United States Patent Application Publication US 2008/0113351 A1 - sequence listing, part 24

SEQ ID NO: 582115 - DNA, 19 bp, Mus musculus
  siRNA target sequence for AA939927 (NM_133857.1,3837-3855).
ccatcatagtaataattca

SEQ ID NO: 582116 - DNA, 19 bp, Mus musculus
  siRNA target sequence for AA939927 (NM_133857.1,3860-3878).
ctcaaactgagcaagtaga

SEQ ID NO: 582117 - DNA, 19 bp, Mus musculus
  siRNA target sequence for AA939927 (NM_133857.1,3870-3888).
gcaagtagagggatccatt

SEQ ID NO: 582118 - DNA, 19 bp, Mus musculus
  siRNA target sequence for AA939927 (NM_133857.1,3871-3889).
caagtagagggatccatta

SEQ ID NO: 582119 - DNA, 19 bp, Mus musculus
  siRNA target sequence for AA939927 (NM_133857.1,3874-3892).
gtagagggatccattacat

SEQ ID NO: 582120 - DNA, 19 bp, Mus musculus
  siRNA target sequence for Afmid (NM_027827.2,86-104).
gctggagaagcaatactca

SEQ ID NO: 582121 - DNA, 19 bp, Mus musculus
  siRNA target sequence for Afmid (NM_027827.2,127-145).
cgaaaccagaggaagttgt

SEQ ID NO: 582122 - DNA, 19 bp, Mus musculus
  siRNA target sequence for Afmid (NM_027827.2,336-354).
gactcggccttcatggtaa

SEQ ID NO: 582123 - DNA, 19 bp, Mus musculus
  siRNA target sequence for Afmid (NM_027827.2,386-404).
gatagtggcttatgacatt

SEQ ID NO: 582124 - DNA, 19 bp, Mus musculus
  siRNA target sequence for Afmid (NM_027827.2,445-463).
cccgcagtgtcgtgtttct

SEQ ID NO: 582125 - DNA, 19 bp, Mus musculus
  siRNA target sequence for Afmid (NM_027827.2,446-464).
ccgcagtgtcgtgtttcta

SEQ ID NO: 582126 - DNA, 19 bp, Mus musculus
  siRNA target sequence for Afmid (NM_027827.2,462-480).
ctacagaggcgctatccaa

SEQ ID NO: 582127 - DNA, 19 bp, Mus musculus
  siRNA target sequence for Afmid (NM_027827.2,467-485).
gaggcgctatccaagcaat

SEQ ID NO: 582128 - DNA, 19 bp, Mus musculus
  siRNA target sequence for Afmid (NM_027827.2,848-866).
gcgtggtgtggatcacttt

SEQ ID NO: 582129 - DNA, 19 bp, Mus musculus
  siRNA target sequence for Afmid (NM_027827.2,867-885).
gacatcatagagaatctga

SEQ ID NO: 582130 - DNA, 19 bp, Mus musculus
  siRNA target sequence for Afmid (NM_027827.2,905-923).
cacccagatcattttgaaa

SEQ ID NO: 582131 - DNA, 19 bp, Mus musculus
  siRNA target sequence for Aqp11 (NM_175105.2,1033-1051).
cttccatggctgcataaca

SEQ ID NO: 582132 - DNA, 19 bp, Mus musculus
  siRNA target sequence for Aqp11 (NM_175105.2,1044-1062).
gcataacaatcaaatgact

SEQ ID NO: 582133 - DNA, 19 bp, Mus musculus
  siRNA target sequence for C030002J06Rik (NM_176988.1,335-353).
gcatctttaaccagtttca

SEQ ID NO: 582134 - DNA, 19 bp, Mus musculus
  siRNA target sequence for C030002J06Rik (NM_176988.1,345-363).
ccagtttcagtgtagtagt

SEQ ID NO: 582135 - DNA, 19 bp, Mus musculus
  siRNA target sequence for C030002J06Rik (NM_176988.1,432-450).
ccagctggggattatggat

SEQ ID NO: 582136 - DNA, 19 bp, Mus musculus
  siRNA target sequence for C030002J06Rik (NM_176988.1,542-560).
gcatatcccaccagaaatt

SEQ ID NO: 582137 - DNA, 19 bp, Mus musculus
  siRNA target sequence for C030002J06Rik (NM_176988.1,543-561).
catatcccaccagaaattt

SEQ ID NO: 582138 - DNA, 19 bp, Mus musculus
  siRNA target sequence for C030002J06Rik (NM_176988.1,548-566).
cccaccagaaatttgcaat

SEQ ID NO: 582139 - DNA, 19 bp, Mus musculus
  siRNA target sequence for C030002J06Rik (NM_176988.1,611-629).
ccgacccgctgccctttat

SEQ ID NO: 582140 - DNA, 19 bp, Mus musculus
  siRNA target sequence for C030002J06Rik (NM_176988.1,663-681).
ctgtaaccaggctatttgt

SEQ ID NO: 582141 - DNA, 19 bp, Mus musculus
  siRNA target sequence for C030002J06Rik (NM_176988.1,665-683).
gtaaccaggctatttgtat

SEQ ID NO: 582142 - DNA, 19 bp, Mus musculus
  siRNA target sequence for C030002J06Rik (NM_176988.1,794-812).
ggatccgccgtgtcttgat

SEQ ID NO: 582143 - DNA, 19 bp, Mus musculus
  siRNA target sequence for C030002J06Rik (NM_176988.1,810-828).
gatgaatgcaccacagatt

SEQ ID NO: 582144 - DNA, 19 bp, Mus musculus
  siRNA target sequence for C030002J06Rik (NM_176988.1,912-930).
gggtgatctgtttttcaga

SEQ ID NO: 582145 - DNA, 19 bp, Mus musculus
  siRNA target sequence for C030002J06Rik (NM_176988.1,951-969).
gcagtctgaactatactta

SEQ ID NO: 582146 - DNA, 19 bp, Mus musculus
  siRNA target sequence for C030002J06Rik (NM_176988.1,954-972).
gtctgaactatacttagta

SEQ ID NO: 582147 - DNA, 19 bp, Mus musculus
  siRNA target sequence for C030002J06Rik (NM_176988.1,983-1001).
gttactatggcaagcatta

SEQ ID NO: 582148 - DNA, 19 bp, Mus musculus
  siRNA target sequence for C030002J06Rik (NM_176988.1,987-1005).
ctatggcaagcattattct

SEQ ID NO: 582149 - DNA, 19 bp, Mus musculus
  siRNA target sequence for C030002J06Rik (NM_176988.1,1026-1044).
gatccgcaaatggatgtat

SEQ ID NO: 582150 - DNA, 19 bp, Mus musculus
  siRNA target sequence for C030002J06Rik (NM_176988.1,1029-1047).
ccgcaaatggatgtatttt

SEQ ID NO: 582151 - DNA, 19 bp, Mus musculus
  siRNA target sequence for C030002J06Rik (NM_176988.1,1092-1110).
ggtcaccaaatgcattaaa

SEQ ID NO: 582152 - DNA, 19 bp, Mus musculus
  siRNA target sequence for C030002J06Rik (NM_176988.1,1103-1121).
gcattaaagggcactatca

SEQ ID NO: 582153 - DNA, 19 bp, Mus musculus
  siRNA target sequence for C030002J06Rik (NM_176988.1,1104-1122).
cattaaagggcactatcaa

SEQ ID NO: 582154 - DNA, 19 bp, Mus musculus
  siRNA target sequence for C030002J06Rik (NM_176988.1,1212-1230).
gacatgctacgatagtgaa

SEQ ID NO: 582155 - DNA, 19 bp, Mus musculus
  siRNA target sequence for C030002J06Rik (NM_176988.1,1256-1274).
ccacccctccatatagtca

SEQ ID NO: 582156 - DNA, 19 bp, Mus musculus
  siRNA target sequence for C030002J06Rik (NM_176988.1,1275-1293).
gatggttgggtctcataca

SEQ ID NO: 582157 - DNA, 19 bp, Mus musculus
  siRNA target sequence for C130086A10 (NM_173746.2,801-819).
ccagtgtacatatatgact

SEQ ID NO: 582158 - DNA, 19 bp, Mus musculus
  siRNA target sequence for C130086A10 (NM_173746.2,824-842).
cagttacaaatcactaaat

SEQ ID NO: 582159 - DNA, 19 bp, Mus musculus
  siRNA target sequence for C130086A10 (NM_173746.2,830-848).
caaatcactaaatctatta

SEQ ID NO: 582160 - DNA, 19 bp, Mus musculus
  siRNA target sequence for C130086A10 (NM_173746.2,888-906).
gcagaagcatactcaaaat

SEQ ID NO: 582161 - DNA, 19 bp, Mus musculus
  siRNA target sequence for C130086A10 (NM_173746.2,936-954).
gccataggaaattgctatt

SEQ ID NO: 582162 - DNA, 19 bp, Mus musculus
  siRNA target sequence for C130086A10 (NM_173746.2,938-956).
cataggaaattgctattta

SEQ ID NO: 582163 - DNA, 19 bp, Mus musculus
  siRNA target sequence for C130086A10 (NM_173746.2,978-996).
cagacatatttcatgtcat

SEQ ID NO: 582164 - DNA, 19 bp, Mus musculus
  siRNA target sequence for C130086A10 (NM_173746.2,992-1010).
gtcattagggagactatct

SEQ ID NO: 582165 - DNA, 19 bp, Mus musculus
  siRNA target sequence for C130086A10 (NM_173746.2,1014-1032).
catacaggcacagtaatct

SEQ ID NO: 582166 - DNA, 19 bp, Mus musculus
  siRNA target sequence for C130086A10 (NM_173746.2,1021-1039).
gcacagtaatctttttctt

SEQ ID NO: 582167 - DNA, 19 bp, Mus musculus
  siRNA target sequence for C330046L10 (NM_198421.1,482-500).
gaccatgcactaaaacact

SEQ ID NO: 582168 - DNA, 19 bp, Mus musculus
  siRNA target sequence for C330046L10 (NM_198421.1,1142-1160).
cagaagttccgggaatgtt

SEQ ID NO: 582169 - DNA, 19 bp, Mus musculus
  siRNA target sequence for C330046L10 (NM_198421.1,1253-1271).
gccgcagagttgtcagtaa

SEQ ID NO: 582170 - DNA, 19 bp, Mus musculus
  siRNA target sequence for C330046L10 (NM_198421.1,1367-1385).
cccagctcaaagcacattt

SEQ ID NO: 582171 - DNA, 19 bp, Mus musculus
  siRNA target sequence for C330046L10 (NM_198421.1,1639-1657).
ggtgaacaccatatttcat

SEQ ID NO: 582172 - DNA, 19 bp, Mus musculus
  siRNA target sequence for C330046L10 (NM_198421.1,1669-1687).
cagtcaggtcacatgtata

SEQ ID NO: 582173 - DNA, 19 bp, Mus musculus
  siRNA target sequence for C330046L10 (NM_198421.1,1678-1696).
cacatgtatatcatgcaat

SEQ ID NO: 582174 - DNA, 19 bp, Mus musculus
  siRNA target sequence for C330046L10 (NM_198421.1,1680-1698).
catgtatatcatgcaatta

SEQ ID NO: 582175 - DNA, 19 bp, Mus musculus
  siRNA target sequence for C330046L10 (NM_198421.1,1689-1707).
catgcaattataaatccaa

SEQ ID NO: 582176 - DNA, 19 bp, Mus musculus
  siRNA target sequence for C330046L10 (NM_198421.1,1725-1743).
gggatctgtccctggaatt

SEQ ID NO: 582177 - DNA, 19 bp, Mus musculus
  siRNA target sequence for C330046L10 (NM_198421.1,1771-1789).
ggggtttgtccctttgaat

SEQ ID NO: 582178 - DNA, 19 bp, Mus musculus
  siRNA target sequence for C330046L10 (NM_198421.1,1811-1829).
gagatgctagccaagttca

SEQ ID NO: 582179 - DNA, 19 bp, Mus musculus
  siRNA target sequence for C330046L10 (NM_198421.1,1842-1860).
ccctggaggggagaatcta

SEQ ID NO: 582180 - DNA, 19 bp, Mus musculus
  siRNA target sequence for C330046L10 (NM_198421.1,1862-1880).
gcttgtgaccagtgtaaca

SEQ ID NO: 582181 - DNA, 19 bp, Mus musculus
  siRNA target sequence for C330046L10 (NM_198421.1,1964-1982).
ctccggctacaccttaaaa

SEQ ID NO: 582182 - DNA, 19 bp, Mus musculus
  siRNA target sequence for C330046L10 (NM_198421.1,1966-1984).
ccggctacaccttaaaaga

SEQ ID NO: 582183 - DNA, 19 bp, Mus musculus
  siRNA target sequence for C330046L10 (NM_198421.1,1967-1985).
cggctacaccttaaaagat

SEQ ID NO: 582184 - DNA, 19 bp, Mus musculus
  siRNA target sequence for C330046L10 (NM_198421.1,1970-1988).
ctacaccttaaaagattca

SEQ ID NO: 582185 - DNA, 19 bp, Mus musculus
  siRNA target sequence for C330046L10 (NM_198421.1,1990-2008).
gtggtctggccgtaaccat

SEQ ID NO: 582186 - DNA, 19 bp, Mus musculus
  siRNA target sequence for C330046L10 (NM_198421.1,2001-2019).
gtaaccatcgtgagaagat

SEQ ID NO: 582187 - DNA, 19 bp, Mus musculus
  siRNA target sequence for C330046L10 (NM_198421.1,2022-2040).
gggtccatgtcatctttga

SEQ ID NO: 582188 - DNA, 19 bp, Mus musculus
  siRNA target sequence for C330046L10 (NM_198421.1,2216-2234).
gactcaaagctggatgtat

SEQ ID NO: 582189 - DNA, 19 bp, Mus musculus
  siRNA target sequence for C330046L10 (NM_198421.1,2240-2258).
gtcgaggaagtgtgcaaaa

SEQ ID NO: 582190 - DNA, 19 bp, Mus musculus
  siRNA target sequence for C330046L10 (NM_198421.1,2264-2282).
gcctacattcttttttaca

SEQ ID NO: 582191 - DNA, 19 bp, Mus musculus
  siRNA target sequence for C330046L10 (NM_198421.1,2359-2377).
cgaacgcagaacatacaca

SEQ ID NO: 582192 - DNA, 19 bp, Mus musculus
  siRNA target sequence for C330046L10 (NM_198421.1,2360-2378).
gaacgcagaacatacacat

SEQ ID NO: 582193 - DNA, 19 bp, Mus musculus
  siRNA target sequence for C630032K07Rik (NM_173754.2,403-421).
ctctggacgcgcgaataca

SEQ ID NO: 582194 - DNA, 19 bp, Mus musculus
  siRNA target sequence for C630032K07Rik (NM_173754.2,584-602).
ccccagaagtgagtaagat

SEQ ID NO: 582195 - DNA, 19 bp, Mus musculus
  siRNA target sequence for C630032K07Rik (NM_173754.2,766-784).
cgccagacgagattcttga

SEQ ID NO: 582196 - DNA, 19 bp, Mus musculus
  siRNA target sequence for C630032K07Rik (NM_173754.2,925-943).
gaactgtatcccaatggat

SEQ ID NO: 582197 - DNA, 19 bp, Mus musculus
  siRNA target sequence for C630032K07Rik (NM_173754.2,940-958).
ggattccagcggtcattct

SEQ ID NO: 582198 - DNA, 19 bp, Mus musculus
  siRNA target sequence for C630032K07Rik (NM_173754.2,991-1009).
ggtgacaatgtgtatgctt

SEQ ID NO: 582199 - DNA, 19 bp, Mus musculus
  siRNA target sequence for C630032K07Rik (NM_173754.2,996-1014).
caatgtgtatgctttccaa

SEQ ID NO: 582200 - DNA, 19 bp, Mus musculus
  siRNA target sequence for C630032K07Rik (NM_173754.2,1226-1244).
cctgggcccagcttcaaca

SEQ ID NO: 582201 - DNA, 19 bp, Mus musculus
  siRNA target sequence for C630032K07Rik (NM_173754.2,1232-1250).
cccagcttcaacagtgtat

SEQ ID NO: 582202 - DNA, 19 bp, Mus musculus
  siRNA target sequence for C630032K07Rik (NM_173754.2,1237-1255).
cttcaacagtgtattctca

SEQ ID NO: 582203 - DNA, 19 bp, Mus musculus
  siRNA target sequence for C630032K07Rik (NM_173754.2,1341-1359).
ggcctgcagctacttatct

SEQ ID NO: 582204 - DNA, 19 bp, Mus musculus
  siRNA target sequence for C630032K07Rik (NM_173754.2,1562-1580).
gtaccctggacgaatgttt

SEQ ID NO: 582205 - DNA, 19 bp, Mus musculus
  siRNA target sequence for C630032K07Rik (NM_173754.2,1565-1583).
ccctggacgaatgttttca

SEQ ID NO: 582206 - DNA, 19 bp, Mus musculus
  siRNA target sequence for C630032K07Rik (NM_173754.2,1567-1585).
ctggacgaatgttttcagt

SEQ ID NO: 582207 - DNA, 19 bp, Mus musculus
  siRNA target sequence for C630032K07Rik (NM_173754.2,1573-1591).
gaatgttttcagtcctata

SEQ ID NO: 582208 - DNA, 19 bp, Mus musculus
  siRNA target sequence for C630032K07Rik (NM_173754.2,1769-1787).
cactgtctggactcaacat

SEQ ID NO: 582209 - DNA, 19 bp, Mus musculus
  siRNA target sequence for C630032K07Rik (NM_173754.2,2153-2171).
gactcgggagcctcaacaa

SEQ ID NO: 582210 - DNA, 19 bp, Mus musculus
  siRNA target sequence for C630032K07Rik (NM_173754.2,2155-2173).
ctcgggagcctcaacaaca

SEQ ID NO: 582211 - DNA, 19 bp, Mus musculus
  siRNA target sequence for C630032K07Rik (NM_173754.2,2309-2327).
gtgttggtggccgaagtat

SEQ ID NO: 582212 - DNA, 19 bp, Mus musculus
  siRNA target sequence for C630032K07Rik (NM_173754.2,2311-2329).
gttggtggccgaagtatca

SEQ ID NO: 582213 - DNA, 19 bp, Mus musculus
  siRNA target sequence for C630032K07Rik (NM_173754.2,2382-2400).
gcccctgaggtggtcattt

SEQ ID NO: 582214 - DNA, 19 bp, Mus musculus
  siRNA target sequence for C630032K07Rik (NM_173754.2,2429-2447).
ccgttgaactggtggaata

SEQ ID NO: 582215 - DNA, 19 bp, Mus musculus
  siRNA target sequence for C630032K07Rik (NM_173754.2,2553-2571).
cacccttcctgctaaaagt

SEQ ID NO: 582216 - DNA, 19 bp, Mus musculus
  siRNA target sequence for C630032K07Rik (NM_173754.2,2685-2703).
gacacgaacggggaatgta

SEQ ID NO: 582217 - DNA, 19 bp, Mus musculus
  siRNA target sequence for C630032K07Rik (NM_173754.2,2690-2708).
gaacggggaatgtaagtca

SEQ ID NO: 582218 - DNA, 19 bp, Mus musculus
  siRNA target sequence for C630032K07Rik (NM_173754.2,2696-2714).
ggaatgtaagtcaggatat

SEQ ID NO: 582219 - DNA, 19 bp, Mus musculus
  siRNA target sequence for C630032K07Rik (NM_173754.2,2715-2733).
caggctcccaaaaaagttt

SEQ ID NO: 582220 - DNA, 19 bp, Mus musculus
  siRNA target sequence for C630032K07Rik (NM_173754.2,2755-2773).
ccctcagtgggggatgaaa

SEQ ID NO: 582221 - DNA, 19 bp, Mus musculus
  siRNA target sequence for C630032K07Rik (NM_173754.2,2756-2774).
cctcagtgggggatgaaaa

SEQ ID NO: 582222 - DNA, 19 bp, Mus musculus
  siRNA target sequence for C630032K07Rik (NM_173754.2,2864-2882).
gcttgcttagaaactttaa

SEQ ID NO: 582223 - DNA, 19 bp, Mus musculus
  siRNA target sequence for C630032K07Rik (NM_173754.2,2886-2904).
cagtggcccaggtacctta

SEQ ID NO: 582224 - DNA, 19 bp, Mus musculus
  siRNA target sequence for C630032K07Rik (NM_173754.2,3077-3095).
gccctgctgccatgaatga

SEQ ID NO: 582225 - DNA, 19 bp, Mus musculus
  siRNA target sequence for C87436 (NM_146170.2,439-457).
ccgatgtggtacgttcaat

SEQ ID NO: 582226 - DNA, 19 bp, Mus musculus
  siRNA target sequence for C87436 (NM_146170.2,464-482).
cgtgggttgagctgtaaga

SEQ ID NO: 582227 - DNA, 19 bp, Mus musculus
  siRNA target sequence for C87436 (NM_146170.2,465-483).
gtgggttgagctgtaagaa

SEQ ID NO: 582228 - DNA, 19 bp, Mus musculus
  siRNA target sequence for C87436 (NM_146170.2,467-485).
gggttgagctgtaagaaca

SEQ ID NO: 582229 - DNA, 19 bp, Mus musculus
  siRNA target sequence for C87436 (NM_146170.2,487-505).
gacatgtggaaccatattt

SEQ ID NO: 582230 - DNA, 19 bp, Mus musculus
  siRNA target sequence for C87436 (NM_146170.2,517-535).
ccgaaagcagcctagcatt

SEQ ID NO: 582231 - DNA, 19 bp, Mus musculus
  siRNA target sequence for C87436 (NM_146170.2,550-568).
catcaccggctctgatcta

SEQ ID NO: 582232 - DNA, 19 bp, Mus musculus
  siRNA target sequence for C87436 (NM_146170.2,654-672).
ccgtggatggtacaatcat

SEQ ID NO: 582233 - DNA, 19 bp, Mus musculus
  siRNA target sequence for C87436 (NM_146170.2,656-674).
gtggatggtacaatcatca

SEQ ID NO: 582234 - DNA, 19 bp, Mus musculus
  siRNA target sequence for C87436 (NM_146170.2,700-718).
cgtcccctcgtgtttgaaa

SEQ ID NO: 582235 - DNA, 19 bp, Mus musculus
  siRNA target sequence for C87436 (NM_146170.2,892-910).
ggtacagagagtcactaaa

SEQ ID NO: 582236 - DNA, 19 bp, Mus musculus
  siRNA target sequence for C87436 (NM_146170.2,893-911).
gtacagagagtcactaaaa

SEQ ID NO: 582237 - DNA, 19 bp, Mus musculus
  siRNA target sequence for C87436 (NM_146170.2,896-914).
cagagagtcactaaaaaca

SEQ ID NO: 582238 - DNA, 19 bp, Mus musculus
  siRNA target sequence for C87436 (NM_146170.2,1313-1331).
ccgcaagatgcagtaaaca

SEQ ID NO: 582239 - DNA, 19 bp, Mus musculus
  siRNA target sequence for C87436 (NM_146170.2,1364-1382).
gtggttacgtcatcattga

SEQ ID NO: 582240 - DNA, 19 bp, Mus musculus
  siRNA target sequence for C87436 (NM_146170.2,1366-1384).
ggttacgtcatcattgaaa

SEQ ID NO: 582241 - DNA, 19 bp, Mus musculus
  siRNA target sequence for C87436 (NM_146170.2,1367-1385).
gttacgtcatcattgaaaa

SEQ ID NO: 582242 - DNA, 19 bp, Mus musculus
  siRNA target sequence for C87436 (NM_146170.2,1472-1490).
caaaccatgcactatcagt

SEQ ID NO: 582243 - DNA, 19 bp, Mus musculus
  siRNA target sequence for C87436 (NM_146170.2,1476-1494).
ccatgcactatcagtttga

SEQ ID NO: 582244 - DNA, 19 bp, Mus musculus
  siRNA target sequence for C87436 (NM_146170.2,1477-1495).
catgcactatcagtttgat

SEQ ID NO: 582245 - DNA, 19 bp, Mus musculus
  siRNA target sequence for C87436 (NM_146170.2,1520-1538).
cacattcctcagtcctttt

SEQ ID NO: 582246 - DNA, 19 bp, Mus musculus
  siRNA target sequence for C87436 (NM_146170.2,1544-1562).
gccttgcaacagagaatat

SEQ ID NO: 582247 - DNA, 19 bp, Mus musculus
  siRNA target sequence for C87436 (NM_146170.2,1591-1609).
caactccactacagctttt

SEQ ID NO: 582248 - DNA, 19 bp, Mus musculus
  siRNA target sequence for C87436 (NM_146170.2,1594-1612).
ctccactacagcttttgtt

SEQ ID NO: 582249 - DNA, 19 bp, Mus musculus
  siRNA target sequence for C87436 (NM_146170.2,1634-1652).
ggaaccttttccaagtaca

SEQ ID NO: 582250 - DNA, 19 bp, Mus musculus
  siRNA target sequence for C87436 (NM_146170.2,1653-1671).
cctggcatatcaccaatat

SEQ ID NO: 582251 - DNA, 19 bp, Mus musculus
  siRNA target sequence for C87436 (NM_146170.2,1654-1672).
ctggcatatcaccaatatt

SEQ ID NO: 582252 - DNA, 19 bp, Mus musculus
  siRNA target sequence for C87436 (NM_146170.2,1673-1691).
ctgcaagtcaaacaaatct

SEQ ID NO: 582253 - DNA, 19 bp, Mus musculus
  siRNA target sequence for C87436 (NM_146170.2,1675-1693).
gcaagtcaaacaaatctta

SEQ ID NO: 582254 - DNA, 19 bp, Mus musculus
  siRNA target sequence for C87436 (NM_146170.2,1679-1697).
gtcaaacaaatcttagaca

SEQ ID NO: 582255 - DNA, 19 bp, Mus musculus
  siRNA target sequence for C87436 (NM_146170.2,1714-1732).
ggaaatcacacgtagcttt

SEQ ID NO: 582256 - DNA, 19 bp, Mus musculus
  siRNA target sequence for C87436 (NM_146170.2,1715-1733).
gaaatcacacgtagcttta

SEQ ID NO: 582257 - DNA, 19 bp, Mus musculus
  siRNA target sequence for C87436 (NM_146170.2,1748-1766).
ggaacttacgagctgttta

SEQ ID NO: 582258 - DNA, 19 bp, Mus musculus
  siRNA target sequence for C87436 (NM_146170.2,1749-1767).
gaacttacgagctgtttaa

SEQ ID NO: 582259 - DNA, 19 bp, Mus musculus
  siRNA target sequence for C87436 (NM_146170.2,1854-1872).
ccttcctcaaagttggtaa

SEQ ID NO: 582260 - DNA, 19 bp, Mus musculus
  siRNA target sequence for C87436 (NM_146170.2,1858-1876).
cctcaaagttggtaacact

SEQ ID NO: 582261 - DNA, 19 bp, Mus musculus
  siRNA target sequence for C87436 (NM_146170.2,1894-1912).
gccaacgccctttatcatt

SEQ ID NO: 582262 - DNA, 19 bp, Mus musculus
  siRNA target sequence for C87436 (NM_146170.2,1896-1914).
caacgccctttatcattga

SEQ ID NO: 582263 - DNA, 19 bp, Mus musculus
  siRNA target sequence for C87436 (NM_146170.2,1949-1967).
ggtgagcttcgaatcaagt

SEQ ID NO: 582264 - DNA, 19 bp, Mus musculus
  siRNA target sequence for C87436 (NM_146170.2,1950-1968).
gtgagcttcgaatcaagtt

SEQ ID NO: 582265 - DNA, 19 bp, Mus musculus
  siRNA target sequence for C87436 (NM_146170.2,2050-2068).
ccctctgactactatcact

SEQ ID NO: 582266 - DNA, 19 bp, Mus musculus
  siRNA target sequence for C87436 (NM_146170.2,2051-2069).
cctctgactactatcactt

SEQ ID NO: 582267 - DNA, 19 bp, Mus musculus
  siRNA target sequence for Cts3 (NM_026906.2,491-509).
gtgcggacacagattgcat

SEQ ID NO: 582268 - DNA, 19 bp, Mus musculus
  siRNA target sequence for Cts3 (NM_026906.2,495-513).
ggacacagattgcatgtaa

SEQ ID NO: 582269 - DNA, 19 bp, Mus musculus
  siRNA target sequence for Cts3 (NM_026906.2,496-514).
gacacagattgcatgtaat

SEQ ID NO: 582270 - DNA, 19 bp, Mus musculus
  siRNA target sequence for Cts3 (NM_026906.2,500-518).
cagattgcatgtaattctt

SEQ ID NO: 582271 - DNA, 19 bp, Mus musculus
  siRNA target sequence for Cts3 (NM_026906.2,635-653).
gcaggcagtgtgttagatt

SEQ ID NO: 582272 - DNA, 19 bp, Mus musculus
  siRNA target sequence for Cts3 (NM_026906.2,638-656).
ggcagtgtgttagattctt

SEQ ID NO: 582273 - DNA, 19 bp, Mus musculus
  siRNA target sequence for Cts3 (NM_026906.2,895-913).
gccaaactgcaataacagt

SEQ ID NO: 582274 - DNA, 19 bp, Mus musculus
  siRNA target sequence for Cts3 (NM_026906.2,896-914).
ccaaactgcaataacagtt

SEQ ID NO: 582275 - DNA, 19 bp, Mus musculus
  siRNA target sequence for Cts3 (NM_026906.2,897-915).
caaactgcaataacagttt

SEQ ID NO: 582276 - DNA, 19 bp, Mus musculus
  siRNA target sequence for Cts3 (NM_026906.2,901-919).
ctgcaataacagtttattt

SEQ ID NO: 582277 - DNA, 19 bp, Mus musculus
  siRNA target sequence for Cts3 (NM_026906.2,904-922).
caataacagtttatttgct

SEQ ID NO: 582278 - DNA, 19 bp, Mus musculus
  siRNA target sequence for Cts6 (NM_021445.1,122-140).
gcacttgatcccaatttga

SEQ ID NO: 582279 - DNA, 19 bp, Mus musculus
  siRNA target sequence for Cts6 (NM_021445.1,167-185).
cagtatgaaaaatcataca

SEQ ID NO: 582280 - DNA, 19 bp, Mus musculus
  siRNA target sequence for Cts6 (NM_021445.1,317-335).
cctgaagaactcagaaaaa

SEQ ID NO: 582281 - DNA, 19 bp, Mus musculus
  siRNA target sequence for Cts6 (NM_021445.1,388-406).
gcgcgcagttggtgatgtt

SEQ ID NO: 582282 - DNA, 19 bp, Mus musculus
  siRNA target sequence for Cts6 (NM_021445.1,449-467).
cgagtacggagacagaaat

SEQ ID NO: 582283 - DNA, 19 bp, Mus musculus
  siRNA target sequence for Cts6 (NM_021445.1,573-591).
gtactaaaactcaaggaaa

SEQ ID NO: 582284 - DNA, 19 bp, Mus musculus
  siRNA target sequence for Cts6 (NM_021445.1,600-618).
gccaatggggtgatccata

SEQ ID NO: 582285 - DNA, 19 bp, Mus musculus
  siRNA target sequence for Cts6 (NM_021445.1,614-632).
ccatacattgcctatgaat

SEQ ID NO: 582286 - DNA, 19 bp, Mus musculus
  siRNA target sequence for Cts6 (NM_021445.1,615-633).
catacattgcctatgaata

SEQ ID NO: 582287 - DNA, 19 bp, Mus musculus
  siRNA target sequence for Cts6 (NM_021445.1,759-777).
gcgaagatattctaatgga

SEQ ID NO: 582288 - DNA, 19 bp, Mus musculus
  siRNA target sequence for Cts6 (NM_021445.1,760-778).
cgaagatattctaatggaa

SEQ ID NO: 582289 - DNA, 19 bp, Mus musculus
  siRNA target sequence for Cts6 (NM_021445.1,814-832).
ggatgcttcctttaacaga

SEQ ID NO: 582290 - DNA, 19 bp, Mus musculus
  siRNA target sequence for Cts6 (NM_021445.1,876-894).
gcaataatactgtgaatca

SEQ ID NO: 582291 - DNA, 19 bp, Mus musculus
  siRNA target sequence for Cts6 (NM_021445.1,877-895).
caataatactgtgaatcat

SEQ ID NO: 582292 - DNA, 19 bp, Mus musculus
  siRNA target sequence for Cts6 (NM_021445.1,1049-1067).
gcacattatcccattgtat

SEQ ID NO: 582293 - DNA, 19 bp, Mus musculus
  siRNA target sequence for Cts7 (NM_019539.1,132-150).
ctgctccagcacctgatta

SEQ ID NO: 582294 - DNA, 19 bp, Mus musculus
  siRNA target sequence for Cts7 (NM_019539.1,135-153).
ctccagcacctgattacaa

SEQ ID NO: 582295 - DNA, 19 bp, Mus musculus
  siRNA target sequence for Cts7 (NM_019539.1,137-155).
ccagcacctgattacaatt

SEQ ID NO: 582296 - DNA, 19 bp, Mus musculus
  siRNA target sequence for Cts7 (NM_019539.1,183-201).
ggagcaatgacagaacata

SEQ ID NO: 582297 - DNA, 19 bp, Mus musculus
  siRNA target sequence for Cts7 (NM_019539.1,281-299).
ggcctgtggatgaacaact

SEQ ID NO: 582298 - DNA, 19 bp, Mus musculus
  siRNA target sequence for Cts7 (NM_019539.1,292-310).
gaacaacttcaccatagaa

SEQ ID NO: 582299 - DNA, 19 bp, Mus musculus
  siRNA target sequence for Cts7 (NM_019539.1,364-382).
ctcatcttatcctctaaga

SEQ ID NO: 582300 - DNA, 19 bp, Mus musculus
  siRNA target sequence for Cts7 (NM_019539.1,482-500).
ggtgcatgttgggcttttt

SEQ ID NO: 582301 - DNA, 19 bp, Mus musculus
  siRNA target sequence for Cts7 (NM_019539.1,513-531).
gcatagaaggtcaactgtt

SEQ ID NO: 582302 - DNA, 19 bp, Mus musculus
  siRNA target sequence for Cts7 (NM_019539.1,577-595).
ggactgctcagtatcttat

SEQ ID NO: 582303 - DNA, 19 bp, Mus musculus
  siRNA target sequence for Cts7 (NM_019539.1,623-641).
ccttatgatgccttccaat

SEQ ID NO: 582304 - DNA, 19 bp, Mus musculus
  siRNA target sequence for Cts7 (NM_019539.1,715-733).
ccgtcctgaacgttctgtt

SEQ ID NO: 582305 - DNA, 19 bp, Mus musculus
  siRNA target sequence for Cts7 (NM_019539.1,720-738).
ctgaacgttctgttgttaa

SEQ ID NO: 582306 - DNA, 19 bp, Mus musculus
  siRNA target sequence for Cts7 (NM_019539.1,739-757).
ggtcaaccgcttttttgtt

SEQ ID NO: 582307 - DNA, 19 bp, Mus musculus
  siRNA target sequence for Cts7 (NM_019539.1,779-797).
ctactgcaagctctagtaa

SEQ ID NO: 582308 - DNA, 19 bp, Mus musculus
  siRNA target sequence for Cts7 (NM_019539.1,849-867).
catatcggggaggtatata

SEQ ID NO: 582309 - DNA, 19 bp, Mus musculus
  siRNA target sequence for Cts7 (NM_019539.1,901-919).
ccatggtttactattggtt

SEQ ID NO: 582310 - DNA, 19 bp, Mus musculus
  siRNA target sequence for Cts7 (NM_019539.1,973-991).
gaacagccatggtgaaaga

SEQ ID NO: 582311 - DNA, 19 bp, Mus musculus
  siRNA target sequence for Cts7 (NM_019539.1,1020-1038).
ccagaggtcagaacaacta

SEQ ID NO: 582312 - DNA, 19 bp, Mus musculus
  siRNA target sequence for Cts8 (NM_019541.1,382-400).
ccagtcccaaattttagga

SEQ ID NO: 582313 - DNA, 19 bp, Mus musculus
  siRNA target sequence for Cts8 (NM_019541.1,383-401).
cagtcccaaattttaggaa

SEQ ID NO: 582314 - DNA, 19 bp, Mus musculus
  siRNA target sequence for Cts8 (NM_019541.1,486-504).
gaatcagggcacgtgtaat

SEQ ID NO: 582315 - DNA, 19 bp, Mus musculus
  siRNA target sequence for Cts8 (NM_019541.1,571-589).
gtcccactgagcacacaaa

SEQ ID NO: 582316 - DNA, 19 bp, Mus musculus
  siRNA target sequence for Cts8 (NM_019541.1,573-591).
cccactgagcacacaaaat

SEQ ID NO: 582317 - DNA, 19 bp, Mus musculus
  siRNA target sequence for Cts8 (NM_019541.1,616-634).
gggaatttcggctgtttta

SEQ ID NO: 582318 - DNA, 19 bp, Mus musculus
  siRNA target sequence for Cts8 (NM_019541.1,617-635).
ggaatttcggctgttttaa

SEQ ID NO: 582319 - DNA, 19 bp, Mus musculus
  siRNA target sequence for Cts8 (NM_019541.1,745-763).
cgttctgctgctagaatca

SEQ ID NO: 582320 - DNA, 19 bp, Mus musculus
  siRNA target sequence for Cts8 (NM_019541.1,754-772).
gctagaatcactagctttt

SEQ ID NO: 582321 - DNA, 19 bp, Mus musculus
  siRNA target sequence for Cts8 (NM_019541.1,758-776).
gaatcactagcttttcgtt

SEQ ID NO: 582322 - DNA, 19 bp, Mus musculus
  siRNA target sequence for Cts8 (NM_019541.1,762-780).
cactagcttttcgtttgtt

SEQ ID NO: 582323 - DNA, 19 bp, Mus musculus
  siRNA target sequence for Cts8 (NM_019541.1,838-856).
ggaattgatgctagacata

SEQ ID NO: 582324 - DNA, 19 bp, Mus musculus
  siRNA target sequence for Cts8 (NM_019541.1,839-857).
gaattgatgctagacataa

SEQ ID NO: 582325 - DNA, 19 bp, Mus musculus
  siRNA target sequence for Cts8 (NM_019541.1,844-862).
gatgctagacataaatctt

SEQ ID NO: 582326 - DNA, 19 bp, Mus musculus
  siRNA target sequence for Cts8 (NM_019541.1,866-884).
ggttgtatagggaaggtat

SEQ ID NO: 582327 - DNA, 19 bp, Mus musculus
  siRNA target sequence for Cts8 (NM_019541.1,963-981).
gtcagatggcaacaaatat

SEQ ID NO: 582328 - DNA, 19 bp, Mus musculus
  siRNA target sequence for Ctsc (NM_009982.2,192-210).
ccaggtgggccctagaagt

SEQ ID NO: 582329 - DNA, 19 bp, Mus musculus
  siRNA target sequence for Ctsc (NM_009982.2,209-227).
gttcccgaagcgacattaa

SEQ ID NO: 582330 - DNA, 19 bp, Mus musculus
  siRNA target sequence for Ctsc (NM_009982.2,303-321).
gggcaattccgggcatttt

SEQ ID NO: 582331 - DNA, 19 bp, Mus musculus
  siRNA target sequence for Ctsc (NM_009982.2,304-322).
ggcaattccgggcatttta

SEQ ID NO: 582332 - DNA, 19 bp, Mus musculus
  siRNA target sequence for Ctsc (NM_009982.2,313-331).
gggcattttaccctcattt

SEQ ID NO: 582333 - DNA, 19 bp, Mus musculus
  siRNA target sequence for Ctsc (NM_009982.2,314-332).
ggcattttaccctcattta

SEQ ID NO: 582334 - DNA, 19 bp, Mus musculus
  siRNA target sequence for Ctsc (NM_009982.2,352-370).
gtgttgaatgactacaaat

SEQ ID NO: 582335 - DNA, 19 bp, Mus musculus
  siRNA target sequence for Ctsc (NM_009982.2,357-375).
gaatgactacaaatggttt

SEQ ID NO: 582336 - DNA, 19 bp, Mus musculus
  siRNA target sequence for Ctsc (NM_009982.2,371-389).
ggtttgcgtttttcaagta

SEQ ID NO: 582337 - DNA, 19 bp, Mus musculus
  siRNA target sequence for Ctsc (NM_009982.2,372-390).
gtttgcgtttttcaagtat

SEQ ID NO: 582338 - DNA, 19 bp, Mus musculus
  siRNA target sequence for Ctsc (NM_009982.2,377-395).
cgtttttcaagtatgaagt

SEQ ID NO: 582339 - DNA, 19 bp, Mus musculus
  siRNA target sequence for Ctsc (NM_009982.2,485-503).
gcaagaaggtggaaagtca

SEQ ID NO: 582340 - DNA, 19 bp, Mus musculus
  siRNA target sequence for Ctsc (NM_009982.2,500-518).
gtcacattgagaaggttaa

SEQ ID NO: 582341 - DNA, 19 bp, Mus musculus
  siRNA target sequence for Ctsc (NM_009982.2,502-520).
cacattgagaaggttaata

SEQ ID NO: 582342 - DNA, 19 bp, Mus musculus
  siRNA target sequence for Ctsc (NM_009982.2,661-679).
ctgcgagatctgataagga

SEQ ID NO: 582343 - DNA, 19 bp, Mus musculus
  siRNA target sequence for Ctsc (NM_009982.2,683-701).
gtggccacagccaaaggat

SEQ ID NO: 582344 - DNA, 19 bp, Mus musculus
  siRNA target sequence for Ctsc (NM_009982.2,718-736).
gccccgatgactgatgaaa

SEQ ID NO: 582345 - DNA, 19 bp, Mus musculus
  siRNA target sequence for Ctsc (NM_009982.2,720-738).
cccgatgactgatgaaata

SEQ ID NO: 582346 - DNA, 19 bp, Mus musculus
  siRNA target sequence for Ctsc (NM_009982.2,783-801).
cgtccaaggcgtcaattat

SEQ ID NO: 582347 - DNA, 19 bp, Mus musculus
  siRNA target sequence for Ctsc (NM_009982.2,786-804).
ccaaggcgtcaattatgtt

SEQ ID NO: 582348 - DNA, 19 bp, Mus musculus
  siRNA target sequence for Ctsc (NM_009982.2,787-805).
caaggcgtcaattatgtta

SEQ ID NO: 582349 - DNA, 19 bp, Mus musculus
  siRNA target sequence for Ctsc (NM_009982.2,808-826).
cctgttcgaaaccaagaat

SEQ ID NO: 582350 - DNA, 19 bp, Mus musculus
  siRNA target sequence for Ctsc (NM_009982.2,830-848).
gtggaagctgctactcatt

SEQ ID NO: 582351 - DNA, 19 bp, Mus musculus
  siRNA target sequence for Ctsc (NM_009982.2,860-878).
gtatgctagaagcaagaat

SEQ ID NO: 582352 - DNA, 19 bp, Mus musculus
  siRNA target sequence for Ctsc (NM_009982.2,864-882).
gctagaagcaagaattcgt

SEQ ID NO: 582353 - DNA, 19 bp, Mus musculus
  siRNA target sequence for Ctsc (NM_009982.2,871-889).
gcaagaattcgtatattaa

SEQ ID NO: 582354 - DNA, 19 bp, Mus musculus
  siRNA target sequence for Ctsc (NM_009982.2,875-893).
gaattcgtatattaaccaa

SEQ ID NO: 582355 - DNA, 19 bp, Mus musculus
  siRNA target sequence for Ctsc (NM_009982.2,988-1006).
gggaagtatgcccaagatt

SEQ ID NO: 582356 - DNA, 19 bp, Mus musculus
  siRNA target sequence for Ctsc (NM_009982.2,989-1007).
ggaagtatgcccaagattt

SEQ ID NO: 582357 - DNA, 19 bp, Mus musculus
  siRNA target sequence for Ctsc (NM_009982.2,1048-1066).
gattctccatgcaaaccaa

SEQ ID NO: 582358 - DNA, 19 bp, Mus musculus
  siRNA target sequence for Ctsc (NM_009982.2,1130-1148).
gcaatgaagccctgatgaa

SEQ ID NO: 582359 - DNA, 19 bp, Mus musculus
  siRNA target sequence for Ctsc (NM_009982.2,1212-1230).
ctaccacagtggaatctat

SEQ ID NO: 582360 - DNA, 19 bp, Mus musculus
  siRNA target sequence for Ctsc (NM_009982.2,1241-1259).
ggctgagtgaccctttcaa

SEQ ID NO: 582361 - DNA, 19 bp, Mus musculus
  siRNA target sequence for Ctsc (NM_009982.2,1260-1278).
ccccttcgagctgacaaat

SEQ ID NO: 582362 - DNA, 19 bp, Mus musculus
  siRNA target sequence for Ctsc (NM_009982.2,1262-1280).
ccttcgagctgacaaatca

SEQ ID NO: 582363 - DNA, 19 bp, Mus musculus
  siRNA target sequence for Ctsc (NM_009982.2,1321-1339).
gggatagaatactggatta

SEQ ID NO: 582364 - DNA, 19 bp, Mus musculus
  siRNA target sequence for Ctsc (NM_009982.2,1400-1418).
ctgatgaatgtgcaattga

SEQ ID NO: 582365 - DNA, 19 bp, Mus musculus
  siRNA target sequence for Ctsc (NM_009982.2,1402-1420).
gatgaatgtgcaattgaga

SEQ ID NO: 582366 - DNA, 19 bp, Mus musculus
  siRNA target sequence for Ctsc (NM_009982.2,1434-1452).
ggccataccgattcctaaa

SEQ ID NO: 582367 - DNA, 19 bp, Mus musculus
  siRNA target sequence for Ctsc (NM_009982.2,1435-1453).
gccataccgattcctaaat

SEQ ID NO: 582368 - DNA, 19 bp, Mus musculus
  siRNA target sequence for Ctsc (NM_009982.2,1436-1454).
ccataccgattcctaaatt

SEQ ID NO: 582369 - DNA, 19 bp, Mus musculus
  siRNA target sequence for Ctsf (NM_019861.1,280-298).
cgcgctggacatgtacaat

SEQ ID NO: 582370 - DNA, 19 bp, Mus musculus
  siRNA target sequence for Ctsf (NM_019861.1,400-418).
ggagccaccttgcaatgat

SEQ ID NO: 582371 - DNA, 19 bp, Mus musculus
  siRNA target sequence for Ctsf (NM_019861.1,535-553).
ggtcacagagtttagaaat

SEQ ID NO: 582372 - DNA, 19 bp, Mus musculus
  siRNA target sequence for Ctsf (NM_019861.1,556-574).
gactttcagctcattcctt

SEQ ID NO: 582373 - DNA, 19 bp, Mus musculus
  siRNA target sequence for Ctsf (NM_019861.1,638-656).
gacttcatgaccacctata

SEQ ID NO: 582374 - DNA, 19 bp, Mus musculus
  siRNA target sequence for Ctsf (NM_019861.1,649-667).
cacctataaccggacttat

SEQ ID NO: 582375 - DNA, 19 bp, Mus musculus
  siRNA target sequence for Ctsf (NM_019861.1,651-669).
cctataaccggacttatga

SEQ ID NO: 582376 - DNA, 19 bp, Mus musculus
  siRNA target sequence for Ctsf (NM_019861.1,652-670).
ctataaccggacttatgaa

SEQ ID NO: 582377 - DNA, 19 bp, Mus musculus
  siRNA target sequence for Ctsf (NM_019861.1,692-710).
cgattgactgtctttgcaa

SEQ ID NO: 582378 - DNA, 19 bp, Mus musculus
  siRNA target sequence for Ctsf (NM_019861.1,718-736).
gatacgagcacagaagatt

SEQ ID NO: 582379 - DNA, 19 bp, Mus musculus
  siRNA target sequence for Ctsf (NM_019861.1,865-883).
caagtccataaatgatctt

SEQ ID NO: 582380 - DNA, 19 bp, Mus musculus
  siRNA target sequence for Ctsf (NM_019861.1,1160-1178).
gttcagacctgcaacttct

SEQ ID NO: 582381 - DNA, 19 bp, Mus musculus
  siRNA target sequence for Ctsf (NM_019861.1,1181-1199).
gcacagatggcaaaagtct

SEQ ID NO: 582382 - DNA, 19 bp, Mus musculus
  siRNA target sequence for Ctsf (NM_019861.1,1189-1207).
ggcaaaagtctacatcaat

SEQ ID NO: 582383 - DNA, 19 bp, Mus musculus
  siRNA target sequence for Ctsf (NM_019861.1,1217-1235).
gagctgagccggaatgaaa

SEQ ID NO: 582384 - DNA, 19 bp, Mus musculus
  siRNA target sequence for Ctsf (NM_019861.1,1220-1238).
ctgagccggaatgaaaata

SEQ ID NO: 582385 - DNA, 19 bp, Mus musculus
  siRNA target sequence for Ctsf (NM_019861.1,1224-1242).
gccggaatgaaaataagat

SEQ ID NO: 582386 - DNA, 19 bp, Mus musculus
  siRNA target sequence for Ctsf (NM_019861.1,1290-1308).
ccttcggcatgcagttcta

SEQ ID NO: 582387 - DNA, 19 bp, Mus musculus
  siRNA target sequence for Ctsf (NM_019861.1,1291-1309).
cttcggcatgcagttctat

SEQ ID NO: 582388 - DNA, 19 bp, Mus musculus
  siRNA target sequence for Ctsf (NM_019861.1,1406-1424).
ccttactgggccatcaaga

SEQ ID NO: 582389 - DNA, 19 bp, Mus musculus
  siRNA target sequence for Ctsf (NM_019861.1,1407-1425).
cttactgggccatcaagaa

SEQ ID NO: 582390 - DNA, 19 bp, Mus musculus
  siRNA target sequence for Ctsf (NM_019861.1,1443-1461).
ggggtgaggagggttacta

SEQ ID NO: 582391 - DNA, 19 bp, Mus musculus
  siRNA target sequence for Ctsf (NM_019861.1,1445-1463).
ggtgaggagggttactact

SEQ ID NO: 582392 - DNA, 19 bp, Mus musculus
  siRNA target sequence for Ctsf (NM_019861.1,1451-1469).
gagggttactactacttgt

SEQ ID NO: 582393 - DNA, 19 bp, Mus musculus
  siRNA target sequence for Ctsf (NM_019861.1,1481-1499).
ggagcctgtggtgtgaata

SEQ ID NO: 582394 - DNA, 19 bp, Mus musculus
  siRNA target sequence for Ctsj (NM_012007.1,88-106).
cctactgtccttctgttaa

SEQ ID NO: 582395 - DNA, 19 bp, Mus musculus
  siRNA target sequence for Ctsj (NM_012007.1,89-107).
ctactgtccttctgttaat

SEQ ID NO: 582396 - DNA, 19 bp, Mus musculus
  siRNA target sequence for Ctsj (NM_012007.1,327-345).
gaccagtgaagaattcaga

SEQ ID NO: 582397 - DNA, 19 bp, Mus musculus
  siRNA target sequence for Ctsj (NM_012007.1,344-362).
gaaaatcaatagacaatat

SEQ ID NO: 582398 - DNA, 19 bp, Mus musculus
  siRNA target sequence for Ctsj (NM_012007.1,350-368).
caatagacaatattccaat

SEQ ID NO: 582399 - DNA, 19 bp, Mus musculus
  siRNA target sequence for Ctsj (NM_012007.1,395-413).
cccagaaccatgtatctat

SEQ ID NO: 582400 - DNA, 19 bp, Mus musculus
  siRNA target sequence for Ctsj (NM_012007.1,396-414).
ccagaaccatgtatctatt

SEQ ID NO: 582401 - DNA, 19 bp, Mus musculus
  siRNA target sequence for Ctsj (NM_012007.1,416-434).
gtttacccgattataagga

SEQ ID NO: 582402 - DNA, 19 bp, Mus musculus
  siRNA target sequence for Ctsj (NM_012007.1,463-481).
gtacggaatcagggtaaat

SEQ ID NO: 582403 - DNA, 19 bp, Mus musculus
  siRNA target sequence for Ctsj (NM_012007.1,475-493).
ggtaaatgtggctcttgtt

SEQ ID NO: 582404 - DNA, 19 bp, Mus musculus
  siRNA target sequence for Ctsj (NM_012007.1,579-597).
ggactgttctaaaactgta

SEQ ID NO: 582405 - DNA, 19 bp, Mus musculus
  siRNA target sequence for Ctsj (NM_012007.1,620-638).
gtactgcacaccaagcatt

SEQ ID NO: 582406 - DNA, 19 bp, Mus musculus
  siRNA target sequence for Ctsj (NM_012007.1,630-648).
ccaagcattcgagtatgtt

SEQ ID NO: 582407 - DNA, 19 bp, Mus musculus
  siRNA target sequence for Ctsj (NM_012007.1,631-649).
caagcattcgagtatgttt

SEQ ID NO: 582408 - DNA, 19 bp, Mus musculus
  siRNA target sequence for Ctsj (NM_012007.1,634-652).
gcattcgagtatgttttga

SEQ ID NO: 582409 - DNA, 19 bp, Mus musculus
  siRNA target sequence for Ctsj (NM_012007.1,635-653).
cattcgagtatgttttgaa

SEQ ID NO: 582410 - DNA, 19 bp, Mus musculus
  siRNA target sequence for Ctsj (NM_012007.1,724-742).
gagaacgctagtgctaata

SEQ ID NO: 582411 - DNA, 19 bp, Mus musculus
  siRNA target sequence for Ctsj (NM_012007.1,729-747).
cgctagtgctaatatcaca

SEQ ID NO: 582412 - DNA, 19 bp, Mus musculus
  siRNA target sequence for Ctsj (NM_012007.1,764-782).
caccgaatgagctttacct

SEQ ID NO: 582413 - DNA, 19 bp, Mus musculus
  siRNA target sequence for Ctsj (NM_012007.1,766-784).
ccgaatgagctttacctat

SEQ ID NO: 582414 - DNA, 19 bp, Mus musculus
  siRNA target sequence for Ctsj (NM_012007.1,785-803).
gggttgctgtagcatctat

SEQ ID NO: 582415 - DNA, 19 bp, Mus musculus
  siRNA target sequence for Ctsm (NM_022326.2,89-107).
cttgggaatggctttacca

SEQ ID NO: 582416 - DNA, 19 bp, Mus musculus
  siRNA target sequence for Ctsm (NM_022326.2,577-595).
gcaactggggctgttattt

SEQ ID NO: 582417 - DNA, 19 bp, Mus musculus
  siRNA target sequence for Ctsm (NM_022326.2,598-616).
gcaatacataccttgcatt

SEQ ID NO: 582418 - DNA, 19 bp, Mus musculus
  siRNA target sequence for Ctsm (NM_022326.2,609-627).
cttgcattgcactatgtga

SEQ ID NO: 582419 - DNA, 19 bp, Mus musculus
  siRNA target sequence for Ctsm (NM_022326.2,764-782).
gaatgctgtggcaagtata

SEQ ID NO: 582420 - DNA, 19 bp, Mus musculus
  siRNA target sequence for Ctsm (NM_022326.2,869-887).
ctctgttgtcacacattct

SEQ ID NO: 582421 - DNA, 19 bp, Mus musculus
  siRNA target sequence for Ctso (NM_177662.1,170-188).
catagacaccgatacttga

SEQ ID NO: 582422 - DNA, 19 bp, Mus musculus
  siRNA target sequence for Ctso (NM_177662.1,176-194).
caccgatacttgaactctt

SEQ ID NO: 582423 - DNA, 19 bp, Mus musculus
  siRNA target sequence for Ctso (NM_177662.1,178-196).
ccgatacttgaactctttt

SEQ ID NO: 582424 - DNA, 19 bp, Mus musculus
  siRNA target sequence for Ctso (NM_177662.1,213-231).
ctgccttctatggagtaaa

SEQ ID NO: 582425 - DNA, 19 bp, Mus musculus
  siRNA target sequence for Ctso (NM_177662.1,220-238).
ctatggagtaaatcagttt

SEQ ID NO: 582426 - DNA, 19 bp, Mus musculus
  siRNA target sequence for Ctso (NM_177662.1,225-243).
gagtaaatcagttttctta

SEQ ID NO: 582427 - DNA, 19 bp, Mus musculus
  siRNA target sequence for Ctso (NM_177662.1,251-269).
cctgaagagtttaaagctt

SEQ ID NO: 582428 - DNA, 19 bp, Mus musculus
  siRNA target sequence for Ctso (NM_177662.1,271-289).
gtatttaggcagcaaatat

SEQ ID NO: 582429 - DNA, 19 bp, Mus musculus
  siRNA target sequence for Ctso (NM_177662.1,363-381).
ggagggacaagcatgttgt

SEQ ID NO: 582430 - DNA, 19 bp, Mus musculus
  siRNA target sequence for Ctso (NM_177662.1,448-466).
gtcagctcgtgcaatccaa

SEQ ID NO: 582431 - DNA, 19 bp, Mus musculus
  siRNA target sequence for Ctso (NM_177662.1,468-486).
ggaaatctctggattacct

SEQ ID NO: 582432 - DNA, 19 bp, Mus musculus
  siRNA target sequence for Ctso (NM_177662.1,502-520).
catcgactgctcctttaat

SEQ ID NO: 582433 - DNA, 19 bp, Mus musculus
  siRNA target sequence for Ctso (NM_177662.1,505-523).
cgactgctcctttaataat

SEQ ID NO: 582434 - DNA, 19 bp, Mus musculus
  siRNA target sequence for Ctso (NM_177662.1,555-573).
ccttgcgctggctaaatga

SEQ ID NO: 582435 - DNA, 19 bp, Mus musculus
  siRNA target sequence for Ctso (NM_177662.1,651-669).
cacaagctggagtttcagt

SEQ ID NO: 582436 - DNA, 19 bp, Mus musculus
  siRNA target sequence for Ctso (NM_177662.1,659-677).
ggagtttcagtcaaggatt

SEQ ID NO: 582437 - DNA, 19 bp, Mus musculus
  siRNA target sequence for Ctso (NM_177662.1,736-754).
cggccctttggttgtgata

SEQ ID NO: 582438 - DNA, 19 bp, Mus musculus
  siRNA target sequence for Ctso (NM_177662.1,822-840).
ccaaccatgccgttctcat

SEQ ID NO: 582439 - DNA, 19 bp, Mus musculus
  siRNA target sequence for Ctso (NM_177662.1,860-878).
ggaaatacaccatattgga

SEQ ID NO: 582440 - DNA, 19 bp, Mus musculus
  siRNA target sequence for Ctso (NM_177662.1,861-879).
gaaatacaccatattggat

SEQ ID NO: 582441 - DNA, 19 bp, Mus musculus
  siRNA target sequence for Ctso (NM_177662.1,964-982).
ctctgtagctgctgtcttt

SEQ ID NO: 582442 - DNA, 19 bp, Mus musculus
  siRNA target sequence for Ctsq (NM_029636.2,86-104).
gtcaggtgtttcagcattt

SEQ ID NO: 582443 - DNA, 19 bp, Mus musculus
  siRNA target sequence for Ctsq (NM_029636.2,163-181).
gtccggaggaagaagtact

SEQ ID NO: 582444 - DNA, 19 bp, Mus musculus
  siRNA target sequence for Ctsq (NM_029636.2,256-274).
cctacaccatgggattaaa

SEQ ID NO: 582445 - DNA, 19 bp, Mus musculus
  siRNA target sequence for Ctsq (NM_029636.2,305-323).
catgaacattgtaattggt

SEQ ID NO: 582446 - DNA, 19 bp, Mus musculus
  siRNA target sequence for Ctsq (NM_029636.2,325-343).
ctacattgccagttgacaa

SEQ ID NO: 582447 - DNA, 19 bp, Mus musculus
  siRNA target sequence for Ctsq (NM_029636.2,372-390).
cttggtagtccttttccta

SEQ ID NO: 582448 - DNA, 19 bp, Mus musculus
  siRNA target sequence for Ctsq (NM_029636.2,375-393).
ggtagtccttttcctaaat

SEQ ID NO: 582449 - DNA, 19 bp, Mus musculus
  siRNA target sequence for Ctsq (NM_029636.2,387-405).
cctaaatcttggtattgga

SEQ ID NO: 582450 - DNA, 19 bp, Mus musculus
  siRNA target sequence for Ctsq (NM_029636.2,388-406).
ctaaatcttggtattggaa

SEQ ID NO: 582451 - DNA, 19 bp, Mus musculus
  siRNA target sequence for Ctsq (NM_029636.2,397-415).
ggtattggaaagatgcttt

SEQ ID NO: 582452 - DNA, 19 bp, Mus musculus
  siRNA target sequence for Ctsq (NM_029636.2,464-482).
gaatcagagaaattgtaat

SEQ ID NO: 582453 - DNA, 19 bp, Mus musculus
  siRNA target sequence for Ctsq (NM_029636.2,605-623).
ctgtcgttggggtaataca

SEQ ID NO: 582454 - DNA, 19 bp, Mus musculus
  siRNA target sequence for Ctsq (NM_029636.2,607-625).
gtcgttggggtaatacata

SEQ ID NO: 582455 - DNA, 19 bp, Mus musculus
  siRNA target sequence for Ctsq (NM_029636.2,609-627).
cgttggggtaatacataca

SEQ ID NO: 582456 - DNA, 19 bp, Mus musculus
  siRNA target sequence for Ctsq (NM_029636.2,610-628).
gttggggtaatacatacaa

SEQ ID NO: 582457 - DNA, 19 bp, Mus musculus
  siRNA target sequence for Ctsq (NM_029636.2,615-633).
ggtaatacatacaatggat

SEQ ID NO: 582458 - DNA, 19 bp, Mus musculus
  siRNA target sequence for Ctsq (NM_029636.2,616-634).
gtaatacatacaatggatt

SEQ ID NO: 582459 - DNA, 19 bp, Mus musculus
  siRNA target sequence for Ctsq (NM_029636.2,631-649).
gattccagtacgttttgca

SEQ ID NO: 582460 - DNA, 19 bp, Mus musculus
  siRNA target sequence for Ctsq (NM_029636.2,752-770).
ggtcctcccagaaagtgaa

SEQ ID NO: 582461 - DNA, 19 bp, Mus musculus
  siRNA target sequence for Ctsq (NM_029636.2,803-821).
ccccattgctactggaatt

SEQ ID NO: 582462 - DNA, 19 bp, Mus musculus
  siRNA target sequence for Ctsq (NM_029636.2,825-843).
gttgtctccagtagtttta

SEQ ID NO: 582463 - DNA, 19 bp, Mus musculus
  siRNA target sequence for Ctsq (NM_029636.2,835-853).
gtagttttaggttctatga

SEQ ID NO: 582464 - DNA, 19 bp, Mus musculus
  siRNA target sequence for Ctsq (NM_029636.2,988-1006).
ggggattgagtggatatat

SEQ ID NO: 582465 - DNA, 19 bp, Mus musculus
  siRNA target sequence for Ctsq (NM_029636.2,995-1013).
gagtggatatatgatgatt

SEQ ID NO: 582466 - DNA, 19 bp, Mus musculus
  siRNA target sequence for Ctsr (NM_020284.1,121-139).
gttccagtacttgattcaa

SEQ ID NO: 582467 - DNA, 19 bp, Mus musculus
  siRNA target sequence for Ctsr (NM_020284.1,124-142).
ccagtacttgattcaagtt

SEQ ID NO: 582468 - DNA, 19 bp, Mus musculus
  siRNA target sequence for Ctsr (NM_020284.1,168-186).
gataaagtataacaaatca

SEQ ID NO: 582469 - DNA, 19 bp, Mus musculus
  siRNA target sequence for Ctsr (NM_020284.1,427-445).
gattggcgaaagaaaggat

SEQ ID NO: 582470 - DNA, 19 bp, Mus musculus
  siRNA target sequence for Ctsr (NM_020284.1,570-588).
ggtggactgttctaaacct

SEQ ID NO: 582471 - DNA, 19 bp, Mus musculus
  siRNA target sequence for Ctsr (NM_020284.1,759-777).
ccaaagtgaggatatccta

SEQ ID NO: 582472 - DNA, 19 bp, Mus musculus
  siRNA target sequence for Ctsr (NM_020284.1,760-778).
caaagtgaggatatcctaa

SEQ ID NO: 582473 - DNA, 19 bp, Mus musculus
  siRNA target sequence for Ctsr (NM_020284.1,832-850).
gagtctttcaagaactata

SEQ ID NO: 582474 - DNA, 19 bp, Mus musculus
  siRNA target sequence for Ctsr (NM_020284.1,843-861).
gaactataagggaggtatt

SEQ ID NO: 582475 - DNA, 19 bp, Mus musculus
  siRNA target sequence for Ctsr (NM_020284.1,902-920).
gagtcctcgtggttggtta

SEQ ID NO: 582476 - DNA, 19 bp, Mus musculus
  siRNA target sequence for Ctsr (NM_020284.1,910-928).
gtggttggttacggattta

SEQ ID NO: 582477 - DNA, 19 bp, Mus musculus
  siRNA target sequence for Ctsr (NM_020284.1,932-950).
gaattgagaccgatggtaa

SEQ ID NO: 582478 - DNA, 19 bp, Mus musculus
  siRNA target sequence for Ctsr (NM_020284.1,937-955).
gagaccgatggtaatcact

SEQ ID NO: 582479 - DNA, 19 bp, Mus musculus
  siRNA target sequence for Ctsr (NM_020284.1,1054-1072).
gctcactaccctactattt

SEQ ID NO: 582480 - DNA, 19 bp, Mus musculus
  siRNA target sequence for Ctsw (NM_009985.2,152-170).
cggttcaaccggagttact

SEQ ID NO: 582481 - DNA, 19 bp, Mus musculus
  siRNA target sequence for Ctsw (NM_009985.2,250-268).
cttgggtacagctgagttt

SEQ ID NO: 582482 - DNA, 19 bp, Mus musculus
  siRNA target sequence for Ctsw (NM_009985.2,338-356).
gaaaggacccccaacatga

SEQ ID NO: 582483 - DNA, 19 bp, Mus musculus
  siRNA target sequence for Ctsw (NM_009985.2,357-375).
ccaaaaaggtagagtctaa

SEQ ID NO: 582484 - DNA, 19 bp, Mus musculus
  siRNA target sequence for Ctsw (NM_009985.2,411-429).
ggcgtaaagcaaagaacat

SEQ ID NO: 582485 - DNA, 19 bp, Mus musculus
  siRNA target sequence for Ctsw (NM_009985.2,562-580).
cgaacgctgtggaaatggt

SEQ ID NO: 582486 - DNA, 19 bp, Mus musculus
  siRNA target sequence for Ctsw (NM_009985.2,595-613).
cgtgtgggacgcatatcta

SEQ ID NO: 582487 - DNA, 19 bp, Mus musculus
  siRNA target sequence for Ctsw (NM_009985.2,596-614).
gtgtgggacgcatatctaa

SEQ ID NO: 582488 - DNA, 19 bp, Mus musculus
  siRNA target sequence for Ctsw (NM_009985.2,598-616).
gtgggacgcatatctaact

SEQ ID NO: 582489 - DNA, 19 bp, Mus musculus
  siRNA target sequence for Ctsw (NM_009985.2,600-618).
gggacgcatatctaactgt

SEQ ID NO: 582490 - DNA, 19 bp, Mus musculus
  siRNA target sequence for Ctsw (NM_009985.2,630-648).
gtggcctggccagtgaaaa

SEQ ID NO: 582491 - DNA, 19 bp, Mus musculus
  siRNA target sequence for Ctsw (NM_009985.2,637-655).
ggccagtgaaaaggattat

SEQ ID NO: 582492 - DNA, 19 bp, Mus musculus
  siRNA target sequence for Ctsw (NM_009985.2,684-702).
gatgcctagccaagaagta

SEQ ID NO: 582493 - DNA, 19 bp, Mus musculus
  siRNA target sequence for Ctsw (NM_009985.2,792-810).
ccgtgaccatcaacatgaa

SEQ ID NO: 582494 - DNA, 19 bp, Mus musculus
  siRNA target sequence for Ctsw (NM_009985.2,793-811).
cgtgaccatcaacatgaaa

SEQ ID NO: 582495 - DNA, 19 bp, Mus musculus
  siRNA target sequence for Ctsw (NM_009985.2,798-816).
ccatcaacatgaaactact

SEQ ID NO: 582496 - DNA, 19 bp, Mus musculus
  siRNA target sequence for Ctsw (NM_009985.2,943-961).
gtcccattctcgaaaacgt

SEQ ID NO: 582497 - DNA, 19 bp, Mus musculus
  siRNA target sequence for Ctsw (NM_009985.2,975-993).
catactggatcctgaagaa

SEQ ID NO: 582498 - DNA, 19 bp, Mus musculus
  siRNA target sequence for Ctsw (NM_009985.2,1011-1029).
ggggcgagaagggttactt

SEQ ID NO: 582499 - DNA, 19 bp, Mus musculus
  siRNA target sequence for Ctsw (NM_009985.2,1013-1031).
ggcgagaagggttacttca

SEQ ID NO: 582500 - DNA, 19 bp, Mus musculus
  siRNA target sequence for Ctsw (NM_009985.2,1032-1050).
ggctgtatcggggaaacaa

SEQ ID NO: 582501 - DNA, 19 bp, Mus musculus
  siRNA target sequence for Ctsw (NM_009985.2,1034-1052).
ctgtatcggggaaacaaca

SEQ ID NO: 582502 - DNA, 19 bp, Mus musculus
  siRNA target sequence for Ctsw (NM_009985.2,1054-1072).
ctgtggagtcaccaagtat

SEQ ID NO: 582503 - DNA, 19 bp, Mus musculus
  siRNA target sequence for Ctsw (NM_009985.2,1088-1106).
gtggactcaccagtaaaga

SEQ ID NO: 582504 - DNA, 19 bp, Mus musculus
  siRNA target sequence for Ctsz (NM_022325.1,288-306).
gcggatctccccaagaatt

SEQ ID NO: 582505 - DNA, 19 bp, Mus musculus
  siRNA target sequence for Ctsz (NM_022325.1,414-432).
gcagaccgaatcaacatca

SEQ ID NO: 582506 - DNA, 19 bp, Mus musculus
  siRNA target sequence for Ctsz (NM_022325.1,415-433).
cagaccgaatcaacatcaa

SEQ ID NO: 582507 - DNA, 19 bp, Mus musculus
  siRNA target sequence for Ctsz (NM_022325.1,458-476).
cctgctgtccgtacagaat

SEQ ID NO: 582508 - DNA, 19 bp, Mus musculus
  siRNA target sequence for Ctsz (NM_022325.1,462-480).
ctgtccgtacagaatgtca

SEQ ID NO: 582509 - DNA, 19 bp, Mus musculus
  siRNA target sequence for Ctsz (NM_022325.1,466-484).
ccgtacagaatgtcattga

SEQ ID NO: 582510 - DNA, 19 bp, Mus musculus
  siRNA target sequence for Ctsz (NM_022325.1,561-579).
gatgagacctgcaacaact

SEQ ID NO: 582511 - DNA, 19 bp, Mus musculus
  siRNA target sequence for Ctsz (NM_022325.1,619-637).
gtgggacctgcactgaatt

SEQ ID NO: 582512 - DNA, 19 bp, Mus musculus
  siRNA target sequence for Ctsz (NM_022325.1,621-639).
gggacctgcactgaattca

SEQ ID NO: 582513 - DNA, 19 bp, Mus musculus
  siRNA target sequence for Ctsz (NM_022325.1,622-640).
ggacctgcactgaattcaa

SEQ ID NO: 582514 - DNA, 19 bp, Mus musculus
  siRNA target sequence for Cyld (NM_173369.1,190-208).
gtggagccaagagaaagtt

SEQ ID NO: 582515 - DNA, 19 bp, Mus musculus
  siRNA target sequence for Cyld (NM_173369.1,220-238).
ctgggaagaacggattttt

SEQ ID NO: 582516 - DNA, 19 bp, Mus musculus
  siRNA target sequence for Cyld (NM_173369.1,223-241).
ggaagaacggattttttat

SEQ ID NO: 582517 - DNA, 19 bp, Mus musculus
  siRNA target sequence for Cyld (NM_173369.1,306-324).
ggagtataggacagtacat

SEQ ID NO: 582518 - DNA, 19 bp, Mus musculus
  siRNA target sequence for Cyld (NM_173369.1,332-350).
cgttctgtggggcattcaa

SEQ ID NO: 582519 - DNA, 19 bp, Mus musculus
  siRNA target sequence for Cyld (NM_173369.1,436-454).
ggatgttgtagaaataaat

SEQ ID NO: 582520 - DNA, 19 bp, Mus musculus
  siRNA target sequence for Cyld (NM_173369.1,497-515).
gagaggctcagcctattta

SEQ ID NO: 582521 - DNA, 19 bp, Mus musculus
  siRNA target sequence for Cyld (NM_173369.1,499-517).
gaggctcagcctatttaga

SEQ ID NO: 582522 - DNA, 19 bp, Mus musculus
  siRNA target sequence for Cyld (NM_173369.1,501-519).
ggctcagcctatttagaaa

SEQ ID NO: 582523 - DNA, 19 bp, Mus musculus
  siRNA target sequence for Cyld (NM_173369.1,553-571).
cgtgggcagtcctgtgaaa

SEQ ID NO: 582524 - DNA, 19 bp, Mus musculus
  siRNA target sequence for Cyld (NM_173369.1,558-576).
gcagtcctgtgaaagtaca

SEQ ID NO: 582525 - DNA, 19 bp, Mus musculus
  siRNA target sequence for Cyld (NM_173369.1,581-599).
cgatctggggaagagaaat

SEQ ID NO: 582526 - DNA, 19 bp, Mus musculus
  siRNA target sequence for Cyld (NM_173369.1,614-632).
cgcttcagaggacctttat

SEQ ID NO: 582527 - DNA, 19 bp, Mus musculus
  siRNA target sequence for Cyld (NM_173369.1,615-633).
gcttcagaggacctttatt

SEQ ID NO: 582528 - DNA, 19 bp, Mus musculus
  siRNA target sequence for Cyld (NM_173369.1,642-660).
ggacggtgtcggggatttt

SEQ ID NO: 582529 - DNA, 19 bp, Mus musculus
  siRNA target sequence for Cyld (NM_173369.1,703-721).
cacggatggggtatatcaa

SEQ ID NO: 582530 - DNA, 19 bp, Mus musculus
  siRNA target sequence for Cyld (NM_173369.1,768-786).
cattggacaaactagaact

SEQ ID NO: 582531 - DNA, 19 bp, Mus musculus
  siRNA target sequence for Cyld (NM_173369.1,772-790).
ggacaaactagaacttata

SEQ ID NO: 582532 - DNA, 19 bp, Mus musculus
  siRNA target sequence for Cyld (NM_173369.1,997-1015).
caactgggatggaaggttt

SEQ ID NO: 582533 - DNA, 19 bp, Mus musculus
  siRNA target sequence for Cyld (NM_173369.1,1000-1018).
ctgggatggaaggtttgat

SEQ ID NO: 582534 - DNA, 19 bp, Mus musculus
  siRNA target sequence for Cyld (NM_173369.1,1019-1037).
ggagtacagctctgtagtt

SEQ ID NO: 582535 - DNA, 19 bp, Mus musculus
  siRNA target sequence for Cyld (NM_173369.1,1020-1038).
gagtacagctctgtagttt

SEQ ID NO: 582536 - DNA, 19 bp, Mus musculus
  siRNA target sequence for Cyld (NM_173369.1,1154-1172).
ggttcatctagtcataata

SEQ ID NO: 582537 - DNA, 19 bp, Mus musculus
  siRNA target sequence for Cyld (NM_173369.1,1155-1173).
gttcatctagtcataataa

SEQ ID NO: 582538 - DNA, 19 bp, Mus musculus
  siRNA target sequence for Cyld (NM_173369.1,1276-1294).
caaaaatccatggtacatt

SEQ ID NO: 582539 - DNA, 19 bp, Mus musculus
  siRNA target sequence for Cyld (NM_173369.1,1312-1330).
ccctgcaaagtcacttaca

SEQ ID NO: 582540 - DNA, 19 bp, Mus musculus
  siRNA target sequence for Cyld (NM_173369.1,1314-1332).
ctgcaaagtcacttacaga

SEQ ID NO: 582541 - DNA, 19 bp, Mus musculus
  siRNA target sequence for Cyld (NM_173369.1,1342-1360).
ggacttcggacattcatct

SEQ ID NO: 582542 - DNA, 19 bp, Mus musculus
  siRNA target sequence for Cyld (NM_173369.1,1421-1439).
cccttcagcctgacaaaga

SEQ ID NO: 582543 - DNA, 19 bp, Mus musculus
  siRNA target sequence for Cyld (NM_173369.1,1432-1450).
gacaaagatgcccaatact

SEQ ID NO: 582544 - DNA, 19 bp, Mus musculus
  siRNA target sequence for Cyld (NM_173369.1,1579-1597).
gggctcactggctgaagta

SEQ ID NO: 582545 - DNA, 19 bp, Mus musculus
  siRNA target sequence for Cyld (NM_173369.1,1584-1602).
cactggctgaagtaaaaga

SEQ ID NO: 582546 - DNA, 19 bp, Mus musculus
  siRNA target sequence for Cyld (NM_173369.1,1744-1762).
cctgaagaaggcactgttt

SEQ ID NO: 582547 - DNA, 19 bp, Mus musculus
  siRNA target sequence for Cyld (NM_173369.1,1780-1798).
cagaccggactctaggttt

SEQ ID NO: 582548 - DNA, 19 bp, Mus musculus
  siRNA target sequence for Cyld (NM_173369.1,1784-1802).
ccggactctaggtttgcat

SEQ ID NO: 582549 - DNA, 19 bp, Mus musculus
  siRNA target sequence for Cyld (NM_173369.1,1812-1830).
ctgtttccaatcaaattga

SEQ ID NO: 582550 - DNA, 19 bp, Mus musculus
  siRNA target sequence for Cyld (NM_173369.1,1823-1841).
caaattgaaaggtgtaact

SEQ ID NO: 582551 - DNA, 19 bp, Mus musculus
  siRNA target sequence for Cyld (NM_173369.1,1855-1873).
gggctatttaagtgaagta

SEQ ID NO: 582552 - DNA, 19 bp, Mus musculus
  siRNA target sequence for Cyld (NM_173369.1,1857-1875).
gctatttaagtgaagtagt

SEQ ID NO: 582553 - DNA, 19 bp, Mus musculus
  siRNA target sequence for Cyld (NM_173369.1,1887-1905).
ctccacctaaaatggaaaa

SEQ ID NO: 582554 - DNA, 19 bp, Mus musculus
  siRNA target sequence for Cyld (NM_173369.1,1941-1959).
gcatccagggccattacaa

SEQ ID NO: 582555 - DNA, 19 bp, Mus musculus
  siRNA target sequence for Cyld (NM_173369.1,1942-1960).
catccagggccattacaat

SEQ ID NO: 582556 - DNA, 19 bp, Mus musculus
  siRNA target sequence for Cyld (NM_173369.1,1949-1967).
ggccattacaattcttgtt

SEQ ID NO: 582557 - DNA, 19 bp, Mus musculus
  siRNA target sequence for Cyld (NM_173369.1,1965-1983).
gttacttagactcaacttt

SEQ ID NO: 582558 - DNA, 19 bp, Mus musculus
  siRNA target sequence for Cyld (NM_173369.1,2011-2029).
cctggacactgtgttactt

SEQ ID NO: 582559 - DNA, 19 bp, Mus musculus
  siRNA target sequence for Cyld (NM_173369.1,2012-2030).
ctggacactgtgttactta

SEQ ID NO: 582560 - DNA, 19 bp, Mus musculus
  siRNA target sequence for Cyld (NM_173369.1,2096-2114).
gtcaatcctctgagaatat

SEQ ID NO: 582561 - DNA, 19 bp, Mus musculus
  siRNA target sequence for Cyld (NM_173369.1,2098-2116).
caatcctctgagaatatat

SEQ ID NO: 582562 - DNA, 19 bp, Mus musculus
  siRNA target sequence for Cyld (NM_173369.1,2123-2141).
gtgtgtgccacaaagatta

SEQ ID NO: 582563 - DNA, 19 bp, Mus musculus
  siRNA target sequence for Cyld (NM_173369.1,2274-2292).
cagcaggtcaaaaagttca

SEQ ID NO: 582564 - DNA, 19 bp, Mus musculus
  siRNA target sequence for Cyld (NM_173369.1,2288-2306).
gttcaagactgtaacttct

SEQ ID NO: 582565 - DNA, 19 bp, Mus musculus
  siRNA target sequence for Cyld (NM_173369.1,2294-2312).
gactgtaacttctatcaaa

SEQ ID NO: 582566 - DNA, 19 bp, Mus musculus
  siRNA target sequence for Cyld (NM_173369.1,2409-2427).
catcatgcttgattatcca

SEQ ID NO: 582567 - DNA, 19 bp, Mus musculus
  siRNA target sequence for Cyld (NM_173369.1,2428-2446).
gatgcctcggtttggaaaa

SEQ ID NO: 582568 - DNA, 19 bp, Mus musculus
  siRNA target sequence for Cyld (NM_173369.1,2435-2453).
cggtttggaaaagacttta

SEQ ID NO: 582569 - DNA, 19 bp, Mus musculus
  siRNA target sequence for Cyld (NM_173369.1,2647-2665).
caggaggttgaatcattct

SEQ ID NO: 582570 - DNA, 19 bp, Mus musculus
  siRNA target sequence for Cyld (NM_173369.1,2649-2667).
ggaggttgaatcattctta

SEQ ID NO: 582571 - DNA, 19 bp, Mus musculus
  siRNA target sequence for Cyld (NM_173369.1,2650-2668).
gaggttgaatcattcttat

SEQ ID NO: 582572 - DNA, 19 bp, Mus musculus
  siRNA target sequence for Cyld (NM_173369.1,2652-2670).
ggttgaatcattcttatca

SEQ ID NO: 582573 - DNA, 19 bp, Mus musculus
  siRNA target sequence for Cyld (NM_173369.1,2653-2671).
gttgaatcattcttatcat

SEQ ID NO: 582574 - DNA, 19 bp, Mus musculus
  siRNA target sequence for Cyld (NM_173369.1,2721-2739).
gcatcccctgtcagaagat

SEQ ID NO: 582575 - DNA, 19 bp, Mus musculus
  siRNA target sequence for Cyld (NM_173369.1,2750-2768).
gctgttctctgcatagaaa

SEQ ID NO: 582576 - DNA, 19 bp, Mus musculus
  siRNA target sequence for Cyld (NM_173369.1,2769-2787).
cgagccactatgttgcttt

SEQ ID NO: 582577 - DNA, 19 bp, Mus musculus
  siRNA target sequence for Cyld (NM_173369.1,2894-2912).
gaagtgggagagtacttga

SEQ ID NO: 582578 - DNA, 19 bp, Mus musculus
  siRNA target sequence for Cyld (NM_173369.1,2941-2959).
ggattccagaaggattcaa

SEQ ID NO: 582579 - DNA, 19 bp, Mus musculus
  siRNA target sequence for Cyld (NM_173369.1,2973-2991).
gacttctttgcgatgcata

SEQ ID NO: 582580 - DNA, 19 bp, Mus musculus
  siRNA target sequence for Cyld (NM_173369.1,3012-3030).
caaccatgagcctgtacaa

SEQ ID NO: 582581 - DNA, 19 bp, Mus musculus
  siRNA target sequence for Dub1 (NM_007887.1,1338-1356).
ccctttcacagaagattta

SEQ ID NO: 582582 - DNA, 19 bp, Mus musculus
  siRNA target sequence for Dub1 (NM_007887.1,1377-1395).
ggataagagagcaattaaa

SEQ ID NO: 582583 - DNA, 19 bp, Mus musculus
  siRNA target sequence for E430004F17 (NM_183199.1,301-319).
ctcagaaatggtactgtat

SEQ ID NO: 582584 - DNA, 19 bp, Mus musculus
  siRNA target sequence for E430004F17 (NM_183199.1,369-387).
gtcgcctgtgggaagtaca

SEQ ID NO: 582585 - DNA, 19 bp, Mus musculus
  siRNA target sequence for E430004F17 (NM_183199.1,455-473).
gtacgctttttgttatctt

SEQ ID NO: 582586 - DNA, 19 bp, Mus musculus
  siRNA target sequence for E430004F17 (NM_183199.1,458-476).
cgctttttgttatctttgt

SEQ ID NO: 582587 - DNA, 19 bp, Mus musculus
  siRNA target sequence for E430004F17 (NM_183199.1,466-484).
gttatctttgtaacgatta

SEQ ID NO: 582588 - DNA, 19 bp, Mus musculus
  siRNA target sequence for E430004F17 (NM_183199.1,475-493).
gtaacgattatgttctaaa

SEQ ID NO: 582589 - DNA, 19 bp, Mus musculus
  siRNA target sequence for E430004F17 (NM_183199.1,479-497).
cgattatgttctaaacgat

SEQ ID NO: 582590 - DNA, 19 bp, Mus musculus
  siRNA target sequence for E430004F17 (NM_183199.1,480-498).
gattatgttctaaacgata

SEQ ID NO: 582591 - DNA, 19 bp, Mus musculus
  siRNA target sequence for E430004F17 (NM_183199.1,518-536).
gtcactacggagtacacta

SEQ ID NO: 582592 - DNA, 19 bp, Mus musculus
  siRNA target sequence for E430004F17 (NM_183199.1,522-540).
ctacggagtacactaagta

SEQ ID NO: 582593 - DNA, 19 bp, Mus musculus
  siRNA target sequence for E430004F17 (NM_183199.1,525-543).
cggagtacactaagtacaa

SEQ ID NO: 582594 - DNA, 19 bp, Mus musculus
  siRNA target sequence for E430004F17 (NM_183199.1,526-544).
ggagtacactaagtacaat

SEQ ID NO: 582595 - DNA, 19 bp, Mus musculus
  siRNA target sequence for E430004F17 (NM_183199.1,603-621).
gcacaggaccgtgtttact

SEQ ID NO: 582596 - DNA, 19 bp, Mus musculus
  siRNA target sequence for E430004F17 (NM_183199.1,725-743).
gttcgaacagtcagcaatt

SEQ ID NO: 582597 - DNA, 19 bp, Mus musculus
  siRNA target sequence for E430004F17 (NM_183199.1,728-746).
cgaacagtcagcaattgga

SEQ ID NO: 582598 - DNA, 19 bp, Mus musculus
  siRNA target sequence for E430004F17 (NM_183199.1,729-747).
gaacagtcagcaattggaa

SEQ ID NO: 582599 - DNA, 19 bp, Mus musculus
  siRNA target sequence for E430004F17 (NM_183199.1,773-791).
gagaatggtagcaaaacga

SEQ ID NO: 582600 - DNA, 19 bp, Mus musculus
  siRNA target sequence for E430004F17 (NM_183199.1,853-871).
cacctccgcggaagagttt

SEQ ID NO: 582601 - DNA, 19 bp, Mus musculus
  siRNA target sequence for E430004F17 (NM_183199.1,863-881).
gaagagtttacgcttacaa

SEQ ID NO: 582602 - DNA, 19 bp, Mus musculus
  siRNA target sequence for E430004F17 (NM_183199.1,1163-1181).
gagcggaggggcctcaaaa

SEQ ID NO: 582603 - DNA, 19 bp, Mus musculus
  siRNA target sequence for E430004F17 (NM_183199.1,1166-1184).
cggaggggcctcaaaaggt

SEQ ID NO: 582604 - DNA, 19 bp, Mus musculus
  siRNA target sequence for E430004F17 (NM_183199.1,1236-1254).
ctctgccatgaattgcata

SEQ ID NO: 582605 - DNA, 19 bp, Mus musculus
  siRNA target sequence for E430004F17 (NM_183199.1,1415-1433).
gacaaccggaaccaagtta

SEQ ID NO: 582606 - DNA, 19 bp, Mus musculus
  siRNA target sequence for E430004F17 (NM_183199.1,1450-1468).
cttcccaaaggagacttat

SEQ ID NO: 582607 - DNA, 19 bp, Mus musculus
  siRNA target sequence for E430004F17 (NM_183199.1,1528-1546).
ggatgtcttgccacatttt

SEQ ID NO: 582608 - DNA, 19 bp, Mus musculus
  siRNA target sequence for E430004F17 (NM_183199.1,1575-1593).
gcctacaactgggtattct

SEQ ID NO: 582609 - DNA, 19 bp, Mus musculus
  siRNA target sequence for E430004F17 (NM_183199.1,1583-1601).
ctgggtattctgtatggat

SEQ ID NO: 582610 - DNA, 19 bp, Mus musculus
  siRNA target sequence for E430004F17 (NM_183199.1,1621-1639).
ggcatttctcggtcagaat

SEQ ID NO: 582611 - DNA, 19 bp, Mus musculus
  siRNA target sequence for E430004F17 (NM_183199.1,1622-1640).
gcatttctcggtcagaata

SEQ ID NO: 582612 - DNA, 19 bp, Mus musculus
  siRNA target sequence for E430004F17 (NM_183199.1,1667-1685).
gtcacggatctctgaatca

SEQ ID NO: 582613 - DNA, 19 bp, Mus musculus
  siRNA target sequence for E430004F17 (NM_183199.1,1669-1687).
cacggatctctgaatcatt

SEQ ID NO: 582614 - DNA, 19 bp, Mus musculus
  siRNA target sequence for E430004F17 (NM_183199.1,1684-1702).
cattggaaatagttttgta

SEQ ID NO: 582615 - DNA, 19 bp, Mus musculus
  siRNA target sequence for Gpr26 (NM_173410.1,912-930).
cggcttccaccagctatat

SEQ ID NO: 582616 - DNA, 19 bp, Mus musculus
  siRNA target sequence for Gpr26 (NM_173410.1,1229-1247).
gctttgcaccctatgtgat

SEQ ID NO: 582617 - DNA, 19 bp, Mus musculus
  siRNA target sequence for Gpr26 (NM_173410.1,1230-1248).
ctttgcaccctatgtgatt

SEQ ID NO: 582618 - DNA, 19 bp, Mus musculus
  siRNA target sequence for Gpr26 (NM_173410.1,1234-1252).
gcaccctatgtgattacca

SEQ ID NO: 582619 - DNA, 19 bp, Mus musculus
  siRNA target sequence for Gpr26 (NM_173410.1,1355-1373).
ccttgctgcgacaccaata

SEQ ID NO: 582620 - DNA, 19 bp, Mus musculus
  siRNA target sequence for Gpr26 (NM_173410.1,1393-1411).
ctcctgaacaggatcttca

SEQ ID NO: 582621 - DNA, 19 bp, Mus musculus
  siRNA target sequence for Lcn7 (NM_023476.1,775-793).
catcctccactgtcatgaa

SEQ ID NO: 582622 - DNA, 19 bp, Mus musculus
  siRNA target sequence for Lcn7 (NM_023476.1,778-796).
cctccactgtcatgaatat

SEQ ID NO: 582623 - DNA, 19 bp, Mus musculus
  siRNA target sequence for Lcn7 (NM_023476.1,786-804).
gtcatgaatatgaatgaga

SEQ ID NO: 582624 - DNA, 19 bp, Mus musculus
  siRNA target sequence for Lcn7 (NM_023476.1,940-958).
catctgatcgcgtctctat

SEQ ID NO: 582625 - DNA, 19 bp, Mus musculus
  siRNA target sequence for Lcn7 (NM_023476.1,945-963).
gatcgcgtctctatccatt

SEQ ID NO: 582626 - DNA, 19 bp, Mus musculus
  siRNA target sequence for Lcn7 (NM_023476.1,948-966).
cgcgtctctatccattctt

SEQ ID NO: 582627 - DNA, 19 bp, Mus musculus
  siRNA target sequence for Lcn7 (NM_023476.1,949-967).
gcgtctctatccattcttt

SEQ ID NO: 582628 - DNA, 19 bp, Mus musculus
  siRNA target sequence for Lcn7 (NM_023476.1,972-990).
cacatgacacccatcctat

SEQ ID NO: 582629 - DNA, 19 bp, Mus musculus
  siRNA target sequence for Lcn7 (NM_023476.1,1037-1055).
ccgaggtgggcgtcttgat

SEQ ID NO: 582630 - DNA, 19 bp, Mus musculus
  siRNA target sequence for Lcn7 (NM_023476.1,1138-1156).
gccccactcctcgttgtat

SEQ ID NO: 582631 - DNA, 19 bp, Mus musculus
  siRNA target sequence for Lcn7 (NM_023476.1,1140-1158).
cccactcctcgttgtatga

SEQ ID NO: 582632 - DNA, 19 bp, Mus musculus
  siRNA target sequence for Lcn7 (NM_023476.1,1141-1159).
ccactcctcgttgtatgat

SEQ ID NO: 582633 - DNA, 19 bp, Mus musculus
  siRNA target sequence for Lcn7 (NM_023476.1,1209-1227).
cccaatggtcaggttgatt

SEQ ID NO: 582634 - DNA, 19 bp, Mus musculus
  siRNA target sequence for Lcn7 (NM_023476.1,1301-1319).
ggaaaacggccctgttcaa

SEQ ID NO: 582635 - DNA, 19 bp, Mus musculus
  siRNA target sequence for Lcn7 (NM_023476.1,1332-1350).
gtacacgaggacttcttct

SEQ ID NO: 582636 - DNA, 19 bp, Mus musculus
  siRNA target sequence for Lcn7 (NM_023476.1,1420-1438).
ggactcactcagtcaagat

SEQ ID NO: 582637 - DNA, 19 bp, Mus musculus
  siRNA target sequence for Ndst1 (NM_008306.1,80-98).
gcctgttcagcgtttttgt

SEQ ID NO: 582638 - DNA, 19 bp, Mus musculus
  siRNA target sequence for Ndst1 (NM_008306.1,82-100).
ctgttcagcgtttttgtct

SEQ ID NO: 582639 - DNA, 19 bp, Mus musculus
  siRNA target sequence for Ndst1 (NM_008306.1,99-117).
ctctgcctactacctatat

SEQ ID NO: 582640 - DNA, 19 bp, Mus musculus
  siRNA target sequence for Ndst1 (NM_008306.1,312-330).
ggaatccagtcgcttcaaa

SEQ ID NO: 582641 - DNA, 19 bp, Mus musculus
  siRNA target sequence for Ndst1 (NM_008306.1,313-331).
gaatccagtcgcttcaaat

SEQ ID NO: 582642 - DNA, 19 bp, Mus musculus
  siRNA target sequence for Ndst1 (NM_008306.1,327-345).
caaataccggacagagatt

SEQ ID NO: 582643 - DNA, 19 bp, Mus musculus
  siRNA target sequence for Ndst1 (NM_008306.1,392-410).
gccgcttcgccctcatcat

SEQ ID NO: 582644 - DNA, 19 bp, Mus musculus
  siRNA target sequence for Ndst1 (NM_008306.1,483-501).
ctacggcgtgggcatcatt

SEQ ID NO: 582645 - DNA, 19 bp, Mus musculus
  siRNA target sequence for Ndst1 (NM_008306.1,493-511).
ggcatcattggattcttca

SEQ ID NO: 582646 - DNA, 19 bp, Mus musculus
  siRNA target sequence for Ndst1 (NM_008306.1,494-512).
gcatcattggattcttcaa

SEQ ID NO: 582647 - DNA, 19 bp, Mus musculus
  siRNA target sequence for Ndst1 (NM_008306.1,728-746).
cacgctcctccgaatccat

SEQ ID NO: 582648 - DNA, 19 bp, Mus musculus
  siRNA target sequence for Ndst1 (NM_008306.1,858-876).
cttttggctgcataagctt

SEQ ID NO: 582649 - DNA, 19 bp, Mus musculus
  siRNA target sequence for Ndst1 (NM_008306.1,863-881).
ggctgcataagcttgtctt

SEQ ID NO: 582650 - DNA, 19 bp, Mus musculus
  siRNA target sequence for Ndst1 (NM_008306.1,1005-1023).
gaaggccctgtttgataca

SEQ ID NO: 582651 - DNA, 19 bp, Mus musculus
  siRNA target sequence for Ndst1 (NM_008306.1,1033-1051).
ctccgcacacatattccaa

SEQ ID NO: 582652 - DNA, 19 bp, Mus musculus
  siRNA target sequence for Ndst1 (NM_008306.1,1037-1055).
gcacacatattccaaactt

SEQ ID NO: 582653 - DNA, 19 bp, Mus musculus
  siRNA target sequence for Ndst1 (NM_008306.1,1070-1088).
gctactcagggaaattctt

SEQ ID NO: 582654 - DNA, 19 bp, Mus musculus
  siRNA target sequence for Ndst1 (NM_008306.1,1126-1144).
ctgctgttgtcctatgtga

SEQ ID NO: 582655 - DNA, 19 bp, Mus musculus
  siRNA target sequence for Ndst1 (NM_008306.1,1222-1240).
cagatggccctgaacaaga

SEQ ID NO: 582656 - DNA, 19 bp, Mus musculus
  siRNA target sequence for Ndst1 (NM_008306.1,1450-1468).
cagacctgtggcctcttta

SEQ ID NO: 582657 - DNA, 19 bp, Mus musculus
  siRNA target sequence for Ndst1 (NM_008306.1,1452-1470).
gacctgtggcctctttaca

SEQ ID NO: 582658 - DNA, 19 bp, Mus musculus
  siRNA target sequence for Ndst1 (NM_008306.1,1469-1487).
cacacaccatcttctacaa

SEQ ID NO: 582659 - DNA, 19 bp, Mus musculus
  siRNA target sequence for Ndst1 (NM_008306.1,1572-1590).
catcttcatgacacactta

SEQ ID NO: 582660 - DNA, 19 bp, Mus musculus
  siRNA target sequence for Ndst1 (NM_008306.1,1587-1605).
cttatccaactatggaaat

SEQ ID NO: 582661 - DNA, 19 bp, Mus musculus
  siRNA target sequence for Ndst1 (NM_008306.1,1606-1624).
gaccgcctgggactataca

SEQ ID NO: 582662 - DNA, 19 bp, Mus musculus
  siRNA target sequence for Ndst1 (NM_008306.1,1707-1725).
gtactttcagatcttttct

SEQ ID NO: 582663 - DNA, 19 bp, Mus musculus
  siRNA target sequence for Ndst1 (NM_008306.1,1807-1825).
cgcttcccaaagcttctta

SEQ ID NO: 582664 - DNA, 19 bp, Mus musculus
  siRNA target sequence for Ndst1 (NM_008306.1,1808-1826).
gcttcccaaagcttcttat

SEQ ID NO: 582665 - DNA, 19 bp, Mus musculus
  siRNA target sequence for Ndst1 (NM_008306.1,1812-1830).
cccaaagcttcttatcatt

SEQ ID NO: 582666 - DNA, 19 bp, Mus musculus
  siRNA target sequence for Ndst1 (NM_008306.1,1920-1938).
cgaggagatccagtttttt

SEQ ID NO: 582667 - DNA, 19 bp, Mus musculus
  siRNA target sequence for Ndst1 (NM_008306.1,1941-1959).
cggccacaactatcacaaa

SEQ ID NO: 582668 - DNA, 19 bp, Mus musculus
  siRNA target sequence for Ndst1 (NM_008306.1,2003-2021).
ccacctcggacttctactt

SEQ ID NO: 582669 - DNA, 19 bp, Mus musculus
  siRNA target sequence for Ndst1 (NM_008306.1,2033-2051).
ccaactactttgattcaga

SEQ ID NO: 582670 - DNA, 19 bp, Mus musculus
  siRNA target sequence for Ndst1 (NM_008306.1,2034-2052).
caactactttgattcagaa

SEQ ID NO: 582671 - DNA, 19 bp, Mus musculus
  siRNA target sequence for Ndst1 (NM_008306.1,2116-2134).
ccagccgaccgggcttatt

SEQ ID NO: 582672 - DNA, 19 bp, Mus musculus
  siRNA target sequence for Ndst1 (NM_008306.1,2263-2281).
ggctggtatgccactcata

SEQ ID NO: 582673 - DNA, 19 bp, Mus musculus
  siRNA target sequence for Ndst1 (NM_008306.1,2264-2282).
gctggtatgccactcatat

SEQ ID NO: 582674 - DNA, 19 bp, Mus musculus
  siRNA target sequence for Ndst1 (NM_008306.1,2265-2283).
ctggtatgccactcatatt

SEQ ID NO: 582675 - DNA, 19 bp, Mus musculus
  siRNA target sequence for Ndst1 (NM_008306.1,2267-2285).
ggtatgccactcatattga

SEQ ID NO: 582676 - DNA, 19 bp, Mus musculus
  siRNA target sequence for Ndst1 (NM_008306.1,2268-2286).
gtatgccactcatattgaa

SEQ ID NO: 582677 - DNA, 19 bp, Mus musculus
  siRNA target sequence for Ndst1 (NM_008306.1,2334-2352).
caaactgctgcgaacagaa

SEQ ID NO: 582678 - DNA, 19 bp, Mus musculus
  siRNA target sequence for Ndst1 (NM_008306.1,2399-2417).
gcactgtcgactaccataa

SEQ ID NO: 582679 - DNA, 19 bp, Mus musculus
  siRNA target sequence for Ndst1 (NM_008306.1,2400-2418).
cactgtcgactaccataaa

SEQ ID NO: 582680 - DNA, 19 bp, Mus musculus
  siRNA target sequence for Ndst1 (NM_008306.1,2404-2422).
gtcgactaccataaaacct

SEQ ID NO: 582681 - DNA, 19 bp, Mus musculus
  siRNA target sequence for Ndst1 (NM_008306.1,2527-2545).
gattcccgagccttcctaa

SEQ ID NO: 582682 - DNA, 19 bp, Mus musculus
  siRNA target sequence for Ndst1 (NM_008306.1,2531-2549).
cccgagccttcctaaagga

SEQ ID NO: 582683 - DNA, 19 bp, Mus musculus
  siRNA target sequence for Ndst1 (NM_008306.1,2532-2550).
ccgagccttcctaaaggat

SEQ ID NO: 582684 - DNA, 19 bp, Mus musculus
  siRNA target sequence for Ndst1 (NM_008306.1,2536-2554).
gccttcctaaaggattact

SEQ ID NO: 582685 - DNA, 19 bp, Mus musculus
  siRNA target sequence for Ndst1 (NM_008306.1,2537-2555).
ccttcctaaaggattactt

SEQ ID NO: 582686 - DNA, 19 bp, Mus musculus
  siRNA target sequence for Park2 (NM_016694.2,214-232).
gaccagctgcgtgtgattt

SEQ ID NO: 582687 - DNA, 19 bp, Mus musculus
  siRNA target sequence for Park2 (NM_016694.2,258-276).
cctgacggttcaaaactgt

SEQ ID NO: 582688 - DNA, 19 bp, Mus musculus
  siRNA target sequence for Park2 (NM_016694.2,282-300).
ggaacaacagagtattgta

SEQ ID NO: 582689 - DNA, 19 bp, Mus musculus
  siRNA target sequence for Park2 (NM_016694.2,293-311).
gtattgtacacatagtaca

SEQ ID NO: 582690 - DNA, 19 bp, Mus musculus
  siRNA target sequence for Park2 (NM_016694.2,319-337).
cggaggagaagtcatgaaa

SEQ ID NO: 582691 - DNA, 19 bp, Mus musculus
  siRNA target sequence for Park2 (NM_016694.2,321-339).
gaggagaagtcatgaaaca

SEQ ID NO: 582692 - DNA, 19 bp, Mus musculus
  siRNA target sequence for Park2 (NM_016694.2,497-515).
cagccagaggtccagttaa

SEQ ID NO: 582693 - DNA, 19 bp, Mus musculus
  siRNA target sequence for Park2 (NM_016694.2,511-529).
gttaaacccacctacaaca

SEQ ID NO: 582694 - DNA, 19 bp, Mus musculus
  siRNA target sequence for Park2 (NM_016694.2,645-663).
ggacgatgtcttaattcca

SEQ ID NO: 582695 - DNA, 19 bp, Mus musculus
  siRNA target sequence for Park2 (NM_016694.2,646-664).
gacgatgtcttaattccaa

SEQ ID NO: 582696 - DNA, 19 bp, Mus musculus
  siRNA target sequence for Park2 (NM_016694.2,701-719).
ctggaaccagagctgaatt

SEQ ID NO: 582697 - DNA, 19 bp, Mus musculus
  siRNA target sequence for Park2 (NM_016694.2,859-877).
caccgtcacgtgatctgtt

SEQ ID NO: 582698 - DNA, 19 bp, Mus musculus
  siRNA target sequence for Park2 (NM_016694.2,1197-1215).
ctgtaaggaagcataccat

SEQ ID NO: 582699 - DNA, 19 bp, Mus musculus
  siRNA target sequence for Park2 (NM_016694.2,1358-1376).
gcaacgtgccaattgaaaa

SEQ ID NO: 582700 - DNA, 19 bp, Mus musculus
  siRNA target sequence for Park2 (NM_016694.2,1359-1377).
caacgtgccaattgaaaaa

SEQ ID NO: 582701 - DNA, 19 bp, Mus musculus
  siRNA target sequence for Rhag (NM_011269.1,160-178).
cagggtaacacctcaagtt

SEQ ID NO: 582702 - DNA, 19 bp, Mus musculus
  siRNA target sequence for Rhag (NM_011269.1,162-180).
gggtaacacctcaagttca

SEQ ID NO: 582703 - DNA, 19 bp, Mus musculus
  siRNA target sequence for Rhag (NM_011269.1,179-197).
cagcaaaaaaggaccaatt

SEQ ID NO: 582704 - DNA, 19 bp, Mus musculus
  siRNA target sequence for Rhag (NM_011269.1,181-199).
gcaaaaaaggaccaatttt

SEQ ID NO: 582705 - DNA, 19 bp, Mus musculus
  siRNA target sequence for Rhag (NM_011269.1,327-345).
cctccaatggggtacgatt

SEQ ID NO: 582706 - DNA, 19 bp, Mus musculus
  siRNA target sequence for Rhag (NM_011269.1,328-346).
ctccaatggggtacgatta

SEQ ID NO: 582707 - DNA, 19 bp, Mus musculus
  siRNA target sequence for Rhag (NM_011269.1,382-400).
cacttcggaatctacaata

SEQ ID NO: 582708 - DNA, 19 bp, Mus musculus
  siRNA target sequence for Rhag (NM_011269.1,387-405).
cggaatctacaatatgata

SEQ ID NO: 582709 - DNA, 19 bp, Mus musculus
  siRNA target sequence for Rhag (NM_011269.1,447-465).
cgctgtcctggggaaaaca

SEQ ID NO: 582710 - DNA, 19 bp, Mus musculus
  siRNA target sequence for Rhag (NM_011269.1,470-488).
ccattcaaatgttgatcat

SEQ ID NO: 582711 - DNA, 19 bp, Mus musculus
  siRNA target sequence for Rhag (NM_011269.1,475-493).
caaatgttgatcatgacaa

SEQ ID NO: 582712 - DNA, 19 bp, Mus musculus
  siRNA target sequence for Rhag (NM_011269.1,498-516).
ggaaattgctgtatttgct

SEQ ID NO: 582713 - DNA, 19 bp, Mus musculus
  siRNA target sequence for Rhag (NM_011269.1,508-526).
gtatttgctggcaacgaat

SEQ ID NO: 582714 - DNA, 19 bp, Mus musculus
  siRNA target sequence for Rhag (NM_011269.1,515-533).
ctggcaacgaatatcttgt

SEQ ID NO: 582715 - DNA, 19 bp, Mus musculus
  siRNA target sequence for Rhag (NM_011269.1,517-535).
ggcaacgaatatcttgtta

SEQ ID NO: 582716 - DNA, 19 bp, Mus musculus
  siRNA target sequence for Rhag (NM_011269.1,522-540).
cgaatatcttgttactgaa

SEQ ID NO: 582717 - DNA, 19 bp, Mus musculus
  siRNA target sequence for Rhag (NM_011269.1,523-541).
gaatatcttgttactgaat

SEQ ID NO: 582718 - DNA, 19 bp, Mus musculus
  siRNA target sequence for Rhag (NM_011269.1,556-574).
gacactggagcatcaatga

SEQ ID NO: 582719 - DNA, 19 bp, Mus musculus
  siRNA target sequence for Rhag (NM_011269.1,558-576).
cactggagcatcaatgaca

SEQ ID NO: 582720 - DNA, 19 bp, Mus musculus
  siRNA target sequence for Rhag (NM_011269.1,646-664).
gaacacccaaatgatgaat

SEQ ID NO: 582721 - DNA, 19 bp, Mus musculus
  siRNA target sequence for Rhag (NM_011269.1,688-706).
gccatgatcggaacacttt

SEQ ID NO: 582722 - DNA, 19 bp, Mus musculus
  siRNA target sequence for Rhag (NM_011269.1,689-707).
ccatgatcggaacactttt

SEQ ID NO: 582723 - DNA, 19 bp, Mus musculus
  siRNA target sequence for Rhag (NM_011269.1,763-781).
cagtatagggccattgtca

SEQ ID NO: 582724 - DNA, 19 bp, Mus musculus
  siRNA target sequence for Rhag (NM_011269.1,770-788).
gggccattgtcaacacata

SEQ ID NO: 582725 - DNA, 19 bp, Mus musculus
  siRNA target sequence for Rhag (NM_011269.1,824-842).
ccttgtccagccttgtaga

SEQ ID NO: 582726 - DNA, 19 bp, Mus musculus
  siRNA target sequence for Rhag (NM_011269.1,855-873).
gctggatatggtacacatt

SEQ ID NO: 582727 - DNA, 19 bp, Mus musculus
  siRNA target sequence for Rhag (NM_011269.1,870-888).
cattcagaatgctactcta

SEQ ID NO: 582728 - DNA, 19 bp, Mus musculus
  siRNA target sequence for Rhag (NM_011269.1,940-958).
gctgctatgaccattggaa

SEQ ID NO: 582729 - DNA, 19 bp, Mus musculus
  siRNA target sequence for Rhag (NM_011269.1,977-995).
ctgtgcttggatacaagtt

SEQ ID NO: 582730 - DNA, 19 bp, Mus musculus
  siRNA target sequence for Rhag (NM_011269.1,1001-1019).
gtccactgttagctaataa

SEQ ID NO: 582731 - DNA, 19 bp, Mus musculus
  siRNA target sequence for Rhag (NM_011269.1,1004-1022).
cactgttagctaataaact

SEQ ID NO: 582732 - DNA, 19 bp, Mus musculus
  siRNA target sequence for Rhag (NM_011269.1,1023-1041).
gatgatccatgatacatgt

SEQ ID NO: 582733 - DNA, 19 bp, Mus musculus
  siRNA target sequence for Rhag (NM_011269.1,1033-1051).
gatacatgtggggttcata

SEQ ID NO: 582734 - DNA, 19 bp, Mus musculus
  siRNA target sequence for Rhag (NM_011269.1,1037-1055).
catgtggggttcataactt

SEQ ID NO: 582735 - DNA, 19 bp, Mus musculus
  siRNA target sequence for Rhag (NM_011269.1,1161-1179).
cattggctcagcgattgtt

SEQ ID NO: 582736 - DNA, 19 bp, Mus musculus
  siRNA target sequence for Rhag (NM_011269.1,1184-1202).
gtttgcttacaggtctaat

SEQ ID NO: 582737 - DNA, 19 bp, Mus musculus
  siRNA target sequence for Rhag (NM_011269.1,1193-1211).
caggtctaattctgaagtt

SEQ ID NO: 582738 - DNA, 19 bp, Mus musculus
  siRNA target sequence for Rhag (NM_011269.1,1262-1280).
cttggaaggttcccaaatt

SEQ ID NO: 582739 - DNA, 19 bp, Mus musculus
  siRNA target sequence for Rhag (NM_011269.1,1320-1338).
caaccacgtggaacatgaa

SEQ ID NO: 582740 - DNA, 19 bp, Mus musculus
  siRNA target sequence for Tinag (NM_012033.2,114-132).
ccagggccaagattcacta

SEQ ID NO: 582741 - DNA, 19 bp, Mus musculus
  siRNA target sequence for Tinag (NM_012033.2,121-139).
caagattcactagaaatca

SEQ ID NO: 582742 - DNA, 19 bp, Mus musculus
  siRNA target sequence for Tinag (NM_012033.2,150-168).
gaaggttctcggcacaaaa

SEQ ID NO: 582743 - DNA, 19 bp, Mus musculus
  siRNA target sequence for Tinag (NM_012033.2,160-178).
ggcacaaaagggccatttt

SEQ ID NO: 582744 - DNA, 19 bp, Mus musculus
  siRNA target sequence for Tinag (NM_012033.2,197-215).
gcgctttggctgttgtgaa

SEQ ID NO: 582745 - DNA, 19 bp, Mus musculus
  siRNA target sequence for Tinag (NM_012033.2,206-224).
ctgttgtgaagctagagat

SEQ ID NO: 582746 - DNA, 19 bp, Mus musculus
  siRNA target sequence for Tinag (NM_012033.2,254-272).
caatgcactgtgttactgt

SEQ ID NO: 582747 - DNA, 19 bp, Mus musculus
  siRNA target sequence for Tinag (NM_012033.2,285-303).
gagcgggacacctctgatt

SEQ ID NO: 582748 - DNA, 19 bp, Mus musculus
  siRNA target sequence for Tinag (NM_012033.2,307-325).
gtcctgattacaagtcatt

SEQ ID NO: 582749 - DNA, 19 bp, Mus musculus
  siRNA target sequence for Tinag (NM_012033.2,322-340).
cattctgccacgaagaaaa

SEQ ID NO: 582750 - DNA, 19 bp, Mus musculus
  siRNA target sequence for Tinag (NM_012033.2,375-393).
gaaggttgcttcagagata

SEQ ID NO: 582751 - DNA, 19 bp, Mus musculus
  siRNA target sequence for Tinag (NM_012033.2,386-404).
cagagatagccagcattat

SEQ ID NO: 582752 - DNA, 19 bp, Mus musculus
  siRNA target sequence for Tinag (NM_012033.2,431-449).
ctgcaactcctgtacatgt

SEQ ID NO: 582753 - DNA, 19 bp, Mus musculus
  siRNA target sequence for Tinag (NM_012033.2,484-502).
gccttgttcatccagaatt

SEQ ID NO: 582754 - DNA, 19 bp, Mus musculus
  siRNA target sequence for Tinag (NM_012033.2,485-503).
ccttgttcatccagaatta

SEQ ID NO: 582755 - DNA, 19 bp, Mus musculus
  siRNA target sequence for Tinag (NM_012033.2,532-550).
gatggacagcacagaatta

SEQ ID NO: 582756 - DNA, 19 bp, Mus musculus
  siRNA target sequence for Tinag (NM_012033.2,562-580).
ggggaatgaccttagaaga

SEQ ID NO: 582757 - DNA, 19 bp, Mus musculus
  siRNA target sequence for Tinag (NM_012033.2,627-645).
ctcagcatgaatgaaatga

SEQ ID NO: 582758 - DNA, 19 bp, Mus musculus
  siRNA target sequence for Tinag (NM_012033.2,717-735).
catggtccactggatcaaa

SEQ ID NO: 582759 - DNA, 19 bp, Mus musculus
  siRNA target sequence for Tinag (NM_012033.2,720-738).
ggtccactggatcaaaaaa

SEQ ID NO: 582760 - DNA, 19 bp, Mus musculus
  siRNA target sequence for Tinag (NM_012033.2,776-794).
ggcagctgaccgaattgca

SEQ ID NO: 582761 - DNA, 19 bp, Mus musculus
  siRNA target sequence for Tinag (NM_012033.2,777-795).
gcagctgaccgaattgcaa

SEQ ID NO: 582762 - DNA, 19 bp, Mus musculus
  siRNA target sequence for Tinag (NM_012033.2,778-796).
cagctgaccgaattgcaat

SEQ ID NO: 582763 - DNA, 19 bp, Mus musculus
  siRNA target sequence for Tinag (NM_012033.2,783-801).
gaccgaattgcaattcagt

SEQ ID NO: 582764 - DNA, 19 bp, Mus musculus
  siRNA target sequence for Tinag (NM_012033.2,800-818).
gtccaagggtcgatacaca

SEQ ID NO: 582765 - DNA, 19 bp, Mus musculus
  siRNA target sequence for Tinag (NM_012033.2,821-839).
caatctctcgcctcagaat

SEQ ID NO: 582766 - DNA, 19 bp, Mus musculus
  siRNA target sequence for Tinag (NM_012033.2,825-843).
ctctcgcctcagaatttga

SEQ ID NO: 582767 - DNA, 19 bp, Mus musculus
  siRNA target sequence for Tinag (NM_012033.2,902-920).
gtggttcctgagaaaacgt

SEQ ID NO: 582768 - DNA, 19 bp, Mus musculus
  siRNA target sequence for Tinag (NM_012033.2,937-955).
catgctacccacttttcaa

SEQ ID NO: 582769 - DNA, 19 bp, Mus musculus
  siRNA target sequence for Tinag (NM_012033.2,956-974).
ggaccaaaacactaccaat

SEQ ID NO: 582770 - DNA, 19 bp, Mus musculus
  siRNA target sequence for Tinag (NM_012033.2,980-998).
ctgtgctatggcaagtaga

SEQ ID NO: 582771 - DNA, 19 bp, Mus musculus
  siRNA target sequence for Tinag (NM_012033.2,1088-1106).
cagagtctcttccaatgaa

SEQ ID NO: 582772 - DNA, 19 bp, Mus musculus
  siRNA target sequence for Tinag (NM_012033.2,1350-1368).
ggagagaatggctatttta

SEQ ID NO: 582773 - DNA, 19 bp, Mus musculus
  siRNA target sequence for Tinag (NM_012033.2,1353-1371).
gagaatggctattttagga

SEQ ID NO: 582774 - DNA, 19 bp, Mus musculus
  siRNA target sequence for Tinag (NM_012033.2,1369-1387).
ggattcttcgaggagtaaa

SEQ ID NO: 582775 - DNA, 19 bp, Mus musculus
  siRNA target sequence for Tinag (NM_012033.2,1370-1388).
gattcttcgaggagtaaat

SEQ ID NO: 582776 - DNA, 19 bp, Mus musculus
  siRNA target sequence for Tinag (NM_012033.2,1389-1407).
gaatctgacattgagaaat

SEQ ID NO: 582777 - DNA, 19 bp, Mus musculus
  siRNA target sequence for Tinag (NM_012033.2,1424-1442).
gggccaactgacaagttca

SEQ ID NO: 582778 - DNA, 19 bp, Mus musculus
  siRNA target sequence for Tinag (NM_012033.2,1427-1445).
ccaactgacaagttcagat

SEQ ID NO: 582779 - DNA, 19 bp, Mus musculus
  siRNA target sequence for Uchrp (NM_009462.1,77-95).
cacaacccacagtatatct

SEQ ID NO: 582780 - DNA, 19 bp, Mus musculus
  siRNA target sequence for Uchrp (NM_009462.1,136-154).
gactccccgctcttctgtt

SEQ ID NO: 582781 - DNA, 19 bp, Mus musculus
  siRNA target sequence for Uchrp (NM_009462.1,284-302).
ccaactcctagctacagta

SEQ ID NO: 582782 - DNA, 19 bp, Mus musculus
  siRNA target sequence for Uchrp (NM_009462.1,290-308).
cctagctacagtatttcaa

SEQ ID NO: 582783 - DNA, 19 bp, Mus musculus
  siRNA target sequence for Uchrp (NM_009462.1,319-337).
cccccaggcacccgaattt

SEQ ID NO: 582784 - DNA, 19 bp, Mus musculus
  siRNA target sequence for Uchrp (NM_009462.1,320-338).
ccccaggcacccgaattta

SEQ ID NO: 582785 - DNA, 19 bp, Mus musculus
  siRNA target sequence for Uchrp (NM_009462.1,321-339).
cccaggcacccgaatttat

SEQ ID NO: 582786 - DNA, 19 bp, Mus musculus
  siRNA target sequence for Uchrp (NM_009462.1,325-343).
ggcacccgaatttatcctt

SEQ ID NO: 582787 - DNA, 19 bp, Mus musculus
  siRNA target sequence for Uchrp (NM_009462.1,341-359).
cttggttgtacgacttcta

SEQ ID NO: 582788 - DNA, 19 bp, Mus musculus
  siRNA target sequence for Uchrp (NM_009462.1,369-387).
ctgaagccgttgaaaaaga

SEQ ID NO: 582789 - DNA, 19 bp, Mus musculus
  siRNA target sequence for Uchrp (NM_009462.1,431-449).
gctctggaaagcaactcta

SEQ ID NO: 582790 - DNA, 19 bp, Mus musculus
  siRNA target sequence for Uchrp (NM_009462.1,432-450).
ctctggaaagcaactctaa

SEQ ID NO: 582791 - DNA, 19 bp, Mus musculus
  siRNA target sequence for Uchrp (NM_009462.1,536-554).
gggtactacagttatttga

SEQ ID NO: 582792 - DNA, 19 bp, Mus musculus
  siRNA target sequence for Uchrp (NM_009462.1,868-886).
cgttggcaccgatactact

SEQ ID NO: 582793 - DNA, 19 bp, Mus musculus
  siRNA target sequence for Uchrp (NM_009462.1,876-894).
ccgatactactgagaactt

SEQ ID NO: 582794 - DNA, 19 bp, Mus musculus
  siRNA target sequence for Uchrp (NM_009462.1,889-907).
gaacttcgcagttgctaat

SEQ ID NO: 582795 - DNA, 19 bp, Mus musculus
  siRNA target sequence for Uchrp (NM_009462.1,1077-1095).
gggctagtctctttcatga

SEQ ID NO: 582796 - DNA, 19 bp, Mus musculus
  siRNA target sequence for Uchrp (NM_009462.1,1124-1142).
gcgtatgtggaaactaagt

SEQ ID NO: 582797 - DNA, 19 bp, Mus musculus
  siRNA target sequence for Uchrp (NM_009462.1,1255-1273).
gactgtaaccctaatacat

SEQ ID NO: 582798 - DNA, 19 bp, Mus musculus
  siRNA target sequence for Uchrp (NM_009462.1,1257-1275).
ctgtaaccctaatacataa

SEQ ID NO: 582799 - DNA, 19 bp, Mus musculus
  siRNA target sequence for Uchrp (NM_009462.1,1293-1311).
cccgtgggctgatcaataa

SEQ ID NO: 582800 - DNA, 19 bp, Mus musculus
  siRNA target sequence for Uchrp (NM_009462.1,1294-1312).
ccgtgggctgatcaataaa

SEQ ID NO: 582801 - DNA, 19 bp, Mus musculus
  siRNA target sequence for Uchrp (NM_009462.1,1298-1316).
gggctgatcaataaaggaa

SEQ ID NO: 582802 - DNA, 19 bp, Mus musculus
  siRNA target sequence for Uchrp (NM_009462.1,1299-1317).
ggctgatcaataaaggaaa

SEQ ID NO: 582803 - DNA, 19 bp, Mus musculus
  siRNA target sequence for Uchrp (NM_009462.1,1354-1372).
ggcttgccctccgatgtat

SEQ ID NO: 582804 - DNA, 19 bp, Mus musculus
  siRNA target sequence for Uchrp (NM_009462.1,1356-1374).
cttgccctccgatgtatca

SEQ ID NO: 582805 - DNA, 19 bp, Mus musculus
  siRNA target sequence for Uchrp (NM_009462.1,1365-1383).
cgatgtatcacctgatgaa

SEQ ID NO: 582806 - DNA, 19 bp, Mus musculus
  siRNA target sequence for Uchrp (NM_009462.1,1422-1440).
catcaacgcccatgataga

SEQ ID NO: 582807 - DNA, 19 bp, Mus musculus
  siRNA target sequence for Uchrp (NM_009462.1,1428-1446).
cgcccatgatagatagctt

SEQ ID NO: 582808 - DNA, 19 bp, Mus musculus
  siRNA target sequence for Uchrp (NM_009462.1,1429-1447).
gcccatgatagatagcttt

SEQ ID NO: 582809 - DNA, 19 bp, Mus musculus
  siRNA target sequence for Uchrp (NM_009462.1,1444-1462).
ctttgttcggctcatgaat

SEQ ID NO: 582810 - DNA, 19 bp, Mus musculus
  siRNA target sequence for Uchrp (NM_009462.1,1503-1521).
ctctcggggataaaatcgt

SEQ ID NO: 582811 - DNA, 19 bp, Mus musculus
  siRNA target sequence for Uchrp (NM_009462.1,1569-1587).
gactcctgacagtcatcaa

SEQ ID NO: 582812 - DNA, 19 bp, Mus musculus
  siRNA target sequence for Uchrp (NM_009462.1,1694-1712).
cccacgcacgaaaaacact

SEQ ID NO: 582813 - DNA, 19 bp, Mus musculus
  siRNA target sequence for Uchrp (NM_009462.1,1700-1718).
cacgaaaaacactctgttt

SEQ ID NO: 582814 - DNA, 19 bp, Mus musculus
  siRNA target sequence for Uchrp (NM_009462.1,1725-1743).
ggcccagaagcgacttgat

SEQ ID NO: 582815 - DNA, 19 bp, Mus musculus
  siRNA target sequence for Uchrp (NM_009462.1,1726-1744).
gcccagaagcgacttgata

SEQ ID NO: 582816 - DNA, 19 bp, Mus musculus
  siRNA target sequence for Uchrp (NM_009462.1,1851-1869).
cgcccatcactggcatttt

SEQ ID NO: 582817 - DNA, 19 bp, Mus musculus
  siRNA target sequence for Uchrp (NM_009462.1,1852-1870).
gcccatcactggcattttt

SEQ ID NO: 582818 - DNA, 19 bp, Mus musculus
  siRNA target sequence for Uchrp (NM_009462.1,1917-1935).
cagctactctgcaactgtt

SEQ ID NO: 582819 - DNA, 19 bp, Mus musculus
  siRNA target sequence for Uchrp (NM_009462.1,1919-1937).
gctactctgcaactgtttt

SEQ ID NO: 582820 - DNA, 19 bp, Mus musculus
  siRNA target sequence for Uchrp (NM_009462.1,2024-2042).
ggttacaccaccaaaacca

SEQ ID NO: 582821 - DNA, 19 bp, Mus musculus
  siRNA target sequence for Uchrp (NM_009462.1,2025-2043).
gttacaccaccaaaaccaa

SEQ ID NO: 582822 - DNA, 19 bp, Mus musculus
  siRNA target sequence for Uchrp (NM_009462.1,2105-2123).
cacctgaagcgctttgtct

SEQ ID NO: 582823 - DNA, 19 bp, Mus musculus
  siRNA target sequence for Uchrp (NM_009462.1,2107-2125).
cctgaagcgctttgtctat

SEQ ID NO: 582824 - DNA, 19 bp, Mus musculus
  siRNA target sequence for Uchrp (NM_009462.1,2314-2332).
cttccagattgggcttaat

SEQ ID NO: 582825 - DNA, 19 bp, Mus musculus
  siRNA target sequence for Uchrp (NM_009462.1,2351-2369).
gaccaaacggtcaaggtta

SEQ ID NO: 582826 - DNA, 19 bp, Mus musculus
  siRNA target sequence for Uchrp (NM_009462.1,2354-2372).
caaacggtcaaggttatta

SEQ ID NO: 582827 - DNA, 19 bp, Mus musculus
  siRNA target sequence for Uchrp (NM_009462.1,2406-2424).
gcacagcctacctcctata

SEQ ID NO: 582828 - DNA, 19 bp, Mus musculus
  siRNA target sequence for Uchrp (NM_009462.1,2407-2425).
cacagcctacctcctatat

SEQ ID NO: 582829 - DNA, 19 bp, Mus musculus
  siRNA target sequence for Usp1 (NM_146144.2,492-510).
ggcgtcatacctagtgaaa

SEQ ID NO: 582830 - DNA, 19 bp, Mus musculus
  siRNA target sequence for Usp1 (NM_146144.2,528-546).
ggcagtccatccaagaaaa

SEQ ID NO: 582831 - DNA, 19 bp, Mus musculus
  siRNA target sequence for Usp1 (NM_146144.2,589-607).
gagccttagactttactga

SEQ ID NO: 582832 - DNA, 19 bp, Mus musculus
  siRNA target sequence for Usp1 (NM_146144.2,2392-2410).
ggaactacgacgatgaagt

SEQ ID NO: 582833 - DNA, 19 bp, Mus musculus
  siRNA target sequence for Usp1 (NM_146144.2,2393-2411).
gaactacgacgatgaagta

SEQ ID NO: 582834 - DNA, 19 bp, Mus musculus
  siRNA target sequence for Usp11 (NM_145628.2,707-725).
ggagactcgaaacaaagat

SEQ ID NO: 582835 - DNA, 19 bp, Mus musculus
  siRNA target sequence for Usp11 (NM_145628.2,964-982).
cctatgcagatctggtaaa

SEQ ID NO: 582836 - DNA, 19 bp, Mus musculus
  siRNA target sequence for Usp11 (NM_145628.2,1006-1024).
gctccattgtgccaaatgt

SEQ ID NO: 582837 - DNA, 19 bp, Mus musculus
  siRNA target sequence for Usp11 (NM_145628.2,1009-1027).
ccattgtgccaaatgtgtt

SEQ ID NO: 582838 - DNA, 19 bp, Mus musculus
  siRNA target sequence for Usp11 (NM_145628.2,1014-1032).
gtgccaaatgtgttcaaga

SEQ ID NO: 582839 - DNA, 19 bp, Mus musculus
  siRNA target sequence for Usp11 (NM_145628.2,1018-1036).
caaatgtgttcaagaacaa

SEQ ID NO: 582840 - DNA, 19 bp, Mus musculus
  siRNA target sequence for Usp11 (NM_145628.2,1031-1049).
gaacaaggttggccatttt

SEQ ID NO: 582841 - DNA, 19 bp, Mus musculus
  siRNA target sequence for Usp11 (NM_145628.2,1125-1143).
gatctcaatcgggtcaaaa

SEQ ID NO: 582842 - DNA, 19 bp, Mus musculus
  siRNA target sequence for Usp11 (NM_145628.2,1128-1146).
ctcaatcgggtcaaaaaga

SEQ ID NO: 582843 - DNA, 19 bp, Mus musculus
  siRNA target sequence for Usp11 (NM_145628.2,1130-1148).
caatcgggtcaaaaagaaa

SEQ ID NO: 582844 - DNA, 19 bp, Mus musculus
  siRNA target sequence for Usp11 (NM_145628.2,1134-1152).
cgggtcaaaaagaaagaat

SEQ ID NO: 582845 - DNA, 19 bp, Mus musculus
  siRNA target sequence for Usp11 (NM_145628.2,1214-1232).
gaaccataaacgacgaaat

SEQ ID NO: 582846 - DNA, 19 bp, Mus musculus
  siRNA target sequence for Usp11 (NM_145628.2,1217-1235).
ccataaacgacgaaatgat

SEQ ID NO: 582847 - DNA, 19 bp, Mus musculus
  siRNA target sequence for Usp11 (NM_145628.2,1218-1236).
cataaacgacgaaatgatt

SEQ ID NO: 582848 - DNA, 19 bp, Mus musculus
  siRNA target sequence for Usp11 (NM_145628.2,1277-1295).
cctggtgtgccctgattgt

SEQ ID NO: 582849 - DNA, 19 bp, Mus musculus
  siRNA target sequence for Usp11 (NM_145628.2,1286-1304).
ccctgattgtggcaatgtt

SEQ ID NO: 582850 - DNA, 19 bp, Mus musculus
  siRNA target sequence for Usp11 (NM_145628.2,1363-1381).
gggtcttggaagtcttctt

SEQ ID NO: 582851 - DNA, 19 bp, Mus musculus
  siRNA target sequence for Usp11 (NM_145628.2,1364-1382).
ggtcttggaagtcttcttt

SEQ ID NO: 582852 - DNA, 19 bp, Mus musculus
  siRNA target sequence for Usp11 (NM_145628.2,1431-1449).
cccaagaagggcaatatct

SEQ ID NO: 582853 - DNA, 19 bp, Mus musculus
  siRNA target sequence for Usp11 (NM_145628.2,1464-1482).
gctctgtccacgcatacaa

SEQ ID NO: 582854 - DNA, 19 bp, Mus musculus
  siRNA target sequence for Usp11 (NM_145628.2,1469-1487).
gtccacgcatacaagtgtt

SEQ ID NO: 582855 - DNA, 19 bp, Mus musculus
  siRNA target sequence for Usp11 (NM_145628.2,1483-1501).
gtgttgcaccagacaagat

SEQ ID NO: 582856 - DNA, 19 bp, Mus musculus
  siRNA target sequence for Usp11 (NM_145628.2,1489-1507).
caccagacaagatgatagt

SEQ ID NO: 582857 - DNA, 19 bp, Mus musculus
  siRNA target sequence for Usp11 (NM_145628.2,1517-1535).
cttcagtcaccgattctat

SEQ ID NO: 582858 - DNA, 19 bp, Mus musculus
  siRNA target sequence for Usp11 (NM_145628.2,1522-1540).
gtcaccgattctataagct

SEQ ID NO: 582859 - DNA, 19 bp, Mus musculus
  siRNA target sequence for Usp11 (NM_145628.2,1524-1542).
caccgattctataagcttt

SEQ ID NO: 582860 - DNA, 19 bp, Mus musculus
  siRNA target sequence for Usp11 (NM_145628.2,1528-1546).
gattctataagctttacca

SEQ ID NO: 582861 - DNA, 19 bp, Mus musculus
  siRNA target sequence for Usp11 (NM_145628.2,1574-1592).
ggatcgtgatgatatcttt

SEQ ID NO: 582862 - DNA, 19 bp, Mus musculus
  siRNA target sequence for Usp11 (NM_145628.2,1578-1596).
cgtgatgatatctttgtat

SEQ ID NO: 582863 - DNA, 19 bp, Mus musculus
  siRNA target sequence for Usp11 (NM_145628.2,1619-1637).
gccggttgagggttcaaga

SEQ ID NO: 582864 - DNA, 19 bp, Mus musculus
  siRNA target sequence for Usp11 (NM_145628.2,1678-1696).
catccagagactacaacaa

SEQ ID NO: 582865 - DNA, 19 bp, Mus musculus
  siRNA target sequence for Usp11 (NM_145628.2,1688-1706).
ctacaacaactcctactat

SEQ ID NO: 582866 - DNA, 19 bp, Mus musculus
  siRNA target sequence for Usp11 (NM_145628.2,1699-1717).
cctactatggtctgatact

SEQ ID NO: 582867 - DNA, 19 bp, Mus musculus
  siRNA target sequence for Usp11 (NM_145628.2,1700-1718).
ctactatggtctgatactt

SEQ ID NO: 582868 - DNA, 19 bp, Mus musculus
  siRNA target sequence for Usp11 (NM_145628.2,1784-1802).
cttgatgtaccgactttca

SEQ ID NO: 582869 - DNA, 19 bp, Mus musculus
  siRNA target sequence for Usp11 (NM_145628.2,1790-1808).
gtaccgactttcacgatat

SEQ ID NO: 582870 - DNA, 19 bp, Mus musculus
  siRNA target sequence for Usp11 (NM_145628.2,1916-1934).
gtctgcgcccactgttaat

SEQ ID NO: 582871 - DNA, 19 bp, Mus musculus
  siRNA target sequence for Usp11 (NM_145628.2,1993-2011).
gatgcccatccctcttaga

SEQ ID NO: 582872 - DNA, 19 bp, Mus musculus
  siRNA target sequence for Usp11 (NM_145628.2,2049-2067).
cgacgaaagcagctgttta

SEQ ID NO: 582873 - DNA, 19 bp, Mus musculus
  siRNA target sequence for Usp11 (NM_145628.2,2126-2144).
gcaaacccagccatacatt

SEQ ID NO: 582874 - DNA, 19 bp, Mus musculus
  siRNA target sequence for Usp11 (NM_145628.2,2136-2154).
ccatacattgccatggatt

SEQ ID NO: 582875 - DNA, 19 bp, Mus musculus
  siRNA target sequence for Usp11 (NM_145628.2,2151-2169).
gattgggaaccagatatga

SEQ ID NO: 582876 - DNA, 19 bp, Mus musculus
  siRNA target sequence for Usp11 (NM_145628.2,2163-2181).
gatatgaagaggcgttatt

SEQ ID NO: 582877 - DNA, 19 bp, Mus musculus
  siRNA target sequence for Usp11 (NM_145628.2,2339-2357).
ccagctggccaccaagaaa

SEQ ID NO: 582878 - DNA, 19 bp, Mus musculus
  siRNA target sequence for Usp11 (NM_145628.2,2372-2390).
gctacccgaagttctcatt

SEQ ID NO: 582879 - DNA, 19 bp, Mus musculus
  siRNA target sequence for Usp11 (NM_145628.2,2373-2391).
ctacccgaagttctcatta

SEQ ID NO: 582880 - DNA, 19 bp, Mus musculus
  siRNA target sequence for Usp11 (NM_145628.2,2377-2395).
ccgaagttctcattatcca

SEQ ID NO: 582881 - DNA, 19 bp, Mus musculus
  siRNA target sequence for Usp11 (NM_145628.2,2394-2412).
cacctgaagcgtttttcat

SEQ ID NO: 582882 - DNA, 19 bp, Mus musculus
  siRNA target sequence for Usp11 (NM_145628.2,2512-2530).
ctccagacctctacaaata

SEQ ID NO: 582883 - DNA, 19 bp, Mus musculus
  siRNA target sequence for Usp11 (NM_145628.2,2515-2533).
cagacctctacaaatatga

SEQ ID NO: 582884 - DNA, 19 bp, Mus musculus
  siRNA target sequence for Usp11 (NM_145628.2,2540-2558).
cgcagtttccaaccattat

SEQ ID NO: 582885 - DNA, 19 bp, Mus musculus
  siRNA target sequence for Usp11 (NM_145628.2,2564-2582).
catgcgtgatggacactat

SEQ ID NO: 582886 - DNA, 19 bp, Mus musculus
  siRNA target sequence for Usp11 (NM_145628.2,2567-2585).
gcgtgatggacactataca

SEQ ID NO: 582887 - DNA, 19 bp, Mus musculus
  siRNA target sequence for Usp11 (NM_145628.2,2568-2586).
cgtgatggacactatacaa

SEQ ID NO: 582888 - DNA, 19 bp, Mus musculus
  siRNA target sequence for Usp11 (NM_145628.2,2617-2635).
ggcactactttgatgacaa

SEQ ID NO: 582889 - DNA, 19 bp, Mus musculus
  siRNA target sequence for Usp11 (NM_145628.2,2618-2636).
gcactactttgatgacaat

SEQ ID NO: 582890 - DNA, 19 bp, Mus musculus
  siRNA target sequence for Usp11 (NM_145628.2,2619-2637).
cactactttgatgacaata

SEQ ID NO: 582891 - DNA, 19 bp, Mus musculus
  siRNA target sequence for Usp11 (NM_145628.2,2676-2694).
gcagcctatgtcttgttct

SEQ ID NO: 582892 - DNA, 19 bp, Mus musculus
  siRNA target sequence for Usp11 (NM_145628.2,2677-2695).
cagcctatgtcttgttcta

SEQ ID NO: 582893 - DNA, 19 bp, Mus musculus
  siRNA target sequence for Usp14 (NM_021522.2,155-173).
cactctactctgttacagt

SEQ ID NO: 582894 - DNA, 19 bp, Mus musculus
  siRNA target sequence for Usp14 (NM_021522.2,157-175).
ctctactctgttacagtaa

SEQ ID NO: 582895 - DNA, 19 bp, Mus musculus
  siRNA target sequence for Usp14 (NM_021522.2,159-177).
ctactctgttacagtaaaa

SEQ ID NO: 582896 - DNA, 19 bp, Mus musculus
  siRNA target sequence for Usp14 (NM_021522.2,189-207).
gaagtttgaaggtgtagaa

SEQ ID NO: 582897 - DNA, 19 bp, Mus musculus
  siRNA target sequence for Usp14 (NM_021522.2,237-255).
caaagcccagctttttgca

SEQ ID NO: 582898 - DNA, 19 bp, Mus musculus
  siRNA target sequence for Usp14 (NM_021522.2,270-288).
gccagccagacaaaaagtt

SEQ ID NO: 582899 - DNA, 19 bp, Mus musculus
  siRNA target sequence for Usp14 (NM_021522.2,272-290).
cagccagacaaaaagttat

SEQ ID NO: 582900 - DNA, 19 bp, Mus musculus
  siRNA target sequence for Usp14 (NM_021522.2,275-293).
ccagacaaaaagttatggt

SEQ ID NO: 582901 - DNA, 19 bp, Mus musculus
  siRNA target sequence for Usp14 (NM_021522.2,319-337).
gactggggaaacatcaaaa

SEQ ID NO: 582902 - DNA, 19 bp, Mus musculus
  siRNA target sequence for Usp14 (NM_021522.2,346-364).
ggaatgactgtactaatga

SEQ ID NO: 582903 - DNA, 19 bp, Mus musculus
  siRNA target sequence for Usp14 (NM_021522.2,347-365).
gaatgactgtactaatgat

SEQ ID NO: 582904 - DNA, 19 bp, Mus musculus
  siRNA target sequence for Usp14 (NM_021522.2,438-456).
gttagcaaccgctatggaa

SEQ ID NO: 582905 - DNA, 19 bp, Mus musculus
  siRNA target sequence for Usp14 (NM_021522.2,610-628).
gcagctcttagagatttgt

SEQ ID NO: 582906 - DNA, 19 bp, Mus musculus
  siRNA target sequence for Usp14 (NM_021522.2,620-638).
gagatttgtttgattccat

SEQ ID NO: 582907 - DNA, 19 bp, Mus musculus
  siRNA target sequence for Usp14 (NM_021522.2,636-654).
catggataaaacttcttct

SEQ ID NO: 582908 - DNA, 19 bp, Mus musculus
  siRNA target sequence for Usp14 (NM_021522.2,639-657).
ggataaaacttcttctagt

SEQ ID NO: 582909 - DNA, 19 bp, Mus musculus
  siRNA target sequence for Usp14 (NM_021522.2,653-671).
ctagtatcccacctattat

SEQ ID NO: 582910 - DNA, 19 bp, Mus musculus
  siRNA target sequence for Usp14 (NM_021522.2,719-737).
gcgaacaagggcagtatct

SEQ ID NO: 582911 - DNA, 19 bp, Mus musculus
  siRNA target sequence for Usp14 (NM_021522.2,720-738).
cgaacaagggcagtatctt

SEQ ID NO: 582912 - DNA, 19 bp, Mus musculus
  siRNA target sequence for Usp14 (NM_021522.2,845-863).
cagcggtgacaccttctaa

SEQ ID NO: 582913 - DNA, 19 bp, Mus musculus
  siRNA target sequence for Usp14 (NM_021522.2,892-910).
ggtgttgagtttgaaacta

SEQ ID NO: 582914 - DNA, 19 bp, Mus musculus
  siRNA target sequence for Usp14 (NM_021522.2,912-930).
catgaaatgtacagaatct

SEQ ID NO: 582915 - DNA, 19 bp, Mus musculus
  siRNA target sequence for Usp14 (NM_021522.2,967-985).
cttcaacttagttgtttca

SEQ ID NO: 582916 - DNA, 19 bp, Mus musculus
  siRNA target sequence for Usp14 (NM_021522.2,1026-1044).
gcgacttcaggaagaaatt

SEQ ID NO: 582917 - DNA, 19 bp, Mus musculus
  siRNA target sequence for Usp14 (NM_021522.2,1103-1121).
gccggctacctgcttactt

SEQ ID NO: 582918 - DNA, 19 bp, Mus musculus
  siRNA target sequence for Usp14 (NM_021522.2,1104-1122).
ccggctacctgcttactta

SEQ ID NO: 582919 - DNA, 19 bp, Mus musculus
  siRNA target sequence for Usp14 (NM_021522.2,1105-1123).
cggctacctgcttacttaa

SEQ ID NO: 582920 - DNA, 19 bp, Mus musculus
  siRNA target sequence for Usp14 (NM_021522.2,1108-1126).
ctacctgcttacttaacta

SEQ ID NO: 582921 - DNA, 19 bp, Mus musculus
  siRNA target sequence for Usp14 (NM_021522.2,1112-1130).
ctgcttacttaactattca

SEQ ID NO: 582922 - DNA, 19 bp, Mus musculus
  siRNA target sequence for Usp14 (NM_021522.2,1114-1132).
gcttacttaactattcaaa

SEQ ID NO: 582923 - DNA, 19 bp, Mus musculus
  siRNA target sequence for Usp14 (NM_021522.2,1124-1142).
ctattcaaatggttcgatt

SEQ ID NO: 582924 - DNA, 19 bp, Mus musculus
  siRNA target sequence for Usp14 (NM_021522.2,1129-1147).
caaatggttcgattttttt

SEQ ID NO: 582925 - DNA, 19 bp, Mus musculus
  siRNA target sequence for Usp14 (NM_021522.2,1165-1183).
gtgaacgccaaagttctta

SEQ ID NO: 582926 - DNA, 19 bp, Mus musculus
  siRNA target sequence for Usp14 (NM_021522.2,1170-1188).
cgccaaagttcttaaggat

SEQ ID NO: 582927 - DNA, 19 bp, Mus musculus
  siRNA target sequence for Usp14 (NM_021522.2,1199-1217).
ctcttatgttggatgtgta

SEQ ID NO: 582928 - DNA, 19 bp, Mus musculus
  siRNA target sequence for Usp14 (NM_021522.2,1256-1274).
cttttcggtcaaaattcaa

SEQ ID NO: 582929 - DNA, 19 bp, Mus musculus
  siRNA target sequence for Usp14 (NM_021522.2,1328-1346).
gtcctccgaaagagattaa

SEQ ID NO: 582930 - DNA, 19 bp, Mus musculus
  siRNA target sequence for Usp14 (NM_021522.2,1330-1348).
cctccgaaagagattaagt

SEQ ID NO: 582931 - DNA, 19 bp, Mus musculus
  siRNA target sequence for Usp14 (NM_021522.2,1369-1387).
gacgatattggctccaata

SEQ ID NO: 582932 - DNA, 19 bp, Mus musculus
  siRNA target sequence for Usp14 (NM_021522.2,1371-1389).
cgatattggctccaataat

SEQ ID NO: 582933 - DNA, 19 bp, Mus musculus
  siRNA target sequence for Usp14 (NM_021522.2,1383-1401).
caataattgtggctactat

SEQ ID NO: 582934 - DNA, 19 bp, Mus musculus
  siRNA target sequence for Usp14 (NM_021522.2,1391-1409).
gtggctactatgacttaca

SEQ ID NO: 582935 - DNA, 19 bp, Mus musculus
  siRNA target sequence for Usp14 (NM_021522.2,1402-1420).
gacttacaagcagtgttaa

SEQ ID NO: 582936 - DNA, 19 bp, Mus musculus
  siRNA target sequence for Usp14 (NM_021522.2,1504-1522).
gataaggtcagcattgtaa

SEQ ID NO: 582937 - DNA, 19 bp, Mus musculus
  siRNA target sequence for Usp14 (NM_021522.2,1563-1581).
gcacattgcttatgttcta

SEQ ID NO: 582938 - DNA, 19 bp, Mus musculus
  siRNA target sequence for Usp14 (NM_021522.2,1588-1606).
gggcctcgaagagttgaaa

SEQ ID NO: 582939 - DNA, 19 bp, Mus musculus
  siRNA target sequence for Usp14 (NM_021522.2,1589-1607).
ggcctcgaagagttgaaat

SEQ ID NO: 582940 - DNA, 19 bp, Mus musculus
  siRNA target sequence for Usp14 (NM_021522.2,1590-1608).
gcctcgaagagttgaaata

SEQ ID NO: 582941 - DNA, 19 bp, Mus musculus
  siRNA target sequence for Usp14 (NM_021522.2,1591-1609).
cctcgaagagttgaaataa

SEQ ID NO: 582942 - DNA, 19 bp, Mus musculus
  siRNA target sequence for Usp15 (NM_027604.2,57-75).
gcgacgctgctcaaaacct

SEQ ID NO: 582943 - DNA, 19 bp, Mus musculus
  siRNA target sequence for Usp15 (NM_027604.2,88-106).
gggacacctggtatctagt

SEQ ID NO: 582944 - DNA, 19 bp, Mus musculus
  siRNA target sequence for Usp15 (NM_027604.2,89-107).
ggacacctggtatctagta

SEQ ID NO: 582945 - DNA, 19 bp, Mus musculus
  siRNA target sequence for Usp15 (NM_027604.2,92-110).
cacctggtatctagtagat

SEQ ID NO: 582946 - DNA, 19 bp, Mus musculus
  siRNA target sequence for Usp15 (NM_027604.2,173-191).
gggagatcaaaatgtctat

SEQ ID NO: 582947 - DNA, 19 bp, Mus musculus
  siRNA target sequence for Usp15 (NM_027604.2,228-246).
ggcgacgcgcagtcactta

SEQ ID NO: 582948 - DNA, 19 bp, Mus musculus
  siRNA target sequence for Usp15 (NM_027604.2,229-247).
gcgacgcgcagtcacttaa

SEQ ID NO: 582949 - DNA, 19 bp, Mus musculus
  siRNA target sequence for Usp15 (NM_027604.2,289-307).
ctgagggctggaataaact

SEQ ID NO: 582950 - DNA, 19 bp, Mus musculus
  siRNA target sequence for Usp15 (NM_027604.2,332-350).
gggccaggagccaatagca

SEQ ID NO: 582951 - DNA, 19 bp, Mus musculus
  siRNA target sequence for Usp15 (NM_027604.2,359-377).
ggtagaacagggtatgttt

SEQ ID NO: 582952 - DNA, 19 bp, Mus musculus
  siRNA target sequence for Usp15 (NM_027604.2,363-381).
gaacagggtatgtttgtaa

SEQ ID NO: 582953 - DNA, 19 bp, Mus musculus
  siRNA target sequence for Usp15 (NM_027604.2,426-444).
gagaacgggaacatgaaca

SEQ ID NO: 582954 - DNA, 19 bp, Mus musculus
  siRNA target sequence for Usp15 (NM_027604.2,428-446).
gaacgggaacatgaacaat

SEQ ID NO: 582955 - DNA, 19 bp, Mus musculus
  siRNA target sequence for Usp15 (NM_027604.2,447-465).
gttgtaactcggaggttta

SEQ ID NO: 582956 - DNA, 19 bp, Mus musculus
  siRNA target sequence for Usp15 (NM_027604.2,450-468).
gtaactcggaggtttagca

SEQ ID NO: 582957 - DNA, 19 bp, Mus musculus
  siRNA target sequence for Usp15 (NM_027604.2,466-484).
gcaaagctgacacaataga

SEQ ID NO: 582958 - DNA, 19 bp, Mus musculus
  siRNA target sequence for Usp15 (NM_027604.2,467-485).
caaagctgacacaatagat

SEQ ID NO: 582959 - DNA, 19 bp, Mus musculus
  siRNA target sequence for Usp15 (NM_027604.2,472-490).
ctgacacaatagatacgat

SEQ ID NO: 582960 - DNA, 19 bp, Mus musculus
  siRNA target sequence for Usp15 (NM_027604.2,488-506).
gattgagaaggaaataaga

SEQ ID NO: 582961 - DNA, 19 bp, Mus musculus
  siRNA target sequence for Usp15 (NM_027604.2,696-714).
ccaggtgcatccaattttt

SEQ ID NO: 582962 - DNA, 19 bp, Mus musculus
  siRNA target sequence for Usp15 (NM_027604.2,703-721).
catccaatttttcaacttt

SEQ ID NO: 582963 - DNA, 19 bp, Mus musculus
  siRNA target sequence for Usp15 (NM_027604.2,739-757).
catctctatcaaataatta

SEQ ID NO: 582964 - DNA, 19 bp, Mus musculus
  siRNA target sequence for Usp15 (NM_027604.2,803-821).
cccgtcatatactgcttat

SEQ ID NO: 582965 - DNA, 19 bp, Mus musculus
  siRNA target sequence for Usp15 (NM_027604.2,805-823).
cgtcatatactgcttataa

SEQ ID NO: 582966 - DNA, 19 bp, Mus musculus
  siRNA target sequence for Usp15 (NM_027604.2,817-835).
cttataagaactatgatta

SEQ ID NO: 582967 - DNA, 19 bp, Mus musculus
  siRNA target sequence for Usp15 (NM_027604.2,867-885).
ggcctgtgtggcttaagta

SEQ ID NO: 582968 - DNA, 19 bp, Mus musculus
  siRNA target sequence for Usp15 (NM_027604.2,868-886).
gcctgtgtggcttaagtaa

SEQ ID NO: 582969 - DNA, 19 bp, Mus musculus
  siRNA target sequence for Usp15 (NM_027604.2,870-888).
ctgtgtggcttaagtaact

SEQ ID NO: 582970 - DNA, 19 bp, Mus musculus
  siRNA target sequence for Usp15 (NM_027604.2,932-950).
caacacacctccacttact

SEQ ID NO: 582971 - DNA, 19 bp, Mus musculus
  siRNA target sequence for Usp15 (NM_027604.2,939-957).
cctccacttactgaatatt

SEQ ID NO: 582972 - DNA, 19 bp, Mus musculus
  siRNA target sequence for Usp15 (NM_027604.2,949-967).
ctgaatatttcctcaatga

SEQ ID NO: 582973 - DNA, 19 bp, Mus musculus
  siRNA target sequence for Usp15 (NM_027604.2,995-1013).
caatcccttaggaatgaga

SEQ ID NO: 582974 - DNA, 19 bp, Mus musculus
  siRNA target sequence for Usp15 (NM_027604.2,1010-1028).
gagaggtgaaatagctaaa

SEQ ID NO: 582975 - DNA, 19 bp, Mus musculus
  siRNA target sequence for Usp15 (NM_027604.2,1014-1032).
ggtgaaatagctaaatcat

SEQ ID NO: 582976 - DNA, 19 bp, Mus musculus
  siRNA target sequence for Usp15 (NM_027604.2,1030-1048).
catacgctgaactcatcaa

SEQ ID NO: 582977 - DNA, 19 bp, Mus musculus
  siRNA target sequence for Usp15 (NM_027604.2,1057-1075).
ggtctggaaagtttagcta

SEQ ID NO: 582978 - DNA, 19 bp, Mus musculus
  siRNA target sequence for Usp15 (NM_027604.2,1142-1160).
gcaggactgccaagaacta

SEQ ID NO: 582979 - DNA, 19 bp, Mus musculus
  siRNA target sequence for Usp15 (NM_027604.2,1185-1203).
cacgaggacctgaatagaa

SEQ ID NO: 582980 - DNA, 19 bp, Mus musculus
  siRNA target sequence for Usp15 (NM_027604.2,1187-1205).
cgaggacctgaatagaatt

SEQ ID NO: 582981 - DNA, 19 bp, Mus musculus
  siRNA target sequence for Usp15 (NM_027604.2,1188-1206).
gaggacctgaatagaatta

SEQ ID NO: 582982 - DNA, 19 bp, Mus musculus
  siRNA target sequence for Usp15 (NM_027604.2,1191-1209).
gacctgaatagaattagga

SEQ ID NO: 582983 - DNA, 19 bp, Mus musculus
  siRNA target sequence for Usp15 (NM_027604.2,1273-1291).
cctgggagaaccatttaaa

SEQ ID NO: 582984 - DNA, 19 bp, Mus musculus
  siRNA target sequence for Usp15 (NM_027604.2,1283-1301).
ccatttaaagcgaaatgat

SEQ ID NO: 582985 - DNA, 19 bp, Mus musculus
  siRNA target sequence for Usp15 (NM_027604.2,1284-1302).
catttaaagcgaaatgatt

SEQ ID NO: 582986 - DNA, 19 bp, Mus musculus
  siRNA target sequence for Usp15 (NM_027604.2,1292-1310).
gcgaaatgattccatcata

SEQ ID NO: 582987 - DNA, 19 bp, Mus musculus
  siRNA target sequence for Usp15 (NM_027604.2,1303-1321).
ccatcatagtagacatatt

SEQ ID NO: 582988 - DNA, 19 bp, Mus musculus
  siRNA target sequence for Usp15 (NM_027604.2,1328-1346).
ccttttcaagtctacgtta

SEQ ID NO: 582989 - DNA, 19 bp, Mus musculus
  siRNA target sequence for Usp15 (NM_027604.2,1353-1371).
cctgagtgtgctaagatct

SEQ ID NO: 582990 - DNA, 19 bp, Mus musculus
  siRNA target sequence for Usp15 (NM_027604.2,1383-1401).
gaccctttctgttacttga

SEQ ID NO: 582991 - DNA, 19 bp, Mus musculus
  siRNA target sequence for Usp15 (NM_027604.2,1393-1411).
gttacttgactcttccatt

SEQ ID NO: 582992 - DNA, 19 bp, Mus musculus
  siRNA target sequence for Usp15 (NM_027604.2,1408-1426).
cattgcctatgaaaaaaga

SEQ ID NO: 582993 - DNA, 19 bp, Mus musculus
  siRNA target sequence for Usp15 (NM_027604.2,1425-1443).
gaacgtagcttggaagttt

SEQ ID NO: 582994 - DNA, 19 bp, Mus musculus
  siRNA target sequence for Usp15 (NM_027604.2,1453-1471).
gaatggatccacttgctaa

SEQ ID NO: 582995 - DNA, 19 bp, Mus musculus
  siRNA target sequence for Usp15 (NM_027604.2,1464-1482).
cttgctaaacctatgcaat

SEQ ID NO: 582996 - DNA, 19 bp, Mus musculus
  siRNA target sequence for Usp15 (NM_027604.2,1467-1485).
gctaaacctatgcaataca

SEQ ID NO: 582997 - DNA, 19 bp, Mus musculus
  siRNA target sequence for Usp15 (NM_027604.2,1468-1486).
ctaaacctatgcaatacaa

SEQ ID NO: 582998 - DNA, 19 bp, Mus musculus
  siRNA target sequence for Usp15 (NM_027604.2,1506-1524).
ggaaatatactagatcttt

SEQ ID NO: 582999 - DNA, 19 bp, Mus musculus
  siRNA target sequence for Usp15 (NM_027604.2,1546-1564).
cgggagtacctgcagataa

SEQ ID NO: 583000 - DNA, 19 bp, Mus musculus
  siRNA target sequence for Usp15 (NM_027604.2,1565-1583).
gatgatagtcactgacata

SEQ ID NO: 583001 - DNA, 19 bp, Mus musculus
  siRNA target sequence for Usp15 (NM_027604.2,1578-1596).
gacatatacaatcatagat

SEQ ID NO: 583002 - DNA, 19 bp, Mus musculus
  siRNA target sequence for Usp15 (NM_027604.2,1580-1598).
catatacaatcatagattt

SEQ ID NO: 583003 - DNA, 19 bp, Mus musculus
  siRNA target sequence for Usp15 (NM_027604.2,1650-1668).
gatatttacgtgtttgaaa

SEQ ID NO: 583004 - DNA, 19 bp, Mus musculus
  siRNA target sequence for Usp15 (NM_027604.2,1793-1811).
ggctataccacgaaacaat

SEQ ID NO: 583005 - DNA, 19 bp, Mus musculus
  siRNA target sequence for Usp15 (NM_027604.2,1794-1812).
gctataccacgaaacaata

SEQ ID NO: 583006 - DNA, 19 bp, Mus musculus
  siRNA target sequence for Usp15 (NM_027604.2,1803-1821).
cgaaacaatactgaagata

SEQ ID NO: 583007 - DNA, 19 bp, Mus musculus
  siRNA target sequence for Usp15 (NM_027604.2,1846-1864).
gaatgtgccggtatgtcaa

SEQ ID NO: 583008 - DNA, 19 bp, Mus musculus
  siRNA target sequence for Usp15 (NM_027604.2,1854-1872).
cggtatgtcaaaatgtcta

SEQ ID NO: 583009 - DNA, 19 bp, Mus musculus
  siRNA target sequence for Usp15 (NM_027604.2,1907-1925).
ctgtgaggaccagaatatt

SEQ ID NO: 583010 - DNA, 19 bp, Mus musculus
  siRNA target sequence for Usp15 (NM_027604.2,1909-1927).
gtgaggaccagaatattaa

SEQ ID NO: 583011 - DNA, 19 bp, Mus musculus
  siRNA target sequence for Usp15 (NM_027604.2,1936-1954).
ggccaaatggcctacatga

SEQ ID NO: 583012 - DNA, 19 bp, Mus musculus
  siRNA target sequence for Usp15 (NM_027604.2,2041-2059).
gtcagtctgaagattcagt

SEQ ID NO: 583013 - DNA, 19 bp, Mus musculus
  siRNA target sequence for Usp15 (NM_027604.2,2064-2082).
ggagataacgattctgaaa

SEQ ID NO: 583014 - DNA, 19 bp, Mus musculus
  siRNA target sequence for Usp15 (NM_027604.2,2065-2083).
gagataacgattctgaaaa

SEQ ID NO: 583015 - DNA, 19 bp, Mus musculus
  siRNA target sequence for Usp15 (NM_027604.2,2115-2133).
caacttacgggacacaaaa

SEQ ID NO: 583016 - DNA, 19 bp, Mus musculus
  siRNA target sequence for Usp15 (NM_027604.2,2127-2145).
cacaaaaagcgcttgttta

SEQ ID NO: 583017 - DNA, 19 bp, Mus musculus
  siRNA target sequence for Usp15 (NM_027604.2,2129-2147).
caaaaagcgcttgtttaca

SEQ ID NO: 583018 - DNA, 19 bp, Mus musculus
  siRNA target sequence for Usp15 (NM_027604.2,2201-2219).
cagtcacatccgattcgat

SEQ ID NO: 583019 - DNA, 19 bp, Mus musculus
  siRNA target sequence for Usp15 (NM_027604.2,2232-2250).
cggctggacgaaagatctt

SEQ ID NO: 583020 - DNA, 19 bp, Mus musculus
  siRNA target sequence for Usp15 (NM_027604.2,2233-2251).
ggctggacgaaagatcttt

SEQ ID NO: 583021 - DNA, 19 bp, Mus musculus
  siRNA target sequence for Usp15 (NM_027604.2,2234-2252).
gctggacgaaagatctttt

SEQ ID NO: 583022 - DNA, 19 bp, Mus musculus
  siRNA target sequence for Usp15 (NM_027604.2,2274-2292).
gacttgaagaagagatact

SEQ ID NO: 583023 - DNA, 19 bp, Mus musculus
  siRNA target sequence for Usp15 (NM_027604.2,2415-2433).
gctgaggacccctggtatt

SEQ ID NO: 583024 - DNA, 19 bp, Mus musculus
  siRNA target sequence for Usp15 (NM_027604.2,2423-2441).
cccctggtattgtccaaat

SEQ ID NO: 583025 - DNA, 19 bp, Mus musculus
  siRNA target sequence for Usp15 (NM_027604.2,2426-2444).
ctggtattgtccaaattgt

SEQ ID NO: 583026 - DNA, 19 bp, Mus musculus
  siRNA target sequence for Usp15 (NM_027604.2,2429-2447).
gtattgtccaaattgtaaa

SEQ ID NO: 583027 - DNA, 19 bp, Mus musculus
  siRNA target sequence for Usp15 (NM_027604.2,2461-2479).
ccacaaagaaattagatct

SEQ ID NO: 583028 - DNA, 19 bp, Mus musculus
  siRNA target sequence for Usp15 (NM_027604.2,2502-2520).
gtggtgcatctcaagagat

SEQ ID NO: 583029 - DNA, 19 bp, Mus musculus
  siRNA target sequence for Usp15 (NM_027604.2,2513-2531).
caagagattctcctatagt

SEQ ID NO: 583030 - DNA, 19 bp, Mus musculus
  siRNA target sequence for Usp15 (NM_027604.2,2540-2558).
gagagacaagctagataca

SEQ ID NO: 583031 - DNA, 19 bp, Mus musculus
  siRNA target sequence for Usp15 (NM_027604.2,2585-2603).
ggatatgtcagaattccta

SEQ ID NO: 583032 - DNA, 19 bp, Mus musculus
  siRNA target sequence for Usp15 (NM_027604.2,2600-2618).
cctaattaacccaaatgca

SEQ ID NO: 583033 - DNA, 19 bp, Mus musculus
  siRNA target sequence for Usp15 (NM_027604.2,2623-2641).
cttgccgctataatttgat

SEQ ID NO: 583034 - DNA, 19 bp, Mus musculus
  siRNA target sequence for Usp15 (NM_027604.2,2669-2687).
gggaggaggacattatact

SEQ ID NO: 583035 - DNA, 19 bp, Mus musculus
  siRNA target sequence for Usp15 (NM_027604.2,2679-2697).
cattatactgcttttgcaa

SEQ ID NO: 583036 - DNA, 19 bp, Mus musculus
  siRNA target sequence for Usp15 (NM_027604.2,2713-2731).
ggaagtggtactatttcga

SEQ ID NO: 583037 - DNA, 19 bp, Mus musculus
  siRNA target sequence for Usp15 (NM_027604.2,2714-2732).
gaagtggtactatttcgat

SEQ ID NO: 583038 - DNA, 19 bp, Mus musculus
  siRNA target sequence for Usp15 (NM_027604.2,2801-2819).
gagacaggacactttcagt

SEQ ID NO: 583039 - DNA, 19 bp, Mus musculus
  siRNA target sequence for Usp15 (NM_027604.2,2835-2853).
cctcttgaccgagaaacta

SEQ ID NO: 583040 - DNA, 19 bp, Mus musculus
  siRNA target sequence for Usp16 (NM_024258.1,229-247).
ctgccaagactgtaagact

SEQ ID NO: 583041 - DNA, 19 bp, Mus musculus
  siRNA target sequence for Usp16 (NM_024258.1,236-254).
gactgtaagactgacaata

SEQ ID NO: 583042 - DNA, 19 bp, Mus musculus
  siRNA target sequence for Usp16 (NM_024258.1,240-258).
gtaagactgacaataaagt

SEQ ID NO: 583043 - DNA, 19 bp, Mus musculus
  siRNA target sequence for Usp16 (NM_024258.1,248-266).
gacaataaagtgaaagata

SEQ ID NO: 583044 - DNA, 19 bp, Mus musculus
  siRNA target sequence for Usp16 (NM_024258.1,294-312).
cggtttggctctgtcttaa

SEQ ID NO: 583045 - DNA, 19 bp, Mus musculus
  siRNA target sequence for Usp16 (NM_024258.1,443-461).
gacgaggaagtcaagtact

SEQ ID NO: 583046 - DNA, 19 bp, Mus musculus
  siRNA target sequence for Usp16 (NM_024258.1,480-498).
gccaagtggttgattatgt

SEQ ID NO: 583047 - DNA, 19 bp, Mus musculus
  siRNA target sequence for Usp16 (NM_024258.1,510-528).
ctggcgtaagaacttcaaa

SEQ ID NO: 583048 - DNA, 19 bp, Mus musculus
  siRNA target sequence for Usp16 (NM_024258.1,514-532).
cgtaagaacttcaaaacca

SEQ ID NO: 583049 - DNA, 19 bp, Mus musculus
  siRNA target sequence for Usp16 (NM_024258.1,549-567).
gacacattgagctcgaaaa

SEQ ID NO: 583050 - DNA, 19 bp, Mus musculus
  siRNA target sequence for Usp16 (NM_024258.1,557-575).
gagctcgaaaataaaaaat

SEQ ID NO: 583051 - DNA, 19 bp, Mus musculus
  siRNA target sequence for Usp16 (NM_024258.1,615-633).
cggaaaacctggctaaaga

SEQ ID NO: 583052 - DNA, 19 bp, Mus musculus
  siRNA target sequence for Usp16 (NM_024258.1,647-665).
gactctgcttcccagataa

SEQ ID NO: 583053 - DNA, 19 bp, Mus musculus
  siRNA target sequence for Usp16 (NM_024258.1,649-667).
ctctgcttcccagataact

SEQ ID NO: 583054 - DNA, 19 bp, Mus musculus
  siRNA target sequence for Usp16 (NM_024258.1,666-684).
ctgtgaaaggactcagtaa

SEQ ID NO: 583055 - DNA, 19 bp, Mus musculus
  siRNA target sequence for Usp16 (NM_024258.1,668-686).
gtgaaaggactcagtaatt

SEQ ID NO: 583056 - DNA, 19 bp, Mus musculus
  siRNA target sequence for Usp16 (NM_024258.1,679-697).
cagtaatttggggaatact

SEQ ID NO: 583057 - DNA, 19 bp, Mus musculus
  siRNA target sequence for Usp16 (NM_024258.1,710-728).
gcagttatgcagaacttgt

SEQ ID NO: 583058 - DNA, 19 bp, Mus musculus
  siRNA target sequence for Usp16 (NM_024258.1,740-758).
gtgcttagagaactactaa

SEQ ID NO: 583059 - DNA, 19 bp, Mus musculus
  siRNA target sequence for Usp16 (NM_024258.1,747-765).
gagaactactaaaagaagt

SEQ ID NO: 583060 - DNA, 19 bp, Mus musculus
  siRNA target sequence for Usp16 (NM_024258.1,766-784).
gaagatgtctggaacgatt

SEQ ID NO: 583061 - DNA, 19 bp, Mus musculus
  siRNA target sequence for Usp16 (NM_024258.1,772-790).
gtctggaacgattgtaaaa

SEQ ID NO: 583062 - DNA, 19 bp, Mus musculus
  siRNA target sequence for Usp16 (NM_024258.1,774-792).
ctggaacgattgtaaaaat

SEQ ID NO: 583063 - DNA, 19 bp, Mus musculus
  siRNA target sequence for Usp16 (NM_024258.1,777-795).
gaacgattgtaaaaataga

SEQ ID NO: 583064 - DNA, 19 bp, Mus musculus
  siRNA target sequence for Usp16 (NM_024258.1,904-922).
gcgagttgtgacacctaaa

SEQ ID NO: 583065 - DNA, 19 bp, Mus musculus
  siRNA target sequence for Usp16 (NM_024258.1,906-924).
gagttgtgacacctaaaga

SEQ ID NO: 583066 - DNA, 19 bp, Mus musculus
  siRNA target sequence for Usp16 (NM_024258.1,928-946).
cttttctcaggtctgtaaa

SEQ ID NO: 583067 - DNA, 19 bp, Mus musculus
  siRNA target sequence for Usp16 (NM_024258.1,935-953).
caggtctgtaaaaaagcaa

SEQ ID NO: 583068 - DNA, 19 bp, Mus musculus
  siRNA target sequence for Usp16 (NM_024258.1,1163-1181).
ggtggcgagctgactagta

SEQ ID NO: 583069 - DNA, 19 bp, Mus musculus
  siRNA target sequence for Usp16 (NM_024258.1,1212-1230).
ccttagtgcatgaatcgtt

SEQ ID NO: 583070 - DNA, 19 bp, Mus musculus
  siRNA target sequence for Usp16 (NM_024258.1,1220-1238).
catgaatcgttccttgatt

SEQ ID NO: 583071 - DNA, 19 bp, Mus musculus
  siRNA target sequence for Usp16 (NM_024258.1,1240-1258).
gtctcttccagttttagat

SEQ ID NO: 583072 - DNA, 19 bp, Mus musculus
  siRNA target sequence for Usp16 (NM_024258.1,1343-1361).
gatgacagctacatgaaat

SEQ ID NO: 583073 - DNA, 19 bp, Mus musculus
  siRNA target sequence for Usp16 (NM_024258.1,1346-1364).
gacagctacatgaaatcaa

SEQ ID NO: 583074 - DNA, 19 bp, Mus musculus
  siRNA target sequence for Usp16 (NM_024258.1,1614-1632).
ctgttaaccagaaggattt

SEQ ID NO: 583075 - DNA, 19 bp, Mus musculus
  siRNA target sequence for Usp16 (NM_024258.1,1639-1657).
ccaagagagcatgatagaa

SEQ ID NO: 583076 - DNA, 19 bp, Mus musculus
  siRNA target sequence for Usp16 (NM_024258.1,1640-1658).
caagagagcatgatagaaa

SEQ ID NO: 583077 - DNA, 19 bp, Mus musculus
  siRNA target sequence for Usp16 (NM_024258.1,1685-1703).
gaggacctaggagtgaaaa

SEQ ID NO: 583078 - DNA, 19 bp, Mus musculus
  siRNA target sequence for Usp16 (NM_024258.1,1735-1753).
gacgcctgctcctgaatgt

SEQ ID NO: 583079 - DNA, 19 bp, Mus musculus
  siRNA target sequence for Usp16 (NM_024258.1,1791-1809).
ccagtggagaactagacat

SEQ ID NO: 583080 - DNA, 19 bp, Mus musculus
  siRNA target sequence for Usp16 (NM_024258.1,1792-1810).
cagtggagaactagacatt

SEQ ID NO: 583081 - DNA, 19 bp, Mus musculus
  siRNA target sequence for Usp16 (NM_024258.1,1794-1812).
gtggagaactagacattat

SEQ ID NO: 583082 - DNA, 19 bp, Mus musculus
  siRNA target sequence for Usp16 (NM_024258.1,1802-1820).
ctagacattatcaatggtt

SEQ ID NO: 583083 - DNA, 19 bp, Mus musculus
  siRNA target sequence for Usp16 (NM_024258.1,1889-1907).
cattctgcacccaaggtat

SEQ ID NO: 583084 - DNA, 19 bp, Mus musculus
  siRNA target sequence for Usp16 (NM_024258.1,1918-1936).
gaacgaggacccagaaact

SEQ ID NO: 583085 - DNA, 19 bp, Mus musculus
  siRNA target sequence for Usp16 (NM_024258.1,1954-1972).
gaaccgagaagcgtttagt

SEQ ID NO: 583086 - DNA, 19 bp, Mus musculus
  siRNA target sequence for Usp16 (NM_024258.1,1957-1975).
ccgagaagcgtttagtact

SEQ ID NO: 583087 - DNA, 19 bp, Mus musculus
  siRNA target sequence for Usp16 (NM_024258.1,1979-1997).
gagtgttccattcaacatt

SEQ ID NO: 583088 - DNA, 19 bp, Mus musculus
  siRNA target sequence for Usp16 (NM_024258.1,1987-2005).
cattcaacattgcttatat

SEQ ID NO: 583089 - DNA, 19 bp, Mus musculus
  siRNA target sequence for Usp16 (NM_024258.1,1991-2009).
caacattgcttatatcagt

SEQ ID NO: 583090 - DNA, 19 bp, Mus musculus
  siRNA target sequence for Usp16 (NM_024258.1,2006-2024).
cagttcacccggaatgaga

SEQ ID NO: 583091 - DNA, 19 bp, Mus musculus
  siRNA target sequence for Usp16 (NM_024258.1,2008-2026).
gttcacccggaatgagaaa

SEQ ID NO: 583092 - DNA, 19 bp, Mus musculus
  siRNA target sequence for Usp16 (NM_024258.1,2014-2032).
ccggaatgagaaacttcaa

SEQ ID NO: 583093 - DNA, 19 bp, Mus musculus
  siRNA target sequence for Usp16 (NM_024258.1,2061-2079).
gttcaagacggcagtgtaa

SEQ ID NO: 583094 - DNA, 19 bp, Mus musculus
  siRNA target sequence for Usp16 (NM_024258.1,2081-2099).
ggaccaaaggcaaatataa

SEQ ID NO: 583095 - DNA, 19 bp, Mus musculus
  siRNA target sequence for Usp16 (NM_024258.1,2103-2121).
gtgacaggagacatgttta

SEQ ID NO: 583096 - DNA, 19 bp, Mus musculus
  siRNA target sequence for Usp16 (NM_024258.1,2105-2123).
gacaggagacatgtttaca

SEQ ID NO: 583097 - DNA, 19 bp, Mus musculus
  siRNA target sequence for Usp16 (NM_024258.1,2209-2227).
cctgcgcaaagttaacaaa

SEQ ID NO: 583098 - DNA, 19 bp, Mus musculus
  siRNA target sequence for Usp16 (NM_024258.1,2236-2254).
gtttccagaaatcttagat

SEQ ID NO: 583099 - DNA, 19 bp, Mus musculus
  siRNA target sequence for Usp16 (NM_024258.1,2248-2266).
cttagatttggctcctttt

SEQ ID NO: 583100 - DNA, 19 bp, Mus musculus
  siRNA target sequence for Usp16 (NM_024258.1,2252-2270).
gatttggctcctttttgta

SEQ ID NO: 583101 - DNA, 19 bp, Mus musculus
  siRNA target sequence for Usp16 (NM_024258.1,2271-2289).
cccttaaatgtaagaatgt

SEQ ID NO: 583102 - DNA, 19 bp, Mus musculus
  siRNA target sequence for Usp16 (NM_024258.1,2272-2290).
ccttaaatgtaagaatgtt

SEQ ID NO: 583103 - DNA, 19 bp, Mus musculus
  siRNA target sequence for Usp16 (NM_024258.1,2304-2322).
cacgagtgctgtattcctt

SEQ ID NO: 583104 - DNA, 19 bp, Mus musculus
  siRNA target sequence for Usp16 (NM_024258.1,2306-2324).
cgagtgctgtattccttat

SEQ ID NO: 583105 - DNA, 19 bp, Mus musculus
  siRNA target sequence for Usp16 (NM_024258.1,2336-2354).
gaacacagtggtactatga

SEQ ID NO: 583106 - DNA, 19 bp, Mus musculus
  siRNA target sequence for Usp16 (NM_024258.1,2353-2371).
gaggtcagggcattacact

SEQ ID NO: 583107 - DNA, 19 bp, Mus musculus
  siRNA target sequence for Usp16 (NM_024258.1,2431-2449).
cattccacaagattgtgaa

SEQ ID NO: 583108 - DNA, 19 bp, Mus musculus
  siRNA target sequence for Usp16 (NM_024258.1,2495-2513).
gtgcaagctgtgcctataa

SEQ ID NO: 583109 - DNA, 19 bp, Mus musculus
  siRNA target sequence for Usp16 (NM_024258.1,2497-2515).
gcaagctgtgcctataact

SEQ ID NO: 583110 - DNA, 19 bp, Mus musculus
  siRNA target sequence for Usp16 (NM_024258.1,2498-2516).
caagctgtgcctataacta

SEQ ID NO: 583111 - DNA, 19 bp, Mus musculus
  siRNA target sequence for Usp16 (NM_024258.1,2542-2560).
cctattttatgagagaata

SEQ ID NO: 583112 - DNA, 19 bp, Mus musculus
  siRNA target sequence for Usp18 (NM_011909.1,400-418).
cagacgtgttgccttaact

SEQ ID NO: 583113 - DNA, 19 bp, Mus musculus
  siRNA target sequence for Usp18 (NM_011909.1,444-462).
catggacttcagaatgata

SEQ ID NO: 583114 - DNA, 19 bp, Mus musculus
  siRNA target sequence for Usp18 (NM_011909.1,546-564).
gcaggacagtcgacagaaa

SEQ ID NO: 583115 - DNA, 19 bp, Mus musculus
  siRNA target sequence for Usp18 (NM_011909.1,637-655).
gctcaactctaccttacaa

SEQ ID NO: 583116 - DNA, 19 bp, Mus musculus
  siRNA target sequence for Usp18 (NM_011909.1,638-656).
ctcaactctaccttacaat

SEQ ID NO: 583117 - DNA, 19 bp, Mus musculus
  siRNA target sequence for Usp18 (NM_011909.1,653-671).
caatctggaacctgactaa

SEQ ID NO: 583118 - DNA, 19 bp, Mus musculus
  siRNA target sequence for Usp18 (NM_011909.1,844-862).
gaggatgccttgagatgtt

SEQ ID NO: 583119 - DNA, 19 bp, Mus musculus
  siRNA target sequence for Usp18 (NM_011909.1,864-882).
cgtccagcccaaagagtta

SEQ ID NO: 583120 - DNA, 19 bp, Mus musculus
  siRNA target sequence for Usp18 (NM_011909.1,971-989).
ccattcacctcatgagatt

SEQ ID NO: 583121 - DNA, 19 bp, Mus musculus
  siRNA target sequence for Usp18 (NM_011909.1,1017-1035).
gatctgtcactcagttaat

SEQ ID NO: 583122 - DNA, 19 bp, Mus musculus
  siRNA target sequence for Usp18 (NM_011909.1,1143-1161).
cgttgggatggctgacttt

SEQ ID NO: 583123 - DNA, 19 bp, Mus musculus
  siRNA target sequence for Usp18 (NM_011909.1,1184-1202).
ggaatcccgtggatggaaa

SEQ ID NO: 583124 - DNA, 19 bp, Mus musculus
  siRNA target sequence for Usp18 (NM_011909.1,1212-1230).
cttcaatgactcacatgtt

SEQ ID NO: 583125 - DNA, 19 bp, Mus musculus
  siRNA target sequence for Usp18 (NM_011909.1,1215-1233).
caatgactcacatgtttgt

SEQ ID NO: 583126 - DNA, 19 bp, Mus musculus
  siRNA target sequence for Usp18 (NM_011909.1,1248-1266).
ggatgtccagtgtacctat

SEQ ID NO: 583127 - DNA, 19 bp, Mus musculus
  siRNA target sequence for Usp18 (NM_011909.1,1288-1306).
cgggaaacggcctatctct

SEQ ID NO: 583128 - DNA, 19 bp, Mus musculus
  siRNA target sequence for Usp18 (NM_011909.1,1289-1307).
gggaaacggcctatctctt

SEQ ID NO: 583129 - DNA, 19 bp, Mus musculus
  siRNA target sequence for Usp18 (NM_011909.1,1295-1313).
cggcctatctcttggttta

SEQ ID NO: 583130 - DNA, 19 bp, Mus musculus
  siRNA target sequence for Usp2 (NM_016808.1,107-125).
cccgagagctgagagatta

SEQ ID NO: 583131 - DNA, 19 bp, Mus musculus
  siRNA target sequence for Usp2 (NM_016808.1,109-127).
cgagagctgagagattact

SEQ ID NO: 583132 - DNA, 19 bp, Mus musculus
  siRNA target sequence for Usp2 (NM_016808.1,222-240).
gacgtcgtcccccaatgat

SEQ ID NO: 583133 - DNA, 19 bp, Mus musculus
  siRNA target sequence for Usp2 (NM_016808.1,224-242).
cgtcgtcccccaatgatgt

SEQ ID NO: 583134 - DNA, 19 bp, Mus musculus
  siRNA target sequence for Usp2 (NM_016808.1,290-308).
gcttcatgggctataatca

SEQ ID NO: 583135 - DNA, 19 bp, Mus musculus
  siRNA target sequence for Usp2 (NM_016808.1,321-339).
ggaattccttcgtttcctt

SEQ ID NO: 583136 - DNA, 19 bp, Mus musculus
  siRNA target sequence for Usp2 (NM_016808.1,392-410).
gccctgagacccttgatca

SEQ ID NO: 583137 - DNA, 19 bp, Mus musculus
  siRNA target sequence for Usp2 (NM_016808.1,393-411).
ccctgagacccttgatcat

SEQ ID NO: 583138 - DNA, 19 bp, Mus musculus
  siRNA target sequence for Usp2 (NM_016808.1,570-588).
gttgcccatcgcaaagaga

SEQ ID NO: 583139 - DNA, 19 bp, Mus musculus
  siRNA target sequence for Usp2 (NM_016808.1,598-616).
gaggtgacgttaatggatt

SEQ ID NO: 583140 - DNA, 19 bp, Mus musculus
  siRNA target sequence for Usp2 (NM_016808.1,601-619).
gtgacgttaatggattgta

SEQ ID NO: 583141 - DNA, 19 bp, Mus musculus
  siRNA target sequence for Usp2 (NM_016808.1,632-650).
ccaaagaggacatattgga

SEQ ID NO: 583142 - DNA, 19 bp, Mus musculus
  siRNA target sequence for Usp2 (NM_016808.1,633-651).
caaagaggacatattggat

SEQ ID NO: 583143 - DNA, 19 bp, Mus musculus
  siRNA target sequence for Usp2 (NM_016808.1,675-693).
ccgctgccgagccagaaaa

SEQ ID NO: 583144 - DNA, 19 bp, Mus musculus
  siRNA target sequence for Usp2 (NM_016808.1,678-696).
ctgccgagccagaaaacga

SEQ ID NO: 583145 - DNA, 19 bp, Mus musculus
  siRNA target sequence for Usp2 (NM_016808.1,685-703).
gccagaaaacgatgcataa

SEQ ID NO: 583146 - DNA, 19 bp, Mus musculus
  siRNA target sequence for Usp2 (NM_016808.1,687-705).
cagaaaacgatgcataaaa

SEQ ID NO: 583147 - DNA, 19 bp, Mus musculus
  siRNA target sequence for Usp2 (NM_016808.1,689-707).
gaaaacgatgcataaaaaa

SEQ ID NO: 583148 - DNA, 19 bp, Mus musculus
  siRNA target sequence for Usp2 (NM_016808.1,694-712).
cgatgcataaaaaagttct

SEQ ID NO: 583149 - DNA, 19 bp, Mus musculus
  siRNA target sequence for Usp2 (NM_016808.1,748-766).
ctgaagcgattctcagaat

SEQ ID NO: 583150 - DNA, 19 bp, Mus musculus
  siRNA target sequence for Usp2 (NM_016808.1,779-797).
ccagcaagctcacaacatt

SEQ ID NO: 583151 - DNA, 19 bp, Mus musculus
  siRNA target sequence for Usp2 (NM_016808.1,782-800).
gcaagctcacaacatttgt

SEQ ID NO: 583152 - DNA, 19 bp, Mus musculus
  siRNA target sequence for Usp2 (NM_016808.1,822-840).
ggacttgagagaatttgct

SEQ ID NO: 583153 - DNA, 19 bp, Mus musculus
  siRNA target sequence for Usp2 (NM_016808.1,947-965).
gcgaatggcacactttcaa

SEQ ID NO: 583154 - DNA, 19 bp, Mus musculus
  siRNA target sequence for Usp2 (NM_016808.1,1004-1022).
gcaccagcgacgcctattt

SEQ ID NO: 583155 - DNA, 19 bp, Mus musculus
  siRNA target sequence for Usp2 (NM_016808.1,1007-1025).
ccagcgacgcctatttgct

SEQ ID NO: 583156 - DNA, 19 bp, Mus musculus
  siRNA target sequence for Usp2 (NM_198091.1,361-379).
ggggcttctgctcaacaaa

SEQ ID NO: 583157 - DNA, 19 bp, Mus musculus
  siRNA target sequence for Usp2 (NM_198092.1,117-135).
ctgaagcgctatacagaat

SEQ ID NO: 583158 - DNA, 19 bp, Mus musculus
  siRNA target sequence for Usp2 (NM_198092.1,345-363).
gacatcattgggagtagta

SEQ ID NO: 583159 - DNA, 19 bp, Mus musculus
  siRNA target sequence for Usp2 (NM_198092.1,377-395).
ccagacccgtggcaatgaa

SEQ ID NO: 583160 - DNA, 19 bp, Mus musculus
  siRNA target sequence for Usp2 (NM_198092.1,378-396).
cagacccgtggcaatgaaa

SEQ ID NO: 583161 - DNA, 19 bp, Mus musculus
  siRNA target sequence for Usp2 (NM_198092.1,416-434).
caacggaggcagtggattt

SEQ ID NO: 583162 - DNA, 19 bp, Mus musculus
  siRNA target sequence for Usp2 (NM_198092.1,421-439).
gaggcagtggattttctta

SEQ ID NO: 583163 - DNA, 19 bp, Mus musculus
  siRNA target sequence for Usp2 (NM_198092.1,581-599).
ctcagagggctttaggata

SEQ ID NO: 583164 - DNA, 19 bp, Mus musculus
  siRNA target sequence for Usp2 (NM_198092.1,882-900).
cgagacaccatgaattcaa

SEQ ID NO: 583165 - DNA, 19 bp, Mus musculus
  siRNA target sequence for Usp20 (NM_028846.1,236-254).
gaggatttgctgcttaaat

SEQ ID NO: 583166 - DNA, 19 bp, Mus musculus
  siRNA target sequence for Usp20 (NM_028846.1,238-256).
ggatttgctgcttaaatct

SEQ ID NO: 583167 - DNA, 19 bp, Mus musculus
  siRNA target sequence for Usp20 (NM_028846.1,239-257).
gatttgctgcttaaatcta

SEQ ID NO: 583168 - DNA, 19 bp, Mus musculus
  siRNA target sequence for Usp20 (NM_028846.1,280-298).
ggttgctggacctaaccta

SEQ ID NO: 583169 - DNA, 19 bp, Mus musculus
  siRNA target sequence for Usp20 (NM_028846.1,313-331).
ggtcacctgcccttacgtt

SEQ ID NO: 583170 - DNA, 19 bp, Mus musculus
  siRNA target sequence for Usp20 (NM_028846.1,334-352).
ctgtggagagtcttttgct

SEQ ID NO: 583171 - DNA, 19 bp, Mus musculus
  siRNA target sequence for Usp20 (NM_028846.1,433-451).
ctgtgagcgtgaagtcttt

SEQ ID NO: 583172 - DNA, 19 bp, Mus musculus
  siRNA target sequence for Usp20 (NM_028846.1,435-453).
gtgagcgtgaagtctttct

SEQ ID NO: 583173 - DNA, 19 bp, Mus musculus
  siRNA target sequence for Usp20 (NM_028846.1,734-752).
ccagccttgtgcaaaagtt

SEQ ID NO: 583174 - DNA, 19 bp, Mus musculus
  siRNA target sequence for Usp20 (NM_028846.1,768-786).
ctgaggtgtggcacaagaa

SEQ ID NO: 583175 - DNA, 19 bp, Mus musculus
  siRNA target sequence for Usp20 (NM_028846.1,781-799).
caagaagcggccaagctat

SEQ ID NO: 583176 - DNA, 19 bp, Mus musculus
  siRNA target sequence for Usp20 (NM_028846.1,1440-1458).
cgtcgtatgtgctcaagaa

SEQ ID NO: 583177 - DNA, 19 bp, Mus musculus
  siRNA target sequence for Usp20 (NM_028846.1,1441-1459).
gtcgtatgtgctcaagaaa

SEQ ID NO: 583178 - DNA, 19 bp, Mus musculus
  siRNA target sequence for Usp20 (NM_028846.1,1516-1534).
catctcagacgtcttcaat

SEQ ID NO: 583179 - DNA, 19 bp, Mus musculus
  siRNA target sequence for Usp20 (NM_028846.1,1596-1614).
cattccaggacctgtcatt

SEQ ID NO: 583180 - DNA, 19 bp, Mus musculus
  siRNA target sequence for Usp20 (NM_028846.1,1883-1901).
cggaatggcgtgaagtact

SEQ ID NO: 583181 - DNA, 19 bp, Mus musculus
  siRNA target sequence for Usp20 (NM_028846.1,1909-1927).
cctatgtctgcctgagatt

SEQ ID NO: 583182 - DNA, 19 bp, Mus musculus
  siRNA target sequence for Usp20 (NM_028846.1,2125-2143).
ctgtcagaacgtgatcaat

SEQ ID NO: 583183 - DNA, 19 bp, Mus musculus
  siRNA target sequence for Usp20 (NM_028846.1,2145-2163).
ggcagtggtacgaattcga

SEQ ID NO: 583184 - DNA, 19 bp, Mus musculus
  siRNA target sequence for Usp20 (NM_028846.1,2146-2164).
gcagtggtacgaattcgat

SEQ ID NO: 583185 - DNA, 19 bp, Mus musculus
  siRNA target sequence for Usp20 (NM_028846.1,2322-2340).
cccgagaatggctcaacaa

SEQ ID NO: 583186 - DNA, 19 bp, Mus musculus
  siRNA target sequence for Usp20 (NM_028846.1,2402-2420).
ggtatcccacccaacaaat

SEQ ID NO: 583187 - DNA, 19 bp, Mus musculus
  siRNA target sequence for Usp20 (NM_028846.1,2403-2421).
gtatcccacccaacaaata

SEQ ID NO: 583188 - DNA, 19 bp, Mus musculus
  siRNA target sequence for Usp20 (NM_028846.1,2504-2522).
gtgaaccatctgtatgtgt

SEQ ID NO: 583189 - DNA, 19 bp, Mus musculus
  siRNA target sequence for Usp20 (NM_028846.1,2573-2591).
gagattgacactttcatca

SEQ ID NO: 583190 - DNA, 19 bp, Mus musculus
  siRNA target sequence for Usp20 (NM_028846.1,2627-2645).
gcggtcatctactgtatca

SEQ ID NO: 583191 - DNA, 19 bp, Mus musculus
  siRNA target sequence for Usp20 (NM_028846.1,2745-2763).
gtggccatatccagctaaa

SEQ ID NO: 583192 - DNA, 19 bp, Mus musculus
  siRNA target sequence for Usp20 (NM_028846.1,2806-2824).
ctatctgagcagtctgtat

SEQ ID NO: 583193 - DNA, 19 bp, Mus musculus
  siRNA target sequence for Usp21 (NM_013919.2,274-292).
ccgagtgggagccaagata

SEQ ID NO: 583194 - DNA, 19 bp, Mus musculus
  siRNA target sequence for Usp21 (NM_013919.2,280-298).
gggagccaagataccattt

SEQ ID NO: 583195 - DNA, 19 bp, Mus musculus
  siRNA target sequence for Usp21 (NM_013919.2,658-676).
cactttgagacgtagtact

SEQ ID NO: 583196 - DNA, 19 bp, Mus musculus
  siRNA target sequence for Usp21 (NM_013919.2,752-770).
ggctccttccacatgatat

SEQ ID NO: 583197 - DNA, 19 bp, Mus musculus
  siRNA target sequence for Usp21 (NM_013919.2,849-867).
gcctccgaaatctaggaaa

SEQ ID NO: 583198 - DNA, 19 bp, Mus musculus
  siRNA target sequence for Usp21 (NM_013919.2,1030-1048).
ctcctgtgaagctgtgaat

SEQ ID NO: 583199 - DNA, 19 bp, Mus musculus
  siRNA target sequence for Usp21 (NM_013919.2,1061-1079).
cgggctgtcttccagaaat

SEQ ID NO: 583200 - DNA, 19 bp, Mus musculus
  siRNA target sequence for Usp21 (NM_013919.2,1062-1080).
gggctgtcttccagaaata

SEQ ID NO: 583201 - DNA, 19 bp, Mus musculus
  siRNA target sequence for Usp21 (NM_013919.2,1146-1164).
ggttgcaccttgagatcaa

SEQ ID NO: 583202 - DNA, 19 bp, Mus musculus
  siRNA target sequence for Usp21 (NM_013919.2,1271-1289).
gaccgagccaacttaatgt

SEQ ID NO: 583203 - DNA, 19 bp, Mus musculus
  siRNA target sequence for Usp21 (NM_013919.2,1306-1324).
gcgagaagacagcaagatt

SEQ ID NO: 583204 - DNA, 19 bp, Mus musculus
  siRNA target sequence for Usp21 (NM_013919.2,1386-1404).
ccacgaccttcgaggtttt

SEQ ID NO: 583205 - DNA, 19 bp, Mus musculus
  siRNA target sequence for Usp21 (NM_013919.2,1387-1405).
cacgaccttcgaggttttt

SEQ ID NO: 583206 - DNA, 19 bp, Mus musculus
  siRNA target sequence for Usp21 (NM_013919.2,1392-1410).
ccttcgaggttttttgtga

SEQ ID NO: 583207 - DNA, 19 bp, Mus musculus
  siRNA target sequence for Usp21 (NM_013919.2,1526-1544).
gaccgatgtcggcagaaaa

SEQ ID NO: 583208 - DNA, 19 bp, Mus musculus
  siRNA target sequence for Usp21 (NM_013919.2,1545-1563).
cccgaagtaccaaaaagtt

SEQ ID NO: 583209 - DNA, 19 bp, Mus musculus
  siRNA target sequence for Usp21 (NM_013919.2,1547-1565).
cgaagtaccaaaaagttga

SEQ ID NO: 583210 - DNA, 19 bp, Mus musculus
  siRNA target sequence for Usp21 (NM_013919.2,1622-1640).
cgaggctccatcaagaaaa

SEQ ID NO: 583211 - DNA, 19 bp, Mus musculus
  siRNA target sequence for Usp21 (NM_013919.2,1627-1645).
ctccatcaagaaaagttca

SEQ ID NO: 583212 - DNA, 19 bp, Mus musculus
  siRNA target sequence for Usp21 (NM_013919.2,1630-1648).
catcaagaaaagttcagta

SEQ ID NO: 583213 - DNA, 19 bp, Mus musculus
  siRNA target sequence for Usp21 (NM_013919.2,1827-1845).
cccctgtcagtgaaaatca

SEQ ID NO: 583214 - DNA, 19 bp, Mus musculus
  siRNA target sequence for Usp21 (NM_013919.2,1868-1886).
gtgctgttctaccaattga

SEQ ID NO: 583215 - DNA, 19 bp, Mus musculus
  siRNA target sequence for Usp25 (NM_013918.2,73-91).
caccagcagacatttttga

SEQ ID NO: 583216 - DNA, 19 bp, Mus musculus
  siRNA target sequence for Usp25 (NM_013918.2,139-157).
caagccctgaaggatagta

SEQ ID NO: 583217 - DNA, 19 bp, Mus musculus
  siRNA target sequence for Usp25 (NM_013918.2,155-173).
gtaacggaaacttggaatt

SEQ ID NO: 583218 - DNA, 19 bp, Mus musculus
  siRNA target sequence for Usp25 (NM_013918.2,159-177).
cggaaacttggaattagca

SEQ ID NO: 583219 - DNA, 19 bp, Mus musculus
  siRNA target sequence for Usp25 (NM_013918.2,253-271).
ggcaacgacaggtacatca

SEQ ID NO: 583220 - DNA, 19 bp, Mus musculus
  siRNA target sequence for Usp25 (NM_013918.2,309-327).
cactggagatgacaaagat

SEQ ID NO: 583221 - DNA, 19 bp, Mus musculus
  siRNA target sequence for Usp25 (NM_013918.2,338-356).
gagcgattgccttgagttt

SEQ ID NO: 583222 - DNA, 19 bp, Mus musculus
  siRNA target sequence for Usp25 (NM_013918.2,386-404).
cgggcataaccgatgaaga

SEQ ID NO: 583223 - DNA, 19 bp, Mus musculus
  siRNA target sequence for Usp25 (NM_013918.2,405-423).
gcaggccatcagtagagtt

SEQ ID NO: 583224 - DNA, 19 bp, Mus musculus
  siRNA target sequence for Usp25 (NM_013918.2,408-426).
ggccatcagtagagttctt

SEQ ID NO: 583225 - DNA, 19 bp, Mus musculus
  siRNA target sequence for Usp25 (NM_013918.2,527-545).
ctccagtcggtctgaagaa

SEQ ID NO: 583226 - DNA, 19 bp, Mus musculus
  siRNA target sequence for Usp25 (NM_013918.2,530-548).
cagtcggtctgaagaatgt

SEQ ID NO: 583227 - DNA, 19 bp, Mus musculus
  siRNA target sequence for Usp25 (NM_013918.2,550-568).
ggcaacacctgctggttta

SEQ ID NO: 583228 - DNA, 19 bp, Mus musculus
  siRNA target sequence for Usp25 (NM_013918.2,560-578).
gctggtttagtgcagttat

SEQ ID NO: 583229 - DNA, 19 bp, Mus musculus
  siRNA target sequence for Usp25 (NM_013918.2,561-579).
ctggtttagtgcagttatt

SEQ ID NO: 583230 - DNA, 19 bp, Mus musculus
  siRNA target sequence for Usp25 (NM_013918.2,563-581).
ggtttagtgcagttattca

SEQ ID NO: 583231 - DNA, 19 bp, Mus musculus
  siRNA target sequence for Usp25 (NM_013918.2,580-598).
cagtcattattcaatcttt

SEQ ID NO: 583232 - DNA, 19 bp, Mus musculus
  siRNA target sequence for Usp25 (NM_013918.2,608-626).
gaagattagttctgaatta

SEQ ID NO: 583233 - DNA, 19 bp, Mus musculus
  siRNA target sequence for Usp25 (NM_013918.2,634-652).
ccatcaaatgctcaagatt

SEQ ID NO: 583234 - DNA, 19 bp, Mus musculus
  siRNA target sequence for Usp25 (NM_013918.2,635-653).
catcaaatgctcaagattt

SEQ ID NO: 583235 - DNA, 19 bp, Mus musculus
  siRNA target sequence for Usp25 (NM_013918.2,695-713).
gggaactgaggtatctgtt

SEQ ID NO: 583236 - DNA, 19 bp, Mus musculus
  siRNA target sequence for Usp25 (NM_013918.2,728-746).
gtaccaagaggaagtatgt

SEQ ID NO: 583237 - DNA, 19 bp, Mus musculus
  siRNA target sequence for Usp25 (NM_013918.2,732-750).
caagaggaagtatgttgat

SEQ ID NO: 583238 - DNA, 19 bp, Mus musculus
  siRNA target sequence for Usp25 (NM_013918.2,781-799).
gccttcaaatccaatgact

SEQ ID NO: 583239 - DNA, 19 bp, Mus musculus
  siRNA target sequence for Usp25 (NM_013918.2,820-838).
gagtttacacacaagttat

SEQ ID NO: 583240 - DNA, 19 bp, Mus musculus
  siRNA target sequence for Usp25 (NM_013918.2,908-926).
ctatggtagagctgttcta

SEQ ID NO: 583241 - DNA, 19 bp, Mus musculus
  siRNA target sequence for Usp25 (NM_013918.2,945-963).
gggagtgcttgaaggaaaa

SEQ ID NO: 583242 - DNA, 19 bp, Mus musculus
  siRNA target sequence for Usp25 (NM_013918.2,1071-1089).
cttacactccgataactca

SEQ ID NO: 583243 - DNA, 19 bp, Mus musculus
  siRNA target sequence for Usp25 (NM_013918.2,1080-1098).
cgataactcaggaaagtca

SEQ ID NO: 583244 - DNA, 19 bp, Mus musculus
  siRNA target sequence for Usp25 (NM_013918.2,1130-1148).
cggtattaacatttgaact

SEQ ID NO: 583245 - DNA, 19 bp, Mus musculus
  siRNA target sequence for Usp25 (NM_013918.2,1144-1162).
gaactgtcaagatttgaat

SEQ ID NO: 583246 - DNA, 19 bp, Mus musculus
  siRNA target sequence for Usp25 (NM_013918.2,1176-1194).
gggaagaccagaaaaaatt

SEQ ID NO: 583247 - DNA, 19 bp, Mus musculus
  siRNA target sequence for Usp25 (NM_013918.2,1183-1201).
ccagaaaaaattcacaata

SEQ ID NO: 583248 - DNA, 19 bp, Mus musculus
  siRNA target sequence for Usp25 (NM_013918.2,1204-1222).
ctagaatttccccaagttt

SEQ ID NO: 583249 - DNA, 19 bp, Mus musculus
  siRNA target sequence for Usp25 (NM_013918.2,1265-1283).
gaattaaacgtgaagagat

SEQ ID NO: 583250 - DNA, 19 bp, Mus musculus
  siRNA target sequence for Usp25 (NM_013918.2,1303-1321).
ctcacagtattacaacaaa

SEQ ID NO: 583251 - DNA, 19 bp, Mus musculus
  siRNA target sequence for Usp25 (NM_013918.2,1345-1363).
ggttccggtcccaaaagat

SEQ ID NO: 583252 - DNA, 19 bp, Mus musculus
  siRNA target sequence for Usp25 (NM_013918.2,1346-1364).
gttccggtcccaaaagatt

SEQ ID NO: 583253 - DNA, 19 bp, Mus musculus
  siRNA target sequence for Usp25 (NM_013918.2,1356-1374).
caaaagattcccattggta

SEQ ID NO: 583254 - DNA, 19 bp, Mus musculus
  siRNA target sequence for Usp25 (NM_013918.2,1365-1383).
cccattggtagatgttcta

SEQ ID NO: 583255 - DNA, 19 bp, Mus musculus
  siRNA target sequence for Usp25 (NM_013918.2,1367-1385).
cattggtagatgttctaca

SEQ ID NO: 583256 - DNA, 19 bp, Mus musculus
  siRNA target sequence for Usp25 (NM_013918.2,1371-1389).
ggtagatgttctacagtat

SEQ ID NO: 583257 - DNA, 19 bp, Mus musculus
  siRNA target sequence for Usp25 (NM_013918.2,1424-1442).
cttcccccgttgatgacat

SEQ ID NO: 583258 - DNA, 19 bp, Mus musculus
  siRNA target sequence for Usp25 (NM_013918.2,1572-1590).
gaggtcagtgattcacaaa

SEQ ID NO: 583259 - DNA, 19 bp, Mus musculus
  siRNA target sequence for Usp25 (NM_013918.2,1695-1713).
gaggacggaaatagaaaat

SEQ ID NO: 583260 - DNA, 19 bp, Mus musculus
  siRNA target sequence for Usp25 (NM_013918.2,1697-1715).
ggacggaaatagaaaatga

SEQ ID NO: 583261 - DNA, 19 bp, Mus musculus
  siRNA target sequence for Usp25 (NM_013918.2,1742-1760).
ccagaatccatcgaacaat

SEQ ID NO: 583262 - DNA, 19 bp, Mus musculus
  siRNA target sequence for Usp25 (NM_013918.2,1743-1761).
cagaatccatcgaacaatt

SEQ ID NO: 583263 - DNA, 19 bp, Mus musculus
  siRNA target sequence for Usp25 (NM_013918.2,1765-1783).
ctcatgtactcggacaaat

SEQ ID NO: 583264 - DNA, 19 bp, Mus musculus
  siRNA target sequence for Usp25 (NM_013918.2,1851-1869).
ctactgggcgtacatcttt

SEQ ID NO: 583265 - DNA, 19 bp, Mus musculus
  siRNA target sequence for Usp25 (NM_013918.2,1883-1901).
gccggtggatgaagtataa

SEQ ID NO: 583266 - DNA, 19 bp, Mus musculus
  siRNA target sequence for Usp25 (NM_013918.2,1884-1902).
ccggtggatgaagtataat

SEQ ID NO: 583267 - DNA, 19 bp, Mus musculus
  siRNA target sequence for Usp25 (NM_013918.2,1909-1927).
gctgtgaccaagtcttcat

SEQ ID NO: 583268 - DNA, 19 bp, Mus musculus
  siRNA target sequence for Usp25 (NM_013918.2,1944-1962).
ggactctttcggtggttat

SEQ ID NO: 583269 - DNA, 19 bp, Mus musculus
  siRNA target sequence for Usp25 (NM_013918.2,1947-1965).
ctctttcggtggttatcga

SEQ ID NO: 583270 - DNA, 19 bp, Mus musculus
  siRNA target sequence for Usp25 (NM_013918.2,1949-1967).
ctttcggtggttatcgaaa

SEQ ID NO: 583271 - DNA, 19 bp, Mus musculus
  siRNA target sequence for Usp25 (NM_013918.2,1970-1988).
ccagtgcatactgcttaat

SEQ ID NO: 583272 - DNA, 19 bp, Mus musculus
  siRNA target sequence for Usp25 (NM_013918.2,1973-1991).
gtgcatactgcttaatgta

SEQ ID NO: 583273 - DNA, 19 bp, Mus musculus
  siRNA target sequence for Usp25 (NM_013918.2,1975-1993).
gcatactgcttaatgtaca

SEQ ID NO: 583274 - DNA, 19 bp, Mus musculus
  siRNA target sequence for Usp25 (NM_013918.2,2001-2019).
caaggcacagttcctaata

SEQ ID NO: 583275 - DNA, 19 bp, Mus musculus
  siRNA target sequence for Usp25 (NM_013918.2,2014-2032).
ctaatacaagaggagttta

SEQ ID NO: 583276 - DNA, 19 bp, Mus musculus
  siRNA target sequence for Usp25 (NM_013918.2,2155-2173).
caacgatcactgcaagaaa

SEQ ID NO: 583277 - DNA, 19 bp, Mus musculus
  siRNA target sequence for Usp25 (NM_013918.2,2234-2252).
gaggcgcagactatctaga

SEQ ID NO: 583278 - DNA, 19 bp, Mus musculus
  siRNA target sequence for Usp25 (NM_013918.2,2313-2331).
caaggcgtcacatgatctt

SEQ ID NO: 583279 - DNA, 19 bp, Mus musculus
  siRNA target sequence for Usp25 (NM_013918.2,2318-2336).
cgtcacatgatcttgaaga

SEQ ID NO: 583280 - DNA, 19 bp, Mus musculus
  siRNA target sequence for Usp25 (NM_013918.2,2353-2371).
gttttgcagtcggcaatta

SEQ ID NO: 583281 - DNA, 19 bp, Mus musculus
  siRNA target sequence for Usp25 (NM_013918.2,2358-2376).
gcagtcggcaattaaatta

SEQ ID NO: 583282 - DNA, 19 bp, Mus musculus
  siRNA target sequence for Usp25 (NM_013918.2,2363-2381).
cggcaattaaattagagta

SEQ ID NO: 583283 - DNA, 19 bp, Mus musculus
  siRNA target sequence for Usp25 (NM_013918.2,2364-2382).
ggcaattaaattagagtat

SEQ ID NO: 583284 - DNA, 19 bp, Mus musculus
  siRNA target sequence for Usp25 (NM_013918.2,2365-2383).
gcaattaaattagagtatt

SEQ ID NO: 583285 - DNA, 19 bp, Mus musculus
  siRNA target sequence for Usp25 (NM_013918.2,2419-2437).
ccagaaacagattatcgtt

SEQ ID NO: 583286 - DNA, 19 bp, Mus musculus
  siRNA target sequence for Usp25 (NM_013918.2,2420-2438).
cagaaacagattatcgttt

SEQ ID NO: 583287 - DNA, 19 bp, Mus musculus
  siRNA target sequence for Usp25 (NM_013918.2,2426-2444).
cagattatcgtttacatca

SEQ ID NO: 583288 - DNA, 19 bp, Mus musculus
  siRNA target sequence for Usp25 (NM_013918.2,2443-2461).
catgtcctggtctacttta

SEQ ID NO: 583289 - DNA, 19 bp, Mus musculus
  siRNA target sequence for Usp25 (NM_013918.2,2470-2488).
caggcaccaaagaaaatca

SEQ ID NO: 583290 - DNA, 19 bp, Mus musculus
  siRNA target sequence for Usp25 (NM_013918.2,2623-2641).
gagtggcatgcagattata

SEQ ID NO: 583291 - DNA, 19 bp, Mus musculus
  siRNA target sequence for Usp25 (NM_013918.2,2651-2669).
gagaaacaactatgtatct

SEQ ID NO: 583292 - DNA, 19 bp, Mus musculus
  siRNA target sequence for Usp25 (NM_013918.2,2668-2686).
ctcataactggactagaaa

SEQ ID NO: 583293 - DNA, 19 bp, Mus musculus
  siRNA target sequence for Usp25 (NM_013918.2,2675-2693).
ctggactagaaaactttca

SEQ ID NO: 583294 - DNA, 19 bp, Mus musculus
  siRNA target sequence for Usp25 (NM_013918.2,2688-2706).
ctttcagagagaaagttat

SEQ ID NO: 583295 - DNA, 19 bp, Mus musculus
  siRNA target sequence for Usp25 (NM_013918.2,2791-2809).
gagctgatatcacattaca

SEQ ID NO: 583296 - DNA, 19 bp, Mus musculus
  siRNA target sequence for Usp25 (NM_013918.2,2793-2811).
gctgatatcacattacaga

SEQ ID NO: 583297 - DNA, 19 bp, Mus musculus
  siRNA target sequence for Usp25 (NM_013918.2,2794-2812).
ctgatatcacattacagaa

SEQ ID NO: 583298 - DNA, 19 bp, Mus musculus
  siRNA target sequence for Usp25 (NM_013918.2,2815-2833).
gagtgcttactgaaattaa

SEQ ID NO: 583299 - DNA, 19 bp, Mus musculus
  siRNA target sequence for Usp25 (NM_013918.2,2819-2837).
gcttactgaaattaaacga

SEQ ID NO: 583300 - DNA, 19 bp, Mus musculus
  siRNA target sequence for Usp25 (NM_013918.2,2868-2886).
ggacggagacgtgaacaat

SEQ ID NO: 583301 - DNA, 19 bp, Mus musculus
  siRNA target sequence for Usp25 (NM_013918.2,3003-3021).
cctggggcaagaaatggaa

SEQ ID NO: 583302 - DNA, 19 bp, Mus musculus
  siRNA target sequence for Usp25 (NM_013918.2,3054-3072).
gccaaaactgcttgattgt

SEQ ID NO: 583303 - DNA, 19 bp, Mus musculus
  siRNA target sequence for Usp25 (NM_013918.2,3055-3073).
ccaaaactgcttgattgtt

SEQ ID NO: 583304 - DNA, 19 bp, Mus musculus
  siRNA target sequence for Usp25 (NM_013918.2,3097-3115).
gagccaccaaagttacctt

SEQ ID NO: 583305 - DNA, 19 bp, Mus musculus
  siRNA target sequence for Usp26 (NM_031388.1,294-312).
ggagcccatattgataaat

SEQ ID NO: 583306 - DNA, 19 bp, Mus musculus
  siRNA target sequence for Usp26 (NM_031388.1,354-372).
gtcaagaaatgcactcatt

SEQ ID NO: 583307 - DNA, 19 bp, Mus musculus
  siRNA target sequence for Usp26 (NM_031388.1,386-404).
gaaaacgagaagttaaact

SEQ ID NO: 583308 - DNA, 19 bp, Mus musculus
  siRNA target sequence for Usp26 (NM_031388.1,437-455).
ctttgcaactacacgataa

SEQ ID NO: 583309 - DNA, 19 bp, Mus musculus
  siRNA target sequence for Usp26 (NM_031388.1,441-459).
gcaactacacgataatatt

SEQ ID NO: 583310 - DNA, 19 bp, Mus musculus
  siRNA target sequence for Usp26 (NM_031388.1,442-460).
caactacacgataatatta

SEQ ID NO: 583311 - DNA, 19 bp, Mus musculus
  siRNA target sequence for Usp26 (NM_031388.1,445-463).
ctacacgataatattaaaa

SEQ ID NO: 583312 - DNA, 19 bp, Mus musculus
  siRNA target sequence for Usp26 (NM_031388.1,490-508).
gaccagaattacctacatt

SEQ ID NO: 583313 - DNA, 19 bp, Mus musculus
  siRNA target sequence for Usp26 (NM_031388.1,881-899).
gggactttgaggcaaattt

SEQ ID NO: 583314 - DNA, 19 bp, Mus musculus
  siRNA target sequence for Usp26 (NM_031388.1,882-900).
ggactttgaggcaaattta

SEQ ID NO: 583315 - DNA, 19 bp, Mus musculus
  siRNA target sequence for Usp26 (NM_031388.1,903-921).
ggtgtgtatctctaatgaa

SEQ ID NO: 583316 - DNA, 19 bp, Mus musculus
  siRNA target sequence for Usp26 (NM_031388.1,987-1005).
gaccaactatcctgaagat

SEQ ID NO: 583317 - DNA, 19 bp, Mus musculus
  siRNA target sequence for Usp26 (NM_031388.1,990-1008).
caactatcctgaagatagt

SEQ ID NO: 583318 - DNA, 19 bp, Mus musculus
  siRNA target sequence for Usp26 (NM_031388.1,1012-1030).
gtggatgttcgtgatctta

SEQ ID NO: 583319 - DNA, 19 bp, Mus musculus
  siRNA target sequence for Usp26 (NM_031388.1,1014-1032).
ggatgttcgtgatcttaat

SEQ ID NO: 583320 - DNA, 19 bp, Mus musculus
  siRNA target sequence for Usp26 (NM_031388.1,1027-1045).
cttaatgatctcattacaa

SEQ ID NO: 583321 - DNA, 19 bp, Mus musculus
  siRNA target sequence for Usp26 (NM_031388.1,1091-1109).
gcctagagtggcatgaata

SEQ ID NO: 583322 - DNA, 19 bp, Mus musculus
  siRNA target sequence for Usp26 (NM_031388.1,1092-1110).
cctagagtggcatgaatat

SEQ ID NO: 583323 - DNA, 19 bp, Mus musculus
  siRNA target sequence for Usp26 (NM_031388.1,1093-1111).
ctagagtggcatgaatata

SEQ ID NO: 583324 - DNA, 19 bp, Mus musculus
  siRNA target sequence for Usp26 (NM_031388.1,1126-1144).
ctttacccagagaaattgt

SEQ ID NO: 583325 - DNA, 19 bp, Mus musculus
  siRNA target sequence for Usp26 (NM_031388.1,1162-1180).
gtgggaaacacctgctata

SEQ ID NO: 583326 - DNA, 19 bp, Mus musculus
  siRNA target sequence for Usp26 (NM_031388.1,1165-1183).
ggaaacacctgctatataa

SEQ ID NO: 583327 - DNA, 19 bp, Mus musculus
  siRNA target sequence for Usp26 (NM_031388.1,1166-1184).
gaaacacctgctatataaa

SEQ ID NO: 583328 - DNA, 19 bp, Mus musculus
  siRNA target sequence for Usp26 (NM_031388.1,1172-1190).
cctgctatataaatgttgt

SEQ ID NO: 583329 - DNA, 19 bp, Mus musculus
  siRNA target sequence for Usp26 (NM_031388.1,1186-1204).
gttgtattacagtctctat

SEQ ID NO: 583330 - DNA, 19 bp, Mus musculus
  siRNA target sequence for Usp26 (NM_031388.1,1205-1223).
gctcaataccactgtttat

SEQ ID NO: 583331 - DNA, 19 bp, Mus musculus
  siRNA target sequence for Usp26 (NM_031388.1,1206-1224).
ctcaataccactgtttatt

SEQ ID NO: 583332 - DNA, 19 bp, Mus musculus
  siRNA target sequence for Usp26 (NM_031388.1,1208-1226).
caataccactgtttattaa

SEQ ID NO: 583333 - DNA, 19 bp, Mus musculus
  siRNA target sequence for Usp26 (NM_031388.1,1240-1258).
cagggtttcccatggatta

SEQ ID NO: 583334 - DNA, 19 bp, Mus musculus
  siRNA target sequence for Usp26 (NM_031388.1,1293-1311).
gcaactgcttgttttgaaa

SEQ ID NO: 583335 - DNA, 19 bp, Mus musculus
  siRNA target sequence for Usp26 (NM_031388.1,1336-1354).
cagaagttacttataggta

SEQ ID NO: 583336 - DNA, 19 bp, Mus musculus
  siRNA target sequence for Usp26 (NM_031388.1,1338-1356).
gaagttacttataggtatt

SEQ ID NO: 583337 - DNA, 19 bp, Mus musculus
  siRNA target sequence for Usp26 (NM_031388.1,1341-1359).
gttacttataggtattaca

SEQ ID NO: 583338 - DNA, 19 bp, Mus musculus
  siRNA target sequence for Usp26 (NM_031388.1,1358-1376).
caaaagccctccccatatt

SEQ ID NO: 583339 - DNA, 19 bp, Mus musculus
  siRNA target sequence for Usp26 (NM_031388.1,1368-1386).
ccccatatttggagagata

SEQ ID NO: 583340 - DNA, 19 bp, Mus musculus
  siRNA target sequence for Usp26 (NM_031388.1,1369-1387).
cccatatttggagagatat

SEQ ID NO: 583341 - DNA, 19 bp, Mus musculus
  siRNA target sequence for Usp26 (NM_031388.1,1443-1461).
gttgaaggagactttccaa

SEQ ID NO: 583342 - DNA, 19 bp, Mus musculus
  siRNA target sequence for Usp26 (NM_031388.1,1473-1491).
gatgtggcagtctgaaaat

SEQ ID NO: 583343 - DNA, 19 bp, Mus musculus
  siRNA target sequence for Usp26 (NM_031388.1,1492-1510).
gattcgggggatttttact

SEQ ID NO: 583344 - DNA, 19 bp, Mus musculus
  siRNA target sequence for Usp26 (NM_031388.1,1496-1514).
cgggggatttttacttact

SEQ ID NO: 583345 - DNA, 19 bp, Mus musculus
  siRNA target sequence for Usp26 (NM_031388.1,1521-1539).
catttttgctgattatgct

SEQ ID NO: 583346 - DNA, 19 bp, Mus musculus
  siRNA target sequence for Usp26 (NM_031388.1,1531-1549).
gattatgctactatcaaca

SEQ ID NO: 583347 - DNA, 19 bp, Mus musculus
  siRNA target sequence for Usp26 (NM_031388.1,1562-1580).
gtcctgttaccaataattt

SEQ ID NO: 583348 - DNA, 19 bp, Mus musculus
  siRNA target sequence for Usp26 (NM_031388.1,1588-1606).
gagttgctaagctccattt

SEQ ID NO: 583349 - DNA, 19 bp, Mus musculus
  siRNA target sequence for Usp26 (NM_031388.1,1642-1660).
gaaccaagtagataccttt

SEQ ID NO: 583350 - DNA, 19 bp, Mus musculus
  siRNA target sequence for Usp26 (NM_031388.1,1645-1663).
ccaagtagatacctttcta

SEQ ID NO: 583351 - DNA, 19 bp, Mus musculus
  siRNA target sequence for Usp26 (NM_031388.1,1646-1664).
caagtagatacctttctat

SEQ ID NO: 583352 - DNA, 19 bp, Mus musculus
  siRNA target sequence for Usp26 (NM_031388.1,1649-1667).
gtagatacctttctatcaa

SEQ ID NO: 583353 - DNA, 19 bp, Mus musculus
  siRNA target sequence for Usp26 (NM_031388.1,1652-1670).
gatacctttctatcaacat

SEQ ID NO: 583354 - DNA, 19 bp, Mus musculus
  siRNA target sequence for Usp26 (NM_031388.1,1692-1710).
gtccatccagtccacttta

SEQ ID NO: 583355 - DNA, 19 bp, Mus musculus
  siRNA target sequence for Usp26 (NM_031388.1,1694-1712).
ccatccagtccactttaga

SEQ ID NO: 583356 - DNA, 19 bp, Mus musculus
  siRNA target sequence for Usp26 (NM_031388.1,1695-1713).
catccagtccactttagat

SEQ ID NO: 583357 - DNA, 19 bp, Mus musculus
  siRNA target sequence for Usp26 (NM_031388.1,1735-1753).
cttgagcataggtgtgaaa

SEQ ID NO: 583358 - DNA, 19 bp, Mus musculus
  siRNA target sequence for Usp26 (NM_031388.1,1738-1756).
gagcataggtgtgaaaagt

SEQ ID NO: 583359 - DNA, 19 bp, Mus musculus
  siRNA target sequence for Usp26 (NM_031388.1,1795-1813).
cggctacccagggtaatta

SEQ ID NO: 583360 - DNA, 19 bp, Mus musculus
  siRNA target sequence for Usp26 (NM_031388.1,1797-1815).
gctacccagggtaattatt

SEQ ID NO: 583361 - DNA, 19 bp, Mus musculus
  siRNA target sequence for Usp26 (NM_031388.1,1805-1823).
gggtaattattgttcatct

SEQ ID NO: 583362 - DNA, 19 bp, Mus musculus
  siRNA target sequence for Usp26 (NM_031388.1,1819-1837).
catctgaaacgctatcact

SEQ ID NO: 583363 - DNA, 19 bp, Mus musculus
  siRNA target sequence for Usp26 (NM_031388.1,1822-1840).
ctgaaacgctatcacttta

SEQ ID NO: 583364 - DNA, 19 bp, Mus musculus
  siRNA target sequence for Usp26 (NM_031388.1,1824-1842).
gaaacgctatcactttaat

SEQ ID NO: 583365 - DNA, 19 bp, Mus musculus
  siRNA target sequence for Usp26 (NM_031388.1,1828-1846).
cgctatcactttaatgagt

SEQ ID NO: 583366 - DNA, 19 bp, Mus musculus
  siRNA target sequence for Usp26 (NM_031388.1,1843-1861).
gagtcatgggtaatgaaga

SEQ ID NO: 583367 - DNA, 19 bp, Mus musculus
  siRNA target sequence for Usp26 (NM_031388.1,1949-1967).
caggtgaacatgttaagaa

SEQ ID NO: 583368 - DNA, 19 bp, Mus musculus
  siRNA target sequence for Usp26 (NM_031388.1,1960-1978).
gttaagaatcttgacttat

SEQ ID NO: 583369 - DNA, 19 bp, Mus musculus
  siRNA target sequence for Usp26 (NM_031388.1,1998-2016).
gggttccgaaatactcaaa

SEQ ID NO: 583370 - DNA, 19 bp, Mus musculus
  siRNA target sequence for Usp26 (NM_031388.1,2011-2029).
ctcaaattgccttttaatt

SEQ ID NO: 583371 - DNA, 19 bp, Mus musculus
  siRNA target sequence for Usp26 (NM_031388.1,2048-2066).
ccaagggtttcgaaactat

SEQ ID NO: 583372 - DNA, 19 bp, Mus musculus
  siRNA target sequence for Usp26 (NM_031388.1,2049-2067).
caagggtttcgaaactata

SEQ ID NO: 583373 - DNA, 19 bp, Mus musculus
  siRNA target sequence for Usp26 (NM_031388.1,2053-2071).
ggtttcgaaactataaaca

SEQ ID NO: 583374 - DNA, 19 bp, Mus musculus
  siRNA target sequence for Usp26 (NM_031388.1,2054-2072).
gtttcgaaactataaacat

SEQ ID NO: 583375 - DNA, 19 bp, Mus musculus
  siRNA target sequence for Usp26 (NM_031388.1,2179-2197).
gttgggtcagaacttacaa

SEQ ID NO: 583376 - DNA, 19 bp, Mus musculus
  siRNA target sequence for Usp26 (NM_031388.1,2230-2248).
gagcatagacccagtgatt

SEQ ID NO: 583377 - DNA, 19 bp, Mus musculus
  siRNA target sequence for Usp26 (NM_031388.1,2232-2250).
gcatagacccagtgattta

SEQ ID NO: 583378 - DNA, 19 bp, Mus musculus
  siRNA target sequence for Usp26 (NM_031388.1,2289-2307).
ggctgagaaatgtaacgaa

SEQ ID NO: 583379 - DNA, 19 bp, Mus musculus
  siRNA target sequence for Usp26 (NM_031388.1,2332-2350).
ctagaggcacttactcaaa

SEQ ID NO: 583380 - DNA, 19 bp, Mus musculus
  siRNA target sequence for Usp26 (NM_031388.1,2347-2365).
caaagccgtccaaaaccaa

SEQ ID NO: 583381 - DNA, 19 bp, Mus musculus
  siRNA target sequence for Usp26 (NM_031388.1,2465-2483).
cccgatgcagtgatgatct

SEQ ID NO: 583382 - DNA, 19 bp, Mus musculus
  siRNA target sequence for Usp26 (NM_031388.1,2471-2489).
gcagtgatgatctcgataa

SEQ ID NO: 583383 - DNA, 19 bp, Mus musculus
  siRNA target sequence for Usp26 (NM_031388.1,2474-2492).
gtgatgatctcgataagaa

SEQ ID NO: 583384 - DNA, 19 bp, Mus musculus
  siRNA target sequence for Usp26 (NM_031388.1,2591-2609).
ccaatggaggccactacat

SEQ ID NO: 583385 - DNA, 19 bp, Mus musculus
  siRNA target sequence for Usp26 (NM_031388.1,2597-2615).
gaggccactacatcaatga

SEQ ID NO: 583386 - DNA, 19 bp, Mus musculus
  siRNA target sequence for Usp26 (NM_031388.1,2633-2651).
ggcagagttggttcactta

SEQ ID NO: 583387 - DNA, 19 bp, Mus musculus
  siRNA target sequence for Usp26 (NM_031388.1,2634-2652).
gcagagttggttcacttat

SEQ ID NO: 583388 - DNA, 19 bp, Mus musculus
  siRNA target sequence for Usp26 (NM_031388.1,2639-2657).
gttggttcacttatagtga

SEQ ID NO: 583389 - DNA, 19 bp, Mus musculus
  siRNA target sequence for Usp26 (NM_031388.1,2643-2661).
gttcacttatagtgatcta

SEQ ID NO: 583390 - DNA, 19 bp, Mus musculus
  siRNA target sequence for Usp26 (NM_031388.1,2646-2664).
cacttatagtgatctacat

SEQ ID NO: 583391 - DNA, 19 bp, Mus musculus
  siRNA target sequence for Usp26 (NM_031388.1,2648-2666).
cttatagtgatctacatgt

SEQ ID NO: 583392 - DNA, 19 bp, Mus musculus
  siRNA target sequence for Usp26 (NM_031388.1,2675-2693).
cccaagaggactttgtata

SEQ ID NO: 583393 - DNA, 19 bp, Mus musculus
  siRNA target sequence for Usp26 (NM_031388.1,2677-2695).
caagaggactttgtatata

SEQ ID NO: 583394 - DNA, 19 bp, Mus musculus
  siRNA target sequence for Usp26 (NM_031388.1,2705-2723).
gttctactgggtatgtctt

SEQ ID NO: 583395 - DNA, 19 bp, Mus musculus
  siRNA target sequence for Usp26 (NM_031388.1,2708-2726).
ctactgggtatgtcttctt

SEQ ID NO: 583396 - DNA, 19 bp, Mus musculus
  siRNA target sequence for Usp26 (NM_031388.1,2713-2731).
gggtatgtcttcttttaca

SEQ ID NO: 583397 - DNA, 19 bp, Mus musculus
  siRNA target sequence for Usp27x (NM_019461.1,653-671).
gatgcctggatgtggattt

SEQ ID NO: 583398 - DNA, 19 bp, Mus musculus
  siRNA target sequence for Usp27x (NM_019461.1,695-713).
cccacgtgaacagctttaa

SEQ ID NO: 583399 - DNA, 19 bp, Mus musculus
  siRNA target sequence for Usp27x (NM_019461.1,733-751).
caggaattgcgggttatct

SEQ ID NO: 583400 - DNA, 19 bp, Mus musculus
  siRNA target sequence for Usp27x (NM_019461.1,820-838).
gtgtgtggcacccatttaa

SEQ ID NO: 583401 - DNA, 19 bp, Mus musculus
  siRNA target sequence for Usp27x (NM_019461.1,854-872).
gcctttcctgcgtcttctt

SEQ ID NO: 583402 - DNA, 19 bp, Mus musculus
  siRNA target sequence for Usp27x (NM_019461.1,900-918).
cgagcacgctgagacaaaa

SEQ ID NO: 583403 - DNA, 19 bp, Mus musculus
  siRNA target sequence for Usp27x (NM_019461.1,924-942).
caacttagcggtagatctt

SEQ ID NO: 583404 - DNA, 19 bp, Mus musculus
  siRNA target sequence for Usp27x (NM_019461.1,927-945).
cttagcggtagatctttat

SEQ ID NO: 583405 - DNA, 19 bp, Mus musculus
  siRNA target sequence for Usp27x (NM_019461.1,952-970).
ggcatatactgcttcatgt

SEQ ID NO: 583406 - DNA, 19 bp, Mus musculus
  siRNA target sequence for Usp27x (NM_019461.1,969-987).
gtgtaaagactatgtgtat

SEQ ID NO: 583407 - DNA, 19 bp, Mus musculus
  siRNA target sequence for Usp27x (NM_019461.1,1088-1106).
cgggacttggggagaaata

SEQ ID NO: 583408 - DNA, 19 bp, Mus musculus
  siRNA target sequence for Usp27x (NM_019461.1,1121-1139).
cgaccaaacctgaactaga

SEQ ID NO: 583409 - DNA, 19 bp, Mus musculus
  siRNA target sequence for Usp27x (NM_019461.1,1122-1140).
gaccaaacctgaactagaa

SEQ ID NO: 583410 - DNA, 19 bp, Mus musculus
  siRNA target sequence for Usp27x (NM_019461.1,1191-1209).
cggcttacgaggactaatt

SEQ ID NO: 583411 - DNA, 19 bp, Mus musculus
  siRNA target sequence for Usp27x (NM_019461.1,1192-1210).
ggcttacgaggactaatta

SEQ ID NO: 583412 - DNA, 19 bp, Mus musculus
  siRNA target sequence for Usp27x (NM_019461.1,1193-1211).
gcttacgaggactaattaa

SEQ ID NO: 583413 - DNA, 19 bp, Mus musculus
  siRNA target sequence for Usp27x (NM_019461.1,1194-1212).
cttacgaggactaattaat

SEQ ID NO: 583414 - DNA, 19 bp, Mus musculus
  siRNA target sequence for Usp27x (NM_019461.1,1213-1231).
cttggcaacacgtgtttta

SEQ ID NO: 583415 - DNA, 19 bp, Mus musculus
  siRNA target sequence for Usp27x (NM_019461.1,1251-1269).
cttgacccacactccaata

SEQ ID NO: 583416 - DNA, 19 bp, Mus musculus
  siRNA target sequence for Usp27x (NM_019461.1,1264-1282).
ccaatactgagagatttct

SEQ ID NO: 583417 - DNA, 19 bp, Mus musculus
  siRNA target sequence for Usp27x (NM_019461.1,1265-1283).
caatactgagagatttctt

SEQ ID NO: 583418 - DNA, 19 bp, Mus musculus
  siRNA target sequence for Usp27x (NM_019461.1,1291-1309).
gacaggcaccggtgtgaaa

SEQ ID NO: 583419 - DNA, 19 bp, Mus musculus
  siRNA target sequence for Usp27x (NM_019461.1,1382-1400).
ctcctcatgtgccctataa

SEQ ID NO: 583420 - DNA, 19 bp, Mus musculus
  siRNA target sequence for Usp27x (NM_019461.1,1761-1779).
ctgcttgcgaaggtttaca

SEQ ID NO: 583421 - DNA, 19 bp, Mus musculus
  siRNA target sequence for Usp27x (NM_019461.1,1817-1835).
gtggtagttgccaaagcta

SEQ ID NO: 583422 - DNA, 19 bp, Mus musculus
  siRNA target sequence for Usp27x (NM_019461.1,1921-1939).
cagaggcgcaagatcacta

SEQ ID NO: 583423 - DNA, 19 bp, Mus musculus
  siRNA target sequence for Usp27x (NM_019461.1,1929-1947).
caagatcactacgtacatt

SEQ ID NO: 583424 - DNA, 19 bp, Mus musculus
  siRNA target sequence for Usp27x (NM_019461.1,1935-1953).
cactacgtacatttccttt

SEQ ID NO: 583425 - DNA, 19 bp, Mus musculus
  siRNA target sequence for Usp27x (NM_019461.1,1963-1981).
ctggatatgacaccattta

SEQ ID NO: 583426 - DNA, 19 bp, Mus musculus
  siRNA target sequence for Usp27x (NM_019461.1,2016-2034).
gttgcagctcccaaccaat

SEQ ID NO: 583427 - DNA, 19 bp, Mus musculus
  siRNA target sequence for Usp27x (NM_019461.1,2019-2037).
gcagctcccaaccaatagt

SEQ ID NO: 583428 - DNA, 19 bp, Mus musculus
  siRNA target sequence for Usp27x (NM_019461.1,2036-2054).
gtgcgaacaacgagaataa

SEQ ID NO: 583429 - DNA, 19 bp, Mus musculus
  siRNA target sequence for Usp27x (NM_019461.1,2038-2056).
gcgaacaacgagaataagt

SEQ ID NO: 583430 - DNA, 19 bp, Mus musculus
  siRNA target sequence for Usp27x (NM_019461.1,2039-2057).
cgaacaacgagaataagta

SEQ ID NO: 583431 - DNA, 19 bp, Mus musculus
  siRNA target sequence for Usp29 (NM_021323.1,1511-1529).
cagatccgcagcacaaaca

SEQ ID NO: 583432 - DNA, 19 bp, Mus musculus
  siRNA target sequence for Usp29 (NM_021323.1,1566-1584).
cagtcatcgaaatagtaga

SEQ ID NO: 583433 - DNA, 19 bp, Mus musculus
  siRNA target sequence for Usp29 (NM_021323.1,1568-1586).
gtcatcgaaatagtagaaa

SEQ ID NO: 583434 - DNA, 19 bp, Mus musculus
  siRNA target sequence for Usp29 (NM_021323.1,1642-1660).
gtttcagctgggtgataat

SEQ ID NO: 583435 - DNA, 19 bp, Mus musculus
  siRNA target sequence for Usp29 (NM_021323.1,1646-1664).
cagctgggtgataatgtta

SEQ ID NO: 583436 - DNA, 19 bp, Mus musculus
  siRNA target sequence for Usp29 (NM_021323.1,1696-1714).
gtatcatctggatttaact

SEQ ID NO: 583437 - DNA, 19 bp, Mus musculus
  siRNA target sequence for Usp29 (NM_021323.1,1721-1739).
gacgacacatccttactca

SEQ ID NO: 583438 - DNA, 19 bp, Mus musculus
  siRNA target sequence for Usp29 (NM_021323.1,1731-1749).
ccttactcatcgacaagtt

SEQ ID NO: 583439 - DNA, 19 bp, Mus musculus
  siRNA target sequence for Usp29 (NM_021323.1,1732-1750).
cttactcatcgacaagtta

SEQ ID NO: 583440 - DNA, 19 bp, Mus musculus
  siRNA target sequence for Usp29 (NM_021323.1,1736-1754).
ctcatcgacaagttatcct

SEQ ID NO: 583441 - DNA, 19 bp, Mus musculus
  siRNA target sequence for Usp29 (NM_021323.1,1747-1765).
gttatcctctgcagatgtt

SEQ ID NO: 583442 - DNA, 19 bp, Mus musculus
  siRNA target sequence for Usp29 (NM_021323.1,1763-1781).
gttgaacatttgaagtcat

SEQ ID NO: 583443 - DNA, 19 bp, Mus musculus
  siRNA target sequence for Usp29 (NM_021323.1,1936-1954).
ccgcaagatgccactttct

SEQ ID NO: 583444 - DNA, 19 bp, Mus musculus
  siRNA target sequence for Usp29 (NM_021323.1,1937-1955).
cgcaagatgccactttcta

SEQ ID NO: 583445 - DNA, 19 bp, Mus musculus
  siRNA target sequence for Usp29 (NM_021323.1,1938-1956).
gcaagatgccactttctat

SEQ ID NO: 583446 - DNA, 19 bp, Mus musculus
  siRNA target sequence for Usp29 (NM_021323.1,2083-2101).
gaaatccaggcgatattat

SEQ ID NO: 583447 - DNA, 19 bp, Mus musculus
  siRNA target sequence for Usp29 (NM_021323.1,2126-2144).
gagaaagctgtgaccttaa

SEQ ID NO: 583448 - DNA, 19 bp, Mus musculus
  siRNA target sequence for Usp29 (NM_021323.1,2128-2146).
gaaagctgtgaccttaaga

SEQ ID NO: 583449 - DNA, 19 bp, Mus musculus
  siRNA target sequence for Usp29 (NM_021323.1,2153-2171).
gaaaagcgtagcaattgga

SEQ ID NO: 583450 - DNA, 19 bp, Mus musculus
  siRNA target sequence for Usp29 (NM_021323.1,2158-2176).
gcgtagcaattggaaactt

SEQ ID NO: 583451 - DNA, 19 bp, Mus musculus
  siRNA target sequence for Usp29 (NM_021323.1,2174-2192).
cttgaacctgctttcaatt

SEQ ID NO: 583452 - DNA, 19 bp, Mus musculus
  siRNA target sequence for Usp29 (NM_021323.1,2177-2195).
gaacctgctttcaattcca

SEQ ID NO: 583453 - DNA, 19 bp, Mus musculus
  siRNA target sequence for Usp29 (NM_021323.1,2277-2295).
gactggagatcataacaca

SEQ ID NO: 583454 - DNA, 19 bp, Mus musculus
  siRNA target sequence for Usp29 (NM_021323.1,2373-2391).
gttacatgaattccatttt

SEQ ID NO: 583455 - DNA, 19 bp, Mus musculus
  siRNA target sequence for Usp29 (NM_021323.1,2401-2419).
ctttgggattccaaccttt

SEQ ID NO: 583456 - DNA, 19 bp, Mus musculus
  siRNA target sequence for Usp29 (NM_021323.1,2405-2423).
gggattccaacctttgcaa

SEQ ID NO: 583457 - DNA, 19 bp, Mus musculus
  siRNA target sequence for Usp29 (NM_021323.1,2406-2424).
ggattccaacctttgcaaa

SEQ ID NO: 583458 - DNA, 19 bp, Mus musculus
  siRNA target sequence for Usp29 (NM_021323.1,2463-2481).
cctacgatgaccttatcat

SEQ ID NO: 583459 - DNA, 19 bp, Mus musculus
  siRNA target sequence for Usp29 (NM_021323.1,2537-2555).
gagttactcaccagtgtaa

SEQ ID NO: 583460 - DNA, 19 bp, Mus musculus
  siRNA target sequence for Usp29 (NM_021323.1,2543-2561).
ctcaccagtgtaaagaagt

SEQ ID NO: 583461 - DNA, 19 bp, Mus musculus
  siRNA target sequence for Usp29 (NM_021323.1,2552-2570).
gtaaagaagtccatttcca

SEQ ID NO: 583462 - DNA, 19 bp, Mus musculus
  siRNA target sequence for Usp29 (NM_021323.1,2581-2599).
cacattctcgggcaatgaa

SEQ ID NO: 583463 - DNA, 19 bp, Mus musculus
  siRNA target sequence for Usp29 (NM_021323.1,2583-2601).
cattctcgggcaatgaaca

SEQ ID NO: 583464 - DNA, 19 bp, Mus musculus
  siRNA target sequence for Usp29 (NM_021323.1,2705-2723).
gggtctgctggcaccaaaa

SEQ ID NO: 583465 - DNA, 19 bp, Mus musculus
  siRNA target sequence for Usp29 (NM_021323.1,2709-2727).
ctgctggcaccaaaaggtt

SEQ ID NO: 583466 - DNA, 19 bp, Mus musculus
  siRNA target sequence for Usp29 (NM_021323.1,2714-2732).
ggcaccaaaaggtttgttt

SEQ ID NO: 583467 - DNA, 19 bp, Mus musculus
  siRNA target sequence for Usp29 (NM_021323.1,2733-2751).
gtcccgttggagctaattt

SEQ ID NO: 583468 - DNA, 19 bp, Mus musculus
  siRNA target sequence for Usp29 (NM_021323.1,2736-2754).
ccgttggagctaattttga

SEQ ID NO: 583469 - DNA, 19 bp, Mus musculus
  siRNA target sequence for Usp29 (NM_021323.1,2737-2755).
cgttggagctaattttgaa

SEQ ID NO: 583470 - DNA, 19 bp, Mus musculus
  siRNA target sequence for Usp29 (NM_021323.1,2790-2808).
gtggtgaggctactatcaa

SEQ ID NO: 583471 - DNA, 19 bp, Mus musculus
  siRNA target sequence for Usp29 (NM_021323.1,2806-2824).
caaaaccgaagtgagtaat

SEQ ID NO: 583472 - DNA, 19 bp, Mus musculus
  siRNA target sequence for Usp29 (NM_021323.1,2811-2829).
ccgaagtgagtaattacct

SEQ ID NO: 583473 - DNA, 19 bp, Mus musculus
  siRNA target sequence for Usp29 (NM_021323.1,2859-2877).
cacaccctctatcaattca

SEQ ID NO: 583474 - DNA, 19 bp, Mus musculus
  siRNA target sequence for Usp29 (NM_021323.1,2861-2879).
caccctctatcaattcaaa

SEQ ID NO: 583475 - DNA, 19 bp, Mus musculus
  siRNA target sequence for Usp29 (NM_021323.1,2871-2889).
caattcaaaagtcttttga

SEQ ID NO: 583476 - DNA, 19 bp, Mus musculus
  siRNA target sequence for Usp29 (NM_021323.1,2906-2924).
gaaaaaattgagcataact

SEQ ID NO: 583477 - DNA, 19 bp, Mus musculus
  siRNA target sequence for Usp29 (NM_021323.1,2915-2933).
gagcataactgtgagaaat

SEQ ID NO: 583478 - DNA, 19 bp, Mus musculus
  siRNA target sequence for Usp29 (NM_021323.1,2935-2953).
caagaacaagaattctgtt

SEQ ID NO: 583479 - DNA, 19 bp, Mus musculus
  siRNA target sequence for Usp29 (NM_021323.1,2951-2969).
gttctcaagtacacattga

SEQ ID NO: 583480 - DNA, 19 bp, Mus musculus
  siRNA target sequence for Usp29 (NM_021323.1,2982-3000).
gggtcctcattgttcatct

SEQ ID NO: 583481 - DNA, 19 bp, Mus musculus
  siRNA target sequence for Usp29 (NM_021323.1,3044-3062).
gagcagccagttgagattt

SEQ ID NO: 583482 - DNA, 19 bp, Mus musculus
  siRNA target sequence for Usp29 (NM_021323.1,3058-3076).
gatttctaagtatttaaat

SEQ ID NO: 583483 - DNA, 19 bp, Mus musculus
  siRNA target sequence for Usp29 (NM_021323.1,3162-3180).
ggatcttcaaccagtcaat

SEQ ID NO: 583484 - DNA, 19 bp, Mus musculus
  siRNA target sequence for Usp29 (NM_021323.1,3166-3184).
cttcaaccagtcaatgtca

SEQ ID NO: 583485 - DNA, 19 bp, Mus musculus
  siRNA target sequence for Usp29 (NM_021323.1,3186-3204).
ctaagaaggtgatttcaga

SEQ ID NO: 583486 - DNA, 19 bp, Mus musculus
  siRNA target sequence for Usp29 (NM_021323.1,3261-3279).
gcttccagataatgtatga

SEQ ID NO: 583487 - DNA, 19 bp, Mus musculus
  siRNA target sequence for Usp29 (NM_021323.1,3331-3349).
catgctggagccagaacta

SEQ ID NO: 583488 - DNA, 19 bp, Mus musculus
  siRNA target sequence for Usp29 (NM_021323.1,3389-3407).
ctagcaactgactcaatga

SEQ ID NO: 583489 - DNA, 19 bp, Mus musculus
  siRNA target sequence for Usp29 (NM_021323.1,3498-3516).
cagagaatccagaatttaa

SEQ ID NO: 583490 - DNA, 19 bp, Mus musculus
  siRNA target sequence for Usp29 (NM_021323.1,3509-3527).
gaatttaagaactatgaga

SEQ ID NO: 583491 - DNA, 19 bp, Mus musculus
  siRNA target sequence for Usp29 (NM_021323.1,3600-3618).
gtcgaatcaagggtttgtt

SEQ ID NO: 583492 - DNA, 19 bp, Mus musculus
  siRNA target sequence for Usp29 (NM_021323.1,3603-3621).
gaatcaagggtttgtttct

SEQ ID NO: 583493 - DNA, 19 bp, Mus musculus
  siRNA target sequence for Usp29 (NM_021323.1,3625-3643).
ggcatcccttgcaagtgtt

SEQ ID NO: 583494 - DNA, 19 bp, Mus musculus
  siRNA target sequence for Usp29 (NM_021323.1,3626-3644).
gcatcccttgcaagtgtta

SEQ ID NO: 583495 - DNA, 19 bp, Mus musculus
  siRNA target sequence for Usp29 (NM_021323.1,3631-3649).
ccttgcaagtgttagttct

SEQ ID NO: 583496 - DNA, 19 bp, Mus musculus
  siRNA target sequence for Usp29 (NM_021323.1,3675-3693).
gtaggtctccagaattgca

SEQ ID NO: 583497 - DNA, 19 bp, Mus musculus
  siRNA target sequence for Usp29 (NM_021323.1,3755-3773).
gatgatcttcagaattaca

SEQ ID NO: 583498 - DNA, 19 bp, Mus musculus
  siRNA target sequence for Usp29 (NM_021323.1,3810-3828).
caaattcaggccattatgt

SEQ ID NO: 583499 - DNA, 19 bp, Mus musculus
  siRNA target sequence for Usp29 (NM_021323.1,3816-3834).
caggccattatgtaagtga

SEQ ID NO: 583500 - DNA, 19 bp, Mus musculus
  siRNA target sequence for Usp29 (NM_021323.1,3827-3845).
gtaagtgatgtgtatgact

SEQ ID NO: 583501 - DNA, 19 bp, Mus musculus
  siRNA target sequence for Usp29 (NM_021323.1,3928-3946).
cagcggatacatcttcttt

SEQ ID NO: 583502 - DNA, 19 bp, Mus musculus
  siRNA target sequence for Usp29 (NM_021323.1,3930-3948).
gcggatacatcttctttta

SEQ ID NO: 583503 - DNA, 19 bp, Mus musculus
  siRNA target sequence for Usp29 (NM_021323.1,4031-4049).
gacatagattacttctcaa

SEQ ID NO: 583504 - DNA, 19 bp, Mus musculus
  siRNA target sequence for Usp29 (NM_021323.1,4055-4073).
cttaacggccttacataca

SEQ ID NO: 583505 - DNA, 19 bp, Mus musculus
  siRNA target sequence for Usp3 (NM_144937.2,196-214).
cgtgtgcaggtccaacaaa

SEQ ID NO: 583506 - DNA, 19 bp, Mus musculus
  siRNA target sequence for Usp3 (NM_144937.2,223-241).
ggtctgtttgacttgttca

SEQ ID NO: 583507 - DNA, 19 bp, Mus musculus
  siRNA target sequence for Usp3 (NM_144937.2,224-242).
gtctgtttgacttgttcaa

SEQ ID NO: 583508 - DNA, 19 bp, Mus musculus
  siRNA target sequence for Usp3 (NM_144937.2,226-244).
ctgtttgacttgttcaagt

SEQ ID NO: 583509 - DNA, 19 bp, Mus musculus
  siRNA target sequence for Usp3 (NM_144937.2,263-281).
gtgaatggccatgcaaaaa

SEQ ID NO: 583510 - DNA, 19 bp, Mus musculus
  siRNA target sequence for Usp3 (NM_144937.2,270-288).
gccatgcaaaaaaacatta

SEQ ID NO: 583511 - DNA, 19 bp, Mus musculus
  siRNA target sequence for Usp3 (NM_144937.2,271-289).
ccatgcaaaaaaacattat

SEQ ID NO: 583512 - DNA, 19 bp, Mus musculus
  siRNA target sequence for Usp3 (NM_144937.2,296-314).
gcacagatacccttactca

SEQ ID NO: 583513 - DNA, 19 bp, Mus musculus
  siRNA target sequence for Usp3 (NM_144937.2,297-315).
cacagatacccttactcaa

SEQ ID NO: 583514 - DNA, 19 bp, Mus musculus
  siRNA target sequence for Usp3 (NM_144937.2,305-323).
cccttactcaaccataaga

SEQ ID NO: 583515 - DNA, 19 bp, Mus musculus
  siRNA target sequence for Usp3 (NM_144937.2,307-325).
cttactcaaccataagaga

SEQ ID NO: 583516 - DNA, 19 bp, Mus musculus
  siRNA target sequence for Usp3 (NM_144937.2,376-394).
ctacagcacatactgttat

SEQ ID NO: 583517 - DNA, 19 bp, Mus musculus
  siRNA target sequence for Usp3 (NM_144937.2,390-408).
gttatcgctgtgacgattt

SEQ ID NO: 583518 - DNA, 19 bp, Mus musculus
  siRNA target sequence for Usp3 (NM_144937.2,450-468).
gagaacacttacagaactt

SEQ ID NO: 583519 - DNA, 19 bp, Mus musculus
  siRNA target sequence for Usp3 (NM_144937.2,488-506).
gcggacaggcacagaaaaa

SEQ ID NO: 583520 - DNA, 19 bp, Mus musculus
  siRNA target sequence for Usp3 (NM_144937.2,490-508).
ggacaggcacagaaaaaga

SEQ ID NO: 583521 - DNA, 19 bp, Mus musculus
  siRNA target sequence for Usp3 (NM_144937.2,538-556).
caagttattaaaagtaaat

SEQ ID NO: 583522 - DNA, 19 bp, Mus musculus
  siRNA target sequence for Usp3 (NM_144937.2,578-596).
gccacaggccttcgaaatt

SEQ ID NO: 583523 - DNA, 19 bp, Mus musculus
  siRNA target sequence for Usp3 (NM_144937.2,579-597).
ccacaggccttcgaaattt

SEQ ID NO: 583524 - DNA, 19 bp, Mus musculus
  siRNA target sequence for Usp3 (NM_144937.2,590-608).
cgaaatttgggcaacactt

SEQ ID NO: 583525 - DNA, 19 bp, Mus musculus
  siRNA target sequence for Usp3 (NM_144937.2,742-760).
ggacagcaatgtgtcttta

SEQ ID NO: 583526 - DNA, 19 bp, Mus musculus
  siRNA target sequence for Usp3 (NM_144937.2,748-766).
caatgtgtctttagtagaa

SEQ ID NO: 583527 - DNA, 19 bp, Mus musculus
  siRNA target sequence for Usp3 (NM_144937.2,800-818).
ggcagccagactgcattta

SEQ ID NO: 583528 - DNA, 19 bp, Mus musculus
  siRNA target sequence for Usp3 (NM_144937.2,802-820).
cagccagactgcatttagt

SEQ ID NO: 583529 - DNA, 19 bp, Mus musculus
  siRNA target sequence for Usp3 (NM_144937.2,893-911).
gaattcatgcgctaccttt

SEQ ID NO: 583530 - DNA, 19 bp, Mus musculus
  siRNA target sequence for Usp3 (NM_144937.2,898-916).
catgcgctaccttttggat

SEQ ID NO: 583531 - DNA, 19 bp, Mus musculus
  siRNA target sequence for Usp3 (NM_144937.2,904-922).
ctaccttttggatcatcta

SEQ ID NO: 583532 - DNA, 19 bp, Mus musculus
  siRNA target sequence for Usp3 (NM_144937.2,913-931).
ggatcatctacacttagaa

SEQ ID NO: 583533 - DNA, 19 bp, Mus musculus
  siRNA target sequence for Usp3 (NM_144937.2,957-975).
cccgctcagcaattctaca

SEQ ID NO: 583534 - DNA, 19 bp, Mus musculus
  siRNA target sequence for Usp3 (NM_144937.2,987-1005).
cactgtctgcaagtaacaa

SEQ ID NO: 583535 - DNA, 19 bp, Mus musculus
  siRNA target sequence for Usp3 (NM_144937.2,1012-1030).
cataaatggagcatcaact

SEQ ID NO: 583536 - DNA, 19 bp, Mus musculus
  siRNA target sequence for Usp3 (NM_144937.2,1029-1047).
ctgttgtcacagcaatatt

SEQ ID NO: 583537 - DNA, 19 bp, Mus musculus
  siRNA target sequence for Usp3 (NM_144937.2,1069-1087).
ggtcaactgcctcatatgt

SEQ ID NO: 583538 - DNA, 19 bp, Mus musculus
  siRNA target sequence for Usp3 (NM_144937.2,1092-1110).
cagagtcgaggaagtttga

SEQ ID NO: 583539 - DNA, 19 bp, Mus musculus
  siRNA target sequence for Usp3 (NM_144937.2,1098-1116).
cgaggaagtttgatccatt

SEQ ID NO: 583540 - DNA, 19 bp, Mus musculus
  siRNA target sequence for Usp3 (NM_144937.2,1117-1135).
cctagatctctccttagat

SEQ ID NO: 583541 - DNA, 19 bp, Mus musculus
  siRNA target sequence for Usp3 (NM_144937.2,1152-1170).
gaagcaagcgctctaagaa

SEQ ID NO: 583542 - DNA, 19 bp, Mus musculus
  siRNA target sequence for Usp3 (NM_144937.2,1155-1173).
gcaagcgctctaagaatca

SEQ ID NO: 583543 - DNA, 19 bp, Mus musculus
  siRNA target sequence for Usp3 (NM_144937.2,1183-1201).
gccagtttgctccttaaga

SEQ ID NO: 583544 - DNA, 19 bp, Mus musculus
  siRNA target sequence for Usp3 (NM_144937.2,1260-1278).
gccataagtgcaaaaagaa

SEQ ID NO: 583545 - DNA, 19 bp, Mus musculus
  siRNA target sequence for Usp3 (NM_144937.2,1334-1352).
cacctgaaaaggtttcact

SEQ ID NO: 583546 - DNA, 19 bp, Mus musculus
  siRNA target sequence for Usp3 (NM_144937.2,1368-1386).
gaaacaaagtcgatacata

SEQ ID NO: 583547 - DNA, 19 bp, Mus musculus
  siRNA target sequence for Usp3 (NM_144937.2,1372-1390).
caaagtcgatacatacgtt

SEQ ID NO: 583548 - DNA, 19 bp, Mus musculus
  siRNA target sequence for Usp3 (NM_144937.2,1376-1394).
gtcgatacatacgttcaat

SEQ ID NO: 583549 - DNA, 19 bp, Mus musculus
  siRNA target sequence for Usp3 (NM_144937.2,1503-1521).
gggttggttctggacatta

SEQ ID NO: 583550 - DNA, 19 bp, Mus musculus
  siRNA target sequence for Usp3 (NM_144937.2,1541-1559).
gaaggccgctggttccatt

SEQ ID NO: 583551 - DNA, 19 bp, Mus musculus
  siRNA target sequence for Usp3 (NM_144937.2,1544-1562).
ggccgctggttccatttca

SEQ ID NO: 583552 - DNA, 19 bp, Mus musculus
  siRNA target sequence for Usp3 (NM_144937.2,1607-1625).
gcaaaggcctacattctgt

SEQ ID NO: 583553 - DNA, 19 bp, Mus musculus
  siRNA target sequence for Usp3 (NM_144937.2,1608-1626).
caaaggcctacattctgtt

SEQ ID NO: 583554 - DNA, 19 bp, Mus musculus
  siRNA target sequence for Usp33 (NM_133247.1,205-223).
gacgacttttcgaaatcat

SEQ ID NO: 583555 - DNA, 19 bp, Mus musculus
  siRNA target sequence for Usp33 (NM_133247.1,225-243).
gtccacatttggattcagt

SEQ ID NO: 583556 - DNA, 19 bp, Mus musculus
  siRNA target sequence for Usp33 (NM_133247.1,235-253).
ggattcagttggtgaaata

SEQ ID NO: 583557 - DNA, 19 bp, Mus musculus
  siRNA target sequence for Usp33 (NM_133247.1,236-254).
gattcagttggtgaaataa

SEQ ID NO: 583558 - DNA, 19 bp, Mus musculus
  siRNA target sequence for Usp33 (NM_133247.1,262-280).
ggacttgatacagaaatct

SEQ ID NO: 583559 - DNA, 19 bp, Mus musculus
  siRNA target sequence for Usp33 (NM_133247.1,285-303).
gcgcttgtcaggactgtaa

SEQ ID NO: 583560 - DNA, 19 bp, Mus musculus
  siRNA target sequence for Usp33 (NM_133247.1,286-304).
cgcttgtcaggactgtaaa

SEQ ID NO: 583561 - DNA, 19 bp, Mus musculus
  siRNA target sequence for Usp33 (NM_133247.1,326-344).
gcgtgcctggagaataggt

SEQ ID NO: 583562 - DNA, 19 bp, Mus musculus
  siRNA target sequence for Usp33 (NM_133247.1,401-419).
gagacaaagcattatctaa

SEQ ID NO: 583563 - DNA, 19 bp, Mus musculus
  siRNA target sequence for Usp33 (NM_133247.1,440-458).
cgagtatggtgttatgctt

SEQ ID NO: 583564 - DNA, 19 bp, Mus musculus
  siRNA target sequence for Usp33 (NM_133247.1,455-473).
gcttgcagcaaagaagtat

SEQ ID NO: 583565 - DNA, 19 bp, Mus musculus
  siRNA target sequence for Usp33 (NM_133247.1,500-518).
ccttcattacctcatgtaa

SEQ ID NO: 583566 - DNA, 19 bp, Mus musculus
  siRNA target sequence for Usp33 (NM_133247.1,504-522).
cattacctcatgtaagaca

SEQ ID NO: 583567 - DNA, 19 bp, Mus musculus
  siRNA target sequence for Usp33 (NM_133247.1,656-674).
ggcctgacaggtttgaaaa

SEQ ID NO: 583568 - DNA, 19 bp, Mus musculus
  siRNA target sequence for Usp33 (NM_133247.1,761-779).
ggactggctagaacagata

SEQ ID NO: 583569 - DNA, 19 bp, Mus musculus
  siRNA target sequence for Usp33 (NM_133247.1,785-803).
ccagcaatttgtaaaagtt

SEQ ID NO: 583570 - DNA, 19 bp, Mus musculus
  siRNA target sequence for Usp33 (NM_133247.1,795-813).
gtaaaagttatctcaaact

SEQ ID NO: 583571 - DNA, 19 bp, Mus musculus
  siRNA target sequence for Usp33 (NM_133247.1,849-867).
ctgttgtgccggctaatct

SEQ ID NO: 583572 - DNA, 19 bp, Mus musculus
  siRNA target sequence for Usp33 (NM_133247.1,851-869).
gttgtgccggctaatctgt

SEQ ID NO: 583573 - DNA, 19 bp, Mus musculus
  siRNA target sequence for Usp33 (NM_133247.1,868-886).
gttccaaggaattaaaact

SEQ ID NO: 583574 - DNA, 19 bp, Mus musculus
  siRNA target sequence for Usp33 (NM_133247.1,872-890).
caaggaattaaaactgtaa

SEQ ID NO: 583575 - DNA, 19 bp, Mus musculus
  siRNA target sequence for Usp33 (NM_133247.1,893-911).
ccaacttttcgaggttatt

SEQ ID NO: 583576 - DNA, 19 bp, Mus musculus
  siRNA target sequence for Usp33 (NM_133247.1,897-915).
cttttcgaggttattctca

SEQ ID NO: 583577 - DNA, 19 bp, Mus musculus
  siRNA target sequence for Usp33 (NM_133247.1,998-1016).
gagcctcaaacactaactt

SEQ ID NO: 583578 - DNA, 19 bp, Mus musculus
  siRNA target sequence for Usp33 (NM_133247.1,1202-1220).
gagaaggtgtgcaataaga

SEQ ID NO: 583579 - DNA, 19 bp, Mus musculus
  siRNA target sequence for Usp33 (NM_133247.1,1228-1246).
ggcaaatgccgatgtagaa

SEQ ID NO: 583580 - DNA, 19 bp, Mus musculus
  siRNA target sequence for Usp33 (NM_133247.1,1264-1282).
cacagtgtgtgaaacagtt

SEQ ID NO: 583581 - DNA, 19 bp, Mus musculus
  siRNA target sequence for Usp33 (NM_133247.1,1272-1290).
gtgaaacagttgacctaaa

SEQ ID NO: 583582 - DNA, 19 bp, Mus musculus
  siRNA target sequence for Usp33 (NM_133247.1,1293-1311).
gccaggagaccgtcaaagt

SEQ ID NO: 583583 - DNA, 19 bp, Mus musculus
  siRNA target sequence for Usp33 (NM_133247.1,1319-1337).
cacggcagagcctcagaat

SEQ ID NO: 583584 - DNA, 19 bp, Mus musculus
  siRNA target sequence for Usp33 (NM_133247.1,1385-1403).
ccttcaaatgaaagtgtta

SEQ ID NO: 583585 - DNA, 19 bp, Mus musculus
  siRNA target sequence for Usp33 (NM_133247.1,1456-1474).
gtcgcctccacacaagaaa

SEQ ID NO: 583586 - DNA, 19 bp, Mus musculus
  siRNA target sequence for Usp33 (NM_133247.1,1524-1542).
gtgtcatctccgacatatt

SEQ ID NO: 583587 - DNA, 19 bp, Mus musculus
  siRNA target sequence for Usp33 (NM_133247.1,1528-1546).
catctccgacatattcgat

SEQ ID NO: 583588 - DNA, 19 bp, Mus musculus
  siRNA target sequence for Usp33 (NM_133247.1,1665-1683).
cctccagtcacccaactat

SEQ ID NO: 583589 - DNA, 19 bp, Mus musculus
  siRNA target sequence for Usp33 (NM_133247.1,1671-1689).
gtcacccaactatagtcaa

SEQ ID NO: 583590 - DNA, 19 bp, Mus musculus
  siRNA target sequence for Usp33 (NM_133247.1,1718-1736).
ccgcaggggtggatagctt

SEQ ID NO: 583591 - DNA, 19 bp, Mus musculus
  siRNA target sequence for Usp33 (NM_133247.1,1719-1737).
cgcaggggtggatagcttt

SEQ ID NO: 583592 - DNA, 19 bp, Mus musculus
  siRNA target sequence for Usp33 (NM_133247.1,1724-1742).
gggtggatagctttcttca

SEQ ID NO: 583593 - DNA, 19 bp, Mus musculus
  siRNA target sequence for Usp33 (NM_133247.1,1791-1809).
ggggtccagtagttacctt

SEQ ID NO: 583594 - DNA, 19 bp, Mus musculus
  siRNA target sequence for Usp33 (NM_133247.1,1799-1817).
gtagttaccttgcaagatt

SEQ ID NO: 583595 - DNA, 19 bp, Mus musculus
  siRNA target sequence for Usp33 (NM_133247.1,1891-1909).
gaggaatggagtaaagttt

SEQ ID NO: 583596 - DNA, 19 bp, Mus musculus
  siRNA target sequence for Usp33 (NM_133247.1,1939-1957).
gtgtatccaccttaaaaga

SEQ ID NO: 583597 - DNA, 19 bp, Mus musculus
  siRNA target sequence for Usp33 (NM_133247.1,1945-1963).
ccaccttaaaagatttcga

SEQ ID NO: 583598 - DNA, 19 bp, Mus musculus
  siRNA target sequence for Usp33 (NM_133247.1,1956-1974).
gatttcgacatgaactgat

SEQ ID NO: 583599 - DNA, 19 bp, Mus musculus
  siRNA target sequence for Usp33 (NM_133247.1,1961-1979).
cgacatgaactgatgtttt

SEQ ID NO: 583600 - DNA, 19 bp, Mus musculus
  siRNA target sequence for Usp33 (NM_133247.1,2058-2076).
ctcagattgtgacatatga

SEQ ID NO: 583601 - DNA, 19 bp, Mus musculus
  siRNA target sequence for Usp33 (NM_133247.1,2098-2116).
ccatgggactgcaagtagt

SEQ ID NO: 583602 - DNA, 19 bp, Mus musculus
  siRNA target sequence for Usp33 (NM_133247.1,2129-2147).
gcctactgccgaaacaatt

SEQ ID NO: 583603 - DNA, 19 bp, Mus musculus
  siRNA target sequence for Usp33 (NM_133247.1,2134-2152).
ctgccgaaacaatttaaat

SEQ ID NO: 583604 - DNA, 19 bp, Mus musculus
  siRNA target sequence for Usp33 (NM_133247.1,2136-2154).
gccgaaacaatttaaataa

SEQ ID NO: 583605 - DNA, 19 bp, Mus musculus
  siRNA target sequence for Usp33 (NM_133247.1,2217-2235).
ccgaggcctacgtcctttt

SEQ ID NO: 583606 - DNA, 19 bp, Mus musculus
  siRNA target sequence for Usp33 (NM_133247.1,2250-2268).
gtgaagaggcacaaaagga

SEQ ID NO: 583607 - DNA, 19 bp, Mus musculus
  siRNA target sequence for Usp33 (NM_133247.1,2269-2287).
gaggcggaggatatcaaat

SEQ ID NO: 583608 - DNA, 19 bp, Mus musculus
  siRNA target sequence for Usp33 (NM_133247.1,2271-2289).
ggcggaggatatcaaattt

SEQ ID NO: 583609 - DNA, 19 bp, Mus musculus
  siRNA target sequence for Usp33 (NM_133247.1,2273-2291).
cggaggatatcaaatttgt

SEQ ID NO: 583610 - DNA, 19 bp, Mus musculus
  siRNA target sequence for Usp33 (NM_133247.1,2307-2325).
ctagcctccttcagttcta

SEQ ID NO: 583611 - DNA, 19 bp, Mus musculus
  siRNA target sequence for Usp33 (NM_133247.1,2312-2330).
ctccttcagttctacatat

SEQ ID NO: 583612 - DNA, 19 bp, Mus musculus
  siRNA target sequence for Usp33 (NM_133247.1,2331-2349).
ctcgacagtggttgaataa

SEQ ID NO: 583613 - DNA, 19 bp, Mus musculus
  siRNA target sequence for Usp33 (NM_133247.1,2366-2384).
gaacctggccctatttcaa

SEQ ID NO: 583614 - DNA, 19 bp, Mus musculus
  siRNA target sequence for Usp33 (NM_133247.1,2373-2391).
gccctatttcaaataatga

SEQ ID NO: 583615 - DNA, 19 bp, Mus musculus
  siRNA target sequence for Usp33 (NM_133247.1,2375-2393).
cctatttcaaataatgatt

SEQ ID NO: 583616 - DNA, 19 bp, Mus musculus
  siRNA target sequence for Usp33 (NM_133247.1,2376-2394).
ctatttcaaataatgattt

SEQ ID NO: 583617 - DNA, 19 bp, Mus musculus
  siRNA target sequence for Usp33 (NM_133247.1,2420-2438).
ccacgaaaagcgagttata

SEQ ID NO: 583618 - DNA, 19 bp, Mus musculus
  siRNA target sequence for Usp33 (NM_133247.1,2421-2439).
cacgaaaagcgagttatat

SEQ ID NO: 583619 - DNA, 19 bp, Mus musculus
  siRNA target sequence for Usp33 (NM_133247.1,2430-2448).
cgagttatattgaagactt

SEQ ID NO: 583620 - DNA, 19 bp, Mus musculus
  siRNA target sequence for Usp33 (NM_133247.1,2433-2451).
gttatattgaagacttagt

SEQ ID NO: 583621 - DNA, 19 bp, Mus musculus
  siRNA target sequence for Usp33 (NM_133247.1,2455-2473).
gatgctgcctcagaacatt

SEQ ID NO: 583622 - DNA, 19 bp, Mus musculus
  siRNA target sequence for Usp33 (NM_133247.1,2513-2531).
gtcaaccatctctacatct

SEQ ID NO: 583623 - DNA, 19 bp, Mus musculus
  siRNA target sequence for Usp33 (NM_133247.1,2530-2548).
ctgccacacctgccaaatt

SEQ ID NO: 583624 - DNA, 19 bp, Mus musculus
  siRNA target sequence for Usp33 (NM_133247.1,2532-2550).
gccacacctgccaaattga

SEQ ID NO: 583625 - DNA, 19 bp, Mus musculus
  siRNA target sequence for Usp33 (NM_133247.1,2538-2556).
cctgccaaattgagttaga

SEQ ID NO: 583626 - DNA, 19 bp, Mus musculus
  siRNA target sequence for Usp33 (NM_133247.1,2626-2644).
ggactccccagctactttt

SEQ ID NO: 583627 - DNA, 19 bp, Mus musculus
  siRNA target sequence for Usp33 (NM_133247.1,2715-2733).
gtccaatcgacaacactaa

SEQ ID NO: 583628 - DNA, 19 bp, Mus musculus
  siRNA target sequence for Usp33 (NM_133247.1,2717-2735).
ccaatcgacaacactaaaa

SEQ ID NO: 583629 - DNA, 19 bp, Mus musculus
  siRNA target sequence for Usp33 (NM_133247.1,2718-2736).
caatcgacaacactaaaat

SEQ ID NO: 583630 - DNA, 19 bp, Mus musculus
  siRNA target sequence for Usp33 (NM_133247.1,2730-2748).
ctaaaattgcggttactaa

SEQ ID NO: 583631 - DNA, 19 bp, Mus musculus
  siRNA target sequence for Usp33 (NM_133247.1,2775-2793).
gagcagactctggtcaaat

SEQ ID NO: 583632 - DNA, 19 bp, Mus musculus
  siRNA target sequence for Usp33 (NM_133247.1,2777-2795).
gcagactctggtcaaattt

SEQ ID NO: 583633 - DNA, 19 bp, Mus musculus
  siRNA target sequence for Usp33 (NM_133247.1,2808-2826).
ggaatttcctgcagtctat

SEQ ID NO: 583634 - DNA, 19 bp, Mus musculus
  siRNA target sequence for Usp33 (NM_133247.1,2809-2827).
gaatttcctgcagtctata

SEQ ID NO: 583635 - DNA, 19 bp, Mus musculus
  siRNA target sequence for Usp33 (NM_133247.1,2815-2833).
cctgcagtctatatatggt

SEQ ID NO: 583636 - DNA, 19 bp, Mus musculus
  siRNA target sequence for Usp33 (NM_133247.1,2851-2869).
cctccgacctccagttgtt

SEQ ID NO: 583637 - DNA, 19 bp, Mus musculus
  siRNA target sequence for Usp33 (NM_133247.1,2856-2874).
gacctccagttgttcatgt

SEQ ID NO: 583638 - DNA, 19 bp, Mus musculus
  siRNA target sequence for Usp33 (NM_133247.1,2912-2930).
gtagaaactcgctctttgt

SEQ ID NO: 583639 - DNA, 19 bp, Mus musculus
  siRNA target sequence for Usp39 (NM_138592.1,98-116).
gctcgggtcgcatcaagaa

SEQ ID NO: 583640 - DNA, 19 bp, Mus musculus
  siRNA target sequence for Usp39 (NM_138592.1,281-299).
gggaggtgcgagcaaagaa

SEQ ID NO: 583641 - DNA, 19 bp, Mus musculus
  siRNA target sequence for Usp39 (NM_138592.1,282-300).
ggaggtgcgagcaaagaat

SEQ ID NO: 583642 - DNA, 19 bp, Mus musculus
  siRNA target sequence for Usp39 (NM_138592.1,334-352).
cactgcccgtacttggata

SEQ ID NO: 583643 - DNA, 19 bp, Mus musculus
  siRNA target sequence for Usp39 (NM_138592.1,338-356).
gcccgtacttggataccat

SEQ ID NO: 583644 - DNA, 19 bp, Mus musculus
  siRNA target sequence for Usp39 (NM_138592.1,339-357).
cccgtacttggataccatt

SEQ ID NO: 583645 - DNA, 19 bp, Mus musculus
  siRNA target sequence for Usp39 (NM_138592.1,340-358).
ccgtacttggataccatta

SEQ ID NO: 583646 - DNA, 19 bp, Mus musculus
  siRNA target sequence for Usp39 (NM_138592.1,583-601).
gaggatatcacgtatgtgt

SEQ ID NO: 583647 - DNA, 19 bp, Mus musculus
  siRNA target sequence for Usp39 (NM_138592.1,600-618).
gttgaagcctactttcaca

SEQ ID NO: 583648 - DNA, 19 bp, Mus musculus
  siRNA target sequence for Usp39 (NM_138592.1,625-643).
caaattgcaaacttggata

SEQ ID NO: 583649 - DNA, 19 bp, Mus musculus
  siRNA target sequence for Usp39 (NM_138592.1,696-714).
cgtgggactgaacaacata

SEQ ID NO: 583650 - DNA, 19 bp, Mus musculus
  siRNA target sequence for Usp39 (NM_138592.1,697-715).
gtgggactgaacaacataa

SEQ ID NO: 583651 - DNA, 19 bp, Mus musculus
  siRNA target sequence for Usp39 (NM_138592.1,720-738).
caacgactatgcaaatgct

SEQ ID NO: 583652 - DNA, 19 bp, Mus musculus
  siRNA target sequence for Usp39 (NM_138592.1,763-781).
cctcctcttcggaactact

SEQ ID NO: 583653 - DNA, 19 bp, Mus musculus
  siRNA target sequence for Usp39 (NM_138592.1,764-782).
ctcctcttcggaactactt

SEQ ID NO: 583654 - DNA, 19 bp, Mus musculus
  siRNA target sequence for Usp39 (NM_138592.1,840-858).
gttggttcagcgttttgga

SEQ ID NO: 583655 - DNA, 19 bp, Mus musculus
  siRNA target sequence for Usp39 (NM_138592.1,1071-1089).
ccagggatcaatgagaatt

SEQ ID NO: 583656 - DNA, 19 bp, Mus musculus
  siRNA target sequence for Usp39 (NM_138592.1,1075-1093).
ggatcaatgagaattttca

SEQ ID NO: 583657 - DNA, 19 bp, Mus musculus
  siRNA target sequence for Usp39 (NM_138592.1,1174-1192).
gtagagtccacgttcatgt

SEQ ID NO: 583658 - DNA, 19 bp, Mus musculus
  siRNA target sequence for Usp39 (NM_138592.1,1220-1238).
cgctctataaggatgagaa

SEQ ID NO: 583659 - DNA, 19 bp, Mus musculus
  siRNA target sequence for Usp39 (NM_138592.1,1362-1380).
gcctccgtatctaatcttt

SEQ ID NO: 583660 - DNA, 19 bp, Mus musculus
  siRNA target sequence for Usp39 (NM_138592.1,1363-1381).
cctccgtatctaatctttt

SEQ ID NO: 583661 - DNA, 19 bp, Mus musculus
  siRNA target sequence for Usp39 (NM_138592.1,1367-1385).
cgtatctaatcttttgcat

SEQ ID NO: 583662 - DNA, 19 bp, Mus musculus
  siRNA target sequence for Usp39 (NM_138592.1,1382-1400).
gcatcaagagatttactaa

SEQ ID NO: 583663 - DNA, 19 bp, Mus musculus
  siRNA target sequence for Usp39 (NM_138592.1,1391-1409).
gatttactaagaacaactt

SEQ ID NO: 583664 - DNA, 19 bp, Mus musculus
  siRNA target sequence for Usp39 (NM_138592.1,1416-1434).
ggagaagaatccaacaatt

SEQ ID NO: 583665 - DNA, 19 bp, Mus musculus
  siRNA target sequence for Usp39 (NM_138592.1,1435-1453).
gtcaacttccctatcacaa

SEQ ID NO: 583666 - DNA, 19 bp, Mus musculus
  siRNA target sequence for Usp39 (NM_138592.1,1437-1455).
caacttccctatcacaaat

SEQ ID NO: 583667 - DNA, 19 bp, Mus musculus
  siRNA target sequence for Usp39 (NM_138592.1,1459-1477).
gatctgagagaatacttat

SEQ ID NO: 583668 - DNA, 19 bp, Mus musculus
  siRNA target sequence for Usp39 (NM_138592.1,1464-1482).
gagagaatacttatctgaa

SEQ ID NO: 583669 - DNA, 19 bp, Mus musculus
  siRNA target sequence for Usp39 (NM_138592.1,1489-1507).
caagccgtccacaagaaca

SEQ ID NO: 583670 - DNA, 19 bp, Mus musculus
  siRNA target sequence for Usp39 (NM_138592.1,1568-1586).
ggatccacgtgcttcatca

SEQ ID NO: 583671 - DNA, 19 bp, Mus musculus
  siRNA target sequence for Usp39 (NM_138592.1,1590-1608).
gactggcaagtggtatgaa

SEQ ID NO: 583672 - DNA, 19 bp, Mus musculus
  siRNA target sequence for Usp39 (NM_138592.1,1595-1613).
gcaagtggtatgaattaca

SEQ ID NO: 583673 - DNA, 19 bp, Mus musculus
  siRNA target sequence for Usp39 (NM_138592.1,1596-1614).
caagtggtatgaattacaa

SEQ ID NO: 583674 - DNA, 19 bp, Mus musculus
  siRNA target sequence for Usp39 (NM_138592.1,1658-1676).
ctgaggcgtacattcagat

SEQ ID NO: 583675 - DNA, 19 bp, Mus musculus
  siRNA target sequence for Usp39 (NM_138592.1,1660-1678).
gaggcgtacattcagattt

SEQ ID NO: 583676 - DNA, 19 bp, Mus musculus
  siRNA target sequence for Usp39 (NM_138592.1,1683-1701).
gaggcgggacaatgatgaa

SEQ ID NO: 583677 - DNA, 19 bp, Mus musculus
  siRNA target sequence for Usp39 (NM_138592.1,1688-1706).
gggacaatgatgaaaccaa

SEQ ID NO: 583678 - DNA, 19 bp, Mus musculus
  siRNA target sequence for Usp4 (NM_011678.1,145-163).
cgcagtggtatcttattga

SEQ ID NO: 583679 - DNA, 19 bp, Mus musculus
  siRNA target sequence for Usp4 (NM_011678.1,299-317).
gaaggagcacttaatcgat

SEQ ID NO: 583680 - DNA, 19 bp, Mus musculus
  siRNA target sequence for Usp4 (NM_011678.1,339-357).
ccagccgaagcctggaata

SEQ ID NO: 583681 - DNA, 19 bp, Mus musculus
  siRNA target sequence for Usp4 (NM_011678.1,340-358).
cagccgaagcctggaataa

SEQ ID NO: 583682 - DNA, 19 bp, Mus musculus
  siRNA target sequence for Usp4 (NM_011678.1,342-360).
gccgaagcctggaataaat

SEQ ID NO: 583683 - DNA, 19 bp, Mus musculus
  siRNA target sequence for Usp4 (NM_011678.1,343-361).
ccgaagcctggaataaatt

SEQ ID NO: 583684 - DNA, 19 bp, Mus musculus
  siRNA target sequence for Usp4 (NM_011678.1,392-410).
gcagcctattgtcagaaaa

SEQ ID NO: 583685 - DNA, 19 bp, Mus musculus
  siRNA target sequence for Usp4 (NM_011678.1,395-413).
gcctattgtcagaaaagtt

SEQ ID NO: 583686 - DNA, 19 bp, Mus musculus
  siRNA target sequence for Usp4 (NM_011678.1,397-415).
ctattgtcagaaaagttgt

SEQ ID NO: 583687 - DNA, 19 bp, Mus musculus
  siRNA target sequence for Usp4 (NM_011678.1,442-460).
gcaaagtggaagtgtattt

SEQ ID NO: 583688 - DNA, 19 bp, Mus musculus
  siRNA target sequence for Usp4 (NM_011678.1,492-510).
cccaccaatgtgctaagtt

SEQ ID NO: 583689 - DNA, 19 bp, Mus musculus
  siRNA target sequence for Usp4 (NM_011678.1,504-522).
ctaagttgccattttagca

SEQ ID NO: 583690 - DNA, 19 bp, Mus musculus
  siRNA target sequence for Usp4 (NM_011678.1,575-593).
ccctgcagaacgtgaaaca

SEQ ID NO: 583691 - DNA, 19 bp, Mus musculus
  siRNA target sequence for Usp4 (NM_011678.1,637-655).
gcaagctagacaacactat

SEQ ID NO: 583692 - DNA, 19 bp, Mus musculus
  siRNA target sequence for Usp4 (NM_011678.1,677-695).
gggtcaggtgctagtaatt

SEQ ID NO: 583693 - DNA, 19 bp, Mus musculus
  siRNA target sequence for Usp4 (NM_011678.1,679-697).
gtcaggtgctagtaattga

SEQ ID NO: 583694 - DNA, 19 bp, Mus musculus
  siRNA target sequence for Usp4 (NM_011678.1,756-774).
gcacctagcagaaatttca

SEQ ID NO: 583695 - DNA, 19 bp, Mus musculus
  siRNA target sequence for Usp4 (NM_011678.1,759-777).
cctagcagaaatttcacta

SEQ ID NO: 583696 - DNA, 19 bp, Mus musculus
  siRNA target sequence for Usp4 (NM_011678.1,821-839).
ctctctcattgcaaatggt

SEQ ID NO: 583697 - DNA, 19 bp, Mus musculus
  siRNA target sequence for Usp4 (NM_011678.1,896-914).
cttctctgcttcgtataat

SEQ ID NO: 583698 - DNA, 19 bp, Mus musculus
  siRNA target sequence for Usp4 (NM_011678.1,1021-1039).
ccccactgactgagtactt

SEQ ID NO: 583699 - DNA, 19 bp, Mus musculus
  siRNA target sequence for Usp4 (NM_011678.1,1022-1040).
cccactgactgagtacttt

SEQ ID NO: 583700 - DNA, 19 bp, Mus musculus
  siRNA target sequence for Usp4 (NM_011678.1,1158-1176).
gtggcaccacggatgttca

SEQ ID NO: 583701 - DNA, 19 bp, Mus musculus
  siRNA target sequence for Usp4 (NM_011678.1,1191-1209).
cgttttgcccctcagtttt

SEQ ID NO: 583702 - DNA, 19 bp, Mus musculus
  siRNA target sequence for Usp4 (NM_011678.1,1272-1290).
gacctgaaccgcgtaaaga

SEQ ID NO: 583703 - DNA, 19 bp, Mus musculus
  siRNA target sequence for Usp4 (NM_011678.1,1275-1293).
ctgaaccgcgtaaagaaga

SEQ ID NO: 583704 - DNA, 19 bp, Mus musculus
  siRNA target sequence for Usp4 (NM_011678.1,1330-1348).
cagatgcggtggtagcaaa

SEQ ID NO: 583705 - DNA, 19 bp, Mus musculus
  siRNA target sequence for Usp4 (NM_011678.1,1367-1385).
caggctgaggaatgattct

SEQ ID NO: 583706 - DNA, 19 bp, Mus musculus
  siRNA target sequence for Usp4 (NM_011678.1,1369-1387).
ggctgaggaatgattctgt

SEQ ID NO: 583707 - DNA, 19 bp, Mus musculus
  siRNA target sequence for Usp4 (NM_011678.1,1466-1484).
cccattttgctatctaact

SEQ ID NO: 583708 - DNA, 19 bp, Mus musculus
  siRNA target sequence for Usp4 (NM_011678.1,1468-1486).
cattttgctatctaactct

SEQ ID NO: 583709 - DNA, 19 bp, Mus musculus
  siRNA target sequence for Usp4 (NM_011678.1,1718-1736).
cacgcctcgagatgacatt

SEQ ID NO: 583710 - DNA, 19 bp, Mus musculus
  siRNA target sequence for Usp4 (NM_011678.1,1720-1738).
cgcctcgagatgacatttt

SEQ ID NO: 583711 - DNA, 19 bp, Mus musculus
  siRNA target sequence for Usp4 (NM_011678.1,1725-1743).
cgagatgacatttttgtgt

SEQ ID NO: 583712 - DNA, 19 bp, Mus musculus
  siRNA target sequence for Usp4 (NM_011678.1,1873-1891).
ctgtccctaagcataagct

SEQ ID NO: 583713 - DNA, 19 bp, Mus musculus
  siRNA target sequence for Usp4 (NM_011678.1,1875-1893).
gtccctaagcataagctaa

SEQ ID NO: 583714 - DNA, 19 bp, Mus musculus
  siRNA target sequence for Usp4 (NM_011678.1,1926-1944).
cgtatcagccgctacataa

SEQ ID NO: 583715 - DNA, 19 bp, Mus musculus
  siRNA target sequence for Usp4 (NM_011678.1,1927-1945).
gtatcagccgctacataaa

SEQ ID NO: 583716 - DNA, 19 bp, Mus musculus
  siRNA target sequence for Usp4 (NM_011678.1,2003-2021).
ctctaggagtagctatgaa

SEQ ID NO: 583717 - DNA, 19 bp, Mus musculus
  siRNA target sequence for Usp4 (NM_011678.1,2119-2137).
gcgagagcgcccaaaaggt

SEQ ID NO: 583718 - DNA, 19 bp, Mus musculus
  siRNA target sequence for Usp4 (NM_011678.1,2197-2215).
ctgctgatatcaattcact

SEQ ID NO: 583719 - DNA, 19 bp, Mus musculus
  siRNA target sequence for Usp4 (NM_011678.1,2280-2298).
gagacccgaagcctttact

SEQ ID NO: 583720 - DNA, 19 bp, Mus musculus
  siRNA target sequence for Usp4 (NM_011678.1,2470-2488).
caacaaagaagtttgactt

SEQ ID NO: 583721 - DNA, 19 bp, Mus musculus
  siRNA target sequence for Usp4 (NM_011678.1,2540-2558).
cagatactggcgggataaa

SEQ ID NO: 583722 - DNA, 19 bp, Mus musculus
  siRNA target sequence for Usp4 (NM_011678.1,2542-2560).
gatactggcgggataaact

SEQ ID NO: 583723 - DNA, 19 bp, Mus musculus
  siRNA target sequence for Usp4 (NM_011678.1,2632-2650).
cttatgtttatgacctaat

SEQ ID NO: 583724 - DNA, 19 bp, Mus musculus
  siRNA target sequence for Usp4 (NM_011678.1,2715-2733).
ctgaacgggaaatggtatt

SEQ ID NO: 583725 - DNA, 19 bp, Mus musculus
  siRNA target sequence for Usp4 (NM_011678.1,2787-2805).
gccgcctacgtgttgttct

SEQ ID NO: 583726 - DNA, 19 bp, Mus musculus
  siRNA target sequence for Usp4 (NM_011678.1,2788-2806).
ccgcctacgtgttgttcta

SEQ ID NO: 583727 - DNA, 19 bp, Mus musculus
  siRNA target sequence for Usp4 (NM_011678.1,2789-2807).
cgcctacgtgttgttctat

SEQ ID NO: 583728 - DNA, 19 bp, Mus musculus
  siRNA target sequence for Usp5 (NM_013700.1,114-132).
cgggagaccgggtccataa

SEQ ID NO: 583729 - DNA, 19 bp, Mus musculus
  siRNA target sequence for Usp5 (NM_013700.1,115-133).
gggagaccgggtccataaa

SEQ ID NO: 583730 - DNA, 19 bp, Mus musculus
  siRNA target sequence for Usp5 (NM_013700.1,117-135).
gagaccgggtccataaaga

SEQ ID NO: 583731 - DNA, 19 bp, Mus musculus
  siRNA target sequence for Usp5 (NM_013700.1,134-152).
gacgagtgcgctttctctt

SEQ ID NO: 583732 - DNA, 19 bp, Mus musculus
  siRNA target sequence for Usp5 (NM_013700.1,170-188).
gagggtggcctctatatct

SEQ ID NO: 583733 - DNA, 19 bp, Mus musculus
  siRNA target sequence for Usp5 (NM_013700.1,207-225).
gattcgggaagcagtatgt

SEQ ID NO: 583734 - DNA, 19 bp, Mus musculus
  siRNA target sequence for Usp5 (NM_013700.1,376-394).
cctcaccgaggacaagttt

SEQ ID NO: 583735 - DNA, 19 bp, Mus musculus
  siRNA target sequence for Usp5 (NM_013700.1,382-400).
cgaggacaagtttgaattt

SEQ ID NO: 583736 - DNA, 19 bp, Mus musculus
  siRNA target sequence for Usp5 (NM_013700.1,774-792).
gctaccccttagctgttaa

SEQ ID NO: 583737 - DNA, 19 bp, Mus musculus
  siRNA target sequence for Usp5 (NM_013700.1,812-830).
gatggagctgacgtgtatt

SEQ ID NO: 583738 - DNA, 19 bp, Mus musculus
  siRNA target sequence for Usp5 (NM_013700.1,1046-1064).
ggtaacagctgctatctca

SEQ ID NO: 583739 - DNA, 19 bp, Mus musculus
  siRNA target sequence for Usp5 (NM_013700.1,1249-1267).
ggagcaggtaccagaacaa

SEQ ID NO: 583740 - DNA, 19 bp, Mus musculus
  siRNA target sequence for Usp5 (NM_013700.1,1284-1302).
gcattgcccctcgaatgtt

SEQ ID NO: 583741 - DNA, 19 bp, Mus musculus
  siRNA target sequence for Usp5 (NM_013700.1,1364-1382).
gaattcttcctacatctta

SEQ ID NO: 583742 - DNA, 19 bp, Mus musculus
  siRNA target sequence for Usp5 (NM_013700.1,1399-1417).
gaattgccggagttctgaa

SEQ ID NO: 583743 - DNA, 19 bp, Mus musculus
  siRNA target sequence for Usp5 (NM_013700.1,1405-1423).
ccggagttctgaaaatcca

SEQ ID NO: 583744 - DNA, 19 bp, Mus musculus
  siRNA target sequence for Usp5 (NM_013700.1,1436-1454).
cgctttttggtggaagaaa

SEQ ID NO: 583745 - DNA, 19 bp, Mus musculus
  siRNA target sequence for Usp5 (NM_013700.1,1437-1455).
gctttttggtggaagaaaa

SEQ ID NO: 583746 - DNA, 19 bp, Mus musculus
  siRNA target sequence for Usp5 (NM_013700.1,1469-1487).
gccacagagaaggttaagt

SEQ ID NO: 583747 - DNA, 19 bp, Mus musculus
  siRNA target sequence for Usp5 (NM_013700.1,1470-1488).
ccacagagaaggttaagta

SEQ ID NO: 583748 - DNA, 19 bp, Mus musculus
  siRNA target sequence for Usp5 (NM_013700.1,1491-1509).
ctcagcgagttgactacat

SEQ ID NO: 583749 - DNA, 19 bp, Mus musculus
  siRNA target sequence for Usp5 (NM_013700.1,1552-1570).
ggagcttttagagtatgaa

SEQ ID NO: 583750 - DNA, 19 bp, Mus musculus
  siRNA target sequence for Usp5 (NM_013700.1,1832-1850).
ccagaggagctcgatatct

SEQ ID NO: 583751 - DNA, 19 bp, Mus musculus
  siRNA target sequence for Usp5 (NM_013700.1,1922-1940).
ccggatgagcccaaaggta

SEQ ID NO: 583752 - DNA, 19 bp, Mus musculus
  siRNA target sequence for Usp5 (NM_013700.1,1932-1950).
ccaaaggtagccttggttt

SEQ ID NO: 583753 - DNA, 19 bp, Mus musculus
  siRNA target sequence for Usp5 (NM_013700.1,2017-2035).
ggacgaatccgtcatcata

SEQ ID NO: 583754 - DNA, 19 bp, Mus musculus
  siRNA target sequence for Usp5 (NM_013700.1,2021-2039).
gaatccgtcatcatacagt

SEQ ID NO: 583755 - DNA, 19 bp, Mus musculus
  siRNA target sequence for Usp5 (NM_013700.1,2072-2090).
cggaaagctgtgtactata

SEQ ID NO: 583756 - DNA, 19 bp, Mus musculus
  siRNA target sequence for Usp5 (NM_013700.1,2105-2123).
gccgaagcagccatgaact

SEQ ID NO: 583757 - DNA, 19 bp, Mus musculus
  siRNA target sequence for Usp5 (NM_013700.1,2140-2158).
ggatgatccagattttgca

SEQ ID NO: 583758 - DNA, 19 bp, Mus musculus
  siRNA target sequence for Usp5 (NM_013700.1,2141-2159).
gatgatccagattttgcaa

SEQ ID NO: 583759 - DNA, 19 bp, Mus musculus
  siRNA target sequence for Usp5 (NM_013700.1,2315-2333).
gctgtagactggatcttca

SEQ ID NO: 583760 - DNA, 19 bp, Mus musculus
  siRNA target sequence for Usp5 (NM_013700.1,2437-2455).
ggatggtcctggaaagtat

SEQ ID NO: 583761 - DNA, 19 bp, Mus musculus
  siRNA target sequence for Usp9x (NM_009481.1,460-478).
gcctgattcgtccaatgaa

SEQ ID NO: 583762 - DNA, 19 bp, Mus musculus
  siRNA target sequence for Usp9x (NM_009481.1,461-479).
cctgattcgtccaatgaaa

SEQ ID NO: 583763 - DNA, 19 bp, Mus musculus
  siRNA target sequence for Usp9x (NM_009481.1,462-480).
ctgattcgtccaatgaaaa

SEQ ID NO: 583764 - DNA, 19 bp, Mus musculus
  siRNA target sequence for Usp9x (NM_009481.1,464-482).
gattcgtccaatgaaaatt

SEQ ID NO: 583765 - DNA, 19 bp, Mus musculus
  siRNA target sequence for Usp9x (NM_009481.1,522-540).
ctcctccacagattgaaga

SEQ ID NO: 583766 - DNA, 19 bp, Mus musculus
  siRNA target sequence for Usp9x (NM_009481.1,622-640).
gccgaaaggggaattagaa

SEQ ID NO: 583767 - DNA, 19 bp, Mus musculus
  siRNA target sequence for Usp9x (NM_009481.1,656-674).
gctattgatcttagtaaga

SEQ ID NO: 583768 - DNA, 19 bp, Mus musculus
  siRNA target sequence for Usp9x (NM_009481.1,669-687).
gtaagaaaggccttgatgt

SEQ ID NO: 583769 - DNA, 19 bp, Mus musculus
  siRNA target sequence for Usp9x (NM_009481.1,673-691).
gaaaggccttgatgttaaa

SEQ ID NO: 583770 - DNA, 19 bp, Mus musculus
  siRNA target sequence for Usp9x (NM_009481.1,722-740).
gggctaacgatctcattta

SEQ ID NO: 583771 - DNA, 19 bp, Mus musculus
  siRNA target sequence for Usp9x (NM_009481.1,725-743).
ctaacgatctcatttacaa

SEQ ID NO: 583772 - DNA, 19 bp, Mus musculus
  siRNA target sequence for Usp9x (NM_009481.1,729-747).
cgatctcatttacaaaaat

SEQ ID NO: 583773 - DNA, 19 bp, Mus musculus
  siRNA target sequence for Usp9x (NM_009481.1,782-800).
gaaattcacagatgcatta

SEQ ID NO: 583774 - DNA, 19 bp, Mus musculus
  siRNA target sequence for Usp9x (NM_009481.1,788-806).
cacagatgcattattaaca

SEQ ID NO: 583775 - DNA, 19 bp, Mus musculus
  siRNA target sequence for Usp9x (NM_009481.1,900-918).
gcaaattccatatctacaa

SEQ ID NO: 583776 - DNA, 19 bp, Mus musculus
  siRNA target sequence for Usp9x (NM_009481.1,994-1012).
ccctcgatcaccaaaaggt

SEQ ID NO: 583777 - DNA, 19 bp, Mus musculus
  siRNA target sequence for Usp9x (NM_009481.1,995-1013).
cctcgatcaccaaaaggtt

SEQ ID NO: 583778 - DNA, 19 bp, Mus musculus
  siRNA target sequence for Usp9x (NM_009481.1,1019-1037).
gtggatctcctcaacaagt

SEQ ID NO: 583779 - DNA, 19 bp, Mus musculus
  siRNA target sequence for Usp9x (NM_009481.1,1030-1048).
caacaagtttggcacttta

SEQ ID NO: 583780 - DNA, 19 bp, Mus musculus
  siRNA target sequence for Usp9x (NM_009481.1,1033-1051).
caagtttggcactttaaat

SEQ ID NO: 583781 - DNA, 19 bp, Mus musculus
  siRNA target sequence for Usp9x (NM_009481.1,1069-1087).
cgatcgttttattaatgga

SEQ ID NO: 583782 - DNA, 19 bp, Mus musculus
  siRNA target sequence for Usp9x (NM_009481.1,1089-1107).
cagcattaaacgttcagat

SEQ ID NO: 583783 - DNA, 19 bp, Mus musculus
  siRNA target sequence for Usp9x (NM_009481.1,1091-1109).
gcattaaacgttcagataa

SEQ ID NO: 583784 - DNA, 19 bp, Mus musculus
  siRNA target sequence for Usp9x (NM_009481.1,1092-1110).
cattaaacgttcagataat

SEQ ID NO: 583785 - DNA, 19 bp, Mus musculus
  siRNA target sequence for Usp9x (NM_009481.1,1105-1123).
gataattgcagcccttatt

SEQ ID NO: 583786 - DNA, 19 bp, Mus musculus
  siRNA target sequence for Usp9x (NM_009481.1,1112-1130).
gcagcccttattaaaccat

SEQ ID NO: 583787 - DNA, 19 bp, Mus musculus
  siRNA target sequence for Usp9x (NM_009481.1,1117-1135).
ccttattaaaccatttgga

SEQ ID NO: 583788 - DNA, 19 bp, Mus musculus
  siRNA target sequence for Usp9x (NM_009481.1,1271-1289).
gctctttcaatgattatta

SEQ ID NO: 583789 - DNA, 19 bp, Mus musculus
  siRNA target sequence for Usp9x (NM_009481.1,1416-1434).
cactgaatgaggttaataa

SEQ ID NO: 583790 - DNA, 19 bp, Mus musculus
  siRNA target sequence for Usp9x (NM_009481.1,1424-1442).
gaggttaataaggtgattt

SEQ ID NO: 583791 - DNA, 19 bp, Mus musculus
  siRNA target sequence for Usp9x (NM_009481.1,1534-1552).
caatattttatccatagtt

SEQ ID NO: 583792 - DNA, 19 bp, Mus musculus
  siRNA target sequence for Usp9x (NM_009481.1,1600-1618).
gattcttcgctttgtcata

SEQ ID NO: 583793 - DNA, 19 bp, Mus musculus
  siRNA target sequence for Usp9x (NM_009481.1,1633-1651).
gaccttgcaagatcttgat

SEQ ID NO: 583794 - DNA, 19 bp, Mus musculus
  siRNA target sequence for Usp9x (NM_009481.1,1635-1653).
ccttgcaagatcttgataa

SEQ ID NO: 583795 - DNA, 19 bp, Mus musculus
  siRNA target sequence for Usp9x (NM_009481.1,1636-1654).
cttgcaagatcttgataat

SEQ ID NO: 583796 - DNA, 19 bp, Mus musculus
  siRNA target sequence for Usp9x (NM_009481.1,1687-1705).
cattgtaaagaatgtacat

SEQ ID NO: 583797 - DNA, 19 bp, Mus musculus
  siRNA target sequence for Usp9x (NM_009481.1,1859-1877).
gtgatggcacataaagtat

SEQ ID NO: 583798 - DNA, 19 bp, Mus musculus
  siRNA target sequence for Usp9x (NM_009481.1,2027-2045).
gaacttcgcacaaatgaca

SEQ ID NO: 583799 - DNA, 19 bp, Mus musculus
  siRNA target sequence for Usp9x (NM_009481.1,2030-2048).
cttcgcacaaatgacaaat

SEQ ID NO: 583800 - DNA, 19 bp, Mus musculus
  siRNA target sequence for Usp9x (NM_009481.1,2126-2144).
cagcgaagtccccatgtat

SEQ ID NO: 583801 - DNA, 19 bp, Mus musculus
  siRNA target sequence for Usp9x (NM_009481.1,2128-2146).
gcgaagtccccatgtattt

SEQ ID NO: 583802 - DNA, 19 bp, Mus musculus
  siRNA target sequence for Usp9x (NM_009481.1,2152-2170).
ccatgacttaatcaatcaa

SEQ ID NO: 583803 - DNA, 19 bp, Mus musculus
  siRNA target sequence for Usp9x (NM_009481.1,2213-2231).
cttgcaacttacatggaaa

SEQ ID NO: 583804 - DNA, 19 bp, Mus musculus
  siRNA target sequence for Usp9x (NM_009481.1,2250-2268).
gagacaatgaagactatga

SEQ ID NO: 583805 - DNA, 19 bp, Mus musculus
  siRNA target sequence for Usp9x (NM_009481.1,2281-2299).
gagactgggaagtagatat

SEQ ID NO: 583806 - DNA, 19 bp, Mus musculus
  siRNA target sequence for Usp9x (NM_009481.1,2321-2339).
gaacggcttaactttctta

SEQ ID NO: 583807 - DNA, 19 bp, Mus musculus
  siRNA target sequence for Usp9x (NM_009481.1,2325-2343).
ggcttaactttcttaggtt

SEQ ID NO: 583808 - DNA, 19 bp, Mus musculus
  siRNA target sequence for Usp9x (NM_009481.1,2718-2736).
gagctattgatctccttaa

SEQ ID NO: 583809 - DNA, 19 bp, Mus musculus
  siRNA target sequence for Usp9x (NM_009481.1,2886-2904).
gacaggaagctgttcgaat

SEQ ID NO: 583810 - DNA, 19 bp, Mus musculus
  siRNA target sequence for Usp9x (NM_009481.1,2900-2918).
cgaatggtccgagtgttaa

SEQ ID NO: 583811 - DNA, 19 bp, Mus musculus
  siRNA target sequence for Usp9x (NM_009481.1,2905-2923).
ggtccgagtgttaactgtt

SEQ ID NO: 583812 - DNA, 19 bp, Mus musculus
  siRNA target sequence for Usp9x (NM_009481.1,2908-2926).
ccgagtgttaactgttcta

SEQ ID NO: 583813 - DNA, 19 bp, Mus musculus
  siRNA target sequence for Usp9x (NM_009481.1,2919-2937).
ctgttctaagagaatatat

SEQ ID NO: 583814 - DNA, 19 bp, Mus musculus
  siRNA target sequence for Usp9x (NM_009481.1,2991-3009).
gagctttccgtggtaaaca

SEQ ID NO: 583815 - DNA, 19 bp, Mus musculus
  siRNA target sequence for Usp9x (NM_009481.1,3000-3018).
gtggtaaacacctctcttt

SEQ ID NO: 583816 - DNA, 19 bp, Mus musculus
  siRNA target sequence for Usp9x (NM_009481.1,3002-3020).
ggtaaacacctctctttta

SEQ ID NO: 583817 - DNA, 19 bp, Mus musculus
  siRNA target sequence for Usp9x (NM_009481.1,3093-3111).
gttcagttcgaagatgtat

SEQ ID NO: 583818 - DNA, 19 bp, Mus musculus
  siRNA target sequence for Usp9x (NM_009481.1,3096-3114).
cagttcgaagatgtatact

SEQ ID NO: 583819 - DNA, 19 bp, Mus musculus
  siRNA target sequence for Usp9x (NM_009481.1,3098-3116).
gttcgaagatgtatactca

SEQ ID NO: 583820 - DNA, 19 bp, Mus musculus
  siRNA target sequence for Usp9x (NM_009481.1,3105-3123).
gatgtatactcaatcgtat

SEQ ID NO: 583821 - DNA, 19 bp, Mus musculus
  siRNA target sequence for Usp9x (NM_009481.1,3183-3201).
ctggagatgaccgaaagtt

SEQ ID NO: 583822 - DNA, 19 bp, Mus musculus
  siRNA target sequence for Usp9x (NM_009481.1,3185-3203).
ggagatgaccgaaagttga

SEQ ID NO: 583823 - DNA, 19 bp, Mus musculus
  siRNA target sequence for Usp9x (NM_009481.1,3186-3204).
gagatgaccgaaagttgat

SEQ ID NO: 583824 - DNA, 19 bp, Mus musculus
  siRNA target sequence for Usp9x (NM_009481.1,3207-3225).
gacaattaaacctaaaaga

SEQ ID NO: 583825 - DNA, 19 bp, Mus musculus
  siRNA target sequence for Usp9x (NM_009481.1,3252-3270).
cacaaataagctccaatat

SEQ ID NO: 583826 - DNA, 19 bp, Mus musculus
  siRNA target sequence for Usp9x (NM_009481.1,3392-3410).
cttcatcccagatacatct

SEQ ID NO: 583827 - DNA, 19 bp, Mus musculus
  siRNA target sequence for Usp9x (NM_009481.1,3433-3451).
cttagggagcagcctaaat

SEQ ID NO: 583828 - DNA, 19 bp, Mus musculus
  siRNA target sequence for Usp9x (NM_009481.1,3499-3517).
gccagatagtacgacaata

SEQ ID NO: 583829 - DNA, 19 bp, Mus musculus
  siRNA target sequence for Usp9x (NM_009481.1,3501-3519).
cagatagtacgacaataga

SEQ ID NO: 583830 - DNA, 19 bp, Mus musculus
  siRNA target sequence for Usp9x (NM_009481.1,3503-3521).
gatagtacgacaatagaaa

SEQ ID NO: 583831 - DNA, 19 bp, Mus musculus
  siRNA target sequence for Usp9x (NM_009481.1,3507-3525).
gtacgacaatagaaaagtt

SEQ ID NO: 583832 - DNA, 19 bp, Mus musculus
  siRNA target sequence for Usp9x (NM_009481.1,3565-3583).
cagccttagtccatctctt

SEQ ID NO: 583833 - DNA, 19 bp, Mus musculus
  siRNA target sequence for Usp9x (NM_009481.1,3610-3628).
ctcacaagtgctataccta

SEQ ID NO: 583834 - DNA, 19 bp, Mus musculus
  siRNA target sequence for Usp9x (NM_009481.1,3625-3643).
cctaacagaggtagtctat

SEQ ID NO: 583835 - DNA, 19 bp, Mus musculus
  siRNA target sequence for Usp9x (NM_009481.1,3635-3653).
gtagtctatgccttgttaa

SEQ ID NO: 583836 - DNA, 19 bp, Mus musculus
  siRNA target sequence for Usp9x (NM_009481.1,3680-3698).
gattcctcggattttcagt

SEQ ID NO: 583837 - DNA, 19 bp, Mus musculus
  siRNA target sequence for Usp9x (NM_009481.1,3727-3745).
ccttgtcctgagtatgcta

SEQ ID NO: 583838 - DNA, 19 bp, Mus musculus
  siRNA target sequence for Usp9x (NM_009481.1,3728-3746).
cttgtcctgagtatgctaa

SEQ ID NO: 583839 - DNA, 19 bp, Mus musculus
  siRNA target sequence for Usp9x (NM_009481.1,3736-3754).
gagtatgctaaccagaaat

SEQ ID NO: 583840 - DNA, 19 bp, Mus musculus
  siRNA target sequence for Usp9x (NM_009481.1,3887-3905).
gtagaaggcgtgaatccta

SEQ ID NO: 583841 - DNA, 19 bp, Mus musculus
  siRNA target sequence for Usp9x (NM_009481.1,3893-3911).
ggcgtgaatcctatgacat

SEQ ID NO: 583842 - DNA, 19 bp, Mus musculus
  siRNA target sequence for Usp9x (NM_009481.1,3913-3931).
ggtcaaccaagtaactcat

SEQ ID NO: 583843 - DNA, 19 bp, Mus musculus
  siRNA target sequence for Usp9x (NM_009481.1,3916-3934).
caaccaagtaactcatgat

SEQ ID NO: 583844 - DNA, 19 bp, Mus musculus
  siRNA target sequence for Usp9x (NM_009481.1,3967-3985).
cattcctaacccatcatct

SEQ ID NO: 583845 - DNA, 19 bp, Mus musculus
  siRNA target sequence for Usp9x (NM_009481.1,3971-3989).
cctaacccatcatctgaat

SEQ ID NO: 583846 - DNA, 19 bp, Mus musculus
  siRNA target sequence for Usp9x (NM_009481.1,4034-4052).
gatgaggcttcaagatata

SEQ ID NO: 583847 - DNA, 19 bp, Mus musculus
  siRNA target sequence for Usp9x (NM_009481.1,4110-4128).
gaggattacagctggtatt

SEQ ID NO: 583848 - DNA, 19 bp, Mus musculus
  siRNA target sequence for Usp9x (NM_009481.1,4112-4130).
ggattacagctggtattca

SEQ ID NO: 583849 - DNA, 19 bp, Mus musculus
  siRNA target sequence for Usp9x (NM_009481.1,4249-4267).
gattccaacagccttagat

SEQ ID NO: 583850 - DNA, 19 bp, Mus musculus
  siRNA target sequence for Usp9x (NM_009481.1,4260-4278).
ccttagatgctctaagtaa

SEQ ID NO: 583851 - DNA, 19 bp, Mus musculus
  siRNA target sequence for Usp9x (NM_009481.1,4290-4308).
ggcagacatttattattga

SEQ ID NO: 583852 - DNA, 19 bp, Mus musculus
  siRNA target sequence for Usp9x (NM_009481.1,4318-4336).
gcactgtcacagcaaaact

SEQ ID NO: 583853 - DNA, 19 bp, Mus musculus
  siRNA target sequence for Usp9x (NM_009481.1,4391-4409).
gggcacaggcctctacttt

SEQ ID NO: 583854 - DNA, 19 bp, Mus musculus
  siRNA target sequence for Usp9x (NM_009481.1,4414-4432).
cattacgctgctctttact

SEQ ID NO: 583855 - DNA, 19 bp, Mus musculus
  siRNA target sequence for Usp9x (NM_009481.1,4419-4437).
cgctgctctttactgtttt

SEQ ID NO: 583856 - DNA, 19 bp, Mus musculus
  siRNA target sequence for Usp9x (NM_009481.1,4466-4484).
cactcaggcgactacttta

SEQ ID NO: 583857 - DNA, 19 bp, Mus musculus
  siRNA target sequence for Usp9x (NM_009481.1,4468-4486).
ctcaggcgactactttact

SEQ ID NO: 583858 - DNA, 19 bp, Mus musculus
  siRNA target sequence for Usp9x (NM_009481.1,4472-4490).
ggcgactactttactcttt

SEQ ID NO: 583859 - DNA, 19 bp, Mus musculus
  siRNA target sequence for Usp9x (NM_009481.1,4473-4491).
gcgactactttactctttt

SEQ ID NO: 583860 - DNA, 19 bp, Mus musculus
  siRNA target sequence for Usp9x (NM_009481.1,4474-4492).
cgactactttactctttta

SEQ ID NO: 583861 - DNA, 19 bp, Mus musculus
  siRNA target sequence for Usp9x (NM_009481.1,4510-4528).
cgcctacaacagtaacatt

SEQ ID NO: 583862 - DNA, 19 bp, Mus musculus
  siRNA target sequence for Usp9x (NM_009481.1,4534-4552).
gcccaatgctgaagttctt

SEQ ID NO: 583863 - DNA, 19 bp, Mus musculus
  siRNA target sequence for Usp9x (NM_009481.1,4537-4555).
caatgctgaagttcttcta

SEQ ID NO: 583864 - DNA, 19 bp, Mus musculus
  siRNA target sequence for Usp9x (NM_009481.1,4614-4632).
caggtgttgaggagacaat

SEQ ID NO: 583865 - DNA, 19 bp, Mus musculus
  siRNA target sequence for Usp9x (NM_009481.1,4678-4696).
gactcctgagaaaaagttt

SEQ ID NO: 583866 - DNA, 19 bp, Mus musculus
  siRNA target sequence for Usp9x (NM_009481.1,4756-4774).
ctttcccgcatccaatgtt

SEQ ID NO: 583867 - DNA, 19 bp, Mus musculus
  siRNA target sequence for Usp9x (NM_009481.1,4761-4779).
ccgcatccaatgtttacct

SEQ ID NO: 583868 - DNA, 19 bp, Mus musculus
  siRNA target sequence for Usp9x (NM_009481.1,4780-4798).
gcagtatatgagaaatgga

SEQ ID NO: 583869 - DNA, 19 bp, Mus musculus
  siRNA target sequence for Usp9x (NM_009481.1,4907-4925).
cagatagtagattctttga

SEQ ID NO: 583870 - DNA, 19 bp, Mus musculus
  siRNA target sequence for Usp9x (NM_009481.1,4909-4927).
gatagtagattctttgact

SEQ ID NO: 583871 - DNA, 19 bp, Mus musculus
  siRNA target sequence for Usp9x (NM_009481.1,4924-4942).
gactgaaatgtattacatt

SEQ ID NO: 583872 - DNA, 19 bp, Mus musculus
  siRNA target sequence for Usp9x (NM_009481.1,5090-5108).
ccctctatcaggaatggta

SEQ ID NO: 583873 - DNA, 19 bp, Mus musculus
  siRNA target sequence for Usp9x (NM_009481.1,5091-5109).
cctctatcaggaatggtat

SEQ ID NO: 583874 - DNA, 19 bp, Mus musculus
  siRNA target sequence for Usp9x (NM_009481.1,5124-5142).
gcacaggtagtgatgtaga

SEQ ID NO: 583875 - DNA, 19 bp, Mus musculus
  siRNA target sequence for Usp9x (NM_009481.1,5125-5143).
cacaggtagtgatgtagat

SEQ ID NO: 583876 - DNA, 19 bp, Mus musculus
  siRNA target sequence for Usp9x (NM_009481.1,5127-5145).
caggtagtgatgtagatga

SEQ ID NO: 583877 - DNA, 19 bp, Mus musculus
  siRNA target sequence for Usp9x (NM_009481.1,5173-5191).
caacgagagcaatgttgat

SEQ ID NO: 583878 - DNA, 19 bp, Mus musculus
  siRNA target sequence for Usp9x (NM_009481.1,5196-5214).
gggatgatgtgtttggata

SEQ ID NO: 583879 - DNA, 19 bp, Mus musculus
  siRNA target sequence for Usp9x (NM_009481.1,5197-5215).
ggatgatgtgtttggatat

SEQ ID NO: 583880 - DNA, 19 bp, Mus musculus
  siRNA target sequence for Usp9x (NM_009481.1,5468-5486).
gggcatccagctatgctaa

SEQ ID NO: 583881 - DNA, 19 bp, Mus musculus
  siRNA target sequence for Usp9x (NM_009481.1,5471-5489).
catccagctatgctaagta

SEQ ID NO: 583882 - DNA, 19 bp, Mus musculus
  siRNA target sequence for Usp9x (NM_009481.1,5475-5493).
cagctatgctaagtaaagt

SEQ ID NO: 583883 - DNA, 19 bp, Mus musculus
  siRNA target sequence for Usp9x (NM_009481.1,5477-5495).
gctatgctaagtaaagtct

SEQ ID NO: 583884 - DNA, 19 bp, Mus musculus
  siRNA target sequence for Usp9x (NM_009481.1,5478-5496).
ctatgctaagtaaagtctt

SEQ ID NO: 583885 - DNA, 19 bp, Mus musculus
  siRNA target sequence for Usp9x (NM_009481.1,5629-5647).
caaaggagacttactagaa

SEQ ID NO: 583886 - DNA, 19 bp, Mus musculus
  siRNA target sequence for Usp9x (NM_009481.1,5642-5660).
ctagaaggagcaaatgctt

SEQ ID NO: 583887 - DNA, 19 bp, Mus musculus
  siRNA target sequence for Usp9x (NM_009481.1,5648-5666).
ggagcaaatgcttatcatt

SEQ ID NO: 583888 - DNA, 19 bp, Mus musculus
  siRNA target sequence for Usp9x (NM_009481.1,5663-5681).
cattgtgaaaaatgcaata

SEQ ID NO: 583889 - DNA, 19 bp, Mus musculus
  siRNA target sequence for Usp9x (NM_009481.1,5677-5695).
caataaaaaggttgatact

SEQ ID NO: 583890 - DNA, 19 bp, Mus musculus
  siRNA target sequence for Usp9x (NM_009481.1,5696-5714).
gtaaagcgcttgctaatta

SEQ ID NO: 583891 - DNA, 19 bp, Mus musculus
  siRNA target sequence for Usp9x (NM_009481.1,5701-5719).
gcgcttgctaattaaaaaa

SEQ ID NO: 583892 - DNA, 19 bp, Mus musculus
  siRNA target sequence for Usp9x (NM_009481.1,5740-5758).
ccaactaaaacgattcgat

SEQ ID NO: 583893 - DNA, 19 bp, Mus musculus
  siRNA target sequence for Usp9x (NM_009481.1,5886-5904).
gtcagctgatacaacagaa

SEQ ID NO: 583894 - DNA, 19 bp, Mus musculus
  siRNA target sequence for Usp9x (NM_009481.1,5978-5996).
gcaagtggcggacattact

SEQ ID NO: 583895 - DNA, 19 bp, Mus musculus
  siRNA target sequence for Usp9x (NM_009481.1,5979-5997).
caagtggcggacattacta

SEQ ID NO: 583896 - DNA, 19 bp, Mus musculus
  siRNA target sequence for Usp9x (NM_009481.1,6025-6043).
ggatggtgaaaaaaatcgt

SEQ ID NO: 583897 - DNA, 19 bp, Mus musculus
  siRNA target sequence for Usp9x (NM_009481.1,6042-6060).
gttggtataaatttgatga

SEQ ID NO: 583898 - DNA, 19 bp, Mus musculus
  siRNA target sequence for Usp9x (NM_009481.1,6114-6132).
gttttgggggagagtacat

SEQ ID NO: 583899 - DNA, 19 bp, Mus musculus
  siRNA target sequence for Usp9x (NM_009481.1,6189-6207).
ggtggaatgcatatatact

SEQ ID NO: 583900 - DNA, 19 bp, Mus musculus
  siRNA target sequence for Usp9x (NM_009481.1,6223-6241).
ggacacaataggtcatgat

SEQ ID NO: 583901 - DNA, 19 bp, Mus musculus
  siRNA target sequence for Usp9x (NM_009481.1,6226-6244).
cacaataggtcatgatgat

SEQ ID NO: 583902 - DNA, 19 bp, Mus musculus
  siRNA target sequence for Usp9x (NM_009481.1,6242-6260).
gatgaggtgataagataca

SEQ ID NO: 583903 - DNA, 19 bp, Mus musculus
  siRNA target sequence for Usp9x (NM_009481.1,6282-6300).
caaggccccatcagattgt

SEQ ID NO: 583904 - DNA, 19 bp, Mus musculus
  siRNA target sequence for Usp9x (NM_009481.1,6285-6303).
ggccccatcagattgtcat

SEQ ID NO: 583905 - DNA, 19 bp, Mus musculus
  siRNA target sequence for Usp9x (NM_009481.1,6301-6319).
catgccatccgccattgaa

SEQ ID NO: 583906 - DNA, 19 bp, Mus musculus
  siRNA target sequence for Usp9x (NM_009481.1,6304-6322).
gccatccgccattgaaaga

SEQ ID NO: 583907 - DNA, 19 bp, Mus musculus
  siRNA target sequence for Usp9x (NM_009481.1,6305-6323).
ccatccgccattgaaagaa

SEQ ID NO: 583908 - DNA, 19 bp, Mus musculus
  siRNA target sequence for Usp9x (NM_009481.1,6324-6342).
gtgttcggaagcagaatgt

SEQ ID NO: 583909 - DNA, 19 bp, Mus musculus
  siRNA target sequence for Usp9x (NM_009481.1,6367-6385).
gtacagtctggaatatttt

SEQ ID NO: 583910 - DNA, 19 bp, Mus musculus
  siRNA target sequence for Usp9x (NM_009481.1,6400-6418).
gctactgacatgtaatggt

SEQ ID NO: 583911 - DNA, 19 bp, Mus musculus
  siRNA target sequence for Usp9x (NM_009481.1,6500-6518).
gctaggttcctttttacta

SEQ ID NO: 583912 - DNA, 19 bp, Mus musculus
  siRNA target sequence for Usp9x (NM_009481.1,6549-6567).
gatctgccagtgattggta

SEQ ID NO: 583913 - DNA, 19 bp, Mus musculus
  siRNA target sequence for Usp9x (NM_009481.1,6558-6576).
gtgattggtatgatgcatt

SEQ ID NO: 583914 - DNA, 19 bp, Mus musculus
  siRNA target sequence for Usp9x (NM_009481.1,6564-6582).
ggtatgatgcattgtgtat

SEQ ID NO: 583915 - DNA, 19 bp, Mus musculus
  siRNA target sequence for Usp9x (NM_009481.1,6621-6639).
ctcacaatgtcctttttaa

SEQ ID NO: 583916 - DNA, 19 bp, Mus musculus
  siRNA target sequence for Usp9x (NM_009481.1,6704-6722).
gcaaagctcatagttttca

SEQ ID NO: 583917 - DNA, 19 bp, Mus musculus
  siRNA target sequence for Usp9x (NM_009481.1,6748-6766).
gccttgtccttcacctttt

SEQ ID NO: 583918 - DNA, 19 bp, Mus musculus
  siRNA target sequence for Usp9x (NM_009481.1,6786-6804).
gtcaggcttatgacaactt

SEQ ID NO: 583919 - DNA, 19 bp, Mus musculus
  siRNA target sequence for Usp9x (NM_009481.1,6807-6825).
gtttgagtgaccacttact

SEQ ID NO: 583920 - DNA, 19 bp, Mus musculus
  siRNA target sequence for Usp9x (NM_009481.1,6820-6838).
cttactaagagcagtacta

SEQ ID NO: 583921 - DNA, 19 bp, Mus musculus
  siRNA target sequence for Usp9x (NM_009481.1,6828-6846).
gagcagtactaaatctctt

SEQ ID NO: 583922 - DNA, 19 bp, Mus musculus
  siRNA target sequence for Usp9x (NM_009481.1,6861-6879).
cagagcatggacgtcattt

SEQ ID NO: 583923 - DNA, 19 bp, Mus musculus
  siRNA target sequence for Usp9x (NM_009481.1,6873-6891).
gtcatttacagcagtattt

SEQ ID NO: 583924 - DNA, 19 bp, Mus musculus
  siRNA target sequence for Usp9x (NM_009481.1,6881-6899).
cagcagtatttcaacttgt

SEQ ID NO: 583925 - DNA, 19 bp, Mus musculus
  siRNA target sequence for Usp9x (NM_009481.1,6892-6910).
caacttgttcgtaatgtat

SEQ ID NO: 583926 - DNA, 19 bp, Mus musculus
  siRNA target sequence for Usp9x (NM_009481.1,6921-6939).
gagtggcagagaaaacaca

SEQ ID NO: 583927 - DNA, 19 bp, Mus musculus
  siRNA target sequence for Usp9x (NM_009481.1,6952-6970).
gagtgtacctgctaccttt

SEQ ID NO: 583928 - DNA, 19 bp, Mus musculus
  siRNA target sequence for Usp9x (NM_009481.1,6954-6972).
gtgtacctgctacctttat

SEQ ID NO: 583929 - DNA, 19 bp, Mus musculus
  siRNA target sequence for Usp9x (NM_009481.1,6992-7010).
ggtcctggccctccaatta

SEQ ID NO: 583930 - DNA, 19 bp, Mus musculus
  siRNA target sequence for Usp9x (NM_009481.1,6993-7011).
gtcctggccctccaattaa

SEQ ID NO: 583931 - DNA, 19 bp, Mus musculus
  siRNA target sequence for Usp9x (NM_009481.1,7022-7040).
gctgaattaggcaaattat

SEQ ID NO: 583932 - DNA, 19 bp, Mus musculus
  siRNA target sequence for Usp9x (NM_009481.1,7023-7041).
ctgaattaggcaaattata

SEQ ID NO: 583933 - DNA, 19 bp, Mus musculus
  siRNA target sequence for Usp9x (NM_009481.1,7057-7075).
gctcatccgctgttgcaat

SEQ ID NO: 583934 - DNA, 19 bp, Mus musculus
  siRNA target sequence for Usp9x (NM_009481.1,7128-7146).
cttttggtgatcctaactt

SEQ ID NO: 583935 - DNA, 19 bp, Mus musculus
  siRNA target sequence for Usp9x (NM_009481.1,7134-7152).
gtgatcctaacttatcaca

SEQ ID NO: 583936 - DNA, 19 bp, Mus musculus
  siRNA target sequence for Usp9x (NM_009481.1,7140-7158).
ctaacttatcacaacctat

SEQ ID NO: 583937 - DNA, 19 bp, Mus musculus
  siRNA target sequence for Usp9x (NM_009481.1,7196-7214).
gtgagaacaagttatgtga

SEQ ID NO: 583938 - DNA, 19 bp, Mus musculus
  siRNA target sequence for Usp9x (NM_009481.1,7323-7341).
ggcaggttgcatattctta

SEQ ID NO: 583939 - DNA, 19 bp, Mus musculus
  siRNA target sequence for Usp9x (NM_009481.1,7332-7350).
catattcttatacttatga

SEQ ID NO: 583940 - DNA, 19 bp, Mus musculus
  siRNA target sequence for Usp9x (NM_009481.1,7451-7469).
cgagatgggctgtttgaca

SEQ ID NO: 583941 - DNA, 19 bp, Mus musculus
  siRNA target sequence for Usp9x (NM_009481.1,7458-7476).
ggctgtttgacacaattca

SEQ ID NO: 583942 - DNA, 19 bp, Mus musculus
  siRNA target sequence for Usp9x (NM_009481.1,7470-7488).
caattcagcgttctaagaa

SEQ ID NO: 583943 - DNA, 19 bp, Mus musculus
  siRNA target sequence for Usp9x (NM_009481.1,7475-7493).
cagcgttctaagaatcact

SEQ ID NO: 583944 - DNA, 19 bp, Mus musculus
  siRNA target sequence for Usp9x (NM_009481.1,7551-7569).
ctgttgcttaccaaatcct

SEQ ID NO: 583945 - DNA, 19 bp, Mus musculus
  siRNA target sequence for Usp9y (NM_148943.1,463-481).
ccagggtcagacttctgat

SEQ ID NO: 583946 - DNA, 19 bp, Mus musculus
  siRNA target sequence for Usp9y (NM_148943.1,483-501).
gacaacctcagccttcttt

SEQ ID NO: 583947 - DNA, 19 bp, Mus musculus
  siRNA target sequence for Usp9y (NM_148943.1,511-529).
ccagatctcatcatctgat

SEQ ID NO: 583948 - DNA, 19 bp, Mus musculus
  siRNA target sequence for Usp9y (NM_148943.1,512-530).
cagatctcatcatctgatt

SEQ ID NO: 583949 - DNA, 19 bp, Mus musculus
  siRNA target sequence for Usp9y (NM_148943.1,549-567).
caacaactcctccatatga

SEQ ID NO: 583950 - DNA, 19 bp, Mus musculus
  siRNA target sequence for Usp9y (NM_148943.1,633-651).
cggcaaagttagaagacat

SEQ ID NO: 583951 - DNA, 19 bp, Mus musculus
  siRNA target sequence for Usp9y (NM_148943.1,770-788).
cgtttttttcgcgatgttt

SEQ ID NO: 583952 - DNA, 19 bp, Mus musculus
  siRNA target sequence for Usp9y (NM_148943.1,771-789).
gtttttttcgcgatgtttt

SEQ ID NO: 583953 - DNA, 19 bp, Mus musculus
  siRNA target sequence for Usp9y (NM_148943.1,798-816).
ctttttccaaaatccttat

SEQ ID NO: 583954 - DNA, 19 bp, Mus musculus
  siRNA target sequence for Usp9y (NM_148943.1,851-869).
cataggtgtattattaaca

SEQ ID NO: 583955 - DNA, 19 bp, Mus musculus
  siRNA target sequence for Usp9y (NM_148943.1,932-950).
gaacttctagcaattgcat

SEQ ID NO: 583956 - DNA, 19 bp, Mus musculus
  siRNA target sequence for Usp9y (NM_148943.1,983-1001).
ggtgcacgtccatgtgaat

SEQ ID NO: 583957 - DNA, 19 bp, Mus musculus
  siRNA target sequence for Usp9y (NM_148943.1,987-1005).
cacgtccatgtgaatcagt

SEQ ID NO: 583958 - DNA, 19 bp, Mus musculus
  siRNA target sequence for Usp9y (NM_148943.1,1057-1075).
cctacattcaccaaaaggt

SEQ ID NO: 583959 - DNA, 19 bp, Mus musculus
  siRNA target sequence for Usp9y (NM_148943.1,1058-1076).
ctacattcaccaaaaggtt

SEQ ID NO: 583960 - DNA, 19 bp, Mus musculus
  siRNA target sequence for Usp9y (NM_148943.1,1082-1100).
gtggacctcattaacacat

SEQ ID NO: 583961 - DNA, 19 bp, Mus musculus
  siRNA target sequence for Usp9y (NM_148943.1,1084-1102).
ggacctcattaacacattt

SEQ ID NO: 583962 - DNA, 19 bp, Mus musculus
  siRNA target sequence for Usp9y (NM_148943.1,1096-1114).
cacatttggcacactaaat

SEQ ID NO: 583963 - DNA, 19 bp, Mus musculus
  siRNA target sequence for Usp9y (NM_148943.1,1214-1232).
ctcactcaacatacattaa

SEQ ID NO: 583964 - DNA, 19 bp, Mus musculus
  siRNA target sequence for Usp9y (NM_148943.1,1218-1236).
ctcaacatacattaagaaa

SEQ ID NO: 583965 - DNA, 19 bp, Mus musculus
  siRNA target sequence for Usp9y (NM_148943.1,1223-1241).
catacattaagaaagtact

SEQ ID NO: 583966 - DNA, 19 bp, Mus musculus
  siRNA target sequence for Usp9y (NM_148943.1,1227-1245).
cattaagaaagtacttcat

SEQ ID NO: 583967 - DNA, 19 bp, Mus musculus
  siRNA target sequence for Usp9y (NM_148943.1,1243-1261).
cattccagttatagaagta

SEQ ID NO: 583968 - DNA, 19 bp, Mus musculus
  siRNA target sequence for Usp9y (NM_148943.1,1266-1284).
cacaaatattacaaaaatt

SEQ ID NO: 583969 - DNA, 19 bp, Mus musculus
  siRNA target sequence for Usp9y (NM_148943.1,1331-1349).
gataccatttcaatgatta

SEQ ID NO: 583970 - DNA, 19 bp, Mus musculus
  siRNA target sequence for Usp9y (NM_148943.1,1478-1496).
gcactgaatgaaattaaca

SEQ ID NO: 583971 - DNA, 19 bp, Mus musculus
  siRNA target sequence for Usp9y (NM_148943.1,1634-1652).
ccacagtatgtggaaaaaa

SEQ ID NO: 583972 - DNA, 19 bp, Mus musculus
  siRNA target sequence for Usp9y (NM_148943.1,1657-1675).
gaagattcttcgttttgta

SEQ ID NO: 583973 - DNA, 19 bp, Mus musculus
  siRNA target sequence for Usp9y (NM_148943.1,1660-1678).
gattcttcgttttgtaatt

SEQ ID NO: 583974 - DNA, 19 bp, Mus musculus
  siRNA target sequence for Usp9y (NM_148943.1,1691-1709).
cttactttacaggatctta

SEQ ID NO: 583975 - DNA, 19 bp, Mus musculus
  siRNA target sequence for Usp9y (NM_148943.1,1695-1713).
ctttacaggatcttaataa

SEQ ID NO: 583976 - DNA, 19 bp, Mus musculus
  siRNA target sequence for Usp9y (NM_148943.1,2039-2057).
caggatcgagatacacaaa

SEQ ID NO: 583977 - DNA, 19 bp, Mus musculus
  siRNA target sequence for Usp9y (NM_148943.1,2041-2059).
ggatcgagatacacaaaaa

SEQ ID NO: 583978 - DNA, 19 bp, Mus musculus
  siRNA target sequence for Usp9y (NM_148943.1,2042-2060).
gatcgagatacacaaaaaa

SEQ ID NO: 583979 - DNA, 19 bp, Mus musculus
  siRNA target sequence for Usp9y (NM_148943.1,2077-2095).
ctttatagaagaatttcga

SEQ ID NO: 583980 - DNA, 19 bp, Mus musculus
  siRNA target sequence for Usp9y (NM_148943.1,2113-2131).
catccctgcattaaaacaa

SEQ ID NO: 583981 - DNA, 19 bp, Mus musculus
  siRNA target sequence for Usp9y (NM_148943.1,2226-2244).
gccaacttcagcataatca

SEQ ID NO: 583982 - DNA, 19 bp, Mus musculus
  siRNA target sequence for Usp9y (NM_148943.1,2237-2255).
cataatcatgctttagtta

SEQ ID NO: 583983 - DNA, 19 bp, Mus musculus
  siRNA target sequence for Usp9y (NM_148943.1,2302-2320).
gtatgctagagatcatgaa

SEQ ID NO: 583984 - DNA, 19 bp, Mus musculus
  siRNA target sequence for Usp9y (NM_148943.1,2468-2486).
gcagagaatgccgtttact

SEQ ID NO: 583985 - DNA, 19 bp, Mus musculus
  siRNA target sequence for Usp9y (NM_148943.1,2469-2487).
cagagaatgccgtttactt

SEQ ID NO: 583986 - DNA, 19 bp, Mus musculus
  siRNA target sequence for Usp9y (NM_148943.1,2566-2584).
ggagtttttcgaaagtaat

SEQ ID NO: 583987 - DNA, 19 bp, Mus musculus
  siRNA target sequence for Usp9y (NM_148943.1,2772-2790).
caagcagagcaatagatct

SEQ ID NO: 583988 - DNA, 19 bp, Mus musculus
  siRNA target sequence for Usp9y (NM_148943.1,2775-2793).
gcagagcaatagatcttct

SEQ ID NO: 583989 - DNA, 19 bp, Mus musculus
  siRNA target sequence for Usp9y (NM_148943.1,2776-2794).
cagagcaatagatcttctt

SEQ ID NO: 583990 - DNA, 19 bp, Mus musculus
  siRNA target sequence for Usp9y (NM_148943.1,2778-2796).
gagcaatagatcttcttaa

SEQ ID NO: 583991 - DNA, 19 bp, Mus musculus
  siRNA target sequence for Usp9y (NM_148943.1,2808-2826).
caagccttggtcccaaatt

SEQ ID NO: 583992 - DNA, 19 bp, Mus musculus
  siRNA target sequence for Usp9y (NM_148943.1,2820-2838).
ccaaattgcaagctaatca

SEQ ID NO: 583993 - DNA, 19 bp, Mus musculus
  siRNA target sequence for Usp9y (NM_148943.1,2828-2846).
caagctaatcaggtagtaa

SEQ ID NO: 583994 - DNA, 19 bp, Mus musculus
  siRNA target sequence for Usp9y (NM_148943.1,2832-2850).
ctaatcaggtagtaattca

SEQ ID NO: 583995 - DNA, 19 bp, Mus musculus
  siRNA target sequence for Usp9y (NM_148943.1,2962-2980).
ccgaatggttcgcatatta

SEQ ID NO: 583996 - DNA, 19 bp, Mus musculus
  siRNA target sequence for Usp9y (NM_148943.1,2963-2981).
cgaatggttcgcatattaa

SEQ ID NO: 583997 - DNA, 19 bp, Mus musculus
  siRNA target sequence for Usp9y (NM_148943.1,2982-3000).
cggtcttaagggaatacat

SEQ ID NO: 583998 - DNA, 19 bp, Mus musculus
  siRNA target sequence for Usp9y (NM_148943.1,2983-3001).
ggtcttaagggaatacata

SEQ ID NO: 583999 - DNA, 19 bp, Mus musculus
  siRNA target sequence for Usp9y (NM_148943.1,2984-3002).
gtcttaagggaatacataa

SEQ ID NO: 584000 - DNA, 19 bp, Mus musculus
  siRNA target sequence for Usp9y (NM_148943.1,2986-3004).
cttaagggaatacataagt

SEQ ID NO: 584001 - DNA, 19 bp, Mus musculus
  siRNA target sequence for Usp9y (NM_148943.1,2992-3010).
ggaatacataagtgaatat

SEQ ID NO: 584002 - DNA, 19 bp, Mus musculus
  siRNA target sequence for Usp9y (NM_148943.1,3057-3075).
catttcgtggaaaacactt

SEQ ID NO: 584003 - DNA, 19 bp, Mus musculus
  siRNA target sequence for Usp9y (NM_148943.1,3062-3080).
cgtggaaaacacttgtctt

SEQ ID NO: 584004 - DNA, 19 bp, Mus musculus
  siRNA target sequence for Usp9y (NM_148943.1,3105-3123).
gcaaagaggttgaggattt

SEQ ID NO: 584005 - DNA, 19 bp, Mus musculus
  siRNA target sequence for Usp9y (NM_148943.1,3116-3134).
gaggatttggacatattgt

SEQ ID NO: 584006 - DNA, 19 bp, Mus musculus
  siRNA target sequence for Usp9y (NM_148943.1,3118-3136).
ggatttggacatattgtct

SEQ ID NO: 584007 - DNA, 19 bp, Mus musculus
  siRNA target sequence for Usp9y (NM_148943.1,3161-3179).
gtgcgacgctgcattctca

SEQ ID NO: 584008 - DNA, 19 bp, Mus musculus
  siRNA target sequence for Usp9y (NM_148943.1,3163-3181).
gcgacgctgcattctcaat

SEQ ID NO: 584009 - DNA, 19 bp, Mus musculus
  siRNA target sequence for Usp9y (NM_148943.1,3167-3185).
cgctgcattctcaatcgta

SEQ ID NO: 584010 - DNA, 19 bp, Mus musculus
  siRNA target sequence for Usp9y (NM_148943.1,3171-3189).
gcattctcaatcgtatgaa

SEQ ID NO: 584011 - DNA, 19 bp, Mus musculus
  siRNA target sequence for Usp9y (NM_148943.1,3172-3190).
cattctcaatcgtatgaat

SEQ ID NO: 584012 - DNA, 19 bp, Mus musculus
  siRNA target sequence for Usp9y (NM_148943.1,3176-3194).
ctcaatcgtatgaatgtca

SEQ ID NO: 584013 - DNA, 19 bp, Mus musculus
  siRNA target sequence for Usp9y (NM_148943.1,3178-3196).
caatcgtatgaatgtcaat

SEQ ID NO: 584014 - DNA, 19 bp, Mus musculus
  siRNA target sequence for Usp9y (NM_148943.1,3220-3238).
gtttataggtggagagtta

SEQ ID NO: 584015 - DNA, 19 bp, Mus musculus
  siRNA target sequence for Usp9y (NM_148943.1,3263-3281).
ctagttgaacagttaaatt

SEQ ID NO: 584016 - DNA, 19 bp, Mus musculus
  siRNA target sequence for Usp9y (NM_148943.1,3294-3312).
cactaattactgctaaatt

SEQ ID NO: 584017 - DNA, 19 bp, Mus musculus
  siRNA target sequence for Usp9y (NM_148943.1,3296-3314).
ctaattactgctaaattta

SEQ ID NO: 584018 - DNA, 19 bp, Mus musculus
  siRNA target sequence for Usp9y (NM_148943.1,3458-3476).
ctgcagcccagatacatat

SEQ ID NO: 584019 - DNA, 19 bp, Mus musculus
  siRNA target sequence for Usp9y (NM_148943.1,3460-3478).
gcagcccagatacatatct

SEQ ID NO: 584020 - DNA, 19 bp, Mus musculus
  siRNA target sequence for Usp9y (NM_148943.1,3497-3515).
gacttaggtagcatgttga

SEQ ID NO: 584021 - DNA, 19 bp, Mus musculus
  siRNA target sequence for Usp9y (NM_148943.1,3587-3605).
caattaagagctctatgtt

SEQ ID NO: 584022 - DNA, 19 bp, Mus musculus
  siRNA target sequence for Usp9y (NM_148943.1,3603-3621).
gttcagaccatgtaaatct

SEQ ID NO: 584023 - DNA, 19 bp, Mus musculus
  siRNA target sequence for Usp9y (NM_148943.1,3630-3648).
gacgacttggtcaatctct

SEQ ID NO: 584024 - DNA, 19 bp, Mus musculus
  siRNA target sequence for Usp9y (NM_148943.1,3700-3718).
ggtagtttacaccttgtta

SEQ ID NO: 584025 - DNA, 19 bp, Mus musculus
  siRNA target sequence for Usp9y (NM_148943.1,3701-3719).
gtagtttacaccttgttaa

SEQ ID NO: 584026 - DNA, 19 bp, Mus musculus
  siRNA target sequence for Usp9y (NM_148943.1,3734-3752).
cctctggctgatatttcct

SEQ ID NO: 584027 - DNA, 19 bp, Mus musculus
  siRNA target sequence for Usp9y (NM_148943.1,3753-3771).
ctgactttcagtatcactt

SEQ ID NO: 584028 - DNA, 19 bp, Mus musculus
  siRNA target sequence for Usp9y (NM_148943.1,3785-3803).
ggcttacctcttgtactaa

SEQ ID NO: 584029 - DNA, 19 bp, Mus musculus
  siRNA target sequence for Usp9y (NM_148943.1,3809-3827).
ctgatacaaaataacttct

SEQ ID NO: 584030 - DNA, 19 bp, Mus musculus
  siRNA target sequence for Usp9y (NM_148943.1,3849-3867).
ctcgtagagatgcttactt

SEQ ID NO: 584031 - DNA, 19 bp, Mus musculus
  siRNA target sequence for Usp9y (NM_148943.1,3851-3869).
cgtagagatgcttacttca

SEQ ID NO: 584032 - DNA, 19 bp, Mus musculus
  siRNA target sequence for Usp9y (NM_148943.1,3865-3883).
cttcagtgcccttaaaata

SEQ ID NO: 584033 - DNA, 19 bp, Mus musculus
  siRNA target sequence for Usp9y (NM_148943.1,3884-3902).
gccaaactgttgttaacta

SEQ ID NO: 584034 - DNA, 19 bp, Mus musculus
  siRNA target sequence for Usp9y (NM_148943.1,3969-3987).
ctaaaacaccgattaacca

SEQ ID NO: 584035 - DNA, 19 bp, Mus musculus
  siRNA target sequence for Usp9y (NM_148943.1,3978-3996).
cgattaaccaggttactca

SEQ ID NO: 584036 - DNA, 19 bp, Mus musculus
  siRNA target sequence for Usp9y (NM_148943.1,3979-3997).
gattaaccaggttactcat

SEQ ID NO: 584037 - DNA, 19 bp, Mus musculus
  siRNA target sequence for Usp9y (NM_148943.1,4033-4051).
cattcctaatccttcttct

SEQ ID NO: 584038 - DNA, 19 bp, Mus musculus
  siRNA target sequence for Usp9y (NM_148943.1,4065-4083).
gaaatgtatcagttcatct

SEQ ID NO: 584039 - DNA, 19 bp, Mus musculus
  siRNA target sequence for Usp9y (NM_148943.1,4076-4094).
gttcatcttgctcaacaaa

SEQ ID NO: 584040 - DNA, 19 bp, Mus musculus
  siRNA target sequence for Usp9y (NM_148943.1,4079-4097).
catcttgctcaacaaatat

SEQ ID NO: 584041 - DNA, 19 bp, Mus musculus
  siRNA target sequence for Usp9y (NM_148943.1,4098-4116).
cagggttggcctcaagata

SEQ ID NO: 584042 - DNA, 19 bp, Mus musculus
  siRNA target sequence for Usp9y (NM_148943.1,4100-4118).
gggttggcctcaagatata

SEQ ID NO: 584043 - DNA, 19 bp, Mus musculus
  siRNA target sequence for Usp9y (NM_148943.1,4101-4119).
ggttggcctcaagatatat

SEQ ID NO: 584044 - DNA, 19 bp, Mus musculus
  siRNA target sequence for Usp9y (NM_148943.1,4102-4120).
gttggcctcaagatatata

SEQ ID NO: 584045 - DNA, 19 bp, Mus musculus
  siRNA target sequence for Usp9y (NM_148943.1,4175-4193).
ggatcattagagctagttt

SEQ ID NO: 584046 - DNA, 19 bp, Mus musculus
  siRNA target sequence for Usp9y (NM_148943.1,4176-4194).
gatcattagagctagtttt

SEQ ID NO: 584047 - DNA, 19 bp, Mus musculus
  siRNA target sequence for Usp9y (NM_148943.1,4234-4252).
caccagtacaaggagtaat

SEQ ID NO: 584048 - DNA, 19 bp, Mus musculus
  siRNA target sequence for Usp9y (NM_148943.1,4239-4257).
gtacaaggagtaatctaga

SEQ ID NO: 584049 - DNA, 19 bp, Mus musculus
  siRNA target sequence for Usp9y (NM_148943.1,4242-4260).
caaggagtaatctagaagt

SEQ ID NO: 584050 - DNA, 19 bp, Mus musculus
  siRNA target sequence for Usp9y (NM_148943.1,4297-4315).
gatgacattatgttttgct

SEQ ID NO: 584051 - DNA, 19 bp, Mus musculus
  siRNA target sequence for Usp9y (NM_148943.1,4323-4341).
caactgctatggattcact

SEQ ID NO: 584052 - DNA, 19 bp, Mus musculus
  siRNA target sequence for Usp9y (NM_148943.1,4329-4347).
ctatggattcactcaataa

SEQ ID NO: 584053 - DNA, 19 bp, Mus musculus
  siRNA target sequence for Usp9y (NM_148943.1,4363-4381).
gtcatttgtcattgactta

SEQ ID NO: 584054 - DNA, 19 bp, Mus musculus
  siRNA target sequence for Usp9y (NM_148943.1,4387-4405).
gtactgtcctagcaaaact

SEQ ID NO: 584055 - DNA, 19 bp, Mus musculus
  siRNA target sequence for Usp9y (NM_148943.1,4390-4408).
ctgtcctagcaaaactgta

SEQ ID NO: 584056 - DNA, 19 bp, Mus musculus
  siRNA target sequence for Usp9y (NM_148943.1,4488-4506).
ctctactctttaccatttt

SEQ ID NO: 584057 - DNA, 19 bp, Mus musculus
  siRNA target sequence for Usp9y (NM_148943.1,4518-4536).
ctaacgagaagggtaaaca

SEQ ID NO: 584058 - DNA, 19 bp, Mus musculus
  siRNA target sequence for Usp9y (NM_148943.1,4522-4540).
cgagaagggtaaacattca

SEQ ID NO: 584059 - DNA, 19 bp, Mus musculus
  siRNA target sequence for Usp9y (NM_148943.1,4525-4543).
gaagggtaaacattcagat

SEQ ID NO: 584060 - DNA, 19 bp, Mus musculus
  siRNA target sequence for Usp9y (NM_148943.1,4541-4559).
gatgtctacttcacacttt

SEQ ID NO: 584061 - DNA, 19 bp, Mus musculus
  siRNA target sequence for Usp9y (NM_148943.1,4544-4562).
gtctacttcacacttttaa

SEQ ID NO: 584062 - DNA, 19 bp, Mus musculus
  siRNA target sequence for Usp9y (NM_148943.1,4564-4582).
gcgtcttctcacttatgct

SEQ ID NO: 584063 - DNA, 19 bp, Mus musculus
  siRNA target sequence for Usp9y (NM_148943.1,4565-4583).
cgtcttctcacttatgctt

SEQ ID NO: 584064 - DNA, 19 bp, Mus musculus
  siRNA target sequence for Usp9y (NM_148943.1,4566-4584).
gtcttctcacttatgctta

SEQ ID NO: 584065 - DNA, 19 bp, Mus musculus
  siRNA target sequence for Usp9y (NM_148943.1,4650-4668).
gggttagggattacattaa

SEQ ID NO: 584066 - DNA, 19 bp, Mus musculus
  siRNA target sequence for Usp9y (NM_148943.1,4709-4727).
ggccatctgggagtaacaa

SEQ ID NO: 584067 - DNA, 19 bp, Mus musculus
  siRNA target sequence for Usp9y (NM_148943.1,4715-4733).
ctgggagtaacaaaagagt

SEQ ID NO: 584068 - DNA, 19 bp, Mus musculus
  siRNA target sequence for Usp9y (NM_148943.1,4717-4735).
gggagtaacaaaagagtta

SEQ ID NO: 584069 - DNA, 19 bp, Mus musculus
  siRNA target sequence for Usp9y (NM_148943.1,4721-4739).
gtaacaaaagagttactgt

SEQ ID NO: 584070 - DNA, 19 bp, Mus musculus
  siRNA target sequence for Usp9y (NM_148943.1,4836-4854).
ccaaagcttacctgcaata

SEQ ID NO: 584071 - DNA, 19 bp, Mus musculus
  siRNA target sequence for Usp9y (NM_148943.1,4837-4855).
caaagcttacctgcaatat

SEQ ID NO: 584072 - DNA, 19 bp, Mus musculus
  siRNA target sequence for Usp9y (NM_148943.1,4956-4974).
gttgtgtaaggaatcttaa

SEQ ID NO: 584073 - DNA, 19 bp, Mus musculus
  siRNA target sequence for Usp9y (NM_148943.1,4961-4979).
gtaaggaatcttaaacaga

SEQ ID NO: 584074 - DNA, 19 bp, Mus musculus
  siRNA target sequence for Usp9y (NM_148943.1,4989-5007).
gtttgactgaactgtttta

SEQ ID NO: 584075 - DNA, 19 bp, Mus musculus
  siRNA target sequence for Usp9y (NM_148943.1,5008-5026).
cataggcacaccagtaact

SEQ ID NO: 584076 - DNA, 19 bp, Mus musculus
  siRNA target sequence for Usp9y (NM_148943.1,5038-5056).
cgttggtgaatgggaatat

SEQ ID NO: 584077 - DNA, 19 bp, Mus musculus
  siRNA target sequence for Usp9y (NM_148943.1,5039-5057).
gttggtgaatgggaatatt

SEQ ID NO: 584078 - DNA, 19 bp, Mus musculus
  siRNA target sequence for Usp9y (NM_148943.1,5140-5158).
ccaacagctattcatgatt

SEQ ID NO: 584079 - DNA, 19 bp, Mus musculus
  siRNA target sequence for Usp9y (NM_148943.1,5160-5178).
cttcaatcaggaacagtat

SEQ ID NO: 584080 - DNA, 19 bp, Mus musculus
  siRNA target sequence for Usp9y (NM_148943.1,5163-5181).
caatcaggaacagtattct

SEQ ID NO: 584081 - DNA, 19 bp, Mus musculus
  siRNA target sequence for Usp9y (NM_148943.1,5170-5188).
gaacagtattcttgcaatt

SEQ ID NO: 584082 - DNA, 19 bp, Mus musculus
  siRNA target sequence for Usp9y (NM_148943.1,5180-5198).
cttgcaattgatagcatat

SEQ ID NO: 584083 - DNA, 19 bp, Mus musculus
  siRNA target sequence for Usp9y (NM_148943.1,5189-5207).
gatagcatatggagtgata

SEQ ID NO: 584084 - DNA, 19 bp, Mus musculus
  siRNA target sequence for Usp9y (NM_148943.1,5194-5212).
catatggagtgatacagat

SEQ ID NO: 584085 - DNA, 19 bp, Mus musculus
  siRNA target sequence for Usp9y (NM_148943.1,5200-5218).
gagtgatacagatgatgat

SEQ ID NO: 584086 - DNA, 19 bp, Mus musculus
  siRNA target sequence for Usp9y (NM_148943.1,5204-5222).
gatacagatgatgatatat

SEQ ID NO: 584087 - DNA, 19 bp, Mus musculus
  siRNA target sequence for Usp9y (NM_148943.1,5208-5226).
cagatgatgatatattcaa

SEQ ID NO: 584088 - DNA, 19 bp, Mus musculus
  siRNA target sequence for Usp9y (NM_148943.1,5239-5257).
ggacagtgagaataatgtt

SEQ ID NO: 584089 - DNA, 19 bp, Mus musculus
  siRNA target sequence for Usp9y (NM_148943.1,5300-5318).
gataaaccaacattaagta

SEQ ID NO: 584090 - DNA, 19 bp, Mus musculus
  siRNA target sequence for Usp9y (NM_148943.1,5763-5781).
cagtaaaacgcttattgat

SEQ ID NO: 584091 - DNA, 19 bp, Mus musculus
  siRNA target sequence for Usp9y (NM_148943.1,5765-5783).
gtaaaacgcttattgatta

SEQ ID NO: 584092 - DNA, 19 bp, Mus musculus
  siRNA target sequence for Usp9y (NM_148943.1,5810-5828).
caactgaaacgatttgact

SEQ ID NO: 584093 - DNA, 19 bp, Mus musculus
  siRNA target sequence for Usp9y (NM_148943.1,5815-5833).
gaaacgatttgactatgat

SEQ ID NO: 584094 - DNA, 19 bp, Mus musculus
  siRNA target sequence for Usp9y (NM_148943.1,5942-5960).
gtaaatccacagactcaat

SEQ ID NO: 584095 - DNA, 19 bp, Mus musculus
  siRNA target sequence for Usp9y (NM_148943.1,5948-5966).
ccacagactcaattgatta

SEQ ID NO: 584096 - DNA, 19 bp, Mus musculus
  siRNA target sequence for Usp9y (NM_148943.1,5992-6010).
cataccaggaagcacaaaa

SEQ ID NO: 584097 - DNA, 19 bp, Mus musculus
  siRNA target sequence for Usp9y (NM_148943.1,6073-6091).
catcattcaaagaaatggt

SEQ ID NO: 584098 - DNA, 19 bp, Mus musculus
  siRNA target sequence for Usp9y (NM_148943.1,6076-6094).
cattcaaagaaatggtaaa

SEQ ID NO: 584099 - DNA, 19 bp, Mus musculus
  siRNA target sequence for Usp9y (NM_148943.1,6105-6123).
gaagtcactggttcaaatt

SEQ ID NO: 584100 - DNA, 19 bp, Mus musculus
  siRNA target sequence for Usp9y (NM_148943.1,6108-6126).
gtcactggttcaaatttga

SEQ ID NO: 584101 - DNA, 19 bp, Mus musculus
  siRNA target sequence for Usp9y (NM_148943.1,6348-6366).
ccagacctcatcagattat

SEQ ID NO: 584102 - DNA, 19 bp, Mus musculus
  siRNA target sequence for Usp9y (NM_148943.1,6406-6424).
gcaattcctgcataaccaa

SEQ ID NO: 584103 - DNA, 19 bp, Mus musculus
  siRNA target sequence for Usp9y (NM_148943.1,6416-6434).
cataaccaaatgcagttta

SEQ ID NO: 584104 - DNA, 19 bp, Mus musculus
  siRNA target sequence for Usp9y (NM_148943.1,6427-6445).
gcagtttagcttagaatat

SEQ ID NO: 584105 - DNA, 19 bp, Mus musculus
  siRNA target sequence for Usp9y (NM_148943.1,6428-6446).
cagtttagcttagaatatt

SEQ ID NO: 584106 - DNA, 19 bp, Mus musculus
  siRNA target sequence for Usp9y (NM_148943.1,6430-6448).
gtttagcttagaatatttt

SEQ ID NO: 584107 - DNA, 19 bp, Mus musculus
  siRNA target sequence for Usp9y (NM_148943.1,6550-6568).
cattcagcttgcttctaga

SEQ ID NO: 584108 - DNA, 19 bp, Mus musculus
  siRNA target sequence for Usp9y (NM_148943.1,6579-6597).
ctactggatttcatactaa

SEQ ID NO: 584109 - DNA, 19 bp, Mus musculus
  siRNA target sequence for Usp9y (NM_148943.1,6625-6643).
ctggtatgacgcactttgt

SEQ ID NO: 584110 - DNA, 19 bp, Mus musculus
  siRNA target sequence for Usp9y (NM_148943.1,6627-6645).
ggtatgacgcactttgtat

SEQ ID NO: 584111 - DNA, 19 bp, Mus musculus
  siRNA target sequence for Usp9y (NM_148943.1,6652-6670).
ccgtcacagcaagaatgta

SEQ ID NO: 584112 - DNA, 19 bp, Mus musculus
  siRNA target sequence for Usp9y (NM_148943.1,6772-6790).
gcttatagtatttattgca

SEQ ID NO: 584113 - DNA, 19 bp, Mus musculus
  siRNA target sequence for Usp9y (NM_148943.1,6852-6870).
gaccttatagtcagatcta

SEQ ID NO: 584114 - DNA, 19 bp, Mus musculus
  siRNA target sequence for Usp9y (NM_148943.1,6855-6873).
cttatagtcagatctatga

SEQ ID NO: 584115 - DNA, 19 bp, Mus musculus
  siRNA target sequence for Usp9y (NM_148943.1,6882-6900).
gcttgagtgatcatttact

SEQ ID NO: 584116 - DNA, 19 bp, Mus musculus
  siRNA target sequence for Usp9y (NM_148943.1,6886-6904).
gagtgatcatttactaaaa

SEQ ID NO: 584117 - DNA, 19 bp, Mus musculus
  siRNA target sequence for Usp9y (NM_148943.1,6908-6926).
gtattaagtctcttgagaa

SEQ ID NO: 584118 - DNA, 19 bp, Mus musculus
  siRNA target sequence for Usp9y (NM_148943.1,6919-6937).
cttgagaagggaagtttct

SEQ ID NO: 584119 - DNA, 19 bp, Mus musculus
  siRNA target sequence for Usp9y (NM_148943.1,6944-6962).
gggcgacatttacaacaat

SEQ ID NO: 584120 - DNA, 19 bp, Mus musculus
  siRNA target sequence for Usp9y (NM_148943.1,6945-6963).
ggcgacatttacaacaata

SEQ ID NO: 584121 - DNA, 19 bp, Mus musculus
  siRNA target sequence for Usp9y (NM_148943.1,7015-7033).
gcttctaaaactgaatgtt

SEQ ID NO: 584122 - DNA, 19 bp, Mus musculus
  siRNA target sequence for Usp9y (NM_148943.1,7027-7045).
gaatgttcctgcaaccttt

SEQ ID NO: 584123 - DNA, 19 bp, Mus musculus
  siRNA target sequence for Usp9y (NM_148943.1,7098-7116).
ctgagttgagcaagttaca

SEQ ID NO: 584124 - DNA, 19 bp, Mus musculus
  siRNA target sequence for Usp9y (NM_148943.1,7100-7118).
gagttgagcaagttacatt

SEQ ID NO: 584125 - DNA, 19 bp, Mus musculus
  siRNA target sequence for Usp9y (NM_148943.1,7124-7142).
gtgtctcagctgatcagat

SEQ ID NO: 584126 - DNA, 19 bp, Mus musculus
  siRNA target sequence for Usp9y (NM_148943.1,7188-7206).
cccctcttccaaatccatt

SEQ ID NO: 584127 - DNA, 19 bp, Mus musculus
  siRNA target sequence for Usp9y (NM_148943.1,7202-7220).
ccatttggtgacccaaatt

SEQ ID NO: 584128 - DNA, 19 bp, Mus musculus
  siRNA target sequence for Usp9y (NM_148943.1,7203-7221).
catttggtgacccaaattt

SEQ ID NO: 584129 - DNA, 19 bp, Mus musculus
  siRNA target sequence for Usp9y (NM_148943.1,7246-7264).
gcaaaatgtggctgacatt

SEQ ID NO: 584130 - DNA, 19 bp, Mus musculus
  siRNA target sequence for Usp9y (NM_148943.1,7311-7329).
gtaactcagaggatacagt

SEQ ID NO: 584131 - DNA, 19 bp, Mus musculus
  siRNA target sequence for Usp9y (NM_148943.1,7321-7339).
ggatacagtcaaattactt

SEQ ID NO: 584132 - DNA, 19 bp, Mus musculus
  siRNA target sequence for Usp9y (NM_148943.1,7580-7598).
gcctatcaatgtataaaat

SEQ ID NO: 584133 - DNA, 19 bp, Mus musculus
  siRNA target sequence for Usp9y (NM_148943.1,7818-7836).
caaaaatgaaacttacaaa

SEQ ID NO: 584134 - DNA, 19 bp, Mus musculus
  siRNA target sequence for Usp9y (NM_148943.1,7833-7851).
caaaagcttgtgatctgta

SEQ ID NO: 584135 - DNA, 19 bp, Mus musculus
  siRNA target sequence for Usp9y (NM_148943.1,7897-7915).
gtcacatgcaccacaagat

SEQ ID NO: 584136 - DNA, 19 bp, Mus musculus
  siRNA target sequence for Usp9y (NM_148943.1,7944-7962).
ctcactatcaacagaatta

SEQ ID NO: 584137 - DNA, 19 bp, Mus musculus
  siRNA target sequence for Usp9y (NM_148943.1,7991-8009).
gcatcacatcacttgaata

SEQ ID NO: 584138 - DNA, 19 bp, Mus musculus
  siRNA target sequence for Usp9y (NM_148943.1,7992-8010).
catcacatcacttgaataa

SEQ ID NO: 584139 - DNA, 19 bp, Mus musculus
  siRNA target sequence for Usp9y (NM_148943.1,8002-8020).
cttgaataaccctcagaaa

SEQ ID NO: 584140 - DNA, 19 bp, Mus musculus
  siRNA target sequence for Usp9y (NM_148943.1,8005-8023).
gaataaccctcagaaaaat

SEQ ID NO: 584141 - DNA, 19 bp, Mus musculus
  siRNA target sequence for Wdr31 (NM_023597.1,269-287).
ctcagacacagcacttact

SEQ ID NO: 584142 - DNA, 19 bp, Mus musculus
  siRNA target sequence for Wdr31 (NM_023597.1,294-312).
gcaggcctgatggaattat

SEQ ID NO: 584143 - DNA, 19 bp, Mus musculus
  siRNA target sequence for Wdr31 (NM_023597.1,297-315).
ggcctgatggaattataga

SEQ ID NO: 584144 - DNA, 19 bp, Mus musculus
  siRNA target sequence for Wdr31 (NM_023597.1,298-316).
gcctgatggaattatagaa

SEQ ID NO: 584145 - DNA, 19 bp, Mus musculus
  siRNA target sequence for Wdr31 (NM_023597.1,330-348).
ctaaagctccccaagaata

SEQ ID NO: 584146 - DNA, 19 bp, Mus musculus
  siRNA target sequence for Wdr31 (NM_023597.1,364-382).
ggataccgtctctgtgatt

SEQ ID NO: 584147 - DNA, 19 bp, Mus musculus
  siRNA target sequence for Wdr31 (NM_023597.1,394-412).
ctcagacctttgtatctct

SEQ ID NO: 584148 - DNA, 19 bp, Mus musculus
  siRNA target sequence for Wdr31 (NM_023597.1,427-445).
gaccgccgtggcctacaat

SEQ ID NO: 584149 - DNA, 19 bp, Mus musculus
  siRNA target sequence for Wdr31 (NM_023597.1,431-449).
gccgtggcctacaattgga

SEQ ID NO: 584150 - DNA, 19 bp, Mus musculus
  siRNA target sequence for Wdr31 (NM_023597.1,432-450).
ccgtggcctacaattggaa

SEQ ID NO: 584151 - DNA, 19 bp, Mus musculus
  siRNA target sequence for Wdr31 (NM_023597.1,433-451).
cgtggcctacaattggaaa

SEQ ID NO: 584152 - DNA, 19 bp, Mus musculus
  siRNA target sequence for Wdr31 (NM_023597.1,434-452).
gtggcctacaattggaaaa

SEQ ID NO: 584153 - DNA, 19 bp, Mus musculus
  siRNA target sequence for Wdr31 (NM_023597.1,455-473).
gggcgtatggtgaaaaggt

SEQ ID NO: 584154 - DNA, 19 bp, Mus musculus
  siRNA target sequence for Wdr31 (NM_023597.1,456-474).
ggcgtatggtgaaaaggtt

SEQ ID NO: 584155 - DNA, 19 bp, Mus musculus
  siRNA target sequence for Wdr31 (NM_023597.1,479-497).
gggcacgagcgggaaatca

SEQ ID NO: 584156 - DNA, 19 bp, Mus musculus
  siRNA target sequence for Wdr31 (NM_023597.1,487-505).
gcgggaaatcacgaagata

SEQ ID NO: 584157 - DNA, 19 bp, Mus musculus
  siRNA target sequence for Wdr31 (NM_023597.1,496-514).
cacgaagatagcctgtatt

SEQ ID NO: 584158 - DNA, 19 bp, Mus musculus
  siRNA target sequence for Wdr31 (NM_023597.1,769-787).
cccgagtgagccatacata

SEQ ID NO: 584159 - DNA, 19 bp, Mus musculus
  siRNA target sequence for Wdr31 (NM_023597.1,771-789).
cgagtgagccatacatagt

SEQ ID NO: 584160 - DNA, 19 bp, Mus musculus
  siRNA target sequence for Wdr31 (NM_023597.1,898-916).
ggatggacacacgtgtatt

SEQ ID NO: 584161 - DNA, 19 bp, Mus musculus
  siRNA target sequence for Wdr31 (NM_023597.1,1050-1068).
cggccttgatgcctatgat

SEQ ID NO: 584162 - DNA, 19 bp, Mus musculus
  siRNA target sequence for Wdr31 (NM_023597.1,1051-1069).
ggccttgatgcctatgatt

SEQ ID NO: 584163 - DNA, 19 bp, Mus musculus
  siRNA target sequence for Wdr31 (NM_023597.1,1085-1103).
gactccaaggtgaagattt

SEQ ID NO: 584164 - DNA, 19 bp, Mus musculus
  siRNA target sequence for Wdr31 (NM_023597.1,1191-1209).
ccttgttatgcgcaagttt

SEQ ID NO: 584165 - DNA, 19 bp, Mus musculus
  siRNA target sequence for Bap1 (NM_027088.1,151-169).
gggcctgtgtatggattta

SEQ ID NO: 584166 - DNA, 19 bp, Mus musculus
  siRNA target sequence for Bap1 (NM_027088.1,164-182).
gatttatcttcctgttcaa

SEQ ID NO: 584167 - DNA, 19 bp, Mus musculus
  siRNA target sequence for Bap1 (NM_027088.1,234-252).
cacgtctgtgattgatgat

SEQ ID NO: 584168 - DNA, 19 bp, Mus musculus
  siRNA target sequence for Bap1 (NM_027088.1,236-254).
cgtctgtgattgatgatga

SEQ ID NO: 584169 - DNA, 19 bp, Mus musculus
  siRNA target sequence for Bap1 (NM_027088.1,253-271).
gatattgtgaataacatgt

SEQ ID NO: 584170 - DNA, 19 bp, Mus musculus
  siRNA target sequence for Bap1 (NM_027088.1,283-301).
cagctgattcccaactctt

SEQ ID NO: 584171 - DNA, 19 bp, Mus musculus
  siRNA target sequence for Bap1 (NM_027088.1,304-322).
gccactcacgccttgctaa

SEQ ID NO: 584172 - DNA, 19 bp, Mus musculus
  siRNA target sequence for Bap1 (NM_027088.1,403-421).
gagagcaaaggatatgcaa

SEQ ID NO: 584173 - DNA, 19 bp, Mus musculus
  siRNA target sequence for Bap1 (NM_027088.1,405-423).
gagcaaaggatatgcaatt

SEQ ID NO: 584174 - DNA, 19 bp, Mus musculus
  siRNA target sequence for Bap1 (NM_027088.1,519-537).
gaccatggaggcgtttcat

SEQ ID NO: 584175 - DNA, 19 bp, Mus musculus
  siRNA target sequence for Bap1 (NM_027088.1,521-539).
ccatggaggcgtttcattt

SEQ ID NO: 584176 - DNA, 19 bp, Mus musculus
  siRNA target sequence for Bap1 (NM_027088.1,526-544).
gaggcgtttcattttgtca

SEQ ID NO: 584177 - DNA, 19 bp, Mus musculus
  siRNA target sequence for Bap1 (NM_027088.1,558-576).
cacagggaggctctttgaa

SEQ ID NO: 584178 - DNA, 19 bp, Mus musculus
  siRNA target sequence for Bap1 (NM_027088.1,686-704).
caggggagccctatcatga

SEQ ID NO: 584179 - DNA, 19 bp, Mus musculus
  siRNA target sequence for Bap1 (NM_027088.1,689-707).
gggagccctatcatgacat

SEQ ID NO: 584180 - DNA, 19 bp, Mus musculus
  siRNA target sequence for Bap1 (NM_027088.1,690-708).
ggagccctatcatgacatt

SEQ ID NO: 584181 - DNA, 19 bp, Mus musculus
  siRNA target sequence for Bap1 (NM_027088.1,730-748).
gtgcctgaccgcaggatta

SEQ ID NO: 584182 - DNA, 19 bp, Mus musculus
  siRNA target sequence for Bap1 (NM_027088.1,733-751).
cctgaccgcaggattaagt

SEQ ID NO: 584183 - DNA, 19 bp, Mus musculus
  siRNA target sequence for Bap1 (NM_027088.1,734-752).
ctgaccgcaggattaagta

SEQ ID NO: 584184 - DNA, 19 bp, Mus musculus
  siRNA target sequence for Bap1 (NM_027088.1,827-845).
cccagccggagctgattca

SEQ ID NO: 584185 - DNA, 19 bp, Mus musculus
  siRNA target sequence for Bap1 (NM_027088.1,840-858).
gattcagacccacaaatct

SEQ ID NO: 584186 - DNA, 19 bp, Mus musculus
  siRNA target sequence for Bap1 (NM_027088.1,982-1000).
ggttcgtgcccacaaacta

SEQ ID NO: 584187 - DNA, 19 bp, Mus musculus
  siRNA target sequence for Bap1 (NM_027088.1,1006-1024).
catagtcctcccagcaaat

SEQ ID NO: 584188 - DNA, 19 bp, Mus musculus
  siRNA target sequence for Bap1 (NM_027088.1,1101-1119).
gccagccttcctagacaat

SEQ ID NO: 584189 - DNA, 19 bp, Mus musculus
  siRNA target sequence for Bap1 (NM_027088.1,1110-1128).
cctagacaatcacaattat

SEQ ID NO: 584190 - DNA, 19 bp, Mus musculus
  siRNA target sequence for Bap1 (NM_027088.1,1262-1280).
ccaaccctgccatcagata

SEQ ID NO: 584191 - DNA, 19 bp, Mus musculus
  siRNA target sequence for Bap1 (NM_027088.1,1303-1321).
ccaggatcgttgagcaatt

SEQ ID NO: 584192 - DNA, 19 bp, Mus musculus
  siRNA target sequence for Bap1 (NM_027088.1,1311-1329).
gttgagcaattcttcagat

SEQ ID NO: 584193 - DNA, 19 bp, Mus musculus
  siRNA target sequence for Bap1 (NM_027088.1,1483-1501).
cccacccctagcaatgaga

SEQ ID NO: 584194 - DNA, 19 bp, Mus musculus
  siRNA target sequence for Bap1 (NM_027088.1,1608-1626).
ctccaaggtgctttttgga

SEQ ID NO: 584195 - DNA, 19 bp, Mus musculus
  siRNA target sequence for Bap1 (NM_027088.1,1681-1699).
gacctgggtcctgtcatta

SEQ ID NO: 584196 - DNA, 19 bp, Mus musculus
  siRNA target sequence for Bap1 (NM_027088.1,1684-1702).
ctgggtcctgtcattagca

SEQ ID NO: 584197 - DNA, 19 bp, Mus musculus
  siRNA target sequence for Bap1 (NM_027088.1,1949-1967).
ccgagattgcaaactatga

SEQ ID NO: 584198 - DNA, 19 bp, Mus musculus
  siRNA target sequence for Bap1 (NM_027088.1,2024-2042).
gaaggacccacaactatga

SEQ ID NO: 584199 - DNA, 19 bp, Mus musculus
  siRNA target sequence for Bap1 (NM_027088.1,2032-2050).
cacaactatgacgagttta

SEQ ID NO: 584200 - DNA, 19 bp, Mus musculus
  siRNA target sequence for Bap1 (NM_027088.1,2037-2055).
ctatgacgagtttatctgt

SEQ ID NO: 584201 - DNA, 19 bp, Mus musculus
  siRNA target sequence for Uchl1 (NM_011670.1,15-33).
ctgaagccgatggagatta

SEQ ID NO: 584202 - DNA, 19 bp, Mus musculus
  siRNA target sequence for Uchl1 (NM_011670.1,37-55).
ccgagatgctgaacaaagt

SEQ ID NO: 584203 - DNA, 19 bp, Mus musculus
  siRNA target sequence for Uchl1 (NM_011670.1,175-193).
cggcccagcatgaaaactt

SEQ ID NO: 584204 - DNA, 19 bp, Mus musculus
  siRNA target sequence for Uchl1 (NM_011670.1,177-195).
gcccagcatgaaaacttca

SEQ ID NO: 584205 - DNA, 19 bp, Mus musculus
  siRNA target sequence for Uchl1 (NM_011670.1,227-245).
ggaagttagccctaaagtt

SEQ ID NO: 584206 - DNA, 19 bp, Mus musculus
  siRNA target sequence for Uchl1 (NM_011670.1,231-249).
gttagccctaaagtttact

SEQ ID NO: 584207 - DNA, 19 bp, Mus musculus
  siRNA target sequence for Uchl1 (NM_011670.1,235-253).
gccctaaagtttacttcat

SEQ ID NO: 584208 - DNA, 19 bp, Mus musculus
  siRNA target sequence for Uchl1 (NM_011670.1,339-357).
ggatccgtcctgaaacagt

SEQ ID NO: 584209 - DNA, 19 bp, Mus musculus
  siRNA target sequence for Uchl1 (NM_011670.1,340-358).
gatccgtcctgaaacagtt

SEQ ID NO: 584210 - DNA, 19 bp, Mus musculus
  siRNA target sequence for Uchl1 (NM_011670.1,457-475).
gccagtgtcgggtagatga

SEQ ID NO: 584211 - DNA, 19 bp, Mus musculus
  siRNA target sequence for Uchl1 (NM_011670.1,461-479).
gtgtcgggtagatgacaaa

SEQ ID NO: 584212 - DNA, 19 bp, Mus musculus
  siRNA target sequence for Uchl1 (NM_011670.1,463-481).
gtcgggtagatgacaaagt

SEQ ID NO: 584213 - DNA, 19 bp, Mus musculus
  siRNA target sequence for Uchl1 (NM_011670.1,465-483).
cgggtagatgacaaagtga

SEQ ID NO: 584214 - DNA, 19 bp, Mus musculus
  siRNA target sequence for Uchl1 (NM_011670.1,605-623).
ggtctgcagagaattcact

SEQ ID NO: 584215 - DNA, 19 bp, Mus musculus
  siRNA target sequence for Uchl3 (NM_016723.1,87-105).
ctaactggcagtttgttga

SEQ ID NO: 584216 - DNA, 19 bp, Mus musculus
  siRNA target sequence for Uchl3 (NM_016723.1,177-195).
ctatcacagaaaagtatga

SEQ ID NO: 584217 - DNA, 19 bp, Mus musculus
  siRNA target sequence for Uchl3 (NM_016723.1,245-263).
gtgacatcatcagtatatt

SEQ ID NO: 584218 - DNA, 19 bp, Mus musculus
  siRNA target sequence for Uchl3 (NM_016723.1,294-312).
gaacgattggactaatcca

SEQ ID NO: 584219 - DNA, 19 bp, Mus musculus
  siRNA target sequence for Uchl3 (NM_016723.1,347-365).
gaatcagggtcaacattga

SEQ ID NO: 584220 - DNA, 19 bp, Mus musculus
  siRNA target sequence for Uchl3 (NM_016723.1,373-391).
cctggaggagtctgtatca

SEQ ID NO: 584221 - DNA, 19 bp, Mus musculus
  siRNA target sequence for Uchl3 (NM_016723.1,374-392).
ctggaggagtctgtatcaa

SEQ ID NO: 584222 - DNA, 19 bp, Mus musculus
  siRNA target sequence for Uchl3 (NM_016723.1,433-451).
cgctattcgagttactcat

SEQ ID NO: 584223 - DNA, 19 bp, Mus musculus
  siRNA target sequence for Uchl3 (NM_016723.1,475-493).
gactgaggcaccaagtata

SEQ ID NO: 584224 - DNA, 19 bp, Mus musculus
  siRNA target sequence for Uchl3 (NM_016723.1,486-504).
caagtatagatgaaaaagt

SEQ ID NO: 584225 - DNA, 19 bp, Mus musculus
  siRNA target sequence for Uchl3 (NM_016723.1,597-615).
gcgatgagacgttgttaga

SEQ ID NO: 584226 - DNA, 19 bp, Mus musculus
  siRNA target sequence for Uchl3 (NM_016723.1,607-625).
gttgttagaggatgtcata

SEQ ID NO: 584227 - DNA, 19 bp, Mus musculus
  siRNA target sequence for Uchl3 (NM_016723.1,653-671).
gaccctgatgagttaagat

SEQ ID NO: 584228 - DNA, 19 bp, Mus musculus
  siRNA target sequence for Uchl3 (NM_016723.1,662-680).
gagttaagatttaatgcaa

SEQ ID NO: 584229 - DNA, 19 bp, Mus musculus
  siRNA target sequence for Uchl4 (NM_033607.1,89-107).
ccagtttctcaagcaatta

SEQ ID NO: 584230 - DNA, 19 bp, Mus musculus
  siRNA target sequence for Uchl4 (NM_033607.1,159-177).
cttcttagcatcataccaa

SEQ ID NO: 584231 - DNA, 19 bp, Mus musculus
  siRNA target sequence for Uchl4 (NM_033607.1,318-336).
gcctgtggaacgattggaa

SEQ ID NO: 584232 - DNA, 19 bp, Mus musculus
  siRNA target sequence for Uchl4 (NM_033607.1,372-390).
gacaaggtgcactttgaat

SEQ ID NO: 584233 - DNA, 19 bp, Mus musculus
  siRNA target sequence for Uchl4 (NM_033607.1,374-392).
caaggtgcactttgaatca

SEQ ID NO: 584234 - DNA, 19 bp, Mus musculus
  siRNA target sequence for Uchl5 (NM_019562.1,177-195).
cttagaacctgagagtttt

SEQ ID NO: 584235 - DNA, 19 bp, Mus musculus
  siRNA target sequence for Uchl5 (NM_019562.1,185-203).
ctgagagttttgaaaagct

SEQ ID NO: 584236 - DNA, 19 bp, Mus musculus
  siRNA target sequence for Uchl5 (NM_019562.1,207-225).
gccagttcatgggttaatt

SEQ ID NO: 584237 - DNA, 19 bp, Mus musculus
  siRNA target sequence for Uchl5 (NM_019562.1,208-226).
ccagttcatgggttaattt

SEQ ID NO: 584238 - DNA, 19 bp, Mus musculus
  siRNA target sequence for Uchl5 (NM_019562.1,209-227).
cagttcatgggttaatttt

SEQ ID NO: 584239 - DNA, 19 bp, Mus musculus
  siRNA target sequence for Uchl5 (NM_019562.1,279-297).
ctccagacttgaaacaata

SEQ ID NO: 584240 - DNA, 19 bp, Mus musculus
  siRNA target sequence for Uchl5 (NM_019562.1,304-322).
gccaagcaggtaattaata

SEQ ID NO: 584241 - DNA, 19 bp, Mus musculus
  siRNA target sequence for Uchl5 (NM_019562.1,305-323).
ccaagcaggtaattaataa

SEQ ID NO: 584242 - DNA, 19 bp, Mus musculus
  siRNA target sequence for Uchl5 (NM_019562.1,331-349).
gccactcaggctatcgtaa

SEQ ID NO: 584243 - DNA, 19 bp, Mus musculus
  siRNA target sequence for Uchl5 (NM_019562.1,335-353).
ctcaggctatcgtaagtgt

SEQ ID NO: 584244 - DNA, 19 bp, Mus musculus
  siRNA target sequence for Uchl5 (NM_019562.1,339-357).
ggctatcgtaagtgtacta

SEQ ID NO: 584245 - DNA, 19 bp, Mus musculus
  siRNA target sequence for Uchl5 (NM_019562.1,341-359).
ctatcgtaagtgtactact

SEQ ID NO: 584246 - DNA, 19 bp, Mus musculus
  siRNA target sequence for Uchl5 (NM_019562.1,360-378).
gaactgtacgcatcaagat

SEQ ID NO: 584247 - DNA, 19 bp, Mus musculus
  siRNA target sequence for Uchl5 (NM_019562.1,369-387).
gcatcaagatgtgcattta

SEQ ID NO: 584248 - DNA, 19 bp, Mus musculus
  siRNA target sequence for Uchl5 (NM_019562.1,388-406).
ggagagacattatcagaat

SEQ ID NO: 584249 - DNA, 19 bp, Mus musculus
  siRNA target sequence for Uchl5 (NM_019562.1,389-407).
gagagacattatcagaatt

SEQ ID NO: 584250 - DNA, 19 bp, Mus musculus
  siRNA target sequence for Uchl5 (NM_019562.1,441-459).
gaaggggctggcattgagt

SEQ ID NO: 584251 - DNA, 19 bp, Mus musculus
  siRNA target sequence for Uchl5 (NM_019562.1,447-465).
gctggcattgagtaactca

SEQ ID NO: 584252 - DNA, 19 bp, Mus musculus
  siRNA target sequence for Uchl5 (NM_019562.1,475-493).
cgacaagtgcacaacagtt

SEQ ID NO: 584253 - DNA, 19 bp, Mus musculus
  siRNA target sequence for Uchl5 (NM_019562.1,476-494).
gacaagtgcacaacagttt

SEQ ID NO: 584254 - DNA, 19 bp, Mus musculus
  siRNA target sequence for Uchl5 (NM_019562.1,564-582).
cagttacgttccagtcaat

SEQ ID NO: 584255 - DNA, 19 bp, Mus musculus
  siRNA target sequence for Uchl5 (NM_019562.1,584-602).
ggaggctgtatgaactaga

SEQ ID NO: 584256 - DNA, 19 bp, Mus musculus
  siRNA target sequence for Uchl5 (NM_019562.1,611-629).
gagagggcccaattgattt

SEQ ID NO: 584257 - DNA, 19 bp, Mus musculus
  siRNA target sequence for Uchl5 (NM_019562.1,615-633).
gggcccaattgatttaggt

SEQ ID NO: 584258 - DNA, 19 bp, Mus musculus
  siRNA target sequence for Uchl5 (NM_019562.1,659-677).
ctgcagtgaggccagtaat

SEQ ID NO: 584259 - DNA, 19 bp, Mus musculus
  siRNA target sequence for Uchl5 (NM_019562.1,662-680).
cagtgaggccagtaataga

SEQ ID NO: 584260 - DNA, 19 bp, Mus musculus
  siRNA target sequence for Uchl5 (NM_019562.1,664-682).
gtgaggccagtaatagaga

SEQ ID NO: 584261 - DNA, 19 bp, Mus musculus
  siRNA target sequence for Uchl5 (NM_019562.1,696-714).
gtatagtgaaggagaaatt

SEQ ID NO: 584262 - DNA, 19 bp, Mus musculus
  siRNA target sequence for Uchl5 (NM_019562.1,744-762).
cagaaaaatgatatatgaa

SEQ ID NO: 584263 - DNA, 19 bp, Mus musculus
  siRNA target sequence for Uchl5 (NM_019562.1,765-783).
gaagatagcagagttacaa

SEQ ID NO: 584264 - DNA, 19 bp, Mus musculus
  siRNA target sequence for Uchl5 (NM_019562.1,832-850).
gtgttaagtgctattcagt

SEQ ID NO: 584265 - DNA, 19 bp, Mus musculus
  siRNA target sequence for Uchl5 (NM_019562.1,861-879).
cagaaaccagatgcttatt

SEQ ID NO: 584266 - DNA, 19 bp, Mus musculus
  siRNA target sequence for Uchl5 (NM_019562.1,888-906).
ggtacaaaagttaaagaga

SEQ ID NO: 584267 - DNA, 19 bp, Mus musculus
  siRNA target sequence for Uchl5 (NM_019562.1,889-907).
gtacaaaagttaaagagat

SEQ ID NO: 584268 - DNA, 19 bp, Mus musculus
  siRNA target sequence for Uchl5 (NM_019562.1,892-910).
caaaagttaaagagatata

SEQ ID NO: 584269 - DNA, 19 bp, Mus musculus
  siRNA target sequence for Uchl5 (NM_019562.1,976-994).
gctgagcaccagcagttaa

SEQ ID NO: 584270 - DNA, 19 bp, Mus musculus
  siRNA target sequence for Uchl5 (NM_019562.1,977-995).
ctgagcaccagcagttaat

SEQ ID NO: 584271 - DNA, 19 bp, Mus musculus
  siRNA target sequence for Uchl5 (NM_019562.1,981-999).
gcaccagcagttaattcca

SEQ ID NO: 584272 - DNA, 19 bp, Mus musculus
  siRNA target sequence for 2810003H13Rik (NM_023217.2,302-320).
ggcacaacaagggttacaa

SEQ ID NO: 584273 - DNA, 19 bp, Mus musculus
  siRNA target sequence for 2810003H13Rik (NM_023217.2,314-332).
gttacaaaggactggataa

SEQ ID NO: 584274 - DNA, 19 bp, Mus musculus
  siRNA target sequence for 2810003H13Rik (NM_023217.2,436-454).
ggactggacgtgtctgtta

SEQ ID NO: 584275 - DNA, 19 bp, Mus musculus
  siRNA target sequence for 2810003H13Rik (NM_023217.2,481-499).
ctgtgtgacttcacgtatt

SEQ ID NO: 584276 - DNA, 19 bp, Mus musculus
  siRNA target sequence for 2810003H13Rik (NM_023217.2,483-501).
gtgtgacttcacgtattat

SEQ ID NO: 584277 - DNA, 19 bp, Mus musculus
  siRNA target sequence for 2810003H13Rik (NM_023217.2,487-505).
gacttcacgtattatacat

SEQ ID NO: 584278 - DNA, 19 bp, Mus musculus
  siRNA target sequence for 2810403B08Rik (NM_028815.2,107-125).
gggactgcagaaattaggt

SEQ ID NO: 584279 - DNA, 19 bp, Mus musculus
  siRNA target sequence for 2810403B08Rik (NM_028815.2,224-242).
gttgtcagtggctaacaat

SEQ ID NO: 584280 - DNA, 19 bp, Mus musculus
  siRNA target sequence for 2810403B08Rik (NM_028815.2,279-297).
caactccgagtgttaaatt

SEQ ID NO: 584281 - DNA, 19 bp, Mus musculus
  siRNA target sequence for 2810403B08Rik (NM_028815.2,284-302).
ccgagtgttaaatttacct

SEQ ID NO: 584282 - DNA, 19 bp, Mus musculus
  siRNA target sequence for 2810403B08Rik (NM_028815.2,359-377).
gaatttagcgggcaataat

SEQ ID NO: 584283 - DNA, 19 bp, Mus musculus
  siRNA target sequence for 2810403B08Rik (NM_028815.2,383-401).
gaccatggagcaagtcaat

SEQ ID NO: 584284 - DNA, 19 bp, Mus musculus
  siRNA target sequence for 2810403B08Rik (NM_028815.2,456-474).
ggtgatgtgtcgaaattga

SEQ ID NO: 584285 - DNA, 19 bp, Mus musculus
  siRNA target sequence for 2810403B08Rik (NM_028815.2,459-477).
gatgtgtcgaaattgatat

SEQ ID NO: 584286 - DNA, 19 bp, Mus musculus
  siRNA target sequence for 2810403B08Rik (NM_028815.2,462-480).
gtgtcgaaattgatatctt

SEQ ID NO: 584287 - DNA, 19 bp, Mus musculus
  siRNA target sequence for 2810403B08Rik (NM_028815.2,487-505).
ccttgcttttacatggaaa

SEQ ID NO: 584288 - DNA, 19 bp, Mus musculus
  siRNA target sequence for 2810403B08Rik (NM_028815.2,506-524).
catcatcacttctcttaga

SEQ ID NO: 584289 - DNA, 19 bp, Mus musculus
  siRNA target sequence for 2810403B08Rik (NM_028815.2,563-581).
gtctttggcagaaaacgaa

SEQ ID NO: 584290 - DNA, 19 bp, Mus musculus
  siRNA target sequence for 2810403B08Rik (NM_028815.2,578-596).
cgaaatccgagacttaaat

SEQ ID NO: 584291 - DNA, 19 bp, Mus musculus
  siRNA target sequence for 2810403B08Rik (NM_028815.2,676-694).
ccattccagggtttgacta

SEQ ID NO: 584292 - DNA, 19 bp, Mus musculus
  siRNA target sequence for 2810403B08Rik (NM_028815.2,707-725).
cgtcagctggtgtctaaat

SEQ ID NO: 584293 - DNA, 19 bp, Mus musculus
  siRNA target sequence for 2810403B08Rik (NM_028815.2,735-753).
cttgatggatacgtgattt

SEQ ID NO: 584294 - DNA, 19 bp, Mus musculus
  siRNA target sequence for 2810403B08Rik (NM_028815.2,773-791).
ggctgagtggctctatagt

SEQ ID NO: 584295 - DNA, 19 bp, Mus musculus
  siRNA target sequence for 2810403B08Rik (NM_028815.2,775-793).
ctgagtggctctatagtca

SEQ ID NO: 584296 - DNA, 19 bp, Mus musculus
  siRNA target sequence for 2810403B08Rik (NM_028815.2,1059-1077).
cctgtcctccaaatcaatt

SEQ ID NO: 584297 - DNA, 19 bp, Mus musculus
  siRNA target sequence for 2810403B08Rik (NM_028815.2,1082-1100).
ggttggcatcagcagtaat

SEQ ID NO: 584298 - DNA, 19 bp, Mus musculus
  siRNA target sequence for 2810403B08Rik (NM_028815.2,1093-1111).
gcagtaatgatgatcagtt

SEQ ID NO: 584299 - DNA, 19 bp, Mus musculus
  siRNA target sequence for 2810403B08Rik (NM_028815.2,1094-1112).
cagtaatgatgatcagtta

SEQ ID NO: 584300 - DNA, 19 bp, Mus musculus
  siRNA target sequence for 2810403B08Rik (NM_028815.2,1096-1114).
gtaatgatgatcagttata

SEQ ID NO: 584301 - DNA, 19 bp, Mus musculus
  siRNA target sequence for 2810403B08Rik (NM_028815.2,1141-1159).
ctgcacacgctgcaagata

SEQ ID NO: 584302 - DNA, 19 bp, Mus musculus
  siRNA target sequence for 2810403B08Rik (NM_028815.2,1143-1161).
gcacacgctgcaagatatt

SEQ ID NO: 584303 - DNA, 19 bp, Mus musculus
  siRNA target sequence for 2810403B08Rik (NM_028815.2,1294-1312).
ggctacagggcattaactt

SEQ ID NO: 584304 - DNA, 19 bp, Mus musculus
  siRNA target sequence for 2810403B08Rik (NM_028815.2,1332-1350).
ggtgcagatgagttcacaa

SEQ ID NO: 584305 - DNA, 19 bp, Mus musculus
  siRNA target sequence for 2810403B08Rik (NM_028815.2,1391-1409).
gtctttatgggatatgagt

SEQ ID NO: 584306 - DNA, 19 bp, Mus musculus
  siRNA target sequence for 2810403B08Rik (NM_028815.2,1419-1437).
gttgaaatgctgaaacgta

SEQ ID NO: 584307 - DNA, 19 bp, Mus musculus
  siRNA target sequence for 2810403B08Rik (NM_028815.2,1439-1457).
gatcagtacagaagtaagt

SEQ ID NO: 584308 - DNA, 19 bp, Mus musculus
  siRNA target sequence for 2810403B08Rik (NM_028815.2,1480-1498).
gtcccaagtcagtgatcat

SEQ ID NO: 584309 - DNA, 19 bp, Mus musculus
  siRNA target sequence for 2810403B08Rik (NM_028815.2,1482-1500).
cccaagtcagtgatcatca

SEQ ID NO: 584310 - DNA, 19 bp, Mus musculus
  siRNA target sequence for 2810403B08Rik (NM_028815.2,1515-1533).
gaggatacccacagtctta

SEQ ID NO: 584311 - DNA, 19 bp, Mus musculus
  siRNA target sequence for 2810403B08Rik (NM_028815.2,1517-1535).
ggatacccacagtcttaca

SEQ ID NO: 584312 - DNA, 19 bp, Mus musculus
  siRNA target sequence for 2810403B08Rik (NM_028815.2,1564-1582).
cgtctcgtacggaagcaaa

SEQ ID NO: 584313 - DNA, 19 bp, Mus musculus
  siRNA target sequence for 2810403B08Rik (NM_028815.2,1603-1621).
ctgccacttcagagaaatt

SEQ ID NO: 584314 - DNA, 19 bp, Mus musculus
  siRNA target sequence for 2810403B08Rik (NM_028815.2,1650-1668).
gctgctttgggacaagata

SEQ ID NO: 584315 - DNA, 19 bp, Mus musculus
  siRNA target sequence for 2810403B08Rik (NM_028815.2,1651-1669).
ctgctttgggacaagataa

SEQ ID NO: 584316 - DNA, 19 bp, Mus musculus
  siRNA target sequence for 2810403B08Rik (NM_028815.2,1821-1839).
gaagtgcggaggttgagaa

SEQ ID NO: 584317 - DNA, 19 bp, Mus musculus
  siRNA target sequence for 2810403B08Rik (NM_028815.2,1827-1845).
cggaggttgagaaaagaaa

SEQ ID NO: 584318 - DNA, 19 bp, Mus musculus
  siRNA target sequence for 2810403B08Rik (NM_028815.2,1901-1919).
gaacgaggtaagatctgta

SEQ ID NO: 584319 - DNA, 19 bp, Mus musculus
  siRNA target sequence for 2810403B08Rik (NM_028815.2,1904-1922).
cgaggtaagatctgtacaa

SEQ ID NO: 584320 - DNA, 19 bp, Mus musculus
  siRNA target sequence for 2810403B08Rik (NM_028815.2,1967-1985).
cgacgtgcctcctatatca

SEQ ID NO: 584321 - DNA, 19 bp, Mus musculus
  siRNA target sequence for 2810403B08Rik (NM_028815.2,1968-1986).
gacgtgcctcctatatcaa

SEQ ID NO: 584322 - DNA, 19 bp, Mus musculus
  siRNA target sequence for 2810403B08Rik (NM_028815.2,1970-1988).
cgtgcctcctatatcaagt

SEQ ID NO: 584323 - DNA, 19 bp, Mus musculus
  siRNA target sequence for 2810403B08Rik (NM_028815.2,1971-1989).
gtgcctcctatatcaagta

SEQ ID NO: 584324 - DNA, 19 bp, Mus musculus
  siRNA target sequence for 2810403B08Rik (NM_028815.2,1973-1991).
gcctcctatatcaagtact

SEQ ID NO: 584325 - DNA, 19 bp, Mus musculus
  siRNA target sequence for 2810403B08Rik (NM_028815.2,2090-2108).
gagatcagcgccagacttt

SEQ ID NO: 584326 - DNA, 19 bp, Mus musculus
  siRNA target sequence for 2810403B08Rik (NM_028815.2,2109-2127).
cccgactctgggtttcact

SEQ ID NO: 584327 - DNA, 19 bp, Mus musculus
  siRNA target sequence for 2810403B08Rik (NM_028815.2,2154-2172).
ctgcaggattcgttggatt

SEQ ID NO: 584328 - DNA, 19 bp, Mus musculus
  siRNA target sequence for 2810403B08Rik (NM_028815.2,2156-2174).
gcaggattcgttggatttt

SEQ ID NO: 584329 - DNA, 19 bp, Mus musculus
  siRNA target sequence for 2810403B08Rik (NM_028815.2,2159-2177).
ggattcgttggattttgaa

SEQ ID NO: 584330 - DNA, 19 bp, Mus musculus
  siRNA target sequence for 2810403B08Rik (NM_028815.2,2160-2178).
gattcgttggattttgaaa

SEQ ID NO: 584331 - DNA, 19 bp, Mus musculus
  siRNA target sequence for 2810403B08Rik (NM_028815.2,2187-2205).
gtagaaagcagcgaaaact

SEQ ID NO: 584332 - DNA, 19 bp, Mus musculus
  siRNA target sequence for 2810403B08Rik (NM_028815.2,2230-2248).
cggtgaaatgcgtcaaaga

SEQ ID NO: 584333 - DNA, 19 bp, Mus musculus
  siRNA target sequence for 2810403B08Rik (NM_028815.2,2325-2343).
ctgctccaacagtatttaa

SEQ ID NO: 584334 - DNA, 19 bp, Mus musculus
  siRNA target sequence for 2810403B08Rik (NM_028815.2,2328-2346).
ctccaacagtatttaacct

SEQ ID NO: 584335 - DNA, 19 bp, Mus musculus
  siRNA target sequence for 2810403B08Rik (NM_028815.2,2411-2429).
gcgtcacctcgcttgttct

SEQ ID NO: 584336 - DNA, 19 bp, Mus musculus
  siRNA target sequence for 2810403B08Rik (NM_028815.2,2422-2440).
cttgttctccggaaaggtt

SEQ ID NO: 584337 - DNA, 19 bp, Mus musculus
  siRNA target sequence for 2810403B08Rik (NM_028815.2,2501-2519).
ccagacgccagagaattgt

SEQ ID NO: 584338 - DNA, 19 bp, Mus musculus
  siRNA target sequence for A730063F07Rik (NM_177103.2,254-272).
cttagccttttctgagaaa

SEQ ID NO: 584339 - DNA, 19 bp, Mus musculus
  siRNA target sequence for A730063F07Rik (NM_177103.2,293-311).
ctttaagaagttctacttt

SEQ ID NO: 584340 - DNA, 19 bp, Mus musculus
  siRNA target sequence for A730063F07Rik (NM_177103.2,388-406).
gtaataagggtcttcacat

SEQ ID NO: 584341 - DNA, 19 bp, Mus musculus
  siRNA target sequence for A730063F07Rik (NM_177103.2,399-417).
cttcacatccagaaaacat

SEQ ID NO: 584342 - DNA, 19 bp, Mus musculus
  siRNA target sequence for A730063F07Rik (NM_177103.2,423-441).
caagatgtaccgttttgtt

SEQ ID NO: 584343 - DNA, 19 bp, Mus musculus
  siRNA target sequence for A730063F07Rik (NM_177103.2,426-444).
gatgtaccgttttgttcaa

SEQ ID NO: 584344 - DNA, 19 bp, Mus musculus
  siRNA target sequence for A730063F07Rik (NM_177103.2,452-470).
gtctggactggctactcaa

SEQ ID NO: 584345 - DNA, 19 bp, Mus musculus
  siRNA target sequence for A730063F07Rik (NM_177103.2,457-475).
gactggctactcaaaatgt

SEQ ID NO: 584346 - DNA, 19 bp, Mus musculus
  siRNA target sequence for A730063F07Rik (NM_177103.2,461-479).
ggctactcaaaatgttagt

SEQ ID NO: 584347 - DNA, 19 bp, Mus musculus
  siRNA target sequence for A730063F07Rik (NM_177103.2,545-563).
gaaactccaagcagataaa

SEQ ID NO: 584348 - DNA, 19 bp, Mus musculus
  siRNA target sequence for A730063F07Rik (NM_177103.2,552-570).
caagcagataaattactgt

SEQ ID NO: 584349 - DNA, 19 bp, Mus musculus
  siRNA target sequence for A730063F07Rik (NM_177103.2,577-595).
caaagagcttggaccataa

SEQ ID NO: 584350 - DNA, 19 bp, Mus musculus
  siRNA target sequence for A730063F07Rik (NM_177103.2,642-660).
gcaaacactgttttaggta

SEQ ID NO: 584351 - DNA, 19 bp, Mus musculus
  siRNA target sequence for A730063F07Rik (NM_177103.2,689-707).
cccacaagcttcagacttt

SEQ ID NO: 584352 - DNA, 19 bp, Mus musculus
  siRNA target sequence for A730063F07Rik (NM_177103.2,848-866).
gcagttccagcttaaccaa

SEQ ID NO: 584353 - DNA, 19 bp, Mus musculus
  siRNA target sequence for A730063F07Rik (NM_177103.2,880-898).
gagcgtctctgatgatgta

SEQ ID NO: 584354 - DNA, 19 bp, Mus musculus
  siRNA target sequence for A730063F07Rik (NM_177103.2,883-901).
cgtctctgatgatgtatga

SEQ ID NO: 584355 - DNA, 19 bp, Mus musculus
  siRNA target sequence for A730063F07Rik (NM_177103.2,919-937).
gatttcggtataggatttt

SEQ ID NO: 584356 - DNA, 19 bp, Mus musculus
  siRNA target sequence for A730063F07Rik (NM_177103.2,924-942).
cggtataggattttcagat

SEQ ID NO: 584357 - DNA, 19 bp, Mus musculus
  siRNA target sequence for A730063F07Rik (NM_177103.2,958-976).
cgaaaagcagagtttgcaa

SEQ ID NO: 584358 - DNA, 19 bp, Mus musculus
  siRNA target sequence for A730063F07Rik (NM_177103.2,1029-1047).
gagaaccttagggataata

SEQ ID NO: 584359 - DNA, 19 bp, Mus musculus
  siRNA target sequence for A730063F07Rik (NM_177103.2,1034-1052).
ccttagggataataacact

SEQ ID NO: 584360 - DNA, 19 bp, Mus musculus
  siRNA target sequence for A730063F07Rik (NM_177103.2,1076-1094).
cccttccctagaacctaaa

SEQ ID NO: 584361 - DNA, 19 bp, Mus musculus
  siRNA target sequence for A730063F07Rik (NM_177103.2,1078-1096).
cttccctagaacctaaaga

SEQ ID NO: 584362 - DNA, 19 bp, Mus musculus
  siRNA target sequence for A730063F07Rik (NM_177103.2,1169-1187).
gcctgatggtcacactaaa

SEQ ID NO: 584363 - DNA, 19 bp, Mus musculus
  siRNA target sequence for A730063F07Rik (NM_177103.2,1171-1189).
ctgatggtcacactaaaga

SEQ ID NO: 584364 - DNA, 19 bp, Mus musculus
  siRNA target sequence for A730063F07Rik (NM_177103.2,1248-1266).
ggctgtgttgcatacaatt

SEQ ID NO: 584365 - DNA, 19 bp, Mus musculus
  siRNA target sequence for A730063F07Rik (NM_177103.2,1294-1312).
gggaatgtacagagcaaat

SEQ ID NO: 584366 - DNA, 19 bp, Mus musculus
  siRNA target sequence for A730063F07Rik (NM_177103.2,1295-1313).
ggaatgtacagagcaaatt

SEQ ID NO: 584367 - DNA, 19 bp, Mus musculus
  siRNA target sequence for A730063F07Rik (NM_177103.2,1338-1356).
ccttctagtgacaagttct

SEQ ID NO: 584368 - DNA, 19 bp, Mus musculus
  siRNA target sequence for A730063F07Rik (NM_177103.2,1352-1370).
gttctctccagaaactgaa

SEQ ID NO: 584369 - DNA, 19 bp, Mus musculus
  siRNA target sequence for A730063F07Rik (NM_177103.2,1454-1472).
caaatctgtgagtagtgta

SEQ ID NO: 584370 - DNA, 19 bp, Mus musculus
  siRNA target sequence for A730063F07Rik (NM_177103.2,1495-1513).
ctgcccagaatgagaactt

SEQ ID NO: 584371 - DNA, 19 bp, Mus musculus
  siRNA target sequence for A730063F07Rik (NM_177103.2,1538-1556).
gaagcagagcattcttagt

SEQ ID NO: 584372 - DNA, 19 bp, Mus musculus
  siRNA target sequence for A730063F07Rik (NM_177103.2,1542-1560).
cagagcattcttagttcta

SEQ ID NO: 584373 - DNA, 19 bp, Mus musculus
  siRNA target sequence for A730063F07Rik (NM_177103.2,1610-1628).
gtgcagtgaacccaaagta

SEQ ID NO: 584374 - DNA, 19 bp, Mus musculus
  siRNA target sequence for A730063F07Rik (NM_177103.2,1612-1630).
gcagtgaacccaaagtaga

SEQ ID NO: 584375 - DNA, 19 bp, Mus musculus
  siRNA target sequence for A730063F07Rik (NM_177103.2,1750-1768).
cactcagtgaaaaagatgt

SEQ ID NO: 584376 - DNA, 19 bp, Mus musculus
  siRNA target sequence for A730063F07Rik (NM_177103.2,1764-1782).
gatgtccttgggagattaa

SEQ ID NO: 584377 - DNA, 19 bp, Mus musculus
  siRNA target sequence for A730063F07Rik (NM_177103.2,1774-1792).
ggagattaaaagatgtctt

SEQ ID NO: 584378 - DNA, 19 bp, Mus musculus
  siRNA target sequence for A730063F07Rik (NM_177103.2,1775-1793).
gagattaaaagatgtcttt

SEQ ID NO: 584379 - DNA, 19 bp, Mus musculus
  siRNA target sequence for A730063F07Rik (NM_177103.2,1850-1868).
ggccagacatcaaaagtgt

SEQ ID NO: 584380 - DNA, 19 bp, Mus musculus
  siRNA target sequence for A730063F07Rik (NM_177103.2,1876-1894).
gcatcttctacaataagca

SEQ ID NO: 584381 - DNA, 19 bp, Mus musculus
  siRNA target sequence for A730063F07Rik (NM_177103.2,1910-1928).
cgatctggcaactttggat

SEQ ID NO: 584382 - DNA, 19 bp, Mus musculus
  siRNA target sequence for A730063F07Rik (NM_177103.2,1930-1948).
ggcagaactggttgaatga

SEQ ID NO: 584383 - DNA, 19 bp, Mus musculus
  siRNA target sequence for A730063F07Rik (NM_177103.2,1939-1957).
ggttgaatgaccaggttat

SEQ ID NO: 584384 - DNA, 19 bp, Mus musculus
  siRNA target sequence for A730063F07Rik (NM_177103.2,1940-1958).
gttgaatgaccaggttatt

SEQ ID NO: 584385 - DNA, 19 bp, Mus musculus
  siRNA target sequence for A730063F07Rik (NM_177103.2,2046-2064).
ggctataatggagttaaaa

SEQ ID NO: 584386 - DNA, 19 bp, Mus musculus
  siRNA target sequence for A730063F07Rik (NM_177103.2,2075-2093).
gaaggtggacttgtttaaa

SEQ ID NO: 584387 - DNA, 19 bp, Mus musculus
  siRNA target sequence for A730063F07Rik (NM_177103.2,2127-2145).
gtccactggtctctcatta

SEQ ID NO: 584388 - DNA, 19 bp, Mus musculus
  siRNA target sequence for A730063F07Rik (NM_177103.2,2129-2147).
ccactggtctctcattact

SEQ ID NO: 584389 - DNA, 19 bp, Mus musculus
  siRNA target sequence for A730063F07Rik (NM_177103.2,2152-2170).
cactctccagccggattat

SEQ ID NO: 584390 - DNA, 19 bp, Mus musculus
  siRNA target sequence for A730063F07Rik (NM_177103.2,2156-2174).
ctccagccggattatttca

SEQ ID NO: 584391 - DNA, 19 bp, Mus musculus
  siRNA target sequence for A730063F07Rik (NM_177103.2,2158-2176).
ccagccggattatttcatt

SEQ ID NO: 584392 - DNA, 19 bp, Mus musculus
  siRNA target sequence for A730063F07Rik (NM_177103.2,2159-2177).
cagccggattatttcattt

SEQ ID NO: 584393 - DNA, 19 bp, Mus musculus
  siRNA target sequence for A730063F07Rik (NM_177103.2,2161-2179).
gccggattatttcatttta

SEQ ID NO: 584394 - DNA, 19 bp, Mus musculus
  siRNA target sequence for A730063F07Rik (NM_177103.2,2209-2227).
gtgtagagaatataagaaa

SEQ ID NO: 584395 - DNA, 19 bp, Mus musculus
  siRNA target sequence for A730063F07Rik (NM_177103.2,2287-2305).
ctgctgttacaaagtgtat

SEQ ID NO: 584396 - DNA, 19 bp, Mus musculus
  siRNA target sequence for E330036L07Rik (NM_144851.2,267-285).
cagcctatcgtccagatta

SEQ ID NO: 584397 - DNA, 19 bp, Mus musculus
  siRNA target sequence for E330036L07Rik (NM_144851.2,320-338).
ggctcaggtgacgtaagaa

SEQ ID NO: 584398 - DNA, 19 bp, Mus musculus
  siRNA target sequence for E330036L07Rik (NM_144851.2,387-405).
caggctcagcgccacaaaa

SEQ ID NO: 584399 - DNA, 19 bp, Mus musculus
  siRNA target sequence for E330036L07Rik (NM_144851.2,496-514).
ccacatgtctgcgtatgaa

SEQ ID NO: 584400 - DNA, 19 bp, Mus musculus
  siRNA target sequence for E330036L07Rik (NM_144851.2,502-520).
gtctgcgtatgaaaagtca

SEQ ID NO: 584401 - DNA, 19 bp, Mus musculus
  siRNA target sequence for E330036L07Rik (NM_144851.2,561-579).
catgtcgtcggagtctttt

SEQ ID NO: 584402 - DNA, 19 bp, Mus musculus
  siRNA target sequence for E330036L07Rik (NM_144851.2,573-591).
gtcttttaagccctaagaa

SEQ ID NO: 584403 - DNA, 19 bp, Mus musculus
  siRNA target sequence for E330036L07Rik (NM_144851.2,698-716).
gcgaaacccaccacacatt

SEQ ID NO: 584404 - DNA, 19 bp, Mus musculus
  siRNA target sequence for E330036L07Rik (NM_144851.2,699-717).
cgaaacccaccacacattt

SEQ ID NO: 584405 - DNA, 19 bp, Mus musculus
  siRNA target sequence for E330036L07Rik (NM_144851.2,725-743).
cgcctgtctcggtgtctta

SEQ ID NO: 584406 - DNA, 19 bp, Mus musculus
  siRNA target sequence for E330036L07Rik (NM_144851.2,734-752).
cggtgtcttagttccaata

SEQ ID NO: 584407 - DNA, 19 bp, Mus musculus
  siRNA target sequence for E330036L07Rik (NM_144851.2,735-753).
ggtgtcttagttccaataa

SEQ ID NO: 584408 - DNA, 19 bp, Mus musculus
  siRNA target sequence for E330036L07Rik (NM_144851.2,738-756).
gtcttagttccaataagaa

SEQ ID NO: 584409 - DNA, 19 bp, Mus musculus
  siRNA target sequence for E330036L07Rik (NM_144851.2,740-758).
cttagttccaataagaact

SEQ ID NO: 584410 - DNA, 19 bp, Mus musculus
  siRNA target sequence for E330036L07Rik (NM_144851.2,797-815).
gcatctcatgtcattggtt

SEQ ID NO: 584411 - DNA, 19 bp, Mus musculus
  siRNA target sequence for E330036L07Rik (NM_144851.2,803-821).
catgtcattggttctgata

SEQ ID NO: 584412 - DNA, 19 bp, Mus musculus
  siRNA target sequence for E330036L07Rik (NM_144851.2,831-849).
ctggatctgccagcatttt

SEQ ID NO: 584413 - DNA, 19 bp, Mus musculus
  siRNA target sequence for E330036L07Rik (NM_144851.2,833-851).
ggatctgccagcattttaa

SEQ ID NO: 584414 - DNA, 19 bp, Mus musculus
  siRNA target sequence for E330036L07Rik (NM_144851.2,902-920).
ccagatgttgcctttggat

SEQ ID NO: 584415 - DNA, 19 bp, Mus musculus
  siRNA target sequence for E330036L07Rik (NM_144851.2,953-971).
gcacctcatcagccaaata

SEQ ID NO: 584416 - DNA, 19 bp, Mus musculus
  siRNA target sequence for E330036L07Rik (NM_144851.2,957-975).
ctcatcagccaaatagctt

SEQ ID NO: 584417 - DNA, 19 bp, Mus musculus
  siRNA target sequence for E330036L07Rik (NM_144851.2,973-991).
cttaccagcatcaaataca

SEQ ID NO: 584418 - DNA, 19 bp, Mus musculus
  siRNA target sequence for E330036L07Rik (NM_144851.2,1003-1021).
gtcagactctgtgatttta

SEQ ID NO: 584419 - DNA, 19 bp, Mus musculus
  siRNA target sequence for E330036L07Rik (NM_144851.2,1005-1023).
cagactctgtgattttact

SEQ ID NO: 584420 - DNA, 19 bp, Mus musculus
  siRNA target sequence for E330036L07Rik (NM_144851.2,1007-1025).
gactctgtgattttactta

SEQ ID NO: 584421 - DNA, 19 bp, Mus musculus
  siRNA target sequence for E330036L07Rik (NM_144851.2,1074-1092).
cagagctatggatcaaaga

SEQ ID NO: 584422 - DNA, 19 bp, Mus musculus
  siRNA target sequence for E330036L07Rik (NM_144851.2,1076-1094).
gagctatggatcaaagaat

SEQ ID NO: 584423 - DNA, 19 bp, Mus musculus
  siRNA target sequence for E330036L07Rik (NM_144851.2,1078-1096).
gctatggatcaaagaatta

SEQ ID NO: 584424 - DNA, 19 bp, Mus musculus
  siRNA target sequence for E330036L07Rik (NM_144851.2,1113-1131).
ctcgagctcgggaaagatt

SEQ ID NO: 584425 - DNA, 19 bp, Mus musculus
  siRNA target sequence for E330036L07Rik (NM_144851.2,1228-1246).
ccttcgtgtgcctcttgaa

SEQ ID NO: 584426 - DNA, 19 bp, Mus musculus
  siRNA target sequence for E330036L07Rik (NM_144851.2,1233-1251).
gtgtgcctcttgaaaagga

SEQ ID NO: 584427 - DNA, 19 bp, Mus musculus
  siRNA target sequence for E330036L07Rik (NM_144851.2,1315-1333).
cgaatttcctgaaattaca

SEQ ID NO: 584428 - DNA, 19 bp, Mus musculus
  siRNA target sequence for E330036L07Rik (NM_144851.2,1400-1418).
gcattccgcttgaccatta

SEQ ID NO: 584429 - DNA, 19 bp, Mus musculus
  siRNA target sequence for E330036L07Rik (NM_144851.2,1413-1431).
ccattacacgcaaagacat

SEQ ID NO: 584430 - DNA, 19 bp, Mus musculus
  siRNA target sequence for E330036L07Rik (NM_144851.2,1414-1432).
cattacacgcaaagacatt

SEQ ID NO: 584431 - DNA, 19 bp, Mus musculus
  siRNA target sequence for E330036L07Rik (NM_144851.2,1433-1451).
cagactctaaaccatctaa

SEQ ID NO: 584432 - DNA, 19 bp, Mus musculus
  siRNA target sequence for E330036L07Rik (NM_144851.2,1492-1510).
gctaatggaacgcagtaaa

SEQ ID NO: 584433 - DNA, 19 bp, Mus musculus
  siRNA target sequence for E330036L07Rik (NM_144851.2,1529-1547).
gtacatgcgtttaatacct

SEQ ID NO: 584434 - DNA, 19 bp, Mus musculus
  siRNA target sequence for E330036L07Rik (NM_144851.2,1546-1564).
cttcttcttcactaagcta

SEQ ID NO: 584435 - DNA, 19 bp, Mus musculus
  siRNA target sequence for E330036L07Rik (NM_144851.2,1549-1567).
cttcttcactaagctaaaa

SEQ ID NO: 584436 - DNA, 19 bp, Mus musculus
  siRNA target sequence for E330036L07Rik (NM_144851.2,1586-1604).
gtgaaacgctggacaaaga

SEQ ID NO: 584437 - DNA, 19 bp, Mus musculus
  siRNA target sequence for E330036L07Rik (NM_144851.2,1610-1628).
gatgtattctccgttgata

SEQ ID NO: 584438 - DNA, 19 bp, Mus musculus
  siRNA target sequence for E330036L07Rik (NM_144851.2,1665-1683).
gtctagctgttgtagactt

SEQ ID NO: 584439 - DNA, 19 bp, Mus musculus
  siRNA target sequence for E330036L07Rik (NM_144851.2,1679-1697).
gactttagaaggaagagta

SEQ ID NO: 584440 - DNA, 19 bp, Mus musculus
  siRNA target sequence for E330036L07Rik (NM_144851.2,1690-1708).
gaagagtatcacctactat

SEQ ID NO: 584441 - DNA, 19 bp, Mus musculus
  siRNA target sequence for E330036L07Rik (NM_144851.2,1709-1727).
gattctatgggtggaataa

SEQ ID NO: 584442 - DNA, 19 bp, Mus musculus
  siRNA target sequence for E330036L07Rik (NM_144851.2,1740-1758).
gcaggatcctcttgcaata

SEQ ID NO: 584443 - DNA, 19 bp, Mus musculus
  siRNA target sequence for E330036L07Rik (NM_144851.2,1743-1761).
ggatcctcttgcaatacct

SEQ ID NO: 584444 - DNA, 19 bp, Mus musculus
  siRNA target sequence for E330036L07Rik (NM_144851.2,1910-1928).
gacagaccaatcaacttca

SEQ ID NO: 584445 - DNA, 19 bp, Mus musculus
  siRNA target sequence for 1300003D03Rik (NM_026179.1,155-173).
ctacatcacaccttaaaga

SEQ ID NO: 584446 - DNA, 19 bp, Mus musculus
  siRNA target sequence for 1300003D03Rik (NM_026179.1,199-217).
gtcccctgcacttacaaga

SEQ ID NO: 584447 - DNA, 19 bp, Mus musculus
  siRNA target sequence for 1300003D03Rik (NM_026179.1,220-238).
gagcctgtgcgcatatcca

SEQ ID NO: 584448 - DNA, 19 bp, Mus musculus
  siRNA target sequence for 1300003D03Rik (NM_026179.1,226-244).
gtgcgcatatccaatggaa

SEQ ID NO: 584449 - DNA, 19 bp, Mus musculus
  siRNA target sequence for 1300003D03Rik (NM_026179.1,231-249).
catatccaatggaaacaga

SEQ ID NO: 584450 - DNA, 19 bp, Mus musculus
  siRNA target sequence for 1300003D03Rik (NM_026179.1,261-279).
gatgttctctcacaacatt

SEQ ID NO: 584451 - DNA, 19 bp, Mus musculus
  siRNA target sequence for 1300003D03Rik (NM_026179.1,267-285).
ctctcacaacatttctagt

SEQ ID NO: 584452 - DNA, 19 bp, Mus musculus
  siRNA target sequence for 1300003D03Rik (NM_026179.1,339-357).
cctgaattttgaagatcta

SEQ ID NO: 584453 - DNA, 19 bp, Mus musculus
  siRNA target sequence for 1300003D03Rik (NM_026179.1,340-358).
ctgaattttgaagatctaa

SEQ ID NO: 584454 - DNA, 19 bp, Mus musculus
  siRNA target sequence for 1300003D03Rik (NM_026179.1,360-378).
caccgataggcctgtctat

SEQ ID NO: 584455 - DNA, 19 bp, Mus musculus
  siRNA target sequence for 1300003D03Rik (NM_026179.1,393-411).
gggcttcggaagaagtagt

SEQ ID NO: 584456 - DNA, 19 bp, Mus musculus
  siRNA target sequence for 1300003D03Rik (NM_026179.1,394-412).
ggcttcggaagaagtagta

SEQ ID NO: 584457 - DNA, 19 bp, Mus musculus
  siRNA target sequence for 1300003D03Rik (NM_026179.1,453-471).
gtttgtggaatccattgaa

SEQ ID NO: 584458 - DNA, 19 bp, Mus musculus
  siRNA target sequence for 1300003D03Rik (NM_026179.1,484-502).
gccctcaggttggacaaaa

SEQ ID NO: 584459 - DNA, 19 bp, Mus musculus
  siRNA target sequence for 1300003D03Rik (NM_026179.1,534-552).
cttggctgccgcttactca

SEQ ID NO: 584460 - DNA, 19 bp, Mus musculus
  siRNA target sequence for 1300003D03Rik (NM_026179.1,542-560).
ccgcttactcactgaagta

SEQ ID NO: 584461 - DNA, 19 bp, Mus musculus
  siRNA target sequence for 1300003D03Rik (NM_026179.1,569-587).
gggttagtcacctcatttt

SEQ ID NO: 584462 - DNA, 19 bp, Mus musculus
  siRNA target sequence for 1300003D03Rik (NM_026179.1,705-723).
caggattgcaggacctttt

SEQ ID NO: 584463 - DNA, 19 bp, Mus musculus
  siRNA target sequence for 1300003D03Rik (NM_026179.1,742-760).
cgtttgaggcctgatttca

SEQ ID NO: 584464 - DNA, 19 bp, Mus musculus
  siRNA target sequence for 1300003D03Rik (NM_026179.1,743-761).
gtttgaggcctgatttcaa

SEQ ID NO: 584465 - DNA, 19 bp, Mus musculus
  siRNA target sequence for 1300003D03Rik (NM_026179.1,754-772).
gatttcaagcggaagtact

SEQ ID NO: 584466 - DNA, 19 bp, Mus musculus
  siRNA target sequence for 1300003D03Rik (NM_026179.1,768-786).
gtactcctctatgtttgaa

SEQ ID NO: 584467 - DNA, 19 bp, Mus musculus
  siRNA target sequence for 1300003D03Rik (NM_026179.1,773-791).
cctctatgtttgaagatga

SEQ ID NO: 584468 - DNA, 19 bp, Mus musculus
  siRNA target sequence for 1300003D03Rik (NM_026179.1,794-812).
cggtgacagagtacatcta

SEQ ID NO: 584469 - DNA, 19 bp, Mus musculus
  siRNA target sequence for 1300003D03Rik (NM_026179.1,810-828).
ctaccactgtaatgtacaa

SEQ ID NO: 584470 - DNA, 19 bp, Mus musculus
  siRNA target sequence for 1300003D03Rik (NM_026179.1,879-897).
ggccaaacggccaatgctt

SEQ ID NO: 584471 - DNA, 19 bp, Mus musculus
  siRNA target sequence for Ggh (NM_010281.1,105-123).
gcttagcgggctttcaagt

SEQ ID NO: 584472 - DNA, 19 bp, Mus musculus
  siRNA target sequence for Ggh (NM_010281.1,162-180).
gcccatcatcggagtagta

SEQ ID NO: 584473 - DNA, 19 bp, Mus musculus
  siRNA target sequence for Ggh (NM_010281.1,163-181).
cccatcatcggagtagtaa

SEQ ID NO: 584474 - DNA, 19 bp, Mus musculus
  siRNA target sequence for Ggh (NM_010281.1,164-182).
ccatcatcggagtagtaat

SEQ ID NO: 584475 - DNA, 19 bp, Mus musculus
  siRNA target sequence for Ggh (NM_010281.1,168-186).
catcggagtagtaatgcaa

SEQ ID NO: 584476 - DNA, 19 bp, Mus musculus
  siRNA target sequence for Ggh (NM_010281.1,175-193).
gtagtaatgcaagaatgtt

SEQ ID NO: 584477 - DNA, 19 bp, Mus musculus
  siRNA target sequence for Ggh (NM_010281.1,205-223).
gcgaagttgggaaactact

SEQ ID NO: 584478 - DNA, 19 bp, Mus musculus
  siRNA target sequence for Ggh (NM_010281.1,206-224).
cgaagttgggaaactacta

SEQ ID NO: 584479 - DNA, 19 bp, Mus musculus
  siRNA target sequence for Ggh (NM_010281.1,210-228).
gttgggaaactactacatt

SEQ ID NO: 584480 - DNA, 19 bp, Mus musculus
  siRNA target sequence for Ggh (NM_010281.1,222-240).
ctacattgctgcatcctat

SEQ ID NO: 584481 - DNA, 19 bp, Mus musculus
  siRNA target sequence for Ggh (NM_010281.1,230-248).
ctgcatcctatgtgaagta

SEQ ID NO: 584482 - DNA, 19 bp, Mus musculus
  siRNA target sequence for Ggh (NM_010281.1,279-297).
cataaggcctgatcttagt

SEQ ID NO: 584483 - DNA, 19 bp, Mus musculus
  siRNA target sequence for Ggh (NM_010281.1,310-328).
gaagaactttttagatcta

SEQ ID NO: 584484 - DNA, 19 bp, Mus musculus
  siRNA target sequence for Ggh (NM_010281.1,313-331).
gaactttttagatctatta

SEQ ID NO: 584485 - DNA, 19 bp, Mus musculus
  siRNA target sequence for Ggh (NM_010281.1,349-367).
ggaggaggtgctaacctaa

SEQ ID NO: 584486 - DNA, 19 bp, Mus musculus
  siRNA target sequence for Ggh (NM_010281.1,364-382).
ctaacagattcaggttatt

SEQ ID NO: 584487 - DNA, 19 bp, Mus musculus
  siRNA target sequence for Ggh (NM_010281.1,383-401).
cccgagtggccaaaatatt

SEQ ID NO: 584488 - DNA, 19 bp, Mus musculus
  siRNA target sequence for Ggh (NM_010281.1,384-402).
ccgagtggccaaaatattt

SEQ ID NO: 584489 - DNA, 19 bp, Mus musculus
  siRNA target sequence for Ggh (NM_010281.1,413-431).
ctctagagagctttgataa

SEQ ID NO: 584490 - DNA, 19 bp, Mus musculus
  siRNA target sequence for Ggh (NM_010281.1,489-507).
ggttagtggagagaactta

SEQ ID NO: 584491 - DNA, 19 bp, Mus musculus
  siRNA target sequence for Ggh (NM_010281.1,513-531).
gagtacagacactaagtca

SEQ ID NO: 584492 - DNA, 19 bp, Mus musculus
  siRNA target sequence for Ggh (NM_010281.1,586-604).
cattttcctactgagttat

SEQ ID NO: 584493 - DNA, 19 bp, Mus musculus
  siRNA target sequence for Ggh (NM_010281.1,634-652).
gcaaattttcacaaatgga

SEQ ID NO: 584494 - DNA, 19 bp, Mus musculus
  siRNA target sequence for Ggh (NM_010281.1,702-720).
caatatattaacaaccaat

SEQ ID NO: 584495 - DNA, 19 bp, Mus musculus
  siRNA target sequence for Ggh (NM_010281.1,794-812).
ctgagaaagcaccatttga

SEQ ID NO: 584496 - DNA, 19 bp, Mus musculus
  siRNA target sequence for Ggh (NM_010281.1,853-871).
gtgaagacttcattctact

SEQ ID NO: 584497 - DNA, 19 bp, Mus musculus
  siRNA target sequence for Ggh (NM_010281.1,933-951).
ggagacggcatccttgatt

SEQ ID NO: 584498 - DNA, 19 bp, Mus musculus
  siRNA target sequence for Ggh (NM_010281.1,934-952).
gagacggcatccttgattt

SEQ ID NO: 584499 - DNA, 19 bp, Mus musculus
  siRNA target sequence for Ggh (NM_010281.1,938-956).
cggcatccttgatttacaa

SEQ ID NO: 584500 - DNA, 19 bp, Mus musculus
  siRNA target sequence for Ggh (NM_010281.1,954-972).
caaggtctatcccatttat

SEQ ID NO: 584501 - DNA, 19 bp, Mus musculus
  siRNA target sequence for Ggh (NM_010281.1,964-982).
cccatttatactggaaata

SEQ ID NO: 584502 - DNA, 19 bp, Mus musculus
  siRNA target sequence for Ggh (NM_010281.1,965-983).
ccatttatactggaaatat

SEQ ID NO: 584503 - DNA, 19 bp, Mus musculus
  siRNA target sequence for Ggh (NM_010281.1,986-1004).
cttcatttcagcaagctta

SEQ ID NO: 584504 - DNA, 19 bp, Mus musculus
  siRNA target sequence for Ggh (NM_010281.1,989-1007).
catttcagcaagcttatat

SEQ ID NO: 584505 - DNA, 19 bp, Mus musculus
  siRNA target sequence for Ggh (NM_010281.1,997-1015).
caagcttatatgtttgact

SEQ ID NO: 584506 - DNA, 19 bp, Mus musculus
  siRNA target sequence for AF229032 (NM_021449.1,164-182).
catacctgggagctgatat

SEQ ID NO: 584507 - DNA, 19 bp, Mus musculus
  siRNA target sequence for AF229032 (NM_021449.1,312-330).
cagcatggtgcggaactta

SEQ ID NO: 584508 - DNA, 19 bp, Mus musculus
  siRNA target sequence for AF229032 (NM_021449.1,323-341).
ggaacttaatccagaaaga

SEQ ID NO: 584509 - DNA, 19 bp, Mus musculus
  siRNA target sequence for AF229032 (NM_021449.1,503-521).
gaacacagtcagatggaat

SEQ ID NO: 584510 - DNA, 19 bp, Mus musculus
  siRNA target sequence for AF229032 (NM_021449.1,573-591).
gtctgcagtgcagttagaa

SEQ ID NO: 584511 - DNA, 19 bp, Mus musculus
  siRNA target sequence for AF229032 (NM_021449.1,578-596).
cagtgcagttagaatcact

SEQ ID NO: 584512 - DNA, 19 bp, Mus musculus
  siRNA target sequence for AF229032 (NM_021449.1,582-600).
gcagttagaatcactcaat

SEQ ID NO: 584513 - DNA, 19 bp, Mus musculus
  siRNA target sequence for AF229032 (NM_021449.1,583-601).
cagttagaatcactcaata

SEQ ID NO: 584514 - DNA, 19 bp, Mus musculus
  siRNA target sequence for AF229032 (NM_021449.1,597-615).
caataagtgccaggtattt

SEQ ID NO: 584515 - DNA, 19 bp, Mus musculus
  siRNA target sequence for AF229032 (NM_021449.1,605-623).
gccaggtatttccttcaaa

SEQ ID NO: 584516 - DNA, 19 bp, Mus musculus
  siRNA target sequence for AF229032 (NM_021449.1,633-651).
ctgggaagaccagtattca

SEQ ID NO: 584517 - DNA, 19 bp, Mus musculus
  siRNA target sequence for AF229032 (NM_021449.1,688-706).
cactgtgcaaatctaacat

SEQ ID NO: 584518 - DNA, 19 bp, Mus musculus
  siRNA target sequence for AF229032 (NM_021449.1,716-734).
gctggctgtattcattata

SEQ ID NO: 584519 - DNA, 19 bp, Mus musculus
  siRNA target sequence for AF229032 (NM_021449.1,772-790).
ctacgtgaatgggatgaaa

SEQ ID NO: 584520 - DNA, 19 bp, Mus musculus
  siRNA target sequence for AF229032 (NM_021449.1,812-830).
ctgaaaatccaatagactt

SEQ ID NO: 584521 - DNA, 19 bp, Mus musculus
  siRNA target sequence for AF229032 (NM_021449.1,820-838).
ccaatagacttttcttaca

SEQ ID NO: 584522 - DNA, 19 bp, Mus musculus
  siRNA target sequence for AF229032 (NM_021449.1,851-869).
gtcttcctattgatgatgt

SEQ ID NO: 584523 - DNA, 19 bp, Mus musculus
  siRNA target sequence for AF229032 (NM_021449.1,853-871).
cttcctattgatgatgtat

SEQ ID NO: 584524 - DNA, 19 bp, Mus musculus
  siRNA target sequence for AF229032 (NM_021449.1,928-946).
gacatcatgaacaaatgta

SEQ ID NO: 584525 - DNA, 19 bp, Mus musculus
  siRNA target sequence for AF229032 (NM_021449.1,957-975).
ctgtaaacaatgtcaagaa

SEQ ID NO: 584526 - DNA, 19 bp, Mus musculus
  siRNA target sequence for AF229032 (NM_021449.1,1022-1040).
gtccaatggcagcatatgt

SEQ ID NO: 584527 - DNA, 19 bp, Mus musculus
  siRNA target sequence for AF229032 (NM_021449.1,1024-1042).
ccaatggcagcatatgtga

SEQ ID NO: 584528 - DNA, 19 bp, Mus musculus
  siRNA target sequence for AF229032 (NM_021449.1,1084-1102).
gcgtccaacctgaatctga

SEQ ID NO: 584529 - DNA, 19 bp, Mus musculus
  siRNA target sequence for AF229032 (NM_021449.1,1086-1104).
gtccaacctgaatctgata

SEQ ID NO: 584530 - DNA, 19 bp, Mus musculus
  siRNA target sequence for AF229032 (NM_021449.1,1178-1196).
gccatattggatggaaatt

SEQ ID NO: 584531 - DNA, 19 bp, Mus musculus
  siRNA target sequence for AF229032 (NM_021449.1,1179-1197).
ccatattggatggaaattt

SEQ ID NO: 584532 - DNA, 19 bp, Mus musculus
  siRNA target sequence for AF229032 (NM_021449.1,1180-1198).
catattggatggaaattta

SEQ ID NO: 584533 - DNA, 19 bp, Mus musculus
  siRNA target sequence for AF229032 (NM_021449.1,1215-1233).
catgtcacctcaaaaattt

SEQ ID NO: 584534 - DNA, 19 bp, Mus musculus
  siRNA target sequence for AF229032 (NM_175357.1,119-137).
gttgaagaccaagatagta

SEQ ID NO: 584535 - DNA, 19 bp, Mus musculus
  siRNA target sequence for AF229032 (NM_175357.1,143-161).
gccagaaaaccgaatatca

SEQ ID NO: 584536 - DNA, 19 bp, Mus musculus
  siRNA target sequence for AF229032 (NM_175357.1,144-162).
ccagaaaaccgaatatcat

SEQ ID NO: 584537 - DNA, 19 bp, Mus musculus
  siRNA target sequence for AF229032 (NM_175357.1,145-163).
cagaaaaccgaatatcata

SEQ ID NO: 584538 - DNA, 19 bp, Mus musculus
  siRNA target sequence for AF229032 (NM_175357.1,147-165).
gaaaaccgaatatcataaa

SEQ ID NO: 584539 - DNA, 19 bp, Mus musculus
  siRNA target sequence for AF229032 (NM_175357.1,218-236).
gagttccacgggagaactt

SEQ ID NO: 584540 - DNA, 19 bp, Mus musculus
  siRNA target sequence for AF229032 (NM_175357.1,223-241).
ccacgggagaactttgcat

SEQ ID NO: 584541 - DNA, 19 bp, Mus musculus
  siRNA target sequence for AF229032 (NM_175357.1,384-402).
cagtccttgcatacagtaa

SEQ ID NO: 584542 - DNA, 19 bp, Mus musculus
  siRNA target sequence for AF229032 (NM_175357.1,942-960).
ggcttcgctgtgaattgga

SEQ ID NO: 584543 - DNA, 19 bp, Mus musculus
  siRNA target sequence for 1200009H11Rik (NM_023734.2,76-94).
gaggacgagaagcaaacta

SEQ ID NO: 584544 - DNA, 19 bp, Mus musculus
  siRNA target sequence for 1200009H11Rik (NM_023734.2,92-110).
ctatggtggatcttcacaa

SEQ ID NO: 584545 - DNA, 19 bp, Mus musculus
  siRNA target sequence for 1200009H11Rik (NM_023734.2,209-227).
gcgtgtggggccacaacaa

SEQ ID NO: 584546 - DNA, 19 bp, Mus musculus
  siRNA target sequence for 1200009H11Rik (NM_023734.2,210-228).
cgtgtggggccacaacaaa

SEQ ID NO: 584547 - DNA, 19 bp, Mus musculus
  siRNA target sequence for 1200009H11Rik (NM_023734.2,306-324).
gcacgaggagcatgagtat

SEQ ID NO: 584548 - DNA, 19 bp, Mus musculus
  siRNA target sequence for 1200009H11Rik (NM_023734.2,307-325).
cacgaggagcatgagtatt

SEQ ID NO: 584549 - DNA, 19 bp, Mus musculus
  siRNA target sequence for 1200009H11Rik (NM_023734.2,448-466).
gaagaagctaacatccatt

SEQ ID NO: 584550 - DNA, 19 bp, Mus musculus
  siRNA target sequence for 1200009H11Rik (NM_023734.2,698-716).
cctctgagactctacattt

SEQ ID NO: 584551 - DNA, 19 bp, Mus musculus
  siRNA target sequence for 1200009H11Rik (NM_023734.2,756-774).
ctcacctgcagtagaaaca

SEQ ID NO: 584552 - DNA, 19 bp, Mus musculus
  siRNA target sequence for 1200009H11Rik (NM_023734.2,886-904).
gatgaagggccagttaact

SEQ ID NO: 584553 - DNA, 19 bp, Mus musculus
  siRNA target sequence for 1200009H11Rik (NM_023734.2,972-990).
ctccgtgagcccaaagaaa

SEQ ID NO: 584554 - DNA, 19 bp, Mus musculus
  siRNA target sequence for 1200009H11Rik (NM_023734.2,1338-1356).
caccctggccctacaatca

SEQ ID NO: 584555 - DNA, 19 bp, Mus musculus
  siRNA target sequence for 1200009H11Rik (NM_023734.2,1387-1405).
gccgactgggatttgaaga

SEQ ID NO: 584556 - DNA, 19 bp, Mus musculus
  siRNA target sequence for 1200009H11Rik (NM_023734.2,1388-1406).
ccgactgggatttgaagaa

SEQ ID NO: 584557 - DNA, 19 bp, Mus musculus
  siRNA target sequence for 1810004F21Rik (NM_026911.1,146-164).
ctgcccacccagatggatt

SEQ ID NO: 584558 - DNA, 19 bp, Mus musculus
  siRNA target sequence for 1810004F21Rik (NM_026911.1,216-234).
ctgcaatagttgggtttat

SEQ ID NO: 584559 - DNA, 19 bp, Mus musculus
  siRNA target sequence for 1810004F21Rik (NM_026911.1,218-236).
gcaatagttgggtttatct

SEQ ID NO: 584560 - DNA, 19 bp, Mus musculus
  siRNA target sequence for 1810004F21Rik (NM_026911.1,219-237).
caatagttgggtttatcta

SEQ ID NO: 584561 - DNA, 19 bp, Mus musculus
  siRNA target sequence for 1810004F21Rik (NM_026911.1,261-279).
ggtggactgtctacatagt

SEQ ID NO: 584562 - DNA, 19 bp, Mus musculus
  siRNA target sequence for 1810004F21Rik (NM_026911.1,262-280).
gtggactgtctacatagtt

SEQ ID NO: 584563 - DNA, 19 bp, Mus musculus
  siRNA target sequence for 1810004F21Rik (NM_026911.1,264-282).
ggactgtctacatagttat

SEQ ID NO: 584564 - DNA, 19 bp, Mus musculus
  siRNA target sequence for 1810004F21Rik (NM_026911.1,278-296).
gttatggccggatttgctt

SEQ ID NO: 584565 - DNA, 19 bp, Mus musculus
  siRNA target sequence for 1810004F21Rik (NM_026911.1,354-372).
ggttacctgttcaagactt

SEQ ID NO: 584566 - DNA, 19 bp, Mus musculus
  siRNA target sequence for 1810012E07Rik (NM_019951.1,155-173).
ctaccaagtcctaaatttt

SEQ ID NO: 584567 - DNA, 19 bp, Mus musculus
  siRNA target sequence for 1810012E07Rik (NM_019951.1,158-176).
ccaagtcctaaattttgga

SEQ ID NO: 584568 - DNA, 19 bp, Mus musculus
  siRNA target sequence for 1810012E07Rik (NM_019951.1,164-182).
cctaaattttggaatgatt

SEQ ID NO: 584569 - DNA, 19 bp, Mus musculus
  siRNA target sequence for 1810012E07Rik (NM_019951.1,227-245).
cggaagtgagagtccaatt

SEQ ID NO: 584570 - DNA, 19 bp, Mus musculus
  siRNA target sequence for 1810012E07Rik (NM_019951.1,229-247).
gaagtgagagtccaattgt

SEQ ID NO: 584571 - DNA, 19 bp, Mus musculus
  siRNA target sequence for 1810012E07Rik (NM_019951.1,232-250).
gtgagagtccaattgtagt

SEQ ID NO: 584572 - DNA, 19 bp, Mus musculus
  siRNA target sequence for 1810012E07Rik (NM_019951.1,302-320).
cctcacgaaccgagttgaa

SEQ ID NO: 584573 - DNA, 19 bp, Mus musculus
  siRNA target sequence for 1810012E07Rik (NM_019951.1,305-323).
cacgaaccgagttgaagat

SEQ ID NO: 584574 - DNA, 19 bp, Mus musculus
  siRNA target sequence for 1810012E07Rik (NM_019951.1,333-351).
gtgggggagatcgttgttt

SEQ ID NO: 584575 - DNA, 19 bp, Mus musculus
  siRNA target sequence for 1810012E07Rik (NM_019951.1,336-354).
ggggagatcgttgttttca

SEQ ID NO: 584576 - DNA, 19 bp, Mus musculus
  siRNA target sequence for 1810012E07Rik (NM_019951.1,437-455).
caaaggagataataatgct

SEQ ID NO: 584577 - DNA, 19 bp, Mus musculus
  siRNA target sequence for 1810012E07Rik (NM_019951.1,464-482).
ccgaggtctctataaacaa

SEQ ID NO: 584578 - DNA, 19 bp, Mus musculus
  siRNA target sequence for 1810029G24Rik (NM_025468.1,135-153).
gctctactaccaggtttta

SEQ ID NO: 584579 - DNA, 19 bp, Mus musculus
  siRNA target sequence for 1810029G24Rik (NM_025468.1,136-154).
ctctactaccaggttttaa

SEQ ID NO: 584580 - DNA, 19 bp, Mus musculus
  siRNA target sequence for 1810029G24Rik (NM_025468.1,141-159).
ctaccaggttttaaacttt

SEQ ID NO: 584581 - DNA, 19 bp, Mus musculus
  siRNA target sequence for 1810029G24Rik (NM_025468.1,191-209).
ggaaaggcctgattgttct

SEQ ID NO: 584582 - DNA, 19 bp, Mus musculus
  siRNA target sequence for 1810029G24Rik (NM_025468.1,353-371).
gagacattccgatagttca

SEQ ID NO: 584583 - DNA, 19 bp, Mus musculus
  siRNA target sequence for 1810029G24Rik (NM_025468.1,361-379).
ccgatagttcacagagtaa

SEQ ID NO: 584584 - DNA, 19 bp, Mus musculus
  siRNA target sequence for 1810029G24Rik (NM_025468.1,362-380).
cgatagttcacagagtaat

SEQ ID NO: 584585 - DNA, 19 bp, Mus musculus
  siRNA target sequence for 1810029G24Rik (NM_025468.1,374-392).
gagtaatcaaggttcatga

SEQ ID NO: 584586 - DNA, 19 bp, Mus musculus
  siRNA target sequence for 1810029G24Rik (NM_025468.1,376-394).
gtaatcaaggttcatgaaa

SEQ ID NO: 584587 - DNA, 19 bp, Mus musculus
  siRNA target sequence for 1810029G24Rik (NM_025468.1,384-402).
ggttcatgaaaaagataat

SEQ ID NO: 584588 - DNA, 19 bp, Mus musculus
  siRNA target sequence for 1810029G24Rik (NM_025468.1,397-415).
gataatggtgacatcaagt

SEQ ID NO: 584589 - DNA, 19 bp, Mus musculus
  siRNA target sequence for 1810029G24Rik (NM_025468.1,411-429).
caagtttctgactaaagga

SEQ ID NO: 584590 - DNA, 19 bp, Mus musculus
  siRNA target sequence for 1810029G24Rik (NM_025468.1,508-526).
gctcgagggttcttacctt

SEQ ID NO: 584591 - DNA, 19 bp, Mus musculus
  siRNA target sequence for 1810029G24Rik (NM_025468.1,509-527).
ctcgagggttcttacctta

SEQ ID NO: 584592 - DNA, 19 bp, Mus musculus
  siRNA target sequence for 1810029G24Rik (NM_025468.1,512-530).
gagggttcttaccttatgt

SEQ ID NO: 584593 - DNA, 19 bp, Mus musculus
  siRNA target sequence for 1810029G24Rik (NM_025468.1,533-551).
gcatggtcaccatcataat

SEQ ID NO: 584594 - DNA, 19 bp, Mus musculus
  siRNA target sequence for 1810029G24Rik (NM_025468.1,585-603).
ggctgtgatgggtgcatat

SEQ ID NO: 584595 - DNA, 19 bp, Mus musculus
  siRNA target sequence for 1810029G24Rik (NM_025468.1,587-605).
ctgtgatgggtgcatatgt

SEQ ID NO: 584596 - DNA, 19 bp, Mus musculus
  siRNA target sequence for 1810029G24Rik (NM_025468.1,594-612).
gggtgcatatgtgttacta

SEQ ID NO: 584597 - DNA, 19 bp, Mus musculus
  siRNA target sequence for 1810029G24Rik (NM_025468.1,595-613).
ggtgcatatgtgttactaa

SEQ ID NO: 584598 - DNA, 19 bp, Mus musculus
  siRNA target sequence for 2010106G01Rik (NM_023220.1,357-375).
gcatgtattataacaacaa

SEQ ID NO: 584599 - DNA, 19 bp, Mus musculus
  siRNA target sequence for 2010106G01Rik (NM_023220.1,386-404).
cttccaagttccctagaaa

SEQ ID NO: 584600 - DNA, 19 bp, Mus musculus
  siRNA target sequence for 2010106G01Rik (NM_023220.1,448-466).
gtgccacctttctgatatt

SEQ ID NO: 584601 - DNA, 19 bp, Mus musculus
  siRNA target sequence for 2010106G01Rik (NM_023220.1,467-485).
cctcctgatggcataagga

SEQ ID NO: 584602 - DNA, 19 bp, Mus musculus
  siRNA target sequence for 2010106G01Rik (NM_023220.1,580-598).
caacagtgtcctaattcct

SEQ ID NO: 584603 - DNA, 19 bp, Mus musculus
  siRNA target sequence for 2010106G01Rik (NM_023220.1,603-621).
caaggaacaaatctacatt

SEQ ID NO: 584604 - DNA, 19 bp, Mus musculus
  siRNA target sequence for 2010106G01Rik (NM_023220.1,607-625).
gaacaaatctacatttcaa

SEQ ID NO: 584605 - DNA, 19 bp, Mus musculus
  siRNA target sequence for 2010106G01Rik (NM_023220.1,633-651).
ctgtactaattgcagttat

SEQ ID NO: 584606 - DNA, 19 bp, Mus musculus
  siRNA target sequence for 2010106G01Rik (NM_023220.1,635-653).
gtactaattgcagttataa

SEQ ID NO: 584607 - DNA, 19 bp, Mus musculus
  siRNA target sequence for 2010106G01Rik (NM_023220.1,645-663).
cagttataacccaaaaaga

SEQ ID NO: 584608 - DNA, 19 bp, Mus musculus
  siRNA target sequence for 2010106G01Rik (NM_023220.1,647-665).
gttataacccaaaaagact

SEQ ID NO: 584609 - DNA, 19 bp, Mus musculus
  siRNA target sequence for 2010106G01Rik (NM_023220.1,682-700).
gactcttggagatgacatt

SEQ ID NO: 584610 - DNA, 19 bp, Mus musculus
  siRNA target sequence for 2010106G01Rik (NM_023220.1,692-710).
gatgacattaccgtgaaaa

SEQ ID NO: 584611 - DNA, 19 bp, Mus musculus
  siRNA target sequence for 2010106G01Rik (NM_023220.1,695-713).
gacattaccgtgaaaatgt

SEQ ID NO: 584612 - DNA, 19 bp, Mus musculus
  siRNA target sequence for 2010106G01Rik (NM_023220.1,697-715).
cattaccgtgaaaatgtat

SEQ ID NO: 584613 - DNA, 19 bp, Mus musculus
  siRNA target sequence for 2010106G01Rik (NM_023220.1,727-745).
gcctaactttgactatact

SEQ ID NO: 584614 - DNA, 19 bp, Mus musculus
  siRNA target sequence for 2010106G01Rik (NM_023220.1,729-747).
ctaactttgactatactct

SEQ ID NO: 584615 - DNA, 19 bp, Mus musculus
  siRNA target sequence for 2010106G01Rik (NM_023220.1,739-757).
ctatactctggtggttatt

SEQ ID NO: 584616 - DNA, 19 bp, Mus musculus
  siRNA target sequence for 2010106G01Rik (NM_023220.1,796-814).
ctggagtggacttattgaa

SEQ ID NO: 584617 - DNA, 19 bp, Mus musculus
  siRNA target sequence for 2010106G01Rik (NM_023220.1,798-816).
ggagtggacttattgaatt

SEQ ID NO: 584618 - DNA, 19 bp, Mus musculus
  siRNA target sequence for 2010106G01Rik (NM_023220.1,806-824).
cttattgaattggaaaaca

SEQ ID NO: 584619 - DNA, 19 bp, Mus musculus
  siRNA target sequence for 2010106G01Rik (NM_023220.1,872-890).
gacgattacttaacattca

SEQ ID NO: 584620 - DNA, 19 bp, Mus musculus
  siRNA target sequence for 2010106G01Rik (NM_023220.1,891-909).
gtcctctcacggttgttgt

SEQ ID NO: 584621 - DNA, 19 bp, Mus musculus
  siRNA target sequence for 2010106G01Rik (NM_023220.1,894-912).
ctctcacggttgttgtgtt

SEQ ID NO: 584622 - DNA, 19 bp, Mus musculus
  siRNA target sequence for 2010106G01Rik (NM_023220.1,914-932).
gtggtcatctgctgtataa

SEQ ID NO: 584623 - DNA, 19 bp, Mus musculus
  siRNA target sequence for 2010106G01Rik (NM_023220.1,925-943).
ctgtataatgattgtctta

SEQ ID NO: 584624 - DNA, 19 bp, Mus musculus
  siRNA target sequence for 2010106G01Rik (NM_023220.1,958-976).
caggtggcttgtgtatgtt

SEQ ID NO: 584625 - DNA, 19 bp, Mus musculus
  siRNA target sequence for 2010106G01Rik (NM_023220.1,960-978).
ggtggcttgtgtatgttat

SEQ ID NO: 584626 - DNA, 19 bp, Mus musculus
  siRNA target sequence for 2010106G01Rik (NM_023220.1,963-981).
ggcttgtgtatgttatgat

SEQ ID NO: 584627 - DNA, 19 bp, Mus musculus
  siRNA target sequence for 2010106G01Rik (NM_023220.1,964-982).
gcttgtgtatgttatgata

SEQ ID NO: 584628 - DNA, 19 bp, Mus musculus
  siRNA target sequence for 2010106G01Rik (NM_023220.1,983-1001).
gcgattttctgcatagcat

SEQ ID NO: 584629 - DNA, 19 bp, Mus musculus
  siRNA target sequence for 2010106G01Rik (NM_023220.1,1002-1020).
cgtcaatgagcctgtacaa

SEQ ID NO: 584630 - DNA, 19 bp, Mus musculus
  siRNA target sequence for 2010106G01Rik (NM_023220.1,1012-1030).
cctgtacaactgtctttct

SEQ ID NO: 584631 - DNA, 19 bp, Mus musculus
  siRNA target sequence for 2010106G01Rik (NM_023220.1,1023-1041).
gtctttctgcattgattca

SEQ ID NO: 584632 - DNA, 19 bp, Mus musculus
  siRNA target sequence for 2010106G01Rik (NM_023220.1,1074-1092).
gttgtggcaaaaacattaa

SEQ ID NO: 584633 - DNA, 19 bp, Mus musculus
  siRNA target sequence for 2010106G01Rik (NM_023220.1,1134-1152).
ctgttgtgtgggctgtatt

SEQ ID NO: 584634 - DNA, 19 bp, Mus musculus
  siRNA target sequence for 2010106G01Rik (NM_023220.1,1139-1157).
gtgtgggctgtatttcgaa

SEQ ID NO: 584635 - DNA, 19 bp, Mus musculus
  siRNA target sequence for 2010106G01Rik (NM_023220.1,1141-1159).
gtgggctgtatttcgaaat

SEQ ID NO: 584636 - DNA, 19 bp, Mus musculus
  siRNA target sequence for 2010106G01Rik (NM_023220.1,1163-1181).
gataggtgggcttggattt

SEQ ID NO: 584637 - DNA, 19 bp, Mus musculus
  siRNA target sequence for 2010106G01Rik (NM_023220.1,1167-1185).
ggtgggcttggattttaca

SEQ ID NO: 584638 - DNA, 19 bp, Mus musculus
  siRNA target sequence for 2010106G01Rik (NM_023220.1,1186-1204).
ggatatcttaggaattgct

SEQ ID NO: 584639 - DNA, 19 bp, Mus musculus
  siRNA target sequence for 2010106G01Rik (NM_023220.1,1211-1229).
ctcaacttaattaaaacaa

SEQ ID NO: 584640 - DNA, 19 bp, Mus musculus
  siRNA target sequence for 2010106G01Rik (NM_023220.1,1437-1455).
gctccgtgcctgtttcagt

SEQ ID NO: 584641 - DNA, 19 bp, Mus musculus
  siRNA target sequence for 2010106G01Rik (NM_023220.1,1438-1456).
ctccgtgcctgtttcagta

SEQ ID NO: 584642 - DNA, 19 bp, Mus musculus
  siRNA target sequence for 2010106G01Rik (NM_023220.1,1459-1477).
gggtttcggagatatcatt

SEQ ID NO: 584643 - DNA, 19 bp, Mus musculus
  siRNA target sequence for 2010106G01Rik (NM_023220.1,1461-1479).
gtttcggagatatcattgt

SEQ ID NO: 584644 - DNA, 19 bp, Mus musculus
  siRNA target sequence for 2010106G01Rik (NM_023220.1,1482-1500).
caggcctgttgattgcata

SEQ ID NO: 584645 - DNA, 19 bp, Mus musculus
  siRNA target sequence for 2010106G01Rik (NM_023220.1,1484-1502).
ggcctgttgattgcatatt

SEQ ID NO: 584646 - DNA, 19 bp, Mus musculus
  siRNA target sequence for 2010106G01Rik (NM_023220.1,1489-1507).
gttgattgcatattgtaga

SEQ ID NO: 584647 - DNA, 19 bp, Mus musculus
  siRNA target sequence for 2010106G01Rik (NM_023220.1,1503-1521).
gtagaagattcgatgttca

SEQ ID NO: 584648 - DNA, 19 bp, Mus musculus
  siRNA target sequence for 2010106G01Rik (NM_023220.1,1565-1583).
gctgttggcatgatcatta

SEQ ID NO: 584649 - DNA, 19 bp, Mus musculus
  siRNA target sequence for 2010106G01Rik (NM_023220.1,1568-1586).
gttggcatgatcattacct

SEQ ID NO: 584650 - DNA, 19 bp, Mus musculus
  siRNA target sequence for 2010106G01Rik (NM_023220.1,1729-1747).
ccacctggactattcaaca

SEQ ID NO: 584651 - DNA, 19 bp, Mus musculus
  siRNA target sequence for 2010106G01Rik (NM_023220.1,1730-1748).
cacctggactattcaacaa

SEQ ID NO: 584652 - DNA, 19 bp, Mus musculus
  siRNA target sequence for 2010106G01Rik (NM_023220.1,1732-1750).
cctggactattcaacaaat

SEQ ID NO: 584653 - DNA, 19 bp, Mus musculus
  siRNA target sequence for 2010106G01Rik (NM_023220.1,1735-1753).
ggactattcaacaaatgaa

SEQ ID NO: 584654 - DNA, 19 bp, Mus musculus
  siRNA target sequence for 3100002P13Rik (NM_134009.1,144-162).
gcctgccactcggctttat

SEQ ID NO: 584655 - DNA, 19 bp, Mus musculus
  siRNA target sequence for 3100002P13Rik (NM_134009.1,372-390).
cctatgagcactatcagaa

SEQ ID NO: 584656 - DNA, 19 bp, Mus musculus
  siRNA target sequence for 3100002P13Rik (NM_134009.1,405-423).
cagcaggtgctgtggttat

SEQ ID NO: 584657 - DNA, 19 bp, Mus musculus
  siRNA target sequence for 3100002P13Rik (NM_134009.1,407-425).
gcaggtgctgtggttatca

SEQ ID NO: 584658 - DNA, 19 bp, Mus musculus
  siRNA target sequence for 3100002P13Rik (NM_134009.1,458-476).
gatgtcgtccggcaattca

SEQ ID NO: 584659 - DNA, 19 bp, Mus musculus
  siRNA target sequence for 3100002P13Rik (NM_134009.1,468-486).
ggcaattcatggagattga

SEQ ID NO: 584660 - DNA, 19 bp, Mus musculus
  siRNA target sequence for 3100002P13Rik (NM_134009.1,737-755).
gaccttcccaccattgtca

SEQ ID NO: 584661 - DNA, 19 bp, Mus musculus
  siRNA target sequence for 3100002P13Rik (NM_134009.1,798-816).
ccctgggcgcagactcaaa

SEQ ID NO: 584662 - DNA, 19 bp, Mus musculus
  siRNA target sequence for 3100002P13Rik (NM_134009.1,861-879).
cgcgcctctacacatacaa

SEQ ID NO: 584663 - DNA, 19 bp, Mus musculus
  siRNA target sequence for 3100002P13Rik (NM_134009.1,921-939).
gagggggcaagttcaacta

SEQ ID NO: 584664 - DNA, 19 bp, Mus musculus
  siRNA target sequence for 3100002P13Rik (NM_134009.1,1152-1170).
gcttctccatggtacacaa

SEQ ID NO: 584665 - DNA, 19 bp, Mus musculus
  siRNA target sequence for 3100002P13Rik (NM_134009.1,1524-1542).
gcacactggagcactttct

SEQ ID NO: 584666 - DNA, 19 bp, Mus musculus
  siRNA target sequence for 3100002P13Rik (NM_134009.1,1588-1606).
caagcgggaccctgagttt

SEQ ID NO: 584667 - DNA, 19 bp, Mus musculus
  siRNA target sequence for 3100002P13Rik (NM_134009.1,1648-1666).
ggtcaagccagccatcttt

SEQ ID NO: 584668 - DNA, 19 bp, Mus musculus
  siRNA target sequence for 3100002P13Rik (NM_134009.1,1727-1745).
cacttccacgtgctataca

SEQ ID NO: 584669 - DNA, 19 bp, Mus musculus
  siRNA target sequence for 4833416I09Rik (NM_029012.1,580-598).
cccctggcccagccaatat

SEQ ID NO: 584670 - DNA, 19 bp, Mus musculus
  siRNA target sequence for 4833416I09Rik (NM_029012.1,582-600).
cctggcccagccaatatct

SEQ ID NO: 584671 - DNA, 19 bp, Mus musculus
  siRNA target sequence for 4833416I09Rik (NM_029012.1,758-776).
ctacctaaagggtgactta

SEQ ID NO: 584672 - DNA, 19 bp, Mus musculus
  siRNA target sequence for 4930544G21Rik (NM_172430.1,195-213).
ggtagttgaaccaaactct

SEQ ID NO: 584673 - DNA, 19 bp, Mus musculus
  siRNA target sequence for 4930544G21Rik (NM_172430.1,351-369).
cacggcctgtaaaaaggtt

SEQ ID NO: 584674 - DNA, 19 bp, Mus musculus
  siRNA target sequence for 4930544G21Rik (NM_172430.1,367-385).
gttcttcgaagcaatagct

SEQ ID NO: 584675 - DNA, 19 bp, Mus musculus
  siRNA target sequence for 4930544G21Rik (NM_172430.1,586-604).
gtccaacagccgaaagaaa

SEQ ID NO: 584676 - DNA, 19 bp, Mus musculus
  siRNA target sequence for 4930544G21Rik (NM_172430.1,712-730).
gggaacagaccaaacagta

SEQ ID NO: 584677 - DNA, 19 bp, Mus musculus
  siRNA target sequence for 4930544G21Rik (NM_172430.1,750-768).
gatcaacaagttcttaatt

SEQ ID NO: 584678 - DNA, 19 bp, Mus musculus
  siRNA target sequence for 4930544G21Rik (NM_172430.1,825-843).
ggaggatgatacaaactgt

SEQ ID NO: 584679 - DNA, 19 bp, Mus musculus
  siRNA target sequence for 4930544G21Rik (NM_172430.1,826-844).
gaggatgatacaaactgtt

SEQ ID NO: 584680 - DNA, 19 bp, Mus musculus
  siRNA target sequence for 4930544G21Rik (NM_172430.1,842-860).
gttctctgtcttcaattga

SEQ ID NO: 584681 - DNA, 19 bp, Mus musculus
  siRNA target sequence for 4930544G21Rik (NM_172430.1,938-956).
caaatgtgtcagctaatgt

SEQ ID NO: 584682 - DNA, 19 bp, Mus musculus
  siRNA target sequence for 4930544G21Rik (NM_172430.1,950-968).
ctaatgttttggaaagtaa

SEQ ID NO: 584683 - DNA, 19 bp, Mus musculus
  siRNA target sequence for 4930544G21Rik (NM_172430.1,1056-1074).
ccgtacgccctccacaaaa

SEQ ID NO: 584684 - DNA, 19 bp, Mus musculus
  siRNA target sequence for 4930544G21Rik (NM_172430.1,1057-1075).
cgtacgccctccacaaaaa

SEQ ID NO: 584685 - DNA, 19 bp, Mus musculus
  siRNA target sequence for 4930544G21Rik (NM_172430.1,1076-1094).
cagaagggtcaaaggaaaa

SEQ ID NO: 584686 - DNA, 19 bp, Mus musculus
  siRNA target sequence for 4930544G21Rik (NM_172430.1,1110-1128).
gtccttgaaaagtctcaat

SEQ ID NO: 584687 - DNA, 19 bp, Mus musculus
  siRNA target sequence for 4930544G21Rik (NM_172430.1,1116-1134).
gaaaagtctcaatcgttta

SEQ ID NO: 584688 - DNA, 19 bp, Mus musculus
  siRNA target sequence for 4930544G21Rik (NM_172430.1,1140-1158).
gccatcacacctgaaaagt

SEQ ID NO: 584689 - DNA, 19 bp, Mus musculus
  siRNA target sequence for 4930544G21Rik (NM_172430.1,1191-1209).
ctactcctacccagaaaat

SEQ ID NO: 584690 - DNA, 19 bp, Mus musculus
  siRNA target sequence for 4930544G21Rik (NM_172430.1,1196-1214).
cctacccagaaaatatcaa

SEQ ID NO: 584691 - DNA, 19 bp, Mus musculus
  siRNA target sequence for 4930544G21Rik (NM_172430.1,1212-1230).
caaaggggaactagaaaca

SEQ ID NO: 584692 - DNA, 19 bp, Mus musculus
  siRNA target sequence for 4930544G21Rik (NM_172430.1,1219-1237).
gaactagaaacatctcaaa

SEQ ID NO: 584693 - DNA, 19 bp, Mus musculus
  siRNA target sequence for 4930544G21Rik (NM_172430.1,1249-1267).
cctagagatgcctatctct

SEQ ID NO: 584694 - DNA, 19 bp, Mus musculus
  siRNA target sequence for 4930544G21Rik (NM_172430.1,1258-1276).
gcctatctctccatggtta

SEQ ID NO: 584695 - DNA, 19 bp, Mus musculus
  siRNA target sequence for 4930544G21Rik (NM_172430.1,1259-1277).
cctatctctccatggttaa

SEQ ID NO: 584696 - DNA, 19 bp, Mus musculus
  siRNA target sequence for 4930544G21Rik (NM_172430.1,1272-1290).
ggttaagaaagatgtactt

SEQ ID NO: 584697 - DNA, 19 bp, Mus musculus
  siRNA target sequence for 4930544G21Rik (NM_172430.1,1355-1373).
ctcttcctcccgttcaaaa

SEQ ID NO: 584698 - DNA, 19 bp, Mus musculus
  siRNA target sequence for 4930544G21Rik (NM_172430.1,1390-1408).
ggagagtatgccacaaact

SEQ ID NO: 584699 - DNA, 19 bp, Mus musculus
  siRNA target sequence for 4930544G21Rik (NM_172430.1,1401-1419).
cacaaacttagcagaatct

SEQ ID NO: 584700 - DNA, 19 bp, Mus musculus
  siRNA target sequence for 4930544G21Rik (NM_172430.1,1474-1492).
gaatctgcagtcagtttct

SEQ ID NO: 584701 - DNA, 19 bp, Mus musculus
  siRNA target sequence for 4930544G21Rik (NM_172430.1,1517-1535).
gtggctgttgcacaaaaga

SEQ ID NO: 584702 - DNA, 19 bp, Mus musculus
  siRNA target sequence for 4930544G21Rik (NM_172430.1,1519-1537).
ggctgttgcacaaaagata

SEQ ID NO: 584703 - DNA, 19 bp, Mus musculus
  siRNA target sequence for 4930544G21Rik (NM_172430.1,1523-1541).
gttgcacaaaagatatggt

SEQ ID NO: 584704 - DNA, 19 bp, Mus musculus
  siRNA target sequence for 4930544G21Rik (NM_172430.1,1563-1581).
gctacccaaaattgtcatt

SEQ ID NO: 584705 - DNA, 19 bp, Mus musculus
  siRNA target sequence for 4930544G21Rik (NM_172430.1,1607-1625).
cagtccctgagccaaatgt

SEQ ID NO: 584706 - DNA, 19 bp, Mus musculus
  siRNA target sequence for 4930544G21Rik (NM_172430.1,1654-1672).
gaaacctcgggcatctttt

SEQ ID NO: 584707 - DNA, 19 bp, Mus musculus
  siRNA target sequence for 4930544G21Rik (NM_172430.1,1738-1756).
gtgattggaaccatttcca

SEQ ID NO: 584708 - DNA, 19 bp, Mus musculus
  siRNA target sequence for 4930544G21Rik (NM_172430.1,1826-1844).
ctggggtacagcaaactca

SEQ ID NO: 584709 - DNA, 19 bp, Mus musculus
  siRNA target sequence for 4930544G21Rik (NM_172430.1,1867-1885).
ccttctacaaccgagtatt

SEQ ID NO: 584710 - DNA, 19 bp, Mus musculus
  siRNA target sequence for 4930544G21Rik (NM_172430.1,1871-1889).
ctacaaccgagtattcctt

SEQ ID NO: 584711 - DNA, 19 bp, Mus musculus
  siRNA target sequence for 4930544G21Rik (NM_172430.1,1932-1950).
cgctgtctgtggcttatgt

SEQ ID NO: 584712 - DNA, 19 bp, Mus musculus
  siRNA target sequence for 4930544G21Rik (NM_172430.1,2005-2023).
ggggcttctgaagaaatat

SEQ ID NO: 584713 - DNA, 19 bp, Mus musculus
  siRNA target sequence for 4930544G21Rik (NM_172430.1,2101-2119).
gctactctgattttagcaa

SEQ ID NO: 584714 - DNA, 19 bp, Mus musculus
  siRNA target sequence for 4930544G21Rik (NM_172430.1,2144-2162).
gtgagctcttggaatctgt

SEQ ID NO: 584715 - DNA, 19 bp, Mus musculus
  siRNA target sequence for 4930544G21Rik (NM_172430.1,2159-2177).
ctgtgaaccagagaatcat

SEQ ID NO: 584716 - DNA, 19 bp, Mus musculus
  siRNA target sequence for 4930544G21Rik (NM_172430.1,2199-2217).
gaccctgtgcacagaaagt

SEQ ID NO: 584717 - DNA, 19 bp, Mus musculus
  siRNA target sequence for 4930544G21Rik (NM_172430.1,2239-2257).
cacaccttgtccaatgtca

SEQ ID NO: 584718 - DNA, 19 bp, Mus musculus
  siRNA target sequence for 4930544G21Rik (NM_172430.1,2301-2319).
ggctcaccccactgatgaa

SEQ ID NO: 584719 - DNA, 19 bp, Mus musculus
  siRNA target sequence for 4930544G21Rik (NM_172430.1,2403-2421).
gatgaatcacattgtaaca

SEQ ID NO: 584720 - DNA, 19 bp, Mus musculus
  siRNA target sequence for 4930544G21Rik (NM_172430.1,2489-2507).
gcagccagcctcttagcaa

SEQ ID NO: 584721 - DNA, 19 bp, Mus musculus
  siRNA target sequence for 4930544G21Rik (NM_172430.1,2548-2566).
gatgcatctcctaagtcaa

SEQ ID NO: 584722 - DNA, 19 bp, Mus musculus
  siRNA target sequence for 4930544G21Rik (NM_172430.1,2617-2635).
gaattctcctgcagtcata

SEQ ID NO: 584723 - DNA, 19 bp, Mus musculus
  siRNA target sequence for 4930544G21Rik (NM_172430.1,2713-2731).
cctcatcatacactaaatt

SEQ ID NO: 584724 - DNA, 19 bp, Mus musculus
  siRNA target sequence for 4930544G21Rik (NM_172430.1,2714-2732).
ctcatcatacactaaatta

SEQ ID NO: 584725 - DNA, 19 bp, Mus musculus
  siRNA target sequence for 4930544G21Rik (NM_172430.1,2719-2737).
catacactaaattatgaca

SEQ ID NO: 584726 - DNA, 19 bp, Mus musculus
  siRNA target sequence for 4930544G21Rik (NM_172430.1,2756-2774).
ctacagacctaggaaaatt

SEQ ID NO: 584727 - DNA, 19 bp, Mus musculus
  siRNA target sequence for 4930544G21Rik (NM_172430.1,2761-2779).
gacctaggaaaattgacaa

SEQ ID NO: 584728 - DNA, 19 bp, Mus musculus
  siRNA target sequence for 4930544G21Rik (NM_172430.1,2859-2877).
cacacccctaaacaatgaa

SEQ ID NO: 584729 - DNA, 19 bp, Mus musculus
  siRNA target sequence for 4930544G21Rik (NM_172430.1,2875-2893).
gaagctcaagttaacctat

SEQ ID NO: 584730 - DNA, 19 bp, Mus musculus
  siRNA target sequence for 4930544G21Rik (NM_172430.1,2879-2897).
ctcaagttaacctatcctt

SEQ ID NO: 584731 - DNA, 19 bp, Mus musculus
  siRNA target sequence for 4930544G21Rik (NM_172430.1,2881-2899).
caagttaacctatccttat

SEQ ID NO: 584732 - DNA, 19 bp, Mus musculus
  siRNA target sequence for 4930544G21Rik (NM_172430.1,2956-2974).
gtctatggcatcacagatt

SEQ ID NO: 584733 - DNA, 19 bp, Mus musculus
  siRNA target sequence for 4930544G21Rik (NM_172430.1,2958-2976).
ctatggcatcacagatttt

SEQ ID NO: 584734 - DNA, 19 bp, Mus musculus
  siRNA target sequence for 4930544G21Rik (NM_172430.1,2969-2987).
cagattttgcggaagaatt

SEQ ID NO: 584735 - DNA, 19 bp, Mus musculus
  siRNA target sequence for 4930544G21Rik (NM_172430.1,3178-3196).
ccacctcgcctcagtgaaa

SEQ ID NO: 584736 - DNA, 19 bp, Mus musculus
  siRNA target sequence for 4930544G21Rik (NM_172430.1,3179-3197).
cacctcgcctcagtgaaat

SEQ ID NO: 584737 - DNA, 19 bp, Mus musculus
  siRNA target sequence for 4930544G21Rik (NM_172430.1,3181-3199).
cctcgcctcagtgaaatca

SEQ ID NO: 584738 - DNA, 19 bp, Mus musculus
  siRNA target sequence for 4930544G21Rik (NM_172430.1,3187-3205).
ctcagtgaaatcaagagaa

SEQ ID NO: 584739 - DNA, 19 bp, Mus musculus
  siRNA target sequence for 4930544G21Rik (NM_172430.1,3263-3281).
ccatgaacctcgaagacat

SEQ ID NO: 584740 - DNA, 19 bp, Mus musculus
  siRNA target sequence for 4930544G21Rik (NM_172430.1,3296-3314).
gtacctttgccaatgaagt

SEQ ID NO: 584741 - DNA, 19 bp, Mus musculus
  siRNA target sequence for 4930544G21Rik (NM_172430.1,3489-3507).
gggtttgatgagtacctta

SEQ ID NO: 584742 - DNA, 19 bp, Mus musculus
  siRNA target sequence for 4930544G21Rik (NM_172430.1,3490-3508).
ggtttgatgagtaccttaa

SEQ ID NO: 584743 - DNA, 19 bp, Mus musculus
  siRNA target sequence for 4930544G21Rik (NM_172430.1,3761-3779).
cagaggagttctataggta

SEQ ID NO: 584744 - DNA, 19 bp, Mus musculus
  siRNA target sequence for 4930544G21Rik (NM_172430.1,3872-3890).
cacgatcccctctgtgtta

SEQ ID NO: 584745 - DNA, 19 bp, Mus musculus
  siRNA target sequence for 4930544G21Rik (NM_172430.1,3874-3892).
cgatcccctctgtgttaca

SEQ ID NO: 584746 - DNA, 19 bp, Mus musculus
  siRNA target sequence for 4930544G21Rik (NM_172430.1,3926-3944).
gctccagactaacagtaaa

SEQ ID NO: 584747 - DNA, 19 bp, Mus musculus
  siRNA target sequence for 4930544G21Rik (NM_172430.1,3954-3972).
caaagccaactccttagat

SEQ ID NO: 584748 - DNA, 19 bp, Mus musculus
  siRNA target sequence for 4930544G21Rik (NM_172430.1,3981-3999).
ccaaaactgccctcaagat

SEQ ID NO: 584749 - DNA, 19 bp, Mus musculus
  siRNA target sequence for 4930544G21Rik (NM_172430.1,3987-4005).
ctgccctcaagattctgta

SEQ ID NO: 584750 - DNA, 19 bp, Mus musculus
  siRNA target sequence for 4930544G21Rik (NM_172430.1,4094-4112).
caaacatgctaattcatga

SEQ ID NO: 584751 - DNA, 19 bp, Mus musculus
  siRNA target sequence for 4930544G21Rik (NM_172430.1,4098-4116).
catgctaattcatgaaaca

SEQ ID NO: 584752 - DNA, 19 bp, Mus musculus
  siRNA target sequence for 4930544G21Rik (NM_172430.1,4132-4150).
gaggctctcatgagaaaga

SEQ ID NO: 584753 - DNA, 19 bp, Mus musculus
  siRNA target sequence for 4930544G21Rik (NM_172430.1,4271-4289).
ggccaactctgcttgtaca

SEQ ID NO: 584754 - DNA, 19 bp, Mus musculus
  siRNA target sequence for 4930544G21Rik (NM_172430.1,4281-4299).
gcttgtacaggaatctgtt

SEQ ID NO: 584755 - DNA, 19 bp, Mus musculus
  siRNA target sequence for 4930544G21Rik (NM_172430.1,4321-4339).
gttactgaaggcaatcatt

SEQ ID NO: 584756 - DNA, 19 bp, Mus musculus
  siRNA target sequence for 4930544G21Rik (NM_172430.1,4358-4376).
gcaaaacagctcctgttaa

SEQ ID NO: 584757 - DNA, 19 bp, Mus musculus
  siRNA target sequence for 4930544G21Rik (NM_172430.1,4519-4537).
gaacctggacctttccttt

SEQ ID NO: 584758 - DNA, 19 bp, Mus musculus
  siRNA target sequence for 4930544G21Rik (NM_172430.1,4898-4916).
cgtcttctcccatgattaa

SEQ ID NO: 584759 - DNA, 19 bp, Mus musculus
  siRNA target sequence for 5730408C10Rik (NM_027445.1,457-475).
ggaggcccacccagaaaat

SEQ ID NO: 584760 - DNA, 19 bp, Mus musculus
  siRNA target sequence for 5730408C10Rik (NM_027445.1,514-532).
caatgggtcagtctttatt

SEQ ID NO: 584761 - DNA, 19 bp, Mus musculus
  siRNA target sequence for 5730408C10Rik (NM_027445.1,608-626).
gtggtgcacaatgtgaatt

SEQ ID NO: 584762 - DNA, 19 bp, Mus musculus
  siRNA target sequence for 5730408C10Rik (NM_027445.1,613-631).
gcacaatgtgaattccaat

SEQ ID NO: 584763 - DNA, 19 bp, Mus musculus
  siRNA target sequence for 5730408C10Rik (NM_027445.1,685-703).
cccatctgtatttattgga

SEQ ID NO: 584764 - DNA, 19 bp, Mus musculus
  siRNA target sequence for 5730408C10Rik (NM_027445.1,718-736).
gtacctacgagcccttttt

SEQ ID NO: 584765 - DNA, 19 bp, Mus musculus
  siRNA target sequence for 5730408C10Rik (NM_027445.1,791-809).
ggctattacctcattcctt

SEQ ID NO: 584766 - DNA, 19 bp, Mus musculus
  siRNA target sequence for 5730408C10Rik (NM_027445.1,792-810).
gctattacctcattccttt

SEQ ID NO: 584767 - DNA, 19 bp, Mus musculus
  siRNA target sequence for 5730408C10Rik (NM_027445.1,844-862).
gggaacagtattgatagtt

SEQ ID NO: 584768 - DNA, 19 bp, Mus musculus
  siRNA target sequence for 5730408C10Rik (NM_027445.1,892-910).
gcggaaccgacttaccaaa

SEQ ID NO: 584769 - DNA, 19 bp, Mus musculus
  siRNA target sequence for 5730408C10Rik (NM_027445.1,914-932).
caactgaaacagattccta

SEQ ID NO: 584770 - DNA, 19 bp, Mus musculus
  siRNA target sequence for 5730408C10Rik (NM_027445.1,929-947).
cctacccatgactatcaga

SEQ ID NO: 584771 - DNA, 19 bp, Mus musculus
  siRNA target sequence for 5730408C10Rik (NM_027445.1,930-948).
ctacccatgactatcagaa

SEQ ID NO: 584772 - DNA, 19 bp, Mus musculus
  siRNA target sequence for 5730408C10Rik (NM_027445.1,1000-1018).
ggacaagcttcgagtactt

SEQ ID NO: 584773 - DNA, 19 bp, Mus musculus
  siRNA target sequence for 5730408C10Rik (NM_027445.1,1020-1038).
cctgtgctcatgcttatca

SEQ ID NO: 584774 - DNA, 19 bp, Mus musculus
  siRNA target sequence for 5730408C10Rik (NM_027445.1,1213-1231).
gggctctagccctactctt

SEQ ID NO: 584775 - DNA, 19 bp, Mus musculus
  siRNA target sequence for 5930431H10 (NM_173776.2,226-244).
ggctgatgcggagaaactt

SEQ ID NO: 584776 - DNA, 19 bp, Mus musculus
  siRNA target sequence for 5930431H10 (NM_173776.2,227-245).
gctgatgcggagaaacttt

SEQ ID NO: 584777 - DNA, 19 bp, Mus musculus
  siRNA target sequence for 5930431H10 (NM_173776.2,246-264).
cccctcaggatcagatgaa

SEQ ID NO: 584778 - DNA, 19 bp, Mus musculus
  siRNA target sequence for 5930431H10 (NM_173776.2,248-266).
cctcaggatcagatgaaca

SEQ ID NO: 584779 - DNA, 19 bp, Mus musculus
  siRNA target sequence for 5930431H10 (NM_173776.2,326-344).
cagccagctgctcagtatt

SEQ ID NO: 584780 - DNA, 19 bp, Mus musculus
  siRNA target sequence for 5930431H10 (NM_173776.2,351-369).
gctcctctacagtgagttt

SEQ ID NO: 584781 - DNA, 19 bp, Mus musculus
  siRNA target sequence for 5930431H10 (NM_173776.2,352-370).
ctcctctacagtgagttta

SEQ ID NO: 584782 - DNA, 19 bp, Mus musculus
  siRNA target sequence for 5930431H10 (NM_173776.2,444-462).
cgtctcatgggatgagaat

SEQ ID NO: 584783 - DNA, 19 bp, Mus musculus
  siRNA target sequence for 5930431H10 (NM_173776.2,463-481).
gccattgttatctacagtt

SEQ ID NO: 584784 - DNA, 19 bp, Mus musculus
  siRNA target sequence for 5930431H10 (NM_173776.2,557-575).
ctgacacaacagagaaata

SEQ ID NO: 584785 - DNA, 19 bp, Mus musculus
  siRNA target sequence for 5930431H10 (NM_173776.2,579-597).
ctcaactgataacaaatca

SEQ ID NO: 584786 - DNA, 19 bp, Mus musculus
  siRNA target sequence for 5930431H10 (NM_173776.2,633-651).
gggcaaataacggtaacaa

SEQ ID NO: 584787 - DNA, 19 bp, Mus musculus
  siRNA target sequence for 5930431H10 (NM_173776.2,634-652).
ggcaaataacggtaacaat

SEQ ID NO: 584788 - DNA, 19 bp, Mus musculus
  siRNA target sequence for 5930431H10 (NM_173776.2,636-654).
caaataacggtaacaatgt

SEQ ID NO: 584789 - DNA, 19 bp, Mus musculus
  siRNA target sequence for 5930431H10 (NM_173776.2,815-833).
caggaagccctcaaatcca

SEQ ID NO: 584790 - DNA, 19 bp, Mus musculus
  siRNA target sequence for 5930431H10 (NM_173776.2,839-857).
gtccggttcccaacaagta

SEQ ID NO: 584791 - DNA, 19 bp, Mus musculus
  siRNA target sequence for 5930431H10 (NM_173776.2,899-917).
gtagggagccagccatttt

SEQ ID NO: 584792 - DNA, 19 bp, Mus musculus
  siRNA target sequence for 5930431H10 (NM_173776.2,932-950).
gcaccccctagccagttat

SEQ ID NO: 584793 - DNA, 19 bp, Mus musculus
  siRNA target sequence for 5930431H10 (NM_173776.2,952-970).
gccagcagtgcaaatgaga

SEQ ID NO: 584794 - DNA, 19 bp, Mus musculus
  siRNA target sequence for 5930431H10 (NM_173776.2,980-998).
caaatgaatcaggcattaa

SEQ ID NO: 584795 - DNA, 19 bp, Mus musculus
  siRNA target sequence for 5930431H10 (NM_173776.2,1055-1073).
gcccagagcctgtctaata

SEQ ID NO: 584796 - DNA, 19 bp, Mus musculus
  siRNA target sequence for 5930431H10 (NM_173776.2,1056-1074).
cccagagcctgtctaatat

SEQ ID NO: 584797 - DNA, 19 bp, Mus musculus
  siRNA target sequence for 5930431H10 (NM_173776.2,1058-1076).
cagagcctgtctaatatga

SEQ ID NO: 584798 - DNA, 19 bp, Mus musculus
  siRNA target sequence for 5930431H10 (NM_173776.2,1188-1206).
ctgatcatggcagtgattt

SEQ ID NO: 584799 - DNA, 19 bp, Mus musculus
  siRNA target sequence for 5930431H10 (NM_173776.2,1197-1215).
gcagtgatttagcttttga

SEQ ID NO: 584800 - DNA, 19 bp, Mus musculus
  siRNA target sequence for 5930431H10 (NM_173776.2,1200-1218).
gtgatttagcttttgactt

SEQ ID NO: 584801 - DNA, 19 bp, Mus musculus
  siRNA target sequence for 5930431H10 (NM_173776.2,1243-1261).
gtgccctgccctaaacagt

SEQ ID NO: 584802 - DNA, 19 bp, Mus musculus
  siRNA target sequence for 5930431H10 (NM_173776.2,1262-1280).
gatgctgatttcatcgatt

SEQ ID NO: 584803 - DNA, 19 bp, Mus musculus
  siRNA target sequence for BC019734 (NM_145369.1,148-166).
ctgttgccttgtgtagaaa

SEQ ID NO: 584804 - DNA, 19 bp, Mus musculus
  siRNA target sequence for BC019734 (NM_145369.1,150-168).
gttgccttgtgtagaaaga

SEQ ID NO: 584805 - DNA, 19 bp, Mus musculus
  siRNA target sequence for BC019734 (NM_145369.1,229-247).
ctgatcagtgcttgaatga

SEQ ID NO: 584806 - DNA, 19 bp, Mus musculus
  siRNA target sequence for BC019734 (NM_145369.1,231-249).
gatcagtgcttgaatgaca

SEQ ID NO: 584807 - DNA, 19 bp, Mus musculus
  siRNA target sequence for BC019734 (NM_145369.1,301-319).
gtatgcctcgtgtctttgt

SEQ ID NO: 584808 - DNA, 19 bp, Mus musculus
  siRNA target sequence for BC019734 (NM_145369.1,367-385).
caaagcacatgtgtaacaa

SEQ ID NO: 584809 - DNA, 19 bp, Mus musculus
  siRNA target sequence for BC019734 (NM_145369.1,449-467).
ccccagcaaaagtaccatt

SEQ ID NO: 584810 - DNA, 19 bp, Mus musculus
  siRNA target sequence for BC019734 (NM_145369.1,450-468).
cccagcaaaagtaccattt

SEQ ID NO: 584811 - DNA, 19 bp, Mus musculus
  siRNA target sequence for Dhh (NM_007857.2,308-326).
ggcactcttggcactatct

SEQ ID NO: 584812 - DNA, 19 bp, Mus musculus
  siRNA target sequence for Dhh (NM_007857.2,563-581).
gatgacagagcgttgcaaa

SEQ ID NO: 584813 - DNA, 19 bp, Mus musculus
  siRNA target sequence for Dhh (NM_007857.2,600-618).
gccatcgcggtgatgaaca

SEQ ID NO: 584814 - DNA, 19 bp, Mus musculus
  siRNA target sequence for Dhh (NM_007857.2,601-619).
ccatcgcggtgatgaacat

SEQ ID NO: 584815 - DNA, 19 bp, Mus musculus
  siRNA target sequence for Dhh (NM_007857.2,732-750).
gaccgtaataagtatggtt

SEQ ID NO: 584816 - DNA, 19 bp, Mus musculus
  siRNA target sequence for Dhh (NM_007857.2,1047-1065).
cggcctccgcgcaaactgt

SEQ ID NO: 584817 - DNA, 19 bp, Mus musculus
  siRNA target sequence for Dhh (NM_007857.2,1048-1066).
ggcctccgcgcaaactgtt

SEQ ID NO: 584818 - DNA, 19 bp, Mus musculus
  siRNA target sequence for Dhh (NM_007857.2,1294-1312).
cctgctacgcggttctaga

SEQ ID NO: 584819 - DNA, 19 bp, Mus musculus
  siRNA target sequence for Dhh (NM_007857.2,1399-1417).
cgactggcatgcattggta

SEQ ID NO: 584820 - DNA, 19 bp, Mus musculus
  siRNA target sequence for Dhh (NM_007857.2,1414-1432).
ggtactctcgcctccttta

SEQ ID NO: 584821 - DNA, 19 bp, Mus musculus
  siRNA target sequence for Dhh (NM_007857.2,1435-1453).
gcttggccgaggagttaat

SEQ ID NO: 584822 - DNA, 19 bp, Mus musculus
  siRNA target sequence for Grp58 (NM_007952.1,164-182).
gaactgacggacgaaaact

SEQ ID NO: 584823 - DNA, 19 bp, Mus musculus
  siRNA target sequence for Grp58 (NM_007952.1,326-344).
gattgcactgccaacacaa

SEQ ID NO: 584824 - DNA, 19 bp, Mus musculus
  siRNA target sequence for Grp58 (NM_007952.1,337-355).
caacacaaacacctgtaat

SEQ ID NO: 584825 - DNA, 19 bp, Mus musculus
  siRNA target sequence for Grp58 (NM_007952.1,536-554).
gcctcagtggtgggttttt

SEQ ID NO: 584826 - DNA, 19 bp, Mus musculus
  siRNA target sequence for Grp58 (NM_007952.1,548-566).
ggttttttcagggatttat

SEQ ID NO: 584827 - DNA, 19 bp, Mus musculus
  siRNA target sequence for Grp58 (NM_007952.1,570-588).
gtgatgggcactctgaatt

SEQ ID NO: 584828 - DNA, 19 bp, Mus musculus
  siRNA target sequence for Grp58 (NM_007952.1,653-671).
gtgaaggagtacgatgata

SEQ ID NO: 584829 - DNA, 19 bp, Mus musculus
  siRNA target sequence for Grp58 (NM_007952.1,655-673).
gaaggagtacgatgataat

SEQ ID NO: 584830 - DNA, 19 bp, Mus musculus
  siRNA target sequence for Grp58 (NM_007952.1,675-693).
gagaggggatcactatatt

SEQ ID NO: 584831 - DNA, 19 bp, Mus musculus
  siRNA target sequence for Grp58 (NM_007952.1,687-705).
ctatattccgtccattaca

SEQ ID NO: 584832 - DNA, 19 bp, Mus musculus
  siRNA target sequence for Grp58 (NM_007952.1,696-714).
gtccattacatcttgctaa

SEQ ID NO: 584833 - DNA, 19 bp, Mus musculus
  siRNA target sequence for Grp58 (NM_007952.1,699-717).
cattacatcttgctaacaa

SEQ ID NO: 584834 - DNA, 19 bp, Mus musculus
  siRNA target sequence for Grp58 (NM_007952.1,800-818).
ggtctctgtcctcatatga

SEQ ID NO: 584835 - DNA, 19 bp, Mus musculus
  siRNA target sequence for Grp58 (NM_007952.1,809-827).
cctcatatgacggaagata

SEQ ID NO: 584836 - DNA, 19 bp, Mus musculus
  siRNA target sequence for Grp58 (NM_007952.1,810-828).
ctcatatgacggaagataa

SEQ ID NO: 584837 - DNA, 19 bp, Mus musculus
  siRNA target sequence for Grp58 (NM_007952.1,853-871).
cttactcaccgcttactat

SEQ ID NO: 584838 - DNA, 19 bp, Mus musculus
  siRNA target sequence for Grp58 (NM_007952.1,872-890).
gatgtggactatgaaaaga

SEQ ID NO: 584839 - DNA, 19 bp, Mus musculus
  siRNA target sequence for Grp58 (NM_007952.1,878-896).
gactatgaaaagaatgcta

SEQ ID NO: 584840 - DNA, 19 bp, Mus musculus
  siRNA target sequence for Grp58 (NM_007952.1,893-911).
gctaaaggttctaactact

SEQ ID NO: 584841 - DNA, 19 bp, Mus musculus
  siRNA target sequence for Grp58 (NM_007952.1,912-930).
ggagaaacagggtcatgat

SEQ ID NO: 584842 - DNA, 19 bp, Mus musculus
  siRNA target sequence for Grp58 (NM_007952.1,974-992).
gctgtagctagccgtaaaa

SEQ ID NO: 584843 - DNA, 19 bp, Mus musculus
  siRNA target sequence for Grp58 (NM_007952.1,977-995).
gtagctagccgtaaaacct

SEQ ID NO: 584844 - DNA, 19 bp, Mus musculus
  siRNA target sequence for Grp58 (NM_007952.1,980-998).
gctagccgtaaaaccttta

SEQ ID NO: 584845 - DNA, 19 bp, Mus musculus
  siRNA target sequence for Grp58 (NM_007952.1,1065-1083).
ctgctaaaggagagaagtt

SEQ ID NO: 584846 - DNA, 19 bp, Mus musculus
  siRNA target sequence for Grp58 (NM_007952.1,1261-1279).
ggacgtgctgattgaattt

SEQ ID NO: 584847 - DNA, 19 bp, Mus musculus
  siRNA target sequence for Grp58 (NM_007952.1,1262-1280).
gacgtgctgattgaatttt

SEQ ID NO: 584848 - DNA, 19 bp, Mus musculus
  siRNA target sequence for Grp58 (NM_007952.1,1306-1324).
gaatctggaacccaagtat

SEQ ID NO: 584849 - DNA, 19 bp, Mus musculus
  siRNA target sequence for Grp58 (NM_007952.1,1421-1439).
ggttttcctaccatctact

SEQ ID NO: 584850 - DNA, 19 bp, Mus musculus
  siRNA target sequence for Grp58 (NM_007952.1,1459-1477).
gctaactccaaagaagtat

SEQ ID NO: 584851 - DNA, 19 bp, Mus musculus
  siRNA target sequence for Grp58 (NM_007952.1,1478-1496).
gaaggtggccgtgaattaa

SEQ ID NO: 584852 - DNA, 19 bp, Mus musculus
  siRNA target sequence for Grp58 (NM_007952.1,1482-1500).
gtggccgtgaattaaatga

SEQ ID NO: 584853 - DNA, 19 bp, Mus musculus
  siRNA target sequence for Grp58 (NM_007952.1,1526-1544).
gctacaaacccccctataa

SEQ ID NO: 584854 - DNA, 19 bp, Mus musculus
  siRNA target sequence for Grp58 (NM_007952.1,1527-1545).
ctacaaacccccctataat

SEQ ID NO: 584855 - DNA, 19 bp, Mus musculus
  siRNA target sequence for Grp58 (NM_007952.1,1530-1548).
caaacccccctataattca

SEQ ID NO: 584856 - DNA, 19 bp, Mus musculus
  siRNA target sequence for H13 (NM_010376.2,274-292).
cggacatgccagaaaccat

SEQ ID NO: 584857 - DNA, 19 bp, Mus musculus
  siRNA target sequence for H13 (NM_010376.2,345-363).
gggctctacctctttttca

SEQ ID NO: 584858 - DNA, 19 bp, Mus musculus
  siRNA target sequence for H13 (NM_010376.2,346-364).
ggctctacctctttttcaa

SEQ ID NO: 584859 - DNA, 19 bp, Mus musculus
  siRNA target sequence for H13 (NM_010376.2,347-365).
gctctacctctttttcaaa

SEQ ID NO: 584860 - DNA, 19 bp, Mus musculus
  siRNA target sequence for H13 (NM_010376.2,389-407).
cctcttgctgtccatgtat

SEQ ID NO: 584861 - DNA, 19 bp, Mus musculus
  siRNA target sequence for H13 (NM_010376.2,448-466).
gccccttcatgaataagtt

SEQ ID NO: 584862 - DNA, 19 bp, Mus musculus
  siRNA target sequence for H13 (NM_010376.2,449-467).
ccccttcatgaataagttt

SEQ ID NO: 584863 - DNA, 19 bp, Mus musculus
  siRNA target sequence for H13 (NM_010376.2,450-468).
cccttcatgaataagtttt

SEQ ID NO: 584864 - DNA, 19 bp, Mus musculus
  siRNA target sequence for H13 (NM_010376.2,452-470).
cttcatgaataagtttttt

SEQ ID NO: 584865 - DNA, 19 bp, Mus musculus
  siRNA target sequence for H13 (NM_010376.2,513-531).
cagggctctggggaaaaca

SEQ ID NO: 584866 - DNA, 19 bp, Mus musculus
  siRNA target sequence for H13 (NM_010376.2,517-535).
gctctggggaaaacaaaga

SEQ ID NO: 584867 - DNA, 19 bp, Mus musculus
  siRNA target sequence for H13 (NM_010376.2,785-803).
gtcctttgaggcaccaata

SEQ ID NO: 584868 - DNA, 19 bp, Mus musculus
  siRNA target sequence for H13 (NM_010376.2,787-805).
cctttgaggcaccaataaa

SEQ ID NO: 584869 - DNA, 19 bp, Mus musculus
  siRNA target sequence for H13 (NM_010376.2,882-900).
gtcattccagggatcttca

SEQ ID NO: 584870 - DNA, 19 bp, Mus musculus
  siRNA target sequence for H13 (NM_010376.2,1096-1114).
gagaagtggccgagatgtt

SEQ ID NO: 584871 - DNA, 19 bp, Mus musculus
  siRNA target sequence for H13 (NM_010376.2,1101-1119).
gtggccgagatgttcagtt

SEQ ID NO: 584872 - DNA, 19 bp, Mus musculus
  siRNA target sequence for H13 (NM_010376.2,1103-1121).
ggccgagatgttcagttat

SEQ ID NO: 584873 - DNA, 19 bp, Mus musculus
  siRNA target sequence for H13 (NM_010376.2,1105-1123).
ccgagatgttcagttatga

SEQ ID NO: 584874 - DNA, 19 bp, Mus musculus
  siRNA target sequence for H13 (NM_010376.2,1124-1142).
ggagtccaaccctaaagat

SEQ ID NO: 584875 - DNA, 19 bp, Mus musculus
  siRNA target sequence for H13 (NM_010376.2,1189-1207).
catcgaagaggctagagaa

SEQ ID NO: 584876 - DNA, 19 bp, Mus musculus
  siRNA target sequence for Ihh (NM_010544.2,656-674).
cagctctgagcgcttcaaa

SEQ ID NO: 584877 - DNA, 19 bp, Mus musculus
  siRNA target sequence for Ihh (NM_010544.2,677-695).
gctcacccccaactacaat

SEQ ID NO: 584878 - DNA, 19 bp, Mus musculus
  siRNA target sequence for Ihh (NM_010544.2,957-975).
ggcttcgactgggtgtatt

SEQ ID NO: 584879 - DNA, 19 bp, Mus musculus
  siRNA target sequence for Ihh (NM_010544.2,958-976).
gcttcgactgggtgtatta

SEQ ID NO: 584880 - DNA, 19 bp, Mus musculus
  siRNA target sequence for Ihh (NM_010544.2,1060-1078).
cccaggtgcgcctagagaa

SEQ ID NO: 584881 - DNA, 19 bp, Mus musculus
  siRNA target sequence for Ihh (NM_010544.2,1268-1286).
cttcattgcggacaatcat

SEQ ID NO: 584882 - DNA, 19 bp, Mus musculus
  siRNA target sequence for Ihh (NM_010544.2,1271-1289).
cattgcggacaatcataca

SEQ ID NO: 584883 - DNA, 19 bp, Mus musculus
  siRNA target sequence for Ihh (NM_010544.2,1612-1630).
ggcgtctcttgctagaaga

SEQ ID NO: 584884 - DNA, 19 bp, Mus musculus
  siRNA target sequence for Muc5b (NM_028801.1,168-186).
gacagtcagagagtgtata

SEQ ID NO: 584885 - DNA, 19 bp, Mus musculus
  siRNA target sequence for Muc5b (NM_028801.1,170-188).
cagtcagagagtgtatagt

SEQ ID NO: 584886 - DNA, 19 bp, Mus musculus
  siRNA target sequence for Muc5b (NM_028801.1,180-198).
gtgtatagtgactccatat

SEQ ID NO: 584887 - DNA, 19 bp, Mus musculus
  siRNA target sequence for Muc5b (NM_028801.1,308-326).
ccattacaagacctttgat

SEQ ID NO: 584888 - DNA, 19 bp, Mus musculus
  siRNA target sequence for Muc5b (NM_028801.1,344-362).
ccctggcctctgtaactat

SEQ ID NO: 584889 - DNA, 19 bp, Mus musculus
  siRNA target sequence for Muc5b (NM_028801.1,957-975).
gccacttttgccgaatatt

SEQ ID NO: 584890 - DNA, 19 bp, Mus musculus
  siRNA target sequence for Muc5b (NM_028801.1,1020-1038).
catcctgatctctgcaatt

SEQ ID NO: 584891 - DNA, 19 bp, Mus musculus
  siRNA target sequence for Muc5b (NM_028801.1,1023-1041).
cctgatctctgcaattgga

SEQ ID NO: 584892 - DNA, 19 bp, Mus musculus
  siRNA target sequence for Muc5b (NM_028801.1,1222-1240).
cacacggtggccgaattta

SEQ ID NO: 584893 - DNA, 19 bp, Mus musculus
  siRNA target sequence for Muc5b (NM_028801.1,1344-1362).
ggcgggtcccacatcttta

SEQ ID NO: 584894 - DNA, 19 bp, Mus musculus
  siRNA target sequence for Muc5b (NM_028801.1,1363-1381).
cctttgacgagaaactcta

SEQ ID NO: 584895 - DNA, 19 bp, Mus musculus
  siRNA target sequence for Muc5b (NM_028801.1,1500-1518).
gtgacactaaacctcaata

SEQ ID NO: 584896 - DNA, 19 bp, Mus musculus
  siRNA target sequence for Muc5b (NM_028801.1,1502-1520).
gacactaaacctcaatagt

SEQ ID NO: 584897 - DNA, 19 bp, Mus musculus
  siRNA target sequence for Muc5b (NM_028801.1,1627-1645).
ccttcttcatcatagtaca

SEQ ID NO: 584898 - DNA, 19 bp, Mus musculus
  siRNA target sequence for Muc5b (NM_028801.1,1858-1876).
ccaagaacacctatgaaga

SEQ ID NO: 584899 - DNA, 19 bp, Mus musculus
  siRNA target sequence for Muc5b (NM_028801.1,1872-1890).
gaagacccctgctcataca

SEQ ID NO: 584900 - DNA, 19 bp, Mus musculus
  siRNA target sequence for Muc5b (NM_028801.1,1936-1954).
cggaaagctcaggagtttt

SEQ ID NO: 584901 - DNA, 19 bp, Mus musculus
  siRNA target sequence for Muc5b (NM_028801.1,1959-1977).
gcctgccatgccactgtta

SEQ ID NO: 584902 - DNA, 19 bp, Mus musculus
  siRNA target sequence for Muc5b (NM_028801.1,1991-2009).
ctactcgaactgcttgttt

SEQ ID NO: 584903 - DNA, 19 bp, Mus musculus
  siRNA target sequence for Muc5b (NM_028801.1,2052-2070).
gccctgtcctcctatgtgt

SEQ ID NO: 584904 - DNA, 19 bp, Mus musculus
  siRNA target sequence for Muc5b (NM_028801.1,2107-2125).
ggagggacaaagtttgcta

SEQ ID NO: 584905 - DNA, 19 bp, Mus musculus
  siRNA target sequence for Muc5b (NM_028801.1,2343-2361).
gctcccagagaggttgtta

SEQ ID NO: 584906 - DNA, 19 bp, Mus musculus
  siRNA target sequence for Muc5b (NM_028801.1,2373-2391).
gtggtgtgctcgtgtacaa

SEQ ID NO: 584907 - DNA, 19 bp, Mus musculus
  siRNA target sequence for Muc5b (NM_028801.1,2454-2472).
gtctacctggattgtaaca

SEQ ID NO: 584908 - DNA, 19 bp, Mus musculus
  siRNA target sequence for Muc5b (NM_028801.1,2496-2514).
gctgaatgcctcaaaagct

SEQ ID NO: 584909 - DNA, 19 bp, Mus musculus
  siRNA target sequence for Muc5b (NM_028801.1,2594-2612).
gaatgggggctgtattgct

SEQ ID NO: 584910 - DNA, 19 bp, Mus musculus
  siRNA target sequence for Muc5b (NM_028801.1,2619-2637).
gattgcccctgcatacaca

SEQ ID NO: 584911 - DNA, 19 bp, Mus musculus
  siRNA target sequence for Muc5b (NM_028801.1,2634-2652).
cacaatgaggtcacatata

SEQ ID NO: 584912 - DNA, 19 bp, Mus musculus
  siRNA target sequence for Muc5b (NM_028801.1,2670-2688).
cgggtagactgcaataact

SEQ ID NO: 584913 - DNA, 19 bp, Mus musculus
  siRNA target sequence for Muc5b (NM_028801.1,2753-2771).
cggggatggccactttgtt

SEQ ID NO: 584914 - DNA, 19 bp, Mus musculus
  siRNA target sequence for Muc5b (NM_028801.1,2754-2772).
ggggatggccactttgtta

SEQ ID NO: 584915 - DNA, 19 bp, Mus musculus
  siRNA target sequence for Muc5b (NM_028801.1,2782-2800).
gtgaacgctacatctttga

SEQ ID NO: 584916 - DNA, 19 bp, Mus musculus
  siRNA target sequence for Muc5b (NM_028801.1,2799-2817).
gaaggtagctgcgagtata

SEQ ID NO: 584917 - DNA, 19 bp, Mus musculus
  siRNA target sequence for Muc5b (NM_028801.1,2802-2820).
ggtagctgcgagtatacct

SEQ ID NO: 584918 - DNA, 19 bp, Mus musculus
  siRNA target sequence for Muc5b (NM_028801.1,2803-2821).
gtagctgcgagtatacctt

SEQ ID NO: 584919 - DNA, 19 bp, Mus musculus
  siRNA target sequence for Muc5b (NM_028801.1,2839-2857).
gaggcaacaccagtactaa

SEQ ID NO: 584920 - DNA, 19 bp, Mus musculus
  siRNA target sequence for Muc5b (NM_028801.1,2859-2877).
gggaccttccgaattgtca

SEQ ID NO: 584921 - DNA, 19 bp, Mus musculus
  siRNA target sequence for Muc5b (NM_028801.1,3000-3018).
ggagaccctccatacaaga

SEQ ID NO: 584922 - DNA, 19 bp, Mus musculus
  siRNA target sequence for Muc5b (NM_028801.1,3001-3019).
gagaccctccatacaagat

SEQ ID NO: 584923 - DNA, 19 bp, Mus musculus
  siRNA target sequence for Muc5b (NM_028801.1,3003-3021).
gaccctccatacaagatca

SEQ ID NO: 584924 - DNA, 19 bp, Mus musculus
  siRNA target sequence for Muc5b (NM_028801.1,3006-3024).
cctccatacaagatcagat

SEQ ID NO: 584925 - DNA, 19 bp, Mus musculus
  siRNA target sequence for Muc5b (NM_028801.1,3007-3025).
ctccatacaagatcagatt

SEQ ID NO: 584926 - DNA, 19 bp, Mus musculus
  siRNA target sequence for Muc5b (NM_028801.1,3010-3028).
catacaagatcagattcat

SEQ ID NO: 584927 - DNA, 19 bp, Mus musculus
  siRNA target sequence for Muc5b (NM_028801.1,3102-3120).
cggctgcagcagcattata

SEQ ID NO: 584928 - DNA, 19 bp, Mus musculus
  siRNA target sequence for Muc5b (NM_028801.1,3358-3376).
ctcaggttgactctacaaa

SEQ ID NO: 584929 - DNA, 19 bp, Mus musculus
  siRNA target sequence for Muc5b (NM_028801.1,3508-3526).
cggacatctgccctctttt

SEQ ID NO: 584930 - DNA, 19 bp, Mus musculus
  siRNA target sequence for Muc5b (NM_028801.1,3855-3873).
gagggccgtacctacaact

SEQ ID NO: 584931 - DNA, 19 bp, Mus musculus
  siRNA target sequence for Muc5b (NM_028801.1,3858-3876).
ggccgtacctacaactaca

SEQ ID NO: 584932 - DNA, 19 bp, Mus musculus
  siRNA target sequence for Muc5b (NM_028801.1,3859-3877).
gccgtacctacaactacaa

SEQ ID NO: 584933 - DNA, 19 bp, Mus musculus
  siRNA target sequence for Muc5b (NM_028801.1,3862-3880).
gtacctacaactacaatga

SEQ ID NO: 584934 - DNA, 19 bp, Mus musculus
  siRNA target sequence for Muc5b (NM_028801.1,3905-3923).
ccttggcgcctgcttagta

SEQ ID NO: 584935 - DNA, 19 bp, Mus musculus
  siRNA target sequence for Muc5b (NM_028801.1,3983-4001).
gtctaccacaccattcaca

SEQ ID NO: 584936 - DNA, 19 bp, Mus musculus
  siRNA target sequence for Muc5b (NM_028801.1,4054-4072).
ctaccgtgtgtgttcatga

SEQ ID NO: 584937 - DNA, 19 bp, Mus musculus
  siRNA target sequence for Muc5b (NM_028801.1,4074-4092).
gtctgccaatggtccattt

SEQ ID NO: 584938 - DNA, 19 bp, Mus musculus
  siRNA target sequence for Muc5b (NM_028801.1,4084-4102).
ggtccatttggtatgatga

SEQ ID NO: 584939 - DNA, 19 bp, Mus musculus
  siRNA target sequence for Muc5b (NM_028801.1,4200-4218).
gaatgccgtgcagtgaaat

SEQ ID NO: 584940 - DNA, 19 bp, Mus musculus
  siRNA target sequence for Muc5b (NM_028801.1,4309-4327).
cgctgtgccacgactatga

SEQ ID NO: 584941 - DNA, 19 bp, Mus musculus
  siRNA target sequence for Muc5b (NM_028801.1,4422-4440).
ccctcttcgcctacactta

SEQ ID NO: 584942 - DNA, 19 bp, Mus musculus
  siRNA target sequence for Muc5b (NM_028801.1,4493-4511).
gacatcagtggataaaagt

SEQ ID NO: 584943 - DNA, 19 bp, Mus musculus
  siRNA target sequence for Muc5b (NM_028801.1,4528-4546).
cagtgccattcacttcaaa

SEQ ID NO: 584944 - DNA, 19 bp, Mus musculus
  siRNA target sequence for Muc5b (NM_028801.1,4554-4572).
ctcacttcaacttctatgt

SEQ ID NO: 584945 - DNA, 19 bp, Mus musculus
  siRNA target sequence for Muc5b (NM_028801.1,4601-4619).
ccctacctggactacaaca

SEQ ID NO: 584946 - DNA, 19 bp, Mus musculus
  siRNA target sequence for Muc5b (NM_028801.1,4603-4621).
ctacctggactacaacatt

SEQ ID NO: 584947 - DNA, 19 bp, Mus musculus
  siRNA target sequence for Muc5b (NM_028801.1,4606-4624).
cctggactacaacattgaa

SEQ ID NO: 584948 - DNA, 19 bp, Mus musculus
  siRNA target sequence for Muc5b (NM_028801.1,4626-4644).
gcgaccgacgagaacacaa

SEQ ID NO: 584949 - DNA, 19 bp, Mus musculus
  siRNA target sequence for Muc5b (NM_028801.1,4627-4645).
cgaccgacgagaacacaat

SEQ ID NO: 584950 - DNA, 19 bp, Mus musculus
  siRNA target sequence for Muc5b (NM_028801.1,4631-4649).
cgacgagaacacaatgctt

SEQ ID NO: 584951 - DNA, 19 bp, Mus musculus
  siRNA target sequence for Muc5b (NM_028801.1,4632-4650).
gacgagaacacaatgctta

SEQ ID NO: 584952 - DNA, 19 bp, Mus musculus
  siRNA target sequence for Muc5b (NM_028801.1,4654-4672).
cccggacaacagcagtatt

SEQ ID NO: 584953 - DNA, 19 bp, Mus musculus
  siRNA target sequence for Muc5b (NM_028801.1,4658-4676).
gacaacagcagtattcact

SEQ ID NO: 584954 - DNA, 19 bp, Mus musculus
  siRNA target sequence for Muc5b (NM_028801.1,4680-4698).
caaaccaggtccacttcaa

SEQ ID NO: 584955 - DNA, 19 bp, Mus musculus
  siRNA target sequence for Muc5b (NM_028801.1,7145-7163).
cagtccctatgctaccaat

SEQ ID NO: 584956 - DNA, 19 bp, Mus musculus
  siRNA target sequence for Muc5b (NM_028801.1,8024-8042).
cacctccacaggctgtaaa

SEQ ID NO: 584957 - DNA, 19 bp, Mus musculus
  siRNA target sequence for Muc5b (NM_028801.1,8027-8045).
ctccacaggctgtaaatct

SEQ ID NO: 584958 - DNA, 19 bp, Mus musculus
  siRNA target sequence for Muc5b (NM_028801.1,8030-8048).
cacaggctgtaaatctcaa

SEQ ID NO: 584959 - DNA, 19 bp, Mus musculus
  siRNA target sequence for Muc5b (NM_028801.1,8111-8129).
cgagacctactatcatatt

SEQ ID NO: 584960 - DNA, 19 bp, Mus musculus
  siRNA target sequence for Muc5b (NM_028801.1,8140-8158).
caggtatcaagatatgcaa

SEQ ID NO: 584961 - DNA, 19 bp, Mus musculus
  siRNA target sequence for Muc5b (NM_028801.1,8186-8204).
cgtcctctttcccaacata

SEQ ID NO: 584962 - DNA, 19 bp, Mus musculus
  siRNA target sequence for Muc5b (NM_028801.1,8187-8205).
gtcctctttcccaacatat

SEQ ID NO: 584963 - DNA, 19 bp, Mus musculus
  siRNA target sequence for Muc5b (NM_028801.1,8190-8208).
ctctttcccaacatatcct

SEQ ID NO: 584964 - DNA, 19 bp, Mus musculus
  siRNA target sequence for Muc5b (NM_028801.1,8220-8238).
ggccaggaggtggtttgta

SEQ ID NO: 584965 - DNA, 19 bp, Mus musculus
  siRNA target sequence for Muc5b (NM_028801.1,8222-8240).
ccaggaggtggtttgtaat

SEQ ID NO: 584966 - DNA, 19 bp, Mus musculus
  siRNA target sequence for Muc5b (NM_028801.1,8278-8296).
gtgacaaccaaatctgttt

SEQ ID NO: 584967 - DNA, 19 bp, Mus musculus
  siRNA target sequence for Muc5b (NM_028801.1,8328-8346).
gaagataccagctgtatca

SEQ ID NO: 584968 - DNA, 19 bp, Mus musculus
  siRNA target sequence for Muc5b (NM_028801.1,8403-8421).
gtctccacgtctacaacaa

SEQ ID NO: 584969 - DNA, 19 bp, Mus musculus
  siRNA target sequence for Muc5b (NM_028801.1,8439-8457).
gagccaataccctcaactt

SEQ ID NO: 584970 - DNA, 19 bp, Mus musculus
  siRNA target sequence for Muc5b (NM_028801.1,8448-8466).
ccctcaacttcattcacaa

SEQ ID NO: 584971 - DNA, 19 bp, Mus musculus
  siRNA target sequence for Muc5b (NM_028801.1,8603-8621).
gccacattcaggtaaacca

SEQ ID NO: 584972 - DNA, 19 bp, Mus musculus
  siRNA target sequence for Muc5b (NM_028801.1,8604-8622).
ccacattcaggtaaaccaa

SEQ ID NO: 584973 - DNA, 19 bp, Mus musculus
  siRNA target sequence for Muc5b (NM_028801.1,8613-8631).
ggtaaaccaagcacaagtt

SEQ ID NO: 584974 - DNA, 19 bp, Mus musculus
  siRNA target sequence for Muc5b (NM_028801.1,8687-8705).
cagacagttccctagaaca

SEQ ID NO: 584975 - DNA, 19 bp, Mus musculus
  siRNA target sequence for Muc5b (NM_028801.1,8691-8709).
cagttccctagaacaaaaa

SEQ ID NO: 584976 - DNA, 19 bp, Mus musculus
  siRNA target sequence for Muc5b (NM_028801.1,8771-8789).
catttctaccacaatgaca

SEQ ID NO: 584977 - DNA, 19 bp, Mus musculus
  siRNA target sequence for Muc5b (NM_028801.1,8827-8845).
ccaaaagcaactctatgtt

SEQ ID NO: 584978 - DNA, 19 bp, Mus musculus
  siRNA target sequence for Muc5b (NM_028801.1,8890-8908).
gtggtagtcagataagcaa

SEQ ID NO: 584979 - DNA, 19 bp, Mus musculus
  siRNA target sequence for Muc5b (NM_028801.1,8896-8914).
gtcagataagcaagtcata

SEQ ID NO: 584980 - DNA, 19 bp, Mus musculus
  siRNA target sequence for Muc5b (NM_028801.1,10585-10603).
ggagcgtctcctcaattca

SEQ ID NO: 584981 - DNA, 19 bp, Mus musculus
  siRNA target sequence for Muc5b (NM_028801.1,10586-10604).
gagcgtctcctcaattcat

SEQ ID NO: 584982 - DNA, 19 bp, Mus musculus
  siRNA target sequence for Muc5b (NM_028801.1,10589-10607).
cgtctcctcaattcataca

SEQ ID NO: 584983 - DNA, 19 bp, Mus musculus
  siRNA target sequence for Muc5b (NM_028801.1,10590-10608).
gtctcctcaattcatacaa

SEQ ID NO: 584984 - DNA, 19 bp, Mus musculus
  siRNA target sequence for Muc5b (NM_028801.1,10592-10610).
ctcctcaattcatacaaca

SEQ ID NO: 584985 - DNA, 19 bp, Mus musculus
  siRNA target sequence for Muc5b (NM_028801.1,10739-10757).
cagcctagagtctactaca

SEQ ID NO: 584986 - DNA, 19 bp, Mus musculus
  siRNA target sequence for Muc5b (NM_028801.1,10795-10813).
ctaccctaccagtaactgt

SEQ ID NO: 584987 - DNA, 19 bp, Mus musculus
  siRNA target sequence for Muc5b (NM_028801.1,10806-10824).
gtaactgtgactaatgcta

SEQ ID NO: 584988 - DNA, 19 bp, Mus musculus
  siRNA target sequence for Muc5b (NM_028801.1,10861-10879).
gtaagtggactgaatggtt

SEQ ID NO: 584989 - DNA, 19 bp, Mus musculus
  siRNA target sequence for Muc5b (NM_028801.1,10867-10885).
ggactgaatggtttgatgt

SEQ ID NO: 584990 - DNA, 19 bp, Mus musculus
  siRNA target sequence for Muc5b (NM_028801.1,10895-10913).
gacctcgggatcggtaaaa

SEQ ID NO: 584991 - DNA, 19 bp, Mus musculus
  siRNA target sequence for Muc5b (NM_028801.1,10968-10986).
gcaccagagaaaattgagt

SEQ ID NO: 584992 - DNA, 19 bp, Mus musculus
  siRNA target sequence for Muc5b (NM_028801.1,11003-11021).
ccctgcagtgagcattgat

SEQ ID NO: 584993 - DNA, 19 bp, Mus musculus
  siRNA target sequence for Muc5b (NM_028801.1,11005-11023).
ctgcagtgagcattgataa

SEQ ID NO: 584994 - DNA, 19 bp, Mus musculus
  siRNA target sequence for Muc5b (NM_028801.1,11008-11026).
cagtgagcattgataaggt

SEQ ID NO: 584995 - DNA, 19 bp, Mus musculus
  siRNA target sequence for Muc5b (NM_028801.1,11079-11097).
gaccagaaagatgatttca

SEQ ID NO: 584996 - DNA, 19 bp, Mus musculus
  siRNA target sequence for Muc5b (NM_028801.1,11126-11144).
gctttgctgtgatgactat

SEQ ID NO: 584997 - DNA, 19 bp, Mus musculus
  siRNA target sequence for Muc5b (NM_028801.1,11403-11421).
cgtgaggttggctacatct

SEQ ID NO: 584998 - DNA, 19 bp, Mus musculus
  siRNA target sequence for Muc5b (NM_028801.1,11404-11422).
gtgaggttggctacatctt

SEQ ID NO: 584999 - DNA, 19 bp, Mus musculus
  siRNA target sequence for Muc5b (NM_028801.1,11406-11424).
gaggttggctacatcttct

SEQ ID NO: 585000 - DNA, 19 bp, Mus musculus
  siRNA target sequence for Muc5b (NM_028801.1,11471-11489).
caggcccctggaaactcta

SEQ ID NO: 585001 - DNA, 19 bp, Mus musculus
  siRNA target sequence for Muc5b (NM_028801.1,11511-11529).
gtgcgatttgggctgatat

SEQ ID NO: 585002 - DNA, 19 bp, Mus musculus
  siRNA target sequence for Muc5b (NM_028801.1,11514-11532).
cgatttgggctgatatgca

SEQ ID NO: 585003 - DNA, 19 bp, Mus musculus
  siRNA target sequence for Muc5b (NM_028801.1,11520-11538).
gggctgatatgcaaaaata

SEQ ID NO: 585004 - DNA, 19 bp, Mus musculus
  siRNA target sequence for Muc5b (NM_028801.1,11657-11675).
ctctcacctgccatctact

SEQ ID NO: 585005 - DNA, 19 bp, Mus musculus
  siRNA target sequence for Muc5b (NM_028801.1,11761-11779).
ctcacacctccacaatgtt

SEQ ID NO: 585006 - DNA, 19 bp, Mus musculus
  siRNA target sequence for Muc5b (NM_028801.1,11843-11861).
cccttacacccccaaagtt

SEQ ID NO: 585007 - DNA, 19 bp, Mus musculus
  siRNA target sequence for Muc5b (NM_028801.1,11844-11862).
ccttacacccccaaagttt

SEQ ID NO: 585008 - DNA, 19 bp, Mus musculus
  siRNA target sequence for Muc5b (NM_028801.1,11977-11995).
catttgggcaactgttctt

SEQ ID NO: 585009 - DNA, 19 bp, Mus musculus
  siRNA target sequence for Muc5b (NM_028801.1,11997-12015).
cctggggatatcatctaca

SEQ ID NO: 585010 - DNA, 19 bp, Mus musculus
  siRNA target sequence for Muc5b (NM_028801.1,11998-12016).
ctggggatatcatctacaa

SEQ ID NO: 585011 - DNA, 19 bp, Mus musculus
  siRNA target sequence for Muc5b (NM_028801.1,12001-12019).
gggatatcatctacaataa

SEQ ID NO: 585012 - DNA, 19 bp, Mus musculus
  siRNA target sequence for Muc5b (NM_028801.1,12003-12021).
gatatcatctacaataaga

SEQ ID NO: 585013 - DNA, 19 bp, Mus musculus
  siRNA target sequence for Muc5b (NM_028801.1,12048-12066).
gccatctgcaaccagtatt

SEQ ID NO: 585014 - DNA, 19 bp, Mus musculus
  siRNA target sequence for Muc5b (NM_028801.1,12050-12068).
catctgcaaccagtattgt

SEQ ID NO: 585015 - DNA, 19 bp, Mus musculus
  siRNA target sequence for Muc5b (NM_028801.1,12221-12239).
caggtgccagggcaacaat

SEQ ID NO: 585016 - DNA, 19 bp, Mus musculus
  siRNA target sequence for Muc5b (NM_028801.1,12224-12242).
gtgccagggcaacaatcaa

SEQ ID NO: 585017 - DNA, 19 bp, Mus musculus
  siRNA target sequence for Muc5b (NM_028801.1,12226-12244).
gccagggcaacaatcaaat

SEQ ID NO: 585018 - DNA, 19 bp, Mus musculus
  siRNA target sequence for Muc5b (NM_028801.1,12230-12248).
gggcaacaatcaaatcatt

SEQ ID NO: 585019 - DNA, 19 bp, Mus musculus
  siRNA target sequence for Muc5b (NM_028801.1,12290-12308).
ccgtcacttgcctatcaaa

SEQ ID NO: 585020 - DNA, 19 bp, Mus musculus
  siRNA target sequence for Muc5b (NM_028801.1,12292-12310).
gtcacttgcctatcaaagt

SEQ ID NO: 585021 - DNA, 19 bp, Mus musculus
  siRNA target sequence for Muc5b (NM_028801.1,12294-12312).
cacttgcctatcaaagtgt

SEQ ID NO: 585022 - DNA, 19 bp, Mus musculus
  siRNA target sequence for Muc5b (NM_028801.1,12393-12411).
gatggcacctcctatactt

SEQ ID NO: 585023 - DNA, 19 bp, Mus musculus
  siRNA target sequence for Muc5b (NM_028801.1,12403-12421).
cctatactttcctggataa

SEQ ID NO: 585024 - DNA, 19 bp, Mus musculus
  siRNA target sequence for Muc5b (NM_028801.1,12494-12512).
ctgtggggctaccacaaat

SEQ ID NO: 585025 - DNA, 19 bp, Mus musculus
  siRNA target sequence for Muc5b (NM_028801.1,12498-12516).
ggggctaccacaaatgtca

SEQ ID NO: 585026 - DNA, 19 bp, Mus musculus
  siRNA target sequence for Muc5b (NM_028801.1,12529-12547).
gtgccctcggtgtgtacta

SEQ ID NO: 585027 - DNA, 19 bp, Mus musculus
  siRNA target sequence for Muc5b (NM_028801.1,12531-12549).
gccctcggtgtgtactaca

SEQ ID NO: 585028 - DNA, 19 bp, Mus musculus
  siRNA target sequence for Muc5b (NM_028801.1,12532-12550).
ccctcggtgtgtactacaa

SEQ ID NO: 585029 - DNA, 19 bp, Mus musculus
  siRNA target sequence for Muc5b (NM_028801.1,12534-12552).
ctcggtgtgtactacaact

SEQ ID NO: 585030 - DNA, 19 bp, Mus musculus
  siRNA target sequence for Muc5b (NM_028801.1,12551-12569).
ctccatggagattatcctt

SEQ ID NO: 585031 - DNA, 19 bp, Mus musculus
  siRNA target sequence for Muc5b (NM_028801.1,12618-12636).
gaccaaatgtggatacgat

SEQ ID NO: 585032 - DNA, 19 bp, Mus musculus
  siRNA target sequence for Muc5b (NM_028801.1,12633-12651).
cgatcaggcttcagtaaga

SEQ ID NO: 585033 - DNA, 19 bp, Mus musculus
  siRNA target sequence for Muc5b (NM_028801.1,12682-12700).
ccacaatgagtgtcaacat

SEQ ID NO: 585034 - DNA, 19 bp, Mus musculus
  siRNA target sequence for Muc5b (NM_028801.1,12735-12753).
gacatcttccagatatggt

SEQ ID NO: 585035 - DNA, 19 bp, Mus musculus
  siRNA target sequence for Muc5b (NM_028801.1,12751-12769).
ggttgccctacagatattt

SEQ ID NO: 585036 - DNA, 19 bp, Mus musculus
  siRNA target sequence for Muc5b (NM_028801.1,12834-12852).
cctgatggcaccatagctt

SEQ ID NO: 585037 - DNA, 19 bp, Mus musculus
  siRNA target sequence for Muc5b (NM_028801.1,13088-13106).
ctgcaatgccaatattact

SEQ ID NO: 585038 - DNA, 19 bp, Mus musculus
  siRNA target sequence for Muc5b (NM_028801.1,13090-13108).
gcaatgccaatattactga

SEQ ID NO: 585039 - DNA, 19 bp, Mus musculus
  siRNA target sequence for Muc5b (NM_028801.1,13429-13447).
gtcaggcctgtgtatgtga

SEQ ID NO: 585040 - DNA, 19 bp, Mus musculus
  siRNA target sequence for Muc5b (NM_028801.1,13569-13587).
cccgagacactgtgtgttt

SEQ ID NO: 585041 - DNA, 19 bp, Mus musculus
  siRNA target sequence for Muc5b (NM_028801.1,13574-13592).
gacactgtgtgtttgcaat

SEQ ID NO: 585042 - DNA, 19 bp, Mus musculus
  siRNA target sequence for Muc5b (NM_028801.1,13643-13661).
ggtccagacccatgagaat

SEQ ID NO: 585043 - DNA, 19 bp, Mus musculus
  siRNA target sequence for Muc5b (NM_028801.1,13689-13707).
cgacctaagctgtgtacat

SEQ ID NO: 585044 - DNA, 19 bp, Mus musculus
  siRNA target sequence for Muc5b (NM_028801.1,13690-13708).
gacctaagctgtgtacata

SEQ ID NO: 585045 - DNA, 19 bp, Mus musculus
  siRNA target sequence for Muc5b (NM_028801.1,13692-13710).
cctaagctgtgtacataca

SEQ ID NO: 585046 - DNA, 19 bp, Mus musculus
  siRNA target sequence for Muc5b (NM_028801.1,13693-13711).
ctaagctgtgtacatacaa

SEQ ID NO: 585047 - DNA, 19 bp, Mus musculus
  siRNA target sequence for Muc5b (NM_028801.1,13834-13852).
gtccccagggcttcaagta

SEQ ID NO: 585048 - DNA, 19 bp, Mus musculus
  siRNA target sequence for Muc5b (NM_028801.1,13919-13937).
cgcggtacagcccaatgaa

SEQ ID NO: 585049 - DNA, 19 bp, Mus musculus
  siRNA target sequence for Muc5b (NM_028801.1,13966-13984).
gcactgcataccactgtat

SEQ ID NO: 585050 - DNA, 19 bp, Mus musculus
  siRNA target sequence for Muc5b (NM_028801.1,14021-14039).
cacatcttgccctgatgta

SEQ ID NO: 585051 - DNA, 19 bp, Mus musculus
  siRNA target sequence for Muc5b (NM_028801.1,14026-14044).
cttgccctgatgtatccaa

SEQ ID NO: 585052 - DNA, 19 bp, Mus musculus
  siRNA target sequence for Muc5b (NM_028801.1,14031-14049).
cctgatgtatccaactgta

SEQ ID NO: 585053 - DNA, 19 bp, Mus musculus
  siRNA target sequence for Muc5b (NM_028801.1,14047-14065).
gtacgggaaccctaaggaa

SEQ ID NO: 585054 - DNA, 19 bp, Mus musculus
  siRNA target sequence for Muc5b (NM_028801.1,14075-14093).
ctgttactcctgtgaaaaa

SEQ ID NO: 585055 - DNA, 19 bp, Mus musculus
  siRNA target sequence for Muc5b (NM_028801.1,14088-14106).
gaaaaagaggactcaagta

SEQ ID NO: 585056 - DNA, 19 bp, Mus musculus
  siRNA target sequence for Muc5b (NM_028801.1,14107-14125).
cctgtcaagtgcacgtaaa

SEQ ID NO: 585057 - DNA, 19 bp, Mus musculus
  siRNA target sequence for Muc5b (NM_028801.1,14128-14146).
cgactgtcttgcggtataa

SEQ ID NO: 585058 - DNA, 19 bp, Mus musculus
  siRNA target sequence for Muc5b (NM_028801.1,14183-14201).
gggttcctgctctggaata

SEQ ID NO: 585059 - DNA, 19 bp, Mus musculus
  siRNA target sequence for Muc5b (NM_028801.1,14268-14286).
catgatgtagctgtaacta

SEQ ID NO: 585060 - DNA, 19 bp, Mus musculus
  siRNA target sequence for Muc5b (NM_028801.1,14307-14325).
gtcatccagcacacctata

SEQ ID NO: 585061 - DNA, 19 bp, Mus musculus
  siRNA target sequence for Muc5b (NM_028801.1,14369-14387).
gcctgggacttccatgatt

SEQ ID NO: 585062 - DNA, 19 bp, Mus musculus
  siRNA target sequence for Psme3 (NM_011192.2,307-325).
gttactagaacttgatagt

SEQ ID NO: 585063 - DNA, 19 bp, Mus musculus
  siRNA target sequence for Psme3 (NM_011192.2,311-329).
ctagaacttgatagttttt

SEQ ID NO: 585064 - DNA, 19 bp, Mus musculus
  siRNA target sequence for Psme3 (NM_011192.2,324-342).
gttttttgaaggaaccaat

SEQ ID NO: 585065 - DNA, 19 bp, Mus musculus
  siRNA target sequence for Psme3 (NM_011192.2,454-472).
gcgcaggttggatgaatgt

SEQ ID NO: 585066 - DNA, 19 bp, Mus musculus
  siRNA target sequence for Psme3 (NM_011192.2,489-507).
gaaccaaggtgtttgtgat

SEQ ID NO: 585067 - DNA, 19 bp, Mus musculus
  siRNA target sequence for Psme3 (NM_011192.2,508-526).
gcccaatgggatgttgaaa

SEQ ID NO: 585068 - DNA, 19 bp, Mus musculus
  siRNA target sequence for Psme3 (NM_011192.2,509-527).
cccaatgggatgttgaaaa

SEQ ID NO: 585069 - DNA, 19 bp, Mus musculus
  siRNA target sequence for Psme3 (NM_011192.2,535-553).
gcagcttgtggacattatt

SEQ ID NO: 585070 - DNA, 19 bp, Mus musculus
  siRNA target sequence for Psme3 (NM_011192.2,544-562).
ggacattattgagaaagta

SEQ ID NO: 585071 - DNA, 19 bp, Mus musculus
  siRNA target sequence for Psme3 (NM_011192.2,622-640).
gttgattcccagaatagaa

SEQ ID NO: 585072 - DNA, 19 bp, Mus musculus
  siRNA target sequence for Psme3 (NM_011192.2,625-643).
gattcccagaatagaagat

SEQ ID NO: 585073 - DNA, 19 bp, Mus musculus
  siRNA target sequence for Psme3 (NM_011192.2,649-667).
caacttcggggtatcaatt

SEQ ID NO: 585074 - DNA, 19 bp, Mus musculus
  siRNA target sequence for Psme3 (NM_011192.2,673-691).
ggaaacagttgctgaacta

SEQ ID NO: 585075 - DNA, 19 bp, Mus musculus
  siRNA target sequence for Psme3 (NM_011192.2,805-823).
ccgcactgtcacagagatt

SEQ ID NO: 585076 - DNA, 19 bp, Mus musculus
  siRNA target sequence for Rbp3 (NM_015745.1,204-222).
gaacctgatgggaatgcaa

SEQ ID NO: 585077 - DNA, 19 bp, Mus musculus
  siRNA target sequence for Rbp3 (NM_015745.1,323-341).
gtgacccacgactcttcat

SEQ ID NO: 585078 - DNA, 19 bp, Mus musculus
  siRNA target sequence for Rbp3 (NM_015745.1,328-346).
ccacgactcttcatctctt

SEQ ID NO: 585079 - DNA, 19 bp, Mus musculus
  siRNA target sequence for Rbp3 (NM_015745.1,329-347).
cacgactcttcatctctta

SEQ ID NO: 585080 - DNA, 19 bp, Mus musculus
  siRNA target sequence for Rbp3 (NM_015745.1,393-411).
caacctcacccgagaagaa

SEQ ID NO: 585081 - DNA, 19 bp, Mus musculus
  siRNA target sequence for Rbp3 (NM_015745.1,509-527).
gcgagctgggggagttctt

SEQ ID NO: 585082 - DNA, 19 bp, Mus musculus
  siRNA target sequence for Rbp3 (NM_015745.1,510-528).
cgagctgggggagttctta

SEQ ID NO: 585083 - DNA, 19 bp, Mus musculus
  siRNA target sequence for Rbp3 (NM_015745.1,721-739).
gtcctcggggagagataca

SEQ ID NO: 585084 - DNA, 19 bp, Mus musculus
  siRNA target sequence for Rbp3 (NM_015745.1,723-741).
cctcggggagagatacagt

SEQ ID NO: 585085 - DNA, 19 bp, Mus musculus
  siRNA target sequence for Rbp3 (NM_015745.1,1086-1104).
ccaggactattacacatta

SEQ ID NO: 585086 - DNA, 19 bp, Mus musculus
  siRNA target sequence for Rbp3 (NM_015745.1,1273-1291).
gagactgggcctaatgagt

SEQ ID NO: 585087 - DNA, 19 bp, Mus musculus
  siRNA target sequence for Rbp3 (NM_015745.1,1389-1407).
ctacctgcgctttgataga

SEQ ID NO: 585088 - DNA, 19 bp, Mus musculus
  siRNA target sequence for Rbp3 (NM_015745.1,1392-1410).
cctgcgctttgatagattt

SEQ ID NO: 585089 - DNA, 19 bp, Mus musculus
  siRNA target sequence for Rbp3 (NM_015745.1,1395-1413).
gcgctttgatagatttgca

SEQ ID NO: 585090 - DNA, 19 bp, Mus musculus
  siRNA target sequence for Rbp3 (NM_015745.1,1584-1602).
gctctttaccacctatgat

SEQ ID NO: 585091 - DNA, 19 bp, Mus musculus
  siRNA target sequence for Rbp3 (NM_015745.1,1600-1618).
gatcgccgcaccaacatca

SEQ ID NO: 585092 - DNA, 19 bp, Mus musculus
  siRNA target sequence for Rbp3 (NM_015745.1,1648-1666).
ctaggccaacgctatggta

SEQ ID NO: 585093 - DNA, 19 bp, Mus musculus
  siRNA target sequence for Rbp3 (NM_015745.1,1706-1724).
ccacagctgccgaagagtt

SEQ ID NO: 585094 - DNA, 19 bp, Mus musculus
  siRNA target sequence for Rbp3 (NM_015745.1,1842-1860).
cacagtaccggtacttact

SEQ ID NO: 585095 - DNA, 19 bp, Mus musculus
  siRNA target sequence for Rbp3 (NM_015745.1,1844-1862).
cagtaccggtacttacttt

SEQ ID NO: 585096 - DNA, 19 bp, Mus musculus
  siRNA target sequence for Rbp3 (NM_015745.1,1846-1864).
gtaccggtacttactttta

SEQ ID NO: 585097 - DNA, 19 bp, Mus musculus
  siRNA target sequence for Rbp3 (NM_015745.1,2004-2022).
cctgctggaggctcactat

SEQ ID NO: 585098 - DNA, 19 bp, Mus musculus
  siRNA target sequence for Rbp3 (NM_015745.1,2051-2069).
gagctctcctgcaatctaa

SEQ ID NO: 585099 - DNA, 19 bp, Mus musculus
  siRNA target sequence for Rbp3 (NM_015745.1,2054-2072).
ctctcctgcaatctaagtt

SEQ ID NO: 585100 - DNA, 19 bp, Mus musculus
  siRNA target sequence for Rbp3 (NM_015745.1,2160-2178).
ccgcctgctggtattccat

SEQ ID NO: 585101 - DNA, 19 bp, Mus musculus
  siRNA target sequence for Rbp3 (NM_015745.1,2161-2179).
cgcctgctggtattccata

SEQ ID NO: 585102 - DNA, 19 bp, Mus musculus
  siRNA target sequence for Rbp3 (NM_015745.1,2241-2259).
ggaactctcctatctcata

SEQ ID NO: 585103 - DNA, 19 bp, Mus musculus
  siRNA target sequence for Rbp3 (NM_015745.1,2323-2341).
gctgagctagagacagtaa

SEQ ID NO: 585104 - DNA, 19 bp, Mus musculus
  siRNA target sequence for Rbp3 (NM_015745.1,2449-2467).
cctctactctgctcctatt

SEQ ID NO: 585105 - DNA, 19 bp, Mus musculus
  siRNA target sequence for Rbp3 (NM_015745.1,2450-2468).
ctctactctgctcctattt

SEQ ID NO: 585106 - DNA, 19 bp, Mus musculus
  siRNA target sequence for Rbp3 (NM_015745.1,2557-2575).
gctgggcaacgctatggat

SEQ ID NO: 585107 - DNA, 19 bp, Mus musculus
  siRNA target sequence for Rbp3 (NM_015745.1,2567-2585).
gctatggatcccataagga

SEQ ID NO: 585108 - DNA, 19 bp, Mus musculus
  siRNA target sequence for Rbp3 (NM_015745.1,2573-2591).
gatcccataaggacctata

SEQ ID NO: 585109 - DNA, 19 bp, Mus musculus
  siRNA target sequence for Rbp3 (NM_015745.1,2576-2594).
cccataaggacctatacat

SEQ ID NO: 585110 - DNA, 19 bp, Mus musculus
  siRNA target sequence for Rbp3 (NM_015745.1,2903-2921).
ggaaactagtggctgataa

SEQ ID NO: 585111 - DNA, 19 bp, Mus musculus
  siRNA target sequence for Rbp3 (NM_015745.1,2971-2989).
ctgcagagccgctatgcaa

SEQ ID NO: 585112 - DNA, 19 bp, Mus musculus
  siRNA target sequence for Rbp3 (NM_015745.1,3026-3044).
gggcagatctgcaaatact

SEQ ID NO: 585113 - DNA, 19 bp, Mus musculus
  siRNA target sequence for Rbp3 (NM_015745.1,3148-3166).
gacctgatcaagttttcct

SEQ ID NO: 585114 - DNA, 19 bp, Mus musculus
  siRNA target sequence for Rbp3 (NM_015745.1,3418-3436).
gactcggtcagcgaacttt

SEQ ID NO: 585115 - DNA, 19 bp, Mus musculus
  siRNA target sequence for Rbp3 (NM_015745.1,3450-3468).
gctcacaggtgaacgatat

SEQ ID NO: 585116 - DNA, 19 bp, Mus musculus
  siRNA target sequence for Rbp3 (NM_015745.1,3520-3538).
gccgaggaatttacttaca

SEQ ID NO: 585117 - DNA, 19 bp, Mus musculus
  siRNA target sequence for Rbp3 (NM_015745.1,3521-3539).
ccgaggaatttacttacat

SEQ ID NO: 585118 - DNA, 19 bp, Mus musculus
  siRNA target sequence for Rbp3 (NM_015745.1,3523-3541).
gaggaatttacttacatca

SEQ ID NO: 585119 - DNA, 19 bp, Mus musculus
  siRNA target sequence for Rbp3 (NM_015745.1,3693-3711).
ggtgggcgtgacacctaat

SEQ ID NO: 585120 - DNA, 19 bp, Mus musculus
  siRNA target sequence for Rbp3 (NM_015745.1,3696-3714).
gggcgtgacacctaatgta

SEQ ID NO: 585121 - DNA, 19 bp, Mus musculus
  siRNA target sequence for Rbp3 (NM_015745.1,3698-3716).
gcgtgacacctaatgtagt

SEQ ID NO: 585122 - DNA, 19 bp, Mus musculus
  siRNA target sequence for Rbp3 (NM_015745.1,3699-3717).
cgtgacacctaatgtagtt

SEQ ID NO: 585123 - DNA, 19 bp, Mus musculus
  siRNA target sequence for Rnf128 (NM_023270.3,474-492).
gtaacccgcacaccaattt

SEQ ID NO: 585124 - DNA, 19 bp, Mus musculus
  siRNA target sequence for Rnf128 (NM_023270.3,512-530).
gggagcacggtgcaagtat

SEQ ID NO: 585125 - DNA, 19 bp, Mus musculus
  siRNA target sequence for Rnf128 (NM_023270.3,606-624).
cttctggagcggtcatctt

SEQ ID NO: 585126 - DNA, 19 bp, Mus musculus
  siRNA target sequence for Rnf128 (NM_023270.3,611-629).
ggagcggtcatctttaact

SEQ ID NO: 585127 - DNA, 19 bp, Mus musculus
  siRNA target sequence for Rnf128 (NM_023270.3,741-759).
gaggcatccaagtcacaat

SEQ ID NO: 585128 - DNA, 19 bp, Mus musculus
  siRNA target sequence for Rnf128 (NM_023270.3,763-781).
catcgaagtagggaaaaaa

SEQ ID NO: 585129 - DNA, 19 bp, Mus musculus
  siRNA target sequence for Rnf128 (NM_023270.3,788-806).
ccttgggtgaatcattatt

SEQ ID NO: 585130 - DNA, 19 bp, Mus musculus
  siRNA target sequence for Rnf128 (NM_023270.3,792-810).
gggtgaatcattattcaat

SEQ ID NO: 585131 - DNA, 19 bp, Mus musculus
  siRNA target sequence for Rnf128 (NM_023270.3,848-866).
gcaaccgtgggctatttca

SEQ ID NO: 585132 - DNA, 19 bp, Mus musculus
  siRNA target sequence for Rnf128 (NM_023270.3,849-867).
caaccgtgggctatttcat

SEQ ID NO: 585133 - DNA, 19 bp, Mus musculus
  siRNA target sequence for Rnf128 (NM_023270.3,853-871).
cgtgggctatttcatcttt

SEQ ID NO: 585134 - DNA, 19 bp, Mus musculus
  siRNA target sequence for Rnf128 (NM_023270.3,876-894).
ctgctcgaagattacgaaa

SEQ ID NO: 585135 - DNA, 19 bp, Mus musculus
  siRNA target sequence for Rnf128 (NM_023270.3,881-899).
cgaagattacgaaatgcaa

SEQ ID NO: 585136 - DNA, 19 bp, Mus musculus
  siRNA target sequence for Rnf128 (NM_023270.3,938-956).
gctaaaaaagctattggaa

SEQ ID NO: 585137 - DNA, 19 bp, Mus musculus
  siRNA target sequence for Rnf128 (NM_023270.3,964-982).
gctgcgcaccttgaaacaa

SEQ ID NO: 585138 - DNA, 19 bp, Mus musculus
  siRNA target sequence for Rnf128 (NM_023270.3,1049-1067).
gatttggtgcgcatcctaa

SEQ ID NO: 585139 - DNA, 19 bp, Mus musculus
  siRNA target sequence for Rnf128 (NM_023270.3,1063-1081).
cctaacctgcaatcatatt

SEQ ID NO: 585140 - DNA, 19 bp, Mus musculus
  siRNA target sequence for Rnf128 (NM_023270.3,1071-1089).
gcaatcatattttccataa

SEQ ID NO: 585141 - DNA, 19 bp, Mus musculus
  siRNA target sequence for Rnf128 (NM_023270.3,1271-1289).
gcatcatctggatatgctt

SEQ ID NO: 585142 - DNA, 19 bp, Mus musculus
  siRNA target sequence for Rnf128 (NM_023270.3,1330-1348).
gcagtcagcaaatgaaaat

SEQ ID NO: 585143 - DNA, 19 bp, Mus musculus
  siRNA target sequence for Rnf128 (NM_023270.3,1357-1375).
ggtaaaccatgaagcaaat

SEQ ID NO: 585144 - DNA, 19 bp, Mus musculus
  siRNA target sequence for Rnf128 (NM_023270.3,1413-1431).
caacctttgaagaagatga

SEQ ID NO: 585145 - DNA, 19 bp, Mus musculus
  siRNA target sequence for Rnf128 (NM_023270.3,1448-1466).
gcagctgttcgggagatta

SEQ ID NO: 585146 - DNA, 19 bp, Mus musculus
  siRNA target sequence for Rnf128 (NM_023270.3,1454-1472).
gttcgggagattaaatctt

SEQ ID NO: 585147 - DNA, 19 bp, Mus musculus
  siRNA target sequence for Rnf13 (NM_011883.1,128-146).
caggtctacaccatcttga

SEQ ID NO: 585148 - DNA, 19 bp, Mus musculus
  siRNA target sequence for Rnf13 (NM_011883.1,180-198).
ctgtagaagcagacatttt

SEQ ID NO: 585149 - DNA, 19 bp, Mus musculus
  siRNA target sequence for Rnf13 (NM_011883.1,235-253).
ggaccttccagcaagattt

SEQ ID NO: 585150 - DNA, 19 bp, Mus musculus
  siRNA target sequence for Rnf13 (NM_011883.1,242-260).
ccagcaagatttggttata

SEQ ID NO: 585151 - DNA, 19 bp, Mus musculus
  siRNA target sequence for Rnf13 (NM_011883.1,246-264).
caagatttggttatagact

SEQ ID NO: 585152 - DNA, 19 bp, Mus musculus
  siRNA target sequence for Rnf13 (NM_011883.1,284-302).
ggttttctgattaactcaa

SEQ ID NO: 585153 - DNA, 19 bp, Mus musculus
  siRNA target sequence for Rnf13 (NM_011883.1,285-303).
gttttctgattaactcaaa

SEQ ID NO: 585154 - DNA, 19 bp, Mus musculus
  siRNA target sequence for Rnf13 (NM_011883.1,338-356).
ccactgaaagacaattctt

SEQ ID NO: 585155 - DNA, 19 bp, Mus musculus
  siRNA target sequence for Rnf13 (NM_011883.1,367-385).
catcgtgctgattagaaga

SEQ ID NO: 585156 - DNA, 19 bp, Mus musculus
  siRNA target sequence for Rnf13 (NM_011883.1,370-388).
cgtgctgattagaagactt

SEQ ID NO: 585157 - DNA, 19 bp, Mus musculus
  siRNA target sequence for Rnf13 (NM_011883.1,373-391).
gctgattagaagacttgat

SEQ ID NO: 585158 - DNA, 19 bp, Mus musculus
  siRNA target sequence for Rnf13 (NM_011883.1,374-392).
ctgattagaagacttgatt

SEQ ID NO: 585159 - DNA, 19 bp, Mus musculus
  siRNA target sequence for Rnf13 (NM_011883.1,389-407).
gattgcaattttgatataa

SEQ ID NO: 585160 - DNA, 19 bp, Mus musculus
  siRNA target sequence for Rnf13 (NM_011883.1,465-483).
ctgatgacctgattagcat

SEQ ID NO: 585161 - DNA, 19 bp, Mus musculus
  siRNA target sequence for Rnf13 (NM_011883.1,489-507).
ccaacgacattgatacact

SEQ ID NO: 585162 - DNA, 19 bp, Mus musculus
  siRNA target sequence for Rnf13 (NM_011883.1,490-508).
caacgacattgatacacta

SEQ ID NO: 585163 - DNA, 19 bp, Mus musculus
  siRNA target sequence for Rnf13 (NM_011883.1,494-512).
gacattgatacactaaaga

SEQ ID NO: 585164 - DNA, 19 bp, Mus musculus
  siRNA target sequence for Rnf13 (NM_011883.1,518-536).
gacattccgtctgtcttta

SEQ ID NO: 585165 - DNA, 19 bp, Mus musculus
  siRNA target sequence for Rnf13 (NM_011883.1,552-570).
ctaattccctgaaagatga

SEQ ID NO: 585166 - DNA, 19 bp, Mus musculus
  siRNA target sequence for Rnf13 (NM_011883.1,618-636).
gtcttcctttggagtacta

SEQ ID NO: 585167 - DNA, 19 bp, Mus musculus
  siRNA target sequence for Rnf13 (NM_011883.1,624-642).
ctttggagtactatctgat

SEQ ID NO: 585168 - DNA, 19 bp, Mus musculus
  siRNA target sequence for Rnf13 (NM_011883.1,661-679).
gggcatctgcctcatctta

SEQ ID NO: 585169 - DNA, 19 bp, Mus musculus
  siRNA target sequence for Rnf13 (NM_011883.1,669-687).
gcctcatcttaatagtcat

SEQ ID NO: 585170 - DNA, 19 bp, Mus musculus
  siRNA target sequence for Rnf13 (NM_011883.1,670-688).
cctcatcttaatagtcatt

SEQ ID NO: 585171 - DNA, 19 bp, Mus musculus
  siRNA target sequence for Rnf13 (NM_011883.1,671-689).
ctcatcttaatagtcattt

SEQ ID NO: 585172 - DNA, 19 bp, Mus musculus
  siRNA target sequence for Rnf13 (NM_011883.1,732-750).
gaaatagacttcgtaaaga

SEQ ID NO: 585173 - DNA, 19 bp, Mus musculus
  siRNA target sequence for Rnf13 (NM_011883.1,738-756).
gacttcgtaaagatcaact

SEQ ID NO: 585174 - DNA, 19 bp, Mus musculus
  siRNA target sequence for Rnf13 (NM_011883.1,743-761).
cgtaaagatcaacttaaaa

SEQ ID NO: 585175 - DNA, 19 bp, Mus musculus
  siRNA target sequence for Rnf13 (NM_011883.1,764-782).
cttcccgtacataaattta

SEQ ID NO: 585176 - DNA, 19 bp, Mus musculus
  siRNA target sequence for Rnf13 (NM_011883.1,799-817).
cgatgtgtgtgctatctgt

SEQ ID NO: 585177 - DNA, 19 bp, Mus musculus
  siRNA target sequence for Rnf13 (NM_011883.1,830-848).
gaagacggagataagctaa

SEQ ID NO: 585178 - DNA, 19 bp, Mus musculus
  siRNA target sequence for Rnf13 (NM_011883.1,859-877).
ctgctcccatggtatgagt

SEQ ID NO: 585179 - DNA, 19 bp, Mus musculus
  siRNA target sequence for Rnf130 (NM_021540.2,152-170).
gcgagccaggagtactaca

SEQ ID NO: 585180 - DNA, 19 bp, Mus musculus
  siRNA target sequence for Rnf130 (NM_021540.2,304-322).
ccacggagttgctgatcat

SEQ ID NO: 585181 - DNA, 19 bp, Mus musculus
  siRNA target sequence for Rnf130 (NM_021540.2,336-354).
ctcaaacacggttctttgt

SEQ ID NO: 585182 - DNA, 19 bp, Mus musculus
  siRNA target sequence for Rnf130 (NM_021540.2,346-364).
gttctttgtccctcctaat

SEQ ID NO: 585183 - DNA, 19 bp, Mus musculus
  siRNA target sequence for Rnf130 (NM_021540.2,423-441).
cacgggctgcttttcacaa

SEQ ID NO: 585184 - DNA, 19 bp, Mus musculus
  siRNA target sequence for Rnf130 (NM_021540.2,508-526).
cacgggagatattattgct

SEQ ID NO: 585185 - DNA, 19 bp, Mus musculus
  siRNA target sequence for Rnf130 (NM_021540.2,524-542).
gctgtcatgataacagaat

SEQ ID NO: 585186 - DNA, 19 bp, Mus musculus
  siRNA target sequence for Rnf130 (NM_021540.2,527-545).
gtcatgataacagaattga

SEQ ID NO: 585187 - DNA, 19 bp, Mus musculus
  siRNA target sequence for Rnf130 (NM_021540.2,539-557).
gaattgaggggtaaggata

SEQ ID NO: 585188 - DNA, 19 bp, Mus musculus
  siRNA target sequence for Rnf130 (NM_021540.2,612-630).
ctcgaatgccgccaaagaa

SEQ ID NO: 585189 - DNA, 19 bp, Mus musculus
  siRNA target sequence for Rnf130 (NM_021540.2,645-663).
ctctagtcttcgtgtcaat

SEQ ID NO: 585190 - DNA, 19 bp, Mus musculus
  siRNA target sequence for Rnf130 (NM_021540.2,647-665).
ctagtcttcgtgtcaatct

SEQ ID NO: 585191 - DNA, 19 bp, Mus musculus
  siRNA target sequence for Rnf130 (NM_021540.2,693-711).
cagcgtggctcatattcta

SEQ ID NO: 585192 - DNA, 19 bp, Mus musculus
  siRNA target sequence for Rnf130 (NM_021540.2,695-713).
gcgtggctcatattctact

SEQ ID NO: 585193 - DNA, 19 bp, Mus musculus
  siRNA target sequence for Rnf130 (NM_021540.2,721-739).
gaagatcaggtacacaaat

SEQ ID NO: 585194 - DNA, 19 bp, Mus musculus
  siRNA target sequence for Rnf130 (NM_021540.2,785-803).
gccatcagtaaattgacaa

SEQ ID NO: 585195 - DNA, 19 bp, Mus musculus
  siRNA target sequence for Rnf130 (NM_021540.2,858-876).
cagtctgcatagaaagcta

SEQ ID NO: 585196 - DNA, 19 bp, Mus musculus
  siRNA target sequence for Rnf130 (NM_021540.2,864-882).
gcatagaaagctataagca

SEQ ID NO: 585197 - DNA, 19 bp, Mus musculus
  siRNA target sequence for Rnf130 (NM_021540.2,873-891).
gctataagcagaatgatgt

SEQ ID NO: 585198 - DNA, 19 bp, Mus musculus
  siRNA target sequence for Rnf130 (NM_021540.2,874-892).
ctataagcagaatgatgtt

SEQ ID NO: 585199 - DNA, 19 bp, Mus musculus
  siRNA target sequence for Rnf130 (NM_021540.2,966-984).
gtcctatgtgcaaacttaa

SEQ ID NO: 585200 - DNA, 19 bp, Mus musculus
  siRNA target sequence for Rnf130 (NM_021540.2,968-986).
cctatgtgcaaacttaata

SEQ ID NO: 585201 - DNA, 19 bp, Mus musculus
  siRNA target sequence for Rnf130 (NM_021540.2,969-987).
ctatgtgcaaacttaatat

SEQ ID NO: 585202 - DNA, 19 bp, Mus musculus
  siRNA target sequence for Rnf130 (NM_021540.2,1009-1027).
gccaaatctgccatgtact

SEQ ID NO: 585203 - DNA, 19 bp, Mus musculus
  siRNA target sequence for Rnf130 (NM_021540.2,1028-1046).
gataatgtagcctttgata

SEQ ID NO: 585204 - DNA, 19 bp, Mus musculus
  siRNA target sequence for Rnf130 (NM_021540.2,1179-1197).
ctcctcgcacgggtgaaat

SEQ ID NO: 585205 - DNA, 19 bp, Mus musculus
  siRNA target sequence for Rnf130 (NM_021540.2,1181-1199).
cctcgcacgggtgaaatca

SEQ ID NO: 585206 - DNA, 19 bp, Mus musculus
  siRNA target sequence for Rnf130 (NM_021540.2,1182-1200).
ctcgcacgggtgaaatcaa

SEQ ID NO: 585207 - DNA, 19 bp, Mus musculus
  siRNA target sequence for Rnf130 (NM_021540.2,1184-1202).
cgcacgggtgaaatcaaca

SEQ ID NO: 585208 - DNA, 19 bp, Mus musculus
  siRNA target sequence for Rnf130 (NM_021540.2,1185-1203).
gcacgggtgaaatcaacat

SEQ ID NO: 585209 - DNA, 19 bp, Mus musculus
  siRNA target sequence for Rnf130 (NM_021540.2,1186-1204).
cacgggtgaaatcaacatt

SEQ ID NO: 585210 - DNA, 19 bp, Mus musculus
  siRNA target sequence for Rnf130 (NM_021540.2,1198-1216).
caacattgcagtaacaaaa

SEQ ID NO: 585211 - DNA, 19 bp, Mus musculus
  siRNA target sequence for Rnf130 (NM_021540.2,1287-1305).
cagctagcttgaatgctaa

SEQ ID NO: 585212 - DNA, 19 bp, Mus musculus
  siRNA target sequence for Rnf150 (NM_177378.2,1048-1066).
gcacgtacagggataagat

SEQ ID NO: 585213 - DNA, 19 bp, Mus musculus
  siRNA target sequence for Rnf150 (NM_177378.2,1091-1109).
ctccgctgtggtcatcttt

SEQ ID NO: 585214 - DNA, 19 bp, Mus musculus
  siRNA target sequence for Rnf150 (NM_177378.2,1093-1111).
ccgctgtggtcatctttaa

SEQ ID NO: 585215 - DNA, 19 bp, Mus musculus
  siRNA target sequence for Rnf150 (NM_177378.2,1096-1114).
ctgtggtcatctttaacgt

SEQ ID NO: 585216 - DNA, 19 bp, Mus musculus
  siRNA target sequence for Serpina1b (NM_009244.2,1365-1383).
gaagccgttcctatgtcta

SEQ ID NO: 585217 - DNA, 19 bp, Mus musculus
  siRNA target sequence for Serpina3m (NM_009253.1,114-132).
gacacatggggaatagata

SEQ ID NO: 585218 - DNA, 19 bp, Mus musculus
  siRNA target sequence for Serpina3m (NM_009253.1,116-134).
cacatggggaatagatatt

SEQ ID NO: 585219 - DNA, 19 bp, Mus musculus
  siRNA target sequence for Serpina3m (NM_009253.1,121-139).
ggggaatagatattctatt

SEQ ID NO: 585220 - DNA, 19 bp, Mus musculus
  siRNA target sequence for Serpina3m (NM_009253.1,122-140).
gggaatagatattctatta

SEQ ID NO: 585221 - DNA, 19 bp, Mus musculus
  siRNA target sequence for Serpina3m (NM_009253.1,124-142).
gaatagatattctattaca

SEQ ID NO: 585222 - DNA, 19 bp, Mus musculus
  siRNA target sequence for Serpina3m (NM_009253.1,947-965).
gaaaaccaggaaaataggt

SEQ ID NO: 585223 - DNA, 19 bp, Mus musculus
  siRNA target sequence for Serpina3m (NM_009253.1,1179-1197).
ggctttcgttctagaagat

SEQ ID NO: 585224 - DNA, 19 bp, Mus musculus
  siRNA target sequence for Serpina3m (NM_009253.1,1180-1198).
gctttcgttctagaagatt

SEQ ID NO: 585225 - DNA, 19 bp, Mus musculus
  siRNA target sequence for Serpina3m (NM_009253.1,1185-1203).
cgttctagaagattacaaa

SEQ ID NO: 585226 - DNA, 19 bp, Mus musculus
  siRNA target sequence for Serpina3n (NM_009252.1,1198-1216).
ccaatgtctgcgaaactgt

SEQ ID NO: 585227 - DNA, 19 bp, Mus musculus
  siRNA target sequence for Serpina3n (NM_009252.1,1199-1217).
caatgtctgcgaaactgta

SEQ ID NO: 585228 - DNA, 19 bp, Mus musculus
  siRNA target sequence for Serpina3n (NM_009252.1,1215-1233).
gtaccctctgactgtatat

SEQ ID NO: 585229 - DNA, 19 bp, Mus musculus
  siRNA target sequence for Serpina3n (NM_009252.1,1240-1258).
cggcctttcctgataatga

SEQ ID NO: 585230 - DNA, 19 bp, Mus musculus
  siRNA target sequence for Serpina3n (NM_009252.1,1274-1292).
ctgaaattgccccctttat

SEQ ID NO: 585231 - DNA, 19 bp, Mus musculus
  siRNA target sequence for Serpina3n (NM_009252.1,1284-1302).
cccctttatagccaagata

SEQ ID NO: 585232 - DNA, 19 bp, Mus musculus
  siRNA target sequence for Serpinb1a (NM_025429.1,98-116).
gttccaaaccctgaatgaa

SEQ ID NO: 585233 - DNA, 19 bp, Mus musculus
  siRNA target sequence for Serpinb1a (NM_025429.1,788-806).
gattgaaaagcaaataact

SEQ ID NO: 585234 - DNA, 19 bp, Mus musculus
  siRNA target sequence for Serpinb1b (NM_173052.1,587-605).
gcaattcatgacaagagaa

SEQ ID NO: 585235 - DNA, 19 bp, Mus musculus
  siRNA target sequence for Serpinb1b (NM_173052.1,849-867).
catgagaacttgagaaaca

SEQ ID NO: 585236 - DNA, 19 bp, Mus musculus
  siRNA target sequence for Serpinb1b (NM_173052.1,1072-1090).
ctgccacaggaggcattat

SEQ ID NO: 585237 - DNA, 19 bp, Mus musculus
  siRNA target sequence for Serpinb1b (NM_173052.1,1167-1185).
cacaaccccacagctaata

SEQ ID NO: 585238 - DNA, 19 bp, Mus musculus
  siRNA target sequence for Serpinb1b (NM_173052.1,1173-1191).
cccacagctaatatgatct

SEQ ID NO: 585239 - DNA, 19 bp, Mus musculus
  siRNA target sequence for Serpinb1b (NM_173052.1,1174-1192).
ccacagctaatatgatctt

SEQ ID NO: 585240 - DNA, 19 bp, Mus musculus
  siRNA target sequence for Serpinb1b (NM_173052.1,1177-1195).
cagctaatatgatcttctt

SEQ ID NO: 585241 - DNA, 19 bp, Mus musculus
  siRNA target sequence for Serpinb8 (NM_011459.2,418-436).
gaaatggagatgttcatca

SEQ ID NO: 585242 - DNA, 19 bp, Mus musculus
  siRNA target sequence for Serpinb8 (NM_011459.2,446-464).
gacacttctcgctgaaatt

SEQ ID NO: 585243 - DNA, 19 bp, Mus musculus
  siRNA target sequence for Serpinb8 (NM_011459.2,448-466).
cacttctcgctgaaattaa

SEQ ID NO: 585244 - DNA, 19 bp, Mus musculus
  siRNA target sequence for Serpinb8 (NM_011459.2,450-468).
cttctcgctgaaattaaca

SEQ ID NO: 585245 - DNA, 19 bp, Mus musculus
  siRNA target sequence for Serpinb8 (NM_011459.2,455-473).
cgctgaaattaacaaaact

SEQ ID NO: 585246 - DNA, 19 bp, Mus musculus
  siRNA target sequence for Serpinb8 (NM_011459.2,472-490).
ctgacactcagtacttgtt

SEQ ID NO: 585247 - DNA, 19 bp, Mus musculus
  siRNA target sequence for Serpinb8 (NM_011459.2,474-492).
gacactcagtacttgttaa

SEQ ID NO: 585248 - DNA, 19 bp, Mus musculus
  siRNA target sequence for Serpinb8 (NM_011459.2,476-494).
cactcagtacttgttaaaa

SEQ ID NO: 585249 - DNA, 19 bp, Mus musculus
  siRNA target sequence for Serpinb8 (NM_011459.2,503-521).
ccgactctttggagaagaa

SEQ ID NO: 585250 - DNA, 19 bp, Mus musculus
  siRNA target sequence for Serpinb8 (NM_011459.2,504-522).
cgactctttggagaagaat

SEQ ID NO: 585251 - DNA, 19 bp, Mus musculus
  siRNA target sequence for Serpinb8 (NM_011459.2,513-531).
ggagaagaatcgtgtgatt

SEQ ID NO: 585252 - DNA, 19 bp, Mus musculus
  siRNA target sequence for Serpinb8 (NM_011459.2,519-537).
gaatcgtgtgatttccttt

SEQ ID NO: 585253 - DNA, 19 bp, Mus musculus
  siRNA target sequence for Serpinb8 (NM_011459.2,613-631).
ggtgcaggaaacacatcaa

SEQ ID NO: 585254 - DNA, 19 bp, Mus musculus
  siRNA target sequence for Serpinb8 (NM_011459.2,633-651).
gactgggtgtcggaaaaaa

SEQ ID NO: 585255 - DNA, 19 bp, Mus musculus
  siRNA target sequence for Serpinb8 (NM_011459.2,635-653).
ctgggtgtcggaaaaaact

SEQ ID NO: 585256 - DNA, 19 bp, Mus musculus
  siRNA target sequence for Serpinb8 (NM_011459.2,637-655).
gggtgtcggaaaaaactga

SEQ ID NO: 585257 - DNA, 19 bp, Mus musculus
  siRNA target sequence for Serpinb8 (NM_011459.2,638-656).
ggtgtcggaaaaaactgaa

SEQ ID NO: 585258 - DNA, 19 bp, Mus musculus
  siRNA target sequence for Serpinb8 (NM_011459.2,751-769).
ctcagtttgaccgaaagta

SEQ ID NO: 585259 - DNA, 19 bp, Mus musculus
  siRNA target sequence for Serpinb8 (NM_011459.2,772-790).
cgagaggcatgccctttaa

SEQ ID NO: 585260 - DNA, 19 bp, Mus musculus
  siRNA target sequence for Serpinb8 (NM_011459.2,777-795).
ggcatgccctttaaaacta

SEQ ID NO: 585261 - DNA, 19 bp, Mus musculus
  siRNA target sequence for Serpinb8 (NM_011459.2,821-839).
gatgttcaagcatgctaaa

SEQ ID NO: 585262 - DNA, 19 bp, Mus musculus
  siRNA target sequence for Serpinb8 (NM_011459.2,953-971).
ggtggaaaaagcacttaca

SEQ ID NO: 585263 - DNA, 19 bp, Mus musculus
  siRNA target sequence for Serpinb8 (NM_011459.2,956-974).
ggaaaaagcacttacatat

SEQ ID NO: 585264 - DNA, 19 bp, Mus musculus
  siRNA target sequence for Serpinb8 (NM_011459.2,966-984).
cttacatatgagaagctta

SEQ ID NO: 585265 - DNA, 19 bp, Mus musculus
  siRNA target sequence for Serpinb8 (NM_011459.2,1018-1036).
gtcaagtgcaagtcttttt

SEQ ID NO: 585266 - DNA, 19 bp, Mus musculus
  siRNA target sequence for Serpinb8 (NM_011459.2,1060-1078).
gttacgacctggaaactgt

SEQ ID NO: 585267 - DNA, 19 bp, Mus musculus
  siRNA target sequence for Serpinb8 (NM_011459.2,1071-1089).
gaaactgtacttcagaatt

SEQ ID NO: 585268 - DNA, 19 bp, Mus musculus
  siRNA target sequence for Serpinb8 (NM_011459.2,1132-1150).
ctggcatgacaactaagaa

SEQ ID NO: 585269 - DNA, 19 bp, Mus musculus
  siRNA target sequence for Serpinb8 (NM_011459.2,1134-1152).
ggcatgacaactaagaaga

SEQ ID NO: 585270 - DNA, 19 bp, Mus musculus
  siRNA target sequence for Serpinb8 (NM_011459.2,1135-1153).
gcatgacaactaagaagaa

SEQ ID NO: 585271 - DNA, 19 bp, Mus musculus
  siRNA target sequence for Serpinb8 (NM_011459.2,1136-1154).
catgacaactaagaagaat

SEQ ID NO: 585272 - DNA, 19 bp, Mus musculus
  siRNA target sequence for Serpinb8 (NM_011459.2,1221-1239).
gcggccactgcagtgatta

SEQ ID NO: 585273 - DNA, 19 bp, Mus musculus
  siRNA target sequence for Serpinb8 (NM_011459.2,1224-1242).
gccactgcagtgattagga

SEQ ID NO: 585274 - DNA, 19 bp, Mus musculus
  siRNA target sequence for Serpinb8 (NM_011459.2,1225-1243).
ccactgcagtgattaggaa

SEQ ID NO: 585275 - DNA, 19 bp, Mus musculus
  siRNA target sequence for Serpinb8 (NM_011459.2,1247-1265).
ccggtgctgtagaacagaa

SEQ ID NO: 585276 - DNA, 19 bp, Mus musculus
  siRNA target sequence for Serpinb9 (NM_009256.2,338-356).
gaaagtactctcttagagt

SEQ ID NO: 585277 - DNA, 19 bp, Mus musculus
  siRNA target sequence for Serpinb9 (NM_009256.2,411-429).
gtcctctcttcacttctat

SEQ ID NO: 585278 - DNA, 19 bp, Mus musculus
  siRNA target sequence for Serpinb9 (NM_009256.2,544-562).
ggctccgtcgattcagaaa

SEQ ID NO: 585279 - DNA, 19 bp, Mus musculus
  siRNA target sequence for Serpinb9 (NM_009256.2,599-617).
gaaagtggcatcaaccatt

SEQ ID NO: 585280 - DNA, 19 bp, Mus musculus
  siRNA target sequence for Serpinb9 (NM_009256.2,605-623).
ggcatcaaccatttaacaa

SEQ ID NO: 585281 - DNA, 19 bp, Mus musculus
  siRNA target sequence for Serpinb9 (NM_009256.2,606-624).
gcatcaaccatttaacaaa

SEQ ID NO: 585282 - DNA, 19 bp, Mus musculus
  siRNA target sequence for Serpinb9 (NM_009256.2,610-628).
caaccatttaacaaagagt

SEQ ID NO: 585283 - DNA, 19 bp, Mus musculus
  siRNA target sequence for Serpinb9 (NM_009256.2,632-650).
caatggacatgccctttaa

SEQ ID NO: 585284 - DNA, 19 bp, Mus musculus
  siRNA target sequence for Serpinb9 (NM_009256.2,687-705).
gtgtcgtgaagacacatat

SEQ ID NO: 585285 - DNA, 19 bp, Mus musculus
  siRNA target sequence for Serpinb9 (NM_009256.2,689-707).
gtcgtgaagacacatataa

SEQ ID NO: 585286 - DNA, 19 bp, Mus musculus
  siRNA target sequence for Serpinb9 (NM_009256.2,692-710).
gtgaagacacatataacct

SEQ ID NO: 585287 - DNA, 19 bp, Mus musculus
  siRNA target sequence for Serpinb9 (NM_009256.2,1087-1105).
gcctctgccatcatagaat

SEQ ID NO: 585288 - DNA, 19 bp, Mus musculus
  siRNA target sequence for Serpinb9 (NM_009256.2,1088-1106).
cctctgccatcatagaatt

SEQ ID NO: 585289 - DNA, 19 bp, Mus musculus
  siRNA target sequence for Serpinb9 (NM_009256.2,1093-1111).
gccatcatagaattttgct

SEQ ID NO: 585290 - DNA, 19 bp, Mus musculus
  siRNA target sequence for Serpinb9e (NM_011456.1,1075-1093).
gctggcaaaattatacttt

SEQ ID NO: 585291 - DNA, 19 bp, Mus musculus
  siRNA target sequence for Serpinb9e (NM_011456.1,1102-1120).
ggtcctgatcccgaagttt

SEQ ID NO: 585292 - DNA, 19 bp, Mus musculus
  siRNA target sequence for Serpinb9e (NM_011456.1,1103-1121).
gtcctgatcccgaagtttt

SEQ ID NO: 585293 - DNA, 19 bp, Mus musculus
  siRNA target sequence for Shh (NM_009170.2,426-444).
ggcggcaccccaaaaagct

SEQ ID NO: 585294 - DNA, 19 bp, Mus musculus
  siRNA target sequence for Shh (NM_009170.2,499-517).
ggccagcggcagatatgaa

SEQ ID NO: 585295 - DNA, 19 bp, Mus musculus
  siRNA target sequence for Shh (NM_009170.2,528-546).
caagaaactccgaacgatt

SEQ ID NO: 585296 - DNA, 19 bp, Mus musculus
  siRNA target sequence for Shh (NM_009170.2,531-549).
gaaactccgaacgatttaa

SEQ ID NO: 585297 - DNA, 19 bp, Mus musculus
  siRNA target sequence for Shh (NM_009170.2,574-592).
cgacatcatatttaaggat

SEQ ID NO: 585298 - DNA, 19 bp, Mus musculus
  siRNA target sequence for Shh (NM_009170.2,628-646).
gaggtgcaaagacaagtta

SEQ ID NO: 585299 - DNA, 19 bp, Mus musculus
  siRNA target sequence for Shh (NM_009170.2,631-649).
gtgcaaagacaagttaaat

SEQ ID NO: 585300 - DNA, 19 bp, Mus musculus
  siRNA target sequence for Shh (NM_009170.2,843-861).
gggtctactatgaatccaa

SEQ ID NO: 585301 - DNA, 19 bp, Mus musculus
  siRNA target sequence for Shh (NM_009170.2,844-862).
ggtctactatgaatccaaa

SEQ ID NO: 585302 - DNA, 19 bp, Mus musculus
  siRNA target sequence for Shh (NM_009170.2,1331-1349).
gcgcacggcaccattctca

SEQ ID NO: 585303 - DNA, 19 bp, Mus musculus
  siRNA target sequence for Shh (NM_009170.2,1332-1350).
cgcacggcaccattctcat

SEQ ID NO: 585304 - DNA, 19 bp, Mus musculus
  siRNA target sequence for Spint1 (NM_016907.2,535-553).
ccgaaggagggcttcatca

SEQ ID NO: 585305 - DNA, 19 bp, Mus musculus
  siRNA target sequence for Spint1 (NM_016907.2,536-554).
cgaaggagggcttcatcaa

SEQ ID NO: 585306 - DNA, 19 bp, Mus musculus
  siRNA target sequence for Spint1 (NM_016907.2,544-562).
ggcttcatcaactatctta

SEQ ID NO: 585307 - DNA, 19 bp, Mus musculus
  siRNA target sequence for Spint1 (NM_016907.2,795-813).
gttccaactgacaagaact

SEQ ID NO: 585308 - DNA, 19 bp, Mus musculus
  siRNA target sequence for Spint1 (NM_016907.2,955-973).
cagatctgcaaaagtttta

SEQ ID NO: 585309 - DNA, 19 bp, Mus musculus
  siRNA target sequence for Spint1 (NM_016907.2,960-978).
ctgcaaaagttttactttt

SEQ ID NO: 585310 - DNA, 19 bp, Mus musculus
  siRNA target sequence for Spint1 (NM_016907.2,983-1001).
gttgcctgggcaacaagaa

SEQ ID NO: 585311 - DNA, 19 bp, Mus musculus
  siRNA target sequence for Spint1 (NM_016907.2,1104-1122).
ccagttccgctgtagcaat

SEQ ID NO: 585312 - DNA, 19 bp, Mus musculus
  siRNA target sequence for Spint1 (NM_016907.2,1311-1329).
gtattacaacccattcagt

SEQ ID NO: 585313 - DNA, 19 bp, Mus musculus
  siRNA target sequence for Spint1 (NM_016907.2,1422-1440).
ctccaagaaggatgtgttt

SEQ ID NO: 585314 - DNA, 19 bp, Mus musculus
  siRNA target sequence for Spint1 (NM_016907.2,1479-1497).
cgctgaggtagctattgct

SEQ ID NO: 585315 - DNA, 19 bp, Mus musculus
  siRNA target sequence for Spint1 (NM_016907.2,1485-1503).
ggtagctattgctgtattt

SEQ ID NO: 585316 - DNA, 19 bp, Mus musculus
  siRNA target sequence for Spint1 (NM_016907.2,1606-1624).
ccagccagctccactgttt

SEQ ID NO: 585317 - DNA, 19 bp, Mus musculus
  siRNA target sequence for Spint1 (NM_016907.2,1645-1663).
cacctggtctataatcaca

SEQ ID NO: 585318 - DNA, 19 bp, Mus musculus
  siRNA target sequence for Trfr (NM_011638.3,89-107).
ggtggggaaccattgtcat

SEQ ID NO: 585319 - DNA, 19 bp, Mus musculus
  siRNA target sequence for Trfr (NM_011638.3,90-108).
gtggggaaccattgtcata

SEQ ID NO: 585320 - DNA, 19 bp, Mus musculus
  siRNA target sequence for Trfr (NM_011638.3,120-138).
gccttgctcggcaagtaga

SEQ ID NO: 585321 - DNA, 19 bp, Mus musculus
  siRNA target sequence for Trfr (NM_011638.3,129-147).
ggcaagtagatggagataa

SEQ ID NO: 585322 - DNA, 19 bp, Mus musculus
  siRNA target sequence for Trfr (NM_011638.3,205-223).
gaaggctagtgtcagaaaa

SEQ ID NO: 585323 - DNA, 19 bp, Mus musculus
  siRNA target sequence for Trfr (NM_011638.3,224-242).
cccaagaggtttaatggaa

SEQ ID NO: 585324 - DNA, 19 bp, Mus musculus
  siRNA target sequence for Trfr (NM_011638.3,257-275).
gctattgcactagtcattt

SEQ ID NO: 585325 - DNA, 19 bp, Mus musculus
  siRNA target sequence for Trfr (NM_011638.3,258-276).
ctattgcactagtcatttt

SEQ ID NO: 585326 - DNA, 19 bp, Mus musculus
  siRNA target sequence for Trfr (NM_011638.3,300-318).
gctacctgggctattgtaa

SEQ ID NO: 585327 - DNA, 19 bp, Mus musculus
  siRNA target sequence for Trfr (NM_011638.3,310-328).
ctattgtaagcgtgtagaa

SEQ ID NO: 585328 - DNA, 19 bp, Mus musculus
  siRNA target sequence for Trfr (NM_011638.3,315-333).
gtaagcgtgtagaacaaaa

SEQ ID NO: 585329 - DNA, 19 bp, Mus musculus
  siRNA target sequence for Trfr (NM_011638.3,395-413).
gaggatgttcctacatcat

SEQ ID NO: 585330 - DNA, 19 bp, Mus musculus
  siRNA target sequence for Trfr (NM_011638.3,397-415).
ggatgttcctacatcatct

SEQ ID NO: 585331 - DNA, 19 bp, Mus musculus
  siRNA target sequence for Trfr (NM_011638.3,426-444).
gggcagacctcaaaacact

SEQ ID NO: 585332 - DNA, 19 bp, Mus musculus
  siRNA target sequence for Trfr (NM_011638.3,443-461).
ctgttgtcagagaagttga

SEQ ID NO: 585333 - DNA, 19 bp, Mus musculus
  siRNA target sequence for Trfr (NM_011638.3,457-475).
gttgaactccatagagttt

SEQ ID NO: 585334 - DNA, 19 bp, Mus musculus
  siRNA target sequence for Trfr (NM_011638.3,496-514).
gagccagaatacatacact

SEQ ID NO: 585335 - DNA, 19 bp, Mus musculus
  siRNA target sequence for Trfr (NM_011638.3,546-564).
gtcttgcctattatattga

SEQ ID NO: 585336 - DNA, 19 bp, Mus musculus
  siRNA target sequence for Trfr (NM_011638.3,548-566).
cttgcctattatattgaaa

SEQ ID NO: 585337 - DNA, 19 bp, Mus musculus
  siRNA target sequence for Trfr (NM_011638.3,552-570).
cctattatattgaaaatca

SEQ ID NO: 585338 - DNA, 19 bp, Mus musculus
  siRNA target sequence for Trfr (NM_011638.3,592-610).
caaagtctggcgagatgaa

SEQ ID NO: 585339 - DNA, 19 bp, Mus musculus
  siRNA target sequence for Trfr (NM_011638.3,602-620).
cgagatgaacactatgtga

SEQ ID NO: 585340 - DNA, 19 bp, Mus musculus
  siRNA target sequence for Trfr (NM_011638.3,658-676).
gaccatagtgcagtcaaat

SEQ ID NO: 585341 - DNA, 19 bp, Mus musculus
  siRNA target sequence for Trfr (NM_011638.3,661-679).
catagtgcagtcaaatggt

SEQ ID NO: 585342 - DNA, 19 bp, Mus musculus
  siRNA target sequence for Trfr (NM_011638.3,667-685).
gcagtcaaatggtaactta

SEQ ID NO: 585343 - DNA, 19 bp, Mus musculus
  siRNA target sequence for Trfr (NM_011638.3,706-724).
gggttatgtggcattcagt

SEQ ID NO: 585344 - DNA, 19 bp, Mus musculus
  siRNA target sequence for Trfr (NM_011638.3,721-739).
cagtaaacctacagaagtt

SEQ ID NO: 585345 - DNA, 19 bp, Mus musculus
  siRNA target sequence for Trfr (NM_011638.3,744-762).
gtaaactggtccatgctaa

SEQ ID NO: 585346 - DNA, 19 bp, Mus musculus
  siRNA target sequence for Trfr (NM_011638.3,758-776).
gctaattttggcactaaaa

SEQ ID NO: 585347 - DNA, 19 bp, Mus musculus
  siRNA target sequence for Trfr (NM_011638.3,805-823).
gaatggatctttagtgatt

SEQ ID NO: 585348 - DNA, 19 bp, Mus musculus
  siRNA target sequence for Trfr (NM_011638.3,828-846).
gagcaggggaaattacttt

SEQ ID NO: 585349 - DNA, 19 bp, Mus musculus
  siRNA target sequence for Trfr (NM_011638.3,867-885).
cccaaagctttaatgcaat

SEQ ID NO: 585350 - DNA, 19 bp, Mus musculus
  siRNA target sequence for Trfr (NM_011638.3,868-886).
ccaaagctttaatgcaatt

SEQ ID NO: 585351 - DNA, 19 bp, Mus musculus
  siRNA target sequence for Trfr (NM_011638.3,882-900).
caattggtgtcctcatata

SEQ ID NO: 585352 - DNA, 19 bp, Mus musculus
  siRNA target sequence for Trfr (NM_011638.3,1032-1050).
catcagggttgcctaatat

SEQ ID NO: 585353 - DNA, 19 bp, Mus musculus
  siRNA target sequence for Trfr (NM_011638.3,1052-1070).
cctgtgcaaacaatctcaa

SEQ ID NO: 585354 - DNA, 19 bp, Mus musculus
  siRNA target sequence for Trfr (NM_011638.3,1172-1190).
gtgaagctcattgtgaaaa

SEQ ID NO: 585355 - DNA, 19 bp, Mus musculus
  siRNA target sequence for Trfr (NM_011638.3,1251-1269).
cagaccgttatgttgtagt

SEQ ID NO: 585356 - DNA, 19 bp, Mus musculus
  siRNA target sequence for Trfr (NM_011638.3,1349-1367).
caagtattctcagatatga

SEQ ID NO: 585357 - DNA, 19 bp, Mus musculus
  siRNA target sequence for Trfr (NM_011638.3,1386-1404).
gacccagcagaagtataat

SEQ ID NO: 585358 - DNA, 19 bp, Mus musculus
  siRNA target sequence for Trfr (NM_011638.3,1480-1498).
gcatttaaaagctttcact

SEQ ID NO: 585359 - DNA, 19 bp, Mus musculus
  siRNA target sequence for Trfr (NM_011638.3,1495-1513).
cacttatattaatttggat

SEQ ID NO: 585360 - DNA, 19 bp, Mus musculus
  siRNA target sequence for Trfr (NM_011638.3,1497-1515).
cttatattaatttggataa

SEQ ID NO: 585361 - DNA, 19 bp, Mus musculus
  siRNA target sequence for Trfr (NM_011638.3,1520-1538).
gtccttggtactagtaact

SEQ ID NO: 585362 - DNA, 19 bp, Mus musculus
  siRNA target sequence for Trfr (NM_011638.3,1527-1545).
gtactagtaacttcaaagt

SEQ ID NO: 585363 - DNA, 19 bp, Mus musculus
  siRNA target sequence for Trfr (NM_011638.3,1548-1566).
ctgccagccccttattata

SEQ ID NO: 585364 - DNA, 19 bp, Mus musculus
  siRNA target sequence for Trfr (NM_011638.3,1550-1568).
gccagccccttattatata

SEQ ID NO: 585365 - DNA, 19 bp, Mus musculus
  siRNA target sequence for Trfr (NM_011638.3,1555-1573).
ccccttattatatacactt

SEQ ID NO: 585366 - DNA, 19 bp, Mus musculus
  siRNA target sequence for Trfr (NM_011638.3,1557-1575).
ccttattatatacacttat

SEQ ID NO: 585367 - DNA, 19 bp, Mus musculus
  siRNA target sequence for Trfr (NM_011638.3,1578-1596).
gaaagataatgcaagatgt

SEQ ID NO: 585368 - DNA, 19 bp, Mus musculus
  siRNA target sequence for Trfr (NM_011638.3,1631-1649).
gacagcaattggattagca

SEQ ID NO: 585369 - DNA, 19 bp, Mus musculus
  siRNA target sequence for Trfr (NM_011638.3,1636-1654).
caattggattagcaaagtt

SEQ ID NO: 585370 - DNA, 19 bp, Mus musculus
  siRNA target sequence for Trfr (NM_011638.3,1680-1698).
catatcctttccttgcata

SEQ ID NO: 585371 - DNA, 19 bp, Mus musculus
  siRNA target sequence for Trfr (NM_011638.3,1703-1721).
ggaatcccagcagtttctt

SEQ ID NO: 585372 - DNA, 19 bp, Mus musculus
  siRNA target sequence for Trfr (NM_011638.3,1733-1751).
gaggatgcagactatcctt

SEQ ID NO: 585373 - DNA, 19 bp, Mus musculus
  siRNA target sequence for Trfr (NM_011638.3,1735-1753).
ggatgcagactatccttat

SEQ ID NO: 585374 - DNA, 19 bp, Mus musculus
  siRNA target sequence for Trfr (NM_011638.3,1748-1766).
ccttatttgggcactagat

SEQ ID NO: 585375 - DNA, 19 bp, Mus musculus
  siRNA target sequence for Trfr (NM_011638.3,1749-1767).
cttatttgggcactagatt

SEQ ID NO: 585376 - DNA, 19 bp, Mus musculus
  siRNA target sequence for Trfr (NM_011638.3,1758-1776).
gcactagattggataccta

SEQ ID NO: 585377 - DNA, 19 bp, Mus musculus
  siRNA target sequence for Trfr (NM_011638.3,1796-1814).
gttcctcagctcaaccaaa

SEQ ID NO: 585378 - DNA, 19 bp, Mus musculus
  siRNA target sequence for Trfr (NM_011638.3,1863-1881).
cccatgacgttgaattgaa

SEQ ID NO: 585379 - DNA, 19 bp, Mus musculus
  siRNA target sequence for Trfr (NM_011638.3,1883-1901).
ctggactatgagatgtata

SEQ ID NO: 585380 - DNA, 19 bp, Mus musculus
  siRNA target sequence for Trfr (NM_011638.3,1917-1935).
catttatgaaggatctgaa

SEQ ID NO: 585381 - DNA, 19 bp, Mus musculus
  siRNA target sequence for Trfr (NM_011638.3,1954-1972).
cagggatatgggtctaagt

SEQ ID NO: 585382 - DNA, 19 bp, Mus musculus
  siRNA target sequence for Trfr (NM_011638.3,1956-1974).
gggatatgggtctaagtct

SEQ ID NO: 585383 - DNA, 19 bp, Mus musculus
  siRNA target sequence for Trfr (NM_011638.3,1989-2007).
ccgctcgtggagactactt

SEQ ID NO: 585384 - DNA, 19 bp, Mus musculus
  siRNA target sequence for Trfr (NM_011638.3,2002-2020).
ctacttccgtgctacttct

SEQ ID NO: 585385 - DNA, 19 bp, Mus musculus
  siRNA target sequence for Trfr (NM_011638.3,2005-2023).
cttccgtgctacttctaga

SEQ ID NO: 585386 - DNA, 19 bp, Mus musculus
  siRNA target sequence for Trfr (NM_011638.3,2008-2026).
ccgtgctacttctagacta

SEQ ID NO: 585387 - DNA, 19 bp, Mus musculus
  siRNA target sequence for Trfr (NM_011638.3,2009-2027).
cgtgctacttctagactaa

SEQ ID NO: 585388 - DNA, 19 bp, Mus musculus
  siRNA target sequence for Trfr (NM_011638.3,2012-2030).
gctacttctagactaacaa

SEQ ID NO: 585389 - DNA, 19 bp, Mus musculus
  siRNA target sequence for Trfr (NM_011638.3,2019-2037).
ctagactaacaactgattt

SEQ ID NO: 585390 - DNA, 19 bp, Mus musculus
  siRNA target sequence for Trfr (NM_011638.3,2073-2091).
gggaaatcaatgatcgtat

SEQ ID NO: 585391 - DNA, 19 bp, Mus musculus
  siRNA target sequence for Trfr (NM_011638.3,2074-2092).
ggaaatcaatgatcgtatt

SEQ ID NO: 585392 - DNA, 19 bp, Mus musculus
  siRNA target sequence for Trfr (NM_011638.3,2080-2098).
caatgatcgtattatgaaa

SEQ ID NO: 585393 - DNA, 19 bp, Mus musculus
  siRNA target sequence for Trfr (NM_011638.3,2142-2160).
ctcctttccgacatatctt

SEQ ID NO: 585394 - DNA, 19 bp, Mus musculus
  siRNA target sequence for Trfr (NM_011638.3,2187-2205).
cagctttagtggagaactt

SEQ ID NO: 585395 - DNA, 19 bp, Mus musculus
  siRNA target sequence for Trfr (NM_011638.3,2190-2208).
ctttagtggagaacttgaa

SEQ ID NO: 585396 - DNA, 19 bp, Mus musculus
  siRNA target sequence for Trfr (NM_011638.3,2203-2221).
cttgaagcttcgtcaaaaa

SEQ ID NO: 585397 - DNA, 19 bp, Mus musculus
  siRNA target sequence for Trfr (NM_011638.3,2206-2224).
gaagcttcgtcaaaaaaat

SEQ ID NO: 585398 - DNA, 19 bp, Mus musculus
  siRNA target sequence for Trfr (NM_011638.3,2210-2228).
cttcgtcaaaaaaatatta

SEQ ID NO: 585399 - DNA, 19 bp, Mus musculus
  siRNA target sequence for Trfr (NM_011638.3,2305-2323).
ctctggtgacatttggaat

SEQ ID NO: 585400 - DNA, 19 bp, Mus musculus
  siRNA target sequence for Trfr (NM_011638.3,2319-2337).
ggaatattgacaatgagtt

SEQ ID NO: 585401 - DNA, 19 bp, Mus musculus
  siRNA target sequence for Trfr2 (NM_015799.2,351-369).
ctgccccatggaactcaaa

SEQ ID NO: 585402 - DNA, 19 bp, Mus musculus
  siRNA target sequence for Trfr2 (NM_015799.2,390-408).
ctgtcccgggaggtcaatt

SEQ ID NO: 585403 - DNA, 19 bp, Mus musculus
  siRNA target sequence for Trfr2 (NM_015799.2,457-475).
ctgatcaccctgctaatct

SEQ ID NO: 585404 - DNA, 19 bp, Mus musculus
  siRNA target sequence for Trfr2 (NM_015799.2,543-561).
gttggtggtcgatgaagat

SEQ ID NO: 585405 - DNA, 19 bp, Mus musculus
  siRNA target sequence for Trfr2 (NM_015799.2,603-621).
cgacctccaggccatgttt

SEQ ID NO: 585406 - DNA, 19 bp, Mus musculus
  siRNA target sequence for Trfr2 (NM_015799.2,951-969).
ggacctacaggacctaaaa

SEQ ID NO: 585407 - DNA, 19 bp, Mus musculus
  siRNA target sequence for Trfr2 (NM_015799.2,1002-1020).
gctagtgcgagttggaatt

SEQ ID NO: 585408 - DNA, 19 bp, Mus musculus
  siRNA target sequence for Trfr2 (NM_015799.2,1003-1021).
ctagtgcgagttggaatta

SEQ ID NO: 585409 - DNA, 19 bp, Mus musculus
  siRNA target sequence for Trfr2 (NM_015799.2,1006-1024).
gtgcgagttggaattacta

SEQ ID NO: 585410 - DNA, 19 bp, Mus musculus
  siRNA target sequence for Trfr2 (NM_015799.2,1215-1233).
gttccctccagtagaatca

SEQ ID NO: 585411 - DNA, 19 bp, Mus musculus
  siRNA target sequence for Trfr2 (NM_015799.2,1260-1278).
gcccatcagtgctgacatt

SEQ ID NO: 585412 - DNA, 19 bp, Mus musculus
  siRNA target sequence for Trfr2 (NM_015799.2,1271-1289).
ctgacattgctgatcaatt

SEQ ID NO: 585413 - DNA, 19 bp, Mus musculus
  siRNA target sequence for Trfr2 (NM_015799.2,1409-1427).
ctacccccatcagtaacat

SEQ ID NO: 585414 - DNA, 19 bp, Mus musculus
  siRNA target sequence for Trfr2 (NM_015799.2,1546-1564).
ctggttcggaccttctctt

SEQ ID NO: 585415 - DNA, 19 bp, Mus musculus
  siRNA target sequence for Trfr2 (NM_015799.2,1581-1599).
gttcagacctcgaagaagt

SEQ ID NO: 585416 - DNA, 19 bp, Mus musculus
  siRNA target sequence for Trfr2 (NM_015799.2,1589-1607).
ctcgaagaagtcttttgtt

SEQ ID NO: 585417 - DNA, 19 bp, Mus musculus
  siRNA target sequence for Trfr2 (NM_015799.2,1591-1609).
cgaagaagtcttttgttca

SEQ ID NO: 585418 - DNA, 19 bp, Mus musculus
  siRNA target sequence for Trfr2 (NM_015799.2,1765-1783).
gtcagcctcattgagaata

SEQ ID NO: 585419 - DNA, 19 bp, Mus musculus
  siRNA target sequence for Trfr2 (NM_015799.2,1794-1812).
ggtggactcccctaaccat

SEQ ID NO: 585420 - DNA, 19 bp, Mus musculus
  siRNA target sequence for Trfr2 (NM_015799.2,1795-1813).
gtggactcccctaaccata

SEQ ID NO: 585421 - DNA, 19 bp, Mus musculus
  siRNA target sequence for Trfr2 (NM_015799.2,1814-1832).
gtggacagaccctctatga

SEQ ID NO: 585422 - DNA, 19 bp, Mus musculus
  siRNA target sequence for Trfr2 (NM_015799.2,1983-2001).
cacgaaggaggacacatat

SEQ ID NO: 585423 - DNA, 19 bp, Mus musculus
  siRNA target sequence for Trfr2 (NM_015799.2,1985-2003).
cgaaggaggacacatatga

SEQ ID NO: 585424 - DNA, 19 bp, Mus musculus
  siRNA target sequence for Trfr2 (NM_015799.2,2570-2588).
gcgacgtttggaacattga

SEQ ID NO: 585425 - DNA, 19 bp, Mus musculus
  siRNA target sequence for Atp6v0a4 (NM_080467.2,280-298).
cgaagtgaggagatgtgtt

SEQ ID NO: 585426 - DNA, 19 bp, Mus musculus
  siRNA target sequence for Atp6v0a4 (NM_080467.2,319-337).
gtggaggctgcgtattgct

SEQ ID NO: 585427 - DNA, 19 bp, Mus musculus
  siRNA target sequence for Atp6v0a4 (NM_080467.2,362-380).
gcttggttcagttcaaaga

SEQ ID NO: 585428 - DNA, 19 bp, Mus musculus
  siRNA target sequence for Atp6v0a4 (NM_080467.2,379-397).
gatctaaatgcaaatgtga

SEQ ID NO: 585429 - DNA, 19 bp, Mus musculus
  siRNA target sequence for Atp6v0a4 (NM_080467.2,526-544).
cctctccctcgggaaatga

SEQ ID NO: 585430 - DNA, 19 bp, Mus musculus
  siRNA target sequence for Atp6v0a4 (NM_080467.2,527-545).
ctctccctcgggaaatgat

SEQ ID NO: 585431 - DNA, 19 bp, Mus musculus
  siRNA target sequence for Atp6v0a4 (NM_080467.2,645-663).
caaatacctcctaaagaaa

SEQ ID NO: 585432 - DNA, 19 bp, Mus musculus
  siRNA target sequence for Atp6v0a4 (NM_080467.2,689-707).
ccaacttaggtgaagattt

SEQ ID NO: 585433 - DNA, 19 bp, Mus musculus
  siRNA target sequence for Atp6v0a4 (NM_080467.2,755-773).
ccttcatgactggaaagtt

SEQ ID NO: 585434 - DNA, 19 bp, Mus musculus
  siRNA target sequence for Atp6v0a4 (NM_080467.2,845-863).
ggggaaacgtgtacttgaa

SEQ ID NO: 585435 - DNA, 19 bp, Mus musculus
  siRNA target sequence for Atp6v0a4 (NM_080467.2,891-909).
ggaccctgtgacgaaagaa

SEQ ID NO: 585436 - DNA, 19 bp, Mus musculus
  siRNA target sequence for Atp6v0a4 (NM_080467.2,952-970).
cagctcaggctgaaaatca

SEQ ID NO: 585437 - DNA, 19 bp, Mus musculus
  siRNA target sequence for Atp6v0a4 (NM_080467.2,1056-1074).
cgtgaggctggaagactta

SEQ ID NO: 585438 - DNA, 19 bp, Mus musculus
  siRNA target sequence for Atp6v0a4 (NM_080467.2,1057-1075).
gtgaggctggaagacttaa

SEQ ID NO: 585439 - DNA, 19 bp, Mus musculus
  siRNA target sequence for Atp6v0a4 (NM_080467.2,1069-1087).
gacttaatcaccgtcatta

SEQ ID NO: 585440 - DNA, 19 bp, Mus musculus
  siRNA target sequence for Atp6v0a4 (NM_080467.2,1079-1097).
ccgtcattacccaaacaga

SEQ ID NO: 585441 - DNA, 19 bp, Mus musculus
  siRNA target sequence for Atp6v0a4 (NM_080467.2,1140-1158).
gcactcctgggtcatcaaa

SEQ ID NO: 585442 - DNA, 19 bp, Mus musculus
  siRNA target sequence for Atp6v0a4 (NM_080467.2,1143-1161).
ctcctgggtcatcaaagta

SEQ ID NO: 585443 - DNA, 19 bp, Mus musculus
  siRNA target sequence for Atp6v0a4 (NM_080467.2,1148-1166).
gggtcatcaaagtacagaa

SEQ ID NO: 585444 - DNA, 19 bp, Mus musculus
  siRNA target sequence for Atp6v0a4 (NM_080467.2,1188-1206).
gctgaacatgtgcaacatt

SEQ ID NO: 585445 - DNA, 19 bp, Mus musculus
  siRNA target sequence for Atp6v0a4 (NM_080467.2,1252-1270).
gcagacactagacacatta

SEQ ID NO: 585446 - DNA, 19 bp, Mus musculus
  siRNA target sequence for Atp6v0a4 (NM_080467.2,1253-1271).
cagacactagacacattaa

SEQ ID NO: 585447 - DNA, 19 bp, Mus musculus
  siRNA target sequence for Atp6v0a4 (NM_080467.2,1358-1376).
ccttcaacaggacgaataa

SEQ ID NO: 585448 - DNA, 19 bp, Mus musculus
  siRNA target sequence for Atp6v0a4 (NM_080467.2,1359-1377).
cttcaacaggacgaataaa

SEQ ID NO: 585449 - DNA, 19 bp, Mus musculus
  siRNA target sequence for Atp6v0a4 (NM_080467.2,1420-1438).
ggtagctaccgagagataa

SEQ ID NO: 585450 - DNA, 19 bp, Mus musculus
  siRNA target sequence for Atp6v0a4 (NM_080467.2,1529-1547).
ccttgtggatggtcctaaa

SEQ ID NO: 585451 - DNA, 19 bp, Mus musculus
  siRNA target sequence for Atp6v0a4 (NM_080467.2,1530-1548).
cttgtggatggtcctaaat

SEQ ID NO: 585452 - DNA, 19 bp, Mus musculus
  siRNA target sequence for Atp6v0a4 (NM_080467.2,1587-1605).
gtggaacatcttcttcaat

SEQ ID NO: 585453 - DNA, 19 bp, Mus musculus
  siRNA target sequence for Atp6v0a4 (NM_080467.2,1711-1729).
gtccagcctatgttcagaa

SEQ ID NO: 585454 - DNA, 19 bp, Mus musculus
  siRNA target sequence for Atp6v0a4 (NM_080467.2,1752-1770).
cgtggaaaacagtccatat

SEQ ID NO: 585455 - DNA, 19 bp, Mus musculus
  siRNA target sequence for Atp6v0a4 (NM_080467.2,1753-1771).
gtggaaaacagtccatatt

SEQ ID NO: 585456 - DNA, 19 bp, Mus musculus
  siRNA target sequence for Atp6v0a4 (NM_080467.2,1786-1804).
gccatcccaggagtgtatt

SEQ ID NO: 585457 - DNA, 19 bp, Mus musculus
  siRNA target sequence for Atp6v0a4 (NM_080467.2,1841-1859).
ggaacctggcttcaaacaa

SEQ ID NO: 585458 - DNA, 19 bp, Mus musculus
  siRNA target sequence for Atp6v0a4 (NM_080467.2,1903-1921).
ctgggaatcgctcatatga

SEQ ID NO: 585459 - DNA, 19 bp, Mus musculus
  siRNA target sequence for Atp6v0a4 (NM_080467.2,1905-1923).
gggaatcgctcatatgatt

SEQ ID NO: 585460 - DNA, 19 bp, Mus musculus
  siRNA target sequence for Atp6v0a4 (NM_080467.2,1906-1924).
ggaatcgctcatatgattt

SEQ ID NO: 585461 - DNA, 19 bp, Mus musculus
  siRNA target sequence for Atp6v0a4 (NM_080467.2,1907-1925).
gaatcgctcatatgatttt

SEQ ID NO: 585462 - DNA, 19 bp, Mus musculus
  siRNA target sequence for Atp6v0a4 (NM_080467.2,1940-1958).
gcctcttcaatcacattta

SEQ ID NO: 585463 - DNA, 19 bp, Mus musculus
  siRNA target sequence for Atp6v0a4 (NM_080467.2,1964-1982).
gaagaaccctcaacatcat

SEQ ID NO: 585464 - DNA, 19 bp, Mus musculus
  siRNA target sequence for Atp6v0a4 (NM_080467.2,1992-2010).
cattcccgagatgattttt

SEQ ID NO: 585465 - DNA, 19 bp, Mus musculus
  siRNA target sequence for Atp6v0a4 (NM_080467.2,1997-2015).
ccgagatgatttttatgct

SEQ ID NO: 585466 - DNA, 19 bp, Mus musculus
  siRNA target sequence for Atp6v0a4 (NM_080467.2,2096-2114).
gcatcctcatccactttat

SEQ ID NO: 585467 - DNA, 19 bp, Mus musculus
  siRNA target sequence for Atp6v0a4 (NM_080467.2,2106-2124).
ccactttatcggcatgttt

SEQ ID NO: 585468 - DNA, 19 bp, Mus musculus
  siRNA target sequence for Atp6v0a4 (NM_080467.2,2213-2231).
ctgtgccatggatgctttt

SEQ ID NO: 585469 - DNA, 19 bp, Mus musculus
  siRNA target sequence for Atp6v0a4 (NM_080467.2,2232-2250).
gattaagccatttgttctt

SEQ ID NO: 585470 - DNA, 19 bp, Mus musculus
  siRNA target sequence for Atp6v0a4 (NM_080467.2,2369-2387).
gccatgaggaggagttcaa

SEQ ID NO: 585471 - DNA, 19 bp, Mus musculus
  siRNA target sequence for Atp6v0d1 (NM_013477.2,170-188).
gctacttggagggattagt

SEQ ID NO: 585472 - DNA, 19 bp, Mus musculus
  siRNA target sequence for Atp6v0d1 (NM_013477.2,271-289).
cacctacagagtacagatt

SEQ ID NO: 585473 - DNA, 19 bp, Mus musculus
  siRNA target sequence for Atp6v0d1 (NM_013477.2,273-291).
cctacagagtacagattat

SEQ ID NO: 585474 - DNA, 19 bp, Mus musculus
  siRNA target sequence for Atp6v0d1 (NM_013477.2,375-393).
ccgccacatgagaaaccat

SEQ ID NO: 585475 - DNA, 19 bp, Mus musculus
  siRNA target sequence for Atp6v0d1 (NM_013477.2,417-435).
cctggacttcataacttat

SEQ ID NO: 585476 - DNA, 19 bp, Mus musculus
  siRNA target sequence for Atp6v0d1 (NM_013477.2,418-436).
ctggacttcataacttata

SEQ ID NO: 585477 - DNA, 19 bp, Mus musculus
  siRNA target sequence for Atp6v0d1 (NM_013477.2,431-449).
cttatagctacatgattga

SEQ ID NO: 585478 - DNA, 19 bp, Mus musculus
  siRNA target sequence for Atp6v0d1 (NM_013477.2,476-494).
cactgcaccagcgttcaat

SEQ ID NO: 585479 - DNA, 19 bp, Mus musculus
  siRNA target sequence for Atp6v0d1 (NM_013477.2,480-498).
gcaccagcgttcaatagct

SEQ ID NO: 585480 - DNA, 19 bp, Mus musculus
  siRNA target sequence for Atp6v0d1 (NM_013477.2,486-504).
gcgttcaatagctgaactt

SEQ ID NO: 585481 - DNA, 19 bp, Mus musculus
  siRNA target sequence for Atp6v0d1 (NM_013477.2,602-620).
cacccctggcggctttttt

SEQ ID NO: 585482 - DNA, 19 bp, Mus musculus
  siRNA target sequence for Atp6v0d1 (NM_013477.2,605-623).
ccctggcggcttttttcca

SEQ ID NO: 585483 - DNA, 19 bp, Mus musculus
  siRNA target sequence for Atp6v0d1 (NM_013477.2,652-670).
gagatgaacatcgagataa

SEQ ID NO: 585484 - DNA, 19 bp, Mus musculus
  siRNA target sequence for Atp6v0d1 (NM_013477.2,755-773).
gtcctatcctagagtttga

SEQ ID NO: 585485 - DNA, 19 bp, Mus musculus
  siRNA target sequence for Atp6v0d1 (NM_013477.2,899-917).
gggctgatgactatgaaca

SEQ ID NO: 585486 - DNA, 19 bp, Mus musculus
  siRNA target sequence for Atp6v0d1 (NM_013477.2,999-1017).
ggaggaccggttttttgaa

SEQ ID NO: 585487 - DNA, 19 bp, Mus musculus
  siRNA target sequence for Atp6v0d1 (NM_013477.2,1002-1020).
ggaccggttttttgaacat

SEQ ID NO: 585488 - DNA, 19 bp, Mus musculus
  siRNA target sequence for Atp6v0d1 (NM_013477.2,1015-1033).
gaacatgaggtgaagctaa

SEQ ID NO: 585489 - DNA, 19 bp, Mus musculus
  siRNA target sequence for Atp6v0d1 (NM_013477.2,1069-1087).
gtcttttatgcctttgtga

SEQ ID NO: 585490 - DNA, 19 bp, Mus musculus
  siRNA target sequence for Atp6v0d1 (NM_013477.2,1102-1120).
gaatgtcgcaacatcgtat

SEQ ID NO: 585491 - DNA, 19 bp, Mus musculus
  siRNA target sequence for Atp6v0d1 (NM_013477.2,1106-1124).
gtcgcaacatcgtatggat

SEQ ID NO: 585492 - DNA, 19 bp, Mus musculus
  siRNA target sequence for Atp6v0d1 (NM_013477.2,1151-1169).
gcgccaagatcgacaacta

SEQ ID NO: 585493 - DNA, 19 bp, Mus musculus
  siRNA target sequence for Atp6v0d1 (NM_013477.2,1164-1182).
caactacatccccatcttt

SEQ ID NO: 585494 - DNA, 19 bp, Mus musculus
  siRNA target sequence for Atp6v1e1 (NM_007510.1,146-164).
cgcaaagactgaagattat

SEQ ID NO: 585495 - DNA, 19 bp, Mus musculus
  siRNA target sequence for Atp6v1e1 (NM_007510.1,165-183).
ggaatactacgagaagaaa

SEQ ID NO: 585496 - DNA, 19 bp, Mus musculus
  siRNA target sequence for Atp6v1e1 (NM_007510.1,219-237).
gatgtccaacttgatgaat

SEQ ID NO: 585497 - DNA, 19 bp, Mus musculus
  siRNA target sequence for Atp6v1e1 (NM_007510.1,402-420).
gatcgtgcgttgcagaaaa

SEQ ID NO: 585498 - DNA, 19 bp, Mus musculus
  siRNA target sequence for Atp6v1e1 (NM_007510.1,405-423).
cgtgcgttgcagaaaacaa

SEQ ID NO: 585499 - DNA, 19 bp, Mus musculus
  siRNA target sequence for Atp6v1e1 (NM_007510.1,408-426).
gcgttgcagaaaacaagat

SEQ ID NO: 585500 - DNA, 19 bp, Mus musculus
  siRNA target sequence for Atp6v1e1 (NM_007510.1,435-453).
ggtgaaggccgcagtacaa

SEQ ID NO: 585501 - DNA, 19 bp, Mus musculus
  siRNA target sequence for Atp6v1e1 (NM_007510.1,436-454).
gtgaaggccgcagtacaaa

SEQ ID NO: 585502 - DNA, 19 bp, Mus musculus
  siRNA target sequence for Atp6v1e1 (NM_007510.1,438-456).
gaaggccgcagtacaaaaa

SEQ ID NO: 585503 - DNA, 19 bp, Mus musculus
  siRNA target sequence for Atp6v1e1 (NM_007510.1,541-559).
ggtggcgttgagatctata

SEQ ID NO: 585504 - DNA, 19 bp, Mus musculus
  siRNA target sequence for Atp6v1e1 (NM_007510.1,542-560).
gtggcgttgagatctataa

SEQ ID NO: 585505 - DNA, 19 bp, Mus musculus
  siRNA target sequence for Atp6v1e1 (NM_007510.1,563-581).
gggatcgcaagataaaggt

SEQ ID NO: 585506 - DNA, 19 bp, Mus musculus
  siRNA target sequence for Atp6v1e1 (NM_007510.1,564-582).
ggatcgcaagataaaggtt

SEQ ID NO: 585507 - DNA, 19 bp, Mus musculus
  siRNA target sequence for Atp6v1e1 (NM_007510.1,565-583).
gatcgcaagataaaggttt

SEQ ID NO: 585508 - DNA, 19 bp, Mus musculus
  siRNA target sequence for Atp6v1e1 (NM_007510.1,655-673).
ggtgcaaatgccaatagga

SEQ ID NO: 585509 - DNA, 19 bp, Mus musculus
  siRNA target sequence for Atp6v1e2 (NM_029121.1,389-407).
cccgagacaatctcatctt

SEQ ID NO: 585510 - DNA, 19 bp, Mus musculus
  siRNA target sequence for Atp6v1e2 (NM_029121.1,390-408).
ccgagacaatctcatctta

SEQ ID NO: 585511 - DNA, 19 bp, Mus musculus
  siRNA target sequence for Atp6v1e2 (NM_029121.1,394-412).
gacaatctcatcttagaat

SEQ ID NO: 585512 - DNA, 19 bp, Mus musculus
  siRNA target sequence for Atp6v1e2 (NM_029121.1,443-461).
gaattgtgtcggatgaaga

SEQ ID NO: 585513 - DNA, 19 bp, Mus musculus
  siRNA target sequence for Atp6v1e2 (NM_029121.1,602-620).
ggctctgccagaagcattt

SEQ ID NO: 585514 - DNA, 19 bp, Mus musculus
  siRNA target sequence for Atp6v1e2 (NM_029121.1,760-778).
gaaatacgagggattctgt

SEQ ID NO: 585515 - DNA, 19 bp, Mus musculus
  siRNA target sequence for Atp6v1e2 (NM_029121.1,789-807).
caccagcagaaagttcttt

SEQ ID NO: 585516 - DNA, 19 bp, Mus musculus
  siRNA target sequence for Atp6v1g3 (NM_177397.2,81-99).
ccaaggacaagctagatga

SEQ ID NO: 585517 - DNA, 19 bp, Mus musculus
  siRNA target sequence for Atp6v1g3 (NM_177397.2,155-173).
gagacggaccagtacagaa

SEQ ID NO: 585518 - DNA, 19 bp, Mus musculus
  siRNA target sequence for Atp6v1g3 (NM_177397.2,197-215).
ctgaagcaggctaagataa

SEQ ID NO: 585519 - DNA, 19 bp, Mus musculus
  siRNA target sequence for Atp6v1g3 (NM_177397.2,228-246).
gccacctctcggatgaaat

SEQ ID NO: 585520 - DNA, 19 bp, Mus musculus
  siRNA target sequence for Atp6v1g3 (NM_177397.2,229-247).
ccacctctcggatgaaata

SEQ ID NO: 585521 - DNA, 19 bp, Mus musculus
  siRNA target sequence for Atp6v1g3 (NM_177397.2,309-327).
gcgtgattaagcagctatt

SEQ ID NO: 585522 - DNA, 19 bp, Mus musculus
  siRNA target sequence for Atp6v1g3 (NM_177397.2,331-349).
catggtgtgcgacatgaaa

SEQ ID NO: 585523 - DNA, 19 bp, Mus musculus
  siRNA target sequence for Atp1b1 (NM_009721.2,721-739).
gccaggattgacacagatt

SEQ ID NO: 585524 - DNA, 19 bp, Mus musculus
  siRNA target sequence for Atp1b1 (NM_009721.2,760-778).
gatctccttccgtcctaat

SEQ ID NO: 585525 - DNA, 19 bp, Mus musculus
  siRNA target sequence for Atp1b1 (NM_009721.2,794-812).
gaggcctacgtgctaaaca

SEQ ID NO: 585526 - DNA, 19 bp, Mus musculus
  siRNA target sequence for Atp1b1 (NM_009721.2,1376-1394).
cagggacgctttgatgtaa

SEQ ID NO: 585527 - DNA, 19 bp, Mus musculus
  siRNA target sequence for Atp1b1 (NM_009721.2,1378-1396).
gggacgctttgatgtaaaa

SEQ ID NO: 585528 - DNA, 19 bp, Mus musculus
  siRNA target sequence for Atp1b1 (NM_009721.2,1379-1397).
ggacgctttgatgtaaaaa

SEQ ID NO: 585529 - DNA, 19 bp, Mus musculus
  siRNA target sequence for Atp1b1 (NM_009721.2,1380-1398).
gacgctttgatgtaaaaat

SEQ ID NO: 585530 - DNA, 19 bp, Mus musculus
  siRNA target sequence for Atp1b2 (NM_013415.2,583-601).
cttctacctcgtcttctat

SEQ ID NO: 585531 - DNA, 19 bp, Mus musculus
  siRNA target sequence for Atp1b2 (NM_013415.2,691-709).
cacaccaggcttgatgatt

SEQ ID NO: 585532 - DNA, 19 bp, Mus musculus
  siRNA target sequence for Atp1b2 (NM_013415.2,765-783).
ggggtcagcatgttcagaa

SEQ ID NO: 585533 - DNA, 19 bp, Mus musculus
  siRNA target sequence for Atp1b2 (NM_013415.2,843-861).
gccgtccagggcgatatta

SEQ ID NO: 585534 - DNA, 19 bp, Mus musculus
  siRNA target sequence for Atp1b2 (NM_013415.2,844-862).
ccgtccagggcgatattat

SEQ ID NO: 585535 - DNA, 19 bp, Mus musculus
  siRNA target sequence for Atp1b2 (NM_013415.2,846-864).
gtccagggcgatattatga

SEQ ID NO: 585536 - DNA, 19 bp, Mus musculus
  siRNA target sequence for Atp1b2 (NM_013415.2,950-968).
gaccctacccactatggtt

SEQ ID NO: 585537 - DNA, 19 bp, Mus musculus
  siRNA target sequence for Atp1b2 (NM_013415.2,1119-1137).
gcagcattgatctgatgta

SEQ ID NO: 585538 - DNA, 19 bp, Mus musculus
  siRNA target sequence for Atp1b2 (NM_013415.2,1122-1140).
gcattgatctgatgtactt

SEQ ID NO: 585539 - DNA, 19 bp, Mus musculus
  siRNA target sequence for Atp1b2 (NM_013415.2,1132-1150).
gatgtactttccctactat

SEQ ID NO: 585540 - DNA, 19 bp, Mus musculus
  siRNA target sequence for Atp1b2 (NM_013415.2,1159-1177).
gttccatgtaaactatact

SEQ ID NO: 585541 - DNA, 19 bp, Mus musculus
  siRNA target sequence for Atp1b2 (NM_013415.2,1242-1260).
gcatcaacgctgccaatat

SEQ ID NO: 585542 - DNA, 19 bp, Mus musculus
  siRNA target sequence for Atp1b2 (NM_013415.2,1243-1261).
catcaacgctgccaatatt

SEQ ID NO: 585543 - DNA, 19 bp, Mus musculus
  siRNA target sequence for Atp1b2 (NM_013415.2,1306-1324).
caaactccggatcaacaaa

SEQ ID NO: 585544 - DNA, 19 bp, Mus musculus
  siRNA target sequence for Atp1b4 (NM_133690.1,70-88).
caggatgaagcgaatcaca

SEQ ID NO: 585545 - DNA, 19 bp, Mus musculus
  siRNA target sequence for Atp1b4 (NM_133690.1,76-94).
gaagcgaatcacaactact

SEQ ID NO: 585546 - DNA, 19 bp, Mus musculus
  siRNA target sequence for Atp1b4 (NM_133690.1,236-254).
gtgcctggtggcggaaatt

SEQ ID NO: 585547 - DNA, 19 bp, Mus musculus
  siRNA target sequence for Atp1b4 (NM_133690.1,239-257).
cctggtggcggaaattgca

SEQ ID NO: 585548 - DNA, 19 bp, Mus musculus
  siRNA target sequence for Atp1b4 (NM_133690.1,314-332).
gtcagagtcggagtcttat

SEQ ID NO: 585549 - DNA, 19 bp, Mus musculus
  siRNA target sequence for Atp1b4 (NM_133690.1,320-338).
gtcggagtcttattttagt

SEQ ID NO: 585550 - DNA, 19 bp, Mus musculus
  siRNA target sequence for Atp1b4 (NM_133690.1,492-510).
caacttcaacgtttctgaa

SEQ ID NO: 585551 - DNA, 19 bp, Mus musculus
  siRNA target sequence for Atp1b4 (NM_133690.1,501-519).
cgtttctgaacctgaaact

SEQ ID NO: 585552 - DNA, 19 bp, Mus musculus
  siRNA target sequence for Atp1b4 (NM_133690.1,553-571).
ctccagggctataatgaca

SEQ ID NO: 585553 - DNA, 19 bp, Mus musculus
  siRNA target sequence for Atp1b4 (NM_133690.1,561-579).
ctataatgacagtcttcaa

SEQ ID NO: 585554 - DNA, 19 bp, Mus musculus
  siRNA target sequence for Atp1b4 (NM_133690.1,582-600).
ggaaatgaatatagattgt

SEQ ID NO: 585555 - DNA, 19 bp, Mus musculus
  siRNA target sequence for Atp1b4 (NM_133690.1,601-619).
cctccgggtcggtacttca

SEQ ID NO: 585556 - DNA, 19 bp, Mus musculus
  siRNA target sequence for Atp1b4 (NM_133690.1,602-620).
ctccgggtcggtacttcat

SEQ ID NO: 585557 - DNA, 19 bp, Mus musculus
  siRNA target sequence for Atp1b4 (NM_133690.1,645-663).
caagaaggcctgccaattt

SEQ ID NO: 585558 - DNA, 19 bp, Mus musculus
  siRNA target sequence for Atp1b4 (NM_133690.1,666-684).
gcgctccttcctgaagaat

SEQ ID NO: 585559 - DNA, 19 bp, Mus musculus
  siRNA target sequence for Atp1b4 (NM_133690.1,667-685).
cgctccttcctgaagaatt

SEQ ID NO: 585560 - DNA, 19 bp, Mus musculus
  siRNA target sequence for Atp1b4 (NM_133690.1,693-711).
gttggaggatcccactttt

SEQ ID NO: 585561 - DNA, 19 bp, Mus musculus
  siRNA target sequence for Atp1b4 (NM_133690.1,696-714).
ggaggatcccacttttgga

SEQ ID NO: 585562 - DNA, 19 bp, Mus musculus
  siRNA target sequence for Atp1b4 (NM_133690.1,697-715).
gaggatcccacttttggat

SEQ ID NO: 585563 - DNA, 19 bp, Mus musculus
  siRNA target sequence for Atp1b4 (NM_133690.1,703-721).
cccacttttggatactcta

SEQ ID NO: 585564 - DNA, 19 bp, Mus musculus
  siRNA target sequence for Atp1b4 (NM_133690.1,731-749).
cttgcatcctcctcaagat

SEQ ID NO: 585565 - DNA, 19 bp, Mus musculus
  siRNA target sequence for Atp1b4 (NM_133690.1,734-752).
gcatcctcctcaagatgaa

SEQ ID NO: 585566 - DNA, 19 bp, Mus musculus
  siRNA target sequence for Atp1b4 (NM_133690.1,744-762).
caagatgaaccggattgta

SEQ ID NO: 585567 - DNA, 19 bp, Mus musculus
  siRNA target sequence for Atp1b4 (NM_133690.1,798-816).
gtcctgcaaagttcagaaa

SEQ ID NO: 585568 - DNA, 19 bp, Mus musculus
  siRNA target sequence for Atp1b4 (NM_133690.1,829-847).
gacattcgatccatcaatt

SEQ ID NO: 585569 - DNA, 19 bp, Mus musculus
  siRNA target sequence for Atp1b4 (NM_133690.1,852-870).
cccggagtccgcttctttt

SEQ ID NO: 585570 - DNA, 19 bp, Mus musculus
  siRNA target sequence for Atp1b4 (NM_133690.1,895-913).
ggcaaactgactcatgtta

SEQ ID NO: 585571 - DNA, 19 bp, Mus musculus
  siRNA target sequence for Atp1b4 (NM_133690.1,896-914).
gcaaactgactcatgttaa

SEQ ID NO: 585572 - DNA, 19 bp, Mus musculus
  siRNA target sequence for Atp1b4 (NM_133690.1,901-919).
ctgactcatgttaactaca

SEQ ID NO: 585573 - DNA, 19 bp, Mus musculus
  siRNA target sequence for Atp1b4 (NM_133690.1,925-943).
ccgctggtggcaatgcatt

SEQ ID NO: 585574 - DNA, 19 bp, Mus musculus
  siRNA target sequence for Atp1b4 (NM_133690.1,926-944).
cgctggtggcaatgcattt

SEQ ID NO: 585575 - DNA, 19 bp, Mus musculus
  siRNA target sequence for Atp1b4 (NM_133690.1,933-951).
ggcaatgcattttacagat

SEQ ID NO: 585576 - DNA, 19 bp, Mus musculus
  siRNA target sequence for Atp1b4 (NM_133690.1,995-1013).
gcaaaggcatcgtaaatga

SEQ ID NO: 585577 - DNA, 19 bp, Mus musculus
  siRNA target sequence for Atp1b4 (NM_133690.1,996-1014).
caaaggcatcgtaaatgat

SEQ ID NO: 585578 - DNA, 19 bp, Mus musculus
  siRNA target sequence for Atp1b4 (NM_133690.1,1017-1035).
catcaatgatcgttttgtt

SEQ ID NO: 585579 - DNA, 19 bp, Mus musculus
  siRNA target sequence for Atp1b4 (NM_133690.1,1027-1045).
cgttttgttgggaggataa

SEQ ID NO: 585580 - DNA, 19 bp, Mus musculus
  siRNA target sequence for Atp1b4 (NM_133690.1,1028-1046).
gttttgttgggaggataat

SEQ ID NO: 585581 - DNA, 19 bp, Mus musculus
  siRNA target sequence for Atp1b4 (NM_133690.1,1033-1051).
gttgggaggataatcttta

SEQ ID NO: 585582 - DNA, 19 bp, Mus musculus
  siRNA target sequence for Atp4b (NM_009724.1,151-169).
gtactacgcaggtttctat

SEQ ID NO: 585583 - DNA, 19 bp, Mus musculus
  siRNA target sequence for Atp4b (NM_009724.1,239-257).
gactaccaggaccagttaa

SEQ ID NO: 585584 - DNA, 19 bp, Mus musculus
  siRNA target sequence for Atp4b (NM_009724.1,244-262).
ccaggaccagttaaagtca

SEQ ID NO: 585585 - DNA, 19 bp, Mus musculus
  siRNA target sequence for Atp4b (NM_009724.1,304-322).
gctgaagatttcctacaat

SEQ ID NO: 585586 - DNA, 19 bp, Mus musculus
  siRNA target sequence for Atp4b (NM_009724.1,404-422).
gacagcatcaactgtacat

SEQ ID NO: 585587 - DNA, 19 bp, Mus musculus
  siRNA target sequence for Atp4b (NM_009724.1,406-424).
cagcatcaactgtacatct

SEQ ID NO: 585588 - DNA, 19 bp, Mus musculus
  siRNA target sequence for Atp4b (NM_009724.1,409-427).
catcaactgtacatctgaa

SEQ ID NO: 585589 - DNA, 19 bp, Mus musculus
  siRNA target sequence for Atp4b (NM_009724.1,417-435).
gtacatctgaaaagtactt

SEQ ID NO: 585590 - DNA, 19 bp, Mus musculus
  siRNA target sequence for Atp4b (NM_009724.1,672-690).
ccctgcaggtcgagtacta

SEQ ID NO: 585591 - DNA, 19 bp, Mus musculus
  siRNA target sequence for Atp4b (NM_009724.1,705-723).
ccttcagtctccactattt

SEQ ID NO: 585592 - DNA, 19 bp, Mus musculus
  siRNA target sequence for Atp4b (NM_009724.1,715-733).
ccactatttcccctactat

SEQ ID NO: 585593 - DNA, 19 bp, Mus musculus
  siRNA target sequence for Atp4b (NM_009724.1,724-742).
cccctactatggcaagaaa

SEQ ID NO: 585594 - DNA, 19 bp, Mus musculus
  siRNA target sequence for Atp4b (NM_009724.1,881-899).
gtggagtttaaacttacaa

SEQ ID NO: 585595 - DNA, 19 bp, Mus musculus
  siRNA target sequence for Atp4b (NM_009724.1,883-901).
ggagtttaaacttacaata

SEQ ID NO: 585596 - DNA, 19 bp, Mus musculus
  siRNA target sequence for Atp2a1 (NM_007504.2,221-239).
cttaccccagaccaagtta

SEQ ID NO: 585597 - DNA, 19 bp, Mus musculus
  siRNA target sequence for Atp2a1 (NM_007504.2,328-346).
cctgcttgtgcggattctt

SEQ ID NO: 585598 - DNA, 19 bp, Mus musculus
  siRNA target sequence for Atp2a1 (NM_007504.2,495-513).
ctatcgaagcgctgaaaga

SEQ ID NO: 585599 - DNA, 19 bp, Mus musculus
  siRNA target sequence for Atp2a1 (NM_007504.2,640-658).
ccgcatcctctccatcaaa

SEQ ID NO: 585600 - DNA, 19 bp, Mus musculus
  siRNA target sequence for Atp2a1 (NM_007504.2,641-659).
cgcatcctctccatcaaat

SEQ ID NO: 585601 - DNA, 19 bp, Mus musculus
  siRNA target sequence for Atp2a1 (NM_007504.2,1014-1032).
ggttccggggtgccattta

SEQ ID NO: 585602 - DNA, 19 bp, Mus musculus
  siRNA target sequence for Atp2a1 (NM_007504.2,1238-1256).
gtttgcaagatgttcatca

SEQ ID NO: 585603 - DNA, 19 bp, Mus musculus
  siRNA target sequence for Atp2a1 (NM_007504.2,1242-1260).
gcaagatgttcatcattga

SEQ ID NO: 585604 - DNA, 19 bp, Mus musculus
  siRNA target sequence for Atp2a1 (NM_007504.2,1299-1317).
ccatcactggctctactta

SEQ ID NO: 585605 - DNA, 19 bp, Mus musculus
  siRNA target sequence for Atp2a1 (NM_007504.2,1329-1347).
gagaggtcttgaagaatga

SEQ ID NO: 585606 - DNA, 19 bp, Mus musculus
  siRNA target sequence for Atp2a1 (NM_007504.2,1357-1375).
ccgagcagggcagtatgat

SEQ ID NO: 585607 - DNA, 19 bp, Mus musculus
  siRNA target sequence for Atp2a1 (NM_007504.2,1499-1517).
gagaagatgaacgtattca

SEQ ID NO: 585608 - DNA, 19 bp, Mus musculus
  siRNA target sequence for Atp2a1 (NM_007504.2,1569-1587).
cggtgatccgccaactcat

SEQ ID NO: 585609 - DNA, 19 bp, Mus musculus
  siRNA target sequence for Atp2a1 (NM_007504.2,1594-1612).
ggaattcaccctggaattt

SEQ ID NO: 585610 - DNA, 19 bp, Mus musculus
  siRNA target sequence for Atp2a1 (NM_007504.2,1595-1613).
gaattcaccctggaatttt

SEQ ID NO: 585611 - DNA, 19 bp, Mus musculus
  siRNA target sequence for Atp2a1 (NM_007504.2,1668-1686).
ctgccgtgggcaacaagat

SEQ ID NO: 585612 - DNA, 19 bp, Mus musculus
  siRNA target sequence for Atp2a1 (NM_007504.2,1670-1688).
gccgtgggcaacaagatgt

SEQ ID NO: 585613 - DNA, 19 bp, Mus musculus
  siRNA target sequence for Atp2a1 (NM_007504.2,1671-1689).
ccgtgggcaacaagatgtt

SEQ ID NO: 585614 - DNA, 19 bp, Mus musculus
  siRNA target sequence for Atp2a1 (NM_007504.2,1672-1690).
cgtgggcaacaagatgttt

SEQ ID NO: 585615 - DNA, 19 bp, Mus musculus
  siRNA target sequence for Atp2a1 (NM_007504.2,1712-1730).
gtcatcgaccgctgtaact

SEQ ID NO: 585616 - DNA, 19 bp, Mus musculus
  siRNA target sequence for Atp2a1 (NM_007504.2,1714-1732).
catcgaccgctgtaactat

SEQ ID NO: 585617 - DNA, 19 bp, Mus musculus
  siRNA target sequence for Atp2a1 (NM_007504.2,1747-1765).
gacccgtgtgccattgaca

SEQ ID NO: 585618 - DNA, 19 bp, Mus musculus
  siRNA target sequence for Atp2a1 (NM_007504.2,1874-1892).
gagatggttctggatgatt

SEQ ID NO: 585619 - DNA, 19 bp, Mus musculus
  siRNA target sequence for Atp2a1 (NM_007504.2,2003-2021).
gggatccgagtgatcatga

SEQ ID NO: 585620 - DNA, 19 bp, Mus musculus
  siRNA target sequence for Atp2a1 (NM_007504.2,2004-2022).
ggatccgagtgatcatgat

SEQ ID NO: 585621 - DNA, 19 bp, Mus musculus
  siRNA target sequence for Atp2a1 (NM_007504.2,2194-2212).
ctcacacaagtccaagatt

SEQ ID NO: 585622 - DNA, 19 bp, Mus musculus
  siRNA target sequence for Atp2a1 (NM_007504.2,2335-2353).
gacggcctctgaaatggta

SEQ ID NO: 585623 - DNA, 19 bp, Mus musculus
  siRNA target sequence for Atp2a1 (NM_007504.2,2351-2369).
gtactggccgatgataact

SEQ ID NO: 585624 - DNA, 19 bp, Mus musculus
  siRNA target sequence for Atp2a1 (NM_007504.2,2619-2637).
gtcccaaggagcctcttat

SEQ ID NO: 585625 - DNA, 19 bp, Mus musculus
  siRNA target sequence for Atp2a1 (NM_007504.2,2785-2803).
gcacaaccctgaattcgat

SEQ ID NO: 585626 - DNA, 19 bp, Mus musculus
  siRNA target sequence for Atp2a1 (NM_007504.2,3002-3020).
gaccccctgccgatgatct

SEQ ID NO: 585627 - DNA, 19 bp, Mus musculus
  siRNA target sequence for Atp2a1 (NM_007504.2,3005-3023).
cccctgccgatgatcttca

SEQ ID NO: 585628 - DNA, 19 bp, Mus musculus
  siRNA target sequence for Atp2a1 (NM_007504.2,3051-3069).
ggctcatggtcctcaagat

SEQ ID NO: 585629 - DNA, 19 bp, Mus musculus
  siRNA target sequence for Atp2a1 (NM_007504.2,3106-3124).
gttcattgctcggaactat

SEQ ID NO: 585630 - DNA, 19 bp, Mus musculus
  siRNA target sequence for Helb (NM_080446.1,65-83).
cctctgcacccgtacaaga

SEQ ID NO: 585631 - DNA, 19 bp, Mus musculus
  siRNA target sequence for Helb (NM_080446.1,208-226).
gtctatccctgatgagtat

SEQ ID NO: 585632 - DNA, 19 bp, Mus musculus
  siRNA target sequence for Helb (NM_080446.1,214-232).
ccctgatgagtatactaaa

SEQ ID NO: 585633 - DNA, 19 bp, Mus musculus
  siRNA target sequence for Helb (NM_080446.1,221-239).
gagtatactaaagagaaat

SEQ ID NO: 585634 - DNA, 19 bp, Mus musculus
  siRNA target sequence for Helb (NM_080446.1,310-328).
gcgatccaggagctatcaa

SEQ ID NO: 585635 - DNA, 19 bp, Mus musculus
  siRNA target sequence for Helb (NM_080446.1,369-387).
cgccaccagatcaaaaaca

SEQ ID NO: 585636 - DNA, 19 bp, Mus musculus
  siRNA target sequence for Helb (NM_080446.1,393-411).
gttcgctttttcttaaaga

SEQ ID NO: 585637 - DNA, 19 bp, Mus musculus
  siRNA target sequence for Helb (NM_080446.1,426-444).
ctgagcgcatacaggaatt

SEQ ID NO: 585638 - DNA, 19 bp, Mus musculus
  siRNA target sequence for Helb (NM_080446.1,428-446).
gagcgcatacaggaatttt

SEQ ID NO: 585639 - DNA, 19 bp, Mus musculus
  siRNA target sequence for Helb (NM_080446.1,432-450).
gcatacaggaatttttaaa

SEQ ID NO: 585640 - DNA, 19 bp, Mus musculus
  siRNA target sequence for Helb (NM_080446.1,503-521).
gaaacattaaggcttttct

SEQ ID NO: 585641 - DNA, 19 bp, Mus musculus
  siRNA target sequence for Helb (NM_080446.1,712-730).
ggtgctgggatgcatagaa

SEQ ID NO: 585642 - DNA, 19 bp, Mus musculus
  siRNA target sequence for Helb (NM_080446.1,718-736).
gggatgcatagaagatgtt

SEQ ID NO: 585643 - DNA, 19 bp, Mus musculus
  siRNA target sequence for Helb (NM_080446.1,771-789).
ggataacctacagagaaat

SEQ ID NO: 585644 - DNA, 19 bp, Mus musculus
  siRNA target sequence for Helb (NM_080446.1,875-893).
gcattggtcatatattcta

SEQ ID NO: 585645 - DNA, 19 bp, Mus musculus
  siRNA target sequence for Helb (NM_080446.1,876-894).
cattggtcatatattctaa

SEQ ID NO: 585646 - DNA, 19 bp, Mus musculus
  siRNA target sequence for Helb (NM_080446.1,919-937).
cggacacacgtacattgaa

SEQ ID NO: 585647 - DNA, 19 bp, Mus musculus
  siRNA target sequence for Helb (NM_080446.1,923-941).
cacacgtacattgaagtaa

SEQ ID NO: 585648 - DNA, 19 bp, Mus musculus
  siRNA target sequence for Helb (NM_080446.1,927-945).
cgtacattgaagtaaaaga

SEQ ID NO: 585649 - DNA, 19 bp, Mus musculus
  siRNA target sequence for Helb (NM_080446.1,954-972).
cgggcttgtcggagcatat

SEQ ID NO: 585650 - DNA, 19 bp, Mus musculus
  siRNA target sequence for Helb (NM_080446.1,956-974).
ggcttgtcggagcatatgt

SEQ ID NO: 585651 - DNA, 19 bp, Mus musculus
  siRNA target sequence for Helb (NM_080446.1,958-976).
cttgtcggagcatatgtca

SEQ ID NO: 585652 - DNA, 19 bp, Mus musculus
  siRNA target sequence for Helb (NM_080446.1,1019-1037).
gacgtggtcatttatgaga

SEQ ID NO: 585653 - DNA, 19 bp, Mus musculus
  siRNA target sequence for Helb (NM_080446.1,1116-1134).
ctccgtggcacttaaaagt

SEQ ID NO: 585654 - DNA, 19 bp, Mus musculus
  siRNA target sequence for Helb (NM_080446.1,1144-1162).
gaacgtcctggcgtcaatt

SEQ ID NO: 585655 - DNA, 19 bp, Mus musculus
  siRNA target sequence for Helb (NM_080446.1,1147-1165).
cgtcctggcgtcaattaga

SEQ ID NO: 585656 - DNA, 19 bp, Mus musculus
  siRNA target sequence for Helb (NM_080446.1,1265-1283).
gatggcgatgaccatgtta

SEQ ID NO: 585657 - DNA, 19 bp, Mus musculus
  siRNA target sequence for Helb (NM_080446.1,1268-1286).
ggcgatgaccatgttagaa

SEQ ID NO: 585658 - DNA, 19 bp, Mus musculus
  siRNA target sequence for Helb (NM_080446.1,1294-1312).
cgaacacgtcgcaaatgca

SEQ ID NO: 585659 - DNA, 19 bp, Mus musculus
  siRNA target sequence for Helb (NM_080446.1,1300-1318).
cgtcgcaaatgcagaaata

SEQ ID NO: 585660 - DNA, 19 bp, Mus musculus
  siRNA target sequence for Helb (NM_080446.1,1324-1342).
cgtcccactggatcaagat

SEQ ID NO: 585661 - DNA, 19 bp, Mus musculus
  siRNA target sequence for Helb (NM_080446.1,1694-1712).
gacaagccgtggaaattct

SEQ ID NO: 585662 - DNA, 19 bp, Mus musculus
  siRNA target sequence for Helb (NM_080446.1,1762-1780).
gatcttcaagtcagtgtta

SEQ ID NO: 585663 - DNA, 19 bp, Mus musculus
  siRNA target sequence for Helb (NM_080446.1,1874-1892).
gatgtctttgagactctta

SEQ ID NO: 585664 - DNA, 19 bp, Mus musculus
  siRNA target sequence for Helb (NM_080446.1,1877-1895).
gtctttgagactcttaagt

SEQ ID NO: 585665 - DNA, 19 bp, Mus musculus
  siRNA target sequence for Helb (NM_080446.1,1879-1897).
ctttgagactcttaagtca

SEQ ID NO: 585666 - DNA, 19 bp, Mus musculus
  siRNA target sequence for Helb (NM_080446.1,1935-1953).
cagagtctcagctgattgt

SEQ ID NO: 585667 - DNA, 19 bp, Mus musculus
  siRNA target sequence for Helb (NM_080446.1,1946-1964).
ctgattgtggacaatgcta

SEQ ID NO: 585668 - DNA, 19 bp, Mus musculus
  siRNA target sequence for Helb (NM_080446.1,1955-1973).
gacaatgctacaagaatct

SEQ ID NO: 585669 - DNA, 19 bp, Mus musculus
  siRNA target sequence for Helb (NM_080446.1,1997-2015).
gatgctgaactaaatatct

SEQ ID NO: 585670 - DNA, 19 bp, Mus musculus
  siRNA target sequence for Helb (NM_080446.1,2014-2032).
ctgtggtaatcctacatta

SEQ ID NO: 585671 - DNA, 19 bp, Mus musculus
  siRNA target sequence for Helb (NM_080446.1,2033-2051).
cctctctccattcaagata

SEQ ID NO: 585672 - DNA, 19 bp, Mus musculus
  siRNA target sequence for Helb (NM_080446.1,2034-2052).
ctctctccattcaagataa

SEQ ID NO: 585673 - DNA, 19 bp, Mus musculus
  siRNA target sequence for Helb (NM_080446.1,2041-2059).
cattcaagataagacattt

SEQ ID NO: 585674 - DNA, 19 bp, Mus musculus
  siRNA target sequence for Helb (NM_080446.1,2089-2107).
cagatctcagtcgtctaaa

SEQ ID NO: 585675 - DNA, 19 bp, Mus musculus
  siRNA target sequence for Helb (NM_080446.1,2109-2127).
gtgaacaccgatctaattt

SEQ ID NO: 585676 - DNA, 19 bp, Mus musculus
  siRNA target sequence for Helb (NM_080446.1,2111-2129).
gaacaccgatctaatttat

SEQ ID NO: 585677 - DNA, 19 bp, Mus musculus
  siRNA target sequence for Helb (NM_080446.1,2114-2132).
caccgatctaatttatata

SEQ ID NO: 585678 - DNA, 19 bp, Mus musculus
  siRNA target sequence for Helb (NM_080446.1,2116-2134).
ccgatctaatttatatact

SEQ ID NO: 585679 - DNA, 19 bp, Mus musculus
  siRNA target sequence for Helb (NM_080446.1,2167-2185).
ctgctcttttgaaagttca

SEQ ID NO: 585680 - DNA, 19 bp, Mus musculus
  siRNA target sequence for Helb (NM_080446.1,2184-2202).
caaaaacatcgcaatttat

SEQ ID NO: 585681 - DNA, 19 bp, Mus musculus
  siRNA target sequence for Helb (NM_080446.1,2190-2208).
catcgcaatttattgcatt

SEQ ID NO: 585682 - DNA, 19 bp, Mus musculus
  siRNA target sequence for Helb (NM_080446.1,2194-2212).
gcaatttattgcatttaga

SEQ ID NO: 585683 - DNA, 19 bp, Mus musculus
  siRNA target sequence for Helb (NM_080446.1,2300-2318).
gccgtcggtgataagatct

SEQ ID NO: 585684 - DNA, 19 bp, Mus musculus
  siRNA target sequence for Helb (NM_080446.1,2334-2352).
catacctctcagatttact

SEQ ID NO: 585685 - DNA, 19 bp, Mus musculus
  siRNA target sequence for Helb (NM_080446.1,2397-2415).
cccctgacgacgatgctaa

SEQ ID NO: 585686 - DNA, 19 bp, Mus musculus
  siRNA target sequence for Helb (NM_080446.1,2398-2416).
ccctgacgacgatgctaaa

SEQ ID NO: 585687 - DNA, 19 bp, Mus musculus
  siRNA target sequence for Helb (NM_080446.1,2399-2417).
cctgacgacgatgctaaaa

SEQ ID NO: 585688 - DNA, 19 bp, Mus musculus
  siRNA target sequence for Helb (NM_080446.1,2400-2418).
ctgacgacgatgctaaaat

SEQ ID NO: 585689 - DNA, 19 bp, Mus musculus
  siRNA target sequence for Helb (NM_080446.1,2402-2420).
gacgacgatgctaaaatca

SEQ ID NO: 585690 - DNA, 19 bp, Mus musculus
  siRNA target sequence for Helb (NM_080446.1,2404-2422).
cgacgatgctaaaatcaaa

SEQ ID NO: 585691 - DNA, 19 bp, Mus musculus
  siRNA target sequence for Helb (NM_080446.1,2446-2464).
cctgtgcaacggggaaata

SEQ ID NO: 585692 - DNA, 19 bp, Mus musculus
  siRNA target sequence for Helb (NM_080446.1,2470-2488).
cataacacgggatgtaact

SEQ ID NO: 585693 - DNA, 19 bp, Mus musculus
  siRNA target sequence for Helb (NM_080446.1,2480-2498).
gatgtaactgacgtaactt

SEQ ID NO: 585694 - DNA, 19 bp, Mus musculus
  siRNA target sequence for Helb (NM_080446.1,2483-2501).
gtaactgacgtaactttca

SEQ ID NO: 585695 - DNA, 19 bp, Mus musculus
  siRNA target sequence for Helb (NM_080446.1,2563-2581).
caaactaatggcaaactgt

SEQ ID NO: 585696 - DNA, 19 bp, Mus musculus
  siRNA target sequence for Helb (NM_080446.1,2599-2617).
ggcaaggaccattcatact

SEQ ID NO: 585697 - DNA, 19 bp, Mus musculus
  siRNA target sequence for Helb (NM_080446.1,2600-2618).
gcaaggaccattcatactt

SEQ ID NO: 585698 - DNA, 19 bp, Mus musculus
  siRNA target sequence for Helb (NM_080446.1,2604-2622).
ggaccattcatacttttca

SEQ ID NO: 585699 - DNA, 19 bp, Mus musculus
  siRNA target sequence for Helb (NM_080446.1,2778-2796).
ccaggcagacgcgtttgaa

SEQ ID NO: 585700 - DNA, 19 bp, Mus musculus
  siRNA target sequence for Helb (NM_080446.1,2781-2799).
ggcagacgcgtttgaaaca

SEQ ID NO: 585701 - DNA, 19 bp, Mus musculus
  siRNA target sequence for Helb (NM_080446.1,2903-2921).
gcgtcacacctctgtagaa

SEQ ID NO: 585702 - DNA, 19 bp, Mus musculus
  siRNA target sequence for Helb (NM_080446.1,2951-2969).
gccagaggcgacgaaagat

SEQ ID NO: 585703 - DNA, 19 bp, Mus musculus
  siRNA target sequence for Helb (NM_080446.1,2970-2988).
ggctgtcagcttctgttaa

SEQ ID NO: 585704 - DNA, 19 bp, Mus musculus
  siRNA target sequence for Helb (NM_080446.1,3049-3067).
cggcttcccgtttgatgaa

SEQ ID NO: 585705 - DNA, 19 bp, Mus musculus
  siRNA target sequence for Helb (NM_080446.1,3051-3069).
gcttcccgtttgatgaaga

SEQ ID NO: 585706 - DNA, 19 bp, Mus musculus
  siRNA target sequence for Helb (NM_080446.1,3231-3249).
gcaatcaggagatggaaat

SEQ ID NO: 585707 - DNA, 19 bp, Mus musculus
  siRNA target sequence for 2400006A19Rik (NM_025550.1,161-179).
cggtgcgcgaggagttgat

SEQ ID NO: 585708 - DNA, 19 bp, Mus musculus
  siRNA target sequence for 2400006A19Rik (NM_025550.1,184-202).
gccgtccgggaaaacaata

SEQ ID NO: 585709 - DNA, 19 bp, Mus musculus
  siRNA target sequence for 2400006A19Rik (NM_025550.1,185-203).
ccgtccgggaaaacaatat

SEQ ID NO: 585710 - DNA, 19 bp, Mus musculus
  siRNA target sequence for 2400006A19Rik (NM_025550.1,198-216).
caatatggctccttattat

SEQ ID NO: 585711 - DNA, 19 bp, Mus musculus
  siRNA target sequence for 2400006A19Rik (NM_025550.1,347-365).
gtgaaattcgagatgcaat

SEQ ID NO: 585712 - DNA, 19 bp, Mus musculus
  siRNA target sequence for 2400006A19Rik (NM_025550.1,419-437).
cagcttttcgcaagacata

SEQ ID NO: 585713 - DNA, 19 bp, Mus musculus
  siRNA target sequence for 2400006A19Rik (NM_025550.1,427-445).
cgcaagacatacgataaga

SEQ ID NO: 585714 - DNA, 19 bp, Mus musculus
  siRNA target sequence for 2400006A19Rik (NM_025550.1,456-474).
gggtcaccgcctggatatt

SEQ ID NO: 585715 - DNA, 19 bp, Mus musculus
  siRNA target sequence for 2400006A19Rik (NM_025550.1,458-476).
gtcaccgcctggatattgt

SEQ ID NO: 585716 - DNA, 19 bp, Mus musculus
  siRNA target sequence for 2400006A19Rik (NM_025550.1,486-504).
cctaaggatcggactcttt

SEQ ID NO: 585717 - DNA, 19 bp, Mus musculus
  siRNA target sequence for 2400006A19Rik (NM_025550.1,495-513).
cggactcttttatatggat

SEQ ID NO: 585718 - DNA, 19 bp, Mus musculus
  siRNA target sequence for 2400006A19Rik (NM_025550.1,497-515).
gactcttttatatggataa

SEQ ID NO: 585719 - DNA, 19 bp, Mus musculus
  siRNA target sequence for 2400006A19Rik (NM_025550.1,510-528).
ggataatgacctcattact

SEQ ID NO: 585720 - DNA, 19 bp, Mus musculus
  siRNA target sequence for 2400006A19Rik (NM_025550.1,519-537).
cctcattactcgaaacaca

SEQ ID NO: 585721 - DNA, 19 bp, Mus musculus
  siRNA target sequence for 2400006A19Rik (NM_025550.1,581-599).
ggcgaaacaggctgaaagt

SEQ ID NO: 585722 - DNA, 19 bp, Mus musculus
  siRNA target sequence for 2400006A19Rik (NM_025550.1,583-601).
cgaaacaggctgaaagtgt

SEQ ID NO: 585723 - DNA, 19 bp, Mus musculus
  siRNA target sequence for 2400006A19Rik (NM_025550.1,600-618).
gtaccagggcttatattgt

SEQ ID NO: 585724 - DNA, 19 bp, Mus musculus
  siRNA target sequence for 2400006A19Rik (NM_025550.1,621-639).
ggctatccgtgacttcaaa

SEQ ID NO: 585725 - DNA, 19 bp, Mus musculus
  siRNA target sequence for 2400006A19Rik (NM_025550.1,623-641).
ctatccgtgacttcaaaca

SEQ ID NO: 585726 - DNA, 19 bp, Mus musculus
  siRNA target sequence for 2400006A19Rik (NM_025550.1,660-678).
cgacactgtttctacgttt

SEQ ID NO: 585727 - DNA, 19 bp, Mus musculus
  siRNA target sequence for 2400006A19Rik (NM_025550.1,683-701).
cgtatgagctcatggatta

SEQ ID NO: 585728 - DNA, 19 bp, Mus musculus
  siRNA target sequence for 2400006A19Rik (NM_025550.1,693-711).
catggattacaagacattt

SEQ ID NO: 585729 - DNA, 19 bp, Mus musculus
  siRNA target sequence for 2400006A19Rik (NM_025550.1,705-723).
gacatttgtgacttacact

SEQ ID NO: 585730 - DNA, 19 bp, Mus musculus
  siRNA target sequence for 2400006A19Rik (NM_025550.1,722-740).
ctgtttacgtcagtatgat

SEQ ID NO: 585731 - DNA, 19 bp, Mus musculus
  siRNA target sequence for 2400006A19Rik (NM_025550.1,760-778).
ctcagggaaaaggtcatta

SEQ ID NO: 585732 - DNA, 19 bp, Mus musculus
  siRNA target sequence for 2400006A19Rik (NM_025550.1,782-800).
gggcagagatccttgaagt

SEQ ID NO: 585733 - DNA, 19 bp, Mus musculus
  siRNA target sequence for 2400006A19Rik (NM_025550.1,785-803).
cagagatccttgaagtgtt

SEQ ID NO: 585734 - DNA, 19 bp, Mus musculus
  siRNA target sequence for 2400006A19Rik (NM_025550.1,815-833).
cagcagttcggcagtatct

SEQ ID NO: 585735 - DNA, 19 bp, Mus musculus
  siRNA target sequence for 2400006A19Rik (NM_025550.1,817-835).
gcagttcggcagtatctgt

SEQ ID NO: 585736 - DNA, 19 bp, Mus musculus
  siRNA target sequence for 2400006A19Rik (NM_025550.1,818-836).
cagttcggcagtatctgtt

SEQ ID NO: 585737 - DNA, 19 bp, Mus musculus
  siRNA target sequence for 2400006A19Rik (NM_025550.1,843-861).
ctatgaatgccgttattca

SEQ ID NO: 585738 - DNA, 19 bp, Mus musculus
  siRNA target sequence for 2400006A19Rik (NM_025550.1,847-865).
gaatgccgttattcagttt

SEQ ID NO: 585739 - DNA, 19 bp, Mus musculus
  siRNA target sequence for 2400006A19Rik (NM_025550.1,911-929).
ggctttttgcgcctcatta

SEQ ID NO: 585740 - DNA, 19 bp, Mus musculus
  siRNA target sequence for 2400006A19Rik (NM_025550.1,920-938).
cgcctcattaccgatacta

SEQ ID NO: 585741 - DNA, 19 bp, Mus musculus
  siRNA target sequence for 2400006A19Rik (NM_025550.1,921-939).
gcctcattaccgatactat

SEQ ID NO: 585742 - DNA, 19 bp, Mus musculus
  siRNA target sequence for 2400006A19Rik (NM_025550.1,923-941).
ctcattaccgatactatgt

SEQ ID NO: 585743 - DNA, 19 bp, Mus musculus
  siRNA target sequence for 2400006A19Rik (NM_025550.1,930-948).
ccgatactatgtaagagaa

SEQ ID NO: 585744 - DNA, 19 bp, Mus musculus
  siRNA target sequence for 2400006A19Rik (NM_025550.1,931-949).
cgatactatgtaagagaaa

SEQ ID NO: 585745 - DNA, 19 bp, Mus musculus
  siRNA target sequence for 2400006A19Rik (NM_025550.1,970-988).
cagctgctggaatcatata

SEQ ID NO: 585746 - DNA, 19 bp, Mus musculus
  siRNA target sequence for 2400006A19Rik (NM_025550.1,973-991).
ctgctggaatcatataggt

SEQ ID NO: 585747 - DNA, 19 bp, Mus musculus
  siRNA target sequence for 2400006A19Rik (NM_025550.1,1053-1071).
gctgtccaggtttattgct

SEQ ID NO: 585748 - DNA, 19 bp, Mus musculus
  siRNA target sequence for 2400006A19Rik (NM_025550.1,1076-1094).
gaagactccactgcaaaat

SEQ ID NO: 585749 - DNA, 19 bp, Mus musculus
  siRNA target sequence for 2400006A19Rik (NM_025550.1,1079-1097).
gactccactgcaaaattga

SEQ ID NO: 585750 - DNA, 19 bp, Mus musculus
  siRNA target sequence for 2400006A19Rik (NM_025550.1,1121-1139).
ccaacagacctgatagcaa

SEQ ID NO: 585751 - DNA, 19 bp, Mus musculus
  siRNA target sequence for 2400006A19Rik (NM_025550.1,1136-1154).
gcaagaactggcagtatca

SEQ ID NO: 585752 - DNA, 19 bp, Mus musculus
  siRNA target sequence for 2400006A19Rik (NM_025550.1,1145-1163).
ggcagtatcaagaaaccat

SEQ ID NO: 585753 - DNA, 19 bp, Mus musculus
  siRNA target sequence for 2400006A19Rik (NM_025550.1,1182-1200).
gctaaacagggttcagaaa

SEQ ID NO: 585754 - DNA, 19 bp, Mus musculus
  siRNA target sequence for 1110013G13Rik (NM_146141.1,169-187).
catgtagctggtcattaca

SEQ ID NO: 585755 - DNA, 19 bp, Mus musculus
  siRNA target sequence for 1110013G13Rik (NM_146141.1,172-190).
gtagctggtcattacatct

SEQ ID NO: 585756 - DNA, 19 bp, Mus musculus
  siRNA target sequence for 1110013G13Rik (NM_146141.1,249-267).
gaaaaaggcacgaaatgat

SEQ ID NO: 585757 - DNA, 19 bp, Mus musculus
  siRNA target sequence for 1110013G13Rik (NM_146141.1,255-273).
ggcacgaaatgatgaatat

SEQ ID NO: 585758 - DNA, 19 bp, Mus musculus
  siRNA target sequence for 1110013G13Rik (NM_146141.1,257-275).
cacgaaatgatgaatatga

SEQ ID NO: 585759 - DNA, 19 bp, Mus musculus
  siRNA target sequence for 1110013G13Rik (NM_146141.1,259-277).
cgaaatgatgaatatgaga

SEQ ID NO: 585760 - DNA, 19 bp, Mus musculus
  siRNA target sequence for 1110013G13Rik (NM_146141.1,347-365).
cactcaatcccattaagca

SEQ ID NO: 585761 - DNA, 19 bp, Mus musculus
  siRNA target sequence for 1110013G13Rik (NM_146141.1,389-407).
gctacacaccgaacatctt

SEQ ID NO: 585762 - DNA, 19 bp, Mus musculus
  siRNA target sequence for 1110013G13Rik (NM_146141.1,408-426).
ccctcacaagggctatata

SEQ ID NO: 585763 - DNA, 19 bp, Mus musculus
  siRNA target sequence for 1110013G13Rik (NM_146141.1,409-427).
cctcacaagggctatatat

SEQ ID NO: 585764 - DNA, 19 bp, Mus musculus
  siRNA target sequence for 1110013G13Rik (NM_146141.1,412-430).
cacaagggctatatatgga

SEQ ID NO: 585765 - DNA, 19 bp, Mus musculus
  siRNA target sequence for 1110013G13Rik (NM_146141.1,414-432).
caagggctatatatggaat

SEQ ID NO: 585766 - DNA, 19 bp, Mus musculus
  siRNA target sequence for 1110013G13Rik (NM_146141.1,460-478).
gatcctcacctaagagata

SEQ ID NO: 585767 - DNA, 19 bp, Mus musculus
  siRNA target sequence for 1110013G13Rik (NM_146141.1,486-504).
cgactgctgtggggataat

SEQ ID NO: 585768 - DNA, 19 bp, Mus musculus
  siRNA target sequence for 1110013G13Rik (NM_146141.1,510-528).
cattgacgtctgtgaaata

SEQ ID NO: 585769 - DNA, 19 bp, Mus musculus
  siRNA target sequence for 1110013G13Rik (NM_146141.1,551-569).
gagacgtggtccatgtgaa

SEQ ID NO: 585770 - DNA, 19 bp, Mus musculus
  siRNA target sequence for 1110013G13Rik (NM_146141.1,589-607).
cttattgatcagagtgaaa

SEQ ID NO: 585771 - DNA, 19 bp, Mus musculus
  siRNA target sequence for 1110013G13Rik (NM_146141.1,703-721).
gaagccactctcaattggt

SEQ ID NO: 585772 - DNA, 19 bp, Mus musculus
  siRNA target sequence for 1110013G13Rik (NM_146141.1,706-724).
gccactctcaattggttta

SEQ ID NO: 585773 - DNA, 19 bp, Mus musculus
  siRNA target sequence for 1110013G13Rik (NM_146141.1,714-732).
caattggtttagactctat

SEQ ID NO: 585774 - DNA, 19 bp, Mus musculus
  siRNA target sequence for 1110013G13Rik (NM_146141.1,719-737).
ggtttagactctataaggt

SEQ ID NO: 585775 - DNA, 19 bp, Mus musculus
  siRNA target sequence for 1110013G13Rik (NM_146141.1,720-738).
gtttagactctataaggta

SEQ ID NO: 585776 - DNA, 19 bp, Mus musculus
  siRNA target sequence for 1110013G13Rik (NM_146141.1,759-777).
caagtttgcttttaatgga

SEQ ID NO: 585777 - DNA, 19 bp, Mus musculus
  siRNA target sequence for 1110013G13Rik (NM_146141.1,794-812).
ctttcgccctcgacgttat

SEQ ID NO: 585778 - DNA, 19 bp, Mus musculus
  siRNA target sequence for 1110013G13Rik (NM_146141.1,799-817).
gccctcgacgttattaact

SEQ ID NO: 585779 - DNA, 19 bp, Mus musculus
  siRNA target sequence for 1110013G13Rik (NM_146141.1,801-819).
cctcgacgttattaactct

SEQ ID NO: 585780 - DNA, 19 bp, Mus musculus
  siRNA target sequence for 1110013G13Rik (NM_146141.1,859-877).
gacaagggagccatcagtt

SEQ ID NO: 585781 - DNA, 19 bp, Mus musculus
  siRNA target sequence for 1110013G13Rik (NM_146141.1,864-882).
gggagccatcagttgtgta

SEQ ID NO: 585782 - DNA, 19 bp, Mus musculus
  siRNA target sequence for 1110013G13Rik (NM_146141.1,865-883).
ggagccatcagttgtgtaa

SEQ ID NO: 585783 - DNA, 19 bp, Mus musculus
  siRNA target sequence for 1110013G13Rik (NM_146141.1,866-884).
gagccatcagttgtgtaaa

SEQ ID NO: 585784 - DNA, 19 bp, Mus musculus
  siRNA target sequence for 1110013G13Rik (NM_146141.1,924-942).
ggaagcaagatcattggtt

SEQ ID NO: 585785 - DNA, 19 bp, Mus musculus
  siRNA target sequence for 1110013G13Rik (NM_146141.1,952-970).
ccaacaccttcgatgaata

SEQ ID NO: 585786 - DNA, 19 bp, Mus musculus
  siRNA target sequence for 1110013G13Rik (NM_146141.1,953-971).
caacaccttcgatgaataa

SEQ ID NO: 585787 - DNA, 19 bp, Mus musculus
  siRNA target sequence for 1110013G13Rik (NM_146141.1,956-974).
caccttcgatgaataagga

SEQ ID NO: 585788 - DNA, 19 bp, Mus musculus
  siRNA target sequence for 1110013G13Rik (NM_146141.1,958-976).
ccttcgatgaataaggaaa

SEQ ID NO: 585789 - DNA, 19 bp, Mus musculus
  siRNA target sequence for 9230112O05Rik (NM_173347.2,587-605).
cgtctgaagctgaagacat

SEQ ID NO: 585790 - DNA, 19 bp, Mus musculus
  siRNA target sequence for 9230112O05Rik (NM_173347.2,763-781).
cttgttgaccaccatattt

SEQ ID NO: 585791 - DNA, 19 bp, Mus musculus
  siRNA target sequence for 9230112O05Rik (NM_173347.2,825-843).
gctggaccaccgaccaatt

SEQ ID NO: 585792 - DNA, 19 bp, Mus musculus
  siRNA target sequence for 9230112O05Rik (NM_173347.2,902-920).
ccctggtgacagagagaat

SEQ ID NO: 585793 - DNA, 19 bp, Mus musculus
  siRNA target sequence for 9230112O05Rik (NM_173347.2,1199-1217).
caatcagtgcaatctacat

SEQ ID NO: 585794 - DNA, 19 bp, Mus musculus
  siRNA target sequence for 9230112O05Rik (NM_173347.2,1265-1283).
gttctttctgccatgatca

SEQ ID NO: 585795 - DNA, 19 bp, Mus musculus
  siRNA target sequence for 9230112O05Rik (NM_173347.2,1275-1293).
ccatgatcacagctatgat

SEQ ID NO: 585796 - DNA, 19 bp, Mus musculus
  siRNA target sequence for 9230112O05Rik (NM_173347.2,1335-1353).
gccagtacggcaattagct

SEQ ID NO: 585797 - DNA, 19 bp, Mus musculus
  siRNA target sequence for 9230112O05Rik (NM_173347.2,1336-1354).
ccagtacggcaattagcta

SEQ ID NO: 585798 - DNA, 19 bp, Mus musculus
  siRNA target sequence for 9230112O05Rik (NM_173347.2,1337-1355).
cagtacggcaattagctat

SEQ ID NO: 585799 - DNA, 19 bp, Mus musculus
  siRNA target sequence for 9230112O05Rik (NM_173347.2,1342-1360).
cggcaattagctatcttct

SEQ ID NO: 585800 - DNA, 19 bp, Mus musculus
  siRNA target sequence for 9230112O05Rik (NM_173347.2,1364-1382).
cacacgaggcacttcgaat

SEQ ID NO: 585801 - DNA, 19 bp, Mus musculus
  siRNA target sequence for 9230112O05Rik (NM_173347.2,1368-1386).
cgaggcacttcgaatgaca

SEQ ID NO: 585802 - DNA, 19 bp, Mus musculus
  siRNA target sequence for 9230112O05Rik (NM_173347.2,1369-1387).
gaggcacttcgaatgacaa

SEQ ID NO: 585803 - DNA, 19 bp, Mus musculus
  siRNA target sequence for 9230112O05Rik (NM_173347.2,1372-1390).
gcacttcgaatgacaatct

SEQ ID NO: 585804 - DNA, 19 bp, Mus musculus
  siRNA target sequence for 9230112O05Rik (NM_173347.2,1526-1544).
ccctctccgcatatcttga

SEQ ID NO: 585805 - DNA, 19 bp, Mus musculus
  siRNA target sequence for 9230112O05Rik (NM_173347.2,1576-1594).
gtagctgtgggtatgtcta

SEQ ID NO: 585806 - DNA, 19 bp, Mus musculus
  siRNA target sequence for 9230112O05Rik (NM_173347.2,1740-1758).
ctccgctgaggctgtcttt

SEQ ID NO: 585807 - DNA, 19 bp, Mus musculus
  siRNA target sequence for 9230112O05Rik (NM_173347.2,1796-1814).
gagcctgcacatcaaataa

SEQ ID NO: 585808 - DNA, 19 bp, Mus musculus
  siRNA target sequence for D6Wsu116e (NM_026585.1,184-202).
ggctgacgccggtctacta

SEQ ID NO: 585809 - DNA, 19 bp, Mus musculus
  siRNA target sequence for D6Wsu116e (NM_026585.1,186-204).
ctgacgccggtctactaca

SEQ ID NO: 585810 - DNA, 19 bp, Mus musculus
  siRNA target sequence for D6Wsu116e (NM_026585.1,190-208).
cgccggtctactacagttt

SEQ ID NO: 585811 - DNA, 19 bp, Mus musculus
  siRNA target sequence for D6Wsu116e (NM_026585.1,192-210).
ccggtctactacagtttct

SEQ ID NO: 585812 - DNA, 19 bp, Mus musculus
  siRNA target sequence for D6Wsu116e (NM_026585.1,193-211).
cggtctactacagtttcta

SEQ ID NO: 585813 - DNA, 19 bp, Mus musculus
  siRNA target sequence for D6Wsu116e (NM_026585.1,203-221).
cagtttctacaggaattct

SEQ ID NO: 585814 - DNA, 19 bp, Mus musculus
  siRNA target sequence for D6Wsu116e (NM_026585.1,240-258).
ggactcatgaaatcaagaa

SEQ ID NO: 585815 - DNA, 19 bp, Mus musculus
  siRNA target sequence for D6Wsu116e (NM_026585.1,294-312).
cacattgtcgtctgcataa

SEQ ID NO: 585816 - DNA, 19 bp, Mus musculus
  siRNA target sequence for D6Wsu116e (NM_026585.1,300-318).
gtcgtctgcataatgtgtt

SEQ ID NO: 585817 - DNA, 19 bp, Mus musculus
  siRNA target sequence for D6Wsu116e (NM_026585.1,308-326).
cataatgtgttcaatgact

SEQ ID NO: 585818 - DNA, 19 bp, Mus musculus
  siRNA target sequence for D6Wsu116e (NM_026585.1,325-343).
cttcctcatgctgtctaat

SEQ ID NO: 585819 - DNA, 19 bp, Mus musculus
  siRNA target sequence for D6Wsu116e (NM_026585.1,339-357).
ctaatacccagttcattga

SEQ ID NO: 585820 - DNA, 19 bp, Mus musculus
  siRNA target sequence for D6Wsu116e (NM_026585.1,507-525).
gcgcgtttgagcaacttga

SEQ ID NO: 585821 - DNA, 19 bp, Mus musculus
  siRNA target sequence for D6Wsu116e (NM_026585.1,615-633).
ggcctctgccctatctcat

SEQ ID NO: 585822 - DNA, 19 bp, Mus musculus
  siRNA target sequence for D6Wsu116e (NM_026585.1,783-801).
gtgacaatgaccaaaacca

SEQ ID NO: 585823 - DNA, 19 bp, Mus musculus
  siRNA target sequence for D6Wsu116e (NM_026585.1,799-817).
ccagcataccacacagata

SEQ ID NO: 585824 - DNA, 19 bp, Mus musculus
  siRNA target sequence for D6Wsu116e (NM_026585.1,802-820).
gcataccacacagataagt

SEQ ID NO: 585825 - DNA, 19 bp, Mus musculus
  siRNA target sequence for D6Wsu116e (NM_026585.1,808-826).
cacacagataagtgatgaa

SEQ ID NO: 585826 - DNA, 19 bp, Mus musculus
  siRNA target sequence for D6Wsu116e (NM_026585.1,907-925).
gtctaaaagacctacatct

SEQ ID NO: 585827 - DNA, 19 bp, Mus musculus
  siRNA target sequence for D6Wsu116e (NM_026585.1,921-939).
catcttttgccgatgaact

SEQ ID NO: 585828 - DNA, 19 bp, Mus musculus
  siRNA target sequence for D6Wsu116e (NM_026585.1,947-965).
cggatcaaaggagatatct

SEQ ID NO: 585829 - DNA, 19 bp, Mus musculus
  siRNA target sequence for D6Wsu116e (NM_026585.1,949-967).
gatcaaaggagatatctca

SEQ ID NO: 585830 - DNA, 19 bp, Mus musculus
  siRNA target sequence for D6Wsu116e (NM_026585.1,973-991).
gcggaaagagggacaaaca

SEQ ID NO: 585831 - DNA, 19 bp, Mus musculus
  siRNA target sequence for D6Wsu116e (NM_026585.1,1135-1153).
cgggcaggggctttttgat

SEQ ID NO: 585832 - DNA, 19 bp, Mus musculus
  siRNA target sequence for D6Wsu116e (NM_026585.1,1137-1155).
ggcaggggctttttgatga

SEQ ID NO: 585833 - DNA, 19 bp, Mus musculus
  siRNA target sequence for D6Wsu116e (NM_026585.1,1138-1156).
gcaggggctttttgatgat

SEQ ID NO: 585834 - DNA, 19 bp, Mus musculus
  siRNA target sequence for D6Wsu116e (NM_026585.1,1358-1376).
ccggggaagagctcacatt

SEQ ID NO: 585835 - DNA, 19 bp, Mus musculus
  siRNA target sequence for D6Wsu116e (NM_026585.1,1359-1377).
cggggaagagctcacattt

SEQ ID NO: 585836 - DNA, 19 bp, Mus musculus
  siRNA target sequence for D6Wsu116e (NM_026585.1,1511-1529).
gacgaaggagatctgttta

SEQ ID NO: 585837 - DNA, 19 bp, Mus musculus
  siRNA target sequence for D6Wsu116e (NM_026585.1,1517-1535).
ggagatctgtttaaagaaa

SEQ ID NO: 585838 - DNA, 19 bp, Mus musculus
  siRNA target sequence for D6Wsu116e (NM_026585.1,1606-1624).
cgccttaccttctagcaaa

SEQ ID NO: 585839 - DNA, 19 bp, Mus musculus
  siRNA target sequence for D6Wsu116e (NM_026585.1,1609-1627).
cttaccttctagcaaaaat

SEQ ID NO: 585840 - DNA, 19 bp, Mus musculus
  siRNA target sequence for D6Wsu116e (NM_026585.1,1682-1700).
gactctgaggatttgtttt

SEQ ID NO: 585841 - DNA, 19 bp, Mus musculus
  siRNA target sequence for D6Wsu116e (NM_026585.1,1872-1890).
ccgagcagccctcaaagaa

SEQ ID NO: 585842 - DNA, 19 bp, Mus musculus
  siRNA target sequence for D6Wsu116e (NM_026585.1,1921-1939).
ggaggaccaatggaatatt

SEQ ID NO: 585843 - DNA, 19 bp, Mus musculus
  siRNA target sequence for D6Wsu116e (NM_026585.1,1954-1972).
caagttagcatctgacaat

SEQ ID NO: 585844 - DNA, 19 bp, Mus musculus
  siRNA target sequence for D6Wsu116e (NM_026585.1,2030-2048).
gtgaaaaagaccaatctat

SEQ ID NO: 585845 - DNA, 19 bp, Mus musculus
  siRNA target sequence for D6Wsu116e (NM_026585.1,2032-2050).
gaaaaagaccaatctattt

SEQ ID NO: 585846 - DNA, 19 bp, Mus musculus
  siRNA target sequence for D6Wsu116e (NM_026585.1,2075-2093).
gatctgtttgctattgcaa

SEQ ID NO: 585847 - DNA, 19 bp, Mus musculus
  siRNA target sequence for D6Wsu116e (NM_026585.1,2116-2134).
gagaacgtcccttctcttt

SEQ ID NO: 585848 - DNA, 19 bp, Mus musculus
  siRNA target sequence for D6Wsu116e (NM_026585.1,2118-2136).
gaacgtcccttctctttga

SEQ ID NO: 585849 - DNA, 19 bp, Mus musculus
  siRNA target sequence for D6Wsu116e (NM_026585.1,2189-2207).
ccttctgcaacaacgaaaa

SEQ ID NO: 585850 - DNA, 19 bp, Mus musculus
  siRNA target sequence for D6Wsu116e (NM_026585.1,2190-2208).
cttctgcaacaacgaaaaa

SEQ ID NO: 585851 - DNA, 19 bp, Mus musculus
  siRNA target sequence for D6Wsu116e (NM_026585.1,2219-2237).
cccaaggtgccattgttgt

SEQ ID NO: 585852 - DNA, 19 bp, Mus musculus
  siRNA target sequence for D6Wsu116e (NM_026585.1,2224-2242).
ggtgccattgttgtttagt

SEQ ID NO: 585853 - DNA, 19 bp, Mus musculus
  siRNA target sequence for D6Wsu116e (NM_026585.1,2282-2300).
gaggatctgaaggttgata

SEQ ID NO: 585854 - DNA, 19 bp, Mus musculus
  siRNA target sequence for D6Wsu116e (NM_026585.1,2388-2406).
caggtgggccttctgatat

SEQ ID NO: 585855 - DNA, 19 bp, Mus musculus
  siRNA target sequence for D6Wsu116e (NM_026585.1,2391-2409).
gtgggccttctgatatatt

SEQ ID NO: 585856 - DNA, 19 bp, Mus musculus
  siRNA target sequence for D6Wsu116e (NM_026585.1,2531-2549).
cgggagaagggtctcaaaa

SEQ ID NO: 585857 - DNA, 19 bp, Mus musculus
  siRNA target sequence for D6Wsu116e (NM_026585.1,2620-2638).
ggacaacgacccagatgtt

SEQ ID NO: 585858 - DNA, 19 bp, Mus musculus
  siRNA target sequence for D6Wsu116e (NM_026585.1,2623-2641).
caacgacccagatgttgat

SEQ ID NO: 585859 - DNA, 19 bp, Mus musculus
  siRNA target sequence for D6Wsu116e (NM_026585.1,2626-2644).
cgacccagatgttgatctt

SEQ ID NO: 585860 - DNA, 19 bp, Mus musculus
  siRNA target sequence for D6Wsu116e (NM_026585.1,2642-2660).
ctttttgctggcaccaaaa

SEQ ID NO: 585861 - DNA, 19 bp, Mus musculus
  siRNA target sequence for D6Wsu116e (NM_026585.1,2689-2707).
gagcctcttcggtgatgat

SEQ ID NO: 585862 - DNA, 19 bp, Mus musculus
  siRNA target sequence for D6Wsu116e (NM_026585.1,2743-2761).
gcctgtggtaccagaaaaa

SEQ ID NO: 585863 - DNA, 19 bp, Mus musculus
  siRNA target sequence for D6Wsu116e (NM_026585.1,2780-2798).
gaccaccctgtttctttaa

SEQ ID NO: 585864 - DNA, 19 bp, Mus musculus
  siRNA target sequence for D6Wsu116e (NM_026585.1,2818-2836).
ctctactcaaggtagcaaa

SEQ ID NO: 585865 - DNA, 19 bp, Mus musculus
  siRNA target sequence for D6Wsu116e (NM_026585.1,2910-2928).
ccagtcgcatcgggaaaat

SEQ ID NO: 585866 - DNA, 19 bp, Mus musculus
  siRNA target sequence for D6Wsu116e (NM_026585.1,2911-2929).
cagtcgcatcgggaaaata

SEQ ID NO: 585867 - DNA, 19 bp, Mus musculus
  siRNA target sequence for D6Wsu116e (NM_026585.1,2913-2931).
gtcgcatcgggaaaataca

SEQ ID NO: 585868 - DNA, 19 bp, Mus musculus
  siRNA target sequence for D6Wsu116e (NM_026585.1,2930-2948).
caagcaaatttagcaatta

SEQ ID NO: 585869 - DNA, 19 bp, Mus musculus
  siRNA target sequence for D6Wsu116e (NM_026585.1,3090-3108).
ctggtgtgagttttgatct

SEQ ID NO: 585870 - DNA, 19 bp, Mus musculus
  siRNA target sequence for D6Wsu116e (NM_026585.1,3270-3288).
gtagtcctgtcctaccaaa

SEQ ID NO: 585871 - DNA, 19 bp, Mus musculus
  siRNA target sequence for D6Wsu116e (NM_026585.1,3363-3381).
gggaaggtggacctgtttt

SEQ ID NO: 585872 - DNA, 19 bp, Mus musculus
  siRNA target sequence for D6Wsu116e (NM_026585.1,3434-3452).
gaggctgacctgtttgatt

SEQ ID NO: 585873 - DNA, 19 bp, Mus musculus
  siRNA target sequence for D6Wsu116e (NM_026585.1,3436-3454).
ggctgacctgtttgattca

SEQ ID NO: 585874 - DNA, 19 bp, Mus musculus
  siRNA target sequence for D6Wsu116e (NM_026585.1,3620-3638).
ccgagagcagcgaagaaca

SEQ ID NO: 585875 - DNA, 19 bp, Mus musculus
  siRNA target sequence for D6Wsu116e (NM_026585.1,3645-3663).
ctttccctctccttgaaga

SEQ ID NO: 585876 - DNA, 19 bp, Mus musculus
  siRNA target sequence for D6Wsu116e (NM_026585.1,3681-3699).
cagatccgagaggcaaaaa

SEQ ID NO: 585877 - DNA, 19 bp, Mus musculus
  siRNA target sequence for D6Wsu116e (NM_026585.1,3751-3769).
catctttgaggatgatata

SEQ ID NO: 585878 - DNA, 19 bp, Mus musculus
  siRNA target sequence for D6Wsu116e (NM_026585.1,3777-3795).
cggaagcaattaaaccttt

SEQ ID NO: 585879 - DNA, 19 bp, Mus musculus
  siRNA target sequence for D6Wsu116e (NM_026585.1,3829-3847).
gcccaacttatttgatgat

SEQ ID NO: 585880 - DNA, 19 bp, Mus musculus
  siRNA target sequence for D6Wsu116e (NM_026585.1,3830-3848).
cccaacttatttgatgata

SEQ ID NO: 585881 - DNA, 19 bp, Mus musculus
  siRNA target sequence for D6Wsu116e (NM_026585.1,3842-3860).
gatgataatattgatatct

SEQ ID NO: 585882 - DNA, 19 bp, Mus musculus
  siRNA target sequence for D6Wsu116e (NM_026585.1,3854-3872).
gatatcttcgctgacttaa

SEQ ID NO: 585883 - DNA, 19 bp, Mus musculus
  siRNA target sequence for D6Wsu116e (NM_026585.1,3862-3880).
cgctgacttaactgtaaaa

SEQ ID NO: 585884 - DNA, 19 bp, Mus musculus
  siRNA target sequence for D6Wsu116e (NM_026585.1,3998-4016).
gaggcagcatctgaacaaa

SEQ ID NO: 585885 - DNA, 19 bp, Mus musculus
  siRNA target sequence for Acyp1 (NM_025421.1,155-173).
ggtctcagtggattacgaa

SEQ ID NO: 585886 - DNA, 19 bp, Mus musculus
  siRNA target sequence for Acyp1 (NM_025421.1,156-174).
gtctcagtggattacgaaa

SEQ ID NO: 585887 - DNA, 19 bp, Mus musculus
  siRNA target sequence for Acyp1 (NM_025421.1,158-176).
ctcagtggattacgaaatt

SEQ ID NO: 585888 - DNA, 19 bp, Mus musculus
  siRNA target sequence for Acyp1 (NM_025421.1,160-178).
cagtggattacgaaatttt

SEQ ID NO: 585889 - DNA, 19 bp, Mus musculus
  siRNA target sequence for Acyp1 (NM_025421.1,164-182).
ggattacgaaatttttgga

SEQ ID NO: 585890 - DNA, 19 bp, Mus musculus
  siRNA target sequence for Acyp1 (NM_025421.1,165-183).
gattacgaaatttttggaa

SEQ ID NO: 585891 - DNA, 19 bp, Mus musculus
  siRNA target sequence for Acyp1 (NM_025421.1,195-213).
gtgtttttccgcaagtaca

SEQ ID NO: 585892 - DNA, 19 bp, Mus musculus
  siRNA target sequence for Acyp1 (NM_025421.1,369-387).
gcaaacttcaacaatgaga

SEQ ID NO: 585893 - DNA, 19 bp, Mus musculus
  siRNA target sequence for Acyp1 (NM_025421.1,390-408).
gtcatcgcaaacttggatt

SEQ ID NO: 585894 - DNA, 19 bp, Mus musculus
  siRNA target sequence for Acyp1 (NM_025421.1,395-413).
cgcaaacttggattattca

SEQ ID NO: 585895 - DNA, 19 bp, Mus musculus
  siRNA target sequence for Acyp1 (NM_025421.1,405-423).
gattattcagacttccaaa

SEQ ID NO: 585896 - DNA, 19 bp, Mus musculus
  siRNA target sequence for Acyp2 (NM_029344.1,64-82).
ctgtggactacgaagtgtt

SEQ ID NO: 585897 - DNA, 19 bp, Mus musculus
  siRNA target sequence for Acyp2 (NM_029344.1,275-293).
cgacttttctaacgaaaaa

SEQ ID NO: 585898 - DNA, 19 bp, Mus musculus
  siRNA target sequence for Acyp2 (NM_029344.1,287-305).
cgaaaaaacaatctctaaa

SEQ ID NO: 585899 - DNA, 19 bp, Mus musculus
  siRNA target sequence for Acyp2 (NM_029344.1,308-326).
ggaatactctgattttagt

SEQ ID NO: 585900 - DNA, 19 bp, Mus musculus
  siRNA target sequence for Acyp2 (NM_029344.1,314-332).
ctctgattttagtattcga

SEQ ID NO: 585901 - DNA, 19 bp, Mus musculus
  siRNA target sequence for ORF5 (NM_016924.1,195-213).
gaatgagctcatagtgaat

SEQ ID NO: 585902 - DNA, 19 bp, Mus musculus
  siRNA target sequence for ORF5 (NM_016924.1,272-290).
ggcgatcatcgcaagtgta

SEQ ID NO: 585903 - DNA, 19 bp, Mus musculus
  siRNA target sequence for ORF5 (NM_016924.1,281-299).
cgcaagtgtactttacgat

SEQ ID NO: 585904 - DNA, 19 bp, Mus musculus
  siRNA target sequence for ORF5 (NM_016924.1,520-538).
catgcctttgactatgtca

SEQ ID NO: 585905 - DNA, 19 bp, Mus musculus
  siRNA target sequence for ORF5 (NM_016924.1,524-542).
cctttgactatgtcaacat

SEQ ID NO: 585906 - DNA, 19 bp, Mus musculus
  siRNA target sequence for ORF5 (NM_016924.1,630-648).
ctacaacaagtgcaaaaga

SEQ ID NO: 585907 - DNA, 19 bp, Mus musculus
  siRNA target sequence for ORF5 (NM_016924.1,680-698).
ccctgactgggtttagcat

SEQ ID NO: 585908 - DNA, 19 bp, Mus musculus
  siRNA target sequence for ORF5 (NM_016924.1,703-721).
gggaaacctggtgttgttt

SEQ ID NO: 585909 - DNA, 19 bp, Mus musculus
  siRNA target sequence for ORF5 (NM_016924.1,759-777).
gtcaagactcagaaaacta

SEQ ID NO: 585910 - DNA, 19 bp, Mus musculus
  siRNA target sequence for ORF5 (NM_016924.1,843-861).
ggaaggacagcggaaattt

SEQ ID NO: 585911 - DNA, 19 bp, Mus musculus
  siRNA target sequence for ORF5 (NM_016924.1,852-870).
gcggaaatttcccattctt

SEQ ID NO: 585912 - DNA, 19 bp, Mus musculus
  siRNA target sequence for ORF5 (NM_016924.1,855-873).
gaaatttcccattcttgaa

SEQ ID NO: 585913 - DNA, 19 bp, Mus musculus
  siRNA target sequence for ORF5 (NM_016924.1,923-941).
gccagctgtatcagttctt

SEQ ID NO: 585914 - DNA, 19 bp, Mus musculus
  siRNA target sequence for ORF5 (NM_016924.1,927-945).
gctgtatcagttcttaaat

SEQ ID NO: 585915 - DNA, 19 bp, Mus musculus
  siRNA target sequence for ORF5 (NM_016924.1,950-968).
ggggatgtggggatgtttt

SEQ ID NO: 585916 - DNA, 19 bp, Mus musculus
  siRNA target sequence for ORF5 (NM_016924.1,959-977).
gggatgttttccagatgtt

SEQ ID NO: 585917 - DNA, 19 bp, Mus musculus
  siRNA target sequence for Rwdd2 (NM_027100.1,260-278).
cctaatcaaggagaagtaa

SEQ ID NO: 585918 - DNA, 19 bp, Mus musculus
  siRNA target sequence for Rwdd2 (NM_027100.1,287-305).
gatgtaaacgccctaacaa

SEQ ID NO: 585919 - DNA, 19 bp, Mus musculus
  siRNA target sequence for Rwdd2 (NM_027100.1,290-308).
gtaaacgccctaacaaaca

SEQ ID NO: 585920 - DNA, 19 bp, Mus musculus
  siRNA target sequence for Rwdd2 (NM_027100.1,341-359).
ctcccacccaacatcgaat

SEQ ID NO: 585921 - DNA, 19 bp, Mus musculus
  siRNA target sequence for Rwdd2 (NM_027100.1,343-361).
cccacccaacatcgaattt

SEQ ID NO: 585922 - DNA, 19 bp, Mus musculus
  siRNA target sequence for Rwdd2 (NM_027100.1,345-363).
cacccaacatcgaatttgt

SEQ ID NO: 585923 - DNA, 19 bp, Mus musculus
  siRNA target sequence for Rwdd2 (NM_027100.1,347-365).
cccaacatcgaatttgtca

SEQ ID NO: 585924 - DNA, 19 bp, Mus musculus
  siRNA target sequence for Rwdd2 (NM_027100.1,387-405).
ccaaggtgaccattgattt

SEQ ID NO: 585925 - DNA, 19 bp, Mus musculus
  siRNA target sequence for Rwdd2 (NM_027100.1,391-409).
ggtgaccattgatttgcaa

SEQ ID NO: 585926 - DNA, 19 bp, Mus musculus
  siRNA target sequence for Rwdd2 (NM_027100.1,730-748).
gttagatgtgactggattt

SEQ ID NO: 585927 - DNA, 19 bp, Mus musculus
  siRNA target sequence for Rwdd2 (NM_027100.1,734-752).
gatgtgactggattttgca

SEQ ID NO: 585928 - DNA, 19 bp, Mus musculus
  siRNA target sequence for Rwdd2 (NM_027100.1,754-772).
gacaggaaagcctggtata

SEQ ID NO: 585929 - DNA, 19 bp, Mus musculus
  siRNA target sequence for Rwdd2 (NM_027100.1,758-776).
ggaaagcctggtataatct

SEQ ID NO: 585930 - DNA, 19 bp, Mus musculus
  siRNA target sequence for Rwdd2 (NM_027100.1,852-870).
gcaagcatgcagaaagtgt

SEQ ID NO: 585931 - DNA, 19 bp, Mus musculus
  siRNA target sequence for Rwdd2 (NM_027100.1,893-911).
gacctgcgcctcttccatt

SEQ ID NO: 585932 - DNA, 19 bp, Mus musculus
  siRNA target sequence for Rwdd2 (NM_027100.1,898-916).
gcgcctcttccattcgttt

SEQ ID NO: 585933 - DNA, 19 bp, Mus musculus
  siRNA target sequence for Rwdd2 (NM_027100.1,907-925).
ccattcgtttgaggaatta

SEQ ID NO: 585934 - DNA, 19 bp, Mus musculus
  siRNA target sequence for Rwdd2 (NM_027100.1,951-969).
gattgcggaatgattatca

SEQ ID NO: 585935 - DNA, 19 bp, Mus musculus
  siRNA target sequence for Rwdd2 (NM_027100.1,1014-1032).
gtgagcatgtttttcagat

SEQ ID NO: 585936 - DNA, 19 bp, Mus musculus
  siRNA target sequence for Nudt5 (NM_016918.2,427-445).
ccaggcaagcaccttgtta

SEQ ID NO: 585937 - DNA, 19 bp, Mus musculus
  siRNA target sequence for Nudt5 (NM_016918.2,953-971).
cagaacaacaccttacagt

SEQ ID NO: 585938 - DNA, 19 bp, Mus musculus
  siRNA target sequence for Nudt5 (NM_016918.2,990-1008).
ctacggtctggctctgaaa

SEQ ID NO: 585939 - DNA, 19 bp, Mus musculus
  siRNA target sequence for Nudt5 (NM_016918.2,1014-1032).
caactcgaagccattcgaa

SEQ ID NO: 585940 - DNA, 19 bp, Mus musculus
  siRNA target sequence for Nudt9 (NM_028794.2,166-184).
cttaacgccaacatcatgt

SEQ ID NO: 585941 - DNA, 19 bp, Mus musculus
  siRNA target sequence for Nudt9 (NM_028794.2,233-251).
ctccttacccaggttcaaa

SEQ ID NO: 585942 - DNA, 19 bp, Mus musculus
  siRNA target sequence for Nudt9 (NM_028794.2,236-254).
cttacccaggttcaaaagt

SEQ ID NO: 585943 - DNA, 19 bp, Mus musculus
  siRNA target sequence for Nudt9 (NM_028794.2,263-281).
gtcaggttccgaatgagaa

SEQ ID NO: 585944 - DNA, 19 bp, Mus musculus
  siRNA target sequence for Nudt9 (NM_028794.2,442-460).
ggcctgtatgagattgaaa

SEQ ID NO: 585945 - DNA, 19 bp, Mus musculus
  siRNA target sequence for Nudt9 (NM_028794.2,443-461).
gcctgtatgagattgaaaa

SEQ ID NO: 585946 - DNA, 19 bp, Mus musculus
  siRNA target sequence for Nudt9 (NM_028794.2,535-553).
catgccgcagatcctatta

SEQ ID NO: 585947 - DNA, 19 bp, Mus musculus
  siRNA target sequence for Nudt9 (NM_028794.2,538-556).
gccgcagatcctattataa

SEQ ID NO: 585948 - DNA, 19 bp, Mus musculus
  siRNA target sequence for Nudt9 (NM_028794.2,569-587).
gggacgagagcgggaataa

SEQ ID NO: 585949 - DNA, 19 bp, Mus musculus
  siRNA target sequence for Nudt9 (NM_028794.2,574-592).
gagagcgggaataagatca

SEQ ID NO: 585950 - DNA, 19 bp, Mus musculus
  siRNA target sequence for Nudt9 (NM_028794.2,682-700).
gaccccggagagaagatca

SEQ ID NO: 585951 - DNA, 19 bp, Mus musculus
  siRNA target sequence for Nudt9 (NM_028794.2,734-752).
ccctgaactcgttacagaa

SEQ ID NO: 585952 - DNA, 19 bp, Mus musculus
  siRNA target sequence for Nudt9 (NM_028794.2,881-899).
ccgtgaactaccatgatga

SEQ ID NO: 585953 - DNA, 19 bp, Mus musculus
  siRNA target sequence for Nudt9 (NM_028794.2,882-900).
cgtgaactaccatgatgaa

SEQ ID NO: 585954 - DNA, 19 bp, Mus musculus
  siRNA target sequence for Nudt9 (NM_028794.2,883-901).
gtgaactaccatgatgaaa

SEQ ID NO: 585955 - DNA, 19 bp, Mus musculus
  siRNA target sequence for Nudt9 (NM_028794.2,885-903).
gaactaccatgatgaaaca

SEQ ID NO: 585956 - DNA, 19 bp, Mus musculus
  siRNA target sequence for Nudt9 (NM_028794.2,974-992).
gcgaccagctcaagttgta

SEQ ID NO: 585957 - DNA, 19 bp, Mus musculus
  siRNA target sequence for Lysal2 (NM_053103.1,394-412).
ggcagtatgagaggtattt

SEQ ID NO: 585958 - DNA, 19 bp, Mus musculus
  siRNA target sequence for Lysal2 (NM_053103.1,490-508).
gcagcggctcccggatttt

SEQ ID NO: 585959 - DNA, 19 bp, Mus musculus
  siRNA target sequence for Lysal2 (NM_053103.1,491-509).
cagcggctcccggattttt

SEQ ID NO: 585960 - DNA, 19 bp, Mus musculus
  siRNA target sequence for Lysal2 (NM_053103.1,493-511).
gcggctcccggatttttgt

SEQ ID NO: 585961 - DNA, 19 bp, Mus musculus
  siRNA target sequence for Lysal2 (NM_053103.1,494-512).
cggctcccggatttttgtt

SEQ ID NO: 585962 - DNA, 19 bp, Mus musculus
  siRNA target sequence for Lysal2 (NM_053103.1,496-514).
gctcccggatttttgttta

SEQ ID NO: 585963 - DNA, 19 bp, Mus musculus
  siRNA target sequence for Lysal2 (NM_053103.1,583-601).
gccagcccgtggttaagaa

SEQ ID NO: 585964 - DNA, 19 bp, Mus musculus
  siRNA target sequence for Lysal2 (NM_053103.1,584-602).
ccagcccgtggttaagaaa

SEQ ID NO: 585965 - DNA, 19 bp, Mus musculus
  siRNA target sequence for Lysal2 (NM_053103.1,585-603).
cagcccgtggttaagaaaa

SEQ ID NO: 585966 - DNA, 19 bp, Mus musculus
  siRNA target sequence for Lysal2 (NM_053103.1,587-605).
gcccgtggttaagaaaata

SEQ ID NO: 585967 - DNA, 19 bp, Mus musculus
  siRNA target sequence for Lysal2 (NM_053103.1,763-781).
ggcaacagttggctatctt

SEQ ID NO: 585968 - DNA, 19 bp, Mus musculus
  siRNA target sequence for Lysal2 (NM_053103.1,773-791).
ggctatcttggcagattta

SEQ ID NO: 585969 - DNA, 19 bp, Mus musculus
  siRNA target sequence for Lysal2 (NM_053103.1,779-797).
cttggcagatttagtgaaa

SEQ ID NO: 585970 - DNA, 19 bp, Mus musculus
  siRNA target sequence for Lysal2 (NM_053103.1,876-894).
gcatggatcggaatcaact

SEQ ID NO: 585971 - DNA, 19 bp, Mus musculus
  siRNA target sequence for Lysal2 (NM_053103.1,877-895).
catggatcggaatcaactt

SEQ ID NO: 585972 - DNA, 19 bp, Mus musculus
  siRNA target sequence for Lysal2 (NM_053103.1,881-899).
gatcggaatcaactttgtt

SEQ ID NO: 585973 - DNA, 19 bp, Mus musculus
  siRNA target sequence for Lysal2 (NM_053103.1,994-1012).
gaggagcctctctccaaat

SEQ ID NO: 585974 - DNA, 19 bp, Mus musculus
  siRNA target sequence for Lysal2 (NM_053103.1,1125-1143).
gtgtacagggtttatgtca

SEQ ID NO: 585975 - DNA, 19 bp, Mus musculus
  siRNA target sequence for Lysal2 (NM_053103.1,1154-1172).
gggctttgggggcaacttt

SEQ ID NO: 585976 - DNA, 19 bp, Mus musculus
  siRNA target sequence for Lysal2 (NM_053103.1,1200-1218).
ctgaatgaaacgcttaaca

SEQ ID NO: 585977 - DNA, 19 bp, Mus musculus
  siRNA target sequence for Lysal2 (NM_053103.1,1407-1425).
gcctcactgaacggtattt

SEQ ID NO: 585978 - DNA, 19 bp, Mus musculus
  siRNA target sequence for Lysal2 (NM_053103.1,1408-1426).
cctcactgaacggtattta

SEQ ID NO: 585979 - DNA, 19 bp, Mus musculus
  siRNA target sequence for Lysal2 (NM_053103.1,1432-1450).
ctccaatcgacttcaacaa

SEQ ID NO: 585980 - DNA, 19 bp, Mus musculus
  siRNA target sequence for Lysal2 (NM_053103.1,1434-1452).
ccaatcgacttcaacaaca

SEQ ID NO: 585981 - DNA, 19 bp, Mus musculus
  siRNA target sequence for Lysal2 (NM_053103.1,1445-1463).
caacaacagcgagttttat

SEQ ID NO: 585982 - DNA, 19 bp, Mus musculus
  siRNA target sequence for Lysal2 (NM_053103.1,1537-1555).
ccaaggctgctcaggatta

SEQ ID NO: 585983 - DNA, 19 bp, Mus musculus
  siRNA target sequence for Lysal2 (NM_053103.1,1573-1591).
cggtgctagcccagagatt

SEQ ID NO: 585984 - DNA, 19 bp, Mus musculus
  siRNA target sequence for Lysal2 (NM_053103.1,1575-1593).
gtgctagcccagagattca

SEQ ID NO: 585985 - DNA, 19 bp, Mus musculus
  siRNA target sequence for Lysal2 (NM_053103.1,1622-1640).
cgagcatcgactcaagtat

SEQ ID NO: 585986 - DNA, 19 bp, Mus musculus
  siRNA target sequence for Lysal2 (NM_053103.1,1720-1738).
cagcgcagctggtgtatga

SEQ ID NO: 585987 - DNA, 19 bp, Mus musculus
  siRNA target sequence for Lysal2 (NM_053103.1,1756-1774).
cgctgggagcaattctgta

SEQ ID NO: 585988 - DNA, 19 bp, Mus musculus
  siRNA target sequence for Lysal2 (NM_053103.1,1760-1778).
gggagcaattctgtataaa

SEQ ID NO: 585989 - DNA, 19 bp, Mus musculus
  siRNA target sequence for Lysal2 (NM_053103.1,1997-2015).
gcaagtggtgccgatgatt

SEQ ID NO: 585990 - DNA, 19 bp, Mus musculus
  siRNA target sequence for Rraga (NM_178376.2,518-536).
gagccgcgaactggaaaaa

SEQ ID NO: 585991 - DNA, 19 bp, Mus musculus
  siRNA target sequence for Rraga (NM_178376.2,522-540).
cgcgaactggaaaaagata

SEQ ID NO: 585992 - DNA, 19 bp, Mus musculus
  siRNA target sequence for Rraga (NM_178376.2,530-548).
ggaaaaagatatgcattat

SEQ ID NO: 585993 - DNA, 19 bp, Mus musculus
  siRNA target sequence for Rraga (NM_178376.2,531-549).
gaaaaagatatgcattatt

SEQ ID NO: 585994 - DNA, 19 bp, Mus musculus
  siRNA target sequence for Rraga (NM_178376.2,537-555).
gatatgcattattaccaat

SEQ ID NO: 585995 - DNA, 19 bp, Mus musculus
  siRNA target sequence for Rraga (NM_178376.2,585-603).
cctgacgccaaaatcttct

SEQ ID NO: 585996 - DNA, 19 bp, Mus musculus
  siRNA target sequence for Rraga (NM_178376.2,636-654).
gatcaacgtgacctgattt

SEQ ID NO: 585997 - DNA, 19 bp, Mus musculus
  siRNA target sequence for Rraga (NM_178376.2,639-657).
caacgtgacctgattttta

SEQ ID NO: 585998 - DNA, 19 bp, Mus musculus
  siRNA target sequence for Rraga (NM_178376.2,694-712).
cgctggagtgcgcttgttt

SEQ ID NO: 585999 - DNA, 19 bp, Mus musculus
  siRNA target sequence for Rraga (NM_178376.2,698-716).
ggagtgcgcttgttttcga

SEQ ID NO: 586000 - DNA, 19 bp, Mus musculus
  siRNA target sequence for Rraga (NM_178376.2,699-717).
gagtgcgcttgttttcgaa

SEQ ID NO: 586001 - DNA, 19 bp, Mus musculus
  siRNA target sequence for Rraga (NM_178376.2,727-745).
gggatgagacgctctacaa

SEQ ID NO: 586002 - DNA, 19 bp, Mus musculus
  siRNA target sequence for Rraga (NM_178376.2,795-813).
gagatgaacctaaggaatt

SEQ ID NO: 586003 - DNA, 19 bp, Mus musculus
  siRNA target sequence for Rraga (NM_178376.2,808-826).
ggaattttgcccagattat

SEQ ID NO: 586004 - DNA, 19 bp, Mus musculus
  siRNA target sequence for Rraga (NM_178376.2,809-827).
gaattttgcccagattatt

SEQ ID NO: 586005 - DNA, 19 bp, Mus musculus
  siRNA target sequence for Rraga (NM_178376.2,858-876).
gctacgttcttggtgattt

SEQ ID NO: 586006 - DNA, 19 bp, Mus musculus
  siRNA target sequence for Rraga (NM_178376.2,903-921).
gatgtgcaccgctttgaga

SEQ ID NO: 586007 - DNA, 19 bp, Mus musculus
  siRNA target sequence for Rraga (NM_178376.2,961-979).
gtaaattggccgcttcttt

SEQ ID NO: 586008 - DNA, 19 bp, Mus musculus
  siRNA target sequence for Rraga (NM_178376.2,1127-1145).
gaagctagaaagagtagat

SEQ ID NO: 586009 - DNA, 19 bp, Mus musculus
  siRNA target sequence for Rragd (NM_027491.1,57-75).
cagaaagtcgtctttcaca

SEQ ID NO: 586010 - DNA, 19 bp, Mus musculus
  siRNA target sequence for Rragd (NM_027491.1,85-103).
cgagcgagacgctgttctt

SEQ ID NO: 586011 - DNA, 19 bp, Mus musculus
  siRNA target sequence for Rragd (NM_027491.1,201-219).
cctacctttgactatgaga

SEQ ID NO: 586012 - DNA, 19 bp, Mus musculus
  siRNA target sequence for Rragd (NM_027491.1,202-220).
ctacctttgactatgagat

SEQ ID NO: 586013 - DNA, 19 bp, Mus musculus
  siRNA target sequence for Rragd (NM_027491.1,257-275).
cgactcccaggatgactat

SEQ ID NO: 586014 - DNA, 19 bp, Mus musculus
  siRNA target sequence for Rragd (NM_027491.1,258-276).
gactcccaggatgactata

SEQ ID NO: 586015 - DNA, 19 bp, Mus musculus
  siRNA target sequence for Rragd (NM_027491.1,263-281).
ccaggatgactatatggaa

SEQ ID NO: 586016 - DNA, 19 bp, Mus musculus
  siRNA target sequence for Rragd (NM_027491.1,341-359).
ctttgaggtgtttattcat

SEQ ID NO: 586017 - DNA, 19 bp, Mus musculus
  siRNA target sequence for Rragd (NM_027491.1,431-449).
cctcgctgatgctggatta

SEQ ID NO: 586018 - DNA, 19 bp, Mus musculus
  siRNA target sequence for Rragd (NM_027491.1,434-452).
cgctgatgctggattagaa

SEQ ID NO: 586019 - DNA, 19 bp, Mus musculus
  siRNA target sequence for Rragd (NM_027491.1,514-532).
gcaaagtggttcagaaact

SEQ ID NO: 586020 - DNA, 19 bp, Mus musculus
  siRNA target sequence for Rragd (NM_027491.1,612-630).
gacgtggtcagtaagattt

SEQ ID NO: 586021 - DNA, 19 bp, Mus musculus
  siRNA target sequence for Rragd (NM_027491.1,617-635).
ggtcagtaagatttatatt

SEQ ID NO: 586022 - DNA, 19 bp, Mus musculus
  siRNA target sequence for Rragd (NM_027491.1,620-638).
cagtaagatttatattgca

SEQ ID NO: 586023 - DNA, 19 bp, Mus musculus
  siRNA target sequence for Rragd (NM_027491.1,696-714).
gtggtgatcgacatctctt

SEQ ID NO: 586024 - DNA, 19 bp, Mus musculus
  siRNA target sequence for Rragd (NM_027491.1,699-717).
gtgatcgacatctcttgta

SEQ ID NO: 586025 - DNA, 19 bp, Mus musculus
  siRNA target sequence for Rragd (NM_027491.1,701-719).
gatcgacatctcttgtatt

SEQ ID NO: 586026 - DNA, 19 bp, Mus musculus
  siRNA target sequence for Rragd (NM_027491.1,704-722).
cgacatctcttgtatttat

SEQ ID NO: 586027 - DNA, 19 bp, Mus musculus
  siRNA target sequence for Rragd (NM_027491.1,715-733).
gtatttatggtctcaaaga

SEQ ID NO: 586028 - DNA, 19 bp, Mus musculus
  siRNA target sequence for Rragd (NM_027491.1,762-780).
gactcaacagccattataa

SEQ ID NO: 586029 - DNA, 19 bp, Mus musculus
  siRNA target sequence for Rragd (NM_027491.1,873-891).
gggctgattgactataatt

SEQ ID NO: 586030 - DNA, 19 bp, Mus musculus
  siRNA target sequence for Rragd (NM_027491.1,904-922).
ggaaggccatccatgaagt

SEQ ID NO: 586031 - DNA, 19 bp, Mus musculus
  siRNA target sequence for BC018399 (NM_145431.1,223-241).
cacgatgctgagattgtgt

SEQ ID NO: 586032 - DNA, 19 bp, Mus musculus
  siRNA target sequence for BC018399 (NM_145431.1,371-389).
gcgaagctgtcatttctgt

SEQ ID NO: 586033 - DNA, 19 bp, Mus musculus
  siRNA target sequence for BC018399 (NM_145431.1,498-516).
gcactgggtccttagcata

SEQ ID NO: 586034 - DNA, 19 bp, Mus musculus
  siRNA target sequence for BC018399 (NM_145431.1,499-517).
cactgggtccttagcatat

SEQ ID NO: 586035 - DNA, 19 bp, Mus musculus
  siRNA target sequence for BC018399 (NM_145431.1,543-561).
ggcctcaggctgcaagaat

SEQ ID NO: 586036 - DNA, 19 bp, Mus musculus
  siRNA target sequence for BC018399 (NM_145431.1,613-631).
ctcactggccacagcaaat

SEQ ID NO: 586037 - DNA, 19 bp, Mus musculus
  siRNA target sequence for BC018399 (NM_145431.1,647-665).
gctgggagccccttcacat

SEQ ID NO: 586038 - DNA, 19 bp, Mus musculus
  siRNA target sequence for BC018399 (NM_145431.1,712-730).
gtacgagtctgggatacaa

SEQ ID NO: 586039 - DNA, 19 bp, Mus musculus
  siRNA target sequence for BC018399 (NM_145431.1,864-882).
gctgtgtcgtactcttcaa

SEQ ID NO: 586040 - DNA, 19 bp, Mus musculus
  siRNA target sequence for BC018399 (NM_145431.1,1073-1091).
cagacgacttcaccttatt

SEQ ID NO: 586041 - DNA, 19 bp, Mus musculus
  siRNA target sequence for BC018399 (NM_145431.1,1199-1217).
cctccttcgacaagtctat

SEQ ID NO: 586042 - DNA, 19 bp, Mus musculus
  siRNA target sequence for BC018399 (NM_145431.1,1298-1316).
cagctgacagccgactatt

SEQ ID NO: 586043 - DNA, 19 bp, Mus musculus
  siRNA target sequence for BC018399 (NM_145431.1,1301-1319).
ctgacagccgactattagt

SEQ ID NO: 586044 - DNA, 19 bp, Mus musculus
  siRNA target sequence for BC018399 (NM_145431.1,1303-1321).
gacagccgactattagtca

SEQ ID NO: 586045 - DNA, 19 bp, Mus musculus
  siRNA target sequence for BC018399 (NM_145431.1,1391-1409).
gccatgccgatgaggtata

SEQ ID NO: 586046 - DNA, 19 bp, Mus musculus
  siRNA target sequence for BC018399 (NM_145431.1,1392-1410).
ccatgccgatgaggtatat

SEQ ID NO: 586047 - DNA, 19 bp, Mus musculus
  siRNA target sequence for Chaf1b (NM_028083.1,301-319).
caccaaagctgtcaatgtt

SEQ ID NO: 586048 - DNA, 19 bp, Mus musculus
  siRNA target sequence for Chaf1b (NM_028083.1,313-331).
caatgttgtacgcttttct

SEQ ID NO: 586049 - DNA, 19 bp, Mus musculus
  siRNA target sequence for Chaf1b (NM_028083.1,497-515).
gatgtgtatgatatttgct

SEQ ID NO: 586050 - DNA, 19 bp, Mus musculus
  siRNA target sequence for Chaf1b (NM_028083.1,516-534).
gggcaaccgatgggaattt

SEQ ID NO: 586051 - DNA, 19 bp, Mus musculus
  siRNA target sequence for Chaf1b (NM_028083.1,568-586).
catatgggatgtcagtaaa

SEQ ID NO: 586052 - DNA, 19 bp, Mus musculus
  siRNA target sequence for Chaf1b (NM_028083.1,580-598).
cagtaaagggcagaaaatt

SEQ ID NO: 586053 - DNA, 19 bp, Mus musculus
  siRNA target sequence for Chaf1b (NM_028083.1,587-605).
gggcagaaaatttccattt

SEQ ID NO: 586054 - DNA, 19 bp, Mus musculus
  siRNA target sequence for Chaf1b (NM_028083.1,633-651).
gagtcacctgggatccttt

SEQ ID NO: 586055 - DNA, 19 bp, Mus musculus
  siRNA target sequence for Chaf1b (NM_028083.1,684-702).
gggtgctgcggatctataa

SEQ ID NO: 586056 - DNA, 19 bp, Mus musculus
  siRNA target sequence for Chaf1b (NM_028083.1,685-703).
ggtgctgcggatctataat

SEQ ID NO: 586057 - DNA, 19 bp, Mus musculus
  siRNA target sequence for Chaf1b (NM_028083.1,686-704).
gtgctgcggatctataata

SEQ ID NO: 586058 - DNA, 19 bp, Mus musculus
  siRNA target sequence for Chaf1b (NM_028083.1,715-733).
gcgtgtggctttcaacatt

SEQ ID NO: 586059 - DNA, 19 bp, Mus musculus
  siRNA target sequence for Chaf1b (NM_028083.1,716-734).
cgtgtggctttcaacattt

SEQ ID NO: 586060 - DNA, 19 bp, Mus musculus
  siRNA target sequence for Chaf1b (NM_028083.1,774-792).
gaagtttccggatgtttca

SEQ ID NO: 586061 - DNA, 19 bp, Mus musculus
  siRNA target sequence for Chaf1b (NM_028083.1,791-809).
cacgacgacagcatgaagt

SEQ ID NO: 586062 - DNA, 19 bp, Mus musculus
  siRNA target sequence for Chaf1b (NM_028083.1,817-835).
ccgaagactcagctttact

SEQ ID NO: 586063 - DNA, 19 bp, Mus musculus
  siRNA target sequence for Chaf1b (NM_028083.1,860-878).
ccagccggatgtatggaat

SEQ ID NO: 586064 - DNA, 19 bp, Mus musculus
  siRNA target sequence for Chaf1b (NM_028083.1,894-912).
caaacaccacttatgtgtt

SEQ ID NO: 586065 - DNA, 19 bp, Mus musculus
  siRNA target sequence for Chaf1b (NM_028083.1,981-999).
gctgttgtcctgtctactt

SEQ ID NO: 586066 - DNA, 19 bp, Mus musculus
  siRNA target sequence for Chaf1b (NM_028083.1,1137-1155).
catttggctatgtgtctaa

SEQ ID NO: 586067 - DNA, 19 bp, Mus musculus
  siRNA target sequence for Chaf1b (NM_028083.1,1150-1168).
gtctaacatccattaccat

SEQ ID NO: 586068 - DNA, 19 bp, Mus musculus
  siRNA target sequence for Chaf1b (NM_028083.1,1202-1220).
gccttcttggccatttcct

SEQ ID NO: 586069 - DNA, 19 bp, Mus musculus
  siRNA target sequence for Chaf1b (NM_028083.1,1225-1243).
ggatggctattgcacattt

SEQ ID NO: 586070 - DNA, 19 bp, Mus musculus
  siRNA target sequence for Chaf1b (NM_028083.1,1249-1267).
cttcgagaaaggtgaactt

SEQ ID NO: 586071 - DNA, 19 bp, Mus musculus
  siRNA target sequence for Chaf1b (NM_028083.1,1259-1277).
ggtgaacttggcatacctt

SEQ ID NO: 586072 - DNA, 19 bp, Mus musculus
  siRNA target sequence for Gnb1 (NM_008142.2,456-474).
ggggcatctggcaaagatt

SEQ ID NO: 586073 - DNA, 19 bp, Mus musculus
  siRNA target sequence for Gnb1 (NM_008142.2,457-475).
gggcatctggcaaagattt

SEQ ID NO: 586074 - DNA, 19 bp, Mus musculus
  siRNA target sequence for Gnb1 (NM_008142.2,458-476).
ggcatctggcaaagattta

SEQ ID NO: 586075 - DNA, 19 bp, Mus musculus
  siRNA target sequence for Gnb1 (NM_008142.2,459-477).
gcatctggcaaagatttat

SEQ ID NO: 586076 - DNA, 19 bp, Mus musculus
  siRNA target sequence for Gnb1 (NM_008142.2,516-534).
cgcctctcaggatggaaaa

SEQ ID NO: 586077 - DNA, 19 bp, Mus musculus
  siRNA target sequence for Gnb1 (NM_008142.2,615-633).
cgctccttctgggaattat

SEQ ID NO: 586078 - DNA, 19 bp, Mus musculus
  siRNA target sequence for Gnb1 (NM_008142.2,717-735).
ggcgggacacacaggttat

SEQ ID NO: 586079 - DNA, 19 bp, Mus musculus
  siRNA target sequence for Gnb1 (NM_008142.2,719-737).
cgggacacacaggttatct

SEQ ID NO: 586080 - DNA, 19 bp, Mus musculus
  siRNA target sequence for Gnb1 (NM_008142.2,721-739).
ggacacacaggttatctgt

SEQ ID NO: 586081 - DNA, 19 bp, Mus musculus
  siRNA target sequence for Gnb1 (NM_008142.2,749-767).
ggttcctggatgacaatca

SEQ ID NO: 586082 - DNA, 19 bp, Mus musculus
  siRNA target sequence for Gnb1 (NM_008142.2,1110-1128).
ctgtggtatcacatctgtt

SEQ ID NO: 586083 - DNA, 19 bp, Mus musculus
  siRNA target sequence for Gnb2 (NM_010312.2,71-89).
gatccgggacgccagaaaa

SEQ ID NO: 586084 - DNA, 19 bp, Mus musculus
  siRNA target sequence for Gnb2 (NM_010312.2,74-92).
ccgggacgccagaaaagca

SEQ ID NO: 586085 - DNA, 19 bp, Mus musculus
  siRNA target sequence for Gnb2 (NM_010312.2,75-93).
cgggacgccagaaaagcat

SEQ ID NO: 586086 - DNA, 19 bp, Mus musculus
  siRNA target sequence for Gnb2 (NM_010312.2,135-153).
ccagtggggcgaattcaga

SEQ ID NO: 586087 - DNA, 19 bp, Mus musculus
  siRNA target sequence for Gnb2 (NM_010312.2,136-154).
cagtggggcgaattcagat

SEQ ID NO: 586088 - DNA, 19 bp, Mus musculus
  siRNA target sequence for Gnb2 (NM_010312.2,174-192).
cgtggacacctggcaaaaa

SEQ ID NO: 586089 - DNA, 19 bp, Mus musculus
  siRNA target sequence for Gnb2 (NM_010312.2,177-195).
ggacacctggcaaaaatct

SEQ ID NO: 586090 - DNA, 19 bp, Mus musculus
  siRNA target sequence for Gnb2 (NM_010312.2,245-263).
ggacggaaagctcatcatt

SEQ ID NO: 586091 - DNA, 19 bp, Mus musculus
  siRNA target sequence for Gnb2 (NM_010312.2,246-264).
gacggaaagctcatcattt

SEQ ID NO: 586092 - DNA, 19 bp, Mus musculus
  siRNA target sequence for Gnb2 (NM_010312.2,363-381).
gggggtttggacaacatct

SEQ ID NO: 586093 - DNA, 19 bp, Mus musculus
  siRNA target sequence for Gnb2 (NM_010312.2,474-492).
ctggacgacaaccaaatca

SEQ ID NO: 586094 - DNA, 19 bp, Mus musculus
  siRNA target sequence for Gnb2 (NM_010312.2,477-495).
gacgacaaccaaatcatca

SEQ ID NO: 586095 - DNA, 19 bp, Mus musculus
  siRNA target sequence for Gnb2 (NM_010312.2,652-670).
gggatgttcgggattccat

SEQ ID NO: 586096 - DNA, 19 bp, Mus musculus
  siRNA target sequence for Gnb2 (NM_010312.2,667-685).
ccatgtgccgacagacatt

SEQ ID NO: 586097 - DNA, 19 bp, Mus musculus
  siRNA target sequence for Gnb2 (NM_010312.2,671-689).
gtgccgacagacattcata

SEQ ID NO: 586098 - DNA, 19 bp, Mus musculus
  siRNA target sequence for Gnb2 (NM_010312.2,939-957).
gtcctcgctggccatgata

SEQ ID NO: 586099 - DNA, 19 bp, Mus musculus
  siRNA target sequence for Gnb3 (NM_013530.1,521-539).
gcggacacggaggacatta

SEQ ID NO: 586100 - DNA, 19 bp, Mus musculus
  siRNA target sequence for Gnb3 (NM_013530.1,522-540).
cggacacggaggacattaa

SEQ ID NO: 586101 - DNA, 19 bp, Mus musculus
  siRNA target sequence for Gnb3 (NM_013530.1,637-655).
cttataccaccaataaggt

SEQ ID NO: 586102 - DNA, 19 bp, Mus musculus
  siRNA target sequence for Gnb3 (NM_013530.1,646-664).
ccaataaggtgcatgcaat

SEQ ID NO: 586103 - DNA, 19 bp, Mus musculus
  siRNA target sequence for Gnb3 (NM_013530.1,732-750).
gggctggacaacatgtgtt

SEQ ID NO: 586104 - DNA, 19 bp, Mus musculus
  siRNA target sequence for Gnb3 (NM_013530.1,807-825).
gctcacacaggttatctct

SEQ ID NO: 586105 - DNA, 19 bp, Mus musculus
  siRNA target sequence for Gnb3 (NM_013530.1,964-982).
ccccagactacaaactctt

SEQ ID NO: 586106 - DNA, 19 bp, Mus musculus
  siRNA target sequence for Gnb3 (NM_013530.1,1033-1051).
ggacctgtcgtcagacttt

SEQ ID NO: 586107 - DNA, 19 bp, Mus musculus
  siRNA target sequence for Gnb3 (NM_013530.1,1037-1055).
ctgtcgtcagactttcact

SEQ ID NO: 586108 - DNA, 19 bp, Mus musculus
  siRNA target sequence for Gnb3 (NM_013530.1,1058-1076).
ccatgagtcagacatcaat

SEQ ID NO: 586109 - DNA, 19 bp, Mus musculus
  siRNA target sequence for Gnb3 (NM_013530.1,1293-1311).
gagcgtgtaggcatactct

SEQ ID NO: 586110 - DNA, 19 bp, Mus musculus
  siRNA target sequence for Gnb4 (NM_013531.2,228-246).
ggttcagatcacgtctaat

SEQ ID NO: 586111 - DNA, 19 bp, Mus musculus
  siRNA target sequence for Gnb4 (NM_013531.2,229-247).
gttcagatcacgtctaata

SEQ ID NO: 586112 - DNA, 19 bp, Mus musculus
  siRNA target sequence for Gnb4 (NM_013531.2,252-270).
ctccgtgggccgaatacaa

SEQ ID NO: 586113 - DNA, 19 bp, Mus musculus
  siRNA target sequence for Gnb4 (NM_013531.2,254-272).
ccgtgggccgaatacaaat

SEQ ID NO: 586114 - DNA, 19 bp, Mus musculus
  siRNA target sequence for Gnb4 (NM_013531.2,295-313).
ggccacctcgctaagatct

SEQ ID NO: 586115 - DNA, 19 bp, Mus musculus
  siRNA target sequence for Gnb4 (NM_013531.2,296-314).
gccacctcgctaagatcta

SEQ ID NO: 586116 - DNA, 19 bp, Mus musculus
  siRNA target sequence for Gnb4 (NM_013531.2,356-374).
cttcgcaagatggaaaatt

SEQ ID NO: 586117 - DNA, 19 bp, Mus musculus
  siRNA target sequence for Gnb4 (NM_013531.2,384-402).
ggatagctatacgacaaat

SEQ ID NO: 586118 - DNA, 19 bp, Mus musculus
  siRNA target sequence for Gnb4 (NM_013531.2,385-403).
gatagctatacgacaaata

SEQ ID NO: 586119 - DNA, 19 bp, Mus musculus
  siRNA target sequence for Gnb4 (NM_013531.2,576-594).
gtcctgctgccgattctta

SEQ ID NO: 586120 - DNA, 19 bp, Mus musculus
  siRNA target sequence for Gnb4 (NM_013531.2,578-596).
cctgctgccgattcttaga

SEQ ID NO: 586121 - DNA, 19 bp, Mus musculus
  siRNA target sequence for Gnb4 (NM_013531.2,579-597).
ctgctgccgattcttagat

SEQ ID NO: 586122 - DNA, 19 bp, Mus musculus
  siRNA target sequence for Gnb4 (NM_013531.2,581-599).
gctgccgattcttagatga

SEQ ID NO: 586123 - DNA, 19 bp, Mus musculus
  siRNA target sequence for Gnb4 (NM_013531.2,582-600).
ctgccgattcttagatgat

SEQ ID NO: 586124 - DNA, 19 bp, Mus musculus
  siRNA target sequence for Gnb4 (NM_013531.2,710-728).
cactgagtcctgacttgaa

SEQ ID NO: 586125 - DNA, 19 bp, Mus musculus
  siRNA target sequence for Gnb4 (NM_013531.2,913-931).
caggagctcctgctatact

SEQ ID NO: 586126 - DNA, 19 bp, Mus musculus
  siRNA target sequence for Gnb4 (NM_013531.2,925-943).
ctatactctcatgacaata

SEQ ID NO: 586127 - DNA, 19 bp, Mus musculus
  siRNA target sequence for Gnb5 (NM_010313.1,34-52).
ggctcatgtgacaaatgct

SEQ ID NO: 586128 - DNA, 19 bp, Mus musculus
  siRNA target sequence for Gnb5 (NM_010313.1,64-82).
gccctaagacccgttttca

SEQ ID NO: 586129 - DNA, 19 bp, Mus musculus
  siRNA target sequence for Gnb5 (NM_010313.1,65-83).
ccctaagacccgttttcaa

SEQ ID NO: 586130 - DNA, 19 bp, Mus musculus
  siRNA target sequence for Gnb5 (NM_010313.1,67-85).
ctaagacccgttttcaaga

SEQ ID NO: 586131 - DNA, 19 bp, Mus musculus
  siRNA target sequence for Gnb5 (NM_010313.1,391-409).
gtctgggattccttcacta

SEQ ID NO: 586132 - DNA, 19 bp, Mus musculus
  siRNA target sequence for Gnb5 (NM_010313.1,493-511).
ggtggtctggataataagt

SEQ ID NO: 586133 - DNA, 19 bp, Mus musculus
  siRNA target sequence for Gnb5 (NM_010313.1,515-533).
ctgtgtatccactgacatt

SEQ ID NO: 586134 - DNA, 19 bp, Mus musculus
  siRNA target sequence for Gnb5 (NM_010313.1,960-978).
caaggagagcatcatattt

SEQ ID NO: 586135 - DNA, 19 bp, Mus musculus
  siRNA target sequence for Gnb5 (NM_010313.1,1017-1035).
gctttttgctgggtacaat

SEQ ID NO: 586136 - DNA, 19 bp, Mus musculus
  siRNA target sequence for Gnb5 (NM_010313.1,1024-1042).
gctgggtacaatgactata

SEQ ID NO: 586137 - DNA, 19 bp, Mus musculus
  siRNA target sequence for Gnb5 (NM_010313.1,1027-1045).
gggtacaatgactatacca

SEQ ID NO: 586138 - DNA, 19 bp, Mus musculus
  siRNA target sequence for Gng1 (NM_010314.1,135-153).
gaggtagaccagcttaaga

SEQ ID NO: 586139 - DNA, 19 bp, Mus musculus
  siRNA target sequence for Gng1 (NM_010314.1,229-247).
gagaagaccctctagtgaa

SEQ ID NO: 586140 - DNA, 19 bp, Mus musculus
  siRNA target sequence for Gng10 (NM_025277.1,150-168).
gcagtactgcatacagaat

SEQ ID NO: 586141 - DNA, 19 bp, Mus musculus
  siRNA target sequence for Gng11 (NM_025331.2,351-369).
gatctgccggaaaaggaaa

SEQ ID NO: 586142 - DNA, 19 bp, Mus musculus
  siRNA target sequence for Gng11 (NM_025331.2,414-432).
cagagacaacaggtatcta

SEQ ID NO: 586143 - DNA, 19 bp, Mus musculus
  siRNA target sequence for Gng12 (NM_025278.2,307-325).
gcctccatcgaaagaataa

SEQ ID NO: 586144 - DNA, 19 bp, Mus musculus
  siRNA target sequence for Gng12 (NM_025278.2,311-329).
ccatcgaaagaataaaggt

SEQ ID NO: 586145 - DNA, 19 bp, Mus musculus
  siRNA target sequence for Gng12 (NM_025278.2,397-415).
ggcataccgacctcagaaa

SEQ ID NO: 586146 - DNA, 19 bp, Mus musculus
  siRNA target sequence for Gng12 (NM_025278.2,398-416).
gcataccgacctcagaaaa

SEQ ID NO: 586147 - DNA, 19 bp, Mus musculus
  siRNA target sequence for Gng12 (NM_025278.2,412-430).
gaaaacccgttcaaggata

SEQ ID NO: 586148 - DNA, 19 bp, Mus musculus
  siRNA target sequence for Gng12 (NM_025278.2,418-436).
ccgttcaaggataagaaga

SEQ ID NO: 586149 - DNA, 19 bp, Mus musculus
  siRNA target sequence for Gng13 (NM_022422.3,102-120).
gatgtgccccagatgaaga

SEQ ID NO: 586150 - DNA, 19 bp, Mus musculus
  siRNA target sequence for Gng2 (NM_010315.2,220-238).
ccaacatcgacaggataaa

SEQ ID NO: 586151 - DNA, 19 bp, Mus musculus
  siRNA target sequence for Gng3 (NM_010316.2,212-230).
ggggagacccccgttaaca

SEQ ID NO: 586152 - DNA, 19 bp, Mus musculus
  siRNA target sequence for Gng3 (NM_010316.2,223-241).
cgttaacagcactatgagt

SEQ ID NO: 586153 - DNA, 19 bp, Mus musculus
  siRNA target sequence for Gng3 (NM_010316.2,229-247).
cagcactatgagtattggt

SEQ ID NO: 586154 - DNA, 19 bp, Mus musculus
  siRNA target sequence for Gng3 (NM_010316.2,285-303).
ccagcttgtgccggataaa

SEQ ID NO: 586155 - DNA, 19 bp, Mus musculus
  siRNA target sequence for Gng3 (NM_010316.2,288-306).
gcttgtgccggataaaggt

SEQ ID NO: 586156 - DNA, 19 bp, Mus musculus
  siRNA target sequence for Gng4 (NM_010317.2,223-241).
gaaggaaggcatgtctaat

SEQ ID NO: 586157 - DNA, 19 bp, Mus musculus
  siRNA target sequence for Gng4 (NM_010317.2,227-245).
gaaggcatgtctaataaca

SEQ ID NO: 586158 - DNA, 19 bp, Mus musculus
  siRNA target sequence for Gng7 (NM_010319.2,238-256).
cgtgccagcctctgagaat

SEQ ID NO: 586159 - DNA, 19 bp, Mus musculus
  siRNA target sequence for Gng7 (NM_010319.2,247-265).
ctctgagaatccattcaaa

SEQ ID NO: 586160 - DNA, 19 bp, Mus musculus
  siRNA target sequence for Gng7 (NM_010319.2,268-286).
caaaaagccttgcataatt

SEQ ID NO: 586161 - DNA, 19 bp, Mus musculus
  siRNA target sequence for Gng8 (NM_010320.2,120-138).
cgaaacgcacgctaaggat

SEQ ID NO: 586162 - DNA, 19 bp, Mus musculus
  siRNA target sequence for Gngt2 (NM_023121.1,1320-1338).
gaacccacgtgatctgatt

SEQ ID NO: 586163 - DNA, 19 bp, Mus musculus
  siRNA target sequence for Gngt2 (NM_023121.1,1349-1367).
gaaaggaaatcaaggatta

SEQ ID NO: 586164 - DNA, 19 bp, Mus musculus
  siRNA target sequence for Rgs6 (NM_015812.1,421-439).
gagttctcccaacatgatt

SEQ ID NO: 586165 - DNA, 19 bp, Mus musculus
  siRNA target sequence for Rgs6 (NM_015812.1,426-444).
ctcccaacatgattgtcta

SEQ ID NO: 586166 - DNA, 19 bp, Mus musculus
  siRNA target sequence for Rgs6 (NM_015812.1,448-466).
caaaattgaggacatcatt

SEQ ID NO: 586167 - DNA, 19 bp, Mus musculus
  siRNA target sequence for Rgs6 (NM_015812.1,544-562).
cgtcacaggtactgacatt

SEQ ID NO: 586168 - DNA, 19 bp, Mus musculus
  siRNA target sequence for Rgs6 (NM_015812.1,547-565).
cacaggtactgacattgta

SEQ ID NO: 586169 - DNA, 19 bp, Mus musculus
  siRNA target sequence for Rgs6 (NM_015812.1,563-581).
gtacagtggcttatgaaga

SEQ ID NO: 586170 - DNA, 19 bp, Mus musculus
  siRNA target sequence for Rgs6 (NM_015812.1,595-613).
ggacccagttgaagcaata

SEQ ID NO: 586171 - DNA, 19 bp, Mus musculus
  siRNA target sequence for Rgs6 (NM_015812.1,858-876).
caaggaagtgggaattcat

SEQ ID NO: 586172 - DNA, 19 bp, Mus musculus
  siRNA target sequence for Rgs6 (NM_015812.1,910-928).
ccggaaaaaggataagaca

SEQ ID NO: 586173 - DNA, 19 bp, Mus musculus
  siRNA target sequence for Rgs6 (NM_015812.1,986-1004).
ccaggctgtgtgaacacaa

SEQ ID NO: 586174 - DNA, 19 bp, Mus musculus
  siRNA target sequence for Rgs6 (NM_015812.1,1020-1038).
gaaaatgtcggcgtttgaa

SEQ ID NO: 586175 - DNA, 19 bp, Mus musculus
  siRNA target sequence for Rgs6 (NM_015812.1,1039-1057).
gaatccacaaaaggttaaa

SEQ ID NO: 586176 - DNA, 19 bp, Mus musculus
  siRNA target sequence for Rgs6 (NM_015812.1,1051-1069).
ggttaaaaagtcagtatat

SEQ ID NO: 586177 - DNA, 19 bp, Mus musculus
  siRNA target sequence for Rgs6 (NM_015812.1,1121-1139).
ccaatcaggaaaactacaa

SEQ ID NO: 586178 - DNA, 19 bp, Mus musculus
  siRNA target sequence for Rgs6 (NM_015812.1,1151-1169).
cgaaaacagataacgtttt

SEQ ID NO: 586179 - DNA, 19 bp, Mus musculus
  siRNA target sequence for Rgs6 (NM_015812.1,1206-1224).
ccaaagtggctgaaagttt

SEQ ID NO: 586180 - DNA, 19 bp, Mus musculus
  siRNA target sequence for Rgs6 (NM_015812.1,1207-1225).
caaagtggctgaaagttta

SEQ ID NO: 586181 - DNA, 19 bp, Mus musculus
  siRNA target sequence for Rgs6 (NM_015812.1,1230-1248).
cttacacggagcagtatgt

SEQ ID NO: 586182 - DNA, 19 bp, Mus musculus
  siRNA target sequence for Rgs6 (NM_015812.1,1249-1267).
ggagtacgacccattcata

SEQ ID NO: 586183 - DNA, 19 bp, Mus musculus
  siRNA target sequence for Rgs6 (NM_015812.1,1252-1270).
gtacgacccattcataaca

SEQ ID NO: 586184 - DNA, 19 bp, Mus musculus
  siRNA target sequence for Rgs6 (NM_015812.1,1311-1329).
ccttatgggacatagagat

SEQ ID NO: 586185 - DNA, 19 bp, Mus musculus
  siRNA target sequence for Rgs6 (NM_015812.1,1360-1378).
gcgttggggcttctctttt

SEQ ID NO: 586186 - DNA, 19 bp, Mus musculus
  siRNA target sequence for Rgs6 (NM_015812.1,1362-1380).
gttggggcttctcttttga

SEQ ID NO: 586187 - DNA, 19 bp, Mus musculus
  siRNA target sequence for Rgs6 (NM_015812.1,1554-1572).
ccccaagtgcaatcaactt

SEQ ID NO: 586188 - DNA, 19 bp, Mus musculus
  siRNA target sequence for Rgs6 (NM_015812.1,1580-1598).
cacagctatgagataacca

SEQ ID NO: 586189 - DNA, 19 bp, Mus musculus
  siRNA target sequence for Rgs7 (NM_011880.1,179-197).
ggctcagggaaataattat

SEQ ID NO: 586190 - DNA, 19 bp, Mus musculus
  siRNA target sequence for Rgs7 (NM_011880.1,273-291).
cgtatgcaagacgagaaaa

SEQ ID NO: 586191 - DNA, 19 bp, Mus musculus
  siRNA target sequence for Rgs7 (NM_011880.1,349-367).
ccgggtcagacattgttca

SEQ ID NO: 586192 - DNA, 19 bp, Mus musculus
  siRNA target sequence for Rgs7 (NM_011880.1,350-368).
cgggtcagacattgttcaa

SEQ ID NO: 586193 - DNA, 19 bp, Mus musculus
  siRNA target sequence for Rgs7 (NM_011880.1,351-369).
gggtcagacattgttcaat

SEQ ID NO: 586194 - DNA, 19 bp, Mus musculus
  siRNA target sequence for Rgs7 (NM_011880.1,363-381).
gttcaatggttaataaaga

SEQ ID NO: 586195 - DNA, 19 bp, Mus musculus
  siRNA target sequence for Rgs7 (NM_011880.1,366-384).
caatggttaataaagaact

SEQ ID NO: 586196 - DNA, 19 bp, Mus musculus
  siRNA target sequence for Rgs7 (NM_011880.1,432-450).
gctgcccatggctacttct

SEQ ID NO: 586197 - DNA, 19 bp, Mus musculus
  siRNA target sequence for Rgs7 (NM_011880.1,564-582).
gtttacctctgcaagagaa

SEQ ID NO: 586198 - DNA, 19 bp, Mus musculus
  siRNA target sequence for Rgs7 (NM_011880.1,574-592).
gcaagagaacaatgcaaaa

SEQ ID NO: 586199 - DNA, 19 bp, Mus musculus
  siRNA target sequence for Rgs7 (NM_011880.1,601-619).
ggctagagctagcagatta

SEQ ID NO: 586200 - DNA, 19 bp, Mus musculus
  siRNA target sequence for Rgs7 (NM_011880.1,602-620).
gctagagctagcagattat

SEQ ID NO: 586201 - DNA, 19 bp, Mus musculus
  siRNA target sequence for Rgs7 (NM_011880.1,733-751).
ggaagatcctcgatagtca

SEQ ID NO: 586202 - DNA, 19 bp, Mus musculus
  siRNA target sequence for Rgs7 (NM_011880.1,734-752).
gaagatcctcgatagtcaa

SEQ ID NO: 586203 - DNA, 19 bp, Mus musculus
  siRNA target sequence for Rgs7 (NM_011880.1,833-851).
gatgagaaacccacacaaa

SEQ ID NO: 586204 - DNA, 19 bp, Mus musculus
  siRNA target sequence for Rgs7 (NM_011880.1,855-873).
cgaaagtctgtctatggtt

SEQ ID NO: 586205 - DNA, 19 bp, Mus musculus
  siRNA target sequence for Rgs7 (NM_011880.1,860-878).
gtctgtctatggtttacaa

SEQ ID NO: 586206 - DNA, 19 bp, Mus musculus
  siRNA target sequence for Rgs7 (NM_011880.1,910-928).
cacctacaccagaaaccaa

SEQ ID NO: 586207 - DNA, 19 bp, Mus musculus
  siRNA target sequence for Rgs7 (NM_011880.1,948-966).
ctgcaccaacagataaaat

SEQ ID NO: 586208 - DNA, 19 bp, Mus musculus
  siRNA target sequence for Rgs7 (NM_011880.1,968-986).
ctggcaaatacagttagat

SEQ ID NO: 586209 - DNA, 19 bp, Mus musculus
  siRNA target sequence for Rgs7 (NM_011880.1,994-1012).
ggttaaaaatgtcaaaagt

SEQ ID NO: 586210 - DNA, 19 bp, Mus musculus
  siRNA target sequence for Rgs7 (NM_011880.1,1004-1022).
gtcaaaagttgctgatagt

SEQ ID NO: 586211 - DNA, 19 bp, Mus musculus
  siRNA target sequence for Rgs7 (NM_011880.1,1011-1029).
gttgctgatagtctactaa

SEQ ID NO: 586212 - DNA, 19 bp, Mus musculus
  siRNA target sequence for Rgs7 (NM_011880.1,1015-1033).
ctgatagtctactaagcta

SEQ ID NO: 586213 - DNA, 19 bp, Mus musculus
  siRNA target sequence for Rgs7 (NM_011880.1,1017-1035).
gatagtctactaagctata

SEQ ID NO: 586214 - DNA, 19 bp, Mus musculus
  siRNA target sequence for Rgs7 (NM_011880.1,1030-1048).
gctatacggaacagtatgt

SEQ ID NO: 586215 - DNA, 19 bp, Mus musculus
  siRNA target sequence for Rgs7 (NM_011880.1,1036-1054).
cggaacagtatgtagaata

SEQ ID NO: 586216 - DNA, 19 bp, Mus musculus
  siRNA target sequence for Rgs7 (NM_011880.1,1070-1088).
gccgcctgacccttccaat

SEQ ID NO: 586217 - DNA, 19 bp, Mus musculus
  siRNA target sequence for Rgs7 (NM_011880.1,1074-1092).
cctgacccttccaatccat

SEQ ID NO: 586218 - DNA, 19 bp, Mus musculus
  siRNA target sequence for Rgs7 (NM_011880.1,1108-1126).
cgactttctgggaacttga

SEQ ID NO: 586219 - DNA, 19 bp, Mus musculus
  siRNA target sequence for Rgs7 (NM_011880.1,1174-1192).
gtatggatgaggcattgaa

SEQ ID NO: 586220 - DNA, 19 bp, Mus musculus
  siRNA target sequence for Rgs7 (NM_011880.1,1320-1338).
caggaaatatggcaagaat

SEQ ID NO: 586221 - DNA, 19 bp, Mus musculus
  siRNA target sequence for Rgs7 (NM_011880.1,1370-1388).
cttggattctaagagttat

SEQ ID NO: 586222 - DNA, 19 bp, Mus musculus
  siRNA target sequence for Rgs7 (NM_011880.1,1413-1431).
gaaccaggacgatacacat

SEQ ID NO: 586223 - DNA, 19 bp, Mus musculus
  siRNA target sequence for Rgs7 (NM_011880.1,1417-1435).
caggacgatacacatttga

SEQ ID NO: 586224 - DNA, 19 bp, Mus musculus
  siRNA target sequence for Rgs7 (NM_011880.1,1437-1455).
gatgctcaggagcatattt

SEQ ID NO: 586225 - DNA, 19 bp, Mus musculus
  siRNA target sequence for Rgs7 (NM_011880.1,1440-1458).
gctcaggagcatatttaca

SEQ ID NO: 586226 - DNA, 19 bp, Mus musculus
  siRNA target sequence for Rgs7 (NM_011880.1,1441-1459).
ctcaggagcatatttacaa

SEQ ID NO: 586227 - DNA, 19 bp, Mus musculus
  siRNA target sequence for Rgs7 (NM_011880.1,1484-1502).
ccgctttataagatctagt

SEQ ID NO: 586228 - DNA, 19 bp, Mus musculus
  siRNA target sequence for Rgs9 (NM_011268.1,236-254).
gacgggagtcagaatgcat

SEQ ID NO: 586229 - DNA, 19 bp, Mus musculus
  siRNA target sequence for Rgs9 (NM_011268.1,241-259).
gagtcagaatgcataacca

SEQ ID NO: 586230 - DNA, 19 bp, Mus musculus
  siRNA target sequence for Rgs9 (NM_011268.1,386-404).
ctacatctatcctttgcaa

SEQ ID NO: 586231 - DNA, 19 bp, Mus musculus
  siRNA target sequence for Rgs9 (NM_011268.1,436-454).
gcagtctctaccgatttca

SEQ ID NO: 586232 - DNA, 19 bp, Mus musculus
  siRNA target sequence for Rgs9 (NM_011268.1,447-465).
cgatttcagacgccatatt

SEQ ID NO: 586233 - DNA, 19 bp, Mus musculus
  siRNA target sequence for Rgs9 (NM_011268.1,448-466).
gatttcagacgccatattt

SEQ ID NO: 586234 - DNA, 19 bp, Mus musculus
  siRNA target sequence for Rgs9 (NM_011268.1,519-537).
gcgaagcggaatatcaaga

SEQ ID NO: 586235 - DNA, 19 bp, Mus musculus
  siRNA target sequence for Rgs9 (NM_011268.1,520-538).
cgaagcggaatatcaagaa

SEQ ID NO: 586236 - DNA, 19 bp, Mus musculus
  siRNA target sequence for Rgs9 (NM_011268.1,718-736).
gaagtccgcctggaatgaa

SEQ ID NO: 586237 - DNA, 19 bp, Mus musculus
  siRNA target sequence for Rgs9 (NM_011268.1,721-739).
gtccgcctggaatgaacaa

SEQ ID NO: 586238 - DNA, 19 bp, Mus musculus
  siRNA target sequence for Rgs9 (NM_011268.1,759-777).
gaccgcgtgaccaatccaa

SEQ ID NO: 586239 - DNA, 19 bp, Mus musculus
  siRNA target sequence for Rgs9 (NM_011268.1,764-782).
cgtgaccaatccaaacgaa

SEQ ID NO: 586240 - DNA, 19 bp, Mus musculus
  siRNA target sequence for Rgs9 (NM_011268.1,769-787).
ccaatccaaacgaagttaa

SEQ ID NO: 586241 - DNA, 19 bp, Mus musculus
  siRNA target sequence for Rgs9 (NM_011268.1,1073-1091).
gcagagcttccagtacttt

SEQ ID NO: 586242 - DNA, 19 bp, Mus musculus
  siRNA target sequence for Rgs9 (NM_011268.1,1218-1236).
gcgaggcggtggatcaaca

SEQ ID NO: 586243 - DNA, 19 bp, Mus musculus
  siRNA target sequence for Rgs9 (NM_011268.1,1220-1238).
gaggcggtggatcaacata

SEQ ID NO: 586244 - DNA, 19 bp, Mus musculus
  siRNA target sequence for Rgs9 (NM_011268.1,1222-1240).
ggcggtggatcaacataga

SEQ ID NO: 586245 - DNA, 19 bp, Mus musculus
  siRNA target sequence for Rgs9 (NM_011268.1,1302-1320).
gcagcgcagacccacattt

SEQ ID NO: 586246 - DNA, 19 bp, Mus musculus
  siRNA target sequence for Rgs9 (NM_011268.1,1303-1321).
cagcgcagacccacattta

SEQ ID NO: 586247 - DNA, 19 bp, Mus musculus
  siRNA target sequence for Rgs9 (NM_011268.1,1305-1323).
gcgcagacccacatttaca

SEQ ID NO: 586248 - DNA, 19 bp, Mus musculus
  siRNA target sequence for Rgs9 (NM_011268.1,1342-1360).
cttacgcacgctatttgaa

SEQ ID NO: 586249 - DNA, 19 bp, Mus musculus
  siRNA target sequence for Rgs9 (NM_011268.1,1346-1364).
cgcacgctatttgaaatct

SEQ ID NO: 586250 - DNA, 19 bp, Mus musculus
  siRNA target sequence for Rgs9 (NM_011268.1,1366-1384).
caatctataaagaaatgct

SEQ ID NO: 586251 - DNA, 19 bp, Mus musculus
  siRNA target sequence for Rgs9 (NM_011268.1,1377-1395).
gaaatgctggccaaagcta

SEQ ID NO: 586252 - DNA, 19 bp, Mus musculus
  siRNA target sequence for Rgs9 (NM_011268.1,1566-1584).
cctcacctggccgtgtata

SEQ ID NO: 586253 - DNA, 19 bp, Mus musculus
  siRNA target sequence for Rgs9 (NM_011268.1,2103-2121).
ggtgaccagaccacagaaa

SEQ ID NO: 586254 - DNA, 19 bp, Mus musculus
  siRNA target sequence for Wdr5 (NM_080848.1,320-338).
caaactatgccctgaagtt

SEQ ID NO: 586255 - DNA, 19 bp, Mus musculus
  siRNA target sequence for Wdr5 (NM_080848.1,404-422).
caagttcatctgctgataa

SEQ ID NO: 586256 - DNA, 19 bp, Mus musculus
  siRNA target sequence for Wdr5 (NM_080848.1,407-425).
gttcatctgctgataaact

SEQ ID NO: 586257 - DNA, 19 bp, Mus musculus
  siRNA target sequence for Wdr5 (NM_080848.1,413-431).
ctgctgataaactcattaa

SEQ ID NO: 586258 - DNA, 19 bp, Mus musculus
  siRNA target sequence for Wdr5 (NM_080848.1,443-461).
catatgatggaaagtttga

SEQ ID NO: 586259 - DNA, 19 bp, Mus musculus
  siRNA target sequence for Wdr5 (NM_080848.1,499-517).
gtagcgtggtcatcagatt

SEQ ID NO: 586260 - DNA, 19 bp, Mus musculus
  siRNA target sequence for Wdr5 (NM_080848.1,503-521).
cgtggtcatcagattctaa

SEQ ID NO: 586261 - DNA, 19 bp, Mus musculus
  siRNA target sequence for Wdr5 (NM_080848.1,531-549).
gtctgcctctgatgataaa

SEQ ID NO: 586262 - DNA, 19 bp, Mus musculus
  siRNA target sequence for Wdr5 (NM_080848.1,535-553).
gcctctgatgataaaactt

SEQ ID NO: 586263 - DNA, 19 bp, Mus musculus
  siRNA target sequence for Wdr5 (NM_080848.1,536-554).
cctctgatgataaaacttt

SEQ ID NO: 586264 - DNA, 19 bp, Mus musculus
  siRNA target sequence for Wdr5 (NM_080848.1,651-669).
catcgtctcagggtctttt

SEQ ID NO: 586265 - DNA, 19 bp, Mus musculus
  siRNA target sequence for Wdr5 (NM_080848.1,654-672).
cgtctcagggtcttttgat

SEQ ID NO: 586266 - DNA, 19 bp, Mus musculus
  siRNA target sequence for Wdr5 (NM_080848.1,739-757).
ccagtctcagccgttcatt

SEQ ID NO: 586267 - DNA, 19 bp, Mus musculus
  siRNA target sequence for Wdr5 (NM_080848.1,742-760).
gtctcagccgttcatttca

SEQ ID NO: 586268 - DNA, 19 bp, Mus musculus
  siRNA target sequence for Wdr5 (NM_080848.1,762-780).
ccgtgatggatcattgatt

SEQ ID NO: 586269 - DNA, 19 bp, Mus musculus
  siRNA target sequence for Wdr5 (NM_080848.1,764-782).
gtgatggatcattgattgt

SEQ ID NO: 586270 - DNA, 19 bp, Mus musculus
  siRNA target sequence for Wdr5 (NM_080848.1,766-784).
gatggatcattgattgttt

SEQ ID NO: 586271 - DNA, 19 bp, Mus musculus
  siRNA target sequence for Wdr5 (NM_080848.1,1057-1075).
gaagataacctggtgtata

SEQ ID NO: 586272 - DNA, 19 bp, Mus musculus
  siRNA target sequence for Wdr5 (NM_080848.1,1150-1168).
cacccgacagagaacatca

SEQ ID NO: 586273 - DNA, 19 bp, Mus musculus
  siRNA target sequence for Wdr5 (NM_080848.1,1152-1170).
cccgacagagaacatcatt

SEQ ID NO: 586274 - DNA, 19 bp, Mus musculus
  siRNA target sequence for Wdr5 (NM_080848.1,1171-1189).
gcctcagcagcgttagaga

SEQ ID NO: 586275 - DNA, 19 bp, Mus musculus
  siRNA target sequence for Wdr5 (NM_080848.1,1172-1190).
cctcagcagcgttagagaa

SEQ ID NO: 586276 - DNA, 19 bp, Mus musculus
  siRNA target sequence for Wdr5 (NM_080848.1,1180-1198).
gcgttagagaacgacaaaa

SEQ ID NO: 586277 - DNA, 19 bp, Mus musculus
  siRNA target sequence for Wdr5 (NM_080848.1,1182-1200).
gttagagaacgacaaaaca

SEQ ID NO: 586278 - DNA, 19 bp, Mus musculus
  siRNA target sequence for Wdr5 (NM_080848.1,1188-1206).
gaacgacaaaacaatcaaa

SEQ ID NO: 586279 - DNA, 19 bp, Mus musculus
  siRNA target sequence for Wdr5b (NM_027113.1,307-325).
gccgcagaaacccaactat

SEQ ID NO: 586280 - DNA, 19 bp, Mus musculus
  siRNA target sequence for Wdr5b (NM_027113.1,358-376).
ggccatatcatcagttaaa

SEQ ID NO: 586281 - DNA, 19 bp, Mus musculus
  siRNA target sequence for Wdr5b (NM_027113.1,359-377).
gccatatcatcagttaaat

SEQ ID NO: 586282 - DNA, 19 bp, Mus musculus
  siRNA target sequence for Wdr5b (NM_027113.1,360-378).
ccatatcatcagttaaatt

SEQ ID NO: 586283 - DNA, 19 bp, Mus musculus
  siRNA target sequence for Wdr5b (NM_027113.1,361-379).
catatcatcagttaaattt

SEQ ID NO: 586284 - DNA, 19 bp, Mus musculus
  siRNA target sequence for Wdr5b (NM_027113.1,408-426).
ctgcagctgatgcactaat

SEQ ID NO: 586285 - DNA, 19 bp, Mus musculus
  siRNA target sequence for Wdr5b (NM_027113.1,410-428).
gcagctgatgcactaatta

SEQ ID NO: 586286 - DNA, 19 bp, Mus musculus
  siRNA target sequence for Wdr5b (NM_027113.1,411-429).
cagctgatgcactaattat

SEQ ID NO: 586287 - DNA, 19 bp, Mus musculus
  siRNA target sequence for Wdr5b (NM_027113.1,414-432).
ctgatgcactaattataat

SEQ ID NO: 586288 - DNA, 19 bp, Mus musculus
  siRNA target sequence for Wdr5b (NM_027113.1,440-458).
gcatacgatgggaattgta

SEQ ID NO: 586289 - DNA, 19 bp, Mus musculus
  siRNA target sequence for Wdr5b (NM_027113.1,441-459).
catacgatgggaattgtaa

SEQ ID NO: 586290 - DNA, 19 bp, Mus musculus
  siRNA target sequence for Wdr5b (NM_027113.1,445-463).
cgatgggaattgtaagaaa

SEQ ID NO: 586291 - DNA, 19 bp, Mus musculus
  siRNA target sequence for Wdr5b (NM_027113.1,450-468).
ggaattgtaagaaaacact

SEQ ID NO: 586292 - DNA, 19 bp, Mus musculus
  siRNA target sequence for Wdr5b (NM_027113.1,512-530).
gattctagtcgtctagttt

SEQ ID NO: 586293 - DNA, 19 bp, Mus musculus
  siRNA target sequence for Wdr5b (NM_027113.1,551-569).
ctaaaggtatgggatatga

SEQ ID NO: 586294 - DNA, 19 bp, Mus musculus
  siRNA target sequence for Wdr5b (NM_027113.1,638-656).
ccatccaacctcatcgttt

SEQ ID NO: 586295 - DNA, 19 bp, Mus musculus
  siRNA target sequence for Wdr5b (NM_027113.1,649-667).
catcgtttcgggctctttt

SEQ ID NO: 586296 - DNA, 19 bp, Mus musculus
  siRNA target sequence for Wdr5b (NM_027113.1,677-695).
gtgaaaatatgggaagtaa

SEQ ID NO: 586297 - DNA, 19 bp, Mus musculus
  siRNA target sequence for Wdr5b (NM_027113.1,736-754).
ccccatttctgccgtaaat

SEQ ID NO: 586298 - DNA, 19 bp, Mus musculus
  siRNA target sequence for Wdr5b (NM_027113.1,737-755).
cccatttctgccgtaaatt

SEQ ID NO: 586299 - DNA, 19 bp, Mus musculus
  siRNA target sequence for Wdr5b (NM_027113.1,746-764).
gccgtaaattttaattgta

SEQ ID NO: 586300 - DNA, 19 bp, Mus musculus
  siRNA target sequence for Wdr5b (NM_027113.1,747-765).
ccgtaaattttaattgtaa

SEQ ID NO: 586301 - DNA, 19 bp, Mus musculus
  siRNA target sequence for Wdr5b (NM_027113.1,748-766).
cgtaaattttaattgtaat

SEQ ID NO: 586302 - DNA, 19 bp, Mus musculus
  siRNA target sequence for Wdr5b (NM_027113.1,762-780).
gtaatgggtccttgatagt

SEQ ID NO: 586303 - DNA, 19 bp, Mus musculus
  siRNA target sequence for Wdr5b (NM_027113.1,821-839).
gcgtcaggccagtgtttaa

SEQ ID NO: 586304 - DNA, 19 bp, Mus musculus
  siRNA target sequence for Wdr5b (NM_027113.1,862-880).
ccctccagtgtcttttgta

SEQ ID NO: 586305 - DNA, 19 bp, Mus musculus
  siRNA target sequence for Wdr5b (NM_027113.1,923-941).
gacaatactcttaaactgt

SEQ ID NO: 586306 - DNA, 19 bp, Mus musculus
  siRNA target sequence for Wdr5b (NM_027113.1,957-975).
gcagatgcctgaagacata

SEQ ID NO: 586307 - DNA, 19 bp, Mus musculus
  siRNA target sequence for Wdr5b (NM_027113.1,1066-1084).
ggtttacatctggaatctt

SEQ ID NO: 586308 - DNA, 19 bp, Mus musculus
  siRNA target sequence for Wdr5b (NM_027113.1,1142-1160).
gcctgtcaccctacaaaaa

SEQ ID NO: 586309 - DNA, 19 bp, Mus musculus
  siRNA target sequence for Wdr5b (NM_027113.1,1143-1161).
cctgtcaccctacaaaaaa

SEQ ID NO: 586310 - DNA, 19 bp, Mus musculus
  siRNA target sequence for Wdr5b (NM_027113.1,1146-1164).
gtcaccctacaaaaaacat

SEQ ID NO: 586311 - DNA, 19 bp, Mus musculus
  siRNA target sequence for Wdr5b (NM_027113.1,1184-1202).
gaaaatgacaagacaatta

SEQ ID NO: 586312 - DNA, 19 bp, Mus musculus
  siRNA target sequence for Gtpbp3 (NM_032544.2,1304-1322).
gacttcggagaggatgata

SEQ ID NO: 586313 - DNA, 19 bp, Mus musculus
  siRNA target sequence for Gtpbp3 (NM_032544.2,1306-1324).
cttcggagaggatgataat

SEQ ID NO: 586314 - DNA, 19 bp, Mus musculus
  siRNA target sequence for Gtpbp3 (NM_032544.2,1311-1329).
gagaggatgataatttgga

SEQ ID NO: 586315 - DNA, 19 bp, Mus musculus
  siRNA target sequence for Igtp (NM_018738.2,448-466).
caaagttgccacaaaatat

SEQ ID NO: 586316 - DNA, 19 bp, Mus musculus
  siRNA target sequence for Igtp (NM_018738.2,518-536).
catcagcccgtggtctaaa

SEQ ID NO: 586317 - DNA, 19 bp, Mus musculus
  siRNA target sequence for Igtp (NM_018738.2,521-539).
cagcccgtggtctaaatct

SEQ ID NO: 586318 - DNA, 19 bp, Mus musculus
  siRNA target sequence for Igtp (NM_018738.2,523-541).
gcccgtggtctaaatctat

SEQ ID NO: 586319 - DNA, 19 bp, Mus musculus
  siRNA target sequence for Igtp (NM_018738.2,544-562).
ctgctggtgagtcacttta

SEQ ID NO: 586320 - DNA, 19 bp, Mus musculus
  siRNA target sequence for Igtp (NM_018738.2,612-630).
gcggtgacagagggaaatt

SEQ ID NO: 586321 - DNA, 19 bp, Mus musculus
  siRNA target sequence for Igtp (NM_018738.2,641-659).
gataggtatagtcaaagat

SEQ ID NO: 586322 - DNA, 19 bp, Mus musculus
  siRNA target sequence for Igtp (NM_018738.2,791-809).
ggtgaggaccactaagaaa

SEQ ID NO: 586323 - DNA, 19 bp, Mus musculus
  siRNA target sequence for Igtp (NM_018738.2,1157-1175).
ctgttttagcccgtctttt

SEQ ID NO: 586324 - DNA, 19 bp, Mus musculus
  siRNA target sequence for Igtp (NM_018738.2,1159-1177).
gttttagcccgtcttttca

SEQ ID NO: 586325 - DNA, 19 bp, Mus musculus
  siRNA target sequence for Igtp (NM_018738.2,1241-1259).
cttagagatcatttctcaa

SEQ ID NO: 586326 - DNA, 19 bp, Mus musculus
  siRNA target sequence for Igtp (NM_018738.2,1473-1491).
cagttccaggacttgatca

SEQ ID NO: 586327 - DNA, 19 bp, Mus musculus
  siRNA target sequence for Igtp (NM_018738.2,1522-1540).
gttttgccgtgaacaagtt

SEQ ID NO: 586328 - DNA, 19 bp, Mus musculus
  siRNA target sequence for Igtp (NM_018738.2,1584-1602).
gtcgtcacccgctacttca

SEQ ID NO: 586329 - DNA, 19 bp, Mus musculus
  siRNA target sequence for Igtp (NM_018738.2,1616-1634).
caagctcgtcattgaaata

SEQ ID NO: 586330 - DNA, 19 bp, Mus musculus
  siRNA target sequence for Igtp (NM_018738.2,1686-1704).
ctccctcccgaaattcact

SEQ ID NO: 586331 - DNA, 19 bp, Mus musculus
  siRNA target sequence for Samhd1 (NM_018851.1,136-154).
cctgcaacagctaatctgt

SEQ ID NO: 586332 - DNA, 19 bp, Mus musculus
  siRNA target sequence for Samhd1 (NM_018851.1,158-176).
cagacgacgacttccaaaa

SEQ ID NO: 586333 - DNA, 19 bp, Mus musculus
  siRNA target sequence for Samhd1 (NM_018851.1,204-222).
ggacgtgtgctccttctta

SEQ ID NO: 586334 - DNA, 19 bp, Mus musculus
  siRNA target sequence for Samhd1 (NM_018851.1,230-248).
gtggtttccgagagaagaa

SEQ ID NO: 586335 - DNA, 19 bp, Mus musculus
  siRNA target sequence for Samhd1 (NM_018851.1,287-305).
cgtttctgccctttttgga

SEQ ID NO: 586336 - DNA, 19 bp, Mus musculus
  siRNA target sequence for Samhd1 (NM_018851.1,381-399).
gagtcagtctcggattgat

SEQ ID NO: 586337 - DNA, 19 bp, Mus musculus
  siRNA target sequence for Samhd1 (NM_018851.1,383-401).
gtcagtctcggattgatct

SEQ ID NO: 586338 - DNA, 19 bp, Mus musculus
  siRNA target sequence for Samhd1 (NM_018851.1,385-403).
cagtctcggattgatctaa

SEQ ID NO: 586339 - DNA, 19 bp, Mus musculus
  siRNA target sequence for Samhd1 (NM_018851.1,389-407).
ctcggattgatctaatgaa

SEQ ID NO: 586340 - DNA, 19 bp, Mus musculus
  siRNA target sequence for Samhd1 (NM_018851.1,422-440).
ccattcatggccacattga

SEQ ID NO: 586341 - DNA, 19 bp, Mus musculus
  siRNA target sequence for Samhd1 (NM_018851.1,448-466).
cctctccttatcagaatca

SEQ ID NO: 586342 - DNA, 19 bp, Mus musculus
  siRNA target sequence for Samhd1 (NM_018851.1,449-467).
ctctccttatcagaatcat

SEQ ID NO: 586343 - DNA, 19 bp, Mus musculus
  siRNA target sequence for Samhd1 (NM_018851.1,484-502).
cagcgacttcgctatatca

SEQ ID NO: 586344 - DNA, 19 bp, Mus musculus
  siRNA target sequence for Samhd1 (NM_018851.1,597-615).
gcgagcacttgccgaaaaa

SEQ ID NO: 586345 - DNA, 19 bp, Mus musculus
  siRNA target sequence for Samhd1 (NM_018851.1,630-648).
gatcagtgagcgagatata

SEQ ID NO: 586346 - DNA, 19 bp, Mus musculus
  siRNA target sequence for Samhd1 (NM_018851.1,691-709).
gggccattttctcatatgt

SEQ ID NO: 586347 - DNA, 19 bp, Mus musculus
  siRNA target sequence for Samhd1 (NM_018851.1,730-748).
cgggctcgcccagagaaaa

SEQ ID NO: 586348 - DNA, 19 bp, Mus musculus
  siRNA target sequence for Samhd1 (NM_018851.1,733-751).
gctcgcccagagaaaaagt

SEQ ID NO: 586349 - DNA, 19 bp, Mus musculus
  siRNA target sequence for Samhd1 (NM_018851.1,760-778).
gaacagggctccattgaga

SEQ ID NO: 586350 - DNA, 19 bp, Mus musculus
  siRNA target sequence for Samhd1 (NM_018851.1,765-783).
gggctccattgagatgttt

SEQ ID NO: 586351 - DNA, 19 bp, Mus musculus
  siRNA target sequence for Samhd1 (NM_018851.1,767-785).
gctccattgagatgtttga

SEQ ID NO: 586352 - DNA, 19 bp, Mus musculus
  siRNA target sequence for Samhd1 (NM_018851.1,786-804).
gcatctggtcaattctaat

SEQ ID NO: 586353 - DNA, 19 bp, Mus musculus
  siRNA target sequence for Samhd1 (NM_018851.1,795-813).
caattctaatgaactcaaa

SEQ ID NO: 586354 - DNA, 19 bp, Mus musculus
  siRNA target sequence for Samhd1 (NM_018851.1,808-826).
ctcaaacttgtcatgaaga

SEQ ID NO: 586355 - DNA, 19 bp, Mus musculus
  siRNA target sequence for Samhd1 (NM_018851.1,938-956).
cgaagagcttcctttacga

SEQ ID NO: 586356 - DNA, 19 bp, Mus musculus
  siRNA target sequence for Samhd1 (NM_018851.1,944-962).
gcttcctttacgagatagt

SEQ ID NO: 586357 - DNA, 19 bp, Mus musculus
  siRNA target sequence for Samhd1 (NM_018851.1,955-973).
gagatagtgtctaacaaga

SEQ ID NO: 586358 - DNA, 19 bp, Mus musculus
  siRNA target sequence for Samhd1 (NM_018851.1,979-997).
ggcatcgacgtagacaaat

SEQ ID NO: 586359 - DNA, 19 bp, Mus musculus
  siRNA target sequence for Samhd1 (NM_018851.1,987-1005).
cgtagacaaatgggattat

SEQ ID NO: 586360 - DNA, 19 bp, Mus musculus
  siRNA target sequence for Samhd1 (NM_018851.1,1048-1066).
gattacaagcgcttcatta

SEQ ID NO: 586361 - DNA, 19 bp, Mus musculus
  siRNA target sequence for Samhd1 (NM_018851.1,1053-1071).
caagcgcttcattaagttt

SEQ ID NO: 586362 - DNA, 19 bp, Mus musculus
  siRNA target sequence for Samhd1 (NM_018851.1,1123-1141).
cgtaaggtgaagcacattt

SEQ ID NO: 586363 - DNA, 19 bp, Mus musculus
  siRNA target sequence for Samhd1 (NM_018851.1,1135-1153).
cacatttgttcgagagaaa

SEQ ID NO: 586364 - DNA, 19 bp, Mus musculus
  siRNA target sequence for Samhd1 (NM_018851.1,1155-1173).
ggaggttggaaatctgtat

SEQ ID NO: 586365 - DNA, 19 bp, Mus musculus
  siRNA target sequence for Samhd1 (NM_018851.1,1208-1226).
gagcttaccaacacaagat

SEQ ID NO: 586366 - DNA, 19 bp, Mus musculus
  siRNA target sequence for Samhd1 (NM_018851.1,1229-1247).
gcaacctcatcgacataat

SEQ ID NO: 586367 - DNA, 19 bp, Mus musculus
  siRNA target sequence for Samhd1 (NM_018851.1,1233-1251).
cctcatcgacataatgatt

SEQ ID NO: 586368 - DNA, 19 bp, Mus musculus
  siRNA target sequence for Samhd1 (NM_018851.1,1234-1252).
ctcatcgacataatgatta

SEQ ID NO: 586369 - DNA, 19 bp, Mus musculus
  siRNA target sequence for Samhd1 (NM_018851.1,1236-1254).
catcgacataatgattaca

SEQ ID NO: 586370 - DNA, 19 bp, Mus musculus
  siRNA target sequence for Samhd1 (NM_018851.1,1239-1257).
cgacataatgattacagat

SEQ ID NO: 586371 - DNA, 19 bp, Mus musculus
  siRNA target sequence for Samhd1 (NM_018851.1,1275-1293).
cccctacgtggagattaca

SEQ ID NO: 586372 - DNA, 19 bp, Mus musculus
  siRNA target sequence for Samhd1 (NM_018851.1,1294-1312).
gggactgccgggaagaagt

SEQ ID NO: 586373 - DNA, 19 bp, Mus musculus
  siRNA target sequence for Samhd1 (NM_018851.1,1317-1335).
catttccacagccattgat

SEQ ID NO: 586374 - DNA, 19 bp, Mus musculus
  siRNA target sequence for Samhd1 (NM_018851.1,1352-1370).
ctaagttgacggataacat

SEQ ID NO: 586375 - DNA, 19 bp, Mus musculus
  siRNA target sequence for Samhd1 (NM_018851.1,1356-1374).
gttgacggataacattttt

SEQ ID NO: 586376 - DNA, 19 bp, Mus musculus
  siRNA target sequence for Samhd1 (NM_018851.1,1380-1398).
ggttttacactctactgat

SEQ ID NO: 586377 - DNA, 19 bp, Mus musculus
  siRNA target sequence for Samhd1 (NM_018851.1,1411-1429).
gaggcccaaagtattttaa

SEQ ID NO: 586378 - DNA, 19 bp, Mus musculus
  siRNA target sequence for Samhd1 (NM_018851.1,1434-1452).
cattgaatgccgcaatcta

SEQ ID NO: 586379 - DNA, 19 bp, Mus musculus
  siRNA target sequence for Samhd1 (NM_018851.1,1442-1460).
gccgcaatctatacaagta

SEQ ID NO: 586380 - DNA, 19 bp, Mus musculus
  siRNA target sequence for Samhd1 (NM_018851.1,1443-1461).
ccgcaatctatacaagtat

SEQ ID NO: 586381 - DNA, 19 bp, Mus musculus
  siRNA target sequence for Samhd1 (NM_018851.1,1444-1462).
cgcaatctatacaagtatt

SEQ ID NO: 586382 - DNA, 19 bp, Mus musculus
  siRNA target sequence for Samhd1 (NM_018851.1,1445-1463).
gcaatctatacaagtattt

SEQ ID NO: 586383 - DNA, 19 bp, Mus musculus
  siRNA target sequence for Samhd1 (NM_018851.1,1564-1582).
gaactgaaggccgaagatt

SEQ ID NO: 586384 - DNA, 19 bp, Mus musculus
  siRNA target sequence for Samhd1 (NM_018851.1,1567-1585).
ctgaaggccgaagatttca

SEQ ID NO: 586385 - DNA, 19 bp, Mus musculus
  siRNA target sequence for Samhd1 (NM_018851.1,1572-1590).
ggccgaagatttcatagtt

SEQ ID NO: 586386 - DNA, 19 bp, Mus musculus
  siRNA target sequence for Samhd1 (NM_018851.1,1574-1592).
ccgaagatttcatagttga

SEQ ID NO: 586387 - DNA, 19 bp, Mus musculus
  siRNA target sequence for Samhd1 (NM_018851.1,1575-1593).
cgaagatttcatagttgat

SEQ ID NO: 586388 - DNA, 19 bp, Mus musculus
  siRNA target sequence for Samhd1 (NM_018851.1,1631-1649).
caatcgatcgtgttcactt

SEQ ID NO: 586389 - DNA, 19 bp, Mus musculus
  siRNA target sequence for Samhd1 (NM_018851.1,1635-1653).
cgatcgtgttcacttctat

SEQ ID NO: 586390 - DNA, 19 bp, Mus musculus
  siRNA target sequence for Samhd1 (NM_018851.1,1636-1654).
gatcgtgttcacttctatt

SEQ ID NO: 586391 - DNA, 19 bp, Mus musculus
  siRNA target sequence for Samhd1 (NM_018851.1,1639-1657).
cgtgttcacttctattgta

SEQ ID NO: 586392 - DNA, 19 bp, Mus musculus
  siRNA target sequence for Samhd1 (NM_018851.1,1671-1689).
gcaagcggtcaggatcaat

SEQ ID NO: 586393 - DNA, 19 bp, Mus musculus
  siRNA target sequence for Samhd1 (NM_018851.1,1672-1690).
caagcggtcaggatcaata

SEQ ID NO: 586394 - DNA, 19 bp, Mus musculus
  siRNA target sequence for Samhd1 (NM_018851.1,1676-1694).
cggtcaggatcaataaaga

SEQ ID NO: 586395 - DNA, 19 bp, Mus musculus
  siRNA target sequence for Samhd1 (NM_018851.1,1735-1753).
ctcattcgggtgtactgta

SEQ ID NO: 586396 - DNA, 19 bp, Mus musculus
  siRNA target sequence for Cdc25a (NM_007658.1,260-278).
ctgggcccttggacagtaa

SEQ ID NO: 586397 - DNA, 19 bp, Mus musculus
  siRNA target sequence for Cdc25a (NM_007658.1,264-282).
gcccttggacagtaaagaa

SEQ ID NO: 586398 - DNA, 19 bp, Mus musculus
  siRNA target sequence for Cdc25a (NM_007658.1,357-375).
gagccactctgattctcta

SEQ ID NO: 586399 - DNA, 19 bp, Mus musculus
  siRNA target sequence for Cdc25a (NM_007658.1,394-412).
ctcatcgaccaggataaaa

SEQ ID NO: 586400 - DNA, 19 bp, Mus musculus
  siRNA target sequence for Cdc25a (NM_007658.1,528-546).
gctatcttcaaatgaaagt

SEQ ID NO: 586401 - DNA, 19 bp, Mus musculus
  siRNA target sequence for Cdc25a (NM_007658.1,692-710).
ggacagctccccttgtcat

SEQ ID NO: 586402 - DNA, 19 bp, Mus musculus
  siRNA target sequence for Cdc25a (NM_007658.1,823-841).
cctcctcggggtacaaaga

SEQ ID NO: 586403 - DNA, 19 bp, Mus musculus
  siRNA target sequence for Cdc25a (NM_007658.1,974-992).
gagaccttataggagattt

SEQ ID NO: 586404 - DNA, 19 bp, Mus musculus
  siRNA target sequence for Cdc25a (NM_007658.1,976-994).
gaccttataggagatttct

SEQ ID NO: 586405 - DNA, 19 bp, Mus musculus
  siRNA target sequence for Cdc25a (NM_007658.1,995-1013).
ccaagggttatctctttaa

SEQ ID NO: 586406 - DNA, 19 bp, Mus musculus
  siRNA target sequence for Cdc25a (NM_007658.1,996-1014).
caagggttatctctttaat

SEQ ID NO: 586407 - DNA, 19 bp, Mus musculus
  siRNA target sequence for Cdc25a (NM_007658.1,1215-1233).
ccctattgtgcctactgat

SEQ ID NO: 586408 - DNA, 19 bp, Mus musculus
  siRNA target sequence for Cdc25a (NM_007658.1,1251-1269).
cgtgttccactgtgagttt

SEQ ID NO: 586409 - DNA, 19 bp, Mus musculus
  siRNA target sequence for Cdc25a (NM_007658.1,1286-1304).
ctcgaatgtgccgatatgt

SEQ ID NO: 586410 - DNA, 19 bp, Mus musculus
  siRNA target sequence for Cdc25a (NM_007658.1,1288-1306).
cgaatgtgccgatatgtga

SEQ ID NO: 586411 - DNA, 19 bp, Mus musculus
  siRNA target sequence for Cdc25a (NM_007658.1,1315-1333).
gataggctcggcaatgagt

SEQ ID NO: 586412 - DNA, 19 bp, Mus musculus
  siRNA target sequence for Cdc25a (NM_007658.1,1430-1448).
ggccaatgcaccatgaaga

SEQ ID NO: 586413 - DNA, 19 bp, Mus musculus
  siRNA target sequence for Cdc25b (NM_023117.1,184-202).
cacctctcggtctttgagt

SEQ ID NO: 586414 - DNA, 19 bp, Mus musculus
  siRNA target sequence for Cdc25b (NM_023117.1,254-272).
cggttaccactcttacaca

SEQ ID NO: 586415 - DNA, 19 bp, Mus musculus
  siRNA target sequence for Cdc25b (NM_023117.1,297-315).
cggcagtgagcctccaaaa

SEQ ID NO: 586416 - DNA, 19 bp, Mus musculus
  siRNA target sequence for Cdc25b (NM_023117.1,465-483).
ggcagagcgcacgtttgaa

SEQ ID NO: 586417 - DNA, 19 bp, Mus musculus
  siRNA target sequence for Cdc25b (NM_023117.1,467-485).
cagagcgcacgtttgaaca

SEQ ID NO: 586418 - DNA, 19 bp, Mus musculus
  siRNA target sequence for Cdc25b (NM_023117.1,500-518).
ccagtcgggtcattcaaaa

SEQ ID NO: 586419 - DNA, 19 bp, Mus musculus
  siRNA target sequence for Cdc25b (NM_023117.1,501-519).
cagtcgggtcattcaaaat

SEQ ID NO: 586420 - DNA, 19 bp, Mus musculus
  siRNA target sequence for Cdc25b (NM_023117.1,503-521).
gtcgggtcattcaaaatga

SEQ ID NO: 586421 - DNA, 19 bp, Mus musculus
  siRNA target sequence for Cdc25b (NM_023117.1,612-630).
ggacagctggaggaaaact

SEQ ID NO: 586422 - DNA, 19 bp, Mus musculus
  siRNA target sequence for Cdc25b (NM_023117.1,676-694).
gagaatgatggatatatct

SEQ ID NO: 586423 - DNA, 19 bp, Mus musculus
  siRNA target sequence for Cdc25b (NM_023117.1,682-700).
gatggatatatcttcaaga

SEQ ID NO: 586424 - DNA, 19 bp, Mus musculus
  siRNA target sequence for Cdc25b (NM_023117.1,921-939).
ggagagtgatttaaaggat

SEQ ID NO: 586425 - DNA, 19 bp, Mus musculus
  siRNA target sequence for Cdc25b (NM_023117.1,1217-1235).
cgctgtgtcatgagattga

SEQ ID NO: 586426 - DNA, 19 bp, Mus musculus
  siRNA target sequence for Cdc25b (NM_023117.1,1259-1277).
gtggactgatcggagatta

SEQ ID NO: 586427 - DNA, 19 bp, Mus musculus
  siRNA target sequence for Cdc25b (NM_023117.1,1261-1279).
ggactgatcggagattact

SEQ ID NO: 586428 - DNA, 19 bp, Mus musculus
  siRNA target sequence for Cdc25b (NM_023117.1,1264-1282).
ctgatcggagattactcta

SEQ ID NO: 586429 - DNA, 19 bp, Mus musculus
  siRNA target sequence for Cdc25b (NM_023117.1,1329-1347).
gtacatctcaccagaaact

SEQ ID NO: 586430 - DNA, 19 bp, Mus musculus
  siRNA target sequence for Cdc25b (NM_023117.1,1357-1375).
ctgttaacaggcaagttca

SEQ ID NO: 586431 - DNA, 19 bp, Mus musculus
  siRNA target sequence for Cdc25b (NM_023117.1,1514-1532).
gtagcctggacaagagaat

SEQ ID NO: 586432 - DNA, 19 bp, Mus musculus
  siRNA target sequence for Cdc25b (NM_023117.1,1529-1547).
gaatcatcctcattttcca

SEQ ID NO: 586433 - DNA, 19 bp, Mus musculus
  siRNA target sequence for Cdc25b (NM_023117.1,1743-1761).
ggatgagctgaggaacttt

SEQ ID NO: 586434 - DNA, 19 bp, Mus musculus
  siRNA target sequence for Cdc25b (NM_023117.1,1755-1773).
gaactttcgccttaagact

SEQ ID NO: 586435 - DNA, 19 bp, Mus musculus
  siRNA target sequence for Cdc25b (NM_023117.1,1792-1810).
cggagcaggagggaacttt

SEQ ID NO: 586436 - DNA, 19 bp, Mus musculus
  siRNA target sequence for Cdc25b (NM_023117.1,1794-1812).
gagcaggagggaactttgt

SEQ ID NO: 586437 - DNA, 19 bp, Mus musculus
  siRNA target sequence for Cdc25c (NM_009860.1,527-545).
gtttcagcacccagtttta

SEQ ID NO: 586438 - DNA, 19 bp, Mus musculus
  siRNA target sequence for Cdc25c (NM_009860.1,547-565).
gtccaaacaaaggaagata

SEQ ID NO: 586439 - DNA, 19 bp, Mus musculus
  siRNA target sequence for Cdc25c (NM_009860.1,618-636).
ctgaatctccgaaagacaa

SEQ ID NO: 586440 - DNA, 19 bp, Mus musculus
  siRNA target sequence for Cdc25c (NM_009860.1,640-658).
ccacgactcggcaaaccta

SEQ ID NO: 586441 - DNA, 19 bp, Mus musculus
  siRNA target sequence for Cdc25c (NM_009860.1,641-659).
cacgactcggcaaacctaa

SEQ ID NO: 586442 - DNA, 19 bp, Mus musculus
  siRNA target sequence for Cdc25c (NM_009860.1,646-664).
ctcggcaaacctaagcatt

SEQ ID NO: 586443 - DNA, 19 bp, Mus musculus
  siRNA target sequence for Cdc25c (NM_009860.1,650-668).
gcaaacctaagcattctgt

SEQ ID NO: 586444 - DNA, 19 bp, Mus musculus
  siRNA target sequence for Cdc25c (NM_009860.1,687-705).
gttgccttgacctttcgaa

SEQ ID NO: 586445 - DNA, 19 bp, Mus musculus
  siRNA target sequence for Cdc25c (NM_009860.1,691-709).
ccttgacctttcgaatctt

SEQ ID NO: 586446 - DNA, 19 bp, Mus musculus
  siRNA target sequence for Cdc25c (NM_009860.1,692-710).
cttgacctttcgaatctta

SEQ ID NO: 586447 - DNA, 19 bp, Mus musculus
  siRNA target sequence for Cdc25c (NM_009860.1,761-779).
gacaatggttccttggatt

SEQ ID NO: 586448 - DNA, 19 bp, Mus musculus
  siRNA target sequence for Cdc25c (NM_009860.1,800-818).
cagttaactggcaaggatt

SEQ ID NO: 586449 - DNA, 19 bp, Mus musculus
  siRNA target sequence for Cdc25c (NM_009860.1,824-842).
caggaccttatgaaaggta

SEQ ID NO: 586450 - DNA, 19 bp, Mus musculus
  siRNA target sequence for Cdc25c (NM_009860.1,861-879).
gtagtactccgaatgctat

SEQ ID NO: 586451 - DNA, 19 bp, Mus musculus
  siRNA target sequence for Cdc25c (NM_009860.1,989-1007).
gcagataaacaccagttta

SEQ ID NO: 586452 - DNA, 19 bp, Mus musculus
  siRNA target sequence for Cdc25c (NM_009860.1,1027-1045).
cactaggaccccaaggttt

SEQ ID NO: 586453 - DNA, 19 bp, Mus musculus
  siRNA target sequence for Cdc25c (NM_009860.1,1033-1051).
gaccccaaggtttcgaaaa

SEQ ID NO: 586454 - DNA, 19 bp, Mus musculus
  siRNA target sequence for Cdc25c (NM_009860.1,1035-1053).
ccccaaggtttcgaaaaat

SEQ ID NO: 586455 - DNA, 19 bp, Mus musculus
  siRNA target sequence for Cdc25c (NM_009860.1,1113-1131).
ccattactacggttcctaa

SEQ ID NO: 586456 - DNA, 19 bp, Mus musculus
  siRNA target sequence for Cdc25c (NM_009860.1,1124-1142).
gttcctaagctgagtcaaa

SEQ ID NO: 586457 - DNA, 19 bp, Mus musculus
  siRNA target sequence for Cdc25c (NM_009860.1,1128-1146).
ctaagctgagtcaaaatgt

SEQ ID NO: 586458 - DNA, 19 bp, Mus musculus
  siRNA target sequence for Cdc25c (NM_009860.1,1135-1153).
gagtcaaaatgtaaagcta

SEQ ID NO: 586459 - DNA, 19 bp, Mus musculus
  siRNA target sequence for Cdc25c (NM_009860.1,1210-1228).
cgccaagggcttaagtcta

SEQ ID NO: 586460 - DNA, 19 bp, Mus musculus
  siRNA target sequence for Cdc25c (NM_009860.1,1211-1229).
gccaagggcttaagtctaa

SEQ ID NO: 586461 - DNA, 19 bp, Mus musculus
  siRNA target sequence for Cdc25c (NM_009860.1,1250-1268).
gacatgaacgccattcaga

SEQ ID NO: 586462 - DNA, 19 bp, Mus musculus
  siRNA target sequence for Cdc25c (NM_009860.1,1349-1367).
cacccggatctgaagtata

SEQ ID NO: 586463 - DNA, 19 bp, Mus musculus
  siRNA target sequence for Cdc25c (NM_009860.1,1352-1370).
ccggatctgaagtatatca

SEQ ID NO: 586464 - DNA, 19 bp, Mus musculus
  siRNA target sequence for Cdc25c (NM_009860.1,1413-1431).
gtgtgatcgagaggtttta

SEQ ID NO: 586465 - DNA, 19 bp, Mus musculus
  siRNA target sequence for Cdc25c (NM_009860.1,1415-1433).
gtgatcgagaggttttata

SEQ ID NO: 586466 - DNA, 19 bp, Mus musculus
  siRNA target sequence for Cdc25c (NM_009860.1,1420-1438).
cgagaggttttatatcatt

SEQ ID NO: 586467 - DNA, 19 bp, Mus musculus
  siRNA target sequence for Cdc25c (NM_009860.1,1443-1461).
gtcgctatccgtatgagta

SEQ ID NO: 586468 - DNA, 19 bp, Mus musculus
  siRNA target sequence for Cdc25c (NM_009860.1,1507-1525).
ggaactgcatgagttcttt

SEQ ID NO: 586469 - DNA, 19 bp, Mus musculus
  siRNA target sequence for Cdc25c (NM_009860.1,1511-1529).
ctgcatgagttctttctga

SEQ ID NO: 586470 - DNA, 19 bp, Mus musculus
  siRNA target sequence for Cdc25c (NM_009860.1,1651-1669).
ccagtatccggcattatat

SEQ ID NO: 586471 - DNA, 19 bp, Mus musculus
  siRNA target sequence for Hcph (NM_013545.1,278-296).
cagtcagggtggatgatca

SEQ ID NO: 586472 - DNA, 19 bp, Mus musculus
  siRNA target sequence for Hcph (NM_013545.1,289-307).
gatgatcaggtgactcata

SEQ ID NO: 586473 - DNA, 19 bp, Mus musculus
  siRNA target sequence for Hcph (NM_013545.1,342-360).
gtacggaggggagaagttt

SEQ ID NO: 586474 - DNA, 19 bp, Mus musculus
  siRNA target sequence for Hcph (NM_013545.1,425-443).
gcaccatcatccaccttaa

SEQ ID NO: 586475 - DNA, 19 bp, Mus musculus
  siRNA target sequence for Hcph (NM_013545.1,483-501).
gtaccacggccacatatct

SEQ ID NO: 586476 - DNA, 19 bp, Mus musculus
  siRNA target sequence for Hcph (NM_013545.1,534-552).
gggcgagccctggacattt

SEQ ID NO: 586477 - DNA, 19 bp, Mus musculus
  siRNA target sequence for Hcph (NM_013545.1,536-554).
gcgagccctggacatttct

SEQ ID NO: 586478 - DNA, 19 bp, Mus musculus
  siRNA target sequence for Hcph (NM_013545.1,570-588).
cagccaacctggtgatttt

SEQ ID NO: 586479 - DNA, 19 bp, Mus musculus
  siRNA target sequence for Hcph (NM_013545.1,572-590).
gccaacctggtgattttgt

SEQ ID NO: 586480 - DNA, 19 bp, Mus musculus
  siRNA target sequence for Hcph (NM_013545.1,634-652).
ccgctcagggtcactcata

SEQ ID NO: 586481 - DNA, 19 bp, Mus musculus
  siRNA target sequence for Hcph (NM_013545.1,635-653).
cgctcagggtcactcatat

SEQ ID NO: 586482 - DNA, 19 bp, Mus musculus
  siRNA target sequence for Hcph (NM_013545.1,643-661).
gtcactcatatcaaggtta

SEQ ID NO: 586483 - DNA, 19 bp, Mus musculus
  siRNA target sequence for Hcph (NM_013545.1,691-709).
ggctcagagacgtttgaca

SEQ ID NO: 586484 - DNA, 19 bp, Mus musculus
  siRNA target sequence for Hcph (NM_013545.1,757-775).
gcctcgggtgcctttgtct

SEQ ID NO: 586485 - DNA, 19 bp, Mus musculus
  siRNA target sequence for Hcph (NM_013545.1,758-776).
cctcgggtgcctttgtcta

SEQ ID NO: 586486 - DNA, 19 bp, Mus musculus
  siRNA target sequence for Hcph (NM_013545.1,804-822).
ggtaaacgcagctgacatt

SEQ ID NO: 586487 - DNA, 19 bp, Mus musculus
  siRNA target sequence for Hcph (NM_013545.1,972-990).
gaaccgctacaagaacatt

SEQ ID NO: 586488 - DNA, 19 bp, Mus musculus
  siRNA target sequence for Hcph (NM_013545.1,1021-1039).
cagggacgtgacagtaaca

SEQ ID NO: 586489 - DNA, 19 bp, Mus musculus
  siRNA target sequence for Hcph (NM_013545.1,1090-1108).
ggtccagatgagaactcta

SEQ ID NO: 586490 - DNA, 19 bp, Mus musculus
  siRNA target sequence for Hcph (NM_013545.1,1091-1109).
gtccagatgagaactctaa

SEQ ID NO: 586491 - DNA, 19 bp, Mus musculus
  siRNA target sequence for Hcph (NM_013545.1,1257-1275).
gggcactcagcgtgtctat

SEQ ID NO: 586492 - DNA, 19 bp, Mus musculus
  siRNA target sequence for Hcph (NM_013545.1,1341-1359).
gatctccccactagacaat

SEQ ID NO: 586493 - DNA, 19 bp, Mus musculus
  siRNA target sequence for Hcph (NM_013545.1,1363-1381).
gacctggttcgggagatat

SEQ ID NO: 586494 - DNA, 19 bp, Mus musculus
  siRNA target sequence for Hcph (NM_013545.1,1548-1566).
cattgatatgcttatggaa

SEQ ID NO: 586495 - DNA, 19 bp, Mus musculus
  siRNA target sequence for Hcph (NM_013545.1,1583-1601).
ggctagactgtgacattga

SEQ ID NO: 586496 - DNA, 19 bp, Mus musculus
  siRNA target sequence for Hcph (NM_013545.1,1661-1679).
cccagtacaagtttattta

SEQ ID NO: 586497 - DNA, 19 bp, Mus musculus
  siRNA target sequence for Hcph (NM_013545.1,1716-1734).
gaaactggagatcatacaa

SEQ ID NO: 586498 - DNA, 19 bp, Mus musculus
  siRNA target sequence for Mtm1 (NM_019926.1,83-101).
ctgcatcagcatctaagta

SEQ ID NO: 586499 - DNA, 19 bp, Mus musculus
  siRNA target sequence for Mtm1 (NM_019926.1,85-103).
gcatcagcatctaagtata

SEQ ID NO: 586500 - DNA, 19 bp, Mus musculus
  siRNA target sequence for Mtm1 (NM_019926.1,109-127).
cactccttggagaatgaat

SEQ ID NO: 586501 - DNA, 19 bp, Mus musculus
  siRNA target sequence for Mtm1 (NM_019926.1,124-142).
gaatccattaagaaagtgt

SEQ ID NO: 586502 - DNA, 19 bp, Mus musculus
  siRNA target sequence for Mtm1 (NM_019926.1,189-207).
cccaggggagttactaatt

SEQ ID NO: 586503 - DNA, 19 bp, Mus musculus
  siRNA target sequence for Mtm1 (NM_019926.1,190-208).
ccaggggagttactaatta

SEQ ID NO: 586504 - DNA, 19 bp, Mus musculus
  siRNA target sequence for Mtm1 (NM_019926.1,194-212).
gggagttactaattactga

SEQ ID NO: 586505 - DNA, 19 bp, Mus musculus
  siRNA target sequence for Mtm1 (NM_019926.1,195-213).
ggagttactaattactgaa

SEQ ID NO: 586506 - DNA, 19 bp, Mus musculus
  siRNA target sequence for Mtm1 (NM_019926.1,198-216).
gttactaattactgaaaaa

SEQ ID NO: 586507 - DNA, 19 bp, Mus musculus
  siRNA target sequence for Mtm1 (NM_019926.1,236-254).
ctttcaatggccccattaa

SEQ ID NO: 586508 - DNA, 19 bp, Mus musculus
  siRNA target sequence for Mtm1 (NM_019926.1,246-264).
ccccattaagggaagagtt

SEQ ID NO: 586509 - DNA, 19 bp, Mus musculus
  siRNA target sequence for Mtm1 (NM_019926.1,256-274).
ggaagagtttacatcacaa

SEQ ID NO: 586510 - DNA, 19 bp, Mus musculus
  siRNA target sequence for Mtm1 (NM_019926.1,260-278).
gagtttacatcacaaatta

SEQ ID NO: 586511 - DNA, 19 bp, Mus musculus
  siRNA target sequence for Mtm1 (NM_019926.1,280-298).
cgtctttatttaagaagtt

SEQ ID NO: 586512 - DNA, 19 bp, Mus musculus
  siRNA target sequence for Mtm1 (NM_019926.1,305-323).
cggattctgctctaatact

SEQ ID NO: 586513 - DNA, 19 bp, Mus musculus
  siRNA target sequence for Mtm1 (NM_019926.1,306-324).
ggattctgctctaatactt

SEQ ID NO: 586514 - DNA, 19 bp, Mus musculus
  siRNA target sequence for Mtm1 (NM_019926.1,331-349).
cctctgggtgtgatatcaa

SEQ ID NO: 586515 - DNA, 19 bp, Mus musculus
  siRNA target sequence for Mtm1 (NM_019926.1,334-352).
ctgggtgtgatatcaagaa

SEQ ID NO: 586516 - DNA, 19 bp, Mus musculus
  siRNA target sequence for Mtm1 (NM_019926.1,336-354).
gggtgtgatatcaagaatt

SEQ ID NO: 586517 - DNA, 19 bp, Mus musculus
  siRNA target sequence for Mtm1 (NM_019926.1,393-411).
ctatggtctagatattact

SEQ ID NO: 586518 - DNA, 19 bp, Mus musculus
  siRNA target sequence for Mtm1 (NM_019926.1,397-415).
ggtctagatattacttgta

SEQ ID NO: 586519 - DNA, 19 bp, Mus musculus
  siRNA target sequence for Mtm1 (NM_019926.1,461-479).
gcagaagagatatgtttga

SEQ ID NO: 586520 - DNA, 19 bp, Mus musculus
  siRNA target sequence for Mtm1 (NM_019926.1,464-482).
gaagagatatgtttgagat

SEQ ID NO: 586521 - DNA, 19 bp, Mus musculus
  siRNA target sequence for Mtm1 (NM_019926.1,513-531).
caatctgccattatttgca

SEQ ID NO: 586522 - DNA, 19 bp, Mus musculus
  siRNA target sequence for Mtm1 (NM_019926.1,558-576).
ggatgggtggactgtttat

SEQ ID NO: 586523 - DNA, 19 bp, Mus musculus
  siRNA target sequence for Mtm1 (NM_019926.1,559-577).
gatgggtggactgtttata

SEQ ID NO: 586524 - DNA, 19 bp, Mus musculus
  siRNA target sequence for Mtm1 (NM_019926.1,623-641).
ggaggataagttttattaa

SEQ ID NO: 586525 - DNA, 19 bp, Mus musculus
  siRNA target sequence for Mtm1 (NM_019926.1,695-713).
ggacctcagatgatgatct

SEQ ID NO: 586526 - DNA, 19 bp, Mus musculus
  siRNA target sequence for Mtm1 (NM_019926.1,807-825).
gcctcttgtcggtatgagt

SEQ ID NO: 586527 - DNA, 19 bp, Mus musculus
  siRNA target sequence for Mtm1 (NM_019926.1,814-832).
gtcggtatgagtggtaaaa

SEQ ID NO: 586528 - DNA, 19 bp, Mus musculus
  siRNA target sequence for Mtm1 (NM_019926.1,816-834).
cggtatgagtggtaaaaga

SEQ ID NO: 586529 - DNA, 19 bp, Mus musculus
  siRNA target sequence for Mtm1 (NM_019926.1,862-880).
gtgatcagggaaactaaca

SEQ ID NO: 586530 - DNA, 19 bp, Mus musculus
  siRNA target sequence for Mtm1 (NM_019926.1,907-925).
gatgcacgacccagtgtaa

SEQ ID NO: 586531 - DNA, 19 bp, Mus musculus
  siRNA target sequence for Mtm1 (NM_019926.1,967-985).
gatgacgcatatcaaaact

SEQ ID NO: 586532 - DNA, 19 bp, Mus musculus
  siRNA target sequence for Mtm1 (NM_019926.1,1021-1039).
gttatgcgagaatctttaa

SEQ ID NO: 586533 - DNA, 19 bp, Mus musculus
  siRNA target sequence for Mtm1 (NM_019926.1,1092-1110).
cagtttggagtctactcat

SEQ ID NO: 586534 - DNA, 19 bp, Mus musculus
  siRNA target sequence for Mtm1 (NM_019926.1,1106-1124).
ctcattggttagaacatat

SEQ ID NO: 586535 - DNA, 19 bp, Mus musculus
  siRNA target sequence for Mtm1 (NM_019926.1,1175-1193).
gaaagagctcggtacttgt

SEQ ID NO: 586536 - DNA, 19 bp, Mus musculus
  siRNA target sequence for Mtm1 (NM_019926.1,1259-1277).
gcttctacagaactattga

SEQ ID NO: 586537 - DNA, 19 bp, Mus musculus
  siRNA target sequence for Mtm1 (NM_019926.1,1271-1289).
ctattgaaggctttgagat

SEQ ID NO: 586538 - DNA, 19 bp, Mus musculus
  siRNA target sequence for Mtm1 (NM_019926.1,1297-1315).
cagaaagagtggataagtt

SEQ ID NO: 586539 - DNA, 19 bp, Mus musculus
  siRNA target sequence for Mtm1 (NM_019926.1,1308-1326).
gataagttttggccataaa

SEQ ID NO: 586540 - DNA, 19 bp, Mus musculus
  siRNA target sequence for Mtm1 (NM_019926.1,1485-1503).
gtatagctgtcgatttggt

SEQ ID NO: 586541 - DNA, 19 bp, Mus musculus
  siRNA target sequence for Mtm1 (NM_019926.1,1565-1583).
ctctatggtcgctaattaa

SEQ ID NO: 586542 - DNA, 19 bp, Mus musculus
  siRNA target sequence for Mtm1 (NM_019926.1,1567-1585).
ctatggtcgctaattaaca

SEQ ID NO: 586543 - DNA, 19 bp, Mus musculus
  siRNA target sequence for Mtm1 (NM_019926.1,1574-1592).
cgctaattaacagcaataa

SEQ ID NO: 586544 - DNA, 19 bp, Mus musculus
  siRNA target sequence for Mtm1 (NM_019926.1,1575-1593).
gctaattaacagcaataaa

SEQ ID NO: 586545 - DNA, 19 bp, Mus musculus
  siRNA target sequence for Mtm1 (NM_019926.1,1602-1620).
caaaaaccccttctataca

SEQ ID NO: 586546 - DNA, 19 bp, Mus musculus
  siRNA target sequence for Mtm1 (NM_019926.1,1614-1632).
ctatacaaaagaaatcaat

SEQ ID NO: 586547 - DNA, 19 bp, Mus musculus
  siRNA target sequence for Mtm1 (NM_019926.1,1624-1642).
gaaatcaatcgggttttgt

SEQ ID NO: 586548 - DNA, 19 bp, Mus musculus
  siRNA target sequence for Mtm1 (NM_019926.1,1672-1690).
ctgtgggtgaattattaca

SEQ ID NO: 586549 - DNA, 19 bp, Mus musculus
  siRNA target sequence for Mtm1 (NM_019926.1,1758-1776).
ggccttgcgtgacgattat

SEQ ID NO: 586550 - DNA, 19 bp, Mus musculus
  siRNA target sequence for Mtm1 (NM_019926.1,1759-1777).
gccttgcgtgacgattata

SEQ ID NO: 586551 - DNA, 19 bp, Mus musculus
  siRNA target sequence for Mtm1 (NM_019926.1,1760-1778).
ccttgcgtgacgattatat

SEQ ID NO: 586552 - DNA, 19 bp, Mus musculus
  siRNA target sequence for Mtm1 (NM_019926.1,1761-1779).
cttgcgtgacgattatata

SEQ ID NO: 586553 - DNA, 19 bp, Mus musculus
  siRNA target sequence for Mtm1 (NM_019926.1,1765-1783).
cgtgacgattatataaaga

SEQ ID NO: 586554 - DNA, 19 bp, Mus musculus
  siRNA target sequence for Ptpn1 (NM_011201.1,769-787).
ccaggacattcgacatgaa

SEQ ID NO: 586555 - DNA, 19 bp, Mus musculus
  siRNA target sequence for Ptpn1 (NM_011201.1,790-808).
cagcgacttcccatgcaaa

SEQ ID NO: 586556 - DNA, 19 bp, Mus musculus
  siRNA target sequence for Ptpn1 (NM_011201.1,813-831).
cgaagcttcctaagaacaa

SEQ ID NO: 586557 - DNA, 19 bp, Mus musculus
  siRNA target sequence for Ptpn1 (NM_011201.1,866-884).
gaccacagtcggattaaat

SEQ ID NO: 586558 - DNA, 19 bp, Mus musculus
  siRNA target sequence for Ptpn1 (NM_011201.1,939-957).
cccagaggagctatattct

SEQ ID NO: 586559 - DNA, 19 bp, Mus musculus
  siRNA target sequence for Ptpn1 (NM_011201.1,1054-1072).
gaaaggctcgttaaaatgt

SEQ ID NO: 586560 - DNA, 19 bp, Mus musculus
  siRNA target sequence for Ptpn1 (NM_011201.1,1125-1143).
gtttgaagttgacactaat

SEQ ID NO: 586561 - DNA, 19 bp, Mus musculus
  siRNA target sequence for Ptpn1 (NM_011201.1,1175-1193).
cgacagttggagttggaaa

SEQ ID NO: 586562 - DNA, 19 bp, Mus musculus
  siRNA target sequence for Ptpn1 (NM_011201.1,1212-1230).
ctcgagagatcctgcattt

SEQ ID NO: 586563 - DNA, 19 bp, Mus musculus
  siRNA target sequence for Ptpn1 (NM_011201.1,1271-1289).
ccggcttctttcctcaatt

SEQ ID NO: 586564 - DNA, 19 bp, Mus musculus
  siRNA target sequence for Ptpn1 (NM_011201.1,1272-1290).
cggcttctttcctcaattt

SEQ ID NO: 586565 - DNA, 19 bp, Mus musculus
  siRNA target sequence for Ptpn1 (NM_011201.1,1431-1449).
catcttccgtggacatcaa

SEQ ID NO: 586566 - DNA, 19 bp, Mus musculus
  siRNA target sequence for Ptpn1 (NM_011201.1,1437-1455).
ccgtggacatcaagaaagt

SEQ ID NO: 586567 - DNA, 19 bp, Mus musculus
  siRNA target sequence for Ptpn1 (NM_011201.1,1438-1456).
cgtggacatcaagaaagta

SEQ ID NO: 586568 - DNA, 19 bp, Mus musculus
  siRNA target sequence for Ptpn12 (NM_011203.2,101-119).
gaagagtccggatcacaat

SEQ ID NO: 586569 - DNA, 19 bp, Mus musculus
  siRNA target sequence for Ptpn12 (NM_011203.2,150-168).
cgattgagaagattgtcta

SEQ ID NO: 586570 - DNA, 19 bp, Mus musculus
  siRNA target sequence for Ptpn12 (NM_011203.2,157-175).
gaagattgtctaccaaata

SEQ ID NO: 586571 - DNA, 19 bp, Mus musculus
  siRNA target sequence for Ptpn12 (NM_011203.2,245-263).
ggacatactgccatttgat

SEQ ID NO: 586572 - DNA, 19 bp, Mus musculus
  siRNA target sequence for Ptpn12 (NM_011203.2,261-279).
gatcacagccgagttaagt

SEQ ID NO: 586573 - DNA, 19 bp, Mus musculus
  siRNA target sequence for Ptpn12 (NM_011203.2,264-282).
cacagccgagttaagttga

SEQ ID NO: 586574 - DNA, 19 bp, Mus musculus
  siRNA target sequence for Ptpn12 (NM_011203.2,268-286).
gccgagttaagttgacttt

SEQ ID NO: 586575 - DNA, 19 bp, Mus musculus
  siRNA target sequence for Ptpn12 (NM_011203.2,271-289).
gagttaagttgactttgaa

SEQ ID NO: 586576 - DNA, 19 bp, Mus musculus
  siRNA target sequence for Ptpn12 (NM_011203.2,298-316).
cccaagattcagattatat

SEQ ID NO: 586577 - DNA, 19 bp, Mus musculus
  siRNA target sequence for Ptpn12 (NM_011203.2,341-359).
gtatgggccaaaagcatat

SEQ ID NO: 586578 - DNA, 19 bp, Mus musculus
  siRNA target sequence for Ptpn12 (NM_011203.2,373-391).
ggcctttggcgaatacagt

SEQ ID NO: 586579 - DNA, 19 bp, Mus musculus
  siRNA target sequence for Ptpn12 (NM_011203.2,382-400).
cgaatacagtcatagactt

SEQ ID NO: 586580 - DNA, 19 bp, Mus musculus
  siRNA target sequence for Ptpn12 (NM_011203.2,406-424).
ggatgatatgggagtataa

SEQ ID NO: 586581 - DNA, 19 bp, Mus musculus
  siRNA target sequence for Ptpn12 (NM_011203.2,407-425).
gatgatatgggagtataat

SEQ ID NO: 586582 - DNA, 19 bp, Mus musculus
  siRNA target sequence for Ptpn12 (NM_011203.2,410-428).
gatatgggagtataatgtt

SEQ ID NO: 586583 - DNA, 19 bp, Mus musculus
  siRNA target sequence for Ptpn12 (NM_011203.2,440-458).
gatggcctgtcgagaattt

SEQ ID NO: 586584 - DNA, 19 bp, Mus musculus
  siRNA target sequence for Ptpn12 (NM_011203.2,445-463).
cctgtcgagaatttgagat

SEQ ID NO: 586585 - DNA, 19 bp, Mus musculus
  siRNA target sequence for Ptpn12 (NM_011203.2,482-500).
gcgctactggcctttgtat

SEQ ID NO: 586586 - DNA, 19 bp, Mus musculus
  siRNA target sequence for Ptpn12 (NM_011203.2,501-519).
ggagaagatcctataacat

SEQ ID NO: 586587 - DNA, 19 bp, Mus musculus
  siRNA target sequence for Ptpn12 (NM_011203.2,502-520).
gagaagatcctataacatt

SEQ ID NO: 586588 - DNA, 19 bp, Mus musculus
  siRNA target sequence for Ptpn12 (NM_011203.2,555-573).
gcaagaaccgactacttca

SEQ ID NO: 586589 - DNA, 19 bp, Mus musculus
  siRNA target sequence for Ptpn12 (NM_011203.2,556-574).
caagaaccgactacttcat

SEQ ID NO: 586590 - DNA, 19 bp, Mus musculus
  siRNA target sequence for Ptpn12 (NM_011203.2,569-587).
cttcatccgaacactttta

SEQ ID NO: 586591 - DNA, 19 bp, Mus musculus
  siRNA target sequence for Ptpn12 (NM_011203.2,575-593).
ccgaacacttttacttgaa

SEQ ID NO: 586592 - DNA, 19 bp, Mus musculus
  siRNA target sequence for Ptpn12 (NM_011203.2,580-598).
cacttttacttgaatttca

SEQ ID NO: 586593 - DNA, 19 bp, Mus musculus
  siRNA target sequence for Ptpn12 (NM_011203.2,607-625).
cccgtcggctctatcagtt

SEQ ID NO: 586594 - DNA, 19 bp, Mus musculus
  siRNA target sequence for Ptpn12 (NM_011203.2,608-626).
ccgtcggctctatcagttt

SEQ ID NO: 586595 - DNA, 19 bp, Mus musculus
  siRNA target sequence for Ptpn12 (NM_011203.2,613-631).
ggctctatcagtttcatta

SEQ ID NO: 586596 - DNA, 19 bp, Mus musculus
  siRNA target sequence for Ptpn12 (NM_011203.2,654-672).
gttccttcgtcatttgatt

SEQ ID NO: 586597 - DNA, 19 bp, Mus musculus
  siRNA target sequence for Ptpn12 (NM_011203.2,657-675).
ccttcgtcatttgattcta

SEQ ID NO: 586598 - DNA, 19 bp, Mus musculus
  siRNA target sequence for Ptpn12 (NM_011203.2,658-676).
cttcgtcatttgattctat

SEQ ID NO: 586599 - DNA, 19 bp, Mus musculus
  siRNA target sequence for Ptpn12 (NM_011203.2,661-679).
cgtcatttgattctattct

SEQ ID NO: 586600 - DNA, 19 bp, Mus musculus
  siRNA target sequence for Ptpn12 (NM_011203.2,681-699).
gacatgataagcttaatga

SEQ ID NO: 586601 - DNA, 19 bp, Mus musculus
  siRNA target sequence for Ptpn12 (NM_011203.2,714-732).
catgaagatgtgcctattt

SEQ ID NO: 586602 - DNA, 19 bp, Mus musculus
  siRNA target sequence for Ptpn12 (NM_011203.2,756-774).
ggacgaacaggtgctattt

SEQ ID NO: 586603 - DNA, 19 bp, Mus musculus
  siRNA target sequence for Ptpn12 (NM_011203.2,788-806).
cacgtggaacttactgaaa

SEQ ID NO: 586604 - DNA, 19 bp, Mus musculus
  siRNA target sequence for Ptpn12 (NM_011203.2,866-884).
gaggcactcggcagtacaa

SEQ ID NO: 586605 - DNA, 19 bp, Mus musculus
  siRNA target sequence for Ptpn12 (NM_011203.2,869-887).
gcactcggcagtacaaaca

SEQ ID NO: 586606 - DNA, 19 bp, Mus musculus
  siRNA target sequence for Ptpn12 (NM_011203.2,870-888).
cactcggcagtacaaacaa

SEQ ID NO: 586607 - DNA, 19 bp, Mus musculus
  siRNA target sequence for Ptpn12 (NM_011203.2,890-908).
ggagcagtatgaacttgtt

SEQ ID NO: 586608 - DNA, 19 bp, Mus musculus
  siRNA target sequence for Ptpn12 (NM_011203.2,893-911).
gcagtatgaacttgttcat

SEQ ID NO: 586609 - DNA, 19 bp, Mus musculus
  siRNA target sequence for Ptpn12 (NM_011203.2,894-912).
cagtatgaacttgttcata

SEQ ID NO: 586610 - DNA, 19 bp, Mus musculus
  siRNA target sequence for Ptpn12 (NM_011203.2,913-931).
gggctattgctcaactgtt

SEQ ID NO: 586611 - DNA, 19 bp, Mus musculus
  siRNA target sequence for Ptpn12 (NM_011203.2,914-932).
ggctattgctcaactgttt

SEQ ID NO: 586612 - DNA, 19 bp, Mus musculus
  siRNA target sequence for Ptpn12 (NM_011203.2,971-989).
gaagatcgctgatggtaat

SEQ ID NO: 586613 - DNA, 19 bp, Mus musculus
  siRNA target sequence for Ptpn12 (NM_011203.2,977-995).
cgctgatggtaatgaaatt

SEQ ID NO: 586614 - DNA, 19 bp, Mus musculus
  siRNA target sequence for Ptpn12 (NM_011203.2,978-996).
gctgatggtaatgaaatta

SEQ ID NO: 586615 - DNA, 19 bp, Mus musculus
  siRNA target sequence for Ptpn12 (NM_011203.2,1251-1269).
ccagccgacctcaacagaa

SEQ ID NO: 586616 - DNA, 19 bp, Mus musculus
  siRNA target sequence for Ptpn12 (NM_011203.2,1256-1274).
cgacctcaacagaagctat

SEQ ID NO: 586617 - DNA, 19 bp, Mus musculus
  siRNA target sequence for Ptpn12 (NM_011203.2,1259-1277).
cctcaacagaagctatgat

SEQ ID NO: 586618 - DNA, 19 bp, Mus musculus
  siRNA target sequence for Ptpn12 (NM_011203.2,1260-1278).
ctcaacagaagctatgata

SEQ ID NO: 586619 - DNA, 19 bp, Mus musculus
  siRNA target sequence for Ptpn12 (NM_011203.2,1286-1304).
ggacccaatggggaaaagt

SEQ ID NO: 586620 - DNA, 19 bp, Mus musculus
  siRNA target sequence for Ptpn12 (NM_011203.2,1298-1316).
gaaaagtgaatcagctatt

SEQ ID NO: 586621 - DNA, 19 bp, Mus musculus
  siRNA target sequence for Ptpn12 (NM_011203.2,1309-1327).
cagctattgagcacataga

SEQ ID NO: 586622 - DNA, 19 bp, Mus musculus
  siRNA target sequence for Ptpn12 (NM_011203.2,1311-1329).
gctattgagcacatagata

SEQ ID NO: 586623 - DNA, 19 bp, Mus musculus
  siRNA target sequence for Ptpn12 (NM_011203.2,1319-1337).
gcacatagataagaagtta

SEQ ID NO: 586624 - DNA, 19 bp, Mus musculus
  siRNA target sequence for Ptpn12 (NM_011203.2,1331-1349).
gaagttagagcgcaattta

SEQ ID NO: 586625 - DNA, 19 bp, Mus musculus
  siRNA target sequence for Ptpn12 (NM_011203.2,1334-1352).
gttagagcgcaatttaagt

SEQ ID NO: 586626 - DNA, 19 bp, Mus musculus
  siRNA target sequence for Ptpn12 (NM_011203.2,1341-1359).
cgcaatttaagttttgaga

SEQ ID NO: 586627 - DNA, 19 bp, Mus musculus
  siRNA target sequence for Ptpn12 (NM_011203.2,1376-1394).
ccaagaagggcccaaaagt

SEQ ID NO: 586628 - DNA, 19 bp, Mus musculus
  siRNA target sequence for Ptpn12 (NM_011203.2,1401-1419).
gggaacacactcttgaata

SEQ ID NO: 586629 - DNA, 19 bp, Mus musculus
  siRNA target sequence for Ptpn12 (NM_011203.2,1421-1439).
gggacatgcgattaaaatt

SEQ ID NO: 586630 - DNA, 19 bp, Mus musculus
  siRNA target sequence for Ptpn12 (NM_011203.2,1422-1440).
ggacatgcgattaaaatta

SEQ ID NO: 586631 - DNA, 19 bp, Mus musculus
  siRNA target sequence for Ptpn12 (NM_011203.2,1423-1441).
gacatgcgattaaaattaa

SEQ ID NO: 586632 - DNA, 19 bp, Mus musculus
  siRNA target sequence for Ptpn12 (NM_011203.2,1492-1510).
gtgcaggtgccctaaaggt

SEQ ID NO: 586633 - DNA, 19 bp, Mus musculus
  siRNA target sequence for Ptpn12 (NM_011203.2,1498-1516).
gtgccctaaaggttgatga

SEQ ID NO: 586634 - DNA, 19 bp, Mus musculus
  siRNA target sequence for Ptpn12 (NM_011203.2,1502-1520).
cctaaaggttgatgatgta

SEQ ID NO: 586635 - DNA, 19 bp, Mus musculus
  siRNA target sequence for Ptpn12 (NM_011203.2,1541-1559).
ctgtagtgcggctcattca

SEQ ID NO: 586636 - DNA, 19 bp, Mus musculus
  siRNA target sequence for Ptpn12 (NM_011203.2,1624-1642).
gcttgcctctcgataagaa

SEQ ID NO: 586637 - DNA, 19 bp, Mus musculus
  siRNA target sequence for Ptpn12 (NM_011203.2,1625-1643).
cttgcctctcgataagaaa

SEQ ID NO: 586638 - DNA, 19 bp, Mus musculus
  siRNA target sequence for Ptpn12 (NM_011203.2,1649-1667).
cgtaacgtggtcacttcat

SEQ ID NO: 586639 - DNA, 19 bp, Mus musculus
  siRNA target sequence for Ptpn12 (NM_011203.2,1706-1724).
cggcaaatccccagataat

SEQ ID NO: 586640 - DNA, 19 bp, Mus musculus
  siRNA target sequence for Ptpn12 (NM_011203.2,1708-1726).
gcaaatccccagataatca

SEQ ID NO: 586641 - DNA, 19 bp, Mus musculus
  siRNA target sequence for Ptpn12 (NM_011203.2,1827-1845).
gctcccctcagctttacca

SEQ ID NO: 586642 - DNA, 19 bp, Mus musculus
  siRNA target sequence for Ptpn12 (NM_011203.2,1828-1846).
ctcccctcagctttaccaa

SEQ ID NO: 586643 - DNA, 19 bp, Mus musculus
  siRNA target sequence for Ptpn12 (NM_011203.2,1907-1925).
gaacaaaactagcatttca

SEQ ID NO: 586644 - DNA, 19 bp, Mus musculus
  siRNA target sequence for Ptpn12 (NM_011203.2,1910-1928).
caaaactagcatttcaaca

SEQ ID NO: 586645 - DNA, 19 bp, Mus musculus
  siRNA target sequence for Ptpn12 (NM_011203.2,2066-2084).
gtcgcctcctcctttacct

SEQ ID NO: 586646 - DNA, 19 bp, Mus musculus
  siRNA target sequence for Ptpn12 (NM_011203.2,2128-2146).
gacctgagtggcatgaact

SEQ ID NO: 586647 - DNA, 19 bp, Mus musculus
  siRNA target sequence for Ptpn12 (NM_011203.2,2135-2153).
gtggcatgaacttccaaat

SEQ ID NO: 586648 - DNA, 19 bp, Mus musculus
  siRNA target sequence for Ptpn12 (NM_011203.2,2175-2193).
gaatctgaaggcttgacaa

SEQ ID NO: 586649 - DNA, 19 bp, Mus musculus
  siRNA target sequence for Ptpn12 (NM_011203.2,2306-2324).
cacagatattggttttggt

SEQ ID NO: 586650 - DNA, 19 bp, Mus musculus
  siRNA target sequence for Ptpn13 (NM_011204.1,1187-1205).
gagccagttcgaagataca

SEQ ID NO: 586651 - DNA, 19 bp, Mus musculus
  siRNA target sequence for Ptpn13 (NM_011204.1,1189-1207).
gccagttcgaagatacaaa

SEQ ID NO: 586652 - DNA, 19 bp, Mus musculus
  siRNA target sequence for Ptpn13 (NM_011204.1,1193-1211).
gttcgaagatacaaaactt

SEQ ID NO: 586653 - DNA, 19 bp, Mus musculus
  siRNA target sequence for Ptpn13 (NM_011204.1,1213-1231).
ccacagcgatatctttagt

SEQ ID NO: 586654 - DNA, 19 bp, Mus musculus
  siRNA target sequence for Ptpn13 (NM_011204.1,1214-1232).
cacagcgatatctttagta

SEQ ID NO: 586655 - DNA, 19 bp, Mus musculus
  siRNA target sequence for Ptpn13 (NM_011204.1,1216-1234).
cagcgatatctttagtatt

SEQ ID NO: 586656 - DNA, 19 bp, Mus musculus
  siRNA target sequence for Ptpn13 (NM_011204.1,1326-1344).
gtcttcccggagtagatga

SEQ ID NO: 586657 - DNA, 19 bp, Mus musculus
  siRNA target sequence for Ptpn13 (NM_011204.1,1351-1369).
ccagacacgaccaagtaga

SEQ ID NO: 586658 - DNA, 19 bp, Mus musculus
  siRNA target sequence for Ptpn13 (NM_011204.1,1354-1372).
gacacgaccaagtagacaa

SEQ ID NO: 586659 - DNA, 19 bp, Mus musculus
  siRNA target sequence for Ptpn13 (NM_011204.1,1356-1374).
cacgaccaagtagacaata

SEQ ID NO: 586660 - DNA, 19 bp, Mus musculus
  siRNA target sequence for Ptpn13 (NM_011204.1,1361-1379).
ccaagtagacaatatgaaa

SEQ ID NO: 586661 - DNA, 19 bp, Mus musculus
  siRNA target sequence for Ptpn13 (NM_011204.1,1383-1401).
ccctcgaaggcaacttgat

SEQ ID NO: 586662 - DNA, 19 bp, Mus musculus
  siRNA target sequence for Ptpn13 (NM_011204.1,1385-1403).
ctcgaaggcaacttgatca

SEQ ID NO: 586663 - DNA, 19 bp, Mus musculus
  siRNA target sequence for Ptpn13 (NM_011204.1,1387-1405).
cgaaggcaacttgatcaat

SEQ ID NO: 586664 - DNA, 19 bp, Mus musculus
  siRNA target sequence for Ptpn13 (NM_011204.1,1402-1420).
caatcaggacataatgcta

SEQ ID NO: 586665 - DNA, 19 bp, Mus musculus
  siRNA target sequence for Ptpn13 (NM_011204.1,1424-1442).
cgtcaagaggaagaaatga

SEQ ID NO: 586666 - DNA, 19 bp, Mus musculus
  siRNA target sequence for Ptpn13 (NM_011204.1,1496-1514).
ggggacaccgtcaaagctt

SEQ ID NO: 586667 - DNA, 19 bp, Mus musculus
  siRNA target sequence for Ptpn13 (NM_011204.1,1618-1636).
gacggttgagccatttgta

SEQ ID NO: 586668 - DNA, 19 bp, Mus musculus
  siRNA target sequence for Ptpn13 (NM_011204.1,1622-1640).
gttgagccatttgtatctt

SEQ ID NO: 586669 - DNA, 19 bp, Mus musculus
  siRNA target sequence for Ptpn13 (NM_011204.1,1831-1849).
cgccacccgcaaagagaat

SEQ ID NO: 586670 - DNA, 19 bp, Mus musculus
  siRNA target sequence for Ptpn13 (NM_011204.1,1833-1851).
ccacccgcaaagagaatga

SEQ ID NO: 586671 - DNA, 19 bp, Mus musculus
  siRNA target sequence for Ptpn13 (NM_011204.1,1834-1852).
cacccgcaaagagaatgaa

SEQ ID NO: 586672 - DNA, 19 bp, Mus musculus
  siRNA target sequence for Ptpn13 (NM_011204.1,1836-1854).
cccgcaaagagaatgaata

SEQ ID NO: 586673 - DNA, 19 bp, Mus musculus
  siRNA target sequence for Ptpn13 (NM_011204.1,1951-1969).
gttgtttttccgaattaaa

SEQ ID NO: 586674 - DNA, 19 bp, Mus musculus
  siRNA target sequence for Ptpn13 (NM_011204.1,1978-1996).
ggatgatgttagtctgata

SEQ ID NO: 586675 - DNA, 19 bp, Mus musculus
  siRNA target sequence for Ptpn13 (NM_011204.1,2006-2024).
ctcacgtgccatcagtatt

SEQ ID NO: 586676 - DNA, 19 bp, Mus musculus
  siRNA target sequence for Ptpn13 (NM_011204.1,2010-2028).
cgtgccatcagtattacct

SEQ ID NO: 586677 - DNA, 19 bp, Mus musculus
  siRNA target sequence for Ptpn13 (NM_011204.1,2197-2215).
gctggacgtgtcctacatt

SEQ ID NO: 586678 - DNA, 19 bp, Mus musculus
  siRNA target sequence for Ptpn13 (NM_011204.1,2198-2216).
ctggacgtgtcctacatta

SEQ ID NO: 586679 - DNA, 19 bp, Mus musculus
  siRNA target sequence for Ptpn13 (NM_011204.1,2200-2218).
ggacgtgtcctacattaaa

SEQ ID NO: 586680 - DNA, 19 bp, Mus musculus
  siRNA target sequence for Ptpn13 (NM_011204.1,2208-2226).
cctacattaaagaagagtt

SEQ ID NO: 586681 - DNA, 19 bp, Mus musculus
  siRNA target sequence for Ptpn13 (NM_011204.1,2333-2351).
gtacaccctgagaagaagt

SEQ ID NO: 586682 - DNA, 19 bp, Mus musculus
  siRNA target sequence for Ptpn13 (NM_011204.1,2368-2386).
gctgggggtctgttccaaa

SEQ ID NO: 586683 - DNA, 19 bp, Mus musculus
  siRNA target sequence for Ptpn13 (NM_011204.1,2440-2458).
cccgtggagggaaacaaaa

SEQ ID NO: 586684 - DNA, 19 bp, Mus musculus
  siRNA target sequence for Ptpn13 (NM_011204.1,2574-2592).
cccagcacaagttccaatt

SEQ ID NO: 586685 - DNA, 19 bp, Mus musculus
  siRNA target sequence for Ptpn13 (NM_011204.1,2621-2639).
gatgcccaagacatagaga

SEQ ID NO: 586686 - DNA, 19 bp, Mus musculus
  siRNA target sequence for Ptpn13 (NM_011204.1,2636-2654).
gagagagcttcgtttagga

SEQ ID NO: 586687 - DNA, 19 bp, Mus musculus
  siRNA target sequence for Ptpn13 (NM_011204.1,2674-2692).
gtctgttagaggatttaat

SEQ ID NO: 586688 - DNA, 19 bp, Mus musculus
  siRNA target sequence for Ptpn13 (NM_011204.1,2676-2694).
ctgttagaggatttaatat

SEQ ID NO: 586689 - DNA, 19 bp, Mus musculus
  siRNA target sequence for Ptpn13 (NM_011204.1,2728-2746).
cagcaccatcaacaaactt

SEQ ID NO: 586690 - DNA, 19 bp, Mus musculus
  siRNA target sequence for Ptpn13 (NM_011204.1,2752-2770).
ccgacccctgtcagttcaa

SEQ ID NO: 586691 - DNA, 19 bp, Mus musculus
  siRNA target sequence for Ptpn13 (NM_011204.1,2819-2837).
cccctgcagaacagttcaa

SEQ ID NO: 586692 - DNA, 19 bp, Mus musculus
  siRNA target sequence for Ptpn13 (NM_011204.1,2820-2838).
ccctgcagaacagttcaaa

SEQ ID NO: 586693 - DNA, 19 bp, Mus musculus
  siRNA target sequence for Ptpn13 (NM_011204.1,2821-2839).
cctgcagaacagttcaaaa

SEQ ID NO: 586694 - DNA, 19 bp, Mus musculus
  siRNA target sequence for Ptpn13 (NM_011204.1,2873-2891).
cctagagggatgagcaaat

SEQ ID NO: 586695 - DNA, 19 bp, Mus musculus
  siRNA target sequence for Ptpn13 (NM_011204.1,2877-2895).
gagggatgagcaaatcgta

SEQ ID NO: 586696 - DNA, 19 bp, Mus musculus
  siRNA target sequence for Ptpn13 (NM_011204.1,2927-2945).
caccggaaacaggtcatta

SEQ ID NO: 586697 - DNA, 19 bp, Mus musculus
  siRNA target sequence for Ptpn13 (NM_011204.1,2930-2948).
cggaaacaggtcattaaca

SEQ ID NO: 586698 - DNA, 19 bp, Mus musculus
  siRNA target sequence for Ptpn13 (NM_011204.1,2995-3013).
gtacccgatggcaagatct

SEQ ID NO: 586699 - DNA, 19 bp, Mus musculus
  siRNA target sequence for Ptpn13 (NM_011204.1,3033-3051).
gactcccaaagcttgataa

SEQ ID NO: 586700 - DNA, 19 bp, Mus musculus
  siRNA target sequence for Ptpn13 (NM_011204.1,3124-3142).
ccctggccaagcatatgtt

SEQ ID NO: 586701 - DNA, 19 bp, Mus musculus
  siRNA target sequence for Ptpn13 (NM_011204.1,3126-3144).
ctggccaagcatatgttgt

SEQ ID NO: 586702 - DNA, 19 bp, Mus musculus
  siRNA target sequence for Ptpn13 (NM_011204.1,3157-3175).
gcctagctctggaaaatct

SEQ ID NO: 586703 - DNA, 19 bp, Mus musculus
  siRNA target sequence for Ptpn13 (NM_011204.1,3158-3176).
cctagctctggaaaatctt

SEQ ID NO: 586704 - DNA, 19 bp, Mus musculus
  siRNA target sequence for Ptpn13 (NM_011204.1,3182-3200).
caagtcccctttaaagaca

SEQ ID NO: 586705 - DNA, 19 bp, Mus musculus
  siRNA target sequence for Ptpn13 (NM_011204.1,3278-3296).
ccaaaacacggcttaggat

SEQ ID NO: 586706 - DNA, 19 bp, Mus musculus
  siRNA target sequence for Ptpn13 (NM_011204.1,3279-3297).
caaaacacggcttaggatt

SEQ ID NO: 586707 - DNA, 19 bp, Mus musculus
  siRNA target sequence for Ptpn13 (NM_011204.1,3284-3302).
cacggcttaggatttcaaa

SEQ ID NO: 586708 - DNA, 19 bp, Mus musculus
  siRNA target sequence for Ptpn13 (NM_011204.1,3397-3415).
gcctggagaccgtttgata

SEQ ID NO: 586709 - DNA, 19 bp, Mus musculus
  siRNA target sequence for Ptpn13 (NM_011204.1,3402-3420).
gagaccgtttgatatctgt

SEQ ID NO: 586710 - DNA, 19 bp, Mus musculus
  siRNA target sequence for Ptpn13 (NM_011204.1,3526-3544).
gtccaaagtgccttctact

SEQ ID NO: 586711 - DNA, 19 bp, Mus musculus
  siRNA target sequence for Ptpn13 (NM_011204.1,3563-3581).
gggatgaaaagctacacaa

SEQ ID NO: 586712 - DNA, 19 bp, Mus musculus
  siRNA target sequence for Ptpn13 (NM_011204.1,3564-3582).
ggatgaaaagctacacaaa

SEQ ID NO: 586713 - DNA, 19 bp, Mus musculus
  siRNA target sequence for Ptpn13 (NM_011204.1,3893-3911).
cgaggcatctccgatttga

SEQ ID NO: 586714 - DNA, 19 bp, Mus musculus
  siRNA target sequence for Ptpn13 (NM_011204.1,3894-3912).
gaggcatctccgatttgat

SEQ ID NO: 586715 - DNA, 19 bp, Mus musculus
  siRNA target sequence for Ptpn13 (NM_011204.1,3897-3915).
gcatctccgatttgattga

SEQ ID NO: 586716 - DNA, 19 bp, Mus musculus
  siRNA target sequence for Ptpn13 (NM_011204.1,3898-3916).
catctccgatttgattgaa

SEQ ID NO: 586717 - DNA, 19 bp, Mus musculus
  siRNA target sequence for Ptpn13 (NM_011204.1,4141-4159).
cgtccgacatggtggtatt

SEQ ID NO: 586718 - DNA, 19 bp, Mus musculus
  siRNA target sequence for Ptpn13 (NM_011204.1,4142-4160).
gtccgacatggtggtattt

SEQ ID NO: 586719 - DNA, 19 bp, Mus musculus
  siRNA target sequence for Ptpn13 (NM_011204.1,4144-4162).
ccgacatggtggtatttat

SEQ ID NO: 586720 - DNA, 19 bp, Mus musculus
  siRNA target sequence for Ptpn13 (NM_011204.1,4270-4288).
gcaagctgtggaaacgtta

SEQ ID NO: 586721 - DNA, 19 bp, Mus musculus
  siRNA target sequence for Ptpn13 (NM_011204.1,4271-4289).
caagctgtggaaacgttaa

SEQ ID NO: 586722 - DNA, 19 bp, Mus musculus
  siRNA target sequence for Ptpn13 (NM_011204.1,4275-4293).
ctgtggaaacgttaagaaa

SEQ ID NO: 586723 - DNA, 19 bp, Mus musculus
  siRNA target sequence for Ptpn13 (NM_011204.1,4277-4295).
gtggaaacgttaagaaaca

SEQ ID NO: 586724 - DNA, 19 bp, Mus musculus
  siRNA target sequence for Ptpn13 (NM_011204.1,4279-4297).
ggaaacgttaagaaacaca

SEQ ID NO: 586725 - DNA, 19 bp, Mus musculus
  siRNA target sequence for Ptpn13 (NM_011204.1,4299-4317).
ggcaggtggtccatctgtt

SEQ ID NO: 586726 - DNA, 19 bp, Mus musculus
  siRNA target sequence for Ptpn13 (NM_011204.1,4303-4321).
ggtggtccatctgttgtta

SEQ ID NO: 586727 - DNA, 19 bp, Mus musculus
  siRNA target sequence for Ptpn13 (NM_011204.1,4306-4324).
ggtccatctgttgttagaa

SEQ ID NO: 586728 - DNA, 19 bp, Mus musculus
  siRNA target sequence for Ptpn13 (NM_011204.1,4430-4448).
caccccatgtcaaagacta

SEQ ID NO: 586729 - DNA, 19 bp, Mus musculus
  siRNA target sequence for Ptpn13 (NM_011204.1,4477-4495).
ggtcaagctgtttaaaaat

SEQ ID NO: 586730 - DNA, 19 bp, Mus musculus
  siRNA target sequence for Ptpn13 (NM_011204.1,4478-4496).
gtcaagctgtttaaaaata

SEQ ID NO: 586731 - DNA, 19 bp, Mus musculus
  siRNA target sequence for Ptpn13 (NM_011204.1,4515-4533).
gtttttctcgggaagataa

SEQ ID NO: 586732 - DNA, 19 bp, Mus musculus
  siRNA target sequence for Ptpn13 (NM_011204.1,4521-4539).
ctcgggaagataatcttat

SEQ ID NO: 586733 - DNA, 19 bp, Mus musculus
  siRNA target sequence for Ptpn13 (NM_011204.1,4525-4543).
ggaagataatcttatacca

SEQ ID NO: 586734 - DNA, 19 bp, Mus musculus
  siRNA target sequence for Ptpn13 (NM_011204.1,4622-4640).
gttggagatgttatattga

SEQ ID NO: 586735 - DNA, 19 bp, Mus musculus
  siRNA target sequence for Ptpn13 (NM_011204.1,4743-4761).
ctggtgtgctaccagaaat

SEQ ID NO: 586736 - DNA, 19 bp, Mus musculus
  siRNA target sequence for Ptpn13 (NM_011204.1,4746-4764).
gtgtgctaccagaaatcga

SEQ ID NO: 586737 - DNA, 19 bp, Mus musculus
  siRNA target sequence for Ptpn13 (NM_011204.1,4748-4766).
gtgctaccagaaatcgata

SEQ ID NO: 586738 - DNA, 19 bp, Mus musculus
  siRNA target sequence for Ptpn13 (NM_011204.1,4751-4769).
ctaccagaaatcgatacta

SEQ ID NO: 586739 - DNA, 19 bp, Mus musculus
  siRNA target sequence for Ptpn13 (NM_011204.1,4786-4804).
ctactctccagcaaactca

SEQ ID NO: 586740 - DNA, 19 bp, Mus musculus
  siRNA target sequence for Ptpn13 (NM_011204.1,4789-4807).
ctctccagcaaactcattt

SEQ ID NO: 586741 - DNA, 19 bp, Mus musculus
  siRNA target sequence for Ptpn13 (NM_011204.1,4793-4811).
ccagcaaactcatttctaa

SEQ ID NO: 586742 - DNA, 19 bp, Mus musculus
  siRNA target sequence for Ptpn13 (NM_011204.1,4794-4812).
cagcaaactcatttctaaa

SEQ ID NO: 586743 - DNA, 19 bp, Mus musculus
  siRNA target sequence for Ptpn13 (NM_011204.1,4796-4814).
gcaaactcatttctaaaca

SEQ ID NO: 586744 - DNA, 19 bp, Mus musculus
  siRNA target sequence for Ptpn13 (NM_011204.1,4877-4895).
ggggtgtctggcaaaacca

SEQ ID NO: 586745 - DNA, 19 bp, Mus musculus
  siRNA target sequence for Ptpn13 (NM_011204.1,4878-4896).
gggtgtctggcaaaaccaa

SEQ ID NO: 586746 - DNA, 19 bp, Mus musculus
  siRNA target sequence for Ptpn13 (NM_011204.1,5281-5299).
ggaagtagagcttctcatt

SEQ ID NO: 586747 - DNA, 19 bp, Mus musculus
  siRNA target sequence for Ptpn13 (NM_011204.1,5282-5300).
gaagtagagcttctcatta

SEQ ID NO: 586748 - DNA, 19 bp, Mus musculus
  siRNA target sequence for Ptpn13 (NM_011204.1,5352-5370).
gtcagagtattggttgtta

SEQ ID NO: 586749 - DNA, 19 bp, Mus musculus
  siRNA target sequence for Ptpn13 (NM_011204.1,5420-5438).
gctggagaccggcttataa

SEQ ID NO: 586750 - DNA, 19 bp, Mus musculus
  siRNA target sequence for Ptpn13 (NM_011204.1,5421-5439).
ctggagaccggcttataaa

SEQ ID NO: 586751 - DNA, 19 bp, Mus musculus
  siRNA target sequence for Ptpn13 (NM_011204.1,5426-5444).
gaccggcttataaaggtta

SEQ ID NO: 586752 - DNA, 19 bp, Mus musculus
  siRNA target sequence for Ptpn13 (NM_011204.1,5430-5448).
ggcttataaaggttaatga

SEQ ID NO: 586753 - DNA, 19 bp, Mus musculus
  siRNA target sequence for Ptpn13 (NM_011204.1,5431-5449).
gcttataaaggttaatgat

SEQ ID NO: 586754 - DNA, 19 bp, Mus musculus
  siRNA target sequence for Ptpn13 (NM_011204.1,5447-5465).
gatacagacgttacaaaca

SEQ ID NO: 586755 - DNA, 19 bp, Mus musculus
  siRNA target sequence for Ptpn13 (NM_011204.1,5494-5512).
gcgagccgcacccaaaaca

SEQ ID NO: 586756 - DNA, 19 bp, Mus musculus
  siRNA target sequence for Ptpn13 (NM_011204.1,5505-5523).
ccaaaacagtcagattagt

SEQ ID NO: 586757 - DNA, 19 bp, Mus musculus
  siRNA target sequence for Ptpn13 (NM_011204.1,5506-5524).
caaaacagtcagattagtt

SEQ ID NO: 586758 - DNA, 19 bp, Mus musculus
  siRNA target sequence for Ptpn13 (NM_011204.1,5597-5615).
cacggagaggagttaggat

SEQ ID NO: 586759 - DNA, 19 bp, Mus musculus
  siRNA target sequence for Ptpn13 (NM_011204.1,5643-5661).
cacatggagtggtgtatat

SEQ ID NO: 586760 - DNA, 19 bp, Mus musculus
  siRNA target sequence for Ptpn13 (NM_011204.1,5645-5663).
catggagtggtgtatatta

SEQ ID NO: 586761 - DNA, 19 bp, Mus musculus
  siRNA target sequence for Ptpn13 (NM_011204.1,5698-5716).
cggtagtctccagctatta

SEQ ID NO: 586762 - DNA, 19 bp, Mus musculus
  siRNA target sequence for Ptpn13 (NM_011204.1,5700-5718).
gtagtctccagctattaga

SEQ ID NO: 586763 - DNA, 19 bp, Mus musculus
  siRNA target sequence for Ptpn13 (NM_011204.1,5711-5729).
ctattagacatcatccatt

SEQ ID NO: 586764 - DNA, 19 bp, Mus musculus
  siRNA target sequence for Ptpn13 (NM_011204.1,5739-5757).
gagtcagcacacaaggaat

SEQ ID NO: 586765 - DNA, 19 bp, Mus musculus
  siRNA target sequence for Ptpn13 (NM_011204.1,5959-5977).
cggggaaggagtacatgaa

SEQ ID NO: 586766 - DNA, 19 bp, Mus musculus
  siRNA target sequence for Ptpn13 (NM_011204.1,6000-6018).
gctcgtcttctcagatgaa

SEQ ID NO: 586767 - DNA, 19 bp, Mus musculus
  siRNA target sequence for Ptpn13 (NM_011204.1,6027-6045).
caggcctgactgaaaccaa

SEQ ID NO: 586768 - DNA, 19 bp, Mus musculus
  siRNA target sequence for Ptpn13 (NM_011204.1,6057-6075).
cccgggatgatgacatcta

SEQ ID NO: 586769 - DNA, 19 bp, Mus musculus
  siRNA target sequence for Ptpn13 (NM_011204.1,6135-6153).
cacagaacctcttaaacca

SEQ ID NO: 586770 - DNA, 19 bp, Mus musculus
  siRNA target sequence for Ptpn13 (NM_011204.1,6293-6311).
gtagaccttgcaagcttaa

SEQ ID NO: 586771 - DNA, 19 bp, Mus musculus
  siRNA target sequence for Ptpn13 (NM_011204.1,6307-6325).
cttaactgcagcatcacaa

SEQ ID NO: 586772 - DNA, 19 bp, Mus musculus
  siRNA target sequence for Ptpn13 (NM_011204.1,6382-6400).
gacaacagacggtgaagat

SEQ ID NO: 586773 - DNA, 19 bp, Mus musculus
  siRNA target sequence for Ptpn13 (NM_011204.1,6557-6575).
gagaaccttcaagaattaa

SEQ ID NO: 586774 - DNA, 19 bp, Mus musculus
  siRNA target sequence for Ptpn13 (NM_011204.1,6559-6577).
gaaccttcaagaattaaaa

SEQ ID NO: 586775 - DNA, 19 bp, Mus musculus
  siRNA target sequence for Ptpn13 (NM_011204.1,6677-6695).
gatgaaggtggatacatca

SEQ ID NO: 586776 - DNA, 19 bp, Mus musculus
  siRNA target sequence for Ptpn13 (NM_011204.1,6727-6745).
ccaggaattcgtgtacatt

SEQ ID NO: 586777 - DNA, 19 bp, Mus musculus
  siRNA target sequence for Ptpn13 (NM_011204.1,6810-6828).
ccacggtgatagcaatgat

SEQ ID NO: 586778 - DNA, 19 bp, Mus musculus
  siRNA target sequence for Ptpn13 (NM_011204.1,6990-7008).
caggggaggtgcgacatat

SEQ ID NO: 586779 - DNA, 19 bp, Mus musculus
  siRNA target sequence for Ptpn13 (NM_011204.1,6992-7010).
ggggaggtgcgacatattt

SEQ ID NO: 586780 - DNA, 19 bp, Mus musculus
  siRNA target sequence for Ptpn13 (NM_011204.1,6994-7012).
ggaggtgcgacatatttct

SEQ ID NO: 586781 - DNA, 19 bp, Mus musculus
  siRNA target sequence for Ptpn13 (NM_011204.1,7059-7077).
cagacgacctgctcacatt

SEQ ID NO: 586782 - DNA, 19 bp, Mus musculus
  siRNA target sequence for Ptpn13 (NM_011204.1,7061-7079).
gacgacctgctcacattca

SEQ ID NO: 586783 - DNA, 19 bp, Mus musculus
  siRNA target sequence for Ptpn13 (NM_011204.1,7172-7190).
gtggtcctaggcttaatca

SEQ ID NO: 586784 - DNA, 19 bp, Mus musculus
  siRNA target sequence for Ptpn13 (NM_011204.1,7191-7209).
gccaggatctggaattcga

SEQ ID NO: 586785 - DNA, 19 bp, Mus musculus
  siRNA target sequence for Ptpn13 (NM_011204.1,7196-7214).
gatctggaattcgacatat

SEQ ID NO: 586786 - DNA, 19 bp, Mus musculus
  siRNA target sequence for Ptpn13 (NM_011204.1,7300-7318).
ctatgtcctgactcatctt

SEQ ID NO: 586787 - DNA, 19 bp, Mus musculus
  siRNA target sequence for Ptpn14 (NM_008976.1,313-331).
ctacttcggcctttggttt

SEQ ID NO: 586788 - DNA, 19 bp, Mus musculus
  siRNA target sequence for Ptpn14 (NM_008976.1,386-404).
catctggacaagtttgcta

SEQ ID NO: 586789 - DNA, 19 bp, Mus musculus
  siRNA target sequence for Ptpn14 (NM_008976.1,402-420).
ctaacgagcctctgctttt

SEQ ID NO: 586790 - DNA, 19 bp, Mus musculus
  siRNA target sequence for Ptpn14 (NM_008976.1,469-487).
ggccacaagatatcagtat

SEQ ID NO: 586791 - DNA, 19 bp, Mus musculus
  siRNA target sequence for Ptpn14 (NM_008976.1,470-488).
gccacaagatatcagtatt

SEQ ID NO: 586792 - DNA, 19 bp, Mus musculus
  siRNA target sequence for Ptpn14 (NM_008976.1,484-502).
gtattacctgcaagtcaaa

SEQ ID NO: 586793 - DNA, 19 bp, Mus musculus
  siRNA target sequence for Ptpn14 (NM_008976.1,528-546).
ggtgctccctggaacaagt

SEQ ID NO: 586794 - DNA, 19 bp, Mus musculus
  siRNA target sequence for Ptpn14 (NM_008976.1,575-593).
gctgacttcggagattata

SEQ ID NO: 586795 - DNA, 19 bp, Mus musculus
  siRNA target sequence for Ptpn14 (NM_008976.1,576-594).
ctgacttcggagattataa

SEQ ID NO: 586796 - DNA, 19 bp, Mus musculus
  siRNA target sequence for Ptpn14 (NM_008976.1,587-605).
gattataaccagtttgatt

SEQ ID NO: 586797 - DNA, 19 bp, Mus musculus
  siRNA target sequence for Ptpn14 (NM_008976.1,726-744).
cggctgaagctgaactgat

SEQ ID NO: 586798 - DNA, 19 bp, Mus musculus
  siRNA target sequence for Ptpn14 (NM_008976.1,754-772).
cgaggtagagcgtttggat

SEQ ID NO: 586799 - DNA, 19 bp, Mus musculus
  siRNA target sequence for Ptpn14 (NM_008976.1,763-781).
gcgtttggatggatttgga

SEQ ID NO: 586800 - DNA, 19 bp, Mus musculus
  siRNA target sequence for Ptpn14 (NM_008976.1,821-839).
gtgcacctcggcatcttct

SEQ ID NO: 586801 - DNA, 19 bp, Mus musculus
  siRNA target sequence for Ptpn14 (NM_008976.1,870-888).
ggagacaggcagtgatata

SEQ ID NO: 586802 - DNA, 19 bp, Mus musculus
  siRNA target sequence for Ptpn14 (NM_008976.1,959-977).
gagaccgcgctcttccata

SEQ ID NO: 586803 - DNA, 19 bp, Mus musculus
  siRNA target sequence for Ptpn14 (NM_008976.1,963-981).
ccgcgctcttccatacaga

SEQ ID NO: 586804 - DNA, 19 bp, Mus musculus
  siRNA target sequence for Ptpn14 (NM_008976.1,964-982).
cgcgctcttccatacagat

SEQ ID NO: 586805 - DNA, 19 bp, Mus musculus
  siRNA target sequence for Ptpn14 (NM_008976.1,970-988).
cttccatacagatgatatt

SEQ ID NO: 586806 - DNA, 19 bp, Mus musculus
  siRNA target sequence for Ptpn14 (NM_008976.1,1000-1018).
gtacatttctcggttgttt

SEQ ID NO: 586807 - DNA, 19 bp, Mus musculus
  siRNA target sequence for Ptpn14 (NM_008976.1,1023-1041).
ctcggcacaaattttacaa

SEQ ID NO: 586808 - DNA, 19 bp, Mus musculus
  siRNA target sequence for Ptpn14 (NM_008976.1,1125-1143).
ggcagcagccgtatatctt

SEQ ID NO: 586809 - DNA, 19 bp, Mus musculus
  siRNA target sequence for Ptpn14 (NM_008976.1,1251-1269).
gcctggaccttaattactt

SEQ ID NO: 586810 - DNA, 19 bp, Mus musculus
  siRNA target sequence for Ptpn14 (NM_008976.1,1253-1271).
ctggaccttaattacttga

SEQ ID NO: 586811 - DNA, 19 bp, Mus musculus
  siRNA target sequence for Ptpn14 (NM_008976.1,1355-1373).
ccagtgtcctccaacctta

SEQ ID NO: 586812 - DNA, 19 bp, Mus musculus
  siRNA target sequence for Ptpn14 (NM_008976.1,1452-1470).
ggccgaccccagattacga

SEQ ID NO: 586813 - DNA, 19 bp, Mus musculus
  siRNA target sequence for Ptpn14 (NM_008976.1,1473-1491).
cggtcatgaggcagatgaa

SEQ ID NO: 586814 - DNA, 19 bp, Mus musculus
  siRNA target sequence for Ptpn14 (NM_008976.1,1529-1547).
ctgcgtaacctcaatatca

SEQ ID NO: 586815 - DNA, 19 bp, Mus musculus
  siRNA target sequence for Ptpn14 (NM_008976.1,1533-1551).
gtaacctcaatatcatcaa

SEQ ID NO: 586816 - DNA, 19 bp, Mus musculus
  siRNA target sequence for Ptpn14 (NM_008976.1,1645-1663).
gtgctacggtcacaaactt

SEQ ID NO: 586817 - DNA, 19 bp, Mus musculus
  siRNA target sequence for Ptpn14 (NM_008976.1,1647-1665).
gctacggtcacaaacttgt

SEQ ID NO: 586818 - DNA, 19 bp, Mus musculus
  siRNA target sequence for Ptpn14 (NM_008976.1,1648-1666).
ctacggtcacaaacttgta

SEQ ID NO: 586819 - DNA, 19 bp, Mus musculus
  siRNA target sequence for Ptpn14 (NM_008976.1,1651-1669).
cggtcacaaacttgtaagt

SEQ ID NO: 586820 - DNA, 19 bp, Mus musculus
  siRNA target sequence for Ptpn14 (NM_008976.1,1681-1699).
gatgaacccccaaaattgt

SEQ ID NO: 586821 - DNA, 19 bp, Mus musculus
  siRNA target sequence for Ptpn14 (NM_008976.1,1774-1792).
ccaaggagcacaacactat

SEQ ID NO: 586822 - DNA, 19 bp, Mus musculus
  siRNA target sequence for Ptpn14 (NM_008976.1,1804-1822).
catgctcaagaactatcta

SEQ ID NO: 586823 - DNA, 19 bp, Mus musculus
  siRNA target sequence for Ptpn14 (NM_008976.1,1937-1955).
gtgcagctctccgtaaaga

SEQ ID NO: 586824 - DNA, 19 bp, Mus musculus
  siRNA target sequence for Ptpn14 (NM_008976.1,2043-2061).
gcggtggcacggtgaataa

SEQ ID NO: 586825 - DNA, 19 bp, Mus musculus
  siRNA target sequence for Ptpn14 (NM_008976.1,2044-2062).
cggtggcacggtgaataaa

SEQ ID NO: 586826 - DNA, 19 bp, Mus musculus
  siRNA target sequence for Ptpn14 (NM_008976.1,2213-2231).
cagtatcaccacaagaaga

SEQ ID NO: 586827 - DNA, 19 bp, Mus musculus
  siRNA target sequence for Ptpn14 (NM_008976.1,2587-2605).
gaaggagcgggtcaagaaa

SEQ ID NO: 586828 - DNA, 19 bp, Mus musculus
  siRNA target sequence for Ptpn14 (NM_008976.1,2622-2640).
ggccggtgtcagagatgtt

SEQ ID NO: 586829 - DNA, 19 bp, Mus musculus
  siRNA target sequence for Ptpn14 (NM_008976.1,2947-2965).
cagccggatccgagaagtt

SEQ ID NO: 586830 - DNA, 19 bp, Mus musculus
  siRNA target sequence for Ptpn14 (NM_008976.1,2949-2967).
gccggatccgagaagttgt

SEQ ID NO: 586831 - DNA, 19 bp, Mus musculus
  siRNA target sequence for Ptpn14 (NM_008976.1,2992-3010).
gctcatcccgaccaaagaa

SEQ ID NO: 586832 - DNA, 19 bp, Mus musculus
  siRNA target sequence for Ptpn14 (NM_008976.1,2999-3017).
ccgaccaaagaaaacaaca

SEQ ID NO: 586833 - DNA, 19 bp, Mus musculus
  siRNA target sequence for Ptpn14 (NM_008976.1,3049-3067).
ggtggtcggcggatcagaa

SEQ ID NO: 586834 - DNA, 19 bp, Mus musculus
  siRNA target sequence for Ptpn14 (NM_008976.1,3050-3068).
gtggtcggcggatcagaat

SEQ ID NO: 586835 - DNA, 19 bp, Mus musculus
  siRNA target sequence for Ptpn14 (NM_008976.1,3060-3078).
gatcagaatggcactacat

SEQ ID NO: 586836 - DNA, 19 bp, Mus musculus
  siRNA target sequence for Ptpn14 (NM_008976.1,3215-3233).
ctggggtccaagcatagtt

SEQ ID NO: 586837 - DNA, 19 bp, Mus musculus
  siRNA target sequence for Ptpn14 (NM_008976.1,3217-3235).
ggggtccaagcatagttct

SEQ ID NO: 586838 - DNA, 19 bp, Mus musculus
  siRNA target sequence for Ptpn14 (NM_008976.1,3274-3292).
gacagattctggttgctat

SEQ ID NO: 586839 - DNA, 19 bp, Mus musculus
  siRNA target sequence for Ptpn14 (NM_008976.1,3278-3296).
gattctggttgctatgcaa

SEQ ID NO: 586840 - DNA, 19 bp, Mus musculus
  siRNA target sequence for Ptpn14 (NM_008976.1,3294-3312).
caacgacgggcctaaaggt

SEQ ID NO: 586841 - DNA, 19 bp, Mus musculus
  siRNA target sequence for Ptpn14 (NM_008976.1,3387-3405).
cagaagacgtccaaggatt

SEQ ID NO: 586842 - DNA, 19 bp, Mus musculus
  siRNA target sequence for Ptpn14 (NM_008976.1,3392-3410).
gacgtccaaggatttttgt

SEQ ID NO: 586843 - DNA, 19 bp, Mus musculus
  siRNA target sequence for Ptpn14 (NM_008976.1,3516-3534).
gaaggactggtgtggttat

SEQ ID NO: 586844 - DNA, 19 bp, Mus musculus
  siRNA target sequence for Ptpn14 (NM_008976.1,3519-3537).
ggactggtgtggttatcct

SEQ ID NO: 586845 - DNA, 19 bp, Mus musculus
  siRNA target sequence for Ptpn18 (NM_011206.1,148-166).
cgtgagttcagcgacatta

SEQ ID NO: 586846 - DNA, 19 bp, Mus musculus
  siRNA target sequence for Ptpn18 (NM_011206.1,149-167).
gtgagttcagcgacattaa

SEQ ID NO: 586847 - DNA, 19 bp, Mus musculus
  siRNA target sequence for Ptpn18 (NM_011206.1,310-328).
ggacatggagattacatca

SEQ ID NO: 586848 - DNA, 19 bp, Mus musculus
  siRNA target sequence for Ptpn18 (NM_011206.1,587-605).
ggaccctccaggttacatt

SEQ ID NO: 586849 - DNA, 19 bp, Mus musculus
  siRNA target sequence for Ptpn18 (NM_011206.1,625-643).
gtgcaccagctacagtata

SEQ ID NO: 586850 - DNA, 19 bp, Mus musculus
  siRNA target sequence for Ptpn18 (NM_011206.1,628-646).
caccagctacagtatatgt

SEQ ID NO: 586851 - DNA, 19 bp, Mus musculus
  siRNA target sequence for Ptpn18 (NM_011206.1,663-681).
ggttcccagcagttctgat

SEQ ID NO: 586852 - DNA, 19 bp, Mus musculus
  siRNA target sequence for Ptpn18 (NM_011206.1,671-689).
gcagttctgatcacattct

SEQ ID NO: 586853 - DNA, 19 bp, Mus musculus
  siRNA target sequence for Ptpn18 (NM_011206.1,1282-1300).
gttcctgcggaccaaaact

SEQ ID NO: 586854 - DNA, 19 bp, Mus musculus
  siRNA target sequence for Ptpn18 (NM_011206.1,1312-1330).
gatgcctacgaagaagtaa

SEQ ID NO: 586855 - DNA, 19 bp, Mus musculus
  siRNA target sequence for Ptpn18 (NM_011206.1,1316-1334).
cctacgaagaagtaacaga

SEQ ID NO: 586856 - DNA, 19 bp, Mus musculus
  siRNA target sequence for Ptpn18 (NM_011206.1,1348-1366).
ggagggctaggcttcaact

SEQ ID NO: 586857 - DNA, 19 bp, Mus musculus
  siRNA target sequence for Ptpn2 (NM_008977.1,113-131).
gtcgctggcagccgttata

SEQ ID NO: 586858 - DNA, 19 bp, Mus musculus
  siRNA target sequence for Ptpn2 (NM_008977.1,115-133).
cgctggcagccgttatact

SEQ ID NO: 586859 - DNA, 19 bp, Mus musculus
  siRNA target sequence for Ptpn2 (NM_008977.1,116-134).
gctggcagccgttatactt

SEQ ID NO: 586860 - DNA, 19 bp, Mus musculus
  siRNA target sequence for Ptpn2 (NM_008977.1,121-139).
cagccgttatacttggaaa

SEQ ID NO: 586861 - DNA, 19 bp, Mus musculus
  siRNA target sequence for Ptpn2 (NM_008977.1,123-141).
gccgttatacttggaaatt

SEQ ID NO: 586862 - DNA, 19 bp, Mus musculus
  siRNA target sequence for Ptpn2 (NM_008977.1,126-144).
gttatacttggaaattcga

SEQ ID NO: 586863 - DNA, 19 bp, Mus musculus
  siRNA target sequence for Ptpn2 (NM_008977.1,238-256).
cgtgttaaactgcaaagta

SEQ ID NO: 586864 - DNA, 19 bp, Mus musculus
  siRNA target sequence for Ptpn2 (NM_008977.1,278-296).
ccagcttagttgacataga

SEQ ID NO: 586865 - DNA, 19 bp, Mus musculus
  siRNA target sequence for Ptpn2 (NM_008977.1,328-346).
ggcccacttccgaacacat

SEQ ID NO: 586866 - DNA, 19 bp, Mus musculus
  siRNA target sequence for Ptpn2 (NM_008977.1,396-414).
catgctaaaccgaactgta

SEQ ID NO: 586867 - DNA, 19 bp, Mus musculus
  siRNA target sequence for Ptpn2 (NM_008977.1,399-417).
gctaaaccgaactgtagaa

SEQ ID NO: 586868 - DNA, 19 bp, Mus musculus
  siRNA target sequence for Ptpn2 (NM_008977.1,406-424).
cgaactgtagaaaaagaat

SEQ ID NO: 586869 - DNA, 19 bp, Mus musculus
  siRNA target sequence for Ptpn2 (NM_008977.1,415-433).
gaaaaagaatcggttaaat

SEQ ID NO: 586870 - DNA, 19 bp, Mus musculus
  siRNA target sequence for Ptpn2 (NM_008977.1,491-509).
gtgtgaagctcttatctga

SEQ ID NO: 586871 - DNA, 19 bp, Mus musculus
  siRNA target sequence for Ptpn2 (NM_008977.1,495-513).
gaagctcttatctgaagat

SEQ ID NO: 586872 - DNA, 19 bp, Mus musculus
  siRNA target sequence for Ptpn2 (NM_008977.1,521-539).
catattatacagtacatct

SEQ ID NO: 586873 - DNA, 19 bp, Mus musculus
  siRNA target sequence for Ptpn2 (NM_008977.1,530-548).
cagtacatctactacagtt

SEQ ID NO: 586874 - DNA, 19 bp, Mus musculus
  siRNA target sequence for Ptpn2 (NM_008977.1,535-553).
catctactacagttagaaa

SEQ ID NO: 586875 - DNA, 19 bp, Mus musculus
  siRNA target sequence for Ptpn2 (NM_008977.1,631-649).
ccagcttcatttctaaact

SEQ ID NO: 586876 - DNA, 19 bp, Mus musculus
  siRNA target sequence for Ptpn2 (NM_008977.1,694-712).
ggacctgcagtgatccatt

SEQ ID NO: 586877 - DNA, 19 bp, Mus musculus
  siRNA target sequence for Ptpn2 (NM_008977.1,787-805).
gatgttaatgtgaaacaat

SEQ ID NO: 586878 - DNA, 19 bp, Mus musculus
  siRNA target sequence for Ptpn2 (NM_008977.1,798-816).
gaaacaattattactgaat

SEQ ID NO: 586879 - DNA, 19 bp, Mus musculus
  siRNA target sequence for Ptpn2 (NM_008977.1,825-843).
gtatcgaatgggacttatt

SEQ ID NO: 586880 - DNA, 19 bp, Mus musculus
  siRNA target sequence for Ptpn2 (NM_008977.1,829-847).
cgaatgggacttattcaga

SEQ ID NO: 586881 - DNA, 19 bp, Mus musculus
  siRNA target sequence for Ptpn2 (NM_008977.1,850-868).
ccggaccaactcagattct

SEQ ID NO: 586882 - DNA, 19 bp, Mus musculus
  siRNA target sequence for Ptpn2 (NM_008977.1,869-887).
cctacatggccataataga

SEQ ID NO: 586883 - DNA, 19 bp, Mus musculus
  siRNA target sequence for Ptpn2 (NM_008977.1,870-888).
ctacatggccataatagaa

SEQ ID NO: 586884 - DNA, 19 bp, Mus musculus
  siRNA target sequence for Ptpn2 (NM_008977.1,908-926).
gagattcaaatatacagaa

SEQ ID NO: 586885 - DNA, 19 bp, Mus musculus
  siRNA target sequence for Ptpn2 (NM_008977.1,928-946).
cggtggaaagaactttcta

SEQ ID NO: 586886 - DNA, 19 bp, Mus musculus
  siRNA target sequence for Ptpn2 (NM_008977.1,929-947).
ggtggaaagaactttctaa

SEQ ID NO: 586887 - DNA, 19 bp, Mus musculus
  siRNA target sequence for Ptpn2 (NM_008977.1,986-1004).
gagtgatggttgagaagta

SEQ ID NO: 586888 - DNA, 19 bp, Mus musculus
  siRNA target sequence for Ptpn2 (NM_008977.1,1005-1023).
caatgggaagagaataggt

SEQ ID NO: 586889 - DNA, 19 bp, Mus musculus
  siRNA target sequence for Ptpn2 (NM_008977.1,1055-1073).
ctaaggtgcaggatactgt

SEQ ID NO: 586890 - DNA, 19 bp, Mus musculus
  siRNA target sequence for Ptpn2 (NM_008977.1,1091-1109).
gcattctacggaaacgtat

SEQ ID NO: 586891 - DNA, 19 bp, Mus musculus
  siRNA target sequence for Ptpn2 (NM_008977.1,1092-1110).
cattctacggaaacgtatt

SEQ ID NO: 586892 - DNA, 19 bp, Mus musculus
  siRNA target sequence for Ptpn2 (NM_008977.1,1105-1123).
cgtattcgagaggatagaa

SEQ ID NO: 586893 - DNA, 19 bp, Mus musculus
  siRNA target sequence for Ptpn2 (NM_008977.1,1106-1124).
gtattcgagaggatagaaa

SEQ ID NO: 586894 - DNA, 19 bp, Mus musculus
  siRNA target sequence for Ptpn20 (NM_008978.1,229-247).
caggaaggttagaggaaaa

SEQ ID NO: 586895 - DNA, 19 bp, Mus musculus
  siRNA target sequence for Ptpn20 (NM_008978.1,290-308).
ctgaatctccgcaactctt

SEQ ID NO: 586896 - DNA, 19 bp, Mus musculus
  siRNA target sequence for Ptpn20 (NM_008978.1,333-351).
cgcctacgaagccgatttt

SEQ ID NO: 586897 - DNA, 19 bp, Mus musculus
  siRNA target sequence for Ptpn20 (NM_008978.1,334-352).
gcctacgaagccgattttt

SEQ ID NO: 586898 - DNA, 19 bp, Mus musculus
  siRNA target sequence for Ptpn20 (NM_008978.1,392-410).
cacctgtcattctcagata

SEQ ID NO: 586899 - DNA, 19 bp, Mus musculus
  siRNA target sequence for Ptpn20 (NM_008978.1,397-415).
gtcattctcagataagtat

SEQ ID NO: 586900 - DNA, 19 bp, Mus musculus
  siRNA target sequence for Ptpn20 (NM_008978.1,407-425).
gataagtatgagcttgttt

SEQ ID NO: 586901 - DNA, 19 bp, Mus musculus
  siRNA target sequence for Ptpn20 (NM_008978.1,476-494).
gaccggtctctcagaaaca

SEQ ID NO: 586902 - DNA, 19 bp, Mus musculus
  siRNA target sequence for Ptpn20 (NM_008978.1,619-637).
ggctcagattcgaccatta

SEQ ID NO: 586903 - DNA, 19 bp, Mus musculus
  siRNA target sequence for Ptpn20 (NM_008978.1,620-638).
gctcagattcgaccattaa

SEQ ID NO: 586904 - DNA, 19 bp, Mus musculus
  siRNA target sequence for Ptpn20 (NM_008978.1,621-639).
ctcagattcgaccattaat

SEQ ID NO: 586905 - DNA, 19 bp, Mus musculus
  siRNA target sequence for Ptpn20 (NM_008978.1,623-641).
cagattcgaccattaatat

SEQ ID NO: 586906 - DNA, 19 bp, Mus musculus
  siRNA target sequence for Ptpn20 (NM_008978.1,660-678).
ctgctatgcgggattgttt

SEQ ID NO: 586907 - DNA, 19 bp, Mus musculus
  siRNA target sequence for Ptpn20 (NM_008978.1,662-680).
gctatgcgggattgtttga

SEQ ID NO: 586908 - DNA, 19 bp, Mus musculus
  siRNA target sequence for Ptpn20 (NM_008978.1,707-725).
gatatcatccgtgagtttt

SEQ ID NO: 586909 - DNA, 19 bp, Mus musculus
  siRNA target sequence for Ptpn20 (NM_008978.1,744-762).
ctctgcctgatgacttcaa

SEQ ID NO: 586910 - DNA, 19 bp, Mus musculus
  siRNA target sequence for Ptpn20 (NM_008978.1,746-764).
ctgcctgatgacttcaatt

SEQ ID NO: 586911 - DNA, 19 bp, Mus musculus
  siRNA target sequence for Ptpn20 (NM_008978.1,760-778).
caattctgggaatacacta

SEQ ID NO: 586912 - DNA, 19 bp, Mus musculus
  siRNA target sequence for Ptpn20 (NM_008978.1,802-820).
ccgagatattcttccatat

SEQ ID NO: 586913 - DNA, 19 bp, Mus musculus
  siRNA target sequence for Ptpn20 (NM_008978.1,856-874).
ctacatcaacgctagttat

SEQ ID NO: 586914 - DNA, 19 bp, Mus musculus
  siRNA target sequence for Ptpn20 (NM_008978.1,859-877).
catcaacgctagttatatt

SEQ ID NO: 586915 - DNA, 19 bp, Mus musculus
  siRNA target sequence for Ptpn20 (NM_008978.1,862-880).
caacgctagttatattaga

SEQ ID NO: 586916 - DNA, 19 bp, Mus musculus
  siRNA target sequence for Ptpn20 (NM_008978.1,870-888).
gttatattagaatagtaaa

SEQ ID NO: 586917 - DNA, 19 bp, Mus musculus
  siRNA target sequence for Ptpn20 (NM_008978.1,879-897).
gaatagtaaatcatgaaga

SEQ ID NO: 586918 - DNA, 19 bp, Mus musculus
  siRNA target sequence for Ptpn20 (NM_008978.1,955-973).
gcaaatggttctggaaaat

SEQ ID NO: 586919 - DNA, 19 bp, Mus musculus
  siRNA target sequence for Ptpn20 (NM_008978.1,962-980).
gttctggaaaataattgta

SEQ ID NO: 586920 - DNA, 19 bp, Mus musculus
  siRNA target sequence for Ptpn20 (NM_008978.1,978-996).
gtaatgttattgctatgat

SEQ ID NO: 586921 - DNA, 19 bp, Mus musculus
  siRNA target sequence for Ptpn20 (NM_008978.1,994-1012).
gataaccagagagatagaa

SEQ ID NO: 586922 - DNA, 19 bp, Mus musculus
  siRNA target sequence for Ptpn20 (NM_008978.1,1010-1028).
gaatgtggagttatcaagt

SEQ ID NO: 586923 - DNA, 19 bp, Mus musculus
  siRNA target sequence for Ptpn20 (NM_008978.1,1016-1034).
ggagttatcaagtgttaca

SEQ ID NO: 586924 - DNA, 19 bp, Mus musculus
  siRNA target sequence for Ptpn20 (NM_008978.1,1057-1075).
ggagcctttggaattcgaa

SEQ ID NO: 586925 - DNA, 19 bp, Mus musculus
  siRNA target sequence for Ptpn20 (NM_008978.1,1062-1080).
ctttggaattcgaacactt

SEQ ID NO: 586926 - DNA, 19 bp, Mus musculus
  siRNA target sequence for Ptpn20 (NM_008978.1,1066-1084).
ggaattcgaacactttagt

SEQ ID NO: 586927 - DNA, 19 bp, Mus musculus
  siRNA target sequence for Ptpn20 (NM_008978.1,1096-1114).
gacctttcatgtaactcaa

SEQ ID NO: 586928 - DNA, 19 bp, Mus musculus
  siRNA target sequence for Ptpn20 (NM_008978.1,1098-1116).
cctttcatgtaactcaata

SEQ ID NO: 586929 - DNA, 19 bp, Mus musculus
  siRNA target sequence for Ptpn20 (NM_008978.1,1099-1117).
ctttcatgtaactcaatat

SEQ ID NO: 586930 - DNA, 19 bp, Mus musculus
  siRNA target sequence for Ptpn20 (NM_008978.1,1103-1121).
catgtaactcaatatttca

SEQ ID NO: 586931 - DNA, 19 bp, Mus musculus
  siRNA target sequence for Ptpn20 (NM_008978.1,1122-1140).
ccgttcgagtatttcagat

SEQ ID NO: 586932 - DNA, 19 bp, Mus musculus
  siRNA target sequence for Ptpn20 (NM_008978.1,1123-1141).
cgttcgagtatttcagatt

SEQ ID NO: 586933 - DNA, 19 bp, Mus musculus
  siRNA target sequence for Ptpn20 (NM_008978.1,1127-1145).
cgagtatttcagattgtga

SEQ ID NO: 586934 - DNA, 19 bp, Mus musculus
  siRNA target sequence for Ptpn20 (NM_008978.1,1157-1175).
ggaaagagccaatgtgtaa

SEQ ID NO: 586935 - DNA, 19 bp, Mus musculus
  siRNA target sequence for Ptpn20 (NM_008978.1,1158-1176).
gaaagagccaatgtgtaaa

SEQ ID NO: 586936 - DNA, 19 bp, Mus musculus
  siRNA target sequence for Ptpn20 (NM_008978.1,1215-1233).
ctgcctcagcagatttttt

SEQ ID NO: 586937 - DNA, 19 bp, Mus musculus
  siRNA target sequence for Ptpn20 (NM_008978.1,1217-1235).
gcctcagcagattttttca

SEQ ID NO: 586938 - DNA, 19 bp, Mus musculus
  siRNA target sequence for Ptpn20 (NM_008978.1,1309-1327).
ccgaacaggggtgttcata

SEQ ID NO: 586939 - DNA, 19 bp, Mus musculus
  siRNA target sequence for Ptpn20 (NM_008978.1,1310-1328).
cgaacaggggtgttcatat

SEQ ID NO: 586940 - DNA, 19 bp, Mus musculus
  siRNA target sequence for Ptpn20 (NM_008978.1,1314-1332).
caggggtgttcatatgtgt

SEQ ID NO: 586941 - DNA, 19 bp, Mus musculus
  siRNA target sequence for Ptpn20 (NM_008978.1,1347-1365).
ctgccatcgagaagaacta

SEQ ID NO: 586942 - DNA, 19 bp, Mus musculus
  siRNA target sequence for Ptpn20 (NM_008978.1,1349-1367).
gccatcgagaagaactact

SEQ ID NO: 586943 - DNA, 19 bp, Mus musculus
  siRNA target sequence for Ptpn20 (NM_008978.1,1405-1423).
gcagcgctgtggcatgatt

SEQ ID NO: 586944 - DNA, 19 bp, Mus musculus
  siRNA target sequence for Ptpn20 (NM_008978.1,1408-1426).
gcgctgtggcatgattcaa

SEQ ID NO: 586945 - DNA, 19 bp, Mus musculus
  siRNA target sequence for Ptpn20 (NM_008978.1,1409-1427).
cgctgtggcatgattcaaa

SEQ ID NO: 586946 - DNA, 19 bp, Mus musculus
  siRNA target sequence for Ptpn20 (NM_008978.1,1435-1453).
gcagtaccagttttgttat

SEQ ID NO: 586947 - DNA, 19 bp, Mus musculus
  siRNA target sequence for Ptpn20 (NM_008978.1,1477-1495).
gaaccttctggctttgtat

SEQ ID NO: 586948 - DNA, 19 bp, Mus musculus
  siRNA target sequence for Ptpn21 (NM_011877.1,316-334).
ccatttggattgaaattga

SEQ ID NO: 586949 - DNA, 19 bp, Mus musculus
  siRNA target sequence for Ptpn21 (NM_011877.1,388-406).
cagctgctcaataatgagt

SEQ ID NO: 586950 - DNA, 19 bp, Mus musculus
  siRNA target sequence for Ptpn21 (NM_011877.1,480-498).
gagagaggtcacttacttt

SEQ ID NO: 586951 - DNA, 19 bp, Mus musculus
  siRNA target sequence for Ptpn21 (NM_011877.1,500-518).
gcctctggtactacaacaa

SEQ ID NO: 586952 - DNA, 19 bp, Mus musculus
  siRNA target sequence for Ptpn21 (NM_011877.1,600-618).
cttcggcgtgctattctat

SEQ ID NO: 586953 - DNA, 19 bp, Mus musculus
  siRNA target sequence for Ptpn21 (NM_011877.1,646-664).
gagattaccaggtatcagt

SEQ ID NO: 586954 - DNA, 19 bp, Mus musculus
  siRNA target sequence for Ptpn21 (NM_011877.1,648-666).
gattaccaggtatcagtat

SEQ ID NO: 586955 - DNA, 19 bp, Mus musculus
  siRNA target sequence for Ptpn21 (NM_011877.1,702-720).
ccttccctgtacattagaa

SEQ ID NO: 586956 - DNA, 19 bp, Mus musculus
  siRNA target sequence for Ptpn21 (NM_011877.1,764-782).
gtgactttgatcagtatga

SEQ ID NO: 586957 - DNA, 19 bp, Mus musculus
  siRNA target sequence for Ptpn21 (NM_011877.1,775-793).
cagtatgaatcccaagatt

SEQ ID NO: 586958 - DNA, 19 bp, Mus musculus
  siRNA target sequence for Ptpn21 (NM_011877.1,1073-1091).
ggcacgacattgctaacat

SEQ ID NO: 586959 - DNA, 19 bp, Mus musculus
  siRNA target sequence for Ptpn21 (NM_011877.1,1075-1093).
cacgacattgctaacatgt

SEQ ID NO: 586960 - DNA, 19 bp, Mus musculus
  siRNA target sequence for Ptpn21 (NM_011877.1,1114-1132).
gcactagagctggcaaata

SEQ ID NO: 586961 - DNA, 19 bp, Mus musculus
  siRNA target sequence for Ptpn21 (NM_011877.1,1115-1133).
cactagagctggcaaataa

SEQ ID NO: 586962 - DNA, 19 bp, Mus musculus
  siRNA target sequence for Ptpn21 (NM_011877.1,1137-1155).
ggagaccatccagtttcaa

SEQ ID NO: 586963 - DNA, 19 bp, Mus musculus
  siRNA target sequence for Ptpn21 (NM_011877.1,1140-1158).
gaccatccagtttcaaact

SEQ ID NO: 586964 - DNA, 19 bp, Mus musculus
  siRNA target sequence for Ptpn21 (NM_011877.1,1196-1214).
gtgtggcacggcacaaatt

SEQ ID NO: 586965 - DNA, 19 bp, Mus musculus
  siRNA target sequence for Ptpn21 (NM_011877.1,1198-1216).
gtggcacggcacaaattct

SEQ ID NO: 586966 - DNA, 19 bp, Mus musculus
  siRNA target sequence for Ptpn21 (NM_011877.1,1201-1219).
gcacggcacaaattctaca

SEQ ID NO: 586967 - DNA, 19 bp, Mus musculus
  siRNA target sequence for Ptpn21 (NM_011877.1,1329-1347).
cccaccccagctgcattat

SEQ ID NO: 586968 - DNA, 19 bp, Mus musculus
  siRNA target sequence for Ptpn21 (NM_011877.1,1330-1348).
ccaccccagctgcattata

SEQ ID NO: 586969 - DNA, 19 bp, Mus musculus
  siRNA target sequence for Ptpn21 (NM_011877.1,1335-1353).
ccagctgcattataatgga

SEQ ID NO: 586970 - DNA, 19 bp, Mus musculus
  siRNA target sequence for Ptpn21 (NM_011877.1,1379-1397).
cccaagacaacatctttgt

SEQ ID NO: 586971 - DNA, 19 bp, Mus musculus
  siRNA target sequence for Ptpn21 (NM_011877.1,1495-1513).
gcacacagtacgaattcct

SEQ ID NO: 586972 - DNA, 19 bp, Mus musculus
  siRNA target sequence for Ptpn21 (NM_011877.1,1496-1514).
cacacagtacgaattcctt

SEQ ID NO: 586973 - DNA, 19 bp, Mus musculus
  siRNA target sequence for Ptpn21 (NM_011877.1,1498-1516).
cacagtacgaattccttaa

SEQ ID NO: 586974 - DNA, 19 bp, Mus musculus
  siRNA target sequence for Ptpn21 (NM_011877.1,1718-1736).
cgctgaggaacctcaacat

SEQ ID NO: 586975 - DNA, 19 bp, Mus musculus
  siRNA target sequence for Ptpn21 (NM_011877.1,1731-1749).
caacattggcagttcctat

SEQ ID NO: 586976 - DNA, 19 bp, Mus musculus
  siRNA target sequence for Ptpn21 (NM_011877.1,1826-1844).
cagcccactacccctttaa

SEQ ID NO: 586977 - DNA, 19 bp, Mus musculus
  siRNA target sequence for Ptpn21 (NM_011877.1,1829-1847).
cccactacccctttaacct

SEQ ID NO: 586978 - DNA, 19 bp, Mus musculus
  siRNA target sequence for Ptpn21 (NM_011877.1,1959-1977).
ctacccagctccaaacatt

SEQ ID NO: 586979 - DNA, 19 bp, Mus musculus
  siRNA target sequence for Ptpn21 (NM_011877.1,1966-1984).
gctccaaacattatgagaa

SEQ ID NO: 586980 - DNA, 19 bp, Mus musculus
  siRNA target sequence for Ptpn21 (NM_011877.1,2072-2090).
gcagcaatccggatctcat

SEQ ID NO: 586981 - DNA, 19 bp, Mus musculus
  siRNA target sequence for Ptpn21 (NM_011877.1,2200-2218).
ctacagaagaggaacagta

SEQ ID NO: 586982 - DNA, 19 bp, Mus musculus
  siRNA target sequence for Ptpn21 (NM_011877.1,2232-2250).
gctcacacatggattcgaa

SEQ ID NO: 586983 - DNA, 19 bp, Mus musculus
  siRNA target sequence for Ptpn21 (NM_011877.1,2333-2351).
gcgtcttctctgacaaaat

SEQ ID NO: 586984 - DNA, 19 bp, Mus musculus
  siRNA target sequence for Ptpn21 (NM_011877.1,2518-2536).
gctttctctcaggaactaa

SEQ ID NO: 586985 - DNA, 19 bp, Mus musculus
  siRNA target sequence for Ptpn21 (NM_011877.1,2815-2833).
ccactaggggggatgaaaa

SEQ ID NO: 586986 - DNA, 19 bp, Mus musculus
  siRNA target sequence for Ptpn21 (NM_011877.1,2816-2834).
cactaggggggatgaaaaa

SEQ ID NO: 586987 - DNA, 19 bp, Mus musculus
  siRNA target sequence for Ptpn21 (NM_011877.1,2837-2855).
ctcgagcagatgcaaaaaa

SEQ ID NO: 586988 - DNA, 19 bp, Mus musculus
  siRNA target sequence for Ptpn21 (NM_011877.1,2934-2952).
gtccaccagagcgacaaat

SEQ ID NO: 586989 - DNA, 19 bp, Mus musculus
  siRNA target sequence for Ptpn21 (NM_011877.1,2994-3012).
catggtcttcaccgaatat

SEQ ID NO: 586990 - DNA, 19 bp, Mus musculus
  siRNA target sequence for Ptpn21 (NM_011877.1,2998-3016).
gtcttcaccgaatatgaga

SEQ ID NO: 586991 - DNA, 19 bp, Mus musculus
  siRNA target sequence for Ptpn21 (NM_011877.1,3162-3180).
catcaacgcgtcacacatt

SEQ ID NO: 586992 - DNA, 19 bp, Mus musculus
  siRNA target sequence for Ptpn21 (NM_011877.1,3186-3204).
ctctgtcagcggaatagaa

SEQ ID NO: 586993 - DNA, 19 bp, Mus musculus
  siRNA target sequence for Ptpn21 (NM_011877.1,3195-3213).
cggaatagaatgggattat

SEQ ID NO: 586994 - DNA, 19 bp, Mus musculus
  siRNA target sequence for Ptpn21 (NM_011877.1,3196-3214).
ggaatagaatgggattata

SEQ ID NO: 586995 - DNA, 19 bp, Mus musculus
  siRNA target sequence for Ptpn21 (NM_011877.1,3218-3236).
ccacacagggaccattaca

SEQ ID NO: 586996 - DNA, 19 bp, Mus musculus
  siRNA target sequence for Ptpn21 (NM_011877.1,3226-3244).
ggaccattacaaaatacct

SEQ ID NO: 586997 - DNA, 19 bp, Mus musculus
  siRNA target sequence for Ptpn21 (NM_011877.1,3271-3289).
gaacagggagtcgcaatta

SEQ ID NO: 586998 - DNA, 19 bp, Mus musculus
  siRNA target sequence for Ptpn21 (NM_011877.1,3276-3294).
gggagtcgcaattatagca

SEQ ID NO: 586999 - DNA, 19 bp, Mus musculus
  siRNA target sequence for Ptpn21 (NM_011877.1,3277-3295).
ggagtcgcaattatagcaa

SEQ ID NO: 587000 - DNA, 19 bp, Mus musculus
  siRNA target sequence for Ptpn21 (NM_011877.1,3278-3296).
gagtcgcaattatagcaat

SEQ ID NO: 587001 - DNA, 19 bp, Mus musculus
  siRNA target sequence for Ptpn21 (NM_011877.1,3322-3340).
cgggagaagagctttaggt

SEQ ID NO: 587002 - DNA, 19 bp, Mus musculus
  siRNA target sequence for Ptpn21 (NM_011877.1,3323-3341).
gggagaagagctttaggta

SEQ ID NO: 587003 - DNA, 19 bp, Mus musculus
  siRNA target sequence for Ptpn21 (NM_011877.1,3373-3391).
gtcacctatggaaggttta

SEQ ID NO: 587004 - DNA, 19 bp, Mus musculus
  siRNA target sequence for Ptpn21 (NM_011877.1,3382-3400).
ggaaggtttaagatcacaa

SEQ ID NO: 587005 - DNA, 19 bp, Mus musculus
  siRNA target sequence for Ptpn21 (NM_011877.1,3434-3452).
ccacaggtttgaagatgaa

SEQ ID NO: 587006 - DNA, 19 bp, Mus musculus
  siRNA target sequence for Ptpn21 (NM_011877.1,3476-3494).
gaaccgtttggcatcttca

SEQ ID NO: 587007 - DNA, 19 bp, Mus musculus
  siRNA target sequence for Ptpn21 (NM_011877.1,3479-3497).
ccgtttggcatcttcagta

SEQ ID NO: 587008 - DNA, 19 bp, Mus musculus
  siRNA target sequence for Ptpn21 (NM_011877.1,3529-3547).
gacctcaaaggatttttat

SEQ ID NO: 587009 - DNA, 19 bp, Mus musculus
  siRNA target sequence for Ptpn21 (NM_011877.1,3532-3550).
ctcaaaggatttttatcct

SEQ ID NO: 587010 - DNA, 19 bp, Mus musculus
  siRNA target sequence for Ptpn21 (NM_011877.1,3567-3585).
gtcagttcgacgtcataca

SEQ ID NO: 587011 - DNA, 19 bp, Mus musculus
  siRNA target sequence for Ptpn21 (NM_011877.1,3569-3587).
cagttcgacgtcatacaaa

SEQ ID NO: 587012 - DNA, 19 bp, Mus musculus
  siRNA target sequence for Ptpn21 (NM_011877.1,3571-3589).
gttcgacgtcatacaaaca

SEQ ID NO: 587013 - DNA, 19 bp, Mus musculus
  siRNA target sequence for Ptpn21 (NM_011877.1,3574-3592).
cgacgtcatacaaacagta

SEQ ID NO: 587014 - DNA, 19 bp, Mus musculus
  siRNA target sequence for Ptpn21 (NM_011877.1,3689-3707).
cctgtctggaacacaatga

SEQ ID NO: 587015 - DNA, 19 bp, Mus musculus
  siRNA target sequence for Ptpn4 (NM_019933.1,99-117).
ggtcgtttgcaacattctt

SEQ ID NO: 587016 - DNA, 19 bp, Mus musculus
  siRNA target sequence for Ptpn4 (NM_019933.1,102-120).
cgtttgcaacattcttctt

SEQ ID NO: 587017 - DNA, 19 bp, Mus musculus
  siRNA target sequence for Ptpn4 (NM_019933.1,144-162).
cagagttaacaaacatgat

SEQ ID NO: 587018 - DNA, 19 bp, Mus musculus
  siRNA target sequence for Ptpn4 (NM_019933.1,166-184).
gggcaagttctgttggata

SEQ ID NO: 587019 - DNA, 19 bp, Mus musculus
  siRNA target sequence for Ptpn4 (NM_019933.1,168-186).
gcaagttctgttggatata

SEQ ID NO: 587020 - DNA, 19 bp, Mus musculus
  siRNA target sequence for Ptpn4 (NM_019933.1,172-190).
gttctgttggatatagtct

SEQ ID NO: 587021 - DNA, 19 bp, Mus musculus
  siRNA target sequence for Ptpn4 (NM_019933.1,187-205).
gtcttcaagcatcttgatt

SEQ ID NO: 587022 - DNA, 19 bp, Mus musculus
  siRNA target sequence for Ptpn4 (NM_019933.1,207-225).
gactgagcgagactatttt

SEQ ID NO: 587023 - DNA, 19 bp, Mus musculus
  siRNA target sequence for Ptpn4 (NM_019933.1,213-231).
gcgagactattttggttta

SEQ ID NO: 587024 - DNA, 19 bp, Mus musculus
  siRNA target sequence for Ptpn4 (NM_019933.1,260-278).
caaggtggctggatccaaa

SEQ ID NO: 587025 - DNA, 19 bp, Mus musculus
  siRNA target sequence for Ptpn4 (NM_019933.1,264-282).
gtggctggatccaaacaaa

SEQ ID NO: 587026 - DNA, 19 bp, Mus musculus
  siRNA target sequence for Ptpn4 (NM_019933.1,270-288).
ggatccaaacaaaccaata

SEQ ID NO: 587027 - DNA, 19 bp, Mus musculus
  siRNA target sequence for Ptpn4 (NM_019933.1,303-321).
gagaggatcaccttacaat

SEQ ID NO: 587028 - DNA, 19 bp, Mus musculus
  siRNA target sequence for Ptpn4 (NM_019933.1,307-325).
ggatcaccttacaatttga

SEQ ID NO: 587029 - DNA, 19 bp, Mus musculus
  siRNA target sequence for Ptpn4 (NM_019933.1,308-326).
gatcaccttacaatttgaa

SEQ ID NO: 587030 - DNA, 19 bp, Mus musculus
  siRNA target sequence for Ptpn4 (NM_019933.1,311-329).
caccttacaatttgaactt

SEQ ID NO: 587031 - DNA, 19 bp, Mus musculus
  siRNA target sequence for Ptpn4 (NM_019933.1,350-368).
gtgaccccaacaagttaca

SEQ ID NO: 587032 - DNA, 19 bp, Mus musculus
  siRNA target sequence for Ptpn4 (NM_019933.1,354-372).
ccccaacaagttacaagaa

SEQ ID NO: 587033 - DNA, 19 bp, Mus musculus
  siRNA target sequence for Ptpn4 (NM_019933.1,363-381).
gttacaagaagagtataca

SEQ ID NO: 587034 - DNA, 19 bp, Mus musculus
  siRNA target sequence for Ptpn4 (NM_019933.1,373-391).
gagtatacaaggtatcagt

SEQ ID NO: 587035 - DNA, 19 bp, Mus musculus
  siRNA target sequence for Ptpn4 (NM_019933.1,380-398).
caaggtatcagtacttttt

SEQ ID NO: 587036 - DNA, 19 bp, Mus musculus
  siRNA target sequence for Ptpn4 (NM_019933.1,383-401).
ggtatcagtactttttgca

SEQ ID NO: 587037 - DNA, 19 bp, Mus musculus
  siRNA target sequence for Ptpn4 (NM_019933.1,388-406).
cagtactttttgcaaatta

SEQ ID NO: 587038 - DNA, 19 bp, Mus musculus
  siRNA target sequence for Ptpn4 (NM_019933.1,428-446).
gattatcctgtccttgtaa

SEQ ID NO: 587039 - DNA, 19 bp, Mus musculus
  siRNA target sequence for Ptpn4 (NM_019933.1,456-474).
ccttttagcatcatttgct

SEQ ID NO: 587040 - DNA, 19 bp, Mus musculus
  siRNA target sequence for Ptpn4 (NM_019933.1,493-511).
gactacaatcagtcagaaa

SEQ ID NO: 587041 - DNA, 19 bp, Mus musculus
  siRNA target sequence for Ptpn4 (NM_019933.1,518-536).
caggctacctctcagatta

SEQ ID NO: 587042 - DNA, 19 bp, Mus musculus
  siRNA target sequence for Ptpn4 (NM_019933.1,520-538).
ggctacctctcagattatt

SEQ ID NO: 587043 - DNA, 19 bp, Mus musculus
  siRNA target sequence for Ptpn4 (NM_019933.1,548-566).
ctaatcaacctcaagattt

SEQ ID NO: 587044 - DNA, 19 bp, Mus musculus
  siRNA target sequence for Ptpn4 (NM_019933.1,553-571).
caacctcaagattttgaga

SEQ ID NO: 587045 - DNA, 19 bp, Mus musculus
  siRNA target sequence for Ptpn4 (NM_019933.1,611-629).
ctcctgcagaagcagaatt

SEQ ID NO: 587046 - DNA, 19 bp, Mus musculus
  siRNA target sequence for Ptpn4 (NM_019933.1,616-634).
gcagaagcagaatttaatt

SEQ ID NO: 587047 - DNA, 19 bp, Mus musculus
  siRNA target sequence for Ptpn4 (NM_019933.1,642-660).
cgcggcacgtaccttagaa

SEQ ID NO: 587048 - DNA, 19 bp, Mus musculus
  siRNA target sequence for Ptpn4 (NM_019933.1,644-662).
cggcacgtaccttagaact

SEQ ID NO: 587049 - DNA, 19 bp, Mus musculus
  siRNA target sequence for Ptpn4 (NM_019933.1,647-665).
cacgtaccttagaactcta

SEQ ID NO: 587050 - DNA, 19 bp, Mus musculus
  siRNA target sequence for Ptpn4 (NM_019933.1,658-676).
gaactctatggagttgaat

SEQ ID NO: 587051 - DNA, 19 bp, Mus musculus
  siRNA target sequence for Ptpn4 (NM_019933.1,679-697).
cactatgcaagggatcaaa

SEQ ID NO: 587052 - DNA, 19 bp, Mus musculus
  siRNA target sequence for Ptpn4 (NM_019933.1,681-699).
ctatgcaagggatcaaagt

SEQ ID NO: 587053 - DNA, 19 bp, Mus musculus
  siRNA target sequence for Ptpn4 (NM_019933.1,685-703).
gcaagggatcaaagtaaca

SEQ ID NO: 587054 - DNA, 19 bp, Mus musculus
  siRNA target sequence for Ptpn4 (NM_019933.1,686-704).
caagggatcaaagtaacaa

SEQ ID NO: 587055 - DNA, 19 bp, Mus musculus
  siRNA target sequence for Ptpn4 (NM_019933.1,726-744).
gtcaggaggaattctgatt

SEQ ID NO: 587056 - DNA, 19 bp, Mus musculus
  siRNA target sequence for Ptpn4 (NM_019933.1,731-749).
gaggaattctgatttataa

SEQ ID NO: 587057 - DNA, 19 bp, Mus musculus
  siRNA target sequence for Ptpn4 (NM_019933.1,733-751).
ggaattctgatttataaga

SEQ ID NO: 587058 - DNA, 19 bp, Mus musculus
  siRNA target sequence for Ptpn4 (NM_019933.1,734-752).
gaattctgatttataagaa

SEQ ID NO: 587059 - DNA, 19 bp, Mus musculus
  siRNA target sequence for Ptpn4 (NM_019933.1,750-768).
gaacagggtacggatgaat

SEQ ID NO: 587060 - DNA, 19 bp, Mus musculus
  siRNA target sequence for Ptpn4 (NM_019933.1,755-773).
gggtacggatgaatacttt

SEQ ID NO: 587061 - DNA, 19 bp, Mus musculus
  siRNA target sequence for Ptpn4 (NM_019933.1,756-774).
ggtacggatgaatactttt

SEQ ID NO: 587062 - DNA, 19 bp, Mus musculus
  siRNA target sequence for Ptpn4 (NM_019933.1,779-797).
ggttgaagattgtaaaaat

SEQ ID NO: 587063 - DNA, 19 bp, Mus musculus
  siRNA target sequence for Ptpn4 (NM_019933.1,809-827).
gcaaacagttttttattca

SEQ ID NO: 587064 - DNA, 19 bp, Mus musculus
  siRNA target sequence for Ptpn4 (NM_019933.1,814-832).
cagttttttattcaactta

SEQ ID NO: 587065 - DNA, 19 bp, Mus musculus
  siRNA target sequence for Ptpn4 (NM_019933.1,816-834).
gttttttattcaacttaga

SEQ ID NO: 587066 - DNA, 19 bp, Mus musculus
  siRNA target sequence for Ptpn4 (NM_019933.1,860-878).
cattactgggatttaatat

SEQ ID NO: 587067 - DNA, 19 bp, Mus musculus
  siRNA target sequence for Ptpn4 (NM_019933.1,906-924).
gtggaaagcgtgtgtagaa

SEQ ID NO: 587068 - DNA, 19 bp, Mus musculus
  siRNA target sequence for Ptpn4 (NM_019933.1,909-927).
gaaagcgtgtgtagaacat

SEQ ID NO: 587069 - DNA, 19 bp, Mus musculus
  siRNA target sequence for Ptpn4 (NM_019933.1,919-937).
gtagaacatcatacattct

SEQ ID NO: 587070 - DNA, 19 bp, Mus musculus
  siRNA target sequence for Ptpn4 (NM_019933.1,1098-1116).
gcctttggcacggaaatta

SEQ ID NO: 587071 - DNA, 19 bp, Mus musculus
  siRNA target sequence for Ptpn4 (NM_019933.1,1099-1117).
cctttggcacggaaattaa

SEQ ID NO: 587072 - DNA, 19 bp, Mus musculus
  siRNA target sequence for Ptpn4 (NM_019933.1,1100-1118).
ctttggcacggaaattaat

SEQ ID NO: 587073 - DNA, 19 bp, Mus musculus
  siRNA target sequence for Ptpn4 (NM_019933.1,1104-1122).
ggcacggaaattaatggat

SEQ ID NO: 587074 - DNA, 19 bp, Mus musculus
  siRNA target sequence for Ptpn4 (NM_019933.1,1105-1123).
gcacggaaattaatggatt

SEQ ID NO: 587075 - DNA, 19 bp, Mus musculus
  siRNA target sequence for Ptpn4 (NM_019933.1,1134-1152).
cagcagaaattcattatct

SEQ ID NO: 587076 - DNA, 19 bp, Mus musculus
  siRNA target sequence for Ptpn4 (NM_019933.1,1204-1222).
cccaaccatcggaattctt

SEQ ID NO: 587077 - DNA, 19 bp, Mus musculus
  siRNA target sequence for Ptpn4 (NM_019933.1,1253-1271).
cgtcttcagttggtcattt

SEQ ID NO: 587078 - DNA, 19 bp, Mus musculus
  siRNA target sequence for Ptpn4 (NM_019933.1,1293-1311).
gtcccccagtgaggatttt

SEQ ID NO: 587079 - DNA, 19 bp, Mus musculus
  siRNA target sequence for Ptpn4 (NM_019933.1,1295-1313).
cccccagtgaggattttgt

SEQ ID NO: 587080 - DNA, 19 bp, Mus musculus
  siRNA target sequence for Ptpn4 (NM_019933.1,1299-1317).
cagtgaggattttgtaagt

SEQ ID NO: 587081 - DNA, 19 bp, Mus musculus
  siRNA target sequence for Ptpn4 (NM_019933.1,1328-1346).
catcatcaacgcaagctaa

SEQ ID NO: 587082 - DNA, 19 bp, Mus musculus
  siRNA target sequence for Ptpn4 (NM_019933.1,1334-1352).
caacgcaagctaatagcat

SEQ ID NO: 587083 - DNA, 19 bp, Mus musculus
  siRNA target sequence for Ptpn4 (NM_019933.1,1338-1356).
gcaagctaatagcatagtt

SEQ ID NO: 587084 - DNA, 19 bp, Mus musculus
  siRNA target sequence for Ptpn4 (NM_019933.1,1395-1413).
gcagccaccagctttacca

SEQ ID NO: 587085 - DNA, 19 bp, Mus musculus
  siRNA target sequence for Ptpn4 (NM_019933.1,1477-1495).
gtcacccatactaatgaat

SEQ ID NO: 587086 - DNA, 19 bp, Mus musculus
  siRNA target sequence for Ptpn4 (NM_019933.1,1481-1499).
cccatactaatgaatcctt

SEQ ID NO: 587087 - DNA, 19 bp, Mus musculus
  siRNA target sequence for Ptpn4 (NM_019933.1,1537-1555).
ggtggcattccacatgata

SEQ ID NO: 587088 - DNA, 19 bp, Mus musculus
  siRNA target sequence for Ptpn4 (NM_019933.1,1538-1556).
gtggcattccacatgataa

SEQ ID NO: 587089 - DNA, 19 bp, Mus musculus
  siRNA target sequence for Ptpn4 (NM_019933.1,1549-1567).
catgataaccttgttctaa

SEQ ID NO: 587090 - DNA, 19 bp, Mus musculus
  siRNA target sequence for Ptpn4 (NM_019933.1,1702-1720).
ggggaccaagtggtactaa

SEQ ID NO: 587091 - DNA, 19 bp, Mus musculus
  siRNA target sequence for Ptpn4 (NM_019933.1,1703-1721).
gggaccaagtggtactaat

SEQ ID NO: 587092 - DNA, 19 bp, Mus musculus
  siRNA target sequence for Ptpn4 (NM_019933.1,1704-1722).
ggaccaagtggtactaata

SEQ ID NO: 587093 - DNA, 19 bp, Mus musculus
  siRNA target sequence for Ptpn4 (NM_019933.1,1705-1723).
gaccaagtggtactaataa

SEQ ID NO: 587094 - DNA, 19 bp, Mus musculus
  siRNA target sequence for Ptpn4 (NM_019933.1,1729-1747).
cgggacattgcagaacata

SEQ ID NO: 587095 - DNA, 19 bp, Mus musculus
  siRNA target sequence for Ptpn4 (NM_019933.1,1777-1795).
gctagctgtgagaaacatt

SEQ ID NO: 587096 - DNA, 19 bp, Mus musculus
  siRNA target sequence for Ptpn4 (NM_019933.1,1812-1830).
cctagtccgacctaatgct

SEQ ID NO: 587097 - DNA, 19 bp, Mus musculus
  siRNA target sequence for Ptpn4 (NM_019933.1,1818-1836).
ccgacctaatgctgtatat

SEQ ID NO: 587098 - DNA, 19 bp, Mus musculus
  siRNA target sequence for Ptpn4 (NM_019933.1,1820-1838).
gacctaatgctgtatatga

SEQ ID NO: 587099 - DNA, 19 bp, Mus musculus
  siRNA target sequence for Ptpn4 (NM_019933.1,1864-1882).
gaaccagacttccagtata

SEQ ID NO: 587100 - DNA, 19 bp, Mus musculus
  siRNA target sequence for Ptpn4 (NM_019933.1,1888-1906).
gagaaagccccactagata

SEQ ID NO: 587101 - DNA, 19 bp, Mus musculus
  siRNA target sequence for Ptpn4 (NM_019933.1,1890-1908).
gaaagccccactagatagt

SEQ ID NO: 587102 - DNA, 19 bp, Mus musculus
  siRNA target sequence for Ptpn4 (NM_019933.1,1962-1980).
gcttatcactggaacagta

SEQ ID NO: 587103 - DNA, 19 bp, Mus musculus
  siRNA target sequence for Ptpn4 (NM_019933.1,1985-2003).
cacagtttgatcaactcta

SEQ ID NO: 587104 - DNA, 19 bp, Mus musculus
  siRNA target sequence for Ptpn4 (NM_019933.1,2024-2042).
caatgtcttgtgccaaatt

SEQ ID NO: 587105 - DNA, 19 bp, Mus musculus
  siRNA target sequence for Ptpn4 (NM_019933.1,2028-2046).
gtcttgtgccaaattacct

SEQ ID NO: 587106 - DNA, 19 bp, Mus musculus
  siRNA target sequence for Ptpn4 (NM_019933.1,2072-2090).
gagatatttcaccttatga

SEQ ID NO: 587107 - DNA, 19 bp, Mus musculus
  siRNA target sequence for Ptpn4 (NM_019933.1,2092-2110).
gctacacgggtccttttaa

SEQ ID NO: 587108 - DNA, 19 bp, Mus musculus
  siRNA target sequence for Ptpn4 (NM_019933.1,2093-2111).
ctacacgggtccttttaaa

SEQ ID NO: 587109 - DNA, 19 bp, Mus musculus
  siRNA target sequence for Ptpn4 (NM_019933.1,2113-2131).
ggtaatgaagactacatca

SEQ ID NO: 587110 - DNA, 19 bp, Mus musculus
  siRNA target sequence for Ptpn4 (NM_019933.1,2152-2170).
gaaattccttcttcaagta

SEQ ID NO: 587111 - DNA, 19 bp, Mus musculus
  siRNA target sequence for Ptpn4 (NM_019933.1,2158-2176).
ccttcttcaagtattataa

SEQ ID NO: 587112 - DNA, 19 bp, Mus musculus
  siRNA target sequence for Ptpn4 (NM_019933.1,2200-2218).
ccattaccacacacttgta

SEQ ID NO: 587113 - DNA, 19 bp, Mus musculus
  siRNA target sequence for Ptpn4 (NM_019933.1,2201-2219).
cattaccacacacttgtaa

SEQ ID NO: 587114 - DNA, 19 bp, Mus musculus
  siRNA target sequence for Ptpn4 (NM_019933.1,2281-2299).
gttgaacgtggcagagtta

SEQ ID NO: 587115 - DNA, 19 bp, Mus musculus
  siRNA target sequence for Ptpn4 (NM_019933.1,2284-2302).
gaacgtggcagagttaaat

SEQ ID NO: 587116 - DNA, 19 bp, Mus musculus
  siRNA target sequence for Ptpn4 (NM_019933.1,2325-2343).
ctcagaaagctcatcctat

SEQ ID NO: 587117 - DNA, 19 bp, Mus musculus
  siRNA target sequence for Ptpn4 (NM_019933.1,2334-2352).
ctcatcctatggatgctat

SEQ ID NO: 587118 - DNA, 19 bp, Mus musculus
  siRNA target sequence for Ptpn4 (NM_019933.1,2377-2395).
ggaaaccctgcctatatct

SEQ ID NO: 587119 - DNA, 19 bp, Mus musculus
  siRNA target sequence for Ptpn4 (NM_019933.1,2378-2396).
gaaaccctgcctatatctt

SEQ ID NO: 587120 - DNA, 19 bp, Mus musculus
  siRNA target sequence for Ptpn4 (NM_019933.1,2438-2456).
gtcaacttactcagattca

SEQ ID NO: 587121 - DNA, 19 bp, Mus musculus
  siRNA target sequence for Ptpn4 (NM_019933.1,2440-2458).
caacttactcagattcagt

SEQ ID NO: 587122 - DNA, 19 bp, Mus musculus
  siRNA target sequence for Ptpn4 (NM_019933.1,2476-2494).
catggagtacctgatgatt

SEQ ID NO: 587123 - DNA, 19 bp, Mus musculus
  siRNA target sequence for Ptpn4 (NM_019933.1,2495-2513).
cgagtgactttctggattt

SEQ ID NO: 587124 - DNA, 19 bp, Mus musculus
  siRNA target sequence for Ptpn4 (NM_019933.1,2585-2603).
gaaggactggggttcttat

SEQ ID NO: 587125 - DNA, 19 bp, Mus musculus
  siRNA target sequence for Ptpn4 (NM_019933.1,2591-2609).
ctggggttcttattactat

SEQ ID NO: 587126 - DNA, 19 bp, Mus musculus
  siRNA target sequence for Ptpn4 (NM_019933.1,2595-2613).
ggttcttattactatggaa

SEQ ID NO: 587127 - DNA, 19 bp, Mus musculus
  siRNA target sequence for Ptpn4 (NM_019933.1,2596-2614).
gttcttattactatggaaa

SEQ ID NO: 587128 - DNA, 19 bp, Mus musculus
  siRNA target sequence for Ptpn4 (NM_019933.1,2617-2635).
gccatgtgtctcattgaat

SEQ ID NO: 587129 - DNA, 19 bp, Mus musculus
  siRNA target sequence for Ptpn4 (NM_019933.1,2678-2696).
gagatcaaagagcaatgat

SEQ ID NO: 587130 - DNA, 19 bp, Mus musculus
  siRNA target sequence for Ptpn4 (NM_019933.1,2697-2715).
gatccaaacacctagtcaa

SEQ ID NO: 587131 - DNA, 19 bp, Mus musculus
  siRNA target sequence for Ptpn4 (NM_019933.1,2731-2749).
gaagctattctgaaagttt

SEQ ID NO: 587132 - DNA, 19 bp, Mus musculus
  siRNA target sequence for Ptpn4 (NM_019933.1,2755-2773).
gaaggatttgttaaaccat

SEQ ID NO: 587133 - DNA, 19 bp, Mus musculus
  siRNA target sequence for Ptpn4 (NM_019933.1,2764-2782).
gttaaaccattaacaacat

SEQ ID NO: 587134 - DNA, 19 bp, Mus musculus
  siRNA target sequence for Ptpn5 (NM_013643.1,785-803).
cctcgctcacagtgttgaa

SEQ ID NO: 587135 - DNA, 19 bp, Mus musculus
  siRNA target sequence for Ptpn5 (NM_013643.1,1053-1071).
gcccgagacacctgtgttt

SEQ ID NO: 587136 - DNA, 19 bp, Mus musculus
  siRNA target sequence for Ptpn5 (NM_013643.1,1055-1073).
ccgagacacctgtgtttga

SEQ ID NO: 587137 - DNA, 19 bp, Mus musculus
  siRNA target sequence for Ptpn5 (NM_013643.1,1057-1075).
gagacacctgtgtttgact

SEQ ID NO: 587138 - DNA, 19 bp, Mus musculus
  siRNA target sequence for Ptpn5 (NM_013643.1,1317-1335).
gctgcaggcggaattcttt

SEQ ID NO: 587139 - DNA, 19 bp, Mus musculus
  siRNA target sequence for Ptpn5 (NM_013643.1,1357-1375).
gatccaaaagagtatgaca

SEQ ID NO: 587140 - DNA, 19 bp, Mus musculus
  siRNA target sequence for Ptpn5 (NM_013643.1,1389-1407).
gcggaagaatcggtacaaa

SEQ ID NO: 587141 - DNA, 19 bp, Mus musculus
  siRNA target sequence for Ptpn5 (NM_013643.1,1390-1408).
cggaagaatcggtacaaaa

SEQ ID NO: 587142 - DNA, 19 bp, Mus musculus
  siRNA target sequence for Ptpn5 (NM_013643.1,1595-1613).
cacccatcatcgtcatgat

SEQ ID NO: 587143 - DNA, 19 bp, Mus musculus
  siRNA target sequence for Ptpn5 (NM_013643.1,1616-1634).
ccaacatcgaggagatgaa

SEQ ID NO: 587144 - DNA, 19 bp, Mus musculus
  siRNA target sequence for Ptpn5 (NM_013643.1,1636-1654).
gagaagtgcacagaatact

SEQ ID NO: 587145 - DNA, 19 bp, Mus musculus
  siRNA target sequence for Ptpn5 (NM_013643.1,1870-1888).
caagagggaccccattgtt

SEQ ID NO: 587146 - DNA, 19 bp, Mus musculus
  siRNA target sequence for Ptpn5 (NM_013643.1,2045-2063).
gcgaacagtaccagtttgt

SEQ ID NO: 587147 - DNA, 19 bp, Mus musculus
  siRNA target sequence for Ptpn8 (NM_008979.1,210-228).
ggcaatccaccaagtacaa

SEQ ID NO: 587148 - DNA, 19 bp, Mus musculus
  siRNA target sequence for Ptpn8 (NM_008979.1,226-244).
caaggccgacaaaatctat

SEQ ID NO: 587149 - DNA, 19 bp, Mus musculus
  siRNA target sequence for Ptpn8 (NM_008979.1,230-248).
gccgacaaaatctatccta

SEQ ID NO: 587150 - DNA, 19 bp, Mus musculus
  siRNA target sequence for Ptpn8 (NM_008979.1,257-275).
gctcagaggcccaagaata

SEQ ID NO: 587151 - DNA, 19 bp, Mus musculus
  siRNA target sequence for Ptpn8 (NM_008979.1,260-278).
cagaggcccaagaatatca

SEQ ID NO: 587152 - DNA, 19 bp, Mus musculus
  siRNA target sequence for Ptpn8 (NM_008979.1,347-365).
gatgaggattccagttata

SEQ ID NO: 587153 - DNA, 19 bp, Mus musculus
  siRNA target sequence for Ptpn8 (NM_008979.1,352-370).
ggattccagttatatcaat

SEQ ID NO: 587154 - DNA, 19 bp, Mus musculus
  siRNA target sequence for Ptpn8 (NM_008979.1,398-416).
cccaaggcttatattgcta

SEQ ID NO: 587155 - DNA, 19 bp, Mus musculus
  siRNA target sequence for Ptpn8 (NM_008979.1,413-431).
gctacccagggtcctttat

SEQ ID NO: 587156 - DNA, 19 bp, Mus musculus
  siRNA target sequence for Ptpn8 (NM_008979.1,418-436).
ccagggtcctttatctaca

SEQ ID NO: 587157 - DNA, 19 bp, Mus musculus
  siRNA target sequence for Ptpn8 (NM_008979.1,493-511).
ggcatgtatggagtttgaa

SEQ ID NO: 587158 - DNA, 19 bp, Mus musculus
  siRNA target sequence for Ptpn8 (NM_008979.1,552-570).
gagaaacgcagctgcaatt

SEQ ID NO: 587159 - DNA, 19 bp, Mus musculus
  siRNA target sequence for Ptpn8 (NM_008979.1,565-583).
gcaatttggccccttttct

SEQ ID NO: 587160 - DNA, 19 bp, Mus musculus
  siRNA target sequence for Ptpn8 (NM_008979.1,566-584).
caatttggccccttttcta

SEQ ID NO: 587161 - DNA, 19 bp, Mus musculus
  siRNA target sequence for Ptpn8 (NM_008979.1,572-590).
ggccccttttctatatcct

SEQ ID NO: 587162 - DNA, 19 bp, Mus musculus
  siRNA target sequence for Ptpn8 (NM_008979.1,601-619).
gaaaaagaaatctgattat

SEQ ID NO: 587163 - DNA, 19 bp, Mus musculus
  siRNA target sequence for Ptpn8 (NM_008979.1,637-655).
ggccaagttcaataatgaa

SEQ ID NO: 587164 - DNA, 19 bp, Mus musculus
  siRNA target sequence for Ptpn8 (NM_008979.1,638-656).
gccaagttcaataatgaaa

SEQ ID NO: 587165 - DNA, 19 bp, Mus musculus
  siRNA target sequence for Ptpn8 (NM_008979.1,660-678).
gaattatttaccagtttca

SEQ ID NO: 587166 - DNA, 19 bp, Mus musculus
  siRNA target sequence for Ptpn8 (NM_008979.1,711-729).
catctatagaccctattct

SEQ ID NO: 587167 - DNA, 19 bp, Mus musculus
  siRNA target sequence for Ptpn8 (NM_008979.1,742-760).
ggatatgcgttgttaccaa

SEQ ID NO: 587168 - DNA, 19 bp, Mus musculus
  siRNA target sequence for Ptpn8 (NM_008979.1,767-785).
gactgtgttcctatatgca

SEQ ID NO: 587169 - DNA, 19 bp, Mus musculus
  siRNA target sequence for Ptpn8 (NM_008979.1,853-871).
gaaagatgggataattcct

SEQ ID NO: 587170 - DNA, 19 bp, Mus musculus
  siRNA target sequence for Ptpn8 (NM_008979.1,861-879).
ggataattcctaagaactt

SEQ ID NO: 587171 - DNA, 19 bp, Mus musculus
  siRNA target sequence for Ptpn8 (NM_008979.1,919-937).
gccttcgctagttcaaact

SEQ ID NO: 587172 - DNA, 19 bp, Mus musculus
  siRNA target sequence for Ptpn8 (NM_008979.1,921-939).
cttcgctagttcaaactca

SEQ ID NO: 587173 - DNA, 19 bp, Mus musculus
  siRNA target sequence for Ptpn8 (NM_008979.1,965-983).
gctgtgttagagctgttta

SEQ ID NO: 587174 - DNA, 19 bp, Mus musculus
  siRNA target sequence for Ptpn8 (NM_008979.1,1085-1103).
cctctggatttaccaaaaa

SEQ ID NO: 587175 - DNA, 19 bp, Mus musculus
  siRNA target sequence for Ptpn8 (NM_008979.1,1086-1104).
ctctggatttaccaaaaaa

SEQ ID NO: 587176 - DNA, 19 bp, Mus musculus
  siRNA target sequence for Ptpn8 (NM_008979.1,1105-1123).
cgccatgagggatgtgaaa

SEQ ID NO: 587177 - DNA, 19 bp, Mus musculus
  siRNA target sequence for Ptpn8 (NM_008979.1,1125-1143).
cgacaaaccagcatagcaa

SEQ ID NO: 587178 - DNA, 19 bp, Mus musculus
  siRNA target sequence for Ptpn8 (NM_008979.1,1208-1226).
gccgaggaagagttggttt

SEQ ID NO: 587179 - DNA, 19 bp, Mus musculus
  siRNA target sequence for Ptpn8 (NM_008979.1,1223-1241).
gttttgcactcggctaaat

SEQ ID NO: 587180 - DNA, 19 bp, Mus musculus
  siRNA target sequence for Ptpn8 (NM_008979.1,1245-1263).
gcccttcttttaactgttt

SEQ ID NO: 587181 - DNA, 19 bp, Mus musculus
  siRNA target sequence for Ptpn8 (NM_008979.1,1342-1360).
gccccttcagaagtatcaa

SEQ ID NO: 587182 - DNA, 19 bp, Mus musculus
  siRNA target sequence for Ptpn8 (NM_008979.1,1398-1416).
ctagtgctctgcccataaa

SEQ ID NO: 587183 - DNA, 19 bp, Mus musculus
  siRNA target sequence for Ptpn8 (NM_008979.1,1421-1439).
gcggacaggtatcacaatt

SEQ ID NO: 587184 - DNA, 19 bp, Mus musculus
  siRNA target sequence for Ptpn8 (NM_008979.1,1448-1466).
ccggtaaaacggaccaaat

SEQ ID NO: 587185 - DNA, 19 bp, Mus musculus
  siRNA target sequence for Ptpn8 (NM_008979.1,1450-1468).
ggtaaaacggaccaaatca

SEQ ID NO: 587186 - DNA, 19 bp, Mus musculus
  siRNA target sequence for Ptpn8 (NM_008979.1,1451-1469).
gtaaaacggaccaaatcaa

SEQ ID NO: 587187 - DNA, 19 bp, Mus musculus
  siRNA target sequence for Ptpn8 (NM_008979.1,1467-1485).
caactccctttgaactgat

SEQ ID NO: 587188 - DNA, 19 bp, Mus musculus
  siRNA target sequence for Ptpn8 (NM_008979.1,1511-1529).
gccgtgggagacggttttt

SEQ ID NO: 587189 - DNA, 19 bp, Mus musculus
  siRNA target sequence for Ptpn8 (NM_008979.1,1513-1531).
cgtgggagacggtttttca

SEQ ID NO: 587190 - DNA, 19 bp, Mus musculus
  siRNA target sequence for Ptpn8 (NM_008979.1,1542-1560).
ctcagctgcatgagcatta

SEQ ID NO: 587191 - DNA, 19 bp, Mus musculus
  siRNA target sequence for Ptpn8 (NM_008979.1,1546-1564).
gctgcatgagcattacagt

SEQ ID NO: 587192 - DNA, 19 bp, Mus musculus
  siRNA target sequence for Ptpn8 (NM_008979.1,1602-1620).
cttcagaagagctgaatta

SEQ ID NO: 587193 - DNA, 19 bp, Mus musculus
  siRNA target sequence for Ptpn8 (NM_008979.1,1698-1716).
ctttagcggaagatcctta

SEQ ID NO: 587194 - DNA, 19 bp, Mus musculus
  siRNA target sequence for Ptpn8 (NM_008979.1,1703-1721).
gcggaagatccttattttt

SEQ ID NO: 587195 - DNA, 19 bp, Mus musculus
  siRNA target sequence for Ptpn8 (NM_008979.1,1705-1723).
ggaagatccttatttttca

SEQ ID NO: 587196 - DNA, 19 bp, Mus musculus
  siRNA target sequence for Ptpn8 (NM_008979.1,1706-1724).
gaagatccttatttttcat

SEQ ID NO: 587197 - DNA, 19 bp, Mus musculus
  siRNA target sequence for Ptpn8 (NM_008979.1,1734-1752).
cgaatagtgctgattcgaa

SEQ ID NO: 587198 - DNA, 19 bp, Mus musculus
  siRNA target sequence for Ptpn8 (NM_008979.1,1743-1761).
ctgattcgaagatgtcttt

SEQ ID NO: 587199 - DNA, 19 bp, Mus musculus
  siRNA target sequence for Ptpn8 (NM_008979.1,1791-1809).
cttcccctggcgctctatt

SEQ ID NO: 587200 - DNA, 19 bp, Mus musculus
  siRNA target sequence for Ptpn8 (NM_008979.1,1805-1823).
ctattgccagcctcttcta

SEQ ID NO: 587201 - DNA, 19 bp, Mus musculus
  siRNA target sequence for Ptpn8 (NM_008979.1,1821-1839).
ctacaacctccttctttta

SEQ ID NO: 587202 - DNA, 19 bp, Mus musculus
  siRNA target sequence for Ptpn8 (NM_008979.1,1848-1866).
cacacgactccctagtgat

SEQ ID NO: 587203 - DNA, 19 bp, Mus musculus
  siRNA target sequence for Ptpn8 (NM_008979.1,1853-1871).
gactccctagtgatgaaca

SEQ ID NO: 587204 - DNA, 19 bp, Mus musculus
  siRNA target sequence for Ptpn8 (NM_008979.1,1881-1899).
gcttttccccaccgttaaa

SEQ ID NO: 587205 - DNA, 19 bp, Mus musculus
  siRNA target sequence for Ptpn8 (NM_008979.1,1967-1985).
cggacacccgagtctttta

SEQ ID NO: 587206 - DNA, 19 bp, Mus musculus
  siRNA target sequence for Ptpn8 (NM_008979.1,1968-1986).
ggacacccgagtcttttat

SEQ ID NO: 587207 - DNA, 19 bp, Mus musculus
  siRNA target sequence for Ptpn8 (NM_008979.1,1969-1987).
gacacccgagtcttttatt

SEQ ID NO: 587208 - DNA, 19 bp, Mus musculus
  siRNA target sequence for Ptpn8 (NM_008979.1,2137-2155).
ccgaagtcccaaatcagat

SEQ ID NO: 587209 - DNA, 19 bp, Mus musculus
  siRNA target sequence for Ptpn8 (NM_008979.1,2240-2258).
gcccaagccgtgcaaactt

SEQ ID NO: 587210 - DNA, 19 bp, Mus musculus
  siRNA target sequence for Ptpn8 (NM_008979.1,2242-2260).
ccaagccgtgcaaacttct

SEQ ID NO: 587211 - DNA, 19 bp, Mus musculus
  siRNA target sequence for Ptpn8 (NM_008979.1,2243-2261).
caagccgtgcaaacttctt

SEQ ID NO: 587212 - DNA, 19 bp, Mus musculus
  siRNA target sequence for Ptpn8 (NM_008979.1,2246-2264).
gccgtgcaaacttcttcta

SEQ ID NO: 587213 - DNA, 19 bp, Mus musculus
  siRNA target sequence for Ptpn8 (NM_008979.1,2248-2266).
cgtgcaaacttcttctact

SEQ ID NO: 587214 - DNA, 19 bp, Mus musculus
  siRNA target sequence for Ptpn8 (NM_008979.1,2249-2267).
gtgcaaacttcttctacta

SEQ ID NO: 587215 - DNA, 19 bp, Mus musculus
  siRNA target sequence for Ptpn8 (NM_008979.1,2285-2303).
gagaactccacatcttcta

SEQ ID NO: 587216 - DNA, 19 bp, Mus musculus
  siRNA target sequence for Ptpn8 (NM_008979.1,2287-2305).
gaactccacatcttctaaa

SEQ ID NO: 587217 - DNA, 19 bp, Mus musculus
  siRNA target sequence for Ptpn8 (NM_008979.1,2321-2339).
cctggaaaaagtttcacaa

SEQ ID NO: 587218 - DNA, 19 bp, Mus musculus
  siRNA target sequence for Ptpn8 (NM_008979.1,2356-2374).
gatttttcgaaatatgaaa

SEQ ID NO: 587219 - DNA, 19 bp, Mus musculus
  siRNA target sequence for Ptpn8 (NM_008979.1,2414-2432).
gaacgtgttcagccaaaaa

SEQ ID NO: 587220 - DNA, 19 bp, Mus musculus
  siRNA target sequence for Ptpn8 (NM_008979.1,2417-2435).
cgtgttcagccaaaaaatt

SEQ ID NO: 587221 - DNA, 19 bp, Mus musculus
  siRNA target sequence for Ptpn8 (NM_008979.1,2456-2474).
ggtttcggaaatcgttttt

SEQ ID NO: 587222 - DNA, 19 bp, Mus musculus
  siRNA target sequence for Ptpn8 (NM_008979.1,2497-2515).
cccgccatcagcttggaat

SEQ ID NO: 587223 - DNA, 19 bp, Mus musculus
  siRNA target sequence for Ptpn8 (NM_008979.1,2498-2516).
ccgccatcagcttggaata

SEQ ID NO: 587224 - DNA, 19 bp, Mus musculus
  siRNA target sequence for Ptpra (NM_008980.1,52-70).
gtttggcagtggtctaata

SEQ ID NO: 587225 - DNA, 19 bp, Mus musculus
  siRNA target sequence for Ptpra (NM_008980.1,58-76).
cagtggtctaatacatgtt

SEQ ID NO: 587226 - DNA, 19 bp, Mus musculus
  siRNA target sequence for Ptpra (NM_008980.1,74-92).
gttagtgccaacaatgcta

SEQ ID NO: 587227 - DNA, 19 bp, Mus musculus
  siRNA target sequence for Ptpra (NM_008980.1,98-116).
gtttcaccttctttaggaa

SEQ ID NO: 587228 - DNA, 19 bp, Mus musculus
  siRNA target sequence for Ptpra (NM_008980.1,108-126).
ctttaggaacgacaagatt

SEQ ID NO: 587229 - DNA, 19 bp, Mus musculus
  siRNA target sequence for Ptpra (NM_008980.1,113-131).
ggaacgacaagattaatta

SEQ ID NO: 587230 - DNA, 19 bp, Mus musculus
  siRNA target sequence for Ptpra (NM_008980.1,114-132).
gaacgacaagattaattaa

SEQ ID NO: 587231 - DNA, 19 bp, Mus musculus
  siRNA target sequence for Ptpra (NM_008980.1,183-201).
cctcttcagtaatttctct

SEQ ID NO: 587232 - DNA, 19 bp, Mus musculus
  siRNA target sequence for Ptpra (NM_008980.1,334-352).
gaacggaagctggcttatt

SEQ ID NO: 587233 - DNA, 19 bp, Mus musculus
  siRNA target sequence for Ptpra (NM_008980.1,339-357).
gaagctggcttattgagaa

SEQ ID NO: 587234 - DNA, 19 bp, Mus musculus
  siRNA target sequence for Ptpra (NM_008980.1,361-379).
gttcacggatgccataaca

SEQ ID NO: 587235 - DNA, 19 bp, Mus musculus
  siRNA target sequence for Ptpra (NM_008980.1,364-382).
cacggatgccataacagaa

SEQ ID NO: 587236 - DNA, 19 bp, Mus musculus
  siRNA target sequence for Ptpra (NM_008980.1,477-495).
cctctctgctagtaatcgt

SEQ ID NO: 587237 - DNA, 19 bp, Mus musculus
  siRNA target sequence for Ptpra (NM_008980.1,482-500).
ctgctagtaatcgtgttta

SEQ ID NO: 587238 - DNA, 19 bp, Mus musculus
  siRNA target sequence for Ptpra (NM_008980.1,484-502).
gctagtaatcgtgtttatt

SEQ ID NO: 587239 - DNA, 19 bp, Mus musculus
  siRNA target sequence for Ptpra (NM_008980.1,485-503).
ctagtaatcgtgtttatta

SEQ ID NO: 587240 - DNA, 19 bp, Mus musculus
  siRNA target sequence for Ptpra (NM_008980.1,488-506).
gtaatcgtgtttattatca

SEQ ID NO: 587241 - DNA, 19 bp, Mus musculus
  siRNA target sequence for Ptpra (NM_008980.1,493-511).
cgtgtttattatcatagtt

SEQ ID NO: 587242 - DNA, 19 bp, Mus musculus
  siRNA target sequence for Ptpra (NM_008980.1,509-527).
gttctgtacatgttaaggt

SEQ ID NO: 587243 - DNA, 19 bp, Mus musculus
  siRNA target sequence for Ptpra (NM_008980.1,512-530).
ctgtacatgttaaggttta

SEQ ID NO: 587244 - DNA, 19 bp, Mus musculus
  siRNA target sequence for Ptpra (NM_008980.1,548-566).
gggagtcattccaactctt

SEQ ID NO: 587245 - DNA, 19 bp, Mus musculus
  siRNA target sequence for Ptpra (NM_008980.1,549-567).
ggagtcattccaactcttt

SEQ ID NO: 587246 - DNA, 19 bp, Mus musculus
  siRNA target sequence for Ptpra (NM_008980.1,796-814).
ggaaaaaaaccgctatgta

SEQ ID NO: 587247 - DNA, 19 bp, Mus musculus
  siRNA target sequence for Ptpra (NM_008980.1,797-815).
gaaaaaaaccgctatgtaa

SEQ ID NO: 587248 - DNA, 19 bp, Mus musculus
  siRNA target sequence for Ptpra (NM_008980.1,972-990).
gggtcccagattctgatta

SEQ ID NO: 587249 - DNA, 19 bp, Mus musculus
  siRNA target sequence for Ptpra (NM_008980.1,974-992).
gtcccagattctgattaca

SEQ ID NO: 587250 - DNA, 19 bp, Mus musculus
  siRNA target sequence for Ptpra (NM_008980.1,1356-1374).
caattggcatgctcaagtt

SEQ ID NO: 587251 - DNA, 19 bp, Mus musculus
  siRNA target sequence for Ptpra (NM_008980.1,1499-1517).
gaacgcaaagtggatgtat

SEQ ID NO: 587252 - DNA, 19 bp, Mus musculus
  siRNA target sequence for Ptpra (NM_008980.1,1511-1529).
gatgtatacgggtttgtga

SEQ ID NO: 587253 - DNA, 19 bp, Mus musculus
  siRNA target sequence for Ptpra (NM_008980.1,1596-1614).
cccttctggagcattatct

SEQ ID NO: 587254 - DNA, 19 bp, Mus musculus
  siRNA target sequence for Ptpra (NM_008980.1,1653-1671).
cccacctacaaaaaattta

SEQ ID NO: 587255 - DNA, 19 bp, Mus musculus
  siRNA target sequence for Ptpra (NM_008980.1,1700-1718).
gggttagaggaggagttta

SEQ ID NO: 587256 - DNA, 19 bp, Mus musculus
  siRNA target sequence for Ptpra (NM_008980.1,1753-1771).
gatgcgcacgggaaacctt

SEQ ID NO: 587257 - DNA, 19 bp, Mus musculus
  siRNA target sequence for Ptpra (NM_008980.1,1792-1810).
ccgggttttacagatcatt

SEQ ID NO: 587258 - DNA, 19 bp, Mus musculus
  siRNA target sequence for Ptpra (NM_008980.1,1856-1874).
gagaacacagactatgtga

SEQ ID NO: 587259 - DNA, 19 bp, Mus musculus
  siRNA target sequence for Ptpra (NM_008980.1,1892-1910).
ggataccggcagaaagact

SEQ ID NO: 587260 - DNA, 19 bp, Mus musculus
  siRNA target sequence for Ptpra (NM_008980.1,1900-1918).
gcagaaagactcctacatt

SEQ ID NO: 587261 - DNA, 19 bp, Mus musculus
  siRNA target sequence for Ptpra (NM_008980.1,1978-1996).
gaagtcctgttctatcgta

SEQ ID NO: 587262 - DNA, 19 bp, Mus musculus
  siRNA target sequence for Ptpra (NM_008980.1,1983-2001).
cctgttctatcgtaatgct

SEQ ID NO: 587263 - DNA, 19 bp, Mus musculus
  siRNA target sequence for Ptpra (NM_008980.1,2219-2237).
gacggcaagggcatgatca

SEQ ID NO: 587264 - DNA, 19 bp, Mus musculus
  siRNA target sequence for Ptpra (NM_008980.1,2223-2241).
gcaagggcatgatcaacat

SEQ ID NO: 587265 - DNA, 19 bp, Mus musculus
  siRNA target sequence for Ptpra (NM_008980.1,2476-2494).
gtacattgacgccttttca

SEQ ID NO: 587266 - DNA, 19 bp, Mus musculus
  siRNA target sequence for Ptpra (NM_008980.1,2495-2513).
gattatgccaacttcaagt

SEQ ID NO: 587267 - DNA, 19 bp, Mus musculus
  siRNA target sequence for Ptprb (NM_029928.1,149-167).
ctaacggccttgtggataa

SEQ ID NO: 587268 - DNA, 19 bp, Mus musculus
  siRNA target sequence for Ptprb (NM_029928.1,153-171).
cggccttgtggataacact

SEQ ID NO: 587269 - DNA, 19 bp, Mus musculus
  siRNA target sequence for Ptprb (NM_029928.1,189-207).
gagtggcagagcaagtgaa

SEQ ID NO: 587270 - DNA, 19 bp, Mus musculus
  siRNA target sequence for Ptprb (NM_029928.1,193-211).
ggcagagcaagtgaaatgt

SEQ ID NO: 587271 - DNA, 19 bp, Mus musculus
  siRNA target sequence for Ptprb (NM_029928.1,194-212).
gcagagcaagtgaaatgta

SEQ ID NO: 587272 - DNA, 19 bp, Mus musculus
  siRNA target sequence for Ptprb (NM_029928.1,339-357).
ctattcggatagacaactt

SEQ ID NO: 587273 - DNA, 19 bp, Mus musculus
  siRNA target sequence for Ptprb (NM_029928.1,344-362).
cggatagacaactttacct

SEQ ID NO: 587274 - DNA, 19 bp, Mus musculus
  siRNA target sequence for Ptprb (NM_029928.1,386-404).
caagcagggaccgtctata

SEQ ID NO: 587275 - DNA, 19 bp, Mus musculus
  siRNA target sequence for Ptprb (NM_029928.1,389-407).
gcagggaccgtctataact

SEQ ID NO: 587276 - DNA, 19 bp, Mus musculus
  siRNA target sequence for Ptprb (NM_029928.1,390-408).
cagggaccgtctataactt

SEQ ID NO: 587277 - DNA, 19 bp, Mus musculus
  siRNA target sequence for Ptprb (NM_029928.1,392-410).
gggaccgtctataacttca

SEQ ID NO: 587278 - DNA, 19 bp, Mus musculus
  siRNA target sequence for Ptprb (NM_029928.1,400-418).
ctataacttcaggattgtt

SEQ ID NO: 587279 - DNA, 19 bp, Mus musculus
  siRNA target sequence for Ptprb (NM_029928.1,468-486).
ctcctgccaggtttgaagt

SEQ ID NO: 587280 - DNA, 19 bp, Mus musculus
  siRNA target sequence for Ptprb (NM_029928.1,471-489).
ctgccaggtttgaagtcaa

SEQ ID NO: 587281 - DNA, 19 bp, Mus musculus
  siRNA target sequence for Ptprb (NM_029928.1,563-581).
gtgcaattatttgatcata

SEQ ID NO: 587282 - DNA, 19 bp, Mus musculus
  siRNA target sequence for Ptprb (NM_029928.1,575-593).
gatcataacaatcaaaaga

SEQ ID NO: 587283 - DNA, 19 bp, Mus musculus
  siRNA target sequence for Ptprb (NM_029928.1,602-620).
gtccaagttcaagaaagta

SEQ ID NO: 587284 - DNA, 19 bp, Mus musculus
  siRNA target sequence for Ptprb (NM_029928.1,630-648).
gccaatatacttttctgaa

SEQ ID NO: 587285 - DNA, 19 bp, Mus musculus
  siRNA target sequence for Ptprb (NM_029928.1,649-667).
cctcactgagggtaacagt

SEQ ID NO: 587286 - DNA, 19 bp, Mus musculus
  siRNA target sequence for Ptprb (NM_029928.1,658-676).
gggtaacagttacaaagtt

SEQ ID NO: 587287 - DNA, 19 bp, Mus musculus
  siRNA target sequence for Ptprb (NM_029928.1,704-722).
cgctcctttccggtgtata

SEQ ID NO: 587288 - DNA, 19 bp, Mus musculus
  siRNA target sequence for Ptprb (NM_029928.1,709-727).
ctttccggtgtatatcaat

SEQ ID NO: 587289 - DNA, 19 bp, Mus musculus
  siRNA target sequence for Ptprb (NM_029928.1,762-780).
gcatttcccccaatcctaa

SEQ ID NO: 587290 - DNA, 19 bp, Mus musculus
  siRNA target sequence for Ptprb (NM_029928.1,768-786).
cccccaatcctaattctct

SEQ ID NO: 587291 - DNA, 19 bp, Mus musculus
  siRNA target sequence for Ptprb (NM_029928.1,810-828).
ctgggaatgtggaacaata

SEQ ID NO: 587292 - DNA, 19 bp, Mus musculus
  siRNA target sequence for Ptprb (NM_029928.1,812-830).
gggaatgtggaacaataca

SEQ ID NO: 587293 - DNA, 19 bp, Mus musculus
  siRNA target sequence for Ptprb (NM_029928.1,829-847).
caggctggtgctaatggat

SEQ ID NO: 587294 - DNA, 19 bp, Mus musculus
  siRNA target sequence for Ptprb (NM_029928.1,831-849).
ggctggtgctaatggataa

SEQ ID NO: 587295 - DNA, 19 bp, Mus musculus
  siRNA target sequence for Ptprb (NM_029928.1,832-850).
gctggtgctaatggataaa

SEQ ID NO: 587296 - DNA, 19 bp, Mus musculus
  siRNA target sequence for Ptprb (NM_029928.1,855-873).
ccatcgttcaagacacaaa

SEQ ID NO: 587297 - DNA, 19 bp, Mus musculus
  siRNA target sequence for Ptprb (NM_029928.1,874-892).
cgtggacaggcgtgatact

SEQ ID NO: 587298 - DNA, 19 bp, Mus musculus
  siRNA target sequence for Ptprb (NM_029928.1,875-893).
gtggacaggcgtgatactt

SEQ ID NO: 587299 - DNA, 19 bp, Mus musculus
  siRNA target sequence for Ptprb (NM_029928.1,877-895).
ggacaggcgtgatacttct

SEQ ID NO: 587300 - DNA, 19 bp, Mus musculus
  siRNA target sequence for Ptprb (NM_029928.1,878-896).
gacaggcgtgatacttctt

SEQ ID NO: 587301 - DNA, 19 bp, Mus musculus
  siRNA target sequence for Ptprb (NM_029928.1,880-898).
caggcgtgatacttcttat

SEQ ID NO: 587302 - DNA, 19 bp, Mus musculus
  siRNA target sequence for Ptprb (NM_029928.1,884-902).
cgtgatacttcttatgctt

SEQ ID NO: 587303 - DNA, 19 bp, Mus musculus
  siRNA target sequence for Ptprb (NM_029928.1,925-943).
cctctacaacctcactatt

SEQ ID NO: 587304 - DNA, 19 bp, Mus musculus
  siRNA target sequence for Ptprb (NM_029928.1,996-1014).
ctcccatggaagtctcaaa

SEQ ID NO: 587305 - DNA, 19 bp, Mus musculus
  siRNA target sequence for Ptprb (NM_029928.1,1070-1088).
ccccctggggatgtagatt

SEQ ID NO: 587306 - DNA, 19 bp, Mus musculus
  siRNA target sequence for Ptprb (NM_029928.1,1074-1092).
ctggggatgtagattccta

SEQ ID NO: 587307 - DNA, 19 bp, Mus musculus
  siRNA target sequence for Ptprb (NM_029928.1,1111-1129).
ccaagggaccatcaaagaa

SEQ ID NO: 587308 - DNA, 19 bp, Mus musculus
  siRNA target sequence for Ptprb (NM_029928.1,1112-1130).
caagggaccatcaaagaat

SEQ ID NO: 587309 - DNA, 19 bp, Mus musculus
  siRNA target sequence for Ptprb (NM_029928.1,1116-1134).
ggaccatcaaagaatccaa

SEQ ID NO: 587310 - DNA, 19 bp, Mus musculus
  siRNA target sequence for Ptprb (NM_029928.1,1142-1160).
gcacctcctgttactgaaa

SEQ ID NO: 587311 - DNA, 19 bp, Mus musculus
  siRNA target sequence for Ptprb (NM_029928.1,1148-1166).
cctgttactgaaactcaat

SEQ ID NO: 587312 - DNA, 19 bp, Mus musculus
  siRNA target sequence for Ptprb (NM_029928.1,1180-1198).
ccctggacggctttaccaa

SEQ ID NO: 587313 - DNA, 19 bp, Mus musculus
  siRNA target sequence for Ptprb (NM_029928.1,1283-1301).
gtttcctacaacgagattt

SEQ ID NO: 587314 - DNA, 19 bp, Mus musculus
  siRNA target sequence for Ptprb (NM_029928.1,1287-1305).
cctacaacgagatttggat

SEQ ID NO: 587315 - DNA, 19 bp, Mus musculus
  siRNA target sequence for Ptprb (NM_029928.1,1338-1356).
ctggagattgggagcatta

SEQ ID NO: 587316 - DNA, 19 bp, Mus musculus
  siRNA target sequence for Ptprb (NM_029928.1,1343-1361).
gattgggagcattatcgta

SEQ ID NO: 587317 - DNA, 19 bp, Mus musculus
  siRNA target sequence for Ptprb (NM_029928.1,1359-1377).
gtatcgtgctcttcaatga

SEQ ID NO: 587318 - DNA, 19 bp, Mus musculus
  siRNA target sequence for Ptprb (NM_029928.1,1555-1573).
cgtcaaacacgctaacgaa

SEQ ID NO: 587319 - DNA, 19 bp, Mus musculus
  siRNA target sequence for Ptprb (NM_029928.1,1604-1622).
ctaggcgaatgggagaaat

SEQ ID NO: 587320 - DNA, 19 bp, Mus musculus
  siRNA target sequence for Ptprb (NM_029928.1,1754-1772).
gatttaaaacagtcatctt

SEQ ID NO: 587321 - DNA, 19 bp, Mus musculus
  siRNA target sequence for Ptprb (NM_029928.1,1836-1854).
ccagtagtctgttcactaa

SEQ ID NO: 587322 - DNA, 19 bp, Mus musculus
  siRNA target sequence for Ptprb (NM_029928.1,1928-1946).
gagagtgtttccagtgata

SEQ ID NO: 587323 - DNA, 19 bp, Mus musculus
  siRNA target sequence for Ptprb (NM_029928.1,2073-2091).
gtggggtgacagtcaacaa

SEQ ID NO: 587324 - DNA, 19 bp, Mus musculus
  siRNA target sequence for Ptprb (NM_029928.1,2075-2093).
ggggtgacagtcaacaatt

SEQ ID NO: 587325 - DNA, 19 bp, Mus musculus
  siRNA target sequence for Ptprb (NM_029928.1,2077-2095).
ggtgacagtcaacaattct

SEQ ID NO: 587326 - DNA, 19 bp, Mus musculus
  siRNA target sequence for Ptprb (NM_029928.1,2194-2212).
cctcatcatcgccaaatct

SEQ ID NO: 587327 - DNA, 19 bp, Mus musculus
  siRNA target sequence for Ptprb (NM_029928.1,2252-2270).
ctctacaacgtcactgtaa

SEQ ID NO: 587328 - DNA, 19 bp, Mus musculus
  siRNA target sequence for Ptprb (NM_029928.1,2271-2289).
ccaccaagagcggcaatta

SEQ ID NO: 587329 - DNA, 19 bp, Mus musculus
  siRNA target sequence for Ptprb (NM_029928.1,2272-2290).
caccaagagcggcaattat

SEQ ID NO: 587330 - DNA, 19 bp, Mus musculus
  siRNA target sequence for Ptprb (NM_029928.1,2275-2293).
caagagcggcaattatgca

SEQ ID NO: 587331 - DNA, 19 bp, Mus musculus
  siRNA target sequence for Ptprb (NM_029928.1,2329-2347).
caaggtccagggaatcagt

SEQ ID NO: 587332 - DNA, 19 bp, Mus musculus
  siRNA target sequence for Ptprb (NM_029928.1,2360-2378).
gccagaagcgactacttaa

SEQ ID NO: 587333 - DNA, 19 bp, Mus musculus
  siRNA target sequence for Ptprb (NM_029928.1,2361-2379).
ccagaagcgactacttaaa

SEQ ID NO: 587334 - DNA, 19 bp, Mus musculus
  siRNA target sequence for Ptprb (NM_029928.1,2403-2421).
gagactttgaccactatga

SEQ ID NO: 587335 - DNA, 19 bp, Mus musculus
  siRNA target sequence for Ptprb (NM_029928.1,2525-2543).
gtcactgtcagtacaaaga

SEQ ID NO: 587336 - DNA, 19 bp, Mus musculus
  siRNA target sequence for Ptprb (NM_029928.1,2535-2553).
gtacaaagagtggacaata

SEQ ID NO: 587337 - DNA, 19 bp, Mus musculus
  siRNA target sequence for Ptprb (NM_029928.1,2734-2752).
gaacacagcaactgagtat

SEQ ID NO: 587338 - DNA, 19 bp, Mus musculus
  siRNA target sequence for Ptprb (NM_029928.1,2818-2836).
ccagcagtcagccttcatt

SEQ ID NO: 587339 - DNA, 19 bp, Mus musculus
  siRNA target sequence for Ptprb (NM_029928.1,2821-2839).
gcagtcagccttcattgaa

SEQ ID NO: 587340 - DNA, 19 bp, Mus musculus
  siRNA target sequence for Ptprb (NM_029928.1,3032-3050).
gaggccggagccaagtaca

SEQ ID NO: 587341 - DNA, 19 bp, Mus musculus
  siRNA target sequence for Ptprb (NM_029928.1,3046-3064).
gtacaggatcgccattgtt

SEQ ID NO: 587342 - DNA, 19 bp, Mus musculus
  siRNA target sequence for Ptprb (NM_029928.1,3049-3067).
caggatcgccattgtttct

SEQ ID NO: 587343 - DNA, 19 bp, Mus musculus
  siRNA target sequence for Ptprb (NM_029928.1,3051-3069).
ggatcgccattgtttctgt

SEQ ID NO: 587344 - DNA, 19 bp, Mus musculus
  siRNA target sequence for Ptprb (NM_029928.1,3134-3152).
gtcgtcgcagccaatgcat

SEQ ID NO: 587345 - DNA, 19 bp, Mus musculus
  siRNA target sequence for Ptprb (NM_029928.1,3145-3163).
caatgcatacagcagtaat

SEQ ID NO: 587346 - DNA, 19 bp, Mus musculus
  siRNA target sequence for Ptprb (NM_029928.1,3149-3167).
gcatacagcagtaattcct

SEQ ID NO: 587347 - DNA, 19 bp, Mus musculus
  siRNA target sequence for Ptprb (NM_029928.1,3154-3172).
cagcagtaattccttaaca

SEQ ID NO: 587348 - DNA, 19 bp, Mus musculus
  siRNA target sequence for Ptprb (NM_029928.1,3157-3175).
cagtaattccttaacagta

SEQ ID NO: 587349 - DNA, 19 bp, Mus musculus
  siRNA target sequence for Ptprb (NM_029928.1,3201-3219).
cagaaagatacgatatcct

SEQ ID NO: 587350 - DNA, 19 bp, Mus musculus
  siRNA target sequence for Ptprb (NM_029928.1,3273-3291).
caagacagcacaaatttga

SEQ ID NO: 587351 - DNA, 19 bp, Mus musculus
  siRNA target sequence for Ptprb (NM_029928.1,3339-3357).
gcggaggcctcttcagtaa

SEQ ID NO: 587352 - DNA, 19 bp, Mus musculus
  siRNA target sequence for Ptprb (NM_029928.1,3344-3362).
ggcctcttcagtaaagaat

SEQ ID NO: 587353 - DNA, 19 bp, Mus musculus
  siRNA target sequence for Ptprb (NM_029928.1,3346-3364).
cctcttcagtaaagaatct

SEQ ID NO: 587354 - DNA, 19 bp, Mus musculus
  siRNA target sequence for Ptprb (NM_029928.1,3389-3407).
gcagctgtcaccaatctga

SEQ ID NO: 587355 - DNA, 19 bp, Mus musculus
  siRNA target sequence for Ptprb (NM_029928.1,3464-3482).
gaactcagctggtacaaca

SEQ ID NO: 587356 - DNA, 19 bp, Mus musculus
  siRNA target sequence for Ptprb (NM_029928.1,3613-3631).
gctgtccaatgagtcattt

SEQ ID NO: 587357 - DNA, 19 bp, Mus musculus
  siRNA target sequence for Ptprb (NM_029928.1,3614-3632).
ctgtccaatgagtcattta

SEQ ID NO: 587358 - DNA, 19 bp, Mus musculus
  siRNA target sequence for Ptprb (NM_029928.1,3616-3634).
gtccaatgagtcatttata

SEQ ID NO: 587359 - DNA, 19 bp, Mus musculus
  siRNA target sequence for Ptprb (NM_029928.1,3618-3636).
ccaatgagtcatttatatt

SEQ ID NO: 587360 - DNA, 19 bp, Mus musculus
  siRNA target sequence for Ptprb (NM_029928.1,3840-3858).
ggaaatacaccctgtatgt

SEQ ID NO: 587361 - DNA, 19 bp, Mus musculus
  siRNA target sequence for Ptprb (NM_029928.1,3873-3891).
gggacctcagcaataaagt

SEQ ID NO: 587362 - DNA, 19 bp, Mus musculus
  siRNA target sequence for Ptprb (NM_029928.1,3914-3932).
ccaagtcctccgagtcttt

SEQ ID NO: 587363 - DNA, 19 bp, Mus musculus
  siRNA target sequence for Ptprb (NM_029928.1,3915-3933).
caagtcctccgagtctttt

SEQ ID NO: 587364 - DNA, 19 bp, Mus musculus
  siRNA target sequence for Ptprb (NM_029928.1,3936-3954).
cattcgctgatgttgcaaa

SEQ ID NO: 587365 - DNA, 19 bp, Mus musculus
  siRNA target sequence for Ptprb (NM_029928.1,3993-4011).
ggacagattacaatgactt

SEQ ID NO: 587366 - DNA, 19 bp, Mus musculus
  siRNA target sequence for Ptprb (NM_029928.1,3994-4012).
gacagattacaatgacttt

SEQ ID NO: 587367 - DNA, 19 bp, Mus musculus
  siRNA target sequence for Ptprb (NM_029928.1,4104-4122).
cagggaggtcctatcaatt

SEQ ID NO: 587368 - DNA, 19 bp, Mus musculus
  siRNA target sequence for Ptprb (NM_029928.1,4142-4160).
ggggactcctggaaaacct

SEQ ID NO: 587369 - DNA, 19 bp, Mus musculus
  siRNA target sequence for Ptprb (NM_029928.1,4143-4161).
gggactcctggaaaaccta

SEQ ID NO: 587370 - DNA, 19 bp, Mus musculus
  siRNA target sequence for Ptprb (NM_029928.1,4189-4207).
gacaaagccagacaagata

SEQ ID NO: 587371 - DNA, 19 bp, Mus musculus
  siRNA target sequence for Ptprb (NM_029928.1,4290-4308).
gcattgagtgccgaaaaat

SEQ ID NO: 587372 - DNA, 19 bp, Mus musculus
  siRNA target sequence for Ptprb (NM_029928.1,4360-4378).
gctcaacatcatgatgtta

SEQ ID NO: 587373 - DNA, 19 bp, Mus musculus
  siRNA target sequence for Ptprb (NM_029928.1,4363-4381).
caacatcatgatgttagta

SEQ ID NO: 587374 - DNA, 19 bp, Mus musculus
  siRNA target sequence for Ptprb (NM_029928.1,4431-4449).
ccagtgaggtggttgaaga

SEQ ID NO: 587375 - DNA, 19 bp, Mus musculus
  siRNA target sequence for Ptprb (NM_029928.1,4452-4470).
gcaccatcaccatgataga

SEQ ID NO: 587376 - DNA, 19 bp, Mus musculus
  siRNA target sequence for Ptprb (NM_029928.1,4493-4511).
cacatccgtgtgaatgaaa

SEQ ID NO: 587377 - DNA, 19 bp, Mus musculus
  siRNA target sequence for Ptprb (NM_029928.1,4514-4532).
gatgtgctaatcagcaaat

SEQ ID NO: 587378 - DNA, 19 bp, Mus musculus
  siRNA target sequence for Ptprb (NM_029928.1,4517-4535).
gtgctaatcagcaaatctt

SEQ ID NO: 587379 - DNA, 19 bp, Mus musculus
  siRNA target sequence for Ptprb (NM_029928.1,4533-4551).
cttccatcaactttactgt

SEQ ID NO: 587380 - DNA, 19 bp, Mus musculus
  siRNA target sequence for Ptprb (NM_029928.1,4573-4591).
caccaacggagcggttaaa

SEQ ID NO: 587381 - DNA, 19 bp, Mus musculus
  siRNA target sequence for Ptprb (NM_029928.1,4575-4593).
ccaacggagcggttaaata

SEQ ID NO: 587382 - DNA, 19 bp, Mus musculus
  siRNA target sequence for Ptprb (NM_029928.1,4579-4597).
cggagcggttaaatacttt

SEQ ID NO: 587383 - DNA, 19 bp, Mus musculus
  siRNA target sequence for Ptprb (NM_029928.1,4617-4635).
ccgacagcatggatgagtt

SEQ ID NO: 587384 - DNA, 19 bp, Mus musculus
  siRNA target sequence for Ptprb (NM_029928.1,4697-4715).
cgagtctaccagaccaatt

SEQ ID NO: 587385 - DNA, 19 bp, Mus musculus
  siRNA target sequence for Ptprb (NM_029928.1,4698-4716).
gagtctaccagaccaatta

SEQ ID NO: 587386 - DNA, 19 bp, Mus musculus
  siRNA target sequence for Ptprb (NM_029928.1,4700-4718).
gtctaccagaccaattatt

SEQ ID NO: 587387 - DNA, 19 bp, Mus musculus
  siRNA target sequence for Ptprb (NM_029928.1,4740-4758).
gtcccgacagcagttctaa

SEQ ID NO: 587388 - DNA, 19 bp, Mus musculus
  siRNA target sequence for Ptprb (NM_029928.1,4749-4767).
gcagttctaaaagtttcaa

SEQ ID NO: 587389 - DNA, 19 bp, Mus musculus
  siRNA target sequence for Ptprb (NM_029928.1,4795-4813).
cctcggtggcaaatgtgat

SEQ ID NO: 587390 - DNA, 19 bp, Mus musculus
  siRNA target sequence for Ptprb (NM_029928.1,4814-4832).
cccagtcagcagaaattct

SEQ ID NO: 587391 - DNA, 19 bp, Mus musculus
  siRNA target sequence for Ptprb (NM_029928.1,4872-4890).
gcatccgggcttttacaca

SEQ ID NO: 587392 - DNA, 19 bp, Mus musculus
  siRNA target sequence for Ptprb (NM_029928.1,4881-4899).
cttttacacagctatttga

SEQ ID NO: 587393 - DNA, 19 bp, Mus musculus
  siRNA target sequence for Ptprb (NM_029928.1,4926-4944).
ctctctactcggatacgtt

SEQ ID NO: 587394 - DNA, 19 bp, Mus musculus
  siRNA target sequence for Ptprb (NM_029928.1,4935-4953).
cggatacgttcttctctat

SEQ ID NO: 587395 - DNA, 19 bp, Mus musculus
  siRNA target sequence for Ptprb (NM_029928.1,4975-4993).
gcccttgtttggagttatt

SEQ ID NO: 587396 - DNA, 19 bp, Mus musculus
  siRNA target sequence for Ptprb (NM_029928.1,4978-4996).
cttgtttggagttattgaa

SEQ ID NO: 587397 - DNA, 19 bp, Mus musculus
  siRNA target sequence for Ptprb (NM_029928.1,5152-5170).
gaaaggcaaccggaaaact

SEQ ID NO: 587398 - DNA, 19 bp, Mus musculus
  siRNA target sequence for Ptprb (NM_029928.1,5175-5193).
gccccataaagatcaatca

SEQ ID NO: 587399 - DNA, 19 bp, Mus musculus
  siRNA target sequence for Ptprb (NM_029928.1,5177-5195).
cccataaagatcaatcagt

SEQ ID NO: 587400 - DNA, 19 bp, Mus musculus
  siRNA target sequence for Ptprb (NM_029928.1,5192-5210).
cagtttgaagggcatttca

SEQ ID NO: 587401 - DNA, 19 bp, Mus musculus
  siRNA target sequence for Ptprb (NM_029928.1,5225-5243).
gactccaactaccttctat

SEQ ID NO: 587402 - DNA, 19 bp, Mus musculus
  siRNA target sequence for Ptprb (NM_029928.1,5229-5247).
ccaactaccttctatccaa

SEQ ID NO: 587403 - DNA, 19 bp, Mus musculus
  siRNA target sequence for Ptprb (NM_029928.1,5311-5329).
gaatcgagggaaaaatcga

SEQ ID NO: 587404 - DNA, 19 bp, Mus musculus
  siRNA target sequence for Ptprb (NM_029928.1,5318-5336).
gggaaaaatcgatacaaca

SEQ ID NO: 587405 - DNA, 19 bp, Mus musculus
  siRNA target sequence for Ptprb (NM_029928.1,5319-5337).
ggaaaaatcgatacaacaa

SEQ ID NO: 587406 - DNA, 19 bp, Mus musculus
  siRNA target sequence for Ptprb (NM_029928.1,5335-5353).
caacatattgccttatgat

SEQ ID NO: 587407 - DNA, 19 bp, Mus musculus
  siRNA target sequence for Ptprb (NM_029928.1,5415-5433).
gctacatccccggtaacaa

SEQ ID NO: 587408 - DNA, 19 bp, Mus musculus
  siRNA target sequence for Ptprb (NM_029928.1,5505-5523).
gggagcagaacgttcacaa

SEQ ID NO: 587409 - DNA, 19 bp, Mus musculus
  siRNA target sequence for Ptprb (NM_029928.1,5533-5551).
ggtgacccagtgtgttgaa

SEQ ID NO: 587410 - DNA, 19 bp, Mus musculus
  siRNA target sequence for Ptprb (NM_029928.1,5534-5552).
gtgacccagtgtgttgaaa

SEQ ID NO: 587411 - DNA, 19 bp, Mus musculus
  siRNA target sequence for Ptprb (NM_029928.1,5655-5673).
ggaccatcagggagtttaa

SEQ ID NO: 587412 - DNA, 19 bp, Mus musculus
  siRNA target sequence for Ptprb (NM_029928.1,5658-5676).
ccatcagggagtttaagat

SEQ ID NO: 587413 - DNA, 19 bp, Mus musculus
  siRNA target sequence for Ptprb (NM_029928.1,5704-5722).
cagactcatccgtcacttt

SEQ ID NO: 587414 - DNA, 19 bp, Mus musculus
  siRNA target sequence for Ptprb (NM_029928.1,5708-5726).
ctcatccgtcactttcact

SEQ ID NO: 587415 - DNA, 19 bp, Mus musculus
  siRNA target sequence for Ptprb (NM_029928.1,5764-5782).
ccagtccctgatccaattt

SEQ ID NO: 587416 - DNA, 19 bp, Mus musculus
  siRNA target sequence for Ptprb (NM_029928.1,5790-5808).
cagtcagggactacatcaa

SEQ ID NO: 587417 - DNA, 19 bp, Mus musculus
  siRNA target sequence for Ptprb (NM_029928.1,5792-5810).
gtcagggactacatcaaca

SEQ ID NO: 587418 - DNA, 19 bp, Mus musculus
  siRNA target sequence for Ptprb (NM_029928.1,5914-5932).
ggactccgtggacatttat

SEQ ID NO: 587419 - DNA, 19 bp, Mus musculus
  siRNA target sequence for Ptprb (NM_029928.1,5972-5990).
gtccagaccgagtgtcaat

SEQ ID NO: 587420 - DNA, 19 bp, Mus musculus
  siRNA target sequence for Ptprb (NM_029928.1,5979-5997).
ccgagtgtcaatatgtgta

SEQ ID NO: 587421 - DNA, 19 bp, Mus musculus
  siRNA target sequence for Ptprb (NM_029928.1,5980-5998).
cgagtgtcaatatgtgtat

SEQ ID NO: 587422 - DNA, 19 bp, Mus musculus
  siRNA target sequence for Ptprb (NM_029928.1,6058-6076).
ccccctgtttccgatttat

SEQ ID NO: 587423 - DNA, 19 bp, Mus musculus
  siRNA target sequence for Ptprb (NM_029928.1,6060-6078).
ccctgtttccgatttatga

SEQ ID NO: 587424 - DNA, 19 bp, Mus musculus
  siRNA target sequence for Ptprb (NM_029928.1,6062-6080).
ctgtttccgatttatgaga

SEQ ID NO: 587425 - DNA, 19 bp, Mus musculus
  siRNA target sequence for Ptprb (NM_029928.1,6068-6086).
ccgatttatgagaatgtga

SEQ ID NO: 587426 - DNA, 19 bp, Mus musculus
  siRNA target sequence for Ptprb (NM_029928.1,6079-6097).
gaatgtgaatccagagtat

SEQ ID NO: 587427 - DNA, 19 bp, Mus musculus
  siRNA target sequence for Ptprb (NM_029928.1,6107-6125).
gcaatctactcgagacatt

SEQ ID NO: 587428 - DNA, 19 bp, Mus musculus
  siRNA target sequence for Ptpre (NM_011212.2,578-596).
gcctaacgggatcttagaa

SEQ ID NO: 587429 - DNA, 19 bp, Mus musculus
  siRNA target sequence for Ptpre (NM_011212.2,725-743).
ccgagaggagttcaattca

SEQ ID NO: 587430 - DNA, 19 bp, Mus musculus
  siRNA target sequence for Ptpre (NM_011212.2,726-744).
cgagaggagttcaattcat

SEQ ID NO: 587431 - DNA, 19 bp, Mus musculus
  siRNA target sequence for Ptpre (NM_011212.2,727-745).
gagaggagttcaattcatt

SEQ ID NO: 587432 - DNA, 19 bp, Mus musculus
  siRNA target sequence for Ptpre (NM_011212.2,766-784).
gaacctttgaactagcaaa

SEQ ID NO: 587433 - DNA, 19 bp, Mus musculus
  siRNA target sequence for Ptpre (NM_011212.2,821-839).
cattctgcccaatgatcat

SEQ ID NO: 587434 - DNA, 19 bp, Mus musculus
  siRNA target sequence for Ptpre (NM_011212.2,834-852).
gatcattgcagagtgattt

SEQ ID NO: 587435 - DNA, 19 bp, Mus musculus
  siRNA target sequence for Ptpre (NM_011212.2,837-855).
cattgcagagtgattttga

SEQ ID NO: 587436 - DNA, 19 bp, Mus musculus
  siRNA target sequence for Ptpre (NM_011212.2,899-917).
ctacatcgatggctacaaa

SEQ ID NO: 587437 - DNA, 19 bp, Mus musculus
  siRNA target sequence for Ptpre (NM_011212.2,1000-1018).
cagccaccatcgtcatgtt

SEQ ID NO: 587438 - DNA, 19 bp, Mus musculus
  siRNA target sequence for Ptpre (NM_011212.2,1457-1475).
gacggatgttcagtataca

SEQ ID NO: 587439 - DNA, 19 bp, Mus musculus
  siRNA target sequence for Ptpre (NM_011212.2,1459-1477).
cggatgttcagtatacatt

SEQ ID NO: 587440 - DNA, 19 bp, Mus musculus
  siRNA target sequence for Ptpre (NM_011212.2,1567-1585).
gcacagccacccattttga

SEQ ID NO: 587441 - DNA, 19 bp, Mus musculus
  siRNA target sequence for Ptpre (NM_011212.2,1570-1588).
cagccacccattttgacaa

SEQ ID NO: 587442 - DNA, 19 bp, Mus musculus
  siRNA target sequence for Ptpre (NM_011212.2,1724-1742).
catcctgtccatgaaaaga

SEQ ID NO: 587443 - DNA, 19 bp, Mus musculus
  siRNA target sequence for Ptpre (NM_011212.2,1749-1767).
gagttcacagactatatca

SEQ ID NO: 587444 - DNA, 19 bp, Mus musculus
  siRNA target sequence for Ptpre (NM_011212.2,1908-1926).
gagcgggaacaggataaat

SEQ ID NO: 587445 - DNA, 19 bp, Mus musculus
  siRNA target sequence for Ptpre (NM_011212.2,1912-1930).
gggaacaggataaatgcta

SEQ ID NO: 587446 - DNA, 19 bp, Mus musculus
  siRNA target sequence for Ptpre (NM_011212.2,1920-1938).
gataaatgctaccagtatt

SEQ ID NO: 587447 - DNA, 19 bp, Mus musculus
  siRNA target sequence for Ptpre (NM_011212.2,1954-1972).
cggtgactcatggagatat

SEQ ID NO: 587448 - DNA, 19 bp, Mus musculus
  siRNA target sequence for Ptpre (NM_011212.2,1955-1973).
ggtgactcatggagatata

SEQ ID NO: 587449 - DNA, 19 bp, Mus musculus
  siRNA target sequence for Ptpre (NM_011212.2,1958-1976).
gactcatggagatataact

SEQ ID NO: 587450 - DNA, 19 bp, Mus musculus
  siRNA target sequence for Ptpre (NM_011212.2,1965-1983).
ggagatataactatagaga

SEQ ID NO: 587451 - DNA, 19 bp, Mus musculus
  siRNA target sequence for Ptpre (NM_011212.2,1966-1984).
gagatataactatagagat

SEQ ID NO: 587452 - DNA, 19 bp, Mus musculus
  siRNA target sequence for Ptpre (NM_011212.2,2024-2042).
ctttctggttaccttcaaa

SEQ ID NO: 587453 - DNA, 19 bp, Mus musculus
  siRNA target sequence for Ptpre (NM_011212.2,2070-2088).
gtccgcatggtgagacaat

SEQ ID NO: 587454 - DNA, 19 bp, Mus musculus
  siRNA target sequence for Ptpre (NM_011212.2,2074-2092).
gcatggtgagacaattcca

SEQ ID NO: 587455 - DNA, 19 bp, Mus musculus
  siRNA target sequence for Ptpre (NM_011212.2,2075-2093).
catggtgagacaattccat

SEQ ID NO: 587456 - DNA, 19 bp, Mus musculus
  siRNA target sequence for Ptpre (NM_011212.2,2221-2239).
cagggcggacaggtacatt

SEQ ID NO: 587457 - DNA, 19 bp, Mus musculus
  siRNA target sequence for Ptpre (NM_011212.2,2223-2241).
gggcggacaggtacattca

SEQ ID NO: 587458 - DNA, 19 bp, Mus musculus
  siRNA target sequence for Ptpre (NM_011212.2,2224-2242).
ggcggacaggtacattcat

SEQ ID NO: 587459 - DNA, 19 bp, Mus musculus
  siRNA target sequence for Ptpre (NM_011212.2,2225-2243).
gcggacaggtacattcata

SEQ ID NO: 587460 - DNA, 19 bp, Mus musculus
  siRNA target sequence for Ptpre (NM_011212.2,2245-2263).
cactcagtaacattttgga

SEQ ID NO: 587461 - DNA, 19 bp, Mus musculus
  siRNA target sequence for Ptpre (NM_011212.2,2281-2299).
gactcctagacgtgtttca

SEQ ID NO: 587462 - DNA, 19 bp, Mus musculus
  siRNA target sequence for Ptpre (NM_011212.2,2298-2316).
caagctgtgaagagcttaa

SEQ ID NO: 587463 - DNA, 19 bp, Mus musculus
  siRNA target sequence for Ptpre (NM_011212.2,2375-2393).
ggtacaagattttatcgat

SEQ ID NO: 587464 - DNA, 19 bp, Mus musculus
  siRNA target sequence for Ptpre (NM_011212.2,2376-2394).
gtacaagattttatcgata

SEQ ID NO: 587465 - DNA, 19 bp, Mus musculus
  siRNA target sequence for Ptpre (NM_011212.2,2379-2397).
caagattttatcgatatat

SEQ ID NO: 587466 - DNA, 19 bp, Mus musculus
  siRNA target sequence for Ptpre (NM_011212.2,2390-2408).
cgatatattttctgattat

SEQ ID NO: 587467 - DNA, 19 bp, Mus musculus
  siRNA target sequence for Ptprf (NM_011213.1,181-199).
gaacccaagcctcgaatta

SEQ ID NO: 587468 - DNA, 19 bp, Mus musculus
  siRNA target sequence for Ptprf (NM_011213.1,193-211).
cgaattacgtggatgaaga

SEQ ID NO: 587469 - DNA, 19 bp, Mus musculus
  siRNA target sequence for Ptprf (NM_011213.1,235-253).
cgctttgaggtaattgagt

SEQ ID NO: 587470 - DNA, 19 bp, Mus musculus
  siRNA target sequence for Ptprf (NM_011213.1,303-321).
gcgagacgaagccatctat

SEQ ID NO: 587471 - DNA, 19 bp, Mus musculus
  siRNA target sequence for Ptprf (NM_011213.1,343-361).
ctcggggagatcaacacaa

SEQ ID NO: 587472 - DNA, 19 bp, Mus musculus
  siRNA target sequence for Ptprf (NM_011213.1,542-560).
caagcaacggtcgtatcaa

SEQ ID NO: 587473 - DNA, 19 bp, Mus musculus
  siRNA target sequence for Ptprf (NM_011213.1,545-563).
gcaacggtcgtatcaaaca

SEQ ID NO: 587474 - DNA, 19 bp, Mus musculus
  siRNA target sequence for Ptprf (NM_011213.1,572-590).
caggtgcattgcagataga

SEQ ID NO: 587475 - DNA, 19 bp, Mus musculus
  siRNA target sequence for Ptprf (NM_011213.1,780-798).
gcccatgccgtatgtgaaa

SEQ ID NO: 587476 - DNA, 19 bp, Mus musculus
  siRNA target sequence for Ptprf (NM_011213.1,840-858).
gccagtcggccgaaatgtt

SEQ ID NO: 587477 - DNA, 19 bp, Mus musculus
  siRNA target sequence for Ptprf (NM_011213.1,842-860).
cagtcggccgaaatgttct

SEQ ID NO: 587478 - DNA, 19 bp, Mus musculus
  siRNA target sequence for Ptprf (NM_011213.1,876-894).
catgcgatctgccaactat

SEQ ID NO: 587479 - DNA, 19 bp, Mus musculus
  siRNA target sequence for Ptprf (NM_011213.1,880-898).
cgatctgccaactatacct

SEQ ID NO: 587480 - DNA, 19 bp, Mus musculus
  siRNA target sequence for Ptprf (NM_011213.1,911-929).
cttcattaggcatgataga

SEQ ID NO: 587481 - DNA, 19 bp, Mus musculus
  siRNA target sequence for Ptprf (NM_011213.1,935-953).
cggcccaggtcacagtaaa

SEQ ID NO: 587482 - DNA, 19 bp, Mus musculus
  siRNA target sequence for Ptprf (NM_011213.1,939-957).
ccaggtcacagtaaaagct

SEQ ID NO: 587483 - DNA, 19 bp, Mus musculus
  siRNA target sequence for Ptprf (NM_011213.1,960-978).
gccaaagcctccaattgat

SEQ ID NO: 587484 - DNA, 19 bp, Mus musculus
  siRNA target sequence for Ptprf (NM_011213.1,998-1016).
ccgccaccagtgttactct

SEQ ID NO: 587485 - DNA, 19 bp, Mus musculus
  siRNA target sequence for Ptprf (NM_011213.1,1143-1161).
cagccccttttcggaatat

SEQ ID NO: 587486 - DNA, 19 bp, Mus musculus
  siRNA target sequence for Ptprf (NM_011213.1,1146-1164).
ccccttttcggaatatgct

SEQ ID NO: 587487 - DNA, 19 bp, Mus musculus
  siRNA target sequence for Ptprf (NM_011213.1,1148-1166).
ccttttcggaatatgcttt

SEQ ID NO: 587488 - DNA, 19 bp, Mus musculus
  siRNA target sequence for Ptprf (NM_011213.1,1168-1186).
cgtgtgttggctgttaaca

SEQ ID NO: 587489 - DNA, 19 bp, Mus musculus
  siRNA target sequence for Ptprf (NM_011213.1,1264-1282).
gtgcaggctcgaatgctta

SEQ ID NO: 587490 - DNA, 19 bp, Mus musculus
  siRNA target sequence for Ptprf (NM_011213.1,1340-1358).
ggggatatcgcgtctacta

SEQ ID NO: 587491 - DNA, 19 bp, Mus musculus
  siRNA target sequence for Ptprf (NM_011213.1,1341-1359).
gggatatcgcgtctactat

SEQ ID NO: 587492 - DNA, 19 bp, Mus musculus
  siRNA target sequence for Ptprf (NM_011213.1,1342-1360).
ggatatcgcgtctactata

SEQ ID NO: 587493 - DNA, 19 bp, Mus musculus
  siRNA target sequence for Ptprf (NM_011213.1,1385-1403).
gcgcctggcacaagcataa

SEQ ID NO: 587494 - DNA, 19 bp, Mus musculus
  siRNA target sequence for Ptprf (NM_011213.1,1505-1523).
gccccaccatccaagtcaa

SEQ ID NO: 587495 - DNA, 19 bp, Mus musculus
  siRNA target sequence for Ptprf (NM_011213.1,1617-1635).
ggagcggatcgtcaagtat

SEQ ID NO: 587496 - DNA, 19 bp, Mus musculus
  siRNA target sequence for Ptprf (NM_011213.1,2211-2229).
caagcagcacggacagatt

SEQ ID NO: 587497 - DNA, 19 bp, Mus musculus
  siRNA target sequence for Ptprf (NM_011213.1,2412-2430).
caaggtggttactacaaca

SEQ ID NO: 587498 - DNA, 19 bp, Mus musculus
  siRNA target sequence for Ptprf (NM_011213.1,2590-2608).
ggcaaggatgaccaacatt

SEQ ID NO: 587499 - DNA, 19 bp, Mus musculus
  siRNA target sequence for Ptprf (NM_011213.1,2591-2609).
gcaaggatgaccaacattt

SEQ ID NO: 587500 - DNA, 19 bp, Mus musculus
  siRNA target sequence for Ptprf (NM_011213.1,2592-2610).
caaggatgaccaacatttt

SEQ ID NO: 587501 - DNA, 19 bp, Mus musculus
  siRNA target sequence for Ptprf (NM_011213.1,2595-2613).
ggatgaccaacattttaca

SEQ ID NO: 587502 - DNA, 19 bp, Mus musculus
  siRNA target sequence for Ptprf (NM_011213.1,2724-2742).
cagtggctttcctcaaaat

SEQ ID NO: 587503 - DNA, 19 bp, Mus musculus
  siRNA target sequence for Ptprf (NM_011213.1,2726-2744).
gtggctttcctcaaaatct

SEQ ID NO: 587504 - DNA, 19 bp, Mus musculus
  siRNA target sequence for Ptprf (NM_011213.1,3037-3055).
gtggccgctgcgatgaaga

SEQ ID NO: 587505 - DNA, 19 bp, Mus musculus
  siRNA target sequence for Ptprf (NM_011213.1,3074-3092).
gggaggtccccgactctta

SEQ ID NO: 587506 - DNA, 19 bp, Mus musculus
  siRNA target sequence for Ptprf (NM_011213.1,3075-3093).
ggaggtccccgactcttat

SEQ ID NO: 587507 - DNA, 19 bp, Mus musculus
  siRNA target sequence for Ptprf (NM_011213.1,3076-3094).
gaggtccccgactcttata

SEQ ID NO: 587508 - DNA, 19 bp, Mus musculus
  siRNA target sequence for Ptprf (NM_011213.1,3079-3097).
gtccccgactcttataagt

SEQ ID NO: 587509 - DNA, 19 bp, Mus musculus
  siRNA target sequence for Ptprf (NM_011213.1,3081-3099).
ccccgactcttataagtca

SEQ ID NO: 587510 - DNA, 19 bp, Mus musculus
  siRNA target sequence for Ptprf (NM_011213.1,3098-3116).
cagctgtgcccttcaagat

SEQ ID NO: 587511 - DNA, 19 bp, Mus musculus
  siRNA target sequence for Ptprf (NM_011213.1,3107-3125).
ccttcaagatcctgtacaa

SEQ ID NO: 587512 - DNA, 19 bp, Mus musculus
  siRNA target sequence for Ptprf (NM_011213.1,3294-3312).
gcctgcctccgcctttata

SEQ ID NO: 587513 - DNA, 19 bp, Mus musculus
  siRNA target sequence for Ptprf (NM_011213.1,3361-3379).
ctagtcaggtggttctaca

SEQ ID NO: 587514 - DNA, 19 bp, Mus musculus
  siRNA target sequence for Ptprf (NM_011213.1,3701-3719).
cctactcggacgagattgt

SEQ ID NO: 587515 - DNA, 19 bp, Mus musculus
  siRNA target sequence for Ptprf (NM_011213.1,3702-3720).
ctactcggacgagattgta

SEQ ID NO: 587516 - DNA, 19 bp, Mus musculus
  siRNA target sequence for Ptprf (NM_011213.1,3779-3797).
ctgtcctggcggtcattct

SEQ ID NO: 587517 - DNA, 19 bp, Mus musculus
  siRNA target sequence for Ptprf (NM_011213.1,3786-3804).
ggcggtcattctcatcata

SEQ ID NO: 587518 - DNA, 19 bp, Mus musculus
  siRNA target sequence for Ptprf (NM_011213.1,3788-3806).
cggtcattctcatcatact

SEQ ID NO: 587519 - DNA, 19 bp, Mus musculus
  siRNA target sequence for Ptprf (NM_011213.1,3849-3867).
ctccccatcatcaaaggat

SEQ ID NO: 587520 - DNA, 19 bp, Mus musculus
  siRNA target sequence for Ptprf (NM_011213.1,3860-3878).
caaaggatgagcagtcaat

SEQ ID NO: 587521 - DNA, 19 bp, Mus musculus
  siRNA target sequence for Ptprf (NM_011213.1,4088-4106).
ccaactcggaggtgaacaa

SEQ ID NO: 587522 - DNA, 19 bp, Mus musculus
  siRNA target sequence for Ptprf (NM_011213.1,4264-4282).
gagaccatgggcgatttct

SEQ ID NO: 587523 - DNA, 19 bp, Mus musculus
  siRNA target sequence for Ptprf (NM_011213.1,4451-4469).
gcacctttgccctccataa

SEQ ID NO: 587524 - DNA, 19 bp, Mus musculus
  siRNA target sequence for Ptprf (NM_011213.1,4455-4473).
ctttgccctccataagagt

SEQ ID NO: 587525 - DNA, 19 bp, Mus musculus
  siRNA target sequence for Ptprf (NM_011213.1,4933-4951).
cacacgtcgcgctttgtca

SEQ ID NO: 587526 - DNA, 19 bp, Mus musculus
  siRNA target sequence for Ptprf (NM_011213.1,5142-5160).
ggacttctggcgcatgtta

SEQ ID NO: 587527 - DNA, 19 bp, Mus musculus
  siRNA target sequence for Ptprf (NM_011213.1,5512-5530).
cgcaccggtgtgttcatca

SEQ ID NO: 587528 - DNA, 19 bp, Mus musculus
  siRNA target sequence for Ptprj (NM_008982.2,461-479).
ggtgcggcaccgaatccta

SEQ ID NO: 587529 - DNA, 19 bp, Mus musculus
  siRNA target sequence for Ptprj (NM_008982.2,462-480).
gtgcggcaccgaatcctat

SEQ ID NO: 587530 - DNA, 19 bp, Mus musculus
  siRNA target sequence for Ptprj (NM_008982.2,464-482).
gcggcaccgaatcctatat

SEQ ID NO: 587531 - DNA, 19 bp, Mus musculus
  siRNA target sequence for Ptprj (NM_008982.2,465-483).
cggcaccgaatcctatatt

SEQ ID NO: 587532 - DNA, 19 bp, Mus musculus
  siRNA target sequence for Ptprj (NM_008982.2,468-486).
caccgaatcctatatttga

SEQ ID NO: 587533 - DNA, 19 bp, Mus musculus
  siRNA target sequence for Ptprj (NM_008982.2,470-488).
ccgaatcctatatttgaca

SEQ ID NO: 587534 - DNA, 19 bp, Mus musculus
  siRNA target sequence for Ptprj (NM_008982.2,471-489).
cgaatcctatatttgacat

SEQ ID NO: 587535 - DNA, 19 bp, Mus musculus
  siRNA target sequence for Ptprj (NM_008982.2,504-522).
gcccaactagtgtgttatt

SEQ ID NO: 587536 - DNA, 19 bp, Mus musculus
  siRNA target sequence for Ptprj (NM_008982.2,505-523).
cccaactagtgtgttatta

SEQ ID NO: 587537 - DNA, 19 bp, Mus musculus
  siRNA target sequence for Ptprj (NM_008982.2,506-524).
ccaactagtgtgttattaa

SEQ ID NO: 587538 - DNA, 19 bp, Mus musculus
  siRNA target sequence for Ptprj (NM_008982.2,546-564).
gcgcttcagaatgtagaat

SEQ ID NO: 587539 - DNA, 19 bp, Mus musculus
  siRNA target sequence for Ptprj (NM_008982.2,547-565).
cgcttcagaatgtagaata

SEQ ID NO: 587540 - DNA, 19 bp, Mus musculus
  siRNA target sequence for Ptprj (NM_008982.2,554-572).
gaatgtagaatagagaata

SEQ ID NO: 587541 - DNA, 19 bp, Mus musculus
  siRNA target sequence for Ptprj (NM_008982.2,610-628).
gacatcatgtaacattaca

SEQ ID NO: 587542 - DNA, 19 bp, Mus musculus
  siRNA target sequence for Ptprj (NM_008982.2,638-656).
ccaggcacttcgtatacat

SEQ ID NO: 587543 - DNA, 19 bp, Mus musculus
  siRNA target sequence for Ptprj (NM_008982.2,639-657).
caggcacttcgtatacatt

SEQ ID NO: 587544 - DNA, 19 bp, Mus musculus
  siRNA target sequence for Ptprj (NM_008982.2,641-659).
ggcacttcgtatacattct

SEQ ID NO: 587545 - DNA, 19 bp, Mus musculus
  siRNA target sequence for Ptprj (NM_008982.2,798-816).
cctaccggatgctgattga

SEQ ID NO: 587546 - DNA, 19 bp, Mus musculus
  siRNA target sequence for Ptprj (NM_008982.2,799-817).
ctaccggatgctgattgaa

SEQ ID NO: 587547 - DNA, 19 bp, Mus musculus
  siRNA target sequence for Ptprj (NM_008982.2,828-846).
cacattcctcagtcaatat

SEQ ID NO: 587548 - DNA, 19 bp, Mus musculus
  siRNA target sequence for Ptprj (NM_008982.2,880-898).
cgctttcccagaatcaaat

SEQ ID NO: 587549 - DNA, 19 bp, Mus musculus
  siRNA target sequence for Ptprj (NM_008982.2,882-900).
ctttcccagaatcaaatga

SEQ ID NO: 587550 - DNA, 19 bp, Mus musculus
  siRNA target sequence for Ptprj (NM_008982.2,932-950).
gtcccggatgccaatggta

SEQ ID NO: 587551 - DNA, 19 bp, Mus musculus
  siRNA target sequence for Ptprj (NM_008982.2,941-959).
gccaatggtaccaagagaa

SEQ ID NO: 587552 - DNA, 19 bp, Mus musculus
  siRNA target sequence for Ptprj (NM_008982.2,942-960).
ccaatggtaccaagagaat

SEQ ID NO: 587553 - DNA, 19 bp, Mus musculus
  siRNA target sequence for Ptprj (NM_008982.2,979-997).
ccaactacacaagaattct

SEQ ID NO: 587554 - DNA, 19 bp, Mus musculus
  siRNA target sequence for Ptprj (NM_008982.2,1093-1111).
ctattctcaagcagcaaat

SEQ ID NO: 587555 - DNA, 19 bp, Mus musculus
  siRNA target sequence for Ptprj (NM_008982.2,1167-1185).
ctgacgtccgagctatgaa

SEQ ID NO: 587556 - DNA, 19 bp, Mus musculus
  siRNA target sequence for Ptprj (NM_008982.2,1169-1187).
gacgtccgagctatgaaca

SEQ ID NO: 587557 - DNA, 19 bp, Mus musculus
  siRNA target sequence for Ptprj (NM_008982.2,1172-1190).
gtccgagctatgaacatca

SEQ ID NO: 587558 - DNA, 19 bp, Mus musculus
  siRNA target sequence for Ptprj (NM_008982.2,1228-1246).
cgatgggtcccgtacttca

SEQ ID NO: 587559 - DNA, 19 bp, Mus musculus
  siRNA target sequence for Ptprj (NM_008982.2,1229-1247).
gatgggtcccgtacttcaa

SEQ ID NO: 587560 - DNA, 19 bp, Mus musculus
  siRNA target sequence for Ptprj (NM_008982.2,1233-1251).
ggtcccgtacttcaattgt

SEQ ID NO: 587561 - DNA, 19 bp, Mus musculus
  siRNA target sequence for Ptprj (NM_008982.2,1236-1254).
cccgtacttcaattgtcta

SEQ ID NO: 587562 - DNA, 19 bp, Mus musculus
  siRNA target sequence for Ptprj (NM_008982.2,1286-1304).
gtcaaccaaactgtcaata

SEQ ID NO: 587563 - DNA, 19 bp, Mus musculus
  siRNA target sequence for Ptprj (NM_008982.2,1291-1309).
ccaaactgtcaataagact

SEQ ID NO: 587564 - DNA, 19 bp, Mus musculus
  siRNA target sequence for Ptprj (NM_008982.2,1392-1410).
caggcttcctccaagtgta

SEQ ID NO: 587565 - DNA, 19 bp, Mus musculus
  siRNA target sequence for Ptprj (NM_008982.2,1431-1449).
ctgacttccgagtgacaaa

SEQ ID NO: 587566 - DNA, 19 bp, Mus musculus
  siRNA target sequence for Ptprj (NM_008982.2,1453-1471).
cagcacaagggcaattggt

SEQ ID NO: 587567 - DNA, 19 bp, Mus musculus
  siRNA target sequence for Ptprj (NM_008982.2,1455-1473).
gcacaagggcaattggttt

SEQ ID NO: 587568 - DNA, 19 bp, Mus musculus
  siRNA target sequence for Ptprj (NM_008982.2,1494-1512).
ccaagtccttcgagatttt

SEQ ID NO: 587569 - DNA, 19 bp, Mus musculus
  siRNA target sequence for Ptprj (NM_008982.2,1527-1545).
gaggtgagaagcatcgaaa

SEQ ID NO: 587570 - DNA, 19 bp, Mus musculus
  siRNA target sequence for Ptprj (NM_008982.2,1554-1572).
cgggaaaccagagctatat

SEQ ID NO: 587571 - DNA, 19 bp, Mus musculus
  siRNA target sequence for Ptprj (NM_008982.2,1564-1582).
gagctatatggttgaagat

SEQ ID NO: 587572 - DNA, 19 bp, Mus musculus
  siRNA target sequence for Ptprj (NM_008982.2,1566-1584).
gctatatggttgaagattt

SEQ ID NO: 587573 - DNA, 19 bp, Mus musculus
  siRNA target sequence for Ptprj (NM_008982.2,1588-1606).
gcctggaaccagttaccat

SEQ ID NO: 587574 - DNA, 19 bp, Mus musculus
  siRNA target sequence for Ptprj (NM_008982.2,1589-1607).
cctggaaccagttaccatt

SEQ ID NO: 587575 - DNA, 19 bp, Mus musculus
  siRNA target sequence for Ptprj (NM_008982.2,1590-1608).
ctggaaccagttaccattt

SEQ ID NO: 587576 - DNA, 19 bp, Mus musculus
  siRNA target sequence for Ptprj (NM_008982.2,1596-1614).
ccagttaccattttgagat

SEQ ID NO: 587577 - DNA, 19 bp, Mus musculus
  siRNA target sequence for Ptprj (NM_008982.2,1597-1615).
cagttaccattttgagata

SEQ ID NO: 587578 - DNA, 19 bp, Mus musculus
  siRNA target sequence for Ptprj (NM_008982.2,1603-1621).
ccattttgagataattcca

SEQ ID NO: 587579 - DNA, 19 bp, Mus musculus
  siRNA target sequence for Ptprj (NM_008982.2,1847-1865).
ctcaccccaggcaccttat

SEQ ID NO: 587580 - DNA, 19 bp, Mus musculus
  siRNA target sequence for Ptprj (NM_008982.2,1851-1869).
ccccaggcaccttatacaa

SEQ ID NO: 587581 - DNA, 19 bp, Mus musculus
  siRNA target sequence for Ptprj (NM_008982.2,1852-1870).
cccaggcaccttatacaat

SEQ ID NO: 587582 - DNA, 19 bp, Mus musculus
  siRNA target sequence for Ptprj (NM_008982.2,1854-1872).
caggcaccttatacaatgt

SEQ ID NO: 587583 - DNA, 19 bp, Mus musculus
  siRNA target sequence for Ptprj (NM_008982.2,1904-1922).
ggaatctccaactccatta

SEQ ID NO: 587584 - DNA, 19 bp, Mus musculus
  siRNA target sequence for Ptprj (NM_008982.2,1946-1964).
gtgtcccacattgaagtaa

SEQ ID NO: 587585 - DNA, 19 bp, Mus musculus
  siRNA target sequence for Ptprj (NM_008982.2,2027-2045).
gcctactccgtccttatct

SEQ ID NO: 587586 - DNA, 19 bp, Mus musculus
  siRNA target sequence for Ptprj (NM_008982.2,2028-2046).
cctactccgtccttatctt

SEQ ID NO: 587587 - DNA, 19 bp, Mus musculus
  siRNA target sequence for Ptprj (NM_008982.2,2054-2072).
ggagatggcagcaatgtaa

SEQ ID NO: 587588 - DNA, 19 bp, Mus musculus
  siRNA target sequence for Ptprj (NM_008982.2,2119-2137).
ccctggtgtctcttacaca

SEQ ID NO: 587589 - DNA, 19 bp, Mus musculus
  siRNA target sequence for Ptprj (NM_008982.2,2136-2154).
cagtgaagatccttacaca

SEQ ID NO: 587590 - DNA, 19 bp, Mus musculus
  siRNA target sequence for Ptprj (NM_008982.2,2322-2340).
gtgattcctgggacaatat

SEQ ID NO: 587591 - DNA, 19 bp, Mus musculus
  siRNA target sequence for Ptprj (NM_008982.2,2324-2342).
gattcctgggacaatatga

SEQ ID NO: 587592 - DNA, 19 bp, Mus musculus
  siRNA target sequence for Ptprj (NM_008982.2,2385-2403).
ggacggaagtcgcctattt

SEQ ID NO: 587593 - DNA, 19 bp, Mus musculus
  siRNA target sequence for Ptprj (NM_008982.2,2388-2406).
cggaagtcgcctatttgaa

SEQ ID NO: 587594 - DNA, 19 bp, Mus musculus
  siRNA target sequence for Ptprj (NM_008982.2,2389-2407).
ggaagtcgcctatttgaat

SEQ ID NO: 587595 - DNA, 19 bp, Mus musculus
  siRNA target sequence for Ptprj (NM_008982.2,2390-2408).
gaagtcgcctatttgaatt

SEQ ID NO: 587596 - DNA, 19 bp, Mus musculus
  siRNA target sequence for Ptprj (NM_008982.2,2393-2411).
gtcgcctatttgaattttt

SEQ ID NO: 587597 - DNA, 19 bp, Mus musculus
  siRNA target sequence for Ptprj (NM_008982.2,2511-2529).
cggatggatcccctaatat

SEQ ID NO: 587598 - DNA, 19 bp, Mus musculus
  siRNA target sequence for Ptprj (NM_008982.2,2512-2530).
ggatggatcccctaatatt

SEQ ID NO: 587599 - DNA, 19 bp, Mus musculus
  siRNA target sequence for Ptprj (NM_008982.2,2513-2531).
gatggatcccctaatatta

SEQ ID NO: 587600 - DNA, 19 bp, Mus musculus
  siRNA target sequence for Ptprj (NM_008982.2,2516-2534).
ggatcccctaatattacat

SEQ ID NO: 587601 - DNA, 19 bp, Mus musculus
  siRNA target sequence for Ptprj (NM_008982.2,2535-2553).
cggtcagtcacaattcagt

SEQ ID NO: 587602 - DNA, 19 bp, Mus musculus
  siRNA target sequence for Ptprj (NM_008982.2,2536-2554).
ggtcagtcacaattcagta

SEQ ID NO: 587603 - DNA, 19 bp, Mus musculus
  siRNA target sequence for Ptprj (NM_008982.2,2541-2559).
gtcacaattcagtaaaggt

SEQ ID NO: 587604 - DNA, 19 bp, Mus musculus
  siRNA target sequence for Ptprj (NM_008982.2,2543-2561).
cacaattcagtaaaggtta

SEQ ID NO: 587605 - DNA, 19 bp, Mus musculus
  siRNA target sequence for Ptprj (NM_008982.2,2580-2598).
ccagccacggacctatcaa

SEQ ID NO: 587606 - DNA, 19 bp, Mus musculus
  siRNA target sequence for Ptprj (NM_008982.2,2581-2599).
cagccacggacctatcaaa

SEQ ID NO: 587607 - DNA, 19 bp, Mus musculus
  siRNA target sequence for Ptprj (NM_008982.2,2645-2663).
gcagatgttttgaagtaca

SEQ ID NO: 587608 - DNA, 19 bp, Mus musculus
  siRNA target sequence for Ptprj (NM_008982.2,2662-2680).
cacgtatgaggatttcaaa

SEQ ID NO: 587609 - DNA, 19 bp, Mus musculus
  siRNA target sequence for Ptprj (NM_008982.2,2682-2700).
ggggagcctcggatactta

SEQ ID NO: 587610 - DNA, 19 bp, Mus musculus
  siRNA target sequence for Ptprj (NM_008982.2,2683-2701).
gggagcctcggatacttat

SEQ ID NO: 587611 - DNA, 19 bp, Mus musculus
  siRNA target sequence for Ptprj (NM_008982.2,2685-2703).
gagcctcggatacttatgt

SEQ ID NO: 587612 - DNA, 19 bp, Mus musculus
  siRNA target sequence for Ptprj (NM_008982.2,2687-2705).
gcctcggatacttatgtca

SEQ ID NO: 587613 - DNA, 19 bp, Mus musculus
  siRNA target sequence for Ptprj (NM_008982.2,2691-2709).
cggatacttatgtcacata

SEQ ID NO: 587614 - DNA, 19 bp, Mus musculus
  siRNA target sequence for Ptprj (NM_008982.2,2702-2720).
gtcacatacctcataagaa

SEQ ID NO: 587615 - DNA, 19 bp, Mus musculus
  siRNA target sequence for Ptprj (NM_008982.2,2745-2763).
gcttgtctgaagtcttgaa

SEQ ID NO: 587616 - DNA, 19 bp, Mus musculus
  siRNA target sequence for Ptprj (NM_008982.2,2855-2873).
ggctttaccaatattacct

SEQ ID NO: 587617 - DNA, 19 bp, Mus musculus
  siRNA target sequence for Ptprj (NM_008982.2,2856-2874).
gctttaccaatattaccta

SEQ ID NO: 587618 - DNA, 19 bp, Mus musculus
  siRNA target sequence for Ptprj (NM_008982.2,2918-2936).
gtgtctttcagtccatatt

SEQ ID NO: 587619 - DNA, 19 bp, Mus musculus
  siRNA target sequence for Ptprj (NM_008982.2,2981-2999).
gcagtgtttggatgtatct

SEQ ID NO: 587620 - DNA, 19 bp, Mus musculus
  siRNA target sequence for Ptprj (NM_008982.2,2982-3000).
cagtgtttggatgtatctt

SEQ ID NO: 587621 - DNA, 19 bp, Mus musculus
  siRNA target sequence for Ptprj (NM_008982.2,3127-3145).
gaattttgaggcctacttt

SEQ ID NO: 587622 - DNA, 19 bp, Mus musculus
  siRNA target sequence for Ptprj (NM_008982.2,3154-3172).
gcaagctgactctaactgt

SEQ ID NO: 587623 - DNA, 19 bp, Mus musculus
  siRNA target sequence for Ptprk (NM_008983.1,1265-1283).
gtgactaccaccaggattt

SEQ ID NO: 587624 - DNA, 19 bp, Mus musculus
  siRNA target sequence for Ptprk (NM_008983.1,1272-1290).
ccaccaggatttatacgat

SEQ ID NO: 587625 - DNA, 19 bp, Mus musculus
  siRNA target sequence for Ptprk (NM_008983.1,1278-1296).
ggatttatacgatgacttt

SEQ ID NO: 587626 - DNA, 19 bp, Mus musculus
  siRNA target sequence for Ptprk (NM_008983.1,1313-1331).
gtgcgcaggaacctcatta

SEQ ID NO: 587627 - DNA, 19 bp, Mus musculus
  siRNA target sequence for Ptprk (NM_008983.1,1349-1367).
ctcaaggttcctatatggt

SEQ ID NO: 587628 - DNA, 19 bp, Mus musculus
  siRNA target sequence for Ptprk (NM_008983.1,1371-1389).
ggactcctcaaatcatgat

SEQ ID NO: 587629 - DNA, 19 bp, Mus musculus
  siRNA target sequence for Ptprk (NM_008983.1,1485-1503).
gaaccctggcactttgaat

SEQ ID NO: 587630 - DNA, 19 bp, Mus musculus
  siRNA target sequence for Ptprk (NM_008983.1,1506-1524).
cctagttagggtgaataaa

SEQ ID NO: 587631 - DNA, 19 bp, Mus musculus
  siRNA target sequence for Ptprk (NM_008983.1,1531-1549).
cttgctaatccaatttgga

SEQ ID NO: 587632 - DNA, 19 bp, Mus musculus
  siRNA target sequence for Ptprk (NM_008983.1,1613-1631).
ccaatgaataccaggtaat

SEQ ID NO: 587633 - DNA, 19 bp, Mus musculus
  siRNA target sequence for Ptprk (NM_008983.1,1652-1670).
gagggagaagtggttatat

SEQ ID NO: 587634 - DNA, 19 bp, Mus musculus
  siRNA target sequence for Ptprk (NM_008983.1,1687-1705).
caagtcctgagttatcctt

SEQ ID NO: 587635 - DNA, 19 bp, Mus musculus
  siRNA target sequence for Ptprk (NM_008983.1,1757-1775).
ggcagaatgctacatttca

SEQ ID NO: 587636 - DNA, 19 bp, Mus musculus
  siRNA target sequence for Ptprk (NM_008983.1,1793-1811).
gagatgctgtgcataacaa

SEQ ID NO: 587637 - DNA, 19 bp, Mus musculus
  siRNA target sequence for Ptprk (NM_008983.1,1795-1813).
gatgctgtgcataacaagt

SEQ ID NO: 587638 - DNA, 19 bp, Mus musculus
  siRNA target sequence for Ptprk (NM_008983.1,1798-1816).
gctgtgcataacaagttat

SEQ ID NO: 587639 - DNA, 19 bp, Mus musculus
  siRNA target sequence for Ptprk (NM_008983.1,1846-1864).
cccgtagcccagactaaga

SEQ ID NO: 587640 - DNA, 19 bp, Mus musculus
  siRNA target sequence for Ptprk (NM_008983.1,1974-1992).
caattttgctcaactcatt

SEQ ID NO: 587641 - DNA, 19 bp, Mus musculus
  siRNA target sequence for Ptprk (NM_008983.1,2052-2070).
cttgctgatccaactaaat

SEQ ID NO: 587642 - DNA, 19 bp, Mus musculus
  siRNA target sequence for Ptprk (NM_008983.1,2103-2121).
cctgaaagaagtagagtat

SEQ ID NO: 587643 - DNA, 19 bp, Mus musculus
  siRNA target sequence for Ptprk (NM_008983.1,2113-2131).
gtagagtatcgaatgacat

SEQ ID NO: 587644 - DNA, 19 bp, Mus musculus
  siRNA target sequence for Ptprk (NM_008983.1,2156-2174).
cagtcaacgcaccaacata

SEQ ID NO: 587645 - DNA, 19 bp, Mus musculus
  siRNA target sequence for Ptprk (NM_008983.1,2260-2278).
ggaccaccactgatcacta

SEQ ID NO: 587646 - DNA, 19 bp, Mus musculus
  siRNA target sequence for Ptprk (NM_008983.1,2302-2320).
cggacaccaaagactttaa

SEQ ID NO: 587647 - DNA, 19 bp, Mus musculus
  siRNA target sequence for Ptprk (NM_008983.1,2303-2321).
ggacaccaaagactttaaa

SEQ ID NO: 587648 - DNA, 19 bp, Mus musculus
  siRNA target sequence for Ptprk (NM_008983.1,2306-2324).
caccaaagactttaaagat

SEQ ID NO: 587649 - DNA, 19 bp, Mus musculus
  siRNA target sequence for Ptprk (NM_008983.1,2362-2380).
gagtccttgggctacaaca

SEQ ID NO: 587650 - DNA, 19 bp, Mus musculus
  siRNA target sequence for Ptprk (NM_008983.1,2384-2402).
ctcgttgccacactttcaa

SEQ ID NO: 587651 - DNA, 19 bp, Mus musculus
  siRNA target sequence for Ptprk (NM_008983.1,2408-2426).
ctatctgctaccattactt

SEQ ID NO: 587652 - DNA, 19 bp, Mus musculus
  siRNA target sequence for Ptprk (NM_008983.1,2477-2495).
cccctcagcatgttgtgaa

SEQ ID NO: 587653 - DNA, 19 bp, Mus musculus
  siRNA target sequence for Ptprk (NM_008983.1,2497-2515).
catctgccaccttacacaa

SEQ ID NO: 587654 - DNA, 19 bp, Mus musculus
  siRNA target sequence for Ptprk (NM_008983.1,2571-2589).
gacaatcatccaaactgat

SEQ ID NO: 587655 - DNA, 19 bp, Mus musculus
  siRNA target sequence for Ptprk (NM_008983.1,2629-2647).
ggaacatcctttgaaaaca

SEQ ID NO: 587656 - DNA, 19 bp, Mus musculus
  siRNA target sequence for Ptprk (NM_008983.1,2671-2689).
ccactggaaccgaatggaa

SEQ ID NO: 587657 - DNA, 19 bp, Mus musculus
  siRNA target sequence for Ptprk (NM_008983.1,2672-2690).
cactggaaccgaatggaat

SEQ ID NO: 587658 - DNA, 19 bp, Mus musculus
  siRNA target sequence for Ptprk (NM_008983.1,2674-2692).
ctggaaccgaatggaatta

SEQ ID NO: 587659 - DNA, 19 bp, Mus musculus
  siRNA target sequence for Ptprk (NM_008983.1,2677-2695).
gaaccgaatggaattatca

SEQ ID NO: 587660 - DNA, 19 bp, Mus musculus
  siRNA target sequence for Ptprk (NM_008983.1,2687-2705).
gaattatcactcagtatga

SEQ ID NO: 587661 - DNA, 19 bp, Mus musculus
  siRNA target sequence for Ptprk (NM_008983.1,2698-2716).
cagtatgaggtgagctata

SEQ ID NO: 587662 - DNA, 19 bp, Mus musculus
  siRNA target sequence for Ptprk (NM_008983.1,2707-2725).
gtgagctatagcagcataa

SEQ ID NO: 587663 - DNA, 19 bp, Mus musculus
  siRNA target sequence for Ptprk (NM_008983.1,2709-2727).
gagctatagcagcataaga

SEQ ID NO: 587664 - DNA, 19 bp, Mus musculus
  siRNA target sequence for Ptprk (NM_008983.1,2712-2730).
ctatagcagcataagatca

SEQ ID NO: 587665 - DNA, 19 bp, Mus musculus
  siRNA target sequence for Ptprk (NM_008983.1,2717-2735).
gcagcataagatcatttga

SEQ ID NO: 587666 - DNA, 19 bp, Mus musculus
  siRNA target sequence for Ptprk (NM_008983.1,2789-2807).
gtacacaccatgtatttat

SEQ ID NO: 587667 - DNA, 19 bp, Mus musculus
  siRNA target sequence for Ptprk (NM_008983.1,2821-2839).
ggaaccacctaccagtttt

SEQ ID NO: 587668 - DNA, 19 bp, Mus musculus
  siRNA target sequence for Ptprk (NM_008983.1,2822-2840).
gaaccacctaccagttttt

SEQ ID NO: 587669 - DNA, 19 bp, Mus musculus
  siRNA target sequence for Ptprk (NM_008983.1,2873-2891).
cagcaacagccatcaatgt

SEQ ID NO: 587670 - DNA, 19 bp, Mus musculus
  siRNA target sequence for Ptprk (NM_008983.1,2912-2930).
caagcttacctgactatga

SEQ ID NO: 587671 - DNA, 19 bp, Mus musculus
  siRNA target sequence for Ptprk (NM_008983.1,2997-3015).
caaaggtgctcctatcagt

SEQ ID NO: 587672 - DNA, 19 bp, Mus musculus
  siRNA target sequence for Ptprk (NM_008983.1,3194-3212).
gtgacaaccggacctataa

SEQ ID NO: 587673 - DNA, 19 bp, Mus musculus
  siRNA target sequence for Ptprk (NM_008983.1,3248-3266).
gatacaacatctatttcca

SEQ ID NO: 587674 - DNA, 19 bp, Mus musculus
  siRNA target sequence for Ptprk (NM_008983.1,3300-3318).
ccaatgtgtacgaattgct

SEQ ID NO: 587675 - DNA, 19 bp, Mus musculus
  siRNA target sequence for Ptprk (NM_008983.1,3301-3319).
caatgtgtacgaattgcta

SEQ ID NO: 587676 - DNA, 19 bp, Mus musculus
  siRNA target sequence for Ptprk (NM_008983.1,3305-3323).
gtgtacgaattgctacaaa

SEQ ID NO: 587677 - DNA, 19 bp, Mus musculus
  siRNA target sequence for Ptprk (NM_008983.1,3404-3422).
gtgctggcatcctagtgtt

SEQ ID NO: 587678 - DNA, 19 bp, Mus musculus
  siRNA target sequence for Ptprk (NM_008983.1,3407-3425).
ctggcatcctagtgttcat

SEQ ID NO: 587679 - DNA, 19 bp, Mus musculus
  siRNA target sequence for Ptprk (NM_008983.1,3442-3460).
gtcatagtaattgtgaaaa

SEQ ID NO: 587680 - DNA, 19 bp, Mus musculus
  siRNA target sequence for Ptprk (NM_008983.1,3518-3536).
cccacatggtgaatgctat

SEQ ID NO: 587681 - DNA, 19 bp, Mus musculus
  siRNA target sequence for Ptprk (NM_008983.1,3645-3663).
gccgactgccgtgttagat

SEQ ID NO: 587682 - DNA, 19 bp, Mus musculus
  siRNA target sequence for Ptprk (NM_008983.1,3647-3665).
cgactgccgtgttagatga

SEQ ID NO: 587683 - DNA, 19 bp, Mus musculus
  siRNA target sequence for Ptprk (NM_008983.1,3872-3890).
cttgggatgtggctaaaaa

SEQ ID NO: 587684 - DNA, 19 bp, Mus musculus
  siRNA target sequence for Ptprk (NM_008983.1,3875-3893).
gggatgtggctaaaaagga

SEQ ID NO: 587685 - DNA, 19 bp, Mus musculus
  siRNA target sequence for Ptprk (NM_008983.1,3876-3894).
ggatgtggctaaaaaggat

SEQ ID NO: 587686 - DNA, 19 bp, Mus musculus
  siRNA target sequence for Ptprk (NM_008983.1,3966-3984).
ggaagatgacccttcttca

SEQ ID NO: 587687 - DNA, 19 bp, Mus musculus
  siRNA target sequence for Ptprk (NM_008983.1,3975-3993).
cccttcttcagattacatt

SEQ ID NO: 587688 - DNA, 19 bp, Mus musculus
  siRNA target sequence for Ptprk (NM_008983.1,3977-3995).
cttcttcagattacattaa

SEQ ID NO: 587689 - DNA, 19 bp, Mus musculus
  siRNA target sequence for Ptprk (NM_008983.1,4042-4060).
ccaagccactacattgcaa

SEQ ID NO: 587690 - DNA, 19 bp, Mus musculus
  siRNA target sequence for Ptprk (NM_008983.1,4075-4093).
catgaaaccgtatatgatt

SEQ ID NO: 587691 - DNA, 19 bp, Mus musculus
  siRNA target sequence for Ptprk (NM_008983.1,4358-4376).
caacagggctcctgtcatt

SEQ ID NO: 587692 - DNA, 19 bp, Mus musculus
  siRNA target sequence for Ptprk (NM_008983.1,4381-4399).
cggagagtcaagctatcta

SEQ ID NO: 587693 - DNA, 19 bp, Mus musculus
  siRNA target sequence for Ptprk (NM_008983.1,4540-4558).
cgatctcggcgcattaata

SEQ ID NO: 587694 - DNA, 19 bp, Mus musculus
  siRNA target sequence for Ptprk (NM_008983.1,4541-4559).
gatctcggcgcattaatat

SEQ ID NO: 587695 - DNA, 19 bp, Mus musculus
  siRNA target sequence for Ptprk (NM_008983.1,4544-4562).
ctcggcgcattaatatggt

SEQ ID NO: 587696 - DNA, 19 bp, Mus musculus
  siRNA target sequence for Ptprk (NM_008983.1,4666-4684).
gatatgattcgaatagact

SEQ ID NO: 587697 - DNA, 19 bp, Mus musculus
  siRNA target sequence for Ptprk (NM_008983.1,4676-4694).
gaatagactctcagactaa

SEQ ID NO: 587698 - DNA, 19 bp, Mus musculus
  siRNA target sequence for Ptprk (NM_008983.1,4700-4718).
ctcatctcaaagatgaatt

SEQ ID NO: 587699 - DNA, 19 bp, Mus musculus
  siRNA target sequence for Ptprk (NM_008983.1,4878-4896).
caatgctgctcttatggat

SEQ ID NO: 587700 - DNA, 19 bp, Mus musculus
  siRNA target sequence for Ptprk (NM_008983.1,4915-4933).
gctttcatcgtcacacaat

SEQ ID NO: 587701 - DNA, 19 bp, Mus musculus
  siRNA target sequence for Ptprk (NM_008983.1,4916-4934).
ctttcatcgtcacacaata

SEQ ID NO: 587702 - DNA, 19 bp, Mus musculus
  siRNA target sequence for Ptprk (NM_008983.1,4964-4982).
ggagattagtatatgatta

SEQ ID NO: 587703 - DNA, 19 bp, Mus musculus
  siRNA target sequence for Ptprk (NM_008983.1,4994-5012).
ccatcgtgatgctaaatga

SEQ ID NO: 587704 - DNA, 19 bp, Mus musculus
  siRNA target sequence for Ptprk (NM_008983.1,4995-5013).
catcgtgatgctaaatgaa

SEQ ID NO: 587705 - DNA, 19 bp, Mus musculus
  siRNA target sequence for Ptprk (NM_008983.1,5064-5082).
gcgatatggtcctatccaa

SEQ ID NO: 587706 - DNA, 19 bp, Mus musculus
  siRNA target sequence for Ptprk (NM_008983.1,5075-5093).
ctatccaagtggaatgtat

SEQ ID NO: 587707 - DNA, 19 bp, Mus musculus
  siRNA target sequence for Ptprk (NM_008983.1,5079-5097).
ccaagtggaatgtatgtct

SEQ ID NO: 587708 - DNA, 19 bp, Mus musculus
  siRNA target sequence for Ptprk (NM_008983.1,5080-5098).
caagtggaatgtatgtctt

SEQ ID NO: 587709 - DNA, 19 bp, Mus musculus
  siRNA target sequence for Ptprk (NM_008983.1,5085-5103).
ggaatgtatgtcttgttca

SEQ ID NO: 587710 - DNA, 19 bp, Mus musculus
  siRNA target sequence for Ptprk (NM_008983.1,5086-5104).
gaatgtatgtcttgttcaa

SEQ ID NO: 587711 - DNA, 19 bp, Mus musculus
  siRNA target sequence for Ptprk (NM_008983.1,5111-5129).
gtgatgtgatcaatcgaat

SEQ ID NO: 587712 - DNA, 19 bp, Mus musculus
  siRNA target sequence for Ptprk (NM_008983.1,5113-5131).
gatgtgatcaatcgaattt

SEQ ID NO: 587713 - DNA, 19 bp, Mus musculus
  siRNA target sequence for Ptprk (NM_008983.1,5155-5173).
ccacaggagggctatctga

SEQ ID NO: 587714 - DNA, 19 bp, Mus musculus
  siRNA target sequence for Ptprk (NM_008983.1,5156-5174).
cacaggagggctatctgat

SEQ ID NO: 587715 - DNA, 19 bp, Mus musculus
  siRNA target sequence for Ptprk (NM_008983.1,5165-5183).
gctatctgatggtacaaca

SEQ ID NO: 587716 - DNA, 19 bp, Mus musculus
  siRNA target sequence for Ptprk (NM_008983.1,5225-5243).
gctccaaacgctcgttttt

SEQ ID NO: 587717 - DNA, 19 bp, Mus musculus
  siRNA target sequence for Ptprk (NM_008983.1,5228-5246).
ccaaacgctcgtttttgaa

SEQ ID NO: 587718 - DNA, 19 bp, Mus musculus
  siRNA target sequence for Ptprk (NM_008983.1,5229-5247).
caaacgctcgtttttgaaa

SEQ ID NO: 587719 - DNA, 19 bp, Mus musculus
  siRNA target sequence for Ptprk (NM_008983.1,5233-5251).
cgctcgtttttgaaattga

SEQ ID NO: 587720 - DNA, 19 bp, Mus musculus
  siRNA target sequence for Ptprk (NM_008983.1,5235-5253).
ctcgtttttgaaattgata

SEQ ID NO: 587721 - DNA, 19 bp, Mus musculus
  siRNA target sequence for Ptprk (NM_008983.1,5237-5255).
cgtttttgaaattgatact

SEQ ID NO: 587722 - DNA, 19 bp, Mus musculus
  siRNA target sequence for Ptprk (NM_008983.1,5291-5309).
gggaaggccggacaatcat

SEQ ID NO: 587723 - DNA, 19 bp, Mus musculus
  siRNA target sequence for Ptprk (NM_008983.1,5348-5366).
gtgccataggcattgttgt

SEQ ID NO: 587724 - DNA, 19 bp, Mus musculus
  siRNA target sequence for Ptprk (NM_008983.1,5452-5470).
ccggagcagtatcgttttt

SEQ ID NO: 587725 - DNA, 19 bp, Mus musculus
  siRNA target sequence for Ptprk (NM_008983.1,5455-5473).
gagcagtatcgtttttgct

SEQ ID NO: 587726 - DNA, 19 bp, Mus musculus
  siRNA target sequence for Ptprk (NM_008983.1,5457-5475).
gcagtatcgtttttgctat

SEQ ID NO: 587727 - DNA, 19 bp, Mus musculus
  siRNA target sequence for Ptprk (NM_008983.1,5460-5478).
gtatcgtttttgctatgat

SEQ ID NO: 587728 - DNA, 19 bp, Mus musculus
  siRNA target sequence for Ptprm (NM_008984.1,369-387).
ggacttgcctggtgacttt

SEQ ID NO: 587729 - DNA, 19 bp, Mus musculus
  siRNA target sequence for Ptprm (NM_008984.1,435-453).
gcctctttgatgaaccata

SEQ ID NO: 587730 - DNA, 19 bp, Mus musculus
  siRNA target sequence for Ptprm (NM_008984.1,454-472).
cagcacatgtggatatagt

SEQ ID NO: 587731 - DNA, 19 bp, Mus musculus
  siRNA target sequence for Ptprm (NM_008984.1,471-489).
gtcaagctgacgaagatga

SEQ ID NO: 587732 - DNA, 19 bp, Mus musculus
  siRNA target sequence for Ptprm (NM_008984.1,638-656).
cactgcatcgactttcact

SEQ ID NO: 587733 - DNA, 19 bp, Mus musculus
  siRNA target sequence for Ptprm (NM_008984.1,642-660).
gcatcgactttcactactt

SEQ ID NO: 587734 - DNA, 19 bp, Mus musculus
  siRNA target sequence for Ptprm (NM_008984.1,643-661).
catcgactttcactacttt

SEQ ID NO: 587735 - DNA, 19 bp, Mus musculus
  siRNA target sequence for Ptprm (NM_008984.1,686-704).
cctgggttgctcaatgtct

SEQ ID NO: 587736 - DNA, 19 bp, Mus musculus
  siRNA target sequence for Ptprm (NM_008984.1,687-705).
ctgggttgctcaatgtcta

SEQ ID NO: 587737 - DNA, 19 bp, Mus musculus
  siRNA target sequence for Ptprm (NM_008984.1,690-708).
ggttgctcaatgtctatgt

SEQ ID NO: 587738 - DNA, 19 bp, Mus musculus
  siRNA target sequence for Ptprm (NM_008984.1,799-817).
cacgttctggcccaacttt

SEQ ID NO: 587739 - DNA, 19 bp, Mus musculus
  siRNA target sequence for Ptprm (NM_008984.1,867-885).
ctatcgatgaagttaaggt

SEQ ID NO: 587740 - DNA, 19 bp, Mus musculus
  siRNA target sequence for Ptprm (NM_008984.1,1011-1029).
ggctgcagggaattgatgt

SEQ ID NO: 587741 - DNA, 19 bp, Mus musculus
  siRNA target sequence for Ptprm (NM_008984.1,1037-1055).
gcccctctgaaggagataa

SEQ ID NO: 587742 - DNA, 19 bp, Mus musculus
  siRNA target sequence for Ptprm (NM_008984.1,1049-1067).
gagataaaggtgactagtt

SEQ ID NO: 587743 - DNA, 19 bp, Mus musculus
  siRNA target sequence for Ptprm (NM_008984.1,1074-1092).
gattcatagcctcatttaa

SEQ ID NO: 587744 - DNA, 19 bp, Mus musculus
  siRNA target sequence for Ptprm (NM_008984.1,1078-1096).
catagcctcatttaacgtt

SEQ ID NO: 587745 - DNA, 19 bp, Mus musculus
  siRNA target sequence for Ptprm (NM_008984.1,1082-1100).
gcctcatttaacgttgtaa

SEQ ID NO: 587746 - DNA, 19 bp, Mus musculus
  siRNA target sequence for Ptprm (NM_008984.1,1083-1101).
cctcatttaacgttgtaaa

SEQ ID NO: 587747 - DNA, 19 bp, Mus musculus
  siRNA target sequence for Ptprm (NM_008984.1,1123-1141).
gaagtaccgctgcatgatt

SEQ ID NO: 587748 - DNA, 19 bp, Mus musculus
  siRNA target sequence for Ptprm (NM_008984.1,1151-1169).
ggaggtgtcgggatatcaa

SEQ ID NO: 587749 - DNA, 19 bp, Mus musculus
  siRNA target sequence for Ptprm (NM_008984.1,1152-1170).
gaggtgtcgggatatcaaa

SEQ ID NO: 587750 - DNA, 19 bp, Mus musculus
  siRNA target sequence for Ptprm (NM_008984.1,1155-1173).
gtgtcgggatatcaaacta

SEQ ID NO: 587751 - DNA, 19 bp, Mus musculus
  siRNA target sequence for Ptprm (NM_008984.1,1167-1185).
caaactacgcagaattggt

SEQ ID NO: 587752 - DNA, 19 bp, Mus musculus
  siRNA target sequence for Ptprm (NM_008984.1,1174-1192).
cgcagaattggtagttaaa

SEQ ID NO: 587753 - DNA, 19 bp, Mus musculus
  siRNA target sequence for Ptprm (NM_008984.1,1176-1194).
cagaattggtagttaaaga

SEQ ID NO: 587754 - DNA, 19 bp, Mus musculus
  siRNA target sequence for Ptprm (NM_008984.1,1232-1250).
gtcggagcaacctatctgt

SEQ ID NO: 587755 - DNA, 19 bp, Mus musculus
  siRNA target sequence for Ptprm (NM_008984.1,1403-1421).
gagatcagtgtgcttctta

SEQ ID NO: 587756 - DNA, 19 bp, Mus musculus
  siRNA target sequence for Ptprm (NM_008984.1,1492-1510).
catgcgtggcccgagaaaa

SEQ ID NO: 587757 - DNA, 19 bp, Mus musculus
  siRNA target sequence for Ptprm (NM_008984.1,1495-1513).
gcgtggcccgagaaaacta

SEQ ID NO: 587758 - DNA, 19 bp, Mus musculus
  siRNA target sequence for Ptprm (NM_008984.1,1500-1518).
gcccgagaaaactagaagt

SEQ ID NO: 587759 - DNA, 19 bp, Mus musculus
  siRNA target sequence for Ptprm (NM_008984.1,1550-1568).
cgctgggagccgtttggat

SEQ ID NO: 587760 - DNA, 19 bp, Mus musculus
  siRNA target sequence for Ptprm (NM_008984.1,1551-1569).
gctgggagccgtttggata

SEQ ID NO: 587761 - DNA, 19 bp, Mus musculus
  siRNA target sequence for Ptprm (NM_008984.1,1554-1572).
gggagccgtttggatacaa

SEQ ID NO: 587762 - DNA, 19 bp, Mus musculus
  siRNA target sequence for Ptprm (NM_008984.1,1555-1573).
ggagccgtttggatacaat

SEQ ID NO: 587763 - DNA, 19 bp, Mus musculus
  siRNA target sequence for Ptprm (NM_008984.1,1578-1596).
ctcgttgccacagttataa

SEQ ID NO: 587764 - DNA, 19 bp, Mus musculus
  siRNA target sequence for Ptprm (NM_008984.1,1581-1599).
gttgccacagttataatct

SEQ ID NO: 587765 - DNA, 19 bp, Mus musculus
  siRNA target sequence for Ptprm (NM_008984.1,1598-1616).
ctcacagtgcactatggtt

SEQ ID NO: 587766 - DNA, 19 bp, Mus musculus
  siRNA target sequence for Ptprm (NM_008984.1,1652-1670).
gtgagctgggatacagata

SEQ ID NO: 587767 - DNA, 19 bp, Mus musculus
  siRNA target sequence for Ptprm (NM_008984.1,1717-1735).
cgtcagcgtgaagcttatt

SEQ ID NO: 587768 - DNA, 19 bp, Mus musculus
  siRNA target sequence for Ptprm (NM_008984.1,1722-1740).
gcgtgaagcttattctgat

SEQ ID NO: 587769 - DNA, 19 bp, Mus musculus
  siRNA target sequence for Ptprm (NM_008984.1,1802-1820).
ggagctgtccccactgaat

SEQ ID NO: 587770 - DNA, 19 bp, Mus musculus
  siRNA target sequence for Ptprm (NM_008984.1,1866-1884).
gagagccgacacaaacata

SEQ ID NO: 587771 - DNA, 19 bp, Mus musculus
  siRNA target sequence for Ptprm (NM_008984.1,1881-1899).
catatggggtcatcacttt

SEQ ID NO: 587772 - DNA, 19 bp, Mus musculus
  siRNA target sequence for Ptprm (NM_008984.1,1915-1933).
caaagcagtcagttccttt

SEQ ID NO: 587773 - DNA, 19 bp, Mus musculus
  siRNA target sequence for Ptprm (NM_008984.1,1934-1952).
gacccggaaatagatttat

SEQ ID NO: 587774 - DNA, 19 bp, Mus musculus
  siRNA target sequence for Ptprm (NM_008984.1,1937-1955).
ccggaaatagatttatcca

SEQ ID NO: 587775 - DNA, 19 bp, Mus musculus
  siRNA target sequence for Ptprm (NM_008984.1,1957-1975).
ccaaagtgggcgagtttca

SEQ ID NO: 587776 - DNA, 19 bp, Mus musculus
  siRNA target sequence for Ptprm (NM_008984.1,1958-1976).
caaagtgggcgagtttcaa

SEQ ID NO: 587777 - DNA, 19 bp, Mus musculus
  siRNA target sequence for Ptprm (NM_008984.1,1962-1980).
gtgggcgagtttcaaaact

SEQ ID NO: 587778 - DNA, 19 bp, Mus musculus
  siRNA target sequence for Ptprm (NM_008984.1,2116-2134).
catgccagcctatgaattt

SEQ ID NO: 587779 - DNA, 19 bp, Mus musculus
  siRNA target sequence for Ptprm (NM_008984.1,2141-2159).
cctttgaatcagactgata

SEQ ID NO: 587780 - DNA, 19 bp, Mus musculus
  siRNA target sequence for Ptprm (NM_008984.1,2209-2227).
cagtgtctatcaaatcgtt

SEQ ID NO: 587781 - DNA, 19 bp, Mus musculus
  siRNA target sequence for Ptprm (NM_008984.1,2237-2255).
gaacgtcctcggagaacta

SEQ ID NO: 587782 - DNA, 19 bp, Mus musculus
  siRNA target sequence for Ptprm (NM_008984.1,2240-2258).
cgtcctcggagaactaaga

SEQ ID NO: 587783 - DNA, 19 bp, Mus musculus
  siRNA target sequence for Ptprm (NM_008984.1,2280-2298).
gttacccggtgccaattca

SEQ ID NO: 587784 - DNA, 19 bp, Mus musculus
  siRNA target sequence for Ptprm (NM_008984.1,2369-2387).
gctgctcaaccatttacca

SEQ ID NO: 587785 - DNA, 19 bp, Mus musculus
  siRNA target sequence for Ptprm (NM_008984.1,2370-2388).
ctgctcaaccatttaccat

SEQ ID NO: 587786 - DNA, 19 bp, Mus musculus
  siRNA target sequence for Ptprm (NM_008984.1,2386-2404).
cattggtgacaataagaca

SEQ ID NO: 587787 - DNA, 19 bp, Mus musculus
  siRNA target sequence for Ptprm (NM_008984.1,2435-2453).
ccccataaaagctacagaa

SEQ ID NO: 587788 - DNA, 19 bp, Mus musculus
  siRNA target sequence for Ptprm (NM_008984.1,2445-2463).
gctacagaatttattacca

SEQ ID NO: 587789 - DNA, 19 bp, Mus musculus
  siRNA target sequence for Ptprm (NM_008984.1,2446-2464).
ctacagaatttattaccaa

SEQ ID NO: 587790 - DNA, 19 bp, Mus musculus
  siRNA target sequence for Ptprm (NM_008984.1,2475-2493).
gagccaatggggaaaccaa

SEQ ID NO: 587791 - DNA, 19 bp, Mus musculus
  siRNA target sequence for Ptprm (NM_008984.1,2479-2497).
caatggggaaaccaaaatt

SEQ ID NO: 587792 - DNA, 19 bp, Mus musculus
  siRNA target sequence for Ptprm (NM_008984.1,2598-2616).
caggcatcttgctgtttgt

SEQ ID NO: 587793 - DNA, 19 bp, Mus musculus
  siRNA target sequence for Ptprm (NM_008984.1,2631-2649).
gagtcgtgctggtcatgaa

SEQ ID NO: 587794 - DNA, 19 bp, Mus musculus
  siRNA target sequence for Ptprm (NM_008984.1,2717-2735).
gtgaattctatggataaga

SEQ ID NO: 587795 - DNA, 19 bp, Mus musculus
  siRNA target sequence for Ptprm (NM_008984.1,2760-2778).
gcgacgaagccttctcttt

SEQ ID NO: 587796 - DNA, 19 bp, Mus musculus
  siRNA target sequence for Ptprm (NM_008984.1,2762-2780).
gacgaagccttctctttca

SEQ ID NO: 587797 - DNA, 19 bp, Mus musculus
  siRNA target sequence for Ptprm (NM_008984.1,2779-2797).
catgggcacgcacaatctt

SEQ ID NO: 587798 - DNA, 19 bp, Mus musculus
  siRNA target sequence for Ptprm (NM_008984.1,2782-2800).
gggcacgcacaatcttaat

SEQ ID NO: 587799 - DNA, 19 bp, Mus musculus
  siRNA target sequence for Ptprm (NM_008984.1,2812-2830).
gtcctcgccatcatccttt

SEQ ID NO: 587800 - DNA, 19 bp, Mus musculus
  siRNA target sequence for Ptprm (NM_008984.1,2856-2874).
catcggtgccgaattccta

SEQ ID NO: 587801 - DNA, 19 bp, Mus musculus
  siRNA target sequence for Ptprm (NM_008984.1,2859-2877).
cggtgccgaattcctatta

SEQ ID NO: 587802 - DNA, 19 bp, Mus musculus
  siRNA target sequence for Ptprm (NM_008984.1,2918-2936).
ctggcacagccccatactt

SEQ ID NO: 587803 - DNA, 19 bp, Mus musculus
  siRNA target sequence for Ptprm (NM_008984.1,2921-2939).
gcacagccccatacttata

SEQ ID NO: 587804 - DNA, 19 bp, Mus musculus
  siRNA target sequence for Ptprm (NM_008984.1,2926-2944).
gccccatacttataagaaa

SEQ ID NO: 587805 - DNA, 19 bp, Mus musculus
  siRNA target sequence for Ptprm (NM_008984.1,3145-3163).
gaacatcattgcatatgat

SEQ ID NO: 587806 - DNA, 19 bp, Mus musculus
  siRNA target sequence for Ptprm (NM_008984.1,3238-3256).
ctatcatcgacccaatcat

SEQ ID NO: 587807 - DNA, 19 bp, Mus musculus
  siRNA target sequence for Ptprm (NM_008984.1,3242-3260).
catcgacccaatcattata

SEQ ID NO: 587808 - DNA, 19 bp, Mus musculus
  siRNA target sequence for Ptprm (NM_008984.1,3248-3266).
cccaatcattatattgcaa

SEQ ID NO: 587809 - DNA, 19 bp, Mus musculus
  siRNA target sequence for Ptprm (NM_008984.1,3276-3294).
ccatgcaggagactatcta

SEQ ID NO: 587810 - DNA, 19 bp, Mus musculus
  siRNA target sequence for Ptprm (NM_008984.1,3281-3299).
caggagactatctatgact

SEQ ID NO: 587811 - DNA, 19 bp, Mus musculus
  siRNA target sequence for Ptprm (NM_008984.1,3362-3380).
gtgggaagggtgaaatgct

SEQ ID NO: 587812 - DNA, 19 bp, Mus musculus
  siRNA target sequence for Ptprm (NM_008984.1,3448-3466).
gctggcagaatatgtgata

SEQ ID NO: 587813 - DNA, 19 bp, Mus musculus
  siRNA target sequence for Ptprm (NM_008984.1,3449-3467).
ctggcagaatatgtgataa

SEQ ID NO: 587814 - DNA, 19 bp, Mus musculus
  siRNA target sequence for Ptprm (NM_008984.1,3451-3469).
ggcagaatatgtgataaga

SEQ ID NO: 587815 - DNA, 19 bp, Mus musculus
  siRNA target sequence for Ptprm (NM_008984.1,3472-3490).
gtttgccgtggaaaagaga

SEQ ID NO: 587816 - DNA, 19 bp, Mus musculus
  siRNA target sequence for Ptprm (NM_008984.1,3584-3602).
gtccggcaggtcaaatcca

SEQ ID NO: 587817 - DNA, 19 bp, Mus musculus
  siRNA target sequence for Ptprm (NM_008984.1,3657-3675).
ggacaggttgcttcattgt

SEQ ID NO: 587818 - DNA, 19 bp, Mus musculus
  siRNA target sequence for Ptprm (NM_008984.1,3858-3876).
ggtctctctactatgacat

SEQ ID NO: 587819 - DNA, 19 bp, Mus musculus
  siRNA target sequence for Ptprm (NM_008984.1,3986-4004).
ccccggaaccacgagaaaa

SEQ ID NO: 587820 - DNA, 19 bp, Mus musculus
  siRNA target sequence for Ptprm (NM_008984.1,3987-4005).
cccggaaccacgagaaaaa

SEQ ID NO: 587821 - DNA, 19 bp, Mus musculus
  siRNA target sequence for Ptprm (NM_008984.1,4170-4188).
ggcgactggtcttggatta

SEQ ID NO: 587822 - DNA, 19 bp, Mus musculus
  siRNA target sequence for Ptprm (NM_008984.1,4173-4191).
gactggtcttggattacca

SEQ ID NO: 587823 - DNA, 19 bp, Mus musculus
  siRNA target sequence for Ptprm (NM_008984.1,4190-4208).
cactgcacatccgtagtta

SEQ ID NO: 587824 - DNA, 19 bp, Mus musculus
  siRNA target sequence for Ptprm (NM_008984.1,4194-4212).
gcacatccgtagttatgct

SEQ ID NO: 587825 - DNA, 19 bp, Mus musculus
  siRNA target sequence for Ptprm (NM_008984.1,4434-4452).
ccaagcgctccttcttgaa

SEQ ID NO: 587826 - DNA, 19 bp, Mus musculus
  siRNA target sequence for Ptprm (NM_008984.1,4610-4628).
catgctgtcaagacattga

SEQ ID NO: 587827 - DNA, 19 bp, Mus musculus
  siRNA target sequence for Ptprm (NM_008984.1,4655-4673).
ctcctggatcagtacaagt

SEQ ID NO: 587828 - DNA, 19 bp, Mus musculus
  siRNA target sequence for Ptprn (NM_008985.1,362-380).
gtgtgctccggcaactcat

SEQ ID NO: 587829 - DNA, 19 bp, Mus musculus
  siRNA target sequence for Ptprn (NM_008985.1,512-530).
gccctgcaggggaattgct

SEQ ID NO: 587830 - DNA, 19 bp, Mus musculus
  siRNA target sequence for Ptprn (NM_008985.1,514-532).
cctgcaggggaattgctaa

SEQ ID NO: 587831 - DNA, 19 bp, Mus musculus
  siRNA target sequence for Ptprn (NM_008985.1,518-536).
caggggaattgctaactca

SEQ ID NO: 587832 - DNA, 19 bp, Mus musculus
  siRNA target sequence for Ptprn (NM_008985.1,529-547).
ctaactcagggcaatccta

SEQ ID NO: 587833 - DNA, 19 bp, Mus musculus
  siRNA target sequence for Ptprn (NM_008985.1,1084-1102).
gcagcacaaccagaattga

SEQ ID NO: 587834 - DNA, 19 bp, Mus musculus
  siRNA target sequence for Ptprn (NM_008985.1,1252-1270).
gccgatgtcaagaaaacaa

SEQ ID NO: 587835 - DNA, 19 bp, Mus musculus
  siRNA target sequence for Ptprn (NM_008985.1,1253-1271).
ccgatgtcaagaaaacaat

SEQ ID NO: 587836 - DNA, 19 bp, Mus musculus
  siRNA target sequence for Ptprn (NM_008985.1,1508-1526).
ccgaggagtatggctatat

SEQ ID NO: 587837 - DNA, 19 bp, Mus musculus
  siRNA target sequence for Ptprn (NM_008985.1,1585-1603).
gctgagcacgtgcatatgt

SEQ ID NO: 587838 - DNA, 19 bp, Mus musculus
  siRNA target sequence for Ptprn (NM_008985.1,1604-1622).
cctccggtagctttatcaa

SEQ ID NO: 587839 - DNA, 19 bp, Mus musculus
  siRNA target sequence for Ptprn (NM_008985.1,1916-1934).
cgagacagcgggataagga

SEQ ID NO: 587840 - DNA, 19 bp, Mus musculus
  siRNA target sequence for Ptprn (NM_008985.1,1963-1981).
gcccatggtgacactactt

SEQ ID NO: 587841 - DNA, 19 bp, Mus musculus
  siRNA target sequence for Ptprn (NM_008985.1,1965-1983).
ccatggtgacactactttt

SEQ ID NO: 587842 - DNA, 19 bp, Mus musculus
  siRNA target sequence for Ptprn (NM_008985.1,2014-2032).
gccacaaagtccctgttta

SEQ ID NO: 587843 - DNA, 19 bp, Mus musculus
  siRNA target sequence for Ptprn (NM_008985.1,2351-2369).
cccgaatcaagctgaaagt

SEQ ID NO: 587844 - DNA, 19 bp, Mus musculus
  siRNA target sequence for Ptprn (NM_008985.1,2381-2399).
cttctcggagtgattacat

SEQ ID NO: 587845 - DNA, 19 bp, Mus musculus
  siRNA target sequence for Ptprn (NM_008985.1,2509-2527).
ggctgcactgtcatcgtta

SEQ ID NO: 587846 - DNA, 19 bp, Mus musculus
  siRNA target sequence for Ptprn (NM_008985.1,2510-2528).
gctgcactgtcatcgttat

SEQ ID NO: 587847 - DNA, 19 bp, Mus musculus
  siRNA target sequence for Ptprn (NM_008985.1,2513-2531).
gcactgtcatcgttatgct

SEQ ID NO: 587848 - DNA, 19 bp, Mus musculus
  siRNA target sequence for Ptprn (NM_008985.1,2594-2612).
ccctctaccacgtctatga

SEQ ID NO: 587849 - DNA, 19 bp, Mus musculus
  siRNA target sequence for Ptprn (NM_008985.1,2659-2677).
cggagcttctaccttaaga

SEQ ID NO: 587850 - DNA, 19 bp, Mus musculus
  siRNA target sequence for Ptprn (NM_008985.1,2660-2678).
ggagcttctaccttaagaa

SEQ ID NO: 587851 - DNA, 19 bp, Mus musculus
  siRNA target sequence for Ptprn (NM_008985.1,2805-2823).
ccgctcctgccccatcata

SEQ ID NO: 587852 - DNA, 19 bp, Mus musculus
  siRNA target sequence for Ptprn (NM_008985.1,2807-2825).
gctcctgccccatcatagt

SEQ ID NO: 587853 - DNA, 19 bp, Mus musculus
  siRNA target sequence for Ptprn (NM_008985.1,2855-2873).
gcacctacatccttattga

SEQ ID NO: 587854 - DNA, 19 bp, Mus musculus
  siRNA target sequence for Ptprn (NM_008985.1,2899-2917).
ggagtgaaggagattgata

SEQ ID NO: 587855 - DNA, 19 bp, Mus musculus
  siRNA target sequence for Ptprn (NM_008985.1,2900-2918).
gagtgaaggagattgatat

SEQ ID NO: 587856 - DNA, 19 bp, Mus musculus
  siRNA target sequence for Ptprn (NM_008985.1,2954-2972).
ctggacttgtccgttctaa

SEQ ID NO: 587857 - DNA, 19 bp, Mus musculus
  siRNA target sequence for Ptprn2 (NM_011215.1,198-216).
gtgtttggaagatgtcaaa

SEQ ID NO: 587858 - DNA, 19 bp, Mus musculus
  siRNA target sequence for Ptprn2 (NM_011215.1,401-419).
cccagccaggtccttacaa

SEQ ID NO: 587859 - DNA, 19 bp, Mus musculus
  siRNA target sequence for Ptprn2 (NM_011215.1,403-421).
cagccaggtccttacaaca

SEQ ID NO: 587860 - DNA, 19 bp, Mus musculus
  siRNA target sequence for Ptprn2 (NM_011215.1,406-424).
ccaggtccttacaacagaa

SEQ ID NO: 587861 - DNA, 19 bp, Mus musculus
  siRNA target sequence for Ptprn2 (NM_011215.1,407-425).
caggtccttacaacagaat

SEQ ID NO: 587862 - DNA, 19 bp, Mus musculus
  siRNA target sequence for Ptprn2 (NM_011215.1,426-444).
gctgacaatgaaaaatggt

SEQ ID NO: 587863 - DNA, 19 bp, Mus musculus
  siRNA target sequence for Ptprn2 (NM_011215.1,427-445).
ctgacaatgaaaaatggtt

SEQ ID NO: 587864 - DNA, 19 bp, Mus musculus
  siRNA target sequence for Ptprn2 (NM_011215.1,652-670).
ccaagtatcctgataacct

SEQ ID NO: 587865 - DNA, 19 bp, Mus musculus
  siRNA target sequence for Ptprn2 (NM_011215.1,653-671).
caagtatcctgataacctt

SEQ ID NO: 587866 - DNA, 19 bp, Mus musculus
  siRNA target sequence for Ptprn2 (NM_011215.1,713-731).
caaggtagacggtgacata

SEQ ID NO: 587867 - DNA, 19 bp, Mus musculus
  siRNA target sequence for Ptprn2 (NM_011215.1,717-735).
gtagacggtgacatagaca

SEQ ID NO: 587868 - DNA, 19 bp, Mus musculus
  siRNA target sequence for Ptprn2 (NM_011215.1,803-821).
gccacggtaccttgtacat

SEQ ID NO: 587869 - DNA, 19 bp, Mus musculus
  siRNA target sequence for Ptprn2 (NM_011215.1,885-903).
cctggagacgccaaagact

SEQ ID NO: 587870 - DNA, 19 bp, Mus musculus
  siRNA target sequence for Ptprn2 (NM_011215.1,937-955).
gtctcctgaaggatttgca

SEQ ID NO: 587871 - DNA, 19 bp, Mus musculus
  siRNA target sequence for Ptprn2 (NM_011215.1,1011-1029).
gttgctggagccatacaaa

SEQ ID NO: 587872 - DNA, 19 bp, Mus musculus
  siRNA target sequence for Ptprn2 (NM_011215.1,1015-1033).
ctggagccatacaaagtga

SEQ ID NO: 587873 - DNA, 19 bp, Mus musculus
  siRNA target sequence for Ptprn2 (NM_011215.1,1230-1248).
ggtccccttctagaaaaat

SEQ ID NO: 587874 - DNA, 19 bp, Mus musculus
  siRNA target sequence for Ptprn2 (NM_011215.1,1286-1304).
ggaggtcttgtcttcagaa

SEQ ID NO: 587875 - DNA, 19 bp, Mus musculus
  siRNA target sequence for Ptprn2 (NM_011215.1,1329-1347).
gtgaggagccggacttact

SEQ ID NO: 587876 - DNA, 19 bp, Mus musculus
  siRNA target sequence for Ptprn2 (NM_011215.1,1346-1364).
ctccaaagacctatttgaa

SEQ ID NO: 587877 - DNA, 19 bp, Mus musculus
  siRNA target sequence for Ptprn2 (NM_011215.1,1398-1416).
cttgaggatcagttccaaa

SEQ ID NO: 587878 - DNA, 19 bp, Mus musculus
  siRNA target sequence for Ptprn2 (NM_011215.1,1662-1680).
gtaagtgccaacatccaaa

SEQ ID NO: 587879 - DNA, 19 bp, Mus musculus
  siRNA target sequence for Ptprn2 (NM_011215.1,1668-1686).
gccaacatccaaaacatga

SEQ ID NO: 587880 - DNA, 19 bp, Mus musculus
  siRNA target sequence for Ptprn2 (NM_011215.1,1818-1836).
gaggactctaccaagttca

SEQ ID NO: 587881 - DNA, 19 bp, Mus musculus
  siRNA target sequence for Ptprn2 (NM_011215.1,1909-1927).
gccacaactcacactacaa

SEQ ID NO: 587882 - DNA, 19 bp, Mus musculus
  siRNA target sequence for Ptprn2 (NM_011215.1,2352-2370).
ctgttgaagtctcaaaaca

SEQ ID NO: 587883 - DNA, 19 bp, Mus musculus
  siRNA target sequence for Ptprn2 (NM_011215.1,2376-2394).
ggcagttccgactacatca

SEQ ID NO: 587884 - DNA, 19 bp, Mus musculus
  siRNA target sequence for Ptprn2 (NM_011215.1,2377-2395).
gcagttccgactacatcaa

SEQ ID NO: 587885 - DNA, 19 bp, Mus musculus
  siRNA target sequence for Ptprn2 (NM_011215.1,2422-2440).
cacgaaaccccgcatacat

SEQ ID NO: 587886 - DNA, 19 bp, Mus musculus
  siRNA target sequence for Ptprn2 (NM_011215.1,2500-2518).
gcggctgtgcagtcattgt

SEQ ID NO: 587887 - DNA, 19 bp, Mus musculus
  siRNA target sequence for Ptprn2 (NM_011215.1,2708-2726).
ccacttcctgagttggtat

SEQ ID NO: 587888 - DNA, 19 bp, Mus musculus
  siRNA target sequence for Ptprn2 (NM_011215.1,2749-2767).
cgaggtcactcctggattt

SEQ ID NO: 587889 - DNA, 19 bp, Mus musculus
  siRNA target sequence for Ptprn2 (NM_011215.1,2798-2816).
ccgctcttgtccgatcatt

SEQ ID NO: 587890 - DNA, 19 bp, Mus musculus
  siRNA target sequence for Ptprn2 (NM_011215.1,2882-2900).
gatggccaaaggtgctaaa

SEQ ID NO: 587891 - DNA, 19 bp, Mus musculus
  siRNA target sequence for Ptprn2 (NM_011215.1,2892-2910).
ggtgctaaagagattgata

SEQ ID NO: 587892 - DNA, 19 bp, Mus musculus
  siRNA target sequence for Ptpro (NM_011216.1,431-449).
cctcagcacacttttaatt

SEQ ID NO: 587893 - DNA, 19 bp, Mus musculus
  siRNA target sequence for Ptpro (NM_011216.1,616-634).
gtctttggactgactatct

SEQ ID NO: 587894 - DNA, 19 bp, Mus musculus
  siRNA target sequence for Ptpro (NM_011216.1,618-636).
ctttggactgactatcttt

SEQ ID NO: 587895 - DNA, 19 bp, Mus musculus
  siRNA target sequence for Ptpro (NM_011216.1,658-676).
ggagtaaaaatggcttaaa

SEQ ID NO: 587896 - DNA, 19 bp, Mus musculus
  siRNA target sequence for Ptpro (NM_011216.1,697-715).
ccgttcagctggatgactt

SEQ ID NO: 587897 - DNA, 19 bp, Mus musculus
  siRNA target sequence for Ptpro (NM_011216.1,705-723).
ctggatgacttcgattctt

SEQ ID NO: 587898 - DNA, 19 bp, Mus musculus
  siRNA target sequence for Ptpro (NM_011216.1,717-735).
gattcttacatcaaggata

SEQ ID NO: 587899 - DNA, 19 bp, Mus musculus
  siRNA target sequence for Ptpro (NM_011216.1,738-756).
gccaaggactcggactata

SEQ ID NO: 587900 - DNA, 19 bp, Mus musculus
  siRNA target sequence for Ptpro (NM_011216.1,739-757).
ccaaggactcggactataa

SEQ ID NO: 587901 - DNA, 19 bp, Mus musculus
  siRNA target sequence for Ptpro (NM_011216.1,740-758).
caaggactcggactataaa

SEQ ID NO: 587902 - DNA, 19 bp, Mus musculus
  siRNA target sequence for Ptpro (NM_011216.1,744-762).
gactcggactataaattct

SEQ ID NO: 587903 - DNA, 19 bp, Mus musculus
  siRNA target sequence for Ptpro (NM_011216.1,785-803).
gttgattggactggatatt

SEQ ID NO: 587904 - DNA, 19 bp, Mus musculus
  siRNA target sequence for Ptpro (NM_011216.1,825-843).
ccgctgaaccgatgtaaaa

SEQ ID NO: 587905 - DNA, 19 bp, Mus musculus
  siRNA target sequence for Ptpro (NM_011216.1,826-844).
cgctgaaccgatgtaaaaa

SEQ ID NO: 587906 - DNA, 19 bp, Mus musculus
  siRNA target sequence for Ptpro (NM_011216.1,857-875).
catcctgccgtatgacttt

SEQ ID NO: 587907 - DNA, 19 bp, Mus musculus
  siRNA target sequence for Ptpro (NM_011216.1,1108-1126).
cagaagaacccattgctta

SEQ ID NO: 587908 - DNA, 19 bp, Mus musculus
  siRNA target sequence for Ptpro (NM_011216.1,1183-1201).
gacacttccggatcaacta

SEQ ID NO: 587909 - DNA, 19 bp, Mus musculus
  siRNA target sequence for Ptpro (NM_011216.1,1212-1230).
gcgcaggacgtgatgcatt

SEQ ID NO: 587910 - DNA, 19 bp, Mus musculus
  siRNA target sequence for Ptpro (NM_011216.1,1213-1231).
cgcaggacgtgatgcattt

SEQ ID NO: 587911 - DNA, 19 bp, Mus musculus
  siRNA target sequence for Ptpro (NM_011216.1,1214-1232).
gcaggacgtgatgcatttt

SEQ ID NO: 587912 - DNA, 19 bp, Mus musculus
  siRNA target sequence for Ptpro (NM_011216.1,1215-1233).
caggacgtgatgcatttta

SEQ ID NO: 587913 - DNA, 19 bp, Mus musculus
  siRNA target sequence for Ptpro (NM_011216.1,1218-1236).
gacgtgatgcattttaact

SEQ ID NO: 587914 - DNA, 19 bp, Mus musculus
  siRNA target sequence for Ptpro (NM_011216.1,1221-1239).
gtgatgcattttaactaca

SEQ ID NO: 587915 - DNA, 19 bp, Mus musculus
  siRNA target sequence for Ptpro (NM_011216.1,1406-1424).
gcaacacattcgagatcat

SEQ ID NO: 587916 - DNA, 19 bp, Mus musculus
  siRNA target sequence for Ptpro (NM_011216.1,1410-1428).
cacattcgagatcatgaat

SEQ ID NO: 587917 - DNA, 19 bp, Mus musculus
  siRNA target sequence for Ptpro (NM_011216.1,1460-1478).
gcgctcataccgaatgtca

SEQ ID NO: 587918 - DNA, 19 bp, Mus musculus
  siRNA target sequence for Ptpro (NM_011216.1,1461-1479).
cgctcataccgaatgtcaa

SEQ ID NO: 587919 - DNA, 19 bp, Mus musculus
  siRNA target sequence for Ptpro (NM_011216.1,1462-1480).
gctcataccgaatgtcaat

SEQ ID NO: 587920 - DNA, 19 bp, Mus musculus
  siRNA target sequence for Ptprs (NM_011218.1,216-234).
gaaccacccaggtttatca

SEQ ID NO: 587921 - DNA, 19 bp, Mus musculus
  siRNA target sequence for Ptprs (NM_011218.1,354-372).
cgcttcgagaccattgact

SEQ ID NO: 587922 - DNA, 19 bp, Mus musculus
  siRNA target sequence for Ptprs (NM_011218.1,458-476).
ctcggtgggcgaaatcaca

SEQ ID NO: 587923 - DNA, 19 bp, Mus musculus
  siRNA target sequence for Ptprs (NM_011218.1,464-482).
gggcgaaatcacaattcat

SEQ ID NO: 587924 - DNA, 19 bp, Mus musculus
  siRNA target sequence for Ptprs (NM_011218.1,547-565).
cccagttgaaggttgtaga

SEQ ID NO: 587925 - DNA, 19 bp, Mus musculus
  siRNA target sequence for Ptprs (NM_011218.1,615-633).
cctgagatcacctggttta

SEQ ID NO: 587926 - DNA, 19 bp, Mus musculus
  siRNA target sequence for Ptprs (NM_011218.1,616-634).
ctgagatcacctggtttaa

SEQ ID NO: 587927 - DNA, 19 bp, Mus musculus
  siRNA target sequence for Ptprs (NM_011218.1,861-879).
ggtgggaatgtgaatatca

SEQ ID NO: 587928 - DNA, 19 bp, Mus musculus
  siRNA target sequence for Ptprs (NM_011218.1,959-977).
gcccgtgggtcggaatgtt

SEQ ID NO: 587929 - DNA, 19 bp, Mus musculus
  siRNA target sequence for Ptprs (NM_011218.1,961-979).
ccgtgggtcggaatgttct

SEQ ID NO: 587930 - DNA, 19 bp, Mus musculus
  siRNA target sequence for Ptprs (NM_011218.1,962-980).
cgtgggtcggaatgttcta

SEQ ID NO: 587931 - DNA, 19 bp, Mus musculus
  siRNA target sequence for Ptprs (NM_011218.1,965-983).
gggtcggaatgttctagaa

SEQ ID NO: 587932 - DNA, 19 bp, Mus musculus
  siRNA target sequence for Ptprs (NM_011218.1,999-1017).
gactcagctaactacactt

SEQ ID NO: 587933 - DNA, 19 bp, Mus musculus
  siRNA target sequence for Ptprs (NM_011218.1,1053-1071).
gtggcccagatcactgtaa

SEQ ID NO: 587934 - DNA, 19 bp, Mus musculus
  siRNA target sequence for Ptprs (NM_011218.1,1161-1179).
cccgtgtcctactacgtaa

SEQ ID NO: 587935 - DNA, 19 bp, Mus musculus
  siRNA target sequence for Ptprs (NM_011218.1,1162-1180).
ccgtgtcctactacgtaat

SEQ ID NO: 587936 - DNA, 19 bp, Mus musculus
  siRNA target sequence for Ptprs (NM_011218.1,1163-1181).
cgtgtcctactacgtaatt

SEQ ID NO: 587937 - DNA, 19 bp, Mus musculus
  siRNA target sequence for Ptprs (NM_011218.1,1168-1186).
cctactacgtaattgagta

SEQ ID NO: 587938 - DNA, 19 bp, Mus musculus
  siRNA target sequence for Ptprs (NM_011218.1,1169-1187).
ctactacgtaattgagtat

SEQ ID NO: 587939 - DNA, 19 bp, Mus musculus
  siRNA target sequence for Ptprs (NM_011218.1,1262-1280).
gagccccaattctgagtat

SEQ ID NO: 587940 - DNA, 19 bp, Mus musculus
  siRNA target sequence for Ptprs (NM_011218.1,1264-1282).
gccccaattctgagtatga

SEQ ID NO: 587941 - DNA, 19 bp, Mus musculus
  siRNA target sequence for Ptprs (NM_011218.1,1267-1285).
ccaattctgagtatgagat

SEQ ID NO: 587942 - DNA, 19 bp, Mus musculus
  siRNA target sequence for Ptprs (NM_011218.1,1459-1477).
gtggctaccgtgtctacta

SEQ ID NO: 587943 - DNA, 19 bp, Mus musculus
  siRNA target sequence for Ptprs (NM_011218.1,1461-1479).
ggctaccgtgtctactata

SEQ ID NO: 587944 - DNA, 19 bp, Mus musculus
  siRNA target sequence for Ptprs (NM_011218.1,1504-1522).
gcaactggcagaaacacaa

SEQ ID NO: 587945 - DNA, 19 bp, Mus musculus
  siRNA target sequence for Ptprs (NM_011218.1,1731-1749).
cgacaggagagtgtcatta

SEQ ID NO: 587946 - DNA, 19 bp, Mus musculus
  siRNA target sequence for Ptprs (NM_011218.1,1734-1752).
caggagagtgtcattaagt

SEQ ID NO: 587947 - DNA, 19 bp, Mus musculus
  siRNA target sequence for Ptprs (NM_011218.1,1736-1754).
ggagagtgtcattaagtat

SEQ ID NO: 587948 - DNA, 19 bp, Mus musculus
  siRNA target sequence for Ptprs (NM_011218.1,1739-1757).
gagtgtcattaagtatgaa

SEQ ID NO: 587949 - DNA, 19 bp, Mus musculus
  siRNA target sequence for Ptprs (NM_011218.1,1741-1759).
gtgtcattaagtatgaact

SEQ ID NO: 587950 - DNA, 19 bp, Mus musculus
  siRNA target sequence for Ptprs (NM_011218.1,1978-1996).
gctccacggccatattggt

SEQ ID NO: 587951 - DNA, 19 bp, Mus musculus
  siRNA target sequence for Ptprs (NM_011218.1,1979-1997).
ctccacggccatattggta

SEQ ID NO: 587952 - DNA, 19 bp, Mus musculus
  siRNA target sequence for Ptprs (NM_011218.1,2008-2026).
cgccaccgccagaaactca

SEQ ID NO: 587953 - DNA, 19 bp, Mus musculus
  siRNA target sequence for Ptprs (NM_011218.1,2168-2186).
caccgccgtggcttacaca

SEQ ID NO: 587954 - DNA, 19 bp, Mus musculus
  siRNA target sequence for Ptprs (NM_011218.1,2433-2451).
caggaaatggtgataacga

SEQ ID NO: 587955 - DNA, 19 bp, Mus musculus
  siRNA target sequence for Ptprs (NM_011218.1,2463-2481).
gagactgcttactctatca

SEQ ID NO: 587956 - DNA, 19 bp, Mus musculus
  siRNA target sequence for Ptprs (NM_011218.1,2482-2500).
cagtagccgcgtataccat

SEQ ID NO: 587957 - DNA, 19 bp, Mus musculus
  siRNA target sequence for Ptprs (NM_011218.1,3213-3231).
gagttccccgacaactata

SEQ ID NO: 587958 - DNA, 19 bp, Mus musculus
  siRNA target sequence for Ptprs (NM_011218.1,3241-3259).
caccctacaagattcagta

SEQ ID NO: 587959 - DNA, 19 bp, Mus musculus
  siRNA target sequence for Ptprs (NM_011218.1,3244-3262).
cctacaagattcagtacaa

SEQ ID NO: 587960 - DNA, 19 bp, Mus musculus
  siRNA target sequence for Ptprs (NM_011218.1,3393-3411).
gccaggaccgcctttaaca

SEQ ID NO: 587961 - DNA, 19 bp, Mus musculus
  siRNA target sequence for Ptprs (NM_011218.1,3394-3412).
ccaggaccgcctttaacat

SEQ ID NO: 587962 - DNA, 19 bp, Mus musculus
  siRNA target sequence for Ptprs (NM_011218.1,3445-3463).
ccgacaatgacggtttcat

SEQ ID NO: 587963 - DNA, 19 bp, Mus musculus
  siRNA target sequence for Ptprs (NM_011218.1,3495-3513).
gtgaccgtgcagaactact

SEQ ID NO: 587964 - DNA, 19 bp, Mus musculus
  siRNA target sequence for Ptprs (NM_011218.1,3499-3517).
ccgtgcagaactacttcat

SEQ ID NO: 587965 - DNA, 19 bp, Mus musculus
  siRNA target sequence for Ptprs (NM_011218.1,3500-3518).
cgtgcagaactacttcatt

SEQ ID NO: 587966 - DNA, 19 bp, Mus musculus
  siRNA target sequence for Ptprs (NM_011218.1,3504-3522).
cagaactacttcattgtga

SEQ ID NO: 587967 - DNA, 19 bp, Mus musculus
  siRNA target sequence for Ptprs (NM_011218.1,3719-3737).
gaaccagaagcaatatggt

SEQ ID NO: 587968 - DNA, 19 bp, Mus musculus
  siRNA target sequence for Ptprs (NM_011218.1,3793-3811).
ctgtgttgcagaagaatga

SEQ ID NO: 587969 - DNA, 19 bp, Mus musculus
  siRNA target sequence for Ptprs (NM_011218.1,3959-3977).
cctgctgtacaagaacaaa

SEQ ID NO: 587970 - DNA, 19 bp, Mus musculus
  siRNA target sequence for Ptprs (NM_011218.1,4215-4233).
caattcacgtgggaacatt

SEQ ID NO: 587971 - DNA, 19 bp, Mus musculus
  siRNA target sequence for Ptprs (NM_011218.1,4321-4339).
gcatcatgggtagtgatta

SEQ ID NO: 587972 - DNA, 19 bp, Mus musculus
  siRNA target sequence for Ptprs (NM_011218.1,4328-4346).
gggtagtgattacatcaat

SEQ ID NO: 587973 - DNA, 19 bp, Mus musculus
  siRNA target sequence for Ptprs (NM_011218.1,4484-4502).
ggagaaatcacggatcaaa

SEQ ID NO: 587974 - DNA, 19 bp, Mus musculus
  siRNA target sequence for Ptprs (NM_011218.1,4485-4503).
gagaaatcacggatcaaat

SEQ ID NO: 587975 - DNA, 19 bp, Mus musculus
  siRNA target sequence for Ptprs (NM_011218.1,4487-4505).
gaaatcacggatcaaatgt

SEQ ID NO: 587976 - DNA, 19 bp, Mus musculus
  siRNA target sequence for Ptprs (NM_011218.1,4586-4604).
cttctgcgtcaggactttt

SEQ ID NO: 587977 - DNA, 19 bp, Mus musculus
  siRNA target sequence for Ptprs (NM_011218.1,4592-4610).
cgtcaggactttttctcta

SEQ ID NO: 587978 - DNA, 19 bp, Mus musculus
  siRNA target sequence for Ptprs (NM_011218.1,4866-4884).
cggtcgcagcgcaactaca

SEQ ID NO: 587979 - DNA, 19 bp, Mus musculus
  siRNA target sequence for Ptprs (NM_011218.1,4867-4885).
ggtcgcagcgcaactacat

SEQ ID NO: 587980 - DNA, 19 bp, Mus musculus
  siRNA target sequence for Ptprs (NM_011218.1,5070-5088).
cacacttcgcgcttcatca

SEQ ID NO: 587981 - DNA, 19 bp, Mus musculus
  siRNA target sequence for Ptprs (NM_011218.1,5292-5310).
gctctgtgggagaacaact

SEQ ID NO: 587982 - DNA, 19 bp, Mus musculus
  siRNA target sequence for Ptprs (NM_011218.1,5295-5313).
ctgtgggagaacaactcta

SEQ ID NO: 587983 - DNA, 19 bp, Mus musculus
  siRNA target sequence for Ptprs (NM_011218.1,5299-5317).
gggagaacaactctactat

SEQ ID NO: 587984 - DNA, 19 bp, Mus musculus
  siRNA target sequence for Ptprs (NM_011218.1,5444-5462).
gtacattctgcgtgagttt

SEQ ID NO: 587985 - DNA, 19 bp, Mus musculus
  siRNA target sequence for Ptprs (NM_011218.1,5546-5564).
gtcaggggaaggcttcatt

SEQ ID NO: 587986 - DNA, 19 bp, Mus musculus
  siRNA target sequence for Ptprs (NM_011218.1,5789-5807).
cttccaggcggctttggaa

SEQ ID NO: 587987 - DNA, 19 bp, Mus musculus
  siRNA target sequence for Ptprt (NM_021464.1,403-421).
ggaaccaatgggtttacct

SEQ ID NO: 587988 - DNA, 19 bp, Mus musculus
  siRNA target sequence for Ptprt (NM_021464.1,469-487).
cccacagggtccttcatga

SEQ ID NO: 587989 - DNA, 19 bp, Mus musculus
  siRNA target sequence for Ptprt (NM_021464.1,515-533).
gccagaaagcccatcttct

SEQ ID NO: 587990 - DNA, 19 bp, Mus musculus
  siRNA target sequence for Ptprt (NM_021464.1,566-584).
gcattgacttccattacta

SEQ ID NO: 587991 - DNA, 19 bp, Mus musculus
  siRNA target sequence for Ptprt (NM_021464.1,611-629).
cgggagccttgaatgtcta

SEQ ID NO: 587992 - DNA, 19 bp, Mus musculus
  siRNA target sequence for Ptprt (NM_021464.1,722-740).
gcaccttctggcctcattt

SEQ ID NO: 587993 - DNA, 19 bp, Mus musculus
  siRNA target sequence for Ptprt (NM_021464.1,725-743).
ccttctggcctcatttcta

SEQ ID NO: 587994 - DNA, 19 bp, Mus musculus
  siRNA target sequence for Ptprt (NM_021464.1,726-744).
cttctggcctcatttctat

SEQ ID NO: 587995 - DNA, 19 bp, Mus musculus
  siRNA target sequence for Ptprt (NM_021464.1,741-759).
ctatcaggtgatatttgaa

SEQ ID NO: 587996 - DNA, 19 bp, Mus musculus
  siRNA target sequence for Ptprt (NM_021464.1,846-864).
cctgcgactccaaaacgtt

SEQ ID NO: 587997 - DNA, 19 bp, Mus musculus
  siRNA target sequence for Ptprt (NM_021464.1,880-898).
cagaacgccacgtttcagt

SEQ ID NO: 587998 - DNA, 19 bp, Mus musculus
  siRNA target sequence for Ptprt (NM_021464.1,1165-1183).
gccacctacctgtggatta

SEQ ID NO: 587999 - DNA, 19 bp, Mus musculus
  siRNA target sequence for Ptprt (NM_021464.1,1166-1184).
ccacctacctgtggattaa

SEQ ID NO: 588000 - DNA, 19 bp, Mus musculus
  siRNA target sequence for Ptprt (NM_021464.1,1167-1185).
cacctacctgtggattaaa

SEQ ID NO: 588001 - DNA, 19 bp, Mus musculus
  siRNA target sequence for Ptprt (NM_021464.1,1170-1188).
ctacctgtggattaaacca

SEQ ID NO: 588002 - DNA, 19 bp, Mus musculus
  siRNA target sequence for Ptprt (NM_021464.1,1378-1396).
ccaggaccacccctaacta

SEQ ID NO: 588003 - DNA, 19 bp, Mus musculus
  siRNA target sequence for Ptprt (NM_021464.1,1576-1594).
gaggtgatccagacatctt

SEQ ID NO: 588004 - DNA, 19 bp, Mus musculus
  siRNA target sequence for Ptprt (NM_021464.1,1585-1603).
cagacatcttcccactata

SEQ ID NO: 588005 - DNA, 19 bp, Mus musculus
  siRNA target sequence for Ptprt (NM_021464.1,1612-1630).
ggtctacggcccttcatga

SEQ ID NO: 588006 - DNA, 19 bp, Mus musculus
  siRNA target sequence for Ptprt (NM_021464.1,1802-1820).
gggtcatcacactctatga

SEQ ID NO: 588007 - DNA, 19 bp, Mus musculus
  siRNA target sequence for Ptprt (NM_021464.1,1811-1829).
cactctatgagattaacta

SEQ ID NO: 588008 - DNA, 19 bp, Mus musculus
  siRNA target sequence for Ptprt (NM_021464.1,1813-1831).
ctctatgagattaactaca

SEQ ID NO: 588009 - DNA, 19 bp, Mus musculus
  siRNA target sequence for Ptprt (NM_021464.1,1936-1954).
gggactacctactctttca

SEQ ID NO: 588010 - DNA, 19 bp, Mus musculus
  siRNA target sequence for Ptprt (NM_021464.1,2002-2020).
cggattgccaccaagattt

SEQ ID NO: 588011 - DNA, 19 bp, Mus musculus
  siRNA target sequence for Ptprt (NM_021464.1,2027-2045).
catcaatgcctgaatatga

SEQ ID NO: 588012 - DNA, 19 bp, Mus musculus
  siRNA target sequence for Ptprt (NM_021464.1,2046-2064).
cgcagataccccactcaat

SEQ ID NO: 588013 - DNA, 19 bp, Mus musculus
  siRNA target sequence for Ptprt (NM_021464.1,2050-2068).
gataccccactcaatgaaa

SEQ ID NO: 588014 - DNA, 19 bp, Mus musculus
  siRNA target sequence for Ptprt (NM_021464.1,2054-2072).
ccccactcaatgaaacaga

SEQ ID NO: 588015 - DNA, 19 bp, Mus musculus
  siRNA target sequence for Ptprt (NM_021464.1,2117-2135).
ccccagtcagtgtttacca

SEQ ID NO: 588016 - DNA, 19 bp, Mus musculus
  siRNA target sequence for Ptprt (NM_021464.1,2182-2200).
gacatcattgagtgtttct

SEQ ID NO: 588017 - DNA, 19 bp, Mus musculus
  siRNA target sequence for Ptprt (NM_021464.1,2235-2253).
cgattcgctacactacttt

SEQ ID NO: 588018 - DNA, 19 bp, Mus musculus
  siRNA target sequence for Ptprt (NM_021464.1,2379-2397).
ggccctcagcaaagcaaat

SEQ ID NO: 588019 - DNA, 19 bp, Mus musculus
  siRNA target sequence for Ptprt (NM_021464.1,2437-2455).
ggtgcttccactcagaatt

SEQ ID NO: 588020 - DNA, 19 bp, Mus musculus
  siRNA target sequence for Ptprt (NM_021464.1,2515-2533).
gctggcctcctcatgttca

SEQ ID NO: 588021 - DNA, 19 bp, Mus musculus
  siRNA target sequence for Ptprt (NM_021464.1,2551-2569).
gtgatgctgaccatcaaaa

SEQ ID NO: 588022 - DNA, 19 bp, Mus musculus
  siRNA target sequence for Ptprt (NM_021464.1,2664-2682).
cggcaccaaccgcaatgat

SEQ ID NO: 588023 - DNA, 19 bp, Mus musculus
  siRNA target sequence for Ptprt (NM_021464.1,2666-2684).
gcaccaaccgcaatgatga

SEQ ID NO: 588024 - DNA, 19 bp, Mus musculus
  siRNA target sequence for Ptprt (NM_021464.1,2667-2685).
caccaaccgcaatgatgaa

SEQ ID NO: 588025 - DNA, 19 bp, Mus musculus
  siRNA target sequence for Ptprt (NM_021464.1,2706-2724).
ggatgttaatggattcaca

SEQ ID NO: 588026 - DNA, 19 bp, Mus musculus
  siRNA target sequence for Ptprt (NM_021464.1,2959-2977).
gatgaaaaccgcaataaga

SEQ ID NO: 588027 - DNA, 19 bp, Mus musculus
  siRNA target sequence for Ptprt (NM_021464.1,2980-2998).
cgatacggaaacatcatat

SEQ ID NO: 588028 - DNA, 19 bp, Mus musculus
  siRNA target sequence for Ptprt (NM_021464.1,2985-3003).
cggaaacatcatatcttat

SEQ ID NO: 588029 - DNA, 19 bp, Mus musculus
  siRNA target sequence for Ptprt (NM_021464.1,3180-3198).
cgtcatggtcacaaacctt

SEQ ID NO: 588030 - DNA, 19 bp, Mus musculus
  siRNA target sequence for Ptprt (NM_021464.1,3430-3448).
cgccaggtcaagtttctca

SEQ ID NO: 588031 - DNA, 19 bp, Mus musculus
  siRNA target sequence for Ptprt (NM_021464.1,3531-3549).
gctcgacatggctgagaat

SEQ ID NO: 588032 - DNA, 19 bp, Mus musculus
  siRNA target sequence for Ptprt (NM_021464.1,3534-3552).
cgacatggctgagaatgaa

SEQ ID NO: 588033 - DNA, 19 bp, Mus musculus
  siRNA target sequence for Ptprt (NM_021464.1,3700-3718).
cgctctctctactacaaca

SEQ ID NO: 588034 - DNA, 19 bp, Mus musculus
  siRNA target sequence for Ptprt (NM_021464.1,3741-3759).
caactccagccagatcaaa

SEQ ID NO: 588035 - DNA, 19 bp, Mus musculus
  siRNA target sequence for Ptprt (NM_021464.1,3829-3847).
ccccggaaccatgataaga

SEQ ID NO: 588036 - DNA, 19 bp, Mus musculus
  siRNA target sequence for Ptprt (NM_021464.1,3830-3848).
cccggaaccatgataagaa

SEQ ID NO: 588037 - DNA, 19 bp, Mus musculus
  siRNA target sequence for Ptprt (NM_021464.1,4101-4119).
gaagacctccgggtgttat

SEQ ID NO: 588038 - DNA, 19 bp, Mus musculus
  siRNA target sequence for Ptprt (NM_021464.1,4104-4122).
gacctccgggtgttatggt

SEQ ID NO: 588039 - DNA, 19 bp, Mus musculus
  siRNA target sequence for Ptprt (NM_021464.1,4203-4221).
gccacaggatggttatcgt

SEQ ID NO: 588040 - DNA, 19 bp, Mus musculus
  siRNA target sequence for Ptprt (NM_021464.1,4204-4222).
ccacaggatggttatcgta

SEQ ID NO: 588041 - DNA, 19 bp, Mus musculus
  siRNA target sequence for Ptprt (NM_021464.1,4205-4223).
cacaggatggttatcgtat

SEQ ID NO: 588042 - DNA, 19 bp, Mus musculus
  siRNA target sequence for Ptprt (NM_021464.1,4300-4318).
gtccgacggctggagaaat

SEQ ID NO: 588043 - DNA, 19 bp, Mus musculus
  siRNA target sequence for Ptprt (NM_021464.1,4446-4464).
cgtgttccacattgtgaaa

SEQ ID NO: 588044 - DNA, 19 bp, Mus musculus
  siRNA target sequence for Ptprt (NM_021464.1,4494-4512).
ggagacgctggaacagtat

SEQ ID NO: 588045 - DNA, 19 bp, Mus musculus
  siRNA target sequence for Ptprt (NM_021464.1,4495-4513).
gagacgctggaacagtata

SEQ ID NO: 588046 - DNA, 19 bp, Mus musculus
  siRNA target sequence for Ptprt (NM_021464.1,4504-4522).
gaacagtataaatttgtat

SEQ ID NO: 588047 - DNA, 19 bp, Mus musculus
  siRNA target sequence for Ptprv (NM_007955.2,819-837).
ccacactctggcatgtaat

SEQ ID NO: 588048 - DNA, 19 bp, Mus musculus
  siRNA target sequence for Ptprv (NM_007955.2,850-868).
cctgacaccctgtcttaca

SEQ ID NO: 588049 - DNA, 19 bp, Mus musculus
  siRNA target sequence for Ptprv (NM_007955.2,858-876).
cctgtcttacaattttggt

SEQ ID NO: 588050 - DNA, 19 bp, Mus musculus
  siRNA target sequence for Ptprv (NM_007955.2,1053-1071).
gtttcacctgatacttaca

SEQ ID NO: 588051 - DNA, 19 bp, Mus musculus
  siRNA target sequence for Ptprv (NM_007955.2,1252-1270).
gtgctgacccccttatgga

SEQ ID NO: 588052 - DNA, 19 bp, Mus musculus
  siRNA target sequence for Ptprv (NM_007955.2,1254-1272).
gctgacccccttatggaat

SEQ ID NO: 588053 - DNA, 19 bp, Mus musculus
  siRNA target sequence for Ptprv (NM_007955.2,1336-1354).
gggccagtggagaatacaa

SEQ ID NO: 588054 - DNA, 19 bp, Mus musculus
  siRNA target sequence for Ptprv (NM_007955.2,1338-1356).
gccagtggagaatacaact

SEQ ID NO: 588055 - DNA, 19 bp, Mus musculus
  siRNA target sequence for Ptprv (NM_007955.2,1339-1357).
ccagtggagaatacaacta

SEQ ID NO: 588056 - DNA, 19 bp, Mus musculus
  siRNA target sequence for Ptprv (NM_007955.2,1594-1612).
ggcctcctagggaacatct

SEQ ID NO: 588057 - DNA, 19 bp, Mus musculus
  siRNA target sequence for Ptprv (NM_007955.2,1808-1826).
cagggcagatggaaggtta

SEQ ID NO: 588058 - DNA, 19 bp, Mus musculus
  siRNA target sequence for Ptprv (NM_007955.2,1862-1880).
cacctggcgaccttgttga

SEQ ID NO: 588059 - DNA, 19 bp, Mus musculus
  siRNA target sequence for Ptprv (NM_007955.2,1865-1883).
ctggcgaccttgttgactt

SEQ ID NO: 588060 - DNA, 19 bp, Mus musculus
  siRNA target sequence for Ptprv (NM_007955.2,1901-1919).
gcctgactctgaaatctct

SEQ ID NO: 588061 - DNA, 19 bp, Mus musculus
  siRNA target sequence for Ptprv (NM_007955.2,2089-2107).
ggcagggatgcctttcagt

SEQ ID NO: 588062 - DNA, 19 bp, Mus musculus
  siRNA target sequence for Ptprv (NM_007955.2,2090-2108).
gcagggatgcctttcagtt

SEQ ID NO: 588063 - DNA, 19 bp, Mus musculus
  siRNA target sequence for Ptprv (NM_007955.2,2091-2109).
cagggatgcctttcagtta

SEQ ID NO: 588064 - DNA, 19 bp, Mus musculus
  siRNA target sequence for Ptprv (NM_007955.2,2283-2301).
ctcagctcctacattggta

SEQ ID NO: 588065 - DNA, 19 bp, Mus musculus
  siRNA target sequence for Ptprv (NM_007955.2,2582-2600).
caggcagtgctgtggttaa

SEQ ID NO: 588066 - DNA, 19 bp, Mus musculus
  siRNA target sequence for Ptprv (NM_007955.2,2585-2603).
gcagtgctgtggttaacct

SEQ ID NO: 588067 - DNA, 19 bp, Mus musculus
  siRNA target sequence for Ptprv (NM_007955.2,2731-2749).
ggacatacggtttcattgt

SEQ ID NO: 588068 - DNA, 19 bp, Mus musculus
  siRNA target sequence for Ptprv (NM_007955.2,2930-2948).
gagggagcgctcattttgt

SEQ ID NO: 588069 - DNA, 19 bp, Mus musculus
  siRNA target sequence for Ptprv (NM_007955.2,2932-2950).
gggagcgctcattttgtct

SEQ ID NO: 588070 - DNA, 19 bp, Mus musculus
  siRNA target sequence for Ptprv (NM_007955.2,2933-2951).
ggagcgctcattttgtctt

SEQ ID NO: 588071 - DNA, 19 bp, Mus musculus
  siRNA target sequence for Ptprv (NM_007955.2,3066-3084).
cctggtgtgcactacttct

SEQ ID NO: 588072 - DNA, 19 bp, Mus musculus
  siRNA target sequence for Ptprv (NM_007955.2,3161-3179).
cacgtggcatgtttggtaa

SEQ ID NO: 588073 - DNA, 19 bp, Mus musculus
  siRNA target sequence for Ptprv (NM_007955.2,3266-3284).
catggtatgaccactacta

SEQ ID NO: 588074 - DNA, 19 bp, Mus musculus
  siRNA target sequence for Ptprv (NM_007955.2,3270-3288).
gtatgaccactactataga

SEQ ID NO: 588075 - DNA, 19 bp, Mus musculus
  siRNA target sequence for Ptprv (NM_007955.2,3391-3409).
gacaacacccaggagatat

SEQ ID NO: 588076 - DNA, 19 bp, Mus musculus
  siRNA target sequence for Ptprv (NM_007955.2,3653-3671).
gcttttcccaggagttgat

SEQ ID NO: 588077 - DNA, 19 bp, Mus musculus
  siRNA target sequence for Ptprv (NM_007955.2,3855-3873).
cccacacgtgctaccttat

SEQ ID NO: 588078 - DNA, 19 bp, Mus musculus
  siRNA target sequence for Ptprv (NM_007955.2,3857-3875).
cacacgtgctaccttatga

SEQ ID NO: 588079 - DNA, 19 bp, Mus musculus
  siRNA target sequence for Ptprv (NM_007955.2,3956-3974).
gccacccacaggagatcat

SEQ ID NO: 588080 - DNA, 19 bp, Mus musculus
  siRNA target sequence for Ptprv (NM_007955.2,3980-3998).
cccaggggcctctcaaaaa

SEQ ID NO: 588081 - DNA, 19 bp, Mus musculus
  siRNA target sequence for Ptprv (NM_007955.2,4203-4221).
gcacggtgcagagcaaaaa

SEQ ID NO: 588082 - DNA, 19 bp, Mus musculus
  siRNA target sequence for Ptprv (NM_007955.2,4438-4456).
gtggtcgatgtgttcaaca

SEQ ID NO: 588083 - DNA, 19 bp, Mus musculus
  siRNA target sequence for Ptprv (NM_007955.2,4449-4467).
gttcaacactgtgtacata

SEQ ID NO: 588084 - DNA, 19 bp, Mus musculus
  siRNA target sequence for Ptprv (NM_007955.2,4578-4596).
ccccatccctgtgatgaat

SEQ ID NO: 588085 - DNA, 19 bp, Mus musculus
  siRNA target sequence for Ptprv (NM_007955.2,4966-4984).
gagatgcagcctattgtca

SEQ ID NO: 588086 - DNA, 19 bp, Mus musculus
  siRNA target sequence for Ptprv (NM_007955.2,5247-5265).
caccttcttggctatggaa

SEQ ID NO: 588087 - DNA, 19 bp, Mus musculus
  siRNA target sequence for Ptprv (NM_007955.2,5353-5371).
ccaacgctggagcagtata

SEQ ID NO: 588088 - DNA, 19 bp, Mus musculus
  siRNA target sequence for Ptprv (NM_007955.2,5354-5372).
caacgctggagcagtatat

SEQ ID NO: 588089 - DNA, 19 bp, Mus musculus
  siRNA target sequence for Ptprv (NM_007955.2,5357-5375).
cgctggagcagtatatcta

SEQ ID NO: 588090 - DNA, 19 bp, Mus musculus
  siRNA target sequence for A530086E13Rik (NM_172587.2,346-364).
ctttgttttgccattctct

SEQ ID NO: 588091 - DNA, 19 bp, Mus musculus
  siRNA target sequence for A530086E13Rik (NM_172587.2,382-400).
gcaacaaacgaacattatt

SEQ ID NO: 588092 - DNA, 19 bp, Mus musculus
  siRNA target sequence for A530086E13Rik (NM_172587.2,418-436).
ctagagtatgagaacttct

SEQ ID NO: 588093 - DNA, 19 bp, Mus musculus
  siRNA target sequence for A530086E13Rik (NM_172587.2,441-459).
ggattttggaccactcaat

SEQ ID NO: 588094 - DNA, 19 bp, Mus musculus
  siRNA target sequence for A530086E13Rik (NM_172587.2,462-480).
ggccatggtttacagatat

SEQ ID NO: 588095 - DNA, 19 bp, Mus musculus
  siRNA target sequence for A530086E13Rik (NM_172587.2,463-481).
gccatggtttacagatatt

SEQ ID NO: 588096 - DNA, 19 bp, Mus musculus
  siRNA target sequence for A530086E13Rik (NM_172587.2,474-492).
cagatattgttgcaagata

SEQ ID NO: 588097 - DNA, 19 bp, Mus musculus
  siRNA target sequence for A530086E13Rik (NM_172587.2,476-494).
gatattgttgcaagataaa

SEQ ID NO: 588098 - DNA, 19 bp, Mus musculus
  siRNA target sequence for A530086E13Rik (NM_172587.2,528-546).
gaaaattatccattttact

SEQ ID NO: 588099 - DNA, 19 bp, Mus musculus
  siRNA target sequence for A530086E13Rik (NM_172587.2,593-611).
gttatatggttatatattt

SEQ ID NO: 588100 - DNA, 19 bp, Mus musculus
  siRNA target sequence for A530086E13Rik (NM_172587.2,622-640).
ccagaagacgcgtatagaa

SEQ ID NO: 588101 - DNA, 19 bp, Mus musculus
  siRNA target sequence for A530086E13Rik (NM_172587.2,625-643).
gaagacgcgtatagaacat

SEQ ID NO: 588102 - DNA, 19 bp, Mus musculus
  siRNA target sequence for A530086E13Rik (NM_172587.2,628-646).
gacgcgtatagaacattaa

SEQ ID NO: 588103 - DNA, 19 bp, Mus musculus
  siRNA target sequence for A530086E13Rik (NM_172587.2,631-649).
gcgtatagaacattaatct

SEQ ID NO: 588104 - DNA, 19 bp, Mus musculus
  siRNA target sequence for A530086E13Rik (NM_172587.2,651-669).
cggagatacagcctatatt

SEQ ID NO: 588105 - DNA, 19 bp, Mus musculus
  siRNA target sequence for A530086E13Rik (NM_172587.2,713-731).
cacttctcgactgttttca

SEQ ID NO: 588106 - DNA, 19 bp, Mus musculus
  siRNA target sequence for A530086E13Rik (NM_172587.2,776-794).
catttaaccttgacgaata

SEQ ID NO: 588107 - DNA, 19 bp, Mus musculus
  siRNA target sequence for A530086E13Rik (NM_172587.2,789-807).
cgaatatgaacactatgaa

SEQ ID NO: 588108 - DNA, 19 bp, Mus musculus
  siRNA target sequence for A530086E13Rik (NM_172587.2,820-838).
ggagatttcaactggataa

SEQ ID NO: 588109 - DNA, 19 bp, Mus musculus
  siRNA target sequence for A530086E13Rik (NM_172587.2,821-839).
gagatttcaactggataat

SEQ ID NO: 588110 - DNA, 19 bp, Mus musculus
  siRNA target sequence for A530086E13Rik (NM_172587.2,907-925).
cattctccggagacttata

SEQ ID NO: 588111 - DNA, 19 bp, Mus musculus
  siRNA target sequence for A530086E13Rik (NM_172587.2,913-931).
ccggagacttatattccat

SEQ ID NO: 588112 - DNA, 19 bp, Mus musculus
  siRNA target sequence for A530086E13Rik (NM_172587.2,914-932).
cggagacttatattccata

SEQ ID NO: 588113 - DNA, 19 bp, Mus musculus
  siRNA target sequence for A530086E13Rik (NM_172587.2,943-961).
cacaatgtaactaccatta

SEQ ID NO: 588114 - DNA, 19 bp, Mus musculus
  siRNA target sequence for A530086E13Rik (NM_172587.2,945-963).
caatgtaactaccattatt

SEQ ID NO: 588115 - DNA, 19 bp, Mus musculus
  siRNA target sequence for A530086E13Rik (NM_172587.2,956-974).
ccattattcgtctgaataa

SEQ ID NO: 588116 - DNA, 19 bp, Mus musculus
  siRNA target sequence for A530086E13Rik (NM_172587.2,957-975).
cattattcgtctgaataaa

SEQ ID NO: 588117 - DNA, 19 bp, Mus musculus
  siRNA target sequence for A530086E13Rik (NM_172587.2,1015-1033).
gatcaccatgatcttttct

SEQ ID NO: 588118 - DNA, 19 bp, Mus musculus
  siRNA target sequence for A530086E13Rik (NM_172587.2,1047-1065).
cacccctgctgagtcaatt

SEQ ID NO: 588119 - DNA, 19 bp, Mus musculus
  siRNA target sequence for A530086E13Rik (NM_172587.2,1049-1067).
cccctgctgagtcaattgt

SEQ ID NO: 588120 - DNA, 19 bp, Mus musculus
  siRNA target sequence for A530086E13Rik (NM_172587.2,1160-1178).
gctacctcatgaagcatta

SEQ ID NO: 588121 - DNA, 19 bp, Mus musculus
  siRNA target sequence for A530086E13Rik (NM_172587.2,1254-1272).
gtttctggtcatgaaacaa

SEQ ID NO: 588122 - DNA, 19 bp, Mus musculus
  siRNA target sequence for A530086E13Rik (NM_172587.2,1292-1310).
gcgactatttccgtcaaaa

SEQ ID NO: 588123 - DNA, 19 bp, Mus musculus
  siRNA target sequence for A530086E13Rik (NM_172587.2,1294-1312).
gactatttccgtcaaaagt

SEQ ID NO: 588124 - DNA, 19 bp, Mus musculus
  siRNA target sequence for A530086E13Rik (NM_172587.2,1296-1314).
ctatttccgtcaaaagtta

SEQ ID NO: 588125 - DNA, 19 bp, Mus musculus
  siRNA target sequence for A530086E13Rik (NM_172587.2,1369-1387).
gctgatgacctgtccttaa

SEQ ID NO: 588126 - DNA, 19 bp, Mus musculus
  siRNA target sequence for A530086E13Rik (NM_172587.2,1370-1388).
ctgatgacctgtccttaaa

SEQ ID NO: 588127 - DNA, 19 bp, Mus musculus
  siRNA target sequence for A530086E13Rik (NM_172587.2,1391-1409).
ggcttgagaatcaagacaa

SEQ ID NO: 588128 - DNA, 19 bp, Mus musculus
  siRNA target sequence for A530086E13Rik (NM_172587.2,1574-1592).
ggattgtgtgtgactacat

SEQ ID NO: 588129 - DNA, 19 bp, Mus musculus
  siRNA target sequence for C920001D21Rik (NM_177081.2,152-170).
cagctgccgaccttgtctt

SEQ ID NO: 588130 - DNA, 19 bp, Mus musculus
  siRNA target sequence for C920001D21Rik (NM_177081.2,258-276).
ctctgatgctggatgtaca

SEQ ID NO: 588131 - DNA, 19 bp, Mus musculus
  siRNA target sequence for C920001D21Rik (NM_177081.2,407-425).
ctagaggaggaattcttga

SEQ ID NO: 588132 - DNA, 19 bp, Mus musculus
  siRNA target sequence for C920001D21Rik (NM_177081.2,424-442).
gaagattccctcaaacttt

SEQ ID NO: 588133 - DNA, 19 bp, Mus musculus
  siRNA target sequence for C920001D21Rik (NM_177081.2,551-569).
gaggacagtgactacatca

SEQ ID NO: 588134 - DNA, 19 bp, Mus musculus
  siRNA target sequence for C920001D21Rik (NM_177081.2,710-728).
cgagagggcaaggagaaat

SEQ ID NO: 588135 - DNA, 19 bp, Mus musculus
  siRNA target sequence for C920001D21Rik (NM_177081.2,1125-1143).
ccgagcagtaccagtttct

SEQ ID NO: 588136 - DNA, 19 bp, Mus musculus
  siRNA target sequence for Dusp4 (NM_176933.3,150-168).
gactgcagcgtgctcaaaa

SEQ ID NO: 588137 - DNA, 19 bp, Mus musculus
  siRNA target sequence for Dusp4 (NM_176933.3,324-342).
gtgaacgtgcgctgcaata

SEQ ID NO: 588138 - DNA, 19 bp, Mus musculus
  siRNA target sequence for Dusp4 (NM_176933.3,544-562).
cggacatctgcctgcttaa

SEQ ID NO: 588139 - DNA, 19 bp, Mus musculus
  siRNA target sequence for Dusp4 (NM_176933.3,564-582).
ggtggctatgagaggtttt

SEQ ID NO: 588140 - DNA, 19 bp, Mus musculus
  siRNA target sequence for Dusp4 (NM_176933.3,593-611).
cccagaattctgctctaaa

SEQ ID NO: 588141 - DNA, 19 bp, Mus musculus
  siRNA target sequence for Dusp4 (NM_176933.3,594-612).
ccagaattctgctctaaaa

SEQ ID NO: 588142 - DNA, 19 bp, Mus musculus
  siRNA target sequence for Dusp4 (NM_176933.3,763-781).
ctgcccgcagggacatgtt

SEQ ID NO: 588143 - DNA, 19 bp, Mus musculus
  siRNA target sequence for Dusp4 (NM_176933.3,820-838).
cagactgtcccaatcactt

SEQ ID NO: 588144 - DNA, 19 bp, Mus musculus
  siRNA target sequence for Dusp4 (NM_176933.3,1065-1083).
cagcgccgaagcatcatct

SEQ ID NO: 588145 - DNA, 19 bp, Mus musculus
  siRNA target sequence for Mtmr1 (NM_016985.1,317-335).
gcttatagctgctacaatt

SEQ ID NO: 588146 - DNA, 19 bp, Mus musculus
  siRNA target sequence for Mtmr1 (NM_016985.1,520-538).
cagtgacggactttaaaat

SEQ ID NO: 588147 - DNA, 19 bp, Mus musculus
  siRNA target sequence for Mtmr1 (NM_016985.1,629-647).
ccatggggataattcttgt

SEQ ID NO: 588148 - DNA, 19 bp, Mus musculus
  siRNA target sequence for Mtmr1 (NM_016985.1,676-694).
ggaacctgagacttgcata

SEQ ID NO: 588149 - DNA, 19 bp, Mus musculus
  siRNA target sequence for Mtmr1 (NM_016985.1,691-709).
catataagcaggaagaaca

SEQ ID NO: 588150 - DNA, 19 bp, Mus musculus
  siRNA target sequence for Mtmr1 (NM_016985.1,710-728).
gcgaaaacttgggatattt

SEQ ID NO: 588151 - DNA, 19 bp, Mus musculus
  siRNA target sequence for Mtmr1 (NM_016985.1,773-791).
gctatttgcattcaactat

SEQ ID NO: 588152 - DNA, 19 bp, Mus musculus
  siRNA target sequence for Mtmr1 (NM_016985.1,774-792).
ctatttgcattcaactata

SEQ ID NO: 588153 - DNA, 19 bp, Mus musculus
  siRNA target sequence for Mtmr1 (NM_016985.1,831-849).
ccagtgtctgaatataaga

SEQ ID NO: 588154 - DNA, 19 bp, Mus musculus
  siRNA target sequence for Mtmr1 (NM_016985.1,852-870).
cagggcttgccaaatgaga

SEQ ID NO: 588155 - DNA, 19 bp, Mus musculus
  siRNA target sequence for Mtmr1 (NM_016985.1,917-935).
ctatcctgccatcattgtt

SEQ ID NO: 588156 - DNA, 19 bp, Mus musculus
  siRNA target sequence for Mtmr1 (NM_016985.1,1048-1066).
gttgcagccagccattagt

SEQ ID NO: 588157 - DNA, 19 bp, Mus musculus
  siRNA target sequence for Mtmr1 (NM_016985.1,1106-1124).
cctgcagacaataatggat

SEQ ID NO: 588158 - DNA, 19 bp, Mus musculus
  siRNA target sequence for Mtmr1 (NM_016985.1,1112-1130).
gacaataatggatgctaat

SEQ ID NO: 588159 - DNA, 19 bp, Mus musculus
  siRNA target sequence for Mtmr1 (NM_016985.1,1126-1144).
ctaatgcacagtcacataa

SEQ ID NO: 588160 - DNA, 19 bp, Mus musculus
  siRNA target sequence for Mtmr1 (NM_016985.1,1195-1213).
caaagggtggtggatatga

SEQ ID NO: 588161 - DNA, 19 bp, Mus musculus
  siRNA target sequence for Mtmr1 (NM_016985.1,1199-1217).
gggtggtggatatgaaaat

SEQ ID NO: 588162 - DNA, 19 bp, Mus musculus
  siRNA target sequence for Mtmr1 (NM_016985.1,1229-1247).
ccctaatgccgaactcata

SEQ ID NO: 588163 - DNA, 19 bp, Mus musculus
  siRNA target sequence for Mtmr1 (NM_016985.1,1230-1248).
cctaatgccgaactcatat

SEQ ID NO: 588164 - DNA, 19 bp, Mus musculus
  siRNA target sequence for Mtmr1 (NM_016985.1,1231-1249).
ctaatgccgaactcatatt

SEQ ID NO: 588165 - DNA, 19 bp, Mus musculus
  siRNA target sequence for Mtmr1 (NM_016985.1,1250-1268).
cttggagatccacaatatt

SEQ ID NO: 588166 - DNA, 19 bp, Mus musculus
  siRNA target sequence for Mtmr1 (NM_016985.1,1277-1295).
gagggagtcacttcgtaaa

SEQ ID NO: 588167 - DNA, 19 bp, Mus musculus
  siRNA target sequence for Mtmr1 (NM_016985.1,1280-1298).
ggagtcacttcgtaaatta

SEQ ID NO: 588168 - DNA, 19 bp, Mus musculus
  siRNA target sequence for Mtmr1 (NM_016985.1,1281-1299).
gagtcacttcgtaaattaa

SEQ ID NO: 588169 - DNA, 19 bp, Mus musculus
  siRNA target sequence for Mtmr1 (NM_016985.1,1291-1309).
gtaaattaaaggagattgt

SEQ ID NO: 588170 - DNA, 19 bp, Mus musculus
  siRNA target sequence for Mtmr1 (NM_016985.1,1304-1322).
gattgtgtatccttcaatt

SEQ ID NO: 588171 - DNA, 19 bp, Mus musculus
  siRNA target sequence for Mtmr1 (NM_016985.1,1328-1346).
gtcacattggctatccaat

SEQ ID NO: 588172 - DNA, 19 bp, Mus musculus
  siRNA target sequence for Mtmr1 (NM_016985.1,1354-1372).
ggacacattggctggaata

SEQ ID NO: 588173 - DNA, 19 bp, Mus musculus
  siRNA target sequence for Mtmr1 (NM_016985.1,1355-1373).
gacacattggctggaatat

SEQ ID NO: 588174 - DNA, 19 bp, Mus musculus
  siRNA target sequence for Mtmr1 (NM_016985.1,1517-1535).
ccggaccattaaaggattt

SEQ ID NO: 588175 - DNA, 19 bp, Mus musculus
  siRNA target sequence for Mtmr1 (NM_016985.1,1531-1549).
gatttgaggctctcataga

SEQ ID NO: 588176 - DNA, 19 bp, Mus musculus
  siRNA target sequence for Mtmr1 (NM_016985.1,1548-1566).
gaaaaggagtggataagct

SEQ ID NO: 588177 - DNA, 19 bp, Mus musculus
  siRNA target sequence for Mtmr1 (NM_016985.1,1621-1639).
ctgaccgatcacctatatt

SEQ ID NO: 588178 - DNA, 19 bp, Mus musculus
  siRNA target sequence for Mtmr1 (NM_016985.1,1625-1643).
ccgatcacctatatttctt

SEQ ID NO: 588179 - DNA, 19 bp, Mus musculus
  siRNA target sequence for Mtmr1 (NM_016985.1,1794-1812).
gatgtatatacaaatacta

SEQ ID NO: 588180 - DNA, 19 bp, Mus musculus
  siRNA target sequence for Mtmr1 (NM_016985.1,1816-1834).
ctttatggtcttatatcaa

SEQ ID NO: 588181 - DNA, 19 bp, Mus musculus
  siRNA target sequence for Mtmr1 (NM_016985.1,1838-1856).
ccaactagatgaattctca

SEQ ID NO: 588182 - DNA, 19 bp, Mus musculus
  siRNA target sequence for Mtmr1 (NM_016985.1,1839-1857).
caactagatgaattctcaa

SEQ ID NO: 588183 - DNA, 19 bp, Mus musculus
  siRNA target sequence for Mtmr1 (NM_016985.1,1880-1898).
gaaccatgtgttatatcct

SEQ ID NO: 588184 - DNA, 19 bp, Mus musculus
  siRNA target sequence for Mtmr1 (NM_016985.1,1906-1924).
gtatgagtcacttggaatt

SEQ ID NO: 588185 - DNA, 19 bp, Mus musculus
  siRNA target sequence for Mtmr1 (NM_016985.1,1925-1943).
gtgggtaaattattatgta

SEQ ID NO: 588186 - DNA, 19 bp, Mus musculus
  siRNA target sequence for Mtmr1 (NM_016985.1,1974-1992).
ccaattcatcagaatctca

SEQ ID NO: 588187 - DNA, 19 bp, Mus musculus
  siRNA target sequence for Mtmr1 (NM_016985.1,1975-1993).
caattcatcagaatctcaa

SEQ ID NO: 588188 - DNA, 19 bp, Mus musculus
  siRNA target sequence for Mtmr7 (NM_019433.1,86-104).
cgcacgcccaaggttgaaa

SEQ ID NO: 588189 - DNA, 19 bp, Mus musculus
  siRNA target sequence for Mtmr7 (NM_019433.1,87-105).
gcacgcccaaggttgaaaa

SEQ ID NO: 588190 - DNA, 19 bp, Mus musculus
  siRNA target sequence for Mtmr7 (NM_019433.1,90-108).
cgcccaaggttgaaaacgt

SEQ ID NO: 588191 - DNA, 19 bp, Mus musculus
  siRNA target sequence for Mtmr7 (NM_019433.1,165-183).
cggccactcacgtcatatt

SEQ ID NO: 588192 - DNA, 19 bp, Mus musculus
  siRNA target sequence for Mtmr7 (NM_019433.1,168-186).
ccactcacgtcatattcgt

SEQ ID NO: 588193 - DNA, 19 bp, Mus musculus
  siRNA target sequence for Mtmr7 (NM_019433.1,175-193).
cgtcatattcgtggaaaat

SEQ ID NO: 588194 - DNA, 19 bp, Mus musculus
  siRNA target sequence for Mtmr7 (NM_019433.1,284-302).
cttattcgctgcaagaact

SEQ ID NO: 588195 - DNA, 19 bp, Mus musculus
  siRNA target sequence for Mtmr7 (NM_019433.1,307-325).
gatcgtacaacttgtcatt

SEQ ID NO: 588196 - DNA, 19 bp, Mus musculus
  siRNA target sequence for Mtmr7 (NM_019433.1,349-367).
cgtgtacatctctctgata

SEQ ID NO: 588197 - DNA, 19 bp, Mus musculus
  siRNA target sequence for Mtmr7 (NM_019433.1,457-475).
gctggttgaccttagtgaa

SEQ ID NO: 588198 - DNA, 19 bp, Mus musculus
  siRNA target sequence for Mtmr7 (NM_019433.1,460-478).
ggttgaccttagtgaagaa

SEQ ID NO: 588199 - DNA, 19 bp, Mus musculus
  siRNA target sequence for Mtmr7 (NM_019433.1,491-509).
ggcctccctgataattatt

SEQ ID NO: 588200 - DNA, 19 bp, Mus musculus
  siRNA target sequence for Mtmr7 (NM_019433.1,510-528).
ggcagctcagcgatgtgaa

SEQ ID NO: 588201 - DNA, 19 bp, Mus musculus
  siRNA target sequence for Mtmr7 (NM_019433.1,531-549).
gagactacagagtttgtga

SEQ ID NO: 588202 - DNA, 19 bp, Mus musculus
  siRNA target sequence for Mtmr7 (NM_019433.1,552-570).
cttaccccacggaactgta

SEQ ID NO: 588203 - DNA, 19 bp, Mus musculus
  siRNA target sequence for Mtmr7 (NM_019433.1,582-600).
cggccacggcacacatcat

SEQ ID NO: 588204 - DNA, 19 bp, Mus musculus
  siRNA target sequence for Mtmr7 (NM_019433.1,622-640).
gagcagacggcgatttcct

SEQ ID NO: 588205 - DNA, 19 bp, Mus musculus
  siRNA target sequence for Mtmr7 (NM_019433.1,641-659).
gccctttcctactactgta

SEQ ID NO: 588206 - DNA, 19 bp, Mus musculus
  siRNA target sequence for Mtmr7 (NM_019433.1,642-660).
ccctttcctactactgtaa

SEQ ID NO: 588207 - DNA, 19 bp, Mus musculus
  siRNA target sequence for Mtmr7 (NM_019433.1,643-661).
cctttcctactactgtaaa

SEQ ID NO: 588208 - DNA, 19 bp, Mus musculus
  siRNA target sequence for Mtmr7 (NM_019433.1,790-808).
ggacacaaggcctaaactt

SEQ ID NO: 588209 - DNA, 19 bp, Mus musculus
  siRNA target sequence for Mtmr7 (NM_019433.1,831-849).
cagggaaaggctatgagaa

SEQ ID NO: 588210 - DNA, 19 bp, Mus musculus
  siRNA target sequence for Mtmr7 (NM_019433.1,854-872).
gacaattattccaatatca

SEQ ID NO: 588211 - DNA, 19 bp, Mus musculus
  siRNA target sequence for Mtmr7 (NM_019433.1,878-896).
cagtttatcggcatagaga

SEQ ID NO: 588212 - DNA, 19 bp, Mus musculus
  siRNA target sequence for Mtmr7 (NM_019433.1,931-949).
gctggaagtgtgtgaactt

SEQ ID NO: 588213 - DNA, 19 bp, Mus musculus
  siRNA target sequence for Mtmr7 (NM_019433.1,954-972).
ctccctctatgagtgattt

SEQ ID NO: 588214 - DNA, 19 bp, Mus musculus
  siRNA target sequence for Mtmr7 (NM_019433.1,957-975).
cctctatgagtgatttcct

SEQ ID NO: 588215 - DNA, 19 bp, Mus musculus
  siRNA target sequence for Mtmr7 (NM_019433.1,1065-1083).
gggcaagtgtgcttgttca

SEQ ID NO: 588216 - DNA, 19 bp, Mus musculus
  siRNA target sequence for Mtmr7 (NM_019433.1,1194-1212).
ggatttccttcggacataa

SEQ ID NO: 588217 - DNA, 19 bp, Mus musculus
  siRNA target sequence for Mtmr7 (NM_019433.1,1195-1213).
gatttccttcggacataaa

SEQ ID NO: 588218 - DNA, 19 bp, Mus musculus
  siRNA target sequence for Mtmr7 (NM_019433.1,1200-1218).
ccttcggacataaatttaa

SEQ ID NO: 588219 - DNA, 19 bp, Mus musculus
  siRNA target sequence for Mtmr7 (NM_019433.1,1201-1219).
cttcggacataaatttaat

SEQ ID NO: 588220 - DNA, 19 bp, Mus musculus
  siRNA target sequence for Mtmr7 (NM_019433.1,1204-1222).
cggacataaatttaatcat

SEQ ID NO: 588221 - DNA, 19 bp, Mus musculus
  siRNA target sequence for Mtmr7 (NM_019433.1,1205-1223).
ggacataaatttaatcata

SEQ ID NO: 588222 - DNA, 19 bp, Mus musculus
  siRNA target sequence for Mtmr7 (NM_019433.1,1238-1256).
gatggtgacccaaaagaaa

SEQ ID NO: 588223 - DNA, 19 bp, Mus musculus
  siRNA target sequence for Mtmr7 (NM_019433.1,1263-1281).
cagtaatcgaccagttcat

SEQ ID NO: 588224 - DNA, 19 bp, Mus musculus
  siRNA target sequence for Mtmr7 (NM_019433.1,1293-1311).
ggcagctaacggaacagtt

SEQ ID NO: 588225 - DNA, 19 bp, Mus musculus
  siRNA target sequence for Mtmr7 (NM_019433.1,1349-1367).
cacattcagcatcatgttt

SEQ ID NO: 588226 - DNA, 19 bp, Mus musculus
  siRNA target sequence for Mtmr7 (NM_019433.1,1351-1369).
cattcagcatcatgtttat

SEQ ID NO: 588227 - DNA, 19 bp, Mus musculus
  siRNA target sequence for Mtmr7 (NM_019433.1,1408-1426).
ggagaggcgagaactcaat

SEQ ID NO: 588228 - DNA, 19 bp, Mus musculus
  siRNA target sequence for Ptp4a3 (NM_008975.2,1257-1275).
cgccgtggggccatcaaca

SEQ ID NO: 588229 - DNA, 19 bp, Mus musculus
  siRNA target sequence for Ptpn9 (NM_019651.1,159-177).
ggctaccaagcagtttctt

SEQ ID NO: 588230 - DNA, 19 bp, Mus musculus
  siRNA target sequence for Ptpn9 (NM_019651.1,175-193).
cttgaagagatcaacaagt

SEQ ID NO: 588231 - DNA, 19 bp, Mus musculus
  siRNA target sequence for Ptpn9 (NM_019651.1,249-267).
catggccagaaagtttgat

SEQ ID NO: 588232 - DNA, 19 bp, Mus musculus
  siRNA target sequence for Ptpn9 (NM_019651.1,366-384).
gatcctcagtgggaagttt

SEQ ID NO: 588233 - DNA, 19 bp, Mus musculus
  siRNA target sequence for Ptpn9 (NM_019651.1,369-387).
cctcagtgggaagtttact

SEQ ID NO: 588234 - DNA, 19 bp, Mus musculus
  siRNA target sequence for Ptpn9 (NM_019651.1,370-388).
ctcagtgggaagtttacta

SEQ ID NO: 588235 - DNA, 19 bp, Mus musculus
  siRNA target sequence for Ptpn9 (NM_019651.1,378-396).
gaagtttactatcttgaat

SEQ ID NO: 588236 - DNA, 19 bp, Mus musculus
  siRNA target sequence for Ptpn9 (NM_019651.1,474-492).
ggtgctccaagctctgttt

SEQ ID NO: 588237 - DNA, 19 bp, Mus musculus
  siRNA target sequence for Ptpn9 (NM_019651.1,539-557).
gactggtgttcatctatga

SEQ ID NO: 588238 - DNA, 19 bp, Mus musculus
  siRNA target sequence for Ptpn9 (NM_019651.1,556-574).
gacatgtgcgggtctaatt

SEQ ID NO: 588239 - DNA, 19 bp, Mus musculus
  siRNA target sequence for Ptpn9 (NM_019651.1,558-576).
catgtgcgggtctaattat

SEQ ID NO: 588240 - DNA, 19 bp, Mus musculus
  siRNA target sequence for Ptpn9 (NM_019651.1,578-596).
ccaactttgagctagatct

SEQ ID NO: 588241 - DNA, 19 bp, Mus musculus
  siRNA target sequence for Ptpn9 (NM_019651.1,579-597).
caactttgagctagatctt

SEQ ID NO: 588242 - DNA, 19 bp, Mus musculus
  siRNA target sequence for Ptpn9 (NM_019651.1,635-653).
cagctcgactgaagaaagt

SEQ ID NO: 588243 - DNA, 19 bp, Mus musculus
  siRNA target sequence for Ptpn9 (NM_019651.1,678-696).
gttccgagtgccctattca

SEQ ID NO: 588244 - DNA, 19 bp, Mus musculus
  siRNA target sequence for Ptpn9 (NM_019651.1,682-700).
cgagtgccctattcaatca

SEQ ID NO: 588245 - DNA, 19 bp, Mus musculus
  siRNA target sequence for Ptpn9 (NM_019651.1,683-701).
gagtgccctattcaatcat

SEQ ID NO: 588246 - DNA, 19 bp, Mus musculus
  siRNA target sequence for Ptpn9 (NM_019651.1,704-722).
gcctgctcttgaaggataa

SEQ ID NO: 588247 - DNA, 19 bp, Mus musculus
  siRNA target sequence for Ptpn9 (NM_019651.1,803-821).
gtgggtacgtcaaaattga

SEQ ID NO: 588248 - DNA, 19 bp, Mus musculus
  siRNA target sequence for Ptpn9 (NM_019651.1,964-982).
gagttggtagactatgtta

SEQ ID NO: 588249 - DNA, 19 bp, Mus musculus
  siRNA target sequence for Ptpn9 (NM_019651.1,1148-1166).
gccacactcagacagatta

SEQ ID NO: 588250 - DNA, 19 bp, Mus musculus
  siRNA target sequence for Ptpn9 (NM_019651.1,1154-1172).
ctcagacagattacatcaa

SEQ ID NO: 588251 - DNA, 19 bp, Mus musculus
  siRNA target sequence for Ptpn9 (NM_019651.1,1175-1193).
ccagtttcatggatggtta

SEQ ID NO: 588252 - DNA, 19 bp, Mus musculus
  siRNA target sequence for Ptpn9 (NM_019651.1,1194-1212).
caagcagaagaatgcttat

SEQ ID NO: 588253 - DNA, 19 bp, Mus musculus
  siRNA target sequence for Ptpn9 (NM_019651.1,1264-1282).
gtttgggagcaaaaagttt

SEQ ID NO: 588254 - DNA, 19 bp, Mus musculus
  siRNA target sequence for Ptpn9 (NM_019651.1,1334-1352).
gccagtactggcctttaga

SEQ ID NO: 588255 - DNA, 19 bp, Mus musculus
  siRNA target sequence for Ptpn9 (NM_019651.1,1335-1353).
ccagtactggcctttagaa

SEQ ID NO: 588256 - DNA, 19 bp, Mus musculus
  siRNA target sequence for Ptpn9 (NM_019651.1,1336-1354).
cagtactggcctttagaaa

SEQ ID NO: 588257 - DNA, 19 bp, Mus musculus
  siRNA target sequence for Ptpn9 (NM_019651.1,1338-1356).
gtactggcctttagaaaaa

SEQ ID NO: 588258 - DNA, 19 bp, Mus musculus
  siRNA target sequence for Ptpn9 (NM_019651.1,1380-1398).
cctcacggtgactaatcta

SEQ ID NO: 588259 - DNA, 19 bp, Mus musculus
  siRNA target sequence for Ptpn9 (NM_019651.1,1391-1409).
ctaatctaggagtggaaaa

SEQ ID NO: 588260 - DNA, 19 bp, Mus musculus
  siRNA target sequence for Ptpn9 (NM_019651.1,1396-1414).
ctaggagtggaaaacatga

SEQ ID NO: 588261 - DNA, 19 bp, Mus musculus
  siRNA target sequence for Ptpn9 (NM_019651.1,1410-1428).
catgaaccattataagaaa

SEQ ID NO: 588262 - DNA, 19 bp, Mus musculus
  siRNA target sequence for Ptpn9 (NM_019651.1,1413-1431).
gaaccattataagaaaaca

SEQ ID NO: 588263 - DNA, 19 bp, Mus musculus
  siRNA target sequence for Ptpn9 (NM_019651.1,1708-1726).
cttggcacccttaatgtgt

SEQ ID NO: 588264 - DNA, 19 bp, Mus musculus
  siRNA target sequence for Ptpn9 (NM_019651.1,1751-1769).
cccaaagggccttcagtat

SEQ ID NO: 588265 - DNA, 19 bp, Mus musculus
  siRNA target sequence for Ptpn9 (NM_019651.1,1775-1793).
cccctgagcagtactactt

SEQ ID NO: 588266 - DNA, 19 bp, Mus musculus
  siRNA target sequence for Ptpn9 (NM_019651.1,1777-1795).
cctgagcagtactactttt

SEQ ID NO: 588267 - DNA, 19 bp, Mus musculus
  siRNA target sequence for Ptprl (NM_011214.1,511-529).
cagtatgacgacttccaat

SEQ ID NO: 588268 - DNA, 19 bp, Mus musculus
  siRNA target sequence for Ptprl (NM_011214.1,577-595).
ccccatggtgcctacttga

SEQ ID NO: 588269 - DNA, 19 bp, Mus musculus
  siRNA target sequence for Ptprl (NM_011214.1,623-641).
gtcagagggcccacatcat

SEQ ID NO: 588270 - DNA, 19 bp, Mus musculus
  siRNA target sequence for Ptprl (NM_011214.1,1270-1288).
ggccccacctacctcatta

SEQ ID NO: 588271 - DNA, 19 bp, Mus musculus
  siRNA target sequence for Ptprl (NM_011214.1,1274-1292).
ccacctacctcattatcca

SEQ ID NO: 588272 - DNA, 19 bp, Mus musculus
  siRNA target sequence for Ptprl (NM_011214.1,1589-1607).
gggagcccctgggctataa

SEQ ID NO: 588273 - DNA, 19 bp, Mus musculus
  siRNA target sequence for Ptprl (NM_011214.1,1594-1612).
cccctgggctataatgtca

SEQ ID NO: 588274 - DNA, 19 bp, Mus musculus
  siRNA target sequence for Ptprl (NM_011214.1,1629-1647).
cgctgtgtccctttgctat

SEQ ID NO: 588275 - DNA, 19 bp, Mus musculus
  siRNA target sequence for Ptprl (NM_011214.1,1716-1734).
ccgctacaccatcaagaat

SEQ ID NO: 588276 - DNA, 19 bp, Mus musculus
  siRNA target sequence for Ptprl (NM_011214.1,1752-1770).
catccacgtgcgtctgatt

SEQ ID NO: 588277 - DNA, 19 bp, Mus musculus
  siRNA target sequence for Ptprl (NM_011214.1,1756-1774).
cacgtgcgtctgattctca

SEQ ID NO: 588278 - DNA, 19 bp, Mus musculus
  siRNA target sequence for Ptprl (NM_011214.1,1847-1865).
cagctgagtccctaacctt

SEQ ID NO: 588279 - DNA, 19 bp, Mus musculus
  siRNA target sequence for Ptprl (NM_011214.1,2053-2071).
cccggcaccacgtatctgt

SEQ ID NO: 588280 - DNA, 19 bp, Mus musculus
  siRNA target sequence for Ptprl (NM_011214.1,2054-2072).
ccggcaccacgtatctgtt

SEQ ID NO: 588281 - DNA, 19 bp, Mus musculus
  siRNA target sequence for Ptprl (NM_011214.1,2110-2128).
gcggctctcactgagataa

SEQ ID NO: 588282 - DNA, 19 bp, Mus musculus
  siRNA target sequence for Ptprl (NM_011214.1,2122-2140).
gagataaccaccaacatct

SEQ ID NO: 588283 - DNA, 19 bp, Mus musculus
  siRNA target sequence for Ptprl (NM_011214.1,2471-2489).
ccagaaaggcctatctcat

SEQ ID NO: 588284 - DNA, 19 bp, Mus musculus
  siRNA target sequence for Ptprl (NM_011214.1,2809-2827).
cggttgggtctgtccttta

SEQ ID NO: 588285 - DNA, 19 bp, Mus musculus
  siRNA target sequence for Ptprl (NM_011214.1,3163-3181).
cctgatgccgactacatct

SEQ ID NO: 588286 - DNA, 19 bp, Mus musculus
  siRNA target sequence for Ptprl (NM_011214.1,3177-3195).
catctctgccaactacata

SEQ ID NO: 588287 - DNA, 19 bp, Mus musculus
  siRNA target sequence for Ptprl (NM_011214.1,3207-3225).
caggtcaaaccacttcata

SEQ ID NO: 588288 - DNA, 19 bp, Mus musculus
  siRNA target sequence for Ptprl (NM_011214.1,3239-3257).
caaagcctgagatgatcta

SEQ ID NO: 588289 - DNA, 19 bp, Mus musculus
  siRNA target sequence for Ptprl (NM_011214.1,3290-3308).
gtgcgagcatcgtcatgat

SEQ ID NO: 588290 - DNA, 19 bp, Mus musculus
  siRNA target sequence for Ptprl (NM_011214.1,3387-3405).
gatcacgctggtaaagaca

SEQ ID NO: 588291 - DNA, 19 bp, Mus musculus
  siRNA target sequence for Ptprl (NM_011214.1,3477-3495).
ccgccagttccatttcaca

SEQ ID NO: 588292 - DNA, 19 bp, Mus musculus
  siRNA target sequence for Ptprl (NM_011214.1,3674-3692).
gggtcgtggacatttacaa

SEQ ID NO: 588293 - DNA, 19 bp, Mus musculus
  siRNA target sequence for Ptprl (NM_011214.1,3710-3728).
gttcccgacgggtcaacat

SEQ ID NO: 588294 - DNA, 19 bp, Mus musculus
  siRNA target sequence for Ptprl (NM_011214.1,3713-3731).
cccgacgggtcaacatgat

SEQ ID NO: 588295 - DNA, 19 bp, Mus musculus
  siRNA target sequence for Ptprl (NM_011214.1,3850-3868).
gaccctcagagcaattcct

SEQ ID NO: 588296 - DNA, 19 bp, Mus musculus
  siRNA target sequence for Ptprl (NM_011214.1,4028-4046).
gggaccccaataactacat

SEQ ID NO: 588297 - DNA, 19 bp, Mus musculus
  siRNA target sequence for Ptprl (NM_011214.1,4030-4048).
gaccccaataactacatca

SEQ ID NO: 588298 - DNA, 19 bp, Mus musculus
  siRNA target sequence for Ptprl (NM_011214.1,4168-4186).
gtcatgctgaaccaactta

SEQ ID NO: 588299 - DNA, 19 bp, Mus musculus
  siRNA target sequence for Ptprl (NM_011214.1,4575-4593).
ctttgctgccaaaacactt

SEQ ID NO: 588300 - DNA, 19 bp, Mus musculus
  siRNA target sequence for Dusp1 (NM_013642.1,206-224).
cagtgcctgttgttggatt

SEQ ID NO: 588301 - DNA, 19 bp, Mus musculus
  siRNA target sequence for Dusp1 (NM_013642.1,228-246).
gctccttcttcgctttcaa

SEQ ID NO: 588302 - DNA, 19 bp, Mus musculus
  siRNA target sequence for Dusp1 (NM_013642.1,701-719).
cacgcttctcggaaggata

SEQ ID NO: 588303 - DNA, 19 bp, Mus musculus
  siRNA target sequence for Dusp1 (NM_013642.1,705-723).
cttctcggaaggatatgct

SEQ ID NO: 588304 - DNA, 19 bp, Mus musculus
  siRNA target sequence for Dusp1 (NM_013642.1,734-752).
ggcatcaccgccttgatca

SEQ ID NO: 588305 - DNA, 19 bp, Mus musculus
  siRNA target sequence for Dusp1 (NM_013642.1,735-753).
gcatcaccgccttgatcaa

SEQ ID NO: 588306 - DNA, 19 bp, Mus musculus
  siRNA target sequence for Dusp1 (NM_013642.1,751-769).
caacgtctcagccaattgt

SEQ ID NO: 588307 - DNA, 19 bp, Mus musculus
  siRNA target sequence for Dusp1 (NM_013642.1,846-864).
ggttcaacgaggctattga

SEQ ID NO: 588308 - DNA, 19 bp, Mus musculus
  siRNA target sequence for Dusp1 (NM_013642.1,853-871).
cgaggctattgacttcata

SEQ ID NO: 588309 - DNA, 19 bp, Mus musculus
  siRNA target sequence for Dusp1 (NM_013642.1,857-875).
gctattgacttcatagact

SEQ ID NO: 588310 - DNA, 19 bp, Mus musculus
  siRNA target sequence for Dusp1 (NM_013642.1,963-981).
ggactaaccgggtaaagct

SEQ ID NO: 588311 - DNA, 19 bp, Mus musculus
  siRNA target sequence for Dusp1 (NM_013642.1,1007-1025).
cagaggcggagtatcatct

SEQ ID NO: 588312 - DNA, 19 bp, Mus musculus
  siRNA target sequence for Dusp1 (NM_013642.1,1140-1158).
ctactaccacagtcttcaa

SEQ ID NO: 588313 - DNA, 19 bp, Mus musculus
  siRNA target sequence for Dusp1 (NM_013642.1,1143-1161).
ctaccacagtcttcaactt

SEQ ID NO: 588314 - DNA, 19 bp, Mus musculus
  siRNA target sequence for Dusp1 (NM_013642.1,1194-1212).
gtgccctgaactaccttaa

SEQ ID NO: 588315 - DNA, 19 bp, Mus musculus
  siRNA target sequence for Dusp13 (NM_013849.2,325-343).
cacactgacccacatcaat

SEQ ID NO: 588316 - DNA, 19 bp, Mus musculus
  siRNA target sequence for Dusp13 (NM_013849.2,327-345).
cactgacccacatcaatga

SEQ ID NO: 588317 - DNA, 19 bp, Mus musculus
  siRNA target sequence for Dusp13 (NM_013849.2,387-405).
gagacaagggtcgtctaat

SEQ ID NO: 588318 - DNA, 19 bp, Mus musculus
  siRNA target sequence for Dusp13 (NM_013849.2,414-432).
gcattacccatgttgtgaa

SEQ ID NO: 588319 - DNA, 19 bp, Mus musculus
  siRNA target sequence for Dusp13 (NM_013849.2,415-433).
cattacccatgttgtgaat

SEQ ID NO: 588320 - DNA, 19 bp, Mus musculus
  siRNA target sequence for Dusp13 (NM_013849.2,483-501).
gaacacctctggagtacta

SEQ ID NO: 588321 - DNA, 19 bp, Mus musculus
  siRNA target sequence for Dusp13 (NM_013849.2,628-646).
gagtcgctctgccacaatt

SEQ ID NO: 588322 - DNA, 19 bp, Mus musculus
  siRNA target sequence for Dusp13 (NM_013849.2,630-648).
gtcgctctgccacaattgt

SEQ ID NO: 588323 - DNA, 19 bp, Mus musculus
  siRNA target sequence for Dusp13 (NM_013849.2,632-650).
cgctctgccacaattgtct

SEQ ID NO: 588324 - DNA, 19 bp, Mus musculus
  siRNA target sequence for Dusp13 (NM_013849.2,707-725).
caggcccaccgagatatct

SEQ ID NO: 588325 - DNA, 19 bp, Mus musculus
  siRNA target sequence for Dusp13 (NM_013849.2,709-727).
ggcccaccgagatatctgt

SEQ ID NO: 588326 - DNA, 19 bp, Mus musculus
  siRNA target sequence for Dusp14 (NM_019819.2,431-449).
catcacctgcgtcatcaat

SEQ ID NO: 588327 - DNA, 19 bp, Mus musculus
  siRNA target sequence for Dusp14 (NM_019819.2,479-497).
gccccagtttgaatatgtt

SEQ ID NO: 588328 - DNA, 19 bp, Mus musculus
  siRNA target sequence for Dusp14 (NM_019819.2,520-538).
ctcatgcccccattagact

SEQ ID NO: 588329 - DNA, 19 bp, Mus musculus
  siRNA target sequence for Dusp14 (NM_019819.2,526-544).
cccccattagactgtactt

SEQ ID NO: 588330 - DNA, 19 bp, Mus musculus
  siRNA target sequence for Dusp14 (NM_019819.2,527-545).
ccccattagactgtacttt

SEQ ID NO: 588331 - DNA, 19 bp, Mus musculus
  siRNA target sequence for Dusp14 (NM_019819.2,529-547).
ccattagactgtactttga

SEQ ID NO: 588332 - DNA, 19 bp, Mus musculus
  siRNA target sequence for Dusp14 (NM_019819.2,646-664).
cgtacctgatgaaattcca

SEQ ID NO: 588333 - DNA, 19 bp, Mus musculus
  siRNA target sequence for Dusp14 (NM_019819.2,812-830).
catcatcccagacgtttat

SEQ ID NO: 588334 - DNA, 19 bp, Mus musculus
  siRNA target sequence for Dusp14 (NM_019819.2,843-861).
cgacacttgatgccttatt

SEQ ID NO: 588335 - DNA, 19 bp, Mus musculus
  siRNA target sequence for Dusp2 (NM_010090.1,393-411).
cttgcgaggcggtttcaaa

SEQ ID NO: 588336 - DNA, 19 bp, Mus musculus
  siRNA target sequence for Dusp2 (NM_010090.1,397-415).
cgaggcggtttcaaaagct

SEQ ID NO: 588337 - DNA, 19 bp, Mus musculus
  siRNA target sequence for Dusp2 (NM_010090.1,398-416).
gaggcggtttcaaaagctt

SEQ ID NO: 588338 - DNA, 19 bp, Mus musculus
  siRNA target sequence for Dusp2 (NM_010090.1,498-516).
cccgagggttccgatctat

SEQ ID NO: 588339 - DNA, 19 bp, Mus musculus
  siRNA target sequence for Dusp2 (NM_010090.1,500-518).
cgagggttccgatctatga

SEQ ID NO: 588340 - DNA, 19 bp, Mus musculus
  siRNA target sequence for Dusp3 (NM_028207.1,294-312).
gggcatcaaggccaatgat

SEQ ID NO: 588341 - DNA, 19 bp, Mus musculus
  siRNA target sequence for Dusp3 (NM_028207.1,295-313).
ggcatcaaggccaatgata

SEQ ID NO: 588342 - DNA, 19 bp, Mus musculus
  siRNA target sequence for Dusp3 (NM_028207.1,327-345).
cctcagtgcttactttgaa

SEQ ID NO: 588343 - DNA, 19 bp, Mus musculus
  siRNA target sequence for Dusp3 (NM_028207.1,366-384).
ccaggcgctggcccataaa

SEQ ID NO: 588344 - DNA, 19 bp, Mus musculus
  siRNA target sequence for Dusp3 (NM_028207.1,367-385).
caggcgctggcccataaaa

SEQ ID NO: 588345 - DNA, 19 bp, Mus musculus
  siRNA target sequence for Dusp3 (NM_028207.1,369-387).
ggcgctggcccataaaaat

SEQ ID NO: 588346 - DNA, 19 bp, Mus musculus
  siRNA target sequence for Dusp3 (NM_028207.1,424-442).
cgctccccaacgctagtta

SEQ ID NO: 588347 - DNA, 19 bp, Mus musculus
  siRNA target sequence for Dusp3 (NM_028207.1,425-443).
gctccccaacgctagttat

SEQ ID NO: 588348 - DNA, 19 bp, Mus musculus
  siRNA target sequence for Dusp6 (NM_026268.1,598-616).
gagtcgtcacacatcgaat

SEQ ID NO: 588349 - DNA, 19 bp, Mus musculus
  siRNA target sequence for Dusp6 (NM_026268.1,609-627).
catcgaatctgccattaat

SEQ ID NO: 588350 - DNA, 19 bp, Mus musculus
  siRNA target sequence for Dusp6 (NM_026268.1,706-724).
gaccgggaccgctttacca

SEQ ID NO: 588351 - DNA, 19 bp, Mus musculus
  siRNA target sequence for Dusp6 (NM_026268.1,748-766).
gtgctgtacgacgagaata

SEQ ID NO: 588352 - DNA, 19 bp, Mus musculus
  siRNA target sequence for Dusp6 (NM_026268.1,751-769).
ctgtacgacgagaatagca

SEQ ID NO: 588353 - DNA, 19 bp, Mus musculus
  siRNA target sequence for Dusp6 (NM_026268.1,767-785).
gcagcgactggaatgagaa

SEQ ID NO: 588354 - DNA, 19 bp, Mus musculus
  siRNA target sequence for Dusp6 (NM_026268.1,1413-1431).
cgatgcttacgacattgtt

SEQ ID NO: 588355 - DNA, 19 bp, Mus musculus
  siRNA target sequence for Dusp6 (NM_026268.1,1414-1432).
gatgcttacgacattgtta

SEQ ID NO: 588356 - DNA, 19 bp, Mus musculus
  siRNA target sequence for Dusp6 (NM_026268.1,1417-1435).
gcttacgacattgttaaga

SEQ ID NO: 588357 - DNA, 19 bp, Mus musculus
  siRNA target sequence for Dusp6 (NM_026268.1,1418-1436).
cttacgacattgttaagat

SEQ ID NO: 588358 - DNA, 19 bp, Mus musculus
  siRNA target sequence for Dusp7 (NM_153459.1,145-163).
gcccatccgctccatcatt

SEQ ID NO: 588359 - DNA, 19 bp, Mus musculus
  siRNA target sequence for Dusp7 (NM_153459.1,826-844).
ccgttcagtgacagttact

SEQ ID NO: 588360 - DNA, 19 bp, Mus musculus
  siRNA target sequence for Dusp8 (NM_008748.1,124-142).
ggtgatggacgcaaagaaa

SEQ ID NO: 588361 - DNA, 19 bp, Mus musculus
  siRNA target sequence for Dusp8 (NM_008748.1,194-212).
cggtccttcgtggagtata

SEQ ID NO: 588362 - DNA, 19 bp, Mus musculus
  siRNA target sequence for Dusp8 (NM_008748.1,195-213).
ggtccttcgtggagtataa

SEQ ID NO: 588363 - DNA, 19 bp, Mus musculus
  siRNA target sequence for Dusp8 (NM_008748.1,280-298).
gggaaaagtgacaattgct

SEQ ID NO: 588364 - DNA, 19 bp, Mus musculus
  siRNA target sequence for Dusp8 (NM_008748.1,645-663).
cccaaaacggaataagcta

SEQ ID NO: 588365 - DNA, 19 bp, Mus musculus
  siRNA target sequence for Dusp8 (NM_008748.1,646-664).
ccaaaacggaataagctat

SEQ ID NO: 588366 - DNA, 19 bp, Mus musculus
  siRNA target sequence for Dusp8 (NM_008748.1,687-705).
gccctaaaccggacttcat

SEQ ID NO: 588367 - DNA, 19 bp, Mus musculus
  siRNA target sequence for Dusp8 (NM_008748.1,689-707).
cctaaaccggacttcatct

SEQ ID NO: 588368 - DNA, 19 bp, Mus musculus
  siRNA target sequence for Dusp8 (NM_008748.1,721-739).
catgcgtatccccatcaat

SEQ ID NO: 588369 - DNA, 19 bp, Mus musculus
  siRNA target sequence for Dusp8 (NM_008748.1,725-743).
cgtatccccatcaatgaca

SEQ ID NO: 588370 - DNA, 19 bp, Mus musculus
  siRNA target sequence for Dusp8 (NM_008748.1,773-791).
gacaagtccatcgagttta

SEQ ID NO: 588371 - DNA, 19 bp, Mus musculus
  siRNA target sequence for Dusp8 (NM_008748.1,775-793).
caagtccatcgagtttatt

SEQ ID NO: 588372 - DNA, 19 bp, Mus musculus
  siRNA target sequence for Dusp8 (NM_008748.1,813-831).
gctgccaagtcattgttca

SEQ ID NO: 588373 - DNA, 19 bp, Mus musculus
  siRNA target sequence for Dusp8 (NM_008748.1,867-885).
ccatcgcgtacatcatgaa

SEQ ID NO: 588374 - DNA, 19 bp, Mus musculus
  siRNA target sequence for Dusp8 (NM_008748.1,868-886).
catcgcgtacatcatgaaa

SEQ ID NO: 588375 - DNA, 19 bp, Mus musculus
  siRNA target sequence for Dusp8 (NM_008748.1,908-926).
gacgcatacaggtttgtga

SEQ ID NO: 588376 - DNA, 19 bp, Mus musculus
  siRNA target sequence for Dusp8 (NM_008748.1,1268-1286).
cgcctcaagcgttcctttt

SEQ ID NO: 588377 - DNA, 19 bp, Mus musculus
  siRNA target sequence for Dusp8 (NM_008748.1,1946-1964).
gcagatgcacagttcaaga

SEQ ID NO: 588378 - DNA, 19 bp, Mus musculus
  siRNA target sequence for A930026L03Rik (NM_175523.2,303-321).
cagcggccttcattacttt

SEQ ID NO: 588379 - DNA, 19 bp, Mus musculus
  siRNA target sequence for A930026L03Rik (NM_175523.2,346-364).
gaagaagagagtgttgtta

SEQ ID NO: 588380 - DNA, 19 bp, Mus musculus
  siRNA target sequence for A930026L03Rik (NM_175523.2,430-448).
caggtgttctcggtttgat

SEQ ID NO: 588381 - DNA, 19 bp, Mus musculus
  siRNA target sequence for A930026L03Rik (NM_175523.2,467-485).
ccagccacttgggacaatt

SEQ ID NO: 588382 - DNA, 19 bp, Mus musculus
  siRNA target sequence for A930026L03Rik (NM_175523.2,493-511).
ctgggataaccgcattgat

SEQ ID NO: 588383 - DNA, 19 bp, Mus musculus
  siRNA target sequence for A930026L03Rik (NM_175523.2,495-513).
gggataaccgcattgatga

SEQ ID NO: 588384 - DNA, 19 bp, Mus musculus
  siRNA target sequence for A930026L03Rik (NM_175523.2,524-542).
ctgccacctagcatcaagt

SEQ ID NO: 588385 - DNA, 19 bp, Mus musculus
  siRNA target sequence for A930026L03Rik (NM_175523.2,538-556).
caagtacggcaaaccaatt

SEQ ID NO: 588386 - DNA, 19 bp, Mus musculus
  siRNA target sequence for A930026L03Rik (NM_175523.2,600-618).
gcaaacggaaagaaaacga

SEQ ID NO: 588387 - DNA, 19 bp, Mus musculus
  siRNA target sequence for A930026L03Rik (NM_175523.2,645-663).
cagaagaggtgctatactt

SEQ ID NO: 588388 - DNA, 19 bp, Mus musculus
  siRNA target sequence for A930026L03Rik (NM_175523.2,655-673).
gctatacttcgcagtctat

SEQ ID NO: 588389 - DNA, 19 bp, Mus musculus
  siRNA target sequence for A930026L03Rik (NM_175523.2,721-739).
ggagaaatgtgttatggat

SEQ ID NO: 588390 - DNA, 19 bp, Mus musculus
  siRNA target sequence for A930026L03Rik (NM_175523.2,877-895).
gttgagagatggtgttgaa

SEQ ID NO: 588391 - DNA, 19 bp, Mus musculus
  siRNA target sequence for A930026L03Rik (NM_175523.2,924-942).
gggctcttttgtgtagaaa

SEQ ID NO: 588392 - DNA, 19 bp, Mus musculus
  siRNA target sequence for A930026L03Rik (NM_175523.2,1009-1027).
gaaattcggtgggtttgta

SEQ ID NO: 588393 - DNA, 19 bp, Mus musculus
  siRNA target sequence for A930026L03Rik (NM_175523.2,1019-1037).
gggtttgtagcttggaata

SEQ ID NO: 588394 - DNA, 19 bp, Mus musculus
  siRNA target sequence for A930026L03Rik (NM_175523.2,1021-1039).
gtttgtagcttggaatagt

SEQ ID NO: 588395 - DNA, 19 bp, Mus musculus
  siRNA target sequence for A930026L03Rik (NM_175523.2,1042-1060).
gggacagccccatgtaaat

SEQ ID NO: 588396 - DNA, 19 bp, Mus musculus
  siRNA target sequence for A930026L03Rik (NM_175523.2,1077-1095).
caaggagtatcggagattt

SEQ ID NO: 588397 - DNA, 19 bp, Mus musculus
  siRNA target sequence for A930026L03Rik (NM_175523.2,1080-1098).
ggagtatcggagatttgga

SEQ ID NO: 588398 - DNA, 19 bp, Mus musculus
  siRNA target sequence for A930026L03Rik (NM_175523.2,1127-1145).
cctgagacaacaaggatta

SEQ ID NO: 588399 - DNA, 19 bp, Mus musculus
  siRNA target sequence for A930026L03Rik (NM_175523.2,1217-1235).
gagatctgcgactttgtca

SEQ ID NO: 588400 - DNA, 19 bp, Mus musculus
  siRNA target sequence for A930026L03Rik (NM_175523.2,1237-1255).
ccagtgccacgatcctaaa

SEQ ID NO: 588401 - DNA, 19 bp, Mus musculus
  siRNA target sequence for A930026L03Rik (NM_175523.2,1337-1355).
gcttggggaaaatacaaga

SEQ ID NO: 588402 - DNA, 19 bp, Mus musculus
  siRNA target sequence for Ppm1f (NM_176833.2,274-292).
gaacgctcccccatcgttt

SEQ ID NO: 588403 - DNA, 19 bp, Mus musculus
  siRNA target sequence for Ppm1f (NM_176833.2,405-423).
ccctcgtgaccttactaga

SEQ ID NO: 588404 - DNA, 19 bp, Mus musculus
  siRNA target sequence for Ppm1f (NM_176833.2,437-455).
gcacggagcttcttcaact

SEQ ID NO: 588405 - DNA, 19 bp, Mus musculus
  siRNA target sequence for Ppm1f (NM_176833.2,1283-1301).
gtcatggtggtcttcctta

SEQ ID NO: 588406 - DNA, 19 bp, Mus musculus
  siRNA target sequence for Ppm1l (NM_178726.1,747-765).
cgcatcatgcgctacttct

SEQ ID NO: 588407 - DNA, 19 bp, Mus musculus
  siRNA target sequence for Ppm1l (NM_178726.1,748-766).
gcatcatgcgctacttctt

SEQ ID NO: 588408 - DNA, 19 bp, Mus musculus
  siRNA target sequence for Ppm1l (NM_178726.1,749-767).
catcatgcgctacttctta

SEQ ID NO: 588409 - DNA, 19 bp, Mus musculus
  siRNA target sequence for Ppm1l (NM_178726.1,772-790).
gacccgagacgcttttcct

SEQ ID NO: 588410 - DNA, 19 bp, Mus musculus
  siRNA target sequence for Ppm1l (NM_178726.1,837-855).
gaagtgaagaccatcgtta

SEQ ID NO: 588411 - DNA, 19 bp, Mus musculus
  siRNA target sequence for Ppm1l (NM_178726.1,840-858).
gtgaagaccatcgttaagt

SEQ ID NO: 588412 - DNA, 19 bp, Mus musculus
  siRNA target sequence for Ppm1l (NM_178726.1,862-880).
gccgggacgcggtgaagat

SEQ ID NO: 588413 - DNA, 19 bp, Mus musculus
  siRNA target sequence for Ppm1l (NM_178726.1,888-906).
ggcaaggtggccgagatta

SEQ ID NO: 588414 - DNA, 19 bp, Mus musculus
  siRNA target sequence for Ppm1l (NM_178726.1,889-907).
gcaaggtggccgagattat

SEQ ID NO: 588415 - DNA, 19 bp, Mus musculus
  siRNA target sequence for Ppm1l (NM_178726.1,919-937).
gtcttggaggacttgatgt

SEQ ID NO: 588416 - DNA, 19 bp, Mus musculus
  siRNA target sequence for Ppm1l (NM_178726.1,1069-1087).
cgtccatcttcggaatctt

SEQ ID NO: 588417 - DNA, 19 bp, Mus musculus
  siRNA target sequence for Ppm1l (NM_178726.1,1108-1126).
ctgcagcggaatatgtaaa

SEQ ID NO: 588418 - DNA, 19 bp, Mus musculus
  siRNA target sequence for Ppm1l (NM_178726.1,1110-1128).
gcagcggaatatgtaaaat

SEQ ID NO: 588419 - DNA, 19 bp, Mus musculus
  siRNA target sequence for Ppm1l (NM_178726.1,1217-1235).
gcagcagatcttgtcaatt

SEQ ID NO: 588420 - DNA, 19 bp, Mus musculus
  siRNA target sequence for Ppm1l (NM_178726.1,1231-1249).
caattgaccgggaaatgct

SEQ ID NO: 588421 - DNA, 19 bp, Mus musculus
  siRNA target sequence for Ppm1l (NM_178726.1,1259-1277).
gacagtctcctatgatgaa

SEQ ID NO: 588422 - DNA, 19 bp, Mus musculus
  siRNA target sequence for Ppm1l (NM_178726.1,1278-1296).
gcaggcacaacgtgtttga

SEQ ID NO: 588423 - DNA, 19 bp, Mus musculus
  siRNA target sequence for Ppm1l (NM_178726.1,1279-1297).
caggcacaacgtgtttgat

SEQ ID NO: 588424 - DNA, 19 bp, Mus musculus
  siRNA target sequence for Ppm1l (NM_178726.1,1298-1316).
cgctctactctcagataaa

SEQ ID NO: 588425 - DNA, 19 bp, Mus musculus
  siRNA target sequence for Ppm1l (NM_178726.1,1349-1367).
gggagtcttgtgtgacaaa

SEQ ID NO: 588426 - DNA, 19 bp, Mus musculus
  siRNA target sequence for Ppm1l (NM_178726.1,1384-1402).
ccttgtctcacgatcacaa

SEQ ID NO: 588427 - DNA, 19 bp, Mus musculus
  siRNA target sequence for Ppm1l (NM_178726.1,1443-1461).
ggtgggttcatcagcttta

SEQ ID NO: 588428 - DNA, 19 bp, Mus musculus
  siRNA target sequence for Ppm1l (NM_178726.1,1444-1462).
gtgggttcatcagctttaa

SEQ ID NO: 588429 - DNA, 19 bp, Mus musculus
  siRNA target sequence for Ppm1l (NM_178726.1,1508-1526).
gggagactatccactgaaa

SEQ ID NO: 588430 - DNA, 19 bp, Mus musculus
  siRNA target sequence for Ppm1l (NM_178726.1,1509-1527).
ggagactatccactgaaaa

SEQ ID NO: 588431 - DNA, 19 bp, Mus musculus
  siRNA target sequence for Ppm1l (NM_178726.1,1510-1528).
gagactatccactgaaaaa

SEQ ID NO: 588432 - DNA, 19 bp, Mus musculus
  siRNA target sequence for Ppm1l (NM_178726.1,1641-1659).
gaagcggttcgattcatca

SEQ ID NO: 588433 - DNA, 19 bp, Mus musculus
  siRNA target sequence for Ppm1l (NM_178726.1,1701-1719).
gtcctgcagtccttttaca

SEQ ID NO: 588434 - DNA, 19 bp, Mus musculus
  siRNA target sequence for Ppm1l (NM_178726.1,1703-1721).
cctgcagtccttttacaga

SEQ ID NO: 588435 - DNA, 19 bp, Mus musculus
  siRNA target sequence for Ppm1l (NM_178726.1,1749-1767).
gtggtgaagttcaggaata

SEQ ID NO: 588436 - DNA, 19 bp, Mus musculus
  siRNA target sequence for Ppm1l (NM_178726.1,1752-1770).
gtgaagttcaggaatagta

SEQ ID NO: 588437 - DNA, 19 bp, Mus musculus
  siRNA target sequence for Ppm1l (NM_178726.1,1757-1775).
gttcaggaatagtagcaaa

SEQ ID NO: 588438 - DNA, 19 bp, Mus musculus
  siRNA target sequence for Ppm1l (NM_178726.1,1760-1778).
caggaatagtagcaaaaca

SEQ ID NO: 588439 - DNA, 19 bp, Mus musculus
  siRNA target sequence for Dusp10 (NM_022019.2,175-193).
ggtagtagtggcactatct

SEQ ID NO: 588440 - DNA, 19 bp, Mus musculus
  siRNA target sequence for Dusp10 (NM_022019.2,211-229).
ggatctcaacctttgttta

SEQ ID NO: 588441 - DNA, 19 bp, Mus musculus
  siRNA target sequence for Dusp10 (NM_022019.2,305-323).
ctcaaggctgcgaatctga

SEQ ID NO: 588442 - DNA, 19 bp, Mus musculus
  siRNA target sequence for Dusp10 (NM_022019.2,311-329).
gctgcgaatctgacgtata

SEQ ID NO: 588443 - DNA, 19 bp, Mus musculus
  siRNA target sequence for Dusp10 (NM_022019.2,452-470).
gccaccaccgccataggaa

SEQ ID NO: 588444 - DNA, 19 bp, Mus musculus
  siRNA target sequence for Dusp10 (NM_022019.2,489-507).
ctaaccagatggtcaacaa

SEQ ID NO: 588445 - DNA, 19 bp, Mus musculus
  siRNA target sequence for Dusp10 (NM_022019.2,584-602).
gccagcatcaagatcatct

SEQ ID NO: 588446 - DNA, 19 bp, Mus musculus
  siRNA target sequence for Dusp10 (NM_022019.2,662-680).
ggtcccgtcatcatcgatt

SEQ ID NO: 588447 - DNA, 19 bp, Mus musculus
  siRNA target sequence for Dusp10 (NM_022019.2,684-702).
ggcctttcatggagtacaa

SEQ ID NO: 588448 - DNA, 19 bp, Mus musculus
  siRNA target sequence for Dusp10 (NM_022019.2,772-790).
gggcaagatcactgtctta

SEQ ID NO: 588449 - DNA, 19 bp, Mus musculus
  siRNA target sequence for Dusp10 (NM_022019.2,939-957).
gcaaagaacccctggtatt

SEQ ID NO: 588450 - DNA, 19 bp, Mus musculus
  siRNA target sequence for Dusp10 (NM_022019.2,962-980).
gggggactcagtagtttta

SEQ ID NO: 588451 - DNA, 19 bp, Mus musculus
  siRNA target sequence for Dusp10 (NM_022019.2,1187-1205).
ctcaacatcggctatgtca

SEQ ID NO: 588452 - DNA, 19 bp, Mus musculus
  siRNA target sequence for Dusp10 (NM_022019.2,1247-1265).
ggcctcttcaactacaaga

SEQ ID NO: 588453 - DNA, 19 bp, Mus musculus
  siRNA target sequence for Dusp10 (NM_022019.2,1440-1458).
ccatgactgacgcttacaa

SEQ ID NO: 588454 - DNA, 19 bp, Mus musculus
  siRNA target sequence for Dusp10 (NM_022019.2,1441-1459).
catgactgacgcttacaaa

SEQ ID NO: 588455 - DNA, 19 bp, Mus musculus
  siRNA target sequence for Dusp10 (NM_022019.2,1446-1464).
ctgacgcttacaaattcgt

SEQ ID NO: 588456 - DNA, 19 bp, Mus musculus
  siRNA target sequence for Dusp10 (NM_022019.2,1469-1487).
ggcaaacgaccaattattt

SEQ ID NO: 588457 - DNA, 19 bp, Mus musculus
  siRNA target sequence for Dusp10 (NM_022019.2,1546-1564).
cgtgacgccaagaatcctt

SEQ ID NO: 588458 - DNA, 19 bp, Mus musculus
  siRNA target sequence for Dusp10 (NM_022019.2,1547-1565).
gtgacgccaagaatcctta

SEQ ID NO: 588459 - DNA, 19 bp, Mus musculus
  siRNA target sequence for Dusp9 (NM_029352.3,319-337).
gcagccgggagctgtatga

SEQ ID NO: 588460 - DNA, 19 bp, Mus musculus
  siRNA target sequence for Dusp9 (NM_029352.3,989-1007).
gagctgtggcctagattct

SEQ ID NO: 588461 - DNA, 19 bp, Mus musculus
  siRNA target sequence for Dusp9 (NM_029352.3,991-1009).
gctgtggcctagattctga

SEQ ID NO: 588462 - DNA, 19 bp, Mus musculus
  siRNA target sequence for Dusp9 (NM_029352.3,1131-1149).
cgctatatcctcaatgtca

SEQ ID NO: 588463 - DNA, 19 bp, Mus musculus
  siRNA target sequence for Dusp9 (NM_029352.3,1158-1176).
cttcctaacctctttgaga

SEQ ID NO: 588464 - DNA, 19 bp, Mus musculus
  siRNA target sequence for Dusp9 (NM_029352.3,1218-1236).
cattggagccagaatctgt

SEQ ID NO: 588465 - DNA, 19 bp, Mus musculus
  siRNA target sequence for Dusp9 (NM_029352.3,1229-1247).
gaatctgtcccagttcttt

SEQ ID NO: 588466 - DNA, 19 bp, Mus musculus
  siRNA target sequence for Dusp9 (NM_029352.3,1249-1267).
cggaggccattgcattcat

SEQ ID NO: 588467 - DNA, 19 bp, Mus musculus
  siRNA target sequence for Dusp9 (NM_029352.3,1421-1439).
ctcacctaacttcaacttt

SEQ ID NO: 588468 - DNA, 19 bp, Mus musculus
  siRNA target sequence for Dusp9 (NM_029352.3,1423-1441).
cacctaacttcaactttat

SEQ ID NO: 588469 - DNA, 19 bp, Mus musculus
  siRNA target sequence for Dusp9 (NM_029352.3,1561-1579).
ccagtgatggggtctttga

SEQ ID NO: 588470 - DNA, 19 bp, Mus musculus
  siRNA target sequence for 0710001B24Rik (NM_175118.2,402-420).
cggtagccgagcccaattt

SEQ ID NO: 588471 - DNA, 19 bp, Mus musculus
  siRNA target sequence for 1700011C14Rik (NM_029659.2,328-346).
cggactcagaagatcatct

SEQ ID NO: 588472 - DNA, 19 bp, Mus musculus
  siRNA target sequence for 1700011C14Rik (NM_029659.2,377-395).
catacccagttgagatact

SEQ ID NO: 588473 - DNA, 19 bp, Mus musculus
  siRNA target sequence for 1700011C14Rik (NM_029659.2,404-422).
gagtctacctgggcaaaat

SEQ ID NO: 588474 - DNA, 19 bp, Mus musculus
  siRNA target sequence for 1700011C14Rik (NM_029659.2,425-443).
gtcaagcctgcaatgctaa

SEQ ID NO: 588475 - DNA, 19 bp, Mus musculus
  siRNA target sequence for 1700011C14Rik (NM_029659.2,469-487).
gcacatgtcaatatttcca

SEQ ID NO: 588476 - DNA, 19 bp, Mus musculus
  siRNA target sequence for 1700011C14Rik (NM_029659.2,470-488).
cacatgtcaatatttccat

SEQ ID NO: 588477 - DNA, 19 bp, Mus musculus
  siRNA target sequence for 1700011C14Rik (NM_029659.2,492-510).
gacaacaccctattttata

SEQ ID NO: 588478 - DNA, 19 bp, Mus musculus
  siRNA target sequence for 1700011C14Rik (NM_029659.2,517-535).
gcagacaagctcttacata

SEQ ID NO: 588479 - DNA, 19 bp, Mus musculus
  siRNA target sequence for 1700011C14Rik (NM_029659.2,518-536).
cagacaagctcttacatat

SEQ ID NO: 588480 - DNA, 19 bp, Mus musculus
  siRNA target sequence for 1700011C14Rik (NM_029659.2,520-538).
gacaagctcttacatatca

SEQ ID NO: 588481 - DNA, 19 bp, Mus musculus
  siRNA target sequence for 1700011C14Rik (NM_029659.2,579-597).
ccgccacatctgtcacttt

SEQ ID NO: 588482 - DNA, 19 bp, Mus musculus
  siRNA target sequence for 1700011C14Rik (NM_029659.2,580-598).
cgccacatctgtcacttta

SEQ ID NO: 588483 - DNA, 19 bp, Mus musculus
  siRNA target sequence for 1700011C14Rik (NM_029659.2,590-608).
gtcactttatagaacttca

SEQ ID NO: 588484 - DNA, 19 bp, Mus musculus
  siRNA target sequence for 1700011C14Rik (NM_029659.2,678-696).
ggccttactcatgcattat

SEQ ID NO: 588485 - DNA, 19 bp, Mus musculus
  siRNA target sequence for 1700011C14Rik (NM_029659.2,679-697).
gccttactcatgcattata

SEQ ID NO: 588486 - DNA, 19 bp, Mus musculus
  siRNA target sequence for 1700011C14Rik (NM_029659.2,680-698).
ccttactcatgcattataa

SEQ ID NO: 588487 - DNA, 19 bp, Mus musculus
  siRNA target sequence for 1700011C14Rik (NM_029659.2,802-820).
ctccatggggaatatctca

SEQ ID NO: 588488 - DNA, 19 bp, Mus musculus
  siRNA target sequence for 2310043K02Rik (NM_025869.1,476-494).
gggcctccatgacttttat

SEQ ID NO: 588489 - DNA, 19 bp, Mus musculus
  siRNA target sequence for 2310043K02Rik (NM_025869.1,810-828).
cgactctccagcctttgat

SEQ ID NO: 588490 - DNA, 19 bp, Mus musculus
  siRNA target sequence for 2810004N20Rik (NM_025576.1,708-726).
gcccagaggaggctataga

SEQ ID NO: 588491 - DNA, 19 bp, Mus musculus
  siRNA target sequence for 2810004N20Rik (NM_025576.1,765-783).
ccagccagctggaagttct

SEQ ID NO: 588492 - DNA, 19 bp, Mus musculus
  siRNA target sequence for 2810004N20Rik (NM_025576.1,809-827).
gcaagggcagcaaagaatt

SEQ ID NO: 588493 - DNA, 19 bp, Mus musculus
  siRNA target sequence for Dusp11 (NM_028099.1,39-57).
gatgatgcaattgaattgt

SEQ ID NO: 588494 - DNA, 19 bp, Mus musculus
  siRNA target sequence for Dusp11 (NM_028099.1,154-172).
ggacagatggccttgaaga

SEQ ID NO: 588495 - DNA, 19 bp, Mus musculus
  siRNA target sequence for Dusp11 (NM_028099.1,295-313).
caccgtactcactcagaaa

SEQ ID NO: 588496 - DNA, 19 bp, Mus musculus
  siRNA target sequence for Dusp11 (NM_028099.1,297-315).
ccgtactcactcagaaaat

SEQ ID NO: 588497 - DNA, 19 bp, Mus musculus
  siRNA target sequence for Dusp11 (NM_028099.1,370-388).
ccggagaggactattcaca

SEQ ID NO: 588498 - DNA, 19 bp, Mus musculus
  siRNA target sequence for Dusp11 (NM_028099.1,371-389).
cggagaggactattcacaa

SEQ ID NO: 588499 - DNA, 19 bp, Mus musculus
  siRNA target sequence for Dusp11 (NM_028099.1,372-390).
ggagaggactattcacaaa

SEQ ID NO: 588500 - DNA, 19 bp, Mus musculus
  siRNA target sequence for Dusp11 (NM_028099.1,377-395).
ggactattcacaaagaaga

SEQ ID NO: 588501 - DNA, 19 bp, Mus musculus
  siRNA target sequence for Dusp11 (NM_028099.1,436-454).
gttaccagagacctttcta

SEQ ID NO: 588502 - DNA, 19 bp, Mus musculus
  siRNA target sequence for Dusp11 (NM_028099.1,445-463).
gacctttctacccatacta

SEQ ID NO: 588503 - DNA, 19 bp, Mus musculus
  siRNA target sequence for Dusp12 (NM_023173.1,417-435).
gcagtgttgctgtagtgat

SEQ ID NO: 588504 - DNA, 19 bp, Mus musculus
  siRNA target sequence for Dusp12 (NM_023173.1,451-469).
gaccgaccagcttaccttt

SEQ ID NO: 588505 - DNA, 19 bp, Mus musculus
  siRNA target sequence for Dusp12 (NM_023173.1,525-543).
ggtttgaatggcaactgaa

SEQ ID NO: 588506 - DNA, 19 bp, Mus musculus
  siRNA target sequence for Dusp12 (NM_023173.1,526-544).
gtttgaatggcaactgaaa

SEQ ID NO: 588507 - DNA, 19 bp, Mus musculus
  siRNA target sequence for Dusp12 (NM_023173.1,576-594).
cgtccagtgccttttacaa

SEQ ID NO: 588508 - DNA, 19 bp, Mus musculus
  siRNA target sequence for Dusp12 (NM_023173.1,592-610).
caagcagtaccgtttacaa

SEQ ID NO: 588509 - DNA, 19 bp, Mus musculus
  siRNA target sequence for Dusp12 (NM_023173.1,665-683).
gttgacccaactaccattt

SEQ ID NO: 588510 - DNA, 19 bp, Mus musculus
  siRNA target sequence for Dusp12 (NM_023173.1,688-706).
gggattaaaagatgacatt

SEQ ID NO: 588511 - DNA, 19 bp, Mus musculus
  siRNA target sequence for Dusp12 (NM_023173.1,690-708).
gattaaaagatgacattct

SEQ ID NO: 588512 - DNA, 19 bp, Mus musculus
  siRNA target sequence for Dusp12 (NM_023173.1,727-745).
caggcggtctttatttaga

SEQ ID NO: 588513 - DNA, 19 bp, Mus musculus
  siRNA target sequence for Dusp12 (NM_023173.1,729-747).
ggcggtctttatttagaca

SEQ ID NO: 588514 - DNA, 19 bp, Mus musculus
  siRNA target sequence for Dusp12 (NM_023173.1,730-748).
gcggtctttatttagacat

SEQ ID NO: 588515 - DNA, 19 bp, Mus musculus
  siRNA target sequence for Dusp12 (NM_023173.1,731-749).
cggtctttatttagacatt

SEQ ID NO: 588516 - DNA, 19 bp, Mus musculus
  siRNA target sequence for Dusp12 (NM_023173.1,842-860).
gctcagtgcacgtcttact

SEQ ID NO: 588517 - DNA, 19 bp, Mus musculus
  siRNA target sequence for Dusp12 (NM_023173.1,891-909).
ctctgttgggcgttatgga

SEQ ID NO: 588518 - DNA, 19 bp, Mus musculus
  siRNA target sequence for Dusp12 (NM_023173.1,914-932).
cagcttctttgcccaaaat

SEQ ID NO: 588519 - DNA, 19 bp, Mus musculus
  siRNA target sequence for Dusp12 (NM_023173.1,938-956).
gccaagttgggttccttta

SEQ ID NO: 588520 - DNA, 19 bp, Mus musculus
  siRNA target sequence for Dusp12 (NM_023173.1,976-994).
ctcctgtggtcgatggata

SEQ ID NO: 588521 - DNA, 19 bp, Mus musculus
  siRNA target sequence for Dusp18 (NM_173745.3,358-376).
gtgccttcccagttcagat

SEQ ID NO: 588522 - DNA, 19 bp, Mus musculus
  siRNA target sequence for Dusp18 (NM_173745.3,567-585).
gtcgcacgcctctccaatt

SEQ ID NO: 588523 - DNA, 19 bp, Mus musculus
  siRNA target sequence for Dusp18 (NM_173745.3,570-588).
gcacgcctctccaatttct

SEQ ID NO: 588524 - DNA, 19 bp, Mus musculus
  siRNA target sequence for Dusp18 (NM_173745.3,571-589).
cacgcctctccaatttctt

SEQ ID NO: 588525 - DNA, 19 bp, Mus musculus
  siRNA target sequence for Dusp18 (NM_173745.3,576-594).
ctctccaatttcttcgatt

SEQ ID NO: 588526 - DNA, 19 bp, Mus musculus
  siRNA target sequence for Dusp18 (NM_173745.3,596-614).
cgttgccgaccgtatccat

SEQ ID NO: 588527 - DNA, 19 bp, Mus musculus
  siRNA target sequence for Dusp18 (NM_173745.3,597-615).
gttgccgaccgtatccatt

SEQ ID NO: 588528 - DNA, 19 bp, Mus musculus
  siRNA target sequence for Dusp18 (NM_173745.3,732-750).
cacacttggaccaagtcat

SEQ ID NO: 588529 - DNA, 19 bp, Mus musculus
  siRNA target sequence for Dusp18 (NM_173745.3,784-802).
gggagcagctcatccatta

SEQ ID NO: 588530 - DNA, 19 bp, Mus musculus
  siRNA target sequence for Dusp18 (NM_173745.3,856-874).
gacggatcccagacatcta

SEQ ID NO: 588531 - DNA, 19 bp, Mus musculus
  siRNA target sequence for Epm2a (NM_010146.1,382-400).
gaccgttgctgcacatata

SEQ ID NO: 588532 - DNA, 19 bp, Mus musculus
  siRNA target sequence for Epm2a (NM_010146.1,395-413).
catataatgaggacaactt

SEQ ID NO: 588533 - DNA, 19 bp, Mus musculus
  siRNA target sequence for Epm2a (NM_010146.1,414-432).
ggtggatggtgtttattgt

SEQ ID NO: 588534 - DNA, 19 bp, Mus musculus
  siRNA target sequence for Epm2a (NM_010146.1,463-481).
gggcacaccaatgaaatga

SEQ ID NO: 588535 - DNA, 19 bp, Mus musculus
  siRNA target sequence for Epm2a (NM_010146.1,483-501).
gcgcacaacagacttctat

SEQ ID NO: 588536 - DNA, 19 bp, Mus musculus
  siRNA target sequence for Epm2a (NM_010146.1,519-537).
ccaagccatgcactattca

SEQ ID NO: 588537 - DNA, 19 bp, Mus musculus
  siRNA target sequence for Epm2a (NM_010146.1,528-546).
gcactattcaagaattcta

SEQ ID NO: 588538 - DNA, 19 bp, Mus musculus
  siRNA target sequence for Epm2a (NM_010146.1,623-641).
cagctgtcatgaatttcca

SEQ ID NO: 588539 - DNA, 19 bp, Mus musculus
  siRNA target sequence for Epm2a (NM_010146.1,651-669).
ggatatcatccagaattct

SEQ ID NO: 588540 - DNA, 19 bp, Mus musculus
  siRNA target sequence for Epm2a (NM_010146.1,652-670).
gatatcatccagaattctt

SEQ ID NO: 588541 - DNA, 19 bp, Mus musculus
  siRNA target sequence for Epm2a (NM_010146.1,714-732).
gatgaagctgtataaggaa

SEQ ID NO: 588542 - DNA, 19 bp, Mus musculus
  siRNA target sequence for 1110061O04Rik (NM_026849.1,473-491).
ctgttcaaaggcaagcata

SEQ ID NO: 588543 - DNA, 19 bp, Mus musculus
  siRNA target sequence for 1110061O04Rik (NM_026849.1,533-551).
ggacgctcgggatacaact

SEQ ID NO: 588544 - DNA, 19 bp, Mus musculus
  siRNA target sequence for 1110061O04Rik (NM_026849.1,534-552).
gacgctcgggatacaacta

SEQ ID NO: 588545 - DNA, 19 bp, Mus musculus
  siRNA target sequence for 1110061O04Rik (NM_026849.1,536-554).
cgctcgggatacaactatt

SEQ ID NO: 588546 - DNA, 19 bp, Mus musculus
  siRNA target sequence for 1110061O04Rik (NM_026849.1,537-555).
gctcgggatacaactattt

SEQ ID NO: 588547 - DNA, 19 bp, Mus musculus
  siRNA target sequence for 1110061O04Rik (NM_026849.1,538-556).
ctcgggatacaactattta

SEQ ID NO: 588548 - DNA, 19 bp, Mus musculus
  siRNA target sequence for 1110061O04Rik (NM_026849.1,540-558).
cgggatacaactatttatt

SEQ ID NO: 588549 - DNA, 19 bp, Mus musculus
  siRNA target sequence for 1110061O04Rik (NM_026849.1,582-600).
gggcaagtacagaagatgt

SEQ ID NO: 588550 - DNA, 19 bp, Mus musculus
  siRNA target sequence for 1110061O04Rik (NM_026849.1,665-683).
gatatcaagctgcttcaat

SEQ ID NO: 588551 - DNA, 19 bp, Mus musculus
  siRNA target sequence for 1110061O04Rik (NM_026849.1,686-704).
ctgtcagtcaagtacatct

SEQ ID NO: 588552 - DNA, 19 bp, Mus musculus
  siRNA target sequence for 1110061O04Rik (NM_026849.1,779-797).
cagcgctatgcaaacttca

SEQ ID NO: 588553 - DNA, 19 bp, Mus musculus
  siRNA target sequence for 1110061O04Rik (NM_026849.1,798-816).
ctctcctctctattccata

SEQ ID NO: 588554 - DNA, 19 bp, Mus musculus
  siRNA target sequence for 1110061O04Rik (NM_026849.1,802-820).
cctctctattccatatcca

SEQ ID NO: 588555 - DNA, 19 bp, Mus musculus
  siRNA target sequence for 1110061O04Rik (NM_026849.1,819-837).
caggttgtgaattcttcaa

SEQ ID NO: 588556 - DNA, 19 bp, Mus musculus
  siRNA target sequence for 1110061O04Rik (NM_026849.1,862-880).
ggctgaagggctcatattt

SEQ ID NO: 588557 - DNA, 19 bp, Mus musculus
  siRNA target sequence for 1110061O04Rik (NM_026849.1,863-881).
gctgaagggctcatattta

SEQ ID NO: 588558 - DNA, 19 bp, Mus musculus
  siRNA target sequence for 1110061O04Rik (NM_026849.1,866-884).
gaagggctcatatttaact

SEQ ID NO: 588559 - DNA, 19 bp, Mus musculus
  siRNA target sequence for 1110061O04Rik (NM_026849.1,920-938).
cccaacttcctgactcaat

SEQ ID NO: 588560 - DNA, 19 bp, Mus musculus
  siRNA target sequence for 1110061O04Rik (NM_026849.1,922-940).
caacttcctgactcaatct

SEQ ID NO: 588561 - DNA, 19 bp, Mus musculus
  siRNA target sequence for 1110061O04Rik (NM_026849.1,933-951).
ctcaatctctgaacattga

SEQ ID NO: 588562 - DNA, 19 bp, Mus musculus
  siRNA target sequence for 1110061O04Rik (NM_026849.1,973-991).
ggacctggtgcaacaaaca

SEQ ID NO: 588563 - DNA, 19 bp, Mus musculus
  siRNA target sequence for 1110061O04Rik (NM_026849.1,1044-1062).
ggctgctggtacactgtat

SEQ ID NO: 588564 - DNA, 19 bp, Mus musculus
  siRNA target sequence for 1110061O04Rik (NM_026849.1,1048-1066).
gctggtacactgtatctca

SEQ ID NO: 588565 - DNA, 19 bp, Mus musculus
  siRNA target sequence for 1110061O04Rik (NM_026849.1,1076-1094).
cggacccccctcttcatct

SEQ ID NO: 588566 - DNA, 19 bp, Mus musculus
  siRNA target sequence for 1110061O04Rik (NM_026849.1,1116-1134).
gggctgatgggctaattca

SEQ ID NO: 588567 - DNA, 19 bp, Mus musculus
  siRNA target sequence for 1110061O04Rik (NM_026849.1,1118-1136).
gctgatgggctaattcaca

SEQ ID NO: 588568 - DNA, 19 bp, Mus musculus
  siRNA target sequence for 1110061O04Rik (NM_026849.1,1515-1533).
catcctccccacagagtat

SEQ ID NO: 588569 - DNA, 19 bp, Mus musculus
  siRNA target sequence for 1110061O04Rik (NM_026849.1,1625-1643).
cattctgacaactttttca

SEQ ID NO: 588570 - DNA, 19 bp, Mus musculus
  siRNA target sequence for 1110061O04Rik (NM_026849.1,1746-1764).
cgggctgtggcagtattca

SEQ ID NO: 588571 - DNA, 19 bp, Mus musculus
  siRNA target sequence for 1110061O04Rik (NM_026849.1,1814-1832).
gatgagctccctaacagtt

SEQ ID NO: 588572 - DNA, 19 bp, Mus musculus
  siRNA target sequence for Mtmr6 (NM_144843.2,125-143).
gacaaccaaggttgaacaa

SEQ ID NO: 588573 - DNA, 19 bp, Mus musculus
  siRNA target sequence for Mtmr6 (NM_144843.2,127-145).
caaccaaggttgaacaagt

SEQ ID NO: 588574 - DNA, 19 bp, Mus musculus
  siRNA target sequence for Mtmr6 (NM_144843.2,149-167).
gttacttgaccggtttagt

SEQ ID NO: 588575 - DNA, 19 bp, Mus musculus
  siRNA target sequence for Mtmr6 (NM_144843.2,159-177).
cggtttagtaccaacaaca

SEQ ID NO: 588576 - DNA, 19 bp, Mus musculus
  siRNA target sequence for Mtmr6 (NM_144843.2,185-203).
gacaggaacactgtatctt

SEQ ID NO: 588577 - DNA, 19 bp, Mus musculus
  siRNA target sequence for Mtmr6 (NM_144843.2,205-223).
cggccacacacctattatt

SEQ ID NO: 588578 - DNA, 19 bp, Mus musculus
  siRNA target sequence for Mtmr6 (NM_144843.2,208-226).
ccacacacctattatttat

SEQ ID NO: 588579 - DNA, 19 bp, Mus musculus
  siRNA target sequence for Mtmr6 (NM_144843.2,211-229).
cacacctattatttattga

SEQ ID NO: 588580 - DNA, 19 bp, Mus musculus
  siRNA target sequence for Mtmr6 (NM_144843.2,250-268).
ggatactacaccaccatat

SEQ ID NO: 588581 - DNA, 19 bp, Mus musculus
  siRNA target sequence for Mtmr6 (NM_144843.2,251-269).
gatactacaccaccatatt

SEQ ID NO: 588582 - DNA, 19 bp, Mus musculus
  siRNA target sequence for Mtmr6 (NM_144843.2,315-333).
gtgattcagtgcaagaact

SEQ ID NO: 588583 - DNA, 19 bp, Mus musculus
  siRNA target sequence for Mtmr6 (NM_144843.2,367-385).
gagattgccacgatattta

SEQ ID NO: 588584 - DNA, 19 bp, Mus musculus
  siRNA target sequence for Mtmr6 (NM_144843.2,369-387).
gattgccacgatatttata

SEQ ID NO: 588585 - DNA, 19 bp, Mus musculus
  siRNA target sequence for Mtmr6 (NM_144843.2,391-409).
ctctcctgcagctatcaaa

SEQ ID NO: 588586 - DNA, 19 bp, Mus musculus
  siRNA target sequence for Mtmr6 (NM_144843.2,442-460).
cttataatcccaagcaaaa

SEQ ID NO: 588587 - DNA, 19 bp, Mus musculus
  siRNA target sequence for Mtmr6 (NM_144843.2,475-493).
ggaatggttggcagcttat

SEQ ID NO: 588588 - DNA, 19 bp, Mus musculus
  siRNA target sequence for Mtmr6 (NM_144843.2,569-587).
caaggtctgtgagacttat

SEQ ID NO: 588589 - DNA, 19 bp, Mus musculus
  siRNA target sequence for Mtmr6 (NM_144843.2,751-769).
gcctagaggatgagcattt

SEQ ID NO: 588590 - DNA, 19 bp, Mus musculus
  siRNA target sequence for Mtmr6 (NM_144843.2,770-788).
gcttcaagccattagtaaa

SEQ ID NO: 588591 - DNA, 19 bp, Mus musculus
  siRNA target sequence for Mtmr6 (NM_144843.2,796-814).
caggaaaccgctacatgta

SEQ ID NO: 588592 - DNA, 19 bp, Mus musculus
  siRNA target sequence for Mtmr6 (NM_144843.2,799-817).
gaaaccgctacatgtatgt

SEQ ID NO: 588593 - DNA, 19 bp, Mus musculus
  siRNA target sequence for Mtmr6 (NM_144843.2,833-851).
caagctcaatgcaatagct

SEQ ID NO: 588594 - DNA, 19 bp, Mus musculus
  siRNA target sequence for Mtmr6 (NM_144843.2,839-857).
caatgcaatagctaacaga

SEQ ID NO: 588595 - DNA, 19 bp, Mus musculus
  siRNA target sequence for Mtmr6 (NM_144843.2,856-874).
gagcagctggaaaaggtta

SEQ ID NO: 588596 - DNA, 19 bp, Mus musculus
  siRNA target sequence for Mtmr6 (NM_144843.2,859-877).
cagctggaaaaggttatga

SEQ ID NO: 588597 - DNA, 19 bp, Mus musculus
  siRNA target sequence for Mtmr6 (NM_144843.2,904-922).
gatttcagttcgttggaat

SEQ ID NO: 588598 - DNA, 19 bp, Mus musculus
  siRNA target sequence for Mtmr6 (NM_144843.2,914-932).
cgttggaatagaaaatatt

SEQ ID NO: 588599 - DNA, 19 bp, Mus musculus
  siRNA target sequence for Mtmr6 (NM_144843.2,943-961).
gatccagccttcagaaatt

SEQ ID NO: 588600 - DNA, 19 bp, Mus musculus
  siRNA target sequence for Mtmr6 (NM_144843.2,980-998).
caaggggctttctgtcaat

SEQ ID NO: 588601 - DNA, 19 bp, Mus musculus
  siRNA target sequence for Mtmr6 (NM_144843.2,983-1001).
ggggctttctgtcaatgat

SEQ ID NO: 588602 - DNA, 19 bp, Mus musculus
  siRNA target sequence for Mtmr6 (NM_144843.2,984-1002).
gggctttctgtcaatgatt

SEQ ID NO: 588603 - DNA, 19 bp, Mus musculus
  siRNA target sequence for Mtmr6 (NM_144843.2,1026-1044).
ggatggcttcgccatatca

SEQ ID NO: 588604 - DNA, 19 bp, Mus musculus
  siRNA target sequence for Mtmr6 (NM_144843.2,1027-1045).
gatggcttcgccatatcaa

SEQ ID NO: 588605 - DNA, 19 bp, Mus musculus
  siRNA target sequence for Mtmr6 (NM_144843.2,1055-1073).
ggatgctgcaatcttctta

SEQ ID NO: 588606 - DNA, 19 bp, Mus musculus
  siRNA target sequence for Mtmr6 (NM_144843.2,1067-1085).
cttcttagccaaagcaata

SEQ ID NO: 588607 - DNA, 19 bp, Mus musculus
  siRNA target sequence for Mtmr6 (NM_144843.2,1153-1171).
ccctcggctcactgttgtt

SEQ ID NO: 588608 - DNA, 19 bp, Mus musculus
  siRNA target sequence for Mtmr6 (NM_144843.2,1162-1180).
cactgttgttggattccta

SEQ ID NO: 588609 - DNA, 19 bp, Mus musculus
  siRNA target sequence for Mtmr6 (NM_144843.2,1177-1195).
cctactacaggacaatgaa

SEQ ID NO: 588610 - DNA, 19 bp, Mus musculus
  siRNA target sequence for Mtmr6 (NM_144843.2,1361-1379).
caacgaagcgtttcttctt

SEQ ID NO: 588611 - DNA, 19 bp, Mus musculus
  siRNA target sequence for Mtmr6 (NM_144843.2,1382-1400).
gatccatgagcacattcat

SEQ ID NO: 588612 - DNA, 19 bp, Mus musculus
  siRNA target sequence for Mtmr6 (NM_144843.2,1385-1403).
ccatgagcacattcattca

SEQ ID NO: 588613 - DNA, 19 bp, Mus musculus
  siRNA target sequence for Mtmr6 (NM_144843.2,1444-1462).
gagaggaactcaggttaaa

SEQ ID NO: 588614 - DNA, 19 bp, Mus musculus
  siRNA target sequence for Mtmr6 (NM_144843.2,1521-1539).
cctctctacagttccaaat

SEQ ID NO: 588615 - DNA, 19 bp, Mus musculus
  siRNA target sequence for Mtmr6 (NM_144843.2,1572-1590).
gcctctttcaattttaagt

SEQ ID NO: 588616 - DNA, 19 bp, Mus musculus
  siRNA target sequence for Mtmr6 (NM_144843.2,1601-1619).
catgtaccaccagtttgat

SEQ ID NO: 588617 - DNA, 19 bp, Mus musculus
  siRNA target sequence for Mtmr6 (NM_144843.2,1640-1658).
gtctgtgctgagcataatt

SEQ ID NO: 588618 - DNA, 19 bp, Mus musculus
  siRNA target sequence for Mtmr6 (NM_144843.2,1642-1660).
ctgtgctgagcataattat

SEQ ID NO: 588619 - DNA, 19 bp, Mus musculus
  siRNA target sequence for Mtmr6 (NM_144843.2,1644-1662).
gtgctgagcataattatga

SEQ ID NO: 588620 - DNA, 19 bp, Mus musculus
  siRNA target sequence for Mtmr6 (NM_144843.2,1704-1722).
gacctcgaggctaaaatta

SEQ ID NO: 588621 - DNA, 19 bp, Mus musculus
  siRNA target sequence for Mtmr6 (NM_144843.2,1835-1853).
ggacacactccgagctata

SEQ ID NO: 588622 - DNA, 19 bp, Mus musculus
  siRNA target sequence for Mtmr6 (NM_144843.2,1885-1903).
gtgactatgccgaggaatt

SEQ ID NO: 588623 - DNA, 19 bp, Mus musculus
  siRNA target sequence for Mtmr6 (NM_144843.2,1887-1905).
gactatgccgaggaatttt

SEQ ID NO: 588624 - DNA, 19 bp, Mus musculus
  siRNA target sequence for Mtmr6 (NM_144843.2,1889-1907).
ctatgccgaggaattttct

SEQ ID NO: 588625 - DNA, 19 bp, Mus musculus
  siRNA target sequence for Mtmr6 (NM_144843.2,1893-1911).
gccgaggaattttctaagt

SEQ ID NO: 588626 - DNA, 19 bp, Mus musculus
  siRNA target sequence for Mtmr6 (NM_144843.2,1940-1958).
cggggtggccagaatgact

SEQ ID NO: 588627 - DNA, 19 bp, Mus musculus
  siRNA target sequence for Mtmr6 (NM_144843.2,1944-1962).
gtggccagaatgacttgtt

SEQ ID NO: 588628 - DNA, 19 bp, Mus musculus
  siRNA target sequence for Pten (NM_008960.1,967-985).
gagatcgttagcagaaaca

SEQ ID NO: 588629 - DNA, 19 bp, Mus musculus
  siRNA target sequence for Pten (NM_008960.1,969-987).
gatcgttagcagaaacaaa

SEQ ID NO: 588630 - DNA, 19 bp, Mus musculus
  siRNA target sequence for Pten (NM_008960.1,980-998).
gaaacaaaaggagatatca

SEQ ID NO: 588631 - DNA, 19 bp, Mus musculus
  siRNA target sequence for Pten (NM_008960.1,1003-1021).
gatggattcgacttagact

SEQ ID NO: 588632 - DNA, 19 bp, Mus musculus
  siRNA target sequence for Pten (NM_008960.1,1012-1030).
gacttagacttgacctata

SEQ ID NO: 588633 - DNA, 19 bp, Mus musculus
  siRNA target sequence for Pten (NM_008960.1,1014-1032).
cttagacttgacctatatt

SEQ ID NO: 588634 - DNA, 19 bp, Mus musculus
  siRNA target sequence for Pten (NM_008960.1,1020-1038).
cttgacctatatttatcca

SEQ ID NO: 588635 - DNA, 19 bp, Mus musculus
  siRNA target sequence for Pten (NM_008960.1,1023-1041).
gacctatatttatccaaat

SEQ ID NO: 588636 - DNA, 19 bp, Mus musculus
  siRNA target sequence for Pten (NM_008960.1,1089-1107).
gaacaatattgatgatgta

SEQ ID NO: 588637 - DNA, 19 bp, Mus musculus
  siRNA target sequence for Pten (NM_008960.1,1099-1117).
gatgatgtagtaaggtttt

SEQ ID NO: 588638 - DNA, 19 bp, Mus musculus
  siRNA target sequence for Pten (NM_008960.1,1137-1155).
ccattacaagatatacaat

SEQ ID NO: 588639 - DNA, 19 bp, Mus musculus
  siRNA target sequence for Pten (NM_008960.1,1143-1161).
caagatatacaatctatgt

SEQ ID NO: 588640 - DNA, 19 bp, Mus musculus
  siRNA target sequence for Pten (NM_008960.1,1156-1174).
ctatgtgctgagagacatt

SEQ ID NO: 588641 - DNA, 19 bp, Mus musculus
  siRNA target sequence for Pten (NM_008960.1,1162-1180).
gctgagagacattatgaca

SEQ ID NO: 588642 - DNA, 19 bp, Mus musculus
  siRNA target sequence for Pten (NM_008960.1,1194-1212).
ctgcagagttgcacagtat

SEQ ID NO: 588643 - DNA, 19 bp, Mus musculus
  siRNA target sequence for Pten (NM_008960.1,1199-1217).
gagttgcacagtatccttt

SEQ ID NO: 588644 - DNA, 19 bp, Mus musculus
  siRNA target sequence for Pten (NM_008960.1,1232-1250).
caccacagctagaacttat

SEQ ID NO: 588645 - DNA, 19 bp, Mus musculus
  siRNA target sequence for Pten (NM_008960.1,1300-1318).
catgttgcagcaattcact

SEQ ID NO: 588646 - DNA, 19 bp, Mus musculus
  siRNA target sequence for Pten (NM_008960.1,1333-1351).
ggacggactggtgtaatga

SEQ ID NO: 588647 - DNA, 19 bp, Mus musculus
  siRNA target sequence for Pten (NM_008960.1,1334-1352).
gacggactggtgtaatgat

SEQ ID NO: 588648 - DNA, 19 bp, Mus musculus
  siRNA target sequence for Pten (NM_008960.1,1390-1408).
gcacaagaggccctagatt

SEQ ID NO: 588649 - DNA, 19 bp, Mus musculus
  siRNA target sequence for Pten (NM_008960.1,1391-1409).
cacaagaggccctagattt

SEQ ID NO: 588650 - DNA, 19 bp, Mus musculus
  siRNA target sequence for Pten (NM_008960.1,1434-1452).
caaaaagggagtcacaatt

SEQ ID NO: 588651 - DNA, 19 bp, Mus musculus
  siRNA target sequence for Pten (NM_008960.1,1455-1473).
cagtcagaggcgctatgta

SEQ ID NO: 588652 - DNA, 19 bp, Mus musculus
  siRNA target sequence for Pten (NM_008960.1,1459-1477).
cagaggcgctatgtatatt

SEQ ID NO: 588653 - DNA, 19 bp, Mus musculus
  siRNA target sequence for Pten (NM_008960.1,1461-1479).
gaggcgctatgtatattat

SEQ ID NO: 588654 - DNA, 19 bp, Mus musculus
  siRNA target sequence for Pten (NM_008960.1,1463-1481).
ggcgctatgtatattatta

SEQ ID NO: 588655 - DNA, 19 bp, Mus musculus
  siRNA target sequence for Pten (NM_008960.1,1464-1482).
gcgctatgtatattattat

SEQ ID NO: 588656 - DNA, 19 bp, Mus musculus
  siRNA target sequence for Pten (NM_008960.1,1484-1502).
gctacctgctaaaaaatca

SEQ ID NO: 588657 - DNA, 19 bp, Mus musculus
  siRNA target sequence for Pten (NM_008960.1,1517-1535).
ccgtggcactgctgtttca

SEQ ID NO: 588658 - DNA, 19 bp, Mus musculus
  siRNA target sequence for Pten (NM_008960.1,1534-1552).
cacaagatgatgtttgaaa

SEQ ID NO: 588659 - DNA, 19 bp, Mus musculus
  siRNA target sequence for Pten (NM_008960.1,1536-1554).
caagatgatgtttgaaact

SEQ ID NO: 588660 - DNA, 19 bp, Mus musculus
  siRNA target sequence for Pten (NM_008960.1,1539-1557).
gatgatgtttgaaactatt

SEQ ID NO: 588661 - DNA, 19 bp, Mus musculus
  siRNA target sequence for Pten (NM_008960.1,1566-1584).
cagtggcggaacttgcaat

SEQ ID NO: 588662 - DNA, 19 bp, Mus musculus
  siRNA target sequence for Pten (NM_008960.1,1577-1595).
cttgcaatcctcagtttgt

SEQ ID NO: 588663 - DNA, 19 bp, Mus musculus
  siRNA target sequence for Pten (NM_008960.1,1603-1621).
cagctaaaggtgaagatat

SEQ ID NO: 588664 - DNA, 19 bp, Mus musculus
  siRNA target sequence for Pten (NM_008960.1,1649-1667).
gggaggacaagttcatgta

SEQ ID NO: 588665 - DNA, 19 bp, Mus musculus
  siRNA target sequence for Pten (NM_008960.1,1695-1713).
gtgtggtgatatcaaagta

SEQ ID NO: 588666 - DNA, 19 bp, Mus musculus
  siRNA target sequence for Pten (NM_008960.1,1829-1847).
gtctttgtgatcaggaaat

SEQ ID NO: 588667 - DNA, 19 bp, Mus musculus
  siRNA target sequence for Pten (NM_008960.1,1840-1858).
caggaaatcgatagcattt

SEQ ID NO: 588668 - DNA, 19 bp, Mus musculus
  siRNA target sequence for Pten (NM_008960.1,1848-1866).
cgatagcatttgcagtata

SEQ ID NO: 588669 - DNA, 19 bp, Mus musculus
  siRNA target sequence for Pten (NM_008960.1,1862-1880).
gtatagagcgtgcagataa

SEQ ID NO: 588670 - DNA, 19 bp, Mus musculus
  siRNA target sequence for Pten (NM_008960.1,1867-1885).
gagcgtgcagataatgaca

SEQ ID NO: 588671 - DNA, 19 bp, Mus musculus
  siRNA target sequence for Pten (NM_008960.1,1894-1912).
cttgtactcaccctaacaa

SEQ ID NO: 588672 - DNA, 19 bp, Mus musculus
  siRNA target sequence for Pten (NM_008960.1,1897-1915).
gtactcaccctaacaaaaa

SEQ ID NO: 588673 - DNA, 19 bp, Mus musculus
  siRNA target sequence for Pten (NM_008960.1,1910-1928).
caaaaaacgatcttgacaa

SEQ ID NO: 588674 - DNA, 19 bp, Mus musculus
  siRNA target sequence for Pten (NM_008960.1,1951-1969).
cgatacttctctccaaatt

SEQ ID NO: 588675 - DNA, 19 bp, Mus musculus
  siRNA target sequence for Pten (NM_008960.1,1964-1982).
caaattttaaggtgaaact

SEQ ID NO: 588676 - DNA, 19 bp, Mus musculus
  siRNA target sequence for Pten (NM_008960.1,1974-1992).
ggtgaaactatactttaca

SEQ ID NO: 588677 - DNA, 19 bp, Mus musculus
  siRNA target sequence for Pten (NM_008960.1,2017-2035).
ccagaggctagcagttcaa

SEQ ID NO: 588678 - DNA, 19 bp, Mus musculus
  siRNA target sequence for Pten (NM_008960.1,2020-2038).
gaggctagcagttcaactt

SEQ ID NO: 588679 - DNA, 19 bp, Mus musculus
  siRNA target sequence for Pten (NM_008960.1,2022-2040).
ggctagcagttcaacttct

SEQ ID NO: 588680 - DNA, 19 bp, Mus musculus
  siRNA target sequence for Pten (NM_008960.1,2059-2077).
gacaatgaacctgatcatt

SEQ ID NO: 588681 - DNA, 19 bp, Mus musculus
  siRNA target sequence for Pten (NM_008960.1,2061-2079).
caatgaacctgatcattat

SEQ ID NO: 588682 - DNA, 19 bp, Mus musculus
  siRNA target sequence for Pten (NM_008960.1,2100-2118).
ctctgatccagagaatgaa

SEQ ID NO: 588683 - DNA, 19 bp, Mus musculus
  siRNA target sequence for Pten (NM_008960.1,2131-2149).
gatcagcattcacaaatta

SEQ ID NO: 588684 - DNA, 19 bp, Mus musculus
  siRNA target sequence for Ptpla (NM_013935.1,630-648).
gagatcactcgctattcct

SEQ ID NO: 588685 - DNA, 19 bp, Mus musculus
  siRNA target sequence for Ptpla (NM_013935.1,639-657).
cgctattccttctacacat

SEQ ID NO: 588686 - DNA, 19 bp, Mus musculus
  siRNA target sequence for Ptpla (NM_013935.1,640-658).
gctattccttctacacatt

SEQ ID NO: 588687 - DNA, 19 bp, Mus musculus
  siRNA target sequence for Ptpla (NM_013935.1,671-689).
ccacttgccgcacttcatt

SEQ ID NO: 588688 - DNA, 19 bp, Mus musculus
  siRNA target sequence for Ptpla (NM_013935.1,672-690).
cacttgccgcacttcatta

SEQ ID NO: 588689 - DNA, 19 bp, Mus musculus
  siRNA target sequence for Ptpla (NM_013935.1,674-692).
cttgccgcacttcattaaa

SEQ ID NO: 588690 - DNA, 19 bp, Mus musculus
  siRNA target sequence for Ptpla (NM_013935.1,694-712).
gggccagatacaatttgtt

SEQ ID NO: 588691 - DNA, 19 bp, Mus musculus
  siRNA target sequence for Ptpla (NM_013935.1,695-713).
ggccagatacaatttgttt

SEQ ID NO: 588692 - DNA, 19 bp, Mus musculus
  siRNA target sequence for Ptpla (NM_013935.1,765-783).
gccttgccttacgtaaaga

SEQ ID NO: 588693 - DNA, 19 bp, Mus musculus
  siRNA target sequence for Ptplb (NM_023587.1,171-189).
cggcgtacctggtcatcta

SEQ ID NO: 588694 - DNA, 19 bp, Mus musculus
  siRNA target sequence for Ptplb (NM_023587.1,173-191).
gcgtacctggtcatctaca

SEQ ID NO: 588695 - DNA, 19 bp, Mus musculus
  siRNA target sequence for Ptplb (NM_023587.1,174-192).
cgtacctggtcatctacaa

SEQ ID NO: 588696 - DNA, 19 bp, Mus musculus
  siRNA target sequence for Ptplb (NM_023587.1,175-193).
gtacctggtcatctacaat

SEQ ID NO: 588697 - DNA, 19 bp, Mus musculus
  siRNA target sequence for Ptplb (NM_023587.1,251-269).
gctaaggggagctaccata

SEQ ID NO: 588698 - DNA, 19 bp, Mus musculus
  siRNA target sequence for Ptplb (NM_023587.1,261-279).
gctaccatagcctttatta

SEQ ID NO: 588699 - DNA, 19 bp, Mus musculus
  siRNA target sequence for Ptplb (NM_023587.1,262-280).
ctaccatagcctttattat

SEQ ID NO: 588700 - DNA, 19 bp, Mus musculus
  siRNA target sequence for Ptplb (NM_023587.1,270-288).
gcctttattattcaataga

SEQ ID NO: 588701 - DNA, 19 bp, Mus musculus
  siRNA target sequence for Ptplb (NM_023587.1,272-290).
ctttattattcaatagaaa

SEQ ID NO: 588702 - DNA, 19 bp, Mus musculus
  siRNA target sequence for Ptplb (NM_023587.1,314-332).
ggagccttactggagattt

SEQ ID NO: 588703 - DNA, 19 bp, Mus musculus
  siRNA target sequence for Ptplb (NM_023587.1,315-333).
gagccttactggagatttt

SEQ ID NO: 588704 - DNA, 19 bp, Mus musculus
  siRNA target sequence for Ptplb (NM_023587.1,328-346).
gattttacattgtgctata

SEQ ID NO: 588705 - DNA, 19 bp, Mus musculus
  siRNA target sequence for Ptplb (NM_023587.1,382-400).
ccaggtgatgtcaagagtt

SEQ ID NO: 588706 - DNA, 19 bp, Mus musculus
  siRNA target sequence for Ptplb (NM_023587.1,411-429).
gggcagtgacacatagtgt

SEQ ID NO: 588707 - DNA, 19 bp, Mus musculus
  siRNA target sequence for Ptplb (NM_023587.1,467-485).
gtcattgcctggacaatca

SEQ ID NO: 588708 - DNA, 19 bp, Mus musculus
  siRNA target sequence for Ptplb (NM_023587.1,477-495).
ggacaatcacggaaattat

SEQ ID NO: 588709 - DNA, 19 bp, Mus musculus
  siRNA target sequence for Ptplb (NM_023587.1,509-527).
cgttactccttttacacat

SEQ ID NO: 588710 - DNA, 19 bp, Mus musculus
  siRNA target sequence for Ptplb (NM_023587.1,525-543).
cattcagtctattaaacca

SEQ ID NO: 588711 - DNA, 19 bp, Mus musculus
  siRNA target sequence for Ptplb (NM_023587.1,564-582).
gggccaggtacacactttt

SEQ ID NO: 588712 - DNA, 19 bp, Mus musculus
  siRNA target sequence for Ptplb (NM_023587.1,566-584).
gccaggtacacacttttca

SEQ ID NO: 588713 - DNA, 19 bp, Mus musculus
  siRNA target sequence for Ptplb (NM_023587.1,567-585).
ccaggtacacacttttcat

SEQ ID NO: 588714 - DNA, 19 bp, Mus musculus
  siRNA target sequence for Ptplb (NM_023587.1,612-630).
gagagctcctcacaatata

SEQ ID NO: 588715 - DNA, 19 bp, Mus musculus
  siRNA target sequence for Ptplb (NM_023587.1,669-687).
ccatcagcttacctaacaa

SEQ ID NO: 588716 - DNA, 19 bp, Mus musculus
  siRNA target sequence for Ptplb (NM_023587.1,670-688).
catcagcttacctaacaaa

SEQ ID NO: 588717 - DNA, 19 bp, Mus musculus
  siRNA target sequence for Ptplb (NM_023587.1,680-698).
cctaacaaatacaacttct

SEQ ID NO: 588718 - DNA, 19 bp, Mus musculus
  siRNA target sequence for Ptplb (NM_023587.1,699-717).
cctttgattaccatgcatt

SEQ ID NO: 588719 - DNA, 19 bp, Mus musculus
  siRNA target sequence for Ptplb (NM_023587.1,749-767).
ctgttcccccagttgtact

SEQ ID NO: 588720 - DNA, 19 bp, Mus musculus
  siRNA target sequence for Ptplb (NM_023587.1,801-819).
ctcacaccgaagaacataa

SEQ ID NO: 588721 - DNA, 19 bp, Mus musculus
  siRNA target sequence for Ptplb (NM_023587.1,803-821).
cacaccgaagaacataaga

SEQ ID NO: 588722 - DNA, 19 bp, Mus musculus
  siRNA target sequence for Ptplb (NM_023587.1,808-826).
cgaagaacataagaagttt

SEQ ID NO: 588723 - DNA, 19 bp, Mus musculus
  siRNA target sequence for Rngtt (NM_011884.1,87-105).
cggtggcaggaagattctt

SEQ ID NO: 588724 - DNA, 19 bp, Mus musculus
  siRNA target sequence for Rngtt (NM_011884.1,121-139).
gctggggccaagatatgat

SEQ ID NO: 588725 - DNA, 19 bp, Mus musculus
  siRNA target sequence for Rngtt (NM_011884.1,124-142).
ggggccaagatatgatagt

SEQ ID NO: 588726 - DNA, 19 bp, Mus musculus
  siRNA target sequence for Rngtt (NM_011884.1,127-145).
gccaagatatgatagtcaa

SEQ ID NO: 588727 - DNA, 19 bp, Mus musculus
  siRNA target sequence for Rngtt (NM_011884.1,174-192).
gtatgctctcaaattatct

SEQ ID NO: 588728 - DNA, 19 bp, Mus musculus
  siRNA target sequence for Rngtt (NM_011884.1,243-261).
caaggttctatgacagaaa

SEQ ID NO: 588729 - DNA, 19 bp, Mus musculus
  siRNA target sequence for Rngtt (NM_011884.1,250-268).
ctatgacagaaatgacata

SEQ ID NO: 588730 - DNA, 19 bp, Mus musculus
  siRNA target sequence for Rngtt (NM_011884.1,275-293).
gaaggaatcaagtatatca

SEQ ID NO: 588731 - DNA, 19 bp, Mus musculus
  siRNA target sequence for Rngtt (NM_011884.1,279-297).
gaatcaagtatatcaaact

SEQ ID NO: 588732 - DNA, 19 bp, Mus musculus
  siRNA target sequence for Rngtt (NM_011884.1,292-310).
caaacttcagtgtaaagga

SEQ ID NO: 588733 - DNA, 19 bp, Mus musculus
  siRNA target sequence for Rngtt (NM_011884.1,378-396).
gaagcccacctgaacttat

SEQ ID NO: 588734 - DNA, 19 bp, Mus musculus
  siRNA target sequence for Rngtt (NM_011884.1,382-400).
cccacctgaacttataggt

SEQ ID NO: 588735 - DNA, 19 bp, Mus musculus
  siRNA target sequence for Rngtt (NM_011884.1,421-439).
caaccgtactggtttcctt

SEQ ID NO: 588736 - DNA, 19 bp, Mus musculus
  siRNA target sequence for Rngtt (NM_011884.1,424-442).
ccgtactggtttccttata

SEQ ID NO: 588737 - DNA, 19 bp, Mus musculus
  siRNA target sequence for Rngtt (NM_011884.1,507-525).
ccagaccaccaggaatcta

SEQ ID NO: 588738 - DNA, 19 bp, Mus musculus
  siRNA target sequence for Rngtt (NM_011884.1,555-573).
gtcgctatggagatataga

SEQ ID NO: 588739 - DNA, 19 bp, Mus musculus
  siRNA target sequence for Rngtt (NM_011884.1,668-686).
gggtcaagtgcatccttta

SEQ ID NO: 588740 - DNA, 19 bp, Mus musculus
  siRNA target sequence for Rngtt (NM_011884.1,670-688).
gtcaagtgcatcctttagt

SEQ ID NO: 588741 - DNA, 19 bp, Mus musculus
  siRNA target sequence for Rngtt (NM_011884.1,672-690).
caagtgcatcctttagtaa

SEQ ID NO: 588742 - DNA, 19 bp, Mus musculus
  siRNA target sequence for Rngtt (NM_011884.1,694-712).
gagaaaagagcggttaaaa

SEQ ID NO: 588743 - DNA, 19 bp, Mus musculus
  siRNA target sequence for Rngtt (NM_011884.1,749-767).
ggtgtaactcaagtaacaa

SEQ ID NO: 588744 - DNA, 19 bp, Mus musculus
  siRNA target sequence for Rngtt (NM_011884.1,859-877).
ggacaagcaaaatattaga

SEQ ID NO: 588745 - DNA, 19 bp, Mus musculus
  siRNA target sequence for Rngtt (NM_011884.1,886-904).
gcagaagccttataaagta

SEQ ID NO: 588746 - DNA, 19 bp, Mus musculus
  siRNA target sequence for Rngtt (NM_011884.1,917-935).
gacggcactcgttacatga

SEQ ID NO: 588747 - DNA, 19 bp, Mus musculus
  siRNA target sequence for Rngtt (NM_011884.1,920-938).
ggcactcgttacatgatgt

SEQ ID NO: 588748 - DNA, 19 bp, Mus musculus
  siRNA target sequence for Rngtt (NM_011884.1,921-939).
gcactcgttacatgatgtt

SEQ ID NO: 588749 - DNA, 19 bp, Mus musculus
  siRNA target sequence for Rngtt (NM_011884.1,924-942).
ctcgttacatgatgttgat

SEQ ID NO: 588750 - DNA, 19 bp, Mus musculus
  siRNA target sequence for Rngtt (NM_011884.1,937-955).
gttgattgatggcacaaat

SEQ ID NO: 588751 - DNA, 19 bp, Mus musculus
  siRNA target sequence for Rngtt (NM_011884.1,944-962).
gatggcacaaatgaagttt

SEQ ID NO: 588752 - DNA, 19 bp, Mus musculus
  siRNA target sequence for Rngtt (NM_011884.1,951-969).
caaatgaagtttttatgat

SEQ ID NO: 588753 - DNA, 19 bp, Mus musculus
  siRNA target sequence for Rngtt (NM_011884.1,956-974).
gaagtttttatgattgaca

SEQ ID NO: 588754 - DNA, 19 bp, Mus musculus
  siRNA target sequence for Rngtt (NM_011884.1,975-993).
gagataattccgtttttca

SEQ ID NO: 588755 - DNA, 19 bp, Mus musculus
  siRNA target sequence for Rngtt (NM_011884.1,1004-1022).
ctggaatttccatttcgta

SEQ ID NO: 588756 - DNA, 19 bp, Mus musculus
  siRNA target sequence for Rngtt (NM_011884.1,1006-1024).
ggaatttccatttcgtaaa

SEQ ID NO: 588757 - DNA, 19 bp, Mus musculus
  siRNA target sequence for Rngtt (NM_011884.1,1025-1043).
gatcttcgcatgcatttat

SEQ ID NO: 588758 - DNA, 19 bp, Mus musculus
  siRNA target sequence for Rngtt (NM_011884.1,1057-1075).
ggatggggaaatgatcatt

SEQ ID NO: 588759 - DNA, 19 bp, Mus musculus
  siRNA target sequence for Rngtt (NM_011884.1,1069-1087).
gatcattgacaaagtaaat

SEQ ID NO: 588760 - DNA, 19 bp, Mus musculus
  siRNA target sequence for Rngtt (NM_011884.1,1089-1107).
gacaggccgtcccaagata

SEQ ID NO: 588761 - DNA, 19 bp, Mus musculus
  siRNA target sequence for Rngtt (NM_011884.1,1091-1109).
caggccgtcccaagatatt

SEQ ID NO: 588762 - DNA, 19 bp, Mus musculus
  siRNA target sequence for Rngtt (NM_011884.1,1094-1112).
gccgtcccaagatatttga

SEQ ID NO: 588763 - DNA, 19 bp, Mus musculus
  siRNA target sequence for Rngtt (NM_011884.1,1095-1113).
ccgtcccaagatatttgat

SEQ ID NO: 588764 - DNA, 19 bp, Mus musculus
  siRNA target sequence for Rngtt (NM_011884.1,1097-1115).
gtcccaagatatttgatct

SEQ ID NO: 588765 - DNA, 19 bp, Mus musculus
  siRNA target sequence for Rngtt (NM_011884.1,1099-1117).
cccaagatatttgatctat

SEQ ID NO: 588766 - DNA, 19 bp, Mus musculus
  siRNA target sequence for Rngtt (NM_011884.1,1101-1119).
caagatatttgatctatga

SEQ ID NO: 588767 - DNA, 19 bp, Mus musculus
  siRNA target sequence for Rngtt (NM_011884.1,1104-1122).
gatatttgatctatgacat

SEQ ID NO: 588768 - DNA, 19 bp, Mus musculus
  siRNA target sequence for Rngtt (NM_011884.1,1149-1167).
gagactgtgattttaatat

SEQ ID NO: 588769 - DNA, 19 bp, Mus musculus
  siRNA target sequence for Rngtt (NM_011884.1,1177-1195).
gtgtattgaacgtgaaatt

SEQ ID NO: 588770 - DNA, 19 bp, Mus musculus
  siRNA target sequence for Rngtt (NM_011884.1,1222-1240).
gactggactcattgacaaa

SEQ ID NO: 588771 - DNA, 19 bp, Mus musculus
  siRNA target sequence for Rngtt (NM_011884.1,1257-1275).
gtgtcagacctaaacaatt

SEQ ID NO: 588772 - DNA, 19 bp, Mus musculus
  siRNA target sequence for Rngtt (NM_011884.1,1259-1277).
gtcagacctaaacaatttt

SEQ ID NO: 588773 - DNA, 19 bp, Mus musculus
  siRNA target sequence for Rngtt (NM_011884.1,1263-1281).
gacctaaacaattttttga

SEQ ID NO: 588774 - DNA, 19 bp, Mus musculus
  siRNA target sequence for Rngtt (NM_011884.1,1266-1284).
ctaaacaattttttgacat

SEQ ID NO: 588775 - DNA, 19 bp, Mus musculus
  siRNA target sequence for Rngtt (NM_011884.1,1271-1289).
caattttttgacatcaata

SEQ ID NO: 588776 - DNA, 19 bp, Mus musculus
  siRNA target sequence for Rngtt (NM_011884.1,1285-1303).
caatatttcaagaaagctt

SEQ ID NO: 588777 - DNA, 19 bp, Mus musculus
  siRNA target sequence for Rngtt (NM_011884.1,1375-1393).
caagcctggtcgatgtgat

SEQ ID NO: 588778 - DNA, 19 bp, Mus musculus
  siRNA target sequence for Rngtt (NM_011884.1,1380-1398).
ctggtcgatgtgatgacat

SEQ ID NO: 588779 - DNA, 19 bp, Mus musculus
  siRNA target sequence for Rngtt (NM_011884.1,1382-1400).
ggtcgatgtgatgacattt

SEQ ID NO: 588780 - DNA, 19 bp, Mus musculus
  siRNA target sequence for Rngtt (NM_011884.1,1383-1401).
gtcgatgtgatgacatttt

SEQ ID NO: 588781 - DNA, 19 bp, Mus musculus
  siRNA target sequence for Rngtt (NM_011884.1,1385-1403).
cgatgtgatgacattttga

SEQ ID NO: 588782 - DNA, 19 bp, Mus musculus
  siRNA target sequence for Rngtt (NM_011884.1,1419-1437).
gtctaaactctgtggattt

SEQ ID NO: 588783 - DNA, 19 bp, Mus musculus
  siRNA target sequence for Rngtt (NM_011884.1,1547-1565).
gaactaaaacagtatgaca

SEQ ID NO: 588784 - DNA, 19 bp, Mus musculus
  siRNA target sequence for Rngtt (NM_011884.1,1616-1634).
cagaggatagacaaaagtt

SEQ ID NO: 588785 - DNA, 19 bp, Mus musculus
  siRNA target sequence for Tpte (NM_181851.3,417-435).
gaacactatgggtatgaca

SEQ ID NO: 588786 - DNA, 19 bp, Mus musculus
  siRNA target sequence for Tpte (NM_181851.3,428-446).
gtatgacatgcctgcaaat

SEQ ID NO: 588787 - DNA, 19 bp, Mus musculus
  siRNA target sequence for Tpte (NM_181851.3,511-529).
gtgcttcaaggaccattaa

SEQ ID NO: 588788 - DNA, 19 bp, Mus musculus
  siRNA target sequence for Tpte (NM_181851.3,541-559).
gcactggctacgacacaaa

SEQ ID NO: 588789 - DNA, 19 bp, Mus musculus
  siRNA target sequence for Tpte (NM_181851.3,542-560).
cactggctacgacacaaat

SEQ ID NO: 588790 - DNA, 19 bp, Mus musculus
  siRNA target sequence for Tpte (NM_181851.3,547-565).
gctacgacacaaatgaaca

SEQ ID NO: 588791 - DNA, 19 bp, Mus musculus
  siRNA target sequence for Tpte (NM_181851.3,561-579).
gaacagataacactaatca

SEQ ID NO: 588792 - DNA, 19 bp, Mus musculus
  siRNA target sequence for Tpte (NM_181851.3,564-582).
cagataacactaatcacta

SEQ ID NO: 588793 - DNA, 19 bp, Mus musculus
  siRNA target sequence for Tpte (NM_181851.3,596-614).
gtcatatccagatgaaata

SEQ ID NO: 588794 - DNA, 19 bp, Mus musculus
  siRNA target sequence for Tpte (NM_181851.3,630-648).
gcggaccccatcagtacaa

SEQ ID NO: 588795 - DNA, 19 bp, Mus musculus
  siRNA target sequence for Tpte (NM_181851.3,631-649).
cggaccccatcagtacaaa

SEQ ID NO: 588796 - DNA, 19 bp, Mus musculus
  siRNA target sequence for Tpte (NM_181851.3,632-650).
ggaccccatcagtacaaaa

SEQ ID NO: 588797 - DNA, 19 bp, Mus musculus
  siRNA target sequence for Tpte (NM_181851.3,637-655).
ccatcagtacaaaagcata

SEQ ID NO: 588798 - DNA, 19 bp, Mus musculus
  siRNA target sequence for Tpte (NM_181851.3,638-656).
catcagtacaaaagcatat

SEQ ID NO: 588799 - DNA, 19 bp, Mus musculus
  siRNA target sequence for Tpte (NM_181851.3,658-676).
caaatgattcgtcagtata

SEQ ID NO: 588800 - DNA, 19 bp, Mus musculus
  siRNA target sequence for Tpte (NM_181851.3,700-718).
gcacaaccctgtatgaact

SEQ ID NO: 588801 - DNA, 19 bp, Mus musculus
  siRNA target sequence for Tpte (NM_181851.3,728-746).
gagtgaagtatcgaaagaa

SEQ ID NO: 588802 - DNA, 19 bp, Mus musculus
  siRNA target sequence for Tpte (NM_181851.3,730-748).
gtgaagtatcgaaagaaat

SEQ ID NO: 588803 - DNA, 19 bp, Mus musculus
  siRNA target sequence for Tpte (NM_181851.3,766-784).
ctgctttactacgtgataa

SEQ ID NO: 588804 - DNA, 19 bp, Mus musculus
  siRNA target sequence for Tpte (NM_181851.3,769-787).
ctttactacgtgataaaga

SEQ ID NO: 588805 - DNA, 19 bp, Mus musculus
  siRNA target sequence for Tpte (NM_181851.3,789-807).
gctaccagcgaactcaaaa

SEQ ID NO: 588806 - DNA, 19 bp, Mus musculus
  siRNA target sequence for Tpte (NM_181851.3,854-872).
ctccttatctgatttatca

SEQ ID NO: 588807 - DNA, 19 bp, Mus musculus
  siRNA target sequence for Tpte (NM_181851.3,857-875).
cttatctgatttatcatca

SEQ ID NO: 588808 - DNA, 19 bp, Mus musculus
  siRNA target sequence for Tpte (NM_181851.3,926-944).
gttgtacgacgatgatgaa

SEQ ID NO: 588809 - DNA, 19 bp, Mus musculus
  siRNA target sequence for Tpte (NM_181851.3,935-953).
cgatgatgaacgtactgat

SEQ ID NO: 588810 - DNA, 19 bp, Mus musculus
  siRNA target sequence for Tpte (NM_181851.3,936-954).
gatgatgaacgtactgata

SEQ ID NO: 588811 - DNA, 19 bp, Mus musculus
  siRNA target sequence for Tpte (NM_181851.3,942-960).
gaacgtactgatattcaaa

SEQ ID NO: 588812 - DNA, 19 bp, Mus musculus
  siRNA target sequence for Tpte (NM_181851.3,945-963).
cgtactgatattcaaaagt

SEQ ID NO: 588813 - DNA, 19 bp, Mus musculus
  siRNA target sequence for Tpte (NM_181851.3,949-967).
ctgatattcaaaagtcata

SEQ ID NO: 588814 - DNA, 19 bp, Mus musculus
  siRNA target sequence for Tpte (NM_181851.3,951-969).
gatattcaaaagtcatact

SEQ ID NO: 588815 - DNA, 19 bp, Mus musculus
  siRNA target sequence for Tpte (NM_181851.3,1007-1025).
ctcggttgccttcagaata

SEQ ID NO: 588816 - DNA, 19 bp, Mus musculus
  siRNA target sequence for Tpte (NM_181851.3,1038-1056).
ctggtcattctggatgtat

SEQ ID NO: 588817 - DNA, 19 bp, Mus musculus
  siRNA target sequence for Tpte (NM_181851.3,1040-1058).
ggtcattctggatgtattt

SEQ ID NO: 588818 - DNA, 19 bp, Mus musculus
  siRNA target sequence for Tpte (NM_181851.3,1059-1077).
cttgtggttgtcgatctaa

SEQ ID NO: 588819 - DNA, 19 bp, Mus musculus
  siRNA target sequence for Tpte (NM_181851.3,1065-1083).
gttgtcgatctaaatgtct

SEQ ID NO: 588820 - DNA, 19 bp, Mus musculus
  siRNA target sequence for Tpte (NM_181851.3,1109-1127).
ggactatcgttccatttct

SEQ ID NO: 588821 - DNA, 19 bp, Mus musculus
  siRNA target sequence for Tpte (NM_181851.3,1110-1128).
gactatcgttccatttctt

SEQ ID NO: 588822 - DNA, 19 bp, Mus musculus
  siRNA target sequence for Tpte (NM_181851.3,1126-1144).
ctttagcgattgctttatt

SEQ ID NO: 588823 - DNA, 19 bp, Mus musculus
  siRNA target sequence for Tpte (NM_181851.3,1182-1200).
gggagacggcgctatttct

SEQ ID NO: 588824 - DNA, 19 bp, Mus musculus
  siRNA target sequence for Tpte (NM_181851.3,1184-1202).
gagacggcgctatttctct

SEQ ID NO: 588825 - DNA, 19 bp, Mus musculus
  siRNA target sequence for Tpte (NM_181851.3,1255-1273).
ctgtcatttatgcacttta

SEQ ID NO: 588826 - DNA, 19 bp, Mus musculus
  siRNA target sequence for Tpte (NM_181851.3,1298-1316).
cccaagactggcagtttta

SEQ ID NO: 588827 - DNA, 19 bp, Mus musculus
  siRNA target sequence for Tpte (NM_181851.3,1324-1342).
ctctacgactgctcattct

SEQ ID NO: 588828 - DNA, 19 bp, Mus musculus
  siRNA target sequence for Tpte (NM_181851.3,1326-1344).
ctacgactgctcattctga

SEQ ID NO: 588829 - DNA, 19 bp, Mus musculus
  siRNA target sequence for Tpte (NM_181851.3,1329-1347).
cgactgctcattctgataa

SEQ ID NO: 588830 - DNA, 19 bp, Mus musculus
  siRNA target sequence for Tpte (NM_181851.3,1353-1371).
ctgcaactggctcatcaaa

SEQ ID NO: 588831 - DNA, 19 bp, Mus musculus
  siRNA target sequence for Tpte (NM_181851.3,1460-1478).
cgtcactgagcgtattatt

SEQ ID NO: 588832 - DNA, 19 bp, Mus musculus
  siRNA target sequence for Tpte (NM_181851.3,1470-1488).
cgtattattgccatgtcat

SEQ ID NO: 588833 - DNA, 19 bp, Mus musculus
  siRNA target sequence for Tpte (NM_181851.3,1471-1489).
gtattattgccatgtcatt

SEQ ID NO: 588834 - DNA, 19 bp, Mus musculus
  siRNA target sequence for Tpte (NM_181851.3,1559-1577).
gcacccaaaccactatcaa

SEQ ID NO: 588835 - DNA, 19 bp, Mus musculus
  siRNA target sequence for Tpte (NM_181851.3,1568-1586).
ccactatcaagtctacaat

SEQ ID NO: 588836 - DNA, 19 bp, Mus musculus
  siRNA target sequence for Tpte (NM_181851.3,1571-1589).
ctatcaagtctacaatcta

SEQ ID NO: 588837 - DNA, 19 bp, Mus musculus
  siRNA target sequence for Tpte (NM_181851.3,1591-1609).
gcagtgagagagcttatga

SEQ ID NO: 588838 - DNA, 19 bp, Mus musculus
  siRNA target sequence for Tpte (NM_181851.3,1630-1648).
gggtccgcagaatcatgat

SEQ ID NO: 588839 - DNA, 19 bp, Mus musculus
  siRNA target sequence for Tpte (NM_181851.3,1631-1649).
ggtccgcagaatcatgatt

SEQ ID NO: 588840 - DNA, 19 bp, Mus musculus
  siRNA target sequence for Tpte (NM_181851.3,1634-1652).
ccgcagaatcatgattgat

SEQ ID NO: 588841 - DNA, 19 bp, Mus musculus
  siRNA target sequence for Tpte (NM_181851.3,1639-1657).
gaatcatgattgatgatca

SEQ ID NO: 588842 - DNA, 19 bp, Mus musculus
  siRNA target sequence for Tpte (NM_181851.3,1669-1687).
ctcttgaggaaatgttgtt

SEQ ID NO: 588843 - DNA, 19 bp, Mus musculus
  siRNA target sequence for Tpte (NM_181851.3,1800-1818).
gccagtgaaatagttttaa

SEQ ID NO: 588844 - DNA, 19 bp, Mus musculus
  siRNA target sequence for Tpte (NM_181851.3,1873-1891).
gctcgaagttccaaggaat

SEQ ID NO: 588845 - DNA, 19 bp, Mus musculus
  siRNA target sequence for Tpte (NM_181851.3,1876-1894).
cgaagttccaaggaataga

SEQ ID NO: 588846 - DNA, 19 bp, Mus musculus
  siRNA target sequence for Tpte (NM_181851.3,1905-1923).
cagaatagatatgtgaaat

SEQ ID NO: 588847 - DNA, 19 bp, Mus musculus
  siRNA target sequence for Tpte (NM_181851.3,1994-2012).
ggtcgtttattccattcat

SEQ ID NO: 588848 - DNA, 19 bp, Mus musculus
  siRNA target sequence for Tpte (NM_181851.3,2033-2051).
gagtgacctggaagtacaa

SEQ ID NO: 588849 - DNA, 19 bp, Mus musculus
  siRNA target sequence for Tpte (NM_181851.3,2040-2058).
ctggaagtacaaatcataa

SEQ ID NO: 588850 - DNA, 19 bp, Mus musculus
  siRNA target sequence for Tpte (NM_181851.3,2043-2061).
gaagtacaaatcataatgt

SEQ ID NO: 588851 - DNA, 19 bp, Mus musculus
  siRNA target sequence for Tpte (NM_181851.3,2096-2114).
gaattgtatgacctttgtt

SEQ ID NO: 588852 - DNA, 19 bp, Mus musculus
  siRNA target sequence for Tpte (NM_181851.3,2112-2130).
gtttgcccacatctaagtt

SEQ ID NO: 588853 - DNA, 19 bp, Mus musculus
  siRNA target sequence for Tpte (NM_181851.3,2116-2134).
gcccacatctaagtttcta

SEQ ID NO: 588854 - DNA, 19 bp, Mus musculus
  siRNA target sequence for Tpte (NM_199257.1,2096-2114).
gaattgtatgatatttcat

SEQ ID NO: 588855 - DNA, 19 bp, Mus musculus
  siRNA target sequence for Tpte (NM_199257.1,2158-2176).
cggctctatacgatgatgt

SEQ ID NO: 588856 - DNA, 19 bp, Mus musculus
  siRNA target sequence for Tpte (NM_199257.1,2161-2179).
ctctatacgatgatgtgaa

SEQ ID NO: 588857 - DNA, 19 bp, Mus musculus
  siRNA target sequence for Tpte (NM_199257.1,2194-2212).
ctccgaatcttcctaaata

SEQ ID NO: 588858 - DNA, 19 bp, Mus musculus
  siRNA target sequence for Tpte (NM_199257.1,2196-2214).
ccgaatcttcctaaatact

SEQ ID NO: 588859 - DNA, 19 bp, Mus musculus
  siRNA target sequence for Tpte (NM_199257.1,2197-2215).
cgaatcttcctaaatacta

SEQ ID NO: 588860 - DNA, 19 bp, Mus musculus
  siRNA target sequence for Tpte (NM_199257.1,2198-2216).
gaatcttcctaaatactat

SEQ ID NO: 588861 - DNA, 19 bp, Mus musculus
  siRNA target sequence for Tpte (NM_199257.1,2280-2298).
ccaagaaacgaattggata

SEQ ID NO: 588862 - DNA, 19 bp, Mus musculus
  siRNA target sequence for Tpte (NM_199257.1,2294-2312).
ggataatacccataaacca

SEQ ID NO: 588863 - DNA, 19 bp, Mus musculus
  siRNA target sequence for Tpte (NM_199257.1,2295-2313).
gataatacccataaaccaa

SEQ ID NO: 588864 - DNA, 19 bp, Mus musculus
  siRNA target sequence for Tpte (NM_199258.1,531-549).
gaacataaatagcactaat

SEQ ID NO: 588865 - DNA, 19 bp, Mus musculus
  siRNA target sequence for Inpp5e (NM_033134.2,803-821).
caaactaaggcaaatctca

SEQ ID NO: 588866 - DNA, 19 bp, Mus musculus
  siRNA target sequence for Inpp5e (NM_033134.2,1020-1038).
ccttgcaggagatacctaa

SEQ ID NO: 588867 - DNA, 19 bp, Mus musculus
  siRNA target sequence for Inpp5e (NM_033134.2,1081-1099).
gtggagtgactgtctttct

SEQ ID NO: 588868 - DNA, 19 bp, Mus musculus
  siRNA target sequence for Inpp5e (NM_033134.2,1162-1180).
caggttggcaagtttgcat

SEQ ID NO: 588869 - DNA, 19 bp, Mus musculus
  siRNA target sequence for Inpp5e (NM_033134.2,1349-1367).
gacgatcactccattcact

SEQ ID NO: 588870 - DNA, 19 bp, Mus musculus
  siRNA target sequence for Inpp5e (NM_033134.2,1557-1575).
cgagcctggatgagtttct

SEQ ID NO: 588871 - DNA, 19 bp, Mus musculus
  siRNA target sequence for Inpp5e (NM_033134.2,1606-1624).
cctgtatgtcattggaatt

SEQ ID NO: 588872 - DNA, 19 bp, Mus musculus
  siRNA target sequence for Inpp5e (NM_033134.2,1772-1790).
gtcgagtactccacagtaa

SEQ ID NO: 588873 - DNA, 19 bp, Mus musculus
  siRNA target sequence for Inpp5e (NM_033134.2,1774-1792).
cgagtactccacagtaact

SEQ ID NO: 588874 - DNA, 19 bp, Mus musculus
  siRNA target sequence for Inpp5e (NM_033134.2,1775-1793).
gagtactccacagtaacta

SEQ ID NO: 588875 - DNA, 19 bp, Mus musculus
  siRNA target sequence for Inpp5e (NM_033134.2,1777-1795).
gtactccacagtaactaca

SEQ ID NO: 588876 - DNA, 19 bp, Mus musculus
  siRNA target sequence for Inpp5e (NM_033134.2,1833-1851).
gcgtcagcttcaccttttt

SEQ ID NO: 588877 - DNA, 19 bp, Mus musculus
  siRNA target sequence for Inpp5e (NM_033134.2,1834-1852).
cgtcagcttcacctttttt

SEQ ID NO: 588878 - DNA, 19 bp, Mus musculus
  siRNA target sequence for Inpp5e (NM_033134.2,2138-2156).
ctcacccgggagatgaaga

SEQ ID NO: 588879 - DNA, 19 bp, Mus musculus
  siRNA target sequence for Inpp5e (NM_033134.2,2274-2292).
cagaccgagtcctatacaa

SEQ ID NO: 588880 - DNA, 19 bp, Mus musculus
  siRNA target sequence for Inpp5e (NM_033134.2,2276-2294).
gaccgagtcctatacaaaa

SEQ ID NO: 588881 - DNA, 19 bp, Mus musculus
  siRNA target sequence for Inpp5e (NM_033134.2,2309-2327).
gacatctgtcccatgaagt

SEQ ID NO: 588882 - DNA, 19 bp, Mus musculus
  siRNA target sequence for Inpp5e (NM_033134.2,2397-2415).
ggccaggacgagacaacat

SEQ ID NO: 588883 - DNA, 19 bp, Mus musculus
  siRNA target sequence for Inpp5e (NM_033134.2,2438-2456).
gaccgagaattgtacttga

SEQ ID NO: 588884 - DNA, 19 bp, Mus musculus
  siRNA target sequence for Inpp5e (NM_033134.2,2444-2462).
gaattgtacttgataggaa

SEQ ID NO: 588885 - DNA, 19 bp, Mus musculus
  siRNA target sequence for Pib5pa (NM_172439.1,171-189).
ccctcgaagaaggtaaact

SEQ ID NO: 588886 - DNA, 19 bp, Mus musculus
  siRNA target sequence for Pib5pa (NM_172439.1,173-191).
ctcgaagaaggtaaactca

SEQ ID NO: 588887 - DNA, 19 bp, Mus musculus
  siRNA target sequence for Pib5pa (NM_172439.1,296-314).
gccgagactggttttgtca

SEQ ID NO: 588888 - DNA, 19 bp, Mus musculus
  siRNA target sequence for Pib5pa (NM_172439.1,297-315).
ccgagactggttttgtcat

SEQ ID NO: 588889 - DNA, 19 bp, Mus musculus
  siRNA target sequence for Pib5pa (NM_172439.1,407-425).
gggccaactggtagtatct

SEQ ID NO: 588890 - DNA, 19 bp, Mus musculus
  siRNA target sequence for Pib5pa (NM_172439.1,451-469).
cagtcgcctcagtctcaat

SEQ ID NO: 588891 - DNA, 19 bp, Mus musculus
  siRNA target sequence for Pib5pa (NM_172439.1,484-502).
ctctggggcagctagtaat

SEQ ID NO: 588892 - DNA, 19 bp, Mus musculus
  siRNA target sequence for Pib5pa (NM_172439.1,488-506).
ggggcagctagtaatatct

SEQ ID NO: 588893 - DNA, 19 bp, Mus musculus
  siRNA target sequence for Pib5pa (NM_172439.1,549-567).
gtcctaactccaacttcta

SEQ ID NO: 588894 - DNA, 19 bp, Mus musculus
  siRNA target sequence for Pib5pa (NM_172439.1,1223-1241).
gtgcccaagccctaaccta

SEQ ID NO: 588895 - DNA, 19 bp, Mus musculus
  siRNA target sequence for Pib5pa (NM_172439.1,1238-1256).
cctacaggcacaagaaagt

SEQ ID NO: 588896 - DNA, 19 bp, Mus musculus
  siRNA target sequence for Pib5pa (NM_172439.1,1335-1353).
cggatcactgtggttacat

SEQ ID NO: 588897 - DNA, 19 bp, Mus musculus
  siRNA target sequence for Pib5pa (NM_172439.1,1367-1385).
cgccatgccccctgatgat

SEQ ID NO: 588898 - DNA, 19 bp, Mus musculus
  siRNA target sequence for Pib5pa (NM_172439.1,1408-1426).
gcagtggccacgacaatga

SEQ ID NO: 588899 - DNA, 19 bp, Mus musculus
  siRNA target sequence for Pib5pa (NM_172439.1,1409-1427).
cagtggccacgacaatgat

SEQ ID NO: 588900 - DNA, 19 bp, Mus musculus
  siRNA target sequence for Pib5pa (NM_172439.1,1461-1479).
gtcaattccatgatcaaca

SEQ ID NO: 588901 - DNA, 19 bp, Mus musculus
  siRNA target sequence for Pib5pa (NM_172439.1,1485-1503).
ctcaaggatgctctcttta

SEQ ID NO: 588902 - DNA, 19 bp, Mus musculus
  siRNA target sequence for Pib5pa (NM_172439.1,1533-1551).
gcactggggcctttcaact

SEQ ID NO: 588903 - DNA, 19 bp, Mus musculus
  siRNA target sequence for Pib5pa (NM_172439.1,1534-1552).
cactggggcctttcaactt

SEQ ID NO: 588904 - DNA, 19 bp, Mus musculus
  siRNA target sequence for Pib5pa (NM_172439.1,1573-1591).
ggatgcagggcgtcattct

SEQ ID NO: 588905 - DNA, 19 bp, Mus musculus
  siRNA target sequence for Pib5pa (NM_172439.1,1767-1785).
gcagaacagcgcaaggata

SEQ ID NO: 588906 - DNA, 19 bp, Mus musculus
  siRNA target sequence for Pib5pa (NM_172439.1,1768-1786).
cagaacagcgcaaggataa

SEQ ID NO: 588907 - DNA, 19 bp, Mus musculus
  siRNA target sequence for Pib5pa (NM_172439.1,1770-1788).
gaacagcgcaaggataact

SEQ ID NO: 588908 - DNA, 19 bp, Mus musculus
  siRNA target sequence for Pib5pa (NM_172439.1,1775-1793).
gcgcaaggataactttcaa

SEQ ID NO: 588909 - DNA, 19 bp, Mus musculus
  siRNA target sequence for Pib5pa (NM_172439.1,1776-1794).
cgcaaggataactttcaaa

SEQ ID NO: 588910 - DNA, 19 bp, Mus musculus
  siRNA target sequence for Pib5pa (NM_172439.1,1841-1859).
cttggatcatgatcttgta

SEQ ID NO: 588911 - DNA, 19 bp, Mus musculus
  siRNA target sequence for Pib5pa (NM_172439.1,1892-1910).
gagctatgacctacacttt

SEQ ID NO: 588912 - DNA, 19 bp, Mus musculus
  siRNA target sequence for Pib5pa (NM_172439.1,1911-1929).
gtcaagttcgccatagaca

SEQ ID NO: 588913 - DNA, 19 bp, Mus musculus
  siRNA target sequence for Pib5pa (NM_172439.1,1987-2005).
ggcccatcttgaaaggttt

SEQ ID NO: 588914 - DNA, 19 bp, Mus musculus
  siRNA target sequence for Pib5pa (NM_172439.1,2029-2047).
ctcccactttcaagtttga

SEQ ID NO: 588915 - DNA, 19 bp, Mus musculus
  siRNA target sequence for Pib5pa (NM_172439.1,2048-2066).
cgtgggtaccaacaaatat

SEQ ID NO: 588916 - DNA, 19 bp, Mus musculus
  siRNA target sequence for Pib5pa (NM_172439.1,2233-2251).
ctgttgctgcccagttcat

SEQ ID NO: 588917 - DNA, 19 bp, Mus musculus
  siRNA target sequence for Pib5pa (NM_172439.1,2292-2310).
ctggaggtagccgatgaat

SEQ ID NO: 588918 - DNA, 19 bp, Mus musculus
  siRNA target sequence for Pib5pa (NM_172439.1,2339-2357).
gtaccgcgtggaaacagta

SEQ ID NO: 588919 - DNA, 19 bp, Mus musculus
  siRNA target sequence for Pib5pa (NM_172439.1,2342-2360).
ccgcgtggaaacagtattt

SEQ ID NO: 588920 - DNA, 19 bp, Mus musculus
  siRNA target sequence for Pib5pa (NM_172439.1,2506-2524).
gccacggagacttcattct

SEQ ID NO: 588921 - DNA, 19 bp, Mus musculus
  siRNA target sequence for Pib5pa (NM_172439.1,2562-2580).
gtcacagaaccctttcaga

SEQ ID NO: 588922 - DNA, 19 bp, Mus musculus
  siRNA target sequence for Pib5pa (NM_172439.1,2841-2859).
gacaggggtcacagtagta

SEQ ID NO: 588923 - DNA, 19 bp, Mus musculus
  siRNA target sequence for Pib5pa (NM_172439.1,3009-3027).
gaggcccctgaccctaata

SEQ ID NO: 588924 - DNA, 19 bp, Mus musculus
  siRNA target sequence for Inpp1 (NM_008384.1,349-367).
gctggtgcaggaagttata

SEQ ID NO: 588925 - DNA, 19 bp, Mus musculus
  siRNA target sequence for Inpp1 (NM_008384.1,352-370).
ggtgcaggaagttataaaa

SEQ ID NO: 588926 - DNA, 19 bp, Mus musculus
  siRNA target sequence for Inpp1 (NM_008384.1,419-437).
gaagaatccaatgagttta

SEQ ID NO: 588927 - DNA, 19 bp, Mus musculus
  siRNA target sequence for Inpp1 (NM_008384.1,565-583).
ggacgtggacttaactgat

SEQ ID NO: 588928 - DNA, 19 bp, Mus musculus
  siRNA target sequence for Inpp1 (NM_008384.1,637-655).
ggtggatcccattgattca

SEQ ID NO: 588929 - DNA, 19 bp, Mus musculus
  siRNA target sequence for Inpp1 (NM_008384.1,674-692).
ggttctgccaatgttaaat

SEQ ID NO: 588930 - DNA, 19 bp, Mus musculus
  siRNA target sequence for Inpp1 (NM_008384.1,771-789).
ccctaatgggagtcatcaa

SEQ ID NO: 588931 - DNA, 19 bp, Mus musculus
  siRNA target sequence for Inpp1 (NM_008384.1,772-790).
cctaatgggagtcatcaat

SEQ ID NO: 588932 - DNA, 19 bp, Mus musculus
  siRNA target sequence for Inpp1 (NM_008384.1,840-858).
gctactggggcctttcgta

SEQ ID NO: 588933 - DNA, 19 bp, Mus musculus
  siRNA target sequence for Inpp1 (NM_008384.1,1100-1118).
gaggacaccacgtacaagt

SEQ ID NO: 588934 - DNA, 19 bp, Mus musculus
  siRNA target sequence for Inpp1 (NM_008384.1,1199-1217).
ccagacacggggttggatt

SEQ ID NO: 588935 - DNA, 19 bp, Mus musculus
  siRNA target sequence for Inpp1 (NM_008384.1,1200-1218).
cagacacggggttggattt

SEQ ID NO: 588936 - DNA, 19 bp, Mus musculus
  siRNA target sequence for Inpp1 (NM_008384.1,1332-1350).
gccgcctcatccaaaacct

SEQ ID NO: 588937 - DNA, 19 bp, Mus musculus
  siRNA target sequence for Inpp1 (NM_008384.1,1348-1366).
cctcgggcctgtaaagaca

SEQ ID NO: 588938 - DNA, 19 bp, Mus musculus
  siRNA target sequence for 1110001C20Rik (NM_177730.2,233-251).
gctgggggtggccgtattt

SEQ ID NO: 588939 - DNA, 19 bp, Mus musculus
  siRNA target sequence for 1110001C20Rik (NM_177730.2,238-256).
gggtggccgtatttttcct

SEQ ID NO: 588940 - DNA, 19 bp, Mus musculus
  siRNA target sequence for 1110001C20Rik (NM_177730.2,531-549).
ctgtccaaccgcaagatgt

SEQ ID NO: 588941 - DNA, 19 bp, Mus musculus
  siRNA target sequence for 1110001C20Rik (NM_177730.2,573-591).
cccaacgtgcagataaata

SEQ ID NO: 588942 - DNA, 19 bp, Mus musculus
  siRNA target sequence for 1110001C20Rik (NM_177730.2,575-593).
caacgtgcagataaatact

SEQ ID NO: 588943 - DNA, 19 bp, Mus musculus
  siRNA target sequence for 1110001C20Rik (NM_177730.2,683-701).
ggaggtaccagcagaaagt

SEQ ID NO: 588944 - DNA, 19 bp, Mus musculus
  siRNA target sequence for 1110001C20Rik (NM_177730.2,750-768).
gatcttcgaaagtatgtca

SEQ ID NO: 588945 - DNA, 19 bp, Mus musculus
  siRNA target sequence for 1110001C20Rik (NM_177730.2,791-809).
gaatggcaaacctgtgtta

SEQ ID NO: 588946 - DNA, 19 bp, Mus musculus
  siRNA target sequence for 1110001C20Rik (NM_177730.2,802-820).
ctgtgttaggagttattca

SEQ ID NO: 588947 - DNA, 19 bp, Mus musculus
  siRNA target sequence for 1110001C20Rik (NM_177730.2,804-822).
gtgttaggagttattcata

SEQ ID NO: 588948 - DNA, 19 bp, Mus musculus
  siRNA target sequence for 1110001C20Rik (NM_177730.2,882-900).
cgttcttcctacaatgaga

SEQ ID NO: 588949 - DNA, 19 bp, Mus musculus
  siRNA target sequence for 1110001C20Rik (NM_177730.2,897-915).
gagaagaccccaaagatca

SEQ ID NO: 588950 - DNA, 19 bp, Mus musculus
  siRNA target sequence for 1110001C20Rik (NM_177730.2,999-1017).
ggtgctggttataaagttt

SEQ ID NO: 588951 - DNA, 19 bp, Mus musculus
  siRNA target sequence for 1110001C20Rik (NM_177730.2,1028-1046).
ggatgtgcctgatatgact

SEQ ID NO: 588952 - DNA, 19 bp, Mus musculus
  siRNA target sequence for 1110001C20Rik (NM_177730.2,1036-1054).
ctgatatgactcaagaaaa

SEQ ID NO: 588953 - DNA, 19 bp, Mus musculus
  siRNA target sequence for 1110001C20Rik (NM_177730.2,1071-1089).
catgtgacatacatcaaaa

SEQ ID NO: 588954 - DNA, 19 bp, Mus musculus
  siRNA target sequence for 1110001C20Rik (NM_177730.2,1085-1103).
caaaaagtgggatatatgt

SEQ ID NO: 588955 - DNA, 19 bp, Mus musculus
  siRNA target sequence for 1110001C20Rik (NM_177730.2,1104-1122).
gctggcaatgccatcttaa

SEQ ID NO: 588956 - DNA, 19 bp, Mus musculus
  siRNA target sequence for 1110001C20Rik (NM_177730.2,1187-1205).
cattgaagggggacttctt

SEQ ID NO: 588957 - DNA, 19 bp, Mus musculus
  siRNA target sequence for 1110001C20Rik (NM_177730.2,1203-1221).
cttgctagcatcagaatga

SEQ ID NO: 588958 - DNA, 19 bp, Mus musculus
  siRNA target sequence for 1110001C20Rik (NM_177730.2,1238-1256).
cagaaaacttccggattta

SEQ ID NO: 588959 - DNA, 19 bp, Mus musculus
  siRNA target sequence for 1110001C20Rik (NM_177730.2,1240-1258).
gaaaacttccggatttaga

SEQ ID NO: 588960 - DNA, 19 bp, Mus musculus
  siRNA target sequence for 9530014D17Rik (NM_177215.2,325-343).
gggcagtatgagttaataa

SEQ ID NO: 588961 - DNA, 19 bp, Mus musculus
  siRNA target sequence for 9530014D17Rik (NM_177215.2,326-344).
ggcagtatgagttaataat

SEQ ID NO: 588962 - DNA, 19 bp, Mus musculus
  siRNA target sequence for 9530014D17Rik (NM_177215.2,361-379).
gaacaacatgttcaagata

SEQ ID NO: 588963 - DNA, 19 bp, Mus musculus
  siRNA target sequence for 9530014D17Rik (NM_177215.2,370-388).
gttcaagatatcattccta

SEQ ID NO: 588964 - DNA, 19 bp, Mus musculus
  siRNA target sequence for 9530014D17Rik (NM_177215.2,491-509).
gagagcgccactttgaaat

SEQ ID NO: 588965 - DNA, 19 bp, Mus musculus
  siRNA target sequence for 9530014D17Rik (NM_177215.2,495-513).
gcgccactttgaaattcct

SEQ ID NO: 588966 - DNA, 19 bp, Mus musculus
  siRNA target sequence for 9530014D17Rik (NM_177215.2,576-594).
gcttcttgttccagaacaa

SEQ ID NO: 588967 - DNA, 19 bp, Mus musculus
  siRNA target sequence for 9530014D17Rik (NM_177215.2,605-623).
ctagctggtaccagaaatt

SEQ ID NO: 588968 - DNA, 19 bp, Mus musculus
  siRNA target sequence for 9530014D17Rik (NM_177215.2,618-636).
gaaattagacactatggat

SEQ ID NO: 588969 - DNA, 19 bp, Mus musculus
  siRNA target sequence for 9530014D17Rik (NM_177215.2,657-675).
gcttggatttgaggataat

SEQ ID NO: 588970 - DNA, 19 bp, Mus musculus
  siRNA target sequence for 9530014D17Rik (NM_177215.2,754-772).
ccttcttcatcgactagaa

SEQ ID NO: 588971 - DNA, 19 bp, Mus musculus
  siRNA target sequence for 9530014D17Rik (NM_177215.2,770-788).
gaatgctttcgcgtgaaaa

SEQ ID NO: 588972 - DNA, 19 bp, Mus musculus
  siRNA target sequence for 9530014D17Rik (NM_177215.2,784-802).
gaaaaggaagcttcaaaca

SEQ ID NO: 588973 - DNA, 19 bp, Mus musculus
  siRNA target sequence for 9530014D17Rik (NM_177215.2,827-845).
ccatgcggaagctatttgt

SEQ ID NO: 588974 - DNA, 19 bp, Mus musculus
  siRNA target sequence for 9530014D17Rik (NM_177215.2,867-885).
gcgagagggtctcattaaa

SEQ ID NO: 588975 - DNA, 19 bp, Mus musculus
  siRNA target sequence for 9530014D17Rik (NM_177215.2,871-889).
gagggtctcattaaacata

SEQ ID NO: 588976 - DNA, 19 bp, Mus musculus
  siRNA target sequence for 9530014D17Rik (NM_177215.2,999-1017).
cgactgtgatccaaatcct

SEQ ID NO: 588977 - DNA, 19 bp, Mus musculus
  siRNA target sequence for 9530014D17Rik (NM_177215.2,1010-1028).
caaatcctcctgatattta

SEQ ID NO: 588978 - DNA, 19 bp, Mus musculus
  siRNA target sequence for 9530014D17Rik (NM_177215.2,1021-1039).
gatatttactgcattggat

SEQ ID NO: 588979 - DNA, 19 bp, Mus musculus
  siRNA target sequence for 9530014D17Rik (NM_177215.2,1058-1076).
gcaccgaagcctttttcta

SEQ ID NO: 588980 - DNA, 19 bp, Mus musculus
  siRNA target sequence for 9530014D17Rik (NM_177215.2,1128-1146).
gccttcgaaggccaagtat

SEQ ID NO: 588981 - DNA, 19 bp, Mus musculus
  siRNA target sequence for 9530014D17Rik (NM_177215.2,1133-1151).
cgaaggccaagtatagaaa

SEQ ID NO: 588982 - DNA, 19 bp, Mus musculus
  siRNA target sequence for 9530014D17Rik (NM_177215.2,1139-1157).
ccaagtatagaaaagttca

SEQ ID NO: 588983 - DNA, 19 bp, Mus musculus
  siRNA target sequence for 9530014D17Rik (NM_177215.2,1140-1158).
caagtatagaaaagttcaa

SEQ ID NO: 588984 - DNA, 19 bp, Mus musculus
  siRNA target sequence for 9530014D17Rik (NM_177215.2,1171-1189).
gtggggatgatgcttctta

SEQ ID NO: 588985 - DNA, 19 bp, Mus musculus
  siRNA target sequence for 9530014D17Rik (NM_177215.2,1174-1192).
gggatgatgcttcttatat

SEQ ID NO: 588986 - DNA, 19 bp, Mus musculus
  siRNA target sequence for 9530014D17Rik (NM_177215.2,1199-1217).
gaaaagatcagtgtcaata

SEQ ID NO: 588987 - DNA, 19 bp, Mus musculus
  siRNA target sequence for 9530014D17Rik (NM_177215.2,1221-1239).
ccgagatgttgctacagaa

SEQ ID NO: 588988 - DNA, 19 bp, Mus musculus
  siRNA target sequence for 9530014D17Rik (NM_177215.2,1279-1297).
ggtggggtagctgtaagat

SEQ ID NO: 588989 - DNA, 19 bp, Mus musculus
  siRNA target sequence for 9530014D17Rik (NM_177215.2,1280-1298).
gtggggtagctgtaagatt

SEQ ID NO: 588990 - DNA, 19 bp, Mus musculus
  siRNA target sequence for 9530014D17Rik (NM_177215.2,1284-1302).
ggtagctgtaagatttgta

SEQ ID NO: 588991 - DNA, 19 bp, Mus musculus
  siRNA target sequence for 9530014D17Rik (NM_177215.2,1285-1303).
gtagctgtaagatttgtat

SEQ ID NO: 588992 - DNA, 19 bp, Mus musculus
  siRNA target sequence for 9530014D17Rik (NM_177215.2,1313-1331).
ccactttctgcattgtcaa

SEQ ID NO: 588993 - DNA, 19 bp, Mus musculus
  siRNA target sequence for 9530014D17Rik (NM_177215.2,1314-1332).
cactttctgcattgtcaat

SEQ ID NO: 588994 - DNA, 19 bp, Mus musculus
  siRNA target sequence for 9530014D17Rik (NM_177215.2,1366-1384).
cgaaggaatcaggattata

SEQ ID NO: 588995 - DNA, 19 bp, Mus musculus
  siRNA target sequence for 9530014D17Rik (NM_177215.2,1397-1415).
caagaatgactttttcagt

SEQ ID NO: 588996 - DNA, 19 bp, Mus musculus
  siRNA target sequence for 9530014D17Rik (NM_177215.2,1427-1445).
ctgtcccgcaagtgaacat

SEQ ID NO: 588997 - DNA, 19 bp, Mus musculus
  siRNA target sequence for 9530014D17Rik (NM_177215.2,1429-1447).
gtcccgcaagtgaacatca

SEQ ID NO: 588998 - DNA, 19 bp, Mus musculus
  siRNA target sequence for 9530014D17Rik (NM_177215.2,1433-1451).
cgcaagtgaacatcatgaa

SEQ ID NO: 588999 - DNA, 19 bp, Mus musculus
  siRNA target sequence for 9530014D17Rik (NM_177215.2,1443-1461).
catcatgaagcatgatgtt

SEQ ID NO: 589000 - DNA, 19 bp, Mus musculus
  siRNA target sequence for 9530014D17Rik (NM_177215.2,1542-1560).
gcttcataagctgttgaaa

SEQ ID NO: 589001 - DNA, 19 bp, Mus musculus
  siRNA target sequence for 9530014D17Rik (NM_177215.2,1581-1599).
gcgcacacagaaaaaagct

SEQ ID NO: 589002 - DNA, 19 bp, Mus musculus
  siRNA target sequence for 9530014D17Rik (NM_177215.2,1611-1629).
caatgaaggggaaattaat

SEQ ID NO: 589003 - DNA, 19 bp, Mus musculus
  siRNA target sequence for 9530014D17Rik (NM_177215.2,1632-1650).
cgttcccacgtacaaatat

SEQ ID NO: 589004 - DNA, 19 bp, Mus musculus
  siRNA target sequence for 9530014D17Rik (NM_177215.2,1636-1654).
cccacgtacaaatatgatt

SEQ ID NO: 589005 - DNA, 19 bp, Mus musculus
  siRNA target sequence for 9530014D17Rik (NM_177215.2,1640-1658).
cgtacaaatatgattcgaa

SEQ ID NO: 589006 - DNA, 19 bp, Mus musculus
  siRNA target sequence for 9530014D17Rik (NM_177215.2,1641-1659).
gtacaaatatgattcgaaa

SEQ ID NO: 589007 - DNA, 19 bp, Mus musculus
  siRNA target sequence for 9530014D17Rik (NM_177215.2,1792-1810).
gttagcgccctgttccata

SEQ ID NO: 589008 - DNA, 19 bp, Mus musculus
  siRNA target sequence for 9530014D17Rik (NM_177215.2,1838-1856).
ggtatcggaaggtctttga

SEQ ID NO: 589009 - DNA, 19 bp, Mus musculus
  siRNA target sequence for 9530014D17Rik (NM_177215.2,1839-1857).
gtatcggaaggtctttgaa

SEQ ID NO: 589010 - DNA, 19 bp, Mus musculus
  siRNA target sequence for 9530014D17Rik (NM_177215.2,1843-1861).
cggaaggtctttgaagata

SEQ ID NO: 589011 - DNA, 19 bp, Mus musculus
  siRNA target sequence for 9530014D17Rik (NM_177215.2,1869-1887).
cattatggacagaatggaa

SEQ ID NO: 589012 - DNA, 19 bp, Mus musculus
  siRNA target sequence for 9530014D17Rik (NM_177215.2,1897-1915).
cttccttcattagaactta

SEQ ID NO: 589013 - DNA, 19 bp, Mus musculus
  siRNA target sequence for 9530014D17Rik (NM_177215.2,2012-2030).
ctttcatccctaagcttaa

SEQ ID NO: 589014 - DNA, 19 bp, Mus musculus
  siRNA target sequence for 9530014D17Rik (NM_177215.2,2026-2044).
cttaatgacagccaatact

SEQ ID NO: 589015 - DNA, 19 bp, Mus musculus
  siRNA target sequence for 9530014D17Rik (NM_177215.2,2089-2107).
ccaaacgagaccttagaca

SEQ ID NO: 589016 - DNA, 19 bp, Mus musculus
  siRNA target sequence for 9530014D17Rik (NM_177215.2,2104-2122).
gacatctcccttgatgtat

SEQ ID NO: 589017 - DNA, 19 bp, Mus musculus
  siRNA target sequence for 9530014D17Rik (NM_177215.2,2119-2137).
gtatacgtcagcaaagact

SEQ ID NO: 589018 - DNA, 19 bp, Mus musculus
  siRNA target sequence for 9530014D17Rik (NM_177215.2,2129-2147).
gcaaagactctgtaaccat

SEQ ID NO: 589019 - DNA, 19 bp, Mus musculus
  siRNA target sequence for 9530014D17Rik (NM_177215.2,2148-2166).
cctgaactccggtgaagat

SEQ ID NO: 589020 - DNA, 19 bp, Mus musculus
  siRNA target sequence for 9530014D17Rik (NM_177215.2,2149-2167).
ctgaactccggtgaagata

SEQ ID NO: 589021 - DNA, 19 bp, Mus musculus
  siRNA target sequence for 9530014D17Rik (NM_177215.2,2156-2174).
ccggtgaagataagattga

SEQ ID NO: 589022 - DNA, 19 bp, Mus musculus
  siRNA target sequence for 9530014D17Rik (NM_177215.2,2157-2175).
cggtgaagataagattgaa

SEQ ID NO: 589023 - DNA, 19 bp, Mus musculus
  siRNA target sequence for 9530014D17Rik (NM_177215.2,2197-2215).
gatcgaggcaaagattact

SEQ ID NO: 589024 - DNA, 19 bp, Mus musculus
  siRNA target sequence for 9530014D17Rik (NM_177215.2,2200-2218).
cgaggcaaagattacttct

SEQ ID NO: 589025 - DNA, 19 bp, Mus musculus
  siRNA target sequence for 9530014D17Rik (NM_177215.2,2203-2221).
ggcaaagattacttcttga

SEQ ID NO: 589026 - DNA, 19 bp, Mus musculus
  siRNA target sequence for 9530014D17Rik (NM_177215.2,2222-2240).
ccatcggtgggaattacct

SEQ ID NO: 589027 - DNA, 19 bp, Mus musculus
  siRNA target sequence for 9530014D17Rik (NM_177215.2,2277-2295).
ccgaatgaaaagaccaatt

SEQ ID NO: 589028 - DNA, 19 bp, Mus musculus
  siRNA target sequence for 9530014D17Rik (NM_177215.2,2302-2320).
gttcctgtcaccaaactca

SEQ ID NO: 589029 - DNA, 19 bp, Mus musculus
  siRNA target sequence for 9530014D17Rik (NM_177215.2,2339-2357).
gctacctagaaaaggtaat

SEQ ID NO: 589030 - DNA, 19 bp, Mus musculus
  siRNA target sequence for 9530014D17Rik (NM_177215.2,2380-2398).
ggtttccttgtgcttgatt

SEQ ID NO: 589031 - DNA, 19 bp, Mus musculus
  siRNA target sequence for Impa2 (NM_053261.1,267-285).
cgctgcgtgcgggacaaat

SEQ ID NO: 589032 - DNA, 19 bp, Mus musculus
  siRNA target sequence for Impa2 (NM_053261.1,269-287).
ctgcgtgcgggacaaatca

SEQ ID NO: 589033 - DNA, 19 bp, Mus musculus
  siRNA target sequence for Impa2 (NM_053261.1,272-290).
cgtgcgggacaaatcatca

SEQ ID NO: 589034 - DNA, 19 bp, Mus musculus
  siRNA target sequence for Impa2 (NM_053261.1,308-326).
gaaaaacgcgtctctacaa

SEQ ID NO: 589035 - DNA, 19 bp, Mus musculus
  siRNA target sequence for Impa2 (NM_053261.1,340-358).
cgatcttgtgacagaaaca

SEQ ID NO: 589036 - DNA, 19 bp, Mus musculus
  siRNA target sequence for Impa2 (NM_053261.1,362-380).
caccgagtagaagatttaa

SEQ ID NO: 589037 - DNA, 19 bp, Mus musculus
  siRNA target sequence for Impa2 (NM_053261.1,364-382).
ccgagtagaagatttaatt

SEQ ID NO: 589038 - DNA, 19 bp, Mus musculus
  siRNA target sequence for Impa2 (NM_053261.1,496-514).
cgacggcacctgcaacttt

SEQ ID NO: 589039 - DNA, 19 bp, Mus musculus
  siRNA target sequence for Impa2 (NM_053261.1,568-586).
gctggaatttggagtgatt

SEQ ID NO: 589040 - DNA, 19 bp, Mus musculus
  siRNA target sequence for Impa2 (NM_053261.1,627-645).
gccaaggcgccttttgcaa

SEQ ID NO: 589041 - DNA, 19 bp, Mus musculus
  siRNA target sequence for Impa2 (NM_053261.1,628-646).
ccaaggcgccttttgcaat

SEQ ID NO: 589042 - DNA, 19 bp, Mus musculus
  siRNA target sequence for Impa2 (NM_053261.1,690-708).
ccttggttctgacagaaat

SEQ ID NO: 589043 - DNA, 19 bp, Mus musculus
  siRNA target sequence for Impa2 (NM_053261.1,721-739).
cgaccccgatactctgaaa

SEQ ID NO: 589044 - DNA, 19 bp, Mus musculus
  siRNA target sequence for Impa2 (NM_053261.1,724-742).
ccccgatactctgaaagta

SEQ ID NO: 589045 - DNA, 19 bp, Mus musculus
  siRNA target sequence for Impa2 (NM_053261.1,837-855).
gtgcagccgacgcctatta

SEQ ID NO: 589046 - DNA, 19 bp, Mus musculus
  siRNA target sequence for Impa2 (NM_053261.1,840-858).
cagccgacgcctattatca

SEQ ID NO: 589047 - DNA, 19 bp, Mus musculus
  siRNA target sequence for Impa2 (NM_053261.1,842-860).
gccgacgcctattatcagt

SEQ ID NO: 589048 - DNA, 19 bp, Mus musculus
  siRNA target sequence for Impa2 (NM_053261.1,843-861).
ccgacgcctattatcagtt

SEQ ID NO: 589049 - DNA, 19 bp, Mus musculus
  siRNA target sequence for Impa2 (NM_053261.1,908-926).
gaagcaggcggcattgtga

SEQ ID NO: 589050 - DNA, 19 bp, Mus musculus
  siRNA target sequence for Impa2 (NM_053261.1,912-930).
caggcggcattgtgattga

SEQ ID NO: 589051 - DNA, 19 bp, Mus musculus
  siRNA target sequence for Impa2 (NM_053261.1,914-932).
ggcggcattgtgattgaca

SEQ ID NO: 589052 - DNA, 19 bp, Mus musculus
  siRNA target sequence for Impa2 (NM_053261.1,1007-1025).
gctcaggccctacaaacta

SEQ ID NO: 589053 - DNA, 19 bp, Mus musculus
  siRNA target sequence for Impa2 (NM_053261.1,1008-1026).
ctcaggccctacaaactat

SEQ ID NO: 589054 - DNA, 19 bp, Mus musculus
  siRNA target sequence for Impa2 (NM_053261.1,1010-1028).
caggccctacaaactatta

SEQ ID NO: 589055 - DNA, 19 bp, Mus musculus
  siRNA target sequence for Inpp5b (NM_008385.3,226-244).
gaggtaccggctggaaaat

SEQ ID NO: 589056 - DNA, 19 bp, Mus musculus
  siRNA target sequence for Inpp5b (NM_008385.3,228-246).
ggtaccggctggaaaatga

SEQ ID NO: 589057 - DNA, 19 bp, Mus musculus
  siRNA target sequence for Inpp5b (NM_008385.3,326-344).
gtgccactctcaaaagatt

SEQ ID NO: 589058 - DNA, 19 bp, Mus musculus
  siRNA target sequence for Inpp5b (NM_008385.3,366-384).
cagatggtgaactctacat

SEQ ID NO: 589059 - DNA, 19 bp, Mus musculus
  siRNA target sequence for Inpp5b (NM_008385.3,393-411).
ctgatgtgacagtacaatt

SEQ ID NO: 589060 - DNA, 19 bp, Mus musculus
  siRNA target sequence for Inpp5b (NM_008385.3,727-745).
cgctgaggagccggaattt

SEQ ID NO: 589061 - DNA, 19 bp, Mus musculus
  siRNA target sequence for Inpp5b (NM_008385.3,729-747).
ctgaggagccggaatttct

SEQ ID NO: 589062 - DNA, 19 bp, Mus musculus
  siRNA target sequence for Inpp5b (NM_008385.3,731-749).
gaggagccggaatttctat

SEQ ID NO: 589063 - DNA, 19 bp, Mus musculus
  siRNA target sequence for Inpp5b (NM_008385.3,996-1014).
ctgacatgtctgaaaaggt

SEQ ID NO: 589064 - DNA, 19 bp, Mus musculus
  siRNA target sequence for Inpp5b (NM_008385.3,1038-1056).
cggacaaggctcacatttt

SEQ ID NO: 589065 - DNA, 19 bp, Mus musculus
  siRNA target sequence for Inpp5b (NM_008385.3,1039-1057).
ggacaaggctcacatttta

SEQ ID NO: 589066 - DNA, 19 bp, Mus musculus
  siRNA target sequence for Inpp5b (NM_008385.3,1040-1058).
gacaaggctcacattttat

SEQ ID NO: 589067 - DNA, 19 bp, Mus musculus
  siRNA target sequence for Inpp5b (NM_008385.3,1258-1276).
gctcgacctgagtaaggaa

SEQ ID NO: 589068 - DNA, 19 bp, Mus musculus
  siRNA target sequence for Inpp5b (NM_008385.3,1376-1394).
cgactggttgggattatgt

SEQ ID NO: 589069 - DNA, 19 bp, Mus musculus
  siRNA target sequence for Inpp5b (NM_008385.3,1452-1470).
ccgtagggacaggaatcat

SEQ ID NO: 589070 - DNA, 19 bp, Mus musculus
  siRNA target sequence for Inpp5b (NM_008385.3,1471-1489).
gggaaggatgggtaacaaa

SEQ ID NO: 589071 - DNA, 19 bp, Mus musculus
  siRNA target sequence for Inpp5b (NM_008385.3,1524-1542).
ccagcatctgcgttgtcaa

SEQ ID NO: 589072 - DNA, 19 bp, Mus musculus
  siRNA target sequence for Inpp5b (NM_008385.3,1525-1543).
cagcatctgcgttgtcaat

SEQ ID NO: 589073 - DNA, 19 bp, Mus musculus
  siRNA target sequence for Inpp5b (NM_008385.3,1589-1607).
gactacagagacatttgtt

SEQ ID NO: 589074 - DNA, 19 bp, Mus musculus
  siRNA target sequence for Inpp5b (NM_008385.3,1640-1658).
caaccccctctcaccatta

SEQ ID NO: 589075 - DNA, 19 bp, Mus musculus
  siRNA target sequence for Inpp5b (NM_008385.3,1769-1787).
gcgcacgaccagctaaaaa

SEQ ID NO: 589076 - DNA, 19 bp, Mus musculus
  siRNA target sequence for Inpp5b (NM_008385.3,1770-1788).
cgcacgaccagctaaaaat

SEQ ID NO: 589077 - DNA, 19 bp, Mus musculus
  siRNA target sequence for Inpp5b (NM_008385.3,1797-1815).
ctgccaggaccatctttga

SEQ ID NO: 589078 - DNA, 19 bp, Mus musculus
  siRNA target sequence for Inpp5b (NM_008385.3,1819-1837).
cttcaccgagggtgagatt

SEQ ID NO: 589079 - DNA, 19 bp, Mus musculus
  siRNA target sequence for Inpp5b (NM_008385.3,1822-1840).
caccgagggtgagattaca

SEQ ID NO: 589080 - DNA, 19 bp, Mus musculus
  siRNA target sequence for Inpp5b (NM_008385.3,1824-1842).
ccgagggtgagattacatt

SEQ ID NO: 589081 - DNA, 19 bp, Mus musculus
  siRNA target sequence for Inpp5b (NM_008385.3,1847-1865).
cctacttacaagtacgata

SEQ ID NO: 589082 - DNA, 19 bp, Mus musculus
  siRNA target sequence for Inpp5b (NM_008385.3,2005-2023).
cagctcagtgtttgacatt

SEQ ID NO: 589083 - DNA, 19 bp, Mus musculus
  siRNA target sequence for Inpp5b (NM_008385.3,2025-2043).
gggtgagggttgtcaatga

SEQ ID NO: 589084 - DNA, 19 bp, Mus musculus
  siRNA target sequence for Inpp5b (NM_008385.3,2075-2093).
gtccgctccctggataaaa

SEQ ID NO: 589085 - DNA, 19 bp, Mus musculus
  siRNA target sequence for Inpp5b (NM_008385.3,2128-2146).
caagcgggagttctgtttt

SEQ ID NO: 589086 - DNA, 19 bp, Mus musculus
  siRNA target sequence for Inpp5b (NM_008385.3,2132-2150).
cgggagttctgttttgaga

SEQ ID NO: 589087 - DNA, 19 bp, Mus musculus
  siRNA target sequence for Inpp5b (NM_008385.3,2176-2194).
cgagtccttcacgattcat

SEQ ID NO: 589088 - DNA, 19 bp, Mus musculus
  siRNA target sequence for Inpp5b (NM_008385.3,2177-2195).
gagtccttcacgattcata

SEQ ID NO: 589089 - DNA, 19 bp, Mus musculus
  siRNA target sequence for Inpp5b (NM_008385.3,2298-2316).
cagattcgcatgttgagat

SEQ ID NO: 589090 - DNA, 19 bp, Mus musculus
  siRNA target sequence for Inpp5b (NM_008385.3,2304-2322).
cgcatgttgagattgaact

SEQ ID NO: 589091 - DNA, 19 bp, Mus musculus
  siRNA target sequence for Inpp5b (NM_008385.3,2371-2389).
ggacacgattgaagacatt

SEQ ID NO: 589092 - DNA, 19 bp, Mus musculus
  siRNA target sequence for Inpp5b (NM_008385.3,2409-2427).
ggggaaaggactactttct

SEQ ID NO: 589093 - DNA, 19 bp, Mus musculus
  siRNA target sequence for Inpp5b (NM_008385.3,2458-2476).
cttcggatctcctatccat

SEQ ID NO: 589094 - DNA, 19 bp, Mus musculus
  siRNA target sequence for Inpp5b (NM_008385.3,2463-2481).
gatctcctatccatacatt

SEQ ID NO: 589095 - DNA, 19 bp, Mus musculus
  siRNA target sequence for Inpp5b (NM_008385.3,2474-2492).
catacattgtgctacatga

SEQ ID NO: 589096 - DNA, 19 bp, Mus musculus
  siRNA target sequence for Inpp5b (NM_008385.3,2503-2521).
cttggatctaccactgaaa

SEQ ID NO: 589097 - DNA, 19 bp, Mus musculus
  siRNA target sequence for Inpp5b (NM_008385.3,2510-2528).
ctaccactgaaaactgtta

SEQ ID NO: 589098 - DNA, 19 bp, Mus musculus
  siRNA target sequence for Inpp5b (NM_008385.3,2514-2532).
cactgaaaactgttagtga

SEQ ID NO: 589099 - DNA, 19 bp, Mus musculus
  siRNA target sequence for Inpp5b (NM_008385.3,2618-2636).
gtggattacctgtacagaa

SEQ ID NO: 589100 - DNA, 19 bp, Mus musculus
  siRNA target sequence for Inpp5b (NM_008385.3,2644-2662).
ccagcaggaagatctgttt

SEQ ID NO: 589101 - DNA, 19 bp, Mus musculus
  siRNA target sequence for Inpp5b (NM_008385.3,2680-2698).
gccagagtttgaccatata

SEQ ID NO: 589102 - DNA, 19 bp, Mus musculus
  siRNA target sequence for Inpp5b (NM_008385.3,2681-2699).
ccagagtttgaccatataa

SEQ ID NO: 589103 - DNA, 19 bp, Mus musculus
  siRNA target sequence for Inpp5b (NM_008385.3,2965-2983).
gaatattctagctagcata

SEQ ID NO: 589104 - DNA, 19 bp, Mus musculus
  siRNA target sequence for Inpp5b (NM_008385.3,3009-3027).
cagctcgtcaccaaaagct

SEQ ID NO: 589105 - DNA, 19 bp, Mus musculus
  siRNA target sequence for Inpp5b (NM_008385.3,3015-3033).
gtcaccaaaagcttgacat

SEQ ID NO: 589106 - DNA, 19 bp, Mus musculus
  siRNA target sequence for Inpp5b (NM_008385.3,3026-3044).
cttgacatggcggaaaaga

SEQ ID NO: 589107 - DNA, 19 bp, Mus musculus
  siRNA target sequence for Inpp5d (NM_010566.1,251-269).
gctgttccggaattgtgtt

SEQ ID NO: 589108 - DNA, 19 bp, Mus musculus
  siRNA target sequence for Inpp5d (NM_010566.1,252-270).
ctgttccggaattgtgttt

SEQ ID NO: 589109 - DNA, 19 bp, Mus musculus
  siRNA target sequence for Inpp5d (NM_010566.1,258-276).
cggaattgtgtttacactt

SEQ ID NO: 589110 - DNA, 19 bp, Mus musculus
  siRNA target sequence for Inpp5d (NM_010566.1,259-277).
ggaattgtgtttacactta

SEQ ID NO: 589111 - DNA, 19 bp, Mus musculus
  siRNA target sequence for Inpp5d (NM_010566.1,287-305).
gcccaatgaggacgataaa

SEQ ID NO: 589112 - DNA, 19 bp, Mus musculus
  siRNA target sequence for Inpp5d (NM_010566.1,288-306).
cccaatgaggacgataaat

SEQ ID NO: 589113 - DNA, 19 bp, Mus musculus
  siRNA target sequence for Inpp5d (NM_010566.1,289-307).
ccaatgaggacgataaatt

SEQ ID NO: 589114 - DNA, 19 bp, Mus musculus
  siRNA target sequence for Inpp5d (NM_010566.1,360-378).
cagctcatcgacttttaca

SEQ ID NO: 589115 - DNA, 19 bp, Mus musculus
  siRNA target sequence for Inpp5d (NM_010566.1,499-517).
ctcccagaaacattcctat

SEQ ID NO: 589116 - DNA, 19 bp, Mus musculus
  siRNA target sequence for Inpp5d (NM_010566.1,618-636).
cgtctacagagcatggata

SEQ ID NO: 589117 - DNA, 19 bp, Mus musculus
  siRNA target sequence for Inpp5d (NM_010566.1,696-714).
ctcctggattccgactttt

SEQ ID NO: 589118 - DNA, 19 bp, Mus musculus
  siRNA target sequence for Inpp5d (NM_010566.1,702-720).
gattccgactttttgaaga

SEQ ID NO: 589119 - DNA, 19 bp, Mus musculus
  siRNA target sequence for Inpp5d (NM_010566.1,817-835).
ctctgcagaggttgtttga

SEQ ID NO: 589120 - DNA, 19 bp, Mus musculus
  siRNA target sequence for Inpp5d (NM_010566.1,906-924).
gccaaactcagccaattga

SEQ ID NO: 589121 - DNA, 19 bp, Mus musculus
  siRNA target sequence for Inpp5d (NM_010566.1,932-950).
gctgtcttccattgaagat

SEQ ID NO: 589122 - DNA, 19 bp, Mus musculus
  siRNA target sequence for Inpp5d (NM_010566.1,1045-1063).
gcattcctcagaaaatgca

SEQ ID NO: 589123 - DNA, 19 bp, Mus musculus
  siRNA target sequence for Inpp5d (NM_010566.1,1077-1095).
gttgagtctgggaaactga

SEQ ID NO: 589124 - DNA, 19 bp, Mus musculus
  siRNA target sequence for Inpp5d (NM_010566.1,1239-1257).
gtttttgctgactctaaga

SEQ ID NO: 589125 - DNA, 19 bp, Mus musculus
  siRNA target sequence for Inpp5d (NM_010566.1,1442-1460).
catcccccatgacatctat

SEQ ID NO: 589126 - DNA, 19 bp, Mus musculus
  siRNA target sequence for Inpp5d (NM_010566.1,1541-1559).
catgacatttaaaacagtt

SEQ ID NO: 589127 - DNA, 19 bp, Mus musculus
  siRNA target sequence for Inpp5d (NM_010566.1,1742-1760).
cttgacttctggaagtgaa

SEQ ID NO: 589128 - DNA, 19 bp, Mus musculus
  siRNA target sequence for Inpp5d (NM_010566.1,1827-1845).
ctaagcccatttaacatca

SEQ ID NO: 589129 - DNA, 19 bp, Mus musculus
  siRNA target sequence for Inpp5d (NM_010566.1,2042-2060).
ccccacctatcgatttgaa

SEQ ID NO: 589130 - DNA, 19 bp, Mus musculus
  siRNA target sequence for Inpp5d (NM_010566.1,2043-2061).
cccacctatcgatttgaaa

SEQ ID NO: 589131 - DNA, 19 bp, Mus musculus
  siRNA target sequence for Inpp5d (NM_010566.1,2045-2063).
cacctatcgatttgaaaga

SEQ ID NO: 589132 - DNA, 19 bp, Mus musculus
  siRNA target sequence for Inpp5d (NM_010566.1,2062-2080).
gactgacccgggacaagta

SEQ ID NO: 589133 - DNA, 19 bp, Mus musculus
  siRNA target sequence for Inpp5d (NM_010566.1,2068-2086).
cccgggacaagtatgcata

SEQ ID NO: 589134 - DNA, 19 bp, Mus musculus
  siRNA target sequence for Inpp5d (NM_010566.1,2139-2157).
cgagtcctctggaagtctt

SEQ ID NO: 589135 - DNA, 19 bp, Mus musculus
  siRNA target sequence for Inpp5d (NM_010566.1,2140-2158).
gagtcctctggaagtctta

SEQ ID NO: 589136 - DNA, 19 bp, Mus musculus
  siRNA target sequence for Inpp5d (NM_010566.1,2191-2209).
gcagtaccagtgacatcat

SEQ ID NO: 589137 - DNA, 19 bp, Mus musculus
  siRNA target sequence for Inpp5d (NM_010566.1,2376-2394).
cactcaagctgcttagaga

SEQ ID NO: 589138 - DNA, 19 bp, Mus musculus
  siRNA target sequence for Inpp5d (NM_010566.1,2463-2481).
gagactcttcccaagctaa

SEQ ID NO: 589139 - DNA, 19 bp, Mus musculus
  siRNA target sequence for Inpp5d (NM_010566.1,2492-2510).
ctctgaccccgagtactta

SEQ ID NO: 589140 - DNA, 19 bp, Mus musculus
  siRNA target sequence for Inpp5d (NM_010566.1,2494-2512).
ctgaccccgagtacttact

SEQ ID NO: 589141 - DNA, 19 bp, Mus musculus
  siRNA target sequence for Inpp5d (NM_010566.1,2520-2538).
catatcctgatcagcatta

SEQ ID NO: 589142 - DNA, 19 bp, Mus musculus
  siRNA target sequence for Inpp5d (NM_010566.1,2526-2544).
ctgatcagcattaaatcct

SEQ ID NO: 589143 - DNA, 19 bp, Mus musculus
  siRNA target sequence for Inpp5d (NM_010566.1,2743-2761).
ccagtggaatgaaatgctt

SEQ ID NO: 589144 - DNA, 19 bp, Mus musculus
  siRNA target sequence for Inpp5d (NM_010566.1,2849-2867).
gatcaatccaaactacatt

SEQ ID NO: 589145 - DNA, 19 bp, Mus musculus
  siRNA target sequence for Inpp5d (NM_010566.1,2888-2906).
gcccctgcatgggaaatca

SEQ ID NO: 589146 - DNA, 19 bp, Mus musculus
  siRNA target sequence for Inpp5d (NM_010566.1,2889-2907).
cccctgcatgggaaatcaa

SEQ ID NO: 589147 - DNA, 19 bp, Mus musculus
  siRNA target sequence for Inpp5d (NM_010566.1,2946-2964).
gaccagctacccaaagact

SEQ ID NO: 589148 - DNA, 19 bp, Mus musculus
  siRNA target sequence for Inpp5d (NM_010566.1,3016-3034).
cacctctgtcgccaaagaa

SEQ ID NO: 589149 - DNA, 19 bp, Mus musculus
  siRNA target sequence for Inpp5d (NM_010566.1,3019-3037).
ctctgtcgccaaagaagtt

SEQ ID NO: 589150 - DNA, 19 bp, Mus musculus
  siRNA target sequence for Inpp5d (NM_010566.1,3140-3158).
gacgaagcccgagatgttt

SEQ ID NO: 589151 - DNA, 19 bp, Mus musculus
  siRNA target sequence for Inpp5d (NM_010566.1,3142-3160).
cgaagcccgagatgtttga

SEQ ID NO: 589152 - DNA, 19 bp, Mus musculus
  siRNA target sequence for Inpp5d (NM_010566.1,3155-3173).
gtttgagaacccactgtat

SEQ ID NO: 589153 - DNA, 19 bp, Mus musculus
  siRNA target sequence for Inpp5d (NM_010566.1,3258-3276).
ccagacccaggaatctcat

SEQ ID NO: 589154 - DNA, 19 bp, Mus musculus
  siRNA target sequence for Inpp5d (NM_010566.1,3369-3387).
cggatccgctcctttacct

SEQ ID NO: 589155 - DNA, 19 bp, Mus musculus
  siRNA target sequence for Inppl1 (NM_010567.1,559-577).
ctctgcgtcctgtatcaaa

SEQ ID NO: 589156 - DNA, 19 bp, Mus musculus
  siRNA target sequence for Inppl1 (NM_010567.1,563-581).
gcgtcctgtatcaaaagca

SEQ ID NO: 589157 - DNA, 19 bp, Mus musculus
  siRNA target sequence for Inppl1 (NM_010567.1,666-684).
gaccctgggtgagcttata

SEQ ID NO: 589158 - DNA, 19 bp, Mus musculus
  siRNA target sequence for Inppl1 (NM_010567.1,923-941).
gcactgtgtcacatgagta

SEQ ID NO: 589159 - DNA, 19 bp, Mus musculus
  siRNA target sequence for Inppl1 (NM_010567.1,928-946).
gtgtcacatgagtatctga

SEQ ID NO: 589160 - DNA, 19 bp, Mus musculus
  siRNA target sequence for Inppl1 (NM_010567.1,1113-1131).
catggtgacccgcctttta

SEQ ID NO: 589161 - DNA, 19 bp, Mus musculus
  siRNA target sequence for Inppl1 (NM_010567.1,1329-1347).
ggtgaagctggatgtaaca

SEQ ID NO: 589162 - DNA, 19 bp, Mus musculus
  siRNA target sequence for Inppl1 (NM_010567.1,1350-1368).
gggtgacctgaccaagatt

SEQ ID NO: 589163 - DNA, 19 bp, Mus musculus
  siRNA target sequence for Inppl1 (NM_010567.1,1477-1495).
cggatccggcagctcatta

SEQ ID NO: 589164 - DNA, 19 bp, Mus musculus
  siRNA target sequence for Inppl1 (NM_010567.1,1478-1496).
ggatccggcagctcattaa

SEQ ID NO: 589165 - DNA, 19 bp, Mus musculus
  siRNA target sequence for Inppl1 (NM_010567.1,1479-1497).
gatccggcagctcattaaa

SEQ ID NO: 589166 - DNA, 19 bp, Mus musculus
  siRNA target sequence for Inppl1 (NM_010567.1,1645-1663).
gacgagcccgacatgatct

SEQ ID NO: 589167 - DNA, 19 bp, Mus musculus
  siRNA target sequence for Inppl1 (NM_010567.1,1705-1723).
cccaaaaacgtgacatctt

SEQ ID NO: 589168 - DNA, 19 bp, Mus musculus
  siRNA target sequence for Inppl1 (NM_010567.1,1772-1790).
ctataccccacgatatcta

SEQ ID NO: 589169 - DNA, 19 bp, Mus musculus
  siRNA target sequence for Inppl1 (NM_010567.1,1777-1795).
ccccacgatatctatgtct

SEQ ID NO: 589170 - DNA, 19 bp, Mus musculus
  siRNA target sequence for Inppl1 (NM_010567.1,1853-1871).
gcctcaaggagcttacaga

SEQ ID NO: 589171 - DNA, 19 bp, Mus musculus
  siRNA target sequence for Inppl1 (NM_010567.1,1876-1894).
gattaccgtccgattgcta

SEQ ID NO: 589172 - DNA, 19 bp, Mus musculus
  siRNA target sequence for Inppl1 (NM_010567.1,2099-2117).
ctcggcggaaccagaatta

SEQ ID NO: 589173 - DNA, 19 bp, Mus musculus
  siRNA target sequence for Inppl1 (NM_010567.1,2222-2240).
gcttagacatggatatcca

SEQ ID NO: 589174 - DNA, 19 bp, Mus musculus
  siRNA target sequence for Inppl1 (NM_010567.1,2244-2262).
gatcctgaactacattagt

SEQ ID NO: 589175 - DNA, 19 bp, Mus musculus
  siRNA target sequence for Inppl1 (NM_010567.1,2325-2343).
ggtcttccttcgatttagt

SEQ ID NO: 589176 - DNA, 19 bp, Mus musculus
  siRNA target sequence for Inppl1 (NM_010567.1,2451-2469).
gtggtgtgaccggattcta

SEQ ID NO: 589177 - DNA, 19 bp, Mus musculus
  siRNA target sequence for Inppl1 (NM_010567.1,2462-2480).
ggattctatggaaatccta

SEQ ID NO: 589178 - DNA, 19 bp, Mus musculus
  siRNA target sequence for Inppl1 (NM_010567.1,2463-2481).
gattctatggaaatcctat

SEQ ID NO: 589179 - DNA, 19 bp, Mus musculus
  siRNA target sequence for Inppl1 (NM_010567.1,2493-2511).
catcatctgcaattcctat

SEQ ID NO: 589180 - DNA, 19 bp, Mus musculus
  siRNA target sequence for Inppl1 (NM_010567.1,2616-2634).
ctcagatcaagcctacatt

SEQ ID NO: 589181 - DNA, 19 bp, Mus musculus
  siRNA target sequence for Inppl1 (NM_010567.1,2618-2636).
cagatcaagcctacattga

SEQ ID NO: 589182 - DNA, 19 bp, Mus musculus
  siRNA target sequence for Inppl1 (NM_010567.1,2620-2638).
gatcaagcctacattgagt

SEQ ID NO: 589183 - DNA, 19 bp, Mus musculus
  siRNA target sequence for Inppl1 (NM_010567.1,2702-2720).
ctacctgcttggaagagta

SEQ ID NO: 589184 - DNA, 19 bp, Mus musculus
  siRNA target sequence for Inppl1 (NM_010567.1,2744-2762).
ctcagagcagcgacaacat

SEQ ID NO: 589185 - DNA, 19 bp, Mus musculus
  siRNA target sequence for Inppl1 (NM_010567.1,2874-2892).
ggatggctacgaatcatat

SEQ ID NO: 589186 - DNA, 19 bp, Mus musculus
  siRNA target sequence for Inppl1 (NM_010567.1,3033-3051).
ccgtgagcggctctatgaa

SEQ ID NO: 589187 - DNA, 19 bp, Mus musculus
  siRNA target sequence for Inppl1 (NM_010567.1,3039-3057).
gcggctctatgaatggatt

SEQ ID NO: 589188 - DNA, 19 bp, Mus musculus
  siRNA target sequence for Inppl1 (NM_010567.1,3040-3058).
cggctctatgaatggatta

SEQ ID NO: 589189 - DNA, 19 bp, Mus musculus
  siRNA target sequence for Inppl1 (NM_010567.1,3319-3337).
cccaagaacagcttcaata

SEQ ID NO: 589190 - DNA, 19 bp, Mus musculus
  siRNA target sequence for Inppl1 (NM_010567.1,3530-3548).
cgctgcctcctccagattt

SEQ ID NO: 589191 - DNA, 19 bp, Mus musculus
  siRNA target sequence for Inppl1 (NM_010567.1,3736-3754).
ggggatgaccggtcttgtt

SEQ ID NO: 589192 - DNA, 19 bp, Mus musculus
  siRNA target sequence for Pps (NM_008916.1,1051-1069).
gctgacactgaagaactat

SEQ ID NO: 589193 - DNA, 19 bp, Mus musculus
  siRNA target sequence for Pps (NM_008916.1,1109-1127).
gtcactggcacctttgact

SEQ ID NO: 589194 - DNA, 19 bp, Mus musculus
  siRNA target sequence for Pps (NM_008916.1,1149-1167).
ctgtcccactgatcactat

SEQ ID NO: 589195 - DNA, 19 bp, Mus musculus
  siRNA target sequence for Pps (NM_008916.1,1248-1266).
gggactggatcggactata

SEQ ID NO: 589196 - DNA, 19 bp, Mus musculus
  siRNA target sequence for Pps (NM_008916.1,1250-1268).
gactggatcggactataca

SEQ ID NO: 589197 - DNA, 19 bp, Mus musculus
  siRNA target sequence for Pps (NM_008916.1,1271-1289).
gtggggatgcgtcacatta

SEQ ID NO: 589198 - DNA, 19 bp, Mus musculus
  siRNA target sequence for Pps (NM_008916.1,1273-1291).
ggggatgcgtcacattaat

SEQ ID NO: 589199 - DNA, 19 bp, Mus musculus
  siRNA target sequence for Pps (NM_008916.1,1279-1297).
gcgtcacattaatgactat

SEQ ID NO: 589200 - DNA, 19 bp, Mus musculus
  siRNA target sequence for Pps (NM_008916.1,1281-1299).
gtcacattaatgactatgt

SEQ ID NO: 589201 - DNA, 19 bp, Mus musculus
  siRNA target sequence for Pps (NM_008916.1,1400-1418).
cttctctgttactatagca

SEQ ID NO: 589202 - DNA, 19 bp, Mus musculus
  siRNA target sequence for Pps (NM_008916.1,1431-1449).
ctgtagtggggataagtca

SEQ ID NO: 589203 - DNA, 19 bp, Mus musculus
  siRNA target sequence for Pps (NM_008916.1,1463-1481).
ccgattcgctcctttttga

SEQ ID NO: 589204 - DNA, 19 bp, Mus musculus
  siRNA target sequence for Pps (NM_008916.1,1465-1483).
gattcgctcctttttgaga

SEQ ID NO: 589205 - DNA, 19 bp, Mus musculus
  siRNA target sequence for 2610040E16Rik (NM_024194.2,131-149).
gaagcagcggccaactcaa

SEQ ID NO: 589206 - DNA, 19 bp, Mus musculus
  siRNA target sequence for 2610040E16Rik (NM_024194.2,134-152).
gcagcggccaactcaactt

SEQ ID NO: 589207 - DNA, 19 bp, Mus musculus
  siRNA target sequence for 2610040E16Rik (NM_024194.2,217-235).
gaggctaatcagaatcttt

SEQ ID NO: 589208 - DNA, 19 bp, Mus musculus
  siRNA target sequence for 2610040E16Rik (NM_024194.2,221-239).
ctaatcagaatctttcatt

SEQ ID NO: 589209 - DNA, 19 bp, Mus musculus
  siRNA target sequence for 2610040E16Rik (NM_024194.2,269-287).
cagatctgaccaaactcat

SEQ ID NO: 589210 - DNA, 19 bp, Mus musculus
  siRNA target sequence for 2610040E16Rik (NM_024194.2,285-303).
catcatctccagcaataaa

SEQ ID NO: 589211 - DNA, 19 bp, Mus musculus
  siRNA target sequence for 2610040E16Rik (NM_024194.2,333-351).
cttgcctgcccttactgtt

SEQ ID NO: 589212 - DNA, 19 bp, Mus musculus
  siRNA target sequence for 2610040E16Rik (NM_024194.2,336-354).
gcctgcccttactgttctt

SEQ ID NO: 589213 - DNA, 19 bp, Mus musculus
  siRNA target sequence for 2610040E16Rik (NM_024194.2,340-358).
gcccttactgttcttgata

SEQ ID NO: 589214 - DNA, 19 bp, Mus musculus
  siRNA target sequence for 2610040E16Rik (NM_024194.2,341-359).
cccttactgttcttgatat

SEQ ID NO: 589215 - DNA, 19 bp, Mus musculus
  siRNA target sequence for 2610040E16Rik (NM_024194.2,392-410).
ctataagagagctagacaa

SEQ ID NO: 589216 - DNA, 19 bp, Mus musculus
  siRNA target sequence for 2610040E16Rik (NM_024194.2,421-439).
cttaatgtcagccataaca

SEQ ID NO: 589217 - DNA, 19 bp, Mus musculus
  siRNA target sequence for 2610040E16Rik (NM_024194.2,518-536).
gcatccccgagggatttga

SEQ ID NO: 589218 - DNA, 19 bp, Mus musculus
  siRNA target sequence for 2610040E16Rik (NM_024194.2,537-555).
gcatctttcctgcttagaa

SEQ ID NO: 589219 - DNA, 19 bp, Mus musculus
  siRNA target sequence for 2610040E16Rik (NM_024194.2,615-633).
cagtctgttgcgactcaat

SEQ ID NO: 589220 - DNA, 19 bp, Mus musculus
  siRNA target sequence for 2610040E16Rik (NM_024194.2,617-635).
gtctgttgcgactcaatct

SEQ ID NO: 589221 - DNA, 19 bp, Mus musculus
  siRNA target sequence for 2610040E16Rik (NM_024194.2,619-637).
ctgttgcgactcaatcttt

SEQ ID NO: 589222 - DNA, 19 bp, Mus musculus
  siRNA target sequence for 2610040E16Rik (NM_024194.2,750-768).
ggaatcactggaattgctt

SEQ ID NO: 589223 - DNA, 19 bp, Mus musculus
  siRNA target sequence for 2610040E16Rik (NM_024194.2,766-784).
ctttatttgcggaggaata

SEQ ID NO: 589224 - DNA, 19 bp, Mus musculus
  siRNA target sequence for 2610040E16Rik (NM_024194.2,780-798).
gaataaattgcgtgttcta

SEQ ID NO: 589225 - DNA, 19 bp, Mus musculus
  siRNA target sequence for 2610040E16Rik (NM_024194.2,815-833).
gtaggcagctaaaggaatt

SEQ ID NO: 589226 - DNA, 19 bp, Mus musculus
  siRNA target sequence for 2610040E16Rik (NM_024194.2,818-836).
ggcagctaaaggaattaca

SEQ ID NO: 589227 - DNA, 19 bp, Mus musculus
  siRNA target sequence for 2610040E16Rik (NM_024194.2,981-999).
gagcaacaatgatattagt

SEQ ID NO: 589228 - DNA, 19 bp, Mus musculus
  siRNA target sequence for 2610040E16Rik (NM_024194.2,1017-1035).
gggaaatcttcatttgaaa

SEQ ID NO: 589229 - DNA, 19 bp, Mus musculus
  siRNA target sequence for 2610040E16Rik (NM_024194.2,1032-1050).
gaaattcctggcactagaa

SEQ ID NO: 589230 - DNA, 19 bp, Mus musculus
  siRNA target sequence for 2610040E16Rik (NM_024194.2,1067-1085).
ccattcgaagagaaattat

SEQ ID NO: 589231 - DNA, 19 bp, Mus musculus
  siRNA target sequence for 2610040E16Rik (NM_024194.2,1068-1086).
cattcgaagagaaattata

SEQ ID NO: 589232 - DNA, 19 bp, Mus musculus
  siRNA target sequence for 2610040E16Rik (NM_024194.2,1072-1090).
cgaagagaaattatagcta

SEQ ID NO: 589233 - DNA, 19 bp, Mus musculus
  siRNA target sequence for 2610040E16Rik (NM_024194.2,1073-1091).
gaagagaaattatagctaa

SEQ ID NO: 589234 - DNA, 19 bp, Mus musculus
  siRNA target sequence for 2610040E16Rik (NM_024194.2,1094-1112).
gaactcaagaagttctaaa

SEQ ID NO: 589235 - DNA, 19 bp, Mus musculus
  siRNA target sequence for 2610040E16Rik (NM_024194.2,1119-1137).
gcgcagcaagatcaaagat

SEQ ID NO: 589236 - DNA, 19 bp, Mus musculus
  siRNA target sequence for 2610040E16Rik (NM_024194.2,1176-1194).
catgacactaccaagtgaa

SEQ ID NO: 589237 - DNA, 19 bp, Mus musculus
  siRNA target sequence for 2610040E16Rik (NM_024194.2,1214-1232).
ccatagccacactaaagct

SEQ ID NO: 589238 - DNA, 19 bp, Mus musculus
  siRNA target sequence for 2610040E16Rik (NM_024194.2,1225-1243).
ctaaagctgctagattata

SEQ ID NO: 589239 - DNA, 19 bp, Mus musculus
  siRNA target sequence for 2610040E16Rik (NM_024194.2,1230-1248).
gctgctagattatagtgat

SEQ ID NO: 589240 - DNA, 19 bp, Mus musculus
  siRNA target sequence for 2610040E16Rik (NM_024194.2,1263-1281).
gattcctgatgacctattt

SEQ ID NO: 589241 - DNA, 19 bp, Mus musculus
  siRNA target sequence for 2610040E16Rik (NM_024194.2,1337-1355).
gcgagattccacaaaggat

SEQ ID NO: 589242 - DNA, 19 bp, Mus musculus
  siRNA target sequence for 2610040E16Rik (NM_024194.2,1338-1356).
cgagattccacaaaggatt

SEQ ID NO: 589243 - DNA, 19 bp, Mus musculus
  siRNA target sequence for 2610040E16Rik (NM_024194.2,1369-1387).
gaaatggtgttggatatca

SEQ ID NO: 589244 - DNA, 19 bp, Mus musculus
  siRNA target sequence for 2610040E16Rik (NM_024194.2,1380-1398).
ggatatcaacctcagtttt

SEQ ID NO: 589245 - DNA, 19 bp, Mus musculus
  siRNA target sequence for 2610040E16Rik (NM_024194.2,1381-1399).
gatatcaacctcagtttta

SEQ ID NO: 589246 - DNA, 19 bp, Mus musculus
  siRNA target sequence for 2610040E16Rik (NM_024194.2,1390-1408).
ctcagttttaacaagcttt

SEQ ID NO: 589247 - DNA, 19 bp, Mus musculus
  siRNA target sequence for 2610040E16Rik (NM_024194.2,1425-1443).
gttatgcttgcttcagaaa

SEQ ID NO: 589248 - DNA, 19 bp, Mus musculus
  siRNA target sequence for 2610040E16Rik (NM_024194.2,1434-1452).
gcttcagaaattgacattt

SEQ ID NO: 589249 - DNA, 19 bp, Mus musculus
  siRNA target sequence for 2610040E16Rik (NM_024194.2,1513-1531).
ctgcaaacgatcaatcttt

SEQ ID NO: 589250 - DNA, 19 bp, Mus musculus
  siRNA target sequence for 2610040E16Rik (NM_024194.2,1520-1538).
cgatcaatctttcctttaa

SEQ ID NO: 589251 - DNA, 19 bp, Mus musculus
  siRNA target sequence for 2610040E16Rik (NM_024194.2,1532-1550).
cctttaacaggttcaaagt

SEQ ID NO: 589252 - DNA, 19 bp, Mus musculus
  siRNA target sequence for 2610040E16Rik (NM_024194.2,1588-1606).
gcggttctgatcagtaaca

SEQ ID NO: 589253 - DNA, 19 bp, Mus musculus
  siRNA target sequence for 2610040E16Rik (NM_024194.2,1589-1607).
cggttctgatcagtaacaa

SEQ ID NO: 589254 - DNA, 19 bp, Mus musculus
  siRNA target sequence for 2610040E16Rik (NM_024194.2,1621-1639).
gtggaccctcagaagatga

SEQ ID NO: 589255 - DNA, 19 bp, Mus musculus
  siRNA target sequence for 2610040E16Rik (NM_024194.2,1763-1781).
ctcgagcggccatattaat

SEQ ID NO: 589256 - DNA, 19 bp, Mus musculus
  siRNA target sequence for 2610040E16Rik (NM_024194.2,1765-1783).
cgagcggccatattaatga

SEQ ID NO: 589257 - DNA, 19 bp, Mus musculus
  siRNA target sequence for 2610040E16Rik (NM_024194.2,1766-1784).
gagcggccatattaatgaa

SEQ ID NO: 589258 - DNA, 19 bp, Mus musculus
  siRNA target sequence for 2610040E16Rik (NM_024194.2,1793-1811).
ctgctgtgctggagtattt

SEQ ID NO: 589259 - DNA, 19 bp, Mus musculus
  siRNA target sequence for Acp2 (NM_007387.1,95-113).
ccggagtctacgctttgtt

SEQ ID NO: 589260 - DNA, 19 bp, Mus musculus
  siRNA target sequence for Acp2 (NM_007387.1,96-114).
cggagtctacgctttgtta

SEQ ID NO: 589261 - DNA, 19 bp, Mus musculus
  siRNA target sequence for Acp2 (NM_007387.1,100-118).
gtctacgctttgttacctt

SEQ ID NO: 589262 - DNA, 19 bp, Mus musculus
  siRNA target sequence for Acp2 (NM_007387.1,167-185).
cccctatcaggaagagaaa

SEQ ID NO: 589263 - DNA, 19 bp, Mus musculus
  siRNA target sequence for Acp2 (NM_007387.1,196-214).
gatttggtcagctaaccaa

SEQ ID NO: 589264 - DNA, 19 bp, Mus musculus
  siRNA target sequence for Acp2 (NM_007387.1,290-308).
ccacaggcaagaggtttat

SEQ ID NO: 589265 - DNA, 19 bp, Mus musculus
  siRNA target sequence for Acp2 (NM_007387.1,392-410).
cttcaaccctaacatttca

SEQ ID NO: 589266 - DNA, 19 bp, Mus musculus
  siRNA target sequence for Acp2 (NM_007387.1,454-472).
ggttgctgaagtttccttt

SEQ ID NO: 589267 - DNA, 19 bp, Mus musculus
  siRNA target sequence for Acp2 (NM_007387.1,475-493).
gtccatgtccccgttatga

SEQ ID NO: 589268 - DNA, 19 bp, Mus musculus
  siRNA target sequence for Acp2 (NM_007387.1,525-543).
gagtatcagaacagaagta

SEQ ID NO: 589269 - DNA, 19 bp, Mus musculus
  siRNA target sequence for Acp2 (NM_007387.1,527-545).
gtatcagaacagaagtatt

SEQ ID NO: 589270 - DNA, 19 bp, Mus musculus
  siRNA target sequence for Acp2 (NM_007387.1,606-624).
gagaccatctggaatgtgt

SEQ ID NO: 589271 - DNA, 19 bp, Mus musculus
  siRNA target sequence for Acp2 (NM_007387.1,697-715).
gtctgagccagctaaagga

SEQ ID NO: 589272 - DNA, 19 bp, Mus musculus
  siRNA target sequence for Acp2 (NM_007387.1,739-757).
ggatccacgagcaagtaca

SEQ ID NO: 589273 - DNA, 19 bp, Mus musculus
  siRNA target sequence for Acp2 (NM_007387.1,780-798).
gttctgctggctcagatat

SEQ ID NO: 589274 - DNA, 19 bp, Mus musculus
  siRNA target sequence for Acp2 (NM_007387.1,836-854).
ccctaagcttctggtttat

SEQ ID NO: 589275 - DNA, 19 bp, Mus musculus
  siRNA target sequence for Acp2 (NM_007387.1,837-855).
cctaagcttctggtttatt

SEQ ID NO: 589276 - DNA, 19 bp, Mus musculus
  siRNA target sequence for Acp2 (NM_007387.1,974-992).
ctcagtcgagatgtacttt

SEQ ID NO: 589277 - DNA, 19 bp, Mus musculus
  siRNA target sequence for Acp2 (NM_007387.1,1051-1069).
gcccactgcaggatttcct

SEQ ID NO: 589278 - DNA, 19 bp, Mus musculus
  siRNA target sequence for Acp2 (NM_007387.1,1109-1127).
ggagtgccagctagcaaat

SEQ ID NO: 589279 - DNA, 19 bp, Mus musculus
  siRNA target sequence for Acp2 (NM_007387.1,1112-1130).
gtgccagctagcaaatgat

SEQ ID NO: 589280 - DNA, 19 bp, Mus musculus
  siRNA target sequence for Acp2 (NM_007387.1,1115-1133).
ccagctagcaaatgatact

SEQ ID NO: 589281 - DNA, 19 bp, Mus musculus
  siRNA target sequence for Acp5 (NM_007388.1,153-171).
gctgggcctacaaatcata

SEQ ID NO: 589282 - DNA, 19 bp, Mus musculus
  siRNA target sequence for Acp5 (NM_007388.1,154-172).
ctgggcctacaaatcatat

SEQ ID NO: 589283 - DNA, 19 bp, Mus musculus
  siRNA target sequence for Acp5 (NM_007388.1,317-335).
cgatgggcgctgacttcat

SEQ ID NO: 589284 - DNA, 19 bp, Mus musculus
  siRNA target sequence for Acp5 (NM_007388.1,322-340).
ggcgctgacttcatcatgt

SEQ ID NO: 589285 - DNA, 19 bp, Mus musculus
  siRNA target sequence for Acp5 (NM_007388.1,341-359).
ctctgggggacaatttcta

SEQ ID NO: 589286 - DNA, 19 bp, Mus musculus
  siRNA target sequence for Acp5 (NM_007388.1,343-361).
ctgggggacaatttctact

SEQ ID NO: 589287 - DNA, 19 bp, Mus musculus
  siRNA target sequence for Acp5 (NM_007388.1,346-364).
ggggacaatttctacttca

SEQ ID NO: 589288 - DNA, 19 bp, Mus musculus
  siRNA target sequence for Acp5 (NM_007388.1,483-501).
caacgtctctgcacagatt

SEQ ID NO: 589289 - DNA, 19 bp, Mus musculus
  siRNA target sequence for Acp5 (NM_007388.1,487-505).
gtctctgcacagattgcat

SEQ ID NO: 589290 - DNA, 19 bp, Mus musculus
  siRNA target sequence for Acp5 (NM_007388.1,493-511).
gcacagattgcatactcta

SEQ ID NO: 589291 - DNA, 19 bp, Mus musculus
  siRNA target sequence for Acp5 (NM_007388.1,546-564).
ctaccgtttgcgcttcaaa

SEQ ID NO: 589292 - DNA, 19 bp, Mus musculus
  siRNA target sequence for Acp5 (NM_007388.1,721-739).
gccaaggaggactacgttt

SEQ ID NO: 589293 - DNA, 19 bp, Mus musculus
  siRNA target sequence for Acp5 (NM_007388.1,722-740).
ccaaggaggactacgtttt

SEQ ID NO: 589294 - DNA, 19 bp, Mus musculus
  siRNA target sequence for Acp5 (NM_007388.1,785-803).
ccacgcgctgccttgtcaa

SEQ ID NO: 589295 - DNA, 19 bp, Mus musculus
  siRNA target sequence for Acp5 (NM_007388.1,788-806).
cgcgctgccttgtcaagaa

SEQ ID NO: 589296 - DNA, 19 bp, Mus musculus
  siRNA target sequence for Acp5 (NM_007388.1,790-808).
cgctgccttgtcaagaact

SEQ ID NO: 589297 - DNA, 19 bp, Mus musculus
  siRNA target sequence for Acp5 (NM_007388.1,804-822).
gaacttgcgaccattgtta

SEQ ID NO: 589298 - DNA, 19 bp, Mus musculus
  siRNA target sequence for Acp5 (NM_007388.1,967-985).
ggctacttgcggtttcact

SEQ ID NO: 589299 - DNA, 19 bp, Mus musculus
  siRNA target sequence for Acp5 (NM_007388.1,968-986).
gctacttgcggtttcacta

SEQ ID NO: 589300 - DNA, 19 bp, Mus musculus
  siRNA target sequence for Acp5 (NM_007388.1,969-987).
ctacttgcggtttcactat

SEQ ID NO: 589301 - DNA, 19 bp, Mus musculus
  siRNA target sequence for Acp5 (NM_007388.1,1023-1041).
ggagataagccccaaagaa

SEQ ID NO: 589302 - DNA, 19 bp, Mus musculus
  siRNA target sequence for Acp5 (NM_007388.1,1024-1042).
gagataagccccaaagaaa

SEQ ID NO: 589303 - DNA, 19 bp, Mus musculus
  siRNA target sequence for Acp5 (NM_007388.1,1069-1087).
ggaaaatcactctttaaga

SEQ ID NO: 589304 - DNA, 19 bp, Mus musculus
  siRNA target sequence for Acp6 (NM_019800.1,72-90).
gtggaaccccaagctttta

SEQ ID NO: 589305 - DNA, 19 bp, Mus musculus
  siRNA target sequence for Acp6 (NM_019800.1,103-121).
caaactcggtttgattaca

SEQ ID NO: 589306 - DNA, 19 bp, Mus musculus
  siRNA target sequence for Acp6 (NM_019800.1,145-163).
ccgaaacctcattctcatt

SEQ ID NO: 589307 - DNA, 19 bp, Mus musculus
  siRNA target sequence for Acp6 (NM_019800.1,158-176).
ctcattacgacactgaata

SEQ ID NO: 589308 - DNA, 19 bp, Mus musculus
  siRNA target sequence for Acp6 (NM_019800.1,403-421).
gggtctgccgtcatccata

SEQ ID NO: 589309 - DNA, 19 bp, Mus musculus
  siRNA target sequence for Acp6 (NM_019800.1,445-463).
ctgtaccccaactatcaga

SEQ ID NO: 589310 - DNA, 19 bp, Mus musculus
  siRNA target sequence for Acp6 (NM_019800.1,467-485).
gctgggtcctgaaagagaa

SEQ ID NO: 589311 - DNA, 19 bp, Mus musculus
  siRNA target sequence for Acp6 (NM_019800.1,554-572).
ccggggtgggcatcaacaa

SEQ ID NO: 589312 - DNA, 19 bp, Mus musculus
  siRNA target sequence for Acp6 (NM_019800.1,870-888).
gttggccttggggattttt

SEQ ID NO: 589313 - DNA, 19 bp, Mus musculus
  siRNA target sequence for Acp6 (NM_019800.1,880-898).
gggatttttgaccaaaaat

SEQ ID NO: 589314 - DNA, 19 bp, Mus musculus
  siRNA target sequence for Acp6 (NM_019800.1,1025-1043).
cactggacaagttcttgaa

SEQ ID NO: 589315 - DNA, 19 bp, Mus musculus
  siRNA target sequence for Acp6 (NM_019800.1,1081-1099).
cgaacactctgctccaaaa

SEQ ID NO: 589316 - DNA, 19 bp, Mus musculus
  siRNA target sequence for Acp6 (NM_019800.1,1089-1107).
ctgctccaaaacacgaata

SEQ ID NO: 589317 - DNA, 19 bp, Mus musculus
  siRNA target sequence for Acp6 (NM_019800.1,1091-1109).
gctccaaaacacgaatagt

SEQ ID NO: 589318 - DNA, 19 bp, Mus musculus
  siRNA target sequence for Acp6 (NM_019800.1,1094-1112).
ccaaaacacgaatagtaga

SEQ ID NO: 589319 - DNA, 19 bp, Mus musculus
  siRNA target sequence for Acp6 (NM_019800.1,1095-1113).
caaaacacgaatagtagaa

SEQ ID NO: 589320 - DNA, 19 bp, Mus musculus
  siRNA target sequence for Acpp (NM_019807.1,158-176).
cccatcgagacctttccta

SEQ ID NO: 589321 - DNA, 19 bp, Mus musculus
  siRNA target sequence for Acpp (NM_019807.1,174-192).
ctaccgaccccattacaga

SEQ ID NO: 589322 - DNA, 19 bp, Mus musculus
  siRNA target sequence for Acpp (NM_019807.1,195-213).
cctcgtggccacaaggatt

SEQ ID NO: 589323 - DNA, 19 bp, Mus musculus
  siRNA target sequence for Acpp (NM_019807.1,196-214).
ctcgtggccacaaggattt

SEQ ID NO: 589324 - DNA, 19 bp, Mus musculus
  siRNA target sequence for Acpp (NM_019807.1,250-268).
cgaacttggaagttatata

SEQ ID NO: 589325 - DNA, 19 bp, Mus musculus
  siRNA target sequence for Acpp (NM_019807.1,270-288).
ggaaaagatacggaagatt

SEQ ID NO: 589326 - DNA, 19 bp, Mus musculus
  siRNA target sequence for Acpp (NM_019807.1,276-294).
gatacggaagattcttgaa

SEQ ID NO: 589327 - DNA, 19 bp, Mus musculus
  siRNA target sequence for Acpp (NM_019807.1,292-310).
gaacgacacctataagcat

SEQ ID NO: 589328 - DNA, 19 bp, Mus musculus
  siRNA target sequence for Acpp (NM_019807.1,300-318).
cctataagcatgatcagat

SEQ ID NO: 589329 - DNA, 19 bp, Mus musculus
  siRNA target sequence for Acpp (NM_019807.1,355-373).
gagtgctatgacaaacctt

SEQ ID NO: 589330 - DNA, 19 bp, Mus musculus
  siRNA target sequence for Acpp (NM_019807.1,487-505).
cagagactgccctcgtttt

SEQ ID NO: 589331 - DNA, 19 bp, Mus musculus
  siRNA target sequence for Acpp (NM_019807.1,489-507).
gagactgccctcgttttga

SEQ ID NO: 589332 - DNA, 19 bp, Mus musculus
  siRNA target sequence for Acpp (NM_019807.1,493-511).
ctgccctcgttttgaagaa

SEQ ID NO: 589333 - DNA, 19 bp, Mus musculus
  siRNA target sequence for Acpp (NM_019807.1,498-516).
ctcgttttgaagaactcaa

SEQ ID NO: 589334 - DNA, 19 bp, Mus musculus
  siRNA target sequence for Acpp (NM_019807.1,550-568).
gaggcttcatccatataaa

SEQ ID NO: 589335 - DNA, 19 bp, Mus musculus
  siRNA target sequence for Acpp (NM_019807.1,554-572).
cttcatccatataaaagct

SEQ ID NO: 589336 - DNA, 19 bp, Mus musculus
  siRNA target sequence for Acpp (NM_019807.1,589-607).
gtcgctgtcgggattcgat

SEQ ID NO: 589337 - DNA, 19 bp, Mus musculus
  siRNA target sequence for Acpp (NM_019807.1,604-622).
cgatgaccaggatcttttt

SEQ ID NO: 589338 - DNA, 19 bp, Mus musculus
  siRNA target sequence for Acpp (NM_019807.1,696-714).
ccgaggacgccatgattaa

SEQ ID NO: 589339 - DNA, 19 bp, Mus musculus
  siRNA target sequence for Acpp (NM_019807.1,698-716).
gaggacgccatgattaagt

SEQ ID NO: 589340 - DNA, 19 bp, Mus musculus
  siRNA target sequence for Acpp (NM_019807.1,701-719).
gacgccatgattaagttga

SEQ ID NO: 589341 - DNA, 19 bp, Mus musculus
  siRNA target sequence for Acpp (NM_019807.1,703-721).
cgccatgattaagttgaaa

SEQ ID NO: 589342 - DNA, 19 bp, Mus musculus
  siRNA target sequence for Acpp (NM_019807.1,740-758).
ctgctatcactttatggaa

SEQ ID NO: 589343 - DNA, 19 bp, Mus musculus
  siRNA target sequence for Acpp (NM_019807.1,742-760).
gctatcactttatggaatt

SEQ ID NO: 589344 - DNA, 19 bp, Mus musculus
  siRNA target sequence for Acpp (NM_019807.1,747-765).
cactttatggaattcacaa

SEQ ID NO: 589345 - DNA, 19 bp, Mus musculus
  siRNA target sequence for Acpp (NM_019807.1,794-812).
ggcgtcctggtcaatgaaa

SEQ ID NO: 589346 - DNA, 19 bp, Mus musculus
  siRNA target sequence for Acpp (NM_019807.1,795-813).
gcgtcctggtcaatgaaat

SEQ ID NO: 589347 - DNA, 19 bp, Mus musculus
  siRNA target sequence for Acpp (NM_019807.1,837-855).
ctcagccacagaagtataa

SEQ ID NO: 589348 - DNA, 19 bp, Mus musculus
  siRNA target sequence for Acpp (NM_019807.1,902-920).
cagatggcgctagatgttt

SEQ ID NO: 589349 - DNA, 19 bp, Mus musculus
  siRNA target sequence for Acpp (NM_019807.1,904-922).
gatggcgctagatgtttat

SEQ ID NO: 589350 - DNA, 19 bp, Mus musculus
  siRNA target sequence for Acpp (NM_019807.1,907-925).
ggcgctagatgtttataat

SEQ ID NO: 589351 - DNA, 19 bp, Mus musculus
  siRNA target sequence for Acpp (NM_019807.1,910-928).
gctagatgtttataatgga

SEQ ID NO: 589352 - DNA, 19 bp, Mus musculus
  siRNA target sequence for Acpp (NM_019807.1,951-969).
gccacatgatggaattgta

SEQ ID NO: 589353 - DNA, 19 bp, Mus musculus
  siRNA target sequence for B430315C20Rik (NM_178795.3,159-177).
gcactacggcccacttctt

SEQ ID NO: 589354 - DNA, 19 bp, Mus musculus
  siRNA target sequence for B430315C20Rik (NM_178795.3,199-217).
gttgggcacctgtggaata

SEQ ID NO: 589355 - DNA, 19 bp, Mus musculus
  siRNA target sequence for B430315C20Rik (NM_178795.3,331-349).
caagccaatgacccaaatt

SEQ ID NO: 589356 - DNA, 19 bp, Mus musculus
  siRNA target sequence for B430315C20Rik (NM_178795.3,336-354).
caatgacccaaattctaga

SEQ ID NO: 589357 - DNA, 19 bp, Mus musculus
  siRNA target sequence for B430315C20Rik (NM_178795.3,356-374).
cgactctgcagatttgact

SEQ ID NO: 589358 - DNA, 19 bp, Mus musculus
  siRNA target sequence for B430315C20Rik (NM_178795.3,395-413).
ggagaagatgtgatcctaa

SEQ ID NO: 589359 - DNA, 19 bp, Mus musculus
  siRNA target sequence for B430315C20Rik (NM_178795.3,506-524).
cttcgaaaccccttcctta

SEQ ID NO: 589360 - DNA, 19 bp, Mus musculus
  siRNA target sequence for B430315C20Rik (NM_178795.3,530-548).
gacttggccatgcagtatt

SEQ ID NO: 589361 - DNA, 19 bp, Mus musculus
  siRNA target sequence for B430315C20Rik (NM_178795.3,542-560).
cagtattacatccaagata

SEQ ID NO: 589362 - DNA, 19 bp, Mus musculus
  siRNA target sequence for B430315C20Rik (NM_178795.3,580-598).
cctacaggaggaaggtatt

SEQ ID NO: 589363 - DNA, 19 bp, Mus musculus
  siRNA target sequence for B430315C20Rik (NM_178795.3,594-612).
gtattgatctgccaagata

SEQ ID NO: 589364 - DNA, 19 bp, Mus musculus
  siRNA target sequence for B430315C20Rik (NM_178795.3,910-928).
cacagtggggccagattat

SEQ ID NO: 589365 - DNA, 19 bp, Mus musculus
  siRNA target sequence for B430315C20Rik (NM_178795.3,1044-1062).
ggaaggtctgcgtagcttt

SEQ ID NO: 589366 - DNA, 19 bp, Mus musculus
  siRNA target sequence for B430315C20Rik (NM_178795.3,1045-1063).
gaaggtctgcgtagctttt

SEQ ID NO: 589367 - DNA, 19 bp, Mus musculus
  siRNA target sequence for B430315C20Rik (NM_178795.3,1121-1139).
gacgtcaatggctttagct

SEQ ID NO: 589368 - DNA, 19 bp, Mus musculus
  siRNA target sequence for B430315C20Rik (NM_178795.3,1147-1165).
gaactcgatgaagtactat

SEQ ID NO: 589369 - DNA, 19 bp, Mus musculus
  siRNA target sequence for B430315C20Rik (NM_178795.3,1335-1353).
gaaccccaaagcagaagat

SEQ ID NO: 589370 - DNA, 19 bp, Mus musculus
  siRNA target sequence for B430315C20Rik (NM_178795.3,1364-1382).
gtgacgcacccgaggtttt

SEQ ID NO: 589371 - DNA, 19 bp, Mus musculus
  siRNA target sequence for B430315C20Rik (NM_178795.3,1366-1384).
gacgcacccgaggtttttt

SEQ ID NO: 589372 - DNA, 19 bp, Mus musculus
  siRNA target sequence for B430315C20Rik (NM_178795.3,1406-1424).
ggatataagacgggaaaat

SEQ ID NO: 589373 - DNA, 19 bp, Mus musculus
  siRNA target sequence for B430315C20Rik (NM_178795.3,1407-1425).
gatataagacgggaaaatt

SEQ ID NO: 589374 - DNA, 19 bp, Mus musculus
  siRNA target sequence for B430315C20Rik (NM_178795.3,1454-1472).
gaggtgctggacattacga

SEQ ID NO: 589375 - DNA, 19 bp, Mus musculus
  siRNA target sequence for B430315C20Rik (NM_178795.3,1568-1586).
ggtcacttctcaggtatta

SEQ ID NO: 589376 - DNA, 19 bp, Mus musculus
  siRNA target sequence for B430315C20Rik (NM_178795.3,1569-1587).
gtcacttctcaggtattaa

SEQ ID NO: 589377 - DNA, 19 bp, Mus musculus
  siRNA target sequence for B430315C20Rik (NM_178795.3,1609-1627).
ctacccccacggagtgaaa

SEQ ID NO: 589378 - DNA, 19 bp, Mus musculus
  siRNA target sequence for B430315C20Rik (NM_178795.3,1632-1650).
cgaacgaggggcaagatct

SEQ ID NO: 589379 - DNA, 19 bp, Mus musculus
  siRNA target sequence for B430315C20Rik (NM_178795.3,1832-1850).
cgtcatgacctcaagatct

SEQ ID NO: 589380 - DNA, 19 bp, Mus musculus
  siRNA target sequence for B430315C20Rik (NM_178795.3,1920-1938).
gggagcttacacccatttt

SEQ ID NO: 589381 - DNA, 19 bp, Mus musculus
  siRNA target sequence for B430315C20Rik (NM_178795.3,1924-1942).
gcttacacccattttggta

SEQ ID NO: 589382 - DNA, 19 bp, Mus musculus
  siRNA target sequence for B430315C20Rik (NM_178795.3,1951-1969).
gaagagtgccaacatgaat

SEQ ID NO: 589383 - DNA, 19 bp, Mus musculus
  siRNA target sequence for B430315C20Rik (NM_178795.3,2024-2042).
gcgcgactgcaccacattt

SEQ ID NO: 589384 - DNA, 19 bp, Mus musculus
  siRNA target sequence for B430315C20Rik (NM_178795.3,2025-2043).
cgcgactgcaccacatttt

SEQ ID NO: 589385 - DNA, 19 bp, Mus musculus
  siRNA target sequence for B430315C20Rik (NM_178795.3,2028-2046).
gactgcaccacattttgca

SEQ ID NO: 589386 - DNA, 19 bp, Mus musculus
  siRNA target sequence for B430315C20Rik (NM_178795.3,2111-2129).
ctcaactccatgtctgtaa

SEQ ID NO: 589387 - DNA, 19 bp, Mus musculus
  siRNA target sequence for B430315C20Rik (NM_178795.3,2158-2176).
ggtatttgccctgattgaa

SEQ ID NO: 589388 - DNA, 19 bp, Mus musculus
  siRNA target sequence for B430315C20Rik (NM_178795.3,2159-2177).
gtatttgccctgattgaaa

SEQ ID NO: 589389 - DNA, 19 bp, Mus musculus
  siRNA target sequence for B430315C20Rik (NM_178795.3,2278-2296).
caaactagagcgtgacttt

SEQ ID NO: 589390 - DNA, 19 bp, Mus musculus
  siRNA target sequence for B430315C20Rik (NM_178795.3,2288-2306).
cgtgactttcgacaaaaga

SEQ ID NO: 589391 - DNA, 19 bp, Mus musculus
  siRNA target sequence for B430315C20Rik (NM_178795.3,2312-2330).
cgctatgatatcagtaaga

SEQ ID NO: 589392 - DNA, 19 bp, Mus musculus
  siRNA target sequence for B430315C20Rik (NM_178795.3,2313-2331).
gctatgatatcagtaagat

SEQ ID NO: 589393 - DNA, 19 bp, Mus musculus
  siRNA target sequence for B430315C20Rik (NM_178795.3,2325-2343).
gtaagatccctgatatcta

SEQ ID NO: 589394 - DNA, 19 bp, Mus musculus
  siRNA target sequence for B430315C20Rik (NM_178795.3,2341-2359).
ctatgactgtgtcaagtat

SEQ ID NO: 589395 - DNA, 19 bp, Mus musculus
  siRNA target sequence for B430315C20Rik (NM_178795.3,2404-2422).
gttactccgtctttccaaa

SEQ ID NO: 589396 - DNA, 19 bp, Mus musculus
  siRNA target sequence for B430315C20Rik (NM_178795.3,2505-2523).
cactgctgcggaaaatcct

SEQ ID NO: 589397 - DNA, 19 bp, Mus musculus
  siRNA target sequence for B430315C20Rik (NM_178795.3,2612-2630).
gttcgaactcggctctatt

SEQ ID NO: 589398 - DNA, 19 bp, Mus musculus
  siRNA target sequence for B430315C20Rik (NM_178795.3,2615-2633).
cgaactcggctctatttca

SEQ ID NO: 589399 - DNA, 19 bp, Mus musculus
  siRNA target sequence for B430315C20Rik (NM_178795.3,2717-2735).
cgagccttggcttatctca

SEQ ID NO: 589400 - DNA, 19 bp, Mus musculus
  siRNA target sequence for B430315C20Rik (NM_178795.3,2825-2843).
catgtggagctacatttca

SEQ ID NO: 589401 - DNA, 19 bp, Mus musculus
  siRNA target sequence for B430315C20Rik (NM_178795.3,2933-2951).
gatccaggcagcattgaga

SEQ ID NO: 589402 - DNA, 19 bp, Mus musculus
  siRNA target sequence for B430315C20Rik (NM_178795.3,3039-3057).
gatcacccctcattcgtaa

SEQ ID NO: 589403 - DNA, 19 bp, Mus musculus
  siRNA target sequence for B430315C20Rik (NM_178795.3,3044-3062).
cccctcattcgtaatcgaa

SEQ ID NO: 589404 - DNA, 19 bp, Mus musculus
  siRNA target sequence for B430315C20Rik (NM_178795.3,3045-3063).
ccctcattcgtaatcgaaa

SEQ ID NO: 589405 - DNA, 19 bp, Mus musculus
  siRNA target sequence for B430315C20Rik (NM_178795.3,3046-3064).
cctcattcgtaatcgaaaa

SEQ ID NO: 589406 - DNA, 19 bp, Mus musculus
  siRNA target sequence for B430315C20Rik (NM_178795.3,3049-3067).
cattcgtaatcgaaaagct

SEQ ID NO: 589407 - DNA, 19 bp, Mus musculus
  siRNA target sequence for B430315C20Rik (NM_178795.3,3113-3131).
ggctaccgtctgttttcat

SEQ ID NO: 589408 - DNA, 19 bp, Mus musculus
  siRNA target sequence for B430315C20Rik (NM_178795.3,3115-3133).
ctaccgtctgttttcatct

SEQ ID NO: 589409 - DNA, 19 bp, Mus musculus
  siRNA target sequence for B430315C20Rik (NM_178795.3,3289-3307).
ccgagatgagctcttgttt

SEQ ID NO: 589410 - DNA, 19 bp, Mus musculus
  siRNA target sequence for B430315C20Rik (NM_178795.3,3315-3333).
ccgtaaaacgattttctgt

SEQ ID NO: 589411 - DNA, 19 bp, Mus musculus
  siRNA target sequence for B430315C20Rik (NM_178795.3,3428-3446).
cgccaagtgagtgaattct

SEQ ID NO: 589412 - DNA, 19 bp, Mus musculus
  siRNA target sequence for B430315C20Rik (NM_178795.3,3438-3456).
gtgaattcttgactaaagt

SEQ ID NO: 589413 - DNA, 19 bp, Mus musculus
  siRNA target sequence for B430315C20Rik (NM_178795.3,3495-3513).
cagccctctttgactctat

SEQ ID NO: 589414 - DNA, 19 bp, Mus musculus
  siRNA target sequence for B430315C20Rik (NM_178795.3,3696-3714).
gtgatcagtcctctgtaaa

SEQ ID NO: 589415 - DNA, 19 bp, Mus musculus
  siRNA target sequence for B430315C20Rik (NM_178795.3,3774-3792).
gaacacgagagctccatat

SEQ ID NO: 589416 - DNA, 19 bp, Mus musculus
  siRNA target sequence for B430315C20Rik (NM_178795.3,3777-3795).
cacgagagctccatataga

SEQ ID NO: 589417 - DNA, 19 bp, Mus musculus
  siRNA target sequence for B430315C20Rik (NM_178795.3,4041-4059).
gccagctgtctcagaaagt

SEQ ID NO: 589418 - DNA, 19 bp, Mus musculus
  siRNA target sequence for B430315C20Rik (NM_178795.3,4074-4092).
gccagctttgtcaagacaa

SEQ ID NO: 589419 - DNA, 19 bp, Mus musculus
  siRNA target sequence for B430315C20Rik (NM_178795.3,4097-4115).
gaggagagtaaccaactat

SEQ ID NO: 589420 - DNA, 19 bp, Mus musculus
  siRNA target sequence for B430315C20Rik (NM_178795.3,4140-4158).
gcaggatggtccatggatt

SEQ ID NO: 589421 - DNA, 19 bp, Mus musculus
  siRNA target sequence for B430315C20Rik (NM_178795.3,4206-4224).
gcagaccaacccaagagat

SEQ ID NO: 589422 - DNA, 19 bp, Mus musculus
  siRNA target sequence for C130099A20Rik (NM_153420.1,506-524).
ccgtagacccggtttatga

SEQ ID NO: 589423 - DNA, 19 bp, Mus musculus
  siRNA target sequence for C130099A20Rik (NM_153420.1,507-525).
cgtagacccggtttatgaa

SEQ ID NO: 589424 - DNA, 19 bp, Mus musculus
  siRNA target sequence for C130099A20Rik (NM_153420.1,603-621).
ctccgttcatgtgttcatt

SEQ ID NO: 589425 - DNA, 19 bp, Mus musculus
  siRNA target sequence for C130099A20Rik (NM_153420.1,630-648).
ggacaggtacccactgtat

SEQ ID NO: 589426 - DNA, 19 bp, Mus musculus
  siRNA target sequence for C130099A20Rik (NM_153420.1,662-680).
caaagcggccagaaatcga

SEQ ID NO: 589427 - DNA, 19 bp, Mus musculus
  siRNA target sequence for C130099A20Rik (NM_153420.1,705-723).
gccgtatcaccctaaacta

SEQ ID NO: 589428 - DNA, 19 bp, Mus musculus
  siRNA target sequence for C130099A20Rik (NM_153420.1,707-725).
cgtatcaccctaaactaga

SEQ ID NO: 589429 - DNA, 19 bp, Mus musculus
  siRNA target sequence for C130099A20Rik (NM_153420.1,708-726).
gtatcaccctaaactagaa

SEQ ID NO: 589430 - DNA, 19 bp, Mus musculus
  siRNA target sequence for C130099A20Rik (NM_153420.1,728-746).
ctttcattagtcacatgtt

SEQ ID NO: 589431 - DNA, 19 bp, Mus musculus
  siRNA target sequence for C130099A20Rik (NM_153420.1,752-770).
gatccggagcctcttttga

SEQ ID NO: 589432 - DNA, 19 bp, Mus musculus
  siRNA target sequence for C130099A20Rik (NM_153420.1,789-807).
gcctctctatcctaaccat

SEQ ID NO: 589433 - DNA, 19 bp, Mus musculus
  siRNA target sequence for C130099A20Rik (NM_153420.1,1070-1088).
gctactgcccgctgagaaa

SEQ ID NO: 589434 - DNA, 19 bp, Mus musculus
  siRNA target sequence for C130099A20Rik (NM_153420.1,1079-1097).
cgctgagaaaccagtatct

SEQ ID NO: 589435 - DNA, 19 bp, Mus musculus
  siRNA target sequence for C130099A20Rik (NM_153420.1,1115-1133).
gccagtacctgctacgttt

SEQ ID NO: 589436 - DNA, 19 bp, Mus musculus
  siRNA target sequence for C130099A20Rik (NM_153420.1,1161-1179).
cggggagatggccaagatt

SEQ ID NO: 589437 - DNA, 19 bp, Mus musculus
  siRNA target sequence for C130099A20Rik (NM_153420.1,1384-1402).
caccccatcctaaatcaga

SEQ ID NO: 589438 - DNA, 19 bp, Mus musculus
  siRNA target sequence for C130099A20Rik (NM_153420.1,1535-1553).
ccgccaggctggtttttga

SEQ ID NO: 589439 - DNA, 19 bp, Mus musculus
  siRNA target sequence for C130099A20Rik (NM_153420.1,1585-1603).
cattcggtccgaattcttt

SEQ ID NO: 589440 - DNA, 19 bp, Mus musculus
  siRNA target sequence for C130099A20Rik (NM_153420.1,1589-1607).
cggtccgaattctttataa

SEQ ID NO: 589441 - DNA, 19 bp, Mus musculus
  siRNA target sequence for C130099A20Rik (NM_153420.1,1659-1677).
ctctcccaagcctatgtgt

SEQ ID NO: 589442 - DNA, 19 bp, Mus musculus
  siRNA target sequence for C130099A20Rik (NM_153420.1,1670-1688).
ctatgtgtcctcttgagaa

SEQ ID NO: 589443 - DNA, 19 bp, Mus musculus
  siRNA target sequence for C130099A20Rik (NM_153420.1,1689-1707).
cttggtccgctttgtcaaa

SEQ ID NO: 589444 - DNA, 19 bp, Mus musculus
  siRNA target sequence for C130099A20Rik (NM_153420.1,1723-1741).
gccctggatggcagtagta

SEQ ID NO: 589445 - DNA, 19 bp, Mus musculus
  siRNA target sequence for C130099A20Rik (NM_153420.1,1725-1743).
cctggatggcagtagtact

SEQ ID NO: 589446 - DNA, 19 bp, Mus musculus
  siRNA target sequence for C130099A20Rik (NM_153420.1,1726-1744).
ctggatggcagtagtacta

SEQ ID NO: 589447 - DNA, 19 bp, Mus musculus
  siRNA target sequence for C130099A20Rik (NM_153420.1,1729-1747).
gatggcagtagtactaact

SEQ ID NO: 589448 - DNA, 19 bp, Mus musculus
  siRNA target sequence for C130099A20Rik (NM_153420.1,1732-1750).
ggcagtagtactaactatt

SEQ ID NO: 589449 - DNA, 19 bp, Mus musculus
  siRNA target sequence for C130099A20Rik (NM_153420.1,1733-1751).
gcagtagtactaactatta

SEQ ID NO: 589450 - DNA, 19 bp, Mus musculus
  siRNA target sequence for C130099A20Rik (NM_153420.1,1736-1754).
gtagtactaactattacga

SEQ ID NO: 589451 - DNA, 19 bp, Mus musculus
  siRNA target sequence for Nt5c (NM_015807.1,72-90).
gcgtgctagctgatttcga

SEQ ID NO: 589452 - DNA, 19 bp, Mus musculus
  siRNA target sequence for Nt5c (NM_015807.1,196-214).
gccggacctggcggaaaaa

SEQ ID NO: 589453 - DNA, 19 bp, Mus musculus
  siRNA target sequence for Nt5c (NM_015807.1,234-252).
ctccaggctttttcctaaa

SEQ ID NO: 589454 - DNA, 19 bp, Mus musculus
  siRNA target sequence for Nt5c (NM_015807.1,237-255).
caggctttttcctaaactt

SEQ ID NO: 589455 - DNA, 19 bp, Mus musculus
  siRNA target sequence for Nt5c (NM_015807.1,288-306).
gagagatgaacgacatgaa

SEQ ID NO: 589456 - DNA, 19 bp, Mus musculus
  siRNA target sequence for Nt5c (NM_015807.1,388-406).
gaacctggggccagagttt

SEQ ID NO: 589457 - DNA, 19 bp, Mus musculus
  siRNA target sequence for Nt5c (NM_015807.1,407-425).
gtggagcggattatcttga

SEQ ID NO: 589458 - DNA, 19 bp, Mus musculus
  siRNA target sequence for Nt5c (NM_015807.1,410-428).
gagcggattatcttgacta

SEQ ID NO: 589459 - DNA, 19 bp, Mus musculus
  siRNA target sequence for Nt5c (NM_015807.1,450-468).
gagacctgctcattgatga

SEQ ID NO: 589460 - DNA, 19 bp, Mus musculus
  siRNA target sequence for Nt5c (NM_015807.1,454-472).
cctgctcattgatgacaaa

SEQ ID NO: 589461 - DNA, 19 bp, Mus musculus
  siRNA target sequence for Nt5c1b (NM_027588.2,22-40).
gagtcaaacatccttgaaa

SEQ ID NO: 589462 - DNA, 19 bp, Mus musculus
  siRNA target sequence for Nt5c1b (NM_027588.2,24-42).
gtcaaacatccttgaaaca

SEQ ID NO: 589463 - DNA, 19 bp, Mus musculus
  siRNA target sequence for Nt5c1b (NM_027588.2,60-78).
ctggaatgaggtactcaaa

SEQ ID NO: 589464 - DNA, 19 bp, Mus musculus
  siRNA target sequence for Nt5c1b (NM_027588.2,180-198).
gaggttacgttgtacgaaa

SEQ ID NO: 589465 - DNA, 19 bp, Mus musculus
  siRNA target sequence for Nt5c1b (NM_027588.2,183-201).
gttacgttgtacgaaatca

SEQ ID NO: 589466 - DNA, 19 bp, Mus musculus
  siRNA target sequence for Nt5c1b (NM_027588.2,251-269).
gagcccagaagcaggaata

SEQ ID NO: 589467 - DNA, 19 bp, Mus musculus
  siRNA target sequence for Nt5c1b (NM_027588.2,404-422).
cctatcacccagcttgaat

SEQ ID NO: 589468 - DNA, 19 bp, Mus musculus
  siRNA target sequence for Nt5c1b (NM_027588.2,464-482).
cgaacatcggcgaagatgt

SEQ ID NO: 589469 - DNA, 19 bp, Mus musculus
  siRNA target sequence for Nt5c1b (NM_027588.2,465-483).
gaacatcggcgaagatgta

SEQ ID NO: 589470 - DNA, 19 bp, Mus musculus
  siRNA target sequence for Nt5c1b (NM_027588.2,580-598).
gcccaagacccgagagtat

SEQ ID NO: 589471 - DNA, 19 bp, Mus musculus
  siRNA target sequence for Nt5c1b (NM_027588.2,840-858).
cttctcgggcacttttcaa

SEQ ID NO: 589472 - DNA, 19 bp, Mus musculus
  siRNA target sequence for Nt5c1b (NM_027588.2,846-864).
gggcacttttcaatatggt

SEQ ID NO: 589473 - DNA, 19 bp, Mus musculus
  siRNA target sequence for Nt5c1b (NM_027588.2,863-881).
gtagatgacaggaaaatct

SEQ ID NO: 589474 - DNA, 19 bp, Mus musculus
  siRNA target sequence for Nt5c1b (NM_027588.2,953-971).
ccagcgttccggtttgtca

SEQ ID NO: 589475 - DNA, 19 bp, Mus musculus
  siRNA target sequence for Nt5c1b (NM_027588.2,954-972).
cagcgttccggtttgtcaa

SEQ ID NO: 589476 - DNA, 19 bp, Mus musculus
  siRNA target sequence for Nt5c1b (NM_027588.2,977-995).
ctgcagcatgtcaactcta

SEQ ID NO: 589477 - DNA, 19 bp, Mus musculus
  siRNA target sequence for Nt5c1b (NM_027588.2,1013-1031).
cctgacgaacaggacttat

SEQ ID NO: 589478 - DNA, 19 bp, Mus musculus
  siRNA target sequence for Nt5c1b (NM_027588.2,1024-1042).
ggacttattcgatatagta

SEQ ID NO: 589479 - DNA, 19 bp, Mus musculus
  siRNA target sequence for Nt5c1b (NM_027588.2,1034-1052).
gatatagtactgatgacta

SEQ ID NO: 589480 - DNA, 19 bp, Mus musculus
  siRNA target sequence for Nt5c1b (NM_027588.2,1067-1085).
gtgggagtaaggcttataa

SEQ ID NO: 589481 - DNA, 19 bp, Mus musculus
  siRNA target sequence for Nt5c1b (NM_027588.2,1070-1088).
ggagtaaggcttataaaca

SEQ ID NO: 589482 - DNA, 19 bp, Mus musculus
  siRNA target sequence for Nt5c1b (NM_027588.2,1109-1127).
ctgattgaccgcttctgtt

SEQ ID NO: 589483 - DNA, 19 bp, Mus musculus
  siRNA target sequence for Nt5c1b (NM_027588.2,1137-1155).
ggaaaagccccattggata

SEQ ID NO: 589484 - DNA, 19 bp, Mus musculus
  siRNA target sequence for Nt5c1b (NM_027588.2,1138-1156).
gaaaagccccattggatat

SEQ ID NO: 589485 - DNA, 19 bp, Mus musculus
  siRNA target sequence for Nt5c1b (NM_027588.2,1143-1161).
gccccattggatatttgaa

SEQ ID NO: 589486 - DNA, 19 bp, Mus musculus
  siRNA target sequence for Nt5c1b (NM_027588.2,1169-1187).
cttaccaacctgtatcttt

SEQ ID NO: 589487 - DNA, 19 bp, Mus musculus
  siRNA target sequence for Nt5c1b (NM_027588.2,1191-1209).
ctgattctgaaaaagtaca

SEQ ID NO: 589488 - DNA, 19 bp, Mus musculus
  siRNA target sequence for Nt5c1b (NM_027588.2,1285-1303).
gctacgcgtggcctttgat

SEQ ID NO: 589489 - DNA, 19 bp, Mus musculus
  siRNA target sequence for Nt5c1b (NM_027588.2,1321-1339).
ctcagatgaatctgaacat

SEQ ID NO: 589490 - DNA, 19 bp, Mus musculus
  siRNA target sequence for Nt5c1b (NM_027588.2,1356-1374).
ggctggacaaatttttcca

SEQ ID NO: 589491 - DNA, 19 bp, Mus musculus
  siRNA target sequence for Nt5c1b (NM_027588.2,1357-1375).
gctggacaaatttttccaa

SEQ ID NO: 589492 - DNA, 19 bp, Mus musculus
  siRNA target sequence for Nt5c1b (NM_027588.2,1376-1394).
catgaaacactatttgaga

SEQ ID NO: 589493 - DNA, 19 bp, Mus musculus
  siRNA target sequence for Nt5c1b (NM_027588.2,1411-1429).
gggtcctcttaaaagcttt

SEQ ID NO: 589494 - DNA, 19 bp, Mus musculus
  siRNA target sequence for Nt5c1b (NM_027588.2,1468-1486).
caaagacgaacgattgctt

SEQ ID NO: 589495 - DNA, 19 bp, Mus musculus
  siRNA target sequence for Nt5c1b (NM_027588.2,1560-1578).
gccgatggggtctagagat

SEQ ID NO: 589496 - DNA, 19 bp, Mus musculus
  siRNA target sequence for Nt5c1b (NM_027588.2,1561-1579).
ccgatggggtctagagata

SEQ ID NO: 589497 - DNA, 19 bp, Mus musculus
  siRNA target sequence for Nt5c1b (NM_027588.2,1606-1624).
ccctaaaggtcccatctta

SEQ ID NO: 589498 - DNA, 19 bp, Mus musculus
  siRNA target sequence for Nt5c1b (NM_027588.2,1657-1675).
ccaaatgttccacattgaa

SEQ ID NO: 589499 - DNA, 19 bp, Mus musculus
  siRNA target sequence for Nt5e (NM_011851.2,89-107).
cgcactgagcgctctacta

SEQ ID NO: 589500 - DNA, 19 bp, Mus musculus
  siRNA target sequence for Nt5e (NM_011851.2,351-369).
gaagtggcacacttcatga

SEQ ID NO: 589501 - DNA, 19 bp, Mus musculus
  siRNA target sequence for Nt5e (NM_011851.2,354-372).
gtggcacacttcatgaaca

SEQ ID NO: 589502 - DNA, 19 bp, Mus musculus
  siRNA target sequence for Nt5e (NM_011851.2,419-437).
cggtgtggaaggactgatt

SEQ ID NO: 589503 - DNA, 19 bp, Mus musculus
  siRNA target sequence for Nt5e (NM_011851.2,441-459).
cccctcctcagaaacgtta

SEQ ID NO: 589504 - DNA, 19 bp, Mus musculus
  siRNA target sequence for Nt5e (NM_011851.2,442-460).
ccctcctcagaaacgttaa

SEQ ID NO: 589505 - DNA, 19 bp, Mus musculus
  siRNA target sequence for Nt5e (NM_011851.2,451-469).
gaaacgttaaatttccaat

SEQ ID NO: 589506 - DNA, 19 bp, Mus musculus
  siRNA target sequence for Nt5e (NM_011851.2,496-514).
ggcctctagcacatcagat

SEQ ID NO: 589507 - DNA, 19 bp, Mus musculus
  siRNA target sequence for Nt5e (NM_011851.2,564-582).
gtggggattgttggatata

SEQ ID NO: 589508 - DNA, 19 bp, Mus musculus
  siRNA target sequence for Nt5e (NM_011851.2,566-584).
ggggattgttggatatact

SEQ ID NO: 589509 - DNA, 19 bp, Mus musculus
  siRNA target sequence for Nt5e (NM_011851.2,567-585).
gggattgttggatatactt

SEQ ID NO: 589510 - DNA, 19 bp, Mus musculus
  siRNA target sequence for Nt5e (NM_011851.2,617-635).
gacaaatttagtctttgaa

SEQ ID NO: 589511 - DNA, 19 bp, Mus musculus
  siRNA target sequence for Nt5e (NM_011851.2,619-637).
caaatttagtctttgaaga

SEQ ID NO: 589512 - DNA, 19 bp, Mus musculus
  siRNA target sequence for Nt5e (NM_011851.2,653-671).
gcagcctgaagtagataaa

SEQ ID NO: 589513 - DNA, 19 bp, Mus musculus
  siRNA target sequence for Nt5e (NM_011851.2,657-675).
cctgaagtagataaactaa

SEQ ID NO: 589514 - DNA, 19 bp, Mus musculus
  siRNA target sequence for Nt5e (NM_011851.2,679-697).
cgctaaatgtgaataagat

SEQ ID NO: 589515 - DNA, 19 bp, Mus musculus
  siRNA target sequence for Nt5e (NM_011851.2,731-749).
caaacttatcgctcagaaa

SEQ ID NO: 589516 - DNA, 19 bp, Mus musculus
  siRNA target sequence for Nt5e (NM_011851.2,835-853).
ggaagtacccattcatagt

SEQ ID NO: 589517 - DNA, 19 bp, Mus musculus
  siRNA target sequence for Nt5e (NM_011851.2,917-935).
ctacctgaaggttgagttt

SEQ ID NO: 589518 - DNA, 19 bp, Mus musculus
  siRNA target sequence for Nt5e (NM_011851.2,1009-1027).
ccatcaaagcagacattaa

SEQ ID NO: 589519 - DNA, 19 bp, Mus musculus
  siRNA target sequence for Nt5e (NM_011851.2,1149-1167).
gatgccatgattaacaaca

SEQ ID NO: 589520 - DNA, 19 bp, Mus musculus
  siRNA target sequence for Nt5e (NM_011851.2,1174-1192).
gacacccagatgaaatgtt

SEQ ID NO: 589521 - DNA, 19 bp, Mus musculus
  siRNA target sequence for Nt5e (NM_011851.2,1237-1255).
ggtcccccattgatgagaa

SEQ ID NO: 589522 - DNA, 19 bp, Mus musculus
  siRNA target sequence for Nt5e (NM_011851.2,1300-1318).
cctttggagggacatttga

SEQ ID NO: 589523 - DNA, 19 bp, Mus musculus
  siRNA target sequence for Nt5e (NM_011851.2,1312-1330).
catttgacctcgtccaatt

SEQ ID NO: 589524 - DNA, 19 bp, Mus musculus
  siRNA target sequence for Nt5e (NM_011851.2,1403-1421).
gcaagtgggtggaatccat

SEQ ID NO: 589525 - DNA, 19 bp, Mus musculus
  siRNA target sequence for Nt5e (NM_011851.2,1487-1505).
gtgtcgagtgcccatctat

SEQ ID NO: 589526 - DNA, 19 bp, Mus musculus
  siRNA target sequence for Nt5e (NM_011851.2,1489-1507).
gtcgagtgcccatctatga

SEQ ID NO: 589527 - DNA, 19 bp, Mus musculus
  siRNA target sequence for Nt5e (NM_011851.2,1499-1517).
catctatgagcctcttgaa

SEQ ID NO: 589528 - DNA, 19 bp, Mus musculus
  siRNA target sequence for Nt5e (NM_011851.2,1508-1526).
gcctcttgaaatggataaa

SEQ ID NO: 589529 - DNA, 19 bp, Mus musculus
  siRNA target sequence for Nt5e (NM_011851.2,1510-1528).
ctcttgaaatggataaagt

SEQ ID NO: 589530 - DNA, 19 bp, Mus musculus
  siRNA target sequence for Nt5e (NM_011851.2,1558-1576).
ccaacggtggagatggatt

SEQ ID NO: 589531 - DNA, 19 bp, Mus musculus
  siRNA target sequence for Nt5e (NM_011851.2,1635-1653).
gtttctgaatacatctcaa

SEQ ID NO: 589532 - DNA, 19 bp, Mus musculus
  siRNA target sequence for Nt5e (NM_011851.2,1639-1657).
ctgaatacatctcaaaaat

SEQ ID NO: 589533 - DNA, 19 bp, Mus musculus
  siRNA target sequence for Nt5e (NM_011851.2,1677-1695).
gttgaagggcggatcaagt

SEQ ID NO: 589534 - DNA, 19 bp, Mus musculus
  siRNA target sequence for Nt5e (NM_011851.2,1680-1698).
gaagggcggatcaagttct

SEQ ID NO: 589535 - DNA, 19 bp, Mus musculus
  siRNA target sequence for Nt5e (NM_011851.2,1750-1768).
gggcaatgatccttatttt

SEQ ID NO: 589536 - DNA, 19 bp, Mus musculus
  siRNA target sequence for Nt5e (NM_011851.2,1753-1771).
caatgatccttattttgta

SEQ ID NO: 589537 - DNA, 19 bp, Mus musculus
  siRNA target sequence for Nt5m (NM_134029.1,320-338).
gggagtcaaaggatttctt

SEQ ID NO: 589538 - DNA, 19 bp, Mus musculus
  siRNA target sequence for Nt5m (NM_134029.1,406-424).
gatgtcttcatctgtacaa

SEQ ID NO: 589539 - DNA, 19 bp, Mus musculus
  siRNA target sequence for Nt5m (NM_134029.1,419-437).
gtacaagccccatcaagat

SEQ ID NO: 589540 - DNA, 19 bp, Mus musculus
  siRNA target sequence for Nt5m (NM_134029.1,422-440).
caagccccatcaagatgtt

SEQ ID NO: 589541 - DNA, 19 bp, Mus musculus
  siRNA target sequence for Nt5m (NM_134029.1,447-465).
ctgtccctatgagaagtat

SEQ ID NO: 589542 - DNA, 19 bp, Mus musculus
  siRNA target sequence for Nt5m (NM_134029.1,480-498).
gcactttggccctgacttt

SEQ ID NO: 589543 - DNA, 19 bp, Mus musculus
  siRNA target sequence for Nt5m (NM_134029.1,537-555).
ctcagccgaccttctcata

SEQ ID NO: 589544 - DNA, 19 bp, Mus musculus
  siRNA target sequence for Nt5m (NM_134029.1,539-557).
cagccgaccttctcataga

SEQ ID NO: 589545 - DNA, 19 bp, Mus musculus
  siRNA target sequence for Fbp1 (NM_019395.1,206-224).
cccttcgaaacggatatca

SEQ ID NO: 589546 - DNA, 19 bp, Mus musculus
  siRNA target sequence for Fbp1 (NM_019395.1,301-319).
gctctgcaccgcgatcaaa

SEQ ID NO: 589547 - DNA, 19 bp, Mus musculus
  siRNA target sequence for Fbp1 (NM_019395.1,386-404).
gtgactggggatcaagtaa

SEQ ID NO: 589548 - DNA, 19 bp, Mus musculus
  siRNA target sequence for Fbp1 (NM_019395.1,424-442).
caatgacctggtgatcaat

SEQ ID NO: 589549 - DNA, 19 bp, Mus musculus
  siRNA target sequence for Fbp1 (NM_019395.1,457-475).
ctacgctacctgtgttctt

SEQ ID NO: 589550 - DNA, 19 bp, Mus musculus
  siRNA target sequence for Fbp1 (NM_019395.1,492-510).
caaatgccatcataatcga

SEQ ID NO: 589551 - DNA, 19 bp, Mus musculus
  siRNA target sequence for Fbp1 (NM_019395.1,583-601).
gtccatcggaaccattttt

SEQ ID NO: 589552 - DNA, 19 bp, Mus musculus
  siRNA target sequence for Fbp1 (NM_019395.1,591-609).
gaaccatttttggcattta

SEQ ID NO: 589553 - DNA, 19 bp, Mus musculus
  siRNA target sequence for Fbp1 (NM_019395.1,595-613).
catttttggcatttacaga

SEQ ID NO: 589554 - DNA, 19 bp, Mus musculus
  siRNA target sequence for Fbp1 (NM_019395.1,931-949).
gtccatggtggctgatatt

SEQ ID NO: 589555 - DNA, 19 bp, Mus musculus
  siRNA target sequence for Fbp1 (NM_019395.1,952-970).
ccgcactctggtatatgga

SEQ ID NO: 589556 - DNA, 19 bp, Mus musculus
  siRNA target sequence for Fbp1 (NM_019395.1,1031-1049).
gagtgcaaccccatagctt

SEQ ID NO: 589557 - DNA, 19 bp, Mus musculus
  siRNA target sequence for Fbp1 (NM_019395.1,1033-1051).
gtgcaaccccatagcttat

SEQ ID NO: 589558 - DNA, 19 bp, Mus musculus
  siRNA target sequence for Fbp1 (NM_019395.1,1080-1098).
ccacgggggacaaagatat

SEQ ID NO: 589559 - DNA, 19 bp, Mus musculus
  siRNA target sequence for Fbp1 (NM_019395.1,1083-1101).
cgggggacaaagatatatt

SEQ ID NO: 589560 - DNA, 19 bp, Mus musculus
  siRNA target sequence for Fbp1 (NM_019395.1,1086-1104).
gggacaaagatatattaga

SEQ ID NO: 589561 - DNA, 19 bp, Mus musculus
  siRNA target sequence for Fbp2 (NM_007994.1,26-44).
gacagaagcccctttgaga

SEQ ID NO: 589562 - DNA, 19 bp, Mus musculus
  siRNA target sequence for Fbp2 (NM_007994.1,57-75).
ccctgacccgttacgttat

SEQ ID NO: 589563 - DNA, 19 bp, Mus musculus
  siRNA target sequence for Fbp2 (NM_007994.1,61-79).
gacccgttacgttatggaa

SEQ ID NO: 589564 - DNA, 19 bp, Mus musculus
  siRNA target sequence for Fbp2 (NM_007994.1,63-81).
cccgttacgttatggaaaa

SEQ ID NO: 589565 - DNA, 19 bp, Mus musculus
  siRNA target sequence for Fbp2 (NM_007994.1,301-319).
gctcgtctccgaagagaat

SEQ ID NO: 589566 - DNA, 19 bp, Mus musculus
  siRNA target sequence for Fbp2 (NM_007994.1,302-320).
ctcgtctccgaagagaata

SEQ ID NO: 589567 - DNA, 19 bp, Mus musculus
  siRNA target sequence for Fbp2 (NM_007994.1,304-322).
cgtctccgaagagaataaa

SEQ ID NO: 589568 - DNA, 19 bp, Mus musculus
  siRNA target sequence for Fbp2 (NM_007994.1,376-394).
ccctctggatggatcttca

SEQ ID NO: 589569 - DNA, 19 bp, Mus musculus
  siRNA target sequence for Fbp2 (NM_007994.1,410-428).
gcctccatcggaactatat

SEQ ID NO: 589570 - DNA, 19 bp, Mus musculus
  siRNA target sequence for Fbp2 (NM_007994.1,411-429).
cctccatcggaactatatt

SEQ ID NO: 589571 - DNA, 19 bp, Mus musculus
  siRNA target sequence for Fbp2 (NM_007994.1,412-430).
ctccatcggaactatattt

SEQ ID NO: 589572 - DNA, 19 bp, Mus musculus
  siRNA target sequence for Fbp2 (NM_007994.1,601-619).
cgtgctagtggaaaaagat

SEQ ID NO: 589573 - DNA, 19 bp, Mus musculus
  siRNA target sequence for Fbp2 (NM_007994.1,617-635).
gatgtccggattaagaaga

SEQ ID NO: 589574 - DNA, 19 bp, Mus musculus
  siRNA target sequence for Fbp2 (NM_007994.1,690-708).
ctgctgagtatgtacagaa

SEQ ID NO: 589575 - DNA, 19 bp, Mus musculus
  siRNA target sequence for Fbp2 (NM_007994.1,692-710).
gctgagtatgtacagaaaa

SEQ ID NO: 589576 - DNA, 19 bp, Mus musculus
  siRNA target sequence for Fbp2 (NM_007994.1,695-713).
gagtatgtacagaaaaaga

SEQ ID NO: 589577 - DNA, 19 bp, Mus musculus
  siRNA target sequence for Fbp2 (NM_007994.1,845-863).
ctccggctcctgtatgaat

SEQ ID NO: 589578 - DNA, 19 bp, Mus musculus
  siRNA target sequence for Fbp2 (NM_007994.1,850-868).
gctcctgtatgaatgcaat

SEQ ID NO: 589579 - DNA, 19 bp, Mus musculus
  siRNA target sequence for Fbp2 (NM_007994.1,864-882).
gcaatcctgtggcctatat

SEQ ID NO: 589580 - DNA, 19 bp, Mus musculus
  siRNA target sequence for Fbp2 (NM_007994.1,988-1006).
gatgtgcaagagtatctca

SEQ ID NO: 589581 - DNA, 19 bp, Mus musculus
  siRNA target sequence for G6pc (NM_008061.2,114-132).
ctcgctatctccaagtgaa

SEQ ID NO: 589582 - DNA, 19 bp, Mus musculus
  siRNA target sequence for G6pc (NM_008061.2,181-199).
cctgaggaacgccttctat

SEQ ID NO: 589583 - DNA, 19 bp, Mus musculus
  siRNA target sequence for G6pc (NM_008061.2,210-228).
ccatctggttccatcttaa

SEQ ID NO: 589584 - DNA, 19 bp, Mus musculus
  siRNA target sequence for G6pc (NM_008061.2,308-326).
ggacaacgcccgtattggt

SEQ ID NO: 589585 - DNA, 19 bp, Mus musculus
  siRNA target sequence for G6pc (NM_008061.2,332-350).
ctggacaccgactactaca

SEQ ID NO: 589586 - DNA, 19 bp, Mus musculus
  siRNA target sequence for G6pc (NM_008061.2,355-373).
cagctccgtgcctataata

SEQ ID NO: 589587 - DNA, 19 bp, Mus musculus
  siRNA target sequence for G6pc (NM_008061.2,360-378).
ccgtgcctataataaagca

SEQ ID NO: 589588 - DNA, 19 bp, Mus musculus
  siRNA target sequence for G6pc (NM_008061.2,431-449).
ggcgcagcaggtgtatact

SEQ ID NO: 589589 - DNA, 19 bp, Mus musculus
  siRNA target sequence for G6pc (NM_008061.2,432-450).
gcgcagcaggtgtatacta

SEQ ID NO: 589590 - DNA, 19 bp, Mus musculus
  siRNA target sequence for G6pc (NM_008061.2,433-451).
cgcagcaggtgtatactat

SEQ ID NO: 589591 - DNA, 19 bp, Mus musculus
  siRNA target sequence for G6pc (NM_008061.2,435-453).
cagcaggtgtatactatgt

SEQ ID NO: 589592 - DNA, 19 bp, Mus musculus
  siRNA target sequence for G6pc (NM_008061.2,438-456).
caggtgtatactatgttat

SEQ ID NO: 589593 - DNA, 19 bp, Mus musculus
  siRNA target sequence for G6pc (NM_008061.2,677-695).
gccagcctccggaagtatt

SEQ ID NO: 589594 - DNA, 19 bp, Mus musculus
  siRNA target sequence for G6pc (NM_008061.2,679-697).
cagcctccggaagtattgt

SEQ ID NO: 589595 - DNA, 19 bp, Mus musculus
  siRNA target sequence for G6pc (NM_008061.2,681-699).
gcctccggaagtattgtct

SEQ ID NO: 589596 - DNA, 19 bp, Mus musculus
  siRNA target sequence for G6pc (NM_008061.2,700-718).
catcaccatcttcttgttt

SEQ ID NO: 589597 - DNA, 19 bp, Mus musculus
  siRNA target sequence for G6pc (NM_008061.2,720-738).
gtttcgcgcttggattcta

SEQ ID NO: 589598 - DNA, 19 bp, Mus musculus
  siRNA target sequence for G6pc (NM_008061.2,774-792).
ggactttggagaaagctaa

SEQ ID NO: 589599 - DNA, 19 bp, Mus musculus
  siRNA target sequence for G6pc (NM_008061.2,1008-1026).
ccccatcccaggttgagtt

SEQ ID NO: 589600 - DNA, 19 bp, Mus musculus
  siRNA target sequence for G6pc (NM_008061.2,1014-1032).
cccaggttgagttgatctt

SEQ ID NO: 589601 - DNA, 19 bp, Mus musculus
  siRNA target sequence for G6pc (NM_008061.2,1016-1034).
caggttgagttgatcttct

SEQ ID NO: 589602 - DNA, 19 bp, Mus musculus
  siRNA target sequence for G6pc (NM_008061.2,1019-1037).
gttgagttgatcttctaca

SEQ ID NO: 589603 - DNA, 19 bp, Mus musculus
  siRNA target sequence for G6pc (NM_008061.2,1048-1066).
ctgcaagagcgcaacagtt

SEQ ID NO: 589604 - DNA, 19 bp, Mus musculus
  siRNA target sequence for G6pc (NM_008061.2,1058-1076).
gcaacagttccctttgcat

SEQ ID NO: 589605 - DNA, 19 bp, Mus musculus
  siRNA target sequence for Bpgm (NM_007563.2,131-149).
gtccaagcacaaacttatt

SEQ ID NO: 589606 - DNA, 19 bp, Mus musculus
  siRNA target sequence for Bpgm (NM_007563.2,133-151).
ccaagcacaaacttattat

SEQ ID NO: 589607 - DNA, 19 bp, Mus musculus
  siRNA target sequence for Bpgm (NM_007563.2,137-155).
gcacaaacttattatacta

SEQ ID NO: 589608 - DNA, 19 bp, Mus musculus
  siRNA target sequence for Bpgm (NM_007563.2,163-181).
gagagggccaatggaataa

SEQ ID NO: 589609 - DNA, 19 bp, Mus musculus
  siRNA target sequence for Bpgm (NM_007563.2,199-217).
gttgggtggaccagaaact

SEQ ID NO: 589610 - DNA, 19 bp, Mus musculus
  siRNA target sequence for Bpgm (NM_007563.2,202-220).
gggtggaccagaaacttaa

SEQ ID NO: 589611 - DNA, 19 bp, Mus musculus
  siRNA target sequence for Bpgm (NM_007563.2,204-222).
gtggaccagaaacttaaca

SEQ ID NO: 589612 - DNA, 19 bp, Mus musculus
  siRNA target sequence for Bpgm (NM_007563.2,268-286).
ctctcaacttcgagtttga

SEQ ID NO: 589613 - DNA, 19 bp, Mus musculus
  siRNA target sequence for Bpgm (NM_007563.2,272-290).
caacttcgagtttgatctt

SEQ ID NO: 589614 - DNA, 19 bp, Mus musculus
  siRNA target sequence for Bpgm (NM_007563.2,306-324).
cttaacaggtccattcaca

SEQ ID NO: 589615 - DNA, 19 bp, Mus musculus
  siRNA target sequence for Bpgm (NM_007563.2,374-392).
gagctcctggcgtctgaat

SEQ ID NO: 589616 - DNA, 19 bp, Mus musculus
  siRNA target sequence for Bpgm (NM_007563.2,488-506).
cgtgaccccacctcctata

SEQ ID NO: 589617 - DNA, 19 bp, Mus musculus
  siRNA target sequence for Bpgm (NM_007563.2,539-557).
cagtgaccggaggtacaaa

SEQ ID NO: 589618 - DNA, 19 bp, Mus musculus
  siRNA target sequence for Bpgm (NM_007563.2,541-559).
gtgaccggaggtacaaagt

SEQ ID NO: 589619 - DNA, 19 bp, Mus musculus
  siRNA target sequence for Bpgm (NM_007563.2,543-561).
gaccggaggtacaaagtgt

SEQ ID NO: 589620 - DNA, 19 bp, Mus musculus
  siRNA target sequence for Bpgm (NM_007563.2,659-677).
cttaaagggcaaaagcatt

SEQ ID NO: 589621 - DNA, 19 bp, Mus musculus
  siRNA target sequence for Bpgm (NM_007563.2,736-754).
cagacgaggatattatcaa

SEQ ID NO: 589622 - DNA, 19 bp, Mus musculus
  siRNA target sequence for Bpgm (NM_007563.2,738-756).
gacgaggatattatcaaca

SEQ ID NO: 589623 - DNA, 19 bp, Mus musculus
  siRNA target sequence for Bpgm (NM_007563.2,873-891).
gatgatcaagggaaagtga

SEQ ID NO: 589624 - DNA, 19 bp, Mus musculus
  siRNA target sequence for Pgam1 (NM_023418.1,727-745).
gcatccctatcgtctatga

SEQ ID NO: 589625 - DNA, 19 bp, Mus musculus
  siRNA target sequence for Pgam1 (NM_023418.1,728-746).
catccctatcgtctatgaa

SEQ ID NO: 589626 - DNA, 19 bp, Mus musculus
  siRNA target sequence for Pgam2 (NM_018870.1,50-68).
ccacccaccgcctagtaat

SEQ ID NO: 589627 - DNA, 19 bp, Mus musculus
  siRNA target sequence for Pgam2 (NM_018870.1,53-71).
cccaccgcctagtaatggt

SEQ ID NO: 589628 - DNA, 19 bp, Mus musculus
  siRNA target sequence for Pgam2 (NM_018870.1,54-72).
ccaccgcctagtaatggtt

SEQ ID NO: 589629 - DNA, 19 bp, Mus musculus
  siRNA target sequence for Pgam2 (NM_018870.1,73-91).
cgccacggtgagagcttat

SEQ ID NO: 589630 - DNA, 19 bp, Mus musculus
  siRNA target sequence for Pgam2 (NM_018870.1,76-94).
cacggtgagagcttatgga

SEQ ID NO: 589631 - DNA, 19 bp, Mus musculus
  siRNA target sequence for Pgam2 (NM_018870.1,96-114).
ccaagagaaccgtttctgt

SEQ ID NO: 589632 - DNA, 19 bp, Mus musculus
  siRNA target sequence for Pgam2 (NM_018870.1,168-186).
ggccaccgctatcaaagat

SEQ ID NO: 589633 - DNA, 19 bp, Mus musculus
  siRNA target sequence for Pgam2 (NM_018870.1,187-205).
gccaagatagagtttgaca

SEQ ID NO: 589634 - DNA, 19 bp, Mus musculus
  siRNA target sequence for Pgam2 (NM_018870.1,188-206).
ccaagatagagtttgacat

SEQ ID NO: 589635 - DNA, 19 bp, Mus musculus
  siRNA target sequence for Pgam2 (NM_018870.1,259-277).
gatgttacggaccaaatgt

SEQ ID NO: 589636 - DNA, 19 bp, Mus musculus
  siRNA target sequence for Pgam2 (NM_018870.1,325-343).
ggcctcacaggcctcaata

SEQ ID NO: 589637 - DNA, 19 bp, Mus musculus
  siRNA target sequence for Pgam2 (NM_018870.1,384-402).
gatctggaggcgttccttt

SEQ ID NO: 589638 - DNA, 19 bp, Mus musculus
  siRNA target sequence for Pgam2 (NM_018870.1,416-434).
cacccatggatgagaaaca

SEQ ID NO: 589639 - DNA, 19 bp, Mus musculus
  siRNA target sequence for Pgam2 (NM_018870.1,492-510).
gctgcctacctgtgaaagt

SEQ ID NO: 589640 - DNA, 19 bp, Mus musculus
  siRNA target sequence for Pgam2 (NM_018870.1,552-570).
ggagatcgcacctaagatt

SEQ ID NO: 589641 - DNA, 19 bp, Mus musculus
  siRNA target sequence for Pgam2 (NM_018870.1,553-571).
gagatcgcacctaagatta

SEQ ID NO: 589642 - DNA, 19 bp, Mus musculus
  siRNA target sequence for Pgam2 (NM_018870.1,579-597).
ccagagagtgcttattgca

SEQ ID NO: 589643 - DNA, 19 bp, Mus musculus
  siRNA target sequence for Pgam2 (NM_018870.1,680-698).
ctggaatccccattgtgta

SEQ ID NO: 589644 - DNA, 19 bp, Mus musculus
  siRNA target sequence for Gpld1 (NM_008156.1,313-331).
cctcttttctgctctaaaa

SEQ ID NO: 589645 - DNA, 19 bp, Mus musculus
  siRNA target sequence for Gpld1 (NM_008156.1,348-366).
ctcaacacatgtagaaata

SEQ ID NO: 589646 - DNA, 19 bp, Mus musculus
  siRNA target sequence for Gpld1 (NM_008156.1,404-422).
gacgcattaactacaaaga

SEQ ID NO: 589647 - DNA, 19 bp, Mus musculus
  siRNA target sequence for Gpld1 (NM_008156.1,552-570).
cgccagcatccattatatt

SEQ ID NO: 589648 - DNA, 19 bp, Mus musculus
  siRNA target sequence for Gpld1 (NM_008156.1,555-573).
cagcatccattatattcga

SEQ ID NO: 589649 - DNA, 19 bp, Mus musculus
  siRNA target sequence for Gpld1 (NM_008156.1,687-705).
gacaatgggagctatcgat

SEQ ID NO: 589650 - DNA, 19 bp, Mus musculus
  siRNA target sequence for Gpld1 (NM_008156.1,689-707).
caatgggagctatcgattt

SEQ ID NO: 589651 - DNA, 19 bp, Mus musculus
  siRNA target sequence for Gpld1 (NM_008156.1,694-712).
ggagctatcgatttttaca

SEQ ID NO: 589652 - DNA, 19 bp, Mus musculus
  siRNA target sequence for Gpld1 (NM_008156.1,697-715).
gctatcgatttttacaact

SEQ ID NO: 589653 - DNA, 19 bp, Mus musculus
  siRNA target sequence for Gpld1 (NM_008156.1,728-746).
ctcactcggctggtgattt

SEQ ID NO: 589654 - DNA, 19 bp, Mus musculus
  siRNA target sequence for Gpld1 (NM_008156.1,759-777).
gttgagccagtttgaattt

SEQ ID NO: 589655 - DNA, 19 bp, Mus musculus
  siRNA target sequence for Gpld1 (NM_008156.1,764-782).
gccagtttgaatttaattt

SEQ ID NO: 589656 - DNA, 19 bp, Mus musculus
  siRNA target sequence for Gpld1 (NM_008156.1,818-836).
gggatcttctgagaattta

SEQ ID NO: 589657 - DNA, 19 bp, Mus musculus
  siRNA target sequence for Gpld1 (NM_008156.1,819-837).
ggatcttctgagaatttat

SEQ ID NO: 589658 - DNA, 19 bp, Mus musculus
  siRNA target sequence for Gpld1 (NM_008156.1,823-841).
cttctgagaatttatgata

SEQ ID NO: 589659 - DNA, 19 bp, Mus musculus
  siRNA target sequence for Gpld1 (NM_008156.1,830-848).
gaatttatgataatctcta

SEQ ID NO: 589660 - DNA, 19 bp, Mus musculus
  siRNA target sequence for Gpld1 (NM_008156.1,844-862).
ctctatggtcggaaagtca

SEQ ID NO: 589661 - DNA, 19 bp, Mus musculus
  siRNA target sequence for Gpld1 (NM_008156.1,866-884).
ccaaagacgtccttgttga

SEQ ID NO: 589662 - DNA, 19 bp, Mus musculus
  siRNA target sequence for Gpld1 (NM_008156.1,928-946).
gctgtttccaagctctatt

SEQ ID NO: 589663 - DNA, 19 bp, Mus musculus
  siRNA target sequence for Gpld1 (NM_008156.1,940-958).
ctctattccacgtactcta

SEQ ID NO: 589664 - DNA, 19 bp, Mus musculus
  siRNA target sequence for Gpld1 (NM_008156.1,1046-1064).
gtttgaccagctttatgct

SEQ ID NO: 589665 - DNA, 19 bp, Mus musculus
  siRNA target sequence for Gpld1 (NM_008156.1,1182-1200).
gaccatgttcataagtaga

SEQ ID NO: 589666 - DNA, 19 bp, Mus musculus
  siRNA target sequence for Gpld1 (NM_008156.1,1199-1217).
gagacatcaggaaaaacct

SEQ ID NO: 589667 - DNA, 19 bp, Mus musculus
  siRNA target sequence for Gpld1 (NM_008156.1,1226-1244).
cagaaagaggcgtgttcta

SEQ ID NO: 589668 - DNA, 19 bp, Mus musculus
  siRNA target sequence for Gpld1 (NM_008156.1,1703-1721).
gctcggtgtatgtctacta

SEQ ID NO: 589669 - DNA, 19 bp, Mus musculus
  siRNA target sequence for Gpld1 (NM_008156.1,1704-1722).
ctcggtgtatgtctactat

SEQ ID NO: 589670 - DNA, 19 bp, Mus musculus
  siRNA target sequence for Gpld1 (NM_008156.1,1708-1726).
gtgtatgtctactatggtt

SEQ ID NO: 589671 - DNA, 19 bp, Mus musculus
  siRNA target sequence for Gpld1 (NM_008156.1,1889-1907).
gaattgtggccacctttta

SEQ ID NO: 589672 - DNA, 19 bp, Mus musculus
  siRNA target sequence for Gpld1 (NM_008156.1,1912-1930).
caccccagacggaatgaca

SEQ ID NO: 589673 - DNA, 19 bp, Mus musculus
  siRNA target sequence for Gpld1 (NM_008156.1,1914-1932).
ccccagacggaatgacaaa

SEQ ID NO: 589674 - DNA, 19 bp, Mus musculus
  siRNA target sequence for Gpld1 (NM_008156.1,1981-1999).
gacttctcgtggtttggat

SEQ ID NO: 589675 - DNA, 19 bp, Mus musculus
  siRNA target sequence for Gpld1 (NM_008156.1,2152-2170).
cgccagagcacaatcacta

SEQ ID NO: 589676 - DNA, 19 bp, Mus musculus
  siRNA target sequence for Gpld1 (NM_008156.1,2155-2173).
cagagcacaatcactatct

SEQ ID NO: 589677 - DNA, 19 bp, Mus musculus
  siRNA target sequence for Gpld1 (NM_008156.1,2209-2227).
ctgtccagtggttatgtga

SEQ ID NO: 589678 - DNA, 19 bp, Mus musculus
  siRNA target sequence for Gpld1 (NM_008156.1,2259-2277).
ggttggagcccctactcat

SEQ ID NO: 589679 - DNA, 19 bp, Mus musculus
  siRNA target sequence for Gpld1 (NM_008156.1,2264-2282).
gagcccctactcatgatga

SEQ ID NO: 589680 - DNA, 19 bp, Mus musculus
  siRNA target sequence for Gpld1 (NM_008156.1,2273-2291).
ctcatgatgacgtgtctaa

SEQ ID NO: 589681 - DNA, 19 bp, Mus musculus
  siRNA target sequence for Gpld1 (NM_008156.1,2397-2415).
ccgacgcttttctcgattt

SEQ ID NO: 589682 - DNA, 19 bp, Mus musculus
  siRNA target sequence for Gpld1 (NM_008156.1,2401-2419).
cgcttttctcgatttggta

SEQ ID NO: 589683 - DNA, 19 bp, Mus musculus
  siRNA target sequence for Gpld1 (NM_008156.1,2452-2470).
ggcttagatgaaatcatca

SEQ ID NO: 589684 - DNA, 19 bp, Mus musculus
  siRNA target sequence for Gpld1 (NM_008156.1,2453-2471).
gcttagatgaaatcatcat

SEQ ID NO: 589685 - DNA, 19 bp, Mus musculus
  siRNA target sequence for Gpld1 (NM_008156.1,2478-2496).
cccactgaggataacagat

SEQ ID NO: 589686 - DNA, 19 bp, Mus musculus
  siRNA target sequence for Gpld1 (NM_008156.1,2524-2542).
gatgggcgagtgtacattt

SEQ ID NO: 589687 - DNA, 19 bp, Mus musculus
  siRNA target sequence for Gpld1 (NM_008156.1,2569-2587).
gacatgaccggcaaatgca

SEQ ID NO: 589688 - DNA, 19 bp, Mus musculus
  siRNA target sequence for Gpld1 (NM_008156.1,2619-2637).
ggcacagtatgtactaact

SEQ ID NO: 589689 - DNA, 19 bp, Mus musculus
  siRNA target sequence for Gpld1 (NM_008156.1,2620-2638).
gcacagtatgtactaactt

SEQ ID NO: 589690 - DNA, 19 bp, Mus musculus
  siRNA target sequence for Pld2 (NM_008876.1,478-496).
ccctatggggactatctga

SEQ ID NO: 589691 - DNA, 19 bp, Mus musculus
  siRNA target sequence for Pld2 (NM_008876.1,479-497).
cctatggggactatctgaa

SEQ ID NO: 589692 - DNA, 19 bp, Mus musculus
  siRNA target sequence for Pld2 (NM_008876.1,693-711).
gggaacctgtactctatat

SEQ ID NO: 589693 - DNA, 19 bp, Mus musculus
  siRNA target sequence for Pld2 (NM_008876.1,694-712).
ggaacctgtactctatatt

SEQ ID NO: 589694 - DNA, 19 bp, Mus musculus
  siRNA target sequence for Pld2 (NM_008876.1,720-738).
cttgacgcatggtgacttt

SEQ ID NO: 589695 - DNA, 19 bp, Mus musculus
  siRNA target sequence for Pld2 (NM_008876.1,928-946).
gccagcaaacagaaatact

SEQ ID NO: 589696 - DNA, 19 bp, Mus musculus
  siRNA target sequence for Pld2 (NM_008876.1,980-998).
ctttctatcgcaattacca

SEQ ID NO: 589697 - DNA, 19 bp, Mus musculus
  siRNA target sequence for Pld2 (NM_008876.1,1123-1141).
ggccgagaccaagtttgtt

SEQ ID NO: 589698 - DNA, 19 bp, Mus musculus
  siRNA target sequence for Pld2 (NM_008876.1,1129-1147).
gaccaagtttgttatcgat

SEQ ID NO: 589699 - DNA, 19 bp, Mus musculus
  siRNA target sequence for Pld2 (NM_008876.1,1246-1264).
gaggtccaggtcggaaaaa

SEQ ID NO: 589700 - DNA, 19 bp, Mus musculus
  siRNA target sequence for Pld2 (NM_008876.1,1381-1399).
cagggttcgggcagagatt

SEQ ID NO: 589701 - DNA, 19 bp, Mus musculus
  siRNA target sequence for Pld2 (NM_008876.1,1383-1401).
gggttcgggcagagatttt

SEQ ID NO: 589702 - DNA, 19 bp, Mus musculus
  siRNA target sequence for Pld2 (NM_008876.1,1388-1406).
cgggcagagattttctaca

SEQ ID NO: 589703 - DNA, 19 bp, Mus musculus
  siRNA target sequence for Pld2 (NM_008876.1,1511-1529).
gagctcaagaggagatttt

SEQ ID NO: 589704 - DNA, 19 bp, Mus musculus
  siRNA target sequence for Pld2 (NM_008876.1,1513-1531).
gctcaagaggagattttca

SEQ ID NO: 589705 - DNA, 19 bp, Mus musculus
  siRNA target sequence for Pld2 (NM_008876.1,1514-1532).
ctcaagaggagattttcat

SEQ ID NO: 589706 - DNA, 19 bp, Mus musculus
  siRNA target sequence for Pld2 (NM_008876.1,1542-1560).
gtggttgagtcctgaaatt

SEQ ID NO: 589707 - DNA, 19 bp, Mus musculus
  siRNA target sequence for Pld2 (NM_008876.1,1544-1562).
ggttgagtcctgaaattta

SEQ ID NO: 589708 - DNA, 19 bp, Mus musculus
  siRNA target sequence for Pld2 (NM_008876.1,1644-1662).
catactgctgtttaaggaa

SEQ ID NO: 589709 - DNA, 19 bp, Mus musculus
  siRNA target sequence for Pld2 (NM_008876.1,1713-1731).
gctgctgcatcccaacata

SEQ ID NO: 589710 - DNA, 19 bp, Mus musculus
  siRNA target sequence for Pld2 (NM_008876.1,1714-1732).
ctgctgcatcccaacataa

SEQ ID NO: 589711 - DNA, 19 bp, Mus musculus
  siRNA target sequence for Pld2 (NM_008876.1,1841-1859).
gctgggatgacgtgcaata

SEQ ID NO: 589712 - DNA, 19 bp, Mus musculus
  siRNA target sequence for Pld2 (NM_008876.1,1882-1900).
ccctctgaacctgtacatt

SEQ ID NO: 589713 - DNA, 19 bp, Mus musculus
  siRNA target sequence for Pld2 (NM_008876.1,1884-1902).
ctctgaacctgtacattta

SEQ ID NO: 589714 - DNA, 19 bp, Mus musculus
  siRNA target sequence for Pld2 (NM_008876.1,1940-1958).
cagacctctcgcataacca

SEQ ID NO: 589715 - DNA, 19 bp, Mus musculus
  siRNA target sequence for Pld2 (NM_008876.1,1942-1960).
gacctctcgcataaccaat

SEQ ID NO: 589716 - DNA, 19 bp, Mus musculus
  siRNA target sequence for Pld2 (NM_008876.1,2391-2409).
ctcagatgggcgaacagtt

SEQ ID NO: 589717 - DNA, 19 bp, Mus musculus
  siRNA target sequence for Pld2 (NM_008876.1,2399-2417).
ggcgaacagttctgaacaa

SEQ ID NO: 589718 - DNA, 19 bp, Mus musculus
  siRNA target sequence for Pld2 (NM_008876.1,2582-2600).
gtcgtggggaacattcaat

SEQ ID NO: 589719 - DNA, 19 bp, Mus musculus
  siRNA target sequence for Pld2 (NM_008876.1,2627-2645).
ggactgcgtggcgagatta

SEQ ID NO: 589720 - DNA, 19 bp, Mus musculus
  siRNA target sequence for Pld2 (NM_008876.1,2630-2648).
ctgcgtggcgagattacat

SEQ ID NO: 589721 - DNA, 19 bp, Mus musculus
  siRNA target sequence for Pld2 (NM_008876.1,2632-2650).
gcgtggcgagattacatgt

SEQ ID NO: 589722 - DNA, 19 bp, Mus musculus
  siRNA target sequence for Pld2 (NM_008876.1,2891-2909).
gtttgcggaagcactgttt

SEQ ID NO: 589723 - DNA, 19 bp, Mus musculus
  siRNA target sequence for Pld2 (NM_008876.1,2901-2919).
gcactgtttcagtgtgatt

SEQ ID NO: 589724 - DNA, 19 bp, Mus musculus
  siRNA target sequence for Pld2 (NM_008876.1,2914-2932).
gtgattcttggggcaaata

SEQ ID NO: 589725 - DNA, 19 bp, Mus musculus
  siRNA target sequence for Pld2 (NM_008876.1,2979-2997).
ccagctgtggcaagaaaca

SEQ ID NO: 589726 - DNA, 19 bp, Mus musculus
  siRNA target sequence for Pld2 (NM_008876.1,3068-3086).
gggctctccgggagtatgt

SEQ ID NO: 589727 - DNA, 19 bp, Mus musculus
  siRNA target sequence for Pld2 (NM_008876.1,3104-3122).
ctacagtcagcccttcttt

SEQ ID NO: 589728 - DNA, 19 bp, Mus musculus
  siRNA target sequence for Pld2 (NM_008876.1,3204-3222).
cccactggggagtaaagaa

SEQ ID NO: 589729 - DNA, 19 bp, Mus musculus
  siRNA target sequence for Pon1 (NM_011134.1,111-129).
gactggtgttggcacttta

SEQ ID NO: 589730 - DNA, 19 bp, Mus musculus
  siRNA target sequence for Pon1 (NM_011134.1,113-131).
ctggtgttggcactttaca

SEQ ID NO: 589731 - DNA, 19 bp, Mus musculus
  siRNA target sequence for Pon1 (NM_011134.1,133-151).
gaaccatcggtcttcctat

SEQ ID NO: 589732 - DNA, 19 bp, Mus musculus
  siRNA target sequence for Pon1 (NM_011134.1,137-155).
catcggtcttcctatcaaa

SEQ ID NO: 589733 - DNA, 19 bp, Mus musculus
  siRNA target sequence for Pon1 (NM_011134.1,140-158).
cggtcttcctatcaaacaa

SEQ ID NO: 589734 - DNA, 19 bp, Mus musculus
  siRNA target sequence for Pon1 (NM_011134.1,142-160).
gtcttcctatcaaacaaga

SEQ ID NO: 589735 - DNA, 19 bp, Mus musculus
  siRNA target sequence for Pon1 (NM_011134.1,183-201).
cgccagtagaacttcctaa

SEQ ID NO: 589736 - DNA, 19 bp, Mus musculus
  siRNA target sequence for Pon1 (NM_011134.1,226-244).
gacgggtgctgaagactta

SEQ ID NO: 589737 - DNA, 19 bp, Mus musculus
  siRNA target sequence for Pon1 (NM_011134.1,228-246).
cgggtgctgaagacttaga

SEQ ID NO: 589738 - DNA, 19 bp, Mus musculus
  siRNA target sequence for Pon1 (NM_011134.1,234-252).
ctgaagacttagagattct

SEQ ID NO: 589739 - DNA, 19 bp, Mus musculus
  siRNA target sequence for Pon1 (NM_011134.1,254-272).
cctaatggactaactttct

SEQ ID NO: 589740 - DNA, 19 bp, Mus musculus
  siRNA target sequence for Pon1 (NM_011134.1,255-273).
ctaatggactaactttctt

SEQ ID NO: 589741 - DNA, 19 bp, Mus musculus
  siRNA target sequence for Pon1 (NM_011134.1,260-278).
ggactaactttctttagca

SEQ ID NO: 589742 - DNA, 19 bp, Mus musculus
  siRNA target sequence for Pon1 (NM_011134.1,315-333).
ccagtaagcctggaaaaat

SEQ ID NO: 589743 - DNA, 19 bp, Mus musculus
  siRNA target sequence for Pon1 (NM_011134.1,368-386).
gtgtcagagttagaaatta

SEQ ID NO: 589744 - DNA, 19 bp, Mus musculus
  siRNA target sequence for Pon1 (NM_011134.1,370-388).
gtcagagttagaaattata

SEQ ID NO: 589745 - DNA, 19 bp, Mus musculus
  siRNA target sequence for Pon1 (NM_011134.1,376-394).
gttagaaattataggaaat

SEQ ID NO: 589746 - DNA, 19 bp, Mus musculus
  siRNA target sequence for Pon1 (NM_011134.1,418-436).
ccctcatgggattagtaca

SEQ ID NO: 589747 - DNA, 19 bp, Mus musculus
  siRNA target sequence for Pon1 (NM_011134.1,419-437).
cctcatgggattagtacat

SEQ ID NO: 589748 - DNA, 19 bp, Mus musculus
  siRNA target sequence for Pon1 (NM_011134.1,420-438).
ctcatgggattagtacatt

SEQ ID NO: 589749 - DNA, 19 bp, Mus musculus
  siRNA target sequence for Pon1 (NM_011134.1,422-440).
catgggattagtacattca

SEQ ID NO: 589750 - DNA, 19 bp, Mus musculus
  siRNA target sequence for Pon1 (NM_011134.1,531-549).
gatcactcttgcatctgaa

SEQ ID NO: 589751 - DNA, 19 bp, Mus musculus
  siRNA target sequence for Pon1 (NM_011134.1,569-587).
ctgcctagcatcaacgata

SEQ ID NO: 589752 - DNA, 19 bp, Mus musculus
  siRNA target sequence for Pon1 (NM_011134.1,571-589).
gcctagcatcaacgatata

SEQ ID NO: 589753 - DNA, 19 bp, Mus musculus
  siRNA target sequence for Pon1 (NM_011134.1,580-598).
caacgatatagctgctatt

SEQ ID NO: 589754 - DNA, 19 bp, Mus musculus
  siRNA target sequence for Pon1 (NM_011134.1,583-601).
cgatatagctgctattgga

SEQ ID NO: 589755 - DNA, 19 bp, Mus musculus
  siRNA target sequence for Pon1 (NM_011134.1,653-671).
cggtcctgggaaatgtact

SEQ ID NO: 589756 - DNA, 19 bp, Mus musculus
  siRNA target sequence for Pon1 (NM_011134.1,679-697).
gtcgtggtccaatgttgtt

SEQ ID NO: 589757 - DNA, 19 bp, Mus musculus
  siRNA target sequence for Pon1 (NM_011134.1,681-699).
cgtggtccaatgttgttta

SEQ ID NO: 589758 - DNA, 19 bp, Mus musculus
  siRNA target sequence for Pon1 (NM_011134.1,725-743).
gtagcagaagggtttgatt

SEQ ID NO: 589759 - DNA, 19 bp, Mus musculus
  siRNA target sequence for Pon1 (NM_011134.1,765-783).
cccttgatggcaagtatgt

SEQ ID NO: 589760 - DNA, 19 bp, Mus musculus
  siRNA target sequence for Pon1 (NM_011134.1,799-817).
gctggctcacaagattcat

SEQ ID NO: 589761 - DNA, 19 bp, Mus musculus
  siRNA target sequence for Pon1 (NM_011134.1,820-838).
gtatgaaaagcatgctaat

SEQ ID NO: 589762 - DNA, 19 bp, Mus musculus
  siRNA target sequence for Pon1 (NM_011134.1,981-999).
gctcagaggtgcttcgaat

SEQ ID NO: 589763 - DNA, 19 bp, Mus musculus
  siRNA target sequence for Pon1 (NM_011134.1,991-1009).
gcttcgaatccagaacatt

SEQ ID NO: 589764 - DNA, 19 bp, Mus musculus
  siRNA target sequence for Pon1 (NM_011134.1,992-1010).
cttcgaatccagaacattt

SEQ ID NO: 589765 - DNA, 19 bp, Mus musculus
  siRNA target sequence for Pon1 (NM_011134.1,995-1013).
cgaatccagaacattttat

SEQ ID NO: 589766 - DNA, 19 bp, Mus musculus
  siRNA target sequence for Pon1 (NM_011134.1,1074-1092).
cggtcgcctctgtgtacaa

SEQ ID NO: 589767 - DNA, 19 bp, Mus musculus
  siRNA target sequence for Pon1 (NM_011134.1,1075-1093).
ggtcgcctctgtgtacaaa

SEQ ID NO: 589768 - DNA, 19 bp, Mus musculus
  siRNA target sequence for Pon3 (NM_173006.1,39-57).
gagcctgtctggccttaat

SEQ ID NO: 589769 - DNA, 19 bp, Mus musculus
  siRNA target sequence for Pon3 (NM_173006.1,296-314).
gcgcaagcactggaaatca

SEQ ID NO: 589770 - DNA, 19 bp, Mus musculus
  siRNA target sequence for Pon3 (NM_173006.1,323-341).
cttgaccaggagtcactaa

SEQ ID NO: 589771 - DNA, 19 bp, Mus musculus
  siRNA target sequence for Pon3 (NM_173006.1,416-434).
gactccactgtggagatat

SEQ ID NO: 589772 - DNA, 19 bp, Mus musculus
  siRNA target sequence for Pon3 (NM_173006.1,463-481).
catccacctgaaaactcta

SEQ ID NO: 589773 - DNA, 19 bp, Mus musculus
  siRNA target sequence for Pon3 (NM_173006.1,542-560).
gccacaagagaccattact

SEQ ID NO: 589774 - DNA, 19 bp, Mus musculus
  siRNA target sequence for Pon3 (NM_173006.1,553-571).
ccattactttaccagttat

SEQ ID NO: 589775 - DNA, 19 bp, Mus musculus
  siRNA target sequence for Pon3 (NM_173006.1,578-596).
gtacttctggagatgatct

SEQ ID NO: 589776 - DNA, 19 bp, Mus musculus
  siRNA target sequence for Pon3 (NM_173006.1,609-627).
ggacttccgtcgttttcta

SEQ ID NO: 589777 - DNA, 19 bp, Mus musculus
  siRNA target sequence for Pon3 (NM_173006.1,697-715).
ccagaagtttgtctatgta

SEQ ID NO: 589778 - DNA, 19 bp, Mus musculus
  siRNA target sequence for Pon3 (NM_173006.1,707-725).
gtctatgtagctgatgtaa

SEQ ID NO: 589779 - DNA, 19 bp, Mus musculus
  siRNA target sequence for Pon3 (NM_173006.1,797-815).
ggaaccttagtggataact

SEQ ID NO: 589780 - DNA, 19 bp, Mus musculus
  siRNA target sequence for Pon3 (NM_173006.1,922-940).
catccaggactctttgtca

SEQ ID NO: 589781 - DNA, 19 bp, Mus musculus
  siRNA target sequence for Pon3 (NM_173006.1,926-944).
caggactctttgtcagata

SEQ ID NO: 589782 - DNA, 19 bp, Mus musculus
  siRNA target sequence for Pon3 (NM_173006.1,1027-1045).
gctcataggtactatattt

SEQ ID NO: 589783 - DNA, 19 bp, Mus musculus
  siRNA target sequence for Akp5 (NM_007433.2,312-330).
ctaagaacctcgttatcct

SEQ ID NO: 589784 - DNA, 19 bp, Mus musculus
  siRNA target sequence for Akp5 (NM_007433.2,343-361).
gatgggggtgtctacagta

SEQ ID NO: 589785 - DNA, 19 bp, Mus musculus
  siRNA target sequence for Akp5 (NM_007433.2,363-381).
ccgctacccggatcctaaa

SEQ ID NO: 589786 - DNA, 19 bp, Mus musculus
  siRNA target sequence for Akp5 (NM_007433.2,412-430).
gacacagctagctatggat

SEQ ID NO: 589787 - DNA, 19 bp, Mus musculus
  siRNA target sequence for Akp5 (NM_007433.2,518-536).
ggggtcaaaaccaacatga

SEQ ID NO: 589788 - DNA, 19 bp, Mus musculus
  siRNA target sequence for Akp5 (NM_007433.2,519-537).
gggtcaaaaccaacatgaa

SEQ ID NO: 589789 - DNA, 19 bp, Mus musculus
  siRNA target sequence for Akp5 (NM_007433.2,717-735).
ggtactcggatgcacaaat

SEQ ID NO: 589790 - DNA, 19 bp, Mus musculus
  siRNA target sequence for Akp5 (NM_007433.2,903-921).
gacgcaacctagttcaaga

SEQ ID NO: 589791 - DNA, 19 bp, Mus musculus
  siRNA target sequence for Akp5 (NM_007433.2,1359-1377).
ctgaggatggcaaatcctt

SEQ ID NO: 589792 - DNA, 19 bp, Mus musculus
  siRNA target sequence for Akp5 (NM_007433.2,1374-1392).
cctttacctcgatactata

SEQ ID NO: 589793 - DNA, 19 bp, Mus musculus
  siRNA target sequence for Akp5 (NM_007433.2,1395-1413).
gcaacggtcctggttacaa

SEQ ID NO: 589794 - DNA, 19 bp, Mus musculus
  siRNA target sequence for Akp5 (NM_007433.2,1703-1721).
ctgttggcagggaaaatgt

SEQ ID NO: 589795 - DNA, 19 bp, Mus musculus
  siRNA target sequence for Sgpp1 (NM_030750.2,501-519).
ggcaacgagctcttctaca

SEQ ID NO: 589796 - DNA, 19 bp, Mus musculus
  siRNA target sequence for Sgpp1 (NM_030750.2,506-524).
cgagctcttctacatctta

SEQ ID NO: 589797 - DNA, 19 bp, Mus musculus
  siRNA target sequence for Sgpp1 (NM_030750.2,567-585).
cggaggctggtgatcatct

SEQ ID NO: 589798 - DNA, 19 bp, Mus musculus
  siRNA target sequence for Sgpp1 (NM_030750.2,803-821).
ctgctggagttcactagtt

SEQ ID NO: 589799 - DNA, 19 bp, Mus musculus
  siRNA target sequence for Sgpp1 (NM_030750.2,819-837).
gtttgcctaagtagaatct

SEQ ID NO: 589800 - DNA, 19 bp, Mus musculus
  siRNA target sequence for Sgpp1 (NM_030750.2,823-841).
gcctaagtagaatctacat

SEQ ID NO: 589801 - DNA, 19 bp, Mus musculus
  siRNA target sequence for Sgpp1 (NM_030750.2,866-884).
cattgctggattcttgtat

SEQ ID NO: 589802 - DNA, 19 bp, Mus musculus
  siRNA target sequence for Sgpp1 (NM_030750.2,870-888).
gctggattcttgtatacca

SEQ ID NO: 589803 - DNA, 19 bp, Mus musculus
  siRNA target sequence for Sgpp1 (NM_030750.2,873-891).
ggattcttgtataccattt

SEQ ID NO: 589804 - DNA, 19 bp, Mus musculus
  siRNA target sequence for Sgpp1 (NM_030750.2,874-892).
gattcttgtataccatttt

SEQ ID NO: 589805 - DNA, 19 bp, Mus musculus
  siRNA target sequence for Sgpp1 (NM_030750.2,881-899).
gtataccattttaatctta

SEQ ID NO: 589806 - DNA, 19 bp, Mus musculus
  siRNA target sequence for Sgpp1 (NM_030750.2,913-931).
cattggtggacctgattga

SEQ ID NO: 589807 - DNA, 19 bp, Mus musculus
  siRNA target sequence for Sgpp1 (NM_030750.2,968-986).
catcatcgggcttcactta

SEQ ID NO: 589808 - DNA, 19 bp, Mus musculus
  siRNA target sequence for Sgpp1 (NM_030750.2,1100-1118).
cctgggcctatccttagaa

SEQ ID NO: 589809 - DNA, 19 bp, Mus musculus
  siRNA target sequence for Sgpp1 (NM_030750.2,1128-1146).
cacatgttacccttagcta

SEQ ID NO: 589810 - DNA, 19 bp, Mus musculus
  siRNA target sequence for Sgpp1 (NM_030750.2,1148-1166).
cccccctcttactgtaact

SEQ ID NO: 589811 - DNA, 19 bp, Mus musculus
  siRNA target sequence for Sgpp1 (NM_030750.2,1150-1168).
cccctcttactgtaactct

SEQ ID NO: 589812 - DNA, 19 bp, Mus musculus
  siRNA target sequence for Sgpp1 (NM_030750.2,1169-1187).
gtttggaaaagccatatta

SEQ ID NO: 589813 - DNA, 19 bp, Mus musculus
  siRNA target sequence for Sgpp1 (NM_030750.2,1201-1219).
gaatgctgcttgtactgtt

SEQ ID NO: 589814 - DNA, 19 bp, Mus musculus
  siRNA target sequence for Sgpp1 (NM_030750.2,1215-1233).
ctgttcgtgagggatatca

SEQ ID NO: 589815 - DNA, 19 bp, Mus musculus
  siRNA target sequence for Sgpp1 (NM_030750.2,1221-1239).
gtgagggatatcatgaaga

SEQ ID NO: 589816 - DNA, 19 bp, Mus musculus
  siRNA target sequence for Sgpp1 (NM_030750.2,1225-1243).
gggatatcatgaagaagat

SEQ ID NO: 589817 - DNA, 19 bp, Mus musculus
  siRNA target sequence for Sgpp1 (NM_030750.2,1259-1277).
ctgtaaactctccagtatt

SEQ ID NO: 589818 - DNA, 19 bp, Mus musculus
  siRNA target sequence for Sgpp1 (NM_030750.2,1322-1340).
gctgccataccggtatatt

SEQ ID NO: 589819 - DNA, 19 bp, Mus musculus
  siRNA target sequence for Sgpp1 (NM_030750.2,1323-1341).
ctgccataccggtatatta

SEQ ID NO: 589820 - DNA, 19 bp, Mus musculus
  siRNA target sequence for Sgpp1 (NM_030750.2,1326-1344).
ccataccggtatattacct

SEQ ID NO: 589821 - DNA, 19 bp, Mus musculus
  siRNA target sequence for Sgpp1 (NM_030750.2,1327-1345).
cataccggtatattaccta

SEQ ID NO: 589822 - DNA, 19 bp, Mus musculus
  siRNA target sequence for Sgpp1 (NM_030750.2,1370-1388).
gtttttggtcccctatgta

SEQ ID NO: 589823 - DNA, 19 bp, Mus musculus
  siRNA target sequence for Psph (NM_133900.2,625-643).
cagtgtgctttgatgttga

SEQ ID NO: 589824 - DNA, 19 bp, Mus musculus
  siRNA target sequence for Psph (NM_133900.2,702-720).
gccgcagtgtctgaaatga

SEQ ID NO: 589825 - DNA, 19 bp, Mus musculus
  siRNA target sequence for Psph (NM_133900.2,735-753).
ggaggagcattgcctttta

SEQ ID NO: 589826 - DNA, 19 bp, Mus musculus
  siRNA target sequence for Psph (NM_133900.2,736-754).
gaggagcattgccttttaa

SEQ ID NO: 589827 - DNA, 19 bp, Mus musculus
  siRNA target sequence for Psph (NM_133900.2,868-886).
gcctccaggagcgtaatgt

SEQ ID NO: 589828 - DNA, 19 bp, Mus musculus
  siRNA target sequence for Psph (NM_133900.2,933-951).
gttgctgcaaagctcaata

SEQ ID NO: 589829 - DNA, 19 bp, Mus musculus
  siRNA target sequence for Psph (NM_133900.2,1000-1018).
gtgagtacgcaggttttga

SEQ ID NO: 589830 - DNA, 19 bp, Mus musculus
  siRNA target sequence for Psph (NM_133900.2,1038-1056).
gagtcgggtgggaaaggaa

SEQ ID NO: 589831 - DNA, 19 bp, Mus musculus
  siRNA target sequence for Psph (NM_133900.2,1045-1063).
gtgggaaaggaaaggttat

SEQ ID NO: 589832 - DNA, 19 bp, Mus musculus
  siRNA target sequence for Psph (NM_133900.2,1054-1072).
gaaaggttattcggttttt

SEQ ID NO: 589833 - DNA, 19 bp, Mus musculus
  siRNA target sequence for Ppap2a (NM_008903.1,343-361).
ggctggattgccttttgca

SEQ ID NO: 589834 - DNA, 19 bp, Mus musculus
  siRNA target sequence for Ppap2a (NM_008903.1,345-363).
ctggattgccttttgcaat

SEQ ID NO: 589835 - DNA, 19 bp, Mus musculus
  siRNA target sequence for Ppap2a (NM_008903.1,348-366).
gattgccttttgcaattct

SEQ ID NO: 589836 - DNA, 19 bp, Mus musculus
  siRNA target sequence for Ppap2a (NM_008903.1,383-401).
cccttccagcgaggaatat

SEQ ID NO: 589837 - DNA, 19 bp, Mus musculus
  siRNA target sequence for Ppap2a (NM_008903.1,384-402).
ccttccagcgaggaatatt

SEQ ID NO: 589838 - DNA, 19 bp, Mus musculus
  siRNA target sequence for Ppap2a (NM_008903.1,388-406).
ccagcgaggaatattctgt

SEQ ID NO: 589839 - DNA, 19 bp, Mus musculus
  siRNA target sequence for Ppap2a (NM_008903.1,389-407).
cagcgaggaatattctgta

SEQ ID NO: 589840 - DNA, 19 bp, Mus musculus
  siRNA target sequence for Ppap2a (NM_008903.1,396-414).
gaatattctgtaatgatga

SEQ ID NO: 589841 - DNA, 19 bp, Mus musculus
  siRNA target sequence for Ppap2a (NM_008903.1,417-435).
ccatcaagtacccttacaa

SEQ ID NO: 589842 - DNA, 19 bp, Mus musculus
  siRNA target sequence for Ppap2a (NM_008903.1,436-454).
ggaagacaccataccttat

SEQ ID NO: 589843 - DNA, 19 bp, Mus musculus
  siRNA target sequence for Ppap2a (NM_008903.1,456-474).
ccttattaggtggaatagt

SEQ ID NO: 589844 - DNA, 19 bp, Mus musculus
  siRNA target sequence for Ppap2a (NM_008903.1,464-482).
ggtggaatagtcattccat

SEQ ID NO: 589845 - DNA, 19 bp, Mus musculus
  siRNA target sequence for Ppap2a (NM_008903.1,465-483).
gtggaatagtcattccatt

SEQ ID NO: 589846 - DNA, 19 bp, Mus musculus
  siRNA target sequence for Ppap2a (NM_008903.1,473-491).
gtcattccattctgtatta

SEQ ID NO: 589847 - DNA, 19 bp, Mus musculus
  siRNA target sequence for Ppap2a (NM_008903.1,479-497).
ccattctgtattatcgtta

SEQ ID NO: 589848 - DNA, 19 bp, Mus musculus
  siRNA target sequence for Ppap2a (NM_008903.1,480-498).
cattctgtattatcgttat

SEQ ID NO: 589849 - DNA, 19 bp, Mus musculus
  siRNA target sequence for Ppap2a (NM_008903.1,484-502).
ctgtattatcgttatgagt

SEQ ID NO: 589850 - DNA, 19 bp, Mus musculus
  siRNA target sequence for Ppap2a (NM_008903.1,533-551).
gtcttgcattcgaattcct

SEQ ID NO: 589851 - DNA, 19 bp, Mus musculus
  siRNA target sequence for Ppap2a (NM_008903.1,535-553).
cttgcattcgaattccttt

SEQ ID NO: 589852 - DNA, 19 bp, Mus musculus
  siRNA target sequence for Ppap2a (NM_008903.1,587-605).
gccgtcggagcctttttgt

SEQ ID NO: 589853 - DNA, 19 bp, Mus musculus
  siRNA target sequence for Ppap2a (NM_008903.1,588-606).
ccgtcggagcctttttgtt

SEQ ID NO: 589854 - DNA, 19 bp, Mus musculus
  siRNA target sequence for Ppap2a (NM_008903.1,631-649).
gactgacatcgctaagtat

SEQ ID NO: 589855 - DNA, 19 bp, Mus musculus
  siRNA target sequence for Ppap2a (NM_008903.1,635-653).
gacatcgctaagtatacta

SEQ ID NO: 589856 - DNA, 19 bp, Mus musculus
  siRNA target sequence for Ppap2a (NM_008903.1,670-688).
gcacttcttggctatctgt

SEQ ID NO: 589857 - DNA, 19 bp, Mus musculus
  siRNA target sequence for Ppap2a (NM_008903.1,724-742).
ctatattgaggactacata

SEQ ID NO: 589858 - DNA, 19 bp, Mus musculus
  siRNA target sequence for Ppap2a (NM_008903.1,793-811).
gggacactcttcattctct

SEQ ID NO: 589859 - DNA, 19 bp, Mus musculus
  siRNA target sequence for Ppap2a (NM_008903.1,794-812).
ggacactcttcattctcta

SEQ ID NO: 589860 - DNA, 19 bp, Mus musculus
  siRNA target sequence for Ppap2a (NM_008903.1,795-813).
gacactcttcattctctat

SEQ ID NO: 589861 - DNA, 19 bp, Mus musculus
  siRNA target sequence for Ppap2a (NM_008903.1,823-841).
gctgtttgtcgcactttat

SEQ ID NO: 589862 - DNA, 19 bp, Mus musculus
  siRNA target sequence for Ppap2a (NM_008903.1,902-920).
ctcattgctttttccatat

SEQ ID NO: 589863 - DNA, 19 bp, Mus musculus
  siRNA target sequence for Ppap2a (NM_008903.1,967-985).
cgtcacagttggactcatt

SEQ ID NO: 589864 - DNA, 19 bp, Mus musculus
  siRNA target sequence for Ppap2a (NM_008903.1,990-1008).
gagctgctatggctatact

SEQ ID NO: 589865 - DNA, 19 bp, Mus musculus
  siRNA target sequence for Ppap2a (NM_008903.1,1007-1025).
ctggttgctttgtatgtat

SEQ ID NO: 589866 - DNA, 19 bp, Mus musculus
  siRNA target sequence for Ppap2a (NM_008903.1,1079-1097).
cacacgactctccatgaaa

SEQ ID NO: 589867 - DNA, 19 bp, Mus musculus
  siRNA target sequence for Ppap2a (NM_008903.1,1100-1118).
gccagttcacggaactact

SEQ ID NO: 589868 - DNA, 19 bp, Mus musculus
  siRNA target sequence for Pde6g (NM_012065.2,158-176).
gccacccaagggtgagatt

SEQ ID NO: 589869 - DNA, 19 bp, Mus musculus
  siRNA target sequence for Pde6g (NM_012065.2,217-235).
ggaaaggaccacctaagtt

SEQ ID NO: 589870 - DNA, 19 bp, Mus musculus
  siRNA target sequence for Pde6g (NM_012065.2,246-264).
caaacaaggcagttcaaga

SEQ ID NO: 589871 - DNA, 19 bp, Mus musculus
  siRNA target sequence for Pde6h (NM_023898.3,179-197).
ggcagactcgacagttcaa

SEQ ID NO: 589872 - DNA, 19 bp, Mus musculus
  siRNA target sequence for Pde6h (NM_023898.3,253-271).
gaggggctaggaacagata

SEQ ID NO: 589873 - DNA, 19 bp, Mus musculus
  siRNA target sequence for Pde7b (NM_013875.2,408-426).
gtgtggcgaagtcttgttt

SEQ ID NO: 589874 - DNA, 19 bp, Mus musculus
  siRNA target sequence for Pde7b (NM_013875.2,410-428).
gtggcgaagtcttgtttga

SEQ ID NO: 589875 - DNA, 19 bp, Mus musculus
  siRNA target sequence for Pde7b (NM_013875.2,412-430).
ggcgaagtcttgtttgaga

SEQ ID NO: 589876 - DNA, 19 bp, Mus musculus
  siRNA target sequence for Pde7b (NM_013875.2,433-451).
cctgaacagagtgtcaaat

SEQ ID NO: 589877 - DNA, 19 bp, Mus musculus
  siRNA target sequence for Pde7b (NM_013875.2,528-546).
cattgacttccgtctactt

SEQ ID NO: 589878 - DNA, 19 bp, Mus musculus
  siRNA target sequence for Pde7b (NM_013875.2,537-555).
ccgtctacttaacaataca

SEQ ID NO: 589879 - DNA, 19 bp, Mus musculus
  siRNA target sequence for Pde7b (NM_013875.2,538-556).
cgtctacttaacaatacaa

SEQ ID NO: 589880 - DNA, 19 bp, Mus musculus
  siRNA target sequence for Pde7b (NM_013875.2,588-606).
ggtgaaacgactgttaagt

SEQ ID NO: 589881 - DNA, 19 bp, Mus musculus
  siRNA target sequence for Pde7b (NM_013875.2,589-607).
gtgaaacgactgttaagtt

SEQ ID NO: 589882 - DNA, 19 bp, Mus musculus
  siRNA target sequence for Pde7b (NM_013875.2,595-613).
cgactgttaagtttccaaa

SEQ ID NO: 589883 - DNA, 19 bp, Mus musculus
  siRNA target sequence for Pde7b (NM_013875.2,721-739).
ggaacgtgggactttgaca

SEQ ID NO: 589884 - DNA, 19 bp, Mus musculus
  siRNA target sequence for Pde7b (NM_013875.2,722-740).
gaacgtgggactttgacat

SEQ ID NO: 589885 - DNA, 19 bp, Mus musculus
  siRNA target sequence for Pde7b (NM_013875.2,767-785).
ggaacagtctggtaactct

SEQ ID NO: 589886 - DNA, 19 bp, Mus musculus
  siRNA target sequence for Pde7b (NM_013875.2,811-829).
gggctcatccaccatttca

SEQ ID NO: 589887 - DNA, 19 bp, Mus musculus
  siRNA target sequence for Pde7b (NM_013875.2,852-870).
caggtttctggttatggtt

SEQ ID NO: 589888 - DNA, 19 bp, Mus musculus
  siRNA target sequence for Pde7b (NM_013875.2,1039-1057).
ggggtcaaccagccatttt

SEQ ID NO: 589889 - DNA, 19 bp, Mus musculus
  siRNA target sequence for Pde7b (NM_013875.2,1040-1058).
gggtcaaccagccattttt

SEQ ID NO: 589890 - DNA, 19 bp, Mus musculus
  siRNA target sequence for Pde7b (NM_013875.2,1042-1060).
gtcaaccagccatttttga

SEQ ID NO: 589891 - DNA, 19 bp, Mus musculus
  siRNA target sequence for Pde7b (NM_013875.2,1050-1068).
gccatttttgatcaaaact

SEQ ID NO: 589892 - DNA, 19 bp, Mus musculus
  siRNA target sequence for Pde7b (NM_013875.2,1078-1096).
cttgccaacctgtatcaga

SEQ ID NO: 589893 - DNA, 19 bp, Mus musculus
  siRNA target sequence for Pde7b (NM_013875.2,1081-1099).
gccaacctgtatcagaata

SEQ ID NO: 589894 - DNA, 19 bp, Mus musculus
  siRNA target sequence for Pde7b (NM_013875.2,1117-1135).
caccactggcgatctacaa

SEQ ID NO: 589895 - DNA, 19 bp, Mus musculus
  siRNA target sequence for Pde7b (NM_013875.2,1119-1137).
ccactggcgatctacaatt

SEQ ID NO: 589896 - DNA, 19 bp, Mus musculus
  siRNA target sequence for Pde7b (NM_013875.2,1251-1269).
gtttctgacccgcttaaaa

SEQ ID NO: 589897 - DNA, 19 bp, Mus musculus
  siRNA target sequence for Pde7b (NM_013875.2,1276-1294).
ctccacaataaagatttga

SEQ ID NO: 589898 - DNA, 19 bp, Mus musculus
  siRNA target sequence for Pde7b (NM_013875.2,1311-1329).
ggacagacactttatgctt

SEQ ID NO: 589899 - DNA, 19 bp, Mus musculus
  siRNA target sequence for Pde7b (NM_013875.2,1344-1362).
gtgtgctgacatttgcaat

SEQ ID NO: 589900 - DNA, 19 bp, Mus musculus
  siRNA target sequence for Pde7b (NM_013875.2,1348-1366).
gctgacatttgcaatcctt

SEQ ID NO: 589901 - DNA, 19 bp, Mus musculus
  siRNA target sequence for Pde7b (NM_013875.2,1466-1484).
ctctttgtaatcaacagaa

SEQ ID NO: 589902 - DNA, 19 bp, Mus musculus
  siRNA target sequence for Pde7b (NM_013875.2,1494-1512).
ccctagcatacaaattggt

SEQ ID NO: 589903 - DNA, 19 bp, Mus musculus
  siRNA target sequence for Pde7b (NM_013875.2,1495-1513).
cctagcatacaaattggtt

SEQ ID NO: 589904 - DNA, 19 bp, Mus musculus
  siRNA target sequence for Pde7b (NM_013875.2,1496-1514).
ctagcatacaaattggttt

SEQ ID NO: 589905 - DNA, 19 bp, Mus musculus
  siRNA target sequence for Pde7b (NM_013875.2,1571-1589).
gcaccctgtcggagaacat

SEQ ID NO: 589906 - DNA, 19 bp, Mus musculus
  siRNA target sequence for Pde7b (NM_013875.2,1576-1594).
ctgtcggagaacatgctaa

SEQ ID NO: 589907 - DNA, 19 bp, Mus musculus
  siRNA target sequence for Pde7b (NM_013875.2,1595-1613).
gccatctcgcgcacaacaa

SEQ ID NO: 589908 - DNA, 19 bp, Mus musculus
  siRNA target sequence for B230331L10Rik (NM_172263.1,233-251).
ctatccaggttctgctaat

SEQ ID NO: 589909 - DNA, 19 bp, Mus musculus
  siRNA target sequence for B230331L10Rik (NM_172263.1,246-264).
gctaatcttcgcaaaggaa

SEQ ID NO: 589910 - DNA, 19 bp, Mus musculus
  siRNA target sequence for B230331L10Rik (NM_172263.1,298-316).
gacagagctggctacagat

SEQ ID NO: 589911 - DNA, 19 bp, Mus musculus
  siRNA target sequence for B230331L10Rik (NM_172263.1,360-378).
ggacaagcatcatgaaatt

SEQ ID NO: 589912 - DNA, 19 bp, Mus musculus
  siRNA target sequence for B230331L10Rik (NM_172263.1,361-379).
gacaagcatcatgaaatta

SEQ ID NO: 589913 - DNA, 19 bp, Mus musculus
  siRNA target sequence for B230331L10Rik (NM_172263.1,393-411).
caggcagagccggaacttt

SEQ ID NO: 589914 - DNA, 19 bp, Mus musculus
  siRNA target sequence for B230331L10Rik (NM_172263.1,480-498).
cgtttcacaagcatctgat

SEQ ID NO: 589915 - DNA, 19 bp, Mus musculus
  siRNA target sequence for B230331L10Rik (NM_172263.1,538-556).
ggcttcaaccggagattta

SEQ ID NO: 589916 - DNA, 19 bp, Mus musculus
  siRNA target sequence for B230331L10Rik (NM_172263.1,539-557).
gcttcaaccggagatttat

SEQ ID NO: 589917 - DNA, 19 bp, Mus musculus
  siRNA target sequence for B230331L10Rik (NM_172263.1,578-596).
cttgctataatgaactgat

SEQ ID NO: 589918 - DNA, 19 bp, Mus musculus
  siRNA target sequence for B230331L10Rik (NM_172263.1,581-599).
gctataatgaactgattca

SEQ ID NO: 589919 - DNA, 19 bp, Mus musculus
  siRNA target sequence for B230331L10Rik (NM_172263.1,582-600).
ctataatgaactgattcaa

SEQ ID NO: 589920 - DNA, 19 bp, Mus musculus
  siRNA target sequence for B230331L10Rik (NM_172263.1,616-634).
gttcgctcacagttcaaat

SEQ ID NO: 589921 - DNA, 19 bp, Mus musculus
  siRNA target sequence for B230331L10Rik (NM_172263.1,672-690).
ctgtcacgaagccatagaa

SEQ ID NO: 589922 - DNA, 19 bp, Mus musculus
  siRNA target sequence for B230331L10Rik (NM_172263.1,676-694).
cacgaagccatagaaataa

SEQ ID NO: 589923 - DNA, 19 bp, Mus musculus
  siRNA target sequence for B230331L10Rik (NM_172263.1,684-702).
catagaaataacaagtgat

SEQ ID NO: 589924 - DNA, 19 bp, Mus musculus
  siRNA target sequence for B230331L10Rik (NM_172263.1,783-801).
cgctgacctacctaagagt

SEQ ID NO: 589925 - DNA, 19 bp, Mus musculus
  siRNA target sequence for B230331L10Rik (NM_172263.1,1041-1059).
ggctcccatcacaaaggtt

SEQ ID NO: 589926 - DNA, 19 bp, Mus musculus
  siRNA target sequence for B230331L10Rik (NM_172263.1,1083-1101).
ggagaacagcccagttaca

SEQ ID NO: 589927 - DNA, 19 bp, Mus musculus
  siRNA target sequence for B230331L10Rik (NM_172263.1,1117-1135).
gacagagtcctagaaattt

SEQ ID NO: 589928 - DNA, 19 bp, Mus musculus
  siRNA target sequence for B230331L10Rik (NM_172263.1,1434-1452).
ctctcggtttggagtatgt

SEQ ID NO: 589929 - DNA, 19 bp, Mus musculus
  siRNA target sequence for B230331L10Rik (NM_172263.1,1438-1456).
cggtttggagtatgtgaat

SEQ ID NO: 589930 - DNA, 19 bp, Mus musculus
  siRNA target sequence for B230331L10Rik (NM_172263.1,1669-1687).
cccggaaggaccaactctt

SEQ ID NO: 589931 - DNA, 19 bp, Mus musculus
  siRNA target sequence for B230331L10Rik (NM_172263.1,1670-1688).
ccggaaggaccaactcttt

SEQ ID NO: 589932 - DNA, 19 bp, Mus musculus
  siRNA target sequence for B230331L10Rik (NM_172263.1,1785-1803).
ggacaccaagtgcaacatt

SEQ ID NO: 589933 - DNA, 19 bp, Mus musculus
  siRNA target sequence for B230331L10Rik (NM_172263.1,1816-1834).
gacaggaaccactatcgaa

SEQ ID NO: 589934 - DNA, 19 bp, Mus musculus
  siRNA target sequence for B230331L10Rik (NM_172263.1,1835-1853).
cgctgcgccaggctattat

SEQ ID NO: 589935 - DNA, 19 bp, Mus musculus
  siRNA target sequence for B230331L10Rik (NM_172263.1,1866-1884).
ggctacagagatgacaaaa

SEQ ID NO: 589936 - DNA, 19 bp, Mus musculus
  siRNA target sequence for B230331L10Rik (NM_172263.1,1887-1905).
cttcgagcacgtgaacaaa

SEQ ID NO: 589937 - DNA, 19 bp, Mus musculus
  siRNA target sequence for B230331L10Rik (NM_172263.1,1939-1957).
gagagtgagggcagtgatt

SEQ ID NO: 589938 - DNA, 19 bp, Mus musculus
  siRNA target sequence for B230331L10Rik (NM_172263.1,1941-1959).
gagtgagggcagtgattgt

SEQ ID NO: 589939 - DNA, 19 bp, Mus musculus
  siRNA target sequence for B230331L10Rik (NM_172263.1,1943-1961).
gtgagggcagtgattgtga

SEQ ID NO: 589940 - DNA, 19 bp, Mus musculus
  siRNA target sequence for B230331L10Rik (NM_172263.1,1945-1963).
gagggcagtgattgtgaat

SEQ ID NO: 589941 - DNA, 19 bp, Mus musculus
  siRNA target sequence for B230331L10Rik (NM_172263.1,2084-2102).
ggatctccgaggagtactt

SEQ ID NO: 589942 - DNA, 19 bp, Mus musculus
  siRNA target sequence for B230331L10Rik (NM_172263.1,2085-2103).
gatctccgaggagtacttt

SEQ ID NO: 589943 - DNA, 19 bp, Mus musculus
  siRNA target sequence for B230331L10Rik (NM_172263.1,2152-2170).
gtgttcgaccgcaatacct

SEQ ID NO: 589944 - DNA, 19 bp, Mus musculus
  siRNA target sequence for B230331L10Rik (NM_172263.1,2268-2286).
gcacctggccgataactat

SEQ ID NO: 589945 - DNA, 19 bp, Mus musculus
  siRNA target sequence for B230331L10Rik (NM_172263.1,2269-2287).
cacctggccgataactata

SEQ ID NO: 589946 - DNA, 19 bp, Mus musculus
  siRNA target sequence for B230331L10Rik (NM_172263.1,2271-2289).
cctggccgataactataaa

SEQ ID NO: 589947 - DNA, 19 bp, Mus musculus
  siRNA target sequence for Pde10a (NM_011866.1,273-291).
gtttgacggatgaaaaggt

SEQ ID NO: 589948 - DNA, 19 bp, Mus musculus
  siRNA target sequence for Pde10a (NM_011866.1,314-332).
ccccaggtattagatgaat

SEQ ID NO: 589949 - DNA, 19 bp, Mus musculus
  siRNA target sequence for Pde10a (NM_011866.1,426-444).
gcaggtaccaggatacgaa

SEQ ID NO: 589950 - DNA, 19 bp, Mus musculus
  siRNA target sequence for Pde10a (NM_011866.1,427-445).
caggtaccaggatacgaat

SEQ ID NO: 589951 - DNA, 19 bp, Mus musculus
  siRNA target sequence for Pde10a (NM_011866.1,429-447).
ggtaccaggatacgaatat

SEQ ID NO: 589952 - DNA, 19 bp, Mus musculus
  siRNA target sequence for Pde10a (NM_011866.1,463-481).
cgagctgaacagctacata

SEQ ID NO: 589953 - DNA, 19 bp, Mus musculus
  siRNA target sequence for Pde10a (NM_011866.1,583-601).
ccttggagagtgcaataat

SEQ ID NO: 589954 - DNA, 19 bp, Mus musculus
  siRNA target sequence for Pde10a (NM_011866.1,584-602).
cttggagagtgcaataata

SEQ ID NO: 589955 - DNA, 19 bp, Mus musculus
  siRNA target sequence for Pde10a (NM_011866.1,721-739).
gttggtagaggatatcctt

SEQ ID NO: 589956 - DNA, 19 bp, Mus musculus
  siRNA target sequence for Pde10a (NM_011866.1,800-818).
ctttgcttgcccattgtca

SEQ ID NO: 589957 - DNA, 19 bp, Mus musculus
  siRNA target sequence for Pde10a (NM_011866.1,898-916).
ggttgcaacagccaatctt

SEQ ID NO: 589958 - DNA, 19 bp, Mus musculus
  siRNA target sequence for Pde10a (NM_011866.1,921-939).
gggcttccgtagcaataca

SEQ ID NO: 589959 - DNA, 19 bp, Mus musculus
  siRNA target sequence for Pde10a (NM_011866.1,967-985).
caaacagaccgaactgaat

SEQ ID NO: 589960 - DNA, 19 bp, Mus musculus
  siRNA target sequence for Pde10a (NM_011866.1,992-1010).
ctactcgacgtatcaaaga

SEQ ID NO: 589961 - DNA, 19 bp, Mus musculus
  siRNA target sequence for Pde10a (NM_011866.1,995-1013).
ctcgacgtatcaaagacat

SEQ ID NO: 589962 - DNA, 19 bp, Mus musculus
  siRNA target sequence for Pde10a (NM_011866.1,998-1016).
gacgtatcaaagacatact

SEQ ID NO: 589963 - DNA, 19 bp, Mus musculus
  siRNA target sequence for Pde10a (NM_011866.1,1041-1059).
ctctacttgaacacatcat

SEQ ID NO: 589964 - DNA, 19 bp, Mus musculus
  siRNA target sequence for Pde10a (NM_011866.1,1135-1153).
ctcggacctgtttgacatt

SEQ ID NO: 589965 - DNA, 19 bp, Mus musculus
  siRNA target sequence for Pde10a (NM_011866.1,1189-1207).
gaccaaggagatcagattt

SEQ ID NO: 589966 - DNA, 19 bp, Mus musculus
  siRNA target sequence for Pde10a (NM_011866.1,1239-1257).
caagaacaggcgaagtctt

SEQ ID NO: 589967 - DNA, 19 bp, Mus musculus
  siRNA target sequence for Pde10a (NM_011866.1,1245-1263).
caggcgaagtcttgaacat

SEQ ID NO: 589968 - DNA, 19 bp, Mus musculus
  siRNA target sequence for Pde10a (NM_011866.1,1277-1295).
gcggaccctcgctttaaca

SEQ ID NO: 589969 - DNA, 19 bp, Mus musculus
  siRNA target sequence for Pde10a (NM_011866.1,1611-1629).
gccgggacatcgagctatt

SEQ ID NO: 589970 - DNA, 19 bp, Mus musculus
  siRNA target sequence for Pde10a (NM_011866.1,1622-1640).
gagctattccactttgaca

SEQ ID NO: 589971 - DNA, 19 bp, Mus musculus
  siRNA target sequence for Pde10a (NM_011866.1,1624-1642).
gctattccactttgacatt

SEQ ID NO: 589972 - DNA, 19 bp, Mus musculus
  siRNA target sequence for Pde10a (NM_011866.1,1643-1661).
ggtcctttcgagaacatgt

SEQ ID NO: 589973 - DNA, 19 bp, Mus musculus
  siRNA target sequence for Pde10a (NM_011866.1,1662-1680).
ggcctgggatctttgtcta

SEQ ID NO: 589974 - DNA, 19 bp, Mus musculus
  siRNA target sequence for Pde10a (NM_011866.1,1698-1716).
gtgggacatcctgttttga

SEQ ID NO: 589975 - DNA, 19 bp, Mus musculus
  siRNA target sequence for Pde10a (NM_011866.1,1810-1828).
ctgcatgtatgccatactt

SEQ ID NO: 589976 - DNA, 19 bp, Mus musculus
  siRNA target sequence for Pde10a (NM_011866.1,1812-1830).
gcatgtatgccatacttca

SEQ ID NO: 589977 - DNA, 19 bp, Mus musculus
  siRNA target sequence for Pde10a (NM_011866.1,1813-1831).
catgtatgccatacttcaa

SEQ ID NO: 589978 - DNA, 19 bp, Mus musculus
  siRNA target sequence for Pde10a (NM_011866.1,1820-1838).
gccatacttcaaaacaaca

SEQ ID NO: 589979 - DNA, 19 bp, Mus musculus
  siRNA target sequence for Pde10a (NM_011866.1,1861-1879).
gcgcaaaggcctgctaatt

SEQ ID NO: 589980 - DNA, 19 bp, Mus musculus
  siRNA target sequence for Pde10a (NM_011866.1,2018-2036).
ctggaagggcacaatatct

SEQ ID NO: 589981 - DNA, 19 bp, Mus musculus
  siRNA target sequence for Pde10a (NM_011866.1,2021-2039).
gaagggcacaatatcttct

SEQ ID NO: 589982 - DNA, 19 bp, Mus musculus
  siRNA target sequence for Pde10a (NM_011866.1,2104-2122).
cgacctcgccctatacttt

SEQ ID NO: 589983 - DNA, 19 bp, Mus musculus
  siRNA target sequence for Pde10a (NM_011866.1,2195-2213).
cgtgtcatcggcttgatga

SEQ ID NO: 589984 - DNA, 19 bp, Mus musculus
  siRNA target sequence for Pde10a (NM_011866.1,2196-2214).
gtgtcatcggcttgatgat

SEQ ID NO: 589985 - DNA, 19 bp, Mus musculus
  siRNA target sequence for Pde10a (NM_011866.1,2198-2216).
gtcatcggcttgatgatga

SEQ ID NO: 589986 - DNA, 19 bp, Mus musculus
  siRNA target sequence for Pde10a (NM_011866.1,2242-2260).
caaactatggccagttaca

SEQ ID NO: 589987 - DNA, 19 bp, Mus musculus
  siRNA target sequence for Pde10a (NM_011866.1,2266-2284).
gacagcgaatgatatatat

SEQ ID NO: 589988 - DNA, 19 bp, Mus musculus
  siRNA target sequence for Pde10a (NM_011866.1,2324-2342).
ggcatacagcccattccta

SEQ ID NO: 589989 - DNA, 19 bp, Mus musculus
  siRNA target sequence for Pde10a (NM_011866.1,2325-2343).
gcatacagcccattcctat

SEQ ID NO: 589990 - DNA, 19 bp, Mus musculus
  siRNA target sequence for Pde10a (NM_011866.1,2352-2370).
gagacaagcgagatgaagt

SEQ ID NO: 589991 - DNA, 19 bp, Mus musculus
  siRNA target sequence for Pde10a (NM_011866.1,2379-2397).
ggcagctcggattctacaa

SEQ ID NO: 589992 - DNA, 19 bp, Mus musculus
  siRNA target sequence for Pde10a (NM_011866.1,2380-2398).
gcagctcggattctacaat

SEQ ID NO: 589993 - DNA, 19 bp, Mus musculus
  siRNA target sequence for Pde10a (NM_011866.1,2402-2420).
gtggccattccctgctata

SEQ ID NO: 589994 - DNA, 19 bp, Mus musculus
  siRNA target sequence for Pde10a (NM_011866.1,2405-2423).
gccattccctgctatacca

SEQ ID NO: 589995 - DNA, 19 bp, Mus musculus
  siRNA target sequence for Pde10a (NM_011866.1,2469-2487).
gcagggataacctcaatca

SEQ ID NO: 589996 - DNA, 19 bp, Mus musculus
  siRNA target sequence for Pde1c (NM_011054.1,529-547).
gtctccaaccaaggaaatt

SEQ ID NO: 589997 - DNA, 19 bp, Mus musculus
  siRNA target sequence for Pde1c (NM_011054.1,656-674).
cggtctttggtcaagcaat

SEQ ID NO: 589998 - DNA, 19 bp, Mus musculus
  siRNA target sequence for Pde1c (NM_011054.1,657-675).
ggtctttggtcaagcaatt

SEQ ID NO: 589999 - DNA, 19 bp, Mus musculus
  siRNA target sequence for Pde1c (NM_011054.1,658-676).
gtctttggtcaagcaatta

SEQ ID NO: 590000 - DNA, 19 bp, Mus musculus
  siRNA target sequence for Pde1c (NM_011054.1,690-708).
cctctgtggtagaccttaa

SEQ ID NO: 590001 - DNA, 19 bp, Mus musculus
  siRNA target sequence for Pde1c (NM_011054.1,697-715).
ggtagaccttaagaagaat

SEQ ID NO: 590002 - DNA, 19 bp, Mus musculus
  siRNA target sequence for Pde1c (NM_011054.1,732-750).
cagtgcttgaatctgtata

SEQ ID NO: 590003 - DNA, 19 bp, Mus musculus
  siRNA target sequence for Pde1c (NM_011054.1,765-783).
ggcgactgctggatacaga

SEQ ID NO: 590004 - DNA, 19 bp, Mus musculus
  siRNA target sequence for Pde1c (NM_011054.1,788-806).
gagcttagtgacattcaat

SEQ ID NO: 590005 - DNA, 19 bp, Mus musculus
  siRNA target sequence for Pde1c (NM_011054.1,790-808).
gcttagtgacattcaatca

SEQ ID NO: 590006 - DNA, 19 bp, Mus musculus
  siRNA target sequence for Pde1c (NM_011054.1,993-1011).
cggctgtaatcgatgcatt

SEQ ID NO: 590007 - DNA, 19 bp, Mus musculus
  siRNA target sequence for Pde1c (NM_011054.1,996-1014).
ctgtaatcgatgcattgaa

SEQ ID NO: 590008 - DNA, 19 bp, Mus musculus
  siRNA target sequence for Pde1c (NM_011054.1,1026-1044).
cgtggtccttcgatgtctt

SEQ ID NO: 590009 - DNA, 19 bp, Mus musculus
  siRNA target sequence for Pde1c (NM_011054.1,1027-1045).
gtggtccttcgatgtcttt

SEQ ID NO: 590010 - DNA, 19 bp, Mus musculus
  siRNA target sequence for Pde1c (NM_011054.1,1065-1083).
gagatcatgcactgaagtt

SEQ ID NO: 590011 - DNA, 19 bp, Mus musculus
  siRNA target sequence for Pde1c (NM_011054.1,1112-1130).
gacctgatcagccgtttta

SEQ ID NO: 590012 - DNA, 19 bp, Mus musculus
  siRNA target sequence for Pde1c (NM_011054.1,1117-1135).
gatcagccgttttaagata

SEQ ID NO: 590013 - DNA, 19 bp, Mus musculus
  siRNA target sequence for Pde1c (NM_011054.1,1288-1306).
gctggagatctttgcaata

SEQ ID NO: 590014 - DNA, 19 bp, Mus musculus
  siRNA target sequence for Pde1c (NM_011054.1,1334-1352).
gaacatactggaactacaa

SEQ ID NO: 590015 - DNA, 19 bp, Mus musculus
  siRNA target sequence for Pde1c (NM_011054.1,1500-1518).
ggagggagtttcgaacttt

SEQ ID NO: 590016 - DNA, 19 bp, Mus musculus
  siRNA target sequence for Pde1c (NM_011054.1,1504-1522).
ggagtttcgaactttggtt

SEQ ID NO: 590017 - DNA, 19 bp, Mus musculus
  siRNA target sequence for Pde1c (NM_011054.1,1505-1523).
gagtttcgaactttggtta

SEQ ID NO: 590018 - DNA, 19 bp, Mus musculus
  siRNA target sequence for Pde1c (NM_011054.1,1507-1525).
gtttcgaactttggttatt

SEQ ID NO: 590019 - DNA, 19 bp, Mus musculus
  siRNA target sequence for Pde1c (NM_011054.1,1511-1529).
cgaactttggttattgaga

SEQ ID NO: 590020 - DNA, 19 bp, Mus musculus
  siRNA target sequence for Pde1c (NM_011054.1,1512-1530).
gaactttggttattgagat

SEQ ID NO: 590021 - DNA, 19 bp, Mus musculus
  siRNA target sequence for Pde1c (NM_011054.1,1591-1609).
gcagcaaccagaagcaatt

SEQ ID NO: 590022 - DNA, 19 bp, Mus musculus
  siRNA target sequence for Pde1c (NM_011054.1,1595-1613).
caaccagaagcaattgaga

SEQ ID NO: 590023 - DNA, 19 bp, Mus musculus
  siRNA target sequence for Pde1c (NM_011054.1,1851-1869).
cggacatgaccgagaagat

SEQ ID NO: 590024 - DNA, 19 bp, Mus musculus
  siRNA target sequence for Pde1c (NM_011054.1,1961-1979).
cgatccggtgtcaagagtt

SEQ ID NO: 590025 - DNA, 19 bp, Mus musculus
  siRNA target sequence for Pde1c (NM_011054.1,1991-2009).
ggaagtgctcccatcaaca

SEQ ID NO: 590026 - DNA, 19 bp, Mus musculus
  siRNA target sequence for Pde1c (NM_011054.1,1992-2010).
gaagtgctcccatcaacaa

SEQ ID NO: 590027 - DNA, 19 bp, Mus musculus
  siRNA target sequence for Pde1c (NM_011054.1,2021-2039).
cctgttgactataagagtt

SEQ ID NO: 590028 - DNA, 19 bp, Mus musculus
  siRNA target sequence for Pde1c (NM_011054.1,2024-2042).
gttgactataagagtttta

SEQ ID NO: 590029 - DNA, 19 bp, Mus musculus
  siRNA target sequence for Pde1c (NM_011054.1,2092-2110).
caaggtacccaaagaagaa

SEQ ID NO: 590030 - DNA, 19 bp, Mus musculus
  siRNA target sequence for Pde1c (NM_011054.1,2320-2338).
gcagaacggtgacttgaaa

SEQ ID NO: 590031 - DNA, 19 bp, Mus musculus
  siRNA target sequence for Pde1c (NM_011054.1,2332-2350).
cttgaaagacggtaaaaat

SEQ ID NO: 590032 - DNA, 19 bp, Mus musculus
  siRNA target sequence for Pde1c (NM_011054.1,2379-2397).
ccggaaatgagtcaaagaa

SEQ ID NO: 590033 - DNA, 19 bp, Mus musculus
  siRNA target sequence for Pde1c (NM_011054.1,2380-2398).
cggaaatgagtcaaagaaa

SEQ ID NO: 590034 - DNA, 19 bp, Mus musculus
  siRNA target sequence for Pde1c (NM_011054.1,2432-2450).
cctgctccgagcactagtt

SEQ ID NO: 590035 - DNA, 19 bp, Mus musculus
  siRNA target sequence for Pde1c (NM_011054.1,2451-2469).
ccacaagtcgcattacctt

SEQ ID NO: 590036 - DNA, 19 bp, Mus musculus
  siRNA target sequence for Pde3a (NM_018779.1,1022-1040).
gaccttacctggcatactt

SEQ ID NO: 590037 - DNA, 19 bp, Mus musculus
  siRNA target sequence for Pde3a (NM_018779.1,1338-1356).
catcactgtggatattgct

SEQ ID NO: 590038 - DNA, 19 bp, Mus musculus
  siRNA target sequence for Pde3a (NM_018779.1,1430-1448).
ccttgagggccgtaagcaa

SEQ ID NO: 590039 - DNA, 19 bp, Mus musculus
  siRNA target sequence for Pde3a (NM_018779.1,1509-1527).
gaccttcagtgagaactat

SEQ ID NO: 590040 - DNA, 19 bp, Mus musculus
  siRNA target sequence for Pde3a (NM_018779.1,1578-1596).
caagcgcctgagaagaagt

SEQ ID NO: 590041 - DNA, 19 bp, Mus musculus
  siRNA target sequence for Pde3a (NM_018779.1,1693-1711).
gaccgcagtgccagcataa

SEQ ID NO: 590042 - DNA, 19 bp, Mus musculus
  siRNA target sequence for Pde3a (NM_018779.1,1820-1838).
ctgcagctaaccatgtaaa

SEQ ID NO: 590043 - DNA, 19 bp, Mus musculus
  siRNA target sequence for Pde3a (NM_018779.1,1826-1844).
ctaaccatgtaaaagctaa

SEQ ID NO: 590044 - DNA, 19 bp, Mus musculus
  siRNA target sequence for Pde3a (NM_018779.1,1856-1874).
ggccaggtggccttgctaa

SEQ ID NO: 590045 - DNA, 19 bp, Mus musculus
  siRNA target sequence for Pde3a (NM_018779.1,1857-1875).
gccaggtggccttgctaaa

SEQ ID NO: 590046 - DNA, 19 bp, Mus musculus
  siRNA target sequence for Pde3a (NM_018779.1,1858-1876).
ccaggtggccttgctaaaa

SEQ ID NO: 590047 - DNA, 19 bp, Mus musculus
  siRNA target sequence for Pde3a (NM_018779.1,1861-1879).
ggtggccttgctaaaattt

SEQ ID NO: 590048 - DNA, 19 bp, Mus musculus
  siRNA target sequence for Pde3a (NM_018779.1,2055-2073).
cccacccccgtctgtcata

SEQ ID NO: 590049 - DNA, 19 bp, Mus musculus
  siRNA target sequence for Pde3a (NM_018779.1,2059-2077).
cccccgtctgtcatatgta

SEQ ID NO: 590050 - DNA, 19 bp, Mus musculus
  siRNA target sequence for Pde3a (NM_018779.1,2079-2097).
cagctgtggcagaccttat

SEQ ID NO: 590051 - DNA, 19 bp, Mus musculus
  siRNA target sequence for Pde3a (NM_018779.1,2145-2163).
catgctgaaaccaaacaga

SEQ ID NO: 590052 - DNA, 19 bp, Mus musculus
  siRNA target sequence for Pde3a (NM_018779.1,2182-2200).
gttacctccgattatgaga

SEQ ID NO: 590053 - DNA, 19 bp, Mus musculus
  siRNA target sequence for Pde3a (NM_018779.1,2191-2209).
gattatgagaccaacaaca

SEQ ID NO: 590054 - DNA, 19 bp, Mus musculus
  siRNA target sequence for Pde3a (NM_018779.1,2213-2231).
gtgacagcagtgacattct

SEQ ID NO: 590055 - DNA, 19 bp, Mus musculus
  siRNA target sequence for Pde3a (NM_018779.1,2222-2240).
gtgacattctgcagaatga

SEQ ID NO: 590056 - DNA, 19 bp, Mus musculus
  siRNA target sequence for Pde3a (NM_018779.1,2263-2281).
gaaccccagaggaaagcat

SEQ ID NO: 590057 - DNA, 19 bp, Mus musculus
  siRNA target sequence for Pde3a (NM_018779.1,2283-2301).
ggcttgtggcacctatact

SEQ ID NO: 590058 - DNA, 19 bp, Mus musculus
  siRNA target sequence for Pde3a (NM_018779.1,2284-2302).
gcttgtggcacctatactt

SEQ ID NO: 590059 - DNA, 19 bp, Mus musculus
  siRNA target sequence for Pde3a (NM_018779.1,2319-2337).
cctggacaaaccaattctt

SEQ ID NO: 590060 - DNA, 19 bp, Mus musculus
  siRNA target sequence for Pde3a (NM_018779.1,2348-2366).
ccctggtcatggataacct

SEQ ID NO: 590061 - DNA, 19 bp, Mus musculus
  siRNA target sequence for Pde3a (NM_018779.1,2372-2390).
caattatggatcagttgaa

SEQ ID NO: 590062 - DNA, 19 bp, Mus musculus
  siRNA target sequence for Pde3a (NM_018779.1,2383-2401).
cagttgaacacctggaatt

SEQ ID NO: 590063 - DNA, 19 bp, Mus musculus
  siRNA target sequence for Pde3a (NM_018779.1,2435-2453).
gaaaatgtggccgtattct

SEQ ID NO: 590064 - DNA, 19 bp, Mus musculus
  siRNA target sequence for Pde3a (NM_018779.1,2454-2472).
gagccaggtatcatacaga

SEQ ID NO: 590065 - DNA, 19 bp, Mus musculus
  siRNA target sequence for Pde3a (NM_018779.1,2512-2530).
ccggttagggagtttatga

SEQ ID NO: 590066 - DNA, 19 bp, Mus musculus
  siRNA target sequence for Pde3a (NM_018779.1,2513-2531).
cggttagggagtttatgaa

SEQ ID NO: 590067 - DNA, 19 bp, Mus musculus
  siRNA target sequence for Pde3a (NM_018779.1,2563-2581).
gacattccttatcataaca

SEQ ID NO: 590068 - DNA, 19 bp, Mus musculus
  siRNA target sequence for Pde3a (NM_018779.1,2586-2604).
ccatgccaccgatgttcta

SEQ ID NO: 590069 - DNA, 19 bp, Mus musculus
  siRNA target sequence for Pde3a (NM_018779.1,2686-2704).
gattctgacagtggattta

SEQ ID NO: 590070 - DNA, 19 bp, Mus musculus
  siRNA target sequence for Pde3a (NM_018779.1,2690-2708).
ctgacagtggatttacaca

SEQ ID NO: 590071 - DNA, 19 bp, Mus musculus
  siRNA target sequence for Pde3a (NM_018779.1,2710-2728).
ggacacatgggatatgtgt

SEQ ID NO: 590072 - DNA, 19 bp, Mus musculus
  siRNA target sequence for Pde3a (NM_018779.1,2711-2729).
gacacatgggatatgtgtt

SEQ ID NO: 590073 - DNA, 19 bp, Mus musculus
  siRNA target sequence for Pde3a (NM_018779.1,2743-2761).
cacgtgccagatgacaaat

SEQ ID NO: 590074 - DNA, 19 bp, Mus musculus
  siRNA target sequence for Pde3a (NM_018779.1,2745-2763).
cgtgccagatgacaaatat

SEQ ID NO: 590075 - DNA, 19 bp, Mus musculus
  siRNA target sequence for Pde3a (NM_018779.1,2879-2897).
cccctcaggcggtgctata

SEQ ID NO: 590076 - DNA, 19 bp, Mus musculus
  siRNA target sequence for Pde3a (NM_018779.1,3012-3030).
ccgcttcctagtcattgaa

SEQ ID NO: 590077 - DNA, 19 bp, Mus musculus
  siRNA target sequence for Pde3a (NM_018779.1,3086-3104).
ccaaggtaaacgatgatgt

SEQ ID NO: 590078 - DNA, 19 bp, Mus musculus
  siRNA target sequence for Pde3a (NM_018779.1,3096-3114).
cgatgatgtcgggatagat

SEQ ID NO: 590079 - DNA, 19 bp, Mus musculus
  siRNA target sequence for Pde3a (NM_018779.1,3097-3115).
gatgatgtcgggatagatt

SEQ ID NO: 590080 - DNA, 19 bp, Mus musculus
  siRNA target sequence for Pde3a (NM_018779.1,3108-3126).
gatagattggaccaatgaa

SEQ ID NO: 590081 - DNA, 19 bp, Mus musculus
  siRNA target sequence for Pde3a (NM_018779.1,3139-3157).
ctggtgtgtcagatgtgta

SEQ ID NO: 590082 - DNA, 19 bp, Mus musculus
  siRNA target sequence for Pde3a (NM_018779.1,3141-3159).
ggtgtgtcagatgtgtata

SEQ ID NO: 590083 - DNA, 19 bp, Mus musculus
  siRNA target sequence for Pde3a (NM_018779.1,3142-3160).
gtgtgtcagatgtgtataa

SEQ ID NO: 590084 - DNA, 19 bp, Mus musculus
  siRNA target sequence for Pde3a (NM_018779.1,3171-3189).
catcaacgggcctgctaaa

SEQ ID NO: 590085 - DNA, 19 bp, Mus musculus
  siRNA target sequence for Pde3a (NM_018779.1,3177-3195).
cgggcctgctaaatgcaaa

SEQ ID NO: 590086 - DNA, 19 bp, Mus musculus
  siRNA target sequence for Pde3a (NM_018779.1,3180-3198).
gcctgctaaatgcaaagaa

SEQ ID NO: 590087 - DNA, 19 bp, Mus musculus
  siRNA target sequence for Pde3a (NM_018779.1,3220-3238).
ggcatcgccagcgagtttt

SEQ ID NO: 590088 - DNA, 19 bp, Mus musculus
  siRNA target sequence for Pde3a (NM_018779.1,3221-3239).
gcatcgccagcgagtttta

SEQ ID NO: 590089 - DNA, 19 bp, Mus musculus
  siRNA target sequence for Pde3a (NM_018779.1,3222-3240).
catcgccagcgagttttat

SEQ ID NO: 590090 - DNA, 19 bp, Mus musculus
  siRNA target sequence for Pde3a (NM_018779.1,3264-3282).
cctcggcttgcccataagt

SEQ ID NO: 590091 - DNA, 19 bp, Mus musculus
  siRNA target sequence for Pde3a (NM_018779.1,3275-3293).
ccataagtccctttatgga

SEQ ID NO: 590092 - DNA, 19 bp, Mus musculus
  siRNA target sequence for Pde3a (NM_018779.1,3305-3323).
cgcagctggccaatcttca

SEQ ID NO: 590093 - DNA, 19 bp, Mus musculus
  siRNA target sequence for Pde3a (NM_018779.1,3319-3337).
cttcaggaatcctttatct

SEQ ID NO: 590094 - DNA, 19 bp, Mus musculus
  siRNA target sequence for Pde3a (NM_018779.1,3355-3373).
ctctgccactcctatgact

SEQ ID NO: 590095 - DNA, 19 bp, Mus musculus
  siRNA target sequence for Pde3a (NM_018779.1,3389-3407).
caggaaaatgggtagatga

SEQ ID NO: 590096 - DNA, 19 bp, Mus musculus
  siRNA target sequence for Pde3a (NM_018779.1,3494-3512).
gtatagctccccgaaagaa

SEQ ID NO: 590097 - DNA, 19 bp, Mus musculus
  siRNA target sequence for Pde3a (NM_018779.1,3499-3517).
gctccccgaaagaaaagtt

SEQ ID NO: 590098 - DNA, 19 bp, Mus musculus
  siRNA target sequence for Pde3a (NM_018779.1,3503-3521).
cccgaaagaaaagtttcaa

SEQ ID NO: 590099 - DNA, 19 bp, Mus musculus
  siRNA target sequence for Pde3b (NM_011055.1,1040-1058).
cgagtaccgcggaggaaaa

SEQ ID NO: 590100 - DNA, 19 bp, Mus musculus
  siRNA target sequence for Pde3b (NM_011055.1,1041-1059).
gagtaccgcggaggaaaaa

SEQ ID NO: 590101 - DNA, 19 bp, Mus musculus
  siRNA target sequence for Pde3b (NM_011055.1,1043-1061).
gtaccgcggaggaaaaagt

SEQ ID NO: 590102 - DNA, 19 bp, Mus musculus
  siRNA target sequence for Pde3b (NM_011055.1,1151-1169).
gaccgtcgttgccttgtat

SEQ ID NO: 590103 - DNA, 19 bp, Mus musculus
  siRNA target sequence for Pde3b (NM_011055.1,1153-1171).
ccgtcgttgccttgtattt

SEQ ID NO: 590104 - DNA, 19 bp, Mus musculus
  siRNA target sequence for Pde3b (NM_011055.1,1206-1224).
gaagcagtggtgtaaacct

SEQ ID NO: 590105 - DNA, 19 bp, Mus musculus
  siRNA target sequence for Pde3b (NM_011055.1,1214-1232).
ggtgtaaacctcattacca

SEQ ID NO: 590106 - DNA, 19 bp, Mus musculus
  siRNA target sequence for Pde3b (NM_011055.1,1246-1264).
ggaaatggagttgatcttt

SEQ ID NO: 590107 - DNA, 19 bp, Mus musculus
  siRNA target sequence for Pde3b (NM_011055.1,1382-1400).
cctgtaggccaaagattaa

SEQ ID NO: 590108 - DNA, 19 bp, Mus musculus
  siRNA target sequence for Pde3b (NM_011055.1,1463-1481).
gagatcgaaaacttcacaa

SEQ ID NO: 590109 - DNA, 19 bp, Mus musculus
  siRNA target sequence for Pde3b (NM_011055.1,1538-1556).
cctcatcgttgctgactaa

SEQ ID NO: 590110 - DNA, 19 bp, Mus musculus
  siRNA target sequence for Pde3b (NM_011055.1,1539-1557).
ctcatcgttgctgactaat

SEQ ID NO: 590111 - DNA, 19 bp, Mus musculus
  siRNA target sequence for Pde3b (NM_011055.1,2710-2728).
gcacctcaggcagttttat

SEQ ID NO: 590112 - DNA, 19 bp, Mus musculus
  siRNA target sequence for Pde4a (NM_019798.2,133-151).
gctggtgggaccagtttaa

SEQ ID NO: 590113 - DNA, 19 bp, Mus musculus
  siRNA target sequence for Pde4a (NM_019798.2,139-157).
gggaccagtttaaaaggat

SEQ ID NO: 590114 - DNA, 19 bp, Mus musculus
  siRNA target sequence for Pde4a (NM_019798.2,366-384).
cacaccggaagcttgaaca

SEQ ID NO: 590115 - DNA, 19 bp, Mus musculus
  siRNA target sequence for Pde4a (NM_019798.2,422-440).
ggacctcttagcacaagaa

SEQ ID NO: 590116 - DNA, 19 bp, Mus musculus
  siRNA target sequence for Pde4a (NM_019798.2,501-519).
cgttcactcagctgtatca

SEQ ID NO: 590117 - DNA, 19 bp, Mus musculus
  siRNA target sequence for Pde4a (NM_019798.2,502-520).
gttcactcagctgtatcat

SEQ ID NO: 590118 - DNA, 19 bp, Mus musculus
  siRNA target sequence for Pde4a (NM_019798.2,512-530).
ctgtatcatgtatacgata

SEQ ID NO: 590119 - DNA, 19 bp, Mus musculus
  siRNA target sequence for Pde4a (NM_019798.2,534-552).
caggagcgggacttactga

SEQ ID NO: 590120 - DNA, 19 bp, Mus musculus
  siRNA target sequence for Pde4a (NM_019798.2,1200-1218).
gaacgcggaatggagatta

SEQ ID NO: 590121 - DNA, 19 bp, Mus musculus
  siRNA target sequence for Pde4a (NM_019798.2,1443-1461).
ctgcctgacaagttccaat

SEQ ID NO: 590122 - DNA, 19 bp, Mus musculus
  siRNA target sequence for Pde4a (NM_019798.2,1445-1463).
gcctgacaagttccaattt

SEQ ID NO: 590123 - DNA, 19 bp, Mus musculus
  siRNA target sequence for Pde4a (NM_019798.2,1694-1712).
cagccttgaaacctctatt

SEQ ID NO: 590124 - DNA, 19 bp, Mus musculus
  siRNA target sequence for Pde4a (NM_019798.2,1842-1860).
gggacatcaggagacaatt

SEQ ID NO: 590125 - DNA, 19 bp, Mus musculus
  siRNA target sequence for Pde4b (NM_019840.1,255-273).
cggaatctgaggtttgcat

SEQ ID NO: 590126 - DNA, 19 bp, Mus musculus
  siRNA target sequence for Pde4b (NM_019840.1,359-377).
cgcagttcaccaaggaatt

SEQ ID NO: 590127 - DNA, 19 bp, Mus musculus
  siRNA target sequence for Pde4b (NM_019840.1,439-457).
ggtggctcatacatgcttt

SEQ ID NO: 590128 - DNA, 19 bp, Mus musculus
  siRNA target sequence for Pde4b (NM_019840.1,450-468).
catgctttgatgtggaaaa

SEQ ID NO: 590129 - DNA, 19 bp, Mus musculus
  siRNA target sequence for Pde4b (NM_019840.1,516-534).
cgtcgggactggtacttca

SEQ ID NO: 590130 - DNA, 19 bp, Mus musculus
  siRNA target sequence for Pde4b (NM_019840.1,517-535).
gtcgggactggtacttcat

SEQ ID NO: 590131 - DNA, 19 bp, Mus musculus
  siRNA target sequence for Pde4b (NM_019840.1,595-613).
ctatgacttgtcaccaaaa

SEQ ID NO: 590132 - DNA, 19 bp, Mus musculus
  siRNA target sequence for Pde4b (NM_019840.1,653-671).
ggcgatgacctgattgtca

SEQ ID NO: 590133 - DNA, 19 bp, Mus musculus
  siRNA target sequence for Pde4b (NM_019840.1,661-679).
cctgattgtcactcctttt

SEQ ID NO: 590134 - DNA, 19 bp, Mus musculus
  siRNA target sequence for Pde4b (NM_019840.1,692-710).
gccagcttgcgaagtgtaa

SEQ ID NO: 590135 - DNA, 19 bp, Mus musculus
  siRNA target sequence for Pde4b (NM_019840.1,694-712).
cagcttgcgaagtgtaaga

SEQ ID NO: 590136 - DNA, 19 bp, Mus musculus
  siRNA target sequence for Pde4b (NM_019840.1,696-714).
gcttgcgaagtgtaagaaa

SEQ ID NO: 590137 - DNA, 19 bp, Mus musculus
  siRNA target sequence for Pde4b (NM_019840.1,701-719).
cgaagtgtaagaaacaact

SEQ ID NO: 590138 - DNA, 19 bp, Mus musculus
  siRNA target sequence for Pde4b (NM_019840.1,740-758).
catggagcgccgaacaaga

SEQ ID NO: 590139 - DNA, 19 bp, Mus musculus
  siRNA target sequence for Pde4b (NM_019840.1,1167-1185).
cggaaaatgaggatcatct

SEQ ID NO: 590140 - DNA, 19 bp, Mus musculus
  siRNA target sequence for Pde4b (NM_019840.1,1215-1233).
ggggccttaacatcttcaa

SEQ ID NO: 590141 - DNA, 19 bp, Mus musculus
  siRNA target sequence for Pde4b (NM_019840.1,1216-1234).
gggccttaacatcttcaat

SEQ ID NO: 590142 - DNA, 19 bp, Mus musculus
  siRNA target sequence for Pde4b (NM_019840.1,1259-1277).
ccccttacgtgcatcatgt

SEQ ID NO: 590143 - DNA, 19 bp, Mus musculus
  siRNA target sequence for Pde4b (NM_019840.1,1260-1278).
cccttacgtgcatcatgta

SEQ ID NO: 590144 - DNA, 19 bp, Mus musculus
  siRNA target sequence for Pde4b (NM_019840.1,1261-1279).
ccttacgtgcatcatgtat

SEQ ID NO: 590145 - DNA, 19 bp, Mus musculus
  siRNA target sequence for Pde4b (NM_019840.1,1266-1284).
cgtgcatcatgtatgcaat

SEQ ID NO: 590146 - DNA, 19 bp, Mus musculus
  siRNA target sequence for Pde4b (NM_019840.1,1298-1316).
gaccttctgaagacgttta

SEQ ID NO: 590147 - DNA, 19 bp, Mus musculus
  siRNA target sequence for Pde4b (NM_019840.1,1300-1318).
ccttctgaagacgtttaaa

SEQ ID NO: 590148 - DNA, 19 bp, Mus musculus
  siRNA target sequence for Pde4b (NM_019840.1,1301-1319).
cttctgaagacgtttaaaa

SEQ ID NO: 590149 - DNA, 19 bp, Mus musculus
  siRNA target sequence for Pde4b (NM_019840.1,1337-1355).
gtaacctacatgatgactt

SEQ ID NO: 590150 - DNA, 19 bp, Mus musculus
  siRNA target sequence for Pde4b (NM_019840.1,1341-1359).
cctacatgatgactttaga

SEQ ID NO: 590151 - DNA, 19 bp, Mus musculus
  siRNA target sequence for Pde4b (NM_019840.1,1342-1360).
ctacatgatgactttagaa

SEQ ID NO: 590152 - DNA, 19 bp, Mus musculus
  siRNA target sequence for Pde4b (NM_019840.1,1546-1564).
catcaatacaaattctgaa

SEQ ID NO: 590153 - DNA, 19 bp, Mus musculus
  siRNA target sequence for Pde4b (NM_019840.1,1562-1580).
gaacttgctttgatgtata

SEQ ID NO: 590154 - DNA, 19 bp, Mus musculus
  siRNA target sequence for Pde4b (NM_019840.1,1610-1628).
cttgctgtgggattcaaat

SEQ ID NO: 590155 - DNA, 19 bp, Mus musculus
  siRNA target sequence for Pde4b (NM_019840.1,1708-1726).
catggtgttggcaactgat

SEQ ID NO: 590156 - DNA, 19 bp, Mus musculus
  siRNA target sequence for Pde4b (NM_019840.1,1747-1765).
cctggcagaccttaaaaca

SEQ ID NO: 590157 - DNA, 19 bp, Mus musculus
  siRNA target sequence for Pde4b (NM_019840.1,1802-1820).
ctcctcctggacaactata

SEQ ID NO: 590158 - DNA, 19 bp, Mus musculus
  siRNA target sequence for Pde4b (NM_019840.1,1899-1917).
ggcaatggaccgatcgtat

SEQ ID NO: 590159 - DNA, 19 bp, Mus musculus
  siRNA target sequence for Pde4b (NM_019840.1,1913-1931).
cgtatcatggaggagtttt

SEQ ID NO: 590160 - DNA, 19 bp, Mus musculus
  siRNA target sequence for Pde4b (NM_019840.1,1993-2011).
cacagcttctgtggaaaaa

SEQ ID NO: 590161 - DNA, 19 bp, Mus musculus
  siRNA target sequence for Pde4b (NM_019840.1,2075-2093).
caaccggatgctcaagata

SEQ ID NO: 590162 - DNA, 19 bp, Mus musculus
  siRNA target sequence for Pde4b (NM_019840.1,2099-2117).
gatacactagaagataaca

SEQ ID NO: 590163 - DNA, 19 bp, Mus musculus
  siRNA target sequence for Pde4d (NM_011056.1,188-206).
gggacacttgtgatgtact

SEQ ID NO: 590164 - DNA, 19 bp, Mus musculus
  siRNA target sequence for Pde4d (NM_011056.1,202-220).
gtactctctcggagcaaaa

SEQ ID NO: 590165 - DNA, 19 bp, Mus musculus
  siRNA target sequence for Pde4d (NM_011056.1,236-254).
cactgcactcctgtaatga

SEQ ID NO: 590166 - DNA, 19 bp, Mus musculus
  siRNA target sequence for Pde4d (NM_011056.1,240-258).
gcactcctgtaatgaagaa

SEQ ID NO: 590167 - DNA, 19 bp, Mus musculus
  siRNA target sequence for Pde4d (NM_011056.1,289-307).
ctcgtacggcgactttctt

SEQ ID NO: 590168 - DNA, 19 bp, Mus musculus
  siRNA target sequence for Pde4d (NM_011056.1,365-383).
gaagcgaatcagagaacat

SEQ ID NO: 590169 - DNA, 19 bp, Mus musculus
  siRNA target sequence for Pde4d (NM_011056.1,521-539).
ggctgattctccaagcaaa

SEQ ID NO: 590170 - DNA, 19 bp, Mus musculus
  siRNA target sequence for Pde4d (NM_011056.1,525-543).
gattctccaagcaaacttt

SEQ ID NO: 590171 - DNA, 19 bp, Mus musculus
  siRNA target sequence for Pde4d (NM_011056.1,595-613).
gacctctctccaaagtcta

SEQ ID NO: 590172 - DNA, 19 bp, Mus musculus
  siRNA target sequence for Pde4d (NM_011056.1,626-644).
cctcgattgccagtgatat

SEQ ID NO: 590173 - DNA, 19 bp, Mus musculus
  siRNA target sequence for Pde4d (NM_011056.1,629-647).
cgattgccagtgatataca

SEQ ID NO: 590174 - DNA, 19 bp, Mus musculus
  siRNA target sequence for Pde4d (NM_011056.1,697-715).
cgaaccgtacggaacaact

SEQ ID NO: 590175 - DNA, 19 bp, Mus musculus
  siRNA target sequence for Pde4d (NM_011056.1,698-716).
gaaccgtacggaacaactt

SEQ ID NO: 590176 - DNA, 19 bp, Mus musculus
  siRNA target sequence for Pde4d (NM_011056.1,714-732).
ctttgctgcgttaacgaat

SEQ ID NO: 590177 - DNA, 19 bp, Mus musculus
  siRNA target sequence for Pde4d (NM_011056.1,719-737).
ctgcgttaacgaatttgca

SEQ ID NO: 590178 - DNA, 19 bp, Mus musculus
  siRNA target sequence for Pde4d (NM_011056.1,742-760).
cgagcacccagcaaaagat

SEQ ID NO: 590179 - DNA, 19 bp, Mus musculus
  siRNA target sequence for Pde4d (NM_011056.1,987-1005).
ggagtacatctcaaacaca

SEQ ID NO: 590180 - DNA, 19 bp, Mus musculus
  siRNA target sequence for Pde4d (NM_011056.1,990-1008).
gtacatctcaaacacattt

SEQ ID NO: 590181 - DNA, 19 bp, Mus musculus
  siRNA target sequence for Pde4d (NM_011056.1,1002-1020).
cacatttctcgataagcaa

SEQ ID NO: 590182 - DNA, 19 bp, Mus musculus
  siRNA target sequence for Pde4d (NM_011056.1,1113-1131).
cagctccagcctaactaat

SEQ ID NO: 590183 - DNA, 19 bp, Mus musculus
  siRNA target sequence for Pde4d (NM_011056.1,1121-1139).
gcctaactaattcatgtat

SEQ ID NO: 590184 - DNA, 19 bp, Mus musculus
  siRNA target sequence for Pde4d (NM_011056.1,1249-1267).
cggcctctgactgttatca

SEQ ID NO: 590185 - DNA, 19 bp, Mus musculus
  siRNA target sequence for Pde4d (NM_011056.1,1250-1268).
ggcctctgactgttatcat

SEQ ID NO: 590186 - DNA, 19 bp, Mus musculus
  siRNA target sequence for Pde4d (NM_011056.1,1282-1300).
caggaacgagatttgttaa

SEQ ID NO: 590187 - DNA, 19 bp, Mus musculus
  siRNA target sequence for Pde4d (NM_011056.1,1288-1306).
cgagatttgttaaaaacgt

SEQ ID NO: 590188 - DNA, 19 bp, Mus musculus
  siRNA target sequence for Pde4d (NM_011056.1,1315-1333).
ccagtagacactttgatta

SEQ ID NO: 590189 - DNA, 19 bp, Mus musculus
  siRNA target sequence for Pde4d (NM_011056.1,1318-1336).
gtagacactttgattacgt

SEQ ID NO: 590190 - DNA, 19 bp, Mus musculus
  siRNA target sequence for Pde4d (NM_011056.1,1325-1343).
ctttgattacgtatcttat

SEQ ID NO: 590191 - DNA, 19 bp, Mus musculus
  siRNA target sequence for Pde4d (NM_011056.1,1329-1347).
gattacgtatcttatgact

SEQ ID NO: 590192 - DNA, 19 bp, Mus musculus
  siRNA target sequence for Pde4d (NM_011056.1,1372-1390).
gtggcctatcacaacaaca

SEQ ID NO: 590193 - DNA, 19 bp, Mus musculus
  siRNA target sequence for Pde4d (NM_011056.1,1490-1508).
ccagtgcaatacatgatgt

SEQ ID NO: 590194 - DNA, 19 bp, Mus musculus
  siRNA target sequence for Pde4d (NM_011056.1,1512-1530).
ccatcctggggtgtcaaat

SEQ ID NO: 590195 - DNA, 19 bp, Mus musculus
  siRNA target sequence for Pde4d (NM_011056.1,1516-1534).
cctggggtgtcaaatcaat

SEQ ID NO: 590196 - DNA, 19 bp, Mus musculus
  siRNA target sequence for Pde4d (NM_011056.1,1522-1540).
gtgtcaaatcaatttctga

SEQ ID NO: 590197 - DNA, 19 bp, Mus musculus
  siRNA target sequence for Pde4d (NM_011056.1,1553-1571).
cggaactcgctctgatgta

SEQ ID NO: 590198 - DNA, 19 bp, Mus musculus
  siRNA target sequence for Pde4d (NM_011056.1,1669-1687).
caaagacaatctttaagga

SEQ ID NO: 590199 - DNA, 19 bp, Mus musculus
  siRNA target sequence for Pde4d (NM_011056.1,1790-1808).
gcgtcctcctcctggataa

SEQ ID NO: 590200 - DNA, 19 bp, Mus musculus
  siRNA target sequence for Pde4d (NM_011056.1,1821-1839).
gatccaggtccttcagaat

SEQ ID NO: 590201 - DNA, 19 bp, Mus musculus
  siRNA target sequence for Pde4d (NM_011056.1,1898-1916).
ggacggaccggataatgga

SEQ ID NO: 590202 - DNA, 19 bp, Mus musculus
  siRNA target sequence for Pde4d (NM_011056.1,1907-1925).
ggataatggaggagttctt

SEQ ID NO: 590203 - DNA, 19 bp, Mus musculus
  siRNA target sequence for Pde4d (NM_011056.1,1948-1966).
gagcgtggcatggagataa

SEQ ID NO: 590204 - DNA, 19 bp, Mus musculus
  siRNA target sequence for Pde4d (NM_011056.1,1950-1968).
gcgtggcatggagataagt

SEQ ID NO: 590205 - DNA, 19 bp, Mus musculus
  siRNA target sequence for Pde4d (NM_011056.1,1989-2007).
cgcctctgtggaaaaatca

SEQ ID NO: 590206 - DNA, 19 bp, Mus musculus
  siRNA target sequence for Pde4d (NM_011056.1,2176-2194).
cggcagggacagactgaaa

SEQ ID NO: 590207 - DNA, 19 bp, Mus musculus
  siRNA target sequence for Pde4d (NM_011056.1,2276-2294).
ctagctgcagtgactctaa

SEQ ID NO: 590208 - DNA, 19 bp, Mus musculus
  siRNA target sequence for Pde4d (NM_011056.1,2373-2391).
ggaaagccagcctgaaact

SEQ ID NO: 590209 - DNA, 19 bp, Mus musculus
  siRNA target sequence for Pde4d (NM_011056.1,2374-2392).
gaaagccagcctgaaactt

SEQ ID NO: 590210 - DNA, 19 bp, Mus musculus
  siRNA target sequence for Pde6a (NM_146086.2,159-177).
gctttgccaaacagtacta

SEQ ID NO: 590211 - DNA, 19 bp, Mus musculus
  siRNA target sequence for Pde6a (NM_146086.2,164-182).
gccaaacagtactataact

SEQ ID NO: 590212 - DNA, 19 bp, Mus musculus
  siRNA target sequence for Pde6a (NM_146086.2,165-183).
ccaaacagtactataactt

SEQ ID NO: 590213 - DNA, 19 bp, Mus musculus
  siRNA target sequence for Pde6a (NM_146086.2,246-264).
gcaactaccacgatgtgaa

SEQ ID NO: 590214 - DNA, 19 bp, Mus musculus
  siRNA target sequence for Pde6a (NM_146086.2,326-344).
gctgagaaatgcacattca

SEQ ID NO: 590215 - DNA, 19 bp, Mus musculus
  siRNA target sequence for Pde6a (NM_146086.2,327-345).
ctgagaaatgcacattcaa

SEQ ID NO: 590216 - DNA, 19 bp, Mus musculus
  siRNA target sequence for Pde6a (NM_146086.2,383-401).
cgcatgagcctgttcatgt

SEQ ID NO: 590217 - DNA, 19 bp, Mus musculus
  siRNA target sequence for Pde6a (NM_146086.2,430-448).
ggccactaggctcttcaat

SEQ ID NO: 590218 - DNA, 19 bp, Mus musculus
  siRNA target sequence for Pde6a (NM_146086.2,432-450).
ccactaggctcttcaatgt

SEQ ID NO: 590219 - DNA, 19 bp, Mus musculus
  siRNA target sequence for Pde6a (NM_146086.2,488-506).
cccgactccgagattgtct

SEQ ID NO: 590220 - DNA, 19 bp, Mus musculus
  siRNA target sequence for Pde6a (NM_146086.2,489-507).
ccgactccgagattgtctt

SEQ ID NO: 590221 - DNA, 19 bp, Mus musculus
  siRNA target sequence for Pde6a (NM_146086.2,533-551).
cacgtcgcacactccaaaa

SEQ ID NO: 590222 - DNA, 19 bp, Mus musculus
  siRNA target sequence for Pde6a (NM_146086.2,538-556).
cgcacactccaaaaagatt

SEQ ID NO: 590223 - DNA, 19 bp, Mus musculus
  siRNA target sequence for Pde6a (NM_146086.2,638-656).
ctggcttcccccatcatga

SEQ ID NO: 590224 - DNA, 19 bp, Mus musculus
  siRNA target sequence for Pde6a (NM_146086.2,665-683).
gatgtggtagccataatca

SEQ ID NO: 590225 - DNA, 19 bp, Mus musculus
  siRNA target sequence for Pde6a (NM_146086.2,685-703).
ggctgtgaataaaatagat

SEQ ID NO: 590226 - DNA, 19 bp, Mus musculus
  siRNA target sequence for Pde6a (NM_146086.2,914-932).
ctcaactgtgacagatact

SEQ ID NO: 590227 - DNA, 19 bp, Mus musculus
  siRNA target sequence for Pde6a (NM_146086.2,933-951).
ccgtaggactcttagacat

SEQ ID NO: 590228 - DNA, 19 bp, Mus musculus
  siRNA target sequence for Pde6a (NM_146086.2,997-1015).
cgaggctccagcttactct

SEQ ID NO: 590229 - DNA, 19 bp, Mus musculus
  siRNA target sequence for Pde6a (NM_146086.2,1031-1049).
gacggaagggaaattaact

SEQ ID NO: 590230 - DNA, 19 bp, Mus musculus
  siRNA target sequence for Pde6a (NM_146086.2,1146-1164).
ccacttacgtggctcaaaa

SEQ ID NO: 590231 - DNA, 19 bp, Mus musculus
  siRNA target sequence for Pde6a (NM_146086.2,1147-1165).
cacttacgtggctcaaaat

SEQ ID NO: 590232 - DNA, 19 bp, Mus musculus
  siRNA target sequence for Pde6a (NM_146086.2,1167-1185).
gtctgatctgcaatataat

SEQ ID NO: 590233 - DNA, 19 bp, Mus musculus
  siRNA target sequence for Pde6a (NM_146086.2,1191-1209).
cgcctgcagaggacttttt

SEQ ID NO: 590234 - DNA, 19 bp, Mus musculus
  siRNA target sequence for Pde6a (NM_146086.2,1235-1253).
gagtctgggtggatgatta

SEQ ID NO: 590235 - DNA, 19 bp, Mus musculus
  siRNA target sequence for Pde6a (NM_146086.2,1242-1260).
ggtggatgattaaaaatgt

SEQ ID NO: 590236 - DNA, 19 bp, Mus musculus
  siRNA target sequence for Pde6a (NM_146086.2,1243-1261).
gtggatgattaaaaatgta

SEQ ID NO: 590237 - DNA, 19 bp, Mus musculus
  siRNA target sequence for Pde6a (NM_146086.2,1297-1315).
cgtcggcgtggccacattt

SEQ ID NO: 590238 - DNA, 19 bp, Mus musculus
  siRNA target sequence for Pde6a (NM_146086.2,1298-1316).
gtcggcgtggccacatttt

SEQ ID NO: 590239 - DNA, 19 bp, Mus musculus
  siRNA target sequence for Pde6a (NM_146086.2,1301-1319).
ggcgtggccacattttaca

SEQ ID NO: 590240 - DNA, 19 bp, Mus musculus
  siRNA target sequence for Pde6a (NM_146086.2,1302-1320).
gcgtggccacattttacaa

SEQ ID NO: 590241 - DNA, 19 bp, Mus musculus
  siRNA target sequence for Pde6a (NM_146086.2,1332-1350).
ggaagcccttcgacgatat

SEQ ID NO: 590242 - DNA, 19 bp, Mus musculus
  siRNA target sequence for Pde6a (NM_146086.2,1366-1384).
ggagtctttgactcagttt

SEQ ID NO: 590243 - DNA, 19 bp, Mus musculus
  siRNA target sequence for Pde6a (NM_146086.2,1385-1403).
ctgggatggtcagtcttaa

SEQ ID NO: 590244 - DNA, 19 bp, Mus musculus
  siRNA target sequence for Pde6a (NM_146086.2,1413-1431).
cctacgagtccatgaacaa

SEQ ID NO: 590245 - DNA, 19 bp, Mus musculus
  siRNA target sequence for Pde6a (NM_146086.2,1477-1495).
cgtgaagtgtgataacgaa

SEQ ID NO: 590246 - DNA, 19 bp, Mus musculus
  siRNA target sequence for Pde6a (NM_146086.2,1595-1613).
gacgcggagtcatacgaaa

SEQ ID NO: 590247 - DNA, 19 bp, Mus musculus
  siRNA target sequence for Pde6a (NM_146086.2,1598-1616).
gcggagtcatacgaaatca

SEQ ID NO: 590248 - DNA, 19 bp, Mus musculus
  siRNA target sequence for Pde6a (NM_146086.2,1599-1617).
cggagtcatacgaaatcaa

SEQ ID NO: 590249 - DNA, 19 bp, Mus musculus
  siRNA target sequence for Pde6a (NM_146086.2,1601-1619).
gagtcatacgaaatcaaca

SEQ ID NO: 590250 - DNA, 19 bp, Mus musculus
  siRNA target sequence for Pde6a (NM_146086.2,1605-1623).
catacgaaatcaacaagtt

SEQ ID NO: 590251 - DNA, 19 bp, Mus musculus
  siRNA target sequence for Pde6a (NM_146086.2,1728-1746).
ccctggtgcgcttcatgta

SEQ ID NO: 590252 - DNA, 19 bp, Mus musculus
  siRNA target sequence for Pde6a (NM_146086.2,1730-1748).
ctggtgcgcttcatgtatt

SEQ ID NO: 590253 - DNA, 19 bp, Mus musculus
  siRNA target sequence for Pde6a (NM_146086.2,1741-1759).
catgtattcgctaagcaaa

SEQ ID NO: 590254 - DNA, 19 bp, Mus musculus
  siRNA target sequence for Pde6a (NM_146086.2,1851-1869).
ggtacttcactgatctaga

SEQ ID NO: 590255 - DNA, 19 bp, Mus musculus
  siRNA target sequence for Pde6a (NM_146086.2,2089-2107).
gatggacatcgcgatcatt

SEQ ID NO: 590256 - DNA, 19 bp, Mus musculus
  siRNA target sequence for Pde6a (NM_146086.2,2159-2177).
gtggatcagtcaaagacat

SEQ ID NO: 590257 - DNA, 19 bp, Mus musculus
  siRNA target sequence for Pde6a (NM_146086.2,2161-2179).
ggatcagtcaaagacatat

SEQ ID NO: 590258 - DNA, 19 bp, Mus musculus
  siRNA target sequence for Pde6a (NM_146086.2,2192-2210).
gagtggacccagtacatga

SEQ ID NO: 590259 - DNA, 19 bp, Mus musculus
  siRNA target sequence for Pde6a (NM_146086.2,2218-2236).
gcagacacggaaggaaatt

SEQ ID NO: 590260 - DNA, 19 bp, Mus musculus
  siRNA target sequence for Pde6a (NM_146086.2,2223-2241).
cacggaaggaaattgtgat

SEQ ID NO: 590261 - DNA, 19 bp, Mus musculus
  siRNA target sequence for Pde6a (NM_146086.2,2474-2492).
cgatttcatgaggagatta

SEQ ID NO: 590262 - DNA, 19 bp, Mus musculus
  siRNA target sequence for Pde6a (NM_146086.2,2652-2670).
ggggtgcacctgcatctaa

SEQ ID NO: 590263 - DNA, 19 bp, Mus musculus
  siRNA target sequence for Pde6b (NM_008806.1,75-93).
gaagttgagccctgaaaat

SEQ ID NO: 590264 - DNA, 19 bp, Mus musculus
  siRNA target sequence for Pde6b (NM_008806.1,165-183).
gagtgcagcactttttgaa

SEQ ID NO: 590265 - DNA, 19 bp, Mus musculus
  siRNA target sequence for Pde6b (NM_008806.1,195-213).
catgcaggagagtgtcaat

SEQ ID NO: 590266 - DNA, 19 bp, Mus musculus
  siRNA target sequence for Pde6b (NM_008806.1,434-452).
ccaagaagatgataaacgt

SEQ ID NO: 590267 - DNA, 19 bp, Mus musculus
  siRNA target sequence for Pde6b (NM_008806.1,496-514).
gagctcaccgactatgtga

SEQ ID NO: 590268 - DNA, 19 bp, Mus musculus
  siRNA target sequence for Pde6b (NM_008806.1,503-521).
ccgactatgtgacaaagaa

SEQ ID NO: 590269 - DNA, 19 bp, Mus musculus
  siRNA target sequence for Pde6b (NM_008806.1,627-645).
cacgaagtacctgaatttt

SEQ ID NO: 590270 - DNA, 19 bp, Mus musculus
  siRNA target sequence for Pde6b (NM_008806.1,725-743).
cagccaataaggtgtttga

SEQ ID NO: 590271 - DNA, 19 bp, Mus musculus
  siRNA target sequence for Pde6b (NM_008806.1,728-746).
ccaataaggtgtttgaaga

SEQ ID NO: 590272 - DNA, 19 bp, Mus musculus
  siRNA target sequence for Pde6b (NM_008806.1,768-786).
gttccacaaggccttctat

SEQ ID NO: 590273 - DNA, 19 bp, Mus musculus
  siRNA target sequence for Pde6b (NM_008806.1,771-789).
ccacaaggccttctatact

SEQ ID NO: 590274 - DNA, 19 bp, Mus musculus
  siRNA target sequence for Pde6b (NM_008806.1,925-943).
cgggaaattgtcttctaca

SEQ ID NO: 590275 - DNA, 19 bp, Mus musculus
  siRNA target sequence for Pde6b (NM_008806.1,939-957).
ctacaaagtcatcgattat

SEQ ID NO: 590276 - DNA, 19 bp, Mus musculus
  siRNA target sequence for Pde6b (NM_008806.1,1074-1092).
gaatgcttcagctgatgaa

SEQ ID NO: 590277 - DNA, 19 bp, Mus musculus
  siRNA target sequence for Pde6b (NM_008806.1,1127-1145).
caggatgggtgatcaagaa

SEQ ID NO: 590278 - DNA, 19 bp, Mus musculus
  siRNA target sequence for Pde6b (NM_008806.1,1130-1148).
gatgggtgatcaagaatgt

SEQ ID NO: 590279 - DNA, 19 bp, Mus musculus
  siRNA target sequence for Pde6b (NM_008806.1,1189-1207).
ggggtggcaaccttctaca

SEQ ID NO: 590280 - DNA, 19 bp, Mus musculus
  siRNA target sequence for Pde6b (NM_008806.1,1190-1208).
gggtggcaaccttctacaa

SEQ ID NO: 590281 - DNA, 19 bp, Mus musculus
  siRNA target sequence for Pde6b (NM_008806.1,1192-1210).
gtggcaaccttctacaaca

SEQ ID NO: 590282 - DNA, 19 bp, Mus musculus
  siRNA target sequence for Pde6b (NM_008806.1,1447-1465).
gatgagctggggaaaatct

SEQ ID NO: 590283 - DNA, 19 bp, Mus musculus
  siRNA target sequence for Pde6b (NM_008806.1,1490-1508).
ccaagtttgacatctatga

SEQ ID NO: 590284 - DNA, 19 bp, Mus musculus
  siRNA target sequence for Pde6b (NM_008806.1,1537-1555).
gagctggagctagtcaaat

SEQ ID NO: 590285 - DNA, 19 bp, Mus musculus
  siRNA target sequence for Pde6b (NM_008806.1,1539-1557).
gctggagctagtcaaatgt

SEQ ID NO: 590286 - DNA, 19 bp, Mus musculus
  siRNA target sequence for Pde6b (NM_008806.1,1614-1632).
ggtcttggtgcgctttcta

SEQ ID NO: 590287 - DNA, 19 bp, Mus musculus
  siRNA target sequence for Pde6b (NM_008806.1,1615-1633).
gtcttggtgcgctttctat

SEQ ID NO: 590288 - DNA, 19 bp, Mus musculus
  siRNA target sequence for Pde6b (NM_008806.1,1620-1638).
ggtgcgctttctattctct

SEQ ID NO: 590289 - DNA, 19 bp, Mus musculus
  siRNA target sequence for Pde6b (NM_008806.1,1639-1657).
gtcagcaaagcctatcgaa

SEQ ID NO: 590290 - DNA, 19 bp, Mus musculus
  siRNA target sequence for Pde6b (NM_008806.1,1643-1661).
gcaaagcctatcgaagaat

SEQ ID NO: 590291 - DNA, 19 bp, Mus musculus
  siRNA target sequence for Pde6b (NM_008806.1,1674-1692).
ctggcgccacggcttcaat

SEQ ID NO: 590292 - DNA, 19 bp, Mus musculus
  siRNA target sequence for Pde6b (NM_008806.1,1676-1694).
ggcgccacggcttcaatgt

SEQ ID NO: 590293 - DNA, 19 bp, Mus musculus
  siRNA target sequence for Pde6b (NM_008806.1,1922-1940).
gcctgaacatctatcagaa

SEQ ID NO: 590294 - DNA, 19 bp, Mus musculus
  siRNA target sequence for Pde6b (NM_008806.1,2047-2065).
gtggatgagtctaagaact

SEQ ID NO: 590295 - DNA, 19 bp, Mus musculus
  siRNA target sequence for Pde6b (NM_008806.1,2049-2067).
ggatgagtctaagaactat

SEQ ID NO: 590296 - DNA, 19 bp, Mus musculus
  siRNA target sequence for Pde6b (NM_008806.1,2079-2097).
gagttgggttgagtactta

SEQ ID NO: 590297 - DNA, 19 bp, Mus musculus
  siRNA target sequence for Pde6b (NM_008806.1,2084-2102).
gggttgagtacttatcctt

SEQ ID NO: 590298 - DNA, 19 bp, Mus musculus
  siRNA target sequence for Pde6b (NM_008806.1,2085-2103).
ggttgagtacttatcctta

SEQ ID NO: 590299 - DNA, 19 bp, Mus musculus
  siRNA target sequence for Pde6b (NM_008806.1,2108-2126).
ccacacgaaaggagatagt

SEQ ID NO: 590300 - DNA, 19 bp, Mus musculus
  siRNA target sequence for Pde6b (NM_008806.1,2317-2335).
ggtttcattgacttcgtat

SEQ ID NO: 590301 - DNA, 19 bp, Mus musculus
  siRNA target sequence for Pde6b (NM_008806.1,2328-2346).
cttcgtatgtactttcgta

SEQ ID NO: 590302 - DNA, 19 bp, Mus musculus
  siRNA target sequence for Pde6b (NM_008806.1,2343-2361).
cgtatacaaggaattttct

SEQ ID NO: 590303 - DNA, 19 bp, Mus musculus
  siRNA target sequence for Pde6b (NM_008806.1,2360-2378).
ctcgatttcacgaagagat

SEQ ID NO: 590304 - DNA, 19 bp, Mus musculus
  siRNA target sequence for Pde6b (NM_008806.1,2392-2410).
gaccgactgcaaaataaca

SEQ ID NO: 590305 - DNA, 19 bp, Mus musculus
  siRNA target sequence for Pde6b (NM_008806.1,2396-2414).
gactgcaaaataacagaaa

SEQ ID NO: 590306 - DNA, 19 bp, Mus musculus
  siRNA target sequence for Pde6b (NM_008806.1,2426-2444).
cactagctgacgagtatga

SEQ ID NO: 590307 - DNA, 19 bp, Mus musculus
  siRNA target sequence for Pde6b (NM_008806.1,2490-2508).
cagagtcgcagccaagaaa

SEQ ID NO: 590308 - DNA, 19 bp, Mus musculus
  siRNA target sequence for Pde6b (NM_008806.1,2511-2529).
gggcacagaagtttgcaat

SEQ ID NO: 590309 - DNA, 19 bp, Mus musculus
  siRNA target sequence for Pde6c (NM_033614.1,66-84).
gtattttgacaagaaacta

SEQ ID NO: 590310 - DNA, 19 bp, Mus musculus
  siRNA target sequence for Pde6c (NM_033614.1,100-118).
ggggtgatcttcaaaaaca

SEQ ID NO: 590311 - DNA, 19 bp, Mus musculus
  siRNA target sequence for Pde6c (NM_033614.1,277-295).
gctgattgctgcagtatgt

SEQ ID NO: 590312 - DNA, 19 bp, Mus musculus
  siRNA target sequence for Pde6c (NM_033614.1,278-296).
ctgattgctgcagtatgtt

SEQ ID NO: 590313 - DNA, 19 bp, Mus musculus
  siRNA target sequence for Pde6c (NM_033614.1,280-298).
gattgctgcagtatgttct

SEQ ID NO: 590314 - DNA, 19 bp, Mus musculus
  siRNA target sequence for Pde6c (NM_033614.1,345-363).
gaacgtcaccccaacttct

SEQ ID NO: 590315 - DNA, 19 bp, Mus musculus
  siRNA target sequence for Pde6c (NM_033614.1,353-371).
ccccaacttctaagtttga

SEQ ID NO: 590316 - DNA, 19 bp, Mus musculus
  siRNA target sequence for Pde6c (NM_033614.1,384-402).
ggcccctgacagagaagtt

SEQ ID NO: 590317 - DNA, 19 bp, Mus musculus
  siRNA target sequence for Pde6c (NM_033614.1,388-406).
cctgacagagaagttgtat

SEQ ID NO: 590318 - DNA, 19 bp, Mus musculus
  siRNA target sequence for Pde6c (NM_033614.1,411-429).
gttggacattgggatagtt

SEQ ID NO: 590319 - DNA, 19 bp, Mus musculus
  siRNA target sequence for Pde6c (NM_033614.1,431-449).
gctgggtcgctcatgtgaa

SEQ ID NO: 590320 - DNA, 19 bp, Mus musculus
  siRNA target sequence for Pde6c (NM_033614.1,434-452).
gggtcgctcatgtgaagaa

SEQ ID NO: 590321 - DNA, 19 bp, Mus musculus
  siRNA target sequence for Pde6c (NM_033614.1,435-453).
ggtcgctcatgtgaagaaa

SEQ ID NO: 590322 - DNA, 19 bp, Mus musculus
  siRNA target sequence for Pde6c (NM_033614.1,603-621).
cgctcccgagttttccaaa

SEQ ID NO: 590323 - DNA, 19 bp, Mus musculus
  siRNA target sequence for Pde6c (NM_033614.1,713-731).
ggagaagccagatccttat

SEQ ID NO: 590324 - DNA, 19 bp, Mus musculus
  siRNA target sequence for Pde6c (NM_033614.1,732-750).
gtggtcagccaataaagta

SEQ ID NO: 590325 - DNA, 19 bp, Mus musculus
  siRNA target sequence for Pde6c (NM_033614.1,737-755).
cagccaataaagtattcga

SEQ ID NO: 590326 - DNA, 19 bp, Mus musculus
  siRNA target sequence for Pde6c (NM_033614.1,753-771).
cgaagagctcactgatgtt

SEQ ID NO: 590327 - DNA, 19 bp, Mus musculus
  siRNA target sequence for Pde6c (NM_033614.1,769-787).
gttgagcgacagtttcaca

SEQ ID NO: 590328 - DNA, 19 bp, Mus musculus
  siRNA target sequence for Pde6c (NM_033614.1,960-978).
catcgattacattttacat

SEQ ID NO: 590329 - DNA, 19 bp, Mus musculus
  siRNA target sequence for Pde6c (NM_033614.1,1018-1036).
gaccactggacgcttgtta

SEQ ID NO: 590330 - DNA, 19 bp, Mus musculus
  siRNA target sequence for Pde6c (NM_033614.1,1046-1064).
caacatacgttgcagaaaa

SEQ ID NO: 590331 - DNA, 19 bp, Mus musculus
  siRNA target sequence for Pde6c (NM_033614.1,1135-1153).
gagactggctgggtcatta

SEQ ID NO: 590332 - DNA, 19 bp, Mus musculus
  siRNA target sequence for Pde6c (NM_033614.1,1137-1155).
gactggctgggtcattaaa

SEQ ID NO: 590333 - DNA, 19 bp, Mus musculus
  siRNA target sequence for Pde6c (NM_033614.1,1139-1157).
ctggctgggtcattaaaaa

SEQ ID NO: 590334 - DNA, 19 bp, Mus musculus
  siRNA target sequence for Pde6c (NM_033614.1,1142-1160).
gctgggtcattaaaaatgt

SEQ ID NO: 590335 - DNA, 19 bp, Mus musculus
  siRNA target sequence for Pde6c (NM_033614.1,1166-1184).
ccctgcctattgtcaacaa

SEQ ID NO: 590336 - DNA, 19 bp, Mus musculus
  siRNA target sequence for Pde6c (NM_033614.1,1197-1215).
cgtgggtgtagctacgttt

SEQ ID NO: 590337 - DNA, 19 bp, Mus musculus
  siRNA target sequence for Pde6c (NM_033614.1,1198-1216).
gtgggtgtagctacgtttt

SEQ ID NO: 590338 - DNA, 19 bp, Mus musculus
  siRNA target sequence for Pde6c (NM_033614.1,1201-1219).
ggtgtagctacgttttaca

SEQ ID NO: 590339 - DNA, 19 bp, Mus musculus
  siRNA target sequence for Pde6c (NM_033614.1,1202-1220).
gtgtagctacgttttacaa

SEQ ID NO: 590340 - DNA, 19 bp, Mus musculus
  siRNA target sequence for Pde6c (NM_033614.1,1227-1245).
ggatgggaaaccctttgat

SEQ ID NO: 590341 - DNA, 19 bp, Mus musculus
  siRNA target sequence for Pde6c (NM_033614.1,1288-1306).
ggatggtctcttttaaaca

SEQ ID NO: 590342 - DNA, 19 bp, Mus musculus
  siRNA target sequence for Pde6c (NM_033614.1,1313-1331).
cctatgagcgagtgaacaa

SEQ ID NO: 590343 - DNA, 19 bp, Mus musculus
  siRNA target sequence for Pde6c (NM_033614.1,1365-1383).
ggttatgaacctcacaaaa

SEQ ID NO: 590344 - DNA, 19 bp, Mus musculus
  siRNA target sequence for Pde6c (NM_033614.1,1384-1402).
gccaccccggatgaaatca

SEQ ID NO: 590345 - DNA, 19 bp, Mus musculus
  siRNA target sequence for Pde6c (NM_033614.1,1403-1421).
gctctattctgaagtttaa

SEQ ID NO: 590346 - DNA, 19 bp, Mus musculus
  siRNA target sequence for Pde6c (NM_033614.1,1513-1531).
gacctgtacgagttctgtt

SEQ ID NO: 590347 - DNA, 19 bp, Mus musculus
  siRNA target sequence for Pde6c (NM_033614.1,1516-1534).
ctgtacgagttctgtttca

SEQ ID NO: 590348 - DNA, 19 bp, Mus musculus
  siRNA target sequence for Pde6c (NM_033614.1,1550-1568).
cggagcacgagttggttaa

SEQ ID NO: 590349 - DNA, 19 bp, Mus musculus
  siRNA target sequence for Pde6c (NM_033614.1,1551-1569).
ggagcacgagttggttaaa

SEQ ID NO: 590350 - DNA, 19 bp, Mus musculus
  siRNA target sequence for Pde6c (NM_033614.1,1552-1570).
gagcacgagttggttaaat

SEQ ID NO: 590351 - DNA, 19 bp, Mus musculus
  siRNA target sequence for Pde6c (NM_033614.1,1571-1589).
gcgggctgaggctgttttt

SEQ ID NO: 590352 - DNA, 19 bp, Mus musculus
  siRNA target sequence for Pde6c (NM_033614.1,1620-1638).
ccctgtagaggttcttaca

SEQ ID NO: 590353 - DNA, 19 bp, Mus musculus
  siRNA target sequence for Pde6c (NM_033614.1,1621-1639).
cctgtagaggttcttacaa

SEQ ID NO: 590354 - DNA, 19 bp, Mus musculus
  siRNA target sequence for Pde6c (NM_033614.1,1633-1651).
cttacaaggtggatgtaca

SEQ ID NO: 590355 - DNA, 19 bp, Mus musculus
  siRNA target sequence for Pde6c (NM_033614.1,1820-1838).
gaggcaccaataacttgta

SEQ ID NO: 590356 - DNA, 19 bp, Mus musculus
  siRNA target sequence for Pde6c (NM_033614.1,1826-1844).
ccaataacttgtaccaaat

SEQ ID NO: 590357 - DNA, 19 bp, Mus musculus
  siRNA target sequence for Pde6c (NM_033614.1,1894-1912).
cgacatcacctggaatata

SEQ ID NO: 590358 - DNA, 19 bp, Mus musculus
  siRNA target sequence for Pde6c (NM_033614.1,1897-1915).
catcacctggaatatagca

SEQ ID NO: 590359 - DNA, 19 bp, Mus musculus
  siRNA target sequence for Pde6c (NM_033614.1,1927-1945).
caggatgagagtttaaaca

SEQ ID NO: 590360 - DNA, 19 bp, Mus musculus
  siRNA target sequence for Pde6c (NM_033614.1,1975-1993).
gaaacggtgatccatttgt

SEQ ID NO: 590361 - DNA, 19 bp, Mus musculus
  siRNA target sequence for Pde6c (NM_033614.1,1992-2010).
gttcgaggttgcaataata

SEQ ID NO: 590362 - DNA, 19 bp, Mus musculus
  siRNA target sequence for Pde6c (NM_033614.1,1995-2013).
cgaggttgcaataatagca

SEQ ID NO: 590363 - DNA, 19 bp, Mus musculus
  siRNA target sequence for Pde6c (NM_033614.1,2114-2132).
cctccgacccgaccaaaaa

SEQ ID NO: 590364 - DNA, 19 bp, Mus musculus
  siRNA target sequence for Pde6c (NM_033614.1,2117-2135).
ccgacccgaccaaaaagga

SEQ ID NO: 590365 - DNA, 19 bp, Mus musculus
  siRNA target sequence for Pde6c (NM_033614.1,2118-2136).
cgacccgaccaaaaaggaa

SEQ ID NO: 590366 - DNA, 19 bp, Mus musculus
  siRNA target sequence for Pde6c (NM_033614.1,2215-2233).
cttctggttgcaaatgaat

SEQ ID NO: 590367 - DNA, 19 bp, Mus musculus
  siRNA target sequence for Pde6c (NM_033614.1,2297-2315).
gaagcaaaaaggatgaact

SEQ ID NO: 590368 - DNA, 19 bp, Mus musculus
  siRNA target sequence for Pde6c (NM_033614.1,2307-2325).
ggatgaactcccgaaactt

SEQ ID NO: 590369 - DNA, 19 bp, Mus musculus
  siRNA target sequence for Pde6c (NM_033614.1,2403-2421).
gctgaacggccttcagaat

SEQ ID NO: 590370 - DNA, 19 bp, Mus musculus
  siRNA target sequence for Pde6c (NM_033614.1,2404-2422).
ctgaacggccttcagaata

SEQ ID NO: 590371 - DNA, 19 bp, Mus musculus
  siRNA target sequence for Pde6c (NM_033614.1,2540-2558).
gaggcagcgccgaagacaa

SEQ ID NO: 590372 - DNA, 19 bp, Mus musculus
  siRNA target sequence for Pde6c (NM_033614.1,2543-2561).
gcagcgccgaagacaaaaa

SEQ ID NO: 590373 - DNA, 19 bp, Mus musculus
  siRNA target sequence for Pde6d (NM_008801.2,185-203).
cctgagaggcttcaaacta

SEQ ID NO: 590374 - DNA, 19 bp, Mus musculus
  siRNA target sequence for Pde6d (NM_008801.2,186-204).
ctgagaggcttcaaactaa

SEQ ID NO: 590375 - DNA, 19 bp, Mus musculus
  siRNA target sequence for Pde6d (NM_008801.2,292-310).
cccgtgtgcccaagaaaat

SEQ ID NO: 590376 - DNA, 19 bp, Mus musculus
  siRNA target sequence for Pde6d (NM_008801.2,327-345).
gtgtctcgagaattgaact

SEQ ID NO: 590377 - DNA, 19 bp, Mus musculus
  siRNA target sequence for Pde6d (NM_008801.2,333-351).
cgagaattgaacttttctt

SEQ ID NO: 590378 - DNA, 19 bp, Mus musculus
  siRNA target sequence for Pde6d (NM_008801.2,344-362).
cttttcttcagcagaacaa

SEQ ID NO: 590379 - DNA, 19 bp, Mus musculus
  siRNA target sequence for Pde6d (NM_008801.2,374-392).
ccgcctggaacaaaaagtt

SEQ ID NO: 590380 - DNA, 19 bp, Mus musculus
  siRNA target sequence for Pde6d (NM_008801.2,375-393).
cgcctggaacaaaaagttt

SEQ ID NO: 590381 - DNA, 19 bp, Mus musculus
  siRNA target sequence for Pde6d (NM_008801.2,376-394).
gcctggaacaaaaagttta

SEQ ID NO: 590382 - DNA, 19 bp, Mus musculus
  siRNA target sequence for Pde6d (NM_008801.2,461-479).
cacctggcagtccttgata

SEQ ID NO: 590383 - DNA, 19 bp, Mus musculus
  siRNA target sequence for Pde6d (NM_008801.2,487-505).
cgcctgagtcccagatgat

SEQ ID NO: 590384 - DNA, 19 bp, Mus musculus
  siRNA target sequence for Pde6d (NM_008801.2,516-534).
gtcctaacgggcaatgtca

SEQ ID NO: 590385 - DNA, 19 bp, Mus musculus
  siRNA target sequence for Pde6d (NM_008801.2,570-588).
gtcagcacatccaaagtga

SEQ ID NO: 590386 - DNA, 19 bp, Mus musculus
  siRNA target sequence for Pde7a (NM_008802.1,100-118).
gtctggctttggttctgat

SEQ ID NO: 590387 - DNA, 19 bp, Mus musculus
  siRNA target sequence for Pde7a (NM_008802.1,122-140).
gtggatcacctctaagaga

SEQ ID NO: 590388 - DNA, 19 bp, Mus musculus
  siRNA target sequence for Pde7a (NM_008802.1,139-157).
gacgtggagctatttccta

SEQ ID NO: 590389 - DNA, 19 bp, Mus musculus
  siRNA target sequence for Pde7a (NM_008802.1,144-162).
ggagctatttcctatgaca

SEQ ID NO: 590390 - DNA, 19 bp, Mus musculus
  siRNA target sequence for Pde7a (NM_008802.1,166-184).
ctgatcagactgcgttata

SEQ ID NO: 590391 - DNA, 19 bp, Mus musculus
  siRNA target sequence for Pde7a (NM_008802.1,168-186).
gatcagactgcgttatata

SEQ ID NO: 590392 - DNA, 19 bp, Mus musculus
  siRNA target sequence for Pde7a (NM_008802.1,173-191).
gactgcgttatatattcgt

SEQ ID NO: 590393 - DNA, 19 bp, Mus musculus
  siRNA target sequence for Pde7a (NM_008802.1,175-193).
ctgcgttatatattcgtat

SEQ ID NO: 590394 - DNA, 19 bp, Mus musculus
  siRNA target sequence for Pde7a (NM_008802.1,179-197).
gttatatattcgtatgcta

SEQ ID NO: 590395 - DNA, 19 bp, Mus musculus
  siRNA target sequence for Pde7a (NM_008802.1,218-236).
ccgagcaggatttgaaaca

SEQ ID NO: 590396 - DNA, 19 bp, Mus musculus
  siRNA target sequence for Pde7a (NM_008802.1,247-265).
gttcccatccgtacattga

SEQ ID NO: 590397 - DNA, 19 bp, Mus musculus
  siRNA target sequence for Pde7a (NM_008802.1,264-282).
gacttccgtatttttcact

SEQ ID NO: 590398 - DNA, 19 bp, Mus musculus
  siRNA target sequence for Pde7a (NM_008802.1,270-288).
cgtatttttcactctcaat

SEQ ID NO: 590399 - DNA, 19 bp, Mus musculus
  siRNA target sequence for Pde7a (NM_008802.1,317-335).
gaacatcagaaggttacta

SEQ ID NO: 590400 - DNA, 19 bp, Mus musculus
  siRNA target sequence for Pde7a (NM_008802.1,320-338).
catcagaaggttactaagt

SEQ ID NO: 590401 - DNA, 19 bp, Mus musculus
  siRNA target sequence for Pde7a (NM_008802.1,353-371).
cagatcctcacgagttttt

SEQ ID NO: 590402 - DNA, 19 bp, Mus musculus
  siRNA target sequence for Pde7a (NM_008802.1,388-406).
gtagttctctagacatttt

SEQ ID NO: 590403 - DNA, 19 bp, Mus musculus
  siRNA target sequence for Pde7a (NM_008802.1,477-495).
ctgtttgatagactaacaa

SEQ ID NO: 590404 - DNA, 19 bp, Mus musculus
  siRNA target sequence for Pde7a (NM_008802.1,505-523).
gtctagtaagcctaacctt

SEQ ID NO: 590405 - DNA, 19 bp, Mus musculus
  siRNA target sequence for Pde7a (NM_008802.1,510-528).
gtaagcctaacctttcatt

SEQ ID NO: 590406 - DNA, 19 bp, Mus musculus
  siRNA target sequence for Pde7a (NM_008802.1,516-534).
ctaacctttcatttattta

SEQ ID NO: 590407 - DNA, 19 bp, Mus musculus
  siRNA target sequence for Pde7a (NM_008802.1,535-553).
gtcttcatggattgattga

SEQ ID NO: 590408 - DNA, 19 bp, Mus musculus
  siRNA target sequence for Pde7a (NM_008802.1,552-570).
gagtacttccatttagata

SEQ ID NO: 590409 - DNA, 19 bp, Mus musculus
  siRNA target sequence for Pde7a (NM_008802.1,575-593).
gaaactccgtcggttttta

SEQ ID NO: 590410 - DNA, 19 bp, Mus musculus
  siRNA target sequence for Pde7a (NM_008802.1,579-597).
ctccgtcggtttttagtta

SEQ ID NO: 590411 - DNA, 19 bp, Mus musculus
  siRNA target sequence for Pde7a (NM_008802.1,582-600).
cgtcggtttttagttatga

SEQ ID NO: 590412 - DNA, 19 bp, Mus musculus
  siRNA target sequence for Pde7a (NM_008802.1,671-689).
gcactgttacttaaaggaa

SEQ ID NO: 590413 - DNA, 19 bp, Mus musculus
  siRNA target sequence for Pde7a (NM_008802.1,676-694).
gttacttaaaggaacctaa

SEQ ID NO: 590414 - DNA, 19 bp, Mus musculus
  siRNA target sequence for Pde7a (NM_008802.1,708-726).
gtcactccttgggatatct

SEQ ID NO: 590415 - DNA, 19 bp, Mus musculus
  siRNA target sequence for Pde7a (NM_008802.1,718-736).
gggatatcttgctgagttt

SEQ ID NO: 590416 - DNA, 19 bp, Mus musculus
  siRNA target sequence for Pde7a (NM_008802.1,725-743).
cttgctgagtttaattgca

SEQ ID NO: 590417 - DNA, 19 bp, Mus musculus
  siRNA target sequence for Pde7a (NM_008802.1,774-792).
gttaatcagccgtttctta

SEQ ID NO: 590418 - DNA, 19 bp, Mus musculus
  siRNA target sequence for Pde7a (NM_008802.1,804-822).
cattatctagcaactttat

SEQ ID NO: 590419 - DNA, 19 bp, Mus musculus
  siRNA target sequence for Pde7a (NM_008802.1,810-828).
ctagcaactttatacaaga

SEQ ID NO: 590420 - DNA, 19 bp, Mus musculus
  siRNA target sequence for Pde7a (NM_008802.1,813-831).
gcaactttatacaagaatt

SEQ ID NO: 590421 - DNA, 19 bp, Mus musculus
  siRNA target sequence for Pde7a (NM_008802.1,869-887).
gggcttgttaagagaatct

SEQ ID NO: 590422 - DNA, 19 bp, Mus musculus
  siRNA target sequence for Pde7a (NM_008802.1,896-914).
ctcacacttgccattggaa

SEQ ID NO: 590423 - DNA, 19 bp, Mus musculus
  siRNA target sequence for Pde7a (NM_008802.1,980-998).
cgagtacctgtcattgttt

SEQ ID NO: 590424 - DNA, 19 bp, Mus musculus
  siRNA target sequence for Pde7a (NM_008802.1,986-1004).
cctgtcattgtttagatct

SEQ ID NO: 590425 - DNA, 19 bp, Mus musculus
  siRNA target sequence for Pde7a (NM_008802.1,1039-1057).
gcagacataggcatttggt

SEQ ID NO: 590426 - DNA, 19 bp, Mus musculus
  siRNA target sequence for Pde7a (NM_008802.1,1040-1058).
cagacataggcatttggtt

SEQ ID NO: 590427 - DNA, 19 bp, Mus musculus
  siRNA target sequence for Pde7a (NM_008802.1,1073-1091).
gaaatgtgctgatatttgt

SEQ ID NO: 590428 - DNA, 19 bp, Mus musculus
  siRNA target sequence for Pde7a (NM_008802.1,1101-1119).
cggaactgggaattaagca

SEQ ID NO: 590429 - DNA, 19 bp, Mus musculus
  siRNA target sequence for Pde7a (NM_008802.1,1121-1139).
gcagtggagtgaaaaagta

SEQ ID NO: 590430 - DNA, 19 bp, Mus musculus
  siRNA target sequence for Pde7a (NM_008802.1,1122-1140).
cagtggagtgaaaaagtaa

SEQ ID NO: 590431 - DNA, 19 bp, Mus musculus
  siRNA target sequence for Pde7a (NM_008802.1,1187-1205).
gggtgtgagtccactttgt

SEQ ID NO: 590432 - DNA, 19 bp, Mus musculus
  siRNA target sequence for Pde7a (NM_008802.1,1227-1245).
gccaacatccagattggtt

SEQ ID NO: 590433 - DNA, 19 bp, Mus musculus
  siRNA target sequence for Pde7a (NM_008802.1,1229-1247).
caacatccagattggtttt

SEQ ID NO: 590434 - DNA, 19 bp, Mus musculus
  siRNA target sequence for Pde7a (NM_008802.1,1257-1275).
ctagtggagcctttattta

SEQ ID NO: 590435 - DNA, 19 bp, Mus musculus
  siRNA target sequence for Pde7a (NM_008802.1,1323-1341).
ggacatgtggggctgaata

SEQ ID NO: 590436 - DNA, 19 bp, Mus musculus
  siRNA target sequence for Pde7a (NM_008802.1,1324-1342).
gacatgtggggctgaataa

SEQ ID NO: 590437 - DNA, 19 bp, Mus musculus
  siRNA target sequence for Pde7a (NM_008802.1,1395-1413).
gctgcatttgagttgaact

SEQ ID NO: 590438 - DNA, 19 bp, Mus musculus
  siRNA target sequence for Pde7a (NM_008802.1,1428-1446).
caggaaaatcggttatcat

SEQ ID NO: 590439 - DNA, 19 bp, Mus musculus
  siRNA target sequence for Cnp1 (NM_009923.1,338-356).
gctgatgcttacaagatca

SEQ ID NO: 590440 - DNA, 19 bp, Mus musculus
  siRNA target sequence for Cnp1 (NM_009923.1,438-456).
gggttcttgtgcttgatga

SEQ ID NO: 590441 - DNA, 19 bp, Mus musculus
  siRNA target sequence for Cnp1 (NM_009923.1,439-457).
ggttcttgtgcttgatgat

SEQ ID NO: 590442 - DNA, 19 bp, Mus musculus
  siRNA target sequence for Cnp1 (NM_009923.1,440-458).
gttcttgtgcttgatgata

SEQ ID NO: 590443 - DNA, 19 bp, Mus musculus
  siRNA target sequence for Cnp1 (NM_009923.1,475-493).
gcggctggatcagcttttt

SEQ ID NO: 590444 - DNA, 19 bp, Mus musculus
  siRNA target sequence for Cnp1 (NM_009923.1,477-495).
ggctggatcagctttttga

SEQ ID NO: 590445 - DNA, 19 bp, Mus musculus
  siRNA target sequence for Cnp1 (NM_009923.1,478-496).
gctggatcagctttttgaa

SEQ ID NO: 590446 - DNA, 19 bp, Mus musculus
  siRNA target sequence for Cnp1 (NM_009923.1,597-615).
cggccgatgacctgaagaa

SEQ ID NO: 590447 - DNA, 19 bp, Mus musculus
  siRNA target sequence for Cnp1 (NM_009923.1,664-682).
gttcctgaccaaaaagagt

SEQ ID NO: 590448 - DNA, 19 bp, Mus musculus
  siRNA target sequence for Cnp1 (NM_009923.1,904-922).
ggtggtgaagagatcgtat

SEQ ID NO: 590449 - DNA, 19 bp, Mus musculus
  siRNA target sequence for Cnp1 (NM_009923.1,1120-1138).
gggtcttgacctcttagat

SEQ ID NO: 590450 - DNA, 19 bp, Mus musculus
  siRNA target sequence for Cnp1 (NM_009923.1,1124-1142).
cttgacctcttagatattt

SEQ ID NO: 590451 - DNA, 19 bp, Mus musculus
  siRNA target sequence for Cnp1 (NM_009923.1,1227-1245).
ggatgctgagcctgactaa

SEQ ID NO: 590452 - DNA, 19 bp, Mus musculus
  siRNA target sequence for Cnp1 (NM_009923.1,1264-1282).
catcttcacggggtactat

SEQ ID NO: 590453 - DNA, 19 bp, Mus musculus
  siRNA target sequence for Plcb1 (NM_019677.1,96-114).
ggatgatgactccactatt

SEQ ID NO: 590454 - DNA, 19 bp, Mus musculus
  siRNA target sequence for Plcb1 (NM_019677.1,254-272).
ccaagttgcgtgaacttct

SEQ ID NO: 590455 - DNA, 19 bp, Mus musculus
  siRNA target sequence for Plcb1 (NM_019677.1,294-312).
cttggaacagcgcatgata

SEQ ID NO: 590456 - DNA, 19 bp, Mus musculus
  siRNA target sequence for Plcb1 (NM_019677.1,297-315).
ggaacagcgcatgataact

SEQ ID NO: 590457 - DNA, 19 bp, Mus musculus
  siRNA target sequence for Plcb1 (NM_019677.1,505-523).
cgcattcctcttaaaaaca

SEQ ID NO: 590458 - DNA, 19 bp, Mus musculus
  siRNA target sequence for Plcb1 (NM_019677.1,514-532).
cttaaaaacatctatcgat

SEQ ID NO: 590459 - DNA, 19 bp, Mus musculus
  siRNA target sequence for Plcb1 (NM_019677.1,544-562).
gaccggaagcgcgttgaaa

SEQ ID NO: 590460 - DNA, 19 bp, Mus musculus
  siRNA target sequence for Plcb1 (NM_019677.1,546-564).
ccggaagcgcgttgaaact

SEQ ID NO: 590461 - DNA, 19 bp, Mus musculus
  siRNA target sequence for Plcb1 (NM_019677.1,586-604).
ccatcttcgaggaatgact

SEQ ID NO: 590462 - DNA, 19 bp, Mus musculus
  siRNA target sequence for Plcb1 (NM_019677.1,618-636).
ggacttcactccagatgta

SEQ ID NO: 590463 - DNA, 19 bp, Mus musculus
  siRNA target sequence for Plcb1 (NM_019677.1,624-642).
cactccagatgtatacaga

SEQ ID NO: 590464 - DNA, 19 bp, Mus musculus
  siRNA target sequence for Plcb1 (NM_019677.1,662-680).
gtccccgacctgaaattga

SEQ ID NO: 590465 - DNA, 19 bp, Mus musculus
  siRNA target sequence for Plcb1 (NM_019677.1,664-682).
ccccgacctgaaattgata

SEQ ID NO: 590466 - DNA, 19 bp, Mus musculus
  siRNA target sequence for Plcb1 (NM_019677.1,665-683).
cccgacctgaaattgataa

SEQ ID NO: 590467 - DNA, 19 bp, Mus musculus
  siRNA target sequence for Plcb1 (NM_019677.1,667-685).
cgacctgaaattgataaca

SEQ ID NO: 590468 - DNA, 19 bp, Mus musculus
  siRNA target sequence for Plcb1 (NM_019677.1,716-734).
cgtacctgacggttgatca

SEQ ID NO: 590469 - DNA, 19 bp, Mus musculus
  siRNA target sequence for Plcb1 (NM_019677.1,727-745).
gttgatcagatgatggatt

SEQ ID NO: 590470 - DNA, 19 bp, Mus musculus
  siRNA target sequence for Plcb1 (NM_019677.1,810-828).
gcaggtccaagtgttgatt

SEQ ID NO: 590471 - DNA, 19 bp, Mus musculus
  siRNA target sequence for Plcb1 (NM_019677.1,894-912).
ctacctgagcggagaagaa

SEQ ID NO: 590472 - DNA, 19 bp, Mus musculus
  siRNA target sequence for Plcb1 (NM_019677.1,897-915).
cctgagcggagaagaaaat

SEQ ID NO: 590473 - DNA, 19 bp, Mus musculus
  siRNA target sequence for Plcb1 (NM_019677.1,1032-1050).
ctcgtctgtagagatgtat

SEQ ID NO: 590474 - DNA, 19 bp, Mus musculus
  siRNA target sequence for Plcb1 (NM_019677.1,1189-1207).
gcagagtgtgcgttcaaga

SEQ ID NO: 590475 - DNA, 19 bp, Mus musculus
  siRNA target sequence for Plcb1 (NM_019677.1,1276-1294).
gccgagtattgccgattaa

SEQ ID NO: 590476 - DNA, 19 bp, Mus musculus
  siRNA target sequence for Plcb1 (NM_019677.1,1277-1295).
ccgagtattgccgattaat

SEQ ID NO: 590477 - DNA, 19 bp, Mus musculus
  siRNA target sequence for Plcb1 (NM_019677.1,1279-1297).
gagtattgccgattaatct

SEQ ID NO: 590478 - DNA, 19 bp, Mus musculus
  siRNA target sequence for Plcb1 (NM_019677.1,1281-1299).
gtattgccgattaatcttt

SEQ ID NO: 590479 - DNA, 19 bp, Mus musculus
  siRNA target sequence for Plcb1 (NM_019677.1,1314-1332).
gatggaaccactggaaaaa

SEQ ID NO: 590480 - DNA, 19 bp, Mus musculus
  siRNA target sequence for Plcb1 (NM_019677.1,1360-1378).
ccaagccctatggatttaa

SEQ ID NO: 590481 - DNA, 19 bp, Mus musculus
  siRNA target sequence for Plcb1 (NM_019677.1,1364-1382).
gccctatggatttaatgta

SEQ ID NO: 590482 - DNA, 19 bp, Mus musculus
  siRNA target sequence for Plcb1 (NM_019677.1,1548-1566).
cgacgacgatgactgtaaa

SEQ ID NO: 590483 - DNA, 19 bp, Mus musculus
  siRNA target sequence for Plcb1 (NM_019677.1,1623-1641).
gtctaacctggtgaactat

SEQ ID NO: 590484 - DNA, 19 bp, Mus musculus
  siRNA target sequence for Plcb1 (NM_019677.1,1625-1643).
ctaacctggtgaactatat

SEQ ID NO: 590485 - DNA, 19 bp, Mus musculus
  siRNA target sequence for Plcb1 (NM_019677.1,1726-1744).
ggacttgaacaacttacaa

SEQ ID NO: 590486 - DNA, 19 bp, Mus musculus
  siRNA target sequence for Plcb1 (NM_019677.1,1727-1745).
gacttgaacaacttacaaa

SEQ ID NO: 590487 - DNA, 19 bp, Mus musculus
  siRNA target sequence for Plcb1 (NM_019677.1,1729-1747).
cttgaacaacttacaaagt

SEQ ID NO: 590488 - DNA, 19 bp, Mus musculus
  siRNA target sequence for Plcb1 (NM_019677.1,1746-1764).
gtctccggtggaatttgta

SEQ ID NO: 590489 - DNA, 19 bp, Mus musculus
  siRNA target sequence for Plcb1 (NM_019677.1,1748-1766).
ctccggtggaatttgtaga

SEQ ID NO: 590490 - DNA, 19 bp, Mus musculus
  siRNA target sequence for Plcb1 (NM_019677.1,1750-1768).
ccggtggaatttgtagaat

SEQ ID NO: 590491 - DNA, 19 bp, Mus musculus
  siRNA target sequence for Plcb1 (NM_019677.1,1779-1797).
gcaacttagcaggatatat

SEQ ID NO: 590492 - DNA, 19 bp, Mus musculus
  siRNA target sequence for Plcb1 (NM_019677.1,1804-1822).
ggaacacgtgtggattcat

SEQ ID NO: 590493 - DNA, 19 bp, Mus musculus
  siRNA target sequence for Plcb1 (NM_019677.1,1905-1923).
gataaacatgggcatgtat

SEQ ID NO: 590494 - DNA, 19 bp, Mus musculus
  siRNA target sequence for Plcb1 (NM_019677.1,1914-1932).
gggcatgtatgagtacaat

SEQ ID NO: 590495 - DNA, 19 bp, Mus musculus
  siRNA target sequence for Plcb1 (NM_019677.1,1970-1988).
ggaggccggacaagcattt

SEQ ID NO: 590496 - DNA, 19 bp, Mus musculus
  siRNA target sequence for Plcb1 (NM_019677.1,1971-1989).
gaggccggacaagcatttt

SEQ ID NO: 590497 - DNA, 19 bp, Mus musculus
  siRNA target sequence for Plcb1 (NM_019677.1,2025-2043).
ggccaacactctatctgtt

SEQ ID NO: 590498 - DNA, 19 bp, Mus musculus
  siRNA target sequence for Plcb1 (NM_019677.1,2026-2044).
gccaacactctatctgtta

SEQ ID NO: 590499 - DNA, 19 bp, Mus musculus
  siRNA target sequence for Plcb1 (NM_019677.1,2027-2045).
ccaacactctatctgttaa

SEQ ID NO: 590500 - DNA, 19 bp, Mus musculus
  siRNA target sequence for Plcb1 (NM_019677.1,2181-2199).
ctgggaagaagaacctatt

SEQ ID NO: 590501 - DNA, 19 bp, Mus musculus
  siRNA target sequence for Plcb1 (NM_019677.1,2195-2213).
ctattgtattcaaaaaggt

SEQ ID NO: 590502 - DNA, 19 bp, Mus musculus
  siRNA target sequence for Plcb1 (NM_019677.1,2238-2256).
gaggatagcagcatatgaa

SEQ ID NO: 590503 - DNA, 19 bp, Mus musculus
  siRNA target sequence for Plcb1 (NM_019677.1,2408-2426).
cgtatgcagatgtaatcga

SEQ ID NO: 590504 - DNA, 19 bp, Mus musculus
  siRNA target sequence for Plcb1 (NM_019677.1,2409-2427).
gtatgcagatgtaatcgaa

SEQ ID NO: 590505 - DNA, 19 bp, Mus musculus
  siRNA target sequence for Plcb1 (NM_019677.1,2439-2457).
cccaatccgatatgtcaat

SEQ ID NO: 590506 - DNA, 19 bp, Mus musculus
  siRNA target sequence for Plcb1 (NM_019677.1,2667-2685).
gaaggcacctgccaaaaca

SEQ ID NO: 590507 - DNA, 19 bp, Mus musculus
  siRNA target sequence for Plcb1 (NM_019677.1,2678-2696).
ccaaaacagaagatctgat

SEQ ID NO: 590508 - DNA, 19 bp, Mus musculus
  siRNA target sequence for Plcb1 (NM_019677.1,2694-2712).
gatccagagcgtgttaaca

SEQ ID NO: 590509 - DNA, 19 bp, Mus musculus
  siRNA target sequence for Plcb1 (NM_019677.1,2700-2718).
gagcgtgttaacagaagta

SEQ ID NO: 590510 - DNA, 19 bp, Mus musculus
  siRNA target sequence for Plcb1 (NM_019677.1,2702-2720).
gcgtgttaacagaagtaga

SEQ ID NO: 590511 - DNA, 19 bp, Mus musculus
  siRNA target sequence for Plcb1 (NM_019677.1,2751-2769).
gaaatcgttcgtgaaactt

SEQ ID NO: 590512 - DNA, 19 bp, Mus musculus
  siRNA target sequence for Plcb1 (NM_019677.1,3061-3079).
cggcaagagcagtattaca

SEQ ID NO: 590513 - DNA, 19 bp, Mus musculus
  siRNA target sequence for Plcb1 (NM_019677.1,3145-3163).
gagtgtcagaacaatcagt

SEQ ID NO: 590514 - DNA, 19 bp, Mus musculus
  siRNA target sequence for Plcb1 (NM_019677.1,3147-3165).
gtgtcagaacaatcagtta

SEQ ID NO: 590515 - DNA, 19 bp, Mus musculus
  siRNA target sequence for Plcb3 (NM_008874.2,179-197).
cgggagtaagttcatcaaa

SEQ ID NO: 590516 - DNA, 19 bp, Mus musculus
  siRNA target sequence for Plcb3 (NM_008874.2,247-265).
ctaatggcttcttcttgta

SEQ ID NO: 590517 - DNA, 19 bp, Mus musculus
  siRNA target sequence for Plcb3 (NM_008874.2,320-338).
cacaaggacaggtcgttat

SEQ ID NO: 590518 - DNA, 19 bp, Mus musculus
  siRNA target sequence for Plcb3 (NM_008874.2,356-374).
ccctaagattcgagaagta

SEQ ID NO: 590519 - DNA, 19 bp, Mus musculus
  siRNA target sequence for Plcb3 (NM_008874.2,435-453).
ccagatccagtaaatacca

SEQ ID NO: 590520 - DNA, 19 bp, Mus musculus
  siRNA target sequence for Plcb3 (NM_008874.2,441-459).
ccagtaaataccacattct

SEQ ID NO: 590521 - DNA, 19 bp, Mus musculus
  siRNA target sequence for Plcb3 (NM_008874.2,499-517).
ggtcagaggagttgtttaa

SEQ ID NO: 590522 - DNA, 19 bp, Mus musculus
  siRNA target sequence for Plcb3 (NM_008874.2,500-518).
gtcagaggagttgtttaaa

SEQ ID NO: 590523 - DNA, 19 bp, Mus musculus
  siRNA target sequence for Plcb3 (NM_008874.2,559-577).
ccttcctgcggaaagcata

SEQ ID NO: 590524 - DNA, 19 bp, Mus musculus
  siRNA target sequence for Plcb3 (NM_008874.2,610-628).
gacggattccggtcaagaa

SEQ ID NO: 590525 - DNA, 19 bp, Mus musculus
  siRNA target sequence for Plcb3 (NM_008874.2,612-630).
cggattccggtcaagaaca

SEQ ID NO: 590526 - DNA, 19 bp, Mus musculus
  siRNA target sequence for Plcb3 (NM_008874.2,613-631).
ggattccggtcaagaacat

SEQ ID NO: 590527 - DNA, 19 bp, Mus musculus
  siRNA target sequence for Plcb3 (NM_008874.2,618-636).
ccggtcaagaacattctga

SEQ ID NO: 590528 - DNA, 19 bp, Mus musculus
  siRNA target sequence for Plcb3 (NM_008874.2,619-637).
cggtcaagaacattctgaa

SEQ ID NO: 590529 - DNA, 19 bp, Mus musculus
  siRNA target sequence for Plcb3 (NM_008874.2,712-730).
ccattcgccctgatgagtt

SEQ ID NO: 590530 - DNA, 19 bp, Mus musculus
  siRNA target sequence for Plcb3 (NM_008874.2,713-731).
cattcgccctgatgagttt

SEQ ID NO: 590531 - DNA, 19 bp, Mus musculus
  siRNA target sequence for Plcb3 (NM_008874.2,840-858).
cagctcatggactttatca

SEQ ID NO: 590532 - DNA, 19 bp, Mus musculus
  siRNA target sequence for Plcb3 (NM_008874.2,966-984).
gagcgcgaccagatgtcta

SEQ ID NO: 590533 - DNA, 19 bp, Mus musculus
  siRNA target sequence for Plcb3 (NM_008874.2,1068-1086).
cagccactgagcgcatatt

SEQ ID NO: 590534 - DNA, 19 bp, Mus musculus
  siRNA target sequence for Plcb3 (NM_008874.2,1070-1088).
gccactgagcgcatatttt

SEQ ID NO: 590535 - DNA, 19 bp, Mus musculus
  siRNA target sequence for Plcb3 (NM_008874.2,1071-1089).
ccactgagcgcatatttta

SEQ ID NO: 590536 - DNA, 19 bp, Mus musculus
  siRNA target sequence for Plcb3 (NM_008874.2,1072-1090).
cactgagcgcatattttat

SEQ ID NO: 590537 - DNA, 19 bp, Mus musculus
  siRNA target sequence for Plcb3 (NM_008874.2,1074-1092).
ctgagcgcatattttatca

SEQ ID NO: 590538 - DNA, 19 bp, Mus musculus
  siRNA target sequence for Plcb3 (NM_008874.2,1138-1156).
catcatcggtggagatgta

SEQ ID NO: 590539 - DNA, 19 bp, Mus musculus
  siRNA target sequence for Plcb3 (NM_008874.2,1386-1404).
gagtactgccgctctatct

SEQ ID NO: 590540 - DNA, 19 bp, Mus musculus
  siRNA target sequence for Plcb3 (NM_008874.2,1388-1406).
gtactgccgctctatcttt

SEQ ID NO: 590541 - DNA, 19 bp, Mus musculus
  siRNA target sequence for Plcb3 (NM_008874.2,1408-1426).
gggatgcgctgctcattga

SEQ ID NO: 590542 - DNA, 19 bp, Mus musculus
  siRNA target sequence for Plcb3 (NM_008874.2,1491-1509).
cgtatcctggtgaagaata

SEQ ID NO: 590543 - DNA, 19 bp, Mus musculus
  siRNA target sequence for Plcb3 (NM_008874.2,1492-1510).
gtatcctggtgaagaataa

SEQ ID NO: 590544 - DNA, 19 bp, Mus musculus
  siRNA target sequence for Plcb3 (NM_008874.2,1732-1750).
gcctcagccgggaacctaa

SEQ ID NO: 590545 - DNA, 19 bp, Mus musculus
  siRNA target sequence for Plcb3 (NM_008874.2,1733-1751).
cctcagccgggaacctaat

SEQ ID NO: 590546 - DNA, 19 bp, Mus musculus
  siRNA target sequence for Plcb3 (NM_008874.2,1805-1823).
ggaaacaacggatccaaaa

SEQ ID NO: 590547 - DNA, 19 bp, Mus musculus
  siRNA target sequence for Plcb3 (NM_008874.2,1899-1917).
gttgagcccgtcaagttca

SEQ ID NO: 590548 - DNA, 19 bp, Mus musculus
  siRNA target sequence for Plcb3 (NM_008874.2,1902-1920).
gagcccgtcaagttcaagt

SEQ ID NO: 590549 - DNA, 19 bp, Mus musculus
  siRNA target sequence for Plcb3 (NM_008874.2,2348-2366).
cgtcgaggtggacatgttt

SEQ ID NO: 590550 - DNA, 19 bp, Mus musculus
  siRNA target sequence for Plcb3 (NM_008874.2,2381-2399).
cacaagacgcaaatatcgt

SEQ ID NO: 590551 - DNA, 19 bp, Mus musculus
  siRNA target sequence for Plcb3 (NM_008874.2,2439-2457).
gacgaggaaccctttgact

SEQ ID NO: 590552 - DNA, 19 bp, Mus musculus
  siRNA target sequence for Plcb3 (NM_008874.2,2560-2578).
gctcaggataccactatgt

SEQ ID NO: 590553 - DNA, 19 bp, Mus musculus
  siRNA target sequence for Plcb3 (NM_008874.2,2672-2690).
ctatgcggaggccttgatt

SEQ ID NO: 590554 - DNA, 19 bp, Mus musculus
  siRNA target sequence for Plcb3 (NM_008874.2,2732-2750).
gcaactagccgctctcatt

SEQ ID NO: 590555 - DNA, 19 bp, Mus musculus
  siRNA target sequence for Plcb3 (NM_008874.2,2768-2786).
ggccagcacagagacatat

SEQ ID NO: 590556 - DNA, 19 bp, Mus musculus
  siRNA target sequence for Plcb3 (NM_008874.2,2916-2934).
gggcagcgagatgatttga

SEQ ID NO: 590557 - DNA, 19 bp, Mus musculus
  siRNA target sequence for Plcb3 (NM_008874.2,2917-2935).
ggcagcgagatgatttgat

SEQ ID NO: 590558 - DNA, 19 bp, Mus musculus
  siRNA target sequence for Plcb3 (NM_008874.2,2918-2936).
gcagcgagatgatttgatt

SEQ ID NO: 590559 - DNA, 19 bp, Mus musculus
  siRNA target sequence for Plcb3 (NM_008874.2,3030-3048).
ctgcgggagttgcataaga

SEQ ID NO: 590560 - DNA, 19 bp, Mus musculus
  siRNA target sequence for Plcb3 (NM_008874.2,3206-3224).
gttccagaaccgacaagta

SEQ ID NO: 590561 - DNA, 19 bp, Mus musculus
  siRNA target sequence for Plcb3 (NM_008874.2,3402-3420).
gacaggaagcgcaacaaca

SEQ ID NO: 590562 - DNA, 19 bp, Mus musculus
  siRNA target sequence for Plcb3 (NM_008874.2,3433-3451).
ccaagacaagggagaaaca

SEQ ID NO: 590563 - DNA, 19 bp, Mus musculus
  siRNA target sequence for Plcb4 (NM_013829.1,204-222).
gatacgaagaggaatcttt

SEQ ID NO: 590564 - DNA, 19 bp, Mus musculus
  siRNA target sequence for Plcb4 (NM_013829.1,238-256).
ctgcctcttcaaagtagat

SEQ ID NO: 590565 - DNA, 19 bp, Mus musculus
  siRNA target sequence for Plcb4 (NM_013829.1,296-314).
gaaggacaagtgctagaat

SEQ ID NO: 590566 - DNA, 19 bp, Mus musculus
  siRNA target sequence for Plcb4 (NM_013829.1,299-317).
ggacaagtgctagaatgtt

SEQ ID NO: 590567 - DNA, 19 bp, Mus musculus
  siRNA target sequence for Plcb4 (NM_013829.1,315-333).
gttccctcatcaacagtat

SEQ ID NO: 590568 - DNA, 19 bp, Mus musculus
  siRNA target sequence for Plcb4 (NM_013829.1,377-395).
ctcgaagctgttggaaaat

SEQ ID NO: 590569 - DNA, 19 bp, Mus musculus
  siRNA target sequence for Plcb4 (NM_013829.1,407-425).
ctggaagggcggatattgt

SEQ ID NO: 590570 - DNA, 19 bp, Mus musculus
  siRNA target sequence for Plcb4 (NM_013829.1,437-455).
ggcacggatctggtgaata

SEQ ID NO: 590571 - DNA, 19 bp, Mus musculus
  siRNA target sequence for Plcb4 (NM_013829.1,438-456).
gcacggatctggtgaatat

SEQ ID NO: 590572 - DNA, 19 bp, Mus musculus
  siRNA target sequence for Plcb4 (NM_013829.1,485-503).
ccagaagtaactaagcaat

SEQ ID NO: 590573 - DNA, 19 bp, Mus musculus
  siRNA target sequence for Plcb4 (NM_013829.1,513-531).
gcctgagatcgatcattca

SEQ ID NO: 590574 - DNA, 19 bp, Mus musculus
  siRNA target sequence for Plcb4 (NM_013829.1,515-533).
ctgagatcgatcattcaca

SEQ ID NO: 590575 - DNA, 19 bp, Mus musculus
  siRNA target sequence for Plcb4 (NM_013829.1,601-619).
gaccaacacaactggtaaa

SEQ ID NO: 590576 - DNA, 19 bp, Mus musculus
  siRNA target sequence for Plcb4 (NM_013829.1,622-640).
cccagtgaggagtatcact

SEQ ID NO: 590577 - DNA, 19 bp, Mus musculus
  siRNA target sequence for Plcb4 (NM_013829.1,626-644).
gtgaggagtatcactagaa

SEQ ID NO: 590578 - DNA, 19 bp, Mus musculus
  siRNA target sequence for Plcb4 (NM_013829.1,650-668).
gcatcagggaaaacagaaa

SEQ ID NO: 590579 - DNA, 19 bp, Mus musculus
  siRNA target sequence for Plcb4 (NM_013829.1,732-750).
ctgctgcatttacttatga

SEQ ID NO: 590580 - DNA, 19 bp, Mus musculus
  siRNA target sequence for Plcb4 (NM_013829.1,734-752).
gctgcatttacttatgaaa

SEQ ID NO: 590581 - DNA, 19 bp, Mus musculus
  siRNA target sequence for Plcb4 (NM_013829.1,780-798).
gtcctcggacagatataga

SEQ ID NO: 590582 - DNA, 19 bp, Mus musculus
  siRNA target sequence for Plcb4 (NM_013829.1,783-801).
ctcggacagatatagaaga

SEQ ID NO: 590583 - DNA, 19 bp, Mus musculus
  siRNA target sequence for Plcb4 (NM_013829.1,787-805).
gacagatatagaagatctt

SEQ ID NO: 590584 - DNA, 19 bp, Mus musculus
  siRNA target sequence for Plcb4 (NM_013829.1,789-807).
cagatatagaagatctttt

SEQ ID NO: 590585 - DNA, 19 bp, Mus musculus
  siRNA target sequence for Plcb4 (NM_013829.1,817-835).
caatggagacaaaactgat

SEQ ID NO: 590586 - DNA, 19 bp, Mus musculus
  siRNA target sequence for Plcb4 (NM_013829.1,910-928).
cccattttatgatgctaaa

SEQ ID NO: 590587 - DNA, 19 bp, Mus musculus
  siRNA target sequence for Plcb4 (NM_013829.1,1042-1060).
cttcttagatcgcttagaa

SEQ ID NO: 590588 - DNA, 19 bp, Mus musculus
  siRNA target sequence for Plcb4 (NM_013829.1,1045-1063).
cttagatcgcttagaactt

SEQ ID NO: 590589 - DNA, 19 bp, Mus musculus
  siRNA target sequence for Plcb4 (NM_013829.1,1088-1106).
gctcattacttcatcagtt

SEQ ID NO: 590590 - DNA, 19 bp, Mus musculus
  siRNA target sequence for Plcb4 (NM_013829.1,1135-1153).
gcaatttggaggaaagtct

SEQ ID NO: 590591 - DNA, 19 bp, Mus musculus
  siRNA target sequence for Plcb4 (NM_013829.1,1232-1250).
gatcaggaaccgataataa

SEQ ID NO: 590592 - DNA, 19 bp, Mus musculus
  siRNA target sequence for Plcb4 (NM_013829.1,1267-1285).
gtgtacagacatccttttt

SEQ ID NO: 590593 - DNA, 19 bp, Mus musculus
  siRNA target sequence for Plcb4 (NM_013829.1,1272-1290).
cagacatcctttttaagga

SEQ ID NO: 590594 - DNA, 19 bp, Mus musculus
  siRNA target sequence for Plcb4 (NM_013829.1,1317-1335).
cgtttgtcacatcagaata

SEQ ID NO: 590595 - DNA, 19 bp, Mus musculus
  siRNA target sequence for Plcb4 (NM_013829.1,1329-1347).
cagaataccctgtcattct

SEQ ID NO: 590596 - DNA, 19 bp, Mus musculus
  siRNA target sequence for Plcb4 (NM_013829.1,1340-1358).
gtcattctctccttcgaaa

SEQ ID NO: 590597 - DNA, 19 bp, Mus musculus
  siRNA target sequence for Plcb4 (NM_013829.1,1360-1378).
ccactgcagcaaatatcaa

SEQ ID NO: 590598 - DNA, 19 bp, Mus musculus
  siRNA target sequence for Plcb4 (NM_013829.1,1368-1386).
gcaaatatcaacagtacaa

SEQ ID NO: 590599 - DNA, 19 bp, Mus musculus
  siRNA target sequence for Plcb4 (NM_013829.1,1381-1399).
gtacaagatgtccaagtat

SEQ ID NO: 590600 - DNA, 19 bp, Mus musculus
  siRNA target sequence for Plcb4 (NM_013829.1,1387-1405).
gatgtccaagtattgtgaa

SEQ ID NO: 590601 - DNA, 19 bp, Mus musculus
  siRNA target sequence for Plcb4 (NM_013829.1,1392-1410).
ccaagtattgtgaagatct

SEQ ID NO: 590602 - DNA, 19 bp, Mus musculus
  siRNA target sequence for Plcb4 (NM_013829.1,1416-1434).
gggatctcctgttgaaaca

SEQ ID NO: 590603 - DNA, 19 bp, Mus musculus
  siRNA target sequence for Plcb4 (NM_013829.1,1417-1435).
ggatctcctgttgaaacaa

SEQ ID NO: 590604 - DNA, 19 bp, Mus musculus
  siRNA target sequence for Plcb4 (NM_013829.1,1468-1486).
gcccttgccgtctcctaat

SEQ ID NO: 590605 - DNA, 19 bp, Mus musculus
  siRNA target sequence for Plcb4 (NM_013829.1,1497-1515).
gaaaaatactcatcaagaa

SEQ ID NO: 590606 - DNA, 19 bp, Mus musculus
  siRNA target sequence for Plcb4 (NM_013829.1,1660-1678).
ccaccctgaatacaaattt

SEQ ID NO: 590607 - DNA, 19 bp, Mus musculus
  siRNA target sequence for Plcb4 (NM_013829.1,1663-1681).
ccctgaatacaaatttgga

SEQ ID NO: 590608 - DNA, 19 bp, Mus musculus
  siRNA target sequence for Plcb4 (NM_013829.1,1665-1683).
ctgaatacaaatttggaaa

SEQ ID NO: 590609 - DNA, 19 bp, Mus musculus
  siRNA target sequence for Plcb4 (NM_013829.1,1770-1788).
catggatggcatcttataa

SEQ ID NO: 590610 - DNA, 19 bp, Mus musculus
  siRNA target sequence for Plcb4 (NM_013829.1,1773-1791).
ggatggcatcttataaata

SEQ ID NO: 590611 - DNA, 19 bp, Mus musculus
  siRNA target sequence for Plcb4 (NM_013829.1,1777-1795).
ggcatcttataaatacgta

SEQ ID NO: 590612 - DNA, 19 bp, Mus musculus
  siRNA target sequence for Plcb4 (NM_013829.1,1825-1843).
gtccacgatgatcaactat

SEQ ID NO: 590613 - DNA, 19 bp, Mus musculus
  siRNA target sequence for Plcb4 (NM_013829.1,1878-1896).
ctgaagagcgcaatattca

SEQ ID NO: 590614 - DNA, 19 bp, Mus musculus
  siRNA target sequence for Plcb4 (NM_013829.1,1880-1898).
gaagagcgcaatattcact

SEQ ID NO: 590615 - DNA, 19 bp, Mus musculus
  siRNA target sequence for Plcb4 (NM_013829.1,1883-1901).
gagcgcaatattcactata

SEQ ID NO: 590616 - DNA, 19 bp, Mus musculus
  siRNA target sequence for Plcb4 (NM_013829.1,1886-1904).
cgcaatattcactataaca

SEQ ID NO: 590617 - DNA, 19 bp, Mus musculus
  siRNA target sequence for Plcb4 (NM_013829.1,1895-1913).
cactataacatgtcttctt

SEQ ID NO: 590618 - DNA, 19 bp, Mus musculus
  siRNA target sequence for Plcb4 (NM_013829.1,1945-1963).
gacgcacgcgattgagttt

SEQ ID NO: 590619 - DNA, 19 bp, Mus musculus
  siRNA target sequence for Plcb4 (NM_013829.1,1947-1965).
cgcacgcgattgagtttgt

SEQ ID NO: 590620 - DNA, 19 bp, Mus musculus
  siRNA target sequence for Plcb4 (NM_013829.1,1949-1967).
cacgcgattgagtttgtaa

SEQ ID NO: 590621 - DNA, 19 bp, Mus musculus
  siRNA target sequence for Plcb4 (NM_013829.1,1951-1969).
cgcgattgagtttgtaaat

SEQ ID NO: 590622 - DNA, 19 bp, Mus musculus
  siRNA target sequence for Plcb4 (NM_013829.1,1952-1970).
gcgattgagtttgtaaatt

SEQ ID NO: 590623 - DNA, 19 bp, Mus musculus
  siRNA target sequence for Plcb4 (NM_013829.1,1980-1998).
gacaaatgagccgcattta

SEQ ID NO: 590624 - DNA, 19 bp, Mus musculus
  siRNA target sequence for Plcb4 (NM_013829.1,2011-2029).
ccgagttgattccagtaat

SEQ ID NO: 590625 - DNA, 19 bp, Mus musculus
  siRNA target sequence for Plcb4 (NM_013829.1,2012-2030).
cgagttgattccagtaatt

SEQ ID NO: 590626 - DNA, 19 bp, Mus musculus
  siRNA target sequence for Plcb4 (NM_013829.1,2080-2098).
ctatcaaaccccagattta

SEQ ID NO: 590627 - DNA, 19 bp, Mus musculus
  siRNA target sequence for Plcb4 (NM_013829.1,2090-2108).
ccagatttagcgatgcaat

SEQ ID NO: 590628 - DNA, 19 bp, Mus musculus
  siRNA target sequence for Plcb4 (NM_013829.1,2093-2111).
gatttagcgatgcaattga

SEQ ID NO: 590629 - DNA, 19 bp, Mus musculus
  siRNA target sequence for Plcb4 (NM_013829.1,2105-2123).
caattgaatcaaggaaaat

SEQ ID NO: 590630 - DNA, 19 bp, Mus musculus
  siRNA target sequence for Plcb4 (NM_013829.1,2139-2157).
catgcgggtaccttctcaa

SEQ ID NO: 590631 - DNA, 19 bp, Mus musculus
  siRNA target sequence for Plcb4 (NM_013829.1,2175-2193).
ggcctgatcggacatttga

SEQ ID NO: 590632 - DNA, 19 bp, Mus musculus
  siRNA target sequence for Plcb4 (NM_013829.1,2209-2227).
ccctgtggacggggttatt

SEQ ID NO: 590633 - DNA, 19 bp, Mus musculus
  siRNA target sequence for Plcb4 (NM_013829.1,2289-2307).
catacgtggaagtcgatat

SEQ ID NO: 590634 - DNA, 19 bp, Mus musculus
  siRNA target sequence for Plcb4 (NM_013829.1,2324-2342).
gacaccatacggaaagagt

SEQ ID NO: 590635 - DNA, 19 bp, Mus musculus
  siRNA target sequence for Plcb4 (NM_013829.1,2345-2363).
cgaacccgcatggttatga

SEQ ID NO: 590636 - DNA, 19 bp, Mus musculus
  siRNA target sequence for Plcb4 (NM_013829.1,2346-2364).
gaacccgcatggttatgaa

SEQ ID NO: 590637 - DNA, 19 bp, Mus musculus
  siRNA target sequence for Plcb4 (NM_013829.1,2349-2367).
cccgcatggttatgaacaa

SEQ ID NO: 590638 - DNA, 19 bp, Mus musculus
  siRNA target sequence for Plcb4 (NM_013829.1,2350-2368).
ccgcatggttatgaacaat

SEQ ID NO: 590639 - DNA, 19 bp, Mus musculus
  siRNA target sequence for Plcb4 (NM_013829.1,2369-2387).
ggactcaacccagtgtata

SEQ ID NO: 590640 - DNA, 19 bp, Mus musculus
  siRNA target sequence for Plcb4 (NM_013829.1,2370-2388).
gactcaacccagtgtataa

SEQ ID NO: 590641 - DNA, 19 bp, Mus musculus
  siRNA target sequence for Plcb4 (NM_013829.1,2378-2396).
ccagtgtataatgaagaat

SEQ ID NO: 590642 - DNA, 19 bp, Mus musculus
  siRNA target sequence for Plcb4 (NM_013829.1,2383-2401).
gtataatgaagaatcgttt

SEQ ID NO: 590643 - DNA, 19 bp, Mus musculus
  siRNA target sequence for Plcb4 (NM_013829.1,2393-2411).
gaatcgtttgtgtttcgaa

SEQ ID NO: 590644 - DNA, 19 bp, Mus musculus
  siRNA target sequence for Plcb4 (NM_013829.1,2448-2466).
cagtctacgatgacaacaa

SEQ ID NO: 590645 - DNA, 19 bp, Mus musculus
  siRNA target sequence for Plcb4 (NM_013829.1,2542-2560).
gggaaacaaaccattatca

SEQ ID NO: 590646 - DNA, 19 bp, Mus musculus
  siRNA target sequence for Plcb4 (NM_013829.1,2544-2562).
gaaacaaaccattatcact

SEQ ID NO: 590647 - DNA, 19 bp, Mus musculus
  siRNA target sequence for Plcb4 (NM_013829.1,2564-2582).
ccaacaattttctgcaata

SEQ ID NO: 590648 - DNA, 19 bp, Mus musculus
  siRNA target sequence for Plcb4 (NM_013829.1,2595-2613).
catacgtgcctgatggatt

SEQ ID NO: 590649 - DNA, 19 bp, Mus musculus
  siRNA target sequence for Plcb4 (NM_013829.1,2631-2649).
ctttatccgatccaaagaa

SEQ ID NO: 590650 - DNA, 19 bp, Mus musculus
  siRNA target sequence for Plcb4 (NM_013829.1,2637-2655).
ccgatccaaagaaatttct

SEQ ID NO: 590651 - DNA, 19 bp, Mus musculus
  siRNA target sequence for Plcb4 (NM_013829.1,2686-2704).
gagagcaatgggcattgaa

SEQ ID NO: 590652 - DNA, 19 bp, Mus musculus
  siRNA target sequence for Plcb4 (NM_013829.1,2690-2708).
gcaatgggcattgaaacta

SEQ ID NO: 590653 - DNA, 19 bp, Mus musculus
  siRNA target sequence for Plcb4 (NM_013829.1,2698-2716).
cattgaaactagtgacata

SEQ ID NO: 590654 - DNA, 19 bp, Mus musculus
  siRNA target sequence for Plcb4 (NM_013829.1,2845-2863).
ggaagccaagaaaggtatt

SEQ ID NO: 590655 - DNA, 19 bp, Mus musculus
  siRNA target sequence for Plcb4 (NM_013829.1,2872-2890).
ccctcaagtgaggatagaa

SEQ ID NO: 590656 - DNA, 19 bp, Mus musculus
  siRNA target sequence for Plcb4 (NM_013829.1,2874-2892).
ctcaagtgaggatagaaga

SEQ ID NO: 590657 - DNA, 19 bp, Mus musculus
  siRNA target sequence for Plcb4 (NM_013829.1,2936-2954).
cagaaggagttaaactctt

SEQ ID NO: 590658 - DNA, 19 bp, Mus musculus
  siRNA target sequence for Plcb4 (NM_013829.1,2938-2956).
gaaggagttaaactcttta

SEQ ID NO: 590659 - DNA, 19 bp, Mus musculus
  siRNA target sequence for Plcb4 (NM_013829.1,2942-2960).
gagttaaactctttaaaga

SEQ ID NO: 590660 - DNA, 19 bp, Mus musculus
  siRNA target sequence for Plcb4 (NM_013829.1,2995-3013).
gttacactgcacacaagtt

SEQ ID NO: 590661 - DNA, 19 bp, Mus musculus
  siRNA target sequence for Plcb4 (NM_013829.1,3006-3024).
cacaagttgacaaaatcgt

SEQ ID NO: 590662 - DNA, 19 bp, Mus musculus
  siRNA target sequence for Plcb4 (NM_013829.1,3026-3044).
gcccagtatgacaaagaga

SEQ ID NO: 590663 - DNA, 19 bp, Mus musculus
  siRNA target sequence for Plcb4 (NM_013829.1,3091-3109).
gggaagtaattgtcttgaa

SEQ ID NO: 590664 - DNA, 19 bp, Mus musculus
  siRNA target sequence for Plcb4 (NM_013829.1,3141-3159).
ccctgacaacggatcacaa

SEQ ID NO: 590665 - DNA, 19 bp, Mus musculus
  siRNA target sequence for Plcb4 (NM_013829.1,3142-3160).
cctgacaacggatcacaaa

SEQ ID NO: 590666 - DNA, 19 bp, Mus musculus
  siRNA target sequence for Plcb4 (NM_013829.1,3145-3163).
gacaacggatcacaaatct

SEQ ID NO: 590667 - DNA, 19 bp, Mus musculus
  siRNA target sequence for Plcb4 (NM_013829.1,3147-3165).
caacggatcacaaatctaa

SEQ ID NO: 590668 - DNA, 19 bp, Mus musculus
  siRNA target sequence for Plcb4 (NM_013829.1,3360-3378).
gagcccatcaggctaagat

SEQ ID NO: 590669 - DNA, 19 bp, Mus musculus
  siRNA target sequence for Plcb4 (NM_013829.1,3362-3380).
gcccatcaggctaagattt

SEQ ID NO: 590670 - DNA, 19 bp, Mus musculus
  siRNA target sequence for Plcb4 (NM_013829.1,3397-3415).
ggccatcagtcaagataaa

SEQ ID NO: 590671 - DNA, 19 bp, Mus musculus
  siRNA target sequence for Plcb4 (NM_013829.1,3398-3416).
gccatcagtcaagataaat

SEQ ID NO: 590672 - DNA, 19 bp, Mus musculus
  siRNA target sequence for Plcb4 (NM_013829.1,3407-3425).
caagataaatctatcaaga

SEQ ID NO: 590673 - DNA, 19 bp, Mus musculus
  siRNA target sequence for Plcb4 (NM_013829.1,3410-3428).
gataaatctatcaagaaca

SEQ ID NO: 590674 - DNA, 19 bp, Mus musculus
  siRNA target sequence for Plcb4 (NM_013829.1,3444-3462).
ggcgagtcagggagttgaa

SEQ ID NO: 590675 - DNA, 19 bp, Mus musculus
  siRNA target sequence for Plcb4 (NM_013829.1,3446-3464).
cgagtcagggagttgaaca

SEQ ID NO: 590676 - DNA, 19 bp, Mus musculus
  siRNA target sequence for Plcb4 (NM_013829.1,3604-3622).
gcagatggtgaaattggaa

SEQ ID NO: 590677 - DNA, 19 bp, Mus musculus
  siRNA target sequence for Plce1 (NM_019588.1,221-239).
catctcacagtggaacaaa

SEQ ID NO: 590678 - DNA, 19 bp, Mus musculus
  siRNA target sequence for Plce1 (NM_019588.1,226-244).
cacagtggaacaaacataa

SEQ ID NO: 590679 - DNA, 19 bp, Mus musculus
  siRNA target sequence for Plce1 (NM_019588.1,245-263).
ggaagagtcgtctagaagt

SEQ ID NO: 590680 - DNA, 19 bp, Mus musculus
  siRNA target sequence for Plce1 (NM_019588.1,2003-2021).
cctcaggtcaaggaaagtt

SEQ ID NO: 590681 - DNA, 19 bp, Mus musculus
  siRNA target sequence for Plce1 (NM_019588.1,2008-2026).
ggtcaaggaaagttctaaa

SEQ ID NO: 590682 - DNA, 19 bp, Mus musculus
  siRNA target sequence for Plce1 (NM_019588.1,2265-2283).
gagtttgtagccgattaca

SEQ ID NO: 590683 - DNA, 19 bp, Mus musculus
  siRNA target sequence for Plce1 (NM_019588.1,2267-2285).
gtttgtagccgattacagt

SEQ ID NO: 590684 - DNA, 19 bp, Mus musculus
  siRNA target sequence for Plce1 (NM_019588.1,2276-2294).
cgattacagtggacaagat

SEQ ID NO: 590685 - DNA, 19 bp, Mus musculus
  siRNA target sequence for Plce1 (NM_019588.1,2277-2295).
gattacagtggacaagata

SEQ ID NO: 590686 - DNA, 19 bp, Mus musculus
  siRNA target sequence for Plce1 (NM_019588.1,2287-2305).
gacaagataacttcttaca

SEQ ID NO: 590687 - DNA, 19 bp, Mus musculus
  siRNA target sequence for Plce1 (NM_019588.1,2313-2331).
ggacagaatggcttaaaga

SEQ ID NO: 590688 - DNA, 19 bp, Mus musculus
  siRNA target sequence for Plce1 (NM_019588.1,2318-2336).
gaatggcttaaagaattca

SEQ ID NO: 590689 - DNA, 19 bp, Mus musculus
  siRNA target sequence for Plce1 (NM_019588.1,2348-2366).
cacggtcaacagcatcttt

SEQ ID NO: 590690 - DNA, 19 bp, Mus musculus
  siRNA target sequence for Plce1 (NM_019588.1,2428-2446).
ggagcggctctaggaaaaa

SEQ ID NO: 590691 - DNA, 19 bp, Mus musculus
  siRNA target sequence for Plce1 (NM_019588.1,2463-2481).
gcccgatggcagtttataa

SEQ ID NO: 590692 - DNA, 19 bp, Mus musculus
  siRNA target sequence for Plce1 (NM_019588.1,2464-2482).
cccgatggcagtttataat

SEQ ID NO: 590693 - DNA, 19 bp, Mus musculus
  siRNA target sequence for Plce1 (NM_019588.1,2465-2483).
ccgatggcagtttataatt

SEQ ID NO: 590694 - DNA, 19 bp, Mus musculus
  siRNA target sequence for Plce1 (NM_019588.1,2619-2637).
gatgtgcaccagttcctat

SEQ ID NO: 590695 - DNA, 19 bp, Mus musculus
  siRNA target sequence for Plce1 (NM_019588.1,2700-2718).
cagttgcagcctgacaata

SEQ ID NO: 590696 - DNA, 19 bp, Mus musculus
  siRNA target sequence for Plce1 (NM_019588.1,2720-2738).
cacgttgacctggatgaaa

SEQ ID NO: 590697 - DNA, 19 bp, Mus musculus
  siRNA target sequence for Plce1 (NM_019588.1,2775-2793).
ctcggtgtgcttagtaaca

SEQ ID NO: 590698 - DNA, 19 bp, Mus musculus
  siRNA target sequence for Plce1 (NM_019588.1,2892-2910).
ggacaccctggcattgata

SEQ ID NO: 590699 - DNA, 19 bp, Mus musculus
  siRNA target sequence for Plce1 (NM_019588.1,2893-2911).
gacaccctggcattgatat

SEQ ID NO: 590700 - DNA, 19 bp, Mus musculus
  siRNA target sequence for Plce1 (NM_019588.1,2925-2943).
gtccagaacaaacttagta

SEQ ID NO: 590701 - DNA, 19 bp, Mus musculus
  siRNA target sequence for Plce1 (NM_019588.1,2937-2955).
cttagtagcatgcttctat

SEQ ID NO: 590702 - DNA, 19 bp, Mus musculus
  siRNA target sequence for Plce1 (NM_019588.1,2985-3003).
cttcagaccacggacaata

SEQ ID NO: 590703 - DNA, 19 bp, Mus musculus
  siRNA target sequence for Plce1 (NM_019588.1,2990-3008).
gaccacggacaatagatta

SEQ ID NO: 590704 - DNA, 19 bp, Mus musculus
  siRNA target sequence for Plce1 (NM_019588.1,2992-3010).
ccacggacaatagattact

SEQ ID NO: 590705 - DNA, 19 bp, Mus musculus
  siRNA target sequence for Plce1 (NM_019588.1,3118-3136).
ggcttcggaaacagtatgt

SEQ ID NO: 590706 - DNA, 19 bp, Mus musculus
  siRNA target sequence for Plce1 (NM_019588.1,3208-3226).
ggcggtggagcactagaaa

SEQ ID NO: 590707 - DNA, 19 bp, Mus musculus
  siRNA target sequence for Plce1 (NM_019588.1,3415-3433).
ctgatcctcaagacgttaa

SEQ ID NO: 590708 - DNA, 19 bp, Mus musculus
  siRNA target sequence for Plce1 (NM_019588.1,3450-3468).
gaggccaatgtcatcacta

SEQ ID NO: 590709 - DNA, 19 bp, Mus musculus
  siRNA target sequence for Plce1 (NM_019588.1,3627-3645).
gtctcagacagtaacatga

SEQ ID NO: 590710 - DNA, 19 bp, Mus musculus
  siRNA target sequence for Plce1 (NM_019588.1,3631-3649).
cagacagtaacatgagttt

SEQ ID NO: 590711 - DNA, 19 bp, Mus musculus
  siRNA target sequence for Plce1 (NM_019588.1,3635-3653).
cagtaacatgagtttcgtt

SEQ ID NO: 590712 - DNA, 19 bp, Mus musculus
  siRNA target sequence for Plce1 (NM_019588.1,3659-3677).
cgtcgagctgttcaaatca

SEQ ID NO: 590713 - DNA, 19 bp, Mus musculus
  siRNA target sequence for Plce1 (NM_019588.1,3660-3678).
gtcgagctgttcaaatcat

SEQ ID NO: 590714 - DNA, 19 bp, Mus musculus
  siRNA target sequence for Plce1 (NM_019588.1,3663-3681).
gagctgttcaaatcattca

SEQ ID NO: 590715 - DNA, 19 bp, Mus musculus
  siRNA target sequence for Plce1 (NM_019588.1,3841-3859).
ccgacctggggctgttcat

SEQ ID NO: 590716 - DNA, 19 bp, Mus musculus
  siRNA target sequence for Plce1 (NM_019588.1,3842-3860).
cgacctggggctgttcatt

SEQ ID NO: 590717 - DNA, 19 bp, Mus musculus
  siRNA target sequence for Plce1 (NM_019588.1,3849-3867).
gggctgttcattaaaagta

SEQ ID NO: 590718 - DNA, 19 bp, Mus musculus
  siRNA target sequence for Plce1 (NM_019588.1,3850-3868).
ggctgttcattaaaagtaa

SEQ ID NO: 590719 - DNA, 19 bp, Mus musculus
  siRNA target sequence for Plce1 (NM_019588.1,3884-3902).
caaccagaggcagatatct

SEQ ID NO: 590720 - DNA, 19 bp, Mus musculus
  siRNA target sequence for Plce1 (NM_019588.1,3892-3910).
ggcagatatctgatgctat

SEQ ID NO: 590721 - DNA, 19 bp, Mus musculus
  siRNA target sequence for Plce1 (NM_019588.1,3952-3970).
gcacgtccctgggcatatt

SEQ ID NO: 590722 - DNA, 19 bp, Mus musculus
  siRNA target sequence for Plce1 (NM_019588.1,3953-3971).
cacgtccctgggcatattt

SEQ ID NO: 590723 - DNA, 19 bp, Mus musculus
  siRNA target sequence for Plce1 (NM_019588.1,4018-4036).
gagaacactgcacatatga

SEQ ID NO: 590724 - DNA, 19 bp, Mus musculus
  siRNA target sequence for Plce1 (NM_019588.1,4023-4041).
cactgcacatatgatgaaa

SEQ ID NO: 590725 - DNA, 19 bp, Mus musculus
  siRNA target sequence for Plce1 (NM_019588.1,4073-4091).
cgtcagcatgtgtcatcaa

SEQ ID NO: 590726 - DNA, 19 bp, Mus musculus
  siRNA target sequence for Plce1 (NM_019588.1,4110-4128).
gggtttgcaaggtttctga

SEQ ID NO: 590727 - DNA, 19 bp, Mus musculus
  siRNA target sequence for Plce1 (NM_019588.1,4111-4129).
ggtttgcaaggtttctgat

SEQ ID NO: 590728 - DNA, 19 bp, Mus musculus
  siRNA target sequence for Plce1 (NM_019588.1,4120-4138).
ggtttctgatggataaaga

SEQ ID NO: 590729 - DNA, 19 bp, Mus musculus
  siRNA target sequence for Plce1 (NM_019588.1,4137-4155).
gacaatttcgcctcaaaaa

SEQ ID NO: 590730 - DNA, 19 bp, Mus musculus
  siRNA target sequence for Plce1 (NM_019588.1,4163-4181).
gtcacgggagaacaagaaa

SEQ ID NO: 590731 - DNA, 19 bp, Mus musculus
  siRNA target sequence for Plce1 (NM_019588.1,4199-4217).
ctcctactattatatagaa

SEQ ID NO: 590732 - DNA, 19 bp, Mus musculus
  siRNA target sequence for Plce1 (NM_019588.1,4202-4220).
ctactattatatagaatct

SEQ ID NO: 590733 - DNA, 19 bp, Mus musculus
  siRNA target sequence for Plce1 (NM_019588.1,4205-4223).
ctattatatagaatcttca

SEQ ID NO: 590734 - DNA, 19 bp, Mus musculus
  siRNA target sequence for Plce1 (NM_019588.1,4343-4361).
gatgcccatcatctatcat

SEQ ID NO: 590735 - DNA, 19 bp, Mus musculus
  siRNA target sequence for Plce1 (NM_019588.1,4413-4431).
gatcgcagtgccttcatca

SEQ ID NO: 590736 - DNA, 19 bp, Mus musculus
  siRNA target sequence for Plce1 (NM_019588.1,4437-4455).
gacctgccaatcatcatat

SEQ ID NO: 590737 - DNA, 19 bp, Mus musculus
  siRNA target sequence for Plce1 (NM_019588.1,4442-4460).
gccaatcatcatatccatt

SEQ ID NO: 590738 - DNA, 19 bp, Mus musculus
  siRNA target sequence for Plce1 (NM_019588.1,4457-4475).
cattgagaaccattgttca

SEQ ID NO: 590739 - DNA, 19 bp, Mus musculus
  siRNA target sequence for Plce1 (NM_019588.1,4577-4595).
gcttccctcacctgatcaa

SEQ ID NO: 590740 - DNA, 19 bp, Mus musculus
  siRNA target sequence for Plce1 (NM_019588.1,4583-4601).
ctcacctgatcaacttaga

SEQ ID NO: 590741 - DNA, 19 bp, Mus musculus
  siRNA target sequence for Plce1 (NM_019588.1,4648-4666).
ctgtcgacatcctaaaaca

SEQ ID NO: 590742 - DNA, 19 bp, Mus musculus
  siRNA target sequence for Plce1 (NM_019588.1,4724-4742).
cccgccacctgccagtaat

SEQ ID NO: 590743 - DNA, 19 bp, Mus musculus
  siRNA target sequence for Plce1 (NM_019588.1,4726-4744).
cgccacctgccagtaatga

SEQ ID NO: 590744 - DNA, 19 bp, Mus musculus
  siRNA target sequence for Plce1 (NM_019588.1,4837-4855).
gcgctgacaagcttcagtt

SEQ ID NO: 590745 - DNA, 19 bp, Mus musculus
  siRNA target sequence for Plce1 (NM_019588.1,4838-4856).
cgctgacaagcttcagttt

SEQ ID NO: 590746 - DNA, 19 bp, Mus musculus
  siRNA target sequence for Plce1 (NM_019588.1,5021-5039).
ccaggcagtaaaatttcca

SEQ ID NO: 590747 - DNA, 19 bp, Mus musculus
  siRNA target sequence for Plce1 (NM_019588.1,5042-5060).
cctgtcaactctaaattca

SEQ ID NO: 590748 - DNA, 19 bp, Mus musculus
  siRNA target sequence for Plce1 (NM_019588.1,5045-5063).
gtcaactctaaattcatct

SEQ ID NO: 590749 - DNA, 19 bp, Mus musculus
  siRNA target sequence for Plce1 (NM_019588.1,5099-5117).
gtccatttttggcaacaat

SEQ ID NO: 590750 - DNA, 19 bp, Mus musculus
  siRNA target sequence for Plce1 (NM_019588.1,5139-5157).
gagacagcgccatttaaca

SEQ ID NO: 590751 - DNA, 19 bp, Mus musculus
  siRNA target sequence for Plce1 (NM_019588.1,5249-5267).
caggactcctaaatgctat

SEQ ID NO: 590752 - DNA, 19 bp, Mus musculus
  siRNA target sequence for Plce1 (NM_019588.1,5254-5272).
ctcctaaatgctatcacat

SEQ ID NO: 590753 - DNA, 19 bp, Mus musculus
  siRNA target sequence for Plce1 (NM_019588.1,5309-5327).
ccgcaggggttctcagaaa

SEQ ID NO: 590754 - DNA, 19 bp, Mus musculus
  siRNA target sequence for Plce1 (NM_019588.1,5430-5448).
cagcttgtagctctaaact

SEQ ID NO: 590755 - DNA, 19 bp, Mus musculus
  siRNA target sequence for Plce1 (NM_019588.1,5505-5523).
gggtgtggttatgttttga

SEQ ID NO: 590756 - DNA, 19 bp, Mus musculus
  siRNA target sequence for Plce1 (NM_019588.1,5506-5524).
ggtgtggttatgttttgaa

SEQ ID NO: 590757 - DNA, 19 bp, Mus musculus
  siRNA target sequence for Plce1 (NM_019588.1,5528-5546).
ccctgtcctgtgggataaa

SEQ ID NO: 590758 - DNA, 19 bp, Mus musculus
  siRNA target sequence for Plce1 (NM_019588.1,5529-5547).
cctgtcctgtgggataaaa

SEQ ID NO: 590759 - DNA, 19 bp, Mus musculus
  siRNA target sequence for Plce1 (NM_019588.1,5532-5550).
gtcctgtgggataaaagct

SEQ ID NO: 590760 - DNA, 19 bp, Mus musculus
  siRNA target sequence for Plce1 (NM_019588.1,5597-5615).
cctggatcctgctatctat

SEQ ID NO: 590761 - DNA, 19 bp, Mus musculus
  siRNA target sequence for Plce1 (NM_019588.1,5598-5616).
ctggatcctgctatctatt

SEQ ID NO: 590762 - DNA, 19 bp, Mus musculus
  siRNA target sequence for Plce1 (NM_019588.1,5600-5618).
ggatcctgctatctattct

SEQ ID NO: 590763 - DNA, 19 bp, Mus musculus
  siRNA target sequence for Plce1 (NM_019588.1,5601-5619).
gatcctgctatctattctt

SEQ ID NO: 590764 - DNA, 19 bp, Mus musculus
  siRNA target sequence for Plce1 (NM_019588.1,5660-5678).
caccggaagtccatgcatt

SEQ ID NO: 590765 - DNA, 19 bp, Mus musculus
  siRNA target sequence for Plce1 (NM_019588.1,5663-5681).
cggaagtccatgcattgaa

SEQ ID NO: 590766 - DNA, 19 bp, Mus musculus
  siRNA target sequence for Plce1 (NM_019588.1,5665-5683).
gaagtccatgcattgaagt

SEQ ID NO: 590767 - DNA, 19 bp, Mus musculus
  siRNA target sequence for Plce1 (NM_019588.1,5725-5743).
caaaacccatccatcgaaa

SEQ ID NO: 590768 - DNA, 19 bp, Mus musculus
  siRNA target sequence for Plce1 (NM_019588.1,5780-5798).
ccgggttcactttgaagat

SEQ ID NO: 590769 - DNA, 19 bp, Mus musculus
  siRNA target sequence for Plce1 (NM_019588.1,5787-5805).
cactttgaagatcttgtat

SEQ ID NO: 590770 - DNA, 19 bp, Mus musculus
  siRNA target sequence for Plce1 (NM_019588.1,5817-5835).
gcagtcgtggaaaacaaca

SEQ ID NO: 590771 - DNA, 19 bp, Mus musculus
  siRNA target sequence for Plce1 (NM_019588.1,5820-5838).
gtcgtggaaaacaacagtt

SEQ ID NO: 590772 - DNA, 19 bp, Mus musculus
  siRNA target sequence for Plce1 (NM_019588.1,5884-5902).
gaggatatcgacatcttca

SEQ ID NO: 590773 - DNA, 19 bp, Mus musculus
  siRNA target sequence for Plce1 (NM_019588.1,5927-5945).
cttggaaatctctagctta

SEQ ID NO: 590774 - DNA, 19 bp, Mus musculus
  siRNA target sequence for Plce1 (NM_019588.1,5993-6011).
gccagcctcgttgatgttt

SEQ ID NO: 590775 - DNA, 19 bp, Mus musculus
  siRNA target sequence for Plce1 (NM_019588.1,5994-6012).
ccagcctcgttgatgttta

SEQ ID NO: 590776 - DNA, 19 bp, Mus musculus
  siRNA target sequence for Plce1 (NM_019588.1,5997-6015).
gcctcgttgatgtttaata

SEQ ID NO: 590777 - DNA, 19 bp, Mus musculus
  siRNA target sequence for Plce1 (NM_019588.1,5999-6017).
ctcgttgatgtttaatact

SEQ ID NO: 590778 - DNA, 19 bp, Mus musculus
  siRNA target sequence for Plce1 (NM_019588.1,6001-6019).
cgttgatgtttaatactga

SEQ ID NO: 590779 - DNA, 19 bp, Mus musculus
  siRNA target sequence for Plce1 (NM_019588.1,6144-6162).
gttgaccaagacaccaaat

SEQ ID NO: 590780 - DNA, 19 bp, Mus musculus
  siRNA target sequence for Plce1 (NM_019588.1,6149-6167).
ccaagacaccaaatgtact

SEQ ID NO: 590781 - DNA, 19 bp, Mus musculus
  siRNA target sequence for Plce1 (NM_019588.1,6332-6350).
gccccaacaggaaactcta

SEQ ID NO: 590782 - DNA, 19 bp, Mus musculus
  siRNA target sequence for Plce1 (NM_019588.1,6478-6496).
gcactgcacaggatgtaat

SEQ ID NO: 590783 - DNA, 19 bp, Mus musculus
  siRNA target sequence for Plce1 (NM_019588.1,6481-6499).
ctgcacaggatgtaattca

SEQ ID NO: 590784 - DNA, 19 bp, Mus musculus
  siRNA target sequence for Plce1 (NM_019588.1,6492-6510).
gtaattcagcagaccttat

SEQ ID NO: 590785 - DNA, 19 bp, Mus musculus
  siRNA target sequence for Plce1 (NM_019588.1,6505-6523).
ccttatgcaaagccaaata

SEQ ID NO: 590786 - DNA, 19 bp, Mus musculus
  siRNA target sequence for Plce1 (NM_019588.1,6511-6529).
gcaaagccaaatattccta

SEQ ID NO: 590787 - DNA, 19 bp, Mus musculus
  siRNA target sequence for Plce1 (NM_019588.1,6547-6565).
ccaacccatgtgactatgt

SEQ ID NO: 590788 - DNA, 19 bp, Mus musculus
  siRNA target sequence for Plce1 (NM_019588.1,6588-6606).
gatgcagctaataagaagt

SEQ ID NO: 590789 - DNA, 19 bp, Mus musculus
  siRNA target sequence for Plce1 (NM_019588.1,6591-6609).
gcagctaataagaagtctt

SEQ ID NO: 590790 - DNA, 19 bp, Mus musculus
  siRNA target sequence for Plce1 (NM_019588.1,6682-6700).
gtgcgggaaagttcatact

SEQ ID NO: 590791 - DNA, 19 bp, Mus musculus
  siRNA target sequence for Plce1 (NM_019588.1,6684-6702).
gcgggaaagttcatactta

SEQ ID NO: 590792 - DNA, 19 bp, Mus musculus
  siRNA target sequence for Plce1 (NM_019588.1,6688-6706).
gaaagttcatacttaagct

SEQ ID NO: 590793 - DNA, 19 bp, Mus musculus
  siRNA target sequence for Plce1 (NM_019588.1,6723-6741).
gcatcccgagaagacaaaa

SEQ ID NO: 590794 - DNA, 19 bp, Mus musculus
  siRNA target sequence for Plcg2 (NM_172285.1,642-660).
gatttattcagtagatcaa

SEQ ID NO: 590795 - DNA, 19 bp, Mus musculus
  siRNA target sequence for Plcg2 (NM_172285.1,705-723).
gcccctggtcaacttcaaa

SEQ ID NO: 590796 - DNA, 19 bp, Mus musculus
  siRNA target sequence for Plcg2 (NM_172285.1,759-777).
ggaaatcggcgcacagaaa

SEQ ID NO: 590797 - DNA, 19 bp, Mus musculus
  siRNA target sequence for Plcg2 (NM_172285.1,831-849).
ccagcaaaaatcgatactt

SEQ ID NO: 590798 - DNA, 19 bp, Mus musculus
  siRNA target sequence for Plcg2 (NM_172285.1,842-860).
cgatacttgacgaattcaa

SEQ ID NO: 590799 - DNA, 19 bp, Mus musculus
  siRNA target sequence for Plcg2 (NM_172285.1,843-861).
gatacttgacgaattcaaa

SEQ ID NO: 590800 - DNA, 19 bp, Mus musculus
  siRNA target sequence for Plcg2 (NM_172285.1,850-868).
gacgaattcaaaaaagact

SEQ ID NO: 590801 - DNA, 19 bp, Mus musculus
  siRNA target sequence for Plcg2 (NM_172285.1,872-890).
ccgtgttcatcctaggaaa

SEQ ID NO: 590802 - DNA, 19 bp, Mus musculus
  siRNA target sequence for Plcg2 (NM_172285.1,876-894).
gttcatcctaggaaacaca

SEQ ID NO: 590803 - DNA, 19 bp, Mus musculus
  siRNA target sequence for Plcg2 (NM_172285.1,933-951).
ccaaaggtttcttttacat

SEQ ID NO: 590804 - DNA, 19 bp, Mus musculus
  siRNA target sequence for Plcg2 (NM_172285.1,968-986).
gggctcaggatctgaacaa

SEQ ID NO: 590805 - DNA, 19 bp, Mus musculus
  siRNA target sequence for Plcg2 (NM_172285.1,969-987).
ggctcaggatctgaacaaa

SEQ ID NO: 590806 - DNA, 19 bp, Mus musculus
  siRNA target sequence for Plcg2 (NM_172285.1,994-1012).
gagcggatgaccaagttta

SEQ ID NO: 590807 - DNA, 19 bp, Mus musculus
  siRNA target sequence for Plcg2 (NM_172285.1,1032-1050).
gaccgcagagcccttctta

SEQ ID NO: 590808 - DNA, 19 bp, Mus musculus
  siRNA target sequence for Plcg2 (NM_172285.1,1034-1052).
ccgcagagcccttcttatt

SEQ ID NO: 590809 - DNA, 19 bp, Mus musculus
  siRNA target sequence for Plcg2 (NM_172285.1,1060-1078).
gagttcctcacgtatctgt

SEQ ID NO: 590810 - DNA, 19 bp, Mus musculus
  siRNA target sequence for Plcg2 (NM_172285.1,1214-1232).
cctccacggaagcgtatat

SEQ ID NO: 590811 - DNA, 19 bp, Mus musculus
  siRNA target sequence for Plcg2 (NM_172285.1,1286-1304).
ctgatgggaagcccattat

SEQ ID NO: 590812 - DNA, 19 bp, Mus musculus
  siRNA target sequence for Plcg2 (NM_172285.1,1362-1380).
ccgagaccacgcctttgtt

SEQ ID NO: 590813 - DNA, 19 bp, Mus musculus
  siRNA target sequence for Plcg2 (NM_172285.1,1363-1381).
cgagaccacgcctttgtta

SEQ ID NO: 590814 - DNA, 19 bp, Mus musculus
  siRNA target sequence for Plcg2 (NM_172285.1,1452-1470).
ggtgttcaaggaagtgtta

SEQ ID NO: 590815 - DNA, 19 bp, Mus musculus
  siRNA target sequence for Plcg2 (NM_172285.1,1537-1555).
cgtgagaagatcattatca

SEQ ID NO: 590816 - DNA, 19 bp, Mus musculus
  siRNA target sequence for Plcg2 (NM_172285.1,1625-1643).
cccagggcgagctgtatat

SEQ ID NO: 590817 - DNA, 19 bp, Mus musculus
  siRNA target sequence for Plcg2 (NM_172285.1,1627-1645).
cagggcgagctgtatatgt

SEQ ID NO: 590818 - DNA, 19 bp, Mus musculus
  siRNA target sequence for Plcg2 (NM_172285.1,1648-1666).
gactccatcgaccagaaat

SEQ ID NO: 590819 - DNA, 19 bp, Mus musculus
  siRNA target sequence for Plcg2 (NM_172285.1,1704-1722).
gtccttcggtgatgacatt

SEQ ID NO: 590820 - DNA, 19 bp, Mus musculus
  siRNA target sequence for Plcg2 (NM_172285.1,1894-1912).
gagaccttccccaatgact

SEQ ID NO: 590821 - DNA, 19 bp, Mus musculus
  siRNA target sequence for Plcg2 (NM_172285.1,1952-1970).
gccggatccggtctactat

SEQ ID NO: 590822 - DNA, 19 bp, Mus musculus
  siRNA target sequence for Plcg2 (NM_172285.1,1972-1990).
gagaatggggtcatgaagt

SEQ ID NO: 590823 - DNA, 19 bp, Mus musculus
  siRNA target sequence for Plcg2 (NM_172285.1,2121-2139).
gtccaagccgtggtactat

SEQ ID NO: 590824 - DNA, 19 bp, Mus musculus
  siRNA target sequence for Plcg2 (NM_172285.1,2256-2274).
gggcaaggtgaaacattgt

SEQ ID NO: 590825 - DNA, 19 bp, Mus musculus
  siRNA target sequence for Plcg2 (NM_172285.1,2365-2383).
gcgctctatcgcaagatga

SEQ ID NO: 590826 - DNA, 19 bp, Mus musculus
  siRNA target sequence for Plcg2 (NM_172285.1,2375-2393).
gcaagatgaggcttcgata

SEQ ID NO: 590827 - DNA, 19 bp, Mus musculus
  siRNA target sequence for Plcg2 (NM_172285.1,2407-2425).
gagctcctggagcgatata

SEQ ID NO: 590828 - DNA, 19 bp, Mus musculus
  siRNA target sequence for Plcg2 (NM_172285.1,2409-2427).
gctcctggagcgatataat

SEQ ID NO: 590829 - DNA, 19 bp, Mus musculus
  siRNA target sequence for Plcg2 (NM_172285.1,2410-2428).
ctcctggagcgatataata

SEQ ID NO: 590830 - DNA, 19 bp, Mus musculus
  siRNA target sequence for Plcg2 (NM_172285.1,2416-2434).
gagcgatataatatggaaa

SEQ ID NO: 590831 - DNA, 19 bp, Mus musculus
  siRNA target sequence for Plcg2 (NM_172285.1,2515-2533).
gtgaaagcgctctatgact

SEQ ID NO: 590832 - DNA, 19 bp, Mus musculus
  siRNA target sequence for Plcg2 (NM_172285.1,2575-2593).
gccctcatccacaatgtct

SEQ ID NO: 590833 - DNA, 19 bp, Mus musculus
  siRNA target sequence for Plcg2 (NM_172285.1,2646-2664).
gtacttcccgtccaactat

SEQ ID NO: 590834 - DNA, 19 bp, Mus musculus
  siRNA target sequence for Plcg2 (NM_172285.1,2739-2757).
ctgcaaaggcatattggat

SEQ ID NO: 590835 - DNA, 19 bp, Mus musculus
  siRNA target sequence for Plcg2 (NM_172285.1,2746-2764).
ggcatattggatcttaata

SEQ ID NO: 590836 - DNA, 19 bp, Mus musculus
  siRNA target sequence for Plcg2 (NM_172285.1,3051-3069).
ccgagaaatccgctctttt

SEQ ID NO: 590837 - DNA, 19 bp, Mus musculus
  siRNA target sequence for Plcg2 (NM_172285.1,3053-3071).
gagaaatccgctcttttgt

SEQ ID NO: 590838 - DNA, 19 bp, Mus musculus
  siRNA target sequence for Plcg2 (NM_172285.1,3090-3108).
cattgtcaggcaaaaacct

SEQ ID NO: 590839 - DNA, 19 bp, Mus musculus
  siRNA target sequence for Plcg2 (NM_172285.1,3100-3118).
caaaaacctgtcgatctat

SEQ ID NO: 590840 - DNA, 19 bp, Mus musculus
  siRNA target sequence for Plcg2 (NM_172285.1,3111-3129).
cgatctattgcgatacaat

SEQ ID NO: 590841 - DNA, 19 bp, Mus musculus
  siRNA target sequence for Plcg2 (NM_172285.1,3115-3133).
ctattgcgatacaatcaga

SEQ ID NO: 590842 - DNA, 19 bp, Mus musculus
  siRNA target sequence for Plcg2 (NM_172285.1,3321-3339).
catgcgctctgagaagtat

SEQ ID NO: 590843 - DNA, 19 bp, Mus musculus
  siRNA target sequence for Plcg2 (NM_172285.1,3404-3422).
cacgccacctccctaaact

SEQ ID NO: 590844 - DNA, 19 bp, Mus musculus
  siRNA target sequence for Plcg2 (NM_172285.1,3429-3447).
gagtattgcctgtcctttt

SEQ ID NO: 590845 - DNA, 19 bp, Mus musculus
  siRNA target sequence for Plcg2 (NM_172285.1,3478-3496).
gacagcaacaaattcaaga

SEQ ID NO: 590846 - DNA, 19 bp, Mus musculus
  siRNA target sequence for Plcg2 (NM_172285.1,3492-3510).
caagacgacggttgtgaat

SEQ ID NO: 590847 - DNA, 19 bp, Mus musculus
  siRNA target sequence for Plcg2 (NM_172285.1,3497-3515).
cgacggttgtgaatgacaa

SEQ ID NO: 590848 - DNA, 19 bp, Mus musculus
  siRNA target sequence for Plcg2 (NM_172285.1,3552-3570).
ggtgacatttgagatctat

SEQ ID NO: 590849 - DNA, 19 bp, Mus musculus
  siRNA target sequence for Plcg2 (NM_172285.1,3666-3684).
catcaaatccgggtttaga

SEQ ID NO: 590850 - DNA, 19 bp, Mus musculus
  siRNA target sequence for Plcg2 (NM_172285.1,3669-3687).
caaatccgggtttagatca

SEQ ID NO: 590851 - DNA, 19 bp, Mus musculus
  siRNA target sequence for Plcg2 (NM_172285.1,3888-3906).
ggtgaaggagttcaatgtt

SEQ ID NO: 590852 - DNA, 19 bp, Mus musculus
  siRNA target sequence for B130016O10Rik (NM_177355.2,579-597).
gagctggaatccgttactt

SEQ ID NO: 590853 - DNA, 19 bp, Mus musculus
  siRNA target sequence for B130016O10Rik (NM_177355.2,591-609).
gttacttcgaccttcgaat

SEQ ID NO: 590854 - DNA, 19 bp, Mus musculus
  siRNA target sequence for B130016O10Rik (NM_177355.2,634-652).
caatgaactgtattttgct

SEQ ID NO: 590855 - DNA, 19 bp, Mus musculus
  siRNA target sequence for B130016O10Rik (NM_177355.2,682-700).
gggtctcgaagagatcaat

SEQ ID NO: 590856 - DNA, 19 bp, Mus musculus
  siRNA target sequence for B130016O10Rik (NM_177355.2,686-704).
ctcgaagagatcaatgcat

SEQ ID NO: 590857 - DNA, 19 bp, Mus musculus
  siRNA target sequence for B130016O10Rik (NM_177355.2,688-706).
cgaagagatcaatgcattt

SEQ ID NO: 590858 - DNA, 19 bp, Mus musculus
  siRNA target sequence for B130016O10Rik (NM_177355.2,716-734).
caccacaaagaggtagtat

SEQ ID NO: 590859 - DNA, 19 bp, Mus musculus
  siRNA target sequence for B130016O10Rik (NM_177355.2,839-857).
gcccaggaagtgagtctaa

SEQ ID NO: 590860 - DNA, 19 bp, Mus musculus
  siRNA target sequence for B130016O10Rik (NM_177355.2,972-990).
cagacccagagaaattgat

SEQ ID NO: 590861 - DNA, 19 bp, Mus musculus
  siRNA target sequence for B130016O10Rik (NM_177355.2,1030-1048).
gggctcattttttatatct

SEQ ID NO: 590862 - DNA, 19 bp, Mus musculus
  siRNA target sequence for B130016O10Rik (NM_177355.2,1055-1073).
gtgctgacacccaaagcaa

SEQ ID NO: 590863 - DNA, 19 bp, Mus musculus
  siRNA target sequence for B130016O10Rik (NM_177355.2,1094-1112).
gcaagtggactcagagaaa

SEQ ID NO: 590864 - DNA, 19 bp, Mus musculus
  siRNA target sequence for 1110015E22Rik (NM_024228.1,172-190).
cgagcagatctcttggaat

SEQ ID NO: 590865 - DNA, 19 bp, Mus musculus
  siRNA target sequence for 1110015E22Rik (NM_024228.1,249-267).
ccgccagtcaggcctaaat

SEQ ID NO: 590866 - DNA, 19 bp, Mus musculus
  siRNA target sequence for 1110015E22Rik (NM_024228.1,250-268).
cgccagtcaggcctaaata

SEQ ID NO: 590867 - DNA, 19 bp, Mus musculus
  siRNA target sequence for 1110015E22Rik (NM_024228.1,255-273).
gtcaggcctaaataaggat

SEQ ID NO: 590868 - DNA, 19 bp, Mus musculus
  siRNA target sequence for 1110015E22Rik (NM_024228.1,356-374).
ggtcagaccggcacatgat

SEQ ID NO: 590869 - DNA, 19 bp, Mus musculus
  siRNA target sequence for 1110015E22Rik (NM_024228.1,357-375).
gtcagaccggcacatgatt

SEQ ID NO: 590870 - DNA, 19 bp, Mus musculus
  siRNA target sequence for 1110015E22Rik (NM_024228.1,361-379).
gaccggcacatgattagtt

SEQ ID NO: 590871 - DNA, 19 bp, Mus musculus
  siRNA target sequence for 1110015E22Rik (NM_024228.1,384-402).
ggatgtattccagaaattt

SEQ ID NO: 590872 - DNA, 19 bp, Mus musculus
  siRNA target sequence for 1110015E22Rik (NM_024228.1,479-497).
gctttgaccggaatgagat

SEQ ID NO: 590873 - DNA, 19 bp, Mus musculus
  siRNA target sequence for 1110015E22Rik (NM_024228.1,480-498).
ctttgaccggaatgagatt

SEQ ID NO: 590874 - DNA, 19 bp, Mus musculus
  siRNA target sequence for 1110015E22Rik (NM_024228.1,484-502).
gaccggaatgagattacta

SEQ ID NO: 590875 - DNA, 19 bp, Mus musculus
  siRNA target sequence for 1110015E22Rik (NM_024228.1,486-504).
ccggaatgagattactatt

SEQ ID NO: 590876 - DNA, 19 bp, Mus musculus
  siRNA target sequence for 1110015E22Rik (NM_024228.1,487-505).
cggaatgagattactattt

SEQ ID NO: 590877 - DNA, 19 bp, Mus musculus
  siRNA target sequence for 1110015E22Rik (NM_024228.1,562-580).
cccatggccttcacgatat

SEQ ID NO: 590878 - DNA, 19 bp, Mus musculus
  siRNA target sequence for 1110015E22Rik (NM_024228.1,593-611).
ggatactgctgctctacta

SEQ ID NO: 590879 - DNA, 19 bp, Mus musculus
  siRNA target sequence for 1110015E22Rik (NM_024228.1,721-739).
ctgtcggctaccattacaa

SEQ ID NO: 590880 - DNA, 19 bp, Mus musculus
  siRNA target sequence for 1110015E22Rik (NM_024228.1,723-741).
gtcggctaccattacaaaa

SEQ ID NO: 590881 - DNA, 19 bp, Mus musculus
  siRNA target sequence for 1110015E22Rik (NM_024228.1,744-762).
gatcatcatgagaaaaagt

SEQ ID NO: 590882 - DNA, 19 bp, Mus musculus
  siRNA target sequence for 1110015E22Rik (NM_024228.1,785-803).
gaggggtgcaggtgctatt

SEQ ID NO: 590883 - DNA, 19 bp, Mus musculus
  siRNA target sequence for 1110015E22Rik (NM_024228.1,787-805).
ggggtgcaggtgctatttt

SEQ ID NO: 590884 - DNA, 19 bp, Mus musculus
  siRNA target sequence for 1110015E22Rik (NM_024228.1,798-816).
gctattttggtgccttaat

SEQ ID NO: 590885 - DNA, 19 bp, Mus musculus
  siRNA target sequence for 2310032D16Rik (NM_027096.1,496-514).
cctggagatatccttaata

SEQ ID NO: 590886 - DNA, 19 bp, Mus musculus
  siRNA target sequence for 2310032D16Rik (NM_027096.1,499-517).
ggagatatccttaataagt

SEQ ID NO: 590887 - DNA, 19 bp, Mus musculus
  siRNA target sequence for 2310032D16Rik (NM_027096.1,507-525).
ccttaataagtgacaatga

SEQ ID NO: 590888 - DNA, 19 bp, Mus musculus
  siRNA target sequence for 2310032D16Rik (NM_027096.1,601-619).
gacaatggaaccagataat

SEQ ID NO: 590889 - DNA, 19 bp, Mus musculus
  siRNA target sequence for 2310032D16Rik (NM_027096.1,744-762).
gcgctggaatccttactct

SEQ ID NO: 590890 - DNA, 19 bp, Mus musculus
  siRNA target sequence for 2310032D16Rik (NM_027096.1,797-815).
ggcaaagtcagagttgatt

SEQ ID NO: 590891 - DNA, 19 bp, Mus musculus
  siRNA target sequence for 2310032D16Rik (NM_027096.1,826-844).
caagccattacctggatat

SEQ ID NO: 590892 - DNA, 19 bp, Mus musculus
  siRNA target sequence for 2310032D16Rik (NM_027096.1,830-848).
ccattacctggatatagtt

SEQ ID NO: 590893 - DNA, 19 bp, Mus musculus
  siRNA target sequence for 2310032D16Rik (NM_027096.1,836-854).
cctggatatagttgttcta

SEQ ID NO: 590894 - DNA, 19 bp, Mus musculus
  siRNA target sequence for 2310032D16Rik (NM_027096.1,837-855).
ctggatatagttgttctat

SEQ ID NO: 590895 - DNA, 19 bp, Mus musculus
  siRNA target sequence for 2310032D16Rik (NM_027096.1,933-951).
cgactgccaagctagctaa

SEQ ID NO: 590896 - DNA, 19 bp, Mus musculus
  siRNA target sequence for 2310032D16Rik (NM_027096.1,939-957).
ccaagctagctaaagtaca

SEQ ID NO: 590897 - DNA, 19 bp, Mus musculus
  siRNA target sequence for 2310032D16Rik (NM_027096.1,970-988).
cgcttctttaagaaatgct

SEQ ID NO: 590898 - DNA, 19 bp, Mus musculus
  siRNA target sequence for 2310032D16Rik (NM_027096.1,1000-1018).
cgcagcatttgtagaattt

SEQ ID NO: 590899 - DNA, 19 bp, Mus musculus
  siRNA target sequence for 2310032D16Rik (NM_027096.1,1107-1125).
cagttgaattgtttgaaat

SEQ ID NO: 590900 - DNA, 19 bp, Mus musculus
  siRNA target sequence for 2310032D16Rik (NM_027096.1,1126-1144).
cccagtaaaagaattaaca

SEQ ID NO: 590901 - DNA, 19 bp, Mus musculus
  siRNA target sequence for 2310032D16Rik (NM_027096.1,1127-1145).
ccagtaaaagaattaacat

SEQ ID NO: 590902 - DNA, 19 bp, Mus musculus
  siRNA target sequence for 2310032D16Rik (NM_027096.1,1178-1196).
gtgactgcattaaaaacca

SEQ ID NO: 590903 - DNA, 19 bp, Mus musculus
  siRNA target sequence for 2310032D16Rik (NM_027096.1,1201-1219).
ccggaaacaatctttgtat

SEQ ID NO: 590904 - DNA, 19 bp, Mus musculus
  siRNA target sequence for 2310032D16Rik (NM_027096.1,1203-1221).
ggaaacaatctttgtatga

SEQ ID NO: 590905 - DNA, 19 bp, Mus musculus
  siRNA target sequence for 2310032D16Rik (NM_027096.1,1262-1280).
cttaagatggttttagaat

SEQ ID NO: 590906 - DNA, 19 bp, Mus musculus
  siRNA target sequence for 2310032D16Rik (NM_027096.1,1286-1304).
ccagaaaatgtaggattta

SEQ ID NO: 590907 - DNA, 19 bp, Mus musculus
  siRNA target sequence for 2310032D16Rik (NM_027096.1,1298-1316).
ggatttaatatagaaataa

SEQ ID NO: 590908 - DNA, 19 bp, Mus musculus
  siRNA target sequence for 2310032D16Rik (NM_027096.1,1348-1366).
ggatggcaacttatcaaca

SEQ ID NO: 590909 - DNA, 19 bp, Mus musculus
  siRNA target sequence for 2310032D16Rik (NM_027096.1,1352-1370).
ggcaacttatcaacatatt

SEQ ID NO: 590910 - DNA, 19 bp, Mus musculus
  siRNA target sequence for 2310032D16Rik (NM_027096.1,1378-1396).
gaatgtgtttttggatata

SEQ ID NO: 590911 - DNA, 19 bp, Mus musculus
  siRNA target sequence for 2310032D16Rik (NM_027096.1,1562-1580).
cggacaacacccattgcaa

SEQ ID NO: 590912 - DNA, 19 bp, Mus musculus
  siRNA target sequence for 2310032D16Rik (NM_027096.1,1563-1581).
ggacaacacccattgcaat

SEQ ID NO: 590913 - DNA, 19 bp, Mus musculus
  siRNA target sequence for 2310032D16Rik (NM_027096.1,1611-1629).
ggataaatgcccatactga

SEQ ID NO: 590914 - DNA, 19 bp, Mus musculus
  siRNA target sequence for 2310032D16Rik (NM_027096.1,1670-1688).
gctaagggattggtcatat

SEQ ID NO: 590915 - DNA, 19 bp, Mus musculus
  siRNA target sequence for 2310032D16Rik (NM_027096.1,1671-1689).
ctaagggattggtcatatt

SEQ ID NO: 590916 - DNA, 19 bp, Mus musculus
  siRNA target sequence for 2310032D16Rik (NM_027096.1,1745-1763).
ggagtaaatggtctaatat

SEQ ID NO: 590917 - DNA, 19 bp, Mus musculus
  siRNA target sequence for 2310032D16Rik (NM_027096.1,1746-1764).
gagtaaatggtctaatata

SEQ ID NO: 590918 - DNA, 19 bp, Mus musculus
  siRNA target sequence for 2310032D16Rik (NM_027096.1,1755-1773).
gtctaatatatgataggat

SEQ ID NO: 590919 - DNA, 19 bp, Mus musculus
  siRNA target sequence for 2310032D16Rik (NM_027096.1,1879-1897).
ccacttcatcccttcttct

SEQ ID NO: 590920 - DNA, 19 bp, Mus musculus
  siRNA target sequence for 2310032D16Rik (NM_027096.1,1924-1942).
ggatgccaacggcattgat

SEQ ID NO: 590921 - DNA, 19 bp, Mus musculus
  siRNA target sequence for 2310032D16Rik (NM_027096.1,1925-1943).
gatgccaacggcattgata

SEQ ID NO: 590922 - DNA, 19 bp, Mus musculus
  siRNA target sequence for 2310032D16Rik (NM_027096.1,1929-1947).
ccaacggcattgatagtgt

SEQ ID NO: 590923 - DNA, 19 bp, Mus musculus
  siRNA target sequence for 2610020H15Rik (NM_025638.1,140-158).
ctcgttcttgttgcttaaa

SEQ ID NO: 590924 - DNA, 19 bp, Mus musculus
  siRNA target sequence for 2610020H15Rik (NM_025638.1,142-160).
cgttcttgttgcttaaata

SEQ ID NO: 590925 - DNA, 19 bp, Mus musculus
  siRNA target sequence for 2610020H15Rik (NM_025638.1,263-281).
ccagcacgcagttaccatt

SEQ ID NO: 590926 - DNA, 19 bp, Mus musculus
  siRNA target sequence for 2610020H15Rik (NM_025638.1,277-295).
ccattgggacagacatgtt

SEQ ID NO: 590927 - DNA, 19 bp, Mus musculus
  siRNA target sequence for 2610020H15Rik (NM_025638.1,283-301).
ggacagacatgttagaact

SEQ ID NO: 590928 - DNA, 19 bp, Mus musculus
  siRNA target sequence for 2610020H15Rik (NM_025638.1,297-315).
gaactggactgccatatca

SEQ ID NO: 590929 - DNA, 19 bp, Mus musculus
  siRNA target sequence for 2610020H15Rik (NM_025638.1,361-379).
ggtcaactggggtcaatgt

SEQ ID NO: 590930 - DNA, 19 bp, Mus musculus
  siRNA target sequence for 2610020H15Rik (NM_025638.1,383-401).
cgtctctgatctcaaatat

SEQ ID NO: 590931 - DNA, 19 bp, Mus musculus
  siRNA target sequence for 2610020H15Rik (NM_025638.1,388-406).
ctgatctcaaatattgtga

SEQ ID NO: 590932 - DNA, 19 bp, Mus musculus
  siRNA target sequence for 2610020H15Rik (NM_025638.1,513-531).
cctgagacccccattaaca

SEQ ID NO: 590933 - DNA, 19 bp, Mus musculus
  siRNA target sequence for 2610020H15Rik (NM_025638.1,576-594).
gaactggtgaagcagtata

SEQ ID NO: 590934 - DNA, 19 bp, Mus musculus
  siRNA target sequence for 2610020H15Rik (NM_025638.1,587-605).
gcagtataagcgagaacat

SEQ ID NO: 590935 - DNA, 19 bp, Mus musculus
  siRNA target sequence for 2610020H15Rik (NM_025638.1,620-638).
caatgccaactctgagatt

SEQ ID NO: 590936 - DNA, 19 bp, Mus musculus
  siRNA target sequence for 2610020H15Rik (NM_025638.1,633-651).
gagattgtagacaagtgtt

SEQ ID NO: 590937 - DNA, 19 bp, Mus musculus
  siRNA target sequence for 2610020H15Rik (NM_025638.1,664-682).
cagacattcctatactctt

SEQ ID NO: 590938 - DNA, 19 bp, Mus musculus
  siRNA target sequence for 2610020H15Rik (NM_025638.1,772-790).
caatgccctccatcatact

SEQ ID NO: 590939 - DNA, 19 bp, Mus musculus
  siRNA target sequence for 2610020H15Rik (NM_025638.1,801-819).
gaaccacacactatatcca

SEQ ID NO: 590940 - DNA, 19 bp, Mus musculus
  siRNA target sequence for 2610020H15Rik (NM_025638.1,811-829).
ctatatccaaaggtcataa

SEQ ID NO: 590941 - DNA, 19 bp, Mus musculus
  siRNA target sequence for 2610020H15Rik (NM_025638.1,843-861).
ctttctgataccttattga

SEQ ID NO: 590942 - DNA, 19 bp, Mus musculus
  siRNA target sequence for 2610020H15Rik (NM_025638.1,860-878).
gatgcggaaagctctattt

SEQ ID NO: 590943 - DNA, 19 bp, Mus musculus
  siRNA target sequence for 2610020H15Rik (NM_025638.1,927-945).
gaggaatacgagtacaaaa

SEQ ID NO: 590944 - DNA, 19 bp, Mus musculus
  siRNA target sequence for 2610020H15Rik (NM_025638.1,929-947).
ggaatacgagtacaaaaga

SEQ ID NO: 590945 - DNA, 19 bp, Mus musculus
  siRNA target sequence for 2610020H15Rik (NM_025638.1,986-1004).
cccaaccaagcttaaggat

SEQ ID NO: 590946 - DNA, 19 bp, Mus musculus
  siRNA target sequence for 2610020H15Rik (NM_025638.1,987-1005).
ccaaccaagcttaaggatt

SEQ ID NO: 590947 - DNA, 19 bp, Mus musculus
  siRNA target sequence for 9130017L10Rik (NM_023608.2,353-371).
cctaaacagaagatgcaaa

SEQ ID NO: 590948 - DNA, 19 bp, Mus musculus
  siRNA target sequence for 9130017L10Rik (NM_023608.2,372-390).
ccagcaagtgcgactgtat

SEQ ID NO: 590949 - DNA, 19 bp, Mus musculus
  siRNA target sequence for 9130017L10Rik (NM_023608.2,426-444).
ccctgggatggctgtacat

SEQ ID NO: 590950 - DNA, 19 bp, Mus musculus
  siRNA target sequence for 9130017L10Rik (NM_023608.2,467-485).
ctgcacaacttcaatgaat

SEQ ID NO: 590951 - DNA, 19 bp, Mus musculus
  siRNA target sequence for 9130017L10Rik (NM_023608.2,646-664).
gctcctcattgtacttcta

SEQ ID NO: 590952 - DNA, 19 bp, Mus musculus
  siRNA target sequence for 9130017L10Rik (NM_023608.2,679-697).
ggtgggcctggatatccaa

SEQ ID NO: 590953 - DNA, 19 bp, Mus musculus
  siRNA target sequence for 9130017L10Rik (NM_023608.2,701-719).
cggcaggagtggcatagtt

SEQ ID NO: 590954 - DNA, 19 bp, Mus musculus
  siRNA target sequence for 9130017L10Rik (NM_023608.2,703-721).
gcaggagtggcatagttta

SEQ ID NO: 590955 - DNA, 19 bp, Mus musculus
  siRNA target sequence for 9130017L10Rik (NM_023608.2,706-724).
ggagtggcatagtttacga

SEQ ID NO: 590956 - DNA, 19 bp, Mus musculus
  siRNA target sequence for 9130017L10Rik (NM_023608.2,839-857).
gttctgctactgttgctat

SEQ ID NO: 590957 - DNA, 19 bp, Mus musculus
  siRNA target sequence for 9130017L10Rik (NM_023608.2,909-927).
ccccctgcatcatgaaact

SEQ ID NO: 590958 - DNA, 19 bp, Mus musculus
  siRNA target sequence for 9130017L10Rik (NM_023608.2,911-929).
ccctgcatcatgaaactca

SEQ ID NO: 590959 - DNA, 19 bp, Mus musculus
  siRNA target sequence for 9130017L10Rik (NM_023608.2,976-994).
catgctggcccctgagaat

SEQ ID NO: 590960 - DNA, 19 bp, Mus musculus
  siRNA target sequence for 9130017L10Rik (NM_023608.2,1026-1044).
gtggagcggctgtgtttga

SEQ ID NO: 590961 - DNA, 19 bp, Mus musculus
  siRNA target sequence for 9130017L10Rik (NM_023608.2,1067-1085).
gacggagtcccctttctca

SEQ ID NO: 590962 - DNA, 19 bp, Mus musculus
  siRNA target sequence for 9130017L10Rik (NM_023608.2,1129-1147).
gtttccagagcgaatctca

SEQ ID NO: 590963 - DNA, 19 bp, Mus musculus
  siRNA target sequence for 9130017L10Rik (NM_023608.2,1319-1337).
ctcaacctttccatcatgt

SEQ ID NO: 590964 - DNA, 19 bp, Mus musculus
  siRNA target sequence for 9130017L10Rik (NM_023608.2,1356-1374).
caagaaaccacacatacta

SEQ ID NO: 590965 - DNA, 19 bp, Mus musculus
  siRNA target sequence for 9130017L10Rik (NM_023608.2,1363-1381).
ccacacatactatgatact

SEQ ID NO: 590966 - DNA, 19 bp, Mus musculus
  siRNA target sequence for 9130017L10Rik (NM_023608.2,1416-1434).
caaacgtgtcccaagctat

SEQ ID NO: 590967 - DNA, 19 bp, Mus musculus
  siRNA target sequence for 9130017L10Rik (NM_023608.2,1486-1504).
cagaatgcgccagatatat

SEQ ID NO: 590968 - DNA, 19 bp, Mus musculus
  siRNA target sequence for 9130017L10Rik (NM_023608.2,1562-1580).
gacctgccagcattggata

SEQ ID NO: 590969 - DNA, 19 bp, Mus musculus
  siRNA target sequence for 9130017L10Rik (NM_023608.2,1565-1583).
ctgccagcattggatatca

SEQ ID NO: 590970 - DNA, 19 bp, Mus musculus
  siRNA target sequence for 9130017L10Rik (NM_023608.2,1585-1603).
ggccctgcaccaggataat

SEQ ID NO: 590971 - DNA, 19 bp, Mus musculus
  siRNA target sequence for 9130017L10Rik (NM_023608.2,1586-1604).
gccctgcaccaggataata

SEQ ID NO: 590972 - DNA, 19 bp, Mus musculus
  siRNA target sequence for 9130017L10Rik (NM_023608.2,1587-1605).
ccctgcaccaggataatat

SEQ ID NO: 590973 - DNA, 19 bp, Mus musculus
  siRNA target sequence for 9130017L10Rik (NM_023608.2,1589-1607).
ctgcaccaggataatatct

SEQ ID NO: 590974 - DNA, 19 bp, Mus musculus
  siRNA target sequence for 9130017L10Rik (NM_023608.2,1591-1609).
gcaccaggataatatctca

SEQ ID NO: 590975 - DNA, 19 bp, Mus musculus
  siRNA target sequence for 9130017L10Rik (NM_023608.2,1733-1751).
ccccctcaaaaatacttaa

SEQ ID NO: 590976 - DNA, 19 bp, Mus musculus
  siRNA target sequence for 9130017L10Rik (NM_023608.2,1734-1752).
cccctcaaaaatacttaat

SEQ ID NO: 590977 - DNA, 19 bp, Mus musculus
  siRNA target sequence for 9130017L10Rik (NM_023608.2,1814-1832).
gggggatgtgctaagagaa

SEQ ID NO: 590978 - DNA, 19 bp, Mus musculus
  siRNA target sequence for Smpd1 (NM_011421.1,204-222).
gagtgggactcctttggat

SEQ ID NO: 590979 - DNA, 19 bp, Mus musculus
  siRNA target sequence for Smpd1 (NM_011421.1,385-403).
ctgcaaagtcttattcact

SEQ ID NO: 590980 - DNA, 19 bp, Mus musculus
  siRNA target sequence for Smpd1 (NM_011421.1,481-499).
gaacatagcaccactagat

SEQ ID NO: 590981 - DNA, 19 bp, Mus musculus
  siRNA target sequence for Smpd1 (NM_011421.1,544-562).
ggtgtggacacgttcagtt

SEQ ID NO: 590982 - DNA, 19 bp, Mus musculus
  siRNA target sequence for Smpd1 (NM_011421.1,611-629).
cactgggacatcttttcga

SEQ ID NO: 590983 - DNA, 19 bp, Mus musculus
  siRNA target sequence for Smpd1 (NM_011421.1,869-887).
cccttgcgaacgctagaaa

SEQ ID NO: 590984 - DNA, 19 bp, Mus musculus
  siRNA target sequence for Smpd1 (NM_011421.1,879-897).
cgctagaaagcctgttgaa

SEQ ID NO: 590985 - DNA, 19 bp, Mus musculus
  siRNA target sequence for Smpd1 (NM_011421.1,1111-1129).
gggaaaccaatcttcacaa

SEQ ID NO: 590986 - DNA, 19 bp, Mus musculus
  siRNA target sequence for Smpd1 (NM_011421.1,1112-1130).
ggaaaccaatcttcacaat

SEQ ID NO: 590987 - DNA, 19 bp, Mus musculus
  siRNA target sequence for Smpd1 (NM_011421.1,1237-1255).
ccgcctcatctctctcaat

SEQ ID NO: 590988 - DNA, 19 bp, Mus musculus
  siRNA target sequence for Smpd1 (NM_011421.1,1238-1256).
cgcctcatctctctcaata

SEQ ID NO: 590989 - DNA, 19 bp, Mus musculus
  siRNA target sequence for Smpd1 (NM_011421.1,1241-1259).
ctcatctctctcaatatga

SEQ ID NO: 590990 - DNA, 19 bp, Mus musculus
  siRNA target sequence for Smpd1 (NM_011421.1,1243-1261).
catctctctcaatatgaat

SEQ ID NO: 590991 - DNA, 19 bp, Mus musculus
  siRNA target sequence for Smpd1 (NM_011421.1,1250-1268).
ctcaatatgaatttttgtt

SEQ ID NO: 590992 - DNA, 19 bp, Mus musculus
  siRNA target sequence for Smpd1 (NM_011421.1,1361-1379).
ggagacaaagtgcatataa

SEQ ID NO: 590993 - DNA, 19 bp, Mus musculus
  siRNA target sequence for Smpd1 (NM_011421.1,1483-1501).
cactcacgtggatgagttt

SEQ ID NO: 590994 - DNA, 19 bp, Mus musculus
  siRNA target sequence for Smpd1 (NM_011421.1,1485-1503).
ctcacgtggatgagtttga

SEQ ID NO: 590995 - DNA, 19 bp, Mus musculus
  siRNA target sequence for Smpd1 (NM_011421.1,1563-1581).
gtgctacaacctttatcaa

SEQ ID NO: 590996 - DNA, 19 bp, Mus musculus
  siRNA target sequence for Smpd1 (NM_011421.1,1592-1610).
ggctaccgagtttaccaaa

SEQ ID NO: 590997 - DNA, 19 bp, Mus musculus
  siRNA target sequence for Smpd1 (NM_011421.1,1593-1611).
gctaccgagtttaccaaat

SEQ ID NO: 590998 - DNA, 19 bp, Mus musculus
  siRNA target sequence for Smpd1 (NM_011421.1,1597-1615).
ccgagtttaccaaatagat

SEQ ID NO: 590999 - DNA, 19 bp, Mus musculus
  siRNA target sequence for Smpd1 (NM_011421.1,1652-1670).
cacgagacctacatcttga

SEQ ID NO: 591000 - DNA, 19 bp, Mus musculus
  siRNA target sequence for Smpd1 (NM_011421.1,1953-1971).
ggagcctcccagatgctaa

SEQ ID NO: 591001 - DNA, 19 bp, Mus musculus
  siRNA target sequence for Smpd3 (NM_021491.2,481-499).
cacgaccccctttcctaat

SEQ ID NO: 591002 - DNA, 19 bp, Mus musculus
  siRNA target sequence for Smpd3 (NM_021491.2,536-554).
ctcatcttcccatgttact

SEQ ID NO: 591003 - DNA, 19 bp, Mus musculus
  siRNA target sequence for Smpd3 (NM_021491.2,566-584).
cggctgttggcctctttca

SEQ ID NO: 591004 - DNA, 19 bp, Mus musculus
  siRNA target sequence for Smpd3 (NM_021491.2,756-774).
cctactcccggctagaaga

SEQ ID NO: 591005 - DNA, 19 bp, Mus musculus
  siRNA target sequence for Smpd3 (NM_021491.2,762-780).
cccggctagaagacaagaa

SEQ ID NO: 591006 - DNA, 19 bp, Mus musculus
  siRNA target sequence for Smpd3 (NM_021491.2,879-897).
cactcgcgaggctcaataa

SEQ ID NO: 591007 - DNA, 19 bp, Mus musculus
  siRNA target sequence for Smpd3 (NM_021491.2,963-981).
ctcagatcaagatctacat

SEQ ID NO: 591008 - DNA, 19 bp, Mus musculus
  siRNA target sequence for Smpd3 (NM_021491.2,1189-1207).
ctgcattgtgcgaattggt

SEQ ID NO: 591009 - DNA, 19 bp, Mus musculus
  siRNA target sequence for Smpd3 (NM_021491.2,1474-1492).
gaggcgccaccctgatgaa

SEQ ID NO: 591010 - DNA, 19 bp, Mus musculus
  siRNA target sequence for Smpd3 (NM_021491.2,1568-1586).
cgtgcggctgctaagttga

SEQ ID NO: 591011 - DNA, 19 bp, Mus musculus
  siRNA target sequence for Smpd3 (NM_021491.2,1569-1587).
gtgcggctgctaagttgaa

SEQ ID NO: 591012 - DNA, 19 bp, Mus musculus
  siRNA target sequence for Smpd3 (NM_021491.2,1609-1627).
cgagtacatcctgtatgat

SEQ ID NO: 591013 - DNA, 19 bp, Mus musculus
  siRNA target sequence for Smpd3 (NM_021491.2,1653-1671).
gctgcaatttcaaatgtct

SEQ ID NO: 591014 - DNA, 19 bp, Mus musculus
  siRNA target sequence for Smpd3 (NM_021491.2,1910-1928).
ctggctgatttccgaaaat

SEQ ID NO: 591015 - DNA, 19 bp, Mus musculus
  siRNA target sequence for Smpd3 (NM_021491.2,1912-1930).
ggctgatttccgaaaatct

SEQ ID NO: 591016 - DNA, 19 bp, Mus musculus
  siRNA target sequence for Smpd3 (NM_021491.2,1913-1931).
gctgatttccgaaaatcta

SEQ ID NO: 591017 - DNA, 19 bp, Mus musculus
  siRNA target sequence for Smpd3 (NM_021491.2,1986-2004).
gtggagatttgaactttga

SEQ ID NO: 591018 - DNA, 19 bp, Mus musculus
  siRNA target sequence for Smpd3 (NM_021491.2,2044-2062).
gctctttactcgctacaaa

SEQ ID NO: 591019 - DNA, 19 bp, Mus musculus
  siRNA target sequence for Smpd3 (NM_021491.2,2119-2137).
ggacacaaacggtctctat

SEQ ID NO: 591020 - DNA, 19 bp, Mus musculus
  siRNA target sequence for Smpd3 (NM_021491.2,2122-2140).
cacaaacggtctctatgat

SEQ ID NO: 591021 - DNA, 19 bp, Mus musculus
  siRNA target sequence for Smpd3 (NM_021491.2,2124-2142).
caaacggtctctatgatga

SEQ ID NO: 591022 - DNA, 19 bp, Mus musculus
  siRNA target sequence for Smpd3 (NM_021491.2,2338-2356).
ggtagaagaattcagtttt

SEQ ID NO: 591023 - DNA, 19 bp, Mus musculus
  siRNA target sequence for 1500019J17Rik (NM_026398.2,483-501).
ctgcgatgccggaaggatt

SEQ ID NO: 591024 - DNA, 19 bp, Mus musculus
  siRNA target sequence for 1500019J17Rik (NM_026398.2,486-504).
cgatgccggaaggatttct

SEQ ID NO: 591025 - DNA, 19 bp, Mus musculus
  siRNA target sequence for 1500019J17Rik (NM_026398.2,487-505).
gatgccggaaggatttcta

SEQ ID NO: 591026 - DNA, 19 bp, Mus musculus
  siRNA target sequence for 1500019J17Rik (NM_026398.2,525-543).
cttcctttcatcacctatt

SEQ ID NO: 591027 - DNA, 19 bp, Mus musculus
  siRNA target sequence for 1500019J17Rik (NM_026398.2,529-547).
ctttcatcacctatttgga

SEQ ID NO: 591028 - DNA, 19 bp, Mus musculus
  siRNA target sequence for 1500019J17Rik (NM_026398.2,561-579).
cgttacccgtgcttcttca

SEQ ID NO: 591029 - DNA, 19 bp, Mus musculus
  siRNA target sequence for 1500019J17Rik (NM_026398.2,569-587).
gtgcttcttcaacacatta

SEQ ID NO: 591030 - DNA, 19 bp, Mus musculus
  siRNA target sequence for 1500019J17Rik (NM_026398.2,571-589).
gcttcttcaacacattaca

SEQ ID NO: 591031 - DNA, 19 bp, Mus musculus
  siRNA target sequence for 1500019J17Rik (NM_026398.2,651-669).
ctgatcttgttgcagaatt

SEQ ID NO: 591032 - DNA, 19 bp, Mus musculus
  siRNA target sequence for Rnasep2 (NM_019428.1,6-24).
ggcgttcgcagatttggat

SEQ ID NO: 591033 - DNA, 19 bp, Mus musculus
  siRNA target sequence for Rnasep2 (NM_019428.1,90-108).
ctcagttgttgccatcaat

SEQ ID NO: 591034 - DNA, 19 bp, Mus musculus
  siRNA target sequence for Rnasep2 (NM_019428.1,105-123).
caatcacattgttgacttt

SEQ ID NO: 591035 - DNA, 19 bp, Mus musculus
  siRNA target sequence for Rnasep2 (NM_019428.1,150-168).
gccaatagcagtttctgaa

SEQ ID NO: 591036 - DNA, 19 bp, Mus musculus
  siRNA target sequence for Rnasep2 (NM_019428.1,186-204).
catcgtacagggaaaatca

SEQ ID NO: 591037 - DNA, 19 bp, Mus musculus
  siRNA target sequence for Rnasep2 (NM_019428.1,189-207).
cgtacagggaaaatcaaga

SEQ ID NO: 591038 - DNA, 19 bp, Mus musculus
  siRNA target sequence for Rnasep2 (NM_019428.1,231-249).
gacaattatagttacagat

SEQ ID NO: 591039 - DNA, 19 bp, Mus musculus
  siRNA target sequence for Rnasep2 (NM_019428.1,284-302).
caagggtccggctgtatga

SEQ ID NO: 591040 - DNA, 19 bp, Mus musculus
  siRNA target sequence for Rnasep2 (NM_019428.1,288-306).
ggtccggctgtatgatatt

SEQ ID NO: 591041 - DNA, 19 bp, Mus musculus
  siRNA target sequence for Rnasep2 (NM_019428.1,339-357).
ccatgttgcttgtacacat

SEQ ID NO: 591042 - DNA, 19 bp, Mus musculus
  siRNA target sequence for Rnasep2 (NM_019428.1,364-382).
gtggatttagtctgtataa

SEQ ID NO: 591043 - DNA, 19 bp, Mus musculus
  siRNA target sequence for Rnasep2 (NM_019428.1,366-384).
ggatttagtctgtataact

SEQ ID NO: 591044 - DNA, 19 bp, Mus musculus
  siRNA target sequence for Rnasep2 (NM_019428.1,411-429).
caaaagaccccctgttaat

SEQ ID NO: 591045 - DNA, 19 bp, Mus musculus
  siRNA target sequence for Rnasep2 (NM_019428.1,450-468).
gggctttgaacttgtctat

SEQ ID NO: 591046 - DNA, 19 bp, Mus musculus
  siRNA target sequence for Rnasep2 (NM_019428.1,465-483).
ctatggtcctgctatcaga

SEQ ID NO: 591047 - DNA, 19 bp, Mus musculus
  siRNA target sequence for Rnasep2 (NM_019428.1,512-530).
ccaatgccctcaatttgat

SEQ ID NO: 591048 - DNA, 19 bp, Mus musculus
  siRNA target sequence for Rnasep2 (NM_019428.1,539-557).
gcaaaggaaagaatgtaat

SEQ ID NO: 591049 - DNA, 19 bp, Mus musculus
  siRNA target sequence for Rnasep2 (NM_019428.1,585-603).
ggaaataagaggaccatat

SEQ ID NO: 591050 - DNA, 19 bp, Mus musculus
  siRNA target sequence for Rnasep2 (NM_019428.1,599-617).
catatgacgtggcaaactt

SEQ ID NO: 591051 - DNA, 19 bp, Mus musculus
  siRNA target sequence for Rnasep2 (NM_019428.1,654-672).
ggctgccgtgtccacaaat

SEQ ID NO: 591052 - DNA, 19 bp, Mus musculus
  siRNA target sequence for Rnasep2 (NM_019428.1,655-673).
gctgccgtgtccacaaatt

SEQ ID NO: 591053 - DNA, 19 bp, Mus musculus
  siRNA target sequence for Rnasep2 (NM_019428.1,658-676).
gccgtgtccacaaattgca

SEQ ID NO: 591054 - DNA, 19 bp, Mus musculus
  siRNA target sequence for Rnasep2 (NM_019428.1,668-686).
caaattgcagagctgtatt

SEQ ID NO: 591055 - DNA, 19 bp, Mus musculus
  siRNA target sequence for Rnasep2 (NM_019428.1,775-793).
ccagtgtgcaagaaagcta

SEQ ID NO: 591056 - DNA, 19 bp, Mus musculus
  siRNA target sequence for Rnasep2 (NM_019428.1,776-794).
cagtgtgcaagaaagctaa

SEQ ID NO: 591057 - DNA, 19 bp, Mus musculus
  siRNA target sequence for Apex1 (NM_009687.1,69-87).
gccaaagcggggaaagaaa

SEQ ID NO: 591058 - DNA, 19 bp, Mus musculus
  siRNA target sequence for Apex1 (NM_009687.1,201-219).
ggaccctccagatcagaaa

SEQ ID NO: 591059 - DNA, 19 bp, Mus musculus
  siRNA target sequence for Apex1 (NM_009687.1,241-259).
gccacactcaagatatgct

SEQ ID NO: 591060 - DNA, 19 bp, Mus musculus
  siRNA target sequence for Apex1 (NM_009687.1,319-337).
gaagaagcaccagatatct

SEQ ID NO: 591061 - DNA, 19 bp, Mus musculus
  siRNA target sequence for Apex1 (NM_009687.1,322-340).
gaagcaccagatatcttgt

SEQ ID NO: 591062 - DNA, 19 bp, Mus musculus
  siRNA target sequence for Apex1 (NM_009687.1,353-371).
ccaagtgctcggagaacaa

SEQ ID NO: 591063 - DNA, 19 bp, Mus musculus
  siRNA target sequence for Apex1 (NM_009687.1,354-372).
caagtgctcggagaacaaa

SEQ ID NO: 591064 - DNA, 19 bp, Mus musculus
  siRNA target sequence for Apex1 (NM_009687.1,398-416).
ctggactcacccatcagta

SEQ ID NO: 591065 - DNA, 19 bp, Mus musculus
  siRNA target sequence for Apex1 (NM_009687.1,420-438).
gtcagctccgtcagacaaa

SEQ ID NO: 591066 - DNA, 19 bp, Mus musculus
  siRNA target sequence for Apex1 (NM_009687.1,428-446).
cgtcagacaaagaaggata

SEQ ID NO: 591067 - DNA, 19 bp, Mus musculus
  siRNA target sequence for Apex1 (NM_009687.1,468-486).
ccgccagtgcccgctaaaa

SEQ ID NO: 591068 - DNA, 19 bp, Mus musculus
  siRNA target sequence for Apex1 (NM_009687.1,470-488).
gccagtgcccgctaaaagt

SEQ ID NO: 591069 - DNA, 19 bp, Mus musculus
  siRNA target sequence for Apex1 (NM_009687.1,472-490).
cagtgcccgctaaaagtct

SEQ ID NO: 591070 - DNA, 19 bp, Mus musculus
  siRNA target sequence for Apex1 (NM_009687.1,476-494).
gcccgctaaaagtctctta

SEQ ID NO: 591071 - DNA, 19 bp, Mus musculus
  siRNA target sequence for Apex1 (NM_009687.1,477-495).
cccgctaaaagtctcttat

SEQ ID NO: 591072 - DNA, 19 bp, Mus musculus
  siRNA target sequence for Apex1 (NM_009687.1,561-579).
cctggtaacagcctatgtt

SEQ ID NO: 591073 - DNA, 19 bp, Mus musculus
  siRNA target sequence for Apex1 (NM_009687.1,596-614).
gtctggtaagactggaata

SEQ ID NO: 591074 - DNA, 19 bp, Mus musculus
  siRNA target sequence for Apex1 (NM_009687.1,681-699).
gctatgtggggatctcaat

SEQ ID NO: 591075 - DNA, 19 bp, Mus musculus
  siRNA target sequence for Apex1 (NM_009687.1,764-782).
cccaggagcgccaaggttt

SEQ ID NO: 591076 - DNA, 19 bp, Mus musculus
  siRNA target sequence for Apex1 (NM_009687.1,842-860).
ctgcttacgcttacacttt

SEQ ID NO: 591077 - DNA, 19 bp, Mus musculus
  siRNA target sequence for Apex1 (NM_009687.1,895-913).
gttggttggcgccttgatt

SEQ ID NO: 591078 - DNA, 19 bp, Mus musculus
  siRNA target sequence for Apex1 (NM_009687.1,898-916).
ggttggcgccttgattact

SEQ ID NO: 591079 - DNA, 19 bp, Mus musculus
  siRNA target sequence for Apex1 (NM_009687.1,902-920).
ggcgccttgattacttttt

SEQ ID NO: 591080 - DNA, 19 bp, Mus musculus
  siRNA target sequence for Apex1 (NM_009687.1,905-923).
gccttgattactttttgct

SEQ ID NO: 591081 - DNA, 19 bp, Mus musculus
  siRNA target sequence for Apex1 (NM_009687.1,906-924).
ccttgattactttttgctt

SEQ ID NO: 591082 - DNA, 19 bp, Mus musculus
  siRNA target sequence for Dnase2a (NM_010062.2,135-153).
ggcagcctgtggattggtt

SEQ ID NO: 591083 - DNA, 19 bp, Mus musculus
  siRNA target sequence for Dnase2a (NM_010062.2,197-215).
ccaaagggactgacgtata

SEQ ID NO: 591084 - DNA, 19 bp, Mus musculus
  siRNA target sequence for Dnase2a (NM_010062.2,198-216).
caaagggactgacgtataa

SEQ ID NO: 591085 - DNA, 19 bp, Mus musculus
  siRNA target sequence for Dnase2a (NM_010062.2,203-221).
ggactgacgtataaataca

SEQ ID NO: 591086 - DNA, 19 bp, Mus musculus
  siRNA target sequence for Dnase2a (NM_010062.2,248-266).
gacggtgtagggtacatca

SEQ ID NO: 591087 - DNA, 19 bp, Mus musculus
  siRNA target sequence for Dnase2a (NM_010062.2,251-269).
ggtgtagggtacatcaaca

SEQ ID NO: 591088 - DNA, 19 bp, Mus musculus
  siRNA target sequence for Dnase2a (NM_010062.2,291-309).
gcagcttgcagccattgta

SEQ ID NO: 591089 - DNA, 19 bp, Mus musculus
  siRNA target sequence for Dnase2a (NM_010062.2,324-342).
gccagctggcctttctact

SEQ ID NO: 591090 - DNA, 19 bp, Mus musculus
  siRNA target sequence for Dnase2a (NM_010062.2,350-368).
gaccaacctcctaaatcca

SEQ ID NO: 591091 - DNA, 19 bp, Mus musculus
  siRNA target sequence for Dnase2a (NM_010062.2,387-405).
ccggccatgggcatacgaa

SEQ ID NO: 591092 - DNA, 19 bp, Mus musculus
  siRNA target sequence for Dnase2a (NM_010062.2,501-519).
ctcctaatgctcaaacctt

SEQ ID NO: 591093 - DNA, 19 bp, Mus musculus
  siRNA target sequence for Dnase2a (NM_010062.2,548-566).
ccgttcactcagtttgcaa

SEQ ID NO: 591094 - DNA, 19 bp, Mus musculus
  siRNA target sequence for Dnase2a (NM_010062.2,553-571).
cactcagtttgcaaggatt

SEQ ID NO: 591095 - DNA, 19 bp, Mus musculus
  siRNA target sequence for Dnase2a (NM_010062.2,589-607).
cacctatccccttgtctat

SEQ ID NO: 591096 - DNA, 19 bp, Mus musculus
  siRNA target sequence for Dnase2a (NM_010062.2,591-609).
cctatccccttgtctatga

SEQ ID NO: 591097 - DNA, 19 bp, Mus musculus
  siRNA target sequence for Dnase2a (NM_010062.2,739-757).
gagctttgccaaatttgga

SEQ ID NO: 591098 - DNA, 19 bp, Mus musculus
  siRNA target sequence for Dnase2a (NM_010062.2,817-835).
ggtccagttctggcaaaat

SEQ ID NO: 591099 - DNA, 19 bp, Mus musculus
  siRNA target sequence for Dnase2a (NM_010062.2,904-922).
ccctggcccatctagacta

SEQ ID NO: 591100 - DNA, 19 bp, Mus musculus
  siRNA target sequence for Dnase2a (NM_010062.2,908-926).
ggcccatctagactaactt

SEQ ID NO: 591101 - DNA, 19 bp, Mus musculus
  siRNA target sequence for Dnase2a (NM_010062.2,938-956).
gaggaccactccaaatggt

SEQ ID NO: 591102 - DNA, 19 bp, Mus musculus
  siRNA target sequence for Dnase2b (NM_019957.2,350-368).
ctaagaacagttctttctt

SEQ ID NO: 591103 - DNA, 19 bp, Mus musculus
  siRNA target sequence for Dnase2b (NM_019957.2,442-460).
ggactggtttatcttttat

SEQ ID NO: 591104 - DNA, 19 bp, Mus musculus
  siRNA target sequence for Dnase2b (NM_019957.2,518-536).
ctggactccacaagacaaa

SEQ ID NO: 591105 - DNA, 19 bp, Mus musculus
  siRNA target sequence for Dnase2b (NM_019957.2,614-632).
cataattccacgaatgaca

SEQ ID NO: 591106 - DNA, 19 bp, Mus musculus
  siRNA target sequence for Dnase2b (NM_019957.2,629-647).
gacacagcctatctaatat

SEQ ID NO: 591107 - DNA, 19 bp, Mus musculus
  siRNA target sequence for Dnase2b (NM_019957.2,633-651).
cagcctatctaatatacaa

SEQ ID NO: 591108 - DNA, 19 bp, Mus musculus
  siRNA target sequence for Dnase2b (NM_019957.2,793-811).
ctcggggaggcgatatgga

SEQ ID NO: 591109 - DNA, 19 bp, Mus musculus
  siRNA target sequence for Dnase2b (NM_019957.2,843-861).
gccagtttgaggaaataga

SEQ ID NO: 591110 - DNA, 19 bp, Mus musculus
  siRNA target sequence for Dnase2b (NM_019957.2,1014-1032).
gtctaaacttcgtccattt

SEQ ID NO: 591111 - DNA, 19 bp, Mus musculus
  siRNA target sequence for Dnase2b (NM_019957.2,1021-1039).
cttcgtccattttgcaaaa

SEQ ID NO: 591112 - DNA, 19 bp, Mus musculus
  siRNA target sequence for Dnase2b (NM_019957.2,1024-1042).
cgtccattttgcaaaatca

SEQ ID NO: 591113 - DNA, 19 bp, Mus musculus
  siRNA target sequence for Dnase2b (NM_019957.2,1068-1086).
caggatggatagctcaaaa

SEQ ID NO: 591114 - DNA, 19 bp, Mus musculus
  siRNA target sequence for Dnase2b (NM_019957.2,1070-1088).
ggatggatagctcaaaagt

SEQ ID NO: 591115 - DNA, 19 bp, Mus musculus
  siRNA target sequence for Dnase2b (NM_019957.2,1071-1089).
gatggatagctcaaaagtt

SEQ ID NO: 591116 - DNA, 19 bp, Mus musculus
  siRNA target sequence for Dnase2b (NM_019957.2,1074-1092).
ggatagctcaaaagttgaa

SEQ ID NO: 591117 - DNA, 19 bp, Mus musculus
  siRNA target sequence for Dnase2b (NM_019957.2,1147-1165).
ctgttccctgccttaccat

SEQ ID NO: 591118 - DNA, 19 bp, Mus musculus
  siRNA target sequence for Dnase2b (NM_019957.2,1190-1208).
gtaacttccaagtcttact

SEQ ID NO: 591119 - DNA, 19 bp, Mus musculus
  siRNA target sequence for Dnase2b (NM_019957.2,1215-1233).
ctcgccaagaccattccaa

SEQ ID NO: 591120 - DNA, 19 bp, Mus musculus
  siRNA target sequence for Dnase2b (NM_019957.2,1217-1235).
cgccaagaccattccaaat

SEQ ID NO: 591121 - DNA, 19 bp, Mus musculus
  siRNA target sequence for Dnase2b (NM_019957.2,1230-1248).
ccaaatggtgtgtttccat

SEQ ID NO: 591122 - DNA, 19 bp, Mus musculus
  siRNA target sequence for Dnase2b (NM_019957.2,1231-1249).
caaatggtgtgtttccata

SEQ ID NO: 591123 - DNA, 19 bp, Mus musculus
  siRNA target sequence for Dnase2b (NM_019957.2,1319-1337).
ggaggattcatctgtacaa

SEQ ID NO: 591124 - DNA, 19 bp, Mus musculus
  siRNA target sequence for Dnase2b (NM_019957.2,1348-1366).
catttaccaggcatttcat

SEQ ID NO: 591125 - DNA, 19 bp, Mus musculus
  siRNA target sequence for Dnase2b (NM_019957.2,1355-1373).
caggcatttcataaattat

SEQ ID NO: 591126 - DNA, 19 bp, Mus musculus
  siRNA target sequence for Dnase2b (NM_019957.2,1376-1394).
ctccgttatgggttctgta

SEQ ID NO: 591127 - DNA, 19 bp, Mus musculus
  siRNA target sequence for Apex2 (NM_029943.1,83-101).
gtggtaagctggaacatca

SEQ ID NO: 591128 - DNA, 19 bp, Mus musculus
  siRNA target sequence for Apex2 (NM_029943.1,162-180).
ccttgcgacgcgttttgga

SEQ ID NO: 591129 - DNA, 19 bp, Mus musculus
  siRNA target sequence for Apex2 (NM_029943.1,181-199).
cgagctggatgctgatatt

SEQ ID NO: 591130 - DNA, 19 bp, Mus musculus
  siRNA target sequence for Apex2 (NM_029943.1,185-203).
ctggatgctgatattgtct

SEQ ID NO: 591131 - DNA, 19 bp, Mus musculus
  siRNA target sequence for Apex2 (NM_029943.1,251-269).
gctattgttgagggttata

SEQ ID NO: 591132 - DNA, 19 bp, Mus musculus
  siRNA target sequence for Apex2 (NM_029943.1,252-270).
ctattgttgagggttataa

SEQ ID NO: 591133 - DNA, 19 bp, Mus musculus
  siRNA target sequence for Apex2 (NM_029943.1,292-310).
cagccgtagtggctattct

SEQ ID NO: 591134 - DNA, 19 bp, Mus musculus
  siRNA target sequence for Apex2 (NM_029943.1,514-532).
gactttgaccctgatcaat

SEQ ID NO: 591135 - DNA, 19 bp, Mus musculus
  siRNA target sequence for Apex2 (NM_029943.1,632-650).
gctggcagtcacgtgataa

SEQ ID NO: 591136 - DNA, 19 bp, Mus musculus
  siRNA target sequence for Apex2 (NM_029943.1,633-651).
ctggcagtcacgtgataat

SEQ ID NO: 591137 - DNA, 19 bp, Mus musculus
  siRNA target sequence for Apex2 (NM_029943.1,688-706).
ccactgcgatgcaagtagt

SEQ ID NO: 591138 - DNA, 19 bp, Mus musculus
  siRNA target sequence for Apex2 (NM_029943.1,699-717).
caagtagtctggaatgctt

SEQ ID NO: 591139 - DNA, 19 bp, Mus musculus
  siRNA target sequence for Apex2 (NM_029943.1,792-810).
ggctcttcatggatagcta

SEQ ID NO: 591140 - DNA, 19 bp, Mus musculus
  siRNA target sequence for Apex2 (NM_029943.1,813-831).
gctacttgcatccaaaaca

SEQ ID NO: 591141 - DNA, 19 bp, Mus musculus
  siRNA target sequence for Apex2 (NM_029943.1,864-882).
gtggtgcacgccatctcaa

SEQ ID NO: 591142 - DNA, 19 bp, Mus musculus
  siRNA target sequence for Apex2 (NM_029943.1,888-906).
gctctagacttgactatgt

SEQ ID NO: 591143 - DNA, 19 bp, Mus musculus
  siRNA target sequence for Apex2 (NM_029943.1,889-907).
ctctagacttgactatgta

SEQ ID NO: 591144 - DNA, 19 bp, Mus musculus
  siRNA target sequence for Apex2 (NM_029943.1,891-909).
ctagacttgactatgtact

SEQ ID NO: 591145 - DNA, 19 bp, Mus musculus
  siRNA target sequence for Apex2 (NM_029943.1,991-1009).
gggagctgtcttaaatgta

SEQ ID NO: 591146 - DNA, 19 bp, Mus musculus
  siRNA target sequence for Apex2 (NM_029943.1,992-1010).
ggagctgtcttaaatgtat

SEQ ID NO: 591147 - DNA, 19 bp, Mus musculus
  siRNA target sequence for Apex2 (NM_029943.1,1238-1256).
cagaaaaacctgatgagtt

SEQ ID NO: 591148 - DNA, 19 bp, Mus musculus
  siRNA target sequence for Apex2 (NM_029943.1,1316-1334).
ctggtgggccctcttacaa

SEQ ID NO: 591149 - DNA, 19 bp, Mus musculus
  siRNA target sequence for Apex2 (NM_029943.1,1362-1380).
cagccacaatgctagaaga

SEQ ID NO: 591150 - DNA, 19 bp, Mus musculus
  siRNA target sequence for Apex2 (NM_029943.1,1532-1550).
ggtcgccagttctacatgt

SEQ ID NO: 591151 - DNA, 19 bp, Mus musculus
  siRNA target sequence for Apex2 (NM_029943.1,1580-1598).
ccctcttcccgctgtaact

SEQ ID NO: 591152 - DNA, 19 bp, Mus musculus
  siRNA target sequence for Apex2 (NM_029943.1,1581-1599).
cctcttcccgctgtaactt

SEQ ID NO: 591153 - DNA, 19 bp, Mus musculus
  siRNA target sequence for Apex2 (NM_029943.1,1584-1602).
cttcccgctgtaacttctt

SEQ ID NO: 591154 - DNA, 19 bp, Mus musculus
  siRNA target sequence for Dnase1l3 (NM_007870.2,263-281).
cgagcaagaaggaaaacca

SEQ ID NO: 591155 - DNA, 19 bp, Mus musculus
  siRNA target sequence for Dnase1l3 (NM_007870.2,325-343).
cttatactgttgatggaaa

SEQ ID NO: 591156 - DNA, 19 bp, Mus musculus
  siRNA target sequence for Dnase1l3 (NM_007870.2,538-556).
ggagacacagacgtgtttt

SEQ ID NO: 591157 - DNA, 19 bp, Mus musculus
  siRNA target sequence for Dnase1l3 (NM_007870.2,638-656).
ccgagacctccgttaaaga

SEQ ID NO: 591158 - DNA, 19 bp, Mus musculus
  siRNA target sequence for Dnase1l3 (NM_007870.2,642-660).
gacctccgttaaagagata

SEQ ID NO: 591159 - DNA, 19 bp, Mus musculus
  siRNA target sequence for Dnase1l3 (NM_007870.2,644-662).
cctccgttaaagagataga

SEQ ID NO: 591160 - DNA, 19 bp, Mus musculus
  siRNA target sequence for Dnase1l3 (NM_007870.2,645-663).
ctccgttaaagagatagat

SEQ ID NO: 591161 - DNA, 19 bp, Mus musculus
  siRNA target sequence for Dnase1l3 (NM_007870.2,647-665).
ccgttaaagagatagatga

SEQ ID NO: 591162 - DNA, 19 bp, Mus musculus
  siRNA target sequence for Dnase1l3 (NM_007870.2,701-719).
ggaagacagagaatttcat

SEQ ID NO: 591163 - DNA, 19 bp, Mus musculus
  siRNA target sequence for Dnase1l3 (NM_007870.2,762-780).
gaaggcctggcagaacatt

SEQ ID NO: 591164 - DNA, 19 bp, Mus musculus
  siRNA target sequence for Dnase1l3 (NM_007870.2,766-784).
gcctggcagaacattcgtt

SEQ ID NO: 591165 - DNA, 19 bp, Mus musculus
  siRNA target sequence for Dnase1l3 (NM_007870.2,767-785).
cctggcagaacattcgttt

SEQ ID NO: 591166 - DNA, 19 bp, Mus musculus
  siRNA target sequence for Dnase1l3 (NM_007870.2,786-804).
gaggacggaccccaagttt

SEQ ID NO: 591167 - DNA, 19 bp, Mus musculus
  siRNA target sequence for Dnase1l3 (NM_007870.2,829-847).
gacactacggtcaagaaga

SEQ ID NO: 591168 - DNA, 19 bp, Mus musculus
  siRNA target sequence for Dnase1l3 (NM_007870.2,914-932).
gttccagtggcgtctttga

SEQ ID NO: 591169 - DNA, 19 bp, Mus musculus
  siRNA target sequence for Dnase1l3 (NM_007870.2,1021-1039).
gccttcaccaacaacagaa

SEQ ID NO: 591170 - DNA, 19 bp, Mus musculus
  siRNA target sequence for Xrn1 (NM_011916.1,79-97).
ccagaatttgataacttgt

SEQ ID NO: 591171 - DNA, 19 bp, Mus musculus
  siRNA target sequence for Xrn1 (NM_011916.1,126-144).
gtgttcccatcctaatgat

SEQ ID NO: 591172 - DNA, 19 bp, Mus musculus
  siRNA target sequence for Xrn1 (NM_011916.1,128-146).
gttcccatcctaatgatga

SEQ ID NO: 591173 - DNA, 19 bp, Mus musculus
  siRNA target sequence for Xrn1 (NM_011916.1,204-222).
ggaggtgttgtttcgaatt

SEQ ID NO: 591174 - DNA, 19 bp, Mus musculus
  siRNA target sequence for Xrn1 (NM_011916.1,205-223).
gaggtgttgtttcgaatta

SEQ ID NO: 591175 - DNA, 19 bp, Mus musculus
  siRNA target sequence for Xrn1 (NM_011916.1,207-225).
ggtgttgtttcgaattatt

SEQ ID NO: 591176 - DNA, 19 bp, Mus musculus
  siRNA target sequence for Xrn1 (NM_011916.1,208-226).
gtgttgtttcgaattatta

SEQ ID NO: 591177 - DNA, 19 bp, Mus musculus
  siRNA target sequence for Xrn1 (NM_011916.1,210-228).
gttgtttcgaattattaaa

SEQ ID NO: 591178 - DNA, 19 bp, Mus musculus
  siRNA target sequence for Xrn1 (NM_011916.1,213-231).
gtttcgaattattaaacct

SEQ ID NO: 591179 - DNA, 19 bp, Mus musculus
  siRNA target sequence for Xrn1 (NM_011916.1,266-284).
ctcctcgagcaaaaatgaa

SEQ ID NO: 591180 - DNA, 19 bp, Mus musculus
  siRNA target sequence for Xrn1 (NM_011916.1,380-398).
gattcgattccaactgtat

SEQ ID NO: 591181 - DNA, 19 bp, Mus musculus
  siRNA target sequence for Xrn1 (NM_011916.1,401-419).
cgccagggactgaattcat

SEQ ID NO: 591182 - DNA, 19 bp, Mus musculus
  siRNA target sequence for Xrn1 (NM_011916.1,425-443).
gattgcatgaacatctgaa

SEQ ID NO: 591183 - DNA, 19 bp, Mus musculus
  siRNA target sequence for Xrn1 (NM_011916.1,430-448).
catgaacatctgaagtatt

SEQ ID NO: 591184 - DNA, 19 bp, Mus musculus
  siRNA target sequence for Xrn1 (NM_011916.1,436-454).
catctgaagtattttgtaa

SEQ ID NO: 591185 - DNA, 19 bp, Mus musculus
  siRNA target sequence for Xrn1 (NM_011916.1,479-497).
catggcaaggtgttaccat

SEQ ID NO: 591186 - DNA, 19 bp, Mus musculus
  siRNA target sequence for Xrn1 (NM_011916.1,484-502).
caaggtgttaccatctact

SEQ ID NO: 591187 - DNA, 19 bp, Mus musculus
  siRNA target sequence for Xrn1 (NM_011916.1,583-601).
gatccaaacaccagacatt

SEQ ID NO: 591188 - DNA, 19 bp, Mus musculus
  siRNA target sequence for Xrn1 (NM_011916.1,591-609).
caccagacattgtctttat

SEQ ID NO: 591189 - DNA, 19 bp, Mus musculus
  siRNA target sequence for Xrn1 (NM_011916.1,711-729).
ggtatgtgcaccagaagaa

SEQ ID NO: 591190 - DNA, 19 bp, Mus musculus
  siRNA target sequence for Xrn1 (NM_011916.1,722-740).
cagaagaaacgacatttca

SEQ ID NO: 591191 - DNA, 19 bp, Mus musculus
  siRNA target sequence for Xrn1 (NM_011916.1,734-752).
catttcacctcctacactt

SEQ ID NO: 591192 - DNA, 19 bp, Mus musculus
  siRNA target sequence for Xrn1 (NM_011916.1,804-822).
gatcacatttaaatatgat

SEQ ID NO: 591193 - DNA, 19 bp, Mus musculus
  siRNA target sequence for Xrn1 (NM_011916.1,884-902).
ctcatctacctcatttaca

SEQ ID NO: 591194 - DNA, 19 bp, Mus musculus
  siRNA target sequence for Xrn1 (NM_011916.1,925-943).
cttctttatggaacatata

SEQ ID NO: 591195 - DNA, 19 bp, Mus musculus
  siRNA target sequence for Xrn1 (NM_011916.1,954-972).
gccagaacttggaggttat

SEQ ID NO: 591196 - DNA, 19 bp, Mus musculus
  siRNA target sequence for Xrn1 (NM_011916.1,955-973).
ccagaacttggaggttata

SEQ ID NO: 591197 - DNA, 19 bp, Mus musculus
  siRNA target sequence for Xrn1 (NM_011916.1,964-982).
ggaggttatattaatgaaa

SEQ ID NO: 591198 - DNA, 19 bp, Mus musculus
  siRNA target sequence for Xrn1 (NM_011916.1,1023-1041).
gaaactatcagattttgat

SEQ ID NO: 591199 - DNA, 19 bp, Mus musculus
  siRNA target sequence for Xrn1 (NM_011916.1,1068-1086).
ggacctcaagtggtttgaa

SEQ ID NO: 591200 - DNA, 19 bp, Mus musculus
  siRNA target sequence for Xrn1 (NM_011916.1,1069-1087).
gacctcaagtggtttgaaa

SEQ ID NO: 591201 - DNA, 19 bp, Mus musculus
  siRNA target sequence for Xrn1 (NM_011916.1,1089-1107).
caaagttggtaacaagtat

SEQ ID NO: 591202 - DNA, 19 bp, Mus musculus
  siRNA target sequence for Xrn1 (NM_011916.1,1093-1111).
gttggtaacaagtatctca

SEQ ID NO: 591203 - DNA, 19 bp, Mus musculus
  siRNA target sequence for Xrn1 (NM_011916.1,1168-1186).
ccgaagggtcaggaaaatt

SEQ ID NO: 591204 - DNA, 19 bp, Mus musculus
  siRNA target sequence for Xrn1 (NM_011916.1,1173-1191).
gggtcaggaaaattcttta

SEQ ID NO: 591205 - DNA, 19 bp, Mus musculus
  siRNA target sequence for Xrn1 (NM_011916.1,1174-1192).
ggtcaggaaaattctttaa

SEQ ID NO: 591206 - DNA, 19 bp, Mus musculus
  siRNA target sequence for Xrn1 (NM_011916.1,1228-1246).
gtagcttctagagataatt

SEQ ID NO: 591207 - DNA, 19 bp, Mus musculus
  siRNA target sequence for Xrn1 (NM_011916.1,1294-1312).
caatataagagaacatact

SEQ ID NO: 591208 - DNA, 19 bp, Mus musculus
  siRNA target sequence for Xrn1 (NM_011916.1,1326-1344).
gggcgtcgatgtagtatct

SEQ ID NO: 591209 - DNA, 19 bp, Mus musculus
  siRNA target sequence for Xrn1 (NM_011916.1,1328-1346).
gcgtcgatgtagtatctga

SEQ ID NO: 591210 - DNA, 19 bp, Mus musculus
  siRNA target sequence for Xrn1 (NM_011916.1,1329-1347).
cgtcgatgtagtatctgat

SEQ ID NO: 591211 - DNA, 19 bp, Mus musculus
  siRNA target sequence for Xrn1 (NM_011916.1,1373-1391).
gttatgttcaggctataca

SEQ ID NO: 591212 - DNA, 19 bp, Mus musculus
  siRNA target sequence for Xrn1 (NM_011916.1,1383-1401).
ggctatacagtggatctta

SEQ ID NO: 591213 - DNA, 19 bp, Mus musculus
  siRNA target sequence for Xrn1 (NM_011916.1,1385-1403).
ctatacagtggatcttaca

SEQ ID NO: 591214 - DNA, 19 bp, Mus musculus
  siRNA target sequence for Xrn1 (NM_011916.1,1390-1408).
cagtggatcttacactatt

SEQ ID NO: 591215 - DNA, 19 bp, Mus musculus
  siRNA target sequence for Xrn1 (NM_011916.1,1398-1416).
cttacactattactatcat

SEQ ID NO: 591216 - DNA, 19 bp, Mus musculus
  siRNA target sequence for Xrn1 (NM_011916.1,1434-1452).
ctggtactatccctatcat

SEQ ID NO: 591217 - DNA, 19 bp, Mus musculus
  siRNA target sequence for Xrn1 (NM_011916.1,1450-1468).
cattacgcacccttcctat

SEQ ID NO: 591218 - DNA, 19 bp, Mus musculus
  siRNA target sequence for Xrn1 (NM_011916.1,1455-1473).
cgcacccttcctatctgat

SEQ ID NO: 591219 - DNA, 19 bp, Mus musculus
  siRNA target sequence for Xrn1 (NM_011916.1,1456-1474).
gcacccttcctatctgata

SEQ ID NO: 591220 - DNA, 19 bp, Mus musculus
  siRNA target sequence for Xrn1 (NM_011916.1,1471-1489).
gatatccgcagtatcagta

SEQ ID NO: 591221 - DNA, 19 bp, Mus musculus
  siRNA target sequence for Xrn1 (NM_011916.1,1481-1499).
gtatcagtacactcaaaat

SEQ ID NO: 591222 - DNA, 19 bp, Mus musculus
  siRNA target sequence for Xrn1 (NM_011916.1,1487-1505).
gtacactcaaaatccattt

SEQ ID NO: 591223 - DNA, 19 bp, Mus musculus
  siRNA target sequence for Xrn1 (NM_011916.1,1490-1508).
cactcaaaatccattttga

SEQ ID NO: 591224 - DNA, 19 bp, Mus musculus
  siRNA target sequence for Xrn1 (NM_011916.1,1555-1573).
ccatcggctagtaaaaatt

SEQ ID NO: 591225 - DNA, 19 bp, Mus musculus
  siRNA target sequence for Xrn1 (NM_011916.1,1559-1577).
cggctagtaaaaatttgct

SEQ ID NO: 591226 - DNA, 19 bp, Mus musculus
  siRNA target sequence for Xrn1 (NM_011916.1,1560-1578).
ggctagtaaaaatttgctt

SEQ ID NO: 591227 - DNA, 19 bp, Mus musculus
  siRNA target sequence for Xrn1 (NM_011916.1,1607-1625).
gtgaagactcgccaattat

SEQ ID NO: 591228 - DNA, 19 bp, Mus musculus
  siRNA target sequence for Xrn1 (NM_011916.1,1612-1630).
gactcgccaattatagaat

SEQ ID NO: 591229 - DNA, 19 bp, Mus musculus
  siRNA target sequence for Xrn1 (NM_011916.1,1614-1632).
ctcgccaattatagaatat

SEQ ID NO: 591230 - DNA, 19 bp, Mus musculus
  siRNA target sequence for Xrn1 (NM_011916.1,1689-1707).
ggtattaataccgtttatt

SEQ ID NO: 591231 - DNA, 19 bp, Mus musculus
  siRNA target sequence for Xrn1 (NM_011916.1,1742-1760).
gtaaccactccctcaaaaa

SEQ ID NO: 591232 - DNA, 19 bp, Mus musculus
  siRNA target sequence for Xrn1 (NM_011916.1,1861-1879).
gccatagaacgatgttgta

SEQ ID NO: 591233 - DNA, 19 bp, Mus musculus
  siRNA target sequence for Xrn1 (NM_011916.1,1863-1881).
catagaacgatgttgtaca

SEQ ID NO: 591234 - DNA, 19 bp, Mus musculus
  siRNA target sequence for Xrn1 (NM_011916.1,1870-1888).
cgatgttgtacaaggtata

SEQ ID NO: 591235 - DNA, 19 bp, Mus musculus
  siRNA target sequence for Xrn1 (NM_011916.1,1874-1892).
gttgtacaaggtataaaat

SEQ ID NO: 591236 - DNA, 19 bp, Mus musculus
  siRNA target sequence for Xrn1 (NM_011916.1,1877-1895).
gtacaaggtataaaatgat

SEQ ID NO: 591237 - DNA, 19 bp, Mus musculus
  siRNA target sequence for Xrn1 (NM_011916.1,1906-1924).
gcttggcgcgtagacataa

SEQ ID NO: 591238 - DNA, 19 bp, Mus musculus
  siRNA target sequence for Xrn1 (NM_011916.1,1907-1925).
cttggcgcgtagacataaa

SEQ ID NO: 591239 - DNA, 19 bp, Mus musculus
  siRNA target sequence for Xrn1 (NM_011916.1,1910-1928).
ggcgcgtagacataaacaa

SEQ ID NO: 591240 - DNA, 19 bp, Mus musculus
  siRNA target sequence for Xrn1 (NM_011916.1,1912-1930).
cgcgtagacataaacaaga

SEQ ID NO: 591241 - DNA, 19 bp, Mus musculus
  siRNA target sequence for Xrn1 (NM_011916.1,1913-1931).
gcgtagacataaacaagaa

SEQ ID NO: 591242 - DNA, 19 bp, Mus musculus
  siRNA target sequence for Xrn1 (NM_011916.1,1951-1969).
cagaaggcattatatttct

SEQ ID NO: 591243 - DNA, 19 bp, Mus musculus
  siRNA target sequence for Xrn1 (NM_011916.1,1970-1988).
gtggattccctactttgaa

SEQ ID NO: 591244 - DNA, 19 bp, Mus musculus
  siRNA target sequence for Xrn1 (NM_011916.1,1979-1997).
ctactttgaaacacatcaa

SEQ ID NO: 591245 - DNA, 19 bp, Mus musculus
  siRNA target sequence for Xrn1 (NM_011916.1,2016-2034).
gaaaagtggtgttcaagta

SEQ ID NO: 591246 - DNA, 19 bp, Mus musculus
  siRNA target sequence for Xrn1 (NM_011916.1,2021-2039).
gtggtgttcaagtattcca

SEQ ID NO: 591247 - DNA, 19 bp, Mus musculus
  siRNA target sequence for Xrn1 (NM_011916.1,2045-2063).
gtagtcgtggtgaaaactt

SEQ ID NO: 591248 - DNA, 19 bp, Mus musculus
  siRNA target sequence for Xrn1 (NM_011916.1,2048-2066).
gtcgtggtgaaaacttgat

SEQ ID NO: 591249 - DNA, 19 bp, Mus musculus
  siRNA target sequence for Xrn1 (NM_011916.1,2095-2113).
gatgaacttaggatagaga

SEQ ID NO: 591250 - DNA, 19 bp, Mus musculus
  siRNA target sequence for Xrn1 (NM_011916.1,2188-2206).
gtatcagatggtgaaacta

SEQ ID NO: 591251 - DNA, 19 bp, Mus musculus
  siRNA target sequence for Xrn1 (NM_011916.1,2275-2293).
gtcatccaacttacagata

SEQ ID NO: 591252 - DNA, 19 bp, Mus musculus
  siRNA target sequence for Xrn1 (NM_011916.1,2303-2321).
cgaactggactaaagaaat

SEQ ID NO: 591253 - DNA, 19 bp, Mus musculus
  siRNA target sequence for Xrn1 (NM_011916.1,2397-2415).
gttgctcacgggtcgtaaa

SEQ ID NO: 591254 - DNA, 19 bp, Mus musculus
  siRNA target sequence for Xrn1 (NM_011916.1,2400-2418).
gctcacgggtcgtaaatat

SEQ ID NO: 591255 - DNA, 19 bp, Mus musculus
  siRNA target sequence for Xrn1 (NM_011916.1,2403-2421).
cacgggtcgtaaatatcaa

SEQ ID NO: 591256 - DNA, 19 bp, Mus musculus
  siRNA target sequence for Xrn1 (NM_011916.1,2405-2423).
cgggtcgtaaatatcaaat

SEQ ID NO: 591257 - DNA, 19 bp, Mus musculus
  siRNA target sequence for Xrn1 (NM_011916.1,2407-2425).
ggtcgtaaatatcaaatca

SEQ ID NO: 591258 - DNA, 19 bp, Mus musculus
  siRNA target sequence for Xrn1 (NM_011916.1,2435-2453).
gtgaagttcgtctagaaaa

SEQ ID NO: 591259 - DNA, 19 bp, Mus musculus
  siRNA target sequence for Xrn1 (NM_011916.1,2440-2458).
gttcgtctagaaaaacagt

SEQ ID NO: 591260 - DNA, 19 bp, Mus musculus
  siRNA target sequence for Xrn1 (NM_011916.1,2476-2494).
ccttttgtttatcaaacta

SEQ ID NO: 591261 - DNA, 19 bp, Mus musculus
  siRNA target sequence for Xrn1 (NM_011916.1,2503-2521).
gacatccgagcttttgact

SEQ ID NO: 591262 - DNA, 19 bp, Mus musculus
  siRNA target sequence for Xrn1 (NM_011916.1,2522-2540).
ctcgtttctccaatatcaa

SEQ ID NO: 591263 - DNA, 19 bp, Mus musculus
  siRNA target sequence for Xrn1 (NM_011916.1,2583-2601).
gcttggaactccttattat

SEQ ID NO: 591264 - DNA, 19 bp, Mus musculus
  siRNA target sequence for Xrn1 (NM_011916.1,2603-2621).
gctgcactggagaagttca

SEQ ID NO: 591265 - DNA, 19 bp, Mus musculus
  siRNA target sequence for Xrn1 (NM_011916.1,2682-2700).
gccaaatcttgatgcttta

SEQ ID NO: 591266 - DNA, 19 bp, Mus musculus
  siRNA target sequence for Xrn1 (NM_011916.1,2683-2701).
ccaaatcttgatgctttaa

SEQ ID NO: 591267 - DNA, 19 bp, Mus musculus
  siRNA target sequence for Xrn1 (NM_011916.1,2704-2722).
cagaatcagcataaatact

SEQ ID NO: 591268 - DNA, 19 bp, Mus musculus
  siRNA target sequence for Xrn1 (NM_011916.1,2706-2724).
gaatcagcataaatactct

SEQ ID NO: 591269 - DNA, 19 bp, Mus musculus
  siRNA target sequence for Xrn1 (NM_011916.1,2713-2731).
cataaatactctataaagt

SEQ ID NO: 591270 - DNA, 19 bp, Mus musculus
  siRNA target sequence for Xrn1 (NM_011916.1,2767-2785).
gtgagtggataccttgttt

SEQ ID NO: 591271 - DNA, 19 bp, Mus musculus
  siRNA target sequence for Xrn1 (NM_011916.1,2769-2787).
gagtggataccttgtttca

SEQ ID NO: 591272 - DNA, 19 bp, Mus musculus
  siRNA target sequence for Xrn1 (NM_011916.1,2778-2796).
ccttgtttcaaggtttaca

SEQ ID NO: 591273 - DNA, 19 bp, Mus musculus
  siRNA target sequence for Xrn1 (NM_011916.1,2797-2815).
ggaagtatttttattggaa

SEQ ID NO: 591274 - DNA, 19 bp, Mus musculus
  siRNA target sequence for Xrn1 (NM_011916.1,2857-2875).
gtgggtttaaatctcaaat

SEQ ID NO: 591275 - DNA, 19 bp, Mus musculus
  siRNA target sequence for Xrn1 (NM_011916.1,2860-2878).
ggtttaaatctcaaattca

SEQ ID NO: 591276 - DNA, 19 bp, Mus musculus
  siRNA target sequence for Xrn1 (NM_011916.1,2861-2879).
gtttaaatctcaaattcaa

SEQ ID NO: 591277 - DNA, 19 bp, Mus musculus
  siRNA target sequence for Xrn1 (NM_011916.1,2920-2938).
gggaacgagtggatgtact

SEQ ID NO: 591278 - DNA, 19 bp, Mus musculus
  siRNA target sequence for Xrn1 (NM_011916.1,2981-2999).
caccagaactgttcagtta

SEQ ID NO: 591279 - DNA, 19 bp, Mus musculus
  siRNA target sequence for Xrn1 (NM_011916.1,2983-3001).
ccagaactgttcagttata

SEQ ID NO: 591280 - DNA, 19 bp, Mus musculus
  siRNA target sequence for Xrn1 (NM_011916.1,3042-3060).
catctggcctggagaaaat

SEQ ID NO: 591281 - DNA, 19 bp, Mus musculus
  siRNA target sequence for Xrn1 (NM_011916.1,3063-3081).
gaacggggctgagaaagtt

SEQ ID NO: 591282 - DNA, 19 bp, Mus musculus
  siRNA target sequence for Xrn1 (NM_011916.1,3066-3084).
cggggctgagaaagttcaa

SEQ ID NO: 591283 - DNA, 19 bp, Mus musculus
  siRNA target sequence for Xrn1 (NM_011916.1,3079-3097).
gttcaagaaattattactt

SEQ ID NO: 591284 - DNA, 19 bp, Mus musculus
  siRNA target sequence for Xrn1 (NM_011916.1,3219-3237).
caagaaagtccgagtaaca

SEQ ID NO: 591285 - DNA, 19 bp, Mus musculus
  siRNA target sequence for Xrn1 (NM_011916.1,3270-3288).
gcagcagcatggagtcatt

SEQ ID NO: 591286 - DNA, 19 bp, Mus musculus
  siRNA target sequence for Xrn1 (NM_011916.1,3302-3320).
ccgagttccggctctttga

SEQ ID NO: 591287 - DNA, 19 bp, Mus musculus
  siRNA target sequence for Xrn1 (NM_011916.1,3303-3321).
cgagttccggctctttgat

SEQ ID NO: 591288 - DNA, 19 bp, Mus musculus
  siRNA target sequence for Xrn1 (NM_011916.1,3367-3385).
cgaggcaccgtcattggaa

SEQ ID NO: 591289 - DNA, 19 bp, Mus musculus
  siRNA target sequence for Xrn1 (NM_011916.1,3368-3386).
gaggcaccgtcattggaat

SEQ ID NO: 591290 - DNA, 19 bp, Mus musculus
  siRNA target sequence for Xrn1 (NM_011916.1,3370-3388).
ggcaccgtcattggaatta

SEQ ID NO: 591291 - DNA, 19 bp, Mus musculus
  siRNA target sequence for Xrn1 (NM_011916.1,3371-3389).
gcaccgtcattggaattaa

SEQ ID NO: 591292 - DNA, 19 bp, Mus musculus
  siRNA target sequence for Xrn1 (NM_011916.1,3409-3427).
gatgtactatttgaagtat

SEQ ID NO: 591293 - DNA, 19 bp, Mus musculus
  siRNA target sequence for Xrn1 (NM_011916.1,3412-3430).
gtactatttgaagtattat

SEQ ID NO: 591294 - DNA, 19 bp, Mus musculus
  siRNA target sequence for Xrn1 (NM_011916.1,3445-3463).
cccggaggcttaacaataa

SEQ ID NO: 591295 - DNA, 19 bp, Mus musculus
  siRNA target sequence for Xrn1 (NM_011916.1,3448-3466).
ggaggcttaacaataaggt

SEQ ID NO: 591296 - DNA, 19 bp, Mus musculus
  siRNA target sequence for Xrn1 (NM_011916.1,3520-3538).
catgggagtcggtgtgaaa

SEQ ID NO: 591297 - DNA, 19 bp, Mus musculus
  siRNA target sequence for Xrn1 (NM_011916.1,3677-3695).
gtgatgatgaattttgcaa

SEQ ID NO: 591298 - DNA, 19 bp, Mus musculus
  siRNA target sequence for Xrn1 (NM_011916.1,3692-3710).
gcaacatttggcaatctct

SEQ ID NO: 591299 - DNA, 19 bp, Mus musculus
  siRNA target sequence for Xrn1 (NM_011916.1,3735-3753).
cttgcagccgacagtacaa

SEQ ID NO: 591300 - DNA, 19 bp, Mus musculus
  siRNA target sequence for Xrn1 (NM_011916.1,3850-3868).
catgactcgcaacgaaaat

SEQ ID NO: 591301 - DNA, 19 bp, Mus musculus
  siRNA target sequence for Xrn1 (NM_011916.1,3853-3871).
gactcgcaacgaaaattta

SEQ ID NO: 591302 - DNA, 19 bp, Mus musculus
  siRNA target sequence for Xrn1 (NM_011916.1,3857-3875).
cgcaacgaaaatttaagga

SEQ ID NO: 591303 - DNA, 19 bp, Mus musculus
  siRNA target sequence for Xrn1 (NM_011916.1,3937-3955).
ggagggtctgccagatgta

SEQ ID NO: 591304 - DNA, 19 bp, Mus musculus
  siRNA target sequence for Xrn1 (NM_011916.1,3947-3965).
ccagatgtagtattaaact

SEQ ID NO: 591305 - DNA, 19 bp, Mus musculus
  siRNA target sequence for Xrn1 (NM_011916.1,3948-3966).
cagatgtagtattaaacta

SEQ ID NO: 591306 - DNA, 19 bp, Mus musculus
  siRNA target sequence for Xrn1 (NM_011916.1,3950-3968).
gatgtagtattaaactatt

SEQ ID NO: 591307 - DNA, 19 bp, Mus musculus
  siRNA target sequence for Xrn1 (NM_011916.1,3953-3971).
gtagtattaaactattgaa

SEQ ID NO: 591308 - DNA, 19 bp, Mus musculus
  siRNA target sequence for Xrn1 (NM_011916.1,3997-4015).
gaagcccagaaggttgtaa

SEQ ID NO: 591309 - DNA, 19 bp, Mus musculus
  siRNA target sequence for Xrn1 (NM_011916.1,4046-4064).
cctctgggattgagaactt

SEQ ID NO: 591310 - DNA, 19 bp, Mus musculus
  siRNA target sequence for Xrn1 (NM_011916.1,4145-4163).
ccccgcagtcctttgctat

SEQ ID NO: 591311 - DNA, 19 bp, Mus musculus
  siRNA target sequence for Xrn1 (NM_011916.1,4148-4166).
cgcagtcctttgctatgaa

SEQ ID NO: 591312 - DNA, 19 bp, Mus musculus
  siRNA target sequence for Xrn1 (NM_011916.1,4149-4167).
gcagtcctttgctatgaaa

SEQ ID NO: 591313 - DNA, 19 bp, Mus musculus
  siRNA target sequence for Xrn1 (NM_011916.1,4169-4187).
gaacacggatgcttaaaga

SEQ ID NO: 591314 - DNA, 19 bp, Mus musculus
  siRNA target sequence for Xrn1 (NM_011916.1,4286-4304).
gagtgtcagcacatcctaa

SEQ ID NO: 591315 - DNA, 19 bp, Mus musculus
  siRNA target sequence for Xrn1 (NM_011916.1,4345-4363).
gggactaacgagttccaaa

SEQ ID NO: 591316 - DNA, 19 bp, Mus musculus
  siRNA target sequence for Xrn1 (NM_011916.1,4347-4365).
gactaacgagttccaaaat

SEQ ID NO: 591317 - DNA, 19 bp, Mus musculus
  siRNA target sequence for Xrn1 (NM_011916.1,4349-4367).
ctaacgagttccaaaatgt

SEQ ID NO: 591318 - DNA, 19 bp, Mus musculus
  siRNA target sequence for Xrn1 (NM_011916.1,4416-4434).
cacaccagtaactgaactt

SEQ ID NO: 591319 - DNA, 19 bp, Mus musculus
  siRNA target sequence for Xrn1 (NM_011916.1,4476-4494).
ctcctttctgcgaacaaca

SEQ ID NO: 591320 - DNA, 19 bp, Mus musculus
  siRNA target sequence for Xrn1 (NM_011916.1,4613-4631).
gctccttgggtgtgagttt

SEQ ID NO: 591321 - DNA, 19 bp, Mus musculus
  siRNA target sequence for Xrn1 (NM_011916.1,4643-4661).
cacccatatttacaaatta

SEQ ID NO: 591322 - DNA, 19 bp, Mus musculus
  siRNA target sequence for Xrn1 (NM_011916.1,4647-4665).
catatttacaaattatcct

SEQ ID NO: 591323 - DNA, 19 bp, Mus musculus
  siRNA target sequence for Xrn1 (NM_011916.1,4703-4721).
cccaacctactgctaatat

SEQ ID NO: 591324 - DNA, 19 bp, Mus musculus
  siRNA target sequence for Xrn1 (NM_011916.1,4704-4722).
ccaacctactgctaatata

SEQ ID NO: 591325 - DNA, 19 bp, Mus musculus
  siRNA target sequence for Xrn1 (NM_011916.1,4727-4745).
cttcatcgtctcatctctt

SEQ ID NO: 591326 - DNA, 19 bp, Mus musculus
  siRNA target sequence for Xrn1 (NM_011916.1,4794-4812).
ccactatccttcatatcct

SEQ ID NO: 591327 - DNA, 19 bp, Mus musculus
  siRNA target sequence for Xrn1 (NM_011916.1,4847-4865).
gagtgcacagtcagttcat

SEQ ID NO: 591328 - DNA, 19 bp, Mus musculus
  siRNA target sequence for Xrn1 (NM_011916.1,4940-4958).
ccacaccacttcagactaa

SEQ ID NO: 591329 - DNA, 19 bp, Mus musculus
  siRNA target sequence for Xrn1 (NM_011916.1,4998-5016).
cccaggatgggtccattta

SEQ ID NO: 591330 - DNA, 19 bp, Mus musculus
  siRNA target sequence for Xrn1 (NM_011916.1,5018-5036).
cagtaaccagtctaaccta

SEQ ID NO: 591331 - DNA, 19 bp, Mus musculus
  siRNA target sequence for 2700083B06Rik (NM_026531.2,251-269).
ggcagcaccagcgattcat

SEQ ID NO: 591332 - DNA, 19 bp, Mus musculus
  siRNA target sequence for 2700083B06Rik (NM_026531.2,421-439).
ggcctgtgcagcaaaaagt

SEQ ID NO: 591333 - DNA, 19 bp, Mus musculus
  siRNA target sequence for 2700083B06Rik (NM_026531.2,565-583).
ggtgacgttctctatgaca

SEQ ID NO: 591334 - DNA, 19 bp, Mus musculus
  siRNA target sequence for 2700083B06Rik (NM_026531.2,568-586).
gacgttctctatgacaaat

SEQ ID NO: 591335 - DNA, 19 bp, Mus musculus
  siRNA target sequence for 2700083B06Rik (NM_026531.2,725-743).
ggcacgcactgcacaatga

SEQ ID NO: 591336 - DNA, 19 bp, Mus musculus
  siRNA target sequence for 2700083B06Rik (NM_026531.2,780-798).
gacccgggataccacttat

SEQ ID NO: 591337 - DNA, 19 bp, Mus musculus
  siRNA target sequence for 2700083B06Rik (NM_026531.2,835-853).
cgaactcgggtctctctta

SEQ ID NO: 591338 - DNA, 19 bp, Mus musculus
  siRNA target sequence for 2700083B06Rik (NM_026531.2,836-854).
gaactcgggtctctcttaa

SEQ ID NO: 591339 - DNA, 19 bp, Mus musculus
  siRNA target sequence for 4933424N09Rik (NM_027698.1,53-71).
cggcttggattaattagga

SEQ ID NO: 591340 - DNA, 19 bp, Mus musculus
  siRNA target sequence for 4933424N09Rik (NM_027698.1,105-123).
gagggagcagattgaaaca

SEQ ID NO: 591341 - DNA, 19 bp, Mus musculus
  siRNA target sequence for 4933424N09Rik (NM_027698.1,107-125).
gggagcagattgaaacagt

SEQ ID NO: 591342 - DNA, 19 bp, Mus musculus
  siRNA target sequence for 4933424N09Rik (NM_027698.1,108-126).
ggagcagattgaaacagtt

SEQ ID NO: 591343 - DNA, 19 bp, Mus musculus
  siRNA target sequence for 4933424N09Rik (NM_027698.1,122-140).
cagttgtatgcctacttaa

SEQ ID NO: 591344 - DNA, 19 bp, Mus musculus
  siRNA target sequence for 4933424N09Rik (NM_027698.1,124-142).
gttgtatgcctacttaatt

SEQ ID NO: 591345 - DNA, 19 bp, Mus musculus
  siRNA target sequence for 4933424N09Rik (NM_027698.1,136-154).
cttaattgtcgttgacttt

SEQ ID NO: 591346 - DNA, 19 bp, Mus musculus
  siRNA target sequence for 4933424N09Rik (NM_027698.1,187-205).
cagtagccctgaaataatt

SEQ ID NO: 591347 - DNA, 19 bp, Mus musculus
  siRNA target sequence for 4933424N09Rik (NM_027698.1,193-211).
ccctgaaataattgaattt

SEQ ID NO: 591348 - DNA, 19 bp, Mus musculus
  siRNA target sequence for 4933424N09Rik (NM_027698.1,233-251).
gcaactggagagattgaat

SEQ ID NO: 591349 - DNA, 19 bp, Mus musculus
  siRNA target sequence for 4933424N09Rik (NM_027698.1,237-255).
ctggagagattgaatctga

SEQ ID NO: 591350 - DNA, 19 bp, Mus musculus
  siRNA target sequence for 4933424N09Rik (NM_027698.1,274-292).
gcctcaagaacatccaatt

SEQ ID NO: 591351 - DNA, 19 bp, Mus musculus
  siRNA target sequence for 4933424N09Rik (NM_027698.1,276-294).
ctcaagaacatccaattct

SEQ ID NO: 591352 - DNA, 19 bp, Mus musculus
  siRNA target sequence for 4933424N09Rik (NM_027698.1,366-384).
gcttgtcccagttctgtaa

SEQ ID NO: 591353 - DNA, 19 bp, Mus musculus
  siRNA target sequence for 4933424N09Rik (NM_027698.1,499-517).
gggcgtttgcctagagtat

SEQ ID NO: 591354 - DNA, 19 bp, Mus musculus
  siRNA target sequence for 4933424N09Rik (NM_027698.1,501-519).
gcgtttgcctagagtatga

SEQ ID NO: 591355 - DNA, 19 bp, Mus musculus
  siRNA target sequence for 4933424N09Rik (NM_027698.1,503-521).
gtttgcctagagtatgagt

SEQ ID NO: 591356 - DNA, 19 bp, Mus musculus
  siRNA target sequence for 4933424N09Rik (NM_027698.1,553-571).
cttaaactcttggattgat

SEQ ID NO: 591357 - DNA, 19 bp, Mus musculus
  siRNA target sequence for 4933424N09Rik (NM_027698.1,569-587).
gatctcagagcaacttaca

SEQ ID NO: 591358 - DNA, 19 bp, Mus musculus
  siRNA target sequence for 4933424N09Rik (NM_027698.1,631-649).
gcaggaagtgggaatagaa

SEQ ID NO: 591359 - DNA, 19 bp, Mus musculus
  siRNA target sequence for 4933424N09Rik (NM_027698.1,695-713).
gctcttcttgcttggaaaa

SEQ ID NO: 591360 - DNA, 19 bp, Mus musculus
  siRNA target sequence for 4933424N09Rik (NM_027698.1,715-733).
gatcagggatggttgctta

SEQ ID NO: 591361 - DNA, 19 bp, Mus musculus
  siRNA target sequence for C80587 (NM_177663.2,479-497).
ctttgggcaaccttcgaaa

SEQ ID NO: 591362 - DNA, 19 bp, Mus musculus
  siRNA target sequence for C80587 (NM_177663.2,589-607).
cccctaacaaggtgtctaa

SEQ ID NO: 591363 - DNA, 19 bp, Mus musculus
  siRNA target sequence for C80587 (NM_177663.2,624-642).
ccaaagaaaggggaaactt

SEQ ID NO: 591364 - DNA, 19 bp, Mus musculus
  siRNA target sequence for C80587 (NM_177663.2,643-661).
caagagtagatggcatttt

SEQ ID NO: 591365 - DNA, 19 bp, Mus musculus
  siRNA target sequence for C80587 (NM_177663.2,646-664).
gagtagatggcattttgaa

SEQ ID NO: 591366 - DNA, 19 bp, Mus musculus
  siRNA target sequence for C80587 (NM_177663.2,715-733).
cagagcagtccaaagacaa

SEQ ID NO: 591367 - DNA, 19 bp, Mus musculus
  siRNA target sequence for C80587 (NM_177663.2,908-926).
ccaagctcagtcaaaggat

SEQ ID NO: 591368 - DNA, 19 bp, Mus musculus
  siRNA target sequence for C80587 (NM_177663.2,974-992).
cacccaagctcgttctgaa

SEQ ID NO: 591369 - DNA, 19 bp, Mus musculus
  siRNA target sequence for C80587 (NM_177663.2,1027-1045).
ggaagatggtggcaataga

SEQ ID NO: 591370 - DNA, 19 bp, Mus musculus
  siRNA target sequence for C80587 (NM_177663.2,1035-1053).
gtggcaatagactgtgaaa

SEQ ID NO: 591371 - DNA, 19 bp, Mus musculus
  siRNA target sequence for C80587 (NM_177663.2,1091-1109).
ggctcgatgcagcattgta

SEQ ID NO: 591372 - DNA, 19 bp, Mus musculus
  siRNA target sequence for C80587 (NM_177663.2,1092-1110).
gctcgatgcagcattgtaa

SEQ ID NO: 591373 - DNA, 19 bp, Mus musculus
  siRNA target sequence for C80587 (NM_177663.2,1093-1111).
ctcgatgcagcattgtaaa

SEQ ID NO: 591374 - DNA, 19 bp, Mus musculus
  siRNA target sequence for C80587 (NM_177663.2,1153-1171).
cctgctacatcgtcaacta

SEQ ID NO: 591375 - DNA, 19 bp, Mus musculus
  siRNA target sequence for C80587 (NM_177663.2,1214-1232).
cgctacaccctttaagact

SEQ ID NO: 591376 - DNA, 19 bp, Mus musculus
  siRNA target sequence for C80587 (NM_177663.2,1231-1249).
ctgctcggagtcagatctt

SEQ ID NO: 591377 - DNA, 19 bp, Mus musculus
  siRNA target sequence for C80587 (NM_177663.2,1236-1254).
cggagtcagatcttgaaga

SEQ ID NO: 591378 - DNA, 19 bp, Mus musculus
  siRNA target sequence for C80587 (NM_177663.2,1240-1258).
gtcagatcttgaagatact

SEQ ID NO: 591379 - DNA, 19 bp, Mus musculus
  siRNA target sequence for C80587 (NM_177663.2,1259-1277).
ctcagggaaggtagtgata

SEQ ID NO: 591380 - DNA, 19 bp, Mus musculus
  siRNA target sequence for C80587 (NM_177663.2,1279-1297).
ggcatgccattcacaatga

SEQ ID NO: 591381 - DNA, 19 bp, Mus musculus
  siRNA target sequence for C80587 (NM_177663.2,1437-1455).
gacatccaggttggaaata

SEQ ID NO: 591382 - DNA, 19 bp, Mus musculus
  siRNA target sequence for C80587 (NM_177663.2,1499-1517).
gtacaagttggttgaagtt

SEQ ID NO: 591383 - DNA, 19 bp, Mus musculus
  siRNA target sequence for Isg20 (NM_020583.4,330-348).
gctgcagcattgtgaacat

SEQ ID NO: 591384 - DNA, 19 bp, Mus musculus
  siRNA target sequence for Isg20 (NM_020583.4,357-375).
cagtcctgtatgacaagta

SEQ ID NO: 591385 - DNA, 19 bp, Mus musculus
  siRNA target sequence for Isg20 (NM_020583.4,392-410).
gagatcacggactacagaa

SEQ ID NO: 591386 - DNA, 19 bp, Mus musculus
  siRNA target sequence for Isg20 (NM_020583.4,445-463).
gagggccacgccatttggt

SEQ ID NO: 591387 - DNA, 19 bp, Mus musculus
  siRNA target sequence for Isg20 (NM_020583.4,520-538).
cctgaagcacgacttcaat

SEQ ID NO: 591388 - DNA, 19 bp, Mus musculus
  siRNA target sequence for Isg20 (NM_020583.4,556-574).
gagcaagtacaccatctat

SEQ ID NO: 591389 - DNA, 19 bp, Mus musculus
  siRNA target sequence for Isg20 (NM_020583.4,608-626).
gccaagctgcagtactaca

SEQ ID NO: 591390 - DNA, 19 bp, Mus musculus
  siRNA target sequence for Isg20 (NM_020583.4,651-669).
gtaagcgcctgctacacaa

SEQ ID NO: 591391 - DNA, 19 bp, Mus musculus
  siRNA target sequence for Isg20 (NM_020583.4,656-674).
cgcctgctacacaagaaca

SEQ ID NO: 591392 - DNA, 19 bp, Mus musculus
  siRNA target sequence for Smfn (NM_024233.2,207-225).
gatgacaggattggatatt

SEQ ID NO: 591393 - DNA, 19 bp, Mus musculus
  siRNA target sequence for Smfn (NM_024233.2,244-262).
gagatggcctgcctgataa

SEQ ID NO: 591394 - DNA, 19 bp, Mus musculus
  siRNA target sequence for Smfn (NM_024233.2,289-307).
gaaggtcccaacctgatta

SEQ ID NO: 591395 - DNA, 19 bp, Mus musculus
  siRNA target sequence for Smfn (NM_024233.2,292-310).
ggtcccaacctgattatca

SEQ ID NO: 591396 - DNA, 19 bp, Mus musculus
  siRNA target sequence for Smfn (NM_024233.2,293-311).
gtcccaacctgattatcaa

SEQ ID NO: 591397 - DNA, 19 bp, Mus musculus
  siRNA target sequence for Smfn (NM_024233.2,594-612).
ctggtatccagaagattat

SEQ ID NO: 591398 - DNA, 19 bp, Mus musculus
  siRNA target sequence for Smfn (NM_024233.2,647-665).
cactggatgacattagtga

SEQ ID NO: 591399 - DNA, 19 bp, Mus musculus
  siRNA target sequence for Smfn (NM_024233.2,691-709).
cgaaataacatcttcaaga

SEQ ID NO: 591400 - DNA, 19 bp, Mus musculus
  siRNA target sequence for Trex1 (NM_011637.4,1352-1370).
gcaccgacagactcacata

SEQ ID NO: 591401 - DNA, 19 bp, Mus musculus
  siRNA target sequence for Trex1 (NM_011637.4,1373-1391).
gctgaaggtgatgttctaa

SEQ ID NO: 591402 - DNA, 19 bp, Mus musculus
  siRNA target sequence for Trex1 (NM_011637.4,1582-1600).
gagcaggcgacctaagagt

SEQ ID NO: 591403 - DNA, 19 bp, Mus musculus
  siRNA target sequence for Trex2 (NM_011907.2,194-212).
cccagaacgggatgattct

SEQ ID NO: 591404 - DNA, 19 bp, Mus musculus
  siRNA target sequence for Trex2 (NM_011907.2,332-350).
cgggaaggctggtttcaat

SEQ ID NO: 591405 - DNA, 19 bp, Mus musculus
  siRNA target sequence for Trex2 (NM_011907.2,415-433).
cccacaatggcttcgatta

SEQ ID NO: 591406 - DNA, 19 bp, Mus musculus
  siRNA target sequence for Trex2 (NM_011907.2,416-434).
ccacaatggcttcgattat

SEQ ID NO: 591407 - DNA, 19 bp, Mus musculus
  siRNA target sequence for Trex2 (NM_011907.2,716-734).
ccgcagctgggctcatatt

SEQ ID NO: 591408 - DNA, 19 bp, Mus musculus
  siRNA target sequence for Trex2 (NM_011907.2,718-736).
gcagctgggctcatattga

SEQ ID NO: 591409 - DNA, 19 bp, Mus musculus
  siRNA target sequence for 2310005K03Rik (NM_027109.1,344-362).
ggacaacctggattccttt

SEQ ID NO: 591410 - DNA, 19 bp, Mus musculus
  siRNA target sequence for 2310005K03Rik (NM_027109.1,386-404).
gcaatgcgtggccttgtta

SEQ ID NO: 591411 - DNA, 19 bp, Mus musculus
  siRNA target sequence for 2310005K03Rik (NM_027109.1,387-405).
caatgcgtggccttgttat

SEQ ID NO: 591412 - DNA, 19 bp, Mus musculus
  siRNA target sequence for 2310005K03Rik (NM_027109.1,435-453).
ggactgaagcctttcgtat

SEQ ID NO: 591413 - DNA, 19 bp, Mus musculus
  siRNA target sequence for 2310005K03Rik (NM_027109.1,476-494).
ctgacactggccaagctaa

SEQ ID NO: 591414 - DNA, 19 bp, Mus musculus
  siRNA target sequence for 2310005K03Rik (NM_027109.1,502-520).
gtcagtgatggatacctta

SEQ ID NO: 591415 - DNA, 19 bp, Mus musculus
  siRNA target sequence for 2310005K03Rik (NM_027109.1,530-548).
ctagcccgatgtgatatca

SEQ ID NO: 591416 - DNA, 19 bp, Mus musculus
  siRNA target sequence for 2310005K03Rik (NM_027109.1,557-575).
caggaggtagtagattctt

SEQ ID NO: 591417 - DNA, 19 bp, Mus musculus
  siRNA target sequence for 2310005K03Rik (NM_027109.1,587-605).
gtcccctttctgcttcaaa

SEQ ID NO: 591418 - DNA, 19 bp, Mus musculus
  siRNA target sequence for 2310005K03Rik (NM_027109.1,656-674).
cgcagcacatacaaggaaa

SEQ ID NO: 591419 - DNA, 19 bp, Mus musculus
  siRNA target sequence for 2310005K03Rik (NM_027109.1,700-718).
caagacacaggtcctaaat

SEQ ID NO: 591420 - DNA, 19 bp, Mus musculus
  siRNA target sequence for 2310005K03Rik (NM_027109.1,705-723).
cacaggtcctaaatttcta

SEQ ID NO: 591421 - DNA, 19 bp, Mus musculus
  siRNA target sequence for 2310005K03Rik (NM_027109.1,713-731).
ctaaatttctaccaataca

SEQ ID NO: 591422 - DNA, 19 bp, Mus musculus
  siRNA target sequence for 2310005K03Rik (NM_027109.1,780-798).
ctctccctagcaaaactct

SEQ ID NO: 591423 - DNA, 19 bp, Mus musculus
  siRNA target sequence for 2310005K03Rik (NM_027109.1,853-871).
gctgaatgccctctatgat

SEQ ID NO: 591424 - DNA, 19 bp, Mus musculus
  siRNA target sequence for 2310005K03Rik (NM_027109.1,861-879).
ccctctatgatgtgtttct

SEQ ID NO: 591425 - DNA, 19 bp, Mus musculus
  siRNA target sequence for 2310005K03Rik (NM_027109.1,892-910).
gcgctggcagaatgagaat

SEQ ID NO: 591426 - DNA, 19 bp, Mus musculus
  siRNA target sequence for 2310005K03Rik (NM_027109.1,940-958).
ctgtgcatcgctgacaaaa

SEQ ID NO: 591427 - DNA, 19 bp, Mus musculus
  siRNA target sequence for 2310005K03Rik (NM_027109.1,952-970).
gacaaaaaaacgtctgaaa

SEQ ID NO: 591428 - DNA, 19 bp, Mus musculus
  siRNA target sequence for 2310005K03Rik (NM_027109.1,1013-1031).
cctgatggggaggatacta

SEQ ID NO: 591429 - DNA, 19 bp, Mus musculus
  siRNA target sequence for 2310005K03Rik (NM_027109.1,1042-1060).
cagtactaactgtacctat

SEQ ID NO: 591430 - DNA, 19 bp, Mus musculus
  siRNA target sequence for 2310005K03Rik (NM_027109.1,1106-1124).
gctgcagctacctttgact

SEQ ID NO: 591431 - DNA, 19 bp, Mus musculus
  siRNA target sequence for 2310005K03Rik (NM_027109.1,1218-1236).
gtatcccaccccactactt

SEQ ID NO: 591432 - DNA, 19 bp, Mus musculus
  siRNA target sequence for Dnase1l2 (NM_025718.1,369-387).
gcggattggagccttcaat

SEQ ID NO: 591433 - DNA, 19 bp, Mus musculus
  siRNA target sequence for Dnase1l2 (NM_025718.1,371-389).
ggattggagccttcaatgt

SEQ ID NO: 591434 - DNA, 19 bp, Mus musculus
  siRNA target sequence for Dnase1l2 (NM_025718.1,372-390).
gattggagccttcaatgtt

SEQ ID NO: 591435 - DNA, 19 bp, Mus musculus
  siRNA target sequence for Dnase1l2 (NM_025718.1,512-530).
ccttgctcatggagcaaat

SEQ ID NO: 591436 - DNA, 19 bp, Mus musculus
  siRNA target sequence for Dnase1l2 (NM_025718.1,547-565).
cacgagtacggctttgtga

SEQ ID NO: 591437 - DNA, 19 bp, Mus musculus
  siRNA target sequence for Dnase1l2 (NM_025718.1,583-601).
cgtgaccagtacaaggaaa

SEQ ID NO: 591438 - DNA, 19 bp, Mus musculus
  siRNA target sequence for Dffb (NM_007859.2,520-538).
cacgtgagccagaatatta

SEQ ID NO: 591439 - DNA, 19 bp, Mus musculus
  siRNA target sequence for Dffb (NM_007859.2,522-540).
cgtgagccagaatattact

SEQ ID NO: 591440 - DNA, 19 bp, Mus musculus
  siRNA target sequence for Dffb (NM_007859.2,634-652).
cggatccggggttacctaa

SEQ ID NO: 591441 - DNA, 19 bp, Mus musculus
  siRNA target sequence for Dffb (NM_007859.2,748-766).
cagtacaatggcagctatt

SEQ ID NO: 591442 - DNA, 19 bp, Mus musculus
  siRNA target sequence for Dffb (NM_007859.2,911-929).
cctggaacctggatcatat

SEQ ID NO: 591443 - DNA, 19 bp, Mus musculus
  siRNA target sequence for Dffb (NM_007859.2,912-930).
ctggaacctggatcatata

SEQ ID NO: 591444 - DNA, 19 bp, Mus musculus
  siRNA target sequence for Dffb (NM_007859.2,991-1009).
gtgaactgggagtacttct

SEQ ID NO: 591445 - DNA, 19 bp, Mus musculus
  siRNA target sequence for Dffb (NM_007859.2,1089-1107).
cgaccgcagtaggatctat

SEQ ID NO: 591446 - DNA, 19 bp, Mus musculus
  siRNA target sequence for Pla2g6 (NM_016915.2,152-170).
gtagcgtcaccaacttgtt

SEQ ID NO: 591447 - DNA, 19 bp, Mus musculus
  siRNA target sequence for Pla2g6 (NM_016915.2,350-368).
cagacgccctggtgaactt

SEQ ID NO: 591448 - DNA, 19 bp, Mus musculus
  siRNA target sequence for Pla2g6 (NM_016915.2,570-588).
gggctgcaccccactacat

SEQ ID NO: 591449 - DNA, 19 bp, Mus musculus
  siRNA target sequence for Pla2g6 (NM_016915.2,622-640).
gtggagctggtacaatact

SEQ ID NO: 591450 - DNA, 19 bp, Mus musculus
  siRNA target sequence for Pla2g6 (NM_016915.2,752-770).
gcctgaaccaggtaaacaa

SEQ ID NO: 591451 - DNA, 19 bp, Mus musculus
  siRNA target sequence for Pla2g6 (NM_016915.2,827-845).
gcgtcctgctgctctgtaa

SEQ ID NO: 591452 - DNA, 19 bp, Mus musculus
  siRNA target sequence for Pla2g6 (NM_016915.2,828-846).
cgtcctgctgctctgtaat

SEQ ID NO: 591453 - DNA, 19 bp, Mus musculus
  siRNA target sequence for Pla2g6 (NM_016915.2,914-932).
ggtgtgctgaaatgattat

SEQ ID NO: 591454 - DNA, 19 bp, Mus musculus
  siRNA target sequence for Pla2g6 (NM_016915.2,1128-1146).
gacctacggggctaatgca

SEQ ID NO: 591455 - DNA, 19 bp, Mus musculus
  siRNA target sequence for Pla2g6 (NM_016915.2,1182-1200).
cctggccatgtcgaaagat

SEQ ID NO: 591456 - DNA, 19 bp, Mus musculus
  siRNA target sequence for Pla2g6 (NM_016915.2,1187-1205).
ccatgtcgaaagataacat

SEQ ID NO: 591457 - DNA, 19 bp, Mus musculus
  siRNA target sequence for Pla2g6 (NM_016915.2,1212-1230).
ggtcaaagccctcattgta

SEQ ID NO: 591458 - DNA, 19 bp, Mus musculus
  siRNA target sequence for Pla2g6 (NM_016915.2,1215-1233).
caaagccctcattgtattt

SEQ ID NO: 591459 - DNA, 19 bp, Mus musculus
  siRNA target sequence for Pla2g6 (NM_016915.2,1265-1283).
gggagactcctgcattgat

SEQ ID NO: 591460 - DNA, 19 bp, Mus musculus
  siRNA target sequence for Pla2g6 (NM_016915.2,1417-1435).
gtgaaaggcctggtcatta

SEQ ID NO: 591461 - DNA, 19 bp, Mus musculus
  siRNA target sequence for Pla2g6 (NM_016915.2,1534-1552).
gccattctgcacagtaaat

SEQ ID NO: 591462 - DNA, 19 bp, Mus musculus
  siRNA target sequence for Pla2g6 (NM_016915.2,1547-1565).
gtaaatccatggcctatat

SEQ ID NO: 591463 - DNA, 19 bp, Mus musculus
  siRNA target sequence for Pla2g6 (NM_016915.2,1571-1589).
gtgtgtacttccgtatgaa

SEQ ID NO: 591464 - DNA, 19 bp, Mus musculus
  siRNA target sequence for Pla2g6 (NM_016915.2,1746-1764).
cctattccggaattacgat

SEQ ID NO: 591465 - DNA, 19 bp, Mus musculus
  siRNA target sequence for Pla2g6 (NM_016915.2,1790-1808).
gctgcaaccaaaacattaa

SEQ ID NO: 591466 - DNA, 19 bp, Mus musculus
  siRNA target sequence for Pla2g6 (NM_016915.2,1793-1811).
gcaaccaaaacattaacct

SEQ ID NO: 591467 - DNA, 19 bp, Mus musculus
  siRNA target sequence for Pla2g6 (NM_016915.2,2058-2076).
gcctgtaacctgtgtagat

SEQ ID NO: 591468 - DNA, 19 bp, Mus musculus
  siRNA target sequence for Pla2g6 (NM_016915.2,2099-2117).
gggaactggccaaaactgt

SEQ ID NO: 591469 - DNA, 19 bp, Mus musculus
  siRNA target sequence for Pla2g6 (NM_016915.2,2100-2118).
ggaactggccaaaactgtt

SEQ ID NO: 591470 - DNA, 19 bp, Mus musculus
  siRNA target sequence for Pla2g6 (NM_016915.2,2101-2119).
gaactggccaaaactgttt

SEQ ID NO: 591471 - DNA, 19 bp, Mus musculus
  siRNA target sequence for Pla2g6 (NM_016915.2,2212-2230).
gtcggcatccagtacttca

SEQ ID NO: 591472 - DNA, 19 bp, Mus musculus
  siRNA target sequence for Pla2g6 (NM_016915.2,2307-2325).
gaccgaggtctacatctat

SEQ ID NO: 591473 - DNA, 19 bp, Mus musculus
  siRNA target sequence for Lypla1 (NM_008866.2,158-176).
gtccccacatcaaatacat

SEQ ID NO: 591474 - DNA, 19 bp, Mus musculus
  siRNA target sequence for Lypla1 (NM_008866.2,191-209).
ctgtgatgccagtcacatt

SEQ ID NO: 591475 - DNA, 19 bp, Mus musculus
  siRNA target sequence for Lypla1 (NM_008866.2,222-240).
ggctatgccttcttggttt

SEQ ID NO: 591476 - DNA, 19 bp, Mus musculus
  siRNA target sequence for Lypla1 (NM_008866.2,230-248).
cttcttggtttgatatcgt

SEQ ID NO: 591477 - DNA, 19 bp, Mus musculus
  siRNA target sequence for Lypla1 (NM_008866.2,305-323).
ccgtaaaagccttgataga

SEQ ID NO: 591478 - DNA, 19 bp, Mus musculus
  siRNA target sequence for Lypla1 (NM_008866.2,306-324).
cgtaaaagccttgatagat

SEQ ID NO: 591479 - DNA, 19 bp, Mus musculus
  siRNA target sequence for Lypla1 (NM_008866.2,314-332).
ccttgatagatcaagaagt

SEQ ID NO: 591480 - DNA, 19 bp, Mus musculus
  siRNA target sequence for Lypla1 (NM_008866.2,379-397).
cagggaggcgccttgtctt

SEQ ID NO: 591481 - DNA, 19 bp, Mus musculus
  siRNA target sequence for Lypla1 (NM_008866.2,383-401).
gaggcgccttgtctttata

SEQ ID NO: 591482 - DNA, 19 bp, Mus musculus
  siRNA target sequence for Lypla1 (NM_008866.2,385-403).
ggcgccttgtctttataca

SEQ ID NO: 591483 - DNA, 19 bp, Mus musculus
  siRNA target sequence for Lypla1 (NM_008866.2,387-405).
cgccttgtctttatacact

SEQ ID NO: 591484 - DNA, 19 bp, Mus musculus
  siRNA target sequence for Lypla1 (NM_008866.2,460-478).
ccacttcgggcttcgtttt

SEQ ID NO: 591485 - DNA, 19 bp, Mus musculus
  siRNA target sequence for Lypla1 (NM_008866.2,486-504).
gccgatcaacagtgctaat

SEQ ID NO: 591486 - DNA, 19 bp, Mus musculus
  siRNA target sequence for Lypla1 (NM_008866.2,489-507).
gatcaacagtgctaatcga

SEQ ID NO: 591487 - DNA, 19 bp, Mus musculus
  siRNA target sequence for Lypla1 (NM_008866.2,495-513).
cagtgctaatcgagatatt

SEQ ID NO: 591488 - DNA, 19 bp, Mus musculus
  siRNA target sequence for Lypla1 (NM_008866.2,545-563).
ctttagttcccctaatgtt

SEQ ID NO: 591489 - DNA, 19 bp, Mus musculus
  siRNA target sequence for Lypla1 (NM_008866.2,597-615).
gataaatccagccaatgta

SEQ ID NO: 591490 - DNA, 19 bp, Mus musculus
  siRNA target sequence for Lypla1 (NM_008866.2,608-626).
ccaatgtaaccttcaaaat

SEQ ID NO: 591491 - DNA, 19 bp, Mus musculus
  siRNA target sequence for Lypla1 (NM_008866.2,647-665).
gctcatgtcagcaggaaat

SEQ ID NO: 591492 - DNA, 19 bp, Mus musculus
  siRNA target sequence for Lypla1 (NM_008866.2,693-711).
gctcctacctccaattgat

SEQ ID NO: 591493 - DNA, 19 bp, Mus musculus
  siRNA target sequence for 2310026J01Rik (NM_177845.2,1741-1759).
gccctgctaccccaattct

SEQ ID NO: 591494 - DNA, 19 bp, Mus musculus
  siRNA target sequence for 2310026J01Rik (NM_177845.2,1809-1827).
cgcctaagagccactgtaa

SEQ ID NO: 591495 - DNA, 19 bp, Mus musculus
  siRNA target sequence for 2310026J01Rik (NM_177845.2,2089-2107).
ggatgaggtaccgataata

SEQ ID NO: 591496 - DNA, 19 bp, Mus musculus
  siRNA target sequence for 2310026J01Rik (NM_177845.2,2137-2155).
gtctatggtctccttgtat

SEQ ID NO: 591497 - DNA, 19 bp, Mus musculus
  siRNA target sequence for 2310026J01Rik (NM_177845.2,2192-2210).
gacgcttctacttacatca

SEQ ID NO: 591498 - DNA, 19 bp, Mus musculus
  siRNA target sequence for 2310026J01Rik (NM_177845.2,2259-2277).
ctgagtggtcctccaaaaa

SEQ ID NO: 591499 - DNA, 19 bp, Mus musculus
  siRNA target sequence for 2310026J01Rik (NM_177845.2,2361-2379).
ggcgagaggacctccaaaa

SEQ ID NO: 591500 - DNA, 19 bp, Mus musculus
  siRNA target sequence for 2310026J01Rik (NM_177845.2,2366-2384).
gaggacctccaaaagcata

SEQ ID NO: 591501 - DNA, 19 bp, Mus musculus
  siRNA target sequence for 2310026J01Rik (NM_177845.2,2395-2413).
ctataagaccacgtttaca

SEQ ID NO: 591502 - DNA, 19 bp, Mus musculus
  siRNA target sequence for 2310026J01Rik (NM_177845.2,2401-2419).
gaccacgtttacagacttt

SEQ ID NO: 591503 - DNA, 19 bp, Mus musculus
  siRNA target sequence for 2310026J01Rik (NM_177845.2,2440-2458).
cagtctgggagataaaaaa

SEQ ID NO: 591504 - DNA, 19 bp, Mus musculus
  siRNA target sequence for 2310026J01Rik (NM_177845.2,2623-2641).
catccccagcgagttattt

SEQ ID NO: 591505 - DNA, 19 bp, Mus musculus
  siRNA target sequence for 2310026J01Rik (NM_177845.2,2705-2723).
ctaggtgactccctaagat

SEQ ID NO: 591506 - DNA, 19 bp, Mus musculus
  siRNA target sequence for 2310026J01Rik (NM_177845.2,2708-2726).
ggtgactccctaagatact

SEQ ID NO: 591507 - DNA, 19 bp, Mus musculus
  siRNA target sequence for E330036I19Rik (NM_144915.2,1071-1089).
gatttcattcacataagct

SEQ ID NO: 591508 - DNA, 19 bp, Mus musculus
  siRNA target sequence for E330036I19Rik (NM_144915.2,1253-1271).
ggcccacaagggaattgct

SEQ ID NO: 591509 - DNA, 19 bp, Mus musculus
  siRNA target sequence for E330036I19Rik (NM_144915.2,1269-1287).
gctcaagcggccagataca

SEQ ID NO: 591510 - DNA, 19 bp, Mus musculus
  siRNA target sequence for E330036I19Rik (NM_144915.2,1270-1288).
ctcaagcggccagatacat

SEQ ID NO: 591511 - DNA, 19 bp, Mus musculus
  siRNA target sequence for E330036I19Rik (NM_144915.2,1292-1310).
ccgcagactggtcaatgat

SEQ ID NO: 591512 - DNA, 19 bp, Mus musculus
  siRNA target sequence for E330036I19Rik (NM_144915.2,1424-1442).
cccacaagtccgtgcttat

SEQ ID NO: 591513 - DNA, 19 bp, Mus musculus
  siRNA target sequence for E330036I19Rik (NM_144915.2,1527-1545).
gatgtgatccccaggttaa

SEQ ID NO: 591514 - DNA, 19 bp, Mus musculus
  siRNA target sequence for E330036I19Rik (NM_144915.2,1587-1605).
gtgatcgctaactgcaata

SEQ ID NO: 591515 - DNA, 19 bp, Mus musculus
  siRNA target sequence for E330036I19Rik (NM_144915.2,1600-1618).
gcaataagccgaagtacaa

SEQ ID NO: 591516 - DNA, 19 bp, Mus musculus
  siRNA target sequence for E330036I19Rik (NM_144915.2,1654-1672).
gaggaagccctgataactt

SEQ ID NO: 591517 - DNA, 19 bp, Mus musculus
  siRNA target sequence for Pnliprp2 (NM_011128.1,194-212).
gccctgggcagggatgatt

SEQ ID NO: 591518 - DNA, 19 bp, Mus musculus
  siRNA target sequence for Pnliprp2 (NM_011128.1,213-231).
cagcggccttcgaagatat

SEQ ID NO: 591519 - DNA, 19 bp, Mus musculus
  siRNA target sequence for Pnliprp2 (NM_011128.1,238-256).
ggtccccagaggacattga

SEQ ID NO: 591520 - DNA, 19 bp, Mus musculus
  siRNA target sequence for Pnliprp2 (NM_011128.1,239-257).
gtccccagaggacattgat

SEQ ID NO: 591521 - DNA, 19 bp, Mus musculus
  siRNA target sequence for Pnliprp2 (NM_011128.1,261-279).
cgctttcttctgtacacaa

SEQ ID NO: 591522 - DNA, 19 bp, Mus musculus
  siRNA target sequence for Pnliprp2 (NM_011128.1,317-335).
cgacccagccaccatcaat

SEQ ID NO: 591523 - DNA, 19 bp, Mus musculus
  siRNA target sequence for Pnliprp2 (NM_011128.1,356-374).
ccgcaagacacgtttcatt

SEQ ID NO: 591524 - DNA, 19 bp, Mus musculus
  siRNA target sequence for Pnliprp2 (NM_011128.1,357-375).
cgcaagacacgtttcatta

SEQ ID NO: 591525 - DNA, 19 bp, Mus musculus
  siRNA target sequence for Pnliprp2 (NM_011128.1,358-376).
gcaagacacgtttcattat

SEQ ID NO: 591526 - DNA, 19 bp, Mus musculus
  siRNA target sequence for Pnliprp2 (NM_011128.1,443-461).
ggagaaagtgaactgtatt

SEQ ID NO: 591527 - DNA, 19 bp, Mus musculus
  siRNA target sequence for Pnliprp2 (NM_011128.1,477-495).
cgcggatccaggactgaat

SEQ ID NO: 591528 - DNA, 19 bp, Mus musculus
  siRNA target sequence for Pnliprp2 (NM_011128.1,478-496).
gcggatccaggactgaata

SEQ ID NO: 591529 - DNA, 19 bp, Mus musculus
  siRNA target sequence for Pnliprp2 (NM_011128.1,776-794).
ccccataatcccctatcta

SEQ ID NO: 591530 - DNA, 19 bp, Mus musculus
  siRNA target sequence for Pnliprp2 (NM_011128.1,818-836).
cggccatctggatttcttt

SEQ ID NO: 591531 - DNA, 19 bp, Mus musculus
  siRNA target sequence for Pnliprp2 (NM_011128.1,837-855).
cccaacggagggaaggaaa

SEQ ID NO: 591532 - DNA, 19 bp, Mus musculus
  siRNA target sequence for Pnliprp2 (NM_011128.1,838-856).
ccaacggagggaaggaaat

SEQ ID NO: 591533 - DNA, 19 bp, Mus musculus
  siRNA target sequence for Pnliprp2 (NM_011128.1,878-896).
cctttccaccattgttgat

SEQ ID NO: 591534 - DNA, 19 bp, Mus musculus
  siRNA target sequence for Pnliprp2 (NM_011128.1,883-901).
ccaccattgttgatatcaa

SEQ ID NO: 591535 - DNA, 19 bp, Mus musculus
  siRNA target sequence for Pnliprp2 (NM_011128.1,945-963).
ctacggagctacaagtact

SEQ ID NO: 591536 - DNA, 19 bp, Mus musculus
  siRNA target sequence for Pnliprp2 (NM_011128.1,1079-1097).
gcactatgctgatcaattt

SEQ ID NO: 591537 - DNA, 19 bp, Mus musculus
  siRNA target sequence for Pnliprp2 (NM_011128.1,1164-1182).
cgttggagatacaaagtat

SEQ ID NO: 591538 - DNA, 19 bp, Mus musculus
  siRNA target sequence for Pnliprp2 (NM_011128.1,1168-1186).
ggagatacaaagtatcagt

SEQ ID NO: 591539 - DNA, 19 bp, Mus musculus
  siRNA target sequence for Pnliprp2 (NM_011128.1,1300-1318).
gatatattcgtgacattga

SEQ ID NO: 591540 - DNA, 19 bp, Mus musculus
  siRNA target sequence for Pnliprp2 (NM_011128.1,1364-1382).
gaacaacaaggtgataaat

SEQ ID NO: 591541 - DNA, 19 bp, Mus musculus
  siRNA target sequence for Pnliprp2 (NM_011128.1,1434-1452).
gacgggaaagagttcaact

SEQ ID NO: 591542 - DNA, 19 bp, Mus musculus
  siRNA target sequence for Pnliprp2 (NM_011128.1,1437-1455).
gggaaagagttcaacttct

SEQ ID NO: 591543 - DNA, 19 bp, Mus musculus
  siRNA target sequence for Acate3 (NM_022816.1,226-244).
gcgggagatagtaggtatt

SEQ ID NO: 591544 - DNA, 19 bp, Mus musculus
  siRNA target sequence for Acate3 (NM_022816.1,227-245).
cgggagatagtaggtattt

SEQ ID NO: 591545 - DNA, 19 bp, Mus musculus
  siRNA target sequence for Acate3 (NM_022816.1,1189-1207).
ccagggtaattacattcaa

SEQ ID NO: 591546 - DNA, 19 bp, Mus musculus
  siRNA target sequence for Ache (NM_009599.2,319-337).
ctgtgggctcacgtagatt

SEQ ID NO: 591547 - DNA, 19 bp, Mus musculus
  siRNA target sequence for Ache (NM_009599.2,321-339).
gtgggctcacgtagattta

SEQ ID NO: 591548 - DNA, 19 bp, Mus musculus
  siRNA target sequence for Ache (NM_009599.2,577-595).
cggcctccttggatgtgta

SEQ ID NO: 591549 - DNA, 19 bp, Mus musculus
  siRNA target sequence for Ache (NM_009599.2,578-596).
ggcctccttggatgtgtat

SEQ ID NO: 591550 - DNA, 19 bp, Mus musculus
  siRNA target sequence for Ache (NM_009599.2,627-645).
gctgtgttggtatctatga

SEQ ID NO: 591551 - DNA, 19 bp, Mus musculus
  siRNA target sequence for Ache (NM_009599.2,628-646).
ctgtgttggtatctatgaa

SEQ ID NO: 591552 - DNA, 19 bp, Mus musculus
  siRNA target sequence for Ache (NM_009599.2,630-648).
gtgttggtatctatgaact

SEQ ID NO: 591553 - DNA, 19 bp, Mus musculus
  siRNA target sequence for Ache (NM_009599.2,647-665).
ctaccgagtgggaaccttt

SEQ ID NO: 591554 - DNA, 19 bp, Mus musculus
  siRNA target sequence for Ache (NM_009599.2,822-840).
gtgggcatgcacatactgt

SEQ ID NO: 591555 - DNA, 19 bp, Mus musculus
  siRNA target sequence for Ache (NM_009599.2,1133-1151).
ggaggctctcatcaatact

SEQ ID NO: 591556 - DNA, 19 bp, Mus musculus
  siRNA target sequence for Ache (NM_009599.2,1193-1211).
ggacgagggctcctacttt

SEQ ID NO: 591557 - DNA, 19 bp, Mus musculus
  siRNA target sequence for Ache (NM_009599.2,1467-1485).
cgggtctatgcctacatct

SEQ ID NO: 591558 - DNA, 19 bp, Mus musculus
  siRNA target sequence for Ache (NM_009599.2,1468-1486).
gggtctatgcctacatctt

SEQ ID NO: 591559 - DNA, 19 bp, Mus musculus
  siRNA target sequence for Ache (NM_009599.2,1469-1487).
ggtctatgcctacatcttt

SEQ ID NO: 591560 - DNA, 19 bp, Mus musculus
  siRNA target sequence for Ache (NM_009599.2,1529-1547).
ggtgccccatggctatgaa

SEQ ID NO: 591561 - DNA, 19 bp, Mus musculus
  siRNA target sequence for Ache (NM_009599.2,1534-1552).
cccatggctatgaaatcga

SEQ ID NO: 591562 - DNA, 19 bp, Mus musculus
  siRNA target sequence for Ache (NM_009599.2,1575-1593).
gatccctcgctgaactaca

SEQ ID NO: 591563 - DNA, 19 bp, Mus musculus
  siRNA target sequence for Ache (NM_009599.2,1614-1632).
gctcagcgacttatgaaat

SEQ ID NO: 591564 - DNA, 19 bp, Mus musculus
  siRNA target sequence for Ache (NM_009599.2,1617-1635).
cagcgacttatgaaatact

SEQ ID NO: 591565 - DNA, 19 bp, Mus musculus
  siRNA target sequence for Ache (NM_009599.2,1670-1688).
ccctcgagactccaaatct

SEQ ID NO: 591566 - DNA, 19 bp, Mus musculus
  siRNA target sequence for Ache (NM_009599.2,1905-1923).
cagttcgaccactatagca

SEQ ID NO: 591567 - DNA, 19 bp, Mus musculus
  siRNA target sequence for Bche (NM_009738.1,49-67).
cccacttcctcctatggat

SEQ ID NO: 591568 - DNA, 19 bp, Mus musculus
  siRNA target sequence for Bche (NM_009738.1,50-68).
ccacttcctcctatggatt

SEQ ID NO: 591569 - DNA, 19 bp, Mus musculus
  siRNA target sequence for Bche (NM_009738.1,92-110).
gaagtcacacactgaagaa

SEQ ID NO: 591570 - DNA, 19 bp, Mus musculus
  siRNA target sequence for Bche (NM_009738.1,105-123).
gaagaagacttcataatta

SEQ ID NO: 591571 - DNA, 19 bp, Mus musculus
  siRNA target sequence for Bche (NM_009738.1,108-126).
gaagacttcataattacaa

SEQ ID NO: 591572 - DNA, 19 bp, Mus musculus
  siRNA target sequence for Bche (NM_009738.1,216-234).
ctgggtagcctaagattca

SEQ ID NO: 591573 - DNA, 19 bp, Mus musculus
  siRNA target sequence for Bche (NM_009738.1,218-236).
gggtagcctaagattcaaa

SEQ ID NO: 591574 - DNA, 19 bp, Mus musculus
  siRNA target sequence for Bche (NM_009738.1,219-237).
ggtagcctaagattcaaaa

SEQ ID NO: 591575 - DNA, 19 bp, Mus musculus
  siRNA target sequence for Bche (NM_009738.1,239-257).
gccgcaacccttaaacaaa

SEQ ID NO: 591576 - DNA, 19 bp, Mus musculus
  siRNA target sequence for Bche (NM_009738.1,240-258).
ccgcaacccttaaacaaat

SEQ ID NO: 591577 - DNA, 19 bp, Mus musculus
  siRNA target sequence for Bche (NM_009738.1,269-287).
ccataatgccactcaatat

SEQ ID NO: 591578 - DNA, 19 bp, Mus musculus
  siRNA target sequence for Bche (NM_009738.1,288-306).
gcaaattcttgttatcaga

SEQ ID NO: 591579 - DNA, 19 bp, Mus musculus
  siRNA target sequence for Bche (NM_009738.1,328-346).
gcttccaggggtcagaaat

SEQ ID NO: 591580 - DNA, 19 bp, Mus musculus
  siRNA target sequence for Bche (NM_009738.1,443-461).
ctatggtggtggctttcaa

SEQ ID NO: 591581 - DNA, 19 bp, Mus musculus
  siRNA target sequence for Bche (NM_009738.1,472-490).
cttctctacctgtttacga

SEQ ID NO: 591582 - DNA, 19 bp, Mus musculus
  siRNA target sequence for Bche (NM_009738.1,497-515).
gtttctagctcgtgttgaa

SEQ ID NO: 591583 - DNA, 19 bp, Mus musculus
  siRNA target sequence for Bche (NM_009738.1,505-523).
ctcgtgttgaaagagttat

SEQ ID NO: 591584 - DNA, 19 bp, Mus musculus
  siRNA target sequence for Bche (NM_009738.1,508-526).
gtgttgaaagagttattgt

SEQ ID NO: 591585 - DNA, 19 bp, Mus musculus
  siRNA target sequence for Bche (NM_009738.1,517-535).
gagttattgtagtttcgat

SEQ ID NO: 591586 - DNA, 19 bp, Mus musculus
  siRNA target sequence for Bche (NM_009738.1,553-571).
ctctaggattcctagcttt

SEQ ID NO: 591587 - DNA, 19 bp, Mus musculus
  siRNA target sequence for Bche (NM_009738.1,595-613).
gaaacatgggtttatttga

SEQ ID NO: 591588 - DNA, 19 bp, Mus musculus
  siRNA target sequence for Bche (NM_009738.1,604-622).
gtttatttgatcaacagtt

SEQ ID NO: 591589 - DNA, 19 bp, Mus musculus
  siRNA target sequence for Bche (NM_009738.1,615-633).
caacagttggcacttcaat

SEQ ID NO: 591590 - DNA, 19 bp, Mus musculus
  siRNA target sequence for Bche (NM_009738.1,654-672).
gcttttggagggaatccta

SEQ ID NO: 591591 - DNA, 19 bp, Mus musculus
  siRNA target sequence for Bche (NM_009738.1,660-678).
ggagggaatcctaaaagta

SEQ ID NO: 591592 - DNA, 19 bp, Mus musculus
  siRNA target sequence for Bche (NM_009738.1,669-687).
cctaaaagtataacgattt

SEQ ID NO: 591593 - DNA, 19 bp, Mus musculus
  siRNA target sequence for Bche (NM_009738.1,699-717).
gcaggggcagcttcagtta

SEQ ID NO: 591594 - DNA, 19 bp, Mus musculus
  siRNA target sequence for Bche (NM_009738.1,703-721).
gggcagcttcagttagctt

SEQ ID NO: 591595 - DNA, 19 bp, Mus musculus
  siRNA target sequence for Bche (NM_009738.1,704-722).
ggcagcttcagttagctta

SEQ ID NO: 591596 - DNA, 19 bp, Mus musculus
  siRNA target sequence for Bche (NM_009738.1,712-730).
cagttagcttacatttgct

SEQ ID NO: 591597 - DNA, 19 bp, Mus musculus
  siRNA target sequence for Bche (NM_009738.1,728-746).
gctctgcccccaaagttat

SEQ ID NO: 591598 - DNA, 19 bp, Mus musculus
  siRNA target sequence for Bche (NM_009738.1,829-847).
gaaccttgaccttagctaa

SEQ ID NO: 591599 - DNA, 19 bp, Mus musculus
  siRNA target sequence for Bche (NM_009738.1,833-851).
cttgaccttagctaaattt

SEQ ID NO: 591600 - DNA, 19 bp, Mus musculus
  siRNA target sequence for Bche (NM_009738.1,836-854).
gaccttagctaaatttact

SEQ ID NO: 591601 - DNA, 19 bp, Mus musculus
  siRNA target sequence for Bche (NM_009738.1,914-932).
ggaaattcttcgcaatgaa

SEQ ID NO: 591602 - DNA, 19 bp, Mus musculus
  siRNA target sequence for Bche (NM_009738.1,945-963).
ccctctgattccatcttat

SEQ ID NO: 591603 - DNA, 19 bp, Mus musculus
  siRNA target sequence for Bche (NM_009738.1,984-1002).
gtggatggcgattttctca

SEQ ID NO: 591604 - DNA, 19 bp, Mus musculus
  siRNA target sequence for Bche (NM_009738.1,1023-1041).
ctccaactaggaaaagtga

SEQ ID NO: 591605 - DNA, 19 bp, Mus musculus
  siRNA target sequence for Bche (NM_009738.1,1026-1044).
caactaggaaaagtgaaaa

SEQ ID NO: 591606 - DNA, 19 bp, Mus musculus
  siRNA target sequence for Bche (NM_009738.1,1061-1079).
gggagttaacaaagatgaa

SEQ ID NO: 591607 - DNA, 19 bp, Mus musculus
  siRNA target sequence for Bche (NM_009738.1,1124-1142).
caatgatagccttatcaca

SEQ ID NO: 591608 - DNA, 19 bp, Mus musculus
  siRNA target sequence for Bche (NM_009738.1,1134-1152).
cttatcacaaggaaggaat

SEQ ID NO: 591609 - DNA, 19 bp, Mus musculus
  siRNA target sequence for Bche (NM_009738.1,1148-1166).
ggaatttcaagaaggttta

SEQ ID NO: 591610 - DNA, 19 bp, Mus musculus
  siRNA target sequence for Bche (NM_009738.1,1256-1274).
ctaccgtgacgctttggat

SEQ ID NO: 591611 - DNA, 19 bp, Mus musculus
  siRNA target sequence for Bche (NM_009738.1,1265-1283).
cgctttggatgatgttatt

SEQ ID NO: 591612 - DNA, 19 bp, Mus musculus
  siRNA target sequence for Bche (NM_009738.1,1275-1293).
gatgttattggagattaca

SEQ ID NO: 591613 - DNA, 19 bp, Mus musculus
  siRNA target sequence for Bche (NM_009738.1,1278-1296).
gttattggagattacaaca

SEQ ID NO: 591614 - DNA, 19 bp, Mus musculus
  siRNA target sequence for Bche (NM_009738.1,1305-1323).
cctgcactggagtttacca

SEQ ID NO: 591615 - DNA, 19 bp, Mus musculus
  siRNA target sequence for Bche (NM_009738.1,1311-1329).
ctggagtttaccaagaaat

SEQ ID NO: 591616 - DNA, 19 bp, Mus musculus
  siRNA target sequence for Bche (NM_009738.1,1335-1353).
gagcttgaaaacaatgctt

SEQ ID NO: 591617 - DNA, 19 bp, Mus musculus
  siRNA target sequence for Bche (NM_009738.1,1367-1385).
cgaacatcgatcttccaaa

SEQ ID NO: 591618 - DNA, 19 bp, Mus musculus
  siRNA target sequence for Bche (NM_009738.1,1455-1473).
ggaagaagagttaattata

SEQ ID NO: 591619 - DNA, 19 bp, Mus musculus
  siRNA target sequence for Bche (NM_009738.1,1474-1492).
cgagagctgaggaaatctt

SEQ ID NO: 591620 - DNA, 19 bp, Mus musculus
  siRNA target sequence for Bche (NM_009738.1,1475-1493).
gagagctgaggaaatcttt

SEQ ID NO: 591621 - DNA, 19 bp, Mus musculus
  siRNA target sequence for Bche (NM_009738.1,1497-1515).
cgatccataatgaaaactt

SEQ ID NO: 591622 - DNA, 19 bp, Mus musculus
  siRNA target sequence for Bche (NM_009738.1,1554-1572).
cagggcaatagcacaatgt

SEQ ID NO: 591623 - DNA, 19 bp, Mus musculus
  siRNA target sequence for Bche (NM_009738.1,1574-1592).
gcctgtcttcacaagtact

SEQ ID NO: 591624 - DNA, 19 bp, Mus musculus
  siRNA target sequence for Bche (NM_009738.1,1580-1598).
cttcacaagtactgaacaa

SEQ ID NO: 591625 - DNA, 19 bp, Mus musculus
  siRNA target sequence for Bche (NM_009738.1,1583-1601).
cacaagtactgaacaaaaa

SEQ ID NO: 591626 - DNA, 19 bp, Mus musculus
  siRNA target sequence for Bche (NM_009738.1,1625-1643).
gtcaaaaatatactctaaa

SEQ ID NO: 591627 - DNA, 19 bp, Mus musculus
  siRNA target sequence for Bche (NM_009738.1,1662-1680).
cagttctggagactatttt

SEQ ID NO: 591628 - DNA, 19 bp, Mus musculus
  siRNA target sequence for Bche (NM_009738.1,1730-1748).
gtggaaggcaggatttcat

SEQ ID NO: 591629 - DNA, 19 bp, Mus musculus
  siRNA target sequence for Bche (NM_009738.1,1746-1764).
catcgctggagcaattaca

SEQ ID NO: 591630 - DNA, 19 bp, Mus musculus
  siRNA target sequence for Bche (NM_009738.1,1749-1767).
cgctggagcaattacatga

SEQ ID NO: 591631 - DNA, 19 bp, Mus musculus
  siRNA target sequence for Bche (NM_009738.1,1750-1768).
gctggagcaattacatgat

SEQ ID NO: 591632 - DNA, 19 bp, Mus musculus
  siRNA target sequence for Bche (NM_009738.1,1763-1781).
catgatggactggcaaaat

SEQ ID NO: 591633 - DNA, 19 bp, Mus musculus
  siRNA target sequence for Bche (NM_009738.1,1770-1788).
gactggcaaaatcaattta

SEQ ID NO: 591634 - DNA, 19 bp, Mus musculus
  siRNA target sequence for Bche (NM_009738.1,1774-1792).
ggcaaaatcaatttaacga

SEQ ID NO: 591635 - DNA, 19 bp, Mus musculus
  siRNA target sequence for Bche (NM_009738.1,1775-1793).
gcaaaatcaatttaacgat

SEQ ID NO: 591636 - DNA, 19 bp, Mus musculus
  siRNA target sequence for Bche (NM_009738.1,1776-1794).
caaaatcaatttaacgatt

SEQ ID NO: 591637 - DNA, 19 bp, Mus musculus
  siRNA target sequence for Bche (NM_009738.1,1790-1808).
cgattacactagcaagaaa

SEQ ID NO: 591638 - DNA, 19 bp, Mus musculus
  siRNA target sequence for Cel (NM_009885.1,8-26).
gcctggaggttctatttct

SEQ ID NO: 591639 - DNA, 19 bp, Mus musculus
  siRNA target sequence for Cel (NM_009885.1,50-68).
cggcttgtgctgcaaagtt

SEQ ID NO: 591640 - DNA, 19 bp, Mus musculus
  siRNA target sequence for Cel (NM_009885.1,218-236).
ggacgctgaaggctacaaa

SEQ ID NO: 591641 - DNA, 19 bp, Mus musculus
  siRNA target sequence for Cel (NM_009885.1,228-246).
ggctacaaacttcaagaaa

SEQ ID NO: 591642 - DNA, 19 bp, Mus musculus
  siRNA target sequence for Cel (NM_009885.1,398-416).
ctggccaaggggccaattt

SEQ ID NO: 591643 - DNA, 19 bp, Mus musculus
  siRNA target sequence for Cel (NM_009885.1,401-419).
gccaaggggccaattttct

SEQ ID NO: 591644 - DNA, 19 bp, Mus musculus
  siRNA target sequence for Cel (NM_009885.1,403-421).
caaggggccaattttctca

SEQ ID NO: 591645 - DNA, 19 bp, Mus musculus
  siRNA target sequence for Cel (NM_009885.1,409-427).
gccaattttctcaaaaact

SEQ ID NO: 591646 - DNA, 19 bp, Mus musculus
  siRNA target sequence for Cel (NM_009885.1,527-545).
ctaaccttccaggtaactt

SEQ ID NO: 591647 - DNA, 19 bp, Mus musculus
  siRNA target sequence for Cel (NM_009885.1,760-778).
cttttctgggccaaaacga

SEQ ID NO: 591648 - DNA, 19 bp, Mus musculus
  siRNA target sequence for Cel (NM_009885.1,823-841).
gctgcgtgtctgaagatca

SEQ ID NO: 591649 - DNA, 19 bp, Mus musculus
  siRNA target sequence for Cel (NM_009885.1,1014-1032).
catggacggccacctattt

SEQ ID NO: 591650 - DNA, 19 bp, Mus musculus
  siRNA target sequence for Cel (NM_009885.1,1023-1041).
ccacctatttgctaccatt

SEQ ID NO: 591651 - DNA, 19 bp, Mus musculus
  siRNA target sequence for Cel (NM_009885.1,1183-1201).
ccgtcccaggagaacatga

SEQ ID NO: 591652 - DNA, 19 bp, Mus musculus
  siRNA target sequence for Cel (NM_009885.1,1289-1307).
gcgccaagacctattctta

SEQ ID NO: 591653 - DNA, 19 bp, Mus musculus
  siRNA target sequence for Cel (NM_009885.1,1333-1351).
cctatctaccccaaatgga

SEQ ID NO: 591654 - DNA, 19 bp, Mus musculus
  siRNA target sequence for Cel (NM_009885.1,1375-1393).
ctccagtacgtctttggaa

SEQ ID NO: 591655 - DNA, 19 bp, Mus musculus
  siRNA target sequence for Cel (NM_009885.1,1447-1465).
gccatgatcgcctattgga

SEQ ID NO: 591656 - DNA, 19 bp, Mus musculus
  siRNA target sequence for Cel (NM_009885.1,1519-1537).
cactggtacccttatacct

SEQ ID NO: 591657 - DNA, 19 bp, Mus musculus
  siRNA target sequence for Cel (NM_009885.1,1558-1576).
gacatcactaagacgataa

SEQ ID NO: 591658 - DNA, 19 bp, Mus musculus
  siRNA target sequence for Ces1 (NM_021456.1,44-62).
gtggctctgtgctttgagt

SEQ ID NO: 591659 - DNA, 19 bp, Mus musculus
  siRNA target sequence for Ces1 (NM_021456.1,359-377).
gatcattccccacaaattt

SEQ ID NO: 591660 - DNA, 19 bp, Mus musculus
  siRNA target sequence for Ces1 (NM_021456.1,390-408).
ctctacctcaacatttata

SEQ ID NO: 591661 - DNA, 19 bp, Mus musculus
  siRNA target sequence for Ces1 (NM_021456.1,531-549).
gttgtagtggtcattcagt

SEQ ID NO: 591662 - DNA, 19 bp, Mus musculus
  siRNA target sequence for Ces1 (NM_021456.1,773-791).
cgctcagagtagtgtcatt

SEQ ID NO: 591663 - DNA, 19 bp, Mus musculus
  siRNA target sequence for Ces1 (NM_021456.1,774-792).
gctcagagtagtgtcattt

SEQ ID NO: 591664 - DNA, 19 bp, Mus musculus
  siRNA target sequence for Ces1 (NM_021456.1,821-839).
cagacccttggctaagaaa

SEQ ID NO: 591665 - DNA, 19 bp, Mus musculus
  siRNA target sequence for Ces1 (NM_021456.1,846-864).
gctcttgctggctgtaaaa

SEQ ID NO: 591666 - DNA, 19 bp, Mus musculus
  siRNA target sequence for Ces1 (NM_021456.1,920-938).
cttggaggtctcactgaaa

SEQ ID NO: 591667 - DNA, 19 bp, Mus musculus
  siRNA target sequence for Ces1 (NM_021456.1,929-947).
ctcactgaaaatgaaattt

SEQ ID NO: 591668 - DNA, 19 bp, Mus musculus
  siRNA target sequence for Ces1 (NM_021456.1,1184-1202).
gcaggcctacccaattctt

SEQ ID NO: 591669 - DNA, 19 bp, Mus musculus
  siRNA target sequence for Ces1 (NM_021456.1,1185-1203).
caggcctacccaattctta

SEQ ID NO: 591670 - DNA, 19 bp, Mus musculus
  siRNA target sequence for Ces1 (NM_021456.1,1228-1246).
cagctattgaaaagtattt

SEQ ID NO: 591671 - DNA, 19 bp, Mus musculus
  siRNA target sequence for Ces1 (NM_021456.1,1310-1328).
gttcggtgtcccatctgta

SEQ ID NO: 591672 - DNA, 19 bp, Mus musculus
  siRNA target sequence for Ces1 (NM_021456.1,1315-1333).
gtgtcccatctgtaatcgt

SEQ ID NO: 591673 - DNA, 19 bp, Mus musculus
  siRNA target sequence for Ces1 (NM_021456.1,1390-1408).
gcccaagttttgtatcaga

SEQ ID NO: 591674 - DNA, 19 bp, Mus musculus
  siRNA target sequence for Ces1 (NM_021456.1,1410-1428).
gatagaccccaggaattgt

SEQ ID NO: 591675 - DNA, 19 bp, Mus musculus
  siRNA target sequence for Ces1 (NM_021456.1,1432-1450).
gagaccacgctgatgaact

SEQ ID NO: 591676 - DNA, 19 bp, Mus musculus
  siRNA target sequence for Ces1 (NM_021456.1,1436-1454).
ccacgctgatgaactcttt

SEQ ID NO: 591677 - DNA, 19 bp, Mus musculus
  siRNA target sequence for Ces1 (NM_021456.1,1437-1455).
cacgctgatgaactctttt

SEQ ID NO: 591678 - DNA, 19 bp, Mus musculus
  siRNA target sequence for Ces1 (NM_021456.1,1439-1457).
cgctgatgaactcttttct

SEQ ID NO: 591679 - DNA, 19 bp, Mus musculus
  siRNA target sequence for Ces1 (NM_021456.1,1463-1481).
gggagccccgtttttaaaa

SEQ ID NO: 591680 - DNA, 19 bp, Mus musculus
  siRNA target sequence for Ces3 (NM_053200.1,63-81).
gcgcctctaccctctgata

SEQ ID NO: 591681 - DNA, 19 bp, Mus musculus
  siRNA target sequence for Ces3 (NM_053200.1,64-82).
cgcctctaccctctgatat

SEQ ID NO: 591682 - DNA, 19 bp, Mus musculus
  siRNA target sequence for Ces3 (NM_053200.1,823-841).
ctgattacaacagatgtaa

SEQ ID NO: 591683 - DNA, 19 bp, Mus musculus
  siRNA target sequence for Ces3 (NM_053200.1,937-955).
ctactggagacctcactaa

SEQ ID NO: 591684 - DNA, 19 bp, Mus musculus
  siRNA target sequence for Ces3 (NM_053200.1,1206-1224).
gtcctacccaacacttaaa

SEQ ID NO: 591685 - DNA, 19 bp, Mus musculus
  siRNA target sequence for Ces3 (NM_053200.1,1317-1335).
ggctgatgtggtatttggt

SEQ ID NO: 591686 - DNA, 19 bp, Mus musculus
  siRNA target sequence for Cte1 (NM_012006.1,820-838).
ctataccccctgtgactat

SEQ ID NO: 591687 - DNA, 19 bp, Mus musculus
  siRNA target sequence for Cte1 (NM_012006.1,871-889).
gcctcaaggatgttgtaga

SEQ ID NO: 591688 - DNA, 19 bp, Mus musculus
  siRNA target sequence for Es22 (NM_133660.1,407-425).
gacagggcaaatagtcaat

SEQ ID NO: 591689 - DNA, 19 bp, Mus musculus
  siRNA target sequence for Es22 (NM_133660.1,409-427).
cagggcaaatagtcaatga

SEQ ID NO: 591690 - DNA, 19 bp, Mus musculus
  siRNA target sequence for Es22 (NM_133660.1,926-944).
gaaaattgctgtcatatct

SEQ ID NO: 591691 - DNA, 19 bp, Mus musculus
  siRNA target sequence for Es22 (NM_133660.1,1010-1028).
cttggggaccacactaaaa

SEQ ID NO: 591692 - DNA, 19 bp, Mus musculus
  siRNA target sequence for Es22 (NM_133660.1,1298-1316).
ccctgaggatgcaattgca

SEQ ID NO: 591693 - DNA, 19 bp, Mus musculus
  siRNA target sequence for Es22 (NM_133660.1,1360-1378).
gaaataaagaccaacttct

SEQ ID NO: 591694 - DNA, 19 bp, Mus musculus
  siRNA target sequence for Es22 (NM_133660.1,1424-1442).
gtcccgtggacatagagat

SEQ ID NO: 591695 - DNA, 19 bp, Mus musculus
  siRNA target sequence for LOC13909 (NM_144511.1,75-93).
gtctgctcctggcatttgt

SEQ ID NO: 591696 - DNA, 19 bp, Mus musculus
  siRNA target sequence for LOC13909 (NM_144511.1,791-809).
gggattgtcacgaccatta

SEQ ID NO: 591697 - DNA, 19 bp, Mus musculus
  siRNA target sequence for LOC13909 (NM_144511.1,792-810).
ggattgtcacgaccattat

SEQ ID NO: 591698 - DNA, 19 bp, Mus musculus
  siRNA target sequence for LOC13909 (NM_144511.1,1256-1274).
ggtgatatctcgttcatca

SEQ ID NO: 591699 - DNA, 19 bp, Mus musculus
  siRNA target sequence for LOC13909 (NM_144511.1,1257-1275).
gtgatatctcgttcatcat

SEQ ID NO: 591700 - DNA, 19 bp, Mus musculus
  siRNA target sequence for LOC13909 (NM_144511.1,1394-1412).
catgcgtctgagaattcct

SEQ ID NO: 591701 - DNA, 19 bp, Mus musculus
  siRNA target sequence for Mte1 (NM_134188.2,1354-1372).
cagttgggtagcaagagtt

SEQ ID NO: 591702 - DNA, 19 bp, Mus musculus
  siRNA target sequence for Pte1 (NM_133240.1,166-184).
cgagccgctagatgaagat

SEQ ID NO: 591703 - DNA, 19 bp, Mus musculus
  siRNA target sequence for Pte1 (NM_133240.1,171-189).
cgctagatgaagatctcta

SEQ ID NO: 591704 - DNA, 19 bp, Mus musculus
  siRNA target sequence for Pte1 (NM_133240.1,550-568).
cttaagggaccctaacctt

SEQ ID NO: 591705 - DNA, 19 bp, Mus musculus
  siRNA target sequence for Pte1 (NM_133240.1,561-579).
ctaaccttcacaagaagta

SEQ ID NO: 591706 - DNA, 19 bp, Mus musculus
  siRNA target sequence for Pte1 (NM_133240.1,603-621).
ctgcccaggaggtacctat

SEQ ID NO: 591707 - DNA, 19 bp, Mus musculus
  siRNA target sequence for Pte1 (NM_133240.1,606-624).
cccaggaggtacctattga

SEQ ID NO: 591708 - DNA, 19 bp, Mus musculus
  siRNA target sequence for Pte1 (NM_133240.1,608-626).
caggaggtacctattgaga

SEQ ID NO: 591709 - DNA, 19 bp, Mus musculus
  siRNA target sequence for Pte1 (NM_133240.1,738-756).
gctgtgtggctgcttatat

SEQ ID NO: 591710 - DNA, 19 bp, Mus musculus
  siRNA target sequence for Pte1 (NM_133240.1,801-819).
ccaagtataaggtgaactt

SEQ ID NO: 591711 - DNA, 19 bp, Mus musculus
  siRNA target sequence for Pte1 (NM_133240.1,1002-1020).
ctcaggtgtcagagagtaa

SEQ ID NO: 591712 - DNA, 19 bp, Mus musculus
  siRNA target sequence for Pte2a (NM_134246.1,757-775).
gcctccttcttgaaaaata

SEQ ID NO: 591713 - DNA, 19 bp, Mus musculus
  siRNA target sequence for Pte2a (NM_134246.1,810-828).
caacatcggcggaaactta

SEQ ID NO: 591714 - DNA, 19 bp, Mus musculus
  siRNA target sequence for Pte2a (NM_134246.1,818-836).
gcggaaacttacagtacaa

SEQ ID NO: 591715 - DNA, 19 bp, Mus musculus
  siRNA target sequence for Pte2a (NM_134246.1,850-868).
ccctccgtgggcataaaca

SEQ ID NO: 591716 - DNA, 19 bp, Mus musculus
  siRNA target sequence for Pte2a (NM_134246.1,1100-1118).
cagagacaggccaccatat

SEQ ID NO: 591717 - DNA, 19 bp, Mus musculus
  siRNA target sequence for Thea (NM_025590.3,84-102).
ggcttcgcctctatgttct

SEQ ID NO: 591718 - DNA, 19 bp, Mus musculus
  siRNA target sequence for Thea (NM_025590.3,108-126).
cgcacatcccggaagtcaa

SEQ ID NO: 591719 - DNA, 19 bp, Mus musculus
  siRNA target sequence for Thea (NM_025590.3,109-127).
gcacatcccggaagtcaat

SEQ ID NO: 591720 - DNA, 19 bp, Mus musculus
  siRNA target sequence for Thea (NM_025590.3,331-349).
cctctatggatgacatcta

SEQ ID NO: 591721 - DNA, 19 bp, Mus musculus
  siRNA target sequence for Thea (NM_025590.3,347-365).
ctacttcgaccataccatt

SEQ ID NO: 591722 - DNA, 19 bp, Mus musculus
  siRNA target sequence for Thea (NM_025590.3,350-368).
cttcgaccataccattagt

SEQ ID NO: 591723 - DNA, 19 bp, Mus musculus
  siRNA target sequence for Thea (NM_025590.3,369-387).
gtcggccaagtggtgaata

SEQ ID NO: 591724 - DNA, 19 bp, Mus musculus
  siRNA target sequence for Thea (NM_025590.3,669-687).
gacaaggactgcagcaata

SEQ ID NO: 591725 - DNA, 19 bp, Mus musculus
  siRNA target sequence for Thea (NM_025590.3,734-752).
gcctcctcacgccaatcat

SEQ ID NO: 591726 - DNA, 19 bp, Mus musculus
  siRNA target sequence for Thea (NM_025590.3,1206-1224).
gtatacctgagctactaca

SEQ ID NO: 591727 - DNA, 19 bp, Mus musculus
  siRNA target sequence for Thea (NM_025590.3,1285-1303).
gcgaggtccgcctgtacat

SEQ ID NO: 591728 - DNA, 19 bp, Mus musculus
  siRNA target sequence for Thea (NM_025590.3,1331-1349).
cttggagatggtggtaaat

SEQ ID NO: 591729 - DNA, 19 bp, Mus musculus
  siRNA target sequence for Thea (NM_025590.3,1398-1416).
ccagagtgggacaagcatt

SEQ ID NO: 591730 - DNA, 19 bp, Mus musculus
  siRNA target sequence for Thea (NM_025590.3,1399-1417).
cagagtgggacaagcatta

SEQ ID NO: 591731 - DNA, 19 bp, Mus musculus
  siRNA target sequence for Thea (NM_025590.3,1498-1516).
ccaagccccaggactttgt

SEQ ID NO: 591732 - DNA, 19 bp, Mus musculus
  siRNA target sequence for Thea (NM_025590.3,1532-1550).
gcggaagccttgtgacaat

SEQ ID NO: 591733 - DNA, 19 bp, Mus musculus
  siRNA target sequence for Thea (NM_025590.3,1659-1677).
gagggggaccagatgacta

SEQ ID NO: 591734 - DNA, 19 bp, Mus musculus
  siRNA target sequence for Thea (NM_025590.3,1668-1686).
cagatgactaaggtttctt

SEQ ID NO: 591735 - DNA, 19 bp, Mus musculus
  siRNA target sequence for Thea (NM_025590.3,1675-1693).
ctaaggtttcttactacaa

SEQ ID NO: 591736 - DNA, 19 bp, Mus musculus
  siRNA target sequence for Thea (NM_025590.3,1707-1725).
ggctttctcaactatgtga

SEQ ID NO: 591737 - DNA, 19 bp, Mus musculus
  siRNA target sequence for Thea (NM_025590.3,1769-1787).
caaggcttgtgagagtttt

SEQ ID NO: 591738 - DNA, 19 bp, Mus musculus
  siRNA target sequence for Ysg2 (NM_011734.2,38-56).
gggatagtgctgctcataa

SEQ ID NO: 591739 - DNA, 19 bp, Mus musculus
  siRNA target sequence for Ysg2 (NM_011734.2,39-57).
ggatagtgctgctcataat

SEQ ID NO: 591740 - DNA, 19 bp, Mus musculus
  siRNA target sequence for Ysg2 (NM_011734.2,67-85).
cagcagaagtgcaggtatt

SEQ ID NO: 591741 - DNA, 19 bp, Mus musculus
  siRNA target sequence for Ysg2 (NM_011734.2,70-88).
cagaagtgcaggtattggt

SEQ ID NO: 591742 - DNA, 19 bp, Mus musculus
  siRNA target sequence for Ysg2 (NM_011734.2,98-116).
gcttcatacatcgataatt

SEQ ID NO: 591743 - DNA, 19 bp, Mus musculus
  siRNA target sequence for Ysg2 (NM_011734.2,99-117).
cttcatacatcgataatta

SEQ ID NO: 591744 - DNA, 19 bp, Mus musculus
  siRNA target sequence for Ysg2 (NM_011734.2,203-221).
ggtcaggaaaccatcatga

SEQ ID NO: 591745 - DNA, 19 bp, Mus musculus
  siRNA target sequence for Ysg2 (NM_011734.2,283-301).
gcctgggggaccttttgaa

SEQ ID NO: 591746 - DNA, 19 bp, Mus musculus
  siRNA target sequence for Ysg2 (NM_011734.2,285-303).
ctgggggaccttttgaagt

SEQ ID NO: 591747 - DNA, 19 bp, Mus musculus
  siRNA target sequence for Ysg2 (NM_011734.2,343-361).
gagagtccatgatgtctta

SEQ ID NO: 591748 - DNA, 19 bp, Mus musculus
  siRNA target sequence for Ysg2 (NM_011734.2,345-363).
gagtccatgatgtcttatt

SEQ ID NO: 591749 - DNA, 19 bp, Mus musculus
  siRNA target sequence for Ysg2 (NM_011734.2,461-479).
cagtctgtgcgcatcttct

SEQ ID NO: 591750 - DNA, 19 bp, Mus musculus
  siRNA target sequence for Ysg2 (NM_011734.2,611-629).
gggcgttacctgtatgaca

SEQ ID NO: 591751 - DNA, 19 bp, Mus musculus
  siRNA target sequence for Ysg2 (NM_011734.2,666-684).
ggggtgggacgtacattga

SEQ ID NO: 591752 - DNA, 19 bp, Mus musculus
  siRNA target sequence for Ysg2 (NM_011734.2,667-685).
gggtgggacgtacattgaa

SEQ ID NO: 591753 - DNA, 19 bp, Mus musculus
  siRNA target sequence for Ysg2 (NM_011734.2,713-731).
gcctgtggagtccctaata

SEQ ID NO: 591754 - DNA, 19 bp, Mus musculus
  siRNA target sequence for Ysg2 (NM_011734.2,715-733).
ctgtggagtccctaataca

SEQ ID NO: 591755 - DNA, 19 bp, Mus musculus
  siRNA target sequence for Ysg2 (NM_011734.2,746-764).
gttggtcagcccgagataa

SEQ ID NO: 591756 - DNA, 19 bp, Mus musculus
  siRNA target sequence for Ysg2 (NM_011734.2,766-784).
gcccatgaggaatgaatgt

SEQ ID NO: 591757 - DNA, 19 bp, Mus musculus
  siRNA target sequence for Ysg2 (NM_011734.2,772-790).
gaggaatgaatgtaacagt

SEQ ID NO: 591758 - DNA, 19 bp, Mus musculus
  siRNA target sequence for Ysg2 (NM_011734.2,794-812).
gagtcctcatgtcctttta

SEQ ID NO: 591759 - DNA, 19 bp, Mus musculus
  siRNA target sequence for Ysg2 (NM_011734.2,849-867).
gacactccgtcctttggaa

SEQ ID NO: 591760 - DNA, 19 bp, Mus musculus
  siRNA target sequence for Ysg2 (NM_011734.2,881-899).
ccactgcaaaacatgactt

SEQ ID NO: 591761 - DNA, 19 bp, Mus musculus
  siRNA target sequence for Ysg2 (NM_011734.2,926-944).
gagtccaatgcggattata

SEQ ID NO: 591762 - DNA, 19 bp, Mus musculus
  siRNA target sequence for Ysg2 (NM_011734.2,1055-1073).
cagctgtcttcatacatgt

SEQ ID NO: 591763 - DNA, 19 bp, Mus musculus
  siRNA target sequence for Ysg2 (NM_011734.2,1078-1096).
gaactcatcggattatgga

SEQ ID NO: 591764 - DNA, 19 bp, Mus musculus
  siRNA target sequence for Ysg2 (NM_011734.2,1114-1132).
gcatcaaactgcagacttt

SEQ ID NO: 591765 - DNA, 19 bp, Mus musculus
  siRNA target sequence for Ysg2 (NM_011734.2,1147-1165).
cccgaagatgcctaatact

SEQ ID NO: 591766 - DNA, 19 bp, Mus musculus
  siRNA target sequence for Ysg2 (NM_011734.2,1148-1166).
ccgaagatgcctaatactt

SEQ ID NO: 591767 - DNA, 19 bp, Mus musculus
  siRNA target sequence for Ysg2 (NM_011734.2,1149-1167).
cgaagatgcctaatacttt

SEQ ID NO: 591768 - DNA, 19 bp, Mus musculus
  siRNA target sequence for Ysg2 (NM_011734.2,1178-1196).
gctattgacctctgtgata

SEQ ID NO: 591769 - DNA, 19 bp, Mus musculus
  siRNA target sequence for Ysg2 (NM_011734.2,1274-1292).
gtggcatatggtgagaaaa

SEQ ID NO: 591770 - DNA, 19 bp, Mus musculus
  siRNA target sequence for Ysg2 (NM_011734.2,1277-1295).
gcatatggtgagaaaaatt

SEQ ID NO: 591771 - DNA, 19 bp, Mus musculus
  siRNA target sequence for Ysg2 (NM_011734.2,1278-1296).
catatggtgagaaaaattt

SEQ ID NO: 591772 - DNA, 19 bp, Mus musculus
  siRNA target sequence for Ysg2 (NM_011734.2,1308-1326).
gaccactacctaagaagat

SEQ ID NO: 591773 - DNA, 19 bp, Mus musculus
  siRNA target sequence for Ysg2 (NM_011734.2,1311-1329).
cactacctaagaagataga

SEQ ID NO: 591774 - DNA, 19 bp, Mus musculus
  siRNA target sequence for Ysg2 (NM_011734.2,1348-1366).
cctgctcaacctcacatat

SEQ ID NO: 591775 - DNA, 19 bp, Mus musculus
  siRNA target sequence for Ysg2 (NM_011734.2,1390-1408).
gcaagataacaaaacattt

SEQ ID NO: 591776 - DNA, 19 bp, Mus musculus
  siRNA target sequence for Ysg2 (NM_011734.2,1422-1440).
gtagtgaccgtcattgcaa

SEQ ID NO: 591777 - DNA, 19 bp, Mus musculus
  siRNA target sequence for Ysg2 (NM_011734.2,1448-1466).
ccagctcctgttaacactt

SEQ ID NO: 591778 - DNA, 19 bp, Mus musculus
  siRNA target sequence for Ysg2 (NM_011734.2,1451-1469).
gctcctgttaacactttct

SEQ ID NO: 591779 - DNA, 19 bp, Mus musculus
  siRNA target sequence for Ysg2 (NM_011734.2,1479-1497).
ctctgattttggatctcaa

SEQ ID NO: 591780 - DNA, 19 bp, Mus musculus
  siRNA target sequence for Ysg2 (NM_011734.2,1489-1507).
ggatctcaatgcttgtctt

SEQ ID NO: 591781 - DNA, 19 bp, Mus musculus
  siRNA target sequence for Ysg2 (NM_011734.2,1537-1555).
gaccacatggccttgtgaa

SEQ ID NO: 591782 - DNA, 19 bp, Mus musculus
  siRNA target sequence for Ysg2 (NM_011734.2,1539-1557).
ccacatggccttgtgaata

SEQ ID NO: 591783 - DNA, 19 bp, Mus musculus
  siRNA target sequence for Ysg2 (NM_011734.2,1540-1558).
cacatggccttgtgaatat

SEQ ID NO: 591784 - DNA, 19 bp, Mus musculus
  siRNA target sequence for Pafah1b1 (NM_013625.1,874-892).
gagacaacgagatgaacta

SEQ ID NO: 591785 - DNA, 19 bp, Mus musculus
  siRNA target sequence for Pafah1b1 (NM_013625.1,876-894).
gacaacgagatgaactaaa

SEQ ID NO: 591786 - DNA, 19 bp, Mus musculus
  siRNA target sequence for Pafah1b1 (NM_013625.1,897-915).
gagctatagcagattatct

SEQ ID NO: 591787 - DNA, 19 bp, Mus musculus
  siRNA target sequence for Pafah1b1 (NM_013625.1,926-944).
ggctatgaagaggcatatt

SEQ ID NO: 591788 - DNA, 19 bp, Mus musculus
  siRNA target sequence for Pafah1b1 (NM_013625.1,935-953).
gaggcatattccgttttta

SEQ ID NO: 591789 - DNA, 19 bp, Mus musculus
  siRNA target sequence for Pafah1b1 (NM_013625.1,937-955).
ggcatattccgtttttaaa

SEQ ID NO: 591790 - DNA, 19 bp, Mus musculus
  siRNA target sequence for Pafah1b1 (NM_013625.1,959-977).
gaagctgaactagatatga

SEQ ID NO: 591791 - DNA, 19 bp, Mus musculus
  siRNA target sequence for Pafah1b1 (NM_013625.1,997-1015).
gtatgctggtcttttggaa

SEQ ID NO: 591792 - DNA, 19 bp, Mus musculus
  siRNA target sequence for Pafah1b1 (NM_013625.1,1023-1041).
ggacatctgttattagatt

SEQ ID NO: 591793 - DNA, 19 bp, Mus musculus
  siRNA target sequence for Pafah1b1 (NM_013625.1,1024-1042).
gacatctgttattagatta

SEQ ID NO: 591794 - DNA, 19 bp, Mus musculus
  siRNA target sequence for Pafah1b1 (NM_013625.1,1026-1044).
catctgttattagattaca

SEQ ID NO: 591795 - DNA, 19 bp, Mus musculus
  siRNA target sequence for Pafah1b1 (NM_013625.1,1029-1047).
ctgttattagattacaaaa

SEQ ID NO: 591796 - DNA, 19 bp, Mus musculus
  siRNA target sequence for Pafah1b1 (NM_013625.1,1051-1069).
ggtaatggaattagaatca

SEQ ID NO: 591797 - DNA, 19 bp, Mus musculus
  siRNA target sequence for Pafah1b1 (NM_013625.1,1082-1100).
gcaaaagaagaatttacgt

SEQ ID NO: 591798 - DNA, 19 bp, Mus musculus
  siRNA target sequence for Pafah1b1 (NM_013625.1,1145-1163).
ccccgtccacctgagaaat

SEQ ID NO: 591799 - DNA, 19 bp, Mus musculus
  siRNA target sequence for Pafah1b1 (NM_013625.1,1146-1164).
cccgtccacctgagaaata

SEQ ID NO: 591800 - DNA, 19 bp, Mus musculus
  siRNA target sequence for Pafah1b1 (NM_013625.1,1187-1205).
ccagttactcgagtcattt

SEQ ID NO: 591801 - DNA, 19 bp, Mus musculus
  siRNA target sequence for Pafah1b1 (NM_013625.1,1208-1226).
catcctgtgttcagtgtta

SEQ ID NO: 591802 - DNA, 19 bp, Mus musculus
  siRNA target sequence for Pafah1b1 (NM_013625.1,1293-1311).
ctctcaagggccatacaga

SEQ ID NO: 591803 - DNA, 19 bp, Mus musculus
  siRNA target sequence for Pafah1b1 (NM_013625.1,1356-1374).
cttcctgttcagcagatat

SEQ ID NO: 591804 - DNA, 19 bp, Mus musculus
  siRNA target sequence for Pafah1b1 (NM_013625.1,1367-1385).
gcagatatgacgattaaat

SEQ ID NO: 591805 - DNA, 19 bp, Mus musculus
  siRNA target sequence for Pafah1b1 (NM_013625.1,1389-1407).
gggattttcagggttttga

SEQ ID NO: 591806 - DNA, 19 bp, Mus musculus
  siRNA target sequence for Pafah1b1 (NM_013625.1,1400-1418).
ggttttgaatgcatcagaa

SEQ ID NO: 591807 - DNA, 19 bp, Mus musculus
  siRNA target sequence for Pafah1b1 (NM_013625.1,1423-1441).
gcacggtcacgatcacaat

SEQ ID NO: 591808 - DNA, 19 bp, Mus musculus
  siRNA target sequence for Pafah1b1 (NM_013625.1,1427-1445).
ggtcacgatcacaatgtct

SEQ ID NO: 591809 - DNA, 19 bp, Mus musculus
  siRNA target sequence for Pafah1b1 (NM_013625.1,1459-1477).
catgcctaatggagatcat

SEQ ID NO: 591810 - DNA, 19 bp, Mus musculus
  siRNA target sequence for Pafah1b1 (NM_013625.1,1483-1501).
gtctgcctcaagggataaa

SEQ ID NO: 591811 - DNA, 19 bp, Mus musculus
  siRNA target sequence for Pafah1b1 (NM_013625.1,1487-1505).
gcctcaagggataaaacta

SEQ ID NO: 591812 - DNA, 19 bp, Mus musculus
  siRNA target sequence for Pafah1b1 (NM_013625.1,1572-1590).
gtatggtgcggccaaatca

SEQ ID NO: 591813 - DNA, 19 bp, Mus musculus
  siRNA target sequence for Pafah1b1 (NM_013625.1,1691-1709).
gtggtggaatgcatttcct

SEQ ID NO: 591814 - DNA, 19 bp, Mus musculus
  siRNA target sequence for Pafah1b1 (NM_013625.1,1746-1764).
caacaggatctgagactaa

SEQ ID NO: 591815 - DNA, 19 bp, Mus musculus
  siRNA target sequence for Pafah1b1 (NM_013625.1,1773-1791).
gcaagcctggacctttctt

SEQ ID NO: 591816 - DNA, 19 bp, Mus musculus
  siRNA target sequence for Pafah1b1 (NM_013625.1,1778-1796).
cctggacctttcttgctat

SEQ ID NO: 591817 - DNA, 19 bp, Mus musculus
  siRNA target sequence for Pafah1b1 (NM_013625.1,1803-1821).
ccagagacaaaactattaa

SEQ ID NO: 591818 - DNA, 19 bp, Mus musculus
  siRNA target sequence for Pafah1b1 (NM_013625.1,1855-1873).
gactcttgtgggtcatgat

SEQ ID NO: 591819 - DNA, 19 bp, Mus musculus
  siRNA target sequence for Pafah1b1 (NM_013625.1,1859-1877).
cttgtgggtcatgataact

SEQ ID NO: 591820 - DNA, 19 bp, Mus musculus
  siRNA target sequence for Pafah1b1 (NM_013625.1,1878-1896).
gggtacgtggagttctgtt

SEQ ID NO: 591821 - DNA, 19 bp, Mus musculus
  siRNA target sequence for Pafah1b1 (NM_013625.1,1946-1964).
cgtgtatgggattataaga

SEQ ID NO: 591822 - DNA, 19 bp, Mus musculus
  siRNA target sequence for Pafah1b1 (NM_013625.1,1983-2001).
ccctcaatgcgcatgaaca

SEQ ID NO: 591823 - DNA, 19 bp, Mus musculus
  siRNA target sequence for Pafah1b1 (NM_013625.1,1987-2005).
caatgcgcatgaacacttt

SEQ ID NO: 591824 - DNA, 19 bp, Mus musculus
  siRNA target sequence for Pafah1b1 (NM_013625.1,2010-2028).
cctccttggatttccataa

SEQ ID NO: 591825 - DNA, 19 bp, Mus musculus
  siRNA target sequence for Pafah1b2 (NM_008775.2,137-155).
ctcgaacccagcagctatt

SEQ ID NO: 591826 - DNA, 19 bp, Mus musculus
  siRNA target sequence for Pafah1b2 (NM_008775.2,156-174).
ccacatgccgcagaagata

SEQ ID NO: 591827 - DNA, 19 bp, Mus musculus
  siRNA target sequence for Pafah1b2 (NM_008775.2,212-230).
gtttgttctggactgtaaa

SEQ ID NO: 591828 - DNA, 19 bp, Mus musculus
  siRNA target sequence for Pafah1b2 (NM_008775.2,221-239).
ggactgtaaagacaaagaa

SEQ ID NO: 591829 - DNA, 19 bp, Mus musculus
  siRNA target sequence for Pafah1b2 (NM_008775.2,305-323).
gctgttttccccacttcat

SEQ ID NO: 591830 - DNA, 19 bp, Mus musculus
  siRNA target sequence for Pafah1b2 (NM_008775.2,336-354).
ggaattgggggagatacaa

SEQ ID NO: 591831 - DNA, 19 bp, Mus musculus
  siRNA target sequence for Pafah1b2 (NM_008775.2,420-438).
gtctgggtagggacaaaca

SEQ ID NO: 591832 - DNA, 19 bp, Mus musculus
  siRNA target sequence for Pafah1b2 (NM_008775.2,430-448).
ggacaaacaaccacgaaaa

SEQ ID NO: 591833 - DNA, 19 bp, Mus musculus
  siRNA target sequence for Pafah1b2 (NM_008775.2,469-487).
gtgggattgaggctattgt

SEQ ID NO: 591834 - DNA, 19 bp, Mus musculus
  siRNA target sequence for Pafah1b2 (NM_008775.2,472-490).
ggattgaggctattgtaca

SEQ ID NO: 591835 - DNA, 19 bp, Mus musculus
  siRNA target sequence for Pafah1b2 (NM_008775.2,473-491).
gattgaggctattgtacaa

SEQ ID NO: 591836 - DNA, 19 bp, Mus musculus
  siRNA target sequence for Pafah1b2 (NM_008775.2,477-495).
gaggctattgtacaactta

SEQ ID NO: 591837 - DNA, 19 bp, Mus musculus
  siRNA target sequence for Pafah1b2 (NM_008775.2,481-499).
ctattgtacaacttataaa

SEQ ID NO: 591838 - DNA, 19 bp, Mus musculus
  siRNA target sequence for Pafah1b2 (NM_008775.2,557-575).
gcccaaccctttaagacaa

SEQ ID NO: 591839 - DNA, 19 bp, Mus musculus
  siRNA target sequence for Pafah1b2 (NM_008775.2,682-700).
cctgccacgacatgtttga

SEQ ID NO: 591840 - DNA, 19 bp, Mus musculus
  siRNA target sequence for Pafah1b2 (NM_008775.2,685-703).
gccacgacatgtttgattt

SEQ ID NO: 591841 - DNA, 19 bp, Mus musculus
  siRNA target sequence for Pafah1b2 (NM_008775.2,686-704).
ccacgacatgtttgatttt

SEQ ID NO: 591842 - DNA, 19 bp, Mus musculus
  siRNA target sequence for Pafah1b2 (NM_008775.2,718-736).
gagggggctatgcaaagat

SEQ ID NO: 591843 - DNA, 19 bp, Mus musculus
  siRNA target sequence for Pafah1b2 (NM_008775.2,720-738).
gggggctatgcaaagatct

SEQ ID NO: 591844 - DNA, 19 bp, Mus musculus
  siRNA target sequence for Pafah1b2 (NM_008775.2,739-757).
gcaaacccctccatgaact

SEQ ID NO: 591845 - DNA, 19 bp, Mus musculus
  siRNA target sequence for Pafah1b3 (NM_008776.1,243-261).
ggaacccgaagtagtcttt

SEQ ID NO: 591846 - DNA, 19 bp, Mus musculus
  siRNA target sequence for Pafah1b3 (NM_008776.1,244-262).
gaacccgaagtagtcttta

SEQ ID NO: 591847 - DNA, 19 bp, Mus musculus
  siRNA target sequence for Pafah1b3 (NM_008776.1,567-585).
caacccacttcgagagaaa

SEQ ID NO: 591848 - DNA, 19 bp, Mus musculus
  siRNA target sequence for Pafah1b3 (NM_008776.1,633-651).
ccgagcccacttcttagat

SEQ ID NO: 591849 - DNA, 19 bp, Mus musculus
  siRNA target sequence for Pafah1b3 (NM_008776.1,773-791).
gtctcttggcccaagatca

SEQ ID NO: 591850 - DNA, 19 bp, Mus musculus
  siRNA target sequence for Pafah2 (NM_133880.1,356-374).
gccgattacctgcagtata

SEQ ID NO: 591851 - DNA, 19 bp, Mus musculus
  siRNA target sequence for Pafah2 (NM_133880.1,357-375).
ccgattacctgcagtataa

SEQ ID NO: 591852 - DNA, 19 bp, Mus musculus
  siRNA target sequence for Pafah2 (NM_133880.1,359-377).
gattacctgcagtataaca

SEQ ID NO: 591853 - DNA, 19 bp, Mus musculus
  siRNA target sequence for Pafah2 (NM_133880.1,384-402).
gggtggggttgctgttcaa

SEQ ID NO: 591854 - DNA, 19 bp, Mus musculus
  siRNA target sequence for Pafah2 (NM_133880.1,403-421).
cgtgggtatcggatcttgt

SEQ ID NO: 591855 - DNA, 19 bp, Mus musculus
  siRNA target sequence for Pafah2 (NM_133880.1,465-483).
ctggataccctttgatcat

SEQ ID NO: 591856 - DNA, 19 bp, Mus musculus
  siRNA target sequence for Pafah2 (NM_133880.1,503-521).
gggttcagggcgtcatact

SEQ ID NO: 591857 - DNA, 19 bp, Mus musculus
  siRNA target sequence for Pafah2 (NM_133880.1,628-646).
gagctctcccgctgaatct

SEQ ID NO: 591858 - DNA, 19 bp, Mus musculus
  siRNA target sequence for Pafah2 (NM_133880.1,780-798).
ggaagactgtcgtcaatgt

SEQ ID NO: 591859 - DNA, 19 bp, Mus musculus
  siRNA target sequence for Pafah2 (NM_133880.1,916-934).
ccagtttcggtgtgctata

SEQ ID NO: 591860 - DNA, 19 bp, Mus musculus
  siRNA target sequence for Pafah2 (NM_133880.1,957-975).
ctctggaacgggactttta

SEQ ID NO: 591861 - DNA, 19 bp, Mus musculus
  siRNA target sequence for Pafah2 (NM_133880.1,1026-1044).
cggtagagagcgtcaactt

SEQ ID NO: 591862 - DNA, 19 bp, Mus musculus
  siRNA target sequence for Pafah2 (NM_133880.1,1028-1046).
gtagagagcgtcaacttga

SEQ ID NO: 591863 - DNA, 19 bp, Mus musculus
  siRNA target sequence for Pafah2 (NM_133880.1,1035-1053).
gcgtcaacttgatgaagaa

SEQ ID NO: 591864 - DNA, 19 bp, Mus musculus
  siRNA target sequence for Pafah2 (NM_133880.1,1100-1118).
gctgttcatcggagtcaaa

SEQ ID NO: 591865 - DNA, 19 bp, Mus musculus
  siRNA target sequence for Pafah2 (NM_133880.1,1137-1155).
cgggcaacctgattgctaa

SEQ ID NO: 591866 - DNA, 19 bp, Mus musculus
  siRNA target sequence for Pafah2 (NM_133880.1,1144-1162).
cctgattgctaaattcttt

SEQ ID NO: 591867 - DNA, 19 bp, Mus musculus
  siRNA target sequence for Pafah2 (NM_133880.1,1324-1342).
gcactatctgtctagtcta

SEQ ID NO: 591868 - DNA, 19 bp, Mus musculus
  siRNA target sequence for Pafah2 (NM_133880.1,1325-1343).
cactatctgtctagtctat

SEQ ID NO: 591869 - DNA, 19 bp, Mus musculus
  siRNA target sequence for Pla2g7 (NM_013737.2,443-461).
gcaagacacatcttctttt

SEQ ID NO: 591870 - DNA, 19 bp, Mus musculus
  siRNA target sequence for Pla2g7 (NM_013737.2,447-465).
gacacatcttcttttgact

SEQ ID NO: 591871 - DNA, 19 bp, Mus musculus
  siRNA target sequence for Pla2g7 (NM_013737.2,462-480).
gacttcaggccgtcagtaa

SEQ ID NO: 591872 - DNA, 19 bp, Mus musculus
  siRNA target sequence for Pla2g7 (NM_013737.2,467-485).
caggccgtcagtaatgttt

SEQ ID NO: 591873 - DNA, 19 bp, Mus musculus
  siRNA target sequence for Pla2g7 (NM_013737.2,471-489).
ccgtcagtaatgtttcaca

SEQ ID NO: 591874 - DNA, 19 bp, Mus musculus
  siRNA target sequence for Pla2g7 (NM_013737.2,472-490).
cgtcagtaatgtttcacaa

SEQ ID NO: 591875 - DNA, 19 bp, Mus musculus
  siRNA target sequence for Pla2g7 (NM_013737.2,513-531).
gccggctctggccatagta

SEQ ID NO: 591876 - DNA, 19 bp, Mus musculus
  siRNA target sequence for Pla2g7 (NM_013737.2,514-532).
ccggctctggccatagtaa

SEQ ID NO: 591877 - DNA, 19 bp, Mus musculus
  siRNA target sequence for Pla2g7 (NM_013737.2,515-533).
cggctctggccatagtaaa

SEQ ID NO: 591878 - DNA, 19 bp, Mus musculus
  siRNA target sequence for Pla2g7 (NM_013737.2,516-534).
ggctctggccatagtaaaa

SEQ ID NO: 591879 - DNA, 19 bp, Mus musculus
  siRNA target sequence for Pla2g7 (NM_013737.2,517-535).
gctctggccatagtaaaat

SEQ ID NO: 591880 - DNA, 19 bp, Mus musculus
  siRNA target sequence for Pla2g7 (NM_013737.2,554-572).
gtaccccgtcggttgtaca

SEQ ID NO: 591881 - DNA, 19 bp, Mus musculus
  siRNA target sequence for Pla2g7 (NM_013737.2,557-575).
ccccgtcggttgtacagat

SEQ ID NO: 591882 - DNA, 19 bp, Mus musculus
  siRNA target sequence for Pla2g7 (NM_013737.2,601-619).
gcgtcttcgtgcgtttgta

SEQ ID NO: 591883 - DNA, 19 bp, Mus musculus
  siRNA target sequence for Pla2g7 (NM_013737.2,603-621).
gtcttcgtgcgtttgtact

SEQ ID NO: 591884 - DNA, 19 bp, Mus musculus
  siRNA target sequence for Pla2g7 (NM_013737.2,617-635).
gtactacccagctcaagat

SEQ ID NO: 591885 - DNA, 19 bp, Mus musculus
  siRNA target sequence for Pla2g7 (NM_013737.2,639-657).
ggtcgcctcgacactgttt

SEQ ID NO: 591886 - DNA, 19 bp, Mus musculus
  siRNA target sequence for Pla2g7 (NM_013737.2,659-677).
gatcccaaacaaagaatat

SEQ ID NO: 591887 - DNA, 19 bp, Mus musculus
  siRNA target sequence for Pla2g7 (NM_013737.2,709-727).
ccagtattgtaggcaatat

SEQ ID NO: 591888 - DNA, 19 bp, Mus musculus
  siRNA target sequence for Pla2g7 (NM_013737.2,710-728).
cagtattgtaggcaatatt

SEQ ID NO: 591889 - DNA, 19 bp, Mus musculus
  siRNA target sequence for Pla2g7 (NM_013737.2,802-820).
cactcattgtcttttctca

SEQ ID NO: 591890 - DNA, 19 bp, Mus musculus
  siRNA target sequence for Pla2g7 (NM_013737.2,829-847).
gagccttcaggacgattta

SEQ ID NO: 591891 - DNA, 19 bp, Mus musculus
  siRNA target sequence for Pla2g7 (NM_013737.2,831-849).
gccttcaggacgatttatt

SEQ ID NO: 591892 - DNA, 19 bp, Mus musculus
  siRNA target sequence for Pla2g7 (NM_013737.2,833-851).
cttcaggacgatttattct

SEQ ID NO: 591893 - DNA, 19 bp, Mus musculus
  siRNA target sequence for Pla2g7 (NM_013737.2,859-877).
gcattggcttggcatctaa

SEQ ID NO: 591894 - DNA, 19 bp, Mus musculus
  siRNA target sequence for Pla2g7 (NM_013737.2,860-878).
cattggcttggcatctaat

SEQ ID NO: 591895 - DNA, 19 bp, Mus musculus
  siRNA target sequence for Pla2g7 (NM_013737.2,869-887).
ggcatctaatgggtttata

SEQ ID NO: 591896 - DNA, 19 bp, Mus musculus
  siRNA target sequence for Pla2g7 (NM_013737.2,871-889).
catctaatgggtttatagt

SEQ ID NO: 591897 - DNA, 19 bp, Mus musculus
  siRNA target sequence for Pla2g7 (NM_013737.2,913-931).
gatctgcatcggcaactta

SEQ ID NO: 591898 - DNA, 19 bp, Mus musculus
  siRNA target sequence for Pla2g7 (NM_013737.2,916-934).
ctgcatcggcaacttactt

SEQ ID NO: 591899 - DNA, 19 bp, Mus musculus
  siRNA target sequence for Pla2g7 (NM_013737.2,918-936).
gcatcggcaacttactttt

SEQ ID NO: 591900 - DNA, 19 bp, Mus musculus
  siRNA target sequence for Pla2g7 (NM_013737.2,922-940).
cggcaacttacttttttga

SEQ ID NO: 591901 - DNA, 19 bp, Mus musculus
  siRNA target sequence for Pla2g7 (NM_013737.2,923-941).
ggcaacttacttttttgaa

SEQ ID NO: 591902 - DNA, 19 bp, Mus musculus
  siRNA target sequence for Pla2g7 (NM_013737.2,925-943).
caacttacttttttgaaga

SEQ ID NO: 591903 - DNA, 19 bp, Mus musculus
  siRNA target sequence for Pla2g7 (NM_013737.2,1031-1049).
ggttcagcaaagagcaata

SEQ ID NO: 591904 - DNA, 19 bp, Mus musculus
  siRNA target sequence for Pla2g7 (NM_013737.2,1037-1055).
gcaaagagcaatagaatgt

SEQ ID NO: 591905 - DNA, 19 bp, Mus musculus
  siRNA target sequence for Pla2g7 (NM_013737.2,1038-1056).
caaagagcaatagaatgtt

SEQ ID NO: 591906 - DNA, 19 bp, Mus musculus
  siRNA target sequence for Pla2g7 (NM_013737.2,1061-1079).
ggctctcagtgcgattctt

SEQ ID NO: 591907 - DNA, 19 bp, Mus musculus
  siRNA target sequence for Pla2g7 (NM_013737.2,1063-1081).
ctctcagtgcgattcttga

SEQ ID NO: 591908 - DNA, 19 bp, Mus musculus
  siRNA target sequence for Pla2g7 (NM_013737.2,1067-1085).
cagtgcgattcttgacatt

SEQ ID NO: 591909 - DNA, 19 bp, Mus musculus
  siRNA target sequence for Pla2g7 (NM_013737.2,1069-1087).
gtgcgattcttgacattga

SEQ ID NO: 591910 - DNA, 19 bp, Mus musculus
  siRNA target sequence for Pla2g7 (NM_013737.2,1072-1090).
cgattcttgacattgaaca

SEQ ID NO: 591911 - DNA, 19 bp, Mus musculus
  siRNA target sequence for Pla2g7 (NM_013737.2,1097-1115).
cccaaaagagaatgtacta

SEQ ID NO: 591912 - DNA, 19 bp, Mus musculus
  siRNA target sequence for Pla2g7 (NM_013737.2,1150-1168).
ctattgatgagactaaaat

SEQ ID NO: 591913 - DNA, 19 bp, Mus musculus
  siRNA target sequence for Pla2g7 (NM_013737.2,1170-1188).
gctttgatgggacattctt

SEQ ID NO: 591914 - DNA, 19 bp, Mus musculus
  siRNA target sequence for Pla2g7 (NM_013737.2,1427-1445).
ctttgacgactttactttt

SEQ ID NO: 591915 - DNA, 19 bp, Mus musculus
  siRNA target sequence for Pla2g7 (NM_013737.2,1477-1495).
cactgaaaggagaaatcga

SEQ ID NO: 591916 - DNA, 19 bp, Mus musculus
  siRNA target sequence for Pla2g7 (NM_013737.2,1528-1546).
cttcgatggctttcttaca

SEQ ID NO: 591917 - DNA, 19 bp, Mus musculus
  siRNA target sequence for Pla2g7 (NM_013737.2,1531-1549).
cgatggctttcttacaaaa

SEQ ID NO: 591918 - DNA, 19 bp, Mus musculus
  siRNA target sequence for Pon2 (NM_183308.1,156-174).
cgctcagaagtcgacttaa

SEQ ID NO: 591919 - DNA, 19 bp, Mus musculus
  siRNA target sequence for Pon2 (NM_183308.1,157-175).
gctcagaagtcgacttaaa

SEQ ID NO: 591920 - DNA, 19 bp, Mus musculus
  siRNA target sequence for Pon2 (NM_183308.1,178-196).
ctccagagaagtagaatct

SEQ ID NO: 591921 - DNA, 19 bp, Mus musculus
  siRNA target sequence for Pon2 (NM_183308.1,180-198).
ccagagaagtagaatctgt

SEQ ID NO: 591922 - DNA, 19 bp, Mus musculus
  siRNA target sequence for Pon2 (NM_183308.1,181-199).
cagagaagtagaatctgta

SEQ ID NO: 591923 - DNA, 19 bp, Mus musculus
  siRNA target sequence for Pon2 (NM_183308.1,206-224).
ccaaactgccacctcatta

SEQ ID NO: 591924 - DNA, 19 bp, Mus musculus
  siRNA target sequence for Pon2 (NM_183308.1,207-225).
caaactgccacctcattaa

SEQ ID NO: 591925 - DNA, 19 bp, Mus musculus
  siRNA target sequence for Pon2 (NM_183308.1,213-231).
gccacctcattaaaggaat

SEQ ID NO: 591926 - DNA, 19 bp, Mus musculus
  siRNA target sequence for Pon2 (NM_183308.1,433-451).
cattagcactttcatagat

SEQ ID NO: 591927 - DNA, 19 bp, Mus musculus
  siRNA target sequence for Pon2 (NM_183308.1,449-467).
gatgacgatgatacagttt

SEQ ID NO: 591928 - DNA, 19 bp, Mus musculus
  siRNA target sequence for Pon2 (NM_183308.1,479-497).
gtaaaccacccacaattca

SEQ ID NO: 591929 - DNA, 19 bp, Mus musculus
  siRNA target sequence for Pon2 (NM_183308.1,485-503).
cacccacaattcaagagta

SEQ ID NO: 591930 - DNA, 19 bp, Mus musculus
  siRNA target sequence for Pon2 (NM_183308.1,496-514).
caagagtacagtggaaatt

SEQ ID NO: 591931 - DNA, 19 bp, Mus musculus
  siRNA target sequence for Pon2 (NM_183308.1,501-519).
gtacagtggaaatttttaa

SEQ ID NO: 591932 - DNA, 19 bp, Mus musculus
  siRNA target sequence for Pon2 (NM_183308.1,686-704).
cactgggcaaatgttgttt

SEQ ID NO: 591933 - DNA, 19 bp, Mus musculus
  siRNA target sequence for Pon2 (NM_183308.1,750-768).
ccgccaacgggatcaatat

SEQ ID NO: 591934 - DNA, 19 bp, Mus musculus
  siRNA target sequence for Pon2 (NM_183308.1,751-769).
cgccaacgggatcaatatt

SEQ ID NO: 591935 - DNA, 19 bp, Mus musculus
  siRNA target sequence for Pon2 (NM_183308.1,752-770).
gccaacgggatcaatattt

SEQ ID NO: 591936 - DNA, 19 bp, Mus musculus
  siRNA target sequence for Pon2 (NM_183308.1,754-772).
caacgggatcaatatttca

SEQ ID NO: 591937 - DNA, 19 bp, Mus musculus
  siRNA target sequence for Pon2 (NM_183308.1,774-792).
ctgataaaaagtatgtcta

SEQ ID NO: 591938 - DNA, 19 bp, Mus musculus
  siRNA target sequence for Pon2 (NM_183308.1,836-854).
caacctaatatgaatttaa

SEQ ID NO: 591939 - DNA, 19 bp, Mus musculus
  siRNA target sequence for Pon2 (NM_183308.1,840-858).
ctaatatgaatttaactca

SEQ ID NO: 591940 - DNA, 19 bp, Mus musculus
  siRNA target sequence for Pon2 (NM_183308.1,886-904).
ggtggacaatttatctatt

SEQ ID NO: 591941 - DNA, 19 bp, Mus musculus
  siRNA target sequence for Pon2 (NM_183308.1,931-949).
cggctgtcaccctaatgga

SEQ ID NO: 591942 - DNA, 19 bp, Mus musculus
  siRNA target sequence for Pon2 (NM_183308.1,992-1010).
gaggtcctccgcattcaga

SEQ ID NO: 591943 - DNA, 19 bp, Mus musculus
  siRNA target sequence for Pon2 (NM_183308.1,997-1015).
cctccgcattcagaacatt

SEQ ID NO: 591944 - DNA, 19 bp, Mus musculus
  siRNA target sequence for Pon2 (NM_183308.1,1000-1018).
ccgcattcagaacattcta

SEQ ID NO: 591945 - DNA, 19 bp, Mus musculus
  siRNA target sequence for Pon2 (NM_183308.1,1001-1019).
cgcattcagaacattctat

SEQ ID NO: 591946 - DNA, 19 bp, Mus musculus
  siRNA target sequence for Pon2 (NM_183308.1,1034-1052).
gtgacaacggtgtatatca

SEQ ID NO: 591947 - DNA, 19 bp, Mus musculus
  siRNA target sequence for Pon2 (NM_183308.1,1038-1056).
caacggtgtatatcaacaa

SEQ ID NO: 591948 - DNA, 19 bp, Mus musculus
  siRNA target sequence for Pon2 (NM_183308.1,1077-1095).
gttctgtggcgaccatata

SEQ ID NO: 591949 - DNA, 19 bp, Mus musculus
  siRNA target sequence for Pon2 (NM_183308.1,1080-1098).
ctgtggcgaccatatatga

SEQ ID NO: 591950 - DNA, 19 bp, Mus musculus
  siRNA target sequence for Pon2 (NM_183308.1,1082-1100).
gtggcgaccatatatgata

SEQ ID NO: 591951 - DNA, 19 bp, Mus musculus
  siRNA target sequence for Pon2 (NM_183308.1,1086-1104).
cgaccatatatgataggaa

SEQ ID NO: 591952 - DNA, 19 bp, Mus musculus
  siRNA target sequence for Pon2 (NM_183308.1,1090-1108).
catatatgataggaaactt

SEQ ID NO: 591953 - DNA, 19 bp, Mus musculus
  siRNA target sequence for Pon2 (NM_183308.1,1106-1124).
cttctcgtaggcactttat

SEQ ID NO: 591954 - DNA, 19 bp, Mus musculus
  siRNA target sequence for Lip1 (NM_021460.1,72-90).
ggtgcccacgggaactgta

SEQ ID NO: 591955 - DNA, 19 bp, Mus musculus
  siRNA target sequence for Lip1 (NM_021460.1,73-91).
gtgcccacgggaactgtat

SEQ ID NO: 591956 - DNA, 19 bp, Mus musculus
  siRNA target sequence for Lip1 (NM_021460.1,75-93).
gcccacgggaactgtatca

SEQ ID NO: 591957 - DNA, 19 bp, Mus musculus
  siRNA target sequence for Lip1 (NM_021460.1,100-118).
gatcctgaagtcaacatga

SEQ ID NO: 591958 - DNA, 19 bp, Mus musculus
  siRNA target sequence for Lip1 (NM_021460.1,106-124).
gaagtcaacatgaatgtga

SEQ ID NO: 591959 - DNA, 19 bp, Mus musculus
  siRNA target sequence for Lip1 (NM_021460.1,135-153).
catgcgctggggatatcct

SEQ ID NO: 591960 - DNA, 19 bp, Mus musculus
  siRNA target sequence for Lip1 (NM_021460.1,174-192).
gacaggagatggctatatt

SEQ ID NO: 591961 - DNA, 19 bp, Mus musculus
  siRNA target sequence for Lip1 (NM_021460.1,185-203).
gctatattctgagtattca

SEQ ID NO: 591962 - DNA, 19 bp, Mus musculus
  siRNA target sequence for Lip1 (NM_021460.1,245-263).
ccagaccagttgtgtatct

SEQ ID NO: 591963 - DNA, 19 bp, Mus musculus
  siRNA target sequence for Lip1 (NM_021460.1,393-411).
gaagcacaagactctttca

SEQ ID NO: 591964 - DNA, 19 bp, Mus musculus
  siRNA target sequence for Lip1 (NM_021460.1,463-481).
gacctacctgcttcaatta

SEQ ID NO: 591965 - DNA, 19 bp, Mus musculus
  siRNA target sequence for Lip1 (NM_021460.1,469-487).
cctgcttcaattaactaca

SEQ ID NO: 591966 - DNA, 19 bp, Mus musculus
  siRNA target sequence for Lip1 (NM_021460.1,470-488).
ctgcttcaattaactacat

SEQ ID NO: 591967 - DNA, 19 bp, Mus musculus
  siRNA target sequence for Lip1 (NM_021460.1,472-490).
gcttcaattaactacattt

SEQ ID NO: 591968 - DNA, 19 bp, Mus musculus
  siRNA target sequence for Lip1 (NM_021460.1,577-595).
gagttggcaaagaagatta

SEQ ID NO: 591969 - DNA, 19 bp, Mus musculus
  siRNA target sequence for Lip1 (NM_021460.1,579-597).
gttggcaaagaagattaaa

SEQ ID NO: 591970 - DNA, 19 bp, Mus musculus
  siRNA target sequence for Lip1 (NM_021460.1,583-601).
gcaaagaagattaaaatgt

SEQ ID NO: 591971 - DNA, 19 bp, Mus musculus
  siRNA target sequence for Lip1 (NM_021460.1,616-634).
cccgtgttgtctctcaatt

SEQ ID NO: 591972 - DNA, 19 bp, Mus musculus
  siRNA target sequence for Lip1 (NM_021460.1,617-635).
ccgtgttgtctctcaattt

SEQ ID NO: 591973 - DNA, 19 bp, Mus musculus
  siRNA target sequence for Lip1 (NM_021460.1,621-639).
gttgtctctcaattttgct

SEQ ID NO: 591974 - DNA, 19 bp, Mus musculus
  siRNA target sequence for Lip1 (NM_021460.1,677-695).
ctcttctcaaggacatgtt

SEQ ID NO: 591975 - DNA, 19 bp, Mus musculus
  siRNA target sequence for Lip1 (NM_021460.1,755-773).
gcacccacgtcatcatgaa

SEQ ID NO: 591976 - DNA, 19 bp, Mus musculus
  siRNA target sequence for Lip1 (NM_021460.1,798-816).
cctgctatgtggcttcaat

SEQ ID NO: 591977 - DNA, 19 bp, Mus musculus
  siRNA target sequence for Lip1 (NM_021460.1,802-820).
ctatgtggcttcaatgaga

SEQ ID NO: 591978 - DNA, 19 bp, Mus musculus
  siRNA target sequence for Lip1 (NM_021460.1,808-826).
ggcttcaatgagaagaatt

SEQ ID NO: 591979 - DNA, 19 bp, Mus musculus
  siRNA target sequence for Lip1 (NM_021460.1,809-827).
gcttcaatgagaagaattt

SEQ ID NO: 591980 - DNA, 19 bp, Mus musculus
  siRNA target sequence for Lip1 (NM_021460.1,880-898).
gtgcaaaacatgttacact

SEQ ID NO: 591981 - DNA, 19 bp, Mus musculus
  siRNA target sequence for Lip1 (NM_021460.1,920-938).
gtaagcttcaagcttttga

SEQ ID NO: 591982 - DNA, 19 bp, Mus musculus
  siRNA target sequence for Lip1 (NM_021460.1,937-955).
gactggggaagcagtgaaa

SEQ ID NO: 591983 - DNA, 19 bp, Mus musculus
  siRNA target sequence for Lip1 (NM_021460.1,947-965).
gcagtgaaaagaattattt

SEQ ID NO: 591984 - DNA, 19 bp, Mus musculus
  siRNA target sequence for Lip1 (NM_021460.1,985-1003).
cctccctcgtacaacataa

SEQ ID NO: 591985 - DNA, 19 bp, Mus musculus
  siRNA target sequence for Lip1 (NM_021460.1,992-1010).
cgtacaacataaaaaacat

SEQ ID NO: 591986 - DNA, 19 bp, Mus musculus
  siRNA target sequence for Lip1 (NM_021460.1,1057-1075).
gacatcaatgacatcacta

SEQ ID NO: 591987 - DNA, 19 bp, Mus musculus
  siRNA target sequence for Lip1 (NM_021460.1,1066-1084).
gacatcactatcttactga

SEQ ID NO: 591988 - DNA, 19 bp, Mus musculus
  siRNA target sequence for Lip1 (NM_021460.1,1073-1091).
ctatcttactgactcaaat

SEQ ID NO: 591989 - DNA, 19 bp, Mus musculus
  siRNA target sequence for Lip1 (NM_021460.1,1101-1119).
ggtgtatcacaagaacatt

SEQ ID NO: 591990 - DNA, 19 bp, Mus musculus
  siRNA target sequence for Lip1 (NM_021460.1,1127-1145).
gggaccatctggattttat

SEQ ID NO: 591991 - DNA, 19 bp, Mus musculus
  siRNA target sequence for Lip1 (NM_021460.1,1166-1184).
ggaaactgtatgatgaaat

SEQ ID NO: 591992 - DNA, 19 bp, Mus musculus
  siRNA target sequence for H6pd (NM_173371.2,344-362).
ggaactcaagggtcatgtt

SEQ ID NO: 591993 - DNA, 19 bp, Mus musculus
  siRNA target sequence for H6pd (NM_173371.2,382-400).
caaccggggacctagctaa

SEQ ID NO: 591994 - DNA, 19 bp, Mus musculus
  siRNA target sequence for H6pd (NM_173371.2,418-436).
gactgtttcagctatacct

SEQ ID NO: 591995 - DNA, 19 bp, Mus musculus
  siRNA target sequence for H6pd (NM_173371.2,447-465).
gggaagggccacagtttca

SEQ ID NO: 591996 - DNA, 19 bp, Mus musculus
  siRNA target sequence for H6pd (NM_173371.2,559-577).
ccagtcgctgtgatgaact

SEQ ID NO: 591997 - DNA, 19 bp, Mus musculus
  siRNA target sequence for H6pd (NM_173371.2,640-658).
ccctcaacaaggatattga

SEQ ID NO: 591998 - DNA, 19 bp, Mus musculus
  siRNA target sequence for H6pd (NM_173371.2,691-709).
caggcaggatcttctactt

SEQ ID NO: 591999 - DNA, 19 bp, Mus musculus
  siRNA target sequence for H6pd (NM_173371.2,722-740).
ctttgcctacgcagacatt

SEQ ID NO: 592000 - DNA, 19 bp, Mus musculus
  siRNA target sequence for H6pd (NM_173371.2,733-751).
cagacattgcccgtaacat

SEQ ID NO: 592001 - DNA, 19 bp, Mus musculus
  siRNA target sequence for H6pd (NM_173371.2,735-753).
gacattgcccgtaacatca

SEQ ID NO: 592002 - DNA, 19 bp, Mus musculus
  siRNA target sequence for H6pd (NM_173371.2,780-798).
gcctggctacgggttgttt

SEQ ID NO: 592003 - DNA, 19 bp, Mus musculus
  siRNA target sequence for H6pd (NM_173371.2,781-799).
cctggctacgggttgtttt

SEQ ID NO: 592004 - DNA, 19 bp, Mus musculus
  siRNA target sequence for H6pd (NM_173371.2,784-802).
ggctacgggttgtttttga

SEQ ID NO: 592005 - DNA, 19 bp, Mus musculus
  siRNA target sequence for H6pd (NM_173371.2,785-803).
gctacgggttgtttttgaa

SEQ ID NO: 592006 - DNA, 19 bp, Mus musculus
  siRNA target sequence for H6pd (NM_173371.2,1004-1022).
cttgaaggagaccatagat

SEQ ID NO: 592007 - DNA, 19 bp, Mus musculus
  siRNA target sequence for H6pd (NM_173371.2,1030-1048).
gtcgggccagtttctatga

SEQ ID NO: 592008 - DNA, 19 bp, Mus musculus
  siRNA target sequence for H6pd (NM_173371.2,1383-1401).
ggctatgttcggattgtgt

SEQ ID NO: 592009 - DNA, 19 bp, Mus musculus
  siRNA target sequence for H6pd (NM_173371.2,1389-1407).
gttcggattgtgtttaaga

SEQ ID NO: 592010 - DNA, 19 bp, Mus musculus
  siRNA target sequence for H6pd (NM_173371.2,1526-1544).
cagccggaacctgttcaaa

SEQ ID NO: 592011 - DNA, 19 bp, Mus musculus
  siRNA target sequence for H6pd (NM_173371.2,1605-1623).
ggccgtcctctgtctgatt

SEQ ID NO: 592012 - DNA, 19 bp, Mus musculus
  siRNA target sequence for H6pd (NM_173371.2,1608-1626).
cgtcctctgtctgattact

SEQ ID NO: 592013 - DNA, 19 bp, Mus musculus
  siRNA target sequence for H6pd (NM_173371.2,1609-1627).
gtcctctgtctgattacta

SEQ ID NO: 592014 - DNA, 19 bp, Mus musculus
  siRNA target sequence for H6pd (NM_173371.2,1871-1889).
ggtgctgataccagatcta

SEQ ID NO: 592015 - DNA, 19 bp, Mus musculus
  siRNA target sequence for H6pd (NM_173371.2,1965-1983).
ccagaggagctgatctcta

SEQ ID NO: 592016 - DNA, 19 bp, Mus musculus
  siRNA target sequence for H6pd (NM_173371.2,2091-2109).
ctggccacaggacattaca

SEQ ID NO: 592017 - DNA, 19 bp, Mus musculus
  siRNA target sequence for H6pd (NM_173371.2,2217-2235).
gtcagggtaccctactaca

SEQ ID NO: 592018 - DNA, 19 bp, Mus musculus
  siRNA target sequence for H6pd (NM_173371.2,2221-2239).
gggtaccctactacaacat

SEQ ID NO: 592019 - DNA, 19 bp, Mus musculus
  siRNA target sequence for H6pd (NM_173371.2,2522-2540).
ggtcatgggcaggacaaaa

SEQ ID NO: 592020 - DNA, 19 bp, Mus musculus
  siRNA target sequence for Pgls (NM_025396.1,358-376).
ccaggtccttaccatcaat

SEQ ID NO: 592021 - DNA, 19 bp, Mus musculus
  siRNA target sequence for Pgls (NM_025396.1,788-806).
gagaagcattccacattgt

SEQ ID NO: 592022 - DNA, 19 bp, Mus musculus
  siRNA target sequence for Mgll (NM_011844.3,392-410).
caggcgaactccacagaat

SEQ ID NO: 592023 - DNA, 19 bp, Mus musculus
  siRNA target sequence for Mgll (NM_011844.3,395-413).
gcgaactccacagaatgtt

SEQ ID NO: 592024 - DNA, 19 bp, Mus musculus
  siRNA target sequence for Mgll (NM_011844.3,447-465).
gacggacagtacctctttt

SEQ ID NO: 592025 - DNA, 19 bp, Mus musculus
  siRNA target sequence for Mgll (NM_011844.3,449-467).
cggacagtacctcttttgt

SEQ ID NO: 592026 - DNA, 19 bp, Mus musculus
  siRNA target sequence for Mgll (NM_011844.3,450-468).
ggacagtacctcttttgta

SEQ ID NO: 592027 - DNA, 19 bp, Mus musculus
  siRNA target sequence for Mgll (NM_011844.3,453-471).
cagtacctcttttgtagat

SEQ ID NO: 592028 - DNA, 19 bp, Mus musculus
  siRNA target sequence for Mgll (NM_011844.3,549-567).
gagctggctcatatgttga

SEQ ID NO: 592029 - DNA, 19 bp, Mus musculus
  siRNA target sequence for Mgll (NM_011844.3,639-657).
gtgtcggacttccaagttt

SEQ ID NO: 592030 - DNA, 19 bp, Mus musculus
  siRNA target sequence for Mgll (NM_011844.3,645-663).
gacttccaagtttttgtca

SEQ ID NO: 592031 - DNA, 19 bp, Mus musculus
  siRNA target sequence for Mgll (NM_011844.3,918-936).
gtgctgtctcggaacaagt

SEQ ID NO: 592032 - DNA, 19 bp, Mus musculus
  siRNA target sequence for Mgll (NM_011844.3,937-955).
cggaggttgacctgtacaa

SEQ ID NO: 592033 - DNA, 19 bp, Mus musculus
  siRNA target sequence for Mgll (NM_011844.3,1110-1128).
gcctacctgctcatggaat

SEQ ID NO: 592034 - DNA, 19 bp, Mus musculus
  siRNA target sequence for Mgll (NM_011844.3,1213-1231).
ccgtcctccatgaagtaaa

SEQ ID NO: 592035 - DNA, 19 bp, Mus musculus
  siRNA target sequence for Mgll (NM_011844.3,1215-1233).
gtcctccatgaagtaaact

SEQ ID NO: 592036 - DNA, 19 bp, Mus musculus
  siRNA target sequence for 2210013M04Rik (NM_178595.2,130-148).
ggcggtgctggggcaaata

SEQ ID NO: 592037 - DNA, 19 bp, Mus musculus
  siRNA target sequence for 2210013M04Rik (NM_178595.2,134-152).
gtgctggggcaaatagcaa

SEQ ID NO: 592038 - DNA, 19 bp, Mus musculus
  siRNA target sequence for 2210013M04Rik (NM_178595.2,161-179).
ggagtggcggagaattgga

SEQ ID NO: 592039 - DNA, 19 bp, Mus musculus
  siRNA target sequence for 2210013M04Rik (NM_178595.2,407-425).
ggagtccgttcctgcatta

SEQ ID NO: 592040 - DNA, 19 bp, Mus musculus
  siRNA target sequence for 2210013M04Rik (NM_178595.2,429-447).
gtctgaactccaatgcaat

SEQ ID NO: 592041 - DNA, 19 bp, Mus musculus
  siRNA target sequence for 2210013M04Rik (NM_178595.2,477-495).
ccacacaccctaatatggt

SEQ ID NO: 592042 - DNA, 19 bp, Mus musculus
  siRNA target sequence for Nudt7 (NM_024437.1,112-130).
ggctcgcctgagaaagtct

SEQ ID NO: 592043 - DNA, 19 bp, Mus musculus
  siRNA target sequence for Nudt7 (NM_024437.1,131-149).
gatgtcgggaccagatatt

SEQ ID NO: 592044 - DNA, 19 bp, Mus musculus
  siRNA target sequence for Nudt7 (NM_024437.1,157-175).
gtcctctaataaattctct

SEQ ID NO: 592045 - DNA, 19 bp, Mus musculus
  siRNA target sequence for Nudt7 (NM_024437.1,379-397).
cctggtgccatacgtattt

SEQ ID NO: 592046 - DNA, 19 bp, Mus musculus
  siRNA target sequence for Nudt7 (NM_024437.1,382-400).
ggtgccatacgtatttgat

SEQ ID NO: 592047 - DNA, 19 bp, Mus musculus
  siRNA target sequence for Nudt7 (NM_024437.1,385-403).
gccatacgtatttgataat

SEQ ID NO: 592048 - DNA, 19 bp, Mus musculus
  siRNA target sequence for Nudt7 (NM_024437.1,418-436).
ccccgtagtgggttttcta

SEQ ID NO: 592049 - DNA, 19 bp, Mus musculus
  siRNA target sequence for Nudt7 (NM_024437.1,420-438).
ccgtagtgggttttctaga

SEQ ID NO: 592050 - DNA, 19 bp, Mus musculus
  siRNA target sequence for Nudt7 (NM_024437.1,454-472).
ccaacctaatgctgatgaa

SEQ ID NO: 592051 - DNA, 19 bp, Mus musculus
  siRNA target sequence for Nudt7 (NM_024437.1,554-572).
cgtgatttcatcatgcatt

SEQ ID NO: 592052 - DNA, 19 bp, Mus musculus
  siRNA target sequence for Nudt7 (NM_024437.1,591-609).
ctgagactggtgtgaacta

SEQ ID NO: 592053 - DNA, 19 bp, Mus musculus
  siRNA target sequence for Nudt7 (NM_024437.1,597-615).
ctggtgtgaactacctaat

SEQ ID NO: 592054 - DNA, 19 bp, Mus musculus
  siRNA target sequence for Nudt7 (NM_024437.1,641-659).
gtgttggtggccttaatta

SEQ ID NO: 592055 - DNA, 19 bp, Mus musculus
  siRNA target sequence for Nudt7 (NM_024437.1,643-661).
gttggtggccttaattatt

SEQ ID NO: 592056 - DNA, 19 bp, Mus musculus
  siRNA target sequence for Nudt7 (NM_024437.1,649-667).
ggccttaattattttggaa

SEQ ID NO: 592057 - DNA, 19 bp, Mus musculus
  siRNA target sequence for Nudt7 (NM_024437.1,672-690).
gtcctgccttcaagattga

SEQ ID NO: 592058 - DNA, 19 bp, Mus musculus
  siRNA target sequence for Nudt7 (NM_024437.1,674-692).
cctgccttcaagattgatt

SEQ ID NO: 592059 - DNA, 19 bp, Mus musculus
  siRNA target sequence for Nudt7 (NM_024437.1,706-724).
cctgataccgtcttgtgaa

SEQ ID NO: 592060 - DNA, 19 bp, Mus musculus
  siRNA target sequence for Nudt7 (NM_024437.1,707-725).
ctgataccgtcttgtgaaa

SEQ ID NO: 592061 - DNA, 19 bp, Mus musculus
  siRNA target sequence for Nudt7 (NM_024446.2,1816-1834).
gttttgggaaacaatctga

SEQ ID NO: 592062 - DNA, 19 bp, Mus musculus
  siRNA target sequence for Nudt7 (NM_024446.2,2257-2275).
gtctactaccagaagcaaa

SEQ ID NO: 592063 - DNA, 19 bp, Mus musculus
  siRNA target sequence for Nudt7 (NM_024446.2,2262-2280).
ctaccagaagcaaatcaca

SEQ ID NO: 592064 - DNA, 19 bp, Mus musculus
  siRNA target sequence for Ppt1 (NM_008917.1,190-208).
catgagcatgggtgtcatt

SEQ ID NO: 592065 - DNA, 19 bp, Mus musculus
  siRNA target sequence for Ppt1 (NM_008917.1,322-340).
caacatggtgtgtcagatt

SEQ ID NO: 592066 - DNA, 19 bp, Mus musculus
  siRNA target sequence for Ppt1 (NM_008917.1,362-380).
cagcagggatacaatgcta

SEQ ID NO: 592067 - DNA, 19 bp, Mus musculus
  siRNA target sequence for Ppt1 (NM_008917.1,364-382).
gcagggatacaatgctatt

SEQ ID NO: 592068 - DNA, 19 bp, Mus musculus
  siRNA target sequence for Ppt1 (NM_008917.1,457-475).
ctcagttggaggacaacat

SEQ ID NO: 592069 - DNA, 19 bp, Mus musculus
  siRNA target sequence for Ppt1 (NM_008917.1,516-534).
ctcacatctgcgacttcat

SEQ ID NO: 592070 - DNA, 19 bp, Mus musculus
  siRNA target sequence for Ppt1 (NM_008917.1,518-536).
cacatctgcgacttcatca

SEQ ID NO: 592071 - DNA, 19 bp, Mus musculus
  siRNA target sequence for Ppt1 (NM_008917.1,553-571).
cggtgcttactccaaactt

SEQ ID NO: 592072 - DNA, 19 bp, Mus musculus
  siRNA target sequence for Ppt1 (NM_008917.1,632-650).
cgaaactacagcatcttct

SEQ ID NO: 592073 - DNA, 19 bp, Mus musculus
  siRNA target sequence for Ppt1 (NM_008917.1,668-686).
gagaggtgtgtcaatgagt

SEQ ID NO: 592074 - DNA, 19 bp, Mus musculus
  siRNA target sequence for Ppt1 (NM_008917.1,764-782).
gactctgagtggtttggat

SEQ ID NO: 592075 - DNA, 19 bp, Mus musculus
  siRNA target sequence for Ppt1 (NM_008917.1,821-839).
caggagagcactctataca

SEQ ID NO: 592076 - DNA, 19 bp, Mus musculus
  siRNA target sequence for Ppt1 (NM_008917.1,901-919).
ggaaggggaccatcttcaa

SEQ ID NO: 592077 - DNA, 19 bp, Mus musculus
  siRNA target sequence for Ppt1 (NM_008917.1,933-951).
ggtttactgcccacatcat

SEQ ID NO: 592078 - DNA, 19 bp, Mus musculus
  siRNA target sequence for Ppt1 (NM_008917.1,934-952).
gtttactgcccacatcata

SEQ ID NO: 592079 - DNA, 19 bp, Mus musculus
  siRNA target sequence for Ppt1 (NM_008917.1,942-960).
cccacatcataccttttct

SEQ ID NO: 592080 - DNA, 19 bp, Mus musculus
  siRNA target sequence for Ppt1 (NM_008917.1,943-961).
ccacatcataccttttctt

SEQ ID NO: 592081 - DNA, 19 bp, Mus musculus
  siRNA target sequence for Ppt2 (NM_019441.2,300-318).
ctggactatatcaatgaga

SEQ ID NO: 592082 - DNA, 19 bp, Mus musculus
  siRNA target sequence for Ppt2 (NM_019441.2,615-633).
ctctatcgggtctgctata

SEQ ID NO: 592083 - DNA, 19 bp, Mus musculus
  siRNA target sequence for Ppt2 (NM_019441.2,617-635).
ctatcgggtctgctatagt

SEQ ID NO: 592084 - DNA, 19 bp, Mus musculus
  siRNA target sequence for Ppt2 (NM_019441.2,679-697).
ctcaccacgatgacttgta

SEQ ID NO: 592085 - DNA, 19 bp, Mus musculus
  siRNA target sequence for Ppt2 (NM_019441.2,757-775).
ctgcatggcggaagaactt

SEQ ID NO: 592086 - DNA, 19 bp, Mus musculus
  siRNA target sequence for Ppt2 (NM_019441.2,800-818).
gattgggggtcctgatgat

SEQ ID NO: 592087 - DNA, 19 bp, Mus musculus
  siRNA target sequence for Ppt2 (NM_019441.2,810-828).
cctgatgatggcgttatca

SEQ ID NO: 592088 - DNA, 19 bp, Mus musculus
  siRNA target sequence for Ppt2 (NM_019441.2,899-917).
ggtgtatcttcgagattct

SEQ ID NO: 592089 - DNA, 19 bp, Mus musculus
  siRNA target sequence for Ppt2 (NM_019441.2,912-930).
gattcttttgggttgaaga

SEQ ID NO: 592090 - DNA, 19 bp, Mus musculus
  siRNA target sequence for Ppt2 (NM_019441.2,1002-1020).
cgtacgctctacgatactt

SEQ ID NO: 592091 - DNA, 19 bp, Mus musculus
  siRNA target sequence for Hagh (NM_024284.1,216-234).
ccctgactgacaactacat

SEQ ID NO: 592092 - DNA, 19 bp, Mus musculus
  siRNA target sequence for Hagh (NM_024284.1,403-421).
gcctgggctgaaggtttat

SEQ ID NO: 592093 - DNA, 19 bp, Mus musculus
  siRNA target sequence for Hagh (NM_024284.1,484-502).
ggggtctctcagtgtcaaa

SEQ ID NO: 592094 - DNA, 19 bp, Mus musculus
  siRNA target sequence for Hagh (NM_024284.1,525-543).
cttcgggacacatctgtta

SEQ ID NO: 592095 - DNA, 19 bp, Mus musculus
  siRNA target sequence for Hagh (NM_024284.1,528-546).
cgggacacatctgttactt

SEQ ID NO: 592096 - DNA, 19 bp, Mus musculus
  siRNA target sequence for Hagh (NM_024284.1,588-606).
caggtgacacattgtttgt

SEQ ID NO: 592097 - DNA, 19 bp, Mus musculus
  siRNA target sequence for Hagh (NM_024284.1,679-697).
gcttcctccagacacaaaa

SEQ ID NO: 592098 - DNA, 19 bp, Mus musculus
  siRNA target sequence for Hagh (NM_024284.1,683-701).
cctccagacacaaaagtct

SEQ ID NO: 592099 - DNA, 19 bp, Mus musculus
  siRNA target sequence for Hagh (NM_024284.1,720-738).
ccgtaaacaaccttaagtt

SEQ ID NO: 592100 - DNA, 19 bp, Mus musculus
  siRNA target sequence for Hagh (NM_024284.1,721-739).
cgtaaacaaccttaagttt

SEQ ID NO: 592101 - DNA, 19 bp, Mus musculus
  siRNA target sequence for Hagh (NM_024284.1,757-775).
cggcaatgctgccattcaa

SEQ ID NO: 592102 - DNA, 19 bp, Mus musculus
  siRNA target sequence for Hagh (NM_024284.1,759-777).
gcaatgctgccattcaaga

SEQ ID NO: 592103 - DNA, 19 bp, Mus musculus
  siRNA target sequence for Hagh (NM_024284.1,787-805).
ctgggccaaggagaagtat

SEQ ID NO: 592104 - DNA, 19 bp, Mus musculus
  siRNA target sequence for Sts (NM_009293.1,1277-1295).
gcgagacgctcgtctactt

SEQ ID NO: 592105 - DNA, 19 bp, Mus musculus
  siRNA target sequence for Sts (NM_009293.1,1279-1297).
gagacgctcgtctacttca

SEQ ID NO: 592106 - DNA, 19 bp, Mus musculus
  siRNA target sequence for Sts (NM_009293.1,1660-1678).
gtgtggaaggccttctact

SEQ ID NO: 592107 - DNA, 19 bp, Mus musculus
  siRNA target sequence for Arsb (NM_009712.1,256-274).
ggaacgacttgggttttca

SEQ ID NO: 592108 - DNA, 19 bp, Mus musculus
  siRNA target sequence for Arsb (NM_009712.1,322-340).
gcgtggtcctggacaacta

SEQ ID NO: 592109 - DNA, 19 bp, Mus musculus
  siRNA target sequence for Arsb (NM_009712.1,448-466).
gtgttcccctagacgaaaa

SEQ ID NO: 592110 - DNA, 19 bp, Mus musculus
  siRNA target sequence for Arsb (NM_009712.1,530-548).
ggggatgtaccggaaagaa

SEQ ID NO: 592111 - DNA, 19 bp, Mus musculus
  siRNA target sequence for Arsb (NM_009712.1,531-549).
gggatgtaccggaaagaat

SEQ ID NO: 592112 - DNA, 19 bp, Mus musculus
  siRNA target sequence for Arsb (NM_009712.1,533-551).
gatgtaccggaaagaatgt

SEQ ID NO: 592113 - DNA, 19 bp, Mus musculus
  siRNA target sequence for Arsb (NM_009712.1,557-575).
gacacgccgaggattcgat

SEQ ID NO: 592114 - DNA, 19 bp, Mus musculus
  siRNA target sequence for Arsb (NM_009712.1,562-580).
gccgaggattcgataccta

SEQ ID NO: 592115 - DNA, 19 bp, Mus musculus
  siRNA target sequence for Arsb (NM_009712.1,594-612).
ctaggcagtgaagactatt

SEQ ID NO: 592116 - DNA, 19 bp, Mus musculus
  siRNA target sequence for Arsb (NM_009712.1,597-615).
ggcagtgaagactattaca

SEQ ID NO: 592117 - DNA, 19 bp, Mus musculus
  siRNA target sequence for Arsb (NM_009712.1,624-642).
gcctgtgcgccgattgagt

SEQ ID NO: 592118 - DNA, 19 bp, Mus musculus
  siRNA target sequence for Arsb (NM_009712.1,628-646).
gtgcgccgattgagtcttt

SEQ ID NO: 592119 - DNA, 19 bp, Mus musculus
  siRNA target sequence for Arsb (NM_009712.1,630-648).
gcgccgattgagtctttga

SEQ ID NO: 592120 - DNA, 19 bp, Mus musculus
  siRNA target sequence for Arsb (NM_009712.1,631-649).
cgccgattgagtctttgaa

SEQ ID NO: 592121 - DNA, 19 bp, Mus musculus
  siRNA target sequence for Arsb (NM_009712.1,632-650).
gccgattgagtctttgaat

SEQ ID NO: 592122 - DNA, 19 bp, Mus musculus
  siRNA target sequence for Arsb (NM_009712.1,655-673).
cccgctgtgcgcttgactt

SEQ ID NO: 592123 - DNA, 19 bp, Mus musculus
  siRNA target sequence for Arsb (NM_009712.1,656-674).
ccgctgtgcgcttgactta

SEQ ID NO: 592124 - DNA, 19 bp, Mus musculus
  siRNA target sequence for Arsb (NM_009712.1,657-675).
cgctgtgcgcttgacttaa

SEQ ID NO: 592125 - DNA, 19 bp, Mus musculus
  siRNA target sequence for Arsb (NM_009712.1,659-677).
ctgtgcgcttgacttaaga

SEQ ID NO: 592126 - DNA, 19 bp, Mus musculus
  siRNA target sequence for Arsb (NM_009712.1,661-679).
gtgcgcttgacttaagaga

SEQ ID NO: 592127 - DNA, 19 bp, Mus musculus
  siRNA target sequence for Arsb (NM_009712.1,687-705).
gaacctgcaaaagagtata

SEQ ID NO: 592128 - DNA, 19 bp, Mus musculus
  siRNA target sequence for Arsb (NM_009712.1,690-708).
cctgcaaaagagtataaca

SEQ ID NO: 592129 - DNA, 19 bp, Mus musculus
  siRNA target sequence for Arsb (NM_009712.1,691-709).
ctgcaaaagagtataacaa

SEQ ID NO: 592130 - DNA, 19 bp, Mus musculus
  siRNA target sequence for Arsb (NM_009712.1,699-717).
gagtataacaatatttact

SEQ ID NO: 592131 - DNA, 19 bp, Mus musculus
  siRNA target sequence for Arsb (NM_009712.1,741-759).
gctacaaccgtcatagcta

SEQ ID NO: 592132 - DNA, 19 bp, Mus musculus
  siRNA target sequence for Arsb (NM_009712.1,742-760).
ctacaaccgtcatagctaa

SEQ ID NO: 592133 - DNA, 19 bp, Mus musculus
  siRNA target sequence for Arsb (NM_009712.1,853-871).
gcttcatccaagataagca

SEQ ID NO: 592134 - DNA, 19 bp, Mus musculus
  siRNA target sequence for Arsb (NM_009712.1,864-882).
gataagcacagacgtattt

SEQ ID NO: 592135 - DNA, 19 bp, Mus musculus
  siRNA target sequence for Arsb (NM_009712.1,923-941).
cgtcaccaaagccttgaaa

SEQ ID NO: 592136 - DNA, 19 bp, Mus musculus
  siRNA target sequence for Arsb (NM_009712.1,955-973).
ggaacaacacggtcttcat

SEQ ID NO: 592137 - DNA, 19 bp, Mus musculus
  siRNA target sequence for Arsb (NM_009712.1,1088-1106).
ccccttgctgaaacagaaa

SEQ ID NO: 592138 - DNA, 19 bp, Mus musculus
  siRNA target sequence for Arsb (NM_009712.1,1301-1319).
ggaggagcccacttacaaa

SEQ ID NO: 592139 - DNA, 19 bp, Mus musculus
  siRNA target sequence for Ids (NM_010498.1,268-286).
catcccatagcgttctctt

SEQ ID NO: 592140 - DNA, 19 bp, Mus musculus
  siRNA target sequence for Ids (NM_010498.1,273-291).
catagcgttctctttcaga

SEQ ID NO: 592141 - DNA, 19 bp, Mus musculus
  siRNA target sequence for Ids (NM_010498.1,361-379).
ccacccgcctgtatgactt

SEQ ID NO: 592142 - DNA, 19 bp, Mus musculus
  siRNA target sequence for Ids (NM_010498.1,365-383).
ccgcctgtatgacttcaat

SEQ ID NO: 592143 - DNA, 19 bp, Mus musculus
  siRNA target sequence for Ids (NM_010498.1,366-384).
cgcctgtatgacttcaatt

SEQ ID NO: 592144 - DNA, 19 bp, Mus musculus
  siRNA target sequence for Ids (NM_010498.1,473-491).
ctttcaccctggtatatct

SEQ ID NO: 592145 - DNA, 19 bp, Mus musculus
  siRNA target sequence for Ids (NM_010498.1,483-501).
ggtatatcttccaatcaca

SEQ ID NO: 592146 - DNA, 19 bp, Mus musculus
  siRNA target sequence for Ids (NM_010498.1,504-522).
gatgattatccatatagct

SEQ ID NO: 592147 - DNA, 19 bp, Mus musculus
  siRNA target sequence for Ids (NM_010498.1,523-541).
ggtcttttccaccttatca

SEQ ID NO: 592148 - DNA, 19 bp, Mus musculus
  siRNA target sequence for Ids (NM_010498.1,524-542).
gtcttttccaccttatcat

SEQ ID NO: 592149 - DNA, 19 bp, Mus musculus
  siRNA target sequence for Ids (NM_010498.1,572-590).
gacgtgtaagggacaagat

SEQ ID NO: 592150 - DNA, 19 bp, Mus musculus
  siRNA target sequence for Ids (NM_010498.1,678-696).
gccatcaggttgttggaaa

SEQ ID NO: 592151 - DNA, 19 bp, Mus musculus
  siRNA target sequence for Ids (NM_010498.1,761-779).
cagataccccaaggaattt

SEQ ID NO: 592152 - DNA, 19 bp, Mus musculus
  siRNA target sequence for Ids (NM_010498.1,888-906).
gatgtccaagccttaaaca

SEQ ID NO: 592153 - DNA, 19 bp, Mus musculus
  siRNA target sequence for Ids (NM_010498.1,891-909).
gtccaagccttaaacatca

SEQ ID NO: 592154 - DNA, 19 bp, Mus musculus
  siRNA target sequence for Ids (NM_010498.1,954-972).
cgccagagctactttgctt

SEQ ID NO: 592155 - DNA, 19 bp, Mus musculus
  siRNA target sequence for Ids (NM_010498.1,1029-1047).
cgtctagcccacaacacaa

SEQ ID NO: 592156 - DNA, 19 bp, Mus musculus
  siRNA target sequence for Ids (NM_010498.1,1030-1048).
gtctagcccacaacacaat

SEQ ID NO: 592157 - DNA, 19 bp, Mus musculus
  siRNA target sequence for Ids (NM_010498.1,1032-1050).
ctagcccacaacacaatta

SEQ ID NO: 592158 - DNA, 19 bp, Mus musculus
  siRNA target sequence for Ids (NM_010498.1,1037-1055).
ccacaacacaattattgct

SEQ ID NO: 592159 - DNA, 19 bp, Mus musculus
  siRNA target sequence for Ids (NM_010498.1,1038-1056).
cacaacacaattattgctt

SEQ ID NO: 592160 - DNA, 19 bp, Mus musculus
  siRNA target sequence for Ids (NM_010498.1,1100-1118).
ggccaagtacagcaacttt

SEQ ID NO: 592161 - DNA, 19 bp, Mus musculus
  siRNA target sequence for Ids (NM_010498.1,1185-1203).
ggccagaagctctttccat

SEQ ID NO: 592162 - DNA, 19 bp, Mus musculus
  siRNA target sequence for Ids (NM_010498.1,1256-1274).
cgaggacctcgtagaactt

SEQ ID NO: 592163 - DNA, 19 bp, Mus musculus
  siRNA target sequence for Ids (NM_010498.1,1259-1277).
ggacctcgtagaacttgta

SEQ ID NO: 592164 - DNA, 19 bp, Mus musculus
  siRNA target sequence for Ids (NM_010498.1,1260-1278).
gacctcgtagaacttgtat

SEQ ID NO: 592165 - DNA, 19 bp, Mus musculus
  siRNA target sequence for Ids (NM_010498.1,1262-1280).
cctcgtagaacttgtatct

SEQ ID NO: 592166 - DNA, 19 bp, Mus musculus
  siRNA target sequence for Ids (NM_010498.1,1326-1344).
ggtgccccatcccttcttt

SEQ ID NO: 592167 - DNA, 19 bp, Mus musculus
  siRNA target sequence for Ids (NM_010498.1,1590-1608).
ctggctaacttttctgata

SEQ ID NO: 592168 - DNA, 19 bp, Mus musculus
  siRNA target sequence for Ids (NM_010498.1,1643-1661).
cccactgcaggatcacaat

SEQ ID NO: 592169 - DNA, 19 bp, Mus musculus
  siRNA target sequence for Ids (NM_010498.1,1645-1663).
cactgcaggatcacaatgt

SEQ ID NO: 592170 - DNA, 19 bp, Mus musculus
  siRNA target sequence for Ids (NM_010498.1,1647-1665).
ctgcaggatcacaatgtat

SEQ ID NO: 592171 - DNA, 19 bp, Mus musculus
  siRNA target sequence for Ids (NM_010498.1,1649-1667).
gcaggatcacaatgtatat

SEQ ID NO: 592172 - DNA, 19 bp, Mus musculus
  siRNA target sequence for 2610016K11Rik (NM_029364.1,400-418).
cacgtcgttaacaacactt

SEQ ID NO: 592173 - DNA, 19 bp, Mus musculus
  siRNA target sequence for 2610016K11Rik (NM_029364.1,498-516).
cggctatcagacctttttt

SEQ ID NO: 592174 - DNA, 19 bp, Mus musculus
  siRNA target sequence for 2610016K11Rik (NM_029364.1,510-528).
cttttttgctgggaagtat

SEQ ID NO: 592175 - DNA, 19 bp, Mus musculus
  siRNA target sequence for 2610016K11Rik (NM_029364.1,656-674).
ggaagcacggcgagaacta

SEQ ID NO: 592176 - DNA, 19 bp, Mus musculus
  siRNA target sequence for 2610016K11Rik (NM_029364.1,681-699).
ggactacctgacagatgtt

SEQ ID NO: 592177 - DNA, 19 bp, Mus musculus
  siRNA target sequence for 2610016K11Rik (NM_029364.1,829-847).
gtcatcgcaccaagaaaca

SEQ ID NO: 592178 - DNA, 19 bp, Mus musculus
  siRNA target sequence for 2610016K11Rik (NM_029364.1,906-924).
catgacgaactcgtcaata

SEQ ID NO: 592179 - DNA, 19 bp, Mus musculus
  siRNA target sequence for 2610016K11Rik (NM_029364.1,915-933).
ctcgtcaatacggttctta

SEQ ID NO: 592180 - DNA, 19 bp, Mus musculus
  siRNA target sequence for 2610016K11Rik (NM_029364.1,917-935).
cgtcaatacggttcttaga

SEQ ID NO: 592181 - DNA, 19 bp, Mus musculus
  siRNA target sequence for 2610016K11Rik (NM_029364.1,918-936).
gtcaatacggttcttagat

SEQ ID NO: 592182 - DNA, 19 bp, Mus musculus
  siRNA target sequence for 2610016K11Rik (NM_029364.1,920-938).
caatacggttcttagatga

SEQ ID NO: 592183 - DNA, 19 bp, Mus musculus
  siRNA target sequence for 2610016K11Rik (NM_029364.1,1027-1045).
gacaacacgtatatcttct

SEQ ID NO: 592184 - DNA, 19 bp, Mus musculus
  siRNA target sequence for 2610016K11Rik (NM_029364.1,1307-1325).
cagacgtgctggtggaata

SEQ ID NO: 592185 - DNA, 19 bp, Mus musculus
  siRNA target sequence for 2610016K11Rik (NM_029364.1,1330-1348).
ggagaaggccggaatgtca

SEQ ID NO: 592186 - DNA, 19 bp, Mus musculus
  siRNA target sequence for 2610016K11Rik (NM_029364.1,1375-1393).
cctggagtgtctcaatgtt

SEQ ID NO: 592187 - DNA, 19 bp, Mus musculus
  siRNA target sequence for 2610016K11Rik (NM_029364.1,1376-1394).
ctggagtgtctcaatgttt

SEQ ID NO: 592188 - DNA, 19 bp, Mus musculus
  siRNA target sequence for 2610016K11Rik (NM_029364.1,1409-1427).
gtgaagacgcgtacaacaa

SEQ ID NO: 592189 - DNA, 19 bp, Mus musculus
  siRNA target sequence for 2610016K11Rik (NM_029364.1,1411-1429).
gaagacgcgtacaacaata

SEQ ID NO: 592190 - DNA, 19 bp, Mus musculus
  siRNA target sequence for 2610016K11Rik (NM_029364.1,1414-1432).
gacgcgtacaacaatacct

SEQ ID NO: 592191 - DNA, 19 bp, Mus musculus
  siRNA target sequence for 2610016K11Rik (NM_029364.1,1485-1503).
cgacgaccaggaggtattt

SEQ ID NO: 592192 - DNA, 19 bp, Mus musculus
  siRNA target sequence for 2610016K11Rik (NM_029364.1,1504-1522).
gtcgaagtctacaatatca

SEQ ID NO: 592193 - DNA, 19 bp, Mus musculus
  siRNA target sequence for 2610016K11Rik (NM_029364.1,1506-1524).
cgaagtctacaatatcact

SEQ ID NO: 592194 - DNA, 19 bp, Mus musculus
  siRNA target sequence for 2610016K11Rik (NM_029364.1,1545-1563).
caacattgccaagagtata

SEQ ID NO: 592195 - DNA, 19 bp, Mus musculus
  siRNA target sequence for 2610016K11Rik (NM_029364.1,1559-1577).
gtatagaccctgagctttt

SEQ ID NO: 592196 - DNA, 19 bp, Mus musculus
  siRNA target sequence for 2810429K17Rik (NM_029847.2,236-254).
cttcgatggaagactaaca

SEQ ID NO: 592197 - DNA, 19 bp, Mus musculus
  siRNA target sequence for 2810429K17Rik (NM_029847.2,265-283).
gaagtcaggtagtaaaact

SEQ ID NO: 592198 - DNA, 19 bp, Mus musculus
  siRNA target sequence for 2810429K17Rik (NM_029847.2,309-327).
catggcaccaccttcctaa

SEQ ID NO: 592199 - DNA, 19 bp, Mus musculus
  siRNA target sequence for 2810429K17Rik (NM_029847.2,422-440).
gggtctggatccaaattat

SEQ ID NO: 592200 - DNA, 19 bp, Mus musculus
  siRNA target sequence for 2810429K17Rik (NM_029847.2,423-441).
ggtctggatccaaattata

SEQ ID NO: 592201 - DNA, 19 bp, Mus musculus
  siRNA target sequence for 2810429K17Rik (NM_029847.2,442-460).
cgacatggatggacatcat

SEQ ID NO: 592202 - DNA, 19 bp, Mus musculus
  siRNA target sequence for 2810429K17Rik (NM_029847.2,492-510).
ggaaaagtggactatactt

SEQ ID NO: 592203 - DNA, 19 bp, Mus musculus
  siRNA target sequence for 2810429K17Rik (NM_029847.2,513-531).
ggacatcattccattagta

SEQ ID NO: 592204 - DNA, 19 bp, Mus musculus
  siRNA target sequence for 2810429K17Rik (NM_029847.2,539-557).
ggaagcatggacaagagat

SEQ ID NO: 592205 - DNA, 19 bp, Mus musculus
  siRNA target sequence for 2810429K17Rik (NM_029847.2,547-565).
ggacaagagatgttgcatt

SEQ ID NO: 592206 - DNA, 19 bp, Mus musculus
  siRNA target sequence for 2810429K17Rik (NM_029847.2,550-568).
caagagatgttgcattctt

SEQ ID NO: 592207 - DNA, 19 bp, Mus musculus
  siRNA target sequence for 2810429K17Rik (NM_029847.2,583-601).
gcagacccataattaatct

SEQ ID NO: 592208 - DNA, 19 bp, Mus musculus
  siRNA target sequence for 2810429K17Rik (NM_029847.2,586-604).
gacccataattaatcttat

SEQ ID NO: 592209 - DNA, 19 bp, Mus musculus
  siRNA target sequence for 2810429K17Rik (NM_029847.2,670-688).
ggctaagacaggttaacta

SEQ ID NO: 592210 - DNA, 19 bp, Mus musculus
  siRNA target sequence for 2810429K17Rik (NM_029847.2,672-690).
ctaagacaggttaactaca

SEQ ID NO: 592211 - DNA, 19 bp, Mus musculus
  siRNA target sequence for 2810429K17Rik (NM_029847.2,704-722).
cctttacttgggattgaat

SEQ ID NO: 592212 - DNA, 19 bp, Mus musculus
  siRNA target sequence for 2810429K17Rik (NM_029847.2,796-814).
ggcttgaaaaggtagctta

SEQ ID NO: 592213 - DNA, 19 bp, Mus musculus
  siRNA target sequence for 2810429K17Rik (NM_029847.2,797-815).
gcttgaaaaggtagcttat

SEQ ID NO: 592214 - DNA, 19 bp, Mus musculus
  siRNA target sequence for 2810429K17Rik (NM_029847.2,810-828).
gcttatgatgcaatcaaaa

SEQ ID NO: 592215 - DNA, 19 bp, Mus musculus
  siRNA target sequence for 2810429K17Rik (NM_029847.2,969-987).
gccatgctaggtgaaatta

SEQ ID NO: 592216 - DNA, 19 bp, Mus musculus
  siRNA target sequence for 2810429K17Rik (NM_029847.2,970-988).
ccatgctaggtgaaattat

SEQ ID NO: 592217 - DNA, 19 bp, Mus musculus
  siRNA target sequence for 2810429K17Rik (NM_029847.2,1064-1082).
ggaacaccgccagttttat

SEQ ID NO: 592218 - DNA, 19 bp, Mus musculus
  siRNA target sequence for 2810429K17Rik (NM_029847.2,1065-1083).
gaacaccgccagttttata

SEQ ID NO: 592219 - DNA, 19 bp, Mus musculus
  siRNA target sequence for 2810429K17Rik (NM_029847.2,1071-1089).
cgccagttttataaaatga

SEQ ID NO: 592220 - DNA, 19 bp, Mus musculus
  siRNA target sequence for 2810429K17Rik (NM_029847.2,1170-1188).
gtttctcttgtggatatct

SEQ ID NO: 592221 - DNA, 19 bp, Mus musculus
  siRNA target sequence for 2810429K17Rik (NM_029847.2,1190-1208).
ccctactatgcttgacatt

SEQ ID NO: 592222 - DNA, 19 bp, Mus musculus
  siRNA target sequence for 2810429K17Rik (NM_029847.2,1214-1232).
gattgctctgcctccaaat

SEQ ID NO: 592223 - DNA, 19 bp, Mus musculus
  siRNA target sequence for 2810429K17Rik (NM_029847.2,1250-1268).
gttgacgctgttgtcaaat

SEQ ID NO: 592224 - DNA, 19 bp, Mus musculus
  siRNA target sequence for 2810429K17Rik (NM_029847.2,1312-1330).
ggattctgagtgaattcca

SEQ ID NO: 592225 - DNA, 19 bp, Mus musculus
  siRNA target sequence for 2810429K17Rik (NM_029847.2,1416-1434).
cctcagctcttcgatcttt

SEQ ID NO: 592226 - DNA, 19 bp, Mus musculus
  siRNA target sequence for 2810429K17Rik (NM_029847.2,1440-1458).
gatccggatgagctaacaa

SEQ ID NO: 592227 - DNA, 19 bp, Mus musculus
  siRNA target sequence for 2810429K17Rik (NM_029847.2,1443-1461).
ccggatgagctaacaaaca

SEQ ID NO: 592228 - DNA, 19 bp, Mus musculus
  siRNA target sequence for 2810429K17Rik (NM_029847.2,1444-1462).
cggatgagctaacaaacat

SEQ ID NO: 592229 - DNA, 19 bp, Mus musculus
  siRNA target sequence for 2810429K17Rik (NM_029847.2,1499-1517).
ccagaagcttcgttctatt

SEQ ID NO: 592230 - DNA, 19 bp, Mus musculus
  siRNA target sequence for 2810429K17Rik (NM_029847.2,1502-1520).
gaagcttcgttctattgta

SEQ ID NO: 592231 - DNA, 19 bp, Mus musculus
  siRNA target sequence for 2810429K17Rik (NM_029847.2,1506-1524).
cttcgttctattgtaaact

SEQ ID NO: 592232 - DNA, 19 bp, Mus musculus
  siRNA target sequence for 2810429K17Rik (NM_029847.2,1518-1536).
gtaaactaccctaaagtgt

SEQ ID NO: 592233 - DNA, 19 bp, Mus musculus
  siRNA target sequence for 2810429K17Rik (NM_029847.2,1583-1601).
gcaaagcgtagggcaaaat

SEQ ID NO: 592234 - DNA, 19 bp, Mus musculus
  siRNA target sequence for 2810429K17Rik (NM_029847.2,1589-1607).
cgtagggcaaaattactca

SEQ ID NO: 592235 - DNA, 19 bp, Mus musculus
  siRNA target sequence for 2810429K17Rik (NM_029847.2,1590-1608).
gtagggcaaaattactcaa

SEQ ID NO: 592236 - DNA, 19 bp, Mus musculus
  siRNA target sequence for 2810429K17Rik (NM_029847.2,1595-1613).
gcaaaattactcaaacgtt

SEQ ID NO: 592237 - DNA, 19 bp, Mus musculus
  siRNA target sequence for 2810429K17Rik (NM_029847.2,1596-1614).
caaaattactcaaacgtta

SEQ ID NO: 592238 - DNA, 19 bp, Mus musculus
  siRNA target sequence for 2810429K17Rik (NM_029847.2,1650-1668).
gatccaaggaagtatgaaa

SEQ ID NO: 592239 - DNA, 19 bp, Mus musculus
  siRNA target sequence for 6330406P08Rik (NM_028710.1,310-328).
ggttggcatggctttttct

SEQ ID NO: 592240 - DNA, 19 bp, Mus musculus
  siRNA target sequence for 6330406P08Rik (NM_028710.1,341-359).
cctctcgtggatttctcta

SEQ ID NO: 592241 - DNA, 19 bp, Mus musculus
  siRNA target sequence for 6330406P08Rik (NM_028710.1,346-364).
cgtggatttctctatcagt

SEQ ID NO: 592242 - DNA, 19 bp, Mus musculus
  siRNA target sequence for 6330406P08Rik (NM_028710.1,386-404).
ccaaacatcgtgatcattt

SEQ ID NO: 592243 - DNA, 19 bp, Mus musculus
  siRNA target sequence for 6330406P08Rik (NM_028710.1,387-405).
caaacatcgtgatcatttt

SEQ ID NO: 592244 - DNA, 19 bp, Mus musculus
  siRNA target sequence for 6330406P08Rik (NM_028710.1,492-510).
gaatgaggtttgtagactt

SEQ ID NO: 592245 - DNA, 19 bp, Mus musculus
  siRNA target sequence for 6330406P08Rik (NM_028710.1,702-720).
ggcatcatggctcttatca

SEQ ID NO: 592246 - DNA, 19 bp, Mus musculus
  siRNA target sequence for 6330406P08Rik (NM_028710.1,703-721).
gcatcatggctcttatcat

SEQ ID NO: 592247 - DNA, 19 bp, Mus musculus
  siRNA target sequence for 6330406P08Rik (NM_028710.1,711-729).
gctcttatcatcccaattt

SEQ ID NO: 592248 - DNA, 19 bp, Mus musculus
  siRNA target sequence for 6330406P08Rik (NM_028710.1,731-749).
cgtggcttcgattactact

SEQ ID NO: 592249 - DNA, 19 bp, Mus musculus
  siRNA target sequence for 6330406P08Rik (NM_028710.1,732-750).
gtggcttcgattactactt

SEQ ID NO: 592250 - DNA, 19 bp, Mus musculus
  siRNA target sequence for 6330406P08Rik (NM_028710.1,785-803).
gatgctccaggctacaact

SEQ ID NO: 592251 - DNA, 19 bp, Mus musculus
  siRNA target sequence for 6330406P08Rik (NM_028710.1,957-975).
gggcagtggagttcattga

SEQ ID NO: 592252 - DNA, 19 bp, Mus musculus
  siRNA target sequence for 6330406P08Rik (NM_028710.1,1113-1131).
gtctggtagggcagatcaa

SEQ ID NO: 592253 - DNA, 19 bp, Mus musculus
  siRNA target sequence for 6330406P08Rik (NM_028710.1,1351-1369).
cactagcaccgccttgtta

SEQ ID NO: 592254 - DNA, 19 bp, Mus musculus
  siRNA target sequence for 6330406P08Rik (NM_028710.1,1356-1374).
gcaccgccttgttaagctt

SEQ ID NO: 592255 - DNA, 19 bp, Mus musculus
  siRNA target sequence for 6330406P08Rik (NM_028710.1,1422-1440).
ccccaaaccggaaatttga

SEQ ID NO: 592256 - DNA, 19 bp, Mus musculus
  siRNA target sequence for 6330406P08Rik (NM_028710.1,1543-1561).
gactgtccgcctaaaccat

SEQ ID NO: 592257 - DNA, 19 bp, Mus musculus
  siRNA target sequence for 6330406P08Rik (NM_028710.1,1545-1563).
ctgtccgcctaaaccatta

SEQ ID NO: 592258 - DNA, 19 bp, Mus musculus
  siRNA target sequence for 6330406P08Rik (NM_028710.1,1547-1565).
gtccgcctaaaccattaca

SEQ ID NO: 592259 - DNA, 19 bp, Mus musculus
  siRNA target sequence for 6330406P08Rik (NM_028710.1,1549-1567).
ccgcctaaaccattacaaa

SEQ ID NO: 592260 - DNA, 19 bp, Mus musculus
  siRNA target sequence for 6330406P08Rik (NM_028710.1,1816-1834).
ctgtaacccctatcaaact

SEQ ID NO: 592261 - DNA, 19 bp, Mus musculus
  siRNA target sequence for 9330196J05Rik (NM_173451.1,1060-1078).
ggggccaggacttagaaga

SEQ ID NO: 592262 - DNA, 19 bp, Mus musculus
  siRNA target sequence for 9330196J05Rik (NM_173451.1,1087-1105).
ccctaaaagctcaagttga

SEQ ID NO: 592263 - DNA, 19 bp, Mus musculus
  siRNA target sequence for 9330196J05Rik (NM_173451.1,1197-1215).
cacggatctgagataaaga

SEQ ID NO: 592264 - DNA, 19 bp, Mus musculus
  siRNA target sequence for 9330196J05Rik (NM_173451.1,1214-1232).
gacgcccacccttgataaa

SEQ ID NO: 592265 - DNA, 19 bp, Mus musculus
  siRNA target sequence for 9330196J05Rik (NM_173451.1,1216-1234).
cgcccacccttgataaact

SEQ ID NO: 592266 - DNA, 19 bp, Mus musculus
  siRNA target sequence for 9330196J05Rik (NM_173451.1,1237-1255).
ctgcagaaggagttaagct

SEQ ID NO: 592267 - DNA, 19 bp, Mus musculus
  siRNA target sequence for 9330196J05Rik (NM_173451.1,1248-1266).
gttaagctagagaactact

SEQ ID NO: 592268 - DNA, 19 bp, Mus musculus
  siRNA target sequence for 9330196J05Rik (NM_173451.1,1287-1305).
ccgtccaggagccagttta

SEQ ID NO: 592269 - DNA, 19 bp, Mus musculus
  siRNA target sequence for 9330196J05Rik (NM_173451.1,1288-1306).
cgtccaggagccagtttat

SEQ ID NO: 592270 - DNA, 19 bp, Mus musculus
  siRNA target sequence for 9330196J05Rik (NM_173451.1,1301-1319).
gtttattaccggaaagtat

SEQ ID NO: 592271 - DNA, 19 bp, Mus musculus
  siRNA target sequence for 9330196J05Rik (NM_173451.1,1309-1327).
ccggaaagtatcagataca

SEQ ID NO: 592272 - DNA, 19 bp, Mus musculus
  siRNA target sequence for 9330196J05Rik (NM_173451.1,1333-1351).
gacttcagcattctatcat

SEQ ID NO: 592273 - DNA, 19 bp, Mus musculus
  siRNA target sequence for 9330196J05Rik (NM_173451.1,1335-1353).
cttcagcattctatcatta

SEQ ID NO: 592274 - DNA, 19 bp, Mus musculus
  siRNA target sequence for 9330196J05Rik (NM_173451.1,1374-1392).
ctacctctggacaatgcaa

SEQ ID NO: 592275 - DNA, 19 bp, Mus musculus
  siRNA target sequence for 9330196J05Rik (NM_173451.1,1420-1438).
gctattcaacccatatggt

SEQ ID NO: 592276 - DNA, 19 bp, Mus musculus
  siRNA target sequence for 9330196J05Rik (NM_173451.1,1421-1439).
ctattcaacccatatggtt

SEQ ID NO: 592277 - DNA, 19 bp, Mus musculus
  siRNA target sequence for 9330196J05Rik (NM_173451.1,1481-1499).
caccaagagaggatttgat

SEQ ID NO: 592278 - DNA, 19 bp, Mus musculus
  siRNA target sequence for 9330196J05Rik (NM_173451.1,1520-1538).
gggaagtggtgattattat

SEQ ID NO: 592279 - DNA, 19 bp, Mus musculus
  siRNA target sequence for 9330196J05Rik (NM_173451.1,1521-1539).
ggaagtggtgattattata

SEQ ID NO: 592280 - DNA, 19 bp, Mus musculus
  siRNA target sequence for 9330196J05Rik (NM_173451.1,1572-1590).
ggctatgacttgtacgaaa

SEQ ID NO: 592281 - DNA, 19 bp, Mus musculus
  siRNA target sequence for 9330196J05Rik (NM_173451.1,1573-1591).
gctatgacttgtacgaaaa

SEQ ID NO: 592282 - DNA, 19 bp, Mus musculus
  siRNA target sequence for 9330196J05Rik (NM_173451.1,1614-1632).
gacaatggcatctattcaa

SEQ ID NO: 592283 - DNA, 19 bp, Mus musculus
  siRNA target sequence for 9330196J05Rik (NM_173451.1,1649-1667).
gagagtgcagcaaatctta

SEQ ID NO: 592284 - DNA, 19 bp, Mus musculus
  siRNA target sequence for 9330196J05Rik (NM_173451.1,1670-1688).
cacccatgatcccacaaaa

SEQ ID NO: 592285 - DNA, 19 bp, Mus musculus
  siRNA target sequence for 9330196J05Rik (NM_173451.1,1680-1698).
cccacaaaacctctatttt

SEQ ID NO: 592286 - DNA, 19 bp, Mus musculus
  siRNA target sequence for 9330196J05Rik (NM_173451.1,1739-1757).
ccctggcaggtactttgaa

SEQ ID NO: 592287 - DNA, 19 bp, Mus musculus
  siRNA target sequence for 9330196J05Rik (NM_173451.1,1755-1773).
gaacactacagatccatta

SEQ ID NO: 592288 - DNA, 19 bp, Mus musculus
  siRNA target sequence for 9330196J05Rik (NM_173451.1,1758-1776).
cactacagatccattatca

SEQ ID NO: 592289 - DNA, 19 bp, Mus musculus
  siRNA target sequence for 9330196J05Rik (NM_173451.1,1763-1781).
cagatccattatcaacata

SEQ ID NO: 592290 - DNA, 19 bp, Mus musculus
  siRNA target sequence for 9330196J05Rik (NM_173451.1,1765-1783).
gatccattatcaacataaa

SEQ ID NO: 592291 - DNA, 19 bp, Mus musculus
  siRNA target sequence for 9330196J05Rik (NM_173451.1,1845-1863).
gccctaaagaggtatggtt

SEQ ID NO: 592292 - DNA, 19 bp, Mus musculus
  siRNA target sequence for 9330196J05Rik (NM_173451.1,1861-1879).
gtttctataacaatagcat

SEQ ID NO: 592293 - DNA, 19 bp, Mus musculus
  siRNA target sequence for 9330196J05Rik (NM_173451.1,1992-2010).
gtgcatagcccacttctaa

SEQ ID NO: 592294 - DNA, 19 bp, Mus musculus
  siRNA target sequence for 9330196J05Rik (NM_173451.1,1994-2012).
gcatagcccacttctaaaa

SEQ ID NO: 592295 - DNA, 19 bp, Mus musculus
  siRNA target sequence for 9330196J05Rik (NM_173451.1,2023-2041).
cggtatgtaaggaacttgt

SEQ ID NO: 592296 - DNA, 19 bp, Mus musculus
  siRNA target sequence for 9330196J05Rik (NM_173451.1,2057-2075).
gtacccaaccttgatttca

SEQ ID NO: 592297 - DNA, 19 bp, Mus musculus
  siRNA target sequence for 9330196J05Rik (NM_173451.1,2106-2124).
cagctagatggatacgata

SEQ ID NO: 592298 - DNA, 19 bp, Mus musculus
  siRNA target sequence for 9330196J05Rik (NM_173451.1,2109-2127).
ctagatggatacgatatct

SEQ ID NO: 592299 - DNA, 19 bp, Mus musculus
  siRNA target sequence for 9330196J05Rik (NM_173451.1,2121-2139).
gatatctgggagaccataa

SEQ ID NO: 592300 - DNA, 19 bp, Mus musculus
  siRNA target sequence for 9330196J05Rik (NM_173451.1,2152-2170).
gttcaccccgagtggatat

SEQ ID NO: 592301 - DNA, 19 bp, Mus musculus
  siRNA target sequence for 9330196J05Rik (NM_173451.1,2155-2173).
caccccgagtggatatttt

SEQ ID NO: 592302 - DNA, 19 bp, Mus musculus
  siRNA target sequence for 9330196J05Rik (NM_173451.1,2257-2275).
cggccatccgggtacaaca

SEQ ID NO: 592303 - DNA, 19 bp, Mus musculus
  siRNA target sequence for 9330196J05Rik (NM_173451.1,2347-2365).
caaaccggtggcacaatga

SEQ ID NO: 592304 - DNA, 19 bp, Mus musculus
  siRNA target sequence for 9330196J05Rik (NM_173451.1,2358-2376).
cacaatgaaaggattacct

SEQ ID NO: 592305 - DNA, 19 bp, Mus musculus
  siRNA target sequence for 9330196J05Rik (NM_173451.1,2565-2583).
gtctggggtccgtggtata

SEQ ID NO: 592306 - DNA, 19 bp, Mus musculus
  siRNA target sequence for 9330196J05Rik (NM_173451.1,2567-2585).
ctggggtccgtggtataaa

SEQ ID NO: 592307 - DNA, 19 bp, Mus musculus
  siRNA target sequence for 9330196J05Rik (NM_173451.1,2569-2587).
ggggtccgtggtataaaga

SEQ ID NO: 592308 - DNA, 19 bp, Mus musculus
  siRNA target sequence for 9330196J05Rik (NM_173451.1,2575-2593).
cgtggtataaagaggaaaa

SEQ ID NO: 592309 - DNA, 19 bp, Mus musculus
  siRNA target sequence for Galns (NM_016722.2,155-173).
gagagaccccaaatttaga

SEQ ID NO: 592310 - DNA, 19 bp, Mus musculus
  siRNA target sequence for Galns (NM_016722.2,195-213).
gcttttcccaagcttctat

SEQ ID NO: 592311 - DNA, 19 bp, Mus musculus
  siRNA target sequence for Galns (NM_016722.2,274-292).
cgcaatggcttctacacaa

SEQ ID NO: 592312 - DNA, 19 bp, Mus musculus
  siRNA target sequence for Galns (NM_016722.2,336-354).
gggtgggatccctaactca

SEQ ID NO: 592313 - DNA, 19 bp, Mus musculus
  siRNA target sequence for Galns (NM_016722.2,386-404).
caggctataccaacaagat

SEQ ID NO: 592314 - DNA, 19 bp, Mus musculus
  siRNA target sequence for Galns (NM_016722.2,490-508).
cactttggaccgtatgaca

SEQ ID NO: 592315 - DNA, 19 bp, Mus musculus
  siRNA target sequence for Galns (NM_016722.2,547-565).
gagatggtcggcagatttt

SEQ ID NO: 592316 - DNA, 19 bp, Mus musculus
  siRNA target sequence for Galns (NM_016722.2,549-567).
gatggtcggcagattttat

SEQ ID NO: 592317 - DNA, 19 bp, Mus musculus
  siRNA target sequence for Galns (NM_016722.2,587-605).
ggaagactggggaagctaa

SEQ ID NO: 592318 - DNA, 19 bp, Mus musculus
  siRNA target sequence for Galns (NM_016722.2,762-780).
cgatgctgttcgggaaata

SEQ ID NO: 592319 - DNA, 19 bp, Mus musculus
  siRNA target sequence for Galns (NM_016722.2,767-785).
ctgttcgggaaatagatga

SEQ ID NO: 592320 - DNA, 19 bp, Mus musculus
  siRNA target sequence for Galns (NM_016722.2,823-841).
ggcatcagtaagaacacat

SEQ ID NO: 592321 - DNA, 19 bp, Mus musculus
  siRNA target sequence for Galns (NM_016722.2,824-842).
gcatcagtaagaacacatt

SEQ ID NO: 592322 - DNA, 19 bp, Mus musculus
  siRNA target sequence for Galns (NM_016722.2,844-862).
gtcttcttcacgtctgata

SEQ ID NO: 592323 - DNA, 19 bp, Mus musculus
  siRNA target sequence for Galns (NM_016722.2,846-864).
cttcttcacgtctgataat

SEQ ID NO: 592324 - DNA, 19 bp, Mus musculus
  siRNA target sequence for Galns (NM_016722.2,1131-1149).
ggacaggcccatattttat

SEQ ID NO: 592325 - DNA, 19 bp, Mus musculus
  siRNA target sequence for Galns (NM_016722.2,1132-1150).
gacaggcccatattttatt

SEQ ID NO: 592326 - DNA, 19 bp, Mus musculus
  siRNA target sequence for Galns (NM_016722.2,1176-1194).
cactcttggccagtacaaa

SEQ ID NO: 592327 - DNA, 19 bp, Mus musculus
  siRNA target sequence for Galns (NM_016722.2,1304-1322).
cggagctacccctgatctt

SEQ ID NO: 592328 - DNA, 19 bp, Mus musculus
  siRNA target sequence for Galns (NM_016722.2,1463-1481).
gtaaccaggctgtcatgaa

SEQ ID NO: 592329 - DNA, 19 bp, Mus musculus
  siRNA target sequence for Galns (NM_016722.2,1490-1508).
ccccaggctgtgaaaaact

SEQ ID NO: 592330 - DNA, 19 bp, Mus musculus
  siRNA target sequence for Sgsh (NM_018822.2,84-102).
cgcgcaacgtgctactgat

SEQ ID NO: 592331 - DNA, 19 bp, Mus musculus
  siRNA target sequence for Sgsh (NM_018822.2,85-103).
gcgcaacgtgctactgata

SEQ ID NO: 592332 - DNA, 19 bp, Mus musculus
  siRNA target sequence for Sgsh (NM_018822.2,87-105).
gcaacgtgctactgatagt

SEQ ID NO: 592333 - DNA, 19 bp, Mus musculus
  siRNA target sequence for Sgsh (NM_018822.2,120-138).
gctttgagagtggtgtata

SEQ ID NO: 592334 - DNA, 19 bp, Mus musculus
  siRNA target sequence for Sgsh (NM_018822.2,125-143).
gagagtggtgtatacaaca

SEQ ID NO: 592335 - DNA, 19 bp, Mus musculus
  siRNA target sequence for Sgsh (NM_018822.2,408-426).
cggtgtatccctttgactt

SEQ ID NO: 592336 - DNA, 19 bp, Mus musculus
  siRNA target sequence for Sgsh (NM_018822.2,466-484).
gcggaacatcactagaatt

SEQ ID NO: 592337 - DNA, 19 bp, Mus musculus
  siRNA target sequence for Sgsh (NM_018822.2,472-490).
catcactagaattaagcaa

SEQ ID NO: 592338 - DNA, 19 bp, Mus musculus
  siRNA target sequence for Sgsh (NM_018822.2,535-553).
cctgtacgtggctttccat

SEQ ID NO: 592339 - DNA, 19 bp, Mus musculus
  siRNA target sequence for Sgsh (NM_018822.2,622-640).
gagtggaatggggtacatt

SEQ ID NO: 592340 - DNA, 19 bp, Mus musculus
  siRNA target sequence for Sgsh (NM_018822.2,823-841).
catcttcacatctgacaat

SEQ ID NO: 592341 - DNA, 19 bp, Mus musculus
  siRNA target sequence for Sgsh (NM_018822.2,1152-1170).
cggtgtaccaccagaactt

SEQ ID NO: 592342 - DNA, 19 bp, Mus musculus
  siRNA target sequence for Sgsh (NM_018822.2,1208-1226).
cccatcgaccaagatttct

SEQ ID NO: 592343 - DNA, 19 bp, Mus musculus
  siRNA target sequence for Sgsh (NM_018822.2,1210-1228).
catcgaccaagatttctat

SEQ ID NO: 592344 - DNA, 19 bp, Mus musculus
  siRNA target sequence for Sgsh (NM_018822.2,1214-1232).
gaccaagatttctatgtct

SEQ ID NO: 592345 - DNA, 19 bp, Mus musculus
  siRNA target sequence for Sgsh (NM_018822.2,1295-1313).
gacctccaccgttactact

SEQ ID NO: 592346 - DNA, 19 bp, Mus musculus
  siRNA target sequence for Sgsh (NM_018822.2,1501-1519).
gtgccgaccgcttcacaat

SEQ ID NO: 592347 - DNA, 19 bp, Mus musculus
  siRNA target sequence for Sgsh (NM_018822.2,1503-1521).
gccgaccgcttcacaatga

SEQ ID NO: 592348 - DNA, 19 bp, Mus musculus
  siRNA target sequence for Sgsh (NM_018822.2,1504-1522).
ccgaccgcttcacaatgaa

SEQ ID NO: 592349 - DNA, 19 bp, Mus musculus
  siRNA target sequence for Sgsh (NM_018822.2,1506-1524).
gaccgcttcacaatgaact

SEQ ID NO: 592350 - DNA, 19 bp, Mus musculus
  siRNA target sequence for Sulf1 (NM_172294.1,550-568).
gaggttccgaggaaggata

SEQ ID NO: 592351 - DNA, 19 bp, Mus musculus
  siRNA target sequence for Sulf1 (NM_172294.1,569-587).
cagcaggaacgaaaaaaca

SEQ ID NO: 592352 - DNA, 19 bp, Mus musculus
  siRNA target sequence for Sulf1 (NM_172294.1,572-590).
caggaacgaaaaaacatca

SEQ ID NO: 592353 - DNA, 19 bp, Mus musculus
  siRNA target sequence for Sulf1 (NM_172294.1,753-771).
ctgggaagtacgtgcataa

SEQ ID NO: 592354 - DNA, 19 bp, Mus musculus
  siRNA target sequence for Sulf1 (NM_172294.1,756-774).
ggaagtacgtgcataacca

SEQ ID NO: 592355 - DNA, 19 bp, Mus musculus
  siRNA target sequence for Sulf1 (NM_172294.1,837-855).
ggacctttgctgtgtatct

SEQ ID NO: 592356 - DNA, 19 bp, Mus musculus
  siRNA target sequence for Sulf1 (NM_172294.1,935-953).
cgagaatggctcggattaa

SEQ ID NO: 592357 - DNA, 19 bp, Mus musculus
  siRNA target sequence for Sulf1 (NM_172294.1,936-954).
gagaatggctcggattaat

SEQ ID NO: 592358 - DNA, 19 bp, Mus musculus
  siRNA target sequence for Sulf1 (NM_172294.1,938-956).
gaatggctcggattaatca

SEQ ID NO: 592359 - DNA, 19 bp, Mus musculus
  siRNA target sequence for Sulf1 (NM_172294.1,943-961).
gctcggattaatcaagaat

SEQ ID NO: 592360 - DNA, 19 bp, Mus musculus
  siRNA target sequence for Sulf1 (NM_172294.1,946-964).
cggattaatcaagaattct

SEQ ID NO: 592361 - DNA, 19 bp, Mus musculus
  siRNA target sequence for Sulf1 (NM_172294.1,955-973).
caagaattctcgtttctat

SEQ ID NO: 592362 - DNA, 19 bp, Mus musculus
  siRNA target sequence for Sulf1 (NM_172294.1,1009-1027).
gcatggatttgattatgca

SEQ ID NO: 592363 - DNA, 19 bp, Mus musculus
  siRNA target sequence for Sulf1 (NM_172294.1,1019-1037).
gattatgcaaaggattact

SEQ ID NO: 592364 - DNA, 19 bp, Mus musculus
  siRNA target sequence for Sulf1 (NM_172294.1,1051-1069).
cactaacgagagcattaat

SEQ ID NO: 592365 - DNA, 19 bp, Mus musculus
  siRNA target sequence for Sulf1 (NM_172294.1,1053-1071).
ctaacgagagcattaatta

SEQ ID NO: 592366 - DNA, 19 bp, Mus musculus
  siRNA target sequence for Sulf1 (NM_172294.1,1097-1115).
ccccataggcccattatga

SEQ ID NO: 592367 - DNA, 19 bp, Mus musculus
  siRNA target sequence for Sulf1 (NM_172294.1,1098-1116).
cccataggcccattatgat

SEQ ID NO: 592368 - DNA, 19 bp, Mus musculus
  siRNA target sequence for Sulf1 (NM_172294.1,1196-1214).
cacataacacccagctata

SEQ ID NO: 592369 - DNA, 19 bp, Mus musculus
  siRNA target sequence for Sulf1 (NM_172294.1,1221-1239).
caccgaacatggacaaaca

SEQ ID NO: 592370 - DNA, 19 bp, Mus musculus
  siRNA target sequence for Sulf1 (NM_172294.1,1341-1359).
ctgtcgagaggttgtacaa

SEQ ID NO: 592371 - DNA, 19 bp, Mus musculus
  siRNA target sequence for Sulf1 (NM_172294.1,1343-1361).
gtcgagaggttgtacaaca

SEQ ID NO: 592372 - DNA, 19 bp, Mus musculus
  siRNA target sequence for Sulf1 (NM_172294.1,1458-1476).
ccatgccctacgactttga

SEQ ID NO: 592373 - DNA, 19 bp, Mus musculus
  siRNA target sequence for Sulf1 (NM_172294.1,1524-1542).
cgatagtcccacagattgt

SEQ ID NO: 592374 - DNA, 19 bp, Mus musculus
  siRNA target sequence for Sulf1 (NM_172294.1,1552-1570).
cgacctagctcctaccatt

SEQ ID NO: 592375 - DNA, 19 bp, Mus musculus
  siRNA target sequence for Sulf1 (NM_172294.1,1678-1696).
caaaatctggcgtgataca

SEQ ID NO: 592376 - DNA, 19 bp, Mus musculus
  siRNA target sequence for Sulf1 (NM_172294.1,1684-1702).
ctggcgtgatacattccta

SEQ ID NO: 592377 - DNA, 19 bp, Mus musculus
  siRNA target sequence for Sulf1 (NM_172294.1,1705-1723).
ggaaagagggaaattttta

SEQ ID NO: 592378 - DNA, 19 bp, Mus musculus
  siRNA target sequence for Sulf1 (NM_172294.1,1761-1779).
caaaccacttgcccaaata

SEQ ID NO: 592379 - DNA, 19 bp, Mus musculus
  siRNA target sequence for Sulf1 (NM_172294.1,1877-1895).
ctccgaatccacaagtgta

SEQ ID NO: 592380 - DNA, 19 bp, Mus musculus
  siRNA target sequence for Sulf1 (NM_172294.1,1912-1930).
gctcacggtccgtcagaat

SEQ ID NO: 592381 - DNA, 19 bp, Mus musculus
  siRNA target sequence for Sulf1 (NM_172294.1,1947-1965).
ctcgcggattgcatgacaa

SEQ ID NO: 592382 - DNA, 19 bp, Mus musculus
  siRNA target sequence for Sulf1 (NM_172294.1,1950-1968).
gcggattgcatgacaaaga

SEQ ID NO: 592383 - DNA, 19 bp, Mus musculus
  siRNA target sequence for Sulf1 (NM_172294.1,1953-1971).
gattgcatgacaaagacaa

SEQ ID NO: 592384 - DNA, 19 bp, Mus musculus
  siRNA target sequence for Sulf1 (NM_172294.1,2047-2065).
caagggaacaccaaagtat

SEQ ID NO: 592385 - DNA, 19 bp, Mus musculus
  siRNA target sequence for Sulf1 (NM_172294.1,2200-2218).
gggtcaccagggcttcatt

SEQ ID NO: 592386 - DNA, 19 bp, Mus musculus
  siRNA target sequence for Sulf1 (NM_172294.1,2373-2391).
gagcgtggaaggaccataa

SEQ ID NO: 592387 - DNA, 19 bp, Mus musculus
  siRNA target sequence for Sulf1 (NM_172294.1,2386-2404).
ccataaggcctacattgat

SEQ ID NO: 592388 - DNA, 19 bp, Mus musculus
  siRNA target sequence for Sulf1 (NM_172294.1,2387-2405).
cataaggcctacattgata

SEQ ID NO: 592389 - DNA, 19 bp, Mus musculus
  siRNA target sequence for Sulf1 (NM_172294.1,2393-2411).
gcctacattgataaagaga

SEQ ID NO: 592390 - DNA, 19 bp, Mus musculus
  siRNA target sequence for Sulf1 (NM_172294.1,2394-2412).
cctacattgataaagagat

SEQ ID NO: 592391 - DNA, 19 bp, Mus musculus
  siRNA target sequence for Sulf1 (NM_172294.1,2398-2416).
cattgataaagagattgaa

SEQ ID NO: 592392 - DNA, 19 bp, Mus musculus
  siRNA target sequence for Sulf1 (NM_172294.1,2450-2468).
gtgaggggacacctaaaga

SEQ ID NO: 592393 - DNA, 19 bp, Mus musculus
  siRNA target sequence for Sulf1 (NM_172294.1,2495-2513).
ggtgaccagagctattaca

SEQ ID NO: 592394 - DNA, 19 bp, Mus musculus
  siRNA target sequence for Sulf1 (NM_172294.1,2505-2523).
gctattacaacaaagagaa

SEQ ID NO: 592395 - DNA, 19 bp, Mus musculus
  siRNA target sequence for Sulf1 (NM_172294.1,2587-2605).
ggaggtggatagcaaactt

SEQ ID NO: 592396 - DNA, 19 bp, Mus musculus
  siRNA target sequence for Sulf1 (NM_172294.1,2598-2616).
gcaaacttcagctcttcaa

SEQ ID NO: 592397 - DNA, 19 bp, Mus musculus
  siRNA target sequence for Sulf1 (NM_172294.1,2762-2780).
gcctgcacaagttctaaca

SEQ ID NO: 592398 - DNA, 19 bp, Mus musculus
  siRNA target sequence for Sulf1 (NM_172294.1,2772-2790).
gttctaacaacaataccta

SEQ ID NO: 592399 - DNA, 19 bp, Mus musculus
  siRNA target sequence for Sulf1 (NM_172294.1,2807-2825).
gtcaacgagacgcacaatt

SEQ ID NO: 592400 - DNA, 19 bp, Mus musculus
  siRNA target sequence for Sulf1 (NM_172294.1,2857-2875).
ggaatatttcgacatgaat

SEQ ID NO: 592401 - DNA, 19 bp, Mus musculus
  siRNA target sequence for Sulf1 (NM_172294.1,2869-2887).
catgaatacggatccttat

SEQ ID NO: 592402 - DNA, 19 bp, Mus musculus
  siRNA target sequence for Sulf1 (NM_172294.1,2912-2930).
gtagaacggagcatcttaa

SEQ ID NO: 592403 - DNA, 19 bp, Mus musculus
  siRNA target sequence for 4930578F06Rik (NM_029545.1,133-151).
ggagaggattggtgatcta

SEQ ID NO: 592404 - DNA, 19 bp, Mus musculus
  siRNA target sequence for 4930578F06Rik (NM_029545.1,138-156).
ggattggtgatctatgtgt

SEQ ID NO: 592405 - DNA, 19 bp, Mus musculus
  siRNA target sequence for 4930578F06Rik (NM_029545.1,183-201).
cttctccccaaaatggtta

SEQ ID NO: 592406 - DNA, 19 bp, Mus musculus
  siRNA target sequence for 4930578F06Rik (NM_029545.1,197-215).
ggttaatacgctgttaaat

SEQ ID NO: 592407 - DNA, 19 bp, Mus musculus
  siRNA target sequence for 4930578F06Rik (NM_029545.1,207-225).
ctgttaaatgtgaagttaa

SEQ ID NO: 592408 - DNA, 19 bp, Mus musculus
  siRNA target sequence for 4930578F06Rik (NM_029545.1,268-286).
ctggcgatgttctgatcat

SEQ ID NO: 592409 - DNA, 19 bp, Mus musculus
  siRNA target sequence for 4930578F06Rik (NM_029545.1,325-343).
gcatgcagtaccactctaa

SEQ ID NO: 592410 - DNA, 19 bp, Mus musculus
  siRNA target sequence for 4930578F06Rik (NM_029545.1,329-347).
gcagtaccactctaactct

SEQ ID NO: 592411 - DNA, 19 bp, Mus musculus
  siRNA target sequence for 4930578F06Rik (NM_029545.1,461-479).
cgggaacaggcaagtgtta

SEQ ID NO: 592412 - DNA, 19 bp, Mus musculus
  siRNA target sequence for 4930578F06Rik (NM_029545.1,499-517).
cctacacgcacctcattga

SEQ ID NO: 592413 - DNA, 19 bp, Mus musculus
  siRNA target sequence for E230009B14Rik (NM_145921.1,298-316).
gcagtctatgctaagagta

SEQ ID NO: 592414 - DNA, 19 bp, Mus musculus
  siRNA target sequence for E230009B14Rik (NM_145921.1,325-343).
gagaaggttttgaactgtt

SEQ ID NO: 592415 - DNA, 19 bp, Mus musculus
  siRNA target sequence for E230009B14Rik (NM_145921.1,330-348).
ggttttgaactgtttgtgt

SEQ ID NO: 592416 - DNA, 19 bp, Mus musculus
  siRNA target sequence for E230009B14Rik (NM_145921.1,394-412).
ggaggcggctccactcatt

SEQ ID NO: 592417 - DNA, 19 bp, Mus musculus
  siRNA target sequence for E230009B14Rik (NM_145921.1,395-413).
gaggcggctccactcattt

SEQ ID NO: 592418 - DNA, 19 bp, Mus musculus
  siRNA target sequence for E230009B14Rik (NM_145921.1,432-450).
gattaatggcttattggaa

SEQ ID NO: 592419 - DNA, 19 bp, Mus musculus
  siRNA target sequence for E230009B14Rik (NM_145921.1,473-491).
ggagagaaacccgatttga

SEQ ID NO: 592420 - DNA, 19 bp, Mus musculus
  siRNA target sequence for E230009B14Rik (NM_145921.1,474-492).
gagagaaacccgatttgaa

SEQ ID NO: 592421 - DNA, 19 bp, Mus musculus
  siRNA target sequence for E230009B14Rik (NM_145921.1,476-494).
gagaaacccgatttgaaga

SEQ ID NO: 592422 - DNA, 19 bp, Mus musculus
  siRNA target sequence for E230009B14Rik (NM_145921.1,482-500).
cccgatttgaagaaccttt

SEQ ID NO: 592423 - DNA, 19 bp, Mus musculus
  siRNA target sequence for E230009B14Rik (NM_145921.1,555-573).
catccgtgacaaagctttt

SEQ ID NO: 592424 - DNA, 19 bp, Mus musculus
  siRNA target sequence for E230009B14Rik (NM_145921.1,575-593).
cattttttggccacagttt

SEQ ID NO: 592425 - DNA, 19 bp, Mus musculus
  siRNA target sequence for E230009B14Rik (NM_145921.1,588-606).
cagtttcggatcctacatt

SEQ ID NO: 592426 - DNA, 19 bp, Mus musculus
  siRNA target sequence for E230009B14Rik (NM_145921.1,600-618).
ctacattgcttttattact

SEQ ID NO: 592427 - DNA, 19 bp, Mus musculus
  siRNA target sequence for E230009B14Rik (NM_145921.1,652-670).
ccgctgcatatctttgtgt

SEQ ID NO: 592428 - DNA, 19 bp, Mus musculus
  siRNA target sequence for E230009B14Rik (NM_145921.1,701-719).
ggcctcaagttcctgatat

SEQ ID NO: 592429 - DNA, 19 bp, Mus musculus
  siRNA target sequence for E230009B14Rik (NM_145921.1,704-722).
ctcaagttcctgatattaa

SEQ ID NO: 592430 - DNA, 19 bp, Mus musculus
  siRNA target sequence for E230009B14Rik (NM_145921.1,712-730).
cctgatattaacaaattgt

SEQ ID NO: 592431 - DNA, 19 bp, Mus musculus
  siRNA target sequence for E230009B14Rik (NM_145921.1,838-856).
gttgacattgtgaaaaaat

SEQ ID NO: 592432 - DNA, 19 bp, Mus musculus
  siRNA target sequence for E230009B14Rik (NM_145921.1,892-910).
cgggacatcacgtgcttta

SEQ ID NO: 592433 - DNA, 19 bp, Mus musculus
  siRNA target sequence for E230009B14Rik (NM_145921.1,943-961).
ggctggaaagacataacca

SEQ ID NO: 592434 - DNA, 19 bp, Mus musculus
  siRNA target sequence for E230009B14Rik (NM_145921.1,985-1003).
ctgccaggtgaccactttt

SEQ ID NO: 592435 - DNA, 19 bp, Mus musculus
  siRNA target sequence for E230009B14Rik (NM_145921.1,987-1005).
gccaggtgaccacttttat

SEQ ID NO: 592436 - DNA, 19 bp, Mus musculus
  siRNA target sequence for E230009B14Rik (NM_145921.1,991-1009).
ggtgaccacttttatctga

SEQ ID NO: 592437 - DNA, 19 bp, Mus musculus
  siRNA target sequence for E230009B14Rik (NM_145921.1,992-1010).
gtgaccacttttatctgat

SEQ ID NO: 592438 - DNA, 19 bp, Mus musculus
  siRNA target sequence for E230009B14Rik (NM_145921.1,1015-1033).
ccgaacaacgaggacttta

SEQ ID NO: 592439 - DNA, 19 bp, Mus musculus
  siRNA target sequence for E230009B14Rik (NM_145921.1,1016-1034).
cgaacaacgaggactttat

SEQ ID NO: 592440 - DNA, 19 bp, Mus musculus
  siRNA target sequence for E230009B14Rik (NM_145921.1,1027-1045).
gactttatcaagaactaca

SEQ ID NO: 592441 - DNA, 19 bp, Mus musculus
  siRNA target sequence for Hyal1 (NM_008317.2,162-180).
cacctgcttcgcatctcta

SEQ ID NO: 592442 - DNA, 19 bp, Mus musculus
  siRNA target sequence for Hyal1 (NM_008317.2,220-238).
gaggttccgtggtatccaa

SEQ ID NO: 592443 - DNA, 19 bp, Mus musculus
  siRNA target sequence for Hyal1 (NM_008317.2,244-262).
cattcatcactgtttggaa

SEQ ID NO: 592444 - DNA, 19 bp, Mus musculus
  siRNA target sequence for Hyal1 (NM_008317.2,389-407).
gggcacctacccctactat

SEQ ID NO: 592445 - DNA, 19 bp, Mus musculus
  siRNA target sequence for Hyal1 (NM_008317.2,390-408).
ggcacctacccctactata

SEQ ID NO: 592446 - DNA, 19 bp, Mus musculus
  siRNA target sequence for Hyal1 (NM_008317.2,392-410).
cacctacccctactataca

SEQ ID NO: 592447 - DNA, 19 bp, Mus musculus
  siRNA target sequence for Hyal1 (NM_008317.2,413-431).
cacaggggaacccgtattt

SEQ ID NO: 592448 - DNA, 19 bp, Mus musculus
  siRNA target sequence for Hyal1 (NM_008317.2,575-593).
ggacagcaaggacatttat

SEQ ID NO: 592449 - DNA, 19 bp, Mus musculus
  siRNA target sequence for Hyal1 (NM_008317.2,772-790).
gctacaacaacgactttct

SEQ ID NO: 592450 - DNA, 19 bp, Mus musculus
  siRNA target sequence for Hyal1 (NM_008317.2,773-791).
ctacaacaacgactttcta

SEQ ID NO: 592451 - DNA, 19 bp, Mus musculus
  siRNA target sequence for Hyal1 (NM_008317.2,776-794).
caacaacgactttctaagt

SEQ ID NO: 592452 - DNA, 19 bp, Mus musculus
  siRNA target sequence for Hyal1 (NM_008317.2,808-826).
gccagtgcccagtattcgt

SEQ ID NO: 592453 - DNA, 19 bp, Mus musculus
  siRNA target sequence for Hyal1 (NM_008317.2,875-893).
cctttaccccagtatttat

SEQ ID NO: 592454 - DNA, 19 bp, Mus musculus
  siRNA target sequence for Hyal1 (NM_008317.2,876-894).
ctttaccccagtatttatt

SEQ ID NO: 592455 - DNA, 19 bp, Mus musculus
  siRNA target sequence for Hyal1 (NM_008317.2,958-976).
cgctccgtgtggctatagt

SEQ ID NO: 592456 - DNA, 19 bp, Mus musculus
  siRNA target sequence for Hyal1 (NM_008317.2,959-977).
gctccgtgtggctatagtt

SEQ ID NO: 592457 - DNA, 19 bp, Mus musculus
  siRNA target sequence for Hyal1 (NM_008317.2,1007-1025).
ctacgtccagatcttctat

SEQ ID NO: 592458 - DNA, 19 bp, Mus musculus
  siRNA target sequence for Hyal1 (NM_008317.2,1115-1133).
gctaagctcagacaaaaca

SEQ ID NO: 592459 - DNA, 19 bp, Mus musculus
  siRNA target sequence for Hyal1 (NM_008317.2,1116-1134).
ctaagctcagacaaaacaa

SEQ ID NO: 592460 - DNA, 19 bp, Mus musculus
  siRNA target sequence for Hyal1 (NM_008317.2,1150-1168).
gccaggccattaaagcata

SEQ ID NO: 592461 - DNA, 19 bp, Mus musculus
  siRNA target sequence for Hyal1 (NM_008317.2,1258-1276).
gtgtccgccatccaagtta

SEQ ID NO: 592462 - DNA, 19 bp, Mus musculus
  siRNA target sequence for Hyal1 (NM_008317.2,1262-1280).
ccgccatccaagttatcct

SEQ ID NO: 592463 - DNA, 19 bp, Mus musculus
  siRNA target sequence for Hyal1 (NM_008317.2,1316-1334).
cattgagctaacacatgat

SEQ ID NO: 592464 - DNA, 19 bp, Mus musculus
  siRNA target sequence for Hyal1 (NM_008317.2,1357-1375).
gtaccctctcacttaagga

SEQ ID NO: 592465 - DNA, 19 bp, Mus musculus
  siRNA target sequence for Hyal1 (NM_008317.2,1380-1398).
gcgcagatggctatgaaat

SEQ ID NO: 592466 - DNA, 19 bp, Mus musculus
  siRNA target sequence for Hyal2 (NM_010489.1,164-182).
ggactaggtcccatcatca

SEQ ID NO: 592467 - DNA, 19 bp, Mus musculus
  siRNA target sequence for Hyal2 (NM_010489.1,294-312).
gtgccccacgccacaaagt

SEQ ID NO: 592468 - DNA, 19 bp, Mus musculus
  siRNA target sequence for Hyal2 (NM_010489.1,405-423).
gcctgtatccacgttttga

SEQ ID NO: 592469 - DNA, 19 bp, Mus musculus
  siRNA target sequence for Hyal2 (NM_010489.1,567-585).
ggcctgtatgggttcgaaa

SEQ ID NO: 592470 - DNA, 19 bp, Mus musculus
  siRNA target sequence for Hyal2 (NM_010489.1,651-669).
ggccatcagacagagtaat

SEQ ID NO: 592471 - DNA, 19 bp, Mus musculus
  siRNA target sequence for Hyal2 (NM_010489.1,699-717).
ccgctcggcagttcatgtt

SEQ ID NO: 592472 - DNA, 19 bp, Mus musculus
  siRNA target sequence for Hyal2 (NM_010489.1,784-802).
ctgctacaatcacgattat

SEQ ID NO: 592473 - DNA, 19 bp, Mus musculus
  siRNA target sequence for Hyal2 (NM_010489.1,786-804).
gctacaatcacgattatgt

SEQ ID NO: 592474 - DNA, 19 bp, Mus musculus
  siRNA target sequence for Hyal2 (NM_010489.1,787-805).
ctacaatcacgattatgta

SEQ ID NO: 592475 - DNA, 19 bp, Mus musculus
  siRNA target sequence for Hyal2 (NM_010489.1,937-955).
cgtacacagccgcaacttt

SEQ ID NO: 592476 - DNA, 19 bp, Mus musculus
  siRNA target sequence for Hyal2 (NM_010489.1,941-959).
cacagccgcaactttgtca

SEQ ID NO: 592477 - DNA, 19 bp, Mus musculus
  siRNA target sequence for Hyal2 (NM_010489.1,945-963).
gccgcaactttgtcagttt

SEQ ID NO: 592478 - DNA, 19 bp, Mus musculus
  siRNA target sequence for Hyal2 (NM_010489.1,1073-1091).
caggtggaccttatctcta

SEQ ID NO: 592479 - DNA, 19 bp, Mus musculus
  siRNA target sequence for Hyal2 (NM_010489.1,1146-1164).
cggaagacgcttcaagtat

SEQ ID NO: 592480 - DNA, 19 bp, Mus musculus
  siRNA target sequence for Hyal2 (NM_010489.1,1173-1191).
gccaatacctcaagaatta

SEQ ID NO: 592481 - DNA, 19 bp, Mus musculus
  siRNA target sequence for Hyal2 (NM_010489.1,1205-1223).
ctggttccctacatagtca

SEQ ID NO: 592482 - DNA, 19 bp, Mus musculus
  siRNA target sequence for Hyal2 (NM_010489.1,1463-1481).
cagtgccaacggaactata

SEQ ID NO: 592483 - DNA, 19 bp, Mus musculus
  siRNA target sequence for Hyal3 (NM_178020.2,136-154).
ctttttctgtggtatggaa

SEQ ID NO: 592484 - DNA, 19 bp, Mus musculus
  siRNA target sequence for Hyal3 (NM_178020.2,203-221).
cgatgccctcggcattgta

SEQ ID NO: 592485 - DNA, 19 bp, Mus musculus
  siRNA target sequence for Hyal3 (NM_178020.2,389-407).
cagcctaggatctagcttt

SEQ ID NO: 592486 - DNA, 19 bp, Mus musculus
  siRNA target sequence for Hyal3 (NM_178020.2,551-569).
caaagcccatactagcttt

SEQ ID NO: 592487 - DNA, 19 bp, Mus musculus
  siRNA target sequence for Hyal3 (NM_178020.2,580-598).
cccgtgcactcatggaata

SEQ ID NO: 592488 - DNA, 19 bp, Mus musculus
  siRNA target sequence for Hyal3 (NM_178020.2,582-600).
cgtgcactcatggaataca

SEQ ID NO: 592489 - DNA, 19 bp, Mus musculus
  siRNA target sequence for Hyal3 (NM_178020.2,666-684).
ggcaatggctggcataaga

SEQ ID NO: 592490 - DNA, 19 bp, Mus musculus
  siRNA target sequence for Hyal3 (NM_178020.2,885-903).
ctacctgttctggcttatt

SEQ ID NO: 592491 - DNA, 19 bp, Mus musculus
  siRNA target sequence for Hyal3 (NM_178020.2,947-965).
cgacctgatgcagactatt

SEQ ID NO: 592492 - DNA, 19 bp, Mus musculus
  siRNA target sequence for Hyal3 (NM_178020.2,950-968).
cctgatgcagactattgga

SEQ ID NO: 592493 - DNA, 19 bp, Mus musculus
  siRNA target sequence for Hyal3 (NM_178020.2,1042-1060).
gctggcgtctccatgacta

SEQ ID NO: 592494 - DNA, 19 bp, Mus musculus
  siRNA target sequence for Hyal3 (NM_178020.2,1045-1063).
ggcgtctccatgactactt

SEQ ID NO: 592495 - DNA, 19 bp, Mus musculus
  siRNA target sequence for Hyal3 (NM_178020.2,1048-1066).
gtctccatgactacttagt

SEQ ID NO: 592496 - DNA, 19 bp, Mus musculus
  siRNA target sequence for Hyal3 (NM_178020.2,1215-1233).
gcttggaattccttcagat

SEQ ID NO: 592497 - DNA, 19 bp, Mus musculus
  siRNA target sequence for Nat6 (NM_019750.2,941-959).
cagagttgaccctgagatt

SEQ ID NO: 592498 - DNA, 19 bp, Mus musculus
  siRNA target sequence for Nat6 (NM_019750.2,1588-1606).
gtcctacgtgccttctcta

SEQ ID NO: 592499 - DNA, 19 bp, Mus musculus
  siRNA target sequence for Nat6 (NM_019750.2,1761-1779).
cccactagagacatgctat

SEQ ID NO: 592500 - DNA, 19 bp, Mus musculus
  siRNA target sequence for Spam (NM_009241.1,345-363).
ggggagctttgttgaatct

SEQ ID NO: 592501 - DNA, 19 bp, Mus musculus
  siRNA target sequence for Spam (NM_009241.1,365-383).
ggggcacattccaaacagt

SEQ ID NO: 592502 - DNA, 19 bp, Mus musculus
  siRNA target sequence for Spam (NM_009241.1,433-451).
gcaccaattttatcaaata

SEQ ID NO: 592503 - DNA, 19 bp, Mus musculus
  siRNA target sequence for Spam (NM_009241.1,477-495).
cccaactgaacgttgtgta

SEQ ID NO: 592504 - DNA, 19 bp, Mus musculus
  siRNA target sequence for Spam (NM_009241.1,653-671).
ctcagaggggcgattatca

SEQ ID NO: 592505 - DNA, 19 bp, Mus musculus
  siRNA target sequence for Spam (NM_009241.1,662-680).
gcgattatcaagctcattt

SEQ ID NO: 592506 - DNA, 19 bp, Mus musculus
  siRNA target sequence for Spam (NM_009241.1,673-691).
gctcatttgcgcaaagcta

SEQ ID NO: 592507 - DNA, 19 bp, Mus musculus
  siRNA target sequence for Spam (NM_009241.1,674-692).
ctcatttgcgcaaagctaa

SEQ ID NO: 592508 - DNA, 19 bp, Mus musculus
  siRNA target sequence for Spam (NM_009241.1,695-713).
ctgacatagagcattacat

SEQ ID NO: 592509 - DNA, 19 bp, Mus musculus
  siRNA target sequence for Spam (NM_009241.1,721-739).
gacaaattgggcttagcta

SEQ ID NO: 592510 - DNA, 19 bp, Mus musculus
  siRNA target sequence for Spam (NM_009241.1,730-748).
ggcttagctatcattgact

SEQ ID NO: 592511 - DNA, 19 bp, Mus musculus
  siRNA target sequence for Spam (NM_009241.1,782-800).
ggaaacctaaggataacta

SEQ ID NO: 592512 - DNA, 19 bp, Mus musculus
  siRNA target sequence for Spam (NM_009241.1,793-811).
gataactacaggaataagt

SEQ ID NO: 592513 - DNA, 19 bp, Mus musculus
  siRNA target sequence for Spam (NM_009241.1,822-840).
ggtccaatcaactaatcca

SEQ ID NO: 592514 - DNA, 19 bp, Mus musculus
  siRNA target sequence for Spam (NM_009241.1,833-851).
ctaatccaggacttagtat

SEQ ID NO: 592515 - DNA, 19 bp, Mus musculus
  siRNA target sequence for Spam (NM_009241.1,948-966).
ccagctatggggttattat

SEQ ID NO: 592516 - DNA, 19 bp, Mus musculus
  siRNA target sequence for Spam (NM_009241.1,1127-1145).
gacaagctaccctctatgt

SEQ ID NO: 592517 - DNA, 19 bp, Mus musculus
  siRNA target sequence for Spam (NM_009241.1,1196-1214).
cggatccagtcccgatttt

SEQ ID NO: 592518 - DNA, 19 bp, Mus musculus
  siRNA target sequence for Spam (NM_009241.1,1197-1215).
ggatccagtcccgattttt

SEQ ID NO: 592519 - DNA, 19 bp, Mus musculus
  siRNA target sequence for Spam (NM_009241.1,1204-1222).
gtcccgatttttgtctata

SEQ ID NO: 592520 - DNA, 19 bp, Mus musculus
  siRNA target sequence for Spam (NM_009241.1,1224-1242).
ccgtcttgtttttactgat

SEQ ID NO: 592521 - DNA, 19 bp, Mus musculus
  siRNA target sequence for Spam (NM_009241.1,1356-1374).
ggcaggttgcccaatccta

SEQ ID NO: 592522 - DNA, 19 bp, Mus musculus
  siRNA target sequence for Spam (NM_009241.1,1360-1378).
ggttgcccaatcctacata

SEQ ID NO: 592523 - DNA, 19 bp, Mus musculus
  siRNA target sequence for Spam (NM_009241.1,1364-1382).
gcccaatcctacataaata

SEQ ID NO: 592524 - DNA, 19 bp, Mus musculus
  siRNA target sequence for Spam (NM_009241.1,1387-1405).
cagacgaccctgaatccat

SEQ ID NO: 592525 - DNA, 19 bp, Mus musculus
  siRNA target sequence for Spam (NM_009241.1,1391-1409).
cgaccctgaatccatacat

SEQ ID NO: 592526 - DNA, 19 bp, Mus musculus
  siRNA target sequence for Spam (NM_009241.1,1394-1412).
ccctgaatccatacatagt

SEQ ID NO: 592527 - DNA, 19 bp, Mus musculus
  siRNA target sequence for Spam (NM_009241.1,1398-1416).
gaatccatacatagtcaat

SEQ ID NO: 592528 - DNA, 19 bp, Mus musculus
  siRNA target sequence for Spam (NM_009241.1,1439-1457).
gcagccaaacactttgtaa

SEQ ID NO: 592529 - DNA, 19 bp, Mus musculus
  siRNA target sequence for Spam (NM_009241.1,1440-1458).
cagccaaacactttgtaat

SEQ ID NO: 592530 - DNA, 19 bp, Mus musculus
  siRNA target sequence for Spam (NM_009241.1,1442-1460).
gccaaacactttgtaatga

SEQ ID NO: 592531 - DNA, 19 bp, Mus musculus
  siRNA target sequence for Spam (NM_009241.1,1444-1462).
caaacactttgtaatgaga

SEQ ID NO: 592532 - DNA, 19 bp, Mus musculus
  siRNA target sequence for Spam (NM_009241.1,1493-1511).
cagatgtatatcttcactt

SEQ ID NO: 592533 - DNA, 19 bp, Mus musculus
  siRNA target sequence for Spam (NM_009241.1,1512-1530).
gaacccaagtcattttgat

SEQ ID NO: 592534 - DNA, 19 bp, Mus musculus
  siRNA target sequence for Spam (NM_009241.1,1579-1597).
gttggagacttagaatact

SEQ ID NO: 592535 - DNA, 19 bp, Mus musculus
  siRNA target sequence for Spam (NM_009241.1,1647-1665).
gacatctgatgtaaaaaat

SEQ ID NO: 592536 - DNA, 19 bp, Mus musculus
  siRNA target sequence for Spam (NM_009241.1,1666-1684).
gtacaagacgtgaatgtgt

SEQ ID NO: 592537 - DNA, 19 bp, Mus musculus
  siRNA target sequence for Spam (NM_009241.1,1686-1704).
cgtcggtgacaatgtttgt

SEQ ID NO: 592538 - DNA, 19 bp, Mus musculus
  siRNA target sequence for Spam (NM_009241.1,1687-1705).
gtcggtgacaatgtttgta

SEQ ID NO: 592539 - DNA, 19 bp, Mus musculus
  siRNA target sequence for Spam (NM_009241.1,1689-1707).
cggtgacaatgtttgtata

SEQ ID NO: 592540 - DNA, 19 bp, Mus musculus
  siRNA target sequence for Spam (NM_009241.1,1750-1768).
ggcaaaagccttctattta

SEQ ID NO: 592541 - DNA, 19 bp, Mus musculus
  siRNA target sequence for Spam (NM_009241.1,1751-1769).
gcaaaagccttctatttat

SEQ ID NO: 592542 - DNA, 19 bp, Mus musculus
  siRNA target sequence for Chi3l3 (NM_009892.1,511-529).
gtggagaaagacattccaa

SEQ ID NO: 592543 - DNA, 19 bp, Mus musculus
  siRNA target sequence for Chi3l3 (NM_009892.1,839-857).
gaattggtgcccctacaat

SEQ ID NO: 592544 - DNA, 19 bp, Mus musculus
  siRNA target sequence for Chi3l3 (NM_009892.1,844-862).
ggtgcccctacaattagta

SEQ ID NO: 592545 - DNA, 19 bp, Mus musculus
  siRNA target sequence for Hexa (NM_010421.1,221-239).
ggccgtggccccagtacat

SEQ ID NO: 592546 - DNA, 19 bp, Mus musculus
  siRNA target sequence for Hexa (NM_010421.1,263-281).
ccctgtaccccaacaactt

SEQ ID NO: 592547 - DNA, 19 bp, Mus musculus
  siRNA target sequence for Hexa (NM_010421.1,387-405).
ccgacccagcttctcaaat

SEQ ID NO: 592548 - DNA, 19 bp, Mus musculus
  siRNA target sequence for Hexa (NM_010421.1,388-406).
cgacccagcttctcaaata

SEQ ID NO: 592549 - DNA, 19 bp, Mus musculus
  siRNA target sequence for Hexa (NM_010421.1,416-434).
cgttggggaagaacattct

SEQ ID NO: 592550 - DNA, 19 bp, Mus musculus
  siRNA target sequence for Hexa (NM_010421.1,444-462).
cgtcgtcacagctgaatgt

SEQ ID NO: 592551 - DNA, 19 bp, Mus musculus
  siRNA target sequence for Hexa (NM_010421.1,445-463).
gtcgtcacagctgaatgta

SEQ ID NO: 592552 - DNA, 19 bp, Mus musculus
  siRNA target sequence for Hexa (NM_010421.1,447-465).
cgtcacagctgaatgtaat

SEQ ID NO: 592553 - DNA, 19 bp, Mus musculus
  siRNA target sequence for Hexa (NM_010421.1,481-499).
gagtcggtagaaaattaca

SEQ ID NO: 592554 - DNA, 19 bp, Mus musculus
  siRNA target sequence for Hexa (NM_010421.1,498-516).
caccctaaccattaatgat

SEQ ID NO: 592555 - DNA, 19 bp, Mus musculus
  siRNA target sequence for Hexa (NM_010421.1,599-617).
ctgagggcacgttctttat

SEQ ID NO: 592556 - DNA, 19 bp, Mus musculus
  siRNA target sequence for Hexa (NM_010421.1,661-679).
ggcgtactgctggatacat

SEQ ID NO: 592557 - DNA, 19 bp, Mus musculus
  siRNA target sequence for Hexa (NM_010421.1,663-681).
cgtactgctggatacatct

SEQ ID NO: 592558 - DNA, 19 bp, Mus musculus
  siRNA target sequence for Hexa (NM_010421.1,685-703).
cattacctgccattgtcta

SEQ ID NO: 592559 - DNA, 19 bp, Mus musculus
  siRNA target sequence for Hexa (NM_010421.1,721-739).
gatgtcatggcatacaata

SEQ ID NO: 592560 - DNA, 19 bp, Mus musculus
  siRNA target sequence for Hexa (NM_010421.1,835-853).
cctgtcactcacatctaca

SEQ ID NO: 592561 - DNA, 19 bp, Mus musculus
  siRNA target sequence for Hexa (NM_010421.1,903-921).
ccgtgtgctggcagaattt

SEQ ID NO: 592562 - DNA, 19 bp, Mus musculus
  siRNA target sequence for Hexa (NM_010421.1,905-923).
gtgtgctggcagaatttga

SEQ ID NO: 592563 - DNA, 19 bp, Mus musculus
  siRNA target sequence for Hexa (NM_010421.1,907-925).
gtgctggcagaatttgaca

SEQ ID NO: 592564 - DNA, 19 bp, Mus musculus
  siRNA target sequence for Hexa (NM_010421.1,953-971).
caggtgcccctgggttatt

SEQ ID NO: 592565 - DNA, 19 bp, Mus musculus
  siRNA target sequence for Hexa (NM_010421.1,1079-1097).
cagtcttcccggactttta

SEQ ID NO: 592566 - DNA, 19 bp, Mus musculus
  siRNA target sequence for Hexa (NM_010421.1,1260-1278).
ggtgtggcaggaggtattt

SEQ ID NO: 592567 - DNA, 19 bp, Mus musculus
  siRNA target sequence for Hexa (NM_010421.1,1263-1281).
gtggcaggaggtatttgat

SEQ ID NO: 592568 - DNA, 19 bp, Mus musculus
  siRNA target sequence for Hexa (NM_010421.1,1269-1287).
ggaggtatttgataataaa

SEQ ID NO: 592569 - DNA, 19 bp, Mus musculus
  siRNA target sequence for Hexa (NM_010421.1,1290-1308).
gaaggttcggccagataca

SEQ ID NO: 592570 - DNA, 19 bp, Mus musculus
  siRNA target sequence for Hexa (NM_010421.1,1298-1316).
ggccagatacaatcataca

SEQ ID NO: 592571 - DNA, 19 bp, Mus musculus
  siRNA target sequence for Hexa (NM_010421.1,1406-1424).
ggtacctgaaccgtgtaaa

SEQ ID NO: 592572 - DNA, 19 bp, Mus musculus
  siRNA target sequence for Hexa (NM_010421.1,1410-1428).
cctgaaccgtgtaaagtat

SEQ ID NO: 592573 - DNA, 19 bp, Mus musculus
  siRNA target sequence for Hexa (NM_010421.1,1520-1538).
gtatgtggggagagtatgt

SEQ ID NO: 592574 - DNA, 19 bp, Mus musculus
  siRNA target sequence for Hexa (NM_010421.1,1604-1622).
gcagtaacctgacaactaa

SEQ ID NO: 592575 - DNA, 19 bp, Mus musculus
  siRNA target sequence for Hexa (NM_010421.1,1607-1625).
gtaacctgacaactaatat

SEQ ID NO: 592576 - DNA, 19 bp, Mus musculus
  siRNA target sequence for Hexa (NM_010421.1,1614-1632).
gacaactaatatagacttt

SEQ ID NO: 592577 - DNA, 19 bp, Mus musculus
  siRNA target sequence for Hexa (NM_010421.1,1627-1645).
gactttgcctttaaacgtt

SEQ ID NO: 592578 - DNA, 19 bp, Mus musculus
  siRNA target sequence for Hexb (NM_010422.1,232-250).
gaggcgtttcggcgatatt

SEQ ID NO: 592579 - DNA, 19 bp, Mus musculus
  siRNA target sequence for Hexb (NM_010422.1,235-253).
gcgtttcggcgatattaca

SEQ ID NO: 592580 - DNA, 19 bp, Mus musculus
  siRNA target sequence for Hexb (NM_010422.1,236-254).
cgtttcggcgatattacaa

SEQ ID NO: 592581 - DNA, 19 bp, Mus musculus
  siRNA target sequence for Hexb (NM_010422.1,242-260).
ggcgatattacaactatgt

SEQ ID NO: 592582 - DNA, 19 bp, Mus musculus
  siRNA target sequence for Hexb (NM_010422.1,244-262).
cgatattacaactatgttt

SEQ ID NO: 592583 - DNA, 19 bp, Mus musculus
  siRNA target sequence for Hexb (NM_010422.1,259-277).
gtttttggtttctacaaga

SEQ ID NO: 592584 - DNA, 19 bp, Mus musculus
  siRNA target sequence for Hexb (NM_010422.1,375-393).
gtcttcagatgaaacctat

SEQ ID NO: 592585 - DNA, 19 bp, Mus musculus
  siRNA target sequence for Hexb (NM_010422.1,380-398).
cagatgaaacctattctct

SEQ ID NO: 592586 - DNA, 19 bp, Mus musculus
  siRNA target sequence for Hexb (NM_010422.1,444-462).
gggagcgttacgaggttta

SEQ ID NO: 592587 - DNA, 19 bp, Mus musculus
  siRNA target sequence for Hexb (NM_010422.1,446-464).
gagcgttacgaggtttaga

SEQ ID NO: 592588 - DNA, 19 bp, Mus musculus
  siRNA target sequence for Hexb (NM_010422.1,448-466).
gcgttacgaggtttagaga

SEQ ID NO: 592589 - DNA, 19 bp, Mus musculus
  siRNA target sequence for Hexb (NM_010422.1,454-472).
cgaggtttagagacgttta

SEQ ID NO: 592590 - DNA, 19 bp, Mus musculus
  siRNA target sequence for Hexb (NM_010422.1,465-483).
gacgtttagccagttagtt

SEQ ID NO: 592591 - DNA, 19 bp, Mus musculus
  siRNA target sequence for Hexb (NM_010422.1,498-516).
cgggactttcaccatcaat

SEQ ID NO: 592592 - DNA, 19 bp, Mus musculus
  siRNA target sequence for Hexb (NM_010422.1,513-531).
caatgaatccagtatagct

SEQ ID NO: 592593 - DNA, 19 bp, Mus musculus
  siRNA target sequence for Hexb (NM_010422.1,585-603).
cctgcctgtgaagacaatt

SEQ ID NO: 592594 - DNA, 19 bp, Mus musculus
  siRNA target sequence for Hexb (NM_010422.1,586-604).
ctgcctgtgaagacaattt

SEQ ID NO: 592595 - DNA, 19 bp, Mus musculus
  siRNA target sequence for Hexb (NM_010422.1,786-804).
ccgagggattcgagtcata

SEQ ID NO: 592596 - DNA, 19 bp, Mus musculus
  siRNA target sequence for Hexb (NM_010422.1,797-815).
gagtcataccagaatttga

SEQ ID NO: 592597 - DNA, 19 bp, Mus musculus
  siRNA target sequence for Hexb (NM_010422.1,847-865).
ggacagaaaaaccttctaa

SEQ ID NO: 592598 - DNA, 19 bp, Mus musculus
  siRNA target sequence for Hexb (NM_010422.1,872-890).
gttacaatcaaaaaactaa

SEQ ID NO: 592599 - DNA, 19 bp, Mus musculus
  siRNA target sequence for Hexb (NM_010422.1,906-924).
gcctgtagacccaactgta

SEQ ID NO: 592600 - DNA, 19 bp, Mus musculus
  siRNA target sequence for Hexb (NM_010422.1,908-926).
ctgtagacccaactgtaaa

SEQ ID NO: 592601 - DNA, 19 bp, Mus musculus
  siRNA target sequence for Hexb (NM_010422.1,910-928).
gtagacccaactgtaaaca

SEQ ID NO: 592602 - DNA, 19 bp, Mus musculus
  siRNA target sequence for Hexb (NM_010422.1,929-947).
caacgtatgcattctttaa

SEQ ID NO: 592603 - DNA, 19 bp, Mus musculus
  siRNA target sequence for Hexb (NM_010422.1,933-951).
gtatgcattctttaacaca

SEQ ID NO: 592604 - DNA, 19 bp, Mus musculus
  siRNA target sequence for Hexb (NM_010422.1,1071-1089).
ctttggcagcgattttaga

SEQ ID NO: 592605 - DNA, 19 bp, Mus musculus
  siRNA target sequence for Hexb (NM_010422.1,1077-1095).
cagcgattttagaagacta

SEQ ID NO: 592606 - DNA, 19 bp, Mus musculus
  siRNA target sequence for Hexb (NM_010422.1,1080-1098).
cgattttagaagactagaa

SEQ ID NO: 592607 - DNA, 19 bp, Mus musculus
  siRNA target sequence for Hexb (NM_010422.1,1151-1169).
ccattgtttggcaagaagt

SEQ ID NO: 592608 - DNA, 19 bp, Mus musculus
  siRNA target sequence for Hexb (NM_010422.1,1152-1170).
cattgtttggcaagaagtt

SEQ ID NO: 592609 - DNA, 19 bp, Mus musculus
  siRNA target sequence for Hexb (NM_010422.1,1161-1179).
gcaagaagtttttgatgat

SEQ ID NO: 592610 - DNA, 19 bp, Mus musculus
  siRNA target sequence for Hexb (NM_010422.1,1215-1233).
gtggaagagtgagcattat

SEQ ID NO: 592611 - DNA, 19 bp, Mus musculus
  siRNA target sequence for Hexb (NM_010422.1,1316-1334).
ggcaagactggaaaaacta

SEQ ID NO: 592612 - DNA, 19 bp, Mus musculus
  siRNA target sequence for Hexb (NM_010422.1,1338-1356).
caaagttgagccccttaat

SEQ ID NO: 592613 - DNA, 19 bp, Mus musculus
  siRNA target sequence for Hexb (NM_010422.1,1374-1392).
gcagaaacaacttgttatt

SEQ ID NO: 592614 - DNA, 19 bp, Mus musculus
  siRNA target sequence for Hexb (NM_010422.1,1406-1424).
gcctgtggggagaatttgt

SEQ ID NO: 592615 - DNA, 19 bp, Mus musculus
  siRNA target sequence for Hexb (NM_010422.1,1433-1451).
ctaaccttactccaagatt

SEQ ID NO: 592616 - DNA, 19 bp, Mus musculus
  siRNA target sequence for Hexb (NM_010422.1,1554-1572).
ggtcagccgtggaatagct

SEQ ID NO: 592617 - DNA, 19 bp, Mus musculus
  siRNA target sequence for Hexb (NM_010422.1,1570-1588).
gctgcacaacctctctata

SEQ ID NO: 592618 - DNA, 19 bp, Mus musculus
  siRNA target sequence for Hexb (NM_010422.1,1589-1607).
ctggatactgtaactatga

SEQ ID NO: 592619 - DNA, 19 bp, Mus musculus
  siRNA target sequence for Nagpa (NM_013796.1,96-114).
cgtggtgcagcctaagctt

SEQ ID NO: 592620 - DNA, 19 bp, Mus musculus
  siRNA target sequence for Nagpa (NM_013796.1,329-347).
gatcccctacgcactttct

SEQ ID NO: 592621 - DNA, 19 bp, Mus musculus
  siRNA target sequence for Nagpa (NM_013796.1,550-568).
ccgacgcgatggaaccata

SEQ ID NO: 592622 - DNA, 19 bp, Mus musculus
  siRNA target sequence for Nagpa (NM_013796.1,554-572).
cgcgatggaaccatagtca

SEQ ID NO: 592623 - DNA, 19 bp, Mus musculus
  siRNA target sequence for Nagpa (NM_013796.1,645-663).
ggctcatccgcaatggaaa

SEQ ID NO: 592624 - DNA, 19 bp, Mus musculus
  siRNA target sequence for Nagpa (NM_013796.1,774-792).
gtgaggggcagcttatcct

SEQ ID NO: 592625 - DNA, 19 bp, Mus musculus
  siRNA target sequence for Nagpa (NM_013796.1,818-836).
cagcgtggccttaacctat

SEQ ID NO: 592626 - DNA, 19 bp, Mus musculus
  siRNA target sequence for Nagpa (NM_013796.1,894-912).
gaggcggttctgctacttt

SEQ ID NO: 592627 - DNA, 19 bp, Mus musculus
  siRNA target sequence for Nagpa (NM_013796.1,897-915).
gcggttctgctacttttgt

SEQ ID NO: 592628 - DNA, 19 bp, Mus musculus
  siRNA target sequence for Nagpa (NM_013796.1,931-949).
ggccagttacccttcagat

SEQ ID NO: 592629 - DNA, 19 bp, Mus musculus
  siRNA target sequence for Nagpa (NM_013796.1,950-968).
cactgccaggacaacatgt

SEQ ID NO: 592630 - DNA, 19 bp, Mus musculus
  siRNA target sequence for Naglu (NM_013792.1,371-389).
ccaacaggtaccgctatta

SEQ ID NO: 592631 - DNA, 19 bp, Mus musculus
  siRNA target sequence for Naglu (NM_013792.1,382-400).
cgctattaccagaatgtgt

SEQ ID NO: 592632 - DNA, 19 bp, Mus musculus
  siRNA target sequence for Naglu (NM_013792.1,440-458).
gttgggagcaagagattga

SEQ ID NO: 592633 - DNA, 19 bp, Mus musculus
  siRNA target sequence for Naglu (NM_013792.1,556-574).
gagatcgatacgtacttca

SEQ ID NO: 592634 - DNA, 19 bp, Mus musculus
  siRNA target sequence for Naglu (NM_013792.1,596-614).
ggggacgcatgggtaactt

SEQ ID NO: 592635 - DNA, 19 bp, Mus musculus
  siRNA target sequence for Naglu (NM_013792.1,647-665).
ggcacctcagtcaagtcta

SEQ ID NO: 592636 - DNA, 19 bp, Mus musculus
  siRNA target sequence for Naglu (NM_013792.1,769-787).
caggtcaatgtcatcaagt

SEQ ID NO: 592637 - DNA, 19 bp, Mus musculus
  siRNA target sequence for Naglu (NM_013792.1,983-1001).
ccactgcagccgtctatga

SEQ ID NO: 592638 - DNA, 19 bp, Mus musculus
  siRNA target sequence for Naglu (NM_013792.1,1148-1166).
ctgaaagccatcctgttta

SEQ ID NO: 592639 - DNA, 19 bp, Mus musculus
  siRNA target sequence for Naglu (NM_013792.1,1205-1223).
ggtgtatgctccacaactt

SEQ ID NO: 592640 - DNA, 19 bp, Mus musculus
  siRNA target sequence for Naglu (NM_013792.1,1390-1408).
gaccctgtaccagatttga

SEQ ID NO: 592641 - DNA, 19 bp, Mus musculus
  siRNA target sequence for Naglu (NM_013792.1,1555-1573).
ccgtccctacagatgagta

SEQ ID NO: 592642 - DNA, 19 bp, Mus musculus
  siRNA target sequence for Naglu (NM_013792.1,1576-1594).
gctgtctggtacaacagat

SEQ ID NO: 592643 - DNA, 19 bp, Mus musculus
  siRNA target sequence for Naglu (NM_013792.1,1581-1599).
ctggtacaacagatcagat

SEQ ID NO: 592644 - DNA, 19 bp, Mus musculus
  siRNA target sequence for Naglu (NM_013792.1,1826-1844).
ctagcagcagccacttctt

SEQ ID NO: 592645 - DNA, 19 bp, Mus musculus
  siRNA target sequence for Naglu (NM_013792.1,1890-1908).
ggccgaggcccagttctat

SEQ ID NO: 592646 - DNA, 19 bp, Mus musculus
  siRNA target sequence for Naglu (NM_013792.1,1892-1910).
ccgaggcccagttctatga

SEQ ID NO: 592647 - DNA, 19 bp, Mus musculus
  siRNA target sequence for Naglu (NM_013792.1,1898-1916).
cccagttctatgaacaaaa

SEQ ID NO: 592648 - DNA, 19 bp, Mus musculus
  siRNA target sequence for Naglu (NM_013792.1,1948-1966).
gagggcaacattttggatt

SEQ ID NO: 592649 - DNA, 19 bp, Mus musculus
  siRNA target sequence for Naglu (NM_013792.1,1950-1968).
gggcaacattttggattat

SEQ ID NO: 592650 - DNA, 19 bp, Mus musculus
  siRNA target sequence for Naglu (NM_013792.1,1987-2005).
ggactggtggctgattact

SEQ ID NO: 592651 - DNA, 19 bp, Mus musculus
  siRNA target sequence for Naglu (NM_013792.1,1988-2006).
gactggtggctgattacta

SEQ ID NO: 592652 - DNA, 19 bp, Mus musculus
  siRNA target sequence for Naglu (NM_013792.1,2104-2122).
ctcgagcaggctttcgttt

SEQ ID NO: 592653 - DNA, 19 bp, Mus musculus
  siRNA target sequence for Naglu (NM_013792.1,2107-2125).
gagcaggctttcgtttaca

SEQ ID NO: 592654 - DNA, 19 bp, Mus musculus
  siRNA target sequence for Naglu (NM_013792.1,2110-2128).
caggctttcgtttacaaca

SEQ ID NO: 592655 - DNA, 19 bp, Mus musculus
  siRNA target sequence for Naglu (NM_013792.1,2113-2131).
gctttcgtttacaacaaga

SEQ ID NO: 592656 - DNA, 19 bp, Mus musculus
  siRNA target sequence for Naglu (NM_013792.1,2114-2132).
ctttcgtttacaacaagaa

SEQ ID NO: 592657 - DNA, 19 bp, Mus musculus
  siRNA target sequence for Naga (NM_008669.2,216-234).
gaacgcttccgctgtaaca

SEQ ID NO: 592658 - DNA, 19 bp, Mus musculus
  siRNA target sequence for Naga (NM_008669.2,318-336).
cgggacctgggctatgtat

SEQ ID NO: 592659 - DNA, 19 bp, Mus musculus
  siRNA target sequence for Naga (NM_008669.2,319-337).
gggacctgggctatgtata

SEQ ID NO: 592660 - DNA, 19 bp, Mus musculus
  siRNA target sequence for Naga (NM_008669.2,328-346).
gctatgtatacctcaacat

SEQ ID NO: 592661 - DNA, 19 bp, Mus musculus
  siRNA target sequence for Naga (NM_008669.2,511-529).
gtaccaccctagacaaagt

SEQ ID NO: 592662 - DNA, 19 bp, Mus musculus
  siRNA target sequence for Naga (NM_008669.2,705-723).
ccccccaaggtgaactaca

SEQ ID NO: 592663 - DNA, 19 bp, Mus musculus
  siRNA target sequence for Naga (NM_008669.2,743-761).
caatctctggcgcaactat

SEQ ID NO: 592664 - DNA, 19 bp, Mus musculus
  siRNA target sequence for Naga (NM_008669.2,751-769).
ggcgcaactataaagacat

SEQ ID NO: 592665 - DNA, 19 bp, Mus musculus
  siRNA target sequence for Naga (NM_008669.2,875-893).
gctgctcatcgggaacttt

SEQ ID NO: 592666 - DNA, 19 bp, Mus musculus
  siRNA target sequence for Naga (NM_008669.2,894-912).
ggcctgagcttcgatgaat

SEQ ID NO: 592667 - DNA, 19 bp, Mus musculus
  siRNA target sequence for Naga (NM_008669.2,988-1006).
ctcagaatatggacattct

SEQ ID NO: 592668 - DNA, 19 bp, Mus musculus
  siRNA target sequence for Naga (NM_008669.2,1052-1070).
ccagggacgcaggatctta

SEQ ID NO: 592669 - DNA, 19 bp, Mus musculus
  siRNA target sequence for Naga (NM_008669.2,1053-1071).
cagggacgcaggatcttaa

SEQ ID NO: 592670 - DNA, 19 bp, Mus musculus
  siRNA target sequence for Naga (NM_008669.2,1081-1099).
cccatatcgaagtgttcaa

SEQ ID NO: 592671 - DNA, 19 bp, Mus musculus
  siRNA target sequence for Naga (NM_008669.2,1083-1101).
catatcgaagtgttcaaga

SEQ ID NO: 592672 - DNA, 19 bp, Mus musculus
  siRNA target sequence for Naga (NM_008669.2,1092-1110).
gtgttcaagaggtatctgt

SEQ ID NO: 592673 - DNA, 19 bp, Mus musculus
  siRNA target sequence for Naga (NM_008669.2,1177-1195).
ccctcttggaactaaacta

SEQ ID NO: 592674 - DNA, 19 bp, Mus musculus
  siRNA target sequence for Naga (NM_008669.2,1335-1353).
gggatatccacgatgatgt

SEQ ID NO: 592675 - DNA, 19 bp, Mus musculus
  siRNA target sequence for Man2a1 (NM_008549.1,125-143).
cgatcttctgcgtcgtaat

SEQ ID NO: 592676 - DNA, 19 bp, Mus musculus
  siRNA target sequence for Man2a1 (NM_008549.1,217-235).
ccgcagggccagctttcaa

SEQ ID NO: 592677 - DNA, 19 bp, Mus musculus
  siRNA target sequence for Man2a1 (NM_008549.1,282-300).
caacgagatcatctcaaat

SEQ ID NO: 592678 - DNA, 19 bp, Mus musculus
  siRNA target sequence for Man2a1 (NM_008549.1,420-438).
ccccagagactgtttgttt

SEQ ID NO: 592679 - DNA, 19 bp, Mus musculus
  siRNA target sequence for Man2a1 (NM_008549.1,474-492).
gatgttggatgtttacgat

SEQ ID NO: 592680 - DNA, 19 bp, Mus musculus
  siRNA target sequence for Man2a1 (NM_008549.1,480-498).
ggatgtttacgatctgatt

SEQ ID NO: 592681 - DNA, 19 bp, Mus musculus
  siRNA target sequence for Man2a1 (NM_008549.1,484-502).
gtttacgatctgattcctt

SEQ ID NO: 592682 - DNA, 19 bp, Mus musculus
  siRNA target sequence for Man2a1 (NM_008549.1,489-507).
cgatctgattccttttgat

SEQ ID NO: 592683 - DNA, 19 bp, Mus musculus
  siRNA target sequence for Man2a1 (NM_008549.1,521-539).
gagtttggaagcaaggatt

SEQ ID NO: 592684 - DNA, 19 bp, Mus musculus
  siRNA target sequence for Man2a1 (NM_008549.1,652-670).
gacaagactcagtatattt

SEQ ID NO: 592685 - DNA, 19 bp, Mus musculus
  siRNA target sequence for Man2a1 (NM_008549.1,681-699).
ggtcctaaagctgaaagaa

SEQ ID NO: 592686 - DNA, 19 bp, Mus musculus
  siRNA target sequence for Man2a1 (NM_008549.1,743-761).
caaaatggtgggatattat

SEQ ID NO: 592687 - DNA, 19 bp, Mus musculus
  siRNA target sequence for Man2a1 (NM_008549.1,749-767).
ggtgggatattatagatat

SEQ ID NO: 592688 - DNA, 19 bp, Mus musculus
  siRNA target sequence for Man2a1 (NM_008549.1,750-768).
gtgggatattatagatatt

SEQ ID NO: 592689 - DNA, 19 bp, Mus musculus
  siRNA target sequence for Man2a1 (NM_008549.1,782-800).
ctgttaaaagtttactaca

SEQ ID NO: 592690 - DNA, 19 bp, Mus musculus
  siRNA target sequence for Man2a1 (NM_008549.1,831-849).
ctgggttatgcctgatgaa

SEQ ID NO: 592691 - DNA, 19 bp, Mus musculus
  siRNA target sequence for Man2a1 (NM_008549.1,847-865).
gaagccactccacattatt

SEQ ID NO: 592692 - DNA, 19 bp, Mus musculus
  siRNA target sequence for Man2a1 (NM_008549.1,869-887).
ccttaattgaccaactaat

SEQ ID NO: 592693 - DNA, 19 bp, Mus musculus
  siRNA target sequence for Man2a1 (NM_008549.1,965-983).
cacccacaatggcttatct

SEQ ID NO: 592694 - DNA, 19 bp, Mus musculus
  siRNA target sequence for Man2a1 (NM_008549.1,1022-1040).
gagtccattatgcaatcaa

SEQ ID NO: 592695 - DNA, 19 bp, Mus musculus
  siRNA target sequence for Man2a1 (NM_008549.1,1024-1042).
gtccattatgcaatcaaaa

SEQ ID NO: 592696 - DNA, 19 bp, Mus musculus
  siRNA target sequence for Man2a1 (NM_008549.1,1111-1129).
gacattttgtgccatatga

SEQ ID NO: 592697 - DNA, 19 bp, Mus musculus
  siRNA target sequence for Man2a1 (NM_008549.1,1163-1181).
gtgggcctgatcctaaaat

SEQ ID NO: 592698 - DNA, 19 bp, Mus musculus
  siRNA target sequence for Man2a1 (NM_008549.1,1165-1183).
gggcctgatcctaaaatat

SEQ ID NO: 592699 - DNA, 19 bp, Mus musculus
  siRNA target sequence for Man2a1 (NM_008549.1,1168-1186).
cctgatcctaaaatatgct

SEQ ID NO: 592700 - DNA, 19 bp, Mus musculus
  siRNA target sequence for Man2a1 (NM_008549.1,1238-1256).
gagttcccccagaagcaat

SEQ ID NO: 592701 - DNA, 19 bp, Mus musculus
  siRNA target sequence for Man2a1 (NM_008549.1,1240-1258).
gttcccccagaagcaatat

SEQ ID NO: 592702 - DNA, 19 bp, Mus musculus
  siRNA target sequence for Man2a1 (NM_008549.1,1277-1295).
gcagggctcagatgctatt

SEQ ID NO: 592703 - DNA, 19 bp, Mus musculus
  siRNA target sequence for Man2a1 (NM_008549.1,1280-1298).
gggctcagatgctattgga

SEQ ID NO: 592704 - DNA, 19 bp, Mus musculus
  siRNA target sequence for Man2a1 (NM_008549.1,1281-1299).
ggctcagatgctattggat

SEQ ID NO: 592705 - DNA, 19 bp, Mus musculus
  siRNA target sequence for Man2a1 (NM_008549.1,1360-1378).
gactttcggttcagtgaat

SEQ ID NO: 592706 - DNA, 19 bp, Mus musculus
  siRNA target sequence for Man2a1 (NM_008549.1,1403-1421).
ggaactacgagcaactgtt

SEQ ID NO: 592707 - DNA, 19 bp, Mus musculus
  siRNA target sequence for Man2a1 (NM_008549.1,1411-1429).
gagcaactgttcagttaca

SEQ ID NO: 592708 - DNA, 19 bp, Mus musculus
  siRNA target sequence for Man2a1 (NM_008549.1,1453-1471).
gtgaagatccagtttggaa

SEQ ID NO: 592709 - DNA, 19 bp, Mus musculus
  siRNA target sequence for Man2a1 (NM_008549.1,1468-1486).
ggaaccttgtcagattatt

SEQ ID NO: 592710 - DNA, 19 bp, Mus musculus
  siRNA target sequence for Man2a1 (NM_008549.1,1469-1487).
gaaccttgtcagattattt

SEQ ID NO: 592711 - DNA, 19 bp, Mus musculus
  siRNA target sequence for Man2a1 (NM_008549.1,1505-1523).
cggtggcagccgagaagaa

SEQ ID NO: 592712 - DNA, 19 bp, Mus musculus
  siRNA target sequence for Man2a1 (NM_008549.1,1510-1528).
gcagccgagaagaagagta

SEQ ID NO: 592713 - DNA, 19 bp, Mus musculus
  siRNA target sequence for Man2a1 (NM_008549.1,1576-1594).
gacagagacgaccattact

SEQ ID NO: 592714 - DNA, 19 bp, Mus musculus
  siRNA target sequence for Man2a1 (NM_008549.1,1616-1634).
gacctttctacaaacgaat

SEQ ID NO: 592715 - DNA, 19 bp, Mus musculus
  siRNA target sequence for Man2a1 (NM_008549.1,1626-1644).
caaacgaatggacagaata

SEQ ID NO: 592716 - DNA, 19 bp, Mus musculus
  siRNA target sequence for Man2a1 (NM_008549.1,1655-1673).
gtataagggctgctgaaat

SEQ ID NO: 592717 - DNA, 19 bp, Mus musculus
  siRNA target sequence for Man2a1 (NM_008549.1,1726-1744).
ctttcatcacctcattaca

SEQ ID NO: 592718 - DNA, 19 bp, Mus musculus
  siRNA target sequence for Man2a1 (NM_008549.1,1766-1784).
ggaacttaggactatttca

SEQ ID NO: 592719 - DNA, 19 bp, Mus musculus
  siRNA target sequence for Man2a1 (NM_008549.1,1822-1840).
gtggttgtggactatggta

SEQ ID NO: 592720 - DNA, 19 bp, Mus musculus
  siRNA target sequence for Man2a1 (NM_008549.1,1833-1851).
ctatggtaccagactcttt

SEQ ID NO: 592721 - DNA, 19 bp, Mus musculus
  siRNA target sequence for Man2a1 (NM_008549.1,1837-1855).
ggtaccagactctttcagt

SEQ ID NO: 592722 - DNA, 19 bp, Mus musculus
  siRNA target sequence for Man2a1 (NM_008549.1,1846-1864).
ctctttcagtcattaaatt

SEQ ID NO: 592723 - DNA, 19 bp, Mus musculus
  siRNA target sequence for Man2a1 (NM_008549.1,1848-1866).
ctttcagtcattaaattct

SEQ ID NO: 592724 - DNA, 19 bp, Mus musculus
  siRNA target sequence for Man2a1 (NM_008549.1,1872-1890).
gaagataattggagattct

SEQ ID NO: 592725 - DNA, 19 bp, Mus musculus
  siRNA target sequence for Man2a1 (NM_008549.1,1954-1972).
gagatggatacgaagcaaa

SEQ ID NO: 592726 - DNA, 19 bp, Mus musculus
  siRNA target sequence for Man2a1 (NM_008549.1,1959-1977).
ggatacgaagcaaagttca

SEQ ID NO: 592727 - DNA, 19 bp, Mus musculus
  siRNA target sequence for Man2a1 (NM_008549.1,1965-1983).
gaagcaaagttcacaagat

SEQ ID NO: 592728 - DNA, 19 bp, Mus musculus
  siRNA target sequence for Man2a1 (NM_008549.1,1987-2005).
ctgccccaaaaaattataa

SEQ ID NO: 592729 - DNA, 19 bp, Mus musculus
  siRNA target sequence for Man2a1 (NM_008549.1,1989-2007).
gccccaaaaaattataata

SEQ ID NO: 592730 - DNA, 19 bp, Mus musculus
  siRNA target sequence for Man2a1 (NM_008549.1,1991-2009).
cccaaaaaattataataca

SEQ ID NO: 592731 - DNA, 19 bp, Mus musculus
  siRNA target sequence for Man2a1 (NM_008549.1,2030-2048).
ggtaccttgtggtctacaa

SEQ ID NO: 592732 - DNA, 19 bp, Mus musculus
  siRNA target sequence for Man2a1 (NM_008549.1,2043-2061).
ctacaatccctttgaacaa

SEQ ID NO: 592733 - DNA, 19 bp, Mus musculus
  siRNA target sequence for Man2a1 (NM_008549.1,2163-2181).
cgacatgaggacaatttca

SEQ ID NO: 592734 - DNA, 19 bp, Mus musculus
  siRNA target sequence for Man2a1 (NM_008549.1,2166-2184).
catgaggacaatttcacaa

SEQ ID NO: 592735 - DNA, 19 bp, Mus musculus
  siRNA target sequence for Man2a1 (NM_008549.1,2185-2203).
gcagcctatgaggtttctt

SEQ ID NO: 592736 - DNA, 19 bp, Mus musculus
  siRNA target sequence for Man2a1 (NM_008549.1,2186-2204).
cagcctatgaggtttcttt

SEQ ID NO: 592737 - DNA, 19 bp, Mus musculus
  siRNA target sequence for Man2a1 (NM_008549.1,2222-2240).
cactgggactgaaagtgtt

SEQ ID NO: 592738 - DNA, 19 bp, Mus musculus
  siRNA target sequence for Man2a1 (NM_008549.1,2224-2242).
ctgggactgaaagtgttta

SEQ ID NO: 592739 - DNA, 19 bp, Mus musculus
  siRNA target sequence for Man2a1 (NM_008549.1,2228-2246).
gactgaaagtgtttaagat

SEQ ID NO: 592740 - DNA, 19 bp, Mus musculus
  siRNA target sequence for Man2a1 (NM_008549.1,2232-2250).
gaaagtgtttaagatctta

SEQ ID NO: 592741 - DNA, 19 bp, Mus musculus
  siRNA target sequence for Man2a1 (NM_008549.1,2236-2254).
gtgtttaagatcttagagt

SEQ ID NO: 592742 - DNA, 19 bp, Mus musculus
  siRNA target sequence for Man2a1 (NM_008549.1,2244-2262).
gatcttagagtcacaaagt

SEQ ID NO: 592743 - DNA, 19 bp, Mus musculus
  siRNA target sequence for Man2a1 (NM_008549.1,2247-2265).
cttagagtcacaaagttca

SEQ ID NO: 592744 - DNA, 19 bp, Mus musculus
  siRNA target sequence for Man2a1 (NM_008549.1,2267-2285).
gctcacacttggctgatta

SEQ ID NO: 592745 - DNA, 19 bp, Mus musculus
  siRNA target sequence for Man2a1 (NM_008549.1,2277-2295).
ggctgattatgtcctatat

SEQ ID NO: 592746 - DNA, 19 bp, Mus musculus
  siRNA target sequence for Man2a1 (NM_008549.1,2279-2297).
ctgattatgtcctatataa

SEQ ID NO: 592747 - DNA, 19 bp, Mus musculus
  siRNA target sequence for Man2a1 (NM_008549.1,2281-2299).
gattatgtcctatataata

SEQ ID NO: 592748 - DNA, 19 bp, Mus musculus
  siRNA target sequence for Man2a1 (NM_008549.1,2350-2368).
gctggagatgccataacaa

SEQ ID NO: 592749 - DNA, 19 bp, Mus musculus
  siRNA target sequence for Man2a1 (NM_008549.1,2351-2369).
ctggagatgccataacaat

SEQ ID NO: 592750 - DNA, 19 bp, Mus musculus
  siRNA target sequence for Man2a1 (NM_008549.1,2356-2374).
gatgccataacaatagaga

SEQ ID NO: 592751 - DNA, 19 bp, Mus musculus
  siRNA target sequence for Man2a1 (NM_008549.1,2475-2493).
gtacggaaccaccaacaaa

SEQ ID NO: 592752 - DNA, 19 bp, Mus musculus
  siRNA target sequence for Man2a1 (NM_008549.1,2554-2572).
ctaagaccgccctttgtca

SEQ ID NO: 592753 - DNA, 19 bp, Mus musculus
  siRNA target sequence for Man2a1 (NM_008549.1,2616-2634).
cgaacacgttactcacaaa

SEQ ID NO: 592754 - DNA, 19 bp, Mus musculus
  siRNA target sequence for Man2a1 (NM_008549.1,2646-2664).
caacattcagggaatagaa

SEQ ID NO: 592755 - DNA, 19 bp, Mus musculus
  siRNA target sequence for Man2a1 (NM_008549.1,2670-2688).
gtccatggaagtttctaat

SEQ ID NO: 592756 - DNA, 19 bp, Mus musculus
  siRNA target sequence for Man2a1 (NM_008549.1,2709-2727).
gcataaccgtgagattgta

SEQ ID NO: 592757 - DNA, 19 bp, Mus musculus
  siRNA target sequence for Man2a1 (NM_008549.1,2710-2728).
cataaccgtgagattgtaa

SEQ ID NO: 592758 - DNA, 19 bp, Mus musculus
  siRNA target sequence for Man2a1 (NM_008549.1,2721-2739).
gattgtaatgagaatttca

SEQ ID NO: 592759 - DNA, 19 bp, Mus musculus
  siRNA target sequence for Man2a1 (NM_008549.1,2773-2791).
gacctaaatggatatcaga

SEQ ID NO: 592760 - DNA, 19 bp, Mus musculus
  siRNA target sequence for Man2a1 (NM_008549.1,2821-2839).
cctcttcaagccaacgttt

SEQ ID NO: 592761 - DNA, 19 bp, Mus musculus
  siRNA target sequence for Man2a1 (NM_008549.1,2822-2840).
ctcttcaagccaacgttta

SEQ ID NO: 592762 - DNA, 19 bp, Mus musculus
  siRNA target sequence for Man2a1 (NM_008549.1,2849-2867).
gcacaatggcgtatatcca

SEQ ID NO: 592763 - DNA, 19 bp, Mus musculus
  siRNA target sequence for Man2a1 (NM_008549.1,2927-2945).
cttctggtcagattgaagt

SEQ ID NO: 592764 - DNA, 19 bp, Mus musculus
  siRNA target sequence for Man2a1 (NM_008549.1,2990-3008).
ggcaaggcgtccatgacaa

SEQ ID NO: 592765 - DNA, 19 bp, Mus musculus
  siRNA target sequence for Man2a1 (NM_008549.1,2991-3009).
gcaaggcgtccatgacaat

SEQ ID NO: 592766 - DNA, 19 bp, Mus musculus
  siRNA target sequence for Man2a1 (NM_008549.1,2992-3010).
caaggcgtccatgacaata

SEQ ID NO: 592767 - DNA, 19 bp, Mus musculus
  siRNA target sequence for Man2a1 (NM_008549.1,2995-3013).
ggcgtccatgacaataaga

SEQ ID NO: 592768 - DNA, 19 bp, Mus musculus
  siRNA target sequence for Man2a1 (NM_008549.1,2996-3014).
gcgtccatgacaataagat

SEQ ID NO: 592769 - DNA, 19 bp, Mus musculus
  siRNA target sequence for Man2a1 (NM_008549.1,2997-3015).
cgtccatgacaataagatt

SEQ ID NO: 592770 - DNA, 19 bp, Mus musculus
  siRNA target sequence for Man2a1 (NM_008549.1,2998-3016).
gtccatgacaataagatta

SEQ ID NO: 592771 - DNA, 19 bp, Mus musculus
  siRNA target sequence for Man2a1 (NM_008549.1,3000-3018).
ccatgacaataagattaca

SEQ ID NO: 592772 - DNA, 19 bp, Mus musculus
  siRNA target sequence for Man2a1 (NM_008549.1,3103-3121).
ctcctcagccacatgactt

SEQ ID NO: 592773 - DNA, 19 bp, Mus musculus
  siRNA target sequence for Man2a1 (NM_008549.1,3221-3239).
ctctaccttgtgatatcca

SEQ ID NO: 592774 - DNA, 19 bp, Mus musculus
  siRNA target sequence for Man2a1 (NM_008549.1,3243-3261).
ggtcaacctgcggacaata

SEQ ID NO: 592775 - DNA, 19 bp, Mus musculus
  siRNA target sequence for Man2a1 (NM_008549.1,3246-3264).
caacctgcggacaatacaa

SEQ ID NO: 592776 - DNA, 19 bp, Mus musculus
  siRNA target sequence for Man2a1 (NM_008549.1,3249-3267).
cctgcggacaatacaatca

SEQ ID NO: 592777 - DNA, 19 bp, Mus musculus
  siRNA target sequence for Man2a1 (NM_008549.1,3250-3268).
ctgcggacaatacaatcaa

SEQ ID NO: 592778 - DNA, 19 bp, Mus musculus
  siRNA target sequence for Man2a1 (NM_008549.1,3254-3272).
ggacaatacaatcaaagat

SEQ ID NO: 592779 - DNA, 19 bp, Mus musculus
  siRNA target sequence for Man2a1 (NM_008549.1,3458-3476).
ctccagatgcccagaacat

SEQ ID NO: 592780 - DNA, 19 bp, Mus musculus
  siRNA target sequence for Man2a2 (NM_172903.1,1276-1294).
ctgtgtggccgtcttttct

SEQ ID NO: 592781 - DNA, 19 bp, Mus musculus
  siRNA target sequence for Man2a2 (NM_172903.1,1378-1396).
gctacagaaccggatagaa

SEQ ID NO: 592782 - DNA, 19 bp, Mus musculus
  siRNA target sequence for Man2a2 (NM_172903.1,1418-1436).
gaaaaccatgacatcataa

SEQ ID NO: 592783 - DNA, 19 bp, Mus musculus
  siRNA target sequence for Man2a2 (NM_172903.1,1600-1618).
gggtcagaagccagaacta

SEQ ID NO: 592784 - DNA, 19 bp, Mus musculus
  siRNA target sequence for Man2a2 (NM_172903.1,1609-1627).
gccagaactacagatgtta

SEQ ID NO: 592785 - DNA, 19 bp, Mus musculus
  siRNA target sequence for Man2a2 (NM_172903.1,1637-1655).
gaggatttgccgtttgaca

SEQ ID NO: 592786 - DNA, 19 bp, Mus musculus
  siRNA target sequence for Man2a2 (NM_172903.1,1639-1657).
ggatttgccgtttgacaat

SEQ ID NO: 592787 - DNA, 19 bp, Mus musculus
  siRNA target sequence for Man2a2 (NM_172903.1,1719-1737).
ctgaagacctgcaagtgtt

SEQ ID NO: 592788 - DNA, 19 bp, Mus musculus
  siRNA target sequence for Man2a2 (NM_172903.1,1767-1785).
gctggatcaagacttttga

SEQ ID NO: 592789 - DNA, 19 bp, Mus musculus
  siRNA target sequence for Man2a2 (NM_172903.1,1770-1788).
ggatcaagacttttgacaa

SEQ ID NO: 592790 - DNA, 19 bp, Mus musculus
  siRNA target sequence for Man2a2 (NM_172903.1,2171-2189).
gtgcattatgccatcaaga

SEQ ID NO: 592791 - DNA, 19 bp, Mus musculus
  siRNA target sequence for Man2a2 (NM_172903.1,2356-2374).
gccgggtgggagaatcaat

SEQ ID NO: 592792 - DNA, 19 bp, Mus musculus
  siRNA target sequence for Man2a2 (NM_172903.1,2615-2633).
gggaccctctctgagtatt

SEQ ID NO: 592793 - DNA, 19 bp, Mus musculus
  siRNA target sequence for Man2a2 (NM_172903.1,2616-2634).
ggaccctctctgagtattt

SEQ ID NO: 592794 - DNA, 19 bp, Mus musculus
  siRNA target sequence for Man2a2 (NM_172903.1,2619-2637).
ccctctctgagtatttcga

SEQ ID NO: 592795 - DNA, 19 bp, Mus musculus
  siRNA target sequence for Man2a2 (NM_172903.1,2620-2638).
cctctctgagtatttcgat

SEQ ID NO: 592796 - DNA, 19 bp, Mus musculus
  siRNA target sequence for Man2a2 (NM_172903.1,2806-2824).
gcgtggggcagagattcta

SEQ ID NO: 592797 - DNA, 19 bp, Mus musculus
  siRNA target sequence for Man2a2 (NM_172903.1,2807-2825).
cgtggggcagagattctat

SEQ ID NO: 592798 - DNA, 19 bp, Mus musculus
  siRNA target sequence for Man2a2 (NM_172903.1,2808-2826).
gtggggcagagattctata

SEQ ID NO: 592799 - DNA, 19 bp, Mus musculus
  siRNA target sequence for Man2a2 (NM_172903.1,2810-2828).
ggggcagagattctataca

SEQ ID NO: 592800 - DNA, 19 bp, Mus musculus
  siRNA target sequence for Man2a2 (NM_172903.1,2870-2888).
cagtacccgctgtctgatt

SEQ ID NO: 592801 - DNA, 19 bp, Mus musculus
  siRNA target sequence for Man2a2 (NM_172903.1,2875-2893).
cccgctgtctgattttgct

SEQ ID NO: 592802 - DNA, 19 bp, Mus musculus
  siRNA target sequence for Man2a2 (NM_172903.1,3014-3032).
ctcaagcaggttatcatca

SEQ ID NO: 592803 - DNA, 19 bp, Mus musculus
  siRNA target sequence for Man2a2 (NM_172903.1,3016-3034).
caagcaggttatcatcaat

SEQ ID NO: 592804 - DNA, 19 bp, Mus musculus
  siRNA target sequence for Man2a2 (NM_172903.1,3090-3108).
cacccttcctccaaatgga

SEQ ID NO: 592805 - DNA, 19 bp, Mus musculus
  siRNA target sequence for Man2b2 (NM_008550.1,209-227).
gcagccaatgtctacacta

SEQ ID NO: 592806 - DNA, 19 bp, Mus musculus
  siRNA target sequence for Man2b2 (NM_008550.1,454-472).
ctttctctatgaaacgttt

SEQ ID NO: 592807 - DNA, 19 bp, Mus musculus
  siRNA target sequence for Man2b2 (NM_008550.1,458-476).
ctctatgaaacgtttggaa

SEQ ID NO: 592808 - DNA, 19 bp, Mus musculus
  siRNA target sequence for Man2b2 (NM_008550.1,552-570).
gcttcaatgcccatctcat

SEQ ID NO: 592809 - DNA, 19 bp, Mus musculus
  siRNA target sequence for Man2b2 (NM_008550.1,566-584).
ctcatctctcgtattgact

SEQ ID NO: 592810 - DNA, 19 bp, Mus musculus
  siRNA target sequence for Man2b2 (NM_008550.1,677-695).
cacgtcatggaccattata

SEQ ID NO: 592811 - DNA, 19 bp, Mus musculus
  siRNA target sequence for Man2b2 (NM_008550.1,680-698).
gtcatggaccattatagct

SEQ ID NO: 592812 - DNA, 19 bp, Mus musculus
  siRNA target sequence for Man2b2 (NM_008550.1,713-731).
cacatccccttttctaaca

SEQ ID NO: 592813 - DNA, 19 bp, Mus musculus
  siRNA target sequence for Man2b2 (NM_008550.1,726-744).
ctaacaggtctggatttta

SEQ ID NO: 592814 - DNA, 19 bp, Mus musculus
  siRNA target sequence for Man2b2 (NM_008550.1,779-797).
ccagacggcgtgtatccta

SEQ ID NO: 592815 - DNA, 19 bp, Mus musculus
  siRNA target sequence for Man2b2 (NM_008550.1,780-798).
cagacggcgtgtatcctaa

SEQ ID NO: 592816 - DNA, 19 bp, Mus musculus
  siRNA target sequence for Man2b2 (NM_008550.1,785-803).
ggcgtgtatcctaacatga

SEQ ID NO: 592817 - DNA, 19 bp, Mus musculus
  siRNA target sequence for Man2b2 (NM_008550.1,845-863).
gctctggtggccaacgtta

SEQ ID NO: 592818 - DNA, 19 bp, Mus musculus
  siRNA target sequence for Man2b2 (NM_008550.1,846-864).
ctctggtggccaacgttaa

SEQ ID NO: 592819 - DNA, 19 bp, Mus musculus
  siRNA target sequence for Man2b2 (NM_008550.1,851-869).
gtggccaacgttaaacaga

SEQ ID NO: 592820 - DNA, 19 bp, Mus musculus
  siRNA target sequence for Man2b2 (NM_008550.1,935-953).
gcctcggtgcagtttgaca

SEQ ID NO: 592821 - DNA, 19 bp, Mus musculus
  siRNA target sequence for Man2b2 (NM_008550.1,939-957).
cggtgcagtttgacaacat

SEQ ID NO: 592822 - DNA, 19 bp, Mus musculus
  siRNA target sequence for Man2b2 (NM_008550.1,1020-1038).
ccacactgaacgactactt

SEQ ID NO: 592823 - DNA, 19 bp, Mus musculus
  siRNA target sequence for Man2b2 (NM_008550.1,1046-1064).
ctgcacgccaccaacatga

SEQ ID NO: 592824 - DNA, 19 bp, Mus musculus
  siRNA target sequence for Man2b2 (NM_008550.1,1087-1105).
ggacttccttccctattct

SEQ ID NO: 592825 - DNA, 19 bp, Mus musculus
  siRNA target sequence for Man2b2 (NM_008550.1,1093-1111).
ccttccctattcttcagaa

SEQ ID NO: 592826 - DNA, 19 bp, Mus musculus
  siRNA target sequence for Man2b2 (NM_008550.1,1338-1356).
ccaaggtgaagaacatgta

SEQ ID NO: 592827 - DNA, 19 bp, Mus musculus
  siRNA target sequence for Man2b2 (NM_008550.1,1532-1550).
ccgctggcctggaagatca

SEQ ID NO: 592828 - DNA, 19 bp, Mus musculus
  siRNA target sequence for Man2b2 (NM_008550.1,1612-1630).
cccggtgtcaacacagatt

SEQ ID NO: 592829 - DNA, 19 bp, Mus musculus
  siRNA target sequence for Man2b2 (NM_008550.1,1616-1634).
gtgtcaacacagattcaga

SEQ ID NO: 592830 - DNA, 19 bp, Mus musculus
  siRNA target sequence for Man2b2 (NM_008550.1,1693-1711).
caactatcggcactatcaa

SEQ ID NO: 592831 - DNA, 19 bp, Mus musculus
  siRNA target sequence for Man2b2 (NM_008550.1,1764-1782).
gggccaacaccctcaagtt

SEQ ID NO: 592832 - DNA, 19 bp, Mus musculus
  siRNA target sequence for Man2b2 (NM_008550.1,1765-1783).
ggccaacaccctcaagttt

SEQ ID NO: 592833 - DNA, 19 bp, Mus musculus
  siRNA target sequence for Man2b2 (NM_008550.1,1766-1784).
gccaacaccctcaagttta

SEQ ID NO: 592834 - DNA, 19 bp, Mus musculus
  siRNA target sequence for Man2b2 (NM_008550.1,1768-1786).
caacaccctcaagtttagt

SEQ ID NO: 592835 - DNA, 19 bp, Mus musculus
  siRNA target sequence for Man2b2 (NM_008550.1,1824-1842).
gcctggtgcccgtgatgaa

SEQ ID NO: 592836 - DNA, 19 bp, Mus musculus
  siRNA target sequence for Man2b2 (NM_008550.1,1867-1885).
ccaggacaccaacatgtta

SEQ ID NO: 592837 - DNA, 19 bp, Mus musculus
  siRNA target sequence for Man2b2 (NM_008550.1,2034-2052).
cggtggggatggaaatggt

SEQ ID NO: 592838 - DNA, 19 bp, Mus musculus
  siRNA target sequence for Man2b2 (NM_008550.1,2070-2088).
cggacataaggcagtattt

SEQ ID NO: 592839 - DNA, 19 bp, Mus musculus
  siRNA target sequence for Man2b2 (NM_008550.1,2083-2101).
gtatttctacaggtacata

SEQ ID NO: 592840 - DNA, 19 bp, Mus musculus
  siRNA target sequence for Man2b2 (NM_008550.1,2105-2123).
gaccaggagtacatctatt

SEQ ID NO: 592841 - DNA, 19 bp, Mus musculus
  siRNA target sequence for Man2b2 (NM_008550.1,2108-2126).
caggagtacatctattcca

SEQ ID NO: 592842 - DNA, 19 bp, Mus musculus
  siRNA target sequence for Man2b2 (NM_008550.1,2235-2253).
ggaccagcagcgacctaaa

SEQ ID NO: 592843 - DNA, 19 bp, Mus musculus
  siRNA target sequence for Man2b2 (NM_008550.1,2304-2322).
ggccctacaaggctttcaa

SEQ ID NO: 592844 - DNA, 19 bp, Mus musculus
  siRNA target sequence for Man2b2 (NM_008550.1,2306-2324).
ccctacaaggctttcaaga

SEQ ID NO: 592845 - DNA, 19 bp, Mus musculus
  siRNA target sequence for Man2b2 (NM_008550.1,2367-2385).
ccttcatcgaggatgacaa

SEQ ID NO: 592846 - DNA, 19 bp, Mus musculus
  siRNA target sequence for Man2b2 (NM_008550.1,2636-2654).
gaactggctgacgaagaaa

SEQ ID NO: 592847 - DNA, 19 bp, Mus musculus
  siRNA target sequence for Man2b2 (NM_008550.1,2830-2848).
cctgcgccacctgtatgaa

SEQ ID NO: 592848 - DNA, 19 bp, Mus musculus
  siRNA target sequence for Man2b2 (NM_008550.1,2877-2895).
ctgcgacagtggatctcaa

SEQ ID NO: 592849 - DNA, 19 bp, Mus musculus
  siRNA target sequence for Man2b2 (NM_008550.1,3058-3076).
caccgtgtaccctaaggaa

SEQ ID NO: 592850 - DNA, 19 bp, Mus musculus
  siRNA target sequence for Man2b2 (NM_008550.1,3074-3092).
gaaatccggaccttcttca

SEQ ID NO: 592851 - DNA, 19 bp, Mus musculus
  siRNA target sequence for Man2b2 (NM_008550.1,3079-3097).
ccggaccttcttcattaaa

SEQ ID NO: 592852 - DNA, 19 bp, Mus musculus
  siRNA target sequence for Man2b2 (NM_008550.1,3080-3098).
cggaccttcttcattaaat

SEQ ID NO: 592853 - DNA, 19 bp, Mus musculus
  siRNA target sequence for Man2b2 (NM_008550.1,3084-3102).
ccttcttcattaaattcca

SEQ ID NO: 592854 - DNA, 19 bp, Mus musculus
  siRNA target sequence for Man2c1 (NM_028636.1,16-34).
gcggcagcgccgttcttga

SEQ ID NO: 592855 - DNA, 19 bp, Mus musculus
  siRNA target sequence for Man2c1 (NM_028636.1,17-35).
cggcagcgccgttcttgaa

SEQ ID NO: 592856 - DNA, 19 bp, Mus musculus
  siRNA target sequence for Man2c1 (NM_028636.1,87-105).
cttcaccgactgtaacctt

SEQ ID NO: 592857 - DNA, 19 bp, Mus musculus
  siRNA target sequence for Man2c1 (NM_028636.1,163-181).
gagaggcttccctatgaga

SEQ ID NO: 592858 - DNA, 19 bp, Mus musculus
  siRNA target sequence for Man2c1 (NM_028636.1,248-266).
gctggtttcgggtagaact

SEQ ID NO: 592859 - DNA, 19 bp, Mus musculus
  siRNA target sequence for Man2c1 (NM_028636.1,428-446).
ggagcttgactctctatgt

SEQ ID NO: 592860 - DNA, 19 bp, Mus musculus
  siRNA target sequence for Man2c1 (NM_028636.1,656-674).
ccaaccagatggtgaacat

SEQ ID NO: 592861 - DNA, 19 bp, Mus musculus
  siRNA target sequence for Man2c1 (NM_028636.1,778-796).
ggacactgtcacattgata

SEQ ID NO: 592862 - DNA, 19 bp, Mus musculus
  siRNA target sequence for Man2c1 (NM_028636.1,899-917).
gctctcaggcacaacaact

SEQ ID NO: 592863 - DNA, 19 bp, Mus musculus
  siRNA target sequence for Man2c1 (NM_028636.1,900-918).
ctctcaggcacaacaactt

SEQ ID NO: 592864 - DNA, 19 bp, Mus musculus
  siRNA target sequence for Man2c1 (NM_028636.1,1142-1160).
cacagctcccccagatcat

SEQ ID NO: 592865 - DNA, 19 bp, Mus musculus
  siRNA target sequence for Man2c1 (NM_028636.1,1221-1239).
ctttccacaccataccttt

SEQ ID NO: 592866 - DNA, 19 bp, Mus musculus
  siRNA target sequence for Man2c1 (NM_028636.1,1225-1243).
ccacaccatacctttttct

SEQ ID NO: 592867 - DNA, 19 bp, Mus musculus
  siRNA target sequence for Man2c1 (NM_028636.1,1286-1304).
ctggagactcatatggaat

SEQ ID NO: 592868 - DNA, 19 bp, Mus musculus
  siRNA target sequence for Man2c1 (NM_028636.1,1421-1439).
ccatgttggaccgattgaa

SEQ ID NO: 592869 - DNA, 19 bp, Mus musculus
  siRNA target sequence for Man2c1 (NM_028636.1,1465-1483).
cccagggtgcagctatctt

SEQ ID NO: 592870 - DNA, 19 bp, Mus musculus
  siRNA target sequence for Man2c1 (NM_028636.1,1467-1485).
cagggtgcagctatcttct

SEQ ID NO: 592871 - DNA, 19 bp, Mus musculus
  siRNA target sequence for Man2c1 (NM_028636.1,1535-1553).
catgggttggagaactctt

SEQ ID NO: 592872 - DNA, 19 bp, Mus musculus
  siRNA target sequence for Man2c1 (NM_028636.1,1564-1582).
cacaatggcacctacacta

SEQ ID NO: 592873 - DNA, 19 bp, Mus musculus
  siRNA target sequence for Man2c1 (NM_028636.1,1777-1795).
gaagatgccatgaactact

SEQ ID NO: 592874 - DNA, 19 bp, Mus musculus
  siRNA target sequence for Man2c1 (NM_028636.1,1871-1889).
ccaagggcctcctcattat

SEQ ID NO: 592875 - DNA, 19 bp, Mus musculus
  siRNA target sequence for Man2c1 (NM_028636.1,1904-1922).
ggaagcgcactgaagtgtt

SEQ ID NO: 592876 - DNA, 19 bp, Mus musculus
  siRNA target sequence for Man2c1 (NM_028636.1,2171-2189).
ccctggggaaccagtttgt

SEQ ID NO: 592877 - DNA, 19 bp, Mus musculus
  siRNA target sequence for Man2c1 (NM_028636.1,2197-2215).
gatgatgtgccattgtact

SEQ ID NO: 592878 - DNA, 19 bp, Mus musculus
  siRNA target sequence for Man2c1 (NM_028636.1,2222-2240).
catgggatgtcatggatta

SEQ ID NO: 592879 - DNA, 19 bp, Mus musculus
  siRNA target sequence for Man2c1 (NM_028636.1,2226-2244).
ggatgtcatggattaccat

SEQ ID NO: 592880 - DNA, 19 bp, Mus musculus
  siRNA target sequence for Man2c1 (NM_028636.1,2469-2487).
gagcccccaggctacctat

SEQ ID NO: 592881 - DNA, 19 bp, Mus musculus
  siRNA target sequence for Man2c1 (NM_028636.1,2474-2492).
cccaggctacctatgagat

SEQ ID NO: 592882 - DNA, 19 bp, Mus musculus
  siRNA target sequence for Man2c1 (NM_028636.1,2562-2580).
ggctcaccgctggatagat

SEQ ID NO: 592883 - DNA, 19 bp, Mus musculus
  siRNA target sequence for Man2c1 (NM_028636.1,2564-2582).
ctcaccgctggatagatct

SEQ ID NO: 592884 - DNA, 19 bp, Mus musculus
  siRNA target sequence for Man2c1 (NM_028636.1,2610-2628).
gctcaacaactgcaagtat

SEQ ID NO: 592885 - DNA, 19 bp, Mus musculus
  siRNA target sequence for Manba (NM_027288.2,191-209).
gatccttactacagattta

SEQ ID NO: 592886 - DNA, 19 bp, Mus musculus
  siRNA target sequence for Manba (NM_027288.2,204-222).
gatttaatgacctgaacta

SEQ ID NO: 592887 - DNA, 19 bp, Mus musculus
  siRNA target sequence for Manba (NM_027288.2,225-243).
gatggatttccttagataa

SEQ ID NO: 592888 - DNA, 19 bp, Mus musculus
  siRNA target sequence for Manba (NM_027288.2,247-265).
gacctacagcacggaattt

SEQ ID NO: 592889 - DNA, 19 bp, Mus musculus
  siRNA target sequence for Manba (NM_027288.2,291-309).
ggcagaaggtaaagttgat

SEQ ID NO: 592890 - DNA, 19 bp, Mus musculus
  siRNA target sequence for Manba (NM_027288.2,534-552).
gtgaatgtcacgtcaactt

SEQ ID NO: 592891 - DNA, 19 bp, Mus musculus
  siRNA target sequence for Manba (NM_027288.2,630-648).
gaatcgaagcctataacat

SEQ ID NO: 592892 - DNA, 19 bp, Mus musculus
  siRNA target sequence for Manba (NM_027288.2,656-674).
ctggattacctcacgtttt

SEQ ID NO: 592893 - DNA, 19 bp, Mus musculus
  siRNA target sequence for Manba (NM_027288.2,667-685).
cacgtttttgccagtatat

SEQ ID NO: 592894 - DNA, 19 bp, Mus musculus
  siRNA target sequence for Manba (NM_027288.2,669-687).
cgtttttgccagtatatga

SEQ ID NO: 592895 - DNA, 19 bp, Mus musculus
  siRNA target sequence for Manba (NM_027288.2,700-718).
ggcctggaatattgaaata

SEQ ID NO: 592896 - DNA, 19 bp, Mus musculus
  siRNA target sequence for Manba (NM_027288.2,796-814).
gcagacaaacgacattgaa

SEQ ID NO: 592897 - DNA, 19 bp, Mus musculus
  siRNA target sequence for Manba (NM_027288.2,805-823).
cgacattgaacttcaacaa

SEQ ID NO: 592898 - DNA, 19 bp, Mus musculus
  siRNA target sequence for Manba (NM_027288.2,912-930).
ggtacaacatgacaattct

SEQ ID NO: 592899 - DNA, 19 bp, Mus musculus
  siRNA target sequence for Manba (NM_027288.2,936-954).
ctctggatggaggcttaaa

SEQ ID NO: 592900 - DNA, 19 bp, Mus musculus
  siRNA target sequence for Manba (NM_027288.2,945-963).
gaggcttaaaaattgagaa

SEQ ID NO: 592901 - DNA, 19 bp, Mus musculus
  siRNA target sequence for Manba (NM_027288.2,965-983).
gcagccaaggtttatttca

SEQ ID NO: 592902 - DNA, 19 bp, Mus musculus
  siRNA target sequence for Manba (NM_027288.2,1023-1041).
ctggtctgagtttctactt

SEQ ID NO: 592903 - DNA, 19 bp, Mus musculus
  siRNA target sequence for Manba (NM_027288.2,1067-1085).
ctgaaaggctcaaattgga

SEQ ID NO: 592904 - DNA, 19 bp, Mus musculus
  siRNA target sequence for Manba (NM_027288.2,1148-1166).
gtcgtggatgcgaacatga

SEQ ID NO: 592905 - DNA, 19 bp, Mus musculus
  siRNA target sequence for Manba (NM_027288.2,1213-1231).
ctatgcgctctgtgatgaa

SEQ ID NO: 592906 - DNA, 19 bp, Mus musculus
  siRNA target sequence for Manba (NM_027288.2,1224-1242).
gtgatgaacttgggataat

SEQ ID NO: 592907 - DNA, 19 bp, Mus musculus
  siRNA target sequence for Manba (NM_027288.2,1265-1283).
gccagtgccctttatccaa

SEQ ID NO: 592908 - DNA, 19 bp, Mus musculus
  siRNA target sequence for Manba (NM_027288.2,1302-1320).
cctccgtgaggaaagaagt

SEQ ID NO: 592909 - DNA, 19 bp, Mus musculus
  siRNA target sequence for Manba (NM_027288.2,1360-1378).
catcatatggagtggtaat

SEQ ID NO: 592910 - DNA, 19 bp, Mus musculus
  siRNA target sequence for Manba (NM_027288.2,1363-1381).
catatggagtggtaataat

SEQ ID NO: 592911 - DNA, 19 bp, Mus musculus
  siRNA target sequence for Manba (NM_027288.2,1369-1387).
gagtggtaataatgagaat

SEQ ID NO: 592912 - DNA, 19 bp, Mus musculus
  siRNA target sequence for Manba (NM_027288.2,1405-1423).
gaactggttccacgtaaat

SEQ ID NO: 592913 - DNA, 19 bp, Mus musculus
  siRNA target sequence for Manba (NM_027288.2,1461-1479).
ccctctatgtgaagaacat

SEQ ID NO: 592914 - DNA, 19 bp, Mus musculus
  siRNA target sequence for Manba (NM_027288.2,1471-1489).
gaagaacatcaggaagatt

SEQ ID NO: 592915 - DNA, 19 bp, Mus musculus
  siRNA target sequence for Manba (NM_027288.2,1504-1522).
caagagccgtcctttcatt

SEQ ID NO: 592916 - DNA, 19 bp, Mus musculus
  siRNA target sequence for Manba (NM_027288.2,1531-1549).
cccaaccaacgggatgaaa

SEQ ID NO: 592917 - DNA, 19 bp, Mus musculus
  siRNA target sequence for Manba (NM_027288.2,1532-1550).
ccaaccaacgggatgaaaa

SEQ ID NO: 592918 - DNA, 19 bp, Mus musculus
  siRNA target sequence for Manba (NM_027288.2,1572-1590).
cttacgacccttatagcat

SEQ ID NO: 592919 - DNA, 19 bp, Mus musculus
  siRNA target sequence for Manba (NM_027288.2,1587-1605).
gcatccagtatggtgatat

SEQ ID NO: 592920 - DNA, 19 bp, Mus musculus
  siRNA target sequence for Manba (NM_027288.2,1588-1606).
catccagtatggtgatatt

SEQ ID NO: 592921 - DNA, 19 bp, Mus musculus
  siRNA target sequence for Manba (NM_027288.2,1658-1676).
gctcgattagtgtctgaat

SEQ ID NO: 592922 - DNA, 19 bp, Mus musculus
  siRNA target sequence for Manba (NM_027288.2,1659-1677).
ctcgattagtgtctgaata

SEQ ID NO: 592923 - DNA, 19 bp, Mus musculus
  siRNA target sequence for Manba (NM_027288.2,1685-1703).
cagtcctggccttctttta

SEQ ID NO: 592924 - DNA, 19 bp, Mus musculus
  siRNA target sequence for Manba (NM_027288.2,1698-1716).
cttttagcacactagaaaa

SEQ ID NO: 592925 - DNA, 19 bp, Mus musculus
  siRNA target sequence for Manba (NM_027288.2,1841-1859).
gacccattgcgcacattta

SEQ ID NO: 592926 - DNA, 19 bp, Mus musculus
  siRNA target sequence for Manba (NM_027288.2,1843-1861).
cccattgcgcacatttaaa

SEQ ID NO: 592927 - DNA, 19 bp, Mus musculus
  siRNA target sequence for Manba (NM_027288.2,1845-1863).
cattgcgcacatttaaaga

SEQ ID NO: 592928 - DNA, 19 bp, Mus musculus
  siRNA target sequence for Manba (NM_027288.2,1851-1869).
gcacatttaaagacactat

SEQ ID NO: 592929 - DNA, 19 bp, Mus musculus
  siRNA target sequence for Manba (NM_027288.2,2013-2031).
cctgggcctctcttgagta

SEQ ID NO: 592930 - DNA, 19 bp, Mus musculus
  siRNA target sequence for Manba (NM_027288.2,2125-2143).
ctatggcgtctcagatctt

SEQ ID NO: 592931 - DNA, 19 bp, Mus musculus
  siRNA target sequence for Manba (NM_027288.2,2130-2148).
gcgtctcagatcttcacaa

SEQ ID NO: 592932 - DNA, 19 bp, Mus musculus
  siRNA target sequence for Manba (NM_027288.2,2131-2149).
cgtctcagatcttcacaaa

SEQ ID NO: 592933 - DNA, 19 bp, Mus musculus
  siRNA target sequence for Manba (NM_027288.2,2211-2229).
ccctcgtgaattcaagtat

SEQ ID NO: 592934 - DNA, 19 bp, Mus musculus
  siRNA target sequence for Manba (NM_027288.2,2212-2230).
cctcgtgaattcaagtatt

SEQ ID NO: 592935 - DNA, 19 bp, Mus musculus
  siRNA target sequence for Manba (NM_027288.2,2316-2334).
catgcgtggtctcctttta

SEQ ID NO: 592936 - DNA, 19 bp, Mus musculus
  siRNA target sequence for Manba (NM_027288.2,2340-2358).
caactgacaaagaactctt

SEQ ID NO: 592937 - DNA, 19 bp, Mus musculus
  siRNA target sequence for Manba (NM_027288.2,2437-2455).
ctctcagaagggcaatgtt

SEQ ID NO: 592938 - DNA, 19 bp, Mus musculus
  siRNA target sequence for Manba (NM_027288.2,2443-2461).
gaagggcaatgtttttgtt

SEQ ID NO: 592939 - DNA, 19 bp, Mus musculus
  siRNA target sequence for Manba (NM_027288.2,2480-2498).
gcggtcgctccctttgttt

SEQ ID NO: 592940 - DNA, 19 bp, Mus musculus
  siRNA target sequence for Manba (NM_027288.2,2545-2563).
cctcatgattcggaagaaa

SEQ ID NO: 592941 - DNA, 19 bp, Mus musculus
  siRNA target sequence for Manba (NM_027288.2,2560-2578).
gaaactctcggtactgttt

SEQ ID NO: 592942 - DNA, 19 bp, Mus musculus
  siRNA target sequence for Gbe1 (NM_028803.2,151-169).
cccgactcctggagattga

SEQ ID NO: 592943 - DNA, 19 bp, Mus musculus
  siRNA target sequence for Gbe1 (NM_028803.2,195-213).
gacttccagcgcaggtata

SEQ ID NO: 592944 - DNA, 19 bp, Mus musculus
  siRNA target sequence for Gbe1 (NM_028803.2,204-222).
cgcaggtataagaagttta

SEQ ID NO: 592945 - DNA, 19 bp, Mus musculus
  siRNA target sequence for Gbe1 (NM_028803.2,218-236).
gtttagccaggttttgcat

SEQ ID NO: 592946 - DNA, 19 bp, Mus musculus
  siRNA target sequence for Gbe1 (NM_028803.2,252-270).
gaaggtgggatcgataagt

SEQ ID NO: 592947 - DNA, 19 bp, Mus musculus
  siRNA target sequence for Gbe1 (NM_028803.2,255-273).
ggtgggatcgataagttct

SEQ ID NO: 592948 - DNA, 19 bp, Mus musculus
  siRNA target sequence for Gbe1 (NM_028803.2,275-293).
cagaggctatgagtcattt

SEQ ID NO: 592949 - DNA, 19 bp, Mus musculus
  siRNA target sequence for Gbe1 (NM_028803.2,382-400).
gttggaatccattttctca

SEQ ID NO: 592950 - DNA, 19 bp, Mus musculus
  siRNA target sequence for Gbe1 (NM_028803.2,403-421).
catataaaaagctggaata

SEQ ID NO: 592951 - DNA, 19 bp, Mus musculus
  siRNA target sequence for Gbe1 (NM_028803.2,423-441).
ggaaaatgggagctgtata

SEQ ID NO: 592952 - DNA, 19 bp, Mus musculus
  siRNA target sequence for Gbe1 (NM_028803.2,485-503).
caagctgaaggtagttatt

SEQ ID NO: 592953 - DNA, 19 bp, Mus musculus
  siRNA target sequence for Gbe1 (NM_028803.2,488-506).
gctgaaggtagttattact

SEQ ID NO: 592954 - DNA, 19 bp, Mus musculus
  siRNA target sequence for Gbe1 (NM_028803.2,489-507).
ctgaaggtagttattacta

SEQ ID NO: 592955 - DNA, 19 bp, Mus musculus
  siRNA target sequence for Gbe1 (NM_028803.2,495-513).
gtagttattactagtaaga

SEQ ID NO: 592956 - DNA, 19 bp, Mus musculus
  siRNA target sequence for Gbe1 (NM_028803.2,555-573).
gtggttcgtgagaacaaca

SEQ ID NO: 592957 - DNA, 19 bp, Mus musculus
  siRNA target sequence for Gbe1 (NM_028803.2,569-587).
caacaacgtgaactatgat

SEQ ID NO: 592958 - DNA, 19 bp, Mus musculus
  siRNA target sequence for Gbe1 (NM_028803.2,575-593).
cgtgaactatgattggata

SEQ ID NO: 592959 - DNA, 19 bp, Mus musculus
  siRNA target sequence for Gbe1 (NM_028803.2,689-707).
ccacgaaggaaaaatagct

SEQ ID NO: 592960 - DNA, 19 bp, Mus musculus
  siRNA target sequence for Gbe1 (NM_028803.2,697-715).
gaaaaatagcttcttacaa

SEQ ID NO: 592961 - DNA, 19 bp, Mus musculus
  siRNA target sequence for Gbe1 (NM_028803.2,727-745).
gcaatgtactaccaagaat

SEQ ID NO: 592962 - DNA, 19 bp, Mus musculus
  siRNA target sequence for Gbe1 (NM_028803.2,756-774).
gggtataactgcattcagt

SEQ ID NO: 592963 - DNA, 19 bp, Mus musculus
  siRNA target sequence for Gbe1 (NM_028803.2,757-775).
ggtataactgcattcagtt

SEQ ID NO: 592964 - DNA, 19 bp, Mus musculus
  siRNA target sequence for Gbe1 (NM_028803.2,781-799).
cgatcatggaacatgctta

SEQ ID NO: 592965 - DNA, 19 bp, Mus musculus
  siRNA target sequence for Gbe1 (NM_028803.2,785-803).
catggaacatgcttactat

SEQ ID NO: 592966 - DNA, 19 bp, Mus musculus
  siRNA target sequence for Gbe1 (NM_028803.2,805-823).
ccagttttgggtaccaaat

SEQ ID NO: 592967 - DNA, 19 bp, Mus musculus
  siRNA target sequence for Gbe1 (NM_028803.2,915-933).
ctcctagatgtggttcata

SEQ ID NO: 592968 - DNA, 19 bp, Mus musculus
  siRNA target sequence for Gbe1 (NM_028803.2,935-953).
ccatgcttcaaaaaattca

SEQ ID NO: 592969 - DNA, 19 bp, Mus musculus
  siRNA target sequence for Gbe1 (NM_028803.2,952-970).
cagaagatgggttaaacat

SEQ ID NO: 592970 - DNA, 19 bp, Mus musculus
  siRNA target sequence for Gbe1 (NM_028803.2,978-996).
gggaccgattcctgttatt

SEQ ID NO: 592971 - DNA, 19 bp, Mus musculus
  siRNA target sequence for Gbe1 (NM_028803.2,979-997).
ggaccgattcctgttattt

SEQ ID NO: 592972 - DNA, 19 bp, Mus musculus
  siRNA target sequence for Gbe1 (NM_028803.2,980-998).
gaccgattcctgttatttt

SEQ ID NO: 592973 - DNA, 19 bp, Mus musculus
  siRNA target sequence for Gbe1 (NM_028803.2,982-1000).
ccgattcctgttattttca

SEQ ID NO: 592974 - DNA, 19 bp, Mus musculus
  siRNA target sequence for Gbe1 (NM_028803.2,984-1002).
gattcctgttattttcact

SEQ ID NO: 592975 - DNA, 19 bp, Mus musculus
  siRNA target sequence for Gbe1 (NM_028803.2,1010-1028).
ccgagggacccatgatctt

SEQ ID NO: 592976 - DNA, 19 bp, Mus musculus
  siRNA target sequence for Gbe1 (NM_028803.2,1011-1029).
cgagggacccatgatcttt

SEQ ID NO: 592977 - DNA, 19 bp, Mus musculus
  siRNA target sequence for Gbe1 (NM_028803.2,1023-1041).
gatctttgggacagtagat

SEQ ID NO: 592978 - DNA, 19 bp, Mus musculus
  siRNA target sequence for Gbe1 (NM_028803.2,1026-1044).
ctttgggacagtagattat

SEQ ID NO: 592979 - DNA, 19 bp, Mus musculus
  siRNA target sequence for Gbe1 (NM_028803.2,1076-1094).
ccttctgtcgaacataaga

SEQ ID NO: 592980 - DNA, 19 bp, Mus musculus
  siRNA target sequence for Gbe1 (NM_028803.2,1077-1095).
cttctgtcgaacataagat

SEQ ID NO: 592981 - DNA, 19 bp, Mus musculus
  siRNA target sequence for Gbe1 (NM_028803.2,1142-1160).
cacctctatgctctatcat

SEQ ID NO: 592982 - DNA, 19 bp, Mus musculus
  siRNA target sequence for Gbe1 (NM_028803.2,1166-1184).
cggaatgggtcaaggtttt

SEQ ID NO: 592983 - DNA, 19 bp, Mus musculus
  siRNA target sequence for Gbe1 (NM_028803.2,1167-1185).
ggaatgggtcaaggttttt

SEQ ID NO: 592984 - DNA, 19 bp, Mus musculus
  siRNA target sequence for Gbe1 (NM_028803.2,1179-1197).
ggtttttcgggtgactata

SEQ ID NO: 592985 - DNA, 19 bp, Mus musculus
  siRNA target sequence for Gbe1 (NM_028803.2,1180-1198).
gtttttcgggtgactataa

SEQ ID NO: 592986 - DNA, 19 bp, Mus musculus
  siRNA target sequence for Gbe1 (NM_028803.2,1186-1204).
cgggtgactataatgaata

SEQ ID NO: 592987 - DNA, 19 bp, Mus musculus
  siRNA target sequence for Gbe1 (NM_028803.2,1221-1239).
gatgaagatgctttgattt

SEQ ID NO: 592988 - DNA, 19 bp, Mus musculus
  siRNA target sequence for Gbe1 (NM_028803.2,1242-1260).
ctcatgttggcaaatcatt

SEQ ID NO: 592989 - DNA, 19 bp, Mus musculus
  siRNA target sequence for Gbe1 (NM_028803.2,1274-1292).
gtacccagactcgataaca

SEQ ID NO: 592990 - DNA, 19 bp, Mus musculus
  siRNA target sequence for Gbe1 (NM_028803.2,1277-1295).
cccagactcgataacaata

SEQ ID NO: 592991 - DNA, 19 bp, Mus musculus
  siRNA target sequence for Gbe1 (NM_028803.2,1340-1358).
ccagggaggcggtggtttt

SEQ ID NO: 592992 - DNA, 19 bp, Mus musculus
  siRNA target sequence for Gbe1 (NM_028803.2,1344-1362).
ggaggcggtggttttgact

SEQ ID NO: 592993 - DNA, 19 bp, Mus musculus
  siRNA target sequence for Gbe1 (NM_028803.2,1345-1363).
gaggcggtggttttgacta

SEQ ID NO: 592994 - DNA, 19 bp, Mus musculus
  siRNA target sequence for Gbe1 (NM_028803.2,1350-1368).
ggtggttttgactacagat

SEQ ID NO: 592995 - DNA, 19 bp, Mus musculus
  siRNA target sequence for Gbe1 (NM_028803.2,1372-1390).
caatggctattccagataa

SEQ ID NO: 592996 - DNA, 19 bp, Mus musculus
  siRNA target sequence for Gbe1 (NM_028803.2,1378-1396).
ctattccagataaatggat

SEQ ID NO: 592997 - DNA, 19 bp, Mus musculus
  siRNA target sequence for Gbe1 (NM_028803.2,1393-1411).
ggatccaattacttaagga

SEQ ID NO: 592998 - DNA, 19 bp, Mus musculus
  siRNA target sequence for Gbe1 (NM_028803.2,1436-1454).
gggcaatatagtgtatact

SEQ ID NO: 592999 - DNA, 19 bp, Mus musculus
  siRNA target sequence for Gbe1 (NM_028803.2,1438-1456).
gcaatatagtgtatactct

SEQ ID NO: 593000 - DNA, 19 bp, Mus musculus
  siRNA target sequence for Gbe1 (NM_028803.2,1464-1482).
cgacgctaccttgaaaaat

SEQ ID NO: 593001 - DNA, 19 bp, Mus musculus
  siRNA target sequence for Gbe1 (NM_028803.2,1557-1575).
gagatgtacacgaacatga

SEQ ID NO: 593002 - DNA, 19 bp, Mus musculus
  siRNA target sequence for Gbe1 (NM_028803.2,1577-1595).
cgttctggcccctttcact

SEQ ID NO: 593003 - DNA, 19 bp, Mus musculus
  siRNA target sequence for Gbe1 (NM_028803.2,1588-1606).
ctttcactccagtaattga

SEQ ID NO: 593004 - DNA, 19 bp, Mus musculus
  siRNA target sequence for Gbe1 (NM_028803.2,1609-1627).
gaggaatacagcttcataa

SEQ ID NO: 593005 - DNA, 19 bp, Mus musculus
  siRNA target sequence for Gbe1 (NM_028803.2,1611-1629).
ggaatacagcttcataaga

SEQ ID NO: 593006 - DNA, 19 bp, Mus musculus
  siRNA target sequence for Gbe1 (NM_028803.2,1754-1772).
cagaaggcagtttaattta

SEQ ID NO: 593007 - DNA, 19 bp, Mus musculus
  siRNA target sequence for Gbe1 (NM_028803.2,1782-1800).
gaccttcttcgctataagt

SEQ ID NO: 593008 - DNA, 19 bp, Mus musculus
  siRNA target sequence for Gbe1 (NM_028803.2,1791-1809).
cgctataagttcctaaata

SEQ ID NO: 593009 - DNA, 19 bp, Mus musculus
  siRNA target sequence for Gbe1 (NM_028803.2,1866-1884).
caggcctacgtgagtgaaa

SEQ ID NO: 593010 - DNA, 19 bp, Mus musculus
  siRNA target sequence for Gbe1 (NM_028803.2,1868-1886).
ggcctacgtgagtgaaaaa

SEQ ID NO: 593011 - DNA, 19 bp, Mus musculus
  siRNA target sequence for Gbe1 (NM_028803.2,1870-1888).
cctacgtgagtgaaaaaca

SEQ ID NO: 593012 - DNA, 19 bp, Mus musculus
  siRNA target sequence for Gbe1 (NM_028803.2,1871-1889).
ctacgtgagtgaaaaacat

SEQ ID NO: 593013 - DNA, 19 bp, Mus musculus
  siRNA target sequence for Gbe1 (NM_028803.2,1890-1908).
gaagccaataagacaatca

SEQ ID NO: 593014 - DNA, 19 bp, Mus musculus
  siRNA target sequence for Gbe1 (NM_028803.2,1986-2004).
gcaacaccagggaagttca

SEQ ID NO: 593015 - DNA, 19 bp, Mus musculus
  siRNA target sequence for Gbe1 (NM_028803.2,2000-2018).
gttcaaaattgtactagat

SEQ ID NO: 593016 - DNA, 19 bp, Mus musculus
  siRNA target sequence for Gbe1 (NM_028803.2,2072-2090).
ctttgctgaggcttttgaa

SEQ ID NO: 593017 - DNA, 19 bp, Mus musculus
  siRNA target sequence for Slc3a1 (NM_009205.1,90-108).
gaagggatgccgaaccaat

SEQ ID NO: 593018 - DNA, 19 bp, Mus musculus
  siRNA target sequence for Slc3a1 (NM_009205.1,363-381).
catcgtcatctctccaaaa

SEQ ID NO: 593019 - DNA, 19 bp, Mus musculus
  siRNA target sequence for Slc3a1 (NM_009205.1,395-413).
ggcaagcaggtcccatata

SEQ ID NO: 593020 - DNA, 19 bp, Mus musculus
  siRNA target sequence for Slc3a1 (NM_009205.1,417-435).
gatctacccgaggtctttt

SEQ ID NO: 593021 - DNA, 19 bp, Mus musculus
  siRNA target sequence for Slc3a1 (NM_009205.1,637-655).
gccatccatgacaaaggtt

SEQ ID NO: 593022 - DNA, 19 bp, Mus musculus
  siRNA target sequence for Slc3a1 (NM_009205.1,722-740).
ggacacggagcggaaaata

SEQ ID NO: 593023 - DNA, 19 bp, Mus musculus
  siRNA target sequence for Slc3a1 (NM_009205.1,733-751).
ggaaaatacaccgattact

SEQ ID NO: 593024 - DNA, 19 bp, Mus musculus
  siRNA target sequence for Slc3a1 (NM_009205.1,734-752).
gaaaatacaccgattacta

SEQ ID NO: 593025 - DNA, 19 bp, Mus musculus
  siRNA target sequence for Slc3a1 (NM_009205.1,831-849).
ctggcactttgatgaagta

SEQ ID NO: 593026 - DNA, 19 bp, Mus musculus
  siRNA target sequence for Slc3a1 (NM_009205.1,903-921).
ccgaaatcctgctgttcaa

SEQ ID NO: 593027 - DNA, 19 bp, Mus musculus
  siRNA target sequence for Slc3a1 (NM_009205.1,951-969).
gctctcgaagggtgttgat

SEQ ID NO: 593028 - DNA, 19 bp, Mus musculus
  siRNA target sequence for Slc3a1 (NM_009205.1,960-978).
gggtgttgatgggtttagt

SEQ ID NO: 593029 - DNA, 19 bp, Mus musculus
  siRNA target sequence for Slc3a1 (NM_009205.1,961-979).
ggtgttgatgggtttagtt

SEQ ID NO: 593030 - DNA, 19 bp, Mus musculus
  siRNA target sequence for Slc3a1 (NM_009205.1,1255-1273).
gccgactttcctttcaaca

SEQ ID NO: 593031 - DNA, 19 bp, Mus musculus
  siRNA target sequence for Slc3a1 (NM_009205.1,1256-1274).
ccgactttcctttcaacaa

SEQ ID NO: 593032 - DNA, 19 bp, Mus musculus
  siRNA target sequence for Slc3a1 (NM_009205.1,1264-1282).
cctttcaacaagtacttca

SEQ ID NO: 593033 - DNA, 19 bp, Mus musculus
  siRNA target sequence for Slc3a1 (NM_009205.1,1272-1290).
caagtacttcaccacaata

SEQ ID NO: 593034 - DNA, 19 bp, Mus musculus
  siRNA target sequence for Slc3a1 (NM_009205.1,1299-1317).
ctctgggcatactgtctat

SEQ ID NO: 593035 - DNA, 19 bp, Mus musculus
  siRNA target sequence for Slc3a1 (NM_009205.1,1305-1323).
gcatactgtctatgaagtt

SEQ ID NO: 593036 - DNA, 19 bp, Mus musculus
  siRNA target sequence for Slc3a1 (NM_009205.1,1409-1427).
gagtagggagtgagtatgt

SEQ ID NO: 593037 - DNA, 19 bp, Mus musculus
  siRNA target sequence for Slc3a1 (NM_009205.1,1411-1429).
gtagggagtgagtatgtca

SEQ ID NO: 593038 - DNA, 19 bp, Mus musculus
  siRNA target sequence for Slc3a1 (NM_009205.1,1459-1477).
ccgggaacgcccatcactt

SEQ ID NO: 593039 - DNA, 19 bp, Mus musculus
  siRNA target sequence for Slc3a1 (NM_009205.1,1460-1478).
cgggaacgcccatcactta

SEQ ID NO: 593040 - DNA, 19 bp, Mus musculus
  siRNA target sequence for Slc3a1 (NM_009205.1,1462-1480).
ggaacgcccatcacttact

SEQ ID NO: 593041 - DNA, 19 bp, Mus musculus
  siRNA target sequence for Slc3a1 (NM_009205.1,1475-1493).
cttactatggagaggaaat

SEQ ID NO: 593042 - DNA, 19 bp, Mus musculus
  siRNA target sequence for Slc3a1 (NM_009205.1,1501-1519).
ggagacatttccgttacaa

SEQ ID NO: 593043 - DNA, 19 bp, Mus musculus
  siRNA target sequence for Slc3a1 (NM_009205.1,1502-1520).
gagacatttccgttacaaa

SEQ ID NO: 593044 - DNA, 19 bp, Mus musculus
  siRNA target sequence for Slc3a1 (NM_009205.1,1527-1545).
cgagagctatgatagtact

SEQ ID NO: 593045 - DNA, 19 bp, Mus musculus
  siRNA target sequence for Slc3a1 (NM_009205.1,1528-1546).
gagagctatgatagtacta

SEQ ID NO: 593046 - DNA, 19 bp, Mus musculus
  siRNA target sequence for Slc3a1 (NM_009205.1,1564-1582).
ccgatgcagtgggacaata

SEQ ID NO: 593047 - DNA, 19 bp, Mus musculus
  siRNA target sequence for Slc3a1 (NM_009205.1,1572-1590).
gtgggacaatagttccaat

SEQ ID NO: 593048 - DNA, 19 bp, Mus musculus
  siRNA target sequence for Slc3a1 (NM_009205.1,1586-1604).
ccaatgctgggtttactga

SEQ ID NO: 593049 - DNA, 19 bp, Mus musculus
  siRNA target sequence for Slc3a1 (NM_009205.1,1774-1792).
cactctgtggtgtacacaa

SEQ ID NO: 593050 - DNA, 19 bp, Mus musculus
  siRNA target sequence for Slc3a1 (NM_009205.1,1824-1842).
cgtggttctgaattttgga

SEQ ID NO: 593051 - DNA, 19 bp, Mus musculus
  siRNA target sequence for Slc3a1 (NM_009205.1,2031-2049).
cagagacagatgctttgtt

SEQ ID NO: 593052 - DNA, 19 bp, Mus musculus
  siRNA target sequence for Slc3a1 (NM_009205.1,2077-2095).
ctggacatcctctatagct

SEQ ID NO: 593053 - DNA, 19 bp, Mus musculus
  siRNA target sequence for Neu1 (NM_010893.2,456-474).
ggatagtgttccttatcta

SEQ ID NO: 593054 - DNA, 19 bp, Mus musculus
  siRNA target sequence for Neu1 (NM_010893.2,457-475).
gatagtgttccttatctat

SEQ ID NO: 593055 - DNA, 19 bp, Mus musculus
  siRNA target sequence for Neu1 (NM_010893.2,771-789).
ccaaacacgatcacgattt

SEQ ID NO: 593056 - DNA, 19 bp, Mus musculus
  siRNA target sequence for Neu1 (NM_010893.2,1170-1188).
cgcagctgttcgttctgta

SEQ ID NO: 593057 - DNA, 19 bp, Mus musculus
  siRNA target sequence for Neu2 (NM_015750.1,127-145).
ggcgtccatgcttacagaa

SEQ ID NO: 593058 - DNA, 19 bp, Mus musculus
  siRNA target sequence for Neu2 (NM_015750.1,128-146).
gcgtccatgcttacagaat

SEQ ID NO: 593059 - DNA, 19 bp, Mus musculus
  siRNA target sequence for Neu2 (NM_015750.1,396-414).
ccctgggcgtgtatcagaa

SEQ ID NO: 593060 - DNA, 19 bp, Mus musculus
  siRNA target sequence for Neu2 (NM_015750.1,401-419).
ggcgtgtatcagaacatca

SEQ ID NO: 593061 - DNA, 19 bp, Mus musculus
  siRNA target sequence for Neu2 (NM_015750.1,402-420).
gcgtgtatcagaacatcat

SEQ ID NO: 593062 - DNA, 19 bp, Mus musculus
  siRNA target sequence for Neu2 (NM_015750.1,427-445).
cacactaaggttaatgtca

SEQ ID NO: 593063 - DNA, 19 bp, Mus musculus
  siRNA target sequence for Neu2 (NM_015750.1,764-782).
ctcagaggatggtatatct

SEQ ID NO: 593064 - DNA, 19 bp, Mus musculus
  siRNA target sequence for Neu2 (NM_015750.1,768-786).
gaggatggtatatctcaat

SEQ ID NO: 593065 - DNA, 19 bp, Mus musculus
  siRNA target sequence for Neu2 (NM_015750.1,813-831).
ccaggcacaaagtcctaat

SEQ ID NO: 593066 - DNA, 19 bp, Mus musculus
  siRNA target sequence for Neu2 (NM_015750.1,855-873).
ccgggtagtgagtaagctt

SEQ ID NO: 593067 - DNA, 19 bp, Mus musculus
  siRNA target sequence for Neu2 (NM_015750.1,948-966).
cacatggcttctttataca

SEQ ID NO: 593068 - DNA, 19 bp, Mus musculus
  siRNA target sequence for Neu2 (NM_015750.1,1076-1094).
cctactcagacttacagaa

SEQ ID NO: 593069 - DNA, 19 bp, Mus musculus
  siRNA target sequence for Neu3 (NM_016720.1,557-575).
gccgtgtgtacctgttttt

SEQ ID NO: 593070 - DNA, 19 bp, Mus musculus
  siRNA target sequence for Neu3 (NM_016720.1,612-630).
gattgtgtggggcaaaaat

SEQ ID NO: 593071 - DNA, 19 bp, Mus musculus
  siRNA target sequence for Neu3 (NM_016720.1,672-690).
ctcttggggtgaagtgaaa

SEQ ID NO: 593072 - DNA, 19 bp, Mus musculus
  siRNA target sequence for Neu3 (NM_016720.1,677-695).
ggggtgaagtgaaagactt

SEQ ID NO: 593073 - DNA, 19 bp, Mus musculus
  siRNA target sequence for Neu3 (NM_016720.1,807-825).
ctatgtctcacgttggttt

SEQ ID NO: 593074 - DNA, 19 bp, Mus musculus
  siRNA target sequence for Neu3 (NM_016720.1,811-829).
gtctcacgttggtttctct

SEQ ID NO: 593075 - DNA, 19 bp, Mus musculus
  siRNA target sequence for Neu3 (NM_016720.1,851-869).
cccattccctgatgatcta

SEQ ID NO: 593076 - DNA, 19 bp, Mus musculus
  siRNA target sequence for Neu3 (NM_016720.1,894-912).
gcaccatggcaagttcatt

SEQ ID NO: 593077 - DNA, 19 bp, Mus musculus
  siRNA target sequence for Neu3 (NM_016720.1,1009-1027).
cgagcagaggcttttagta

SEQ ID NO: 593078 - DNA, 19 bp, Mus musculus
  siRNA target sequence for Neu3 (NM_016720.1,1017-1035).
ggcttttagtactgatagt

SEQ ID NO: 593079 - DNA, 19 bp, Mus musculus
  siRNA target sequence for Neu3 (NM_016720.1,1089-1107).
cggctgccaaggtagtgta

SEQ ID NO: 593080 - DNA, 19 bp, Mus musculus
  siRNA target sequence for Neu3 (NM_016720.1,1235-1253).
cagcaacatggctcttgta

SEQ ID NO: 593081 - DNA, 19 bp, Mus musculus
  siRNA target sequence for Neu3 (NM_016720.1,1237-1255).
gcaacatggctcttgtact

SEQ ID NO: 593082 - DNA, 19 bp, Mus musculus
  siRNA target sequence for Neu3 (NM_016720.1,1401-1419).
cttggtggcgtgtttgttt

SEQ ID NO: 593083 - DNA, 19 bp, Mus musculus
  siRNA target sequence for Neu3 (NM_016720.1,1449-1467).
gattgacttctgtctgttt

SEQ ID NO: 593084 - DNA, 19 bp, Mus musculus
  siRNA target sequence for Gaa (NM_008064.2,266-284).
ggcctgcacccttatctct

SEQ ID NO: 593085 - DNA, 19 bp, Mus musculus
  siRNA target sequence for Gaa (NM_008064.2,312-330).
ctcatgcttcgggagttaa

SEQ ID NO: 593086 - DNA, 19 bp, Mus musculus
  siRNA target sequence for Gaa (NM_008064.2,388-406).
ctcaccaccaggaaggtta

SEQ ID NO: 593087 - DNA, 19 bp, Mus musculus
  siRNA target sequence for Gaa (NM_008064.2,480-498).
cccagcagccgctttgact

SEQ ID NO: 593088 - DNA, 19 bp, Mus musculus
  siRNA target sequence for Gaa (NM_008064.2,592-610).
ggcagccctggtgtttctt

SEQ ID NO: 593089 - DNA, 19 bp, Mus musculus
  siRNA target sequence for Gaa (NM_008064.2,625-643).
caagctaccgtctagagaa

SEQ ID NO: 593090 - DNA, 19 bp, Mus musculus
  siRNA target sequence for Gaa (NM_008064.2,834-852).
gcaccatccccactttaca

SEQ ID NO: 593091 - DNA, 19 bp, Mus musculus
  siRNA target sequence for Gaa (NM_008064.2,844-862).
cactttacagcgtggaatt

SEQ ID NO: 593092 - DNA, 19 bp, Mus musculus
  siRNA target sequence for Gaa (NM_008064.2,846-864).
ctttacagcgtggaattct

SEQ ID NO: 593093 - DNA, 19 bp, Mus musculus
  siRNA target sequence for Gaa (NM_008064.2,1146-1164).
cacggtgtcttcttgctaa

SEQ ID NO: 593094 - DNA, 19 bp, Mus musculus
  siRNA target sequence for Gaa (NM_008064.2,1270-1288).
gcgttgtgcaacaatacct

SEQ ID NO: 593095 - DNA, 19 bp, Mus musculus
  siRNA target sequence for Gaa (NM_008064.2,1647-1665).
ccgctgattgggaaggttt

SEQ ID NO: 593096 - DNA, 19 bp, Mus musculus
  siRNA target sequence for Gaa (NM_008064.2,1765-1783).
gcatgtggctcgacatgaa

SEQ ID NO: 593097 - DNA, 19 bp, Mus musculus
  siRNA target sequence for Gaa (NM_008064.2,1785-1803).
gaaccgtccaacttcgtta

SEQ ID NO: 593098 - DNA, 19 bp, Mus musculus
  siRNA target sequence for Gaa (NM_008064.2,1817-1835).
gggctgccccaacaatgaa

SEQ ID NO: 593099 - DNA, 19 bp, Mus musculus
  siRNA target sequence for Gaa (NM_008064.2,1819-1837).
gctgccccaacaatgaact

SEQ ID NO: 593100 - DNA, 19 bp, Mus musculus
  siRNA target sequence for Gaa (NM_008064.2,1897-1915).
gtgcctccagccaccaatt

SEQ ID NO: 593101 - DNA, 19 bp, Mus musculus
  siRNA target sequence for Gaa (NM_008064.2,1998-2016).
ggaacacgaccctttgtga

SEQ ID NO: 593102 - DNA, 19 bp, Mus musculus
  siRNA target sequence for Gaa (NM_008064.2,1999-2017).
gaacacgaccctttgtgat

SEQ ID NO: 593103 - DNA, 19 bp, Mus musculus
  siRNA target sequence for Gaa (NM_008064.2,2083-2101).
cttgggagcatcttgcata

SEQ ID NO: 593104 - DNA, 19 bp, Mus musculus
  siRNA target sequence for Gaa (NM_008064.2,2156-2174).
ggacatctgcggcttcata

SEQ ID NO: 593105 - DNA, 19 bp, Mus musculus
  siRNA target sequence for Gaa (NM_008064.2,2489-2507).
gcttgagcctgggaaaact

SEQ ID NO: 593106 - DNA, 19 bp, Mus musculus
  siRNA target sequence for Gaa (NM_008064.2,2679-2697).
ctgagggaggggtacatca

SEQ ID NO: 593107 - DNA, 19 bp, Mus musculus
  siRNA target sequence for Gaa (NM_008064.2,2681-2699).
gagggaggggtacatcata

SEQ ID NO: 593108 - DNA, 19 bp, Mus musculus
  siRNA target sequence for Gaa (NM_008064.2,2863-2881).
cagccaagaacaataccat

SEQ ID NO: 593109 - DNA, 19 bp, Mus musculus
  siRNA target sequence for Gaa (NM_008064.2,2986-3004).
gcatccctgtctccaattt

SEQ ID NO: 593110 - DNA, 19 bp, Mus musculus
  siRNA target sequence for Gaa (NM_008064.2,3007-3025).
cctacagccctgacaacaa

SEQ ID NO: 593111 - DNA, 19 bp, Mus musculus
  siRNA target sequence for Gcs1 (NM_020619.2,376-394).
gtctatttcggcatgaaga

SEQ ID NO: 593112 - DNA, 19 bp, Mus musculus
  siRNA target sequence for Gcs1 (NM_020619.2,536-554).
ccttcggtcggcagcatat

SEQ ID NO: 593113 - DNA, 19 bp, Mus musculus
  siRNA target sequence for Gcs1 (NM_020619.2,737-755).
gagccaaaggacagttgaa

SEQ ID NO: 593114 - DNA, 19 bp, Mus musculus
  siRNA target sequence for Gcs1 (NM_020619.2,901-919).
gtaaagagccgcctaaaca

SEQ ID NO: 593115 - DNA, 19 bp, Mus musculus
  siRNA target sequence for Gcs1 (NM_020619.2,1007-1025).
gtgggcaagggcaattctt

SEQ ID NO: 593116 - DNA, 19 bp, Mus musculus
  siRNA target sequence for Gcs1 (NM_020619.2,1009-1027).
gggcaagggcaattcttga

SEQ ID NO: 593117 - DNA, 19 bp, Mus musculus
  siRNA target sequence for Gcs1 (NM_020619.2,1264-1282).
ggtgggattggttacttct

SEQ ID NO: 593118 - DNA, 19 bp, Mus musculus
  siRNA target sequence for Gcs1 (NM_020619.2,1265-1283).
gtgggattggttacttcta

SEQ ID NO: 593119 - DNA, 19 bp, Mus musculus
  siRNA target sequence for Gcs1 (NM_020619.2,1318-1336).
gaagggtctgaacagaaaa

SEQ ID NO: 593120 - DNA, 19 bp, Mus musculus
  siRNA target sequence for Gcs1 (NM_020619.2,1322-1340).
ggtctgaacagaaaatgga

SEQ ID NO: 593121 - DNA, 19 bp, Mus musculus
  siRNA target sequence for Gcs1 (NM_020619.2,1378-1396).
gtgccttctaggtcattct

SEQ ID NO: 593122 - DNA, 19 bp, Mus musculus
  siRNA target sequence for Gcs1 (NM_020619.2,1556-1574).
gagtgcccccagaattcct

SEQ ID NO: 593123 - DNA, 19 bp, Mus musculus
  siRNA target sequence for Gcs1 (NM_020619.2,1639-1657).
ggccatgaccctgatgatt

SEQ ID NO: 593124 - DNA, 19 bp, Mus musculus
  siRNA target sequence for Gcs1 (NM_020619.2,1727-1745).
ggccagtgccactatccta

SEQ ID NO: 593125 - DNA, 19 bp, Mus musculus
  siRNA target sequence for Gcs1 (NM_020619.2,1768-1786).
gctttgcctaccctactta

SEQ ID NO: 593126 - DNA, 19 bp, Mus musculus
  siRNA target sequence for Gcs1 (NM_020619.2,1769-1787).
ctttgcctaccctacttaa

SEQ ID NO: 593127 - DNA, 19 bp, Mus musculus
  siRNA target sequence for Gcs1 (NM_020619.2,1956-1974).
ggctgcctctctagaagaa

SEQ ID NO: 593128 - DNA, 19 bp, Mus musculus
  siRNA target sequence for Gcs1 (NM_020619.2,2028-2046).
ctttgggaaccacacaaaa

SEQ ID NO: 593129 - DNA, 19 bp, Mus musculus
  siRNA target sequence for Gcs1 (NM_020619.2,2101-2119).
cctccacctcgattacagt

SEQ ID NO: 593130 - DNA, 19 bp, Mus musculus
  siRNA target sequence for Gcs1 (NM_020619.2,2102-2120).
ctccacctcgattacagta

SEQ ID NO: 593131 - DNA, 19 bp, Mus musculus
  siRNA target sequence for Gcs1 (NM_020619.2,2105-2123).
cacctcgattacagtatgt

SEQ ID NO: 593132 - DNA, 19 bp, Mus musculus
  siRNA target sequence for Gcs1 (NM_020619.2,2267-2285).
ctagcctcttttataaaca

SEQ ID NO: 593133 - DNA, 19 bp, Mus musculus
  siRNA target sequence for Gcs1 (NM_020619.2,2320-2338).
ggtgccgtgtggctgaata

SEQ ID NO: 593134 - DNA, 19 bp, Mus musculus
  siRNA target sequence for Gcs1 (NM_020619.2,2351-2369).
ctttgggggcactacatca

SEQ ID NO: 593135 - DNA, 19 bp, Mus musculus
  siRNA target sequence for Gcs1 (NM_020619.2,2355-2373).
gggggcactacatcactat

SEQ ID NO: 593136 - DNA, 19 bp, Mus musculus
  siRNA target sequence for Gcs1 (NM_020619.2,2444-2462).
gaaacgtccgccagcaata

SEQ ID NO: 593137 - DNA, 19 bp, Mus musculus
  siRNA target sequence for Gcs1 (NM_020619.2,2464-2482).
caggctaccggatttctgt

SEQ ID NO: 593138 - DNA, 19 bp, Mus musculus
  siRNA target sequence for Gcs1 (NM_020619.2,2537-2555).
gatggaccagtcttgtctt

SEQ ID NO: 593139 - DNA, 19 bp, Mus musculus
  siRNA target sequence for Gcs1 (NM_020619.2,2540-2558).
ggaccagtcttgtcttact

SEQ ID NO: 593140 - DNA, 19 bp, Mus musculus
  siRNA target sequence for BC038479 (NM_153803.1,120-138).
gtgctccgcaggtatctga

SEQ ID NO: 593141 - DNA, 19 bp, Mus musculus
  siRNA target sequence for BC038479 (NM_153803.1,122-140).
gctccgcaggtatctgaat

SEQ ID NO: 593142 - DNA, 19 bp, Mus musculus
  siRNA target sequence for BC038479 (NM_153803.1,202-220).
ccctatggctccaacatca

SEQ ID NO: 593143 - DNA, 19 bp, Mus musculus
  siRNA target sequence for BC038479 (NM_153803.1,238-256).
caaaaggcccagacttcat

SEQ ID NO: 593144 - DNA, 19 bp, Mus musculus
  siRNA target sequence for BC038479 (NM_153803.1,278-296).
gattctggggggatccata

SEQ ID NO: 593145 - DNA, 19 bp, Mus musculus
  siRNA target sequence for BC038479 (NM_153803.1,284-302).
ggggggatccatacactat

SEQ ID NO: 593146 - DNA, 19 bp, Mus musculus
  siRNA target sequence for BC038479 (NM_153803.1,285-303).
gggggatccatacactatt

SEQ ID NO: 593147 - DNA, 19 bp, Mus musculus
  siRNA target sequence for BC038479 (NM_153803.1,286-304).
ggggatccatacactattt

SEQ ID NO: 593148 - DNA, 19 bp, Mus musculus
  siRNA target sequence for BC038479 (NM_153803.1,306-324).
cgtgtacccagggaatact

SEQ ID NO: 593149 - DNA, 19 bp, Mus musculus
  siRNA target sequence for BC038479 (NM_153803.1,330-348).
gaccgcctgctcaaattga

SEQ ID NO: 593150 - DNA, 19 bp, Mus musculus
  siRNA target sequence for BC038479 (NM_153803.1,332-350).
ccgcctgctcaaattgaaa

SEQ ID NO: 593151 - DNA, 19 bp, Mus musculus
  siRNA target sequence for BC038479 (NM_153803.1,403-421).
cagaaagaggcaaattcga

SEQ ID NO: 593152 - DNA, 19 bp, Mus musculus
  siRNA target sequence for BC038479 (NM_153803.1,636-654).
gtggtgccacttcagtata

SEQ ID NO: 593153 - DNA, 19 bp, Mus musculus
  siRNA target sequence for BC038479 (NM_153803.1,641-659).
gccacttcagtataagcat

SEQ ID NO: 593154 - DNA, 19 bp, Mus musculus
  siRNA target sequence for BC038479 (NM_153803.1,718-736).
gtgcatacatgccttacat

SEQ ID NO: 593155 - DNA, 19 bp, Mus musculus
  siRNA target sequence for BC038479 (NM_153803.1,720-738).
gcatacatgccttacatca

SEQ ID NO: 593156 - DNA, 19 bp, Mus musculus
  siRNA target sequence for BC038479 (NM_153803.1,721-739).
catacatgccttacatcaa

SEQ ID NO: 593157 - DNA, 19 bp, Mus musculus
  siRNA target sequence for BC038479 (NM_153803.1,779-797).
gacctcggacaacaaagat

SEQ ID NO: 593158 - DNA, 19 bp, Mus musculus
  siRNA target sequence for BC038479 (NM_153803.1,827-845).
gctggccaccatcaactta

SEQ ID NO: 593159 - DNA, 19 bp, Mus musculus
  siRNA target sequence for BC038479 (NM_153803.1,831-849).
gccaccatcaacttacagt

SEQ ID NO: 593160 - DNA, 19 bp, Mus musculus
  siRNA target sequence for BC038479 (NM_153803.1,860-878).
gctgatggcactaaacact

SEQ ID NO: 593161 - DNA, 19 bp, Mus musculus
  siRNA target sequence for BC038479 (NM_153803.1,877-895).
ctgttctcttatctataca

SEQ ID NO: 593162 - DNA, 19 bp, Mus musculus
  siRNA target sequence for BC038479 (NM_153803.1,1043-1061).
ccatggaggcacaaatttt

SEQ ID NO: 593163 - DNA, 19 bp, Mus musculus
  siRNA target sequence for BC038479 (NM_153803.1,1104-1122).
gatgttaccagctatgact

SEQ ID NO: 593164 - DNA, 19 bp, Mus musculus
  siRNA target sequence for BC038479 (NM_153803.1,1119-1137).
gactatgatgctatactga

SEQ ID NO: 593165 - DNA, 19 bp, Mus musculus
  siRNA target sequence for BC038479 (NM_153803.1,1147-1165).
gagactacactgccaaata

SEQ ID NO: 593166 - DNA, 19 bp, Mus musculus
  siRNA target sequence for BC038479 (NM_153803.1,1168-1186).
ccaagcttcgagaactctt

SEQ ID NO: 593167 - DNA, 19 bp, Mus musculus
  siRNA target sequence for BC038479 (NM_153803.1,1241-1259).
ggtctatgagccaatgagt

SEQ ID NO: 593168 - DNA, 19 bp, Mus musculus
  siRNA target sequence for BC038479 (NM_153803.1,1287-1305).
gctatccagtacatggata

SEQ ID NO: 593169 - DNA, 19 bp, Mus musculus
  siRNA target sequence for BC038479 (NM_153803.1,1344-1362).
ctgccagtaaacaatggta

SEQ ID NO: 593170 - DNA, 19 bp, Mus musculus
  siRNA target sequence for BC038479 (NM_153803.1,1372-1390).
cctttgggtatgttctgta

SEQ ID NO: 593171 - DNA, 19 bp, Mus musculus
  siRNA target sequence for BC038479 (NM_153803.1,1377-1395).
gggtatgttctgtatgaga

SEQ ID NO: 593172 - DNA, 19 bp, Mus musculus
  siRNA target sequence for BC038479 (NM_153803.1,1386-1404).
ctgtatgagaccactatct

SEQ ID NO: 593173 - DNA, 19 bp, Mus musculus
  siRNA target sequence for BC038479 (NM_153803.1,1388-1406).
gtatgagaccactatcttt

SEQ ID NO: 593174 - DNA, 19 bp, Mus musculus
  siRNA target sequence for BC038479 (NM_153803.1,1392-1410).
gagaccactatcttttcat

SEQ ID NO: 593175 - DNA, 19 bp, Mus musculus
  siRNA target sequence for BC038479 (NM_153803.1,1473-1491).
ggattcctggactataaaa

SEQ ID NO: 593176 - DNA, 19 bp, Mus musculus
  siRNA target sequence for BC038479 (NM_153803.1,1482-1500).
gactataaaacaacaaaga

SEQ ID NO: 593177 - DNA, 19 bp, Mus musculus
  siRNA target sequence for BC038479 (NM_153803.1,1557-1575).
gggcgagtcaactatggaa

SEQ ID NO: 593178 - DNA, 19 bp, Mus musculus
  siRNA target sequence for BC038479 (NM_153803.1,1558-1576).
ggcgagtcaactatggaaa

SEQ ID NO: 593179 - DNA, 19 bp, Mus musculus
  siRNA target sequence for BC038479 (NM_153803.1,1559-1577).
gcgagtcaactatggaaat

SEQ ID NO: 593180 - DNA, 19 bp, Mus musculus
  siRNA target sequence for BC038479 (NM_153803.1,1560-1578).
cgagtcaactatggaaata

SEQ ID NO: 593181 - DNA, 19 bp, Mus musculus
  siRNA target sequence for BC038479 (NM_153803.1,1561-1579).
gagtcaactatggaaataa

SEQ ID NO: 593182 - DNA, 19 bp, Mus musculus
  siRNA target sequence for BC038479 (NM_153803.1,1586-1604).
cagtcagcgcaaaggttta

SEQ ID NO: 593183 - DNA, 19 bp, Mus musculus
  siRNA target sequence for BC038479 (NM_153803.1,1588-1606).
gtcagcgcaaaggtttaat

SEQ ID NO: 593184 - DNA, 19 bp, Mus musculus
  siRNA target sequence for BC038479 (NM_153803.1,1592-1610).
gcgcaaaggtttaattgga

SEQ ID NO: 593185 - DNA, 19 bp, Mus musculus
  siRNA target sequence for BC038479 (NM_153803.1,1593-1611).
cgcaaaggtttaattggaa

SEQ ID NO: 593186 - DNA, 19 bp, Mus musculus
  siRNA target sequence for BC038479 (NM_153803.1,1594-1612).
gcaaaggtttaattggaaa

SEQ ID NO: 593187 - DNA, 19 bp, Mus musculus
  siRNA target sequence for BC038479 (NM_153803.1,1600-1618).
gtttaattggaaatctcta

SEQ ID NO: 593188 - DNA, 19 bp, Mus musculus
  siRNA target sequence for BC038479 (NM_153803.1,1697-1715).
ggacaactggagtgtcata

SEQ ID NO: 593189 - DNA, 19 bp, Mus musculus
  siRNA target sequence for BC038479 (NM_153803.1,1706-1724).
gagtgtcatacccaaagaa

SEQ ID NO: 593190 - DNA, 19 bp, Mus musculus
  siRNA target sequence for BC038479 (NM_153803.1,1753-1771).
ccttgtcagttggcattta

SEQ ID NO: 593191 - DNA, 19 bp, Mus musculus
  siRNA target sequence for BC038479 (NM_153803.1,1808-1826).
gaagggggttgtattcgtt

SEQ ID NO: 593192 - DNA, 19 bp, Mus musculus
  siRNA target sequence for BC038479 (NM_153803.1,1811-1829).
gggggttgtattcgttaat

SEQ ID NO: 593193 - DNA, 19 bp, Mus musculus
  siRNA target sequence for BC038479 (NM_153803.1,1890-1908).
gtctggctggacaaaggaa

SEQ ID NO: 593194 - DNA, 19 bp, Mus musculus
  siRNA target sequence for BC038479 (NM_153803.1,1894-1912).
ggctggacaaaggaatcaa

SEQ ID NO: 593195 - DNA, 19 bp, Mus musculus
  siRNA target sequence for BC038479 (NM_153803.1,1905-1923).
ggaatcaacaaggttatca

SEQ ID NO: 593196 - DNA, 19 bp, Mus musculus
  siRNA target sequence for BC038479 (NM_153803.1,1910-1928).
caacaaggttatcattttt

SEQ ID NO: 593197 - DNA, 19 bp, Mus musculus
  siRNA target sequence for BC038479 (NM_153803.1,1949-1967).
catggtccagtctactgat

SEQ ID NO: 593198 - DNA, 19 bp, Mus musculus
  siRNA target sequence for BC038479 (NM_153803.1,1979-1997).
gggcaggaaccagtacatt

SEQ ID NO: 593199 - DNA, 19 bp, Mus musculus
  siRNA target sequence for Glb1 (NM_009752.1,133-151).
cgctgcgcacggcatctat

SEQ ID NO: 593200 - DNA, 19 bp, Mus musculus
  siRNA target sequence for Glb1 (NM_009752.1,134-152).
gctgcgcacggcatctata

SEQ ID NO: 593201 - DNA, 19 bp, Mus musculus
  siRNA target sequence for Glb1 (NM_009752.1,135-153).
ctgcgcacggcatctataa

SEQ ID NO: 593202 - DNA, 19 bp, Mus musculus
  siRNA target sequence for Glb1 (NM_009752.1,138-156).
cgcacggcatctataatgt

SEQ ID NO: 593203 - DNA, 19 bp, Mus musculus
  siRNA target sequence for Glb1 (NM_009752.1,140-158).
cacggcatctataatgtca

SEQ ID NO: 593204 - DNA, 19 bp, Mus musculus
  siRNA target sequence for Glb1 (NM_009752.1,159-177).
cccagaggacatttaagct

SEQ ID NO: 593205 - DNA, 19 bp, Mus musculus
  siRNA target sequence for Glb1 (NM_009752.1,210-228).
gacagccattccgatacat

SEQ ID NO: 593206 - DNA, 19 bp, Mus musculus
  siRNA target sequence for Glb1 (NM_009752.1,212-230).
cagccattccgatacatct

SEQ ID NO: 593207 - DNA, 19 bp, Mus musculus
  siRNA target sequence for Glb1 (NM_009752.1,226-244).
catctcgggaagcattcat

SEQ ID NO: 593208 - DNA, 19 bp, Mus musculus
  siRNA target sequence for Glb1 (NM_009752.1,251-269).
cggataccccgcttctact

SEQ ID NO: 593209 - DNA, 19 bp, Mus musculus
  siRNA target sequence for Glb1 (NM_009752.1,353-371).
ccaggacaatatgagtttt

SEQ ID NO: 593210 - DNA, 19 bp, Mus musculus
  siRNA target sequence for Glb1 (NM_009752.1,380-398).
cgtgatgtggagcatttca

SEQ ID NO: 593211 - DNA, 19 bp, Mus musculus
  siRNA target sequence for Glb1 (NM_009752.1,539-557).
cttgtagctgtggataaat

SEQ ID NO: 593212 - DNA, 19 bp, Mus musculus
  siRNA target sequence for Glb1 (NM_009752.1,601-619).
gaacggaggaccgatcata

SEQ ID NO: 593213 - DNA, 19 bp, Mus musculus
  siRNA target sequence for Glb1 (NM_009752.1,710-728).
ggtaatgacgtcattctct

SEQ ID NO: 593214 - DNA, 19 bp, Mus musculus
  siRNA target sequence for Glb1 (NM_009752.1,711-729).
gtaatgacgtcattctctt

SEQ ID NO: 593215 - DNA, 19 bp, Mus musculus
  siRNA target sequence for Glb1 (NM_009752.1,733-751).
caccgacggagcaagtgaa

SEQ ID NO: 593216 - DNA, 19 bp, Mus musculus
  siRNA target sequence for Glb1 (NM_009752.1,784-802).
gtacgccacagtggatttt

SEQ ID NO: 593217 - DNA, 19 bp, Mus musculus
  siRNA target sequence for Glb1 (NM_009752.1,803-821).
ggaacaggcaacaatatca

SEQ ID NO: 593218 - DNA, 19 bp, Mus musculus
  siRNA target sequence for Glb1 (NM_009752.1,835-853).
ggtccagaggaagtttgaa

SEQ ID NO: 593219 - DNA, 19 bp, Mus musculus
  siRNA target sequence for Glb1 (NM_009752.1,841-859).
gaggaagtttgaacctaaa

SEQ ID NO: 593220 - DNA, 19 bp, Mus musculus
  siRNA target sequence for Glb1 (NM_009752.1,854-872).
cctaaaggacctttgatca

SEQ ID NO: 593221 - DNA, 19 bp, Mus musculus
  siRNA target sequence for Glb1 (NM_009752.1,855-873).
ctaaaggacctttgatcaa

SEQ ID NO: 593222 - DNA, 19 bp, Mus musculus
  siRNA target sequence for Glb1 (NM_009752.1,916-934).
ccattccacggtgaaaact

SEQ ID NO: 593223 - DNA, 19 bp, Mus musculus
  siRNA target sequence for Glb1 (NM_009752.1,917-935).
cattccacggtgaaaacta

SEQ ID NO: 593224 - DNA, 19 bp, Mus musculus
  siRNA target sequence for Glb1 (NM_009752.1,922-940).
cacggtgaaaactaaaaca

SEQ ID NO: 593225 - DNA, 19 bp, Mus musculus
  siRNA target sequence for Glb1 (NM_009752.1,974-992).
ggggccaacgtgaacttgt

SEQ ID NO: 593226 - DNA, 19 bp, Mus musculus
  siRNA target sequence for Glb1 (NM_009752.1,975-993).
gggccaacgtgaacttgta

SEQ ID NO: 593227 - DNA, 19 bp, Mus musculus
  siRNA target sequence for Glb1 (NM_009752.1,983-1001).
gtgaacttgtacatgttta

SEQ ID NO: 593228 - DNA, 19 bp, Mus musculus
  siRNA target sequence for Glb1 (NM_009752.1,1011-1029).
ccaattttgcctattggaa

SEQ ID NO: 593229 - DNA, 19 bp, Mus musculus
  siRNA target sequence for Glb1 (NM_009752.1,1012-1030).
caattttgcctattggaat

SEQ ID NO: 593230 - DNA, 19 bp, Mus musculus
  siRNA target sequence for Glb1 (NM_009752.1,1095-1113).
ctggggacctcactaagaa

SEQ ID NO: 593231 - DNA, 19 bp, Mus musculus
  siRNA target sequence for Glb1 (NM_009752.1,1124-1142).
cttcgagaagtcattcaga

SEQ ID NO: 593232 - DNA, 19 bp, Mus musculus
  siRNA target sequence for Glb1 (NM_009752.1,1130-1148).
gaagtcattcagatgttta

SEQ ID NO: 593233 - DNA, 19 bp, Mus musculus
  siRNA target sequence for Glb1 (NM_009752.1,1173-1191).
ctccgtctacacccaaatt

SEQ ID NO: 593234 - DNA, 19 bp, Mus musculus
  siRNA target sequence for Glb1 (NM_009752.1,1179-1197).
ctacacccaaatttgcata

SEQ ID NO: 593235 - DNA, 19 bp, Mus musculus
  siRNA target sequence for Glb1 (NM_009752.1,1279-1297).
ctatcccctgacattcact

SEQ ID NO: 593236 - DNA, 19 bp, Mus musculus
  siRNA target sequence for Glb1 (NM_009752.1,1426-1444).
ggtcccccaaggaatcctt

SEQ ID NO: 593237 - DNA, 19 bp, Mus musculus
  siRNA target sequence for Glb1 (NM_009752.1,1456-1474).
catgacagctctgaacata

SEQ ID NO: 593238 - DNA, 19 bp, Mus musculus
  siRNA target sequence for Glb1 (NM_009752.1,1531-1549).
ctatggcagattcatcaat

SEQ ID NO: 593239 - DNA, 19 bp, Mus musculus
  siRNA target sequence for Glb1 (NM_009752.1,1688-1706).
ggacggtcgacctccaatt

SEQ ID NO: 593240 - DNA, 19 bp, Mus musculus
  siRNA target sequence for Glb1 (NM_009752.1,1691-1709).
cggtcgacctccaattctt

SEQ ID NO: 593241 - DNA, 19 bp, Mus musculus
  siRNA target sequence for Glb1 (NM_009752.1,1857-1875).
ccacaatgggcccacaaaa

SEQ ID NO: 593242 - DNA, 19 bp, Mus musculus
  siRNA target sequence for Glb1 (NM_009752.1,1969-1987).
cccagagctgtgtacagta

SEQ ID NO: 593243 - DNA, 19 bp, Mus musculus
  siRNA target sequence for Glb1 (NM_009752.1,1980-1998).
gtacagtagagtttgttga

SEQ ID NO: 593244 - DNA, 19 bp, Mus musculus
  siRNA target sequence for Glb1 (NM_009752.1,1997-2015).
gacactccggtcatttcct

SEQ ID NO: 593245 - DNA, 19 bp, Mus musculus
  siRNA target sequence for Gla (NM_013463.1,155-173).
ggctgcattgggaacgttt

SEQ ID NO: 593246 - DNA, 19 bp, Mus musculus
  siRNA target sequence for Gla (NM_013463.1,160-178).
cattgggaacgtttcatgt

SEQ ID NO: 593247 - DNA, 19 bp, Mus musculus
  siRNA target sequence for Gla (NM_013463.1,203-221).
ctgatgcctgcataagtga

SEQ ID NO: 593248 - DNA, 19 bp, Mus musculus
  siRNA target sequence for Gla (NM_013463.1,212-230).
gcataagtgagcaactgtt

SEQ ID NO: 593249 - DNA, 19 bp, Mus musculus
  siRNA target sequence for Gla (NM_013463.1,264-282).
ctggcgggatgcaggttat

SEQ ID NO: 593250 - DNA, 19 bp, Mus musculus
  siRNA target sequence for Gla (NM_013463.1,268-286).
cgggatgcaggttatgact

SEQ ID NO: 593251 - DNA, 19 bp, Mus musculus
  siRNA target sequence for Gla (NM_013463.1,269-287).
gggatgcaggttatgacta

SEQ ID NO: 593252 - DNA, 19 bp, Mus musculus
  siRNA target sequence for Gla (NM_013463.1,270-288).
ggatgcaggttatgactat

SEQ ID NO: 593253 - DNA, 19 bp, Mus musculus
  siRNA target sequence for Gla (NM_013463.1,274-292).
gcaggttatgactatctct

SEQ ID NO: 593254 - DNA, 19 bp, Mus musculus
  siRNA target sequence for Gla (NM_013463.1,313-331).
gctcccgagagggattcaa

SEQ ID NO: 593255 - DNA, 19 bp, Mus musculus
  siRNA target sequence for Gla (NM_013463.1,314-332).
ctcccgagagggattcaaa

SEQ ID NO: 593256 - DNA, 19 bp, Mus musculus
  siRNA target sequence for Gla (NM_013463.1,411-429).
gaagctagggatttatgca

SEQ ID NO: 593257 - DNA, 19 bp, Mus musculus
  siRNA target sequence for Gla (NM_013463.1,462-480).
cgggagttttggatcctat

SEQ ID NO: 593258 - DNA, 19 bp, Mus musculus
  siRNA target sequence for Gla (NM_013463.1,509-527).
ggggcgtagatctgctaaa

SEQ ID NO: 593259 - DNA, 19 bp, Mus musculus
  siRNA target sequence for Gla (NM_013463.1,510-528).
gggcgtagatctgctaaaa

SEQ ID NO: 593260 - DNA, 19 bp, Mus musculus
  siRNA target sequence for Gla (NM_013463.1,511-529).
ggcgtagatctgctaaaat

SEQ ID NO: 593261 - DNA, 19 bp, Mus musculus
  siRNA target sequence for Gla (NM_013463.1,512-530).
gcgtagatctgctaaaatt

SEQ ID NO: 593262 - DNA, 19 bp, Mus musculus
  siRNA target sequence for Gla (NM_013463.1,513-531).
cgtagatctgctaaaattt

SEQ ID NO: 593263 - DNA, 19 bp, Mus musculus
  siRNA target sequence for Gla (NM_013463.1,541-559).
cactgtgacagtgtagtat

SEQ ID NO: 593264 - DNA, 19 bp, Mus musculus
  siRNA target sequence for Gla (NM_013463.1,545-563).
gtgacagtgtagtatcctt

SEQ ID NO: 593265 - DNA, 19 bp, Mus musculus
  siRNA target sequence for Gla (NM_013463.1,560-578).
ccttggagaatggttataa

SEQ ID NO: 593266 - DNA, 19 bp, Mus musculus
  siRNA target sequence for Gla (NM_013463.1,603-621).
gacaggccgaagcattgta

SEQ ID NO: 593267 - DNA, 19 bp, Mus musculus
  siRNA target sequence for Gla (NM_013463.1,605-623).
caggccgaagcattgtata

SEQ ID NO: 593268 - DNA, 19 bp, Mus musculus
  siRNA target sequence for Gla (NM_013463.1,607-625).
ggccgaagcattgtatact

SEQ ID NO: 593269 - DNA, 19 bp, Mus musculus
  siRNA target sequence for Gla (NM_013463.1,653-671).
cctttcataagcccaatta

SEQ ID NO: 593270 - DNA, 19 bp, Mus musculus
  siRNA target sequence for Gla (NM_013463.1,654-672).
ctttcataagcccaattat

SEQ ID NO: 593271 - DNA, 19 bp, Mus musculus
  siRNA target sequence for Gla (NM_013463.1,666-684).
caattatacagatatccaa

SEQ ID NO: 593272 - DNA, 19 bp, Mus musculus
  siRNA target sequence for Gla (NM_013463.1,681-699).
ccaatattactgcaatcat

SEQ ID NO: 593273 - DNA, 19 bp, Mus musculus
  siRNA target sequence for Gla (NM_013463.1,682-700).
caatattactgcaatcatt

SEQ ID NO: 593274 - DNA, 19 bp, Mus musculus
  siRNA target sequence for Gla (NM_013463.1,701-719).
ggagaaattttgatgatgt

SEQ ID NO: 593275 - DNA, 19 bp, Mus musculus
  siRNA target sequence for Gla (NM_013463.1,755-773).
cttggacagtggtttacca

SEQ ID NO: 593276 - DNA, 19 bp, Mus musculus
  siRNA target sequence for Gla (NM_013463.1,825-843).
gttagtgatcggcaacttt

SEQ ID NO: 593277 - DNA, 19 bp, Mus musculus
  siRNA target sequence for Gla (NM_013463.1,914-932).
ccaacgatctgcgacaaat

SEQ ID NO: 593278 - DNA, 19 bp, Mus musculus
  siRNA target sequence for Gla (NM_013463.1,950-968).
ctctgcttcagaataagga

SEQ ID NO: 593279 - DNA, 19 bp, Mus musculus
  siRNA target sequence for Gla (NM_013463.1,1102-1120).
ggtggaccttgtccttata

SEQ ID NO: 593280 - DNA, 19 bp, Mus musculus
  siRNA target sequence for Gla (NM_013463.1,1105-1123).
ggaccttgtccttatacca

SEQ ID NO: 593281 - DNA, 19 bp, Mus musculus
  siRNA target sequence for Gla (NM_013463.1,1106-1124).
gaccttgtccttataccat

SEQ ID NO: 593282 - DNA, 19 bp, Mus musculus
  siRNA target sequence for Gla (NM_013463.1,1114-1132).
ccttataccatccagattt

SEQ ID NO: 593283 - DNA, 19 bp, Mus musculus
  siRNA target sequence for Gla (NM_013463.1,1158-1176).
caatcctggctgcatcatt

SEQ ID NO: 593284 - DNA, 19 bp, Mus musculus
  siRNA target sequence for Gla (NM_013463.1,1163-1181).
ctggctgcatcattactca

SEQ ID NO: 593285 - DNA, 19 bp, Mus musculus
  siRNA target sequence for Gla (NM_013463.1,1182-1200).
gcttctccccgagaaagta

SEQ ID NO: 593286 - DNA, 19 bp, Mus musculus
  siRNA target sequence for Gla (NM_013463.1,1201-1219).
cacctaggcttctatgaat

SEQ ID NO: 593287 - DNA, 19 bp, Mus musculus
  siRNA target sequence for Gla (NM_013463.1,1216-1234).
gaatggactttgaccttaa

SEQ ID NO: 593288 - DNA, 19 bp, Mus musculus
  siRNA target sequence for Gla (NM_013463.1,1229-1247).
ccttaaaaactcgagtaaa

SEQ ID NO: 593289 - DNA, 19 bp, Mus musculus
  siRNA target sequence for Gla (NM_013463.1,1249-1267).
ccctcaggcactgttttgt

SEQ ID NO: 593290 - DNA, 19 bp, Mus musculus
  siRNA target sequence for Gla (NM_013463.1,1261-1279).
gttttgtttcggttagaaa

SEQ ID NO: 593291 - DNA, 19 bp, Mus musculus
  siRNA target sequence for Lzp-s (NM_013590.2,82-100).
gccaaggtctacaatcgtt

SEQ ID NO: 593292 - DNA, 19 bp, Mus musculus
  siRNA target sequence for Lzp-s (NM_013590.2,101-119).
gtgagttggccagaattct

SEQ ID NO: 593293 - DNA, 19 bp, Mus musculus
  siRNA target sequence for Lzp-s (NM_013590.2,110-128).
ccagaattctgaaaaggaa

SEQ ID NO: 593294 - DNA, 19 bp, Mus musculus
  siRNA target sequence for 0610025O11Rik (NM_025799.2,208-226).
cacgagagcccttagctat

SEQ ID NO: 593295 - DNA, 19 bp, Mus musculus
  siRNA target sequence for 0610025O11Rik (NM_025799.2,282-300).
ccaagttcggcatctttat

SEQ ID NO: 593296 - DNA, 19 bp, Mus musculus
  siRNA target sequence for 0610025O11Rik (NM_025799.2,323-341).
cccagctttggtagtgaat

SEQ ID NO: 593297 - DNA, 19 bp, Mus musculus
  siRNA target sequence for 0610025O11Rik (NM_025799.2,327-345).
gctttggtagtgaatggtt

SEQ ID NO: 593298 - DNA, 19 bp, Mus musculus
  siRNA target sequence for 0610025O11Rik (NM_025799.2,388-406).
ctttatgaacaataattat

SEQ ID NO: 593299 - DNA, 19 bp, Mus musculus
  siRNA target sequence for 0610025O11Rik (NM_025799.2,428-446).
gattttgtagtgctattta

SEQ ID NO: 593300 - DNA, 19 bp, Mus musculus
  siRNA target sequence for 0610025O11Rik (NM_025799.2,440-458).
ctatttacagccaagtatt

SEQ ID NO: 593301 - DNA, 19 bp, Mus musculus
  siRNA target sequence for 0610025O11Rik (NM_025799.2,511-529).
ggtcttcacttctaaacat

SEQ ID NO: 593302 - DNA, 19 bp, Mus musculus
  siRNA target sequence for 0610025O11Rik (NM_025799.2,530-548).
cacgaaggctttacaatgt

SEQ ID NO: 593303 - DNA, 19 bp, Mus musculus
  siRNA target sequence for 0610025O11Rik (NM_025799.2,593-611).
ccaaagagggacattgtca

SEQ ID NO: 593304 - DNA, 19 bp, Mus musculus
  siRNA target sequence for 0610025O11Rik (NM_025799.2,594-612).
caaagagggacattgtcaa

SEQ ID NO: 593305 - DNA, 19 bp, Mus musculus
  siRNA target sequence for 0610025O11Rik (NM_025799.2,649-667).
gcactttggtctgtactat

SEQ ID NO: 593306 - DNA, 19 bp, Mus musculus
  siRNA target sequence for 0610025O11Rik (NM_025799.2,650-668).
cactttggtctgtactatt

SEQ ID NO: 593307 - DNA, 19 bp, Mus musculus
  siRNA target sequence for 0610025O11Rik (NM_025799.2,656-674).
ggtctgtactattctcttt

SEQ ID NO: 593308 - DNA, 19 bp, Mus musculus
  siRNA target sequence for 0610025O11Rik (NM_025799.2,681-699).
ggttccatccgctctttct

SEQ ID NO: 593309 - DNA, 19 bp, Mus musculus
  siRNA target sequence for 0610025O11Rik (NM_025799.2,728-746).
cagcgatttcccgtttcta

SEQ ID NO: 593310 - DNA, 19 bp, Mus musculus
  siRNA target sequence for 0610025O11Rik (NM_025799.2,731-749).
cgatttcccgtttctaaga

SEQ ID NO: 593311 - DNA, 19 bp, Mus musculus
  siRNA target sequence for 0610025O11Rik (NM_025799.2,976-994).
ctatctcttgccacacaaa

SEQ ID NO: 593312 - DNA, 19 bp, Mus musculus
  siRNA target sequence for 0610025O11Rik (NM_025799.2,1105-1123).
cgcatgtggtggaaatctt

SEQ ID NO: 593313 - DNA, 19 bp, Mus musculus
  siRNA target sequence for 0610025O11Rik (NM_025799.2,1106-1124).
gcatgtggtggaaatcttt

SEQ ID NO: 593314 - DNA, 19 bp, Mus musculus
  siRNA target sequence for 0610025O11Rik (NM_025799.2,1107-1125).
catgtggtggaaatctttt

SEQ ID NO: 593315 - DNA, 19 bp, Mus musculus
  siRNA target sequence for 0610025O11Rik (NM_025799.2,1110-1128).
gtggtggaaatcttttgat

SEQ ID NO: 593316 - DNA, 19 bp, Mus musculus
  siRNA target sequence for 0610025O11Rik (NM_025799.2,1150-1168).
cggcaccattcctgtcatt

SEQ ID NO: 593317 - DNA, 19 bp, Mus musculus
  siRNA target sequence for 0610025O11Rik (NM_025799.2,1151-1169).
ggcaccattcctgtcattt

SEQ ID NO: 593318 - DNA, 19 bp, Mus musculus
  siRNA target sequence for Fuca (NM_024243.2,268-286).
gcctaccagcgcttcatga

SEQ ID NO: 593319 - DNA, 19 bp, Mus musculus
  siRNA target sequence for Fuca (NM_024243.2,577-595).
ccactctacctacttgata

SEQ ID NO: 593320 - DNA, 19 bp, Mus musculus
  siRNA target sequence for Fuca (NM_024243.2,578-596).
cactctacctacttgataa

SEQ ID NO: 593321 - DNA, 19 bp, Mus musculus
  siRNA target sequence for Fuca (NM_024243.2,582-600).
ctacctacttgataagaaa

SEQ ID NO: 593322 - DNA, 19 bp, Mus musculus
  siRNA target sequence for Fuca (NM_024243.2,619-637).
catttcgtcagggcaaaaa

SEQ ID NO: 593323 - DNA, 19 bp, Mus musculus
  siRNA target sequence for Fuca (NM_024243.2,646-664).
gagctgtatgaccttgtta

SEQ ID NO: 593324 - DNA, 19 bp, Mus musculus
  siRNA target sequence for Fuca (NM_024243.2,649-667).
ctgtatgaccttgttaaca

SEQ ID NO: 593325 - DNA, 19 bp, Mus musculus
  siRNA target sequence for Fuca (NM_024243.2,745-763).
gcttggctctacaacgata

SEQ ID NO: 593326 - DNA, 19 bp, Mus musculus
  siRNA target sequence for Fuca (NM_024243.2,774-792).
ggatgaggtgatagtgaat

SEQ ID NO: 593327 - DNA, 19 bp, Mus musculus
  siRNA target sequence for Fuca (NM_024243.2,820-838).
catcatggagggtactaca

SEQ ID NO: 593328 - DNA, 19 bp, Mus musculus
  siRNA target sequence for Fuca (NM_024243.2,823-841).
catggagggtactacaact

SEQ ID NO: 593329 - DNA, 19 bp, Mus musculus
  siRNA target sequence for Fuca (NM_024243.2,910-928).
gcatcctggggctatcgaa

SEQ ID NO: 593330 - DNA, 19 bp, Mus musculus
  siRNA target sequence for Fuca (NM_024243.2,944-962).
cgaccatcgccaaggaaaa

SEQ ID NO: 593331 - DNA, 19 bp, Mus musculus
  siRNA target sequence for Fuca (NM_024243.2,945-963).
gaccatcgccaaggaaaat

SEQ ID NO: 593332 - DNA, 19 bp, Mus musculus
  siRNA target sequence for Fuca (NM_024243.2,995-1013).
gtttgggaggcaactatct

SEQ ID NO: 593333 - DNA, 19 bp, Mus musculus
  siRNA target sequence for Fuca (NM_024243.2,1017-1035).
caacattggaccaactaaa

SEQ ID NO: 593334 - DNA, 19 bp, Mus musculus
  siRNA target sequence for Fuca (NM_024243.2,1020-1038).
cattggaccaactaaagat

SEQ ID NO: 593335 - DNA, 19 bp, Mus musculus
  siRNA target sequence for Fuca (NM_024243.2,1135-1153).
gtgcagtcggaaaagaaca

SEQ ID NO: 593336 - DNA, 19 bp, Mus musculus
  siRNA target sequence for Fuca (NM_024243.2,1162-1180).
gtgtggtacactactaaaa

SEQ ID NO: 593337 - DNA, 19 bp, Mus musculus
  siRNA target sequence for Fuca (NM_024243.2,1250-1268).
cgacctcggccacaaagat

SEQ ID NO: 593338 - DNA, 19 bp, Mus musculus
  siRNA target sequence for Fuca (NM_024243.2,1254-1272).
ctcggccacaaagataaca

SEQ ID NO: 593339 - DNA, 19 bp, Mus musculus
  siRNA target sequence for Fuca (NM_024243.2,1256-1274).
cggccacaaagataacaat

SEQ ID NO: 593340 - DNA, 19 bp, Mus musculus
  siRNA target sequence for Idua (NM_008325.1,180-198).
gaccagtacgaccttagtt

SEQ ID NO: 593341 - DNA, 19 bp, Mus musculus
  siRNA target sequence for Idua (NM_008325.1,252-270).
gagcaggtccggatacact

SEQ ID NO: 593342 - DNA, 19 bp, Mus musculus
  siRNA target sequence for Idua (NM_008325.1,301-319).
cacctgggcagggacttat

SEQ ID NO: 593343 - DNA, 19 bp, Mus musculus
  siRNA target sequence for Idua (NM_008325.1,309-327).
cagggacttatgtacaact

SEQ ID NO: 593344 - DNA, 19 bp, Mus musculus
  siRNA target sequence for Idua (NM_008325.1,409-427).
ggtacttcacggactttga

SEQ ID NO: 593345 - DNA, 19 bp, Mus musculus
  siRNA target sequence for Idua (NM_008325.1,474-492).
gccaggagatacattggta

SEQ ID NO: 593346 - DNA, 19 bp, Mus musculus
  siRNA target sequence for Idua (NM_008325.1,479-497).
gagatacattggtaggtat

SEQ ID NO: 593347 - DNA, 19 bp, Mus musculus
  siRNA target sequence for Idua (NM_008325.1,499-517).
ggctgacacacgtttccaa

SEQ ID NO: 593348 - DNA, 19 bp, Mus musculus
  siRNA target sequence for Idua (NM_008325.1,509-527).
cgtttccaagtggaacttt

SEQ ID NO: 593349 - DNA, 19 bp, Mus musculus
  siRNA target sequence for Idua (NM_008325.1,524-542).
ctttgagacttggaatgaa

SEQ ID NO: 593350 - DNA, 19 bp, Mus musculus
  siRNA target sequence for Idua (NM_008325.1,582-600).
caaggcttcctgaattact

SEQ ID NO: 593351 - DNA, 19 bp, Mus musculus
  siRNA target sequence for Idua (NM_008325.1,753-771).
ggcgtgcgtctggattaca

SEQ ID NO: 593352 - DNA, 19 bp, Mus musculus
  siRNA target sequence for Idua (NM_008325.1,754-772).
gcgtgcgtctggattacat

SEQ ID NO: 593353 - DNA, 19 bp, Mus musculus
  siRNA target sequence for Idua (NM_008325.1,756-774).
gtgcgtctggattacatct

SEQ ID NO: 593354 - DNA, 19 bp, Mus musculus
  siRNA target sequence for Idua (NM_008325.1,931-949).
ggagagctgatgtgactta

SEQ ID NO: 593355 - DNA, 19 bp, Mus musculus
  siRNA target sequence for Idua (NM_008325.1,1076-1094).
ctcccagcgcacacttact

SEQ ID NO: 593356 - DNA, 19 bp, Mus musculus
  siRNA target sequence for Idua (NM_008325.1,1178-1196).
cctgttggatggagaacaa

SEQ ID NO: 593357 - DNA, 19 bp, Mus musculus
  siRNA target sequence for Idua (NM_008325.1,1229-1247).
gttggacagcaatcataca

SEQ ID NO: 593358 - DNA, 19 bp, Mus musculus
  siRNA target sequence for Idua (NM_008325.1,1393-1411).
gcttggatcttgtctacat

SEQ ID NO: 593359 - DNA, 19 bp, Mus musculus
  siRNA target sequence for Idua (NM_008325.1,1397-1415).
ggatcttgtctacatagta

SEQ ID NO: 593360 - DNA, 19 bp, Mus musculus
  siRNA target sequence for Idua (NM_008325.1,1406-1424).
ctacatagtactctactta

SEQ ID NO: 593361 - DNA, 19 bp, Mus musculus
  siRNA target sequence for Idua (NM_008325.1,1726-1744).
gcctgtggacatatgagat

SEQ ID NO: 593362 - DNA, 19 bp, Mus musculus
  siRNA target sequence for Idua (NM_008325.1,1754-1772).
ccagaaaggtgaagagtat

SEQ ID NO: 593363 - DNA, 19 bp, Mus musculus
  siRNA target sequence for Idua (NM_008325.1,1767-1785).
gagtatgccccaatcaaca

SEQ ID NO: 593364 - DNA, 19 bp, Mus musculus
  siRNA target sequence for Idua (NM_008325.1,1786-1804).
ggaggccgtctacttttaa

SEQ ID NO: 593365 - DNA, 19 bp, Mus musculus
  siRNA target sequence for Idua (NM_008325.1,1789-1807).
ggccgtctacttttaacct

SEQ ID NO: 593366 - DNA, 19 bp, Mus musculus
  siRNA target sequence for Idua (NM_008325.1,1795-1813).
ctacttttaacctctttgt

SEQ ID NO: 593367 - DNA, 19 bp, Mus musculus
  siRNA target sequence for Idua (NM_008325.1,1850-1868).
ccgagttcgagcattggat

SEQ ID NO: 593368 - DNA, 19 bp, Mus musculus
  siRNA target sequence for Idua (NM_008325.1,1851-1869).
cgagttcgagcattggatt

SEQ ID NO: 593369 - DNA, 19 bp, Mus musculus
  siRNA target sequence for Idua (NM_008325.1,1852-1870).
gagttcgagcattggatta

SEQ ID NO: 593370 - DNA, 19 bp, Mus musculus
  siRNA target sequence for Idua (NM_008325.1,1854-1872).
gttcgagcattggattact

SEQ ID NO: 593371 - DNA, 19 bp, Mus musculus
  siRNA target sequence for Gus (NM_010368.1,185-203).
gtttcgagcagcaatggta

SEQ ID NO: 593372 - DNA, 19 bp, Mus musculus
  siRNA target sequence for Gus (NM_010368.1,250-268).
ccttctagcttcaatgaca

SEQ ID NO: 593373 - DNA, 19 bp, Mus musculus
  siRNA target sequence for Gus (NM_010368.1,251-269).
cttctagcttcaatgacat

SEQ ID NO: 593374 - DNA, 19 bp, Mus musculus
  siRNA target sequence for Gus (NM_010368.1,337-355).
cggcgatggacccaagata

SEQ ID NO: 593375 - DNA, 19 bp, Mus musculus
  siRNA target sequence for Gus (NM_010368.1,384-402).
cagtgcccattattatgca

SEQ ID NO: 593376 - DNA, 19 bp, Mus musculus
  siRNA target sequence for Gus (NM_010368.1,655-673).
cgatctgtggtcctctata

SEQ ID NO: 593377 - DNA, 19 bp, Mus musculus
  siRNA target sequence for Gus (NM_010368.1,683-701).
ccacttacatcgatgatat

SEQ ID NO: 593378 - DNA, 19 bp, Mus musculus
  siRNA target sequence for Gus (NM_010368.1,713-731).
ctaatgtggagcaagacat

SEQ ID NO: 593379 - DNA, 19 bp, Mus musculus
  siRNA target sequence for Gus (NM_010368.1,892-910).
gagcatccagcctacatgt

SEQ ID NO: 593380 - DNA, 19 bp, Mus musculus
  siRNA target sequence for Gus (NM_010368.1,895-913).
catccagcctacatgtact

SEQ ID NO: 593381 - DNA, 19 bp, Mus musculus
  siRNA target sequence for Gus (NM_010368.1,964-982).
cttcctatcgggattcgaa

SEQ ID NO: 593382 - DNA, 19 bp, Mus musculus
  siRNA target sequence for Gus (NM_010368.1,1019-1037).
ggaagcccttctatttcca

SEQ ID NO: 593383 - DNA, 19 bp, Mus musculus
  siRNA target sequence for Gus (NM_010368.1,1020-1038).
gaagcccttctatttccaa

SEQ ID NO: 593384 - DNA, 19 bp, Mus musculus
  siRNA target sequence for Gus (NM_010368.1,1090-1108).
ccgctgctggtaaaggatt

SEQ ID NO: 593385 - DNA, 19 bp, Mus musculus
  siRNA target sequence for Gus (NM_010368.1,1091-1109).
cgctgctggtaaaggattt

SEQ ID NO: 593386 - DNA, 19 bp, Mus musculus
  siRNA target sequence for Gus (NM_010368.1,1120-1138).
cgttggctcggggcaaatt

SEQ ID NO: 593387 - DNA, 19 bp, Mus musculus
  siRNA target sequence for Gus (NM_010368.1,1124-1142).
ggctcggggcaaattcctt

SEQ ID NO: 593388 - DNA, 19 bp, Mus musculus
  siRNA target sequence for Gus (NM_010368.1,1125-1143).
gctcggggcaaattccttt

SEQ ID NO: 593389 - DNA, 19 bp, Mus musculus
  siRNA target sequence for Gus (NM_010368.1,1429-1447).
cgtcccgtgacctttgtga

SEQ ID NO: 593390 - DNA, 19 bp, Mus musculus
  siRNA target sequence for Gus (NM_010368.1,1446-1464).
gagcaacgccaaatatgat

SEQ ID NO: 593391 - DNA, 19 bp, Mus musculus
  siRNA target sequence for Gus (NM_010368.1,1486-1504).
gtggatgttatctgtgtaa

SEQ ID NO: 593392 - DNA, 19 bp, Mus musculus
  siRNA target sequence for Gus (NM_010368.1,1497-1515).
ctgtgtaaacagctacttt

SEQ ID NO: 593393 - DNA, 19 bp, Mus musculus
  siRNA target sequence for Gus (NM_010368.1,1506-1524).
cagctacttttcttggtat

SEQ ID NO: 593394 - DNA, 19 bp, Mus musculus
  siRNA target sequence for Gus (NM_010368.1,1570-1588).
cagtttgagaactggtata

SEQ ID NO: 593395 - DNA, 19 bp, Mus musculus
  siRNA target sequence for Gus (NM_010368.1,1583-1601).
ggtataagacgcatcagaa

SEQ ID NO: 593396 - DNA, 19 bp, Mus musculus
  siRNA target sequence for Gus (NM_010368.1,1592-1610).
cgcatcagaagccgattat

SEQ ID NO: 593397 - DNA, 19 bp, Mus musculus
  siRNA target sequence for Gus (NM_010368.1,1714-1732).
gttctggatcagaaacgta

SEQ ID NO: 593398 - DNA, 19 bp, Mus musculus
  siRNA target sequence for Gus (NM_010368.1,1748-1766).
gagagctcatctggaattt

SEQ ID NO: 593399 - DNA, 19 bp, Mus musculus
  siRNA target sequence for Gus (NM_010368.1,1760-1778).
ggaatttcgccgacttcat

SEQ ID NO: 593400 - DNA, 19 bp, Mus musculus
  siRNA target sequence for Gus (NM_010368.1,1786-1804).
cagtcaccgctgagagtaa

SEQ ID NO: 593401 - DNA, 19 bp, Mus musculus
  siRNA target sequence for Gus (NM_010368.1,1799-1817).
gagtaatcggaaacaagaa

SEQ ID NO: 593402 - DNA, 19 bp, Mus musculus
  siRNA target sequence for Gus (NM_010368.1,1916-1934).
ggccgagaacccagtgttt

SEQ ID NO: 593403 - DNA, 19 bp, Mus musculus
  siRNA target sequence for Gba (NM_008094.3,344-362).
ctcatcggattcttcctat

SEQ ID NO: 593404 - DNA, 19 bp, Mus musculus
  siRNA target sequence for Gba (NM_008094.3,359-377).
ctatttcaggcggtatctt

SEQ ID NO: 593405 - DNA, 19 bp, Mus musculus
  siRNA target sequence for Gba (NM_008094.3,370-388).
ggtatcttgggcatatggt

SEQ ID NO: 593406 - DNA, 19 bp, Mus musculus
  siRNA target sequence for Gba (NM_008094.3,430-448).
ggtctgtgtctgtaatgca

SEQ ID NO: 593407 - DNA, 19 bp, Mus musculus
  siRNA target sequence for Gba (NM_008094.3,431-449).
gtctgtgtctgtaatgcat

SEQ ID NO: 593408 - DNA, 19 bp, Mus musculus
  siRNA target sequence for Gba (NM_008094.3,576-594).
cagggttactactcacttt

SEQ ID NO: 593409 - DNA, 19 bp, Mus musculus
  siRNA target sequence for Gba (NM_008094.3,698-716).
ctactcagatcctacttct

SEQ ID NO: 593410 - DNA, 19 bp, Mus musculus
  siRNA target sequence for Gba (NM_008094.3,717-735).
ctaccaacggaattgaata

SEQ ID NO: 593411 - DNA, 19 bp, Mus musculus
  siRNA target sequence for Gba (NM_008094.3,725-743).
ggaattgaatataacatca

SEQ ID NO: 593412 - DNA, 19 bp, Mus musculus
  siRNA target sequence for Gba (NM_008094.3,775-793).
catccgtgtctatacctat

SEQ ID NO: 593413 - DNA, 19 bp, Mus musculus
  siRNA target sequence for Gba (NM_008094.3,803-821).
cctaacgacttccagttat

SEQ ID NO: 593414 - DNA, 19 bp, Mus musculus
  siRNA target sequence for Gba (NM_008094.3,1007-1025).
cagacctgggccaattact

SEQ ID NO: 593415 - DNA, 19 bp, Mus musculus
  siRNA target sequence for Gba (NM_008094.3,1033-1051).
gtttctggatgcttatgct

SEQ ID NO: 593416 - DNA, 19 bp, Mus musculus
  siRNA target sequence for Gba (NM_008094.3,1039-1057).
ggatgcttatgctaagtat

SEQ ID NO: 593417 - DNA, 19 bp, Mus musculus
  siRNA target sequence for Gba (NM_008094.3,1050-1068).
ctaagtatggcctaagatt

SEQ ID NO: 593418 - DNA, 19 bp, Mus musculus
  siRNA target sequence for Gba (NM_008094.3,1311-1329).
ctgttcactggtatatgga

SEQ ID NO: 593419 - DNA, 19 bp, Mus musculus
  siRNA target sequence for Gba (NM_008094.3,1471-1489).
gtacagtcacagcatcatt

SEQ ID NO: 593420 - DNA, 19 bp, Mus musculus
  siRNA target sequence for Gba (NM_008094.3,1476-1494).
gtcacagcatcattacgaa

SEQ ID NO: 593421 - DNA, 19 bp, Mus musculus
  siRNA target sequence for Gba (NM_008094.3,1752-1770).
cagttgtggtcgtgttaaa

SEQ ID NO: 593422 - DNA, 19 bp, Mus musculus
  siRNA target sequence for Gba (NM_008094.3,1838-1856).
cctggctactccattcaca

SEQ ID NO: 593423 - DNA, 19 bp, Mus musculus
  siRNA target sequence for Gba (NM_008094.3,1842-1860).
gctactccattcacactta

SEQ ID NO: 593424 - DNA, 19 bp, Mus musculus
  siRNA target sequence for Galc (NM_008079.1,155-173).
gtgttgcggtgcccttatt

SEQ ID NO: 593425 - DNA, 19 bp, Mus musculus
  siRNA target sequence for Galc (NM_008079.1,157-175).
gttgcggtgcccttattgt

SEQ ID NO: 593426 - DNA, 19 bp, Mus musculus
  siRNA target sequence for Galc (NM_008079.1,160-178).
gcggtgcccttattgttgt

SEQ ID NO: 593427 - DNA, 19 bp, Mus musculus
  siRNA target sequence for Galc (NM_008079.1,275-293).
caacctcccggcttctagt

SEQ ID NO: 593428 - DNA, 19 bp, Mus musculus
  siRNA target sequence for Galc (NM_008079.1,278-296).
cctcccggcttctagtaaa

SEQ ID NO: 593429 - DNA, 19 bp, Mus musculus
  siRNA target sequence for Galc (NM_008079.1,279-297).
ctcccggcttctagtaaat

SEQ ID NO: 593430 - DNA, 19 bp, Mus musculus
  siRNA target sequence for Galc (NM_008079.1,281-299).
cccggcttctagtaaatta

SEQ ID NO: 593431 - DNA, 19 bp, Mus musculus
  siRNA target sequence for Galc (NM_008079.1,304-322).
gagccctatcgttctgaaa

SEQ ID NO: 593432 - DNA, 19 bp, Mus musculus
  siRNA target sequence for Galc (NM_008079.1,306-324).
gccctatcgttctgaaata

SEQ ID NO: 593433 - DNA, 19 bp, Mus musculus
  siRNA target sequence for Galc (NM_008079.1,308-326).
cctatcgttctgaaatact

SEQ ID NO: 593434 - DNA, 19 bp, Mus musculus
  siRNA target sequence for Galc (NM_008079.1,419-437).
cctcgcacatgcactatga

SEQ ID NO: 593435 - DNA, 19 bp, Mus musculus
  siRNA target sequence for Galc (NM_008079.1,436-454).
gagctagatgagaattatt

SEQ ID NO: 593436 - DNA, 19 bp, Mus musculus
  siRNA target sequence for Galc (NM_008079.1,498-516).
gaacccagatattatactt

SEQ ID NO: 593437 - DNA, 19 bp, Mus musculus
  siRNA target sequence for Galc (NM_008079.1,557-575).
gcttcagctggccttatgt

SEQ ID NO: 593438 - DNA, 19 bp, Mus musculus
  siRNA target sequence for Galc (NM_008079.1,558-576).
cttcagctggccttatgta

SEQ ID NO: 593439 - DNA, 19 bp, Mus musculus
  siRNA target sequence for Galc (NM_008079.1,563-581).
gctggccttatgtaaatct

SEQ ID NO: 593440 - DNA, 19 bp, Mus musculus
  siRNA target sequence for Galc (NM_008079.1,564-582).
ctggccttatgtaaatctt

SEQ ID NO: 593441 - DNA, 19 bp, Mus musculus
  siRNA target sequence for Galc (NM_008079.1,566-584).
ggccttatgtaaatcttca

SEQ ID NO: 593442 - DNA, 19 bp, Mus musculus
  siRNA target sequence for Galc (NM_008079.1,592-610).
gcctactatgttgtaagat

SEQ ID NO: 593443 - DNA, 19 bp, Mus musculus
  siRNA target sequence for Galc (NM_008079.1,634-652).
catgacctggacattgatt

SEQ ID NO: 593444 - DNA, 19 bp, Mus musculus
  siRNA target sequence for Galc (NM_008079.1,637-655).
gacctggacattgattata

SEQ ID NO: 593445 - DNA, 19 bp, Mus musculus
  siRNA target sequence for Galc (NM_008079.1,675-693).
gccgtttgacgccaactat

SEQ ID NO: 593446 - DNA, 19 bp, Mus musculus
  siRNA target sequence for Galc (NM_008079.1,676-694).
ccgtttgacgccaactata

SEQ ID NO: 593447 - DNA, 19 bp, Mus musculus
  siRNA target sequence for Galc (NM_008079.1,677-695).
cgtttgacgccaactatat

SEQ ID NO: 593448 - DNA, 19 bp, Mus musculus
  siRNA target sequence for Galc (NM_008079.1,678-696).
gtttgacgccaactatata

SEQ ID NO: 593449 - DNA, 19 bp, Mus musculus
  siRNA target sequence for Galc (NM_008079.1,686-704).
ccaactatataaaggaatt

SEQ ID NO: 593450 - DNA, 19 bp, Mus musculus
  siRNA target sequence for Galc (NM_008079.1,810-828).
gaaggtggttgatgttata

SEQ ID NO: 593451 - DNA, 19 bp, Mus musculus
  siRNA target sequence for Galc (NM_008079.1,885-903).
gctgtggtcatctgaagat

SEQ ID NO: 593452 - DNA, 19 bp, Mus musculus
  siRNA target sequence for Galc (NM_008079.1,888-906).
gtggtcatctgaagatttt

SEQ ID NO: 593453 - DNA, 19 bp, Mus musculus
  siRNA target sequence for Galc (NM_008079.1,935-953).
gctgttggagtcgcatatt

SEQ ID NO: 593454 - DNA, 19 bp, Mus musculus
  siRNA target sequence for Galc (NM_008079.1,938-956).
gttggagtcgcatattgaa

SEQ ID NO: 593455 - DNA, 19 bp, Mus musculus
  siRNA target sequence for Galc (NM_008079.1,947-965).
gcatattgaaccagaatta

SEQ ID NO: 593456 - DNA, 19 bp, Mus musculus
  siRNA target sequence for Galc (NM_008079.1,1010-1028).
ctagttactatgaagagtt

SEQ ID NO: 593457 - DNA, 19 bp, Mus musculus
  siRNA target sequence for Galc (NM_008079.1,1036-1054).
ggacgaagtgggttgatga

SEQ ID NO: 593458 - DNA, 19 bp, Mus musculus
  siRNA target sequence for Galc (NM_008079.1,1067-1085).
catggagtggacattatgt

SEQ ID NO: 593459 - DNA, 19 bp, Mus musculus
  siRNA target sequence for Galc (NM_008079.1,1130-1148).
ctcaaccaggctggtatta

SEQ ID NO: 593460 - DNA, 19 bp, Mus musculus
  siRNA target sequence for Galc (NM_008079.1,1224-1242).
catcattgaaactatgagt

SEQ ID NO: 593461 - DNA, 19 bp, Mus musculus
  siRNA target sequence for Galc (NM_008079.1,1267-1285).
ccatatctgccatattata

SEQ ID NO: 593462 - DNA, 19 bp, Mus musculus
  siRNA target sequence for Galc (NM_008079.1,1376-1394).
cgcagcagagacttcattt

SEQ ID NO: 593463 - DNA, 19 bp, Mus musculus
  siRNA target sequence for Galc (NM_008079.1,1378-1396).
cagcagagacttcatttta

SEQ ID NO: 593464 - DNA, 19 bp, Mus musculus
  siRNA target sequence for Galc (NM_008079.1,1453-1471).
gaggaggacgagatattta

SEQ ID NO: 593465 - DNA, 19 bp, Mus musculus
  siRNA target sequence for Galc (NM_008079.1,1531-1549).
cccttcccaaccaactaca

SEQ ID NO: 593466 - DNA, 19 bp, Mus musculus
  siRNA target sequence for Galc (NM_008079.1,1569-1587).
gtacccactttttagtgaa

SEQ ID NO: 593467 - DNA, 19 bp, Mus musculus
  siRNA target sequence for Galc (NM_008079.1,1613-1631).
gcgtgtttgagtactacat

SEQ ID NO: 593468 - DNA, 19 bp, Mus musculus
  siRNA target sequence for Galc (NM_008079.1,1615-1633).
gtgtttgagtactacatga

SEQ ID NO: 593469 - DNA, 19 bp, Mus musculus
  siRNA target sequence for Galc (NM_008079.1,1617-1635).
gtttgagtactacatgaat

SEQ ID NO: 593470 - DNA, 19 bp, Mus musculus
  siRNA target sequence for Galc (NM_008079.1,1675-1693).
ctcaaccaacgacctatta

SEQ ID NO: 593471 - DNA, 19 bp, Mus musculus
  siRNA target sequence for Galc (NM_008079.1,1705-1723).
gacgcttccagcacaatca

SEQ ID NO: 593472 - DNA, 19 bp, Mus musculus
  siRNA target sequence for Galc (NM_008079.1,1707-1725).
cgcttccagcacaatcagt

SEQ ID NO: 593473 - DNA, 19 bp, Mus musculus
  siRNA target sequence for Galc (NM_008079.1,1759-1777).
gtgcagtgcgatgtttata

SEQ ID NO: 593474 - DNA, 19 bp, Mus musculus
  siRNA target sequence for Galc (NM_008079.1,1761-1779).
gcagtgcgatgtttatata

SEQ ID NO: 593475 - DNA, 19 bp, Mus musculus
  siRNA target sequence for Galc (NM_008079.1,1828-1846).
ggtggaatcttgattagaa

SEQ ID NO: 593476 - DNA, 19 bp, Mus musculus
  siRNA target sequence for Galc (NM_008079.1,1908-1926).
gggtggatggataacgtat

SEQ ID NO: 593477 - DNA, 19 bp, Mus musculus
  siRNA target sequence for Galc (NM_008079.1,1912-1930).
ggatggataacgtatgctt

SEQ ID NO: 593478 - DNA, 19 bp, Mus musculus
  siRNA target sequence for Galc (NM_008079.1,1941-1959).
ggacgttacagctaaacga

SEQ ID NO: 593479 - DNA, 19 bp, Mus musculus
  siRNA target sequence for Galc (NM_008079.1,1942-1960).
gacgttacagctaaacgat

SEQ ID NO: 593480 - DNA, 19 bp, Mus musculus
  siRNA target sequence for Galc (NM_008079.1,1967-1985).
cactcaccttaggcattaa

SEQ ID NO: 593481 - DNA, 19 bp, Mus musculus
  siRNA target sequence for Galc (NM_008079.1,1987-2005).
ggttatttcgcctttggta

SEQ ID NO: 593482 - DNA, 19 bp, Mus musculus
  siRNA target sequence for Galc (NM_008079.1,1988-2006).
gttatttcgcctttggtat

SEQ ID NO: 593483 - DNA, 19 bp, Mus musculus
  siRNA target sequence for Galc (NM_008079.1,2013-2031).
cggcacgatcctatggaaa

SEQ ID NO: 593484 - DNA, 19 bp, Mus musculus
  siRNA target sequence for Galc (NM_008079.1,2015-2033).
gcacgatcctatggaaaaa

SEQ ID NO: 593485 - DNA, 19 bp, Mus musculus
  siRNA target sequence for Treh (NM_021481.1,365-383).
gaagatctcggatgctaat

SEQ ID NO: 593486 - DNA, 19 bp, Mus musculus
  siRNA target sequence for Treh (NM_021481.1,399-417).
gaggagctacacaagatct

SEQ ID NO: 593487 - DNA, 19 bp, Mus musculus
  siRNA target sequence for Treh (NM_021481.1,465-483).
gagaggtcctccctaatct

SEQ ID NO: 593488 - DNA, 19 bp, Mus musculus
  siRNA target sequence for Treh (NM_021481.1,472-490).
cctccctaatctactcaaa

SEQ ID NO: 593489 - DNA, 19 bp, Mus musculus
  siRNA target sequence for Treh (NM_021481.1,487-505).
caaagcaccccttcattgt

SEQ ID NO: 593490 - DNA, 19 bp, Mus musculus
  siRNA target sequence for Treh (NM_021481.1,516-534).
cgctttgttgaattctact

SEQ ID NO: 593491 - DNA, 19 bp, Mus musculus
  siRNA target sequence for Treh (NM_021481.1,646-664).
ccaacggtggacgcatata

SEQ ID NO: 593492 - DNA, 19 bp, Mus musculus
  siRNA target sequence for Treh (NM_021481.1,647-665).
caacggtggacgcatatat

SEQ ID NO: 593493 - DNA, 19 bp, Mus musculus
  siRNA target sequence for Treh (NM_021481.1,652-670).
gtggacgcatatattacct

SEQ ID NO: 593494 - DNA, 19 bp, Mus musculus
  siRNA target sequence for Treh (NM_021481.1,701-719).
catgatggatcgatatgta

SEQ ID NO: 593495 - DNA, 19 bp, Mus musculus
  siRNA target sequence for Treh (NM_021481.1,712-730).
gatatgtagctcataccaa

SEQ ID NO: 593496 - DNA, 19 bp, Mus musculus
  siRNA target sequence for Treh (NM_021481.1,740-758).
cttccttcaggagaatatt

SEQ ID NO: 593497 - DNA, 19 bp, Mus musculus
  siRNA target sequence for Treh (NM_021481.1,822-840).
ggacaaagctatgtcttaa

SEQ ID NO: 593498 - DNA, 19 bp, Mus musculus
  siRNA target sequence for Treh (NM_021481.1,823-841).
gacaaagctatgtcttaaa

SEQ ID NO: 593499 - DNA, 19 bp, Mus musculus
  siRNA target sequence for Treh (NM_021481.1,1027-1045).
gcatccgaaccagcaaaat

SEQ ID NO: 593500 - DNA, 19 bp, Mus musculus
  siRNA target sequence for Treh (NM_021481.1,1089-1107).
ctgatgagtaacttctact

SEQ ID NO: 593501 - DNA, 19 bp, Mus musculus
  siRNA target sequence for Treh (NM_021481.1,1204-1222).
gtgcctggtttgactatga

SEQ ID NO: 593502 - DNA, 19 bp, Mus musculus
  siRNA target sequence for Treh (NM_021481.1,1346-1364).
cttgacctaccaatatgga

SEQ ID NO: 593503 - DNA, 19 bp, Mus musculus
  siRNA target sequence for Treh (NM_021481.1,1546-1564).
cgatgtttgagaagtatga

SEQ ID NO: 593504 - DNA, 19 bp, Mus musculus
  siRNA target sequence for Adck5 (NM_172960.1,690-708).
ccaggcactccctaatgaa

SEQ ID NO: 593505 - DNA, 19 bp, Mus musculus
  siRNA target sequence for Adck5 (NM_172960.1,695-713).
cactccctaatgaactctt

SEQ ID NO: 593506 - DNA, 19 bp, Mus musculus
  siRNA target sequence for Adck5 (NM_172960.1,785-803).
gcactgatgtagctgtaaa

SEQ ID NO: 593507 - DNA, 19 bp, Mus musculus
  siRNA target sequence for Adck5 (NM_172960.1,957-975).
gaatgagggccgaaatgct

SEQ ID NO: 593508 - DNA, 19 bp, Mus musculus
  siRNA target sequence for Adck5 (NM_172960.1,983-1001).
gtgctcaggagctaaagca

SEQ ID NO: 593509 - DNA, 19 bp, Mus musculus
  siRNA target sequence for Adck5 (NM_172960.1,1059-1077).
gacagctgacttctgtaat

SEQ ID NO: 593510 - DNA, 19 bp, Mus musculus
  siRNA target sequence for Adck5 (NM_172960.1,1079-1097).
gctgtaaggtgaatgacat

SEQ ID NO: 593511 - DNA, 19 bp, Mus musculus
  siRNA target sequence for Adck5 (NM_172960.1,1157-1175).
cctttgctgaacagatctt

SEQ ID NO: 593512 - DNA, 19 bp, Mus musculus
  siRNA target sequence for Adck5 (NM_172960.1,1494-1512).
ggcccgtgaacactttgat

SEQ ID NO: 593513 - DNA, 19 bp, Mus musculus
  siRNA target sequence for Adck5 (NM_172960.1,1555-1573).
ctagtgctgcgaaacatca

SEQ ID NO: 593514 - DNA, 19 bp, Mus musculus
  siRNA target sequence for Adck5 (NM_172960.1,1725-1743).
ctgggaggcattaaagttt

SEQ ID NO: 593515 - DNA, 19 bp, Mus musculus
  siRNA target sequence for Adck5 (NM_172960.1,1752-1770).
cctgaggctggaaatccta

SEQ ID NO: 593516 - DNA, 19 bp, Mus musculus
  siRNA target sequence for AV071179 (NM_031180.1,29-47).
ccggggaatgaatggattt

SEQ ID NO: 593517 - DNA, 19 bp, Mus musculus
  siRNA target sequence for AV071179 (NM_031180.1,32-50).
gggaatgaatggattttct

SEQ ID NO: 593518 - DNA, 19 bp, Mus musculus
  siRNA target sequence for AV071179 (NM_031180.1,70-88).
cacacgctctaggaaaaca

SEQ ID NO: 593519 - DNA, 19 bp, Mus musculus
  siRNA target sequence for AV071179 (NM_031180.1,118-136).
cgtgctgtctgcgtttgtt

SEQ ID NO: 593520 - DNA, 19 bp, Mus musculus
  siRNA target sequence for AV071179 (NM_031180.1,162-180).
ccggagacgggaaagcaat

SEQ ID NO: 593521 - DNA, 19 bp, Mus musculus
  siRNA target sequence for AV071179 (NM_031180.1,219-237).
gtcagctgttcctctatga

SEQ ID NO: 593522 - DNA, 19 bp, Mus musculus
  siRNA target sequence for AV071179 (NM_031180.1,265-283).
cgttgggaccggagcattt

SEQ ID NO: 593523 - DNA, 19 bp, Mus musculus
  siRNA target sequence for AV071179 (NM_031180.1,270-288).
ggaccggagcatttcaagt

SEQ ID NO: 593524 - DNA, 19 bp, Mus musculus
  siRNA target sequence for AV071179 (NM_031180.1,382-400).
cactgacagttacatcttt

SEQ ID NO: 593525 - DNA, 19 bp, Mus musculus
  siRNA target sequence for AV071179 (NM_031180.1,441-459).
ctttttatcagttctcaat

SEQ ID NO: 593526 - DNA, 19 bp, Mus musculus
  siRNA target sequence for AV071179 (NM_031180.1,460-478).
ctcctggccacggttgttt

SEQ ID NO: 593527 - DNA, 19 bp, Mus musculus
  siRNA target sequence for AV071179 (NM_031180.1,470-488).
cggttgtttcccaatggaa

SEQ ID NO: 593528 - DNA, 19 bp, Mus musculus
  siRNA target sequence for AV071179 (NM_031180.1,475-493).
gtttcccaatggaacagta

SEQ ID NO: 593529 - DNA, 19 bp, Mus musculus
  siRNA target sequence for AV071179 (NM_031180.1,536-554).
ctggactcgctggtactta

SEQ ID NO: 593530 - DNA, 19 bp, Mus musculus
  siRNA target sequence for AV071179 (NM_031180.1,556-574).
gaatatcgagcccattgtt

SEQ ID NO: 593531 - DNA, 19 bp, Mus musculus
  siRNA target sequence for AV071179 (NM_031180.1,601-619).
gacgctccaggaagaatat

SEQ ID NO: 593532 - DNA, 19 bp, Mus musculus
  siRNA target sequence for AV071179 (NM_031180.1,614-632).
gaatatgggggctggaaaa

SEQ ID NO: 593533 - DNA, 19 bp, Mus musculus
  siRNA target sequence for AV071179 (NM_031180.1,627-645).
ggaaaaatgcaactatgat

SEQ ID NO: 593534 - DNA, 19 bp, Mus musculus
  siRNA target sequence for AV071179 (NM_031180.1,628-646).
gaaaaatgcaactatgata

SEQ ID NO: 593535 - DNA, 19 bp, Mus musculus
  siRNA target sequence for AV071179 (NM_031180.1,685-703).
ctttggagaccgtgtcaaa

SEQ ID NO: 593536 - DNA, 19 bp, Mus musculus
  siRNA target sequence for AV071179 (NM_031180.1,692-710).
gaccgtgtcaaatattgga

SEQ ID NO: 593537 - DNA, 19 bp, Mus musculus
  siRNA target sequence for AV071179 (NM_031180.1,694-712).
ccgtgtcaaatattggatt

SEQ ID NO: 593538 - DNA, 19 bp, Mus musculus
  siRNA target sequence for AV071179 (NM_031180.1,695-713).
cgtgtcaaatattggatta

SEQ ID NO: 593539 - DNA, 19 bp, Mus musculus
  siRNA target sequence for AV071179 (NM_031180.1,698-716).
gtcaaatattggattacaa

SEQ ID NO: 593540 - DNA, 19 bp, Mus musculus
  siRNA target sequence for AV071179 (NM_031180.1,834-852).
cgaaagtgtggcataacta

SEQ ID NO: 593541 - DNA, 19 bp, Mus musculus
  siRNA target sequence for AV071179 (NM_031180.1,843-861).
ggcataactacgacaaaaa

SEQ ID NO: 593542 - DNA, 19 bp, Mus musculus
  siRNA target sequence for AV071179 (NM_031180.1,898-916).
cttggggtcccattggata

SEQ ID NO: 593543 - DNA, 19 bp, Mus musculus
  siRNA target sequence for AV071179 (NM_031180.1,1200-1218).
ggattaaactggaatacga

SEQ ID NO: 593544 - DNA, 19 bp, Mus musculus
  siRNA target sequence for AV071179 (NM_031180.1,1201-1219).
gattaaactggaatacgat

SEQ ID NO: 593545 - DNA, 19 bp, Mus musculus
  siRNA target sequence for AV071179 (NM_031180.1,1217-1235).
gatgaccctcaaatcttga

SEQ ID NO: 593546 - DNA, 19 bp, Mus musculus
  siRNA target sequence for AV071179 (NM_031180.1,1249-1267).
ctggttcacagatagctat

SEQ ID NO: 593547 - DNA, 19 bp, Mus musculus
  siRNA target sequence for AV071179 (NM_031180.1,1251-1269).
ggttcacagatagctatat

SEQ ID NO: 593548 - DNA, 19 bp, Mus musculus
  siRNA target sequence for AV071179 (NM_031180.1,1252-1270).
gttcacagatagctatata

SEQ ID NO: 593549 - DNA, 19 bp, Mus musculus
  siRNA target sequence for AV071179 (NM_031180.1,1312-1330).
cctaaaccaggttcttcaa

SEQ ID NO: 593550 - DNA, 19 bp, Mus musculus
  siRNA target sequence for AV071179 (NM_031180.1,1318-1336).
ccaggttcttcaagcaata

SEQ ID NO: 593551 - DNA, 19 bp, Mus musculus
  siRNA target sequence for AV071179 (NM_031180.1,1346-1364).
gaaatccgcgtgtttggtt

SEQ ID NO: 593552 - DNA, 19 bp, Mus musculus
  siRNA target sequence for AV071179 (NM_031180.1,1416-1434).
cccgacgagggctgtttta

SEQ ID NO: 593553 - DNA, 19 bp, Mus musculus
  siRNA target sequence for AV071179 (NM_031180.1,1417-1435).
ccgacgagggctgttttat

SEQ ID NO: 593554 - DNA, 19 bp, Mus musculus
  siRNA target sequence for AV071179 (NM_031180.1,1419-1437).
gacgagggctgttttatgt

SEQ ID NO: 593555 - DNA, 19 bp, Mus musculus
  siRNA target sequence for AV071179 (NM_031180.1,1427-1445).
ctgttttatgtggacttta

SEQ ID NO: 593556 - DNA, 19 bp, Mus musculus
  siRNA target sequence for AV071179 (NM_031180.1,1470-1488).
ccaagtcctcggctcatta

SEQ ID NO: 593557 - DNA, 19 bp, Mus musculus
  siRNA target sequence for AV071179 (NM_031180.1,1476-1494).
cctcggctcattactacaa

SEQ ID NO: 593558 - DNA, 19 bp, Mus musculus
  siRNA target sequence for AV071179 (NM_031180.1,1510-1528).
caacggcttccctttgaaa

SEQ ID NO: 593559 - DNA, 19 bp, Mus musculus
  siRNA target sequence for AV071179 (NM_031180.1,1550-1568).
ggtcggttcccctgtgatt

SEQ ID NO: 593560 - DNA, 19 bp, Mus musculus
  siRNA target sequence for AV071179 (NM_031180.1,1551-1569).
gtcggttcccctgtgattt

SEQ ID NO: 593561 - DNA, 19 bp, Mus musculus
  siRNA target sequence for AV071179 (NM_031180.1,1632-1650).
ccgatcctcacctgtatgt

SEQ ID NO: 593562 - DNA, 19 bp, Mus musculus
  siRNA target sequence for AV071179 (NM_031180.1,1634-1652).
gatcctcacctgtatgtgt

SEQ ID NO: 593563 - DNA, 19 bp, Mus musculus
  siRNA target sequence for AV071179 (NM_031180.1,1727-1745).
gattatgtgagcatcaaaa

SEQ ID NO: 593564 - DNA, 19 bp, Mus musculus
  siRNA target sequence for AV071179 (NM_031180.1,1738-1756).
catcaaaaaacgagttgaa

SEQ ID NO: 593565 - DNA, 19 bp, Mus musculus
  siRNA target sequence for AV071179 (NM_031180.1,1751-1769).
gttgaaatgttggcaaaaa

SEQ ID NO: 593566 - DNA, 19 bp, Mus musculus
  siRNA target sequence for AV071179 (NM_031180.1,1754-1772).
gaaatgttggcaaaaatga

SEQ ID NO: 593567 - DNA, 19 bp, Mus musculus
  siRNA target sequence for AV071179 (NM_031180.1,1823-1841).
ggcaatctgtccaaagtta

SEQ ID NO: 593568 - DNA, 19 bp, Mus musculus
  siRNA target sequence for AV071179 (NM_031180.1,1824-1842).
gcaatctgtccaaagttaa

SEQ ID NO: 593569 - DNA, 19 bp, Mus musculus
  siRNA target sequence for AV071179 (NM_031180.1,1838-1856).
gttaacagacaagtgttaa

SEQ ID NO: 593570 - DNA, 19 bp, Mus musculus
  siRNA target sequence for AV071179 (NM_031180.1,1850-1868).
gtgttaaggtactataggt

SEQ ID NO: 593571 - DNA, 19 bp, Mus musculus
  siRNA target sequence for AV071179 (NM_031180.1,1968-1986).
gtggggggtggctaaacat

SEQ ID NO: 593572 - DNA, 19 bp, Mus musculus
  siRNA target sequence for AV071179 (NM_031180.1,1971-1989).
gggggtggctaaacatgaa

SEQ ID NO: 593573 - DNA, 19 bp, Mus musculus
  siRNA target sequence for AV071179 (NM_031180.1,2082-2100).
ggctgagtgacatgtacaa

SEQ ID NO: 593574 - DNA, 19 bp, Mus musculus
  siRNA target sequence for AV071179 (NM_031180.1,2095-2113).
gtacaaccgcacgagtaat

SEQ ID NO: 593575 - DNA, 19 bp, Mus musculus
  siRNA target sequence for AV071179 (NM_031180.1,2158-2176).
ggtctggcacctctatgat

SEQ ID NO: 593576 - DNA, 19 bp, Mus musculus
  siRNA target sequence for AV071179 (NM_031180.1,2159-2177).
gtctggcacctctatgata

SEQ ID NO: 593577 - DNA, 19 bp, Mus musculus
  siRNA target sequence for AV071179 (NM_031180.1,2168-2186).
ctctatgataggcagtata

SEQ ID NO: 593578 - DNA, 19 bp, Mus musculus
  siRNA target sequence for AV071179 (NM_031180.1,2282-2300).
cgcttcctccagtttgaga

SEQ ID NO: 593579 - DNA, 19 bp, Mus musculus
  siRNA target sequence for AV071179 (NM_031180.1,2283-2301).
gcttcctccagtttgagat

SEQ ID NO: 593580 - DNA, 19 bp, Mus musculus
  siRNA target sequence for AV071179 (NM_031180.1,2312-2330).
gcagatccgctcttcaaga

SEQ ID NO: 593581 - DNA, 19 bp, Mus musculus
  siRNA target sequence for AV071179 (NM_031180.1,2336-2354).
gactatccatcggttatga

SEQ ID NO: 593582 - DNA, 19 bp, Mus musculus
  siRNA target sequence for AV071179 (NM_031180.1,2342-2360).
ccatcggttatgaaggaat

SEQ ID NO: 593583 - DNA, 19 bp, Mus musculus
  siRNA target sequence for AV071179 (NM_031180.1,2343-2361).
catcggttatgaaggaata

SEQ ID NO: 593584 - DNA, 19 bp, Mus musculus
  siRNA target sequence for AV071179 (NM_031180.1,2346-2364).
cggttatgaaggaatacat

SEQ ID NO: 593585 - DNA, 19 bp, Mus musculus
  siRNA target sequence for AV071179 (NM_031180.1,2459-2477).
gcactgaaccacttcacta

SEQ ID NO: 593586 - DNA, 19 bp, Mus musculus
  siRNA target sequence for AV071179 (NM_031180.1,2475-2493).
ctacgaggttcgtgataca

SEQ ID NO: 593587 - DNA, 19 bp, Mus musculus
  siRNA target sequence for AV071179 (NM_031180.1,2478-2496).
cgaggttcgtgatacacaa

SEQ ID NO: 593588 - DNA, 19 bp, Mus musculus
  siRNA target sequence for AV071179 (NM_031180.1,2682-2700).
ctctagaggatgatcagat

SEQ ID NO: 593589 - DNA, 19 bp, Mus musculus
  siRNA target sequence for AV071179 (NM_031180.1,2693-2711).
gatcagatccgaaagtact

SEQ ID NO: 593590 - DNA, 19 bp, Mus musculus
  siRNA target sequence for AV071179 (NM_031180.1,2696-2714).
cagatccgaaagtactact

SEQ ID NO: 593591 - DNA, 19 bp, Mus musculus
  siRNA target sequence for AV071179 (NM_031180.1,2707-2725).
gtactacttggagaagtat

SEQ ID NO: 593592 - DNA, 19 bp, Mus musculus
  siRNA target sequence for AV071179 (NM_031180.1,2731-2749).
ggaggctctgaaagcatat

SEQ ID NO: 593593 - DNA, 19 bp, Mus musculus
  siRNA target sequence for AV071179 (NM_031180.1,2775-2793).
gctactatgcattcaaact

SEQ ID NO: 593594 - DNA, 19 bp, Mus musculus
  siRNA target sequence for AV071179 (NM_031180.1,2792-2810).
ctgactgaagagaaatcta

SEQ ID NO: 593595 - DNA, 19 bp, Mus musculus
  siRNA target sequence for AV071179 (NM_031180.1,2813-2831).
cctagatttggatttttca

SEQ ID NO: 593596 - DNA, 19 bp, Mus musculus
  siRNA target sequence for AV071179 (NM_031180.1,2939-2957).
gacacagactgcaccattt

SEQ ID NO: 593597 - DNA, 19 bp, Mus musculus
  siRNA target sequence for AV071179 (NM_031180.1,2947-2965).
ctgcaccatttgctcattt

SEQ ID NO: 593598 - DNA, 19 bp, Mus musculus
  siRNA target sequence for AV071179 (NM_031180.1,2961-2979).
catttctcgtggagaagaa

SEQ ID NO: 593599 - DNA, 19 bp, Mus musculus
  siRNA target sequence for AV071179 (NM_031180.1,3028-3046).
gctatccatcaccgttttt

SEQ ID NO: 593600 - DNA, 19 bp, Mus musculus
  siRNA target sequence for AV071179 (NM_031180.1,3033-3051).
ccatcaccgtttttcatca

SEQ ID NO: 593601 - DNA, 19 bp, Mus musculus
  siRNA target sequence for AV071179 (NM_031180.1,3034-3052).
catcaccgtttttcatcat

SEQ ID NO: 593602 - DNA, 19 bp, Mus musculus
  siRNA target sequence for Kl (NM_013823.1,1649-1667).
ctgacccgaatgtctatct

SEQ ID NO: 593603 - DNA, 19 bp, Mus musculus
  siRNA target sequence for Kl (NM_013823.1,1651-1669).
gacccgaatgtctatctgt

SEQ ID NO: 593604 - DNA, 19 bp, Mus musculus
  siRNA target sequence for Kl (NM_013823.1,1670-1688).
gggatgtgcatcacagtaa

SEQ ID NO: 593605 - DNA, 19 bp, Mus musculus
  siRNA target sequence for Kl (NM_013823.1,1681-1699).
cacagtaagaggcttatta

SEQ ID NO: 593606 - DNA, 19 bp, Mus musculus
  siRNA target sequence for Kl (NM_013823.1,1683-1701).
cagtaagaggcttattaaa

SEQ ID NO: 593607 - DNA, 19 bp, Mus musculus
  siRNA target sequence for Kl (NM_013823.1,1685-1703).
gtaagaggcttattaaagt

SEQ ID NO: 593608 - DNA, 19 bp, Mus musculus
  siRNA target sequence for Kl (NM_013823.1,1753-1771).
gccatccggcctcagataa

SEQ ID NO: 593609 - DNA, 19 bp, Mus musculus
  siRNA target sequence for Kl (NM_013823.1,1758-1776).
ccggcctcagataacctta

SEQ ID NO: 593610 - DNA, 19 bp, Mus musculus
  siRNA target sequence for Kl (NM_013823.1,1761-1779).
gcctcagataaccttactt

SEQ ID NO: 593611 - DNA, 19 bp, Mus musculus
  siRNA target sequence for Kl (NM_013823.1,1841-1859).
gtaaccagacccaagtgaa

SEQ ID NO: 593612 - DNA, 19 bp, Mus musculus
  siRNA target sequence for Kl (NM_013823.1,1965-1983).
gccacatgcccttgcaaaa

SEQ ID NO: 593613 - DNA, 19 bp, Mus musculus
  siRNA target sequence for Kl (NM_013823.1,2028-2046).
ctacgcaaacctgtgtttt

SEQ ID NO: 593614 - DNA, 19 bp, Mus musculus
  siRNA target sequence for Kl (NM_013823.1,2031-2049).
cgcaaacctgtgttttaaa

SEQ ID NO: 593615 - DNA, 19 bp, Mus musculus
  siRNA target sequence for Kl (NM_013823.1,2033-2051).
caaacctgtgttttaaaga

SEQ ID NO: 593616 - DNA, 19 bp, Mus musculus
  siRNA target sequence for Kl (NM_013823.1,2156-2174).
ggcatctgtacgatgacaa

SEQ ID NO: 593617 - DNA, 19 bp, Mus musculus
  siRNA target sequence for Kl (NM_013823.1,2236-2254).
gcctgccctttctctcaaa

SEQ ID NO: 593618 - DNA, 19 bp, Mus musculus
  siRNA target sequence for Kl (NM_013823.1,2240-2258).
gccctttctctcaaaatga

SEQ ID NO: 593619 - DNA, 19 bp, Mus musculus
  siRNA target sequence for Kl (NM_013823.1,2249-2267).
ctcaaaatgacaaagaagt

SEQ ID NO: 593620 - DNA, 19 bp, Mus musculus
  siRNA target sequence for Kl (NM_013823.1,2301-2319).
gctggcagagcctattttt

SEQ ID NO: 593621 - DNA, 19 bp, Mus musculus
  siRNA target sequence for Kl (NM_013823.1,2304-2322).
ggcagagcctatttttggt

SEQ ID NO: 593622 - DNA, 19 bp, Mus musculus
  siRNA target sequence for Kl (NM_013823.1,2305-2323).
gcagagcctatttttggtt

SEQ ID NO: 593623 - DNA, 19 bp, Mus musculus
  siRNA target sequence for Kl (NM_013823.1,2384-2402).
cctatttcaccgaagatga

SEQ ID NO: 593624 - DNA, 19 bp, Mus musculus
  siRNA target sequence for Kl (NM_013823.1,2385-2403).
ctatttcaccgaagatgaa

SEQ ID NO: 593625 - DNA, 19 bp, Mus musculus
  siRNA target sequence for Kl (NM_013823.1,2434-2452).
ctggcggtgagtcattaca

SEQ ID NO: 593626 - DNA, 19 bp, Mus musculus
  siRNA target sequence for Kl (NM_013823.1,2479-2497).
gaggatccgatgaaataca

SEQ ID NO: 593627 - DNA, 19 bp, Mus musculus
  siRNA target sequence for Kl (NM_013823.1,2485-2503).
ccgatgaaatacaacgatt

SEQ ID NO: 593628 - DNA, 19 bp, Mus musculus
  siRNA target sequence for Kl (NM_013823.1,2486-2504).
cgatgaaatacaacgatta

SEQ ID NO: 593629 - DNA, 19 bp, Mus musculus
  siRNA target sequence for Kl (NM_013823.1,2518-2536).
gagatgactgacatcacat

SEQ ID NO: 593630 - DNA, 19 bp, Mus musculus
  siRNA target sequence for Kl (NM_013823.1,2613-2631).
cggagacctcccgatgtat

SEQ ID NO: 593631 - DNA, 19 bp, Mus musculus
  siRNA target sequence for Kl (NM_013823.1,2615-2633).
gagacctcccgatgtatgt

SEQ ID NO: 593632 - DNA, 19 bp, Mus musculus
  siRNA target sequence for Kl (NM_013823.1,2617-2635).
gacctcccgatgtatgtga

SEQ ID NO: 593633 - DNA, 19 bp, Mus musculus
  siRNA target sequence for Kl (NM_013823.1,2756-2774).
gctactttgcgtattcact

SEQ ID NO: 593634 - DNA, 19 bp, Mus musculus
  siRNA target sequence for Kl (NM_013823.1,2757-2775).
ctactttgcgtattcactt

SEQ ID NO: 593635 - DNA, 19 bp, Mus musculus
  siRNA target sequence for Kl (NM_013823.1,2789-2807).
ctcccaagtctggctttta

SEQ ID NO: 593636 - DNA, 19 bp, Mus musculus
  siRNA target sequence for Kl (NM_013823.1,2796-2814).
gtctggcttttatcgatat

SEQ ID NO: 593637 - DNA, 19 bp, Mus musculus
  siRNA target sequence for Kl (NM_013823.1,2809-2827).
cgatatgctgcgaatcagt

SEQ ID NO: 593638 - DNA, 19 bp, Mus musculus
  siRNA target sequence for Kl (NM_013823.1,2810-2828).
gatatgctgcgaatcagtt

SEQ ID NO: 593639 - DNA, 19 bp, Mus musculus
  siRNA target sequence for Kl (NM_013823.1,2830-2848).
gagcccaaaccatctatga

SEQ ID NO: 593640 - DNA, 19 bp, Mus musculus
  siRNA target sequence for Kl (NM_013823.1,2839-2857).
ccatctatgaaacattaca

SEQ ID NO: 593641 - DNA, 19 bp, Mus musculus
  siRNA target sequence for Lctl (NM_145835.1,528-546).
cctgtgacagctactataa

SEQ ID NO: 593642 - DNA, 19 bp, Mus musculus
  siRNA target sequence for Lctl (NM_145835.1,584-602).
gtcagccactaccgatttt

SEQ ID NO: 593643 - DNA, 19 bp, Mus musculus
  siRNA target sequence for Lctl (NM_145835.1,639-657).
gagctgaacaggtgaacaa

SEQ ID NO: 593644 - DNA, 19 bp, Mus musculus
  siRNA target sequence for Lctl (NM_145835.1,774-792).
ggtggcagaatgtgagtat

SEQ ID NO: 593645 - DNA, 19 bp, Mus musculus
  siRNA target sequence for Lctl (NM_145835.1,796-814).
ccgatacttcagtgactat

SEQ ID NO: 593646 - DNA, 19 bp, Mus musculus
  siRNA target sequence for Lctl (NM_145835.1,875-893).
cctcggacaatggtagaaa

SEQ ID NO: 593647 - DNA, 19 bp, Mus musculus
  siRNA target sequence for Lctl (NM_145835.1,876-894).
ctcggacaatggtagaaaa

SEQ ID NO: 593648 - DNA, 19 bp, Mus musculus
  siRNA target sequence for Lctl (NM_145835.1,880-898).
gacaatggtagaaaaaggt

SEQ ID NO: 593649 - DNA, 19 bp, Mus musculus
  siRNA target sequence for Lctl (NM_145835.1,882-900).
caatggtagaaaaaggtta

SEQ ID NO: 593650 - DNA, 19 bp, Mus musculus
  siRNA target sequence for Lctl (NM_145835.1,934-952).
ccagggcactggcctatat

SEQ ID NO: 593651 - DNA, 19 bp, Mus musculus
  siRNA target sequence for Lctl (NM_145835.1,956-974).
gctgcacaccatatcatta

SEQ ID NO: 593652 - DNA, 19 bp, Mus musculus
  siRNA target sequence for Lctl (NM_145835.1,988-1006).
ggcttggcattcttataat

SEQ ID NO: 593653 - DNA, 19 bp, Mus musculus
  siRNA target sequence for Lctl (NM_145835.1,989-1007).
gcttggcattcttataata

SEQ ID NO: 593654 - DNA, 19 bp, Mus musculus
  siRNA target sequence for Lctl (NM_145835.1,990-1008).
cttggcattcttataataa

SEQ ID NO: 593655 - DNA, 19 bp, Mus musculus
  siRNA target sequence for Lctl (NM_145835.1,1081-1099).
cgacaaccccgacgatatt

SEQ ID NO: 593656 - DNA, 19 bp, Mus musculus
  siRNA target sequence for Lctl (NM_145835.1,1102-1120).
ggctgctgagcgataccta

SEQ ID NO: 593657 - DNA, 19 bp, Mus musculus
  siRNA target sequence for Lctl (NM_145835.1,1107-1125).
ctgagcgatacctacagtt

SEQ ID NO: 593658 - DNA, 19 bp, Mus musculus
  siRNA target sequence for Lctl (NM_145835.1,1184-1202).
gaccacattggaacaaaga

SEQ ID NO: 593659 - DNA, 19 bp, Mus musculus
  siRNA target sequence for Lctl (NM_145835.1,1289-1307).
ggcctgggccattttacca

SEQ ID NO: 593660 - DNA, 19 bp, Mus musculus
  siRNA target sequence for Lctl (NM_145835.1,1311-1329).
gatacatcactcaaaggaa

SEQ ID NO: 593661 - DNA, 19 bp, Mus musculus
  siRNA target sequence for Lctl (NM_145835.1,1357-1375).
ccagaatgaccgtgactta

SEQ ID NO: 593662 - DNA, 19 bp, Mus musculus
  siRNA target sequence for Lctl (NM_145835.1,1409-1427).
ggatccccatggctctatt

SEQ ID NO: 593663 - DNA, 19 bp, Mus musculus
  siRNA target sequence for Lctl (NM_145835.1,1440-1458).
gattcaggaggcttctcaa

SEQ ID NO: 593664 - DNA, 19 bp, Mus musculus
  siRNA target sequence for Lctl (NM_145835.1,1477-1495).
cggtgaccctcccatatat

SEQ ID NO: 593665 - DNA, 19 bp, Mus musculus
  siRNA target sequence for Lctl (NM_145835.1,1487-1505).
cccatatatgtgacagaaa

SEQ ID NO: 593666 - DNA, 19 bp, Mus musculus
  siRNA target sequence for Lctl (NM_145835.1,1613-1631).
gatataaaagggtatactt

SEQ ID NO: 593667 - DNA, 19 bp, Mus musculus
  siRNA target sequence for Lctl (NM_145835.1,1663-1681).
gaaaggctatgcagataaa

SEQ ID NO: 593668 - DNA, 19 bp, Mus musculus
  siRNA target sequence for Lctl (NM_145835.1,1674-1692).
cagataaatatggattcta

SEQ ID NO: 593669 - DNA, 19 bp, Mus musculus
  siRNA target sequence for Lctl (NM_145835.1,1686-1704).
gattctactatgttgaatt

SEQ ID NO: 593670 - DNA, 19 bp, Mus musculus
  siRNA target sequence for Lctl (NM_145835.1,1798-1816).
ggaaagttggcgtctcaaa

SEQ ID NO: 593671 - DNA, 19 bp, Mus musculus
  siRNA target sequence for Lctl (NM_145835.1,1811-1829).
ctcaaagccttggaaactt

SEQ ID NO: 593672 - DNA, 19 bp, Mus musculus
  siRNA target sequence for Lctl (NM_145835.1,1853-1871).
gccacagagcccttgctta

SEQ ID NO: 593673 - DNA, 19 bp, Mus musculus
  siRNA target sequence for Ung (NM_011677.1,300-318).
ccgtacttcgtcaagctaa

SEQ ID NO: 593674 - DNA, 19 bp, Mus musculus
  siRNA target sequence for Ung (NM_011677.1,301-319).
cgtacttcgtcaagctaat

SEQ ID NO: 593675 - DNA, 19 bp, Mus musculus
  siRNA target sequence for Ung (NM_011677.1,366-384).
ccggagcaggtgttcacat

SEQ ID NO: 593676 - DNA, 19 bp, Mus musculus
  siRNA target sequence for Ung (NM_011677.1,439-457).
cctatcacggacctaatca

SEQ ID NO: 593677 - DNA, 19 bp, Mus musculus
  siRNA target sequence for Ung (NM_011677.1,440-458).
ctatcacggacctaatcaa

SEQ ID NO: 593678 - DNA, 19 bp, Mus musculus
  siRNA target sequence for Ung (NM_011677.1,535-553).
ctacagacatcgatggttt

SEQ ID NO: 593679 - DNA, 19 bp, Mus musculus
  siRNA target sequence for Ung (NM_011677.1,731-749).
cctctggggctcttatgct

SEQ ID NO: 593680 - DNA, 19 bp, Mus musculus
  siRNA target sequence for Neil1 (NM_028347.1,50-68).
catgtaaggggctggtatt

SEQ ID NO: 593681 - DNA, 19 bp, Mus musculus
  siRNA target sequence for Neil1 (NM_028347.1,106-124).
ccggaggtgccctttgaga

SEQ ID NO: 593682 - DNA, 19 bp, Mus musculus
  siRNA target sequence for Neil1 (NM_028347.1,132-150).
ctaccacatctcagcttta

SEQ ID NO: 593683 - DNA, 19 bp, Mus musculus
  siRNA target sequence for Neil1 (NM_028347.1,284-302).
gccacgcccatctacgttt

SEQ ID NO: 593684 - DNA, 19 bp, Mus musculus
  siRNA target sequence for Neil1 (NM_028347.1,289-307).
gcccatctacgtttttaca

SEQ ID NO: 593685 - DNA, 19 bp, Mus musculus
  siRNA target sequence for Neil1 (NM_028347.1,291-309).
ccatctacgtttttacaca

SEQ ID NO: 593686 - DNA, 19 bp, Mus musculus
  siRNA target sequence for Neil1 (NM_028347.1,332-350).
ccctttgcttcgtagacat

SEQ ID NO: 593687 - DNA, 19 bp, Mus musculus
  siRNA target sequence for Neil1 (NM_028347.1,576-594).
gaaggctcgtacagttcta

SEQ ID NO: 593688 - DNA, 19 bp, Mus musculus
  siRNA target sequence for Neil1 (NM_028347.1,875-893).
ggggcagatcccaaaaaaa

SEQ ID NO: 593689 - DNA, 19 bp, Mus musculus
  siRNA target sequence for Neil1 (NM_028347.1,934-952).
gaggaccttccactttcaa

SEQ ID NO: 593690 - DNA, 19 bp, Mus musculus
  siRNA target sequence for Neil1 (NM_028347.1,984-1002).
gaagcaccctcctaagaga

SEQ ID NO: 593691 - DNA, 19 bp, Mus musculus
  siRNA target sequence for Neil1 (NM_028347.1,987-1005).
gcaccctcctaagagaata

SEQ ID NO: 593692 - DNA, 19 bp, Mus musculus
  siRNA target sequence for Neil1 (NM_028347.1,990-1008).
ccctcctaagagaatagct

SEQ ID NO: 593693 - DNA, 19 bp, Mus musculus
  siRNA target sequence for Neil1 (NM_028347.1,1106-1124).
gcagacgcccaaagactat

SEQ ID NO: 593694 - DNA, 19 bp, Mus musculus
  siRNA target sequence for Neil1 (NM_028347.1,1107-1125).
cagacgcccaaagactata

SEQ ID NO: 593695 - DNA, 19 bp, Mus musculus
  siRNA target sequence for Art5 (NM_007491.1,1045-1063).
gctcccgggagctctacat

SEQ ID NO: 593696 - DNA, 19 bp, Mus musculus
  siRNA target sequence for Art5 (NM_007491.1,1208-1226).
ggactctgtccgattagga

SEQ ID NO: 593697 - DNA, 19 bp, Mus musculus
  siRNA target sequence for Art5 (NM_007491.1,1215-1233).
gtccgattaggacagttta

SEQ ID NO: 593698 - DNA, 19 bp, Mus musculus
  siRNA target sequence for Art5 (NM_007491.1,1218-1236).
cgattaggacagtttacct

SEQ ID NO: 593699 - DNA, 19 bp, Mus musculus
  siRNA target sequence for Art5 (NM_007491.1,1289-1307).
caatctaaggacttgtttt

SEQ ID NO: 593700 - DNA, 19 bp, Mus musculus
  siRNA target sequence for Art5 (NM_007491.1,1404-1422).
ggagcccagagcatagtga

SEQ ID NO: 593701 - DNA, 19 bp, Mus musculus
  siRNA target sequence for Bst1 (NM_009763.1,389-407).
cgtgctgtatggcaaagtt

SEQ ID NO: 593702 - DNA, 19 bp, Mus musculus
  siRNA target sequence for Bst1 (NM_009763.1,399-417).
ggcaaagttggcgatttct

SEQ ID NO: 593703 - DNA, 19 bp, Mus musculus
  siRNA target sequence for Bst1 (NM_009763.1,400-418).
gcaaagttggcgatttctt

SEQ ID NO: 593704 - DNA, 19 bp, Mus musculus
  siRNA target sequence for Bst1 (NM_009763.1,495-513).
gccgtggactcctattgga

SEQ ID NO: 593705 - DNA, 19 bp, Mus musculus
  siRNA target sequence for Bst1 (NM_009763.1,496-514).
ccgtggactcctattggaa

SEQ ID NO: 593706 - DNA, 19 bp, Mus musculus
  siRNA target sequence for Bst1 (NM_009763.1,497-515).
cgtggactcctattggaaa

SEQ ID NO: 593707 - DNA, 19 bp, Mus musculus
  siRNA target sequence for Bst1 (NM_009763.1,498-516).
gtggactcctattggaaaa

SEQ ID NO: 593708 - DNA, 19 bp, Mus musculus
  siRNA target sequence for Bst1 (NM_009763.1,599-617).
cacgagagggttttttgca

SEQ ID NO: 593709 - DNA, 19 bp, Mus musculus
  siRNA target sequence for Bst1 (NM_009763.1,604-622).
gagggttttttgcagattt

SEQ ID NO: 593710 - DNA, 19 bp, Mus musculus
  siRNA target sequence for Bst1 (NM_009763.1,631-649).
cgtacttacaaaaggataa

SEQ ID NO: 593711 - DNA, 19 bp, Mus musculus
  siRNA target sequence for Bst1 (NM_009763.1,644-662).
ggataaagtcacaagaata

SEQ ID NO: 593712 - DNA, 19 bp, Mus musculus
  siRNA target sequence for Bst1 (NM_009763.1,761-779).
ccagcacagctgtatcaat

SEQ ID NO: 593713 - DNA, 19 bp, Mus musculus
  siRNA target sequence for Bst1 (NM_009763.1,820-838).
gcactcaccccgactgtat

SEQ ID NO: 593714 - DNA, 19 bp, Mus musculus
  siRNA target sequence for Bst1 (NM_009763.1,823-841).
ctcaccccgactgtatcat

SEQ ID NO: 593715 - DNA, 19 bp, Mus musculus
  siRNA target sequence for Bst1 (NM_009763.1,825-843).
caccccgactgtatcatga

SEQ ID NO: 593716 - DNA, 19 bp, Mus musculus
  siRNA target sequence for Bst1 (NM_009763.1,828-846).
cccgactgtatcatgaact

SEQ ID NO: 593717 - DNA, 19 bp, Mus musculus
  siRNA target sequence for Bst1 (NM_009763.1,869-887).
ggagagcgcatctcttcat

SEQ ID NO: 593718 - DNA, 19 bp, Mus musculus
  siRNA target sequence for Bst1 (NM_009763.1,874-892).
gcgcatctcttcatgcaat

SEQ ID NO: 593719 - DNA, 19 bp, Mus musculus
  siRNA target sequence for Bst1 (NM_009763.1,875-893).
cgcatctcttcatgcaata

SEQ ID NO: 593720 - DNA, 19 bp, Mus musculus
  siRNA target sequence for Bst1 (NM_009763.1,897-915).
gacgccagccttctcattt

SEQ ID NO: 593721 - DNA, 19 bp, Mus musculus
  siRNA target sequence for Cd38 (NM_007646.2,143-161).
ggatcgtggtcatacttct

SEQ ID NO: 593722 - DNA, 19 bp, Mus musculus
  siRNA target sequence for Cd38 (NM_007646.2,196-214).
cctaccacgaagcactttt

SEQ ID NO: 593723 - DNA, 19 bp, Mus musculus
  siRNA target sequence for Cd38 (NM_007646.2,200-218).
ccacgaagcacttttctga

SEQ ID NO: 593724 - DNA, 19 bp, Mus musculus
  siRNA target sequence for Cd38 (NM_007646.2,352-370).
gactacgccccacttgtta

SEQ ID NO: 593725 - DNA, 19 bp, Mus musculus
  siRNA target sequence for Cd38 (NM_007646.2,354-372).
ctacgccccacttgttaaa

SEQ ID NO: 593726 - DNA, 19 bp, Mus musculus
  siRNA target sequence for Cd38 (NM_007646.2,359-377).
ccccacttgttaaattggt

SEQ ID NO: 593727 - DNA, 19 bp, Mus musculus
  siRNA target sequence for Cd38 (NM_007646.2,367-385).
gttaaattggtcactcaaa

SEQ ID NO: 593728 - DNA, 19 bp, Mus musculus
  siRNA target sequence for Cd38 (NM_007646.2,376-394).
gtcactcaaaccataccat

SEQ ID NO: 593729 - DNA, 19 bp, Mus musculus
  siRNA target sequence for Cd38 (NM_007646.2,380-398).
ctcaaaccataccatgtaa

SEQ ID NO: 593730 - DNA, 19 bp, Mus musculus
  siRNA target sequence for Cd38 (NM_007646.2,406-424).
ctcttttggagcaaatcca

SEQ ID NO: 593731 - DNA, 19 bp, Mus musculus
  siRNA target sequence for Cd38 (NM_007646.2,427-445).
cacctggcccatcaatata

SEQ ID NO: 593732 - DNA, 19 bp, Mus musculus
  siRNA target sequence for Cd38 (NM_007646.2,429-447).
cctggcccatcaatatact

SEQ ID NO: 593733 - DNA, 19 bp, Mus musculus
  siRNA target sequence for Cd38 (NM_007646.2,430-448).
ctggcccatcaatatactt

SEQ ID NO: 593734 - DNA, 19 bp, Mus musculus
  siRNA target sequence for Cd38 (NM_007646.2,449-467).
ggatccagggaaagatgtt

SEQ ID NO: 593735 - DNA, 19 bp, Mus musculus
  siRNA target sequence for Cd38 (NM_007646.2,489-507).
gggctacattgctgatgat

SEQ ID NO: 593736 - DNA, 19 bp, Mus musculus
  siRNA target sequence for Cd38 (NM_007646.2,516-534).
gtgtggagaccctagtact

SEQ ID NO: 593737 - DNA, 19 bp, Mus musculus
  siRNA target sequence for Cd38 (NM_007646.2,526-544).
cctagtacttctgatatga

SEQ ID NO: 593738 - DNA, 19 bp, Mus musculus
  siRNA target sequence for Cd38 (NM_007646.2,557-575).
gcccacattggagtgaaaa

SEQ ID NO: 593739 - DNA, 19 bp, Mus musculus
  siRNA target sequence for Cd38 (NM_007646.2,581-599).
ccaacaaccctattactgt

SEQ ID NO: 593740 - DNA, 19 bp, Mus musculus
  siRNA target sequence for Cd38 (NM_007646.2,641-659).
gtggtgtggtccaagtgat

SEQ ID NO: 593741 - DNA, 19 bp, Mus musculus
  siRNA target sequence for Cd38 (NM_007646.2,671-689).
ccctccgtgagccatttta

SEQ ID NO: 593742 - DNA, 19 bp, Mus musculus
  siRNA target sequence for Cd38 (NM_007646.2,673-691).
ctccgtgagccattttaca

SEQ ID NO: 593743 - DNA, 19 bp, Mus musculus
  siRNA target sequence for Cd38 (NM_007646.2,706-724).
ggaagtgtggaagtcttta

SEQ ID NO: 593744 - DNA, 19 bp, Mus musculus
  siRNA target sequence for Cd38 (NM_007646.2,710-728).
gtgtggaagtctttagttt

SEQ ID NO: 593745 - DNA, 19 bp, Mus musculus
  siRNA target sequence for Cd38 (NM_007646.2,732-750).
cccaaataaggttcataaa

SEQ ID NO: 593746 - DNA, 19 bp, Mus musculus
  siRNA target sequence for Cd38 (NM_007646.2,734-752).
caaataaggttcataaact

SEQ ID NO: 593747 - DNA, 19 bp, Mus musculus
  siRNA target sequence for Cd38 (NM_007646.2,800-818).
gttcaagctcctccttaaa

SEQ ID NO: 593748 - DNA, 19 bp, Mus musculus
  siRNA target sequence for Cd38 (NM_007646.2,831-849).
gattgtgcagaaaaggaat

SEQ ID NO: 593749 - DNA, 19 bp, Mus musculus
  siRNA target sequence for Cd38 (NM_007646.2,837-855).
gcagaaaaggaatatgata

SEQ ID NO: 593750 - DNA, 19 bp, Mus musculus
  siRNA target sequence for Cd38 (NM_007646.2,876-894).
caggcctgccaggtttctt

SEQ ID NO: 593751 - DNA, 19 bp, Mus musculus
  siRNA target sequence for Cd38 (NM_007646.2,915-933).
gcacccatcgtgtagactt

SEQ ID NO: 593752 - DNA, 19 bp, Mus musculus
  siRNA target sequence for Smpdl3a (NM_020561.1,630-648).
gctattagcactttaaaga

SEQ ID NO: 593753 - DNA, 19 bp, Mus musculus
  siRNA target sequence for Smpdl3a (NM_020561.1,647-665).
gaaaggtggtttttactca

SEQ ID NO: 593754 - DNA, 19 bp, Mus musculus
  siRNA target sequence for Smpdl3a (NM_020561.1,684-702).
ccaggcttgaggatcatta

SEQ ID NO: 593755 - DNA, 19 bp, Mus musculus
  siRNA target sequence for Smpdl3a (NM_020561.1,878-896).
ggcgataaggcagtactat

SEQ ID NO: 593756 - DNA, 19 bp, Mus musculus
  siRNA target sequence for Smpdl3a (NM_020561.1,879-897).
gcgataaggcagtactata

SEQ ID NO: 593757 - DNA, 19 bp, Mus musculus
  siRNA target sequence for Smpdl3a (NM_020561.1,880-898).
cgataaggcagtactataa

SEQ ID NO: 593758 - DNA, 19 bp, Mus musculus
  siRNA target sequence for Smpdl3a (NM_020561.1,881-899).
gataaggcagtactataat

SEQ ID NO: 593759 - DNA, 19 bp, Mus musculus
  siRNA target sequence for Smpdl3a (NM_020561.1,912-930).
gatattttcagaagataca

SEQ ID NO: 593760 - DNA, 19 bp, Mus musculus
  siRNA target sequence for Smpdl3a (NM_020561.1,938-956).
cattgcgggacagttctat

SEQ ID NO: 593761 - DNA, 19 bp, Mus musculus
  siRNA target sequence for Smpdl3a (NM_020561.1,1001-1019).
cgggaatccactcaattct

SEQ ID NO: 593762 - DNA, 19 bp, Mus musculus
  siRNA target sequence for Smpdl3a (NM_020561.1,1042-1060).
caccagtgaaaggagtttt

SEQ ID NO: 593763 - DNA, 19 bp, Mus musculus
  siRNA target sequence for Smpdl3a (NM_020561.1,1083-1101).
ggtgtccgcctatttcagt

SEQ ID NO: 593764 - DNA, 19 bp, Mus musculus
  siRNA target sequence for Smpdl3a (NM_020561.1,1084-1102).
gtgtccgcctatttcagta

SEQ ID NO: 593765 - DNA, 19 bp, Mus musculus
  siRNA target sequence for Smpdl3a (NM_020561.1,1128-1146).
gacatggtgcagtattact

SEQ ID NO: 593766 - DNA, 19 bp, Mus musculus
  siRNA target sequence for Smpdl3a (NM_020561.1,1134-1152).
gtgcagtattacttgaact

SEQ ID NO: 593767 - DNA, 19 bp, Mus musculus
  siRNA target sequence for Smpdl3a (NM_020561.1,1361-1379).
cttacaggtctgtgcaatt

SEQ ID NO: 593768 - DNA, 19 bp, Mus musculus
  siRNA target sequence for Smpdl3a (NM_020561.1,1374-1392).
gcaattatgaatcttgata

SEQ ID NO: 593769 - DNA, 19 bp, Mus musculus
  siRNA target sequence for 5730457F11Rik (NM_172935.2,294-312).
ggcgcctggctttatcgat

SEQ ID NO: 593770 - DNA, 19 bp, Mus musculus
  siRNA target sequence for 5730457F11Rik (NM_172935.2,315-333).
gcagatcaacggtggattt

SEQ ID NO: 593771 - DNA, 19 bp, Mus musculus
  siRNA target sequence for 5730457F11Rik (NM_172935.2,318-336).
gatcaacggtggatttggt

SEQ ID NO: 593772 - DNA, 19 bp, Mus musculus
  siRNA target sequence for 5730457F11Rik (NM_172935.2,440-458).
cctccccaccagaggttta

SEQ ID NO: 593773 - DNA, 19 bp, Mus musculus
  siRNA target sequence for 5730457F11Rik (NM_172935.2,443-461).
ccccaccagaggtttatca

SEQ ID NO: 593774 - DNA, 19 bp, Mus musculus
  siRNA target sequence for 5730457F11Rik (NM_172935.2,445-463).
ccaccagaggtttatcaca

SEQ ID NO: 593775 - DNA, 19 bp, Mus musculus
  siRNA target sequence for 5730457F11Rik (NM_172935.2,446-464).
caccagaggtttatcacaa

SEQ ID NO: 593776 - DNA, 19 bp, Mus musculus
  siRNA target sequence for 5730457F11Rik (NM_172935.2,640-658).
gacaacgtctgcattgtga

SEQ ID NO: 593777 - DNA, 19 bp, Mus musculus
  siRNA target sequence for 5730457F11Rik (NM_172935.2,831-849).
ccgtgacccaggcatagta

SEQ ID NO: 593778 - DNA, 19 bp, Mus musculus
  siRNA target sequence for 5730457F11Rik (NM_172935.2,1044-1062).
ggaggtagatgggctaata

SEQ ID NO: 593779 - DNA, 19 bp, Mus musculus
  siRNA target sequence for Asah1 (NM_019734.1,152-170).
ccttctggaccaacctata

SEQ ID NO: 593780 - DNA, 19 bp, Mus musculus
  siRNA target sequence for Asah1 (NM_019734.1,179-197).
gttccgtggcacaccataa

SEQ ID NO: 593781 - DNA, 19 bp, Mus musculus
  siRNA target sequence for Asah1 (NM_019734.1,183-201).
cgtggcacaccataaatct

SEQ ID NO: 593782 - DNA, 19 bp, Mus musculus
  siRNA target sequence for Asah1 (NM_019734.1,203-221).
gatttaccaccctacaaaa

SEQ ID NO: 593783 - DNA, 19 bp, Mus musculus
  siRNA target sequence for Asah1 (NM_019734.1,252-270).
cagcgttgaggattttagt

SEQ ID NO: 593784 - DNA, 19 bp, Mus musculus
  siRNA target sequence for Asah1 (NM_019734.1,254-272).
gcgttgaggattttagtga

SEQ ID NO: 593785 - DNA, 19 bp, Mus musculus
  siRNA target sequence for Asah1 (NM_019734.1,255-273).
cgttgaggattttagtgaa

SEQ ID NO: 593786 - DNA, 19 bp, Mus musculus
  siRNA target sequence for Asah1 (NM_019734.1,256-274).
gttgaggattttagtgaat

SEQ ID NO: 593787 - DNA, 19 bp, Mus musculus
  siRNA target sequence for Asah1 (NM_019734.1,276-294).
ccataacgagtttagtgaa

SEQ ID NO: 593788 - DNA, 19 bp, Mus musculus
  siRNA target sequence for Asah1 (NM_019734.1,277-295).
cataacgagtttagtgaat

SEQ ID NO: 593789 - DNA, 19 bp, Mus musculus
  siRNA target sequence for Asah1 (NM_019734.1,302-320).
gtgccaagtggaaaactaa

SEQ ID NO: 593790 - DNA, 19 bp, Mus musculus
  siRNA target sequence for Asah1 (NM_019734.1,306-324).
caagtggaaaactaatgaa

SEQ ID NO: 593791 - DNA, 19 bp, Mus musculus
  siRNA target sequence for Asah1 (NM_019734.1,382-400).
ggaaatgaggggaattgca

SEQ ID NO: 593792 - DNA, 19 bp, Mus musculus
  siRNA target sequence for Asah1 (NM_019734.1,391-409).
gggaattgcagatgttact

SEQ ID NO: 593793 - DNA, 19 bp, Mus musculus
  siRNA target sequence for Asah1 (NM_019734.1,412-430).
gattcctctaggagagatt

SEQ ID NO: 593794 - DNA, 19 bp, Mus musculus
  siRNA target sequence for Asah1 (NM_019734.1,416-434).
cctctaggagagattattt

SEQ ID NO: 593795 - DNA, 19 bp, Mus musculus
  siRNA target sequence for Asah1 (NM_019734.1,419-437).
ctaggagagattatttcat

SEQ ID NO: 593796 - DNA, 19 bp, Mus musculus
  siRNA target sequence for Asah1 (NM_019734.1,422-440).
ggagagattatttcattca

SEQ ID NO: 593797 - DNA, 19 bp, Mus musculus
  siRNA target sequence for Asah1 (NM_019734.1,435-453).
cattcaacattttctatga

SEQ ID NO: 593798 - DNA, 19 bp, Mus musculus
  siRNA target sequence for Asah1 (NM_019734.1,457-475).
gtttaccatgtgtacatca

SEQ ID NO: 593799 - DNA, 19 bp, Mus musculus
  siRNA target sequence for Asah1 (NM_019734.1,466-484).
gtgtacatcaatcataact

SEQ ID NO: 593800 - DNA, 19 bp, Mus musculus
  siRNA target sequence for Asah1 (NM_019734.1,468-486).
gtacatcaatcataactga

SEQ ID NO: 593801 - DNA, 19 bp, Mus musculus
  siRNA target sequence for Asah1 (NM_019734.1,599-617).
gtgaatttggacttccaaa

SEQ ID NO: 593802 - DNA, 19 bp, Mus musculus
  siRNA target sequence for Asah1 (NM_019734.1,607-625).
ggacttccaaagaaacaat

SEQ ID NO: 593803 - DNA, 19 bp, Mus musculus
  siRNA target sequence for Asah1 (NM_019734.1,642-660).
ctacaagttttgttggata

SEQ ID NO: 593804 - DNA, 19 bp, Mus musculus
  siRNA target sequence for Asah1 (NM_019734.1,723-741).
gtataaatggtggttatct

SEQ ID NO: 593805 - DNA, 19 bp, Mus musculus
  siRNA target sequence for Asah1 (NM_019734.1,757-775).
gatgttcggaaggaaagat

SEQ ID NO: 593806 - DNA, 19 bp, Mus musculus
  siRNA target sequence for Asah1 (NM_019734.1,790-808).
gtttatcactcgatcagtt

SEQ ID NO: 593807 - DNA, 19 bp, Mus musculus
  siRNA target sequence for Asah1 (NM_019734.1,809-827).
ctggaaaacaccacaagtt

SEQ ID NO: 593808 - DNA, 19 bp, Mus musculus
  siRNA target sequence for Asah1 (NM_019734.1,862-880).
gataatggcgccagtatat

SEQ ID NO: 593809 - DNA, 19 bp, Mus musculus
  siRNA target sequence for Asah1 (NM_019734.1,870-888).
cgccagtatattttatcct

SEQ ID NO: 593810 - DNA, 19 bp, Mus musculus
  siRNA target sequence for Asah1 (NM_019734.1,917-935).
gtgatcacacgggaaagaa

SEQ ID NO: 593811 - DNA, 19 bp, Mus musculus
  siRNA target sequence for Asah1 (NM_019734.1,919-937).
gatcacacgggaaagaaaa

SEQ ID NO: 593812 - DNA, 19 bp, Mus musculus
  siRNA target sequence for Asah1 (NM_019734.1,940-958).
gtctttggatgtctatgaa

SEQ ID NO: 593813 - DNA, 19 bp, Mus musculus
  siRNA target sequence for Asah1 (NM_019734.1,942-960).
ctttggatgtctatgaact

SEQ ID NO: 593814 - DNA, 19 bp, Mus musculus
  siRNA target sequence for Asah1 (NM_019734.1,981-999).
ggtatgtggtacaaaccaa

SEQ ID NO: 593815 - DNA, 19 bp, Mus musculus
  siRNA target sequence for Asah1 (NM_019734.1,989-1007).
gtacaaaccaattatgaca

SEQ ID NO: 593816 - DNA, 19 bp, Mus musculus
  siRNA target sequence for Asah1 (NM_019734.1,1012-1030).
gaaaaacaccttgtttatt

SEQ ID NO: 593817 - DNA, 19 bp, Mus musculus
  siRNA target sequence for Asah1 (NM_019734.1,1046-1064).
ccggccaagaagtgtctaa

SEQ ID NO: 593818 - DNA, 19 bp, Mus musculus
  siRNA target sequence for Asah1 (NM_019734.1,1047-1065).
cggccaagaagtgtctaaa

SEQ ID NO: 593819 - DNA, 19 bp, Mus musculus
  siRNA target sequence for Asah1 (NM_019734.1,1048-1066).
ggccaagaagtgtctaaat

SEQ ID NO: 593820 - DNA, 19 bp, Mus musculus
  siRNA target sequence for Asah1 (NM_019734.1,1050-1068).
ccaagaagtgtctaaatca

SEQ ID NO: 593821 - DNA, 19 bp, Mus musculus
  siRNA target sequence for Asah1 (NM_019734.1,1102-1120).
ctatgatgtcctatcaaca

SEQ ID NO: 593822 - DNA, 19 bp, Mus musculus
  siRNA target sequence for Asah1 (NM_019734.1,1119-1137).
caaaacctgtcctcaacaa

SEQ ID NO: 593823 - DNA, 19 bp, Mus musculus
  siRNA target sequence for Asah1 (NM_019734.1,1135-1153).
caagctgactgtattcaca

SEQ ID NO: 593824 - DNA, 19 bp, Mus musculus
  siRNA target sequence for Asah1 (NM_019734.1,1171-1189).
caaaggtcaatttgaaagt

SEQ ID NO: 593825 - DNA, 19 bp, Mus musculus
  siRNA target sequence for Asah2 (NM_018830.1,544-562).
gtgggaccattgaaaacca

SEQ ID NO: 593826 - DNA, 19 bp, Mus musculus
  siRNA target sequence for Asah2 (NM_018830.1,614-632).
ccagccccctccaattaca

SEQ ID NO: 593827 - DNA, 19 bp, Mus musculus
  siRNA target sequence for Asah2 (NM_018830.1,728-746).
gatgggctatggcaaaaat

SEQ ID NO: 593828 - DNA, 19 bp, Mus musculus
  siRNA target sequence for Asah2 (NM_018830.1,776-794).
gctgttcagccgtgctttt

SEQ ID NO: 593829 - DNA, 19 bp, Mus musculus
  siRNA target sequence for Asah2 (NM_018830.1,777-795).
ctgttcagccgtgctttta

SEQ ID NO: 593830 - DNA, 19 bp, Mus musculus
  siRNA target sequence for Asah2 (NM_018830.1,803-821).
ggatccagatgggtcaaat

SEQ ID NO: 593831 - DNA, 19 bp, Mus musculus
  siRNA target sequence for Asah2 (NM_018830.1,807-825).
ccagatgggtcaaatcgaa

SEQ ID NO: 593832 - DNA, 19 bp, Mus musculus
  siRNA target sequence for Asah2 (NM_018830.1,808-826).
cagatgggtcaaatcgaat

SEQ ID NO: 593833 - DNA, 19 bp, Mus musculus
  siRNA target sequence for Asah2 (NM_018830.1,834-852).
gtgagcgtggaactatgta

SEQ ID NO: 593834 - DNA, 19 bp, Mus musculus
  siRNA target sequence for Asah2 (NM_018830.1,838-856).
gcgtggaactatgtatgat

SEQ ID NO: 593835 - DNA, 19 bp, Mus musculus
  siRNA target sequence for Asah2 (NM_018830.1,914-932).
gtatcgaagagacaatgtt

SEQ ID NO: 593836 - DNA, 19 bp, Mus musculus
  siRNA target sequence for Asah2 (NM_018830.1,962-980).
cccagcagggtttttccaa

SEQ ID NO: 593837 - DNA, 19 bp, Mus musculus
  siRNA target sequence for Asah2 (NM_018830.1,964-982).
cagcagggtttttccaata

SEQ ID NO: 593838 - DNA, 19 bp, Mus musculus
  siRNA target sequence for Asah2 (NM_018830.1,966-984).
gcagggtttttccaatata

SEQ ID NO: 593839 - DNA, 19 bp, Mus musculus
  siRNA target sequence for Asah2 (NM_018830.1,970-988).
ggtttttccaatatacact

SEQ ID NO: 593840 - DNA, 19 bp, Mus musculus
  siRNA target sequence for Asah2 (NM_018830.1,1015-1033).
gcaaccggacctttcagta

SEQ ID NO: 593841 - DNA, 19 bp, Mus musculus
  siRNA target sequence for Asah2 (NM_018830.1,1019-1037).
ccggacctttcagtacata

SEQ ID NO: 593842 - DNA, 19 bp, Mus musculus
  siRNA target sequence for Asah2 (NM_018830.1,1106-1124).
caaaggaaatgttgctaat

SEQ ID NO: 593843 - DNA, 19 bp, Mus musculus
  siRNA target sequence for Asah2 (NM_018830.1,1144-1162).
cctcctcttaccttctgaa

SEQ ID NO: 593844 - DNA, 19 bp, Mus musculus
  siRNA target sequence for Asah2 (NM_018830.1,1169-1187).
gtcagagagagcaaggtat

SEQ ID NO: 593845 - DNA, 19 bp, Mus musculus
  siRNA target sequence for Asah2 (NM_018830.1,1179-1197).
gcaaggtattcttcaaaca

SEQ ID NO: 593846 - DNA, 19 bp, Mus musculus
  siRNA target sequence for Asah2 (NM_018830.1,1275-1293).
caccccgtgagcatgaaca

SEQ ID NO: 593847 - DNA, 19 bp, Mus musculus
  siRNA target sequence for Asah2 (NM_018830.1,1278-1296).
cccgtgagcatgaacaata

SEQ ID NO: 593848 - DNA, 19 bp, Mus musculus
  siRNA target sequence for Asah2 (NM_018830.1,1325-1343).
gggctatgcggcttacctt

SEQ ID NO: 593849 - DNA, 19 bp, Mus musculus
  siRNA target sequence for Asah2 (NM_018830.1,1326-1344).
ggctatgcggcttaccttt

SEQ ID NO: 593850 - DNA, 19 bp, Mus musculus
  siRNA target sequence for Asah2 (NM_018830.1,1327-1345).
gctatgcggcttacctttt

SEQ ID NO: 593851 - DNA, 19 bp, Mus musculus
  siRNA target sequence for Asah2 (NM_018830.1,1328-1346).
ctatgcggcttaccttttt

SEQ ID NO: 593852 - DNA, 19 bp, Mus musculus
  siRNA target sequence for Asah2 (NM_018830.1,1399-1417).
gctttgcttcatcaaatct

SEQ ID NO: 593853 - DNA, 19 bp, Mus musculus
  siRNA target sequence for Asah2 (NM_018830.1,1424-1442).
cgtgtcacccaacattctt

SEQ ID NO: 593854 - DNA, 19 bp, Mus musculus
  siRNA target sequence for Asah2 (NM_018830.1,1528-1546).
gcggacctggacaagacat

SEQ ID NO: 593855 - DNA, 19 bp, Mus musculus
  siRNA target sequence for Asah2 (NM_018830.1,1531-1549).
gacctggacaagacatgtt

SEQ ID NO: 593856 - DNA, 19 bp, Mus musculus
  siRNA target sequence for Asah2 (NM_018830.1,1536-1554).
ggacaagacatgtttgaga

SEQ ID NO: 593857 - DNA, 19 bp, Mus musculus
  siRNA target sequence for Asah2 (NM_018830.1,1569-1587).
ggacggatcatctatcaga

SEQ ID NO: 593858 - DNA, 19 bp, Mus musculus
  siRNA target sequence for Asah2 (NM_018830.1,1570-1588).
gacggatcatctatcagaa

SEQ ID NO: 593859 - DNA, 19 bp, Mus musculus
  siRNA target sequence for Asah2 (NM_018830.1,1697-1715).
cacagtgaagacgtgtaaa

SEQ ID NO: 593860 - DNA, 19 bp, Mus musculus
  siRNA target sequence for Asah2 (NM_018830.1,1755-1773).
ggagtttcgggcctcaata

SEQ ID NO: 593861 - DNA, 19 bp, Mus musculus
  siRNA target sequence for Asah2 (NM_018830.1,1756-1774).
gagtttcgggcctcaatat

SEQ ID NO: 593862 - DNA, 19 bp, Mus musculus
  siRNA target sequence for Asah2 (NM_018830.1,1758-1776).
gtttcgggcctcaatatta

SEQ ID NO: 593863 - DNA, 19 bp, Mus musculus
  siRNA target sequence for Asah2 (NM_018830.1,1762-1780).
cgggcctcaatattacaca

SEQ ID NO: 593864 - DNA, 19 bp, Mus musculus
  siRNA target sequence for Asah2 (NM_018830.1,1786-1804).
ctacggaaggggatccatt

SEQ ID NO: 593865 - DNA, 19 bp, Mus musculus
  siRNA target sequence for Asah2 (NM_018830.1,1919-1937).
gcaaccagatattgttgat

SEQ ID NO: 593866 - DNA, 19 bp, Mus musculus
  siRNA target sequence for Asah2 (NM_018830.1,1932-1950).
gttgatgttcagattgtta

SEQ ID NO: 593867 - DNA, 19 bp, Mus musculus
  siRNA target sequence for Asah2 (NM_018830.1,1974-1992).
gctatccctggggaattaa

SEQ ID NO: 593868 - DNA, 19 bp, Mus musculus
  siRNA target sequence for Asah2 (NM_018830.1,2000-2018).
gtcgggacgaagatttcgt

SEQ ID NO: 593869 - DNA, 19 bp, Mus musculus
  siRNA target sequence for Asah2 (NM_018830.1,2043-2061).
ctttatgggatgaaggata

SEQ ID NO: 593870 - DNA, 19 bp, Mus musculus
  siRNA target sequence for Asah2 (NM_018830.1,2075-2093).
cgcaggtctaagcaatgtt

SEQ ID NO: 593871 - DNA, 19 bp, Mus musculus
  siRNA target sequence for Asah2 (NM_018830.1,2079-2097).
ggtctaagcaatgtttata

SEQ ID NO: 593872 - DNA, 19 bp, Mus musculus
  siRNA target sequence for Asah2 (NM_018830.1,2086-2104).
gcaatgtttatacacatta

SEQ ID NO: 593873 - DNA, 19 bp, Mus musculus
  siRNA target sequence for Asah2 (NM_018830.1,2091-2109).
gtttatacacattacatta

SEQ ID NO: 593874 - DNA, 19 bp, Mus musculus
  siRNA target sequence for Asah2 (NM_018830.1,2138-2156).
gtacgaggcagcatctaca

SEQ ID NO: 593875 - DNA, 19 bp, Mus musculus
  siRNA target sequence for Asah2 (NM_018830.1,2205-2223).
cttgctaaggcaattgcta

SEQ ID NO: 593876 - DNA, 19 bp, Mus musculus
  siRNA target sequence for Asah2 (NM_018830.1,2226-2244).
gacacagtagccaacatga

SEQ ID NO: 593877 - DNA, 19 bp, Mus musculus
  siRNA target sequence for Asah2 (NM_018830.1,2251-2269).
gtcccgagcctccattctt

SEQ ID NO: 593878 - DNA, 19 bp, Mus musculus
  siRNA target sequence for Asah2 (NM_018830.1,2253-2271).
cccgagcctccattcttca

SEQ ID NO: 593879 - DNA, 19 bp, Mus musculus
  siRNA target sequence for Asah2 (NM_018830.1,2258-2276).
gcctccattcttcaaaaat

SEQ ID NO: 593880 - DNA, 19 bp, Mus musculus
  siRNA target sequence for Asah2 (NM_018830.1,2342-2360).
cttgcagccagcaaaacct

SEQ ID NO: 593881 - DNA, 19 bp, Mus musculus
  siRNA target sequence for Asah2 (NM_018830.1,2402-2420).
cgctaacccaaagaattca

SEQ ID NO: 593882 - DNA, 19 bp, Mus musculus
  siRNA target sequence for Asah2 (NM_018830.1,2485-2503).
ggcagataatgtataacga

SEQ ID NO: 593883 - DNA, 19 bp, Mus musculus
  siRNA target sequence for Asah2 (NM_018830.1,2486-2504).
gcagataatgtataacgat

SEQ ID NO: 593884 - DNA, 19 bp, Mus musculus
  siRNA target sequence for Asah2 (NM_018830.1,2548-2566).
gtctgagcaatgcaacaat

SEQ ID NO: 593885 - DNA, 19 bp, Mus musculus
  siRNA target sequence for Asah2 (NM_018830.1,2550-2568).
ctgagcaatgcaacaatat

SEQ ID NO: 593886 - DNA, 19 bp, Mus musculus
  siRNA target sequence for Asah2 (NM_018830.1,2594-2612).
ccctggaatctacagaata

SEQ ID NO: 593887 - DNA, 19 bp, Mus musculus
  siRNA target sequence for Asah2 (NM_018830.1,2595-2613).
cctggaatctacagaataa

SEQ ID NO: 593888 - DNA, 19 bp, Mus musculus
  siRNA target sequence for Asah2 (NM_018830.1,2599-2617).
gaatctacagaataagata

SEQ ID NO: 593889 - DNA, 19 bp, Mus musculus
  siRNA target sequence for Asah2 (NM_018830.1,2606-2624).
cagaataagatattttgga

SEQ ID NO: 593890 - DNA, 19 bp, Mus musculus
  siRNA target sequence for Asah2 (NM_018830.1,2648-2666).
gaaacccgctgtcatacta

SEQ ID NO: 593891 - DNA, 19 bp, Mus musculus
  siRNA target sequence for Asah2 (NM_018830.1,2653-2671).
ccgctgtcatactagcatt

SEQ ID NO: 593892 - DNA, 19 bp, Mus musculus
  siRNA target sequence for Asah2 (NM_018830.1,2654-2672).
cgctgtcatactagcattt

SEQ ID NO: 593893 - DNA, 19 bp, Mus musculus
  siRNA target sequence for Ntan1 (NM_010946.2,181-199).
gtcagtctgttcaacaagt

SEQ ID NO: 593894 - DNA, 19 bp, Mus musculus
  siRNA target sequence for Ntan1 (NM_010946.2,295-313).
ccacttgtcacattgtagt

SEQ ID NO: 593895 - DNA, 19 bp, Mus musculus
  siRNA target sequence for Ntan1 (NM_010946.2,436-454).
ggctggaagtacatcttgt

SEQ ID NO: 593896 - DNA, 19 bp, Mus musculus
  siRNA target sequence for Ntan1 (NM_010946.2,527-545).
ggatgatgacattcactta

SEQ ID NO: 593897 - DNA, 19 bp, Mus musculus
  siRNA target sequence for Ntan1 (NM_010946.2,542-560).
cttagtgacattatgtgta

SEQ ID NO: 593898 - DNA, 19 bp, Mus musculus
  siRNA target sequence for Ntan1 (NM_010946.2,556-574).
gtgtaacagagttaaatga

SEQ ID NO: 593899 - DNA, 19 bp, Mus musculus
  siRNA target sequence for Ntan1 (NM_010946.2,617-635).
cgctgtcaacattaaaact

SEQ ID NO: 593900 - DNA, 19 bp, Mus musculus
  siRNA target sequence for Ntan1 (NM_010946.2,686-704).
gcgtgctgcaagagcttta

SEQ ID NO: 593901 - DNA, 19 bp, Mus musculus
  siRNA target sequence for Ntan1 (NM_010946.2,705-723).
gcaggaggcccaatgatta

SEQ ID NO: 593902 - DNA, 19 bp, Mus musculus
  siRNA target sequence for Ntan1 (NM_010946.2,709-727).
gaggcccaatgattagcat

SEQ ID NO: 593903 - DNA, 19 bp, Mus musculus
  siRNA target sequence for Ntan1 (NM_010946.2,711-729).
ggcccaatgattagcattt

SEQ ID NO: 593904 - DNA, 19 bp, Mus musculus
  siRNA target sequence for Ntan1 (NM_010946.2,712-730).
gcccaatgattagcattta

SEQ ID NO: 593905 - DNA, 19 bp, Mus musculus
  siRNA target sequence for Ntan1 (NM_010946.2,713-731).
cccaatgattagcatttat

SEQ ID NO: 593906 - DNA, 19 bp, Mus musculus
  siRNA target sequence for Ntan1 (NM_010946.2,725-743).
catttatgatgcaaagaca

SEQ ID NO: 593907 - DNA, 19 bp, Mus musculus
  siRNA target sequence for Ntan1 (NM_010946.2,778-796).
cattcccacaagtggattt

SEQ ID NO: 593908 - DNA, 19 bp, Mus musculus
  siRNA target sequence for Ntan1 (NM_010946.2,804-822).
cagcaagatgacaagcaaa

SEQ ID NO: 593909 - DNA, 19 bp, Mus musculus
  siRNA target sequence for 2410004D18Rik (NM_025610.2,154-172).
ggcaaccgagggctacaaa

SEQ ID NO: 593910 - DNA, 19 bp, Mus musculus
  siRNA target sequence for 2410004D18Rik (NM_025610.2,155-173).
gcaaccgagggctacaaaa

SEQ ID NO: 593911 - DNA, 19 bp, Mus musculus
  siRNA target sequence for 2410004D18Rik (NM_025610.2,156-174).
caaccgagggctacaaaat

SEQ ID NO: 593912 - DNA, 19 bp, Mus musculus
  siRNA target sequence for 2410004D18Rik (NM_025610.2,159-177).
ccgagggctacaaaatcct

SEQ ID NO: 593913 - DNA, 19 bp, Mus musculus
  siRNA target sequence for 2410004D18Rik (NM_025610.2,271-289).
gaatgtaaacggtgatatt

SEQ ID NO: 593914 - DNA, 19 bp, Mus musculus
  siRNA target sequence for 2410004D18Rik (NM_025610.2,275-293).
gtaaacggtgatattgaga

SEQ ID NO: 593915 - DNA, 19 bp, Mus musculus
  siRNA target sequence for 2410004D18Rik (NM_025610.2,290-308).
gagatggatgctagtatca

SEQ ID NO: 593916 - DNA, 19 bp, Mus musculus
  siRNA target sequence for 2410004D18Rik (NM_025610.2,358-376).
cgcaaatcccgttaaactt

SEQ ID NO: 593917 - DNA, 19 bp, Mus musculus
  siRNA target sequence for 2410004D18Rik (NM_025610.2,378-396).
cacggcttgttatggaaaa

SEQ ID NO: 593918 - DNA, 19 bp, Mus musculus
  siRNA target sequence for 2410004D18Rik (NM_025610.2,380-398).
cggcttgttatggaaaaga

SEQ ID NO: 593919 - DNA, 19 bp, Mus musculus
  siRNA target sequence for 2410004D18Rik (NM_025610.2,618-636).
ctactggggggattgtcaa

SEQ ID NO: 593920 - DNA, 19 bp, Mus musculus
  siRNA target sequence for 2410004D18Rik (NM_025610.2,621-639).
ctggggggattgtcaataa

SEQ ID NO: 593921 - DNA, 19 bp, Mus musculus
  siRNA target sequence for 2410004D18Rik (NM_025610.2,624-642).
gggggattgtcaataaaat

SEQ ID NO: 593922 - DNA, 19 bp, Mus musculus
  siRNA target sequence for 2410004D18Rik (NM_025610.2,627-645).
ggattgtcaataaaatggt

SEQ ID NO: 593923 - DNA, 19 bp, Mus musculus
  siRNA target sequence for 2410004D18Rik (NM_025610.2,678-696).
ctggaggttacgcagataa

SEQ ID NO: 593924 - DNA, 19 bp, Mus musculus
  siRNA target sequence for 2410004D18Rik (NM_025610.2,680-698).
ggaggttacgcagataata

SEQ ID NO: 593925 - DNA, 19 bp, Mus musculus
  siRNA target sequence for 2410004D18Rik (NM_025610.2,681-699).
gaggttacgcagataataa

SEQ ID NO: 593926 - DNA, 19 bp, Mus musculus
  siRNA target sequence for 2410004D18Rik (NM_025610.2,684-702).
gttacgcagataataacct

SEQ ID NO: 593927 - DNA, 19 bp, Mus musculus
  siRNA target sequence for 2410004D18Rik (NM_025610.2,806-824).
gctcagttggcattggatt

SEQ ID NO: 593928 - DNA, 19 bp, Mus musculus
  siRNA target sequence for 2410004D18Rik (NM_025610.2,807-825).
ctcagttggcattggatta

SEQ ID NO: 593929 - DNA, 19 bp, Mus musculus
  siRNA target sequence for 2410004D18Rik (NM_025610.2,815-833).
gcattggattacatgaagt

SEQ ID NO: 593930 - DNA, 19 bp, Mus musculus
  siRNA target sequence for 2410004D18Rik (NM_025610.2,846-864).
gtctaggtggcctcatctt

SEQ ID NO: 593931 - DNA, 19 bp, Mus musculus
  siRNA target sequence for 2410004D18Rik (NM_025610.2,855-873).
gcctcatcttggtcaacaa

SEQ ID NO: 593932 - DNA, 19 bp, Mus musculus
  siRNA target sequence for 2410004D18Rik (NM_025610.2,856-874).
cctcatcttggtcaacaaa

SEQ ID NO: 593933 - DNA, 19 bp, Mus musculus
  siRNA target sequence for 4930485D02Rik (NM_175225.2,400-418).
ggcatctgctgctaaagta

SEQ ID NO: 593934 - DNA, 19 bp, Mus musculus
  siRNA target sequence for 4930485D02Rik (NM_175225.2,495-513).
gctatcattctgaatccaa

SEQ ID NO: 593935 - DNA, 19 bp, Mus musculus
  siRNA target sequence for 4930485D02Rik (NM_175225.2,606-624).
ctgctctggtggaacttga

SEQ ID NO: 593936 - DNA, 19 bp, Mus musculus
  siRNA target sequence for 4930485D02Rik (NM_175225.2,620-638).
cttgaggattctcctttta

SEQ ID NO: 593937 - DNA, 19 bp, Mus musculus
  siRNA target sequence for 4930485D02Rik (NM_175225.2,623-641).
gaggattctccttttacaa

SEQ ID NO: 593938 - DNA, 19 bp, Mus musculus
  siRNA target sequence for 4930485D02Rik (NM_175225.2,645-663).
caggaataggatctaatct

SEQ ID NO: 593939 - DNA, 19 bp, Mus musculus
  siRNA target sequence for 4930485D02Rik (NM_175225.2,647-665).
ggaataggatctaatctaa

SEQ ID NO: 593940 - DNA, 19 bp, Mus musculus
  siRNA target sequence for 4930485D02Rik (NM_175225.2,648-666).
gaataggatctaatctaaa

SEQ ID NO: 593941 - DNA, 19 bp, Mus musculus
  siRNA target sequence for 4930485D02Rik (NM_175225.2,819-837).
gaattcctccctgcttttt

SEQ ID NO: 593942 - DNA, 19 bp, Mus musculus
  siRNA target sequence for 4930485D02Rik (NM_175225.2,897-915).
gcaccatgaccacaagatt

SEQ ID NO: 593943 - DNA, 19 bp, Mus musculus
  siRNA target sequence for 4930485D02Rik (NM_175225.2,966-984).
gggtggaaacagacttcat

SEQ ID NO: 593944 - DNA, 19 bp, Mus musculus
  siRNA target sequence for 4930485D02Rik (NM_175225.2,1063-1081).
ggatcacgaagggaatgtt

SEQ ID NO: 593945 - DNA, 19 bp, Mus musculus
  siRNA target sequence for 4930485D02Rik (NM_175225.2,1102-1120).
gggcttggccttgaaacat

SEQ ID NO: 593946 - DNA, 19 bp, Mus musculus
  siRNA target sequence for 4930485D02Rik (NM_175225.2,1135-1153).
gcaggctgctctttatgga

SEQ ID NO: 593947 - DNA, 19 bp, Mus musculus
  siRNA target sequence for 4930485D02Rik (NM_175225.2,1379-1397).
ctccggtcatgcagatgtt

SEQ ID NO: 593948 - DNA, 19 bp, Mus musculus
  siRNA target sequence for 4930485D02Rik (NM_175225.2,1381-1399).
ccggtcatgcagatgttct

SEQ ID NO: 593949 - DNA, 19 bp, Mus musculus
  siRNA target sequence for 4930485D02Rik (NM_175225.2,1382-1400).
cggtcatgcagatgttctt

SEQ ID NO: 593950 - DNA, 19 bp, Mus musculus
  siRNA target sequence for 4930485D02Rik (NM_175225.2,1407-1425).
ctgactcctcccaagataa

SEQ ID NO: 593951 - DNA, 19 bp, Mus musculus
  siRNA target sequence for 4930485D02Rik (NM_175225.2,1431-1449).
cactgcttgtggaatttct

SEQ ID NO: 593952 - DNA, 19 bp, Mus musculus
  siRNA target sequence for Faah (NM_010173.2,486-504).
ccaactggtacagaagtta

SEQ ID NO: 593953 - DNA, 19 bp, Mus musculus
  siRNA target sequence for Faah (NM_010173.2,701-719).
ccacactgggcttaagttt

SEQ ID NO: 593954 - DNA, 19 bp, Mus musculus
  siRNA target sequence for Faah (NM_010173.2,805-823).
gtcccccagtccatgctaa

SEQ ID NO: 593955 - DNA, 19 bp, Mus musculus
  siRNA target sequence for Faah (NM_010173.2,809-827).
cccagtccatgctaagcta

SEQ ID NO: 593956 - DNA, 19 bp, Mus musculus
  siRNA target sequence for Faah (NM_010173.2,810-828).
ccagtccatgctaagctat

SEQ ID NO: 593957 - DNA, 19 bp, Mus musculus
  siRNA target sequence for Faah (NM_010173.2,1113-1131).
cctggcattgtgcatgaaa

SEQ ID NO: 593958 - DNA, 19 bp, Mus musculus
  siRNA target sequence for Faah (NM_010173.2,1125-1143).
catgaaagccctactttgt

SEQ ID NO: 593959 - DNA, 19 bp, Mus musculus
  siRNA target sequence for Faah (NM_010173.2,1133-1151).
ccctactttgtgaggattt

SEQ ID NO: 593960 - DNA, 19 bp, Mus musculus
  siRNA target sequence for Faah (NM_010173.2,1192-1210).
gaggagatctacagaagtt

SEQ ID NO: 593961 - DNA, 19 bp, Mus musculus
  siRNA target sequence for Faah (NM_010173.2,1217-1235).
cccttcgtgtgggatacta

SEQ ID NO: 593962 - DNA, 19 bp, Mus musculus
  siRNA target sequence for Faah (NM_010173.2,1222-1240).
cgtgtgggatactatgaaa

SEQ ID NO: 593963 - DNA, 19 bp, Mus musculus
  siRNA target sequence for Faah (NM_010173.2,1320-1338).
cacgctggtccccttctta

SEQ ID NO: 593964 - DNA, 19 bp, Mus musculus
  siRNA target sequence for Faah (NM_010173.2,1331-1349).
ccttcttaccaaacaacat

SEQ ID NO: 593965 - DNA, 19 bp, Mus musculus
  siRNA target sequence for Faah (NM_010173.2,1332-1350).
cttcttaccaaacaacata

SEQ ID NO: 593966 - DNA, 19 bp, Mus musculus
  siRNA target sequence for Faah (NM_010173.2,1528-1546).
cggctggcagcctttctca

SEQ ID NO: 593967 - DNA, 19 bp, Mus musculus
  siRNA target sequence for Faah (NM_010173.2,1537-1555).
gcctttctcaacagtatgt

SEQ ID NO: 593968 - DNA, 19 bp, Mus musculus
  siRNA target sequence for Faah (NM_010173.2,1559-1577).
ctcggtcagccgaaaagct

SEQ ID NO: 593969 - DNA, 19 bp, Mus musculus
  siRNA target sequence for Faah (NM_010173.2,1590-1608).
gcatgagattgagatgtat

SEQ ID NO: 593970 - DNA, 19 bp, Mus musculus
  siRNA target sequence for Faah (NM_010173.2,1672-1690).
ggtcctgctctggatttga

SEQ ID NO: 593971 - DNA, 19 bp, Mus musculus
  siRNA target sequence for Faah (NM_010173.2,1799-1817).
cccagatggaacactacaa

SEQ ID NO: 593972 - DNA, 19 bp, Mus musculus
  siRNA target sequence for Faah (NM_010173.2,1800-1818).
ccagatggaacactacaaa

SEQ ID NO: 593973 - DNA, 19 bp, Mus musculus
  siRNA target sequence for Faah (NM_010173.2,1830-1848).
ggatatgtgggacaacatt

SEQ ID NO: 593974 - DNA, 19 bp, Mus musculus
  siRNA target sequence for Faah (NM_010173.2,1955-1973).
ggctgatgacccctgaaaa

SEQ ID NO: 593975 - DNA, 19 bp, Mus musculus
  siRNA target sequence for Ngly1 (NM_021504.2,225-243).
gaacacagcgttttctact

SEQ ID NO: 593976 - DNA, 19 bp, Mus musculus
  siRNA target sequence for Ngly1 (NM_021504.2,228-246).
cacagcgttttctactaga

SEQ ID NO: 593977 - DNA, 19 bp, Mus musculus
  siRNA target sequence for Ngly1 (NM_021504.2,298-316).
gagggagaaacgcatctta

SEQ ID NO: 593978 - DNA, 19 bp, Mus musculus
  siRNA target sequence for Ngly1 (NM_021504.2,302-320).
gagaaacgcatcttatctt

SEQ ID NO: 593979 - DNA, 19 bp, Mus musculus
  siRNA target sequence for Ngly1 (NM_021504.2,308-326).
cgcatcttatctttcctaa

SEQ ID NO: 593980 - DNA, 19 bp, Mus musculus
  siRNA target sequence for Ngly1 (NM_021504.2,361-379).
gatctgattgccatagaga

SEQ ID NO: 593981 - DNA, 19 bp, Mus musculus
  siRNA target sequence for Ngly1 (NM_021504.2,391-409).
ctggacggatccagtaaga

SEQ ID NO: 593982 - DNA, 19 bp, Mus musculus
  siRNA target sequence for Ngly1 (NM_021504.2,544-562).
ggtgattcaaccatcttaa

SEQ ID NO: 593983 - DNA, 19 bp, Mus musculus
  siRNA target sequence for Ngly1 (NM_021504.2,693-711).
gttagataaaggtactaat

SEQ ID NO: 593984 - DNA, 19 bp, Mus musculus
  siRNA target sequence for Ngly1 (NM_021504.2,773-791).
gctgggtgaataacattgt

SEQ ID NO: 593985 - DNA, 19 bp, Mus musculus
  siRNA target sequence for Ngly1 (NM_021504.2,805-823).
ggtggagagactagatcta

SEQ ID NO: 593986 - DNA, 19 bp, Mus musculus
  siRNA target sequence for Ngly1 (NM_021504.2,911-929).
gcaaccgcttcccaagata

SEQ ID NO: 593987 - DNA, 19 bp, Mus musculus
  siRNA target sequence for Ngly1 (NM_021504.2,916-934).
cgcttcccaagatataaca

SEQ ID NO: 593988 - DNA, 19 bp, Mus musculus
  siRNA target sequence for Ngly1 (NM_021504.2,917-935).
gcttcccaagatataacaa

SEQ ID NO: 593989 - DNA, 19 bp, Mus musculus
  siRNA target sequence for Ngly1 (NM_021504.2,973-991).
ggtgaatgggccaattgtt

SEQ ID NO: 593990 - DNA, 19 bp, Mus musculus
  siRNA target sequence for Ngly1 (NM_021504.2,980-998).
gggccaattgttttactct

SEQ ID NO: 593991 - DNA, 19 bp, Mus musculus
  siRNA target sequence for Ngly1 (NM_021504.2,1027-1045).
cgatatgtgtgggattaca

SEQ ID NO: 593992 - DNA, 19 bp, Mus musculus
  siRNA target sequence for Ngly1 (NM_021504.2,1054-1072).
gtttggacagaagtctatt

SEQ ID NO: 593993 - DNA, 19 bp, Mus musculus
  siRNA target sequence for Ngly1 (NM_021504.2,1158-1176).
gaagctttcctatataata

SEQ ID NO: 593994 - DNA, 19 bp, Mus musculus
  siRNA target sequence for Ngly1 (NM_021504.2,1204-1222).
gtcacctggcgatactctt

SEQ ID NO: 593995 - DNA, 19 bp, Mus musculus
  siRNA target sequence for Ngly1 (NM_021504.2,1208-1226).
cctggcgatactcttgtaa

SEQ ID NO: 593996 - DNA, 19 bp, Mus musculus
  siRNA target sequence for Ngly1 (NM_021504.2,1209-1227).
ctggcgatactcttgtaaa

SEQ ID NO: 593997 - DNA, 19 bp, Mus musculus
  siRNA target sequence for Ngly1 (NM_021504.2,1214-1232).
gatactcttgtaaacatga

SEQ ID NO: 593998 - DNA, 19 bp, Mus musculus
  siRNA target sequence for Ngly1 (NM_021504.2,1247-1265).
ggaggaccaaggttaaaga

SEQ ID NO: 593999 - DNA, 19 bp, Mus musculus
  siRNA target sequence for Ngly1 (NM_021504.2,1267-1285).
gagttacttcgagaaacta

SEQ ID NO: 594000 - DNA, 19 bp, Mus musculus
  siRNA target sequence for Ngly1 (NM_021504.2,1269-1287).
gttacttcgagaaactatt

SEQ ID NO: 594001 - DNA, 19 bp, Mus musculus
  siRNA target sequence for Ngly1 (NM_021504.2,1303-1321).
cagagacagctatcattat

SEQ ID NO: 594002 - DNA, 19 bp, Mus musculus
  siRNA target sequence for Ngly1 (NM_021504.2,1307-1325).
gacagctatcattatcaga

SEQ ID NO: 594003 - DNA, 19 bp, Mus musculus
  siRNA target sequence for Ngly1 (NM_021504.2,1309-1327).
cagctatcattatcagaaa

SEQ ID NO: 594004 - DNA, 19 bp, Mus musculus
  siRNA target sequence for Ngly1 (NM_021504.2,1360-1378).
gtggagcttgttgaattta

SEQ ID NO: 594005 - DNA, 19 bp, Mus musculus
  siRNA target sequence for Ngly1 (NM_021504.2,1365-1383).
gcttgttgaatttatatct

SEQ ID NO: 594006 - DNA, 19 bp, Mus musculus
  siRNA target sequence for Ngly1 (NM_021504.2,1483-1501).
ctgttcatcccttctgaaa

SEQ ID NO: 594007 - DNA, 19 bp, Mus musculus
  siRNA target sequence for Ngly1 (NM_021504.2,1521-1539).
gtttcacctccgttatgat

SEQ ID NO: 594008 - DNA, 19 bp, Mus musculus
  siRNA target sequence for Ngly1 (NM_021504.2,1528-1546).
ctccgttatgatattgtga

SEQ ID NO: 594009 - DNA, 19 bp, Mus musculus
  siRNA target sequence for Ngly1 (NM_021504.2,1617-1635).
ggaatccatattcagaaaa

SEQ ID NO: 594010 - DNA, 19 bp, Mus musculus
  siRNA target sequence for Ngly1 (NM_021504.2,1668-1686).
ccgaaaagaaggatcatct

SEQ ID NO: 594011 - DNA, 19 bp, Mus musculus
  siRNA target sequence for Ngly1 (NM_021504.2,1669-1687).
cgaaaagaaggatcatctt

SEQ ID NO: 594012 - DNA, 19 bp, Mus musculus
  siRNA target sequence for Ngly1 (NM_021504.2,1675-1693).
gaaggatcatcttttgctt

SEQ ID NO: 594013 - DNA, 19 bp, Mus musculus
  siRNA target sequence for Ngly1 (NM_021504.2,1715-1733).
gtgggtcagctggtctaaa

SEQ ID NO: 594014 - DNA, 19 bp, Mus musculus
  siRNA target sequence for Ngly1 (NM_021504.2,1718-1736).
ggtcagctggtctaaaagt

SEQ ID NO: 594015 - DNA, 19 bp, Mus musculus
  siRNA target sequence for Ngly1 (NM_021504.2,1721-1739).
cagctggtctaaaagtaga

SEQ ID NO: 594016 - DNA, 19 bp, Mus musculus
  siRNA target sequence for Ngly1 (NM_021504.2,1723-1741).
gctggtctaaaagtagata

SEQ ID NO: 594017 - DNA, 19 bp, Mus musculus
  siRNA target sequence for Ngly1 (NM_021504.2,1744-1762).
gtttccatccgcacaagta

SEQ ID NO: 594018 - DNA, 19 bp, Mus musculus
  siRNA target sequence for Ngly1 (NM_021504.2,1843-1861).
ctacgttcctataatgatt

SEQ ID NO: 594019 - DNA, 19 bp, Mus musculus
  siRNA target sequence for Ngly1 (NM_021504.2,1871-1889).
ccacagaggttacattaga

SEQ ID NO: 594020 - DNA, 19 bp, Mus musculus
  siRNA target sequence for Ngly1 (NM_021504.2,1915-1933).
gacgttgcttggcaacata

SEQ ID NO: 594021 - DNA, 19 bp, Mus musculus
  siRNA target sequence for Ada (NM_007398.2,92-110).
cccagacacccgcattcaa

SEQ ID NO: 594022 - DNA, 19 bp, Mus musculus
  siRNA target sequence for Ada (NM_007398.2,94-112).
cagacacccgcattcaaca

SEQ ID NO: 594023 - DNA, 19 bp, Mus musculus
  siRNA target sequence for Ada (NM_007398.2,111-129).
caaacccaaagtagagtta

SEQ ID NO: 594024 - DNA, 19 bp, Mus musculus
  siRNA target sequence for Ada (NM_007398.2,195-213).
cgccctcccggcagataca

SEQ ID NO: 594025 - DNA, 19 bp, Mus musculus
  siRNA target sequence for Ada (NM_007398.2,197-215).
ccctcccggcagatacagt

SEQ ID NO: 594026 - DNA, 19 bp, Mus musculus
  siRNA target sequence for Ada (NM_007398.2,329-347).
ggatcgcctacgagtttgt

SEQ ID NO: 594027 - DNA, 19 bp, Mus musculus
  siRNA target sequence for Ada (NM_007398.2,686-704).
cctatgagggcgcagtaaa

SEQ ID NO: 594028 - DNA, 19 bp, Mus musculus
  siRNA target sequence for Ada (NM_007398.2,789-807).
gagggtgggacatggttat

SEQ ID NO: 594029 - DNA, 19 bp, Mus musculus
  siRNA target sequence for Ada (NM_007398.2,820-838).
gatgaagctctctacaaca

SEQ ID NO: 594030 - DNA, 19 bp, Mus musculus
  siRNA target sequence for Ada (NM_007398.2,922-940).
gcggttgttcgcttcaaga

SEQ ID NO: 594031 - DNA, 19 bp, Mus musculus
  siRNA target sequence for Ada (NM_007398.2,923-941).
cggttgttcgcttcaagaa

SEQ ID NO: 594032 - DNA, 19 bp, Mus musculus
  siRNA target sequence for Ada (NM_007398.2,924-942).
ggttgttcgcttcaagaat

SEQ ID NO: 594033 - DNA, 19 bp, Mus musculus
  siRNA target sequence for Ada (NM_007398.2,928-946).
gttcgcttcaagaatgata

SEQ ID NO: 594034 - DNA, 19 bp, Mus musculus
  siRNA target sequence for Ada (NM_007398.2,1120-1138).
gaacggctctacagagaat

SEQ ID NO: 594035 - DNA, 19 bp, Mus musculus
  siRNA target sequence for Ada (NM_007398.2,1124-1142).
ggctctacagagaatacca

SEQ ID NO: 594036 - DNA, 19 bp, Mus musculus
  siRNA target sequence for Ampd2 (NM_028779.3,499-517).
cctgcgcacgtctatggat

SEQ ID NO: 594037 - DNA, 19 bp, Mus musculus
  siRNA target sequence for Ampd2 (NM_028779.3,510-528).
ctatggatggcaaatgcaa

SEQ ID NO: 594038 - DNA, 19 bp, Mus musculus
  siRNA target sequence for Ampd2 (NM_028779.3,673-691).
gctggagccagatattctt

SEQ ID NO: 594039 - DNA, 19 bp, Mus musculus
  siRNA target sequence for Ampd2 (NM_028779.3,799-817).
ggtattggaacgggaattt

SEQ ID NO: 594040 - DNA, 19 bp, Mus musculus
  siRNA target sequence for Ampd2 (NM_028779.3,847-865).
gtgtggggtgccattcaca

SEQ ID NO: 594041 - DNA, 19 bp, Mus musculus
  siRNA target sequence for Ampd2 (NM_028779.3,871-889).
cttagacgcagccaaaagt

SEQ ID NO: 594042 - DNA, 19 bp, Mus musculus
  siRNA target sequence for Ampd2 (NM_028779.3,888-906).
gtgtggttcgggcactttt

SEQ ID NO: 594043 - DNA, 19 bp, Mus musculus
  siRNA target sequence for Ampd2 (NM_028779.3,890-908).
gtggttcgggcacttttca

SEQ ID NO: 594044 - DNA, 19 bp, Mus musculus
  siRNA target sequence for Ampd2 (NM_028779.3,1261-1279).
caatggtcccataaagtca

SEQ ID NO: 594045 - DNA, 19 bp, Mus musculus
  siRNA target sequence for Ampd2 (NM_028779.3,1325-1343).
cacgttttgctcaatgaga

SEQ ID NO: 594046 - DNA, 19 bp, Mus musculus
  siRNA target sequence for Ampd2 (NM_028779.3,1374-1392).
cacaccgggacttctacaa

SEQ ID NO: 594047 - DNA, 19 bp, Mus musculus
  siRNA target sequence for Ampd2 (NM_028779.3,1376-1394).
caccgggacttctacaata

SEQ ID NO: 594048 - DNA, 19 bp, Mus musculus
  siRNA target sequence for Ampd2 (NM_028779.3,1553-1571).
ctcactgcctacgacttaa

SEQ ID NO: 594049 - DNA, 19 bp, Mus musculus
  siRNA target sequence for Ampd2 (NM_028779.3,1555-1573).
cactgcctacgacttaagt

SEQ ID NO: 594050 - DNA, 19 bp, Mus musculus
  siRNA target sequence for Ampd2 (NM_028779.3,1557-1575).
ctgcctacgacttaagtgt

SEQ ID NO: 594051 - DNA, 19 bp, Mus musculus
  siRNA target sequence for Ampd2 (NM_028779.3,1592-1610).
catgcggacaggaatacct

SEQ ID NO: 594052 - DNA, 19 bp, Mus musculus
  siRNA target sequence for Ampd2 (NM_028779.3,1602-1620).
ggaatacctttcatcgatt

SEQ ID NO: 594053 - DNA, 19 bp, Mus musculus
  siRNA target sequence for Ampd2 (NM_028779.3,1603-1621).
gaatacctttcatcgattt

SEQ ID NO: 594054 - DNA, 19 bp, Mus musculus
  siRNA target sequence for Ampd2 (NM_028779.3,1609-1627).
ctttcatcgatttgacaaa

SEQ ID NO: 594055 - DNA, 19 bp, Mus musculus
  siRNA target sequence for Ampd2 (NM_028779.3,1613-1631).
catcgatttgacaaattca

SEQ ID NO: 594056 - DNA, 19 bp, Mus musculus
  siRNA target sequence for Ampd2 (NM_028779.3,1659-1677).
ctgttctccgagagatctt

SEQ ID NO: 594057 - DNA, 19 bp, Mus musculus
  siRNA target sequence for Ampd2 (NM_028779.3,1664-1682).
ctccgagagatcttcatta

SEQ ID NO: 594058 - DNA, 19 bp, Mus musculus
  siRNA target sequence for Ampd2 (NM_028779.3,1666-1684).
ccgagagatcttcattaaa

SEQ ID NO: 594059 - DNA, 19 bp, Mus musculus
  siRNA target sequence for Ampd2 (NM_028779.3,1667-1685).
cgagagatcttcattaaaa

SEQ ID NO: 594060 - DNA, 19 bp, Mus musculus
  siRNA target sequence for Ampd2 (NM_028779.3,1830-1848).
gggcagtgaaccacaaagt

SEQ ID NO: 594061 - DNA, 19 bp, Mus musculus
  siRNA target sequence for Ampd2 (NM_028779.3,1995-2013).
cggagctgcacctctttct

SEQ ID NO: 594062 - DNA, 19 bp, Mus musculus
  siRNA target sequence for Ampd2 (NM_028779.3,2014-2032).
ggagcacgtggatggtttt

SEQ ID NO: 594063 - DNA, 19 bp, Mus musculus
  siRNA target sequence for Ampd2 (NM_028779.3,2129-2147).
gcctactacctgtactaca

SEQ ID NO: 594064 - DNA, 19 bp, Mus musculus
  siRNA target sequence for Ampd2 (NM_028779.3,2153-2171).
gctaacatggctatgttga

SEQ ID NO: 594065 - DNA, 19 bp, Mus musculus
  siRNA target sequence for Ampd2 (NM_028779.3,2154-2172).
ctaacatggctatgttgaa

SEQ ID NO: 594066 - DNA, 19 bp, Mus musculus
  siRNA target sequence for Ampd2 (NM_028779.3,2606-2624).
ctgggacccaactatacca

SEQ ID NO: 594067 - DNA, 19 bp, Mus musculus
  siRNA target sequence for Ampd2 (NM_028779.3,2703-2721).
gccaggagctggcacttat

SEQ ID NO: 594068 - DNA, 19 bp, Mus musculus
  siRNA target sequence for Ampd2 (NM_028779.3,2705-2723).
caggagctggcacttatca

SEQ ID NO: 594069 - DNA, 19 bp, Mus musculus
  siRNA target sequence for Ampd2 (NM_028779.3,2724-2742).
cacaggccgtccaaagtga

SEQ ID NO: 594070 - DNA, 19 bp, Mus musculus
  siRNA target sequence for Ampd3 (NM_009667.1,8-26).
gccagttccccaagttgaa

SEQ ID NO: 594071 - DNA, 19 bp, Mus musculus
  siRNA target sequence for Ampd3 (NM_009667.1,10-28).
cagttccccaagttgaaca

SEQ ID NO: 594072 - DNA, 19 bp, Mus musculus
  siRNA target sequence for Ampd3 (NM_009667.1,32-50).
ccgatttggacgaacatgt

SEQ ID NO: 594073 - DNA, 19 bp, Mus musculus
  siRNA target sequence for Ampd3 (NM_009667.1,264-282).
gcagatgccaacacaacaa

SEQ ID NO: 594074 - DNA, 19 bp, Mus musculus
  siRNA target sequence for Ampd3 (NM_009667.1,336-354).
ggttcccggagctacttct

SEQ ID NO: 594075 - DNA, 19 bp, Mus musculus
  siRNA target sequence for Ampd3 (NM_009667.1,337-355).
gttcccggagctacttcta

SEQ ID NO: 594076 - DNA, 19 bp, Mus musculus
  siRNA target sequence for Ampd3 (NM_009667.1,361-379).
gggccagcaccctatgcta

SEQ ID NO: 594077 - DNA, 19 bp, Mus musculus
  siRNA target sequence for Ampd3 (NM_009667.1,362-380).
ggccagcaccctatgctat

SEQ ID NO: 594078 - DNA, 19 bp, Mus musculus
  siRNA target sequence for Ampd3 (NM_009667.1,372-390).
ctatgctatgcctgagtat

SEQ ID NO: 594079 - DNA, 19 bp, Mus musculus
  siRNA target sequence for Ampd3 (NM_009667.1,545-563).
ctcatcagggggaaagtgt

SEQ ID NO: 594080 - DNA, 19 bp, Mus musculus
  siRNA target sequence for Ampd3 (NM_009667.1,669-687).
gcacggaggtgttctcttt

SEQ ID NO: 594081 - DNA, 19 bp, Mus musculus
  siRNA target sequence for Ampd3 (NM_009667.1,796-814).
gatggccccacgaaaacct

SEQ ID NO: 594082 - DNA, 19 bp, Mus musculus
  siRNA target sequence for Ampd3 (NM_009667.1,818-836).
gtcaccggcgactgaactt

SEQ ID NO: 594083 - DNA, 19 bp, Mus musculus
  siRNA target sequence for Ampd3 (NM_009667.1,845-863).
ccaagtttagccttcatga

SEQ ID NO: 594084 - DNA, 19 bp, Mus musculus
  siRNA target sequence for Ampd3 (NM_009667.1,1147-1165).
caccgcttcgacaagttca

SEQ ID NO: 594085 - DNA, 19 bp, Mus musculus
  siRNA target sequence for Ampd3 (NM_009667.1,1200-1218).
ccgggacctgtatctgaaa

SEQ ID NO: 594086 - DNA, 19 bp, Mus musculus
  siRNA target sequence for Ampd3 (NM_009667.1,1201-1219).
cgggacctgtatctgaaaa

SEQ ID NO: 594087 - DNA, 19 bp, Mus musculus
  siRNA target sequence for Ampd3 (NM_009667.1,1282-1300).
gaggacagcaagtaccaat

SEQ ID NO: 594088 - DNA, 19 bp, Mus musculus
  siRNA target sequence for Ampd3 (NM_009667.1,1285-1303).
gacagcaagtaccaatact

SEQ ID NO: 594089 - DNA, 19 bp, Mus musculus
  siRNA target sequence for Ampd3 (NM_009667.1,1446-1464).
gaaactactgccaaacttt

SEQ ID NO: 594090 - DNA, 19 bp, Mus musculus
  siRNA target sequence for Ampd3 (NM_009667.1,1664-1682).
gttactacctgtactacat

SEQ ID NO: 594091 - DNA, 19 bp, Mus musculus
  siRNA target sequence for Ampd3 (NM_009667.1,1798-1816).
ctgacggcagacaacattt

SEQ ID NO: 594092 - DNA, 19 bp, Mus musculus
  siRNA target sequence for Ampd3 (NM_009667.1,1995-2013).
cagtttcactacacaaaga

SEQ ID NO: 594093 - DNA, 19 bp, Mus musculus
  siRNA target sequence for Gda (NM_010266.1,205-223).
gagcgacagcggcaaaata

SEQ ID NO: 594094 - DNA, 19 bp, Mus musculus
  siRNA target sequence for Gda (NM_010266.1,214-232).
cggcaaaatagtgtttcta

SEQ ID NO: 594095 - DNA, 19 bp, Mus musculus
  siRNA target sequence for Gda (NM_010266.1,319-337).
catgccaggccttgttgat

SEQ ID NO: 594096 - DNA, 19 bp, Mus musculus
  siRNA target sequence for Gda (NM_010266.1,343-361).
catccatgcccctcagtat

SEQ ID NO: 594097 - DNA, 19 bp, Mus musculus
  siRNA target sequence for Gda (NM_010266.1,397-415).
ggagtggctgaataagtat

SEQ ID NO: 594098 - DNA, 19 bp, Mus musculus
  siRNA target sequence for Gda (NM_010266.1,398-416).
gagtggctgaataagtata

SEQ ID NO: 594099 - DNA, 19 bp, Mus musculus
  siRNA target sequence for Gda (NM_010266.1,402-420).
ggctgaataagtatacatt

SEQ ID NO: 594100 - DNA, 19 bp, Mus musculus
  siRNA target sequence for Gda (NM_010266.1,403-421).
gctgaataagtatacattt

SEQ ID NO: 594101 - DNA, 19 bp, Mus musculus
  siRNA target sequence for Gda (NM_010266.1,464-482).
gtctacactagagttgtta

SEQ ID NO: 594102 - DNA, 19 bp, Mus musculus
  siRNA target sequence for Gda (NM_010266.1,505-523).
caccacggcttgctacttt

SEQ ID NO: 594103 - DNA, 19 bp, Mus musculus
  siRNA target sequence for Gda (NM_010266.1,513-531).
cttgctactttggaacaat

SEQ ID NO: 594104 - DNA, 19 bp, Mus musculus
  siRNA target sequence for Gda (NM_010266.1,547-565).
cctgatccttgcggaaatt

SEQ ID NO: 594105 - DNA, 19 bp, Mus musculus
  siRNA target sequence for Gda (NM_010266.1,548-566).
ctgatccttgcggaaatta

SEQ ID NO: 594106 - DNA, 19 bp, Mus musculus
  siRNA target sequence for Gda (NM_010266.1,557-575).
gcggaaattacagataaat

SEQ ID NO: 594107 - DNA, 19 bp, Mus musculus
  siRNA target sequence for Gda (NM_010266.1,558-576).
cggaaattacagataaatt

SEQ ID NO: 594108 - DNA, 19 bp, Mus musculus
  siRNA target sequence for Gda (NM_010266.1,597-615).
gcaaagtatgcatggattt

SEQ ID NO: 594109 - DNA, 19 bp, Mus musculus
  siRNA target sequence for Gda (NM_010266.1,691-709).
gctgcaaaagaattatcca

SEQ ID NO: 594110 - DNA, 19 bp, Mus musculus
  siRNA target sequence for Gda (NM_010266.1,692-710).
ctgcaaaagaattatccaa

SEQ ID NO: 594111 - DNA, 19 bp, Mus musculus
  siRNA target sequence for Gda (NM_010266.1,731-749).
ccacgctttaccctttctt

SEQ ID NO: 594112 - DNA, 19 bp, Mus musculus
  siRNA target sequence for Gda (NM_010266.1,757-775).
gactctgatgagtgaactt

SEQ ID NO: 594113 - DNA, 19 bp, Mus musculus
  siRNA target sequence for Gda (NM_010266.1,805-823).
catccagagccatataagt

SEQ ID NO: 594114 - DNA, 19 bp, Mus musculus
  siRNA target sequence for Gda (NM_010266.1,808-826).
ccagagccatataagtgaa

SEQ ID NO: 594115 - DNA, 19 bp, Mus musculus
  siRNA target sequence for Gda (NM_010266.1,811-829).
gagccatataagtgaaaat

SEQ ID NO: 594116 - DNA, 19 bp, Mus musculus
  siRNA target sequence for Gda (NM_010266.1,814-832).
ccatataagtgaaaatcgt

SEQ ID NO: 594117 - DNA, 19 bp, Mus musculus
  siRNA target sequence for Gda (NM_010266.1,855-873).
gcttataccctagttacaa

SEQ ID NO: 594118 - DNA, 19 bp, Mus musculus
  siRNA target sequence for Gda (NM_010266.1,856-874).
cttataccctagttacaaa

SEQ ID NO: 594119 - DNA, 19 bp, Mus musculus
  siRNA target sequence for Gda (NM_010266.1,992-1010).
gcacattgtcccaactcta

SEQ ID NO: 594120 - DNA, 19 bp, Mus musculus
  siRNA target sequence for Gda (NM_010266.1,993-1011).
cacattgtcccaactctaa

SEQ ID NO: 594121 - DNA, 19 bp, Mus musculus
  siRNA target sequence for Gda (NM_010266.1,1019-1037).
ctgagcagtggcttactga

SEQ ID NO: 594122 - DNA, 19 bp, Mus musculus
  siRNA target sequence for Gda (NM_010266.1,1043-1061).
cttgaggtcctgaagcata

SEQ ID NO: 594123 - DNA, 19 bp, Mus musculus
  siRNA target sequence for Gda (NM_010266.1,1054-1072).
gaagcataaagtgaagata

SEQ ID NO: 594124 - DNA, 19 bp, Mus musculus
  siRNA target sequence for Gda (NM_010266.1,1091-1109).
gctggtggctactcctatt

SEQ ID NO: 594125 - DNA, 19 bp, Mus musculus
  siRNA target sequence for Gda (NM_010266.1,1153-1171).
cctcttaattaataaggta

SEQ ID NO: 594126 - DNA, 19 bp, Mus musculus
  siRNA target sequence for Gda (NM_010266.1,1229-1247).
caagccctggggcttgata

SEQ ID NO: 594127 - DNA, 19 bp, Mus musculus
  siRNA target sequence for Gda (NM_010266.1,1241-1259).
cttgatagcgagattggaa

SEQ ID NO: 594128 - DNA, 19 bp, Mus musculus
  siRNA target sequence for Gda (NM_010266.1,1248-1266).
gcgagattggaaactttga

SEQ ID NO: 594129 - DNA, 19 bp, Mus musculus
  siRNA target sequence for Gda (NM_010266.1,1249-1267).
cgagattggaaactttgaa

SEQ ID NO: 594130 - DNA, 19 bp, Mus musculus
  siRNA target sequence for Gda (NM_010266.1,1317-1335).
ctcccattgatctgtttta

SEQ ID NO: 594131 - DNA, 19 bp, Mus musculus
  siRNA target sequence for Gda (NM_010266.1,1392-1410).
gagacgaccgaaatattga

SEQ ID NO: 594132 - DNA, 19 bp, Mus musculus
  siRNA target sequence for Gda (NM_010266.1,1428-1446).
gaaagcaggtcgttccatt

SEQ ID NO: 594133 - DNA, 19 bp, Mus musculus
  siRNA target sequence for Atic (NM_026195.1,151-169).
gtctcgcgtctcttggttt

SEQ ID NO: 594134 - DNA, 19 bp, Mus musculus
  siRNA target sequence for Atic (NM_026195.1,247-265).
cagggttccctgaaatgtt

SEQ ID NO: 594135 - DNA, 19 bp, Mus musculus
  siRNA target sequence for Atic (NM_026195.1,267-285).
gggggacgcgtgaaaacct

SEQ ID NO: 594136 - DNA, 19 bp, Mus musculus
  siRNA target sequence for Atic (NM_026195.1,268-286).
ggggacgcgtgaaaacctt

SEQ ID NO: 594137 - DNA, 19 bp, Mus musculus
  siRNA target sequence for Atic (NM_026195.1,308-326).
gatcttggcacgcaacatt

SEQ ID NO: 594138 - DNA, 19 bp, Mus musculus
  siRNA target sequence for Atic (NM_026195.1,342-360).
gacatggccaggcttgatt

SEQ ID NO: 594139 - DNA, 19 bp, Mus musculus
  siRNA target sequence for Atic (NM_026195.1,413-431).
ggcttctccagatgtaact

SEQ ID NO: 594140 - DNA, 19 bp, Mus musculus
  siRNA target sequence for Atic (NM_026195.1,441-459).
gctgttgaacaaattgata

SEQ ID NO: 594141 - DNA, 19 bp, Mus musculus
  siRNA target sequence for Atic (NM_026195.1,462-480).
ggtggcgtgacattactga

SEQ ID NO: 594142 - DNA, 19 bp, Mus musculus
  siRNA target sequence for Atic (NM_026195.1,552-570).
gagatgcacggctctgata

SEQ ID NO: 594143 - DNA, 19 bp, Mus musculus
  siRNA target sequence for Atic (NM_026195.1,622-640).
ctcataccgctcaatacga

SEQ ID NO: 594144 - DNA, 19 bp, Mus musculus
  siRNA target sequence for Atic (NM_026195.1,631-649).
ctcaatacgatgaagcaat

SEQ ID NO: 594145 - DNA, 19 bp, Mus musculus
  siRNA target sequence for Atic (NM_026195.1,633-651).
caatacgatgaagcaattt

SEQ ID NO: 594146 - DNA, 19 bp, Mus musculus
  siRNA target sequence for Atic (NM_026195.1,645-663).
gcaatttcagattacttca

SEQ ID NO: 594147 - DNA, 19 bp, Mus musculus
  siRNA target sequence for Atic (NM_026195.1,780-798).
ggagccccaggattcataa

SEQ ID NO: 594148 - DNA, 19 bp, Mus musculus
  siRNA target sequence for Atic (NM_026195.1,783-801).
gccccaggattcataaact

SEQ ID NO: 594149 - DNA, 19 bp, Mus musculus
  siRNA target sequence for Atic (NM_026195.1,786-804).
ccaggattcataaacttgt

SEQ ID NO: 594150 - DNA, 19 bp, Mus musculus
  siRNA target sequence for Atic (NM_026195.1,937-955).
gagtctgcatggtctatga

SEQ ID NO: 594151 - DNA, 19 bp, Mus musculus
  siRNA target sequence for Atic (NM_026195.1,973-991).
cgcccctggccgttgcata

SEQ ID NO: 594152 - DNA, 19 bp, Mus musculus
  siRNA target sequence for Atic (NM_026195.1,974-992).
gcccctggccgttgcatat

SEQ ID NO: 594153 - DNA, 19 bp, Mus musculus
  siRNA target sequence for Atic (NM_026195.1,1087-1105).
gagaagtgtcggatggtat

SEQ ID NO: 594154 - DNA, 19 bp, Mus musculus
  siRNA target sequence for Atic (NM_026195.1,1224-1242).
ctctttggtcttcgtttaa

SEQ ID NO: 594155 - DNA, 19 bp, Mus musculus
  siRNA target sequence for Atic (NM_026195.1,1260-1278).
ggtgtcgttgacaagtcat

SEQ ID NO: 594156 - DNA, 19 bp, Mus musculus
  siRNA target sequence for Atic (NM_026195.1,1261-1279).
gtgtcgttgacaagtcatt

SEQ ID NO: 594157 - DNA, 19 bp, Mus musculus
  siRNA target sequence for Atic (NM_026195.1,1265-1283).
cgttgacaagtcattattt

SEQ ID NO: 594158 - DNA, 19 bp, Mus musculus
  siRNA target sequence for Atic (NM_026195.1,1276-1294).
cattatttagcaatattgt

SEQ ID NO: 594159 - DNA, 19 bp, Mus musculus
  siRNA target sequence for Atic (NM_026195.1,1345-1363).
ccaccgtcgctgtcaagta

SEQ ID NO: 594160 - DNA, 19 bp, Mus musculus
  siRNA target sequence for Atic (NM_026195.1,1349-1367).
cgtcgctgtcaagtatact

SEQ ID NO: 594161 - DNA, 19 bp, Mus musculus
  siRNA target sequence for Atic (NM_026195.1,1390-1408).
ccaaggatgggcaggttat

SEQ ID NO: 594162 - DNA, 19 bp, Mus musculus
  siRNA target sequence for Atic (NM_026195.1,1425-1443).
cagcagtctcggatacact

SEQ ID NO: 594163 - DNA, 19 bp, Mus musculus
  siRNA target sequence for Atic (NM_026195.1,1458-1476).
ggtgataaggcaaactctt

SEQ ID NO: 594164 - DNA, 19 bp, Mus musculus
  siRNA target sequence for Atic (NM_026195.1,1498-1516).
gagtgctgtccatgaagtt

SEQ ID NO: 594165 - DNA, 19 bp, Mus musculus
  siRNA target sequence for Atic (NM_026195.1,1500-1518).
gtgctgtccatgaagttta

SEQ ID NO: 594166 - DNA, 19 bp, Mus musculus
  siRNA target sequence for Atic (NM_026195.1,1541-1559).
gatctccaatgcgattgat

SEQ ID NO: 594167 - DNA, 19 bp, Mus musculus
  siRNA target sequence for Atic (NM_026195.1,1551-1569).
gcgattgatcagtatgtga

SEQ ID NO: 594168 - DNA, 19 bp, Mus musculus
  siRNA target sequence for Atic (NM_026195.1,1587-1605).
ggcgaagacctggtgaaat

SEQ ID NO: 594169 - DNA, 19 bp, Mus musculus
  siRNA target sequence for Atic (NM_026195.1,1619-1637).
cgaagaggttcctgagtta

SEQ ID NO: 594170 - DNA, 19 bp, Mus musculus
  siRNA target sequence for Atic (NM_026195.1,1691-1709).
cagctccgacgccttcttt

SEQ ID NO: 594171 - DNA, 19 bp, Mus musculus
  siRNA target sequence for Atic (NM_026195.1,1725-1743).
gtggaccgagctaaaagga

SEQ ID NO: 594172 - DNA, 19 bp, Mus musculus
  siRNA target sequence for Atic (NM_026195.1,1763-1781).
cgctccatctggatctact

SEQ ID NO: 594173 - DNA, 19 bp, Mus musculus
  siRNA target sequence for Gch (NM_008102.2,454-472).
gtcctgaatgatgctatat

SEQ ID NO: 594174 - DNA, 19 bp, Mus musculus
  siRNA target sequence for Gch (NM_008102.2,456-474).
cctgaatgatgctatattt

SEQ ID NO: 594175 - DNA, 19 bp, Mus musculus
  siRNA target sequence for Gch (NM_008102.2,502-520).
gtgaaggacatagatatgt

SEQ ID NO: 594176 - DNA, 19 bp, Mus musculus
  siRNA target sequence for Gch (NM_008102.2,594-612).
ccttggtctcagtaaactt

SEQ ID NO: 594177 - DNA, 19 bp, Mus musculus
  siRNA target sequence for Gch (NM_008102.2,610-628).
cttgccaggattgtagaaa

SEQ ID NO: 594178 - DNA, 19 bp, Mus musculus
  siRNA target sequence for Gch (NM_008102.2,613-631).
gccaggattgtagaaatct

SEQ ID NO: 594179 - DNA, 19 bp, Mus musculus
  siRNA target sequence for Gch (NM_008102.2,614-632).
ccaggattgtagaaatcta

SEQ ID NO: 594180 - DNA, 19 bp, Mus musculus
  siRNA target sequence for Gch (NM_008102.2,630-648).
ctacagtagacgactacaa

SEQ ID NO: 594181 - DNA, 19 bp, Mus musculus
  siRNA target sequence for Gch (NM_008102.2,657-675).
gcgcctcaccaaacagatt

SEQ ID NO: 594182 - DNA, 19 bp, Mus musculus
  siRNA target sequence for Gch (NM_008102.2,707-725).
ctggcgttggagtagtgat

SEQ ID NO: 594183 - DNA, 19 bp, Mus musculus
  siRNA target sequence for Gch (NM_008102.2,711-729).
cgttggagtagtgattgaa

SEQ ID NO: 594184 - DNA, 19 bp, Mus musculus
  siRNA target sequence for Gch (NM_008102.2,754-772).
cgaggcgtgcagaaaatga

SEQ ID NO: 594185 - DNA, 19 bp, Mus musculus
  siRNA target sequence for Gch (NM_008102.2,755-773).
gaggcgtgcagaaaatgaa

SEQ ID NO: 594186 - DNA, 19 bp, Mus musculus
  siRNA target sequence for Gch (NM_008102.2,835-853).
gagttcctcacactaatca

SEQ ID NO: 594187 - DNA, 19 bp, Mus musculus
  siRNA target sequence for Allc (NM_053156.1,236-254).
gtttgcgacggatgacttt

SEQ ID NO: 594188 - DNA, 19 bp, Mus musculus
  siRNA target sequence for Allc (NM_053156.1,281-299).
gagcgacagtccaactttt

SEQ ID NO: 594189 - DNA, 19 bp, Mus musculus
  siRNA target sequence for Allc (NM_053156.1,283-301).
gcgacagtccaacttttaa

SEQ ID NO: 594190 - DNA, 19 bp, Mus musculus
  siRNA target sequence for Allc (NM_053156.1,350-368).
cagacgtaagcgaattcca

SEQ ID NO: 594191 - DNA, 19 bp, Mus musculus
  siRNA target sequence for Allc (NM_053156.1,398-416).
gatacagggcattattcgt

SEQ ID NO: 594192 - DNA, 19 bp, Mus musculus
  siRNA target sequence for Allc (NM_053156.1,423-441).
gacgtggacatttcttact

SEQ ID NO: 594193 - DNA, 19 bp, Mus musculus
  siRNA target sequence for Allc (NM_053156.1,426-444).
gtggacatttcttacttct

SEQ ID NO: 594194 - DNA, 19 bp, Mus musculus
  siRNA target sequence for Allc (NM_053156.1,481-499).
cgaacctgagtgaagaaga

SEQ ID NO: 594195 - DNA, 19 bp, Mus musculus
  siRNA target sequence for Allc (NM_053156.1,486-504).
ctgagtgaagaagatacaa

SEQ ID NO: 594196 - DNA, 19 bp, Mus musculus
  siRNA target sequence for Allc (NM_053156.1,495-513).
gaagatacaatgtcaaaca

SEQ ID NO: 594197 - DNA, 19 bp, Mus musculus
  siRNA target sequence for Allc (NM_053156.1,547-565).
cgacgcctgaggagtttga

SEQ ID NO: 594198 - DNA, 19 bp, Mus musculus
  siRNA target sequence for Allc (NM_053156.1,567-585).
gccgttactgagctgaaat

SEQ ID NO: 594199 - DNA, 19 bp, Mus musculus
  siRNA target sequence for Allc (NM_053156.1,610-628).
ccatgtcggagcttaagct

SEQ ID NO: 594200 - DNA, 19 bp, Mus musculus
  siRNA target sequence for Allc (NM_053156.1,611-629).
catgtcggagcttaagcta

SEQ ID NO: 594201 - DNA, 19 bp, Mus musculus
  siRNA target sequence for Allc (NM_053156.1,637-655).
ctgactccagccacaacta

SEQ ID NO: 594202 - DNA, 19 bp, Mus musculus
  siRNA target sequence for Allc (NM_053156.1,646-664).
gccacaactattattttgt

SEQ ID NO: 594203 - DNA, 19 bp, Mus musculus
  siRNA target sequence for Allc (NM_053156.1,647-665).
ccacaactattattttgtt

SEQ ID NO: 594204 - DNA, 19 bp, Mus musculus
  siRNA target sequence for Allc (NM_053156.1,679-697).
gatggactcatataagact

SEQ ID NO: 594205 - DNA, 19 bp, Mus musculus
  siRNA target sequence for Allc (NM_053156.1,685-703).
ctcatataagactcaacat

SEQ ID NO: 594206 - DNA, 19 bp, Mus musculus
  siRNA target sequence for Allc (NM_053156.1,687-705).
catataagactcaacatct

SEQ ID NO: 594207 - DNA, 19 bp, Mus musculus
  siRNA target sequence for Allc (NM_053156.1,789-807).
gacctggtagccattgctt

SEQ ID NO: 594208 - DNA, 19 bp, Mus musculus
  siRNA target sequence for Allc (NM_053156.1,816-834).
gtctgtgtgggatttagta

SEQ ID NO: 594209 - DNA, 19 bp, Mus musculus
  siRNA target sequence for Allc (NM_053156.1,840-858).
cactttggacatccaaata

SEQ ID NO: 594210 - DNA, 19 bp, Mus musculus
  siRNA target sequence for Allc (NM_053156.1,846-864).
ggacatccaaataatatga

SEQ ID NO: 594211 - DNA, 19 bp, Mus musculus
  siRNA target sequence for Allc (NM_053156.1,847-865).
gacatccaaataatatgat

SEQ ID NO: 594212 - DNA, 19 bp, Mus musculus
  siRNA target sequence for Allc (NM_053156.1,935-953).
gttagaagctagtgagaat

SEQ ID NO: 594213 - DNA, 19 bp, Mus musculus
  siRNA target sequence for Allc (NM_053156.1,1006-1024).
ctggagtcatcactcaaat

SEQ ID NO: 594214 - DNA, 19 bp, Mus musculus
  siRNA target sequence for Allc (NM_053156.1,1009-1027).
gagtcatcactcaaattga

SEQ ID NO: 594215 - DNA, 19 bp, Mus musculus
  siRNA target sequence for Allc (NM_053156.1,1026-1044).
gaaattgatacgaagtact

SEQ ID NO: 594216 - DNA, 19 bp, Mus musculus
  siRNA target sequence for Allc (NM_053156.1,1110-1128).
gacatgatcaggcataatt

SEQ ID NO: 594217 - DNA, 19 bp, Mus musculus
  siRNA target sequence for Allc (NM_053156.1,1115-1133).
gatcaggcataattggaat

SEQ ID NO: 594218 - DNA, 19 bp, Mus musculus
  siRNA target sequence for Allc (NM_053156.1,1118-1136).
caggcataattggaatctt

SEQ ID NO: 594219 - DNA, 19 bp, Mus musculus
  siRNA target sequence for Allc (NM_053156.1,1161-1179).
cttccagtcaccaagctaa

SEQ ID NO: 594220 - DNA, 19 bp, Mus musculus
  siRNA target sequence for Allc (NM_053156.1,1175-1193).
gctaattcccaaccaaaat

SEQ ID NO: 594221 - DNA, 19 bp, Mus musculus
  siRNA target sequence for Allc (NM_053156.1,1183-1201).
ccaaccaaaatcacttgtt

SEQ ID NO: 594222 - DNA, 19 bp, Mus musculus
  siRNA target sequence for Allc (NM_053156.1,1232-1250).
catcactcatgccatgatt

SEQ ID NO: 594223 - DNA, 19 bp, Mus musculus
  siRNA target sequence for Allc (NM_053156.1,1237-1255).
ctcatgccatgattaccat

SEQ ID NO: 594224 - DNA, 19 bp, Mus musculus
  siRNA target sequence for Allc (NM_053156.1,1344-1362).
ctgcggttctctcttaaaa

SEQ ID NO: 594225 - DNA, 19 bp, Mus musculus
  siRNA target sequence for Allc (NM_053156.1,1365-1383).
ggattcagggcgaaccttt

SEQ ID NO: 594226 - DNA, 19 bp, Mus musculus
  siRNA target sequence for Dpys (NM_022722.2,113-131).
cacagggacgacttctcat

SEQ ID NO: 594227 - DNA, 19 bp, Mus musculus
  siRNA target sequence for Dpys (NM_022722.2,433-451).
ctcatcgaggcctttgaga

SEQ ID NO: 594228 - DNA, 19 bp, Mus musculus
  siRNA target sequence for Dpys (NM_022722.2,515-533).
ggtggagcgacaaggtaaa

SEQ ID NO: 594229 - DNA, 19 bp, Mus musculus
  siRNA target sequence for Dpys (NM_022722.2,516-534).
gtggagcgacaaggtaaaa

SEQ ID NO: 594230 - DNA, 19 bp, Mus musculus
  siRNA target sequence for Dpys (NM_022722.2,556-574).
cgagataaaggcgttaact

SEQ ID NO: 594231 - DNA, 19 bp, Mus musculus
  siRNA target sequence for Dpys (NM_022722.2,565-583).
ggcgttaactctttcaaga

SEQ ID NO: 594232 - DNA, 19 bp, Mus musculus
  siRNA target sequence for Dpys (NM_022722.2,566-584).
gcgttaactctttcaagat

SEQ ID NO: 594233 - DNA, 19 bp, Mus musculus
  siRNA target sequence for Dpys (NM_022722.2,906-924).
ggtctatggagaaccaatt

SEQ ID NO: 594234 - DNA, 19 bp, Mus musculus
  siRNA target sequence for Dpys (NM_022722.2,909-927).
ctatggagaaccaattgca

SEQ ID NO: 594235 - DNA, 19 bp, Mus musculus
  siRNA target sequence for Dpys (NM_022722.2,1004-1022).
cactgagacccgatccttt

SEQ ID NO: 594236 - DNA, 19 bp, Mus musculus
  siRNA target sequence for Dpys (NM_022722.2,1006-1024).
ctgagacccgatcctttaa

SEQ ID NO: 594237 - DNA, 19 bp, Mus musculus
  siRNA target sequence for Dpys (NM_022722.2,1008-1026).
gagacccgatcctttaaca

SEQ ID NO: 594238 - DNA, 19 bp, Mus musculus
  siRNA target sequence for Dpys (NM_022722.2,1031-1049).
gctttcttatggatctgtt

SEQ ID NO: 594239 - DNA, 19 bp, Mus musculus
  siRNA target sequence for Dpys (NM_022722.2,1112-1130).
ctctagggaaggatgactt

SEQ ID NO: 594240 - DNA, 19 bp, Mus musculus
  siRNA target sequence for Dpys (NM_022722.2,1165-1183).
gacaggatgtcggtgatat

SEQ ID NO: 594241 - DNA, 19 bp, Mus musculus
  siRNA target sequence for Dpys (NM_022722.2,1191-1209).
gggcgtgcacagtggtaaa

SEQ ID NO: 594242 - DNA, 19 bp, Mus musculus
  siRNA target sequence for Dpys (NM_022722.2,1248-1266).
cgcagccaaaatctttaat

SEQ ID NO: 594243 - DNA, 19 bp, Mus musculus
  siRNA target sequence for Dpys (NM_022722.2,1267-1285).
ctttatccgaaaaaaggaa

SEQ ID NO: 594244 - DNA, 19 bp, Mus musculus
  siRNA target sequence for Dpys (NM_022722.2,1344-1362).
gatctcagccaaaactcat

SEQ ID NO: 594245 - DNA, 19 bp, Mus musculus
  siRNA target sequence for Dpys (NM_022722.2,1360-1378).
catcatcaggccgttaact

SEQ ID NO: 594246 - DNA, 19 bp, Mus musculus
  siRNA target sequence for Dpys (NM_022722.2,1363-1381).
catcaggccgttaacttca

SEQ ID NO: 594247 - DNA, 19 bp, Mus musculus
  siRNA target sequence for Dpys (NM_022722.2,1366-1384).
caggccgttaacttcaaca

SEQ ID NO: 594248 - DNA, 19 bp, Mus musculus
  siRNA target sequence for Dpys (NM_022722.2,1409-1427).
gggtgcccctggtgactat

SEQ ID NO: 594249 - DNA, 19 bp, Mus musculus
  siRNA target sequence for Dpys (NM_022722.2,1410-1428).
ggtgcccctggtgactatt

SEQ ID NO: 594250 - DNA, 19 bp, Mus musculus
  siRNA target sequence for Dpys (NM_022722.2,1411-1429).
gtgcccctggtgactattt

SEQ ID NO: 594251 - DNA, 19 bp, Mus musculus
  siRNA target sequence for Dpys (NM_022722.2,1501-1519).
caaccctttgccgaataca

SEQ ID NO: 594252 - DNA, 19 bp, Mus musculus
  siRNA target sequence for Dpys (NM_022722.2,1504-1522).
ccctttgccgaatacattt

SEQ ID NO: 594253 - DNA, 19 bp, Mus musculus
  siRNA target sequence for Dpys (NM_022722.2,1505-1523).
cctttgccgaatacattta

SEQ ID NO: 594254 - DNA, 19 bp, Mus musculus
  siRNA target sequence for Oplah (NM_153122.1,82-100).
cagaagagcgcttccattt

SEQ ID NO: 594255 - DNA, 19 bp, Mus musculus
  siRNA target sequence for Oplah (NM_153122.1,110-128).
ccgtggtggcacctttaca

SEQ ID NO: 594256 - DNA, 19 bp, Mus musculus
  siRNA target sequence for Oplah (NM_153122.1,218-236).
gggcatccgccgaattcta

SEQ ID NO: 594257 - DNA, 19 bp, Mus musculus
  siRNA target sequence for Oplah (NM_153122.1,220-238).
gcatccgccgaattctaga

SEQ ID NO: 594258 - DNA, 19 bp, Mus musculus
  siRNA target sequence for Oplah (NM_153122.1,383-401).
ccgagacctgctgcatatt

SEQ ID NO: 594259 - DNA, 19 bp, Mus musculus
  siRNA target sequence for Oplah (NM_153122.1,1040-1058).
ccgctatgctggagagttt

SEQ ID NO: 594260 - DNA, 19 bp, Mus musculus
  siRNA target sequence for Oplah (NM_153122.1,1042-1060).
gctatgctggagagtttga

SEQ ID NO: 594261 - DNA, 19 bp, Mus musculus
  siRNA target sequence for Oplah (NM_153122.1,1104-1122).
ccacagctggacatcaata

SEQ ID NO: 594262 - DNA, 19 bp, Mus musculus
  siRNA target sequence for Oplah (NM_153122.1,1363-1381).
ccatggaggtcaacagttt

SEQ ID NO: 594263 - DNA, 19 bp, Mus musculus
  siRNA target sequence for Oplah (NM_153122.1,1402-1420).
cagcttcccagctaagtct

SEQ ID NO: 594264 - DNA, 19 bp, Mus musculus
  siRNA target sequence for Oplah (NM_153122.1,1582-1600).
gtatggacactgtgcatat

SEQ ID NO: 594265 - DNA, 19 bp, Mus musculus
  siRNA target sequence for Oplah (NM_153122.1,1758-1776).
caggcccagggcttctcta

SEQ ID NO: 594266 - DNA, 19 bp, Mus musculus
  siRNA target sequence for Oplah (NM_153122.1,1825-1843).
ctgactgtgccctaatggt

SEQ ID NO: 594267 - DNA, 19 bp, Mus musculus
  siRNA target sequence for Oplah (NM_153122.1,1924-1942).
gagagtttggcttcatcat

SEQ ID NO: 594268 - DNA, 19 bp, Mus musculus
  siRNA target sequence for Oplah (NM_153122.1,2035-2053).
gacctccgcatgtggaaaa

SEQ ID NO: 594269 - DNA, 19 bp, Mus musculus
  siRNA target sequence for Oplah (NM_153122.1,2088-2106).
gagactcccgtgtaccttt

SEQ ID NO: 594270 - DNA, 19 bp, Mus musculus
  siRNA target sequence for Oplah (NM_153122.1,2099-2117).
gtaccttttaggagaacta

SEQ ID NO: 594271 - DNA, 19 bp, Mus musculus
  siRNA target sequence for Oplah (NM_153122.1,2140-2158).
ggccctgcctgatcattga

SEQ ID NO: 594272 - DNA, 19 bp, Mus musculus
  siRNA target sequence for Oplah (NM_153122.1,2148-2166).
ctgatcattgacaacaaca

SEQ ID NO: 594273 - DNA, 19 bp, Mus musculus
  siRNA target sequence for Oplah (NM_153122.1,2191-2209).
gccaagcggaggtgattga

SEQ ID NO: 594274 - DNA, 19 bp, Mus musculus
  siRNA target sequence for Oplah (NM_153122.1,2193-2211).
caagcggaggtgattgaga

SEQ ID NO: 594275 - DNA, 19 bp, Mus musculus
  siRNA target sequence for Oplah (NM_153122.1,2215-2233).
gggacatccgcatttctgt

SEQ ID NO: 594276 - DNA, 19 bp, Mus musculus
  siRNA target sequence for Oplah (NM_153122.1,2239-2257).
ccgaggctcccagtatgat

SEQ ID NO: 594277 - DNA, 19 bp, Mus musculus
  siRNA target sequence for Oplah (NM_153122.1,2240-2258).
cgaggctcccagtatgata

SEQ ID NO: 594278 - DNA, 19 bp, Mus musculus
  siRNA target sequence for Oplah (NM_153122.1,2244-2262).
gctcccagtatgatagaca

SEQ ID NO: 594279 - DNA, 19 bp, Mus musculus
  siRNA target sequence for Oplah (NM_153122.1,2350-2368).
ccatctctaccaacatcaa

SEQ ID NO: 594280 - DNA, 19 bp, Mus musculus
  siRNA target sequence for Oplah (NM_153122.1,2511-2529).
ggtgatgtgttgcttagta

SEQ ID NO: 594281 - DNA, 19 bp, Mus musculus
  siRNA target sequence for Oplah (NM_153122.1,2571-2589).
gtcatcacaccggtgtttt

SEQ ID NO: 594282 - DNA, 19 bp, Mus musculus
  siRNA target sequence for Oplah (NM_153122.1,2708-2726).
cgtttttctgtccttcaaa

SEQ ID NO: 594283 - DNA, 19 bp, Mus musculus
  siRNA target sequence for Oplah (NM_153122.1,2921-2939).
ggcctatatgggccatatt

SEQ ID NO: 594284 - DNA, 19 bp, Mus musculus
  siRNA target sequence for Oplah (NM_153122.1,3090-3108).
ggcagcgctgtatttgact

SEQ ID NO: 594285 - DNA, 19 bp, Mus musculus
  siRNA target sequence for Oplah (NM_153122.1,3128-3146).
ggtgtttggcaatctcaat

SEQ ID NO: 594286 - DNA, 19 bp, Mus musculus
  siRNA target sequence for Oplah (NM_153122.1,3148-3166).
cccctcgagccataacact

SEQ ID NO: 594287 - DNA, 19 bp, Mus musculus
  siRNA target sequence for Oplah (NM_153122.1,3165-3183).
ctgtctgctctcatctatt

SEQ ID NO: 594288 - DNA, 19 bp, Mus musculus
  siRNA target sequence for Oplah (NM_153122.1,3202-3220).
gccgtgacatcccacttaa

SEQ ID NO: 594289 - DNA, 19 bp, Mus musculus
  siRNA target sequence for Oplah (NM_153122.1,3233-3251).
ggctcctgtgcaagtcata

SEQ ID NO: 594290 - DNA, 19 bp, Mus musculus
  siRNA target sequence for Oplah (NM_153122.1,3257-3275).
caaaggctccatattggat

SEQ ID NO: 594291 - DNA, 19 bp, Mus musculus
  siRNA target sequence for Oplah (NM_153122.1,3406-3424).
cccgtatgggctactatga

SEQ ID NO: 594292 - DNA, 19 bp, Mus musculus
  siRNA target sequence for Oplah (NM_153122.1,3408-3426).
cgtatgggctactatgaga

SEQ ID NO: 594293 - DNA, 19 bp, Mus musculus
  siRNA target sequence for Oplah (NM_153122.1,3508-3526).
cggacccagagattttgga

SEQ ID NO: 594294 - DNA, 19 bp, Mus musculus
  siRNA target sequence for Oplah (NM_153122.1,3529-3547).
gccggtatccagttatcct

SEQ ID NO: 594295 - DNA, 19 bp, Mus musculus
  siRNA target sequence for Oplah (NM_153122.1,3703-3721).
ctggtacacgtggcttaaa

SEQ ID NO: 594296 - DNA, 19 bp, Mus musculus
  siRNA target sequence for Oplah (NM_153122.1,3706-3724).
gtacacgtggcttaaacct

SEQ ID NO: 594297 - DNA, 19 bp, Mus musculus
  siRNA target sequence for Oplah (NM_153122.1,3722-3740).
cctcctgatcagaaaagat

SEQ ID NO: 594298 - DNA, 19 bp, Mus musculus
  siRNA target sequence for Oplah (NM_153122.1,3894-3912).
cgaggcagtgtgtatgagt

SEQ ID NO: 594299 - DNA, 19 bp, Mus musculus
  siRNA target sequence for Oplah (NM_153122.1,3895-3913).
gaggcagtgtgtatgagta

SEQ ID NO: 594300 - DNA, 19 bp, Mus musculus
  siRNA target sequence for Btd (NM_025295.1,72-90).
gatttatggtctgcattat

SEQ ID NO: 594301 - DNA, 19 bp, Mus musculus
  siRNA target sequence for Btd (NM_025295.1,283-301).
gaacctcgacgtctatgaa

SEQ ID NO: 594302 - DNA, 19 bp, Mus musculus
  siRNA target sequence for Btd (NM_025295.1,329-347).
ggtgtgcagattatagtgt

SEQ ID NO: 594303 - DNA, 19 bp, Mus musculus
  siRNA target sequence for Btd (NM_025295.1,359-377).
ggtatccacggattcaact

SEQ ID NO: 594304 - DNA, 19 bp, Mus musculus
  siRNA target sequence for Btd (NM_025295.1,360-378).
gtatccacggattcaactt

SEQ ID NO: 594305 - DNA, 19 bp, Mus musculus
  siRNA target sequence for Btd (NM_025295.1,365-383).
cacggattcaactttacaa

SEQ ID NO: 594306 - DNA, 19 bp, Mus musculus
  siRNA target sequence for Btd (NM_025295.1,367-385).
cggattcaactttacaaga

SEQ ID NO: 594307 - DNA, 19 bp, Mus musculus
  siRNA target sequence for Btd (NM_025295.1,368-386).
ggattcaactttacaagaa

SEQ ID NO: 594308 - DNA, 19 bp, Mus musculus
  siRNA target sequence for Btd (NM_025295.1,451-469).
ggagccctttcggttcaat

SEQ ID NO: 594309 - DNA, 19 bp, Mus musculus
  siRNA target sequence for Btd (NM_025295.1,529-547).
ggccaatcttggaacgaaa

SEQ ID NO: 594310 - DNA, 19 bp, Mus musculus
  siRNA target sequence for Btd (NM_025295.1,584-602).
gacgggagataccagttta

SEQ ID NO: 594311 - DNA, 19 bp, Mus musculus
  siRNA target sequence for Btd (NM_025295.1,589-607).
gagataccagtttaacaca

SEQ ID NO: 594312 - DNA, 19 bp, Mus musculus
  siRNA target sequence for Btd (NM_025295.1,591-609).
gataccagtttaacacaaa

SEQ ID NO: 594313 - DNA, 19 bp, Mus musculus
  siRNA target sequence for Btd (NM_025295.1,614-632).
gtgttcagcgacaatggaa

SEQ ID NO: 594314 - DNA, 19 bp, Mus musculus
  siRNA target sequence for Btd (NM_025295.1,651-669).
gtaagcacaacctgtactt

SEQ ID NO: 594315 - DNA, 19 bp, Mus musculus
  siRNA target sequence for Btd (NM_025295.1,753-771).
gctttgacatcctattctt

SEQ ID NO: 594316 - DNA, 19 bp, Mus musculus
  siRNA target sequence for Btd (NM_025295.1,890-908).
gccttcggtgtcaacgttt

SEQ ID NO: 594317 - DNA, 19 bp, Mus musculus
  siRNA target sequence for Btd (NM_025295.1,891-909).
ccttcggtgtcaacgtttt

SEQ ID NO: 594318 - DNA, 19 bp, Mus musculus
  siRNA target sequence for Btd (NM_025295.1,965-983).
cctctcaagtccttttggt

SEQ ID NO: 594319 - DNA, 19 bp, Mus musculus
  siRNA target sequence for Btd (NM_025295.1,1000-1018).
ccccaaaggtcaccttata

SEQ ID NO: 594320 - DNA, 19 bp, Mus musculus
  siRNA target sequence for Btd (NM_025295.1,1057-1075).
gacagggaatacaactagt

SEQ ID NO: 594321 - DNA, 19 bp, Mus musculus
  siRNA target sequence for Btd (NM_025295.1,1089-1107).
cccataggaagttcttaaa

SEQ ID NO: 594322 - DNA, 19 bp, Mus musculus
  siRNA target sequence for Btd (NM_025295.1,1170-1188).
ccaagtggaacgtgaatgt

SEQ ID NO: 594323 - DNA, 19 bp, Mus musculus
  siRNA target sequence for Btd (NM_025295.1,1201-1219).
ccactcggaaatgatgtat

SEQ ID NO: 594324 - DNA, 19 bp, Mus musculus
  siRNA target sequence for Btd (NM_025295.1,1206-1224).
cggaaatgatgtatgacaa

SEQ ID NO: 594325 - DNA, 19 bp, Mus musculus
  siRNA target sequence for Btd (NM_025295.1,1287-1305).
gttgccacttactgtatga

SEQ ID NO: 594326 - DNA, 19 bp, Mus musculus
  siRNA target sequence for Btd (NM_025295.1,1366-1384).
gcacggcacctactacatt

SEQ ID NO: 594327 - DNA, 19 bp, Mus musculus
  siRNA target sequence for Btd (NM_025295.1,1369-1387).
cggcacctactacattcaa

SEQ ID NO: 594328 - DNA, 19 bp, Mus musculus
  siRNA target sequence for Btd (NM_025295.1,1370-1388).
ggcacctactacattcaaa

SEQ ID NO: 594329 - DNA, 19 bp, Mus musculus
  siRNA target sequence for Btd (NM_025295.1,1472-1490).
catctgtgggggaacttca

SEQ ID NO: 594330 - DNA, 19 bp, Mus musculus
  siRNA target sequence for Btd (NM_025295.1,1482-1500).
ggaacttcagcactttgta

SEQ ID NO: 594331 - DNA, 19 bp, Mus musculus
  siRNA target sequence for Btd (NM_025295.1,1483-1501).
gaacttcagcactttgtat

SEQ ID NO: 594332 - DNA, 19 bp, Mus musculus
  siRNA target sequence for Btd (NM_025295.1,1560-1578).
gggagaatgaccactattt

SEQ ID NO: 594333 - DNA, 19 bp, Mus musculus
  siRNA target sequence for D16Ertd502e (NM_023175.1,86-104).
cttccattaaatcagataa

SEQ ID NO: 594334 - DNA, 19 bp, Mus musculus
  siRNA target sequence for D16Ertd502e (NM_023175.1,89-107).
ccattaaatcagataacct

SEQ ID NO: 594335 - DNA, 19 bp, Mus musculus
  siRNA target sequence for D16Ertd502e (NM_023175.1,144-162).
gcaaggtgccaacatagtt

SEQ ID NO: 594336 - DNA, 19 bp, Mus musculus
  siRNA target sequence for D16Ertd502e (NM_023175.1,145-163).
caaggtgccaacatagttt

SEQ ID NO: 594337 - DNA, 19 bp, Mus musculus
  siRNA target sequence for D16Ertd502e (NM_023175.1,149-167).
gtgccaacatagtttctct

SEQ ID NO: 594338 - DNA, 19 bp, Mus musculus
  siRNA target sequence for D16Ertd502e (NM_023175.1,174-192).
gtgcttcaattctccatat

SEQ ID NO: 594339 - DNA, 19 bp, Mus musculus
  siRNA target sequence for D16Ertd502e (NM_023175.1,177-195).
cttcaattctccatatgga

SEQ ID NO: 594340 - DNA, 19 bp, Mus musculus
  siRNA target sequence for D16Ertd502e (NM_023175.1,235-253).
gagtccacacaaaagcttt

SEQ ID NO: 594341 - DNA, 19 bp, Mus musculus
  siRNA target sequence for D16Ertd502e (NM_023175.1,384-402).
ccatctgtttgacattgat

SEQ ID NO: 594342 - DNA, 19 bp, Mus musculus
  siRNA target sequence for D16Ertd502e (NM_023175.1,403-421).
gttcctgggaaaattacgt

SEQ ID NO: 594343 - DNA, 19 bp, Mus musculus
  siRNA target sequence for D16Ertd502e (NM_023175.1,411-429).
gaaaattacgtttcaagaa

SEQ ID NO: 594344 - DNA, 19 bp, Mus musculus
  siRNA target sequence for D16Ertd502e (NM_023175.1,521-539).
cggagcttgcacaaatcta

SEQ ID NO: 594345 - DNA, 19 bp, Mus musculus
  siRNA target sequence for D16Ertd502e (NM_023175.1,571-589).
cctggagctttcaatctga

SEQ ID NO: 594346 - DNA, 19 bp, Mus musculus
  siRNA target sequence for D16Ertd502e (NM_023175.1,665-683).
ctcctgctcgggatgacaa

SEQ ID NO: 594347 - DNA, 19 bp, Mus musculus
  siRNA target sequence for D16Ertd502e (NM_023175.1,728-746).
gggggcaggtcctaaccaa

SEQ ID NO: 594348 - DNA, 19 bp, Mus musculus
  siRNA target sequence for D16Ertd502e (NM_023175.1,729-747).
ggggcaggtcctaaccaaa

SEQ ID NO: 594349 - DNA, 19 bp, Mus musculus
  siRNA target sequence for D16Ertd502e (NM_023175.1,800-818).
ctgaaattcggcagcaaat

SEQ ID NO: 594350 - DNA, 19 bp, Mus musculus
  siRNA target sequence for D16Ertd502e (NM_023175.1,839-857).
gagcagacctctatacagt

SEQ ID NO: 594351 - DNA, 19 bp, Mus musculus
  siRNA target sequence for Nit1 (NM_012049.1,98-116).
gtaccggataccgattact

SEQ ID NO: 594352 - DNA, 19 bp, Mus musculus
  siRNA target sequence for Nit1 (NM_012049.1,118-136).
cgaaccccagtactttgta

SEQ ID NO: 594353 - DNA, 19 bp, Mus musculus
  siRNA target sequence for Nit1 (NM_012049.1,196-214).
gtgtgccaggtaacatcaa

SEQ ID NO: 594354 - DNA, 19 bp, Mus musculus
  siRNA target sequence for Nit1 (NM_012049.1,295-313).
ctgcctgaggcatttgact

SEQ ID NO: 594355 - DNA, 19 bp, Mus musculus
  siRNA target sequence for Nit1 (NM_012049.1,298-316).
cctgaggcatttgacttta

SEQ ID NO: 594356 - DNA, 19 bp, Mus musculus
  siRNA target sequence for Nit1 (NM_012049.1,299-317).
ctgaggcatttgactttat

SEQ ID NO: 594357 - DNA, 19 bp, Mus musculus
  siRNA target sequence for Nit1 (NM_012049.1,303-321).
ggcatttgactttattgca

SEQ ID NO: 594358 - DNA, 19 bp, Mus musculus
  siRNA target sequence for Nit1 (NM_012049.1,323-341).
gaaaccctgccgagacatt

SEQ ID NO: 594359 - DNA, 19 bp, Mus musculus
  siRNA target sequence for Nit1 (NM_012049.1,345-363).
cctgtccgaaccactgaat

SEQ ID NO: 594360 - DNA, 19 bp, Mus musculus
  siRNA target sequence for Nit1 (NM_012049.1,355-373).
ccactgaatggggatcttt

SEQ ID NO: 594361 - DNA, 19 bp, Mus musculus
  siRNA target sequence for Nit1 (NM_012049.1,448-466).
gactgggagcagaatcaga

SEQ ID NO: 594362 - DNA, 19 bp, Mus musculus
  siRNA target sequence for Nit1 (NM_012049.1,492-510).
gaacagcaagggatcagta

SEQ ID NO: 594363 - DNA, 19 bp, Mus musculus
  siRNA target sequence for Nit1 (NM_012049.1,632-650).
gcaaggttggtctagcaat

SEQ ID NO: 594364 - DNA, 19 bp, Mus musculus
  siRNA target sequence for Nit1 (NM_012049.1,636-654).
ggttggtctagcaatctgt

SEQ ID NO: 594365 - DNA, 19 bp, Mus musculus
  siRNA target sequence for Nit1 (NM_012049.1,637-655).
gttggtctagcaatctgtt

SEQ ID NO: 594366 - DNA, 19 bp, Mus musculus
  siRNA target sequence for Nit1 (NM_012049.1,641-659).
gtctagcaatctgttatga

SEQ ID NO: 594367 - DNA, 19 bp, Mus musculus
  siRNA target sequence for Nit1 (NM_012049.1,643-661).
ctagcaatctgttatgaca

SEQ ID NO: 594368 - DNA, 19 bp, Mus musculus
  siRNA target sequence for Nit1 (NM_012049.1,660-678).
catgcggttccctgaactt

SEQ ID NO: 594369 - DNA, 19 bp, Mus musculus
  siRNA target sequence for Nit1 (NM_012049.1,664-682).
cggttccctgaactttctt

SEQ ID NO: 594370 - DNA, 19 bp, Mus musculus
  siRNA target sequence for Nit1 (NM_012049.1,702-720).
ggcagaaatacttacttat

SEQ ID NO: 594371 - DNA, 19 bp, Mus musculus
  siRNA target sequence for Nit1 (NM_012049.1,823-841).
ggacgccaccatgaaacaa

SEQ ID NO: 594372 - DNA, 19 bp, Mus musculus
  siRNA target sequence for Nit1 (NM_012049.1,845-863).
caagttatggccatagcat

SEQ ID NO: 594373 - DNA, 19 bp, Mus musculus
  siRNA target sequence for Nit1 (NM_012049.1,918-936).
ctgccttgctcgaattgat

SEQ ID NO: 594374 - DNA, 19 bp, Mus musculus
  siRNA target sequence for Upb1 (NM_133995.1,98-116).
cccaggtgaagcgaattct

SEQ ID NO: 594375 - DNA, 19 bp, Mus musculus
  siRNA target sequence for Upb1 (NM_133995.1,100-118).
caggtgaagcgaattctct

SEQ ID NO: 594376 - DNA, 19 bp, Mus musculus
  siRNA target sequence for Upb1 (NM_133995.1,248-266).
gcgtggggctcgttcagaa

SEQ ID NO: 594377 - DNA, 19 bp, Mus musculus
  siRNA target sequence for Upb1 (NM_133995.1,253-271).
gggctcgttcagaacagaa

SEQ ID NO: 594378 - DNA, 19 bp, Mus musculus
  siRNA target sequence for Upb1 (NM_133995.1,254-272).
ggctcgttcagaacagaat

SEQ ID NO: 594379 - DNA, 19 bp, Mus musculus
  siRNA target sequence for Upb1 (NM_133995.1,708-726).
caggattgcagtgaacatt

SEQ ID NO: 594380 - DNA, 19 bp, Mus musculus
  siRNA target sequence for Upb1 (NM_133995.1,834-852).
gccgatcgaagccagaaat

SEQ ID NO: 594381 - DNA, 19 bp, Mus musculus
  siRNA target sequence for Upb1 (NM_133995.1,837-855).
gatcgaagccagaaatgca

SEQ ID NO: 594382 - DNA, 19 bp, Mus musculus
  siRNA target sequence for Upb1 (NM_133995.1,904-922).
gaacacttccccaatgagt

SEQ ID NO: 594383 - DNA, 19 bp, Mus musculus
  siRNA target sequence for Upb1 (NM_133995.1,909-927).
cttccccaatgagtttact

SEQ ID NO: 594384 - DNA, 19 bp, Mus musculus
  siRNA target sequence for Upb1 (NM_133995.1,952-970).
catgacctcggctacttct

SEQ ID NO: 594385 - DNA, 19 bp, Mus musculus
  siRNA target sequence for Upb1 (NM_133995.1,958-976).
ctcggctacttctatggtt

SEQ ID NO: 594386 - DNA, 19 bp, Mus musculus
  siRNA target sequence for Upb1 (NM_133995.1,1049-1067).
cggagctcaacctcaatct

SEQ ID NO: 594387 - DNA, 19 bp, Mus musculus
  siRNA target sequence for Upb1 (NM_133995.1,1068-1086).
ctgccagcagatcaatgat

SEQ ID NO: 594388 - DNA, 19 bp, Mus musculus
  siRNA target sequence for Upb1 (NM_133995.1,1106-1124).
cgggacgacttgagatgta

SEQ ID NO: 594389 - DNA, 19 bp, Mus musculus
  siRNA target sequence for Upb1 (NM_133995.1,1107-1125).
gggacgacttgagatgtat

SEQ ID NO: 594390 - DNA, 19 bp, Mus musculus
  siRNA target sequence for Upb1 (NM_133995.1,1155-1173).
caactacagtcccaacatt

SEQ ID NO: 594391 - DNA, 19 bp, Mus musculus
  siRNA target sequence for Vnn1 (NM_011704.1,45-63).
gtgtgctgcagcgttttct

SEQ ID NO: 594392 - DNA, 19 bp, Mus musculus
  siRNA target sequence for Vnn1 (NM_011704.1,98-116).
ctttcctcgcggctgttta

SEQ ID NO: 594393 - DNA, 19 bp, Mus musculus
  siRNA target sequence for Vnn1 (NM_011704.1,205-223).
ctggaaggagcgatcgtat

SEQ ID NO: 594394 - DNA, 19 bp, Mus musculus
  siRNA target sequence for Vnn1 (NM_011704.1,234-252).
gcagggtgcgcacattatt

SEQ ID NO: 594395 - DNA, 19 bp, Mus musculus
  siRNA target sequence for Vnn1 (NM_011704.1,284-302).
gtttcaccagggatacgat

SEQ ID NO: 594396 - DNA, 19 bp, Mus musculus
  siRNA target sequence for Vnn1 (NM_011704.1,349-367).
ccctgtgataaccctaaaa

SEQ ID NO: 594397 - DNA, 19 bp, Mus musculus
  siRNA target sequence for Vnn1 (NM_011704.1,351-369).
ctgtgataaccctaaaaga

SEQ ID NO: 594398 - DNA, 19 bp, Mus musculus
  siRNA target sequence for Vnn1 (NM_011704.1,541-559).
ctggttgcgagataccata

SEQ ID NO: 594399 - DNA, 19 bp, Mus musculus
  siRNA target sequence for Vnn1 (NM_011704.1,548-566).
cgagataccataagcaaaa

SEQ ID NO: 594400 - DNA, 19 bp, Mus musculus
  siRNA target sequence for Vnn1 (NM_011704.1,551-569).
gataccataagcaaaacat

SEQ ID NO: 594401 - DNA, 19 bp, Mus musculus
  siRNA target sequence for Vnn1 (NM_011704.1,576-594).
gggagaagatcagttcaat

SEQ ID NO: 594402 - DNA, 19 bp, Mus musculus
  siRNA target sequence for Vnn1 (NM_011704.1,578-596).
gagaagatcagttcaatgt

SEQ ID NO: 594403 - DNA, 19 bp, Mus musculus
  siRNA target sequence for Vnn1 (NM_011704.1,648-666).
cgtcttcacctgtttcgat

SEQ ID NO: 594404 - DNA, 19 bp, Mus musculus
  siRNA target sequence for Vnn1 (NM_011704.1,649-667).
gtcttcacctgtttcgata

SEQ ID NO: 594405 - DNA, 19 bp, Mus musculus
  siRNA target sequence for Vnn1 (NM_011704.1,651-669).
cttcacctgtttcgatatt

SEQ ID NO: 594406 - DNA, 19 bp, Mus musculus
  siRNA target sequence for Vnn1 (NM_011704.1,656-674).
cctgtttcgatattctctt

SEQ ID NO: 594407 - DNA, 19 bp, Mus musculus
  siRNA target sequence for Vnn1 (NM_011704.1,757-775).
catttggcagccattgaat

SEQ ID NO: 594408 - DNA, 19 bp, Mus musculus
  siRNA target sequence for Vnn1 (NM_011704.1,797-815).
gcatgggggtcaatttcct

SEQ ID NO: 594409 - DNA, 19 bp, Mus musculus
  siRNA target sequence for Vnn1 (NM_011704.1,813-831).
cctagcagctaatctacat

SEQ ID NO: 594410 - DNA, 19 bp, Mus musculus
  siRNA target sequence for Vnn1 (NM_011704.1,814-832).
ctagcagctaatctacata

SEQ ID NO: 594411 - DNA, 19 bp, Mus musculus
  siRNA target sequence for Vnn1 (NM_011704.1,878-896).
ctccaagggtctttcacta

SEQ ID NO: 594412 - DNA, 19 bp, Mus musculus
  siRNA target sequence for Vnn1 (NM_011704.1,978-996).
ctatgctagcagtgtagaa

SEQ ID NO: 594413 - DNA, 19 bp, Mus musculus
  siRNA target sequence for Vnn1 (NM_011704.1,982-1000).
gctagcagtgtagaatcaa

SEQ ID NO: 594414 - DNA, 19 bp, Mus musculus
  siRNA target sequence for Vnn1 (NM_011704.1,994-1012).
gaatcaaccccaaccaaaa

SEQ ID NO: 594415 - DNA, 19 bp, Mus musculus
  siRNA target sequence for Vnn1 (NM_011704.1,1007-1025).
ccaaaacccaggaatttca

SEQ ID NO: 594416 - DNA, 19 bp, Mus musculus
  siRNA target sequence for Vnn1 (NM_011704.1,1018-1036).
gaatttcagagtattgtct

SEQ ID NO: 594417 - DNA, 19 bp, Mus musculus
  siRNA target sequence for Vnn1 (NM_011704.1,1140-1158).
gcgagcagatgaggtttat

SEQ ID NO: 594418 - DNA, 19 bp, Mus musculus
  siRNA target sequence for Vnn1 (NM_011704.1,1187-1205).
ccgtggaagggcagtacta

SEQ ID NO: 594419 - DNA, 19 bp, Mus musculus
  siRNA target sequence for Vnn1 (NM_011704.1,1212-1230).
gatctgcatcctgctaaaa

SEQ ID NO: 594420 - DNA, 19 bp, Mus musculus
  siRNA target sequence for Vnn1 (NM_011704.1,1217-1235).
gcatcctgctaaaatgtaa

SEQ ID NO: 594421 - DNA, 19 bp, Mus musculus
  siRNA target sequence for Vnn1 (NM_011704.1,1267-1285).
gtggacacggcttttacca

SEQ ID NO: 594422 - DNA, 19 bp, Mus musculus
  siRNA target sequence for Vnn1 (NM_011704.1,1276-1294).
gcttttaccaggtttgaaa

SEQ ID NO: 594423 - DNA, 19 bp, Mus musculus
  siRNA target sequence for Vnn1 (NM_011704.1,1277-1295).
cttttaccaggtttgaaat

SEQ ID NO: 594424 - DNA, 19 bp, Mus musculus
  siRNA target sequence for Vnn1 (NM_011704.1,1299-1317).
ctcgctcagcggcactttt

SEQ ID NO: 594425 - DNA, 19 bp, Mus musculus
  siRNA target sequence for Vnn1 (NM_011704.1,1377-1395).
gtttcaggtgtcaagtgat

SEQ ID NO: 594426 - DNA, 19 bp, Mus musculus
  siRNA target sequence for Vnn1 (NM_011704.1,1446-1464).
gctctttgggaggttgtat

SEQ ID NO: 594427 - DNA, 19 bp, Mus musculus
  siRNA target sequence for Vnn1 (NM_011704.1,1467-1485).
gaaggactgggcatccaat

SEQ ID NO: 594428 - DNA, 19 bp, Mus musculus
  siRNA target sequence for Vnn1 (NM_011704.1,1505-1523).
cacactcgctgataataat

SEQ ID NO: 594429 - DNA, 19 bp, Mus musculus
  siRNA target sequence for Vnn1 (NM_011704.1,1525-1543).
ctgattgtgacgcctatta

SEQ ID NO: 594430 - DNA, 19 bp, Mus musculus
  siRNA target sequence for Vnn1 (NM_011704.1,1527-1545).
gattgtgacgcctattata

SEQ ID NO: 594431 - DNA, 19 bp, Mus musculus
  siRNA target sequence for Vnn1 (NM_011704.1,1531-1549).
gtgacgcctattatacatt

SEQ ID NO: 594432 - DNA, 19 bp, Mus musculus
  siRNA target sequence for Vnn1 (NM_011704.1,1535-1553).
cgcctattatacattactt

SEQ ID NO: 594433 - DNA, 19 bp, Mus musculus
  siRNA target sequence for Vnn1 (NM_011704.1,1537-1555).
cctattatacattacttgt

SEQ ID NO: 594434 - DNA, 19 bp, Mus musculus
  siRNA target sequence for Vnn3 (NM_011979.1,91-109).
cagagatcactctatttta

SEQ ID NO: 594435 - DNA, 19 bp, Mus musculus
  siRNA target sequence for Vnn3 (NM_011979.1,138-156).
gggcagtgagttttgtctt

SEQ ID NO: 594436 - DNA, 19 bp, Mus musculus
  siRNA target sequence for Vnn3 (NM_011979.1,173-191).
ggttcaatggacactttta

SEQ ID NO: 594437 - DNA, 19 bp, Mus musculus
  siRNA target sequence for Vnn3 (NM_011979.1,202-220).
gtatgaacatgctgttata

SEQ ID NO: 594438 - DNA, 19 bp, Mus musculus
  siRNA target sequence for Vnn3 (NM_011979.1,213-231).
ctgttatactgccaaacaa

SEQ ID NO: 594439 - DNA, 19 bp, Mus musculus
  siRNA target sequence for Vnn3 (NM_011979.1,260-278).
gctttgctcctgataaaca

SEQ ID NO: 594440 - DNA, 19 bp, Mus musculus
  siRNA target sequence for Vnn3 (NM_011979.1,318-336).
ccagacagggtgcacatat

SEQ ID NO: 594441 - DNA, 19 bp, Mus musculus
  siRNA target sequence for Vnn3 (NM_011979.1,321-339).
gacagggtgcacatatcat

SEQ ID NO: 594442 - DNA, 19 bp, Mus musculus
  siRNA target sequence for Vnn3 (NM_011979.1,345-363).
cgccagaagatggaatcta

SEQ ID NO: 594443 - DNA, 19 bp, Mus musculus
  siRNA target sequence for Vnn3 (NM_011979.1,346-364).
gccagaagatggaatctat

SEQ ID NO: 594444 - DNA, 19 bp, Mus musculus
  siRNA target sequence for Vnn3 (NM_011979.1,394-412).
cccctacctagaggatata

SEQ ID NO: 594445 - DNA, 19 bp, Mus musculus
  siRNA target sequence for Vnn3 (NM_011979.1,497-515).
gccaaggagaactctatct

SEQ ID NO: 594446 - DNA, 19 bp, Mus musculus
  siRNA target sequence for Vnn3 (NM_011979.1,499-517).
caaggagaactctatctat

SEQ ID NO: 594447 - DNA, 19 bp, Mus musculus
  siRNA target sequence for Vnn3 (NM_011979.1,502-520).
ggagaactctatctatatt

SEQ ID NO: 594448 - DNA, 19 bp, Mus musculus
  siRNA target sequence for Vnn3 (NM_011979.1,503-521).
gagaactctatctatatta

SEQ ID NO: 594449 - DNA, 19 bp, Mus musculus
  siRNA target sequence for Vnn3 (NM_011979.1,525-543).
caaatattggggacaagaa

SEQ ID NO: 594450 - DNA, 19 bp, Mus musculus
  siRNA target sequence for Vnn3 (NM_011979.1,577-595).
ggatggccgttaccaatat

SEQ ID NO: 594451 - DNA, 19 bp, Mus musculus
  siRNA target sequence for Vnn3 (NM_011979.1,578-596).
gatggccgttaccaatata

SEQ ID NO: 594452 - DNA, 19 bp, Mus musculus
  siRNA target sequence for Vnn3 (NM_011979.1,581-599).
ggccgttaccaatataata

SEQ ID NO: 594453 - DNA, 19 bp, Mus musculus
  siRNA target sequence for Vnn3 (NM_011979.1,584-602).
cgttaccaatataatacca

SEQ ID NO: 594454 - DNA, 19 bp, Mus musculus
  siRNA target sequence for Vnn3 (NM_011979.1,585-603).
gttaccaatataataccaa

SEQ ID NO: 594455 - DNA, 19 bp, Mus musculus
  siRNA target sequence for Vnn3 (NM_011979.1,629-647).
ctaacagcccgctaccata

SEQ ID NO: 594456 - DNA, 19 bp, Mus musculus
  siRNA target sequence for Vnn3 (NM_011979.1,633-651).
cagcccgctaccataagta

SEQ ID NO: 594457 - DNA, 19 bp, Mus musculus
  siRNA target sequence for Vnn3 (NM_011979.1,635-653).
gcccgctaccataagtaca

SEQ ID NO: 594458 - DNA, 19 bp, Mus musculus
  siRNA target sequence for Vnn3 (NM_011979.1,637-655).
ccgctaccataagtacaat

SEQ ID NO: 594459 - DNA, 19 bp, Mus musculus
  siRNA target sequence for Vnn3 (NM_011979.1,639-657).
gctaccataagtacaatct

SEQ ID NO: 594460 - DNA, 19 bp, Mus musculus
  siRNA target sequence for Vnn3 (NM_011979.1,643-661).
ccataagtacaatcttttt

SEQ ID NO: 594461 - DNA, 19 bp, Mus musculus
  siRNA target sequence for Vnn3 (NM_011979.1,771-789).
cagctgtggtggttgtgaa

SEQ ID NO: 594462 - DNA, 19 bp, Mus musculus
  siRNA target sequence for Vnn3 (NM_011979.1,799-817).
ggtcgacagtgttctctta

SEQ ID NO: 594463 - DNA, 19 bp, Mus musculus
  siRNA target sequence for Vnn3 (NM_011979.1,818-836).
cccacggcgtggtacaaca

SEQ ID NO: 594464 - DNA, 19 bp, Mus musculus
  siRNA target sequence for Vnn3 (NM_011979.1,917-935).
cacaacaccagcatgcata

SEQ ID NO: 594465 - DNA, 19 bp, Mus musculus
  siRNA target sequence for Vnn3 (NM_011979.1,1050-1068).
ccacccctgcagaggttaa

SEQ ID NO: 594466 - DNA, 19 bp, Mus musculus
  siRNA target sequence for Vnn3 (NM_011979.1,1167-1185).
caggaagtgctggcaatta

SEQ ID NO: 594467 - DNA, 19 bp, Mus musculus
  siRNA target sequence for Vnn3 (NM_011979.1,1175-1193).
gctggcaattacacagttt

SEQ ID NO: 594468 - DNA, 19 bp, Mus musculus
  siRNA target sequence for Vnn3 (NM_011979.1,1212-1230).
gtcacctgacttacaagat

SEQ ID NO: 594469 - DNA, 19 bp, Mus musculus
  siRNA target sequence for Vnn3 (NM_011979.1,1242-1260).
gaatggacgaggtgtatgt

SEQ ID NO: 594470 - DNA, 19 bp, Mus musculus
  siRNA target sequence for Vnn3 (NM_011979.1,1297-1315).
ccagtattacctacagata

SEQ ID NO: 594471 - DNA, 19 bp, Mus musculus
  siRNA target sequence for Vnn3 (NM_011979.1,1364-1382).
cccgtggggtcagctttta

SEQ ID NO: 594472 - DNA, 19 bp, Mus musculus
  siRNA target sequence for Vnn3 (NM_011979.1,1366-1384).
cgtggggtcagcttttaca

SEQ ID NO: 594473 - DNA, 19 bp, Mus musculus
  siRNA target sequence for Vnn3 (NM_011979.1,1409-1427).
ggcacctttcggacaaaat

SEQ ID NO: 594474 - DNA, 19 bp, Mus musculus
  siRNA target sequence for Vnn3 (NM_011979.1,1410-1428).
gcacctttcggacaaaata

SEQ ID NO: 594475 - DNA, 19 bp, Mus musculus
  siRNA target sequence for Vnn3 (NM_011979.1,1411-1429).
cacctttcggacaaaatat

SEQ ID NO: 594476 - DNA, 19 bp, Mus musculus
  siRNA target sequence for Vnn3 (NM_011979.1,1413-1431).
cctttcggacaaaatatgt

SEQ ID NO: 594477 - DNA, 19 bp, Mus musculus
  siRNA target sequence for Vnn3 (NM_011979.1,1521-1539).
gagcccctttgcctatctt

SEQ ID NO: 594478 - DNA, 19 bp, Mus musculus
  siRNA target sequence for Vnn3 (NM_011979.1,1524-1542).
cccctttgcctatcttagt

SEQ ID NO: 594479 - DNA, 19 bp, Mus musculus
  siRNA target sequence for 2700017M01Rik (NM_028292.1,78-96).
cggcccttgaaaaaagcat

SEQ ID NO: 594480 - DNA, 19 bp, Mus musculus
  siRNA target sequence for 2700017M01Rik (NM_028292.1,179-197).
ggacggaagcgggacttta

SEQ ID NO: 594481 - DNA, 19 bp, Mus musculus
  siRNA target sequence for 2700017M01Rik (NM_028292.1,213-231).
gtcagtactttgagtcaat

SEQ ID NO: 594482 - DNA, 19 bp, Mus musculus
  siRNA target sequence for 2700017M01Rik (NM_028292.1,409-427).
gcgaggtcacggagaaact

SEQ ID NO: 594483 - DNA, 19 bp, Mus musculus
  siRNA target sequence for 2700017M01Rik (NM_028292.1,410-428).
cgaggtcacggagaaacta

SEQ ID NO: 594484 - DNA, 19 bp, Mus musculus
  siRNA target sequence for 2700017M01Rik (NM_028292.1,411-429).
gaggtcacggagaaactaa

SEQ ID NO: 594485 - DNA, 19 bp, Mus musculus
  siRNA target sequence for 2700017M01Rik (NM_028292.1,414-432).
gtcacggagaaactaaagt

SEQ ID NO: 594486 - DNA, 19 bp, Mus musculus
  siRNA target sequence for 2700017M01Rik (NM_028292.1,416-434).
cacggagaaactaaagtca

SEQ ID NO: 594487 - DNA, 19 bp, Mus musculus
  siRNA target sequence for 2700017M01Rik (NM_028292.1,422-440).
gaaactaaagtcaagaatt

SEQ ID NO: 594488 - DNA, 19 bp, Mus musculus
  siRNA target sequence for 2700017M01Rik (NM_028292.1,600-618).
gcctttgcatgattgatgt

SEQ ID NO: 594489 - DNA, 19 bp, Mus musculus
  siRNA target sequence for 2700017M01Rik (NM_028292.1,601-619).
cctttgcatgattgatgtt

SEQ ID NO: 594490 - DNA, 19 bp, Mus musculus
  siRNA target sequence for 2700017M01Rik (NM_028292.1,607-625).
catgattgatgttgtagaa

SEQ ID NO: 594491 - DNA, 19 bp, Mus musculus
  siRNA target sequence for 2700017M01Rik (NM_028292.1,630-648).
ccgccatggatgcacttaa

SEQ ID NO: 594492 - DNA, 19 bp, Mus musculus
  siRNA target sequence for 2700017M01Rik (NM_028292.1,631-649).
cgccatggatgcacttaat

SEQ ID NO: 594493 - DNA, 19 bp, Mus musculus
  siRNA target sequence for 2700017M01Rik (NM_028292.1,632-650).
gccatggatgcacttaata

SEQ ID NO: 594494 - DNA, 19 bp, Mus musculus
  siRNA target sequence for 2700017M01Rik (NM_028292.1,644-662).
cttaatagcatgcagaatt

SEQ ID NO: 594495 - DNA, 19 bp, Mus musculus
  siRNA target sequence for 2700017M01Rik (NM_028292.1,664-682).
cttgcgtggtcgacctaaa

SEQ ID NO: 594496 - DNA, 19 bp, Mus musculus
  siRNA target sequence for 2700017M01Rik (NM_028292.1,668-686).
cgtggtcgacctaaaacct

SEQ ID NO: 594497 - DNA, 19 bp, Mus musculus
  siRNA target sequence for 2700017M01Rik (NM_028292.1,669-687).
gtggtcgacctaaaacctt

SEQ ID NO: 594498 - DNA, 19 bp, Mus musculus
  siRNA target sequence for 2700017M01Rik (NM_028292.1,674-692).
cgacctaaaaccttcaagt

SEQ ID NO: 594499 - DNA, 19 bp, Mus musculus
  siRNA target sequence for 2700017M01Rik (NM_028292.1,762-780).
ccatggtcggccaagtcaa

SEQ ID NO: 594500 - DNA, 19 bp, Mus musculus
  siRNA target sequence for 2700017M01Rik (NM_028292.1,763-781).
catggtcggccaagtcaaa

SEQ ID NO: 594501 - DNA, 19 bp, Mus musculus
  siRNA target sequence for 2700017M01Rik (NM_028292.1,767-785).
gtcggccaagtcaaacagt

SEQ ID NO: 594502 - DNA, 19 bp, Mus musculus
  siRNA target sequence for 2700017M01Rik (NM_028292.1,820-838).
catagtggaaggaatcata

SEQ ID NO: 594503 - DNA, 19 bp, Mus musculus
  siRNA target sequence for 2700017M01Rik (NM_028292.1,863-881).
ggaagtgagtcagttaaca

SEQ ID NO: 594504 - DNA, 19 bp, Mus musculus
  siRNA target sequence for 2700017M01Rik (NM_028292.1,864-882).
gaagtgagtcagttaacaa

SEQ ID NO: 594505 - DNA, 19 bp, Mus musculus
  siRNA target sequence for 2700017M01Rik (NM_028292.1,924-942).
catacacctggagaattga

SEQ ID NO: 594506 - DNA, 19 bp, Mus musculus
  siRNA target sequence for 2700017M01Rik (NM_028292.1,982-1000).
gggcttatccaatctcttt

SEQ ID NO: 594507 - DNA, 19 bp, Mus musculus
  siRNA target sequence for 2700017M01Rik (NM_028292.1,1001-1019).
cttagctgtcctattccta

SEQ ID NO: 594508 - DNA, 19 bp, Mus musculus
  siRNA target sequence for 2700017M01Rik (NM_028292.1,1037-1055).
ggtgttgacagattggata

SEQ ID NO: 594509 - DNA, 19 bp, Mus musculus
  siRNA target sequence for 2700017M01Rik (NM_028292.1,1038-1056).
gtgttgacagattggataa

SEQ ID NO: 594510 - DNA, 19 bp, Mus musculus
  siRNA target sequence for Abhd6 (NM_025341.2,100-118).
gatctcgatgtggttaaca

SEQ ID NO: 594511 - DNA, 19 bp, Mus musculus
  siRNA target sequence for Abhd6 (NM_025341.2,109-127).
gtggttaacatgtttgtga

SEQ ID NO: 594512 - DNA, 19 bp, Mus musculus
  siRNA target sequence for Abhd6 (NM_025341.2,136-154).
gggaccctggccattccaa

SEQ ID NO: 594513 - DNA, 19 bp, Mus musculus
  siRNA target sequence for Abhd6 (NM_025341.2,186-204).
gccttcagcactgataaga

SEQ ID NO: 594514 - DNA, 19 bp, Mus musculus
  siRNA target sequence for Abhd6 (NM_025341.2,187-205).
ccttcagcactgataagaa

SEQ ID NO: 594515 - DNA, 19 bp, Mus musculus
  siRNA target sequence for Abhd6 (NM_025341.2,188-206).
cttcagcactgataagaat

SEQ ID NO: 594516 - DNA, 19 bp, Mus musculus
  siRNA target sequence for Abhd6 (NM_025341.2,254-272).
cacaccatgaggactatca

SEQ ID NO: 594517 - DNA, 19 bp, Mus musculus
  siRNA target sequence for Abhd6 (NM_025341.2,256-274).
caccatgaggactatcagt

SEQ ID NO: 594518 - DNA, 19 bp, Mus musculus
  siRNA target sequence for Abhd6 (NM_025341.2,356-374).
ggctcagcgtggtcaagtt

SEQ ID NO: 594519 - DNA, 19 bp, Mus musculus
  siRNA target sequence for Abhd6 (NM_025341.2,455-473).
ccatagtggggcaagttaa

SEQ ID NO: 594520 - DNA, 19 bp, Mus musculus
  siRNA target sequence for Abhd6 (NM_025341.2,456-474).
catagtggggcaagttaaa

SEQ ID NO: 594521 - DNA, 19 bp, Mus musculus
  siRNA target sequence for Abhd6 (NM_025341.2,460-478).
gtggggcaagttaaaagga

SEQ ID NO: 594522 - DNA, 19 bp, Mus musculus
  siRNA target sequence for Abhd6 (NM_025341.2,462-480).
ggggcaagttaaaaggata

SEQ ID NO: 594523 - DNA, 19 bp, Mus musculus
  siRNA target sequence for Abhd6 (NM_025341.2,465-483).
gcaagttaaaaggatacat

SEQ ID NO: 594524 - DNA, 19 bp, Mus musculus
  siRNA target sequence for Abhd6 (NM_025341.2,476-494).
ggatacatcagtttgtaga

SEQ ID NO: 594525 - DNA, 19 bp, Mus musculus
  siRNA target sequence for Abhd6 (NM_025341.2,548-566).
gccacgtggctggagtata

SEQ ID NO: 594526 - DNA, 19 bp, Mus musculus
  siRNA target sequence for Abhd6 (NM_025341.2,549-567).
ccacgtggctggagtatat

SEQ ID NO: 594527 - DNA, 19 bp, Mus musculus
  siRNA target sequence for Abhd8 (NM_022419.1,934-952).
ccacgagtacccagatctt

SEQ ID NO: 594528 - DNA, 19 bp, Mus musculus
  siRNA target sequence for Abhd8 (NM_022419.1,943-961).
cccagatcttgtacacaaa

SEQ ID NO: 594529 - DNA, 19 bp, Mus musculus
  siRNA target sequence for Abhd8 (NM_022419.1,947-965).
gatcttgtacacaaagtga

SEQ ID NO: 594530 - DNA, 19 bp, Mus musculus
  siRNA target sequence for Abhd8 (NM_022419.1,956-974).
cacaaagtgatcatgatca

SEQ ID NO: 594531 - DNA, 19 bp, Mus musculus
  siRNA target sequence for Abhd8 (NM_022419.1,1007-1025).
ctatgctccatcttcaaca

SEQ ID NO: 594532 - DNA, 19 bp, Mus musculus
  siRNA target sequence for Ephx1 (NM_010145.2,146-164).
ggagaccttaccacttgaa

SEQ ID NO: 594533 - DNA, 19 bp, Mus musculus
  siRNA target sequence for Ephx1 (NM_010145.2,191-209).
gccatcagccaaagaagat

SEQ ID NO: 594534 - DNA, 19 bp, Mus musculus
  siRNA target sequence for Ephx1 (NM_010145.2,260-278).
cttgcaccagaggatagat

SEQ ID NO: 594535 - DNA, 19 bp, Mus musculus
  siRNA target sequence for Ephx1 (NM_010145.2,404-422).
caaccaatacccacacttt

SEQ ID NO: 594536 - DNA, 19 bp, Mus musculus
  siRNA target sequence for Ephx1 (NM_010145.2,439-457).
ggctggacatccacttcat

SEQ ID NO: 594537 - DNA, 19 bp, Mus musculus
  siRNA target sequence for Ephx1 (NM_010145.2,682-700).
ccactgcgaggatcttcta

SEQ ID NO: 594538 - DNA, 19 bp, Mus musculus
  siRNA target sequence for Ephx1 (NM_010145.2,792-810).
cccaaccacgtgaaaggtt

SEQ ID NO: 594539 - DNA, 19 bp, Mus musculus
  siRNA target sequence for Ephx1 (NM_010145.2,793-811).
ccaaccacgtgaaaggttt

SEQ ID NO: 594540 - DNA, 19 bp, Mus musculus
  siRNA target sequence for Ephx1 (NM_010145.2,803-821).
gaaaggtttgcacttgaat

SEQ ID NO: 594541 - DNA, 19 bp, Mus musculus
  siRNA target sequence for Ephx1 (NM_010145.2,807-825).
ggtttgcacttgaatatgt

SEQ ID NO: 594542 - DNA, 19 bp, Mus musculus
  siRNA target sequence for Ephx1 (NM_010145.2,830-848).
catttcaagaaacatttat

SEQ ID NO: 594543 - DNA, 19 bp, Mus musculus
  siRNA target sequence for Ephx1 (NM_010145.2,1034-1052).
cctggctgcctacatctta

SEQ ID NO: 594544 - DNA, 19 bp, Mus musculus
  siRNA target sequence for Ephx1 (NM_010145.2,1038-1056).
gctgcctacatcttagaga

SEQ ID NO: 594545 - DNA, 19 bp, Mus musculus
  siRNA target sequence for Ephx1 (NM_010145.2,1039-1057).
ctgcctacatcttagagaa

SEQ ID NO: 594546 - DNA, 19 bp, Mus musculus
  siRNA target sequence for Ephx1 (NM_010145.2,1134-1152).
ctgctgactaacatcatga

SEQ ID NO: 594547 - DNA, 19 bp, Mus musculus
  siRNA target sequence for Ephx1 (NM_010145.2,1188-1206).
cgcttctacaaggaaaact

SEQ ID NO: 594548 - DNA, 19 bp, Mus musculus
  siRNA target sequence for Ephx1 (NM_010145.2,1216-1234).
gtgtcatggtccatagaca

SEQ ID NO: 594549 - DNA, 19 bp, Mus musculus
  siRNA target sequence for Ephx1 (NM_010145.2,1290-1308).
ctgcatgccccagaaaagt

SEQ ID NO: 594550 - DNA, 19 bp, Mus musculus
  siRNA target sequence for Ephx1 (NM_010145.2,1326-1344).
cccaaactcatctcctatt

SEQ ID NO: 594551 - DNA, 19 bp, Mus musculus
  siRNA target sequence for Ephx2 (NM_007940.2,209-227).
ccactgagcaactcatgaa

SEQ ID NO: 594552 - DNA, 19 bp, Mus musculus
  siRNA target sequence for Ephx2 (NM_007940.2,315-333).
gaatttctccataagtcaa

SEQ ID NO: 594553 - DNA, 19 bp, Mus musculus
  siRNA target sequence for Ephx2 (NM_007940.2,485-503).
gtgagctgagccaacactt

SEQ ID NO: 594554 - DNA, 19 bp, Mus musculus
  siRNA target sequence for Ephx2 (NM_007940.2,524-542).
gtcaggttgggatgatcaa

SEQ ID NO: 594555 - DNA, 19 bp, Mus musculus
  siRNA target sequence for Ephx2 (NM_007940.2,547-565).
gagcctcagatctacaatt

SEQ ID NO: 594556 - DNA, 19 bp, Mus musculus
  siRNA target sequence for Ephx2 (NM_007940.2,616-634).
gactttggaagtaatctga

SEQ ID NO: 594557 - DNA, 19 bp, Mus musculus
  siRNA target sequence for Ephx2 (NM_007940.2,643-661).
cgtgacatggggatggtta

SEQ ID NO: 594558 - DNA, 19 bp, Mus musculus
  siRNA target sequence for Ephx2 (NM_007940.2,916-934).
cgtgttctggctatagaca

SEQ ID NO: 594559 - DNA, 19 bp, Mus musculus
  siRNA target sequence for Ephx2 (NM_007940.2,1127-1145).
gtttgaacacgccgtttat

SEQ ID NO: 594560 - DNA, 19 bp, Mus musculus
  siRNA target sequence for Ephx2 (NM_007940.2,1162-1180).
gtgtctcccatgaaagtta

SEQ ID NO: 594561 - DNA, 19 bp, Mus musculus
  siRNA target sequence for Ephx2 (NM_007940.2,1183-1201).
cgatctatcccagttttca

SEQ ID NO: 594562 - DNA, 19 bp, Mus musculus
  siRNA target sequence for Ephx2 (NM_007940.2,1187-1205).
ctatcccagttttcaatta

SEQ ID NO: 594563 - DNA, 19 bp, Mus musculus
  siRNA target sequence for Ephx2 (NM_007940.2,1257-1275).
catgagtcggactttcaaa

SEQ ID NO: 594564 - DNA, 19 bp, Mus musculus
  siRNA target sequence for Ephx2 (NM_007940.2,1262-1280).
gtcggactttcaaaagctt

SEQ ID NO: 594565 - DNA, 19 bp, Mus musculus
  siRNA target sequence for Ephx2 (NM_007940.2,1292-1310).
gtgatgagacaggtttcat

SEQ ID NO: 594566 - DNA, 19 bp, Mus musculus
  siRNA target sequence for Ephx2 (NM_007940.2,1336-1354).
gggggaatccttgtgaata

SEQ ID NO: 594567 - DNA, 19 bp, Mus musculus
  siRNA target sequence for Ephx2 (NM_007940.2,1338-1356).
gggaatccttgtgaatact

SEQ ID NO: 594568 - DNA, 19 bp, Mus musculus
  siRNA target sequence for Ephx2 (NM_007940.2,1366-1384).
cccaacctcagcaaaatta

SEQ ID NO: 594569 - DNA, 19 bp, Mus musculus
  siRNA target sequence for Ephx2 (NM_007940.2,1368-1386).
caacctcagcaaaattact

SEQ ID NO: 594570 - DNA, 19 bp, Mus musculus
  siRNA target sequence for Ephx2 (NM_007940.2,1496-1514).
ggttgggacgaaagatctt

SEQ ID NO: 594571 - DNA, 19 bp, Mus musculus
  siRNA target sequence for Ephx2 (NM_007940.2,1552-1570).
gtactccgtcctgaaatgt

SEQ ID NO: 594572 - DNA, 19 bp, Mus musculus
  siRNA target sequence for Ephx2 (NM_007940.2,1628-1646).
gtcactggacacagataga

SEQ ID NO: 594573 - DNA, 19 bp, Mus musculus
  siRNA target sequence for Wbscr21 (NM_145215.1,510-528).
cgcagtagtggccaagaaa

SEQ ID NO: 594574 - DNA, 19 bp, Mus musculus
  siRNA target sequence for Wbscr21 (NM_145215.1,541-559).
ggccgctgccgctgtctta

SEQ ID NO: 594575 - DNA, 19 bp, Mus musculus
  siRNA target sequence for Wbscr21 (NM_145215.1,542-560).
gccgctgccgctgtcttat

SEQ ID NO: 594576 - DNA, 19 bp, Mus musculus
  siRNA target sequence for Wbscr21 (NM_145215.1,543-561).
ccgctgccgctgtcttata

SEQ ID NO: 594577 - DNA, 19 bp, Mus musculus
  siRNA target sequence for Wbscr21 (NM_145215.1,544-562).
cgctgccgctgtcttataa

SEQ ID NO: 594578 - DNA, 19 bp, Mus musculus
  siRNA target sequence for Wbscr21 (NM_145215.1,545-563).
gctgccgctgtcttataat

SEQ ID NO: 594579 - DNA, 19 bp, Mus musculus
  siRNA target sequence for Wbscr21 (NM_145215.1,548-566).
gccgctgtcttataatctt

SEQ ID NO: 594580 - DNA, 19 bp, Mus musculus
  siRNA target sequence for Wbscr21 (NM_145215.1,554-572).
gtcttataatcttctagat

SEQ ID NO: 594581 - DNA, 19 bp, Mus musculus
  siRNA target sequence for Wbscr21 (NM_145215.1,589-607).
cagccatcgtctttttgca

SEQ ID NO: 594582 - DNA, 19 bp, Mus musculus
  siRNA target sequence for Wbscr21 (NM_145215.1,641-659).
cctcgccaaggcaatggtt

SEQ ID NO: 594583 - DNA, 19 bp, Mus musculus
  siRNA target sequence for Wbscr21 (NM_145215.1,719-737).
cagtccagacgcaagctat

SEQ ID NO: 594584 - DNA, 19 bp, Mus musculus
  siRNA target sequence for Wbscr21 (NM_145215.1,853-871).
cagatgttgtggaacgatt

SEQ ID NO: 594585 - DNA, 19 bp, Mus musculus
  siRNA target sequence for Wbscr21 (NM_145215.1,863-881).
ggaacgattggttgttgta

SEQ ID NO: 594586 - DNA, 19 bp, Mus musculus
  siRNA target sequence for Wbscr21 (NM_145215.1,868-886).
gattggttgttgtagacat

SEQ ID NO: 594587 - DNA, 19 bp, Mus musculus
  siRNA target sequence for Wbscr21 (NM_145215.1,902-920).
cacacctggatcacacatt

SEQ ID NO: 594588 - DNA, 19 bp, Mus musculus
  siRNA target sequence for Wbscr21 (NM_145215.1,937-955).
ccatgaaggctgttgagat

SEQ ID NO: 594589 - DNA, 19 bp, Mus musculus
  siRNA target sequence for Wbscr21 (NM_145215.1,993-1011).
gcggataagcagcttagtt

SEQ ID NO: 594590 - DNA, 19 bp, Mus musculus
  siRNA target sequence for Wbscr21 (NM_145215.1,1087-1105).
gactgaacttggatacgtt

SEQ ID NO: 594591 - DNA, 19 bp, Mus musculus
  siRNA target sequence for Wbscr21 (NM_145215.1,1113-1131).
cacttggacaagataatga

SEQ ID NO: 594592 - DNA, 19 bp, Mus musculus
  siRNA target sequence for Wbscr21 (NM_145215.1,1176-1194).
ctgcttggtggaaattcta

SEQ ID NO: 594593 - DNA, 19 bp, Mus musculus
  siRNA target sequence for Wbscr21 (NM_145215.1,1178-1196).
gcttggtggaaattctaca

SEQ ID NO: 594594 - DNA, 19 bp, Mus musculus
  siRNA target sequence for Wbscr21 (NM_145215.1,1179-1197).
cttggtggaaattctacat

SEQ ID NO: 594595 - DNA, 19 bp, Mus musculus
  siRNA target sequence for 4631427C17Rik (NM_021414.2,199-217).
cggacgtcgctctttgtct

SEQ ID NO: 594596 - DNA, 19 bp, Mus musculus
  siRNA target sequence for 4631427C17Rik (NM_021414.2,223-241).
catctctcagtcatctact

SEQ ID NO: 594597 - DNA, 19 bp, Mus musculus
  siRNA target sequence for 4631427C17Rik (NM_021414.2,333-351).
gcgacttctgtgtcaagaa

SEQ ID NO: 594598 - DNA, 19 bp, Mus musculus
  siRNA target sequence for 4631427C17Rik (NM_021414.2,371-389).
ggacgcagagaaattgaaa

SEQ ID NO: 594599 - DNA, 19 bp, Mus musculus
  siRNA target sequence for 4631427C17Rik (NM_021414.2,372-390).
gacgcagagaaattgaaat

SEQ ID NO: 594600 - DNA, 19 bp, Mus musculus
  siRNA target sequence for 4631427C17Rik (NM_021414.2,719-737).
gatctgactcactggattt

SEQ ID NO: 594601 - DNA, 19 bp, Mus musculus
  siRNA target sequence for 4631427C17Rik (NM_021414.2,867-885).
cagtcactaagcagaaatt

SEQ ID NO: 594602 - DNA, 19 bp, Mus musculus
  siRNA target sequence for 4631427C17Rik (NM_021414.2,871-889).
cactaagcagaaatttgat

SEQ ID NO: 594603 - DNA, 19 bp, Mus musculus
  siRNA target sequence for 4631427C17Rik (NM_021414.2,895-913).
ctactgttgccgtgaatct

SEQ ID NO: 594604 - DNA, 19 bp, Mus musculus
  siRNA target sequence for 4631427C17Rik (NM_021414.2,903-921).
gccgtgaatctattcttga

SEQ ID NO: 594605 - DNA, 19 bp, Mus musculus
  siRNA target sequence for 4631427C17Rik (NM_021414.2,912-930).
ctattcttgacggacttaa

SEQ ID NO: 594606 - DNA, 19 bp, Mus musculus
  siRNA target sequence for 4631427C17Rik (NM_021414.2,917-935).
cttgacggacttaaaagga

SEQ ID NO: 594607 - DNA, 19 bp, Mus musculus
  siRNA target sequence for 4631427C17Rik (NM_021414.2,933-951).
ggacaacagatatgatgtt

SEQ ID NO: 594608 - DNA, 19 bp, Mus musculus
  siRNA target sequence for 4631427C17Rik (NM_021414.2,934-952).
gacaacagatatgatgttt

SEQ ID NO: 594609 - DNA, 19 bp, Mus musculus
  siRNA target sequence for 4631427C17Rik (NM_021414.2,1019-1037).
gccatgggctccattgtgt

SEQ ID NO: 594610 - DNA, 19 bp, Mus musculus
  siRNA target sequence for 4631427C17Rik (NM_021414.2,1118-1136).
cgacaggtcgacattgtta

SEQ ID NO: 594611 - DNA, 19 bp, Mus musculus
  siRNA target sequence for 4631427C17Rik (NM_021414.2,1119-1137).
gacaggtcgacattgttat

SEQ ID NO: 594612 - DNA, 19 bp, Mus musculus
  siRNA target sequence for 4631427C17Rik (NM_021414.2,1123-1141).
ggtcgacattgttattact

SEQ ID NO: 594613 - DNA, 19 bp, Mus musculus
  siRNA target sequence for 4631427C17Rik (NM_021414.2,1181-1199).
gaccgtatgaagaatagct

SEQ ID NO: 594614 - DNA, 19 bp, Mus musculus
  siRNA target sequence for 4631427C17Rik (NM_021414.2,1224-1242).
ccaacaccgagattgatgt

SEQ ID NO: 594615 - DNA, 19 bp, Mus musculus
  siRNA target sequence for 4631427C17Rik (NM_021414.2,1265-1283).
ctgacctgggagagagtaa

SEQ ID NO: 594616 - DNA, 19 bp, Mus musculus
  siRNA target sequence for 4631427C17Rik (NM_021414.2,1284-1302).
gatcccaagttgatcatgt

SEQ ID NO: 594617 - DNA, 19 bp, Mus musculus
  siRNA target sequence for 4631427C17Rik (NM_021414.2,1287-1305).
cccaagttgatcatgtgat

SEQ ID NO: 594618 - DNA, 19 bp, Mus musculus
  siRNA target sequence for 4631427C17Rik (NM_021414.2,1288-1306).
ccaagttgatcatgtgata

SEQ ID NO: 594619 - DNA, 19 bp, Mus musculus
  siRNA target sequence for 4631427C17Rik (NM_021414.2,1343-1361).
ggccgtctactgaatctca

SEQ ID NO: 594620 - DNA, 19 bp, Mus musculus
  siRNA target sequence for 4631427C17Rik (NM_021414.2,1411-1429).
ggctctcgccttgatagaa

SEQ ID NO: 594621 - DNA, 19 bp, Mus musculus
  siRNA target sequence for 4631427C17Rik (NM_021414.2,1413-1431).
ctctcgccttgatagaact

SEQ ID NO: 594622 - DNA, 19 bp, Mus musculus
  siRNA target sequence for 4631427C17Rik (NM_021414.2,1418-1436).
gccttgatagaactttaca

SEQ ID NO: 594623 - DNA, 19 bp, Mus musculus
  siRNA target sequence for 4631427C17Rik (NM_021414.2,1419-1437).
ccttgatagaactttacaa

SEQ ID NO: 594624 - DNA, 19 bp, Mus musculus
  siRNA target sequence for 4631427C17Rik (NM_021414.2,1420-1438).
cttgatagaactttacaat

SEQ ID NO: 594625 - DNA, 19 bp, Mus musculus
  siRNA target sequence for 4631427C17Rik (NM_021414.2,1449-1467).
gtcgctataagcaagatgt

SEQ ID NO: 594626 - DNA, 19 bp, Mus musculus
  siRNA target sequence for 4631427C17Rik (NM_021414.2,1537-1555).
gacagagctaacagatgaa

SEQ ID NO: 594627 - DNA, 19 bp, Mus musculus
  siRNA target sequence for 4631427C17Rik (NM_021414.2,1589-1607).
cccttcaagcctaactact

SEQ ID NO: 594628 - DNA, 19 bp, Mus musculus
  siRNA target sequence for 4631427C17Rik (NM_021414.2,1590-1608).
ccttcaagcctaactacta

SEQ ID NO: 594629 - DNA, 19 bp, Mus musculus
  siRNA target sequence for 4631427C17Rik (NM_021414.2,1598-1616).
cctaactactacaggtatt

SEQ ID NO: 594630 - DNA, 19 bp, Mus musculus
  siRNA target sequence for Ahcyl1 (NM_145542.2,697-715).
ggcccagacagcggtatta

SEQ ID NO: 594631 - DNA, 19 bp, Mus musculus
  siRNA target sequence for Ahcyl1 (NM_145542.2,698-716).
gcccagacagcggtattaa

SEQ ID NO: 594632 - DNA, 19 bp, Mus musculus
  siRNA target sequence for Ahcyl1 (NM_145542.2,760-778).
ctgcaacatctattcaact

SEQ ID NO: 594633 - DNA, 19 bp, Mus musculus
  siRNA target sequence for Ahcyl1 (NM_145542.2,766-784).
catctattcaactcagaat

SEQ ID NO: 594634 - DNA, 19 bp, Mus musculus
  siRNA target sequence for Ahcyl1 (NM_145542.2,812-830).
ggagtcgcggtgtttgctt

SEQ ID NO: 594635 - DNA, 19 bp, Mus musculus
  siRNA target sequence for Ahcyl1 (NM_145542.2,835-853).
gggcgagtcagaagatgat

SEQ ID NO: 594636 - DNA, 19 bp, Mus musculus
  siRNA target sequence for Ahcyl1 (NM_145542.2,890-908).
gggtggcaggctaacatga

SEQ ID NO: 594637 - DNA, 19 bp, Mus musculus
  siRNA target sequence for Ahcyl1 (NM_145542.2,891-909).
ggtggcaggctaacatgat

SEQ ID NO: 594638 - DNA, 19 bp, Mus musculus
  siRNA target sequence for Ahcyl1 (NM_145542.2,913-931).
ggatgatgggggagactta

SEQ ID NO: 594639 - DNA, 19 bp, Mus musculus
  siRNA target sequence for Ahcyl1 (NM_145542.2,914-932).
gatgatgggggagacttaa

SEQ ID NO: 594640 - DNA, 19 bp, Mus musculus
  siRNA target sequence for Ahcyl1 (NM_145542.2,956-974).
ccaaacgtgtttaagaaga

SEQ ID NO: 594641 - DNA, 19 bp, Mus musculus
  siRNA target sequence for Ahcyl1 (NM_145542.2,1110-1128).
gccgagaatccattttgga

SEQ ID NO: 594642 - DNA, 19 bp, Mus musculus
  siRNA target sequence for Ahcyl1 (NM_145542.2,1140-1158).
ggaccacggatgtgatgtt

SEQ ID NO: 594643 - DNA, 19 bp, Mus musculus
  siRNA target sequence for Ahcyl1 (NM_145542.2,1226-1244).
gcccttggagcaattgtct

SEQ ID NO: 594644 - DNA, 19 bp, Mus musculus
  siRNA target sequence for Ahcyl1 (NM_145542.2,1227-1245).
cccttggagcaattgtcta

SEQ ID NO: 594645 - DNA, 19 bp, Mus musculus
  siRNA target sequence for Ahcyl1 (NM_145542.2,1232-1250).
ggagcaattgtctacataa

SEQ ID NO: 594646 - DNA, 19 bp, Mus musculus
  siRNA target sequence for Ahcyl1 (NM_145542.2,1325-1343).
cggcaggtggacgttgtaa

SEQ ID NO: 594647 - DNA, 19 bp, Mus musculus
  siRNA target sequence for Ahcyl1 (NM_145542.2,1326-1344).
ggcaggtggacgttgtaat

SEQ ID NO: 594648 - DNA, 19 bp, Mus musculus
  siRNA target sequence for Ahcyl1 (NM_145542.2,1327-1345).
gcaggtggacgttgtaatt

SEQ ID NO: 594649 - DNA, 19 bp, Mus musculus
  siRNA target sequence for Ahcyl1 (NM_145542.2,1328-1346).
caggtggacgttgtaatta

SEQ ID NO: 594650 - DNA, 19 bp, Mus musculus
  siRNA target sequence for Ahcyl1 (NM_145542.2,1330-1348).
ggtggacgttgtaattact

SEQ ID NO: 594651 - DNA, 19 bp, Mus musculus
  siRNA target sequence for Ahcyl1 (NM_145542.2,1331-1349).
gtggacgttgtaattactt

SEQ ID NO: 594652 - DNA, 19 bp, Mus musculus
  siRNA target sequence for Ahcyl1 (NM_145542.2,1387-1405).
ggaccgaatgaaaaatagt

SEQ ID NO: 594653 - DNA, 19 bp, Mus musculus
  siRNA target sequence for Ahcyl1 (NM_145542.2,1456-1474).
cctccgcactccagaacta

SEQ ID NO: 594654 - DNA, 19 bp, Mus musculus
  siRNA target sequence for Ahcyl1 (NM_145542.2,1457-1475).
ctccgcactccagaactaa

SEQ ID NO: 594655 - DNA, 19 bp, Mus musculus
  siRNA target sequence for Ahcyl1 (NM_145542.2,1459-1477).
ccgcactccagaactaaca

SEQ ID NO: 594656 - DNA, 19 bp, Mus musculus
  siRNA target sequence for Ahcyl1 (NM_145542.2,1460-1478).
cgcactccagaactaacat

SEQ ID NO: 594657 - DNA, 19 bp, Mus musculus
  siRNA target sequence for Ahcyl1 (NM_145542.2,1494-1512).
ctcaggtggaccatgtcat

SEQ ID NO: 594658 - DNA, 19 bp, Mus musculus
  siRNA target sequence for Ahcyl1 (NM_145542.2,1550-1568).
ggccgtttacttaatctga

SEQ ID NO: 594659 - DNA, 19 bp, Mus musculus
  siRNA target sequence for Ahcyl1 (NM_145542.2,1626-1644).
cactgatagagctttacaa

SEQ ID NO: 594660 - DNA, 19 bp, Mus musculus
  siRNA target sequence for Ahcyl1 (NM_145542.2,1650-1668).
cggagggacgctacaaaca

SEQ ID NO: 594661 - DNA, 19 bp, Mus musculus
  siRNA target sequence for Ahcyl1 (NM_145542.2,1659-1677).
gctacaaacaggatgtgta

SEQ ID NO: 594662 - DNA, 19 bp, Mus musculus
  siRNA target sequence for Ahcyl1 (NM_145542.2,1686-1704).
ctaagaagatggatgaata

SEQ ID NO: 594663 - DNA, 19 bp, Mus musculus
  siRNA target sequence for Ahcyl1 (NM_145542.2,1793-1811).
gggccattcaaacctaatt

SEQ ID NO: 594664 - DNA, 19 bp, Mus musculus
  siRNA target sequence for Ahcyl1 (NM_145542.2,1796-1814).
ccattcaaacctaattatt

SEQ ID NO: 594665 - DNA, 19 bp, Mus musculus
  siRNA target sequence for Ahcyl1 (NM_145542.2,1805-1823).
cctaattattacagatact

SEQ ID NO: 594666 - DNA, 19 bp, Mus musculus
  siRNA target sequence for Fah (NM_010176.1,60-78).
ccgactttcccatccaaaa

SEQ ID NO: 594667 - DNA, 19 bp, Mus musculus
  siRNA target sequence for Fah (NM_010176.1,80-98).
ctgccctatggtgttttct

SEQ ID NO: 594668 - DNA, 19 bp, Mus musculus
  siRNA target sequence for Fah (NM_010176.1,89-107).
ggtgttttctccactcaaa

SEQ ID NO: 594669 - DNA, 19 bp, Mus musculus
  siRNA target sequence for Fah (NM_010176.1,135-153).
ccatcggtgaccagatctt

SEQ ID NO: 594670 - DNA, 19 bp, Mus musculus
  siRNA target sequence for Fah (NM_010176.1,184-202).
cggacctgccctttccaaa

SEQ ID NO: 594671 - DNA, 19 bp, Mus musculus
  siRNA target sequence for Fah (NM_010176.1,198-216).
ccaaacatcaacatgtctt

SEQ ID NO: 594672 - DNA, 19 bp, Mus musculus
  siRNA target sequence for Fah (NM_010176.1,217-235).
cgatgagacaactctcaat

SEQ ID NO: 594673 - DNA, 19 bp, Mus musculus
  siRNA target sequence for Fah (NM_010176.1,218-236).
gatgagacaactctcaata

SEQ ID NO: 594674 - DNA, 19 bp, Mus musculus
  siRNA target sequence for Fah (NM_010176.1,225-243).
caactctcaataacttcat

SEQ ID NO: 594675 - DNA, 19 bp, Mus musculus
  siRNA target sequence for Fah (NM_010176.1,272-290).
gcaagagcatccttacaga

SEQ ID NO: 594676 - DNA, 19 bp, Mus musculus
  siRNA target sequence for Fah (NM_010176.1,424-442).
gcagcatgccaccaatgtt

SEQ ID NO: 594677 - DNA, 19 bp, Mus musculus
  siRNA target sequence for Fah (NM_010176.1,432-450).
ccaccaatgttggcattat

SEQ ID NO: 594678 - DNA, 19 bp, Mus musculus
  siRNA target sequence for Fah (NM_010176.1,493-511).
cttacctgtgggataccat

SEQ ID NO: 594679 - DNA, 19 bp, Mus musculus
  siRNA target sequence for Fah (NM_010176.1,564-582).
ggcagatgagacctgataa

SEQ ID NO: 594680 - DNA, 19 bp, Mus musculus
  siRNA target sequence for Fah (NM_010176.1,583-601).
ctcaaagcctcctgtgtat

SEQ ID NO: 594681 - DNA, 19 bp, Mus musculus
  siRNA target sequence for Fah (NM_010176.1,606-624).
cctgcagactcttagacat

SEQ ID NO: 594682 - DNA, 19 bp, Mus musculus
  siRNA target sequence for Fah (NM_010176.1,647-665).
gtaggccctgggaacagat

SEQ ID NO: 594683 - DNA, 19 bp, Mus musculus
  siRNA target sequence for Fah (NM_010176.1,671-689).
gagccaatccccatttcca

SEQ ID NO: 594684 - DNA, 19 bp, Mus musculus
  siRNA target sequence for Fah (NM_010176.1,898-916).
cagccagccctacacattt

SEQ ID NO: 594685 - DNA, 19 bp, Mus musculus
  siRNA target sequence for Fah (NM_010176.1,900-918).
gccagccctacacatttga

SEQ ID NO: 594686 - DNA, 19 bp, Mus musculus
  siRNA target sequence for Fah (NM_010176.1,970-988).
catctgcaggtctaacttt

SEQ ID NO: 594687 - DNA, 19 bp, Mus musculus
  siRNA target sequence for Fah (NM_010176.1,975-993).
gcaggtctaactttaagca

SEQ ID NO: 594688 - DNA, 19 bp, Mus musculus
  siRNA target sequence for Fah (NM_010176.1,981-999).
ctaactttaagcacatgta

SEQ ID NO: 594689 - DNA, 19 bp, Mus musculus
  siRNA target sequence for Fah (NM_010176.1,1025-1043).
caccactctgttaatggat

SEQ ID NO: 594690 - DNA, 19 bp, Mus musculus
  siRNA target sequence for Fah (NM_010176.1,1189-1207).
cggcgatgaagtcatcata

SEQ ID NO: 594691 - DNA, 19 bp, Mus musculus
  siRNA target sequence for Fah (NM_010176.1,1192-1210).
cgatgaagtcatcataaca

SEQ ID NO: 594692 - DNA, 19 bp, Mus musculus
  siRNA target sequence for 1110035H23Rik (NM_134076.1,71-89).
ccatgtctcaactgaagaa

SEQ ID NO: 594693 - DNA, 19 bp, Mus musculus
  siRNA target sequence for 1110035H23Rik (NM_134076.1,72-90).
catgtctcaactgaagaat

SEQ ID NO: 594694 - DNA, 19 bp, Mus musculus
  siRNA target sequence for 1110035H23Rik (NM_134076.1,287-305).
cacttcatacctttgatct

SEQ ID NO: 594695 - DNA, 19 bp, Mus musculus
  siRNA target sequence for 1110035H23Rik (NM_134076.1,445-463).
ggattcctggccacttctt

SEQ ID NO: 594696 - DNA, 19 bp, Mus musculus
  siRNA target sequence for 1110035H23Rik (NM_134076.1,451-469).
ctggccacttcttactcta

SEQ ID NO: 594697 - DNA, 19 bp, Mus musculus
  siRNA target sequence for 1110035H23Rik (NM_134076.1,479-497).
ctgaaagagttaaacatct

SEQ ID NO: 594698 - DNA, 19 bp, Mus musculus
  siRNA target sequence for 1110035H23Rik (NM_134076.1,485-503).
gagttaaacatcttatcct

SEQ ID NO: 594699 - DNA, 19 bp, Mus musculus
  siRNA target sequence for 1110035H23Rik (NM_134076.1,706-724).
gacaccatctcggaataca

SEQ ID NO: 594700 - DNA, 19 bp, Mus musculus
  siRNA target sequence for 1110035H23Rik (NM_134076.1,710-728).
ccatctcggaatacatcta

SEQ ID NO: 594701 - DNA, 19 bp, Mus musculus
  siRNA target sequence for 1110035H23Rik (NM_134076.1,813-831).
ggagcgaatccacttaatt

SEQ ID NO: 594702 - DNA, 19 bp, Mus musculus
  siRNA target sequence for 1110035H23Rik (NM_134076.1,816-834).
gcgaatccacttaattcga

SEQ ID NO: 594703 - DNA, 19 bp, Mus musculus
  siRNA target sequence for 1110035H23Rik (NM_134076.1,817-835).
cgaatccacttaattcgaa

SEQ ID NO: 594704 - DNA, 19 bp, Mus musculus
  siRNA target sequence for 1110035H23Rik (NM_134076.1,822-840).
ccacttaattcgaaaagat

SEQ ID NO: 594705 - DNA, 19 bp, Mus musculus
  siRNA target sequence for 1700012G19Rik (NM_025954.2,849-867).
cctgtagcctgaagactat

SEQ ID NO: 594706 - DNA, 19 bp, Mus musculus
  siRNA target sequence for 1700012G19Rik (NM_025954.2,888-906).
ccagtcttgaggatgtgaa

SEQ ID NO: 594707 - DNA, 19 bp, Mus musculus
  siRNA target sequence for 1700012G19Rik (NM_025954.2,917-935).
gaaagtgactgcatgttca

SEQ ID NO: 594708 - DNA, 19 bp, Mus musculus
  siRNA target sequence for 1700121L12Rik (NM_026108.1,40-58).
ccaatttcgaccagttaca

SEQ ID NO: 594709 - DNA, 19 bp, Mus musculus
  siRNA target sequence for 1700121L12Rik (NM_026108.1,74-92).
ctggacggacttattctga

SEQ ID NO: 594710 - DNA, 19 bp, Mus musculus
  siRNA target sequence for 1700121L12Rik (NM_026108.1,76-94).
ggacggacttattctgaat

SEQ ID NO: 594711 - DNA, 19 bp, Mus musculus
  siRNA target sequence for 1700121L12Rik (NM_026108.1,77-95).
gacggacttattctgaata

SEQ ID NO: 594712 - DNA, 19 bp, Mus musculus
  siRNA target sequence for 1700121L12Rik (NM_026108.1,79-97).
cggacttattctgaatact

SEQ ID NO: 594713 - DNA, 19 bp, Mus musculus
  siRNA target sequence for 1700121L12Rik (NM_026108.1,112-130).
cgatgtgtttgaagaaata

SEQ ID NO: 594714 - DNA, 19 bp, Mus musculus
  siRNA target sequence for 1700121L12Rik (NM_026108.1,118-136).
gtttgaagaaatatgcaat

SEQ ID NO: 594715 - DNA, 19 bp, Mus musculus
  siRNA target sequence for 1700121L12Rik (NM_026108.1,137-155).
cgctatgggaagaaataca

SEQ ID NO: 594716 - DNA, 19 bp, Mus musculus
  siRNA target sequence for 1700121L12Rik (NM_026108.1,201-219).
ccgcacagaccatagtaga

SEQ ID NO: 594717 - DNA, 19 bp, Mus musculus
  siRNA target sequence for 1700121L12Rik (NM_026108.1,204-222).
cacagaccatagtagagtt

SEQ ID NO: 594718 - DNA, 19 bp, Mus musculus
  siRNA target sequence for 1700121L12Rik (NM_026108.1,224-242).
ctcaatttacccatatcca

SEQ ID NO: 594719 - DNA, 19 bp, Mus musculus
  siRNA target sequence for 1700121L12Rik (NM_026108.1,226-244).
caatttacccatatccaaa

SEQ ID NO: 594720 - DNA, 19 bp, Mus musculus
  siRNA target sequence for 1700121L12Rik (NM_026108.1,372-390).
gctccgagaccgttacctt

SEQ ID NO: 594721 - DNA, 19 bp, Mus musculus
  siRNA target sequence for 1700121L12Rik (NM_026108.1,377-395).
gagaccgttaccttccaaa

SEQ ID NO: 594722 - DNA, 19 bp, Mus musculus
  siRNA target sequence for 1700121L12Rik (NM_026108.1,405-423).
gtagacacacaggattctt

SEQ ID NO: 594723 - DNA, 19 bp, Mus musculus
  siRNA target sequence for 1700121L12Rik (NM_026108.1,482-500).
ggcatggacatatttctaa

SEQ ID NO: 594724 - DNA, 19 bp, Mus musculus
  siRNA target sequence for 1700121L12Rik (NM_026108.1,524-542).
ccccctgatccaaaagact

SEQ ID NO: 594725 - DNA, 19 bp, Mus musculus
  siRNA target sequence for 1700121L12Rik (NM_026108.1,550-568).
ctttgaagattctccaaat

SEQ ID NO: 594726 - DNA, 19 bp, Mus musculus
  siRNA target sequence for 1700121L12Rik (NM_026108.1,604-622).
cgtcatggtacctcatgaa

SEQ ID NO: 594727 - DNA, 19 bp, Mus musculus
  siRNA target sequence for 1700121L12Rik (NM_026108.1,631-649).
cgcagacctaacacgaaaa

SEQ ID NO: 594728 - DNA, 19 bp, Mus musculus
  siRNA target sequence for 1700121L12Rik (NM_026108.1,666-684).
gttccctccacgacttcaa

SEQ ID NO: 594729 - DNA, 19 bp, Mus musculus
  siRNA target sequence for 2010012D11Rik (NM_026512.1,124-142).
cttcggcactgcagtaact

SEQ ID NO: 594730 - DNA, 19 bp, Mus musculus
  siRNA target sequence for 2010012D11Rik (NM_026512.1,301-319).
ctgggaccctcgaggatat

SEQ ID NO: 594731 - DNA, 19 bp, Mus musculus
  siRNA target sequence for 2010012D11Rik (NM_026512.1,304-322).
ggaccctcgaggatatgga

SEQ ID NO: 594732 - DNA, 19 bp, Mus musculus
  siRNA target sequence for 2010012D11Rik (NM_026512.1,305-323).
gaccctcgaggatatggat

SEQ ID NO: 594733 - DNA, 19 bp, Mus musculus
  siRNA target sequence for 2010012D11Rik (NM_026512.1,311-329).
cgaggatatggatattcca

SEQ ID NO: 594734 - DNA, 19 bp, Mus musculus
  siRNA target sequence for 2010012D11Rik (NM_026512.1,330-348).
gacccccagatcgagattt

SEQ ID NO: 594735 - DNA, 19 bp, Mus musculus
  siRNA target sequence for 2010012D11Rik (NM_026512.1,334-352).
cccagatcgagattttcca

SEQ ID NO: 594736 - DNA, 19 bp, Mus musculus
  siRNA target sequence for 2010012D11Rik (NM_026512.1,344-362).
gattttccacgggattttt

SEQ ID NO: 594737 - DNA, 19 bp, Mus musculus
  siRNA target sequence for 2010012D11Rik (NM_026512.1,436-454).
gagtgatggcggcataact

SEQ ID NO: 594738 - DNA, 19 bp, Mus musculus
  siRNA target sequence for 2010012D11Rik (NM_026512.1,468-486).
ctgcaaagtacccatctta

SEQ ID NO: 594739 - DNA, 19 bp, Mus musculus
  siRNA target sequence for 2010012D11Rik (NM_026512.1,470-488).
gcaaagtacccatcttata

SEQ ID NO: 594740 - DNA, 19 bp, Mus musculus
  siRNA target sequence for 2010012D11Rik (NM_026512.1,471-489).
caaagtacccatcttatat

SEQ ID NO: 594741 - DNA, 19 bp, Mus musculus
  siRNA target sequence for 2010012D11Rik (NM_026512.1,509-527).
ggagcaaatgcctatgtca

SEQ ID NO: 594742 - DNA, 19 bp, Mus musculus
  siRNA target sequence for 2010012D11Rik (NM_026512.1,554-572).
ggtatccgagatgtttcta

SEQ ID NO: 594743 - DNA, 19 bp, Mus musculus
  siRNA target sequence for 2010012D11Rik (NM_026512.1,555-573).
gtatccgagatgtttctaa

SEQ ID NO: 594744 - DNA, 19 bp, Mus musculus
  siRNA target sequence for 2010012D11Rik (NM_026512.1,560-578).
cgagatgtttctaaatgga

SEQ ID NO: 594745 - DNA, 19 bp, Mus musculus
  siRNA target sequence for 2010012D11Rik (NM_026512.1,599-617).
ctggaagccctgtatggat

SEQ ID NO: 594746 - DNA, 19 bp, Mus musculus
  siRNA target sequence for 2010012D11Rik (NM_026512.1,601-619).
ggaagccctgtatggatat

SEQ ID NO: 594747 - DNA, 19 bp, Mus musculus
  siRNA target sequence for 2010012D11Rik (NM_026512.1,606-624).
ccctgtatggatatgacta

SEQ ID NO: 594748 - DNA, 19 bp, Mus musculus
  siRNA target sequence for 2010012D11Rik (NM_026512.1,653-671).
gatggcataagccagttta

SEQ ID NO: 594749 - DNA, 19 bp, Mus musculus
  siRNA target sequence for 2010012D11Rik (NM_026512.1,657-675).
gcataagccagtttaaaca

SEQ ID NO: 594750 - DNA, 19 bp, Mus musculus
  siRNA target sequence for 2010012D11Rik (NM_026512.1,658-676).
cataagccagtttaaacaa

SEQ ID NO: 594751 - DNA, 19 bp, Mus musculus
  siRNA target sequence for 2010012D11Rik (NM_026512.1,825-843).
cagaaggcaagcacaactt

SEQ ID NO: 594752 - DNA, 19 bp, Mus musculus
  siRNA target sequence for 2010012D11Rik (NM_026512.1,830-848).
ggcaagcacaacttacact

SEQ ID NO: 594753 - DNA, 19 bp, Mus musculus
  siRNA target sequence for 2010012D11Rik (NM_026512.1,831-849).
gcaagcacaacttacactt

SEQ ID NO: 594754 - DNA, 19 bp, Mus musculus
  siRNA target sequence for 2010012D11Rik (NM_026512.1,832-850).
caagcacaacttacactta

SEQ ID NO: 594755 - DNA, 19 bp, Mus musculus
  siRNA target sequence for 2010012D11Rik (NM_026512.1,852-870).
gctttgcagacgaattcaa

SEQ ID NO: 594756 - DNA, 19 bp, Mus musculus
  siRNA target sequence for 2210401K11Rik (NM_028836.1,136-154).
cgaggtctttgtatttgat

SEQ ID NO: 594757 - DNA, 19 bp, Mus musculus
  siRNA target sequence for 2210401K11Rik (NM_028836.1,205-223).
ggcagcttttggaaaatat

SEQ ID NO: 594758 - DNA, 19 bp, Mus musculus
  siRNA target sequence for 2210401K11Rik (NM_028836.1,258-276).
gagccagggtagtgctaaa

SEQ ID NO: 594759 - DNA, 19 bp, Mus musculus
  siRNA target sequence for 2210401K11Rik (NM_028836.1,262-280).
cagggtagtgctaaaaggt

SEQ ID NO: 594760 - DNA, 19 bp, Mus musculus
  siRNA target sequence for 2210401K11Rik (NM_028836.1,328-346).
gatagctcagaaagttgat

SEQ ID NO: 594761 - DNA, 19 bp, Mus musculus
  siRNA target sequence for 2210401K11Rik (NM_028836.1,372-390).
ggattaatatagacataga

SEQ ID NO: 594762 - DNA, 19 bp, Mus musculus
  siRNA target sequence for 2210401K11Rik (NM_028836.1,406-424).
ctcatcacctgaatatgaa

SEQ ID NO: 594763 - DNA, 19 bp, Mus musculus
  siRNA target sequence for 2210401K11Rik (NM_028836.1,483-501).
cacaggtaacctttgatgt

SEQ ID NO: 594764 - DNA, 19 bp, Mus musculus
  siRNA target sequence for 2210401K11Rik (NM_028836.1,510-528).
caccaaagcgcatagacaa

SEQ ID NO: 594765 - DNA, 19 bp, Mus musculus
  siRNA target sequence for 2210401K11Rik (NM_028836.1,524-542).
gacaaaaggtgctataatt

SEQ ID NO: 594766 - DNA, 19 bp, Mus musculus
  siRNA target sequence for 2210401K11Rik (NM_028836.1,553-571).
cgcagatgcctgtgacttt

SEQ ID NO: 594767 - DNA, 19 bp, Mus musculus
  siRNA target sequence for 2210401K11Rik (NM_028836.1,585-603).
cttacgatgagcaaagtca

SEQ ID NO: 594768 - DNA, 19 bp, Mus musculus
  siRNA target sequence for 2210401K11Rik (NM_028836.1,630-648).
ccaatgctccctacaatca

SEQ ID NO: 594769 - DNA, 19 bp, Mus musculus
  siRNA target sequence for 2210401K11Rik (NM_028836.1,638-656).
ccctacaatcagacattaa

SEQ ID NO: 594770 - DNA, 19 bp, Mus musculus
  siRNA target sequence for 2210401K11Rik (NM_028836.1,640-658).
ctacaatcagacattaact

SEQ ID NO: 594771 - DNA, 19 bp, Mus musculus
  siRNA target sequence for 2210401K11Rik (NM_028836.1,647-665).
cagacattaactggatata

SEQ ID NO: 594772 - DNA, 19 bp, Mus musculus
  siRNA target sequence for 2210401K11Rik (NM_028836.1,649-667).
gacattaactggatatatt

SEQ ID NO: 594773 - DNA, 19 bp, Mus musculus
  siRNA target sequence for 2210401K11Rik (NM_028836.1,657-675).
ctggatatattgactacat

SEQ ID NO: 594774 - DNA, 19 bp, Mus musculus
  siRNA target sequence for 2210401K11Rik (NM_028836.1,659-677).
ggatatattgactacatca

SEQ ID NO: 594775 - DNA, 19 bp, Mus musculus
  siRNA target sequence for 2210401K11Rik (NM_028836.1,660-678).
gatatattgactacatcaa

SEQ ID NO: 594776 - DNA, 19 bp, Mus musculus
  siRNA target sequence for 2210401K11Rik (NM_028836.1,682-700).
gggcattagccctaagaaa

SEQ ID NO: 594777 - DNA, 19 bp, Mus musculus
  siRNA target sequence for 2210401K11Rik (NM_028836.1,684-702).
gcattagccctaagaaact

SEQ ID NO: 594778 - DNA, 19 bp, Mus musculus
  siRNA target sequence for 2210401K11Rik (NM_028836.1,808-826).
ctcactaaaggcagcatat

SEQ ID NO: 594779 - DNA, 19 bp, Mus musculus
  siRNA target sequence for 2210401K11Rik (NM_028836.1,812-830).
ctaaaggcagcatatgtca

SEQ ID NO: 594780 - DNA, 19 bp, Mus musculus
  siRNA target sequence for 2210401K11Rik (NM_028836.1,819-837).
cagcatatgtcaaaaacta

SEQ ID NO: 594781 - DNA, 19 bp, Mus musculus
  siRNA target sequence for 2310004I24Rik (NM_025510.1,223-241).
gcttcagagccactgtttt

SEQ ID NO: 594782 - DNA, 19 bp, Mus musculus
  siRNA target sequence for 2310004I24Rik (NM_025510.1,237-255).
gttttccttcggagttata

SEQ ID NO: 594783 - DNA, 19 bp, Mus musculus
  siRNA target sequence for 2310004I24Rik (NM_025510.1,272-290).
cagatttagaagatggata

SEQ ID NO: 594784 - DNA, 19 bp, Mus musculus
  siRNA target sequence for 2310004I24Rik (NM_025510.1,283-301).
gatggatacaattatcaaa

SEQ ID NO: 594785 - DNA, 19 bp, Mus musculus
  siRNA target sequence for 2310004I24Rik (NM_025510.1,318-336).
ctaccgacacagtcttatt

SEQ ID NO: 594786 - DNA, 19 bp, Mus musculus
  siRNA target sequence for 2310004I24Rik (NM_025510.1,322-340).
cgacacagtcttattcact

SEQ ID NO: 594787 - DNA, 19 bp, Mus musculus
  siRNA target sequence for 2310004I24Rik (NM_025510.1,408-426).
catcatcgatggctacaat

SEQ ID NO: 594788 - DNA, 19 bp, Mus musculus
  siRNA target sequence for 2310004I24Rik (NM_025510.1,452-470).
ctctagaacttgtcatgaa

SEQ ID NO: 594789 - DNA, 19 bp, Mus musculus
  siRNA target sequence for 2310004I24Rik (NM_025510.1,457-475).
gaacttgtcatgaacacat

SEQ ID NO: 594790 - DNA, 19 bp, Mus musculus
  siRNA target sequence for 2310004I24Rik (NM_025510.1,506-524).
cgtgggggaaccatgagtt

SEQ ID NO: 594791 - DNA, 19 bp, Mus musculus
  siRNA target sequence for 2310004I24Rik (NM_025510.1,510-528).
ggggaaccatgagttctat

SEQ ID NO: 594792 - DNA, 19 bp, Mus musculus
  siRNA target sequence for 2310004I24Rik (NM_025510.1,531-549).
cttcagcagagactactta

SEQ ID NO: 594793 - DNA, 19 bp, Mus musculus
  siRNA target sequence for 2310004I24Rik (NM_025510.1,608-626).
ccacgccatcagagaacta

SEQ ID NO: 594794 - DNA, 19 bp, Mus musculus
  siRNA target sequence for 2310004I24Rik (NM_025510.1,609-627).
cacgccatcagagaactat

SEQ ID NO: 594795 - DNA, 19 bp, Mus musculus
  siRNA target sequence for 2310004I24Rik (NM_025510.1,651-669).
ccctaagttccggttcatt

SEQ ID NO: 594796 - DNA, 19 bp, Mus musculus
  siRNA target sequence for 2310004I24Rik (NM_025510.1,652-670).
cctaagttccggttcattt

SEQ ID NO: 594797 - DNA, 19 bp, Mus musculus
  siRNA target sequence for 2310004I24Rik (NM_025510.1,653-671).
ctaagttccggttcatttt

SEQ ID NO: 594798 - DNA, 19 bp, Mus musculus
  siRNA target sequence for 2310004I24Rik (NM_025510.1,666-684).
cattttactcgattcttat

SEQ ID NO: 594799 - DNA, 19 bp, Mus musculus
  siRNA target sequence for 2310004I24Rik (NM_025510.1,699-717).
gggcatagacccatcttct

SEQ ID NO: 594800 - DNA, 19 bp, Mus musculus
  siRNA target sequence for 2310004I24Rik (NM_025510.1,719-737).
caaaatatgagcagtgtat

SEQ ID NO: 594801 - DNA, 19 bp, Mus musculus
  siRNA target sequence for 2310004I24Rik (NM_025510.1,749-767).
gggagcacaacccaaatgt

SEQ ID NO: 594802 - DNA, 19 bp, Mus musculus
  siRNA target sequence for 2310004I24Rik (NM_025510.1,760-778).
ccaaatgtggagttgaata

SEQ ID NO: 594803 - DNA, 19 bp, Mus musculus
  siRNA target sequence for 2310004I24Rik (NM_025510.1,782-800).
cccaaggtgaattattgct

SEQ ID NO: 594804 - DNA, 19 bp, Mus musculus
  siRNA target sequence for 2310016A09Rik (NM_181588.2,193-211).
caggcaaagccgtgattgt

SEQ ID NO: 594805 - DNA, 19 bp, Mus musculus
  siRNA target sequence for 2310016A09Rik (NM_181588.2,206-224).
gattgtcgtccaggatata

SEQ ID NO: 594806 - DNA, 19 bp, Mus musculus
  siRNA target sequence for 2310016A09Rik (NM_181588.2,250-268).
ggtatatggctgacatgat

SEQ ID NO: 594807 - DNA, 19 bp, Mus musculus
  siRNA target sequence for 2310016A09Rik (NM_181588.2,263-281).
catgattgccagaaatgga

SEQ ID NO: 594808 - DNA, 19 bp, Mus musculus
  siRNA target sequence for 2310016A09Rik (NM_181588.2,270-288).
gccagaaatggatacacaa

SEQ ID NO: 594809 - DNA, 19 bp, Mus musculus
  siRNA target sequence for 2310016A09Rik (NM_181588.2,289-307).
ctattgtcccagacttctt

SEQ ID NO: 594810 - DNA, 19 bp, Mus musculus
  siRNA target sequence for 2310016A09Rik (NM_181588.2,356-374).
cgcgtggttgaaatcaaga

SEQ ID NO: 594811 - DNA, 19 bp, Mus musculus
  siRNA target sequence for 2310016A09Rik (NM_181588.2,405-423).
gctgtcttgaggtatctga

SEQ ID NO: 594812 - DNA, 19 bp, Mus musculus
  siRNA target sequence for 2310016A09Rik (NM_181588.2,431-449).
gtgtcatgctcagaagatt

SEQ ID NO: 594813 - DNA, 19 bp, Mus musculus
  siRNA target sequence for 2310016A09Rik (NM_181588.2,522-540).
ggggtgtctgtctatggta

SEQ ID NO: 594814 - DNA, 19 bp, Mus musculus
  siRNA target sequence for 2310016A09Rik (NM_181588.2,523-541).
gggtgtctgtctatggtat

SEQ ID NO: 594815 - DNA, 19 bp, Mus musculus
  siRNA target sequence for 2310016A09Rik (NM_181588.2,547-565).
gagattctgaagatgttta

SEQ ID NO: 594816 - DNA, 19 bp, Mus musculus
  siRNA target sequence for 2310016A09Rik (NM_181588.2,618-636).
ccacttgagcaggtttcta

SEQ ID NO: 594817 - DNA, 19 bp, Mus musculus
  siRNA target sequence for 2310016A09Rik (NM_181588.2,662-680).
ctgcatagttaattaccaa

SEQ ID NO: 594818 - DNA, 19 bp, Mus musculus
  siRNA target sequence for 2310016A09Rik (NM_181588.2,767-785).
ggcaaggaggaacctaatt

SEQ ID NO: 594819 - DNA, 19 bp, Mus musculus
  siRNA target sequence for 2310016A09Rik (NM_181588.2,769-787).
caaggaggaacctaattga

SEQ ID NO: 594820 - DNA, 19 bp, Mus musculus
  siRNA target sequence for 2310057D15Rik (NM_026421.1,238-256).
caccgtaatcctgttagat

SEQ ID NO: 594821 - DNA, 19 bp, Mus musculus
  siRNA target sequence for 2310057D15Rik (NM_026421.1,240-258).
ccgtaatcctgttagatat

SEQ ID NO: 594822 - DNA, 19 bp, Mus musculus
  siRNA target sequence for 2310057D15Rik (NM_026421.1,286-304).
cgtgaaggatgttttattt

SEQ ID NO: 594823 - DNA, 19 bp, Mus musculus
  siRNA target sequence for 2310057D15Rik (NM_026421.1,296-314).
gttttatttccgtacatca

SEQ ID NO: 594824 - DNA, 19 bp, Mus musculus
  siRNA target sequence for 2310057D15Rik (NM_026421.1,576-594).
gcatgaaggcagagttctt

SEQ ID NO: 594825 - DNA, 19 bp, Mus musculus
  siRNA target sequence for 2310057D15Rik (NM_026421.1,577-595).
catgaaggcagagttcttt

SEQ ID NO: 594826 - DNA, 19 bp, Mus musculus
  siRNA target sequence for 2310057D15Rik (NM_026421.1,744-762).
ccaagattggacacaaagt

SEQ ID NO: 594827 - DNA, 19 bp, Mus musculus
  siRNA target sequence for 2310057D15Rik (NM_026421.1,791-809).
gatagcatcggttgttcaa

SEQ ID NO: 594828 - DNA, 19 bp, Mus musculus
  siRNA target sequence for 2310057D15Rik (NM_026421.1,800-818).
ggttgttcaaccaacaaca

SEQ ID NO: 594829 - DNA, 19 bp, Mus musculus
  siRNA target sequence for 2310057D15Rik (NM_026421.1,801-819).
gttgttcaaccaacaacat

SEQ ID NO: 594830 - DNA, 19 bp, Mus musculus
  siRNA target sequence for 2310057D15Rik (NM_026421.1,915-933).
ctgacgacgagaagacata

SEQ ID NO: 594831 - DNA, 19 bp, Mus musculus
  siRNA target sequence for 2610509I15Rik (NM_146108.1,114-132).
gaagagccagcgttattct

SEQ ID NO: 594832 - DNA, 19 bp, Mus musculus
  siRNA target sequence for 2610509I15Rik (NM_146108.1,123-141).
gcgttattctgcaacatct

SEQ ID NO: 594833 - DNA, 19 bp, Mus musculus
  siRNA target sequence for 2610509I15Rik (NM_146108.1,191-209).
ggctgtggaggcgtcataa

SEQ ID NO: 594834 - DNA, 19 bp, Mus musculus
  siRNA target sequence for 2610509I15Rik (NM_146108.1,232-250).
caacgcactgagtctgaat

SEQ ID NO: 594835 - DNA, 19 bp, Mus musculus
  siRNA target sequence for 2610509I15Rik (NM_146108.1,236-254).
gcactgagtctgaatatga

SEQ ID NO: 594836 - DNA, 19 bp, Mus musculus
  siRNA target sequence for 2610509I15Rik (NM_146108.1,265-283).
ctatccacagctaaagaca

SEQ ID NO: 594837 - DNA, 19 bp, Mus musculus
  siRNA target sequence for 2610509I15Rik (NM_146108.1,297-315).
ctgacacattcctgatcat

SEQ ID NO: 594838 - DNA, 19 bp, Mus musculus
  siRNA target sequence for 2610509I15Rik (NM_146108.1,299-317).
gacacattcctgatcatca

SEQ ID NO: 594839 - DNA, 19 bp, Mus musculus
  siRNA target sequence for 2610509I15Rik (NM_146108.1,345-363).
gtgctggaggggacatcaa

SEQ ID NO: 594840 - DNA, 19 bp, Mus musculus
  siRNA target sequence for 2610509I15Rik (NM_146108.1,394-412).
gaatttaactcaagattta

SEQ ID NO: 594841 - DNA, 19 bp, Mus musculus
  siRNA target sequence for 2610509I15Rik (NM_146108.1,446-464).
gcatcttgtcagaaaccat

SEQ ID NO: 594842 - DNA, 19 bp, Mus musculus
  siRNA target sequence for 2610509I15Rik (NM_146108.1,462-480).
catatgttgcccttattga

SEQ ID NO: 594843 - DNA, 19 bp, Mus musculus
  siRNA target sequence for 2610509I15Rik (NM_146108.1,473-491).
cttattgatggaatcacaa

SEQ ID NO: 594844 - DNA, 19 bp, Mus musculus
  siRNA target sequence for 2610509I15Rik (NM_146108.1,590-608).
gatgtgggtggaggttatt

SEQ ID NO: 594845 - DNA, 19 bp, Mus musculus
  siRNA target sequence for 2610509I15Rik (NM_146108.1,593-611).
gtgggtggaggttatttct

SEQ ID NO: 594846 - DNA, 19 bp, Mus musculus
  siRNA target sequence for 2610509I15Rik (NM_146108.1,661-679).
cagactaaagggaagagat

SEQ ID NO: 594847 - DNA, 19 bp, Mus musculus
  siRNA target sequence for 2610509I15Rik (NM_146108.1,691-709).
gggaattgccacacacttt

SEQ ID NO: 594848 - DNA, 19 bp, Mus musculus
  siRNA target sequence for 2610509I15Rik (NM_146108.1,743-761).
gagctgttagccttaaagt

SEQ ID NO: 594849 - DNA, 19 bp, Mus musculus
  siRNA target sequence for 2610509I15Rik (NM_146108.1,745-763).
gctgttagccttaaagtca

SEQ ID NO: 594850 - DNA, 19 bp, Mus musculus
  siRNA target sequence for 2610509I15Rik (NM_146108.1,779-797).
gttgcaggtgtcttagaaa

SEQ ID NO: 594851 - DNA, 19 bp, Mus musculus
  siRNA target sequence for 2610509I15Rik (NM_146108.1,783-801).
caggtgtcttagaaagcta

SEQ ID NO: 594852 - DNA, 19 bp, Mus musculus
  siRNA target sequence for 2610509I15Rik (NM_146108.1,817-835).
gatggatcaagacaaatct

SEQ ID NO: 594853 - DNA, 19 bp, Mus musculus
  siRNA target sequence for 2610509I15Rik (NM_146108.1,824-842).
caagacaaatctatcatat

SEQ ID NO: 594854 - DNA, 19 bp, Mus musculus
  siRNA target sequence for 2610509I15Rik (NM_146108.1,857-875).
gacaaaataaacagttgtt

SEQ ID NO: 594855 - DNA, 19 bp, Mus musculus
  siRNA target sequence for 2610509I15Rik (NM_146108.1,882-900).
ccaataccgtggaacagat

SEQ ID NO: 594856 - DNA, 19 bp, Mus musculus
  siRNA target sequence for 2610509I15Rik (NM_146108.1,883-901).
caataccgtggaacagata

SEQ ID NO: 594857 - DNA, 19 bp, Mus musculus
  siRNA target sequence for 2610509I15Rik (NM_146108.1,889-907).
cgtggaacagataattgaa

SEQ ID NO: 594858 - DNA, 19 bp, Mus musculus
  siRNA target sequence for 2610509I15Rik (NM_146108.1,890-908).
gtggaacagataattgaaa

SEQ ID NO: 594859 - DNA, 19 bp, Mus musculus
  siRNA target sequence for 2610509I15Rik (NM_146108.1,930-948).
cttttgccatagaacagat

SEQ ID NO: 594860 - DNA, 19 bp, Mus musculus
  siRNA target sequence for 2610509I15Rik (NM_146108.1,944-962).
cagatgaaggtaattaata

SEQ ID NO: 594861 - DNA, 19 bp, Mus musculus
  siRNA target sequence for 2610509I15Rik (NM_146108.1,1001-1019).
ctcatggagggctcttcaa

SEQ ID NO: 594862 - DNA, 19 bp, Mus musculus
  siRNA target sequence for 2610509I15Rik (NM_146108.1,1007-1025).
gagggctcttcaaagactt

SEQ ID NO: 594863 - DNA, 19 bp, Mus musculus
  siRNA target sequence for 2610509I15Rik (NM_146108.1,1031-1049).
gaggtactgatcatggaat

SEQ ID NO: 594864 - DNA, 19 bp, Mus musculus
  siRNA target sequence for 2610509I15Rik (NM_146108.1,1042-1060).
catggaatatcggataact

SEQ ID NO: 594865 - DNA, 19 bp, Mus musculus
  siRNA target sequence for 2610509I15Rik (NM_146108.1,1053-1071).
ggataactcaagcatgtat

SEQ ID NO: 594866 - DNA, 19 bp, Mus musculus
  siRNA target sequence for 2610509I15Rik (NM_146108.1,1068-1086).
gtatggaagggcatgactt

SEQ ID NO: 594867 - DNA, 19 bp, Mus musculus
  siRNA target sequence for 2610509I15Rik (NM_146108.1,1137-1155).
ggaaaccagccaatctaaa

SEQ ID NO: 594868 - DNA, 19 bp, Mus musculus
  siRNA target sequence for 2610509I15Rik (NM_146108.1,1138-1156).
gaaaccagccaatctaaaa

SEQ ID NO: 594869 - DNA, 19 bp, Mus musculus
  siRNA target sequence for 2610509I15Rik (NM_146108.1,1172-1190).
gacttgaatagttacttta

SEQ ID NO: 594870 - DNA, 19 bp, Mus musculus
  siRNA target sequence for 2810435D12Rik (NM_024257.1,267-285).
gacccgtcggggaggaata

SEQ ID NO: 594871 - DNA, 19 bp, Mus musculus
  siRNA target sequence for 2810435D12Rik (NM_024257.1,640-658).
ccttggcctgcgagaacat

SEQ ID NO: 594872 - DNA, 19 bp, Mus musculus
  siRNA target sequence for 2810435D12Rik (NM_024257.1,730-748).
gcagcgcgcttgtgtagaa

SEQ ID NO: 594873 - DNA, 19 bp, Mus musculus
  siRNA target sequence for 2810435D12Rik (NM_024257.1,761-779).
gcccacgtgggggatagtt

SEQ ID NO: 594874 - DNA, 19 bp, Mus musculus
  siRNA target sequence for 2810435D12Rik (NM_024257.1,762-780).
cccacgtgggggatagtta

SEQ ID NO: 594875 - DNA, 19 bp, Mus musculus
  siRNA target sequence for 2810435D12Rik (NM_024257.1,773-791).
gatagttacctctgtgatt

SEQ ID NO: 594876 - DNA, 19 bp, Mus musculus
  siRNA target sequence for 2810435D12Rik (NM_024257.1,870-888).
ctgtacctaaggaacatat

SEQ ID NO: 594877 - DNA, 19 bp, Mus musculus
  siRNA target sequence for 2810435D12Rik (NM_024257.1,935-953).
gcctcaagccctatgtcat

SEQ ID NO: 594878 - DNA, 19 bp, Mus musculus
  siRNA target sequence for 3110023E09Rik (NM_026522.2,227-245).
ggtggtgacggacatcaaa

SEQ ID NO: 594879 - DNA, 19 bp, Mus musculus
  siRNA target sequence for 3110023E09Rik (NM_026522.2,270-288).
cgtagctactgctcatcaa

SEQ ID NO: 594880 - DNA, 19 bp, Mus musculus
  siRNA target sequence for 3110023E09Rik (NM_026522.2,289-307).
gggctcgggagagaaactt

SEQ ID NO: 594881 - DNA, 19 bp, Mus musculus
  siRNA target sequence for 3110023E09Rik (NM_026522.2,290-308).
ggctcgggagagaaacttt

SEQ ID NO: 594882 - DNA, 19 bp, Mus musculus
  siRNA target sequence for 3110023E09Rik (NM_026522.2,400-418).
cagtctggttgcaactgaa

SEQ ID NO: 594883 - DNA, 19 bp, Mus musculus
  siRNA target sequence for 3110023E09Rik (NM_026522.2,421-439).
gacgtggtcgtgagatgtt

SEQ ID NO: 594884 - DNA, 19 bp, Mus musculus
  siRNA target sequence for 3110023E09Rik (NM_026522.2,426-444).
ggtcgtgagatgtttgaaa

SEQ ID NO: 594885 - DNA, 19 bp, Mus musculus
  siRNA target sequence for 3110023E09Rik (NM_026522.2,427-445).
gtcgtgagatgtttgaaat

SEQ ID NO: 594886 - DNA, 19 bp, Mus musculus
  siRNA target sequence for 3110023E09Rik (NM_026522.2,520-538).
ctcgacttctgtttgaaga

SEQ ID NO: 594887 - DNA, 19 bp, Mus musculus
  siRNA target sequence for 3110023E09Rik (NM_026522.2,619-637).
caaagaaccagcattttga

SEQ ID NO: 594888 - DNA, 19 bp, Mus musculus
  siRNA target sequence for 3110023E09Rik (NM_026522.2,668-686).
gctgagccagaaacatgta

SEQ ID NO: 594889 - DNA, 19 bp, Mus musculus
  siRNA target sequence for 3110023E09Rik (NM_026522.2,687-705).
ggcctcattcacatgctta

SEQ ID NO: 594890 - DNA, 19 bp, Mus musculus
  siRNA target sequence for 3110023E09Rik (NM_026522.2,834-852).
gcggagcacttctttgagt

SEQ ID NO: 594891 - DNA, 19 bp, Mus musculus
  siRNA target sequence for 3110052N05Rik (NM_029826.1,92-110).
cgttaaaagctgttttggt

SEQ ID NO: 594892 - DNA, 19 bp, Mus musculus
  siRNA target sequence for 3110052N05Rik (NM_029826.1,156-174).
cgcacaggaagctcttaaa

SEQ ID NO: 594893 - DNA, 19 bp, Mus musculus
  siRNA target sequence for 3110052N05Rik (NM_029826.1,157-175).
gcacaggaagctcttaaaa

SEQ ID NO: 594894 - DNA, 19 bp, Mus musculus
  siRNA target sequence for 3110052N05Rik (NM_029826.1,193-211).
gtgatggttcggtttgtga

SEQ ID NO: 594895 - DNA, 19 bp, Mus musculus
  siRNA target sequence for 3110052N05Rik (NM_029826.1,199-217).
gttcggtttgtgaccaata

SEQ ID NO: 594896 - DNA, 19 bp, Mus musculus
  siRNA target sequence for 3110052N05Rik (NM_029826.1,240-258).
cctactggagagactgaaa

SEQ ID NO: 594897 - DNA, 19 bp, Mus musculus
  siRNA target sequence for 3110052N05Rik (NM_029826.1,241-259).
ctactggagagactgaaaa

SEQ ID NO: 594898 - DNA, 19 bp, Mus musculus
  siRNA target sequence for 3110052N05Rik (NM_029826.1,303-321).
gacagcagcccgaaactta

SEQ ID NO: 594899 - DNA, 19 bp, Mus musculus
  siRNA target sequence for 3110052N05Rik (NM_029826.1,305-323).
cagcagcccgaaacttaat

SEQ ID NO: 594900 - DNA, 19 bp, Mus musculus
  siRNA target sequence for 3110052N05Rik (NM_029826.1,308-326).
cagcccgaaacttaatcga

SEQ ID NO: 594901 - DNA, 19 bp, Mus musculus
  siRNA target sequence for 3110052N05Rik (NM_029826.1,376-394).
gagttcacaggagttcaaa

SEQ ID NO: 594902 - DNA, 19 bp, Mus musculus
  siRNA target sequence for 3110052N05Rik (NM_029826.1,426-444).
ggcaccagagcattttcat

SEQ ID NO: 594903 - DNA, 19 bp, Mus musculus
  siRNA target sequence for 3110052N05Rik (NM_029826.1,427-445).
gcaccagagcattttcatt

SEQ ID NO: 594904 - DNA, 19 bp, Mus musculus
  siRNA target sequence for 3110052N05Rik (NM_029826.1,485-503).
gagcccctctgatagctat

SEQ ID NO: 594905 - DNA, 19 bp, Mus musculus
  siRNA target sequence for 3110052N05Rik (NM_029826.1,505-523).
cacaaggccaggtactaca

SEQ ID NO: 594906 - DNA, 19 bp, Mus musculus
  siRNA target sequence for 3110052N05Rik (NM_029826.1,516-534).
gtactacaagagaaaagat

SEQ ID NO: 594907 - DNA, 19 bp, Mus musculus
  siRNA target sequence for 3110052N05Rik (NM_029826.1,543-561).
cttgggaccaggaccattt

SEQ ID NO: 594908 - DNA, 19 bp, Mus musculus
  siRNA target sequence for 3110052N05Rik (NM_029826.1,663-681).
ggaggaggccgtcatgata

SEQ ID NO: 594909 - DNA, 19 bp, Mus musculus
  siRNA target sequence for 3110052N05Rik (NM_029826.1,705-723).
cgatggggctcagaacatt

SEQ ID NO: 594910 - DNA, 19 bp, Mus musculus
  siRNA target sequence for 3110052N05Rik (NM_029826.1,742-760).
gttaaaaccgggaaataca

SEQ ID NO: 594911 - DNA, 19 bp, Mus musculus
  siRNA target sequence for 4933425L06Rik (NM_025751.1,139-157).
gacatggactcctataact

SEQ ID NO: 594912 - DNA, 19 bp, Mus musculus
  siRNA target sequence for 4933425L06Rik (NM_025751.1,145-163).
gactcctataacttgacta

SEQ ID NO: 594913 - DNA, 19 bp, Mus musculus
  siRNA target sequence for 4933425L06Rik (NM_025751.1,149-167).
cctataacttgactatact

SEQ ID NO: 594914 - DNA, 19 bp, Mus musculus
  siRNA target sequence for 4933425L06Rik (NM_025751.1,150-168).
ctataacttgactatactt

SEQ ID NO: 594915 - DNA, 19 bp, Mus musculus
  siRNA target sequence for 4933425L06Rik (NM_025751.1,235-253).
gccacagccgtgaaaagat

SEQ ID NO: 594916 - DNA, 19 bp, Mus musculus
  siRNA target sequence for 4933425L06Rik (NM_025751.1,261-279).
cctgaatccactcttgatt

SEQ ID NO: 594917 - DNA, 19 bp, Mus musculus
  siRNA target sequence for 4933425L06Rik (NM_025751.1,282-300).
cagtggcgactgcttaaat

SEQ ID NO: 594918 - DNA, 19 bp, Mus musculus
  siRNA target sequence for 4933425L06Rik (NM_025751.1,286-304).
ggcgactgcttaaatcctt

SEQ ID NO: 594919 - DNA, 19 bp, Mus musculus
  siRNA target sequence for 4933425L06Rik (NM_025751.1,306-324).
catcttaagcacaataaca

SEQ ID NO: 594920 - DNA, 19 bp, Mus musculus
  siRNA target sequence for 4933425L06Rik (NM_025751.1,329-347).
gaaagcatatgatctctat

SEQ ID NO: 594921 - DNA, 19 bp, Mus musculus
  siRNA target sequence for 4933425L06Rik (NM_025751.1,333-351).
gcatatgatctctatatta

SEQ ID NO: 594922 - DNA, 19 bp, Mus musculus
  siRNA target sequence for 4933425L06Rik (NM_025751.1,409-427).
gatattttggaagagtata

SEQ ID NO: 594923 - DNA, 19 bp, Mus musculus
  siRNA target sequence for 4933425L06Rik (NM_025751.1,458-476).
gtaacgtccatgacagatt

SEQ ID NO: 594924 - DNA, 19 bp, Mus musculus
  siRNA target sequence for 4933425L06Rik (NM_025751.1,462-480).
cgtccatgacagattcaca

SEQ ID NO: 594925 - DNA, 19 bp, Mus musculus
  siRNA target sequence for 4933425L06Rik (NM_025751.1,502-520).
gcagtcaaaaagatagtta

SEQ ID NO: 594926 - DNA, 19 bp, Mus musculus
  siRNA target sequence for 4933425L06Rik (NM_025751.1,503-521).
cagtcaaaaagatagttaa

SEQ ID NO: 594927 - DNA, 19 bp, Mus musculus
  siRNA target sequence for 4933425L06Rik (NM_025751.1,522-540).
ctggaacaatcggaaaatt

SEQ ID NO: 594928 - DNA, 19 bp, Mus musculus
  siRNA target sequence for 4933425L06Rik (NM_025751.1,578-596).
ctctggccacagttaataa

SEQ ID NO: 594929 - DNA, 19 bp, Mus musculus
  siRNA target sequence for 4933425L06Rik (NM_025751.1,589-607).
gttaataaggccaatgtaa

SEQ ID NO: 594930 - DNA, 19 bp, Mus musculus
  siRNA target sequence for 4933425L06Rik (NM_025751.1,682-700).
gccatgacgcacatgaagt

SEQ ID NO: 594931 - DNA, 19 bp, Mus musculus
  siRNA target sequence for 4933425L06Rik (NM_025751.1,766-784).
cacgaatatgggatcaaga

SEQ ID NO: 594932 - DNA, 19 bp, Mus musculus
  siRNA target sequence for 4933425L06Rik (NM_025751.1,768-786).
cgaatatgggatcaagaaa

SEQ ID NO: 594933 - DNA, 19 bp, Mus musculus
  siRNA target sequence for 4933425L06Rik (NM_025751.1,805-823).
gtcaagagtggatctgatt

SEQ ID NO: 594934 - DNA, 19 bp, Mus musculus
  siRNA target sequence for 4933425L06Rik (NM_025751.1,862-880).
gcttcgttccagtatgtat

SEQ ID NO: 594935 - DNA, 19 bp, Mus musculus
  siRNA target sequence for 4933425L06Rik (NM_025751.1,863-881).
cttcgttccagtatgtatt

SEQ ID NO: 594936 - DNA, 19 bp, Mus musculus
  siRNA target sequence for 4933425L06Rik (NM_025751.1,920-938).
catatatcaaagcaatagt

SEQ ID NO: 594937 - DNA, 19 bp, Mus musculus
  siRNA target sequence for 4933425L06Rik (NM_025751.1,1005-1023).
ggatggccgtgagattact

SEQ ID NO: 594938 - DNA, 19 bp, Mus musculus
  siRNA target sequence for 4933425L06Rik (NM_025751.1,1009-1027).
ggccgtgagattactgtaa

SEQ ID NO: 594939 - DNA, 19 bp, Mus musculus
  siRNA target sequence for 4933425L06Rik (NM_025751.1,1011-1029).
ccgtgagattactgtaaga

SEQ ID NO: 594940 - DNA, 19 bp, Mus musculus
  siRNA target sequence for 4933425L06Rik (NM_025751.1,1088-1106).
ctgatgtggcactccttaa

SEQ ID NO: 594941 - DNA, 19 bp, Mus musculus
  siRNA target sequence for 4933425L06Rik (NM_025751.1,1090-1108).
gatgtggcactccttaatt

SEQ ID NO: 594942 - DNA, 19 bp, Mus musculus
  siRNA target sequence for 4933425L06Rik (NM_025751.1,1111-1129).
ggtactctcaggtatgaca

SEQ ID NO: 594943 - DNA, 19 bp, Mus musculus
  siRNA target sequence for 4933425L06Rik (NM_025751.1,1115-1133).
ctctcaggtatgacagaat

SEQ ID NO: 594944 - DNA, 19 bp, Mus musculus
  siRNA target sequence for 4933425L06Rik (NM_025751.1,1137-1155).
cccgccagggaatttcact

SEQ ID NO: 594945 - DNA, 19 bp, Mus musculus
  siRNA target sequence for 4933425L06Rik (NM_025751.1,1182-1200).
cattgtggacccagtttta

SEQ ID NO: 594946 - DNA, 19 bp, Mus musculus
  siRNA target sequence for 4933425L06Rik (NM_025751.1,1237-1255).
cttgaaaatggggtttaca

SEQ ID NO: 594947 - DNA, 19 bp, Mus musculus
  siRNA target sequence for 4933425L06Rik (NM_025751.1,1291-1309).
gctgggttagaatttggat

SEQ ID NO: 594948 - DNA, 19 bp, Mus musculus
  siRNA target sequence for 4933425L06Rik (NM_025751.1,1292-1310).
ctgggttagaatttggatt

SEQ ID NO: 594949 - DNA, 19 bp, Mus musculus
  siRNA target sequence for 4933425L06Rik (NM_025751.1,1327-1345).
ccaggccatcgagtcataa

SEQ ID NO: 594950 - DNA, 19 bp, Mus musculus
  siRNA target sequence for 4933425L06Rik (NM_025751.1,1331-1349).
gccatcgagtcataagaga

SEQ ID NO: 594951 - DNA, 19 bp, Mus musculus
  siRNA target sequence for 4933425L06Rik (NM_025751.1,1363-1381).
caaggacagtacttacaga

SEQ ID NO: 594952 - DNA, 19 bp, Mus musculus
  siRNA target sequence for 4933425L06Rik (NM_025751.1,1431-1449).
ggatggctacagtatgttt

SEQ ID NO: 594953 - DNA, 19 bp, Mus musculus
  siRNA target sequence for 4933425L06Rik (NM_025751.1,1432-1450).
gatggctacagtatgttta

SEQ ID NO: 594954 - DNA, 19 bp, Mus musculus
  siRNA target sequence for 4933425L06Rik (NM_025751.1,1496-1514).
ctacagtcgtcatgaatca

SEQ ID NO: 594955 - DNA, 19 bp, Mus musculus
  siRNA target sequence for 4933425L06Rik (NM_025751.1,1503-1521).
cgtcatgaatcactttgaa

SEQ ID NO: 594956 - DNA, 19 bp, Mus musculus
  siRNA target sequence for 4933425L06Rik (NM_025751.1,1504-1522).
gtcatgaatcactttgaat

SEQ ID NO: 594957 - DNA, 19 bp, Mus musculus
  siRNA target sequence for 4933425L06Rik (NM_025751.1,1509-1527).
gaatcactttgaatccata

SEQ ID NO: 594958 - DNA, 19 bp, Mus musculus
  siRNA target sequence for 4933425L06Rik (NM_025751.1,1564-1582).
catcggatgagtttgatca

SEQ ID NO: 594959 - DNA, 19 bp, Mus musculus
  siRNA target sequence for 4933425L06Rik (NM_025751.1,1578-1596).
gatcacgacgacaaacaaa

SEQ ID NO: 594960 - DNA, 19 bp, Mus musculus
  siRNA target sequence for 4933425L06Rik (NM_025751.1,1635-1653).
gccattgggagtaattgca

SEQ ID NO: 594961 - DNA, 19 bp, Mus musculus
  siRNA target sequence for 4933425L06Rik (NM_025751.1,1658-1676).
ctggcctagaaggaagaat

SEQ ID NO: 594962 - DNA, 19 bp, Mus musculus
  siRNA target sequence for 4933425L06Rik (NM_025751.1,1660-1678).
ggcctagaaggaagaatct

SEQ ID NO: 594963 - DNA, 19 bp, Mus musculus
  siRNA target sequence for 4933425L06Rik (NM_025751.1,1666-1684).
gaaggaagaatcttccata

SEQ ID NO: 594964 - DNA, 19 bp, Mus musculus
  siRNA target sequence for 4933425L06Rik (NM_025751.1,1748-1766).
ctttccccaccattagtga

SEQ ID NO: 594965 - DNA, 19 bp, Mus musculus
  siRNA target sequence for 9030624L02Rik (NM_172759.1,55-73).
gccactatacaaacttctt

SEQ ID NO: 594966 - DNA, 19 bp, Mus musculus
  siRNA target sequence for 9030624L02Rik (NM_172759.1,327-345).
caaacatgtgtctacaaaa

SEQ ID NO: 594967 - DNA, 19 bp, Mus musculus
  siRNA target sequence for 9030624L02Rik (NM_172759.1,865-883).
cagaatagtggccaatcta

SEQ ID NO: 594968 - DNA, 19 bp, Mus musculus
  siRNA target sequence for 9030624L02Rik (NM_172759.1,922-940).
ctgcctaagaggcaagaat

SEQ ID NO: 594969 - DNA, 19 bp, Mus musculus
  siRNA target sequence for 9030624L02Rik (NM_172759.1,924-942).
gcctaagaggcaagaatga

SEQ ID NO: 594970 - DNA, 19 bp, Mus musculus
  siRNA target sequence for 9030624L02Rik (NM_172759.1,925-943).
cctaagaggcaagaatgaa

SEQ ID NO: 594971 - DNA, 19 bp, Mus musculus
  siRNA target sequence for 9030624L02Rik (NM_172759.1,1030-1048).
gatggcctctaaggatttt

SEQ ID NO: 594972 - DNA, 19 bp, Mus musculus
  siRNA target sequence for 9030624L02Rik (NM_172759.1,1111-1129).
catggacccagctcagaaa

SEQ ID NO: 594973 - DNA, 19 bp, Mus musculus
  siRNA target sequence for 9030624L02Rik (NM_172759.1,1456-1474).
gttcggtaacataaaactt

SEQ ID NO: 594974 - DNA, 19 bp, Mus musculus
  siRNA target sequence for 9030624L02Rik (NM_172759.1,1461-1479).
gtaacataaaacttcctta

SEQ ID NO: 594975 - DNA, 19 bp, Mus musculus
  siRNA target sequence for 9030624L02Rik (NM_172759.1,1495-1513).
gcaactaagcagaaggata

SEQ ID NO: 594976 - DNA, 19 bp, Mus musculus
  siRNA target sequence for 9030624L02Rik (NM_172759.1,1496-1514).
caactaagcagaaggataa

SEQ ID NO: 594977 - DNA, 19 bp, Mus musculus
  siRNA target sequence for 9130231C15Rik (NM_133960.2,349-367).
gtctgcagcctgatataat

SEQ ID NO: 594978 - DNA, 19 bp, Mus musculus
  siRNA target sequence for 9130231C15Rik (NM_133960.2,351-369).
ctgcagcctgatataatga

SEQ ID NO: 594979 - DNA, 19 bp, Mus musculus
  siRNA target sequence for 9130231C15Rik (NM_133960.2,353-371).
gcagcctgatataatgaat

SEQ ID NO: 594980 - DNA, 19 bp, Mus musculus
  siRNA target sequence for 9130231C15Rik (NM_133960.2,717-735).
cgtgacagggtcactatat

SEQ ID NO: 594981 - DNA, 19 bp, Mus musculus
  siRNA target sequence for 9130231C15Rik (NM_133960.2,722-740).
cagggtcactatatttgga

SEQ ID NO: 594982 - DNA, 19 bp, Mus musculus
  siRNA target sequence for 9130231C15Rik (NM_133960.2,1126-1144).
gccttgaccatatcataaa

SEQ ID NO: 594983 - DNA, 19 bp, Mus musculus
  siRNA target sequence for 9130231C15Rik (NM_133960.2,1534-1552).
gggccaatttcgcaagaaa

SEQ ID NO: 594984 - DNA, 19 bp, Mus musculus
  siRNA target sequence for 9130231C15Rik (NM_133960.2,1535-1553).
ggccaatttcgcaagaaat

SEQ ID NO: 594985 - DNA, 19 bp, Mus musculus
  siRNA target sequence for Aadac (NM_023383.1,48-66).
ctgtggtgcttgtagctta

SEQ ID NO: 594986 - DNA, 19 bp, Mus musculus
  siRNA target sequence for Aadac (NM_023383.1,50-68).
gtggtgcttgtagcttatt

SEQ ID NO: 594987 - DNA, 19 bp, Mus musculus
  siRNA target sequence for Aadac (NM_023383.1,52-70).
ggtgcttgtagcttattat

SEQ ID NO: 594988 - DNA, 19 bp, Mus musculus
  siRNA target sequence for Aadac (NM_023383.1,101-119).
gagccttggaaggtagtat

SEQ ID NO: 594989 - DNA, 19 bp, Mus musculus
  siRNA target sequence for Aadac (NM_023383.1,170-188).
cttttgggaatcagtcatt

SEQ ID NO: 594990 - DNA, 19 bp, Mus musculus
  siRNA target sequence for Aadac (NM_023383.1,183-201).
gtcatttcatggaaacgat

SEQ ID NO: 594991 - DNA, 19 bp, Mus musculus
  siRNA target sequence for Aadac (NM_023383.1,190-208).
catggaaacgatacagtta

SEQ ID NO: 594992 - DNA, 19 bp, Mus musculus
  siRNA target sequence for Aadac (NM_023383.1,194-212).
gaaacgatacagttactta

SEQ ID NO: 594993 - DNA, 19 bp, Mus musculus
  siRNA target sequence for Aadac (NM_023383.1,205-223).
gttacttatgagttttcaa

SEQ ID NO: 594994 - DNA, 19 bp, Mus musculus
  siRNA target sequence for Aadac (NM_023383.1,279-297).
gtgttcccgtccgcatata

SEQ ID NO: 594995 - DNA, 19 bp, Mus musculus
  siRNA target sequence for Aadac (NM_023383.1,281-299).
gttcccgtccgcatataca

SEQ ID NO: 594996 - DNA, 19 bp, Mus musculus
  siRNA target sequence for Aadac (NM_023383.1,494-512).
gtgtatcgtagtttacgat

SEQ ID NO: 594997 - DNA, 19 bp, Mus musculus
  siRNA target sequence for Aadac (NM_023383.1,504-522).
gtttacgatggttcttaca

SEQ ID NO: 594998 - DNA, 19 bp, Mus musculus
  siRNA target sequence for Aadac (NM_023383.1,526-544).
ggacgtccttgaaaaatat

SEQ ID NO: 594999 - DNA, 19 bp, Mus musculus
  siRNA target sequence for Aadac (NM_023383.1,580-598).
cagtgctggtggaaactta

SEQ ID NO: 595000 - DNA, 19 bp, Mus musculus
  siRNA target sequence for Aadac (NM_023383.1,606-624).
ctgtgacccaacagcttat

SEQ ID NO: 595001 - DNA, 19 bp, Mus musculus
  siRNA target sequence for Aadac (NM_023383.1,610-628).
gacccaacagcttatacaa

SEQ ID NO: 595002 - DNA, 19 bp, Mus musculus
  siRNA target sequence for Aadac (NM_023383.1,633-651).
cagatgtcaagatcaaact

SEQ ID NO: 595003 - DNA, 19 bp, Mus musculus
  siRNA target sequence for Aadac (NM_023383.1,652-670).
caaggtccaagccttaata

SEQ ID NO: 595004 - DNA, 19 bp, Mus musculus
  siRNA target sequence for Aadac (NM_023383.1,655-673).
ggtccaagccttaatatat

SEQ ID NO: 595005 - DNA, 19 bp, Mus musculus
  siRNA target sequence for Aadac (NM_023383.1,677-695).
gcccttcaggctcttgata

SEQ ID NO: 595006 - DNA, 19 bp, Mus musculus
  siRNA target sequence for Aadac (NM_023383.1,685-703).
ggctcttgatacgaatgta

SEQ ID NO: 595007 - DNA, 19 bp, Mus musculus
  siRNA target sequence for Aadac (NM_023383.1,697-715).
gaatgtaccatcacaacaa

SEQ ID NO: 595008 - DNA, 19 bp, Mus musculus
  siRNA target sequence for Aadac (NM_023383.1,734-752).
gttttaaccaggtcattaa

SEQ ID NO: 595009 - DNA, 19 bp, Mus musculus
  siRNA target sequence for Aadac (NM_023383.1,755-773).
gtcaggttctggagtgaat

SEQ ID NO: 595010 - DNA, 19 bp, Mus musculus
  siRNA target sequence for Aadac (NM_023383.1,759-777).
ggttctggagtgaatactt

SEQ ID NO: 595011 - DNA, 19 bp, Mus musculus
  siRNA target sequence for Aadac (NM_023383.1,760-778).
gttctggagtgaatacttt

SEQ ID NO: 595012 - DNA, 19 bp, Mus musculus
  siRNA target sequence for Aadac (NM_023383.1,832-850).
ggaatctagccacttgtta

SEQ ID NO: 595013 - DNA, 19 bp, Mus musculus
  siRNA target sequence for Aadac (NM_023383.1,842-860).
cacttgttacagtttgtga

SEQ ID NO: 595014 - DNA, 19 bp, Mus musculus
  siRNA target sequence for Aadac (NM_023383.1,844-862).
cttgttacagtttgtgaat

SEQ ID NO: 595015 - DNA, 19 bp, Mus musculus
  siRNA target sequence for Aadac (NM_023383.1,875-893).
ctccctgagagatacaaga

SEQ ID NO: 595016 - DNA, 19 bp, Mus musculus
  siRNA target sequence for Aadac (NM_023383.1,877-895).
ccctgagagatacaagaaa

SEQ ID NO: 595017 - DNA, 19 bp, Mus musculus
  siRNA target sequence for Aadac (NM_023383.1,927-945).
gttctgagctggctcaaaa

SEQ ID NO: 595018 - DNA, 19 bp, Mus musculus
  siRNA target sequence for Aadac (NM_023383.1,946-964).
gtatccagggttcatagat

SEQ ID NO: 595019 - DNA, 19 bp, Mus musculus
  siRNA target sequence for Aadac (NM_023383.1,1007-1025).
catttacctaagacctata

SEQ ID NO: 595020 - DNA, 19 bp, Mus musculus
  siRNA target sequence for Aadac (NM_023383.1,1013-1031).
cctaagacctatatcatca

SEQ ID NO: 595021 - DNA, 19 bp, Mus musculus
  siRNA target sequence for Aadac (NM_023383.1,1027-1045).
catcacttgccagtatgat

SEQ ID NO: 595022 - DNA, 19 bp, Mus musculus
  siRNA target sequence for Aadac (NM_023383.1,1039-1057).
gtatgatgtcctaagagat

SEQ ID NO: 595023 - DNA, 19 bp, Mus musculus
  siRNA target sequence for Aadac (NM_023383.1,1058-1076).
gatggactcatgtatgtca

SEQ ID NO: 595024 - DNA, 19 bp, Mus musculus
  siRNA target sequence for Aadac (NM_023383.1,1075-1093).
caagcggcttcagaatgtt

SEQ ID NO: 595025 - DNA, 19 bp, Mus musculus
  siRNA target sequence for Aadac (NM_023383.1,1127-1145).
ggattccatggaacgtttt

SEQ ID NO: 595026 - DNA, 19 bp, Mus musculus
  siRNA target sequence for Aadac (NM_023383.1,1194-1212).
gttggcttatcaaaaatct

SEQ ID NO: 595027 - DNA, 19 bp, Mus musculus
  siRNA target sequence for Abhd1 (NM_021304.2,514-532).
ggctatagggctgttgtat

SEQ ID NO: 595028 - DNA, 19 bp, Mus musculus
  siRNA target sequence for Abhd1 (NM_021304.2,515-533).
gctatagggctgttgtatt

SEQ ID NO: 595029 - DNA, 19 bp, Mus musculus
  siRNA target sequence for Abhd1 (NM_021304.2,521-539).
gggctgttgtatttaataa

SEQ ID NO: 595030 - DNA, 19 bp, Mus musculus
  siRNA target sequence for Abhd1 (NM_021304.2,567-585).
gactcacagggcttactgt

SEQ ID NO: 595031 - DNA, 19 bp, Mus musculus
  siRNA target sequence for Abhd1 (NM_021304.2,577-595).
gcttactgtgccagcaata

SEQ ID NO: 595032 - DNA, 19 bp, Mus musculus
  siRNA target sequence for Abhd1 (NM_021304.2,677-695).
gagggatactggtgcttaa

SEQ ID NO: 595033 - DNA, 19 bp, Mus musculus
  siRNA target sequence for Abhd1 (NM_021304.2,679-697).
gggatactggtgcttaact

SEQ ID NO: 595034 - DNA, 19 bp, Mus musculus
  siRNA target sequence for Abhd1 (NM_021304.2,680-698).
ggatactggtgcttaacta

SEQ ID NO: 595035 - DNA, 19 bp, Mus musculus
  siRNA target sequence for Abhd1 (NM_021304.2,681-699).
gatactggtgcttaactat

SEQ ID NO: 595036 - DNA, 19 bp, Mus musculus
  siRNA target sequence for Abhd1 (NM_021304.2,860-878).
gaaagccaattgaaaaggt

SEQ ID NO: 595037 - DNA, 19 bp, Mus musculus
  siRNA target sequence for Abhd1 (NM_021304.2,1162-1180).
ccctggcaacactgttaca

SEQ ID NO: 595038 - DNA, 19 bp, Mus musculus
  siRNA target sequence for Abhd1 (NM_021304.2,1179-1197).
catgaaccgcgtactacat

SEQ ID NO: 595039 - DNA, 19 bp, Mus musculus
  siRNA target sequence for Abhd1 (NM_021304.2,1185-1203).
ccgcgtactacatcagtat

SEQ ID NO: 595040 - DNA, 19 bp, Mus musculus
  siRNA target sequence for Abhd2 (NM_018811.4,932-950).
cagtgccgcaggttctaca

SEQ ID NO: 595041 - DNA, 19 bp, Mus musculus
  siRNA target sequence for Abhd2 (NM_018811.4,956-974).
ctcatggccgacaacatga

SEQ ID NO: 595042 - DNA, 19 bp, Mus musculus
  siRNA target sequence for Abhd2 (NM_018811.4,1077-1095).
ccctgatgcagattgatga

SEQ ID NO: 595043 - DNA, 19 bp, Mus musculus
  siRNA target sequence for Abhd2 (NM_018811.4,1128-1146).
ccctgaaggaatactatga

SEQ ID NO: 595044 - DNA, 19 bp, Mus musculus
  siRNA target sequence for Abhd2 (NM_018811.4,1164-1182).
ggtacctgcacaggatata

SEQ ID NO: 595045 - DNA, 19 bp, Mus musculus
  siRNA target sequence for Abhd2 (NM_018811.4,1223-1241).
gtgcacgaaagccttctaa

SEQ ID NO: 595046 - DNA, 19 bp, Mus musculus
  siRNA target sequence for Abhd2 (NM_018811.4,1233-1251).
gccttctaaccattccaaa

SEQ ID NO: 595047 - DNA, 19 bp, Mus musculus
  siRNA target sequence for Abhd2 (NM_018811.4,1346-1364).
ccgctgacatggatggata

SEQ ID NO: 595048 - DNA, 19 bp, Mus musculus
  siRNA target sequence for Abhd2 (NM_018811.4,1347-1365).
cgctgacatggatggataa

SEQ ID NO: 595049 - DNA, 19 bp, Mus musculus
  siRNA target sequence for Abhd3 (NM_134130.1,226-244).
ccgtggtgacagaaaccta

SEQ ID NO: 595050 - DNA, 19 bp, Mus musculus
  siRNA target sequence for Abhd3 (NM_134130.1,288-306).
ctgagacccttcatcactt

SEQ ID NO: 595051 - DNA, 19 bp, Mus musculus
  siRNA target sequence for Abhd3 (NM_134130.1,326-344).
caggaacgaactcattaaa

SEQ ID NO: 595052 - DNA, 19 bp, Mus musculus
  siRNA target sequence for Abhd3 (NM_134130.1,329-347).
gaacgaactcattaaaact

SEQ ID NO: 595053 - DNA, 19 bp, Mus musculus
  siRNA target sequence for Abhd3 (NM_134130.1,369-387).
ctggactggtttgataaca

SEQ ID NO: 595054 - DNA, 19 bp, Mus musculus
  siRNA target sequence for Abhd3 (NM_134130.1,377-395).
gtttgataacaataacagt

SEQ ID NO: 595055 - DNA, 19 bp, Mus musculus
  siRNA target sequence for Abhd3 (NM_134130.1,415-433).
gcaccagacctactatctt

SEQ ID NO: 595056 - DNA, 19 bp, Mus musculus
  siRNA target sequence for Abhd3 (NM_134130.1,469-487).
cctacatccttcatatgat

SEQ ID NO: 595057 - DNA, 19 bp, Mus musculus
  siRNA target sequence for Abhd3 (NM_134130.1,580-598).
gtgcgaacactgaagactt

SEQ ID NO: 595058 - DNA, 19 bp, Mus musculus
  siRNA target sequence for Abhd3 (NM_134130.1,648-666).
ctggcagcaggcgtatcaa

SEQ ID NO: 595059 - DNA, 19 bp, Mus musculus
  siRNA target sequence for Abhd3 (NM_134130.1,673-691).
gaatgctgcttctgaatta

SEQ ID NO: 595060 - DNA, 19 bp, Mus musculus
  siRNA target sequence for Abhd3 (NM_134130.1,696-714).
ggtaaaattgggtccaaaa

SEQ ID NO: 595061 - DNA, 19 bp, Mus musculus
  siRNA target sequence for Abhd3 (NM_134130.1,786-804).
ccgctgaactggctacttt

SEQ ID NO: 595062 - DNA, 19 bp, Mus musculus
  siRNA target sequence for Abhd3 (NM_134130.1,789-807).
ctgaactggctacttttta

SEQ ID NO: 595063 - DNA, 19 bp, Mus musculus
  siRNA target sequence for Abhd3 (NM_134130.1,845-863).
gaagcaccggcatatgttt

SEQ ID NO: 595064 - DNA, 19 bp, Mus musculus
  siRNA target sequence for Abhd3 (NM_134130.1,902-920).
gtcgatcagagagtttgat

SEQ ID NO: 595065 - DNA, 19 bp, Mus musculus
  siRNA target sequence for Abhd3 (NM_134130.1,925-943).
ggttcacggcggtcatgtt

SEQ ID NO: 595066 - DNA, 19 bp, Mus musculus
  siRNA target sequence for Abhd3 (NM_134130.1,926-944).
gttcacggcggtcatgttt

SEQ ID NO: 595067 - DNA, 19 bp, Mus musculus
  siRNA target sequence for Abhd3 (NM_134130.1,951-969).
cgcacactcgatgattact

SEQ ID NO: 595068 - DNA, 19 bp, Mus musculus
  siRNA target sequence for Abhd3 (NM_134130.1,952-970).
gcacactcgatgattacta

SEQ ID NO: 595069 - DNA, 19 bp, Mus musculus
  siRNA target sequence for Abhd3 (NM_134130.1,1017-1035).
gttctgtgcctgaatgcta

SEQ ID NO: 595070 - DNA, 19 bp, Mus musculus
  siRNA target sequence for Abhd3 (NM_134130.1,1057-1075).
gccatgctatcccaataga

SEQ ID NO: 595071 - DNA, 19 bp, Mus musculus
  siRNA target sequence for Abhd3 (NM_134130.1,1058-1076).
ccatgctatcccaatagaa

SEQ ID NO: 595072 - DNA, 19 bp, Mus musculus
  siRNA target sequence for Abhd3 (NM_134130.1,1118-1136).
ctatggaggccatattggt

SEQ ID NO: 595073 - DNA, 19 bp, Mus musculus
  siRNA target sequence for Abhd3 (NM_134130.1,1123-1141).
gaggccatattggttttct

SEQ ID NO: 595074 - DNA, 19 bp, Mus musculus
  siRNA target sequence for Abhd3 (NM_134130.1,1176-1194).
gatcgagtcttcaagcaat

SEQ ID NO: 595075 - DNA, 19 bp, Mus musculus
  siRNA target sequence for Adprhl1 (NM_172750.1,178-196).
gatgccctcggctatggaa

SEQ ID NO: 595076 - DNA, 19 bp, Mus musculus
  siRNA target sequence for Adprhl1 (NM_172750.1,182-200).
ccctcggctatggaaacat

SEQ ID NO: 595077 - DNA, 19 bp, Mus musculus
  siRNA target sequence for Adprhl1 (NM_172750.1,184-202).
ctcggctatggaaacatct

SEQ ID NO: 595078 - DNA, 19 bp, Mus musculus
  siRNA target sequence for Adprhl1 (NM_172750.1,584-602).
cgctcatcgaagtcagtat

SEQ ID NO: 595079 - DNA, 19 bp, Mus musculus
  siRNA target sequence for Adprhl1 (NM_172750.1,585-603).
gctcatcgaagtcagtatt

SEQ ID NO: 595080 - DNA, 19 bp, Mus musculus
  siRNA target sequence for Adprhl1 (NM_172750.1,784-802).
caagaacactggttttact

SEQ ID NO: 595081 - DNA, 19 bp, Mus musculus
  siRNA target sequence for Adprhl1 (NM_172750.1,794-812).
ggttttacttcgaagcaaa

SEQ ID NO: 595082 - DNA, 19 bp, Mus musculus
  siRNA target sequence for Adprhl1 (NM_172750.1,795-813).
gttttacttcgaagcaaaa

SEQ ID NO: 595083 - DNA, 19 bp, Mus musculus
  siRNA target sequence for Adprhl1 (NM_172750.1,850-868).
gatgcagaagacaaagtca

SEQ ID NO: 595084 - DNA, 19 bp, Mus musculus
  siRNA target sequence for Adprhl1 (NM_172750.1,867-885).
cacctttcctgacaactat

SEQ ID NO: 595085 - DNA, 19 bp, Mus musculus
  siRNA target sequence for Adprhl1 (NM_172750.1,1016-1034).
gccagcgagccatgtttca

SEQ ID NO: 595086 - DNA, 19 bp, Mus musculus
  siRNA target sequence for Adprhl1 (NM_172750.1,1173-1191).
ccgcctgtccacagaagaa

SEQ ID NO: 595087 - DNA, 19 bp, Mus musculus
  siRNA target sequence for Adprhl2 (NM_133883.1,441-459).
caagtgccgtgatgtctat

SEQ ID NO: 595088 - DNA, 19 bp, Mus musculus
  siRNA target sequence for Adprhl2 (NM_133883.1,480-498).
caacgggaagggttcctat

SEQ ID NO: 595089 - DNA, 19 bp, Mus musculus
  siRNA target sequence for Adprhl2 (NM_133883.1,545-563).
gcagtgtccaagatgtaca

SEQ ID NO: 595090 - DNA, 19 bp, Mus musculus
  siRNA target sequence for Adprhl2 (NM_133883.1,652-670).
gctctgcagggtgtatcat

SEQ ID NO: 595091 - DNA, 19 bp, Mus musculus
  siRNA target sequence for Adprhl2 (NM_133883.1,859-877).
ggcattgccgcctttgaat

SEQ ID NO: 595092 - DNA, 19 bp, Mus musculus
  siRNA target sequence for Adprhl2 (NM_133883.1,861-879).
cattgccgcctttgaatct

SEQ ID NO: 595093 - DNA, 19 bp, Mus musculus
  siRNA target sequence for Adprhl2 (NM_133883.1,880-898).
gtgcccaccgccatctact

SEQ ID NO: 595094 - DNA, 19 bp, Mus musculus
  siRNA target sequence for Adprhl2 (NM_133883.1,1022-1040).
ccattgctggagcttacta

SEQ ID NO: 595095 - DNA, 19 bp, Mus musculus
  siRNA target sequence for Aoah (NM_012054.2,381-399).
ccatggccaaagctgttta

SEQ ID NO: 595096 - DNA, 19 bp, Mus musculus
  siRNA target sequence for Aoah (NM_012054.2,408-426).
ggtactggtatctgtgatt

SEQ ID NO: 595097 - DNA, 19 bp, Mus musculus
  siRNA target sequence for Aoah (NM_012054.2,436-454).
gctgaagttcacaactctt

SEQ ID NO: 595098 - DNA, 19 bp, Mus musculus
  siRNA target sequence for Aoah (NM_012054.2,548-566).
cagacatcataaaactact

SEQ ID NO: 595099 - DNA, 19 bp, Mus musculus
  siRNA target sequence for Aoah (NM_012054.2,731-749).
ccagaagtggtcgtaacat

SEQ ID NO: 595100 - DNA, 19 bp, Mus musculus
  siRNA target sequence for Aoah (NM_012054.2,732-750).
cagaagtggtcgtaacatt

SEQ ID NO: 595101 - DNA, 19 bp, Mus musculus
  siRNA target sequence for Aoah (NM_012054.2,760-778).
ccatttttgaccaagatct

SEQ ID NO: 595102 - DNA, 19 bp, Mus musculus
  siRNA target sequence for Aoah (NM_012054.2,774-792).
gatctgccagaaaattgaa

SEQ ID NO: 595103 - DNA, 19 bp, Mus musculus
  siRNA target sequence for Aoah (NM_012054.2,809-827).
ccgtgccattcaaagacat

SEQ ID NO: 595104 - DNA, 19 bp, Mus musculus
  siRNA target sequence for Aoah (NM_012054.2,814-832).
ccattcaaagacatagatt

SEQ ID NO: 595105 - DNA, 19 bp, Mus musculus
  siRNA target sequence for Aoah (NM_012054.2,878-896).
gagggcgtgactgtaatga

SEQ ID NO: 595106 - DNA, 19 bp, Mus musculus
  siRNA target sequence for Aoah (NM_012054.2,880-898).
gggcgtgactgtaatgaca

SEQ ID NO: 595107 - DNA, 19 bp, Mus musculus
  siRNA target sequence for Aoah (NM_012054.2,929-947).
cagacaactgggatatcca

SEQ ID NO: 595108 - DNA, 19 bp, Mus musculus
  siRNA target sequence for Aoah (NM_012054.2,975-993).
gggtattgatccgaaagat

SEQ ID NO: 595109 - DNA, 19 bp, Mus musculus
  siRNA target sequence for Aoah (NM_012054.2,985-1003).
ccgaaagatggaattccat

SEQ ID NO: 595110 - DNA, 19 bp, Mus musculus
  siRNA target sequence for Aoah (NM_012054.2,986-1004).
cgaaagatggaattccata

SEQ ID NO: 595111 - DNA, 19 bp, Mus musculus
  siRNA target sequence for Aoah (NM_012054.2,1034-1052).
ccaggggaatcattttgct

SEQ ID NO: 595112 - DNA, 19 bp, Mus musculus
  siRNA target sequence for Aoah (NM_012054.2,1059-1077).
ctcagctggggctcatttt

SEQ ID NO: 595113 - DNA, 19 bp, Mus musculus
  siRNA target sequence for Aoah (NM_012054.2,1170-1188).
ccaactctctggtgtaact

SEQ ID NO: 595114 - DNA, 19 bp, Mus musculus
  siRNA target sequence for Aoah (NM_012054.2,1202-1220).
ccacgagtggaattgaaga

SEQ ID NO: 595115 - DNA, 19 bp, Mus musculus
  siRNA target sequence for Aoah (NM_012054.2,1203-1221).
cacgagtggaattgaagaa

SEQ ID NO: 595116 - DNA, 19 bp, Mus musculus
  siRNA target sequence for Aoah (NM_012054.2,1205-1223).
cgagtggaattgaagaaaa

SEQ ID NO: 595117 - DNA, 19 bp, Mus musculus
  siRNA target sequence for Aoah (NM_012054.2,1233-1251).
ccatcgtttgagaaagaga

SEQ ID NO: 595118 - DNA, 19 bp, Mus musculus
  siRNA target sequence for Aoah (NM_012054.2,1272-1290).
ctatcagagtatctcaaaa

SEQ ID NO: 595119 - DNA, 19 bp, Mus musculus
  siRNA target sequence for Aoah (NM_012054.2,1278-1296).
gagtatctcaaaaaatggt

SEQ ID NO: 595120 - DNA, 19 bp, Mus musculus
  siRNA target sequence for Aoah (NM_012054.2,1372-1390).
ctttatgccatgattggaa

SEQ ID NO: 595121 - DNA, 19 bp, Mus musculus
  siRNA target sequence for Aoah (NM_012054.2,1383-1401).
gattggaaacgatgtttgt

SEQ ID NO: 595122 - DNA, 19 bp, Mus musculus
  siRNA target sequence for Aoah (NM_012054.2,1387-1405).
ggaaacgatgtttgtaatt

SEQ ID NO: 595123 - DNA, 19 bp, Mus musculus
  siRNA target sequence for Aoah (NM_012054.2,1392-1410).
cgatgtttgtaattcgaaa

SEQ ID NO: 595124 - DNA, 19 bp, Mus musculus
  siRNA target sequence for Aoah (NM_012054.2,1464-1482).
gcagactctgacacatcta

SEQ ID NO: 595125 - DNA, 19 bp, Mus musculus
  siRNA target sequence for Aoah (NM_012054.2,1465-1483).
cagactctgacacatctaa

SEQ ID NO: 595126 - DNA, 19 bp, Mus musculus
  siRNA target sequence for Aoah (NM_012054.2,1467-1485).
gactctgacacatctaaat

SEQ ID NO: 595127 - DNA, 19 bp, Mus musculus
  siRNA target sequence for Aoah (NM_012054.2,1496-1514).
ccaatggcagccacgttat

SEQ ID NO: 595128 - DNA, 19 bp, Mus musculus
  siRNA target sequence for Aoah (NM_012054.2,1501-1519).
ggcagccacgttattttat

SEQ ID NO: 595129 - DNA, 19 bp, Mus musculus
  siRNA target sequence for Aoah (NM_012054.2,1502-1520).
gcagccacgttattttata

SEQ ID NO: 595130 - DNA, 19 bp, Mus musculus
  siRNA target sequence for Aoah (NM_012054.2,1573-1591).
cctctaggccagctaaata

SEQ ID NO: 595131 - DNA, 19 bp, Mus musculus
  siRNA target sequence for Aoah (NM_012054.2,1574-1592).
ctctaggccagctaaataa

SEQ ID NO: 595132 - DNA, 19 bp, Mus musculus
  siRNA target sequence for Aoah (NM_012054.2,1694-1712).
cagagagagccgaacaact

SEQ ID NO: 595133 - DNA, 19 bp, Mus musculus
  siRNA target sequence for Aoah (NM_012054.2,1704-1722).
cgaacaactctccaataca

SEQ ID NO: 595134 - DNA, 19 bp, Mus musculus
  siRNA target sequence for Aoah (NM_012054.2,1739-1757).
ccaccgagacgtttgcaaa

SEQ ID NO: 595135 - DNA, 19 bp, Mus musculus
  siRNA target sequence for Aoah (NM_012054.2,1742-1760).
ccgagacgtttgcaaactt

SEQ ID NO: 595136 - DNA, 19 bp, Mus musculus
  siRNA target sequence for Aoah (NM_012054.2,1754-1772).
caaacttcgatcttttcta

SEQ ID NO: 595137 - DNA, 19 bp, Mus musculus
  siRNA target sequence for Aoah (NM_012054.2,1784-1802).
ccttccatgaaataataga

SEQ ID NO: 595138 - DNA, 19 bp, Mus musculus
  siRNA target sequence for Aoah (NM_012054.2,1823-1841).
gacagccatggcagcttat

SEQ ID NO: 595139 - DNA, 19 bp, Mus musculus
  siRNA target sequence for Aoah (NM_012054.2,1866-1884).
caatgaggtggcttcactt

SEQ ID NO: 595140 - DNA, 19 bp, Mus musculus
  siRNA target sequence for Apobec2 (NM_009694.1,229-247).
ccgcccttcgagattgtca

SEQ ID NO: 595141 - DNA, 19 bp, Mus musculus
  siRNA target sequence for Apobec2 (NM_009694.1,256-274).
cggctaccagtcaacttct

SEQ ID NO: 595142 - DNA, 19 bp, Mus musculus
  siRNA target sequence for Apobec2 (NM_009694.1,259-277).
ctaccagtcaacttcttca

SEQ ID NO: 595143 - DNA, 19 bp, Mus musculus
  siRNA target sequence for Apobec2 (NM_009694.1,288-306).
ccggaacgtggaatacagt

SEQ ID NO: 595144 - DNA, 19 bp, Mus musculus
  siRNA target sequence for Apobec2 (NM_009694.1,332-350).
gctatgtggtcgaagtaca

SEQ ID NO: 595145 - DNA, 19 bp, Mus musculus
  siRNA target sequence for Apobec2 (NM_009694.1,512-530).
gcgctgaccggattctcaa

SEQ ID NO: 595146 - DNA, 19 bp, Mus musculus
  siRNA target sequence for Apobec2 (NM_009694.1,513-531).
cgctgaccggattctcaaa

SEQ ID NO: 595147 - DNA, 19 bp, Mus musculus
  siRNA target sequence for Apobec2 (NM_009694.1,514-532).
gctgaccggattctcaaaa

SEQ ID NO: 595148 - DNA, 19 bp, Mus musculus
  siRNA target sequence for Apobec2 (NM_009694.1,571-589).
gtgagccggctcttcatgt

SEQ ID NO: 595149 - DNA, 19 bp, Mus musculus
  siRNA target sequence for Apobec2 (NM_009694.1,642-660).
caaacttcgcatcatgaaa

SEQ ID NO: 595150 - DNA, 19 bp, Mus musculus
  siRNA target sequence for Apobec2 (NM_009694.1,747-765).
ggagaacttcctatactat

SEQ ID NO: 595151 - DNA, 19 bp, Mus musculus
  siRNA target sequence for Atp5c1 (NM_020615.2,153-171).
cagaaaattaccaagtcta

SEQ ID NO: 595152 - DNA, 19 bp, Mus musculus
  siRNA target sequence for Atp5c1 (NM_020615.2,333-351).
ctttgtggtgctattcact

SEQ ID NO: 595153 - DNA, 19 bp, Mus musculus
  siRNA target sequence for Atp5c1 (NM_020615.2,457-475).
ggactcattctgatcagtt

SEQ ID NO: 595154 - DNA, 19 bp, Mus musculus
  siRNA target sequence for Atp5c1 (NM_020615.2,537-555).
gcccttgagttgttaaatt

SEQ ID NO: 595155 - DNA, 19 bp, Mus musculus
  siRNA target sequence for Atp5c1 (NM_020615.2,545-563).
gttgttaaattctggatat

SEQ ID NO: 595156 - DNA, 19 bp, Mus musculus
  siRNA target sequence for Atp5c1 (NM_020615.2,556-574).
ctggatatgaatttgatga

SEQ ID NO: 595157 - DNA, 19 bp, Mus musculus
  siRNA target sequence for Atp5c1 (NM_020615.2,570-588).
gatgaaggctctatcattt

SEQ ID NO: 595158 - DNA, 19 bp, Mus musculus
  siRNA target sequence for Atp5c1 (NM_020615.2,577-595).
gctctatcatttttaatca

SEQ ID NO: 595159 - DNA, 19 bp, Mus musculus
  siRNA target sequence for Atp5c1 (NM_020615.2,632-650).
gcccatcttctctctgaat

SEQ ID NO: 595160 - DNA, 19 bp, Mus musculus
  siRNA target sequence for Atp5c1 (NM_020615.2,633-651).
cccatcttctctctgaata

SEQ ID NO: 595161 - DNA, 19 bp, Mus musculus
  siRNA target sequence for Atp5c1 (NM_020615.2,668-686).
gaccatgagcatctatgat

SEQ ID NO: 595162 - DNA, 19 bp, Mus musculus
  siRNA target sequence for Atp5c1 (NM_020615.2,696-714).
gctgatgtgctgcagaatt

SEQ ID NO: 595163 - DNA, 19 bp, Mus musculus
  siRNA target sequence for Atp5c1 (NM_020615.2,697-715).
ctgatgtgctgcagaatta

SEQ ID NO: 595164 - DNA, 19 bp, Mus musculus
  siRNA target sequence for Atp5e (NM_025983.2,176-194).
cctgaagaccgagttcaaa

SEQ ID NO: 595165 - DNA, 19 bp, Mus musculus
  siRNA target sequence for Atp5e (NM_025983.2,195-213).
gcgaacgctgagaagactt

SEQ ID NO: 595166 - DNA, 19 bp, Mus musculus
  siRNA target sequence for Atp5e (NM_025983.2,211-229).
cttcgggcagcagcataaa

SEQ ID NO: 595167 - DNA, 19 bp, Mus musculus
  siRNA target sequence for Atp5e (NM_025983.2,217-235).
gcagcagcataaaaattgt

SEQ ID NO: 595168 - DNA, 19 bp, Mus musculus
  siRNA target sequence for Atp5o (NM_138597.1,643-661).
gggaaaagtacgttgatat

SEQ ID NO: 595169 - DNA, 19 bp, Mus musculus
  siRNA target sequence for Atp5o (NM_138597.1,645-663).
gaaaagtacgttgatatgt

SEQ ID NO: 595170 - DNA, 19 bp, Mus musculus
  siRNA target sequence for Atp6v0b (NM_033617.1,187-205).
cctgggctttcgctttgat

SEQ ID NO: 595171 - DNA, 19 bp, Mus musculus
  siRNA target sequence for Atp6v0b (NM_033617.1,224-242).
gaaacttcccccttcatgt

SEQ ID NO: 595172 - DNA, 19 bp, Mus musculus
  siRNA target sequence for Atp6v0b (NM_033617.1,253-271).
gggcattggcctagcaatt

SEQ ID NO: 595173 - DNA, 19 bp, Mus musculus
  siRNA target sequence for Atp6v0b (NM_033617.1,254-272).
ggcattggcctagcaattt

SEQ ID NO: 595174 - DNA, 19 bp, Mus musculus
  siRNA target sequence for Atp6v0b (NM_033617.1,256-274).
cattggcctagcaatttct

SEQ ID NO: 595175 - DNA, 19 bp, Mus musculus
  siRNA target sequence for Atp6v0b (NM_033617.1,290-308).
gcagcctggggaatctata

SEQ ID NO: 595176 - DNA, 19 bp, Mus musculus
  siRNA target sequence for Atp6v0b (NM_033617.1,293-311).
gcctggggaatctatataa

SEQ ID NO: 595177 - DNA, 19 bp, Mus musculus
  siRNA target sequence for Atp6v0b (NM_033617.1,471-489).
ccattggccatcgaaacta

SEQ ID NO: 595178 - DNA, 19 bp, Mus musculus
  siRNA target sequence for Atp6v0c (NM_009729.1,159-177).
caagaacaaccccgaatat

SEQ ID NO: 595179 - DNA, 19 bp, Mus musculus
  siRNA target sequence for Atp6v0c (NM_009729.1,162-180).
gaacaaccccgaatattct

SEQ ID NO: 595180 - DNA, 19 bp, Mus musculus
  siRNA target sequence for Atp6v0c (NM_009729.1,168-186).
ccccgaatattcttcgttt

SEQ ID NO: 595181 - DNA, 19 bp, Mus musculus
  siRNA target sequence for Atp6v0c (NM_009729.1,170-188).
ccgaatattcttcgttttt

SEQ ID NO: 595182 - DNA, 19 bp, Mus musculus
  siRNA target sequence for Atp6v0c (NM_009729.1,311-329).
ccatcatcccagtggttat

SEQ ID NO: 595183 - DNA, 19 bp, Mus musculus
  siRNA target sequence for Atp6v0c (NM_009729.1,355-373).
ctggtggtggcagtactta

SEQ ID NO: 595184 - DNA, 19 bp, Mus musculus
  siRNA target sequence for Atp6v0c (NM_009729.1,401-419).
ccctctacaggagttttct

SEQ ID NO: 595185 - DNA, 19 bp, Mus musculus
  siRNA target sequence for Atp6v0c (NM_009729.1,402-420).
cctctacaggagttttctt

SEQ ID NO: 595186 - DNA, 19 bp, Mus musculus
  siRNA target sequence for Atp6v0c (NM_009729.1,405-423).
ctacaggagttttcttcaa

SEQ ID NO: 595187 - DNA, 19 bp, Mus musculus
  siRNA target sequence for Atp6v0c (NM_009729.1,595-613).
ctaatcctctccacaaagt

SEQ ID NO: 595188 - DNA, 19 bp, Mus musculus
  siRNA target sequence for Atp6v1d (NM_023721.1,6-24).
gggcaaagaccggattgaa

SEQ ID NO: 595189 - DNA, 19 bp, Mus musculus
  siRNA target sequence for Atp6v1d (NM_023721.1,51-69).
catcatgaaggctcgatta

SEQ ID NO: 595190 - DNA, 19 bp, Mus musculus
  siRNA target sequence for Atp6v1d (NM_023721.1,54-72).
catgaaggctcgattaaaa

SEQ ID NO: 595191 - DNA, 19 bp, Mus musculus
  siRNA target sequence for Atp6v1d (NM_023721.1,57-75).
gaaggctcgattaaaagga

SEQ ID NO: 595192 - DNA, 19 bp, Mus musculus
  siRNA target sequence for Atp6v1d (NM_023721.1,86-104).
gtcgaaaccttctgaagaa

SEQ ID NO: 595193 - DNA, 19 bp, Mus musculus
  siRNA target sequence for Atp6v1d (NM_023721.1,207-225).
ggctgaggccaaattcaca

SEQ ID NO: 595194 - DNA, 19 bp, Mus musculus
  siRNA target sequence for B230106I24Rik (NM_178772.2,211-229).
gtgagtaacctgatacatt

SEQ ID NO: 595195 - DNA, 19 bp, Mus musculus
  siRNA target sequence for B230106I24Rik (NM_178772.2,247-265).
catctgatcgcgctgaatt

SEQ ID NO: 595196 - DNA, 19 bp, Mus musculus
  siRNA target sequence for B230106I24Rik (NM_178772.2,250-268).
ctgatcgcgctgaatttca

SEQ ID NO: 595197 - DNA, 19 bp, Mus musculus
  siRNA target sequence for B230106I24Rik (NM_178772.2,256-274).
gcgctgaatttcatcatca

SEQ ID NO: 595198 - DNA, 19 bp, Mus musculus
  siRNA target sequence for B230106I24Rik (NM_178772.2,299-317).
ggtcttctccgaaagtgaa

SEQ ID NO: 595199 - DNA, 19 bp, Mus musculus
  siRNA target sequence for B230106I24Rik (NM_178772.2,390-408).
gcgacgcagcgtcatctat

SEQ ID NO: 595200 - DNA, 19 bp, Mus musculus
  siRNA target sequence for B230106I24Rik (NM_178772.2,391-409).
cgacgcagcgtcatctata

SEQ ID NO: 595201 - DNA, 19 bp, Mus musculus
  siRNA target sequence for B230106I24Rik (NM_178772.2,392-410).
gacgcagcgtcatctatat

SEQ ID NO: 595202 - DNA, 19 bp, Mus musculus
  siRNA target sequence for B230106I24Rik (NM_178772.2,395-413).
gcagcgtcatctatatcca

SEQ ID NO: 595203 - DNA, 19 bp, Mus musculus
  siRNA target sequence for B230106I24Rik (NM_178772.2,440-458).
caaagatcagctactatga

SEQ ID NO: 595204 - DNA, 19 bp, Mus musculus
  siRNA target sequence for B230106I24Rik (NM_178772.2,457-475).
gaccagctgtgcacaacaa

SEQ ID NO: 595205 - DNA, 19 bp, Mus musculus
  siRNA target sequence for B230106I24Rik (NM_178772.2,492-510).
cgccgtcatcgtttctatt

SEQ ID NO: 595206 - DNA, 19 bp, Mus musculus
  siRNA target sequence for B230106I24Rik (NM_178772.2,494-512).
ccgtcatcgtttctattga

SEQ ID NO: 595207 - DNA, 19 bp, Mus musculus
  siRNA target sequence for B230106I24Rik (NM_178772.2,496-514).
gtcatcgtttctattgaat

SEQ ID NO: 595208 - DNA, 19 bp, Mus musculus
  siRNA target sequence for B230106I24Rik (NM_178772.2,520-538).
ctagtcccacaggtctatt

SEQ ID NO: 595209 - DNA, 19 bp, Mus musculus
  siRNA target sequence for B230106I24Rik (NM_178772.2,542-560).
cggagcaaatccatgatgt

SEQ ID NO: 595210 - DNA, 19 bp, Mus musculus
  siRNA target sequence for B230106I24Rik (NM_178772.2,559-577).
gtcatccgtgccactaaat

SEQ ID NO: 595211 - DNA, 19 bp, Mus musculus
  siRNA target sequence for B230106I24Rik (NM_178772.2,561-579).
catccgtgccactaaatat

SEQ ID NO: 595212 - DNA, 19 bp, Mus musculus
  siRNA target sequence for B230106I24Rik (NM_178772.2,592-610).
gaagtcttagacaagtaca

SEQ ID NO: 595213 - DNA, 19 bp, Mus musculus
  siRNA target sequence for B230106I24Rik (NM_178772.2,619-637).
cctggaagagtcggtattt

SEQ ID NO: 595214 - DNA, 19 bp, Mus musculus
  siRNA target sequence for B230106I24Rik (NM_178772.2,670-688).
gccctgggacaacagttta

SEQ ID NO: 595215 - DNA, 19 bp, Mus musculus
  siRNA target sequence for B230106I24Rik (NM_178772.2,693-711).
cgttgccagcctgaagaat

SEQ ID NO: 595216 - DNA, 19 bp, Mus musculus
  siRNA target sequence for B230106I24Rik (NM_178772.2,770-788).
cctcttaccagcaaagcat

SEQ ID NO: 595217 - DNA, 19 bp, Mus musculus
  siRNA target sequence for B230106I24Rik (NM_178772.2,805-823).
ccgcgtcatgtcatggtta

SEQ ID NO: 595218 - DNA, 19 bp, Mus musculus
  siRNA target sequence for B230106I24Rik (NM_178772.2,820-838).
gttaggtactggttagact

SEQ ID NO: 595219 - DNA, 19 bp, Mus musculus
  siRNA target sequence for B230106I24Rik (NM_178772.2,824-842).
ggtactggttagactactt

SEQ ID NO: 595220 - DNA, 19 bp, Mus musculus
  siRNA target sequence for B230106I24Rik (NM_178772.2,846-864).
gggcaactacgactttgta

SEQ ID NO: 595221 - DNA, 19 bp, Mus musculus
  siRNA target sequence for B230106I24Rik (NM_178772.2,858-876).
ctttgtagaggccatgatt

SEQ ID NO: 595222 - DNA, 19 bp, Mus musculus
  siRNA target sequence for B230106I24Rik (NM_178772.2,879-897).
gaacaatcacacttcactt

SEQ ID NO: 595223 - DNA, 19 bp, Mus musculus
  siRNA target sequence for B230106I24Rik (NM_178772.2,888-906).
cacttcacttgatgtagaa

SEQ ID NO: 595224 - DNA, 19 bp, Mus musculus
  siRNA target sequence for B230106I24Rik (NM_178772.2,1126-1144).
cgggacgatgggatcatgt

SEQ ID NO: 595225 - DNA, 19 bp, Mus musculus
  siRNA target sequence for B230106I24Rik (NM_178772.2,1127-1145).
gggacgatgggatcatgta

SEQ ID NO: 595226 - DNA, 19 bp, Mus musculus
  siRNA target sequence for B230106I24Rik (NM_178772.2,1252-1270).
ggaatccggactaggaata

SEQ ID NO: 595227 - DNA, 19 bp, Mus musculus
  siRNA target sequence for B230106I24Rik (NM_178772.2,1258-1276).
cggactaggaatagttaca

SEQ ID NO: 595228 - DNA, 19 bp, Mus musculus
  siRNA target sequence for B830009D23Rik (NM_175285.2,182-200).
gctcggaagccaacaacat

SEQ ID NO: 595229 - DNA, 19 bp, Mus musculus
  siRNA target sequence for B830009D23Rik (NM_175285.2,231-249).
cctgagcagatttcaagat

SEQ ID NO: 595230 - DNA, 19 bp, Mus musculus
  siRNA target sequence for B830009D23Rik (NM_175285.2,260-278).
cgctggccttagagaagtt

SEQ ID NO: 595231 - DNA, 19 bp, Mus musculus
  siRNA target sequence for B830009D23Rik (NM_175285.2,276-294).
gttctgttcggaaactatt

SEQ ID NO: 595232 - DNA, 19 bp, Mus musculus
  siRNA target sequence for B830009D23Rik (NM_175285.2,281-299).
gttcggaaactattgacat

SEQ ID NO: 595233 - DNA, 19 bp, Mus musculus
  siRNA target sequence for B830009D23Rik (NM_175285.2,284-302).
cggaaactattgacatcat

SEQ ID NO: 595234 - DNA, 19 bp, Mus musculus
  siRNA target sequence for B830009D23Rik (NM_175285.2,333-351).
cctgacagatgccaaaaca

SEQ ID NO: 595235 - DNA, 19 bp, Mus musculus
  siRNA target sequence for B830009D23Rik (NM_175285.2,360-378).
cttgggatccagacaacat

SEQ ID NO: 595236 - DNA, 19 bp, Mus musculus
  siRNA target sequence for B830009D23Rik (NM_175285.2,363-381).
gggatccagacaacatgaa

SEQ ID NO: 595237 - DNA, 19 bp, Mus musculus
  siRNA target sequence for B830009D23Rik (NM_175285.2,365-383).
gatccagacaacatgaagt

SEQ ID NO: 595238 - DNA, 19 bp, Mus musculus
  siRNA target sequence for B830009D23Rik (NM_175285.2,417-435).
gacaagagtcatggaaaaa

SEQ ID NO: 595239 - DNA, 19 bp, Mus musculus
  siRNA target sequence for B830009D23Rik (NM_175285.2,457-475).
ggaaatcatgatgcatata

SEQ ID NO: 595240 - DNA, 19 bp, Mus musculus
  siRNA target sequence for B830009D23Rik (NM_175285.2,489-507).
ggagagcatcgccaattat

SEQ ID NO: 595241 - DNA, 19 bp, Mus musculus
  siRNA target sequence for B830009D23Rik (NM_175285.2,490-508).
gagagcatcgccaattatt

SEQ ID NO: 595242 - DNA, 19 bp, Mus musculus
  siRNA target sequence for B830009D23Rik (NM_175285.2,531-549).
gaaggacggcgcttttcat

SEQ ID NO: 595243 - DNA, 19 bp, Mus musculus
  siRNA target sequence for B830009D23Rik (NM_175285.2,565-583).
ccctttggcaactattcct

SEQ ID NO: 595244 - DNA, 19 bp, Mus musculus
  siRNA target sequence for B830009D23Rik (NM_175285.2,614-632).
ggcctaagagaccctataa

SEQ ID NO: 595245 - DNA, 19 bp, Mus musculus
  siRNA target sequence for B830009D23Rik (NM_175285.2,615-633).
gcctaagagaccctataat

SEQ ID NO: 595246 - DNA, 19 bp, Mus musculus
  siRNA target sequence for B830009D23Rik (NM_175285.2,641-659).
gcattttagatgagaaaca

SEQ ID NO: 595247 - DNA, 19 bp, Mus musculus
  siRNA target sequence for B830009D23Rik (NM_175285.2,664-682).
gaggaactcgtagagtttt

SEQ ID NO: 595248 - DNA, 19 bp, Mus musculus
  siRNA target sequence for B830009D23Rik (NM_175285.2,667-685).
gaactcgtagagttttcca

SEQ ID NO: 595249 - DNA, 19 bp, Mus musculus
  siRNA target sequence for B830009D23Rik (NM_175285.2,673-691).
gtagagttttccaagaaaa

SEQ ID NO: 595250 - DNA, 19 bp, Mus musculus
  siRNA target sequence for B830009D23Rik (NM_175285.2,697-715).
cagagcaaccagacgattt

SEQ ID NO: 595251 - DNA, 19 bp, Mus musculus
  siRNA target sequence for B830009D23Rik (NM_175285.2,701-719).
gcaaccagacgatttggtt

SEQ ID NO: 595252 - DNA, 19 bp, Mus musculus
  siRNA target sequence for B830009D23Rik (NM_175285.2,702-720).
caaccagacgatttggttt

SEQ ID NO: 595253 - DNA, 19 bp, Mus musculus
  siRNA target sequence for B830009D23Rik (NM_175285.2,717-735).
gtttggccactttacaaca

SEQ ID NO: 595254 - DNA, 19 bp, Mus musculus
  siRNA target sequence for B830009D23Rik (NM_175285.2,757-775).
ccagggatccggacagtaa

SEQ ID NO: 595255 - DNA, 19 bp, Mus musculus
  siRNA target sequence for B830009D23Rik (NM_175285.2,777-795).
gggttccgctacagcttat

SEQ ID NO: 595256 - DNA, 19 bp, Mus musculus
  siRNA target sequence for B830009D23Rik (NM_175285.2,779-797).
gttccgctacagcttatct

SEQ ID NO: 595257 - DNA, 19 bp, Mus musculus
  siRNA target sequence for B830009D23Rik (NM_175285.2,897-915).
cagaaggtaccggatcttt

SEQ ID NO: 595258 - DNA, 19 bp, Mus musculus
  siRNA target sequence for B830009D23Rik (NM_175285.2,922-940).
gatcacgacctctttagct

SEQ ID NO: 595259 - DNA, 19 bp, Mus musculus
  siRNA target sequence for B830009D23Rik (NM_175285.2,943-961).
gcagatgtaacctttgaca

SEQ ID NO: 595260 - DNA, 19 bp, Mus musculus
  siRNA target sequence for B830009D23Rik (NM_175285.2,944-962).
cagatgtaacctttgacaa

SEQ ID NO: 595261 - DNA, 19 bp, Mus musculus
  siRNA target sequence for B830009D23Rik (NM_175285.2,1002-1020).
ctatagctgtgctaagcat

SEQ ID NO: 595262 - DNA, 19 bp, Mus musculus
  siRNA target sequence for B830009D23Rik (NM_175285.2,1046-1064).
ccacacacataagagtatt

SEQ ID NO: 595263 - DNA, 19 bp, Mus musculus
  siRNA target sequence for B830009D23Rik (NM_175285.2,1060-1078).
gtattggccttttccttat

SEQ ID NO: 595264 - DNA, 19 bp, Mus musculus
  siRNA target sequence for B830009D23Rik (NM_175285.2,1088-1106).
cttctgtcactgttaagat

SEQ ID NO: 595265 - DNA, 19 bp, Mus musculus
  siRNA target sequence for B830009D23Rik (NM_175285.2,1091-1109).
ctgtcactgttaagattga

SEQ ID NO: 595266 - DNA, 19 bp, Mus musculus
  siRNA target sequence for B830009D23Rik (NM_175285.2,1135-1153).
cacttgtctggtcctattt

SEQ ID NO: 595267 - DNA, 19 bp, Mus musculus
  siRNA target sequence for B830009D23Rik (NM_175285.2,1140-1158).
gtctggtcctattttcata

SEQ ID NO: 595268 - DNA, 19 bp, Mus musculus
  siRNA target sequence for B830009D23Rik (NM_175285.2,1142-1160).
ctggtcctattttcatact

SEQ ID NO: 595269 - DNA, 19 bp, Mus musculus
  siRNA target sequence for B830009D23Rik (NM_175285.2,1170-1188).
ccctagaaactacagtaat

SEQ ID NO: 595270 - DNA, 19 bp, Mus musculus
  siRNA target sequence for B830009D23Rik (NM_175285.2,1368-1386).
gctcaccacactgattaca

SEQ ID NO: 595271 - DNA, 19 bp, Mus musculus
  siRNA target sequence for B830009D23Rik (NM_175285.2,1380-1398).
gattacattcagatatcta

SEQ ID NO: 595272 - DNA, 19 bp, Mus musculus
  siRNA target sequence for B830009D23Rik (NM_175285.2,1385-1403).
cattcagatatctagcata

SEQ ID NO: 595273 - DNA, 19 bp, Mus musculus
  siRNA target sequence for B830009D23Rik (NM_175285.2,1421-1439).
ctctgggatttgcaaatat

SEQ ID NO: 595274 - DNA, 19 bp, Mus musculus
  siRNA target sequence for B830009D23Rik (NM_175285.2,1432-1450).
gcaaatatgaccacatttt

SEQ ID NO: 595275 - DNA, 19 bp, Mus musculus
  siRNA target sequence for B830009D23Rik (NM_175285.2,1568-1586).
gcttttcatttgggatatt

SEQ ID NO: 595276 - DNA, 19 bp, Mus musculus
  siRNA target sequence for B830009D23Rik (NM_175285.2,1605-1623).
gcaaggtggtctaacattt

SEQ ID NO: 595277 - DNA, 19 bp, Mus musculus
  siRNA target sequence for B830009D23Rik (NM_175285.2,1606-1624).
caaggtggtctaacattta

SEQ ID NO: 595278 - DNA, 19 bp, Mus musculus
  siRNA target sequence for B830009D23Rik (NM_175285.2,1609-1627).
ggtggtctaacatttataa

SEQ ID NO: 595279 - DNA, 19 bp, Mus musculus
  siRNA target sequence for B830009D23Rik (NM_175285.2,1610-1628).
gtggtctaacatttataaa

SEQ ID NO: 595280 - DNA, 19 bp, Mus musculus
  siRNA target sequence for B830009D23Rik (NM_175285.2,1659-1677).
ccccttgatggcttacgta

SEQ ID NO: 595281 - DNA, 19 bp, Mus musculus
  siRNA target sequence for B830009D23Rik (NM_175285.2,1660-1678).
cccttgatggcttacgtat

SEQ ID NO: 595282 - DNA, 19 bp, Mus musculus
  siRNA target sequence for B830009D23Rik (NM_175285.2,1674-1692).
cgtatgctggagtttgcta

SEQ ID NO: 595283 - DNA, 19 bp, Mus musculus
  siRNA target sequence for B830009D23Rik (NM_175285.2,1723-1741).
catctccaccagggaaaat

SEQ ID NO: 595284 - DNA, 19 bp, Mus musculus
  siRNA target sequence for B830009D23Rik (NM_175285.2,1745-1763).
ggaagattatacctgttta

SEQ ID NO: 595285 - DNA, 19 bp, Mus musculus
  siRNA target sequence for B830009D23Rik (NM_175285.2,1749-1767).
gattatacctgtttaccta

SEQ ID NO: 595286 - DNA, 19 bp, Mus musculus
  siRNA target sequence for B830009D23Rik (NM_175285.2,1757-1775).
ctgtttacctacttatact

SEQ ID NO: 595287 - DNA, 19 bp, Mus musculus
  siRNA target sequence for B830009D23Rik (NM_175285.2,1782-1800).
gtacatatggcaggtttat

SEQ ID NO: 595288 - DNA, 19 bp, Mus musculus
  siRNA target sequence for B830009D23Rik (NM_175285.2,1829-1847).
gctccctagcctttacatt

SEQ ID NO: 595289 - DNA, 19 bp, Mus musculus
  siRNA target sequence for B830009D23Rik (NM_175285.2,1833-1851).
cctagcctttacattctct

SEQ ID NO: 595290 - DNA, 19 bp, Mus musculus
  siRNA target sequence for B830009D23Rik (NM_175285.2,1914-1932).
ctccactgaacttggaata

SEQ ID NO: 595291 - DNA, 19 bp, Mus musculus
  siRNA target sequence for B830009D23Rik (NM_175285.2,1919-1937).
ctgaacttggaatattcat

SEQ ID NO: 595292 - DNA, 19 bp, Mus musculus
  siRNA target sequence for B830009D23Rik (NM_175285.2,1938-1956).
ggtgcagttaaaaagtcat

SEQ ID NO: 595293 - DNA, 19 bp, Mus musculus
  siRNA target sequence for BC016423 (NM_134063.2,221-239).
gctacagataacaactaat

SEQ ID NO: 595294 - DNA, 19 bp, Mus musculus
  siRNA target sequence for BC016423 (NM_134063.2,298-316).
gtgagcatagtgagaattt

SEQ ID NO: 595295 - DNA, 19 bp, Mus musculus
  siRNA target sequence for BC016423 (NM_134063.2,365-383).
cctacctgccaaatatgga

SEQ ID NO: 595296 - DNA, 19 bp, Mus musculus
  siRNA target sequence for BC016423 (NM_134063.2,372-390).
gccaaatatggaggtaatt

SEQ ID NO: 595297 - DNA, 19 bp, Mus musculus
  siRNA target sequence for BC016423 (NM_134063.2,373-391).
ccaaatatggaggtaattt

SEQ ID NO: 595298 - DNA, 19 bp, Mus musculus
  siRNA target sequence for BC016423 (NM_134063.2,418-436).
cattggaggcaggttgtat

SEQ ID NO: 595299 - DNA, 19 bp, Mus musculus
  siRNA target sequence for BC016423 (NM_134063.2,476-494).
gtctagtgtaccttcatgt

SEQ ID NO: 595300 - DNA, 19 bp, Mus musculus
  siRNA target sequence for BC016423 (NM_134063.2,487-505).
cttcatgtagtcctagaaa

SEQ ID NO: 595301 - DNA, 19 bp, Mus musculus
  siRNA target sequence for BC016423 (NM_134063.2,490-508).
catgtagtcctagaaaagt

SEQ ID NO: 595302 - DNA, 19 bp, Mus musculus
  siRNA target sequence for BC016423 (NM_134063.2,493-511).
gtagtcctagaaaagttgt

SEQ ID NO: 595303 - DNA, 19 bp, Mus musculus
  siRNA target sequence for BC016423 (NM_134063.2,496-514).
gtcctagaaaagttgttga

SEQ ID NO: 595304 - DNA, 19 bp, Mus musculus
  siRNA target sequence for BC016423 (NM_134063.2,529-547).
ctgacacattggtttctat

SEQ ID NO: 595305 - DNA, 19 bp, Mus musculus
  siRNA target sequence for BC016423 (NM_134063.2,550-568).
ctacaagtggaatagtgaa

SEQ ID NO: 595306 - DNA, 19 bp, Mus musculus
  siRNA target sequence for BC016423 (NM_134063.2,559-577).
gaatagtgaatatgtcatt

SEQ ID NO: 595307 - DNA, 19 bp, Mus musculus
  siRNA target sequence for BC016423 (NM_134063.2,652-670).
cagaggctgatagtaatat

SEQ ID NO: 595308 - DNA, 19 bp, Mus musculus
  siRNA target sequence for BC016423 (NM_134063.2,689-707).
ctctgccttgattgacaaa

SEQ ID NO: 595309 - DNA, 19 bp, Mus musculus
  siRNA target sequence for BC016423 (NM_134063.2,695-713).
cttgattgacaaaactgat

SEQ ID NO: 595310 - DNA, 19 bp, Mus musculus
  siRNA target sequence for BC016423 (NM_134063.2,729-747).
catccagaagtctcaaagt

SEQ ID NO: 595311 - DNA, 19 bp, Mus musculus
  siRNA target sequence for BC016423 (NM_134063.2,776-794).
cacctatcatgcaaaacca

SEQ ID NO: 595312 - DNA, 19 bp, Mus musculus
  siRNA target sequence for BC016423 (NM_134063.2,841-859).
gaatggccagcttacttaa

SEQ ID NO: 595313 - DNA, 19 bp, Mus musculus
  siRNA target sequence for BC016423 (NM_134063.2,845-863).
ggccagcttacttaagaat

SEQ ID NO: 595314 - DNA, 19 bp, Mus musculus
  siRNA target sequence for BC016423 (NM_134063.2,846-864).
gccagcttacttaagaata

SEQ ID NO: 595315 - DNA, 19 bp, Mus musculus
  siRNA target sequence for BC016423 (NM_134063.2,904-922).
ctactggacttcagtctaa

SEQ ID NO: 595316 - DNA, 19 bp, Mus musculus
  siRNA target sequence for BC016423 (NM_134063.2,923-941).
ctccatgtctgcaaaagat

SEQ ID NO: 595317 - DNA, 19 bp, Mus musculus
  siRNA target sequence for BC016423 (NM_134063.2,962-980).
gctgcaggacacaatatgt

SEQ ID NO: 595318 - DNA, 19 bp, Mus musculus
  siRNA target sequence for BC016423 (NM_134063.2,1023-1041).
gctcattcttgtcaaaata

SEQ ID NO: 595319 - DNA, 19 bp, Mus musculus
  siRNA target sequence for BC016423 (NM_134063.2,1047-1065).
gacttcagtaaaagtatca

SEQ ID NO: 595320 - DNA, 19 bp, Mus musculus
  siRNA target sequence for BC016423 (NM_134063.2,1093-1111).
cagaatttgttgatgctat

SEQ ID NO: 595321 - DNA, 19 bp, Mus musculus
  siRNA target sequence for BC016423 (NM_134063.2,1108-1126).
ctatttgtggcgtctacaa

SEQ ID NO: 595322 - DNA, 19 bp, Mus musculus
  siRNA target sequence for BC016423 (NM_134063.2,1114-1132).
gtggcgtctacaaagaaca

SEQ ID NO: 595323 - DNA, 19 bp, Mus musculus
  siRNA target sequence for BC016423 (NM_134063.2,1116-1134).
ggcgtctacaaagaacata

SEQ ID NO: 595324 - DNA, 19 bp, Mus musculus
  siRNA target sequence for BC016423 (NM_134063.2,1118-1136).
cgtctacaaagaacatact

SEQ ID NO: 595325 - DNA, 19 bp, Mus musculus
  siRNA target sequence for BC016423 (NM_134063.2,1119-1137).
gtctacaaagaacatactt

SEQ ID NO: 595326 - DNA, 19 bp, Mus musculus
  siRNA target sequence for BC016423 (NM_134063.2,1124-1142).
caaagaacatactttcaat

SEQ ID NO: 595327 - DNA, 19 bp, Mus musculus
  siRNA target sequence for BC016423 (NM_134063.2,1149-1167).
cctaacatggtacatgaaa

SEQ ID NO: 595328 - DNA, 19 bp, Mus musculus
  siRNA target sequence for BC016423 (NM_134063.2,1195-1213).
ggaatacagagataagtgt

SEQ ID NO: 595329 - DNA, 19 bp, Mus musculus
  siRNA target sequence for BC016423 (NM_134063.2,1250-1268).
ctatgttcaggattctcat

SEQ ID NO: 595330 - DNA, 19 bp, Mus musculus
  siRNA target sequence for BC016423 (NM_134063.2,1254-1272).
gttcaggattctcatgatt

SEQ ID NO: 595331 - DNA, 19 bp, Mus musculus
  siRNA target sequence for BC016423 (NM_134063.2,1257-1275).
caggattctcatgattgta

SEQ ID NO: 595332 - DNA, 19 bp, Mus musculus
  siRNA target sequence for BC016423 (NM_134063.2,1259-1277).
ggattctcatgattgtaaa

SEQ ID NO: 595333 - DNA, 19 bp, Mus musculus
  siRNA target sequence for BC016423 (NM_134063.2,1321-1339).
gccagaaagatgctgtaaa

SEQ ID NO: 595334 - DNA, 19 bp, Mus musculus
  siRNA target sequence for BC016423 (NM_134063.2,1341-1359).
gatagctgtgactctttca

SEQ ID NO: 595335 - DNA, 19 bp, Mus musculus
  siRNA target sequence for BC016423 (NM_134063.2,1380-1398).
gacacctgggcctgttcta

SEQ ID NO: 595336 - DNA, 19 bp, Mus musculus
  siRNA target sequence for BC016423 (NM_134063.2,1385-1403).
ctgggcctgttctagcaaa

SEQ ID NO: 595337 - DNA, 19 bp, Mus musculus
  siRNA target sequence for BC016423 (NM_134063.2,1455-1473).
cgtcttatctcaccaaata

SEQ ID NO: 595338 - DNA, 19 bp, Mus musculus
  siRNA target sequence for BC016423 (NM_134063.2,1519-1537).
ccaagacttacgctaactt

SEQ ID NO: 595339 - DNA, 19 bp, Mus musculus
  siRNA target sequence for BC016423 (NM_134063.2,1520-1538).
caagacttacgctaacttt

SEQ ID NO: 595340 - DNA, 19 bp, Mus musculus
  siRNA target sequence for BC016423 (NM_134063.2,1523-1541).
gacttacgctaactttact

SEQ ID NO: 595341 - DNA, 19 bp, Mus musculus
  siRNA target sequence for BC016423 (NM_134063.2,1525-1543).
cttacgctaactttactat

SEQ ID NO: 595342 - DNA, 19 bp, Mus musculus
  siRNA target sequence for BC016423 (NM_134063.2,1529-1547).
cgctaactttactataaca

SEQ ID NO: 595343 - DNA, 19 bp, Mus musculus
  siRNA target sequence for BC016423 (NM_134063.2,1589-1607).
gaggcatcggaatttgagt

SEQ ID NO: 595344 - DNA, 19 bp, Mus musculus
  siRNA target sequence for BC016423 (NM_134063.2,1659-1677).
gaccttactcagcatacat

SEQ ID NO: 595345 - DNA, 19 bp, Mus musculus
  siRNA target sequence for BC016423 (NM_134063.2,1675-1693).
cattagacctagagtactt

SEQ ID NO: 595346 - DNA, 19 bp, Mus musculus
  siRNA target sequence for BC016423 (NM_134063.2,1694-1712).
gcgttttgatcataagcta

SEQ ID NO: 595347 - DNA, 19 bp, Mus musculus
  siRNA target sequence for BC016423 (NM_134063.2,1695-1713).
cgttttgatcataagctaa

SEQ ID NO: 595348 - DNA, 19 bp, Mus musculus
  siRNA target sequence for BC016423 (NM_134063.2,1727-1745).
gggaggttctcaacaatct

SEQ ID NO: 595349 - DNA, 19 bp, Mus musculus
  siRNA target sequence for BC016423 (NM_134063.2,1728-1746).
ggaggttctcaacaatctt

SEQ ID NO: 595350 - DNA, 19 bp, Mus musculus
  siRNA target sequence for BC016423 (NM_134063.2,1758-1776).
gaatcgctcgtccaaatct

SEQ ID NO: 595351 - DNA, 19 bp, Mus musculus
  siRNA target sequence for BC016423 (NM_134063.2,1850-1868).
cattctggtgacagttgta

SEQ ID NO: 595352 - DNA, 19 bp, Mus musculus
  siRNA target sequence for BC016423 (NM_134063.2,1925-1943).
cgacggttcttcctctttt

SEQ ID NO: 595353 - DNA, 19 bp, Mus musculus
  siRNA target sequence for BC016423 (NM_134063.2,1926-1944).
gacggttcttcctcttttt

SEQ ID NO: 595354 - DNA, 19 bp, Mus musculus
  siRNA target sequence for BC016423 (NM_134063.2,1930-1948).
gttcttcctctttttggaa

SEQ ID NO: 595355 - DNA, 19 bp, Mus musculus
  siRNA target sequence for BC016423 (NM_134063.2,2005-2023).
cattccacctcaataaact

SEQ ID NO: 595356 - DNA, 19 bp, Mus musculus
  siRNA target sequence for BC016423 (NM_134063.2,2009-2027).
ccacctcaataaactgaaa

SEQ ID NO: 595357 - DNA, 19 bp, Mus musculus
  siRNA target sequence for BC016423 (NM_134063.2,2030-2048).
caacagtactttaaaagaa

SEQ ID NO: 595358 - DNA, 19 bp, Mus musculus
  siRNA target sequence for BC016423 (NM_134063.2,2046-2064).
gaatctagaaatgatattt

SEQ ID NO: 595359 - DNA, 19 bp, Mus musculus
  siRNA target sequence for BC016423 (NM_134063.2,2086-2104).
ctgaatttaataagataat

SEQ ID NO: 595360 - DNA, 19 bp, Mus musculus
  siRNA target sequence for BC016423 (NM_134063.2,2108-2126).
gaatagcaagcaaattgtt

SEQ ID NO: 595361 - DNA, 19 bp, Mus musculus
  siRNA target sequence for BC016423 (NM_134063.2,2234-2252).
cactctgcatgtcaaacta

SEQ ID NO: 595362 - DNA, 19 bp, Mus musculus
  siRNA target sequence for BC016423 (NM_134063.2,2291-2309).
gttctacctcgttgaaaca

SEQ ID NO: 595363 - DNA, 19 bp, Mus musculus
  siRNA target sequence for BC016423 (NM_134063.2,2294-2312).
ctacctcgttgaaacagaa

SEQ ID NO: 595364 - DNA, 19 bp, Mus musculus
  siRNA target sequence for BC016423 (NM_134063.2,2351-2369).
gaaaggaggccatatagaa

SEQ ID NO: 595365 - DNA, 19 bp, Mus musculus
  siRNA target sequence for BC016423 (NM_134063.2,2360-2378).
ccatatagaaattgaactt

SEQ ID NO: 595366 - DNA, 19 bp, Mus musculus
  siRNA target sequence for BC016423 (NM_134063.2,2414-2432).
gacactattagttatcatt

SEQ ID NO: 595367 - DNA, 19 bp, Mus musculus
  siRNA target sequence for BC016423 (NM_134063.2,2459-2477).
gcatcaaattccttctcta

SEQ ID NO: 595368 - DNA, 19 bp, Mus musculus
  siRNA target sequence for BC016423 (NM_134063.2,2469-2487).
ccttctctactgaagctaa

SEQ ID NO: 595369 - DNA, 19 bp, Mus musculus
  siRNA target sequence for BC016423 (NM_134063.2,2470-2488).
cttctctactgaagctaaa

SEQ ID NO: 595370 - DNA, 19 bp, Mus musculus
  siRNA target sequence for BC016423 (NM_134063.2,2473-2491).
ctctactgaagctaaagca

SEQ ID NO: 595371 - DNA, 19 bp, Mus musculus
  siRNA target sequence for BC016423 (NM_134063.2,2475-2493).
ctactgaagctaaagcatt

SEQ ID NO: 595372 - DNA, 19 bp, Mus musculus
  siRNA target sequence for BC016423 (NM_134063.2,2522-2540).
cagccctgaagacattgta

SEQ ID NO: 595373 - DNA, 19 bp, Mus musculus
  siRNA target sequence for BC016423 (NM_134063.2,2572-2590).
gcggctttgtggtatcaga

SEQ ID NO: 595374 - DNA, 19 bp, Mus musculus
  siRNA target sequence for BC016423 (NM_134063.2,2573-2591).
cggctttgtggtatcagat

SEQ ID NO: 595375 - DNA, 19 bp, Mus musculus
  siRNA target sequence for BC016423 (NM_134063.2,2576-2594).
ctttgtggtatcagatgat

SEQ ID NO: 595376 - DNA, 19 bp, Mus musculus
  siRNA target sequence for BC016423 (NM_134063.2,2608-2626).
gtttaacattagttcaact

SEQ ID NO: 595377 - DNA, 19 bp, Mus musculus
  siRNA target sequence for BC016423 (NM_134063.2,2674-2692).
ggaagtggctgcttcacta

SEQ ID NO: 595378 - DNA, 19 bp, Mus musculus
  siRNA target sequence for BC016423 (NM_134063.2,2715-2733).
gaagacgtcagggtagatt

SEQ ID NO: 595379 - DNA, 19 bp, Mus musculus
  siRNA target sequence for BC016423 (NM_134063.2,2718-2736).
gacgtcagggtagattcaa

SEQ ID NO: 595380 - DNA, 19 bp, Mus musculus
  siRNA target sequence for BC016423 (NM_134063.2,2720-2738).
cgtcagggtagattcaatt

SEQ ID NO: 595381 - DNA, 19 bp, Mus musculus
  siRNA target sequence for BC016423 (NM_134063.2,2723-2741).
cagggtagattcaattgca

SEQ ID NO: 595382 - DNA, 19 bp, Mus musculus
  siRNA target sequence for BC016423 (NM_134063.2,2855-2873).
gttaaacttgcaaattcaa

SEQ ID NO: 595383 - DNA, 19 bp, Mus musculus
  siRNA target sequence for BC016423 (NM_134063.2,2952-2970).
cttgttacagatgtaaact

SEQ ID NO: 595384 - DNA, 19 bp, Mus musculus
  siRNA target sequence for BC016423 (NM_134063.2,3000-3018).
gctccatttaggagtagtt

SEQ ID NO: 595385 - DNA, 19 bp, Mus musculus
  siRNA target sequence for BC016423 (NM_134063.2,3001-3019).
ctccatttaggagtagtta

SEQ ID NO: 595386 - DNA, 19 bp, Mus musculus
  siRNA target sequence for BC016423 (NM_134063.2,3003-3021).
ccatttaggagtagttatt

SEQ ID NO: 595387 - DNA, 19 bp, Mus musculus
  siRNA target sequence for BC026374 (NM_146213.1,451-469).
ggggacagatattatccat

SEQ ID NO: 595388 - DNA, 19 bp, Mus musculus
  siRNA target sequence for BC026374 (NM_146213.1,572-590).
gccagtgatggtttggttt

SEQ ID NO: 595389 - DNA, 19 bp, Mus musculus
  siRNA target sequence for BC026374 (NM_146213.1,806-824).
cccggacagtgtaacacta

SEQ ID NO: 595390 - DNA, 19 bp, Mus musculus
  siRNA target sequence for BC026374 (NM_146213.1,807-825).
ccggacagtgtaacactat

SEQ ID NO: 595391 - DNA, 19 bp, Mus musculus
  siRNA target sequence for BC026374 (NM_146213.1,852-870).
gtctcaggactgatggtat

SEQ ID NO: 595392 - DNA, 19 bp, Mus musculus
  siRNA target sequence for BC026374 (NM_146213.1,984-1002).
gctggctgcgaccacaata

SEQ ID NO: 595393 - DNA, 19 bp, Mus musculus
  siRNA target sequence for BC026374 (NM_146213.1,987-1005).
ggctgcgaccacaatagca

SEQ ID NO: 595394 - DNA, 19 bp, Mus musculus
  siRNA target sequence for BC026374 (NM_146213.1,1085-1103).
ggctaactcccataaagat

SEQ ID NO: 595395 - DNA, 19 bp, Mus musculus
  siRNA target sequence for BC026374 (NM_146213.1,1093-1111).
cccataaagatccaaaaga

SEQ ID NO: 595396 - DNA, 19 bp, Mus musculus
  siRNA target sequence for BC026374 (NM_146213.1,1178-1196).
gacccgtgggcaggttaaa

SEQ ID NO: 595397 - DNA, 19 bp, Mus musculus
  siRNA target sequence for BC026374 (NM_146213.1,1181-1199).
ccgtgggcaggttaaacct

SEQ ID NO: 595398 - DNA, 19 bp, Mus musculus
  siRNA target sequence for BC026374 (NM_146213.1,1235-1253).
cgagtggaacttacctttt

SEQ ID NO: 595399 - DNA, 19 bp, Mus musculus
  siRNA target sequence for BC026374 (NM_146213.1,1269-1287).
ctaaatcagcgtatgatga

SEQ ID NO: 595400 - DNA, 19 bp, Mus musculus
  siRNA target sequence for BC026374 (NM_146213.1,1275-1293).
cagcgtatgatgaaccaaa

SEQ ID NO: 595401 - DNA, 19 bp, Mus musculus
  siRNA target sequence for BC026374 (NM_146213.1,1279-1297).
gtatgatgaaccaaaccaa

SEQ ID NO: 595402 - DNA, 19 bp, Mus musculus
  siRNA target sequence for BC026374 (NM_146213.1,1497-1515).
ggctcccccgtctatctgt

SEQ ID NO: 595403 - DNA, 19 bp, Mus musculus
  siRNA target sequence for BC026374 (NM_146213.1,1498-1516).
gctcccccgtctatctgta

SEQ ID NO: 595404 - DNA, 19 bp, Mus musculus
  siRNA target sequence for BC026374 (NM_146213.1,1533-1551).
gcttcttcgggcatcatca

SEQ ID NO: 595405 - DNA, 19 bp, Mus musculus
  siRNA target sequence for BC026374 (NM_146213.1,1534-1552).
cttcttcgggcatcatcat

SEQ ID NO: 595406 - DNA, 19 bp, Mus musculus
  siRNA target sequence for BC026374 (NM_146213.1,1537-1555).
cttcgggcatcatcatcaa

SEQ ID NO: 595407 - DNA, 19 bp, Mus musculus
  siRNA target sequence for BC026374 (NM_146213.1,1547-1565).
catcatcaaaccttacaat

SEQ ID NO: 595408 - DNA, 19 bp, Mus musculus
  siRNA target sequence for BC026374 (NM_146213.1,1581-1599).
gacgagctttcctatctct

SEQ ID NO: 595409 - DNA, 19 bp, Mus musculus
  siRNA target sequence for BC026374 (NM_146213.1,1752-1770).
ctgcagttggacttcgata

SEQ ID NO: 595410 - DNA, 19 bp, Mus musculus
  siRNA target sequence for BC026374 (NM_146213.1,1755-1773).
cagttggacttcgatacaa

SEQ ID NO: 595411 - DNA, 19 bp, Mus musculus
  siRNA target sequence for BC026374 (NM_146213.1,1757-1775).
gttggacttcgatacaaga

SEQ ID NO: 595412 - DNA, 19 bp, Mus musculus
  siRNA target sequence for BC026374 (NM_146213.1,1820-1838).
gcttcgccaatctcagaaa

SEQ ID NO: 595413 - DNA, 19 bp, Mus musculus
  siRNA target sequence for BC026374 (NM_146213.1,1824-1842).
cgccaatctcagaaacctt

SEQ ID NO: 595414 - DNA, 19 bp, Mus musculus
  siRNA target sequence for Bclp2 (NM_170594.1,405-423).
ctcccaagatggctatact

SEQ ID NO: 595415 - DNA, 19 bp, Mus musculus
  siRNA target sequence for Bclp2 (NM_170594.1,415-433).
ggctatactggggaaaaca

SEQ ID NO: 595416 - DNA, 19 bp, Mus musculus
  siRNA target sequence for Bclp2 (NM_170594.1,498-516).
gacctactggaatgaaaat

SEQ ID NO: 595417 - DNA, 19 bp, Mus musculus
  siRNA target sequence for Bclp2 (NM_170594.1,576-594).
gagtgacccctccaacaat

SEQ ID NO: 595418 - DNA, 19 bp, Mus musculus
  siRNA target sequence for Bclp2 (NM_170594.1,580-598).
gacccctccaacaatggaa

SEQ ID NO: 595419 - DNA, 19 bp, Mus musculus
  siRNA target sequence for Bclp2 (NM_170594.1,582-600).
cccctccaacaatggaata

SEQ ID NO: 595420 - DNA, 19 bp, Mus musculus
  siRNA target sequence for Bclp2 (NM_170594.1,585-603).
ctccaacaatggaataagt

SEQ ID NO: 595421 - DNA, 19 bp, Mus musculus
  siRNA target sequence for Bclp2 (NM_170594.1,750-768).
caaatgggttggctatgat

SEQ ID NO: 595422 - DNA, 19 bp, Mus musculus
  siRNA target sequence for Bclp2 (NM_170594.1,815-833).
cctgggaggtgccatgtta

SEQ ID NO: 595423 - DNA, 19 bp, Mus musculus
  siRNA target sequence for Bclp2 (NM_170594.1,816-834).
ctgggaggtgccatgttat

SEQ ID NO: 595424 - DNA, 19 bp, Mus musculus
  siRNA target sequence for C330005M16Rik (NM_175319.2,234-252).
ggacccaccagcggaattt

SEQ ID NO: 595425 - DNA, 19 bp, Mus musculus
  siRNA target sequence for C330005M16Rik (NM_175319.2,239-257).
caccagcggaatttgatca

SEQ ID NO: 595426 - DNA, 19 bp, Mus musculus
  siRNA target sequence for C330005M16Rik (NM_175319.2,242-260).
cagcggaatttgatcacat

SEQ ID NO: 595427 - DNA, 19 bp, Mus musculus
  siRNA target sequence for C330005M16Rik (NM_175319.2,367-385).
ccagggagcccaagagtat

SEQ ID NO: 595428 - DNA, 19 bp, Mus musculus
  siRNA target sequence for C330005M16Rik (NM_175319.2,377-395).
caagagtatcctcatgtta

SEQ ID NO: 595429 - DNA, 19 bp, Mus musculus
  siRNA target sequence for C330005M16Rik (NM_175319.2,809-827).
ggagactttgcctacaaca

SEQ ID NO: 595430 - DNA, 19 bp, Mus musculus
  siRNA target sequence for C330005M16Rik (NM_175319.2,843-861).
ctcgcgttggggacagatt

SEQ ID NO: 595431 - DNA, 19 bp, Mus musculus
  siRNA target sequence for C330005M16Rik (NM_175319.2,845-863).
cgcgttggggacagattta

SEQ ID NO: 595432 - DNA, 19 bp, Mus musculus
  siRNA target sequence for C330005M16Rik (NM_175319.2,846-864).
gcgttggggacagatttat

SEQ ID NO: 595433 - DNA, 19 bp, Mus musculus
  siRNA target sequence for C330005M16Rik (NM_175319.2,848-866).
gttggggacagatttatga

SEQ ID NO: 595434 - DNA, 19 bp, Mus musculus
  siRNA target sequence for C330005M16Rik (NM_175319.2,920-938).
catgaacagcgctacaatt

SEQ ID NO: 595435 - DNA, 19 bp, Mus musculus
  siRNA target sequence for C330005M16Rik (NM_175319.2,923-941).
gaacagcgctacaatttct

SEQ ID NO: 595436 - DNA, 19 bp, Mus musculus
  siRNA target sequence for C330005M16Rik (NM_175319.2,926-944).
cagcgctacaatttctcta

SEQ ID NO: 595437 - DNA, 19 bp, Mus musculus
  siRNA target sequence for C330005M16Rik (NM_175319.2,929-947).
cgctacaatttctctaact

SEQ ID NO: 595438 - DNA, 19 bp, Mus musculus
  siRNA target sequence for C330005M16Rik (NM_175319.2,963-981).
gcatgccaggggacaatga

SEQ ID NO: 595439 - DNA, 19 bp, Mus musculus
  siRNA target sequence for C330005M16Rik (NM_175319.2,1007-1025).
gggcctgcccatatcatct

SEQ ID NO: 595440 - DNA, 19 bp, Mus musculus
  siRNA target sequence for C330005M16Rik (NM_175319.2,1026-1044).
cattctccactgaggtata

SEQ ID NO: 595441 - DNA, 19 bp, Mus musculus
  siRNA target sequence for C330005M16Rik (NM_175319.2,1061-1079).
ggccgtcacctgattgaga

SEQ ID NO: 595442 - DNA, 19 bp, Mus musculus
  siRNA target sequence for C330005M16Rik (NM_175319.2,1062-1080).
gccgtcacctgattgagaa

SEQ ID NO: 595443 - DNA, 19 bp, Mus musculus
  siRNA target sequence for C330005M16Rik (NM_175319.2,1133-1151).
gcccgaccttggatcatca

SEQ ID NO: 595444 - DNA, 19 bp, Mus musculus
  siRNA target sequence for C330005M16Rik (NM_175319.2,1157-1175).
ggtcatcggcctatgtact

SEQ ID NO: 595445 - DNA, 19 bp, Mus musculus
  siRNA target sequence for C330005M16Rik (NM_175319.2,1160-1178).
catcggcctatgtactgtt

SEQ ID NO: 595446 - DNA, 19 bp, Mus musculus
  siRNA target sequence for C330005M16Rik (NM_175319.2,1165-1183).
gcctatgtactgttccaat

SEQ ID NO: 595447 - DNA, 19 bp, Mus musculus
  siRNA target sequence for C330005M16Rik (NM_175319.2,1316-1334).
gagcgactatggccaattt

SEQ ID NO: 595448 - DNA, 19 bp, Mus musculus
  siRNA target sequence for C330005M16Rik (NM_175319.2,1320-1338).
gactatggccaatttacaa

SEQ ID NO: 595449 - DNA, 19 bp, Mus musculus
  siRNA target sequence for C330005M16Rik (NM_175319.2,1322-1340).
ctatggccaatttacaact

SEQ ID NO: 595450 - DNA, 19 bp, Mus musculus
  siRNA target sequence for C330005M16Rik (NM_175319.2,1336-1354).
caactaccaggtatttaat

SEQ ID NO: 595451 - DNA, 19 bp, Mus musculus
  siRNA target sequence for C330005M16Rik (NM_175319.2,1339-1357).
ctaccaggtatttaatgga

SEQ ID NO: 595452 - DNA, 19 bp, Mus musculus
  siRNA target sequence for C330005M16Rik (NM_175319.2,1388-1406).
ggcccagttcacatcatta

SEQ ID NO: 595453 - DNA, 19 bp, Mus musculus
  siRNA target sequence for C330005M16Rik (NM_175319.2,1582-1600).
ggtggttagacctttgctt

SEQ ID NO: 595454 - DNA, 19 bp, Mus musculus
  siRNA target sequence for C530044N13Rik (NM_146067.2,144-162).
gacgcgttttcctcagaaa

SEQ ID NO: 595455 - DNA, 19 bp, Mus musculus
  siRNA target sequence for C530044N13Rik (NM_146067.2,175-193).
ggaaaggtccattctactt

SEQ ID NO: 595456 - DNA, 19 bp, Mus musculus
  siRNA target sequence for C530044N13Rik (NM_146067.2,328-346).
ctaaacccaaattctttgt

SEQ ID NO: 595457 - DNA, 19 bp, Mus musculus
  siRNA target sequence for C530044N13Rik (NM_146067.2,382-400).
ctccatggcggcaagaaca

SEQ ID NO: 595458 - DNA, 19 bp, Mus musculus
  siRNA target sequence for C530044N13Rik (NM_146067.2,410-428).
cctgcagcgagtactgaaa

SEQ ID NO: 595459 - DNA, 19 bp, Mus musculus
  siRNA target sequence for C530044N13Rik (NM_146067.2,523-541).
catggggagacgactactt

SEQ ID NO: 595460 - DNA, 19 bp, Mus musculus
  siRNA target sequence for C530044N13Rik (NM_146067.2,531-549).
gacgactacttcagctttt

SEQ ID NO: 595461 - DNA, 19 bp, Mus musculus
  siRNA target sequence for C530044N13Rik (NM_146067.2,644-662).
ggaccaacagctgaacatt

SEQ ID NO: 595462 - DNA, 19 bp, Mus musculus
  siRNA target sequence for C530044N13Rik (NM_146067.2,688-706).
ccattgtcttccagcatat

SEQ ID NO: 595463 - DNA, 19 bp, Mus musculus
  siRNA target sequence for C530044N13Rik (NM_146067.2,709-727).
cgctattcctgcagagtat

SEQ ID NO: 595464 - DNA, 19 bp, Mus musculus
  siRNA target sequence for C530044N13Rik (NM_146067.2,716-734).
cctgcagagtattgatgaa

SEQ ID NO: 595465 - DNA, 19 bp, Mus musculus
  siRNA target sequence for C530044N13Rik (NM_146067.2,845-863).
gggaacctaccagaatctt

SEQ ID NO: 595466 - DNA, 19 bp, Mus musculus
  siRNA target sequence for C530044N13Rik (NM_146067.2,951-969).
gttcatcgttactacagtt

SEQ ID NO: 595467 - DNA, 19 bp, Mus musculus
  siRNA target sequence for C530044N13Rik (NM_146067.2,958-976).
gttactacagtttagatga

SEQ ID NO: 595468 - DNA, 19 bp, Mus musculus
  siRNA target sequence for Ces2 (NM_145603.1,50-68).
gacacggaaccaactacat

SEQ ID NO: 595469 - DNA, 19 bp, Mus musculus
  siRNA target sequence for Ces2 (NM_145603.1,52-70).
cacggaaccaactacataa

SEQ ID NO: 595470 - DNA, 19 bp, Mus musculus
  siRNA target sequence for Ces2 (NM_145603.1,54-72).
cggaaccaactacataact

SEQ ID NO: 595471 - DNA, 19 bp, Mus musculus
  siRNA target sequence for Ces2 (NM_145603.1,337-355).
gtctgcaaaatcttgacat

SEQ ID NO: 595472 - DNA, 19 bp, Mus musculus
  siRNA target sequence for Ces2 (NM_145603.1,367-385).
caggcctgccagatatgaa

SEQ ID NO: 595473 - DNA, 19 bp, Mus musculus
  siRNA target sequence for Ces2 (NM_145603.1,369-387).
ggcctgccagatatgaaaa

SEQ ID NO: 595474 - DNA, 19 bp, Mus musculus
  siRNA target sequence for Ces2 (NM_145603.1,370-388).
gcctgccagatatgaaaat

SEQ ID NO: 595475 - DNA, 19 bp, Mus musculus
  siRNA target sequence for Chi3l1 (NM_007695.1,199-217).
cagacgccatccaaccttt

SEQ ID NO: 595476 - DNA, 19 bp, Mus musculus
  siRNA target sequence for Chi3l1 (NM_007695.1,287-305).
gaatgacgagtcgaactat

SEQ ID NO: 595477 - DNA, 19 bp, Mus musculus
  siRNA target sequence for Chi3l1 (NM_007695.1,358-376).
ctgttggagggtggaaatt

SEQ ID NO: 595478 - DNA, 19 bp, Mus musculus
  siRNA target sequence for Chi3l1 (NM_007695.1,371-389).
gaaatttggcgaaaaaaga

SEQ ID NO: 595479 - DNA, 19 bp, Mus musculus
  siRNA target sequence for Chi3l1 (NM_007695.1,455-473).
gcgttcttatggctttgat

SEQ ID NO: 595480 - DNA, 19 bp, Mus musculus
  siRNA target sequence for Chi3l1 (NM_007695.1,491-509).
gctctaccctcgcttaaga

SEQ ID NO: 595481 - DNA, 19 bp, Mus musculus
  siRNA target sequence for Chi3l1 (NM_007695.1,593-611).
gctcagcgcagctttgtca

SEQ ID NO: 595482 - DNA, 19 bp, Mus musculus
  siRNA target sequence for Chi3l1 (NM_007695.1,702-720).
ggagtctggcgccaaatca

SEQ ID NO: 595483 - DNA, 19 bp, Mus musculus
  siRNA target sequence for Chi3l1 (NM_007695.1,749-767).
ccagaaggacactaggttt

SEQ ID NO: 595484 - DNA, 19 bp, Mus musculus
  siRNA target sequence for Chi3l1 (NM_007695.1,876-894).
gcatcttctgaaaatcagt

SEQ ID NO: 595485 - DNA, 19 bp, Mus musculus
  siRNA target sequence for Chi3l1 (NM_007695.1,893-911).
gttgggagctccaatctca

SEQ ID NO: 595486 - DNA, 19 bp, Mus musculus
  siRNA target sequence for Chi3l1 (NM_007695.1,908-926).
ctcaggggaaggattacca

SEQ ID NO: 595487 - DNA, 19 bp, Mus musculus
  siRNA target sequence for Chi3l1 (NM_007695.1,954-972).
ctggcctactacgagatat

SEQ ID NO: 595488 - DNA, 19 bp, Mus musculus
  siRNA target sequence for Chi3l1 (NM_007695.1,1162-1180).
gtcagccgaaggaattctt

SEQ ID NO: 595489 - DNA, 19 bp, Mus musculus
  siRNA target sequence for Crmp1 (NM_007765.3,355-373).
ccttctacgccgatgtcta

SEQ ID NO: 595490 - DNA, 19 bp, Mus musculus
  siRNA target sequence for Crmp1 (NM_007765.3,374-392).
cctagaagatggactcata

SEQ ID NO: 595491 - DNA, 19 bp, Mus musculus
  siRNA target sequence for Crmp1 (NM_007765.3,375-393).
ctagaagatggactcataa

SEQ ID NO: 595492 - DNA, 19 bp, Mus musculus
  siRNA target sequence for Crmp1 (NM_007765.3,466-484).
ccggtggcattgatgtcaa

SEQ ID NO: 595493 - DNA, 19 bp, Mus musculus
  siRNA target sequence for Crmp1 (NM_007765.3,471-489).
ggcattgatgtcaacactt

SEQ ID NO: 595494 - DNA, 19 bp, Mus musculus
  siRNA target sequence for Crmp1 (NM_007765.3,472-490).
gcattgatgtcaacactta

SEQ ID NO: 595495 - DNA, 19 bp, Mus musculus
  siRNA target sequence for Crmp1 (NM_007765.3,530-548).
cttcttccagggcactaaa

SEQ ID NO: 595496 - DNA, 19 bp, Mus musculus
  siRNA target sequence for Crmp1 (NM_007765.3,533-551).
cttccagggcactaaagca

SEQ ID NO: 595497 - DNA, 19 bp, Mus musculus
  siRNA target sequence for Crmp1 (NM_007765.3,600-618).
cctgggtccagcttgttga

SEQ ID NO: 595498 - DNA, 19 bp, Mus musculus
  siRNA target sequence for Crmp1 (NM_007765.3,603-621).
gggtccagcttgttgactt

SEQ ID NO: 595499 - DNA, 19 bp, Mus musculus
  siRNA target sequence for Crmp1 (NM_007765.3,686-704).
catcacaagctggtatgat

SEQ ID NO: 595500 - DNA, 19 bp, Mus musculus
  siRNA target sequence for Crmp1 (NM_007765.3,851-869).
cttagtccatgcagaaaat

SEQ ID NO: 595501 - DNA, 19 bp, Mus musculus
  siRNA target sequence for Crmp1 (NM_007765.3,989-1007).
cattgcaggccggatcaat

SEQ ID NO: 595502 - DNA, 19 bp, Mus musculus
  siRNA target sequence for Crmp1 (NM_007765.3,1260-1278).
ggccactgtccctacagta

SEQ ID NO: 595503 - DNA, 19 bp, Mus musculus
  siRNA target sequence for Crmp1 (NM_007765.3,1532-1550).
caaaagccataaatcaact

SEQ ID NO: 595504 - DNA, 19 bp, Mus musculus
  siRNA target sequence for Crmp1 (NM_007765.3,1704-1722).
cagcgtgtcaggatcagaa

SEQ ID NO: 595505 - DNA, 19 bp, Mus musculus
  siRNA target sequence for Crmp1 (NM_007765.3,1872-1890).
cagtccaacttcagcttat

SEQ ID NO: 595506 - DNA, 19 bp, Mus musculus
  siRNA target sequence for D15Bwg0669e (NM_172610.1,333-351).
caggccttcaccttctaca

SEQ ID NO: 595507 - DNA, 19 bp, Mus musculus
  siRNA target sequence for D15Bwg0669e (NM_172610.1,335-353).
ggccttcaccttctacaat

SEQ ID NO: 595508 - DNA, 19 bp, Mus musculus
  siRNA target sequence for D15Bwg0669e (NM_172610.1,336-354).
gccttcaccttctacaata

SEQ ID NO: 595509 - DNA, 19 bp, Mus musculus
  siRNA target sequence for D15Bwg0669e (NM_172610.1,337-355).
ccttcaccttctacaatat

SEQ ID NO: 595510 - DNA, 19 bp, Mus musculus
  siRNA target sequence for D15Bwg0669e (NM_172610.1,469-487).
ggacagatcccattcaaat

SEQ ID NO: 595511 - DNA, 19 bp, Mus musculus
  siRNA target sequence for D15Bwg0669e (NM_172610.1,540-558).
ccaagcgaggtgaagaagt

SEQ ID NO: 595512 - DNA, 19 bp, Mus musculus
  siRNA target sequence for D15Bwg0669e (NM_172610.1,541-559).
caagcgaggtgaagaagtt

SEQ ID NO: 595513 - DNA, 19 bp, Mus musculus
  siRNA target sequence for D15Bwg0669e (NM_172610.1,579-597).
ctgccctatgagtacaaga

SEQ ID NO: 595514 - DNA, 19 bp, Mus musculus
  siRNA target sequence for D15Bwg0669e (NM_172610.1,656-674).
caagcaggacttttattat

SEQ ID NO: 595515 - DNA, 19 bp, Mus musculus
  siRNA target sequence for D15Bwg0669e (NM_172610.1,876-894).
gaaggagtagacatcctta

SEQ ID NO: 595516 - DNA, 19 bp, Mus musculus
  siRNA target sequence for D15Bwg0669e (NM_172610.1,879-897).
ggagtagacatccttataa

SEQ ID NO: 595517 - DNA, 19 bp, Mus musculus
  siRNA target sequence for D15Bwg0669e (NM_172610.1,907-925).
caccactgggctttctaga

SEQ ID NO: 595518 - DNA, 19 bp, Mus musculus
  siRNA target sequence for D15Bwg0669e (NM_172610.1,1050-1068).
gggaccaccacctatgtga

SEQ ID NO: 595519 - DNA, 19 bp, Mus musculus
  siRNA target sequence for Ddah1 (NM_026993.1,518-536).
ggtggggacgtcctattca

SEQ ID NO: 595520 - DNA, 19 bp, Mus musculus
  siRNA target sequence for Ddah1 (NM_026993.1,530-548).
ctattcacaggcagagaat

SEQ ID NO: 595521 - DNA, 19 bp, Mus musculus
  siRNA target sequence for Ddah1 (NM_026993.1,554-572).
gtgggcctttccaaaagaa

SEQ ID NO: 595522 - DNA, 19 bp, Mus musculus
  siRNA target sequence for Ddah1 (NM_026993.1,590-608).
gaaatcttggctgatactt

SEQ ID NO: 595523 - DNA, 19 bp, Mus musculus
  siRNA target sequence for Ddah1 (NM_026993.1,632-650).
gtccctgtggccgattctt

SEQ ID NO: 595524 - DNA, 19 bp, Mus musculus
  siRNA target sequence for Ddah1 (NM_026993.1,638-656).
gtggccgattctttgcatt

SEQ ID NO: 595525 - DNA, 19 bp, Mus musculus
  siRNA target sequence for Ddah1 (NM_026993.1,642-660).
ccgattctttgcatttaaa

SEQ ID NO: 595526 - DNA, 19 bp, Mus musculus
  siRNA target sequence for Ddah1 (NM_026993.1,745-763).
gatgagtgaccatcgttat

SEQ ID NO: 595527 - DNA, 19 bp, Mus musculus
  siRNA target sequence for Ddah1 (NM_026993.1,750-768).
gtgaccatcgttatgacaa

SEQ ID NO: 595528 - DNA, 19 bp, Mus musculus
  siRNA target sequence for Ddah1 (NM_026993.1,793-811).
cgccaactgcatatatcta

SEQ ID NO: 595529 - DNA, 19 bp, Mus musculus
  siRNA target sequence for Ddah1 (NM_026993.1,795-813).
ccaactgcatatatctaaa

SEQ ID NO: 595530 - DNA, 19 bp, Mus musculus
  siRNA target sequence for Ddah1 (NM_026993.1,796-814).
caactgcatatatctaaat

SEQ ID NO: 595531 - DNA, 19 bp, Mus musculus
  siRNA target sequence for Ddah1 (NM_026993.1,870-888).
gcgcaaaggtctatgagaa

SEQ ID NO: 595532 - DNA, 19 bp, Mus musculus
  siRNA target sequence for Ddah1 (NM_026993.1,918-936).
gcaactcggagatggaaaa

SEQ ID NO: 595533 - DNA, 19 bp, Mus musculus
  siRNA target sequence for Ddah1 (NM_026993.1,963-981).
ccgtttttattaacaagaa

SEQ ID NO: 595534 - DNA, 19 bp, Mus musculus
  siRNA target sequence for Ddah2 (NM_016765.1,371-389).
gagtactaggaggtaaact

SEQ ID NO: 595535 - DNA, 19 bp, Mus musculus
  siRNA target sequence for Ddah2 (NM_016765.1,373-391).
gtactaggaggtaaactga

SEQ ID NO: 595536 - DNA, 19 bp, Mus musculus
  siRNA target sequence for Ddah2 (NM_016765.1,484-502).
gacacggccctaatcacaa

SEQ ID NO: 595537 - DNA, 19 bp, Mus musculus
  siRNA target sequence for Ddah2 (NM_016765.1,654-672).
ctccaagtggaccaatcat

SEQ ID NO: 595538 - DNA, 19 bp, Mus musculus
  siRNA target sequence for Dio1 (NM_007860.1,96-114).
ctgtaggcaaggtgctaat

SEQ ID NO: 595539 - DNA, 19 bp, Mus musculus
  siRNA target sequence for Dio1 (NM_007860.1,340-358).
caacatctgggatttcatt

SEQ ID NO: 595540 - DNA, 19 bp, Mus musculus
  siRNA target sequence for Dio1 (NM_007860.1,366-384).
gcaggcccctggtgttgaa

SEQ ID NO: 595541 - DNA, 19 bp, Mus musculus
  siRNA target sequence for Dio2 (NM_010050.1,159-177).
gactcctcagcgtagactt

SEQ ID NO: 595542 - DNA, 19 bp, Mus musculus
  siRNA target sequence for Dio2 (NM_010050.1,355-373).
cctcctagatgcctacaaa

SEQ ID NO: 595543 - DNA, 19 bp, Mus musculus
  siRNA target sequence for Dio2 (NM_010050.1,376-394).
ggttaaactgggtgaagat

SEQ ID NO: 595544 - DNA, 19 bp, Mus musculus
  siRNA target sequence for Dio2 (NM_010050.1,418-436).
cgtctccaatcctgaatca

SEQ ID NO: 595545 - DNA, 19 bp, Mus musculus
  siRNA target sequence for Dio2 (NM_010050.1,511-529).
cccactggtggtcaacttt

SEQ ID NO: 595546 - DNA, 19 bp, Mus musculus
  siRNA target sequence for Dio2 (NM_010050.1,515-533).
ctggtggtcaactttggtt

SEQ ID NO: 595547 - DNA, 19 bp, Mus musculus
  siRNA target sequence for Dio2 (NM_010050.1,613-631).
cctgttggtatacattgat

SEQ ID NO: 595548 - DNA, 19 bp, Mus musculus
  siRNA target sequence for Dio2 (NM_010050.1,677-695).
ctgtcttttgaggttaaga

SEQ ID NO: 595549 - DNA, 19 bp, Mus musculus
  siRNA target sequence for Dio2 (NM_010050.1,841-859).
cgtgcagagacggaaaatt

SEQ ID NO: 595550 - DNA, 19 bp, Mus musculus
  siRNA target sequence for Dio2 (NM_010050.1,880-898).
ccccttcagctataaccta

SEQ ID NO: 595551 - DNA, 19 bp, Mus musculus
  siRNA target sequence for Dio2 (NM_010050.1,888-906).
gctataacctacaagaagt

SEQ ID NO: 595552 - DNA, 19 bp, Mus musculus
  siRNA target sequence for Dio2 (NM_010050.1,933-951).
gcaagagatgaattctaga

SEQ ID NO: 595553 - DNA, 19 bp, Mus musculus
  siRNA target sequence for Dio3 (NM_172119.1,352-370).
ggcatggccagaaattgga

SEQ ID NO: 595554 - DNA, 19 bp, Mus musculus
  siRNA target sequence for Dio3 (NM_172119.1,353-371).
gcatggccagaaattggat

SEQ ID NO: 595555 - DNA, 19 bp, Mus musculus
  siRNA target sequence for Dio3 (NM_172119.1,354-372).
catggccagaaattggatt

SEQ ID NO: 595556 - DNA, 19 bp, Mus musculus
  siRNA target sequence for Dio3 (NM_172119.1,357-375).
ggccagaaattggatttct

SEQ ID NO: 595557 - DNA, 19 bp, Mus musculus
  siRNA target sequence for Dio3 (NM_172119.1,476-494).
cccgttggtgctcaatttt

SEQ ID NO: 595558 - DNA, 19 bp, Mus musculus
  siRNA target sequence for Dio3 (NM_172119.1,564-582).
cgcgacgttgacttcctta

SEQ ID NO: 595559 - DNA, 19 bp, Mus musculus
  siRNA target sequence for Dio3 (NM_172119.1,565-583).
gcgacgttgacttccttat

SEQ ID NO: 595560 - DNA, 19 bp, Mus musculus
  siRNA target sequence for Dio3 (NM_172119.1,570-588).
gttgacttccttatcatct

SEQ ID NO: 595561 - DNA, 19 bp, Mus musculus
  siRNA target sequence for Dio3 (NM_172119.1,615-633).
ggctgggtcaccacagatt

SEQ ID NO: 595562 - DNA, 19 bp, Mus musculus
  siRNA target sequence for Dio3 (NM_172119.1,628-646).
cagattcaccctatgtcat

SEQ ID NO: 595563 - DNA, 19 bp, Mus musculus
  siRNA target sequence for Dio3 (NM_172119.1,677-695).
cagcgcagcgagagtacta

SEQ ID NO: 595564 - DNA, 19 bp, Mus musculus
  siRNA target sequence for Dio3 (NM_172119.1,679-697).
gcgcagcgagagtactaca

SEQ ID NO: 595565 - DNA, 19 bp, Mus musculus
  siRNA target sequence for Dio3 (NM_172119.1,680-698).
cgcagcgagagtactacaa

SEQ ID NO: 595566 - DNA, 19 bp, Mus musculus
  siRNA target sequence for Dio3 (NM_172119.1,682-700).
cagcgagagtactacaaca

SEQ ID NO: 595567 - DNA, 19 bp, Mus musculus
  siRNA target sequence for Dio3 (NM_172119.1,718-736).
ctctggtcctggacactat

SEQ ID NO: 595568 - DNA, 19 bp, Mus musculus
  siRNA target sequence for Dio3 (NM_172119.1,754-772).
ccgcatatggtgcctattt

SEQ ID NO: 595569 - DNA, 19 bp, Mus musculus
  siRNA target sequence for Dio3 (NM_172119.1,755-773).
cgcatatggtgcctatttt

SEQ ID NO: 595570 - DNA, 19 bp, Mus musculus
  siRNA target sequence for Dio3 (NM_172119.1,892-910).
gtactaggccacatcgatt

SEQ ID NO: 595571 - DNA, 19 bp, Mus musculus
  siRNA target sequence for Dorz1 (NM_145919.1,703-721).
cctacaggtgcagaatact

SEQ ID NO: 595572 - DNA, 19 bp, Mus musculus
  siRNA target sequence for Dpysl2 (NM_009955.2,269-287).
cgagcgatcgtcttctgat

SEQ ID NO: 595573 - DNA, 19 bp, Mus musculus
  siRNA target sequence for Dpysl2 (NM_009955.2,272-290).
gcgatcgtcttctgatcaa

SEQ ID NO: 595574 - DNA, 19 bp, Mus musculus
  siRNA target sequence for Dpysl2 (NM_009955.2,273-291).
cgatcgtcttctgatcaaa

SEQ ID NO: 595575 - DNA, 19 bp, Mus musculus
  siRNA target sequence for Dpysl2 (NM_009955.2,726-744).
cgtgtacatggctttcaaa

SEQ ID NO: 595576 - DNA, 19 bp, Mus musculus
  siRNA target sequence for Dpysl2 (NM_009955.2,759-777).
gacggattcccagatctat

SEQ ID NO: 595577 - DNA, 19 bp, Mus musculus
  siRNA target sequence for Dpysl2 (NM_009955.2,761-779).
cggattcccagatctatga

SEQ ID NO: 595578 - DNA, 19 bp, Mus musculus
  siRNA target sequence for Dpysl2 (NM_009955.2,937-955).
gtgaaccggtccatcacta

SEQ ID NO: 595579 - DNA, 19 bp, Mus musculus
  siRNA target sequence for Dpysl2 (NM_009955.2,939-957).
gaaccggtccatcactatt

SEQ ID NO: 595580 - DNA, 19 bp, Mus musculus
  siRNA target sequence for Dpysl2 (NM_009955.2,1161-1179).
cccaaccactccagacttt

SEQ ID NO: 595581 - DNA, 19 bp, Mus musculus
  siRNA target sequence for Dpysl2 (NM_009955.2,1163-1181).
caaccactccagactttct

SEQ ID NO: 595582 - DNA, 19 bp, Mus musculus
  siRNA target sequence for Dpysl2 (NM_009955.2,1266-1284).
ggacaacttcaccttgatt

SEQ ID NO: 595583 - DNA, 19 bp, Mus musculus
  siRNA target sequence for Dpysl2 (NM_009955.2,1317-1335).
gtctgtcatttgggataaa

SEQ ID NO: 595584 - DNA, 19 bp, Mus musculus
  siRNA target sequence for Dpysl2 (NM_009955.2,1397-1415).
ccaaagtcttcaaccttta

SEQ ID NO: 595585 - DNA, 19 bp, Mus musculus
  siRNA target sequence for Dpysl2 (NM_009955.2,1593-1611).
ggaggacggcacacttcat

SEQ ID NO: 595586 - DNA, 19 bp, Mus musculus
  siRNA target sequence for Dpysl2 (NM_009955.2,1851-1869).
cttgtctggtgctcagatt

SEQ ID NO: 595587 - DNA, 19 bp, Mus musculus
  siRNA target sequence for Dpysl3 (NM_009468.1,345-363).
cacgagtgaccgtcttcta

SEQ ID NO: 595588 - DNA, 19 bp, Mus musculus
  siRNA target sequence for Dpysl3 (NM_009468.1,350-368).
gtgaccgtcttctaatcaa

SEQ ID NO: 595589 - DNA, 19 bp, Mus musculus
  siRNA target sequence for Dpysl3 (NM_009468.1,374-392).
ggagaatcgtcaatgatga

SEQ ID NO: 595590 - DNA, 19 bp, Mus musculus
  siRNA target sequence for Dpysl3 (NM_009468.1,375-393).
gagaatcgtcaatgatgat

SEQ ID NO: 595591 - DNA, 19 bp, Mus musculus
  siRNA target sequence for Dpysl3 (NM_009468.1,377-395).
gaatcgtcaatgatgatca

SEQ ID NO: 595592 - DNA, 19 bp, Mus musculus
  siRNA target sequence for Dpysl3 (NM_009468.1,396-414).
gtccttttatgctgatatt

SEQ ID NO: 595593 - DNA, 19 bp, Mus musculus
  siRNA target sequence for Dpysl3 (NM_009468.1,398-416).
ccttttatgctgatattta

SEQ ID NO: 595594 - DNA, 19 bp, Mus musculus
  siRNA target sequence for Dpysl3 (NM_009468.1,417-435).
catggaggatggcttaata

SEQ ID NO: 595595 - DNA, 19 bp, Mus musculus
  siRNA target sequence for Dpysl3 (NM_009468.1,424-442).
gatggcttaataaagcaaa

SEQ ID NO: 595596 - DNA, 19 bp, Mus musculus
  siRNA target sequence for Dpysl3 (NM_009468.1,560-578).
ccacagtggacgatttctt

SEQ ID NO: 595597 - DNA, 19 bp, Mus musculus
  siRNA target sequence for Dpysl3 (NM_009468.1,696-714).
gaagagctgctgtgactat

SEQ ID NO: 595598 - DNA, 19 bp, Mus musculus
  siRNA target sequence for Dpysl3 (NM_009468.1,705-723).
ctgtgactatgctttgcat

SEQ ID NO: 595599 - DNA, 19 bp, Mus musculus
  siRNA target sequence for Dpysl3 (NM_009468.1,790-808).
gttaactccttcatggttt

SEQ ID NO: 595600 - DNA, 19 bp, Mus musculus
  siRNA target sequence for Dpysl3 (NM_009468.1,813-831).
ggcctacaaggatttatat

SEQ ID NO: 595601 - DNA, 19 bp, Mus musculus
  siRNA target sequence for Dpysl3 (NM_009468.1,885-903).
ggccattgctcaagttcat

SEQ ID NO: 595602 - DNA, 19 bp, Mus musculus
  siRNA target sequence for Dpysl3 (NM_009468.1,1158-1176).
gggaatagatggaactcat

SEQ ID NO: 595603 - DNA, 19 bp, Mus musculus
  siRNA target sequence for Dpysl3 (NM_009468.1,1159-1177).
ggaatagatggaactcatt

SEQ ID NO: 595604 - DNA, 19 bp, Mus musculus
  siRNA target sequence for Dpysl3 (NM_009468.1,1380-1398).
cgtggaggagcgtatgtct

SEQ ID NO: 595605 - DNA, 19 bp, Mus musculus
  siRNA target sequence for Dpysl3 (NM_009468.1,1466-1484).
ccaatgctgccaagatatt

SEQ ID NO: 595606 - DNA, 19 bp, Mus musculus
  siRNA target sequence for Dpysl3 (NM_009468.1,1589-1607).
cggttgccgaatacaacat

SEQ ID NO: 595607 - DNA, 19 bp, Mus musculus
  siRNA target sequence for Dpysl3 (NM_009468.1,1591-1609).
gttgccgaatacaacatct

SEQ ID NO: 595608 - DNA, 19 bp, Mus musculus
  siRNA target sequence for Dpysl3 (NM_009468.1,1631-1649).
gtgcacctctggtggttat

SEQ ID NO: 595609 - DNA, 19 bp, Mus musculus
  siRNA target sequence for Dpysl3 (NM_009468.1,1724-1742).
gcccattctctgactatgt

SEQ ID NO: 595610 - DNA, 19 bp, Mus musculus
  siRNA target sequence for Dpysl3 (NM_009468.1,1726-1744).
ccattctctgactatgtct

SEQ ID NO: 595611 - DNA, 19 bp, Mus musculus
  siRNA target sequence for Dpysl3 (NM_009468.1,1727-1745).
cattctctgactatgtcta

SEQ ID NO: 595612 - DNA, 19 bp, Mus musculus
  siRNA target sequence for Dpysl3 (NM_009468.1,1743-1761).
ctataagcgcattaaagca

SEQ ID NO: 595613 - DNA, 19 bp, Mus musculus
  siRNA target sequence for Dpysl3 (NM_009468.1,1791-1809).
cccaagaggcatgtatgat

SEQ ID NO: 595614 - DNA, 19 bp, Mus musculus
  siRNA target sequence for Dpysl3 (NM_009468.1,1905-1923).
cctccatcagtcaggattt

SEQ ID NO: 595615 - DNA, 19 bp, Mus musculus
  siRNA target sequence for Dpysl3 (NM_009468.1,1906-1924).
ctccatcagtcaggattta

SEQ ID NO: 595616 - DNA, 19 bp, Mus musculus
  siRNA target sequence for Dpysl3 (NM_009468.1,1987-2005).
cctggaggccgttctaaca

SEQ ID NO: 595617 - DNA, 19 bp, Mus musculus
  siRNA target sequence for Dpysl3 (NM_009468.1,1988-2006).
ctggaggccgttctaacat

SEQ ID NO: 595618 - DNA, 19 bp, Mus musculus
  siRNA target sequence for Dpysl4 (NM_011993.2,89-107).
cgagcgaccgccttctcat

SEQ ID NO: 595619 - DNA, 19 bp, Mus musculus
  siRNA target sequence for Dpysl4 (NM_011993.2,92-110).
gcgaccgccttctcatcaa

SEQ ID NO: 595620 - DNA, 19 bp, Mus musculus
  siRNA target sequence for Dpysl4 (NM_011993.2,93-111).
cgaccgccttctcatcaaa

SEQ ID NO: 595621 - DNA, 19 bp, Mus musculus
  siRNA target sequence for Dpysl4 (NM_011993.2,129-147).
cgatgaccagtcctttcat

SEQ ID NO: 595622 - DNA, 19 bp, Mus musculus
  siRNA target sequence for Dpysl4 (NM_011993.2,160-178).
gtggaagacggtctgatta

SEQ ID NO: 595623 - DNA, 19 bp, Mus musculus
  siRNA target sequence for Dpysl4 (NM_011993.2,162-180).
ggaagacggtctgattaaa

SEQ ID NO: 595624 - DNA, 19 bp, Mus musculus
  siRNA target sequence for Dpysl4 (NM_011993.2,166-184).
gacggtctgattaaacaaa

SEQ ID NO: 595625 - DNA, 19 bp, Mus musculus
  siRNA target sequence for Dpysl4 (NM_011993.2,168-186).
cggtctgattaaacaaatt

SEQ ID NO: 595626 - DNA, 19 bp, Mus musculus
  siRNA target sequence for Dpysl4 (NM_011993.2,201-219).
cgtccctgggggcatcaaa

SEQ ID NO: 595627 - DNA, 19 bp, Mus musculus
  siRNA target sequence for Dpysl4 (NM_011993.2,202-220).
gtccctgggggcatcaaaa

SEQ ID NO: 595628 - DNA, 19 bp, Mus musculus
  siRNA target sequence for Dpysl4 (NM_011993.2,206-224).
ctgggggcatcaaaaccat

SEQ ID NO: 595629 - DNA, 19 bp, Mus musculus
  siRNA target sequence for Dpysl4 (NM_011993.2,346-364).
ggcgggaccaccatgatat

SEQ ID NO: 595630 - DNA, 19 bp, Mus musculus
  siRNA target sequence for Dpysl4 (NM_011993.2,347-365).
gcgggaccaccatgatatt

SEQ ID NO: 595631 - DNA, 19 bp, Mus musculus
  siRNA target sequence for Dpysl4 (NM_011993.2,447-465).
ctgtgactactccttacat

SEQ ID NO: 595632 - DNA, 19 bp, Mus musculus
  siRNA target sequence for Dpysl4 (NM_011993.2,576-594).
gtgtactgacggtcagata

SEQ ID NO: 595633 - DNA, 19 bp, Mus musculus
  siRNA target sequence for Dpysl4 (NM_011993.2,578-596).
gtactgacggtcagatata

SEQ ID NO: 595634 - DNA, 19 bp, Mus musculus
  siRNA target sequence for Dpysl4 (NM_011993.2,581-599).
ctgacggtcagatatatga

SEQ ID NO: 595635 - DNA, 19 bp, Mus musculus
  siRNA target sequence for Dpysl4 (NM_011993.2,583-601).
gacggtcagatatatgaaa

SEQ ID NO: 595636 - DNA, 19 bp, Mus musculus
  siRNA target sequence for Dpysl4 (NM_011993.2,635-653).
cccaggtgcacgcagaaaa

SEQ ID NO: 595637 - DNA, 19 bp, Mus musculus
  siRNA target sequence for Dpysl4 (NM_011993.2,972-990).
caacccggaccctactact

SEQ ID NO: 595638 - DNA, 19 bp, Mus musculus
  siRNA target sequence for Dpysl4 (NM_011993.2,1213-1231).
gctgccaaaatcttcaatt

SEQ ID NO: 595639 - DNA, 19 bp, Mus musculus
  siRNA target sequence for Dpysl4 (NM_011993.2,1313-1331).
ctgccaagagccataacct

SEQ ID NO: 595640 - DNA, 19 bp, Mus musculus
  siRNA target sequence for Dpysl4 (NM_011993.2,1320-1338).
gagccataacctgaatgta

SEQ ID NO: 595641 - DNA, 19 bp, Mus musculus
  siRNA target sequence for Dpysl4 (NM_011993.2,1322-1340).
gccataacctgaatgtaga

SEQ ID NO: 595642 - DNA, 19 bp, Mus musculus
  siRNA target sequence for Dpysl4 (NM_011993.2,1377-1395).
gcccacggtggtcataagt

SEQ ID NO: 595643 - DNA, 19 bp, Mus musculus
  siRNA target sequence for Dpysl4 (NM_011993.2,1469-1487).
cgttcccggactttgtcta

SEQ ID NO: 595644 - DNA, 19 bp, Mus musculus
  siRNA target sequence for Dpysl4 (NM_011993.2,1556-1574).
ctgtgcatgaagtgatgtt

SEQ ID NO: 595645 - DNA, 19 bp, Mus musculus
  siRNA target sequence for Dpysl4 (NM_011993.2,1706-1724).
gacgtacggctcagaagat

SEQ ID NO: 595646 - DNA, 19 bp, Mus musculus
  siRNA target sequence for Dpysl4 (NM_011993.2,1708-1726).
cgtacggctcagaagatca

SEQ ID NO: 595647 - DNA, 19 bp, Mus musculus
  siRNA target sequence for Dutp (NM_023595.3,394-412).
ctgccggctacgacctatt

SEQ ID NO: 595648 - DNA, 19 bp, Mus musculus
  siRNA target sequence for Dutp (NM_023595.3,396-414).
gccggctacgacctattca

SEQ ID NO: 595649 - DNA, 19 bp, Mus musculus
  siRNA target sequence for Dutp (NM_023595.3,398-416).
cggctacgacctattcagt

SEQ ID NO: 595650 - DNA, 19 bp, Mus musculus
  siRNA target sequence for Dutp (NM_023595.3,408-426).
ctattcagtgcctatgatt

SEQ ID NO: 595651 - DNA, 19 bp, Mus musculus
  siRNA target sequence for Dutp (NM_023595.3,413-431).
cagtgcctatgattataca

SEQ ID NO: 595652 - DNA, 19 bp, Mus musculus
  siRNA target sequence for Dutp (NM_023595.3,419-437).
ctatgattatacaatatca

SEQ ID NO: 595653 - DNA, 19 bp, Mus musculus
  siRNA target sequence for Dutp (NM_023595.3,517-535).
ctggcttggctgtaaagca

SEQ ID NO: 595654 - DNA, 19 bp, Mus musculus
  siRNA target sequence for Dutp (NM_023595.3,556-574).
gtgtcatagacgaggatta

SEQ ID NO: 595655 - DNA, 19 bp, Mus musculus
  siRNA target sequence for Dutp (NM_023595.3,558-576).
gtcatagacgaggattaca

SEQ ID NO: 595656 - DNA, 19 bp, Mus musculus
  siRNA target sequence for Dutp (NM_023595.3,560-578).
catagacgaggattacaga

SEQ ID NO: 595657 - DNA, 19 bp, Mus musculus
  siRNA target sequence for Dutp (NM_023595.3,620-638).
gtttgaagtgaaaaaaggt

SEQ ID NO: 595658 - DNA, 19 bp, Mus musculus
  siRNA target sequence for Dutp (NM_023595.3,659-677).
ctgtgagcggatttcttat

SEQ ID NO: 595659 - DNA, 19 bp, Mus musculus
  siRNA target sequence for Enpp5 (NM_032003.1,365-383).
ctaccctaaccattacact

SEQ ID NO: 595660 - DNA, 19 bp, Mus musculus
  siRNA target sequence for Enpp5 (NM_032003.1,968-986).
gccaaaagaaggtaaattt

SEQ ID NO: 595661 - DNA, 19 bp, Mus musculus
  siRNA target sequence for Enpp5 (NM_032003.1,1007-1025).
ggccggtgcccatcctaat

SEQ ID NO: 595662 - DNA, 19 bp, Mus musculus
  siRNA target sequence for Enpp5 (NM_032003.1,1009-1027).
ccggtgcccatcctaatct

SEQ ID NO: 595663 - DNA, 19 bp, Mus musculus
  siRNA target sequence for Enpp5 (NM_032003.1,1010-1028).
cggtgcccatcctaatcta

SEQ ID NO: 595664 - DNA, 19 bp, Mus musculus
  siRNA target sequence for Enpp5 (NM_032003.1,1011-1029).
ggtgcccatcctaatctaa

SEQ ID NO: 595665 - DNA, 19 bp, Mus musculus
  siRNA target sequence for Enpp5 (NM_032003.1,1020-1038).
cctaatctaacggtctata

SEQ ID NO: 595666 - DNA, 19 bp, Mus musculus
  siRNA target sequence for Enpp5 (NM_032003.1,1021-1039).
ctaatctaacggtctataa

SEQ ID NO: 595667 - DNA, 19 bp, Mus musculus
  siRNA target sequence for Enpp5 (NM_032003.1,1043-1061).
ggaggagataccagaaaga

SEQ ID NO: 595668 - DNA, 19 bp, Mus musculus
  siRNA target sequence for Enpp5 (NM_032003.1,1063-1081).
ggcattacaagcacaatga

SEQ ID NO: 595669 - DNA, 19 bp, Mus musculus
  siRNA target sequence for Enpp5 (NM_032003.1,1082-1100).
cagagttcaaccaatcgta

SEQ ID NO: 595670 - DNA, 19 bp, Mus musculus
  siRNA target sequence for Enpp5 (NM_032003.1,1107-1125).
gccgatgaagggtggtata

SEQ ID NO: 595671 - DNA, 19 bp, Mus musculus
  siRNA target sequence for Enpp5 (NM_032003.1,1108-1126).
ccgatgaagggtggtatat

SEQ ID NO: 595672 - DNA, 19 bp, Mus musculus
  siRNA target sequence for Enpp5 (NM_032003.1,1109-1127).
cgatgaagggtggtatatt

SEQ ID NO: 595673 - DNA, 19 bp, Mus musculus
  siRNA target sequence for Enpp5 (NM_032003.1,1110-1128).
gatgaagggtggtatattt

SEQ ID NO: 595674 - DNA, 19 bp, Mus musculus
  siRNA target sequence for Enpp5 (NM_032003.1,1120-1138).
ggtatattttgcagaataa

SEQ ID NO: 595675 - DNA, 19 bp, Mus musculus
  siRNA target sequence for Enpp5 (NM_032003.1,1154-1172).
gttaggcaaccatggttat

SEQ ID NO: 595676 - DNA, 19 bp, Mus musculus
  siRNA target sequence for Enpp5 (NM_032003.1,1160-1178).
caaccatggttatgataat

SEQ ID NO: 595677 - DNA, 19 bp, Mus musculus
  siRNA target sequence for Enpp5 (NM_032003.1,1163-1181).
ccatggttatgataatgca

SEQ ID NO: 595678 - DNA, 19 bp, Mus musculus
  siRNA target sequence for Enpp5 (NM_032003.1,1164-1182).
catggttatgataatgcat

SEQ ID NO: 595679 - DNA, 19 bp, Mus musculus
  siRNA target sequence for Enpp5 (NM_032003.1,1302-1320).
gccctgccacacaatggat

SEQ ID NO: 595680 - DNA, 19 bp, Mus musculus
  siRNA target sequence for Enpp5 (NM_032003.1,1361-1379).
caagccaattccttacaca

SEQ ID NO: 595681 - DNA, 19 bp, Mus musculus
  siRNA target sequence for Enpp5 (NM_032003.1,1431-1449).
gaggaatcgtacccttatt

SEQ ID NO: 595682 - DNA, 19 bp, Mus musculus
  siRNA target sequence for Enpp5 (NM_032003.1,1464-1482).
cttggcagcatcatagcta

SEQ ID NO: 595683 - DNA, 19 bp, Mus musculus
  siRNA target sequence for Enpp5 (NM_032003.1,1469-1487).
cagcatcatagctatggta

SEQ ID NO: 595684 - DNA, 19 bp, Mus musculus
  siRNA target sequence for Enpp5 (NM_032003.1,1480-1498).
ctatggtattctttgtagt

SEQ ID NO: 595685 - DNA, 19 bp, Mus musculus
  siRNA target sequence for Enpp5 (NM_032003.1,1518-1536).
cgcagtcaagtgcatactt

SEQ ID NO: 595686 - DNA, 19 bp, Mus musculus
  siRNA target sequence for Enpp5 (NM_032003.1,1524-1542).
caagtgcatactttacaat

SEQ ID NO: 595687 - DNA, 19 bp, Mus musculus
  siRNA target sequence for Enpp5 (NM_032003.1,1527-1545).
gtgcatactttacaatata

SEQ ID NO: 595688 - DNA, 19 bp, Mus musculus
  siRNA target sequence for Enpp6 (NM_177304.2,145-163).
gttttcgctcagactacat

SEQ ID NO: 595689 - DNA, 19 bp, Mus musculus
  siRNA target sequence for Enpp6 (NM_177304.2,214-232).
gaggcgtcaaagtggatta

SEQ ID NO: 595690 - DNA, 19 bp, Mus musculus
  siRNA target sequence for Enpp6 (NM_177304.2,216-234).
ggcgtcaaagtggattact

SEQ ID NO: 595691 - DNA, 19 bp, Mus musculus
  siRNA target sequence for Enpp6 (NM_177304.2,217-235).
gcgtcaaagtggattactt

SEQ ID NO: 595692 - DNA, 19 bp, Mus musculus
  siRNA target sequence for Enpp6 (NM_177304.2,253-271).
gcctctcctatcccaatta

SEQ ID NO: 595693 - DNA, 19 bp, Mus musculus
  siRNA target sequence for Enpp6 (NM_177304.2,298-316).
gtgaggtccaccagatgat

SEQ ID NO: 595694 - DNA, 19 bp, Mus musculus
  siRNA target sequence for Enpp6 (NM_177304.2,338-356).
cagaaccaacaagtcattt

SEQ ID NO: 595695 - DNA, 19 bp, Mus musculus
  siRNA target sequence for Enpp6 (NM_177304.2,340-358).
gaaccaacaagtcatttga

SEQ ID NO: 595696 - DNA, 19 bp, Mus musculus
  siRNA target sequence for Enpp6 (NM_177304.2,343-361).
ccaacaagtcatttgacat

SEQ ID NO: 595697 - DNA, 19 bp, Mus musculus
  siRNA target sequence for Enpp6 (NM_177304.2,439-457).
ggaggaaagtctacatgta

SEQ ID NO: 595698 - DNA, 19 bp, Mus musculus
  siRNA target sequence for Enpp6 (NM_177304.2,442-460).
ggaaagtctacatgtatta

SEQ ID NO: 595699 - DNA, 19 bp, Mus musculus
  siRNA target sequence for Enpp6 (NM_177304.2,489-507).
ggtgtcagaccaacttact

SEQ ID NO: 595700 - DNA, 19 bp, Mus musculus
  siRNA target sequence for Enpp6 (NM_177304.2,498-516).
ccaacttactgcctagaat

SEQ ID NO: 595701 - DNA, 19 bp, Mus musculus
  siRNA target sequence for Enpp6 (NM_177304.2,499-517).
caacttactgcctagaata

SEQ ID NO: 595702 - DNA, 19 bp, Mus musculus
  siRNA target sequence for Enpp6 (NM_177304.2,502-520).
cttactgcctagaatataa

SEQ ID NO: 595703 - DNA, 19 bp, Mus musculus
  siRNA target sequence for Enpp6 (NM_177304.2,559-577).
gcgatgctctcgactcatt

SEQ ID NO: 595704 - DNA, 19 bp, Mus musculus
  siRNA target sequence for Enpp6 (NM_177304.2,560-578).
cgatgctctcgactcatta

SEQ ID NO: 595705 - DNA, 19 bp, Mus musculus
  siRNA target sequence for Enpp6 (NM_177304.2,561-579).
gatgctctcgactcattaa

SEQ ID NO: 595706 - DNA, 19 bp, Mus musculus
  siRNA target sequence for Enpp6 (NM_177304.2,592-610).
cggatctagcagccatata

SEQ ID NO: 595707 - DNA, 19 bp, Mus musculus
  siRNA target sequence for Enpp6 (NM_177304.2,638-656).
ccactacggcccttcatca

SEQ ID NO: 595708 - DNA, 19 bp, Mus musculus
  siRNA target sequence for Enpp6 (NM_177304.2,687-705).
gacactgtcctgaagtata

SEQ ID NO: 595709 - DNA, 19 bp, Mus musculus
  siRNA target sequence for Enpp6 (NM_177304.2,782-800).
catcttctggatggataaa

SEQ ID NO: 595710 - DNA, 19 bp, Mus musculus
  siRNA target sequence for Enpp6 (NM_177304.2,833-851).
cgacctgcagcaagtgaaa

SEQ ID NO: 595711 - DNA, 19 bp, Mus musculus
  siRNA target sequence for Enpp6 (NM_177304.2,930-948).
cacatgaccgtgtatgaga

SEQ ID NO: 595712 - DNA, 19 bp, Mus musculus
  siRNA target sequence for Enpp6 (NM_177304.2,932-950).
catgaccgtgtatgagaaa

SEQ ID NO: 595713 - DNA, 19 bp, Mus musculus
  siRNA target sequence for Enpp6 (NM_177304.2,938-956).
cgtgtatgagaaagaatca

SEQ ID NO: 595714 - DNA, 19 bp, Mus musculus
  siRNA target sequence for Enpp6 (NM_177304.2,960-978).
cccaacaggttctattaca

SEQ ID NO: 595715 - DNA, 19 bp, Mus musculus
  siRNA target sequence for Enpp6 (NM_177304.2,961-979).
ccaacaggttctattacaa

SEQ ID NO: 595716 - DNA, 19 bp, Mus musculus
  siRNA target sequence for Enpp6 (NM_177304.2,1198-1216).
gatccgtggatgtctacaa

SEQ ID NO: 595717 - DNA, 19 bp, Mus musculus
  siRNA target sequence for Enpp6 (NM_177304.2,1330-1348).
gctgtgcactggtcttgat

SEQ ID NO: 595718 - DNA, 19 bp, Mus musculus
  siRNA target sequence for Enpp6 (NM_177304.2,1331-1349).
ctgtgcactggtcttgatt

SEQ ID NO: 595719 - DNA, 19 bp, Mus musculus
  siRNA target sequence for Enpp6 (NM_177304.2,1341-1359).
gtcttgattctcctcttat

SEQ ID NO: 595720 - DNA, 19 bp, Mus musculus
  siRNA target sequence for Entpd6 (NM_172117.1,239-257).
gcgtgggcctgttcatcta

SEQ ID NO: 595721 - DNA, 19 bp, Mus musculus
  siRNA target sequence for Entpd6 (NM_172117.1,240-258).
cgtgggcctgttcatctat

SEQ ID NO: 595722 - DNA, 19 bp, Mus musculus
  siRNA target sequence for Entpd6 (NM_172117.1,388-406).
gtcttctatgggatcatgt

SEQ ID NO: 595723 - DNA, 19 bp, Mus musculus
  siRNA target sequence for Entpd6 (NM_172117.1,472-490).
cccaccttgacccatgaaa

SEQ ID NO: 595724 - DNA, 19 bp, Mus musculus
  siRNA target sequence for Entpd6 (NM_172117.1,518-536).
ctgcttacgctgatgatgt

SEQ ID NO: 595725 - DNA, 19 bp, Mus musculus
  siRNA target sequence for Entpd6 (NM_172117.1,578-596).
ctaagcaacacattcctta

SEQ ID NO: 595726 - DNA, 19 bp, Mus musculus
  siRNA target sequence for Entpd6 (NM_172117.1,582-600).
gcaacacattccttatgat

SEQ ID NO: 595727 - DNA, 19 bp, Mus musculus
  siRNA target sequence for Entpd6 (NM_172117.1,721-739).
gtcggggatgactgtgttt

SEQ ID NO: 595728 - DNA, 19 bp, Mus musculus
  siRNA target sequence for Entpd6 (NM_172117.1,730-748).
gactgtgtttccatcatga

SEQ ID NO: 595729 - DNA, 19 bp, Mus musculus
  siRNA target sequence for Eya1 (NM_010164.1,226-244).
ctcgatagctctcatataa

SEQ ID NO: 595730 - DNA, 19 bp, Mus musculus
  siRNA target sequence for Eya1 (NM_010164.1,228-246).
cgatagctctcatataaat

SEQ ID NO: 595731 - DNA, 19 bp, Mus musculus
  siRNA target sequence for Eya1 (NM_010164.1,229-247).
gatagctctcatataaata

SEQ ID NO: 595732 - DNA, 19 bp, Mus musculus
  siRNA target sequence for Eya1 (NM_010164.1,234-252).
ctctcatataaatagtact

SEQ ID NO: 595733 - DNA, 19 bp, Mus musculus
  siRNA target sequence for Eya1 (NM_010164.1,262-280).
cccaatggcaccgaagtta

SEQ ID NO: 595734 - DNA, 19 bp, Mus musculus
  siRNA target sequence for Eya1 (NM_010164.1,263-281).
ccaatggcaccgaagttaa

SEQ ID NO: 595735 - DNA, 19 bp, Mus musculus
  siRNA target sequence for Eya1 (NM_010164.1,264-282).
caatggcaccgaagttaaa

SEQ ID NO: 595736 - DNA, 19 bp, Mus musculus
  siRNA target sequence for Eya1 (NM_010164.1,269-287).
gcaccgaagttaaaacaga

SEQ ID NO: 595737 - DNA, 19 bp, Mus musculus
  siRNA target sequence for Eya1 (NM_010164.1,290-308).
caatgagcagcagtgaaat

SEQ ID NO: 595738 - DNA, 19 bp, Mus musculus
  siRNA target sequence for Eya1 (NM_010164.1,320-338).
cagcagacgggtctttaga

SEQ ID NO: 595739 - DNA, 19 bp, Mus musculus
  siRNA target sequence for Eya1 (NM_010164.1,322-340).
gcagacgggtctttagaca

SEQ ID NO: 595740 - DNA, 19 bp, Mus musculus
  siRNA target sequence for Eya1 (NM_010164.1,358-376).
ctcggaagcagcagcttta

SEQ ID NO: 595741 - DNA, 19 bp, Mus musculus
  siRNA target sequence for Eya1 (NM_010164.1,409-427).
cagatttatccttccaaat

SEQ ID NO: 595742 - DNA, 19 bp, Mus musculus
  siRNA target sequence for Eya1 (NM_010164.1,538-556).
cctggacagccctatggaa

SEQ ID NO: 595743 - DNA, 19 bp, Mus musculus
  siRNA target sequence for Eya1 (NM_010164.1,625-643).
ggacagacgggatttctta

SEQ ID NO: 595744 - DNA, 19 bp, Mus musculus
  siRNA target sequence for Eya1 (NM_010164.1,630-648).
gacgggatttcttagctat

SEQ ID NO: 595745 - DNA, 19 bp, Mus musculus
  siRNA target sequence for Eya1 (NM_010164.1,703-721).
caaggtagcagctttacca

SEQ ID NO: 595746 - DNA, 19 bp, Mus musculus
  siRNA target sequence for Eya1 (NM_010164.1,719-737).
ccacgtcatcaggattata

SEQ ID NO: 595747 - DNA, 19 bp, Mus musculus
  siRNA target sequence for Eya1 (NM_010164.1,720-738).
cacgtcatcaggattatat

SEQ ID NO: 595748 - DNA, 19 bp, Mus musculus
  siRNA target sequence for Eya1 (NM_010164.1,758-776).
ccaactcctccggattcaa

SEQ ID NO: 595749 - DNA, 19 bp, Mus musculus
  siRNA target sequence for Eya1 (NM_010164.1,786-804).
gcaggactatccgtcttat

SEQ ID NO: 595750 - DNA, 19 bp, Mus musculus
  siRNA target sequence for Eya1 (NM_010164.1,819-837).
gggtcagtacgcacagtat

SEQ ID NO: 595751 - DNA, 19 bp, Mus musculus
  siRNA target sequence for Eya1 (NM_010164.1,820-838).
ggtcagtacgcacagtatt

SEQ ID NO: 595752 - DNA, 19 bp, Mus musculus
  siRNA target sequence for Eya1 (NM_010164.1,821-839).
gtcagtacgcacagtatta

SEQ ID NO: 595753 - DNA, 19 bp, Mus musculus
  siRNA target sequence for Eya1 (NM_010164.1,851-869).
cgtatccagcacactacat

SEQ ID NO: 595754 - DNA, 19 bp, Mus musculus
  siRNA target sequence for Eya1 (NM_010164.1,967-985).
cccacagcagagtacagta

SEQ ID NO: 595755 - DNA, 19 bp, Mus musculus
  siRNA target sequence for Eya1 (NM_010164.1,1137-1155).
ggacgagaccatcattgtt

SEQ ID NO: 595756 - DNA, 19 bp, Mus musculus
  siRNA target sequence for Eya1 (NM_010164.1,1174-1192).
gggtcctacgccaacagat

SEQ ID NO: 595757 - DNA, 19 bp, Mus musculus
  siRNA target sequence for Eya1 (NM_010164.1,1175-1193).
ggtcctacgccaacagata

SEQ ID NO: 595758 - DNA, 19 bp, Mus musculus
  siRNA target sequence for Eya1 (NM_010164.1,1254-1272).
cttggcagacacacatcta

SEQ ID NO: 595759 - DNA, 19 bp, Mus musculus
  siRNA target sequence for Eya1 (NM_010164.1,1384-1402).
gcagccaccagtgctaatt

SEQ ID NO: 595760 - DNA, 19 bp, Mus musculus
  siRNA target sequence for Eya1 (NM_010164.1,1385-1403).
cagccaccagtgctaattt

SEQ ID NO: 595761 - DNA, 19 bp, Mus musculus
  siRNA target sequence for Eya1 (NM_010164.1,1387-1405).
gccaccagtgctaatttat

SEQ ID NO: 595762 - DNA, 19 bp, Mus musculus
  siRNA target sequence for Eya1 (NM_010164.1,1458-1476).
ccgctacagacgagtaaaa

SEQ ID NO: 595763 - DNA, 19 bp, Mus musculus
  siRNA target sequence for Eya1 (NM_010164.1,1466-1484).
gacgagtaaaagagatcta

SEQ ID NO: 595764 - DNA, 19 bp, Mus musculus
  siRNA target sequence for Eya1 (NM_010164.1,1468-1486).
cgagtaaaagagatctaca

SEQ ID NO: 595765 - DNA, 19 bp, Mus musculus
  siRNA target sequence for Eya1 (NM_010164.1,1471-1489).
gtaaaagagatctacaaca

SEQ ID NO: 595766 - DNA, 19 bp, Mus musculus
  siRNA target sequence for Eya1 (NM_010164.1,1623-1641).
ccggacgaactgtgtgaat

SEQ ID NO: 595767 - DNA, 19 bp, Mus musculus
  siRNA target sequence for Eya1 (NM_010164.1,1624-1642).
cggacgaactgtgtgaata

SEQ ID NO: 595768 - DNA, 19 bp, Mus musculus
  siRNA target sequence for Eya1 (NM_010164.1,1625-1643).
ggacgaactgtgtgaatat

SEQ ID NO: 595769 - DNA, 19 bp, Mus musculus
  siRNA target sequence for Eya1 (NM_010164.1,1626-1644).
gacgaactgtgtgaatatt

SEQ ID NO: 595770 - DNA, 19 bp, Mus musculus
  siRNA target sequence for Eya1 (NM_010164.1,1628-1646).
cgaactgtgtgaatatttt

SEQ ID NO: 595771 - DNA, 19 bp, Mus musculus
  siRNA target sequence for Eya1 (NM_010164.1,1731-1749).
cagtgcaactaaaatagga

SEQ ID NO: 595772 - DNA, 19 bp, Mus musculus
  siRNA target sequence for Eya1 (NM_010164.1,1757-1775).
gctgttttgagaggataat

SEQ ID NO: 595773 - DNA, 19 bp, Mus musculus
  siRNA target sequence for Eya1 (NM_010164.1,1760-1778).
gttttgagaggataatcca

SEQ ID NO: 595774 - DNA, 19 bp, Mus musculus
  siRNA target sequence for Eya1 (NM_010164.1,1838-1856).
gggcaaaaaagcatgctat

SEQ ID NO: 595775 - DNA, 19 bp, Mus musculus
  siRNA target sequence for Eya1 (NM_010164.1,1899-1917).
gcatcatgccttggaatta

SEQ ID NO: 595776 - DNA, 19 bp, Mus musculus
  siRNA target sequence for Eya2 (NM_010165.1,335-353).
ggaaggcatcgccaaatca

SEQ ID NO: 595777 - DNA, 19 bp, Mus musculus
  siRNA target sequence for Eya2 (NM_010165.1,467-485).
gcaggcaccaccctataca

SEQ ID NO: 595778 - DNA, 19 bp, Mus musculus
  siRNA target sequence for Eya2 (NM_010165.1,538-556).
cagaagacagtttgaatca

SEQ ID NO: 595779 - DNA, 19 bp, Mus musculus
  siRNA target sequence for Eya2 (NM_010165.1,540-558).
gaagacagtttgaatcact

SEQ ID NO: 595780 - DNA, 19 bp, Mus musculus
  siRNA target sequence for Eya2 (NM_010165.1,646-664).
gcaccgctgggctctatca

SEQ ID NO: 595781 - DNA, 19 bp, Mus musculus
  siRNA target sequence for Eya2 (NM_010165.1,680-698).
gaccaacaccgctggattt

SEQ ID NO: 595782 - DNA, 19 bp, Mus musculus
  siRNA target sequence for Eya2 (NM_010165.1,700-718).
ggagcgtgcaccaggatta

SEQ ID NO: 595783 - DNA, 19 bp, Mus musculus
  siRNA target sequence for Eya2 (NM_010165.1,701-719).
gagcgtgcaccaggattat

SEQ ID NO: 595784 - DNA, 19 bp, Mus musculus
  siRNA target sequence for Eya2 (NM_010165.1,983-1001).
ccggtcaaagagaaatagt

SEQ ID NO: 595785 - DNA, 19 bp, Mus musculus
  siRNA target sequence for Eya2 (NM_010165.1,985-1003).
ggtcaaagagaaatagtga

SEQ ID NO: 595786 - DNA, 19 bp, Mus musculus
  siRNA target sequence for Eya2 (NM_010165.1,1015-1033).
caggagacaatgaaatcga

SEQ ID NO: 595787 - DNA, 19 bp, Mus musculus
  siRNA target sequence for Eya2 (NM_010165.1,1086-1104).
ctcacagggacgtttgcat

SEQ ID NO: 595788 - DNA, 19 bp, Mus musculus
  siRNA target sequence for Eya2 (NM_010165.1,1183-1201).
cacacctgttcttcaatga

SEQ ID NO: 595789 - DNA, 19 bp, Mus musculus
  siRNA target sequence for Eya2 (NM_010165.1,1257-1275).
caggatttaagcacataca

SEQ ID NO: 595790 - DNA, 19 bp, Mus musculus
  siRNA target sequence for Eya2 (NM_010165.1,1384-1402).
gtcgtgtgaaggagatgta

SEQ ID NO: 595791 - DNA, 19 bp, Mus musculus
  siRNA target sequence for Eya2 (NM_010165.1,1386-1404).
cgtgtgaaggagatgtaca

SEQ ID NO: 595792 - DNA, 19 bp, Mus musculus
  siRNA target sequence for Eya2 (NM_010165.1,1543-1561).
gacccaactgtgtcaatgt

SEQ ID NO: 595793 - DNA, 19 bp, Mus musculus
  siRNA target sequence for Eya2 (NM_010165.1,1546-1564).
ccaactgtgtcaatgtgtt

SEQ ID NO: 595794 - DNA, 19 bp, Mus musculus
  siRNA target sequence for Eya2 (NM_010165.1,1705-1723).
gccgcaaagctgtctacat

SEQ ID NO: 595795 - DNA, 19 bp, Mus musculus
  siRNA target sequence for Eya2 (NM_010165.1,1706-1724).
ccgcaaagctgtctacatt

SEQ ID NO: 595796 - DNA, 19 bp, Mus musculus
  siRNA target sequence for Eya2 (NM_010165.1,1708-1726).
gcaaagctgtctacattgt

SEQ ID NO: 595797 - DNA, 19 bp, Mus musculus
  siRNA target sequence for Eya3 (NM_010166.1,238-256).
ccaagagaacagactttaa

SEQ ID NO: 595798 - DNA, 19 bp, Mus musculus
  siRNA target sequence for Eya3 (NM_010166.1,247-265).
cagactttaagtcaagtaa

SEQ ID NO: 595799 - DNA, 19 bp, Mus musculus
  siRNA target sequence for Eya3 (NM_010166.1,251-269).
ctttaagtcaagtaaacaa

SEQ ID NO: 595800 - DNA, 19 bp, Mus musculus
  siRNA target sequence for Eya3 (NM_010166.1,357-375).
catccctcgctcatccaat

SEQ ID NO: 595801 - DNA, 19 bp, Mus musculus
  siRNA target sequence for Eya3 (NM_010166.1,360-378).
ccctcgctcatccaatgat

SEQ ID NO: 595802 - DNA, 19 bp, Mus musculus
  siRNA target sequence for Eya3 (NM_010166.1,361-379).
cctcgctcatccaatgatt

SEQ ID NO: 595803 - DNA, 19 bp, Mus musculus
  siRNA target sequence for Eya3 (NM_010166.1,362-380).
ctcgctcatccaatgatta

SEQ ID NO: 595804 - DNA, 19 bp, Mus musculus
  siRNA target sequence for Eya3 (NM_010166.1,393-411).
gtattctgcaaaaccttat

SEQ ID NO: 595805 - DNA, 19 bp, Mus musculus
  siRNA target sequence for Eya3 (NM_010166.1,614-632).
gcatctcaaaccaggatta

SEQ ID NO: 595806 - DNA, 19 bp, Mus musculus
  siRNA target sequence for Eya3 (NM_010166.1,625-643).
caggattatcccacctata

SEQ ID NO: 595807 - DNA, 19 bp, Mus musculus
  siRNA target sequence for Eya3 (NM_010166.1,627-645).
ggattatcccacctatact

SEQ ID NO: 595808 - DNA, 19 bp, Mus musculus
  siRNA target sequence for Eya3 (NM_010166.1,695-713).
gagtcacaggtcagactaa

SEQ ID NO: 595809 - DNA, 19 bp, Mus musculus
  siRNA target sequence for Eya3 (NM_010166.1,699-717).
cacaggtcagactaacagt

SEQ ID NO: 595810 - DNA, 19 bp, Mus musculus
  siRNA target sequence for Eya3 (NM_010166.1,734-752).
cattagcagctacaacata

SEQ ID NO: 595811 - DNA, 19 bp, Mus musculus
  siRNA target sequence for Eya3 (NM_010166.1,834-852).
gtcccagactacaccaaat

SEQ ID NO: 595812 - DNA, 19 bp, Mus musculus
  siRNA target sequence for Eya3 (NM_010166.1,836-854).
cccagactacaccaaataa

SEQ ID NO: 595813 - DNA, 19 bp, Mus musculus
  siRNA target sequence for Eya3 (NM_010166.1,930-948).
ccaggacagtgaattggaa

SEQ ID NO: 595814 - DNA, 19 bp, Mus musculus
  siRNA target sequence for Eya3 (NM_010166.1,972-990).
cgaaaccatcatcatcttt

SEQ ID NO: 595815 - DNA, 19 bp, Mus musculus
  siRNA target sequence for Eya3 (NM_010166.1,1007-1025).
gatcctatgctcagaagta

SEQ ID NO: 595816 - DNA, 19 bp, Mus musculus
  siRNA target sequence for Eya3 (NM_010166.1,1286-1304).
cctttcgctaccgaaaagt

SEQ ID NO: 595817 - DNA, 19 bp, Mus musculus
  siRNA target sequence for Eya3 (NM_010166.1,1297-1315).
cgaaaagtgagggaaatct

SEQ ID NO: 595818 - DNA, 19 bp, Mus musculus
  siRNA target sequence for Eya3 (NM_010166.1,1309-1327).
gaaatctacgacaagcata

SEQ ID NO: 595819 - DNA, 19 bp, Mus musculus
  siRNA target sequence for Eya3 (NM_010166.1,1317-1335).
cgacaagcataaaagcaat

SEQ ID NO: 595820 - DNA, 19 bp, Mus musculus
  siRNA target sequence for Eya3 (NM_010166.1,1531-1549).
ctaggagagatatttccta

SEQ ID NO: 595821 - DNA, 19 bp, Mus musculus
  siRNA target sequence for Eya3 (NM_010166.1,1587-1605).
gagctgctttgagagaatt

SEQ ID NO: 595822 - DNA, 19 bp, Mus musculus
  siRNA target sequence for Eya3 (NM_010166.1,1589-1607).
gctgctttgagagaattgt

SEQ ID NO: 595823 - DNA, 19 bp, Mus musculus
  siRNA target sequence for Eya3 (NM_010166.1,1590-1608).
ctgctttgagagaattgtt

SEQ ID NO: 595824 - DNA, 19 bp, Mus musculus
  siRNA target sequence for Eya4 (NM_010167.1,337-355).
cctaaatgagcaatctgta

SEQ ID NO: 595825 - DNA, 19 bp, Mus musculus
  siRNA target sequence for Eya4 (NM_010167.1,465-483).
ggagctccaagctggataa

SEQ ID NO: 595826 - DNA, 19 bp, Mus musculus
  siRNA target sequence for Eya4 (NM_010167.1,499-517).
cacttcagtcacaacaaat

SEQ ID NO: 595827 - DNA, 19 bp, Mus musculus
  siRNA target sequence for Eya4 (NM_010167.1,529-547).
gtctcttcttgcagtcaaa

SEQ ID NO: 595828 - DNA, 19 bp, Mus musculus
  siRNA target sequence for Eya4 (NM_010167.1,593-611).
ggagcgcttgacactttta

SEQ ID NO: 595829 - DNA, 19 bp, Mus musculus
  siRNA target sequence for Eya4 (NM_010167.1,606-624).
cttttactgggtcagtaat

SEQ ID NO: 595830 - DNA, 19 bp, Mus musculus
  siRNA target sequence for Eya4 (NM_010167.1,944-962).
ggccagacgccttactctt

SEQ ID NO: 595831 - DNA, 19 bp, Mus musculus
  siRNA target sequence for Eya4 (NM_010167.1,945-963).
gccagacgccttactctta

SEQ ID NO: 595832 - DNA, 19 bp, Mus musculus
  siRNA target sequence for Eya4 (NM_010167.1,949-967).
gacgccttactcttaccaa

SEQ ID NO: 595833 - DNA, 19 bp, Mus musculus
  siRNA target sequence for Eya4 (NM_010167.1,951-969).
cgccttactcttaccaaat

SEQ ID NO: 595834 - DNA, 19 bp, Mus musculus
  siRNA target sequence for Eya4 (NM_010167.1,987-1005).
caccatcgtctactattta

SEQ ID NO: 595835 - DNA, 19 bp, Mus musculus
  siRNA target sequence for Eya4 (NM_010167.1,993-1011).
cgtctactatttatgcaaa

SEQ ID NO: 595836 - DNA, 19 bp, Mus musculus
  siRNA target sequence for Eya4 (NM_010167.1,1008-1026).
caaataattccgtttctaa

SEQ ID NO: 595837 - DNA, 19 bp, Mus musculus
  siRNA target sequence for Eya4 (NM_010167.1,1041-1059).
gcagctcacagcaggatta

SEQ ID NO: 595838 - DNA, 19 bp, Mus musculus
  siRNA target sequence for Eya4 (NM_010167.1,1073-1091).
gcctttggccaaaaccaat

SEQ ID NO: 595839 - DNA, 19 bp, Mus musculus
  siRNA target sequence for Eya4 (NM_010167.1,1074-1092).
cctttggccaaaaccaata

SEQ ID NO: 595840 - DNA, 19 bp, Mus musculus
  siRNA target sequence for Eya4 (NM_010167.1,1075-1093).
ctttggccaaaaccaatat

SEQ ID NO: 595841 - DNA, 19 bp, Mus musculus
  siRNA target sequence for Eya4 (NM_010167.1,1113-1131).
caacctatggggcatacat

SEQ ID NO: 595842 - DNA, 19 bp, Mus musculus
  siRNA target sequence for Eya4 (NM_010167.1,1161-1179).
catcgtcaacatcaactta

SEQ ID NO: 595843 - DNA, 19 bp, Mus musculus
  siRNA target sequence for Eya4 (NM_010167.1,1242-1260).
gtccctccacaccaatcaa

SEQ ID NO: 595844 - DNA, 19 bp, Mus musculus
  siRNA target sequence for Eya4 (NM_010167.1,1248-1266).
ccacaccaatcaaagatct

SEQ ID NO: 595845 - DNA, 19 bp, Mus musculus
  siRNA target sequence for Eya4 (NM_010167.1,1262-1280).
gatctcgatgacagaacat

SEQ ID NO: 595846 - DNA, 19 bp, Mus musculus
  siRNA target sequence for Eya4 (NM_010167.1,1265-1283).
ctcgatgacagaacatgta

SEQ ID NO: 595847 - DNA, 19 bp, Mus musculus
  siRNA target sequence for Eya4 (NM_010167.1,1268-1286).
gatgacagaacatgtagaa

SEQ ID NO: 595848 - DNA, 19 bp, Mus musculus
  siRNA target sequence for Eya4 (NM_010167.1,1311-1329).
gaggccggaaaaataatct

SEQ ID NO: 595849 - DNA, 19 bp, Mus musculus
  siRNA target sequence for Eya4 (NM_010167.1,1313-1331).
ggccggaaaaataatctct

SEQ ID NO: 595850 - DNA, 19 bp, Mus musculus
  siRNA target sequence for Eya4 (NM_010167.1,1408-1426).
cctcacgggctcttatgca

SEQ ID NO: 595851 - DNA, 19 bp, Mus musculus
  siRNA target sequence for Eya4 (NM_010167.1,1417-1435).
ctcttatgcacagaagtat

SEQ ID NO: 595852 - DNA, 19 bp, Mus musculus
  siRNA target sequence for Eya4 (NM_010167.1,1489-1507).
ctttaatcttgcagataca

SEQ ID NO: 595853 - DNA, 19 bp, Mus musculus
  siRNA target sequence for Eya4 (NM_010167.1,1583-1601).
gacttaagtacctacagtt

SEQ ID NO: 595854 - DNA, 19 bp, Mus musculus
  siRNA target sequence for Eya4 (NM_010167.1,1632-1650).
gtagtgcgaacctttgttt

SEQ ID NO: 595855 - DNA, 19 bp, Mus musculus
  siRNA target sequence for Eya4 (NM_010167.1,1684-1702).
gaggaagctggcttttcgt

SEQ ID NO: 595856 - DNA, 19 bp, Mus musculus
  siRNA target sequence for Eya4 (NM_010167.1,1686-1704).
ggaagctggcttttcgtta

SEQ ID NO: 595857 - DNA, 19 bp, Mus musculus
  siRNA target sequence for Eya4 (NM_010167.1,1775-1793).
gatgcatggctgcagttaa

SEQ ID NO: 595858 - DNA, 19 bp, Mus musculus
  siRNA target sequence for Eya4 (NM_010167.1,1801-1819).
gatcgaaggcctaacagat

SEQ ID NO: 595859 - DNA, 19 bp, Mus musculus
  siRNA target sequence for Eya4 (NM_010167.1,1815-1833).
cagattcctggctaacgaa

SEQ ID NO: 595860 - DNA, 19 bp, Mus musculus
  siRNA target sequence for Eya4 (NM_010167.1,1824-1842).
ggctaacgaatgcacttaa

SEQ ID NO: 595861 - DNA, 19 bp, Mus musculus
  siRNA target sequence for Eya4 (NM_010167.1,1826-1844).
ctaacgaatgcacttaagt

SEQ ID NO: 595862 - DNA, 19 bp, Mus musculus
  siRNA target sequence for Eya4 (NM_010167.1,1998-2016).
gctgttttgagcgtatagt

SEQ ID NO: 595863 - DNA, 19 bp, Mus musculus
  siRNA target sequence for Eya4 (NM_010167.1,2008-2026).
gcgtatagtgtccagattt

SEQ ID NO: 595864 - DNA, 19 bp, Mus musculus
  siRNA target sequence for Eya4 (NM_010167.1,2019-2037).
ccagatttggcactaacat

SEQ ID NO: 595865 - DNA, 19 bp, Mus musculus
  siRNA target sequence for Eya4 (NM_010167.1,2020-2038).
cagatttggcactaacata

SEQ ID NO: 595866 - DNA, 19 bp, Mus musculus
  siRNA target sequence for Eya4 (NM_010167.1,2028-2046).
gcactaacataacttatgt

SEQ ID NO: 595867 - DNA, 19 bp, Mus musculus
  siRNA target sequence for Eya4 (NM_010167.1,2029-2047).
cactaacataacttatgtt

SEQ ID NO: 595868 - DNA, 19 bp, Mus musculus
  siRNA target sequence for Eya4 (NM_010167.1,2079-2097).
ctgctaaccagcacaacat

SEQ ID NO: 595869 - DNA, 19 bp, Mus musculus
  siRNA target sequence for Eya4 (NM_010167.1,2098-2116).
gcccttttggaggatatca

SEQ ID NO: 595870 - DNA, 19 bp, Mus musculus
  siRNA target sequence for Eya4 (NM_010167.1,2128-2146).
cctcttggctctacatcaa

SEQ ID NO: 595871 - DNA, 19 bp, Mus musculus
  siRNA target sequence for Fhit (NM_010210.1,724-742).
gactcgccagccttttgga

SEQ ID NO: 595872 - DNA, 19 bp, Mus musculus
  siRNA target sequence for Hint (NM_008248.1,102-120).
cgatcttcggcaagatcat

SEQ ID NO: 595873 - DNA, 19 bp, Mus musculus
  siRNA target sequence for Hint (NM_008248.1,157-175).
cgaccggtgtcttgctttt

SEQ ID NO: 595874 - DNA, 19 bp, Mus musculus
  siRNA target sequence for Hint (NM_008248.1,160-178).
ccggtgtcttgcttttcat

SEQ ID NO: 595875 - DNA, 19 bp, Mus musculus
  siRNA target sequence for Hint (NM_008248.1,214-232).
gatacccaagaagcatata

SEQ ID NO: 595876 - DNA, 19 bp, Mus musculus
  siRNA target sequence for Hint (NM_008248.1,226-244).
gcatatatcccagatttct

SEQ ID NO: 595877 - DNA, 19 bp, Mus musculus
  siRNA target sequence for Hint (NM_008248.1,286-304).
gattgttggcaagaaatgt

SEQ ID NO: 595878 - DNA, 19 bp, Mus musculus
  siRNA target sequence for Hint (NM_008248.1,361-379).
cgggggacagtctgtctat

SEQ ID NO: 595879 - DNA, 19 bp, Mus musculus
  siRNA target sequence for Hint (NM_008248.1,363-381).
ggggacagtctgtctatca

SEQ ID NO: 595880 - DNA, 19 bp, Mus musculus
  siRNA target sequence for Hint (NM_008248.1,401-419).
gggggtcggcagatgaact

SEQ ID NO: 595881 - DNA, 19 bp, Mus musculus
  siRNA target sequence for Lipe (NM_010719.2,33-51).
gacactcgcagaagacaat

SEQ ID NO: 595882 - DNA, 19 bp, Mus musculus
  siRNA target sequence for Lipe (NM_010719.2,35-53).
cactcgcagaagacaatat

SEQ ID NO: 595883 - DNA, 19 bp, Mus musculus
  siRNA target sequence for Lipe (NM_010719.2,46-64).
gacaatatggccttcttct

SEQ ID NO: 595884 - DNA, 19 bp, Mus musculus
  siRNA target sequence for Lipe (NM_010719.2,146-164).
caaccctaggccaactgtt

SEQ ID NO: 595885 - DNA, 19 bp, Mus musculus
  siRNA target sequence for Lipe (NM_010719.2,206-224).
ccaacggataccgtagttt

SEQ ID NO: 595886 - DNA, 19 bp, Mus musculus
  siRNA target sequence for Lipe (NM_010719.2,250-268).
gcacacctactacacaaat

SEQ ID NO: 595887 - DNA, 19 bp, Mus musculus
  siRNA target sequence for Lipe (NM_010719.2,269-287).
cccgctatgtggcttctaa

SEQ ID NO: 595888 - DNA, 19 bp, Mus musculus
  siRNA target sequence for Lipe (NM_010719.2,279-297).
ggcttctaaccgcaaaagt

SEQ ID NO: 595889 - DNA, 19 bp, Mus musculus
  siRNA target sequence for Lipe (NM_010719.2,280-298).
gcttctaaccgcaaaagta

SEQ ID NO: 595890 - DNA, 19 bp, Mus musculus
  siRNA target sequence for Lipe (NM_010719.2,281-299).
cttctaaccgcaaaagtat

SEQ ID NO: 595891 - DNA, 19 bp, Mus musculus
  siRNA target sequence for Lipe (NM_010719.2,363-381).
ccgtgctatggcctactat

SEQ ID NO: 595892 - DNA, 19 bp, Mus musculus
  siRNA target sequence for Lipe (NM_010719.2,420-438).
cttcttcgagggtgatgaa

SEQ ID NO: 595893 - DNA, 19 bp, Mus musculus
  siRNA target sequence for Lipe (NM_010719.2,465-483).
gtatgtcacgctacacaaa

SEQ ID NO: 595894 - DNA, 19 bp, Mus musculus
  siRNA target sequence for Lipe (NM_010719.2,809-827).
cacctgaggcctttgagat

SEQ ID NO: 595895 - DNA, 19 bp, Mus musculus
  siRNA target sequence for Lipe (NM_010719.2,1084-1102).
gagccctacctcaagaact

SEQ ID NO: 595896 - DNA, 19 bp, Mus musculus
  siRNA target sequence for Lipe (NM_010719.2,1114-1132).
ctaggagtccctatcttct

SEQ ID NO: 595897 - DNA, 19 bp, Mus musculus
  siRNA target sequence for Lipe (NM_010719.2,1172-1190).
gagcgctggaggagtgttt

SEQ ID NO: 595898 - DNA, 19 bp, Mus musculus
  siRNA target sequence for Lipe (NM_010719.2,1174-1192).
gcgctggaggagtgttttt

SEQ ID NO: 595899 - DNA, 19 bp, Mus musculus
  siRNA target sequence for Lipe (NM_010719.2,1175-1193).
cgctggaggagtgtttttt

SEQ ID NO: 595900 - DNA, 19 bp, Mus musculus
  siRNA target sequence for Lipe (NM_010719.2,1176-1194).
gctggaggagtgttttttt

SEQ ID NO: 595901 - DNA, 19 bp, Mus musculus
  siRNA target sequence for Lipe (NM_010719.2,1421-1439).
cactgagcgtactctctaa

SEQ ID NO: 595902 - DNA, 19 bp, Mus musculus
  siRNA target sequence for Lipe (NM_010719.2,1423-1441).
ctgagcgtactctctaagt

SEQ ID NO: 595903 - DNA, 19 bp, Mus musculus
  siRNA target sequence for Lipe (NM_010719.2,1425-1443).
gagcgtactctctaagtgt

SEQ ID NO: 595904 - DNA, 19 bp, Mus musculus
  siRNA target sequence for Lipe (NM_010719.2,1468-1486).
gcagaggaccattttgact

SEQ ID NO: 595905 - DNA, 19 bp, Mus musculus
  siRNA target sequence for Lipe (NM_010719.2,1711-1729).
ggcacagataccttgaaga

SEQ ID NO: 595906 - DNA, 19 bp, Mus musculus
  siRNA target sequence for Lipe (NM_010719.2,1993-2011).
gtcaagaaccccttcatgt

SEQ ID NO: 595907 - DNA, 19 bp, Mus musculus
  siRNA target sequence for MGC18894 (NM_144930.1,42-60).
ctagcaacctgtgtgattt

SEQ ID NO: 595908 - DNA, 19 bp, Mus musculus
  siRNA target sequence for MGC18894 (NM_144930.1,122-140).
cgtgaacgtagaaggattt

SEQ ID NO: 595909 - DNA, 19 bp, Mus musculus
  siRNA target sequence for MGC18894 (NM_144930.1,123-141).
gtgaacgtagaaggatttt

SEQ ID NO: 595910 - DNA, 19 bp, Mus musculus
  siRNA target sequence for MGC18894 (NM_144930.1,289-307).
gaggacaggcggtcaatga

SEQ ID NO: 595911 - DNA, 19 bp, Mus musculus
  siRNA target sequence for MGC18894 (NM_144930.1,297-315).
gcggtcaatgacctcataa

SEQ ID NO: 595912 - DNA, 19 bp, Mus musculus
  siRNA target sequence for MGC18894 (NM_144930.1,302-320).
caatgacctcataaccaat

SEQ ID NO: 595913 - DNA, 19 bp, Mus musculus
  siRNA target sequence for MGC18894 (NM_144930.1,377-395).
cactcctgcggacttttca

SEQ ID NO: 595914 - DNA, 19 bp, Mus musculus
  siRNA target sequence for MGC18894 (NM_144930.1,384-402).
gcggacttttcaaagaaca

SEQ ID NO: 595915 - DNA, 19 bp, Mus musculus
  siRNA target sequence for MGC18894 (NM_144930.1,476-494).
ggctctctctgcatacgaa

SEQ ID NO: 595916 - DNA, 19 bp, Mus musculus
  siRNA target sequence for MGC18894 (NM_144930.1,477-495).
gctctctctgcatacgaaa

SEQ ID NO: 595917 - DNA, 19 bp, Mus musculus
  siRNA target sequence for MGC18894 (NM_144930.1,478-496).
ctctctctgcatacgaaaa

SEQ ID NO: 595918 - DNA, 19 bp, Mus musculus
  siRNA target sequence for MGC18894 (NM_144930.1,516-534).
caatatcgcctgagtatct

SEQ ID NO: 595919 - DNA, 19 bp, Mus musculus
  siRNA target sequence for MGC18894 (NM_144930.1,679-697).
gaggttacagtgtctcaat

SEQ ID NO: 595920 - DNA, 19 bp, Mus musculus
  siRNA target sequence for MGC18894 (NM_144930.1,682-700).
gttacagtgtctcaattct

SEQ ID NO: 595921 - DNA, 19 bp, Mus musculus
  siRNA target sequence for MGC18894 (NM_144930.1,686-704).
cagtgtctcaattcttata

SEQ ID NO: 595922 - DNA, 19 bp, Mus musculus
  siRNA target sequence for MGC18894 (NM_144930.1,688-706).
gtgtctcaattcttatatt

SEQ ID NO: 595923 - DNA, 19 bp, Mus musculus
  siRNA target sequence for MGC18894 (NM_144930.1,793-811).
ggccaattactgagcaaat

SEQ ID NO: 595924 - DNA, 19 bp, Mus musculus
  siRNA target sequence for MGC18894 (NM_144930.1,841-859).
cgtctgccgtcattgttca

SEQ ID NO: 595925 - DNA, 19 bp, Mus musculus
  siRNA target sequence for MGC18894 (NM_144930.1,902-920).
gcataaattgaatctgtat

SEQ ID NO: 595926 - DNA, 19 bp, Mus musculus
  siRNA target sequence for MGC18894 (NM_144930.1,903-921).
cataaattgaatctgtata

SEQ ID NO: 595927 - DNA, 19 bp, Mus musculus
  siRNA target sequence for MGC18894 (NM_144930.1,917-935).
gtataaactgagtttacaa

SEQ ID NO: 595928 - DNA, 19 bp, Mus musculus
  siRNA target sequence for MGC18894 (NM_144930.1,1031-1049).
caacactgtgccttacatt

SEQ ID NO: 595929 - DNA, 19 bp, Mus musculus
  siRNA target sequence for MGC18894 (NM_144930.1,1104-1122).
ctaccagctgatgtaaaat

SEQ ID NO: 595930 - DNA, 19 bp, Mus musculus
  siRNA target sequence for MGC18894 (NM_144930.1,1171-1189).
ctggcataccagaggatat

SEQ ID NO: 595931 - DNA, 19 bp, Mus musculus
  siRNA target sequence for MGC18894 (NM_144930.1,1173-1191).
ggcataccagaggatatta

SEQ ID NO: 595932 - DNA, 19 bp, Mus musculus
  siRNA target sequence for MGC18894 (NM_144930.1,1175-1193).
cataccagaggatattatt

SEQ ID NO: 595933 - DNA, 19 bp, Mus musculus
  siRNA target sequence for MGC18894 (NM_144930.1,1200-1218).
gctgttgagaagtacacaa

SEQ ID NO: 595934 - DNA, 19 bp, Mus musculus
  siRNA target sequence for MGC18894 (NM_144930.1,1201-1219).
ctgttgagaagtacacaaa

SEQ ID NO: 595935 - DNA, 19 bp, Mus musculus
  siRNA target sequence for MGC18894 (NM_144930.1,1268-1286).
gggggatgtggcatttggt

SEQ ID NO: 595936 - DNA, 19 bp, Mus musculus
  siRNA target sequence for MGC18894 (NM_144930.1,1428-1446).
gtcttcggtgctccaattt

SEQ ID NO: 595937 - DNA, 19 bp, Mus musculus
  siRNA target sequence for MGC18894 (NM_144930.1,1430-1448).
cttcggtgctccaatttta

SEQ ID NO: 595938 - DNA, 19 bp, Mus musculus
  siRNA target sequence for MGC18894 (NM_144930.1,1555-1573).
ggccaaagtatgatcagaa

SEQ ID NO: 595939 - DNA, 19 bp, Mus musculus
  siRNA target sequence for MGC18894 (NM_144930.1,1672-1690).
cccagccataccacaatga

SEQ ID NO: 595940 - DNA, 19 bp, Mus musculus
  siRNA target sequence for Mppe1 (NM_172630.1,1218-1236).
caacagcgttgcaatggaa

SEQ ID NO: 595941 - DNA, 19 bp, Mus musculus
  siRNA target sequence for Mppe1 (NM_172630.1,1278-1296).
cagagagatctctcgtaaa

SEQ ID NO: 595942 - DNA, 19 bp, Mus musculus
  siRNA target sequence for Mppe1 (NM_172630.1,1280-1298).
gagagatctctcgtaaact

SEQ ID NO: 595943 - DNA, 19 bp, Mus musculus
  siRNA target sequence for Mppe1 (NM_172630.1,1282-1300).
gagatctctcgtaaactga

SEQ ID NO: 595944 - DNA, 19 bp, Mus musculus
  siRNA target sequence for Mppe1 (NM_172630.1,1284-1302).
gatctctcgtaaactgaat

SEQ ID NO: 595945 - DNA, 19 bp, Mus musculus
  siRNA target sequence for Mppe1 (NM_172630.1,1408-1426).
gccagcgatgctaactgtt

SEQ ID NO: 595946 - DNA, 19 bp, Mus musculus
  siRNA target sequence for Mppe1 (NM_172630.1,1462-1480).
gtcccctttgaggagaaat

SEQ ID NO: 595947 - DNA, 19 bp, Mus musculus
  siRNA target sequence for Mppe1 (NM_172630.1,1493-1511).
ctcgggaggcctcacaaaa

SEQ ID NO: 595948 - DNA, 19 bp, Mus musculus
  siRNA target sequence for Mppe1 (NM_172630.1,1602-1620).
gagcgtcccatctttcagt

SEQ ID NO: 595949 - DNA, 19 bp, Mus musculus
  siRNA target sequence for Mppe1 (NM_172630.1,1619-1637).
gttggaggaaccgaaacaa

SEQ ID NO: 595950 - DNA, 19 bp, Mus musculus
  siRNA target sequence for Mppe1 (NM_172630.1,1630-1648).
cgaaacaacccaagtttca

SEQ ID NO: 595951 - DNA, 19 bp, Mus musculus
  siRNA target sequence for Mppe1 (NM_172630.1,1658-1676).
gcctgacatccagagatta

SEQ ID NO: 595952 - DNA, 19 bp, Mus musculus
  siRNA target sequence for Mtmr2 (NM_023858.1,1265-1283).
gcgggaccccccatttgtt

SEQ ID NO: 595953 - DNA, 19 bp, Mus musculus
  siRNA target sequence for Mtmr2 (NM_023858.1,2523-2541).
gtgtcactgtggtcctata

SEQ ID NO: 595954 - DNA, 19 bp, Mus musculus
  siRNA target sequence for Mtmr2 (NM_023858.1,2527-2545).
cactgtggtcctatataaa

SEQ ID NO: 595955 - DNA, 19 bp, Mus musculus
  siRNA target sequence for Mtmr2 (NM_023858.1,2633-2651).
gctctgggtgggatattat

SEQ ID NO: 595956 - DNA, 19 bp, Mus musculus
  siRNA target sequence for Mtmr2 (NM_023858.1,2640-2658).
gtgggatattatataaggt

SEQ ID NO: 595957 - DNA, 19 bp, Mus musculus
  siRNA target sequence for Nudt3 (NM_019837.1,389-407).
ccatccagaccgatggatt

SEQ ID NO: 595958 - DNA, 19 bp, Mus musculus
  siRNA target sequence for Nudt3 (NM_019837.1,499-517).
gaagactagttggaatttt

SEQ ID NO: 595959 - DNA, 19 bp, Mus musculus
  siRNA target sequence for Nudt3 (NM_019837.1,504-522).
ctagttggaatttttgaga

SEQ ID NO: 595960 - DNA, 19 bp, Mus musculus
  siRNA target sequence for Nudt3 (NM_019837.1,666-684).
cccgtgcaggcgtcatact

SEQ ID NO: 595961 - DNA, 19 bp, Mus musculus
  siRNA target sequence for Nudt3 (NM_019837.1,667-685).
ccgtgcaggcgtcatactt

SEQ ID NO: 595962 - DNA, 19 bp, Mus musculus
  siRNA target sequence for Nudt3 (NM_019837.1,668-686).
cgtgcaggcgtcatacttt

SEQ ID NO: 595963 - DNA, 19 bp, Mus musculus
  siRNA target sequence for Nudt3 (NM_019837.1,672-690).
caggcgtcatactttgaga

SEQ ID NO: 595964 - DNA, 19 bp, Mus musculus
  siRNA target sequence for Ovgp1 (NM_007696.2,162-180).
ctttgtacgcatctgatat

SEQ ID NO: 595965 - DNA, 19 bp, Mus musculus
  siRNA target sequence for Ovgp1 (NM_007696.2,190-208).
cctcaatgagcaacaatca

SEQ ID NO: 595966 - DNA, 19 bp, Mus musculus
  siRNA target sequence for Ovgp1 (NM_007696.2,193-211).
caatgagcaacaatcagat

SEQ ID NO: 595967 - DNA, 19 bp, Mus musculus
  siRNA target sequence for Ovgp1 (NM_007696.2,245-263).
ctatccagagttcaacaaa

SEQ ID NO: 595968 - DNA, 19 bp, Mus musculus
  siRNA target sequence for Ovgp1 (NM_007696.2,354-372).
cttgccaaccgggaaaagt

SEQ ID NO: 595969 - DNA, 19 bp, Mus musculus
  siRNA target sequence for Ovgp1 (NM_007696.2,357-375).
gccaaccgggaaaagttta

SEQ ID NO: 595970 - DNA, 19 bp, Mus musculus
  siRNA target sequence for Ovgp1 (NM_007696.2,358-376).
ccaaccgggaaaagtttat

SEQ ID NO: 595971 - DNA, 19 bp, Mus musculus
  siRNA target sequence for Ovgp1 (NM_007696.2,363-381).
cgggaaaagtttattgact

SEQ ID NO: 595972 - DNA, 19 bp, Mus musculus
  siRNA target sequence for Ovgp1 (NM_007696.2,371-389).
gtttattgactcagtcata

SEQ ID NO: 595973 - DNA, 19 bp, Mus musculus
  siRNA target sequence for Ovgp1 (NM_007696.2,462-480).
ccacacgaccggtggaatt

SEQ ID NO: 595974 - DNA, 19 bp, Mus musculus
  siRNA target sequence for Ovgp1 (NM_007696.2,463-481).
cacacgaccggtggaattt

SEQ ID NO: 595975 - DNA, 19 bp, Mus musculus
  siRNA target sequence for Ovgp1 (NM_007696.2,468-486).
gaccggtggaattttctct

SEQ ID NO: 595976 - DNA, 19 bp, Mus musculus
  siRNA target sequence for Ovgp1 (NM_007696.2,587-605).
catccatacgtcttatgat

SEQ ID NO: 595977 - DNA, 19 bp, Mus musculus
  siRNA target sequence for Ovgp1 (NM_007696.2,598-616).
cttatgatgcgctcctttt

SEQ ID NO: 595978 - DNA, 19 bp, Mus musculus
  siRNA target sequence for Ovgp1 (NM_007696.2,603-621).
gatgcgctccttttaggaa

SEQ ID NO: 595979 - DNA, 19 bp, Mus musculus
  siRNA target sequence for Ovgp1 (NM_007696.2,622-640).
ggcgtttggatttcattaa

SEQ ID NO: 595980 - DNA, 19 bp, Mus musculus
  siRNA target sequence for Ovgp1 (NM_007696.2,660-678).
catggaagttgggaaaagt

SEQ ID NO: 595981 - DNA, 19 bp, Mus musculus
  siRNA target sequence for Ovgp1 (NM_007696.2,708-726).
cttcccgaagactccaaat

SEQ ID NO: 595982 - DNA, 19 bp, Mus musculus
  siRNA target sequence for Ovgp1 (NM_007696.2,719-737).
ctccaaatcttcagcatat

SEQ ID NO: 595983 - DNA, 19 bp, Mus musculus
  siRNA target sequence for Ovgp1 (NM_007696.2,727-745).
cttcagcatatgctatgaa

SEQ ID NO: 595984 - DNA, 19 bp, Mus musculus
  siRNA target sequence for Ovgp1 (NM_007696.2,769-787).
ccgcagataaacttattat

SEQ ID NO: 595985 - DNA, 19 bp, Mus musculus
  siRNA target sequence for Ovgp1 (NM_007696.2,796-814).
ccacctatggacgtaactt

SEQ ID NO: 595986 - DNA, 19 bp, Mus musculus
  siRNA target sequence for Ovgp1 (NM_007696.2,797-815).
cacctatggacgtaacttt

SEQ ID NO: 595987 - DNA, 19 bp, Mus musculus
  siRNA target sequence for Ovgp1 (NM_007696.2,799-817).
cctatggacgtaactttta

SEQ ID NO: 595988 - DNA, 19 bp, Mus musculus
  siRNA target sequence for Ovgp1 (NM_007696.2,819-837).
ctcctcaaagaatctaaga

SEQ ID NO: 595989 - DNA, 19 bp, Mus musculus
  siRNA target sequence for Ovgp1 (NM_007696.2,950-968).
ctggattgattatcaatat

SEQ ID NO: 595990 - DNA, 19 bp, Mus musculus
  siRNA target sequence for Ovgp1 (NM_007696.2,952-970).
ggattgattatcaatatgt

SEQ ID NO: 595991 - DNA, 19 bp, Mus musculus
  siRNA target sequence for Ovgp1 (NM_007696.2,1002-1020).
ggctatgatgacactatca

SEQ ID NO: 595992 - DNA, 19 bp, Mus musculus
  siRNA target sequence for Ovgp1 (NM_007696.2,1004-1022).
ctatgatgacactatcagt

SEQ ID NO: 595993 - DNA, 19 bp, Mus musculus
  siRNA target sequence for Ovgp1 (NM_007696.2,1011-1029).
gacactatcagtttcagtt

SEQ ID NO: 595994 - DNA, 19 bp, Mus musculus
  siRNA target sequence for Ovgp1 (NM_007696.2,1025-1043).
cagttacaaggcaatgtat

SEQ ID NO: 595995 - DNA, 19 bp, Mus musculus
  siRNA target sequence for Ovgp1 (NM_007696.2,1027-1045).
gttacaaggcaatgtatgt

SEQ ID NO: 595996 - DNA, 19 bp, Mus musculus
  siRNA target sequence for Ovgp1 (NM_007696.2,1163-1181).
gcagacagaatccaattca

SEQ ID NO: 595997 - DNA, 19 bp, Mus musculus
  siRNA target sequence for Ovgp1 (NM_007696.2,1202-1220).
gtttacatcttctgtgaat

SEQ ID NO: 595998 - DNA, 19 bp, Mus musculus
  siRNA target sequence for Ovgp1 (NM_007696.2,1257-1275).
gaggtattgaccactgata

SEQ ID NO: 595999 - DNA, 19 bp, Mus musculus
  siRNA target sequence for Ovgp1 (NM_007696.2,1316-1334).
cgaggtccacagaaggtat

SEQ ID NO: 596000 - DNA, 19 bp, Mus musculus
  siRNA target sequence for Ovgp1 (NM_007696.2,1343-1361).
gactacagttcctagtgat

SEQ ID NO: 596001 - DNA, 19 bp, Mus musculus
  siRNA target sequence for Ovgp1 (NM_007696.2,1353-1371).
cctagtgatggatctgtaa

SEQ ID NO: 596002 - DNA, 19 bp, Mus musculus
  siRNA target sequence for Ovgp1 (NM_007696.2,1405-1423).
ctgtaactccagaaaataa

SEQ ID NO: 596003 - DNA, 19 bp, Mus musculus
  siRNA target sequence for Ovgp1 (NM_007696.2,1407-1425).
gtaactccagaaaataaca

SEQ ID NO: 596004 - DNA, 19 bp, Mus musculus
  siRNA target sequence for Ovgp1 (NM_007696.2,1451-1469).
gagcacactggacttcttt

SEQ ID NO: 596005 - DNA, 19 bp, Mus musculus
  siRNA target sequence for Ovgp1 (NM_007696.2,1561-1579).
ctactgctggaatttctaa

SEQ ID NO: 596006 - DNA, 19 bp, Mus musculus
  siRNA target sequence for Ovgp1 (NM_007696.2,1876-1894).
ctacccctgggatttctaa

SEQ ID NO: 596007 - DNA, 19 bp, Mus musculus
  siRNA target sequence for Ovgp1 (NM_007696.2,1901-1919).
ccctgggatgacagtaata

SEQ ID NO: 596008 - DNA, 19 bp, Mus musculus
  siRNA target sequence for Ovgp1 (NM_007696.2,1951-1969).
cagccacaatggatcatca

SEQ ID NO: 596009 - DNA, 19 bp, Mus musculus
  siRNA target sequence for Ovgp1 (NM_007696.2,1986-2004).
gagatggatacgactcttt

SEQ ID NO: 596010 - DNA, 19 bp, Mus musculus
  siRNA target sequence for Ovgp1 (NM_007696.2,1991-2009).
ggatacgactcttttctat

SEQ ID NO: 596011 - DNA, 19 bp, Mus musculus
  siRNA target sequence for Ovgp1 (NM_007696.2,1996-2014).
cgactcttttctatctaaa

SEQ ID NO: 596012 - DNA, 19 bp, Mus musculus
  siRNA target sequence for Ovgp1 (NM_007696.2,2064-2082).
cttgaaaaggccactgttt

SEQ ID NO: 596013 - DNA, 19 bp, Mus musculus
  siRNA target sequence for Ovgp1 (NM_007696.2,2096-2114).
gtcagctacccctaatgga

SEQ ID NO: 596014 - DNA, 19 bp, Mus musculus
  siRNA target sequence for Ovgp1 (NM_007696.2,2104-2122).
cccctaatggacagagtaa

SEQ ID NO: 596015 - DNA, 19 bp, Mus musculus
  siRNA target sequence for Ovgp1 (NM_007696.2,2105-2123).
ccctaatggacagagtaaa

SEQ ID NO: 596016 - DNA, 19 bp, Mus musculus
  siRNA target sequence for Ovgp1 (NM_007696.2,2106-2124).
cctaatggacagagtaaaa

SEQ ID NO: 596017 - DNA, 19 bp, Mus musculus
  siRNA target sequence for Ovgp1 (NM_007696.2,2112-2130).
ggacagagtaaaactctaa

SEQ ID NO: 596018 - DNA, 19 bp, Mus musculus
  siRNA target sequence for Ovgp1 (NM_007696.2,2113-2131).
gacagagtaaaactctaaa

SEQ ID NO: 596019 - DNA, 19 bp, Mus musculus
  siRNA target sequence for Ovgp1 (NM_007696.2,2127-2145).
ctaaaatgggcaagtttga

SEQ ID NO: 596020 - DNA, 19 bp, Mus musculus
  siRNA target sequence for Parg (NM_011960.1,228-246).
caacgccacctcgtttgtt

SEQ ID NO: 596021 - DNA, 19 bp, Mus musculus
  siRNA target sequence for Parg (NM_011960.1,236-254).
cctcgtttgttttcaaaca

SEQ ID NO: 596022 - DNA, 19 bp, Mus musculus
  siRNA target sequence for Parg (NM_011960.1,375-393).
cccacataaggtggaaaaa

SEQ ID NO: 596023 - DNA, 19 bp, Mus musculus
  siRNA target sequence for Parg (NM_011960.1,376-394).
ccacataaggtggaaaaat

SEQ ID NO: 596024 - DNA, 19 bp, Mus musculus
  siRNA target sequence for Parg (NM_011960.1,406-424).
cctcagctaaatcttgata

SEQ ID NO: 596025 - DNA, 19 bp, Mus musculus
  siRNA target sequence for Parg (NM_011960.1,411-429).
gctaaatcttgataaatca

SEQ ID NO: 596026 - DNA, 19 bp, Mus musculus
  siRNA target sequence for Parg (NM_011960.1,550-568).
ctaccaaagcagcttagta

SEQ ID NO: 596027 - DNA, 19 bp, Mus musculus
  siRNA target sequence for Parg (NM_011960.1,561-579).
gcttagtaatgctaacatt

SEQ ID NO: 596028 - DNA, 19 bp, Mus musculus
  siRNA target sequence for Parg (NM_011960.1,634-652).
gacaatcagcagtttctta

SEQ ID NO: 596029 - DNA, 19 bp, Mus musculus
  siRNA target sequence for Parg (NM_011960.1,636-654).
caatcagcagtttcttaca

SEQ ID NO: 596030 - DNA, 19 bp, Mus musculus
  siRNA target sequence for Parg (NM_011960.1,653-671).
cacctataaaacttgcaaa

SEQ ID NO: 596031 - DNA, 19 bp, Mus musculus
  siRNA target sequence for Parg (NM_011960.1,700-718).
gccagaagcaactgtaagt

SEQ ID NO: 596032 - DNA, 19 bp, Mus musculus
  siRNA target sequence for Parg (NM_011960.1,730-748).
cgccagtctgtgaaagact

SEQ ID NO: 596033 - DNA, 19 bp, Mus musculus
  siRNA target sequence for Parg (NM_011960.1,808-826).
ggtgccgaggacattggaa

SEQ ID NO: 596034 - DNA, 19 bp, Mus musculus
  siRNA target sequence for Parg (NM_011960.1,827-845).
ctggaccaaaaaatgacaa

SEQ ID NO: 596035 - DNA, 19 bp, Mus musculus
  siRNA target sequence for Parg (NM_011960.1,875-893).
gtgattcgcctccatttga

SEQ ID NO: 596036 - DNA, 19 bp, Mus musculus
  siRNA target sequence for Parg (NM_011960.1,877-895).
gattcgcctccatttgaga

SEQ ID NO: 596037 - DNA, 19 bp, Mus musculus
  siRNA target sequence for Parg (NM_011960.1,974-992).
caagtccagtctttgatga

SEQ ID NO: 596038 - DNA, 19 bp, Mus musculus
  siRNA target sequence for Parg (NM_011960.1,1007-1025).
cctcccaaacagcaaataa

SEQ ID NO: 596039 - DNA, 19 bp, Mus musculus
  siRNA target sequence for Parg (NM_011960.1,1048-1066).
gaagctgatggcgatctta

SEQ ID NO: 596040 - DNA, 19 bp, Mus musculus
  siRNA target sequence for Parg (NM_011960.1,1052-1070).
ctgatggcgatcttaggaa

SEQ ID NO: 596041 - DNA, 19 bp, Mus musculus
  siRNA target sequence for Parg (NM_011960.1,1063-1081).
cttaggaaacggtatttga

SEQ ID NO: 596042 - DNA, 19 bp, Mus musculus
  siRNA target sequence for Parg (NM_011960.1,1067-1085).
ggaaacggtatttgactaa

SEQ ID NO: 596043 - DNA, 19 bp, Mus musculus
  siRNA target sequence for Parg (NM_011960.1,1091-1109).
gtgaagttagattgcattt

SEQ ID NO: 596044 - DNA, 19 bp, Mus musculus
  siRNA target sequence for Parg (NM_011960.1,1096-1114).
gttagattgcatttccaat

SEQ ID NO: 596045 - DNA, 19 bp, Mus musculus
  siRNA target sequence for Parg (NM_011960.1,1361-1379).
ggctgggaactcctattga

SEQ ID NO: 596046 - DNA, 19 bp, Mus musculus
  siRNA target sequence for Parg (NM_011960.1,1407-1425).
gatccatttgccttcctta

SEQ ID NO: 596047 - DNA, 19 bp, Mus musculus
  siRNA target sequence for Parg (NM_011960.1,1410-1428).
ccatttgccttccttaaga

SEQ ID NO: 596048 - DNA, 19 bp, Mus musculus
  siRNA target sequence for Parg (NM_011960.1,1478-1496).
gagaggttccgaaaccttt

SEQ ID NO: 596049 - DNA, 19 bp, Mus musculus
  siRNA target sequence for Parg (NM_011960.1,1488-1506).
gaaaccttttccaacacat

SEQ ID NO: 596050 - DNA, 19 bp, Mus musculus
  siRNA target sequence for Parg (NM_011960.1,1492-1510).
ccttttccaacacattaca

SEQ ID NO: 596051 - DNA, 19 bp, Mus musculus
  siRNA target sequence for Parg (NM_011960.1,1498-1516).
ccaacacattacaaagatt

SEQ ID NO: 596052 - DNA, 19 bp, Mus musculus
  siRNA target sequence for Parg (NM_011960.1,1543-1561).
ccttgttcggaacaaaact

SEQ ID NO: 596053 - DNA, 19 bp, Mus musculus
  siRNA target sequence for Parg (NM_011960.1,1544-1562).
cttgttcggaacaaaactt

SEQ ID NO: 596054 - DNA, 19 bp, Mus musculus
  siRNA target sequence for Parg (NM_011960.1,1604-1622).
gtaggtgggagctcattca

SEQ ID NO: 596055 - DNA, 19 bp, Mus musculus
  siRNA target sequence for Parg (NM_011960.1,1666-1684).
gatgcgattctgaaataca

SEQ ID NO: 596056 - DNA, 19 bp, Mus musculus
  siRNA target sequence for Parg (NM_011960.1,1670-1688).
cgattctgaaatacaatgt

SEQ ID NO: 596057 - DNA, 19 bp, Mus musculus
  siRNA target sequence for Parg (NM_011960.1,1733-1751).
gggataaggtacttgaaga

SEQ ID NO: 596058 - DNA, 19 bp, Mus musculus
  siRNA target sequence for Parg (NM_011960.1,1734-1752).
ggataaggtacttgaagaa

SEQ ID NO: 596059 - DNA, 19 bp, Mus musculus
  siRNA target sequence for Parg (NM_011960.1,1759-1777).
gcccaacatttatatcagt

SEQ ID NO: 596060 - DNA, 19 bp, Mus musculus
  siRNA target sequence for Parg (NM_011960.1,1804-1822).
gcactctgtctgccaaata

SEQ ID NO: 596061 - DNA, 19 bp, Mus musculus
  siRNA target sequence for Parg (NM_011960.1,1807-1825).
ctctgtctgccaaatattt

SEQ ID NO: 596062 - DNA, 19 bp, Mus musculus
  siRNA target sequence for Parg (NM_011960.1,1893-1911).
cgccagtcttttagctaat

SEQ ID NO: 596063 - DNA, 19 bp, Mus musculus
  siRNA target sequence for Parg (NM_011960.1,1896-1914).
cagtcttttagctaatgct

SEQ ID NO: 596064 - DNA, 19 bp, Mus musculus
  siRNA target sequence for Parg (NM_011960.1,1898-1916).
gtcttttagctaatgcttt

SEQ ID NO: 596065 - DNA, 19 bp, Mus musculus
  siRNA target sequence for Parg (NM_011960.1,1933-1951).
cgacggaatgccaagatga

SEQ ID NO: 596066 - DNA, 19 bp, Mus musculus
  siRNA target sequence for Parg (NM_011960.1,1950-1968).
gaaatcggagtattctagt

SEQ ID NO: 596067 - DNA, 19 bp, Mus musculus
  siRNA target sequence for Parg (NM_011960.1,1964-1982).
ctagttacccagacattaa

SEQ ID NO: 596068 - DNA, 19 bp, Mus musculus
  siRNA target sequence for Parg (NM_011960.1,1967-1985).
gttacccagacattaactt

SEQ ID NO: 596069 - DNA, 19 bp, Mus musculus
  siRNA target sequence for Parg (NM_011960.1,1971-1989).
cccagacattaacttcaat

SEQ ID NO: 596070 - DNA, 19 bp, Mus musculus
  siRNA target sequence for Parg (NM_011960.1,1995-2013).
gtttgaaggacgttcatca

SEQ ID NO: 596071 - DNA, 19 bp, Mus musculus
  siRNA target sequence for Parg (NM_011960.1,2038-2056).
ctcttctgctactttcgaa

SEQ ID NO: 596072 - DNA, 19 bp, Mus musculus
  siRNA target sequence for Parg (NM_011960.1,2080-2098).
ggattggtgacatttacaa

SEQ ID NO: 596073 - DNA, 19 bp, Mus musculus
  siRNA target sequence for Parg (NM_011960.1,2103-2121).
gagtcttgaagattttcca

SEQ ID NO: 596074 - DNA, 19 bp, Mus musculus
  siRNA target sequence for Parg (NM_011960.1,2122-2140).
gaatgggaaaggtgtgaaa

SEQ ID NO: 596075 - DNA, 19 bp, Mus musculus
  siRNA target sequence for Parg (NM_011960.1,2150-2168).
cacgcttacacgtcactta

SEQ ID NO: 596076 - DNA, 19 bp, Mus musculus
  siRNA target sequence for Parg (NM_011960.1,2163-2181).
cacttacgagggtaccata

SEQ ID NO: 596077 - DNA, 19 bp, Mus musculus
  siRNA target sequence for Parg (NM_011960.1,2198-2216).
gcatgctacaggtggattt

SEQ ID NO: 596078 - DNA, 19 bp, Mus musculus
  siRNA target sequence for Parg (NM_011960.1,2202-2220).
gctacaggtggattttgca

SEQ ID NO: 596079 - DNA, 19 bp, Mus musculus
  siRNA target sequence for Parg (NM_011960.1,2203-2221).
ctacaggtggattttgcaa

SEQ ID NO: 596080 - DNA, 19 bp, Mus musculus
  siRNA target sequence for Parg (NM_011960.1,2209-2227).
gtggattttgcaaatcgtt

SEQ ID NO: 596081 - DNA, 19 bp, Mus musculus
  siRNA target sequence for Parg (NM_011960.1,2244-2262).
gactggtgcgggacttgta

SEQ ID NO: 596082 - DNA, 19 bp, Mus musculus
  siRNA target sequence for Parg (NM_011960.1,2257-2275).
cttgtacaagaagaaatca

SEQ ID NO: 596083 - DNA, 19 bp, Mus musculus
  siRNA target sequence for Parg (NM_011960.1,2385-2403).
ctatgctgaaacttatcgt

SEQ ID NO: 596084 - DNA, 19 bp, Mus musculus
  siRNA target sequence for Parg (NM_011960.1,2492-2510).
gacgctacctcgatcagtt

SEQ ID NO: 596085 - DNA, 19 bp, Mus musculus
  siRNA target sequence for Parg (NM_011960.1,2495-2513).
gctacctcgatcagtttgt

SEQ ID NO: 596086 - DNA, 19 bp, Mus musculus
  siRNA target sequence for Parg (NM_011960.1,2629-2647).
gggggtgacgctagattaa

SEQ ID NO: 596087 - DNA, 19 bp, Mus musculus
  siRNA target sequence for Parg (NM_011960.1,2630-2648).
ggggtgacgctagattaaa

SEQ ID NO: 596088 - DNA, 19 bp, Mus musculus
  siRNA target sequence for Parg (NM_011960.1,2631-2649).
gggtgacgctagattaaaa

SEQ ID NO: 596089 - DNA, 19 bp, Mus musculus
  siRNA target sequence for Parg (NM_011960.1,2642-2660).
gattaaaagccttaataca

SEQ ID NO: 596090 - DNA, 19 bp, Mus musculus
  siRNA target sequence for Parg (NM_011960.1,2681-2699).
ctgaacgtgacgtggttta

SEQ ID NO: 596091 - DNA, 19 bp, Mus musculus
  siRNA target sequence for Parg (NM_011960.1,2683-2701).
gaacgtgacgtggtttatt

SEQ ID NO: 596092 - DNA, 19 bp, Mus musculus
  siRNA target sequence for Parg (NM_011960.1,2686-2704).
cgtgacgtggtttatttca

SEQ ID NO: 596093 - DNA, 19 bp, Mus musculus
  siRNA target sequence for Parg (NM_011960.1,2710-2728).
ggggactcagagttgatga

SEQ ID NO: 596094 - DNA, 19 bp, Mus musculus
  siRNA target sequence for Parg (NM_011960.1,2719-2737).
gagttgatgagagacattt

SEQ ID NO: 596095 - DNA, 19 bp, Mus musculus
  siRNA target sequence for Parg (NM_011960.1,2739-2757).
cagcatgcacactttcctt

SEQ ID NO: 596096 - DNA, 19 bp, Mus musculus
  siRNA target sequence for Parg (NM_011960.1,2780-2798).
gaaaagtgtacaagttatt

SEQ ID NO: 596097 - DNA, 19 bp, Mus musculus
  siRNA target sequence for Parg (NM_011960.1,2799-2817).
gcttagatactacaatgaa

SEQ ID NO: 596098 - DNA, 19 bp, Mus musculus
  siRNA target sequence for Phca (NM_025408.1,188-206).
cagtgagtaacctgattat

SEQ ID NO: 596099 - DNA, 19 bp, Mus musculus
  siRNA target sequence for Phca (NM_025408.1,210-228).
catacctccaatttttggt

SEQ ID NO: 596100 - DNA, 19 bp, Mus musculus
  siRNA target sequence for Phca (NM_025408.1,230-248).
caattcaaggcattagaga

SEQ ID NO: 596101 - DNA, 19 bp, Mus musculus
  siRNA target sequence for Phca (NM_025408.1,263-281).
ggtacattgctgcttactt

SEQ ID NO: 596102 - DNA, 19 bp, Mus musculus
  siRNA target sequence for Phca (NM_025408.1,264-282).
gtacattgctgcttactta

SEQ ID NO: 596103 - DNA, 19 bp, Mus musculus
  siRNA target sequence for Phca (NM_025408.1,284-302).
cactcacagtggtaggaat

SEQ ID NO: 596104 - DNA, 19 bp, Mus musculus
  siRNA target sequence for Phca (NM_025408.1,372-390).
cagctgctgcatatttgta

SEQ ID NO: 596105 - DNA, 19 bp, Mus musculus
  siRNA target sequence for Phca (NM_025408.1,388-406).
gtatactgcatgtttgagt

SEQ ID NO: 596106 - DNA, 19 bp, Mus musculus
  siRNA target sequence for Phca (NM_025408.1,411-429).
caagacaaagagctcaata

SEQ ID NO: 596107 - DNA, 19 bp, Mus musculus
  siRNA target sequence for Phca (NM_025408.1,449-467).
ccctatttctatacagttt

SEQ ID NO: 596108 - DNA, 19 bp, Mus musculus
  siRNA target sequence for Phca (NM_025408.1,450-468).
cctatttctatacagttta

SEQ ID NO: 596109 - DNA, 19 bp, Mus musculus
  siRNA target sequence for Phca (NM_025408.1,457-475).
ctatacagtttaacagtaa

SEQ ID NO: 596110 - DNA, 19 bp, Mus musculus
  siRNA target sequence for Phca (NM_025408.1,472-490).
gtaactacgatttacctaa

SEQ ID NO: 596111 - DNA, 19 bp, Mus musculus
  siRNA target sequence for Phca (NM_025408.1,479-497).
cgatttacctaaaagtcaa

SEQ ID NO: 596112 - DNA, 19 bp, Mus musculus
  siRNA target sequence for Phca (NM_025408.1,480-498).
gatttacctaaaagtcaaa

SEQ ID NO: 596113 - DNA, 19 bp, Mus musculus
  siRNA target sequence for Phca (NM_025408.1,527-545).
gaatgttggtctttacatt

SEQ ID NO: 596114 - DNA, 19 bp, Mus musculus
  siRNA target sequence for Phca (NM_025408.1,531-549).
gttggtctttacattagta

SEQ ID NO: 596115 - DNA, 19 bp, Mus musculus
  siRNA target sequence for Phca (NM_025408.1,542-560).
cattagtacttcgttctat

SEQ ID NO: 596116 - DNA, 19 bp, Mus musculus
  siRNA target sequence for Phca (NM_025408.1,547-565).
gtacttcgttctatttata

SEQ ID NO: 596117 - DNA, 19 bp, Mus musculus
  siRNA target sequence for Phca (NM_025408.1,568-586).
gttacatgggtttatccat

SEQ ID NO: 596118 - DNA, 19 bp, Mus musculus
  siRNA target sequence for Phca (NM_025408.1,589-607).
cttagaggactaggttata

SEQ ID NO: 596119 - DNA, 19 bp, Mus musculus
  siRNA target sequence for Phca (NM_025408.1,631-649).
gggtttttattgtggaata

SEQ ID NO: 596120 - DNA, 19 bp, Mus musculus
  siRNA target sequence for Phca (NM_025408.1,644-662).
ggaatatagataacatctt

SEQ ID NO: 596121 - DNA, 19 bp, Mus musculus
  siRNA target sequence for Phca (NM_025408.1,645-663).
gaatatagataacatcttt

SEQ ID NO: 596122 - DNA, 19 bp, Mus musculus
  siRNA target sequence for Phca (NM_025408.1,675-693).
gaggaactttcgaaagaga

SEQ ID NO: 596123 - DNA, 19 bp, Mus musculus
  siRNA target sequence for Phca (NM_025408.1,700-718).
cccgtcctaggtgttacaa

SEQ ID NO: 596124 - DNA, 19 bp, Mus musculus
  siRNA target sequence for Phca (NM_025408.1,702-720).
cgtcctaggtgttacaaca

SEQ ID NO: 596125 - DNA, 19 bp, Mus musculus
  siRNA target sequence for Phca (NM_025408.1,769-787).
cacatccttttcagtttat

SEQ ID NO: 596126 - DNA, 19 bp, Mus musculus
  siRNA target sequence for Phca (NM_025408.1,809-827).
ggtacaggccaaaagtgaa

SEQ ID NO: 596127 - DNA, 19 bp, Mus musculus
  siRNA target sequence for Phca (NM_025408.1,813-831).
caggccaaaagtgaagttt

SEQ ID NO: 596128 - DNA, 19 bp, Mus musculus
  siRNA target sequence for Phca (NM_025408.1,843-861).
ctggccagcagtcatgttt

SEQ ID NO: 596129 - DNA, 19 bp, Mus musculus
  siRNA target sequence for Pign (NM_013784.1,402-420).
ctttgggattgcttatcca

SEQ ID NO: 596130 - DNA, 19 bp, Mus musculus
  siRNA target sequence for Pign (NM_013784.1,406-424).
gggattgcttatccatttt

SEQ ID NO: 596131 - DNA, 19 bp, Mus musculus
  siRNA target sequence for Pign (NM_013784.1,408-426).
gattgcttatccattttgt

SEQ ID NO: 596132 - DNA, 19 bp, Mus musculus
  siRNA target sequence for Pign (NM_013784.1,476-494).
ggaatgactccccagttta

SEQ ID NO: 596133 - DNA, 19 bp, Mus musculus
  siRNA target sequence for Pign (NM_013784.1,504-522).
ctcctccagcaaaaagatt

SEQ ID NO: 596134 - DNA, 19 bp, Mus musculus
  siRNA target sequence for Pign (NM_013784.1,543-561).
gcctgagagcagatactct

SEQ ID NO: 596135 - DNA, 19 bp, Mus musculus
  siRNA target sequence for Pign (NM_013784.1,544-562).
cctgagagcagatactctt

SEQ ID NO: 596136 - DNA, 19 bp, Mus musculus
  siRNA target sequence for Pign (NM_013784.1,545-563).
ctgagagcagatactcttt

SEQ ID NO: 596137 - DNA, 19 bp, Mus musculus
  siRNA target sequence for Pign (NM_013784.1,547-565).
gagagcagatactctttat

SEQ ID NO: 596138 - DNA, 19 bp, Mus musculus
  siRNA target sequence for Pign (NM_013784.1,549-567).
gagcagatactctttatga

SEQ ID NO: 596139 - DNA, 19 bp, Mus musculus
  siRNA target sequence for Pign (NM_013784.1,591-609).
gagcacctttcattaggaa

SEQ ID NO: 596140 - DNA, 19 bp, Mus musculus
  siRNA target sequence for Pign (NM_013784.1,596-614).
cctttcattaggaatgtta

SEQ ID NO: 596141 - DNA, 19 bp, Mus musculus
  siRNA target sequence for Pign (NM_013784.1,597-615).
ctttcattaggaatgttat

SEQ ID NO: 596142 - DNA, 19 bp, Mus musculus
  siRNA target sequence for Pign (NM_013784.1,627-645).
gcagctggggagtatctca

SEQ ID NO: 596143 - DNA, 19 bp, Mus musculus
  siRNA target sequence for Pign (NM_013784.1,789-807).
gctgggggagtccagatat

SEQ ID NO: 596144 - DNA, 19 bp, Mus musculus
  siRNA target sequence for Pign (NM_013784.1,831-849).
ctagtggtgaccatgtcta

SEQ ID NO: 596145 - DNA, 19 bp, Mus musculus
  siRNA target sequence for Pign (NM_013784.1,836-854).
ggtgaccatgtctatacat

SEQ ID NO: 596146 - DNA, 19 bp, Mus musculus
  siRNA target sequence for Pign (NM_013784.1,841-859).
ccatgtctatacatatagt

SEQ ID NO: 596147 - DNA, 19 bp, Mus musculus
  siRNA target sequence for Pign (NM_013784.1,847-865).
ctatacatatagttacgat

SEQ ID NO: 596148 - DNA, 19 bp, Mus musculus
  siRNA target sequence for Pign (NM_013784.1,858-876).
gttacgatgctcaaagaga

SEQ ID NO: 596149 - DNA, 19 bp, Mus musculus
  siRNA target sequence for Pign (NM_013784.1,888-906).
cccacgatgccacaaaact

SEQ ID NO: 596150 - DNA, 19 bp, Mus musculus
  siRNA target sequence for Pign (NM_013784.1,907-925).
ggatacgtgggtttttgat

SEQ ID NO: 596151 - DNA, 19 bp, Mus musculus
  siRNA target sequence for Pign (NM_013784.1,912-930).
cgtgggtttttgataaagt

SEQ ID NO: 596152 - DNA, 19 bp, Mus musculus
  siRNA target sequence for Pign (NM_013784.1,913-931).
gtgggtttttgataaagtt

SEQ ID NO: 596153 - DNA, 19 bp, Mus musculus
  siRNA target sequence for Pign (NM_013784.1,915-933).
gggtttttgataaagttaa

SEQ ID NO: 596154 - DNA, 19 bp, Mus musculus
  siRNA target sequence for Pign (NM_013784.1,947-965).
gctgcaagaaacaaccaat

SEQ ID NO: 596155 - DNA, 19 bp, Mus musculus
  siRNA target sequence for Pign (NM_013784.1,950-968).
gcaagaaacaaccaatctt

SEQ ID NO: 596156 - DNA, 19 bp, Mus musculus
  siRNA target sequence for Pign (NM_013784.1,1049-1067).
ccatcgtcaagggaatata

SEQ ID NO: 596157 - DNA, 19 bp, Mus musculus
  siRNA target sequence for Pign (NM_013784.1,1050-1068).
catcgtcaagggaatataa

SEQ ID NO: 596158 - DNA, 19 bp, Mus musculus
  siRNA target sequence for Pign (NM_013784.1,1069-1087).
ggacaatattaaaaaagtt

SEQ ID NO: 596159 - DNA, 19 bp, Mus musculus
  siRNA target sequence for Pign (NM_013784.1,1094-1112).
ggagtgaaggaaatcgtat

SEQ ID NO: 596160 - DNA, 19 bp, Mus musculus
  siRNA target sequence for Pign (NM_013784.1,1097-1115).
gtgaaggaaatcgtatcaa

SEQ ID NO: 596161 - DNA, 19 bp, Mus musculus
  siRNA target sequence for Pign (NM_013784.1,1099-1117).
gaaggaaatcgtatcaatt

SEQ ID NO: 596162 - DNA, 19 bp, Mus musculus
  siRNA target sequence for Pign (NM_013784.1,1142-1160).
gggaaaacagcatttatct

SEQ ID NO: 596163 - DNA, 19 bp, Mus musculus
  siRNA target sequence for Pign (NM_013784.1,1143-1161).
ggaaaacagcatttatctt

SEQ ID NO: 596164 - DNA, 19 bp, Mus musculus
  siRNA target sequence for Pign (NM_013784.1,1208-1226).
catccgtcagagactttaa

SEQ ID NO: 596165 - DNA, 19 bp, Mus musculus
  siRNA target sequence for Pign (NM_013784.1,1366-1384).
gatggcatcccttattgga

SEQ ID NO: 596166 - DNA, 19 bp, Mus musculus
  siRNA target sequence for Pign (NM_013784.1,1415-1433).
cttcctgtgggttatctta

SEQ ID NO: 596167 - DNA, 19 bp, Mus musculus
  siRNA target sequence for Pign (NM_013784.1,1418-1436).
cctgtgggttatcttaaca

SEQ ID NO: 596168 - DNA, 19 bp, Mus musculus
  siRNA target sequence for Pign (NM_013784.1,1421-1439).
gtgggttatcttaacaaca

SEQ ID NO: 596169 - DNA, 19 bp, Mus musculus
  siRNA target sequence for Pign (NM_013784.1,1471-1489).
caatgcagtacagattctt

SEQ ID NO: 596170 - DNA, 19 bp, Mus musculus
  siRNA target sequence for Pign (NM_013784.1,1526-1544).
gccactttaccgtttttgt

SEQ ID NO: 596171 - DNA, 19 bp, Mus musculus
  siRNA target sequence for Pign (NM_013784.1,1537-1555).
gtttttgtttacaccattt

SEQ ID NO: 596172 - DNA, 19 bp, Mus musculus
  siRNA target sequence for Pign (NM_013784.1,1602-1620).
gatcttacataaaacaaga

SEQ ID NO: 596173 - DNA, 19 bp, Mus musculus
  siRNA target sequence for Pign (NM_013784.1,1674-1692).
gaggattgtcctattatca

SEQ ID NO: 596174 - DNA, 19 bp, Mus musculus
  siRNA target sequence for Pign (NM_013784.1,1676-1694).
ggattgtcctattatcata

SEQ ID NO: 596175 - DNA, 19 bp, Mus musculus
  siRNA target sequence for Pign (NM_013784.1,1683-1701).
cctattatcatacttatga

SEQ ID NO: 596176 - DNA, 19 bp, Mus musculus
  siRNA target sequence for Pign (NM_013784.1,1739-1757).
gtgggatggatgtcttata

SEQ ID NO: 596177 - DNA, 19 bp, Mus musculus
  siRNA target sequence for Pign (NM_013784.1,1741-1759).
gggatggatgtcttatact

SEQ ID NO: 596178 - DNA, 19 bp, Mus musculus
  siRNA target sequence for Pign (NM_013784.1,1830-1848).
gtctcctgctttatagctt

SEQ ID NO: 596179 - DNA, 19 bp, Mus musculus
  siRNA target sequence for Pign (NM_013784.1,1838-1856).
ctttatagcttcatagcta

SEQ ID NO: 596180 - DNA, 19 bp, Mus musculus
  siRNA target sequence for Pign (NM_013784.1,1893-1911).
cctgtccctggacttacta

SEQ ID NO: 596181 - DNA, 19 bp, Mus musculus
  siRNA target sequence for Pign (NM_013784.1,1898-1916).
ccctggacttactatgtgt

SEQ ID NO: 596182 - DNA, 19 bp, Mus musculus
  siRNA target sequence for Pign (NM_013784.1,1899-1917).
cctggacttactatgtgta

SEQ ID NO: 596183 - DNA, 19 bp, Mus musculus
  siRNA target sequence for Pign (NM_013784.1,1976-1994).
gacctggttgaatcactat

SEQ ID NO: 596184 - DNA, 19 bp, Mus musculus
  siRNA target sequence for Pign (NM_013784.1,1979-1997).
ctggttgaatcactattga

SEQ ID NO: 596185 - DNA, 19 bp, Mus musculus
  siRNA target sequence for Pign (NM_013784.1,1981-1999).
ggttgaatcactattgact

SEQ ID NO: 596186 - DNA, 19 bp, Mus musculus
  siRNA target sequence for Pign (NM_013784.1,1982-2000).
gttgaatcactattgactt

SEQ ID NO: 596187 - DNA, 19 bp, Mus musculus
  siRNA target sequence for Pign (NM_013784.1,2035-2053).
ctttaccttgggtattgaa

SEQ ID NO: 596188 - DNA, 19 bp, Mus musculus
  siRNA target sequence for Pign (NM_013784.1,2111-2129).
gcaggctggccgtttctca

SEQ ID NO: 596189 - DNA, 19 bp, Mus musculus
  siRNA target sequence for Pign (NM_013784.1,2227-2245).
gccaaacctttctctagta

SEQ ID NO: 596190 - DNA, 19 bp, Mus musculus
  siRNA target sequence for Pign (NM_013784.1,2229-2247).
caaacctttctctagtaat

SEQ ID NO: 596191 - DNA, 19 bp, Mus musculus
  siRNA target sequence for Pign (NM_013784.1,2278-2296).
gctggctgttgtaacaact

SEQ ID NO: 596192 - DNA, 19 bp, Mus musculus
  siRNA target sequence for Pign (NM_013784.1,2288-2306).
gtaacaactctcggaaaaa

SEQ ID NO: 596193 - DNA, 19 bp, Mus musculus
  siRNA target sequence for Pign (NM_013784.1,2307-2325).
gaaacattaaattggtaaa

SEQ ID NO: 596194 - DNA, 19 bp, Mus musculus
  siRNA target sequence for Pign (NM_013784.1,2689-2707).
ctgtgacactgatatagct

SEQ ID NO: 596195 - DNA, 19 bp, Mus musculus
  siRNA target sequence for Pign (NM_013784.1,2737-2755).
ccgtagggcctttttccta

SEQ ID NO: 596196 - DNA, 19 bp, Mus musculus
  siRNA target sequence for Pign (NM_013784.1,2744-2762).
gcctttttcctagttttct

SEQ ID NO: 596197 - DNA, 19 bp, Mus musculus
  siRNA target sequence for Pign (NM_013784.1,2872-2890).
gctcatgatgtggaagatt

SEQ ID NO: 596198 - DNA, 19 bp, Mus musculus
  siRNA target sequence for Pign (NM_013784.1,2969-2987).
cttgttgttctcatcatat

SEQ ID NO: 596199 - DNA, 19 bp, Mus musculus
  siRNA target sequence for Pign (NM_013784.1,3034-3052).
cagctggcttgatattgga

SEQ ID NO: 596200 - DNA, 19 bp, Mus musculus
  siRNA target sequence for Pign (NM_013784.1,3151-3169).
gtgtggcaaacccaaaagt

SEQ ID NO: 596201 - DNA, 19 bp, Mus musculus
  siRNA target sequence for Pign (NM_013784.1,3153-3171).
gtggcaaacccaaaagtca

SEQ ID NO: 596202 - DNA, 19 bp, Mus musculus
  siRNA target sequence for Pigo (NM_020035.1,909-927).
gacgctctgcggtttgact

SEQ ID NO: 596203 - DNA, 19 bp, Mus musculus
  siRNA target sequence for Pigo (NM_020035.1,911-929).
cgctctgcggtttgacttt

SEQ ID NO: 596204 - DNA, 19 bp, Mus musculus
  siRNA target sequence for Pigo (NM_020035.1,975-993).
gtgccttttctgggaaaat

SEQ ID NO: 596205 - DNA, 19 bp, Mus musculus
  siRNA target sequence for Pigo (NM_020035.1,1072-1090).
ccaccatgcagcgtctaaa

SEQ ID NO: 596206 - DNA, 19 bp, Mus musculus
  siRNA target sequence for Pigo (NM_020035.1,1104-1122).
ggctcgctgccgactttca

SEQ ID NO: 596207 - DNA, 19 bp, Mus musculus
  siRNA target sequence for Pigo (NM_020035.1,1105-1123).
gctcgctgccgactttcat

SEQ ID NO: 596208 - DNA, 19 bp, Mus musculus
  siRNA target sequence for Pigo (NM_020035.1,1108-1126).
cgctgccgactttcattga

SEQ ID NO: 596209 - DNA, 19 bp, Mus musculus
  siRNA target sequence for Pigo (NM_020035.1,1109-1127).
gctgccgactttcattgat

SEQ ID NO: 596210 - DNA, 19 bp, Mus musculus
  siRNA target sequence for Pigo (NM_020035.1,1149-1167).
catgctatagtggaagata

SEQ ID NO: 596211 - DNA, 19 bp, Mus musculus
  siRNA target sequence for Pigo (NM_020035.1,1153-1171).
ctatagtggaagataatgt

SEQ ID NO: 596212 - DNA, 19 bp, Mus musculus
  siRNA target sequence for Pigo (NM_020035.1,1192-1210).
caggaaggcgtgtagtctt

SEQ ID NO: 596213 - DNA, 19 bp, Mus musculus
  siRNA target sequence for Pigo (NM_020035.1,1408-1426).
gccctcaccaccctgaaat

SEQ ID NO: 596214 - DNA, 19 bp, Mus musculus
  siRNA target sequence for Pigo (NM_020035.1,1454-1472).
ggtgatacagggactcata

SEQ ID NO: 596215 - DNA, 19 bp, Mus musculus
  siRNA target sequence for Pigo (NM_020035.1,1473-1491).
gaacgcctggagaatgaca

SEQ ID NO: 596216 - DNA, 19 bp, Mus musculus
  siRNA target sequence for Pigo (NM_020035.1,1618-1636).
ccgaggagccggaggttat

SEQ ID NO: 596217 - DNA, 19 bp, Mus musculus
  siRNA target sequence for Pigo (NM_020035.1,1619-1637).
cgaggagccggaggttatt

SEQ ID NO: 596218 - DNA, 19 bp, Mus musculus
  siRNA target sequence for Pigo (NM_020035.1,1622-1640).
ggagccggaggttattcct

SEQ ID NO: 596219 - DNA, 19 bp, Mus musculus
  siRNA target sequence for Pigo (NM_020035.1,1810-1828).
cccggtttcttcataccta

SEQ ID NO: 596220 - DNA, 19 bp, Mus musculus
  siRNA target sequence for Pigo (NM_020035.1,1941-1959).
gcagcgctgagcacattga

SEQ ID NO: 596221 - DNA, 19 bp, Mus musculus
  siRNA target sequence for Pigo (NM_020035.1,2103-2121).
gtcgccccaggctttctct

SEQ ID NO: 596222 - DNA, 19 bp, Mus musculus
  siRNA target sequence for Pigo (NM_020035.1,2123-2141).
ccgcccactactgctaata

SEQ ID NO: 596223 - DNA, 19 bp, Mus musculus
  siRNA target sequence for Pigo (NM_020035.1,2145-2163).
gtagcctggggcctaactt

SEQ ID NO: 596224 - DNA, 19 bp, Mus musculus
  siRNA target sequence for Pigo (NM_020035.1,2178-2196).
gctggagtctcggtaacta

SEQ ID NO: 596225 - DNA, 19 bp, Mus musculus
  siRNA target sequence for Pigo (NM_020035.1,2194-2212).
ctactgggtcgaagataga

SEQ ID NO: 596226 - DNA, 19 bp, Mus musculus
  siRNA target sequence for Pigo (NM_020035.1,2197-2215).
ctgggtcgaagatagactt

SEQ ID NO: 596227 - DNA, 19 bp, Mus musculus
  siRNA target sequence for Pigo (NM_020035.1,2200-2218).
ggtcgaagatagacttagt

SEQ ID NO: 596228 - DNA, 19 bp, Mus musculus
  siRNA target sequence for Pigo (NM_020035.1,2277-2295).
gttagcagggggtctaaga

SEQ ID NO: 596229 - DNA, 19 bp, Mus musculus
  siRNA target sequence for Pigo (NM_020035.1,2321-2339).
ccctagacctgtcctaata

SEQ ID NO: 596230 - DNA, 19 bp, Mus musculus
  siRNA target sequence for Pigo (NM_020035.1,2326-2344).
gacctgtcctaatattact

SEQ ID NO: 596231 - DNA, 19 bp, Mus musculus
  siRNA target sequence for Pigo (NM_020035.1,2669-2687).
gggaggtcgagccaagaat

SEQ ID NO: 596232 - DNA, 19 bp, Mus musculus
  siRNA target sequence for Pigo (NM_020035.1,2671-2689).
gaggtcgagccaagaattt

SEQ ID NO: 596233 - DNA, 19 bp, Mus musculus
  siRNA target sequence for Pigo (NM_020035.1,2673-2691).
ggtcgagccaagaatttgt

SEQ ID NO: 596234 - DNA, 19 bp, Mus musculus
  siRNA target sequence for Pigo (NM_020035.1,2747-2765).
gcttcgccgctatggtaat

SEQ ID NO: 596235 - DNA, 19 bp, Mus musculus
  siRNA target sequence for Pigo (NM_020035.1,2751-2769).
cgccgctatggtaatctca

SEQ ID NO: 596236 - DNA, 19 bp, Mus musculus
  siRNA target sequence for Pigo (NM_020035.1,2752-2770).
gccgctatggtaatctcaa

SEQ ID NO: 596237 - DNA, 19 bp, Mus musculus
  siRNA target sequence for Pigo (NM_020035.1,3056-3074).
ggctgacctcgactatgta

SEQ ID NO: 596238 - DNA, 19 bp, Mus musculus
  siRNA target sequence for Pigo (NM_020035.1,3058-3076).
ctgacctcgactatgtagt

SEQ ID NO: 596239 - DNA, 19 bp, Mus musculus
  siRNA target sequence for Pigo (NM_020035.1,3119-3137).
gctcgagaggactaaagct

SEQ ID NO: 596240 - DNA, 19 bp, Mus musculus
  siRNA target sequence for Pigo (NM_020035.1,3417-3435).
gtcttttcagccatccatt

SEQ ID NO: 596241 - DNA, 19 bp, Mus musculus
  siRNA target sequence for Pigo (NM_020035.1,3482-3500).
ctggttgcctgccttacta

SEQ ID NO: 596242 - DNA, 19 bp, Mus musculus
  siRNA target sequence for Pigo (NM_020035.1,3484-3502).
ggttgcctgccttactagt

SEQ ID NO: 596243 - DNA, 19 bp, Mus musculus
  siRNA target sequence for Pigo (NM_020035.1,3690-3708).
cgggatgctccgaatcact

SEQ ID NO: 596244 - DNA, 19 bp, Mus musculus
  siRNA target sequence for Pigo (NM_020035.1,3928-3946).
cctggttcaaaaaactagt

SEQ ID NO: 596245 - DNA, 19 bp, Mus musculus
  siRNA target sequence for Pigo (NM_020035.1,3929-3947).
ctggttcaaaaaactagtt

SEQ ID NO: 596246 - DNA, 19 bp, Mus musculus
  siRNA target sequence for Pigo (NM_020035.1,3931-3949).
ggttcaaaaaactagttct

SEQ ID NO: 596247 - DNA, 19 bp, Mus musculus
  siRNA target sequence for Rce1 (NM_023131.1,17-35).
gggacgggctgcgtttact

SEQ ID NO: 596248 - DNA, 19 bp, Mus musculus
  siRNA target sequence for Rce1 (NM_023131.1,185-203).
gggaccaccccgctgttat

SEQ ID NO: 596249 - DNA, 19 bp, Mus musculus
  siRNA target sequence for Rce1 (NM_023131.1,187-205).
gaccaccccgctgttatca

SEQ ID NO: 596250 - DNA, 19 bp, Mus musculus
  siRNA target sequence for Rce1 (NM_023131.1,356-374).
ccctgctgctaactatgat

SEQ ID NO: 596251 - DNA, 19 bp, Mus musculus
  siRNA target sequence for Rce1 (NM_023131.1,389-407).
cactgatgcagctctctat

SEQ ID NO: 596252 - DNA, 19 bp, Mus musculus
  siRNA target sequence for Rce1 (NM_023131.1,486-504).
gcgctggctacgaaaccaa

SEQ ID NO: 596253 - DNA, 19 bp, Mus musculus
  siRNA target sequence for Rce1 (NM_023131.1,491-509).
ggctacgaaaccaagttat

SEQ ID NO: 596254 - DNA, 19 bp, Mus musculus
  siRNA target sequence for Rce1 (NM_023131.1,492-510).
gctacgaaaccaagttatt

SEQ ID NO: 596255 - DNA, 19 bp, Mus musculus
  siRNA target sequence for Rce1 (NM_023131.1,619-637).
gcccattttcaccacatta

SEQ ID NO: 596256 - DNA, 19 bp, Mus musculus
  siRNA target sequence for Rce1 (NM_023131.1,620-638).
cccattttcaccacattat

SEQ ID NO: 596257 - DNA, 19 bp, Mus musculus
  siRNA target sequence for Rce1 (NM_023131.1,711-729).
cgctgtcttcggtgcttat

SEQ ID NO: 596258 - DNA, 19 bp, Mus musculus
  siRNA target sequence for Rce1 (NM_023131.1,770-788).
cggttctctgccactcttt

SEQ ID NO: 596259 - DNA, 19 bp, Mus musculus
  siRNA target sequence for Rce1 (NM_023131.1,781-799).
cactctttctgcaactaca

SEQ ID NO: 596260 - DNA, 19 bp, Mus musculus
  siRNA target sequence for Rce1 (NM_023131.1,935-953).
ctctttgtatgcttttgga

SEQ ID NO: 596261 - DNA, 19 bp, Mus musculus
  siRNA target sequence for Serhl (NM_023475.2,181-199).
gggccacattgctctcaaa

SEQ ID NO: 596262 - DNA, 19 bp, Mus musculus
  siRNA target sequence for Serhl (NM_023475.2,183-201).
gccacattgctctcaaagt

SEQ ID NO: 596263 - DNA, 19 bp, Mus musculus
  siRNA target sequence for Serhl (NM_023475.2,290-308).
ccccaagacttctgttaca

SEQ ID NO: 596264 - DNA, 19 bp, Mus musculus
  siRNA target sequence for Serhl (NM_023475.2,291-309).
cccaagacttctgttacat

SEQ ID NO: 596265 - DNA, 19 bp, Mus musculus
  siRNA target sequence for Serhl (NM_023475.2,303-321).
gttacatggctatggattt

SEQ ID NO: 596266 - DNA, 19 bp, Mus musculus
  siRNA target sequence for Serhl (NM_023475.2,332-350).
gggctctcgtcccattaca

SEQ ID NO: 596267 - DNA, 19 bp, Mus musculus
  siRNA target sequence for Serhl (NM_023475.2,333-351).
ggctctcgtcccattacaa

SEQ ID NO: 596268 - DNA, 19 bp, Mus musculus
  siRNA target sequence for Serhl (NM_023475.2,361-379).
cccgtactaccagcaaaat

SEQ ID NO: 596269 - DNA, 19 bp, Mus musculus
  siRNA target sequence for Serhl (NM_023475.2,363-381).
cgtactaccagcaaaattt

SEQ ID NO: 596270 - DNA, 19 bp, Mus musculus
  siRNA target sequence for Serhl (NM_023475.2,364-382).
gtactaccagcaaaatttt

SEQ ID NO: 596271 - DNA, 19 bp, Mus musculus
  siRNA target sequence for Serhl (NM_023475.2,401-419).
gtggcaacagcctttaagt

SEQ ID NO: 596272 - DNA, 19 bp, Mus musculus
  siRNA target sequence for Serhl (NM_023475.2,489-507).
ctgagatggtggacaaact

SEQ ID NO: 596273 - DNA, 19 bp, Mus musculus
  siRNA target sequence for Serhl (NM_023475.2,515-533).
ctggactcaacgccatttt

SEQ ID NO: 596274 - DNA, 19 bp, Mus musculus
  siRNA target sequence for Serhl (NM_023475.2,567-585).
cctacaggcggagaaacat

SEQ ID NO: 596275 - DNA, 19 bp, Mus musculus
  siRNA target sequence for Serhl (NM_023475.2,568-586).
ctacaggcggagaaacata

SEQ ID NO: 596276 - DNA, 19 bp, Mus musculus
  siRNA target sequence for Serhl (NM_023475.2,656-674).
caggggttcctgaataaca

SEQ ID NO: 596277 - DNA, 19 bp, Mus musculus
  siRNA target sequence for Serhl (NM_023475.2,659-677).
gggttcctgaataacaaca

SEQ ID NO: 596278 - DNA, 19 bp, Mus musculus
  siRNA target sequence for Them2 (NM_025790.1,201-219).
cagaacctacgagaagtaa

SEQ ID NO: 596279 - DNA, 19 bp, Mus musculus
  siRNA target sequence for Them2 (NM_025790.1,210-228).
cgagaagtaatgaaggtta

SEQ ID NO: 596280 - DNA, 19 bp, Mus musculus
  siRNA target sequence for Them2 (NM_025790.1,213-231).
gaagtaatgaaggttatgt

SEQ ID NO: 596281 - DNA, 19 bp, Mus musculus
  siRNA target sequence for Them2 (NM_025790.1,240-258).
cccggttttgatagagttt

SEQ ID NO: 596282 - DNA, 19 bp, Mus musculus
  siRNA target sequence for Them2 (NM_025790.1,244-262).
gttttgatagagttttgga

SEQ ID NO: 596283 - DNA, 19 bp, Mus musculus
  siRNA target sequence for Them2 (NM_025790.1,281-299).
ggctgctcctgagaaacta

SEQ ID NO: 596284 - DNA, 19 bp, Mus musculus
  siRNA target sequence for Them2 (NM_025790.1,466-484).
ctaagataggagaagaaat

SEQ ID NO: 596285 - DNA, 19 bp, Mus musculus
  siRNA target sequence for Vps29 (NM_019780.1,191-209).
gagagctacgactatctca

SEQ ID NO: 596286 - DNA, 19 bp, Mus musculus
  siRNA target sequence for Vps29 (NM_019780.1,240-258).
gaggagacttcgatgagaa

SEQ ID NO: 596287 - DNA, 19 bp, Mus musculus
  siRNA target sequence for Vps29 (NM_019780.1,316-334).
ccacggacaccaagttatt

SEQ ID NO: 596288 - DNA, 19 bp, Mus musculus
  siRNA target sequence for Vps29 (NM_019780.1,340-358).
gggagacatggctagctta

SEQ ID NO: 596289 - DNA, 19 bp, Mus musculus
  siRNA target sequence for Vps29 (NM_019780.1,376-394).
gtttgatgtggacattctt

SEQ ID NO: 596290 - DNA, 19 bp, Mus musculus
  siRNA target sequence for Vps29 (NM_019780.1,462-480).
ctgccactggggcctataa

SEQ ID NO: 596291 - DNA, 19 bp, Mus musculus
  siRNA target sequence for Vps29 (NM_019780.1,473-491).
gcctataatgccttggaaa

SEQ ID NO: 596292 - DNA, 19 bp, Mus musculus
  siRNA target sequence for Vps29 (NM_019780.1,541-559).
ggtcacttacgtctatcaa

SEQ ID NO: 596293 - DNA, 19 bp, Mus musculus
  siRNA target sequence for Vps29 (NM_019780.1,544-562).
cacttacgtctatcaacta

SEQ ID NO: 596294 - DNA, 19 bp, Mus musculus
  siRNA target sequence for Vps29 (NM_019780.1,546-564).
cttacgtctatcaactaat

SEQ ID NO: 596295 - DNA, 19 bp, Mus musculus
  siRNA target sequence for Vps29 (NM_019780.1,581-599).
gtagaacgaattgagtata

SEQ ID NO: 596296 - DNA, 19 bp, Mus musculus
  siRNA target sequence for Vps29 (NM_019780.1,587-605).
cgaattgagtataaaaagt

SEQ ID NO: 596297 - DNA, 19 bp, Mus musculus
  siRNA target sequence for Col4a3bp (NM_023420.1,564-582).
caggatcgttgggtagttt

SEQ ID NO: 596298 - DNA, 19 bp, Mus musculus
  siRNA target sequence for Col4a3bp (NM_023420.1,567-585).
gatcgttgggtagttttga

SEQ ID NO: 596299 - DNA, 19 bp, Mus musculus
  siRNA target sequence for Col4a3bp (NM_023420.1,570-588).
cgttgggtagttttgaaaa

SEQ ID NO: 596300 - DNA, 19 bp, Mus musculus
  siRNA target sequence for Col4a3bp (NM_023420.1,668-686).
gatcacgcctcacgatttt

SEQ ID NO: 596301 - DNA, 19 bp, Mus musculus
  siRNA target sequence for Col4a3bp (NM_023420.1,671-689).
cacgcctcacgattttgat

SEQ ID NO: 596302 - DNA, 19 bp, Mus musculus
  siRNA target sequence for Col4a3bp (NM_023420.1,673-691).
cgcctcacgattttgatga

SEQ ID NO: 596303 - DNA, 19 bp, Mus musculus
  siRNA target sequence for Col4a3bp (NM_023420.1,675-693).
cctcacgattttgatgaat

SEQ ID NO: 596304 - DNA, 19 bp, Mus musculus
  siRNA target sequence for Col4a3bp (NM_023420.1,687-705).
gatgaatgccggtttgata

SEQ ID NO: 596305 - DNA, 19 bp, Mus musculus
  siRNA target sequence for Col4a3bp (NM_023420.1,696-714).
cggtttgatatcagtgtaa

SEQ ID NO: 596306 - DNA, 19 bp, Mus musculus
  siRNA target sequence for Col4a3bp (NM_023420.1,707-725).
cagtgtaaatgatagtgtt

SEQ ID NO: 596307 - DNA, 19 bp, Mus musculus
  siRNA target sequence for Col4a3bp (NM_023420.1,766-784).
gggtagacgccattgaaca

SEQ ID NO: 596308 - DNA, 19 bp, Mus musculus
  siRNA target sequence for Col4a3bp (NM_023420.1,815-833).
gtccagcttgcgtagacat

SEQ ID NO: 596309 - DNA, 19 bp, Mus musculus
  siRNA target sequence for Col4a3bp (NM_023420.1,880-898).
cgtccacctcttctttcaa

SEQ ID NO: 596310 - DNA, 19 bp, Mus musculus
  siRNA target sequence for Col4a3bp (NM_023420.1,905-923).
ccacagtttacgtgagaaa

SEQ ID NO: 596311 - DNA, 19 bp, Mus musculus
  siRNA target sequence for Col4a3bp (NM_023420.1,956-974).
gtgccggcaggttgatact

SEQ ID NO: 596312 - DNA, 19 bp, Mus musculus
  siRNA target sequence for Col4a3bp (NM_023420.1,973-991).
ctctccagaagtactttga

SEQ ID NO: 596313 - DNA, 19 bp, Mus musculus
  siRNA target sequence for Col4a3bp (NM_023420.1,1030-1048).
gggataaagtcgtagaaga

SEQ ID NO: 596314 - DNA, 19 bp, Mus musculus
  siRNA target sequence for Col4a3bp (NM_023420.1,1031-1049).
ggataaagtcgtagaagat

SEQ ID NO: 596315 - DNA, 19 bp, Mus musculus
  siRNA target sequence for Col4a3bp (NM_023420.1,1064-1082).
ccctacaactcgttctgat

SEQ ID NO: 596316 - DNA, 19 bp, Mus musculus
  siRNA target sequence for Col4a3bp (NM_023420.1,1086-1104).
gactttttgcacaatacca

SEQ ID NO: 596317 - DNA, 19 bp, Mus musculus
  siRNA target sequence for Col4a3bp (NM_023420.1,1088-1106).
ctttttgcacaataccaat

SEQ ID NO: 596318 - DNA, 19 bp, Mus musculus
  siRNA target sequence for Col4a3bp (NM_023420.1,1094-1112).
gcacaataccaatggtaat

SEQ ID NO: 596319 - DNA, 19 bp, Mus musculus
  siRNA target sequence for Col4a3bp (NM_023420.1,1095-1113).
cacaataccaatggtaata

SEQ ID NO: 596320 - DNA, 19 bp, Mus musculus
  siRNA target sequence for Col4a3bp (NM_023420.1,1097-1115).
caataccaatggtaataaa

SEQ ID NO: 596321 - DNA, 19 bp, Mus musculus
  siRNA target sequence for Col4a3bp (NM_023420.1,1203-1221).
ggaatccttgctacacttt

SEQ ID NO: 596322 - DNA, 19 bp, Mus musculus
  siRNA target sequence for Col4a3bp (NM_023420.1,1213-1231).
ctacactttctcattgtat

SEQ ID NO: 596323 - DNA, 19 bp, Mus musculus
  siRNA target sequence for Col4a3bp (NM_023420.1,1216-1234).
cactttctcattgtattga

SEQ ID NO: 596324 - DNA, 19 bp, Mus musculus
  siRNA target sequence for Col4a3bp (NM_023420.1,1228-1246).
gtattgaattaatggtaaa

SEQ ID NO: 596325 - DNA, 19 bp, Mus musculus
  siRNA target sequence for Col4a3bp (NM_023420.1,1304-1322).
ggaggaagcgtacaagaat

SEQ ID NO: 596326 - DNA, 19 bp, Mus musculus
  siRNA target sequence for Col4a3bp (NM_023420.1,1308-1326).
gaagcgtacaagaatgtga

SEQ ID NO: 596327 - DNA, 19 bp, Mus musculus
  siRNA target sequence for Col4a3bp (NM_023420.1,1319-1337).
gaatgtgatggaagaactt

SEQ ID NO: 596328 - DNA, 19 bp, Mus musculus
  siRNA target sequence for Col4a3bp (NM_023420.1,1378-1396).
gtccaaacagtctgattaa

SEQ ID NO: 596329 - DNA, 19 bp, Mus musculus
  siRNA target sequence for Col4a3bp (NM_023420.1,1428-1446).
gctcttgacagacaagata

SEQ ID NO: 596330 - DNA, 19 bp, Mus musculus
  siRNA target sequence for Col4a3bp (NM_023420.1,1470-1488).
gaaaaggtcaggttacact

SEQ ID NO: 596331 - DNA, 19 bp, Mus musculus
  siRNA target sequence for Col4a3bp (NM_023420.1,1525-1543).
ctgtcgggacgcatagatt

SEQ ID NO: 596332 - DNA, 19 bp, Mus musculus
  siRNA target sequence for Col4a3bp (NM_023420.1,1529-1547).
cgggacgcatagatttgta

SEQ ID NO: 596333 - DNA, 19 bp, Mus musculus
  siRNA target sequence for Col4a3bp (NM_023420.1,1531-1549).
ggacgcatagatttgtaca

SEQ ID NO: 596334 - DNA, 19 bp, Mus musculus
  siRNA target sequence for Col4a3bp (NM_023420.1,1532-1550).
gacgcatagatttgtacaa

SEQ ID NO: 596335 - DNA, 19 bp, Mus musculus
  siRNA target sequence for Col4a3bp (NM_023420.1,1534-1552).
cgcatagatttgtacaaaa

SEQ ID NO: 596336 - DNA, 19 bp, Mus musculus
  siRNA target sequence for Col4a3bp (NM_023420.1,1563-1581).
cgctcttcctccatgtctt

SEQ ID NO: 596337 - DNA, 19 bp, Mus musculus
  siRNA target sequence for Col4a3bp (NM_023420.1,1605-1623).
gacgatgttcacagattca

SEQ ID NO: 596338 - DNA, 19 bp, Mus musculus
  siRNA target sequence for Col4a3bp (NM_023420.1,1622-1640).
cagctcccaggttgaagaa

SEQ ID NO: 596339 - DNA, 19 bp, Mus musculus
  siRNA target sequence for Col4a3bp (NM_023420.1,1719-1737).
gaaatgaaggtatacagaa

SEQ ID NO: 596340 - DNA, 19 bp, Mus musculus
  siRNA target sequence for Col4a3bp (NM_023420.1,1806-1824).
ggacatgaggtctgcaatt

SEQ ID NO: 596341 - DNA, 19 bp, Mus musculus
  siRNA target sequence for Col4a3bp (NM_023420.1,1807-1825).
gacatgaggtctgcaatta

SEQ ID NO: 596342 - DNA, 19 bp, Mus musculus
  siRNA target sequence for Col4a3bp (NM_023420.1,1809-1827).
catgaggtctgcaattact

SEQ ID NO: 596343 - DNA, 19 bp, Mus musculus
  siRNA target sequence for Col4a3bp (NM_023420.1,1815-1833).
gtctgcaattacttttgga

SEQ ID NO: 596344 - DNA, 19 bp, Mus musculus
  siRNA target sequence for Col4a3bp (NM_023420.1,1817-1835).
ctgcaattacttttggaat

SEQ ID NO: 596345 - DNA, 19 bp, Mus musculus
  siRNA target sequence for Col4a3bp (NM_023420.1,1845-1863).
cgcaatgactgggaaacta

SEQ ID NO: 596346 - DNA, 19 bp, Mus musculus
  siRNA target sequence for Col4a3bp (NM_023420.1,1861-1879).
ctactatagaaaactttca

SEQ ID NO: 596347 - DNA, 19 bp, Mus musculus
  siRNA target sequence for Col4a3bp (NM_023420.1,1864-1882).
ctatagaaaactttcatgt

SEQ ID NO: 596348 - DNA, 19 bp, Mus musculus
  siRNA target sequence for Col4a3bp (NM_023420.1,1886-1904).
ggaaacattagctgataat

SEQ ID NO: 596349 - DNA, 19 bp, Mus musculus
  siRNA target sequence for Col4a3bp (NM_023420.1,1899-1917).
gataatgcaatcatcgttt

SEQ ID NO: 596350 - DNA, 19 bp, Mus musculus
  siRNA target sequence for Col4a3bp (NM_023420.1,1905-1923).
gcaatcatcgtttatcaaa

SEQ ID NO: 596351 - DNA, 19 bp, Mus musculus
  siRNA target sequence for Col4a3bp (NM_023420.1,1920-1938).
caaacgcacaagagagtat

SEQ ID NO: 596352 - DNA, 19 bp, Mus musculus
  siRNA target sequence for Col4a3bp (NM_023420.1,1948-1966).
ctcagagagacgtactgta

SEQ ID NO: 596353 - DNA, 19 bp, Mus musculus
  siRNA target sequence for Col4a3bp (NM_023420.1,1952-1970).
gagagacgtactgtatctt

SEQ ID NO: 596354 - DNA, 19 bp, Mus musculus
  siRNA target sequence for Col4a3bp (NM_023420.1,1964-1982).
gtatctttctgctattcga

SEQ ID NO: 596355 - DNA, 19 bp, Mus musculus
  siRNA target sequence for Col4a3bp (NM_023420.1,1990-2008).
cagccttgactgaaaatga

SEQ ID NO: 596356 - DNA, 19 bp, Mus musculus
  siRNA target sequence for Col4a3bp (NM_023420.1,2055-2073).
gctcctctgaacaatcgat

SEQ ID NO: 596357 - DNA, 19 bp, Mus musculus
  siRNA target sequence for Col4a3bp (NM_023420.1,2074-2092).
gtgtccgtgccaaaatcaa

SEQ ID NO: 596358 - DNA, 19 bp, Mus musculus
  siRNA target sequence for Col4a3bp (NM_023420.1,2076-2094).
gtccgtgccaaaatcaata

SEQ ID NO: 596359 - DNA, 19 bp, Mus musculus
  siRNA target sequence for Col4a3bp (NM_023420.1,2078-2096).
ccgtgccaaaatcaatatt

SEQ ID NO: 596360 - DNA, 19 bp, Mus musculus
  siRNA target sequence for Col4a3bp (NM_023420.1,2082-2100).
gccaaaatcaatattgcta

SEQ ID NO: 596361 - DNA, 19 bp, Mus musculus
  siRNA target sequence for Col4a3bp (NM_023420.1,2090-2108).
caatattgctatgatttgt

SEQ ID NO: 596362 - DNA, 19 bp, Mus musculus
  siRNA target sequence for Col4a3bp (NM_023420.1,2102-2120).
gatttgtcaaactttagta

SEQ ID NO: 596363 - DNA, 19 bp, Mus musculus
  siRNA target sequence for Col4a3bp (NM_023420.1,2171-2189).
gatcacgtatgtagctaat

SEQ ID NO: 596364 - DNA, 19 bp, Mus musculus
  siRNA target sequence for Col4a3bp (NM_023420.1,2176-2194).
cgtatgtagctaatgtgaa

SEQ ID NO: 596365 - DNA, 19 bp, Mus musculus
  siRNA target sequence for Col4a3bp (NM_023420.1,2242-2260).
gagaataccctaagtttct

SEQ ID NO: 596366 - DNA, 19 bp, Mus musculus
  siRNA target sequence for Col4a3bp (NM_023420.1,2244-2262).
gaataccctaagtttctaa

SEQ ID NO: 596367 - DNA, 19 bp, Mus musculus
  siRNA target sequence for Col4a3bp (NM_023420.1,2251-2269).
ctaagtttctaaaacgttt

SEQ ID NO: 596368 - DNA, 19 bp, Mus musculus
  siRNA target sequence for Col4a3bp (NM_023420.1,2255-2273).
gtttctaaaacgttttact

SEQ ID NO: 596369 - DNA, 19 bp, Mus musculus
  siRNA target sequence for Col4a3bp (NM_023420.1,2295-2313).
gcaggaaaaccaattttgt

SEQ ID NO: 596370 - DNA, 19 bp, Mus musculus
  siRNA target sequence for Csnk2b (NM_009975.1,371-389).
ctgtgggctccgtggtaat

SEQ ID NO: 596371 - DNA, 19 bp, Mus musculus
  siRNA target sequence for Csnk2b (NM_009975.1,373-391).
gtgggctccgtggtaatga

SEQ ID NO: 596372 - DNA, 19 bp, Mus musculus
  siRNA target sequence for Csnk2b (NM_009975.1,375-393).
gggctccgtggtaatgaat

SEQ ID NO: 596373 - DNA, 19 bp, Mus musculus
  siRNA target sequence for Csnk2b (NM_009975.1,376-394).
ggctccgtggtaatgaatt

SEQ ID NO: 596374 - DNA, 19 bp, Mus musculus
  siRNA target sequence for Csnk2b (NM_009975.1,381-399).
cgtggtaatgaattcttct

SEQ ID NO: 596375 - DNA, 19 bp, Mus musculus
  siRNA target sequence for Csnk2b (NM_009975.1,422-440).
ccaggacaaatttaatctt

SEQ ID NO: 596376 - DNA, 19 bp, Mus musculus
  siRNA target sequence for Csnk2b (NM_009975.1,606-624).
cgaggcatcgcacaaatgt

SEQ ID NO: 596377 - DNA, 19 bp, Mus musculus
  siRNA target sequence for Csnk2b (NM_009975.1,607-625).
gaggcatcgcacaaatgtt

SEQ ID NO: 596378 - DNA, 19 bp, Mus musculus
  siRNA target sequence for Csnk2b (NM_009975.1,652-670).
gctactgtcctcgtgtata

SEQ ID NO: 596379 - DNA, 19 bp, Mus musculus
  siRNA target sequence for Csnk2b (NM_009975.1,656-674).
ctgtcctcgtgtatactgt

SEQ ID NO: 596380 - DNA, 19 bp, Mus musculus
  siRNA target sequence for Csnk2b (NM_009975.1,865-883).
gacctgccaaccagtttgt

SEQ ID NO: 596381 - DNA, 19 bp, Mus musculus
  siRNA target sequence for Csnk2b (NM_009975.1,882-900).
gtacccaggctctatggtt

SEQ ID NO: 596382 - DNA, 19 bp, Mus musculus
  siRNA target sequence for Csnk2b (NM_009975.1,898-916).
gtttcaagatccatccaat

SEQ ID NO: 596383 - DNA, 19 bp, Mus musculus
  siRNA target sequence for Csnk2b (NM_009975.1,936-954).
caagccgccagcaacttca

SEQ ID NO: 596384 - DNA, 19 bp, Mus musculus
  siRNA target sequence for Csnk2b (NM_009975.1,956-974).
gagcccagtcaagactatt

SEQ ID NO: 596385 - DNA, 19 bp, Mus musculus
  siRNA target sequence for Prkdc (NM_011159.1,207-225).
ccggaagtcgcttagcatt

SEQ ID NO: 596386 - DNA, 19 bp, Mus musculus
  siRNA target sequence for Prkdc (NM_011159.1,226-244).
gaggactttcgtgattgta

SEQ ID NO: 596387 - DNA, 19 bp, Mus musculus
  siRNA target sequence for Prkdc (NM_011159.1,228-246).
ggactttcgtgattgtaga

SEQ ID NO: 596388 - DNA, 19 bp, Mus musculus
  siRNA target sequence for Prkdc (NM_011159.1,231-249).
ctttcgtgattgtagagaa

SEQ ID NO: 596389 - DNA, 19 bp, Mus musculus
  siRNA target sequence for Prkdc (NM_011159.1,250-268).
gaagccctaaagtttttat

SEQ ID NO: 596390 - DNA, 19 bp, Mus musculus
  siRNA target sequence for Prkdc (NM_011159.1,289-307).
gaccagaaggttatgcatt

SEQ ID NO: 596391 - DNA, 19 bp, Mus musculus
  siRNA target sequence for Prkdc (NM_011159.1,303-321).
gcattactctcttgatatt

SEQ ID NO: 596392 - DNA, 19 bp, Mus musculus
  siRNA target sequence for Prkdc (NM_011159.1,309-327).
ctctcttgatattaagaat

SEQ ID NO: 596393 - DNA, 19 bp, Mus musculus
  siRNA target sequence for Prkdc (NM_011159.1,316-334).
gatattaagaatacttgta

SEQ ID NO: 596394 - DNA, 19 bp, Mus musculus
  siRNA target sequence for Prkdc (NM_011159.1,356-374).
gaactgctaagtgtaaaat

SEQ ID NO: 596395 - DNA, 19 bp, Mus musculus
  siRNA target sequence for Prkdc (NM_011159.1,387-405).
ccttctgattaagttactt

SEQ ID NO: 596396 - DNA, 19 bp, Mus musculus
  siRNA target sequence for Prkdc (NM_011159.1,399-417).
gttacttcagatactaaga

SEQ ID NO: 596397 - DNA, 19 bp, Mus musculus
  siRNA target sequence for Prkdc (NM_011159.1,403-421).
cttcagatactaagaagta

SEQ ID NO: 596398 - DNA, 19 bp, Mus musculus
  siRNA target sequence for Prkdc (NM_011159.1,491-509).
caaaactacctgatacagt

SEQ ID NO: 596399 - DNA, 19 bp, Mus musculus
  siRNA target sequence for Prkdc (NM_011159.1,500-518).
ctgatacagttttagaaaa

SEQ ID NO: 596400 - DNA, 19 bp, Mus musculus
  siRNA target sequence for Prkdc (NM_011159.1,536-554).
gagtattaggtgaagttca

SEQ ID NO: 596401 - DNA, 19 bp, Mus musculus
  siRNA target sequence for Prkdc (NM_011159.1,553-571).
catcctagtgagatgataa

SEQ ID NO: 596402 - DNA, 19 bp, Mus musculus
  siRNA target sequence for Prkdc (NM_011159.1,557-575).
ctagtgagatgataaacca

SEQ ID NO: 596403 - DNA, 19 bp, Mus musculus
  siRNA target sequence for Prkdc (NM_011159.1,629-647).
ccacagtaagagaacctaa

SEQ ID NO: 596404 - DNA, 19 bp, Mus musculus
  siRNA target sequence for Prkdc (NM_011159.1,630-648).
cacagtaagagaacctaaa

SEQ ID NO: 596405 - DNA, 19 bp, Mus musculus
  siRNA target sequence for Prkdc (NM_011159.1,749-767).
gttttacatttaaagcaat

SEQ ID NO: 596406 - DNA, 19 bp, Mus musculus
  siRNA target sequence for Prkdc (NM_011159.1,804-822).
cttagctggcctacgatta

SEQ ID NO: 596407 - DNA, 19 bp, Mus musculus
  siRNA target sequence for Prkdc (NM_011159.1,808-826).
gctggcctacgattactta

SEQ ID NO: 596408 - DNA, 19 bp, Mus musculus
  siRNA target sequence for Prkdc (NM_011159.1,827-845).
ccctgcatgcatctcaatt

SEQ ID NO: 596409 - DNA, 19 bp, Mus musculus
  siRNA target sequence for Prkdc (NM_011159.1,856-874).
cttctggacaactatatta

SEQ ID NO: 596410 - DNA, 19 bp, Mus musculus
  siRNA target sequence for Prkdc (NM_011159.1,859-877).
ctggacaactatattactt

SEQ ID NO: 596411 - DNA, 19 bp, Mus musculus
  siRNA target sequence for Prkdc (NM_011159.1,862-880).
gacaactatattactttat

SEQ ID NO: 596412 - DNA, 19 bp, Mus musculus
  siRNA target sequence for Prkdc (NM_011159.1,897-915).
gtggtgtagccatacaaat

SEQ ID NO: 596413 - DNA, 19 bp, Mus musculus
  siRNA target sequence for Prkdc (NM_011159.1,905-923).
gccatacaaatgtggaatt

SEQ ID NO: 596414 - DNA, 19 bp, Mus musculus
  siRNA target sequence for Prkdc (NM_011159.1,957-975).
cctgagacagatttcgttt

SEQ ID NO: 596415 - DNA, 19 bp, Mus musculus
  siRNA target sequence for Prkdc (NM_011159.1,958-976).
ctgagacagatttcgttta

SEQ ID NO: 596416 - DNA, 19 bp, Mus musculus
  siRNA target sequence for Prkdc (NM_011159.1,962-980).
gacagatttcgtttactgt

SEQ ID NO: 596417 - DNA, 19 bp, Mus musculus
  siRNA target sequence for Prkdc (NM_011159.1,972-990).
gtttactgtggcagaagat

SEQ ID NO: 596418 - DNA, 19 bp, Mus musculus
  siRNA target sequence for Prkdc (NM_011159.1,1030-1048).
cagttctatggaatcatca

SEQ ID NO: 596419 - DNA, 19 bp, Mus musculus
  siRNA target sequence for Prkdc (NM_011159.1,1040-1058).
gaatcatcagaaatacaga

SEQ ID NO: 596420 - DNA, 19 bp, Mus musculus
  siRNA target sequence for Prkdc (NM_011159.1,1057-1075).
gactcgaacaacaaggaat

SEQ ID NO: 596421 - DNA, 19 bp, Mus musculus
  siRNA target sequence for Prkdc (NM_011159.1,1071-1089).
ggaattagccattgctatt

SEQ ID NO: 596422 - DNA, 19 bp, Mus musculus
  siRNA target sequence for Prkdc (NM_011159.1,1092-1110).
cggatatggactatttgca

SEQ ID NO: 596423 - DNA, 19 bp, Mus musculus
  siRNA target sequence for Prkdc (NM_011159.1,1109-1127).
caggaccttgcaaggttat

SEQ ID NO: 596424 - DNA, 19 bp, Mus musculus
  siRNA target sequence for Prkdc (NM_011159.1,1112-1130).
gaccttgcaaggttataaa

SEQ ID NO: 596425 - DNA, 19 bp, Mus musculus
  siRNA target sequence for Prkdc (NM_011159.1,1122-1140).
ggttataaatgcaaaagat

SEQ ID NO: 596426 - DNA, 19 bp, Mus musculus
  siRNA target sequence for Prkdc (NM_011159.1,1133-1151).
caaaagatgttgacttcat

SEQ ID NO: 596427 - DNA, 19 bp, Mus musculus
  siRNA target sequence for Prkdc (NM_011159.1,1205-1223).
cttctgaggatcatgttta

SEQ ID NO: 596428 - DNA, 19 bp, Mus musculus
  siRNA target sequence for Prkdc (NM_011159.1,1208-1226).
ctgaggatcatgtttacca

SEQ ID NO: 596429 - DNA, 19 bp, Mus musculus
  siRNA target sequence for Prkdc (NM_011159.1,1275-1293).
cacggttccggaggtatat

SEQ ID NO: 596430 - DNA, 19 bp, Mus musculus
  siRNA target sequence for Prkdc (NM_011159.1,1278-1296).
ggttccggaggtatatact

SEQ ID NO: 596431 - DNA, 19 bp, Mus musculus
  siRNA target sequence for Prkdc (NM_011159.1,1340-1358).
ctcagtatagtcccaaaat

SEQ ID NO: 596432 - DNA, 19 bp, Mus musculus
  siRNA target sequence for Prkdc (NM_011159.1,1442-1460).
ctgtggtgcaccaaggttt

SEQ ID NO: 596433 - DNA, 19 bp, Mus musculus
  siRNA target sequence for Prkdc (NM_011159.1,1444-1462).
gtggtgcaccaaggtttaa

SEQ ID NO: 596434 - DNA, 19 bp, Mus musculus
  siRNA target sequence for Prkdc (NM_011159.1,1447-1465).
gtgcaccaaggtttaatta

SEQ ID NO: 596435 - DNA, 19 bp, Mus musculus
  siRNA target sequence for Prkdc (NM_011159.1,1453-1471).
caaggtttaattagaatat

SEQ ID NO: 596436 - DNA, 19 bp, Mus musculus
  siRNA target sequence for Prkdc (NM_011159.1,1557-1575).
gaaagtacctacgtacaaa

SEQ ID NO: 596437 - DNA, 19 bp, Mus musculus
  siRNA target sequence for Prkdc (NM_011159.1,1612-1630).
gaccagatggaggatttta

SEQ ID NO: 596438 - DNA, 19 bp, Mus musculus
  siRNA target sequence for Prkdc (NM_011159.1,1614-1632).
ccagatggaggattttatt

SEQ ID NO: 596439 - DNA, 19 bp, Mus musculus
  siRNA target sequence for Prkdc (NM_011159.1,1636-1654).
ggagatgaaacatttctct

SEQ ID NO: 596440 - DNA, 19 bp, Mus musculus
  siRNA target sequence for Prkdc (NM_011159.1,1637-1655).
gagatgaaacatttctctt

SEQ ID NO: 596441 - DNA, 19 bp, Mus musculus
  siRNA target sequence for Prkdc (NM_011159.1,1665-1683).
ctcccttaaaagtctgaat

SEQ ID NO: 596442 - DNA, 19 bp, Mus musculus
  siRNA target sequence for Prkdc (NM_011159.1,1668-1686).
ccttaaaagtctgaatcat

SEQ ID NO: 596443 - DNA, 19 bp, Mus musculus
  siRNA target sequence for Prkdc (NM_011159.1,1690-1708).
ctctatgatgaatttataa

SEQ ID NO: 596444 - DNA, 19 bp, Mus musculus
  siRNA target sequence for Prkdc (NM_011159.1,1728-1746).
ggaaaaattggatcttaca

SEQ ID NO: 596445 - DNA, 19 bp, Mus musculus
  siRNA target sequence for Prkdc (NM_011159.1,1737-1755).
ggatcttacactggaaaaa

SEQ ID NO: 596446 - DNA, 19 bp, Mus musculus
  siRNA target sequence for Prkdc (NM_011159.1,1741-1759).
cttacactggaaaaacaga

SEQ ID NO: 596447 - DNA, 19 bp, Mus musculus
  siRNA target sequence for Prkdc (NM_011159.1,1800-1818).
ggtgatcccaacttcagat

SEQ ID NO: 596448 - DNA, 19 bp, Mus musculus
  siRNA target sequence for Prkdc (NM_011159.1,1814-1832).
cagatccagcagctaattt

SEQ ID NO: 596449 - DNA, 19 bp, Mus musculus
  siRNA target sequence for Prkdc (NM_011159.1,1852-1870).
gatttttcagctctcatta

SEQ ID NO: 596450 - DNA, 19 bp, Mus musculus
  siRNA target sequence for Prkdc (NM_011159.1,1881-1899).
gttttgcagggagattctt

SEQ ID NO: 596451 - DNA, 19 bp, Mus musculus
  siRNA target sequence for Prkdc (NM_011159.1,1926-1944).
gccatgggtgtactcattt

SEQ ID NO: 596452 - DNA, 19 bp, Mus musculus
  siRNA target sequence for Prkdc (NM_011159.1,2055-2073).
cagcccaaagagtctgaaa

SEQ ID NO: 596453 - DNA, 19 bp, Mus musculus
  siRNA target sequence for Prkdc (NM_011159.1,2057-2075).
gcccaaagagtctgaaaca

SEQ ID NO: 596454 - DNA, 19 bp, Mus musculus
  siRNA target sequence for Prkdc (NM_011159.1,2134-2152).
gaggtatcagttaaaatga

SEQ ID NO: 596455 - DNA, 19 bp, Mus musculus
  siRNA target sequence for Prkdc (NM_011159.1,2178-2196).
ctcttgtttaacctttgtt

SEQ ID NO: 596456 - DNA, 19 bp, Mus musculus
  siRNA target sequence for Prkdc (NM_011159.1,2207-2225).
cacatgacatcattgaact

SEQ ID NO: 596457 - DNA, 19 bp, Mus musculus
  siRNA target sequence for Prkdc (NM_011159.1,2303-2321).
gtctacatgcccttaaaga

SEQ ID NO: 596458 - DNA, 19 bp, Mus musculus
  siRNA target sequence for Prkdc (NM_011159.1,2324-2342).
ggtcagttcacattgataa

SEQ ID NO: 596459 - DNA, 19 bp, Mus musculus
  siRNA target sequence for Prkdc (NM_011159.1,2357-2375).
cttactacaaagacattct

SEQ ID NO: 596460 - DNA, 19 bp, Mus musculus
  siRNA target sequence for Prkdc (NM_011159.1,2395-2413).
ctgaatacttcaaccttat

SEQ ID NO: 596461 - DNA, 19 bp, Mus musculus
  siRNA target sequence for Prkdc (NM_011159.1,2397-2415).
gaatacttcaaccttatca

SEQ ID NO: 596462 - DNA, 19 bp, Mus musculus
  siRNA target sequence for Prkdc (NM_011159.1,2427-2445).
gagccactggggattgtct

SEQ ID NO: 596463 - DNA, 19 bp, Mus musculus
  siRNA target sequence for Prkdc (NM_011159.1,2461-2479).
gcccagaagggatttaata

SEQ ID NO: 596464 - DNA, 19 bp, Mus musculus
  siRNA target sequence for Prkdc (NM_011159.1,2463-2481).
ccagaagggatttaataga

SEQ ID NO: 596465 - DNA, 19 bp, Mus musculus
  siRNA target sequence for Prkdc (NM_011159.1,2471-2489).
gatttaatagacatgtagt

SEQ ID NO: 596466 - DNA, 19 bp, Mus musculus
  siRNA target sequence for Prkdc (NM_011159.1,2535-2553).
gtccttagaagagataaga

SEQ ID NO: 596467 - DNA, 19 bp, Mus musculus
  siRNA target sequence for Prkdc (NM_011159.1,2552-2570).
gaattaaagtagtacaaat

SEQ ID NO: 596468 - DNA, 19 bp, Mus musculus
  siRNA target sequence for Prkdc (NM_011159.1,2577-2595).
ctctctgggaggacaaata

SEQ ID NO: 596469 - DNA, 19 bp, Mus musculus
  siRNA target sequence for Prkdc (NM_011159.1,2725-2743).
ctgcctcgggtcactgaat

SEQ ID NO: 596470 - DNA, 19 bp, Mus musculus
  siRNA target sequence for Prkdc (NM_011159.1,2755-2773).
gctagcgaccgacaaacta

SEQ ID NO: 596471 - DNA, 19 bp, Mus musculus
  siRNA target sequence for Prkdc (NM_011159.1,2756-2774).
ctagcgaccgacaaactaa

SEQ ID NO: 596472 - DNA, 19 bp, Mus musculus
  siRNA target sequence for Prkdc (NM_011159.1,2760-2778).
cgaccgacaaactaaagta

SEQ ID NO: 596473 - DNA, 19 bp, Mus musculus
  siRNA target sequence for Prkdc (NM_011159.1,2780-2798).
cagcttgtgaactgttaca

SEQ ID NO: 596474 - DNA, 19 bp, Mus musculus
  siRNA target sequence for Prkdc (NM_011159.1,2782-2800).
gcttgtgaactgttacaca

SEQ ID NO: 596475 - DNA, 19 bp, Mus musculus
  siRNA target sequence for Prkdc (NM_011159.1,2797-2815).
cacagcatggttatgttta

SEQ ID NO: 596476 - DNA, 19 bp, Mus musculus
  siRNA target sequence for Prkdc (NM_011159.1,2859-2877).
gcccatgtaccagctttat

SEQ ID NO: 596477 - DNA, 19 bp, Mus musculus
  siRNA target sequence for Prkdc (NM_011159.1,2860-2878).
cccatgtaccagctttata

SEQ ID NO: 596478 - DNA, 19 bp, Mus musculus
  siRNA target sequence for Prkdc (NM_011159.1,2909-2927).
cgtgtgatgtggatcaagt

SEQ ID NO: 596479 - DNA, 19 bp, Mus musculus
  siRNA target sequence for Prkdc (NM_011159.1,2938-2956).
ctctatgaaccgcttgtta

SEQ ID NO: 596480 - DNA, 19 bp, Mus musculus
  siRNA target sequence for Prkdc (NM_011159.1,2962-2980).
ctgatccactggttgacta

SEQ ID NO: 596481 - DNA, 19 bp, Mus musculus
  siRNA target sequence for Prkdc (NM_011159.1,2967-2985).
ccactggttgactaacaat

SEQ ID NO: 596482 - DNA, 19 bp, Mus musculus
  siRNA target sequence for Prkdc (NM_011159.1,2968-2986).
cactggttgactaacaata

SEQ ID NO: 596483 - DNA, 19 bp, Mus musculus
  siRNA target sequence for Prkdc (NM_011159.1,3026-3044).
ccatactggatggtattgt

SEQ ID NO: 596484 - DNA, 19 bp, Mus musculus
  siRNA target sequence for Prkdc (NM_011159.1,3048-3066).
ccctgttgacagtacttta

SEQ ID NO: 596485 - DNA, 19 bp, Mus musculus
  siRNA target sequence for Prkdc (NM_011159.1,3049-3067).
cctgttgacagtactttaa

SEQ ID NO: 596486 - DNA, 19 bp, Mus musculus
  siRNA target sequence for Prkdc (NM_011159.1,3055-3073).
gacagtactttaagagatt

SEQ ID NO: 596487 - DNA, 19 bp, Mus musculus
  siRNA target sequence for Prkdc (NM_011159.1,3057-3075).
cagtactttaagagatttt

SEQ ID NO: 596488 - DNA, 19 bp, Mus musculus
  siRNA target sequence for Prkdc (NM_011159.1,3077-3095).
gtggacggtgcgttcaaga

SEQ ID NO: 596489 - DNA, 19 bp, Mus musculus
  siRNA target sequence for Prkdc (NM_011159.1,3080-3098).
gacggtgcgttcaagaatt

SEQ ID NO: 596490 - DNA, 19 bp, Mus musculus
  siRNA target sequence for Prkdc (NM_011159.1,3083-3101).
ggtgcgttcaagaattcct

SEQ ID NO: 596491 - DNA, 19 bp, Mus musculus
  siRNA target sequence for Prkdc (NM_011159.1,3151-3169).
gtaaacagcaagtcacttt

SEQ ID NO: 596492 - DNA, 19 bp, Mus musculus
  siRNA target sequence for Prkdc (NM_011159.1,3185-3203).
gccttgcacttcatcctaa

SEQ ID NO: 596493 - DNA, 19 bp, Mus musculus
  siRNA target sequence for Prkdc (NM_011159.1,3220-3238).
ggtgcagcacttgctttta

SEQ ID NO: 596494 - DNA, 19 bp, Mus musculus
  siRNA target sequence for Prkdc (NM_011159.1,3241-3259).
cacatctacaaggaattca

SEQ ID NO: 596495 - DNA, 19 bp, Mus musculus
  siRNA target sequence for Prkdc (NM_011159.1,3269-3287).
gatccctggtagaacagtt

SEQ ID NO: 596496 - DNA, 19 bp, Mus musculus
  siRNA target sequence for Prkdc (NM_011159.1,3272-3290).
ccctggtagaacagtttgt

SEQ ID NO: 596497 - DNA, 19 bp, Mus musculus
  siRNA target sequence for Prkdc (NM_011159.1,3295-3313).
gaagccttagtgacatata

SEQ ID NO: 596498 - DNA, 19 bp, Mus musculus
  siRNA target sequence for Prkdc (NM_011159.1,3299-3317).
ccttagtgacatatatgga

SEQ ID NO: 596499 - DNA, 19 bp, Mus musculus
  siRNA target sequence for Prkdc (NM_011159.1,3300-3318).
cttagtgacatatatggaa

SEQ ID NO: 596500 - DNA, 19 bp, Mus musculus
  siRNA target sequence for Prkdc (NM_011159.1,3390-3408).
cctaagacgcatcattgaa

SEQ ID NO: 596501 - DNA, 19 bp, Mus musculus
  siRNA target sequence for Prkdc (NM_011159.1,3395-3413).
gacgcatcattgaaaagaa

SEQ ID NO: 596502 - DNA, 19 bp, Mus musculus
  siRNA target sequence for Prkdc (NM_011159.1,3473-3491).
catcattatgtttattgga

SEQ ID NO: 596503 - DNA, 19 bp, Mus musculus
  siRNA target sequence for Prkdc (NM_011159.1,3520-3538).
ggaaggccccagacagaat

SEQ ID NO: 596504 - DNA, 19 bp, Mus musculus
  siRNA target sequence for Prkdc (NM_011159.1,3591-3609).
caacaaatccccttcttta

SEQ ID NO: 596505 - DNA, 19 bp, Mus musculus
  siRNA target sequence for Prkdc (NM_011159.1,3612-3630).
gttgaaagaccttataaaa

SEQ ID NO: 596506 - DNA, 19 bp, Mus musculus
  siRNA target sequence for Prkdc (NM_011159.1,3711-3729).
gccaaccctcgtctactta

SEQ ID NO: 596507 - DNA, 19 bp, Mus musculus
  siRNA target sequence for Prkdc (NM_011159.1,3713-3731).
caaccctcgtctacttaca

SEQ ID NO: 596508 - DNA, 19 bp, Mus musculus
  siRNA target sequence for Prkdc (NM_011159.1,3745-3763).
ctgcgaggagtgctacaat

SEQ ID NO: 596509 - DNA, 19 bp, Mus musculus
  siRNA target sequence for Prkdc (NM_011159.1,3787-3805).
ctggagtgctacaacacat

SEQ ID NO: 596510 - DNA, 19 bp, Mus musculus
  siRNA target sequence for Prkdc (NM_011159.1,3850-3868).
gaagtacagtcttcacttt

SEQ ID NO: 596511 - DNA, 19 bp, Mus musculus
  siRNA target sequence for Prkdc (NM_011159.1,3853-3871).
gtacagtcttcacttttga

SEQ ID NO: 596512 - DNA, 19 bp, Mus musculus
  siRNA target sequence for Prkdc (NM_011159.1,4009-4027).
gtccggatcatggaattca

SEQ ID NO: 596513 - DNA, 19 bp, Mus musculus
  siRNA target sequence for Prkdc (NM_011159.1,4085-4103).
gtaatacaaatcttatgca

SEQ ID NO: 596514 - DNA, 19 bp, Mus musculus
  siRNA target sequence for Prkdc (NM_011159.1,4096-4114).
cttatgcaggtcttagtga

SEQ ID NO: 596515 - DNA, 19 bp, Mus musculus
  siRNA target sequence for Prkdc (NM_011159.1,4134-4152).
gagcttaggtttcaatatt

SEQ ID NO: 596516 - DNA, 19 bp, Mus musculus
  siRNA target sequence for Prkdc (NM_011159.1,4318-4336).
cgccaagaaaggtctaagt

SEQ ID NO: 596517 - DNA, 19 bp, Mus musculus
  siRNA target sequence for Prkdc (NM_011159.1,4324-4342).
gaaaggtctaagttacttt

SEQ ID NO: 596518 - DNA, 19 bp, Mus musculus
  siRNA target sequence for Prkdc (NM_011159.1,4328-4346).
ggtctaagttactttctat

SEQ ID NO: 596519 - DNA, 19 bp, Mus musculus
  siRNA target sequence for Prkdc (NM_011159.1,4335-4353).
gttactttctatcttatca

SEQ ID NO: 596520 - DNA, 19 bp, Mus musculus
  siRNA target sequence for Prkdc (NM_011159.1,4355-4373).
cctgtaaacagcttcacaa

SEQ ID NO: 596521 - DNA, 19 bp, Mus musculus
  siRNA target sequence for Prkdc (NM_011159.1,4375-4393).
gctggtttctctcatgtta

SEQ ID NO: 596522 - DNA, 19 bp, Mus musculus
  siRNA target sequence for Prkdc (NM_011159.1,4378-4396).
ggtttctctcatgttatat

SEQ ID NO: 596523 - DNA, 19 bp, Mus musculus
  siRNA target sequence for Prkdc (NM_011159.1,4562-4580).
gactgtgtgaccatcttgt

SEQ ID NO: 596524 - DNA, 19 bp, Mus musculus
  siRNA target sequence for Prkdc (NM_011159.1,4568-4586).
gtgaccatcttgtgagttt

SEQ ID NO: 596525 - DNA, 19 bp, Mus musculus
  siRNA target sequence for Prkdc (NM_011159.1,4600-4618).
gcaatgctgtctacacaat

SEQ ID NO: 596526 - DNA, 19 bp, Mus musculus
  siRNA target sequence for Prkdc (NM_011159.1,4601-4619).
caatgctgtctacacaata

SEQ ID NO: 596527 - DNA, 19 bp, Mus musculus
  siRNA target sequence for Prkdc (NM_011159.1,4625-4643).
gcagttcacagagaaatat

SEQ ID NO: 596528 - DNA, 19 bp, Mus musculus
  siRNA target sequence for Prkdc (NM_011159.1,4626-4644).
cagttcacagagaaatatt

SEQ ID NO: 596529 - DNA, 19 bp, Mus musculus
  siRNA target sequence for Prkdc (NM_011159.1,4657-4675).
ggggaatatttctacagtt

SEQ ID NO: 596530 - DNA, 19 bp, Mus musculus
  siRNA target sequence for Prkdc (NM_011159.1,4673-4691).
gtttgttctcagaagtgat

SEQ ID NO: 596531 - DNA, 19 bp, Mus musculus
  siRNA target sequence for Prkdc (NM_011159.1,4707-4725).
gaagaatcttgatattgct

SEQ ID NO: 596532 - DNA, 19 bp, Mus musculus
  siRNA target sequence for Prkdc (NM_011159.1,4748-4766).
cttcggataatcccaaaat

SEQ ID NO: 596533 - DNA, 19 bp, Mus musculus
  siRNA target sequence for Prkdc (NM_011159.1,4751-4769).
cggataatcccaaaatggt

SEQ ID NO: 596534 - DNA, 19 bp, Mus musculus
  siRNA target sequence for Prkdc (NM_011159.1,4808-4826).
gggatcgagctgttcagaa

SEQ ID NO: 596535 - DNA, 19 bp, Mus musculus
  siRNA target sequence for Prkdc (NM_011159.1,4809-4827).
ggatcgagctgttcagaaa

SEQ ID NO: 596536 - DNA, 19 bp, Mus musculus
  siRNA target sequence for Prkdc (NM_011159.1,4839-4857).
gaagcttgcaactgcaatt

SEQ ID NO: 596537 - DNA, 19 bp, Mus musculus
  siRNA target sequence for Prkdc (NM_011159.1,4866-4884).
ctggaggaagtgtgattca

SEQ ID NO: 596538 - DNA, 19 bp, Mus musculus
  siRNA target sequence for Prkdc (NM_011159.1,4950-4968).
gcagattgattcagcttta

SEQ ID NO: 596539 - DNA, 19 bp, Mus musculus
  siRNA target sequence for Prkdc (NM_011159.1,4953-4971).
gattgattcagctttatct

SEQ ID NO: 596540 - DNA, 19 bp, Mus musculus
  siRNA target sequence for Prkdc (NM_011159.1,5007-5025).
cacaacatacgctagtcta

SEQ ID NO: 596541 - DNA, 19 bp, Mus musculus
  siRNA target sequence for Prkdc (NM_011159.1,5036-5054).
caaagttgggtctacactt

SEQ ID NO: 596542 - DNA, 19 bp, Mus musculus
  siRNA target sequence for Prkdc (NM_011159.1,5058-5076).
gggccaagctatcattctt

SEQ ID NO: 596543 - DNA, 19 bp, Mus musculus
  siRNA target sequence for Prkdc (NM_011159.1,5080-5098).
ccattcttcaccagtctta

SEQ ID NO: 596544 - DNA, 19 bp, Mus musculus
  siRNA target sequence for Prkdc (NM_011159.1,5085-5103).
cttcaccagtcttagagaa

SEQ ID NO: 596545 - DNA, 19 bp, Mus musculus
  siRNA target sequence for Prkdc (NM_011159.1,5157-5175).
ccccatgaagtctgatgaa

SEQ ID NO: 596546 - DNA, 19 bp, Mus musculus
  siRNA target sequence for Prkdc (NM_011159.1,5179-5197).
cctcctgattccctaaagt

SEQ ID NO: 596547 - DNA, 19 bp, Mus musculus
  siRNA target sequence for Prkdc (NM_011159.1,5182-5200).
cctgattccctaaagtaca

SEQ ID NO: 596548 - DNA, 19 bp, Mus musculus
  siRNA target sequence for Prkdc (NM_011159.1,5183-5201).
ctgattccctaaagtacaa

SEQ ID NO: 596549 - DNA, 19 bp, Mus musculus
  siRNA target sequence for Prkdc (NM_011159.1,5185-5203).
gattccctaaagtacaata

SEQ ID NO: 596550 - DNA, 19 bp, Mus musculus
  siRNA target sequence for Prkdc (NM_011159.1,5214-5232).
ctgcatgaaaaagtttcta

SEQ ID NO: 596551 - DNA, 19 bp, Mus musculus
  siRNA target sequence for Prkdc (NM_011159.1,5230-5248).
ctagatgcactggagttat

SEQ ID NO: 596552 - DNA, 19 bp, Mus musculus
  siRNA target sequence for Prkdc (NM_011159.1,5255-5273).
gtcctatgttgtttcagtt

SEQ ID NO: 596553 - DNA, 19 bp, Mus musculus
  siRNA target sequence for Prkdc (NM_011159.1,5291-5309).
gtcgggaacagcgacatat

SEQ ID NO: 596554 - DNA, 19 bp, Mus musculus
  siRNA target sequence for Prkdc (NM_011159.1,5293-5311).
cgggaacagcgacatatta

SEQ ID NO: 596555 - DNA, 19 bp, Mus musculus
  siRNA target sequence for Prkdc (NM_011159.1,5294-5312).
gggaacagcgacatattat

SEQ ID NO: 596556 - DNA, 19 bp, Mus musculus
  siRNA target sequence for Prkdc (NM_011159.1,5302-5320).
cgacatattatggaagaat

SEQ ID NO: 596557 - DNA, 19 bp, Mus musculus
  siRNA target sequence for Prkdc (NM_011159.1,5326-5344).
caaaccactttcaaaagga

SEQ ID NO: 596558 - DNA, 19 bp, Mus musculus
  siRNA target sequence for Prkdc (NM_011159.1,5360-5378).
catgtgtcacacagttaaa

SEQ ID NO: 596559 - DNA, 19 bp, Mus musculus
  siRNA target sequence for Prkdc (NM_011159.1,5412-5430).
ggctgacctcccttcaaat

SEQ ID NO: 596560 - DNA, 19 bp, Mus musculus
  siRNA target sequence for Prkdc (NM_011159.1,5433-5451).
cactcgccaggcatttgta

SEQ ID NO: 596561 - DNA, 19 bp, Mus musculus
  siRNA target sequence for Prkdc (NM_011159.1,5530-5548).
gccattgatgtgttgaagt

SEQ ID NO: 596562 - DNA, 19 bp, Mus musculus
  siRNA target sequence for Prkdc (NM_011159.1,5585-5603).
ctcaaatcaccaagaagat

SEQ ID NO: 596563 - DNA, 19 bp, Mus musculus
  siRNA target sequence for Prkdc (NM_011159.1,5628-5646).
gatgtattctcgtctttta

SEQ ID NO: 596564 - DNA, 19 bp, Mus musculus
  siRNA target sequence for Prkdc (NM_011159.1,5747-5765).
gccatgatgcatttacaga

SEQ ID NO: 596565 - DNA, 19 bp, Mus musculus
  siRNA target sequence for Prkdc (NM_011159.1,5796-5814).
gaagagaagactttatcat

SEQ ID NO: 596566 - DNA, 19 bp, Mus musculus
  siRNA target sequence for Prkdc (NM_011159.1,5852-5870).
gtgtcttcaatgagttgaa

SEQ ID NO: 596567 - DNA, 19 bp, Mus musculus
  siRNA target sequence for Prkdc (NM_011159.1,5938-5956).
gacctgaaacgttgctata

SEQ ID NO: 596568 - DNA, 19 bp, Mus musculus
  siRNA target sequence for Prkdc (NM_011159.1,5940-5958).
cctgaaacgttgctataca

SEQ ID NO: 596569 - DNA, 19 bp, Mus musculus
  siRNA target sequence for Prkdc (NM_011159.1,5941-5959).
ctgaaacgttgctatacat

SEQ ID NO: 596570 - DNA, 19 bp, Mus musculus
  siRNA target sequence for Prkdc (NM_011159.1,5943-5961).
gaaacgttgctatacattt

SEQ ID NO: 596571 - DNA, 19 bp, Mus musculus
  siRNA target sequence for Prkdc (NM_011159.1,6044-6062).
cttcaggcagtcctcatta

SEQ ID NO: 596572 - DNA, 19 bp, Mus musculus
  siRNA target sequence for Prkdc (NM_011159.1,6047-6065).
caggcagtcctcattatat

SEQ ID NO: 596573 - DNA, 19 bp, Mus musculus
  siRNA target sequence for Prkdc (NM_011159.1,6049-6067).
ggcagtcctcattatatgt

SEQ ID NO: 596574 - DNA, 19 bp, Mus musculus
  siRNA target sequence for Prkdc (NM_011159.1,6051-6069).
cagtcctcattatatgtct

SEQ ID NO: 596575 - DNA, 19 bp, Mus musculus
  siRNA target sequence for Prkdc (NM_011159.1,6055-6073).
cctcattatatgtcttcat

SEQ ID NO: 596576 - DNA, 19 bp, Mus musculus
  siRNA target sequence for Prkdc (NM_011159.1,6058-6076).
cattatatgtcttcattgt

SEQ ID NO: 596577 - DNA, 19 bp, Mus musculus
  siRNA target sequence for Prkdc (NM_011159.1,6096-6114).
cctaagtgaagaaatgagt

SEQ ID NO: 596578 - DNA, 19 bp, Mus musculus
  siRNA target sequence for Prkdc (NM_011159.1,6133-6151).
ggagttcagagctattcat

SEQ ID NO: 596579 - DNA, 19 bp, Mus musculus
  siRNA target sequence for Prkdc (NM_011159.1,6134-6152).
gagttcagagctattcata

SEQ ID NO: 596580 - DNA, 19 bp, Mus musculus
  siRNA target sequence for Prkdc (NM_011159.1,6139-6157).
cagagctattcatacagtt

SEQ ID NO: 596581 - DNA, 19 bp, Mus musculus
  siRNA target sequence for Prkdc (NM_011159.1,6153-6171).
cagttctcaagatcgtaaa

SEQ ID NO: 596582 - DNA, 19 bp, Mus musculus
  siRNA target sequence for Prkdc (NM_011159.1,6173-6191).
ctaccactggccattttca

SEQ ID NO: 596583 - DNA, 19 bp, Mus musculus
  siRNA target sequence for Prkdc (NM_011159.1,6192-6210).
gagacgggagcatcaagat

SEQ ID NO: 596584 - DNA, 19 bp, Mus musculus
  siRNA target sequence for Prkdc (NM_011159.1,6226-6244).
gacatcatggagttagaga

SEQ ID NO: 596585 - DNA, 19 bp, Mus musculus
  siRNA target sequence for Prkdc (NM_011159.1,6243-6261).
gatggatgagctcaatcaa

SEQ ID NO: 596586 - DNA, 19 bp, Mus musculus
  siRNA target sequence for Prkdc (NM_011159.1,6250-6268).
gagctcaatcaacatgaat

SEQ ID NO: 596587 - DNA, 19 bp, Mus musculus
  siRNA target sequence for Prkdc (NM_011159.1,6252-6270).
gctcaatcaacatgaatgt

SEQ ID NO: 596588 - DNA, 19 bp, Mus musculus
  siRNA target sequence for Prkdc (NM_011159.1,6253-6271).
ctcaatcaacatgaatgta

SEQ ID NO: 596589 - DNA, 19 bp, Mus musculus
  siRNA target sequence for Prkdc (NM_011159.1,6298-6316).
cacatgcagagaaatgtga

SEQ ID NO: 596590 - DNA, 19 bp, Mus musculus
  siRNA target sequence for Prkdc (NM_011159.1,6327-6345).
gggagaagagggttcaata

SEQ ID NO: 596591 - DNA, 19 bp, Mus musculus
  siRNA target sequence for Prkdc (NM_011159.1,6359-6377).
caccgtggatgaaatttct

SEQ ID NO: 596592 - DNA, 19 bp, Mus musculus
  siRNA target sequence for Prkdc (NM_011159.1,6392-6410).
gaaatgcatcagtatcttt

SEQ ID NO: 596593 - DNA, 19 bp, Mus musculus
  siRNA target sequence for Prkdc (NM_011159.1,6397-6415).
gcatcagtatctttaaata

SEQ ID NO: 596594 - DNA, 19 bp, Mus musculus
  siRNA target sequence for Prkdc (NM_011159.1,6456-6474).
ggtctttcgcccttatgca

SEQ ID NO: 596595 - DNA, 19 bp, Mus musculus
  siRNA target sequence for Prkdc (NM_011159.1,6457-6475).
gtctttcgcccttatgcaa

SEQ ID NO: 596596 - DNA, 19 bp, Mus musculus
  siRNA target sequence for Prkdc (NM_011159.1,6505-6523).
gctgtttgcgagaacaaca

SEQ ID NO: 596597 - DNA, 19 bp, Mus musculus
  siRNA target sequence for Prkdc (NM_011159.1,6524-6542).
gagaaggaattcactacat

SEQ ID NO: 596598 - DNA, 19 bp, Mus musculus
  siRNA target sequence for Prkdc (NM_011159.1,6535-6553).
cactacatgatggtagaaa

SEQ ID NO: 596599 - DNA, 19 bp, Mus musculus
  siRNA target sequence for Prkdc (NM_011159.1,6540-6558).
catgatggtagaaatagta

SEQ ID NO: 596600 - DNA, 19 bp, Mus musculus
  siRNA target sequence for Prkdc (NM_011159.1,6603-6621).
ccctaaagatgaagtgtta

SEQ ID NO: 596601 - DNA, 19 bp, Mus musculus
  siRNA target sequence for Prkdc (NM_011159.1,6613-6631).
gaagtgttagcaaatcgat

SEQ ID NO: 596602 - DNA, 19 bp, Mus musculus
  siRNA target sequence for Prkdc (NM_011159.1,6618-6636).
gttagcaaatcgattgctt

SEQ ID NO: 596603 - DNA, 19 bp, Mus musculus
  siRNA target sequence for Prkdc (NM_011159.1,6628-6646).
cgattgcttcgttttctaa

SEQ ID NO: 596604 - DNA, 19 bp, Mus musculus
  siRNA target sequence for Prkdc (NM_011159.1,6722-6740).
ggaaggagtgtctttccat

SEQ ID NO: 596605 - DNA, 19 bp, Mus musculus
  siRNA target sequence for Prkdc (NM_011159.1,6737-6755).
ccatcccttacaggttaat

SEQ ID NO: 596606 - DNA, 19 bp, Mus musculus
  siRNA target sequence for Prkdc (NM_011159.1,6738-6756).
catcccttacaggttaata

SEQ ID NO: 596607 - DNA, 19 bp, Mus musculus
  siRNA target sequence for Prkdc (NM_011159.1,6741-6759).
cccttacaggttaatattt

SEQ ID NO: 596608 - DNA, 19 bp, Mus musculus
  siRNA target sequence for Prkdc (NM_011159.1,6778-6796).
gaccctaattctaaagaca

SEQ ID NO: 596609 - DNA, 19 bp, Mus musculus
  siRNA target sequence for Prkdc (NM_011159.1,6800-6818).
ctgtgggaattcagttatt

SEQ ID NO: 596610 - DNA, 19 bp, Mus musculus
  siRNA target sequence for Prkdc (NM_011159.1,6811-6829).
cagttattaggcattgtga

SEQ ID NO: 596611 - DNA, 19 bp, Mus musculus
  siRNA target sequence for Prkdc (NM_011159.1,6813-6831).
gttattaggcattgtgata

SEQ ID NO: 596612 - DNA, 19 bp, Mus musculus
  siRNA target sequence for Prkdc (NM_011159.1,6820-6838).
ggcattgtgatagctaata

SEQ ID NO: 596613 - DNA, 19 bp, Mus musculus
  siRNA target sequence for Prkdc (NM_011159.1,6844-6862).
cctccctatgacccaaatt

SEQ ID NO: 596614 - DNA, 19 bp, Mus musculus
  siRNA target sequence for Prkdc (NM_011159.1,6853-6871).
gacccaaattgtgacataa

SEQ ID NO: 596615 - DNA, 19 bp, Mus musculus
  siRNA target sequence for Prkdc (NM_011159.1,6856-6874).
ccaaattgtgacataacca

SEQ ID NO: 596616 - DNA, 19 bp, Mus musculus
  siRNA target sequence for Prkdc (NM_011159.1,6889-6907).
gaagctttagtcaataaca

SEQ ID NO: 596617 - DNA, 19 bp, Mus musculus
  siRNA target sequence for Prkdc (NM_011159.1,6892-6910).
gctttagtcaataacatgt

SEQ ID NO: 596618 - DNA, 19 bp, Mus musculus
  siRNA target sequence for Prkdc (NM_011159.1,7008-7026).
ggtatgtgaactggttata

SEQ ID NO: 596619 - DNA, 19 bp, Mus musculus
  siRNA target sequence for Prkdc (NM_011159.1,7159-7177).
ggagtaatgaagacacttt

SEQ ID NO: 596620 - DNA, 19 bp, Mus musculus
  siRNA target sequence for Prkdc (NM_011159.1,7172-7190).
cactttgtctggaagttgt

SEQ ID NO: 596621 - DNA, 19 bp, Mus musculus
  siRNA target sequence for Prkdc (NM_011159.1,7214-7232).
caggcctatacttacagtt

SEQ ID NO: 596622 - DNA, 19 bp, Mus musculus
  siRNA target sequence for Prkdc (NM_011159.1,7216-7234).
ggcctatacttacagttaa

SEQ ID NO: 596623 - DNA, 19 bp, Mus musculus
  siRNA target sequence for Prkdc (NM_011159.1,7219-7237).
ctatacttacagttaaaga

SEQ ID NO: 596624 - DNA, 19 bp, Mus musculus
  siRNA target sequence for Prkdc (NM_011159.1,7238-7256).
gtaaagactttcttcaagt

SEQ ID NO: 596625 - DNA, 19 bp, Mus musculus
  siRNA target sequence for Prkdc (NM_011159.1,7287-7305).
ggtgtgtttggatatagtt

SEQ ID NO: 596626 - DNA, 19 bp, Mus musculus
  siRNA target sequence for Prkdc (NM_011159.1,7353-7371).
gaatcctgttgtggaattt

SEQ ID NO: 596627 - DNA, 19 bp, Mus musculus
  siRNA target sequence for Prkdc (NM_011159.1,7377-7395).
ccatccttctccaacatgt

SEQ ID NO: 596628 - DNA, 19 bp, Mus musculus
  siRNA target sequence for Prkdc (NM_011159.1,7378-7396).
catccttctccaacatgta

SEQ ID NO: 596629 - DNA, 19 bp, Mus musculus
  siRNA target sequence for Prkdc (NM_011159.1,7391-7409).
catgtagagaacaaatgta

SEQ ID NO: 596630 - DNA, 19 bp, Mus musculus
  siRNA target sequence for Prkdc (NM_011159.1,7394-7412).
gtagagaacaaatgtataa

SEQ ID NO: 596631 - DNA, 19 bp, Mus musculus
  siRNA target sequence for Prkdc (NM_011159.1,7491-7509).
ggcaaaagatgtactgatt

SEQ ID NO: 596632 - DNA, 19 bp, Mus musculus
  siRNA target sequence for Prkdc (NM_011159.1,7493-7511).
caaaagatgtactgattca

SEQ ID NO: 596633 - DNA, 19 bp, Mus musculus
  siRNA target sequence for Prkdc (NM_011159.1,7530-7548).
cgttggactccaactaatt

SEQ ID NO: 596634 - DNA, 19 bp, Mus musculus
  siRNA target sequence for Prkdc (NM_011159.1,7531-7549).
gttggactccaactaatta

SEQ ID NO: 596635 - DNA, 19 bp, Mus musculus
  siRNA target sequence for Prkdc (NM_011159.1,7597-7615).
gaccgattgctggcattaa

SEQ ID NO: 596636 - DNA, 19 bp, Mus musculus
  siRNA target sequence for Prkdc (NM_011159.1,7600-7618).
cgattgctggcattaaatt

SEQ ID NO: 596637 - DNA, 19 bp, Mus musculus
  siRNA target sequence for Prkdc (NM_011159.1,7606-7624).
ctggcattaaattctttat

SEQ ID NO: 596638 - DNA, 19 bp, Mus musculus
  siRNA target sequence for Prkdc (NM_011159.1,7635-7653).
gatagaagtccacttttta

SEQ ID NO: 596639 - DNA, 19 bp, Mus musculus
  siRNA target sequence for Prkdc (NM_011159.1,7639-7657).
gaagtccactttttaagtt

SEQ ID NO: 596640 - DNA, 19 bp, Mus musculus
  siRNA target sequence for Prkdc (NM_011159.1,7644-7662).
ccactttttaagtttagca

SEQ ID NO: 596641 - DNA, 19 bp, Mus musculus
  siRNA target sequence for Prkdc (NM_011159.1,7645-7663).
cactttttaagtttagcaa

SEQ ID NO: 596642 - DNA, 19 bp, Mus musculus
  siRNA target sequence for Prkdc (NM_011159.1,7655-7673).
gtttagcaacaaactttct

SEQ ID NO: 596643 - DNA, 19 bp, Mus musculus
  siRNA target sequence for Prkdc (NM_011159.1,7720-7738).
gagcatcctctgtcagaat

SEQ ID NO: 596644 - DNA, 19 bp, Mus musculus
  siRNA target sequence for Prkdc (NM_011159.1,7722-7740).
gcatcctctgtcagaatgt

SEQ ID NO: 596645 - DNA, 19 bp, Mus musculus
  siRNA target sequence for Prkdc (NM_011159.1,7765-7783).
cctgactggcgttttcgta

SEQ ID NO: 596646 - DNA, 19 bp, Mus musculus
  siRNA target sequence for Prkdc (NM_011159.1,7770-7788).
ctggcgttttcgtagtact

SEQ ID NO: 596647 - DNA, 19 bp, Mus musculus
  siRNA target sequence for Prkdc (NM_011159.1,7773-7791).
gcgttttcgtagtactgtt

SEQ ID NO: 596648 - DNA, 19 bp, Mus musculus
  siRNA target sequence for Prkdc (NM_011159.1,7789-7807).
gttcttactccgatgttta

SEQ ID NO: 596649 - DNA, 19 bp, Mus musculus
  siRNA target sequence for Prkdc (NM_011159.1,7896-7914).
ggccacccaacaacaatat

SEQ ID NO: 596650 - DNA, 19 bp, Mus musculus
  siRNA target sequence for Prkdc (NM_011159.1,7899-7917).
cacccaacaacaatatgat

SEQ ID NO: 596651 - DNA, 19 bp, Mus musculus
  siRNA target sequence for Prkdc (NM_011159.1,7993-8011).
gatcacaccgtcttctctt

SEQ ID NO: 596652 - DNA, 19 bp, Mus musculus
  siRNA target sequence for Prkdc (NM_011159.1,8065-8083).
cagagaatgtcttgtaagt

SEQ ID NO: 596653 - DNA, 19 bp, Mus musculus
  siRNA target sequence for Prkdc (NM_011159.1,8067-8085).
gagaatgtcttgtaagtca

SEQ ID NO: 596654 - DNA, 19 bp, Mus musculus
  siRNA target sequence for Prkdc (NM_011159.1,8092-8110).
ccggactttggaacaaaaa

SEQ ID NO: 596655 - DNA, 19 bp, Mus musculus
  siRNA target sequence for Prkdc (NM_011159.1,8134-8152).
gtggataaccaagtgaaaa

SEQ ID NO: 596656 - DNA, 19 bp, Mus musculus
  siRNA target sequence for Prkdc (NM_011159.1,8159-8177).
ctccgagccaggcagatat

SEQ ID NO: 596657 - DNA, 19 bp, Mus musculus
  siRNA target sequence for Prkdc (NM_011159.1,8162-8180).
cgagccaggcagatattct

SEQ ID NO: 596658 - DNA, 19 bp, Mus musculus
  siRNA target sequence for Prkdc (NM_011159.1,8241-8259).
gggcctcatggaacaaaaa

SEQ ID NO: 596659 - DNA, 19 bp, Mus musculus
  siRNA target sequence for Prkdc (NM_011159.1,8243-8261).
gcctcatggaacaaaaact

SEQ ID NO: 596660 - DNA, 19 bp, Mus musculus
  siRNA target sequence for Prkdc (NM_011159.1,8305-8323).
caggttgttctgtacagaa

SEQ ID NO: 596661 - DNA, 19 bp, Mus musculus
  siRNA target sequence for Prkdc (NM_011159.1,8308-8326).
gttgttctgtacagaagtt

SEQ ID NO: 596662 - DNA, 19 bp, Mus musculus
  siRNA target sequence for Prkdc (NM_011159.1,8336-8354).
gcgatcttcctgatatcca

SEQ ID NO: 596663 - DNA, 19 bp, Mus musculus
  siRNA target sequence for Prkdc (NM_011159.1,8396-8414).
cccagaaagacccaataat

SEQ ID NO: 596664 - DNA, 19 bp, Mus musculus
  siRNA target sequence for Prkdc (NM_011159.1,8397-8415).
ccagaaagacccaataatt

SEQ ID NO: 596665 - DNA, 19 bp, Mus musculus
  siRNA target sequence for Prkdc (NM_011159.1,8406-8424).
cccaataattgcaaaacaa

SEQ ID NO: 596666 - DNA, 19 bp, Mus musculus
  siRNA target sequence for Prkdc (NM_011159.1,8408-8426).
caataattgcaaaacaact

SEQ ID NO: 596667 - DNA, 19 bp, Mus musculus
  siRNA target sequence for Prkdc (NM_011159.1,8518-8536).
gatttcaaccgcttcctta

SEQ ID NO: 596668 - DNA, 19 bp, Mus musculus
  siRNA target sequence for Prkdc (NM_011159.1,8523-8541).
caaccgcttccttaataca

SEQ ID NO: 596669 - DNA, 19 bp, Mus musculus
  siRNA target sequence for Prkdc (NM_011159.1,8526-8544).
ccgcttccttaatacaact

SEQ ID NO: 596670 - DNA, 19 bp, Mus musculus
  siRNA target sequence for Prkdc (NM_011159.1,8527-8545).
cgcttccttaatacaactt

SEQ ID NO: 596671 - DNA, 19 bp, Mus musculus
  siRNA target sequence for Prkdc (NM_011159.1,8528-8546).
gcttccttaatacaacttt

SEQ ID NO: 596672 - DNA, 19 bp, Mus musculus
  siRNA target sequence for Prkdc (NM_011159.1,8747-8765).
gcttgcctcccgatgttct

SEQ ID NO: 596673 - DNA, 19 bp, Mus musculus
  siRNA target sequence for Prkdc (NM_011159.1,8768-8786).
ggtggatggaacttgctaa

SEQ ID NO: 596674 - DNA, 19 bp, Mus musculus
  siRNA target sequence for Prkdc (NM_011159.1,8779-8797).
cttgctaaactctatcgtt

SEQ ID NO: 596675 - DNA, 19 bp, Mus musculus
  siRNA target sequence for Prkdc (NM_011159.1,8795-8813).
gttcgattggggagtatga

SEQ ID NO: 596676 - DNA, 19 bp, Mus musculus
  siRNA target sequence for Prkdc (NM_011159.1,8799-8817).
gattggggagtatgatgtt

SEQ ID NO: 596677 - DNA, 19 bp, Mus musculus
  siRNA target sequence for Prkdc (NM_011159.1,8815-8833).
gttctccgtggcattttta

SEQ ID NO: 596678 - DNA, 19 bp, Mus musculus
  siRNA target sequence for Prkdc (NM_011159.1,8859-8877).
cactcagaacgcactatta

SEQ ID NO: 596679 - DNA, 19 bp, Mus musculus
  siRNA target sequence for Prkdc (NM_011159.1,8878-8896).
gcagaagctagaagtgatt

SEQ ID NO: 596680 - DNA, 19 bp, Mus musculus
  siRNA target sequence for Prkdc (NM_011159.1,8881-8899).
gaagctagaagtgattatt

SEQ ID NO: 596681 - DNA, 19 bp, Mus musculus
  siRNA target sequence for Prkdc (NM_011159.1,8992-9010).
gcatcgcttgactgttaca

SEQ ID NO: 596682 - DNA, 19 bp, Mus musculus
  siRNA target sequence for Prkdc (NM_011159.1,9005-9023).
gttacaacaacctctctaa

SEQ ID NO: 596683 - DNA, 19 bp, Mus musculus
  siRNA target sequence for Prkdc (NM_011159.1,9015-9033).
cctctctaaatggaaagaa

SEQ ID NO: 596684 - DNA, 19 bp, Mus musculus
  siRNA target sequence for Prkdc (NM_011159.1,9031-9049).
gaacttgagtactgttcta

SEQ ID NO: 596685 - DNA, 19 bp, Mus musculus
  siRNA target sequence for Prkdc (NM_011159.1,9042-9060).
ctgttctacagtcaatata

SEQ ID NO: 596686 - DNA, 19 bp, Mus musculus
  siRNA target sequence for Prkdc (NM_011159.1,9072-9090).
ctctcttgacctaagtaaa

SEQ ID NO: 596687 - DNA, 19 bp, Mus musculus
  siRNA target sequence for Prkdc (NM_011159.1,9093-9111).
gtggagtgaaccattttat

SEQ ID NO: 596688 - DNA, 19 bp, Mus musculus
  siRNA target sequence for Prkdc (NM_011159.1,9119-9137).
cgtatctgccatatgtgat

SEQ ID NO: 596689 - DNA, 19 bp, Mus musculus
  siRNA target sequence for Prkdc (NM_011159.1,9133-9151).
gtgatccgtagcaaactaa

SEQ ID NO: 596690 - DNA, 19 bp, Mus musculus
  siRNA target sequence for Prkdc (NM_011159.1,9232-9250).
gtcctggagcttcagtata

SEQ ID NO: 596691 - DNA, 19 bp, Mus musculus
  siRNA target sequence for Prkdc (NM_011159.1,9234-9252).
cctggagcttcagtatagt

SEQ ID NO: 596692 - DNA, 19 bp, Mus musculus
  siRNA target sequence for Prkdc (NM_011159.1,9237-9255).
ggagcttcagtatagtcaa

SEQ ID NO: 596693 - DNA, 19 bp, Mus musculus
  siRNA target sequence for Prkdc (NM_011159.1,9298-9316).
gccacatactacattaaaa

SEQ ID NO: 596694 - DNA, 19 bp, Mus musculus
  siRNA target sequence for Prkdc (NM_011159.1,9374-9392).
gtagactcgccaagttaca

SEQ ID NO: 596695 - DNA, 19 bp, Mus musculus
  siRNA target sequence for Prkdc (NM_011159.1,9393-9411).
gtctgtacagactttagca

SEQ ID NO: 596696 - DNA, 19 bp, Mus musculus
  siRNA target sequence for Prkdc (NM_011159.1,9418-9436).
gaggagttcctaagtttta

SEQ ID NO: 596697 - DNA, 19 bp, Mus musculus
  siRNA target sequence for Prkdc (NM_011159.1,9420-9438).
ggagttcctaagttttata

SEQ ID NO: 596698 - DNA, 19 bp, Mus musculus
  siRNA target sequence for Prkdc (NM_011159.1,9498-9516).
cagcagatacccagatgtt

SEQ ID NO: 596699 - DNA, 19 bp, Mus musculus
  siRNA target sequence for Prkdc (NM_011159.1,9554-9572).
caaatcgctgcttctttct

SEQ ID NO: 596700 - DNA, 19 bp, Mus musculus
  siRNA target sequence for Prkdc (NM_011159.1,9663-9681).
cgagccaaaggaagatgtt

SEQ ID NO: 596701 - DNA, 19 bp, Mus musculus
  siRNA target sequence for Prkdc (NM_011159.1,9735-9753).
cgcctggaagcagagtaat

SEQ ID NO: 596702 - DNA, 19 bp, Mus musculus
  siRNA target sequence for Prkdc (NM_011159.1,9741-9759).
gaagcagagtaatttctca

SEQ ID NO: 596703 - DNA, 19 bp, Mus musculus
  siRNA target sequence for Prkdc (NM_011159.1,9880-9898).
cgggaacaagtcctcaata

SEQ ID NO: 596704 - DNA, 19 bp, Mus musculus
  siRNA target sequence for Prkdc (NM_011159.1,9914-9932).
cgctgttggatgaaagtga

SEQ ID NO: 596705 - DNA, 19 bp, Mus musculus
  siRNA target sequence for Prkdc (NM_011159.1,9915-9933).
gctgttggatgaaagtgat

SEQ ID NO: 596706 - DNA, 19 bp, Mus musculus
  siRNA target sequence for Prkdc (NM_011159.1,9991-10009).
ggcacaacttgcagaatca

SEQ ID NO: 596707 - DNA, 19 bp, Mus musculus
  siRNA target sequence for Prkdc (NM_011159.1,9992-10010).
gcacaacttgcagaatcat

SEQ ID NO: 596708 - DNA, 19 bp, Mus musculus
  siRNA target sequence for Prkdc (NM_011159.1,10328-10346).
cagcacttgtggtggaaaa

SEQ ID NO: 596709 - DNA, 19 bp, Mus musculus
  siRNA target sequence for Prkdc (NM_011159.1,10331-10349).
cacttgtggtggaaaaaat

SEQ ID NO: 596710 - DNA, 19 bp, Mus musculus
  siRNA target sequence for Prkdc (NM_011159.1,10350-10368).
gctgagagcattaaagtta

SEQ ID NO: 596711 - DNA, 19 bp, Mus musculus
  siRNA target sequence for Prkdc (NM_011159.1,10381-10399).
gccaggctgaaatttccta

SEQ ID NO: 596712 - DNA, 19 bp, Mus musculus
  siRNA target sequence for Prkdc (NM_011159.1,10385-10403).
ggctgaaatttcctagatt

SEQ ID NO: 596713 - DNA, 19 bp, Mus musculus
  siRNA target sequence for Prkdc (NM_011159.1,10386-10404).
gctgaaatttcctagatta

SEQ ID NO: 596714 - DNA, 19 bp, Mus musculus
  siRNA target sequence for Prkdc (NM_011159.1,10432-10450).
gagaccttaaacataatga

SEQ ID NO: 596715 - DNA, 19 bp, Mus musculus
  siRNA target sequence for Prkdc (NM_011159.1,10434-10452).
gaccttaaacataatgaca

SEQ ID NO: 596716 - DNA, 19 bp, Mus musculus
  siRNA target sequence for Prkdc (NM_011159.1,10531-10549).
gctattgcagtacaacata

SEQ ID NO: 596717 - DNA, 19 bp, Mus musculus
  siRNA target sequence for Prkdc (NM_011159.1,10582-10600).
gccattatctaccctttta

SEQ ID NO: 596718 - DNA, 19 bp, Mus musculus
  siRNA target sequence for Prkdc (NM_011159.1,10583-10601).
ccattatctacccttttat

SEQ ID NO: 596719 - DNA, 19 bp, Mus musculus
  siRNA target sequence for Prkdc (NM_011159.1,10637-10655).
cttctggtcataacaataa

SEQ ID NO: 596720 - DNA, 19 bp, Mus musculus
  siRNA target sequence for Prkdc (NM_011159.1,10690-10708).
cacggagaagtgattcaca

SEQ ID NO: 596721 - DNA, 19 bp, Mus musculus
  siRNA target sequence for Prkdc (NM_011159.1,10755-10773).
caaggactgggtttctgat

SEQ ID NO: 596722 - DNA, 19 bp, Mus musculus
  siRNA target sequence for Prkdc (NM_011159.1,10824-10842).
gttgtatgaaaggatgtat

SEQ ID NO: 596723 - DNA, 19 bp, Mus musculus
  siRNA target sequence for Prkdc (NM_011159.1,10881-10899).
ctttcggaggaggttcata

SEQ ID NO: 596724 - DNA, 19 bp, Mus musculus
  siRNA target sequence for Prkdc (NM_011159.1,10902-10920).
ggcgtttgggaaagaattt

SEQ ID NO: 596725 - DNA, 19 bp, Mus musculus
  siRNA target sequence for Prkdc (NM_011159.1,10946-10964).
ctaagctgcttacaatgaa

SEQ ID NO: 596726 - DNA, 19 bp, Mus musculus
  siRNA target sequence for Prkdc (NM_011159.1,10962-10980).
gaaggtcgatgacttttgt

SEQ ID NO: 596727 - DNA, 19 bp, Mus musculus
  siRNA target sequence for Prkdc (NM_011159.1,10966-10984).
gtcgatgacttttgtaaga

SEQ ID NO: 596728 - DNA, 19 bp, Mus musculus
  siRNA target sequence for Prkdc (NM_011159.1,10969-10987).
gatgacttttgtaagatca

SEQ ID NO: 596729 - DNA, 19 bp, Mus musculus
  siRNA target sequence for Prkdc (NM_011159.1,10986-11004).
cactggctcgctacttgta

SEQ ID NO: 596730 - DNA, 19 bp, Mus musculus
  siRNA target sequence for Prkdc (NM_011159.1,11127-11145).
caaaccactgcctgaatat

SEQ ID NO: 596731 - DNA, 19 bp, Mus musculus
  siRNA target sequence for Prkdc (NM_011159.1,11148-11166).
cgtgcggatctctggattt

SEQ ID NO: 596732 - DNA, 19 bp, Mus musculus
  siRNA target sequence for Prkdc (NM_011159.1,11167-11185).
gatgagcgggtaaaagtga

SEQ ID NO: 596733 - DNA, 19 bp, Mus musculus
  siRNA target sequence for Prkdc (NM_011159.1,11199-11217).
gaagccaaagcgcattgtt

SEQ ID NO: 596734 - DNA, 19 bp, Mus musculus
  siRNA target sequence for Prkdc (NM_011159.1,11202-11220).
gccaaagcgcattgttatt

SEQ ID NO: 596735 - DNA, 19 bp, Mus musculus
  siRNA target sequence for Prkdc (NM_011159.1,11224-11242).
ggccatgatgaaaaggaat

SEQ ID NO: 596736 - DNA, 19 bp, Mus musculus
  siRNA target sequence for Prkdc (NM_011159.1,11244-11262).
cccgttcctggtaaaaggt

SEQ ID NO: 596737 - DNA, 19 bp, Mus musculus
  siRNA target sequence for Prkdc (NM_011159.1,11286-11304).
gcgcattgagcagatcttt

SEQ ID NO: 596738 - DNA, 19 bp, Mus musculus
  siRNA target sequence for Prkdc (NM_011159.1,11380-11398).
gtgccaatgacctctagat

SEQ ID NO: 596739 - DNA, 19 bp, Mus musculus
  siRNA target sequence for Prkdc (NM_011159.1,11382-11400).
gccaatgacctctagatta

SEQ ID NO: 596740 - DNA, 19 bp, Mus musculus
  siRNA target sequence for Prkdc (NM_011159.1,11388-11406).
gacctctagattaggatta

SEQ ID NO: 596741 - DNA, 19 bp, Mus musculus
  siRNA target sequence for Prkdc (NM_011159.1,11390-11408).
cctctagattaggattaat

SEQ ID NO: 596742 - DNA, 19 bp, Mus musculus
  siRNA target sequence for Prkdc (NM_011159.1,11391-11409).
ctctagattaggattaatt

SEQ ID NO: 596743 - DNA, 19 bp, Mus musculus
  siRNA target sequence for Prkdc (NM_011159.1,11430-11448).
gaccttgaaggatcttctt

SEQ ID NO: 596744 - DNA, 19 bp, Mus musculus
  siRNA target sequence for Prkdc (NM_011159.1,11467-11485).
gaggagaaagtggctaata

SEQ ID NO: 596745 - DNA, 19 bp, Mus musculus
  siRNA target sequence for Prkdc (NM_011159.1,11472-11490).
gaaagtggctaataacagt

SEQ ID NO: 596746 - DNA, 19 bp, Mus musculus
  siRNA target sequence for Prkdc (NM_011159.1,11500-11518).
gcgccgatccgtgactata

SEQ ID NO: 596747 - DNA, 19 bp, Mus musculus
  siRNA target sequence for Prkdc (NM_011159.1,11501-11519).
cgccgatccgtgactataa

SEQ ID NO: 596748 - DNA, 19 bp, Mus musculus
  siRNA target sequence for Prkdc (NM_011159.1,11502-11520).
gccgatccgtgactataaa

SEQ ID NO: 596749 - DNA, 19 bp, Mus musculus
  siRNA target sequence for Prkdc (NM_011159.1,11504-11522).
cgatccgtgactataaaga

SEQ ID NO: 596750 - DNA, 19 bp, Mus musculus
  siRNA target sequence for Prkdc (NM_011159.1,11555-11573).
ctggagcctatgtgctaat

SEQ ID NO: 596751 - DNA, 19 bp, Mus musculus
  siRNA target sequence for Prkdc (NM_011159.1,11557-11575).
ggagcctatgtgctaatgt

SEQ ID NO: 596752 - DNA, 19 bp, Mus musculus
  siRNA target sequence for Prkdc (NM_011159.1,11558-11576).
gagcctatgtgctaatgta

SEQ ID NO: 596753 - DNA, 19 bp, Mus musculus
  siRNA target sequence for Prkdc (NM_011159.1,11560-11578).
gcctatgtgctaatgtaca

SEQ ID NO: 596754 - DNA, 19 bp, Mus musculus
  siRNA target sequence for Prkdc (NM_011159.1,11580-11598).
ccgagctaaccgtacagaa

SEQ ID NO: 596755 - DNA, 19 bp, Mus musculus
  siRNA target sequence for Prkdc (NM_011159.1,11585-11603).
ctaaccgtacagaaacagt

SEQ ID NO: 596756 - DNA, 19 bp, Mus musculus
  siRNA target sequence for Prkdc (NM_011159.1,11632-11650).
gtgccgcctgacctcttaa

SEQ ID NO: 596757 - DNA, 19 bp, Mus musculus
  siRNA target sequence for Prkdc (NM_011159.1,11801-11819).
caggcagtgtgattggaat

SEQ ID NO: 596758 - DNA, 19 bp, Mus musculus
  siRNA target sequence for Prkdc (NM_011159.1,11840-11858).
gatcagctactcagtttct

SEQ ID NO: 596759 - DNA, 19 bp, Mus musculus
  siRNA target sequence for Prkdc (NM_011159.1,11885-11903).
gtctaacccgccaatttgt

SEQ ID NO: 596760 - DNA, 19 bp, Mus musculus
  siRNA target sequence for Prkdc (NM_011159.1,11996-12014).
ctgacaccatggaaatttt

SEQ ID NO: 596761 - DNA, 19 bp, Mus musculus
  siRNA target sequence for Prkdc (NM_011159.1,12029-12047).
cctttgattggaagagttt

SEQ ID NO: 596762 - DNA, 19 bp, Mus musculus
  siRNA target sequence for Prkdc (NM_011159.1,12097-12115).
gtaacggaaaagaattggt

SEQ ID NO: 596763 - DNA, 19 bp, Mus musculus
  siRNA target sequence for Prkdc (NM_011159.1,12108-12126).
gaattggtatccacaacat

SEQ ID NO: 596764 - DNA, 19 bp, Mus musculus
  siRNA target sequence for Prkdc (NM_011159.1,12114-12132).
gtatccacaacataaaata

SEQ ID NO: 596765 - DNA, 19 bp, Mus musculus
  siRNA target sequence for Prkdc (NM_011159.1,12133-12151).
cgctatgctaagagaaagt

SEQ ID NO: 596766 - DNA, 19 bp, Mus musculus
  siRNA target sequence for Prkdc (NM_011159.1,12158-12176).
gggccaacccagctgttat

SEQ ID NO: 596767 - DNA, 19 bp, Mus musculus
  siRNA target sequence for Prkdc (NM_011159.1,12208-12226).
gcttcatccgcctttagga

SEQ ID NO: 596768 - DNA, 19 bp, Mus musculus
  siRNA target sequence for Prkdc (NM_011159.1,12216-12234).
cgcctttaggagttataca

SEQ ID NO: 596769 - DNA, 19 bp, Mus musculus
  siRNA target sequence for Prkdc (NM_011159.1,12249-12267).
caacagagactacaacatt

SEQ ID NO: 596770 - DNA, 19 bp, Mus musculus
  siRNA target sequence for Prkdc (NM_011159.1,12281-12299).
cagagagtgggctttcaga

SEQ ID NO: 596771 - DNA, 19 bp, Mus musculus
  siRNA target sequence for Fastk (NM_023229.1,187-205).
cggggaccggccttttgga

SEQ ID NO: 596772 - DNA, 19 bp, Mus musculus
  siRNA target sequence for Fastk (NM_023229.1,818-836).
ccctttgggaggttgaact

SEQ ID NO: 596773 - DNA, 19 bp, Mus musculus
  siRNA target sequence for Fastk (NM_023229.1,819-837).
cctttgggaggttgaacta

SEQ ID NO: 596774 - DNA, 19 bp, Mus musculus
  siRNA target sequence for Fastk (NM_023229.1,1192-1210).
ggggctgcgccagctatta

SEQ ID NO: 596775 - DNA, 19 bp, Mus musculus
  siRNA target sequence for Fastk (NM_023229.1,1202-1220).
cagctattaggggaagaaa

SEQ ID NO: 596776 - DNA, 19 bp, Mus musculus
  siRNA target sequence for Fastk (NM_023229.1,1352-1370).
caggaccaggcaaacttta

SEQ ID NO: 596777 - DNA, 19 bp, Mus musculus
  siRNA target sequence for Fastk (NM_023229.1,1507-1525).
cctaccgctgccatttgaa

SEQ ID NO: 596778 - DNA, 19 bp, Mus musculus
  siRNA target sequence for Wif1 (NM_011915.1,550-568).
gggtagcagcatttgaagt

SEQ ID NO: 596779 - DNA, 19 bp, Mus musculus
  siRNA target sequence for Wif1 (NM_011915.1,564-582).
gaagtgaatgtgattgtca

SEQ ID NO: 596780 - DNA, 19 bp, Mus musculus
  siRNA target sequence for Wif1 (NM_011915.1,662-680).
cggagggtgtcgaaatgga

SEQ ID NO: 596781 - DNA, 19 bp, Mus musculus
  siRNA target sequence for Wif1 (NM_011915.1,672-690).
cgaaatggaggcttttgta

SEQ ID NO: 596782 - DNA, 19 bp, Mus musculus
  siRNA target sequence for Wif1 (NM_011915.1,754-772).
gcataccccgatgtatgaa

SEQ ID NO: 596783 - DNA, 19 bp, Mus musculus
  siRNA target sequence for Wif1 (NM_011915.1,824-842).
cggtgtcaactgtgacaaa

SEQ ID NO: 596784 - DNA, 19 bp, Mus musculus
  siRNA target sequence for Wif1 (NM_011915.1,851-869).
ctcaaccacctgctttaat

SEQ ID NO: 596785 - DNA, 19 bp, Mus musculus
  siRNA target sequence for Wif1 (NM_011915.1,967-985).
gaggtaaatgcattggtaa

SEQ ID NO: 596786 - DNA, 19 bp, Mus musculus
  siRNA target sequence for Wif1 (NM_011915.1,969-987).
ggtaaatgcattggtaaaa

SEQ ID NO: 596787 - DNA, 19 bp, Mus musculus
  siRNA target sequence for Wif1 (NM_011915.1,994-1012).
gtaagtgcccgaaaggtta

SEQ ID NO: 596788 - DNA, 19 bp, Mus musculus
  siRNA target sequence for Wif1 (NM_011915.1,998-1016).
gtgcccgaaaggttaccaa

SEQ ID NO: 596789 - DNA, 19 bp, Mus musculus
  siRNA target sequence for Wif1 (NM_011915.1,1185-1203).
cgacacacgccttcactta

SEQ ID NO: 596790 - DNA, 19 bp, Mus musculus
  siRNA target sequence for Wif1 (NM_011915.1,1186-1204).
gacacacgccttcacttaa

SEQ ID NO: 596791 - DNA, 19 bp, Mus musculus
  siRNA target sequence for Wif1 (NM_011915.1,1222-1240).
gggatccacctgaatccaa

SEQ ID NO: 596792 - DNA, 19 bp, Mus musculus
  siRNA target sequence for Wif1 (NM_011915.1,1223-1241).
ggatccacctgaatccaat

SEQ ID NO: 596793 - DNA, 19 bp, Mus musculus
  siRNA target sequence for Wif1 (NM_011915.1,1228-1246).
cacctgaatccaattacat

SEQ ID NO: 596794 - DNA, 19 bp, Mus musculus
  siRNA target sequence for Wif1 (NM_011915.1,1230-1248).
cctgaatccaattacatct

SEQ ID NO: 596795 - DNA, 19 bp, Mus musculus
  siRNA target sequence for 6430546I09 (NM_172805.1,865-883).
caggcgctccagtgaatca

SEQ ID NO: 596796 - DNA, 19 bp, Mus musculus
  siRNA target sequence for 6430546I09 (NM_172805.1,911-929).
gtggactggcctgtagttt

SEQ ID NO: 596797 - DNA, 19 bp, Mus musculus
  siRNA target sequence for 6430546I09 (NM_172805.1,913-931).
ggactggcctgtagtttat

SEQ ID NO: 596798 - DNA, 19 bp, Mus musculus
  siRNA target sequence for 6430546I09 (NM_172805.1,914-932).
gactggcctgtagtttata

SEQ ID NO: 596799 - DNA, 19 bp, Mus musculus
  siRNA target sequence for 6430546I09 (NM_172805.1,1014-1032).
gagaactgaccgacaagaa

SEQ ID NO: 596800 - DNA, 19 bp, Mus musculus
  siRNA target sequence for 6430546I09 (NM_172805.1,1016-1034).
gaactgaccgacaagaaga

SEQ ID NO: 596801 - DNA, 19 bp, Mus musculus
  siRNA target sequence for 6430546I09 (NM_172805.1,1061-1079).
gacaactacgagtcaaact

SEQ ID NO: 596802 - DNA, 19 bp, Mus musculus
  siRNA target sequence for 6430546I09 (NM_172805.1,1063-1081).
caactacgagtcaaactgt

SEQ ID NO: 596803 - DNA, 19 bp, Mus musculus
  siRNA target sequence for 6430546I09 (NM_172805.1,1066-1084).
ctacgagtcaaactgtttt

SEQ ID NO: 596804 - DNA, 19 bp, Mus musculus
  siRNA target sequence for 6430546I09 (NM_172805.1,1069-1087).
cgagtcaaactgttttgaa

SEQ ID NO: 596805 - DNA, 19 bp, Mus musculus
  siRNA target sequence for 6430546I09 (NM_172805.1,1080-1098).
gttttgaagttcttctgta

SEQ ID NO: 596806 - DNA, 19 bp, Mus musculus
  siRNA target sequence for 6430546I09 (NM_172805.1,1108-1126).
ccgtacccctgtttggttt

SEQ ID NO: 596807 - DNA, 19 bp, Mus musculus
  siRNA target sequence for 6430546I09 (NM_172805.1,1109-1127).
cgtacccctgtttggtttt

SEQ ID NO: 596808 - DNA, 19 bp, Mus musculus
  siRNA target sequence for 6430546I09 (NM_172805.1,1110-1128).
gtacccctgtttggtttta

SEQ ID NO: 596809 - DNA, 19 bp, Mus musculus
  siRNA target sequence for 6430546I09 (NM_172805.1,1129-1147).
catgcaaatcgcaccaata

SEQ ID NO: 596810 - DNA, 19 bp, Mus musculus
  siRNA target sequence for 6430546I09 (NM_172805.1,1133-1151).
caaatcgcaccaataagaa

SEQ ID NO: 596811 - DNA, 19 bp, Mus musculus
  siRNA target sequence for 6430546I09 (NM_172805.1,1185-1203).
cattcaaggacattacact

SEQ ID NO: 596812 - DNA, 19 bp, Mus musculus
  siRNA target sequence for 6430546I09 (NM_172805.1,1223-1241).
gatgactcaacgaaaggtt

SEQ ID NO: 596813 - DNA, 19 bp, Mus musculus
  siRNA target sequence for 6430546I09 (NM_172805.1,1261-1279).
gacacgggctttgacaaat

SEQ ID NO: 596814 - DNA, 19 bp, Mus musculus
  siRNA target sequence for 6430546I09 (NM_172805.1,1273-1291).
gacaaatagccgaagtgtt

SEQ ID NO: 596815 - DNA, 19 bp, Mus musculus
  siRNA target sequence for 6430546I09 (NM_172805.1,1275-1293).
caaatagccgaagtgtttt

SEQ ID NO: 596816 - DNA, 19 bp, Mus musculus
  siRNA target sequence for 6430546I09 (NM_172805.1,1298-1316).
cagcttacaccaatgaata

SEQ ID NO: 596817 - DNA, 19 bp, Mus musculus
  siRNA target sequence for 6430546I09 (NM_172805.1,1300-1318).
gcttacaccaatgaataaa

SEQ ID NO: 596818 - DNA, 19 bp, Mus musculus
  siRNA target sequence for 6430546I09 (NM_172805.1,1404-1422).
caaagacgccaccacatat

SEQ ID NO: 596819 - DNA, 19 bp, Mus musculus
  siRNA target sequence for 6430546I09 (NM_172805.1,1410-1428).
cgccaccacatatcatctt

SEQ ID NO: 596820 - DNA, 19 bp, Mus musculus
  siRNA target sequence for 6430546I09 (NM_172805.1,1411-1429).
gccaccacatatcatctta

SEQ ID NO: 596821 - DNA, 19 bp, Mus musculus
  siRNA target sequence for 6430546I09 (NM_172805.1,1413-1431).
caccacatatcatcttaca

SEQ ID NO: 596822 - DNA, 19 bp, Mus musculus
  siRNA target sequence for 6430546I09 (NM_172805.1,1415-1433).
ccacatatcatcttacact

SEQ ID NO: 596823 - DNA, 19 bp, Mus musculus
  siRNA target sequence for 6430546I09 (NM_172805.1,1416-1434).
cacatatcatcttacacta

SEQ ID NO: 596824 - DNA, 19 bp, Mus musculus
  siRNA target sequence for 6430546I09 (NM_172805.1,1418-1436).
catatcatcttacactatt

SEQ ID NO: 596825 - DNA, 19 bp, Mus musculus
  siRNA target sequence for 6430546I09 (NM_172805.1,1452-1470).
cttgggattgggtgatttt

SEQ ID NO: 596826 - DNA, 19 bp, Mus musculus
  siRNA target sequence for 6430546I09 (NM_172805.1,1455-1473).
gggattgggtgattttaat

SEQ ID NO: 596827 - DNA, 19 bp, Mus musculus
  siRNA target sequence for 6430546I09 (NM_172805.1,1495-1513).
catggttccttacaatgtt

SEQ ID NO: 596828 - DNA, 19 bp, Mus musculus
  siRNA target sequence for 6430546I09 (NM_172805.1,1503-1521).
cttacaatgtttctttcaa

SEQ ID NO: 596829 - DNA, 19 bp, Mus musculus
  siRNA target sequence for 6430546I09 (NM_172805.1,1560-1578).
gtgtggtggacgtgatttt

SEQ ID NO: 596830 - DNA, 19 bp, Mus musculus
  siRNA target sequence for 6430546I09 (NM_172805.1,1643-1661).
gacccgaagcttataagga

SEQ ID NO: 596831 - DNA, 19 bp, Mus musculus
  siRNA target sequence for 6430546I09 (NM_172805.1,1651-1669).
gcttataaggatgaactat

SEQ ID NO: 596832 - DNA, 19 bp, Mus musculus
  siRNA target sequence for 6430546I09 (NM_172805.1,1701-1719).
cttgtttaccttatgacat

SEQ ID NO: 596833 - DNA, 19 bp, Mus musculus
  siRNA target sequence for 6430546I09 (NM_172805.1,1704-1722).
gtttaccttatgacatcat

SEQ ID NO: 596834 - DNA, 19 bp, Mus musculus
  siRNA target sequence for 6430546I09 (NM_172805.1,1809-1827).
ctaggaaactggaccatta

SEQ ID NO: 596835 - DNA, 19 bp, Mus musculus
  siRNA target sequence for 6430546I09 (NM_172805.1,1812-1830).
ggaaactggaccattacct

SEQ ID NO: 596836 - DNA, 19 bp, Mus musculus
  siRNA target sequence for 6430546I09 (NM_172805.1,1819-1837).
ggaccattacctggaatat

SEQ ID NO: 596837 - DNA, 19 bp, Mus musculus
  siRNA target sequence for 6430546I09 (NM_172805.1,2000-2018).
ccatatcgctacaatacga

SEQ ID NO: 596838 - DNA, 19 bp, Mus musculus
  siRNA target sequence for 6430546I09 (NM_172805.1,2091-2109).
gccttacaaccataggatt

SEQ ID NO: 596839 - DNA, 19 bp, Mus musculus
  siRNA target sequence for 6430546I09 (NM_172805.1,2092-2110).
ccttacaaccataggattt

SEQ ID NO: 596840 - DNA, 19 bp, Mus musculus
  siRNA target sequence for 6430546I09 (NM_172805.1,2164-2182).
gatggtcggctctcttctt

SEQ ID NO: 596841 - DNA, 19 bp, Mus musculus
  siRNA target sequence for 6430546I09 (NM_172805.1,2170-2188).
cggctctcttctttatgca

SEQ ID NO: 596842 - DNA, 19 bp, Mus musculus
  siRNA target sequence for 6430546I09 (NM_172805.1,2233-2251).
caacaccaaccgttaccat

SEQ ID NO: 596843 - DNA, 19 bp, Mus musculus
  siRNA target sequence for 6430546I09 (NM_172805.1,2238-2256).
ccaaccgttaccatgagat

SEQ ID NO: 596844 - DNA, 19 bp, Mus musculus
  siRNA target sequence for 6430546I09 (NM_172805.1,2270-2288).
cgagatttcctgaaattat

SEQ ID NO: 596845 - DNA, 19 bp, Mus musculus
  siRNA target sequence for 6430546I09 (NM_172805.1,2271-2289).
gagatttcctgaaattata

SEQ ID NO: 596846 - DNA, 19 bp, Mus musculus
  siRNA target sequence for 6430546I09 (NM_172805.1,2296-2314).
cccaaaaggccttagtgaa

SEQ ID NO: 596847 - DNA, 19 bp, Mus musculus
  siRNA target sequence for 6430546I09 (NM_172805.1,2312-2330).
gaacgagtgatggattata

SEQ ID NO: 596848 - DNA, 19 bp, Mus musculus
  siRNA target sequence for 6430546I09 (NM_172805.1,2324-2342).
gattatattgtctcaacat

SEQ ID NO: 596849 - DNA, 19 bp, Mus musculus
  siRNA target sequence for 6430546I09 (NM_172805.1,2333-2351).
gtctcaacatggtcaatgt

SEQ ID NO: 596850 - DNA, 19 bp, Mus musculus
  siRNA target sequence for 6430546I09 (NM_172805.1,2423-2441).
ctgaaccggaaggttttta

SEQ ID NO: 596851 - DNA, 19 bp, Mus musculus
  siRNA target sequence for 6430546I09 (NM_172805.1,2498-2516).
gagttccaaaccattcact

SEQ ID NO: 596852 - DNA, 19 bp, Mus musculus
  siRNA target sequence for 6430546I09 (NM_172805.1,2523-2541).
ctggggacctgatttacca

SEQ ID NO: 596853 - DNA, 19 bp, Mus musculus
  siRNA target sequence for 6430546I09 (NM_172805.1,2608-2626).
ggaggtggtggccatttta

SEQ ID NO: 596854 - DNA, 19 bp, Mus musculus
  siRNA target sequence for 6430546I09 (NM_172805.1,2749-2767).
ggtccttgacttctataca

SEQ ID NO: 596855 - DNA, 19 bp, Mus musculus
  siRNA target sequence for 6430546I09 (NM_172805.1,2797-2815).
cactctcacttgcaatcta

SEQ ID NO: 596856 - DNA, 19 bp, Mus musculus
  siRNA target sequence for 6430546I09 (NM_172805.1,2822-2840).
cggatcatcttccgtaaaa

SEQ ID NO: 596857 - DNA, 19 bp, Mus musculus
  siRNA target sequence for 6430546I09 (NM_172805.1,2824-2842).
gatcatcttccgtaaaatt

SEQ ID NO: 596858 - DNA, 19 bp, Mus musculus
  siRNA target sequence for 6430546I09 (NM_172805.1,2827-2845).
catcttccgtaaaattagt

SEQ ID NO: 596859 - DNA, 19 bp, Mus musculus
  siRNA target sequence for 6430546I09 (NM_172805.1,3061-3079).
ggtcaccgtatcacagatt

SEQ ID NO: 596860 - DNA, 19 bp, Mus musculus
  siRNA target sequence for 6430546I09 (NM_172805.1,3062-3080).
gtcaccgtatcacagatta

SEQ ID NO: 596861 - DNA, 19 bp, Mus musculus
  siRNA target sequence for 6430546I09 (NM_172805.1,3093-3111).
cgtctctggcgtatgtgaa

SEQ ID NO: 596862 - DNA, 19 bp, Mus musculus
  siRNA target sequence for 6430546I09 (NM_172805.1,3114-3132).
ccagcgagtctcttaagca

SEQ ID NO: 596863 - DNA, 19 bp, Mus musculus
  siRNA target sequence for 6430546I09 (NM_172805.1,3171-3189).
gcgctgaacccaaatgtct

SEQ ID NO: 596864 - DNA, 19 bp, Mus musculus
  siRNA target sequence for 6430546I09 (NM_172805.1,3366-3384).
ccaagaaccccttaaggaa

SEQ ID NO: 596865 - DNA, 19 bp, Mus musculus
  siRNA target sequence for 6430546I09 (NM_172805.1,3367-3385).
caagaaccccttaaggaaa

SEQ ID NO: 596866 - DNA, 19 bp, Mus musculus
  siRNA target sequence for 6430546I09 (NM_172805.1,3402-3420).
gtgggattacaaaaagtga

SEQ ID NO: 596867 - DNA, 19 bp, Mus musculus
  siRNA target sequence for 6430546I09 (NM_172805.1,3417-3435).
gtgaccttcgtttggataa

SEQ ID NO: 596868 - DNA, 19 bp, Mus musculus
  siRNA target sequence for 6430546I09 (NM_172805.1,3445-3463).
ggcccgaagtcctctagaa

SEQ ID NO: 596869 - DNA, 19 bp, Mus musculus
  siRNA target sequence for 6430546I09 (NM_172805.1,3509-3527).
cccgagcaggccttacaaa

SEQ ID NO: 596870 - DNA, 19 bp, Mus musculus
  siRNA target sequence for 6430546I09 (NM_172805.1,3572-3590).
ctgctaagctgcagaatga

SEQ ID NO: 596871 - DNA, 19 bp, Mus musculus
  siRNA target sequence for 6430546I09 (NM_172805.1,3574-3592).
gctaagctgcagaatgact

SEQ ID NO: 596872 - DNA, 19 bp, Mus musculus
  siRNA target sequence for 6430546I09 (NM_172805.1,3682-3700).
ccaagtacctccccaaata

SEQ ID NO: 596873 - DNA, 19 bp, Mus musculus
  siRNA target sequence for 6430546I09 (NM_172805.1,3686-3704).
gtacctccccaaataccat

SEQ ID NO: 596874 - DNA, 19 bp, Mus musculus
  siRNA target sequence for 6430546I09 (NM_172805.1,3732-3750).
ctgagtcacccgaatctga

SEQ ID NO: 596875 - DNA, 19 bp, Mus musculus
  siRNA target sequence for 6430546I09 (NM_172805.1,3736-3754).
gtcacccgaatctgacaaa

SEQ ID NO: 596876 - DNA, 19 bp, Mus musculus
  siRNA target sequence for 6430546I09 (NM_172805.1,3738-3756).
cacccgaatctgacaaaga

SEQ ID NO: 596877 - DNA, 19 bp, Mus musculus
  siRNA target sequence for 6430546I09 (NM_172805.1,3747-3765).
ctgacaaagacgaaatcaa

SEQ ID NO: 596878 - DNA, 19 bp, Mus musculus
  siRNA target sequence for 6430546I09 (NM_172805.1,3749-3767).
gacaaagacgaaatcaact

SEQ ID NO: 596879 - DNA, 19 bp, Mus musculus
  siRNA target sequence for Kcnh2 (NM_013569.1,398-416).
gccagagccgcaagttcat

SEQ ID NO: 596880 - DNA, 19 bp, Mus musculus
  siRNA target sequence for Kcnh2 (NM_013569.1,400-418).
cagagccgcaagttcatca

SEQ ID NO: 596881 - DNA, 19 bp, Mus musculus
  siRNA target sequence for Kcnh2 (NM_013569.1,615-633).
cgccttctaccggaaagat

SEQ ID NO: 596882 - DNA, 19 bp, Mus musculus
  siRNA target sequence for Kcnh2 (NM_013569.1,663-681).
ggtacccgtgaagaatgaa

SEQ ID NO: 596883 - DNA, 19 bp, Mus musculus
  siRNA target sequence for Kcnh2 (NM_013569.1,702-720).
catcctcaactttgaagta

SEQ ID NO: 596884 - DNA, 19 bp, Mus musculus
  siRNA target sequence for Kcnh2 (NM_013569.1,1178-1196).
catcatccgcggatgacat

SEQ ID NO: 596885 - DNA, 19 bp, Mus musculus
  siRNA target sequence for Kcnh2 (NM_013569.1,1181-1199).
catccgcggatgacattga

SEQ ID NO: 596886 - DNA, 19 bp, Mus musculus
  siRNA target sequence for Kcnh2 (NM_013569.1,1267-1285).
cgcagtggcctgcttaact

SEQ ID NO: 596887 - DNA, 19 bp, Mus musculus
  siRNA target sequence for Kcnh2 (NM_013569.1,1306-1324).
gtacgctaccgaaccatta

SEQ ID NO: 596888 - DNA, 19 bp, Mus musculus
  siRNA target sequence for Kcnh2 (NM_013569.1,1309-1327).
cgctaccgaaccattagca

SEQ ID NO: 596889 - DNA, 19 bp, Mus musculus
  siRNA target sequence for Kcnh2 (NM_013569.1,1310-1328).
gctaccgaaccattagcaa

SEQ ID NO: 596890 - DNA, 19 bp, Mus musculus
  siRNA target sequence for Kcnh2 (NM_013569.1,1314-1332).
ccgaaccattagcaagata

SEQ ID NO: 596891 - DNA, 19 bp, Mus musculus
  siRNA target sequence for Kcnh2 (NM_013569.1,1326-1344).
caagataccccaaatcact

SEQ ID NO: 596892 - DNA, 19 bp, Mus musculus
  siRNA target sequence for Kcnh2 (NM_013569.1,1334-1352).
cccaaatcactctcaactt

SEQ ID NO: 596893 - DNA, 19 bp, Mus musculus
  siRNA target sequence for Kcnh2 (NM_013569.1,1335-1353).
ccaaatcactctcaacttt

SEQ ID NO: 596894 - DNA, 19 bp, Mus musculus
  siRNA target sequence for Kcnh2 (NM_013569.1,1391-1409).
ccagtgaccgggagattat

SEQ ID NO: 596895 - DNA, 19 bp, Mus musculus
  siRNA target sequence for Kcnh2 (NM_013569.1,1392-1410).
cagtgaccgggagattata

SEQ ID NO: 596896 - DNA, 19 bp, Mus musculus
  siRNA target sequence for Kcnh2 (NM_013569.1,1404-1422).
gattatagcacccaagata

SEQ ID NO: 596897 - DNA, 19 bp, Mus musculus
  siRNA target sequence for Kcnh2 (NM_013569.1,1707-1725).
cgtggacatcatgttcatt

SEQ ID NO: 596898 - DNA, 19 bp, Mus musculus
  siRNA target sequence for Kcnh2 (NM_013569.1,1796-1814).
gcattgctgtgcactactt

SEQ ID NO: 596899 - DNA, 19 bp, Mus musculus
  siRNA target sequence for Kcnh2 (NM_013569.1,1891-1909).
ctgatcgggctgctgaaaa

SEQ ID NO: 596900 - DNA, 19 bp, Mus musculus
  siRNA target sequence for Kcnh2 (NM_013569.1,1893-1911).
gatcgggctgctgaaaact

SEQ ID NO: 596901 - DNA, 19 bp, Mus musculus
  siRNA target sequence for Kcnh2 (NM_013569.1,2588-2606).
gggcgctggctatgaagtt

SEQ ID NO: 596902 - DNA, 19 bp, Mus musculus
  siRNA target sequence for Kcnh2 (NM_013569.1,2750-2768).
gagagcctctgaacctata

SEQ ID NO: 596903 - DNA, 19 bp, Mus musculus
  siRNA target sequence for Kcnh2 (NM_013569.1,2917-2935).
cttcgagataccaacatga

SEQ ID NO: 596904 - DNA, 19 bp, Mus musculus
  siRNA target sequence for Kcnh2 (NM_013569.1,2962-2980).
ctagagagcggctttaaca

SEQ ID NO: 596905 - DNA, 19 bp, Mus musculus
  siRNA target sequence for Kcnh2 (NM_013569.1,2983-3001).
caacgcaagcgcaaactgt

SEQ ID NO: 596906 - DNA, 19 bp, Mus musculus
  siRNA target sequence for Kcnh2 (NM_013569.1,2987-3005).
gcaagcgcaaactgtcatt

SEQ ID NO: 596907 - DNA, 19 bp, Mus musculus
  siRNA target sequence for Kcnh2 (NM_013569.1,3273-3291).
gaaaagtgacacctgtaat

SEQ ID NO: 596908 - DNA, 19 bp, Mus musculus
  siRNA target sequence for Kcnh2 (NM_013569.1,3309-3327).
ctctggggtgtccaatatt

SEQ ID NO: 596909 - DNA, 19 bp, Mus musculus
  siRNA target sequence for Kcnh2 (NM_013569.1,3311-3329).
ctggggtgtccaatatttt

SEQ ID NO: 596910 - DNA, 19 bp, Mus musculus
  siRNA target sequence for Kcnh2 (NM_013569.1,3403-3421).
ctcaacatccccttgtcta

SEQ ID NO: 596911 - DNA, 19 bp, Mus musculus
  siRNA target sequence for Kcnh2 (NM_013569.1,3602-3620).
cttccgcatcccctttgtt

SEQ ID NO: 596912 - DNA, 19 bp, Mus musculus
  siRNA target sequence for Kcnh2 (NM_013569.1,3647-3665).
ccctggactcgctttctca

SEQ ID NO: 596913 - DNA, 19 bp, Mus musculus
  siRNA target sequence for 5330434F23Rik (NM_181414.2,101-119).
cggagaagttccactacat

SEQ ID NO: 596914 - DNA, 19 bp, Mus musculus
  siRNA target sequence for 5330434F23Rik (NM_181414.2,103-121).
gagaagttccactacatct

SEQ ID NO: 596915 - DNA, 19 bp, Mus musculus
  siRNA target sequence for 5330434F23Rik (NM_181414.2,208-226).
gaagatcccatgttaaagt

SEQ ID NO: 596916 - DNA, 19 bp, Mus musculus
  siRNA target sequence for 5330434F23Rik (NM_181414.2,321-339).
ctacaaggcgtttagtaca

SEQ ID NO: 596917 - DNA, 19 bp, Mus musculus
  siRNA target sequence for 5330434F23Rik (NM_181414.2,324-342).
caaggcgtttagtacaaga

SEQ ID NO: 596918 - DNA, 19 bp, Mus musculus
  siRNA target sequence for 5330434F23Rik (NM_181414.2,350-368).
ggaacgagtggctgaaact

SEQ ID NO: 596919 - DNA, 19 bp, Mus musculus
  siRNA target sequence for 5330434F23Rik (NM_181414.2,400-418).
gcccaagtggccttgacta

SEQ ID NO: 596920 - DNA, 19 bp, Mus musculus
  siRNA target sequence for 5330434F23Rik (NM_181414.2,402-420).
ccaagtggccttgactata

SEQ ID NO: 596921 - DNA, 19 bp, Mus musculus
  siRNA target sequence for 5330434F23Rik (NM_181414.2,403-421).
caagtggccttgactatat

SEQ ID NO: 596922 - DNA, 19 bp, Mus musculus
  siRNA target sequence for 5330434F23Rik (NM_181414.2,471-489).
gtcgctctttggaaaatat

SEQ ID NO: 596923 - DNA, 19 bp, Mus musculus
  siRNA target sequence for 5330434F23Rik (NM_181414.2,491-509).
gcatgtttcgccaaggaat

SEQ ID NO: 596924 - DNA, 19 bp, Mus musculus
  siRNA target sequence for 5330434F23Rik (NM_181414.2,495-513).
gtttcgccaaggaatgcat

SEQ ID NO: 596925 - DNA, 19 bp, Mus musculus
  siRNA target sequence for 5330434F23Rik (NM_181414.2,547-565).
ggttctgaacctacaagaa

SEQ ID NO: 596926 - DNA, 19 bp, Mus musculus
  siRNA target sequence for 5330434F23Rik (NM_181414.2,587-605).
cactgtcagaagatcagat

SEQ ID NO: 596927 - DNA, 19 bp, Mus musculus
  siRNA target sequence for 5330434F23Rik (NM_181414.2,699-717).
gataaatgagagtgagaaa

SEQ ID NO: 596928 - DNA, 19 bp, Mus musculus
  siRNA target sequence for 5330434F23Rik (NM_181414.2,712-730).
gagaaacgaagctctaatt

SEQ ID NO: 596929 - DNA, 19 bp, Mus musculus
  siRNA target sequence for 5330434F23Rik (NM_181414.2,718-736).
cgaagctctaatttcatgt

SEQ ID NO: 596930 - DNA, 19 bp, Mus musculus
  siRNA target sequence for 5330434F23Rik (NM_181414.2,774-792).
caaggagtatggcattgtt

SEQ ID NO: 596931 - DNA, 19 bp, Mus musculus
  siRNA target sequence for 5330434F23Rik (NM_181414.2,804-822).
ggatggtgacgaatcatct

SEQ ID NO: 596932 - DNA, 19 bp, Mus musculus
  siRNA target sequence for 5330434F23Rik (NM_181414.2,811-829).
gacgaatcatctccaattt

SEQ ID NO: 596933 - DNA, 19 bp, Mus musculus
  siRNA target sequence for 5330434F23Rik (NM_181414.2,813-831).
cgaatcatctccaatttta

SEQ ID NO: 596934 - DNA, 19 bp, Mus musculus
  siRNA target sequence for 5330434F23Rik (NM_181414.2,814-832).
gaatcatctccaattttaa

SEQ ID NO: 596935 - DNA, 19 bp, Mus musculus
  siRNA target sequence for 5330434F23Rik (NM_181414.2,856-874).
cctgatcctcaaatgtcta

SEQ ID NO: 596936 - DNA, 19 bp, Mus musculus
  siRNA target sequence for 5330434F23Rik (NM_181414.2,857-875).
ctgatcctcaaatgtctat

SEQ ID NO: 596937 - DNA, 19 bp, Mus musculus
  siRNA target sequence for 5330434F23Rik (NM_181414.2,906-924).
gcttgctcggagcttaaga

SEQ ID NO: 596938 - DNA, 19 bp, Mus musculus
  siRNA target sequence for 5330434F23Rik (NM_181414.2,907-925).
cttgctcggagcttaagaa

SEQ ID NO: 596939 - DNA, 19 bp, Mus musculus
  siRNA target sequence for 5330434F23Rik (NM_181414.2,932-950).
catctgaccacgatctcaa

SEQ ID NO: 596940 - DNA, 19 bp, Mus musculus
  siRNA target sequence for 5330434F23Rik (NM_181414.2,962-980).
ccacaagagatcagctaaa

SEQ ID NO: 596941 - DNA, 19 bp, Mus musculus
  siRNA target sequence for 5330434F23Rik (NM_181414.2,963-981).
cacaagagatcagctaaat

SEQ ID NO: 596942 - DNA, 19 bp, Mus musculus
  siRNA target sequence for 5330434F23Rik (NM_181414.2,1008-1026).
gcaactcacatatgaagaa

SEQ ID NO: 596943 - DNA, 19 bp, Mus musculus
  siRNA target sequence for 5330434F23Rik (NM_181414.2,1076-1094).
ctctgacgaagttcttgaa

SEQ ID NO: 596944 - DNA, 19 bp, Mus musculus
  siRNA target sequence for 5330434F23Rik (NM_181414.2,1154-1172).
ggaagccaatggatgtaga

SEQ ID NO: 596945 - DNA, 19 bp, Mus musculus
  siRNA target sequence for 5330434F23Rik (NM_181414.2,1250-1268).
ccgatgatgaggatttgct

SEQ ID NO: 596946 - DNA, 19 bp, Mus musculus
  siRNA target sequence for 5330434F23Rik (NM_181414.2,1357-1375).
caaacttcagcatcagaaa

SEQ ID NO: 596947 - DNA, 19 bp, Mus musculus
  siRNA target sequence for 5330434F23Rik (NM_181414.2,1407-1425).
catagatagctcccaaatt

SEQ ID NO: 596948 - DNA, 19 bp, Mus musculus
  siRNA target sequence for 5330434F23Rik (NM_181414.2,1411-1429).
gatagctcccaaattataa

SEQ ID NO: 596949 - DNA, 19 bp, Mus musculus
  siRNA target sequence for 5330434F23Rik (NM_181414.2,1456-1474).
cctcctgcatctaaagcaa

SEQ ID NO: 596950 - DNA, 19 bp, Mus musculus
  siRNA target sequence for 5330434F23Rik (NM_181414.2,1457-1475).
ctcctgcatctaaagcaaa

SEQ ID NO: 596951 - DNA, 19 bp, Mus musculus
  siRNA target sequence for 5330434F23Rik (NM_181414.2,1507-1525).
gatctatgtacgttcttga

SEQ ID NO: 596952 - DNA, 19 bp, Mus musculus
  siRNA target sequence for 5330434F23Rik (NM_181414.2,1510-1528).
ctatgtacgttcttgatat

SEQ ID NO: 596953 - DNA, 19 bp, Mus musculus
  siRNA target sequence for 5330434F23Rik (NM_181414.2,1552-1570).
ctggctaattatttatact

SEQ ID NO: 596954 - DNA, 19 bp, Mus musculus
  siRNA target sequence for 5330434F23Rik (NM_181414.2,1578-1596).
gatagtggagtgtgaagat

SEQ ID NO: 596955 - DNA, 19 bp, Mus musculus
  siRNA target sequence for 5330434F23Rik (NM_181414.2,1619-1637).
caaagactcacgagatgta

SEQ ID NO: 596956 - DNA, 19 bp, Mus musculus
  siRNA target sequence for 5330434F23Rik (NM_181414.2,1830-1848).
gaaaatgaacttatcagat

SEQ ID NO: 596957 - DNA, 19 bp, Mus musculus
  siRNA target sequence for 5330434F23Rik (NM_181414.2,2012-2030).
gtcaagatcagcttattct

SEQ ID NO: 596958 - DNA, 19 bp, Mus musculus
  siRNA target sequence for 5330434F23Rik (NM_181414.2,2103-2121).
gttagccactagcacaaaa

SEQ ID NO: 596959 - DNA, 19 bp, Mus musculus
  siRNA target sequence for 5330434F23Rik (NM_181414.2,2148-2166).
ggttcctgtcgcagaagtt

SEQ ID NO: 596960 - DNA, 19 bp, Mus musculus
  siRNA target sequence for 5330434F23Rik (NM_181414.2,2153-2171).
ctgtcgcagaagttcttga

SEQ ID NO: 596961 - DNA, 19 bp, Mus musculus
  siRNA target sequence for 5330434F23Rik (NM_181414.2,2250-2268).
catggacacttacgttaaa

SEQ ID NO: 596962 - DNA, 19 bp, Mus musculus
  siRNA target sequence for 5330434F23Rik (NM_181414.2,2275-2293).
gctggatactgtgtgatta

SEQ ID NO: 596963 - DNA, 19 bp, Mus musculus
  siRNA target sequence for 5330434F23Rik (NM_181414.2,2278-2296).
ggatactgtgtgattacgt

SEQ ID NO: 596964 - DNA, 19 bp, Mus musculus
  siRNA target sequence for 5330434F23Rik (NM_181414.2,2279-2297).
gatactgtgtgattacgta

SEQ ID NO: 596965 - DNA, 19 bp, Mus musculus
  siRNA target sequence for 5330434F23Rik (NM_181414.2,2312-2330).
gagaccggcacctggataa

SEQ ID NO: 596966 - DNA, 19 bp, Mus musculus
  siRNA target sequence for 5330434F23Rik (NM_181414.2,2325-2343).
ggataaccttttgttaaca

SEQ ID NO: 596967 - DNA, 19 bp, Mus musculus
  siRNA target sequence for 5330434F23Rik (NM_181414.2,2326-2344).
gataaccttttgttaacaa

SEQ ID NO: 596968 - DNA, 19 bp, Mus musculus
  siRNA target sequence for 5330434F23Rik (NM_181414.2,2352-2370).
caaactcttccatatagat

SEQ ID NO: 596969 - DNA, 19 bp, Mus musculus
  siRNA target sequence for 5330434F23Rik (NM_181414.2,2509-2527).
cacctgcgaaggtattcca

SEQ ID NO: 596970 - DNA, 19 bp, Mus musculus
  siRNA target sequence for 5330434F23Rik (NM_181414.2,2511-2529).
cctgcgaaggtattccaat

SEQ ID NO: 596971 - DNA, 19 bp, Mus musculus
  siRNA target sequence for 5330434F23Rik (NM_181414.2,2515-2533).
cgaaggtattccaatctga

SEQ ID NO: 596972 - DNA, 19 bp, Mus musculus
  siRNA target sequence for 5330434F23Rik (NM_181414.2,2519-2537).
ggtattccaatctgatctt

SEQ ID NO: 596973 - DNA, 19 bp, Mus musculus
  siRNA target sequence for 5330434F23Rik (NM_181414.2,2553-2571).
gatggttgatgcaaacatt

SEQ ID NO: 596974 - DNA, 19 bp, Mus musculus
  siRNA target sequence for 5330434F23Rik (NM_181414.2,2581-2599).
gctcttgaaccagataaaa

SEQ ID NO: 596975 - DNA, 19 bp, Mus musculus
  siRNA target sequence for 5330434F23Rik (NM_181414.2,2587-2605).
gaaccagataaaactgtaa

SEQ ID NO: 596976 - DNA, 19 bp, Mus musculus
  siRNA target sequence for Dapp1 (NM_011932.1,108-126).
gggcagagcagaacttcta

SEQ ID NO: 596977 - DNA, 19 bp, Mus musculus
  siRNA target sequence for Dapp1 (NM_011932.1,124-142).
ctaggagggaacatgagta

SEQ ID NO: 596978 - DNA, 19 bp, Mus musculus
  siRNA target sequence for Dapp1 (NM_011932.1,332-350).
ccaaagactctgtcaaaca

SEQ ID NO: 596979 - DNA, 19 bp, Mus musculus
  siRNA target sequence for Dapp1 (NM_011932.1,339-357).
ctctgtcaaacactttcat

SEQ ID NO: 596980 - DNA, 19 bp, Mus musculus
  siRNA target sequence for Dapp1 (NM_011932.1,349-367).
cactttcatgttgaatata

SEQ ID NO: 596981 - DNA, 19 bp, Mus musculus
  siRNA target sequence for Dapp1 (NM_011932.1,387-405).
cggctttaatgagtattca

SEQ ID NO: 596982 - DNA, 19 bp, Mus musculus
  siRNA target sequence for Dapp1 (NM_011932.1,388-406).
ggctttaatgagtattcat

SEQ ID NO: 596983 - DNA, 19 bp, Mus musculus
  siRNA target sequence for Dapp1 (NM_011932.1,390-408).
ctttaatgagtattcatct

SEQ ID NO: 596984 - DNA, 19 bp, Mus musculus
  siRNA target sequence for Dapp1 (NM_011932.1,463-481).
gggactctgatggttttga

SEQ ID NO: 596985 - DNA, 19 bp, Mus musculus
  siRNA target sequence for Dapp1 (NM_011932.1,464-482).
ggactctgatggttttgaa

SEQ ID NO: 596986 - DNA, 19 bp, Mus musculus
  siRNA target sequence for Dapp1 (NM_011932.1,508-526).
gaaccttgcatttacgaat

SEQ ID NO: 596987 - DNA, 19 bp, Mus musculus
  siRNA target sequence for Dapp1 (NM_011932.1,674-692).
ggaacgaactgaaatattt

SEQ ID NO: 596988 - DNA, 19 bp, Mus musculus
  siRNA target sequence for Dapp1 (NM_011932.1,702-720).
gatgtcaccagaaccaatt

SEQ ID NO: 596989 - DNA, 19 bp, Mus musculus
  siRNA target sequence for Dapp1 (NM_011932.1,722-740).
ggatcctagacctaacaga

SEQ ID NO: 596990 - DNA, 19 bp, Mus musculus
  siRNA target sequence for Dapp1 (NM_011932.1,743-761).
gctcagctgttcaatttga

SEQ ID NO: 596991 - DNA, 19 bp, Mus musculus
  siRNA target sequence for Dapp1 (NM_011932.1,746-764).
cagctgttcaatttgatta

SEQ ID NO: 596992 - DNA, 19 bp, Mus musculus
  siRNA target sequence for Dapp1 (NM_011932.1,769-787).
caggaacgagtaaactgtt

SEQ ID NO: 596993 - DNA, 19 bp, Mus musculus
  siRNA target sequence for Dapp1 (NM_011932.1,772-790).
gaacgagtaaactgtttct

SEQ ID NO: 596994 - DNA, 19 bp, Mus musculus
  siRNA target sequence for Dapp1 (NM_011932.1,835-853).
ggagttgaagccgatgaat

SEQ ID NO: 596995 - DNA, 19 bp, Mus musculus
  siRNA target sequence for Dapp1 (NM_011932.1,845-863).
ccgatgaatggatcaaaat

SEQ ID NO: 596996 - DNA, 19 bp, Mus musculus
  siRNA target sequence for Dapp1 (NM_011932.1,846-864).
cgatgaatggatcaaaata

SEQ ID NO: 596997 - DNA, 19 bp, Mus musculus
  siRNA target sequence for Dapp1 (NM_011932.1,918-936).
cgtccgatctaggtcattt

SEQ ID NO: 596998 - DNA, 19 bp, Mus musculus
  siRNA target sequence for Dapp1 (NM_011932.1,919-937).
gtccgatctaggtcattta

SEQ ID NO: 596999 - DNA, 19 bp, Mus musculus
  siRNA target sequence for Dapp1 (NM_011932.1,922-940).
cgatctaggtcatttatct

SEQ ID NO: 597000 - DNA, 19 bp, Mus musculus
  siRNA target sequence for Dapp1 (NM_011932.1,923-941).
gatctaggtcatttatctt

SEQ ID NO: 597001 - DNA, 19 bp, Mus musculus
  siRNA target sequence for Dapp1 (NM_011932.1,926-944).
ctaggtcatttatcttcaa

SEQ ID NO: 597002 - DNA, 19 bp, Mus musculus
  siRNA target sequence for Pik3c2a (NM_011083.1,555-573).
cattcggacagctcaattt

SEQ ID NO: 597003 - DNA, 19 bp, Mus musculus
  siRNA target sequence for Pik3c2a (NM_011083.1,559-577).
cggacagctcaatttacaa

SEQ ID NO: 597004 - DNA, 19 bp, Mus musculus
  siRNA target sequence for Pik3c2a (NM_011083.1,560-578).
ggacagctcaatttacaaa

SEQ ID NO: 597005 - DNA, 19 bp, Mus musculus
  siRNA target sequence for Pik3c2a (NM_011083.1,585-603).
gggccaagtatctcagaaa

SEQ ID NO: 597006 - DNA, 19 bp, Mus musculus
  siRNA target sequence for Pik3c2a (NM_011083.1,587-605).
gccaagtatctcagaaaga

SEQ ID NO: 597007 - DNA, 19 bp, Mus musculus
  siRNA target sequence for Pik3c2a (NM_011083.1,635-653).
gaagttctcttctacaaga

SEQ ID NO: 597008 - DNA, 19 bp, Mus musculus
  siRNA target sequence for Pik3c2a (NM_011083.1,638-656).
gttctcttctacaagaatt

SEQ ID NO: 597009 - DNA, 19 bp, Mus musculus
  siRNA target sequence for Pik3c2a (NM_011083.1,641-659).
ctcttctacaagaatttga

SEQ ID NO: 597010 - DNA, 19 bp, Mus musculus
  siRNA target sequence for Pik3c2a (NM_011083.1,672-690).
cgaggtggcagctttttgt

SEQ ID NO: 597011 - DNA, 19 bp, Mus musculus
  siRNA target sequence for Pik3c2a (NM_011083.1,680-698).
cagctttttgtcaatccat

SEQ ID NO: 597012 - DNA, 19 bp, Mus musculus
  siRNA target sequence for Pik3c2a (NM_011083.1,683-701).
ctttttgtcaatccattat

SEQ ID NO: 597013 - DNA, 19 bp, Mus musculus
  siRNA target sequence for Pik3c2a (NM_011083.1,689-707).
gtcaatccattatgaaatt

SEQ ID NO: 597014 - DNA, 19 bp, Mus musculus
  siRNA target sequence for Pik3c2a (NM_011083.1,708-726).
gaagaccaaatttccatat

SEQ ID NO: 597015 - DNA, 19 bp, Mus musculus
  siRNA target sequence for Pik3c2a (NM_011083.1,711-729).
gaccaaatttccatatact

SEQ ID NO: 597016 - DNA, 19 bp, Mus musculus
  siRNA target sequence for Pik3c2a (NM_011083.1,713-731).
ccaaatttccatatactga

SEQ ID NO: 597017 - DNA, 19 bp, Mus musculus
  siRNA target sequence for Pik3c2a (NM_011083.1,714-732).
caaatttccatatactgat

SEQ ID NO: 597018 - DNA, 19 bp, Mus musculus
  siRNA target sequence for Pik3c2a (NM_011083.1,831-849).
gcttcaactaccagttact

SEQ ID NO: 597019 - DNA, 19 bp, Mus musculus
  siRNA target sequence for Pik3c2a (NM_011083.1,896-914).
ccctttgctgggtacatga

SEQ ID NO: 597020 - DNA, 19 bp, Mus musculus
  siRNA target sequence for Pik3c2a (NM_011083.1,902-920).
gctgggtacatgatgactt

SEQ ID NO: 597021 - DNA, 19 bp, Mus musculus
  siRNA target sequence for Pik3c2a (NM_011083.1,905-923).
gggtacatgatgacttgaa

SEQ ID NO: 597022 - DNA, 19 bp, Mus musculus
  siRNA target sequence for Pik3c2a (NM_011083.1,906-924).
ggtacatgatgacttgaat

SEQ ID NO: 597023 - DNA, 19 bp, Mus musculus
  siRNA target sequence for Pik3c2a (NM_011083.1,938-956).
gcagctacattctgaaagt

SEQ ID NO: 597024 - DNA, 19 bp, Mus musculus
  siRNA target sequence for Pik3c2a (NM_011083.1,962-980).
gtcaagaggaggttctaca

SEQ ID NO: 597025 - DNA, 19 bp, Mus musculus
  siRNA target sequence for Pik3c2a (NM_011083.1,994-1012).
cttggaagtcacgaacata

SEQ ID NO: 597026 - DNA, 19 bp, Mus musculus
  siRNA target sequence for Pik3c2a (NM_011083.1,998-1016).
gaagtcacgaacatattca

SEQ ID NO: 597027 - DNA, 19 bp, Mus musculus
  siRNA target sequence for Pik3c2a (NM_011083.1,1003-1021).
cacgaacatattcaaaatt

SEQ ID NO: 597028 - DNA, 19 bp, Mus musculus
  siRNA target sequence for Pik3c2a (NM_011083.1,1005-1023).
cgaacatattcaaaattgt

SEQ ID NO: 597029 - DNA, 19 bp, Mus musculus
  siRNA target sequence for Pik3c2a (NM_011083.1,1086-1104).
ggctcgaacagcagaagat

SEQ ID NO: 597030 - DNA, 19 bp, Mus musculus
  siRNA target sequence for Pik3c2a (NM_011083.1,1117-1135).
gtggatttaaacaaatact

SEQ ID NO: 597031 - DNA, 19 bp, Mus musculus
  siRNA target sequence for Pik3c2a (NM_011083.1,1137-1155).
gtatcaaatagaaaaacct

SEQ ID NO: 597032 - DNA, 19 bp, Mus musculus
  siRNA target sequence for Pik3c2a (NM_011083.1,1192-1210).
ctcttagattcctatcact

SEQ ID NO: 597033 - DNA, 19 bp, Mus musculus
  siRNA target sequence for Pik3c2a (NM_011083.1,1242-1260).
ccagcaccgagctgttgat

SEQ ID NO: 597034 - DNA, 19 bp, Mus musculus
  siRNA target sequence for Pik3c2a (NM_011083.1,1245-1263).
gcaccgagctgttgatcaa

SEQ ID NO: 597035 - DNA, 19 bp, Mus musculus
  siRNA target sequence for Pik3c2a (NM_011083.1,1250-1268).
gagctgttgatcaagtgat

SEQ ID NO: 597036 - DNA, 19 bp, Mus musculus
  siRNA target sequence for Pik3c2a (NM_011083.1,1252-1270).
gctgttgatcaagtgatta

SEQ ID NO: 597037 - DNA, 19 bp, Mus musculus
  siRNA target sequence for Pik3c2a (NM_011083.1,1253-1271).
ctgttgatcaagtgattaa

SEQ ID NO: 597038 - DNA, 19 bp, Mus musculus
  siRNA target sequence for Pik3c2a (NM_011083.1,1264-1282).
gtgattaaagcagtaagaa

SEQ ID NO: 597039 - DNA, 19 bp, Mus musculus
  siRNA target sequence for Pik3c2a (NM_011083.1,1354-1372).
gttaaccttccaaggaata

SEQ ID NO: 597040 - DNA, 19 bp, Mus musculus
  siRNA target sequence for Pik3c2a (NM_011083.1,1359-1377).
ccttccaaggaataaaagt

SEQ ID NO: 597041 - DNA, 19 bp, Mus musculus
  siRNA target sequence for Pik3c2a (NM_011083.1,1431-1449).
gtcactgaatcctgaaaat

SEQ ID NO: 597042 - DNA, 19 bp, Mus musculus
  siRNA target sequence for Pik3c2a (NM_011083.1,1478-1496).
caacagcgatttatgatct

SEQ ID NO: 597043 - DNA, 19 bp, Mus musculus
  siRNA target sequence for Pik3c2a (NM_011083.1,1481-1499).
cagcgatttatgatcttct

SEQ ID NO: 597044 - DNA, 19 bp, Mus musculus
  siRNA target sequence for Pik3c2a (NM_011083.1,1500-1518).
caggctccatgcaaattct

SEQ ID NO: 597045 - DNA, 19 bp, Mus musculus
  siRNA target sequence for Pik3c2a (NM_011083.1,1503-1521).
gctccatgcaaattctagt

SEQ ID NO: 597046 - DNA, 19 bp, Mus musculus
  siRNA target sequence for Pik3c2a (NM_011083.1,1504-1522).
ctccatgcaaattctagta

SEQ ID NO: 597047 - DNA, 19 bp, Mus musculus
  siRNA target sequence for Pik3c2a (NM_011083.1,1587-1605).
gctccagttcactgtctat

SEQ ID NO: 597048 - DNA, 19 bp, Mus musculus
  siRNA target sequence for Pik3c2a (NM_011083.1,1612-1630).
cacggaatttccagtaact

SEQ ID NO: 597049 - DNA, 19 bp, Mus musculus
  siRNA target sequence for Pik3c2a (NM_011083.1,1629-1647).
ctgggtatcaaattatgaa

SEQ ID NO: 597050 - DNA, 19 bp, Mus musculus
  siRNA target sequence for Pik3c2a (NM_011083.1,1631-1649).
gggtatcaaattatgaaaa

SEQ ID NO: 597051 - DNA, 19 bp, Mus musculus
  siRNA target sequence for Pik3c2a (NM_011083.1,1632-1650).
ggtatcaaattatgaaaaa

SEQ ID NO: 597052 - DNA, 19 bp, Mus musculus
  siRNA target sequence for Pik3c2a (NM_011083.1,1675-1693).
cacaatgggaaggatcttt

SEQ ID NO: 597053 - DNA, 19 bp, Mus musculus
  siRNA target sequence for Pik3c2a (NM_011083.1,1677-1695).
caatgggaaggatcttttt

SEQ ID NO: 597054 - DNA, 19 bp, Mus musculus
  siRNA target sequence for Pik3c2a (NM_011083.1,1690-1708).
ctttttaagcctattcagt

SEQ ID NO: 597055 - DNA, 19 bp, Mus musculus
  siRNA target sequence for Pik3c2a (NM_011083.1,1721-1739).
gcacgtacaagaatttctt

SEQ ID NO: 597056 - DNA, 19 bp, Mus musculus
  siRNA target sequence for Pik3c2a (NM_011083.1,1724-1742).
cgtacaagaatttcttcta

SEQ ID NO: 597057 - DNA, 19 bp, Mus musculus
  siRNA target sequence for Pik3c2a (NM_011083.1,1754-1772).
gggatgaactaatcatttt

SEQ ID NO: 597058 - DNA, 19 bp, Mus musculus
  siRNA target sequence for Pik3c2a (NM_011083.1,1755-1773).
ggatgaactaatcattttt

SEQ ID NO: 597059 - DNA, 19 bp, Mus musculus
  siRNA target sequence for Pik3c2a (NM_011083.1,1791-1809).
gttgccattagaatcagtt

SEQ ID NO: 597060 - DNA, 19 bp, Mus musculus
  siRNA target sequence for Pik3c2a (NM_011083.1,1888-1906).
gaagctctgggcaaagttt

SEQ ID NO: 597061 - DNA, 19 bp, Mus musculus
  siRNA target sequence for Pik3c2a (NM_011083.1,1891-1909).
gctctgggcaaagtttctt

SEQ ID NO: 597062 - DNA, 19 bp, Mus musculus
  siRNA target sequence for Pik3c2a (NM_011083.1,1963-1981).
ctttggacttcatcacata

SEQ ID NO: 597063 - DNA, 19 bp, Mus musculus
  siRNA target sequence for Pik3c2a (NM_011083.1,1967-1985).
ggacttcatcacatacaaa

SEQ ID NO: 597064 - DNA, 19 bp, Mus musculus
  siRNA target sequence for Pik3c2a (NM_011083.1,2015-2033).
gctatgtcatggaaagaat

SEQ ID NO: 597065 - DNA, 19 bp, Mus musculus
  siRNA target sequence for Pik3c2a (NM_011083.1,2053-2071).
ccttctcctgcgtttgaca

SEQ ID NO: 597066 - DNA, 19 bp, Mus musculus
  siRNA target sequence for Pik3c2a (NM_011083.1,2057-2075).
ctcctgcgtttgacattat

SEQ ID NO: 597067 - DNA, 19 bp, Mus musculus
  siRNA target sequence for Pik3c2a (NM_011083.1,2059-2077).
cctgcgtttgacattattt

SEQ ID NO: 597068 - DNA, 19 bp, Mus musculus
  siRNA target sequence for Pik3c2a (NM_011083.1,2060-2078).
ctgcgtttgacattattta

SEQ ID NO: 597069 - DNA, 19 bp, Mus musculus
  siRNA target sequence for Pik3c2a (NM_011083.1,2062-2080).
gcgtttgacattatttata

SEQ ID NO: 597070 - DNA, 19 bp, Mus musculus
  siRNA target sequence for Pik3c2a (NM_011083.1,2110-2128).
cagcaagacaagttggaaa

SEQ ID NO: 597071 - DNA, 19 bp, Mus musculus
  siRNA target sequence for Pik3c2a (NM_011083.1,2129-2147).
cactggagagtgatataaa

SEQ ID NO: 597072 - DNA, 19 bp, Mus musculus
  siRNA target sequence for Pik3c2a (NM_011083.1,2149-2167).
gggaaacttctggatatta

SEQ ID NO: 597073 - DNA, 19 bp, Mus musculus
  siRNA target sequence for Pik3c2a (NM_011083.1,2155-2173).
cttctggatattattcaca

SEQ ID NO: 597074 - DNA, 19 bp, Mus musculus
  siRNA target sequence for Pik3c2a (NM_011083.1,2200-2218).
gaagataaggtctttttgt

SEQ ID NO: 597075 - DNA, 19 bp, Mus musculus
  siRNA target sequence for Pik3c2a (NM_011083.1,2217-2235).
gtgggaaaaccgctattat

SEQ ID NO: 597076 - DNA, 19 bp, Mus musculus
  siRNA target sequence for Pik3c2a (NM_011083.1,2226-2244).
ccgctattattgcctaaaa

SEQ ID NO: 597077 - DNA, 19 bp, Mus musculus
  siRNA target sequence for Pik3c2a (NM_011083.1,2228-2246).
gctattattgcctaaaaca

SEQ ID NO: 597078 - DNA, 19 bp, Mus musculus
  siRNA target sequence for Pik3c2a (NM_011083.1,2229-2247).
ctattattgcctaaaacat

SEQ ID NO: 597079 - DNA, 19 bp, Mus musculus
  siRNA target sequence for Pik3c2a (NM_011083.1,2238-2256).
cctaaaacatccaaattgt

SEQ ID NO: 597080 - DNA, 19 bp, Mus musculus
  siRNA target sequence for Pik3c2a (NM_011083.1,2286-2304).
ctggaagtgggctaatctt

SEQ ID NO: 597081 - DNA, 19 bp, Mus musculus
  siRNA target sequence for Pik3c2a (NM_011083.1,2296-2314).
gctaatcttgccaaaactt

SEQ ID NO: 597082 - DNA, 19 bp, Mus musculus
  siRNA target sequence for Pik3c2a (NM_011083.1,2302-2320).
cttgccaaaacttactcat

SEQ ID NO: 597083 - DNA, 19 bp, Mus musculus
  siRNA target sequence for Pik3c2a (NM_011083.1,2361-2379).
ggagctccttgatgcaaaa

SEQ ID NO: 597084 - DNA, 19 bp, Mus musculus
  siRNA target sequence for Pik3c2a (NM_011083.1,2362-2380).
gagctccttgatgcaaaat

SEQ ID NO: 597085 - DNA, 19 bp, Mus musculus
  siRNA target sequence for Pik3c2a (NM_011083.1,2364-2382).
gctccttgatgcaaaattt

SEQ ID NO: 597086 - DNA, 19 bp, Mus musculus
  siRNA target sequence for Pik3c2a (NM_011083.1,2466-2484).
cgtacaggctttgaaatat

SEQ ID NO: 597087 - DNA, 19 bp, Mus musculus
  siRNA target sequence for Pik3c2a (NM_011083.1,2746-2764).
caggttgtcctccaaaaga

SEQ ID NO: 597088 - DNA, 19 bp, Mus musculus
  siRNA target sequence for Pik3c2a (NM_011083.1,2754-2772).
cctccaaaagagtatggaa

SEQ ID NO: 597089 - DNA, 19 bp, Mus musculus
  siRNA target sequence for Pik3c2a (NM_011083.1,2827-2845).
ctagtggcaaaagaactaa

SEQ ID NO: 597090 - DNA, 19 bp, Mus musculus
  siRNA target sequence for Pik3c2a (NM_011083.1,2839-2857).
gaactaaatattaagtcat

SEQ ID NO: 597091 - DNA, 19 bp, Mus musculus
  siRNA target sequence for Pik3c2a (NM_011083.1,2842-2860).
ctaaatattaagtcatgtt

SEQ ID NO: 597092 - DNA, 19 bp, Mus musculus
  siRNA target sequence for Pik3c2a (NM_011083.1,2858-2876).
gttcgttcttcagttctaa

SEQ ID NO: 597093 - DNA, 19 bp, Mus musculus
  siRNA target sequence for Pik3c2a (NM_011083.1,2940-2958).
gtttaaggttggtgaagat

SEQ ID NO: 597094 - DNA, 19 bp, Mus musculus
  siRNA target sequence for Pik3c2a (NM_011083.1,2968-2986).
gatatgttagctttacaga

SEQ ID NO: 597095 - DNA, 19 bp, Mus musculus
  siRNA target sequence for Pik3c2a (NM_011083.1,2973-2991).
gttagctttacagatgata

SEQ ID NO: 597096 - DNA, 19 bp, Mus musculus
  siRNA target sequence for Pik3c2a (NM_011083.1,2977-2995).
gctttacagatgataaaga

SEQ ID NO: 597097 - DNA, 19 bp, Mus musculus
  siRNA target sequence for Pik3c2a (NM_011083.1,2985-3003).
gatgataaagattatggat

SEQ ID NO: 597098 - DNA, 19 bp, Mus musculus
  siRNA target sequence for Pik3c2a (NM_011083.1,3088-3106).
ctagttcctgcttcagata

SEQ ID NO: 597099 - DNA, 19 bp, Mus musculus
  siRNA target sequence for Pik3c2a (NM_011083.1,3136-3154).
gtaacaggatccttaagaa

SEQ ID NO: 597100 - DNA, 19 bp, Mus musculus
  siRNA target sequence for Pik3c2a (NM_011083.1,3248-3266).
gtgtagccacctatgtttt

SEQ ID NO: 597101 - DNA, 19 bp, Mus musculus
  siRNA target sequence for Pik3c2a (NM_011083.1,3258-3276).
ctatgttttaggcatttgt

SEQ ID NO: 597102 - DNA, 19 bp, Mus musculus
  siRNA target sequence for Pik3c2a (NM_011083.1,3277-3295).
gatcggcacaatgacaata

SEQ ID NO: 597103 - DNA, 19 bp, Mus musculus
  siRNA target sequence for Pik3c2a (NM_011083.1,3314-3332).
gacacatgttccacattga

SEQ ID NO: 597104 - DNA, 19 bp, Mus musculus
  siRNA target sequence for Pik3c2a (NM_011083.1,3360-3378).
gatgtttggtagcttcaaa

SEQ ID NO: 597105 - DNA, 19 bp, Mus musculus
  siRNA target sequence for Pik3c2a (NM_011083.1,3380-3398).
gggaccgagctccttttgt

SEQ ID NO: 597106 - DNA, 19 bp, Mus musculus
  siRNA target sequence for Pik3c2a (NM_011083.1,3436-3454).
gaaaagcccaccattcgtt

SEQ ID NO: 597107 - DNA, 19 bp, Mus musculus
  siRNA target sequence for Pik3c2a (NM_011083.1,3481-3499).
caagcctacaacttgataa

SEQ ID NO: 597108 - DNA, 19 bp, Mus musculus
  siRNA target sequence for Pik3c2a (NM_011083.1,3526-3544).
ctctcactgatgattcctt

SEQ ID NO: 597109 - DNA, 19 bp, Mus musculus
  siRNA target sequence for Pik3c2a (NM_011083.1,3554-3572).
cagaactcacaagtattca

SEQ ID NO: 597110 - DNA, 19 bp, Mus musculus
  siRNA target sequence for Pik3c2a (NM_011083.1,3566-3584).
gtattcaggatctgaaata

SEQ ID NO: 597111 - DNA, 19 bp, Mus musculus
  siRNA target sequence for Pik3c2a (NM_011083.1,3665-3683).
gaagcattgccacaaagtt

SEQ ID NO: 597112 - DNA, 19 bp, Mus musculus
  siRNA target sequence for Pik3c2a (NM_011083.1,3702-3720).
ccttgctcagctacgtttt

SEQ ID NO: 597113 - DNA, 19 bp, Mus musculus
  siRNA target sequence for Pik3c2a (NM_011083.1,3722-3740).
ctggccttccttctaatga

SEQ ID NO: 597114 - DNA, 19 bp, Mus musculus
  siRNA target sequence for Pik3c2a (NM_011083.1,3739-3757).
gatgagcccatcctttcat

SEQ ID NO: 597115 - DNA, 19 bp, Mus musculus
  siRNA target sequence for Pik3c2a (NM_011083.1,3744-3762).
gcccatcctttcattctca

SEQ ID NO: 597116 - DNA, 19 bp, Mus musculus
  siRNA target sequence for Pik3c2a (NM_011083.1,3763-3781).
ccgaaaacatactccttta

SEQ ID NO: 597117 - DNA, 19 bp, Mus musculus
  siRNA target sequence for Pik3c2a (NM_011083.1,3807-3825).
ctctgttttcacatatcat

SEQ ID NO: 597118 - DNA, 19 bp, Mus musculus
  siRNA target sequence for Pik3c2a (NM_011083.1,3809-3827).
ctgttttcacatatcataa

SEQ ID NO: 597119 - DNA, 19 bp, Mus musculus
  siRNA target sequence for Pik3c2a (NM_011083.1,3811-3829).
gttttcacatatcataaga

SEQ ID NO: 597120 - DNA, 19 bp, Mus musculus
  siRNA target sequence for Pik3c2a (NM_011083.1,3837-3855).
cccagataaacactatatt

SEQ ID NO: 597121 - DNA, 19 bp, Mus musculus
  siRNA target sequence for Pik3c2a (NM_011083.1,3838-3856).
ccagataaacactatattt

SEQ ID NO: 597122 - DNA, 19 bp, Mus musculus
  siRNA target sequence for Pik3c2a (NM_011083.1,3839-3857).
cagataaacactatattta

SEQ ID NO: 597123 - DNA, 19 bp, Mus musculus
  siRNA target sequence for Pik3c2a (NM_011083.1,3861-3879).
ggttcgaattctaagagaa

SEQ ID NO: 597124 - DNA, 19 bp, Mus musculus
  siRNA target sequence for Pik3c2a (NM_011083.1,3881-3899).
gacaccttgaaccatcatt

SEQ ID NO: 597125 - DNA, 19 bp, Mus musculus
  siRNA target sequence for Pik3c2a (NM_011083.1,3906-3924).
ccggacatttgatgaattt

SEQ ID NO: 597126 - DNA, 19 bp, Mus musculus
  siRNA target sequence for Pik3c2a (NM_011083.1,3934-3952).
cacaataagctcagtatta

SEQ ID NO: 597127 - DNA, 19 bp, Mus musculus
  siRNA target sequence for Pik3c2a (NM_011083.1,4090-4108).
gcagagtgtgatcttgttt

SEQ ID NO: 597128 - DNA, 19 bp, Mus musculus
  siRNA target sequence for Pik3c2a (NM_011083.1,4124-4142).
ctttacttcgtgatgagaa

SEQ ID NO: 597129 - DNA, 19 bp, Mus musculus
  siRNA target sequence for Pik3c2a (NM_011083.1,4204-4222).
ggaggagcagtgaagttat

SEQ ID NO: 597130 - DNA, 19 bp, Mus musculus
  siRNA target sequence for Pik3c2a (NM_011083.1,4208-4226).
gagcagtgaagttatctgt

SEQ ID NO: 597131 - DNA, 19 bp, Mus musculus
  siRNA target sequence for Pik3c2a (NM_011083.1,4213-4231).
gtgaagttatctgtttctt

SEQ ID NO: 597132 - DNA, 19 bp, Mus musculus
  siRNA target sequence for Pik3c2a (NM_011083.1,4235-4253).
gaaatggcaccctcttcat

SEQ ID NO: 597133 - DNA, 19 bp, Mus musculus
  siRNA target sequence for Pik3c2a (NM_011083.1,4254-4272).
catggtgatgcacatcaaa

SEQ ID NO: 597134 - DNA, 19 bp, Mus musculus
  siRNA target sequence for Pik3c2a (NM_011083.1,4297-4315).
gacccaaatccctatgtca

SEQ ID NO: 597135 - DNA, 19 bp, Mus musculus
  siRNA target sequence for Pik3c2a (NM_011083.1,4338-4356).
ccacaaaacgtcaaaacgt

SEQ ID NO: 597136 - DNA, 19 bp, Mus musculus
  siRNA target sequence for Pik3c2a (NM_011083.1,4339-4357).
cacaaaacgtcaaaacgta

SEQ ID NO: 597137 - DNA, 19 bp, Mus musculus
  siRNA target sequence for Pik3c2a (NM_011083.1,4341-4359).
caaaacgtcaaaacgtaaa

SEQ ID NO: 597138 - DNA, 19 bp, Mus musculus
  siRNA target sequence for Pik3c2a (NM_011083.1,4346-4364).
cgtcaaaacgtaaaaccaa

SEQ ID NO: 597139 - DNA, 19 bp, Mus musculus
  siRNA target sequence for Pik3c2a (NM_011083.1,4347-4365).
gtcaaaacgtaaaaccaaa

SEQ ID NO: 597140 - DNA, 19 bp, Mus musculus
  siRNA target sequence for Pik3c2a (NM_011083.1,4362-4380).
caaaatttcacgtaaaact

SEQ ID NO: 597141 - DNA, 19 bp, Mus musculus
  siRNA target sequence for Pik3c2a (NM_011083.1,4418-4436).
gatacagcaaagaaactct

SEQ ID NO: 597142 - DNA, 19 bp, Mus musculus
  siRNA target sequence for Pik3c2a (NM_011083.1,4474-4492).
gaatcactgcgggagaatt

SEQ ID NO: 597143 - DNA, 19 bp, Mus musculus
  siRNA target sequence for Pik3c2a (NM_011083.1,4511-4529).
ccctgccactgaaagattt

SEQ ID NO: 597144 - DNA, 19 bp, Mus musculus
  siRNA target sequence for Pik3c2a (NM_011083.1,4563-4581).
gctgactgcggcaacgtat

SEQ ID NO: 597145 - DNA, 19 bp, Mus musculus
  siRNA target sequence for Pik3c2a (NM_011083.1,4566-4584).
gactgcggcaacgtatcta

SEQ ID NO: 597146 - DNA, 19 bp, Mus musculus
  siRNA target sequence for Pik3c2g (NM_011084.1,263-281).
caaggtgaagcctacttta

SEQ ID NO: 597147 - DNA, 19 bp, Mus musculus
  siRNA target sequence for Pik3c2g (NM_011084.1,266-284).
ggtgaagcctactttaaaa

SEQ ID NO: 597148 - DNA, 19 bp, Mus musculus
  siRNA target sequence for Pik3c2g (NM_011084.1,355-373).
ggagcagaaacttgtcaaa

SEQ ID NO: 597149 - DNA, 19 bp, Mus musculus
  siRNA target sequence for Pik3c2g (NM_011084.1,358-376).
gcagaaacttgtcaaactt

SEQ ID NO: 597150 - DNA, 19 bp, Mus musculus
  siRNA target sequence for Pik3c2g (NM_011084.1,423-441).
gaaaggatgtgctaaagaa

SEQ ID NO: 597151 - DNA, 19 bp, Mus musculus
  siRNA target sequence for Pik3c2g (NM_011084.1,449-467).
ggcagtctagaagaattct

SEQ ID NO: 597152 - DNA, 19 bp, Mus musculus
  siRNA target sequence for Pik3c2g (NM_011084.1,450-468).
gcagtctagaagaattctt

SEQ ID NO: 597153 - DNA, 19 bp, Mus musculus
  siRNA target sequence for Pik3c2g (NM_011084.1,511-529).
gtgcataaaaggaattgat

SEQ ID NO: 597154 - DNA, 19 bp, Mus musculus
  siRNA target sequence for Pik3c2g (NM_011084.1,530-548).
cgggatgcttgctcgtatt

SEQ ID NO: 597155 - DNA, 19 bp, Mus musculus
  siRNA target sequence for Pik3c2g (NM_011084.1,531-549).
gggatgcttgctcgtattt

SEQ ID NO: 597156 - DNA, 19 bp, Mus musculus
  siRNA target sequence for Pik3c2g (NM_011084.1,533-551).
gatgcttgctcgtatttca

SEQ ID NO: 597157 - DNA, 19 bp, Mus musculus
  siRNA target sequence for Pik3c2g (NM_011084.1,536-554).
gcttgctcgtatttcacat

SEQ ID NO: 597158 - DNA, 19 bp, Mus musculus
  siRNA target sequence for Pik3c2g (NM_011084.1,566-584).
ccattgaagattactttca

SEQ ID NO: 597159 - DNA, 19 bp, Mus musculus
  siRNA target sequence for Pik3c2g (NM_011084.1,567-585).
cattgaagattactttcat

SEQ ID NO: 597160 - DNA, 19 bp, Mus musculus
  siRNA target sequence for Pik3c2g (NM_011084.1,591-609).
ctaatccaatgggcaaaaa

SEQ ID NO: 597161 - DNA, 19 bp, Mus musculus
  siRNA target sequence for Pik3c2g (NM_011084.1,603-621).
gcaaaaatatcagtgttat

SEQ ID NO: 597162 - DNA, 19 bp, Mus musculus
  siRNA target sequence for Pik3c2g (NM_011084.1,700-718).
ggagggcctcgatatgcaa

SEQ ID NO: 597163 - DNA, 19 bp, Mus musculus
  siRNA target sequence for Pik3c2g (NM_011084.1,704-722).
ggcctcgatatgcaaatga

SEQ ID NO: 597164 - DNA, 19 bp, Mus musculus
  siRNA target sequence for Pik3c2g (NM_011084.1,705-723).
gcctcgatatgcaaatgat

SEQ ID NO: 597165 - DNA, 19 bp, Mus musculus
  siRNA target sequence for Pik3c2g (NM_011084.1,707-725).
ctcgatatgcaaatgatca

SEQ ID NO: 597166 - DNA, 19 bp, Mus musculus
  siRNA target sequence for Pik3c2g (NM_011084.1,715-733).
gcaaatgatcacttatgga

SEQ ID NO: 597167 - DNA, 19 bp, Mus musculus
  siRNA target sequence for Pik3c2g (NM_011084.1,820-838).
gatcggacccctgaaagaa

SEQ ID NO: 597168 - DNA, 19 bp, Mus musculus
  siRNA target sequence for Pik3c2g (NM_011084.1,901-919).
gaggaacttcttttactct

SEQ ID NO: 597169 - DNA, 19 bp, Mus musculus
  siRNA target sequence for Pik3c2g (NM_011084.1,954-972).
gagtctgtgaccgacataa

SEQ ID NO: 597170 - DNA, 19 bp, Mus musculus
  siRNA target sequence for Pik3c2g (NM_011084.1,962-980).
gaccgacataatgacaata

SEQ ID NO: 597171 - DNA, 19 bp, Mus musculus
  siRNA target sequence for Pik3c2g (NM_011084.1,994-1012).
gtcaggtcacatgtttcat

SEQ ID NO: 597172 - DNA, 19 bp, Mus musculus
  siRNA target sequence for Pik3c2g (NM_011084.1,1033-1051).
gggtcatgcgcaaacattt

SEQ ID NO: 597173 - DNA, 19 bp, Mus musculus
  siRNA target sequence for Pik3c2g (NM_011084.1,1065-1083).
gggacagagcccctttcat

SEQ ID NO: 597174 - DNA, 19 bp, Mus musculus
  siRNA target sequence for Pik3c2g (NM_011084.1,1066-1084).
ggacagagcccctttcatt

SEQ ID NO: 597175 - DNA, 19 bp, Mus musculus
  siRNA target sequence for Pik3c2g (NM_011084.1,1094-1112).
gagatggagtactttatta

SEQ ID NO: 597176 - DNA, 19 bp, Mus musculus
  siRNA target sequence for Pik3c2g (NM_011084.1,1096-1114).
gatggagtactttattact

SEQ ID NO: 597177 - DNA, 19 bp, Mus musculus
  siRNA target sequence for Pik3c2g (NM_011084.1,1258-1276).
cgaagacctgaagtatgta

SEQ ID NO: 597178 - DNA, 19 bp, Mus musculus
  siRNA target sequence for Pik3c2g (NM_011084.1,1262-1280).
gacctgaagtatgtacata

SEQ ID NO: 597179 - DNA, 19 bp, Mus musculus
  siRNA target sequence for Pik3c2g (NM_011084.1,1267-1285).
gaagtatgtacataacaat

SEQ ID NO: 597180 - DNA, 19 bp, Mus musculus
  siRNA target sequence for Pik3c2g (NM_011084.1,1356-1374).
gtttcccagtgaaattgaa

SEQ ID NO: 597181 - DNA, 19 bp, Mus musculus
  siRNA target sequence for Pik3c2g (NM_011084.1,1362-1380).
cagtgaaattgaataacct

SEQ ID NO: 597182 - DNA, 19 bp, Mus musculus
  siRNA target sequence for Pik3c2g (NM_011084.1,1462-1480).
gaataagaccaggacaatt

SEQ ID NO: 597183 - DNA, 19 bp, Mus musculus
  siRNA target sequence for Pik3c2g (NM_011084.1,1537-1555).
ggtgacatgcagtgacaat

SEQ ID NO: 597184 - DNA, 19 bp, Mus musculus
  siRNA target sequence for Pik3c2g (NM_011084.1,1538-1556).
gtgacatgcagtgacaata

SEQ ID NO: 597185 - DNA, 19 bp, Mus musculus
  siRNA target sequence for Pik3c2g (NM_011084.1,1579-1597).
cttcgagcagttttacaga

SEQ ID NO: 597186 - DNA, 19 bp, Mus musculus
  siRNA target sequence for Pik3c2g (NM_011084.1,1723-1741).
ggtgctacgcggatcttat

SEQ ID NO: 597187 - DNA, 19 bp, Mus musculus
  siRNA target sequence for Pik3c2g (NM_011084.1,1726-1744).
gctacgcggatcttatgaa

SEQ ID NO: 597188 - DNA, 19 bp, Mus musculus
  siRNA target sequence for Pik3c2g (NM_011084.1,1851-1869).
gccctaaggtgcagttact

SEQ ID NO: 597189 - DNA, 19 bp, Mus musculus
  siRNA target sequence for Pik3c2g (NM_011084.1,1890-1908).
ggctcaccatcctagtgaa

SEQ ID NO: 597190 - DNA, 19 bp, Mus musculus
  siRNA target sequence for Pik3c2g (NM_011084.1,1891-1909).
gctcaccatcctagtgaaa

SEQ ID NO: 597191 - DNA, 19 bp, Mus musculus
  siRNA target sequence for Pik3c2g (NM_011084.1,1901-1919).
ctagtgaaacacttgaaaa

SEQ ID NO: 597192 - DNA, 19 bp, Mus musculus
  siRNA target sequence for Pik3c2g (NM_011084.1,1945-1963).
gcccagtgcacatgttgaa

SEQ ID NO: 597193 - DNA, 19 bp, Mus musculus
  siRNA target sequence for Pik3c2g (NM_011084.1,1947-1965).
ccagtgcacatgttgaaat

SEQ ID NO: 597194 - DNA, 19 bp, Mus musculus
  siRNA target sequence for Pik3c2g (NM_011084.1,2026-2044).
cactgacccaacttacaat

SEQ ID NO: 597195 - DNA, 19 bp, Mus musculus
  siRNA target sequence for Pik3c2g (NM_011084.1,2030-2048).
gacccaacttacaatgaaa

SEQ ID NO: 597196 - DNA, 19 bp, Mus musculus
  siRNA target sequence for Pik3c2g (NM_011084.1,2032-2050).
cccaacttacaatgaaatt

SEQ ID NO: 597197 - DNA, 19 bp, Mus musculus
  siRNA target sequence for Pik3c2g (NM_011084.1,2073-2091).
ggctccagggccatgtttt

SEQ ID NO: 597198 - DNA, 19 bp, Mus musculus
  siRNA target sequence for Pik3c2g (NM_011084.1,2074-2092).
gctccagggccatgtttta

SEQ ID NO: 597199 - DNA, 19 bp, Mus musculus
  siRNA target sequence for Pik3c2g (NM_011084.1,2096-2114).
cttatcgtgaagagcaaaa

SEQ ID NO: 597200 - DNA, 19 bp, Mus musculus
  siRNA target sequence for Pik3c2g (NM_011084.1,2149-2167).
cagtgtacccctcaatgaa

SEQ ID NO: 597201 - DNA, 19 bp, Mus musculus
  siRNA target sequence for Pik3c2g (NM_011084.1,2151-2169).
gtgtacccctcaatgaaga

SEQ ID NO: 597202 - DNA, 19 bp, Mus musculus
  siRNA target sequence for Pik3c2g (NM_011084.1,2153-2171).
gtacccctcaatgaagaaa

SEQ ID NO: 597203 - DNA, 19 bp, Mus musculus
  siRNA target sequence for Pik3c2g (NM_011084.1,2156-2174).
cccctcaatgaagaaaagt

SEQ ID NO: 597204 - DNA, 19 bp, Mus musculus
  siRNA target sequence for Pik3c2g (NM_011084.1,2176-2194).
gtacccactaggaaacagt

SEQ ID NO: 597205 - DNA, 19 bp, Mus musculus
  siRNA target sequence for Pik3c2g (NM_011084.1,2180-2198).
ccactaggaaacagtatca

SEQ ID NO: 597206 - DNA, 19 bp, Mus musculus
  siRNA target sequence for Pik3ca (NM_008839.1,45-63).
gatgcccccacgaatccta

SEQ ID NO: 597207 - DNA, 19 bp, Mus musculus
  siRNA target sequence for Pik3ca (NM_008839.1,55-73).
cgaatcctagtggaatgtt

SEQ ID NO: 597208 - DNA, 19 bp, Mus musculus
  siRNA target sequence for Pik3ca (NM_008839.1,56-74).
gaatcctagtggaatgttt

SEQ ID NO: 597209 - DNA, 19 bp, Mus musculus
  siRNA target sequence for Pik3ca (NM_008839.1,71-89).
gtttactccccaatggaat

SEQ ID NO: 597210 - DNA, 19 bp, Mus musculus
  siRNA target sequence for Pik3ca (NM_008839.1,79-97).
cccaatggaatgatagtga

SEQ ID NO: 597211 - DNA, 19 bp, Mus musculus
  siRNA target sequence for Pik3ca (NM_008839.1,86-104).
gaatgatagtgactttaga

SEQ ID NO: 597212 - DNA, 19 bp, Mus musculus
  siRNA target sequence for Pik3ca (NM_008839.1,120-138).
cacactcgtcaccatcaaa

SEQ ID NO: 597213 - DNA, 19 bp, Mus musculus
  siRNA target sequence for Pik3ca (NM_008839.1,122-140).
cactcgtcaccatcaaaca

SEQ ID NO: 597214 - DNA, 19 bp, Mus musculus
  siRNA target sequence for Pik3ca (NM_008839.1,126-144).
cgtcaccatcaaacatgaa

SEQ ID NO: 597215 - DNA, 19 bp, Mus musculus
  siRNA target sequence for Pik3ca (NM_008839.1,131-149).
ccatcaaacatgaactgtt

SEQ ID NO: 597216 - DNA, 19 bp, Mus musculus
  siRNA target sequence for Pik3ca (NM_008839.1,187-205).
caagacgaaacttcttaca

SEQ ID NO: 597217 - DNA, 19 bp, Mus musculus
  siRNA target sequence for Pik3ca (NM_008839.1,190-208).
gacgaaacttcttacattt

SEQ ID NO: 597218 - DNA, 19 bp, Mus musculus
  siRNA target sequence for Pik3ca (NM_008839.1,200-218).
cttacattttcgtaagtgt

SEQ ID NO: 597219 - DNA, 19 bp, Mus musculus
  siRNA target sequence for Pik3ca (NM_008839.1,230-248).
cagaaagggaagaattttt

SEQ ID NO: 597220 - DNA, 19 bp, Mus musculus
  siRNA target sequence for Pik3ca (NM_008839.1,313-331).
gtaggcaaccgtgaagaaa

SEQ ID NO: 597221 - DNA, 19 bp, Mus musculus
  siRNA target sequence for Pik3ca (NM_008839.1,317-335).
gcaaccgtgaagaaaagat

SEQ ID NO: 597222 - DNA, 19 bp, Mus musculus
  siRNA target sequence for Pik3ca (NM_008839.1,336-354).
cctcaatcgagaaattggt

SEQ ID NO: 597223 - DNA, 19 bp, Mus musculus
  siRNA target sequence for Pik3ca (NM_008839.1,337-355).
ctcaatcgagaaattggtt

SEQ ID NO: 597224 - DNA, 19 bp, Mus musculus
  siRNA target sequence for Pik3ca (NM_008839.1,343-361).
cgagaaattggttttgtta

SEQ ID NO: 597225 - DNA, 19 bp, Mus musculus
  siRNA target sequence for Pik3ca (NM_008839.1,403-421).
gaagtccaagactttcgaa

SEQ ID NO: 597226 - DNA, 19 bp, Mus musculus
  siRNA target sequence for Pik3ca (NM_008839.1,482-500).
gcagagcaatgtatgtcta

SEQ ID NO: 597227 - DNA, 19 bp, Mus musculus
  siRNA target sequence for Pik3ca (NM_008839.1,532-550).
ccaaagcacatctacaaca

SEQ ID NO: 597228 - DNA, 19 bp, Mus musculus
  siRNA target sequence for Pik3ca (NM_008839.1,537-555).
gcacatctacaacaagtta

SEQ ID NO: 597229 - DNA, 19 bp, Mus musculus
  siRNA target sequence for Pik3ca (NM_008839.1,621-639).
cactctgaagatcaatcat

SEQ ID NO: 597230 - DNA, 19 bp, Mus musculus
  siRNA target sequence for Pik3ca (NM_008839.1,733-751).
gaatatcagggcaagtata

SEQ ID NO: 597231 - DNA, 19 bp, Mus musculus
  siRNA target sequence for Pik3ca (NM_008839.1,739-757).
cagggcaagtatattctga

SEQ ID NO: 597232 - DNA, 19 bp, Mus musculus
  siRNA target sequence for Pik3ca (NM_008839.1,741-759).
gggcaagtatattctgaaa

SEQ ID NO: 597233 - DNA, 19 bp, Mus musculus
  siRNA target sequence for Pik3ca (NM_008839.1,801-819).
gagtcagtacaagtacata

SEQ ID NO: 597234 - DNA, 19 bp, Mus musculus
  siRNA target sequence for Pik3ca (NM_008839.1,839-857).
ggaggatgcccaacttgat

SEQ ID NO: 597235 - DNA, 19 bp, Mus musculus
  siRNA target sequence for Pik3ca (NM_008839.1,865-883).
gccaaagaaagcctatact

SEQ ID NO: 597236 - DNA, 19 bp, Mus musculus
  siRNA target sequence for Pik3ca (NM_008839.1,882-900).
ctctcagctgccgattgat

SEQ ID NO: 597237 - DNA, 19 bp, Mus musculus
  siRNA target sequence for Pik3ca (NM_008839.1,938-956).
cagccacaccctacatgaa

SEQ ID NO: 597238 - DNA, 19 bp, Mus musculus
  siRNA target sequence for Pik3ca (NM_008839.1,958-976).
ggagagacatctacgaaat

SEQ ID NO: 597239 - DNA, 19 bp, Mus musculus
  siRNA target sequence for Pik3ca (NM_008839.1,978-996).
cctctgggtcataaatagt

SEQ ID NO: 597240 - DNA, 19 bp, Mus musculus
  siRNA target sequence for Pik3ca (NM_008839.1,998-1016).
cgctcagaataaaaattct

SEQ ID NO: 597241 - DNA, 19 bp, Mus musculus
  siRNA target sequence for Pik3ca (NM_008839.1,1015-1033).
ctttgtgcaacctatgtaa

SEQ ID NO: 597242 - DNA, 19 bp, Mus musculus
  siRNA target sequence for Pik3ca (NM_008839.1,1088-1106).
gaggagaacccttatgtga

SEQ ID NO: 597243 - DNA, 19 bp, Mus musculus
  siRNA target sequence for Pik3ca (NM_008839.1,1096-1114).
cccttatgtgacaatgtga

SEQ ID NO: 597244 - DNA, 19 bp, Mus musculus
  siRNA target sequence for Pik3ca (NM_008839.1,1105-1123).
gacaatgtgaacactcaaa

SEQ ID NO: 597245 - DNA, 19 bp, Mus musculus
  siRNA target sequence for Pik3ca (NM_008839.1,1107-1125).
caatgtgaacactcaaaga

SEQ ID NO: 597246 - DNA, 19 bp, Mus musculus
  siRNA target sequence for Pik3ca (NM_008839.1,1137-1155).
caatcctaggtggaatgaa

SEQ ID NO: 597247 - DNA, 19 bp, Mus musculus
  siRNA target sequence for Pik3ca (NM_008839.1,1149-1167).
gaatgaatggctgaattat

SEQ ID NO: 597248 - DNA, 19 bp, Mus musculus
  siRNA target sequence for Pik3ca (NM_008839.1,1201-1219).
cgcctttgcctttcaatct

SEQ ID NO: 597249 - DNA, 19 bp, Mus musculus
  siRNA target sequence for Pik3ca (NM_008839.1,1210-1228).
ctttcaatctgctctgtta

SEQ ID NO: 597250 - DNA, 19 bp, Mus musculus
  siRNA target sequence for Pik3ca (NM_008839.1,1262-1280).
cgttggcctggggaaacat

SEQ ID NO: 597251 - DNA, 19 bp, Mus musculus
  siRNA target sequence for Pik3ca (NM_008839.1,1267-1285).
gcctggggaaacataaact

SEQ ID NO: 597252 - DNA, 19 bp, Mus musculus
  siRNA target sequence for Pik3ca (NM_008839.1,1268-1286).
cctggggaaacataaactt

SEQ ID NO: 597253 - DNA, 19 bp, Mus musculus
  siRNA target sequence for Pik3ca (NM_008839.1,1272-1290).
gggaaacataaacttgttt

SEQ ID NO: 597254 - DNA, 19 bp, Mus musculus
  siRNA target sequence for Pik3ca (NM_008839.1,1304-1322).
ccctagtgtccgggaaaat

SEQ ID NO: 597255 - DNA, 19 bp, Mus musculus
  siRNA target sequence for Pik3ca (NM_008839.1,1368-1386).
gaaccctattggtgttact

SEQ ID NO: 597256 - DNA, 19 bp, Mus musculus
  siRNA target sequence for Pik3ca (NM_008839.1,1385-1403).
ctgggtcaaatccaaataa

SEQ ID NO: 597257 - DNA, 19 bp, Mus musculus
  siRNA target sequence for Pik3ca (NM_008839.1,1388-1406).
ggtcaaatccaaataaaga

SEQ ID NO: 597258 - DNA, 19 bp, Mus musculus
  siRNA target sequence for Pik3ca (NM_008839.1,1389-1407).
gtcaaatccaaataaagaa

SEQ ID NO: 597259 - DNA, 19 bp, Mus musculus
  siRNA target sequence for Pik3ca (NM_008839.1,1415-1433).
gcttagagttggagtttga

SEQ ID NO: 597260 - DNA, 19 bp, Mus musculus
  siRNA target sequence for Pik3ca (NM_008839.1,1528-1546).
catacaggactgagtaaca

SEQ ID NO: 597261 - DNA, 19 bp, Mus musculus
  siRNA target sequence for Pik3ca (NM_008839.1,1549-1567).
ctagccagagacaatgagt

SEQ ID NO: 597262 - DNA, 19 bp, Mus musculus
  siRNA target sequence for Pik3ca (NM_008839.1,1605-1623).
cacccgggacccactatct

SEQ ID NO: 597263 - DNA, 19 bp, Mus musculus
  siRNA target sequence for Pik3ca (NM_008839.1,1608-1626).
ccgggacccactatctgaa

SEQ ID NO: 597264 - DNA, 19 bp, Mus musculus
  siRNA target sequence for Pik3ca (NM_008839.1,1612-1630).
gacccactatctgaaatca

SEQ ID NO: 597265 - DNA, 19 bp, Mus musculus
  siRNA target sequence for Pik3ca (NM_008839.1,1664-1682).
gacactactgcgtaactat

SEQ ID NO: 597266 - DNA, 19 bp, Mus musculus
  siRNA target sequence for Pik3ca (NM_008839.1,1673-1691).
gcgtaactattcctgaaat

SEQ ID NO: 597267 - DNA, 19 bp, Mus musculus
  siRNA target sequence for Pik3ca (NM_008839.1,1685-1703).
ctgaaatcctacccaaatt

SEQ ID NO: 597268 - DNA, 19 bp, Mus musculus
  siRNA target sequence for Pik3ca (NM_008839.1,1744-1762).
cagatgtactgcttagtaa

SEQ ID NO: 597269 - DNA, 19 bp, Mus musculus
  siRNA target sequence for Pik3ca (NM_008839.1,1749-1767).
gtactgcttagtaaaagat

SEQ ID NO: 597270 - DNA, 19 bp, Mus musculus
  siRNA target sequence for Pik3ca (NM_008839.1,1811-1829).
gtaactatccagatcctat

SEQ ID NO: 597271 - DNA, 19 bp, Mus musculus
  siRNA target sequence for Pik3ca (NM_008839.1,1815-1833).
ctatccagatcctatggtt

SEQ ID NO: 597272 - DNA, 19 bp, Mus musculus
  siRNA target sequence for Pik3ca (NM_008839.1,1843-1861).
gctgttcggtgcttagaaa

SEQ ID NO: 597273 - DNA, 19 bp, Mus musculus
  siRNA target sequence for Pik3ca (NM_008839.1,1844-1862).
ctgttcggtgcttagaaaa

SEQ ID NO: 597274 - DNA, 19 bp, Mus musculus
  siRNA target sequence for Pik3ca (NM_008839.1,1846-1864).
gttcggtgcttagaaaaat

SEQ ID NO: 597275 - DNA, 19 bp, Mus musculus
  siRNA target sequence for Pik3ca (NM_008839.1,1890-1908).
gtacctcattcaacttgta

SEQ ID NO: 597276 - DNA, 19 bp, Mus musculus
  siRNA target sequence for Pik3ca (NM_008839.1,1900-1918).
caacttgtacaggtcttaa

SEQ ID NO: 597277 - DNA, 19 bp, Mus musculus
  siRNA target sequence for Pik3ca (NM_008839.1,1945-1963).
cttgtgagatttttactca

SEQ ID NO: 597278 - DNA, 19 bp, Mus musculus
  siRNA target sequence for Pik3ca (NM_008839.1,1981-1999).
caaaggattggccattttt

SEQ ID NO: 597279 - DNA, 19 bp, Mus musculus
  siRNA target sequence for Pik3ca (NM_008839.1,2048-2066).
ggtttggcctgctattgga

SEQ ID NO: 597280 - DNA, 19 bp, Mus musculus
  siRNA target sequence for Pik3ca (NM_008839.1,2078-2096).
gtgcctgtgggatgtatct

SEQ ID NO: 597281 - DNA, 19 bp, Mus musculus
  siRNA target sequence for Pik3ca (NM_008839.1,2180-2198).
cacaaaaggtacagatgaa

SEQ ID NO: 597282 - DNA, 19 bp, Mus musculus
  siRNA target sequence for Pik3ca (NM_008839.1,2182-2200).
caaaaggtacagatgaagt

SEQ ID NO: 597283 - DNA, 19 bp, Mus musculus
  siRNA target sequence for Pik3ca (NM_008839.1,2285-2303).
gaaacctcaggcttgaaga

SEQ ID NO: 597284 - DNA, 19 bp, Mus musculus
  siRNA target sequence for Pik3ca (NM_008839.1,2295-2313).
gcttgaagagtgtcgaatt

SEQ ID NO: 597285 - DNA, 19 bp, Mus musculus
  siRNA target sequence for Pik3ca (NM_008839.1,2296-2314).
cttgaagagtgtcgaatta

SEQ ID NO: 597286 - DNA, 19 bp, Mus musculus
  siRNA target sequence for Pik3ca (NM_008839.1,2299-2317).
gaagagtgtcgaattatgt

SEQ ID NO: 597287 - DNA, 19 bp, Mus musculus
  siRNA target sequence for Pik3ca (NM_008839.1,2364-2382).
catgtcagagctactgttt

SEQ ID NO: 597288 - DNA, 19 bp, Mus musculus
  siRNA target sequence for Pik3ca (NM_008839.1,2413-2431).
gacgacttacggcaagata

SEQ ID NO: 597289 - DNA, 19 bp, Mus musculus
  siRNA target sequence for Pik3ca (NM_008839.1,2416-2434).
gacttacggcaagatatgt

SEQ ID NO: 597290 - DNA, 19 bp, Mus musculus
  siRNA target sequence for Pik3ca (NM_008839.1,2418-2436).
cttacggcaagatatgtta

SEQ ID NO: 597291 - DNA, 19 bp, Mus musculus
  siRNA target sequence for Pik3ca (NM_008839.1,2463-2481).
gaacatctggcaaaaccaa

SEQ ID NO: 597292 - DNA, 19 bp, Mus musculus
  siRNA target sequence for Pik3ca (NM_008839.1,2490-2508).
ccttcgcatgctaccttat

SEQ ID NO: 597293 - DNA, 19 bp, Mus musculus
  siRNA target sequence for Pik3ca (NM_008839.1,2500-2518).
ctaccttatggctgtctat

SEQ ID NO: 597294 - DNA, 19 bp, Mus musculus
  siRNA target sequence for Pik3ca (NM_008839.1,2652-2670).
gaacaagggcgagatatat

SEQ ID NO: 597295 - DNA, 19 bp, Mus musculus
  siRNA target sequence for Pik3ca (NM_008839.1,2655-2673).
caagggcgagatatatgat

SEQ ID NO: 597296 - DNA, 19 bp, Mus musculus
  siRNA target sequence for Pik3ca (NM_008839.1,2714-2732).
gcgtggcaacctttatctt

SEQ ID NO: 597297 - DNA, 19 bp, Mus musculus
  siRNA target sequence for Pik3ca (NM_008839.1,2724-2742).
ctttatcttgggaattgga

SEQ ID NO: 597298 - DNA, 19 bp, Mus musculus
  siRNA target sequence for Pik3ca (NM_008839.1,2776-2794).
gacggacagctgtttcata

SEQ ID NO: 597299 - DNA, 19 bp, Mus musculus
  siRNA target sequence for Pik3ca (NM_008839.1,2778-2796).
cggacagctgtttcatata

SEQ ID NO: 597300 - DNA, 19 bp, Mus musculus
  siRNA target sequence for Pik3ca (NM_008839.1,2780-2798).
gacagctgtttcatataga

SEQ ID NO: 597301 - DNA, 19 bp, Mus musculus
  siRNA target sequence for Pik3ca (NM_008839.1,2804-2822).
ggcactttttggatcacaa

SEQ ID NO: 597302 - DNA, 19 bp, Mus musculus
  siRNA target sequence for Pik3ca (NM_008839.1,2846-2864).
gggaacgtgtgccatttgt

SEQ ID NO: 597303 - DNA, 19 bp, Mus musculus
  siRNA target sequence for Pik3ca (NM_008839.1,2870-2888).
cacaggatttcttgattgt

SEQ ID NO: 597304 - DNA, 19 bp, Mus musculus
  siRNA target sequence for Pik3ca (NM_008839.1,2872-2890).
caggatttcttgattgtga

SEQ ID NO: 597305 - DNA, 19 bp, Mus musculus
  siRNA target sequence for Pik3ca (NM_008839.1,2874-2892).
ggatttcttgattgtgatt

SEQ ID NO: 597306 - DNA, 19 bp, Mus musculus
  siRNA target sequence for Pik3ca (NM_008839.1,2875-2893).
gatttcttgattgtgatta

SEQ ID NO: 597307 - DNA, 19 bp, Mus musculus
  siRNA target sequence for Pik3ca (NM_008839.1,2894-2912).
gtaagggagcacaagagta

SEQ ID NO: 597308 - DNA, 19 bp, Mus musculus
  siRNA target sequence for Pik3ca (NM_008839.1,2974-2992).
cggcagcatgccaatctct

SEQ ID NO: 597309 - DNA, 19 bp, Mus musculus
  siRNA target sequence for Pik3ca (NM_008839.1,3023-3041).
ctggaatgccagaactaca

SEQ ID NO: 597310 - DNA, 19 bp, Mus musculus
  siRNA target sequence for Pik3ca (NM_008839.1,3030-3048).
gccagaactacaatctttt

SEQ ID NO: 597311 - DNA, 19 bp, Mus musculus
  siRNA target sequence for Pik3ca (NM_008839.1,3146-3164).
gtggatggacgacaaaaat

SEQ ID NO: 597312 - DNA, 19 bp, Mus musculus
  siRNA target sequence for Pik3ca (NM_008839.1,3155-3173).
cgacaaaaatggattggat

SEQ ID NO: 597313 - DNA, 19 bp, Mus musculus
  siRNA target sequence for Pik3cb (NM_029094.1,265-283).
gtggactcacagattgcat

SEQ ID NO: 597314 - DNA, 19 bp, Mus musculus
  siRNA target sequence for Pik3cb (NM_029094.1,290-308).
gcgccatatccgtcgattt

SEQ ID NO: 597315 - DNA, 19 bp, Mus musculus
  siRNA target sequence for Pik3cb (NM_029094.1,293-311).
ccatatccgtcgatttcct

SEQ ID NO: 597316 - DNA, 19 bp, Mus musculus
  siRNA target sequence for Pik3cb (NM_029094.1,294-312).
catatccgtcgatttcctt

SEQ ID NO: 597317 - DNA, 19 bp, Mus musculus
  siRNA target sequence for Pik3cb (NM_029094.1,313-331).
ctgcccaccgggatttata

SEQ ID NO: 597318 - DNA, 19 bp, Mus musculus
  siRNA target sequence for Pik3cb (NM_029094.1,317-335).
ccaccgggatttatatcca

SEQ ID NO: 597319 - DNA, 19 bp, Mus musculus
  siRNA target sequence for Pik3cb (NM_029094.1,346-364).
cctcgggaagctaccattt

SEQ ID NO: 597320 - DNA, 19 bp, Mus musculus
  siRNA target sequence for Pik3cb (NM_029094.1,349-367).
cgggaagctaccatttctt

SEQ ID NO: 597321 - DNA, 19 bp, Mus musculus
  siRNA target sequence for Pik3cb (NM_029094.1,350-368).
gggaagctaccatttctta

SEQ ID NO: 597322 - DNA, 19 bp, Mus musculus
  siRNA target sequence for Pik3cb (NM_029094.1,351-369).
ggaagctaccatttcttat

SEQ ID NO: 597323 - DNA, 19 bp, Mus musculus
  siRNA target sequence for Pik3cb (NM_029094.1,352-370).
gaagctaccatttcttata

SEQ ID NO: 597324 - DNA, 19 bp, Mus musculus
  siRNA target sequence for Pik3cb (NM_029094.1,355-373).
gctaccatttcttatatta

SEQ ID NO: 597325 - DNA, 19 bp, Mus musculus
  siRNA target sequence for Pik3cb (NM_029094.1,356-374).
ctaccatttcttatattaa

SEQ ID NO: 597326 - DNA, 19 bp, Mus musculus
  siRNA target sequence for Pik3cb (NM_029094.1,386-404).
ggaagcaagttcacaacta

SEQ ID NO: 597327 - DNA, 19 bp, Mus musculus
  siRNA target sequence for Pik3cb (NM_029094.1,397-415).
cacaactacccgatgttta

SEQ ID NO: 597328 - DNA, 19 bp, Mus musculus
  siRNA target sequence for Pik3cb (NM_029094.1,427-445).
gacattgactcgtatatgt

SEQ ID NO: 597329 - DNA, 19 bp, Mus musculus
  siRNA target sequence for Pik3cb (NM_029094.1,429-447).
cattgactcgtatatgttt

SEQ ID NO: 597330 - DNA, 19 bp, Mus musculus
  siRNA target sequence for Pik3cb (NM_029094.1,433-451).
gactcgtatatgtttgcat

SEQ ID NO: 597331 - DNA, 19 bp, Mus musculus
  siRNA target sequence for Pik3cb (NM_029094.1,456-474).
gaatcaaactgctgtatat

SEQ ID NO: 597332 - DNA, 19 bp, Mus musculus
  siRNA target sequence for Pik3cb (NM_029094.1,554-572).
gtgaccccgcagaaaaatt

SEQ ID NO: 597333 - DNA, 19 bp, Mus musculus
  siRNA target sequence for Pik3cb (NM_029094.1,563-581).
cagaaaaattggactcaaa

SEQ ID NO: 597334 - DNA, 19 bp, Mus musculus
  siRNA target sequence for Pik3cb (NM_029094.1,627-645).
gaaggatcccgaagtgaat

SEQ ID NO: 597335 - DNA, 19 bp, Mus musculus
  siRNA target sequence for Pik3cb (NM_029094.1,631-649).
gatcccgaagtgaatgaat

SEQ ID NO: 597336 - DNA, 19 bp, Mus musculus
  siRNA target sequence for Pik3cb (NM_029094.1,634-652).
cccgaagtgaatgaattta

SEQ ID NO: 597337 - DNA, 19 bp, Mus musculus
  siRNA target sequence for Pik3cb (NM_029094.1,710-728).
ggatcgactggctaaagca

SEQ ID NO: 597338 - DNA, 19 bp, Mus musculus
  siRNA target sequence for Pik3cb (NM_029094.1,817-835).
gaaaatagccaggatgtat

SEQ ID NO: 597339 - DNA, 19 bp, Mus musculus
  siRNA target sequence for Pik3cb (NM_029094.1,824-842).
gccaggatgtatttagttt

SEQ ID NO: 597340 - DNA, 19 bp, Mus musculus
  siRNA target sequence for Pik3cb (NM_029094.1,854-872).
ccaatttgaatcctataaa

SEQ ID NO: 597341 - DNA, 19 bp, Mus musculus
  siRNA target sequence for Pik3cb (NM_029094.1,855-873).
caatttgaatcctataaaa

SEQ ID NO: 597342 - DNA, 19 bp, Mus musculus
  siRNA target sequence for Pik3cb (NM_029094.1,891-909).
ccagaaacgcctcactatt

SEQ ID NO: 597343 - DNA, 19 bp, Mus musculus
  siRNA target sequence for Pik3cb (NM_029094.1,894-912).
gaaacgcctcactattcgt

SEQ ID NO: 597344 - DNA, 19 bp, Mus musculus
  siRNA target sequence for Pik3cb (NM_029094.1,963-981).
gagagtggagtatgtgttt

SEQ ID NO: 597345 - DNA, 19 bp, Mus musculus
  siRNA target sequence for Pik3cb (NM_029094.1,983-1001).
gcgatcatccactaattca

SEQ ID NO: 597346 - DNA, 19 bp, Mus musculus
  siRNA target sequence for Pik3cb (NM_029094.1,985-1003).
gatcatccactaattcagt

SEQ ID NO: 597347 - DNA, 19 bp, Mus musculus
  siRNA target sequence for Pik3cb (NM_029094.1,1005-1023).
ccagtacatccggaattgt

SEQ ID NO: 597348 - DNA, 19 bp, Mus musculus
  siRNA target sequence for Pik3cb (NM_029094.1,1014-1032).
ccggaattgtgtgatgaat

SEQ ID NO: 597349 - DNA, 19 bp, Mus musculus
  siRNA target sequence for Pik3cb (NM_029094.1,1015-1033).
cggaattgtgtgatgaata

SEQ ID NO: 597350 - DNA, 19 bp, Mus musculus
  siRNA target sequence for Pik3cb (NM_029094.1,1034-1052).
gaaccctgccccacttcat

SEQ ID NO: 597351 - DNA, 19 bp, Mus musculus
  siRNA target sequence for Pik3cb (NM_029094.1,1071-1089).
gatcaagaaaatgtatgaa

SEQ ID NO: 597352 - DNA, 19 bp, Mus musculus
  siRNA target sequence for Pik3cb (NM_029094.1,1157-1175).
caaagaaaacgcgagttat

SEQ ID NO: 597353 - DNA, 19 bp, Mus musculus
  siRNA target sequence for Pik3cb (NM_029094.1,1161-1179).
gaaaacgcgagttatttct

SEQ ID NO: 597354 - DNA, 19 bp, Mus musculus
  siRNA target sequence for Pik3cb (NM_029094.1,1166-1184).
cgcgagttatttctcatat

SEQ ID NO: 597355 - DNA, 19 bp, Mus musculus
  siRNA target sequence for Pik3cb (NM_029094.1,1191-1209).
caacaacaaccctttccaa

SEQ ID NO: 597356 - DNA, 19 bp, Mus musculus
  siRNA target sequence for Pik3cb (NM_029094.1,1206-1224).
ccaaattaccttggttaaa

SEQ ID NO: 597357 - DNA, 19 bp, Mus musculus
  siRNA target sequence for Pik3cb (NM_029094.1,1286-1304).
gaaccgagctcctgtgtaa

SEQ ID NO: 597358 - DNA, 19 bp, Mus musculus
  siRNA target sequence for Pik3cb (NM_029094.1,1308-1326).
cgtcgtaagctcagagata

SEQ ID NO: 597359 - DNA, 19 bp, Mus musculus
  siRNA target sequence for Pik3cb (NM_029094.1,1309-1327).
gtcgtaagctcagagatat

SEQ ID NO: 597360 - DNA, 19 bp, Mus musculus
  siRNA target sequence for Pik3cb (NM_029094.1,1311-1329).
cgtaagctcagagatatca

SEQ ID NO: 597361 - DNA, 19 bp, Mus musculus
  siRNA target sequence for Pik3cb (NM_029094.1,1328-1346).
caggaaagaacgaccatat

SEQ ID NO: 597362 - DNA, 19 bp, Mus musculus
  siRNA target sequence for Pik3cb (NM_029094.1,1330-1348).
ggaaagaacgaccatattt

SEQ ID NO: 597363 - DNA, 19 bp, Mus musculus
  siRNA target sequence for Pik3cb (NM_029094.1,1335-1353).
gaacgaccatatttggaat

SEQ ID NO: 597364 - DNA, 19 bp, Mus musculus
  siRNA target sequence for Pik3cb (NM_029094.1,1463-1481).
ctattaatccctctaagta

SEQ ID NO: 597365 - DNA, 19 bp, Mus musculus
  siRNA target sequence for Pik3cb (NM_029094.1,1500-1518).
cgggaaagtgcattatcct

SEQ ID NO: 597366 - DNA, 19 bp, Mus musculus
  siRNA target sequence for Pik3cb (NM_029094.1,1535-1553).
ccatggtttttgacttcaa

SEQ ID NO: 597367 - DNA, 19 bp, Mus musculus
  siRNA target sequence for Pik3cb (NM_029094.1,1536-1554).
catggtttttgacttcaaa

SEQ ID NO: 597368 - DNA, 19 bp, Mus musculus
  siRNA target sequence for Pik3cb (NM_029094.1,1568-1586).
ctggagacgtcatattgca

SEQ ID NO: 597369 - DNA, 19 bp, Mus musculus
  siRNA target sequence for Pik3cb (NM_029094.1,1673-1691).
ccgccttgcacattacgtt

SEQ ID NO: 597370 - DNA, 19 bp, Mus musculus
  siRNA target sequence for Pik3cb (NM_029094.1,1683-1701).
cattacgttcccagagaat

SEQ ID NO: 597371 - DNA, 19 bp, Mus musculus
  siRNA target sequence for Pik3cb (NM_029094.1,1704-1722).
gaagcagccgtgttattat

SEQ ID NO: 597372 - DNA, 19 bp, Mus musculus
  siRNA target sequence for Pik3cb (NM_029094.1,1727-1745).
ccttcgataagatcattga

SEQ ID NO: 597373 - DNA, 19 bp, Mus musculus
  siRNA target sequence for Pik3cb (NM_029094.1,1785-1803).
gtcaagtcgtggtggaaaa

SEQ ID NO: 597374 - DNA, 19 bp, Mus musculus
  siRNA target sequence for Pik3cb (NM_029094.1,1852-1870).
cagctgtgtgagaacgaaa

SEQ ID NO: 597375 - DNA, 19 bp, Mus musculus
  siRNA target sequence for Pik3cb (NM_029094.1,1863-1881).
gaacgaaatggaccttatt

SEQ ID NO: 597376 - DNA, 19 bp, Mus musculus
  siRNA target sequence for Pik3cb (NM_029094.1,1892-1910).
ggcaagactgccgagaaaa

SEQ ID NO: 597377 - DNA, 19 bp, Mus musculus
  siRNA target sequence for Pik3cb (NM_029094.1,1922-1940).
cactgccaaaactactctt

SEQ ID NO: 597378 - DNA, 19 bp, Mus musculus
  siRNA target sequence for Pik3cb (NM_029094.1,1933-1951).
ctactcttgtcaatcaagt

SEQ ID NO: 597379 - DNA, 19 bp, Mus musculus
  siRNA target sequence for Pik3cb (NM_029094.1,1950-1968).
gtggaataaacttgaagat

SEQ ID NO: 597380 - DNA, 19 bp, Mus musculus
  siRNA target sequence for Pik3cb (NM_029094.1,1952-1970).
ggaataaacttgaagatgt

SEQ ID NO: 597381 - DNA, 19 bp, Mus musculus
  siRNA target sequence for Pik3cb (NM_029094.1,1981-1999).
caggcgctcctgcagatat

SEQ ID NO: 597382 - DNA, 19 bp, Mus musculus
  siRNA target sequence for Pik3cb (NM_029094.1,2114-2132).
ctcagtatcttttacaatt

SEQ ID NO: 597383 - DNA, 19 bp, Mus musculus
  siRNA target sequence for Pik3cb (NM_029094.1,2133-2151).
ggtgcaagttttgaaatat

SEQ ID NO: 597384 - DNA, 19 bp, Mus musculus
  siRNA target sequence for Pik3cb (NM_029094.1,2213-2231).
ggattgggcagtttctgtt

SEQ ID NO: 597385 - DNA, 19 bp, Mus musculus
  siRNA target sequence for Pik3cb (NM_029094.1,2261-2279).
ctgctgtgtccgtacagtt

SEQ ID NO: 597386 - DNA, 19 bp, Mus musculus
  siRNA target sequence for Pik3cb (NM_029094.1,2282-2300).
gtgtcatcctggaagcata

SEQ ID NO: 597387 - DNA, 19 bp, Mus musculus
  siRNA target sequence for Pik3cb (NM_029094.1,2286-2304).
catcctggaagcatactgt

SEQ ID NO: 597388 - DNA, 19 bp, Mus musculus
  siRNA target sequence for Pik3cb (NM_029094.1,2309-2327).
gaagcgtggggcacatgaa

SEQ ID NO: 597389 - DNA, 19 bp, Mus musculus
  siRNA target sequence for Pik3cb (NM_029094.1,2312-2330).
gcgtggggcacatgaaagt

SEQ ID NO: 597390 - DNA, 19 bp, Mus musculus
  siRNA target sequence for Pik3cb (NM_029094.1,2353-2371).
ctcaataagttaaaaactt

SEQ ID NO: 597391 - DNA, 19 bp, Mus musculus
  siRNA target sequence for Pik3cb (NM_029094.1,2355-2373).
caataagttaaaaacttta

SEQ ID NO: 597392 - DNA, 19 bp, Mus musculus
  siRNA target sequence for Pik3cb (NM_029094.1,2515-2533).
gagctctatgttgaaaagt

SEQ ID NO: 597393 - DNA, 19 bp, Mus musculus
  siRNA target sequence for Pik3cb (NM_029094.1,2601-2619).
ctcggttggagtgatcttt

SEQ ID NO: 597394 - DNA, 19 bp, Mus musculus
  siRNA target sequence for Pik3cb (NM_029094.1,2603-2621).
cggttggagtgatctttaa

SEQ ID NO: 597395 - DNA, 19 bp, Mus musculus
  siRNA target sequence for Pik3cb (NM_029094.1,2604-2622).
ggttggagtgatctttaaa

SEQ ID NO: 597396 - DNA, 19 bp, Mus musculus
  siRNA target sequence for Pik3cb (NM_029094.1,2676-2694).
ggatctgctttggaaagaa

SEQ ID NO: 597397 - DNA, 19 bp, Mus musculus
  siRNA target sequence for Pik3cb (NM_029094.1,2791-2809).
gacattcagctgaacagta

SEQ ID NO: 597398 - DNA, 19 bp, Mus musculus
  siRNA target sequence for Pik3cb (NM_029094.1,2823-2841).
cacggcagccttcaacaaa

SEQ ID NO: 597399 - DNA, 19 bp, Mus musculus
  siRNA target sequence for Pik3cb (NM_029094.1,2893-2911).
cgagcgattgaggagttta

SEQ ID NO: 597400 - DNA, 19 bp, Mus musculus
  siRNA target sequence for Pik3cb (NM_029094.1,2896-2914).
gcgattgaggagtttacct

SEQ ID NO: 597401 - DNA, 19 bp, Mus musculus
  siRNA target sequence for Pik3cb (NM_029094.1,2897-2915).
cgattgaggagtttacctt

SEQ ID NO: 597402 - DNA, 19 bp, Mus musculus
  siRNA target sequence for Pik3cb (NM_029094.1,3012-3030).
catagattttgggcatatt

SEQ ID NO: 597403 - DNA, 19 bp, Mus musculus
  siRNA target sequence for Pik3cb (NM_029094.1,3022-3040).
gggcatattcttggaaatt

SEQ ID NO: 597404 - DNA, 19 bp, Mus musculus
  siRNA target sequence for Pik3cb (NM_029094.1,3023-3041).
ggcatattcttggaaattt

SEQ ID NO: 597405 - DNA, 19 bp, Mus musculus
  siRNA target sequence for Pik3cb (NM_029094.1,3065-3083).
gggagcgagtaccttttat

SEQ ID NO: 597406 - DNA, 19 bp, Mus musculus
  siRNA target sequence for Pik3cb (NM_029094.1,3066-3084).
ggagcgagtaccttttatt

SEQ ID NO: 597407 - DNA, 19 bp, Mus musculus
  siRNA target sequence for Pik3cb (NM_029094.1,3069-3087).
gcgagtaccttttattctt

SEQ ID NO: 597408 - DNA, 19 bp, Mus musculus
  siRNA target sequence for Pik3cb (NM_029094.1,3070-3088).
cgagtaccttttattctta

SEQ ID NO: 597409 - DNA, 19 bp, Mus musculus
  siRNA target sequence for Pik3cb (NM_029094.1,3164-3182).
gtgaagatgcgtatctgat

SEQ ID NO: 597410 - DNA, 19 bp, Mus musculus
  siRNA target sequence for Pik3cb (NM_029094.1,3249-3267).
gctcacatcggtcaaagat

SEQ ID NO: 597411 - DNA, 19 bp, Mus musculus
  siRNA target sequence for Pik3cb (NM_029094.1,3250-3268).
ctcacatcggtcaaagata

SEQ ID NO: 597412 - DNA, 19 bp, Mus musculus
  siRNA target sequence for Pik3cb (NM_029094.1,3254-3272).
catcggtcaaagatataca

SEQ ID NO: 597413 - DNA, 19 bp, Mus musculus
  siRNA target sequence for Pik3cb (NM_029094.1,3257-3275).
cggtcaaagatatacagta

SEQ ID NO: 597414 - DNA, 19 bp, Mus musculus
  siRNA target sequence for Pik3cb (NM_029094.1,3258-3276).
ggtcaaagatatacagtat

SEQ ID NO: 597415 - DNA, 19 bp, Mus musculus
  siRNA target sequence for Pik3cb (NM_029094.1,3362-3380).
gctggactactaaagtgaa

SEQ ID NO: 597416 - DNA, 19 bp, Mus musculus
  siRNA target sequence for Pik3cb (NM_029094.1,3391-3409).
cacacagtacggaaagact

SEQ ID NO: 597417 - DNA, 19 bp, Mus musculus
  siRNA target sequence for Pik3cd (NM_008840.1,50-68).
gccagagcgtggttgttga

SEQ ID NO: 597418 - DNA, 19 bp, Mus musculus
  siRNA target sequence for Pik3cd (NM_008840.1,80-98).
ccacaggggtctacttgaa

SEQ ID NO: 597419 - DNA, 19 bp, Mus musculus
  siRNA target sequence for Pik3cd (NM_008840.1,147-165).
gtggcaccgtgcacagtat

SEQ ID NO: 597420 - DNA, 19 bp, Mus musculus
  siRNA target sequence for Pik3cd (NM_008840.1,190-208).
gaccccgaggcctatgtgt

SEQ ID NO: 597421 - DNA, 19 bp, Mus musculus
  siRNA target sequence for Pik3cd (NM_008840.1,426-444).
gatgcgccagttttgtgaa

SEQ ID NO: 597422 - DNA, 19 bp, Mus musculus
  siRNA target sequence for Pik3cd (NM_008840.1,652-670).
gcctgtgccctccgaaaaa

SEQ ID NO: 597423 - DNA, 19 bp, Mus musculus
  siRNA target sequence for Pik3cd (NM_008840.1,653-671).
cctgtgccctccgaaaaaa

SEQ ID NO: 597424 - DNA, 19 bp, Mus musculus
  siRNA target sequence for Pik3cd (NM_008840.1,984-1002).
cgagggccgaaaagtgaat

SEQ ID NO: 597425 - DNA, 19 bp, Mus musculus
  siRNA target sequence for Pik3cd (NM_008840.1,1013-1031).
ggatgaagctggttgttca

SEQ ID NO: 597426 - DNA, 19 bp, Mus musculus
  siRNA target sequence for Pik3cd (NM_008840.1,1117-1135).
cagcgactggagttcgata

SEQ ID NO: 597427 - DNA, 19 bp, Mus musculus
  siRNA target sequence for Pik3cd (NM_008840.1,1120-1138).
cgactggagttcgatatca

SEQ ID NO: 597428 - DNA, 19 bp, Mus musculus
  siRNA target sequence for Pik3cd (NM_008840.1,1259-1277).
gggccaacctcatgctatt

SEQ ID NO: 597429 - DNA, 19 bp, Mus musculus
  siRNA target sequence for Pik3cd (NM_008840.1,1262-1280).
ccaacctcatgctattcga

SEQ ID NO: 597430 - DNA, 19 bp, Mus musculus
  siRNA target sequence for Pik3cd (NM_008840.1,1272-1290).
gctattcgactacaaagat

SEQ ID NO: 597431 - DNA, 19 bp, Mus musculus
  siRNA target sequence for Pik3cd (NM_008840.1,1306-1324).
gagcgctgcctctacatgt

SEQ ID NO: 597432 - DNA, 19 bp, Mus musculus
  siRNA target sequence for Pik3cd (NM_008840.1,1328-1346).
cctctgtcccagatgagaa

SEQ ID NO: 597433 - DNA, 19 bp, Mus musculus
  siRNA target sequence for Pik3cd (NM_008840.1,1550-1568).
ggggatccggggaactgta

SEQ ID NO: 597434 - DNA, 19 bp, Mus musculus
  siRNA target sequence for Pik3cd (NM_008840.1,1559-1577).
gggaactgtacgaacatga

SEQ ID NO: 597435 - DNA, 19 bp, Mus musculus
  siRNA target sequence for Pik3cd (NM_008840.1,1678-1696).
gtggcccagatgctctatt

SEQ ID NO: 597436 - DNA, 19 bp, Mus musculus
  siRNA target sequence for Pik3cd (NM_008840.1,1840-1858).
ctggtgcaagtgctcaaat

SEQ ID NO: 597437 - DNA, 19 bp, Mus musculus
  siRNA target sequence for Pik3cd (NM_008840.1,1846-1864).
caagtgctcaaatatgagt

SEQ ID NO: 597438 - DNA, 19 bp, Mus musculus
  siRNA target sequence for Pik3cd (NM_008840.1,1873-1891).
gactgcgagctgaccaaat

SEQ ID NO: 597439 - DNA, 19 bp, Mus musculus
  siRNA target sequence for Pik3cd (NM_008840.1,1877-1895).
gcgagctgaccaaattctt

SEQ ID NO: 597440 - DNA, 19 bp, Mus musculus
  siRNA target sequence for Pik3cd (NM_008840.1,2056-2074).
gaagcactgagcaagctta

SEQ ID NO: 597441 - DNA, 19 bp, Mus musculus
  siRNA target sequence for Pik3cd (NM_008840.1,2067-2085).
caagcttaaggcactgaat

SEQ ID NO: 597442 - DNA, 19 bp, Mus musculus
  siRNA target sequence for Pik3cd (NM_008840.1,2114-2132).
ccaccaagccccaaaccaa

SEQ ID NO: 597443 - DNA, 19 bp, Mus musculus
  siRNA target sequence for Pik3cd (NM_008840.1,2129-2147).
ccaaggagatgatgcatat

SEQ ID NO: 597444 - DNA, 19 bp, Mus musculus
  siRNA target sequence for Pik3cd (NM_008840.1,2246-2264).
ccttcatggactccaaaat

SEQ ID NO: 597445 - DNA, 19 bp, Mus musculus
  siRNA target sequence for Pik3cd (NM_008840.1,2269-2287).
cccctgtggatcatgtaca

SEQ ID NO: 597446 - DNA, 19 bp, Mus musculus
  siRNA target sequence for Pik3cd (NM_008840.1,2824-2842).
cagcaggggaagactaaca

SEQ ID NO: 597447 - DNA, 19 bp, Mus musculus
  siRNA target sequence for Pik3cd (NM_008840.1,2827-2845).
caggggaagactaacaaca

SEQ ID NO: 597448 - DNA, 19 bp, Mus musculus
  siRNA target sequence for Pik3cd (NM_008840.1,2876-2894).
gtgaacgagcctataccat

SEQ ID NO: 597449 - DNA, 19 bp, Mus musculus
  siRNA target sequence for Pik3cd (NM_008840.1,2961-2979).
gcttagctgctccaaagat

SEQ ID NO: 597450 - DNA, 19 bp, Mus musculus
  siRNA target sequence for Pik3cd (NM_008840.1,2962-2980).
cttagctgctccaaagata

SEQ ID NO: 597451 - DNA, 19 bp, Mus musculus
  siRNA target sequence for Pik3cd (NM_008840.1,3064-3082).
ctccgagaaagctggaaaa

SEQ ID NO: 597452 - DNA, 19 bp, Mus musculus
  siRNA target sequence for Pik3cg (NM_020272.1,632-650).
gacaatggtatgagatcta

SEQ ID NO: 597453 - DNA, 19 bp, Mus musculus
  siRNA target sequence for Pik3cg (NM_020272.1,676-694).
ctagactgcctgcattact

SEQ ID NO: 597454 - DNA, 19 bp, Mus musculus
  siRNA target sequence for Pik3cg (NM_020272.1,818-836).
gcaatgtgcacgatgatga

SEQ ID NO: 597455 - DNA, 19 bp, Mus musculus
  siRNA target sequence for Pik3cg (NM_020272.1,1001-1019).
gtaccaccagccaaaccat

SEQ ID NO: 597456 - DNA, 19 bp, Mus musculus
  siRNA target sequence for Pik3cg (NM_020272.1,1023-1041).
ggtctccgcagatgatact

SEQ ID NO: 597457 - DNA, 19 bp, Mus musculus
  siRNA target sequence for Pik3cg (NM_020272.1,1112-1130).
gtcaaagtgagcaggattt

SEQ ID NO: 597458 - DNA, 19 bp, Mus musculus
  siRNA target sequence for Pik3cg (NM_020272.1,1158-1176).
gtacctggtgggtgaaaca

SEQ ID NO: 597459 - DNA, 19 bp, Mus musculus
  siRNA target sequence for Pik3cg (NM_020272.1,1168-1186).
ggtgaaacacccctcaaaa

SEQ ID NO: 597460 - DNA, 19 bp, Mus musculus
  siRNA target sequence for Pik3cg (NM_020272.1,1385-1403).
gggactgcgaccgaaagtt

SEQ ID NO: 597461 - DNA, 19 bp, Mus musculus
  siRNA target sequence for Pik3cg (NM_020272.1,1387-1405).
gactgcgaccgaaagttca

SEQ ID NO: 597462 - DNA, 19 bp, Mus musculus
  siRNA target sequence for Pik3cg (NM_020272.1,1397-1415).
gaaagttcagggtcaagat

SEQ ID NO: 597463 - DNA, 19 bp, Mus musculus
  siRNA target sequence for Pik3cg (NM_020272.1,1449-1467).
caccgacctcactgtgttt

SEQ ID NO: 597464 - DNA, 19 bp, Mus musculus
  siRNA target sequence for Pik3cg (NM_020272.1,1560-1578).
gctggagtttggcatcaaa

SEQ ID NO: 597465 - DNA, 19 bp, Mus musculus
  siRNA target sequence for Pik3cg (NM_020272.1,1561-1579).
ctggagtttggcatcaaaa

SEQ ID NO: 597466 - DNA, 19 bp, Mus musculus
  siRNA target sequence for Pik3cg (NM_020272.1,1591-1609).
cccaaaggggctctattga

SEQ ID NO: 597467 - DNA, 19 bp, Mus musculus
  siRNA target sequence for Pik3cg (NM_020272.1,1592-1610).
ccaaaggggctctattgaa

SEQ ID NO: 597468 - DNA, 19 bp, Mus musculus
  siRNA target sequence for Pik3cg (NM_020272.1,1601-1619).
ctctattgaacctacagat

SEQ ID NO: 597469 - DNA, 19 bp, Mus musculus
  siRNA target sequence for Pik3cg (NM_020272.1,1694-1712).
cccagcttctctattacgt

SEQ ID NO: 597470 - DNA, 19 bp, Mus musculus
  siRNA target sequence for Pik3cg (NM_020272.1,1765-1783).
ctccacatgtggcagatat

SEQ ID NO: 597471 - DNA, 19 bp, Mus musculus
  siRNA target sequence for Pik3cg (NM_020272.1,1767-1785).
ccacatgtggcagatatct

SEQ ID NO: 597472 - DNA, 19 bp, Mus musculus
  siRNA target sequence for Pik3cg (NM_020272.1,1824-1842).
gctcacatccgcaaccaat

SEQ ID NO: 597473 - DNA, 19 bp, Mus musculus
  siRNA target sequence for Pik3cg (NM_020272.1,1843-1861).
cctgacaaggagaactcaa

SEQ ID NO: 597474 - DNA, 19 bp, Mus musculus
  siRNA target sequence for Pik3cg (NM_020272.1,1844-1862).
ctgacaaggagaactcaat

SEQ ID NO: 597475 - DNA, 19 bp, Mus musculus
  siRNA target sequence for Pik3cg (NM_020272.1,1980-1998).
gcaattggaggcgatcata

SEQ ID NO: 597476 - DNA, 19 bp, Mus musculus
  siRNA target sequence for Pik3cg (NM_020272.1,2043-2061).
gctctggcattttcgatat

SEQ ID NO: 597477 - DNA, 19 bp, Mus musculus
  siRNA target sequence for Pik3cg (NM_020272.1,2046-2064).
ctggcattttcgatatgaa

SEQ ID NO: 597478 - DNA, 19 bp, Mus musculus
  siRNA target sequence for Pik3cg (NM_020272.1,2079-2097).
gaaggcttaccctaagcta

SEQ ID NO: 597479 - DNA, 19 bp, Mus musculus
  siRNA target sequence for Pik3cg (NM_020272.1,2083-2101).
gcttaccctaagctattca

SEQ ID NO: 597480 - DNA, 19 bp, Mus musculus
  siRNA target sequence for Pik3cg (NM_020272.1,2114-2132).
gggggcagcaagaaattgt

SEQ ID NO: 597481 - DNA, 19 bp, Mus musculus
  siRNA target sequence for Pik3cg (NM_020272.1,2115-2133).
ggggcagcaagaaattgtt

SEQ ID NO: 597482 - DNA, 19 bp, Mus musculus
  siRNA target sequence for Pik3cg (NM_020272.1,2125-2143).
gaaattgttgccaaaacgt

SEQ ID NO: 597483 - DNA, 19 bp, Mus musculus
  siRNA target sequence for Pik3cg (NM_020272.1,2209-2227).
ctcctggactgcaactttt

SEQ ID NO: 597484 - DNA, 19 bp, Mus musculus
  siRNA target sequence for Pik3cg (NM_020272.1,2211-2229).
cctggactgcaacttttca

SEQ ID NO: 597485 - DNA, 19 bp, Mus musculus
  siRNA target sequence for Pik3cg (NM_020272.1,2370-2388).
gcgtggcttgaggaacaaa

SEQ ID NO: 597486 - DNA, 19 bp, Mus musculus
  siRNA target sequence for Pik3cg (NM_020272.1,2390-2408).
gaatcggtcacttcttgtt

SEQ ID NO: 597487 - DNA, 19 bp, Mus musculus
  siRNA target sequence for Pik3cg (NM_020272.1,2519-2537).
cacagcaggtccatgtgat

SEQ ID NO: 597488 - DNA, 19 bp, Mus musculus
  siRNA target sequence for Pik3cg (NM_020272.1,2529-2547).
ccatgtgattgagatgtta

SEQ ID NO: 597489 - DNA, 19 bp, Mus musculus
  siRNA target sequence for Pik3cg (NM_020272.1,2533-2551).
gtgattgagatgttacaga

SEQ ID NO: 597490 - DNA, 19 bp, Mus musculus
  siRNA target sequence for Pik3cg (NM_020272.1,2573-2591).
cgctctcggcagagaagta

SEQ ID NO: 597491 - DNA, 19 bp, Mus musculus
  siRNA target sequence for Pik3cg (NM_020272.1,2574-2592).
gctctcggcagagaagtat

SEQ ID NO: 597492 - DNA, 19 bp, Mus musculus
  siRNA target sequence for Pik3cg (NM_020272.1,2593-2611).
gacgtcagttcccaagtta

SEQ ID NO: 597493 - DNA, 19 bp, Mus musculus
  siRNA target sequence for Pik3cg (NM_020272.1,2595-2613).
cgtcagttcccaagttatt

SEQ ID NO: 597494 - DNA, 19 bp, Mus musculus
  siRNA target sequence for Pik3cg (NM_020272.1,2658-2676).
ccccgagagctttagagtt

SEQ ID NO: 597495 - DNA, 19 bp, Mus musculus
  siRNA target sequence for Pik3cg (NM_020272.1,2667-2685).
ctttagagttccctatgat

SEQ ID NO: 597496 - DNA, 19 bp, Mus musculus
  siRNA target sequence for Pik3cg (NM_020272.1,2678-2696).
cctatgatcctggactaaa

SEQ ID NO: 597497 - DNA, 19 bp, Mus musculus
  siRNA target sequence for Pik3cg (NM_020272.1,2679-2697).
ctatgatcctggactaaaa

SEQ ID NO: 597498 - DNA, 19 bp, Mus musculus
  siRNA target sequence for Pik3cg (NM_020272.1,2752-2770).
ctgtggcttgagtttaagt

SEQ ID NO: 597499 - DNA, 19 bp, Mus musculus
  siRNA target sequence for Pik3cg (NM_020272.1,2787-2805).
cctatccaacgaaaccatt

SEQ ID NO: 597500 - DNA, 19 bp, Mus musculus
  siRNA target sequence for Pik3cg (NM_020272.1,2792-2810).
ccaacgaaaccattggaat

SEQ ID NO: 597501 - DNA, 19 bp, Mus musculus
  siRNA target sequence for Pik3cg (NM_020272.1,2797-2815).
gaaaccattggaatcatct

SEQ ID NO: 597502 - DNA, 19 bp, Mus musculus
  siRNA target sequence for Pik3cg (NM_020272.1,2801-2819).
ccattggaatcatctttaa

SEQ ID NO: 597503 - DNA, 19 bp, Mus musculus
  siRNA target sequence for Pik3cg (NM_020272.1,2802-2820).
cattggaatcatctttaaa

SEQ ID NO: 597504 - DNA, 19 bp, Mus musculus
  siRNA target sequence for Pik3cg (NM_020272.1,2837-2855).
gccaagacatgttgatctt

SEQ ID NO: 597505 - DNA, 19 bp, Mus musculus
  siRNA target sequence for Pik3cg (NM_020272.1,2847-2865).
gttgatcttgcagattcta

SEQ ID NO: 597506 - DNA, 19 bp, Mus musculus
  siRNA target sequence for Pik3cg (NM_020272.1,2866-2884).
cgcatcatggagtccattt

SEQ ID NO: 597507 - DNA, 19 bp, Mus musculus
  siRNA target sequence for Pik3cg (NM_020272.1,2950-2968).
ggaatgatcgagattgtaa

SEQ ID NO: 597508 - DNA, 19 bp, Mus musculus
  siRNA target sequence for Pik3cg (NM_020272.1,2975-2993).
ccacaacgatcgctcaaat

SEQ ID NO: 597509 - DNA, 19 bp, Mus musculus
  siRNA target sequence for Pik3cg (NM_020272.1,2976-2994).
cacaacgatcgctcaaatt

SEQ ID NO: 597510 - DNA, 19 bp, Mus musculus
  siRNA target sequence for Pik3cg (NM_020272.1,2978-2996).
caacgatcgctcaaattca

SEQ ID NO: 597511 - DNA, 19 bp, Mus musculus
  siRNA target sequence for Pik3cg (NM_020272.1,3031-3049).
gatgaagtcctgaatcact

SEQ ID NO: 597512 - DNA, 19 bp, Mus musculus
  siRNA target sequence for Pik3cg (NM_020272.1,3048-3066).
ctggctcaaggaaaaatgt

SEQ ID NO: 597513 - DNA, 19 bp, Mus musculus
  siRNA target sequence for Pik3cg (NM_020272.1,3057-3075).
ggaaaaatgtcctattgaa

SEQ ID NO: 597514 - DNA, 19 bp, Mus musculus
  siRNA target sequence for Pik3cg (NM_020272.1,3159-3177).
caggcacaacgacaacatt

SEQ ID NO: 597515 - DNA, 19 bp, Mus musculus
  siRNA target sequence for Pik3cg (NM_020272.1,3218-3236).
gacacattcttgggaatta

SEQ ID NO: 597516 - DNA, 19 bp, Mus musculus
  siRNA target sequence for Pik3cg (NM_020272.1,3220-3238).
cacattcttgggaattaca

SEQ ID NO: 597517 - DNA, 19 bp, Mus musculus
  siRNA target sequence for Pik3cg (NM_020272.1,3240-3258).
gagtttcctgggcatcaat

SEQ ID NO: 597518 - DNA, 19 bp, Mus musculus
  siRNA target sequence for Pik3cg (NM_020272.1,3280-3298).
ctaaccccagacttcttgt

SEQ ID NO: 597519 - DNA, 19 bp, Mus musculus
  siRNA target sequence for Pik3cg (NM_020272.1,3357-3375).
ctgtgttagagcttaccta

SEQ ID NO: 597520 - DNA, 19 bp, Mus musculus
  siRNA target sequence for Pik3cg (NM_020272.1,3377-3395).
ctcttcgccatcacacaaa

SEQ ID NO: 597521 - DNA, 19 bp, Mus musculus
  siRNA target sequence for Pik3cg (NM_020272.1,3438-3456).
gccccagctgacaagcaaa

SEQ ID NO: 597522 - DNA, 19 bp, Mus musculus
  siRNA target sequence for Pik3cg (NM_020272.1,3481-3499).
gccctcaccgtgggaaaaa

SEQ ID NO: 597523 - DNA, 19 bp, Mus musculus
  siRNA target sequence for Pik3cg (NM_020272.1,3502-3520).
gaggaggacgctaagaaat

SEQ ID NO: 597524 - DNA, 19 bp, Mus musculus
  siRNA target sequence for Pik3cg (NM_020272.1,3504-3522).
ggaggacgctaagaaatat

SEQ ID NO: 597525 - DNA, 19 bp, Mus musculus
  siRNA target sequence for Pik3cg (NM_020272.1,3505-3523).
gaggacgctaagaaatatt

SEQ ID NO: 597526 - DNA, 19 bp, Mus musculus
  siRNA target sequence for Pik3cg (NM_020272.1,3556-3574).
ggatggactgtgcagttta

SEQ ID NO: 597527 - DNA, 19 bp, Mus musculus
  siRNA target sequence for Pik3cg (NM_020272.1,3557-3575).
gatggactgtgcagtttaa

SEQ ID NO: 597528 - DNA, 19 bp, Mus musculus
  siRNA target sequence for Pik3cg (NM_020272.1,3576-3594).
ctggttcctacatcttgtt

SEQ ID NO: 597529 - DNA, 19 bp, Mus musculus
  siRNA target sequence for Pik3cg (NM_020272.1,3579-3597).
gttcctacatcttgttctt

SEQ ID NO: 597530 - DNA, 19 bp, Mus musculus
  siRNA target sequence for Pik3r2 (NM_008841.1,747-765).
gcccttggatggatcttct

SEQ ID NO: 597531 - DNA, 19 bp, Mus musculus
  siRNA target sequence for Pik3r2 (NM_008841.1,945-963).
ggaccgcaccgccttgtat

SEQ ID NO: 597532 - DNA, 19 bp, Mus musculus
  siRNA target sequence for Pik3r2 (NM_008841.1,1541-1559).
ggaaaggcgggaacaacaa

SEQ ID NO: 597533 - DNA, 19 bp, Mus musculus
  siRNA target sequence for Pik3r2 (NM_008841.1,1546-1564).
ggcgggaacaacaagttga

SEQ ID NO: 597534 - DNA, 19 bp, Mus musculus
  siRNA target sequence for Pik3r2 (NM_008841.1,1547-1565).
gcgggaacaacaagttgat

SEQ ID NO: 597535 - DNA, 19 bp, Mus musculus
  siRNA target sequence for Pik3r2 (NM_008841.1,1549-1567).
gggaacaacaagttgatca

SEQ ID NO: 597536 - DNA, 19 bp, Mus musculus
  siRNA target sequence for Pik3r2 (NM_008841.1,1575-1593).
ccaccgggatggtcactat

SEQ ID NO: 597537 - DNA, 19 bp, Mus musculus
  siRNA target sequence for Pik3r2 (NM_008841.1,1619-1637).
gctccgtggtggaactcat

SEQ ID NO: 597538 - DNA, 19 bp, Mus musculus
  siRNA target sequence for Pik3r2 (NM_008841.1,2021-2039).
ctcgcatcgcggagataca

SEQ ID NO: 597539 - DNA, 19 bp, Mus musculus
  siRNA target sequence for Pik3r2 (NM_008841.1,2189-2207).
cccgacagaggaagatcaa

SEQ ID NO: 597540 - DNA, 19 bp, Mus musculus
  siRNA target sequence for Pik3r2 (NM_008841.1,2465-2483).
gcttcgcagagccctataa

SEQ ID NO: 597541 - DNA, 19 bp, Mus musculus
  siRNA target sequence for BC028795 (NM_198191.1,233-251).
ggacatgagctgcatagaa

SEQ ID NO: 597542 - DNA, 19 bp, Mus musculus
  siRNA target sequence for BC028795 (NM_198191.1,234-252).
gacatgagctgcatagaat

SEQ ID NO: 597543 - DNA, 19 bp, Mus musculus
  siRNA target sequence for BC028795 (NM_198191.1,320-338).
cctactacccagaaggatt

SEQ ID NO: 597544 - DNA, 19 bp, Mus musculus
  siRNA target sequence for BC028795 (NM_198191.1,321-339).
ctactacccagaaggatta

SEQ ID NO: 597545 - DNA, 19 bp, Mus musculus
  siRNA target sequence for BC028795 (NM_198191.1,407-425).
gcacggctgaggaaatcca

SEQ ID NO: 597546 - DNA, 19 bp, Mus musculus
  siRNA target sequence for BC028795 (NM_198191.1,467-485).
ggtgatccctaccttcaat

SEQ ID NO: 597547 - DNA, 19 bp, Mus musculus
  siRNA target sequence for BC028795 (NM_198191.1,470-488).
gatccctaccttcaattct

SEQ ID NO: 597548 - DNA, 19 bp, Mus musculus
  siRNA target sequence for BC028795 (NM_198191.1,473-491).
ccctaccttcaattcttca

SEQ ID NO: 597549 - DNA, 19 bp, Mus musculus
  siRNA target sequence for BC028795 (NM_198191.1,526-544).
ccacgaccagcgcttcttt

SEQ ID NO: 597550 - DNA, 19 bp, Mus musculus
  siRNA target sequence for BC028795 (NM_198191.1,530-548).
gaccagcgcttctttgtga

SEQ ID NO: 597551 - DNA, 19 bp, Mus musculus
  siRNA target sequence for BC028795 (NM_198191.1,668-686).
gtagctcaggggaaaaaga

SEQ ID NO: 597552 - DNA, 19 bp, Mus musculus
  siRNA target sequence for BC028795 (NM_198191.1,718-736).
ccctaccagccgcatttct

SEQ ID NO: 597553 - DNA, 19 bp, Mus musculus
  siRNA target sequence for BC028795 (NM_198191.1,720-738).
ctaccagccgcatttctga

SEQ ID NO: 597554 - DNA, 19 bp, Mus musculus
  siRNA target sequence for BC028795 (NM_198191.1,748-766).
catcaagggctgcaacata

SEQ ID NO: 597555 - DNA, 19 bp, Mus musculus
  siRNA target sequence for BC028795 (NM_198191.1,817-835).
gaaggacctcaactttcaa

SEQ ID NO: 597556 - DNA, 19 bp, Mus musculus
  siRNA target sequence for BC028795 (NM_198191.1,904-922).
cctgcgggaggtgaatgta

SEQ ID NO: 597557 - DNA, 19 bp, Mus musculus
  siRNA target sequence for BC028795 (NM_198191.1,989-1007).
gtcttcagcacattcaagt

SEQ ID NO: 597558 - DNA, 19 bp, Mus musculus
  siRNA target sequence for BC028795 (NM_198191.1,1098-1116).
ggccagaccaacgctattt

SEQ ID NO: 597559 - DNA, 19 bp, Mus musculus
  siRNA target sequence for BC028795 (NM_198191.1,1099-1117).
gccagaccaacgctatttt

SEQ ID NO: 597560 - DNA, 19 bp, Mus musculus
  siRNA target sequence for BC028795 (NM_198191.1,1118-1136).
ctgggcttagtggatatga

SEQ ID NO: 597561 - DNA, 19 bp, Mus musculus
  siRNA target sequence for BC028795 (NM_198191.1,1155-1173).
gcaaacggctggaacatgt

SEQ ID NO: 597562 - DNA, 19 bp, Mus musculus
  siRNA target sequence for Pip5k1a (NM_008846.1,153-171).
gacggcatcgtcagctatt

SEQ ID NO: 597563 - DNA, 19 bp, Mus musculus
  siRNA target sequence for Pip5k1a (NM_008846.1,155-173).
cggcatcgtcagctattaa

SEQ ID NO: 597564 - DNA, 19 bp, Mus musculus
  siRNA target sequence for Pip5k1a (NM_008846.1,156-174).
ggcatcgtcagctattaaa

SEQ ID NO: 597565 - DNA, 19 bp, Mus musculus
  siRNA target sequence for Pip5k1a (NM_008846.1,379-397).
ggtatcaagcccgatgatt

SEQ ID NO: 597566 - DNA, 19 bp, Mus musculus
  siRNA target sequence for Pip5k1a (NM_008846.1,411-429).
ctgcagtgaacctctgata

SEQ ID NO: 597567 - DNA, 19 bp, Mus musculus
  siRNA target sequence for Pip5k1a (NM_008846.1,413-431).
gcagtgaacctctgataga

SEQ ID NO: 597568 - DNA, 19 bp, Mus musculus
  siRNA target sequence for Pip5k1a (NM_008846.1,416-434).
gtgaacctctgatagaact

SEQ ID NO: 597569 - DNA, 19 bp, Mus musculus
  siRNA target sequence for Pip5k1a (NM_008846.1,468-486).
cttgaccagcgatgatgaa

SEQ ID NO: 597570 - DNA, 19 bp, Mus musculus
  siRNA target sequence for Pip5k1a (NM_008846.1,471-489).
gaccagcgatgatgaattt

SEQ ID NO: 597571 - DNA, 19 bp, Mus musculus
  siRNA target sequence for Pip5k1a (NM_008846.1,543-561).
gggctattacatgaattta

SEQ ID NO: 597572 - DNA, 19 bp, Mus musculus
  siRNA target sequence for Pip5k1a (NM_008846.1,544-562).
ggctattacatgaatttaa

SEQ ID NO: 597573 - DNA, 19 bp, Mus musculus
  siRNA target sequence for Pip5k1a (NM_008846.1,664-682).
cgtgccatgaggatgcatt

SEQ ID NO: 597574 - DNA, 19 bp, Mus musculus
  siRNA target sequence for Pip5k1a (NM_008846.1,665-683).
gtgccatgaggatgcattt

SEQ ID NO: 597575 - DNA, 19 bp, Mus musculus
  siRNA target sequence for Pip5k1a (NM_008846.1,789-807).
cgaggggctgtatttcgat

SEQ ID NO: 597576 - DNA, 19 bp, Mus musculus
  siRNA target sequence for Pip5k1a (NM_008846.1,790-808).
gaggggctgtatttcgata

SEQ ID NO: 597577 - DNA, 19 bp, Mus musculus
  siRNA target sequence for Pip5k1a (NM_008846.1,794-812).
ggctgtatttcgatacaga

SEQ ID NO: 597578 - DNA, 19 bp, Mus musculus
  siRNA target sequence for Pip5k1a (NM_008846.1,795-813).
gctgtatttcgatacagaa

SEQ ID NO: 597579 - DNA, 19 bp, Mus musculus
  siRNA target sequence for Pip5k1a (NM_008846.1,796-814).
ctgtatttcgatacagaaa

SEQ ID NO: 597580 - DNA, 19 bp, Mus musculus
  siRNA target sequence for Pip5k1a (NM_008846.1,804-822).
cgatacagaaacatacaat

SEQ ID NO: 597581 - DNA, 19 bp, Mus musculus
  siRNA target sequence for Pip5k1a (NM_008846.1,815-833).
catacaatgcccttatgaa

SEQ ID NO: 597582 - DNA, 19 bp, Mus musculus
  siRNA target sequence for Pip5k1a (NM_008846.1,851-869).
gccgggttctggaaagctt

SEQ ID NO: 597583 - DNA, 19 bp, Mus musculus
  siRNA target sequence for Pip5k1a (NM_008846.1,913-931).
gaccattccctcaaagaca

SEQ ID NO: 597584 - DNA, 19 bp, Mus musculus
  siRNA target sequence for Pip5k1a (NM_008846.1,1102-1120).
gagaagctgcttctattca

SEQ ID NO: 597585 - DNA, 19 bp, Mus musculus
  siRNA target sequence for Pip5k1a (NM_008846.1,1137-1155).
cctccaatcatataggtta

SEQ ID NO: 597586 - DNA, 19 bp, Mus musculus
  siRNA target sequence for Pip5k1a (NM_008846.1,1141-1159).
caatcatataggttaatga

SEQ ID NO: 597587 - DNA, 19 bp, Mus musculus
  siRNA target sequence for Pip5k1a (NM_008846.1,1175-1193).
cctggaaagcccttgttta

SEQ ID NO: 597588 - DNA, 19 bp, Mus musculus
  siRNA target sequence for Pip5k1a (NM_008846.1,1203-1221).
caccgtttcagttcataga

SEQ ID NO: 597589 - DNA, 19 bp, Mus musculus
  siRNA target sequence for Pip5k1a (NM_008846.1,1211-1229).
cagttcatagaccaagttt

SEQ ID NO: 597590 - DNA, 19 bp, Mus musculus
  siRNA target sequence for Pip5k1a (NM_008846.1,1384-1402).
gacgagaagcgggatttgt

SEQ ID NO: 597591 - DNA, 19 bp, Mus musculus
  siRNA target sequence for Pip5k1a (NM_008846.1,1386-1404).
cgagaagcgggatttgtta

SEQ ID NO: 597592 - DNA, 19 bp, Mus musculus
  siRNA target sequence for Pip5k1a (NM_008846.1,1478-1496).
gcactccatcattatttga

SEQ ID NO: 597593 - DNA, 19 bp, Mus musculus
  siRNA target sequence for Pip5k1a (NM_008846.1,1479-1497).
cactccatcattatttgaa

SEQ ID NO: 597594 - DNA, 19 bp, Mus musculus
  siRNA target sequence for Pip5k1a (NM_008846.1,1510-1528).
gcgaccacaatatcatctt

SEQ ID NO: 597595 - DNA, 19 bp, Mus musculus
  siRNA target sequence for Pip5k1a (NM_008846.1,1561-1579).
gacaggactaccctttact

SEQ ID NO: 597596 - DNA, 19 bp, Mus musculus
  siRNA target sequence for Pip5k1a (NM_008846.1,1563-1581).
caggactaccctttactca

SEQ ID NO: 597597 - DNA, 19 bp, Mus musculus
  siRNA target sequence for Pip5k1b (NM_008847.2,497-515).
caagagagccacagtatct

SEQ ID NO: 597598 - DNA, 19 bp, Mus musculus
  siRNA target sequence for Pip5k1b (NM_008847.2,555-573).
ggccatcgaagtgttgatt

SEQ ID NO: 597599 - DNA, 19 bp, Mus musculus
  siRNA target sequence for Pip5k1b (NM_008847.2,748-766).
caccggctcaccattacaa

SEQ ID NO: 597600 - DNA, 19 bp, Mus musculus
  siRNA target sequence for Pip5k1b (NM_008847.2,751-769).
cggctcaccattacaatga

SEQ ID NO: 597601 - DNA, 19 bp, Mus musculus
  siRNA target sequence for Pip5k1b (NM_008847.2,759-777).
cattacaatgactttcgat

SEQ ID NO: 597602 - DNA, 19 bp, Mus musculus
  siRNA target sequence for Pip5k1b (NM_008847.2,825-843).
ggcatccggcctgatgatt

SEQ ID NO: 597603 - DNA, 19 bp, Mus musculus
  siRNA target sequence for Pip5k1b (NM_008847.2,826-844).
gcatccggcctgatgatta

SEQ ID NO: 597604 - DNA, 19 bp, Mus musculus
  siRNA target sequence for Pip5k1b (NM_008847.2,895-913).
ctagtggttccctcttcta

SEQ ID NO: 597605 - DNA, 19 bp, Mus musculus
  siRNA target sequence for Pip5k1b (NM_008847.2,927-945).
gatgaattcatcattaaga

SEQ ID NO: 597606 - DNA, 19 bp, Mus musculus
  siRNA target sequence for Pip5k1b (NM_008847.2,944-962).
gaccgtccagcataaagaa

SEQ ID NO: 597607 - DNA, 19 bp, Mus musculus
  siRNA target sequence for Pip5k1b (NM_008847.2,984-1002).
cttccaggatactacatga

SEQ ID NO: 597608 - DNA, 19 bp, Mus musculus
  siRNA target sequence for Pip5k1b (NM_008847.2,1029-1047).
ctgcccaaattttatggat

SEQ ID NO: 597609 - DNA, 19 bp, Mus musculus
  siRNA target sequence for Pip5k1b (NM_008847.2,1033-1051).
ccaaattttatggattgta

SEQ ID NO: 597610 - DNA, 19 bp, Mus musculus
  siRNA target sequence for Pip5k1b (NM_008847.2,1065-1083).
ggcggcaagaacatacgaa

SEQ ID NO: 597611 - DNA, 19 bp, Mus musculus
  siRNA target sequence for Pip5k1b (NM_008847.2,1066-1084).
gcggcaagaacatacgaat

SEQ ID NO: 597612 - DNA, 19 bp, Mus musculus
  siRNA target sequence for Pip5k1b (NM_008847.2,1103-1121).
cttgcctcggtcagtcaaa

SEQ ID NO: 597613 - DNA, 19 bp, Mus musculus
  siRNA target sequence for Pip5k1b (NM_008847.2,1108-1126).
ctcggtcagtcaaaatgca

SEQ ID NO: 597614 - DNA, 19 bp, Mus musculus
  siRNA target sequence for Pip5k1b (NM_008847.2,1110-1128).
cggtcagtcaaaatgcata

SEQ ID NO: 597615 - DNA, 19 bp, Mus musculus
  siRNA target sequence for Pip5k1b (NM_008847.2,1111-1129).
ggtcagtcaaaatgcatat

SEQ ID NO: 597616 - DNA, 19 bp, Mus musculus
  siRNA target sequence for Pip5k1b (NM_008847.2,1114-1132).
cagtcaaaatgcatatgaa

SEQ ID NO: 597617 - DNA, 19 bp, Mus musculus
  siRNA target sequence for Pip5k1b (NM_008847.2,1192-1210).
ctctccccacctttaaaga

SEQ ID NO: 597618 - DNA, 19 bp, Mus musculus
  siRNA target sequence for Pip5k1b (NM_008847.2,1282-1300).
ctctacagcgtgactgttt

SEQ ID NO: 597619 - DNA, 19 bp, Mus musculus
  siRNA target sequence for Pip5k1b (NM_008847.2,1425-1443).
ccacagaaggcgctctatt

SEQ ID NO: 597620 - DNA, 19 bp, Mus musculus
  siRNA target sequence for Pip5k1b (NM_008847.2,1581-1599).
cagtcctacaggtttgtta

SEQ ID NO: 597621 - DNA, 19 bp, Mus musculus
  siRNA target sequence for Pip5k1b (NM_008847.2,1585-1603).
cctacaggtttgttaagaa

SEQ ID NO: 597622 - DNA, 19 bp, Mus musculus
  siRNA target sequence for Pip5k1b (NM_008847.2,1604-1622).
gttggagcactcttggaaa

SEQ ID NO: 597623 - DNA, 19 bp, Mus musculus
  siRNA target sequence for Pip5k1b (NM_008847.2,1732-1750).
cttctcctaccaaaaagtt

SEQ ID NO: 597624 - DNA, 19 bp, Mus musculus
  siRNA target sequence for Pip5k1b (NM_008847.2,1752-1770).
cggtctggcccgtctttct

SEQ ID NO: 597625 - DNA, 19 bp, Mus musculus
  siRNA target sequence for Pip5k1b (NM_008847.2,1906-1924).
ctccacctttggaggaaat

SEQ ID NO: 597626 - DNA, 19 bp, Mus musculus
  siRNA target sequence for Pip5k1b (NM_008847.2,1972-1990).
gacaacctttgcaaatact

SEQ ID NO: 597627 - DNA, 19 bp, Mus musculus
  siRNA target sequence for Pip5k1b (NM_008847.2,1982-2000).
gcaaatactaaatttgagt

SEQ ID NO: 597628 - DNA, 19 bp, Mus musculus
  siRNA target sequence for Pip5k1c (NM_008844.1,276-294).
cgggagagactacgtataa

SEQ ID NO: 597629 - DNA, 19 bp, Mus musculus
  siRNA target sequence for Pip5k1c (NM_008844.1,525-543).
gcatccgtccagatgacta

SEQ ID NO: 597630 - DNA, 19 bp, Mus musculus
  siRNA target sequence for Pip5k1c (NM_008844.1,526-544).
catccgtccagatgactat

SEQ ID NO: 597631 - DNA, 19 bp, Mus musculus
  siRNA target sequence for Pip5k1c (NM_008844.1,530-548).
cgtccagatgactatttgt

SEQ ID NO: 597632 - DNA, 19 bp, Mus musculus
  siRNA target sequence for Pip5k1c (NM_008844.1,531-549).
gtccagatgactatttgta

SEQ ID NO: 597633 - DNA, 19 bp, Mus musculus
  siRNA target sequence for Pip5k1c (NM_008844.1,621-639).
gcgacgacgagttcatcat

SEQ ID NO: 597634 - DNA, 19 bp, Mus musculus
  siRNA target sequence for Pip5k1c (NM_008844.1,779-797).
cgcgtggtggtcatgaaca

SEQ ID NO: 597635 - DNA, 19 bp, Mus musculus
  siRNA target sequence for Pip5k1c (NM_008844.1,803-821).
ctgccccgtgtcgtcaaaa

SEQ ID NO: 597636 - DNA, 19 bp, Mus musculus
  siRNA target sequence for Pip5k1c (NM_008844.1,807-825).
cccgtgtcgtcaaaatgca

SEQ ID NO: 597637 - DNA, 19 bp, Mus musculus
  siRNA target sequence for Pip5k1c (NM_008844.1,815-833).
gtcaaaatgcaccttaagt

SEQ ID NO: 597638 - DNA, 19 bp, Mus musculus
  siRNA target sequence for Pip5k1c (NM_008844.1,1123-1141).
ggcccagaaggctctgtat

SEQ ID NO: 597639 - DNA, 19 bp, Mus musculus
  siRNA target sequence for Pip5k1c (NM_008844.1,1252-1270).
cctccacatcgggatcatt

SEQ ID NO: 597640 - DNA, 19 bp, Mus musculus
  siRNA target sequence for Pip5k1c (NM_008844.1,1962-1980).
caccctctacagacatcta

SEQ ID NO: 597641 - DNA, 19 bp, Mus musculus
  siRNA target sequence for Pip5k1c (NM_008844.1,1964-1982).
ccctctacagacatctatt

SEQ ID NO: 597642 - DNA, 19 bp, Mus musculus
  siRNA target sequence for Pip5k2a (NM_008845.2,257-275).
ggggggtcaaccattcgat

SEQ ID NO: 597643 - DNA, 19 bp, Mus musculus
  siRNA target sequence for Pip5k2a (NM_008845.2,261-279).
ggtcaaccattcgatcaat

SEQ ID NO: 597644 - DNA, 19 bp, Mus musculus
  siRNA target sequence for Pip5k2a (NM_008845.2,280-298).
gaactgagccacgttcaaa

SEQ ID NO: 597645 - DNA, 19 bp, Mus musculus
  siRNA target sequence for Pip5k2a (NM_008845.2,295-313).
caaatccctgtcatgttga

SEQ ID NO: 597646 - DNA, 19 bp, Mus musculus
  siRNA target sequence for Pip5k2a (NM_008845.2,327-345).
caaagcctactcaaagata

SEQ ID NO: 597647 - DNA, 19 bp, Mus musculus
  siRNA target sequence for Pip5k2a (NM_008845.2,348-366).
ggttgacaaccaccttttt

SEQ ID NO: 597648 - DNA, 19 bp, Mus musculus
  siRNA target sequence for Pip5k2a (NM_008845.2,381-399).
gccgagccatttcaagttt

SEQ ID NO: 597649 - DNA, 19 bp, Mus musculus
  siRNA target sequence for Pip5k2a (NM_008845.2,430-448).
ctgcgggagaggtttggaa

SEQ ID NO: 597650 - DNA, 19 bp, Mus musculus
  siRNA target sequence for Pip5k2a (NM_008845.2,445-463).
ggaatcgacgaccaagatt

SEQ ID NO: 597651 - DNA, 19 bp, Mus musculus
  siRNA target sequence for Pip5k2a (NM_008845.2,446-464).
gaatcgacgaccaagattt

SEQ ID NO: 597652 - DNA, 19 bp, Mus musculus
  siRNA target sequence for Pip5k2a (NM_008845.2,454-472).
gaccaagatttccagaatt

SEQ ID NO: 597653 - DNA, 19 bp, Mus musculus
  siRNA target sequence for Pip5k2a (NM_008845.2,527-545).
ggtttcacacgtcttatga

SEQ ID NO: 597654 - DNA, 19 bp, Mus musculus
  siRNA target sequence for Pip5k2a (NM_008845.2,528-546).
gtttcacacgtcttatgat

SEQ ID NO: 597655 - DNA, 19 bp, Mus musculus
  siRNA target sequence for Pip5k2a (NM_008845.2,532-550).
cacacgtcttatgataaaa

SEQ ID NO: 597656 - DNA, 19 bp, Mus musculus
  siRNA target sequence for Pip5k2a (NM_008845.2,666-684).
gggaatgtaccggcttaat

SEQ ID NO: 597657 - DNA, 19 bp, Mus musculus
  siRNA target sequence for Pip5k2a (NM_008845.2,668-686).
gaatgtaccggcttaatgt

SEQ ID NO: 597658 - DNA, 19 bp, Mus musculus
  siRNA target sequence for Pip5k2a (NM_008845.2,691-709).
ggagtggaaatatatgtga

SEQ ID NO: 597659 - DNA, 19 bp, Mus musculus
  siRNA target sequence for Pip5k2a (NM_008845.2,731-749).
gccaccggctatctgtata

SEQ ID NO: 597660 - DNA, 19 bp, Mus musculus
  siRNA target sequence for Pip5k2a (NM_008845.2,732-750).
ccaccggctatctgtatat

SEQ ID NO: 597661 - DNA, 19 bp, Mus musculus
  siRNA target sequence for Pip5k2a (NM_008845.2,733-751).
caccggctatctgtatata

SEQ ID NO: 597662 - DNA, 19 bp, Mus musculus
  siRNA target sequence for Pip5k2a (NM_008845.2,736-754).
cggctatctgtatatagga

SEQ ID NO: 597663 - DNA, 19 bp, Mus musculus
  siRNA target sequence for Pip5k2a (NM_008845.2,743-761).
ctgtatataggaaatacga

SEQ ID NO: 597664 - DNA, 19 bp, Mus musculus
  siRNA target sequence for Pip5k2a (NM_008845.2,771-789).
ctcgacagtggctagagaa

SEQ ID NO: 597665 - DNA, 19 bp, Mus musculus
  siRNA target sequence for Pip5k2a (NM_008845.2,852-870).
gggccaaaagatctatatt

SEQ ID NO: 597666 - DNA, 19 bp, Mus musculus
  siRNA target sequence for Pip5k2a (NM_008845.2,918-936).
cgagttccttgcacagtta

SEQ ID NO: 597667 - DNA, 19 bp, Mus musculus
  siRNA target sequence for Pip5k2a (NM_008845.2,921-939).
gttccttgcacagttaaaa

SEQ ID NO: 597668 - DNA, 19 bp, Mus musculus
  siRNA target sequence for Pip5k2a (NM_008845.2,1014-1032).
gaacgatggggaagaagaa

SEQ ID NO: 597669 - DNA, 19 bp, Mus musculus
  siRNA target sequence for Pip5k2a (NM_008845.2,1069-1087).
ccagacagtcccggaaata

SEQ ID NO: 597670 - DNA, 19 bp, Mus musculus
  siRNA target sequence for Pip5k2a (NM_008845.2,1107-1125).
cttggctcctggagagttt

SEQ ID NO: 597671 - DNA, 19 bp, Mus musculus
  siRNA target sequence for Pip5k2a (NM_008845.2,1110-1128).
ggctcctggagagtttgat

SEQ ID NO: 597672 - DNA, 19 bp, Mus musculus
  siRNA target sequence for Pip5k2a (NM_008845.2,1169-1187).
cgcctagaaaagaggtata

SEQ ID NO: 597673 - DNA, 19 bp, Mus musculus
  siRNA target sequence for Pip5k2a (NM_008845.2,1171-1189).
cctagaaaagaggtatact

SEQ ID NO: 597674 - DNA, 19 bp, Mus musculus
  siRNA target sequence for Pip5k2a (NM_008845.2,1172-1190).
ctagaaaagaggtatactt

SEQ ID NO: 597675 - DNA, 19 bp, Mus musculus
  siRNA target sequence for Pip5k2a (NM_008845.2,1195-1213).
gcgattattgacatcctta

SEQ ID NO: 597676 - DNA, 19 bp, Mus musculus
  siRNA target sequence for Pip5k2a (NM_008845.2,1216-1234).
cattacgatgcaaaaaaga

SEQ ID NO: 597677 - DNA, 19 bp, Mus musculus
  siRNA target sequence for Pip5k2a (NM_008845.2,1237-1255).
gctgcccacgctgcaaaaa

SEQ ID NO: 597678 - DNA, 19 bp, Mus musculus
  siRNA target sequence for Pip5k2a (NM_008845.2,1245-1263).
cgctgcaaaaactgttaaa

SEQ ID NO: 597679 - DNA, 19 bp, Mus musculus
  siRNA target sequence for Pip5k2a (NM_008845.2,1247-1265).
ctgcaaaaactgttaaaca

SEQ ID NO: 597680 - DNA, 19 bp, Mus musculus
  siRNA target sequence for Pip5k2b (NM_054051.1,247-265).
ggtgaaccacacgatcaat

SEQ ID NO: 597681 - DNA, 19 bp, Mus musculus
  siRNA target sequence for Pip5k2b (NM_054051.1,328-346).
gatcaaggtggacaatcat

SEQ ID NO: 597682 - DNA, 19 bp, Mus musculus
  siRNA target sequence for Pip5k2b (NM_054051.1,465-483).
cacgcagtgcacctatcaa

SEQ ID NO: 597683 - DNA, 19 bp, Mus musculus
  siRNA target sequence for Pip5k2b (NM_054051.1,467-485).
cgcagtgcacctatcaaca

SEQ ID NO: 597684 - DNA, 19 bp, Mus musculus
  siRNA target sequence for Pip5k2b (NM_054051.1,533-551).
cggcgtttcgtcatcaaga

SEQ ID NO: 597685 - DNA, 19 bp, Mus musculus
  siRNA target sequence for Pip5k2b (NM_054051.1,695-713).
gtggtcaccaggaatgtat

SEQ ID NO: 597686 - DNA, 19 bp, Mus musculus
  siRNA target sequence for Pip5k2b (NM_054051.1,698-716).
gtcaccaggaatgtattca

SEQ ID NO: 597687 - DNA, 19 bp, Mus musculus
  siRNA target sequence for Pip5k2b (NM_054051.1,729-747).
ctgtgcatcgcaaatacga

SEQ ID NO: 597688 - DNA, 19 bp, Mus musculus
  siRNA target sequence for Pip5k2b (NM_054051.1,795-813).
ctaaggacttgccaacttt

SEQ ID NO: 597689 - DNA, 19 bp, Mus musculus
  siRNA target sequence for Pip5k2b (NM_054051.1,1172-1190).
cctaagaaggaggtctatt

SEQ ID NO: 597690 - DNA, 19 bp, Mus musculus
  siRNA target sequence for Pip5k2b (NM_054051.1,1173-1191).
ctaagaaggaggtctattt

SEQ ID NO: 597691 - DNA, 19 bp, Mus musculus
  siRNA target sequence for Pip5k2b (NM_054051.1,1217-1235).
ccctatgacgctaagaaga

SEQ ID NO: 597692 - DNA, 19 bp, Mus musculus
  siRNA target sequence for Pip5k2b (NM_054051.1,1218-1236).
cctatgacgctaagaagaa

SEQ ID NO: 597693 - DNA, 19 bp, Mus musculus
  siRNA target sequence for Pip5k2b (NM_054051.1,1219-1237).
ctatgacgctaagaagaaa

SEQ ID NO: 597694 - DNA, 19 bp, Mus musculus
  siRNA target sequence for Pip5k2b (NM_054051.1,1297-1315).
cccggagcagtactcaaaa

SEQ ID NO: 597695 - DNA, 19 bp, Mus musculus
  siRNA target sequence for Pip5k2b (NM_054051.1,1316-1334).
cgcttcaacgagttcatgt

SEQ ID NO: 597696 - DNA, 19 bp, Mus musculus
  siRNA target sequence for Pip5k2c (NM_054097.2,206-224).
cgtcgctcactcgatcaat

SEQ ID NO: 597697 - DNA, 19 bp, Mus musculus
  siRNA target sequence for Pip5k2c (NM_054097.2,324-342).
cttcccagtcatttcaagt

SEQ ID NO: 597698 - DNA, 19 bp, Mus musculus
  siRNA target sequence for Pip5k2c (NM_054097.2,385-403).
ggtttgccatcgatgatca

SEQ ID NO: 597699 - DNA, 19 bp, Mus musculus
  siRNA target sequence for Pip5k2c (NM_054097.2,391-409).
ccatcgatgatcacgatta

SEQ ID NO: 597700 - DNA, 19 bp, Mus musculus
  siRNA target sequence for Pip5k2c (NM_054097.2,452-470).
cagtgatggccgtttcctt

SEQ ID NO: 597701 - DNA, 19 bp, Mus musculus
  siRNA target sequence for Pip5k2c (NM_054097.2,454-472).
gtgatggccgtttccttat

SEQ ID NO: 597702 - DNA, 19 bp, Mus musculus
  siRNA target sequence for Pip5k2c (NM_054097.2,456-474).
gatggccgtttccttatct

SEQ ID NO: 597703 - DNA, 19 bp, Mus musculus
  siRNA target sequence for Pip5k2c (NM_054097.2,501-519).
gaagtgtcgagcgaagata

SEQ ID NO: 597704 - DNA, 19 bp, Mus musculus
  siRNA target sequence for Pip5k2c (NM_054097.2,608-626).
gtaccgagtcagtgtagaa

SEQ ID NO: 597705 - DNA, 19 bp, Mus musculus
  siRNA target sequence for Pip5k2c (NM_054097.2,611-629).
ccgagtcagtgtagaaaat

SEQ ID NO: 597706 - DNA, 19 bp, Mus musculus
  siRNA target sequence for Pip5k2c (NM_054097.2,645-663).
ctcgtgatgcgcaatatgt

SEQ ID NO: 597707 - DNA, 19 bp, Mus musculus
  siRNA target sequence for Pip5k2c (NM_054097.2,647-665).
cgtgatgcgcaatatgttt

SEQ ID NO: 597708 - DNA, 19 bp, Mus musculus
  siRNA target sequence for Pip5k2c (NM_054097.2,648-666).
gtgatgcgcaatatgttta

SEQ ID NO: 597709 - DNA, 19 bp, Mus musculus
  siRNA target sequence for Pip5k2c (NM_054097.2,650-668).
gatgcgcaatatgtttagt

SEQ ID NO: 597710 - DNA, 19 bp, Mus musculus
  siRNA target sequence for Pip5k2c (NM_054097.2,673-691).
gtcttcctgtgcataggaa

SEQ ID NO: 597711 - DNA, 19 bp, Mus musculus
  siRNA target sequence for Pip5k2c (NM_054097.2,722-740).
ggaagccagcgataaggaa

SEQ ID NO: 597712 - DNA, 19 bp, Mus musculus
  siRNA target sequence for Pip5k2c (NM_054097.2,727-745).
ccagcgataaggaaaaggt

SEQ ID NO: 597713 - DNA, 19 bp, Mus musculus
  siRNA target sequence for Pip5k2c (NM_054097.2,728-746).
cagcgataaggaaaaggtt

SEQ ID NO: 597714 - DNA, 19 bp, Mus musculus
  siRNA target sequence for Pip5k2c (NM_054097.2,730-748).
gcgataaggaaaaggttaa

SEQ ID NO: 597715 - DNA, 19 bp, Mus musculus
  siRNA target sequence for Pip5k2c (NM_054097.2,757-775).
caacactaaaggatatgga

SEQ ID NO: 597716 - DNA, 19 bp, Mus musculus
  siRNA target sequence for Pip5k2c (NM_054097.2,768-786).
gatatggactttcttaaca

SEQ ID NO: 597717 - DNA, 19 bp, Mus musculus
  siRNA target sequence for Pip5k2c (NM_054097.2,791-809).
ccagaaagtgtatattggt

SEQ ID NO: 597718 - DNA, 19 bp, Mus musculus
  siRNA target sequence for Pip5k2c (NM_054097.2,845-863).
gcgagatgtggagtttcta

SEQ ID NO: 597719 - DNA, 19 bp, Mus musculus
  siRNA target sequence for Pip5k2c (NM_054097.2,847-865).
gagatgtggagtttctagt

SEQ ID NO: 597720 - DNA, 19 bp, Mus musculus
  siRNA target sequence for Pip5k2c (NM_054097.2,1088-1106).
gtccttcatcgatgtctat

SEQ ID NO: 597721 - DNA, 19 bp, Mus musculus
  siRNA target sequence for Pip5k2c (NM_054097.2,1155-1173).
ggcctcattgacattctga

SEQ ID NO: 597722 - DNA, 19 bp, Mus musculus
  siRNA target sequence for Pip5k2c (NM_054097.2,1166-1184).
cattctgacacagtatgat

SEQ ID NO: 597723 - DNA, 19 bp, Mus musculus
  siRNA target sequence for Pip5k2c (NM_054097.2,1284-1302).
gactttattgccaacatct

SEQ ID NO: 597724 - DNA, 19 bp, Mus musculus
  siRNA target sequence for D830007E07 (NM_173027.1,222-240).
ctcggacaaggggaagata

SEQ ID NO: 597725 - DNA, 19 bp, Mus musculus
  siRNA target sequence for D830007E07 (NM_173027.1,383-401).
gcttcactccgaagtacaa

SEQ ID NO: 597726 - DNA, 19 bp, Mus musculus
  siRNA target sequence for D830007E07 (NM_173027.1,384-402).
cttcactccgaagtacaaa

SEQ ID NO: 597727 - DNA, 19 bp, Mus musculus
  siRNA target sequence for D830007E07 (NM_173027.1,778-796).
cggttcttgctgttggaaa

SEQ ID NO: 597728 - DNA, 19 bp, Mus musculus
  siRNA target sequence for D830007E07 (NM_173027.1,779-797).
ggttcttgctgttggaaaa

SEQ ID NO: 597729 - DNA, 19 bp, Mus musculus
  siRNA target sequence for D830007E07 (NM_173027.1,948-966).
catgcaggtttatcaaact

SEQ ID NO: 597730 - DNA, 19 bp, Mus musculus
  siRNA target sequence for D830007E07 (NM_173027.1,951-969).
gcaggtttatcaaactgat

SEQ ID NO: 597731 - DNA, 19 bp, Mus musculus
  siRNA target sequence for D830007E07 (NM_173027.1,982-1000).
ctctgcaaagataagtact

SEQ ID NO: 597732 - DNA, 19 bp, Mus musculus
  siRNA target sequence for D830007E07 (NM_173027.1,984-1002).
ctgcaaagataagtactat

SEQ ID NO: 597733 - DNA, 19 bp, Mus musculus
  siRNA target sequence for D830007E07 (NM_173027.1,1157-1175).
ccagctccgtcctcataat

SEQ ID NO: 597734 - DNA, 19 bp, Mus musculus
  siRNA target sequence for D830007E07 (NM_173027.1,1160-1178).
gctccgtcctcataatcta

SEQ ID NO: 597735 - DNA, 19 bp, Mus musculus
  siRNA target sequence for D830007E07 (NM_173027.1,1161-1179).
ctccgtcctcataatctat

SEQ ID NO: 597736 - DNA, 19 bp, Mus musculus
  siRNA target sequence for D830007E07 (NM_173027.1,1163-1181).
ccgtcctcataatctatga

SEQ ID NO: 597737 - DNA, 19 bp, Mus musculus
  siRNA target sequence for D830007E07 (NM_173027.1,1164-1182).
cgtcctcataatctatgat

SEQ ID NO: 597738 - DNA, 19 bp, Mus musculus
  siRNA target sequence for D830007E07 (NM_173027.1,1322-1340).
gaccagatcctggctatat

SEQ ID NO: 597739 - DNA, 19 bp, Mus musculus
  siRNA target sequence for D830007E07 (NM_173027.1,1364-1382).
ggattctgcgggatatcca

SEQ ID NO: 597740 - DNA, 19 bp, Mus musculus
  siRNA target sequence for Ihpk1 (NM_013785.2,482-500).
cactccctcccgaaatgaa

SEQ ID NO: 597741 - DNA, 19 bp, Mus musculus
  siRNA target sequence for Ihpk1 (NM_013785.2,487-505).
cctcccgaaatgaaggaat

SEQ ID NO: 597742 - DNA, 19 bp, Mus musculus
  siRNA target sequence for Ihpk1 (NM_013785.2,488-506).
ctcccgaaatgaaggaatt

SEQ ID NO: 597743 - DNA, 19 bp, Mus musculus
  siRNA target sequence for Ihpk1 (NM_013785.2,570-588).
cttggtagcctatccttat

SEQ ID NO: 597744 - DNA, 19 bp, Mus musculus
  siRNA target sequence for Ihpk1 (NM_013785.2,896-914).
ccaaggaccgaaaactcta

SEQ ID NO: 597745 - DNA, 19 bp, Mus musculus
  siRNA target sequence for Ihpk1 (NM_013785.2,937-955).
gtggtacaccacttcaagt

SEQ ID NO: 597746 - DNA, 19 bp, Mus musculus
  siRNA target sequence for Ihpk1 (NM_013785.2,1169-1187).
gcaatgcgctctatcagta

SEQ ID NO: 597747 - DNA, 19 bp, Mus musculus
  siRNA target sequence for Ihpk1 (NM_013785.2,1301-1319).
ccctgcttgtcatctatga

SEQ ID NO: 597748 - DNA, 19 bp, Mus musculus
  siRNA target sequence for Itpka (NM_146125.1,511-529).
gaggacgtggggcagaaaa

SEQ ID NO: 597749 - DNA, 19 bp, Mus musculus
  siRNA target sequence for Itpka (NM_146125.1,668-686).
gctcggagcctgaacacta

SEQ ID NO: 597750 - DNA, 19 bp, Mus musculus
  siRNA target sequence for Itpka (NM_146125.1,1054-1072).
ggatcttgcagtactgatt

SEQ ID NO: 597751 - DNA, 19 bp, Mus musculus
  siRNA target sequence for Itpka (NM_146125.1,1058-1076).
cttgcagtactgatttcaa

SEQ ID NO: 597752 - DNA, 19 bp, Mus musculus
  siRNA target sequence for Itpka (NM_146125.1,1267-1285).
ggtgtgtggctcatcgatt

SEQ ID NO: 597753 - DNA, 19 bp, Mus musculus
  siRNA target sequence for Itpka (NM_146125.1,1268-1286).
gtgtgtggctcatcgattt

SEQ ID NO: 597754 - DNA, 19 bp, Mus musculus
  siRNA target sequence for Itpka (NM_146125.1,1355-1373).
gtgaggacggctatttgct

SEQ ID NO: 597755 - DNA, 19 bp, Mus musculus
  siRNA target sequence for 2610042N09Rik (NM_025951.1,343-361).
cgcactacgagctcagaaa

SEQ ID NO: 597756 - DNA, 19 bp, Mus musculus
  siRNA target sequence for 2610042N09Rik (NM_025951.1,383-401).
cagaatttgctgatattgt

SEQ ID NO: 597757 - DNA, 19 bp, Mus musculus
  siRNA target sequence for 2610042N09Rik (NM_025951.1,414-432).
gcaagcaatagaaattgga

SEQ ID NO: 597758 - DNA, 19 bp, Mus musculus
  siRNA target sequence for 2610042N09Rik (NM_025951.1,457-475).
gggtcaagtggaagttact

SEQ ID NO: 597759 - DNA, 19 bp, Mus musculus
  siRNA target sequence for 2610042N09Rik (NM_025951.1,461-479).
caagtggaagttactttgt

SEQ ID NO: 597760 - DNA, 19 bp, Mus musculus
  siRNA target sequence for 2610042N09Rik (NM_025951.1,483-501).
ggattctaaaaggaatatt

SEQ ID NO: 597761 - DNA, 19 bp, Mus musculus
  siRNA target sequence for 2610042N09Rik (NM_025951.1,484-502).
gattctaaaaggaatatta

SEQ ID NO: 597762 - DNA, 19 bp, Mus musculus
  siRNA target sequence for 2610042N09Rik (NM_025951.1,507-525).
cgtgtttaaacccaaatca

SEQ ID NO: 597763 - DNA, 19 bp, Mus musculus
  siRNA target sequence for 2610042N09Rik (NM_025951.1,557-575).
ggaccaagtacgtccataa

SEQ ID NO: 597764 - DNA, 19 bp, Mus musculus
  siRNA target sequence for 2610042N09Rik (NM_025951.1,560-578).
ccaagtacgtccataaggt

SEQ ID NO: 597765 - DNA, 19 bp, Mus musculus
  siRNA target sequence for 2610042N09Rik (NM_025951.1,561-579).
caagtacgtccataaggtt

SEQ ID NO: 597766 - DNA, 19 bp, Mus musculus
  siRNA target sequence for 2610042N09Rik (NM_025951.1,647-665).
cctacctggtggatgtcaa

SEQ ID NO: 597767 - DNA, 19 bp, Mus musculus
  siRNA target sequence for 2610042N09Rik (NM_025951.1,673-691).
ctgggtattgtgcctaaaa

SEQ ID NO: 597768 - DNA, 19 bp, Mus musculus
  siRNA target sequence for 2610042N09Rik (NM_025951.1,675-693).
gggtattgtgcctaaaaca

SEQ ID NO: 597769 - DNA, 19 bp, Mus musculus
  siRNA target sequence for 2610042N09Rik (NM_025951.1,706-724).
cttgtcagtgagacattta

SEQ ID NO: 597770 - DNA, 19 bp, Mus musculus
  siRNA target sequence for 2610042N09Rik (NM_025951.1,908-926).
ccgagaacattagaaaaca

SEQ ID NO: 597771 - DNA, 19 bp, Mus musculus
  siRNA target sequence for 2610042N09Rik (NM_025951.1,933-951).
gtcacagtttgaaaaatta

SEQ ID NO: 597772 - DNA, 19 bp, Mus musculus
  siRNA target sequence for 2610042N09Rik (NM_025951.1,982-1000).
gacaggggaaatgataact

SEQ ID NO: 597773 - DNA, 19 bp, Mus musculus
  siRNA target sequence for 2610042N09Rik (NM_025951.1,1050-1068).
ggaatcaaactggattgat

SEQ ID NO: 597774 - DNA, 19 bp, Mus musculus
  siRNA target sequence for 2610042N09Rik (NM_025951.1,1051-1069).
gaatcaaactggattgata

SEQ ID NO: 597775 - DNA, 19 bp, Mus musculus
  siRNA target sequence for 2610042N09Rik (NM_025951.1,1059-1077).
ctggattgataataaacaa

SEQ ID NO: 597776 - DNA, 19 bp, Mus musculus
  siRNA target sequence for 2610042N09Rik (NM_025951.1,1061-1079).
ggattgataataaacaatt

SEQ ID NO: 597777 - DNA, 19 bp, Mus musculus
  siRNA target sequence for 2610042N09Rik (NM_025951.1,1109-1127).
ggctagcatttccctttaa

SEQ ID NO: 597778 - DNA, 19 bp, Mus musculus
  siRNA target sequence for 2610042N09Rik (NM_025951.1,1138-1156).
gaatggcgagcatatccat

SEQ ID NO: 597779 - DNA, 19 bp, Mus musculus
  siRNA target sequence for 2610042N09Rik (NM_025951.1,1142-1160).
ggcgagcatatccatttca

SEQ ID NO: 597780 - DNA, 19 bp, Mus musculus
  siRNA target sequence for 2610042N09Rik (NM_025951.1,1144-1162).
cgagcatatccatttcact

SEQ ID NO: 597781 - DNA, 19 bp, Mus musculus
  siRNA target sequence for 2610042N09Rik (NM_025951.1,1170-1188).
gcttcctcaagcaaaggtt

SEQ ID NO: 597782 - DNA, 19 bp, Mus musculus
  siRNA target sequence for 2610042N09Rik (NM_025951.1,1198-1216).
gaagagactcgaaacttga

SEQ ID NO: 597783 - DNA, 19 bp, Mus musculus
  siRNA target sequence for 2610042N09Rik (NM_025951.1,1203-1221).
gactcgaaacttgattcta

SEQ ID NO: 597784 - DNA, 19 bp, Mus musculus
  siRNA target sequence for 2610042N09Rik (NM_025951.1,1212-1230).
cttgattctaccctatatt

SEQ ID NO: 597785 - DNA, 19 bp, Mus musculus
  siRNA target sequence for 2610042N09Rik (NM_025951.1,1215-1233).
gattctaccctatatttct

SEQ ID NO: 597786 - DNA, 19 bp, Mus musculus
  siRNA target sequence for 2610042N09Rik (NM_025951.1,1232-1250).
ctgacatgaactttgtaca

SEQ ID NO: 597787 - DNA, 19 bp, Mus musculus
  siRNA target sequence for 2610042N09Rik (NM_028744.1,365-383).
ctgaactttgtccgtttta

SEQ ID NO: 597788 - DNA, 19 bp, Mus musculus
  siRNA target sequence for 2610042N09Rik (NM_028744.1,367-385).
gaactttgtccgttttact

SEQ ID NO: 597789 - DNA, 19 bp, Mus musculus
  siRNA target sequence for 2610042N09Rik (NM_028744.1,370-388).
ctttgtccgttttactcta

SEQ ID NO: 597790 - DNA, 19 bp, Mus musculus
  siRNA target sequence for 2610042N09Rik (NM_028744.1,386-404).
ctaggagtctgtgttacaa

SEQ ID NO: 597791 - DNA, 19 bp, Mus musculus
  siRNA target sequence for 2610042N09Rik (NM_028744.1,396-414).
gtgttacaaaacaactact

SEQ ID NO: 597792 - DNA, 19 bp, Mus musculus
  siRNA target sequence for 2610042N09Rik (NM_028744.1,415-433).
gctttggggtattataata

SEQ ID NO: 597793 - DNA, 19 bp, Mus musculus
  siRNA target sequence for 2610042N09Rik (NM_028744.1,416-434).
ctttggggtattataatat

SEQ ID NO: 597794 - DNA, 19 bp, Mus musculus
  siRNA target sequence for 2610042N09Rik (NM_028744.1,420-438).
ggggtattataatattatt

SEQ ID NO: 597795 - DNA, 19 bp, Mus musculus
  siRNA target sequence for Frap1 (NM_020009.1,293-311).
gctgaaccatcacattttt

SEQ ID NO: 597796 - DNA, 19 bp, Mus musculus
  siRNA target sequence for Frap1 (NM_020009.1,381-399).
gtggaaggtgggaattcca

SEQ ID NO: 597797 - DNA, 19 bp, Mus musculus
  siRNA target sequence for Frap1 (NM_020009.1,398-416).
caccagaattggcagattt

SEQ ID NO: 597798 - DNA, 19 bp, Mus musculus
  siRNA target sequence for Frap1 (NM_020009.1,445-463).
caagcgatccagttgtcat

SEQ ID NO: 597799 - DNA, 19 bp, Mus musculus
  siRNA target sequence for Frap1 (NM_020009.1,500-518).
ggcaggggacactttcact

SEQ ID NO: 597800 - DNA, 19 bp, Mus musculus
  siRNA target sequence for Frap1 (NM_020009.1,509-527).
cactttcactgctgaatat

SEQ ID NO: 597801 - DNA, 19 bp, Mus musculus
  siRNA target sequence for Frap1 (NM_020009.1,731-749).
ccttcgtgcctgtctgatt

SEQ ID NO: 597802 - DNA, 19 bp, Mus musculus
  siRNA target sequence for Frap1 (NM_020009.1,754-772).
ccacgcagcgggaaccaaa

SEQ ID NO: 597803 - DNA, 19 bp, Mus musculus
  siRNA target sequence for Frap1 (NM_020009.1,794-812).
gtaccggcacacatttgaa

SEQ ID NO: 597804 - DNA, 19 bp, Mus musculus
  siRNA target sequence for Frap1 (NM_020009.1,854-872).
gggtatgaatcgagatgat

SEQ ID NO: 597805 - DNA, 19 bp, Mus musculus
  siRNA target sequence for Frap1 (NM_020009.1,1423-1441).
ccgtgaggtcggagtttaa

SEQ ID NO: 597806 - DNA, 19 bp, Mus musculus
  siRNA target sequence for Frap1 (NM_020009.1,1527-1545).
gtggatgccaccgtattca

SEQ ID NO: 597807 - DNA, 19 bp, Mus musculus
  siRNA target sequence for Frap1 (NM_020009.1,1906-1924).
gacactgcgcagatcactt

SEQ ID NO: 597808 - DNA, 19 bp, Mus musculus
  siRNA target sequence for Frap1 (NM_020009.1,2326-2344).
gcggcattgggagaatcaa

SEQ ID NO: 597809 - DNA, 19 bp, Mus musculus
  siRNA target sequence for Frap1 (NM_020009.1,2415-2433).
cctatcctgaaggctttaa

SEQ ID NO: 597810 - DNA, 19 bp, Mus musculus
  siRNA target sequence for Frap1 (NM_020009.1,2416-2434).
ctatcctgaaggctttaat

SEQ ID NO: 597811 - DNA, 19 bp, Mus musculus
  siRNA target sequence for Frap1 (NM_020009.1,2486-2504).
cgtgttggccactatagga

SEQ ID NO: 597812 - DNA, 19 bp, Mus musculus
  siRNA target sequence for Frap1 (NM_020009.1,2542-2560).
gggtggacgagctctttat

SEQ ID NO: 597813 - DNA, 19 bp, Mus musculus
  siRNA target sequence for Frap1 (NM_020009.1,2550-2568).
gagctctttatcatcatca

SEQ ID NO: 597814 - DNA, 19 bp, Mus musculus
  siRNA target sequence for Frap1 (NM_020009.1,2762-2780).
gctccttggggctttggat

SEQ ID NO: 597815 - DNA, 19 bp, Mus musculus
  siRNA target sequence for Frap1 (NM_020009.1,2963-2981).
gcggatcttccgagatcaa

SEQ ID NO: 597816 - DNA, 19 bp, Mus musculus
  siRNA target sequence for Frap1 (NM_020009.1,2964-2982).
cggatcttccgagatcaat

SEQ ID NO: 597817 - DNA, 19 bp, Mus musculus
  siRNA target sequence for Frap1 (NM_020009.1,3115-3133).
ccatccgggaatttctgtt

SEQ ID NO: 597818 - DNA, 19 bp, Mus musculus
  siRNA target sequence for Frap1 (NM_020009.1,3177-3195).
cgtccctacatggatgaaa

SEQ ID NO: 597819 - DNA, 19 bp, Mus musculus
  siRNA target sequence for Frap1 (NM_020009.1,3178-3196).
gtccctacatggatgaaat

SEQ ID NO: 597820 - DNA, 19 bp, Mus musculus
  siRNA target sequence for Frap1 (NM_020009.1,3239-3257).
ccagagcacaatcattctt

SEQ ID NO: 597821 - DNA, 19 bp, Mus musculus
  siRNA target sequence for Frap1 (NM_020009.1,3278-3296).
ggctctcggaggggaattt

SEQ ID NO: 597822 - DNA, 19 bp, Mus musculus
  siRNA target sequence for Frap1 (NM_020009.1,3279-3297).
gctctcggaggggaattta

SEQ ID NO: 597823 - DNA, 19 bp, Mus musculus
  siRNA target sequence for Frap1 (NM_020009.1,3280-3298).
ctctcggaggggaatttaa

SEQ ID NO: 597824 - DNA, 19 bp, Mus musculus
  siRNA target sequence for Frap1 (NM_020009.1,3284-3302).
cggaggggaatttaagctt

SEQ ID NO: 597825 - DNA, 19 bp, Mus musculus
  siRNA target sequence for Frap1 (NM_020009.1,3285-3303).
ggaggggaatttaagcttt

SEQ ID NO: 597826 - DNA, 19 bp, Mus musculus
  siRNA target sequence for Frap1 (NM_020009.1,3406-3424).
gcgccaacctggatgacta

SEQ ID NO: 597827 - DNA, 19 bp, Mus musculus
  siRNA target sequence for Frap1 (NM_020009.1,3409-3427).
ccaacctggatgactatct

SEQ ID NO: 597828 - DNA, 19 bp, Mus musculus
  siRNA target sequence for Frap1 (NM_020009.1,3441-3459).
cctccgattgtgaaattgt

SEQ ID NO: 597829 - DNA, 19 bp, Mus musculus
  siRNA target sequence for Frap1 (NM_020009.1,3442-3460).
ctccgattgtgaaattgtt

SEQ ID NO: 597830 - DNA, 19 bp, Mus musculus
  siRNA target sequence for Frap1 (NM_020009.1,3445-3463).
cgattgtgaaattgtttga

SEQ ID NO: 597831 - DNA, 19 bp, Mus musculus
  siRNA target sequence for Frap1 (NM_020009.1,3545-3563).
ctacgcctcccgcatcatt

SEQ ID NO: 597832 - DNA, 19 bp, Mus musculus
  siRNA target sequence for Frap1 (NM_020009.1,3556-3574).
gcatcattcacccaatagt

SEQ ID NO: 597833 - DNA, 19 bp, Mus musculus
  siRNA target sequence for Frap1 (NM_020009.1,3557-3575).
catcattcacccaatagtt

SEQ ID NO: 597834 - DNA, 19 bp, Mus musculus
  siRNA target sequence for Frap1 (NM_020009.1,3626-3644).
gtcttcgcttgtctttcaa

SEQ ID NO: 597835 - DNA, 19 bp, Mus musculus
  siRNA target sequence for Frap1 (NM_020009.1,3628-3646).
cttcgcttgtctttcaact

SEQ ID NO: 597836 - DNA, 19 bp, Mus musculus
  siRNA target sequence for Frap1 (NM_020009.1,3717-3735).
cgctatgatgtgcttatct

SEQ ID NO: 597837 - DNA, 19 bp, Mus musculus
  siRNA target sequence for Frap1 (NM_020009.1,3770-3788).
ggaagaagaccctttgatt

SEQ ID NO: 597838 - DNA, 19 bp, Mus musculus
  siRNA target sequence for Frap1 (NM_020009.1,3771-3789).
gaagaagaccctttgattt

SEQ ID NO: 597839 - DNA, 19 bp, Mus musculus
  siRNA target sequence for Frap1 (NM_020009.1,4069-4087).
gctggtctgagctgaatga

SEQ ID NO: 597840 - DNA, 19 bp, Mus musculus
  siRNA target sequence for Frap1 (NM_020009.1,4104-4122).
ctcatcaggagtattgagt

SEQ ID NO: 597841 - DNA, 19 bp, Mus musculus
  siRNA target sequence for Frap1 (NM_020009.1,4126-4144).
ctctcacttctcaagacat

SEQ ID NO: 597842 - DNA, 19 bp, Mus musculus
  siRNA target sequence for Frap1 (NM_020009.1,4211-4229).
gccgctgagagatgacaat

SEQ ID NO: 597843 - DNA, 19 bp, Mus musculus
  siRNA target sequence for Frap1 (NM_020009.1,4276-4294).
ccaaagcactgcactacaa

SEQ ID NO: 597844 - DNA, 19 bp, Mus musculus
  siRNA target sequence for Frap1 (NM_020009.1,4277-4295).
caaagcactgcactacaaa

SEQ ID NO: 597845 - DNA, 19 bp, Mus musculus
  siRNA target sequence for Frap1 (NM_020009.1,4339-4357).
ccctcatcagcattaacaa

SEQ ID NO: 597846 - DNA, 19 bp, Mus musculus
  siRNA target sequence for Frap1 (NM_020009.1,4391-4409).
gttggaatacgccatgaaa

SEQ ID NO: 597847 - DNA, 19 bp, Mus musculus
  siRNA target sequence for Frap1 (NM_020009.1,4395-4413).
gaatacgccatgaaacact

SEQ ID NO: 597848 - DNA, 19 bp, Mus musculus
  siRNA target sequence for Frap1 (NM_020009.1,4431-4449).
caggccacctggtatgaga

SEQ ID NO: 597849 - DNA, 19 bp, Mus musculus
  siRNA target sequence for Frap1 (NM_020009.1,4597-4615).
ggactctggttaatgatga

SEQ ID NO: 597850 - DNA, 19 bp, Mus musculus
  siRNA target sequence for Frap1 (NM_020009.1,4714-4732).
cccacgatggagcctttta

SEQ ID NO: 597851 - DNA, 19 bp, Mus musculus
  siRNA target sequence for Frap1 (NM_020009.1,4716-4734).
cacgatggagccttttaca

SEQ ID NO: 597852 - DNA, 19 bp, Mus musculus
  siRNA target sequence for Frap1 (NM_020009.1,4747-4765).
ctctacatcaggatctctt

SEQ ID NO: 597853 - DNA, 19 bp, Mus musculus
  siRNA target sequence for Frap1 (NM_020009.1,4885-4903).
ccgagctggaagaggttat

SEQ ID NO: 597854 - DNA, 19 bp, Mus musculus
  siRNA target sequence for Frap1 (NM_020009.1,4898-4916).
ggttatccagtacaaactt

SEQ ID NO: 597855 - DNA, 19 bp, Mus musculus
  siRNA target sequence for Frap1 (NM_020009.1,4967-4985).
gggctgccagcgtattgtt

SEQ ID NO: 597856 - DNA, 19 bp, Mus musculus
  siRNA target sequence for Frap1 (NM_020009.1,5095-5113).
ctcttgctcataaaacctt

SEQ ID NO: 597857 - DNA, 19 bp, Mus musculus
  siRNA target sequence for Frap1 (NM_020009.1,5100-5118).
gctcataaaaccttagtgt

SEQ ID NO: 597858 - DNA, 19 bp, Mus musculus
  siRNA target sequence for Frap1 (NM_020009.1,5181-5199).
gtgacctatgcctacatga

SEQ ID NO: 597859 - DNA, 19 bp, Mus musculus
  siRNA target sequence for Frap1 (NM_020009.1,5210-5228).
gaaaagtgctcggaagatt

SEQ ID NO: 597860 - DNA, 19 bp, Mus musculus
  siRNA target sequence for Frap1 (NM_020009.1,5404-5422).
ccaaggtgctacagtacta

SEQ ID NO: 597861 - DNA, 19 bp, Mus musculus
  siRNA target sequence for Frap1 (NM_020009.1,5649-5667).
gaagctgagagcaatgaga

SEQ ID NO: 597862 - DNA, 19 bp, Mus musculus
  siRNA target sequence for Frap1 (NM_020009.1,5700-5718).
gtcactgaggatttatcca

SEQ ID NO: 597863 - DNA, 19 bp, Mus musculus
  siRNA target sequence for Frap1 (NM_020009.1,5702-5720).
cactgaggatttatccaaa

SEQ ID NO: 597864 - DNA, 19 bp, Mus musculus
  siRNA target sequence for Frap1 (NM_020009.1,5716-5734).
ccaaaactctcttgttgta

SEQ ID NO: 597865 - DNA, 19 bp, Mus musculus
  siRNA target sequence for Frap1 (NM_020009.1,5735-5753).
cactgtccctgctgttcaa

SEQ ID NO: 597866 - DNA, 19 bp, Mus musculus
  siRNA target sequence for Frap1 (NM_020009.1,5763-5781).
cgttctatctccttgtcaa

SEQ ID NO: 597867 - DNA, 19 bp, Mus musculus
  siRNA target sequence for Frap1 (NM_020009.1,5789-5807).
caacctccaggatacacta

SEQ ID NO: 597868 - DNA, 19 bp, Mus musculus
  siRNA target sequence for Frap1 (NM_020009.1,5792-5810).
cctccaggatacactaaga

SEQ ID NO: 597869 - DNA, 19 bp, Mus musculus
  siRNA target sequence for Frap1 (NM_020009.1,5814-5832).
ctcaccctgtggtttgatt

SEQ ID NO: 597870 - DNA, 19 bp, Mus musculus
  siRNA target sequence for Frap1 (NM_020009.1,5816-5834).
caccctgtggtttgattat

SEQ ID NO: 597871 - DNA, 19 bp, Mus musculus
  siRNA target sequence for Frap1 (NM_020009.1,6023-6041).
gacggtggcttctaagtct

SEQ ID NO: 597872 - DNA, 19 bp, Mus musculus
  siRNA target sequence for Frap1 (NM_020009.1,6221-6239).
gaacgtgaaaggcatgttt

SEQ ID NO: 597873 - DNA, 19 bp, Mus musculus
  siRNA target sequence for Frap1 (NM_020009.1,6313-6331).
catatggccgagatttaat

SEQ ID NO: 597874 - DNA, 19 bp, Mus musculus
  siRNA target sequence for Frap1 (NM_020009.1,6342-6360).
gaatggtgtcgaaagtaca

SEQ ID NO: 597875 - DNA, 19 bp, Mus musculus
  siRNA target sequence for Frap1 (NM_020009.1,6346-6364).
ggtgtcgaaagtacatgaa

SEQ ID NO: 597876 - DNA, 19 bp, Mus musculus
  siRNA target sequence for Frap1 (NM_020009.1,6467-6485).
gtatgtgtcccccaaactt

SEQ ID NO: 597877 - DNA, 19 bp, Mus musculus
  siRNA target sequence for Frap1 (NM_020009.1,6545-6563).
cattcgcattcaatccata

SEQ ID NO: 597878 - DNA, 19 bp, Mus musculus
  siRNA target sequence for Frap1 (NM_020009.1,6565-6583).
ccccgtctttgcaagtcat

SEQ ID NO: 597879 - DNA, 19 bp, Mus musculus
  siRNA target sequence for Frap1 (NM_020009.1,6725-6743).
caatgaccccacttctctt

SEQ ID NO: 597880 - DNA, 19 bp, Mus musculus
  siRNA target sequence for Frap1 (NM_020009.1,6902-6920).
gcggatggctcctgactat

SEQ ID NO: 597881 - DNA, 19 bp, Mus musculus
  siRNA target sequence for Frap1 (NM_020009.1,6995-7013).
caagctactgtggctaaaa

SEQ ID NO: 597882 - DNA, 19 bp, Mus musculus
  siRNA target sequence for Frap1 (NM_020009.1,7038-7056).
gaccgaagaaccaactata

SEQ ID NO: 597883 - DNA, 19 bp, Mus musculus
  siRNA target sequence for Frap1 (NM_020009.1,7059-7077).
cgctccctggccgttatgt

SEQ ID NO: 597884 - DNA, 19 bp, Mus musculus
  siRNA target sequence for Frap1 (NM_020009.1,7076-7094).
gtcgatggtcggatacatt

SEQ ID NO: 597885 - DNA, 19 bp, Mus musculus
  siRNA target sequence for Frap1 (NM_020009.1,7078-7096).
cgatggtcggatacatttt

SEQ ID NO: 597886 - DNA, 19 bp, Mus musculus
  siRNA target sequence for Frap1 (NM_020009.1,7079-7097).
gatggtcggatacatttta

SEQ ID NO: 597887 - DNA, 19 bp, Mus musculus
  siRNA target sequence for Frap1 (NM_020009.1,7111-7129).
ggcacccatccaatctgat

SEQ ID NO: 597888 - DNA, 19 bp, Mus musculus
  siRNA target sequence for Frap1 (NM_020009.1,7187-7205).
cgctatgaccagagagaaa

SEQ ID NO: 597889 - DNA, 19 bp, Mus musculus
  siRNA target sequence for Frap1 (NM_020009.1,7237-7255).
gaatgttgaccaatgctat

SEQ ID NO: 597890 - DNA, 19 bp, Mus musculus
  siRNA target sequence for Frap1 (NM_020009.1,7266-7284).
ggtctggatggcaactaca

SEQ ID NO: 597891 - DNA, 19 bp, Mus musculus
  siRNA target sequence for Frap1 (NM_020009.1,7344-7362).
gtgctggaagcctttgtct

SEQ ID NO: 597892 - DNA, 19 bp, Mus musculus
  siRNA target sequence for Frap1 (NM_020009.1,7346-7364).
gctggaagcctttgtctat

SEQ ID NO: 597893 - DNA, 19 bp, Mus musculus
  siRNA target sequence for Frap1 (NM_020009.1,7449-7467).
ggccagtcagtagaaattt

SEQ ID NO: 597894 - DNA, 19 bp, Mus musculus
  siRNA target sequence for Frap1 (NM_020009.1,7450-7468).
gccagtcagtagaaatttt

SEQ ID NO: 597895 - DNA, 19 bp, Mus musculus
  siRNA target sequence for Frap1 (NM_020009.1,7485-7503).
ggagaaccagcccataaga

SEQ ID NO: 597896 - DNA, 19 bp, Mus musculus
  siRNA target sequence for Frap1 (NM_020009.1,7564-7582).
cagaagccttaaacaagaa

SEQ ID NO: 597897 - DNA, 19 bp, Mus musculus
  siRNA target sequence for Frap1 (NM_020009.1,7570-7588).
ccttaaacaagaaagctat

SEQ ID NO: 597898 - DNA, 19 bp, Mus musculus
  siRNA target sequence for Frap1 (NM_020009.1,7617-7635).
ctcactggtcgggatttct

SEQ ID NO: 597899 - DNA, 19 bp, Mus musculus
  siRNA target sequence for Frap1 (NM_020009.1,7663-7681).
cccaagtggagctgcttat

SEQ ID NO: 597900 - DNA, 19 bp, Mus musculus
  siRNA target sequence for Frap1 (NM_020009.1,7665-7683).
caagtggagctgcttatca

SEQ ID NO: 597901 - DNA, 19 bp, Mus musculus
  siRNA target sequence for Pi4k2a (NM_145501.1,105-123).
gggctccggagctcacttt

SEQ ID NO: 597902 - DNA, 19 bp, Mus musculus
  siRNA target sequence for Pi4k2a (NM_145501.1,399-417).
catcgagtgcagcatctat

SEQ ID NO: 597903 - DNA, 19 bp, Mus musculus
  siRNA target sequence for Pi4k2a (NM_145501.1,476-494).
gaatcgttgctgtcttcaa

SEQ ID NO: 597904 - DNA, 19 bp, Mus musculus
  siRNA target sequence for Pi4k2a (NM_145501.1,578-596).
gccgagactgccttgttct

SEQ ID NO: 597905 - DNA, 19 bp, Mus musculus
  siRNA target sequence for Pi4k2a (NM_145501.1,664-682).
ccacgtacaaaggtagtat

SEQ ID NO: 597906 - DNA, 19 bp, Mus musculus
  siRNA target sequence for Pi4k2a (NM_145501.1,665-683).
cacgtacaaaggtagtata

SEQ ID NO: 597907 - DNA, 19 bp, Mus musculus
  siRNA target sequence for Pi4k2a (NM_145501.1,668-686).
gtacaaaggtagtatacct

SEQ ID NO: 597908 - DNA, 19 bp, Mus musculus
  siRNA target sequence for Pi4k2a (NM_145501.1,688-706).
gccagtgaaaccttcaact

SEQ ID NO: 597909 - DNA, 19 bp, Mus musculus
  siRNA target sequence for Pi4k2a (NM_145501.1,994-1012).
gactgtccgatggataatt

SEQ ID NO: 597910 - DNA, 19 bp, Mus musculus
  siRNA target sequence for Pi4k2a (NM_145501.1,996-1014).
ctgtccgatggataattct

SEQ ID NO: 597911 - DNA, 19 bp, Mus musculus
  siRNA target sequence for Pi4k2a (NM_145501.1,1110-1128).
ctcctggagggcatatcct

SEQ ID NO: 597912 - DNA, 19 bp, Mus musculus
  siRNA target sequence for Pi4k2a (NM_145501.1,1115-1133).
ggagggcatatccttttta

SEQ ID NO: 597913 - DNA, 19 bp, Mus musculus
  siRNA target sequence for Pi4k2a (NM_145501.1,1415-1433).
ggtctgcaagcgaatccta

SEQ ID NO: 597914 - DNA, 19 bp, Mus musculus
  siRNA target sequence for Pi4k2a (NM_145501.1,1449-1467).
gagtcggaagcccttcttt

SEQ ID NO: 597915 - DNA, 19 bp, Mus musculus
  siRNA target sequence for Pik4cb (NM_175356.1,489-507).
cggggaactgtcagtgatt

SEQ ID NO: 597916 - DNA, 19 bp, Mus musculus
  siRNA target sequence for Pik4cb (NM_175356.1,596-614).
ccccgctggagttggttaa

SEQ ID NO: 597917 - DNA, 19 bp, Mus musculus
  siRNA target sequence for Pik4cb (NM_175356.1,597-615).
cccgctggagttggttaat

SEQ ID NO: 597918 - DNA, 19 bp, Mus musculus
  siRNA target sequence for Pik4cb (NM_175356.1,728-746).
gacgacgacgacagaacaa

SEQ ID NO: 597919 - DNA, 19 bp, Mus musculus
  siRNA target sequence for Pik4cb (NM_175356.1,730-748).
cgacgacgacagaacaact

SEQ ID NO: 597920 - DNA, 19 bp, Mus musculus
  siRNA target sequence for Pik4cb (NM_175356.1,766-784).
ctcctgaggctgtttgagt

SEQ ID NO: 597921 - DNA, 19 bp, Mus musculus
  siRNA target sequence for Pik4cb (NM_175356.1,773-791).
ggctgtttgagtcaaaact

SEQ ID NO: 597922 - DNA, 19 bp, Mus musculus
  siRNA target sequence for Pik4cb (NM_175356.1,774-792).
gctgtttgagtcaaaacta

SEQ ID NO: 597923 - DNA, 19 bp, Mus musculus
  siRNA target sequence for Pik4cb (NM_175356.1,796-814).
gacatctctatggctattt

SEQ ID NO: 597924 - DNA, 19 bp, Mus musculus
  siRNA target sequence for Pik4cb (NM_175356.1,861-879).
caaccggctcttctacttt

SEQ ID NO: 597925 - DNA, 19 bp, Mus musculus
  siRNA target sequence for Pik4cb (NM_175356.1,907-925).
ccccagttgcttaacatgt

SEQ ID NO: 597926 - DNA, 19 bp, Mus musculus
  siRNA target sequence for Pik4cb (NM_175356.1,985-1003).
cgccagagcatcaactttt

SEQ ID NO: 597927 - DNA, 19 bp, Mus musculus
  siRNA target sequence for Pik4cb (NM_175356.1,1079-1097).
ccaagttacggaagctaat

SEQ ID NO: 597928 - DNA, 19 bp, Mus musculus
  siRNA target sequence for Pik4cb (NM_175356.1,1131-1149).
gagggagctgccgacatta

SEQ ID NO: 597929 - DNA, 19 bp, Mus musculus
  siRNA target sequence for Pik4cb (NM_175356.1,1187-1205).
ggactcaccagcgttctaa

SEQ ID NO: 597930 - DNA, 19 bp, Mus musculus
  siRNA target sequence for Pik4cb (NM_175356.1,1210-1228).
gatgctacggccagcataa

SEQ ID NO: 597931 - DNA, 19 bp, Mus musculus
  siRNA target sequence for Pik4cb (NM_175356.1,1214-1232).
ctacggccagcataagtct

SEQ ID NO: 597932 - DNA, 19 bp, Mus musculus
  siRNA target sequence for Pik4cb (NM_175356.1,1253-1271).
cagccagcaaccctaaagt

SEQ ID NO: 597933 - DNA, 19 bp, Mus musculus
  siRNA target sequence for Pik4cb (NM_175356.1,1306-1324).
gagcgagaattcatcaagt

SEQ ID NO: 597934 - DNA, 19 bp, Mus musculus
  siRNA target sequence for Pik4cb (NM_175356.1,1310-1328).
gagaattcatcaagtcttt

SEQ ID NO: 597935 - DNA, 19 bp, Mus musculus
  siRNA target sequence for Pik4cb (NM_175356.1,1350-1368).
ggccacgctccccactaaa

SEQ ID NO: 597936 - DNA, 19 bp, Mus musculus
  siRNA target sequence for Pik4cb (NM_175356.1,1352-1370).
ccacgctccccactaaaga

SEQ ID NO: 597937 - DNA, 19 bp, Mus musculus
  siRNA target sequence for Pik4cb (NM_175356.1,1359-1377).
ccccactaaagagcaaaaa

SEQ ID NO: 597938 - DNA, 19 bp, Mus musculus
  siRNA target sequence for Pik4cb (NM_175356.1,1403-1421).
ccctgctcaaccataagct

SEQ ID NO: 597939 - DNA, 19 bp, Mus musculus
  siRNA target sequence for Pik4cb (NM_175356.1,1489-1507).
gctgttgttctcaattcca

SEQ ID NO: 597940 - DNA, 19 bp, Mus musculus
  siRNA target sequence for Pik4cb (NM_175356.1,1495-1513).
gttctcaattccaaggata

SEQ ID NO: 597941 - DNA, 19 bp, Mus musculus
  siRNA target sequence for Pik4cb (NM_175356.1,1540-1558).
gttctcgaatgtgaaaact

SEQ ID NO: 597942 - DNA, 19 bp, Mus musculus
  siRNA target sequence for Pik4cb (NM_175356.1,1557-1575).
ctttgacacaactagtgtt

SEQ ID NO: 597943 - DNA, 19 bp, Mus musculus
  siRNA target sequence for Pik4cb (NM_175356.1,1607-1625).
gtacacggtctgtagagaa

SEQ ID NO: 597944 - DNA, 19 bp, Mus musculus
  siRNA target sequence for Pik4cb (NM_175356.1,1680-1698).
gcccaattatgacaatgat

SEQ ID NO: 597945 - DNA, 19 bp, Mus musculus
  siRNA target sequence for Pik4cb (NM_175356.1,1705-1723).
gcctggtcagtggatgata

SEQ ID NO: 597946 - DNA, 19 bp, Mus musculus
  siRNA target sequence for Pik4cb (NM_175356.1,1706-1724).
cctggtcagtggatgatat

SEQ ID NO: 597947 - DNA, 19 bp, Mus musculus
  siRNA target sequence for Pik4cb (NM_175356.1,1707-1725).
ctggtcagtggatgatata

SEQ ID NO: 597948 - DNA, 19 bp, Mus musculus
  siRNA target sequence for Pik4cb (NM_175356.1,2001-2019).
gcgactcctttcagtcatt

SEQ ID NO: 597949 - DNA, 19 bp, Mus musculus
  siRNA target sequence for Pik4cb (NM_175356.1,2110-2128).
ctttggatcaagccatata

SEQ ID NO: 597950 - DNA, 19 bp, Mus musculus
  siRNA target sequence for Pik4cb (NM_175356.1,2118-2136).
caagccatataagattctt

SEQ ID NO: 597951 - DNA, 19 bp, Mus musculus
  siRNA target sequence for Pik4cb (NM_175356.1,2186-2204).
ccatccaccaggtgaagaa

SEQ ID NO: 597952 - DNA, 19 bp, Mus musculus
  siRNA target sequence for Pik4cb (NM_175356.1,2274-2292).
cagtgcccagcgcaatttt

SEQ ID NO: 597953 - DNA, 19 bp, Mus musculus
  siRNA target sequence for Pik4cb (NM_175356.1,2276-2294).
gtgcccagcgcaattttgt

SEQ ID NO: 597954 - DNA, 19 bp, Mus musculus
  siRNA target sequence for Pik4cb (NM_175356.1,2315-2333).
gcttggtctgctacctatt

SEQ ID NO: 597955 - DNA, 19 bp, Mus musculus
  siRNA target sequence for Pik4cb (NM_175356.1,2319-2337).
ggtctgctacctattgcaa

SEQ ID NO: 597956 - DNA, 19 bp, Mus musculus
  siRNA target sequence for Pik4cb (NM_175356.1,2489-2507).
gtggcctgaacggtgatat

SEQ ID NO: 597957 - DNA, 19 bp, Mus musculus
  siRNA target sequence for Pik4cb (NM_175356.1,2491-2509).
ggcctgaacggtgatatgt

SEQ ID NO: 597958 - DNA, 19 bp, Mus musculus
  siRNA target sequence for Pik4cb (NM_175356.1,2492-2510).
gcctgaacggtgatatgtt

SEQ ID NO: 597959 - DNA, 19 bp, Mus musculus
  siRNA target sequence for Pik4cb (NM_175356.1,2494-2512).
ctgaacggtgatatgttca

SEQ ID NO: 597960 - DNA, 19 bp, Mus musculus
  siRNA target sequence for Pik4cb (NM_175356.1,2500-2518).
ggtgatatgttcaactact

SEQ ID NO: 597961 - DNA, 19 bp, Mus musculus
  siRNA target sequence for Pik4cb (NM_175356.1,2501-2519).
gtgatatgttcaactacta

SEQ ID NO: 597962 - DNA, 19 bp, Mus musculus
  siRNA target sequence for Pik4cb (NM_175356.1,2503-2521).
gatatgttcaactactaca

SEQ ID NO: 597963 - DNA, 19 bp, Mus musculus
  siRNA target sequence for Pik4cb (NM_175356.1,2636-2654).
ccattcgcaacctcaaaga

SEQ ID NO: 597964 - DNA, 19 bp, Mus musculus
  siRNA target sequence for Pik4cb (NM_175356.1,2764-2782).
ctcaccaatggcatcatgt

SEQ ID NO: 597965 - DNA, 19 bp, Mus musculus
  siRNA target sequence for 2610037M15Rik (NM_023538.1,398-416).
cactgatgtgatcattgtt

SEQ ID NO: 597966 - DNA, 19 bp, Mus musculus
  siRNA target sequence for 2610037M15Rik (NM_023538.1,471-489).
gatgaggctaccttcagta

SEQ ID NO: 597967 - DNA, 19 bp, Mus musculus
  siRNA target sequence for 2610037M15Rik (NM_023538.1,476-494).
ggctaccttcagtaagatt

SEQ ID NO: 597968 - DNA, 19 bp, Mus musculus
  siRNA target sequence for 2610037M15Rik (NM_023538.1,513-531).
ctgggacagaccagtagtt

SEQ ID NO: 597969 - DNA, 19 bp, Mus musculus
  siRNA target sequence for 2610037M15Rik (NM_023538.1,516-534).
ggacagaccagtagtttga

SEQ ID NO: 597970 - DNA, 19 bp, Mus musculus
  siRNA target sequence for 2610037M15Rik (NM_023538.1,539-557).
cactctctttgctgaaagt

SEQ ID NO: 597971 - DNA, 19 bp, Mus musculus
  siRNA target sequence for 2610037M15Rik (NM_023538.1,559-577).
gaaacaaagtccaacatat

SEQ ID NO: 597972 - DNA, 19 bp, Mus musculus
  siRNA target sequence for 2610037M15Rik (NM_023538.1,585-603).
gccacacttgccattgtga

SEQ ID NO: 597973 - DNA, 19 bp, Mus musculus
  siRNA target sequence for 2610037M15Rik (NM_023538.1,586-604).
ccacacttgccattgtgaa

SEQ ID NO: 597974 - DNA, 19 bp, Mus musculus
  siRNA target sequence for 2610037M15Rik (NM_023538.1,587-605).
cacacttgccattgtgaaa

SEQ ID NO: 597975 - DNA, 19 bp, Mus musculus
  siRNA target sequence for 2610037M15Rik (NM_023538.1,676-694).
gcctccggtggggatcttt

SEQ ID NO: 597976 - DNA, 19 bp, Mus musculus
  siRNA target sequence for Dgkq (NM_199011.1,200-218).
gcggactagcagagctatt

SEQ ID NO: 597977 - DNA, 19 bp, Mus musculus
  siRNA target sequence for Dgkq (NM_199011.1,371-389).
gaccccgtgcacaagcatt

SEQ ID NO: 597978 - DNA, 19 bp, Mus musculus
  siRNA target sequence for Dgkq (NM_199011.1,414-432).
gtagcccactgctttggtt

SEQ ID NO: 597979 - DNA, 19 bp, Mus musculus
  siRNA target sequence for Dgkq (NM_199011.1,744-762).
cttgcgcctgagtgtacat

SEQ ID NO: 597980 - DNA, 19 bp, Mus musculus
  siRNA target sequence for Dgkq (NM_199011.1,980-998).
cgactccatgaggaaaaat

SEQ ID NO: 597981 - DNA, 19 bp, Mus musculus
  siRNA target sequence for Dgkq (NM_199011.1,986-1004).
catgaggaaaaatcagttt

SEQ ID NO: 597982 - DNA, 19 bp, Mus musculus
  siRNA target sequence for Dgkq (NM_199011.1,1056-1074).
gcacttcgggcctactata

SEQ ID NO: 597983 - DNA, 19 bp, Mus musculus
  siRNA target sequence for Dgkq (NM_199011.1,1057-1075).
cacttcgggcctactatat

SEQ ID NO: 597984 - DNA, 19 bp, Mus musculus
  siRNA target sequence for Dgkq (NM_199011.1,1059-1077).
cttcgggcctactatatta

SEQ ID NO: 597985 - DNA, 19 bp, Mus musculus
  siRNA target sequence for Dgkq (NM_199011.1,1426-1444).
ccgtgctggcagatgaaga

SEQ ID NO: 597986 - DNA, 19 bp, Mus musculus
  siRNA target sequence for Dgkq (NM_199011.1,1576-1594).
gcttgtccccccaggatta

SEQ ID NO: 597987 - DNA, 19 bp, Mus musculus
  siRNA target sequence for Dgkq (NM_199011.1,1750-1768).
ggccactgactgcattagt

SEQ ID NO: 597988 - DNA, 19 bp, Mus musculus
  siRNA target sequence for Dgkq (NM_199011.1,2201-2219).
cctgctggatgctcatgaa

SEQ ID NO: 597989 - DNA, 19 bp, Mus musculus
  siRNA target sequence for Dgkq (NM_199011.1,2261-2279).
caagattgttcagatgaat

SEQ ID NO: 597990 - DNA, 19 bp, Mus musculus
  siRNA target sequence for Dgkq (NM_199011.1,2268-2286).
gttcagatgaataactact

SEQ ID NO: 597991 - DNA, 19 bp, Mus musculus
  siRNA target sequence for Dgkq (NM_199011.1,2285-2303).
ctgtggcattggtattgat

SEQ ID NO: 597992 - DNA, 19 bp, Mus musculus
  siRNA target sequence for Dgkz (NM_138306.1,420-438).
gagtgagtcagcagtgtat

SEQ ID NO: 597993 - DNA, 19 bp, Mus musculus
  siRNA target sequence for Dgkz (NM_138306.1,522-540).
gaagtcagcgcccagaaaa

SEQ ID NO: 597994 - DNA, 19 bp, Mus musculus
  siRNA target sequence for Dgkz (NM_138306.1,564-582).
ggtgcatacccaatgcatt

SEQ ID NO: 597995 - DNA, 19 bp, Mus musculus
  siRNA target sequence for Dgkz (NM_138306.1,565-583).
gtgcatacccaatgcatta

SEQ ID NO: 597996 - DNA, 19 bp, Mus musculus
  siRNA target sequence for Dgkz (NM_138306.1,649-667).
cgtgagccaaccttcgtaa

SEQ ID NO: 597997 - DNA, 19 bp, Mus musculus
  siRNA target sequence for Dgkz (NM_138306.1,991-1009).
cgctggagacccttcatca

SEQ ID NO: 597998 - DNA, 19 bp, Mus musculus
  siRNA target sequence for Dgkz (NM_138306.1,1019-1037).
ccccatcccccctcatgaa

SEQ ID NO: 597999 - DNA, 19 bp, Mus musculus
  siRNA target sequence for Dgkz (NM_138306.1,1100-1118).
cttttttgtggtatctgaa

SEQ ID NO: 598000 - DNA, 19 bp, Mus musculus
  siRNA target sequence for Dgkz (NM_138306.1,1167-1185).
ggaaatgtaccgcaaagta

SEQ ID NO: 598001 - DNA, 19 bp, Mus musculus
  siRNA target sequence for Dgkz (NM_138306.1,1173-1191).
gtaccgcaaagtacataat

SEQ ID NO: 598002 - DNA, 19 bp, Mus musculus
  siRNA target sequence for Dgkz (NM_138306.1,1177-1195).
cgcaaagtacataatttga

SEQ ID NO: 598003 - DNA, 19 bp, Mus musculus
  siRNA target sequence for Dgkz (NM_138306.1,1248-1266).
ggaccagctgcgcttaaaa

SEQ ID NO: 598004 - DNA, 19 bp, Mus musculus
  siRNA target sequence for Dgkz (NM_138306.1,1354-1372).
cctgtgtcaaagatccttt

SEQ ID NO: 598005 - DNA, 19 bp, Mus musculus
  siRNA target sequence for Dgkz (NM_138306.1,1483-1501).
cccctggatgtctttaaca

SEQ ID NO: 598006 - DNA, 19 bp, Mus musculus
  siRNA target sequence for Dgkz (NM_138306.1,1486-1504).
ctggatgtctttaacaact

SEQ ID NO: 598007 - DNA, 19 bp, Mus musculus
  siRNA target sequence for Dgkz (NM_138306.1,1489-1507).
gatgtctttaacaactact

SEQ ID NO: 598008 - DNA, 19 bp, Mus musculus
  siRNA target sequence for Dgkz (NM_138306.1,1492-1510).
gtctttaacaactacttca

SEQ ID NO: 598009 - DNA, 19 bp, Mus musculus
  siRNA target sequence for Dgkz (NM_138306.1,1561-1579).
gccaacccagagaagttca

SEQ ID NO: 598010 - DNA, 19 bp, Mus musculus
  siRNA target sequence for Dgkz (NM_138306.1,1583-1601).
gccgctttcggaataagat

SEQ ID NO: 598011 - DNA, 19 bp, Mus musculus
  siRNA target sequence for Dgkz (NM_138306.1,1585-1603).
cgctttcggaataagatgt

SEQ ID NO: 598012 - DNA, 19 bp, Mus musculus
  siRNA target sequence for Dgkz (NM_138306.1,1586-1604).
gctttcggaataagatgtt

SEQ ID NO: 598013 - DNA, 19 bp, Mus musculus
  siRNA target sequence for Dgkz (NM_138306.1,1721-1739).
cgcagtgcatcgtctttct

SEQ ID NO: 598014 - DNA, 19 bp, Mus musculus
  siRNA target sequence for Dgkz (NM_138306.1,1725-1743).
gtgcatcgtctttctgaat

SEQ ID NO: 598015 - DNA, 19 bp, Mus musculus
  siRNA target sequence for Dgkz (NM_138306.1,1976-1994).
cagcatcacggattcgaat

SEQ ID NO: 598016 - DNA, 19 bp, Mus musculus
  siRNA target sequence for Dgkz (NM_138306.1,2118-2136).
cgactacgaggctctacat

SEQ ID NO: 598017 - DNA, 19 bp, Mus musculus
  siRNA target sequence for Dgkz (NM_138306.1,2119-2137).
gactacgaggctctacatt

SEQ ID NO: 598018 - DNA, 19 bp, Mus musculus
  siRNA target sequence for Dgkz (NM_138306.1,2121-2139).
ctacgaggctctacattat

SEQ ID NO: 598019 - DNA, 19 bp, Mus musculus
  siRNA target sequence for Dgkz (NM_138306.1,2125-2143).
gaggctctacattatgaca

SEQ ID NO: 598020 - DNA, 19 bp, Mus musculus
  siRNA target sequence for Dgkz (NM_138306.1,2352-2370).
ccaggagcacctcaactat

SEQ ID NO: 598021 - DNA, 19 bp, Mus musculus
  siRNA target sequence for Dgkz (NM_138306.1,2769-2787).
caccatctgccactacatt

SEQ ID NO: 598022 - DNA, 19 bp, Mus musculus
  siRNA target sequence for Dgkz (NM_138306.1,2771-2789).
ccatctgccactacattgt

SEQ ID NO: 598023 - DNA, 19 bp, Mus musculus
  siRNA target sequence for Gk-rs1 (NM_010293.1,268-286).
cggacagcagagcattgat

SEQ ID NO: 598024 - DNA, 19 bp, Mus musculus
  siRNA target sequence for Gk-rs1 (NM_010293.1,319-337).
ccagcgggaaactacgata

SEQ ID NO: 598025 - DNA, 19 bp, Mus musculus
  siRNA target sequence for Gk-rs1 (NM_010293.1,323-341).
cgggaaactacgatagtct

SEQ ID NO: 598026 - DNA, 19 bp, Mus musculus
  siRNA target sequence for Gk-rs1 (NM_010293.1,435-453).
cagtaagcaataactttgt

SEQ ID NO: 598027 - DNA, 19 bp, Mus musculus
  siRNA target sequence for Gk-rs1 (NM_010293.1,469-487).
ccttccaatcagcacttat

SEQ ID NO: 598028 - DNA, 19 bp, Mus musculus
  siRNA target sequence for Gk-rs1 (NM_010293.1,473-491).
ccaatcagcacttatttta

SEQ ID NO: 598029 - DNA, 19 bp, Mus musculus
  siRNA target sequence for Gk-rs1 (NM_010293.1,575-593).
gttgattcgtggcttatct

SEQ ID NO: 598030 - DNA, 19 bp, Mus musculus
  siRNA target sequence for Gk-rs1 (NM_010293.1,597-615).
gtatgactggaggtatcaa

SEQ ID NO: 598031 - DNA, 19 bp, Mus musculus
  siRNA target sequence for Gk-rs1 (NM_010293.1,734-752).
ccccgaatccggagttctt

SEQ ID NO: 598032 - DNA, 19 bp, Mus musculus
  siRNA target sequence for Gk-rs1 (NM_010293.1,736-754).
ccgaatccggagttcttct

SEQ ID NO: 598033 - DNA, 19 bp, Mus musculus
  siRNA target sequence for Gk-rs1 (NM_010293.1,854-872).
caggacggacaagctaaaa

SEQ ID NO: 598034 - DNA, 19 bp, Mus musculus
  siRNA target sequence for Gk-rs1 (NM_010293.1,857-875).
gacggacaagctaaaagca

SEQ ID NO: 598035 - DNA, 19 bp, Mus musculus
  siRNA target sequence for Gk-rs1 (NM_010293.1,909-927).
caggccagaagtgtgtaaa

SEQ ID NO: 598036 - DNA, 19 bp, Mus musculus
  siRNA target sequence for Gk-rs1 (NM_010293.1,1012-1030).
catagccggtgctgttgtt

SEQ ID NO: 598037 - DNA, 19 bp, Mus musculus
  siRNA target sequence for Gk-rs1 (NM_010293.1,1028-1046).
gttagctggataaaaaaca

SEQ ID NO: 598038 - DNA, 19 bp, Mus musculus
  siRNA target sequence for Gk-rs1 (NM_010293.1,1068-1086).
catcggaaattgaaaaact

SEQ ID NO: 598039 - DNA, 19 bp, Mus musculus
  siRNA target sequence for Gk-rs1 (NM_010293.1,1101-1119).
ggacttcttatggttgtta

SEQ ID NO: 598040 - DNA, 19 bp, Mus musculus
  siRNA target sequence for Gk-rs1 (NM_010293.1,1139-1157).
ggcttatacgctccatatt

SEQ ID NO: 598041 - DNA, 19 bp, Mus musculus
  siRNA target sequence for Gk-rs1 (NM_010293.1,1268-1286).
gatgccatgaacagtgatt

SEQ ID NO: 598042 - DNA, 19 bp, Mus musculus
  siRNA target sequence for Gk-rs1 (NM_010293.1,1329-1347).
ccgcaaacagagttctcat

SEQ ID NO: 598043 - DNA, 19 bp, Mus musculus
  siRNA target sequence for Gk-rs1 (NM_010293.1,1357-1375).
ggcggacattctgtgtatt

SEQ ID NO: 598044 - DNA, 19 bp, Mus musculus
  siRNA target sequence for Gk-rs1 (NM_010293.1,1369-1387).
gtgtattccggtgatgaaa

SEQ ID NO: 598045 - DNA, 19 bp, Mus musculus
  siRNA target sequence for Gk-rs1 (NM_010293.1,1465-1483).
ggatcctaaggatttgtca

SEQ ID NO: 598046 - DNA, 19 bp, Mus musculus
  siRNA target sequence for Gk-rs1 (NM_010293.1,1466-1484).
gatcctaaggatttgtcaa

SEQ ID NO: 598047 - DNA, 19 bp, Mus musculus
  siRNA target sequence for Gk-rs1 (NM_010293.1,1604-1622).
ggtcgcgaccctagtattt

SEQ ID NO: 598048 - DNA, 19 bp, Mus musculus
  siRNA target sequence for Gk-rs1 (NM_010293.1,1605-1623).
gtcgcgaccctagtatttt

SEQ ID NO: 598049 - DNA, 19 bp, Mus musculus
  siRNA target sequence for Gk-rs1 (NM_010293.1,1607-1625).
cgcgaccctagtattttca

SEQ ID NO: 598050 - DNA, 19 bp, Mus musculus
  siRNA target sequence for Gk-rs1 (NM_010293.1,1635-1653).
cgctgggcttttatgtagt

SEQ ID NO: 598051 - DNA, 19 bp, Mus musculus
  siRNA target sequence for Gk-rs1 (NM_010293.1,1652-1670).
gtgagtagtatggtgatat

SEQ ID NO: 598052 - DNA, 19 bp, Mus musculus
  siRNA target sequence for Gk-rs1 (NM_010293.1,1654-1672).
gagtagtatggtgatatta

SEQ ID NO: 598053 - DNA, 19 bp, Mus musculus
  siRNA target sequence for Gk-rs2 (NM_010294.1,91-109).
caactccactcgctttcta

SEQ ID NO: 598054 - DNA, 19 bp, Mus musculus
  siRNA target sequence for Gk-rs2 (NM_010294.1,94-112).
ctccactcgctttctagtt

SEQ ID NO: 598055 - DNA, 19 bp, Mus musculus
  siRNA target sequence for Gk-rs2 (NM_010294.1,101-119).
cgctttctagttttcaata

SEQ ID NO: 598056 - DNA, 19 bp, Mus musculus
  siRNA target sequence for Gk-rs2 (NM_010294.1,121-139).
caaaacagcagaactagtt

SEQ ID NO: 598057 - DNA, 19 bp, Mus musculus
  siRNA target sequence for Gk-rs2 (NM_010294.1,200-218).
cccaaggaaatccttaaat

SEQ ID NO: 598058 - DNA, 19 bp, Mus musculus
  siRNA target sequence for Gk-rs2 (NM_010294.1,212-230).
cttaaatctgtctatgagt

SEQ ID NO: 598059 - DNA, 19 bp, Mus musculus
  siRNA target sequence for Gk-rs2 (NM_010294.1,227-245).
gagtgcatagcgaaagctt

SEQ ID NO: 598060 - DNA, 19 bp, Mus musculus
  siRNA target sequence for Gk-rs2 (NM_010294.1,257-275).
gctgaagtgaacattgata

SEQ ID NO: 598061 - DNA, 19 bp, Mus musculus
  siRNA target sequence for Gk-rs2 (NM_010294.1,321-339).
ctgtggtctgggacaagtt

SEQ ID NO: 598062 - DNA, 19 bp, Mus musculus
  siRNA target sequence for Gk-rs2 (NM_010294.1,342-360).
cgggagaccctctgtacaa

SEQ ID NO: 598063 - DNA, 19 bp, Mus musculus
  siRNA target sequence for Gk-rs2 (NM_010294.1,343-361).
gggagaccctctgtacaat

SEQ ID NO: 598064 - DNA, 19 bp, Mus musculus
  siRNA target sequence for Gk-rs2 (NM_010294.1,401-419).
gagactctcactaagaaaa

SEQ ID NO: 598065 - DNA, 19 bp, Mus musculus
  siRNA target sequence for Gk-rs2 (NM_010294.1,461-479).
cctcttagcacttacttca

SEQ ID NO: 598066 - DNA, 19 bp, Mus musculus
  siRNA target sequence for Gk-rs2 (NM_010294.1,508-526).
caacctaagacccattcaa

SEQ ID NO: 598067 - DNA, 19 bp, Mus musculus
  siRNA target sequence for Gk-rs2 (NM_010294.1,599-617).
gtcaatggaggcatccatt

SEQ ID NO: 598068 - DNA, 19 bp, Mus musculus
  siRNA target sequence for Gk-rs2 (NM_010294.1,614-632).
cattgcaccgatgtaacaa

SEQ ID NO: 598069 - DNA, 19 bp, Mus musculus
  siRNA target sequence for Gk-rs2 (NM_010294.1,722-740).
ccaaatgtatgcagttctt

SEQ ID NO: 598070 - DNA, 19 bp, Mus musculus
  siRNA target sequence for Gk-rs2 (NM_010294.1,849-867).
gtcaagccaaaaacacata

SEQ ID NO: 598071 - DNA, 19 bp, Mus musculus
  siRNA target sequence for Gk-rs2 (NM_010294.1,937-955).
cacattggcttacaaacta

SEQ ID NO: 598072 - DNA, 19 bp, Mus musculus
  siRNA target sequence for Gk-rs2 (NM_010294.1,945-963).
cttacaaactaggcaaaaa

SEQ ID NO: 598073 - DNA, 19 bp, Mus musculus
  siRNA target sequence for Gk-rs2 (NM_010294.1,1315-1333).
gaccaacaacaggattctt

SEQ ID NO: 598074 - DNA, 19 bp, Mus musculus
  siRNA target sequence for Gk-rs2 (NM_010294.1,1355-1373).
ctgcacattccggtagtta

SEQ ID NO: 598075 - DNA, 19 bp, Mus musculus
  siRNA target sequence for Gk-rs2 (NM_010294.1,1358-1376).
cacattccggtagttaagt

SEQ ID NO: 598076 - DNA, 19 bp, Mus musculus
  siRNA target sequence for Gk-rs2 (NM_010294.1,1360-1378).
cattccggtagttaagtct

SEQ ID NO: 598077 - DNA, 19 bp, Mus musculus
  siRNA target sequence for Gk-rs2 (NM_010294.1,1463-1481).
gatttgtctacgatcttga

SEQ ID NO: 598078 - DNA, 19 bp, Mus musculus
  siRNA target sequence for Gk-rs2 (NM_010294.1,1473-1491).
cgatcttgatggaacgata

SEQ ID NO: 598079 - DNA, 19 bp, Mus musculus
  siRNA target sequence for Gk-rs2 (NM_010294.1,1474-1492).
gatcttgatggaacgatat

SEQ ID NO: 598080 - DNA, 19 bp, Mus musculus
  siRNA target sequence for Gk-rs2 (NM_010294.1,1477-1495).
cttgatggaacgatatgaa

SEQ ID NO: 598081 - DNA, 19 bp, Mus musculus
  siRNA target sequence for Gk-rs2 (NM_010294.1,1512-1530).
cagagagtgaaattcgttt

SEQ ID NO: 598082 - DNA, 19 bp, Mus musculus
  siRNA target sequence for Gk-rs2 (NM_010294.1,1514-1532).
gagagtgaaattcgttttt

SEQ ID NO: 598083 - DNA, 19 bp, Mus musculus
  siRNA target sequence for Gk-rs2 (NM_010294.1,1640-1658).
gtgagtagcatgacgttat

SEQ ID NO: 598084 - DNA, 19 bp, Mus musculus
  siRNA target sequence for Gk-rs2 (NM_010294.1,1644-1662).
gtagcatgacgttattaat

SEQ ID NO: 598085 - DNA, 19 bp, Mus musculus
  siRNA target sequence for Gk-rs2 (NM_010294.1,1648-1666).
catgacgttattaattgga

SEQ ID NO: 598086 - DNA, 19 bp, Mus musculus
  siRNA target sequence for Chk (NM_013490.1,500-518).
ggggtggtctcagtaacat

SEQ ID NO: 598087 - DNA, 19 bp, Mus musculus
  siRNA target sequence for Chk (NM_013490.1,587-605).
ggctctatggggcaatctt

SEQ ID NO: 598088 - DNA, 19 bp, Mus musculus
  siRNA target sequence for Chk (NM_013490.1,588-606).
gctctatggggcaatctta

SEQ ID NO: 598089 - DNA, 19 bp, Mus musculus
  siRNA target sequence for Chk (NM_013490.1,589-607).
ctctatggggcaatcttaa

SEQ ID NO: 598090 - DNA, 19 bp, Mus musculus
  siRNA target sequence for Chk (NM_013490.1,703-721).
ggccgactggagcagttta

SEQ ID NO: 598091 - DNA, 19 bp, Mus musculus
  siRNA target sequence for Chk (NM_013490.1,704-722).
gccgactggagcagtttat

SEQ ID NO: 598092 - DNA, 19 bp, Mus musculus
  siRNA target sequence for Chk (NM_013490.1,739-757).
gacactgaagagttacgtt

SEQ ID NO: 598093 - DNA, 19 bp, Mus musculus
  siRNA target sequence for Chk (NM_013490.1,741-759).
cactgaagagttacgttta

SEQ ID NO: 598094 - DNA, 19 bp, Mus musculus
  siRNA target sequence for Chk (NM_013490.1,832-850).
ccaaaatggctttttggaa

SEQ ID NO: 598095 - DNA, 19 bp, Mus musculus
  siRNA target sequence for Chk (NM_013490.1,864-882).
cctgaatcaagtactaaga

SEQ ID NO: 598096 - DNA, 19 bp, Mus musculus
  siRNA target sequence for Chk (NM_013490.1,966-984).
gtcattgctgcagtatact

SEQ ID NO: 598097 - DNA, 19 bp, Mus musculus
  siRNA target sequence for Chk (NM_013490.1,972-990).
gctgcagtatactagatct

SEQ ID NO: 598098 - DNA, 19 bp, Mus musculus
  siRNA target sequence for Chk (NM_013490.1,997-1015).
gtattttgtcataatgact

SEQ ID NO: 598099 - DNA, 19 bp, Mus musculus
  siRNA target sequence for Chk (NM_013490.1,1012-1030).
gactgtcaagaaggtaata

SEQ ID NO: 598100 - DNA, 19 bp, Mus musculus
  siRNA target sequence for Chk (NM_013490.1,1021-1039).
gaaggtaatatcttattgt

SEQ ID NO: 598101 - DNA, 19 bp, Mus musculus
  siRNA target sequence for Chk (NM_013490.1,1065-1083).
gcggaagctgatgcttatt

SEQ ID NO: 598102 - DNA, 19 bp, Mus musculus
  siRNA target sequence for Chk (NM_013490.1,1071-1089).
gctgatgcttattgacttt

SEQ ID NO: 598103 - DNA, 19 bp, Mus musculus
  siRNA target sequence for Chk (NM_013490.1,1145-1163).
ggatgtatgattataccta

SEQ ID NO: 598104 - DNA, 19 bp, Mus musculus
  siRNA target sequence for Chk (NM_013490.1,1146-1164).
gatgtatgattatacctat

SEQ ID NO: 598105 - DNA, 19 bp, Mus musculus
  siRNA target sequence for Chk (NM_013490.1,1160-1178).
cctatgagaagtatccttt

SEQ ID NO: 598106 - DNA, 19 bp, Mus musculus
  siRNA target sequence for Chk (NM_013490.1,1200-1218).
gtatccttcccgaaaacaa

SEQ ID NO: 598107 - DNA, 19 bp, Mus musculus
  siRNA target sequence for Chk (NM_013490.1,1235-1253).
ccagttacttgactacatt

SEQ ID NO: 598108 - DNA, 19 bp, Mus musculus
  siRNA target sequence for Chk (NM_013490.1,1242-1260).
cttgactacattccaaaat

SEQ ID NO: 598109 - DNA, 19 bp, Mus musculus
  siRNA target sequence for Chk (NM_013490.1,1245-1263).
gactacattccaaaatgat

SEQ ID NO: 598110 - DNA, 19 bp, Mus musculus
  siRNA target sequence for Chk (NM_013490.1,1356-1374).
gggactttggtccattgta

SEQ ID NO: 598111 - DNA, 19 bp, Mus musculus
  siRNA target sequence for Chk (NM_013490.1,1358-1376).
gactttggtccattgtaca

SEQ ID NO: 598112 - DNA, 19 bp, Mus musculus
  siRNA target sequence for Chk (NM_013490.1,1383-1401).
gatctcatccattgaattt

SEQ ID NO: 598113 - DNA, 19 bp, Mus musculus
  siRNA target sequence for Chkl (NM_007692.2,698-716).
ccagctttacggagtgttt

SEQ ID NO: 598114 - DNA, 19 bp, Mus musculus
  siRNA target sequence for Chkl (NM_007692.2,1320-1338).
gcctcaggaagttactaga

SEQ ID NO: 598115 - DNA, 19 bp, Mus musculus
  siRNA target sequence for Chkl (NM_007692.2,1493-1511).
cagacagtgatgataacct

SEQ ID NO: 598116 - DNA, 19 bp, Mus musculus
  siRNA target sequence for Chkl (NM_007692.2,1499-1517).
gtgatgataacctcatgtt

SEQ ID NO: 598117 - DNA, 19 bp, Mus musculus
  siRNA target sequence for Chkl (NM_007692.2,1528-1546).
gagtacagtagttataact

SEQ ID NO: 598118 - DNA, 19 bp, Mus musculus
  siRNA target sequence for Chkl (NM_007692.2,1699-1717).
gtgagtgggtttatgatta

SEQ ID NO: 598119 - DNA, 19 bp, Mus musculus
  siRNA target sequence for Chkl (NM_007692.2,1701-1719).
gagtgggtttatgattata

SEQ ID NO: 598120 - DNA, 19 bp, Mus musculus
  siRNA target sequence for Chkl (NM_007692.2,1703-1721).
gtgggtttatgattatact

SEQ ID NO: 598121 - DNA, 19 bp, Mus musculus
  siRNA target sequence for Chkl (NM_007692.2,1713-1731).
gattatacttatgaagaat

SEQ ID NO: 598122 - DNA, 19 bp, Mus musculus
  siRNA target sequence for Chkl (NM_007692.2,1893-1911).
ctggcatctcactttttct

SEQ ID NO: 598123 - DNA, 19 bp, Mus musculus
  siRNA target sequence for Chkl (NM_007692.2,1934-1952).
ggcttcgatgtccactata

SEQ ID NO: 598124 - DNA, 19 bp, Mus musculus
  siRNA target sequence for Chkl (NM_007692.2,1936-1954).
cttcgatgtccactataga

SEQ ID NO: 598125 - DNA, 19 bp, Mus musculus
  siRNA target sequence for Chkl (NM_007692.2,1939-1957).
cgatgtccactatagagtt

SEQ ID NO: 598126 - DNA, 19 bp, Mus musculus
  siRNA target sequence for Chkl (NM_007692.2,1981-1999).
ctcggttccagttctactt

SEQ ID NO: 598127 - DNA, 19 bp, Mus musculus
  siRNA target sequence for BC004012 (NM_138671.1,141-159).
caactgctcagcatgtcat

SEQ ID NO: 598128 - DNA, 19 bp, Mus musculus
  siRNA target sequence for BC004012 (NM_138671.1,348-366).
ccaggaccctgcaagtcaa

SEQ ID NO: 598129 - DNA, 19 bp, Mus musculus
  siRNA target sequence for BC004012 (NM_138671.1,358-376).
gcaagtcaacggttgacat

SEQ ID NO: 598130 - DNA, 19 bp, Mus musculus
  siRNA target sequence for BC004012 (NM_138671.1,367-385).
cggttgacatggaacaagt

SEQ ID NO: 598131 - DNA, 19 bp, Mus musculus
  siRNA target sequence for BC004012 (NM_138671.1,395-413).
gtgtgcttgtcatcaaaaa

SEQ ID NO: 598132 - DNA, 19 bp, Mus musculus
  siRNA target sequence for BC004012 (NM_138671.1,429-447).
cttactgcagcccttcaaa

SEQ ID NO: 598133 - DNA, 19 bp, Mus musculus
  siRNA target sequence for BC004012 (NM_138671.1,520-538).
gctatagtgagtgatgaaa

SEQ ID NO: 598134 - DNA, 19 bp, Mus musculus
  siRNA target sequence for BC004012 (NM_138671.1,847-865).
cacaacggcctcagtgaaa

SEQ ID NO: 598135 - DNA, 19 bp, Mus musculus
  siRNA target sequence for BC004012 (NM_138671.1,849-867).
caacggcctcagtgaaaat

SEQ ID NO: 598136 - DNA, 19 bp, Mus musculus
  siRNA target sequence for BC004012 (NM_138671.1,852-870).
cggcctcagtgaaaatggt

SEQ ID NO: 598137 - DNA, 19 bp, Mus musculus
  siRNA target sequence for BC004012 (NM_138671.1,885-903).
cggaaaacaggctatgcaa

SEQ ID NO: 598138 - DNA, 19 bp, Mus musculus
  siRNA target sequence for BC004012 (NM_138671.1,900-918).
gcaataccaggtcttaaat

SEQ ID NO: 598139 - DNA, 19 bp, Mus musculus
  siRNA target sequence for BC004012 (NM_138671.1,933-951).
cagaggcccctcctcatat

SEQ ID NO: 598140 - DNA, 19 bp, Mus musculus
  siRNA target sequence for BC004012 (NM_138671.1,937-955).
ggcccctcctcatatctgt

SEQ ID NO: 598141 - DNA, 19 bp, Mus musculus
  siRNA target sequence for BC004012 (NM_138671.1,1032-1050).
gggcagcacagcatatgca

SEQ ID NO: 598142 - DNA, 19 bp, Mus musculus
  siRNA target sequence for BC004012 (NM_138671.1,1196-1214).
cggcatgggtgtcttttga

SEQ ID NO: 598143 - DNA, 19 bp, Mus musculus
  siRNA target sequence for BC004012 (NM_138671.1,1217-1235).
gacggaagagacaggaaat

SEQ ID NO: 598144 - DNA, 19 bp, Mus musculus
  siRNA target sequence for Khk (NM_008439.2,338-356).
gctcccgtaccattatact

SEQ ID NO: 598145 - DNA, 19 bp, Mus musculus
  siRNA target sequence for Khk (NM_008439.2,341-359).
cccgtaccattatactcta

SEQ ID NO: 598146 - DNA, 19 bp, Mus musculus
  siRNA target sequence for Khk (NM_008439.2,406-424).
gatctgacccggttcaagt

SEQ ID NO: 598147 - DNA, 19 bp, Mus musculus
  siRNA target sequence for Khk (NM_008439.2,449-467).
catcggaacaggtgaagat

SEQ ID NO: 598148 - DNA, 19 bp, Mus musculus
  siRNA target sequence for Khk (NM_008439.2,521-539).
gggtgtcggtggagataga

SEQ ID NO: 598149 - DNA, 19 bp, Mus musculus
  siRNA target sequence for Khk (NM_008439.2,558-576).
cttccagttgtttagctat

SEQ ID NO: 598150 - DNA, 19 bp, Mus musculus
  siRNA target sequence for Khk (NM_008439.2,585-603).
ggtgtttgtcagcaaagat

SEQ ID NO: 598151 - DNA, 19 bp, Mus musculus
  siRNA target sequence for Khk (NM_008439.2,786-804).
ggctggagacaccttcaat

SEQ ID NO: 598152 - DNA, 19 bp, Mus musculus
  siRNA target sequence for BC021917 (NM_145496.1,269-287).
cctgcccatgccggtttta

SEQ ID NO: 598153 - DNA, 19 bp, Mus musculus
  siRNA target sequence for BC021917 (NM_145496.1,270-288).
ctgcccatgccggttttat

SEQ ID NO: 598154 - DNA, 19 bp, Mus musculus
  siRNA target sequence for BC021917 (NM_145496.1,423-441).
ctggggatcggctcaactt

SEQ ID NO: 598155 - DNA, 19 bp, Mus musculus
  siRNA target sequence for BC021917 (NM_145496.1,552-570).
gtggcacagtacttatcca

SEQ ID NO: 598156 - DNA, 19 bp, Mus musculus
  siRNA target sequence for BC021917 (NM_145496.1,605-623).
gggctggaggagatcacaa

SEQ ID NO: 598157 - DNA, 19 bp, Mus musculus
  siRNA target sequence for BC021917 (NM_145496.1,761-779).
ggtgttcgtcggataaaga

SEQ ID NO: 598158 - DNA, 19 bp, Mus musculus
  siRNA target sequence for BC021917 (NM_145496.1,762-780).
gtgttcgtcggataaagat

SEQ ID NO: 598159 - DNA, 19 bp, Mus musculus
  siRNA target sequence for BC021917 (NM_145496.1,785-803).
cctgttgatcagattgtca

SEQ ID NO: 598160 - DNA, 19 bp, Mus musculus
  siRNA target sequence for BC021917 (NM_145496.1,796-814).
gattgtcactcttatgctt

SEQ ID NO: 598161 - DNA, 19 bp, Mus musculus
  siRNA target sequence for BC021917 (NM_145496.1,825-843).
caaacacctccaatatatt

SEQ ID NO: 598162 - DNA, 19 bp, Mus musculus
  siRNA target sequence for BC021917 (NM_145496.1,829-847).
cacctccaatatatttcat

SEQ ID NO: 598163 - DNA, 19 bp, Mus musculus
  siRNA target sequence for BC021917 (NM_145496.1,831-849).
cctccaatatatttcatgt

SEQ ID NO: 598164 - DNA, 19 bp, Mus musculus
  siRNA target sequence for BC021917 (NM_145496.1,870-888).
cagtggtgctgatagtcaa

SEQ ID NO: 598165 - DNA, 19 bp, Mus musculus
  siRNA target sequence for BC021917 (NM_145496.1,874-892).
ggtgctgatagtcaacaat

SEQ ID NO: 598166 - DNA, 19 bp, Mus musculus
  siRNA target sequence for BC021917 (NM_145496.1,1016-1034).
cctggtgtgtctcttactt

SEQ ID NO: 598167 - DNA, 19 bp, Mus musculus
  siRNA target sequence for BC021917 (NM_145496.1,1019-1037).
ggtgtgtctcttactttga

SEQ ID NO: 598168 - DNA, 19 bp, Mus musculus
  siRNA target sequence for BC021917 (NM_145496.1,1049-1067).
gaacccgtgctgaagctaa

SEQ ID NO: 598169 - DNA, 19 bp, Mus musculus
  siRNA target sequence for BC021917 (NM_145496.1,1053-1071).
ccgtgctgaagctaataga

SEQ ID NO: 598170 - DNA, 19 bp, Mus musculus
  siRNA target sequence for BC021917 (NM_145496.1,1054-1072).
cgtgctgaagctaatagat

SEQ ID NO: 598171 - DNA, 19 bp, Mus musculus
  siRNA target sequence for BC021917 (NM_145496.1,1181-1199).
gcagcaggaggtgtaacat

SEQ ID NO: 598172 - DNA, 19 bp, Mus musculus
  siRNA target sequence for BC021917 (NM_145496.1,1217-1235).
gtgctggatcggatatgca

SEQ ID NO: 598173 - DNA, 19 bp, Mus musculus
  siRNA target sequence for BC021917 (NM_145496.1,1376-1394).
caggtactctccagattgt

SEQ ID NO: 598174 - DNA, 19 bp, Mus musculus
  siRNA target sequence for BC021917 (NM_145496.1,1378-1396).
ggtactctccagattgtct

SEQ ID NO: 598175 - DNA, 19 bp, Mus musculus
  siRNA target sequence for BC021917 (NM_145496.1,1707-1725).
gtgctgggagagctagtta

SEQ ID NO: 598176 - DNA, 19 bp, Mus musculus
  siRNA target sequence for BC021917 (NM_145496.1,1709-1727).
gctgggagagctagttata

SEQ ID NO: 598177 - DNA, 19 bp, Mus musculus
  siRNA target sequence for BC021917 (NM_145496.1,1729-1747).
cagctctgcacaactagat

SEQ ID NO: 598178 - DNA, 19 bp, Mus musculus
  siRNA target sequence for 0610038L10Rik (NM_019437.1,312-330).
ccaattttcctgaacaagt

SEQ ID NO: 598179 - DNA, 19 bp, Mus musculus
  siRNA target sequence for 0610038L10Rik (NM_019437.1,355-373).
gtctactggcatttattat

SEQ ID NO: 598180 - DNA, 19 bp, Mus musculus
  siRNA target sequence for 0610038L10Rik (NM_019437.1,390-408).
ggagcggcgatgtccataa

SEQ ID NO: 598181 - DNA, 19 bp, Mus musculus
  siRNA target sequence for 0610038L10Rik (NM_019437.1,393-411).
gcggcgatgtccataaaat

SEQ ID NO: 598182 - DNA, 19 bp, Mus musculus
  siRNA target sequence for 0610038L10Rik (NM_019437.1,396-414).
gcgatgtccataaaatggt

SEQ ID NO: 598183 - DNA, 19 bp, Mus musculus
  siRNA target sequence for 0610038L10Rik (NM_019437.1,434-452).
ccgtactataagaatgtga

SEQ ID NO: 598184 - DNA, 19 bp, Mus musculus
  siRNA target sequence for 0610038L10Rik (NM_019437.1,499-517).
ctatggggaaattctcaat

SEQ ID NO: 598185 - DNA, 19 bp, Mus musculus
  siRNA target sequence for 0610038L10Rik (NM_019437.1,521-539).
gccattgttggctatctca

SEQ ID NO: 598186 - DNA, 19 bp, Mus musculus
  siRNA target sequence for 0610038L10Rik (NM_019437.1,620-638).
gatttacccgaacatttga

SEQ ID NO: 598187 - DNA, 19 bp, Mus musculus
  siRNA target sequence for 0610038L10Rik (NM_019437.1,641-659).
ctcaaagatgataatttct

SEQ ID NO: 598188 - DNA, 19 bp, Mus musculus
  siRNA target sequence for Pdxk (NM_172134.1,278-296).
caggctacgcccattggaa

SEQ ID NO: 598189 - DNA, 19 bp, Mus musculus
  siRNA target sequence for Pdxk (NM_172134.1,355-373).
gatgtcaataagtatgact

SEQ ID NO: 598190 - DNA, 19 bp, Mus musculus
  siRNA target sequence for Pdxk (NM_172134.1,450-468).
gaactctcgccttgtgtat

SEQ ID NO: 598191 - DNA, 19 bp, Mus musculus
  siRNA target sequence for Pold2 (NM_008894.1,204-222).
ctgggagagcgcagcttta

SEQ ID NO: 598192 - DNA, 19 bp, Mus musculus
  siRNA target sequence for Pold2 (NM_008894.1,224-242).
ccggcagtacgcccatatt

SEQ ID NO: 598193 - DNA, 19 bp, Mus musculus
  siRNA target sequence for Pold2 (NM_008894.1,225-243).
cggcagtacgcccatattt

SEQ ID NO: 598194 - DNA, 19 bp, Mus musculus
  siRNA target sequence for Pold2 (NM_008894.1,227-245).
gcagtacgcccatatttat

SEQ ID NO: 598195 - DNA, 19 bp, Mus musculus
  siRNA target sequence for Pold2 (NM_008894.1,301-319).
ggggcagccgagttgaagt

SEQ ID NO: 598196 - DNA, 19 bp, Mus musculus
  siRNA target sequence for Pold2 (NM_008894.1,307-325).
gccgagttgaagtgaagaa

SEQ ID NO: 598197 - DNA, 19 bp, Mus musculus
  siRNA target sequence for Pold2 (NM_008894.1,309-327).
cgagttgaagtgaagaagt

SEQ ID NO: 598198 - DNA, 19 bp, Mus musculus
  siRNA target sequence for Pold2 (NM_008894.1,310-328).
gagttgaagtgaagaagtt

SEQ ID NO: 598199 - DNA, 19 bp, Mus musculus
  siRNA target sequence for Pold2 (NM_008894.1,312-330).
gttgaagtgaagaagttgt

SEQ ID NO: 598200 - DNA, 19 bp, Mus musculus
  siRNA target sequence for Pold2 (NM_008894.1,443-461).
gcctccacggagcaaatat

SEQ ID NO: 598201 - DNA, 19 bp, Mus musculus
  siRNA target sequence for Pold2 (NM_008894.1,444-462).
cctccacggagcaaatata

SEQ ID NO: 598202 - DNA, 19 bp, Mus musculus
  siRNA target sequence for Pold2 (NM_008894.1,445-463).
ctccacggagcaaatatat

SEQ ID NO: 598203 - DNA, 19 bp, Mus musculus
  siRNA target sequence for Pold2 (NM_008894.1,448-466).
cacggagcaaatatatcca

SEQ ID NO: 598204 - DNA, 19 bp, Mus musculus
  siRNA target sequence for Pold2 (NM_008894.1,498-516).
ctgcagcgtatcaaactga

SEQ ID NO: 598205 - DNA, 19 bp, Mus musculus
  siRNA target sequence for Pold2 (NM_008894.1,500-518).
gcagcgtatcaaactgaaa

SEQ ID NO: 598206 - DNA, 19 bp, Mus musculus
  siRNA target sequence for Pold2 (NM_008894.1,853-871).
ccatcaacaaggccaaata

SEQ ID NO: 598207 - DNA, 19 bp, Mus musculus
  siRNA target sequence for Pold2 (NM_008894.1,898-916).
gtgtggaggcagtcaaaat

SEQ ID NO: 598208 - DNA, 19 bp, Mus musculus
  siRNA target sequence for Pold2 (NM_008894.1,949-967).
cggtaccggtggatgtgat

SEQ ID NO: 598209 - DNA, 19 bp, Mus musculus
  siRNA target sequence for Pold2 (NM_008894.1,1064-1082).
ggtcaccaacccataccaa

SEQ ID NO: 598210 - DNA, 19 bp, Mus musculus
  siRNA target sequence for Pold2 (NM_008894.1,1122-1140).
cagaacgtgagtgatatct

SEQ ID NO: 598211 - DNA, 19 bp, Mus musculus
  siRNA target sequence for Pold2 (NM_008894.1,1230-1248).
gggtgctaccccttctaca

SEQ ID NO: 598212 - DNA, 19 bp, Mus musculus
  siRNA target sequence for Pold2 (NM_008894.1,1390-1408).
cggcctgcctagtgaactt

SEQ ID NO: 598213 - DNA, 19 bp, Mus musculus
  siRNA target sequence for Rev1l (NM_019570.2,232-250).
gaagagaacggagaatgat

SEQ ID NO: 598214 - DNA, 19 bp, Mus musculus
  siRNA target sequence for Rev1l (NM_019570.2,338-356).
gggacggcgtctgcaatat

SEQ ID NO: 598215 - DNA, 19 bp, Mus musculus
  siRNA target sequence for Rev1l (NM_019570.2,339-357).
ggacggcgtctgcaatatt

SEQ ID NO: 598216 - DNA, 19 bp, Mus musculus
  siRNA target sequence for Rev1l (NM_019570.2,340-358).
gacggcgtctgcaatattt

SEQ ID NO: 598217 - DNA, 19 bp, Mus musculus
  siRNA target sequence for Rev1l (NM_019570.2,343-361).
ggcgtctgcaatatttagt

SEQ ID NO: 598218 - DNA, 19 bp, Mus musculus
  siRNA target sequence for Rev1l (NM_019570.2,360-378).
gtggagttgccatctatgt

SEQ ID NO: 598219 - DNA, 19 bp, Mus musculus
  siRNA target sequence for Rev1l (NM_019570.2,362-380).
ggagttgccatctatgtta

SEQ ID NO: 598220 - DNA, 19 bp, Mus musculus
  siRNA target sequence for Rev1l (NM_019570.2,363-381).
gagttgccatctatgttaa

SEQ ID NO: 598221 - DNA, 19 bp, Mus musculus
  siRNA target sequence for Rev1l (NM_019570.2,395-413).
ccttctgcggaggaattga

SEQ ID NO: 598222 - DNA, 19 bp, Mus musculus
  siRNA target sequence for Rev1l (NM_019570.2,399-417).
ctgcggaggaattgagaaa

SEQ ID NO: 598223 - DNA, 19 bp, Mus musculus
  siRNA target sequence for Rev1l (NM_019570.2,402-420).
cggaggaattgagaaatct

SEQ ID NO: 598224 - DNA, 19 bp, Mus musculus
  siRNA target sequence for Rev1l (NM_019570.2,437-455).
ggtcaataccatgtgtatt

SEQ ID NO: 598225 - DNA, 19 bp, Mus musculus
  siRNA target sequence for Rev1l (NM_019570.2,438-456).
gtcaataccatgtgtatta

SEQ ID NO: 598226 - DNA, 19 bp, Mus musculus
  siRNA target sequence for Rev1l (NM_019570.2,474-492).
cacacattattgctacaaa

SEQ ID NO: 598227 - DNA, 19 bp, Mus musculus
  siRNA target sequence for Rev1l (NM_019570.2,478-496).
cattattgctacaaatctt

SEQ ID NO: 598228 - DNA, 19 bp, Mus musculus
  siRNA target sequence for Rev1l (NM_019570.2,494-512).
cttcctaatgccaaaatta

SEQ ID NO: 598229 - DNA, 19 bp, Mus musculus
  siRNA target sequence for Rev1l (NM_019570.2,523-541).
gggggaaaaagtaatacga

SEQ ID NO: 598230 - DNA, 19 bp, Mus musculus
  siRNA target sequence for Rev1l (NM_019570.2,711-729).
gggtaaatcacataattaa

SEQ ID NO: 598231 - DNA, 19 bp, Mus musculus
  siRNA target sequence for Rev1l (NM_019570.2,713-731).
gtaaatcacataattaaga

SEQ ID NO: 598232 - DNA, 19 bp, Mus musculus
  siRNA target sequence for Rev1l (NM_019570.2,788-806).
ggtgtaaatgatgatttta

SEQ ID NO: 598233 - DNA, 19 bp, Mus musculus
  siRNA target sequence for Rev1l (NM_019570.2,854-872).
gtaatgcatcccagagata

SEQ ID NO: 598234 - DNA, 19 bp, Mus musculus
  siRNA target sequence for Rev1l (NM_019570.2,867-885).
gagataccgctgtcatttt

SEQ ID NO: 598235 - DNA, 19 bp, Mus musculus
  siRNA target sequence for Rev1l (NM_019570.2,869-887).
gataccgctgtcattttta

SEQ ID NO: 598236 - DNA, 19 bp, Mus musculus
  siRNA target sequence for Rev1l (NM_019570.2,890-908).
ggacacacccatagttcaa

SEQ ID NO: 598237 - DNA, 19 bp, Mus musculus
  siRNA target sequence for Rev1l (NM_019570.2,891-909).
gacacacccatagttcaaa

SEQ ID NO: 598238 - DNA, 19 bp, Mus musculus
  siRNA target sequence for Rev1l (NM_019570.2,956-974).
gttgctagcaggctatctt

SEQ ID NO: 598239 - DNA, 19 bp, Mus musculus
  siRNA target sequence for Rev1l (NM_019570.2,960-978).
ctagcaggctatctttaga

SEQ ID NO: 598240 - DNA, 19 bp, Mus musculus
  siRNA target sequence for Rev1l (NM_019570.2,1080-1098).
ggagtccacacagaactaa

SEQ ID NO: 598241 - DNA, 19 bp, Mus musculus
  siRNA target sequence for Rev1l (NM_019570.2,1188-1206).
ctgttctgactcttagtaa

SEQ ID NO: 598242 - DNA, 19 bp, Mus musculus
  siRNA target sequence for Rev1l (NM_019570.2,1232-1250).
ccctcggactgcaacttca

SEQ ID NO: 598243 - DNA, 19 bp, Mus musculus
  siRNA target sequence for Rev1l (NM_019570.2,1233-1251).
cctcggactgcaacttcat

SEQ ID NO: 598244 - DNA, 19 bp, Mus musculus
  siRNA target sequence for Rev1l (NM_019570.2,1234-1252).
ctcggactgcaacttcatt

SEQ ID NO: 598245 - DNA, 19 bp, Mus musculus
  siRNA target sequence for Rev1l (NM_019570.2,1237-1255).
ggactgcaacttcatttca

SEQ ID NO: 598246 - DNA, 19 bp, Mus musculus
  siRNA target sequence for Rev1l (NM_019570.2,1269-1287).
gttcaagactgcatcacat

SEQ ID NO: 598247 - DNA, 19 bp, Mus musculus
  siRNA target sequence for Rev1l (NM_019570.2,1302-1320).
gtgaattgactgagtttgt

SEQ ID NO: 598248 - DNA, 19 bp, Mus musculus
  siRNA target sequence for Rev1l (NM_019570.2,1335-1353).
gacaaagtagtggtatctt

SEQ ID NO: 598249 - DNA, 19 bp, Mus musculus
  siRNA target sequence for Rev1l (NM_019570.2,1355-1373).
ccgggaagggaaaagttaa

SEQ ID NO: 598250 - DNA, 19 bp, Mus musculus
  siRNA target sequence for Rev1l (NM_019570.2,1390-1408).
caggtcttctcttgttgta

SEQ ID NO: 598251 - DNA, 19 bp, Mus musculus
  siRNA target sequence for Rev1l (NM_019570.2,1395-1413).
cttctcttgttgtaactga

SEQ ID NO: 598252 - DNA, 19 bp, Mus musculus
  siRNA target sequence for Rev1l (NM_019570.2,1477-1495).
ggactgcttctttgtatca

SEQ ID NO: 598253 - DNA, 19 bp, Mus musculus
  siRNA target sequence for Rev1l (NM_019570.2,1643-1661).
gcagatataccagattcat

SEQ ID NO: 598254 - DNA, 19 bp, Mus musculus
  siRNA target sequence for Rev1l (NM_019570.2,1659-1677).
catcagtatgggagaatca

SEQ ID NO: 598255 - DNA, 19 bp, Mus musculus
  siRNA target sequence for Rev1l (NM_019570.2,1664-1682).
gtatgggagaatcaagatt

SEQ ID NO: 598256 - DNA, 19 bp, Mus musculus
  siRNA target sequence for Rev1l (NM_019570.2,1761-1779).
gcattaagaacggaatgtt

SEQ ID NO: 598257 - DNA, 19 bp, Mus musculus
  siRNA target sequence for Rev1l (NM_019570.2,1762-1780).
cattaagaacggaatgttt

SEQ ID NO: 598258 - DNA, 19 bp, Mus musculus
  siRNA target sequence for Rev1l (NM_019570.2,1818-1836).
ctgttccgtatgattttca

SEQ ID NO: 598259 - DNA, 19 bp, Mus musculus
  siRNA target sequence for Rev1l (NM_019570.2,1909-1927).
ctgcgatgaagcactgatt

SEQ ID NO: 598260 - DNA, 19 bp, Mus musculus
  siRNA target sequence for Rev1l (NM_019570.2,1911-1929).
gcgatgaagcactgattga

SEQ ID NO: 598261 - DNA, 19 bp, Mus musculus
  siRNA target sequence for Rev1l (NM_019570.2,1942-1960).
ccttgcagagacgaaactt

SEQ ID NO: 598262 - DNA, 19 bp, Mus musculus
  siRNA target sequence for Rev1l (NM_019570.2,1943-1961).
cttgcagagacgaaacttt

SEQ ID NO: 598263 - DNA, 19 bp, Mus musculus
  siRNA target sequence for Rev1l (NM_019570.2,1979-1997).
gctgccctccgtattgaaa

SEQ ID NO: 598264 - DNA, 19 bp, Mus musculus
  siRNA target sequence for Rev1l (NM_019570.2,1980-1998).
ctgccctccgtattgaaat

SEQ ID NO: 598265 - DNA, 19 bp, Mus musculus
  siRNA target sequence for Rev1l (NM_019570.2,1982-2000).
gccctccgtattgaaatca

SEQ ID NO: 598266 - DNA, 19 bp, Mus musculus
  siRNA target sequence for Rev1l (NM_019570.2,1983-2001).
ccctccgtattgaaatcaa

SEQ ID NO: 598267 - DNA, 19 bp, Mus musculus
  siRNA target sequence for Rev1l (NM_019570.2,1984-2002).
cctccgtattgaaatcaaa

SEQ ID NO: 598268 - DNA, 19 bp, Mus musculus
  siRNA target sequence for Rev1l (NM_019570.2,1988-2006).
cgtattgaaatcaaagaca

SEQ ID NO: 598269 - DNA, 19 bp, Mus musculus
  siRNA target sequence for Rev1l (NM_019570.2,2108-2126).
gacgaggtagacgatttca

SEQ ID NO: 598270 - DNA, 19 bp, Mus musculus
  siRNA target sequence for Rev1l (NM_019570.2,2154-2172).
cgggagttggacgttcaat

SEQ ID NO: 598271 - DNA, 19 bp, Mus musculus
  siRNA target sequence for Rev1l (NM_019570.2,2162-2180).
ggacgttcaatggaatcta

SEQ ID NO: 598272 - DNA, 19 bp, Mus musculus
  siRNA target sequence for Rev1l (NM_019570.2,2163-2181).
gacgttcaatggaatctaa

SEQ ID NO: 598273 - DNA, 19 bp, Mus musculus
  siRNA target sequence for Rev1l (NM_019570.2,2186-2204).
gcatctttggggattaaga

SEQ ID NO: 598274 - DNA, 19 bp, Mus musculus
  siRNA target sequence for Rev1l (NM_019570.2,2268-2286).
ggcagatgctgtataggtt

SEQ ID NO: 598275 - DNA, 19 bp, Mus musculus
  siRNA target sequence for Rev1l (NM_019570.2,2339-2357).
gtttcagccgagatcaact

SEQ ID NO: 598276 - DNA, 19 bp, Mus musculus
  siRNA target sequence for Rev1l (NM_019570.2,2345-2363).
gccgagatcaactatggaa

SEQ ID NO: 598277 - DNA, 19 bp, Mus musculus
  siRNA target sequence for Rev1l (NM_019570.2,2346-2364).
ccgagatcaactatggaat

SEQ ID NO: 598278 - DNA, 19 bp, Mus musculus
  siRNA target sequence for Rev1l (NM_019570.2,2347-2365).
cgagatcaactatggaata

SEQ ID NO: 598279 - DNA, 19 bp, Mus musculus
  siRNA target sequence for Rev1l (NM_019570.2,2348-2366).
gagatcaactatggaataa

SEQ ID NO: 598280 - DNA, 19 bp, Mus musculus
  siRNA target sequence for Rev1l (NM_019570.2,2459-2477).
cgcctgactctgaaaatca

SEQ ID NO: 598281 - DNA, 19 bp, Mus musculus
  siRNA target sequence for Rev1l (NM_019570.2,2498-2516).
cctatagaaactgcaaaat

SEQ ID NO: 598282 - DNA, 19 bp, Mus musculus
  siRNA target sequence for Rev1l (NM_019570.2,2499-2517).
ctatagaaactgcaaaatt

SEQ ID NO: 598283 - DNA, 19 bp, Mus musculus
  siRNA target sequence for Rev1l (NM_019570.2,2522-2540).
ggccatggaatttgtgata

SEQ ID NO: 598284 - DNA, 19 bp, Mus musculus
  siRNA target sequence for Rev1l (NM_019570.2,2563-2581).
ggaccaggcaacagatagt

SEQ ID NO: 598285 - DNA, 19 bp, Mus musculus
  siRNA target sequence for Rev1l (NM_019570.2,2570-2588).
gcaacagatagtgcaaaaa

SEQ ID NO: 598286 - DNA, 19 bp, Mus musculus
  siRNA target sequence for Rev1l (NM_019570.2,2571-2589).
caacagatagtgcaaaaat

SEQ ID NO: 598287 - DNA, 19 bp, Mus musculus
  siRNA target sequence for Rev1l (NM_019570.2,2614-2632).
gtttcatacaatgaaacta

SEQ ID NO: 598288 - DNA, 19 bp, Mus musculus
  siRNA target sequence for Rev1l (NM_019570.2,2630-2648).
ctaaatatatcggatatga

SEQ ID NO: 598289 - DNA, 19 bp, Mus musculus
  siRNA target sequence for Rev1l (NM_019570.2,2652-2670).
gggttggtattcaagtgaa

SEQ ID NO: 598290 - DNA, 19 bp, Mus musculus
  siRNA target sequence for Rev1l (NM_019570.2,2653-2671).
ggttggtattcaagtgaat

SEQ ID NO: 598291 - DNA, 19 bp, Mus musculus
  siRNA target sequence for Rev1l (NM_019570.2,2657-2675).
ggtattcaagtgaatcagt

SEQ ID NO: 598292 - DNA, 19 bp, Mus musculus
  siRNA target sequence for Rev1l (NM_019570.2,2658-2676).
gtattcaagtgaatcagtt

SEQ ID NO: 598293 - DNA, 19 bp, Mus musculus
  siRNA target sequence for Rev1l (NM_019570.2,2674-2692).
gttggttcctgctaattca

SEQ ID NO: 598294 - DNA, 19 bp, Mus musculus
  siRNA target sequence for Rev1l (NM_019570.2,2677-2695).
ggttcctgctaattcaaat

SEQ ID NO: 598295 - DNA, 19 bp, Mus musculus
  siRNA target sequence for Rev1l (NM_019570.2,2740-2758).
ctctggtcggccacattct

SEQ ID NO: 598296 - DNA, 19 bp, Mus musculus
  siRNA target sequence for Rev1l (NM_019570.2,2742-2760).
ctggtcggccacattctgt

SEQ ID NO: 598297 - DNA, 19 bp, Mus musculus
  siRNA target sequence for Rev1l (NM_019570.2,2857-2875).
ctctagagcttgtggttta

SEQ ID NO: 598298 - DNA, 19 bp, Mus musculus
  siRNA target sequence for Rev1l (NM_019570.2,2907-2925).
gtgttagtcctgacactaa

SEQ ID NO: 598299 - DNA, 19 bp, Mus musculus
  siRNA target sequence for Rev1l (NM_019570.2,2982-3000).
cacggctgaacctcagtat

SEQ ID NO: 598300 - DNA, 19 bp, Mus musculus
  siRNA target sequence for Rev1l (NM_019570.2,2985-3003).
ggctgaacctcagtataga

SEQ ID NO: 598301 - DNA, 19 bp, Mus musculus
  siRNA target sequence for Rev1l (NM_019570.2,3020-3038).
cagattgaccagtctgttt

SEQ ID NO: 598302 - DNA, 19 bp, Mus musculus
  siRNA target sequence for Rev1l (NM_019570.2,3213-3231).
gtgacagcaagattagtgt

SEQ ID NO: 598303 - DNA, 19 bp, Mus musculus
  siRNA target sequence for Rev1l (NM_019570.2,3215-3233).
gacagcaagattagtgtaa

SEQ ID NO: 598304 - DNA, 19 bp, Mus musculus
  siRNA target sequence for Rev1l (NM_019570.2,3217-3235).
cagcaagattagtgtaatt

SEQ ID NO: 598305 - DNA, 19 bp, Mus musculus
  siRNA target sequence for Rev1l (NM_019570.2,3301-3319).
ggagctgaaagcagcatat

SEQ ID NO: 598306 - DNA, 19 bp, Mus musculus
  siRNA target sequence for Rev1l (NM_019570.2,3356-3374).
cagcagccaaccagtacat

SEQ ID NO: 598307 - DNA, 19 bp, Mus musculus
  siRNA target sequence for Rev1l (NM_019570.2,3358-3376).
gcagccaaccagtacatct

SEQ ID NO: 598308 - DNA, 19 bp, Mus musculus
  siRNA target sequence for Rev1l (NM_019570.2,3369-3387).
gtacatctgtgccaaagaa

SEQ ID NO: 598309 - DNA, 19 bp, Mus musculus
  siRNA target sequence for Rev1l (NM_019570.2,3525-3543).
gaagcccccagaagttaat

SEQ ID NO: 598310 - DNA, 19 bp, Mus musculus
  siRNA target sequence for Rev1l (NM_019570.2,3538-3556).
gttaatggatggttttcta

SEQ ID NO: 598311 - DNA, 19 bp, Mus musculus
  siRNA target sequence for Rev1l (NM_019570.2,3614-3632).
ggtgcacaggacctatcta

SEQ ID NO: 598312 - DNA, 19 bp, Mus musculus
  siRNA target sequence for Rev1l (NM_019570.2,3617-3635).
gcacaggacctatctagtt

SEQ ID NO: 598313 - DNA, 19 bp, Mus musculus
  siRNA target sequence for Rev1l (NM_019570.2,3618-3636).
cacaggacctatctagttt

SEQ ID NO: 598314 - DNA, 19 bp, Mus musculus
  siRNA target sequence for Rev1l (NM_019570.2,3644-3662).
ggccagagcagctgtttta

SEQ ID NO: 598315 - DNA, 19 bp, Mus musculus
  siRNA target sequence for Rev1l (NM_019570.2,3719-3737).
ctcaaagagtggatcacta

SEQ ID NO: 598316 - DNA, 19 bp, Mus musculus
  siRNA target sequence for Rev1l (NM_019570.2,3727-3745).
gtggatcactactatctca

SEQ ID NO: 598317 - DNA, 19 bp, Mus musculus
  siRNA target sequence for Rev1l (NM_019570.2,3938-3956).
ggaagcacactgaaagtga

SEQ ID NO: 598318 - DNA, 19 bp, Mus musculus
  siRNA target sequence for Pold3 (NM_133692.1,82-100).
ggcggaacagctgtatcta

SEQ ID NO: 598319 - DNA, 19 bp, Mus musculus
  siRNA target sequence for Pold3 (NM_133692.1,84-102).
cggaacagctgtatctaga

SEQ ID NO: 598320 - DNA, 19 bp, Mus musculus
  siRNA target sequence for Pold3 (NM_133692.1,144-162).
cttacaagtggctaagcta

SEQ ID NO: 598321 - DNA, 19 bp, Mus musculus
  siRNA target sequence for Pold3 (NM_133692.1,151-169).
gtggctaagctatacacta

SEQ ID NO: 598322 - DNA, 19 bp, Mus musculus
  siRNA target sequence for Pold3 (NM_133692.1,165-183).
cactaggggttcatgttaa

SEQ ID NO: 598323 - DNA, 19 bp, Mus musculus
  siRNA target sequence for Pold3 (NM_133692.1,243-261).
ctcagctgcatgttaccta

SEQ ID NO: 598324 - DNA, 19 bp, Mus musculus
  siRNA target sequence for Pold3 (NM_133692.1,265-283).
ggtgtctggcagtcttata

SEQ ID NO: 598325 - DNA, 19 bp, Mus musculus
  siRNA target sequence for Pold3 (NM_133692.1,311-329).
gcagtagtgagagaagata

SEQ ID NO: 598326 - DNA, 19 bp, Mus musculus
  siRNA target sequence for Pold3 (NM_133692.1,312-330).
cagtagtgagagaagataa

SEQ ID NO: 598327 - DNA, 19 bp, Mus musculus
  siRNA target sequence for Pold3 (NM_133692.1,437-455).
gacatccttaaaagcaatt

SEQ ID NO: 598328 - DNA, 19 bp, Mus musculus
  siRNA target sequence for Pold3 (NM_133692.1,460-478).
gaactgcagcaagtttagt

SEQ ID NO: 598329 - DNA, 19 bp, Mus musculus
  siRNA target sequence for Pold3 (NM_133692.1,538-556).
gtatgaacagtcaaatctt

SEQ ID NO: 598330 - DNA, 19 bp, Mus musculus
  siRNA target sequence for Pold3 (NM_133692.1,580-598).
cagtgagctgactaccaat

SEQ ID NO: 598331 - DNA, 19 bp, Mus musculus
  siRNA target sequence for Pold3 (NM_133692.1,644-662).
ggaattatgggaatgttaa

SEQ ID NO: 598332 - DNA, 19 bp, Mus musculus
  siRNA target sequence for Pold3 (NM_133692.1,801-819).
caatgaataaacttaaagt

SEQ ID NO: 598333 - DNA, 19 bp, Mus musculus
  siRNA target sequence for Pold3 (NM_133692.1,805-823).
gaataaacttaaagtcaat

SEQ ID NO: 598334 - DNA, 19 bp, Mus musculus
  siRNA target sequence for Pold3 (NM_133692.1,812-830).
cttaaagtcaatttggatt

SEQ ID NO: 598335 - DNA, 19 bp, Mus musculus
  siRNA target sequence for Pold3 (NM_133692.1,820-838).
caatttggattcagaacaa

SEQ ID NO: 598336 - DNA, 19 bp, Mus musculus
  siRNA target sequence for Pold3 (NM_133692.1,1014-1032).
ccgaacacctgaagaaaaa

SEQ ID NO: 598337 - DNA, 19 bp, Mus musculus
  siRNA target sequence for Pold3 (NM_133692.1,1145-1163).
cctgatcctatgccaaaaa

SEQ ID NO: 598338 - DNA, 19 bp, Mus musculus
  siRNA target sequence for Pold3 (NM_133692.1,1185-1203).
gttcaagtggagaaaccaa

SEQ ID NO: 598339 - DNA, 19 bp, Mus musculus
  siRNA target sequence for Pold3 (NM_133692.1,1209-1227).
gacgaaagcgtgtactgaa

SEQ ID NO: 598340 - DNA, 19 bp, Mus musculus
  siRNA target sequence for Pold3 (NM_133692.1,1211-1229).
cgaaagcgtgtactgaaat

SEQ ID NO: 598341 - DNA, 19 bp, Mus musculus
  siRNA target sequence for Pold3 (NM_133692.1,1216-1234).
gcgtgtactgaaatctaaa

SEQ ID NO: 598342 - DNA, 19 bp, Mus musculus
  siRNA target sequence for Pold3 (NM_133692.1,1217-1235).
cgtgtactgaaatctaaaa

SEQ ID NO: 598343 - DNA, 19 bp, Mus musculus
  siRNA target sequence for Pold3 (NM_133692.1,1257-1275).
gcatagtgactgagaaagt

SEQ ID NO: 598344 - DNA, 19 bp, Mus musculus
  siRNA target sequence for Polh (NM_030715.2,270-288).
gtagacatggactgctttt

SEQ ID NO: 598345 - DNA, 19 bp, Mus musculus
  siRNA target sequence for Polh (NM_030715.2,306-324).
cggcaaaatcctcatttga

SEQ ID NO: 598346 - DNA, 19 bp, Mus musculus
  siRNA target sequence for Polh (NM_030715.2,373-391).
gaattattgcagttagcta

SEQ ID NO: 598347 - DNA, 19 bp, Mus musculus
  siRNA target sequence for Polh (NM_030715.2,389-407).
ctatgaagcccgagcattt

SEQ ID NO: 598348 - DNA, 19 bp, Mus musculus
  siRNA target sequence for Polh (NM_030715.2,402-420).
gcatttggtgtcactagaa

SEQ ID NO: 598349 - DNA, 19 bp, Mus musculus
  siRNA target sequence for Polh (NM_030715.2,408-426).
ggtgtcactagaaacatgt

SEQ ID NO: 598350 - DNA, 19 bp, Mus musculus
  siRNA target sequence for Polh (NM_030715.2,427-445).
gggcggatgatgctaagaa

SEQ ID NO: 598351 - DNA, 19 bp, Mus musculus
  siRNA target sequence for Polh (NM_030715.2,429-447).
gcggatgatgctaagaagt

SEQ ID NO: 598352 - DNA, 19 bp, Mus musculus
  siRNA target sequence for Polh (NM_030715.2,443-461).
gaagttatgtccagatctt

SEQ ID NO: 598353 - DNA, 19 bp, Mus musculus
  siRNA target sequence for Polh (NM_030715.2,480-498).
gagtcccgtggaaaagcta

SEQ ID NO: 598354 - DNA, 19 bp, Mus musculus
  siRNA target sequence for Polh (NM_030715.2,512-530).
ccgggaagctagtgttgaa

SEQ ID NO: 598355 - DNA, 19 bp, Mus musculus
  siRNA target sequence for Polh (NM_030715.2,574-592).
gcatcgatgaggcttatat

SEQ ID NO: 598356 - DNA, 19 bp, Mus musculus
  siRNA target sequence for Polh (NM_030715.2,575-593).
catcgatgaggcttatata

SEQ ID NO: 598357 - DNA, 19 bp, Mus musculus
  siRNA target sequence for Polh (NM_030715.2,578-596).
cgatgaggcttatatagat

SEQ ID NO: 598358 - DNA, 19 bp, Mus musculus
  siRNA target sequence for Polh (NM_030715.2,579-597).
gatgaggcttatatagatt

SEQ ID NO: 598359 - DNA, 19 bp, Mus musculus
  siRNA target sequence for Polh (NM_030715.2,582-600).
gaggcttatatagatttga

SEQ ID NO: 598360 - DNA, 19 bp, Mus musculus
  siRNA target sequence for Polh (NM_030715.2,602-620).
cagtgctgtacaagaaaga

SEQ ID NO: 598361 - DNA, 19 bp, Mus musculus
  siRNA target sequence for Polh (NM_030715.2,643-661).
ctatctcagcagatttgct

SEQ ID NO: 598362 - DNA, 19 bp, Mus musculus
  siRNA target sequence for Polh (NM_030715.2,659-677).
gctgccaagcacttacatt

SEQ ID NO: 598363 - DNA, 19 bp, Mus musculus
  siRNA target sequence for Polh (NM_030715.2,746-764).
gcttcagtggcttgattct

SEQ ID NO: 598364 - DNA, 19 bp, Mus musculus
  siRNA target sequence for Polh (NM_030715.2,866-884).
gtgttcagctggaatctca

SEQ ID NO: 598365 - DNA, 19 bp, Mus musculus
  siRNA target sequence for Polh (NM_030715.2,873-891).
gctggaatctcacacaata

SEQ ID NO: 598366 - DNA, 19 bp, Mus musculus
  siRNA target sequence for Polh (NM_030715.2,874-892).
ctggaatctcacacaataa

SEQ ID NO: 598367 - DNA, 19 bp, Mus musculus
  siRNA target sequence for Polh (NM_030715.2,877-895).
gaatctcacacaataaggt

SEQ ID NO: 598368 - DNA, 19 bp, Mus musculus
  siRNA target sequence for Polh (NM_030715.2,978-996).
cagatgccaatccgtaaaa

SEQ ID NO: 598369 - DNA, 19 bp, Mus musculus
  siRNA target sequence for Polh (NM_030715.2,989-1007).
ccgtaaaatccgaagtctt

SEQ ID NO: 598370 - DNA, 19 bp, Mus musculus
  siRNA target sequence for Polh (NM_030715.2,1088-1106).
gctccagagtcattttgga

SEQ ID NO: 598371 - DNA, 19 bp, Mus musculus
  siRNA target sequence for Polh (NM_030715.2,1132-1150).
ccatgtgtcgaggtattga

SEQ ID NO: 598372 - DNA, 19 bp, Mus musculus
  siRNA target sequence for Polh (NM_030715.2,1280-1298).
ggagaggctaaccaaagat

SEQ ID NO: 598373 - DNA, 19 bp, Mus musculus
  siRNA target sequence for Polh (NM_030715.2,1285-1303).
ggctaaccaaagatcgaaa

SEQ ID NO: 598374 - DNA, 19 bp, Mus musculus
  siRNA target sequence for Polh (NM_030715.2,1286-1304).
gctaaccaaagatcgaaat

SEQ ID NO: 598375 - DNA, 19 bp, Mus musculus
  siRNA target sequence for Polh (NM_030715.2,1291-1309).
ccaaagatcgaaatgataa

SEQ ID NO: 598376 - DNA, 19 bp, Mus musculus
  siRNA target sequence for Polh (NM_030715.2,1328-1346).
gctggtcgtcagtattcgt

SEQ ID NO: 598377 - DNA, 19 bp, Mus musculus
  siRNA target sequence for Polh (NM_030715.2,1329-1347).
ctggtcgtcagtattcgtt

SEQ ID NO: 598378 - DNA, 19 bp, Mus musculus
  siRNA target sequence for Polh (NM_030715.2,1331-1349).
ggtcgtcagtattcgtttt

SEQ ID NO: 598379 - DNA, 19 bp, Mus musculus
  siRNA target sequence for Polh (NM_030715.2,1477-1495).
ggtcccctcctctcacaat

SEQ ID NO: 598380 - DNA, 19 bp, Mus musculus
  siRNA target sequence for Polh (NM_030715.2,1536-1554).
ccagcttgcacggatatca

SEQ ID NO: 598381 - DNA, 19 bp, Mus musculus
  siRNA target sequence for Polh (NM_030715.2,1563-1581).
ctgagtagcgactcaagtt

SEQ ID NO: 598382 - DNA, 19 bp, Mus musculus
  siRNA target sequence for Polh (NM_030715.2,1565-1583).
gagtagcgactcaagttgt

SEQ ID NO: 598383 - DNA, 19 bp, Mus musculus
  siRNA target sequence for Polh (NM_030715.2,1639-1657).
ctgtaccaacctctaaaga

SEQ ID NO: 598384 - DNA, 19 bp, Mus musculus
  siRNA target sequence for Polh (NM_030715.2,1664-1682).
cacatctctagcgtctttt

SEQ ID NO: 598385 - DNA, 19 bp, Mus musculus
  siRNA target sequence for Polh (NM_030715.2,1739-1757).
cacagccacagagaagtta

SEQ ID NO: 598386 - DNA, 19 bp, Mus musculus
  siRNA target sequence for Polh (NM_030715.2,1762-1780).
ccaagccttcacttgtgtt

SEQ ID NO: 598387 - DNA, 19 bp, Mus musculus
  siRNA target sequence for Polh (NM_030715.2,1839-1857).
cagcacacacagcttagta

SEQ ID NO: 598388 - DNA, 19 bp, Mus musculus
  siRNA target sequence for Polh (NM_030715.2,1955-1973).
gaagccagtatcctctaaa

SEQ ID NO: 598389 - DNA, 19 bp, Mus musculus
  siRNA target sequence for Polh (NM_030715.2,1958-1976).
gccagtatcctctaaagca

SEQ ID NO: 598390 - DNA, 19 bp, Mus musculus
  siRNA target sequence for Polh (NM_030715.2,2124-2142).
gaacacacggactaccatt

SEQ ID NO: 598391 - DNA, 19 bp, Mus musculus
  siRNA target sequence for Polh (NM_030715.2,2129-2147).
cacggactaccattttgca

SEQ ID NO: 598392 - DNA, 19 bp, Mus musculus
  siRNA target sequence for Polh (NM_030715.2,2131-2149).
cggactaccattttgcatt

SEQ ID NO: 598393 - DNA, 19 bp, Mus musculus
  siRNA target sequence for Polh (NM_030715.2,2282-2300).
gcagacgctggaatcgttt

SEQ ID NO: 598394 - DNA, 19 bp, Mus musculus
  siRNA target sequence for Polh (NM_030715.2,2287-2305).
cgctggaatcgttttttaa

SEQ ID NO: 598395 - DNA, 19 bp, Mus musculus
  siRNA target sequence for Pold4 (NM_027196.1,160-178).
ggtcggaagcggttcatca

SEQ ID NO: 598396 - DNA, 19 bp, Mus musculus
  siRNA target sequence for Pold4 (NM_027196.1,334-352).
ccttgtacaggtatcacaa

SEQ ID NO: 598397 - DNA, 19 bp, Mus musculus
  siRNA target sequence for Pold4 (NM_027196.1,433-451).
gaagaccctcacttccaat

SEQ ID NO: 598398 - DNA, 19 bp, Mus musculus
  siRNA target sequence for Prim1 (NM_008921.1,62-80).
ccggagctactcaagcttt

SEQ ID NO: 598399 - DNA, 19 bp, Mus musculus
  siRNA target sequence for Prim1 (NM_008921.1,63-81).
cggagctactcaagcttta

SEQ ID NO: 598400 - DNA, 19 bp, Mus musculus
  siRNA target sequence for Prim1 (NM_008921.1,64-82).
ggagctactcaagctttat

SEQ ID NO: 598401 - DNA, 19 bp, Mus musculus
  siRNA target sequence for Prim1 (NM_008921.1,65-83).
gagctactcaagctttatt

SEQ ID NO: 598402 - DNA, 19 bp, Mus musculus
  siRNA target sequence for Prim1 (NM_008921.1,139-157).
gacaaagaattactttcaa

SEQ ID NO: 598403 - DNA, 19 bp, Mus musculus
  siRNA target sequence for Prim1 (NM_008921.1,160-178).
ccgtgaattttcattcaca

SEQ ID NO: 598404 - DNA, 19 bp, Mus musculus
  siRNA target sequence for Prim1 (NM_008921.1,171-189).
cattcacactgaaagatga

SEQ ID NO: 598405 - DNA, 19 bp, Mus musculus
  siRNA target sequence for Prim1 (NM_008921.1,200-218).
cgctaccagtccttcaaca

SEQ ID NO: 598406 - DNA, 19 bp, Mus musculus
  siRNA target sequence for Prim1 (NM_008921.1,201-219).
gctaccagtccttcaacaa

SEQ ID NO: 598407 - DNA, 19 bp, Mus musculus
  siRNA target sequence for Prim1 (NM_008921.1,253-271).
gaatccatataagattgat

SEQ ID NO: 598408 - DNA, 19 bp, Mus musculus
  siRNA target sequence for Prim1 (NM_008921.1,269-287).
gatataggcgcagtatatt

SEQ ID NO: 598409 - DNA, 19 bp, Mus musculus
  siRNA target sequence for Prim1 (NM_008921.1,288-306).
ctcacagacccaatcaaca

SEQ ID NO: 598410 - DNA, 19 bp, Mus musculus
  siRNA target sequence for Prim1 (NM_008921.1,292-310).
cagacccaatcaacacaat

SEQ ID NO: 598411 - DNA, 19 bp, Mus musculus
  siRNA target sequence for Prim1 (NM_008921.1,543-561).
gtgatgaatccgttcgaaa

SEQ ID NO: 598412 - DNA, 19 bp, Mus musculus
  siRNA target sequence for Prim1 (NM_008921.1,582-600).
ccgggatcgtggagtactt

SEQ ID NO: 598413 - DNA, 19 bp, Mus musculus
  siRNA target sequence for Prim1 (NM_008921.1,584-602).
gggatcgtggagtacttga

SEQ ID NO: 598414 - DNA, 19 bp, Mus musculus
  siRNA target sequence for Prim1 (NM_008921.1,593-611).
gagtacttgagtcttgtaa

SEQ ID NO: 598415 - DNA, 19 bp, Mus musculus
  siRNA target sequence for Prim1 (NM_008921.1,613-631).
gggtggtcaagatgttaaa

SEQ ID NO: 598416 - DNA, 19 bp, Mus musculus
  siRNA target sequence for Prim1 (NM_008921.1,614-632).
ggtggtcaagatgttaaaa

SEQ ID NO: 598417 - DNA, 19 bp, Mus musculus
  siRNA target sequence for Prim1 (NM_008921.1,659-677).
cacccttttgtcagaaaat

SEQ ID NO: 598418 - DNA, 19 bp, Mus musculus
  siRNA target sequence for Prim1 (NM_008921.1,668-686).
gtcagaaaatctataaaca

SEQ ID NO: 598419 - DNA, 19 bp, Mus musculus
  siRNA target sequence for Prim1 (NM_008921.1,713-731).
gccttagtcggccaagata

SEQ ID NO: 598420 - DNA, 19 bp, Mus musculus
  siRNA target sequence for Prim1 (NM_008921.1,714-732).
ccttagtcggccaagatat

SEQ ID NO: 598421 - DNA, 19 bp, Mus musculus
  siRNA target sequence for Prim1 (NM_008921.1,715-733).
cttagtcggccaagatatt

SEQ ID NO: 598422 - DNA, 19 bp, Mus musculus
  siRNA target sequence for Prim1 (NM_008921.1,721-739).
cggccaagatattcttgaa

SEQ ID NO: 598423 - DNA, 19 bp, Mus musculus
  siRNA target sequence for Prim1 (NM_008921.1,777-795).
ctgagacaattcatgatga

SEQ ID NO: 598424 - DNA, 19 bp, Mus musculus
  siRNA target sequence for Prim1 (NM_008921.1,859-877).
ggccaactcatctcagaat

SEQ ID NO: 598425 - DNA, 19 bp, Mus musculus
  siRNA target sequence for Prim1 (NM_008921.1,917-935).
gtcatgctccagtactgtt

SEQ ID NO: 598426 - DNA, 19 bp, Mus musculus
  siRNA target sequence for Prim1 (NM_008921.1,965-983).
ggagtcaatcacttactga

SEQ ID NO: 598427 - DNA, 19 bp, Mus musculus
  siRNA target sequence for Prim1 (NM_008921.1,1006-1024).
caagacaggtcggatttct

SEQ ID NO: 598428 - DNA, 19 bp, Mus musculus
  siRNA target sequence for Prim1 (NM_008921.1,1018-1036).
gatttctgtgcctatcgat

SEQ ID NO: 598429 - DNA, 19 bp, Mus musculus
  siRNA target sequence for Prim1 (NM_008921.1,1025-1043).
gtgcctatcgattttcata

SEQ ID NO: 598430 - DNA, 19 bp, Mus musculus
  siRNA target sequence for Prim1 (NM_008921.1,1029-1047).
ctatcgattttcataaagt

SEQ ID NO: 598431 - DNA, 19 bp, Mus musculus
  siRNA target sequence for Prim1 (NM_008921.1,1062-1080).
cgtttactgtcccaactat

SEQ ID NO: 598432 - DNA, 19 bp, Mus musculus
  siRNA target sequence for Prim1 (NM_008921.1,1092-1110).
gccgggaattggatatggt

SEQ ID NO: 598433 - DNA, 19 bp, Mus musculus
  siRNA target sequence for Prim1 (NM_008921.1,1093-1111).
ccgggaattggatatggtt

SEQ ID NO: 598434 - DNA, 19 bp, Mus musculus
  siRNA target sequence for Prim1 (NM_008921.1,1094-1112).
cgggaattggatatggttt

SEQ ID NO: 598435 - DNA, 19 bp, Mus musculus
  siRNA target sequence for Prim1 (NM_008921.1,1185-1203).
gtctagcaccgtatgtgaa

SEQ ID NO: 598436 - DNA, 19 bp, Mus musculus
  siRNA target sequence for Prim1 (NM_008921.1,1190-1208).
gcaccgtatgtgaaagtat

SEQ ID NO: 598437 - DNA, 19 bp, Mus musculus
  siRNA target sequence for Prim1 (NM_008921.1,1191-1209).
caccgtatgtgaaagtatt

SEQ ID NO: 598438 - DNA, 19 bp, Mus musculus
  siRNA target sequence for Prim1 (NM_008921.1,1194-1212).
cgtatgtgaaagtatttga

SEQ ID NO: 598439 - DNA, 19 bp, Mus musculus
  siRNA target sequence for Prim1 (NM_008921.1,1258-1276).
caagaagagcgatttacaa

SEQ ID NO: 598440 - DNA, 19 bp, Mus musculus
  siRNA target sequence for 2610028L19Rik (NM_027002.1,184-202).
ctgtcggaggtcttcatga

SEQ ID NO: 598441 - DNA, 19 bp, Mus musculus
  siRNA target sequence for 2610028L19Rik (NM_027002.1,222-240).
ccgcttcagccggttcaaa

SEQ ID NO: 598442 - DNA, 19 bp, Mus musculus
  siRNA target sequence for 2610028L19Rik (NM_027002.1,223-241).
cgcttcagccggttcaaaa

SEQ ID NO: 598443 - DNA, 19 bp, Mus musculus
  siRNA target sequence for 2610028L19Rik (NM_027002.1,224-242).
gcttcagccggttcaaaaa

SEQ ID NO: 598444 - DNA, 19 bp, Mus musculus
  siRNA target sequence for 2610028L19Rik (NM_027002.1,228-246).
cagccggttcaaaaacaga

SEQ ID NO: 598445 - DNA, 19 bp, Mus musculus
  siRNA target sequence for 2610028L19Rik (NM_027002.1,273-291).
gcttctccagaaaaagtta

SEQ ID NO: 598446 - DNA, 19 bp, Mus musculus
  siRNA target sequence for 2610028L19Rik (NM_027002.1,277-295).
ctccagaaaaagttacata

SEQ ID NO: 598447 - DNA, 19 bp, Mus musculus
  siRNA target sequence for 2610028L19Rik (NM_027002.1,365-383).
gcctggaagggcgttttga

SEQ ID NO: 598448 - DNA, 19 bp, Mus musculus
  siRNA target sequence for 2610028L19Rik (NM_027002.1,366-384).
cctggaagggcgttttgaa

SEQ ID NO: 598449 - DNA, 19 bp, Mus musculus
  siRNA target sequence for 3010019O03Rik (NM_027417.1,129-147).
cggatccggtggagataga

SEQ ID NO: 598450 - DNA, 19 bp, Mus musculus
  siRNA target sequence for 3010019O03Rik (NM_027417.1,130-148).
ggatccggtggagatagaa

SEQ ID NO: 598451 - DNA, 19 bp, Mus musculus
  siRNA target sequence for 3010019O03Rik (NM_027417.1,142-160).
gatagaaaacagaattata

SEQ ID NO: 598452 - DNA, 19 bp, Mus musculus
  siRNA target sequence for 3010019O03Rik (NM_027417.1,175-193).
gttccctcatggaatcaca

SEQ ID NO: 598453 - DNA, 19 bp, Mus musculus
  siRNA target sequence for 3010019O03Rik (NM_027417.1,192-210).
cagatcaagtaattcagaa

SEQ ID NO: 598454 - DNA, 19 bp, Mus musculus
  siRNA target sequence for 3010019O03Rik (NM_027417.1,208-226).
gaacgaaatgcctcacatt

SEQ ID NO: 598455 - DNA, 19 bp, Mus musculus
  siRNA target sequence for 3010019O03Rik (NM_027417.1,211-229).
cgaaatgcctcacattgaa

SEQ ID NO: 598456 - DNA, 19 bp, Mus musculus
  siRNA target sequence for 3010019O03Rik (NM_027417.1,238-256).
gcgggcagtggccatcaat

SEQ ID NO: 598457 - DNA, 19 bp, Mus musculus
  siRNA target sequence for 3010019O03Rik (NM_027417.1,241-259).
ggcagtggccatcaataga

SEQ ID NO: 598458 - DNA, 19 bp, Mus musculus
  siRNA target sequence for 3010019O03Rik (NM_027417.1,271-289).
gggtcagttggatctttta

SEQ ID NO: 598459 - DNA, 19 bp, Mus musculus
  siRNA target sequence for 3010019O03Rik (NM_027417.1,272-290).
ggtcagttggatcttttaa

SEQ ID NO: 598460 - DNA, 19 bp, Mus musculus
  siRNA target sequence for 3010019O03Rik (NM_027417.1,298-316).
cacaggcctcttatataga

SEQ ID NO: 598461 - DNA, 19 bp, Mus musculus
  siRNA target sequence for 3010019O03Rik (NM_027417.1,302-320).
ggcctcttatatagaataa

SEQ ID NO: 598462 - DNA, 19 bp, Mus musculus
  siRNA target sequence for 3010019O03Rik (NM_027417.1,307-325).
cttatatagaataaaggat

SEQ ID NO: 598463 - DNA, 19 bp, Mus musculus
  siRNA target sequence for 3010019O03Rik (NM_027417.1,351-369).
ggtccgataaccaggaaaa

SEQ ID NO: 598464 - DNA, 19 bp, Mus musculus
  siRNA target sequence for 3010019O03Rik (NM_027417.1,352-370).
gtccgataaccaggaaaaa

SEQ ID NO: 598465 - DNA, 19 bp, Mus musculus
  siRNA target sequence for 3010019O03Rik (NM_027417.1,364-382).
ggaaaaactggtctatcaa

SEQ ID NO: 598466 - DNA, 19 bp, Mus musculus
  siRNA target sequence for 3010019O03Rik (NM_027417.1,365-383).
gaaaaactggtctatcaaa

SEQ ID NO: 598467 - DNA, 19 bp, Mus musculus
  siRNA target sequence for 3010019O03Rik (NM_027417.1,415-433).
ccctctagatggtgataca

SEQ ID NO: 598468 - DNA, 19 bp, Mus musculus
  siRNA target sequence for 3010019O03Rik (NM_027417.1,416-434).
cctctagatggtgatacat

SEQ ID NO: 598469 - DNA, 19 bp, Mus musculus
  siRNA target sequence for 3010019O03Rik (NM_027417.1,422-440).
gatggtgatacatcacttt

SEQ ID NO: 598470 - DNA, 19 bp, Mus musculus
  siRNA target sequence for 3010019O03Rik (NM_027417.1,428-446).
gatacatcactttatccta

SEQ ID NO: 598471 - DNA, 19 bp, Mus musculus
  siRNA target sequence for 3010019O03Rik (NM_029763.2,439-457).
gatattcggtacaaaagta

SEQ ID NO: 598472 - DNA, 19 bp, Mus musculus
  siRNA target sequence for 3010019O03Rik (NM_029763.2,463-481).
ccgttaacagaaatcaaca

SEQ ID NO: 598473 - DNA, 19 bp, Mus musculus
  siRNA target sequence for 3010019O03Rik (NM_029763.2,465-483).
gttaacagaaatcaacaaa

SEQ ID NO: 598474 - DNA, 19 bp, Mus musculus
  siRNA target sequence for 3010019O03Rik (NM_029763.2,472-490).
gaaatcaacaaaattctca

SEQ ID NO: 598475 - DNA, 19 bp, Mus musculus
  siRNA target sequence for 3010019O03Rik (NM_029763.2,539-557).
cttccaaaaagaaggttta

SEQ ID NO: 598476 - DNA, 19 bp, Mus musculus
  siRNA target sequence for 3010019O03Rik (NM_029763.2,646-664).
cttaatcaacagtgtttca

SEQ ID NO: 598477 - DNA, 19 bp, Mus musculus
  siRNA target sequence for 3010019O03Rik (NM_029763.2,779-797).
gcatcagcaaggtagagtt

SEQ ID NO: 598478 - DNA, 19 bp, Mus musculus
  siRNA target sequence for 3010019O03Rik (NM_029763.2,822-840).
cttgaacacactcatttat

SEQ ID NO: 598479 - DNA, 19 bp, Mus musculus
  siRNA target sequence for 3010019O03Rik (NM_029763.2,893-911).
gcgtagatggacacatgaa

SEQ ID NO: 598480 - DNA, 19 bp, Mus musculus
  siRNA target sequence for 3010019O03Rik (NM_029763.2,894-912).
cgtagatggacacatgaaa

SEQ ID NO: 598481 - DNA, 19 bp, Mus musculus
  siRNA target sequence for 3010019O03Rik (NM_029763.2,898-916).
gatggacacatgaaactgt

SEQ ID NO: 598482 - DNA, 19 bp, Mus musculus
  siRNA target sequence for 3010019O03Rik (NM_029763.2,971-989).
gactctgccccgtttttga

SEQ ID NO: 598483 - DNA, 19 bp, Mus musculus
  siRNA target sequence for 3010019O03Rik (NM_029763.2,1009-1027).
gagatttcgccgtctaatt

SEQ ID NO: 598484 - DNA, 19 bp, Mus musculus
  siRNA target sequence for 3010019O03Rik (NM_029763.2,1011-1029).
gatttcgccgtctaattgt

SEQ ID NO: 598485 - DNA, 19 bp, Mus musculus
  siRNA target sequence for 3010019O03Rik (NM_029763.2,1016-1034).
cgccgtctaattgtattta

SEQ ID NO: 598486 - DNA, 19 bp, Mus musculus
  siRNA target sequence for 3010019O03Rik (NM_029763.2,1018-1036).
ccgtctaattgtatttaca

SEQ ID NO: 598487 - DNA, 19 bp, Mus musculus
  siRNA target sequence for 3010019O03Rik (NM_029763.2,1019-1037).
cgtctaattgtatttacat

SEQ ID NO: 598488 - DNA, 19 bp, Mus musculus
  siRNA target sequence for Polr3d (NM_025945.2,266-284).
cccttggcggagtcaagaa

SEQ ID NO: 598489 - DNA, 19 bp, Mus musculus
  siRNA target sequence for Polr3d (NM_025945.2,268-286).
cttggcggagtcaagaaga

SEQ ID NO: 598490 - DNA, 19 bp, Mus musculus
  siRNA target sequence for Polr3d (NM_025945.2,306-324).
catcagtcggaagatcaaa

SEQ ID NO: 598491 - DNA, 19 bp, Mus musculus
  siRNA target sequence for Polr3d (NM_025945.2,424-442).
gtgatccagtcccattcta

SEQ ID NO: 598492 - DNA, 19 bp, Mus musculus
  siRNA target sequence for Polr3d (NM_025945.2,455-473).
gtccggcagaaatgatgaa

SEQ ID NO: 598493 - DNA, 19 bp, Mus musculus
  siRNA target sequence for Polr3d (NM_025945.2,457-475).
ccggcagaaatgatgaaaa

SEQ ID NO: 598494 - DNA, 19 bp, Mus musculus
  siRNA target sequence for Polr3d (NM_025945.2,510-528).
cgacatgggaccttctcat

SEQ ID NO: 598495 - DNA, 19 bp, Mus musculus
  siRNA target sequence for Polr3d (NM_025945.2,520-538).
ccttctcatatcatcaaca

SEQ ID NO: 598496 - DNA, 19 bp, Mus musculus
  siRNA target sequence for Polr3d (NM_025945.2,521-539).
cttctcatatcatcaacat

SEQ ID NO: 598497 - DNA, 19 bp, Mus musculus
  siRNA target sequence for Polr3d (NM_025945.2,670-688).
cattcagggtggcttttta

SEQ ID NO: 598498 - DNA, 19 bp, Mus musculus
  siRNA target sequence for Polr3d (NM_025945.2,674-692).
cagggtggctttttaagga

SEQ ID NO: 598499 - DNA, 19 bp, Mus musculus
  siRNA target sequence for Polr3d (NM_025945.2,730-748).
ggccccaaggaagaagata

SEQ ID NO: 598500 - DNA, 19 bp, Mus musculus
  siRNA target sequence for Polr3d (NM_025945.2,956-974).
cacccactcaggacatcaa

SEQ ID NO: 598501 - DNA, 19 bp, Mus musculus
  siRNA target sequence for Polr3d (NM_025945.2,1143-1161).
gggcaaggtgactctagat

SEQ ID NO: 598502 - DNA, 19 bp, Mus musculus
  siRNA target sequence for Polr3d (NM_025945.2,1145-1163).
gcaaggtgactctagatgt

SEQ ID NO: 598503 - DNA, 19 bp, Mus musculus
  siRNA target sequence for Polr3d (NM_025945.2,1250-1268).
gacatgtgaagcacaaact

SEQ ID NO: 598504 - DNA, 19 bp, Mus musculus
  siRNA target sequence for Polr3d (NM_025945.2,1260-1278).
gcacaaacttgtatgttct

SEQ ID NO: 598505 - DNA, 19 bp, Mus musculus
  siRNA target sequence for Sin (NM_025298.2,191-209).
gatgtgtacttggctaaaa

SEQ ID NO: 598506 - DNA, 19 bp, Mus musculus
  siRNA target sequence for Sin (NM_025298.2,258-276).
caatgacctatgatgacat

SEQ ID NO: 598507 - DNA, 19 bp, Mus musculus
  siRNA target sequence for Sin (NM_025298.2,410-428).
gacgagactagcacatatt

SEQ ID NO: 598508 - DNA, 19 bp, Mus musculus
  siRNA target sequence for Sin (NM_025298.2,413-431).
gagactagcacatattcct

SEQ ID NO: 598509 - DNA, 19 bp, Mus musculus
  siRNA target sequence for Sin (NM_025298.2,648-666).
cagaagaagacgttaagca

SEQ ID NO: 598510 - DNA, 19 bp, Mus musculus
  siRNA target sequence for Sin (NM_025298.2,716-734).
cgcgtgcagtcctatgagt

SEQ ID NO: 598511 - DNA, 19 bp, Mus musculus
  siRNA target sequence for Sin (NM_025298.2,717-735).
gcgtgcagtcctatgagtt

SEQ ID NO: 598512 - DNA, 19 bp, Mus musculus
  siRNA target sequence for Sin (NM_025298.2,765-783).
gggtccacctgcactacta

SEQ ID NO: 598513 - DNA, 19 bp, Mus musculus
  siRNA target sequence for Sin (NM_025298.2,1104-1122).
cgatgttagtccaaggaaa

SEQ ID NO: 598514 - DNA, 19 bp, Mus musculus
  siRNA target sequence for Sin (NM_025298.2,1239-1257).
gccgatgggtggtaagaaa

SEQ ID NO: 598515 - DNA, 19 bp, Mus musculus
  siRNA target sequence for Sin (NM_025298.2,1364-1382).
gacctggagtttatcaaga

SEQ ID NO: 598516 - DNA, 19 bp, Mus musculus
  siRNA target sequence for Sin (NM_025298.2,1422-1440).
cgggcatccaggccaaatt

SEQ ID NO: 598517 - DNA, 19 bp, Mus musculus
  siRNA target sequence for Sin (NM_025298.2,1423-1441).
gggcatccaggccaaatta

SEQ ID NO: 598518 - DNA, 19 bp, Mus musculus
  siRNA target sequence for Sin (NM_025298.2,1425-1443).
gcatccaggccaaattaga

SEQ ID NO: 598519 - DNA, 19 bp, Mus musculus
  siRNA target sequence for Sin (NM_025298.2,1429-1447).
ccaggccaaattagaaaaa

SEQ ID NO: 598520 - DNA, 19 bp, Mus musculus
  siRNA target sequence for Sin (NM_025298.2,1450-1468).
ctataatctcgtaaaagaa

SEQ ID NO: 598521 - DNA, 19 bp, Mus musculus
  siRNA target sequence for Sin (NM_025298.2,1480-1498).
gaagccggatggacaatca

SEQ ID NO: 598522 - DNA, 19 bp, Mus musculus
  siRNA target sequence for Sin (NM_025298.2,1532-1550).
gtccaaacagccaaaacca

SEQ ID NO: 598523 - DNA, 19 bp, Mus musculus
  siRNA target sequence for Sin (NM_025298.2,1777-1795).
gggtggggacagcctaaat

SEQ ID NO: 598524 - DNA, 19 bp, Mus musculus
  siRNA target sequence for Sin (NM_025298.2,1827-1845).
cggttgcctgtgaactgaa

SEQ ID NO: 598525 - DNA, 19 bp, Mus musculus
  siRNA target sequence for Sin (NM_025298.2,1960-1978).
cgtctcagaccgaatgcta

SEQ ID NO: 598526 - DNA, 19 bp, Mus musculus
  siRNA target sequence for Sin (NM_025298.2,1998-2016).
ctggctgcaagcagatact

SEQ ID NO: 598527 - DNA, 19 bp, Mus musculus
  siRNA target sequence for Sin (NM_025298.2,2101-2119).
gcatcggcaggttttgctt

SEQ ID NO: 598528 - DNA, 19 bp, Mus musculus
  siRNA target sequence for Sin (NM_025298.2,2105-2123).
cggcaggttttgcttgaaa

SEQ ID NO: 598529 - DNA, 19 bp, Mus musculus
  siRNA target sequence for Sin (NM_025298.2,2106-2124).
ggcaggttttgcttgaaat

SEQ ID NO: 598530 - DNA, 19 bp, Mus musculus
  siRNA target sequence for Sin (NM_025298.2,2107-2125).
gcaggttttgcttgaaata

SEQ ID NO: 598531 - DNA, 19 bp, Mus musculus
  siRNA target sequence for Sin (NM_025298.2,2141-2159).
cgagtacgtcggaacttga

SEQ ID NO: 598532 - DNA, 19 bp, Mus musculus
  siRNA target sequence for Sin (NM_025298.2,2142-2160).
gagtacgtcggaacttgat

SEQ ID NO: 598533 - DNA, 19 bp, Mus musculus
  siRNA target sequence for Sin (NM_025298.2,2164-2182).
gtctcggctgactcaagaa

SEQ ID NO: 598534 - DNA, 19 bp, Mus musculus
  siRNA target sequence for Sin (NM_025298.2,2221-2239).
gctaaaggactgttgtgta

SEQ ID NO: 598535 - DNA, 19 bp, Mus musculus
  siRNA target sequence for Sin (NM_025298.2,2246-2264).
ggtggcatgtggtacctta

SEQ ID NO: 598536 - DNA, 19 bp, Mus musculus
  siRNA target sequence for Sin (NM_025298.2,2247-2265).
gtggcatgtggtaccttaa

SEQ ID NO: 598537 - DNA, 19 bp, Mus musculus
  siRNA target sequence for Sin (NM_025298.2,2261-2279).
cttaaggggacagtacaat

SEQ ID NO: 598538 - DNA, 19 bp, Mus musculus
  siRNA target sequence for Usp49 (NM_020048.2,147-165).
ggagctcctcaccaagaaa

SEQ ID NO: 598539 - DNA, 19 bp, Mus musculus
  siRNA target sequence for Usp49 (NM_020048.2,186-204).
gaaacaagggacattttgt

SEQ ID NO: 598540 - DNA, 19 bp, Mus musculus
  siRNA target sequence for Usp49 (NM_020048.2,268-286).
ctgatgtacgtgatgcata

SEQ ID NO: 598541 - DNA, 19 bp, Mus musculus
  siRNA target sequence for Usp49 (NM_020048.2,424-442).
ggcactcgctaccagtatt

SEQ ID NO: 598542 - DNA, 19 bp, Mus musculus
  siRNA target sequence for Usp49 (NM_020048.2,426-444).
cactcgctaccagtattgt

SEQ ID NO: 598543 - DNA, 19 bp, Mus musculus
  siRNA target sequence for Usp49 (NM_020048.2,428-446).
ctcgctaccagtattgtga

SEQ ID NO: 598544 - DNA, 19 bp, Mus musculus
  siRNA target sequence for Usp49 (NM_020048.2,593-611).
caggggcacccacagtatt

SEQ ID NO: 598545 - DNA, 19 bp, Mus musculus
  siRNA target sequence for Usp49 (NM_020048.2,639-657).
gccagcagataccatgata

SEQ ID NO: 598546 - DNA, 19 bp, Mus musculus
  siRNA target sequence for Usp49 (NM_020048.2,643-661).
gcagataccatgatacagt

SEQ ID NO: 598547 - DNA, 19 bp, Mus musculus
  siRNA target sequence for Cds1 (NM_173370.3,651-669).
ctacgacctcccatggttt

SEQ ID NO: 598548 - DNA, 19 bp, Mus musculus
  siRNA target sequence for Cds1 (NM_173370.3,655-673).
gacctcccatggtttagga

SEQ ID NO: 598549 - DNA, 19 bp, Mus musculus
  siRNA target sequence for Cds1 (NM_173370.3,719-737).
gagagacggtggcagatta

SEQ ID NO: 598550 - DNA, 19 bp, Mus musculus
  siRNA target sequence for Cds1 (NM_173370.3,721-739).
gagacggtggcagattact

SEQ ID NO: 598551 - DNA, 19 bp, Mus musculus
  siRNA target sequence for Cds1 (NM_173370.3,887-905).
catggacgcacgtcacttt

SEQ ID NO: 598552 - DNA, 19 bp, Mus musculus
  siRNA target sequence for Cds1 (NM_173370.3,890-908).
ggacgcacgtcactttact

SEQ ID NO: 598553 - DNA, 19 bp, Mus musculus
  siRNA target sequence for Cds1 (NM_173370.3,894-912).
gcacgtcactttactgata

SEQ ID NO: 598554 - DNA, 19 bp, Mus musculus
  siRNA target sequence for Cds1 (NM_173370.3,895-913).
cacgtcactttactgataa

SEQ ID NO: 598555 - DNA, 19 bp, Mus musculus
  siRNA target sequence for Cds1 (NM_173370.3,920-938).
ctcagtcacatcttgtcat

SEQ ID NO: 598556 - DNA, 19 bp, Mus musculus
  siRNA target sequence for Cds1 (NM_173370.3,936-954).
catccaaaatctgtttgaa

SEQ ID NO: 598557 - DNA, 19 bp, Mus musculus
  siRNA target sequence for Cds1 (NM_173370.3,966-984).
gttccttgttcccatatca

SEQ ID NO: 598558 - DNA, 19 bp, Mus musculus
  siRNA target sequence for Cds1 (NM_173370.3,996-1014).
caatgacatcacagcttat

SEQ ID NO: 598559 - DNA, 19 bp, Mus musculus
  siRNA target sequence for Cds1 (NM_173370.3,1005-1023).
cacagcttatctttttgga

SEQ ID NO: 598560 - DNA, 19 bp, Mus musculus
  siRNA target sequence for Cds1 (NM_173370.3,1007-1025).
cagcttatctttttggatt

SEQ ID NO: 598561 - DNA, 19 bp, Mus musculus
  siRNA target sequence for Cds1 (NM_173370.3,1037-1055).
gaactcctctaattaagct

SEQ ID NO: 598562 - DNA, 19 bp, Mus musculus
  siRNA target sequence for Cds1 (NM_173370.3,1079-1097).
gattcattggtggtttctt

SEQ ID NO: 598563 - DNA, 19 bp, Mus musculus
  siRNA target sequence for Cds1 (NM_173370.3,1095-1113).
cttctccacagtcatattt

SEQ ID NO: 598564 - DNA, 19 bp, Mus musculus
  siRNA target sequence for Cds1 (NM_173370.3,1100-1118).
ccacagtcatatttggatt

SEQ ID NO: 598565 - DNA, 19 bp, Mus musculus
  siRNA target sequence for Cds1 (NM_173370.3,1205-1223).
gtgagccctcagaactgtt

SEQ ID NO: 598566 - DNA, 19 bp, Mus musculus
  siRNA target sequence for Cds1 (NM_173370.3,1381-1399).
gctttcaaaatcaaggatt

SEQ ID NO: 598567 - DNA, 19 bp, Mus musculus
  siRNA target sequence for Cds1 (NM_173370.3,1415-1433).
ctggacatggcgggataat

SEQ ID NO: 598568 - DNA, 19 bp, Mus musculus
  siRNA target sequence for Cds1 (NM_173370.3,1439-1457).
ggtttgactgtcagtattt

SEQ ID NO: 598569 - DNA, 19 bp, Mus musculus
  siRNA target sequence for Cds1 (NM_173370.3,1466-1484).
cgttcgtgcacgtgtacat

SEQ ID NO: 598570 - DNA, 19 bp, Mus musculus
  siRNA target sequence for Cds1 (NM_173370.3,1566-1584).
ctacagaaccctgaagatt

SEQ ID NO: 598571 - DNA, 19 bp, Mus musculus
  siRNA target sequence for Cds2 (NM_138651.2,376-394).
gccatgatcgcgtttttct

SEQ ID NO: 598572 - DNA, 19 bp, Mus musculus
  siRNA target sequence for Cds2 (NM_138651.2,377-395).
ccatgatcgcgtttttctt

SEQ ID NO: 598573 - DNA, 19 bp, Mus musculus
  siRNA target sequence for Cds2 (NM_138651.2,436-454).
gttatgtgtgtccagatta

SEQ ID NO: 598574 - DNA, 19 bp, Mus musculus
  siRNA target sequence for Cds2 (NM_138651.2,443-461).
gtgtccagattaagtgttt

SEQ ID NO: 598575 - DNA, 19 bp, Mus musculus
  siRNA target sequence for Cds2 (NM_138651.2,462-480).
ccatgaaataatcactatt

SEQ ID NO: 598576 - DNA, 19 bp, Mus musculus
  siRNA target sequence for Cds2 (NM_138651.2,577-595).
gtgacggactacttcttca

SEQ ID NO: 598577 - DNA, 19 bp, Mus musculus
  siRNA target sequence for Cds2 (NM_138651.2,617-635).
ctttgcggatcctcagtaa

SEQ ID NO: 598578 - DNA, 19 bp, Mus musculus
  siRNA target sequence for Cds2 (NM_138651.2,684-702).
gtttgtactgagtctagtt

SEQ ID NO: 598579 - DNA, 19 bp, Mus musculus
  siRNA target sequence for Cds2 (NM_138651.2,715-733).
cggctgcagttctacatgt

SEQ ID NO: 598580 - DNA, 19 bp, Mus musculus
  siRNA target sequence for Cds2 (NM_138651.2,850-868).
gacattatggcctatatgt

SEQ ID NO: 598581 - DNA, 19 bp, Mus musculus
  siRNA target sequence for Cds2 (NM_138651.2,883-901).
ggtcggaccccactcatta

SEQ ID NO: 598582 - DNA, 19 bp, Mus musculus
  siRNA target sequence for Cds2 (NM_138651.2,967-985).
cttttgctctcctatgtga

SEQ ID NO: 598583 - DNA, 19 bp, Mus musculus
  siRNA target sequence for Cds2 (NM_138651.2,1013-1031).
ccgtggaatacaacaatga

SEQ ID NO: 598584 - DNA, 19 bp, Mus musculus
  siRNA target sequence for Cds2 (NM_138651.2,1055-1073).
gtgagccgtctgacctatt

SEQ ID NO: 598585 - DNA, 19 bp, Mus musculus
  siRNA target sequence for Cds2 (NM_138651.2,1220-1238).
gattcaaacgggcctttaa

SEQ ID NO: 598586 - DNA, 19 bp, Mus musculus
  siRNA target sequence for Cds2 (NM_138651.2,1230-1248).
ggcctttaaaatcaaagat

SEQ ID NO: 598587 - DNA, 19 bp, Mus musculus
  siRNA target sequence for Cds2 (NM_138651.2,1308-1326).
gatggccacctttgtcaat

SEQ ID NO: 598588 - DNA, 19 bp, Mus musculus
  siRNA target sequence for Cds2 (NM_138651.2,1312-1330).
gccacctttgtcaatgtgt

SEQ ID NO: 598589 - DNA, 19 bp, Mus musculus
  siRNA target sequence for Pcyt2 (NM_024229.2,118-136).
gcgatggctgctatgacat

SEQ ID NO: 598590 - DNA, 19 bp, Mus musculus
  siRNA target sequence for Pcyt2 (NM_024229.2,216-234).
gaggagattgccaagcata

SEQ ID NO: 598591 - DNA, 19 bp, Mus musculus
  siRNA target sequence for Pcyt2 (NM_024229.2,367-385).
gtgttcacggcaatgacat

SEQ ID NO: 598592 - DNA, 19 bp, Mus musculus
  siRNA target sequence for Pcyt2 (NM_024229.2,550-568).
gggaatatgctgacagttt

SEQ ID NO: 598593 - DNA, 19 bp, Mus musculus
  siRNA target sequence for Pcyt2 (NM_024229.2,658-676).
gggtgtcccagtttctaca

SEQ ID NO: 598594 - DNA, 19 bp, Mus musculus
  siRNA target sequence for Pcyt2 (NM_024229.2,917-935).
gctggcctgccggtatgtt

SEQ ID NO: 598595 - DNA, 19 bp, Mus musculus
  siRNA target sequence for Pcyt2 (NM_024229.2,918-936).
ctggcctgccggtatgttt

SEQ ID NO: 598596 - DNA, 19 bp, Mus musculus
  siRNA target sequence for Pcyt2 (NM_024229.2,920-938).
ggcctgccggtatgtttca

SEQ ID NO: 598597 - DNA, 19 bp, Mus musculus
  siRNA target sequence for Pcyt2 (NM_024229.2,923-941).
ctgccggtatgtttcagaa

SEQ ID NO: 598598 - DNA, 19 bp, Mus musculus
  siRNA target sequence for Pcyt2 (NM_024229.2,972-990).
gcggagctcctgaatcact

SEQ ID NO: 598599 - DNA, 19 bp, Mus musculus
  siRNA target sequence for Pcyt2 (NM_024229.2,973-991).
cggagctcctgaatcactt

SEQ ID NO: 598600 - DNA, 19 bp, Mus musculus
  siRNA target sequence for Pcyt2 (NM_024229.2,1013-1031).
cgggaagacagagattgta

SEQ ID NO: 598601 - DNA, 19 bp, Mus musculus
  siRNA target sequence for Pcyt2 (NM_024229.2,1072-1090).
gaagaggcatcttctatca

SEQ ID NO: 598602 - DNA, 19 bp, Mus musculus
  siRNA target sequence for Pcyt2 (NM_024229.2,1231-1249).
cgcctggaggggagattga

SEQ ID NO: 598603 - DNA, 19 bp, Mus musculus
  siRNA target sequence for Pcyt2 (NM_024229.2,1233-1251).
cctggaggggagattgact

SEQ ID NO: 598604 - DNA, 19 bp, Mus musculus
  siRNA target sequence for Pcyt1a (NM_009981.2,54-72).
cacagagttcagctaaagt

SEQ ID NO: 598605 - DNA, 19 bp, Mus musculus
  siRNA target sequence for Pcyt1a (NM_009981.2,56-74).
cagagttcagctaaagtca

SEQ ID NO: 598606 - DNA, 19 bp, Mus musculus
  siRNA target sequence for Pcyt1a (NM_009981.2,58-76).
gagttcagctaaagtcaat

SEQ ID NO: 598607 - DNA, 19 bp, Mus musculus
  siRNA target sequence for Pcyt1a (NM_009981.2,170-188).
cggcagccagctccttttt

SEQ ID NO: 598608 - DNA, 19 bp, Mus musculus
  siRNA target sequence for Pcyt1a (NM_009981.2,175-193).
gccagctcctttttctgat

SEQ ID NO: 598609 - DNA, 19 bp, Mus musculus
  siRNA target sequence for Pcyt1a (NM_009981.2,219-237).
cctatgtcagggtgactat

SEQ ID NO: 598610 - DNA, 19 bp, Mus musculus
  siRNA target sequence for Pcyt1a (NM_009981.2,266-284).
gagcggcctgtgagagttt

SEQ ID NO: 598611 - DNA, 19 bp, Mus musculus
  siRNA target sequence for Pcyt1a (NM_009981.2,268-286).
gcggcctgtgagagtttat

SEQ ID NO: 598612 - DNA, 19 bp, Mus musculus
  siRNA target sequence for Pcyt1a (NM_009981.2,349-367).
ccttttccctaatacgtat

SEQ ID NO: 598613 - DNA, 19 bp, Mus musculus
  siRNA target sequence for Pcyt1a (NM_009981.2,355-373).
ccctaatacgtatctaatt

SEQ ID NO: 598614 - DNA, 19 bp, Mus musculus
  siRNA target sequence for Pcyt1a (NM_009981.2,357-375).
ctaatacgtatctaattgt

SEQ ID NO: 598615 - DNA, 19 bp, Mus musculus
  siRNA target sequence for Pcyt1a (NM_009981.2,392-410).
gagctaacgcacaacttca

SEQ ID NO: 598616 - DNA, 19 bp, Mus musculus
  siRNA target sequence for Pcyt1a (NM_009981.2,520-538).
ggcagagcaccggattgat

SEQ ID NO: 598617 - DNA, 19 bp, Mus musculus
  siRNA target sequence for Pcyt1a (NM_009981.2,551-569).
gacgacatcccctattctt

SEQ ID NO: 598618 - DNA, 19 bp, Mus musculus
  siRNA target sequence for Pcyt1a (NM_009981.2,553-571).
cgacatcccctattcttct

SEQ ID NO: 598619 - DNA, 19 bp, Mus musculus
  siRNA target sequence for Pcyt1a (NM_009981.2,573-591).
cagggagcgatgatgtgta

SEQ ID NO: 598620 - DNA, 19 bp, Mus musculus
  siRNA target sequence for Pcyt1a (NM_009981.2,575-593).
gggagcgatgatgtgtata

SEQ ID NO: 598621 - DNA, 19 bp, Mus musculus
  siRNA target sequence for Pcyt1a (NM_009981.2,579-597).
gcgatgatgtgtataagca

SEQ ID NO: 598622 - DNA, 19 bp, Mus musculus
  siRNA target sequence for Pcyt1a (NM_009981.2,680-698).
gactatgatgtgtatgcaa

SEQ ID NO: 598623 - DNA, 19 bp, Mus musculus
  siRNA target sequence for Pcyt1a (NM_009981.2,776-794).
gaacgagttgataaagtaa

SEQ ID NO: 598624 - DNA, 19 bp, Mus musculus
  siRNA target sequence for Pcyt1a (NM_009981.2,779-797).
cgagttgataaagtaaaga

SEQ ID NO: 598625 - DNA, 19 bp, Mus musculus
  siRNA target sequence for Pcyt1a (NM_009981.2,780-798).
gagttgataaagtaaagaa

SEQ ID NO: 598626 - DNA, 19 bp, Mus musculus
  siRNA target sequence for Pcyt1a (NM_009981.2,886-904).
gaagtcccgagagttcatt

SEQ ID NO: 598627 - DNA, 19 bp, Mus musculus
  siRNA target sequence for Cmas (NM_009908.1,273-291).
ccatgatgaaattgagaat

SEQ ID NO: 598628 - DNA, 19 bp, Mus musculus
  siRNA target sequence for Cmas (NM_009908.1,315-333).
ggtccatcgaagaagttct

SEQ ID NO: 598629 - DNA, 19 bp, Mus musculus
  siRNA target sequence for Cmas (NM_009908.1,319-337).
catcgaagaagttctgaaa

SEQ ID NO: 598630 - DNA, 19 bp, Mus musculus
  siRNA target sequence for Cmas (NM_009908.1,357-375).
ctcactagacgccattgta

SEQ ID NO: 598631 - DNA, 19 bp, Mus musculus
  siRNA target sequence for Cmas (NM_009908.1,359-377).
cactagacgccattgtaga

SEQ ID NO: 598632 - DNA, 19 bp, Mus musculus
  siRNA target sequence for Cmas (NM_009908.1,361-379).
ctagacgccattgtagaat

SEQ ID NO: 598633 - DNA, 19 bp, Mus musculus
  siRNA target sequence for Cmas (NM_009908.1,376-394).
gaattcctgaattatcaca

SEQ ID NO: 598634 - DNA, 19 bp, Mus musculus
  siRNA target sequence for Cmas (NM_009908.1,474-492).
gatccgagaagaaggatat

SEQ ID NO: 598635 - DNA, 19 bp, Mus musculus
  siRNA target sequence for Cmas (NM_009908.1,478-496).
cgagaagaaggatatgact

SEQ ID NO: 598636 - DNA, 19 bp, Mus musculus
  siRNA target sequence for Cmas (NM_009908.1,525-543).
gtttcgatggagtgaaatt

SEQ ID NO: 598637 - DNA, 19 bp, Mus musculus
  siRNA target sequence for Cmas (NM_009908.1,529-547).
cgatggagtgaaattcaga

SEQ ID NO: 598638 - DNA, 19 bp, Mus musculus
  siRNA target sequence for Cmas (NM_009908.1,614-632).
gggatggagagttatatga

SEQ ID NO: 598639 - DNA, 19 bp, Mus musculus
  siRNA target sequence for Cmas (NM_009908.1,666-684).
gatagagatgggttactta

SEQ ID NO: 598640 - DNA, 19 bp, Mus musculus
  siRNA target sequence for Cmas (NM_009908.1,689-707).
gtgggaaaatggcatatta

SEQ ID NO: 598641 - DNA, 19 bp, Mus musculus
  siRNA target sequence for Cmas (NM_009908.1,758-776).
cgatcgcagagcaaagagt

SEQ ID NO: 598642 - DNA, 19 bp, Mus musculus
  siRNA target sequence for Cmas (NM_009908.1,759-777).
gatcgcagagcaaagagtt

SEQ ID NO: 598643 - DNA, 19 bp, Mus musculus
  siRNA target sequence for Cmas (NM_009908.1,882-900).
ccaaaaagaaataatatct

SEQ ID NO: 598644 - DNA, 19 bp, Mus musculus
  siRNA target sequence for Cmas (NM_009908.1,992-1010).
cgctctctgccctaaagct

SEQ ID NO: 598645 - DNA, 19 bp, Mus musculus
  siRNA target sequence for Cmas (NM_009908.1,1001-1019).
ccctaaagctggactgtaa

SEQ ID NO: 598646 - DNA, 19 bp, Mus musculus
  siRNA target sequence for Cmas (NM_009908.1,1003-1021).
ctaaagctggactgtaaaa

SEQ ID NO: 598647 - DNA, 19 bp, Mus musculus
  siRNA target sequence for Cmas (NM_009908.1,1098-1116).
ggcctatctcggcaatgaa

SEQ ID NO: 598648 - DNA, 19 bp, Mus musculus
  siRNA target sequence for Cmas (NM_009908.1,1100-1118).
cctatctcggcaatgaagt

SEQ ID NO: 598649 - DNA, 19 bp, Mus musculus
  siRNA target sequence for Cmas (NM_009908.1,1195-1213).
gtggggtacatctgcaaat

SEQ ID NO: 598650 - DNA, 19 bp, Mus musculus
  siRNA target sequence for Cmas (NM_009908.1,1198-1216).
gggtacatctgcaaatgca

SEQ ID NO: 598651 - DNA, 19 bp, Mus musculus
  siRNA target sequence for Cmas (NM_009908.1,1260-1278).
cctactgatagaaaaagtt

SEQ ID NO: 598652 - DNA, 19 bp, Mus musculus
  siRNA target sequence for Cmas (NM_009908.1,1264-1282).
ctgatagaaaaagttaata

SEQ ID NO: 598653 - DNA, 19 bp, Mus musculus
  siRNA target sequence for 4933408N02Rik (NM_144533.1,556-574).
gtgattgagggcatcatct

SEQ ID NO: 598654 - DNA, 19 bp, Mus musculus
  siRNA target sequence for 4933408N02Rik (NM_144533.1,809-827).
cactgccagagttgaaact

SEQ ID NO: 598655 - DNA, 19 bp, Mus musculus
  siRNA target sequence for 4933408N02Rik (NM_144533.1,938-956).
gtcatgacccggaaaggta

SEQ ID NO: 598656 - DNA, 19 bp, Mus musculus
  siRNA target sequence for 4933408N02Rik (NM_144533.1,943-961).
gacccggaaaggtacatct

SEQ ID NO: 598657 - DNA, 19 bp, Mus musculus
  siRNA target sequence for 4933408N02Rik (NM_144533.1,981-999).
gcagtttcagcacaacatt

SEQ ID NO: 598658 - DNA, 19 bp, Mus musculus
  siRNA target sequence for D030041I09Rik (NM_175460.2,148-166).
ggcctgcggcagcttcaat

SEQ ID NO: 598659 - DNA, 19 bp, Mus musculus
  siRNA target sequence for D030041I09Rik (NM_175460.2,174-192).
ctaaagggcacattcagat

SEQ ID NO: 598660 - DNA, 19 bp, Mus musculus
  siRNA target sequence for D030041I09Rik (NM_175460.2,196-214).
cgagagagccagggattat

SEQ ID NO: 598661 - DNA, 19 bp, Mus musculus
  siRNA target sequence for D030041I09Rik (NM_175460.2,217-235).
gcacaagactggaagattt

SEQ ID NO: 598662 - DNA, 19 bp, Mus musculus
  siRNA target sequence for D030041I09Rik (NM_175460.2,220-238).
caagactggaagatttatt

SEQ ID NO: 598663 - DNA, 19 bp, Mus musculus
  siRNA target sequence for D030041I09Rik (NM_175460.2,300-318).
gtcggcaccgtctcatcat

SEQ ID NO: 598664 - DNA, 19 bp, Mus musculus
  siRNA target sequence for D030041I09Rik (NM_175460.2,302-320).
cggcaccgtctcatcatgt

SEQ ID NO: 598665 - DNA, 19 bp, Mus musculus
  siRNA target sequence for D030041I09Rik (NM_175460.2,617-635).
ccagtggagcgcttcactt

SEQ ID NO: 598666 - DNA, 19 bp, Mus musculus
  siRNA target sequence for D030041I09Rik (NM_175460.2,618-636).
cagtggagcgcttcacttt

SEQ ID NO: 598667 - DNA, 19 bp, Mus musculus
  siRNA target sequence for D030041I09Rik (NM_175460.2,622-640).
ggagcgcttcacttttgta

SEQ ID NO: 598668 - DNA, 19 bp, Mus musculus
  siRNA target sequence for D030041I09Rik (NM_175460.2,820-838).
cacagaccggatcatgaat

SEQ ID NO: 598669 - DNA, 19 bp, Mus musculus
  siRNA target sequence for D030041I09Rik (NM_175460.2,822-840).
cagaccggatcatgaatca

SEQ ID NO: 598670 - DNA, 19 bp, Mus musculus
  siRNA target sequence for D030041I09Rik (NM_175460.2,847-865).
catactccgcaagtacaaa

SEQ ID NO: 598671 - DNA, 19 bp, Mus musculus
  siRNA target sequence for D030041I09Rik (NM_175460.2,878-896).
gttgtgaaggatgatatca

SEQ ID NO: 598672 - DNA, 19 bp, Mus musculus
  siRNA target sequence for D030041I09Rik (NM_175460.2,957-975).
gccatgttgtggattacct

SEQ ID NO: 598673 - DNA, 19 bp, Mus musculus
  siRNA target sequence for Gmppb (NM_177910.2,419-437).
gcttggaatccgaatctct

SEQ ID NO: 598674 - DNA, 19 bp, Mus musculus
  siRNA target sequence for Gmppb (NM_177910.2,423-441).
ggaatccgaatctctatgt

SEQ ID NO: 598675 - DNA, 19 bp, Mus musculus
  siRNA target sequence for Gmppb (NM_177910.2,485-503).
ggcccgagacctactatct

SEQ ID NO: 598676 - DNA, 19 bp, Mus musculus
  siRNA target sequence for Gmppb (NM_177910.2,533-551).
cagtgatgtgatatgtgat

SEQ ID NO: 598677 - DNA, 19 bp, Mus musculus
  siRNA target sequence for Gmppb (NM_177910.2,623-641).
ggaagagccttccaagtat

SEQ ID NO: 598678 - DNA, 19 bp, Mus musculus
  siRNA target sequence for Gmppb (NM_177910.2,670-688).
gccgcatccaccgttttgt

SEQ ID NO: 598679 - DNA, 19 bp, Mus musculus
  siRNA target sequence for Gmppb (NM_177910.2,671-689).
ccgcatccaccgttttgtt

SEQ ID NO: 598680 - DNA, 19 bp, Mus musculus
  siRNA target sequence for Gmppb (NM_177910.2,673-691).
gcatccaccgttttgttga

SEQ ID NO: 598681 - DNA, 19 bp, Mus musculus
  siRNA target sequence for Gmppb (NM_177910.2,770-788).
gctgaagcctacatccatt

SEQ ID NO: 598682 - DNA, 19 bp, Mus musculus
  siRNA target sequence for Gmppb (NM_177910.2,815-833).
caaggaggggcagctatat

SEQ ID NO: 598683 - DNA, 19 bp, Mus musculus
  siRNA target sequence for Gmppb (NM_177910.2,1159-1177).
gggtgcgcatggagaatgt

SEQ ID NO: 598684 - DNA, 19 bp, Mus musculus
  siRNA target sequence for Gmppb (NM_177910.2,1160-1178).
ggtgcgcatggagaatgta

SEQ ID NO: 598685 - DNA, 19 bp, Mus musculus
  siRNA target sequence for Gmppb (NM_177910.2,1161-1179).
gtgcgcatggagaatgtaa

SEQ ID NO: 598686 - DNA, 19 bp, Mus musculus
  siRNA target sequence for Gmppb (NM_177910.2,1163-1181).
gcgcatggagaatgtaaca

SEQ ID NO: 598687 - DNA, 19 bp, Mus musculus
  siRNA target sequence for Gmppb (NM_177910.2,1165-1183).
gcatggagaatgtaacagt

SEQ ID NO: 598688 - DNA, 19 bp, Mus musculus
  siRNA target sequence for Gmppb (NM_177910.2,1269-1287).
ccagaacctcgtattatca

SEQ ID NO: 598689 - DNA, 19 bp, Mus musculus
  siRNA target sequence for Gmppb (NM_177910.2,1270-1288).
cagaacctcgtattatcat

SEQ ID NO: 598690 - DNA, 19 bp, Mus musculus
  siRNA target sequence for Gmppb (NM_177910.2,1272-1290).
gaacctcgtattatcatgt

SEQ ID NO: 598691 - DNA, 19 bp, Mus musculus
  siRNA target sequence for Pcyt1b (NM_177546.1,494-512).
gtcacgcaagggcacttat

SEQ ID NO: 598692 - DNA, 19 bp, Mus musculus
  siRNA target sequence for Pcyt1b (NM_177546.1,498-516).
cgcaagggcacttatgcaa

SEQ ID NO: 598693 - DNA, 19 bp, Mus musculus
  siRNA target sequence for Pcyt1b (NM_177546.1,560-578).
gcagtgatgaccttactca

SEQ ID NO: 598694 - DNA, 19 bp, Mus musculus
  siRNA target sequence for Pcyt1b (NM_177546.1,568-586).
gaccttactcacaaattca

SEQ ID NO: 598695 - DNA, 19 bp, Mus musculus
  siRNA target sequence for Pcyt1b (NM_177546.1,570-588).
ccttactcacaaattcaaa

SEQ ID NO: 598696 - DNA, 19 bp, Mus musculus
  siRNA target sequence for Pcyt1b (NM_177546.1,603-621).
gaacgaggcagagagatat

SEQ ID NO: 598697 - DNA, 19 bp, Mus musculus
  siRNA target sequence for Pcyt1b (NM_177546.1,638-656).
gtcgatacgtggatgaagt

SEQ ID NO: 598698 - DNA, 19 bp, Mus musculus
  siRNA target sequence for Pcyt1b (NM_177546.1,641-659).
gatacgtggatgaagtcat

SEQ ID NO: 598699 - DNA, 19 bp, Mus musculus
  siRNA target sequence for Pcyt1b (NM_177546.1,664-682).
gacgcgccatggactctta

SEQ ID NO: 598700 - DNA, 19 bp, Mus musculus
  siRNA target sequence for Pcyt1b (NM_177546.1,666-684).
cgcgccatggactcttact

SEQ ID NO: 598701 - DNA, 19 bp, Mus musculus
  siRNA target sequence for Pcyt1b (NM_177546.1,721-739).
gctcacgatgatattccat

SEQ ID NO: 598702 - DNA, 19 bp, Mus musculus
  siRNA target sequence for Pcyt1b (NM_177546.1,722-740).
ctcacgatgatattccata

SEQ ID NO: 598703 - DNA, 19 bp, Mus musculus
  siRNA target sequence for Pcyt1b (NM_177546.1,749-767).
ctggttctgatgacgttta

SEQ ID NO: 598704 - DNA, 19 bp, Mus musculus
  siRNA target sequence for Pcyt1b (NM_177546.1,751-769).
ggttctgatgacgtttata

SEQ ID NO: 598705 - DNA, 19 bp, Mus musculus
  siRNA target sequence for Pcyt1b (NM_177546.1,755-773).
ctgatgacgtttataagca

SEQ ID NO: 598706 - DNA, 19 bp, Mus musculus
  siRNA target sequence for Pcyt1b (NM_177546.1,757-775).
gatgacgtttataagcata

SEQ ID NO: 598707 - DNA, 19 bp, Mus musculus
  siRNA target sequence for Pcyt1b (NM_177546.1,760-778).
gacgtttataagcatatca

SEQ ID NO: 598708 - DNA, 19 bp, Mus musculus
  siRNA target sequence for Pcyt1b (NM_177546.1,910-928).
ctgaacgtcagctttataa

SEQ ID NO: 598709 - DNA, 19 bp, Mus musculus
  siRNA target sequence for Pcyt1b (NM_177546.1,998-1016).
gatcaaaggagtttgttaa

SEQ ID NO: 598710 - DNA, 19 bp, Mus musculus
  siRNA target sequence for Uap1 (NM_133806.2,324-342).
cccagcaggtagaacttta

SEQ ID NO: 598711 - DNA, 19 bp, Mus musculus
  siRNA target sequence for Uap1 (NM_133806.2,325-343).
ccagcaggtagaactttat

SEQ ID NO: 598712 - DNA, 19 bp, Mus musculus
  siRNA target sequence for Uap1 (NM_133806.2,326-344).
cagcaggtagaactttata

SEQ ID NO: 598713 - DNA, 19 bp, Mus musculus
  siRNA target sequence for Uap1 (NM_133806.2,368-386).
gaagagctgaactcctttt

SEQ ID NO: 598714 - DNA, 19 bp, Mus musculus
  siRNA target sequence for Uap1 (NM_133806.2,413-431).
cgatcctctcaccaagaaa

SEQ ID NO: 598715 - DNA, 19 bp, Mus musculus
  siRNA target sequence for Uap1 (NM_133806.2,417-435).
cctctcaccaagaaaaggt

SEQ ID NO: 598716 - DNA, 19 bp, Mus musculus
  siRNA target sequence for Uap1 (NM_133806.2,582-600).
caagacttggagtctcata

SEQ ID NO: 598717 - DNA, 19 bp, Mus musculus
  siRNA target sequence for Uap1 (NM_133806.2,633-651).
cccacaagacgctttttca

SEQ ID NO: 598718 - DNA, 19 bp, Mus musculus
  siRNA target sequence for Uap1 (NM_133806.2,640-658).
gacgctttttcagattcaa

SEQ ID NO: 598719 - DNA, 19 bp, Mus musculus
  siRNA target sequence for Uap1 (NM_133806.2,656-674).
caagcagaacgtattctga

SEQ ID NO: 598720 - DNA, 19 bp, Mus musculus
  siRNA target sequence for Uap1 (NM_133806.2,660-678).
cagaacgtattctgaaact

SEQ ID NO: 598721 - DNA, 19 bp, Mus musculus
  siRNA target sequence for Uap1 (NM_133806.2,714-732).
gcaccatcccatggtatat

SEQ ID NO: 598722 - DNA, 19 bp, Mus musculus
  siRNA target sequence for Uap1 (NM_133806.2,715-733).
caccatcccatggtatata

SEQ ID NO: 598723 - DNA, 19 bp, Mus musculus
  siRNA target sequence for Uap1 (NM_133806.2,739-757).
cagcggcagaacaatggaa

SEQ ID NO: 598724 - DNA, 19 bp, Mus musculus
  siRNA target sequence for Uap1 (NM_133806.2,743-761).
ggcagaacaatggaatcaa

SEQ ID NO: 598725 - DNA, 19 bp, Mus musculus
  siRNA target sequence for Uap1 (NM_133806.2,762-780).
cgaaggagttcttcacaaa

SEQ ID NO: 598726 - DNA, 19 bp, Mus musculus
  siRNA target sequence for Uap1 (NM_133806.2,927-945).
ctcttgcagcccaaaacat

SEQ ID NO: 598727 - DNA, 19 bp, Mus musculus
  siRNA target sequence for Uap1 (NM_133806.2,969-987).
gcatctgcagtattcatgt

SEQ ID NO: 598728 - DNA, 19 bp, Mus musculus
  siRNA target sequence for Uap1 (NM_133806.2,973-991).
ctgcagtattcatgtctat

SEQ ID NO: 598729 - DNA, 19 bp, Mus musculus
  siRNA target sequence for Uap1 (NM_133806.2,993-1011).
gtgtggacaacatattggt

SEQ ID NO: 598730 - DNA, 19 bp, Mus musculus
  siRNA target sequence for Uap1 (NM_133806.2,995-1013).
gtggacaacatattggtaa

SEQ ID NO: 598731 - DNA, 19 bp, Mus musculus
  siRNA target sequence for Uap1 (NM_133806.2,997-1015).
ggacaacatattggtaaaa

SEQ ID NO: 598732 - DNA, 19 bp, Mus musculus
  siRNA target sequence for Uap1 (NM_133806.2,1119-1137).
gccgggtggatggagtata

SEQ ID NO: 598733 - DNA, 19 bp, Mus musculus
  siRNA target sequence for Uap1 (NM_133806.2,1122-1140).
gggtggatggagtatacca

SEQ ID NO: 598734 - DNA, 19 bp, Mus musculus
  siRNA target sequence for Uap1 (NM_133806.2,1207-1225).
gttcaatgcagggaacatt

SEQ ID NO: 598735 - DNA, 19 bp, Mus musculus
  siRNA target sequence for Uap1 (NM_133806.2,1217-1235).
gggaacattgccaatcact

SEQ ID NO: 598736 - DNA, 19 bp, Mus musculus
  siRNA target sequence for Uap1 (NM_133806.2,1246-1264).
cccgttcctgaaagatgtt

SEQ ID NO: 598737 - DNA, 19 bp, Mus musculus
  siRNA target sequence for Uap1 (NM_133806.2,1327-1345).
ctcccaggggcacttcatt

SEQ ID NO: 598738 - DNA, 19 bp, Mus musculus
  siRNA target sequence for Uap1 (NM_133806.2,1329-1347).
cccaggggcacttcattaa

SEQ ID NO: 598739 - DNA, 19 bp, Mus musculus
  siRNA target sequence for Uap1 (NM_133806.2,1414-1432).
gtttgtggtgtatgaagta

SEQ ID NO: 598740 - DNA, 19 bp, Mus musculus
  siRNA target sequence for Uap1 (NM_133806.2,1447-1465).
gttttccccgctcaagaat

SEQ ID NO: 598741 - DNA, 19 bp, Mus musculus
  siRNA target sequence for Uap1 (NM_133806.2,1590-1608).
ccatcccccgtgctacaaa

SEQ ID NO: 598742 - DNA, 19 bp, Mus musculus
  siRNA target sequence for Uap1 (NM_133806.2,1591-1609).
catcccccgtgctacaaat

SEQ ID NO: 598743 - DNA, 19 bp, Mus musculus
  siRNA target sequence for Uap1 (NM_133806.2,1596-1614).
cccgtgctacaaatggaaa

SEQ ID NO: 598744 - DNA, 19 bp, Mus musculus
  siRNA target sequence for Uap1 (NM_133806.2,1639-1657).
caatcacaacttgaaagat

SEQ ID NO: 598745 - DNA, 19 bp, Mus musculus
  siRNA target sequence for Uap1 (NM_133806.2,1648-1666).
cttgaaagatgccaatgat

SEQ ID NO: 598746 - DNA, 19 bp, Mus musculus
  siRNA target sequence for Uap1 (NM_133806.2,1667-1685).
gtaccgatccagtgtgaaa

SEQ ID NO: 598747 - DNA, 19 bp, Mus musculus
  siRNA target sequence for Uap1 (NM_133806.2,1755-1773).
cgctaatcatcgatgagaa

SEQ ID NO: 598748 - DNA, 19 bp, Mus musculus
  siRNA target sequence for Uap1 (NM_133806.2,1756-1774).
gctaatcatcgatgagaat

SEQ ID NO: 598749 - DNA, 19 bp, Mus musculus
  siRNA target sequence for Adk (NM_134079.1,79-97).
ccacaagcgctgagtgaaa

SEQ ID NO: 598750 - DNA, 19 bp, Mus musculus
  siRNA target sequence for Adk (NM_134079.1,80-98).
cacaagcgctgagtgaaaa

SEQ ID NO: 598751 - DNA, 19 bp, Mus musculus
  siRNA target sequence for Adk (NM_134079.1,139-157).
gctgtagtagacaaagatt

SEQ ID NO: 598752 - DNA, 19 bp, Mus musculus
  siRNA target sequence for Adk (NM_134079.1,140-158).
ctgtagtagacaaagattt

SEQ ID NO: 598753 - DNA, 19 bp, Mus musculus
  siRNA target sequence for Adk (NM_134079.1,216-234).
ggaactgtttgatgaactt

SEQ ID NO: 598754 - DNA, 19 bp, Mus musculus
  siRNA target sequence for Adk (NM_134079.1,265-283).
ggtggctctacgcagaatt

SEQ ID NO: 598755 - DNA, 19 bp, Mus musculus
  siRNA target sequence for Adk (NM_134079.1,268-286).
ggctctacgcagaattcaa

SEQ ID NO: 598756 - DNA, 19 bp, Mus musculus
  siRNA target sequence for Adk (NM_134079.1,269-287).
gctctacgcagaattcaat

SEQ ID NO: 598757 - DNA, 19 bp, Mus musculus
  siRNA target sequence for Adk (NM_134079.1,275-293).
cgcagaattcaatgaaagt

SEQ ID NO: 598758 - DNA, 19 bp, Mus musculus
  siRNA target sequence for Adk (NM_134079.1,306-324).
gattcaggagccacacaaa

SEQ ID NO: 598759 - DNA, 19 bp, Mus musculus
  siRNA target sequence for Adk (NM_134079.1,325-343).
gcagcaacattctttggat

SEQ ID NO: 598760 - DNA, 19 bp, Mus musculus
  siRNA target sequence for Adk (NM_134079.1,340-358).
ggatgcattgggatagata

SEQ ID NO: 598761 - DNA, 19 bp, Mus musculus
  siRNA target sequence for Adk (NM_134079.1,341-359).
gatgcattgggatagataa

SEQ ID NO: 598762 - DNA, 19 bp, Mus musculus
  siRNA target sequence for Adk (NM_134079.1,344-362).
gcattgggatagataagtt

SEQ ID NO: 598763 - DNA, 19 bp, Mus musculus
  siRNA target sequence for Adk (NM_134079.1,345-363).
cattgggatagataagttt

SEQ ID NO: 598764 - DNA, 19 bp, Mus musculus
  siRNA target sequence for Adk (NM_134079.1,395-413).
cacatgtggatgctcatta

SEQ ID NO: 598765 - DNA, 19 bp, Mus musculus
  siRNA target sequence for Adk (NM_134079.1,474-492).
gtccctcgttgctaacctt

SEQ ID NO: 598766 - DNA, 19 bp, Mus musculus
  siRNA target sequence for Adk (NM_134079.1,489-507).
ccttgctgccgccaattgt

SEQ ID NO: 598767 - DNA, 19 bp, Mus musculus
  siRNA target sequence for Adk (NM_134079.1,490-508).
cttgctgccgccaattgtt

SEQ ID NO: 598768 - DNA, 19 bp, Mus musculus
  siRNA target sequence for Adk (NM_134079.1,493-511).
gctgccgccaattgttaca

SEQ ID NO: 598769 - DNA, 19 bp, Mus musculus
  siRNA target sequence for Adk (NM_134079.1,496-514).
gccgccaattgttacaaga

SEQ ID NO: 598770 - DNA, 19 bp, Mus musculus
  siRNA target sequence for Adk (NM_134079.1,498-516).
cgccaattgttacaagaaa

SEQ ID NO: 598771 - DNA, 19 bp, Mus musculus
  siRNA target sequence for Adk (NM_134079.1,602-620).
ccccagagtcggtattgaa

SEQ ID NO: 598772 - DNA, 19 bp, Mus musculus
  siRNA target sequence for Adk (NM_134079.1,603-621).
cccagagtcggtattgaaa

SEQ ID NO: 598773 - DNA, 19 bp, Mus musculus
  siRNA target sequence for Adk (NM_134079.1,605-623).
cagagtcggtattgaaagt

SEQ ID NO: 598774 - DNA, 19 bp, Mus musculus
  siRNA target sequence for Adk (NM_134079.1,629-647).
gctatgctgccgagaacaa

SEQ ID NO: 598775 - DNA, 19 bp, Mus musculus
  siRNA target sequence for Adk (NM_134079.1,711-729).
ggacgtcatgccttatgtt

SEQ ID NO: 598776 - DNA, 19 bp, Mus musculus
  siRNA target sequence for Adk (NM_134079.1,715-733).
gtcatgccttatgttgata

SEQ ID NO: 598777 - DNA, 19 bp, Mus musculus
  siRNA target sequence for Adk (NM_134079.1,750-768).
gacggaagctgccactttt

SEQ ID NO: 598778 - DNA, 19 bp, Mus musculus
  siRNA target sequence for Adk (NM_134079.1,777-795).
gcaaggctttgagactaaa

SEQ ID NO: 598779 - DNA, 19 bp, Mus musculus
  siRNA target sequence for Pmvk (NM_026784.1,92-110).
ctgtttagcgggaagagaa

SEQ ID NO: 598780 - DNA, 19 bp, Mus musculus
  siRNA target sequence for Pmvk (NM_026784.1,94-112).
gtttagcgggaagagaaaa

SEQ ID NO: 598781 - DNA, 19 bp, Mus musculus
  siRNA target sequence for Pmvk (NM_026784.1,147-165).
gcagacttggaggtaacat

SEQ ID NO: 598782 - DNA, 19 bp, Mus musculus
  siRNA target sequence for Pmvk (NM_026784.1,417-435).
cctatggggctgtgataca

SEQ ID NO: 598783 - DNA, 19 bp, Mus musculus
  siRNA target sequence for Pmvk (NM_026784.1,520-538).
gtgtggtctggacaacttt

SEQ ID NO: 598784 - DNA, 19 bp, Mus musculus
  siRNA target sequence for Ckb (NM_021273.2,192-210).
cacgccgagcggctttact

SEQ ID NO: 598785 - DNA, 19 bp, Mus musculus
  siRNA target sequence for Ckb (NM_021273.2,194-212).
cgccgagcggctttacttt

SEQ ID NO: 598786 - DNA, 19 bp, Mus musculus
  siRNA target sequence for Ckb (NM_021273.2,247-265).
ggccacccgtacatcatga

SEQ ID NO: 598787 - DNA, 19 bp, Mus musculus
  siRNA target sequence for Ckb (NM_021273.2,292-310).
gagagttacgacgtattca

SEQ ID NO: 598788 - DNA, 19 bp, Mus musculus
  siRNA target sequence for Ckm (NM_007710.1,143-161).
gcaagcacaacaatcacat

SEQ ID NO: 598789 - DNA, 19 bp, Mus musculus
  siRNA target sequence for Ckm (NM_007710.1,176-194).
cccctgacctctacaataa

SEQ ID NO: 598790 - DNA, 19 bp, Mus musculus
  siRNA target sequence for Ckm (NM_007710.1,263-281).
caggtcaccccttcatcat

SEQ ID NO: 598791 - DNA, 19 bp, Mus musculus
  siRNA target sequence for Ckm (NM_007710.1,357-375).
ccgccatggcggctacaaa

SEQ ID NO: 598792 - DNA, 19 bp, Mus musculus
  siRNA target sequence for Ckm (NM_007710.1,376-394).
cccacagacaagcataaga

SEQ ID NO: 598793 - DNA, 19 bp, Mus musculus
  siRNA target sequence for Ckm (NM_007710.1,563-581).
gcctgacgggcgagttcaa

SEQ ID NO: 598794 - DNA, 19 bp, Mus musculus
  siRNA target sequence for Ckm (NM_007710.1,723-741).
ctggcacaacgacaacaaa

SEQ ID NO: 598795 - DNA, 19 bp, Mus musculus
  siRNA target sequence for Ckm (NM_007710.1,803-821).
gcaatatgaaggaggtttt

SEQ ID NO: 598796 - DNA, 19 bp, Mus musculus
  siRNA target sequence for Ckm (NM_007710.1,834-852).
cgtgggcctgcagaagatt

SEQ ID NO: 598797 - DNA, 19 bp, Mus musculus
  siRNA target sequence for Ckm (NM_007710.1,871-889).
gctggtcaccccttcatgt

SEQ ID NO: 598798 - DNA, 19 bp, Mus musculus
  siRNA target sequence for Ckm (NM_007710.1,980-998).
gcaagcaccccaagtttga

SEQ ID NO: 598799 - DNA, 19 bp, Mus musculus
  siRNA target sequence for Ckmt1 (NM_009897.1,455-473).
cactggttggacactagat

SEQ ID NO: 598800 - DNA, 19 bp, Mus musculus
  siRNA target sequence for Ckmt1 (NM_009897.1,457-475).
ctggttggacactagatca

SEQ ID NO: 598801 - DNA, 19 bp, Mus musculus
  siRNA target sequence for Ckmt1 (NM_009897.1,587-605).
gatccaagagcggcataat

SEQ ID NO: 598802 - DNA, 19 bp, Mus musculus
  siRNA target sequence for Ckmt1 (NM_009897.1,591-609).
caagagcggcataatggat

SEQ ID NO: 598803 - DNA, 19 bp, Mus musculus
  siRNA target sequence for Ckmt1 (NM_009897.1,639-657).
gaccttgatgccagtaaaa

SEQ ID NO: 598804 - DNA, 19 bp, Mus musculus
  siRNA target sequence for Ckmt1 (NM_009897.1,671-689).
ctttgatgagaggtatgta

SEQ ID NO: 598805 - DNA, 19 bp, Mus musculus
  siRNA target sequence for Ckmt1 (NM_009897.1,675-693).
gatgagaggtatgtattgt

SEQ ID NO: 598806 - DNA, 19 bp, Mus musculus
  siRNA target sequence for Ckmt1 (NM_009897.1,683-701).
gtatgtattgtcttcaaga

SEQ ID NO: 598807 - DNA, 19 bp, Mus musculus
  siRNA target sequence for Ckmt1 (NM_009897.1,815-833).
cctggctggacggtactat

SEQ ID NO: 598808 - DNA, 19 bp, Mus musculus
  siRNA target sequence for Ckmt1 (NM_009897.1,816-834).
ctggctggacggtactata

SEQ ID NO: 598809 - DNA, 19 bp, Mus musculus
  siRNA target sequence for Ckmt1 (NM_009897.1,869-887).
gcttattgatgaccatttt

SEQ ID NO: 598810 - DNA, 19 bp, Mus musculus
  siRNA target sequence for Ckmt1 (NM_009897.1,955-973).
gagggatctggcacaacaa

SEQ ID NO: 598811 - DNA, 19 bp, Mus musculus
  siRNA target sequence for Ckmt1 (NM_009897.1,1032-1050).
gagaaaggcggcaacatga

SEQ ID NO: 598812 - DNA, 19 bp, Mus musculus
  siRNA target sequence for Ckmt1 (NM_009897.1,1043-1061).
caacatgaagagagtgttt

SEQ ID NO: 598813 - DNA, 19 bp, Mus musculus
  siRNA target sequence for Ckmt1 (NM_009897.1,1134-1152).
gagcgtttaggctacatct

SEQ ID NO: 598814 - DNA, 19 bp, Mus musculus
  siRNA target sequence for Ckmt1 (NM_009897.1,1209-1227).
ccactgctgagcaaagata

SEQ ID NO: 598815 - DNA, 19 bp, Mus musculus
  siRNA target sequence for Ckmt1 (NM_009897.1,1210-1228).
cactgctgagcaaagataa

SEQ ID NO: 598816 - DNA, 19 bp, Mus musculus
  siRNA target sequence for Ckmt1 (NM_009897.1,1306-1324).
gcgtctttgacatctctaa

SEQ ID NO: 598817 - DNA, 19 bp, Mus musculus
  siRNA target sequence for Ckmt1 (NM_009897.1,1307-1325).
cgtctttgacatctctaat

SEQ ID NO: 598818 - DNA, 19 bp, Mus musculus
  siRNA target sequence for Ckmt1 (NM_009897.1,1308-1326).
gtctttgacatctctaatt

SEQ ID NO: 598819 - DNA, 19 bp, Mus musculus
  siRNA target sequence for Ckmt1 (NM_009897.1,1370-1388).
catcgatggggtgaactat

SEQ ID NO: 598820 - DNA, 19 bp, Mus musculus
  siRNA target sequence for Ckmt1 (NM_009897.1,1378-1396).
gggtgaactatttgattga

SEQ ID NO: 598821 - DNA, 19 bp, Mus musculus
  siRNA target sequence for Ckmt1 (NM_009897.1,1415-1433).
gagaggacaggatattcga

SEQ ID NO: 598822 - DNA, 19 bp, Mus musculus
  siRNA target sequence for Ckmt1 (NM_009897.1,1417-1435).
gaggacaggatattcgaat

SEQ ID NO: 598823 - DNA, 19 bp, Mus musculus
  siRNA target sequence for Ckmt1 (NM_009897.1,1446-1464).
cttgtccacagcaaacatt

SEQ ID NO: 598824 - DNA, 19 bp, Mus musculus
  siRNA target sequence for 1700011K15Rik (NM_029294.1,266-284).
gagtgtgcgtggagaagat

SEQ ID NO: 598825 - DNA, 19 bp, Mus musculus
  siRNA target sequence for 1700011K15Rik (NM_029294.1,301-319).
gcggttgtggtgagatcaa

SEQ ID NO: 598826 - DNA, 19 bp, Mus musculus
  siRNA target sequence for 1700011K15Rik (NM_029294.1,312-330).
gagatcaacgacagtctaa

SEQ ID NO: 598827 - DNA, 19 bp, Mus musculus
  siRNA target sequence for 1700011K15Rik (NM_029294.1,451-469).
ctgcgaagctcgtagcaaa

SEQ ID NO: 598828 - DNA, 19 bp, Mus musculus
  siRNA target sequence for 1700011K15Rik (NM_029294.1,453-471).
gcgaagctcgtagcaaata

SEQ ID NO: 598829 - DNA, 19 bp, Mus musculus
  siRNA target sequence for 1700011K15Rik (NM_029294.1,454-472).
cgaagctcgtagcaaatat

SEQ ID NO: 598830 - DNA, 19 bp, Mus musculus
  siRNA target sequence for 1700011K15Rik (NM_029294.1,664-682).
cttccatcgcggaccattt

SEQ ID NO: 598831 - DNA, 19 bp, Mus musculus
  siRNA target sequence for 1700011K15Rik (NM_029294.1,667-685).
ccatcgcggaccatttgaa

SEQ ID NO: 598832 - DNA, 19 bp, Mus musculus
  siRNA target sequence for 1700011K15Rik (NM_029294.1,668-686).
catcgcggaccatttgaat

SEQ ID NO: 598833 - DNA, 19 bp, Mus musculus
  siRNA target sequence for 1700011K15Rik (NM_029294.1,843-861).
gagggagctaccagagttt

SEQ ID NO: 598834 - DNA, 19 bp, Mus musculus
  siRNA target sequence for 1700011K15Rik (NM_029294.1,908-926).
catcaatggcgcatgcttt

SEQ ID NO: 598835 - DNA, 19 bp, Mus musculus
  siRNA target sequence for 1700011K15Rik (NM_029294.1,930-948).
gcagtagtagtcacaaaca

SEQ ID NO: 598836 - DNA, 19 bp, Mus musculus
  siRNA target sequence for 1700011K15Rik (NM_029294.1,1038-1056).
cataacggagaatctgttt

SEQ ID NO: 598837 - DNA, 19 bp, Mus musculus
  siRNA target sequence for Prps1 (NM_021463.2,316-334).
gtgagataaatgacaatct

SEQ ID NO: 598838 - DNA, 19 bp, Mus musculus
  siRNA target sequence for Prps1 (NM_021463.2,420-438).
cgccaagataagaaggata

SEQ ID NO: 598839 - DNA, 19 bp, Mus musculus
  siRNA target sequence for Prps1 (NM_021463.2,421-439).
gccaagataagaaggataa

SEQ ID NO: 598840 - DNA, 19 bp, Mus musculus
  siRNA target sequence for Prps1 (NM_021463.2,459-477).
gctaagcttgttgcaaata

SEQ ID NO: 598841 - DNA, 19 bp, Mus musculus
  siRNA target sequence for Prps1 (NM_021463.2,596-614).
gatacgggagaatatatct

SEQ ID NO: 598842 - DNA, 19 bp, Mus musculus
  siRNA target sequence for Prps1 (NM_021463.2,683-701).
ccggctgaatgtggatttt

SEQ ID NO: 598843 - DNA, 19 bp, Mus musculus
  siRNA target sequence for Prps1 (NM_021463.2,821-839).
ctgtcacgccgctgacaaa

SEQ ID NO: 598844 - DNA, 19 bp, Mus musculus
  siRNA target sequence for Prps1 (NM_021463.2,823-841).
gtcacgccgctgacaaact

SEQ ID NO: 598845 - DNA, 19 bp, Mus musculus
  siRNA target sequence for Prps1 (NM_021463.2,849-867).
gctggcgctaccagagttt

SEQ ID NO: 598846 - DNA, 19 bp, Mus musculus
  siRNA target sequence for Prps1 (NM_021463.2,850-868).
ctggcgctaccagagttta

SEQ ID NO: 598847 - DNA, 19 bp, Mus musculus
  siRNA target sequence for Prps1 (NM_021463.2,871-889).
ctatcttgacgcatggaat

SEQ ID NO: 598848 - DNA, 19 bp, Mus musculus
  siRNA target sequence for Prps1 (NM_021463.2,901-919).
ctgccatttctcgaatcaa

SEQ ID NO: 598849 - DNA, 19 bp, Mus musculus
  siRNA target sequence for Prps1 (NM_021463.2,904-922).
ccatttctcgaatcaacaa

SEQ ID NO: 598850 - DNA, 19 bp, Mus musculus
  siRNA target sequence for Prps1 (NM_021463.2,905-923).
catttctcgaatcaacaat

SEQ ID NO: 598851 - DNA, 19 bp, Mus musculus
  siRNA target sequence for Prps1 (NM_021463.2,936-954).
gcagtagtagttaccaata

SEQ ID NO: 598852 - DNA, 19 bp, Mus musculus
  siRNA target sequence for Prps1 (NM_021463.2,939-957).
gtagtagttaccaatacca

SEQ ID NO: 598853 - DNA, 19 bp, Mus musculus
  siRNA target sequence for Prps2 (NM_026662.2,288-306).
gcggggagattaatgacaa

SEQ ID NO: 598854 - DNA, 19 bp, Mus musculus
  siRNA target sequence for Prps2 (NM_026662.2,316-334).
gctactcatcatgatcaat

SEQ ID NO: 598855 - DNA, 19 bp, Mus musculus
  siRNA target sequence for Prps2 (NM_026662.2,412-430).
caagagtcgtgctccaatt

SEQ ID NO: 598856 - DNA, 19 bp, Mus musculus
  siRNA target sequence for Prps2 (NM_026662.2,415-433).
gagtcgtgctccaatttct

SEQ ID NO: 598857 - DNA, 19 bp, Mus musculus
  siRNA target sequence for Prps2 (NM_026662.2,426-444).
caatttctgctaaacttgt

SEQ ID NO: 598858 - DNA, 19 bp, Mus musculus
  siRNA target sequence for Prps2 (NM_026662.2,465-483).
ctggggctgatcacatcat

SEQ ID NO: 598859 - DNA, 19 bp, Mus musculus
  siRNA target sequence for Prps2 (NM_026662.2,471-489).
ctgatcacatcattaccat

SEQ ID NO: 598860 - DNA, 19 bp, Mus musculus
  siRNA target sequence for Prps2 (NM_026662.2,575-593).
cgggagaacatcactgaat

SEQ ID NO: 598861 - DNA, 19 bp, Mus musculus
  siRNA target sequence for Prps2 (NM_026662.2,629-647).
ggagccaaaagggttacat

SEQ ID NO: 598862 - DNA, 19 bp, Mus musculus
  siRNA target sequence for Prps2 (NM_026662.2,633-651).
ccaaaagggttacatcaat

SEQ ID NO: 598863 - DNA, 19 bp, Mus musculus
  siRNA target sequence for Prps2 (NM_026662.2,634-652).
caaaagggttacatcaatt

SEQ ID NO: 598864 - DNA, 19 bp, Mus musculus
  siRNA target sequence for Prps2 (NM_026662.2,677-695).
gctttgattcacaaagaga

SEQ ID NO: 598865 - DNA, 19 bp, Mus musculus
  siRNA target sequence for Prps2 (NM_026662.2,767-785).
gacgacatggccgatacat

SEQ ID NO: 598866 - DNA, 19 bp, Mus musculus
  siRNA target sequence for Prps2 (NM_026662.2,769-787).
cgacatggccgatacatgt

SEQ ID NO: 598867 - DNA, 19 bp, Mus musculus
  siRNA target sequence for Prps2 (NM_026662.2,803-821).
gctgcagataagttactct

SEQ ID NO: 598868 - DNA, 19 bp, Mus musculus
  siRNA target sequence for Prps2 (NM_026662.2,824-842).
gctggtgccaccaaagttt

SEQ ID NO: 598869 - DNA, 19 bp, Mus musculus
  siRNA target sequence for Prps2 (NM_026662.2,825-843).
ctggtgccaccaaagttta

SEQ ID NO: 598870 - DNA, 19 bp, Mus musculus
  siRNA target sequence for Prps2 (NM_026662.2,832-850).
caccaaagtttatgctatt

SEQ ID NO: 598871 - DNA, 19 bp, Mus musculus
  siRNA target sequence for Prps2 (NM_026662.2,834-852).
ccaaagtttatgctattct

SEQ ID NO: 598872 - DNA, 19 bp, Mus musculus
  siRNA target sequence for Prps2 (NM_026662.2,846-864).
ctattcttacccatggaat

SEQ ID NO: 598873 - DNA, 19 bp, Mus musculus
  siRNA target sequence for Prps2 (NM_026662.2,874-892).
gccagctatttccagaata

SEQ ID NO: 598874 - DNA, 19 bp, Mus musculus
  siRNA target sequence for Prps2 (NM_026662.2,875-893).
ccagctatttccagaataa

SEQ ID NO: 598875 - DNA, 19 bp, Mus musculus
  siRNA target sequence for Prps2 (NM_026662.2,878-896).
gctatttccagaataaata

SEQ ID NO: 598876 - DNA, 19 bp, Mus musculus
  siRNA target sequence for Prps2 (NM_026662.2,1028-1046).
gaatccgtgtcctatctgt

SEQ ID NO: 598877 - DNA, 19 bp, Mus musculus
  siRNA target sequence for Tpk1 (NM_013861.1,90-108).
ctacctacggggaacttga

SEQ ID NO: 598878 - DNA, 19 bp, Mus musculus
  siRNA target sequence for Tpk1 (NM_013861.1,93-111).
cctacggggaacttgaaat

SEQ ID NO: 598879 - DNA, 19 bp, Mus musculus
  siRNA target sequence for Tpk1 (NM_013861.1,94-112).
ctacggggaacttgaaata

SEQ ID NO: 598880 - DNA, 19 bp, Mus musculus
  siRNA target sequence for Tpk1 (NM_013861.1,144-162).
gcacgatttcgccatcttt

SEQ ID NO: 598881 - DNA, 19 bp, Mus musculus
  siRNA target sequence for Tpk1 (NM_013861.1,195-213).
gggggtgccaaccacttat

SEQ ID NO: 598882 - DNA, 19 bp, Mus musculus
  siRNA target sequence for Tpk1 (NM_013861.1,196-214).
ggggtgccaaccacttata

SEQ ID NO: 598883 - DNA, 19 bp, Mus musculus
  siRNA target sequence for Tpk1 (NM_013861.1,197-215).
gggtgccaaccacttatat

SEQ ID NO: 598884 - DNA, 19 bp, Mus musculus
  siRNA target sequence for Tpk1 (NM_013861.1,258-276).
gtcagtggggactttgatt

SEQ ID NO: 598885 - DNA, 19 bp, Mus musculus
  siRNA target sequence for Tpk1 (NM_013861.1,260-278).
cagtggggactttgattct

SEQ ID NO: 598886 - DNA, 19 bp, Mus musculus
  siRNA target sequence for Tpk1 (NM_013861.1,283-301).
ggcctgaagtcaaagagta

SEQ ID NO: 598887 - DNA, 19 bp, Mus musculus
  siRNA target sequence for Tpk1 (NM_013861.1,341-359).
ccaagaccacactgacttt

SEQ ID NO: 598888 - DNA, 19 bp, Mus musculus
  siRNA target sequence for Tpk1 (NM_013861.1,408-426).
caggttgacgtgattgtga

SEQ ID NO: 598889 - DNA, 19 bp, Mus musculus
  siRNA target sequence for Tpk1 (NM_013861.1,436-454).
gtctcggtgggcgttttga

SEQ ID NO: 598890 - DNA, 19 bp, Mus musculus
  siRNA target sequence for Tpk1 (NM_013861.1,442-460).
gtgggcgttttgaccaaat

SEQ ID NO: 598891 - DNA, 19 bp, Mus musculus
  siRNA target sequence for Tpk1 (NM_013861.1,469-487).
ctgtgaatacccttttcca

SEQ ID NO: 598892 - DNA, 19 bp, Mus musculus
  siRNA target sequence for Tpk1 (NM_013861.1,500-518).
cactcctgtgccgattata

SEQ ID NO: 598893 - DNA, 19 bp, Mus musculus
  siRNA target sequence for Tpk1 (NM_013861.1,502-520).
ctcctgtgccgattataat

SEQ ID NO: 598894 - DNA, 19 bp, Mus musculus
  siRNA target sequence for Tpk1 (NM_013861.1,504-522).
cctgtgccgattataataa

SEQ ID NO: 598895 - DNA, 19 bp, Mus musculus
  siRNA target sequence for Tpk1 (NM_013861.1,511-529).
cgattataataatccaaaa

SEQ ID NO: 598896 - DNA, 19 bp, Mus musculus
  siRNA target sequence for Tpk1 (NM_013861.1,661-679).
ggaacctcacaaatgatgt

SEQ ID NO: 598897 - DNA, 19 bp, Mus musculus
  siRNA target sequence for Tpk1 (NM_013861.1,690-708).
ggaacactggtcagtactt

SEQ ID NO: 598898 - DNA, 19 bp, Mus musculus
  siRNA target sequence for Tpk1 (NM_013861.1,694-712).
cactggtcagtacttctaa

SEQ ID NO: 598899 - DNA, 19 bp, Mus musculus
  siRNA target sequence for Tpk1 (NM_013861.1,696-714).
ctggtcagtacttctaaca

SEQ ID NO: 598900 - DNA, 19 bp, Mus musculus
  siRNA target sequence for Dpagt1 (NM_007875.2,292-310).
ccttccgtagccactttat

SEQ ID NO: 598901 - DNA, 19 bp, Mus musculus
  siRNA target sequence for Dpagt1 (NM_007875.2,466-484).
cattcccccaccatgaatt

SEQ ID NO: 598902 - DNA, 19 bp, Mus musculus
  siRNA target sequence for Dpagt1 (NM_007875.2,623-641).
cacaaactttggcaataca

SEQ ID NO: 598903 - DNA, 19 bp, Mus musculus
  siRNA target sequence for Dpagt1 (NM_007875.2,846-864).
gattatcgagatgatcata

SEQ ID NO: 598904 - DNA, 19 bp, Mus musculus
  siRNA target sequence for Dpagt1 (NM_007875.2,968-986).
ctttgcgggcatgactttt

SEQ ID NO: 598905 - DNA, 19 bp, Mus musculus
  siRNA target sequence for Dpagt1 (NM_007875.2,1042-1060).
cacaagtattcaatttcct

SEQ ID NO: 598906 - DNA, 19 bp, Mus musculus
  siRNA target sequence for Dpagt1 (NM_007875.2,1140-1158).
ctggaaatgagctattcca

SEQ ID NO: 598907 - DNA, 19 bp, Mus musculus
  siRNA target sequence for Dpagt1 (NM_007875.2,1212-1230).
gagaacctccggttagtga

SEQ ID NO: 598908 - DNA, 19 bp, Mus musculus
  siRNA target sequence for Dpagt1 (NM_007875.2,1258-1276).
gtgccttcactgagtgtaa

SEQ ID NO: 598909 - DNA, 19 bp, Mus musculus
  siRNA target sequence for Dpagt1 (NM_007875.2,1260-1278).
gccttcactgagtgtaaca

SEQ ID NO: 598910 - DNA, 19 bp, Mus musculus
  siRNA target sequence for Dpagt1 (NM_007875.2,1295-1313).
cttgctacttaaagtcttt

SEQ ID NO: 598911 - DNA, 19 bp, Mus musculus
  siRNA target sequence for Dpagt1 (NM_007875.2,1377-1395).
gccaccttctccattcgtt

SEQ ID NO: 598912 - DNA, 19 bp, Mus musculus
  siRNA target sequence for Dpagt1 (NM_007875.2,1378-1396).
ccaccttctccattcgtta

SEQ ID NO: 598913 - DNA, 19 bp, Mus musculus
  siRNA target sequence for Dpagt1 (NM_007875.2,1382-1400).
cttctccattcgttaccaa

SEQ ID NO: 598914 - DNA, 19 bp, Mus musculus
  siRNA target sequence for Dpagt1 (NM_007875.2,1403-1421).
cgtccgactcttctatgat

SEQ ID NO: 598915 - DNA, 19 bp, Mus musculus
  siRNA target sequence for Ptdss2 (NM_013782.2,188-206).
gcaccgagtctgaagtcta

SEQ ID NO: 598916 - DNA, 19 bp, Mus musculus
  siRNA target sequence for Ptdss2 (NM_013782.2,234-252).
gcgtgcccacactttaact

SEQ ID NO: 598917 - DNA, 19 bp, Mus musculus
  siRNA target sequence for Ptdss2 (NM_013782.2,324-342).
caacaccaagagaggtatt

SEQ ID NO: 598918 - DNA, 19 bp, Mus musculus
  siRNA target sequence for Ptdss2 (NM_013782.2,337-355).
ggtattgtggccagtattt

SEQ ID NO: 598919 - DNA, 19 bp, Mus musculus
  siRNA target sequence for Ptdss2 (NM_013782.2,385-403).
gctaaagacgggccatttt

SEQ ID NO: 598920 - DNA, 19 bp, Mus musculus
  siRNA target sequence for Ptdss2 (NM_013782.2,427-445).
cggttttggctgtgtgtta

SEQ ID NO: 598921 - DNA, 19 bp, Mus musculus
  siRNA target sequence for Ptdss2 (NM_013782.2,442-460).
gttagtgtggtctacgaat

SEQ ID NO: 598922 - DNA, 19 bp, Mus musculus
  siRNA target sequence for Ptdss2 (NM_013782.2,446-464).
gtgtggtctacgaattgtt

SEQ ID NO: 598923 - DNA, 19 bp, Mus musculus
  siRNA target sequence for Ptdss2 (NM_013782.2,451-469).
gtctacgaattgtttctca

SEQ ID NO: 598924 - DNA, 19 bp, Mus musculus
  siRNA target sequence for Ptdss2 (NM_013782.2,492-510).
ccaggatggccgacagttt

SEQ ID NO: 598925 - DNA, 19 bp, Mus musculus
  siRNA target sequence for Ptdss2 (NM_013782.2,496-514).
gatggccgacagtttctga

SEQ ID NO: 598926 - DNA, 19 bp, Mus musculus
  siRNA target sequence for Ptdss2 (NM_013782.2,500-518).
gccgacagtttctgaagta

SEQ ID NO: 598927 - DNA, 19 bp, Mus musculus
  siRNA target sequence for Ptdss2 (NM_013782.2,501-519).
ccgacagtttctgaagtat

SEQ ID NO: 598928 - DNA, 19 bp, Mus musculus
  siRNA target sequence for Ptdss2 (NM_013782.2,503-521).
gacagtttctgaagtatgt

SEQ ID NO: 598929 - DNA, 19 bp, Mus musculus
  siRNA target sequence for Ptdss2 (NM_013782.2,564-582).
gggcaactgcctcatctat

SEQ ID NO: 598930 - DNA, 19 bp, Mus musculus
  siRNA target sequence for Ptdss2 (NM_013782.2,566-584).
gcaactgcctcatctatga

SEQ ID NO: 598931 - DNA, 19 bp, Mus musculus
  siRNA target sequence for Ptdss2 (NM_013782.2,567-585).
caactgcctcatctatgat

SEQ ID NO: 598932 - DNA, 19 bp, Mus musculus
  siRNA target sequence for Ptdss2 (NM_013782.2,599-617).
ctgaccctttccacaacat

SEQ ID NO: 598933 - DNA, 19 bp, Mus musculus
  siRNA target sequence for Ptdss2 (NM_013782.2,773-791).
gctggtgggaccattggat

SEQ ID NO: 598934 - DNA, 19 bp, Mus musculus
  siRNA target sequence for Ptdss2 (NM_013782.2,853-871).
ctgtccctgaagacatata

SEQ ID NO: 598935 - DNA, 19 bp, Mus musculus
  siRNA target sequence for Ptdss2 (NM_013782.2,880-898).
ggcctctggaacattccaa

SEQ ID NO: 598936 - DNA, 19 bp, Mus musculus
  siRNA target sequence for Ptdss2 (NM_013782.2,1217-1235).
cagtcacagagcttctcat

SEQ ID NO: 598937 - DNA, 19 bp, Mus musculus
  siRNA target sequence for Pgk2 (NM_031190.1,24-42).
gctctttctgctaagttga

SEQ ID NO: 598938 - DNA, 19 bp, Mus musculus
  siRNA target sequence for Pgk2 (NM_031190.1,45-63).
ctggacaaagtggatctta

SEQ ID NO: 598939 - DNA, 19 bp, Mus musculus
  siRNA target sequence for Pgk2 (NM_031190.1,144-162).
gctgccatcccaagtatca

SEQ ID NO: 598940 - DNA, 19 bp, Mus musculus
  siRNA target sequence for Pgk2 (NM_031190.1,145-163).
ctgccatcccaagtatcaa

SEQ ID NO: 598941 - DNA, 19 bp, Mus musculus
  siRNA target sequence for Pgk2 (NM_031190.1,230-248).
ccctatgccagacaagtat

SEQ ID NO: 598942 - DNA, 19 bp, Mus musculus
  siRNA target sequence for Pgk2 (NM_031190.1,231-249).
cctatgccagacaagtatt

SEQ ID NO: 598943 - DNA, 19 bp, Mus musculus
  siRNA target sequence for Pgk2 (NM_031190.1,285-303).
ctgaacaaggacgtcatat

SEQ ID NO: 598944 - DNA, 19 bp, Mus musculus
  siRNA target sequence for Pgk2 (NM_031190.1,351-369).
ccagataatgggtctatca

SEQ ID NO: 598945 - DNA, 19 bp, Mus musculus
  siRNA target sequence for Pgk2 (NM_031190.1,352-370).
cagataatgggtctatcat

SEQ ID NO: 598946 - DNA, 19 bp, Mus musculus
  siRNA target sequence for Pgk2 (NM_031190.1,408-426).
ggtaagggtaaagattctt

SEQ ID NO: 598947 - DNA, 19 bp, Mus musculus
  siRNA target sequence for Pgk2 (NM_031190.1,445-463).
ctgaccctgctaaagtaga

SEQ ID NO: 598948 - DNA, 19 bp, Mus musculus
  siRNA target sequence for Pgk2 (NM_031190.1,484-502).
ctaaacttggcgatgtcta

SEQ ID NO: 598949 - DNA, 19 bp, Mus musculus
  siRNA target sequence for Pgk2 (NM_031190.1,528-546).
catcgggctcacagttcta

SEQ ID NO: 598950 - DNA, 19 bp, Mus musculus
  siRNA target sequence for Pgk2 (NM_031190.1,541-559).
gttctatggtcggagtaaa

SEQ ID NO: 598951 - DNA, 19 bp, Mus musculus
  siRNA target sequence for Pgk2 (NM_031190.1,573-591).
gcatctggtttccttatga

SEQ ID NO: 598952 - DNA, 19 bp, Mus musculus
  siRNA target sequence for Pgk2 (NM_031190.1,574-592).
catctggtttccttatgaa

SEQ ID NO: 598953 - DNA, 19 bp, Mus musculus
  siRNA target sequence for Pgk2 (NM_031190.1,654-672).
cttggtggagccaaagtga

SEQ ID NO: 598954 - DNA, 19 bp, Mus musculus
  siRNA target sequence for Pgk2 (NM_031190.1,658-676).
gtggagccaaagtgaaaga

SEQ ID NO: 598955 - DNA, 19 bp, Mus musculus
  siRNA target sequence for Pgk2 (NM_031190.1,677-695).
caagatccaactcattaaa

SEQ ID NO: 598956 - DNA, 19 bp, Mus musculus
  siRNA target sequence for Pgk2 (NM_031190.1,784-802).
cttccttgtttgatgaaga

SEQ ID NO: 598957 - DNA, 19 bp, Mus musculus
  siRNA target sequence for Pgk2 (NM_031190.1,801-819).
gagggagccacgattgtta

SEQ ID NO: 598958 - DNA, 19 bp, Mus musculus
  siRNA target sequence for Pgk2 (NM_031190.1,803-821).
gggagccacgattgttaaa

SEQ ID NO: 598959 - DNA, 19 bp, Mus musculus
  siRNA target sequence for Pgk2 (NM_031190.1,845-863).
gaatggtgtaaagatagtt

SEQ ID NO: 598960 - DNA, 19 bp, Mus musculus
  siRNA target sequence for Pgk2 (NM_031190.1,893-911).
gtttgatgagaatgctaaa

SEQ ID NO: 598961 - DNA, 19 bp, Mus musculus
  siRNA target sequence for Pgk2 (NM_031190.1,915-933).
ggacaagccactatagaat

SEQ ID NO: 598962 - DNA, 19 bp, Mus musculus
  siRNA target sequence for Pgk2 (NM_031190.1,923-941).
cactatagaatctggtata

SEQ ID NO: 598963 - DNA, 19 bp, Mus musculus
  siRNA target sequence for Pgk2 (NM_031190.1,1006-1024).
cccaagcaaagctgatagt

SEQ ID NO: 598964 - DNA, 19 bp, Mus musculus
  siRNA target sequence for Pgk2 (NM_031190.1,1055-1073).
ggatgcctttgctaaagga

SEQ ID NO: 598965 - DNA, 19 bp, Mus musculus
  siRNA target sequence for Pgk2 (NM_031190.1,1083-1101).
ctcatggatgaagttgtaa

SEQ ID NO: 598966 - DNA, 19 bp, Mus musculus
  siRNA target sequence for Pycs (NM_019698.1,189-207).
cttcaggcaacgtcttcta

SEQ ID NO: 598967 - DNA, 19 bp, Mus musculus
  siRNA target sequence for Pycs (NM_019698.1,252-270).
gccctcagctattagacat

SEQ ID NO: 598968 - DNA, 19 bp, Mus musculus
  siRNA target sequence for Pycs (NM_019698.1,281-299).
ggagcaacatcccctttat

SEQ ID NO: 598969 - DNA, 19 bp, Mus musculus
  siRNA target sequence for Pycs (NM_019698.1,352-370).
ctgaagcacgccaagagaa

SEQ ID NO: 598970 - DNA, 19 bp, Mus musculus
  siRNA target sequence for Pycs (NM_019698.1,434-452).
gcctggcatctattgttga

SEQ ID NO: 598971 - DNA, 19 bp, Mus musculus
  siRNA target sequence for Pycs (NM_019698.1,435-453).
cctggcatctattgttgaa

SEQ ID NO: 598972 - DNA, 19 bp, Mus musculus
  siRNA target sequence for Pycs (NM_019698.1,666-684).
cttgtacgaggccatgttt

SEQ ID NO: 598973 - DNA, 19 bp, Mus musculus
  siRNA target sequence for Pycs (NM_019698.1,799-817).
gtccccatcgtcaacacaa

SEQ ID NO: 598974 - DNA, 19 bp, Mus musculus
  siRNA target sequence for Pycs (NM_019698.1,804-822).
catcgtcaacacaaacgat

SEQ ID NO: 598975 - DNA, 19 bp, Mus musculus
  siRNA target sequence for Pycs (NM_019698.1,840-858).
cgagcccaacagtgatctt

SEQ ID NO: 598976 - DNA, 19 bp, Mus musculus
  siRNA target sequence for Pycs (NM_019698.1,861-879).
gggggtaaatgtgattagt

SEQ ID NO: 598977 - DNA, 19 bp, Mus musculus
  siRNA target sequence for Pycs (NM_019698.1,863-881).
gggtaaatgtgattagtgt

SEQ ID NO: 598978 - DNA, 19 bp, Mus musculus
  siRNA target sequence for Pycs (NM_019698.1,864-882).
ggtaaatgtgattagtgtt

SEQ ID NO: 598979 - DNA, 19 bp, Mus musculus
  siRNA target sequence for Pycs (NM_019698.1,865-883).
gtaaatgtgattagtgtta

SEQ ID NO: 598980 - DNA, 19 bp, Mus musculus
  siRNA target sequence for Pycs (NM_019698.1,873-891).
gattagtgttaaggataat

SEQ ID NO: 598981 - DNA, 19 bp, Mus musculus
  siRNA target sequence for Pycs (NM_019698.1,924-942).
gaaaaccgacctcttgatt

SEQ ID NO: 598982 - DNA, 19 bp, Mus musculus
  siRNA target sequence for Pycs (NM_019698.1,955-973).
gtagaaggcctctttgaca

SEQ ID NO: 598983 - DNA, 19 bp, Mus musculus
  siRNA target sequence for Pycs (NM_019698.1,994-1012).
gcaaagctcattgatatat

SEQ ID NO: 598984 - DNA, 19 bp, Mus musculus
  siRNA target sequence for Pycs (NM_019698.1,1275-1293).
gagaatgctggctacctta

SEQ ID NO: 598985 - DNA, 19 bp, Mus musculus
  siRNA target sequence for Pycs (NM_019698.1,1305-1323).
gagagctgaaattatcaat

SEQ ID NO: 598986 - DNA, 19 bp, Mus musculus
  siRNA target sequence for Pycs (NM_019698.1,1310-1328).
ctgaaattatcaatcatct

SEQ ID NO: 598987 - DNA, 19 bp, Mus musculus
  siRNA target sequence for Pycs (NM_019698.1,1343-1361).
cggaccagcgggaagagat

SEQ ID NO: 598988 - DNA, 19 bp, Mus musculus
  siRNA target sequence for Pycs (NM_019698.1,1359-1377).
gatcctgttagccaacaaa

SEQ ID NO: 598989 - DNA, 19 bp, Mus musculus
  siRNA target sequence for Pycs (NM_019698.1,1365-1383).
gttagccaacaaaaaagat

SEQ ID NO: 598990 - DNA, 19 bp, Mus musculus
  siRNA target sequence for Pycs (NM_019698.1,1435-1453).
ctctccacgtccaaactga

SEQ ID NO: 598991 - DNA, 19 bp, Mus musculus
  siRNA target sequence for Pycs (NM_019698.1,1526-1544).
ctcggattgccaaaaacct

SEQ ID NO: 598992 - DNA, 19 bp, Mus musculus
  siRNA target sequence for Pycs (NM_019698.1,1747-1765).
gccatacagctggtaaaca

SEQ ID NO: 598993 - DNA, 19 bp, Mus musculus
  siRNA target sequence for Pycs (NM_019698.1,1786-1804).
ctctgccgccttgacaaaa

SEQ ID NO: 598994 - DNA, 19 bp, Mus musculus
  siRNA target sequence for Pycs (NM_019698.1,1788-1806).
ctgccgccttgacaaaata

SEQ ID NO: 598995 - DNA, 19 bp, Mus musculus
  siRNA target sequence for Pycs (NM_019698.1,1790-1808).
gccgccttgacaaaataat

SEQ ID NO: 598996 - DNA, 19 bp, Mus musculus
  siRNA target sequence for Pycs (NM_019698.1,1791-1809).
ccgccttgacaaaataata

SEQ ID NO: 598997 - DNA, 19 bp, Mus musculus
  siRNA target sequence for Pycs (NM_019698.1,1949-1967).
gactcgtcagagactctaa

SEQ ID NO: 598998 - DNA, 19 bp, Mus musculus
  siRNA target sequence for Pycs (NM_019698.1,1951-1969).
ctcgtcagagactctaaat

SEQ ID NO: 598999 - DNA, 19 bp, Mus musculus
  siRNA target sequence for Pycs (NM_019698.1,1953-1971).
cgtcagagactctaaatgt

SEQ ID NO: 599000 - DNA, 19 bp, Mus musculus
  siRNA target sequence for Pycs (NM_019698.1,2025-2043).
gctgagaacacccttattt

SEQ ID NO: 599001 - DNA, 19 bp, Mus musculus
  siRNA target sequence for Pycs (NM_019698.1,2036-2054).
ccttatttgaccagatcat

SEQ ID NO: 599002 - DNA, 19 bp, Mus musculus
  siRNA target sequence for Pycs (NM_019698.1,2037-2055).
cttatttgaccagatcatt

SEQ ID NO: 599003 - DNA, 19 bp, Mus musculus
  siRNA target sequence for Pycs (NM_019698.1,2064-2082).
ccgagtggaacaggtaaaa

SEQ ID NO: 599004 - DNA, 19 bp, Mus musculus
  siRNA target sequence for Pycs (NM_019698.1,2065-2083).
cgagtggaacaggtaaaaa

SEQ ID NO: 599005 - DNA, 19 bp, Mus musculus
  siRNA target sequence for Pycs (NM_019698.1,2066-2084).
gagtggaacaggtaaaaat

SEQ ID NO: 599006 - DNA, 19 bp, Mus musculus
  siRNA target sequence for Pycs (NM_019698.1,2410-2428).
ggacttgagggattgctaa

SEQ ID NO: 599007 - DNA, 19 bp, Mus musculus
  siRNA target sequence for Pycs (NM_019698.1,2419-2437).
ggattgctaactacaaagt

SEQ ID NO: 599008 - DNA, 19 bp, Mus musculus
  siRNA target sequence for Pycs (NM_019698.1,2518-2536).
gttccccagagaaatttca

SEQ ID NO: 599009 - DNA, 19 bp, Mus musculus
  siRNA target sequence for Pycs (NM_153554.1,853-871).
gatcttcagggggtgatta

SEQ ID NO: 599010 - DNA, 19 bp, Mus musculus
  siRNA target sequence for Pycs (NM_153554.1,859-877).
cagggggtgattagtgtta

SEQ ID NO: 599011 - DNA, 19 bp, Mus musculus
  siRNA target sequence for Tpt1h (NM_153597.1,313-331).
cagttccacagcttttcca

SEQ ID NO: 599012 - DNA, 19 bp, Mus musculus
  siRNA target sequence for Tpt1h (NM_153597.1,315-333).
gttccacagcttttccatt

SEQ ID NO: 599013 - DNA, 19 bp, Mus musculus
  siRNA target sequence for Tpt1h (NM_153597.1,340-358).
gtgcagctcgtggtcaata

SEQ ID NO: 599014 - DNA, 19 bp, Mus musculus
  siRNA target sequence for Tpt1h (NM_153597.1,525-543).
ctggccatctattctacta

SEQ ID NO: 599015 - DNA, 19 bp, Mus musculus
  siRNA target sequence for Tpt1h (NM_153597.1,527-545).
ggccatctattctactaaa

SEQ ID NO: 599016 - DNA, 19 bp, Mus musculus
  siRNA target sequence for Tpt1h (NM_153597.1,615-633).
cagcggcattcgtccaaat

SEQ ID NO: 599017 - DNA, 19 bp, Mus musculus
  siRNA target sequence for Tpt1h (NM_153597.1,618-636).
cggcattcgtccaaattgt

SEQ ID NO: 599018 - DNA, 19 bp, Mus musculus
  siRNA target sequence for Tpt1h (NM_153597.1,635-653).
gtgaggtggcggtgttcat

SEQ ID NO: 599019 - DNA, 19 bp, Mus musculus
  siRNA target sequence for Tpt1h (NM_153597.1,674-692).
cagatggaatccctttctt

SEQ ID NO: 599020 - DNA, 19 bp, Mus musculus
  siRNA target sequence for Tpt1h (NM_153597.1,676-694).
gatggaatccctttcttct

SEQ ID NO: 599021 - DNA, 19 bp, Mus musculus
  siRNA target sequence for Tpt1h (NM_153597.1,696-714).
ctccgccaatggtgtgatt

SEQ ID NO: 599022 - DNA, 19 bp, Mus musculus
  siRNA target sequence for Tpt1h (NM_153597.1,698-716).
ccgccaatggtgtgattct

SEQ ID NO: 599023 - DNA, 19 bp, Mus musculus
  siRNA target sequence for B3galt1 (NM_020283.1,72-90).
cataaccagacctacttca

SEQ ID NO: 599024 - DNA, 19 bp, Mus musculus
  siRNA target sequence for B3galt1 (NM_020283.1,110-128).
cgttcagtcacctaacagt

SEQ ID NO: 599025 - DNA, 19 bp, Mus musculus
  siRNA target sequence for B3galt1 (NM_020283.1,111-129).
gttcagtcacctaacagtt

SEQ ID NO: 599026 - DNA, 19 bp, Mus musculus
  siRNA target sequence for B3galt1 (NM_020283.1,121-139).
ctaacagttgccaggaaaa

SEQ ID NO: 599027 - DNA, 19 bp, Mus musculus
  siRNA target sequence for B3galt1 (NM_020283.1,141-159).
cttcacctttggcaacata

SEQ ID NO: 599028 - DNA, 19 bp, Mus musculus
  siRNA target sequence for B3galt1 (NM_020283.1,156-174).
cataagaactcgacctata

SEQ ID NO: 599029 - DNA, 19 bp, Mus musculus
  siRNA target sequence for B3galt1 (NM_020283.1,169-187).
cctataaacccacattctt

SEQ ID NO: 599030 - DNA, 19 bp, Mus musculus
  siRNA target sequence for B3galt1 (NM_020283.1,209-227).
ccaacaagtgcgagaaaaa

SEQ ID NO: 599031 - DNA, 19 bp, Mus musculus
  siRNA target sequence for B3galt1 (NM_020283.1,213-231).
caagtgcgagaaaaacatt

SEQ ID NO: 599032 - DNA, 19 bp, Mus musculus
  siRNA target sequence for B3galt1 (NM_020283.1,218-236).
gcgagaaaaacattccttt

SEQ ID NO: 599033 - DNA, 19 bp, Mus musculus
  siRNA target sequence for B3galt1 (NM_020283.1,238-256).
ctcgtgatcctcattagca

SEQ ID NO: 599034 - DNA, 19 bp, Mus musculus
  siRNA target sequence for B3galt1 (NM_020283.1,305-323).
gggatgaaaacaacttcaa

SEQ ID NO: 599035 - DNA, 19 bp, Mus musculus
  siRNA target sequence for B3galt1 (NM_020283.1,439-457).
gactcctaccacaatctca

SEQ ID NO: 599036 - DNA, 19 bp, Mus musculus
  siRNA target sequence for B3galt1 (NM_020283.1,448-466).
cacaatctcaccctcaaaa

SEQ ID NO: 599037 - DNA, 19 bp, Mus musculus
  siRNA target sequence for B3galt1 (NM_020283.1,588-606).
caagccaagaagaaggtat

SEQ ID NO: 599038 - DNA, 19 bp, Mus musculus
  siRNA target sequence for B3galt1 (NM_020283.1,646-664).
gtccgcagtaagtggtata

SEQ ID NO: 599039 - DNA, 19 bp, Mus musculus
  siRNA target sequence for B3galt1 (NM_020283.1,657-675).
gtggtatatgcctagagat

SEQ ID NO: 599040 - DNA, 19 bp, Mus musculus
  siRNA target sequence for B3galt1 (NM_020283.1,659-677).
ggtatatgcctagagattt

SEQ ID NO: 599041 - DNA, 19 bp, Mus musculus
  siRNA target sequence for B3galt1 (NM_020283.1,712-730).
gggactggctatatctttt

SEQ ID NO: 599042 - DNA, 19 bp, Mus musculus
  siRNA target sequence for B3galt1 (NM_020283.1,742-760).
gctgaactcatttacaaga

SEQ ID NO: 599043 - DNA, 19 bp, Mus musculus
  siRNA target sequence for B3galt1 (NM_020283.1,774-792).
caggctgcttcatcttgaa

SEQ ID NO: 599044 - DNA, 19 bp, Mus musculus
  siRNA target sequence for B3galt2 (NM_020025.2,744-762).
gacactgctgctttgcaaa

SEQ ID NO: 599045 - DNA, 19 bp, Mus musculus
  siRNA target sequence for B3galt2 (NM_020025.2,873-891).
caggtagaccaggattcaa

SEQ ID NO: 599046 - DNA, 19 bp, Mus musculus
  siRNA target sequence for B3galt2 (NM_020025.2,893-911).
gaaaatcctgtgacataca

SEQ ID NO: 599047 - DNA, 19 bp, Mus musculus
  siRNA target sequence for B3galt2 (NM_020025.2,910-928).
cactttccgaggatttcgt

SEQ ID NO: 599048 - DNA, 19 bp, Mus musculus
  siRNA target sequence for B3galt2 (NM_020025.2,916-934).
ccgaggatttcgttctaca

SEQ ID NO: 599049 - DNA, 19 bp, Mus musculus
  siRNA target sequence for B3galt2 (NM_020025.2,917-935).
cgaggatttcgttctacaa

SEQ ID NO: 599050 - DNA, 19 bp, Mus musculus
  siRNA target sequence for B3galt2 (NM_020025.2,918-936).
gaggatttcgttctacaaa

SEQ ID NO: 599051 - DNA, 19 bp, Mus musculus
  siRNA target sequence for B3galt2 (NM_020025.2,920-938).
ggatttcgttctacaaaaa

SEQ ID NO: 599052 - DNA, 19 bp, Mus musculus
  siRNA target sequence for B3galt2 (NM_020025.2,964-982).
gaccatctggaaagaagta

SEQ ID NO: 599053 - DNA, 19 bp, Mus musculus
  siRNA target sequence for B3galt2 (NM_020025.2,1082-1100).
ggcagcatttataatgaaa

SEQ ID NO: 599054 - DNA, 19 bp, Mus musculus
  siRNA target sequence for B3galt2 (NM_020025.2,1083-1101).
gcagcatttataatgaaaa

SEQ ID NO: 599055 - DNA, 19 bp, Mus musculus
  siRNA target sequence for B3galt2 (NM_020025.2,1216-1234).
cgaagcaagaagagctata

SEQ ID NO: 599056 - DNA, 19 bp, Mus musculus
  siRNA target sequence for B3galt2 (NM_020025.2,1263-1281).
cacctggcatccaaatcat

SEQ ID NO: 599057 - DNA, 19 bp, Mus musculus
  siRNA target sequence for B3galt2 (NM_020025.2,1273-1291).
ccaaatcatacgggttttt

SEQ ID NO: 599058 - DNA, 19 bp, Mus musculus
  siRNA target sequence for B3galt2 (NM_020025.2,1274-1292).
caaatcatacgggtttttt

SEQ ID NO: 599059 - DNA, 19 bp, Mus musculus
  siRNA target sequence for B3galt2 (NM_020025.2,1297-1315).
gggcataagtattaagcta

SEQ ID NO: 599060 - DNA, 19 bp, Mus musculus
  siRNA target sequence for B3galt2 (NM_020025.2,1300-1318).
cataagtattaagctaaat

SEQ ID NO: 599061 - DNA, 19 bp, Mus musculus
  siRNA target sequence for B3galt2 (NM_020025.2,1312-1330).
gctaaatggctatcttcaa

SEQ ID NO: 599062 - DNA, 19 bp, Mus musculus
  siRNA target sequence for B3galt2 (NM_020025.2,1320-1338).
gctatcttcaacatgcaat

SEQ ID NO: 599063 - DNA, 19 bp, Mus musculus
  siRNA target sequence for B3galt2 (NM_020025.2,1321-1339).
ctatcttcaacatgcaatt

SEQ ID NO: 599064 - DNA, 19 bp, Mus musculus
  siRNA target sequence for B3galt2 (NM_020025.2,1350-1368).
gcagacagtatcatgatat

SEQ ID NO: 599065 - DNA, 19 bp, Mus musculus
  siRNA target sequence for B3galt2 (NM_020025.2,1388-1406).
gatacatactataatctga

SEQ ID NO: 599066 - DNA, 19 bp, Mus musculus
  siRNA target sequence for B3galt2 (NM_020025.2,1396-1414).
ctataatctgaccattaaa

SEQ ID NO: 599067 - DNA, 19 bp, Mus musculus
  siRNA target sequence for B3galt2 (NM_020025.2,1432-1450).
ctgggttgcaacatactgt

SEQ ID NO: 599068 - DNA, 19 bp, Mus musculus
  siRNA target sequence for B3galt2 (NM_020025.2,1451-1469).
ccacatactccctatgtta

SEQ ID NO: 599069 - DNA, 19 bp, Mus musculus
  siRNA target sequence for B3galt2 (NM_020025.2,1452-1470).
cacatactccctatgttat

SEQ ID NO: 599070 - DNA, 19 bp, Mus musculus
  siRNA target sequence for B3galt2 (NM_020025.2,1507-1525).
cttaatacacaagttacta

SEQ ID NO: 599071 - DNA, 19 bp, Mus musculus
  siRNA target sequence for B3galt2 (NM_020025.2,1537-1555).
gcctcctagacataactat

SEQ ID NO: 599072 - DNA, 19 bp, Mus musculus
  siRNA target sequence for B3galt2 (NM_020025.2,1539-1557).
ctcctagacataactattt

SEQ ID NO: 599073 - DNA, 19 bp, Mus musculus
  siRNA target sequence for B3galt2 (NM_020025.2,1541-1559).
cctagacataactatttta

SEQ ID NO: 599074 - DNA, 19 bp, Mus musculus
  siRNA target sequence for B3galt2 (NM_020025.2,1687-1705).
ggatctggcagagaagata

SEQ ID NO: 599075 - DNA, 19 bp, Mus musculus
  siRNA target sequence for B3galt2 (NM_020025.2,1688-1706).
gatctggcagagaagatat

SEQ ID NO: 599076 - DNA, 19 bp, Mus musculus
  siRNA target sequence for B3galt2 (NM_020025.2,1731-1749).
gtttgcacttggaagatgt

SEQ ID NO: 599077 - DNA, 19 bp, Mus musculus
  siRNA target sequence for B3galt2 (NM_020025.2,1790-1808).
gtgccccctcccaatgagt

SEQ ID NO: 599078 - DNA, 19 bp, Mus musculus
  siRNA target sequence for B3galt2 (NM_020025.2,1822-1840).
ctggcgagtttcttattca

SEQ ID NO: 599079 - DNA, 19 bp, Mus musculus
  siRNA target sequence for B3galt2 (NM_020025.2,1845-1863).
gtaaatacagccacctaat

SEQ ID NO: 599080 - DNA, 19 bp, Mus musculus
  siRNA target sequence for B3galt2 (NM_020025.2,1903-1921).
ctggaaccatttacaacaa

SEQ ID NO: 599081 - DNA, 19 bp, Mus musculus
  siRNA target sequence for B3galt2 (NM_020025.2,1969-1987).
gtatcgacaccgcaaacta

SEQ ID NO: 599082 - DNA, 19 bp, Mus musculus
  siRNA target sequence for B3galt6 (NM_080445.2,99-117).
gcggcaccactctgttgta

SEQ ID NO: 599083 - DNA, 19 bp, Mus musculus
  siRNA target sequence for B3galt6 (NM_080445.2,630-648).
ggcaactctgcgactacta

SEQ ID NO: 599084 - DNA, 19 bp, Mus musculus
  siRNA target sequence for B3galt6 (NM_080445.2,684-702).
ctgcggacctggtgcatta

SEQ ID NO: 599085 - DNA, 19 bp, Mus musculus
  siRNA target sequence for B3galt6 (NM_080445.2,804-822).
gcttcgacacggagtacaa

SEQ ID NO: 599086 - DNA, 19 bp, Mus musculus
  siRNA target sequence for B3galt6 (NM_080445.2,805-823).
cttcgacacggagtacaaa

SEQ ID NO: 599087 - DNA, 19 bp, Mus musculus
  siRNA target sequence for B3galt6 (NM_080445.2,827-845).
cgaggctgcaacaatcagt

SEQ ID NO: 599088 - DNA, 19 bp, Mus musculus
  siRNA target sequence for B3galt6 (NM_080445.2,828-846).
gaggctgcaacaatcagta

SEQ ID NO: 599089 - DNA, 19 bp, Mus musculus
  siRNA target sequence for B3galt6 (NM_080445.2,848-866).
ctggtgacacacaagcaaa

SEQ ID NO: 599090 - DNA, 19 bp, Mus musculus
  siRNA target sequence for B3galt6 (NM_080445.2,940-958).
gcgcctttcctatgtctat

SEQ ID NO: 599091 - DNA, 19 bp, Mus musculus
  siRNA target sequence for B3galt6 (NM_080445.2,944-962).
ctttcctatgtctatgact

SEQ ID NO: 599092 - DNA, 19 bp, Mus musculus
  siRNA target sequence for B4galt1 (NM_022305.2,296-314).
ggcgtcaccctcgtctatt

SEQ ID NO: 599093 - DNA, 19 bp, Mus musculus
  siRNA target sequence for B4galt1 (NM_022305.2,297-315).
gcgtcaccctcgtctatta

SEQ ID NO: 599094 - DNA, 19 bp, Mus musculus
  siRNA target sequence for B4galt1 (NM_022305.2,611-629).
ggccccatgctgattgact

SEQ ID NO: 599095 - DNA, 19 bp, Mus musculus
  siRNA target sequence for B4galt1 (NM_022305.2,614-632).
cccatgctgattgacttta

SEQ ID NO: 599096 - DNA, 19 bp, Mus musculus
  siRNA target sequence for B4galt1 (NM_022305.2,615-633).
ccatgctgattgactttaa

SEQ ID NO: 599097 - DNA, 19 bp, Mus musculus
  siRNA target sequence for B4galt1 (NM_022305.2,619-637).
gctgattgactttaatatt

SEQ ID NO: 599098 - DNA, 19 bp, Mus musculus
  siRNA target sequence for B4galt1 (NM_022305.2,622-640).
gattgactttaatattgct

SEQ ID NO: 599099 - DNA, 19 bp, Mus musculus
  siRNA target sequence for B4galt1 (NM_022305.2,754-772).
ccggcaggagcatctcaaa

SEQ ID NO: 599100 - DNA, 19 bp, Mus musculus
  siRNA target sequence for B4galt1 (NM_022305.2,758-776).
caggagcatctcaaatact

SEQ ID NO: 599101 - DNA, 19 bp, Mus musculus
  siRNA target sequence for B4galt1 (NM_022305.2,769-787).
caaatactggctgtattat

SEQ ID NO: 599102 - DNA, 19 bp, Mus musculus
  siRNA target sequence for B4galt1 (NM_022305.2,775-793).
ctggctgtattatttgcat

SEQ ID NO: 599103 - DNA, 19 bp, Mus musculus
  siRNA target sequence for B4galt1 (NM_022305.2,866-884).
cgagctaagctgctcaata

SEQ ID NO: 599104 - DNA, 19 bp, Mus musculus
  siRNA target sequence for B4galt1 (NM_022305.2,867-885).
gagctaagctgctcaatat

SEQ ID NO: 599105 - DNA, 19 bp, Mus musculus
  siRNA target sequence for B4galt1 (NM_022305.2,877-895).
gctcaatattggctttcaa

SEQ ID NO: 599106 - DNA, 19 bp, Mus musculus
  siRNA target sequence for B4galt1 (NM_022305.2,899-917).
gccttgaaggactatgatt

SEQ ID NO: 599107 - DNA, 19 bp, Mus musculus
  siRNA target sequence for B4galt1 (NM_022305.2,900-918).
ccttgaaggactatgatta

SEQ ID NO: 599108 - DNA, 19 bp, Mus musculus
  siRNA target sequence for B4galt1 (NM_022305.2,1027-1045).
gtttagcctgccatatgtt

SEQ ID NO: 599109 - DNA, 19 bp, Mus musculus
  siRNA target sequence for B4galt1 (NM_022305.2,1033-1051).
cctgccatatgttcagtat

SEQ ID NO: 599110 - DNA, 19 bp, Mus musculus
  siRNA target sequence for B4galt1 (NM_022305.2,1059-1077).
gtgtctctgctctcagtaa

SEQ ID NO: 599111 - DNA, 19 bp, Mus musculus
  siRNA target sequence for B4galt1 (NM_022305.2,1072-1090).
cagtaaacaacagtttctt

SEQ ID NO: 599112 - DNA, 19 bp, Mus musculus
  siRNA target sequence for B4galt1 (NM_022305.2,1136-1154).
gatgacgacatttttaaca

SEQ ID NO: 599113 - DNA, 19 bp, Mus musculus
  siRNA target sequence for B4galt1 (NM_022305.2,1139-1157).
gacgacatttttaacagat

SEQ ID NO: 599114 - DNA, 19 bp, Mus musculus
  siRNA target sequence for B4galt1 (NM_022305.2,1211-1229).
cgaatgatccggcattcaa

SEQ ID NO: 599115 - DNA, 19 bp, Mus musculus
  siRNA target sequence for B4galt1 (NM_022305.2,1221-1239).
ggcattcaagagacaagaa

SEQ ID NO: 599116 - DNA, 19 bp, Mus musculus
  siRNA target sequence for B4galt1 (NM_022305.2,1265-1283).
gaccggatcgcacatacaa

SEQ ID NO: 599117 - DNA, 19 bp, Mus musculus
  siRNA target sequence for B4galt1 (NM_022305.2,1270-1288).
gatcgcacatacaaaggaa

SEQ ID NO: 599118 - DNA, 19 bp, Mus musculus
  siRNA target sequence for B4galt1 (NM_022305.2,1295-1313).
cgcttcgatggtttgaact

SEQ ID NO: 599119 - DNA, 19 bp, Mus musculus
  siRNA target sequence for B4galt1 (NM_022305.2,1305-1323).
gtttgaactcacttaccta

SEQ ID NO: 599120 - DNA, 19 bp, Mus musculus
  siRNA target sequence for B4galt1 (NM_022305.2,1340-1358).
cagagatacccgttatata

SEQ ID NO: 599121 - DNA, 19 bp, Mus musculus
  siRNA target sequence for B4galt1 (NM_022305.2,1349-1367).
ccgttatatacccaaatca

SEQ ID NO: 599122 - DNA, 19 bp, Mus musculus
  siRNA target sequence for B4galt1 (NM_022305.2,1351-1369).
gttatatacccaaatcaca

SEQ ID NO: 599123 - DNA, 19 bp, Mus musculus
  siRNA target sequence for Ugt8 (NM_011674.2,98-116).
gaagtcttacactccatat

SEQ ID NO: 599124 - DNA, 19 bp, Mus musculus
  siRNA target sequence for Ugt8 (NM_011674.2,148-166).
caagggctgctaaaatcat

SEQ ID NO: 599125 - DNA, 19 bp, Mus musculus
  siRNA target sequence for Ugt8 (NM_011674.2,173-191).
gccgccaattatgtttgaa

SEQ ID NO: 599126 - DNA, 19 bp, Mus musculus
  siRNA target sequence for Ugt8 (NM_011674.2,174-192).
ccgccaattatgtttgaaa

SEQ ID NO: 599127 - DNA, 19 bp, Mus musculus
  siRNA target sequence for Ugt8 (NM_011674.2,274-292).
gagacattgccccatctaa

SEQ ID NO: 599128 - DNA, 19 bp, Mus musculus
  siRNA target sequence for Ugt8 (NM_011674.2,383-401).
gagattgacagcagttgaa

SEQ ID NO: 599129 - DNA, 19 bp, Mus musculus
  siRNA target sequence for Ugt8 (NM_011674.2,385-403).
gattgacagcagttgaact

SEQ ID NO: 599130 - DNA, 19 bp, Mus musculus
  siRNA target sequence for Ugt8 (NM_011674.2,408-426).
gacatactggatcactata

SEQ ID NO: 599131 - DNA, 19 bp, Mus musculus
  siRNA target sequence for Ugt8 (NM_011674.2,410-428).
catactggatcactatact

SEQ ID NO: 599132 - DNA, 19 bp, Mus musculus
  siRNA target sequence for Ugt8 (NM_011674.2,414-432).
ctggatcactatactaaga

SEQ ID NO: 599133 - DNA, 19 bp, Mus musculus
  siRNA target sequence for Ugt8 (NM_011674.2,427-445).
ctaagaattgtgacatgat

SEQ ID NO: 599134 - DNA, 19 bp, Mus musculus
  siRNA target sequence for Ugt8 (NM_011674.2,462-480).
ctaatccagggtttaaaaa

SEQ ID NO: 599135 - DNA, 19 bp, Mus musculus
  siRNA target sequence for Ugt8 (NM_011674.2,504-522).
gttgaccccaatgatatgt

SEQ ID NO: 599136 - DNA, 19 bp, Mus musculus
  siRNA target sequence for Ugt8 (NM_011674.2,516-534).
gatatgtgtggatttgtga

SEQ ID NO: 599137 - DNA, 19 bp, Mus musculus
  siRNA target sequence for Ugt8 (NM_011674.2,540-558).
catcttttaggcgttaagt

SEQ ID NO: 599138 - DNA, 19 bp, Mus musculus
  siRNA target sequence for Ugt8 (NM_011674.2,551-569).
cgttaagtatgctgtattt

SEQ ID NO: 599139 - DNA, 19 bp, Mus musculus
  siRNA target sequence for Ugt8 (NM_011674.2,552-570).
gttaagtatgctgtatttt

SEQ ID NO: 599140 - DNA, 19 bp, Mus musculus
  siRNA target sequence for Ugt8 (NM_011674.2,607-625).
ctgctcctttagcttatgt

SEQ ID NO: 599141 - DNA, 19 bp, Mus musculus
  siRNA target sequence for Ugt8 (NM_011674.2,619-637).
cttatgtcccagagtttaa

SEQ ID NO: 599142 - DNA, 19 bp, Mus musculus
  siRNA target sequence for Ugt8 (NM_011674.2,687-705).
ggtgtttacctcatatcca

SEQ ID NO: 599143 - DNA, 19 bp, Mus musculus
  siRNA target sequence for Ugt8 (NM_011674.2,703-721).
ccagaataggggttagctt

SEQ ID NO: 599144 - DNA, 19 bp, Mus musculus
  siRNA target sequence for Ugt8 (NM_011674.2,704-722).
cagaataggggttagcttt

SEQ ID NO: 599145 - DNA, 19 bp, Mus musculus
  siRNA target sequence for Ugt8 (NM_011674.2,726-744).
gttctcccgaaatatgaga

SEQ ID NO: 599146 - DNA, 19 bp, Mus musculus
  siRNA target sequence for Ugt8 (NM_011674.2,733-751).
cgaaatatgagaggataat

SEQ ID NO: 599147 - DNA, 19 bp, Mus musculus
  siRNA target sequence for Ugt8 (NM_011674.2,774-792).
gcaaagtccatgtatgatt

SEQ ID NO: 599148 - DNA, 19 bp, Mus musculus
  siRNA target sequence for Ugt8 (NM_011674.2,779-797).
gtccatgtatgatttggtt

SEQ ID NO: 599149 - DNA, 19 bp, Mus musculus
  siRNA target sequence for Ugt8 (NM_011674.2,809-827).
cctatggatgttatgtact

SEQ ID NO: 599150 - DNA, 19 bp, Mus musculus
  siRNA target sequence for Ugt8 (NM_011674.2,1033-1051).
ggagattgcctcaaaaagt

SEQ ID NO: 599151 - DNA, 19 bp, Mus musculus
  siRNA target sequence for Ugt8 (NM_011674.2,1058-1076).
gagattttctggaaccaaa

SEQ ID NO: 599152 - DNA, 19 bp, Mus musculus
  siRNA target sequence for Ugt8 (NM_011674.2,1131-1149).
ctgcttggccattcaaata

SEQ ID NO: 599153 - DNA, 19 bp, Mus musculus
  siRNA target sequence for Ugt8 (NM_011674.2,1167-1185).
catggtggtttgaacagta

SEQ ID NO: 599154 - DNA, 19 bp, Mus musculus
  siRNA target sequence for Ugt8 (NM_011674.2,1170-1188).
ggtggtttgaacagtatat

SEQ ID NO: 599155 - DNA, 19 bp, Mus musculus
  siRNA target sequence for Ugt8 (NM_011674.2,1236-1254).
ggagaccattatgatacta

SEQ ID NO: 599156 - DNA, 19 bp, Mus musculus
  siRNA target sequence for Ugt8 (NM_011674.2,1237-1255).
gagaccattatgatactat

SEQ ID NO: 599157 - DNA, 19 bp, Mus musculus
  siRNA target sequence for Ugt8 (NM_011674.2,1241-1259).
ccattatgatactatgact

SEQ ID NO: 599158 - DNA, 19 bp, Mus musculus
  siRNA target sequence for Ugt8 (NM_011674.2,1242-1260).
cattatgatactatgacta

SEQ ID NO: 599159 - DNA, 19 bp, Mus musculus
  siRNA target sequence for Ugt8 (NM_011674.2,1276-1294).
gcatggggatcttgttaga

SEQ ID NO: 599160 - DNA, 19 bp, Mus musculus
  siRNA target sequence for Ugt8 (NM_011674.2,1329-1347).
gccctggtgaaagttatca

SEQ ID NO: 599161 - DNA, 19 bp, Mus musculus
  siRNA target sequence for Ugt8 (NM_011674.2,1331-1349).
cctggtgaaagttatcaat

SEQ ID NO: 599162 - DNA, 19 bp, Mus musculus
  siRNA target sequence for Ugt8 (NM_011674.2,1416-1434).
gtcaatcggactacctatt

SEQ ID NO: 599163 - DNA, 19 bp, Mus musculus
  siRNA target sequence for Ugt8 (NM_011674.2,1426-1444).
ctacctattggatagacta

SEQ ID NO: 599164 - DNA, 19 bp, Mus musculus
  siRNA target sequence for Ugt8 (NM_011674.2,1429-1447).
cctattggatagactacat

SEQ ID NO: 599165 - DNA, 19 bp, Mus musculus
  siRNA target sequence for Ugt8 (NM_011674.2,1430-1448).
ctattggatagactacatt

SEQ ID NO: 599166 - DNA, 19 bp, Mus musculus
  siRNA target sequence for Ugt8 (NM_011674.2,1477-1495).
gttctgctgtccatcagat

SEQ ID NO: 599167 - DNA, 19 bp, Mus musculus
  siRNA target sequence for Ugt8 (NM_011674.2,1548-1566).
gctgtcttgctctacttca

SEQ ID NO: 599168 - DNA, 19 bp, Mus musculus
  siRNA target sequence for Ugt8 (NM_011674.2,1549-1567).
ctgtcttgctctacttcat

SEQ ID NO: 599169 - DNA, 19 bp, Mus musculus
  siRNA target sequence for Ugt8 (NM_011674.2,1636-1654).
cagttaatggacattacca

SEQ ID NO: 599170 - DNA, 19 bp, Mus musculus
  siRNA target sequence for Ugt8 (NM_011674.2,1638-1656).
gttaatggacattaccaaa

SEQ ID NO: 599171 - DNA, 19 bp, Mus musculus
  siRNA target sequence for Ugt8 (NM_011674.2,1645-1663).
gacattaccaaaatggaat

SEQ ID NO: 599172 - DNA, 19 bp, Mus musculus
  siRNA target sequence for Ugt8 (NM_011674.2,1660-1678).
gaatccgcaatggcaaata

SEQ ID NO: 599173 - DNA, 19 bp, Mus musculus
  siRNA target sequence for Ugt8 (NM_011674.2,1664-1682).
ccgcaatggcaaatacaaa

SEQ ID NO: 599174 - DNA, 19 bp, Mus musculus
  siRNA target sequence for Ugt8 (NM_011674.2,1690-1708).
gtcgtgttaaacacgaaaa

SEQ ID NO: 599175 - DNA, 19 bp, Mus musculus
  siRNA target sequence for Ugt8 (NM_011674.2,1692-1710).
cgtgttaaacacgaaaaga

SEQ ID NO: 599176 - DNA, 19 bp, Mus musculus
  siRNA target sequence for Abo (NM_030718.2,145-163).
ccttcccttcgcagtgttt

SEQ ID NO: 599177 - DNA, 19 bp, Mus musculus
  siRNA target sequence for Abo (NM_030718.2,149-167).
cccttcgcagtgtttgtct

SEQ ID NO: 599178 - DNA, 19 bp, Mus musculus
  siRNA target sequence for Abo (NM_030718.2,151-169).
cttcgcagtgtttgtctta

SEQ ID NO: 599179 - DNA, 19 bp, Mus musculus
  siRNA target sequence for Abo (NM_030718.2,330-348).
ccttcaacatcgacatatt

SEQ ID NO: 599180 - DNA, 19 bp, Mus musculus
  siRNA target sequence for Abo (NM_030718.2,334-352).
caacatcgacatattgaat

SEQ ID NO: 599181 - DNA, 19 bp, Mus musculus
  siRNA target sequence for Abo (NM_030718.2,358-376).
gttcaggattcggaatact

SEQ ID NO: 599182 - DNA, 19 bp, Mus musculus
  siRNA target sequence for Abo (NM_030718.2,364-382).
gattcggaatactacgatt

SEQ ID NO: 599183 - DNA, 19 bp, Mus musculus
  siRNA target sequence for Abo (NM_030718.2,378-396).
cgattggactgactgtatt

SEQ ID NO: 599184 - DNA, 19 bp, Mus musculus
  siRNA target sequence for Abo (NM_030718.2,379-397).
gattggactgactgtattt

SEQ ID NO: 599185 - DNA, 19 bp, Mus musculus
  siRNA target sequence for Abo (NM_030718.2,383-401).
ggactgactgtatttgcta

SEQ ID NO: 599186 - DNA, 19 bp, Mus musculus
  siRNA target sequence for Abo (NM_030718.2,384-402).
gactgactgtatttgctat

SEQ ID NO: 599187 - DNA, 19 bp, Mus musculus
  siRNA target sequence for Abo (NM_030718.2,550-568).
gctaactgtgcgcaactat

SEQ ID NO: 599188 - DNA, 19 bp, Mus musculus
  siRNA target sequence for Abo (NM_030718.2,551-569).
ctaactgtgcgcaactata

SEQ ID NO: 599189 - DNA, 19 bp, Mus musculus
  siRNA target sequence for Abo (NM_030718.2,662-680).
gcagatgcggacatgaagt

SEQ ID NO: 599190 - DNA, 19 bp, Mus musculus
  siRNA target sequence for Abo (NM_030718.2,663-681).
cagatgcggacatgaagtt

SEQ ID NO: 599191 - DNA, 19 bp, Mus musculus
  siRNA target sequence for Abo (NM_030718.2,698-716).
gtggagattctctcaacat

SEQ ID NO: 599192 - DNA, 19 bp, Mus musculus
  siRNA target sequence for Abo (NM_030718.2,701-719).
gagattctctcaacattct

SEQ ID NO: 599193 - DNA, 19 bp, Mus musculus
  siRNA target sequence for Abo (NM_030718.2,703-721).
gattctctcaacattcttt

SEQ ID NO: 599194 - DNA, 19 bp, Mus musculus
  siRNA target sequence for Abo (NM_030718.2,753-771).
gccgagaggcctttaccta

SEQ ID NO: 599195 - DNA, 19 bp, Mus musculus
  siRNA target sequence for Abo (NM_030718.2,754-772).
ccgagaggcctttacctat

SEQ ID NO: 599196 - DNA, 19 bp, Mus musculus
  siRNA target sequence for Abo (NM_030718.2,826-844).
ctacggaggagccttcttt

SEQ ID NO: 599197 - DNA, 19 bp, Mus musculus
  siRNA target sequence for Abo (NM_030718.2,846-864).
gggggtcagtgctagaagt

SEQ ID NO: 599198 - DNA, 19 bp, Mus musculus
  siRNA target sequence for Abo (NM_030718.2,945-963).
gctatttgaacaaatacct

SEQ ID NO: 599199 - DNA, 19 bp, Mus musculus
  siRNA target sequence for Abo (NM_030718.2,955-973).
caaatacctgctttaccat

SEQ ID NO: 599200 - DNA, 19 bp, Mus musculus
  siRNA target sequence for Abo (NM_030718.2,1076-1094).
catcaggcaatcagaaact

SEQ ID NO: 599201 - DNA, 19 bp, Mus musculus
  siRNA target sequence for C1galt1 (NM_052993.2,123-141).
gatcagcaatagggttttt

SEQ ID NO: 599202 - DNA, 19 bp, Mus musculus
  siRNA target sequence for C1galt1 (NM_052993.2,150-168).
ctcaactcttgagtatttt

SEQ ID NO: 599203 - DNA, 19 bp, Mus musculus
  siRNA target sequence for C1galt1 (NM_052993.2,183-201).
ctgccattcagcctaacat

SEQ ID NO: 599204 - DNA, 19 bp, Mus musculus
  siRNA target sequence for C1galt1 (NM_052993.2,195-213).
ctaacatgcttcacaatga

SEQ ID NO: 599205 - DNA, 19 bp, Mus musculus
  siRNA target sequence for C1galt1 (NM_052993.2,288-306).
gccaacataaagatgagaa

SEQ ID NO: 599206 - DNA, 19 bp, Mus musculus
  siRNA target sequence for C1galt1 (NM_052993.2,317-335).
gctgagaacctctatcaga

SEQ ID NO: 599207 - DNA, 19 bp, Mus musculus
  siRNA target sequence for C1galt1 (NM_052993.2,318-336).
ctgagaacctctatcagaa

SEQ ID NO: 599208 - DNA, 19 bp, Mus musculus
  siRNA target sequence for C1galt1 (NM_052993.2,322-340).
gaacctctatcagaaagtt

SEQ ID NO: 599209 - DNA, 19 bp, Mus musculus
  siRNA target sequence for C1galt1 (NM_052993.2,347-365).
ctttgttgggttatgacaa

SEQ ID NO: 599210 - DNA, 19 bp, Mus musculus
  siRNA target sequence for C1galt1 (NM_052993.2,361-379).
gacaagtcctcaaaatcta

SEQ ID NO: 599211 - DNA, 19 bp, Mus musculus
  siRNA target sequence for C1galt1 (NM_052993.2,366-384).
gtcctcaaaatctagagaa

SEQ ID NO: 599212 - DNA, 19 bp, Mus musculus
  siRNA target sequence for C1galt1 (NM_052993.2,408-426).
cgtgggcccagcgttgtaa

SEQ ID NO: 599213 - DNA, 19 bp, Mus musculus
  siRNA target sequence for C1galt1 (NM_052993.2,409-427).
gtgggcccagcgttgtaat

SEQ ID NO: 599214 - DNA, 19 bp, Mus musculus
  siRNA target sequence for C1galt1 (NM_052993.2,411-429).
gggcccagcgttgtaataa

SEQ ID NO: 599215 - DNA, 19 bp, Mus musculus
  siRNA target sequence for C1galt1 (NM_052993.2,416-434).
cagcgttgtaataaagtgt

SEQ ID NO: 599216 - DNA, 19 bp, Mus musculus
  siRNA target sequence for C1galt1 (NM_052993.2,418-436).
gcgttgtaataaagtgtta

SEQ ID NO: 599217 - DNA, 19 bp, Mus musculus
  siRNA target sequence for C1galt1 (NM_052993.2,419-437).
cgttgtaataaagtgttat

SEQ ID NO: 599218 - DNA, 19 bp, Mus musculus
  siRNA target sequence for C1galt1 (NM_052993.2,494-512).
ggcagagagcaactatatt

SEQ ID NO: 599219 - DNA, 19 bp, Mus musculus
  siRNA target sequence for C1galt1 (NM_052993.2,498-516).
gagagcaactatattggaa

SEQ ID NO: 599220 - DNA, 19 bp, Mus musculus
  siRNA target sequence for C1galt1 (NM_052993.2,535-553).
gtatgtacatgaccattat

SEQ ID NO: 599221 - DNA, 19 bp, Mus musculus
  siRNA target sequence for C1galt1 (NM_052993.2,641-659).
cctgaacaacccatttact

SEQ ID NO: 599222 - DNA, 19 bp, Mus musculus
  siRNA target sequence for C1galt1 (NM_052993.2,642-660).
ctgaacaacccatttactt

SEQ ID NO: 599223 - DNA, 19 bp, Mus musculus
  siRNA target sequence for C1galt1 (NM_052993.2,669-687).
gatttaagccctatgtgaa

SEQ ID NO: 599224 - DNA, 19 bp, Mus musculus
  siRNA target sequence for C1galt1 (NM_052993.2,711-729).
cgggctatgtcctaagcaa

SEQ ID NO: 599225 - DNA, 19 bp, Mus musculus
  siRNA target sequence for C1galt1 (NM_052993.2,735-753).
ccttgagaagatttgttaa

SEQ ID NO: 599226 - DNA, 19 bp, Mus musculus
  siRNA target sequence for C1galt1 (NM_052993.2,744-762).
gatttgttaatgcatttaa

SEQ ID NO: 599227 - DNA, 19 bp, Mus musculus
  siRNA target sequence for C1galt1 (NM_052993.2,808-826).
gggaaggtgcatggaaatt

SEQ ID NO: 599228 - DNA, 19 bp, Mus musculus
  siRNA target sequence for C1galt1 (NM_052993.2,809-827).
ggaaggtgcatggaaatta

SEQ ID NO: 599229 - DNA, 19 bp, Mus musculus
  siRNA target sequence for C1galt1 (NM_052993.2,810-828).
gaaggtgcatggaaattat

SEQ ID NO: 599230 - DNA, 19 bp, Mus musculus
  siRNA target sequence for C1galt1 (NM_052993.2,813-831).
ggtgcatggaaattataaa

SEQ ID NO: 599231 - DNA, 19 bp, Mus musculus
  siRNA target sequence for C1galt1 (NM_052993.2,839-857).
gctggagattccagagata

SEQ ID NO: 599232 - DNA, 19 bp, Mus musculus
  siRNA target sequence for C1galt1 (NM_052993.2,887-905).
gtaccagaacaccacttaa

SEQ ID NO: 599233 - DNA, 19 bp, Mus musculus
  siRNA target sequence for C1galt1 (NM_052993.2,890-908).
ccagaacaccacttaatca

SEQ ID NO: 599234 - DNA, 19 bp, Mus musculus
  siRNA target sequence for C1galt1 (NM_052993.2,891-909).
cagaacaccacttaatcaa

SEQ ID NO: 599235 - DNA, 19 bp, Mus musculus
  siRNA target sequence for C1galt1 (NM_052993.2,917-935).
ctaccaaaaacattttggt

SEQ ID NO: 599236 - DNA, 19 bp, Mus musculus
  siRNA target sequence for C1galt1 (NM_052993.2,927-945).
cattttggtactggaatta

SEQ ID NO: 599237 - DNA, 19 bp, Mus musculus
  siRNA target sequence for C1galt1 (NM_052993.2,937-955).
ctggaattacaactattat

SEQ ID NO: 599238 - DNA, 19 bp, Mus musculus
  siRNA target sequence for C1galt1 (NM_052993.2,1010-1028).
gttgatgggacaactatgt

SEQ ID NO: 599239 - DNA, 19 bp, Mus musculus
  siRNA target sequence for C1galt1 (NM_052993.2,1017-1035).
ggacaactatgtatgaatt

SEQ ID NO: 599240 - DNA, 19 bp, Mus musculus
  siRNA target sequence for C1galt1 (NM_052993.2,1018-1036).
gacaactatgtatgaatta

SEQ ID NO: 599241 - DNA, 19 bp, Mus musculus
  siRNA target sequence for C1galt1 (NM_052993.2,1020-1038).
caactatgtatgaattaga

SEQ ID NO: 599242 - DNA, 19 bp, Mus musculus
  siRNA target sequence for B3galt4 (NM_019420.1,671-689).
gactgaactgggtgaacaa

SEQ ID NO: 599243 - DNA, 19 bp, Mus musculus
  siRNA target sequence for B3galt4 (NM_019420.1,678-696).
ctgggtgaacaaatactgt

SEQ ID NO: 599244 - DNA, 19 bp, Mus musculus
  siRNA target sequence for B3galt4 (NM_019420.1,722-740).
cggatgatgacgtgtatgt

SEQ ID NO: 599245 - DNA, 19 bp, Mus musculus
  siRNA target sequence for B3galt4 (NM_019420.1,757-775).
gtgtcagagctgatacaaa

SEQ ID NO: 599246 - DNA, 19 bp, Mus musculus
  siRNA target sequence for B3galt4 (NM_019420.1,827-845).
caacagctatccatgaaga

SEQ ID NO: 599247 - DNA, 19 bp, Mus musculus
  siRNA target sequence for B3galt4 (NM_019420.1,1299-1317).
cttgaggtgccggttcata

SEQ ID NO: 599248 - DNA, 19 bp, Mus musculus
  siRNA target sequence for B3galt5 (NM_033149.2,274-292).
gcgcactctgcttgtactt

SEQ ID NO: 599249 - DNA, 19 bp, Mus musculus
  siRNA target sequence for B3galt5 (NM_033149.2,293-311).
cagcatggattctttcaga

SEQ ID NO: 599250 - DNA, 19 bp, Mus musculus
  siRNA target sequence for B3galt5 (NM_033149.2,354-372).
cagattccggatatagact

SEQ ID NO: 599251 - DNA, 19 bp, Mus musculus
  siRNA target sequence for B3galt5 (NM_033149.2,636-654).
gaatgggtctaccactttt

SEQ ID NO: 599252 - DNA, 19 bp, Mus musculus
  siRNA target sequence for B3galt5 (NM_033149.2,662-680).
gacagcttacgtgatgaaa

SEQ ID NO: 599253 - DNA, 19 bp, Mus musculus
  siRNA target sequence for B3galt5 (NM_033149.2,787-805).
ccatccggcagaagttcaa

SEQ ID NO: 599254 - DNA, 19 bp, Mus musculus
  siRNA target sequence for B3galt5 (NM_033149.2,839-857).
ggacaggtacccacctttt

SEQ ID NO: 599255 - DNA, 19 bp, Mus musculus
  siRNA target sequence for B3galt5 (NM_033149.2,840-858).
gacaggtacccaccttttt

SEQ ID NO: 599256 - DNA, 19 bp, Mus musculus
  siRNA target sequence for B3galt5 (NM_033149.2,888-906).
gacgtggcgatccaagtat

SEQ ID NO: 599257 - DNA, 19 bp, Mus musculus
  siRNA target sequence for B3galt5 (NM_033149.2,891-909).
gtggcgatccaagtataca

SEQ ID NO: 599258 - DNA, 19 bp, Mus musculus
  siRNA target sequence for B3galt5 (NM_033149.2,918-936).
gagagcgttccgttcatca

SEQ ID NO: 599259 - DNA, 19 bp, Mus musculus
  siRNA target sequence for B3galt5 (NM_033149.2,964-982).
gcttggccaagctaaagat

SEQ ID NO: 599260 - DNA, 19 bp, Mus musculus
  siRNA target sequence for B3galt5 (NM_033149.2,1039-1057).
ccgtgtgccgctttcagaa

SEQ ID NO: 599261 - DNA, 19 bp, Mus musculus
  siRNA target sequence for B3galt5 (NM_033149.2,1040-1058).
cgtgtgccgctttcagaaa

SEQ ID NO: 599262 - DNA, 19 bp, Mus musculus
  siRNA target sequence for B3gnt1 (NM_016888.4,220-238).
ggcgtcgaagagtcaagtt

SEQ ID NO: 599263 - DNA, 19 bp, Mus musculus
  siRNA target sequence for B3gnt1 (NM_016888.4,257-275).
ggcaaatgtcttcatttat

SEQ ID NO: 599264 - DNA, 19 bp, Mus musculus
  siRNA target sequence for B3gnt1 (NM_016888.4,282-300).
gtggaagtctccaaaaaca

SEQ ID NO: 599265 - DNA, 19 bp, Mus musculus
  siRNA target sequence for B3gnt1 (NM_016888.4,330-348).
gtaataatcccgaaagaga

SEQ ID NO: 599266 - DNA, 19 bp, Mus musculus
  siRNA target sequence for B3gnt1 (NM_016888.4,415-433).
ggtacaatcccatcttgaa

SEQ ID NO: 599267 - DNA, 19 bp, Mus musculus
  siRNA target sequence for B3gnt1 (NM_016888.4,522-540).
gctgtgacagattttaata

SEQ ID NO: 599268 - DNA, 19 bp, Mus musculus
  siRNA target sequence for B3gnt1 (NM_016888.4,586-604).
ggaattactcgctgcttat

SEQ ID NO: 599269 - DNA, 19 bp, Mus musculus
  siRNA target sequence for B3gnt1 (NM_016888.4,786-804).
gacctttcggacatgctta

SEQ ID NO: 599270 - DNA, 19 bp, Mus musculus
  siRNA target sequence for B3gnt1 (NM_016888.4,833-851).
cctcatgtggaactataga

SEQ ID NO: 599271 - DNA, 19 bp, Mus musculus
  siRNA target sequence for B3gnt1 (NM_016888.4,913-931).
gtccagacgcagagtttgt

SEQ ID NO: 599272 - DNA, 19 bp, Mus musculus
  siRNA target sequence for B3gnt1 (NM_016888.4,969-987).
cacatccttaattacttga

SEQ ID NO: 599273 - DNA, 19 bp, Mus musculus
  siRNA target sequence for B3gnt1 (NM_016888.4,1003-1021).
gcaaagccaaagacttgtt

SEQ ID NO: 599274 - DNA, 19 bp, Mus musculus
  siRNA target sequence for B3gnt1 (NM_016888.4,1047-1065).
gggcctcaccgggataaga

SEQ ID NO: 599275 - DNA, 19 bp, Mus musculus
  siRNA target sequence for B3gnt1 (NM_016888.4,1048-1066).
ggcctcaccgggataagaa

SEQ ID NO: 599276 - DNA, 19 bp, Mus musculus
  siRNA target sequence for B3gnt1 (NM_016888.4,1053-1071).
caccgggataagaaactga

SEQ ID NO: 599277 - DNA, 19 bp, Mus musculus
  siRNA target sequence for B3gnt1 (NM_016888.4,1187-1205).
ccatctctaccctattgat

SEQ ID NO: 599278 - DNA, 19 bp, Mus musculus
  siRNA target sequence for B3gnt1 (NM_016888.4,1197-1215).
cctattgatgatgtttata

SEQ ID NO: 599279 - DNA, 19 bp, Mus musculus
  siRNA target sequence for B3gnt1 (NM_016888.4,1264-1282).
gcttcaggacatttgatat

SEQ ID NO: 599280 - DNA, 19 bp, Mus musculus
  siRNA target sequence for B3gnt1 (NM_016888.4,1265-1283).
cttcaggacatttgatatt

SEQ ID NO: 599281 - DNA, 19 bp, Mus musculus
  siRNA target sequence for B3gnt1 (NM_016888.4,1312-1330).
cctatatagacctaatgtt

SEQ ID NO: 599282 - DNA, 19 bp, Mus musculus
  siRNA target sequence for B3gnt1 (NM_016888.4,1313-1331).
ctatatagacctaatgtta

SEQ ID NO: 599283 - DNA, 19 bp, Mus musculus
  siRNA target sequence for B3gnt1 (NM_016888.4,1320-1338).
gacctaatgttagtacata

SEQ ID NO: 599284 - DNA, 19 bp, Mus musculus
  siRNA target sequence for B3gnt1 (NM_016888.4,1379-1397).
gcaaagtcctaatttaaaa

SEQ ID NO: 599285 - DNA, 19 bp, Mus musculus
  siRNA target sequence for B3gnt3 (NM_028189.2,268-286).
ccggtgccgagctaatcta

SEQ ID NO: 599286 - DNA, 19 bp, Mus musculus
  siRNA target sequence for B3gnt3 (NM_028189.2,269-287).
cggtgccgagctaatctat

SEQ ID NO: 599287 - DNA, 19 bp, Mus musculus
  siRNA target sequence for B3gnt3 (NM_028189.2,326-344).
cacgtgcgcgacttcttgt

SEQ ID NO: 599288 - DNA, 19 bp, Mus musculus
  siRNA target sequence for B3gnt3 (NM_028189.2,329-347).
gtgcgcgacttcttgttct

SEQ ID NO: 599289 - DNA, 19 bp, Mus musculus
  siRNA target sequence for B3gnt3 (NM_028189.2,433-451).
gtcctcgcctgcaaactat

SEQ ID NO: 599290 - DNA, 19 bp, Mus musculus
  siRNA target sequence for B3gnt3 (NM_028189.2,549-567).
cacaacaagcacgcaaata

SEQ ID NO: 599291 - DNA, 19 bp, Mus musculus
  siRNA target sequence for B3gnt3 (NM_028189.2,648-666).
cgcttaagcaggtcctttt

SEQ ID NO: 599292 - DNA, 19 bp, Mus musculus
  siRNA target sequence for B3gnt5 (NM_054052.2,873-891).
cacttttttgtcacttgtt

SEQ ID NO: 599293 - DNA, 19 bp, Mus musculus
  siRNA target sequence for B3gnt5 (NM_054052.2,919-937).
gcccaatcaataattacat

SEQ ID NO: 599294 - DNA, 19 bp, Mus musculus
  siRNA target sequence for B3gnt5 (NM_054052.2,962-980).
ctacagatacctcgtaaat

SEQ ID NO: 599295 - DNA, 19 bp, Mus musculus
  siRNA target sequence for B3gnt5 (NM_054052.2,967-985).
gatacctcgtaaatagcta

SEQ ID NO: 599296 - DNA, 19 bp, Mus musculus
  siRNA target sequence for B3gnt5 (NM_054052.2,982-1000).
gctatggctttgtaaacaa

SEQ ID NO: 599297 - DNA, 19 bp, Mus musculus
  siRNA target sequence for B3gnt5 (NM_054052.2,1032-1050).
cctcactacccatacttga

SEQ ID NO: 599298 - DNA, 19 bp, Mus musculus
  siRNA target sequence for B3gnt5 (NM_054052.2,1033-1051).
ctcactacccatacttgat

SEQ ID NO: 599299 - DNA, 19 bp, Mus musculus
  siRNA target sequence for B3gnt5 (NM_054052.2,1035-1053).
cactacccatacttgatca

SEQ ID NO: 599300 - DNA, 19 bp, Mus musculus
  siRNA target sequence for B3gnt5 (NM_054052.2,1127-1145).
ccgacgttctgcaatcaga

SEQ ID NO: 599301 - DNA, 19 bp, Mus musculus
  siRNA target sequence for B3gnt5 (NM_054052.2,1129-1147).
gacgttctgcaatcagaaa

SEQ ID NO: 599302 - DNA, 19 bp, Mus musculus
  siRNA target sequence for B3gnt5 (NM_054052.2,1150-1168).
cgtggggcaatgagaacta

SEQ ID NO: 599303 - DNA, 19 bp, Mus musculus
  siRNA target sequence for B3gnt5 (NM_054052.2,1156-1174).
gcaatgagaactatgttca

SEQ ID NO: 599304 - DNA, 19 bp, Mus musculus
  siRNA target sequence for B3gnt5 (NM_054052.2,1179-1197).
caactcaatgccaacatca

SEQ ID NO: 599305 - DNA, 19 bp, Mus musculus
  siRNA target sequence for B3gnt5 (NM_054052.2,1225-1243).
gtccactgaagggaaaaga

SEQ ID NO: 599306 - DNA, 19 bp, Mus musculus
  siRNA target sequence for B3gnt5 (NM_054052.2,1242-1260).
gaactgcaaaaaagactaa

SEQ ID NO: 599307 - DNA, 19 bp, Mus musculus
  siRNA target sequence for B3gnt5 (NM_054052.2,1293-1311).
cagcaagatttcattgatt

SEQ ID NO: 599308 - DNA, 19 bp, Mus musculus
  siRNA target sequence for B3gnt5 (NM_054052.2,1308-1326).
gattctttccacaatctta

SEQ ID NO: 599309 - DNA, 19 bp, Mus musculus
  siRNA target sequence for B3gnt5 (NM_054052.2,1317-1335).
cacaatcttacttctaaat

SEQ ID NO: 599310 - DNA, 19 bp, Mus musculus
  siRNA target sequence for B3gnt5 (NM_054052.2,1352-1370).
ctgggcaaataccttttgt

SEQ ID NO: 599311 - DNA, 19 bp, Mus musculus
  siRNA target sequence for B3gnt5 (NM_054052.2,1388-1406).
gatgactgctgatgatgat

SEQ ID NO: 599312 - DNA, 19 bp, Mus musculus
  siRNA target sequence for B3gnt5 (NM_054052.2,1391-1409).
gactgctgatgatgatata

SEQ ID NO: 599313 - DNA, 19 bp, Mus musculus
  siRNA target sequence for B3gnt5 (NM_054052.2,1506-1524).
cctgttagggataaaagca

SEQ ID NO: 599314 - DNA, 19 bp, Mus musculus
  siRNA target sequence for B3gnt5 (NM_054052.2,1559-1577).
gccagcctaccctgactat

SEQ ID NO: 599315 - DNA, 19 bp, Mus musculus
  siRNA target sequence for B3gnt5 (NM_054052.2,1560-1578).
ccagcctaccctgactata

SEQ ID NO: 599316 - DNA, 19 bp, Mus musculus
  siRNA target sequence for B3gnt5 (NM_054052.2,1632-1650).
gcatcgcagacactgaatt

SEQ ID NO: 599317 - DNA, 19 bp, Mus musculus
  siRNA target sequence for B3gnt5 (NM_054052.2,1646-1664).
gaattccagtatgtacata

SEQ ID NO: 599318 - DNA, 19 bp, Mus musculus
  siRNA target sequence for B3gnt5 (NM_054052.2,1651-1669).
ccagtatgtacatagatga

SEQ ID NO: 599319 - DNA, 19 bp, Mus musculus
  siRNA target sequence for B3gnt5 (NM_054052.2,1652-1670).
cagtatgtacatagatgat

SEQ ID NO: 599320 - DNA, 19 bp, Mus musculus
  siRNA target sequence for B3gnt5 (NM_054052.2,1709-1727).
gccacaggaccatgtattt

SEQ ID NO: 599321 - DNA, 19 bp, Mus musculus
  siRNA target sequence for B3gnt5 (NM_054052.2,1735-1753).
gggaagggaaaattcctta

SEQ ID NO: 599322 - DNA, 19 bp, Mus musculus
  siRNA target sequence for B3gnt5 (NM_054052.2,1736-1754).
ggaagggaaaattccttat

SEQ ID NO: 599323 - DNA, 19 bp, Mus musculus
  siRNA target sequence for B3gnt5 (NM_054052.2,1781-1799).
gacatctcacggacactta

SEQ ID NO: 599324 - DNA, 19 bp, Mus musculus
  siRNA target sequence for B3gnt5 (NM_054052.2,1783-1801).
catctcacggacacttaca

SEQ ID NO: 599325 - DNA, 19 bp, Mus musculus
  siRNA target sequence for B3gnt5 (NM_054052.2,1786-1804).
ctcacggacacttacaaga

SEQ ID NO: 599326 - DNA, 19 bp, Mus musculus
  siRNA target sequence for B3gnt5 (NM_054052.2,1827-1845).
gctacacatcctaaagtaa

SEQ ID NO: 599327 - DNA, 19 bp, Mus musculus
  siRNA target sequence for B3gnt5 (NM_054052.2,1828-1846).
ctacacatcctaaagtaaa

SEQ ID NO: 599328 - DNA, 19 bp, Mus musculus
  siRNA target sequence for B3gnt5 (NM_054052.2,1860-1878).
gggttttttggtcaaatat

SEQ ID NO: 599329 - DNA, 19 bp, Mus musculus
  siRNA target sequence for B3gnt5 (NM_054052.2,1872-1890).
caaatatactgcaggttaa

SEQ ID NO: 599330 - DNA, 19 bp, Mus musculus
  siRNA target sequence for B3gnt5 (NM_054052.2,1880-1898).
ctgcaggttaattaagata

SEQ ID NO: 599331 - DNA, 19 bp, Mus musculus
  siRNA target sequence for B3gnt5 (NM_054052.2,1882-1900).
gcaggttaattaagatagt

SEQ ID NO: 599332 - DNA, 19 bp, Mus musculus
  siRNA target sequence for B3gnt5 (NM_054052.2,1885-1903).
ggttaattaagatagttct

SEQ ID NO: 599333 - DNA, 19 bp, Mus musculus
  siRNA target sequence for B3gnt7 (NM_145222.1,87-105).
ggaagaaaaccctctacaa

SEQ ID NO: 599334 - DNA, 19 bp, Mus musculus
  siRNA target sequence for B3gnt7 (NM_145222.1,208-226).
gccagccaaaactggaaat

SEQ ID NO: 599335 - DNA, 19 bp, Mus musculus
  siRNA target sequence for B3gnt7 (NM_145222.1,311-329).
gatgtgatcaccactaact

SEQ ID NO: 599336 - DNA, 19 bp, Mus musculus
  siRNA target sequence for B3gnt7 (NM_145222.1,324-342).
ctaactgctctatcaacat

SEQ ID NO: 599337 - DNA, 19 bp, Mus musculus
  siRNA target sequence for B3gnt7 (NM_145222.1,381-399).
cacacttccgacagtttct

SEQ ID NO: 599338 - DNA, 19 bp, Mus musculus
  siRNA target sequence for B3gnt7 (NM_145222.1,451-469).
gtgtgctggcgatgtctat

SEQ ID NO: 599339 - DNA, 19 bp, Mus musculus
  siRNA target sequence for B3gnt7 (NM_145222.1,453-471).
gtgctggcgatgtctatat

SEQ ID NO: 599340 - DNA, 19 bp, Mus musculus
  siRNA target sequence for B3gnt7 (NM_145222.1,456-474).
ctggcgatgtctatatgct

SEQ ID NO: 599341 - DNA, 19 bp, Mus musculus
  siRNA target sequence for B3gnt7 (NM_145222.1,646-664).
ctacgaggaccgtctctat

SEQ ID NO: 599342 - DNA, 19 bp, Mus musculus
  siRNA target sequence for B3gnt7 (NM_145222.1,736-754).
gtggctcgacatttactgt

SEQ ID NO: 599343 - DNA, 19 bp, Mus musculus
  siRNA target sequence for B3gnt7 (NM_145222.1,755-773).
cccaacgtccccttcgttt

SEQ ID NO: 599344 - DNA, 19 bp, Mus musculus
  siRNA target sequence for B3gnt7 (NM_145222.1,756-774).
ccaacgtccccttcgtttt

SEQ ID NO: 599345 - DNA, 19 bp, Mus musculus
  siRNA target sequence for B3gnt7 (NM_145222.1,760-778).
cgtccccttcgttttcaaa

SEQ ID NO: 599346 - DNA, 19 bp, Mus musculus
  siRNA target sequence for B3gnt7 (NM_145222.1,850-868).
cctatttgtaggtgatgtt

SEQ ID NO: 599347 - DNA, 19 bp, Mus musculus
  siRNA target sequence for B3gnt7 (NM_145222.1,889-907).
ccgcaaaaaagataacaaa

SEQ ID NO: 599348 - DNA, 19 bp, Mus musculus
  siRNA target sequence for B3gnt7 (NM_145222.1,890-908).
cgcaaaaaagataacaaat

SEQ ID NO: 599349 - DNA, 19 bp, Mus musculus
  siRNA target sequence for B3gnt7 (NM_145222.1,913-931).
catcccagccgtcatgtat

SEQ ID NO: 599350 - DNA, 19 bp, Mus musculus
  siRNA target sequence for B3gnt7 (NM_145222.1,917-935).
ccagccgtcatgtatggta

SEQ ID NO: 599351 - DNA, 19 bp, Mus musculus
  siRNA target sequence for B3gnt7 (NM_145222.1,918-936).
cagccgtcatgtatggtaa

SEQ ID NO: 599352 - DNA, 19 bp, Mus musculus
  siRNA target sequence for B3gnt7 (NM_145222.1,1130-1148).
cgaagcagccggatgaaca

SEQ ID NO: 599353 - DNA, 19 bp, Mus musculus
  siRNA target sequence for B3gnt7 (NM_145222.1,1223-1241).
ctggtgcatagcaatctta

SEQ ID NO: 599354 - DNA, 19 bp, Mus musculus
  siRNA target sequence for C76566 (NM_178879.2,638-656).
cctacggacccctttgact

SEQ ID NO: 599355 - DNA, 19 bp, Mus musculus
  siRNA target sequence for C76566 (NM_178879.2,639-657).
ctacggacccctttgactt

SEQ ID NO: 599356 - DNA, 19 bp, Mus musculus
  siRNA target sequence for C76566 (NM_178879.2,689-707).
cgcttcccgctgctcatta

SEQ ID NO: 599357 - DNA, 19 bp, Mus musculus
  siRNA target sequence for C76566 (NM_178879.2,690-708).
gcttcccgctgctcattaa

SEQ ID NO: 599358 - DNA, 19 bp, Mus musculus
  siRNA target sequence for C76566 (NM_178879.2,854-872).
gtgcgccgagtgttcttgt

SEQ ID NO: 599359 - DNA, 19 bp, Mus musculus
  siRNA target sequence for C76566 (NM_178879.2,949-967).
ccgagcttatgcagacatt

SEQ ID NO: 599360 - DNA, 19 bp, Mus musculus
  siRNA target sequence for C76566 (NM_178879.2,951-969).
gagcttatgcagacattct

SEQ ID NO: 599361 - DNA, 19 bp, Mus musculus
  siRNA target sequence for C76566 (NM_178879.2,977-995).
gctttcgaagacacctttt

SEQ ID NO: 599362 - DNA, 19 bp, Mus musculus
  siRNA target sequence for C76566 (NM_178879.2,1013-1031).
gagattcactttctatctt

SEQ ID NO: 599363 - DNA, 19 bp, Mus musculus
  siRNA target sequence for C76566 (NM_178879.2,1041-1059).
cattctgtccagatgtaca

SEQ ID NO: 599364 - DNA, 19 bp, Mus musculus
  siRNA target sequence for C76566 (NM_178879.2,1045-1063).
ctgtccagatgtacacttt

SEQ ID NO: 599365 - DNA, 19 bp, Mus musculus
  siRNA target sequence for C76566 (NM_178879.2,1187-1205).
gctagagccagcaagtact

SEQ ID NO: 599366 - DNA, 19 bp, Mus musculus
  siRNA target sequence for C76566 (NM_178879.2,1330-1348).
catagacgatgtctttcta

SEQ ID NO: 599367 - DNA, 19 bp, Mus musculus
  siRNA target sequence for C76566 (NM_178879.2,1499-1517).
gctgacatctggcttatgt

SEQ ID NO: 599368 - DNA, 19 bp, Mus musculus
  siRNA target sequence for C76566 (NM_178879.2,1580-1598).
cccttccaatggaattctt

SEQ ID NO: 599369 - DNA, 19 bp, Mus musculus
  siRNA target sequence for MGC32391 (NM_146184.2,552-570).
ctcctgggcctcaaagtat

SEQ ID NO: 599370 - DNA, 19 bp, Mus musculus
  siRNA target sequence for MGC32391 (NM_146184.2,555-573).
ctgggcctcaaagtataca

SEQ ID NO: 599371 - DNA, 19 bp, Mus musculus
  siRNA target sequence for MGC32391 (NM_146184.2,1184-1202).
ccactgccccgatgtcaat

SEQ ID NO: 599372 - DNA, 19 bp, Mus musculus
  siRNA target sequence for MGC32391 (NM_146184.2,1187-1205).
ctgccccgatgtcaatttt

SEQ ID NO: 599373 - DNA, 19 bp, Mus musculus
  siRNA target sequence for MGC32391 (NM_146184.2,1189-1207).
gccccgatgtcaattttgt

SEQ ID NO: 599374 - DNA, 19 bp, Mus musculus
  siRNA target sequence for MGC32391 (NM_146184.2,1337-1355).
gcccggaggacccttctat

SEQ ID NO: 599375 - DNA, 19 bp, Mus musculus
  siRNA target sequence for MGC32391 (NM_146184.2,1339-1357).
ccggaggacccttctatgt

SEQ ID NO: 599376 - DNA, 19 bp, Mus musculus
  siRNA target sequence for MGC32391 (NM_146184.2,1463-1481).
ggcacccttcccctttgat

SEQ ID NO: 599377 - DNA, 19 bp, Mus musculus
  siRNA target sequence for 4930467B06Rik (NM_026651.1,148-166).
ccttacctggaagtataaa

SEQ ID NO: 599378 - DNA, 19 bp, Mus musculus
  siRNA target sequence for 4930467B06Rik (NM_026651.1,156-174).
ggaagtataaactgacaaa

SEQ ID NO: 599379 - DNA, 19 bp, Mus musculus
  siRNA target sequence for 4930467B06Rik (NM_026651.1,374-392).
gtgctggatgtggaagtat

SEQ ID NO: 599380 - DNA, 19 bp, Mus musculus
  siRNA target sequence for 4930467B06Rik (NM_026651.1,386-404).
gaagtatactccagtagaa

SEQ ID NO: 599381 - DNA, 19 bp, Mus musculus
  siRNA target sequence for 4930467B06Rik (NM_026651.1,465-483).
gccgaggcatccatgtcat

SEQ ID NO: 599382 - DNA, 19 bp, Mus musculus
  siRNA target sequence for 4930467B06Rik (NM_026651.1,466-484).
ccgaggcatccatgtcata

SEQ ID NO: 599383 - DNA, 19 bp, Mus musculus
  siRNA target sequence for 4930467B06Rik (NM_026651.1,468-486).
gaggcatccatgtcatagt

SEQ ID NO: 599384 - DNA, 19 bp, Mus musculus
  siRNA target sequence for 4930467B06Rik (NM_026651.1,521-539).
cgcgtgtttgacacatact

SEQ ID NO: 599385 - DNA, 19 bp, Mus musculus
  siRNA target sequence for 4930467B06Rik (NM_026651.1,523-541).
cgtgtttgacacatactct

SEQ ID NO: 599386 - DNA, 19 bp, Mus musculus
  siRNA target sequence for 4930467B06Rik (NM_026651.1,712-730).
ggccttcgtgggacgaaaa

SEQ ID NO: 599387 - DNA, 19 bp, Mus musculus
  siRNA target sequence for 4930467B06Rik (NM_026651.1,715-733).
cttcgtgggacgaaaagga

SEQ ID NO: 599388 - DNA, 19 bp, Mus musculus
  siRNA target sequence for 4930467B06Rik (NM_026651.1,743-761).
cttggcgagaaacattcta

SEQ ID NO: 599389 - DNA, 19 bp, Mus musculus
  siRNA target sequence for 4930467B06Rik (NM_026651.1,849-867).
gggcagatacggagttgaa

SEQ ID NO: 599390 - DNA, 19 bp, Mus musculus
  siRNA target sequence for 4930467B06Rik (NM_026651.1,929-947).
gacccgacgcctattgagt

SEQ ID NO: 599391 - DNA, 19 bp, Mus musculus
  siRNA target sequence for 4930467B06Rik (NM_026651.1,960-978).
cacttccagacaataaggt

SEQ ID NO: 599392 - DNA, 19 bp, Mus musculus
  siRNA target sequence for 4930467B06Rik (NM_026651.1,1062-1080).
gggtatctccacagatgat

SEQ ID NO: 599393 - DNA, 19 bp, Mus musculus
  siRNA target sequence for 4930467B06Rik (NM_026651.1,1063-1081).
ggtatctccacagatgata

SEQ ID NO: 599394 - DNA, 19 bp, Mus musculus
  siRNA target sequence for 4930467B06Rik (NM_026651.1,1078-1096).
gataacggtcttcattgat

SEQ ID NO: 599395 - DNA, 19 bp, Mus musculus
  siRNA target sequence for 4930467B06Rik (NM_026651.1,1434-1452).
gggtgctcaggaaatcttt

SEQ ID NO: 599396 - DNA, 19 bp, Mus musculus
  siRNA target sequence for 4930467B06Rik (NM_026651.1,1619-1637).
catgaggcctacttcaaga

SEQ ID NO: 599397 - DNA, 19 bp, Mus musculus
  siRNA target sequence for 4930467B06Rik (NM_026651.1,1731-1749).
gtgaggccgaggttttgga

SEQ ID NO: 599398 - DNA, 19 bp, Mus musculus
  siRNA target sequence for 4930467B06Rik (NM_026651.1,1819-1837).
ccgaatggagacagatgat

SEQ ID NO: 599399 - DNA, 19 bp, Mus musculus
  siRNA target sequence for 4930467B06Rik (NM_026651.1,1862-1880).
gccaagtgcctccatattt

SEQ ID NO: 599400 - DNA, 19 bp, Mus musculus
  siRNA target sequence for 4930467B06Rik (NM_026651.1,1991-2009).
ccatcagtcacccctattt

SEQ ID NO: 599401 - DNA, 19 bp, Mus musculus
  siRNA target sequence for 4930467B06Rik (NM_026651.1,1992-2010).
catcagtcacccctatttt

SEQ ID NO: 599402 - DNA, 19 bp, Mus musculus
  siRNA target sequence for Mgat1 (NM_010794.2,675-693).
ggggtgctatcatctttgt

SEQ ID NO: 599403 - DNA, 19 bp, Mus musculus
  siRNA target sequence for Mgat1 (NM_010794.2,1004-1022).
cgctgcttggataagttgt

SEQ ID NO: 599404 - DNA, 19 bp, Mus musculus
  siRNA target sequence for Mgat1 (NM_010794.2,1041-1059).
ctgagcgtttccccattat

SEQ ID NO: 599405 - DNA, 19 bp, Mus musculus
  siRNA target sequence for Mgat1 (NM_010794.2,1134-1152).
ggcagccggacctgagtaa

SEQ ID NO: 599406 - DNA, 19 bp, Mus musculus
  siRNA target sequence for Mgat1 (NM_010794.2,1138-1156).
gccggacctgagtaacatt

SEQ ID NO: 599407 - DNA, 19 bp, Mus musculus
  siRNA target sequence for Mgat1 (NM_010794.2,1221-1239).
cactaggccagatcttcaa

SEQ ID NO: 599408 - DNA, 19 bp, Mus musculus
  siRNA target sequence for Mgat1 (NM_010794.2,1226-1244).
ggccagatcttcaacaagt

SEQ ID NO: 599409 - DNA, 19 bp, Mus musculus
  siRNA target sequence for Mgat1 (NM_010794.2,1227-1245).
gccagatcttcaacaagtt

SEQ ID NO: 599410 - DNA, 19 bp, Mus musculus
  siRNA target sequence for Mgat1 (NM_010794.2,1290-1308).
caccagacttctttgagta

SEQ ID NO: 599411 - DNA, 19 bp, Mus musculus
  siRNA target sequence for Mgat1 (NM_010794.2,1358-1376).
gtgtctgcttggaatgaca

SEQ ID NO: 599412 - DNA, 19 bp, Mus musculus
  siRNA target sequence for Mgat1 (NM_010794.2,1360-1378).
gtctgcttggaatgacaat

SEQ ID NO: 599413 - DNA, 19 bp, Mus musculus
  siRNA target sequence for Mgat1 (NM_010794.2,1390-1408).
gatggtagactcaagcaaa

SEQ ID NO: 599414 - DNA, 19 bp, Mus musculus
  siRNA target sequence for Mgat1 (NM_010794.2,1409-1427).
cctgagctgctctatcgaa

SEQ ID NO: 599415 - DNA, 19 bp, Mus musculus
  siRNA target sequence for Mgat1 (NM_010794.2,1417-1435).
gctctatcgaacagacttt

SEQ ID NO: 599416 - DNA, 19 bp, Mus musculus
  siRNA target sequence for Mgat1 (NM_010794.2,1420-1438).
ctatcgaacagactttttt

SEQ ID NO: 599417 - DNA, 19 bp, Mus musculus
  siRNA target sequence for Mgat1 (NM_010794.2,1539-1557).
ggaaaggacgggcttgtat

SEQ ID NO: 599418 - DNA, 19 bp, Mus musculus
  siRNA target sequence for Mgat1 (NM_010794.2,1540-1558).
gaaaggacgggcttgtatt

SEQ ID NO: 599419 - DNA, 19 bp, Mus musculus
  siRNA target sequence for Mgat1 (NM_010794.2,1551-1569).
cttgtattcgtccagaaat

SEQ ID NO: 599420 - DNA, 19 bp, Mus musculus
  siRNA target sequence for Mgat1 (NM_010794.2,1622-1640).
gaccagcatcttaagttca

SEQ ID NO: 599421 - DNA, 19 bp, Mus musculus
  siRNA target sequence for Mgat1 (NM_010794.2,1791-1809).
gggaggtgcgggtacagta

SEQ ID NO: 599422 - DNA, 19 bp, Mus musculus
  siRNA target sequence for Mgat1 (NM_010794.2,1796-1814).
gtgcgggtacagtacacta

SEQ ID NO: 599423 - DNA, 19 bp, Mus musculus
  siRNA target sequence for Mgat1 (NM_010794.2,1889-1907).
ggctaccgtggcattgtca

SEQ ID NO: 599424 - DNA, 19 bp, Mus musculus
  siRNA target sequence for Mgat1 (NM_010794.2,1951-1969).
gacatggactggctatgat

SEQ ID NO: 599425 - DNA, 19 bp, Mus musculus
  siRNA target sequence for Pigq (NM_011822.2,199-217).
cagacagtggcctgttagt

SEQ ID NO: 599426 - DNA, 19 bp, Mus musculus
  siRNA target sequence for Pigq (NM_011822.2,405-423).
ggcctgggcaccatcttct

SEQ ID NO: 599427 - DNA, 19 bp, Mus musculus
  siRNA target sequence for Pigq (NM_011822.2,487-505).
cttacccgcagatgtctaa

SEQ ID NO: 599428 - DNA, 19 bp, Mus musculus
  siRNA target sequence for Pigq (NM_011822.2,533-551).
ggtcatgctcatcttctat

SEQ ID NO: 599429 - DNA, 19 bp, Mus musculus
  siRNA target sequence for Pigq (NM_011822.2,637-655).
gaggcctagctgacatctt

SEQ ID NO: 599430 - DNA, 19 bp, Mus musculus
  siRNA target sequence for Pigq (NM_011822.2,838-856).
gtgcttgccggctatggaa

SEQ ID NO: 599431 - DNA, 19 bp, Mus musculus
  siRNA target sequence for Pigq (NM_011822.2,1049-1067).
cagcaataaccgaattgga

SEQ ID NO: 599432 - DNA, 19 bp, Mus musculus
  siRNA target sequence for Pigq (NM_011822.2,1147-1165).
ctcctgctgggctcaagat

SEQ ID NO: 599433 - DNA, 19 bp, Mus musculus
  siRNA target sequence for Pigq (NM_011822.2,1214-1232).
ccatctgtggataagctat

SEQ ID NO: 599434 - DNA, 19 bp, Mus musculus
  siRNA target sequence for Pigq (NM_011822.2,1246-1264).
ccccctttattgagcatat

SEQ ID NO: 599435 - DNA, 19 bp, Mus musculus
  siRNA target sequence for Pigq (NM_011822.2,1345-1363).
ccttccacatctattgctt

SEQ ID NO: 599436 - DNA, 19 bp, Mus musculus
  siRNA target sequence for Pigq (NM_011822.2,1381-1399).
ggctgtactgcctgaagat

SEQ ID NO: 599437 - DNA, 19 bp, Mus musculus
  siRNA target sequence for Pigq (NM_011822.2,1385-1403).
gtactgcctgaagatctat

SEQ ID NO: 599438 - DNA, 19 bp, Mus musculus
  siRNA target sequence for Pigq (NM_011822.2,1435-1453).
ggaagaagtggaatgttct

SEQ ID NO: 599439 - DNA, 19 bp, Mus musculus
  siRNA target sequence for Pigq (NM_011822.2,1455-1473).
cgccagcgagtggattctt

SEQ ID NO: 599440 - DNA, 19 bp, Mus musculus
  siRNA target sequence for Pigq (NM_011822.2,1603-1621).
gcttaatccatctacttgt

SEQ ID NO: 599441 - DNA, 19 bp, Mus musculus
  siRNA target sequence for Pigq (NM_011822.2,1604-1622).
cttaatccatctacttgta

SEQ ID NO: 599442 - DNA, 19 bp, Mus musculus
  siRNA target sequence for Pigq (NM_011822.2,1686-1704).
gcagctggtgtgaagttca

SEQ ID NO: 599443 - DNA, 19 bp, Mus musculus
  siRNA target sequence for Pigq (NM_011822.2,1737-1755).
cgcctcctgatgcagataa

SEQ ID NO: 599444 - DNA, 19 bp, Mus musculus
  siRNA target sequence for Pigq (NM_011822.2,1757-1775).
ccccctgtcctataaccat

SEQ ID NO: 599445 - DNA, 19 bp, Mus musculus
  siRNA target sequence for Gcnt2 (NM_008105.2,206-224).
ctccgtccgtgcgttactt

SEQ ID NO: 599446 - DNA, 19 bp, Mus musculus
  siRNA target sequence for Gcnt2 (NM_008105.2,208-226).
ccgtccgtgcgttacttct

SEQ ID NO: 599447 - DNA, 19 bp, Mus musculus
  siRNA target sequence for Gcnt2 (NM_008105.2,209-227).
cgtccgtgcgttacttctt

SEQ ID NO: 599448 - DNA, 19 bp, Mus musculus
  siRNA target sequence for Gcnt2 (NM_008105.2,213-231).
cgtgcgttacttcttcata

SEQ ID NO: 599449 - DNA, 19 bp, Mus musculus
  siRNA target sequence for Gcnt2 (NM_008105.2,217-235).
cgttacttcttcatagtgt

SEQ ID NO: 599450 - DNA, 19 bp, Mus musculus
  siRNA target sequence for Gcnt2 (NM_008105.2,238-256).
gtgactactgtcatcgttt

SEQ ID NO: 599451 - DNA, 19 bp, Mus musculus
  siRNA target sequence for Gcnt2 (NM_008105.2,240-258).
gactactgtcatcgttttt

SEQ ID NO: 599452 - DNA, 19 bp, Mus musculus
  siRNA target sequence for Gcnt2 (NM_008105.2,242-260).
ctactgtcatcgtttttat

SEQ ID NO: 599453 - DNA, 19 bp, Mus musculus
  siRNA target sequence for Gcnt2 (NM_008105.2,245-263).
ctgtcatcgtttttattgt

SEQ ID NO: 599454 - DNA, 19 bp, Mus musculus
  siRNA target sequence for Gcnt2 (NM_008105.2,264-282).
gctctacgtgttaagtttt

SEQ ID NO: 599455 - DNA, 19 bp, Mus musculus
  siRNA target sequence for Gcnt2 (NM_008105.2,267-285).
ctacgtgttaagttttgga

SEQ ID NO: 599456 - DNA, 19 bp, Mus musculus
  siRNA target sequence for Gcnt2 (NM_008105.2,334-352).
gctcaagtgtgctcatctt

SEQ ID NO: 599457 - DNA, 19 bp, Mus musculus
  siRNA target sequence for Gcnt2 (NM_008105.2,335-353).
ctcaagtgtgctcatcttt

SEQ ID NO: 599458 - DNA, 19 bp, Mus musculus
  siRNA target sequence for Gcnt2 (NM_008105.2,370-388).
cggttcctgtggagaaaca

SEQ ID NO: 599459 - DNA, 19 bp, Mus musculus
  siRNA target sequence for Gcnt2 (NM_008105.2,410-428).
cttcttgcacagaatatgt

SEQ ID NO: 599460 - DNA, 19 bp, Mus musculus
  siRNA target sequence for Gcnt2 (NM_008105.2,461-479).
ctcaggaagaggtcgattt

SEQ ID NO: 599461 - DNA, 19 bp, Mus musculus
  siRNA target sequence for Gcnt2 (NM_008105.2,466-484).
gaagaggtcgattttcctt

SEQ ID NO: 599462 - DNA, 19 bp, Mus musculus
  siRNA target sequence for Gcnt2 (NM_008105.2,530-548).
ggctcttcagggcaatctt

SEQ ID NO: 599463 - DNA, 19 bp, Mus musculus
  siRNA target sequence for Gcnt2 (NM_008105.2,859-877).
ccagcccacgccattggaa

SEQ ID NO: 599464 - DNA, 19 bp, Mus musculus
  siRNA target sequence for Gcnt2 (NM_008105.2,894-912).
ccgggaacacctaagcaaa

SEQ ID NO: 599465 - DNA, 19 bp, Mus musculus
  siRNA target sequence for Gcnt2 (NM_008105.2,916-934).
ctttcctacgtgatcagaa

SEQ ID NO: 599466 - DNA, 19 bp, Mus musculus
  siRNA target sequence for Gcnt2 (NM_008105.2,996-1014).
cgccctgtcgagagagttt

SEQ ID NO: 599467 - DNA, 19 bp, Mus musculus
  siRNA target sequence for Gcnt2 (NM_008105.2,1000-1018).
ctgtcgagagagtttgcta

SEQ ID NO: 599468 - DNA, 19 bp, Mus musculus
  siRNA target sequence for Gcnt2 (NM_008105.2,1053-1071).
gctccattggtccaaagat

SEQ ID NO: 599469 - DNA, 19 bp, Mus musculus
  siRNA target sequence for Gcnt2 (NM_008105.2,1054-1072).
ctccattggtccaaagata

SEQ ID NO: 599470 - DNA, 19 bp, Mus musculus
  siRNA target sequence for Gcnt2 (NM_008105.2,1056-1074).
ccattggtccaaagatact

SEQ ID NO: 599471 - DNA, 19 bp, Mus musculus
  siRNA target sequence for Gcnt2 (NM_008105.2,1057-1075).
cattggtccaaagatactt

SEQ ID NO: 599472 - DNA, 19 bp, Mus musculus
  siRNA target sequence for Gcnt2 (NM_008105.2,1225-1243).
gtccatggcatttgtatct

SEQ ID NO: 599473 - DNA, 19 bp, Mus musculus
  siRNA target sequence for Gcnt2 (NM_008105.2,1227-1245).
ccatggcatttgtatctat

SEQ ID NO: 599474 - DNA, 19 bp, Mus musculus
  siRNA target sequence for Gcnt2 (NM_008105.2,1231-1249).
ggcatttgtatctatggaa

SEQ ID NO: 599475 - DNA, 19 bp, Mus musculus
  siRNA target sequence for Gcnt2 (NM_008105.2,1255-1273).
gacttgcagtggctgatta

SEQ ID NO: 599476 - DNA, 19 bp, Mus musculus
  siRNA target sequence for Gcnt2 (NM_008105.2,1257-1275).
cttgcagtggctgattaat

SEQ ID NO: 599477 - DNA, 19 bp, Mus musculus
  siRNA target sequence for Gcnt2 (NM_008105.2,1284-1302).
cctgtttgctaacaaattt

SEQ ID NO: 599478 - DNA, 19 bp, Mus musculus
  siRNA target sequence for Gcnt2 (NM_008105.2,1387-1405).
cagccgagctggtatttct

SEQ ID NO: 599479 - DNA, 19 bp, Mus musculus
  siRNA target sequence for Gcnt2 (NM_023887.3,231-249).
cttggaagtacagtctttt

SEQ ID NO: 599480 - DNA, 19 bp, Mus musculus
  siRNA target sequence for Gcnt2 (NM_023887.3,266-284).
gctgccttgatgcttatgt

SEQ ID NO: 599481 - DNA, 19 bp, Mus musculus
  siRNA target sequence for Gcnt2 (NM_023887.3,278-296).
cttatgtttatgtacgata

SEQ ID NO: 599482 - DNA, 19 bp, Mus musculus
  siRNA target sequence for Gcnt2 (NM_023887.3,322-340).
cccgagggcggtttccaat

SEQ ID NO: 599483 - DNA, 19 bp, Mus musculus
  siRNA target sequence for Gcnt2 (NM_023887.3,323-341).
ccgagggcggtttccaata

SEQ ID NO: 599484 - DNA, 19 bp, Mus musculus
  siRNA target sequence for Gcnt2 (NM_023887.3,324-342).
cgagggcggtttccaatat

SEQ ID NO: 599485 - DNA, 19 bp, Mus musculus
  siRNA target sequence for Gcnt2 (NM_023887.3,325-343).
gagggcggtttccaatatt

SEQ ID NO: 599486 - DNA, 19 bp, Mus musculus
  siRNA target sequence for Gcnt2 (NM_023887.3,328-346).
ggcggtttccaatatttca

SEQ ID NO: 599487 - DNA, 19 bp, Mus musculus
  siRNA target sequence for Gcnt2 (NM_023887.3,401-419).
gacagcgcacggaaaacca

SEQ ID NO: 599488 - DNA, 19 bp, Mus musculus
  siRNA target sequence for Gcnt2 (NM_023887.3,435-453).
cctgccccgagtacaagat

SEQ ID NO: 599489 - DNA, 19 bp, Mus musculus
  siRNA target sequence for Gcnt2 (NM_023887.3,436-454).
ctgccccgagtacaagatt

SEQ ID NO: 599490 - DNA, 19 bp, Mus musculus
  siRNA target sequence for Gcnt2 (NM_023887.3,438-456).
gccccgagtacaagattca

SEQ ID NO: 599491 - DNA, 19 bp, Mus musculus
  siRNA target sequence for Gcnt2 (NM_023887.3,440-458).
cccgagtacaagattcaaa

SEQ ID NO: 599492 - DNA, 19 bp, Mus musculus
  siRNA target sequence for Gcnt2 (NM_023887.3,516-534).
cacttactatccacaaaga

SEQ ID NO: 599493 - DNA, 19 bp, Mus musculus
  siRNA target sequence for Gcnt2 (NM_023887.3,832-850).
gtacctgaaacggtttatt

SEQ ID NO: 599494 - DNA, 19 bp, Mus musculus
  siRNA target sequence for Gcnt2 (NM_023887.3,949-967).
gcacaatacagcaagatta

SEQ ID NO: 599495 - DNA, 19 bp, Mus musculus
  siRNA target sequence for Gcnt2 (NM_023887.3,950-968).
cacaatacagcaagattaa

SEQ ID NO: 599496 - DNA, 19 bp, Mus musculus
  siRNA target sequence for Gcnt2 (NM_023887.3,1018-1036).
ggctctcacacgggaattt

SEQ ID NO: 599497 - DNA, 19 bp, Mus musculus
  siRNA target sequence for Gcnt2 (NM_023887.3,1038-1056).
ctaactttgtcctcaaaga

SEQ ID NO: 599498 - DNA, 19 bp, Mus musculus
  siRNA target sequence for Gcnt2 (NM_023887.3,1084-1102).
gtccaaggacacgtatagt

SEQ ID NO: 599499 - DNA, 19 bp, Mus musculus
  siRNA target sequence for Gcnt2 (NM_133219.1,252-270).
gagcctacgcgggaaagtt

SEQ ID NO: 599500 - DNA, 19 bp, Mus musculus
  siRNA target sequence for Gcnt2 (NM_133219.1,254-272).
gcctacgcgggaaagtttt

SEQ ID NO: 599501 - DNA, 19 bp, Mus musculus
  siRNA target sequence for Gcnt2 (NM_133219.1,377-395).
ctgtcaccatctgtgatta

SEQ ID NO: 599502 - DNA, 19 bp, Mus musculus
  siRNA target sequence for Gcnt2 (NM_133219.1,389-407).
gtgattacggcttgcaaaa

SEQ ID NO: 599503 - DNA, 19 bp, Mus musculus
  siRNA target sequence for Gcnt2 (NM_133219.1,403-421).
caaaatcatacgttcttca

SEQ ID NO: 599504 - DNA, 19 bp, Mus musculus
  siRNA target sequence for Gcnt2 (NM_133219.1,555-573).
caaagacttcgataccttt

SEQ ID NO: 599505 - DNA, 19 bp, Mus musculus
  siRNA target sequence for Gcnt2 (NM_133219.1,843-861).
caaggaaataattaaccat

SEQ ID NO: 599506 - DNA, 19 bp, Mus musculus
  siRNA target sequence for Gcnt2 (NM_133219.1,900-918).
gctgccccctgcgtacata

SEQ ID NO: 599507 - DNA, 19 bp, Mus musculus
  siRNA target sequence for Gcnt2 (NM_133219.1,903-921).
gccccctgcgtacatagtt

SEQ ID NO: 599508 - DNA, 19 bp, Mus musculus
  siRNA target sequence for Gcnt2 (NM_133219.1,905-923).
cccctgcgtacatagttgt

SEQ ID NO: 599509 - DNA, 19 bp, Mus musculus
  siRNA target sequence for Gcnt2 (NM_133219.1,906-924).
ccctgcgtacatagttgta

SEQ ID NO: 599510 - DNA, 19 bp, Mus musculus
  siRNA target sequence for Gcnt2 (NM_133219.1,915-933).
catagttgtacggactaaa

SEQ ID NO: 599511 - DNA, 19 bp, Mus musculus
  siRNA target sequence for Gcnt2 (NM_133219.1,955-973).
ggcaaagacggatatttta

SEQ ID NO: 599512 - DNA, 19 bp, Mus musculus
  siRNA target sequence for Gcnt2 (NM_133219.1,956-974).
gcaaagacggatattttat

SEQ ID NO: 599513 - DNA, 19 bp, Mus musculus
  siRNA target sequence for Gcnt2 (NM_133219.1,961-979).
gacggatattttatgcata

SEQ ID NO: 599514 - DNA, 19 bp, Mus musculus
  siRNA target sequence for Gcnt2 (NM_133219.1,963-981).
cggatattttatgcataaa

SEQ ID NO: 599515 - DNA, 19 bp, Mus musculus
  siRNA target sequence for Gcnt2 (NM_133219.1,1001-1019).
cacctccacaccaactgat

SEQ ID NO: 599516 - DNA, 19 bp, Mus musculus
  siRNA target sequence for Gcnt2 (NM_133219.1,1006-1024).
ccacaccaactgatcatct

SEQ ID NO: 599517 - DNA, 19 bp, Mus musculus
  siRNA target sequence for Gcnt2 (NM_133219.1,1007-1025).
cacaccaactgatcatcta

SEQ ID NO: 599518 - DNA, 19 bp, Mus musculus
  siRNA target sequence for Gcnt2 (NM_133219.1,1009-1027).
caccaactgatcatctact

SEQ ID NO: 599519 - DNA, 19 bp, Mus musculus
  siRNA target sequence for Gcnt2 (NM_133219.1,1046-1064).
ccctcacccgggactttgt

SEQ ID NO: 599520 - DNA, 19 bp, Mus musculus
  siRNA target sequence for Gcnt2 (NM_133219.1,1054-1072).
cgggactttgtcaacttta

SEQ ID NO: 599521 - DNA, 19 bp, Mus musculus
  siRNA target sequence for Gcnt2 (NM_133219.1,1101-1119).
cttagagtggtctaaagat

SEQ ID NO: 599522 - DNA, 19 bp, Mus musculus
  siRNA target sequence for Gcnt2 (NM_133219.1,1121-1139).
cctatagccctgatgaaca

SEQ ID NO: 599523 - DNA, 19 bp, Mus musculus
  siRNA target sequence for 2010013H22Rik (NM_028087.1,445-463).
cagactgtgagcacttcaa

SEQ ID NO: 599524 - DNA, 19 bp, Mus musculus
  siRNA target sequence for 2010013H22Rik (NM_028087.1,464-482).
gaccaagaggaagtttata

SEQ ID NO: 599525 - DNA, 19 bp, Mus musculus
  siRNA target sequence for 2010013H22Rik (NM_028087.1,466-484).
ccaagaggaagtttataca

SEQ ID NO: 599526 - DNA, 19 bp, Mus musculus
  siRNA target sequence for 2010013H22Rik (NM_028087.1,581-599).
gtacacccctcagaatgta

SEQ ID NO: 599527 - DNA, 19 bp, Mus musculus
  siRNA target sequence for 2010013H22Rik (NM_028087.1,609-627).
cacatggatcagaagtctt

SEQ ID NO: 599528 - DNA, 19 bp, Mus musculus
  siRNA target sequence for 2010013H22Rik (NM_028087.1,625-643).
cttcagaaccctttaagca

SEQ ID NO: 599529 - DNA, 19 bp, Mus musculus
  siRNA target sequence for 2010013H22Rik (NM_028087.1,664-682).
catgcttccccaatgtctt

SEQ ID NO: 599530 - DNA, 19 bp, Mus musculus
  siRNA target sequence for 2010013H22Rik (NM_028087.1,727-745).
gggtgcaggctgacctaaa

SEQ ID NO: 599531 - DNA, 19 bp, Mus musculus
  siRNA target sequence for 2010013H22Rik (NM_028087.1,840-858).
gtcaaggccctcaagctat

SEQ ID NO: 599532 - DNA, 19 bp, Mus musculus
  siRNA target sequence for 2010013H22Rik (NM_028087.1,845-863).
ggccctcaagctattgaaa

SEQ ID NO: 599533 - DNA, 19 bp, Mus musculus
  siRNA target sequence for 2010013H22Rik (NM_028087.1,887-905).
ggtaccacctccacataaa

SEQ ID NO: 599534 - DNA, 19 bp, Mus musculus
  siRNA target sequence for 2010013H22Rik (NM_028087.1,910-928).
cccgctggaaatatcacta

SEQ ID NO: 599535 - DNA, 19 bp, Mus musculus
  siRNA target sequence for 2010013H22Rik (NM_028087.1,976-994).
cacctaataacctaaccat

SEQ ID NO: 599536 - DNA, 19 bp, Mus musculus
  siRNA target sequence for 2010013H22Rik (NM_028087.1,1038-1056).
gaacacgtgttcagtaact

SEQ ID NO: 599537 - DNA, 19 bp, Mus musculus
  siRNA target sequence for 2010013H22Rik (NM_028087.1,1041-1059).
cacgtgttcagtaactcaa

SEQ ID NO: 599538 - DNA, 19 bp, Mus musculus
  siRNA target sequence for 2010013H22Rik (NM_028087.1,1043-1061).
cgtgttcagtaactcaaaa

SEQ ID NO: 599539 - DNA, 19 bp, Mus musculus
  siRNA target sequence for 2010013H22Rik (NM_028087.1,1153-1171).
cagatcccttgcatcgaaa

SEQ ID NO: 599540 - DNA, 19 bp, Mus musculus
  siRNA target sequence for 2010013H22Rik (NM_028087.1,1155-1173).
gatcccttgcatcgaaaat

SEQ ID NO: 599541 - DNA, 19 bp, Mus musculus
  siRNA target sequence for 2010013H22Rik (NM_028087.1,1159-1177).
ccttgcatcgaaaatttga

SEQ ID NO: 599542 - DNA, 19 bp, Mus musculus
  siRNA target sequence for 2010013H22Rik (NM_028087.1,1195-1213).
ccattgcgagactaaccaa

SEQ ID NO: 599543 - DNA, 19 bp, Mus musculus
  siRNA target sequence for 2010013H22Rik (NM_028087.1,1220-1238).
cgaccatgagggagacatt

SEQ ID NO: 599544 - DNA, 19 bp, Mus musculus
  siRNA target sequence for 2010013H22Rik (NM_028087.1,1335-1353).
cacctcttggccaacaagt

SEQ ID NO: 599545 - DNA, 19 bp, Mus musculus
  siRNA target sequence for 2010013H22Rik (NM_028087.1,1358-1376).
cccaaaggtggatgataat

SEQ ID NO: 599546 - DNA, 19 bp, Mus musculus
  siRNA target sequence for 2010013H22Rik (NM_028087.1,1415-1433).
catctatgggactgaacta

SEQ ID NO: 599547 - DNA, 19 bp, Mus musculus
  siRNA target sequence for Xylt1 (NM_175645.2,288-306).
cgctggtggtgtggaattt

SEQ ID NO: 599548 - DNA, 19 bp, Mus musculus
  siRNA target sequence for Xylt1 (NM_175645.2,647-665).
gtccccaaggactttgaga

SEQ ID NO: 599549 - DNA, 19 bp, Mus musculus
  siRNA target sequence for Xylt1 (NM_175645.2,1237-1255).
caaagaccatttctactat

SEQ ID NO: 599550 - DNA, 19 bp, Mus musculus
  siRNA target sequence for Xylt1 (NM_175645.2,1393-1411).
gagcatgcgggatctacta

SEQ ID NO: 599551 - DNA, 19 bp, Mus musculus
  siRNA target sequence for Xylt1 (NM_175645.2,1395-1413).
gcatgcgggatctactaga

SEQ ID NO: 599552 - DNA, 19 bp, Mus musculus
  siRNA target sequence for Xylt1 (NM_175645.2,1462-1480).
ctaccccatcaggacaaat

SEQ ID NO: 599553 - DNA, 19 bp, Mus musculus
  siRNA target sequence for Xylt1 (NM_175645.2,1503-1521).
ccagatatcgagatatgaa

SEQ ID NO: 599554 - DNA, 19 bp, Mus musculus
  siRNA target sequence for Xylt1 (NM_175645.2,1583-1601).
ctcttcctggagtgtgata

SEQ ID NO: 599555 - DNA, 19 bp, Mus musculus
  siRNA target sequence for Xylt1 (NM_175645.2,1585-1603).
cttcctggagtgtgataca

SEQ ID NO: 599556 - DNA, 19 bp, Mus musculus
  siRNA target sequence for Xylt1 (NM_175645.2,1662-1680).
ctgattggttcctgctaaa

SEQ ID NO: 599557 - DNA, 19 bp, Mus musculus
  siRNA target sequence for Xylt1 (NM_175645.2,1672-1690).
cctgctaaacaggaagttt

SEQ ID NO: 599558 - DNA, 19 bp, Mus musculus
  siRNA target sequence for Xylt1 (NM_175645.2,1728-1746).
ccaagatgaagcagttcta

SEQ ID NO: 599559 - DNA, 19 bp, Mus musculus
  siRNA target sequence for Xylt1 (NM_175645.2,2434-2452).
gaggctgttccggaacttt

SEQ ID NO: 599560 - DNA, 19 bp, Mus musculus
  siRNA target sequence for Xylt1 (NM_175645.2,2480-2498).
ccggtggggatgcagaaat

SEQ ID NO: 599561 - DNA, 19 bp, Mus musculus
  siRNA target sequence for Xylt1 (NM_175645.2,2565-2583).
cctatgatatcctgattga

SEQ ID NO: 599562 - DNA, 19 bp, Mus musculus
  siRNA target sequence for Xylt1 (NM_175645.2,2582-2600).
gagtccactgcggaattca

SEQ ID NO: 599563 - DNA, 19 bp, Mus musculus
  siRNA target sequence for Xylt2 (NM_145828.1,249-267).
gcgtccaatgggaagagat

SEQ ID NO: 599564 - DNA, 19 bp, Mus musculus
  siRNA target sequence for Xylt2 (NM_145828.1,447-465).
cccagcactacgagaatgt

SEQ ID NO: 599565 - DNA, 19 bp, Mus musculus
  siRNA target sequence for Xylt2 (NM_145828.1,510-528).
gccttctgaggatgtatct

SEQ ID NO: 599566 - DNA, 19 bp, Mus musculus
  siRNA target sequence for Xylt2 (NM_145828.1,512-530).
cttctgaggatgtatctga

SEQ ID NO: 599567 - DNA, 19 bp, Mus musculus
  siRNA target sequence for Xylt2 (NM_145828.1,541-559).
ggaccttctggaaattcct

SEQ ID NO: 599568 - DNA, 19 bp, Mus musculus
  siRNA target sequence for Xylt2 (NM_145828.1,586-604).
cctgagtgccactgactat

SEQ ID NO: 599569 - DNA, 19 bp, Mus musculus
  siRNA target sequence for Xylt2 (NM_145828.1,622-640).
ggagctggtagcattctta

SEQ ID NO: 599570 - DNA, 19 bp, Mus musculus
  siRNA target sequence for Xylt2 (NM_145828.1,819-837).
cacgcagctttgtggaata

SEQ ID NO: 599571 - DNA, 19 bp, Mus musculus
  siRNA target sequence for Xylt2 (NM_145828.1,822-840).
gcagctttgtggaatatgt

SEQ ID NO: 599572 - DNA, 19 bp, Mus musculus
  siRNA target sequence for Xylt2 (NM_145828.1,832-850).
ggaatatgtggtgtataca

SEQ ID NO: 599573 - DNA, 19 bp, Mus musculus
  siRNA target sequence for Xylt2 (NM_145828.1,867-885).
cccagcttcgccagttcta

SEQ ID NO: 599574 - DNA, 19 bp, Mus musculus
  siRNA target sequence for Xylt2 (NM_145828.1,871-889).
gcttcgccagttctataca

SEQ ID NO: 599575 - DNA, 19 bp, Mus musculus
  siRNA target sequence for Xylt2 (NM_145828.1,872-890).
cttcgccagttctatacat

SEQ ID NO: 599576 - DNA, 19 bp, Mus musculus
  siRNA target sequence for Xylt2 (NM_145828.1,951-969).
cgagcctggtggacaacaa

SEQ ID NO: 599577 - DNA, 19 bp, Mus musculus
  siRNA target sequence for Xylt2 (NM_145828.1,1208-1226).
gcctactgggagaacatct

SEQ ID NO: 599578 - DNA, 19 bp, Mus musculus
  siRNA target sequence for Xylt2 (NM_145828.1,1374-1392).
ccagcgtgcacctgtattt

SEQ ID NO: 599579 - DNA, 19 bp, Mus musculus
  siRNA target sequence for Xylt2 (NM_145828.1,1377-1395).
gcgtgcacctgtatttcta

SEQ ID NO: 599580 - DNA, 19 bp, Mus musculus
  siRNA target sequence for Xylt2 (NM_145828.1,1378-1396).
cgtgcacctgtatttctat

SEQ ID NO: 599581 - DNA, 19 bp, Mus musculus
  siRNA target sequence for Xylt2 (NM_145828.1,1694-1712).
gtggccacatcgtatgaca

SEQ ID NO: 599582 - DNA, 19 bp, Mus musculus
  siRNA target sequence for Xylt2 (NM_145828.1,1731-1749).
ccgaagtcacgcagtacaa

SEQ ID NO: 599583 - DNA, 19 bp, Mus musculus
  siRNA target sequence for Xylt2 (NM_145828.1,1788-1806).
ctgtccgcttgcttcagtt

SEQ ID NO: 599584 - DNA, 19 bp, Mus musculus
  siRNA target sequence for Xylt2 (NM_145828.1,1849-1867).
gacgttcaaccgcaaacta

SEQ ID NO: 599585 - DNA, 19 bp, Mus musculus
  siRNA target sequence for Xylt2 (NM_145828.1,1904-1922).
ggaccaccccacaacgaat

SEQ ID NO: 599586 - DNA, 19 bp, Mus musculus
  siRNA target sequence for Xylt2 (NM_145828.1,1905-1923).
gaccaccccacaacgaata

SEQ ID NO: 599587 - DNA, 19 bp, Mus musculus
  siRNA target sequence for Xylt2 (NM_145828.1,1907-1925).
ccaccccacaacgaataca

SEQ ID NO: 599588 - DNA, 19 bp, Mus musculus
  siRNA target sequence for Xylt2 (NM_145828.1,1908-1926).
caccccacaacgaatacat

SEQ ID NO: 599589 - DNA, 19 bp, Mus musculus
  siRNA target sequence for Fut1 (NM_008051.1,84-102).
gaatggaggaaacttcttt

SEQ ID NO: 599590 - DNA, 19 bp, Mus musculus
  siRNA target sequence for Fut1 (NM_008051.1,99-117).
ctttcgaaatggtctaact

SEQ ID NO: 599591 - DNA, 19 bp, Mus musculus
  siRNA target sequence for Fut1 (NM_008051.1,260-278).
caggaggcaggtttggtaa

SEQ ID NO: 599592 - DNA, 19 bp, Mus musculus
  siRNA target sequence for Fut1 (NM_008051.1,518-536).
ggacctttttccatcatct

SEQ ID NO: 599593 - DNA, 19 bp, Mus musculus
  siRNA target sequence for Fut1 (NM_008051.1,544-562).
cagattcgtagggaattca

SEQ ID NO: 599594 - DNA, 19 bp, Mus musculus
  siRNA target sequence for Fut1 (NM_008051.1,546-564).
gattcgtagggaattcact

SEQ ID NO: 599595 - DNA, 19 bp, Mus musculus
  siRNA target sequence for Fut1 (NM_008051.1,554-572).
gggaattcactctgcataa

SEQ ID NO: 599596 - DNA, 19 bp, Mus musculus
  siRNA target sequence for Fut1 (NM_008051.1,968-986).
cggtctaccttgcaaactt

SEQ ID NO: 599597 - DNA, 19 bp, Mus musculus
  siRNA target sequence for Fut1 (NM_008051.1,994-1012).
ccagattcggagtttctga

SEQ ID NO: 599598 - DNA, 19 bp, Mus musculus
  siRNA target sequence for Fut1 (NM_008051.1,995-1013).
cagattcggagtttctgaa

SEQ ID NO: 599599 - DNA, 19 bp, Mus musculus
  siRNA target sequence for Fut2 (NM_018876.2,238-256).
gaattacaggcggttcaaa

SEQ ID NO: 599600 - DNA, 19 bp, Mus musculus
  siRNA target sequence for Fut2 (NM_018876.2,309-327).
gggcatattcacgatcaat

SEQ ID NO: 599601 - DNA, 19 bp, Mus musculus
  siRNA target sequence for Fut2 (NM_018876.2,310-328).
ggcatattcacgatcaatt

SEQ ID NO: 599602 - DNA, 19 bp, Mus musculus
  siRNA target sequence for Fut2 (NM_018876.2,355-373).
ggcgaatatgctacattgt

SEQ ID NO: 599603 - DNA, 19 bp, Mus musculus
  siRNA target sequence for Fut2 (NM_018876.2,356-374).
gcgaatatgctacattgtt

SEQ ID NO: 599604 - DNA, 19 bp, Mus musculus
  siRNA target sequence for Fut2 (NM_018876.2,357-375).
cgaatatgctacattgttt

SEQ ID NO: 599605 - DNA, 19 bp, Mus musculus
  siRNA target sequence for Fut2 (NM_018876.2,907-925).
gtgtttgcgggcaatggta

SEQ ID NO: 599606 - DNA, 19 bp, Mus musculus
  siRNA target sequence for Fut2 (NM_018876.2,1063-1081).
gattctccgttcctcaaaa

SEQ ID NO: 599607 - DNA, 19 bp, Mus musculus
  siRNA target sequence for Fut2 (NM_018876.2,1069-1087).
ccgttcctcaaaatcttta

SEQ ID NO: 599608 - DNA, 19 bp, Mus musculus
  siRNA target sequence for Sec1 (NM_019934.1,929-947).
ctgtttacctggctaactt

SEQ ID NO: 599609 - DNA, 19 bp, Mus musculus
  siRNA target sequence for Sec1 (NM_019934.1,931-949).
gtttacctggctaacttta

SEQ ID NO: 599610 - DNA, 19 bp, Mus musculus
  siRNA target sequence for Sec1 (NM_019934.1,964-982).
cccttccacacggttttca

SEQ ID NO: 599611 - DNA, 19 bp, Mus musculus
  siRNA target sequence for Fut8 (NM_016893.2,669-687).
ggttcctggcgttggatta

SEQ ID NO: 599612 - DNA, 19 bp, Mus musculus
  siRNA target sequence for Fut8 (NM_016893.2,670-688).
gttcctggcgttggattat

SEQ ID NO: 599613 - DNA, 19 bp, Mus musculus
  siRNA target sequence for Fut8 (NM_016893.2,673-691).
cctggcgttggattatgct

SEQ ID NO: 599614 - DNA, 19 bp, Mus musculus
  siRNA target sequence for Fut8 (NM_016893.2,682-700).
ggattatgctcattctttt

SEQ ID NO: 599615 - DNA, 19 bp, Mus musculus
  siRNA target sequence for Fut8 (NM_016893.2,702-720).
gcctgggggaccttgttat

SEQ ID NO: 599616 - DNA, 19 bp, Mus musculus
  siRNA target sequence for Fut8 (NM_016893.2,703-721).
cctgggggaccttgttatt

SEQ ID NO: 599617 - DNA, 19 bp, Mus musculus
  siRNA target sequence for Fut8 (NM_016893.2,775-793).
gagaactctccaagattct

SEQ ID NO: 599618 - DNA, 19 bp, Mus musculus
  siRNA target sequence for Fut8 (NM_016893.2,796-814).
caaagcttgaacgcttaaa

SEQ ID NO: 599619 - DNA, 19 bp, Mus musculus
  siRNA target sequence for Fut8 (NM_016893.2,895-913).
gaagagtccgtgttttaga

SEQ ID NO: 599620 - DNA, 19 bp, Mus musculus
  siRNA target sequence for Fut8 (NM_016893.2,956-974).
gaaacaagctagaaatggt

SEQ ID NO: 599621 - DNA, 19 bp, Mus musculus
  siRNA target sequence for Fut8 (NM_016893.2,973-991).
gtctggggaaggatcatga

SEQ ID NO: 599622 - DNA, 19 bp, Mus musculus
  siRNA target sequence for Fut8 (NM_016893.2,978-996).
gggaaggatcatgaaatct

SEQ ID NO: 599623 - DNA, 19 bp, Mus musculus
  siRNA target sequence for Fut8 (NM_016893.2,983-1001).
ggatcatgaaatcttaaga

SEQ ID NO: 599624 - DNA, 19 bp, Mus musculus
  siRNA target sequence for Fut8 (NM_016893.2,984-1002).
gatcatgaaatcttaagaa

SEQ ID NO: 599625 - DNA, 19 bp, Mus musculus
  siRNA target sequence for Fut8 (NM_016893.2,1044-1062).
caaagcgaactgaagaaat

SEQ ID NO: 599626 - DNA, 19 bp, Mus musculus
  siRNA target sequence for Fut8 (NM_016893.2,1136-1154).
gtctatcatgacagatcta

SEQ ID NO: 599627 - DNA, 19 bp, Mus musculus
  siRNA target sequence for Fut8 (NM_016893.2,1138-1156).
ctatcatgacagatctata

SEQ ID NO: 599628 - DNA, 19 bp, Mus musculus
  siRNA target sequence for Fut8 (NM_016893.2,1180-1198).
caggggattggcgtgaaaa

SEQ ID NO: 599629 - DNA, 19 bp, Mus musculus
  siRNA target sequence for Fut8 (NM_016893.2,1183-1201).
gggattggcgtgaaaaaga

SEQ ID NO: 599630 - DNA, 19 bp, Mus musculus
  siRNA target sequence for Fut8 (NM_016893.2,1224-1242).
gtccagcggagaataacat

SEQ ID NO: 599631 - DNA, 19 bp, Mus musculus
  siRNA target sequence for Fut8 (NM_016893.2,1226-1244).
ccagcggagaataacatat

SEQ ID NO: 599632 - DNA, 19 bp, Mus musculus
  siRNA target sequence for Fut8 (NM_016893.2,1240-1258).
catatctccagaatcctaa

SEQ ID NO: 599633 - DNA, 19 bp, Mus musculus
  siRNA target sequence for Fut8 (NM_016893.2,1281-1299).
ctggtgtgtaacatcaata

SEQ ID NO: 599634 - DNA, 19 bp, Mus musculus
  siRNA target sequence for Fut8 (NM_016893.2,1283-1301).
ggtgtgtaacatcaataaa

SEQ ID NO: 599635 - DNA, 19 bp, Mus musculus
  siRNA target sequence for Fut8 (NM_016893.2,1334-1352).
ggtctactgtttcatgatt

SEQ ID NO: 599636 - DNA, 19 bp, Mus musculus
  siRNA target sequence for Fut8 (NM_016893.2,1363-1381).
cccagcgaacactcatctt

SEQ ID NO: 599637 - DNA, 19 bp, Mus musculus
  siRNA target sequence for Fut8 (NM_016893.2,1389-1407).
cagaattggcgctatgcta

SEQ ID NO: 599638 - DNA, 19 bp, Mus musculus
  siRNA target sequence for Fut8 (NM_016893.2,1413-1431).
ggatgggagactgtgttta

SEQ ID NO: 599639 - DNA, 19 bp, Mus musculus
  siRNA target sequence for Fut8 (NM_016893.2,1434-1452).
cctgtaagtgagacatgta

SEQ ID NO: 599640 - DNA, 19 bp, Mus musculus
  siRNA target sequence for Fut8 (NM_016893.2,1517-1535).
ggtcgagctccccattgta

SEQ ID NO: 599641 - DNA, 19 bp, Mus musculus
  siRNA target sequence for Fut8 (NM_016893.2,1630-1648).
ggtgggtgtcccagtttgt

SEQ ID NO: 599642 - DNA, 19 bp, Mus musculus
  siRNA target sequence for Fut8 (NM_016893.2,1634-1652).
ggtgtcccagtttgtcaaa

SEQ ID NO: 599643 - DNA, 19 bp, Mus musculus
  siRNA target sequence for Fut8 (NM_016893.2,1635-1653).
gtgtcccagtttgtcaaat

SEQ ID NO: 599644 - DNA, 19 bp, Mus musculus
  siRNA target sequence for Fut8 (NM_016893.2,1715-1733).
cttcaaacatccagttatt

SEQ ID NO: 599645 - DNA, 19 bp, Mus musculus
  siRNA target sequence for Fut8 (NM_016893.2,1802-1820).
ggtacacgttgaagaacat

SEQ ID NO: 599646 - DNA, 19 bp, Mus musculus
  siRNA target sequence for Fut8 (NM_016893.2,1803-1821).
gtacacgttgaagaacatt

SEQ ID NO: 599647 - DNA, 19 bp, Mus musculus
  siRNA target sequence for Fut8 (NM_016893.2,1873-1891).
ctactgatgatcctacttt

SEQ ID NO: 599648 - DNA, 19 bp, Mus musculus
  siRNA target sequence for Fut8 (NM_016893.2,1876-1894).
ctgatgatcctactttgtt

SEQ ID NO: 599649 - DNA, 19 bp, Mus musculus
  siRNA target sequence for Fut8 (NM_016893.2,1913-1931).
gtactccaattatgaattt

SEQ ID NO: 599650 - DNA, 19 bp, Mus musculus
  siRNA target sequence for Fut8 (NM_016893.2,1926-1944).
gaatttattagtgataact

SEQ ID NO: 599651 - DNA, 19 bp, Mus musculus
  siRNA target sequence for Fut8 (NM_016893.2,1968-1986).
cacaatcggtacacagaaa

SEQ ID NO: 599652 - DNA, 19 bp, Mus musculus
  siRNA target sequence for Fut8 (NM_016893.2,1975-1993).
ggtacacagaaaattcact

SEQ ID NO: 599653 - DNA, 19 bp, Mus musculus
  siRNA target sequence for Fut8 (NM_016893.2,1996-2014).
ggggtgtgatcctggatat

SEQ ID NO: 599654 - DNA, 19 bp, Mus musculus
  siRNA target sequence for Fut8 (NM_016893.2,1997-2015).
gggtgtgatcctggatata

SEQ ID NO: 599655 - DNA, 19 bp, Mus musculus
  siRNA target sequence for Fut8 (NM_016893.2,2007-2025).
ctggatatacactttctct

SEQ ID NO: 599656 - DNA, 19 bp, Mus musculus
  siRNA target sequence for Fut8 (NM_016893.2,2063-2081).
ggtctgtcgggttgcttat

SEQ ID NO: 599657 - DNA, 19 bp, Mus musculus
  siRNA target sequence for Fut8 (NM_016893.2,2066-2084).
ctgtcgggttgcttatgaa

SEQ ID NO: 599658 - DNA, 19 bp, Mus musculus
  siRNA target sequence for Fut8 (NM_016893.2,2068-2086).
gtcgggttgcttatgaaat

SEQ ID NO: 599659 - DNA, 19 bp, Mus musculus
  siRNA target sequence for Fut8 (NM_016893.2,2109-2127).
gcctctgcgaacttccatt

SEQ ID NO: 599660 - DNA, 19 bp, Mus musculus
  siRNA target sequence for Fut8 (NM_016893.2,2113-2131).
ctgcgaacttccattcttt

SEQ ID NO: 599661 - DNA, 19 bp, Mus musculus
  siRNA target sequence for Fut8 (NM_016893.2,2197-2215).
ctcgaactgaagaggaaat

SEQ ID NO: 599662 - DNA, 19 bp, Mus musculus
  siRNA target sequence for Fut8 (NM_016893.2,2251-2269).
gaaaccattgggatggtta

SEQ ID NO: 599663 - DNA, 19 bp, Mus musculus
  siRNA target sequence for Fut8 (NM_016893.2,2261-2279).
ggatggttattctaaaggt

SEQ ID NO: 599664 - DNA, 19 bp, Mus musculus
  siRNA target sequence for Fut8 (NM_016893.2,2262-2280).
gatggttattctaaaggta

SEQ ID NO: 599665 - DNA, 19 bp, Mus musculus
  siRNA target sequence for Fut8 (NM_016893.2,2336-2354).
gatagaaacagtcaagtat

SEQ ID NO: 599666 - DNA, 19 bp, Mus musculus
  siRNA target sequence for Fut10 (NM_134161.1,334-352).
cagcgactgtctttctgat

SEQ ID NO: 599667 - DNA, 19 bp, Mus musculus
  siRNA target sequence for Fut10 (NM_134161.1,419-437).
gcaagacggacatagagat

SEQ ID NO: 599668 - DNA, 19 bp, Mus musculus
  siRNA target sequence for Fut10 (NM_134161.1,640-658).
ccagggccttcctattcta

SEQ ID NO: 599669 - DNA, 19 bp, Mus musculus
  siRNA target sequence for Fut10 (NM_134161.1,694-712).
ctcgggaagcccatcatga

SEQ ID NO: 599670 - DNA, 19 bp, Mus musculus
  siRNA target sequence for Fut10 (NM_134161.1,734-752).
gtcccccaaaaacaattat

SEQ ID NO: 599671 - DNA, 19 bp, Mus musculus
  siRNA target sequence for Fut10 (NM_134161.1,917-935).
ggccccattggtatatgtt

SEQ ID NO: 599672 - DNA, 19 bp, Mus musculus
  siRNA target sequence for Fut10 (NM_134161.1,986-1004).
gatggcgtacattgaagtt

SEQ ID NO: 599673 - DNA, 19 bp, Mus musculus
  siRNA target sequence for Fut10 (NM_134161.1,989-1007).
ggcgtacattgaagttgat

SEQ ID NO: 599674 - DNA, 19 bp, Mus musculus
  siRNA target sequence for Fut10 (NM_134161.1,990-1008).
gcgtacattgaagttgatt

SEQ ID NO: 599675 - DNA, 19 bp, Mus musculus
  siRNA target sequence for Fut10 (NM_134161.1,1009-1027).
cctatggcgagtgtttaca

SEQ ID NO: 599676 - DNA, 19 bp, Mus musculus
  siRNA target sequence for Fut10 (NM_134161.1,1090-1108).
gagtcattgcccagtataa

SEQ ID NO: 599677 - DNA, 19 bp, Mus musculus
  siRNA target sequence for Fut10 (NM_134161.1,1112-1130).
catcctggcctttgagaat

SEQ ID NO: 599678 - DNA, 19 bp, Mus musculus
  siRNA target sequence for Fut10 (NM_134161.1,1182-1200).
ggggtcgtgcccgtgtatt

SEQ ID NO: 599679 - DNA, 19 bp, Mus musculus
  siRNA target sequence for Fut10 (NM_134161.1,1183-1201).
gggtcgtgcccgtgtatta

SEQ ID NO: 599680 - DNA, 19 bp, Mus musculus
  siRNA target sequence for Fut10 (NM_134161.1,1219-1237).
ccgactggcttccaagtaa

SEQ ID NO: 599681 - DNA, 19 bp, Mus musculus
  siRNA target sequence for Fut10 (NM_134161.1,1278-1296).
gagctggcgagcttcatta

SEQ ID NO: 599682 - DNA, 19 bp, Mus musculus
  siRNA target sequence for Fut10 (NM_134161.1,1281-1299).
ctggcgagcttcattagga

SEQ ID NO: 599683 - DNA, 19 bp, Mus musculus
  siRNA target sequence for Fut10 (NM_134161.1,1311-1329).
gacgatgggttgtatgaga

SEQ ID NO: 599684 - DNA, 19 bp, Mus musculus
  siRNA target sequence for Fut10 (NM_134161.1,1347-1365).
ctaaagggcaagatctcta

SEQ ID NO: 599685 - DNA, 19 bp, Mus musculus
  siRNA target sequence for Fut10 (NM_134161.1,1402-1420).
ggggtgtgcaggacattaa

SEQ ID NO: 599686 - DNA, 19 bp, Mus musculus
  siRNA target sequence for Fut10 (NM_134161.1,1572-1590).
cctgccacagggctctatt

SEQ ID NO: 599687 - DNA, 19 bp, Mus musculus
  siRNA target sequence for Fut4 (NM_010242.2,322-340).
gcgttgaccaccttcatct

SEQ ID NO: 599688 - DNA, 19 bp, Mus musculus
  siRNA target sequence for Fut4 (NM_010242.2,707-725).
ggtgggtgtggatgaactt

SEQ ID NO: 599689 - DNA, 19 bp, Mus musculus
  siRNA target sequence for Fut4 (NM_010242.2,712-730).
gtgtggatgaacttcgaat

SEQ ID NO: 599690 - DNA, 19 bp, Mus musculus
  siRNA target sequence for Fut4 (NM_010242.2,797-815).
ggaccgactcggatgtctt

SEQ ID NO: 599691 - DNA, 19 bp, Mus musculus
  siRNA target sequence for Fut4 (NM_010242.2,1050-1068).
ccgctacaagttttatcta

SEQ ID NO: 599692 - DNA, 19 bp, Mus musculus
  siRNA target sequence for Fut4 (NM_010242.2,1082-1100).
cacggcacgtggattacat

SEQ ID NO: 599693 - DNA, 19 bp, Mus musculus
  siRNA target sequence for Fut4 (NM_010242.2,1084-1102).
cggcacgtggattacatca

SEQ ID NO: 599694 - DNA, 19 bp, Mus musculus
  siRNA target sequence for Fut4 (NM_010242.2,1158-1176).
cccagatcgtgccaactat

SEQ ID NO: 599695 - DNA, 19 bp, Mus musculus
  siRNA target sequence for Fut4 (NM_010242.2,1160-1178).
cagatcgtgccaactatga

SEQ ID NO: 599696 - DNA, 19 bp, Mus musculus
  siRNA target sequence for Fut4 (NM_010242.2,1212-1230).
ggacgatttccctaatgct

SEQ ID NO: 599697 - DNA, 19 bp, Mus musculus
  siRNA target sequence for Fut9 (NM_010243.2,330-348).
cattcttcgcccatttcta

SEQ ID NO: 599698 - DNA, 19 bp, Mus musculus
  siRNA target sequence for Fut9 (NM_010243.2,448-466).
gtgctgaaaatgaaaaatt

SEQ ID NO: 599699 - DNA, 19 bp, Mus musculus
  siRNA target sequence for Fut9 (NM_010243.2,471-489).
ctccacaaaaactgattat

SEQ ID NO: 599700 - DNA, 19 bp, Mus musculus
  siRNA target sequence for Fut9 (NM_010243.2,548-566).
catcctgccaagcaatgtt

SEQ ID NO: 599701 - DNA, 19 bp, Mus musculus
  siRNA target sequence for Fut9 (NM_010243.2,551-569).
cctgccaagcaatgttcaa

SEQ ID NO: 599702 - DNA, 19 bp, Mus musculus
  siRNA target sequence for Fut9 (NM_010243.2,554-572).
gccaagcaatgttcaatat

SEQ ID NO: 599703 - DNA, 19 bp, Mus musculus
  siRNA target sequence for Fut9 (NM_010243.2,593-611).
cagaccgctcattgtacaa

SEQ ID NO: 599704 - DNA, 19 bp, Mus musculus
  siRNA target sequence for Fut9 (NM_010243.2,595-613).
gaccgctcattgtacaaca

SEQ ID NO: 599705 - DNA, 19 bp, Mus musculus
  siRNA target sequence for Fut9 (NM_010243.2,597-615).
ccgctcattgtacaacaaa

SEQ ID NO: 599706 - DNA, 19 bp, Mus musculus
  siRNA target sequence for Fut9 (NM_010243.2,598-616).
cgctcattgtacaacaaat

SEQ ID NO: 599707 - DNA, 19 bp, Mus musculus
  siRNA target sequence for Fut9 (NM_010243.2,617-635).
cccatgcggtcctgattca

SEQ ID NO: 599708 - DNA, 19 bp, Mus musculus
  siRNA target sequence for Fut9 (NM_010243.2,738-756).
ccaaaagagtggcattgaa

SEQ ID NO: 599709 - DNA, 19 bp, Mus musculus
  siRNA target sequence for Fut9 (NM_010243.2,762-780).
gttcaacctgactctaact

SEQ ID NO: 599710 - DNA, 19 bp, Mus musculus
  siRNA target sequence for Fut9 (NM_010243.2,765-783).
caacctgactctaacttat

SEQ ID NO: 599711 - DNA, 19 bp, Mus musculus
  siRNA target sequence for Fut9 (NM_010243.2,779-797).
cttatcgccgtgattcaga

SEQ ID NO: 599712 - DNA, 19 bp, Mus musculus
  siRNA target sequence for Fut9 (NM_010243.2,785-803).
gccgtgattcagatatcca

SEQ ID NO: 599713 - DNA, 19 bp, Mus musculus
  siRNA target sequence for Fut9 (NM_010243.2,786-804).
ccgtgattcagatatccaa

SEQ ID NO: 599714 - DNA, 19 bp, Mus musculus
  siRNA target sequence for Fut9 (NM_010243.2,805-823).
gtgccttatggcttcttga

SEQ ID NO: 599715 - DNA, 19 bp, Mus musculus
  siRNA target sequence for Fut9 (NM_010243.2,819-837).
cttgacggtgagcacaaat

SEQ ID NO: 599716 - DNA, 19 bp, Mus musculus
  siRNA target sequence for Fut9 (NM_010243.2,830-848).
gcacaaatccctttgtgtt

SEQ ID NO: 599717 - DNA, 19 bp, Mus musculus
  siRNA target sequence for Fut9 (NM_010243.2,906-924).
gcatgccagggtcaagtat

SEQ ID NO: 599718 - DNA, 19 bp, Mus musculus
  siRNA target sequence for Fut9 (NM_010243.2,907-925).
catgccagggtcaagtatt

SEQ ID NO: 599719 - DNA, 19 bp, Mus musculus
  siRNA target sequence for Fut9 (NM_010243.2,910-928).
gccagggtcaagtattaca

SEQ ID NO: 599720 - DNA, 19 bp, Mus musculus
  siRNA target sequence for Fut9 (NM_010243.2,930-948).
cgagctcagcaagagtatt

SEQ ID NO: 599721 - DNA, 19 bp, Mus musculus
  siRNA target sequence for Fut9 (NM_010243.2,933-951).
gctcagcaagagtattgaa

SEQ ID NO: 599722 - DNA, 19 bp, Mus musculus
  siRNA target sequence for Fut9 (NM_010243.2,934-952).
ctcagcaagagtattgaaa

SEQ ID NO: 599723 - DNA, 19 bp, Mus musculus
  siRNA target sequence for Fut9 (NM_010243.2,965-983).
gccaagcattcggagaata

SEQ ID NO: 599724 - DNA, 19 bp, Mus musculus
  siRNA target sequence for Fut9 (NM_010243.2,976-994).
ggagaatacgtgaacgata

SEQ ID NO: 599725 - DNA, 19 bp, Mus musculus
  siRNA target sequence for Fut9 (NM_010243.2,977-995).
gagaatacgtgaacgataa

SEQ ID NO: 599726 - DNA, 19 bp, Mus musculus
  siRNA target sequence for Fut9 (NM_010243.2,979-997).
gaatacgtgaacgataaaa

SEQ ID NO: 599727 - DNA, 19 bp, Mus musculus
  siRNA target sequence for Fut9 (NM_010243.2,985-1003).
gtgaacgataaaaatctga

SEQ ID NO: 599728 - DNA, 19 bp, Mus musculus
  siRNA target sequence for Fut9 (NM_010243.2,987-1005).
gaacgataaaaatctgatt

SEQ ID NO: 599729 - DNA, 19 bp, Mus musculus
  siRNA target sequence for Fut9 (NM_010243.2,1000-1018).
ctgattcccaccatatcta

SEQ ID NO: 599730 - DNA, 19 bp, Mus musculus
  siRNA target sequence for Fut9 (NM_010243.2,1002-1020).
gattcccaccatatctact

SEQ ID NO: 599731 - DNA, 19 bp, Mus musculus
  siRNA target sequence for Fut9 (NM_010243.2,1006-1024).
cccaccatatctacttgta

SEQ ID NO: 599732 - DNA, 19 bp, Mus musculus
  siRNA target sequence for Fut9 (NM_010243.2,1049-1067).
caattcacaaagattacat

SEQ ID NO: 599733 - DNA, 19 bp, Mus musculus
  siRNA target sequence for Fut9 (NM_010243.2,1072-1090).
gaaaagctctacaatgcat

SEQ ID NO: 599734 - DNA, 19 bp, Mus musculus
  siRNA target sequence for Fut9 (NM_010243.2,1121-1139).
gtccatctagggaaaacta

SEQ ID NO: 599735 - DNA, 19 bp, Mus musculus
  siRNA target sequence for Fut9 (NM_010243.2,1190-1208).
ctcccagtgagttagcaaa

SEQ ID NO: 599736 - DNA, 19 bp, Mus musculus
  siRNA target sequence for Fut9 (NM_010243.2,1194-1212).
cagtgagttagcaaaatat

SEQ ID NO: 599737 - DNA, 19 bp, Mus musculus
  siRNA target sequence for Fut9 (NM_010243.2,1196-1214).
gtgagttagcaaaatatct

SEQ ID NO: 599738 - DNA, 19 bp, Mus musculus
  siRNA target sequence for Fut9 (NM_010243.2,1222-1240).
gttgacaaaaacaataagt

SEQ ID NO: 599739 - DNA, 19 bp, Mus musculus
  siRNA target sequence for Fut9 (NM_010243.2,1269-1287).
ggattttactgtaaaccta

SEQ ID NO: 599740 - DNA, 19 bp, Mus musculus
  siRNA target sequence for Fut9 (NM_010243.2,1289-1307).
cacggttttgggaatcaca

SEQ ID NO: 599741 - DNA, 19 bp, Mus musculus
  siRNA target sequence for Fut9 (NM_010243.2,1315-1333).
ctggcatgcgaccatgtaa

SEQ ID NO: 599742 - DNA, 19 bp, Mus musculus
  siRNA target sequence for Fut9 (NM_010243.2,1317-1335).
ggcatgcgaccatgtaaaa

SEQ ID NO: 599743 - DNA, 19 bp, Mus musculus
  siRNA target sequence for Galnt10 (NM_134189.1,88-106).
gccttcgactgggaaatgt

SEQ ID NO: 599744 - DNA, 19 bp, Mus musculus
  siRNA target sequence for Galnt10 (NM_134189.1,96-114).
ctgggaaatgtattacaaa

SEQ ID NO: 599745 - DNA, 19 bp, Mus musculus
  siRNA target sequence for Galnt10 (NM_134189.1,336-354).
ccacatctacaggaagtat

SEQ ID NO: 599746 - DNA, 19 bp, Mus musculus
  siRNA target sequence for Galnt10 (NM_134189.1,484-502).
gatgtcgtggcccagaaaa

SEQ ID NO: 599747 - DNA, 19 bp, Mus musculus
  siRNA target sequence for Galnt10 (NM_134189.1,511-529).
gtctccctcaactgtaaga

SEQ ID NO: 599748 - DNA, 19 bp, Mus musculus
  siRNA target sequence for Galnt10 (NM_134189.1,560-578).
gggacctgcccaagttcta

SEQ ID NO: 599749 - DNA, 19 bp, Mus musculus
  siRNA target sequence for Galnt10 (NM_134189.1,725-743).
gtatgcaggtctttacctt

SEQ ID NO: 599750 - DNA, 19 bp, Mus musculus
  siRNA target sequence for Galnt10 (NM_134189.1,856-874).
ggcaaccagctgtggaaat

SEQ ID NO: 599751 - DNA, 19 bp, Mus musculus
  siRNA target sequence for Galnt10 (NM_134189.1,857-875).
gcaaccagctgtggaaata

SEQ ID NO: 599752 - DNA, 19 bp, Mus musculus
  siRNA target sequence for Galnt10 (NM_134189.1,1008-1026).
ctcgacggtcttagagaat

SEQ ID NO: 599753 - DNA, 19 bp, Mus musculus
  siRNA target sequence for Galnt10 (NM_134189.1,1010-1028).
cgacggtcttagagaattt

SEQ ID NO: 599754 - DNA, 19 bp, Mus musculus
  siRNA target sequence for Galnt10 (NM_134189.1,1013-1031).
cggtcttagagaatttcaa

SEQ ID NO: 599755 - DNA, 19 bp, Mus musculus
  siRNA target sequence for Galnt10 (NM_134189.1,1021-1039).
gagaatttcaacaagaact

SEQ ID NO: 599756 - DNA, 19 bp, Mus musculus
  siRNA target sequence for Galnt11 (NM_144908.1,186-204).
gcatcacagttcgatattt

SEQ ID NO: 599757 - DNA, 19 bp, Mus musculus
  siRNA target sequence for Galnt11 (NM_144908.1,187-205).
catcacagttcgatatttt

SEQ ID NO: 599758 - DNA, 19 bp, Mus musculus
  siRNA target sequence for Galnt11 (NM_144908.1,237-255).
ggacagttctgcttttcat

SEQ ID NO: 599759 - DNA, 19 bp, Mus musculus
  siRNA target sequence for Galnt11 (NM_144908.1,277-295).
gactcagccccttaggaat

SEQ ID NO: 599760 - DNA, 19 bp, Mus musculus
  siRNA target sequence for Galnt11 (NM_144908.1,322-340).
cgggccatttcccaaaaaa

SEQ ID NO: 599761 - DNA, 19 bp, Mus musculus
  siRNA target sequence for Galnt11 (NM_144908.1,363-381).
gtccaggtcgggtattaga

SEQ ID NO: 599762 - DNA, 19 bp, Mus musculus
  siRNA target sequence for Galnt11 (NM_144908.1,402-420).
gaatcgaccgtttgatgaa

SEQ ID NO: 599763 - DNA, 19 bp, Mus musculus
  siRNA target sequence for Galnt11 (NM_144908.1,459-477).
cttcctctgaactaggtat

SEQ ID NO: 599764 - DNA, 19 bp, Mus musculus
  siRNA target sequence for Galnt11 (NM_144908.1,488-506).
gaacgtgatcaggaattga

SEQ ID NO: 599765 - DNA, 19 bp, Mus musculus
  siRNA target sequence for Galnt11 (NM_144908.1,530-548).
gcctttaatatgctcatta

SEQ ID NO: 599766 - DNA, 19 bp, Mus musculus
  siRNA target sequence for Galnt11 (NM_144908.1,629-647).
ccaactgctagcattgtca

SEQ ID NO: 599767 - DNA, 19 bp, Mus musculus
  siRNA target sequence for Galnt11 (NM_144908.1,635-653).
gctagcattgtcatctgtt

SEQ ID NO: 599768 - DNA, 19 bp, Mus musculus
  siRNA target sequence for Galnt11 (NM_144908.1,636-654).
ctagcattgtcatctgttt

SEQ ID NO: 599769 - DNA, 19 bp, Mus musculus
  siRNA target sequence for Galnt11 (NM_144908.1,812-830).
gcaaaagtcaaggtcataa

SEQ ID NO: 599770 - DNA, 19 bp, Mus musculus
  siRNA target sequence for Galnt11 (NM_144908.1,818-836).
gtcaaggtcataagaaata

SEQ ID NO: 599771 - DNA, 19 bp, Mus musculus
  siRNA target sequence for Galnt11 (NM_144908.1,913-931).
cagccactgtgaagtgaat

SEQ ID NO: 599772 - DNA, 19 bp, Mus musculus
  siRNA target sequence for Galnt11 (NM_144908.1,1030-1048).
cagctcatccccagtagtt

SEQ ID NO: 599773 - DNA, 19 bp, Mus musculus
  siRNA target sequence for Galnt11 (NM_144908.1,1046-1064).
gttcggggaggtttcaact

SEQ ID NO: 599774 - DNA, 19 bp, Mus musculus
  siRNA target sequence for Galnt11 (NM_144908.1,1169-1187).
gccatgaacagacagtatt

SEQ ID NO: 599775 - DNA, 19 bp, Mus musculus
  siRNA target sequence for Galnt11 (NM_144908.1,1170-1188).
ccatgaacagacagtattt

SEQ ID NO: 599776 - DNA, 19 bp, Mus musculus
  siRNA target sequence for Galnt11 (NM_144908.1,1179-1197).
gacagtatttcaatgatct

SEQ ID NO: 599777 - DNA, 19 bp, Mus musculus
  siRNA target sequence for Galnt11 (NM_144908.1,1288-1306).
cctcccttgctcaagagta

SEQ ID NO: 599778 - DNA, 19 bp, Mus musculus
  siRNA target sequence for Galnt11 (NM_144908.1,1297-1315).
ctcaagagtaggacacatt

SEQ ID NO: 599779 - DNA, 19 bp, Mus musculus
  siRNA target sequence for Galnt11 (NM_144908.1,1411-1429).
ggagcaatatttttcctta

SEQ ID NO: 599780 - DNA, 19 bp, Mus musculus
  siRNA target sequence for Galnt11 (NM_144908.1,1412-1430).
gagcaatatttttccttaa

SEQ ID NO: 599781 - DNA, 19 bp, Mus musculus
  siRNA target sequence for Galnt11 (NM_144908.1,1496-1514).
ggctgtcagtcattcaagt

SEQ ID NO: 599782 - DNA, 19 bp, Mus musculus
  siRNA target sequence for Galnt11 (NM_144908.1,1569-1587).
ctcagcagcccgttctcat

SEQ ID NO: 599783 - DNA, 19 bp, Mus musculus
  siRNA target sequence for Galnt11 (NM_144908.1,1689-1707).
gaggcctagtgctgcttaa

SEQ ID NO: 599784 - DNA, 19 bp, Mus musculus
  siRNA target sequence for Galnt11 (NM_144908.1,1691-1709).
ggcctagtgctgcttaaga

SEQ ID NO: 599785 - DNA, 19 bp, Mus musculus
  siRNA target sequence for Galnt11 (NM_144908.1,1731-1749).
ctcaggtctggatttataa

SEQ ID NO: 599786 - DNA, 19 bp, Mus musculus
  siRNA target sequence for Galnt11 (NM_144908.1,1735-1753).
ggtctggatttataatgaa

SEQ ID NO: 599787 - DNA, 19 bp, Mus musculus
  siRNA target sequence for Galnt11 (NM_144908.1,1817-1835).
ccaccccgactcatgaagt

SEQ ID NO: 599788 - DNA, 19 bp, Mus musculus
  siRNA target sequence for Galnt11 (NM_144908.1,1904-1922).
gggcagtgcctgagagtta

SEQ ID NO: 599789 - DNA, 19 bp, Mus musculus
  siRNA target sequence for Galnt11 (NM_144908.1,1905-1923).
ggcagtgcctgagagttat

SEQ ID NO: 599790 - DNA, 19 bp, Mus musculus
  siRNA target sequence for Galnt4 (NM_015737.2,387-405).
cggctcccggaccttgata

SEQ ID NO: 599791 - DNA, 19 bp, Mus musculus
  siRNA target sequence for Galnt4 (NM_015737.2,389-407).
gctcccggaccttgataca

SEQ ID NO: 599792 - DNA, 19 bp, Mus musculus
  siRNA target sequence for Galnt4 (NM_015737.2,390-408).
ctcccggaccttgatacaa

SEQ ID NO: 599793 - DNA, 19 bp, Mus musculus
  siRNA target sequence for Galnt4 (NM_015737.2,522-540).
caagaagaacttattgaga

SEQ ID NO: 599794 - DNA, 19 bp, Mus musculus
  siRNA target sequence for Galnt4 (NM_015737.2,584-602).
ccgccacatagaggataaa

SEQ ID NO: 599795 - DNA, 19 bp, Mus musculus
  siRNA target sequence for Galnt4 (NM_015737.2,585-603).
cgccacatagaggataaaa

SEQ ID NO: 599796 - DNA, 19 bp, Mus musculus
  siRNA target sequence for Galnt4 (NM_015737.2,612-630).
gagtgtaaagccaagaagt

SEQ ID NO: 599797 - DNA, 19 bp, Mus musculus
  siRNA target sequence for Galnt4 (NM_015737.2,659-677).
cgttatcatcgccttctat

SEQ ID NO: 599798 - DNA, 19 bp, Mus musculus
  siRNA target sequence for Galnt4 (NM_015737.2,660-678).
gttatcatcgccttctata

SEQ ID NO: 599799 - DNA, 19 bp, Mus musculus
  siRNA target sequence for Galnt4 (NM_015737.2,711-729).
cacagtgttttagaaactt

SEQ ID NO: 599800 - DNA, 19 bp, Mus musculus
  siRNA target sequence for Galnt4 (NM_015737.2,791-809).
gaaggcgcaacttgaaact

SEQ ID NO: 599801 - DNA, 19 bp, Mus musculus
  siRNA target sequence for Galnt4 (NM_015737.2,795-813).
gcgcaacttgaaacttaca

SEQ ID NO: 599802 - DNA, 19 bp, Mus musculus
  siRNA target sequence for Galnt4 (NM_015737.2,824-842).
ggagagagttcgcttgatt

SEQ ID NO: 599803 - DNA, 19 bp, Mus musculus
  siRNA target sequence for Galnt4 (NM_015737.2,827-845).
gagagttcgcttgattaga

SEQ ID NO: 599804 - DNA, 19 bp, Mus musculus
  siRNA target sequence for Galnt4 (NM_015737.2,834-852).
cgcttgattagaaccaata

SEQ ID NO: 599805 - DNA, 19 bp, Mus musculus
  siRNA target sequence for Galnt4 (NM_015737.2,949-967).
gttggttggaaccactttt

SEQ ID NO: 599806 - DNA, 19 bp, Mus musculus
  siRNA target sequence for Galnt4 (NM_015737.2,963-981).
cttttggagaggatcagta

SEQ ID NO: 599807 - DNA, 19 bp, Mus musculus
  siRNA target sequence for Galnt4 (NM_015737.2,984-1002).
gacgaaaccgcaatcgtat

SEQ ID NO: 599808 - DNA, 19 bp, Mus musculus
  siRNA target sequence for Galnt4 (NM_015737.2,1003-1021).
gtcctgtcatcgacactat

SEQ ID NO: 599809 - DNA, 19 bp, Mus musculus
  siRNA target sequence for Galnt4 (NM_015737.2,1006-1024).
ctgtcatcgacactattga

SEQ ID NO: 599810 - DNA, 19 bp, Mus musculus
  siRNA target sequence for Galnt4 (NM_015737.2,1008-1026).
gtcatcgacactattgact

SEQ ID NO: 599811 - DNA, 19 bp, Mus musculus
  siRNA target sequence for Galnt4 (NM_015737.2,1018-1036).
ctattgactggaacacttt

SEQ ID NO: 599812 - DNA, 19 bp, Mus musculus
  siRNA target sequence for Galnt4 (NM_015737.2,1023-1041).
gactggaacactttcgaat

SEQ ID NO: 599813 - DNA, 19 bp, Mus musculus
  siRNA target sequence for Galnt4 (NM_015737.2,1027-1045).
ggaacactttcgaattcta

SEQ ID NO: 599814 - DNA, 19 bp, Mus musculus
  siRNA target sequence for Galnt4 (NM_015737.2,1093-1111).
ccttccagtggcattctgt

SEQ ID NO: 599815 - DNA, 19 bp, Mus musculus
  siRNA target sequence for Galnt4 (NM_015737.2,1130-1148).
caggcgaacgtcaagaatt

SEQ ID NO: 599816 - DNA, 19 bp, Mus musculus
  siRNA target sequence for Galnt4 (NM_015737.2,1132-1150).
ggcgaacgtcaagaattga

SEQ ID NO: 599817 - DNA, 19 bp, Mus musculus
  siRNA target sequence for Galnt4 (NM_015737.2,1360-1378).
gccccaacttcctacagaa

SEQ ID NO: 599818 - DNA, 19 bp, Mus musculus
  siRNA target sequence for Galnt4 (NM_015737.2,1362-1380).
cccaacttcctacagaata

SEQ ID NO: 599819 - DNA, 19 bp, Mus musculus
  siRNA target sequence for Galnt4 (NM_015737.2,1455-1473).
gaggcctatggcgatcttt

SEQ ID NO: 599820 - DNA, 19 bp, Mus musculus
  siRNA target sequence for Galnt4 (NM_015737.2,1457-1475).
ggcctatggcgatctttct

SEQ ID NO: 599821 - DNA, 19 bp, Mus musculus
  siRNA target sequence for Galnt4 (NM_015737.2,1459-1477).
cctatggcgatctttctga

SEQ ID NO: 599822 - DNA, 19 bp, Mus musculus
  siRNA target sequence for Galnt4 (NM_015737.2,1460-1478).
ctatggcgatctttctgaa

SEQ ID NO: 599823 - DNA, 19 bp, Mus musculus
  siRNA target sequence for Galnt4 (NM_015737.2,1488-1506).
ctaagggaacggctgaaat

SEQ ID NO: 599824 - DNA, 19 bp, Mus musculus
  siRNA target sequence for Galnt4 (NM_015737.2,1494-1512).
gaacggctgaaatgtaaga

SEQ ID NO: 599825 - DNA, 19 bp, Mus musculus
  siRNA target sequence for Galnt4 (NM_015737.2,1652-1670).
ggctaatctttcgttgttt

SEQ ID NO: 599826 - DNA, 19 bp, Mus musculus
  siRNA target sequence for Galnt4 (NM_015737.2,1681-1699).
gtcaaggaggcaatcagtt

SEQ ID NO: 599827 - DNA, 19 bp, Mus musculus
  siRNA target sequence for Galnt4 (NM_015737.2,1733-1751).
caattccgtgactgaatta

SEQ ID NO: 599828 - DNA, 19 bp, Mus musculus
  siRNA target sequence for Galnt4 (NM_015737.2,1755-1773).
gcagaggtcccccaacaaa

SEQ ID NO: 599829 - DNA, 19 bp, Mus musculus
  siRNA target sequence for Galnt4 (NM_015737.2,1776-1794).
gattatgtagggatgcaaa

SEQ ID NO: 599830 - DNA, 19 bp, Mus musculus
  siRNA target sequence for Galnt4 (NM_015737.2,1816-1834).
cagttccagtgaacatcat

SEQ ID NO: 599831 - DNA, 19 bp, Mus musculus
  siRNA target sequence for Galnt4 (NM_015737.2,1818-1836).
gttccagtgaacatcattt

SEQ ID NO: 599832 - DNA, 19 bp, Mus musculus
  siRNA target sequence for Galnt4 (NM_015737.2,1912-1930).
gccgacctagtgtccatat

SEQ ID NO: 599833 - DNA, 19 bp, Mus musculus
  siRNA target sequence for Galnt4 (NM_015737.2,1914-1932).
cgacctagtgtccatatga

SEQ ID NO: 599834 - DNA, 19 bp, Mus musculus
  siRNA target sequence for Galnt4 (NM_015737.2,1917-1935).
cctagtgtccatatgaaaa

SEQ ID NO: 599835 - DNA, 19 bp, Mus musculus
  siRNA target sequence for Galnt4 (NM_015737.2,1936-1954).
cgtgtgatgcccttgataa

SEQ ID NO: 599836 - DNA, 19 bp, Mus musculus
  siRNA target sequence for Galnt6 (NM_172451.1,562-580).
ggtgctgtgaacaacatta

SEQ ID NO: 599837 - DNA, 19 bp, Mus musculus
  siRNA target sequence for Galnt6 (NM_172451.1,728-746).
gggcagatggaaaagcatt

SEQ ID NO: 599838 - DNA, 19 bp, Mus musculus
  siRNA target sequence for Galnt6 (NM_172451.1,753-771).
gaaagaatggaccaatcta

SEQ ID NO: 599839 - DNA, 19 bp, Mus musculus
  siRNA target sequence for Galnt6 (NM_172451.1,765-783).
caatctagagaccaaagaa

SEQ ID NO: 599840 - DNA, 19 bp, Mus musculus
  siRNA target sequence for Galnt6 (NM_172451.1,923-941).
ccagcgtgatcattgtgtt

SEQ ID NO: 599841 - DNA, 19 bp, Mus musculus
  siRNA target sequence for Galnt6 (NM_172451.1,962-980).
ctctgctgcgcacagtata

SEQ ID NO: 599842 - DNA, 19 bp, Mus musculus
  siRNA target sequence for Galnt6 (NM_172451.1,1194-1212).
cgcccactgtgagtgtttt

SEQ ID NO: 599843 - DNA, 19 bp, Mus musculus
  siRNA target sequence for Galnt6 (NM_172451.1,1281-1299).
cgtcaccatcgaccttaat

SEQ ID NO: 599844 - DNA, 19 bp, Mus musculus
  siRNA target sequence for Galnt6 (NM_172451.1,1286-1304).
ccatcgaccttaatacctt

SEQ ID NO: 599845 - DNA, 19 bp, Mus musculus
  siRNA target sequence for Galnt6 (NM_172451.1,1370-1388).
ccttcggctgggaaatgct

SEQ ID NO: 599846 - DNA, 19 bp, Mus musculus
  siRNA target sequence for Galnt6 (NM_172451.1,1420-1438).
gagacctaccccatcaagt

SEQ ID NO: 599847 - DNA, 19 bp, Mus musculus
  siRNA target sequence for Galnt6 (NM_172451.1,1488-1506).
gcacatcggtacctatgat

SEQ ID NO: 599848 - DNA, 19 bp, Mus musculus
  siRNA target sequence for Galnt6 (NM_172451.1,1489-1507).
cacatcggtacctatgata

SEQ ID NO: 599849 - DNA, 19 bp, Mus musculus
  siRNA target sequence for Galnt6 (NM_172451.1,1691-1709).
ggatggacgactataagaa

SEQ ID NO: 599850 - DNA, 19 bp, Mus musculus
  siRNA target sequence for Galnt6 (NM_172451.1,1695-1713).
ggacgactataagaagatt

SEQ ID NO: 599851 - DNA, 19 bp, Mus musculus
  siRNA target sequence for Galnt6 (NM_172451.1,1696-1714).
gacgactataagaagattt

SEQ ID NO: 599852 - DNA, 19 bp, Mus musculus
  siRNA target sequence for Galnt6 (NM_172451.1,1801-1819).
ctacgatgccacaacttct

SEQ ID NO: 599853 - DNA, 19 bp, Mus musculus
  siRNA target sequence for Galnt6 (NM_172451.1,1820-1838).
cctggtacctgcacaatgt

SEQ ID NO: 599854 - DNA, 19 bp, Mus musculus
  siRNA target sequence for Galnt6 (NM_172451.1,1940-1958).
gaggaaagcctctcatcat

SEQ ID NO: 599855 - DNA, 19 bp, Mus musculus
  siRNA target sequence for Galnt6 (NM_172451.1,1948-1966).
cctctcatcatgtatgtct

SEQ ID NO: 599856 - DNA, 19 bp, Mus musculus
  siRNA target sequence for Galnt6 (NM_172451.1,1987-2005).
cagtactttgagtacacat

SEQ ID NO: 599857 - DNA, 19 bp, Mus musculus
  siRNA target sequence for Galnt6 (NM_172451.1,2013-2031).
ggacctccgccacaacatt

SEQ ID NO: 599858 - DNA, 19 bp, Mus musculus
  siRNA target sequence for Galnt6 (NM_172451.1,2017-2035).
ctccgccacaacattggaa

SEQ ID NO: 599859 - DNA, 19 bp, Mus musculus
  siRNA target sequence for Galnt6 (NM_172451.1,2084-2102).
gtcagttcgttggcaaaaa

SEQ ID NO: 599860 - DNA, 19 bp, Mus musculus
  siRNA target sequence for Galnt6 (NM_172451.1,2119-2137).
gacgaggagtgggaattga

SEQ ID NO: 599861 - DNA, 19 bp, Mus musculus
  siRNA target sequence for Galnt7 (NM_144731.2,33-51).
ctgaagatcgggttcatct

SEQ ID NO: 599862 - DNA, 19 bp, Mus musculus
  siRNA target sequence for Galnt7 (NM_144731.2,35-53).
gaagatcgggttcatctta

SEQ ID NO: 599863 - DNA, 19 bp, Mus musculus
  siRNA target sequence for Galnt7 (NM_144731.2,233-251).
ggtaccatggcctcatgtt

SEQ ID NO: 599864 - DNA, 19 bp, Mus musculus
  siRNA target sequence for Galnt7 (NM_144731.2,256-274).
gagtagaagtggacttaga

SEQ ID NO: 599865 - DNA, 19 bp, Mus musculus
  siRNA target sequence for Galnt7 (NM_144731.2,264-282).
gtggacttagagtctatta

SEQ ID NO: 599866 - DNA, 19 bp, Mus musculus
  siRNA target sequence for Galnt7 (NM_144731.2,266-284).
ggacttagagtctattaga

SEQ ID NO: 599867 - DNA, 19 bp, Mus musculus
  siRNA target sequence for Galnt7 (NM_144731.2,267-285).
gacttagagtctattagaa

SEQ ID NO: 599868 - DNA, 19 bp, Mus musculus
  siRNA target sequence for Galnt7 (NM_144731.2,269-287).
cttagagtctattagaaga

SEQ ID NO: 599869 - DNA, 19 bp, Mus musculus
  siRNA target sequence for Galnt7 (NM_144731.2,334-352).
cccagagagacgtaatgca

SEQ ID NO: 599870 - DNA, 19 bp, Mus musculus
  siRNA target sequence for Galnt7 (NM_144731.2,351-369).
cagaggcagtaccttacat

SEQ ID NO: 599871 - DNA, 19 bp, Mus musculus
  siRNA target sequence for Galnt7 (NM_144731.2,353-371).
gaggcagtaccttacattt

SEQ ID NO: 599872 - DNA, 19 bp, Mus musculus
  siRNA target sequence for Galnt7 (NM_144731.2,415-433).
gggtcctcgggaactttga

SEQ ID NO: 599873 - DNA, 19 bp, Mus musculus
  siRNA target sequence for Galnt7 (NM_144731.2,495-513).
gttctgggaccagaataca

SEQ ID NO: 599874 - DNA, 19 bp, Mus musculus
  siRNA target sequence for Galnt7 (NM_144731.2,532-550).
gcattaaggagtttggatt

SEQ ID NO: 599875 - DNA, 19 bp, Mus musculus
  siRNA target sequence for Galnt7 (NM_144731.2,584-602).
ccgcagcgtcaatgactta

SEQ ID NO: 599876 - DNA, 19 bp, Mus musculus
  siRNA target sequence for Galnt7 (NM_144731.2,616-634).
gcaagtattggcactatga

SEQ ID NO: 599877 - DNA, 19 bp, Mus musculus
  siRNA target sequence for Galnt7 (NM_144731.2,617-635).
caagtattggcactatgat

SEQ ID NO: 599878 - DNA, 19 bp, Mus musculus
  siRNA target sequence for Galnt7 (NM_144731.2,620-638).
gtattggcactatgatgaa

SEQ ID NO: 599879 - DNA, 19 bp, Mus musculus
  siRNA target sequence for Galnt7 (NM_144731.2,625-643).
ggcactatgatgaaaacct

SEQ ID NO: 599880 - DNA, 19 bp, Mus musculus
  siRNA target sequence for Galnt7 (NM_144731.2,649-667).
cttcaagcgttgtcattgt

SEQ ID NO: 599881 - DNA, 19 bp, Mus musculus
  siRNA target sequence for Galnt7 (NM_144731.2,745-763).
cagaaatcgtgttaattga

SEQ ID NO: 599882 - DNA, 19 bp, Mus musculus
  siRNA target sequence for Galnt7 (NM_144731.2,800-818).
ggatgagtatataaagcta

SEQ ID NO: 599883 - DNA, 19 bp, Mus musculus
  siRNA target sequence for Galnt7 (NM_144731.2,801-819).
gatgagtatataaagctat

SEQ ID NO: 599884 - DNA, 19 bp, Mus musculus
  siRNA target sequence for Galnt7 (NM_144731.2,806-824).
gtatataaagctatggaat

SEQ ID NO: 599885 - DNA, 19 bp, Mus musculus
  siRNA target sequence for Galnt7 (NM_144731.2,827-845).
cctcgtgaaggtatttcga

SEQ ID NO: 599886 - DNA, 19 bp, Mus musculus
  siRNA target sequence for Galnt7 (NM_144731.2,828-846).
ctcgtgaaggtatttcgaa

SEQ ID NO: 599887 - DNA, 19 bp, Mus musculus
  siRNA target sequence for Galnt7 (NM_144731.2,830-848).
cgtgaaggtatttcgaaat

SEQ ID NO: 599888 - DNA, 19 bp, Mus musculus
  siRNA target sequence for Galnt7 (NM_144731.2,851-869).
gagaagagagggtttgatt

SEQ ID NO: 599889 - DNA, 19 bp, Mus musculus
  siRNA target sequence for Galnt7 (NM_144731.2,886-904).
gcgcacagaaggctaaact

SEQ ID NO: 599890 - DNA, 19 bp, Mus musculus
  siRNA target sequence for Galnt7 (NM_144731.2,903-921).
ctcggacaggttttgatat

SEQ ID NO: 599891 - DNA, 19 bp, Mus musculus
  siRNA target sequence for Galnt7 (NM_144731.2,953-971).
ctggtatgctccacttgta

SEQ ID NO: 599892 - DNA, 19 bp, Mus musculus
  siRNA target sequence for Galnt7 (NM_144731.2,966-984).
cttgtaccccccatatcta

SEQ ID NO: 599893 - DNA, 19 bp, Mus musculus
  siRNA target sequence for Galnt7 (NM_144731.2,1000-1018).
gcactgtgccgattataga

SEQ ID NO: 599894 - DNA, 19 bp, Mus musculus
  siRNA target sequence for Galnt7 (NM_144731.2,1001-1019).
cactgtgccgattatagat

SEQ ID NO: 599895 - DNA, 19 bp, Mus musculus
  siRNA target sequence for Galnt7 (NM_144731.2,1003-1021).
ctgtgccgattatagatgt

SEQ ID NO: 599896 - DNA, 19 bp, Mus musculus
  siRNA target sequence for Galnt7 (NM_144731.2,1008-1026).
ccgattatagatgtcataa

SEQ ID NO: 599897 - DNA, 19 bp, Mus musculus
  siRNA target sequence for Galnt7 (NM_144731.2,1020-1038).
gtcataagcggcaacacat

SEQ ID NO: 599898 - DNA, 19 bp, Mus musculus
  siRNA target sequence for Galnt7 (NM_144731.2,1022-1040).
cataagcggcaacacatat

SEQ ID NO: 599899 - DNA, 19 bp, Mus musculus
  siRNA target sequence for Galnt7 (NM_144731.2,1027-1045).
gcggcaacacatatgaaat

SEQ ID NO: 599900 - DNA, 19 bp, Mus musculus
  siRNA target sequence for Galnt7 (NM_144731.2,1028-1046).
cggcaacacatatgaaatt

SEQ ID NO: 599901 - DNA, 19 bp, Mus musculus
  siRNA target sequence for Galnt7 (NM_144731.2,1029-1047).
ggcaacacatatgaaatta

SEQ ID NO: 599902 - DNA, 19 bp, Mus musculus
  siRNA target sequence for Galnt7 (NM_144731.2,1052-1070).
ccaagggggtggtgatgaa

SEQ ID NO: 599903 - DNA, 19 bp, Mus musculus
  siRNA target sequence for Galnt7 (NM_144731.2,1183-1201).
ctatggcgggtggattgtt

SEQ ID NO: 599904 - DNA, 19 bp, Mus musculus
  siRNA target sequence for Galnt7 (NM_144731.2,1297-1315).
ggcagtgcggtggcaaatt

SEQ ID NO: 599905 - DNA, 19 bp, Mus musculus
  siRNA target sequence for Galnt7 (NM_144731.2,1301-1319).
gtgcggtggcaaattgtta

SEQ ID NO: 599906 - DNA, 19 bp, Mus musculus
  siRNA target sequence for Galnt7 (NM_144731.2,1304-1322).
cggtggcaaattgttattt

SEQ ID NO: 599907 - DNA, 19 bp, Mus musculus
  siRNA target sequence for Galnt7 (NM_144731.2,1333-1351).
ctcgtgttgggcacatcta

SEQ ID NO: 599908 - DNA, 19 bp, Mus musculus
  siRNA target sequence for Galnt7 (NM_144731.2,1402-1420).
ctccaactctgaagaatta

SEQ ID NO: 599909 - DNA, 19 bp, Mus musculus
  siRNA target sequence for Galnt7 (NM_144731.2,1405-1423).
caactctgaagaattatgt

SEQ ID NO: 599910 - DNA, 19 bp, Mus musculus
  siRNA target sequence for Galnt7 (NM_144731.2,1437-1455).
gtctggtgggatgaatata

SEQ ID NO: 599911 - DNA, 19 bp, Mus musculus
  siRNA target sequence for Galnt7 (NM_144731.2,1444-1462).
gggatgaatataaagacta

SEQ ID NO: 599912 - DNA, 19 bp, Mus musculus
  siRNA target sequence for Galnt7 (NM_144731.2,1498-1516).
cctacggggacatatctga

SEQ ID NO: 599913 - DNA, 19 bp, Mus musculus
  siRNA target sequence for Galnt7 (NM_144731.2,1520-1538).
gaagaaatttcgagaagat

SEQ ID NO: 599914 - DNA, 19 bp, Mus musculus
  siRNA target sequence for Galnt7 (NM_144731.2,1533-1551).
gaagatcacaactgcaaaa

SEQ ID NO: 599915 - DNA, 19 bp, Mus musculus
  siRNA target sequence for Galnt7 (NM_144731.2,1643-1661).
cctcgaaactgcatactgt

SEQ ID NO: 599916 - DNA, 19 bp, Mus musculus
  siRNA target sequence for Galnt7 (NM_144731.2,1644-1662).
ctcgaaactgcatactgta

SEQ ID NO: 599917 - DNA, 19 bp, Mus musculus
  siRNA target sequence for Galnt7 (NM_144731.2,1730-1748).
ccagcttttccgaatcaat

SEQ ID NO: 599918 - DNA, 19 bp, Mus musculus
  siRNA target sequence for Galnt7 (NM_144731.2,1767-1785).
cagtacgaccagtgtttga

SEQ ID NO: 599919 - DNA, 19 bp, Mus musculus
  siRNA target sequence for Galnt7 (NM_144731.2,1795-1813).
ctgatggatccaaagtcat

SEQ ID NO: 599920 - DNA, 19 bp, Mus musculus
  siRNA target sequence for Galnt7 (NM_144731.2,1800-1818).
ggatccaaagtcatgatca

SEQ ID NO: 599921 - DNA, 19 bp, Mus musculus
  siRNA target sequence for Galnt7 (NM_144731.2,1821-1839).
cactgtaacctaaatgaat

SEQ ID NO: 599922 - DNA, 19 bp, Mus musculus
  siRNA target sequence for Galnt7 (NM_144731.2,1912-1930).
cggaggtcctgcatcaagt

SEQ ID NO: 599923 - DNA, 19 bp, Mus musculus
  siRNA target sequence for Galnt7 (NM_144731.2,1920-1938).
ctgcatcaagtgttcatct

SEQ ID NO: 599924 - DNA, 19 bp, Mus musculus
  siRNA target sequence for Galgt1 (NM_008080.2,119-137).
ccctctatgcgctagtctt

SEQ ID NO: 599925 - DNA, 19 bp, Mus musculus
  siRNA target sequence for Galgt1 (NM_008080.2,521-539).
ccaactcccccttacagta

SEQ ID NO: 599926 - DNA, 19 bp, Mus musculus
  siRNA target sequence for Galgt1 (NM_008080.2,633-651).
gaacctgagtgcttctcta

SEQ ID NO: 599927 - DNA, 19 bp, Mus musculus
  siRNA target sequence for Galgt1 (NM_008080.2,661-679).
gacgtggcaggggaagtaa

SEQ ID NO: 599928 - DNA, 19 bp, Mus musculus
  siRNA target sequence for Galgt1 (NM_008080.2,725-743).
ccagcccagttctggataa

SEQ ID NO: 599929 - DNA, 19 bp, Mus musculus
  siRNA target sequence for Galgt1 (NM_008080.2,757-775).
ctgcaactggtgacttaca

SEQ ID NO: 599930 - DNA, 19 bp, Mus musculus
  siRNA target sequence for Galgt1 (NM_008080.2,902-920).
cccaaggagccgagtacaa

SEQ ID NO: 599931 - DNA, 19 bp, Mus musculus
  siRNA target sequence for Galgt1 (NM_008080.2,951-969).
gacttttcttcgttatgat

SEQ ID NO: 599932 - DNA, 19 bp, Mus musculus
  siRNA target sequence for Galgt1 (NM_008080.2,989-1007).
ccagcatccgacgctttta

SEQ ID NO: 599933 - DNA, 19 bp, Mus musculus
  siRNA target sequence for Galgt1 (NM_008080.2,1009-1027).
cctacggtcaccatagtca

SEQ ID NO: 599934 - DNA, 19 bp, Mus musculus
  siRNA target sequence for Galgt1 (NM_008080.2,1010-1028).
ctacggtcaccatagtcat

SEQ ID NO: 599935 - DNA, 19 bp, Mus musculus
  siRNA target sequence for Galgt1 (NM_008080.2,1067-1085).
cacacgtggagcactactt

SEQ ID NO: 599936 - DNA, 19 bp, Mus musculus
  siRNA target sequence for Galgt1 (NM_008080.2,1123-1141).
ctggcggtgtcccaagtaa

SEQ ID NO: 599937 - DNA, 19 bp, Mus musculus
  siRNA target sequence for Galgt1 (NM_008080.2,1133-1151).
cccaagtaaccaccaaata

SEQ ID NO: 599938 - DNA, 19 bp, Mus musculus
  siRNA target sequence for Galgt1 (NM_008080.2,1394-1412).
cagacggcgtggtcaactt

SEQ ID NO: 599939 - DNA, 19 bp, Mus musculus
  siRNA target sequence for Galgt1 (NM_008080.2,1469-1487).
gggtggcacatctggaatt

SEQ ID NO: 599940 - DNA, 19 bp, Mus musculus
  siRNA target sequence for Galgt1 (NM_008080.2,1520-1538).
gctcctgctctgatgttgt

SEQ ID NO: 599941 - DNA, 19 bp, Mus musculus
  siRNA target sequence for Galgt1 (NM_008080.2,1651-1669).
catcgcctactcttcttca

SEQ ID NO: 599942 - DNA, 19 bp, Mus musculus
  siRNA target sequence for Ugt2b5 (NM_009467.1,1523-1541).
ccactatagtccttagtgt

SEQ ID NO: 599943 - DNA, 19 bp, Mus musculus
  siRNA target sequence for Pygl (NM_133198.1,270-288).
gtcccaagagggtgtatta

SEQ ID NO: 599944 - DNA, 19 bp, Mus musculus
  siRNA target sequence for Pygl (NM_133198.1,273-291).
ccaagagggtgtattacct

SEQ ID NO: 599945 - DNA, 19 bp, Mus musculus
  siRNA target sequence for Pygl (NM_133198.1,388-406).
ggacatggaagagttagaa

SEQ ID NO: 599946 - DNA, 19 bp, Mus musculus
  siRNA target sequence for Pygl (NM_133198.1,504-522).
gctacggcattcgttatga

SEQ ID NO: 599947 - DNA, 19 bp, Mus musculus
  siRNA target sequence for Pygl (NM_133198.1,505-523).
ctacggcattcgttatgaa

SEQ ID NO: 599948 - DNA, 19 bp, Mus musculus
  siRNA target sequence for Pygl (NM_133198.1,516-534).
gttatgaatacggaatctt

SEQ ID NO: 599949 - DNA, 19 bp, Mus musculus
  siRNA target sequence for Pygl (NM_133198.1,637-655).
gcatttctacggaagagta

SEQ ID NO: 599950 - DNA, 19 bp, Mus musculus
  siRNA target sequence for Pygl (NM_133198.1,720-738).
cccccgtgcctggatatat

SEQ ID NO: 599951 - DNA, 19 bp, Mus musculus
  siRNA target sequence for Pygl (NM_133198.1,769-787).
gtcggctcgagcaccaaat

SEQ ID NO: 599952 - DNA, 19 bp, Mus musculus
  siRNA target sequence for Pygl (NM_133198.1,774-792).
ctcgagcaccaaatgactt

SEQ ID NO: 599953 - DNA, 19 bp, Mus musculus
  siRNA target sequence for Pygl (NM_133198.1,776-794).
cgagcaccaaatgacttta

SEQ ID NO: 599954 - DNA, 19 bp, Mus musculus
  siRNA target sequence for Pygl (NM_133198.1,780-798).
caccaaatgactttaacct

SEQ ID NO: 599955 - DNA, 19 bp, Mus musculus
  siRNA target sequence for Pygl (NM_133198.1,788-806).
gactttaaccttcaagatt

SEQ ID NO: 599956 - DNA, 19 bp, Mus musculus
  siRNA target sequence for Pygl (NM_133198.1,1306-1324).
ccgcatgcggagaatgtct

SEQ ID NO: 599957 - DNA, 19 bp, Mus musculus
  siRNA target sequence for Pygl (NM_133198.1,1314-1332).
ggagaatgtctctcattga

SEQ ID NO: 599958 - DNA, 19 bp, Mus musculus
  siRNA target sequence for Pygl (NM_133198.1,1341-1359).
gaggcaaacggatcaacat

SEQ ID NO: 599959 - DNA, 19 bp, Mus musculus
  siRNA target sequence for Pygl (NM_133198.1,1389-1407).
cggtgaacggtgtagcaaa

SEQ ID NO: 599960 - DNA, 19 bp, Mus musculus
  siRNA target sequence for Pygl (NM_133198.1,1591-1609).
gacgaagctccacagtttt

SEQ ID NO: 599961 - DNA, 19 bp, Mus musculus
  siRNA target sequence for Pygl (NM_133198.1,1631-1649).
cgggaaatagccaaagtga

SEQ ID NO: 599962 - DNA, 19 bp, Mus musculus
  siRNA target sequence for Pygl (NM_133198.1,1633-1651).
ggaaatagccaaagtgaaa

SEQ ID NO: 599963 - DNA, 19 bp, Mus musculus
  siRNA target sequence for Pygl (NM_133198.1,1741-1759).
gcggatccacgagtataaa

SEQ ID NO: 599964 - DNA, 19 bp, Mus musculus
  siRNA target sequence for Pygl (NM_133198.1,1742-1760).
cggatccacgagtataaaa

SEQ ID NO: 599965 - DNA, 19 bp, Mus musculus
  siRNA target sequence for Pygl (NM_133198.1,1781-1799).
catgtgatcaccatgtaca

SEQ ID NO: 599966 - DNA, 19 bp, Mus musculus
  siRNA target sequence for Pygl (NM_133198.1,1795-1813).
gtacaatcgcatcaagaaa

SEQ ID NO: 599967 - DNA, 19 bp, Mus musculus
  siRNA target sequence for Pygl (NM_133198.1,1831-1849).
cgtgccaaggacagtcata

SEQ ID NO: 599968 - DNA, 19 bp, Mus musculus
  siRNA target sequence for Pygl (NM_133198.1,1832-1850).
gtgccaaggacagtcataa

SEQ ID NO: 599969 - DNA, 19 bp, Mus musculus
  siRNA target sequence for Pygl (NM_133198.1,1834-1852).
gccaaggacagtcataatt

SEQ ID NO: 599970 - DNA, 19 bp, Mus musculus
  siRNA target sequence for Pygl (NM_133198.1,1872-1890).
gatatcacatggccaaaat

SEQ ID NO: 599971 - DNA, 19 bp, Mus musculus
  siRNA target sequence for Pygl (NM_133198.1,1879-1897).
catggccaaaatgatcata

SEQ ID NO: 599972 - DNA, 19 bp, Mus musculus
  siRNA target sequence for Pygl (NM_133198.1,1915-1933).
ggcagaagtggtgaacaat

SEQ ID NO: 599973 - DNA, 19 bp, Mus musculus
  siRNA target sequence for Pygl (NM_133198.1,1942-1960).
ggtcggcagcaagttgaaa

SEQ ID NO: 599974 - DNA, 19 bp, Mus musculus
  siRNA target sequence for Pygl (NM_133198.1,1947-1965).
gcagcaagttgaaagtcat

SEQ ID NO: 599975 - DNA, 19 bp, Mus musculus
  siRNA target sequence for Pygl (NM_133198.1,1989-2007).
ctcttgccgaaaaagtcat

SEQ ID NO: 599976 - DNA, 19 bp, Mus musculus
  siRNA target sequence for Pygl (NM_133198.1,2098-2116).
gaccatcgggactatggat

SEQ ID NO: 599977 - DNA, 19 bp, Mus musculus
  siRNA target sequence for Pygl (NM_133198.1,2167-2185).
ctttggcatgagagtagat

SEQ ID NO: 599978 - DNA, 19 bp, Mus musculus
  siRNA target sequence for Pygl (NM_133198.1,2186-2204).
gatgtggctgctttggata

SEQ ID NO: 599979 - DNA, 19 bp, Mus musculus
  siRNA target sequence for Pygm (NM_011224.1,61-79).
ctctttcagaccaggataa

SEQ ID NO: 599980 - DNA, 19 bp, Mus musculus
  siRNA target sequence for Pygm (NM_011224.1,104-122).
cttagccggagtggaaaat

SEQ ID NO: 599981 - DNA, 19 bp, Mus musculus
  siRNA target sequence for Pygm (NM_011224.1,108-126).
gccggagtggaaaatgtgt

SEQ ID NO: 599982 - DNA, 19 bp, Mus musculus
  siRNA target sequence for Pygm (NM_011224.1,123-141).
gtgtcggagctaaaaaaga

SEQ ID NO: 599983 - DNA, 19 bp, Mus musculus
  siRNA target sequence for Pygm (NM_011224.1,186-204).
gtggctactccgagagatt

SEQ ID NO: 599984 - DNA, 19 bp, Mus musculus
  siRNA target sequence for Pygm (NM_011224.1,189-207).
gctactccgagagattact

SEQ ID NO: 599985 - DNA, 19 bp, Mus musculus
  siRNA target sequence for Pygm (NM_011224.1,190-208).
ctactccgagagattacta

SEQ ID NO: 599986 - DNA, 19 bp, Mus musculus
  siRNA target sequence for Pygm (NM_011224.1,295-313).
ggatctactacctgtcttt

SEQ ID NO: 599987 - DNA, 19 bp, Mus musculus
  siRNA target sequence for Pygm (NM_011224.1,465-483).
cgcctggcagcttgctttt

SEQ ID NO: 599988 - DNA, 19 bp, Mus musculus
  siRNA target sequence for Pygm (NM_011224.1,859-877).
gaaacctggccgagaacat

SEQ ID NO: 599989 - DNA, 19 bp, Mus musculus
  siRNA target sequence for Pygm (NM_011224.1,885-903).
gttttgtaccccaatgata

SEQ ID NO: 599990 - DNA, 19 bp, Mus musculus
  siRNA target sequence for Pygm (NM_011224.1,1011-1029).
gatcctgtgcgcacaaact

SEQ ID NO: 599991 - DNA, 19 bp, Mus musculus
  siRNA target sequence for Pygm (NM_011224.1,1356-1374).
gcagtgaaacgcatcaaca

SEQ ID NO: 599992 - DNA, 19 bp, Mus musculus
  siRNA target sequence for Pygm (NM_011224.1,1357-1375).
cagtgaaacgcatcaacat

SEQ ID NO: 599993 - DNA, 19 bp, Mus musculus
  siRNA target sequence for Pygm (NM_011224.1,1450-1468).
ccatcttcaaggactttta

SEQ ID NO: 599994 - DNA, 19 bp, Mus musculus
  siRNA target sequence for Pygm (NM_011224.1,1451-1469).
catcttcaaggacttttat

SEQ ID NO: 599995 - DNA, 19 bp, Mus musculus
  siRNA target sequence for Pygm (NM_011224.1,1480-1498).
ctcacaagttccagaacaa

SEQ ID NO: 599996 - DNA, 19 bp, Mus musculus
  siRNA target sequence for Pygm (NM_011224.1,1570-1588).
gcattggtgaggactacat

SEQ ID NO: 599997 - DNA, 19 bp, Mus musculus
  siRNA target sequence for Pygm (NM_011224.1,1697-1715).
cctcgagagggaatacaaa

SEQ ID NO: 599998 - DNA, 19 bp, Mus musculus
  siRNA target sequence for Pygm (NM_011224.1,1745-1763).
cgtccaggtgaaaaggatt

SEQ ID NO: 599999 - DNA, 19 bp, Mus musculus
  siRNA target sequence for Pygm (NM_011224.1,1748-1766).
ccaggtgaaaaggattcat

SEQ ID NO: 600000 - DNA, 19 bp, Mus musculus
  siRNA target sequence for Pygm (NM_011224.1,1797-1815).
cacatcatcaccttgtata

SEQ ID NO: 600001 - DNA, 19 bp, Mus musculus
  siRNA target sequence for Pygm (NM_011224.1,1808-1826).
cttgtataaccgcatcaaa

SEQ ID NO: 600002 - DNA, 19 bp, Mus musculus
  siRNA target sequence for Pygm (NM_011224.1,1828-1846).
gggagcccaataggtttat

SEQ ID NO: 600003 - DNA, 19 bp, Mus musculus
  siRNA target sequence for Pygm (NM_011224.1,1848-1866).
gtgccgaggactatcatga

SEQ ID NO: 600004 - DNA, 19 bp, Mus musculus
  siRNA target sequence for Pygm (NM_011224.1,1850-1868).
gccgaggactatcatgatt

SEQ ID NO: 600005 - DNA, 19 bp, Mus musculus
  siRNA target sequence for Pygm (NM_011224.1,1907-1925).
gatcatcaagcttatcact

SEQ ID NO: 600006 - DNA, 19 bp, Mus musculus
  siRNA target sequence for Pygm (NM_011224.1,2006-2024).
ccttgctgagaaagttatt

SEQ ID NO: 600007 - DNA, 19 bp, Mus musculus
  siRNA target sequence for Pygm (NM_011224.1,2243-2261).
gtactacgaccgaattcct

SEQ ID NO: 600008 - DNA, 19 bp, Mus musculus
  siRNA target sequence for Pygm (NM_011224.1,2286-2304).
ctaagcagcggcttcttct

SEQ ID NO: 600009 - DNA, 19 bp, Mus musculus
  siRNA target sequence for Pygm (NM_011224.1,2351-2369).
gcaccatgaccggtttaaa

SEQ ID NO: 600010 - DNA, 19 bp, Mus musculus
  siRNA target sequence for Pygm (NM_011224.1,2376-2394).
gcagattatgaggaataca

SEQ ID NO: 600011 - DNA, 19 bp, Mus musculus
  siRNA target sequence for Pygm (NM_011224.1,2377-2395).
cagattatgaggaatacat

SEQ ID NO: 600012 - DNA, 19 bp, Mus musculus
  siRNA target sequence for Pnp (NM_013632.2,65-83).
gaacgagttcacatacgaa

SEQ ID NO: 600013 - DNA, 19 bp, Mus musculus
  siRNA target sequence for Pnp (NM_013632.2,71-89).
gttcacatacgaagattat

SEQ ID NO: 600014 - DNA, 19 bp, Mus musculus
  siRNA target sequence for Pnp (NM_013632.2,113-131).
gcaacacactgaatatcga

SEQ ID NO: 600015 - DNA, 19 bp, Mus musculus
  siRNA target sequence for Pnp (NM_013632.2,189-207).
gaggctcagatctttgact

SEQ ID NO: 600016 - DNA, 19 bp, Mus musculus
  siRNA target sequence for Pnp (NM_013632.2,255-273).
ggccgactggtgtttggat

SEQ ID NO: 600017 - DNA, 19 bp, Mus musculus
  siRNA target sequence for Pnp (NM_013632.2,303-321).
caaggccggttccatatgt

SEQ ID NO: 600018 - DNA, 19 bp, Mus musculus
  siRNA target sequence for Pnp (NM_013632.2,307-325).
gccggttccatatgtatga

SEQ ID NO: 600019 - DNA, 19 bp, Mus musculus
  siRNA target sequence for Pnp (NM_013632.2,412-430).
gaggactcaaccccaattt

SEQ ID NO: 600020 - DNA, 19 bp, Mus musculus
  siRNA target sequence for Pnp (NM_013632.2,415-433).
gactcaaccccaattttga

SEQ ID NO: 600021 - DNA, 19 bp, Mus musculus
  siRNA target sequence for Pnp (NM_013632.2,521-539).
gtttggagttcgttttcct

SEQ ID NO: 600022 - DNA, 19 bp, Mus musculus
  siRNA target sequence for Pnp (NM_013632.2,552-570).
gcttatgaccgggatatga

SEQ ID NO: 600023 - DNA, 19 bp, Mus musculus
  siRNA target sequence for Pnp (NM_013632.2,602-620).
gggggagcaacgaaagcta

SEQ ID NO: 600024 - DNA, 19 bp, Mus musculus
  siRNA target sequence for Pnp (NM_013632.2,608-626).
gcaacgaaagctacaagaa

SEQ ID NO: 600025 - DNA, 19 bp, Mus musculus
  siRNA target sequence for Pnp (NM_013632.2,721-739).
cagtcccagaagttatcgt

SEQ ID NO: 600026 - DNA, 19 bp, Mus musculus
  siRNA target sequence for Pnp (NM_013632.2,749-767).
ctgtgggctccgtgtcttt

SEQ ID NO: 600027 - DNA, 19 bp, Mus musculus
  siRNA target sequence for Pnp (NM_013632.2,758-776).
ccgtgtctttggtttctca

SEQ ID NO: 600028 - DNA, 19 bp, Mus musculus
  siRNA target sequence for Pnp (NM_013632.2,768-786).
ggtttctcactcattacga

SEQ ID NO: 600029 - DNA, 19 bp, Mus musculus
  siRNA target sequence for Pnp (NM_013632.2,769-787).
gtttctcactcattacgaa

SEQ ID NO: 600030 - DNA, 19 bp, Mus musculus
  siRNA target sequence for Pnp (NM_013632.2,792-810).
gttgtcatggattatgaga

SEQ ID NO: 600031 - DNA, 19 bp, Mus musculus
  siRNA target sequence for Pygb (NM_153781.1,154-172).
gtgcggaagagcttcaaca

SEQ ID NO: 600032 - DNA, 19 bp, Mus musculus
  siRNA target sequence for Pygb (NM_153781.1,307-325).
gaccccaagcgcatctatt

SEQ ID NO: 600033 - DNA, 19 bp, Mus musculus
  siRNA target sequence for Pygb (NM_153781.1,312-330).
caagcgcatctattacctt

SEQ ID NO: 600034 - DNA, 19 bp, Mus musculus
  siRNA target sequence for Pygb (NM_153781.1,352-370).
cgcacgctgcagaatacca

SEQ ID NO: 600035 - DNA, 19 bp, Mus musculus
  siRNA target sequence for Pygb (NM_153781.1,353-371).
gcacgctgcagaataccat

SEQ ID NO: 600036 - DNA, 19 bp, Mus musculus
  siRNA target sequence for Pygb (NM_153781.1,398-416).
gcgacgaagccacttatca

SEQ ID NO: 600037 - DNA, 19 bp, Mus musculus
  siRNA target sequence for Pygb (NM_153781.1,400-418).
gacgaagccacttatcagt

SEQ ID NO: 600038 - DNA, 19 bp, Mus musculus
  siRNA target sequence for Pygb (NM_153781.1,497-515).
cctgcttccttgattcaat

SEQ ID NO: 600039 - DNA, 19 bp, Mus musculus
  siRNA target sequence for Pygb (NM_153781.1,532-550).
gctgcatacggctatggaa

SEQ ID NO: 600040 - DNA, 19 bp, Mus musculus
  siRNA target sequence for Pygb (NM_153781.1,533-551).
ctgcatacggctatggaat

SEQ ID NO: 600041 - DNA, 19 bp, Mus musculus
  siRNA target sequence for Pygb (NM_153781.1,543-561).
ctatggaatccgatatgaa

SEQ ID NO: 600042 - DNA, 19 bp, Mus musculus
  siRNA target sequence for Pygb (NM_153781.1,565-583).
gggattttcaaccaaaaga

SEQ ID NO: 600043 - DNA, 19 bp, Mus musculus
  siRNA target sequence for Pygb (NM_153781.1,758-776).
ccccagtgcctgggtataa

SEQ ID NO: 600044 - DNA, 19 bp, Mus musculus
  siRNA target sequence for Pygb (NM_153781.1,907-925).
gtcctgtatcccaatgaca

SEQ ID NO: 600045 - DNA, 19 bp, Mus musculus
  siRNA target sequence for Pygb (NM_153781.1,1043-1061).
gaacctgtttcgagacatt

SEQ ID NO: 600046 - DNA, 19 bp, Mus musculus
  siRNA target sequence for Pygb (NM_153781.1,1267-1285).
cggcacctggaaataatct

SEQ ID NO: 600047 - DNA, 19 bp, Mus musculus
  siRNA target sequence for Pygb (NM_153781.1,1268-1286).
ggcacctggaaataatcta

SEQ ID NO: 600048 - DNA, 19 bp, Mus musculus
  siRNA target sequence for Pygb (NM_153781.1,1269-1287).
gcacctggaaataatctat

SEQ ID NO: 600049 - DNA, 19 bp, Mus musculus
  siRNA target sequence for Pygb (NM_153781.1,1352-1370).
ggaggatgtccgtgattga

SEQ ID NO: 600050 - DNA, 19 bp, Mus musculus
  siRNA target sequence for Pygb (NM_153781.1,1372-1390).
gaaggggactgcaagagaa

SEQ ID NO: 600051 - DNA, 19 bp, Mus musculus
  siRNA target sequence for Pygb (NM_153781.1,1376-1394).
gggactgcaagagaatcaa

SEQ ID NO: 600052 - DNA, 19 bp, Mus musculus
  siRNA target sequence for Pygb (NM_153781.1,1378-1396).
gactgcaagagaatcaaca

SEQ ID NO: 600053 - DNA, 19 bp, Mus musculus
  siRNA target sequence for Pygb (NM_153781.1,1431-1449).
gaacggggtggcaaggatt

SEQ ID NO: 600054 - DNA, 19 bp, Mus musculus
  siRNA target sequence for Pygb (NM_153781.1,1435-1453).
ggggtggcaaggattcact

SEQ ID NO: 600055 - DNA, 19 bp, Mus musculus
  siRNA target sequence for Pygb (NM_153781.1,1544-1562).
ggtggctgctgttgtgtaa

SEQ ID NO: 600056 - DNA, 19 bp, Mus musculus
  siRNA target sequence for Pygb (NM_153781.1,1670-1688).
gagacgtagccaaggttaa

SEQ ID NO: 600057 - DNA, 19 bp, Mus musculus
  siRNA target sequence for Pygb (NM_153781.1,1746-1764).
caaccctgcatccatgttt

SEQ ID NO: 600058 - DNA, 19 bp, Mus musculus
  siRNA target sequence for Pygb (NM_153781.1,1806-1824).
gctcaactgcctacacatt

SEQ ID NO: 600059 - DNA, 19 bp, Mus musculus
  siRNA target sequence for Pygb (NM_153781.1,1935-1953).
caagctggtcacatccatt

SEQ ID NO: 600060 - DNA, 19 bp, Mus musculus
  siRNA target sequence for Pygb (NM_153781.1,1944-1962).
cacatccattggagatgtt

SEQ ID NO: 600061 - DNA, 19 bp, Mus musculus
  siRNA target sequence for Pygb (NM_153781.1,1946-1964).
catccattggagatgttgt

SEQ ID NO: 600062 - DNA, 19 bp, Mus musculus
  siRNA target sequence for Pygb (NM_153781.1,2013-2031).
gaactaccgtgtgtcttta

SEQ ID NO: 600063 - DNA, 19 bp, Mus musculus
  siRNA target sequence for Gys2 (NM_145572.1,361-379).
cctgataggtccgtacttt

SEQ ID NO: 600064 - DNA, 19 bp, Mus musculus
  siRNA target sequence for Gys2 (NM_145572.1,369-387).
gtccgtactttgagcataa

SEQ ID NO: 600065 - DNA, 19 bp, Mus musculus
  siRNA target sequence for Gys2 (NM_145572.1,371-389).
ccgtactttgagcataata

SEQ ID NO: 600066 - DNA, 19 bp, Mus musculus
  siRNA target sequence for Gys2 (NM_145572.1,372-390).
cgtactttgagcataatat

SEQ ID NO: 600067 - DNA, 19 bp, Mus musculus
  siRNA target sequence for Gys2 (NM_145572.1,420-438).
ccaacgatgctgtcagaaa

SEQ ID NO: 600068 - DNA, 19 bp, Mus musculus
  siRNA target sequence for Gys2 (NM_145572.1,421-439).
caacgatgctgtcagaaaa

SEQ ID NO: 600069 - DNA, 19 bp, Mus musculus
  siRNA target sequence for Gys2 (NM_145572.1,424-442).
cgatgctgtcagaaaagct

SEQ ID NO: 600070 - DNA, 19 bp, Mus musculus
  siRNA target sequence for Gys2 (NM_145572.1,466-484).
ctgccaggtgcattttgga

SEQ ID NO: 600071 - DNA, 19 bp, Mus musculus
  siRNA target sequence for Gys2 (NM_145572.1,586-604).
cgttggcatccctcatcat

SEQ ID NO: 600072 - DNA, 19 bp, Mus musculus
  siRNA target sequence for Gys2 (NM_145572.1,625-643).
gctcatatttgggtcttta

SEQ ID NO: 600073 - DNA, 19 bp, Mus musculus
  siRNA target sequence for Gys2 (NM_145572.1,626-644).
ctcatatttgggtctttaa

SEQ ID NO: 600074 - DNA, 19 bp, Mus musculus
  siRNA target sequence for Gys2 (NM_145572.1,691-709).
cgtcattgcccaattccat

SEQ ID NO: 600075 - DNA, 19 bp, Mus musculus
  siRNA target sequence for Gys2 (NM_145572.1,755-773).
ctccccattgccacagtat

SEQ ID NO: 600076 - DNA, 19 bp, Mus musculus
  siRNA target sequence for Gys2 (NM_145572.1,789-807).
cactgcttgggcgttatct

SEQ ID NO: 600077 - DNA, 19 bp, Mus musculus
  siRNA target sequence for Gys2 (NM_145572.1,791-809).
ctgcttgggcgttatctct

SEQ ID NO: 600078 - DNA, 19 bp, Mus musculus
  siRNA target sequence for Gys2 (NM_145572.1,979-997).
gaagaggaagcctgatgta

SEQ ID NO: 600079 - DNA, 19 bp, Mus musculus
  siRNA target sequence for Gys2 (NM_145572.1,995-1013).
gtagtgactccaaatggtt

SEQ ID NO: 600080 - DNA, 19 bp, Mus musculus
  siRNA target sequence for Gys2 (NM_145572.1,1000-1018).
gactccaaatggtttgaat

SEQ ID NO: 600081 - DNA, 19 bp, Mus musculus
  siRNA target sequence for Gys2 (NM_145572.1,1090-1108).
cgttcgaggtcatttctat

SEQ ID NO: 600082 - DNA, 19 bp, Mus musculus
  siRNA target sequence for Gys2 (NM_145572.1,1110-1128).
gtcatctggactttgatct

SEQ ID NO: 600083 - DNA, 19 bp, Mus musculus
  siRNA target sequence for Gys2 (NM_145572.1,1273-1291).
gcctgccaagacaaacaat

SEQ ID NO: 600084 - DNA, 19 bp, Mus musculus
  siRNA target sequence for Gys2 (NM_145572.1,1277-1295).
gccaagacaaacaatttca

SEQ ID NO: 600085 - DNA, 19 bp, Mus musculus
  siRNA target sequence for Gys2 (NM_145572.1,1379-1397).
ctctatgacgggttattaa

SEQ ID NO: 600086 - DNA, 19 bp, Mus musculus
  siRNA target sequence for Gys2 (NM_145572.1,1381-1399).
ctatgacgggttattaaga

SEQ ID NO: 600087 - DNA, 19 bp, Mus musculus
  siRNA target sequence for Gys2 (NM_145572.1,1389-1407).
ggttattaagaggagaaat

SEQ ID NO: 600088 - DNA, 19 bp, Mus musculus
  siRNA target sequence for Gys2 (NM_145572.1,1429-1447).
ggatcgagatgacttaaca

SEQ ID NO: 600089 - DNA, 19 bp, Mus musculus
  siRNA target sequence for Gys2 (NM_145572.1,1430-1448).
gatcgagatgacttaacaa

SEQ ID NO: 600090 - DNA, 19 bp, Mus musculus
  siRNA target sequence for Gys2 (NM_145572.1,1470-1488).
caactcagagacagtcttt

SEQ ID NO: 600091 - DNA, 19 bp, Mus musculus
  siRNA target sequence for Gys2 (NM_145572.1,1494-1512).
ctgtgaccactcacaatat

SEQ ID NO: 600092 - DNA, 19 bp, Mus musculus
  siRNA target sequence for Gys2 (NM_145572.1,1505-1523).
cacaatatgatcgatgatt

SEQ ID NO: 600093 - DNA, 19 bp, Mus musculus
  siRNA target sequence for Gys2 (NM_145572.1,1551-1569).
gacgaatcggacttttcaa

SEQ ID NO: 600094 - DNA, 19 bp, Mus musculus
  siRNA target sequence for Gys2 (NM_145572.1,1670-1688).
caccttggggtgtttccat

SEQ ID NO: 600095 - DNA, 19 bp, Mus musculus
  siRNA target sequence for Gys2 (NM_145572.1,1678-1696).
ggtgtttccatcgtactat

SEQ ID NO: 600096 - DNA, 19 bp, Mus musculus
  siRNA target sequence for Gys2 (NM_145572.1,1802-1820).
cctactgcatacggtattt

SEQ ID NO: 600097 - DNA, 19 bp, Mus musculus
  siRNA target sequence for Gys2 (NM_145572.1,1803-1821).
ctactgcatacggtattta

SEQ ID NO: 600098 - DNA, 19 bp, Mus musculus
  siRNA target sequence for Gys2 (NM_145572.1,1841-1859).
cgctctccagacgattctt

SEQ ID NO: 600099 - DNA, 19 bp, Mus musculus
  siRNA target sequence for Gys2 (NM_145572.1,1876-1894).
gttcctctacgggttttgt

SEQ ID NO: 600100 - DNA, 19 bp, Mus musculus
  siRNA target sequence for Gys2 (NM_145572.1,1879-1897).
cctctacgggttttgtaaa

SEQ ID NO: 600101 - DNA, 19 bp, Mus musculus
  siRNA target sequence for Gys2 (NM_145572.1,1963-1981).
gagatacctgggcagatat

SEQ ID NO: 600102 - DNA, 19 bp, Mus musculus
  siRNA target sequence for Gys2 (NM_145572.1,2013-2031).
gggcttttccagacaaatt

SEQ ID NO: 600103 - DNA, 19 bp, Mus musculus
  siRNA target sequence for Gys2 (NM_145572.1,2195-2213).
gagagggatcggctaaata

SEQ ID NO: 600104 - DNA, 19 bp, Mus musculus
  siRNA target sequence for Gys2 (NM_145572.1,2201-2219).
gatcggctaaatatcaagt

SEQ ID NO: 600105 - DNA, 19 bp, Mus musculus
  siRNA target sequence for Gys3 (NM_008195.1,135-153).
ccgagaacgcagtgctttt

SEQ ID NO: 600106 - DNA, 19 bp, Mus musculus
  siRNA target sequence for Gys3 (NM_008195.1,237-255).
ggggtgacaactactatct

SEQ ID NO: 600107 - DNA, 19 bp, Mus musculus
  siRNA target sequence for Gys3 (NM_008195.1,355-373).
gggttgtaaggtgtatttt

SEQ ID NO: 600108 - DNA, 19 bp, Mus musculus
  siRNA target sequence for Gys3 (NM_008195.1,591-609).
cccacttccacgaatggtt

SEQ ID NO: 600109 - DNA, 19 bp, Mus musculus
  siRNA target sequence for Gys3 (NM_008195.1,650-668).
ccggtggcaaccatcttca

SEQ ID NO: 600110 - DNA, 19 bp, Mus musculus
  siRNA target sequence for Gys3 (NM_008195.1,860-878).
caacacctccttaagagaa

SEQ ID NO: 600111 - DNA, 19 bp, Mus musculus
  siRNA target sequence for Gys3 (NM_008195.1,896-914).
cccaacgggctgaatgtga

SEQ ID NO: 600112 - DNA, 19 bp, Mus musculus
  siRNA target sequence for Gys3 (NM_008195.1,924-942).
ctgctatgcacgaattcca

SEQ ID NO: 600113 - DNA, 19 bp, Mus musculus
  siRNA target sequence for Gys3 (NM_008195.1,966-984).
cacgaatccaggaatttgt

SEQ ID NO: 600114 - DNA, 19 bp, Mus musculus
  siRNA target sequence for Gys3 (NM_008195.1,1018-1036).
cctagacaagactttgtat

SEQ ID NO: 600115 - DNA, 19 bp, Mus musculus
  siRNA target sequence for Gys3 (NM_008195.1,1022-1040).
gacaagactttgtatttct

SEQ ID NO: 600116 - DNA, 19 bp, Mus musculus
  siRNA target sequence for Gys3 (NM_008195.1,1045-1063).
cgctggccgctatgagttt

SEQ ID NO: 600117 - DNA, 19 bp, Mus musculus
  siRNA target sequence for Gys3 (NM_008195.1,1049-1067).
ggccgctatgagttttcca

SEQ ID NO: 600118 - DNA, 19 bp, Mus musculus
  siRNA target sequence for Gys3 (NM_008195.1,1050-1068).
gccgctatgagttttccaa

SEQ ID NO: 600119 - DNA, 19 bp, Mus musculus
  siRNA target sequence for Gys3 (NM_008195.1,1145-1163).
gttgtcgcattcttcatca

SEQ ID NO: 600120 - DNA, 19 bp, Mus musculus
  siRNA target sequence for Gys3 (NM_008195.1,1211-1229).
gccgtgcgcaaacaactat

SEQ ID NO: 600121 - DNA, 19 bp, Mus musculus
  siRNA target sequence for Gys3 (NM_008195.1,1270-1288).
gctctacgaatccctttta

SEQ ID NO: 600122 - DNA, 19 bp, Mus musculus
  siRNA target sequence for Gys3 (NM_008195.1,1293-1311).
ggagcctcccggacatgaa

SEQ ID NO: 600123 - DNA, 19 bp, Mus musculus
  siRNA target sequence for Gys3 (NM_008195.1,1298-1316).
ctcccggacatgaacaaga

SEQ ID NO: 600124 - DNA, 19 bp, Mus musculus
  siRNA target sequence for Gys3 (NM_008195.1,1362-1380).
ccactcagcggcagtcttt

SEQ ID NO: 600125 - DNA, 19 bp, Mus musculus
  siRNA target sequence for Gys3 (NM_008195.1,1442-1460).
cgccgaattggccttttca

SEQ ID NO: 600126 - DNA, 19 bp, Mus musculus
  siRNA target sequence for Gys3 (NM_008195.1,1443-1461).
gccgaattggccttttcaa

SEQ ID NO: 600127 - DNA, 19 bp, Mus musculus
  siRNA target sequence for Gys3 (NM_008195.1,1472-1490).
gaccgtgtgaaggtgattt

SEQ ID NO: 600128 - DNA, 19 bp, Mus musculus
  siRNA target sequence for Gys3 (NM_008195.1,1474-1492).
ccgtgtgaaggtgattttt

SEQ ID NO: 600129 - DNA, 19 bp, Mus musculus
  siRNA target sequence for Gys3 (NM_008195.1,1530-1548).
ccgtggattatgaggaatt

SEQ ID NO: 600130 - DNA, 19 bp, Mus musculus
  siRNA target sequence for Gys3 (NM_008195.1,1531-1549).
cgtggattatgaggaattt

SEQ ID NO: 600131 - DNA, 19 bp, Mus musculus
  siRNA target sequence for Gys3 (NM_008195.1,1695-1713).
cctcagcttacggcattta

SEQ ID NO: 600132 - DNA, 19 bp, Mus musculus
  siRNA target sequence for Gys3 (NM_008195.1,1701-1719).
cttacggcatttacattct

SEQ ID NO: 600133 - DNA, 19 bp, Mus musculus
  siRNA target sequence for Gys3 (NM_008195.1,1732-1750).
ccgcagcctggatgattca

SEQ ID NO: 600134 - DNA, 19 bp, Mus musculus
  siRNA target sequence for Gys3 (NM_008195.1,1733-1751).
cgcagcctggatgattcat

SEQ ID NO: 600135 - DNA, 19 bp, Mus musculus
  siRNA target sequence for Gys3 (NM_008195.1,1839-1857).
cggacttgctagattggaa

SEQ ID NO: 600136 - DNA, 19 bp, Mus musculus
  siRNA target sequence for Alg5 (NM_025442.1,141-159).
caaaaatgccaccatgtta

SEQ ID NO: 600137 - DNA, 19 bp, Mus musculus
  siRNA target sequence for Alg5 (NM_025442.1,150-168).
caccatgttaccaacatga

SEQ ID NO: 600138 - DNA, 19 bp, Mus musculus
  siRNA target sequence for Alg5 (NM_025442.1,234-252).
ctacgaaacagctatctgt

SEQ ID NO: 600139 - DNA, 19 bp, Mus musculus
  siRNA target sequence for Alg5 (NM_025442.1,310-328).
gaactacctagaaaagaga

SEQ ID NO: 600140 - DNA, 19 bp, Mus musculus
  siRNA target sequence for Alg5 (NM_025442.1,421-439).
gaaatacggaagtgacaaa

SEQ ID NO: 600141 - DNA, 19 bp, Mus musculus
  siRNA target sequence for Alg5 (NM_025442.1,434-452).
gacaaagtccgggtgataa

SEQ ID NO: 600142 - DNA, 19 bp, Mus musculus
  siRNA target sequence for Alg5 (NM_025442.1,504-522).
gttcccgaggagagaagat

SEQ ID NO: 600143 - DNA, 19 bp, Mus musculus
  siRNA target sequence for Alg5 (NM_025442.1,608-626).
gagcaaatggctattgcat

SEQ ID NO: 600144 - DNA, 19 bp, Mus musculus
  siRNA target sequence for Alg5 (NM_025442.1,670-688).
ctcttacttccgtaccttt

SEQ ID NO: 600145 - DNA, 19 bp, Mus musculus
  siRNA target sequence for Alg5 (NM_025442.1,689-707).
cttatgtacggattccatt

SEQ ID NO: 600146 - DNA, 19 bp, Mus musculus
  siRNA target sequence for Alg5 (NM_025442.1,715-733).
gtggttcctctgtgtcaaa

SEQ ID NO: 600147 - DNA, 19 bp, Mus musculus
  siRNA target sequence for Alg5 (NM_025442.1,745-763).
cacacagtgcgggttcaaa

SEQ ID NO: 600148 - DNA, 19 bp, Mus musculus
  siRNA target sequence for Alg5 (NM_025442.1,747-765).
cacagtgcgggttcaaatt

SEQ ID NO: 600149 - DNA, 19 bp, Mus musculus
  siRNA target sequence for Alg5 (NM_025442.1,796-814).
ctcgtctctgcacattgaa

SEQ ID NO: 600150 - DNA, 19 bp, Mus musculus
  siRNA target sequence for Alg5 (NM_025442.1,816-834).
gatgggcatttgatgtaga

SEQ ID NO: 600151 - DNA, 19 bp, Mus musculus
  siRNA target sequence for Alg5 (NM_025442.1,881-899).
gctgtcaactggacagaaa

SEQ ID NO: 600152 - DNA, 19 bp, Mus musculus
  siRNA target sequence for Alg5 (NM_025442.1,894-912).
cagaaattgagggttctaa

SEQ ID NO: 600153 - DNA, 19 bp, Mus musculus
  siRNA target sequence for Alg5 (NM_025442.1,896-914).
gaaattgagggttctaagt

SEQ ID NO: 600154 - DNA, 19 bp, Mus musculus
  siRNA target sequence for Alg5 (NM_025442.1,906-924).
gttctaagttagttccatt

SEQ ID NO: 600155 - DNA, 19 bp, Mus musculus
  siRNA target sequence for Gyg1 (NM_013755.1,68-86).
gacgctgaccacaaacgat

SEQ ID NO: 600156 - DNA, 19 bp, Mus musculus
  siRNA target sequence for Gyg1 (NM_013755.1,142-160).
ctaggaggatggttgtact

SEQ ID NO: 600157 - DNA, 19 bp, Mus musculus
  siRNA target sequence for Gyg1 (NM_013755.1,182-200).
ctccatgagaaaagtttta

SEQ ID NO: 600158 - DNA, 19 bp, Mus musculus
  siRNA target sequence for Gyg1 (NM_013755.1,255-273).
gctcatctaaccttaatga

SEQ ID NO: 600159 - DNA, 19 bp, Mus musculus
  siRNA target sequence for Gyg1 (NM_013755.1,256-274).
ctcatctaaccttaatgaa

SEQ ID NO: 600160 - DNA, 19 bp, Mus musculus
  siRNA target sequence for Gyg1 (NM_013755.1,280-298).
ctgagttgggcatcacatt

SEQ ID NO: 600161 - DNA, 19 bp, Mus musculus
  siRNA target sequence for Gyg1 (NM_013755.1,284-302).
gttgggcatcacattgact

SEQ ID NO: 600162 - DNA, 19 bp, Mus musculus
  siRNA target sequence for Gyg1 (NM_013755.1,287-305).
gggcatcacattgactaaa

SEQ ID NO: 600163 - DNA, 19 bp, Mus musculus
  siRNA target sequence for Gyg1 (NM_013755.1,289-307).
gcatcacattgactaaact

SEQ ID NO: 600164 - DNA, 19 bp, Mus musculus
  siRNA target sequence for Gyg1 (NM_013755.1,306-324).
ctccactgctggtcactta

SEQ ID NO: 600165 - DNA, 19 bp, Mus musculus
  siRNA target sequence for Gyg1 (NM_013755.1,344-362).
gttcatggatgcagatact

SEQ ID NO: 600166 - DNA, 19 bp, Mus musculus
  siRNA target sequence for Gyg1 (NM_013755.1,428-446).
gtggcctgactgtttcaat

SEQ ID NO: 600167 - DNA, 19 bp, Mus musculus
  siRNA target sequence for Gyg1 (NM_013755.1,461-479).
ctatcaaccctccattgaa

SEQ ID NO: 600168 - DNA, 19 bp, Mus musculus
  siRNA target sequence for Gyg1 (NM_013755.1,468-486).
ccctccattgaaacgtata

SEQ ID NO: 600169 - DNA, 19 bp, Mus musculus
  siRNA target sequence for Gyg1 (NM_013755.1,469-487).
cctccattgaaacgtataa

SEQ ID NO: 600170 - DNA, 19 bp, Mus musculus
  siRNA target sequence for Gyg1 (NM_013755.1,472-490).
ccattgaaacgtataacca

SEQ ID NO: 600171 - DNA, 19 bp, Mus musculus
  siRNA target sequence for Gyg1 (NM_013755.1,508-526).
ctgagcaaggtagttttga

SEQ ID NO: 600172 - DNA, 19 bp, Mus musculus
  siRNA target sequence for Gyg1 (NM_013755.1,534-552).
gaccagggcctactgaata

SEQ ID NO: 600173 - DNA, 19 bp, Mus musculus
  siRNA target sequence for Gyg1 (NM_013755.1,540-558).
ggcctactgaatacatatt

SEQ ID NO: 600174 - DNA, 19 bp, Mus musculus
  siRNA target sequence for Gyg1 (NM_013755.1,564-582).
ggctgggcaacgacagata

SEQ ID NO: 600175 - DNA, 19 bp, Mus musculus
  siRNA target sequence for Gyg1 (NM_013755.1,565-583).
gctgggcaacgacagatat

SEQ ID NO: 600176 - DNA, 19 bp, Mus musculus
  siRNA target sequence for Gyg1 (NM_013755.1,570-588).
gcaacgacagatatcacaa

SEQ ID NO: 600177 - DNA, 19 bp, Mus musculus
  siRNA target sequence for Gyg1 (NM_013755.1,571-589).
caacgacagatatcacaaa

SEQ ID NO: 600178 - DNA, 19 bp, Mus musculus
  siRNA target sequence for Gyg1 (NM_013755.1,591-609).
cacctgccatttgtgtata

SEQ ID NO: 600179 - DNA, 19 bp, Mus musculus
  siRNA target sequence for Gyg1 (NM_013755.1,611-629).
cctaagcagcatttcaata

SEQ ID NO: 600180 - DNA, 19 bp, Mus musculus
  siRNA target sequence for Gyg1 (NM_013755.1,634-652).
cctacctcccggcatttaa

SEQ ID NO: 600181 - DNA, 19 bp, Mus musculus
  siRNA target sequence for Gyg1 (NM_013755.1,635-653).
ctacctcccggcatttaaa

SEQ ID NO: 600182 - DNA, 19 bp, Mus musculus
  siRNA target sequence for Gyg1 (NM_013755.1,645-663).
gcatttaaagcgtttggta

SEQ ID NO: 600183 - DNA, 19 bp, Mus musculus
  siRNA target sequence for Gyg1 (NM_013755.1,661-679).
gtaaaaatgccaaagttgt

SEQ ID NO: 600184 - DNA, 19 bp, Mus musculus
  siRNA target sequence for Gyg1 (NM_013755.1,693-711).
cgaaccaagccatggaatt

SEQ ID NO: 600185 - DNA, 19 bp, Mus musculus
  siRNA target sequence for Gyg1 (NM_013755.1,701-719).
gccatggaattacacttat

SEQ ID NO: 600186 - DNA, 19 bp, Mus musculus
  siRNA target sequence for Gyg1 (NM_013755.1,703-721).
catggaattacacttataa

SEQ ID NO: 600187 - DNA, 19 bp, Mus musculus
  siRNA target sequence for Gyg1 (NM_013755.1,715-733).
cttataacccccaaacaaa

SEQ ID NO: 600188 - DNA, 19 bp, Mus musculus
  siRNA target sequence for Gyg1 (NM_013755.1,764-782).
cgtgagtcacccagagttt

SEQ ID NO: 600189 - DNA, 19 bp, Mus musculus
  siRNA target sequence for Gyg1 (NM_013755.1,852-870).
gatgccagctcctatctaa

SEQ ID NO: 600190 - DNA, 19 bp, Mus musculus
  siRNA target sequence for Gyg1 (NM_013755.1,925-943).
ctgcaccacaaccttctat

SEQ ID NO: 600191 - DNA, 19 bp, Mus musculus
  siRNA target sequence for Gyg1 (NM_013755.1,995-1013).
gggagcagattcttttgat

SEQ ID NO: 600192 - DNA, 19 bp, Mus musculus
  siRNA target sequence for Ddost (NM_007838.1,343-361).
ccagcttgtccctcattaa

SEQ ID NO: 600193 - DNA, 19 bp, Mus musculus
  siRNA target sequence for Ddost (NM_007838.1,400-418).
ccccgtcggtggaagattt

SEQ ID NO: 600194 - DNA, 19 bp, Mus musculus
  siRNA target sequence for Ddost (NM_007838.1,401-419).
cccgtcggtggaagatttt

SEQ ID NO: 600195 - DNA, 19 bp, Mus musculus
  siRNA target sequence for Ddost (NM_007838.1,404-422).
gtcggtggaagattttgga

SEQ ID NO: 600196 - DNA, 19 bp, Mus musculus
  siRNA target sequence for Ddost (NM_007838.1,443-461).
catcagtgccttcattgat

SEQ ID NO: 600197 - DNA, 19 bp, Mus musculus
  siRNA target sequence for Ddost (NM_007838.1,463-481).
gtggcggcagcgttttggt

SEQ ID NO: 600198 - DNA, 19 bp, Mus musculus
  siRNA target sequence for Ddost (NM_007838.1,482-500).
ggctgccagctctgatatt

SEQ ID NO: 600199 - DNA, 19 bp, Mus musculus
  siRNA target sequence for Ddost (NM_007838.1,524-542).
cagtgagtgtgggattgaa

SEQ ID NO: 600200 - DNA, 19 bp, Mus musculus
  siRNA target sequence for Ddost (NM_007838.1,526-544).
gtgagtgtgggattgaatt

SEQ ID NO: 600201 - DNA, 19 bp, Mus musculus
  siRNA target sequence for Ddost (NM_007838.1,530-548).
gtgtgggattgaatttgat

SEQ ID NO: 600202 - DNA, 19 bp, Mus musculus
  siRNA target sequence for Ddost (NM_007838.1,532-550).
gtgggattgaatttgatga

SEQ ID NO: 600203 - DNA, 19 bp, Mus musculus
  siRNA target sequence for Ddost (NM_007838.1,569-587).
cgaccaccacaactatgat

SEQ ID NO: 600204 - DNA, 19 bp, Mus musculus
  siRNA target sequence for Ddost (NM_007838.1,572-590).
ccaccacaactatgatgtt

SEQ ID NO: 600205 - DNA, 19 bp, Mus musculus
  siRNA target sequence for Ddost (NM_007838.1,573-591).
caccacaactatgatgttt

SEQ ID NO: 600206 - DNA, 19 bp, Mus musculus
  siRNA target sequence for Ddost (NM_007838.1,601-619).
gccagcacacactcattgt

SEQ ID NO: 600207 - DNA, 19 bp, Mus musculus
  siRNA target sequence for Ddost (NM_007838.1,715-733).
cggacaatcccttggtttt

SEQ ID NO: 600208 - DNA, 19 bp, Mus musculus
  siRNA target sequence for Ddost (NM_007838.1,764-782).
ctccttcttcccagataaa

SEQ ID NO: 600209 - DNA, 19 bp, Mus musculus
  siRNA target sequence for Ddost (NM_007838.1,767-785).
cttcttcccagataaacca

SEQ ID NO: 600210 - DNA, 19 bp, Mus musculus
  siRNA target sequence for Ddost (NM_007838.1,930-948).
cccggtgcgcagaggtatt

SEQ ID NO: 600211 - DNA, 19 bp, Mus musculus
  siRNA target sequence for Ddost (NM_007838.1,932-950).
cggtgcgcagaggtattct

SEQ ID NO: 600212 - DNA, 19 bp, Mus musculus
  siRNA target sequence for Ddost (NM_007838.1,949-967).
ctcagacaggcaactatga

SEQ ID NO: 600213 - DNA, 19 bp, Mus musculus
  siRNA target sequence for Ddost (NM_007838.1,1127-1145).
caagtgggtcccctttgat

SEQ ID NO: 600214 - DNA, 19 bp, Mus musculus
  siRNA target sequence for Ddost (NM_007838.1,1243-1261).
ctgacgtgtatggtgtatt

SEQ ID NO: 600215 - DNA, 19 bp, Mus musculus
  siRNA target sequence for Ddost (NM_007838.1,1255-1273).
gtgtattccagtttaaagt

SEQ ID NO: 600216 - DNA, 19 bp, Mus musculus
  siRNA target sequence for Ddost (NM_007838.1,1367-1385).
ctcggcctatccctactat

SEQ ID NO: 600217 - DNA, 19 bp, Mus musculus
  siRNA target sequence for Itm1 (NM_008408.2,661-679).
ctgcttacttactacatgt

SEQ ID NO: 600218 - DNA, 19 bp, Mus musculus
  siRNA target sequence for Itm1 (NM_008408.2,764-782).
gctatgtgttcctgatcaa

SEQ ID NO: 600219 - DNA, 19 bp, Mus musculus
  siRNA target sequence for Itm1 (NM_008408.2,843-861).
cgtagcctactgtactgtt

SEQ ID NO: 600220 - DNA, 19 bp, Mus musculus
  siRNA target sequence for Itm1 (NM_008408.2,847-865).
gcctactgtactgtttact

SEQ ID NO: 600221 - DNA, 19 bp, Mus musculus
  siRNA target sequence for Itm1 (NM_008408.2,868-886).
ctgggcaccattctttcta

SEQ ID NO: 600222 - DNA, 19 bp, Mus musculus
  siRNA target sequence for Itm1 (NM_008408.2,909-927).
ccagcccgtcctttcatca

SEQ ID NO: 600223 - DNA, 19 bp, Mus musculus
  siRNA target sequence for Itm1 (NM_008408.2,912-930).
gcccgtcctttcatcagaa

SEQ ID NO: 600224 - DNA, 19 bp, Mus musculus
  siRNA target sequence for Itm1 (NM_008408.2,1007-1025).
cacagcaattcgaagttct

SEQ ID NO: 600225 - DNA, 19 bp, Mus musculus
  siRNA target sequence for Itm1 (NM_008408.2,1021-1039).
gttcttttccggagtgtta

SEQ ID NO: 600226 - DNA, 19 bp, Mus musculus
  siRNA target sequence for Itm1 (NM_008408.2,1024-1042).
cttttccggagtgttatct

SEQ ID NO: 600227 - DNA, 19 bp, Mus musculus
  siRNA target sequence for Itm1 (NM_008408.2,1072-1090).
ggagctctcctcatgctaa

SEQ ID NO: 600228 - DNA, 19 bp, Mus musculus
  siRNA target sequence for Itm1 (NM_008408.2,1106-1124).
cctggacagggcgtttcta

SEQ ID NO: 600229 - DNA, 19 bp, Mus musculus
  siRNA target sequence for Itm1 (NM_008408.2,1139-1157).
cctcttatgctaagaataa

SEQ ID NO: 600230 - DNA, 19 bp, Mus musculus
  siRNA target sequence for Itm1 (NM_008408.2,1162-1180).
cccattattgcatctgttt

SEQ ID NO: 600231 - DNA, 19 bp, Mus musculus
  siRNA target sequence for Itm1 (NM_008408.2,1199-1217).
cctggtcttcctactattt

SEQ ID NO: 600232 - DNA, 19 bp, Mus musculus
  siRNA target sequence for Itm1 (NM_008408.2,1200-1218).
ctggtcttcctactatttt

SEQ ID NO: 600233 - DNA, 19 bp, Mus musculus
  siRNA target sequence for Itm1 (NM_008408.2,1202-1220).
ggtcttcctactattttga

SEQ ID NO: 600234 - DNA, 19 bp, Mus musculus
  siRNA target sequence for Itm1 (NM_008408.2,1203-1221).
gtcttcctactattttgat

SEQ ID NO: 600235 - DNA, 19 bp, Mus musculus
  siRNA target sequence for Itm1 (NM_008408.2,1208-1226).
cctactattttgatctaca

SEQ ID NO: 600236 - DNA, 19 bp, Mus musculus
  siRNA target sequence for Itm1 (NM_008408.2,1255-1273).
ctctattactgctttagca

SEQ ID NO: 600237 - DNA, 19 bp, Mus musculus
  siRNA target sequence for Itm1 (NM_008408.2,1278-1296).
gtctgatgctcggattttt

SEQ ID NO: 600238 - DNA, 19 bp, Mus musculus
  siRNA target sequence for Itm1 (NM_008408.2,1280-1298).
ctgatgctcggatttttat

SEQ ID NO: 600239 - DNA, 19 bp, Mus musculus
  siRNA target sequence for Itm1 (NM_008408.2,1282-1300).
gatgctcggatttttatca

SEQ ID NO: 600240 - DNA, 19 bp, Mus musculus
  siRNA target sequence for Itm1 (NM_008408.2,1285-1303).
gctcggatttttatcatca

SEQ ID NO: 600241 - DNA, 19 bp, Mus musculus
  siRNA target sequence for Itm1 (NM_008408.2,1286-1304).
ctcggatttttatcatcat

SEQ ID NO: 600242 - DNA, 19 bp, Mus musculus
  siRNA target sequence for Itm1 (NM_008408.2,1314-1332).
gaccagcatgtacttttca

SEQ ID NO: 600243 - DNA, 19 bp, Mus musculus
  siRNA target sequence for Itm1 (NM_008408.2,1334-1352).
ctgtaatggtgcgtctaat

SEQ ID NO: 600244 - DNA, 19 bp, Mus musculus
  siRNA target sequence for Itm1 (NM_008408.2,1357-1375).
gtattggcacctgttatgt

SEQ ID NO: 600245 - DNA, 19 bp, Mus musculus
  siRNA target sequence for Itm1 (NM_008408.2,1407-1425).
ggtgtccacatatatgaaa

SEQ ID NO: 600246 - DNA, 19 bp, Mus musculus
  siRNA target sequence for Itm1 (NM_008408.2,1478-1496).
cttaccctattaagaatga

SEQ ID NO: 600247 - DNA, 19 bp, Mus musculus
  siRNA target sequence for Itm1 (NM_008408.2,1497-1515).
ggtggcgagtgggatgata

SEQ ID NO: 600248 - DNA, 19 bp, Mus musculus
  siRNA target sequence for Itm1 (NM_008408.2,1618-1636).
gatggcagtaggatcattt

SEQ ID NO: 600249 - DNA, 19 bp, Mus musculus
  siRNA target sequence for Itm1 (NM_008408.2,1622-1640).
gcagtaggatcatttttga

SEQ ID NO: 600250 - DNA, 19 bp, Mus musculus
  siRNA target sequence for Itm1 (NM_008408.2,1623-1641).
cagtaggatcatttttgat

SEQ ID NO: 600251 - DNA, 19 bp, Mus musculus
  siRNA target sequence for Itm1 (NM_008408.2,1625-1643).
gtaggatcatttttgatga

SEQ ID NO: 600252 - DNA, 19 bp, Mus musculus
  siRNA target sequence for Itm1 (NM_008408.2,1644-1662).
cttccgagaagcgtattat

SEQ ID NO: 600253 - DNA, 19 bp, Mus musculus
  siRNA target sequence for Itm1 (NM_008408.2,1711-1729).
gattatggctaccaaatta

SEQ ID NO: 600254 - DNA, 19 bp, Mus musculus
  siRNA target sequence for Itm1 (NM_008408.2,1739-1757).
caaatcggacaattttagt

SEQ ID NO: 600255 - DNA, 19 bp, Mus musculus
  siRNA target sequence for Itm1 (NM_008408.2,1758-1776).
ggacaataacacatggaat

SEQ ID NO: 600256 - DNA, 19 bp, Mus musculus
  siRNA target sequence for Itm1 (NM_008408.2,1759-1777).
gacaataacacatggaata

SEQ ID NO: 600257 - DNA, 19 bp, Mus musculus
  siRNA target sequence for Itm1 (NM_008408.2,1773-1791).
gaataatacccatatttct

SEQ ID NO: 600258 - DNA, 19 bp, Mus musculus
  siRNA target sequence for Itm1 (NM_008408.2,1891-1909).
gggtattcttcggatgata

SEQ ID NO: 600259 - DNA, 19 bp, Mus musculus
  siRNA target sequence for Itm1 (NM_008408.2,1892-1910).
ggtattcttcggatgatat

SEQ ID NO: 600260 - DNA, 19 bp, Mus musculus
  siRNA target sequence for Itm1 (NM_008408.2,1898-1916).
cttcggatgatatcaacaa

SEQ ID NO: 600261 - DNA, 19 bp, Mus musculus
  siRNA target sequence for Itm1 (NM_008408.2,1951-1969).
gagacaggaagacacatta

SEQ ID NO: 600262 - DNA, 19 bp, Mus musculus
  siRNA target sequence for Itm1 (NM_008408.2,1963-1981).
cacattaaggagaatgact

SEQ ID NO: 600263 - DNA, 19 bp, Mus musculus
  siRNA target sequence for Itm1 (NM_008408.2,1971-1989).
ggagaatgactactatact

SEQ ID NO: 600264 - DNA, 19 bp, Mus musculus
  siRNA target sequence for Itm1 (NM_008408.2,2109-2127).
ctttgaccgtgttcgaaat

SEQ ID NO: 600265 - DNA, 19 bp, Mus musculus
  siRNA target sequence for Itm1 (NM_008408.2,2197-2215).
gtcaggatatacaaggtaa

SEQ ID NO: 600266 - DNA, 19 bp, Mus musculus
  siRNA target sequence for Itm1 (NM_008408.2,2224-2242).
gataatcgaggcttgtcaa

SEQ ID NO: 600267 - DNA, 19 bp, Mus musculus
  siRNA target sequence for Dpm1 (NM_010072.2,81-99).
cctcgcgacaggacaagta

SEQ ID NO: 600268 - DNA, 19 bp, Mus musculus
  siRNA target sequence for Dpm1 (NM_010072.2,175-193).
cgagagtgcaatcaactat

SEQ ID NO: 600269 - DNA, 19 bp, Mus musculus
  siRNA target sequence for Dpm1 (NM_010072.2,178-196).
gagtgcaatcaactatgaa

SEQ ID NO: 600270 - DNA, 19 bp, Mus musculus
  siRNA target sequence for Dpm1 (NM_010072.2,288-306).
gaccacgagagaaaaagct

SEQ ID NO: 600271 - DNA, 19 bp, Mus musculus
  siRNA target sequence for Dpm1 (NM_010072.2,313-331).
cggaactgcctacattcat

SEQ ID NO: 600272 - DNA, 19 bp, Mus musculus
  siRNA target sequence for Dpm1 (NM_010072.2,344-362).
gccacggggaactatgtga

SEQ ID NO: 600273 - DNA, 19 bp, Mus musculus
  siRNA target sequence for Dpm1 (NM_010072.2,345-363).
ccacggggaactatgtgat

SEQ ID NO: 600274 - DNA, 19 bp, Mus musculus
  siRNA target sequence for Dpm1 (NM_010072.2,351-369).
ggaactatgtgatcatcat

SEQ ID NO: 600275 - DNA, 19 bp, Mus musculus
  siRNA target sequence for Dpm1 (NM_010072.2,385-403).
ccaccatcccaaatttatt

SEQ ID NO: 600276 - DNA, 19 bp, Mus musculus
  siRNA target sequence for Dpm1 (NM_010072.2,469-487).
gaatgggggtgtttatgga

SEQ ID NO: 600277 - DNA, 19 bp, Mus musculus
  siRNA target sequence for Dpm1 (NM_010072.2,513-531).
gccgtggggccaattttat

SEQ ID NO: 600278 - DNA, 19 bp, Mus musculus
  siRNA target sequence for Dpm1 (NM_010072.2,514-532).
ccgtggggccaattttata

SEQ ID NO: 600279 - DNA, 19 bp, Mus musculus
  siRNA target sequence for Dpm1 (NM_010072.2,515-533).
cgtggggccaattttataa

SEQ ID NO: 600280 - DNA, 19 bp, Mus musculus
  siRNA target sequence for Dpm1 (NM_010072.2,519-537).
gggccaattttataactca

SEQ ID NO: 600281 - DNA, 19 bp, Mus musculus
  siRNA target sequence for Dpm1 (NM_010072.2,551-569).
cctggagcgtcagacttaa

SEQ ID NO: 600282 - DNA, 19 bp, Mus musculus
  siRNA target sequence for Dpm1 (NM_010072.2,582-600).
gattataccgaaaagaagt

SEQ ID NO: 600283 - DNA, 19 bp, Mus musculus
  siRNA target sequence for Dpm1 (NM_010072.2,630-648).
ccaaaggctatgtctttca

SEQ ID NO: 600284 - DNA, 19 bp, Mus musculus
  siRNA target sequence for Dpm1 (NM_010072.2,687-705).
ctattggtgaggttccaat

SEQ ID NO: 600285 - DNA, 19 bp, Mus musculus
  siRNA target sequence for Dpm1 (NM_010072.2,692-710).
ggtgaggttccaatttcat

SEQ ID NO: 600286 - DNA, 19 bp, Mus musculus
  siRNA target sequence for Dpm1 (NM_010072.2,693-711).
gtgaggttccaatttcatt

SEQ ID NO: 600287 - DNA, 19 bp, Mus musculus
  siRNA target sequence for Dpm1 (NM_010072.2,720-738).
gagtttatggtgaatccaa

SEQ ID NO: 600288 - DNA, 19 bp, Mus musculus
  siRNA target sequence for Dpm1 (NM_010072.2,743-761).
ggaggaaatgaaatagtct

SEQ ID NO: 600289 - DNA, 19 bp, Mus musculus
  siRNA target sequence for Dpm1 (NM_010072.2,762-780).
cgttcctgaaagggttatt

SEQ ID NO: 600290 - DNA, 19 bp, Mus musculus
  siRNA target sequence for Dpm1 (NM_010072.2,766-784).
cctgaaagggttattgact

SEQ ID NO: 600291 - DNA, 19 bp, Mus musculus
  siRNA target sequence for Pomt1 (NM_145145.1,199-217).
ctcgggctgtggttttcga

SEQ ID NO: 600292 - DNA, 19 bp, Mus musculus
  siRNA target sequence for Pomt1 (NM_145145.1,205-223).
ctgtggttttcgatgaagt

SEQ ID NO: 600293 - DNA, 19 bp, Mus musculus
  siRNA target sequence for Pomt1 (NM_145145.1,207-225).
gtggttttcgatgaagtat

SEQ ID NO: 600294 - DNA, 19 bp, Mus musculus
  siRNA target sequence for Pomt1 (NM_145145.1,308-326).
ggccttaggaggttggtta

SEQ ID NO: 600295 - DNA, 19 bp, Mus musculus
  siRNA target sequence for Pomt1 (NM_145145.1,328-346).
ggggattcgatggtaactt

SEQ ID NO: 600296 - DNA, 19 bp, Mus musculus
  siRNA target sequence for Pomt1 (NM_145145.1,329-347).
gggattcgatggtaacttt

SEQ ID NO: 600297 - DNA, 19 bp, Mus musculus
  siRNA target sequence for Pomt1 (NM_145145.1,456-474).
gtgctagagctccactttt

SEQ ID NO: 600298 - DNA, 19 bp, Mus musculus
  siRNA target sequence for Pomt1 (NM_145145.1,585-603).
gctgtgttgtcctatctga

SEQ ID NO: 600299 - DNA, 19 bp, Mus musculus
  siRNA target sequence for Pomt1 (NM_145145.1,663-681).
ctgaccggggtctcttgtt

SEQ ID NO: 600300 - DNA, 19 bp, Mus musculus
  siRNA target sequence for Pomt1 (NM_145145.1,683-701).
ctgtgcagttgggatcaaa

SEQ ID NO: 600301 - DNA, 19 bp, Mus musculus
  siRNA target sequence for Pomt1 (NM_145145.1,747-765).
gtccacgcgtggaatctga

SEQ ID NO: 600302 - DNA, 19 bp, Mus musculus
  siRNA target sequence for Pomt1 (NM_145145.1,768-786).
ggagaccagaccttgtcaa

SEQ ID NO: 600303 - DNA, 19 bp, Mus musculus
  siRNA target sequence for Pomt1 (NM_145145.1,769-787).
gagaccagaccttgtcaaa

SEQ ID NO: 600304 - DNA, 19 bp, Mus musculus
  siRNA target sequence for Pomt1 (NM_145145.1,900-918).
ccccatgaccaaatcatgt

SEQ ID NO: 600305 - DNA, 19 bp, Mus musculus
  siRNA target sequence for Pomt1 (NM_145145.1,1042-1060).
ggcttcattcgcacaagaa

SEQ ID NO: 600306 - DNA, 19 bp, Mus musculus
  siRNA target sequence for Pomt1 (NM_145145.1,1061-1079).
cacctatcccatgatatat

SEQ ID NO: 600307 - DNA, 19 bp, Mus musculus
  siRNA target sequence for Pomt1 (NM_145145.1,1063-1081).
cctatcccatgatatatga

SEQ ID NO: 600308 - DNA, 19 bp, Mus musculus
  siRNA target sequence for Pomt1 (NM_145145.1,1106-1124).
gcaacaggtgacctgttat

SEQ ID NO: 600309 - DNA, 19 bp, Mus musculus
  siRNA target sequence for Pomt1 (NM_145145.1,1115-1133).
gacctgttatcccttcaaa

SEQ ID NO: 600310 - DNA, 19 bp, Mus musculus
  siRNA target sequence for Pomt1 (NM_145145.1,1117-1135).
cctgttatcccttcaaaga

SEQ ID NO: 600311 - DNA, 19 bp, Mus musculus
  siRNA target sequence for Pomt1 (NM_145145.1,1286-1304).
gagcccccattctcaagaa

SEQ ID NO: 600312 - DNA, 19 bp, Mus musculus
  siRNA target sequence for Pomt1 (NM_145145.1,1288-1306).
gcccccattctcaagaagt

SEQ ID NO: 600313 - DNA, 19 bp, Mus musculus
  siRNA target sequence for Pomt1 (NM_145145.1,1307-1325).
ctcctgctacattgactat

SEQ ID NO: 600314 - DNA, 19 bp, Mus musculus
  siRNA target sequence for Pomt1 (NM_145145.1,1309-1327).
cctgctacattgactataa

SEQ ID NO: 600315 - DNA, 19 bp, Mus musculus
  siRNA target sequence for Pomt1 (NM_145145.1,1312-1330).
gctacattgactataacat

SEQ ID NO: 600316 - DNA, 19 bp, Mus musculus
  siRNA target sequence for Pomt1 (NM_145145.1,1386-1404).
cgggatacctggaagacta

SEQ ID NO: 600317 - DNA, 19 bp, Mus musculus
  siRNA target sequence for Pomt1 (NM_145145.1,1389-1407).
gatacctggaagactatct

SEQ ID NO: 600318 - DNA, 19 bp, Mus musculus
  siRNA target sequence for Pomt1 (NM_145145.1,1409-1427).
gtcggaagtgcgctttgta

SEQ ID NO: 600319 - DNA, 19 bp, Mus musculus
  siRNA target sequence for Pomt1 (NM_145145.1,1500-1518).
gtagttggggagaagttgt

SEQ ID NO: 600320 - DNA, 19 bp, Mus musculus
  siRNA target sequence for Pomt1 (NM_145145.1,1612-1630).
cgcccactcagctcgatat

SEQ ID NO: 600321 - DNA, 19 bp, Mus musculus
  siRNA target sequence for Pomt1 (NM_145145.1,1614-1632).
cccactcagctcgatatca

SEQ ID NO: 600322 - DNA, 19 bp, Mus musculus
  siRNA target sequence for Pomt1 (NM_145145.1,1654-1672).
ccagattctcagagttaca

SEQ ID NO: 600323 - DNA, 19 bp, Mus musculus
  siRNA target sequence for Pomt1 (NM_145145.1,1957-1975).
gcggctgggcactcaacta

SEQ ID NO: 600324 - DNA, 19 bp, Mus musculus
  siRNA target sequence for Pomt1 (NM_145145.1,2123-2141).
cctggttgtagcatggtat

SEQ ID NO: 600325 - DNA, 19 bp, Mus musculus
  siRNA target sequence for Pomt1 (NM_145145.1,2124-2142).
ctggttgtagcatggtatt

SEQ ID NO: 600326 - DNA, 19 bp, Mus musculus
  siRNA target sequence for Pomt1 (NM_145145.1,2127-2145).
gttgtagcatggtattcct

SEQ ID NO: 600327 - DNA, 19 bp, Mus musculus
  siRNA target sequence for Pomt1 (NM_145145.1,2168-2186).
gctacgcccactaacctat

SEQ ID NO: 600328 - DNA, 19 bp, Mus musculus
  siRNA target sequence for Pomt1 (NM_145145.1,2220-2238).
gcccttcgctggaaagaca

SEQ ID NO: 600329 - DNA, 19 bp, Mus musculus
  siRNA target sequence for Pomt1 (NM_145145.1,2235-2253).
gacagctgggatattctga

SEQ ID NO: 600330 - DNA, 19 bp, Mus musculus
  siRNA target sequence for 0610033E06Rik (NM_053215.2,316-334).
gagttgtcaagagatacat

SEQ ID NO: 600331 - DNA, 19 bp, Mus musculus
  siRNA target sequence for 0610033E06Rik (NM_053215.2,318-336).
gttgtcaagagatacatgt

SEQ ID NO: 600332 - DNA, 19 bp, Mus musculus
  siRNA target sequence for 0610033E06Rik (NM_053215.2,491-509).
gggagctaatcgctgaatt

SEQ ID NO: 600333 - DNA, 19 bp, Mus musculus
  siRNA target sequence for 0610033E06Rik (NM_053215.2,540-558).
cttcactgcaggttacaga

SEQ ID NO: 600334 - DNA, 19 bp, Mus musculus
  siRNA target sequence for 0610033E06Rik (NM_053215.2,570-588).
cagtggaagatttctacta

SEQ ID NO: 600335 - DNA, 19 bp, Mus musculus
  siRNA target sequence for 1300012D20Rik (NM_152811.1,38-56).
gatacagttcatatgctat

SEQ ID NO: 600336 - DNA, 19 bp, Mus musculus
  siRNA target sequence for 1300012D20Rik (NM_152811.1,97-115).
cagaatacagccattggat

SEQ ID NO: 600337 - DNA, 19 bp, Mus musculus
  siRNA target sequence for 1300012D20Rik (NM_152811.1,159-177).
gacgtcaccgttctcatat

SEQ ID NO: 600338 - DNA, 19 bp, Mus musculus
  siRNA target sequence for 1300012D20Rik (NM_152811.1,161-179).
cgtcaccgttctcatatct

SEQ ID NO: 600339 - DNA, 19 bp, Mus musculus
  siRNA target sequence for 1300012D20Rik (NM_152811.1,162-180).
gtcaccgttctcatatctt

SEQ ID NO: 600340 - DNA, 19 bp, Mus musculus
  siRNA target sequence for 1300012D20Rik (NM_152811.1,164-182).
caccgttctcatatcttct

SEQ ID NO: 600341 - DNA, 19 bp, Mus musculus
  siRNA target sequence for 1300012D20Rik (NM_152811.1,194-212).
cattgggccgagcaatgaa

SEQ ID NO: 600342 - DNA, 19 bp, Mus musculus
  siRNA target sequence for 1300012D20Rik (NM_152811.1,198-216).
gggccgagcaatgaatctt

SEQ ID NO: 600343 - DNA, 19 bp, Mus musculus
  siRNA target sequence for 1300012D20Rik (NM_152811.1,200-218).
gccgagcaatgaatcttct

SEQ ID NO: 600344 - DNA, 19 bp, Mus musculus
  siRNA target sequence for 1300012D20Rik (NM_152811.1,202-220).
cgagcaatgaatcttctat

SEQ ID NO: 600345 - DNA, 19 bp, Mus musculus
  siRNA target sequence for 1300012D20Rik (NM_152811.1,206-224).
caatgaatcttctattaat

SEQ ID NO: 600346 - DNA, 19 bp, Mus musculus
  siRNA target sequence for 1300012D20Rik (NM_152811.1,288-306).
ggaaactggacatacgaat

SEQ ID NO: 600347 - DNA, 19 bp, Mus musculus
  siRNA target sequence for 1300012D20Rik (NM_152811.1,293-311).
ctggacatacgaattaaaa

SEQ ID NO: 600348 - DNA, 19 bp, Mus musculus
  siRNA target sequence for 1300012D20Rik (NM_152811.1,318-336).
ccattttggacatcttatt

SEQ ID NO: 600349 - DNA, 19 bp, Mus musculus
  siRNA target sequence for 1300012D20Rik (NM_152811.1,404-422).
gaacaagagcctcatgaaa

SEQ ID NO: 600350 - DNA, 19 bp, Mus musculus
  siRNA target sequence for 1300012D20Rik (NM_152811.1,497-515).
gcttaagacacctttagta

SEQ ID NO: 600351 - DNA, 19 bp, Mus musculus
  siRNA target sequence for 1300012D20Rik (NM_152811.1,498-516).
cttaagacacctttagtat

SEQ ID NO: 600352 - DNA, 19 bp, Mus musculus
  siRNA target sequence for 1300012D20Rik (NM_152811.1,594-612).
gtggttctgtcagaactaa

SEQ ID NO: 600353 - DNA, 19 bp, Mus musculus
  siRNA target sequence for 1300012D20Rik (NM_152811.1,609-627).
ctaagtgaccacatgacat

SEQ ID NO: 600354 - DNA, 19 bp, Mus musculus
  siRNA target sequence for 1300012D20Rik (NM_152811.1,654-672).
caggtgttgctttttgact

SEQ ID NO: 600355 - DNA, 19 bp, Mus musculus
  siRNA target sequence for 1300012D20Rik (NM_152811.1,693-711).
gagaaatcctggaatcagt

SEQ ID NO: 600356 - DNA, 19 bp, Mus musculus
  siRNA target sequence for 1300012D20Rik (NM_152811.1,729-747).
gggagacctacaacattaa

SEQ ID NO: 600357 - DNA, 19 bp, Mus musculus
  siRNA target sequence for 1300012D20Rik (NM_152811.1,731-749).
gagacctacaacattaact

SEQ ID NO: 600358 - DNA, 19 bp, Mus musculus
  siRNA target sequence for 1300012D20Rik (NM_152811.1,733-751).
gacctacaacattaactga

SEQ ID NO: 600359 - DNA, 19 bp, Mus musculus
  siRNA target sequence for 1300012D20Rik (NM_152811.1,739-757).
caacattaactgagatgat

SEQ ID NO: 600360 - DNA, 19 bp, Mus musculus
  siRNA target sequence for 1300012D20Rik (NM_152811.1,1197-1215).
ggggatcaacctgataata

SEQ ID NO: 600361 - DNA, 19 bp, Mus musculus
  siRNA target sequence for 1300012D20Rik (NM_152811.1,1198-1216).
gggatcaacctgataatat

SEQ ID NO: 600362 - DNA, 19 bp, Mus musculus
  siRNA target sequence for 1300012D20Rik (NM_152811.1,1200-1218).
gatcaacctgataatatta

SEQ ID NO: 600363 - DNA, 19 bp, Mus musculus
  siRNA target sequence for 1300012D20Rik (NM_152811.1,1245-1263).
gttagagtggactttgata

SEQ ID NO: 600364 - DNA, 19 bp, Mus musculus
  siRNA target sequence for 1300012D20Rik (NM_152811.1,1249-1267).
gagtggactttgatacaat

SEQ ID NO: 600365 - DNA, 19 bp, Mus musculus
  siRNA target sequence for 1300012D20Rik (NM_152811.1,1507-1525).
gtgtggtagctgtggtatt

SEQ ID NO: 600366 - DNA, 19 bp, Mus musculus
  siRNA target sequence for 1300012D20Rik (NM_152811.1,1520-1538).
ggtattcatcattgcaaaa

SEQ ID NO: 600367 - DNA, 19 bp, Mus musculus
  siRNA target sequence for 1300012D20Rik (NM_152811.1,1521-1539).
gtattcatcattgcaaaat

SEQ ID NO: 600368 - DNA, 19 bp, Mus musculus
  siRNA target sequence for 1300012D20Rik (NM_152811.1,1555-1573).
gccataagactgctaacat

SEQ ID NO: 600369 - DNA, 19 bp, Mus musculus
  siRNA target sequence for 1300012D20Rik (NM_152811.1,1566-1584).
gctaacatgggaaagaaga

SEQ ID NO: 600370 - DNA, 19 bp, Mus musculus
  siRNA target sequence for 2010321J07Rik (NM_028094.1,96-114).
gtgtggccctgtgatatga

SEQ ID NO: 600371 - DNA, 19 bp, Mus musculus
  siRNA target sequence for 2010321J07Rik (NM_028094.1,113-131).
gagccactggctgaatcta

SEQ ID NO: 600372 - DNA, 19 bp, Mus musculus
  siRNA target sequence for 2010321J07Rik (NM_028094.1,121-139).
ggctgaatctaaagactat

SEQ ID NO: 600373 - DNA, 19 bp, Mus musculus
  siRNA target sequence for 2010321J07Rik (NM_028094.1,125-143).
gaatctaaagactattctt

SEQ ID NO: 600374 - DNA, 19 bp, Mus musculus
  siRNA target sequence for 2010321J07Rik (NM_028094.1,160-178).
gagggcacgaggtaacagt

SEQ ID NO: 600375 - DNA, 19 bp, Mus musculus
  siRNA target sequence for 2010321J07Rik (NM_028094.1,168-186).
gaggtaacagtcctgaaat

SEQ ID NO: 600376 - DNA, 19 bp, Mus musculus
  siRNA target sequence for 2010321J07Rik (NM_028094.1,188-206).
ccccagtatcatcatagat

SEQ ID NO: 600377 - DNA, 19 bp, Mus musculus
  siRNA target sequence for 2010321J07Rik (NM_028094.1,190-208).
ccagtatcatcatagatca

SEQ ID NO: 600378 - DNA, 19 bp, Mus musculus
  siRNA target sequence for 2010321J07Rik (NM_028094.1,197-215).
catcatagatcagagtaaa

SEQ ID NO: 600379 - DNA, 19 bp, Mus musculus
  siRNA target sequence for 2010321J07Rik (NM_028094.1,200-218).
catagatcagagtaaacgt

SEQ ID NO: 600380 - DNA, 19 bp, Mus musculus
  siRNA target sequence for 2010321J07Rik (NM_028094.1,217-235).
gtattccactgcactttga

SEQ ID NO: 600381 - DNA, 19 bp, Mus musculus
  siRNA target sequence for 2010321J07Rik (NM_028094.1,261-279).
gagacagctgagaatcgtt

SEQ ID NO: 600382 - DNA, 19 bp, Mus musculus
  siRNA target sequence for 2010321J07Rik (NM_028094.1,265-283).
cagctgagaatcgtttaaa

SEQ ID NO: 600383 - DNA, 19 bp, Mus musculus
  siRNA target sequence for 2010321J07Rik (NM_028094.1,268-286).
ctgagaatcgtttaaatga

SEQ ID NO: 600384 - DNA, 19 bp, Mus musculus
  siRNA target sequence for 2010321J07Rik (NM_028094.1,270-288).
gagaatcgtttaaatgaga

SEQ ID NO: 600385 - DNA, 19 bp, Mus musculus
  siRNA target sequence for 2010321J07Rik (NM_028094.1,272-290).
gaatcgtttaaatgagatt

SEQ ID NO: 600386 - DNA, 19 bp, Mus musculus
  siRNA target sequence for 2010321J07Rik (NM_028094.1,292-310).
caaatctagctgtgaatgt

SEQ ID NO: 600387 - DNA, 19 bp, Mus musculus
  siRNA target sequence for 2010321J07Rik (NM_028094.1,346-364).
cattacaagacttctttct

SEQ ID NO: 600388 - DNA, 19 bp, Mus musculus
  siRNA target sequence for 2010321J07Rik (NM_028094.1,354-372).
gacttctttcttcaagtaa

SEQ ID NO: 600389 - DNA, 19 bp, Mus musculus
  siRNA target sequence for 2010321J07Rik (NM_028094.1,394-412).
gtaggagtgtattgtacaa

SEQ ID NO: 600390 - DNA, 19 bp, Mus musculus
  siRNA target sequence for 2010321J07Rik (NM_028094.1,431-449).
gctacgggatgcacaatat

SEQ ID NO: 600391 - DNA, 19 bp, Mus musculus
  siRNA target sequence for 2010321J07Rik (NM_028094.1,436-454).
gggatgcacaatatgatgt

SEQ ID NO: 600392 - DNA, 19 bp, Mus musculus
  siRNA target sequence for 2010321J07Rik (NM_028094.1,437-455).
ggatgcacaatatgatgta

SEQ ID NO: 600393 - DNA, 19 bp, Mus musculus
  siRNA target sequence for 2010321J07Rik (NM_028094.1,503-521).
gcttcagatccctttcgta

SEQ ID NO: 600394 - DNA, 19 bp, Mus musculus
  siRNA target sequence for 2010321J07Rik (NM_028094.1,504-522).
cttcagatccctttcgtat

SEQ ID NO: 600395 - DNA, 19 bp, Mus musculus
  siRNA target sequence for 2010321J07Rik (NM_028094.1,507-525).
cagatccctttcgtataca

SEQ ID NO: 600396 - DNA, 19 bp, Mus musculus
  siRNA target sequence for 2010321J07Rik (NM_028094.1,509-527).
gatccctttcgtatacaca

SEQ ID NO: 600397 - DNA, 19 bp, Mus musculus
  siRNA target sequence for 2010321J07Rik (NM_028094.1,544-562).
gctactacatggagaaaca

SEQ ID NO: 600398 - DNA, 19 bp, Mus musculus
  siRNA target sequence for 2010321J07Rik (NM_028094.1,563-581).
ctgtggccagcttccaatt

SEQ ID NO: 600399 - DNA, 19 bp, Mus musculus
  siRNA target sequence for 2010321J07Rik (NM_028094.1,589-607).
cgtatgtaccggttgtcat

SEQ ID NO: 600400 - DNA, 19 bp, Mus musculus
  siRNA target sequence for 2010321J07Rik (NM_028094.1,610-628).
gtgagctgacagacaatat

SEQ ID NO: 600401 - DNA, 19 bp, Mus musculus
  siRNA target sequence for 2010321J07Rik (NM_028094.1,683-701).
gctccagcaatatgacttt

SEQ ID NO: 600402 - DNA, 19 bp, Mus musculus
  siRNA target sequence for 2010321J07Rik (NM_028094.1,741-759).
cccacaacgttctgtaaga

SEQ ID NO: 600403 - DNA, 19 bp, Mus musculus
  siRNA target sequence for 2010321J07Rik (NM_028094.1,1061-1079).
caatactcggctttttaat

SEQ ID NO: 600404 - DNA, 19 bp, Mus musculus
  siRNA target sequence for 2010321J07Rik (NM_028094.1,1141-1159).
gaacaaacgggatttatga

SEQ ID NO: 600405 - DNA, 19 bp, Mus musculus
  siRNA target sequence for 2010321J07Rik (NM_028094.1,1270-1288).
caatgacgagcacagattt

SEQ ID NO: 600406 - DNA, 19 bp, Mus musculus
  siRNA target sequence for 2010321J07Rik (NM_028094.1,1297-1315).
ctgtgagggcagtcattaa

SEQ ID NO: 600407 - DNA, 19 bp, Mus musculus
  siRNA target sequence for 2010321J07Rik (NM_028094.1,1513-1531).
gtgtcgttactctgacatt

SEQ ID NO: 600408 - DNA, 19 bp, Mus musculus
  siRNA target sequence for 2010321J07Rik (NM_028094.1,1515-1533).
gtcgttactctgacattca

SEQ ID NO: 600409 - DNA, 19 bp, Mus musculus
  siRNA target sequence for 2010321J07Rik (NM_028094.1,1518-1536).
gttactctgacattcatca

SEQ ID NO: 600410 - DNA, 19 bp, Mus musculus
  siRNA target sequence for 2010321J07Rik (NM_028094.1,1526-1544).
gacattcatcatcactaaa

SEQ ID NO: 600411 - DNA, 19 bp, Mus musculus
  siRNA target sequence for 2010321J07Rik (NM_028094.1,1532-1550).
catcatcactaaattttgt

SEQ ID NO: 600412 - DNA, 19 bp, Mus musculus
  siRNA target sequence for 2010321J07Rik (NM_028094.1,1553-1571).
gtttgtgtgtcaaaaactt

SEQ ID NO: 600413 - DNA, 19 bp, Mus musculus
  siRNA target sequence for 2010321J07Rik (NM_028094.1,1557-1575).
gtgtgtcaaaaactttata

SEQ ID NO: 600414 - DNA, 19 bp, Mus musculus
  siRNA target sequence for 2410004H05Rik (NM_029626.1,342-360).
cgtaaagtgaacatcatca

SEQ ID NO: 600415 - DNA, 19 bp, Mus musculus
  siRNA target sequence for 2410004H05Rik (NM_029626.1,411-429).
ctcagcttgagcagtttgt

SEQ ID NO: 600416 - DNA, 19 bp, Mus musculus
  siRNA target sequence for 2410004H05Rik (NM_029626.1,415-433).
gcttgagcagtttgttaaa

SEQ ID NO: 600417 - DNA, 19 bp, Mus musculus
  siRNA target sequence for 2410004H05Rik (NM_029626.1,462-480).
gggcttcagcccatagact

SEQ ID NO: 600418 - DNA, 19 bp, Mus musculus
  siRNA target sequence for 2410004H05Rik (NM_029626.1,464-482).
gcttcagcccatagacttt

SEQ ID NO: 600419 - DNA, 19 bp, Mus musculus
  siRNA target sequence for 2410004H05Rik (NM_029626.1,524-542).
ggagattcccgtggttatt

SEQ ID NO: 600420 - DNA, 19 bp, Mus musculus
  siRNA target sequence for 2410004H05Rik (NM_029626.1,527-545).
gattcccgtggttattgct

SEQ ID NO: 600421 - DNA, 19 bp, Mus musculus
  siRNA target sequence for 2410004H05Rik (NM_029626.1,580-598).
ccataaacagcgttcatca

SEQ ID NO: 600422 - DNA, 19 bp, Mus musculus
  siRNA target sequence for 2410004H05Rik (NM_029626.1,695-713).
caggtacaaaattgtaaat

SEQ ID NO: 600423 - DNA, 19 bp, Mus musculus
  siRNA target sequence for 2410004H05Rik (NM_029626.1,697-715).
ggtacaaaattgtaaattt

SEQ ID NO: 600424 - DNA, 19 bp, Mus musculus
  siRNA target sequence for 2410004H05Rik (NM_029626.1,762-780).
ggggagtccatgaaaccat

SEQ ID NO: 600425 - DNA, 19 bp, Mus musculus
  siRNA target sequence for 2410004H05Rik (NM_029626.1,765-783).
gagtccatgaaaccattaa

SEQ ID NO: 600426 - DNA, 19 bp, Mus musculus
  siRNA target sequence for 2410004H05Rik (NM_029626.1,769-787).
ccatgaaaccattaacctt

SEQ ID NO: 600427 - DNA, 19 bp, Mus musculus
  siRNA target sequence for 2410004H05Rik (NM_029626.1,770-788).
catgaaaccattaaccttt

SEQ ID NO: 600428 - DNA, 19 bp, Mus musculus
  siRNA target sequence for 2410004H05Rik (NM_029626.1,784-802).
cctttgcaaggttctactt

SEQ ID NO: 600429 - DNA, 19 bp, Mus musculus
  siRNA target sequence for 2410004H05Rik (NM_029626.1,966-984).
gcagggaaccagtacaatt

SEQ ID NO: 600430 - DNA, 19 bp, Mus musculus
  siRNA target sequence for 2410004H05Rik (NM_029626.1,967-985).
cagggaaccagtacaatta

SEQ ID NO: 600431 - DNA, 19 bp, Mus musculus
  siRNA target sequence for 2410004H05Rik (NM_029626.1,969-987).
gggaaccagtacaattaca

SEQ ID NO: 600432 - DNA, 19 bp, Mus musculus
  siRNA target sequence for 2410004H05Rik (NM_029626.1,971-989).
gaaccagtacaattacatt

SEQ ID NO: 600433 - DNA, 19 bp, Mus musculus
  siRNA target sequence for 2410004H05Rik (NM_029626.1,975-993).
cagtacaattacattggtt

SEQ ID NO: 600434 - DNA, 19 bp, Mus musculus
  siRNA target sequence for 2410004H05Rik (NM_029626.1,1015-1033).
gaattcgtaaactttccat

SEQ ID NO: 600435 - DNA, 19 bp, Mus musculus
  siRNA target sequence for 2410004H05Rik (NM_029626.1,1038-1056).
gccagcacctgttccttta

SEQ ID NO: 600436 - DNA, 19 bp, Mus musculus
  siRNA target sequence for 2410004H05Rik (NM_029626.1,1043-1061).
cacctgttcctttaatcct

SEQ ID NO: 600437 - DNA, 19 bp, Mus musculus
  siRNA target sequence for 2410004H05Rik (NM_029626.1,1071-1089).
gttgcaaacttgactgaat

SEQ ID NO: 600438 - DNA, 19 bp, Mus musculus
  siRNA target sequence for 2410004H05Rik (NM_029626.1,1188-1206).
cctcctctgcttatcgtat

SEQ ID NO: 600439 - DNA, 19 bp, Mus musculus
  siRNA target sequence for 2410004H05Rik (NM_029626.1,1189-1207).
ctcctctgcttatcgtatt

SEQ ID NO: 600440 - DNA, 19 bp, Mus musculus
  siRNA target sequence for 2410004H05Rik (NM_029626.1,1191-1209).
cctctgcttatcgtatttt

SEQ ID NO: 600441 - DNA, 19 bp, Mus musculus
  siRNA target sequence for 2410004H05Rik (NM_029626.1,1192-1210).
ctctgcttatcgtatttta

SEQ ID NO: 600442 - DNA, 19 bp, Mus musculus
  siRNA target sequence for 2410004H05Rik (NM_029626.1,1276-1294).
ggtactcaccccagtttgt

SEQ ID NO: 600443 - DNA, 19 bp, Mus musculus
  siRNA target sequence for 2410004H05Rik (NM_029626.1,1331-1349).
caagccttggggaagaact

SEQ ID NO: 600444 - DNA, 19 bp, Mus musculus
  siRNA target sequence for 2410004H05Rik (NM_029626.1,1340-1358).
gggaagaactgcttcatat

SEQ ID NO: 600445 - DNA, 19 bp, Mus musculus
  siRNA target sequence for 2410004H05Rik (NM_029626.1,1422-1440).
catatggatacctcaaaca

SEQ ID NO: 600446 - DNA, 19 bp, Mus musculus
  siRNA target sequence for 2410004H05Rik (NM_029626.1,1428-1446).
gatacctcaaacataaagt

SEQ ID NO: 600447 - DNA, 19 bp, Mus musculus
  siRNA target sequence for 4931440L10Rik (NM_183292.1,950-968).
gctcctcgagttctctaat

SEQ ID NO: 600448 - DNA, 19 bp, Mus musculus
  siRNA target sequence for 4931440L10Rik (NM_183292.1,951-969).
ctcctcgagttctctaata

SEQ ID NO: 600449 - DNA, 19 bp, Mus musculus
  siRNA target sequence for 4931440L10Rik (NM_183292.1,1083-1101).
ctcctgggccagcaaagtt

SEQ ID NO: 600450 - DNA, 19 bp, Mus musculus
  siRNA target sequence for 4931440L10Rik (NM_183292.1,1085-1103).
cctgggccagcaaagttca

SEQ ID NO: 600451 - DNA, 19 bp, Mus musculus
  siRNA target sequence for 4931440L10Rik (NM_183292.1,1109-1127).
ctgccgaccatttctcttt

SEQ ID NO: 600452 - DNA, 19 bp, Mus musculus
  siRNA target sequence for 4931440L10Rik (NM_183292.1,1111-1129).
gccgaccatttctctttta

SEQ ID NO: 600453 - DNA, 19 bp, Mus musculus
  siRNA target sequence for 4931440L10Rik (NM_183292.1,1114-1132).
gaccatttctcttttacca

SEQ ID NO: 600454 - DNA, 19 bp, Mus musculus
  siRNA target sequence for 4931440L10Rik (NM_183292.1,1136-1154).
gttgactcacctcactttt

SEQ ID NO: 600455 - DNA, 19 bp, Mus musculus
  siRNA target sequence for 4931440L10Rik (NM_183292.1,1165-1183).
ccttaataggccatgaaaa

SEQ ID NO: 600456 - DNA, 19 bp, Mus musculus
  siRNA target sequence for 4931440L10Rik (NM_183292.1,1253-1271).
cccgcaggaggcctatact

SEQ ID NO: 600457 - DNA, 19 bp, Mus musculus
  siRNA target sequence for 4931440L10Rik (NM_183292.1,1255-1273).
cgcaggaggcctatactct

SEQ ID NO: 600458 - DNA, 19 bp, Mus musculus
  siRNA target sequence for 4931440L10Rik (NM_183292.1,1272-1290).
ctggatgagtcgttcttct

SEQ ID NO: 600459 - DNA, 19 bp, Mus musculus
  siRNA target sequence for 4931440L10Rik (NM_183292.1,1283-1301).
gttcttctggtcctacaat

SEQ ID NO: 600460 - DNA, 19 bp, Mus musculus
  siRNA target sequence for 4931440L10Rik (NM_183292.1,1302-1320).
gtcactacagggaactatt

SEQ ID NO: 600461 - DNA, 19 bp, Mus musculus
  siRNA target sequence for 4931440L10Rik (NM_183292.1,1350-1368).
ctcaacagagtgcaagtaa

SEQ ID NO: 600462 - DNA, 19 bp, Mus musculus
  siRNA target sequence for 4931440L10Rik (NM_183292.1,1352-1370).
caacagagtgcaagtaaga

SEQ ID NO: 600463 - DNA, 19 bp, Mus musculus
  siRNA target sequence for 4931440L10Rik (NM_183292.1,1375-1393).
gctccatcacggatggaaa

SEQ ID NO: 600464 - DNA, 19 bp, Mus musculus
  siRNA target sequence for 4931440L10Rik (NM_183292.1,1578-1596).
ctcatgatcaggcatatct

SEQ ID NO: 600465 - DNA, 19 bp, Mus musculus
  siRNA target sequence for 4931440L10Rik (NM_183292.1,1595-1613).
ctacatctggggggaaaat

SEQ ID NO: 600466 - DNA, 19 bp, Mus musculus
  siRNA target sequence for 4933406M09 (NM_173771.2,719-737).
cccacatggctcaaccaaa

SEQ ID NO: 600467 - DNA, 19 bp, Mus musculus
  siRNA target sequence for 4933406M09 (NM_173771.2,723-741).
catggctcaaccaaacagt

SEQ ID NO: 600468 - DNA, 19 bp, Mus musculus
  siRNA target sequence for 4933406M09 (NM_173771.2,844-862).
ctccccctgtggaaaacta

SEQ ID NO: 600469 - DNA, 19 bp, Mus musculus
  siRNA target sequence for 4933406M09 (NM_173771.2,860-878).
ctatattctaggcaaaaaa

SEQ ID NO: 600470 - DNA, 19 bp, Mus musculus
  siRNA target sequence for 4933406M09 (NM_173771.2,928-946).
cctgttgctaggagataat

SEQ ID NO: 600471 - DNA, 19 bp, Mus musculus
  siRNA target sequence for 4933406M09 (NM_173771.2,960-978).
ccaagtttctggctaatgt

SEQ ID NO: 600472 - DNA, 19 bp, Mus musculus
  siRNA target sequence for 4933406M09 (NM_173771.2,1039-1057).
gccgctctccggaaaggtt

SEQ ID NO: 600473 - DNA, 19 bp, Mus musculus
  siRNA target sequence for 4933406M09 (NM_173771.2,1040-1058).
ccgctctccggaaaggttt

SEQ ID NO: 600474 - DNA, 19 bp, Mus musculus
  siRNA target sequence for 4933406M09 (NM_173771.2,1041-1059).
cgctctccggaaaggtttt

SEQ ID NO: 600475 - DNA, 19 bp, Mus musculus
  siRNA target sequence for 4933406M09 (NM_173771.2,1045-1063).
ctccggaaaggttttccat

SEQ ID NO: 600476 - DNA, 19 bp, Mus musculus
  siRNA target sequence for 4933406M09 (NM_173771.2,1050-1068).
gaaaggttttccatactga

SEQ ID NO: 600477 - DNA, 19 bp, Mus musculus
  siRNA target sequence for 4933406M09 (NM_173771.2,1070-1088).
gacctttcccgcttcgttt

SEQ ID NO: 600478 - DNA, 19 bp, Mus musculus
  siRNA target sequence for 4933406M09 (NM_173771.2,1239-1257).
ctgcgaagcgagacaaaga

SEQ ID NO: 600479 - DNA, 19 bp, Mus musculus
  siRNA target sequence for 4933406M09 (NM_173771.2,1241-1259).
gcgaagcgagacaaagact

SEQ ID NO: 600480 - DNA, 19 bp, Mus musculus
  siRNA target sequence for 4933406M09 (NM_173771.2,1242-1260).
cgaagcgagacaaagactt

SEQ ID NO: 600481 - DNA, 19 bp, Mus musculus
  siRNA target sequence for 4933406M09 (NM_173771.2,1258-1276).
cttgggcagaccagacaat

SEQ ID NO: 600482 - DNA, 19 bp, Mus musculus
  siRNA target sequence for 4933406M09 (NM_173771.2,1289-1307).
gtctttacagacatgatct

SEQ ID NO: 600483 - DNA, 19 bp, Mus musculus
  siRNA target sequence for 4933406M09 (NM_173771.2,1303-1321).
gatctcgttttggaataca

SEQ ID NO: 600484 - DNA, 19 bp, Mus musculus
  siRNA target sequence for 4933406M09 (NM_173771.2,1374-1392).
ctctagaaggcaactactt

SEQ ID NO: 600485 - DNA, 19 bp, Mus musculus
  siRNA target sequence for 4933406M09 (NM_173771.2,1390-1408).
cttgctggtggttctagat

SEQ ID NO: 600486 - DNA, 19 bp, Mus musculus
  siRNA target sequence for 4933406M09 (NM_173771.2,1441-1459).
gacaggctctactaagaat

SEQ ID NO: 600487 - DNA, 19 bp, Mus musculus
  siRNA target sequence for 4933406M09 (NM_173771.2,1445-1463).
ggctctactaagaataggt

SEQ ID NO: 600488 - DNA, 19 bp, Mus musculus
  siRNA target sequence for 4933406M09 (NM_173771.2,1446-1464).
gctctactaagaataggtt

SEQ ID NO: 600489 - DNA, 19 bp, Mus musculus
  siRNA target sequence for 4933406M09 (NM_173771.2,1497-1515).
gctacagccccatggaata

SEQ ID NO: 600490 - DNA, 19 bp, Mus musculus
  siRNA target sequence for 4933406M09 (NM_173771.2,1523-1541).
cgctgtgctcattataact

SEQ ID NO: 600491 - DNA, 19 bp, Mus musculus
  siRNA target sequence for 4933406M09 (NM_173771.2,1524-1542).
gctgtgctcattataactt

SEQ ID NO: 600492 - DNA, 19 bp, Mus musculus
  siRNA target sequence for 4933406M09 (NM_173771.2,1565-1583).
cagttggagcagatggtat

SEQ ID NO: 600493 - DNA, 19 bp, Mus musculus
  siRNA target sequence for 4933406M09 (NM_173771.2,1567-1585).
gttggagcagatggtattt

SEQ ID NO: 600494 - DNA, 19 bp, Mus musculus
  siRNA target sequence for 4933406M09 (NM_173771.2,1570-1588).
ggagcagatggtattttat

SEQ ID NO: 600495 - DNA, 19 bp, Mus musculus
  siRNA target sequence for 4933406M09 (NM_173771.2,1576-1594).
gatggtattttatgaagaa

SEQ ID NO: 600496 - DNA, 19 bp, Mus musculus
  siRNA target sequence for 4933406M09 (NM_173771.2,1598-1616).
gctgtgatggagattagtt

SEQ ID NO: 600497 - DNA, 19 bp, Mus musculus
  siRNA target sequence for 4933406M09 (NM_173771.2,1603-1621).
gatggagattagttgtata

SEQ ID NO: 600498 - DNA, 19 bp, Mus musculus
  siRNA target sequence for 4933406M09 (NM_173771.2,1659-1677).
ggatcatgcagatcaaagt

SEQ ID NO: 600499 - DNA, 19 bp, Mus musculus
  siRNA target sequence for 4933434I20Rik (NM_026233.1,63-81).
ccgtcctgctctttggttt

SEQ ID NO: 600500 - DNA, 19 bp, Mus musculus
  siRNA target sequence for 4933434I20Rik (NM_026233.1,109-127).
ccaaaccaataatcaacta

SEQ ID NO: 600501 - DNA, 19 bp, Mus musculus
  siRNA target sequence for 4933434I20Rik (NM_026233.1,135-153).
gcagaaaccacgttttgga

SEQ ID NO: 600502 - DNA, 19 bp, Mus musculus
  siRNA target sequence for 4933434I20Rik (NM_026233.1,142-160).
ccacgttttggagtttaaa

SEQ ID NO: 600503 - DNA, 19 bp, Mus musculus
  siRNA target sequence for 4933434I20Rik (NM_026233.1,161-179).
gaaattatgctccgtttaa

SEQ ID NO: 600504 - DNA, 19 bp, Mus musculus
  siRNA target sequence for 4933434I20Rik (NM_026233.1,208-226).
cctaatgcaagtcttgtat

SEQ ID NO: 600505 - DNA, 19 bp, Mus musculus
  siRNA target sequence for 4933434I20Rik (NM_026233.1,215-233).
caagtcttgtatcaaatga

SEQ ID NO: 600506 - DNA, 19 bp, Mus musculus
  siRNA target sequence for 4933434I20Rik (NM_026233.1,245-263).
gcccacacaacaagatcat

SEQ ID NO: 600507 - DNA, 19 bp, Mus musculus
  siRNA target sequence for 4933434I20Rik (NM_026233.1,283-301).
gaaggggagcatattgagt

SEQ ID NO: 600508 - DNA, 19 bp, Mus musculus
  siRNA target sequence for 4933434I20Rik (NM_026233.1,340-358).
gtacttccttcctcatcta

SEQ ID NO: 600509 - DNA, 19 bp, Mus musculus
  siRNA target sequence for 4933434I20Rik (NM_026233.1,360-378).
ggacagcagggaaacttta

SEQ ID NO: 600510 - DNA, 19 bp, Mus musculus
  siRNA target sequence for 4933434I20Rik (NM_026233.1,370-388).
gaaactttacccagctata

SEQ ID NO: 600511 - DNA, 19 bp, Mus musculus
  siRNA target sequence for 4933434I20Rik (NM_026233.1,402-420).
ggagagcaggcgtttcctt

SEQ ID NO: 600512 - DNA, 19 bp, Mus musculus
  siRNA target sequence for 4933434I20Rik (NM_026233.1,425-443).
ctgggaatctccaccatta

SEQ ID NO: 600513 - DNA, 19 bp, Mus musculus
  siRNA target sequence for 4933434I20Rik (NM_026233.1,455-473).
cacacctacctgaagcaaa

SEQ ID NO: 600514 - DNA, 19 bp, Mus musculus
  siRNA target sequence for 4933434I20Rik (NM_026233.1,495-513).
gaatgactcccgaagaaga

SEQ ID NO: 600515 - DNA, 19 bp, Mus musculus
  siRNA target sequence for 4933434I20Rik (NM_026233.1,532-550).
cgtctctgtcgctgatact

SEQ ID NO: 600516 - DNA, 19 bp, Mus musculus
  siRNA target sequence for 4933434I20Rik (NM_026233.1,539-557).
gtcgctgatactgatgaaa

SEQ ID NO: 600517 - DNA, 19 bp, Mus musculus
  siRNA target sequence for 4933434I20Rik (NM_026233.1,541-559).
cgctgatactgatgaaagt

SEQ ID NO: 600518 - DNA, 19 bp, Mus musculus
  siRNA target sequence for 4933434I20Rik (NM_026233.1,542-560).
gctgatactgatgaaagtt

SEQ ID NO: 600519 - DNA, 19 bp, Mus musculus
  siRNA target sequence for 4933434I20Rik (NM_026233.1,543-561).
ctgatactgatgaaagtta

SEQ ID NO: 600520 - DNA, 19 bp, Mus musculus
  siRNA target sequence for 4933434I20Rik (NM_026233.1,545-563).
gatactgatgaaagttatt

SEQ ID NO: 600521 - DNA, 19 bp, Mus musculus
  siRNA target sequence for 4933434I20Rik (NM_026233.1,570-588).
ctgttgttcgcatggttaa

SEQ ID NO: 600522 - DNA, 19 bp, Mus musculus
  siRNA target sequence for 4933434I20Rik (NM_026233.1,572-590).
gttgttcgcatggttaaaa

SEQ ID NO: 600523 - DNA, 19 bp, Mus musculus
  siRNA target sequence for 4933434I20Rik (NM_026233.1,575-593).
gttcgcatggttaaaacca

SEQ ID NO: 600524 - DNA, 19 bp, Mus musculus
  siRNA target sequence for 4933434I20Rik (NM_026233.1,578-596).
cgcatggttaaaaccaaat

SEQ ID NO: 600525 - DNA, 19 bp, Mus musculus
  siRNA target sequence for 4933434I20Rik (NM_026233.1,579-597).
gcatggttaaaaccaaatt

SEQ ID NO: 600526 - DNA, 19 bp, Mus musculus
  siRNA target sequence for 4933434I20Rik (NM_026233.1,617-635).
ggcgtcttggaggtcattt

SEQ ID NO: 600527 - DNA, 19 bp, Mus musculus
  siRNA target sequence for 4933434I20Rik (NM_026233.1,619-637).
cgtcttggaggtcatttca

SEQ ID NO: 600528 - DNA, 19 bp, Mus musculus
  siRNA target sequence for 4933434I20Rik (NM_026233.1,622-640).
cttggaggtcatttcaata

SEQ ID NO: 600529 - DNA, 19 bp, Mus musculus
  siRNA target sequence for 4933434I20Rik (NM_026233.1,682-700).
gaagacggactcagaaagt

SEQ ID NO: 600530 - DNA, 19 bp, Mus musculus
  siRNA target sequence for 4933434I20Rik (NM_026233.1,713-731).
caagtattggacttctgta

SEQ ID NO: 600531 - DNA, 19 bp, Mus musculus
  siRNA target sequence for 4933434I20Rik (NM_026233.1,749-767).
cagcccaaggccacgtatt

SEQ ID NO: 600532 - DNA, 19 bp, Mus musculus
  siRNA target sequence for 4933434I20Rik (NM_026233.1,751-769).
gcccaaggccacgtattat

SEQ ID NO: 600533 - DNA, 19 bp, Mus musculus
  siRNA target sequence for 4933434I20Rik (NM_026233.1,782-800).
gatgatatcgtagcaaaaa

SEQ ID NO: 600534 - DNA, 19 bp, Mus musculus
  siRNA target sequence for 4933434I20Rik (NM_026233.1,785-803).
gatatcgtagcaaaaaaga

SEQ ID NO: 600535 - DNA, 19 bp, Mus musculus
  siRNA target sequence for 4933434I20Rik (NM_026233.1,790-808).
cgtagcaaaaaagatgtat

SEQ ID NO: 600536 - DNA, 19 bp, Mus musculus
  siRNA target sequence for 4933434I20Rik (NM_026233.1,830-848).
gtaaatagtctcacttcaa

SEQ ID NO: 600537 - DNA, 19 bp, Mus musculus
  siRNA target sequence for 4933434I20Rik (NM_026233.1,907-925).
gaaggacctcactgacttt

SEQ ID NO: 600538 - DNA, 19 bp, Mus musculus
  siRNA target sequence for 4933434I20Rik (NM_026233.1,952-970).
gacaaagcccatagatata

SEQ ID NO: 600539 - DNA, 19 bp, Mus musculus
  siRNA target sequence for 4933434I20Rik (NM_026233.1,958-976).
gcccatagatatactttta

SEQ ID NO: 600540 - DNA, 19 bp, Mus musculus
  siRNA target sequence for 4933434I20Rik (NM_026233.1,1026-1044).
gctgtttgcagcgaaagaa

SEQ ID NO: 600541 - DNA, 19 bp, Mus musculus
  siRNA target sequence for 4933434I20Rik (NM_026233.1,1036-1054).
gcgaaagaagggatttcga

SEQ ID NO: 600542 - DNA, 19 bp, Mus musculus
  siRNA target sequence for 4933434I20Rik (NM_026233.1,1037-1055).
cgaaagaagggatttcgaa

SEQ ID NO: 600543 - DNA, 19 bp, Mus musculus
  siRNA target sequence for 4933434I20Rik (NM_026233.1,1124-1142).
ctcaaggataattattact

SEQ ID NO: 600544 - DNA, 19 bp, Mus musculus
  siRNA target sequence for 9130411I17Rik (NM_026243.2,282-300).
cggtctacagtgtcattct

SEQ ID NO: 600545 - DNA, 19 bp, Mus musculus
  siRNA target sequence for 9130411I17Rik (NM_026243.2,295-313).
cattcttgggggttcttgt

SEQ ID NO: 600546 - DNA, 19 bp, Mus musculus
  siRNA target sequence for 9130411I17Rik (NM_026243.2,324-342).
ctattcatgaacttgtaca

SEQ ID NO: 600547 - DNA, 19 bp, Mus musculus
  siRNA target sequence for 9130411I17Rik (NM_026243.2,329-347).
catgaacttgtacattgaa

SEQ ID NO: 600548 - DNA, 19 bp, Mus musculus
  siRNA target sequence for 9130411I17Rik (NM_026243.2,332-350).
gaacttgtacattgaagat

SEQ ID NO: 600549 - DNA, 19 bp, Mus musculus
  siRNA target sequence for 9130411I17Rik (NM_026243.2,363-381).
gaaggcgacaagcaactta

SEQ ID NO: 600550 - DNA, 19 bp, Mus musculus
  siRNA target sequence for 9130411I17Rik (NM_026243.2,366-384).
ggcgacaagcaacttataa

SEQ ID NO: 600551 - DNA, 19 bp, Mus musculus
  siRNA target sequence for 9130411I17Rik (NM_026243.2,417-435).
cgctatgttcacactttca

SEQ ID NO: 600552 - DNA, 19 bp, Mus musculus
  siRNA target sequence for 9130411I17Rik (NM_026243.2,486-504).
gctgccacacctttacaga

SEQ ID NO: 600553 - DNA, 19 bp, Mus musculus
  siRNA target sequence for 9130411I17Rik (NM_026243.2,496-514).
ctttacagagaaaacgata

SEQ ID NO: 600554 - DNA, 19 bp, Mus musculus
  siRNA target sequence for 9130411I17Rik (NM_026243.2,505-523).
gaaaacgatatctcacaat

SEQ ID NO: 600555 - DNA, 19 bp, Mus musculus
  siRNA target sequence for 9130411I17Rik (NM_026243.2,516-534).
ctcacaattggactttcat

SEQ ID NO: 600556 - DNA, 19 bp, Mus musculus
  siRNA target sequence for 9130411I17Rik (NM_026243.2,518-536).
cacaattggactttcatca

SEQ ID NO: 600557 - DNA, 19 bp, Mus musculus
  siRNA target sequence for 9130411I17Rik (NM_026243.2,532-550).
catcagtgaaacgaaaaaa

SEQ ID NO: 600558 - DNA, 19 bp, Mus musculus
  siRNA target sequence for 9130411I17Rik (NM_026243.2,569-587).
cacaatcaagtcaattttt

SEQ ID NO: 600559 - DNA, 19 bp, Mus musculus
  siRNA target sequence for 9130411I17Rik (NM_026243.2,593-611).
gtccagctatgaagaacta

SEQ ID NO: 600560 - DNA, 19 bp, Mus musculus
  siRNA target sequence for 9130411I17Rik (NM_026243.2,633-651).
catctagcagacttcaatt

SEQ ID NO: 600561 - DNA, 19 bp, Mus musculus
  siRNA target sequence for 9130411I17Rik (NM_026243.2,636-654).
ctagcagacttcaattcat

SEQ ID NO: 600562 - DNA, 19 bp, Mus musculus
  siRNA target sequence for 9130411I17Rik (NM_026243.2,639-657).
gcagacttcaattcatcat

SEQ ID NO: 600563 - DNA, 19 bp, Mus musculus
  siRNA target sequence for 9130411I17Rik (NM_026243.2,815-833).
caagcaaaacgtagattat

SEQ ID NO: 600564 - DNA, 19 bp, Mus musculus
  siRNA target sequence for 9130411I17Rik (NM_026243.2,856-874).
ccaatacttctgactatta

SEQ ID NO: 600565 - DNA, 19 bp, Mus musculus
  siRNA target sequence for 9130411I17Rik (NM_026243.2,894-912).
gttcggtgttccagaaatt

SEQ ID NO: 600566 - DNA, 19 bp, Mus musculus
  siRNA target sequence for 9130411I17Rik (NM_026243.2,897-915).
cggtgttccagaaatttct

SEQ ID NO: 600567 - DNA, 19 bp, Mus musculus
  siRNA target sequence for 9130411I17Rik (NM_026243.2,963-981).
gtaactcttgagttctcta

SEQ ID NO: 600568 - DNA, 19 bp, Mus musculus
  siRNA target sequence for 9130411I17Rik (NM_026243.2,977-995).
ctctaaacttggctacatt

SEQ ID NO: 600569 - DNA, 19 bp, Mus musculus
  siRNA target sequence for 9130411I17Rik (NM_026243.2,988-1006).
gctacattggtaaactcta

SEQ ID NO: 600570 - DNA, 19 bp, Mus musculus
  siRNA target sequence for 9130411I17Rik (NM_026243.2,989-1007).
ctacattggtaaactctat

SEQ ID NO: 600571 - DNA, 19 bp, Mus musculus
  siRNA target sequence for 9130411I17Rik (NM_026243.2,992-1010).
cattggtaaactctatcat

SEQ ID NO: 600572 - DNA, 19 bp, Mus musculus
  siRNA target sequence for 9130411I17Rik (NM_026243.2,997-1015).
gtaaactctatcattctca

SEQ ID NO: 600573 - DNA, 19 bp, Mus musculus
  siRNA target sequence for 9130411I17Rik (NM_026243.2,1026-1044).
cgtctggcccatttcttat

SEQ ID NO: 600574 - DNA, 19 bp, Mus musculus
  siRNA target sequence for 9130411I17Rik (NM_026243.2,1065-1083).
ccctgcgattggctattga

SEQ ID NO: 600575 - DNA, 19 bp, Mus musculus
  siRNA target sequence for 9130411I17Rik (NM_026243.2,1067-1085).
ctgcgattggctattgact

SEQ ID NO: 600576 - DNA, 19 bp, Mus musculus
  siRNA target sequence for 9130411I17Rik (NM_026243.2,1071-1089).
gattggctattgactcatt

SEQ ID NO: 600577 - DNA, 19 bp, Mus musculus
  siRNA target sequence for 9130411I17Rik (NM_026243.2,1107-1125).
cagaaaaatgtgattcgat

SEQ ID NO: 600578 - DNA, 19 bp, Mus musculus
  siRNA target sequence for 9130411I17Rik (NM_026243.2,1143-1161).
cagcacatggggtattatt

SEQ ID NO: 600579 - DNA, 19 bp, Mus musculus
  siRNA target sequence for 9130411I17Rik (NM_026243.2,1146-1164).
cacatggggtattattcat

SEQ ID NO: 600580 - DNA, 19 bp, Mus musculus
  siRNA target sequence for 9130411I17Rik (NM_026243.2,1151-1169).
ggggtattattcatcctat

SEQ ID NO: 600581 - DNA, 19 bp, Mus musculus
  siRNA target sequence for 9130411I17Rik (NM_026243.2,1152-1170).
gggtattattcatcctata

SEQ ID NO: 600582 - DNA, 19 bp, Mus musculus
  siRNA target sequence for 9130411I17Rik (NM_026243.2,1153-1171).
ggtattattcatcctataa

SEQ ID NO: 600583 - DNA, 19 bp, Mus musculus
  siRNA target sequence for 9130411I17Rik (NM_026243.2,1236-1254).
cccccagcgagtttctaca

SEQ ID NO: 600584 - DNA, 19 bp, Mus musculus
  siRNA target sequence for 9130411I17Rik (NM_026243.2,1284-1302).
gcaagcaaggcttacagta

SEQ ID NO: 600585 - DNA, 19 bp, Mus musculus
  siRNA target sequence for 9130411I17Rik (NM_026243.2,1289-1307).
caaggcttacagtagtgtt

SEQ ID NO: 600586 - DNA, 19 bp, Mus musculus
  siRNA target sequence for 9130411I17Rik (NM_026243.2,1333-1351).
cttcaatgggagatacgtt

SEQ ID NO: 600587 - DNA, 19 bp, Mus musculus
  siRNA target sequence for 9130411I17Rik (NM_026243.2,1340-1358).
gggagatacgttcgttatt

SEQ ID NO: 600588 - DNA, 19 bp, Mus musculus
  siRNA target sequence for 9130411I17Rik (NM_026243.2,1342-1360).
gagatacgttcgttattgt

SEQ ID NO: 600589 - DNA, 19 bp, Mus musculus
  siRNA target sequence for 9130411I17Rik (NM_026243.2,1348-1366).
cgttcgttattgtatttga

SEQ ID NO: 600590 - DNA, 19 bp, Mus musculus
  siRNA target sequence for 9130411I17Rik (NM_026243.2,1349-1367).
gttcgttattgtatttgaa

SEQ ID NO: 600591 - DNA, 19 bp, Mus musculus
  siRNA target sequence for 9130411I17Rik (NM_026243.2,1365-1383).
gaaaatccgattacaatta

SEQ ID NO: 600592 - DNA, 19 bp, Mus musculus
  siRNA target sequence for 9130411I17Rik (NM_026243.2,1372-1390).
cgattacaattaaaaaaat

SEQ ID NO: 600593 - DNA, 19 bp, Mus musculus
  siRNA target sequence for 9130411I17Rik (NM_026243.2,1417-1435).
ggcagaatgacatcttaca

SEQ ID NO: 600594 - DNA, 19 bp, Mus musculus
  siRNA target sequence for 9130411I17Rik (NM_026243.2,1458-1476).
gaaaaacttatttttagca

SEQ ID NO: 600595 - DNA, 19 bp, Mus musculus
  siRNA target sequence for 9130411I17Rik (NM_026243.2,1486-1504).
gacaatgtgatacttactt

SEQ ID NO: 600596 - DNA, 19 bp, Mus musculus
  siRNA target sequence for 9130411I17Rik (NM_026243.2,1507-1525).
gactaggggaattcaaaaa

SEQ ID NO: 600597 - DNA, 19 bp, Mus musculus
  siRNA target sequence for 9130411I17Rik (NM_026243.2,1543-1561).
cagatgtgaatcaaaaaat

SEQ ID NO: 600598 - DNA, 19 bp, Mus musculus
  siRNA target sequence for 9130411I17Rik (NM_026243.2,1586-1604).
gatatgtgttaccaaaaca

SEQ ID NO: 600599 - DNA, 19 bp, Mus musculus
  siRNA target sequence for 9430041C03Rik (NM_133894.1,1531-1549).
gtgttgcagtcactatagt

SEQ ID NO: 600600 - DNA, 19 bp, Mus musculus
  siRNA target sequence for AI313915 (NM_144845.1,177-195).
gtgcaagccattatatagt

SEQ ID NO: 600601 - DNA, 19 bp, Mus musculus
  siRNA target sequence for AI313915 (NM_144845.1,180-198).
caagccattatatagtgat

SEQ ID NO: 600602 - DNA, 19 bp, Mus musculus
  siRNA target sequence for AI313915 (NM_144845.1,224-242).
gaaggtggccacaatgtga

SEQ ID NO: 600603 - DNA, 19 bp, Mus musculus
  siRNA target sequence for AI313915 (NM_144845.1,232-250).
ccacaatgtgaccaaactt

SEQ ID NO: 600604 - DNA, 19 bp, Mus musculus
  siRNA target sequence for AI313915 (NM_144845.1,235-253).
caatgtgaccaaacttctt

SEQ ID NO: 600605 - DNA, 19 bp, Mus musculus
  siRNA target sequence for AI313915 (NM_144845.1,251-269).
ctttatgaaagtgctaata

SEQ ID NO: 600606 - DNA, 19 bp, Mus musculus
  siRNA target sequence for AI313915 (NM_144845.1,293-311).
ccatcatatcaagttatta

SEQ ID NO: 600607 - DNA, 19 bp, Mus musculus
  siRNA target sequence for AI313915 (NM_144845.1,362-380).
cgacttacagaagaaataa

SEQ ID NO: 600608 - DNA, 19 bp, Mus musculus
  siRNA target sequence for AI313915 (NM_144845.1,727-745).
ggaaatcctttctcagtat

SEQ ID NO: 600609 - DNA, 19 bp, Mus musculus
  siRNA target sequence for AI313915 (NM_144845.1,750-768).
gcactatccaggagcattt

SEQ ID NO: 600610 - DNA, 19 bp, Mus musculus
  siRNA target sequence for AI788959 (NM_153598.1,124-142).
gccattggctcaacttgaa

SEQ ID NO: 600611 - DNA, 19 bp, Mus musculus
  siRNA target sequence for AI788959 (NM_153598.1,126-144).
cattggctcaacttgaaga

SEQ ID NO: 600612 - DNA, 19 bp, Mus musculus
  siRNA target sequence for AI788959 (NM_153598.1,130-148).
ggctcaacttgaagacaat

SEQ ID NO: 600613 - DNA, 19 bp, Mus musculus
  siRNA target sequence for AI788959 (NM_153598.1,134-152).
caacttgaagacaatccta

SEQ ID NO: 600614 - DNA, 19 bp, Mus musculus
  siRNA target sequence for AI788959 (NM_153598.1,229-247).
catctgctattgaattcga

SEQ ID NO: 600615 - DNA, 19 bp, Mus musculus
  siRNA target sequence for AI788959 (NM_153598.1,235-253).
ctattgaattcgagactta

SEQ ID NO: 600616 - DNA, 19 bp, Mus musculus
  siRNA target sequence for AI788959 (NM_153598.1,240-258).
gaattcgagacttatccta

SEQ ID NO: 600617 - DNA, 19 bp, Mus musculus
  siRNA target sequence for AI788959 (NM_153598.1,245-263).
cgagacttatcctacatca

SEQ ID NO: 600618 - DNA, 19 bp, Mus musculus
  siRNA target sequence for AI788959 (NM_153598.1,246-264).
gagacttatcctacatcat

SEQ ID NO: 600619 - DNA, 19 bp, Mus musculus
  siRNA target sequence for AI788959 (NM_153598.1,255-273).
cctacatcatactccttat

SEQ ID NO: 600620 - DNA, 19 bp, Mus musculus
  siRNA target sequence for AI788959 (NM_153598.1,343-361).
ggggatacttcttaatgtt

SEQ ID NO: 600621 - DNA, 19 bp, Mus musculus
  siRNA target sequence for AI788959 (NM_153598.1,366-384).
gaaatggtttgggtagatt

SEQ ID NO: 600622 - DNA, 19 bp, Mus musculus
  siRNA target sequence for AI788959 (NM_153598.1,376-394).
gggtagattcaaaatattt

SEQ ID NO: 600623 - DNA, 19 bp, Mus musculus
  siRNA target sequence for AI788959 (NM_153598.1,470-488).
cctggcagatcccttcata

SEQ ID NO: 600624 - DNA, 19 bp, Mus musculus
  siRNA target sequence for AI788959 (NM_153598.1,609-627).
cctgttgttatgtcagaat

SEQ ID NO: 600625 - DNA, 19 bp, Mus musculus
  siRNA target sequence for AI788959 (NM_153598.1,612-630).
gttgttatgtcagaattga

SEQ ID NO: 600626 - DNA, 19 bp, Mus musculus
  siRNA target sequence for AI788959 (NM_153598.1,631-649).
gtgacaggatgactttcat

SEQ ID NO: 600627 - DNA, 19 bp, Mus musculus
  siRNA target sequence for AI788959 (NM_153598.1,716-734).
gaactggaatcagctttat

SEQ ID NO: 600628 - DNA, 19 bp, Mus musculus
  siRNA target sequence for AI788959 (NM_153598.1,721-739).
ggaatcagctttatactga

SEQ ID NO: 600629 - DNA, 19 bp, Mus musculus
  siRNA target sequence for AI788959 (NM_153598.1,722-740).
gaatcagctttatactgaa

SEQ ID NO: 600630 - DNA, 19 bp, Mus musculus
  siRNA target sequence for AI788959 (NM_153598.1,757-775).
cgacactctcagagactat

SEQ ID NO: 600631 - DNA, 19 bp, Mus musculus
  siRNA target sequence for AI788959 (NM_153598.1,802-820).
ggacctactgggatttaga

SEQ ID NO: 600632 - DNA, 19 bp, Mus musculus
  siRNA target sequence for AI788959 (NM_153598.1,803-821).
gacctactgggatttagaa

SEQ ID NO: 600633 - DNA, 19 bp, Mus musculus
  siRNA target sequence for AI788959 (NM_153598.1,825-843).
cctcatcctgtcttaccaa

SEQ ID NO: 600634 - DNA, 19 bp, Mus musculus
  siRNA target sequence for AI788959 (NM_153598.1,828-846).
catcctgtcttaccaaatt

SEQ ID NO: 600635 - DNA, 19 bp, Mus musculus
  siRNA target sequence for AI788959 (NM_153598.1,834-852).
gtcttaccaaattttgatt

SEQ ID NO: 600636 - DNA, 19 bp, Mus musculus
  siRNA target sequence for AI788959 (NM_153598.1,914-932).
ccagtcatctggagaacat

SEQ ID NO: 600637 - DNA, 19 bp, Mus musculus
  siRNA target sequence for AI788959 (NM_153598.1,962-980).
ggtgggtagcataacagaa

SEQ ID NO: 600638 - DNA, 19 bp, Mus musculus
  siRNA target sequence for AI788959 (NM_153598.1,965-983).
gggtagcataacagaagaa

SEQ ID NO: 600639 - DNA, 19 bp, Mus musculus
  siRNA target sequence for AI788959 (NM_153598.1,966-984).
ggtagcataacagaagaaa

SEQ ID NO: 600640 - DNA, 19 bp, Mus musculus
  siRNA target sequence for AI788959 (NM_153598.1,1073-1091).
caacactcgtctgtacaaa

SEQ ID NO: 600641 - DNA, 19 bp, Mus musculus
  siRNA target sequence for AI788959 (NM_153598.1,1113-1131).
ctaggtcattccaaaacca

SEQ ID NO: 600642 - DNA, 19 bp, Mus musculus
  siRNA target sequence for AI788959 (NM_153598.1,1263-1281).
gttagactggactttctca

SEQ ID NO: 600643 - DNA, 19 bp, Mus musculus
  siRNA target sequence for AI788959 (NM_153598.1,1280-1298).
cacaatgtctagtacagat

SEQ ID NO: 600644 - DNA, 19 bp, Mus musculus
  siRNA target sequence for AI788959 (NM_153598.1,1536-1554).
gtgatgttcatcctcaaaa

SEQ ID NO: 600645 - DNA, 19 bp, Mus musculus
  siRNA target sequence for C730031G17 (NM_172881.1,366-384).
cttcaaacactgtttggta

SEQ ID NO: 600646 - DNA, 19 bp, Mus musculus
  siRNA target sequence for C730031G17 (NM_172881.1,377-395).
gtttggtaaattatctgat

SEQ ID NO: 600647 - DNA, 19 bp, Mus musculus
  siRNA target sequence for C730031G17 (NM_172881.1,464-482).
gtttgatgtccttatttta

SEQ ID NO: 600648 - DNA, 19 bp, Mus musculus
  siRNA target sequence for C730031G17 (NM_172881.1,578-596).
gaacagtggaggatttgta

SEQ ID NO: 600649 - DNA, 19 bp, Mus musculus
  siRNA target sequence for C730031G17 (NM_172881.1,662-680).
ggtcaaaaatatgatatgt

SEQ ID NO: 600650 - DNA, 19 bp, Mus musculus
  siRNA target sequence for C730031G17 (NM_172881.1,700-718).
ggttccagacatttacaga

SEQ ID NO: 600651 - DNA, 19 bp, Mus musculus
  siRNA target sequence for C730031G17 (NM_172881.1,987-1005).
gaaagggccaacgcaattt

SEQ ID NO: 600652 - DNA, 19 bp, Mus musculus
  siRNA target sequence for C730031G17 (NM_172881.1,1055-1073).
caaaaccccagcttcctta

SEQ ID NO: 600653 - DNA, 19 bp, Mus musculus
  siRNA target sequence for C730031G17 (NM_172881.1,1315-1333).
cactggaagaagtaattaa

SEQ ID NO: 600654 - DNA, 19 bp, Mus musculus
  siRNA target sequence for C730031G17 (NM_172881.1,1317-1335).
ctggaagaagtaattaata

SEQ ID NO: 600655 - DNA, 19 bp, Mus musculus
  siRNA target sequence for C730031G17 (NM_172881.1,1319-1337).
ggaagaagtaattaataat

SEQ ID NO: 600656 - DNA, 19 bp, Mus musculus
  siRNA target sequence for C730031G17 (NM_172881.1,1323-1341).
gaagtaattaataatcctt

SEQ ID NO: 600657 - DNA, 19 bp, Mus musculus
  siRNA target sequence for C730031G17 (NM_172881.1,1398-1416).
ccactgaacaggactatat

SEQ ID NO: 600658 - DNA, 19 bp, Mus musculus
  siRNA target sequence for C730031G17 (NM_172881.1,1406-1424).
caggactatattttggatt

SEQ ID NO: 600659 - DNA, 19 bp, Mus musculus
  siRNA target sequence for C730031G17 (NM_172881.1,1545-1563).
gcagtccttcctgtaaagt

SEQ ID NO: 600660 - DNA, 19 bp, Mus musculus
  siRNA target sequence for Fgs (NM_139197.1,101-119).
cctacataccctattacct

SEQ ID NO: 600661 - DNA, 19 bp, Mus musculus
  siRNA target sequence for Fgs (NM_139197.1,267-285).
cgtctccgagggaaccttt

SEQ ID NO: 600662 - DNA, 19 bp, Mus musculus
  siRNA target sequence for Fgs (NM_139197.1,413-431).
gtgggtaccaagtacacta

SEQ ID NO: 600663 - DNA, 19 bp, Mus musculus
  siRNA target sequence for Fgs (NM_139197.1,415-433).
gggtaccaagtacactatt

SEQ ID NO: 600664 - DNA, 19 bp, Mus musculus
  siRNA target sequence for Fgs (NM_139197.1,424-442).
gtacactattacctcttta

SEQ ID NO: 600665 - DNA, 19 bp, Mus musculus
  siRNA target sequence for Fgs (NM_139197.1,677-695).
ccattcacccaggctattt

SEQ ID NO: 600666 - DNA, 19 bp, Mus musculus
  siRNA target sequence for Fgs (NM_139197.1,678-696).
cattcacccaggctatttt

SEQ ID NO: 600667 - DNA, 19 bp, Mus musculus
  siRNA target sequence for Fgs (NM_139197.1,698-716).
ctgtacctcgccggaaatt

SEQ ID NO: 600668 - DNA, 19 bp, Mus musculus
  siRNA target sequence for Fgs (NM_139197.1,707-725).
gccggaaattcccttatga

SEQ ID NO: 600669 - DNA, 19 bp, Mus musculus
  siRNA target sequence for Fgs (NM_139197.1,708-726).
ccggaaattcccttatgaa

SEQ ID NO: 600670 - DNA, 19 bp, Mus musculus
  siRNA target sequence for Fgs (NM_139197.1,807-825).
ggccagagtgtatgagttt

SEQ ID NO: 600671 - DNA, 19 bp, Mus musculus
  siRNA target sequence for Fgs (NM_139197.1,808-826).
gccagagtgtatgagttta

SEQ ID NO: 600672 - DNA, 19 bp, Mus musculus
  siRNA target sequence for Fgs (NM_139197.1,843-861).
ggccattctggcagacaaa

SEQ ID NO: 600673 - DNA, 19 bp, Mus musculus
  siRNA target sequence for Fgs (NM_139197.1,949-967).
gagtacctctgggatgaaa

SEQ ID NO: 600674 - DNA, 19 bp, Mus musculus
  siRNA target sequence for Fgs (NM_139197.1,986-1004).
gcctgaagatgattcgatt

SEQ ID NO: 600675 - DNA, 19 bp, Mus musculus
  siRNA target sequence for Gyltl1b (NM_172670.1,271-289).
cacccaagtgcgaggaaaa

SEQ ID NO: 600676 - DNA, 19 bp, Mus musculus
  siRNA target sequence for Gyltl1b (NM_172670.1,273-291).
cccaagtgcgaggaaaaat

SEQ ID NO: 600677 - DNA, 19 bp, Mus musculus
  siRNA target sequence for Gyltl1b (NM_172670.1,300-318).
cctccacctgataactgat

SEQ ID NO: 600678 - DNA, 19 bp, Mus musculus
  siRNA target sequence for Gyltl1b (NM_172670.1,316-334).
gatgccgtagccagaaaca

SEQ ID NO: 600679 - DNA, 19 bp, Mus musculus
  siRNA target sequence for Gyltl1b (NM_172670.1,375-393).
ggtggtcagcttctatgat

SEQ ID NO: 600680 - DNA, 19 bp, Mus musculus
  siRNA target sequence for Gyltl1b (NM_172670.1,446-464).
gcctctatgggctaatgaa

SEQ ID NO: 600681 - DNA, 19 bp, Mus musculus
  siRNA target sequence for Gyltl1b (NM_172670.1,455-473).
ggctaatgaagctagtact

SEQ ID NO: 600682 - DNA, 19 bp, Mus musculus
  siRNA target sequence for Gyltl1b (NM_172670.1,456-474).
gctaatgaagctagtactt

SEQ ID NO: 600683 - DNA, 19 bp, Mus musculus
  siRNA target sequence for Gyltl1b (NM_172670.1,517-535).
gataccgacgtcactttct

SEQ ID NO: 600684 - DNA, 19 bp, Mus musculus
  siRNA target sequence for Gyltl1b (NM_172670.1,528-546).
cactttctcctctgacatt

SEQ ID NO: 600685 - DNA, 19 bp, Mus musculus
  siRNA target sequence for Gyltl1b (NM_172670.1,552-570).
gctctgggcactctttgat

SEQ ID NO: 600686 - DNA, 19 bp, Mus musculus
  siRNA target sequence for Gyltl1b (NM_172670.1,555-573).
ctgggcactctttgatcat

SEQ ID NO: 600687 - DNA, 19 bp, Mus musculus
  siRNA target sequence for Gyltl1b (NM_172670.1,661-679).
gccttgggcaggggattta

SEQ ID NO: 600688 - DNA, 19 bp, Mus musculus
  siRNA target sequence for Gyltl1b (NM_172670.1,662-680).
ccttgggcaggggatttaa

SEQ ID NO: 600689 - DNA, 19 bp, Mus musculus
  siRNA target sequence for Gyltl1b (NM_172670.1,666-684).
gggcaggggatttaacaca

SEQ ID NO: 600690 - DNA, 19 bp, Mus musculus
  siRNA target sequence for Gyltl1b (NM_172670.1,911-929).
cagctgacctcaaagtgat

SEQ ID NO: 600691 - DNA, 19 bp, Mus musculus
  siRNA target sequence for Gyltl1b (NM_172670.1,974-992).
cagaattcttccgtaatct

SEQ ID NO: 600692 - DNA, 19 bp, Mus musculus
  siRNA target sequence for Gyltl1b (NM_172670.1,999-1017).
gacctttctggggtatgat

SEQ ID NO: 600693 - DNA, 19 bp, Mus musculus
  siRNA target sequence for Gyltl1b (NM_172670.1,1346-1364).
cgtcgccagtgctctctat

SEQ ID NO: 600694 - DNA, 19 bp, Mus musculus
  siRNA target sequence for Gyltl1b (NM_172670.1,1395-1413).
ccgggacggtccactctat

SEQ ID NO: 600695 - DNA, 19 bp, Mus musculus
  siRNA target sequence for Gyltl1b (NM_172670.1,1464-1482).
cgtcttcctcagtgatatt

SEQ ID NO: 600696 - DNA, 19 bp, Mus musculus
  siRNA target sequence for Gyltl1b (NM_172670.1,1473-1491).
cagtgatattgacttctta

SEQ ID NO: 600697 - DNA, 19 bp, Mus musculus
  siRNA target sequence for Gyltl1b (NM_172670.1,1580-1598).
catttgagaccctacacta

SEQ ID NO: 600698 - DNA, 19 bp, Mus musculus
  siRNA target sequence for Gyltl1b (NM_172670.1,1693-1711).
cactcatccacagactatt

SEQ ID NO: 600699 - DNA, 19 bp, Mus musculus
  siRNA target sequence for Gyltl1b (NM_172670.1,1746-1764).
gcagtggtcagctgactat

SEQ ID NO: 600700 - DNA, 19 bp, Mus musculus
  siRNA target sequence for Gyltl1b (NM_172670.1,1833-1851).
caaggtggcccacatcata

SEQ ID NO: 600701 - DNA, 19 bp, Mus musculus
  siRNA target sequence for Gyltl1b (NM_172670.1,1862-1880).
ctcaggaatatgaattcct

SEQ ID NO: 600702 - DNA, 19 bp, Mus musculus
  siRNA target sequence for Large (NM_010687.1,238-256).
cagccatcacctggattta

SEQ ID NO: 600703 - DNA, 19 bp, Mus musculus
  siRNA target sequence for Large (NM_010687.1,260-278).
gtttgctgggagctttgaa

SEQ ID NO: 600704 - DNA, 19 bp, Mus musculus
  siRNA target sequence for Large (NM_010687.1,558-576).
cagccagctgtggaaaagt

SEQ ID NO: 600705 - DNA, 19 bp, Mus musculus
  siRNA target sequence for Large (NM_010687.1,560-578).
gccagctgtggaaaagtgt

SEQ ID NO: 600706 - DNA, 19 bp, Mus musculus
  siRNA target sequence for Large (NM_010687.1,599-617).
cgtctgtgccggatacaat

SEQ ID NO: 600707 - DNA, 19 bp, Mus musculus
  siRNA target sequence for Large (NM_010687.1,630-648).
gttgtcaccctggtgaaat

SEQ ID NO: 600708 - DNA, 19 bp, Mus musculus
  siRNA target sequence for Large (NM_010687.1,748-766).
ctgcagtgcgagtagactt

SEQ ID NO: 600709 - DNA, 19 bp, Mus musculus
  siRNA target sequence for Large (NM_010687.1,751-769).
cagtgcgagtagacttcta

SEQ ID NO: 600710 - DNA, 19 bp, Mus musculus
  siRNA target sequence for Large (NM_010687.1,845-863).
gctggttctgaccaaaact

SEQ ID NO: 600711 - DNA, 19 bp, Mus musculus
  siRNA target sequence for Large (NM_010687.1,872-890).
caacctggagagagtcatt

SEQ ID NO: 600712 - DNA, 19 bp, Mus musculus
  siRNA target sequence for Large (NM_010687.1,933-951).
ctgtgggccgtgttccata

SEQ ID NO: 600713 - DNA, 19 bp, Mus musculus
  siRNA target sequence for Large (NM_010687.1,940-958).
ccgtgttccataagttcaa

SEQ ID NO: 600714 - DNA, 19 bp, Mus musculus
  siRNA target sequence for Large (NM_010687.1,1285-1303).
gagatgtgtctgatttaaa

SEQ ID NO: 600715 - DNA, 19 bp, Mus musculus
  siRNA target sequence for Large (NM_010687.1,1334-1352).
ccgtgtgaagaacaaacat

SEQ ID NO: 600716 - DNA, 19 bp, Mus musculus
  siRNA target sequence for Large (NM_010687.1,1379-1397).
gaccttcttggagtatgat

SEQ ID NO: 600717 - DNA, 19 bp, Mus musculus
  siRNA target sequence for Large (NM_010687.1,1491-1509).
gatgacttgtgctatgagt

SEQ ID NO: 600718 - DNA, 19 bp, Mus musculus
  siRNA target sequence for Large (NM_010687.1,1762-1780).
gctaccacatcgtgtacaa

SEQ ID NO: 600719 - DNA, 19 bp, Mus musculus
  siRNA target sequence for Large (NM_010687.1,1838-1856).
cacaccctacatgttctta

SEQ ID NO: 600720 - DNA, 19 bp, Mus musculus
  siRNA target sequence for Large (NM_010687.1,1876-1894).
ctatgtatgggctctatga

SEQ ID NO: 600721 - DNA, 19 bp, Mus musculus
  siRNA target sequence for Large (NM_010687.1,1925-1943).
ccttgccaataccaagaaa

SEQ ID NO: 600722 - DNA, 19 bp, Mus musculus
  siRNA target sequence for Large (NM_010687.1,2031-2049).
gggaccctattcacattca

SEQ ID NO: 600723 - DNA, 19 bp, Mus musculus
  siRNA target sequence for Large (NM_010687.1,2051-2069).
gtatcacgtatggactaaa

SEQ ID NO: 600724 - DNA, 19 bp, Mus musculus
  siRNA target sequence for Large (NM_010687.1,2072-2090).
ccatgcacccacaaacttt

SEQ ID NO: 600725 - DNA, 19 bp, Mus musculus
  siRNA target sequence for Large (NM_010687.1,2301-2319).
cctagtttcgacatcacta

SEQ ID NO: 600726 - DNA, 19 bp, Mus musculus
  siRNA target sequence for Large (NM_010687.1,2305-2323).
gtttcgacatcactaagtt

SEQ ID NO: 600727 - DNA, 19 bp, Mus musculus
  siRNA target sequence for Large (NM_010687.1,2400-2418).
ggctttgctgccttgaaat

SEQ ID NO: 600728 - DNA, 19 bp, Mus musculus
  siRNA target sequence for Mgat4a (NM_173870.1,24-42).
ggccactgcgctggtattt

SEQ ID NO: 600729 - DNA, 19 bp, Mus musculus
  siRNA target sequence for Mgat4a (NM_173870.1,55-73).
cttaccctatcctggtata

SEQ ID NO: 600730 - DNA, 19 bp, Mus musculus
  siRNA target sequence for Mgat4a (NM_173870.1,69-87).
gtataccacgtggcaaaat

SEQ ID NO: 600731 - DNA, 19 bp, Mus musculus
  siRNA target sequence for Mgat4a (NM_173870.1,107-125).
cttatcaacgagaattcct

SEQ ID NO: 600732 - DNA, 19 bp, Mus musculus
  siRNA target sequence for Mgat4a (NM_173870.1,116-134).
gagaattccttgctctaaa

SEQ ID NO: 600733 - DNA, 19 bp, Mus musculus
  siRNA target sequence for Mgat4a (NM_173870.1,148-166).
gtggccgagcataggatat

SEQ ID NO: 600734 - DNA, 19 bp, Mus musculus
  siRNA target sequence for Mgat4a (NM_173870.1,150-168).
ggccgagcataggatatct

SEQ ID NO: 600735 - DNA, 19 bp, Mus musculus
  siRNA target sequence for Mgat4a (NM_173870.1,152-170).
ccgagcataggatatctca

SEQ ID NO: 600736 - DNA, 19 bp, Mus musculus
  siRNA target sequence for Mgat4a (NM_173870.1,172-190).
cgctcctcggagctaaaca

SEQ ID NO: 600737 - DNA, 19 bp, Mus musculus
  siRNA target sequence for Mgat4a (NM_173870.1,223-241).
gagactaatggaagtaaga

SEQ ID NO: 600738 - DNA, 19 bp, Mus musculus
  siRNA target sequence for Mgat4a (NM_173870.1,225-243).
gactaatggaagtaagaca

SEQ ID NO: 600739 - DNA, 19 bp, Mus musculus
  siRNA target sequence for Mgat4a (NM_173870.1,247-265).
ctgagtacaatctcagata

SEQ ID NO: 600740 - DNA, 19 bp, Mus musculus
  siRNA target sequence for Mgat4a (NM_173870.1,254-272).
caatctcagataataccat

SEQ ID NO: 600741 - DNA, 19 bp, Mus musculus
  siRNA target sequence for Mgat4a (NM_173870.1,286-304).
gagttgacaagcaaaaaat

SEQ ID NO: 600742 - DNA, 19 bp, Mus musculus
  siRNA target sequence for Mgat4a (NM_173870.1,305-323).
cacttcgagtgccaagtat

SEQ ID NO: 600743 - DNA, 19 bp, Mus musculus
  siRNA target sequence for Mgat4a (NM_173870.1,307-325).
cttcgagtgccaagtattt

SEQ ID NO: 600744 - DNA, 19 bp, Mus musculus
  siRNA target sequence for Mgat4a (NM_173870.1,311-329).
gagtgccaagtatttatta

SEQ ID NO: 600745 - DNA, 19 bp, Mus musculus
  siRNA target sequence for Mgat4a (NM_173870.1,391-409).
ggaagaacgggagtttcaa

SEQ ID NO: 600746 - DNA, 19 bp, Mus musculus
  siRNA target sequence for Mgat4a (NM_173870.1,392-410).
gaagaacgggagtttcaat

SEQ ID NO: 600747 - DNA, 19 bp, Mus musculus
  siRNA target sequence for Mgat4a (NM_173870.1,395-413).
gaacgggagtttcaatagt

SEQ ID NO: 600748 - DNA, 19 bp, Mus musculus
  siRNA target sequence for Mgat4a (NM_173870.1,398-416).
cgggagtttcaatagttat

SEQ ID NO: 600749 - DNA, 19 bp, Mus musculus
  siRNA target sequence for Mgat4a (NM_173870.1,501-519).
gaagctggactgtgttata

SEQ ID NO: 600750 - DNA, 19 bp, Mus musculus
  siRNA target sequence for Mgat4a (NM_173870.1,512-530).
gtgttatagtcgtcttcat

SEQ ID NO: 600751 - DNA, 19 bp, Mus musculus
  siRNA target sequence for Mgat4a (NM_173870.1,539-557).
cagatcttgattatgttca

SEQ ID NO: 600752 - DNA, 19 bp, Mus musculus
  siRNA target sequence for Mgat4a (NM_173870.1,602-620).
gttctggcctgctggaaat

SEQ ID NO: 600753 - DNA, 19 bp, Mus musculus
  siRNA target sequence for Mgat4a (NM_173870.1,605-623).
ctggcctgctggaaataat

SEQ ID NO: 600754 - DNA, 19 bp, Mus musculus
  siRNA target sequence for Mgat4a (NM_173870.1,677-695).
gagactccaaggaaagagt

SEQ ID NO: 600755 - DNA, 19 bp, Mus musculus
  siRNA target sequence for Mgat4a (NM_173870.1,718-736).
ctggattactgttttctga

SEQ ID NO: 600756 - DNA, 19 bp, Mus musculus
  siRNA target sequence for Mgat4a (NM_173870.1,751-769).
gagaagggcatctactaca

SEQ ID NO: 600757 - DNA, 19 bp, Mus musculus
  siRNA target sequence for Mgat4a (NM_173870.1,774-792).
gcttgaagacgatattatt

SEQ ID NO: 600758 - DNA, 19 bp, Mus musculus
  siRNA target sequence for Mgat4a (NM_173870.1,778-796).
gaagacgatattattgtca

SEQ ID NO: 600759 - DNA, 19 bp, Mus musculus
  siRNA target sequence for Mgat4a (NM_173870.1,783-801).
cgatattattgtcaaacaa

SEQ ID NO: 600760 - DNA, 19 bp, Mus musculus
  siRNA target sequence for Mgat4a (NM_173870.1,876-894).
gcttggcttcattggaaaa

SEQ ID NO: 600761 - DNA, 19 bp, Mus musculus
  siRNA target sequence for Mgat4a (NM_173870.1,877-895).
cttggcttcattggaaaaa

SEQ ID NO: 600762 - DNA, 19 bp, Mus musculus
  siRNA target sequence for Mgat4a (NM_173870.1,917-935).
cgctggtcgtggagttcat

SEQ ID NO: 600763 - DNA, 19 bp, Mus musculus
  siRNA target sequence for Mgat4a (NM_173870.1,999-1017).
ctgcaaccccgaaaaagat

SEQ ID NO: 600764 - DNA, 19 bp, Mus musculus
  siRNA target sequence for Mgat4a (NM_173870.1,1005-1023).
ccccgaaaaagatgctaaa

SEQ ID NO: 600765 - DNA, 19 bp, Mus musculus
  siRNA target sequence for Mgat4a (NM_173870.1,1007-1025).
ccgaaaaagatgctaaaca

SEQ ID NO: 600766 - DNA, 19 bp, Mus musculus
  siRNA target sequence for Mgat4a (NM_173870.1,1100-1118).
ctctgtcggggaagattca

SEQ ID NO: 600767 - DNA, 19 bp, Mus musculus
  siRNA target sequence for Mgat4a (NM_173870.1,1104-1122).
gtcggggaagattcagaaa

SEQ ID NO: 600768 - DNA, 19 bp, Mus musculus
  siRNA target sequence for Mgat4a (NM_173870.1,1123-1141).
ctcacggataaagattaca

SEQ ID NO: 600769 - DNA, 19 bp, Mus musculus
  siRNA target sequence for Mgat4a (NM_173870.1,1127-1145).
cggataaagattacatgaa

SEQ ID NO: 600770 - DNA, 19 bp, Mus musculus
  siRNA target sequence for Mgat4a (NM_173870.1,1232-1250).
cctacatgggggaagactt

SEQ ID NO: 600771 - DNA, 19 bp, Mus musculus
  siRNA target sequence for Mgat4a (NM_173870.1,1271-1289).
cggctggagactacatctt

SEQ ID NO: 600772 - DNA, 19 bp, Mus musculus
  siRNA target sequence for Mgat4a (NM_173870.1,1276-1294).
ggagactacatcttgttta

SEQ ID NO: 600773 - DNA, 19 bp, Mus musculus
  siRNA target sequence for Mgat4a (NM_173870.1,1277-1295).
gagactacatcttgtttaa

SEQ ID NO: 600774 - DNA, 19 bp, Mus musculus
  siRNA target sequence for Mgat4a (NM_173870.1,1279-1297).
gactacatcttgtttaaat

SEQ ID NO: 600775 - DNA, 19 bp, Mus musculus
  siRNA target sequence for Mgat4a (NM_173870.1,1307-1325).
cggtcaacgtggagagtta

SEQ ID NO: 600776 - DNA, 19 bp, Mus musculus
  siRNA target sequence for Mgat4a (NM_173870.1,1308-1326).
ggtcaacgtggagagttat

SEQ ID NO: 600777 - DNA, 19 bp, Mus musculus
  siRNA target sequence for Mgat4a (NM_173870.1,1309-1327).
gtcaacgtggagagttatt

SEQ ID NO: 600778 - DNA, 19 bp, Mus musculus
  siRNA target sequence for Mgat4a (NM_173870.1,1394-1412).
ctcttaagagcgacagttt

SEQ ID NO: 600779 - DNA, 19 bp, Mus musculus
  siRNA target sequence for Mgat4a (NM_173870.1,1430-1448).
ccaaagacaaacgattaga

SEQ ID NO: 600780 - DNA, 19 bp, Mus musculus
  siRNA target sequence for Mgat4a (NM_173870.1,1463-1481).
gaataggaaaatttgagta

SEQ ID NO: 600781 - DNA, 19 bp, Mus musculus
  siRNA target sequence for Mgat4a (NM_173870.1,1484-1502).
gtgttgcagagggaattgt

SEQ ID NO: 600782 - DNA, 19 bp, Mus musculus
  siRNA target sequence for Mgat4a (NM_173870.1,1530-1548).
ctttcgactttccgttatt

SEQ ID NO: 600783 - DNA, 19 bp, Mus musculus
  siRNA target sequence for Mgat4a (NM_173870.1,1534-1552).
cgactttccgttattcaga

SEQ ID NO: 600784 - DNA, 19 bp, Mus musculus
  siRNA target sequence for Mgat4a (NM_173870.1,1535-1553).
gactttccgttattcagaa

SEQ ID NO: 600785 - DNA, 19 bp, Mus musculus
  siRNA target sequence for Mgat4a (NM_173870.1,1569-1587).
cattcttaatgagattcat

SEQ ID NO: 600786 - DNA, 19 bp, Mus musculus
  siRNA target sequence for Mgat4b (NM_145926.2,324-342).
cgcacaggcacgtacttca

SEQ ID NO: 600787 - DNA, 19 bp, Mus musculus
  siRNA target sequence for Mgat4b (NM_145926.2,470-488).
gaggtgcactcgtacttga

SEQ ID NO: 600788 - DNA, 19 bp, Mus musculus
  siRNA target sequence for Mgat4b (NM_145926.2,480-498).
cgtacttgactgacacatt

SEQ ID NO: 600789 - DNA, 19 bp, Mus musculus
  siRNA target sequence for Mgat4b (NM_145926.2,738-756).
ccaaacagaacctcgatta

SEQ ID NO: 600790 - DNA, 19 bp, Mus musculus
  siRNA target sequence for Mgat4b (NM_145926.2,781-799).
gtccaaaggcatctactat

SEQ ID NO: 600791 - DNA, 19 bp, Mus musculus
  siRNA target sequence for Mgat4b (NM_145926.2,901-919).
ctcgcagttgggcttcatt

SEQ ID NO: 600792 - DNA, 19 bp, Mus musculus
  siRNA target sequence for Mgat4b (NM_145926.2,1040-1058).
gagaaggatgcgaaacatt

SEQ ID NO: 600793 - DNA, 19 bp, Mus musculus
  siRNA target sequence for Mgat4b (NM_145926.2,1045-1063).
ggatgcgaaacattgtgat

SEQ ID NO: 600794 - DNA, 19 bp, Mus musculus
  siRNA target sequence for Mgat4b (NM_145926.2,1140-1158).
gcaaaatccagaaactgaa

SEQ ID NO: 600795 - DNA, 19 bp, Mus musculus
  siRNA target sequence for Mgat4b (NM_145926.2,1343-1361).
cgccttgagcggttcttct

SEQ ID NO: 600796 - DNA, 19 bp, Mus musculus
  siRNA target sequence for Mgat4b (NM_145926.2,1344-1362).
gccttgagcggttcttctt

SEQ ID NO: 600797 - DNA, 19 bp, Mus musculus
  siRNA target sequence for Mgat4b (NM_145926.2,1391-1409).
gataagctcttcaacactt

SEQ ID NO: 600798 - DNA, 19 bp, Mus musculus
  siRNA target sequence for Mgat4b (NM_145926.2,1491-1509).
ctaggagcccagatggata

SEQ ID NO: 600799 - DNA, 19 bp, Mus musculus
  siRNA target sequence for Mgat4b (NM_145926.2,1583-1601).
ctacgtctctccattcaga

SEQ ID NO: 600800 - DNA, 19 bp, Mus musculus
  siRNA target sequence for Mgat4b (NM_145926.2,1608-1626).
ccccggtgtgggtcatttt

SEQ ID NO: 600801 - DNA, 19 bp, Mus musculus
  siRNA target sequence for Mgat4b (NM_145926.2,1610-1628).
ccggtgtgggtcattttga

SEQ ID NO: 600802 - DNA, 19 bp, Mus musculus
  siRNA target sequence for Mgat4b (NM_145926.2,1612-1630).
ggtgtgggtcattttgagt

SEQ ID NO: 600803 - DNA, 19 bp, Mus musculus
  siRNA target sequence for Ugt2a1 (NM_053184.1,89-107).
gcagtcactggctaaatgt

SEQ ID NO: 600804 - DNA, 19 bp, Mus musculus
  siRNA target sequence for Ugt2a1 (NM_053184.1,90-108).
cagtcactggctaaatgtt

SEQ ID NO: 600805 - DNA, 19 bp, Mus musculus
  siRNA target sequence for Ugt2a1 (NM_053184.1,98-116).
ggctaaatgttaagatcat

SEQ ID NO: 600806 - DNA, 19 bp, Mus musculus
  siRNA target sequence for Ugt2a1 (NM_053184.1,99-117).
gctaaatgttaagatcata

SEQ ID NO: 600807 - DNA, 19 bp, Mus musculus
  siRNA target sequence for Ugt2a1 (NM_053184.1,228-246).
gccctttggcaaggaaaaa

SEQ ID NO: 600808 - DNA, 19 bp, Mus musculus
  siRNA target sequence for Ugt2a1 (NM_053184.1,250-268).
gaaagtgtgatcaaagact

SEQ ID NO: 600809 - DNA, 19 bp, Mus musculus
  siRNA target sequence for Ugt2a1 (NM_053184.1,293-311).
ggccatctccttcaactat

SEQ ID NO: 600810 - DNA, 19 bp, Mus musculus
  siRNA target sequence for Ugt2a1 (NM_053184.1,295-313).
ccatctccttcaactatct

SEQ ID NO: 600811 - DNA, 19 bp, Mus musculus
  siRNA target sequence for Ugt2a1 (NM_053184.1,305-323).
caactatctggactttcta

SEQ ID NO: 600812 - DNA, 19 bp, Mus musculus
  siRNA target sequence for Ugt2a1 (NM_053184.1,308-326).
ctatctggactttctataa

SEQ ID NO: 600813 - DNA, 19 bp, Mus musculus
  siRNA target sequence for Ugt2a1 (NM_053184.1,312-330).
ctggactttctataaggaa

SEQ ID NO: 600814 - DNA, 19 bp, Mus musculus
  siRNA target sequence for Ugt2a1 (NM_053184.1,360-378).
ggtgtccagaggtatctgt

SEQ ID NO: 600815 - DNA, 19 bp, Mus musculus
  siRNA target sequence for Ugt2a1 (NM_053184.1,382-400).
ggcgttcttaagaatgaaa

SEQ ID NO: 600816 - DNA, 19 bp, Mus musculus
  siRNA target sequence for Ugt2a1 (NM_053184.1,429-447).
gttcgaagtactgttatca

SEQ ID NO: 600817 - DNA, 19 bp, Mus musculus
  siRNA target sequence for Ugt2a1 (NM_053184.1,441-459).
gttatcagaccctgtattt

SEQ ID NO: 600818 - DNA, 19 bp, Mus musculus
  siRNA target sequence for Ugt2a1 (NM_053184.1,466-484).
ggtgacatcgtggctttaa

SEQ ID NO: 600819 - DNA, 19 bp, Mus musculus
  siRNA target sequence for Ugt2a1 (NM_053184.1,467-485).
gtgacatcgtggctttaaa

SEQ ID NO: 600820 - DNA, 19 bp, Mus musculus
  siRNA target sequence for Ugt2a1 (NM_053184.1,487-505).
ctgggaattccatttatct

SEQ ID NO: 600821 - DNA, 19 bp, Mus musculus
  siRNA target sequence for Ugt2a1 (NM_053184.1,489-507).
gggaattccatttatctat

SEQ ID NO: 600822 - DNA, 19 bp, Mus musculus
  siRNA target sequence for Ugt2a1 (NM_053184.1,620-638).
ctgaccgagtaagaaactt

SEQ ID NO: 600823 - DNA, 19 bp, Mus musculus
  siRNA target sequence for Ugt2a1 (NM_053184.1,622-640).
gaccgagtaagaaacttca

SEQ ID NO: 600824 - DNA, 19 bp, Mus musculus
  siRNA target sequence for Ugt2a1 (NM_053184.1,624-642).
ccgagtaagaaacttcatt

SEQ ID NO: 600825 - DNA, 19 bp, Mus musculus
  siRNA target sequence for Ugt2a1 (NM_053184.1,625-643).
cgagtaagaaacttcattt

SEQ ID NO: 600826 - DNA, 19 bp, Mus musculus
  siRNA target sequence for Ugt2a1 (NM_053184.1,680-698).
ggaagcagtgggattccta

SEQ ID NO: 600827 - DNA, 19 bp, Mus musculus
  siRNA target sequence for Ugt2a1 (NM_053184.1,681-699).
gaagcagtgggattcctat

SEQ ID NO: 600828 - DNA, 19 bp, Mus musculus
  siRNA target sequence for Ugt2a1 (NM_053184.1,685-703).
cagtgggattcctattata

SEQ ID NO: 600829 - DNA, 19 bp, Mus musculus
  siRNA target sequence for Ugt2a1 (NM_053184.1,687-705).
gtgggattcctattatact

SEQ ID NO: 600830 - DNA, 19 bp, Mus musculus
  siRNA target sequence for Ugt2a1 (NM_053184.1,689-707).
gggattcctattatactaa

SEQ ID NO: 600831 - DNA, 19 bp, Mus musculus
  siRNA target sequence for Ugt2a1 (NM_053184.1,695-713).
cctattatactaaagcttt

SEQ ID NO: 600832 - DNA, 19 bp, Mus musculus
  siRNA target sequence for Ugt2a1 (NM_053184.1,725-743).
ccacactgtgtgagactat

SEQ ID NO: 600833 - DNA, 19 bp, Mus musculus
  siRNA target sequence for Ugt2a1 (NM_053184.1,768-786).
gcgaacctattgggatttt

SEQ ID NO: 600834 - DNA, 19 bp, Mus musculus
  siRNA target sequence for Ugt2a1 (NM_053184.1,996-1014).
ggttttgtggcgatacaaa

SEQ ID NO: 600835 - DNA, 19 bp, Mus musculus
  siRNA target sequence for Ugt2a1 (NM_053184.1,1004-1022).
ggcgatacaaaggaaagat

SEQ ID NO: 600836 - DNA, 19 bp, Mus musculus
  siRNA target sequence for Ugt2a1 (NM_053184.1,1005-1023).
gcgatacaaaggaaagata

SEQ ID NO: 600837 - DNA, 19 bp, Mus musculus
  siRNA target sequence for Ugt2a1 (NM_053184.1,1040-1058).
ccaatacaagactgtttga

SEQ ID NO: 600838 - DNA, 19 bp, Mus musculus
  siRNA target sequence for Ugt2a1 (NM_053184.1,1046-1064).
caagactgtttgattggat

SEQ ID NO: 600839 - DNA, 19 bp, Mus musculus
  siRNA target sequence for Ugt2a1 (NM_053184.1,1495-1513).
gtggcatctgctatattat

SEQ ID NO: 600840 - DNA, 19 bp, Mus musculus
  siRNA target sequence for Ugt2a1 (NM_053184.1,1499-1517).
catctgctatattattggt

SEQ ID NO: 600841 - DNA, 19 bp, Mus musculus
  siRNA target sequence for Siat8a (NM_011374.1,355-373).
ccatgctagctcggaaatt

SEQ ID NO: 600842 - DNA, 19 bp, Mus musculus
  siRNA target sequence for Siat8a (NM_011374.1,562-580).
gtgaccctgcccatctctt

SEQ ID NO: 600843 - DNA, 19 bp, Mus musculus
  siRNA target sequence for Siat8a (NM_011374.1,644-662).
ctcgttcaccatcgataat

SEQ ID NO: 600844 - DNA, 19 bp, Mus musculus
  siRNA target sequence for Siat8a (NM_011374.1,701-719).
gctgccattgaagaaatgt

SEQ ID NO: 600845 - DNA, 19 bp, Mus musculus
  siRNA target sequence for Siat8a (NM_011374.1,874-892).
gcataattcgccagagatt

SEQ ID NO: 600846 - DNA, 19 bp, Mus musculus
  siRNA target sequence for Siat8a (NM_011374.1,883-901).
gccagagatttgaaaacct

SEQ ID NO: 600847 - DNA, 19 bp, Mus musculus
  siRNA target sequence for Siat8a (NM_011374.1,995-1013).
gccgtctctccgtgtgtat

SEQ ID NO: 600848 - DNA, 19 bp, Mus musculus
  siRNA target sequence for Siat8a (NM_011374.1,996-1014).
ccgtctctccgtgtgtatt

SEQ ID NO: 600849 - DNA, 19 bp, Mus musculus
  siRNA target sequence for Siat8a (NM_011374.1,997-1015).
cgtctctccgtgtgtatta

SEQ ID NO: 600850 - DNA, 19 bp, Mus musculus
  siRNA target sequence for Siat8a (NM_011374.1,1026-1044).
gatgttggagccaatcaaa

SEQ ID NO: 600851 - DNA, 19 bp, Mus musculus
  siRNA target sequence for Siat8a (NM_011374.1,1074-1092).
cggaacattggaaagttct

SEQ ID NO: 600852 - DNA, 19 bp, Mus musculus
  siRNA target sequence for Siat8a (NM_011374.1,1110-1128).
cacgccaagcgcttgtcta

SEQ ID NO: 600853 - DNA, 19 bp, Mus musculus
  siRNA target sequence for Siat8a (NM_011374.1,1192-1210).
ggcccttctcggtgaacat

SEQ ID NO: 600854 - DNA, 19 bp, Mus musculus
  siRNA target sequence for Siat8a (NM_011374.1,1274-1292).
catgcctgaggaattcctt

SEQ ID NO: 600855 - DNA, 19 bp, Mus musculus
  siRNA target sequence for Siat8b (NM_009181.1,242-260).
ctcagagatcgaagaagaa

SEQ ID NO: 600856 - DNA, 19 bp, Mus musculus
  siRNA target sequence for Siat8b (NM_009181.1,271-289).
ctggaggcagaggtacaat

SEQ ID NO: 600857 - DNA, 19 bp, Mus musculus
  siRNA target sequence for Siat8b (NM_009181.1,297-315).
gctgtgaacagcttacata

SEQ ID NO: 600858 - DNA, 19 bp, Mus musculus
  siRNA target sequence for Siat8b (NM_009181.1,322-340).
ctaatagagctgaagttgt

SEQ ID NO: 600859 - DNA, 19 bp, Mus musculus
  siRNA target sequence for Siat8b (NM_009181.1,363-381).
gctgtcgctgacagaagta

SEQ ID NO: 600860 - DNA, 19 bp, Mus musculus
  siRNA target sequence for Siat8b (NM_009181.1,364-382).
ctgtcgctgacagaagtaa

SEQ ID NO: 600861 - DNA, 19 bp, Mus musculus
  siRNA target sequence for Siat8b (NM_009181.1,368-386).
cgctgacagaagtaatgaa

SEQ ID NO: 600862 - DNA, 19 bp, Mus musculus
  siRNA target sequence for Siat8b (NM_009181.1,369-387).
gctgacagaagtaatgaaa

SEQ ID NO: 600863 - DNA, 19 bp, Mus musculus
  siRNA target sequence for Siat8b (NM_009181.1,479-497).
ggatgcggagaaggatatt

SEQ ID NO: 600864 - DNA, 19 bp, Mus musculus
  siRNA target sequence for Siat8b (NM_009181.1,480-498).
gatgcggagaaggatattt

SEQ ID NO: 600865 - DNA, 19 bp, Mus musculus
  siRNA target sequence for Siat8b (NM_009181.1,521-539).
gcctggagacattattcat

SEQ ID NO: 600866 - DNA, 19 bp, Mus musculus
  siRNA target sequence for Siat8b (NM_009181.1,528-546).
gacattattcattatatct

SEQ ID NO: 600867 - DNA, 19 bp, Mus musculus
  siRNA target sequence for Siat8b (NM_009181.1,572-590).
gtcccagaacctctatgaa

SEQ ID NO: 600868 - DNA, 19 bp, Mus musculus
  siRNA target sequence for Siat8b (NM_009181.1,574-592).
cccagaacctctatgaact

SEQ ID NO: 600869 - DNA, 19 bp, Mus musculus
  siRNA target sequence for Siat8b (NM_009181.1,610-628).
ctctgaagaataagcattt

SEQ ID NO: 600870 - DNA, 19 bp, Mus musculus
  siRNA target sequence for Siat8b (NM_009181.1,995-1013).
gcacgcagtccgaggatat

SEQ ID NO: 600871 - DNA, 19 bp, Mus musculus
  siRNA target sequence for Siat8b (NM_009181.1,1048-1066).
ccaccggcctcttgatgta

SEQ ID NO: 600872 - DNA, 19 bp, Mus musculus
  siRNA target sequence for Siat8b (NM_009181.1,1078-1096).
cacgcttctgcaatcagat

SEQ ID NO: 600873 - DNA, 19 bp, Mus musculus
  siRNA target sequence for Siat8b (NM_009181.1,1087-1105).
gcaatcagatctaccttta

SEQ ID NO: 600874 - DNA, 19 bp, Mus musculus
  siRNA target sequence for Siat8b (NM_009181.1,1088-1106).
caatcagatctacctttat

SEQ ID NO: 600875 - DNA, 19 bp, Mus musculus
  siRNA target sequence for Siat8b (NM_009181.1,1122-1140).
ccactggatcagaatcaga

SEQ ID NO: 600876 - DNA, 19 bp, Mus musculus
  siRNA target sequence for Siat8b (NM_009181.1,1142-1160).
ccccgtcaagtatcactat

SEQ ID NO: 600877 - DNA, 19 bp, Mus musculus
  siRNA target sequence for Siat8b (NM_009181.1,1143-1161).
cccgtcaagtatcactatt

SEQ ID NO: 600878 - DNA, 19 bp, Mus musculus
  siRNA target sequence for Siat8b (NM_009181.1,1144-1162).
ccgtcaagtatcactatta

SEQ ID NO: 600879 - DNA, 19 bp, Mus musculus
  siRNA target sequence for Siat8b (NM_009181.1,1145-1163).
cgtcaagtatcactattat

SEQ ID NO: 600880 - DNA, 19 bp, Mus musculus
  siRNA target sequence for Siat8b (NM_009181.1,1170-1188).
ctcaagtatggctacactt

SEQ ID NO: 600881 - DNA, 19 bp, Mus musculus
  siRNA target sequence for Siat8b (NM_009181.1,1229-1247).
cctcaagagcctacatgaa

SEQ ID NO: 600882 - DNA, 19 bp, Mus musculus
  siRNA target sequence for Siat8c (NM_009182.1,131-149).
cgtggccctgctgatttta

SEQ ID NO: 600883 - DNA, 19 bp, Mus musculus
  siRNA target sequence for Siat8c (NM_009182.1,132-150).
gtggccctgctgattttat

SEQ ID NO: 600884 - DNA, 19 bp, Mus musculus
  siRNA target sequence for Siat8c (NM_009182.1,160-178).
gctacgtgtctctgaaaaa

SEQ ID NO: 600885 - DNA, 19 bp, Mus musculus
  siRNA target sequence for Siat8c (NM_009182.1,260-278).
gtttgcactgaagtttcta

SEQ ID NO: 600886 - DNA, 19 bp, Mus musculus
  siRNA target sequence for Siat8c (NM_009182.1,272-290).
gtttctagaccagtcattt

SEQ ID NO: 600887 - DNA, 19 bp, Mus musculus
  siRNA target sequence for Siat8c (NM_009182.1,286-304).
catttgtgcccattacgaa

SEQ ID NO: 600888 - DNA, 19 bp, Mus musculus
  siRNA target sequence for Siat8c (NM_009182.1,314-332).
ccatgaactccaagagaaa

SEQ ID NO: 600889 - DNA, 19 bp, Mus musculus
  siRNA target sequence for Siat8c (NM_009182.1,355-373).
ggacagcgtttttacatca

SEQ ID NO: 600890 - DNA, 19 bp, Mus musculus
  siRNA target sequence for Siat8c (NM_009182.1,356-374).
gacagcgtttttacatcaa

SEQ ID NO: 600891 - DNA, 19 bp, Mus musculus
  siRNA target sequence for Siat8c (NM_009182.1,387-405).
cttcagcatgtcgatgtaa

SEQ ID NO: 600892 - DNA, 19 bp, Mus musculus
  siRNA target sequence for Siat8c (NM_009182.1,390-408).
cagcatgtcgatgtaataa

SEQ ID NO: 600893 - DNA, 19 bp, Mus musculus
  siRNA target sequence for Siat8c (NM_009182.1,392-410).
gcatgtcgatgtaataaaa

SEQ ID NO: 600894 - DNA, 19 bp, Mus musculus
  siRNA target sequence for Siat8c (NM_009182.1,393-411).
catgtcgatgtaataaaaa

SEQ ID NO: 600895 - DNA, 19 bp, Mus musculus
  siRNA target sequence for Siat8c (NM_009182.1,439-457).
ggattggacaactaatgca

SEQ ID NO: 600896 - DNA, 19 bp, Mus musculus
  siRNA target sequence for Siat8c (NM_009182.1,447-465).
caactaatgcattatgatt

SEQ ID NO: 600897 - DNA, 19 bp, Mus musculus
  siRNA target sequence for Siat8c (NM_009182.1,520-538).
cagatgtgtcgcccattat

SEQ ID NO: 600898 - DNA, 19 bp, Mus musculus
  siRNA target sequence for Siat8c (NM_009182.1,522-540).
gatgtgtcgcccattatga

SEQ ID NO: 600899 - DNA, 19 bp, Mus musculus
  siRNA target sequence for Siat8c (NM_009182.1,525-543).
gtgtcgcccattatgaata

SEQ ID NO: 600900 - DNA, 19 bp, Mus musculus
  siRNA target sequence for Siat8c (NM_009182.1,539-557).
gaataagcgttataatgtt

SEQ ID NO: 600901 - DNA, 19 bp, Mus musculus
  siRNA target sequence for Siat8c (NM_009182.1,701-719).
cttcaatccgagcatctta

SEQ ID NO: 600902 - DNA, 19 bp, Mus musculus
  siRNA target sequence for Siat8c (NM_009182.1,708-726).
ccgagcatcttagagaaat

SEQ ID NO: 600903 - DNA, 19 bp, Mus musculus
  siRNA target sequence for Siat8c (NM_009182.1,709-727).
cgagcatcttagagaaata

SEQ ID NO: 600904 - DNA, 19 bp, Mus musculus
  siRNA target sequence for Siat8c (NM_009182.1,731-749).
caacaatcttttaaccatt

SEQ ID NO: 600905 - DNA, 19 bp, Mus musculus
  siRNA target sequence for Siat8c (NM_009182.1,745-763).
ccattcaggaccgtaacaa

SEQ ID NO: 600906 - DNA, 19 bp, Mus musculus
  siRNA target sequence for Siat8c (NM_009182.1,786-804).
cttgatggggccatacttt

SEQ ID NO: 600907 - DNA, 19 bp, Mus musculus
  siRNA target sequence for Siat8c (NM_009182.1,844-862).
cgagaacgctagtggattt

SEQ ID NO: 600908 - DNA, 19 bp, Mus musculus
  siRNA target sequence for Siat8c (NM_009182.1,845-863).
gagaacgctagtggatttt

SEQ ID NO: 600909 - DNA, 19 bp, Mus musculus
  siRNA target sequence for Siat8c (NM_009182.1,847-865).
gaacgctagtggatttttt

SEQ ID NO: 600910 - DNA, 19 bp, Mus musculus
  siRNA target sequence for Siat8c (NM_009182.1,850-868).
cgctagtggatttttttgt

SEQ ID NO: 600911 - DNA, 19 bp, Mus musculus
  siRNA target sequence for Siat8c (NM_009182.1,870-888).
gagcacagaggtcagttaa

SEQ ID NO: 600912 - DNA, 19 bp, Mus musculus
  siRNA target sequence for Siat8c (NM_009182.1,900-918).
gcttggcctggaaatatca

SEQ ID NO: 600913 - DNA, 19 bp, Mus musculus
  siRNA target sequence for Siat8c (NM_009182.1,901-919).
cttggcctggaaatatcat

SEQ ID NO: 600914 - DNA, 19 bp, Mus musculus
  siRNA target sequence for Siat8c (NM_009182.1,1012-1030).
gtgaagagatccacttgta

SEQ ID NO: 600915 - DNA, 19 bp, Mus musculus
  siRNA target sequence for Siat8d (NM_009183.1,357-375).
gaccatctgcactataagt

SEQ ID NO: 600916 - DNA, 19 bp, Mus musculus
  siRNA target sequence for Siat8d (NM_009183.1,379-397).
ctcctgatcttttataaga

SEQ ID NO: 600917 - DNA, 19 bp, Mus musculus
  siRNA target sequence for Siat8d (NM_009183.1,381-399).
cctgatcttttataagaca

SEQ ID NO: 600918 - DNA, 19 bp, Mus musculus
  siRNA target sequence for Siat8d (NM_009183.1,446-464).
gagatggtgaactgtgttt

SEQ ID NO: 600919 - DNA, 19 bp, Mus musculus
  siRNA target sequence for Siat8d (NM_009183.1,448-466).
gatggtgaactgtgtttga

SEQ ID NO: 600920 - DNA, 19 bp, Mus musculus
  siRNA target sequence for Siat8d (NM_009183.1,478-496).
gtcaacagctctgataaaa

SEQ ID NO: 600921 - DNA, 19 bp, Mus musculus
  siRNA target sequence for Siat8d (NM_009183.1,516-534).
caccatcttccaacattct

SEQ ID NO: 600922 - DNA, 19 bp, Mus musculus
  siRNA target sequence for Siat8d (NM_009183.1,585-603).
cattcttcgtttcttagat

SEQ ID NO: 600923 - DNA, 19 bp, Mus musculus
  siRNA target sequence for Siat8d (NM_009183.1,605-623).
cggaacgtgacgtatctgt

SEQ ID NO: 600924 - DNA, 19 bp, Mus musculus
  siRNA target sequence for Siat8d (NM_009183.1,622-640).
gtggtcaagagcagtttta

SEQ ID NO: 600925 - DNA, 19 bp, Mus musculus
  siRNA target sequence for Siat8d (NM_009183.1,644-662).
ctggtgatgtcatacacta

SEQ ID NO: 600926 - DNA, 19 bp, Mus musculus
  siRNA target sequence for Siat8d (NM_009183.1,647-665).
gtgatgtcatacactatgt

SEQ ID NO: 600927 - DNA, 19 bp, Mus musculus
  siRNA target sequence for Siat8d (NM_009183.1,670-688).
gacagacgccggacactaa

SEQ ID NO: 600928 - DNA, 19 bp, Mus musculus
  siRNA target sequence for Siat8d (NM_009183.1,672-690).
cagacgccggacactaaat

SEQ ID NO: 600929 - DNA, 19 bp, Mus musculus
  siRNA target sequence for Siat8d (NM_009183.1,676-694).
cgccggacactaaatattt

SEQ ID NO: 600930 - DNA, 19 bp, Mus musculus
  siRNA target sequence for Siat8d (NM_009183.1,680-698).
ggacactaaatatttctca

SEQ ID NO: 600931 - DNA, 19 bp, Mus musculus
  siRNA target sequence for Siat8d (NM_009183.1,719-737).
ctgaagtttcaccaatgaa

SEQ ID NO: 600932 - DNA, 19 bp, Mus musculus
  siRNA target sequence for Siat8d (NM_009183.1,797-815).
gatgtggaaaggagattga

SEQ ID NO: 600933 - DNA, 19 bp, Mus musculus
  siRNA target sequence for Siat8d (NM_009183.1,868-886).
gctgatgtggggactaaat

SEQ ID NO: 600934 - DNA, 19 bp, Mus musculus
  siRNA target sequence for Siat8d (NM_009183.1,974-992).
gactctccatgctgaatga

SEQ ID NO: 600935 - DNA, 19 bp, Mus musculus
  siRNA target sequence for Siat8d (NM_009183.1,1038-1056).
gcacgtggagtgggttaat

SEQ ID NO: 600936 - DNA, 19 bp, Mus musculus
  siRNA target sequence for Siat8d (NM_009183.1,1041-1059).
cgtggagtgggttaatgca

SEQ ID NO: 600937 - DNA, 19 bp, Mus musculus
  siRNA target sequence for Siat8d (NM_009183.1,1042-1060).
gtggagtgggttaatgcat

SEQ ID NO: 600938 - DNA, 19 bp, Mus musculus
  siRNA target sequence for Siat8d (NM_009183.1,1044-1062).
ggagtgggttaatgcatta

SEQ ID NO: 600939 - DNA, 19 bp, Mus musculus
  siRNA target sequence for Siat8d (NM_009183.1,1050-1068).
ggttaatgcattaatcctt

SEQ ID NO: 600940 - DNA, 19 bp, Mus musculus
  siRNA target sequence for Siat8d (NM_009183.1,1084-1102).
gtgcgaactgcctatccat

SEQ ID NO: 600941 - DNA, 19 bp, Mus musculus
  siRNA target sequence for Siat8d (NM_009183.1,1094-1112).
cctatccatcacttagact

SEQ ID NO: 600942 - DNA, 19 bp, Mus musculus
  siRNA target sequence for Siat8d (NM_009183.1,1100-1118).
catcacttagacttattca

SEQ ID NO: 600943 - DNA, 19 bp, Mus musculus
  siRNA target sequence for Siat8d (NM_009183.1,1134-1152).
ctggctgactaacaaagtt

SEQ ID NO: 600944 - DNA, 19 bp, Mus musculus
  siRNA target sequence for Siat8d (NM_009183.1,1142-1160).
ctaacaaagttcctatcaa

SEQ ID NO: 600945 - DNA, 19 bp, Mus musculus
  siRNA target sequence for Siat8d (NM_009183.1,1197-1215).
caccagattctgtgatgaa

SEQ ID NO: 600946 - DNA, 19 bp, Mus musculus
  siRNA target sequence for Siat8d (NM_009183.1,1208-1226).
gtgatgaaattcaccttta

SEQ ID NO: 600947 - DNA, 19 bp, Mus musculus
  siRNA target sequence for Siat8d (NM_009183.1,1322-1340).
ctcacaggatgccattaga

SEQ ID NO: 600948 - DNA, 19 bp, Mus musculus
  siRNA target sequence for Siat8d (NM_009183.1,1328-1346).
ggatgccattagaatttaa

SEQ ID NO: 600949 - DNA, 19 bp, Mus musculus
  siRNA target sequence for Siat8d (NM_009183.1,1353-1371).
gaatgtgctacacaataga

SEQ ID NO: 600950 - DNA, 19 bp, Mus musculus
  siRNA target sequence for Siat8d (NM_009183.1,1365-1383).
caatagaggagctctaaaa

SEQ ID NO: 600951 - DNA, 19 bp, Mus musculus
  siRNA target sequence for Siat8e (NM_153124.1,644-662).
ggaatccagcggcttatat

SEQ ID NO: 600952 - DNA, 19 bp, Mus musculus
  siRNA target sequence for Siat7a (NM_011371.1,160-178).
gtgttggcattgctcttta

SEQ ID NO: 600953 - DNA, 19 bp, Mus musculus
  siRNA target sequence for Siat7a (NM_011371.1,183-201).
gctcttcgttgttaaggat

SEQ ID NO: 600954 - DNA, 19 bp, Mus musculus
  siRNA target sequence for Siat7a (NM_011371.1,199-217).
gatccaagggcaaaagatt

SEQ ID NO: 600955 - DNA, 19 bp, Mus musculus
  siRNA target sequence for Siat7a (NM_011371.1,554-572).
gagctgtcccagctaagaa

SEQ ID NO: 600956 - DNA, 19 bp, Mus musculus
  siRNA target sequence for Siat7a (NM_011371.1,685-703).
gaggaatatagcttggata

SEQ ID NO: 600957 - DNA, 19 bp, Mus musculus
  siRNA target sequence for Siat7a (NM_011371.1,688-706).
gaatatagcttggatatga

SEQ ID NO: 600958 - DNA, 19 bp, Mus musculus
  siRNA target sequence for Siat7a (NM_011371.1,758-776).
caccatggctacagaatat

SEQ ID NO: 600959 - DNA, 19 bp, Mus musculus
  siRNA target sequence for Siat7a (NM_011371.1,959-977).
ctgggtactccaagtgtat

SEQ ID NO: 600960 - DNA, 19 bp, Mus musculus
  siRNA target sequence for Siat7a (NM_011371.1,1002-1020).
gggcatcctgaatgattca

SEQ ID NO: 600961 - DNA, 19 bp, Mus musculus
  siRNA target sequence for Siat7a (NM_011371.1,1039-1057).
gacagccatgactatgttt

SEQ ID NO: 600962 - DNA, 19 bp, Mus musculus
  siRNA target sequence for Siat7a (NM_011371.1,1063-1081).
ctgagtggagccgttatta

SEQ ID NO: 600963 - DNA, 19 bp, Mus musculus
  siRNA target sequence for Siat7a (NM_011371.1,1065-1083).
gagtggagccgttattaaa

SEQ ID NO: 600964 - DNA, 19 bp, Mus musculus
  siRNA target sequence for Siat7a (NM_011371.1,1104-1122).
gacccggacatccttctat

SEQ ID NO: 600965 - DNA, 19 bp, Mus musculus
  siRNA target sequence for Siat7a (NM_011371.1,1196-1214).
gaaaggacgtccgatatct

SEQ ID NO: 600966 - DNA, 19 bp, Mus musculus
  siRNA target sequence for Siat7a (NM_011371.1,1251-1269).
ggaagctatgtttttgaat

SEQ ID NO: 600967 - DNA, 19 bp, Mus musculus
  siRNA target sequence for Siat7a (NM_011371.1,1369-1387).
gactttctccgttacatga

SEQ ID NO: 600968 - DNA, 19 bp, Mus musculus
  siRNA target sequence for Siat7a (NM_011371.1,1540-1558).
gaccactactatgatacat

SEQ ID NO: 600969 - DNA, 19 bp, Mus musculus
  siRNA target sequence for Siat7a (NM_011371.1,1552-1570).
gatacatcgtggaaaaggt

SEQ ID NO: 600970 - DNA, 19 bp, Mus musculus
  siRNA target sequence for Siat7a (NM_011371.1,1617-1635).
gaagcggttgcatgatgaa

SEQ ID NO: 600971 - DNA, 19 bp, Mus musculus
  siRNA target sequence for Siat7a (NM_011371.1,1650-1668).
ctaccagcgtccacaaagt

SEQ ID NO: 600972 - DNA, 19 bp, Mus musculus
  siRNA target sequence for Siat7a (NM_011371.1,1660-1678).
ccacaaagtgacaaagcaa

SEQ ID NO: 600973 - DNA, 19 bp, Mus musculus
  siRNA target sequence for Siat7f (NM_016973.1,208-226).
cgccggagagagatgagta

SEQ ID NO: 600974 - DNA, 19 bp, Mus musculus
  siRNA target sequence for Siat7f (NM_016973.1,237-255).
gcagcggtcagcagtgttt

SEQ ID NO: 600975 - DNA, 19 bp, Mus musculus
  siRNA target sequence for Siat7f (NM_016973.1,397-415).
cctatcctcggcaacaaga

SEQ ID NO: 600976 - DNA, 19 bp, Mus musculus
  siRNA target sequence for Siat7f (NM_016973.1,431-449).
gcaaccagtgtgtgatcat

SEQ ID NO: 600977 - DNA, 19 bp, Mus musculus
  siRNA target sequence for Siat7f (NM_016973.1,477-495).
caaactgggccctgagatt

SEQ ID NO: 600978 - DNA, 19 bp, Mus musculus
  siRNA target sequence for Siat7f (NM_016973.1,548-566).
cggctgacgtcggaaacaa

SEQ ID NO: 600979 - DNA, 19 bp, Mus musculus
  siRNA target sequence for Siat7f (NM_016973.1,549-567).
ggctgacgtcggaaacaaa

SEQ ID NO: 600980 - DNA, 19 bp, Mus musculus
  siRNA target sequence for Siat7f (NM_016973.1,550-568).
gctgacgtcggaaacaaaa

SEQ ID NO: 600981 - DNA, 19 bp, Mus musculus
  siRNA target sequence for Siat7f (NM_016973.1,583-601).
gtggcccattccagtgtat

SEQ ID NO: 600982 - DNA, 19 bp, Mus musculus
  siRNA target sequence for Siat7f (NM_016973.1,612-630).
gcggaagccccaggaattt

SEQ ID NO: 600983 - DNA, 19 bp, Mus musculus
  siRNA target sequence for Siat7f (NM_016973.1,641-659).
cccctgagacggtgttcat

SEQ ID NO: 600984 - DNA, 19 bp, Mus musculus
  siRNA target sequence for Siat7f (NM_016973.1,643-661).
cctgagacggtgttcatct

SEQ ID NO: 600985 - DNA, 19 bp, Mus musculus
  siRNA target sequence for Siat7f (NM_016973.1,646-664).
gagacggtgttcatcttct

SEQ ID NO: 600986 - DNA, 19 bp, Mus musculus
  siRNA target sequence for Siat7f (NM_016973.1,865-883).
gtgattgcggtggaattgt

SEQ ID NO: 600987 - DNA, 19 bp, Mus musculus
  siRNA target sequence for Siat7f (NM_016973.1,950-968).
gcatgccataccactacta

SEQ ID NO: 600988 - DNA, 19 bp, Mus musculus
  siRNA target sequence for Siat7f (NM_016973.1,951-969).
catgccataccactactat

SEQ ID NO: 600989 - DNA, 19 bp, Mus musculus
  siRNA target sequence for Siat7f (NM_016973.1,1067-1085).
cgtcctgggcccaactcta

SEQ ID NO: 600990 - DNA, 19 bp, Mus musculus
  siRNA target sequence for Siat4a (NM_009177.2,934-952).
cttcctttgtcctgaatta

SEQ ID NO: 600991 - DNA, 19 bp, Mus musculus
  siRNA target sequence for Siat4a (NM_009177.2,1066-1084).
gccaggacaaggtatcata

SEQ ID NO: 600992 - DNA, 19 bp, Mus musculus
  siRNA target sequence for Siat4a (NM_009177.2,1071-1089).
gacaaggtatcatattggt

SEQ ID NO: 600993 - DNA, 19 bp, Mus musculus
  siRNA target sequence for Siat4a (NM_009177.2,1246-1264).
gcaatgtggatcctatgtt

SEQ ID NO: 600994 - DNA, 19 bp, Mus musculus
  siRNA target sequence for Siat4a (NM_009177.2,1251-1269).
gtggatcctatgttgaaca

SEQ ID NO: 600995 - DNA, 19 bp, Mus musculus
  siRNA target sequence for Siat4a (NM_009177.2,1254-1272).
gatcctatgttgaacaaga

SEQ ID NO: 600996 - DNA, 19 bp, Mus musculus
  siRNA target sequence for Siat4a (NM_009177.2,1286-1304).
ccgacgctgtgcagttgta

SEQ ID NO: 600997 - DNA, 19 bp, Mus musculus
  siRNA target sequence for Siat4a (NM_009177.2,1573-1591).
cgaagatcaaagtgaaaca

SEQ ID NO: 600998 - DNA, 19 bp, Mus musculus
  siRNA target sequence for Siat4a (NM_009177.2,1574-1592).
gaagatcaaagtgaaacaa

SEQ ID NO: 600999 - DNA, 19 bp, Mus musculus
  siRNA target sequence for Siat4a (NM_009177.2,1653-1671).
ggccatgggcggtatccat

SEQ ID NO: 601000 - DNA, 19 bp, Mus musculus
  siRNA target sequence for Siat4a (NM_009177.2,1718-1736).
ggtggacttatatggtttt

SEQ ID NO: 601001 - DNA, 19 bp, Mus musculus
  siRNA target sequence for Siat4a (NM_009177.2,1752-1770).
ggaaattggcaccattact

SEQ ID NO: 601002 - DNA, 19 bp, Mus musculus
  siRNA target sequence for St6gal1 (NM_145933.2,931-949).
gacaaggactccacatact

SEQ ID NO: 601003 - DNA, 19 bp, Mus musculus
  siRNA target sequence for St6gal1 (NM_145933.2,933-951).
caaggactccacatactca

SEQ ID NO: 601004 - DNA, 19 bp, Mus musculus
  siRNA target sequence for St6gal1 (NM_145933.2,939-957).
ctccacatactcaaaactt

SEQ ID NO: 601005 - DNA, 19 bp, Mus musculus
  siRNA target sequence for St6gal1 (NM_145933.2,983-1001).
ggaactatctgaacatgaa

SEQ ID NO: 601006 - DNA, 19 bp, Mus musculus
  siRNA target sequence for St6gal1 (NM_145933.2,984-1002).
gaactatctgaacatgaat

SEQ ID NO: 601007 - DNA, 19 bp, Mus musculus
  siRNA target sequence for St6gal1 (NM_145933.2,987-1005).
ctatctgaacatgaataaa

SEQ ID NO: 601008 - DNA, 19 bp, Mus musculus
  siRNA target sequence for St6gal1 (NM_145933.2,1028-1046).
cgggaccaggagtcaagtt

SEQ ID NO: 601009 - DNA, 19 bp, Mus musculus
  siRNA target sequence for St6gal1 (NM_145933.2,1075-1093).
cgagaccacgtgaatgtgt

SEQ ID NO: 601010 - DNA, 19 bp, Mus musculus
  siRNA target sequence for St6gal1 (NM_145933.2,1098-1116).
gatagaggccacagatttt

SEQ ID NO: 601011 - DNA, 19 bp, Mus musculus
  siRNA target sequence for St6gal1 (NM_145933.2,1117-1135).
cccttcaacaccactgaat

SEQ ID NO: 601012 - DNA, 19 bp, Mus musculus
  siRNA target sequence for St6gal1 (NM_145933.2,1174-1192).
gctgggccttggcataagt

SEQ ID NO: 601013 - DNA, 19 bp, Mus musculus
  siRNA target sequence for St6gal1 (NM_145933.2,1210-1228).
gcaggatctctgaagaact

SEQ ID NO: 601014 - DNA, 19 bp, Mus musculus
  siRNA target sequence for St6gal1 (NM_145933.2,1233-1251).
gctgggtcgagagattgat

SEQ ID NO: 601015 - DNA, 19 bp, Mus musculus
  siRNA target sequence for St6gal1 (NM_145933.2,1234-1252).
ctgggtcgagagattgata

SEQ ID NO: 601016 - DNA, 19 bp, Mus musculus
  siRNA target sequence for St6gal1 (NM_145933.2,1236-1254).
gggtcgagagattgataat

SEQ ID NO: 601017 - DNA, 19 bp, Mus musculus
  siRNA target sequence for St6gal1 (NM_145933.2,1238-1256).
gtcgagagattgataatca

SEQ ID NO: 601018 - DNA, 19 bp, Mus musculus
  siRNA target sequence for St6gal1 (NM_145933.2,1241-1259).
gagagattgataatcatga

SEQ ID NO: 601019 - DNA, 19 bp, Mus musculus
  siRNA target sequence for St6gal1 (NM_145933.2,1258-1276).
gatgcggtcctgaggttta

SEQ ID NO: 601020 - DNA, 19 bp, Mus musculus
  siRNA target sequence for St6gal1 (NM_145933.2,1305-1323).
ggatgtgggcacaaaaact

SEQ ID NO: 601021 - DNA, 19 bp, Mus musculus
  siRNA target sequence for St6gal1 (NM_145933.2,1322-1340).
ctaccatccgcctagtgaa

SEQ ID NO: 601022 - DNA, 19 bp, Mus musculus
  siRNA target sequence for St6gal1 (NM_145933.2,1332-1350).
cctagtgaactctcagtta

SEQ ID NO: 601023 - DNA, 19 bp, Mus musculus
  siRNA target sequence for St6gal1 (NM_145933.2,1345-1363).
cagttagtcaccacagaaa

SEQ ID NO: 601024 - DNA, 19 bp, Mus musculus
  siRNA target sequence for St6gal1 (NM_145933.2,1382-1400).
gtttgtacaccgaaggaat

SEQ ID NO: 601025 - DNA, 19 bp, Mus musculus
  siRNA target sequence for St6gal1 (NM_145933.2,1393-1411).
gaaggaatcctgattctgt

SEQ ID NO: 601026 - DNA, 19 bp, Mus musculus
  siRNA target sequence for St6gal1 (NM_145933.2,1412-1430).
gggacccatctgtgtatca

SEQ ID NO: 601027 - DNA, 19 bp, Mus musculus
  siRNA target sequence for St6gal1 (NM_145933.2,1462-1480).
gactacaacttcttcgaaa

SEQ ID NO: 601028 - DNA, 19 bp, Mus musculus
  siRNA target sequence for St6gal1 (NM_145933.2,1473-1491).
cttcgaaacctataagagt

SEQ ID NO: 601029 - DNA, 19 bp, Mus musculus
  siRNA target sequence for St6gal1 (NM_145933.2,1547-1565).
gggaactatgggacatcat

SEQ ID NO: 601030 - DNA, 19 bp, Mus musculus
  siRNA target sequence for St6gal1 (NM_145933.2,1556-1574).
gggacatcattcaggaaat

SEQ ID NO: 601031 - DNA, 19 bp, Mus musculus
  siRNA target sequence for St6gal1 (NM_145933.2,1614-1632).
catgctgggtatcatcatt

SEQ ID NO: 601032 - DNA, 19 bp, Mus musculus
  siRNA target sequence for St6gal1 (NM_145933.2,1621-1639).
ggtatcatcattatgatga

SEQ ID NO: 601033 - DNA, 19 bp, Mus musculus
  siRNA target sequence for St6gal1 (NM_145933.2,1640-1658).
cgctgtgtgaccaagttga

SEQ ID NO: 601034 - DNA, 19 bp, Mus musculus
  siRNA target sequence for St6gal1 (NM_145933.2,1689-1707).
gacagatgtgtgctactat

SEQ ID NO: 601035 - DNA, 19 bp, Mus musculus
  siRNA target sequence for St6gal1 (NM_145933.2,1700-1718).
gctactatcaccagaagtt

SEQ ID NO: 601036 - DNA, 19 bp, Mus musculus
  siRNA target sequence for St6gal1 (NM_145933.2,1754-1772).
cgctcctcttcgagaagaa

SEQ ID NO: 601037 - DNA, 19 bp, Mus musculus
  siRNA target sequence for St6gal1 (NM_145933.2,1756-1774).
ctcctcttcgagaagaata

SEQ ID NO: 601038 - DNA, 19 bp, Mus musculus
  siRNA target sequence for Siat9 (NM_011375.1,293-311).
gagtctggctcctgtacat

SEQ ID NO: 601039 - DNA, 19 bp, Mus musculus
  siRNA target sequence for Siat9 (NM_011375.1,304-322).
ctgtacatcctcattttga

SEQ ID NO: 601040 - DNA, 19 bp, Mus musculus
  siRNA target sequence for Siat9 (NM_011375.1,306-324).
gtacatcctcattttgaat

SEQ ID NO: 601041 - DNA, 19 bp, Mus musculus
  siRNA target sequence for Siat9 (NM_011375.1,321-339).
gaattacaccgctgaagaa

SEQ ID NO: 601042 - DNA, 19 bp, Mus musculus
  siRNA target sequence for Siat9 (NM_011375.1,332-350).
ctgaagaatgtgacatgaa

SEQ ID NO: 601043 - DNA, 19 bp, Mus musculus
  siRNA target sequence for Siat9 (NM_011375.1,367-385).
gaccctgaccggataaaga

SEQ ID NO: 601044 - DNA, 19 bp, Mus musculus
  siRNA target sequence for Siat9 (NM_011375.1,444-462).
gacggctatggctctgtta

SEQ ID NO: 601045 - DNA, 19 bp, Mus musculus
  siRNA target sequence for Siat9 (NM_011375.1,446-464).
cggctatggctctgttatt

SEQ ID NO: 601046 - DNA, 19 bp, Mus musculus
  siRNA target sequence for Siat9 (NM_011375.1,449-467).
ctatggctctgttatttga

SEQ ID NO: 601047 - DNA, 19 bp, Mus musculus
  siRNA target sequence for Siat9 (NM_011375.1,537-555).
gtatgacccgccttttgga

SEQ ID NO: 601048 - DNA, 19 bp, Mus musculus
  siRNA target sequence for Siat9 (NM_011375.1,558-576).
ccggaagttctccagtaaa

SEQ ID NO: 601049 - DNA, 19 bp, Mus musculus
  siRNA target sequence for Siat9 (NM_011375.1,560-578).
ggaagttctccagtaaagt

SEQ ID NO: 601050 - DNA, 19 bp, Mus musculus
  siRNA target sequence for Siat9 (NM_011375.1,718-736).
gtggtaataaggttgaaca

SEQ ID NO: 601051 - DNA, 19 bp, Mus musculus
  siRNA target sequence for Siat9 (NM_011375.1,741-759).
gccagttgagggttactct

SEQ ID NO: 601052 - DNA, 19 bp, Mus musculus
  siRNA target sequence for Siat9 (NM_011375.1,758-776).
ctgaacacgttgggaataa

SEQ ID NO: 601053 - DNA, 19 bp, Mus musculus
  siRNA target sequence for Siat9 (NM_011375.1,763-781).
cacgttgggaataaaacta

SEQ ID NO: 601054 - DNA, 19 bp, Mus musculus
  siRNA target sequence for Siat9 (NM_011375.1,765-783).
cgttgggaataaaactact

SEQ ID NO: 601055 - DNA, 19 bp, Mus musculus
  siRNA target sequence for Siat9 (NM_011375.1,766-784).
gttgggaataaaactacta

SEQ ID NO: 601056 - DNA, 19 bp, Mus musculus
  siRNA target sequence for Siat9 (NM_011375.1,779-797).
ctactataaggatgactta

SEQ ID NO: 601057 - DNA, 19 bp, Mus musculus
  siRNA target sequence for Siat9 (NM_011375.1,812-830).
cactgtcggacgttgaata

SEQ ID NO: 601058 - DNA, 19 bp, Mus musculus
  siRNA target sequence for Siat9 (NM_011375.1,814-832).
ctgtcggacgttgaatact

SEQ ID NO: 601059 - DNA, 19 bp, Mus musculus
  siRNA target sequence for Siat9 (NM_011375.1,826-844).
gaatactacgccaatgatt

SEQ ID NO: 601060 - DNA, 19 bp, Mus musculus
  siRNA target sequence for Siat9 (NM_011375.1,835-853).
gccaatgatttgttcgtta

SEQ ID NO: 601061 - DNA, 19 bp, Mus musculus
  siRNA target sequence for Siat9 (NM_011375.1,993-1011).
gaacccagttatcatcaaa

SEQ ID NO: 601062 - DNA, 19 bp, Mus musculus
  siRNA target sequence for Siat9 (NM_011375.1,1019-1037).
ccttcgacatccttcagta

SEQ ID NO: 601063 - DNA, 19 bp, Mus musculus
  siRNA target sequence for Siat9 (NM_011375.1,1055-1073).
gattctggggccatgataa

SEQ ID NO: 601064 - DNA, 19 bp, Mus musculus
  siRNA target sequence for Siat9 (NM_011375.1,1091-1109).
gcgtcattgccgttgtctt

SEQ ID NO: 601065 - DNA, 19 bp, Mus musculus
  siRNA target sequence for Siat9 (NM_011375.1,1101-1119).
cgttgtcttggctacacat

SEQ ID NO: 601066 - DNA, 19 bp, Mus musculus
  siRNA target sequence for Siat7d (NM_011373.1,262-280).
ctcacactgtgcatcttga

SEQ ID NO: 601067 - DNA, 19 bp, Mus musculus
  siRNA target sequence for Siat7d (NM_011373.1,270-288).
gtgcatcttgacattctct

SEQ ID NO: 601068 - DNA, 19 bp, Mus musculus
  siRNA target sequence for Siat7d (NM_011373.1,422-440).
cagacgggaagcctcttat

SEQ ID NO: 601069 - DNA, 19 bp, Mus musculus
  siRNA target sequence for Siat7d (NM_011373.1,633-651).
gcgcaactactcacactat

SEQ ID NO: 601070 - DNA, 19 bp, Mus musculus
  siRNA target sequence for Siat7d (NM_011373.1,634-652).
cgcaactactcacactatt

SEQ ID NO: 601071 - DNA, 19 bp, Mus musculus
  siRNA target sequence for Siat7d (NM_011373.1,635-653).
gcaactactcacactattt

SEQ ID NO: 601072 - DNA, 19 bp, Mus musculus
  siRNA target sequence for Siat7d (NM_011373.1,744-762).
gcagctcaccagaatgtat

SEQ ID NO: 601073 - DNA, 19 bp, Mus musculus
  siRNA target sequence for Siat7d (NM_011373.1,837-855).
caagaaccggagacaatca

SEQ ID NO: 601074 - DNA, 19 bp, Mus musculus
  siRNA target sequence for Siat7d (NM_011373.1,850-868).
caatcaggctcctttctca

SEQ ID NO: 601075 - DNA, 19 bp, Mus musculus
  siRNA target sequence for Siat7d (NM_011373.1,873-891).
cggttggttcaccatgatt

SEQ ID NO: 601076 - DNA, 19 bp, Mus musculus
  siRNA target sequence for Siat7d (NM_011373.1,928-946).
gggatggtcagcgatagtt

SEQ ID NO: 601077 - DNA, 19 bp, Mus musculus
  siRNA target sequence for Siat7d (NM_011373.1,929-947).
ggatggtcagcgatagtta

SEQ ID NO: 601078 - DNA, 19 bp, Mus musculus
  siRNA target sequence for Siat7d (NM_011373.1,971-989).
ccgtgccctaccactactt

SEQ ID NO: 601079 - DNA, 19 bp, Mus musculus
  siRNA target sequence for Siat7d (NM_011373.1,972-990).
cgtgccctaccactacttt

SEQ ID NO: 601080 - DNA, 19 bp, Mus musculus
  siRNA target sequence for Siat7d (NM_011373.1,1047-1065).
gagcgcccatcgcttcatt

SEQ ID NO: 601081 - DNA, 19 bp, Mus musculus
  siRNA target sequence for Siat6 (NM_009176.2,636-654).
gggaagactccaattcatt

SEQ ID NO: 601082 - DNA, 19 bp, Mus musculus
  siRNA target sequence for Siat6 (NM_009176.2,684-702).
ccctaggcacagagtatga

SEQ ID NO: 601083 - DNA, 19 bp, Mus musculus
  siRNA target sequence for Siat6 (NM_009176.2,685-703).
cctaggcacagagtatgat

SEQ ID NO: 601084 - DNA, 19 bp, Mus musculus
  siRNA target sequence for Siat6 (NM_009176.2,686-704).
ctaggcacagagtatgata

SEQ ID NO: 601085 - DNA, 19 bp, Mus musculus
  siRNA target sequence for Siat6 (NM_009176.2,753-771).
ccaccaagtacgcaaactt

SEQ ID NO: 601086 - DNA, 19 bp, Mus musculus
  siRNA target sequence for Siat6 (NM_009176.2,912-930).
ggatcaaaggtcaagacaa

SEQ ID NO: 601087 - DNA, 19 bp, Mus musculus
  siRNA target sequence for Siat6 (NM_009176.2,921-939).
gtcaagacaatctgatcaa

SEQ ID NO: 601088 - DNA, 19 bp, Mus musculus
  siRNA target sequence for Siat6 (NM_009176.2,1056-1074).
cacggattgacgactatga

SEQ ID NO: 601089 - DNA, 19 bp, Mus musculus
  siRNA target sequence for Siat6 (NM_009176.2,1058-1076).
cggattgacgactatgaca

SEQ ID NO: 601090 - DNA, 19 bp, Mus musculus
  siRNA target sequence for Siat6 (NM_009176.2,1059-1077).
ggattgacgactatgacat

SEQ ID NO: 601091 - DNA, 19 bp, Mus musculus
  siRNA target sequence for Siat6 (NM_009176.2,1060-1078).
gattgacgactatgacatt

SEQ ID NO: 601092 - DNA, 19 bp, Mus musculus
  siRNA target sequence for Siat6 (NM_009176.2,1064-1082).
gacgactatgacattgtga

SEQ ID NO: 601093 - DNA, 19 bp, Mus musculus
  siRNA target sequence for Siat6 (NM_009176.2,1267-1285).
gagagtgagtgcatctgat

SEQ ID NO: 601094 - DNA, 19 bp, Mus musculus
  siRNA target sequence for Siat6 (NM_009176.2,1338-1356).
gcatcctcaacccatactt

SEQ ID NO: 601095 - DNA, 19 bp, Mus musculus
  siRNA target sequence for Siat6 (NM_009176.2,1366-1384).
ggctgccttcactctcatt

SEQ ID NO: 601096 - DNA, 19 bp, Mus musculus
  siRNA target sequence for Siat6 (NM_009176.2,1521-1539).
cacccctgcactactatga

SEQ ID NO: 601097 - DNA, 19 bp, Mus musculus
  siRNA target sequence for Siat6 (NM_009176.2,1546-1564).
gcgcatggcagccatcaaa

SEQ ID NO: 601098 - DNA, 19 bp, Mus musculus
  siRNA target sequence for Siat6 (NM_009176.2,1625-1643).
cgtgtcatcactgacttaa

SEQ ID NO: 601099 - DNA, 19 bp, Mus musculus
  siRNA target sequence for Siat10 (NM_018784.1,549-567).
gtactatactgtatactgt

SEQ ID NO: 601100 - DNA, 19 bp, Mus musculus
  siRNA target sequence for Siat10 (NM_018784.1,641-659).
gccagctttcgccaatctt

SEQ ID NO: 601101 - DNA, 19 bp, Mus musculus
  siRNA target sequence for Siat10 (NM_018784.1,643-661).
cagctttcgccaatcttct

SEQ ID NO: 601102 - DNA, 19 bp, Mus musculus
  siRNA target sequence for Siat10 (NM_018784.1,650-668).
cgccaatcttctgagattt

SEQ ID NO: 601103 - DNA, 19 bp, Mus musculus
  siRNA target sequence for Siat10 (NM_018784.1,689-707).
gtgcagagctgactttata

SEQ ID NO: 601104 - DNA, 19 bp, Mus musculus
  siRNA target sequence for Siat10 (NM_018784.1,718-736).
ccatgtccggtaccaataa

SEQ ID NO: 601105 - DNA, 19 bp, Mus musculus
  siRNA target sequence for Siat10 (NM_018784.1,719-737).
catgtccggtaccaataat

SEQ ID NO: 601106 - DNA, 19 bp, Mus musculus
  siRNA target sequence for Siat10 (NM_018784.1,779-797).
cagctcggccctttcaaaa

SEQ ID NO: 601107 - DNA, 19 bp, Mus musculus
  siRNA target sequence for Siat10 (NM_018784.1,781-799).
gctcggccctttcaaaact

SEQ ID NO: 601108 - DNA, 19 bp, Mus musculus
  siRNA target sequence for Siat10 (NM_018784.1,873-891).
gtgttgaagaataagacat

SEQ ID NO: 601109 - DNA, 19 bp, Mus musculus
  siRNA target sequence for Siat10 (NM_018784.1,875-893).
gttgaagaataagacatta

SEQ ID NO: 601110 - DNA, 19 bp, Mus musculus
  siRNA target sequence for Siat10 (NM_018784.1,901-919).
caattgactcctatgatgt

SEQ ID NO: 601111 - DNA, 19 bp, Mus musculus
  siRNA target sequence for Siat10 (NM_018784.1,906-924).
gactcctatgatgtaataa

SEQ ID NO: 601112 - DNA, 19 bp, Mus musculus
  siRNA target sequence for Siat10 (NM_018784.1,908-926).
ctcctatgatgtaataata

SEQ ID NO: 601113 - DNA, 19 bp, Mus musculus
  siRNA target sequence for Siat10 (NM_018784.1,932-950).
gaacaacggtcctgtctta

SEQ ID NO: 601114 - DNA, 19 bp, Mus musculus
  siRNA target sequence for Siat10 (NM_018784.1,1028-1046).
ctatgaccccaatactaca

SEQ ID NO: 601115 - DNA, 19 bp, Mus musculus
  siRNA target sequence for Siat10 (NM_018784.1,1047-1065).
gcggttctcgtcgtcttta

SEQ ID NO: 601116 - DNA, 19 bp, Mus musculus
  siRNA target sequence for Siat10 (NM_018784.1,1048-1066).
cggttctcgtcgtctttaa

SEQ ID NO: 601117 - DNA, 19 bp, Mus musculus
  siRNA target sequence for Siat10 (NM_018784.1,1061-1079).
ctttaagccacaggattta

SEQ ID NO: 601118 - DNA, 19 bp, Mus musculus
  siRNA target sequence for Siat10 (NM_018784.1,1091-1109).
ggaaatactgctaggtaaa

SEQ ID NO: 601119 - DNA, 19 bp, Mus musculus
  siRNA target sequence for Siat10 (NM_018784.1,1092-1110).
gaaatactgctaggtaaaa

SEQ ID NO: 601120 - DNA, 19 bp, Mus musculus
  siRNA target sequence for Siat10 (NM_018784.1,1141-1159).
cagccttaaaactgatcta

SEQ ID NO: 601121 - DNA, 19 bp, Mus musculus
  siRNA target sequence for Siat10 (NM_018784.1,1154-1172).
gatctataaacaataccaa

SEQ ID NO: 601122 - DNA, 19 bp, Mus musculus
  siRNA target sequence for Siat10 (NM_018784.1,1177-1195).
gaatattagatccatatat

SEQ ID NO: 601123 - DNA, 19 bp, Mus musculus
  siRNA target sequence for Siat10 (NM_018784.1,1263-1281).
caccctacaacaggaatta

SEQ ID NO: 601124 - DNA, 19 bp, Mus musculus
  siRNA target sequence for Siat10 (NM_018784.1,1265-1283).
ccctacaacaggaattatt

SEQ ID NO: 601125 - DNA, 19 bp, Mus musculus
  siRNA target sequence for Siat10 (NM_018784.1,1289-1307).
cacaatggcctttcacata

SEQ ID NO: 601126 - DNA, 19 bp, Mus musculus
  siRNA target sequence for Siat10 (NM_018784.1,1317-1335).
gtgcacctcgctggtttta

SEQ ID NO: 601127 - DNA, 19 bp, Mus musculus
  siRNA target sequence for Siat10 (NM_018784.1,1320-1338).
cacctcgctggttttaagt

SEQ ID NO: 601128 - DNA, 19 bp, Mus musculus
  siRNA target sequence for Siat10 (NM_018784.1,1326-1344).
gctggttttaagtacaact

SEQ ID NO: 601129 - DNA, 19 bp, Mus musculus
  siRNA target sequence for Siat10 (NM_018784.1,1351-1369).
gccccaacagtcctttaca

SEQ ID NO: 601130 - DNA, 19 bp, Mus musculus
  siRNA target sequence for Siat10 (NM_018784.1,1403-1421).
gcagaatgcatatcacaat

SEQ ID NO: 601131 - DNA, 19 bp, Mus musculus
  siRNA target sequence for Siat10 (NM_018784.1,1437-1455).
ctctttttaaacgacatta

SEQ ID NO: 601132 - DNA, 19 bp, Mus musculus
  siRNA target sequence for Siat10 (NM_018784.1,1439-1457).
ctttttaaacgacattata

SEQ ID NO: 601133 - DNA, 19 bp, Mus musculus
  siRNA target sequence for Siat4c (NM_009178.2,228-246).
gtcatggtgtggtattcca

SEQ ID NO: 601134 - DNA, 19 bp, Mus musculus
  siRNA target sequence for Siat4c (NM_009178.2,251-269).
ccgagaagataggtacatt

SEQ ID NO: 601135 - DNA, 19 bp, Mus musculus
  siRNA target sequence for Siat4c (NM_009178.2,253-271).
gagaagataggtacattga

SEQ ID NO: 601136 - DNA, 19 bp, Mus musculus
  siRNA target sequence for Siat4c (NM_009178.2,331-349).
gacaggcctctaagatttt

SEQ ID NO: 601137 - DNA, 19 bp, Mus musculus
  siRNA target sequence for Siat4c (NM_009178.2,364-382).
gggaacagcccatctttct

SEQ ID NO: 601138 - DNA, 19 bp, Mus musculus
  siRNA target sequence for Siat4c (NM_009178.2,474-492).
ctggccatcactagctatt

SEQ ID NO: 601139 - DNA, 19 bp, Mus musculus
  siRNA target sequence for Siat4c (NM_009178.2,476-494).
ggccatcactagctattct

SEQ ID NO: 601140 - DNA, 19 bp, Mus musculus
  siRNA target sequence for Siat4c (NM_009178.2,477-495).
gccatcactagctattcta

SEQ ID NO: 601141 - DNA, 19 bp, Mus musculus
  siRNA target sequence for Siat4c (NM_009178.2,482-500).
cactagctattctatacct

SEQ ID NO: 601142 - DNA, 19 bp, Mus musculus
  siRNA target sequence for Siat4c (NM_009178.2,597-615).
gacgtggtcatcagattga

SEQ ID NO: 601143 - DNA, 19 bp, Mus musculus
  siRNA target sequence for Siat4c (NM_009178.2,600-618).
gtggtcatcagattgaaca

SEQ ID NO: 601144 - DNA, 19 bp, Mus musculus
  siRNA target sequence for Siat4c (NM_009178.2,602-620).
ggtcatcagattgaacaat

SEQ ID NO: 601145 - DNA, 19 bp, Mus musculus
  siRNA target sequence for Siat4c (NM_009178.2,661-679).
ccaccatacgtctcttcta

SEQ ID NO: 601146 - DNA, 19 bp, Mus musculus
  siRNA target sequence for Siat4c (NM_009178.2,662-680).
caccatacgtctcttctat

SEQ ID NO: 601147 - DNA, 19 bp, Mus musculus
  siRNA target sequence for Siat4c (NM_009178.2,690-708).
gcccactttgaccctaaaa

SEQ ID NO: 601148 - DNA, 19 bp, Mus musculus
  siRNA target sequence for Siat4c (NM_009178.2,691-709).
cccactttgaccctaaaat

SEQ ID NO: 601149 - DNA, 19 bp, Mus musculus
  siRNA target sequence for Siat4c (NM_009178.2,759-777).
gacttccactggattgaga

SEQ ID NO: 601150 - DNA, 19 bp, Mus musculus
  siRNA target sequence for Siat4c (NM_009178.2,774-792).
gagaccatcttgagtgata

SEQ ID NO: 601151 - DNA, 19 bp, Mus musculus
  siRNA target sequence for Siat4c (NM_009178.2,778-796).
ccatcttgagtgataagaa

SEQ ID NO: 601152 - DNA, 19 bp, Mus musculus
  siRNA target sequence for Siat4c (NM_009178.2,851-869).
caaacaggtccggattcta

SEQ ID NO: 601153 - DNA, 19 bp, Mus musculus
  siRNA target sequence for Siat4c (NM_009178.2,921-939).
caacagcctcgaaagatca

SEQ ID NO: 601154 - DNA, 19 bp, Mus musculus
  siRNA target sequence for Siat4c (NM_009178.2,1046-1064).
gaccatccactactatgaa

SEQ ID NO: 601155 - DNA, 19 bp, Mus musculus
  siRNA target sequence for Siat4c (NM_009178.2,1062-1080).
gaacagatcacacttaagt

SEQ ID NO: 601156 - DNA, 19 bp, Mus musculus
  siRNA target sequence for Siat4c (NM_009178.2,1085-1103).
ggcgggatcaggccataat

SEQ ID NO: 601157 - DNA, 19 bp, Mus musculus
  siRNA target sequence for Siat4c (NM_009178.2,1087-1105).
cgggatcaggccataatgt

SEQ ID NO: 601158 - DNA, 19 bp, Mus musculus
  siRNA target sequence for Siat4c (NM_009178.2,1089-1107).
ggatcaggccataatgtct

SEQ ID NO: 601159 - DNA, 19 bp, Mus musculus
  siRNA target sequence for Siat4c (NM_009178.2,1150-1168).
ctgtcaagaacctcacata

SEQ ID NO: 601160 - DNA, 19 bp, Mus musculus
  siRNA target sequence for Siat4c (NM_009178.2,1152-1170).
gtcaagaacctcacatact

SEQ ID NO: 601161 - DNA, 19 bp, Mus musculus
  siRNA target sequence for Siat5 (NM_009179.1,333-351).
gacgccagcacctctgaat

SEQ ID NO: 601162 - DNA, 19 bp, Mus musculus
  siRNA target sequence for Siat5 (NM_009179.1,352-370).
ggtttgacagccactttga

SEQ ID NO: 601163 - DNA, 19 bp, Mus musculus
  siRNA target sequence for Siat5 (NM_009179.1,363-381).
cactttgacggcaacatct

SEQ ID NO: 601164 - DNA, 19 bp, Mus musculus
  siRNA target sequence for Siat5 (NM_009179.1,385-403).
ccgtctggaccagagataa

SEQ ID NO: 601165 - DNA, 19 bp, Mus musculus
  siRNA target sequence for Siat5 (NM_009179.1,444-462).
ctacaaccccaattcaagt

SEQ ID NO: 601166 - DNA, 19 bp, Mus musculus
  siRNA target sequence for Siat5 (NM_009179.1,609-627).
gtggacagccacaacttta

SEQ ID NO: 601167 - DNA, 19 bp, Mus musculus
  siRNA target sequence for Siat5 (NM_009179.1,649-667).
cgactgtgggctttgagaa

SEQ ID NO: 601168 - DNA, 19 bp, Mus musculus
  siRNA target sequence for Siat5 (NM_009179.1,681-699).
cgaacaactcaccatttca

SEQ ID NO: 601169 - DNA, 19 bp, Mus musculus
  siRNA target sequence for Siat5 (NM_009179.1,685-703).
caactcaccatttcatgta

SEQ ID NO: 601170 - DNA, 19 bp, Mus musculus
  siRNA target sequence for Siat5 (NM_009179.1,855-873).
gagaaggtccagatttaca

SEQ ID NO: 601171 - DNA, 19 bp, Mus musculus
  siRNA target sequence for Siat5 (NM_009179.1,880-898).
ccttcttcaagtacattca

SEQ ID NO: 601172 - DNA, 19 bp, Mus musculus
  siRNA target sequence for Siat7b (NM_009180.2,185-203).
cgtacccacgagcattctt

SEQ ID NO: 601173 - DNA, 19 bp, Mus musculus
  siRNA target sequence for Siat7b (NM_009180.2,186-204).
gtacccacgagcattcttt

SEQ ID NO: 601174 - DNA, 19 bp, Mus musculus
  siRNA target sequence for Siat7b (NM_009180.2,214-232).
ccaccgaattcggaaaaca

SEQ ID NO: 601175 - DNA, 19 bp, Mus musculus
  siRNA target sequence for Siat7b (NM_009180.2,217-235).
ccgaattcggaaaacagaa

SEQ ID NO: 601176 - DNA, 19 bp, Mus musculus
  siRNA target sequence for Siat7b (NM_009180.2,218-236).
cgaattcggaaaacagaaa

SEQ ID NO: 601177 - DNA, 19 bp, Mus musculus
  siRNA target sequence for Siat7b (NM_009180.2,398-416).
ggctctcccacgaagtcat

SEQ ID NO: 601178 - DNA, 19 bp, Mus musculus
  siRNA target sequence for Siat7b (NM_009180.2,399-417).
gctctcccacgaagtcatt

SEQ ID NO: 601179 - DNA, 19 bp, Mus musculus
  siRNA target sequence for Siat7b (NM_009180.2,510-528).
ggtgggtaacggaggtatt

SEQ ID NO: 601180 - DNA, 19 bp, Mus musculus
  siRNA target sequence for Siat7b (NM_009180.2,514-532).
ggtaacggaggtattctga

SEQ ID NO: 601181 - DNA, 19 bp, Mus musculus
  siRNA target sequence for Siat7b (NM_009180.2,542-560).
ggcagggccagaaaatcga

SEQ ID NO: 601182 - DNA, 19 bp, Mus musculus
  siRNA target sequence for Siat7b (NM_009180.2,543-561).
gcagggccagaaaatcgat

SEQ ID NO: 601183 - DNA, 19 bp, Mus musculus
  siRNA target sequence for Siat7b (NM_009180.2,613-631).
cgcgacgtgggcactaaga

SEQ ID NO: 601184 - DNA, 19 bp, Mus musculus
  siRNA target sequence for Siat7b (NM_009180.2,820-838).
gacaggcctcacacctatt

SEQ ID NO: 601185 - DNA, 19 bp, Mus musculus
  siRNA target sequence for Siat7b (NM_009180.2,825-843).
gcctcacacctattttgga

SEQ ID NO: 601186 - DNA, 19 bp, Mus musculus
  siRNA target sequence for Siat7b (NM_009180.2,924-942).
gctgattaacacacgattt

SEQ ID NO: 601187 - DNA, 19 bp, Mus musculus
  siRNA target sequence for Siat7b (NM_009180.2,927-945).
gattaacacacgatttgga

SEQ ID NO: 601188 - DNA, 19 bp, Mus musculus
  siRNA target sequence for Siat7b (NM_009180.2,1015-1033).
gcctacggattcatcacaa

SEQ ID NO: 601189 - DNA, 19 bp, Mus musculus
  siRNA target sequence for Siat7b (NM_009180.2,1016-1034).
cctacggattcatcacaaa

SEQ ID NO: 601190 - DNA, 19 bp, Mus musculus
  siRNA target sequence for Siat7b (NM_009180.2,1022-1040).
gattcatcacaaacaacta

SEQ ID NO: 601191 - DNA, 19 bp, Mus musculus
  siRNA target sequence for Siat7b (NM_009180.2,1050-1068).
ctcagaccactatttcgaa

SEQ ID NO: 601192 - DNA, 19 bp, Mus musculus
  siRNA target sequence for Siat7c (NM_011372.1,101-119).
gcttgtggtgagcttcata

SEQ ID NO: 601193 - DNA, 19 bp, Mus musculus
  siRNA target sequence for Siat7c (NM_011372.1,143-161).
catgcgccttgtcaatgat

SEQ ID NO: 601194 - DNA, 19 bp, Mus musculus
  siRNA target sequence for Siat7c (NM_011372.1,192-210).
ggacagcctaagaccaaat

SEQ ID NO: 601195 - DNA, 19 bp, Mus musculus
  siRNA target sequence for Siat7c (NM_011372.1,239-257).
gcctcttcgaactcactat

SEQ ID NO: 601196 - DNA, 19 bp, Mus musculus
  siRNA target sequence for Siat7c (NM_011372.1,243-261).
cttcgaactcactatggat

SEQ ID NO: 601197 - DNA, 19 bp, Mus musculus
  siRNA target sequence for Siat7c (NM_011372.1,250-268).
ctcactatggatacataaa

SEQ ID NO: 601198 - DNA, 19 bp, Mus musculus
  siRNA target sequence for Siat7c (NM_011372.1,308-326).
ctgtgccatcgtgtcaaat

SEQ ID NO: 601199 - DNA, 19 bp, Mus musculus
  siRNA target sequence for Siat7c (NM_011372.1,420-438).
gaagatgtcggctacatga

SEQ ID NO: 601200 - DNA, 19 bp, Mus musculus
  siRNA target sequence for Siat7c (NM_011372.1,423-441).
gatgtcggctacatgacaa

SEQ ID NO: 601201 - DNA, 19 bp, Mus musculus
  siRNA target sequence for Siat7c (NM_011372.1,514-532).
gcaggaccatttatgttat

SEQ ID NO: 601202 - DNA, 19 bp, Mus musculus
  siRNA target sequence for Siat7c (NM_011372.1,565-583).
gtaatggcatcgtgtacaa

SEQ ID NO: 601203 - DNA, 19 bp, Mus musculus
  siRNA target sequence for Siat7c (NM_011372.1,570-588).
ggcatcgtgtacaacatgt

SEQ ID NO: 601204 - DNA, 19 bp, Mus musculus
  siRNA target sequence for Siat7c (NM_011372.1,571-589).
gcatcgtgtacaacatgtt

SEQ ID NO: 601205 - DNA, 19 bp, Mus musculus
  siRNA target sequence for Siat7c (NM_011372.1,572-590).
catcgtgtacaacatgtta

SEQ ID NO: 601206 - DNA, 19 bp, Mus musculus
  siRNA target sequence for Siat7c (NM_011372.1,654-672).
cactgcgatagagtgttta

SEQ ID NO: 601207 - DNA, 19 bp, Mus musculus
  siRNA target sequence for Siat7c (NM_011372.1,658-676).
gcgatagagtgtttaagga

SEQ ID NO: 601208 - DNA, 19 bp, Mus musculus
  siRNA target sequence for Siat7c (NM_011372.1,659-677).
cgatagagtgtttaaggat

SEQ ID NO: 601209 - DNA, 19 bp, Mus musculus
  siRNA target sequence for Siat7c (NM_011372.1,767-785).
ccacgtctacgggatgata

SEQ ID NO: 601210 - DNA, 19 bp, Mus musculus
  siRNA target sequence for Siat7c (NM_011372.1,768-786).
cacgtctacgggatgataa

SEQ ID NO: 601211 - DNA, 19 bp, Mus musculus
  siRNA target sequence for Siat7c (NM_011372.1,770-788).
cgtctacgggatgataaat

SEQ ID NO: 601212 - DNA, 19 bp, Mus musculus
  siRNA target sequence for Siat7c (NM_011372.1,773-791).
ctacgggatgataaatgaa

SEQ ID NO: 601213 - DNA, 19 bp, Mus musculus
  siRNA target sequence for Siat7c (NM_011372.1,817-835).
gaaaagtcccctatcacta

SEQ ID NO: 601214 - DNA, 19 bp, Mus musculus
  siRNA target sequence for Siat7c (NM_011372.1,824-842).
cccctatcactactatgaa

SEQ ID NO: 601215 - DNA, 19 bp, Mus musculus
  siRNA target sequence for Siat7c (NM_011372.1,826-844).
cctatcactactatgaaca

SEQ ID NO: 601216 - DNA, 19 bp, Mus musculus
  siRNA target sequence for Siat7c (NM_011372.1,827-845).
ctatcactactatgaacaa

SEQ ID NO: 601217 - DNA, 19 bp, Mus musculus
  siRNA target sequence for Siat7c (NM_011372.1,947-965).
gcacagaatagtattcaca

SEQ ID NO: 601218 - DNA, 19 bp, Mus musculus
  siRNA target sequence for Siat7e (NM_012028.2,217-235).
gtctggcagtgtgtttagt

SEQ ID NO: 601219 - DNA, 19 bp, Mus musculus
  siRNA target sequence for Siat7e (NM_012028.2,449-467).
caagcccctgaaaatgcat

SEQ ID NO: 601220 - DNA, 19 bp, Mus musculus
  siRNA target sequence for Siat7e (NM_012028.2,545-563).
gtgtgttatccgcatgaat

SEQ ID NO: 601221 - DNA, 19 bp, Mus musculus
  siRNA target sequence for Siat7e (NM_012028.2,547-565).
gtgttatccgcatgaatga

SEQ ID NO: 601222 - DNA, 19 bp, Mus musculus
  siRNA target sequence for Siat7e (NM_012028.2,681-699).
cagggcaccgtgttcatct

SEQ ID NO: 601223 - DNA, 19 bp, Mus musculus
  siRNA target sequence for Siat7e (NM_012028.2,891-909).
ggctggttcaccatgacaa

SEQ ID NO: 601224 - DNA, 19 bp, Mus musculus
  siRNA target sequence for Siat7e (NM_012028.2,892-910).
gctggttcaccatgacaat

SEQ ID NO: 601225 - DNA, 19 bp, Mus musculus
  siRNA target sequence for Siat7e (NM_012028.2,893-911).
ctggttcaccatgacaatt

SEQ ID NO: 601226 - DNA, 19 bp, Mus musculus
  siRNA target sequence for Siat7e (NM_012028.2,984-1002).
ccttccgtaccctatcatt

SEQ ID NO: 601227 - DNA, 19 bp, Mus musculus
  siRNA target sequence for Siat7e (NM_012028.2,985-1003).
cttccgtaccctatcatta

SEQ ID NO: 601228 - DNA, 19 bp, Mus musculus
  siRNA target sequence for Siat7e (NM_012028.2,989-1007).
cgtaccctatcattactat

SEQ ID NO: 601229 - DNA, 19 bp, Mus musculus
  siRNA target sequence for Siat7e (NM_012028.2,1017-1035).
ggacccgatgaatgtacaa

SEQ ID NO: 601230 - DNA, 19 bp, Mus musculus
  siRNA target sequence for Siat7e (NM_012028.2,1018-1036).
gacccgatgaatgtacaat

SEQ ID NO: 601231 - DNA, 19 bp, Mus musculus
  siRNA target sequence for Siat7e (NM_012028.2,1076-1094).
ccgtttcattacagagaaa

SEQ ID NO: 601232 - DNA, 19 bp, Mus musculus
  siRNA target sequence for Siat7e (NM_012028.2,1087-1105).
cagagaaacgggtgtttaa

SEQ ID NO: 601233 - DNA, 19 bp, Mus musculus
  siRNA target sequence for Siat7e (NM_012028.2,1089-1107).
gagaaacgggtgtttaaga

SEQ ID NO: 601234 - DNA, 19 bp, Mus musculus
  siRNA target sequence for Siat7e (NM_012028.2,1111-1129).
gggcacggacattcaacat

SEQ ID NO: 601235 - DNA, 19 bp, Mus musculus
  siRNA target sequence for Siat7e (NM_012028.2,1112-1130).
ggcacggacattcaacatt

SEQ ID NO: 601236 - DNA, 19 bp, Mus musculus
  siRNA target sequence for Siat7e (NM_012028.2,1116-1134).
cggacattcaacattcact

SEQ ID NO: 601237 - DNA, 19 bp, Mus musculus
  siRNA target sequence for Siat8f (NM_145838.1,326-344).
ctgcaatatagcttgaact

SEQ ID NO: 601238 - DNA, 19 bp, Mus musculus
  siRNA target sequence for Siat8f (NM_145838.1,431-449).
gcagaagaatatgacaatt

SEQ ID NO: 601239 - DNA, 19 bp, Mus musculus
  siRNA target sequence for Siat8f (NM_145838.1,469-487).
ctgttgcgatgccattcaa

SEQ ID NO: 601240 - DNA, 19 bp, Mus musculus
  siRNA target sequence for Siat8f (NM_145838.1,471-489).
gttgcgatgccattcaaga

SEQ ID NO: 601241 - DNA, 19 bp, Mus musculus
  siRNA target sequence for Siat8f (NM_145838.1,474-492).
gcgatgccattcaagactt

SEQ ID NO: 601242 - DNA, 19 bp, Mus musculus
  siRNA target sequence for Siat8f (NM_145838.1,515-533).
ccagtggggactaacatga

SEQ ID NO: 601243 - DNA, 19 bp, Mus musculus
  siRNA target sequence for Siat8f (NM_145838.1,534-552).
gctacgaggtggaaagcaa

SEQ ID NO: 601244 - DNA, 19 bp, Mus musculus
  siRNA target sequence for Siat8f (NM_145838.1,562-580).
ccccattcgagagaacatt

SEQ ID NO: 601245 - DNA, 19 bp, Mus musculus
  siRNA target sequence for Siat8f (NM_145838.1,563-581).
cccattcgagagaacattt

SEQ ID NO: 601246 - DNA, 19 bp, Mus musculus
  siRNA target sequence for Siat8f (NM_145838.1,564-582).
ccattcgagagaacatttt

SEQ ID NO: 601247 - DNA, 19 bp, Mus musculus
  siRNA target sequence for Siat8f (NM_145838.1,594-612).
cagtgtcgcagccttttgt

SEQ ID NO: 601248 - DNA, 19 bp, Mus musculus
  siRNA target sequence for Siat8f (NM_145838.1,644-662).
ggtaatgggggaattctca

SEQ ID NO: 601249 - DNA, 19 bp, Mus musculus
  siRNA target sequence for Siat8f (NM_145838.1,675-693).
gcggagcagaaattgataa

SEQ ID NO: 601250 - DNA, 19 bp, Mus musculus
  siRNA target sequence for Siat8f (NM_145838.1,730-748).
cacagggagcgctagtaaa

SEQ ID NO: 601251 - DNA, 19 bp, Mus musculus
  siRNA target sequence for Siat8f (NM_145838.1,732-750).
cagggagcgctagtaaaga

SEQ ID NO: 601252 - DNA, 19 bp, Mus musculus
  siRNA target sequence for Siat8f (NM_145838.1,735-753).
ggagcgctagtaaagatgt

SEQ ID NO: 601253 - DNA, 19 bp, Mus musculus
  siRNA target sequence for Siat8f (NM_145838.1,736-754).
gagcgctagtaaagatgtt

SEQ ID NO: 601254 - DNA, 19 bp, Mus musculus
  siRNA target sequence for Siat8f (NM_145838.1,789-807).
gcattataaccctgaagta

SEQ ID NO: 601255 - DNA, 19 bp, Mus musculus
  siRNA target sequence for Siat8f (NM_145838.1,998-1016).
gctcttttctggagaacta

SEQ ID NO: 601256 - DNA, 19 bp, Mus musculus
  siRNA target sequence for Siat8f (NM_145838.1,1099-1117).
cggattctggcctttctct

SEQ ID NO: 601257 - DNA, 19 bp, Mus musculus
  siRNA target sequence for Siat8f (NM_145838.1,1101-1119).
gattctggcctttctctaa

SEQ ID NO: 601258 - DNA, 19 bp, Mus musculus
  siRNA target sequence for Siat8f (NM_145838.1,1184-1202).
caccagatgcctaaagaat

SEQ ID NO: 601259 - DNA, 19 bp, Mus musculus
  siRNA target sequence for Siat8f (NM_145838.1,1233-1251).
gaatcctcaaactgcaatt

SEQ ID NO: 601260 - DNA, 19 bp, Mus musculus
  siRNA target sequence for St6gal2 (NM_172829.1,208-226).
gtttgggggctcctctttt

SEQ ID NO: 601261 - DNA, 19 bp, Mus musculus
  siRNA target sequence for St6gal2 (NM_172829.1,323-341).
gcaagcagcgggtcatcat

SEQ ID NO: 601262 - DNA, 19 bp, Mus musculus
  siRNA target sequence for St6gal2 (NM_172829.1,460-478).
gccccaaatggctttgaca

SEQ ID NO: 601263 - DNA, 19 bp, Mus musculus
  siRNA target sequence for St6gal2 (NM_172829.1,462-480).
cccaaatggctttgacaat

SEQ ID NO: 601264 - DNA, 19 bp, Mus musculus
  siRNA target sequence for St6gal2 (NM_172829.1,504-522).
ggttgggaggaaatcacaa

SEQ ID NO: 601265 - DNA, 19 bp, Mus musculus
  siRNA target sequence for St6gal2 (NM_172829.1,535-553).
cccgaggaagatagctatt

SEQ ID NO: 601266 - DNA, 19 bp, Mus musculus
  siRNA target sequence for St6gal2 (NM_172829.1,767-785).
ccgtgtcctctaagatgtt

SEQ ID NO: 601267 - DNA, 19 bp, Mus musculus
  siRNA target sequence for St6gal2 (NM_172829.1,769-787).
gtgtcctctaagatgttga

SEQ ID NO: 601268 - DNA, 19 bp, Mus musculus
  siRNA target sequence for St6gal2 (NM_172829.1,1022-1040).
gcagctgcgcagttgtcat

SEQ ID NO: 601269 - DNA, 19 bp, Mus musculus
  siRNA target sequence for St6gal2 (NM_172829.1,1077-1095).
ggaaatcgattctcatgat

SEQ ID NO: 601270 - DNA, 19 bp, Mus musculus
  siRNA target sequence for St6gal2 (NM_172829.1,1120-1138).
cctacacgtggctatgaga

SEQ ID NO: 601271 - DNA, 19 bp, Mus musculus
  siRNA target sequence for St6gal2 (NM_172829.1,1121-1139).
ctacacgtggctatgagaa

SEQ ID NO: 601272 - DNA, 19 bp, Mus musculus
  siRNA target sequence for St6gal2 (NM_172829.1,1157-1175).
ccacagtacgcatcattaa

SEQ ID NO: 601273 - DNA, 19 bp, Mus musculus
  siRNA target sequence for St6gal2 (NM_172829.1,1158-1176).
cacagtacgcatcattaat

SEQ ID NO: 601274 - DNA, 19 bp, Mus musculus
  siRNA target sequence for St6gal2 (NM_172829.1,1206-1224).
cttcattgacagtgcttta

SEQ ID NO: 601275 - DNA, 19 bp, Mus musculus
  siRNA target sequence for St6gal2 (NM_172829.1,1219-1237).
gctttatataaagatgtta

SEQ ID NO: 601276 - DNA, 19 bp, Mus musculus
  siRNA target sequence for St6gal2 (NM_172829.1,1251-1269).
ggatcctgctccttattct

SEQ ID NO: 601277 - DNA, 19 bp, Mus musculus
  siRNA target sequence for St6gal2 (NM_172829.1,1261-1279).
ccttattctgccaatctta

SEQ ID NO: 601278 - DNA, 19 bp, Mus musculus
  siRNA target sequence for St6gal2 (NM_172829.1,1276-1294).
cttaacctgtggtataaga

SEQ ID NO: 601279 - DNA, 19 bp, Mus musculus
  siRNA target sequence for St6gal2 (NM_172829.1,1297-1315).
ccagattacaaccttttca

SEQ ID NO: 601280 - DNA, 19 bp, Mus musculus
  siRNA target sequence for St6gal2 (NM_172829.1,1305-1323).
caaccttttcactccatat

SEQ ID NO: 601281 - DNA, 19 bp, Mus musculus
  siRNA target sequence for St6gal2 (NM_172829.1,1345-1363).
ccgactcagccattttaca

SEQ ID NO: 601282 - DNA, 19 bp, Mus musculus
  siRNA target sequence for St6gal2 (NM_172829.1,1366-1384).
cttcaccccaagttcatat

SEQ ID NO: 601283 - DNA, 19 bp, Mus musculus
  siRNA target sequence for St6gal2 (NM_172829.1,1385-1403).
ggcagctttgggacattat

SEQ ID NO: 601284 - DNA, 19 bp, Mus musculus
  siRNA target sequence for St6gal2 (NM_172829.1,1398-1416).
cattatccaggagaataca

SEQ ID NO: 601285 - DNA, 19 bp, Mus musculus
  siRNA target sequence for St6gal2 (NM_172829.1,1437-1455).
cccaccatcttctggtttt

SEQ ID NO: 601286 - DNA, 19 bp, Mus musculus
  siRNA target sequence for Art1 (NM_009710.2,151-169).
gttcaggttcaaagttact

SEQ ID NO: 601287 - DNA, 19 bp, Mus musculus
  siRNA target sequence for Art1 (NM_009710.2,174-192).
ctcacaactagacatcttt

SEQ ID NO: 601288 - DNA, 19 bp, Mus musculus
  siRNA target sequence for Art1 (NM_009710.2,216-234).
ggccccagcgtcctttgat

SEQ ID NO: 601289 - DNA, 19 bp, Mus musculus
  siRNA target sequence for Art1 (NM_009710.2,329-347).
gggctcaggccaacaatca

SEQ ID NO: 601290 - DNA, 19 bp, Mus musculus
  siRNA target sequence for Art1 (NM_009710.2,331-349).
gctcaggccaacaatcagt

SEQ ID NO: 601291 - DNA, 19 bp, Mus musculus
  siRNA target sequence for Art1 (NM_009710.2,458-476).
ccctgcacaaggagttcaa

SEQ ID NO: 601292 - DNA, 19 bp, Mus musculus
  siRNA target sequence for Art1 (NM_009710.2,801-819).
gctgatccctcctttcgaa

SEQ ID NO: 601293 - DNA, 19 bp, Mus musculus
  siRNA target sequence for Art1 (NM_009710.2,1023-1041).
gagcgcccttccagagaat

SEQ ID NO: 601294 - DNA, 19 bp, Mus musculus
  siRNA target sequence for Art2a (NM_007490.1,303-321).
catccacagaagccttaat

SEQ ID NO: 601295 - DNA, 19 bp, Mus musculus
  siRNA target sequence for Art2a (NM_007490.1,315-333).
ccttaatgaggctactaga

SEQ ID NO: 601296 - DNA, 19 bp, Mus musculus
  siRNA target sequence for Art2a (NM_007490.1,329-347).
ctagagagttcaaaataaa

SEQ ID NO: 601297 - DNA, 19 bp, Mus musculus
  siRNA target sequence for Art2a (NM_007490.1,443-461).
ctaatgtcaggtttcgtta

SEQ ID NO: 601298 - DNA, 19 bp, Mus musculus
  siRNA target sequence for Art2a (NM_007490.1,513-531).
ccggagtgtagctacttct

SEQ ID NO: 601299 - DNA, 19 bp, Mus musculus
  siRNA target sequence for Art2a (NM_007490.1,514-532).
cggagtgtagctacttcta

SEQ ID NO: 601300 - DNA, 19 bp, Mus musculus
  siRNA target sequence for Art2a (NM_007490.1,543-561).
caatggacaggggacatta

SEQ ID NO: 601301 - DNA, 19 bp, Mus musculus
  siRNA target sequence for Art2a (NM_007490.1,585-603).
ggctcacatcaaacattgt

SEQ ID NO: 601302 - DNA, 19 bp, Mus musculus
  siRNA target sequence for Art2a (NM_007490.1,586-604).
gctcacatcaaacattgtt

SEQ ID NO: 601303 - DNA, 19 bp, Mus musculus
  siRNA target sequence for Art2a (NM_007490.1,674-692).
gtgtcgaacggtatatcca

SEQ ID NO: 601304 - DNA, 19 bp, Mus musculus
  siRNA target sequence for Art2a (NM_007490.1,676-694).
gtcgaacggtatatccaaa

SEQ ID NO: 601305 - DNA, 19 bp, Mus musculus
  siRNA target sequence for Art2a (NM_007490.1,678-696).
cgaacggtatatccaaatt

SEQ ID NO: 601306 - DNA, 19 bp, Mus musculus
  siRNA target sequence for Art2a (NM_007490.1,679-697).
gaacggtatatccaaattt

SEQ ID NO: 601307 - DNA, 19 bp, Mus musculus
  siRNA target sequence for Art2a (NM_007490.1,738-756).
cttctatagcggttctact

SEQ ID NO: 601308 - DNA, 19 bp, Mus musculus
  siRNA target sequence for Art2a (NM_007490.1,741-759).
ctatagcggttctactcaa

SEQ ID NO: 601309 - DNA, 19 bp, Mus musculus
  siRNA target sequence for Art2b (NM_019915.1,296-314).
ctgggaacctcgctataga

SEQ ID NO: 601310 - DNA, 19 bp, Mus musculus
  siRNA target sequence for Art2b (NM_019915.1,298-316).
gggaacctcgctatagatt

SEQ ID NO: 601311 - DNA, 19 bp, Mus musculus
  siRNA target sequence for Art2b (NM_019915.1,299-317).
ggaacctcgctatagattt

SEQ ID NO: 601312 - DNA, 19 bp, Mus musculus
  siRNA target sequence for Art2b (NM_019915.1,300-318).
gaacctcgctatagatttt

SEQ ID NO: 601313 - DNA, 19 bp, Mus musculus
  siRNA target sequence for Art2b (NM_019915.1,304-322).
ctcgctatagattttaaca

SEQ ID NO: 601314 - DNA, 19 bp, Mus musculus
  siRNA target sequence for Art2b (NM_019915.1,306-324).
cgctatagattttaacaga

SEQ ID NO: 601315 - DNA, 19 bp, Mus musculus
  siRNA target sequence for Art2b (NM_019915.1,323-341).
gagctgttagagacttcaa

SEQ ID NO: 601316 - DNA, 19 bp, Mus musculus
  siRNA target sequence for Art2b (NM_019915.1,325-343).
gctgttagagacttcaaga

SEQ ID NO: 601317 - DNA, 19 bp, Mus musculus
  siRNA target sequence for Art2b (NM_019915.1,440-458).
gtactaaagtcatgtttga

SEQ ID NO: 601318 - DNA, 19 bp, Mus musculus
  siRNA target sequence for Art2b (NM_019915.1,545-563).
gtaatcatgggacactatt

SEQ ID NO: 601319 - DNA, 19 bp, Mus musculus
  siRNA target sequence for Art2b (NM_019915.1,575-593).
cctgcttgggggttaatat

SEQ ID NO: 601320 - DNA, 19 bp, Mus musculus
  siRNA target sequence for Art2b (NM_019915.1,582-600).
gggggttaatatcaaagaa

SEQ ID NO: 601321 - DNA, 19 bp, Mus musculus
  siRNA target sequence for Art2b (NM_019915.1,583-601).
ggggttaatatcaaagaat

SEQ ID NO: 601322 - DNA, 19 bp, Mus musculus
  siRNA target sequence for Art2b (NM_019915.1,584-602).
gggttaatatcaaagaatt

SEQ ID NO: 601323 - DNA, 19 bp, Mus musculus
  siRNA target sequence for Art2b (NM_019915.1,663-681).
cacagcacaaaatgataat

SEQ ID NO: 601324 - DNA, 19 bp, Mus musculus
  siRNA target sequence for Art2b (NM_019915.1,755-773).
ctcaaacagtcaacattga

SEQ ID NO: 601325 - DNA, 19 bp, Mus musculus
  siRNA target sequence for Art2b (NM_019915.1,765-783).
caacattgatttcagtata

SEQ ID NO: 601326 - DNA, 19 bp, Mus musculus
  siRNA target sequence for Art2b (NM_019915.1,768-786).
cattgatttcagtatatca

SEQ ID NO: 601327 - DNA, 19 bp, Mus musculus
  siRNA target sequence for Art4 (NM_026639.1,463-481).
cttgacacctgattccttt

SEQ ID NO: 601328 - DNA, 19 bp, Mus musculus
  siRNA target sequence for Art4 (NM_026639.1,466-484).
gacacctgattcctttgat

SEQ ID NO: 601329 - DNA, 19 bp, Mus musculus
  siRNA target sequence for Art4 (NM_026639.1,477-495).
cctttgatgatcaatacca

SEQ ID NO: 601330 - DNA, 19 bp, Mus musculus
  siRNA target sequence for Art4 (NM_026639.1,478-496).
ctttgatgatcaataccaa

SEQ ID NO: 601331 - DNA, 19 bp, Mus musculus
  siRNA target sequence for Art4 (NM_026639.1,523-541).
gctaaatcaaggagactat

SEQ ID NO: 601332 - DNA, 19 bp, Mus musculus
  siRNA target sequence for Art4 (NM_026639.1,524-542).
ctaaatcaaggagactatt

SEQ ID NO: 601333 - DNA, 19 bp, Mus musculus
  siRNA target sequence for Art4 (NM_026639.1,530-548).
caaggagactatttcataa

SEQ ID NO: 601334 - DNA, 19 bp, Mus musculus
  siRNA target sequence for Art4 (NM_026639.1,747-765).
gtcagtcattccacttcaa

SEQ ID NO: 601335 - DNA, 19 bp, Mus musculus
  siRNA target sequence for Art4 (NM_026639.1,887-905).
gtaggttccaccattcgat

SEQ ID NO: 601336 - DNA, 19 bp, Mus musculus
  siRNA target sequence for Art4 (NM_026639.1,1039-1057).
cccctatgagttatttgaa

SEQ ID NO: 601337 - DNA, 19 bp, Mus musculus
  siRNA target sequence for Art4 (NM_026639.1,1077-1095).
gccccaaaggagatttgat

SEQ ID NO: 601338 - DNA, 19 bp, Mus musculus
  siRNA target sequence for Art4 (NM_026639.1,1112-1130).
gggaacatgagcacgtata

SEQ ID NO: 601339 - DNA, 19 bp, Mus musculus
  siRNA target sequence for Art4 (NM_026639.1,1113-1131).
ggaacatgagcacgtataa

SEQ ID NO: 601340 - DNA, 19 bp, Mus musculus
  siRNA target sequence for Art4 (NM_026639.1,1208-1226).
gttgttatctcgtccaaaa

SEQ ID NO: 601341 - DNA, 19 bp, Mus musculus
  siRNA target sequence for Art4 (NM_026639.1,1211-1229).
gttatctcgtccaaaagca

SEQ ID NO: 601342 - DNA, 19 bp, Mus musculus
  siRNA target sequence for Art4 (NM_026639.1,1228-1246).
cagagcgcaaaggaatcta

SEQ ID NO: 601343 - DNA, 19 bp, Mus musculus
  siRNA target sequence for Art4 (NM_026639.1,1230-1248).
gagcgcaaaggaatctact

SEQ ID NO: 601344 - DNA, 19 bp, Mus musculus
  siRNA target sequence for Art4 (NM_026639.1,1240-1258).
gaatctactggctcctttt

SEQ ID NO: 601345 - DNA, 19 bp, Mus musculus
  siRNA target sequence for Adprtl3 (NM_145619.2,344-362).
gtccacgaggactatgact

SEQ ID NO: 601346 - DNA, 19 bp, Mus musculus
  siRNA target sequence for Adprtl3 (NM_145619.2,590-608).
gcccagcccaacaagtaca

SEQ ID NO: 601347 - DNA, 19 bp, Mus musculus
  siRNA target sequence for Adprtl3 (NM_145619.2,639-657).
gccaagaggctgtagtgaa

SEQ ID NO: 601348 - DNA, 19 bp, Mus musculus
  siRNA target sequence for Adprtl3 (NM_145619.2,1143-1161).
ccggggagtccgagtacaa

SEQ ID NO: 601349 - DNA, 19 bp, Mus musculus
  siRNA target sequence for Adprtl3 (NM_145619.2,1152-1170).
ccgagtacaaggcaataca

SEQ ID NO: 601350 - DNA, 19 bp, Mus musculus
  siRNA target sequence for Adprtl3 (NM_145619.2,1208-1226).
ccagacctgcggcatgttt

SEQ ID NO: 601351 - DNA, 19 bp, Mus musculus
  siRNA target sequence for Adprtl3 (NM_145619.2,1213-1231).
cctgcggcatgtttggaaa

SEQ ID NO: 601352 - DNA, 19 bp, Mus musculus
  siRNA target sequence for Adprtl3 (NM_145619.2,1217-1235).
cggcatgtttggaaagtga

SEQ ID NO: 601353 - DNA, 19 bp, Mus musculus
  siRNA target sequence for Adprtl3 (NM_145619.2,1373-1391).
cgtgttggcaagggtattt

SEQ ID NO: 601354 - DNA, 19 bp, Mus musculus
  siRNA target sequence for Adprtl3 (NM_145619.2,1649-1667).
gtgcagtgcccgtcattca

SEQ ID NO: 601355 - DNA, 19 bp, Mus musculus
  siRNA target sequence for Adprtl3 (NM_145619.2,1652-1670).
cagtgcccgtcattcaaaa

SEQ ID NO: 601356 - DNA, 19 bp, Mus musculus
  siRNA target sequence for Adprtl3 (NM_145619.2,1685-1703).
cagagtgaatacctcatat

SEQ ID NO: 601357 - DNA, 19 bp, Mus musculus
  siRNA target sequence for Upp1 (NM_009477.1,335-353).
catccaactttcaaatcca

SEQ ID NO: 601358 - DNA, 19 bp, Mus musculus
  siRNA target sequence for Upp1 (NM_009477.1,375-393).
gacgtgctctaccatttca

SEQ ID NO: 601359 - DNA, 19 bp, Mus musculus
  siRNA target sequence for Upp1 (NM_009477.1,400-418).
gcactagcacacacgattt

SEQ ID NO: 601360 - DNA, 19 bp, Mus musculus
  siRNA target sequence for Upp1 (NM_009477.1,428-446).
gtttggagacgtgaagttt

SEQ ID NO: 601361 - DNA, 19 bp, Mus musculus
  siRNA target sequence for Upp1 (NM_009477.1,432-450).
ggagacgtgaagtttgtgt

SEQ ID NO: 601362 - DNA, 19 bp, Mus musculus
  siRNA target sequence for Upp1 (NM_009477.1,471-489).
cggatgaacaccttcatca

SEQ ID NO: 601363 - DNA, 19 bp, Mus musculus
  siRNA target sequence for Upp1 (NM_009477.1,476-494).
gaacaccttcatcaagtat

SEQ ID NO: 601364 - DNA, 19 bp, Mus musculus
  siRNA target sequence for Upp1 (NM_009477.1,516-534).
gaccatccagggaaggaat

SEQ ID NO: 601365 - DNA, 19 bp, Mus musculus
  siRNA target sequence for Upp1 (NM_009477.1,518-536).
ccatccagggaaggaatat

SEQ ID NO: 601366 - DNA, 19 bp, Mus musculus
  siRNA target sequence for Upp1 (NM_009477.1,558-576).
gaccgctacgccatgtata

SEQ ID NO: 601367 - DNA, 19 bp, Mus musculus
  siRNA target sequence for Upp1 (NM_009477.1,560-578).
ccgctacgccatgtataaa

SEQ ID NO: 601368 - DNA, 19 bp, Mus musculus
  siRNA target sequence for Upp1 (NM_009477.1,603-621).
catggcatgggcattcctt

SEQ ID NO: 601369 - DNA, 19 bp, Mus musculus
  siRNA target sequence for Upp1 (NM_009477.1,618-636).
ccttccatcggcatcatgt

SEQ ID NO: 601370 - DNA, 19 bp, Mus musculus
  siRNA target sequence for Upp1 (NM_009477.1,619-637).
cttccatcggcatcatgtt

SEQ ID NO: 601371 - DNA, 19 bp, Mus musculus
  siRNA target sequence for Upp1 (NM_009477.1,862-880).
cctcagacctgaatgagtt

SEQ ID NO: 601372 - DNA, 19 bp, Mus musculus
  siRNA target sequence for Upp1 (NM_009477.1,907-925).
gcaccttggacttctatga

SEQ ID NO: 601373 - DNA, 19 bp, Mus musculus
  siRNA target sequence for Upp1 (NM_009477.1,1006-1024).
cgggtgtccgaaatatcga

SEQ ID NO: 601374 - DNA, 19 bp, Mus musculus
  siRNA target sequence for Upp1 (NM_009477.1,1171-1189).
ggctagtgggccacttcat

SEQ ID NO: 601375 - DNA, 19 bp, Mus musculus
  siRNA target sequence for Upp1 (NM_009477.1,1173-1191).
ctagtgggccacttcatca

SEQ ID NO: 601376 - DNA, 19 bp, Mus musculus
  siRNA target sequence for Upp1 (NM_009477.1,1179-1197).
ggccacttcatcaagaaga

SEQ ID NO: 601377 - DNA, 19 bp, Mus musculus
  siRNA target sequence for Aprt (NM_009698.1,192-210).
gcggcaagatcgactacat

SEQ ID NO: 601378 - DNA, 19 bp, Mus musculus
  siRNA target sequence for Aprt (NM_009698.1,387-405).
ggcagagagtggtcattgt

SEQ ID NO: 601379 - DNA, 19 bp, Mus musculus
  siRNA target sequence for Aprt (NM_009698.1,523-541).
ggagaggctaggacctata

SEQ ID NO: 601380 - DNA, 19 bp, Mus musculus
  siRNA target sequence for Aprt (NM_009698.1,533-551).
ggacctataccattcttct

SEQ ID NO: 601381 - DNA, 19 bp, Mus musculus
  siRNA target sequence for Umps (NM_009471.1,173-191).
cagtcaggtcgcagacatt

SEQ ID NO: 601382 - DNA, 19 bp, Mus musculus
  siRNA target sequence for Umps (NM_009471.1,175-193).
gtcaggtcgcagacatttt

SEQ ID NO: 601383 - DNA, 19 bp, Mus musculus
  siRNA target sequence for Umps (NM_009471.1,213-231).
gcggggatcagttttgaca

SEQ ID NO: 601384 - DNA, 19 bp, Mus musculus
  siRNA target sequence for Umps (NM_009471.1,291-309).
cacattcccatgctcatta

SEQ ID NO: 601385 - DNA, 19 bp, Mus musculus
  siRNA target sequence for Umps (NM_009471.1,313-331).
ggaaggaaacaaaggatta

SEQ ID NO: 601386 - DNA, 19 bp, Mus musculus
  siRNA target sequence for Umps (NM_009471.1,334-352).
gtaccaagcgccttgtaga

SEQ ID NO: 601387 - DNA, 19 bp, Mus musculus
  siRNA target sequence for Umps (NM_009471.1,345-363).
cttgtagaaggagagatta

SEQ ID NO: 601388 - DNA, 19 bp, Mus musculus
  siRNA target sequence for Umps (NM_009471.1,403-421).
ccagcggagccagtgtttt

SEQ ID NO: 601389 - DNA, 19 bp, Mus musculus
  siRNA target sequence for Umps (NM_009471.1,406-424).
gcggagccagtgttttgga

SEQ ID NO: 601390 - DNA, 19 bp, Mus musculus
  siRNA target sequence for Umps (NM_009471.1,443-461).
gaaggagggtctaaaggta

SEQ ID NO: 601391 - DNA, 19 bp, Mus musculus
  siRNA target sequence for Umps (NM_009471.1,449-467).
gggtctaaaggtaactgat

SEQ ID NO: 601392 - DNA, 19 bp, Mus musculus
  siRNA target sequence for Umps (NM_009471.1,553-571).
cccaaatgctggagattct

SEQ ID NO: 601393 - DNA, 19 bp, Mus musculus
  siRNA target sequence for Umps (NM_009471.1,610-628).
gagtgaagaggttcattca

SEQ ID NO: 601394 - DNA, 19 bp, Mus musculus
  siRNA target sequence for Umps (NM_009471.1,851-869).
catctgcatgctcaaaact

SEQ ID NO: 601395 - DNA, 19 bp, Mus musculus
  siRNA target sequence for Umps (NM_009471.1,854-872).
ctgcatgctcaaaactcat

SEQ ID NO: 601396 - DNA, 19 bp, Mus musculus
  siRNA target sequence for Umps (NM_009471.1,928-946).
caaaacgccacgagttctt

SEQ ID NO: 601397 - DNA, 19 bp, Mus musculus
  siRNA target sequence for Umps (NM_009471.1,933-951).
cgccacgagttcttaatat

SEQ ID NO: 601398 - DNA, 19 bp, Mus musculus
  siRNA target sequence for Umps (NM_009471.1,934-952).
gccacgagttcttaatatt

SEQ ID NO: 601399 - DNA, 19 bp, Mus musculus
  siRNA target sequence for Umps (NM_009471.1,935-953).
ccacgagttcttaatattt

SEQ ID NO: 601400 - DNA, 19 bp, Mus musculus
  siRNA target sequence for Umps (NM_009471.1,959-977).
caggaaattcgctgatatt

SEQ ID NO: 601401 - DNA, 19 bp, Mus musculus
  siRNA target sequence for Umps (NM_009471.1,962-980).
gaaattcgctgatattgga

SEQ ID NO: 601402 - DNA, 19 bp, Mus musculus
  siRNA target sequence for Umps (NM_009471.1,972-990).
gatattggaaacacagtta

SEQ ID NO: 601403 - DNA, 19 bp, Mus musculus
  siRNA target sequence for Umps (NM_009471.1,1002-1020).
gaaagtggcacctttaaaa

SEQ ID NO: 601404 - DNA, 19 bp, Mus musculus
  siRNA target sequence for Umps (NM_009471.1,1008-1026).
ggcacctttaaaatagctt

SEQ ID NO: 601405 - DNA, 19 bp, Mus musculus
  siRNA target sequence for Umps (NM_009471.1,1024-1042).
cttcatgggcagatatagt

SEQ ID NO: 601406 - DNA, 19 bp, Mus musculus
  siRNA target sequence for Umps (NM_009471.1,1027-1045).
catgggcagatatagtgaa

SEQ ID NO: 601407 - DNA, 19 bp, Mus musculus
  siRNA target sequence for Umps (NM_009471.1,1060-1078).
caggctcaggagttgtgaa

SEQ ID NO: 601408 - DNA, 19 bp, Mus musculus
  siRNA target sequence for Umps (NM_009471.1,1117-1135).
gcctgctcattgcagaaat

SEQ ID NO: 601409 - DNA, 19 bp, Mus musculus
  siRNA target sequence for Umps (NM_009471.1,1119-1137).
ctgctcattgcagaaatga

SEQ ID NO: 601410 - DNA, 19 bp, Mus musculus
  siRNA target sequence for Umps (NM_009471.1,1150-1168).
ccttggccactggaaacta

SEQ ID NO: 601411 - DNA, 19 bp, Mus musculus
  siRNA target sequence for Umps (NM_009471.1,1197-1215).
gagcactgtgaatttgtca

SEQ ID NO: 601412 - DNA, 19 bp, Mus musculus
  siRNA target sequence for Umps (NM_009471.1,1232-1250).
ctcccgagtaagcatgaaa

SEQ ID NO: 601413 - DNA, 19 bp, Mus musculus
  siRNA target sequence for Umps (NM_009471.1,1304-1322).
ccttggccagcagtacaat

SEQ ID NO: 601414 - DNA, 19 bp, Mus musculus
  siRNA target sequence for Umps (NM_009471.1,1340-1358).
cgggaaacgcggttctgat

SEQ ID NO: 601415 - DNA, 19 bp, Mus musculus
  siRNA target sequence for Ppat (NM_172146.1,189-207).
ggcccacgcagctagatgt

SEQ ID NO: 601416 - DNA, 19 bp, Mus musculus
  siRNA target sequence for Ppat (NM_172146.1,257-275).
gagagcgctggtattgtga

SEQ ID NO: 601417 - DNA, 19 bp, Mus musculus
  siRNA target sequence for Ppat (NM_172146.1,284-302).
gggagtgcagtgcctaaat

SEQ ID NO: 601418 - DNA, 19 bp, Mus musculus
  siRNA target sequence for Ppat (NM_172146.1,285-303).
ggagtgcagtgcctaaatt

SEQ ID NO: 601419 - DNA, 19 bp, Mus musculus
  siRNA target sequence for Ppat (NM_172146.1,297-315).
ctaaattcagggtgcataa

SEQ ID NO: 601420 - DNA, 19 bp, Mus musculus
  siRNA target sequence for Ppat (NM_172146.1,318-336).
gaatgggtcttgtaaacca

SEQ ID NO: 601421 - DNA, 19 bp, Mus musculus
  siRNA target sequence for Ppat (NM_172146.1,403-421).
cgccaccacgggaaagtgt

SEQ ID NO: 601422 - DNA, 19 bp, Mus musculus
  siRNA target sequence for Ppat (NM_172146.1,545-563).
ctttccacgtcctctgata

SEQ ID NO: 601423 - DNA, 19 bp, Mus musculus
  siRNA target sequence for Ppat (NM_172146.1,623-641).
gactgggtagcaagaatta

SEQ ID NO: 601424 - DNA, 19 bp, Mus musculus
  siRNA target sequence for Ppat (NM_172146.1,629-647).
gtagcaagaattaagaact

SEQ ID NO: 601425 - DNA, 19 bp, Mus musculus
  siRNA target sequence for Ppat (NM_172146.1,668-686).
gcatactccctggttataa

SEQ ID NO: 601426 - DNA, 19 bp, Mus musculus
  siRNA target sequence for Ppat (NM_172146.1,669-687).
catactccctggttataat

SEQ ID NO: 601427 - DNA, 19 bp, Mus musculus
  siRNA target sequence for Ppat (NM_172146.1,706-724).
cgcggtgcgagatccatat

SEQ ID NO: 601428 - DNA, 19 bp, Mus musculus
  siRNA target sequence for Ppat (NM_172146.1,709-727).
ggtgcgagatccatatgga

SEQ ID NO: 601429 - DNA, 19 bp, Mus musculus
  siRNA target sequence for Ppat (NM_172146.1,710-728).
gtgcgagatccatatggaa

SEQ ID NO: 601430 - DNA, 19 bp, Mus musculus
  siRNA target sequence for Ppat (NM_172146.1,712-730).
gcgagatccatatggaaat

SEQ ID NO: 601431 - DNA, 19 bp, Mus musculus
  siRNA target sequence for Ppat (NM_172146.1,852-870).
ccagatattgccatgaagt

SEQ ID NO: 601432 - DNA, 19 bp, Mus musculus
  siRNA target sequence for Ppat (NM_172146.1,871-889).
caaacccggagaaattgta

SEQ ID NO: 601433 - DNA, 19 bp, Mus musculus
  siRNA target sequence for Ppat (NM_172146.1,875-893).
cccggagaaattgtagaaa

SEQ ID NO: 601434 - DNA, 19 bp, Mus musculus
  siRNA target sequence for Ppat (NM_172146.1,876-894).
ccggagaaattgtagaaat

SEQ ID NO: 601435 - DNA, 19 bp, Mus musculus
  siRNA target sequence for Ppat (NM_172146.1,877-895).
cggagaaattgtagaaata

SEQ ID NO: 601436 - DNA, 19 bp, Mus musculus
  siRNA target sequence for Ppat (NM_172146.1,881-899).
gaaattgtagaaatatcca

SEQ ID NO: 601437 - DNA, 19 bp, Mus musculus
  siRNA target sequence for Ppat (NM_172146.1,906-924).
gtatcagaactcttgatat

SEQ ID NO: 601438 - DNA, 19 bp, Mus musculus
  siRNA target sequence for Ppat (NM_172146.1,944-962).
gacccagtggctttttgta

SEQ ID NO: 601439 - DNA, 19 bp, Mus musculus
  siRNA target sequence for Ppat (NM_172146.1,1010-1028).
caaatggtttatacagtaa

SEQ ID NO: 601440 - DNA, 19 bp, Mus musculus
  siRNA target sequence for Ppat (NM_172146.1,1162-1180).
gtgtaagaaccggtatgta

SEQ ID NO: 601441 - DNA, 19 bp, Mus musculus
  siRNA target sequence for Ppat (NM_172146.1,1188-1206).
ccttcattcaaccaaacat

SEQ ID NO: 601442 - DNA, 19 bp, Mus musculus
  siRNA target sequence for Ppat (NM_172146.1,1196-1214).
caaccaaacatgaggttaa

SEQ ID NO: 601443 - DNA, 19 bp, Mus musculus
  siRNA target sequence for Ppat (NM_172146.1,1220-1238).
ctcggtgttgcaaagaagt

SEQ ID NO: 601444 - DNA, 19 bp, Mus musculus
  siRNA target sequence for Ppat (NM_172146.1,1222-1240).
cggtgttgcaaagaagttt

SEQ ID NO: 601445 - DNA, 19 bp, Mus musculus
  siRNA target sequence for Ppat (NM_172146.1,1243-1261).
cgtgttgtctgacaacttt

SEQ ID NO: 601446 - DNA, 19 bp, Mus musculus
  siRNA target sequence for Ppat (NM_172146.1,1266-1284).
gcaaaagaatcgttctcat

SEQ ID NO: 601447 - DNA, 19 bp, Mus musculus
  siRNA target sequence for Ppat (NM_172146.1,1267-1285).
caaaagaatcgttctcata

SEQ ID NO: 601448 - DNA, 19 bp, Mus musculus
  siRNA target sequence for Ppat (NM_172146.1,1272-1290).
gaatcgttctcatagatga

SEQ ID NO: 601449 - DNA, 19 bp, Mus musculus
  siRNA target sequence for Ppat (NM_172146.1,1300-1318).
gaggggcaatactatctca

SEQ ID NO: 601450 - DNA, 19 bp, Mus musculus
  siRNA target sequence for Ppat (NM_172146.1,1370-1388).
gtcgcttcaccaccaataa

SEQ ID NO: 601451 - DNA, 19 bp, Mus musculus
  siRNA target sequence for Ppat (NM_172146.1,1374-1392).
cttcaccaccaataaaata

SEQ ID NO: 601452 - DNA, 19 bp, Mus musculus
  siRNA target sequence for Ppat (NM_172146.1,1394-1412).
ccgtgcttcatgggaataa

SEQ ID NO: 601453 - DNA, 19 bp, Mus musculus
  siRNA target sequence for Ppat (NM_172146.1,1395-1413).
cgtgcttcatgggaataaa

SEQ ID NO: 601454 - DNA, 19 bp, Mus musculus
  siRNA target sequence for Ppat (NM_172146.1,1479-1497).
gagcaaacagcgttgtgta

SEQ ID NO: 601455 - DNA, 19 bp, Mus musculus
  siRNA target sequence for Ppat (NM_172146.1,1482-1500).
caaacagcgttgtgtatct

SEQ ID NO: 601456 - DNA, 19 bp, Mus musculus
  siRNA target sequence for Ppat (NM_172146.1,1507-1525).
ggaaggactggtttcatct

SEQ ID NO: 601457 - DNA, 19 bp, Mus musculus
  siRNA target sequence for Qtrt1 (NM_021888.1,349-367).
ggagaagagacacttttga

SEQ ID NO: 601458 - DNA, 19 bp, Mus musculus
  siRNA target sequence for Qtrt1 (NM_021888.1,398-416).
ctctgggctcggacatcat

SEQ ID NO: 601459 - DNA, 19 bp, Mus musculus
  siRNA target sequence for Qtrt1 (NM_021888.1,400-418).
ctgggctcggacatcatca

SEQ ID NO: 601460 - DNA, 19 bp, Mus musculus
  siRNA target sequence for Qtrt1 (NM_021888.1,506-524).
gcatcgcagcccataagca

SEQ ID NO: 601461 - DNA, 19 bp, Mus musculus
  siRNA target sequence for Qtrt1 (NM_021888.1,737-755).
gctatgccaccgatttggt

SEQ ID NO: 601462 - DNA, 19 bp, Mus musculus
  siRNA target sequence for Qtrt1 (NM_021888.1,805-823).
cggacagcgcgctttggat

SEQ ID NO: 601463 - DNA, 19 bp, Mus musculus
  siRNA target sequence for Qtrt1 (NM_021888.1,952-970).
ctacacagtgacaacacta

SEQ ID NO: 601464 - DNA, 19 bp, Mus musculus
  siRNA target sequence for Qtrt1 (NM_021888.1,984-1002).
cctaaccgtgcacaacatt

SEQ ID NO: 601465 - DNA, 19 bp, Mus musculus
  siRNA target sequence for Qtrt1 (NM_021888.1,1028-1046).
ccgtgcgcagcagtatctt

SEQ ID NO: 601466 - DNA, 19 bp, Mus musculus
  siRNA target sequence for Qtrt1 (NM_021888.1,1061-1079).
ctgactttgtacgaaactt

SEQ ID NO: 601467 - DNA, 19 bp, Mus musculus
  siRNA target sequence for Qtrt1 (NM_021888.1,1063-1081).
gactttgtacgaaacttca

SEQ ID NO: 601468 - DNA, 19 bp, Mus musculus
  siRNA target sequence for Qtrt1 (NM_021888.1,1077-1095).
cttcatgcgcactatgtat

SEQ ID NO: 601469 - DNA, 19 bp, Mus musculus
  siRNA target sequence for 1500002I11Rik (NM_021550.2,146-164).
cagaaagcagttccttttt

SEQ ID NO: 601470 - DNA, 19 bp, Mus musculus
  siRNA target sequence for 1500002I11Rik (NM_021550.2,214-232).
ggccacattaggattggaa

SEQ ID NO: 601471 - DNA, 19 bp, Mus musculus
  siRNA target sequence for 1500002I11Rik (NM_021550.2,215-233).
gccacattaggattggaaa

SEQ ID NO: 601472 - DNA, 19 bp, Mus musculus
  siRNA target sequence for 1500002I11Rik (NM_021550.2,280-298).
gacgatatctcgaaaattt

SEQ ID NO: 601473 - DNA, 19 bp, Mus musculus
  siRNA target sequence for 1500002I11Rik (NM_021550.2,282-300).
cgatatctcgaaaatttca

SEQ ID NO: 601474 - DNA, 19 bp, Mus musculus
  siRNA target sequence for 1500002I11Rik (NM_021550.2,312-330).
catggagctcagtaagagt

SEQ ID NO: 601475 - DNA, 19 bp, Mus musculus
  siRNA target sequence for 1500002I11Rik (NM_021550.2,327-345).
gagtttccgggtatactgt

SEQ ID NO: 601476 - DNA, 19 bp, Mus musculus
  siRNA target sequence for 1500002I11Rik (NM_021550.2,329-347).
gtttccgggtatactgtat

SEQ ID NO: 601477 - DNA, 19 bp, Mus musculus
  siRNA target sequence for 1500002I11Rik (NM_021550.2,335-353).
gggtatactgtatagttct

SEQ ID NO: 601478 - DNA, 19 bp, Mus musculus
  siRNA target sequence for 1500002I11Rik (NM_021550.2,336-354).
ggtatactgtatagttctt

SEQ ID NO: 601479 - DNA, 19 bp, Mus musculus
  siRNA target sequence for 1500002I11Rik (NM_021550.2,526-544).
caatacagggaccaataca

SEQ ID NO: 601480 - DNA, 19 bp, Mus musculus
  siRNA target sequence for 1500002I11Rik (NM_021550.2,556-574).
cttgcacgccccactactt

SEQ ID NO: 601481 - DNA, 19 bp, Mus musculus
  siRNA target sequence for 1500002I11Rik (NM_021550.2,566-584).
ccactactttcgctgttat

SEQ ID NO: 601482 - DNA, 19 bp, Mus musculus
  siRNA target sequence for 1500002I11Rik (NM_021550.2,658-676).
ggagaccttgaatatgtga

SEQ ID NO: 601483 - DNA, 19 bp, Mus musculus
  siRNA target sequence for 1500002I11Rik (NM_021550.2,686-704).
gaggaattgtcttaagcat

SEQ ID NO: 601484 - DNA, 19 bp, Mus musculus
  siRNA target sequence for 1500002I11Rik (NM_021550.2,694-712).
gtcttaagcatagaatcaa

SEQ ID NO: 601485 - DNA, 19 bp, Mus musculus
  siRNA target sequence for 1500002I11Rik (NM_021550.2,757-775).
gaacaaggaggaatgattt

SEQ ID NO: 601486 - DNA, 19 bp, Mus musculus
  siRNA target sequence for 1500002I11Rik (NM_021550.2,799-817).
ctggcggtctgcctgaaat

SEQ ID NO: 601487 - DNA, 19 bp, Mus musculus
  siRNA target sequence for 1500002I11Rik (NM_021550.2,813-831).
gaaatacgccggagtattt

SEQ ID NO: 601488 - DNA, 19 bp, Mus musculus
  siRNA target sequence for 1500002I11Rik (NM_021550.2,822-840).
cggagtatttgcagaaaat

SEQ ID NO: 601489 - DNA, 19 bp, Mus musculus
  siRNA target sequence for 1500002I11Rik (NM_021550.2,842-860).
ccgaagatgccgatggaaa

SEQ ID NO: 601490 - DNA, 19 bp, Mus musculus
  siRNA target sequence for 1500002I11Rik (NM_021550.2,843-861).
cgaagatgccgatggaaaa

SEQ ID NO: 601491 - DNA, 19 bp, Mus musculus
  siRNA target sequence for 1500002I11Rik (NM_021550.2,851-869).
ccgatggaaaagatgtgtt

SEQ ID NO: 601492 - DNA, 19 bp, Mus musculus
  siRNA target sequence for 1500002I11Rik (NM_021550.2,881-899).
ccgttggccttttcattaa

SEQ ID NO: 601493 - DNA, 19 bp, Mus musculus
  siRNA target sequence for 1500002I11Rik (NM_021550.2,894-912).
cattaaagaggcaatgact

SEQ ID NO: 601494 - DNA, 19 bp, Mus musculus
  siRNA target sequence for 1500002I11Rik (NM_021550.2,947-965).
ctgatatggctgttacttt

SEQ ID NO: 601495 - DNA, 19 bp, Mus musculus
  siRNA target sequence for 1500002I11Rik (NM_021550.2,970-988).
ggactgactcctaatcaga

SEQ ID NO: 601496 - DNA, 19 bp, Mus musculus
  siRNA target sequence for 1500002I11Rik (NM_021550.2,987-1005).
gatgcacgtgatgatgtat

SEQ ID NO: 601497 - DNA, 19 bp, Mus musculus
  siRNA target sequence for 1500002I11Rik (NM_021550.2,1014-1032).
ccggcttagggcatttgga

SEQ ID NO: 601498 - DNA, 19 bp, Mus musculus
  siRNA target sequence for 1500002I11Rik (NM_021550.2,1067-1085).
caaatggttctgagaatga

SEQ ID NO: 601499 - DNA, 19 bp, Mus musculus
  siRNA target sequence for 1500032M01Rik (NM_175383.1,286-304).
gatccgtagaccaggtaaa

SEQ ID NO: 601500 - DNA, 19 bp, Mus musculus
  siRNA target sequence for 1500032M01Rik (NM_175383.1,329-347).
ctccggaggcgttctagat

SEQ ID NO: 601501 - DNA, 19 bp, Mus musculus
  siRNA target sequence for 1500032M01Rik (NM_175383.1,398-416).
ccccaacgatgtcatctta

SEQ ID NO: 601502 - DNA, 19 bp, Mus musculus
  siRNA target sequence for 1500032M01Rik (NM_175383.1,430-448).
gtgtggacaacctactaca

SEQ ID NO: 601503 - DNA, 19 bp, Mus musculus
  siRNA target sequence for 1500032M01Rik (NM_175383.1,747-765).
cccaataacctgttaagga

SEQ ID NO: 601504 - DNA, 19 bp, Mus musculus
  siRNA target sequence for 1500032M01Rik (NM_175383.1,748-766).
ccaataacctgttaaggaa

SEQ ID NO: 601505 - DNA, 19 bp, Mus musculus
  siRNA target sequence for 1500032M01Rik (NM_175383.1,924-942).
cgaatgccgatgaacaaga

SEQ ID NO: 601506 - DNA, 19 bp, Mus musculus
  siRNA target sequence for 1500032M01Rik (NM_175383.1,925-943).
gaatgccgatgaacaagaa

SEQ ID NO: 601507 - DNA, 19 bp, Mus musculus
  siRNA target sequence for 1500032M01Rik (NM_175383.1,1091-1109).
ggacccctgggaaccattt

SEQ ID NO: 601508 - DNA, 19 bp, Mus musculus
  siRNA target sequence for 1500032M01Rik (NM_175383.1,1094-1112).
cccctgggaaccattttat

SEQ ID NO: 601509 - DNA, 19 bp, Mus musculus
  siRNA target sequence for 1500032M01Rik (NM_175383.1,1096-1114).
cctgggaaccattttatgt

SEQ ID NO: 601510 - DNA, 19 bp, Mus musculus
  siRNA target sequence for 1500032M01Rik (NM_175383.1,1123-1141).
gaaaggtgcccacatttga

SEQ ID NO: 601511 - DNA, 19 bp, Mus musculus
  siRNA target sequence for 1500032M01Rik (NM_175383.1,1146-1164).
cgctttcggcagtatggtt

SEQ ID NO: 601512 - DNA, 19 bp, Mus musculus
  siRNA target sequence for 1500032M01Rik (NM_175383.1,1155-1173).
cagtatggtttcaatcgaa

SEQ ID NO: 601513 - DNA, 19 bp, Mus musculus
  siRNA target sequence for 1500032M01Rik (NM_175383.1,1194-1212).
cacgtggcagggtttaatt

SEQ ID NO: 601514 - DNA, 19 bp, Mus musculus
  siRNA target sequence for 1500032M01Rik (NM_175383.1,1217-1235).
ggtgctgaacgaaggtttt

SEQ ID NO: 601515 - DNA, 19 bp, Mus musculus
  siRNA target sequence for 1500032M01Rik (NM_175383.1,1227-1245).
gaaggttttctggttcata

SEQ ID NO: 601516 - DNA, 19 bp, Mus musculus
  siRNA target sequence for 1500032M01Rik (NM_175383.1,1288-1306).
ctgaaaaccagcgcaataa

SEQ ID NO: 601517 - DNA, 19 bp, Mus musculus
  siRNA target sequence for 1500032M01Rik (NM_175383.1,1296-1314).
cagcgcaataagatccttt

SEQ ID NO: 601518 - DNA, 19 bp, Mus musculus
  siRNA target sequence for 1500032M01Rik (NM_175383.1,1310-1328).
cctttaccgccagttcaaa

SEQ ID NO: 601519 - DNA, 19 bp, Mus musculus
  siRNA target sequence for Alg12 (NM_145477.1,123-141).
caccatccacctggttata

SEQ ID NO: 601520 - DNA, 19 bp, Mus musculus
  siRNA target sequence for Alg12 (NM_145477.1,126-144).
catccacctggttatatgt

SEQ ID NO: 601521 - DNA, 19 bp, Mus musculus
  siRNA target sequence for Alg12 (NM_145477.1,146-164).
cctacaccaaggtagaaga

SEQ ID NO: 601522 - DNA, 19 bp, Mus musculus
  siRNA target sequence for Alg12 (NM_145477.1,293-311).
ccagccccgtggtttatgt

SEQ ID NO: 601523 - DNA, 19 bp, Mus musculus
  siRNA target sequence for Alg12 (NM_145477.1,312-330).
gctctcgcttttagaagta

SEQ ID NO: 601524 - DNA, 19 bp, Mus musculus
  siRNA target sequence for Alg12 (NM_145477.1,313-331).
ctctcgcttttagaagtat

SEQ ID NO: 601525 - DNA, 19 bp, Mus musculus
  siRNA target sequence for Alg12 (NM_145477.1,317-335).
cgcttttagaagtatccaa

SEQ ID NO: 601526 - DNA, 19 bp, Mus musculus
  siRNA target sequence for Alg12 (NM_145477.1,386-404).
ctggactctggacattaca

SEQ ID NO: 601527 - DNA, 19 bp, Mus musculus
  siRNA target sequence for Alg12 (NM_145477.1,442-460).
gtcatgttctgctggatat

SEQ ID NO: 601528 - DNA, 19 bp, Mus musculus
  siRNA target sequence for Alg12 (NM_145477.1,790-808).
ctggtgacagggcatatct

SEQ ID NO: 601529 - DNA, 19 bp, Mus musculus
  siRNA target sequence for Alg12 (NM_145477.1,810-828).
ggtgaatgtggcatataca

SEQ ID NO: 601530 - DNA, 19 bp, Mus musculus
  siRNA target sequence for Alg12 (NM_145477.1,827-845).
cagccacgtccctctatgt

SEQ ID NO: 601531 - DNA, 19 bp, Mus musculus
  siRNA target sequence for Alg12 (NM_145477.1,829-847).
gccacgtccctctatgtgt

SEQ ID NO: 601532 - DNA, 19 bp, Mus musculus
  siRNA target sequence for Alg12 (NM_145477.1,836-854).
ccctctatgtgtctcattt

SEQ ID NO: 601533 - DNA, 19 bp, Mus musculus
  siRNA target sequence for Alg12 (NM_145477.1,838-856).
ctctatgtgtctcatttca

SEQ ID NO: 601534 - DNA, 19 bp, Mus musculus
  siRNA target sequence for Alg12 (NM_145477.1,875-893).
cgatgcagcagctacatga

SEQ ID NO: 601535 - DNA, 19 bp, Mus musculus
  siRNA target sequence for Alg12 (NM_145477.1,953-971).
gagtgtcacggtttctaca

SEQ ID NO: 601536 - DNA, 19 bp, Mus musculus
  siRNA target sequence for Alg12 (NM_145477.1,963-981).
gtttctacaggtcaatgat

SEQ ID NO: 601537 - DNA, 19 bp, Mus musculus
  siRNA target sequence for Alg12 (NM_145477.1,979-997).
gatgactggaggtatgaca

SEQ ID NO: 601538 - DNA, 19 bp, Mus musculus
  siRNA target sequence for Alg12 (NM_145477.1,1094-1112).
gagtcctggccagtattga

SEQ ID NO: 601539 - DNA, 19 bp, Mus musculus
  siRNA target sequence for Alg12 (NM_145477.1,1111-1129).
gagggcactacaggtataa

SEQ ID NO: 601540 - DNA, 19 bp, Mus musculus
  siRNA target sequence for Alg12 (NM_145477.1,1143-1161).
gaaactgccaccctttgat

SEQ ID NO: 601541 - DNA, 19 bp, Mus musculus
  siRNA target sequence for Alg12 (NM_145477.1,1173-1191).
gacaaagctggtacttcta

SEQ ID NO: 601542 - DNA, 19 bp, Mus musculus
  siRNA target sequence for B4galt2 (NM_017377.1,191-209).
ggccgtcatcctctacttt

SEQ ID NO: 601543 - DNA, 19 bp, Mus musculus
  siRNA target sequence for B4galt2 (NM_017377.1,420-438).
ggccgagtggtcatcgaat

SEQ ID NO: 601544 - DNA, 19 bp, Mus musculus
  siRNA target sequence for B4galt2 (NM_017377.1,421-439).
gccgagtggtcatcgaatt

SEQ ID NO: 601545 - DNA, 19 bp, Mus musculus
  siRNA target sequence for B4galt2 (NM_017377.1,423-441).
cgagtggtcatcgaattca

SEQ ID NO: 601546 - DNA, 19 bp, Mus musculus
  siRNA target sequence for B4galt2 (NM_017377.1,580-598).
gctattggctccactatct

SEQ ID NO: 601547 - DNA, 19 bp, Mus musculus
  siRNA target sequence for B4galt2 (NM_017377.1,623-641).
gctgcgctacggtgtctat

SEQ ID NO: 601548 - DNA, 19 bp, Mus musculus
  siRNA target sequence for B4galt2 (NM_017377.1,627-645).
cgctacggtgtctatgtca

SEQ ID NO: 601549 - DNA, 19 bp, Mus musculus
  siRNA target sequence for B4galt2 (NM_017377.1,1034-1052).
gcacgaccgggacaaacat

SEQ ID NO: 601550 - DNA, 19 bp, Mus musculus
  siRNA target sequence for B4galt2 (NM_017377.1,1035-1053).
cacgaccgggacaaacata

SEQ ID NO: 601551 - DNA, 19 bp, Mus musculus
  siRNA target sequence for B4galt2 (NM_017377.1,1061-1079).
caaccctcagaggtttaat

SEQ ID NO: 601552 - DNA, 19 bp, Mus musculus
  siRNA target sequence for B4galt2 (NM_017377.1,1066-1084).
ctcagaggtttaataagat

SEQ ID NO: 601553 - DNA, 19 bp, Mus musculus
  siRNA target sequence for B4galt2 (NM_017377.1,1070-1088).
gaggtttaataagattcaa

SEQ ID NO: 601554 - DNA, 19 bp, Mus musculus
  siRNA target sequence for B4galt2 (NM_017377.1,1072-1090).
ggtttaataagattcaaaa

SEQ ID NO: 601555 - DNA, 19 bp, Mus musculus
  siRNA target sequence for B4galt3 (NM_020579.1,899-917).
ccatgaacaagtttggata

SEQ ID NO: 601556 - DNA, 19 bp, Mus musculus
  siRNA target sequence for B4galt3 (NM_020579.1,936-954).
gtactttggcggagtttca

SEQ ID NO: 601557 - DNA, 19 bp, Mus musculus
  siRNA target sequence for B4galt3 (NM_020579.1,1159-1177).
ctggtccgtacccagaatt

SEQ ID NO: 601558 - DNA, 19 bp, Mus musculus
  siRNA target sequence for B4galt3 (NM_020579.1,1161-1179).
ggtccgtacccagaattct

SEQ ID NO: 601559 - DNA, 19 bp, Mus musculus
  siRNA target sequence for B4galt3 (NM_020579.1,1173-1191).
gaattcttggacacaagat

SEQ ID NO: 601560 - DNA, 19 bp, Mus musculus
  siRNA target sequence for B4galt3 (NM_020579.1,1193-1211).
gaatgaactcactaacgta

SEQ ID NO: 601561 - DNA, 19 bp, Mus musculus
  siRNA target sequence for B4galt4 (NM_019804.1,237-255).
gctgcaacccaccttatca

SEQ ID NO: 601562 - DNA, 19 bp, Mus musculus
  siRNA target sequence for B4galt4 (NM_019804.1,256-274).
cctctcctacagattacga

SEQ ID NO: 601563 - DNA, 19 bp, Mus musculus
  siRNA target sequence for B4galt4 (NM_019804.1,257-275).
ctctcctacagattacgat

SEQ ID NO: 601564 - DNA, 19 bp, Mus musculus
  siRNA target sequence for B4galt4 (NM_019804.1,261-279).
cctacagattacgattgtt

SEQ ID NO: 601565 - DNA, 19 bp, Mus musculus
  siRNA target sequence for B4galt4 (NM_019804.1,394-412).
catacatttggggaatgaa

SEQ ID NO: 601566 - DNA, 19 bp, Mus musculus
  siRNA target sequence for B4galt4 (NM_019804.1,425-443).
catgatggggccacgaaaa

SEQ ID NO: 601567 - DNA, 19 bp, Mus musculus
  siRNA target sequence for B4galt4 (NM_019804.1,489-507).
gccagagcaagctcgtttt

SEQ ID NO: 601568 - DNA, 19 bp, Mus musculus
  siRNA target sequence for B4galt4 (NM_019804.1,491-509).
cagagcaagctcgttttta

SEQ ID NO: 601569 - DNA, 19 bp, Mus musculus
  siRNA target sequence for B4galt4 (NM_019804.1,517-535).
cctcacgttggaggaaata

SEQ ID NO: 601570 - DNA, 19 bp, Mus musculus
  siRNA target sequence for B4galt4 (NM_019804.1,688-706).
gctggactacggcatctat

SEQ ID NO: 601571 - DNA, 19 bp, Mus musculus
  siRNA target sequence for B4galt4 (NM_019804.1,689-707).
ctggactacggcatctata

SEQ ID NO: 601572 - DNA, 19 bp, Mus musculus
  siRNA target sequence for B4galt4 (NM_019804.1,713-731).
caccagacgggaagtaaaa

SEQ ID NO: 601573 - DNA, 19 bp, Mus musculus
  siRNA target sequence for B4galt4 (NM_019804.1,716-734).
cagacgggaagtaaaaagt

SEQ ID NO: 601574 - DNA, 19 bp, Mus musculus
  siRNA target sequence for B4galt4 (NM_019804.1,901-919).
ctacaggttgcgttacagt

SEQ ID NO: 601575 - DNA, 19 bp, Mus musculus
  siRNA target sequence for B4galt4 (NM_019804.1,904-922).
caggttgcgttacagtaaa

SEQ ID NO: 601576 - DNA, 19 bp, Mus musculus
  siRNA target sequence for B4galt4 (NM_019804.1,906-924).
ggttgcgttacagtaaata

SEQ ID NO: 601577 - DNA, 19 bp, Mus musculus
  siRNA target sequence for B4galt4 (NM_019804.1,907-925).
gttgcgttacagtaaatat

SEQ ID NO: 601578 - DNA, 19 bp, Mus musculus
  siRNA target sequence for B4galt4 (NM_019804.1,910-928).
gcgttacagtaaatatttt

SEQ ID NO: 601579 - DNA, 19 bp, Mus musculus
  siRNA target sequence for B4galt4 (NM_019804.1,974-992).
ggattctctaacaactact

SEQ ID NO: 601580 - DNA, 19 bp, Mus musculus
  siRNA target sequence for B4galt4 (NM_019804.1,1029-1047).
gggttgagctccataaaat

SEQ ID NO: 601581 - DNA, 19 bp, Mus musculus
  siRNA target sequence for B4galt4 (NM_019804.1,1067-1085).
cccgacgtgggcaaataca

SEQ ID NO: 601582 - DNA, 19 bp, Mus musculus
  siRNA target sequence for B4galt4 (NM_019804.1,1076-1094).
ggcaaatacaccatgatct

SEQ ID NO: 601583 - DNA, 19 bp, Mus musculus
  siRNA target sequence for B4galt4 (NM_019804.1,1077-1095).
gcaaatacaccatgatctt

SEQ ID NO: 601584 - DNA, 19 bp, Mus musculus
  siRNA target sequence for B4galt4 (NM_019804.1,1159-1177).
ccgggtctggaaaacagat

SEQ ID NO: 601585 - DNA, 19 bp, Mus musculus
  siRNA target sequence for B4galt4 (NM_019804.1,1175-1193).
gatggcttatcgagttgtt

SEQ ID NO: 601586 - DNA, 19 bp, Mus musculus
  siRNA target sequence for B4galt4 (NM_019804.1,1178-1196).
ggcttatcgagttgttctt

SEQ ID NO: 601587 - DNA, 19 bp, Mus musculus
  siRNA target sequence for B4galt4 (NM_019804.1,1179-1197).
gcttatcgagttgttctta

SEQ ID NO: 601588 - DNA, 19 bp, Mus musculus
  siRNA target sequence for B4galt4 (NM_019804.1,1185-1203).
cgagttgttcttacagatt

SEQ ID NO: 601589 - DNA, 19 bp, Mus musculus
  siRNA target sequence for B4galt4 (NM_019804.1,1186-1204).
gagttgttcttacagatta

SEQ ID NO: 601590 - DNA, 19 bp, Mus musculus
  siRNA target sequence for B4galt4 (NM_019804.1,1213-1231).
ggagcacaaccctttatat

SEQ ID NO: 601591 - DNA, 19 bp, Mus musculus
  siRNA target sequence for B4galt4 (NM_019804.1,1223-1241).
cctttatatgccaacatca

SEQ ID NO: 601592 - DNA, 19 bp, Mus musculus
  siRNA target sequence for B4galt5 (NM_019835.1,301-319).
ctactgcgggacaatgtga

SEQ ID NO: 601593 - DNA, 19 bp, Mus musculus
  siRNA target sequence for B4galt5 (NM_019835.1,543-561).
cgcaatggacgatattcat

SEQ ID NO: 601594 - DNA, 19 bp, Mus musculus
  siRNA target sequence for B4galt5 (NM_019835.1,727-745).
cagttcgccttctatgtga

SEQ ID NO: 601595 - DNA, 19 bp, Mus musculus
  siRNA target sequence for B4galt5 (NM_019835.1,774-792).
ccgagccatgcttttcaat

SEQ ID NO: 601596 - DNA, 19 bp, Mus musculus
  siRNA target sequence for B4galt5 (NM_019835.1,863-881).
ctgagagtgaccgaaacta

SEQ ID NO: 601597 - DNA, 19 bp, Mus musculus
  siRNA target sequence for B4galt5 (NM_019835.1,867-885).
gagtgaccgaaactactat

SEQ ID NO: 601598 - DNA, 19 bp, Mus musculus
  siRNA target sequence for B4galt5 (NM_019835.1,972-990).
gagcggcctgactgtagaa

SEQ ID NO: 601599 - DNA, 19 bp, Mus musculus
  siRNA target sequence for B4galt5 (NM_019835.1,974-992).
gcggcctgactgtagaaca

SEQ ID NO: 601600 - DNA, 19 bp, Mus musculus
  siRNA target sequence for B4galt5 (NM_019835.1,988-1006).
gaacagtttcggaaaatca

SEQ ID NO: 601601 - DNA, 19 bp, Mus musculus
  siRNA target sequence for B4galt5 (NM_019835.1,1056-1074).
gtggaacagggtacaaaat

SEQ ID NO: 601602 - DNA, 19 bp, Mus musculus
  siRNA target sequence for B4galt5 (NM_019835.1,1059-1077).
gaacagggtacaaaatgca

SEQ ID NO: 601603 - DNA, 19 bp, Mus musculus
  siRNA target sequence for B4galt5 (NM_019835.1,1242-1260).
cacgtacgacgccttgtat

SEQ ID NO: 601604 - DNA, 19 bp, Mus musculus
  siRNA target sequence for B4galt5 (NM_019835.1,1244-1262).
cgtacgacgccttgtataa

SEQ ID NO: 601605 - DNA, 19 bp, Mus musculus
  siRNA target sequence for B4galt5 (NM_019835.1,1245-1263).
gtacgacgccttgtataaa

SEQ ID NO: 601606 - DNA, 19 bp, Mus musculus
  siRNA target sequence for B4galt5 (NM_019835.1,1249-1267).
gacgccttgtataaaaaca

SEQ ID NO: 601607 - DNA, 19 bp, Mus musculus
  siRNA target sequence for B4galt5 (NM_019835.1,1251-1269).
cgccttgtataaaaacata

SEQ ID NO: 601608 - DNA, 19 bp, Mus musculus
  siRNA target sequence for B4galt7 (NM_146045.1,372-390).
cacatgcaccgcttcctaa

SEQ ID NO: 601609 - DNA, 19 bp, Mus musculus
  siRNA target sequence for B4galt7 (NM_146045.1,434-452).
ggaccatttcaggttcaat

SEQ ID NO: 601610 - DNA, 19 bp, Mus musculus
  siRNA target sequence for B4galt7 (NM_146045.1,490-508).
gcaacagcacagactacat

SEQ ID NO: 601611 - DNA, 19 bp, Mus musculus
  siRNA target sequence for B4galt7 (NM_146045.1,606-624).
cctctctaccactacaaga

SEQ ID NO: 601612 - DNA, 19 bp, Mus musculus
  siRNA target sequence for B4galt7 (NM_146045.1,708-726).
cgagaggatgatgaattct

SEQ ID NO: 601613 - DNA, 19 bp, Mus musculus
  siRNA target sequence for B4galt7 (NM_146045.1,841-859).
gcattgcggctcaaaaaca

SEQ ID NO: 601614 - DNA, 19 bp, Mus musculus
  siRNA target sequence for B4galt7 (NM_146045.1,919-937).
cccgcacggcactgtctat

SEQ ID NO: 601615 - DNA, 19 bp, Mus musculus
  siRNA target sequence for B4galt7 (NM_146045.1,920-938).
ccgcacggcactgtctata

SEQ ID NO: 601616 - DNA, 19 bp, Mus musculus
  siRNA target sequence for B4galt7 (NM_146045.1,923-941).
cacggcactgtctatagga

SEQ ID NO: 601617 - DNA, 19 bp, Mus musculus
  siRNA target sequence for B4galt7 (NM_146045.1,949-967).
cgtgcactgtcctcaatgt

SEQ ID NO: 601618 - DNA, 19 bp, Mus musculus
  siRNA target sequence for B4galt7 (NM_146045.1,968-986).
catgctggactgcgataaa

SEQ ID NO: 601619 - DNA, 19 bp, Mus musculus
  siRNA target sequence for B4galt7 (NM_146045.1,971-989).
gctggactgcgataaaaca

SEQ ID NO: 601620 - DNA, 19 bp, Mus musculus
  siRNA target sequence for B4galt7 (NM_146045.1,990-1008).
gccaccccatggtgcatat

SEQ ID NO: 601621 - DNA, 19 bp, Mus musculus
  siRNA target sequence for B4galt7 (NM_146045.1,992-1010).
caccccatggtgcatattt

SEQ ID NO: 601622 - DNA, 19 bp, Mus musculus
  siRNA target sequence for Ecgf1 (NM_138302.1,198-216).
cgtgcacgcggtgatagat

SEQ ID NO: 601623 - DNA, 19 bp, Mus musculus
  siRNA target sequence for Ecgf1 (NM_138302.1,350-368).
ggcaccagcagcttgttga

SEQ ID NO: 601624 - DNA, 19 bp, Mus musculus
  siRNA target sequence for Ecgf1 (NM_138302.1,492-510).
ggataagctggaatcgatt

SEQ ID NO: 601625 - DNA, 19 bp, Mus musculus
  siRNA target sequence for Ecgf1 (NM_138302.1,651-669).
ggacagtgtcccactcatt

SEQ ID NO: 601626 - DNA, 19 bp, Mus musculus
  siRNA target sequence for Ecgf1 (NM_138302.1,652-670).
gacagtgtcccactcatta

SEQ ID NO: 601627 - DNA, 19 bp, Mus musculus
  siRNA target sequence for Ecgf1 (NM_138302.1,654-672).
cagtgtcccactcattaca

SEQ ID NO: 601628 - DNA, 19 bp, Mus musculus
  siRNA target sequence for Ecgf1 (NM_138302.1,673-691).
gcttcaatcctcagtaaga

SEQ ID NO: 601629 - DNA, 19 bp, Mus musculus
  siRNA target sequence for Ecgf1 (NM_138302.1,674-692).
cttcaatcctcagtaagaa

SEQ ID NO: 601630 - DNA, 19 bp, Mus musculus
  siRNA target sequence for Ecgf1 (NM_138302.1,710-728).
ccactctggtggtagatgt

SEQ ID NO: 601631 - DNA, 19 bp, Mus musculus
  siRNA target sequence for Ecgf1 (NM_138302.1,778-796).
ctggcaaagatgttggtta

SEQ ID NO: 601632 - DNA, 19 bp, Mus musculus
  siRNA target sequence for Ecgf1 (NM_138302.1,833-851).
ccctgaccgccatggataa

SEQ ID NO: 601633 - DNA, 19 bp, Mus musculus
  siRNA target sequence for Ecgf1 (NM_138302.1,951-969).
gctaggaggcgccattctt

SEQ ID NO: 601634 - DNA, 19 bp, Mus musculus
  siRNA target sequence for Ecgf1 (NM_138302.1,952-970).
ctaggaggcgccattcttt

SEQ ID NO: 601635 - DNA, 19 bp, Mus musculus
  siRNA target sequence for Ecgf1 (NM_138302.1,958-976).
ggcgccattctttggatta

SEQ ID NO: 601636 - DNA, 19 bp, Mus musculus
  siRNA target sequence for Ecgf1 (NM_138302.1,977-995).
gcggacaggcggaaacaca

SEQ ID NO: 601637 - DNA, 19 bp, Mus musculus
  siRNA target sequence for Ecgf1 (NM_138302.1,978-996).
cggacaggcggaaacacaa

SEQ ID NO: 601638 - DNA, 19 bp, Mus musculus
  siRNA target sequence for Ecgf1 (NM_138302.1,1178-1196).
cggcagacggcattgttga

SEQ ID NO: 601639 - DNA, 19 bp, Mus musculus
  siRNA target sequence for Ecgf1 (NM_138302.1,1303-1321).
gacgtgggccagtgtttgt

SEQ ID NO: 601640 - DNA, 19 bp, Mus musculus
  siRNA target sequence for Ecgf1 (NM_138302.1,1439-1457).
cacccttcgctgaacttgt

SEQ ID NO: 601641 - DNA, 19 bp, Mus musculus
  siRNA target sequence for Ext1 (NM_010162.1,601-619).
gccaaaaaacgctatttca

SEQ ID NO: 601642 - DNA, 19 bp, Mus musculus
  siRNA target sequence for Ext1 (NM_010162.1,736-754).
cagcccagtccggatcatt

SEQ ID NO: 601643 - DNA, 19 bp, Mus musculus
  siRNA target sequence for Ext1 (NM_010162.1,797-815).
gggatcaattggaaaacga

SEQ ID NO: 601644 - DNA, 19 bp, Mus musculus
  siRNA target sequence for Ext1 (NM_010162.1,817-835).
gattccagcgtgcacattt

SEQ ID NO: 601645 - DNA, 19 bp, Mus musculus
  siRNA target sequence for Ext1 (NM_010162.1,856-874).
gccaactcgagcatctaca

SEQ ID NO: 601646 - DNA, 19 bp, Mus musculus
  siRNA target sequence for Ext1 (NM_010162.1,858-876).
caactcgagcatctacaaa

SEQ ID NO: 601647 - DNA, 19 bp, Mus musculus
  siRNA target sequence for Ext1 (NM_010162.1,895-913).
gagtcctgcttcgatttca

SEQ ID NO: 601648 - DNA, 19 bp, Mus musculus
  siRNA target sequence for Ext1 (NM_010162.1,967-985).
gagaaaatcgccgaaagtt

SEQ ID NO: 601649 - DNA, 19 bp, Mus musculus
  siRNA target sequence for Ext1 (NM_010162.1,977-995).
ccgaaagttaccaaaacat

SEQ ID NO: 601650 - DNA, 19 bp, Mus musculus
  siRNA target sequence for Ext1 (NM_010162.1,978-996).
cgaaagttaccaaaacatt

SEQ ID NO: 601651 - DNA, 19 bp, Mus musculus
  siRNA target sequence for Ext1 (NM_010162.1,1042-1060).
caggcgtgcctctttgtct

SEQ ID NO: 601652 - DNA, 19 bp, Mus musculus
  siRNA target sequence for Ext1 (NM_010162.1,1086-1104).
ccagttatcacctcagtat

SEQ ID NO: 601653 - DNA, 19 bp, Mus musculus
  siRNA target sequence for Ext1 (NM_010162.1,1107-1125).
gcacaatttgagatccaaa

SEQ ID NO: 601654 - DNA, 19 bp, Mus musculus
  siRNA target sequence for Ext1 (NM_010162.1,1138-1156).
cacttgtggaacaatggta

SEQ ID NO: 601655 - DNA, 19 bp, Mus musculus
  siRNA target sequence for Ext1 (NM_010162.1,1146-1164).
gaacaatggtaggaatcat

SEQ ID NO: 601656 - DNA, 19 bp, Mus musculus
  siRNA target sequence for Ext1 (NM_010162.1,1149-1167).
caatggtaggaatcattta

SEQ ID NO: 601657 - DNA, 19 bp, Mus musculus
  siRNA target sequence for Ext1 (NM_010162.1,1207-1225).
gaggacgtggggtttgaca

SEQ ID NO: 601658 - DNA, 19 bp, Mus musculus
  siRNA target sequence for Ext1 (NM_010162.1,1269-1287).
cttccgaccaaactttgat

SEQ ID NO: 601659 - DNA, 19 bp, Mus musculus
  siRNA target sequence for Ext1 (NM_010162.1,1272-1290).
ccgaccaaactttgatgtt

SEQ ID NO: 601660 - DNA, 19 bp, Mus musculus
  siRNA target sequence for Ext1 (NM_010162.1,1292-1310).
ctattcccctcttttctaa

SEQ ID NO: 601661 - DNA, 19 bp, Mus musculus
  siRNA target sequence for Ext1 (NM_010162.1,1333-1351).
gagagggggtttttgaaat

SEQ ID NO: 601662 - DNA, 19 bp, Mus musculus
  siRNA target sequence for Ext1 (NM_010162.1,1535-1553).
gagacaacaccgagtatga

SEQ ID NO: 601663 - DNA, 19 bp, Mus musculus
  siRNA target sequence for Ext1 (NM_010162.1,1542-1560).
caccgagtatgagaaatat

SEQ ID NO: 601664 - DNA, 19 bp, Mus musculus
  siRNA target sequence for Ext1 (NM_010162.1,1545-1563).
cgagtatgagaaatatgat

SEQ ID NO: 601665 - DNA, 19 bp, Mus musculus
  siRNA target sequence for Ext1 (NM_010162.1,1616-1634).
ggcttgggtccttcagatt

SEQ ID NO: 601666 - DNA, 19 bp, Mus musculus
  siRNA target sequence for Ext1 (NM_010162.1,1692-1710).
gccattctccgaagtgatt

SEQ ID NO: 601667 - DNA, 19 bp, Mus musculus
  siRNA target sequence for Ext1 (NM_010162.1,1693-1711).
ccattctccgaagtgatta

SEQ ID NO: 601668 - DNA, 19 bp, Mus musculus
  siRNA target sequence for Ext1 (NM_010162.1,1694-1712).
cattctccgaagtgattaa

SEQ ID NO: 601669 - DNA, 19 bp, Mus musculus
  siRNA target sequence for Ext1 (NM_010162.1,1735-1753).
ggcgatgagagattgctat

SEQ ID NO: 601670 - DNA, 19 bp, Mus musculus
  siRNA target sequence for Ext1 (NM_010162.1,1736-1754).
gcgatgagagattgctatt

SEQ ID NO: 601671 - DNA, 19 bp, Mus musculus
  siRNA target sequence for Ext1 (NM_010162.1,1737-1755).
cgatgagagattgctatta

SEQ ID NO: 601672 - DNA, 19 bp, Mus musculus
  siRNA target sequence for Ext1 (NM_010162.1,1741-1759).
gagagattgctattacaga

SEQ ID NO: 601673 - DNA, 19 bp, Mus musculus
  siRNA target sequence for Ext1 (NM_010162.1,1743-1761).
gagattgctattacagatt

SEQ ID NO: 601674 - DNA, 19 bp, Mus musculus
  siRNA target sequence for Ext1 (NM_010162.1,1775-1793).
ggtctattcatcaggataa

SEQ ID NO: 601675 - DNA, 19 bp, Mus musculus
  siRNA target sequence for Ext1 (NM_010162.1,1778-1796).
ctattcatcaggataaaat

SEQ ID NO: 601676 - DNA, 19 bp, Mus musculus
  siRNA target sequence for Ext1 (NM_010162.1,1824-1842).
cttgtgggaggcttatttt

SEQ ID NO: 601677 - DNA, 19 bp, Mus musculus
  siRNA target sequence for Ext1 (NM_010162.1,1857-1875).
gattgtattaactacacta

SEQ ID NO: 601678 - DNA, 19 bp, Mus musculus
  siRNA target sequence for Ext1 (NM_010162.1,1878-1896).
gattattcaggacagaata

SEQ ID NO: 601679 - DNA, 19 bp, Mus musculus
  siRNA target sequence for Ext1 (NM_010162.1,1902-1920).
gcacatatcacgtaacagt

SEQ ID NO: 601680 - DNA, 19 bp, Mus musculus
  siRNA target sequence for Ext1 (NM_010162.1,1903-1921).
cacatatcacgtaacagtt

SEQ ID NO: 601681 - DNA, 19 bp, Mus musculus
  siRNA target sequence for Ext1 (NM_010162.1,1905-1923).
catatcacgtaacagttta

SEQ ID NO: 601682 - DNA, 19 bp, Mus musculus
  siRNA target sequence for Ext1 (NM_010162.1,1912-1930).
cgtaacagtttaatatgga

SEQ ID NO: 601683 - DNA, 19 bp, Mus musculus
  siRNA target sequence for Ext1 (NM_010162.1,1919-1937).
gtttaatatggaacaaaca

SEQ ID NO: 601684 - DNA, 19 bp, Mus musculus
  siRNA target sequence for Ext1 (NM_010162.1,1953-1971).
cgtcctaccgcagtattca

SEQ ID NO: 601685 - DNA, 19 bp, Mus musculus
  siRNA target sequence for Ext1 (NM_010162.1,1954-1972).
gtcctaccgcagtattcat

SEQ ID NO: 601686 - DNA, 19 bp, Mus musculus
  siRNA target sequence for Ext1 (NM_010162.1,1956-1974).
cctaccgcagtattcatct

SEQ ID NO: 601687 - DNA, 19 bp, Mus musculus
  siRNA target sequence for Ext1 (NM_010162.1,1957-1975).
ctaccgcagtattcatctt

SEQ ID NO: 601688 - DNA, 19 bp, Mus musculus
  siRNA target sequence for Ext1 (NM_010162.1,1989-2007).
cccttactactatgctaat

SEQ ID NO: 601689 - DNA, 19 bp, Mus musculus
  siRNA target sequence for Ext1 (NM_010162.1,1990-2008).
ccttactactatgctaatt

SEQ ID NO: 601690 - DNA, 19 bp, Mus musculus
  siRNA target sequence for Ext1 (NM_010162.1,1991-2009).
cttactactatgctaattt

SEQ ID NO: 601691 - DNA, 19 bp, Mus musculus
  siRNA target sequence for Ext1 (NM_010162.1,1995-2013).
ctactatgctaatttaggt

SEQ ID NO: 601692 - DNA, 19 bp, Mus musculus
  siRNA target sequence for Ext1 (NM_010162.1,1998-2016).
ctatgctaatttaggttta

SEQ ID NO: 601693 - DNA, 19 bp, Mus musculus
  siRNA target sequence for Ext1 (NM_010162.1,2118-2136).
gtactgtgcgcagatcata

SEQ ID NO: 601694 - DNA, 19 bp, Mus musculus
  siRNA target sequence for Ext1 (NM_010162.1,2121-2139).
ctgtgcgcagatcatagtt

SEQ ID NO: 601695 - DNA, 19 bp, Mus musculus
  siRNA target sequence for Ext1 (NM_010162.1,2123-2141).
gtgcgcagatcatagttct

SEQ ID NO: 601696 - DNA, 19 bp, Mus musculus
  siRNA target sequence for Ext1 (NM_010162.1,2196-2214).
gcctgtcatcgtcattgaa

SEQ ID NO: 601697 - DNA, 19 bp, Mus musculus
  siRNA target sequence for Ext1 (NM_010162.1,2237-2255).
ggtttctgccctatgacaa

SEQ ID NO: 601698 - DNA, 19 bp, Mus musculus
  siRNA target sequence for Ext1 (NM_010162.1,2287-2305).
gaggacactgtgctttcaa

SEQ ID NO: 601699 - DNA, 19 bp, Mus musculus
  siRNA target sequence for Ext1 (NM_010162.1,2289-2307).
ggacactgtgctttcaact

SEQ ID NO: 601700 - DNA, 19 bp, Mus musculus
  siRNA target sequence for Ext1 (NM_010162.1,2400-2418).
ggagcggtggggatataca

SEQ ID NO: 601701 - DNA, 19 bp, Mus musculus
  siRNA target sequence for Ext1 (NM_010162.1,2458-2476).
gctgctatctaccacaaat

SEQ ID NO: 601702 - DNA, 19 bp, Mus musculus
  siRNA target sequence for Ext1 (NM_010162.1,2462-2480).
ctatctaccacaaatatta

SEQ ID NO: 601703 - DNA, 19 bp, Mus musculus
  siRNA target sequence for Ext1 (NM_010162.1,2540-2558).
ccaactgtgaggacattct

SEQ ID NO: 601704 - DNA, 19 bp, Mus musculus
  siRNA target sequence for Ext2 (NM_010163.1,302-320).
catagccacgggcatgttt

SEQ ID NO: 601705 - DNA, 19 bp, Mus musculus
  siRNA target sequence for Ext2 (NM_010163.1,306-324).
gccacgggcatgtttcagt

SEQ ID NO: 601706 - DNA, 19 bp, Mus musculus
  siRNA target sequence for Ext2 (NM_010163.1,432-450).
ggggatctcagctgtagaa

SEQ ID NO: 601707 - DNA, 19 bp, Mus musculus
  siRNA target sequence for Ext2 (NM_010163.1,478-496).
gcggcttcaacccaaagaa

SEQ ID NO: 601708 - DNA, 19 bp, Mus musculus
  siRNA target sequence for Ext2 (NM_010163.1,515-533).
ctaccccctaaaaaagtat

SEQ ID NO: 601709 - DNA, 19 bp, Mus musculus
  siRNA target sequence for Ext2 (NM_010163.1,654-672).
ccctccattgacgtactaa

SEQ ID NO: 601710 - DNA, 19 bp, Mus musculus
  siRNA target sequence for Ext2 (NM_010163.1,655-673).
cctccattgacgtactaaa

SEQ ID NO: 601711 - DNA, 19 bp, Mus musculus
  siRNA target sequence for Ext2 (NM_010163.1,658-676).
ccattgacgtactaaacca

SEQ ID NO: 601712 - DNA, 19 bp, Mus musculus
  siRNA target sequence for Ext2 (NM_010163.1,674-692).
ccagaacccccttcgaata

SEQ ID NO: 601713 - DNA, 19 bp, Mus musculus
  siRNA target sequence for Ext2 (NM_010163.1,675-693).
cagaacccccttcgaataa

SEQ ID NO: 601714 - DNA, 19 bp, Mus musculus
  siRNA target sequence for Ext2 (NM_010163.1,728-746).
gtgggatcgaggaacaaat

SEQ ID NO: 601715 - DNA, 19 bp, Mus musculus
  siRNA target sequence for Ext2 (NM_010163.1,771-789).
ggagctcccccagattaca

SEQ ID NO: 601716 - DNA, 19 bp, Mus musculus
  siRNA target sequence for Ext2 (NM_010163.1,772-790).
gagctcccccagattacaa

SEQ ID NO: 601717 - DNA, 19 bp, Mus musculus
  siRNA target sequence for Ext2 (NM_010163.1,774-792).
gctcccccagattacaaca

SEQ ID NO: 601718 - DNA, 19 bp, Mus musculus
  siRNA target sequence for Ext2 (NM_010163.1,828-846).
gctggtggcggcttttcta

SEQ ID NO: 601719 - DNA, 19 bp, Mus musculus
  siRNA target sequence for Ext2 (NM_010163.1,1125-1143).
ctgcaggaggctacttttt

SEQ ID NO: 601720 - DNA, 19 bp, Mus musculus
  siRNA target sequence for Ext2 (NM_010163.1,1127-1145).
gcaggaggctactttttgt

SEQ ID NO: 601721 - DNA, 19 bp, Mus musculus
  siRNA target sequence for Ext2 (NM_010163.1,1128-1146).
caggaggctactttttgta

SEQ ID NO: 601722 - DNA, 19 bp, Mus musculus
  siRNA target sequence for Ext2 (NM_010163.1,1220-1238).
cattgcagactcttatatt

SEQ ID NO: 601723 - DNA, 19 bp, Mus musculus
  siRNA target sequence for Ext2 (NM_010163.1,1372-1390).
ggttctgggaggcatactt

SEQ ID NO: 601724 - DNA, 19 bp, Mus musculus
  siRNA target sequence for Ext2 (NM_010163.1,1383-1401).
gcatacttccagtccatta

SEQ ID NO: 601725 - DNA, 19 bp, Mus musculus
  siRNA target sequence for Ext2 (NM_010163.1,1430-1448).
catcaatgacaggatctat

SEQ ID NO: 601726 - DNA, 19 bp, Mus musculus
  siRNA target sequence for Ext2 (NM_010163.1,1650-1668).
gtggtctggaataatcaga

SEQ ID NO: 601727 - DNA, 19 bp, Mus musculus
  siRNA target sequence for Ext2 (NM_010163.1,1830-1848).
gacgagctgcagtttggtt

SEQ ID NO: 601728 - DNA, 19 bp, Mus musculus
  siRNA target sequence for Ext2 (NM_010163.1,1909-1927).
gggaccacgagatgaacaa

SEQ ID NO: 601729 - DNA, 19 bp, Mus musculus
  siRNA target sequence for Ext2 (NM_010163.1,1911-1929).
gaccacgagatgaacaagt

SEQ ID NO: 601730 - DNA, 19 bp, Mus musculus
  siRNA target sequence for Ext2 (NM_010163.1,2209-2227).
gatctgagtgcatcaacaa

SEQ ID NO: 601731 - DNA, 19 bp, Mus musculus
  siRNA target sequence for Ext2 (NM_010163.1,2212-2230).
ctgagtgcatcaacaagtt

SEQ ID NO: 601732 - DNA, 19 bp, Mus musculus
  siRNA target sequence for Extl1 (NM_019578.1,207-225).
ctgccttcttacagagttt

SEQ ID NO: 601733 - DNA, 19 bp, Mus musculus
  siRNA target sequence for Extl1 (NM_019578.1,327-345).
ggggaaaggtcctcaagat

SEQ ID NO: 601734 - DNA, 19 bp, Mus musculus
  siRNA target sequence for Extl1 (NM_019578.1,387-405).
gcaggatcctggattcctt

SEQ ID NO: 601735 - DNA, 19 bp, Mus musculus
  siRNA target sequence for Extl1 (NM_019578.1,1105-1123).
ctcctcggtggaaaaagtt

SEQ ID NO: 601736 - DNA, 19 bp, Mus musculus
  siRNA target sequence for Extl1 (NM_019578.1,1110-1128).
cggtggaaaaagttatcca

SEQ ID NO: 601737 - DNA, 19 bp, Mus musculus
  siRNA target sequence for Extl1 (NM_019578.1,1111-1129).
ggtggaaaaagttatccat

SEQ ID NO: 601738 - DNA, 19 bp, Mus musculus
  siRNA target sequence for Extl1 (NM_019578.1,1112-1130).
gtggaaaaagttatccata

SEQ ID NO: 601739 - DNA, 19 bp, Mus musculus
  siRNA target sequence for Extl1 (NM_019578.1,1131-1149).
ccaccctagaggttattca

SEQ ID NO: 601740 - DNA, 19 bp, Mus musculus
  siRNA target sequence for Extl1 (NM_019578.1,1217-1235).
gcgctgcccacattttcca

SEQ ID NO: 601741 - DNA, 19 bp, Mus musculus
  siRNA target sequence for Extl1 (NM_019578.1,1791-1809).
gtgttgacgtcctgatgaa

SEQ ID NO: 601742 - DNA, 19 bp, Mus musculus
  siRNA target sequence for Extl1 (NM_019578.1,1793-1811).
gttgacgtcctgatgaact

SEQ ID NO: 601743 - DNA, 19 bp, Mus musculus
  siRNA target sequence for Extl1 (NM_019578.1,1830-1848).
ccaaactgccccctatcaa

SEQ ID NO: 601744 - DNA, 19 bp, Mus musculus
  siRNA target sequence for Extl1 (NM_019578.1,1998-2016).
gtctggatccggtgttgtt

SEQ ID NO: 601745 - DNA, 19 bp, Mus musculus
  siRNA target sequence for Extl1 (NM_019578.1,2000-2018).
ctggatccggtgttgttca

SEQ ID NO: 601746 - DNA, 19 bp, Mus musculus
  siRNA target sequence for Extl1 (NM_019578.1,2032-2050).
ggtgcaacgcaagaagtat

SEQ ID NO: 601747 - DNA, 19 bp, Mus musculus
  siRNA target sequence for Extl2 (NM_021388.2,925-943).
gacgatgacacactcatta

SEQ ID NO: 601748 - DNA, 19 bp, Mus musculus
  siRNA target sequence for Extl2 (NM_021388.2,927-945).
cgatgacacactcattagt

SEQ ID NO: 601749 - DNA, 19 bp, Mus musculus
  siRNA target sequence for Extl2 (NM_021388.2,944-962).
gtgcccaggaccttgtttt

SEQ ID NO: 601750 - DNA, 19 bp, Mus musculus
  siRNA target sequence for Extl2 (NM_021388.2,955-973).
cttgttttcgctttctcaa

SEQ ID NO: 601751 - DNA, 19 bp, Mus musculus
  siRNA target sequence for Extl2 (NM_021388.2,958-976).
gttttcgctttctcaattt

SEQ ID NO: 601752 - DNA, 19 bp, Mus musculus
  siRNA target sequence for Extl2 (NM_021388.2,969-987).
ctcaatttggcagcaattt

SEQ ID NO: 601753 - DNA, 19 bp, Mus musculus
  siRNA target sequence for Extl2 (NM_021388.2,988-1006).
cctgatcagatcataggat

SEQ ID NO: 601754 - DNA, 19 bp, Mus musculus
  siRNA target sequence for Extl2 (NM_021388.2,989-1007).
ctgatcagatcataggatt

SEQ ID NO: 601755 - DNA, 19 bp, Mus musculus
  siRNA target sequence for Extl2 (NM_021388.2,1034-1052).
cctccgggatctacagtta

SEQ ID NO: 601756 - DNA, 19 bp, Mus musculus
  siRNA target sequence for Extl2 (NM_021388.2,1205-1223).
gtgacgacatcgctatgaa

SEQ ID NO: 601757 - DNA, 19 bp, Mus musculus
  siRNA target sequence for Extl2 (NM_021388.2,1207-1225).
gacgacatcgctatgaatt

SEQ ID NO: 601758 - DNA, 19 bp, Mus musculus
  siRNA target sequence for Extl2 (NM_021388.2,1355-1373).
cctactgtataaataagct

SEQ ID NO: 601759 - DNA, 19 bp, Mus musculus
  siRNA target sequence for Extl2 (NM_021388.2,1361-1379).
gtataaataagctcgttaa

SEQ ID NO: 601760 - DNA, 19 bp, Mus musculus
  siRNA target sequence for Extl2 (NM_021388.2,1387-1405).
gacggcatgcccttaaagt

SEQ ID NO: 601761 - DNA, 19 bp, Mus musculus
  siRNA target sequence for Extl2 (NM_021388.2,1398-1416).
cttaaagtactccaacatt

SEQ ID NO: 601762 - DNA, 19 bp, Mus musculus
  siRNA target sequence for Extl2 (NM_021388.2,1438-1456).
ccgtatgccaaccataaaa

SEQ ID NO: 601763 - DNA, 19 bp, Mus musculus
  siRNA target sequence for Extl2 (NM_021388.2,1440-1458).
gtatgccaaccataaaagt

SEQ ID NO: 601764 - DNA, 19 bp, Mus musculus
  siRNA target sequence for Extl3 (NM_018788.1,555-573).
gtttcacgctgttcatcat

SEQ ID NO: 601765 - DNA, 19 bp, Mus musculus
  siRNA target sequence for Extl3 (NM_018788.1,588-606).
ccctcattgctcactatta

SEQ ID NO: 601766 - DNA, 19 bp, Mus musculus
  siRNA target sequence for Extl3 (NM_018788.1,784-802).
gctgaacctcaagattgaa

SEQ ID NO: 601767 - DNA, 19 bp, Mus musculus
  siRNA target sequence for Extl3 (NM_018788.1,981-999).
ggggttgccgccttcacaa

SEQ ID NO: 601768 - DNA, 19 bp, Mus musculus
  siRNA target sequence for Extl3 (NM_018788.1,1040-1058).
cccgtctacgtctatgaca

SEQ ID NO: 601769 - DNA, 19 bp, Mus musculus
  siRNA target sequence for Extl3 (NM_018788.1,1119-1137).
cagtgagagccaacgttta

SEQ ID NO: 601770 - DNA, 19 bp, Mus musculus
  siRNA target sequence for Extl3 (NM_018788.1,1123-1141).
gagagccaacgtttatgtt

SEQ ID NO: 601771 - DNA, 19 bp, Mus musculus
  siRNA target sequence for Extl3 (NM_018788.1,1128-1146).
ccaacgtttatgttacaga

SEQ ID NO: 601772 - DNA, 19 bp, Mus musculus
  siRNA target sequence for Extl3 (NM_018788.1,1129-1147).
caacgtttatgttacagaa

SEQ ID NO: 601773 - DNA, 19 bp, Mus musculus
  siRNA target sequence for Extl3 (NM_018788.1,1164-1182).
gcctgtatgtggtgttagt

SEQ ID NO: 601774 - DNA, 19 bp, Mus musculus
  siRNA target sequence for Extl3 (NM_018788.1,1177-1195).
gttagtgggagaaatgcaa

SEQ ID NO: 601775 - DNA, 19 bp, Mus musculus
  siRNA target sequence for Extl3 (NM_018788.1,1211-1229).
cggcctgccgaccttgaaa

SEQ ID NO: 601776 - DNA, 19 bp, Mus musculus
  siRNA target sequence for Extl3 (NM_018788.1,1212-1230).
ggcctgccgaccttgaaaa

SEQ ID NO: 601777 - DNA, 19 bp, Mus musculus
  siRNA target sequence for Extl3 (NM_018788.1,1215-1233).
ctgccgaccttgaaaagca

SEQ ID NO: 601778 - DNA, 19 bp, Mus musculus
  siRNA target sequence for Extl3 (NM_018788.1,1223-1241).
cttgaaaagcagctgtttt

SEQ ID NO: 601779 - DNA, 19 bp, Mus musculus
  siRNA target sequence for Extl3 (NM_018788.1,1265-1283).
gggcacaaccacgtcatta

SEQ ID NO: 601780 - DNA, 19 bp, Mus musculus
  siRNA target sequence for Extl3 (NM_018788.1,1404-1422).
caccccttgtccatgctat

SEQ ID NO: 601781 - DNA, 19 bp, Mus musculus
  siRNA target sequence for Extl3 (NM_018788.1,1427-1445).
gaacccaacttcatggaaa

SEQ ID NO: 601782 - DNA, 19 bp, Mus musculus
  siRNA target sequence for Extl3 (NM_018788.1,1449-1467).
caccgcaggtgccagttaa

SEQ ID NO: 601783 - DNA, 19 bp, Mus musculus
  siRNA target sequence for Extl3 (NM_018788.1,1459-1477).
gccagttaagcggaaatat

SEQ ID NO: 601784 - DNA, 19 bp, Mus musculus
  siRNA target sequence for Extl3 (NM_018788.1,1461-1479).
cagttaagcggaaatatct

SEQ ID NO: 601785 - DNA, 19 bp, Mus musculus
  siRNA target sequence for Extl3 (NM_018788.1,1463-1481).
gttaagcggaaatatctct

SEQ ID NO: 601786 - DNA, 19 bp, Mus musculus
  siRNA target sequence for Extl3 (NM_018788.1,1469-1487).
cggaaatatctcttcactt

SEQ ID NO: 601787 - DNA, 19 bp, Mus musculus
  siRNA target sequence for Extl3 (NM_018788.1,1634-1652).
gtgctggtagaattcactt

SEQ ID NO: 601788 - DNA, 19 bp, Mus musculus
  siRNA target sequence for Extl3 (NM_018788.1,1639-1657).
ggtagaattcacttgcaaa

SEQ ID NO: 601789 - DNA, 19 bp, Mus musculus
  siRNA target sequence for Extl3 (NM_018788.1,1640-1658).
gtagaattcacttgcaaaa

SEQ ID NO: 601790 - DNA, 19 bp, Mus musculus
  siRNA target sequence for Extl3 (NM_018788.1,1712-1730).
gaccgcctggagttactga

SEQ ID NO: 601791 - DNA, 19 bp, Mus musculus
  siRNA target sequence for Extl3 (NM_018788.1,1931-1949).
gtccacttcctgttacgaa

SEQ ID NO: 601792 - DNA, 19 bp, Mus musculus
  siRNA target sequence for Extl3 (NM_018788.1,1936-1954).
cttcctgttacgaagtctt

SEQ ID NO: 601793 - DNA, 19 bp, Mus musculus
  siRNA target sequence for Extl3 (NM_018788.1,1939-1957).
cctgttacgaagtctttca

SEQ ID NO: 601794 - DNA, 19 bp, Mus musculus
  siRNA target sequence for Extl3 (NM_018788.1,1982-2000).
cggcaaggccgctttctct

SEQ ID NO: 601795 - DNA, 19 bp, Mus musculus
  siRNA target sequence for Extl3 (NM_018788.1,2014-2032).
ctccaccgcagacagtatt

SEQ ID NO: 601796 - DNA, 19 bp, Mus musculus
  siRNA target sequence for Extl3 (NM_018788.1,2016-2034).
ccaccgcagacagtatttt

SEQ ID NO: 601797 - DNA, 19 bp, Mus musculus
  siRNA target sequence for Extl3 (NM_018788.1,2017-2035).
caccgcagacagtattttt

SEQ ID NO: 601798 - DNA, 19 bp, Mus musculus
  siRNA target sequence for Extl3 (NM_018788.1,2019-2037).
ccgcagacagtatttttaa

SEQ ID NO: 601799 - DNA, 19 bp, Mus musculus
  siRNA target sequence for Extl3 (NM_018788.1,2020-2038).
cgcagacagtatttttaat

SEQ ID NO: 601800 - DNA, 19 bp, Mus musculus
  siRNA target sequence for Extl3 (NM_018788.1,2042-2060).
gtgctggccatgattagga

SEQ ID NO: 601801 - DNA, 19 bp, Mus musculus
  siRNA target sequence for Extl3 (NM_018788.1,2050-2068).
catgattaggactcgaatt

SEQ ID NO: 601802 - DNA, 19 bp, Mus musculus
  siRNA target sequence for Extl3 (NM_018788.1,2201-2219).
ccctatgcctcacctaaat

SEQ ID NO: 601803 - DNA, 19 bp, Mus musculus
  siRNA target sequence for Extl3 (NM_018788.1,2202-2220).
cctatgcctcacctaaata

SEQ ID NO: 601804 - DNA, 19 bp, Mus musculus
  siRNA target sequence for Extl3 (NM_018788.1,2214-2232).
ctaaatacctccgcaattt

SEQ ID NO: 601805 - DNA, 19 bp, Mus musculus
  siRNA target sequence for Extl3 (NM_018788.1,2558-2576).
ccctcggaggaccttttgt

SEQ ID NO: 601806 - DNA, 19 bp, Mus musculus
  siRNA target sequence for Extl3 (NM_018788.1,2569-2587).
ccttttgtggccagacatt

SEQ ID NO: 601807 - DNA, 19 bp, Mus musculus
  siRNA target sequence for Extl3 (NM_018788.1,2606-2624).
gtccgtactgagaagaaca

SEQ ID NO: 601808 - DNA, 19 bp, Mus musculus
  siRNA target sequence for Extl3 (NM_018788.1,2660-2678).
gagacagaggccatactgt

SEQ ID NO: 601809 - DNA, 19 bp, Mus musculus
  siRNA target sequence for Extl3 (NM_018788.1,2694-2712).
ctcacctccgccatgatga

SEQ ID NO: 601810 - DNA, 19 bp, Mus musculus
  siRNA target sequence for Extl3 (NM_018788.1,2699-2717).
ctccgccatgatgaaatca

SEQ ID NO: 601811 - DNA, 19 bp, Mus musculus
  siRNA target sequence for Extl3 (NM_018788.1,2883-2901).
cctacctgtattcttatgt

SEQ ID NO: 601812 - DNA, 19 bp, Mus musculus
  siRNA target sequence for Extl3 (NM_018788.1,2948-2966).
gaggatatcgccatgaact

SEQ ID NO: 601813 - DNA, 19 bp, Mus musculus
  siRNA target sequence for Extl3 (NM_018788.1,3077-3095).
gagcggcacaagtgtatca

SEQ ID NO: 601814 - DNA, 19 bp, Mus musculus
  siRNA target sequence for Extl3 (NM_018788.1,3080-3098).
cggcacaagtgtatcaact

SEQ ID NO: 601815 - DNA, 19 bp, Mus musculus
  siRNA target sequence for Extl3 (NM_018788.1,3081-3099).
ggcacaagtgtatcaactt

SEQ ID NO: 601816 - DNA, 19 bp, Mus musculus
  siRNA target sequence for Extl3 (NM_018788.1,3082-3100).
gcacaagtgtatcaacttt

SEQ ID NO: 601817 - DNA, 19 bp, Mus musculus
  siRNA target sequence for Extl3 (NM_018788.1,3083-3101).
cacaagtgtatcaactttt

SEQ ID NO: 601818 - DNA, 19 bp, Mus musculus
  siRNA target sequence for Extl3 (NM_018788.1,3192-3210).
ccaagtgcttcaagttcat

SEQ ID NO: 601819 - DNA, 19 bp, Mus musculus
  siRNA target sequence for Galgt2 (NM_008081.1,44-62).
gacttccagcgtgtctttt

SEQ ID NO: 601820 - DNA, 19 bp, Mus musculus
  siRNA target sequence for Galgt2 (NM_008081.1,118-136).
ccactgttgcgtttatggt

SEQ ID NO: 601821 - DNA, 19 bp, Mus musculus
  siRNA target sequence for Galgt2 (NM_008081.1,166-184).
gcaccttcaagccaaagtt

SEQ ID NO: 601822 - DNA, 19 bp, Mus musculus
  siRNA target sequence for Galgt2 (NM_008081.1,266-284).
ctggctcttccccaaaaat

SEQ ID NO: 601823 - DNA, 19 bp, Mus musculus
  siRNA target sequence for Galgt2 (NM_008081.1,268-286).
ggctcttccccaaaaatca

SEQ ID NO: 601824 - DNA, 19 bp, Mus musculus
  siRNA target sequence for Galgt2 (NM_008081.1,301-319).
ctggcaaactgcgaatgaa

SEQ ID NO: 601825 - DNA, 19 bp, Mus musculus
  siRNA target sequence for Galgt2 (NM_008081.1,304-322).
gcaaactgcgaatgaaata

SEQ ID NO: 601826 - DNA, 19 bp, Mus musculus
  siRNA target sequence for Galgt2 (NM_008081.1,509-527).
cccaggcctccagtatgaa

SEQ ID NO: 601827 - DNA, 19 bp, Mus musculus
  siRNA target sequence for Galgt2 (NM_008081.1,657-675).
cggaaggtcctgaatttca

SEQ ID NO: 601828 - DNA, 19 bp, Mus musculus
  siRNA target sequence for Galgt2 (NM_008081.1,719-737).
caaggtggacacagtaagt

SEQ ID NO: 601829 - DNA, 19 bp, Mus musculus
  siRNA target sequence for Galgt2 (NM_008081.1,726-744).
gacacagtaagtatggaat

SEQ ID NO: 601830 - DNA, 19 bp, Mus musculus
  siRNA target sequence for Galgt2 (NM_008081.1,730-748).
cagtaagtatggaatacga

SEQ ID NO: 601831 - DNA, 19 bp, Mus musculus
  siRNA target sequence for Galgt2 (NM_008081.1,749-767).
gtcgtcagtggccaagttt

SEQ ID NO: 601832 - DNA, 19 bp, Mus musculus
  siRNA target sequence for Galgt2 (NM_008081.1,760-778).
ccaagtttccagtgactat

SEQ ID NO: 601833 - DNA, 19 bp, Mus musculus
  siRNA target sequence for Galgt2 (NM_008081.1,769-787).
cagtgactatcaaacaaca

SEQ ID NO: 601834 - DNA, 19 bp, Mus musculus
  siRNA target sequence for Galgt2 (NM_008081.1,788-806).
gactgtacccaagttgtat

SEQ ID NO: 601835 - DNA, 19 bp, Mus musculus
  siRNA target sequence for Galgt2 (NM_008081.1,884-902).
gatcctgcttcagagtatt

SEQ ID NO: 601836 - DNA, 19 bp, Mus musculus
  siRNA target sequence for Galgt2 (NM_008081.1,887-905).
cctgcttcagagtattcga

SEQ ID NO: 601837 - DNA, 19 bp, Mus musculus
  siRNA target sequence for Galgt2 (NM_008081.1,888-906).
ctgcttcagagtattcgaa

SEQ ID NO: 601838 - DNA, 19 bp, Mus musculus
  siRNA target sequence for Galgt2 (NM_008081.1,891-909).
cttcagagtattcgaaaat

SEQ ID NO: 601839 - DNA, 19 bp, Mus musculus
  siRNA target sequence for Galgt2 (NM_008081.1,894-912).
cagagtattcgaaaatatt

SEQ ID NO: 601840 - DNA, 19 bp, Mus musculus
  siRNA target sequence for Galgt2 (NM_008081.1,955-973).
ccctggaaattaatgatga

SEQ ID NO: 601841 - DNA, 19 bp, Mus musculus
  siRNA target sequence for Galgt2 (NM_008081.1,1037-1055).
ctcacaggtgactactaaa

SEQ ID NO: 601842 - DNA, 19 bp, Mus musculus
  siRNA target sequence for Galgt2 (NM_008081.1,1157-1175).
cagcgtgcaggggaatact

SEQ ID NO: 601843 - DNA, 19 bp, Mus musculus
  siRNA target sequence for Galgt2 (NM_008081.1,1159-1177).
gcgtgcaggggaatactta

SEQ ID NO: 601844 - DNA, 19 bp, Mus musculus
  siRNA target sequence for Galgt2 (NM_008081.1,1358-1376).
ggcccacggagagttcttt

SEQ ID NO: 601845 - DNA, 19 bp, Mus musculus
  siRNA target sequence for Galgt2 (NM_008081.1,1359-1377).
gcccacggagagttcttta

SEQ ID NO: 601846 - DNA, 19 bp, Mus musculus
  siRNA target sequence for Galgt2 (NM_008081.1,1360-1378).
cccacggagagttctttat

SEQ ID NO: 601847 - DNA, 19 bp, Mus musculus
  siRNA target sequence for Galgt2 (NM_008081.1,1361-1379).
ccacggagagttctttatt

SEQ ID NO: 601848 - DNA, 19 bp, Mus musculus
  siRNA target sequence for Galgt2 (NM_008081.1,1364-1382).
cggagagttctttattgat

SEQ ID NO: 601849 - DNA, 19 bp, Mus musculus
  siRNA target sequence for Galgt2 (NM_008081.1,1468-1486).
ctgccttggagaagactta

SEQ ID NO: 601850 - DNA, 19 bp, Mus musculus
  siRNA target sequence for Galgt2 (NM_008081.1,1476-1494).
gagaagacttatgacaaat

SEQ ID NO: 601851 - DNA, 19 bp, Mus musculus
  siRNA target sequence for Has1 (NM_008215.1,109-127).
cgagcactcacgatcatct

SEQ ID NO: 601852 - DNA, 19 bp, Mus musculus
  siRNA target sequence for Has1 (NM_008215.1,174-192).
cgttcctctggcttcagat

SEQ ID NO: 601853 - DNA, 19 bp, Mus musculus
  siRNA target sequence for Has1 (NM_008215.1,473-491).
gcgctgaggatctgtacat

SEQ ID NO: 601854 - DNA, 19 bp, Mus musculus
  siRNA target sequence for Has1 (NM_008215.1,857-875).
gggatgtgaggatccttaa

SEQ ID NO: 601855 - DNA, 19 bp, Mus musculus
  siRNA target sequence for Has1 (NM_008215.1,992-1010).
gtctatacagaaacaatct

SEQ ID NO: 601856 - DNA, 19 bp, Mus musculus
  siRNA target sequence for Has1 (NM_008215.1,1030-1048).
gcctggtacaaccaaaagt

SEQ ID NO: 601857 - DNA, 19 bp, Mus musculus
  siRNA target sequence for Has1 (NM_008215.1,1031-1049).
cctggtacaaccaaaagtt

SEQ ID NO: 601858 - DNA, 19 bp, Mus musculus
  siRNA target sequence for Has1 (NM_008215.1,1086-1104).
cctcaccaaccgaatgctt

SEQ ID NO: 601859 - DNA, 19 bp, Mus musculus
  siRNA target sequence for Has1 (NM_008215.1,1087-1105).
ctcaccaaccgaatgctta

SEQ ID NO: 601860 - DNA, 19 bp, Mus musculus
  siRNA target sequence for Has1 (NM_008215.1,1091-1109).
ccaaccgaatgcttagcat

SEQ ID NO: 601861 - DNA, 19 bp, Mus musculus
  siRNA target sequence for Has1 (NM_008215.1,1102-1120).
cttagcatgggctatgcta

SEQ ID NO: 601862 - DNA, 19 bp, Mus musculus
  siRNA target sequence for Has1 (NM_008215.1,1111-1129).
ggctatgctaccaagtata

SEQ ID NO: 601863 - DNA, 19 bp, Mus musculus
  siRNA target sequence for Has1 (NM_008215.1,1189-1207).
cagacccgctggtccaaat

SEQ ID NO: 601864 - DNA, 19 bp, Mus musculus
  siRNA target sequence for Has1 (NM_008215.1,1193-1211).
cccgctggtccaaatctta

SEQ ID NO: 601865 - DNA, 19 bp, Mus musculus
  siRNA target sequence for Has1 (NM_008215.1,1195-1213).
cgctggtccaaatcttact

SEQ ID NO: 601866 - DNA, 19 bp, Mus musculus
  siRNA target sequence for Has1 (NM_008215.1,1257-1275).
cgcatggatgacctatgaa

SEQ ID NO: 601867 - DNA, 19 bp, Mus musculus
  siRNA target sequence for Has1 (NM_008215.1,1316-1334).
cggtgttgaggctcttcta

SEQ ID NO: 601868 - DNA, 19 bp, Mus musculus
  siRNA target sequence for Has1 (NM_008215.1,1317-1335).
ggtgttgaggctcttctat

SEQ ID NO: 601869 - DNA, 19 bp, Mus musculus
  siRNA target sequence for Has1 (NM_008215.1,1499-1517).
cgttggttaccatgaatca

SEQ ID NO: 601870 - DNA, 19 bp, Mus musculus
  siRNA target sequence for Has1 (NM_008215.1,1500-1518).
gttggttaccatgaatcaa

SEQ ID NO: 601871 - DNA, 19 bp, Mus musculus
  siRNA target sequence for Has1 (NM_008215.1,1503-1521).
ggttaccatgaatcaaagt

SEQ ID NO: 601872 - DNA, 19 bp, Mus musculus
  siRNA target sequence for Has1 (NM_008215.1,1711-1729).
gcctactgggtggtaatgt

SEQ ID NO: 601873 - DNA, 19 bp, Mus musculus
  siRNA target sequence for Has1 (NM_008215.1,1713-1731).
ctactgggtggtaatgtta

SEQ ID NO: 601874 - DNA, 19 bp, Mus musculus
  siRNA target sequence for Has1 (NM_008215.1,1780-1798).
ggttaccgtgtccaagtat

SEQ ID NO: 601875 - DNA, 19 bp, Mus musculus
  siRNA target sequence for Has2 (NM_008216.2,511-529).
cattgtgagaggtttctat

SEQ ID NO: 601876 - DNA, 19 bp, Mus musculus
  siRNA target sequence for Has2 (NM_008216.2,526-544).
ctatgtgtcctgagaataa

SEQ ID NO: 601877 - DNA, 19 bp, Mus musculus
  siRNA target sequence for Has2 (NM_008216.2,579-597).
cggaatcacagctgcttat

SEQ ID NO: 601878 - DNA, 19 bp, Mus musculus
  siRNA target sequence for Has2 (NM_008216.2,581-599).
gaatcacagctgcttatat

SEQ ID NO: 601879 - DNA, 19 bp, Mus musculus
  siRNA target sequence for Has2 (NM_008216.2,612-630).
gtttatccaaacagataat

SEQ ID NO: 601880 - DNA, 19 bp, Mus musculus
  siRNA target sequence for Has2 (NM_008216.2,728-746).
cccttgaaaccccgattaa

SEQ ID NO: 601881 - DNA, 19 bp, Mus musculus
  siRNA target sequence for Has2 (NM_008216.2,729-747).
ccttgaaaccccgattaaa

SEQ ID NO: 601882 - DNA, 19 bp, Mus musculus
  siRNA target sequence for Has2 (NM_008216.2,737-755).
ccccgattaaattgaacaa

SEQ ID NO: 601883 - DNA, 19 bp, Mus musculus
  siRNA target sequence for Has2 (NM_008216.2,796-814).
gactacttacggaaatgtt

SEQ ID NO: 601884 - DNA, 19 bp, Mus musculus
  siRNA target sequence for Has2 (NM_008216.2,801-819).
cttacggaaatgtttgcaa

SEQ ID NO: 601885 - DNA, 19 bp, Mus musculus
  siRNA target sequence for Has2 (NM_008216.2,836-854).
cctaccctgggattaaagt

SEQ ID NO: 601886 - DNA, 19 bp, Mus musculus
  siRNA target sequence for Has2 (NM_008216.2,916-934).
gttattggcagggacaaat

SEQ ID NO: 601887 - DNA, 19 bp, Mus musculus
  siRNA target sequence for Has2 (NM_008216.2,984-1002).
gacagaagagtcccataaa

SEQ ID NO: 601888 - DNA, 19 bp, Mus musculus
  siRNA target sequence for Has2 (NM_008216.2,991-1009).
gagtcccataaagaaagtt

SEQ ID NO: 601889 - DNA, 19 bp, Mus musculus
  siRNA target sequence for Has2 (NM_008216.2,993-1011).
gtcccataaagaaagttca

SEQ ID NO: 601890 - DNA, 19 bp, Mus musculus
  siRNA target sequence for Has2 (NM_008216.2,1022-1040).
cccaattggtcttgtctaa

SEQ ID NO: 601891 - DNA, 19 bp, Mus musculus
  siRNA target sequence for Has2 (NM_008216.2,1024-1042).
caattggtcttgtctaaca

SEQ ID NO: 601892 - DNA, 19 bp, Mus musculus
  siRNA target sequence for Has2 (NM_008216.2,1029-1047).
ggtcttgtctaacaaaagt

SEQ ID NO: 601893 - DNA, 19 bp, Mus musculus
  siRNA target sequence for Has2 (NM_008216.2,1030-1048).
gtcttgtctaacaaaagta

SEQ ID NO: 601894 - DNA, 19 bp, Mus musculus
  siRNA target sequence for Has2 (NM_008216.2,1032-1050).
cttgtctaacaaaagtatt

SEQ ID NO: 601895 - DNA, 19 bp, Mus musculus
  siRNA target sequence for Has2 (NM_008216.2,1046-1064).
gtatttgcatcatgcaaaa

SEQ ID NO: 601896 - DNA, 19 bp, Mus musculus
  siRNA target sequence for Has2 (NM_008216.2,1110-1128).
ggggcgaagcgtggattat

SEQ ID NO: 601897 - DNA, 19 bp, Mus musculus
  siRNA target sequence for Has2 (NM_008216.2,1112-1130).
ggcgaagcgtggattatgt

SEQ ID NO: 601898 - DNA, 19 bp, Mus musculus
  siRNA target sequence for Has2 (NM_008216.2,1113-1131).
gcgaagcgtggattatgta

SEQ ID NO: 601899 - DNA, 19 bp, Mus musculus
  siRNA target sequence for Has2 (NM_008216.2,1115-1133).
gaagcgtggattatgtaca

SEQ ID NO: 601900 - DNA, 19 bp, Mus musculus
  siRNA target sequence for Has2 (NM_008216.2,1228-1246).
gatgtccagattttaaaca

SEQ ID NO: 601901 - DNA, 19 bp, Mus musculus
  siRNA target sequence for Has2 (NM_008216.2,1270-1288).
ctcagcagcgtgagatact

SEQ ID NO: 601902 - DNA, 19 bp, Mus musculus
  siRNA target sequence for Has2 (NM_008216.2,1349-1367).
gcggtcctctgggaatgta

SEQ ID NO: 601903 - DNA, 19 bp, Mus musculus
  siRNA target sequence for Has2 (NM_008216.2,1357-1375).
ctgggaatgtacagaaact

SEQ ID NO: 601904 - DNA, 19 bp, Mus musculus
  siRNA target sequence for Has2 (NM_008216.2,1403-1421).
ggtacaatcaggaattcat

SEQ ID NO: 601905 - DNA, 19 bp, Mus musculus
  siRNA target sequence for Has2 (NM_008216.2,1413-1431).
ggaattcatgggtaaccaa

SEQ ID NO: 601906 - DNA, 19 bp, Mus musculus
  siRNA target sequence for Has2 (NM_008216.2,1414-1432).
gaattcatgggtaaccaat

SEQ ID NO: 601907 - DNA, 19 bp, Mus musculus
  siRNA target sequence for Has2 (NM_008216.2,1475-1493).
gtctgggctatgcaactaa

SEQ ID NO: 601908 - DNA, 19 bp, Mus musculus
  siRNA target sequence for Has2 (NM_008216.2,1506-1524).
gtccaagtgccttactgaa

SEQ ID NO: 601909 - DNA, 19 bp, Mus musculus
  siRNA target sequence for Has2 (NM_008216.2,1509-1527).
caagtgccttactgaaact

SEQ ID NO: 601910 - DNA, 19 bp, Mus musculus
  siRNA target sequence for Has2 (NM_008216.2,1753-1771).
gtgggtctcatcaagtcat

SEQ ID NO: 601911 - DNA, 19 bp, Mus musculus
  siRNA target sequence for Has2 (NM_008216.2,1756-1774).
ggtctcatcaagtcatctt

SEQ ID NO: 601912 - DNA, 19 bp, Mus musculus
  siRNA target sequence for Has2 (NM_008216.2,1781-1799).
gctgccttagaggaaatat

SEQ ID NO: 601913 - DNA, 19 bp, Mus musculus
  siRNA target sequence for Has2 (NM_008216.2,1784-1802).
gccttagaggaaatatcgt

SEQ ID NO: 601914 - DNA, 19 bp, Mus musculus
  siRNA target sequence for Has2 (NM_008216.2,1817-1835).
ctctgtattcagtgttata

SEQ ID NO: 601915 - DNA, 19 bp, Mus musculus
  siRNA target sequence for Has2 (NM_008216.2,1830-1848).
gttatacatgtcaagtcta

SEQ ID NO: 601916 - DNA, 19 bp, Mus musculus
  siRNA target sequence for Has2 (NM_008216.2,1853-1871).
ctgccaagatgtttgcaat

SEQ ID NO: 601917 - DNA, 19 bp, Mus musculus
  siRNA target sequence for Has2 (NM_008216.2,1863-1881).
gtttgcaattgcaaccata

SEQ ID NO: 601918 - DNA, 19 bp, Mus musculus
  siRNA target sequence for Has2 (NM_008216.2,1867-1885).
gcaattgcaaccataaaca

SEQ ID NO: 601919 - DNA, 19 bp, Mus musculus
  siRNA target sequence for Has2 (NM_008216.2,1945-1963).
ccagtgtccgtgtggttta

SEQ ID NO: 601920 - DNA, 19 bp, Mus musculus
  siRNA target sequence for Has2 (NM_008216.2,1948-1966).
gtgtccgtgtggtttacaa

SEQ ID NO: 601921 - DNA, 19 bp, Mus musculus
  siRNA target sequence for Has2 (NM_008216.2,1953-1971).
cgtgtggtttacaatcctt

SEQ ID NO: 601922 - DNA, 19 bp, Mus musculus
  siRNA target sequence for Has2 (NM_008216.2,1968-1986).
ccttctaggtggtgtaatt

SEQ ID NO: 601923 - DNA, 19 bp, Mus musculus
  siRNA target sequence for Has2 (NM_008216.2,1972-1990).
ctaggtggtgtaattttca

SEQ ID NO: 601924 - DNA, 19 bp, Mus musculus
  siRNA target sequence for Has2 (NM_008216.2,2013-2031).
gccattttccgaatccaaa

SEQ ID NO: 601925 - DNA, 19 bp, Mus musculus
  siRNA target sequence for Has2 (NM_008216.2,2041-2059).
ctcatcgtgggaactttga

SEQ ID NO: 601926 - DNA, 19 bp, Mus musculus
  siRNA target sequence for Has2 (NM_008216.2,2046-2064).
cgtgggaactttgatctat

SEQ ID NO: 601927 - DNA, 19 bp, Mus musculus
  siRNA target sequence for Has2 (NM_008216.2,2079-2097).
catgcttttgactctctat

SEQ ID NO: 601928 - DNA, 19 bp, Mus musculus
  siRNA target sequence for Has2 (NM_008216.2,2100-2118).
ggttctcatcaataagtgt

SEQ ID NO: 601929 - DNA, 19 bp, Mus musculus
  siRNA target sequence for Has2 (NM_008216.2,2146-2164).
gacatggtgcttgatgtat

SEQ ID NO: 601930 - DNA, 19 bp, Mus musculus
  siRNA target sequence for Has3 (NM_008217.2,262-280).
gtgacaggctaccagttta

SEQ ID NO: 601931 - DNA, 19 bp, Mus musculus
  siRNA target sequence for Has3 (NM_008217.2,502-520).
cagcgcattgcctttccaa

SEQ ID NO: 601932 - DNA, 19 bp, Mus musculus
  siRNA target sequence for Has3 (NM_008217.2,621-639).
ctttgtgtggcgtagcaat

SEQ ID NO: 601933 - DNA, 19 bp, Mus musculus
  siRNA target sequence for Has3 (NM_008217.2,791-809).
gcaactcagtggactacat

SEQ ID NO: 601934 - DNA, 19 bp, Mus musculus
  siRNA target sequence for Has3 (NM_008217.2,902-920).
gaggagatgtccaaatcct

SEQ ID NO: 601935 - DNA, 19 bp, Mus musculus
  siRNA target sequence for Has3 (NM_008217.2,918-936).
cctcaacaagtatgattca

SEQ ID NO: 601936 - DNA, 19 bp, Mus musculus
  siRNA target sequence for Has3 (NM_008217.2,1009-1027).
ggctgtgtgcaatgtatta

SEQ ID NO: 601937 - DNA, 19 bp, Mus musculus
  siRNA target sequence for Has3 (NM_008217.2,1159-1177).
ggctaccggactaagtata

SEQ ID NO: 601938 - DNA, 19 bp, Mus musculus
  siRNA target sequence for Has3 (NM_008217.2,1161-1179).
ctaccggactaagtataca

SEQ ID NO: 601939 - DNA, 19 bp, Mus musculus
  siRNA target sequence for Has3 (NM_008217.2,1245-1263).
ctggagcaagtcttacttt

SEQ ID NO: 601940 - DNA, 19 bp, Mus musculus
  siRNA target sequence for Has3 (NM_008217.2,1264-1282).
cgggaatggctctacaatt

SEQ ID NO: 601941 - DNA, 19 bp, Mus musculus
  siRNA target sequence for Has3 (NM_008217.2,1266-1284).
ggaatggctctacaattct

SEQ ID NO: 601942 - DNA, 19 bp, Mus musculus
  siRNA target sequence for Has3 (NM_008217.2,1308-1326).
ctggatgacctatgaatca

SEQ ID NO: 601943 - DNA, 19 bp, Mus musculus
  siRNA target sequence for Has3 (NM_008217.2,1325-1343).
cagtggtcacaggtttctt

SEQ ID NO: 601944 - DNA, 19 bp, Mus musculus
  siRNA target sequence for Has3 (NM_008217.2,1353-1371).
cctcattgctacagtcata

SEQ ID NO: 601945 - DNA, 19 bp, Mus musculus
  siRNA target sequence for Has3 (NM_008217.2,1364-1382).
cagtcatacaacttttcta

SEQ ID NO: 601946 - DNA, 19 bp, Mus musculus
  siRNA target sequence for Has3 (NM_008217.2,1426-1444).
cagctggtgggcattatca

SEQ ID NO: 601947 - DNA, 19 bp, Mus musculus
  siRNA target sequence for Has3 (NM_008217.2,1472-1490).
gcaatgcagagatgatctt

SEQ ID NO: 601948 - DNA, 19 bp, Mus musculus
  siRNA target sequence for Has3 (NM_008217.2,1576-1594).
ggcacttctggcaggaaaa

SEQ ID NO: 601949 - DNA, 19 bp, Mus musculus
  siRNA target sequence for Has3 (NM_008217.2,1632-1650).
catctgggtggcagttctt

SEQ ID NO: 601950 - DNA, 19 bp, Mus musculus
  siRNA target sequence for Has3 (NM_008217.2,1659-1677).
gttagcctacacagcttat

SEQ ID NO: 601951 - DNA, 19 bp, Mus musculus
  siRNA target sequence for Lfng (NM_008494.2,528-546).
gagatgacgttcatcttca

SEQ ID NO: 601952 - DNA, 19 bp, Mus musculus
  siRNA target sequence for Lfng (NM_008494.2,650-668).
ggagtatgaccgattcatt

SEQ ID NO: 601953 - DNA, 19 bp, Mus musculus
  siRNA target sequence for Lfng (NM_008494.2,817-835).
ggatcagcgagcacaaagt

SEQ ID NO: 601954 - DNA, 19 bp, Mus musculus
  siRNA target sequence for Lfng (NM_008494.2,834-852).
gtgagacctgtccactttt

SEQ ID NO: 601955 - DNA, 19 bp, Mus musculus
  siRNA target sequence for Lfng (NM_008494.2,838-856).
gacctgtccacttttggtt

SEQ ID NO: 601956 - DNA, 19 bp, Mus musculus
  siRNA target sequence for Lfng (NM_008494.2,976-994).
ccattggctacattgtaga

SEQ ID NO: 601957 - DNA, 19 bp, Mus musculus
  siRNA target sequence for Lfng (NM_008494.2,1123-1141).
ggaacgcagtgcacatcaa

SEQ ID NO: 601958 - DNA, 19 bp, Mus musculus
  siRNA target sequence for Lfng (NM_008494.2,1221-1239).
cctcgctccgccatcttct

SEQ ID NO: 601959 - DNA, 19 bp, Mus musculus
  siRNA target sequence for Mfng (NM_008595.1,243-261).
ctacgataccactcaagtt

SEQ ID NO: 601960 - DNA, 19 bp, Mus musculus
  siRNA target sequence for Mfng (NM_008595.1,246-264).
cgataccactcaagtttgt

SEQ ID NO: 601961 - DNA, 19 bp, Mus musculus
  siRNA target sequence for Mfng (NM_008595.1,415-433).
ggatcaggcaacagacatt

SEQ ID NO: 601962 - DNA, 19 bp, Mus musculus
  siRNA target sequence for Mfng (NM_008595.1,421-439).
ggcaacagacattcatctt

SEQ ID NO: 601963 - DNA, 19 bp, Mus musculus
  siRNA target sequence for Mfng (NM_008595.1,423-441).
caacagacattcatcttca

SEQ ID NO: 601964 - DNA, 19 bp, Mus musculus
  siRNA target sequence for Mfng (NM_008595.1,486-504).
ctcgtggtcaccaactgtt

SEQ ID NO: 601965 - DNA, 19 bp, Mus musculus
  siRNA target sequence for Mfng (NM_008595.1,652-670).
cgcaggaccgtgatgtcta

SEQ ID NO: 601966 - DNA, 19 bp, Mus musculus
  siRNA target sequence for Ogt (NM_139144.1,21-39).
cgtggccgacagtacagaa

SEQ ID NO: 601967 - DNA, 19 bp, Mus musculus
  siRNA target sequence for Ogt (NM_139144.1,35-53).
cagaaccaacgaaacgtat

SEQ ID NO: 601968 - DNA, 19 bp, Mus musculus
  siRNA target sequence for Ogt (NM_139144.1,44-62).
cgaaacgtatgctttcctt

SEQ ID NO: 601969 - DNA, 19 bp, Mus musculus
  siRNA target sequence for Ogt (NM_139144.1,78-96).
gttggcacatcgagaatat

SEQ ID NO: 601970 - DNA, 19 bp, Mus musculus
  siRNA target sequence for Ogt (NM_139144.1,213-231).
ggacagatctgctcatttt

SEQ ID NO: 601971 - DNA, 19 bp, Mus musculus
  siRNA target sequence for Ogt (NM_139144.1,214-232).
gacagatctgctcatttta

SEQ ID NO: 601972 - DNA, 19 bp, Mus musculus
  siRNA target sequence for Ogt (NM_139144.1,308-326).
ggcagttgcaggaagcaat

SEQ ID NO: 601973 - DNA, 19 bp, Mus musculus
  siRNA target sequence for Ogt (NM_139144.1,318-336).
ggaagcaatcgagcattat

SEQ ID NO: 601974 - DNA, 19 bp, Mus musculus
  siRNA target sequence for Ogt (NM_139144.1,359-377).
ctgatttcattgatggtta

SEQ ID NO: 601975 - DNA, 19 bp, Mus musculus
  siRNA target sequence for Ogt (NM_139144.1,424-442).
gcagtacaagcctatgtct

SEQ ID NO: 601976 - DNA, 19 bp, Mus musculus
  siRNA target sequence for Ogt (NM_139144.1,527-545).
ccaaggcatgttatttgaa

SEQ ID NO: 601977 - DNA, 19 bp, Mus musculus
  siRNA target sequence for Ogt (NM_139144.1,584-602).
gtaatctcggctgtgtttt

SEQ ID NO: 601978 - DNA, 19 bp, Mus musculus
  siRNA target sequence for Ogt (NM_139144.1,652-670).
gtcacccttgacccaaatt

SEQ ID NO: 601979 - DNA, 19 bp, Mus musculus
  siRNA target sequence for Ogt (NM_139144.1,654-672).
cacccttgacccaaatttt

SEQ ID NO: 601980 - DNA, 19 bp, Mus musculus
  siRNA target sequence for Ogt (NM_139144.1,673-691).
ctggatgcttatatcaatt

SEQ ID NO: 601981 - DNA, 19 bp, Mus musculus
  siRNA target sequence for Ogt (NM_139144.1,705-723).
gaaagaggcacgcattttt

SEQ ID NO: 601982 - DNA, 19 bp, Mus musculus
  siRNA target sequence for Ogt (NM_139144.1,745-763).
cttcgtgccttaagtttga

SEQ ID NO: 601983 - DNA, 19 bp, Mus musculus
  siRNA target sequence for Ogt (NM_139144.1,807-825).
ctacgagcaaggcctaata

SEQ ID NO: 601984 - DNA, 19 bp, Mus musculus
  siRNA target sequence for Ogt (NM_139144.1,843-861).
ctacaggagagctatcgaa

SEQ ID NO: 601985 - DNA, 19 bp, Mus musculus
  siRNA target sequence for Ogt (NM_139144.1,869-887).
cccatttccccgatgctta

SEQ ID NO: 601986 - DNA, 19 bp, Mus musculus
  siRNA target sequence for Ogt (NM_139144.1,934-952).
gcagaagattgttataaca

SEQ ID NO: 601987 - DNA, 19 bp, Mus musculus
  siRNA target sequence for Ogt (NM_139144.1,974-992).
ctcatgcagactctttgaa

SEQ ID NO: 601988 - DNA, 19 bp, Mus musculus
  siRNA target sequence for Ogt (NM_139144.1,976-994).
catgcagactctttgaata

SEQ ID NO: 601989 - DNA, 19 bp, Mus musculus
  siRNA target sequence for Ogt (NM_139144.1,1042-1060).
cgcctgtatcgcaaagcat

SEQ ID NO: 601990 - DNA, 19 bp, Mus musculus
  siRNA target sequence for Ogt (NM_139144.1,1043-1061).
gcctgtatcgcaaagcatt

SEQ ID NO: 601991 - DNA, 19 bp, Mus musculus
  siRNA target sequence for Ogt (NM_139144.1,1044-1062).
cctgtatcgcaaagcatta

SEQ ID NO: 601992 - DNA, 19 bp, Mus musculus
  siRNA target sequence for Ogt (NM_139144.1,1047-1065).
gtatcgcaaagcattagaa

SEQ ID NO: 601993 - DNA, 19 bp, Mus musculus
  siRNA target sequence for Ogt (NM_139144.1,1135-1153).
gaagcactgatgcactata

SEQ ID NO: 601994 - DNA, 19 bp, Mus musculus
  siRNA target sequence for Ogt (NM_139144.1,1139-1157).
cactgatgcactataaaga

SEQ ID NO: 601995 - DNA, 19 bp, Mus musculus
  siRNA target sequence for Ogt (NM_139144.1,1184-1202).
ctgatgcttattccaatat

SEQ ID NO: 601996 - DNA, 19 bp, Mus musculus
  siRNA target sequence for Ogt (NM_139144.1,1236-1254).
gggcgctttgcagtgttat

SEQ ID NO: 601997 - DNA, 19 bp, Mus musculus
  siRNA target sequence for Ogt (NM_139144.1,1239-1257).
cgctttgcagtgttatact

SEQ ID NO: 601998 - DNA, 19 bp, Mus musculus
  siRNA target sequence for Ogt (NM_139144.1,1256-1274).
ctcgtgccatccagattaa

SEQ ID NO: 601999 - DNA, 19 bp, Mus musculus
  siRNA target sequence for Ogt (NM_139144.1,1306-1324).
gcctccattcacaaggatt

SEQ ID NO: 602000 - DNA, 19 bp, Mus musculus
  siRNA target sequence for Ogt (NM_139144.1,1357-1375).
cgcacagctctgaaactta

SEQ ID NO: 602001 - DNA, 19 bp, Mus musculus
  siRNA target sequence for Ogt (NM_139144.1,1381-1399).
gactttcctgatgcttatt

SEQ ID NO: 602002 - DNA, 19 bp, Mus musculus
  siRNA target sequence for Ogt (NM_139144.1,1387-1405).
cctgatgcttattgtaact

SEQ ID NO: 602003 - DNA, 19 bp, Mus musculus
  siRNA target sequence for Ogt (NM_139144.1,1447-1465).
gatgagcggatgaagaaat

SEQ ID NO: 602004 - DNA, 19 bp, Mus musculus
  siRNA target sequence for Ogt (NM_139144.1,1452-1470).
gcggatgaagaaattggtt

SEQ ID NO: 602005 - DNA, 19 bp, Mus musculus
  siRNA target sequence for Ogt (NM_139144.1,1453-1471).
cggatgaagaaattggtta

SEQ ID NO: 602006 - DNA, 19 bp, Mus musculus
  siRNA target sequence for Ogt (NM_139144.1,1461-1479).
gaaattggttagtattgta

SEQ ID NO: 602007 - DNA, 19 bp, Mus musculus
  siRNA target sequence for Ogt (NM_139144.1,1582-1600).
gggaatctctgcttggata

SEQ ID NO: 602008 - DNA, 19 bp, Mus musculus
  siRNA target sequence for Ogt (NM_139144.1,1590-1608).
ctgcttggataagattaat

SEQ ID NO: 602009 - DNA, 19 bp, Mus musculus
  siRNA target sequence for Ogt (NM_139144.1,1592-1610).
gcttggataagattaatgt

SEQ ID NO: 602010 - DNA, 19 bp, Mus musculus
  siRNA target sequence for Ogt (NM_139144.1,1695-1713).
cgggaatcaccctacttca

SEQ ID NO: 602011 - DNA, 19 bp, Mus musculus
  siRNA target sequence for Ogt (NM_139144.1,1748-1766).
ctgataagtttgaggtatt

SEQ ID NO: 602012 - DNA, 19 bp, Mus musculus
  siRNA target sequence for Ogt (NM_139144.1,1750-1768).
gataagtttgaggtattct

SEQ ID NO: 602013 - DNA, 19 bp, Mus musculus
  siRNA target sequence for Ogt (NM_139144.1,1781-1799).
gcccggatgatggtacaaa

SEQ ID NO: 602014 - DNA, 19 bp, Mus musculus
  siRNA target sequence for Ogt (NM_139144.1,1783-1801).
ccggatgatggtacaaact

SEQ ID NO: 602015 - DNA, 19 bp, Mus musculus
  siRNA target sequence for Ogt (NM_139144.1,1784-1802).
cggatgatggtacaaactt

SEQ ID NO: 602016 - DNA, 19 bp, Mus musculus
  siRNA target sequence for Ogt (NM_139144.1,1815-1833).
gatggcggaagccaatcat

SEQ ID NO: 602017 - DNA, 19 bp, Mus musculus
  siRNA target sequence for Ogt (NM_139144.1,1819-1837).
gcggaagccaatcatttca

SEQ ID NO: 602018 - DNA, 19 bp, Mus musculus
  siRNA target sequence for Ogt (NM_139144.1,1820-1838).
cggaagccaatcatttcat

SEQ ID NO: 602019 - DNA, 19 bp, Mus musculus
  siRNA target sequence for Ogt (NM_139144.1,1851-1869).
gattccttgtaatggaaaa

SEQ ID NO: 602020 - DNA, 19 bp, Mus musculus
  siRNA target sequence for Ogt (NM_139144.1,2003-2021).
ctagtggtgcactgttcat

SEQ ID NO: 602021 - DNA, 19 bp, Mus musculus
  siRNA target sequence for Ogt (NM_139144.1,2008-2026).
ggtgcactgttcatggatt

SEQ ID NO: 602022 - DNA, 19 bp, Mus musculus
  siRNA target sequence for Ogt (NM_139144.1,2009-2027).
gtgcactgttcatggatta

SEQ ID NO: 602023 - DNA, 19 bp, Mus musculus
  siRNA target sequence for Ogt (NM_139144.1,2011-2029).
gcactgttcatggattaca

SEQ ID NO: 602024 - DNA, 19 bp, Mus musculus
  siRNA target sequence for Ogt (NM_139144.1,2012-2030).
cactgttcatggattacat

SEQ ID NO: 602025 - DNA, 19 bp, Mus musculus
  siRNA target sequence for Ogt (NM_139144.1,2089-2107).
gcttatatgccccatactt

SEQ ID NO: 602026 - DNA, 19 bp, Mus musculus
  siRNA target sequence for Ogt (NM_139144.1,2090-2108).
cttatatgccccatacttt

SEQ ID NO: 602027 - DNA, 19 bp, Mus musculus
  siRNA target sequence for Ogt (NM_139144.1,2116-2134).
ggtgatcatgctaatatgt

SEQ ID NO: 602028 - DNA, 19 bp, Mus musculus
  siRNA target sequence for Ogt (NM_139144.1,2117-2135).
gtgatcatgctaatatgtt

SEQ ID NO: 602029 - DNA, 19 bp, Mus musculus
  siRNA target sequence for Ogt (NM_139144.1,2155-2173).
gcagtcatcgattttaaat

SEQ ID NO: 602030 - DNA, 19 bp, Mus musculus
  siRNA target sequence for Ogt (NM_139144.1,2160-2178).
catcgattttaaatccaat

SEQ ID NO: 602031 - DNA, 19 bp, Mus musculus
  siRNA target sequence for Ogt (NM_139144.1,2212-2230).
ggcatcgatctcaaagcat

SEQ ID NO: 602032 - DNA, 19 bp, Mus musculus
  siRNA target sequence for Ogt (NM_139144.1,2241-2259).
cctacccgatgtgaagatt

SEQ ID NO: 602033 - DNA, 19 bp, Mus musculus
  siRNA target sequence for Ogt (NM_139144.1,2251-2269).
gtgaagattgtcaagatga

SEQ ID NO: 602034 - DNA, 19 bp, Mus musculus
  siRNA target sequence for Ogt (NM_139144.1,2256-2274).
gattgtcaagatgaaatgt

SEQ ID NO: 602035 - DNA, 19 bp, Mus musculus
  siRNA target sequence for Ogt (NM_139144.1,2301-2319).
cagtaacacagctcttaat

SEQ ID NO: 602036 - DNA, 19 bp, Mus musculus
  siRNA target sequence for Ogt (NM_139144.1,2303-2321).
gtaacacagctcttaatat

SEQ ID NO: 602037 - DNA, 19 bp, Mus musculus
  siRNA target sequence for Ogt (NM_139144.1,2322-2340).
gcccgttattcccatgaat

SEQ ID NO: 602038 - DNA, 19 bp, Mus musculus
  siRNA target sequence for Ogt (NM_139144.1,2323-2341).
cccgttattcccatgaata

SEQ ID NO: 602039 - DNA, 19 bp, Mus musculus
  siRNA target sequence for Ogt (NM_139144.1,2326-2344).
gttattcccatgaatacga

SEQ ID NO: 602040 - DNA, 19 bp, Mus musculus
  siRNA target sequence for Ogt (NM_139144.1,2343-2361).
gattgcagaagcagtaatt

SEQ ID NO: 602041 - DNA, 19 bp, Mus musculus
  siRNA target sequence for Ogt (NM_139144.1,2353-2371).
gcagtaattgaaatgatta

SEQ ID NO: 602042 - DNA, 19 bp, Mus musculus
  siRNA target sequence for Ogt (NM_139144.1,2373-2391).
cagagggcagattcagata

SEQ ID NO: 602043 - DNA, 19 bp, Mus musculus
  siRNA target sequence for Ogt (NM_139144.1,2377-2395).
gggcagattcagataacaa

SEQ ID NO: 602044 - DNA, 19 bp, Mus musculus
  siRNA target sequence for Ogt (NM_139144.1,2393-2411).
caattaacggattcagtat

SEQ ID NO: 602045 - DNA, 19 bp, Mus musculus
  siRNA target sequence for Ogt (NM_139144.1,2422-2440).
ctggcgactacacagatta

SEQ ID NO: 602046 - DNA, 19 bp, Mus musculus
  siRNA target sequence for Ogt (NM_139144.1,2424-2442).
ggcgactacacagattaat

SEQ ID NO: 602047 - DNA, 19 bp, Mus musculus
  siRNA target sequence for Ogt (NM_139144.1,2464-2482).
gaagttccccgtaccatta

SEQ ID NO: 602048 - DNA, 19 bp, Mus musculus
  siRNA target sequence for Ogt (NM_139144.1,2470-2488).
ccccgtaccattattgtaa

SEQ ID NO: 602049 - DNA, 19 bp, Mus musculus
  siRNA target sequence for Ogt (NM_139144.1,2502-2520).
gtatgggctaccagaagat

SEQ ID NO: 602050 - DNA, 19 bp, Mus musculus
  siRNA target sequence for Ogt (NM_139144.1,2518-2536).
gatgccattgtgtactgta

SEQ ID NO: 602051 - DNA, 19 bp, Mus musculus
  siRNA target sequence for Ogt (NM_139144.1,2532-2550).
ctgtaactttaatcagtta

SEQ ID NO: 602052 - DNA, 19 bp, Mus musculus
  siRNA target sequence for Ogt (NM_139144.1,2534-2552).
gtaactttaatcagttata

SEQ ID NO: 602053 - DNA, 19 bp, Mus musculus
  siRNA target sequence for Ogt (NM_139144.1,2574-2592).
gcagatgtgggcaaatatt

SEQ ID NO: 602054 - DNA, 19 bp, Mus musculus
  siRNA target sequence for Ogt (NM_139144.1,2639-2657).
cagtaggagaacccaatat

SEQ ID NO: 602055 - DNA, 19 bp, Mus musculus
  siRNA target sequence for Ogt (NM_139144.1,2647-2665).
gaacccaatattcaacaat

SEQ ID NO: 602056 - DNA, 19 bp, Mus musculus
  siRNA target sequence for Ogt (NM_139144.1,2686-2704).
ccccagaaccgtatcattt

SEQ ID NO: 602057 - DNA, 19 bp, Mus musculus
  siRNA target sequence for Ogt (NM_139144.1,2689-2707).
cagaaccgtatcattttct

SEQ ID NO: 602058 - DNA, 19 bp, Mus musculus
  siRNA target sequence for Ogt (NM_139144.1,2691-2709).
gaaccgtatcattttctca

SEQ ID NO: 602059 - DNA, 19 bp, Mus musculus
  siRNA target sequence for Ogt (NM_139144.1,2819-2837).
gaacacccatggtgactat

SEQ ID NO: 602060 - DNA, 19 bp, Mus musculus
  siRNA target sequence for Ogt (NM_139144.1,2894-2912).
gtctcgagctcattgctaa

SEQ ID NO: 602061 - DNA, 19 bp, Mus musculus
  siRNA target sequence for Ogt (NM_139144.1,2947-2965).
ctgggaaccgatctagaat

SEQ ID NO: 602062 - DNA, 19 bp, Mus musculus
  siRNA target sequence for Ogt (NM_139144.1,2951-2969).
gaaccgatctagaatacct

SEQ ID NO: 602063 - DNA, 19 bp, Mus musculus
  siRNA target sequence for Ogt (NM_139144.1,3042-3060).
ggaattagagcgactttat

SEQ ID NO: 602064 - DNA, 19 bp, Mus musculus
  siRNA target sequence for Ogt (NM_139144.1,3063-3081).
gcagatgtgggagcattat

SEQ ID NO: 602065 - DNA, 19 bp, Mus musculus
  siRNA target sequence for Ogt (NM_139144.1,3066-3084).
gatgtgggagcattatgca

SEQ ID NO: 602066 - DNA, 19 bp, Mus musculus
  siRNA target sequence for Piga (NM_011081.1,144-162).
gggtagctctggaaacctt

SEQ ID NO: 602067 - DNA, 19 bp, Mus musculus
  siRNA target sequence for Piga (NM_011081.1,174-192).
gacctgcacccataatata

SEQ ID NO: 602068 - DNA, 19 bp, Mus musculus
  siRNA target sequence for Piga (NM_011081.1,179-197).
gcacccataatatatgcat

SEQ ID NO: 602069 - DNA, 19 bp, Mus musculus
  siRNA target sequence for Piga (NM_011081.1,194-212).
gcatggtgtcagacttttt

SEQ ID NO: 602070 - DNA, 19 bp, Mus musculus
  siRNA target sequence for Piga (NM_011081.1,278-296).
ggcacaaggtcataactgt

SEQ ID NO: 602071 - DNA, 19 bp, Mus musculus
  siRNA target sequence for Piga (NM_011081.1,297-315).
cacccatgcttatggaaat

SEQ ID NO: 602072 - DNA, 19 bp, Mus musculus
  siRNA target sequence for Piga (NM_011081.1,300-318).
ccatgcttatggaaatcga

SEQ ID NO: 602073 - DNA, 19 bp, Mus musculus
  siRNA target sequence for Piga (NM_011081.1,336-354).
caccaatggcctcaaagtt

SEQ ID NO: 602074 - DNA, 19 bp, Mus musculus
  siRNA target sequence for Piga (NM_011081.1,343-361).
ggcctcaaagtttactatt

SEQ ID NO: 602075 - DNA, 19 bp, Mus musculus
  siRNA target sequence for Piga (NM_011081.1,373-391).
gtcatgtacaaccaatcta

SEQ ID NO: 602076 - DNA, 19 bp, Mus musculus
  siRNA target sequence for Piga (NM_011081.1,417-435).
gccattgctcaggtacata

SEQ ID NO: 602077 - DNA, 19 bp, Mus musculus
  siRNA target sequence for Piga (NM_011081.1,418-436).
ccattgctcaggtacatat

SEQ ID NO: 602078 - DNA, 19 bp, Mus musculus
  siRNA target sequence for Piga (NM_011081.1,419-437).
cattgctcaggtacatatt

SEQ ID NO: 602079 - DNA, 19 bp, Mus musculus
  siRNA target sequence for Piga (NM_011081.1,423-441).
gctcaggtacatatttgtt

SEQ ID NO: 602080 - DNA, 19 bp, Mus musculus
  siRNA target sequence for Piga (NM_011081.1,439-457).
gttcgggagagaattacga

SEQ ID NO: 602081 - DNA, 19 bp, Mus musculus
  siRNA target sequence for Piga (NM_011081.1,442-460).
cgggagagaattacgataa

SEQ ID NO: 602082 - DNA, 19 bp, Mus musculus
  siRNA target sequence for Piga (NM_011081.1,443-461).
gggagagaattacgataat

SEQ ID NO: 602083 - DNA, 19 bp, Mus musculus
  siRNA target sequence for Piga (NM_011081.1,447-465).
gagaattacgataatccat

SEQ ID NO: 602084 - DNA, 19 bp, Mus musculus
  siRNA target sequence for Piga (NM_011081.1,502-520).
ctcttccacgccaagacaa

SEQ ID NO: 602085 - DNA, 19 bp, Mus musculus
  siRNA target sequence for Piga (NM_011081.1,571-589).
gtcagctcggtgcttacaa

SEQ ID NO: 602086 - DNA, 19 bp, Mus musculus
  siRNA target sequence for Piga (NM_011081.1,575-593).
gctcggtgcttacaaacaa

SEQ ID NO: 602087 - DNA, 19 bp, Mus musculus
  siRNA target sequence for Piga (NM_011081.1,635-653).
gtgtctcttacactagtaa

SEQ ID NO: 602088 - DNA, 19 bp, Mus musculus
  siRNA target sequence for Piga (NM_011081.1,702-720).
cattcctaacgctgtagat

SEQ ID NO: 602089 - DNA, 19 bp, Mus musculus
  siRNA target sequence for Piga (NM_011081.1,742-760).
ccatttaggaggcatgata

SEQ ID NO: 602090 - DNA, 19 bp, Mus musculus
  siRNA target sequence for Piga (NM_011081.1,761-779).
gtgtaataactgttgttgt

SEQ ID NO: 602091 - DNA, 19 bp, Mus musculus
  siRNA target sequence for Piga (NM_011081.1,781-799).
gtcagcagacttgtttaca

SEQ ID NO: 602092 - DNA, 19 bp, Mus musculus
  siRNA target sequence for Piga (NM_011081.1,811-829).
gatttgcttagtggtataa

SEQ ID NO: 602093 - DNA, 19 bp, Mus musculus
  siRNA target sequence for Piga (NM_011081.1,832-850).
cctgaactctgtcagaaat

SEQ ID NO: 602094 - DNA, 19 bp, Mus musculus
  siRNA target sequence for Piga (NM_011081.1,833-851).
ctgaactctgtcagaaata

SEQ ID NO: 602095 - DNA, 19 bp, Mus musculus
  siRNA target sequence for Piga (NM_011081.1,878-896).
gagagggaccaaagagaat

SEQ ID NO: 602096 - DNA, 19 bp, Mus musculus
  siRNA target sequence for Piga (NM_011081.1,945-963).
gcttttgggagctttagaa

SEQ ID NO: 602097 - DNA, 19 bp, Mus musculus
  siRNA target sequence for Piga (NM_011081.1,961-979).
gaacacaaggatgttagaa

SEQ ID NO: 602098 - DNA, 19 bp, Mus musculus
  siRNA target sequence for Piga (NM_011081.1,1105-1123).
gtccttccggaaagtctta

SEQ ID NO: 602099 - DNA, 19 bp, Mus musculus
  siRNA target sequence for Piga (NM_011081.1,1107-1125).
ccttccggaaagtcttatt

SEQ ID NO: 602100 - DNA, 19 bp, Mus musculus
  siRNA target sequence for Piga (NM_011081.1,1108-1126).
cttccggaaagtcttatta

SEQ ID NO: 602101 - DNA, 19 bp, Mus musculus
  siRNA target sequence for Piga (NM_011081.1,1112-1130).
cggaaagtcttattattct

SEQ ID NO: 602102 - DNA, 19 bp, Mus musculus
  siRNA target sequence for Piga (NM_011081.1,1131-1149).
ctgcgagccttcagtaaaa

SEQ ID NO: 602103 - DNA, 19 bp, Mus musculus
  siRNA target sequence for Piga (NM_011081.1,1155-1173).
gtgtgacggtctggaaaaa

SEQ ID NO: 602104 - DNA, 19 bp, Mus musculus
  siRNA target sequence for Piga (NM_011081.1,1205-1223).
cagctccagaaaatatcca

SEQ ID NO: 602105 - DNA, 19 bp, Mus musculus
  siRNA target sequence for Piga (NM_011081.1,1228-1246).
gtagtgaagactttctaca

SEQ ID NO: 602106 - DNA, 19 bp, Mus musculus
  siRNA target sequence for Piga (NM_011081.1,1285-1303).
gagcgagtgtcgaaggaaa

SEQ ID NO: 602107 - DNA, 19 bp, Mus musculus
  siRNA target sequence for Piga (NM_011081.1,1289-1307).
gagtgtcgaaggaaactgt

SEQ ID NO: 602108 - DNA, 19 bp, Mus musculus
  siRNA target sequence for Piga (NM_011081.1,1361-1379).
cgggctacatgtttgcttt

SEQ ID NO: 602109 - DNA, 19 bp, Mus musculus
  siRNA target sequence for Piga (NM_011081.1,1384-1402).
gctgtgctcagctatctct

SEQ ID NO: 602110 - DNA, 19 bp, Mus musculus
  siRNA target sequence for Piga (NM_011081.1,1385-1403).
ctgtgctcagctatctctt

SEQ ID NO: 602111 - DNA, 19 bp, Mus musculus
  siRNA target sequence for Piga (NM_011081.1,1425-1443).
gactccagactctttcatt

SEQ ID NO: 602112 - DNA, 19 bp, Mus musculus
  siRNA target sequence for Piga (NM_011081.1,1489-1507).
caatggcctcgtgataaga

SEQ ID NO: 602113 - DNA, 19 bp, Mus musculus
  siRNA target sequence for Piga (NM_011081.1,1494-1512).
gcctcgtgataagaaaaga

SEQ ID NO: 602114 - DNA, 19 bp, Mus musculus
  siRNA target sequence for Rfng (NM_009053.1,297-315).
ccacggcagacgttcattt

SEQ ID NO: 602115 - DNA, 19 bp, Mus musculus
  siRNA target sequence for Rfng (NM_009053.1,298-316).
cacggcagacgttcatttt

SEQ ID NO: 602116 - DNA, 19 bp, Mus musculus
  siRNA target sequence for Rfng (NM_009053.1,300-318).
cggcagacgttcattttca

SEQ ID NO: 602117 - DNA, 19 bp, Mus musculus
  siRNA target sequence for Rfng (NM_009053.1,360-378).
cgcatgatcaacaccaatt

SEQ ID NO: 602118 - DNA, 19 bp, Mus musculus
  siRNA target sequence for Rfng (NM_009053.1,412-430).
gcaaaatgtcggtggaata

SEQ ID NO: 602119 - DNA, 19 bp, Mus musculus
  siRNA target sequence for Rfng (NM_009053.1,413-431).
caaaatgtcggtggaatat

SEQ ID NO: 602120 - DNA, 19 bp, Mus musculus
  siRNA target sequence for Rfng (NM_009053.1,421-439).
cggtggaatatgataagtt

SEQ ID NO: 602121 - DNA, 19 bp, Mus musculus
  siRNA target sequence for Rfng (NM_009053.1,602-620).
cggtggcacctcaaacaca

SEQ ID NO: 602122 - DNA, 19 bp, Mus musculus
  siRNA target sequence for Rfng (NM_009053.1,667-685).
ggggccttgccctcaaaat

SEQ ID NO: 602123 - DNA, 19 bp, Mus musculus
  siRNA target sequence for Rfng (NM_009053.1,839-857).
gctgccgtctggtgctatt

SEQ ID NO: 602124 - DNA, 19 bp, Mus musculus
  siRNA target sequence for Rfng (NM_009053.1,840-858).
ctgccgtctggtgctattt

SEQ ID NO: 602125 - DNA, 19 bp, Mus musculus
  siRNA target sequence for Rfng (NM_009053.1,844-862).
cgtctggtgctattttgca

SEQ ID NO: 602126 - DNA, 19 bp, Mus musculus
  siRNA target sequence for Rfng (NM_009053.1,889-907).
ctgagaacccacataatgt

SEQ ID NO: 602127 - DNA, 19 bp, Mus musculus
  siRNA target sequence for Rfng (NM_009053.1,942-960).
gaccctacacggtttcagt

SEQ ID NO: 602128 - DNA, 19 bp, Mus musculus
  siRNA target sequence for Nat1 (NM_008673.1,273-291).
ggacttagccacattaact

SEQ ID NO: 602129 - DNA, 19 bp, Mus musculus
  siRNA target sequence for Nat1 (NM_008673.1,309-327).
gatgcgagcagttcctttt

SEQ ID NO: 602130 - DNA, 19 bp, Mus musculus
  siRNA target sequence for Nat1 (NM_008673.1,313-331).
cgagcagttccttttgaga

SEQ ID NO: 602131 - DNA, 19 bp, Mus musculus
  siRNA target sequence for Nat1 (NM_008673.1,356-374).
ccatgcatctggatttaca

SEQ ID NO: 602132 - DNA, 19 bp, Mus musculus
  siRNA target sequence for Nat1 (NM_008673.1,483-501).
gggaggatatgtttacata

SEQ ID NO: 602133 - DNA, 19 bp, Mus musculus
  siRNA target sequence for Nat1 (NM_008673.1,484-502).
ggaggatatgtttacataa

SEQ ID NO: 602134 - DNA, 19 bp, Mus musculus
  siRNA target sequence for Nat1 (NM_008673.1,505-523).
ccagtcagcaaatatagca

SEQ ID NO: 602135 - DNA, 19 bp, Mus musculus
  siRNA target sequence for Nat1 (NM_008673.1,803-821).
cccgagttatcgaggattt

SEQ ID NO: 602136 - DNA, 19 bp, Mus musculus
  siRNA target sequence for Nat1 (NM_008673.1,804-822).
ccgagttatcgaggatttt

SEQ ID NO: 602137 - DNA, 19 bp, Mus musculus
  siRNA target sequence for Nat1 (NM_008673.1,808-826).
gttatcgaggattttgaat

SEQ ID NO: 602138 - DNA, 19 bp, Mus musculus
  siRNA target sequence for Nat1 (NM_008673.1,900-918).
ggaaggggttcactgttta

SEQ ID NO: 602139 - DNA, 19 bp, Mus musculus
  siRNA target sequence for Nat1 (NM_008673.1,919-937).
gtgggctccacctttacaa

SEQ ID NO: 602140 - DNA, 19 bp, Mus musculus
  siRNA target sequence for Nat1 (NM_008673.1,921-939).
gggctccacctttacaagt

SEQ ID NO: 602141 - DNA, 19 bp, Mus musculus
  siRNA target sequence for Nat1 (NM_008673.1,922-940).
ggctccacctttacaagta

SEQ ID NO: 602142 - DNA, 19 bp, Mus musculus
  siRNA target sequence for Nat1 (NM_008673.1,938-956).
gtaggagattcagctataa

SEQ ID NO: 602143 - DNA, 19 bp, Mus musculus
  siRNA target sequence for Nat1 (NM_008673.1,950-968).
gctataaggacgatgtaga

SEQ ID NO: 602144 - DNA, 19 bp, Mus musculus
  siRNA target sequence for Nat1 (NM_008673.1,951-969).
ctataaggacgatgtagat

SEQ ID NO: 602145 - DNA, 19 bp, Mus musculus
  siRNA target sequence for Nat1 (NM_008673.1,1022-1040).
ccgcatttggcatttcttt

SEQ ID NO: 602146 - DNA, 19 bp, Mus musculus
  siRNA target sequence for Nat2 (NM_010874.2,400-418).
ggaggatatgtctttaaca

SEQ ID NO: 602147 - DNA, 19 bp, Mus musculus
  siRNA target sequence for Nat2 (NM_010874.2,444-462).
catgattcaccttctagtt

SEQ ID NO: 602148 - DNA, 19 bp, Mus musculus
  siRNA target sequence for Nat2 (NM_010874.2,717-735).
gccccgaactattgaagat

SEQ ID NO: 602149 - DNA, 19 bp, Mus musculus
  siRNA target sequence for Nat2 (NM_010874.2,769-787).
ccagcgtctgtgtttacta

SEQ ID NO: 602150 - DNA, 19 bp, Mus musculus
  siRNA target sequence for Nat2 (NM_010874.2,774-792).
gtctgtgtttactagcaaa

SEQ ID NO: 602151 - DNA, 19 bp, Mus musculus
  siRNA target sequence for Nat2 (NM_010874.2,778-796).
gtgtttactagcaaatcat

SEQ ID NO: 602152 - DNA, 19 bp, Mus musculus
  siRNA target sequence for Nat2 (NM_010874.2,810-828).
gaccccagaaggagttcat

SEQ ID NO: 602153 - DNA, 19 bp, Mus musculus
  siRNA target sequence for Nat2 (NM_010874.2,840-858).
ctccaccctcacttataga

SEQ ID NO: 602154 - DNA, 19 bp, Mus musculus
  siRNA target sequence for Nat2 (NM_010874.2,843-861).
caccctcacttatagaaga

SEQ ID NO: 602155 - DNA, 19 bp, Mus musculus
  siRNA target sequence for Nat2 (NM_010874.2,846-864).
cctcacttatagaagattt

SEQ ID NO: 602156 - DNA, 19 bp, Mus musculus
  siRNA target sequence for Nat2 (NM_010874.2,849-867).
cacttatagaagatttagt

SEQ ID NO: 602157 - DNA, 19 bp, Mus musculus
  siRNA target sequence for Nat2 (NM_010874.2,873-891).
ggacaacgtcgatcttgta

SEQ ID NO: 602158 - DNA, 19 bp, Mus musculus
  siRNA target sequence for Nat2 (NM_010874.2,879-897).
cgtcgatcttgtagagttt

SEQ ID NO: 602159 - DNA, 19 bp, Mus musculus
  siRNA target sequence for Nat2 (NM_010874.2,880-898).
gtcgatcttgtagagttta

SEQ ID NO: 602160 - DNA, 19 bp, Mus musculus
  siRNA target sequence for Nat2 (NM_010874.2,925-943).
gatgtactgagaactatat

SEQ ID NO: 602161 - DNA, 19 bp, Mus musculus
  siRNA target sequence for Nat2 (NM_010874.2,974-992).
ctaaacatggtgatcgatt

SEQ ID NO: 602162 - DNA, 19 bp, Mus musculus
  siRNA target sequence for Nat2 (NM_010874.2,979-997).
catggtgatcgatttttta

SEQ ID NO: 602163 - DNA, 19 bp, Mus musculus
  siRNA target sequence for Nat3 (NM_008674.2,295-313).
ggacttgcagacattaact

SEQ ID NO: 602164 - DNA, 19 bp, Mus musculus
  siRNA target sequence for Nat3 (NM_008674.2,298-316).
cttgcagacattaactgaa

SEQ ID NO: 602165 - DNA, 19 bp, Mus musculus
  siRNA target sequence for Nat3 (NM_008674.2,391-409).
cttagaggacacctttcat

SEQ ID NO: 602166 - DNA, 19 bp, Mus musculus
  siRNA target sequence for Nat3 (NM_008674.2,432-450).
gagggtggtgtcttcaagt

SEQ ID NO: 602167 - DNA, 19 bp, Mus musculus
  siRNA target sequence for Nat3 (NM_008674.2,435-453).
ggtggtgtcttcaagtcaa

SEQ ID NO: 602168 - DNA, 19 bp, Mus musculus
  siRNA target sequence for Nat3 (NM_008674.2,476-494).
gccatgatagggtttgaga

SEQ ID NO: 602169 - DNA, 19 bp, Mus musculus
  siRNA target sequence for Nat3 (NM_008674.2,502-520).
gttaggaggatgtgtttat

SEQ ID NO: 602170 - DNA, 19 bp, Mus musculus
  siRNA target sequence for Nat3 (NM_008674.2,530-548).
gcctgcaagtatagtaaca

SEQ ID NO: 602171 - DNA, 19 bp, Mus musculus
  siRNA target sequence for Nat3 (NM_008674.2,538-556).
gtatagtaacactatgata

SEQ ID NO: 602172 - DNA, 19 bp, Mus musculus
  siRNA target sequence for Nat3 (NM_008674.2,549-567).
ctatgatacaccttctact

SEQ ID NO: 602173 - DNA, 19 bp, Mus musculus
  siRNA target sequence for Nat3 (NM_008674.2,771-789).
ctaattttcttgagaagaa

SEQ ID NO: 602174 - DNA, 19 bp, Mus musculus
  siRNA target sequence for Nat3 (NM_008674.2,784-802).
gaagaacacacatcgaaaa

SEQ ID NO: 602175 - DNA, 19 bp, Mus musculus
  siRNA target sequence for Nat3 (NM_008674.2,790-808).
cacacatcgaaaaatatat

SEQ ID NO: 602176 - DNA, 19 bp, Mus musculus
  siRNA target sequence for Nat3 (NM_008674.2,827-845).
cgaacgattgaagatttct

SEQ ID NO: 602177 - DNA, 19 bp, Mus musculus
  siRNA target sequence for Nat3 (NM_008674.2,865-883).
ccaggtatctcgaacatct

SEQ ID NO: 602178 - DNA, 19 bp, Mus musculus
  siRNA target sequence for Nat3 (NM_008674.2,948-966).
ccattcttgcctataagaa

SEQ ID NO: 602179 - DNA, 19 bp, Mus musculus
  siRNA target sequence for Nat3 (NM_008674.2,956-974).
gcctataagaagttcaatt

SEQ ID NO: 602180 - DNA, 19 bp, Mus musculus
  siRNA target sequence for Nat3 (NM_008674.2,1079-1097).
cccaaatgtggcaatgtct

SEQ ID NO: 602181 - DNA, 19 bp, Mus musculus
  siRNA target sequence for Aanat (NM_009591.1,277-295).
ccaccagtgcgtttgagat

SEQ ID NO: 602182 - DNA, 19 bp, Mus musculus
  siRNA target sequence for Aanat (NM_009591.1,278-296).
caccagtgcgtttgagatt

SEQ ID NO: 602183 - DNA, 19 bp, Mus musculus
  siRNA target sequence for Aanat (NM_009591.1,297-315).
gagcgggaagcctttatct

SEQ ID NO: 602184 - DNA, 19 bp, Mus musculus
  siRNA target sequence for Aanat (NM_009591.1,299-317).
gcgggaagcctttatctct

SEQ ID NO: 602185 - DNA, 19 bp, Mus musculus
  siRNA target sequence for Aanat (NM_009591.1,348-366).
gagatccggcacttcctaa

SEQ ID NO: 602186 - DNA, 19 bp, Mus musculus
  siRNA target sequence for Aanat (NM_009591.1,440-458).
ggacaaggagagacttact

SEQ ID NO: 602187 - DNA, 19 bp, Mus musculus
  siRNA target sequence for Aanat (NM_009591.1,636-654).
gtacccttctatgagaaat

SEQ ID NO: 602188 - DNA, 19 bp, Mus musculus
  siRNA target sequence for Nags (NM_145829.1,835-853).
cagcccaccaaaatcatct

SEQ ID NO: 602189 - DNA, 19 bp, Mus musculus
  siRNA target sequence for Nags (NM_145829.1,1014-1032).
ctactcctccgcagtcatt

SEQ ID NO: 602190 - DNA, 19 bp, Mus musculus
  siRNA target sequence for Nags (NM_145829.1,1017-1035).
ctcctccgcagtcattaca

SEQ ID NO: 602191 - DNA, 19 bp, Mus musculus
  siRNA target sequence for Nags (NM_145829.1,1046-1064).
cgctgctcacggaactctt

SEQ ID NO: 602192 - DNA, 19 bp, Mus musculus
  siRNA target sequence for Nags (NM_145829.1,1050-1068).
gctcacggaactctttagt

SEQ ID NO: 602193 - DNA, 19 bp, Mus musculus
  siRNA target sequence for Nags (NM_145829.1,1055-1073).
cggaactctttagtaacaa

SEQ ID NO: 602194 - DNA, 19 bp, Mus musculus
  siRNA target sequence for Nags (NM_145829.1,1220-1238).
ggttgcactcgatctatgt

SEQ ID NO: 602195 - DNA, 19 bp, Mus musculus
  siRNA target sequence for Nags (NM_145829.1,1373-1391).
ggagagacctgcaaacgtt

SEQ ID NO: 602196 - DNA, 19 bp, Mus musculus
  siRNA target sequence for Nags (NM_145829.1,1505-1523).
gagactcctacgaactagt

SEQ ID NO: 602197 - DNA, 19 bp, Mus musculus
  siRNA target sequence for Nags (NM_145829.1,1509-1527).
ctcctacgaactagtcaat

SEQ ID NO: 602198 - DNA, 19 bp, Mus musculus
  siRNA target sequence for Nags (NM_145829.1,1511-1529).
cctacgaactagtcaatca

SEQ ID NO: 602199 - DNA, 19 bp, Mus musculus
  siRNA target sequence for Nags (NM_145829.1,1512-1530).
ctacgaactagtcaatcat

SEQ ID NO: 602200 - DNA, 19 bp, Mus musculus
  siRNA target sequence for Nags (NM_145829.1,1537-1555).
gggctgccggactctttct

SEQ ID NO: 602201 - DNA, 19 bp, Mus musculus
  siRNA target sequence for 1110028N05Rik (NM_025400.2,597-615).
ctacggtgtgacgaagtta

SEQ ID NO: 602202 - DNA, 19 bp, Mus musculus
  siRNA target sequence for 1110028N05Rik (NM_025400.2,666-684).
ccggatgttccagaaactt

SEQ ID NO: 602203 - DNA, 19 bp, Mus musculus
  siRNA target sequence for 1200013P24Rik (NM_029090.2,241-259).
gtacccagactcatggtat

SEQ ID NO: 602204 - DNA, 19 bp, Mus musculus
  siRNA target sequence for 1200013P24Rik (NM_029090.2,315-333).
ccattgtgggaatgatagt

SEQ ID NO: 602205 - DNA, 19 bp, Mus musculus
  siRNA target sequence for 1200013P24Rik (NM_029090.2,346-364).
gaataggaccaaaatccat

SEQ ID NO: 602206 - DNA, 19 bp, Mus musculus
  siRNA target sequence for 1200013P24Rik (NM_029090.2,431-449).
ctgggagtggtgaaagagt

SEQ ID NO: 602207 - DNA, 19 bp, Mus musculus
  siRNA target sequence for 1200013P24Rik (NM_029090.2,460-478).
cggcataggttccctttta

SEQ ID NO: 602208 - DNA, 19 bp, Mus musculus
  siRNA target sequence for 1200013P24Rik (NM_029090.2,462-480).
gcataggttcccttttact

SEQ ID NO: 602209 - DNA, 19 bp, Mus musculus
  siRNA target sequence for 1200013P24Rik (NM_029090.2,463-481).
cataggttcccttttacta

SEQ ID NO: 602210 - DNA, 19 bp, Mus musculus
  siRNA target sequence for 1200013P24Rik (NM_029090.2,545-563).
gttctcaccaccaacaata

SEQ ID NO: 602211 - DNA, 19 bp, Mus musculus
  siRNA target sequence for 1200013P24Rik (NM_029090.2,553-571).
caccaacaatacagcaata

SEQ ID NO: 602212 - DNA, 19 bp, Mus musculus
  siRNA target sequence for 1200013P24Rik (NM_029090.2,592-610).
ctttaggcagcatcactat

SEQ ID NO: 602213 - DNA, 19 bp, Mus musculus
  siRNA target sequence for 1200013P24Rik (NM_029090.2,605-623).
cactatctgccctactact

SEQ ID NO: 602214 - DNA, 19 bp, Mus musculus
  siRNA target sequence for 1200013P24Rik (NM_029090.2,657-675).
cctatgtcctctacatcaa

SEQ ID NO: 602215 - DNA, 19 bp, Mus musculus
  siRNA target sequence for 1200013P24Rik (NM_029090.2,683-701).
caccctccctggaccattt

SEQ ID NO: 602216 - DNA, 19 bp, Mus musculus
  siRNA target sequence for 1200013P24Rik (NM_029090.2,693-711).
ggaccattttagactacat

SEQ ID NO: 602217 - DNA, 19 bp, Mus musculus
  siRNA target sequence for 1500004D14Rik (NM_026425.1,78-96).
gttccgcttcaacaacatt

SEQ ID NO: 602218 - DNA, 19 bp, Mus musculus
  siRNA target sequence for 1500004D14Rik (NM_026425.1,82-100).
cgcttcaacaacattaact

SEQ ID NO: 602219 - DNA, 19 bp, Mus musculus
  siRNA target sequence for 1500004D14Rik (NM_026425.1,102-120).
ggatccacttacagaaact

SEQ ID NO: 602220 - DNA, 19 bp, Mus musculus
  siRNA target sequence for 1500004D14Rik (NM_026425.1,103-121).
gatccacttacagaaactt

SEQ ID NO: 602221 - DNA, 19 bp, Mus musculus
  siRNA target sequence for 1500004D14Rik (NM_026425.1,115-133).
gaaacttatgggattcctt

SEQ ID NO: 602222 - DNA, 19 bp, Mus musculus
  siRNA target sequence for 1500004D14Rik (NM_026425.1,119-137).
cttatgggattccttttta

SEQ ID NO: 602223 - DNA, 19 bp, Mus musculus
  siRNA target sequence for 1500004D14Rik (NM_026425.1,125-143).
ggattcctttttacttaca

SEQ ID NO: 602224 - DNA, 19 bp, Mus musculus
  siRNA target sequence for 1500004D14Rik (NM_026425.1,151-169).
gcgcactggccagagtatt

SEQ ID NO: 602225 - DNA, 19 bp, Mus musculus
  siRNA target sequence for 1500004D14Rik (NM_026425.1,184-202).
gcacctggcggagaactaa

SEQ ID NO: 602226 - DNA, 19 bp, Mus musculus
  siRNA target sequence for 1500004D14Rik (NM_026425.1,185-203).
cacctggcggagaactaat

SEQ ID NO: 602227 - DNA, 19 bp, Mus musculus
  siRNA target sequence for 1500004D14Rik (NM_026425.1,193-211).
ggagaactaatgggttata

SEQ ID NO: 602228 - DNA, 19 bp, Mus musculus
  siRNA target sequence for 1500004D14Rik (NM_026425.1,199-217).
ctaatgggttatagtaagt

SEQ ID NO: 602229 - DNA, 19 bp, Mus musculus
  siRNA target sequence for 1500004D14Rik (NM_026425.1,216-234).
gtacagtaccactagtact

SEQ ID NO: 602230 - DNA, 19 bp, Mus musculus
  siRNA target sequence for 1500004D14Rik (NM_026425.1,332-350).
gcttggctgctaaacttat

SEQ ID NO: 602231 - DNA, 19 bp, Mus musculus
  siRNA target sequence for 1500004D14Rik (NM_026425.1,341-359).
ctaaacttatggagttact

SEQ ID NO: 602232 - DNA, 19 bp, Mus musculus
  siRNA target sequence for 1500004D14Rik (NM_026425.1,352-370).
gagttactagaagaaattt

SEQ ID NO: 602233 - DNA, 19 bp, Mus musculus
  siRNA target sequence for 1500004D14Rik (NM_026425.1,354-372).
gttactagaagaaatttca

SEQ ID NO: 602234 - DNA, 19 bp, Mus musculus
  siRNA target sequence for 1500004D14Rik (NM_026425.1,397-415).
gatctcttcgtaagagtat

SEQ ID NO: 602235 - DNA, 19 bp, Mus musculus
  siRNA target sequence for 1500004D14Rik (NM_026425.1,402-420).
cttcgtaagagtatccaat

SEQ ID NO: 602236 - DNA, 19 bp, Mus musculus
  siRNA target sequence for 1500004D14Rik (NM_026425.1,405-423).
cgtaagagtatccaatcaa

SEQ ID NO: 602237 - DNA, 19 bp, Mus musculus
  siRNA target sequence for 1500004D14Rik (NM_026425.1,421-439).
caagttgccgtcaacatgt

SEQ ID NO: 602238 - DNA, 19 bp, Mus musculus
  siRNA target sequence for 1500004D14Rik (NM_026425.1,424-442).
gttgccgtcaacatgtaca

SEQ ID NO: 602239 - DNA, 19 bp, Mus musculus
  siRNA target sequence for AI429152 (NM_153126.1,232-250).
ggtggataaccgaattcga

SEQ ID NO: 602240 - DNA, 19 bp, Mus musculus
  siRNA target sequence for AI429152 (NM_153126.1,233-251).
gtggataaccgaattcgaa

SEQ ID NO: 602241 - DNA, 19 bp, Mus musculus
  siRNA target sequence for AI429152 (NM_153126.1,235-253).
ggataaccgaattcgaatt

SEQ ID NO: 602242 - DNA, 19 bp, Mus musculus
  siRNA target sequence for AI429152 (NM_153126.1,243-261).
gaattcgaattctcattga

SEQ ID NO: 602243 - DNA, 19 bp, Mus musculus
  siRNA target sequence for AI429152 (NM_153126.1,279-297).
ggcagaggtctctttttgt

SEQ ID NO: 602244 - DNA, 19 bp, Mus musculus
  siRNA target sequence for AI429152 (NM_153126.1,315-333).
gaaaagatcaggtggttat

SEQ ID NO: 602245 - DNA, 19 bp, Mus musculus
  siRNA target sequence for AI429152 (NM_153126.1,325-343).
ggtggttattcttcatcat

SEQ ID NO: 602246 - DNA, 19 bp, Mus musculus
  siRNA target sequence for AI429152 (NM_153126.1,589-607).
ggattttgaagcgttaact

SEQ ID NO: 602247 - DNA, 19 bp, Mus musculus
  siRNA target sequence for AI429152 (NM_153126.1,599-617).
gcgttaactccgaacttgt

SEQ ID NO: 602248 - DNA, 19 bp, Mus musculus
  siRNA target sequence for AI429152 (NM_153126.1,600-618).
cgttaactccgaacttgtt

SEQ ID NO: 602249 - DNA, 19 bp, Mus musculus
  siRNA target sequence for AI429152 (NM_153126.1,613-631).
cttgttggccagaactgta

SEQ ID NO: 602250 - DNA, 19 bp, Mus musculus
  siRNA target sequence for AI429152 (NM_153126.1,675-693).
ccatgaactcgcttaagca

SEQ ID NO: 602251 - DNA, 19 bp, Mus musculus
  siRNA target sequence for AI429152 (NM_153126.1,692-710).
cagctgtacacgatgacta

SEQ ID NO: 602252 - DNA, 19 bp, Mus musculus
  siRNA target sequence for AI429152 (NM_153126.1,697-715).
gtacacgatgactatggat

SEQ ID NO: 602253 - DNA, 19 bp, Mus musculus
  siRNA target sequence for AI429152 (NM_153126.1,762-780).
gatttaacgagaggtttat

SEQ ID NO: 602254 - DNA, 19 bp, Mus musculus
  siRNA target sequence for AI429152 (NM_153126.1,1121-1139).
gtggcattcgggtattcca

SEQ ID NO: 602255 - DNA, 19 bp, Mus musculus
  siRNA target sequence for AI429152 (NM_153126.1,1125-1143).
cattcgggtattccaatat

SEQ ID NO: 602256 - DNA, 19 bp, Mus musculus
  siRNA target sequence for AI429152 (NM_153126.1,1129-1147).
cgggtattccaatattttt

SEQ ID NO: 602257 - DNA, 19 bp, Mus musculus
  siRNA target sequence for AI429152 (NM_153126.1,1171-1189).
cctccacacgctgtttgaa

SEQ ID NO: 602258 - DNA, 19 bp, Mus musculus
  siRNA target sequence for AI429152 (NM_153126.1,1179-1197).
cgctgtttgaatttgtatt

SEQ ID NO: 602259 - DNA, 19 bp, Mus musculus
  siRNA target sequence for AI429152 (NM_153126.1,1311-1329).
gacagactattcagtacat

SEQ ID NO: 602260 - DNA, 19 bp, Mus musculus
  siRNA target sequence for AI429152 (NM_153126.1,1360-1378).
ggctgagctggttgtgata

SEQ ID NO: 602261 - DNA, 19 bp, Mus musculus
  siRNA target sequence for AI429152 (NM_153126.1,1366-1384).
gctggttgtgatagatgaa

SEQ ID NO: 602262 - DNA, 19 bp, Mus musculus
  siRNA target sequence for AI429152 (NM_153126.1,1441-1459).
catggcatctactatcaat

SEQ ID NO: 602263 - DNA, 19 bp, Mus musculus
  siRNA target sequence for AI429152 (NM_153126.1,1539-1557).
gcaccactgctgagaacaa

SEQ ID NO: 602264 - DNA, 19 bp, Mus musculus
  siRNA target sequence for AI429152 (NM_153126.1,1676-1694).
ctggattgcctcaacatca

SEQ ID NO: 602265 - DNA, 19 bp, Mus musculus
  siRNA target sequence for AI429152 (NM_153126.1,1729-1747).
ctgtgagctctactatgtt

SEQ ID NO: 602266 - DNA, 19 bp, Mus musculus
  siRNA target sequence for AI429152 (NM_153126.1,1731-1749).
gtgagctctactatgttaa

SEQ ID NO: 602267 - DNA, 19 bp, Mus musculus
  siRNA target sequence for AI429152 (NM_153126.1,1752-1770).
gagataccctcttttgcta

SEQ ID NO: 602268 - DNA, 19 bp, Mus musculus
  siRNA target sequence for AI429152 (NM_153126.1,1772-1790).
cacaaggcctctgaagttt

SEQ ID NO: 602269 - DNA, 19 bp, Mus musculus
  siRNA target sequence for AI429152 (NM_153126.1,1817-1835).
gtggcttctcattacaaga

SEQ ID NO: 602270 - DNA, 19 bp, Mus musculus
  siRNA target sequence for AI429152 (NM_153126.1,1820-1838).
gcttctcattacaagaact

SEQ ID NO: 602271 - DNA, 19 bp, Mus musculus
  siRNA target sequence for AI429152 (NM_153126.1,1954-1972).
gtgccttgagggagagatt

SEQ ID NO: 602272 - DNA, 19 bp, Mus musculus
  siRNA target sequence for AI429152 (NM_153126.1,1957-1975).
ccttgagggagagatttct

SEQ ID NO: 602273 - DNA, 19 bp, Mus musculus
  siRNA target sequence for AI429152 (NM_153126.1,1976-1994).
cgtcagtccattttgaata

SEQ ID NO: 602274 - DNA, 19 bp, Mus musculus
  siRNA target sequence for AI429152 (NM_153126.1,2044-2062).
gtcggaacagtttcaagat

SEQ ID NO: 602275 - DNA, 19 bp, Mus musculus
  siRNA target sequence for AI429152 (NM_153126.1,2053-2071).
gtttcaagatccagacttt

SEQ ID NO: 602276 - DNA, 19 bp, Mus musculus
  siRNA target sequence for AI429152 (NM_153126.1,2085-2103).
gtggacgggttgttcgaat

SEQ ID NO: 602277 - DNA, 19 bp, Mus musculus
  siRNA target sequence for AI429152 (NM_153126.1,2155-2173).
gctgctgcagatgtattat

SEQ ID NO: 602278 - DNA, 19 bp, Mus musculus
  siRNA target sequence for AI429152 (NM_153126.1,2322-2340).
ctgcagagcgcctggatta

SEQ ID NO: 602279 - DNA, 19 bp, Mus musculus
  siRNA target sequence for AI429152 (NM_153126.1,2383-2401).
ctggaaacgagctggattt

SEQ ID NO: 602280 - DNA, 19 bp, Mus musculus
  siRNA target sequence for AI429152 (NM_153126.1,2396-2414).
ggatttgttcctgtctatt

SEQ ID NO: 602281 - DNA, 19 bp, Mus musculus
  siRNA target sequence for AI429152 (NM_153126.1,2441-2459).
ggggaacactcgtgcatta

SEQ ID NO: 602282 - DNA, 19 bp, Mus musculus
  siRNA target sequence for AI429152 (NM_153126.1,2442-2460).
gggaacactcgtgcattat

SEQ ID NO: 602283 - DNA, 19 bp, Mus musculus
  siRNA target sequence for AI429152 (NM_153126.1,2505-2523).
ggctggcagcattttggaa

SEQ ID NO: 602284 - DNA, 19 bp, Mus musculus
  siRNA target sequence for AI429152 (NM_153126.1,2703-2721).
ctcggaacatggtcgatta

SEQ ID NO: 602285 - DNA, 19 bp, Mus musculus
  siRNA target sequence for AI429152 (NM_153126.1,2723-2741).
cacctcatcatggatctta

SEQ ID NO: 602286 - DNA, 19 bp, Mus musculus
  siRNA target sequence for AI429152 (NM_153126.1,2905-2923).
ccggatcatccgcaaagtt

SEQ ID NO: 602287 - DNA, 19 bp, Mus musculus
  siRNA target sequence for AI429152 (NM_153126.1,2907-2925).
ggatcatccgcaaagttgt

SEQ ID NO: 602288 - DNA, 19 bp, Mus musculus
  siRNA target sequence for AI429152 (NM_153126.1,2990-3008).
gtcatggagcccactatga

SEQ ID NO: 602289 - DNA, 19 bp, Mus musculus
  siRNA target sequence for AI429152 (NM_153126.1,3086-3104).
gacatggacctctctcaat

SEQ ID NO: 602290 - DNA, 19 bp, Mus musculus
  siRNA target sequence for AI429152 (NM_153126.1,3088-3106).
catggacctctctcaatat

SEQ ID NO: 602291 - DNA, 19 bp, Mus musculus
  siRNA target sequence for AI429152 (NM_153126.1,3092-3110).
gacctctctcaatatgtaa

SEQ ID NO: 602292 - DNA, 19 bp, Mus musculus
  siRNA target sequence for AI429152 (NM_153126.1,3097-3115).
ctctcaatatgtaattcgt

SEQ ID NO: 602293 - DNA, 19 bp, Mus musculus
  siRNA target sequence for AI429152 (NM_153126.1,3125-3143).
gaagagtggaatgaagttt

SEQ ID NO: 602294 - DNA, 19 bp, Mus musculus
  siRNA target sequence for AI429152 (NM_153126.1,3165-3183).
cctccattgttagtttgaa

SEQ ID NO: 602295 - DNA, 19 bp, Mus musculus
  siRNA target sequence for AI429152 (NM_153126.1,3169-3187).
cattgttagtttgaaaagt

SEQ ID NO: 602296 - DNA, 19 bp, Mus musculus
  siRNA target sequence for AI429152 (NM_153126.1,3177-3195).
gtttgaaaagtgacaagaa

SEQ ID NO: 602297 - DNA, 19 bp, Mus musculus
  siRNA target sequence for Ard1 (NM_019870.1,312-330).
ggctacgtcttggctaaaa

SEQ ID NO: 602298 - DNA, 19 bp, Mus musculus
  siRNA target sequence for Ard1 (NM_019870.1,313-331).
gctacgtcttggctaaaat

SEQ ID NO: 602299 - DNA, 19 bp, Mus musculus
  siRNA target sequence for Ard1 (NM_019870.1,431-449).
ggcctctcgagccatgata

SEQ ID NO: 602300 - DNA, 19 bp, Mus musculus
  siRNA target sequence for Ard1 (NM_019870.1,433-451).
cctctcgagccatgataga

SEQ ID NO: 602301 - DNA, 19 bp, Mus musculus
  siRNA target sequence for Ard1 (NM_019870.1,436-454).
ctcgagccatgatagagaa

SEQ ID NO: 602302 - DNA, 19 bp, Mus musculus
  siRNA target sequence for Ard1 (NM_019870.1,683-701).
gaacaaagcggagaacaaa

SEQ ID NO: 602303 - DNA, 19 bp, Mus musculus
  siRNA target sequence for Cml1 (NM_023160.1,243-261).
ccaggacagcgaccataaa

SEQ ID NO: 602304 - DNA, 19 bp, Mus musculus
  siRNA target sequence for Cml1 (NM_023160.1,244-262).
caggacagcgaccataaaa

SEQ ID NO: 602305 - DNA, 19 bp, Mus musculus
  siRNA target sequence for Cml1 (NM_023160.1,297-315).
gtacattccctctaccttt

SEQ ID NO: 602306 - DNA, 19 bp, Mus musculus
  siRNA target sequence for Cml1 (NM_023160.1,311-329).
cctttcggcacatgcttat

SEQ ID NO: 602307 - DNA, 19 bp, Mus musculus
  siRNA target sequence for Cml1 (NM_023160.1,452-470).
gacagccctggaaggaata

SEQ ID NO: 602308 - DNA, 19 bp, Mus musculus
  siRNA target sequence for Cml1 (NM_023160.1,805-823).
ggccagtacttcatgagta

SEQ ID NO: 602309 - DNA, 19 bp, Mus musculus
  siRNA target sequence for Cml1 (NM_023160.1,806-824).
gccagtacttcatgagtat

SEQ ID NO: 602310 - DNA, 19 bp, Mus musculus
  siRNA target sequence for Cml1 (NM_023160.1,807-825).
ccagtacttcatgagtata

SEQ ID NO: 602311 - DNA, 19 bp, Mus musculus
  siRNA target sequence for Cml1 (NM_023160.1,808-826).
cagtacttcatgagtatat

SEQ ID NO: 602312 - DNA, 19 bp, Mus musculus
  siRNA target sequence for Cml1 (NM_023160.1,828-846).
ctggaggttagcaggtatt

SEQ ID NO: 602313 - DNA, 19 bp, Mus musculus
  siRNA target sequence for Cml1 (NM_023160.1,831-849).
gaggttagcaggtatttgt

SEQ ID NO: 602314 - DNA, 19 bp, Mus musculus
  siRNA target sequence for Cml1 (NM_023160.1,834-852).
gttagcaggtatttgtaca

SEQ ID NO: 602315 - DNA, 19 bp, Mus musculus
  siRNA target sequence for Cml1 (NM_023160.1,839-857).
caggtatttgtacaattca

SEQ ID NO: 602316 - DNA, 19 bp, Mus musculus
  siRNA target sequence for Cml1 (NM_023160.1,848-866).
gtacaattcaattaaagta

SEQ ID NO: 602317 - DNA, 19 bp, Mus musculus
  siRNA target sequence for Cml2 (NM_053096.2,411-429).
gcggcatgaaggagcttat

SEQ ID NO: 602318 - DNA, 19 bp, Mus musculus
  siRNA target sequence for Cml2 (NM_053096.2,412-430).
cggcatgaaggagcttatt

SEQ ID NO: 602319 - DNA, 19 bp, Mus musculus
  siRNA target sequence for Cml2 (NM_053096.2,492-510).
ctgtgaccatagtattgat

SEQ ID NO: 602320 - DNA, 19 bp, Mus musculus
  siRNA target sequence for Cml2 (NM_053096.2,494-512).
gtgaccatagtattgatgt

SEQ ID NO: 602321 - DNA, 19 bp, Mus musculus
  siRNA target sequence for Cml2 (NM_053096.2,930-948).
gccagtactttgtcagtat

SEQ ID NO: 602322 - DNA, 19 bp, Mus musculus
  siRNA target sequence for Cml2 (NM_053096.2,932-950).
cagtactttgtcagtataa

SEQ ID NO: 602323 - DNA, 19 bp, Mus musculus
  siRNA target sequence for Cml2 (NM_053096.2,1014-1032).
cagggtatagtgggaaata

SEQ ID NO: 602324 - DNA, 19 bp, Mus musculus
  siRNA target sequence for Cml4 (NM_023455.2,549-567).
ctgttgtatgcattttctt

SEQ ID NO: 602325 - DNA, 19 bp, Mus musculus
  siRNA target sequence for Cml4 (NM_023455.2,598-616).
caagccctggaagaattat

SEQ ID NO: 602326 - DNA, 19 bp, Mus musculus
  siRNA target sequence for Cml4 (NM_023455.2,979-997).
gcttgtggatgtttctcta

SEQ ID NO: 602327 - DNA, 19 bp, Mus musculus
  siRNA target sequence for Cml4 (NM_023455.2,985-1003).
ggatgtttctctaattcat

SEQ ID NO: 602328 - DNA, 19 bp, Mus musculus
  siRNA target sequence for Cml4 (NM_023455.2,1023-1041).
ctgctcaaaaatatgagtt

SEQ ID NO: 602329 - DNA, 19 bp, Mus musculus
  siRNA target sequence for Cml5 (NM_023493.1,744-762).
catacaacaaagtgctata

SEQ ID NO: 602330 - DNA, 19 bp, Mus musculus
  siRNA target sequence for Cml5 (NM_023493.1,755-773).
gtgctataaccctctatga

SEQ ID NO: 602331 - DNA, 19 bp, Mus musculus
  siRNA target sequence for Csrp2bp (NM_181417.2,628-646).
gggagagactctcctaatt

SEQ ID NO: 602332 - DNA, 19 bp, Mus musculus
  siRNA target sequence for Csrp2bp (NM_181417.2,662-680).
caggcgtcagtggacttat

SEQ ID NO: 602333 - DNA, 19 bp, Mus musculus
  siRNA target sequence for Csrp2bp (NM_181417.2,664-682).
ggcgtcagtggacttatct

SEQ ID NO: 602334 - DNA, 19 bp, Mus musculus
  siRNA target sequence for Csrp2bp (NM_181417.2,968-986).
cggtggaaagaagatatct

SEQ ID NO: 602335 - DNA, 19 bp, Mus musculus
  siRNA target sequence for Csrp2bp (NM_181417.2,998-1016).
gagaaacattggacttttt

SEQ ID NO: 602336 - DNA, 19 bp, Mus musculus
  siRNA target sequence for Csrp2bp (NM_181417.2,1008-1026).
ggacttttttactaggaaa

SEQ ID NO: 602337 - DNA, 19 bp, Mus musculus
  siRNA target sequence for Csrp2bp (NM_181417.2,1074-1092).
gcgtgggaagccctgttta

SEQ ID NO: 602338 - DNA, 19 bp, Mus musculus
  siRNA target sequence for Csrp2bp (NM_181417.2,1075-1093).
cgtgggaagccctgtttat

SEQ ID NO: 602339 - DNA, 19 bp, Mus musculus
  siRNA target sequence for Csrp2bp (NM_181417.2,1076-1094).
gtgggaagccctgtttatt

SEQ ID NO: 602340 - DNA, 19 bp, Mus musculus
  siRNA target sequence for Csrp2bp (NM_181417.2,1125-1143).
ccggatggtggaaacttgt

SEQ ID NO: 602341 - DNA, 19 bp, Mus musculus
  siRNA target sequence for Csrp2bp (NM_181417.2,1186-1204).
ggctgcctccaccttgaaa

SEQ ID NO: 602342 - DNA, 19 bp, Mus musculus
  siRNA target sequence for Csrp2bp (NM_181417.2,1225-1243).
gctggatcccatcattact

SEQ ID NO: 602343 - DNA, 19 bp, Mus musculus
  siRNA target sequence for Csrp2bp (NM_181417.2,1314-1332).
cgcgaacacaggaagctaa

SEQ ID NO: 602344 - DNA, 19 bp, Mus musculus
  siRNA target sequence for Csrp2bp (NM_181417.2,1315-1333).
gcgaacacaggaagctaaa

SEQ ID NO: 602345 - DNA, 19 bp, Mus musculus
  siRNA target sequence for Csrp2bp (NM_181417.2,1416-1434).
gccggaggccggatctgat

SEQ ID NO: 602346 - DNA, 19 bp, Mus musculus
  siRNA target sequence for Csrp2bp (NM_181417.2,1422-1440).
ggccggatctgattttgga

SEQ ID NO: 602347 - DNA, 19 bp, Mus musculus
  siRNA target sequence for Csrp2bp (NM_181417.2,1509-1527).
cttctccgtctctggattt

SEQ ID NO: 602348 - DNA, 19 bp, Mus musculus
  siRNA target sequence for Csrp2bp (NM_181417.2,1709-1727).
ctgcttgggagcagaaaga

SEQ ID NO: 602349 - DNA, 19 bp, Mus musculus
  siRNA target sequence for Csrp2bp (NM_181417.2,1733-1751).
cgagctccggaacagataa

SEQ ID NO: 602350 - DNA, 19 bp, Mus musculus
  siRNA target sequence for Csrp2bp (NM_181417.2,1737-1755).
ctccggaacagataaaaca

SEQ ID NO: 602351 - DNA, 19 bp, Mus musculus
  siRNA target sequence for Csrp2bp (NM_181417.2,1799-1817).
gatagcgaagacacagatt

SEQ ID NO: 602352 - DNA, 19 bp, Mus musculus
  siRNA target sequence for Csrp2bp (NM_181417.2,1989-2007).
ggctgaaacggaaactgat

SEQ ID NO: 602353 - DNA, 19 bp, Mus musculus
  siRNA target sequence for Csrp2bp (NM_181417.2,2050-2068).
cttggacgaggttgtgaat

SEQ ID NO: 602354 - DNA, 19 bp, Mus musculus
  siRNA target sequence for Csrp2bp (NM_181417.2,2065-2083).
gaatgccgcacttctgtta

SEQ ID NO: 602355 - DNA, 19 bp, Mus musculus
  siRNA target sequence for Csrp2bp (NM_181417.2,2080-2098).
gttagtcgatgggatttat

SEQ ID NO: 602356 - DNA, 19 bp, Mus musculus
  siRNA target sequence for Csrp2bp (NM_181417.2,2130-2148).
cagctggacaagctacata

SEQ ID NO: 602357 - DNA, 19 bp, Mus musculus
  siRNA target sequence for Csrp2bp (NM_181417.2,2221-2239).
gcaccagaccacgagattt

SEQ ID NO: 602358 - DNA, 19 bp, Mus musculus
  siRNA target sequence for Csrp2bp (NM_181417.2,2222-2240).
caccagaccacgagatttt

SEQ ID NO: 602359 - DNA, 19 bp, Mus musculus
  siRNA target sequence for Csrp2bp (NM_181417.2,2225-2243).
cagaccacgagatttttgt

SEQ ID NO: 602360 - DNA, 19 bp, Mus musculus
  siRNA target sequence for Csrp2bp (NM_181417.2,2271-2289).
ctgtggaccaaagtattat

SEQ ID NO: 602361 - DNA, 19 bp, Mus musculus
  siRNA target sequence for Csrp2bp (NM_181417.2,2273-2291).
gtggaccaaagtattatca

SEQ ID NO: 602362 - DNA, 19 bp, Mus musculus
  siRNA target sequence for Csrp2bp (NM_181417.2,2304-2322).
ctcggatcttgaaacctta

SEQ ID NO: 602363 - DNA, 19 bp, Mus musculus
  siRNA target sequence for Csrp2bp (NM_181417.2,2306-2324).
cggatcttgaaaccttata

SEQ ID NO: 602364 - DNA, 19 bp, Mus musculus
  siRNA target sequence for Csrp2bp (NM_181417.2,2319-2337).
cttatatcaggcgtgatta

SEQ ID NO: 602365 - DNA, 19 bp, Mus musculus
  siRNA target sequence for Csrp2bp (NM_181417.2,2328-2346).
ggcgtgattatgagacaaa

SEQ ID NO: 602366 - DNA, 19 bp, Mus musculus
  siRNA target sequence for Csrp2bp (NM_181417.2,2343-2361).
caaagccacccaaactaca

SEQ ID NO: 602367 - DNA, 19 bp, Mus musculus
  siRNA target sequence for Csrp2bp (NM_181417.2,2421-2439).
ctgatgcacccctcgatta

SEQ ID NO: 602368 - DNA, 19 bp, Mus musculus
  siRNA target sequence for Csrp2bp (NM_181417.2,2442-2460).
gctatgtccgaccaaatca

SEQ ID NO: 602369 - DNA, 19 bp, Mus musculus
  siRNA target sequence for Csrp2bp (NM_181417.2,2478-2496).
ccatgtgccaggagttttt

SEQ ID NO: 602370 - DNA, 19 bp, Mus musculus
  siRNA target sequence for Csrp2bp (NM_181417.2,2544-2562).
gtgttgtagtcctttataa

SEQ ID NO: 602371 - DNA, 19 bp, Mus musculus
  siRNA target sequence for Csrp2bp (NM_181417.2,2546-2564).
gttgtagtcctttataaaa

SEQ ID NO: 602372 - DNA, 19 bp, Mus musculus
  siRNA target sequence for Csrp2bp (NM_181417.2,2591-2609).
gttcctgatgtgaagtaca

SEQ ID NO: 602373 - DNA, 19 bp, Mus musculus
  siRNA target sequence for Csrp2bp (NM_181417.2,2611-2629).
cgaagcttacatctcattt

SEQ ID NO: 602374 - DNA, 19 bp, Mus musculus
  siRNA target sequence for Csrp2bp (NM_181417.2,2657-2675).
gcagggatcgccacattca

SEQ ID NO: 602375 - DNA, 19 bp, Mus musculus
  siRNA target sequence for Csrp2bp (NM_181417.2,2660-2678).
gggatcgccacattcatga

SEQ ID NO: 602376 - DNA, 19 bp, Mus musculus
  siRNA target sequence for D18Wsu98e (NM_178604.2,807-825).
gaacttcagcgctaagtat

SEQ ID NO: 602377 - DNA, 19 bp, Mus musculus
  siRNA target sequence for D18Wsu98e (NM_178604.2,810-828).
cttcagcgctaagtatgta

SEQ ID NO: 602378 - DNA, 19 bp, Mus musculus
  siRNA target sequence for D18Wsu98e (NM_178604.2,996-1014).
gctgaagaaaggcagatat

SEQ ID NO: 602379 - DNA, 19 bp, Mus musculus
  siRNA target sequence for Elp3 (NM_028811.1,52-70).
gatgatgctgactatagga

SEQ ID NO: 602380 - DNA, 19 bp, Mus musculus
  siRNA target sequence for Elp3 (NM_028811.1,63-81).
ctataggagacgttatcaa

SEQ ID NO: 602381 - DNA, 19 bp, Mus musculus
  siRNA target sequence for Elp3 (NM_028811.1,107-125).
gggaaagacgtcgatctaa

SEQ ID NO: 602382 - DNA, 19 bp, Mus musculus
  siRNA target sequence for Elp3 (NM_028811.1,108-126).
ggaaagacgtcgatctaaa

SEQ ID NO: 602383 - DNA, 19 bp, Mus musculus
  siRNA target sequence for Elp3 (NM_028811.1,109-127).
gaaagacgtcgatctaaat

SEQ ID NO: 602384 - DNA, 19 bp, Mus musculus
  siRNA target sequence for Elp3 (NM_028811.1,113-131).
gacgtcgatctaaataaga

SEQ ID NO: 602385 - DNA, 19 bp, Mus musculus
  siRNA target sequence for Elp3 (NM_028811.1,116-134).
gtcgatctaaataagatga

SEQ ID NO: 602386 - DNA, 19 bp, Mus musculus
  siRNA target sequence for Elp3 (NM_028811.1,118-136).
cgatctaaataagatgaaa

SEQ ID NO: 602387 - DNA, 19 bp, Mus musculus
  siRNA target sequence for Elp3 (NM_028811.1,200-218).
gtccctcctcactatcgaa

SEQ ID NO: 602388 - DNA, 19 bp, Mus musculus
  siRNA target sequence for Elp3 (NM_028811.1,206-224).
cctcactatcgaaagatct

SEQ ID NO: 602389 - DNA, 19 bp, Mus musculus
  siRNA target sequence for Elp3 (NM_028811.1,207-225).
ctcactatcgaaagatctt

SEQ ID NO: 602390 - DNA, 19 bp, Mus musculus
  siRNA target sequence for Elp3 (NM_028811.1,209-227).
cactatcgaaagatcttga

SEQ ID NO: 602391 - DNA, 19 bp, Mus musculus
  siRNA target sequence for Elp3 (NM_028811.1,220-238).
gatcttgattcctaagcta

SEQ ID NO: 602392 - DNA, 19 bp, Mus musculus
  siRNA target sequence for Elp3 (NM_028811.1,356-374).
cctgactccgattttgagt

SEQ ID NO: 602393 - DNA, 19 bp, Mus musculus
  siRNA target sequence for Elp3 (NM_028811.1,357-375).
ctgactccgattttgagta

SEQ ID NO: 602394 - DNA, 19 bp, Mus musculus
  siRNA target sequence for Elp3 (NM_028811.1,417-435).
gagctatccgtgctagata

SEQ ID NO: 602395 - DNA, 19 bp, Mus musculus
  siRNA target sequence for Elp3 (NM_028811.1,420-438).
ctatccgtgctagatatga

SEQ ID NO: 602396 - DNA, 19 bp, Mus musculus
  siRNA target sequence for Elp3 (NM_028811.1,591-609).
caggccatacttcaaacaa

SEQ ID NO: 602397 - DNA, 19 bp, Mus musculus
  siRNA target sequence for Elp3 (NM_028811.1,593-611).
ggccatacttcaaacaata

SEQ ID NO: 602398 - DNA, 19 bp, Mus musculus
  siRNA target sequence for Elp3 (NM_028811.1,614-632).
cacgaggcaatcaagtatt

SEQ ID NO: 602399 - DNA, 19 bp, Mus musculus
  siRNA target sequence for Elp3 (NM_028811.1,616-634).
cgaggcaatcaagtattct

SEQ ID NO: 602400 - DNA, 19 bp, Mus musculus
  siRNA target sequence for Elp3 (NM_028811.1,699-717).
ggcacctaagtgacatgtt

SEQ ID NO: 602401 - DNA, 19 bp, Mus musculus
  siRNA target sequence for Elp3 (NM_028811.1,704-722).
ctaagtgacatgttgactt

SEQ ID NO: 602402 - DNA, 19 bp, Mus musculus
  siRNA target sequence for Elp3 (NM_028811.1,751-769).
gcagagtgtctatgaagat

SEQ ID NO: 602403 - DNA, 19 bp, Mus musculus
  siRNA target sequence for Elp3 (NM_028811.1,800-818).
gtgaaggcagcgtgtgaat

SEQ ID NO: 602404 - DNA, 19 bp, Mus musculus
  siRNA target sequence for Elp3 (NM_028811.1,823-841).
ccacctggccaaagattct

SEQ ID NO: 602405 - DNA, 19 bp, Mus musculus
  siRNA target sequence for Elp3 (NM_028811.1,925-943).
cgagaaccctgcttttcgt

SEQ ID NO: 602406 - DNA, 19 bp, Mus musculus
  siRNA target sequence for Elp3 (NM_028811.1,936-954).
cttttcgtcctgatggttt

SEQ ID NO: 602407 - DNA, 19 bp, Mus musculus
  siRNA target sequence for Elp3 (NM_028811.1,1159-1177).
gcgcgagctggcatttgca

SEQ ID NO: 602408 - DNA, 19 bp, Mus musculus
  siRNA target sequence for Elp3 (NM_028811.1,1160-1178).
cgcgagctggcatttgcaa

SEQ ID NO: 602409 - DNA, 19 bp, Mus musculus
  siRNA target sequence for Elp3 (NM_028811.1,1215-1233).
gaaccagggaggttggaat

SEQ ID NO: 602410 - DNA, 19 bp, Mus musculus
  siRNA target sequence for Elp3 (NM_028811.1,1219-1237).
cagggaggttggaatccaa

SEQ ID NO: 602411 - DNA, 19 bp, Mus musculus
  siRNA target sequence for Elp3 (NM_028811.1,1225-1243).
ggttggaatccaagaaatt

SEQ ID NO: 602412 - DNA, 19 bp, Mus musculus
  siRNA target sequence for Elp3 (NM_028811.1,1273-1291).
gttggtacggagagattat

SEQ ID NO: 602413 - DNA, 19 bp, Mus musculus
  siRNA target sequence for Elp3 (NM_028811.1,1384-1402).
ggaaaccttccggtttgaa

SEQ ID NO: 602414 - DNA, 19 bp, Mus musculus
  siRNA target sequence for Elp3 (NM_028811.1,1465-1483).
cagccgggatcccactaaa

SEQ ID NO: 602415 - DNA, 19 bp, Mus musculus
  siRNA target sequence for Elp3 (NM_028811.1,1468-1486).
ccgggatcccactaaattt

SEQ ID NO: 602416 - DNA, 19 bp, Mus musculus
  siRNA target sequence for Elp3 (NM_028811.1,1470-1488).
gggatcccactaaatttca

SEQ ID NO: 602417 - DNA, 19 bp, Mus musculus
  siRNA target sequence for Elp3 (NM_028811.1,1575-1593).
caggggtcggcacaagaaa

SEQ ID NO: 602418 - DNA, 19 bp, Mus musculus
  siRNA target sequence for Elp3 (NM_028811.1,1577-1595).
ggggtcggcacaagaaatt

SEQ ID NO: 602419 - DNA, 19 bp, Mus musculus
  siRNA target sequence for Elp3 (NM_028811.1,1578-1596).
gggtcggcacaagaaatta

SEQ ID NO: 602420 - DNA, 19 bp, Mus musculus
  siRNA target sequence for Elp3 (NM_028811.1,1579-1597).
ggtcggcacaagaaattat

SEQ ID NO: 602421 - DNA, 19 bp, Mus musculus
  siRNA target sequence for Elp3 (NM_028811.1,1580-1598).
gtcggcacaagaaattatt

SEQ ID NO: 602422 - DNA, 19 bp, Mus musculus
  siRNA target sequence for Elp3 (NM_028811.1,1601-1619).
cgaaagattggctacagat

SEQ ID NO: 602423 - DNA, 19 bp, Mus musculus
  siRNA target sequence for Elp3 (NM_028811.1,1626-1644).
gcccctacatggtaaagat

SEQ ID NO: 602424 - DNA, 19 bp, Mus musculus
  siRNA target sequence for Mak3p (NM_028108.1,251-269).
gacgccacacaatattaaa

SEQ ID NO: 602425 - DNA, 19 bp, Mus musculus
  siRNA target sequence for Mak3p (NM_028108.1,280-298).
gactgaaccaggtcatctt

SEQ ID NO: 602426 - DNA, 19 bp, Mus musculus
  siRNA target sequence for Mak3p (NM_028108.1,300-318).
ccagtcagctataatgata

SEQ ID NO: 602427 - DNA, 19 bp, Mus musculus
  siRNA target sequence for Mak3p (NM_028108.1,341-359).
ggttggcgagctagcaaaa

SEQ ID NO: 602428 - DNA, 19 bp, Mus musculus
  siRNA target sequence for Mak3p (NM_028108.1,351-369).
ctagcaaaacttgcatatt

SEQ ID NO: 602429 - DNA, 19 bp, Mus musculus
  siRNA target sequence for Mak3p (NM_028108.1,354-372).
gcaaaacttgcatatttca

SEQ ID NO: 602430 - DNA, 19 bp, Mus musculus
  siRNA target sequence for Mak3p (NM_028108.1,360-378).
cttgcatatttcaatgata

SEQ ID NO: 602431 - DNA, 19 bp, Mus musculus
  siRNA target sequence for Mak3p (NM_028108.1,400-418).
gcagggtggatcattcaca

SEQ ID NO: 602432 - DNA, 19 bp, Mus musculus
  siRNA target sequence for Mak3p (NM_028108.1,463-481).
cttaccgaagactaggaat

SEQ ID NO: 602433 - DNA, 19 bp, Mus musculus
  siRNA target sequence for Mak3p (NM_028108.1,467-485).
ccgaagactaggaatagga

SEQ ID NO: 602434 - DNA, 19 bp, Mus musculus
  siRNA target sequence for Mak3p (NM_028108.1,468-486).
cgaagactaggaataggaa

SEQ ID NO: 602435 - DNA, 19 bp, Mus musculus
  siRNA target sequence for Mak3p (NM_028108.1,525-543).
gatggcacttttgacaata

SEQ ID NO: 602436 - DNA, 19 bp, Mus musculus
  siRNA target sequence for Mak3p (NM_028108.1,528-546).
ggcacttttgacaatatct

SEQ ID NO: 602437 - DNA, 19 bp, Mus musculus
  siRNA target sequence for Mak3p (NM_028108.1,529-547).
gcacttttgacaatatcta

SEQ ID NO: 602438 - DNA, 19 bp, Mus musculus
  siRNA target sequence for Mak3p (NM_028108.1,570-588).
gagtcagcgattgactttt

SEQ ID NO: 602439 - DNA, 19 bp, Mus musculus
  siRNA target sequence for Mak3p (NM_028108.1,606-624).
gagattatcgagacaaaga

SEQ ID NO: 602440 - DNA, 19 bp, Mus musculus
  siRNA target sequence for Mak3p (NM_028108.1,656-674).
cgcgcatgtgcttcagaaa

SEQ ID NO: 602441 - DNA, 19 bp, Mus musculus
  siRNA target sequence for Mak3p (NM_028108.1,657-675).
gcgcatgtgcttcagaaaa

SEQ ID NO: 602442 - DNA, 19 bp, Mus musculus
  siRNA target sequence for Mak3p (NM_028108.1,658-676).
cgcatgtgcttcagaaaaa

SEQ ID NO: 602443 - DNA, 19 bp, Mus musculus
  siRNA target sequence for Narg1 (NM_053089.2,234-252).
ctcttcaagcggatcttga

SEQ ID NO: 602444 - DNA, 19 bp, Mus musculus
  siRNA target sequence for Narg1 (NM_053089.2,242-260).
gcggatcttgagatgttat

SEQ ID NO: 602445 - DNA, 19 bp, Mus musculus
  siRNA target sequence for Narg1 (NM_053089.2,245-263).
gatcttgagatgttatgaa

SEQ ID NO: 602446 - DNA, 19 bp, Mus musculus
  siRNA target sequence for Narg1 (NM_053089.2,253-271).
gatgttatgaacataaaca

SEQ ID NO: 602447 - DNA, 19 bp, Mus musculus
  siRNA target sequence for Narg1 (NM_053089.2,290-308).
gttctgtaaacaaatcctt

SEQ ID NO: 602448 - DNA, 19 bp, Mus musculus
  siRNA target sequence for Narg1 (NM_053089.2,345-363).
gctatgaaaggattaacgt

SEQ ID NO: 602449 - DNA, 19 bp, Mus musculus
  siRNA target sequence for Narg1 (NM_053089.2,346-364).
ctatgaaaggattaacgtt

SEQ ID NO: 602450 - DNA, 19 bp, Mus musculus
  siRNA target sequence for Narg1 (NM_053089.2,354-372).
ggattaacgttgaactgtt

SEQ ID NO: 602451 - DNA, 19 bp, Mus musculus
  siRNA target sequence for Narg1 (NM_053089.2,355-373).
gattaacgttgaactgttt

SEQ ID NO: 602452 - DNA, 19 bp, Mus musculus
  siRNA target sequence for Narg1 (NM_053089.2,401-419).
ggttcgcagaggtttgaga

SEQ ID NO: 602453 - DNA, 19 bp, Mus musculus
  siRNA target sequence for Narg1 (NM_053089.2,402-420).
gttcgcagaggtttgagaa

SEQ ID NO: 602454 - DNA, 19 bp, Mus musculus
  siRNA target sequence for Narg1 (NM_053089.2,406-424).
gcagaggtttgagaaatga

SEQ ID NO: 602455 - DNA, 19 bp, Mus musculus
  siRNA target sequence for Narg1 (NM_053089.2,514-532).
cactgaaatgggataaaga

SEQ ID NO: 602456 - DNA, 19 bp, Mus musculus
  siRNA target sequence for Narg1 (NM_053089.2,523-541).
gggataaagacaatcttca

SEQ ID NO: 602457 - DNA, 19 bp, Mus musculus
  siRNA target sequence for Narg1 (NM_053089.2,531-549).
gacaatcttcagatcttaa

SEQ ID NO: 602458 - DNA, 19 bp, Mus musculus
  siRNA target sequence for Narg1 (NM_053089.2,569-587).
gattcaaatgcgagatctt

SEQ ID NO: 602459 - DNA, 19 bp, Mus musculus
  siRNA target sequence for Narg1 (NM_053089.2,588-606).
gagggctatagggaaacaa

SEQ ID NO: 602460 - DNA, 19 bp, Mus musculus
  siRNA target sequence for Narg1 (NM_053089.2,590-608).
gggctatagggaaacaaga

SEQ ID NO: 602461 - DNA, 19 bp, Mus musculus
  siRNA target sequence for Narg1 (NM_053089.2,591-609).
ggctatagggaaacaagat

SEQ ID NO: 602462 - DNA, 19 bp, Mus musculus
  siRNA target sequence for Narg1 (NM_053089.2,592-610).
gctatagggaaacaagata

SEQ ID NO: 602463 - DNA, 19 bp, Mus musculus
  siRNA target sequence for Narg1 (NM_053089.2,640-658).
gagcatcatggattggtta

SEQ ID NO: 602464 - DNA, 19 bp, Mus musculus
  siRNA target sequence for Narg1 (NM_053089.2,646-664).
catggattggttatgctat

SEQ ID NO: 602465 - DNA, 19 bp, Mus musculus
  siRNA target sequence for Narg1 (NM_053089.2,650-668).
gattggttatgctattgct

SEQ ID NO: 602466 - DNA, 19 bp, Mus musculus
  siRNA target sequence for Narg1 (NM_053089.2,660-678).
gctattgcttaccatttat

SEQ ID NO: 602467 - DNA, 19 bp, Mus musculus
  siRNA target sequence for Narg1 (NM_053089.2,661-679).
ctattgcttaccatttatt

SEQ ID NO: 602468 - DNA, 19 bp, Mus musculus
  siRNA target sequence for Narg1 (NM_053089.2,667-685).
cttaccatttattagaaga

SEQ ID NO: 602469 - DNA, 19 bp, Mus musculus
  siRNA target sequence for Narg1 (NM_053089.2,671-689).
ccatttattagaagactat

SEQ ID NO: 602470 - DNA, 19 bp, Mus musculus
  siRNA target sequence for Narg1 (NM_053089.2,739-757).
ctcctgataaagtggatta

SEQ ID NO: 602471 - DNA, 19 bp, Mus musculus
  siRNA target sequence for Narg1 (NM_053089.2,766-784).
gtgaactcctcttatatca

SEQ ID NO: 602472 - DNA, 19 bp, Mus musculus
  siRNA target sequence for Narg1 (NM_053089.2,773-791).
cctcttatatcagaatcaa

SEQ ID NO: 602473 - DNA, 19 bp, Mus musculus
  siRNA target sequence for Narg1 (NM_053089.2,827-845).
ggaacatctttgtacctat

SEQ ID NO: 602474 - DNA, 19 bp, Mus musculus
  siRNA target sequence for Narg1 (NM_053089.2,902-920).
gcagttgtgtcgtttggaa

SEQ ID NO: 602475 - DNA, 19 bp, Mus musculus
  siRNA target sequence for Narg1 (NM_053089.2,932-950).
cgtttatagaggattacaa

SEQ ID NO: 602476 - DNA, 19 bp, Mus musculus
  siRNA target sequence for Narg1 (NM_053089.2,961-979).
ctgaaaattgggcctatta

SEQ ID NO: 602477 - DNA, 19 bp, Mus musculus
  siRNA target sequence for Narg1 (NM_053089.2,974-992).
ctattacaaaggcttagaa

SEQ ID NO: 602478 - DNA, 19 bp, Mus musculus
  siRNA target sequence for Narg1 (NM_053089.2,1001-1019).
gaagccagctaatatgtta

SEQ ID NO: 602479 - DNA, 19 bp, Mus musculus
  siRNA target sequence for Narg1 (NM_053089.2,1016-1034).
gttagaacggctaaaaata

SEQ ID NO: 602480 - DNA, 19 bp, Mus musculus
  siRNA target sequence for Narg1 (NM_053089.2,1175-1193).
caataccttgaggtcttta

SEQ ID NO: 602481 - DNA, 19 bp, Mus musculus
  siRNA target sequence for Narg1 (NM_053089.2,1186-1204).
ggtctttatacagagataa

SEQ ID NO: 602482 - DNA, 19 bp, Mus musculus
  siRNA target sequence for Narg1 (NM_053089.2,1211-1229).
ggtggcaatcgtagaagaa

SEQ ID NO: 602483 - DNA, 19 bp, Mus musculus
  siRNA target sequence for Narg1 (NM_053089.2,1216-1234).
caatcgtagaagaactagt

SEQ ID NO: 602484 - DNA, 19 bp, Mus musculus
  siRNA target sequence for Narg1 (NM_053089.2,1220-1238).
cgtagaagaactagtagtt

SEQ ID NO: 602485 - DNA, 19 bp, Mus musculus
  siRNA target sequence for Narg1 (NM_053089.2,1230-1248).
ctagtagttggttatgaaa

SEQ ID NO: 602486 - DNA, 19 bp, Mus musculus
  siRNA target sequence for Narg1 (NM_053089.2,1233-1251).
gtagttggttatgaaactt

SEQ ID NO: 602487 - DNA, 19 bp, Mus musculus
  siRNA target sequence for Narg1 (NM_053089.2,1239-1257).
ggttatgaaacttctctaa

SEQ ID NO: 602488 - DNA, 19 bp, Mus musculus
  siRNA target sequence for Narg1 (NM_053089.2,1240-1258).
gttatgaaacttctctaaa

SEQ ID NO: 602489 - DNA, 19 bp, Mus musculus
  siRNA target sequence for Narg1 (NM_053089.2,1245-1263).
gaaacttctctaaaaagtt

SEQ ID NO: 602490 - DNA, 19 bp, Mus musculus
  siRNA target sequence for Narg1 (NM_053089.2,1268-1286).
cctatttaaccccaatgat

SEQ ID NO: 602491 - DNA, 19 bp, Mus musculus
  siRNA target sequence for Narg1 (NM_053089.2,1298-1316).
ggaacctccaaccacatta

SEQ ID NO: 602492 - DNA, 19 bp, Mus musculus
  siRNA target sequence for Narg1 (NM_053089.2,1317-1335).
ctttgggtccagtactatt

SEQ ID NO: 602493 - DNA, 19 bp, Mus musculus
  siRNA target sequence for Narg1 (NM_053089.2,1331-1349).
ctatttggcacagcattat

SEQ ID NO: 602494 - DNA, 19 bp, Mus musculus
  siRNA target sequence for Narg1 (NM_053089.2,1366-1384).
catccattgctctggaata

SEQ ID NO: 602495 - DNA, 19 bp, Mus musculus
  siRNA target sequence for Narg1 (NM_053089.2,1385-1403).
cataaatactgcaattgaa

SEQ ID NO: 602496 - DNA, 19 bp, Mus musculus
  siRNA target sequence for Narg1 (NM_053089.2,1414-1432).
cattgatagaactctttct

SEQ ID NO: 602497 - DNA, 19 bp, Mus musculus
  siRNA target sequence for Narg1 (NM_053089.2,1621-1639).
cggtagagaacctgaatga

SEQ ID NO: 602498 - DNA, 19 bp, Mus musculus
  siRNA target sequence for Narg1 (NM_053089.2,1622-1640).
ggtagagaacctgaatgaa

SEQ ID NO: 602499 - DNA, 19 bp, Mus musculus
  siRNA target sequence for Narg1 (NM_053089.2,1682-1700).
caaagcaatgaacaaattt

SEQ ID NO: 602500 - DNA, 19 bp, Mus musculus
  siRNA target sequence for Narg1 (NM_053089.2,1804-1822).
gatcatatgtggacttatt

SEQ ID NO: 602501 - DNA, 19 bp, Mus musculus
  siRNA target sequence for Narg1 (NM_053089.2,1807-1825).
catatgtggacttattaaa

SEQ ID NO: 602502 - DNA, 19 bp, Mus musculus
  siRNA target sequence for Narg1 (NM_053089.2,1817-1835).
cttattaaaactagaagat

SEQ ID NO: 602503 - DNA, 19 bp, Mus musculus
  siRNA target sequence for Narg1 (NM_053089.2,1867-1885).
cagcgaggattgctattga

SEQ ID NO: 602504 - DNA, 19 bp, Mus musculus
  siRNA target sequence for Narg1 (NM_053089.2,1869-1887).
gcgaggattgctattgaga

SEQ ID NO: 602505 - DNA, 19 bp, Mus musculus
  siRNA target sequence for Narg1 (NM_053089.2,1870-1888).
cgaggattgctattgagat

SEQ ID NO: 602506 - DNA, 19 bp, Mus musculus
  siRNA target sequence for Narg1 (NM_053089.2,1873-1891).
ggattgctattgagatcta

SEQ ID NO: 602507 - DNA, 19 bp, Mus musculus
  siRNA target sequence for Narg1 (NM_053089.2,1874-1892).
gattgctattgagatctat

SEQ ID NO: 602508 - DNA, 19 bp, Mus musculus
  siRNA target sequence for Narg1 (NM_053089.2,1878-1896).
gctattgagatctatttga

SEQ ID NO: 602509 - DNA, 19 bp, Mus musculus
  siRNA target sequence for Narg1 (NM_053089.2,1941-1959).
gctgatacagcaaacatgt

SEQ ID NO: 602510 - DNA, 19 bp, Mus musculus
  siRNA target sequence for Narg1 (NM_053089.2,1971-1989).
ctaaagaaactgcgtaata

SEQ ID NO: 602511 - DNA, 19 bp, Mus musculus
  siRNA target sequence for Narg1 (NM_053089.2,1982-2000).
gcgtaataaacaaagaaga

SEQ ID NO: 602512 - DNA, 19 bp, Mus musculus
  siRNA target sequence for Narg1 (NM_053089.2,2058-2076).
caacggaatcagaaaaaga

SEQ ID NO: 602513 - DNA, 19 bp, Mus musculus
  siRNA target sequence for Narg1 (NM_053089.2,2107-2125).
gccccaaagaagagcttat

SEQ ID NO: 602514 - DNA, 19 bp, Mus musculus
  siRNA target sequence for Narg1 (NM_053089.2,2152-2170).
ctccattggaagaagctat

SEQ ID NO: 602515 - DNA, 19 bp, Mus musculus
  siRNA target sequence for Narg1 (NM_053089.2,2280-2298).
gtaaagcgggcatttgcta

SEQ ID NO: 602516 - DNA, 19 bp, Mus musculus
  siRNA target sequence for Narg1 (NM_053089.2,2285-2303).
gcgggcatttgctattgat

SEQ ID NO: 602517 - DNA, 19 bp, Mus musculus
  siRNA target sequence for Narg1 (NM_053089.2,2286-2304).
cgggcatttgctattgatt

SEQ ID NO: 602518 - DNA, 19 bp, Mus musculus
  siRNA target sequence for Narg1 (NM_053089.2,2318-2336).
gcttcatgagtgcatgatt

SEQ ID NO: 602519 - DNA, 19 bp, Mus musculus
  siRNA target sequence for Narg1 (NM_053089.2,2329-2347).
gcatgattcgactctttca

SEQ ID NO: 602520 - DNA, 19 bp, Mus musculus
  siRNA target sequence for Narg1 (NM_053089.2,2330-2348).
catgattcgactctttcat

SEQ ID NO: 602521 - DNA, 19 bp, Mus musculus
  siRNA target sequence for Narg1 (NM_053089.2,2333-2351).
gattcgactctttcattct

SEQ ID NO: 602522 - DNA, 19 bp, Mus musculus
  siRNA target sequence for Narg1 (NM_053089.2,2346-2364).
cattctgtgtgtgaaagta

SEQ ID NO: 602523 - DNA, 19 bp, Mus musculus
  siRNA target sequence for Narg1 (NM_053089.2,2352-2370).
gtgtgtgaaagtaaagact

SEQ ID NO: 602524 - DNA, 19 bp, Mus musculus
  siRNA target sequence for Narg1 (NM_053089.2,2354-2372).
gtgtgaaagtaaagactta

SEQ ID NO: 602525 - DNA, 19 bp, Mus musculus
  siRNA target sequence for Narg1 (NM_053089.2,2367-2385).
gacttacccgaaacagtta

SEQ ID NO: 602526 - DNA, 19 bp, Mus musculus
  siRNA target sequence for Narg1 (NM_053089.2,2369-2387).
cttacccgaaacagttaga

SEQ ID NO: 602527 - DNA, 19 bp, Mus musculus
  siRNA target sequence for Narg1 (NM_053089.2,2375-2393).
cgaaacagttagaacagta

SEQ ID NO: 602528 - DNA, 19 bp, Mus musculus
  siRNA target sequence for Narg1 (NM_053089.2,2380-2398).
cagttagaacagtattaaa

SEQ ID NO: 602529 - DNA, 19 bp, Mus musculus
  siRNA target sequence for Narg1 (NM_053089.2,2488-2506).
gattatcagctgccaaaat

SEQ ID NO: 602530 - DNA, 19 bp, Mus musculus
  siRNA target sequence for Narg1 (NM_053089.2,2499-2517).
gccaaaatggtatattatt

SEQ ID NO: 602531 - DNA, 19 bp, Mus musculus
  siRNA target sequence for Narg1 (NM_053089.2,2508-2526).
gtatattatttagattctt

SEQ ID NO: 602532 - DNA, 19 bp, Mus musculus
  siRNA target sequence for Narg1 (NM_053089.2,2629-2647).
gtagcctaggagactgtaa

SEQ ID NO: 602533 - DNA, 19 bp, Mus musculus
  siRNA target sequence for Narg1 (NM_053089.2,2632-2650).
gcctaggagactgtaaaga

SEQ ID NO: 602534 - DNA, 19 bp, Mus musculus
  siRNA target sequence for Narg1 (NM_053089.2,2668-2686).
gagcaagttgtcataagct

SEQ ID NO: 602535 - DNA, 19 bp, Mus musculus
  siRNA target sequence for Narg1 (NM_053089.2,2670-2688).
gcaagttgtcataagcttt

SEQ ID NO: 602536 - DNA, 19 bp, Mus musculus
  siRNA target sequence for Narg1 (NM_053089.2,2671-2689).
caagttgtcataagctttt

SEQ ID NO: 602537 - DNA, 19 bp, Mus musculus
  siRNA target sequence for Narg1 (NM_053089.2,2716-2734).
ctggatacgaagaggatat

SEQ ID NO: 602538 - DNA, 19 bp, Mus musculus
  siRNA target sequence for Ncoa3 (NM_008679.1,263-281).
ctcatctctgcaaatctca

SEQ ID NO: 602539 - DNA, 19 bp, Mus musculus
  siRNA target sequence for Ncoa3 (NM_008679.1,282-300).
gcgacatcgacaacttcaa

SEQ ID NO: 602540 - DNA, 19 bp, Mus musculus
  siRNA target sequence for Ncoa3 (NM_008679.1,340-358).
gagacagatacggcaaata

SEQ ID NO: 602541 - DNA, 19 bp, Mus musculus
  siRNA target sequence for Ncoa3 (NM_008679.1,342-360).
gacagatacggcaaataaa

SEQ ID NO: 602542 - DNA, 19 bp, Mus musculus
  siRNA target sequence for Ncoa3 (NM_008679.1,422-440).
gggcagggagtcattgata

SEQ ID NO: 602543 - DNA, 19 bp, Mus musculus
  siRNA target sequence for Ncoa3 (NM_008679.1,423-441).
ggcagggagtcattgataa

SEQ ID NO: 602544 - DNA, 19 bp, Mus musculus
  siRNA target sequence for Ncoa3 (NM_008679.1,433-451).
cattgataaagactcttta

SEQ ID NO: 602545 - DNA, 19 bp, Mus musculus
  siRNA target sequence for Ncoa3 (NM_008679.1,447-465).
ctttaggaccgcttttact

SEQ ID NO: 602546 - DNA, 19 bp, Mus musculus
  siRNA target sequence for Ncoa3 (NM_008679.1,500-518).
cgagatggaaacattgtat

SEQ ID NO: 602547 - DNA, 19 bp, Mus musculus
  siRNA target sequence for Ncoa3 (NM_008679.1,559-577).
ggaggacctggttaacaca

SEQ ID NO: 602548 - DNA, 19 bp, Mus musculus
  siRNA target sequence for Ncoa3 (NM_008679.1,560-578).
gaggacctggttaacacaa

SEQ ID NO: 602549 - DNA, 19 bp, Mus musculus
  siRNA target sequence for Ncoa3 (NM_008679.1,650-668).
gagtttcttggactaatga

SEQ ID NO: 602550 - DNA, 19 bp, Mus musculus
  siRNA target sequence for Ncoa3 (NM_008679.1,652-670).
gtttcttggactaatgaga

SEQ ID NO: 602551 - DNA, 19 bp, Mus musculus
  siRNA target sequence for Ncoa3 (NM_008679.1,764-782).
cgccagagatatgaaacaa

SEQ ID NO: 602552 - DNA, 19 bp, Mus musculus
  siRNA target sequence for Ncoa3 (NM_008679.1,833-851).
gacttgcagtgctgtatga

SEQ ID NO: 602553 - DNA, 19 bp, Mus musculus
  siRNA target sequence for Ncoa3 (NM_008679.1,924-942).
ccggaaaggttgtcaatat

SEQ ID NO: 602554 - DNA, 19 bp, Mus musculus
  siRNA target sequence for Ncoa3 (NM_008679.1,925-943).
cggaaaggttgtcaatata

SEQ ID NO: 602555 - DNA, 19 bp, Mus musculus
  siRNA target sequence for Ncoa3 (NM_008679.1,932-950).
gttgtcaatatagatacaa

SEQ ID NO: 602556 - DNA, 19 bp, Mus musculus
  siRNA target sequence for Ncoa3 (NM_008679.1,935-953).
gtcaatatagatacaaact

SEQ ID NO: 602557 - DNA, 19 bp, Mus musculus
  siRNA target sequence for Ncoa3 (NM_008679.1,937-955).
caatatagatacaaactca

SEQ ID NO: 602558 - DNA, 19 bp, Mus musculus
  siRNA target sequence for Ncoa3 (NM_008679.1,944-962).
gatacaaactcacttagat

SEQ ID NO: 602559 - DNA, 19 bp, Mus musculus
  siRNA target sequence for Ncoa3 (NM_008679.1,1009-1027).
gaggttcttcagtctgaat

SEQ ID NO: 602560 - DNA, 19 bp, Mus musculus
  siRNA target sequence for Ncoa3 (NM_008679.1,1011-1029).
ggttcttcagtctgaatga

SEQ ID NO: 602561 - DNA, 19 bp, Mus musculus
  siRNA target sequence for Ncoa3 (NM_008679.1,1042-1060).
gtcccagaagcgtcactat

SEQ ID NO: 602562 - DNA, 19 bp, Mus musculus
  siRNA target sequence for Ncoa3 (NM_008679.1,1044-1062).
cccagaagcgtcactatca

SEQ ID NO: 602563 - DNA, 19 bp, Mus musculus
  siRNA target sequence for Ncoa3 (NM_008679.1,1048-1066).
gaagcgtcactatcaagaa

SEQ ID NO: 602564 - DNA, 19 bp, Mus musculus
  siRNA target sequence for Ncoa3 (NM_008679.1,1088-1106).
gagacccccgtgtatcgtt

SEQ ID NO: 602565 - DNA, 19 bp, Mus musculus
  siRNA target sequence for Ncoa3 (NM_008679.1,1111-1129).
cttggctgatggaactatt

SEQ ID NO: 602566 - DNA, 19 bp, Mus musculus
  siRNA target sequence for Ncoa3 (NM_008679.1,1115-1133).
gctgatggaactattgtga

SEQ ID NO: 602567 - DNA, 19 bp, Mus musculus
  siRNA target sequence for Ncoa3 (NM_008679.1,1130-1148).
gtgagtgcgcagacaaaaa

SEQ ID NO: 602568 - DNA, 19 bp, Mus musculus
  siRNA target sequence for Ncoa3 (NM_008679.1,1134-1152).
gtgcgcagacaaaaagcaa

SEQ ID NO: 602569 - DNA, 19 bp, Mus musculus
  siRNA target sequence for Ncoa3 (NM_008679.1,1159-1177).
ccgcaatcctgtaacgaat

SEQ ID NO: 602570 - DNA, 19 bp, Mus musculus
  siRNA target sequence for Ncoa3 (NM_008679.1,1162-1180).
caatcctgtaacgaatgat

SEQ ID NO: 602571 - DNA, 19 bp, Mus musculus
  siRNA target sequence for Ncoa3 (NM_008679.1,1178-1196).
gatcgtcacggcttcatct

SEQ ID NO: 602572 - DNA, 19 bp, Mus musculus
  siRNA target sequence for Ncoa3 (NM_008679.1,1288-1306).
cgtgagcatgtctccaaat

SEQ ID NO: 602573 - DNA, 19 bp, Mus musculus
  siRNA target sequence for Ncoa3 (NM_008679.1,1299-1317).
ctccaaatcagaatgtaca

SEQ ID NO: 602574 - DNA, 19 bp, Mus musculus
  siRNA target sequence for Ncoa3 (NM_008679.1,1628-1646).
gggagccacagcttttcta

SEQ ID NO: 602575 - DNA, 19 bp, Mus musculus
  siRNA target sequence for Ncoa3 (NM_008679.1,1682-1700).
ggcgtggggacctctcttt

SEQ ID NO: 602576 - DNA, 19 bp, Mus musculus
  siRNA target sequence for Ncoa3 (NM_008679.1,1683-1701).
gcgtggggacctctctttt

SEQ ID NO: 602577 - DNA, 19 bp, Mus musculus
  siRNA target sequence for Ncoa3 (NM_008679.1,1684-1702).
cgtggggacctctctttta

SEQ ID NO: 602578 - DNA, 19 bp, Mus musculus
  siRNA target sequence for Ncoa3 (NM_008679.1,1733-1751).
gataattctcccaatatga

SEQ ID NO: 602579 - DNA, 19 bp, Mus musculus
  siRNA target sequence for Ncoa3 (NM_008679.1,1795-1813).
ccccctaggcttatactgt

SEQ ID NO: 602580 - DNA, 19 bp, Mus musculus
  siRNA target sequence for Ncoa3 (NM_008679.1,2060-2078).
ggagtgtcctcctcaacat

SEQ ID NO: 602581 - DNA, 19 bp, Mus musculus
  siRNA target sequence for Ncoa3 (NM_008679.1,2113-2131).
gtctctgttgcaagagaaa

SEQ ID NO: 602582 - DNA, 19 bp, Mus musculus
  siRNA target sequence for Ncoa3 (NM_008679.1,2174-2192).
gcggaggtcgccaagatca

SEQ ID NO: 602583 - DNA, 19 bp, Mus musculus
  siRNA target sequence for Ncoa3 (NM_008679.1,2466-2484).
cgggagacctggataatct

SEQ ID NO: 602584 - DNA, 19 bp, Mus musculus
  siRNA target sequence for Ncoa3 (NM_008679.1,2467-2485).
gggagacctggataatcta

SEQ ID NO: 602585 - DNA, 19 bp, Mus musculus
  siRNA target sequence for Ncoa3 (NM_008679.1,2489-2507).
gccattcttggagatttga

SEQ ID NO: 602586 - DNA, 19 bp, Mus musculus
  siRNA target sequence for Ncoa3 (NM_008679.1,2508-2526).
ccagttctgacttctacaa

SEQ ID NO: 602587 - DNA, 19 bp, Mus musculus
  siRNA target sequence for Ncoa3 (NM_008679.1,2516-2534).
gacttctacaacaatccta

SEQ ID NO: 602588 - DNA, 19 bp, Mus musculus
  siRNA target sequence for Ncoa3 (NM_008679.1,2521-2539).
ctacaacaatcctacaaat

SEQ ID NO: 602589 - DNA, 19 bp, Mus musculus
  siRNA target sequence for Ncoa3 (NM_008679.1,2617-2635).
gtctgttcgtcctccatat

SEQ ID NO: 602590 - DNA, 19 bp, Mus musculus
  siRNA target sequence for Ncoa3 (NM_008679.1,2679-2697).
gtccgccagtgaagaatgt

SEQ ID NO: 602591 - DNA, 19 bp, Mus musculus
  siRNA target sequence for Ncoa3 (NM_008679.1,2681-2699).
ccgccagtgaagaatgtca

SEQ ID NO: 602592 - DNA, 19 bp, Mus musculus
  siRNA target sequence for Ncoa3 (NM_008679.1,2779-2797).
caacatgggcccaaacaga

SEQ ID NO: 602593 - DNA, 19 bp, Mus musculus
  siRNA target sequence for Ncoa3 (NM_008679.1,2785-2803).
gggcccaaacagaaatgtt

SEQ ID NO: 602594 - DNA, 19 bp, Mus musculus
  siRNA target sequence for Ncoa3 (NM_008679.1,2828-2846).
ggagactggggcttagcta

SEQ ID NO: 602595 - DNA, 19 bp, Mus musculus
  siRNA target sequence for Ncoa3 (NM_008679.1,2866-2884).
ggagcctctggcatcaagt

SEQ ID NO: 602596 - DNA, 19 bp, Mus musculus
  siRNA target sequence for Ncoa3 (NM_008679.1,2905-2923).
cgattacagtgccacttta

SEQ ID NO: 602597 - DNA, 19 bp, Mus musculus
  siRNA target sequence for Ncoa3 (NM_008679.1,2955-2973).
ccttgccacttcgttctaa

SEQ ID NO: 602598 - DNA, 19 bp, Mus musculus
  siRNA target sequence for Ncoa3 (NM_008679.1,2956-2974).
cttgccacttcgttctaat

SEQ ID NO: 602599 - DNA, 19 bp, Mus musculus
  siRNA target sequence for Ncoa3 (NM_008679.1,2959-2977).
gccacttcgttctaatcga

SEQ ID NO: 602600 - DNA, 19 bp, Mus musculus
  siRNA target sequence for Ncoa3 (NM_008679.1,3188-3206).
ggtcctcacgggtctcaaa

SEQ ID NO: 602601 - DNA, 19 bp, Mus musculus
  siRNA target sequence for Ncoa3 (NM_008679.1,3191-3209).
cctcacgggtctcaaaata

SEQ ID NO: 602602 - DNA, 19 bp, Mus musculus
  siRNA target sequence for Ncoa3 (NM_008679.1,3432-3450).
cagtaatgatggatcagaa

SEQ ID NO: 602603 - DNA, 19 bp, Mus musculus
  siRNA target sequence for Ncoa3 (NM_008679.1,3448-3466).
gaaggctgcactatatgga

SEQ ID NO: 602604 - DNA, 19 bp, Mus musculus
  siRNA target sequence for Ncoa3 (NM_008679.1,3456-3474).
cactatatggacagacata

SEQ ID NO: 602605 - DNA, 19 bp, Mus musculus
  siRNA target sequence for Ncoa3 (NM_008679.1,3517-3535).
gggacagtcaccatcgttt

SEQ ID NO: 602606 - DNA, 19 bp, Mus musculus
  siRNA target sequence for Ncoa3 (NM_008679.1,3518-3536).
ggacagtcaccatcgttta

SEQ ID NO: 602607 - DNA, 19 bp, Mus musculus
  siRNA target sequence for Ncoa3 (NM_008679.1,3519-3537).
gacagtcaccatcgtttaa

SEQ ID NO: 602608 - DNA, 19 bp, Mus musculus
  siRNA target sequence for Ncoa3 (NM_008679.1,3521-3539).
cagtcaccatcgtttaact

SEQ ID NO: 602609 - DNA, 19 bp, Mus musculus
  siRNA target sequence for Ncoa3 (NM_008679.1,3523-3541).
gtcaccatcgtttaactct

SEQ ID NO: 602610 - DNA, 19 bp, Mus musculus
  siRNA target sequence for Ncoa3 (NM_008679.1,3525-3543).
caccatcgtttaactctat

SEQ ID NO: 602611 - DNA, 19 bp, Mus musculus
  siRNA target sequence for Ncoa3 (NM_008679.1,3527-3545).
ccatcgtttaactctatga

SEQ ID NO: 602612 - DNA, 19 bp, Mus musculus
  siRNA target sequence for Ncoa3 (NM_008679.1,3528-3546).
catcgtttaactctatgat

SEQ ID NO: 602613 - DNA, 19 bp, Mus musculus
  siRNA target sequence for Ncoa3 (NM_008679.1,3662-3680).
ctacagggccagcagtttt

SEQ ID NO: 602614 - DNA, 19 bp, Mus musculus
  siRNA target sequence for Ncoa3 (NM_008679.1,3667-3685).
gggccagcagtttttaaat

SEQ ID NO: 602615 - DNA, 19 bp, Mus musculus
  siRNA target sequence for Ncoa3 (NM_008679.1,3688-3706).
gagccggcaggcacttgaa

SEQ ID NO: 602616 - DNA, 19 bp, Mus musculus
  siRNA target sequence for Ncoa3 (NM_008679.1,3692-3710).
cggcaggcacttgaaatga

SEQ ID NO: 602617 - DNA, 19 bp, Mus musculus
  siRNA target sequence for Ncoa3 (NM_008679.1,3693-3711).
ggcaggcacttgaaatgaa

SEQ ID NO: 602618 - DNA, 19 bp, Mus musculus
  siRNA target sequence for Ncoa3 (NM_008679.1,3944-3962).
cctccacaacagtttccat

SEQ ID NO: 602619 - DNA, 19 bp, Mus musculus
  siRNA target sequence for Ncoa3 (NM_008679.1,3945-3963).
ctccacaacagtttccata

SEQ ID NO: 602620 - DNA, 19 bp, Mus musculus
  siRNA target sequence for Ncoa3 (NM_008679.1,4197-4215).
cctacaacatggtgcatat

SEQ ID NO: 602621 - DNA, 19 bp, Mus musculus
  siRNA target sequence for Acat1 (NM_144784.2,127-145).
gggctgctgcaggaagtaa

SEQ ID NO: 602622 - DNA, 19 bp, Mus musculus
  siRNA target sequence for Acat1 (NM_144784.2,146-164).
gatgcctggaacgaagtta

SEQ ID NO: 602623 - DNA, 19 bp, Mus musculus
  siRNA target sequence for Acat1 (NM_144784.2,150-168).
cctggaacgaagttatgca

SEQ ID NO: 602624 - DNA, 19 bp, Mus musculus
  siRNA target sequence for Acat1 (NM_144784.2,151-169).
ctggaacgaagttatgcat

SEQ ID NO: 602625 - DNA, 19 bp, Mus musculus
  siRNA target sequence for Acat1 (NM_144784.2,192-210).
ggttatagtaagtgctata

SEQ ID NO: 602626 - DNA, 19 bp, Mus musculus
  siRNA target sequence for Acat1 (NM_144784.2,193-211).
gttatagtaagtgctataa

SEQ ID NO: 602627 - DNA, 19 bp, Mus musculus
  siRNA target sequence for Acat1 (NM_144784.2,331-349).
gtctacatgggcaatgtca

SEQ ID NO: 602628 - DNA, 19 bp, Mus musculus
  siRNA target sequence for Acat1 (NM_144784.2,394-412).
ggcgcaggtttacctattt

SEQ ID NO: 602629 - DNA, 19 bp, Mus musculus
  siRNA target sequence for Acat1 (NM_144784.2,418-436).
ccatgcaccacagtaaaca

SEQ ID NO: 602630 - DNA, 19 bp, Mus musculus
  siRNA target sequence for Acat1 (NM_144784.2,419-437).
catgcaccacagtaaacaa

SEQ ID NO: 602631 - DNA, 19 bp, Mus musculus
  siRNA target sequence for Acat1 (NM_144784.2,468-486).
gatggcctctcaaagtctt

SEQ ID NO: 602632 - DNA, 19 bp, Mus musculus
  siRNA target sequence for Acat1 (NM_144784.2,534-552).
gtccaatgtcccatacgta

SEQ ID NO: 602633 - DNA, 19 bp, Mus musculus
  siRNA target sequence for Acat1 (NM_144784.2,536-554).
ccaatgtcccatacgtaat

SEQ ID NO: 602634 - DNA, 19 bp, Mus musculus
  siRNA target sequence for Acat1 (NM_144784.2,558-576).
cagaggagcaacaccatat

SEQ ID NO: 602635 - DNA, 19 bp, Mus musculus
  siRNA target sequence for Acat1 (NM_144784.2,589-607).
cttgaagacctgattgtaa

SEQ ID NO: 602636 - DNA, 19 bp, Mus musculus
  siRNA target sequence for Acat1 (NM_144784.2,615-633).
gctaactgatgtctacaat

SEQ ID NO: 602637 - DNA, 19 bp, Mus musculus
  siRNA target sequence for Acat1 (NM_144784.2,620-638).
ctgatgtctacaataaaat

SEQ ID NO: 602638 - DNA, 19 bp, Mus musculus
  siRNA target sequence for Acat1 (NM_144784.2,625-643).
gtctacaataaaattcata

SEQ ID NO: 602639 - DNA, 19 bp, Mus musculus
  siRNA target sequence for Acat1 (NM_144784.2,667-685).
gcaaagaagatgaatatct

SEQ ID NO: 602640 - DNA, 19 bp, Mus musculus
  siRNA target sequence for Acat1 (NM_144784.2,689-707).
ggcaggaacaggatacgta

SEQ ID NO: 602641 - DNA, 19 bp, Mus musculus
  siRNA target sequence for Acat1 (NM_144784.2,741-759).
gtgggacgcagggaagttt

SEQ ID NO: 602642 - DNA, 19 bp, Mus musculus
  siRNA target sequence for Acat1 (NM_144784.2,839-857).
gtgttgactttagtaaagt

SEQ ID NO: 602643 - DNA, 19 bp, Mus musculus
  siRNA target sequence for Acat1 (NM_144784.2,968-986).
cccagaggctcaatgttaa

SEQ ID NO: 602644 - DNA, 19 bp, Mus musculus
  siRNA target sequence for Acat1 (NM_144784.2,993-1011).
ggcacgaattgcagcattt

SEQ ID NO: 602645 - DNA, 19 bp, Mus musculus
  siRNA target sequence for Acat1 (NM_144784.2,1021-1039).
gccgtagaccccattgatt

SEQ ID NO: 602646 - DNA, 19 bp, Mus musculus
  siRNA target sequence for Acat1 (NM_144784.2,1022-1040).
ccgtagaccccattgattt

SEQ ID NO: 602647 - DNA, 19 bp, Mus musculus
  siRNA target sequence for Acat1 (NM_144784.2,1023-1041).
cgtagaccccattgatttt

SEQ ID NO: 602648 - DNA, 19 bp, Mus musculus
  siRNA target sequence for Acat1 (NM_144784.2,1052-1070).
ctgcatatgccgtacctaa

SEQ ID NO: 602649 - DNA, 19 bp, Mus musculus
  siRNA target sequence for Acat1 (NM_144784.2,1060-1078).
gccgtacctaaggttctta

SEQ ID NO: 602650 - DNA, 19 bp, Mus musculus
  siRNA target sequence for Acat1 (NM_144784.2,1061-1079).
ccgtacctaaggttcttaa

SEQ ID NO: 602651 - DNA, 19 bp, Mus musculus
  siRNA target sequence for Acat1 (NM_144784.2,1141-1159).
gttgtgctagccaacatta

SEQ ID NO: 602652 - DNA, 19 bp, Mus musculus
  siRNA target sequence for Acat1 (NM_144784.2,1144-1162).
gtgctagccaacattaaaa

SEQ ID NO: 602653 - DNA, 19 bp, Mus musculus
  siRNA target sequence for Acat1 (NM_144784.2,1170-1188).
gattgacccccaaaaagta

SEQ ID NO: 602654 - DNA, 19 bp, Mus musculus
  siRNA target sequence for Acat1 (NM_144784.2,1174-1192).
gacccccaaaaagtaaata

SEQ ID NO: 602655 - DNA, 19 bp, Mus musculus
  siRNA target sequence for Acat1 (NM_144784.2,1235-1253).
ctggagcccggattgttgt

SEQ ID NO: 602656 - DNA, 19 bp, Mus musculus
  siRNA target sequence for Acat1 (NM_144784.2,1238-1256).
gagcccggattgttgttca

SEQ ID NO: 602657 - DNA, 19 bp, Mus musculus
  siRNA target sequence for Acat1 (NM_144784.2,1240-1258).
gcccggattgttgttcata

SEQ ID NO: 602658 - DNA, 19 bp, Mus musculus
  siRNA target sequence for Acat1 (NM_144784.2,1241-1259).
cccggattgttgttcatat

SEQ ID NO: 602659 - DNA, 19 bp, Mus musculus
  siRNA target sequence for Acat1 (NM_144784.2,1284-1302).
gttcggtctggctagtatt

SEQ ID NO: 602660 - DNA, 19 bp, Mus musculus
  siRNA target sequence for Acat1 (NM_144784.2,1289-1307).
gtctggctagtatttgcaa

SEQ ID NO: 602661 - DNA, 19 bp, Mus musculus
  siRNA target sequence for Gcat (NM_013847.2,197-215).
cgggaggaatcctcaactt

SEQ ID NO: 602662 - DNA, 19 bp, Mus musculus
  siRNA target sequence for Gcat (NM_013847.2,292-310).
ggagctggactcagttcta

SEQ ID NO: 602663 - DNA, 19 bp, Mus musculus
  siRNA target sequence for Gcat (NM_013847.2,301-319).
ctcagttctactcgattta

SEQ ID NO: 602664 - DNA, 19 bp, Mus musculus
  siRNA target sequence for Gcat (NM_013847.2,326-344).
ggacccagagcatccataa

SEQ ID NO: 602665 - DNA, 19 bp, Mus musculus
  siRNA target sequence for Gcat (NM_013847.2,333-351).
gagcatccataagaatcta

SEQ ID NO: 602666 - DNA, 19 bp, Mus musculus
  siRNA target sequence for Gcat (NM_013847.2,335-353).
gcatccataagaatctaga

SEQ ID NO: 602667 - DNA, 19 bp, Mus musculus
  siRNA target sequence for Gcat (NM_013847.2,396-414).
ctatcccagctgtttcgat

SEQ ID NO: 602668 - DNA, 19 bp, Mus musculus
  siRNA target sequence for Gcat (NM_013847.2,1066-1084).
ggagatgcacggttgtctt

SEQ ID NO: 602669 - DNA, 19 bp, Mus musculus
  siRNA target sequence for Gcat (NM_013847.2,1072-1090).
gcacggttgtcttctcaaa

SEQ ID NO: 602670 - DNA, 19 bp, Mus musculus
  siRNA target sequence for Gcat (NM_013847.2,1073-1091).
cacggttgtcttctcaaat

SEQ ID NO: 602671 - DNA, 19 bp, Mus musculus
  siRNA target sequence for Crat (NM_007760.1,255-273).
cagcaatccctggactatt

SEQ ID NO: 602672 - DNA, 19 bp, Mus musculus
  siRNA target sequence for Crat (NM_007760.1,554-572).
catcgagggtgtattggat

SEQ ID NO: 602673 - DNA, 19 bp, Mus musculus
  siRNA target sequence for Crat (NM_007760.1,634-652).
gcatgaaccagtattatca

SEQ ID NO: 602674 - DNA, 19 bp, Mus musculus
  siRNA target sequence for Crat (NM_007760.1,694-712).
cagtggtgaacttcttaaa

SEQ ID NO: 602675 - DNA, 19 bp, Mus musculus
  siRNA target sequence for Crat (NM_007760.1,719-737).
gagaccacccacgcatata

SEQ ID NO: 602676 - DNA, 19 bp, Mus musculus
  siRNA target sequence for Crat (NM_007760.1,796-814).
cgctcacctcagatcagat

SEQ ID NO: 602677 - DNA, 19 bp, Mus musculus
  siRNA target sequence for Crat (NM_007760.1,824-842).
gctagagaaaatatggaat

SEQ ID NO: 602678 - DNA, 19 bp, Mus musculus
  siRNA target sequence for Crat (NM_007760.1,825-843).
ctagagaaaatatggaatt

SEQ ID NO: 602679 - DNA, 19 bp, Mus musculus
  siRNA target sequence for Crat (NM_007760.1,847-865).
cactgcaatccaacaaaga

SEQ ID NO: 602680 - DNA, 19 bp, Mus musculus
  siRNA target sequence for Crat (NM_007760.1,914-932).
ctacaacaacctcattaaa

SEQ ID NO: 602681 - DNA, 19 bp, Mus musculus
  siRNA target sequence for Crat (NM_007760.1,952-970).
cagtgaactccatacagaa

SEQ ID NO: 602682 - DNA, 19 bp, Mus musculus
  siRNA target sequence for Crat (NM_007760.1,1004-1022).
gcctagagtctcagatgat

SEQ ID NO: 602683 - DNA, 19 bp, Mus musculus
  siRNA target sequence for Crat (NM_007760.1,1060-1078).
gtggtggtagcaagttcaa

SEQ ID NO: 602684 - DNA, 19 bp, Mus musculus
  siRNA target sequence for Crat (NM_007760.1,1196-1214).
ccatgtcatggagtataca

SEQ ID NO: 602685 - DNA, 19 bp, Mus musculus
  siRNA target sequence for Crat (NM_007760.1,1197-1215).
catgtcatggagtatacaa

SEQ ID NO: 602686 - DNA, 19 bp, Mus musculus
  siRNA target sequence for Crat (NM_007760.1,1200-1218).
gtcatggagtatacaaaaa

SEQ ID NO: 602687 - DNA, 19 bp, Mus musculus
  siRNA target sequence for Crat (NM_007760.1,1361-1379).
gctgacgttccatcacttt

SEQ ID NO: 602688 - DNA, 19 bp, Mus musculus
  siRNA target sequence for Crat (NM_007760.1,1366-1384).
cgttccatcactttggaaa

SEQ ID NO: 602689 - DNA, 19 bp, Mus musculus
  siRNA target sequence for Crat (NM_007760.1,1445-1463).
ggcatactacaggatctat

SEQ ID NO: 602690 - DNA, 19 bp, Mus musculus
  siRNA target sequence for Crat (NM_007760.1,1472-1490).
gtgtgccacgtatgaaagt

SEQ ID NO: 602691 - DNA, 19 bp, Mus musculus
  siRNA target sequence for Crat (NM_007760.1,1750-1768).
cctcttacgccattgctat

SEQ ID NO: 602692 - DNA, 19 bp, Mus musculus
  siRNA target sequence for Crat (NM_007760.1,1759-1777).
ccattgctatgcacttcaa

SEQ ID NO: 602693 - DNA, 19 bp, Mus musculus
  siRNA target sequence for Crat (NM_007760.1,1831-1849).
ctgtggtcccagatggtta

SEQ ID NO: 602694 - DNA, 19 bp, Mus musculus
  siRNA target sequence for Crat (NM_007760.1,1867-1885).
ccatggaggcccatatcaa

SEQ ID NO: 602695 - DNA, 19 bp, Mus musculus
  siRNA target sequence for Crat (NM_007760.1,1930-1948).
cccgcatggctcactactt

SEQ ID NO: 602696 - DNA, 19 bp, Mus musculus
  siRNA target sequence for Gnpat (NM_010322.2,235-253).
gcgaaagacctcaaaaagt

SEQ ID NO: 602697 - DNA, 19 bp, Mus musculus
  siRNA target sequence for Gnpat (NM_010322.2,289-307).
cacatcagtgacttcaaat

SEQ ID NO: 602698 - DNA, 19 bp, Mus musculus
  siRNA target sequence for Gnpat (NM_010322.2,291-309).
catcagtgacttcaaattt

SEQ ID NO: 602699 - DNA, 19 bp, Mus musculus
  siRNA target sequence for Gnpat (NM_010322.2,296-314).
gtgacttcaaatttgcaat

SEQ ID NO: 602700 - DNA, 19 bp, Mus musculus
  siRNA target sequence for Gnpat (NM_010322.2,394-412).
gaagagatcaactatgtca

SEQ ID NO: 602701 - DNA, 19 bp, Mus musculus
  siRNA target sequence for Gnpat (NM_010322.2,641-659).
gtcaccgcagctacattga

SEQ ID NO: 602702 - DNA, 19 bp, Mus musculus
  siRNA target sequence for Gnpat (NM_010322.2,643-661).
caccgcagctacattgact

SEQ ID NO: 602703 - DNA, 19 bp, Mus musculus
  siRNA target sequence for Gnpat (NM_010322.2,780-798).
cttcatgcgacgcactttt

SEQ ID NO: 602704 - DNA, 19 bp, Mus musculus
  siRNA target sequence for Gnpat (NM_010322.2,783-801).
catgcgacgcacttttgga

SEQ ID NO: 602705 - DNA, 19 bp, Mus musculus
  siRNA target sequence for Gnpat (NM_010322.2,811-829).
ctctactgggccgtattct

SEQ ID NO: 602706 - DNA, 19 bp, Mus musculus
  siRNA target sequence for Gnpat (NM_010322.2,813-831).
ctactgggccgtattctct

SEQ ID NO: 602707 - DNA, 19 bp, Mus musculus
  siRNA target sequence for Gnpat (NM_010322.2,846-864).
catgctgcggtgtggttat

SEQ ID NO: 602708 - DNA, 19 bp, Mus musculus
  siRNA target sequence for Gnpat (NM_010322.2,859-877).
ggttatgctcctgttgaat

SEQ ID NO: 602709 - DNA, 19 bp, Mus musculus
  siRNA target sequence for Gnpat (NM_010322.2,931-949).
ggtctcctgaatattgtga

SEQ ID NO: 602710 - DNA, 19 bp, Mus musculus
  siRNA target sequence for Gnpat (NM_010322.2,968-986).
gagaagtcttcgataccta

SEQ ID NO: 602711 - DNA, 19 bp, Mus musculus
  siRNA target sequence for Gnpat (NM_010322.2,993-1011).
cccaattagcatcagttat

SEQ ID NO: 602712 - DNA, 19 bp, Mus musculus
  siRNA target sequence for Gnpat (NM_010322.2,995-1013).
caattagcatcagttatga

SEQ ID NO: 602713 - DNA, 19 bp, Mus musculus
  siRNA target sequence for Gnpat (NM_010322.2,1001-1019).
gcatcagttatgataaaat

SEQ ID NO: 602714 - DNA, 19 bp, Mus musculus
  siRNA target sequence for Gnpat (NM_010322.2,1007-1025).
gttatgataaaatattgga

SEQ ID NO: 602715 - DNA, 19 bp, Mus musculus
  siRNA target sequence for Gnpat (NM_010322.2,1076-1094).
ccaccactggattgttgaa

SEQ ID NO: 602716 - DNA, 19 bp, Mus musculus
  siRNA target sequence for Gnpat (NM_010322.2,1124-1142).
gaagcatccatgtgtactt

SEQ ID NO: 602717 - DNA, 19 bp, Mus musculus
  siRNA target sequence for Gnpat (NM_010322.2,1183-1201).
ctcaatcggaacacgtata

SEQ ID NO: 602718 - DNA, 19 bp, Mus musculus
  siRNA target sequence for Gnpat (NM_010322.2,1240-1258).
gacgtgcaagcctttgtca

SEQ ID NO: 602719 - DNA, 19 bp, Mus musculus
  siRNA target sequence for Gnpat (NM_010322.2,1259-1277).
ctgaggtcgcctataagat

SEQ ID NO: 602720 - DNA, 19 bp, Mus musculus
  siRNA target sequence for Gnpat (NM_010322.2,1278-1296).
gcagcttctgcagattgaa

SEQ ID NO: 602721 - DNA, 19 bp, Mus musculus
  siRNA target sequence for Gnpat (NM_010322.2,1323-1341).
ggtggtcaccattctactt

SEQ ID NO: 602722 - DNA, 19 bp, Mus musculus
  siRNA target sequence for Gnpat (NM_010322.2,1428-1446).
gctttggcctgataacaaa

SEQ ID NO: 602723 - DNA, 19 bp, Mus musculus
  siRNA target sequence for Gnpat (NM_010322.2,1558-1576).
gggcttgtgcccgaacata

SEQ ID NO: 602724 - DNA, 19 bp, Mus musculus
  siRNA target sequence for Gnpat (NM_010322.2,1559-1577).
ggcttgtgcccgaacatat

SEQ ID NO: 602725 - DNA, 19 bp, Mus musculus
  siRNA target sequence for Gnpat (NM_010322.2,1704-1722).
cttcctccgcaatgtgttt

SEQ ID NO: 602726 - DNA, 19 bp, Mus musculus
  siRNA target sequence for Gnpat (NM_010322.2,1710-1728).
ccgcaatgtgttttcagat

SEQ ID NO: 602727 - DNA, 19 bp, Mus musculus
  siRNA target sequence for Gnpat (NM_010322.2,1883-1901).
cttttgtggaatcatatca

SEQ ID NO: 602728 - DNA, 19 bp, Mus musculus
  siRNA target sequence for Gnpat (NM_010322.2,2001-2019).
ctcctctcagtgttacgat

SEQ ID NO: 602729 - DNA, 19 bp, Mus musculus
  siRNA target sequence for Gnpat (NM_010322.2,2066-2084).
gactgggggtggtggaaaa

SEQ ID NO: 602730 - DNA, 19 bp, Mus musculus
  siRNA target sequence for Gnpat (NM_010322.2,2095-2113).
gatagtaagtatgtgtatt

SEQ ID NO: 602731 - DNA, 19 bp, Mus musculus
  siRNA target sequence for Gnpat (NM_010322.2,2124-2142).
gcctgccacaagcaagtta

SEQ ID NO: 602732 - DNA, 19 bp, Mus musculus
  siRNA target sequence for Gnpat (NM_010322.2,2126-2144).
ctgccacaagcaagttaga

SEQ ID NO: 602733 - DNA, 19 bp, Mus musculus
  siRNA target sequence for Nmt1 (NM_008707.2,161-179).
gacaccggagccaaaaaga

SEQ ID NO: 602734 - DNA, 19 bp, Mus musculus
  siRNA target sequence for Nmt1 (NM_008707.2,236-254).
gaccagcccgtgaagatga

SEQ ID NO: 602735 - DNA, 19 bp, Mus musculus
  siRNA target sequence for Nmt1 (NM_008707.2,379-397).
gccagtgcccaaattaggt

SEQ ID NO: 602736 - DNA, 19 bp, Mus musculus
  siRNA target sequence for Nmt1 (NM_008707.2,422-440).
gtcgaacctgacaaagaca

SEQ ID NO: 602737 - DNA, 19 bp, Mus musculus
  siRNA target sequence for Nmt1 (NM_008707.2,916-934).
ccctcggaagctgattgaa

SEQ ID NO: 602738 - DNA, 19 bp, Mus musculus
  siRNA target sequence for Nmt1 (NM_008707.2,918-936).
ctcggaagctgattgaagt

SEQ ID NO: 602739 - DNA, 19 bp, Mus musculus
  siRNA target sequence for Nmt1 (NM_008707.2,926-944).
ctgattgaagtgaagttct

SEQ ID NO: 602740 - DNA, 19 bp, Mus musculus
  siRNA target sequence for Nmt1 (NM_008707.2,1159-1177).
cacttttgtggtagagaat

SEQ ID NO: 602741 - DNA, 19 bp, Mus musculus
  siRNA target sequence for Nmt1 (NM_008707.2,1196-1214).
gatttcctgagcttttata

SEQ ID NO: 602742 - DNA, 19 bp, Mus musculus
  siRNA target sequence for Nmt1 (NM_008707.2,1201-1219).
cctgagcttttatacactt

SEQ ID NO: 602743 - DNA, 19 bp, Mus musculus
  siRNA target sequence for Nmt1 (NM_008707.2,1288-1306).
cacccagacccctcttcta

SEQ ID NO: 602744 - DNA, 19 bp, Mus musculus
  siRNA target sequence for Nmt1 (NM_008707.2,1323-1341).
ccctcgttctagccaaaat

SEQ ID NO: 602745 - DNA, 19 bp, Mus musculus
  siRNA target sequence for Nmt1 (NM_008707.2,1325-1343).
ctcgttctagccaaaatga

SEQ ID NO: 602746 - DNA, 19 bp, Mus musculus
  siRNA target sequence for Nmt1 (NM_008707.2,1327-1345).
cgttctagccaaaatgaaa

SEQ ID NO: 602747 - DNA, 19 bp, Mus musculus
  siRNA target sequence for Nmt1 (NM_008707.2,1421-1439).
gacggcaacctgcagtatt

SEQ ID NO: 602748 - DNA, 19 bp, Mus musculus
  siRNA target sequence for Nmt1 (NM_008707.2,1433-1451).
cagtattacctgtacaatt

SEQ ID NO: 602749 - DNA, 19 bp, Mus musculus
  siRNA target sequence for Nmt2 (NM_008708.1,75-93).
cggaatagacggagacaat

SEQ ID NO: 602750 - DNA, 19 bp, Mus musculus
  siRNA target sequence for Nmt2 (NM_008708.1,224-242).
cccaggagattaagattca

SEQ ID NO: 602751 - DNA, 19 bp, Mus musculus
  siRNA target sequence for Nmt2 (NM_008708.1,292-310).
gccatgggtggtgatacta

SEQ ID NO: 602752 - DNA, 19 bp, Mus musculus
  siRNA target sequence for Nmt2 (NM_008708.1,293-311).
ccatgggtggtgatactat

SEQ ID NO: 602753 - DNA, 19 bp, Mus musculus
  siRNA target sequence for Nmt2 (NM_008708.1,297-315).
gggtggtgatactatggaa

SEQ ID NO: 602754 - DNA, 19 bp, Mus musculus
  siRNA target sequence for Nmt2 (NM_008708.1,353-371).
ccaccatccctattcagaa

SEQ ID NO: 602755 - DNA, 19 bp, Mus musculus
  siRNA target sequence for Nmt2 (NM_008708.1,362-380).
ctattcagaagctacaaga

SEQ ID NO: 602756 - DNA, 19 bp, Mus musculus
  siRNA target sequence for Nmt2 (NM_008708.1,419-437).
gcccagccaggaacattga

SEQ ID NO: 602757 - DNA, 19 bp, Mus musculus
  siRNA target sequence for Nmt2 (NM_008708.1,420-438).
cccagccaggaacattgat

SEQ ID NO: 602758 - DNA, 19 bp, Mus musculus
  siRNA target sequence for Nmt2 (NM_008708.1,477-495).
gccagtgcccaaattgaat

SEQ ID NO: 602759 - DNA, 19 bp, Mus musculus
  siRNA target sequence for Nmt2 (NM_008708.1,485-503).
ccaaattgaatgaagtcat

SEQ ID NO: 602760 - DNA, 19 bp, Mus musculus
  siRNA target sequence for Nmt2 (NM_008708.1,492-510).
gaatgaagtcataacatct

SEQ ID NO: 602761 - DNA, 19 bp, Mus musculus
  siRNA target sequence for Nmt2 (NM_008708.1,543-561).
ccgccaggaaccatattct

SEQ ID NO: 602762 - DNA, 19 bp, Mus musculus
  siRNA target sequence for Nmt2 (NM_008708.1,544-562).
cgccaggaaccatattctt

SEQ ID NO: 602763 - DNA, 19 bp, Mus musculus
  siRNA target sequence for Nmt2 (NM_008708.1,560-578).
ctttgccgcaaggttttat

SEQ ID NO: 602764 - DNA, 19 bp, Mus musculus
  siRNA target sequence for Nmt2 (NM_008708.1,583-601).
gacactttagacttgagta

SEQ ID NO: 602765 - DNA, 19 bp, Mus musculus
  siRNA target sequence for Nmt2 (NM_008708.1,585-603).
cactttagacttgagtaat

SEQ ID NO: 602766 - DNA, 19 bp, Mus musculus
  siRNA target sequence for Nmt2 (NM_008708.1,613-631).
ctgaaggagctgtatacgt

SEQ ID NO: 602767 - DNA, 19 bp, Mus musculus
  siRNA target sequence for Nmt2 (NM_008708.1,629-647).
cgttgctgaatgagaatta

SEQ ID NO: 602768 - DNA, 19 bp, Mus musculus
  siRNA target sequence for Nmt2 (NM_008708.1,669-687).
gttccgctttgactattca

SEQ ID NO: 602769 - DNA, 19 bp, Mus musculus
  siRNA target sequence for Nmt2 (NM_008708.1,750-768).
ccgagtgtcttcaaataaa

SEQ ID NO: 602770 - DNA, 19 bp, Mus musculus
  siRNA target sequence for Nmt2 (NM_008708.1,751-769).
cgagtgtcttcaaataaaa

SEQ ID NO: 602771 - DNA, 19 bp, Mus musculus
  siRNA target sequence for Nmt2 (NM_008708.1,796-814).
ccagcaaacatccgaattt

SEQ ID NO: 602772 - DNA, 19 bp, Mus musculus
  siRNA target sequence for Nmt2 (NM_008708.1,797-815).
cagcaaacatccgaattta

SEQ ID NO: 602773 - DNA, 19 bp, Mus musculus
  siRNA target sequence for Nmt2 (NM_008708.1,804-822).
catccgaatttatgatagt

SEQ ID NO: 602774 - DNA, 19 bp, Mus musculus
  siRNA target sequence for Nmt2 (NM_008708.1,948-966).
gtatactgcgggagtagtt

SEQ ID NO: 602775 - DNA, 19 bp, Mus musculus
  siRNA target sequence for Nmt2 (NM_008708.1,956-974).
cgggagtagttcttcctaa

SEQ ID NO: 602776 - DNA, 19 bp, Mus musculus
  siRNA target sequence for Nmt2 (NM_008708.1,1045-1063).
cacctgagtagaaacatga

SEQ ID NO: 602777 - DNA, 19 bp, Mus musculus
  siRNA target sequence for Nmt2 (NM_008708.1,1069-1087).
cagagaacgatgaagcttt

SEQ ID NO: 602778 - DNA, 19 bp, Mus musculus
  siRNA target sequence for Nmt2 (NM_008708.1,1091-1109).
gacttccagatgttacaaa

SEQ ID NO: 602779 - DNA, 19 bp, Mus musculus
  siRNA target sequence for Nmt2 (NM_008708.1,1124-1142).
gaccaatggaaccaaaaga

SEQ ID NO: 602780 - DNA, 19 bp, Mus musculus
  siRNA target sequence for Nmt2 (NM_008708.1,1150-1168).
gcagtccgagagctaatca

SEQ ID NO: 602781 - DNA, 19 bp, Mus musculus
  siRNA target sequence for Nmt2 (NM_008708.1,1156-1174).
cgagagctaatcaacatct

SEQ ID NO: 602782 - DNA, 19 bp, Mus musculus
  siRNA target sequence for Nmt2 (NM_008708.1,1162-1180).
ctaatcaacatctacttga

SEQ ID NO: 602783 - DNA, 19 bp, Mus musculus
  siRNA target sequence for Nmt2 (NM_008708.1,1332-1350).
gcaccacccagctcacaaa

SEQ ID NO: 602784 - DNA, 19 bp, Mus musculus
  siRNA target sequence for Nmt2 (NM_008708.1,1413-1431).
gaatgatgcgctcattata

SEQ ID NO: 602785 - DNA, 19 bp, Mus musculus
  siRNA target sequence for Nmt2 (NM_008708.1,1421-1439).
cgctcattatagccaaatt

SEQ ID NO: 602786 - DNA, 19 bp, Mus musculus
  siRNA target sequence for Nmt2 (NM_008708.1,1423-1441).
ctcattatagccaaattga

SEQ ID NO: 602787 - DNA, 19 bp, Mus musculus
  siRNA target sequence for Nmt2 (NM_008708.1,1462-1480).
gcactagatttgatggaaa

SEQ ID NO: 602788 - DNA, 19 bp, Mus musculus
  siRNA target sequence for Nmt2 (NM_008708.1,1517-1535).
gagatggcaacttacagta

SEQ ID NO: 602789 - DNA, 19 bp, Mus musculus
  siRNA target sequence for Nmt2 (NM_008708.1,1519-1537).
gatggcaacttacagtatt

SEQ ID NO: 602790 - DNA, 19 bp, Mus musculus
  siRNA target sequence for Nmt2 (NM_008708.1,1531-1549).
cagtattatttgtacaact

SEQ ID NO: 602791 - DNA, 19 bp, Mus musculus
  siRNA target sequence for Nmt2 (NM_008708.1,1562-1580).
ggacagactctgaaaaggt

SEQ ID NO: 602792 - DNA, 19 bp, Mus musculus
  siRNA target sequence for Baat (NM_007519.1,445-463).
ctattgggtagattgataa

SEQ ID NO: 602793 - DNA, 19 bp, Mus musculus
  siRNA target sequence for Baat (NM_007519.1,489-507).
ccaaatccacataaaagct

SEQ ID NO: 602794 - DNA, 19 bp, Mus musculus
  siRNA target sequence for Baat (NM_007519.1,510-528).
ccatccatactttccatta

SEQ ID NO: 602795 - DNA, 19 bp, Mus musculus
  siRNA target sequence for Baat (NM_007519.1,541-559).
gtcagtcctcccttggata

SEQ ID NO: 602796 - DNA, 19 bp, Mus musculus
  siRNA target sequence for Baat (NM_007519.1,662-680).
cttttccaggggtcattga

SEQ ID NO: 602797 - DNA, 19 bp, Mus musculus
  siRNA target sequence for Baat (NM_007519.1,668-686).
caggggtcattgacttgtt

SEQ ID NO: 602798 - DNA, 19 bp, Mus musculus
  siRNA target sequence for Baat (NM_007519.1,759-777).
ggcttactggaactatgat

SEQ ID NO: 602799 - DNA, 19 bp, Mus musculus
  siRNA target sequence for Baat (NM_007519.1,791-809).
gactggagaaggtagatct

SEQ ID NO: 602800 - DNA, 19 bp, Mus musculus
  siRNA target sequence for Baat (NM_007519.1,907-925).
ggactttctatggctatta

SEQ ID NO: 602801 - DNA, 19 bp, Mus musculus
  siRNA target sequence for Baat (NM_007519.1,908-926).
gactttctatggctattaa

SEQ ID NO: 602802 - DNA, 19 bp, Mus musculus
  siRNA target sequence for Baat (NM_007519.1,914-932).
ctatggctattaacctaaa

SEQ ID NO: 602803 - DNA, 19 bp, Mus musculus
  siRNA target sequence for Baat (NM_007519.1,918-936).
ggctattaacctaaaacaa

SEQ ID NO: 602804 - DNA, 19 bp, Mus musculus
  siRNA target sequence for Baat (NM_007519.1,919-937).
gctattaacctaaaacaaa

SEQ ID NO: 602805 - DNA, 19 bp, Mus musculus
  siRNA target sequence for Baat (NM_007519.1,941-959).
gagccactgtacttatcaa

SEQ ID NO: 602806 - DNA, 19 bp, Mus musculus
  siRNA target sequence for Baat (NM_007519.1,962-980).
ggcctaattttgtttctca

SEQ ID NO: 602807 - DNA, 19 bp, Mus musculus
  siRNA target sequence for Baat (NM_007519.1,1011-1029).
cccacctgtacccagtaat

SEQ ID NO: 602808 - DNA, 19 bp, Mus musculus
  siRNA target sequence for Baat (NM_007519.1,1013-1031).
cacctgtacccagtaatga

SEQ ID NO: 602809 - DNA, 19 bp, Mus musculus
  siRNA target sequence for Baat (NM_007519.1,1022-1040).
ccagtaatgaagagtttgt

SEQ ID NO: 602810 - DNA, 19 bp, Mus musculus
  siRNA target sequence for Baat (NM_007519.1,1025-1043).
gtaatgaagagtttgtagt

SEQ ID NO: 602811 - DNA, 19 bp, Mus musculus
  siRNA target sequence for Baat (NM_007519.1,1056-1074).
gggacttgtagaattctat

SEQ ID NO: 602812 - DNA, 19 bp, Mus musculus
  siRNA target sequence for Baat (NM_007519.1,1060-1078).
cttgtagaattctatcgaa

SEQ ID NO: 602813 - DNA, 19 bp, Mus musculus
  siRNA target sequence for Baat (NM_007519.1,1155-1173).
ggttggagaagatgataaa

SEQ ID NO: 602814 - DNA, 19 bp, Mus musculus
  siRNA target sequence for Baat (NM_007519.1,1182-1200).
cagcaaagtgcatgctaat

SEQ ID NO: 602815 - DNA, 19 bp, Mus musculus
  siRNA target sequence for Baat (NM_007519.1,1262-1280).
gggcaggtcacctgattga

SEQ ID NO: 602816 - DNA, 19 bp, Mus musculus
  siRNA target sequence for Agpat1 (NM_018862.2,242-260).
ggcgcaatgtcgagaacat

SEQ ID NO: 602817 - DNA, 19 bp, Mus musculus
  siRNA target sequence for Agpat1 (NM_018862.2,244-262).
cgcaatgtcgagaacatga

SEQ ID NO: 602818 - DNA, 19 bp, Mus musculus
  siRNA target sequence for Agpat1 (NM_018862.2,383-401).
ccctcgacctgcttggaat

SEQ ID NO: 602819 - DNA, 19 bp, Mus musculus
  siRNA target sequence for Agpat1 (NM_018862.2,479-497).
gctggctggcaggaatcat

SEQ ID NO: 602820 - DNA, 19 bp, Mus musculus
  siRNA target sequence for Agpat1 (NM_018862.2,482-500).
ggctggcaggaatcatctt

SEQ ID NO: 602821 - DNA, 19 bp, Mus musculus
  siRNA target sequence for Agpat1 (NM_018862.2,488-506).
caggaatcatcttcattga

SEQ ID NO: 602822 - DNA, 19 bp, Mus musculus
  siRNA target sequence for Agpat1 (NM_018862.2,576-594).
gagagtctgggtttttcct

SEQ ID NO: 602823 - DNA, 19 bp, Mus musculus
  siRNA target sequence for Agpat1 (NM_018862.2,687-705).
cgtcatgtcctcctatcaa

SEQ ID NO: 602824 - DNA, 19 bp, Mus musculus
  siRNA target sequence for Agpat2 (NM_026212.1,271-289).
ccctgtgtcatcatctcta

SEQ ID NO: 602825 - DNA, 19 bp, Mus musculus
  siRNA target sequence for Agpat2 (NM_026212.1,312-330).
gatgggtctcatggaaata

SEQ ID NO: 602826 - DNA, 19 bp, Mus musculus
  siRNA target sequence for Agpat2 (NM_026212.1,356-374).
ccaagcgtgagctaatgtt

SEQ ID NO: 602827 - DNA, 19 bp, Mus musculus
  siRNA target sequence for Agpat2 (NM_026212.1,383-401).
ctgtgggcctcatcatgta

SEQ ID NO: 602828 - DNA, 19 bp, Mus musculus
  siRNA target sequence for Agpat2 (NM_026212.1,606-624).
ggtgtactcgtctttctct

SEQ ID NO: 602829 - DNA, 19 bp, Mus musculus
  siRNA target sequence for Agpat2 (NM_026212.1,684-702).
ggatgctgtccctaccaat

SEQ ID NO: 602830 - DNA, 19 bp, Mus musculus
  siRNA target sequence for Agpat2 (NM_026212.1,758-776).
gggccacctttctacagat

SEQ ID NO: 602831 - DNA, 19 bp, Mus musculus
  siRNA target sequence for Agpat2 (NM_026212.1,759-777).
ggccacctttctacagatt

SEQ ID NO: 602832 - DNA, 19 bp, Mus musculus
  siRNA target sequence for Agpat3 (NM_053014.2,247-265).
cgtggtgagcgggttaatt

SEQ ID NO: 602833 - DNA, 19 bp, Mus musculus
  siRNA target sequence for Agpat3 (NM_053014.2,248-266).
gtggtgagcgggttaatta

SEQ ID NO: 602834 - DNA, 19 bp, Mus musculus
  siRNA target sequence for Agpat3 (NM_053014.2,255-273).
gcgggttaattatcaactt

SEQ ID NO: 602835 - DNA, 19 bp, Mus musculus
  siRNA target sequence for Agpat3 (NM_053014.2,257-275).
gggttaattatcaacttca

SEQ ID NO: 602836 - DNA, 19 bp, Mus musculus
  siRNA target sequence for Agpat3 (NM_053014.2,303-321).
ccatcagcaagcacctata

SEQ ID NO: 602837 - DNA, 19 bp, Mus musculus
  siRNA target sequence for Agpat3 (NM_053014.2,317-335).
ctataccgccgtatcaact

SEQ ID NO: 602838 - DNA, 19 bp, Mus musculus
  siRNA target sequence for Agpat3 (NM_053014.2,672-690).
ctgactacccagagtacat

SEQ ID NO: 602839 - DNA, 19 bp, Mus musculus
  siRNA target sequence for Agpat3 (NM_053014.2,771-789).
ggctgcccccactcaagta

SEQ ID NO: 602840 - DNA, 19 bp, Mus musculus
  siRNA target sequence for Agpat3 (NM_053014.2,843-861).
ggacagttgcagctatcta

SEQ ID NO: 602841 - DNA, 19 bp, Mus musculus
  siRNA target sequence for Agpat3 (NM_053014.2,846-864).
cagttgcagctatctatga

SEQ ID NO: 602842 - DNA, 19 bp, Mus musculus
  siRNA target sequence for Agpat3 (NM_053014.2,1234-1252).
cggagtccggagactgata

SEQ ID NO: 602843 - DNA, 19 bp, Mus musculus
  siRNA target sequence for Agpat3 (NM_053014.2,1249-1267).
gataggagtgactgagata

SEQ ID NO: 602844 - DNA, 19 bp, Mus musculus
  siRNA target sequence for Agpat3 (NM_053014.2,1286-1304).
ggcaaccaagagcttaaga

SEQ ID NO: 602845 - DNA, 19 bp, Mus musculus
  siRNA target sequence for D8Ertd319e (NM_026792.2,72-90).
gtgctccacacgtactcta

SEQ ID NO: 602846 - DNA, 19 bp, Mus musculus
  siRNA target sequence for D8Ertd319e (NM_026792.2,204-222).
gtggacgaccggctttact

SEQ ID NO: 602847 - DNA, 19 bp, Mus musculus
  siRNA target sequence for D8Ertd319e (NM_026792.2,265-283).
ccggggtccagatattgct

SEQ ID NO: 602848 - DNA, 19 bp, Mus musculus
  siRNA target sequence for D8Ertd319e (NM_026792.2,266-284).
cggggtccagatattgcta

SEQ ID NO: 602849 - DNA, 19 bp, Mus musculus
  siRNA target sequence for D8Ertd319e (NM_026792.2,272-290).
ccagatattgctatatgga

SEQ ID NO: 602850 - DNA, 19 bp, Mus musculus
  siRNA target sequence for D8Ertd319e (NM_026792.2,402-420).
cgctacgtactgaaagaca

SEQ ID NO: 602851 - DNA, 19 bp, Mus musculus
  siRNA target sequence for D8Ertd319e (NM_026792.2,403-421).
gctacgtactgaaagacaa

SEQ ID NO: 602852 - DNA, 19 bp, Mus musculus
  siRNA target sequence for D8Ertd319e (NM_026792.2,407-425).
cgtactgaaagacaagtta

SEQ ID NO: 602853 - DNA, 19 bp, Mus musculus
  siRNA target sequence for D8Ertd319e (NM_026792.2,435-453).
ccgctgtatgggttctact

SEQ ID NO: 602854 - DNA, 19 bp, Mus musculus
  siRNA target sequence for D8Ertd319e (NM_026792.2,436-454).
cgctgtatgggttctactt

SEQ ID NO: 602855 - DNA, 19 bp, Mus musculus
  siRNA target sequence for D8Ertd319e (NM_026792.2,461-479).
gcatggaggaatttatgta

SEQ ID NO: 602856 - DNA, 19 bp, Mus musculus
  siRNA target sequence for D8Ertd319e (NM_026792.2,487-505).
gtgccaaatttaatgataa

SEQ ID NO: 602857 - DNA, 19 bp, Mus musculus
  siRNA target sequence for D8Ertd319e (NM_026792.2,539-557).
cgcaggaacaccgatgtat

SEQ ID NO: 602858 - DNA, 19 bp, Mus musculus
  siRNA target sequence for D8Ertd319e (NM_026792.2,541-559).
caggaacaccgatgtatct

SEQ ID NO: 602859 - DNA, 19 bp, Mus musculus
  siRNA target sequence for D8Ertd319e (NM_026792.2,544-562).
gaacaccgatgtatcttgt

SEQ ID NO: 602860 - DNA, 19 bp, Mus musculus
  siRNA target sequence for D8Ertd319e (NM_026792.2,547-565).
caccgatgtatcttgtgat

SEQ ID NO: 602861 - DNA, 19 bp, Mus musculus
  siRNA target sequence for D8Ertd319e (NM_026792.2,549-567).
ccgatgtatcttgtgattt

SEQ ID NO: 602862 - DNA, 19 bp, Mus musculus
  siRNA target sequence for D8Ertd319e (NM_026792.2,550-568).
cgatgtatcttgtgatttt

SEQ ID NO: 602863 - DNA, 19 bp, Mus musculus
  siRNA target sequence for D8Ertd319e (NM_026792.2,569-587).
cccagagggaacaaggtat

SEQ ID NO: 602864 - DNA, 19 bp, Mus musculus
  siRNA target sequence for D8Ertd319e (NM_026792.2,570-588).
ccagagggaacaaggtata

SEQ ID NO: 602865 - DNA, 19 bp, Mus musculus
  siRNA target sequence for D8Ertd319e (NM_026792.2,571-589).
cagagggaacaaggtataa

SEQ ID NO: 602866 - DNA, 19 bp, Mus musculus
  siRNA target sequence for D8Ertd319e (NM_026792.2,575-593).
gggaacaaggtataatgca

SEQ ID NO: 602867 - DNA, 19 bp, Mus musculus
  siRNA target sequence for D8Ertd319e (NM_026792.2,576-594).
ggaacaaggtataatgcaa

SEQ ID NO: 602868 - DNA, 19 bp, Mus musculus
  siRNA target sequence for D8Ertd319e (NM_026792.2,683-701).
ggccactcacgttgctttt

SEQ ID NO: 602869 - DNA, 19 bp, Mus musculus
  siRNA target sequence for D8Ertd319e (NM_026792.2,685-703).
ccactcacgttgcttttga

SEQ ID NO: 602870 - DNA, 19 bp, Mus musculus
  siRNA target sequence for D8Ertd319e (NM_026792.2,690-708).
cacgttgcttttgattcta

SEQ ID NO: 602871 - DNA, 19 bp, Mus musculus
  siRNA target sequence for D8Ertd319e (NM_026792.2,702-720).
gattctatgaagagtcatt

SEQ ID NO: 602872 - DNA, 19 bp, Mus musculus
  siRNA target sequence for D8Ertd319e (NM_026792.2,713-731).
gagtcatttagatgcaatt

SEQ ID NO: 602873 - DNA, 19 bp, Mus musculus
  siRNA target sequence for D8Ertd319e (NM_026792.2,769-787).
gttcaggaaaatactcaaa

SEQ ID NO: 602874 - DNA, 19 bp, Mus musculus
  siRNA target sequence for D8Ertd319e (NM_026792.2,793-811).
catccatgactgagtttct

SEQ ID NO: 602875 - DNA, 19 bp, Mus musculus
  siRNA target sequence for D8Ertd319e (NM_026792.2,819-837).
cagtgcccaaaacttcata

SEQ ID NO: 602876 - DNA, 19 bp, Mus musculus
  siRNA target sequence for D8Ertd319e (NM_026792.2,840-858).
cactttgatcgtatagaca

SEQ ID NO: 602877 - DNA, 19 bp, Mus musculus
  siRNA target sequence for D8Ertd319e (NM_026792.2,900-918).
cttcatgagcgctttgaga

SEQ ID NO: 602878 - DNA, 19 bp, Mus musculus
  siRNA target sequence for D8Ertd319e (NM_026792.2,909-927).
cgctttgagataaaagata

SEQ ID NO: 602879 - DNA, 19 bp, Mus musculus
  siRNA target sequence for D8Ertd319e (NM_026792.2,924-942).
gataggttgctcatagagt

SEQ ID NO: 602880 - DNA, 19 bp, Mus musculus
  siRNA target sequence for D8Ertd319e (NM_026792.2,928-946).
ggttgctcatagagttcta

SEQ ID NO: 602881 - DNA, 19 bp, Mus musculus
  siRNA target sequence for D8Ertd319e (NM_026792.2,929-947).
gttgctcatagagttctat

SEQ ID NO: 602882 - DNA, 19 bp, Mus musculus
  siRNA target sequence for D8Ertd319e (NM_026792.2,933-951).
ctcatagagttctatgatt

SEQ ID NO: 602883 - DNA, 19 bp, Mus musculus
  siRNA target sequence for D8Ertd319e (NM_026792.2,935-953).
catagagttctatgattca

SEQ ID NO: 602884 - DNA, 19 bp, Mus musculus
  siRNA target sequence for D8Ertd319e (NM_026792.2,1037-1055).
gatcttggggagtttgact

SEQ ID NO: 602885 - DNA, 19 bp, Mus musculus
  siRNA target sequence for D8Ertd319e (NM_026792.2,1070-1088).
gacggagtccggaaggaaa

SEQ ID NO: 602886 - DNA, 19 bp, Mus musculus
  siRNA target sequence for D8Ertd319e (NM_026792.2,1098-1116).
ggcacctggttgtatggaa

SEQ ID NO: 602887 - DNA, 19 bp, Mus musculus
  siRNA target sequence for D8Ertd319e (NM_026792.2,1125-1143).
ggctgcctgtggtttgtta

SEQ ID NO: 602888 - DNA, 19 bp, Mus musculus
  siRNA target sequence for Dgat1 (NM_010046.2,272-290).
cgtctgcaagattctttgt

SEQ ID NO: 602889 - DNA, 19 bp, Mus musculus
  siRNA target sequence for Dgat1 (NM_010046.2,275-293).
ctgcaagattctttgttca

SEQ ID NO: 602890 - DNA, 19 bp, Mus musculus
  siRNA target sequence for Dgat1 (NM_010046.2,301-319).
cagtggtttcagcaattat

SEQ ID NO: 602891 - DNA, 19 bp, Mus musculus
  siRNA target sequence for Dgat1 (NM_010046.2,320-338).
cgtggtatcctgaattggt

SEQ ID NO: 602892 - DNA, 19 bp, Mus musculus
  siRNA target sequence for Dgat1 (NM_010046.2,346-364).
gatgctgatcctgagtaat

SEQ ID NO: 602893 - DNA, 19 bp, Mus musculus
  siRNA target sequence for Dgat1 (NM_010046.2,355-373).
cctgagtaatgcaaggtta

SEQ ID NO: 602894 - DNA, 19 bp, Mus musculus
  siRNA target sequence for Dgat1 (NM_010046.2,356-374).
ctgagtaatgcaaggttat

SEQ ID NO: 602895 - DNA, 19 bp, Mus musculus
  siRNA target sequence for Dgat1 (NM_010046.2,358-376).
gagtaatgcaaggttattt

SEQ ID NO: 602896 - DNA, 19 bp, Mus musculus
  siRNA target sequence for Dgat1 (NM_010046.2,360-378).
gtaatgcaaggttattttt

SEQ ID NO: 602897 - DNA, 19 bp, Mus musculus
  siRNA target sequence for Dgat1 (NM_010046.2,458-476).
cctgccccatgcgtgatta

SEQ ID NO: 602898 - DNA, 19 bp, Mus musculus
  siRNA target sequence for Dgat1 (NM_010046.2,459-477).
ctgccccatgcgtgattat

SEQ ID NO: 602899 - DNA, 19 bp, Mus musculus
  siRNA target sequence for Dgat1 (NM_010046.2,494-512).
gttgtggctgcatttcaga

SEQ ID NO: 602900 - DNA, 19 bp, Mus musculus
  siRNA target sequence for Dgat1 (NM_010046.2,572-590).
gttaacctggccacaatca

SEQ ID NO: 602901 - DNA, 19 bp, Mus musculus
  siRNA target sequence for Dgat1 (NM_010046.2,612-630).
ccttactggttgagtctat

SEQ ID NO: 602902 - DNA, 19 bp, Mus musculus
  siRNA target sequence for Dgat1 (NM_010046.2,660-678).
catcatactccatcatgtt

SEQ ID NO: 602903 - DNA, 19 bp, Mus musculus
  siRNA target sequence for Dgat1 (NM_010046.2,811-829).
gacctaccgagatctctat

SEQ ID NO: 602904 - DNA, 19 bp, Mus musculus
  siRNA target sequence for Dgat1 (NM_010046.2,813-831).
cctaccgagatctctatta

SEQ ID NO: 602905 - DNA, 19 bp, Mus musculus
  siRNA target sequence for Dgat1 (NM_010046.2,818-836).
cgagatctctattacttca

SEQ ID NO: 602906 - DNA, 19 bp, Mus musculus
  siRNA target sequence for Dgat1 (NM_010046.2,819-837).
gagatctctattacttcat

SEQ ID NO: 602907 - DNA, 19 bp, Mus musculus
  siRNA target sequence for Dgat1 (NM_010046.2,843-861).
ctcctactttgtgttatga

SEQ ID NO: 602908 - DNA, 19 bp, Mus musculus
  siRNA target sequence for Dgat1 (NM_010046.2,846-864).
ctactttgtgttatgaact

SEQ ID NO: 602909 - DNA, 19 bp, Mus musculus
  siRNA target sequence for Dgat1 (NM_010046.2,1050-1068).
cggtccccaaccatctgat

SEQ ID NO: 602910 - DNA, 19 bp, Mus musculus
  siRNA target sequence for Dgat1 (NM_010046.2,1061-1079).
catctgatctggcttatct

SEQ ID NO: 602911 - DNA, 19 bp, Mus musculus
  siRNA target sequence for Dgat1 (NM_010046.2,1142-1160).
cgcgagttctacagagatt

SEQ ID NO: 602912 - DNA, 19 bp, Mus musculus
  siRNA target sequence for Dgat1 (NM_010046.2,1276-1294).
ggccaggacaggagtattt

SEQ ID NO: 602913 - DNA, 19 bp, Mus musculus
  siRNA target sequence for Dgat1 (NM_010046.2,1395-1413).
ggattgtgggccgattctt

SEQ ID NO: 602914 - DNA, 19 bp, Mus musculus
  siRNA target sequence for Dgat1 (NM_010046.2,1441-1459).
gtgggtgacactcatcatt

SEQ ID NO: 602915 - DNA, 19 bp, Mus musculus
  siRNA target sequence for Dgat2 (NM_026384.2,262-280).
gcccgcagcgaaaacaaga

SEQ ID NO: 602916 - DNA, 19 bp, Mus musculus
  siRNA target sequence for Dgat2 (NM_026384.2,263-281).
cccgcagcgaaaacaagaa

SEQ ID NO: 602917 - DNA, 19 bp, Mus musculus
  siRNA target sequence for Dgat2 (NM_026384.2,264-282).
ccgcagcgaaaacaagaat

SEQ ID NO: 602918 - DNA, 19 bp, Mus musculus
  siRNA target sequence for Dgat2 (NM_026384.2,265-283).
cgcagcgaaaacaagaata

SEQ ID NO: 602919 - DNA, 19 bp, Mus musculus
  siRNA target sequence for Dgat2 (NM_026384.2,266-284).
gcagcgaaaacaagaataa

SEQ ID NO: 602920 - DNA, 19 bp, Mus musculus
  siRNA target sequence for Dgat2 (NM_026384.2,409-427).
gtcatctcagtactacaat

SEQ ID NO: 602921 - DNA, 19 bp, Mus musculus
  siRNA target sequence for Dgat2 (NM_026384.2,602-620).
gctacttccgagactactt

SEQ ID NO: 602922 - DNA, 19 bp, Mus musculus
  siRNA target sequence for Dgat2 (NM_026384.2,603-621).
ctacttccgagactacttt

SEQ ID NO: 602923 - DNA, 19 bp, Mus musculus
  siRNA target sequence for Dgat2 (NM_026384.2,656-674).
ccaccaggaactatatctt

SEQ ID NO: 602924 - DNA, 19 bp, Mus musculus
  siRNA target sequence for Dgat2 (NM_026384.2,657-675).
caccaggaactatatcttt

SEQ ID NO: 602925 - DNA, 19 bp, Mus musculus
  siRNA target sequence for Dgat2 (NM_026384.2,700-718).
ggcctgggtgccttctgta

SEQ ID NO: 602926 - DNA, 19 bp, Mus musculus
  siRNA target sequence for Dgat2 (NM_026384.2,701-719).
gcctgggtgccttctgtaa

SEQ ID NO: 602927 - DNA, 19 bp, Mus musculus
  siRNA target sequence for Dgat2 (NM_026384.2,758-776).
ctggcataaggccctattt

SEQ ID NO: 602928 - DNA, 19 bp, Mus musculus
  siRNA target sequence for Dgat2 (NM_026384.2,854-872).
gagacaccatagactactt

SEQ ID NO: 602929 - DNA, 19 bp, Mus musculus
  siRNA target sequence for Dgat2 (NM_026384.2,1015-1033).
gatctggttcccacttatt

SEQ ID NO: 602930 - DNA, 19 bp, Mus musculus
  siRNA target sequence for Dgat2 (NM_026384.2,1090-1108).
cgatgggtccagaagaagt

SEQ ID NO: 602931 - DNA, 19 bp, Mus musculus
  siRNA target sequence for Dgat2 (NM_026384.2,1270-1288).
ctgtaccatgccatgtaca

SEQ ID NO: 602932 - DNA, 19 bp, Mus musculus
  siRNA target sequence for Dgat2 (NM_026384.2,1299-1317).
ggtgaagctctttgacaat

SEQ ID NO: 602933 - DNA, 19 bp, Mus musculus
  siRNA target sequence for Cpt1a (NM_013495.1,217-235).
cctccagctggcttatcgt

SEQ ID NO: 602934 - DNA, 19 bp, Mus musculus
  siRNA target sequence for Cpt1a (NM_013495.1,233-251).
cgtggtggtgggtgtgata

SEQ ID NO: 602935 - DNA, 19 bp, Mus musculus
  siRNA target sequence for Cpt1a (NM_013495.1,234-252).
gtggtggtgggtgtgatat

SEQ ID NO: 602936 - DNA, 19 bp, Mus musculus
  siRNA target sequence for Cpt1a (NM_013495.1,246-264).
gtgatatcatccatgcata

SEQ ID NO: 602937 - DNA, 19 bp, Mus musculus
  siRNA target sequence for Cpt1a (NM_013495.1,387-405).
gtggcgatcatcatgacta

SEQ ID NO: 602938 - DNA, 19 bp, Mus musculus
  siRNA target sequence for Cpt1a (NM_013495.1,516-534).
ggtcgaaagcccatgttgt

SEQ ID NO: 602939 - DNA, 19 bp, Mus musculus
  siRNA target sequence for Cpt1a (NM_013495.1,519-537).
cgaaagcccatgttgtaca

SEQ ID NO: 602940 - DNA, 19 bp, Mus musculus
  siRNA target sequence for Cpt1a (NM_013495.1,567-585).
gtcccagctgtcaaagata

SEQ ID NO: 602941 - DNA, 19 bp, Mus musculus
  siRNA target sequence for Cpt1a (NM_013495.1,684-702).
cccaaattgcagtggtatt

SEQ ID NO: 602942 - DNA, 19 bp, Mus musculus
  siRNA target sequence for Cpt1a (NM_013495.1,685-703).
ccaaattgcagtggtattt

SEQ ID NO: 602943 - DNA, 19 bp, Mus musculus
  siRNA target sequence for Cpt1a (NM_013495.1,693-711).
cagtggtatttgaagctaa

SEQ ID NO: 602944 - DNA, 19 bp, Mus musculus
  siRNA target sequence for Cpt1a (NM_013495.1,715-733).
cctggtgggccacaaatta

SEQ ID NO: 602945 - DNA, 19 bp, Mus musculus
  siRNA target sequence for Cpt1a (NM_013495.1,718-736).
ggtgggccacaaattatgt

SEQ ID NO: 602946 - DNA, 19 bp, Mus musculus
  siRNA target sequence for Cpt1a (NM_013495.1,741-759).
gactggtgggaggaataca

SEQ ID NO: 602947 - DNA, 19 bp, Mus musculus
  siRNA target sequence for Cpt1a (NM_013495.1,774-792).
cgagggccgatcatggtta

SEQ ID NO: 602948 - DNA, 19 bp, Mus musculus
  siRNA target sequence for Cpt1a (NM_013495.1,775-793).
gagggccgatcatggttaa

SEQ ID NO: 602949 - DNA, 19 bp, Mus musculus
  siRNA target sequence for Cpt1a (NM_013495.1,777-795).
gggccgatcatggttaaca

SEQ ID NO: 602950 - DNA, 19 bp, Mus musculus
  siRNA target sequence for Cpt1a (NM_013495.1,903-921).
cgtgaggaactcaaaccta

SEQ ID NO: 602951 - DNA, 19 bp, Mus musculus
  siRNA target sequence for Cpt1a (NM_013495.1,904-922).
gtgaggaactcaaacctat

SEQ ID NO: 602952 - DNA, 19 bp, Mus musculus
  siRNA target sequence for Cpt1a (NM_013495.1,962-980).
gtgggagcgactcttcaat

SEQ ID NO: 602953 - DNA, 19 bp, Mus musculus
  siRNA target sequence for Cpt1a (NM_013495.1,965-983).
ggagcgactcttcaatact

SEQ ID NO: 602954 - DNA, 19 bp, Mus musculus
  siRNA target sequence for Cpt1a (NM_013495.1,966-984).
gagcgactcttcaatactt

SEQ ID NO: 602955 - DNA, 19 bp, Mus musculus
  siRNA target sequence for Cpt1a (NM_013495.1,1053-1071).
cacagaggccgttacttca

SEQ ID NO: 602956 - DNA, 19 bp, Mus musculus
  siRNA target sequence for Cpt1a (NM_013495.1,1220-1238).
gtgtcggcagacctatttt

SEQ ID NO: 602957 - DNA, 19 bp, Mus musculus
  siRNA target sequence for Cpt1a (NM_013495.1,1232-1250).
ctattttgcacgaggaaaa

SEQ ID NO: 602958 - DNA, 19 bp, Mus musculus
  siRNA target sequence for Cpt1a (NM_013495.1,1305-1323).
gaatcggaacagggatata

SEQ ID NO: 602959 - DNA, 19 bp, Mus musculus
  siRNA target sequence for Cpt1a (NM_013495.1,1335-1353).
cctgaggcatctattgaca

SEQ ID NO: 602960 - DNA, 19 bp, Mus musculus
  siRNA target sequence for Cpt1a (NM_013495.1,1408-1426).
ccatcacctttgttgtctt

SEQ ID NO: 602961 - DNA, 19 bp, Mus musculus
  siRNA target sequence for Cpt1a (NM_013495.1,1412-1430).
cacctttgttgtcttcaaa

SEQ ID NO: 602962 - DNA, 19 bp, Mus musculus
  siRNA target sequence for Cpt1a (NM_013495.1,1651-1669).
ccagttttttggcaaatga

SEQ ID NO: 602963 - DNA, 19 bp, Mus musculus
  siRNA target sequence for Cpt1a (NM_013495.1,1654-1672).
gttttttggcaaatgatgt

SEQ ID NO: 602964 - DNA, 19 bp, Mus musculus
  siRNA target sequence for Cpt1a (NM_013495.1,1704-1722).
ggcaaaggcttgatcaaga

SEQ ID NO: 602965 - DNA, 19 bp, Mus musculus
  siRNA target sequence for Cpt1a (NM_013495.1,1705-1723).
gcaaaggcttgatcaagaa

SEQ ID NO: 602966 - DNA, 19 bp, Mus musculus
  siRNA target sequence for Cpt1a (NM_013495.1,1759-1777).
cactgcagctcgcacatta

SEQ ID NO: 602967 - DNA, 19 bp, Mus musculus
  siRNA target sequence for Cpt1a (NM_013495.1,1761-1779).
ctgcagctcgcacattaca

SEQ ID NO: 602968 - DNA, 19 bp, Mus musculus
  siRNA target sequence for Cpt1a (NM_013495.1,1870-1888).
cggagtcctgcaactttgt

SEQ ID NO: 602969 - DNA, 19 bp, Mus musculus
  siRNA target sequence for Cpt1a (NM_013495.1,1927-1945).
ggttcaagctgttcaagat

SEQ ID NO: 602970 - DNA, 19 bp, Mus musculus
  siRNA target sequence for Cpt1a (NM_013495.1,1928-1946).
gttcaagctgttcaagata

SEQ ID NO: 602971 - DNA, 19 bp, Mus musculus
  siRNA target sequence for Cpt1a (NM_013495.1,1937-1955).
gttcaagatagcttgtgaa

SEQ ID NO: 602972 - DNA, 19 bp, Mus musculus
  siRNA target sequence for Cpt1a (NM_013495.1,2318-2336).
ggacattatcaccttgttt

SEQ ID NO: 602973 - DNA, 19 bp, Mus musculus
  siRNA target sequence for Cpt1a (NM_013495.1,2340-2358).
ctcaccgccaattccaaaa

SEQ ID NO: 602974 - DNA, 19 bp, Mus musculus
  siRNA target sequence for Cpt2 (NM_009949.1,128-146).
ccctagtcggcccttaagt

SEQ ID NO: 602975 - DNA, 19 bp, Mus musculus
  siRNA target sequence for Cpt2 (NM_009949.1,221-239).
gctgcctatccctaaactt

SEQ ID NO: 602976 - DNA, 19 bp, Mus musculus
  siRNA target sequence for Cpt2 (NM_009949.1,224-242).
gcctatccctaaacttgaa

SEQ ID NO: 602977 - DNA, 19 bp, Mus musculus
  siRNA target sequence for Cpt2 (NM_009949.1,226-244).
ctatccctaaacttgaaga

SEQ ID NO: 602978 - DNA, 19 bp, Mus musculus
  siRNA target sequence for Cpt2 (NM_009949.1,362-380).
cctgctcgctcaggataaa

SEQ ID NO: 602979 - DNA, 19 bp, Mus musculus
  siRNA target sequence for Cpt2 (NM_009949.1,406-424).
caggcccctggtttgatat

SEQ ID NO: 602980 - DNA, 19 bp, Mus musculus
  siRNA target sequence for Cpt2 (NM_009949.1,408-426).
ggcccctggtttgatatgt

SEQ ID NO: 602981 - DNA, 19 bp, Mus musculus
  siRNA target sequence for Cpt2 (NM_009949.1,416-434).
gtttgatatgtatttaact

SEQ ID NO: 602982 - DNA, 19 bp, Mus musculus
  siRNA target sequence for Cpt2 (NM_009949.1,436-454).
ctcgagactctgtcgtttt

SEQ ID NO: 602983 - DNA, 19 bp, Mus musculus
  siRNA target sequence for Cpt2 (NM_009949.1,438-456).
cgagactctgtcgttttaa

SEQ ID NO: 602984 - DNA, 19 bp, Mus musculus
  siRNA target sequence for Cpt2 (NM_009949.1,439-457).
gagactctgtcgttttaaa

SEQ ID NO: 602985 - DNA, 19 bp, Mus musculus
  siRNA target sequence for Cpt2 (NM_009949.1,449-467).
cgttttaaactttaatcca

SEQ ID NO: 602986 - DNA, 19 bp, Mus musculus
  siRNA target sequence for Cpt2 (NM_009949.1,485-503).
ggacccgaagtctgagtat

SEQ ID NO: 602987 - DNA, 19 bp, Mus musculus
  siRNA target sequence for Cpt2 (NM_009949.1,486-504).
gacccgaagtctgagtata

SEQ ID NO: 602988 - DNA, 19 bp, Mus musculus
  siRNA target sequence for Cpt2 (NM_009949.1,488-506).
cccgaagtctgagtataat

SEQ ID NO: 602989 - DNA, 19 bp, Mus musculus
  siRNA target sequence for Cpt2 (NM_009949.1,490-508).
cgaagtctgagtataatga

SEQ ID NO: 602990 - DNA, 19 bp, Mus musculus
  siRNA target sequence for Cpt2 (NM_009949.1,679-697).
cctacctggtcaatgcata

SEQ ID NO: 602991 - DNA, 19 bp, Mus musculus
  siRNA target sequence for Cpt2 (NM_009949.1,680-698).
ctacctggtcaatgcatat

SEQ ID NO: 602992 - DNA, 19 bp, Mus musculus
  siRNA target sequence for Cpt2 (NM_009949.1,693-711).
gcatatcccctggatatgt

SEQ ID NO: 602993 - DNA, 19 bp, Mus musculus
  siRNA target sequence for Cpt2 (NM_009949.1,701-719).
cctggatatgtcccaatat

SEQ ID NO: 602994 - DNA, 19 bp, Mus musculus
  siRNA target sequence for Cpt2 (NM_009949.1,704-722).
ggatatgtcccaatatttt

SEQ ID NO: 602995 - DNA, 19 bp, Mus musculus
  siRNA target sequence for Cpt2 (NM_009949.1,714-732).
caatattttcggcttttca

SEQ ID NO: 602996 - DNA, 19 bp, Mus musculus
  siRNA target sequence for Cpt2 (NM_009949.1,755-773).
cagtcgtgatgaactcttt

SEQ ID NO: 602997 - DNA, 19 bp, Mus musculus
  siRNA target sequence for Cpt2 (NM_009949.1,870-888).
gaaatccaggcacatctaa

SEQ ID NO: 602998 - DNA, 19 bp, Mus musculus
  siRNA target sequence for Cpt2 (NM_009949.1,878-896).
ggcacatctaaagtacatt

SEQ ID NO: 602999 - DNA, 19 bp, Mus musculus
  siRNA target sequence for Cpt2 (NM_009949.1,921-939).
gagtttcccctggcttatt

SEQ ID NO: 603000 - DNA, 19 bp, Mus musculus
  siRNA target sequence for Cpt2 (NM_009949.1,969-987).
gagctcagacagaagttga

SEQ ID NO: 603001 - DNA, 19 bp, Mus musculus
  siRNA target sequence for Cpt2 (NM_009949.1,974-992).
cagacagaagttgattcat

SEQ ID NO: 603002 - DNA, 19 bp, Mus musculus
  siRNA target sequence for Cpt2 (NM_009949.1,1039-1057).
gcctctgcttagatgactt

SEQ ID NO: 603003 - DNA, 19 bp, Mus musculus
  siRNA target sequence for Cpt2 (NM_009949.1,1058-1076).
cccgatgaaggatcttgtt

SEQ ID NO: 603004 - DNA, 19 bp, Mus musculus
  siRNA target sequence for Cpt2 (NM_009949.1,1109-1127).
cacgaaccgctggtttgat

SEQ ID NO: 603005 - DNA, 19 bp, Mus musculus
  siRNA target sequence for Cpt2 (NM_009949.1,1111-1129).
cgaaccgctggtttgataa

SEQ ID NO: 603006 - DNA, 19 bp, Mus musculus
  siRNA target sequence for Cpt2 (NM_009949.1,1198-1216).
gtgtagcagtccttaggtt

SEQ ID NO: 603007 - DNA, 19 bp, Mus musculus
  siRNA target sequence for Cpt2 (NM_009949.1,1200-1218).
gtagcagtccttaggtttt

SEQ ID NO: 603008 - DNA, 19 bp, Mus musculus
  siRNA target sequence for Cpt2 (NM_009949.1,1213-1231).
ggtttttcaatgaagtgtt

SEQ ID NO: 603009 - DNA, 19 bp, Mus musculus
  siRNA target sequence for Cpt2 (NM_009949.1,1302-1320).
gtgcagaagctcagtttta

SEQ ID NO: 603010 - DNA, 19 bp, Mus musculus
  siRNA target sequence for Cpt2 (NM_009949.1,1393-1411).
ccattgacgccattcagtt

SEQ ID NO: 603011 - DNA, 19 bp, Mus musculus
  siRNA target sequence for Cpt2 (NM_009949.1,1394-1412).
cattgacgccattcagttt

SEQ ID NO: 603012 - DNA, 19 bp, Mus musculus
  siRNA target sequence for Cpt2 (NM_009949.1,1398-1416).
gacgccattcagtttcaga

SEQ ID NO: 603013 - DNA, 19 bp, Mus musculus
  siRNA target sequence for Cpt2 (NM_009949.1,1420-1438).
gtggcaaggaattcttgaa

SEQ ID NO: 603014 - DNA, 19 bp, Mus musculus
  siRNA target sequence for Cpt2 (NM_009949.1,1422-1440).
ggcaaggaattcttgaaga

SEQ ID NO: 603015 - DNA, 19 bp, Mus musculus
  siRNA target sequence for Cpt2 (NM_009949.1,1508-1526).
ccagacagtggctacctat

SEQ ID NO: 603016 - DNA, 19 bp, Mus musculus
  siRNA target sequence for Cpt2 (NM_009949.1,1600-1618).
gatgctccgaggcatttgt

SEQ ID NO: 603017 - DNA, 19 bp, Mus musculus
  siRNA target sequence for Cpt2 (NM_009949.1,1644-1662).
ggcgagcttcagcatatga

SEQ ID NO: 603018 - DNA, 19 bp, Mus musculus
  siRNA target sequence for Cpt2 (NM_009949.1,1645-1663).
gcgagcttcagcatatgat

SEQ ID NO: 603019 - DNA, 19 bp, Mus musculus
  siRNA target sequence for Cpt2 (NM_009949.1,1666-1684).
ctgagtgctccaaatacca

SEQ ID NO: 603020 - DNA, 19 bp, Mus musculus
  siRNA target sequence for Cpt2 (NM_009949.1,1798-1816).
ctgcataccagcggataaa

SEQ ID NO: 603021 - DNA, 19 bp, Mus musculus
  siRNA target sequence for Cpt2 (NM_009949.1,1801-1819).
cataccagcggataaacca

SEQ ID NO: 603022 - DNA, 19 bp, Mus musculus
  siRNA target sequence for Cpt2 (NM_009949.1,1960-1978).
gcaatgcccgagagtttct

SEQ ID NO: 603023 - DNA, 19 bp, Mus musculus
  siRNA target sequence for Cpt2 (NM_009949.1,2025-2043).
ggcaaagccatcaaaactt

SEQ ID NO: 603024 - DNA, 19 bp, Mus musculus
  siRNA target sequence for Crot (NM_023733.2,164-182).
ggaaaatcaattgactaaa

SEQ ID NO: 603025 - DNA, 19 bp, Mus musculus
  siRNA target sequence for Crot (NM_023733.2,237-255).
cctgcacttgaagaatcat

SEQ ID NO: 603026 - DNA, 19 bp, Mus musculus
  siRNA target sequence for Crot (NM_023733.2,240-258).
gcacttgaagaatcattaa

SEQ ID NO: 603027 - DNA, 19 bp, Mus musculus
  siRNA target sequence for Crot (NM_023733.2,241-259).
cacttgaagaatcattaaa

SEQ ID NO: 603028 - DNA, 19 bp, Mus musculus
  siRNA target sequence for Crot (NM_023733.2,288-306).
gcaaatgaagacgagtata

SEQ ID NO: 603029 - DNA, 19 bp, Mus musculus
  siRNA target sequence for Crot (NM_023733.2,289-307).
caaatgaagacgagtataa

SEQ ID NO: 603030 - DNA, 19 bp, Mus musculus
  siRNA target sequence for Crot (NM_023733.2,393-411).
cgaaactggctggaagaat

SEQ ID NO: 603031 - DNA, 19 bp, Mus musculus
  siRNA target sequence for Crot (NM_023733.2,427-445).
cctacctggacgtacgtat

SEQ ID NO: 603032 - DNA, 19 bp, Mus musculus
  siRNA target sequence for Crot (NM_023733.2,428-446).
ctacctggacgtacgtatt

SEQ ID NO: 603033 - DNA, 19 bp, Mus musculus
  siRNA target sequence for Crot (NM_023733.2,431-449).
cctggacgtacgtattcca

SEQ ID NO: 603034 - DNA, 19 bp, Mus musculus
  siRNA target sequence for Crot (NM_023733.2,432-450).
ctggacgtacgtattccat

SEQ ID NO: 603035 - DNA, 19 bp, Mus musculus
  siRNA target sequence for Crot (NM_023733.2,447-465).
ccatcacaactgaatgtga

SEQ ID NO: 603036 - DNA, 19 bp, Mus musculus
  siRNA target sequence for Crot (NM_023733.2,512-530).
ggaaggcactcagttagaa

SEQ ID NO: 603037 - DNA, 19 bp, Mus musculus
  siRNA target sequence for Crot (NM_023733.2,585-603).
gaaaaattgcctgtacata

SEQ ID NO: 603038 - DNA, 19 bp, Mus musculus
  siRNA target sequence for Crot (NM_023733.2,610-628).
gaaatactcctctagacat

SEQ ID NO: 603039 - DNA, 19 bp, Mus musculus
  siRNA target sequence for Crot (NM_023733.2,632-650).
ccaattccgaatgttgttt

SEQ ID NO: 603040 - DNA, 19 bp, Mus musculus
  siRNA target sequence for Crot (NM_023733.2,633-651).
caattccgaatgttgtttt

SEQ ID NO: 603041 - DNA, 19 bp, Mus musculus
  siRNA target sequence for Crot (NM_023733.2,670-688).
gaattactagagattcgat

SEQ ID NO: 603042 - DNA, 19 bp, Mus musculus
  siRNA target sequence for Crot (NM_023733.2,676-694).
ctagagattcgattatgaa

SEQ ID NO: 603043 - DNA, 19 bp, Mus musculus
  siRNA target sequence for Crot (NM_023733.2,679-697).
gagattcgattatgaatta

SEQ ID NO: 603044 - DNA, 19 bp, Mus musculus
  siRNA target sequence for Crot (NM_023733.2,681-699).
gattcgattatgaattatt

SEQ ID NO: 603045 - DNA, 19 bp, Mus musculus
  siRNA target sequence for Crot (NM_023733.2,754-772).
gcagagcgtttgtctttga

SEQ ID NO: 603046 - DNA, 19 bp, Mus musculus
  siRNA target sequence for Crot (NM_023733.2,760-778).
cgtttgtctttgatgtact

SEQ ID NO: 603047 - DNA, 19 bp, Mus musculus
  siRNA target sequence for Crot (NM_023733.2,777-795).
ctacatgagggatgtttga

SEQ ID NO: 603048 - DNA, 19 bp, Mus musculus
  siRNA target sequence for Crot (NM_023733.2,780-798).
catgagggatgtttgatca

SEQ ID NO: 603049 - DNA, 19 bp, Mus musculus
  siRNA target sequence for Crot (NM_023733.2,794-812).
gatcaccccaccagaactt

SEQ ID NO: 603050 - DNA, 19 bp, Mus musculus
  siRNA target sequence for Crot (NM_023733.2,804-822).
ccagaacttctcagacaat

SEQ ID NO: 603051 - DNA, 19 bp, Mus musculus
  siRNA target sequence for Crot (NM_023733.2,912-930).
gcaagagaatatctgatta

SEQ ID NO: 603052 - DNA, 19 bp, Mus musculus
  siRNA target sequence for Crot (NM_023733.2,1011-1029).
catgcaaccccagaagaat

SEQ ID NO: 603053 - DNA, 19 bp, Mus musculus
  siRNA target sequence for Crot (NM_023733.2,1014-1032).
gcaaccccagaagaatatt

SEQ ID NO: 603054 - DNA, 19 bp, Mus musculus
  siRNA target sequence for Crot (NM_023733.2,1079-1097).
gggtgacaagtcctataat

SEQ ID NO: 603055 - DNA, 19 bp, Mus musculus
  siRNA target sequence for Crot (NM_023733.2,1080-1098).
ggtgacaagtcctataatt

SEQ ID NO: 603056 - DNA, 19 bp, Mus musculus
  siRNA target sequence for Crot (NM_023733.2,1081-1099).
gtgacaagtcctataattt

SEQ ID NO: 603057 - DNA, 19 bp, Mus musculus
  siRNA target sequence for Crot (NM_023733.2,1083-1101).
gacaagtcctataatttga

SEQ ID NO: 603058 - DNA, 19 bp, Mus musculus
  siRNA target sequence for Crot (NM_023733.2,1106-1124).
ctttgctaatggaatattt

SEQ ID NO: 603059 - DNA, 19 bp, Mus musculus
  siRNA target sequence for Crot (NM_023733.2,1156-1174).
caatggtcatggtgaacat

SEQ ID NO: 603060 - DNA, 19 bp, Mus musculus
  siRNA target sequence for Crot (NM_023733.2,1219-1237).
ggaagggttcagaaaaagt

SEQ ID NO: 603061 - DNA, 19 bp, Mus musculus
  siRNA target sequence for Crot (NM_023733.2,1283-1301).
gaaaatactgaatgatgta

SEQ ID NO: 603062 - DNA, 19 bp, Mus musculus
  siRNA target sequence for Crot (NM_023733.2,1309-1327).
ccaaagcccaacatctcaa

SEQ ID NO: 603063 - DNA, 19 bp, Mus musculus
  siRNA target sequence for Crot (NM_023733.2,1520-1538).
gactgtgcgatcttgtaca

SEQ ID NO: 603064 - DNA, 19 bp, Mus musculus
  siRNA target sequence for Crot (NM_023733.2,1614-1632).
gaagcttttgccaagcata

SEQ ID NO: 603065 - DNA, 19 bp, Mus musculus
  siRNA target sequence for Crot (NM_023733.2,1617-1635).
gcttttgccaagcataata

SEQ ID NO: 603066 - DNA, 19 bp, Mus musculus
  siRNA target sequence for Crot (NM_023733.2,1623-1641).
gccaagcataataagatga

SEQ ID NO: 603067 - DNA, 19 bp, Mus musculus
  siRNA target sequence for Crot (NM_023733.2,1624-1642).
ccaagcataataagatgat

SEQ ID NO: 603068 - DNA, 19 bp, Mus musculus
  siRNA target sequence for Crot (NM_023733.2,1637-1655).
gatgatgaaagattgttca

SEQ ID NO: 603069 - DNA, 19 bp, Mus musculus
  siRNA target sequence for Crot (NM_023733.2,1762-1780).
gaggaggtggaaattttgt

SEQ ID NO: 603070 - DNA, 19 bp, Mus musculus
  siRNA target sequence for Crot (NM_023733.2,1781-1799).
gctctcaacaagtttggtt

SEQ ID NO: 603071 - DNA, 19 bp, Mus musculus
  siRNA target sequence for Crot (NM_023733.2,1831-1849).
ccatggtacacaatggata

SEQ ID NO: 603072 - DNA, 19 bp, Mus musculus
  siRNA target sequence for Crot (NM_023733.2,1836-1854).
gtacacaatggatatggat

SEQ ID NO: 603073 - DNA, 19 bp, Mus musculus
  siRNA target sequence for Crot (NM_023733.2,1934-1952).
gcttgttcagatgattttt

SEQ ID NO: 603074 - DNA, 19 bp, Mus musculus
  siRNA target sequence for Crot (NM_023733.2,1953-1971).
catgctttccacgatatga

SEQ ID NO: 603075 - DNA, 19 bp, Mus musculus
  siRNA target sequence for Crot (NM_023733.2,1957-1975).
ctttccacgatatgataca

SEQ ID NO: 603076 - DNA, 19 bp, Mus musculus
  siRNA target sequence for Crot (NM_023733.2,1979-1997).
gatgaacaccgctcatctt

SEQ ID NO: 603077 - DNA, 19 bp, Mus musculus
  siRNA target sequence for Lcat (NM_008490.1,220-238).
gatgtgctaccgtaagaca

SEQ ID NO: 603078 - DNA, 19 bp, Mus musculus
  siRNA target sequence for Lcat (NM_008490.1,305-323).
gataataccaggattgtct

SEQ ID NO: 603079 - DNA, 19 bp, Mus musculus
  siRNA target sequence for Lcat (NM_008490.1,525-543).
cccaccagcaggatgaata

SEQ ID NO: 603080 - DNA, 19 bp, Mus musculus
  siRNA target sequence for Lcat (NM_008490.1,876-894).
ccacaccaaacttcaacta

SEQ ID NO: 603081 - DNA, 19 bp, Mus musculus
  siRNA target sequence for Lcat (NM_008490.1,892-910).
ctacaccgtccaagacttt

SEQ ID NO: 603082 - DNA, 19 bp, Mus musculus
  siRNA target sequence for Lcat (NM_008490.1,907-925).
ctttgagcgttttttcaca

SEQ ID NO: 603083 - DNA, 19 bp, Mus musculus
  siRNA target sequence for Lcat (NM_008490.1,924-942).
cagatctgcattttgaaga

SEQ ID NO: 603084 - DNA, 19 bp, Mus musculus
  siRNA target sequence for Lcat (NM_008490.1,945-963).
gctggcacatgtttcttca

SEQ ID NO: 603085 - DNA, 19 bp, Mus musculus
  siRNA target sequence for Lcat (NM_008490.1,990-1008).
ccgcacctggtgtagaagt

SEQ ID NO: 603086 - DNA, 19 bp, Mus musculus
  siRNA target sequence for Lcat (NM_008490.1,991-1009).
cgcacctggtgtagaagta

SEQ ID NO: 603087 - DNA, 19 bp, Mus musculus
  siRNA target sequence for Lcat (NM_008490.1,992-1010).
gcacctggtgtagaagtat

SEQ ID NO: 603088 - DNA, 19 bp, Mus musculus
  siRNA target sequence for Lcat (NM_008490.1,995-1013).
cctggtgtagaagtatatt

SEQ ID NO: 603089 - DNA, 19 bp, Mus musculus
  siRNA target sequence for Lcat (NM_008490.1,999-1017).
gtgtagaagtatattgtct

SEQ ID NO: 603090 - DNA, 19 bp, Mus musculus
  siRNA target sequence for Lcat (NM_008490.1,1081-1099).
ccccgtggctgcactctat

SEQ ID NO: 603091 - DNA, 19 bp, Mus musculus
  siRNA target sequence for Lcat (NM_008490.1,1083-1101).
ccgtggctgcactctatga

SEQ ID NO: 603092 - DNA, 19 bp, Mus musculus
  siRNA target sequence for Lcat (NM_008490.1,1084-1102).
cgtggctgcactctatgaa

SEQ ID NO: 603093 - DNA, 19 bp, Mus musculus
  siRNA target sequence for Lcat (NM_008490.1,1163-1181).
cagtcgcagcccgtacatt

SEQ ID NO: 603094 - DNA, 19 bp, Mus musculus
  siRNA target sequence for Lcat (NM_008490.1,1167-1185).
cgcagcccgtacatttgct

SEQ ID NO: 603095 - DNA, 19 bp, Mus musculus
  siRNA target sequence for Lcat (NM_008490.1,1216-1234).
ggtcttcagcaataagaca

SEQ ID NO: 603096 - DNA, 19 bp, Mus musculus
  siRNA target sequence for Lypla3 (NM_133792.2,147-165).
ctctgtttctactaatgat

SEQ ID NO: 603097 - DNA, 19 bp, Mus musculus
  siRNA target sequence for Lypla3 (NM_133792.2,488-506).
gtgggttcctatttctaca

SEQ ID NO: 603098 - DNA, 19 bp, Mus musculus
  siRNA target sequence for Lypla3 (NM_133792.2,491-509).
ggttcctatttctacacta

SEQ ID NO: 603099 - DNA, 19 bp, Mus musculus
  siRNA target sequence for Lypla3 (NM_133792.2,492-510).
gttcctatttctacactat

SEQ ID NO: 603100 - DNA, 19 bp, Mus musculus
  siRNA target sequence for Lypla3 (NM_133792.2,557-575).
cgaggtgctccctatgatt

SEQ ID NO: 603101 - DNA, 19 bp, Mus musculus
  siRNA target sequence for Lypla3 (NM_133792.2,579-597).
ggcgagccccaaatgaaaa

SEQ ID NO: 603102 - DNA, 19 bp, Mus musculus
  siRNA target sequence for Lypla3 (NM_133792.2,681-699).
gcatgggcaacgtgtacat

SEQ ID NO: 603103 - DNA, 19 bp, Mus musculus
  siRNA target sequence for Lypla3 (NM_133792.2,728-746).
gtctggaaggacaaatata

SEQ ID NO: 603104 - DNA, 19 bp, Mus musculus
  siRNA target sequence for Lypla3 (NM_133792.2,907-925).
ccacacttggtcacatgaa

SEQ ID NO: 603105 - DNA, 19 bp, Mus musculus
  siRNA target sequence for Lypla3 (NM_133792.2,915-933).
ggtcacatgaaaaggtatt

SEQ ID NO: 603106 - DNA, 19 bp, Mus musculus
  siRNA target sequence for Lypla3 (NM_133792.2,918-936).
cacatgaaaaggtatttgt

SEQ ID NO: 603107 - DNA, 19 bp, Mus musculus
  siRNA target sequence for Lypla3 (NM_133792.2,985-1003).
ccgggacatcggtttcgaa

SEQ ID NO: 603108 - DNA, 19 bp, Mus musculus
  siRNA target sequence for Lypla3 (NM_133792.2,1066-1084).
ggagctgcactgcttgtat

SEQ ID NO: 603109 - DNA, 19 bp, Mus musculus
  siRNA target sequence for Lypla3 (NM_133792.2,1094-1112).
gttcccacgccaaactctt

SEQ ID NO: 603110 - DNA, 19 bp, Mus musculus
  siRNA target sequence for Lypla3 (NM_133792.2,1098-1116).
ccacgccaaactctttcta

SEQ ID NO: 603111 - DNA, 19 bp, Mus musculus
  siRNA target sequence for Lypla3 (NM_133792.2,1101-1119).
cgccaaactctttctacta

SEQ ID NO: 603112 - DNA, 19 bp, Mus musculus
  siRNA target sequence for Lypla3 (NM_133792.2,1131-1149).
ctgatcgggaccccaaaat

SEQ ID NO: 603113 - DNA, 19 bp, Mus musculus
  siRNA target sequence for Lypla3 (NM_133792.2,1133-1151).
gatcgggaccccaaaatct

SEQ ID NO: 603114 - DNA, 19 bp, Mus musculus
  siRNA target sequence for Lypla3 (NM_133792.2,1251-1269).
cgggaagcgagcacattga

SEQ ID NO: 603115 - DNA, 19 bp, Mus musculus
  siRNA target sequence for Lypla3 (NM_133792.2,1253-1271).
ggaagcgagcacattgaga

SEQ ID NO: 603116 - DNA, 19 bp, Mus musculus
  siRNA target sequence for Lypla3 (NM_133792.2,1254-1272).
gaagcgagcacattgagat

SEQ ID NO: 603117 - DNA, 19 bp, Mus musculus
  siRNA target sequence for Soat1 (NM_009230.1,956-974).
ggagctgaagccactattt

SEQ ID NO: 603118 - DNA, 19 bp, Mus musculus
  siRNA target sequence for Soat1 (NM_009230.1,989-1007).
gtgccacttcgatgacttt

SEQ ID NO: 603119 - DNA, 19 bp, Mus musculus
  siRNA target sequence for Soat1 (NM_009230.1,1072-1090).
ccattcttgaagaaatgaa

SEQ ID NO: 603120 - DNA, 19 bp, Mus musculus
  siRNA target sequence for Soat1 (NM_009230.1,1219-1237).
cactcctcatcctattcgt

SEQ ID NO: 603121 - DNA, 19 bp, Mus musculus
  siRNA target sequence for Soat1 (NM_009230.1,1246-1264).
cgatcgtcgtggactacat

SEQ ID NO: 603122 - DNA, 19 bp, Mus musculus
  siRNA target sequence for Soat1 (NM_009230.1,1273-1291).
gaaggctggtacttgagtt

SEQ ID NO: 603123 - DNA, 19 bp, Mus musculus
  siRNA target sequence for Soat1 (NM_009230.1,1277-1295).
gctggtacttgagttcaat

SEQ ID NO: 603124 - DNA, 19 bp, Mus musculus
  siRNA target sequence for Soat1 (NM_009230.1,1308-1326).
gcttttggcaaatttccta

SEQ ID NO: 603125 - DNA, 19 bp, Mus musculus
  siRNA target sequence for Soat1 (NM_009230.1,1316-1334).
caaatttcctactgttatt

SEQ ID NO: 603126 - DNA, 19 bp, Mus musculus
  siRNA target sequence for Soat1 (NM_009230.1,1401-1419).
cacggttacagcaagagtt

SEQ ID NO: 603127 - DNA, 19 bp, Mus musculus
  siRNA target sequence for Soat1 (NM_009230.1,1417-1435).
gttctcacccattgatcta

SEQ ID NO: 603128 - DNA, 19 bp, Mus musculus
  siRNA target sequence for Soat1 (NM_009230.1,1454-1472).
gctcttcttagtctttcaa

SEQ ID NO: 603129 - DNA, 19 bp, Mus musculus
  siRNA target sequence for Soat1 (NM_009230.1,1493-1511).
gccaacatacgttgtctta

SEQ ID NO: 603130 - DNA, 19 bp, Mus musculus
  siRNA target sequence for Soat1 (NM_009230.1,1498-1516).
catacgttgtcttagcata

SEQ ID NO: 603131 - DNA, 19 bp, Mus musculus
  siRNA target sequence for Soat1 (NM_009230.1,1502-1520).
cgttgtcttagcatacaca

SEQ ID NO: 603132 - DNA, 19 bp, Mus musculus
  siRNA target sequence for Soat1 (NM_009230.1,1528-1546).
cagcctcccggttcattct

SEQ ID NO: 603133 - DNA, 19 bp, Mus musculus
  siRNA target sequence for Soat1 (NM_009230.1,1531-1549).
cctcccggttcattctgat

SEQ ID NO: 603134 - DNA, 19 bp, Mus musculus
  siRNA target sequence for Soat1 (NM_009230.1,1532-1550).
ctcccggttcattctgata

SEQ ID NO: 603135 - DNA, 19 bp, Mus musculus
  siRNA target sequence for Soat1 (NM_009230.1,1534-1552).
cccggttcattctgatact

SEQ ID NO: 603136 - DNA, 19 bp, Mus musculus
  siRNA target sequence for Soat1 (NM_009230.1,1598-1616).
gaatatcccacgagtacta

SEQ ID NO: 603137 - DNA, 19 bp, Mus musculus
  siRNA target sequence for Soat1 (NM_009230.1,1604-1622).
cccacgagtactaaatgca

SEQ ID NO: 603138 - DNA, 19 bp, Mus musculus
  siRNA target sequence for Soat1 (NM_009230.1,1679-1697).
cctgtttgcgcctacactt

SEQ ID NO: 603139 - DNA, 19 bp, Mus musculus
  siRNA target sequence for Soat1 (NM_009230.1,1680-1698).
ctgtttgcgcctacactta

SEQ ID NO: 603140 - DNA, 19 bp, Mus musculus
  siRNA target sequence for Soat1 (NM_009230.1,1682-1700).
gtttgcgcctacacttatt

SEQ ID NO: 603141 - DNA, 19 bp, Mus musculus
  siRNA target sequence for Soat1 (NM_009230.1,1777-1795).
gcctgttttatgtgtacta

SEQ ID NO: 603142 - DNA, 19 bp, Mus musculus
  siRNA target sequence for Soat1 (NM_009230.1,1807-1825).
gactctgtgccccactatt

SEQ ID NO: 603143 - DNA, 19 bp, Mus musculus
  siRNA target sequence for Soat1 (NM_009230.1,1816-1834).
ccccactattccggaatat

SEQ ID NO: 603144 - DNA, 19 bp, Mus musculus
  siRNA target sequence for Soat1 (NM_009230.1,1819-1837).
cactattccggaatatcaa

SEQ ID NO: 603145 - DNA, 19 bp, Mus musculus
  siRNA target sequence for Soat1 (NM_009230.1,2052-2070).
cacgactggctctactact

SEQ ID NO: 603146 - DNA, 19 bp, Mus musculus
  siRNA target sequence for Soat1 (NM_009230.1,2054-2072).
cgactggctctactactat

SEQ ID NO: 603147 - DNA, 19 bp, Mus musculus
  siRNA target sequence for Soat1 (NM_009230.1,2057-2075).
ctggctctactactatgtt

SEQ ID NO: 603148 - DNA, 19 bp, Mus musculus
  siRNA target sequence for Soat1 (NM_009230.1,2061-2079).
ctctactactatgtttaca

SEQ ID NO: 603149 - DNA, 19 bp, Mus musculus
  siRNA target sequence for Soat1 (NM_009230.1,2099-2117).
ctcgaagaggttcaaatct

SEQ ID NO: 603150 - DNA, 19 bp, Mus musculus
  siRNA target sequence for Soat1 (NM_009230.1,2307-2325).
ggctatggactcattctgt

SEQ ID NO: 603151 - DNA, 19 bp, Mus musculus
  siRNA target sequence for Lrat (NM_023624.1,371-389).
gaagaaccgtccctatgaa

SEQ ID NO: 603152 - DNA, 19 bp, Mus musculus
  siRNA target sequence for Lrat (NM_023624.1,422-440).
ggtgtcacggacccatttt

SEQ ID NO: 603153 - DNA, 19 bp, Mus musculus
  siRNA target sequence for Lrat (NM_023624.1,423-441).
gtgtcacggacccatttta

SEQ ID NO: 603154 - DNA, 19 bp, Mus musculus
  siRNA target sequence for Lrat (NM_023624.1,558-576).
ctcctgggagtcatttgca

SEQ ID NO: 603155 - DNA, 19 bp, Mus musculus
  siRNA target sequence for Lrat (NM_023624.1,662-680).
gaagaagtccttactcaat

SEQ ID NO: 603156 - DNA, 19 bp, Mus musculus
  siRNA target sequence for Lrat (NM_023624.1,739-757).
ggaacaactgcgaacactt

SEQ ID NO: 603157 - DNA, 19 bp, Mus musculus
  siRNA target sequence for Lrat (NM_023624.1,740-758).
gaacaactgcgaacacttt

SEQ ID NO: 603158 - DNA, 19 bp, Mus musculus
  siRNA target sequence for Lrat (NM_023624.1,748-766).
gcgaacactttgtgactta

SEQ ID NO: 603159 - DNA, 19 bp, Mus musculus
  siRNA target sequence for Lrat (NM_023624.1,793-811).
cacaggctgagaagttcta

SEQ ID NO: 603160 - DNA, 19 bp, Mus musculus
  siRNA target sequence for Lrat (NM_023624.1,861-879).
gctgtcttgggattagcat

SEQ ID NO: 603161 - DNA, 19 bp, Mus musculus
  siRNA target sequence for Lrat (NM_023624.1,866-884).
cttgggattagcatctatt

SEQ ID NO: 603162 - DNA, 19 bp, Mus musculus
  siRNA target sequence for Lrat (NM_023624.1,871-889).
gattagcatctattgtcta

SEQ ID NO: 603163 - DNA, 19 bp, Mus musculus
  siRNA target sequence for Lrat (NM_023624.1,890-908).
cacaggcctggcatcatat

SEQ ID NO: 603164 - DNA, 19 bp, Mus musculus
  siRNA target sequence for Lrat (NM_023624.1,911-929).
gacccttcctgcaatctgt

SEQ ID NO: 603165 - DNA, 19 bp, Mus musculus
  siRNA target sequence for Sptlc1 (NM_009269.2,66-84).
cgaggctccagcataccat

SEQ ID NO: 603166 - DNA, 19 bp, Mus musculus
  siRNA target sequence for Sptlc1 (NM_009269.2,70-88).
gctccagcataccatctta

SEQ ID NO: 603167 - DNA, 19 bp, Mus musculus
  siRNA target sequence for Sptlc1 (NM_009269.2,71-89).
ctccagcataccatcttat

SEQ ID NO: 603168 - DNA, 19 bp, Mus musculus
  siRNA target sequence for Sptlc1 (NM_009269.2,77-95).
cataccatcttattttgga

SEQ ID NO: 603169 - DNA, 19 bp, Mus musculus
  siRNA target sequence for Sptlc1 (NM_009269.2,103-121).
ctaatactttggataatca

SEQ ID NO: 603170 - DNA, 19 bp, Mus musculus
  siRNA target sequence for Sptlc1 (NM_009269.2,113-131).
ggataatcagactcgtttt

SEQ ID NO: 603171 - DNA, 19 bp, Mus musculus
  siRNA target sequence for Sptlc1 (NM_009269.2,150-168).
gcaggagcgttctgatctt

SEQ ID NO: 603172 - DNA, 19 bp, Mus musculus
  siRNA target sequence for Sptlc1 (NM_009269.2,151-169).
caggagcgttctgatctta

SEQ ID NO: 603173 - DNA, 19 bp, Mus musculus
  siRNA target sequence for Sptlc1 (NM_009269.2,241-259).
caccctgctctcaactaca

SEQ ID NO: 603174 - DNA, 19 bp, Mus musculus
  siRNA target sequence for Sptlc1 (NM_009269.2,244-262).
cctgctctcaactacaaca

SEQ ID NO: 603175 - DNA, 19 bp, Mus musculus
  siRNA target sequence for Sptlc1 (NM_009269.2,245-263).
ctgctctcaactacaacat

SEQ ID NO: 603176 - DNA, 19 bp, Mus musculus
  siRNA target sequence for Sptlc1 (NM_009269.2,292-310).
gtggtgaatggaaaagagt

SEQ ID NO: 603177 - DNA, 19 bp, Mus musculus
  siRNA target sequence for Sptlc1 (NM_009269.2,302-320).
gaaaagagtgtgtcaactt

SEQ ID NO: 603178 - DNA, 19 bp, Mus musculus
  siRNA target sequence for Sptlc1 (NM_009269.2,422-440).
ggttctatggcacatttga

SEQ ID NO: 603179 - DNA, 19 bp, Mus musculus
  siRNA target sequence for Sptlc1 (NM_009269.2,423-441).
gttctatggcacatttgat

SEQ ID NO: 603180 - DNA, 19 bp, Mus musculus
  siRNA target sequence for Sptlc1 (NM_009269.2,460-478).
gagcgcctggcaaagttta

SEQ ID NO: 603181 - DNA, 19 bp, Mus musculus
  siRNA target sequence for Sptlc1 (NM_009269.2,463-481).
cgcctggcaaagtttatga

SEQ ID NO: 603182 - DNA, 19 bp, Mus musculus
  siRNA target sequence for Sptlc1 (NM_009269.2,533-551).
ccattcctgcgtactctaa

SEQ ID NO: 603183 - DNA, 19 bp, Mus musculus
  siRNA target sequence for Sptlc1 (NM_009269.2,554-572).
gaggggacatcatctttgt

SEQ ID NO: 603184 - DNA, 19 bp, Mus musculus
  siRNA target sequence for Sptlc1 (NM_009269.2,613-631).
gcatcaagaagtgacatta

SEQ ID NO: 603185 - DNA, 19 bp, Mus musculus
  siRNA target sequence for Sptlc1 (NM_009269.2,614-632).
catcaagaagtgacattaa

SEQ ID NO: 603186 - DNA, 19 bp, Mus musculus
  siRNA target sequence for Sptlc1 (NM_009269.2,623-641).
gtgacattaagttatttaa

SEQ ID NO: 603187 - DNA, 19 bp, Mus musculus
  siRNA target sequence for Sptlc1 (NM_009269.2,627-645).
cattaagttatttaagcat

SEQ ID NO: 603188 - DNA, 19 bp, Mus musculus
  siRNA target sequence for Sptlc1 (NM_009269.2,660-678).
cctggagcgactgctaaaa

SEQ ID NO: 603189 - DNA, 19 bp, Mus musculus
  siRNA target sequence for Sptlc1 (NM_009269.2,663-681).
ggagcgactgctaaaagaa

SEQ ID NO: 603190 - DNA, 19 bp, Mus musculus
  siRNA target sequence for Sptlc1 (NM_009269.2,666-684).
gcgactgctaaaagaacaa

SEQ ID NO: 603191 - DNA, 19 bp, Mus musculus
  siRNA target sequence for Sptlc1 (NM_009269.2,779-797).
cccttccagaactggttaa

SEQ ID NO: 603192 - DNA, 19 bp, Mus musculus
  siRNA target sequence for Sptlc1 (NM_009269.2,883-901).
gagcactatgggatcagta

SEQ ID NO: 603193 - DNA, 19 bp, Mus musculus
  siRNA target sequence for Sptlc1 (NM_009269.2,885-903).
gcactatgggatcagtatt

SEQ ID NO: 603194 - DNA, 19 bp, Mus musculus
  siRNA target sequence for Sptlc1 (NM_009269.2,998-1016).
ggctctccggtcaaggata

SEQ ID NO: 603195 - DNA, 19 bp, Mus musculus
  siRNA target sequence for Sptlc1 (NM_009269.2,1006-1024).
ggtcaaggatactgctttt

SEQ ID NO: 603196 - DNA, 19 bp, Mus musculus
  siRNA target sequence for Sptlc1 (NM_009269.2,1081-1099).
gaagagaatccagatattt

SEQ ID NO: 603197 - DNA, 19 bp, Mus musculus
  siRNA target sequence for Sptlc1 (NM_009269.2,1128-1146).
catccataagtctctacaa

SEQ ID NO: 603198 - DNA, 19 bp, Mus musculus
  siRNA target sequence for Sptlc1 (NM_009269.2,1144-1162).
caaggtgtttcgggtttaa

SEQ ID NO: 603199 - DNA, 19 bp, Mus musculus
  siRNA target sequence for Sptlc1 (NM_009269.2,1148-1166).
gtgtttcgggtttaaaagt

SEQ ID NO: 603200 - DNA, 19 bp, Mus musculus
  siRNA target sequence for Sptlc1 (NM_009269.2,1217-1235).
cgggctctcgggagaaaga

SEQ ID NO: 603201 - DNA, 19 bp, Mus musculus
  siRNA target sequence for Sptlc1 (NM_009269.2,1218-1236).
gggctctcgggagaaagat

SEQ ID NO: 603202 - DNA, 19 bp, Mus musculus
  siRNA target sequence for Sptlc1 (NM_009269.2,1242-1260).
gctgcttcaagcaatcgta

SEQ ID NO: 603203 - DNA, 19 bp, Mus musculus
  siRNA target sequence for Sptlc2 (NM_011479.2,133-151).
gtgaggaacgggtacttga

SEQ ID NO: 603204 - DNA, 19 bp, Mus musculus
  siRNA target sequence for Sptlc2 (NM_011479.2,224-242).
gaccgtttaatgaagcttt

SEQ ID NO: 603205 - DNA, 19 bp, Mus musculus
  siRNA target sequence for Sptlc2 (NM_011479.2,227-245).
cgtttaatgaagcttttga

SEQ ID NO: 603206 - DNA, 19 bp, Mus musculus
  siRNA target sequence for Sptlc2 (NM_011479.2,261-279).
ggttgctgtgctcacatat

SEQ ID NO: 603207 - DNA, 19 bp, Mus musculus
  siRNA target sequence for Sptlc2 (NM_011479.2,307-325).
ggatatcttcgagatttct

SEQ ID NO: 603208 - DNA, 19 bp, Mus musculus
  siRNA target sequence for Sptlc2 (NM_011479.2,392-410).
ccttgtatcaggattttga

SEQ ID NO: 603209 - DNA, 19 bp, Mus musculus
  siRNA target sequence for Sptlc2 (NM_011479.2,481-499).
ggagccaaggtggatatca

SEQ ID NO: 603210 - DNA, 19 bp, Mus musculus
  siRNA target sequence for Sptlc2 (NM_011479.2,504-522).
gagaaaatctcatgactat

SEQ ID NO: 603211 - DNA, 19 bp, Mus musculus
  siRNA target sequence for Sptlc2 (NM_011479.2,534-552).
caagtacacagggaatata

SEQ ID NO: 603212 - DNA, 19 bp, Mus musculus
  siRNA target sequence for Sptlc2 (NM_011479.2,570-588).
catgggttcctacaactat

SEQ ID NO: 603213 - DNA, 19 bp, Mus musculus
  siRNA target sequence for Sptlc2 (NM_011479.2,573-591).
gggttcctacaactatctt

SEQ ID NO: 603214 - DNA, 19 bp, Mus musculus
  siRNA target sequence for Sptlc2 (NM_011479.2,578-596).
cctacaactatcttggatt

SEQ ID NO: 603215 - DNA, 19 bp, Mus musculus
  siRNA target sequence for Sptlc2 (NM_011479.2,579-597).
ctacaactatcttggattt

SEQ ID NO: 603216 - DNA, 19 bp, Mus musculus
  siRNA target sequence for Sptlc2 (NM_011479.2,600-618).
gaggaacactggatcatgt

SEQ ID NO: 603217 - DNA, 19 bp, Mus musculus
  siRNA target sequence for Sptlc2 (NM_011479.2,665-683).
gcagcactcgtcaggaaat

SEQ ID NO: 603218 - DNA, 19 bp, Mus musculus
  siRNA target sequence for Sptlc2 (NM_011479.2,666-684).
cagcactcgtcaggaaatt

SEQ ID NO: 603219 - DNA, 19 bp, Mus musculus
  siRNA target sequence for Sptlc2 (NM_011479.2,669-687).
cactcgtcaggaaattgga

SEQ ID NO: 603220 - DNA, 19 bp, Mus musculus
  siRNA target sequence for Sptlc2 (NM_011479.2,786-804).
gaacattcctgctcttgtt

SEQ ID NO: 603221 - DNA, 19 bp, Mus musculus
  siRNA target sequence for Sptlc2 (NM_011479.2,872-890).
caggagcaaccattcgaat

SEQ ID NO: 603222 - DNA, 19 bp, Mus musculus
  siRNA target sequence for Sptlc2 (NM_011479.2,877-895).
gcaaccattcgaatcttca

SEQ ID NO: 603223 - DNA, 19 bp, Mus musculus
  siRNA target sequence for Sptlc2 (NM_011479.2,878-896).
caaccattcgaatcttcaa

SEQ ID NO: 603224 - DNA, 19 bp, Mus musculus
  siRNA target sequence for Sptlc2 (NM_011479.2,900-918).
caacaatatgcaaagctta

SEQ ID NO: 603225 - DNA, 19 bp, Mus musculus
  siRNA target sequence for Sptlc2 (NM_011479.2,910-928).
caaagcttagagaagcttt

SEQ ID NO: 603226 - DNA, 19 bp, Mus musculus
  siRNA target sequence for Sptlc2 (NM_011479.2,949-967).
ggtcagcctcggacaagaa

SEQ ID NO: 603227 - DNA, 19 bp, Mus musculus
  siRNA target sequence for Sptlc2 (NM_011479.2,990-1008).
ccttgtggaaggcatatat

SEQ ID NO: 603228 - DNA, 19 bp, Mus musculus
  siRNA target sequence for Sptlc2 (NM_011479.2,994-1012).
gtggaaggcatatatagta

SEQ ID NO: 603229 - DNA, 19 bp, Mus musculus
  siRNA target sequence for Sptlc2 (NM_011479.2,1120-1138).
gggcgaggcgtggtagatt

SEQ ID NO: 603230 - DNA, 19 bp, Mus musculus
  siRNA target sequence for Sptlc2 (NM_011479.2,1121-1139).
ggcgaggcgtggtagatta

SEQ ID NO: 603231 - DNA, 19 bp, Mus musculus
  siRNA target sequence for Sptlc2 (NM_011479.2,1123-1141).
cgaggcgtggtagattact

SEQ ID NO: 603232 - DNA, 19 bp, Mus musculus
  siRNA target sequence for Sptlc2 (NM_011479.2,1124-1142).
gaggcgtggtagattactt

SEQ ID NO: 603233 - DNA, 19 bp, Mus musculus
  siRNA target sequence for Sptlc2 (NM_011479.2,1153-1171).
cctgaggatgtagatgtta

SEQ ID NO: 603234 - DNA, 19 bp, Mus musculus
  siRNA target sequence for Sptlc2 (NM_011479.2,1168-1186).
gttatgatgggaacattca

SEQ ID NO: 603235 - DNA, 19 bp, Mus musculus
  siRNA target sequence for Sptlc2 (NM_011479.2,1240-1258).
gactacctgcgcacacatt

SEQ ID NO: 603236 - DNA, 19 bp, Mus musculus
  siRNA target sequence for Sptlc2 (NM_011479.2,1242-1260).
ctacctgcgcacacattct

SEQ ID NO: 603237 - DNA, 19 bp, Mus musculus
  siRNA target sequence for Sptlc2 (NM_011479.2,1292-1310).
cgcctgtgatggaacagat

SEQ ID NO: 603238 - DNA, 19 bp, Mus musculus
  siRNA target sequence for Sptlc2 (NM_011479.2,1294-1312).
cctgtgatggaacagatta

SEQ ID NO: 603239 - DNA, 19 bp, Mus musculus
  siRNA target sequence for Sptlc2 (NM_011479.2,1295-1313).
ctgtgatggaacagattat

SEQ ID NO: 603240 - DNA, 19 bp, Mus musculus
  siRNA target sequence for Sptlc2 (NM_011479.2,1347-1365).
caccagtcttggcaaagaa

SEQ ID NO: 603241 - DNA, 19 bp, Mus musculus
  siRNA target sequence for Sptlc2 (NM_011479.2,1518-1536).
gcggaacattggtgtagtt

SEQ ID NO: 603242 - DNA, 19 bp, Mus musculus
  siRNA target sequence for Sptlc2 (NM_011479.2,1520-1538).
ggaacattggtgtagttgt

SEQ ID NO: 603243 - DNA, 19 bp, Mus musculus
  siRNA target sequence for Sptlc2 (NM_011479.2,1550-1568).
ctgctaccccgatcattga

SEQ ID NO: 603244 - DNA, 19 bp, Mus musculus
  siRNA target sequence for Sptlc2 (NM_011479.2,1552-1570).
gctaccccgatcattgagt

SEQ ID NO: 603245 - DNA, 19 bp, Mus musculus
  siRNA target sequence for Sptlc2 (NM_011479.2,1590-1608).
gtcagcagctcataccaaa

SEQ ID NO: 603246 - DNA, 19 bp, Mus musculus
  siRNA target sequence for Sptlc2 (NM_011479.2,1594-1612).
gcagctcataccaaagaaa

SEQ ID NO: 603247 - DNA, 19 bp, Mus musculus
  siRNA target sequence for Sptlc2 (NM_011479.2,1595-1613).
cagctcataccaaagaaat

SEQ ID NO: 603248 - DNA, 19 bp, Mus musculus
  siRNA target sequence for Sptlc2 (NM_011479.2,1707-1725).
ctttgatgagactacctat

SEQ ID NO: 603249 - DNA, 19 bp, Mus musculus
  siRNA target sequence for Dlst (NM_030225.3,94-112).
gcctggggtctccttatgt

SEQ ID NO: 603250 - DNA, 19 bp, Mus musculus
  siRNA target sequence for Dlst (NM_030225.3,139-157).
gaagatggtcattaacagt

SEQ ID NO: 603251 - DNA, 19 bp, Mus musculus
  siRNA target sequence for Dlst (NM_030225.3,192-210).
cggctgtgtgcaagaatga

SEQ ID NO: 603252 - DNA, 19 bp, Mus musculus
  siRNA target sequence for Dlst (NM_030225.3,199-217).
gtgcaagaatgatgtgata

SEQ ID NO: 603253 - DNA, 19 bp, Mus musculus
  siRNA target sequence for Dlst (NM_030225.3,202-220).
caagaatgatgtgataaca

SEQ ID NO: 603254 - DNA, 19 bp, Mus musculus
  siRNA target sequence for Dlst (NM_030225.3,346-364).
ggttccgtcgccagcaaat

SEQ ID NO: 603255 - DNA, 19 bp, Mus musculus
  siRNA target sequence for Dlst (NM_030225.3,391-409).
cgatgggggcaaagttgaa

SEQ ID NO: 603256 - DNA, 19 bp, Mus musculus
  siRNA target sequence for Dlst (NM_030225.3,740-758).
gcaatgctgacgactttca

SEQ ID NO: 603257 - DNA, 19 bp, Mus musculus
  siRNA target sequence for Dlst (NM_030225.3,741-759).
caatgctgacgactttcaa

SEQ ID NO: 603258 - DNA, 19 bp, Mus musculus
  siRNA target sequence for Dlst (NM_030225.3,753-771).
ctttcaatgaggttgacat

SEQ ID NO: 603259 - DNA, 19 bp, Mus musculus
  siRNA target sequence for Dlst (NM_030225.3,763-781).
ggttgacatgagtaacata

SEQ ID NO: 603260 - DNA, 19 bp, Mus musculus
  siRNA target sequence for Dlst (NM_030225.3,795-813).
ctcggcacaaggatgcttt

SEQ ID NO: 603261 - DNA, 19 bp, Mus musculus
  siRNA target sequence for Dlst (NM_030225.3,830-848).
ctcaaattaggcttcatgt

SEQ ID NO: 603262 - DNA, 19 bp, Mus musculus
  siRNA target sequence for Dlst (NM_030225.3,922-940).
caaggaagtggtgtataga

SEQ ID NO: 603263 - DNA, 19 bp, Mus musculus
  siRNA target sequence for Dlst (NM_030225.3,925-943).
ggaagtggtgtatagagat

SEQ ID NO: 603264 - DNA, 19 bp, Mus musculus
  siRNA target sequence for Dlst (NM_030225.3,929-947).
gtggtgtatagagattata

SEQ ID NO: 603265 - DNA, 19 bp, Mus musculus
  siRNA target sequence for Dlst (NM_030225.3,1028-1046).
gatattgaacggaccatta

SEQ ID NO: 603266 - DNA, 19 bp, Mus musculus
  siRNA target sequence for Dlst (NM_030225.3,1186-1204).
gggcatgcacgccatcttt

SEQ ID NO: 603267 - DNA, 19 bp, Mus musculus
  siRNA target sequence for Dlst (NM_030225.3,1188-1206).
gcatgcacgccatctttga

SEQ ID NO: 603268 - DNA, 19 bp, Mus musculus
  siRNA target sequence for 2010300G19Rik (NM_028097.2,227-245).
ccctatgtgacctgtatga

SEQ ID NO: 603269 - DNA, 19 bp, Mus musculus
  siRNA target sequence for 2010300G19Rik (NM_028097.2,228-246).
cctatgtgacctgtatgat

SEQ ID NO: 603270 - DNA, 19 bp, Mus musculus
  siRNA target sequence for 2010300G19Rik (NM_028097.2,229-247).
ctatgtgacctgtatgatt

SEQ ID NO: 603271 - DNA, 19 bp, Mus musculus
  siRNA target sequence for 2010300G19Rik (NM_028097.2,278-296).
caattggaggactatctga

SEQ ID NO: 603272 - DNA, 19 bp, Mus musculus
  siRNA target sequence for 2010300G19Rik (NM_028097.2,286-304).
ggactatctgaattttgca

SEQ ID NO: 603273 - DNA, 19 bp, Mus musculus
  siRNA target sequence for 2010300G19Rik (NM_028097.2,287-305).
gactatctgaattttgcaa

SEQ ID NO: 603274 - DNA, 19 bp, Mus musculus
  siRNA target sequence for 2010300G19Rik (NM_028097.2,319-337).
ggttttcaccccactgata

SEQ ID NO: 603275 - DNA, 19 bp, Mus musculus
  siRNA target sequence for 2010300G19Rik (NM_028097.2,325-343).
caccccactgatactttta

SEQ ID NO: 603276 - DNA, 19 bp, Mus musculus
  siRNA target sequence for 2010300G19Rik (NM_028097.2,327-345).
ccccactgatacttttaat

SEQ ID NO: 603277 - DNA, 19 bp, Mus musculus
  siRNA target sequence for 2010300G19Rik (NM_028097.2,368-386).
cttctctaccttactatta

SEQ ID NO: 603278 - DNA, 19 bp, Mus musculus
  siRNA target sequence for 2010300G19Rik (NM_028097.2,492-510).
cggctgtttggcatggtta

SEQ ID NO: 603279 - DNA, 19 bp, Mus musculus
  siRNA target sequence for 2010300G19Rik (NM_028097.2,501-519).
ggcatggttatgaagttca

SEQ ID NO: 603280 - DNA, 19 bp, Mus musculus
  siRNA target sequence for 2010300G19Rik (NM_028097.2,502-520).
gcatggttatgaagttcat

SEQ ID NO: 603281 - DNA, 19 bp, Mus musculus
  siRNA target sequence for 2010300G19Rik (NM_028097.2,542-560).
ggagctgcacttataattt

SEQ ID NO: 603282 - DNA, 19 bp, Mus musculus
  siRNA target sequence for 2010300G19Rik (NM_028097.2,543-561).
gagctgcacttataatttt

SEQ ID NO: 603283 - DNA, 19 bp, Mus musculus
  siRNA target sequence for 2010300G19Rik (NM_028097.2,570-588).
gagccatccccatagactt

SEQ ID NO: 603284 - DNA, 19 bp, Mus musculus
  siRNA target sequence for 2010300G19Rik (NM_028097.2,573-591).
ccatccccatagactttta

SEQ ID NO: 603285 - DNA, 19 bp, Mus musculus
  siRNA target sequence for 2010300G19Rik (NM_028097.2,625-643).
cagaacttgccgagtagta

SEQ ID NO: 603286 - DNA, 19 bp, Mus musculus
  siRNA target sequence for 2010300G19Rik (NM_028097.2,644-662).
gctgaccactttgtcttta

SEQ ID NO: 603287 - DNA, 19 bp, Mus musculus
  siRNA target sequence for 2010300G19Rik (NM_028097.2,678-696).
gtttattacttgatgtgtt

SEQ ID NO: 603288 - DNA, 19 bp, Mus musculus
  siRNA target sequence for 2010300G19Rik (NM_028097.2,739-757).
gaggagtggtcacttgtta

SEQ ID NO: 603289 - DNA, 19 bp, Mus musculus
  siRNA target sequence for 2010300G19Rik (NM_028097.2,744-762).
gtggtcacttgttagctat

SEQ ID NO: 603290 - DNA, 19 bp, Mus musculus
  siRNA target sequence for 2010300G19Rik (NM_028097.2,776-794).
gttcgagaagccttactta

SEQ ID NO: 603291 - DNA, 19 bp, Mus musculus
  siRNA target sequence for 2010300G19Rik (NM_028097.2,780-798).
gagaagccttacttagtga

SEQ ID NO: 603292 - DNA, 19 bp, Mus musculus
  siRNA target sequence for 2010300G19Rik (NM_028097.2,814-832).
catatggggtaatcgtaaa

SEQ ID NO: 603293 - DNA, 19 bp, Mus musculus
  siRNA target sequence for 2010300G19Rik (NM_028097.2,835-853).
ctttgctcaggttgcaatt

SEQ ID NO: 603294 - DNA, 19 bp, Mus musculus
  siRNA target sequence for 2010300G19Rik (NM_028097.2,880-898).
gtttacacaaaatattcga

SEQ ID NO: 603295 - DNA, 19 bp, Mus musculus
  siRNA target sequence for 2010300G19Rik (NM_028097.2,914-932).
cttggaggcacaagattat

SEQ ID NO: 603296 - DNA, 19 bp, Mus musculus
  siRNA target sequence for 2010300G19Rik (NM_028097.2,920-938).
ggcacaagattatttaagt

SEQ ID NO: 603297 - DNA, 19 bp, Mus musculus
  siRNA target sequence for 2010300G19Rik (NM_028097.2,980-998).
ggaggttttcctgtaaagt

SEQ ID NO: 603298 - DNA, 19 bp, Mus musculus
  siRNA target sequence for 2010300G19Rik (NM_028097.2,981-999).
gaggttttcctgtaaagtt

SEQ ID NO: 603299 - DNA, 19 bp, Mus musculus
  siRNA target sequence for 2010300G19Rik (NM_028097.2,1025-1043).
ccatatgacccaaaggtaa

SEQ ID NO: 603300 - DNA, 19 bp, Mus musculus
  siRNA target sequence for 2010300G19Rik (NM_028097.2,1066-1084).
gaccaagaatgctgttcaa

SEQ ID NO: 603301 - DNA, 19 bp, Mus musculus
  siRNA target sequence for 2010300G19Rik (NM_028097.2,1135-1153).
gctggaccgctttcataaa

SEQ ID NO: 603302 - DNA, 19 bp, Mus musculus
  siRNA target sequence for 4933408F15 (NM_172715.1,671-689).
cttctgtgggtattatcca

SEQ ID NO: 603303 - DNA, 19 bp, Mus musculus
  siRNA target sequence for 4933408F15 (NM_172715.1,678-696).
gggtattatccaaagagat

SEQ ID NO: 603304 - DNA, 19 bp, Mus musculus
  siRNA target sequence for 4933408F15 (NM_172715.1,747-765).
gctctctgatgtgttctat

SEQ ID NO: 603305 - DNA, 19 bp, Mus musculus
  siRNA target sequence for 4933408F15 (NM_172715.1,748-766).
ctctctgatgtgttctatt

SEQ ID NO: 603306 - DNA, 19 bp, Mus musculus
  siRNA target sequence for 4933408F15 (NM_172715.1,822-840).
ctccgaagagctagtatca

SEQ ID NO: 603307 - DNA, 19 bp, Mus musculus
  siRNA target sequence for 4933408F15 (NM_172715.1,846-864).
cctcctcacacgaaccaat

SEQ ID NO: 603308 - DNA, 19 bp, Mus musculus
  siRNA target sequence for 4933408F15 (NM_172715.1,850-868).
ctcacacgaaccaatgtca

SEQ ID NO: 603309 - DNA, 19 bp, Mus musculus
  siRNA target sequence for 4933408F15 (NM_172715.1,854-872).
cacgaaccaatgtcaactt

SEQ ID NO: 603310 - DNA, 19 bp, Mus musculus
  siRNA target sequence for 4933408F15 (NM_172715.1,857-875).
gaaccaatgtcaactttca

SEQ ID NO: 603311 - DNA, 19 bp, Mus musculus
  siRNA target sequence for 4933408F15 (NM_172715.1,916-934).
gtcctagtgcgctattgct

SEQ ID NO: 603312 - DNA, 19 bp, Mus musculus
  siRNA target sequence for 4933408F15 (NM_172715.1,951-969).
ggtcaccctggctttcatt

SEQ ID NO: 603313 - DNA, 19 bp, Mus musculus
  siRNA target sequence for 4933408F15 (NM_172715.1,1093-1111).
ggcaccatccattaccata

SEQ ID NO: 603314 - DNA, 19 bp, Mus musculus
  siRNA target sequence for 4933408F15 (NM_172715.1,1094-1112).
gcaccatccattaccataa

SEQ ID NO: 603315 - DNA, 19 bp, Mus musculus
  siRNA target sequence for 4933408F15 (NM_172715.1,1097-1115).
ccatccattaccataacaa

SEQ ID NO: 603316 - DNA, 19 bp, Mus musculus
  siRNA target sequence for 4933408F15 (NM_172715.1,1229-1247).
gattgatggggatcattca

SEQ ID NO: 603317 - DNA, 19 bp, Mus musculus
  siRNA target sequence for 4933408F15 (NM_172715.1,1280-1298).
ggtttgagcgctcagaaat

SEQ ID NO: 603318 - DNA, 19 bp, Mus musculus
  siRNA target sequence for 4933408F15 (NM_172715.1,1496-1514).
ggaacagtagtaaatacaa

SEQ ID NO: 603319 - DNA, 19 bp, Mus musculus
  siRNA target sequence for 4933408F15 (NM_172715.1,1523-1541).
gctacctgcttcgaatcat

SEQ ID NO: 603320 - DNA, 19 bp, Mus musculus
  siRNA target sequence for 4933408F15 (NM_172715.1,1617-1635).
gtttgcaaacagggtaaaa

SEQ ID NO: 603321 - DNA, 19 bp, Mus musculus
  siRNA target sequence for 4933408F15 (NM_172715.1,1723-1741).
gaacaacagaagaattaca

SEQ ID NO: 603322 - DNA, 19 bp, Mus musculus
  siRNA target sequence for Acaa2 (NM_177470.2,130-148).
cgatttaactgaatttgct

SEQ ID NO: 603323 - DNA, 19 bp, Mus musculus
  siRNA target sequence for Acaa2 (NM_177470.2,514-532).
gctgcccatgggaatgact

SEQ ID NO: 603324 - DNA, 19 bp, Mus musculus
  siRNA target sequence for Acaa2 (NM_177470.2,545-563).
gctgcaaaatacaacataa

SEQ ID NO: 603325 - DNA, 19 bp, Mus musculus
  siRNA target sequence for Acaa2 (NM_177470.2,622-640).
cgaggctggctacttcaat

SEQ ID NO: 603326 - DNA, 19 bp, Mus musculus
  siRNA target sequence for Acaa2 (NM_177470.2,743-761).
ctcccgtccgtgttcaaga

SEQ ID NO: 603327 - DNA, 19 bp, Mus musculus
  siRNA target sequence for Acaa2 (NM_177470.2,745-763).
cccgtccgtgttcaagaaa

SEQ ID NO: 603328 - DNA, 19 bp, Mus musculus
  siRNA target sequence for Acaa2 (NM_177470.2,747-765).
cgtccgtgttcaagaaaga

SEQ ID NO: 603329 - DNA, 19 bp, Mus musculus
  siRNA target sequence for Acaa2 (NM_177470.2,831-849).
gcgaagatgctgtcaaaaa

SEQ ID NO: 603330 - DNA, 19 bp, Mus musculus
  siRNA target sequence for Acaa2 (NM_177470.2,832-850).
cgaagatgctgtcaaaaaa

SEQ ID NO: 603331 - DNA, 19 bp, Mus musculus
  siRNA target sequence for Acaa2 (NM_177470.2,836-854).
gatgctgtcaaaaaacata

SEQ ID NO: 603332 - DNA, 19 bp, Mus musculus
  siRNA target sequence for Acaa2 (NM_177470.2,894-912).
ccggatgcgatcctactat

SEQ ID NO: 603333 - DNA, 19 bp, Mus musculus
  siRNA target sequence for Acaa2 (NM_177470.2,897-915).
gatgcgatcctactatcat

SEQ ID NO: 603334 - DNA, 19 bp, Mus musculus
  siRNA target sequence for Acaa2 (NM_177470.2,924-942).
gtccagtccctgctatcaa

SEQ ID NO: 603335 - DNA, 19 bp, Mus musculus
  siRNA target sequence for Acaa2 (NM_177470.2,971-989).
cttaaggacatggatttga

SEQ ID NO: 603336 - DNA, 19 bp, Mus musculus
  siRNA target sequence for Acaa2 (NM_177470.2,1199-1217).
caaggcatcgccttgatca

SEQ ID NO: 603337 - DNA, 19 bp, Mus musculus
  siRNA target sequence for Agpat4 (NM_026644.1,322-340).
gtcatctggcccatcaaca

SEQ ID NO: 603338 - DNA, 19 bp, Mus musculus
  siRNA target sequence for Agpat4 (NM_026644.1,460-478).
ccccactacgggaaggaaa

SEQ ID NO: 603339 - DNA, 19 bp, Mus musculus
  siRNA target sequence for Agpat4 (NM_026644.1,461-479).
cccactacgggaaggaaaa

SEQ ID NO: 603340 - DNA, 19 bp, Mus musculus
  siRNA target sequence for Agpat4 (NM_026644.1,482-500).
ccatcgtggtcctcaatca

SEQ ID NO: 603341 - DNA, 19 bp, Mus musculus
  siRNA target sequence for Agpat4 (NM_026644.1,499-517).
cacaagtttgagattgact

SEQ ID NO: 603342 - DNA, 19 bp, Mus musculus
  siRNA target sequence for Agpat4 (NM_026644.1,591-609).
ggcttatgtcccaatcatt

SEQ ID NO: 603343 - DNA, 19 bp, Mus musculus
  siRNA target sequence for Agpat4 (NM_026644.1,702-720).
ggactacccagagaagtat

SEQ ID NO: 603344 - DNA, 19 bp, Mus musculus
  siRNA target sequence for Agpat4 (NM_026644.1,833-851).
gcaccaaaggctttgctat

SEQ ID NO: 603345 - DNA, 19 bp, Mus musculus
  siRNA target sequence for Agpat4 (NM_026644.1,877-895).
gtcccagctgtatatgact

SEQ ID NO: 603346 - DNA, 19 bp, Mus musculus
  siRNA target sequence for Agpat4 (NM_026644.1,892-910).
gactgtacactcaatttca

SEQ ID NO: 603347 - DNA, 19 bp, Mus musculus
  siRNA target sequence for Agpat4 (NM_026644.1,929-947).
cactgctgggagtcttaaa

SEQ ID NO: 603348 - DNA, 19 bp, Mus musculus
  siRNA target sequence for Agpat4 (NM_026644.1,933-951).
gctgggagtcttaaatgga

SEQ ID NO: 603349 - DNA, 19 bp, Mus musculus
  siRNA target sequence for Agpat4 (NM_026644.1,1135-1153).
ctggtcaactggttgttct

SEQ ID NO: 603350 - DNA, 19 bp, Mus musculus
  siRNA target sequence for Alas1 (NM_020559.1,109-127).
cgccgatgcccattcttat

SEQ ID NO: 603351 - DNA, 19 bp, Mus musculus
  siRNA target sequence for Alas1 (NM_020559.1,161-179).
gaaagtctctgttgttcta

SEQ ID NO: 603352 - DNA, 19 bp, Mus musculus
  siRNA target sequence for Alas1 (NM_020559.1,495-513).
ggacgtgcaggaaatgcat

SEQ ID NO: 603353 - DNA, 19 bp, Mus musculus
  siRNA target sequence for Alas1 (NM_020559.1,550-568).
cccagcctggttaatgtga

SEQ ID NO: 603354 - DNA, 19 bp, Mus musculus
  siRNA target sequence for Alas1 (NM_020559.1,649-667).
catcttcttcaggataact

SEQ ID NO: 603355 - DNA, 19 bp, Mus musculus
  siRNA target sequence for Alas1 (NM_020559.1,739-757).
catacctaccgagttttta

SEQ ID NO: 603356 - DNA, 19 bp, Mus musculus
  siRNA target sequence for Alas1 (NM_020559.1,836-854).
cggtctggtgcagtaatga

SEQ ID NO: 603357 - DNA, 19 bp, Mus musculus
  siRNA target sequence for Alas1 (NM_020559.1,929-947).
ctgggggaactaggaatat

SEQ ID NO: 603358 - DNA, 19 bp, Mus musculus
  siRNA target sequence for Alas1 (NM_020559.1,931-949).
gggggaactaggaatattt

SEQ ID NO: 603359 - DNA, 19 bp, Mus musculus
  siRNA target sequence for Alas1 (NM_020559.1,933-951).
gggaactaggaatatttct

SEQ ID NO: 603360 - DNA, 19 bp, Mus musculus
  siRNA target sequence for Alas1 (NM_020559.1,993-1011).
cgacctccacggcaaagat

SEQ ID NO: 603361 - DNA, 19 bp, Mus musculus
  siRNA target sequence for Alas1 (NM_020559.1,1077-1095).
gatgccaggctgtgaaatt

SEQ ID NO: 603362 - DNA, 19 bp, Mus musculus
  siRNA target sequence for Alas1 (NM_020559.1,1143-1161).
cagtcgagtgccaaaatat

SEQ ID NO: 603363 - DNA, 19 bp, Mus musculus
  siRNA target sequence for Alas1 (NM_020559.1,1145-1163).
gtcgagtgccaaaatatat

SEQ ID NO: 603364 - DNA, 19 bp, Mus musculus
  siRNA target sequence for Alas1 (NM_020559.1,1147-1165).
cgagtgccaaaatatatct

SEQ ID NO: 603365 - DNA, 19 bp, Mus musculus
  siRNA target sequence for Alas1 (NM_020559.1,1169-1187).
gccacaatgacgttaacca

SEQ ID NO: 603366 - DNA, 19 bp, Mus musculus
  siRNA target sequence for Alas1 (NM_020559.1,1170-1188).
ccacaatgacgttaaccat

SEQ ID NO: 603367 - DNA, 19 bp, Mus musculus
  siRNA target sequence for Alas1 (NM_020559.1,1224-1242).
ccccaagatagtagcattt

SEQ ID NO: 603368 - DNA, 19 bp, Mus musculus
  siRNA target sequence for Alas1 (NM_020559.1,1289-1307).
gtgacgtggcccatgagtt

SEQ ID NO: 603369 - DNA, 19 bp, Mus musculus
  siRNA target sequence for Alas1 (NM_020559.1,1384-1402).
gatggcgtcatgccaaaaa

SEQ ID NO: 603370 - DNA, 19 bp, Mus musculus
  siRNA target sequence for Alas1 (NM_020559.1,1388-1406).
gcgtcatgccaaaaatgga

SEQ ID NO: 603371 - DNA, 19 bp, Mus musculus
  siRNA target sequence for Alas1 (NM_020559.1,1413-1431).
ctctgggacgcttggtaaa

SEQ ID NO: 603372 - DNA, 19 bp, Mus musculus
  siRNA target sequence for Alas1 (NM_020559.1,1603-1621).
cagcaccagcgaaatgtca

SEQ ID NO: 603373 - DNA, 19 bp, Mus musculus
  siRNA target sequence for Alas1 (NM_020559.1,1734-1752).
gttgatgaccaggcataat

SEQ ID NO: 603374 - DNA, 19 bp, Mus musculus
  siRNA target sequence for Alas1 (NM_020559.1,1934-1952).
ggaggcccctgcactttga

SEQ ID NO: 603375 - DNA, 19 bp, Mus musculus
  siRNA target sequence for Alas1 (NM_020559.1,1935-1953).
gaggcccctgcactttgaa

SEQ ID NO: 603376 - DNA, 19 bp, Mus musculus
  siRNA target sequence for Alas2 (NM_009653.1,140-158).
ctaccagttcctatttagt

SEQ ID NO: 603377 - DNA, 19 bp, Mus musculus
  siRNA target sequence for Alas2 (NM_009653.1,143-161).
ccagttcctatttagtatt

SEQ ID NO: 603378 - DNA, 19 bp, Mus musculus
  siRNA target sequence for Alas2 (NM_009653.1,146-164).
gttcctatttagtattgga

SEQ ID NO: 603379 - DNA, 19 bp, Mus musculus
  siRNA target sequence for Alas2 (NM_009653.1,189-207).
ggaccaacctgttctcaaa

SEQ ID NO: 603380 - DNA, 19 bp, Mus musculus
  siRNA target sequence for Alas2 (NM_009653.1,193-211).
caacctgttctcaaatcca

SEQ ID NO: 603381 - DNA, 19 bp, Mus musculus
  siRNA target sequence for Alas2 (NM_009653.1,199-217).
gttctcaaatccatcttaa

SEQ ID NO: 603382 - DNA, 19 bp, Mus musculus
  siRNA target sequence for Alas2 (NM_009653.1,336-354).
gaggatgtcaagactttca

SEQ ID NO: 603383 - DNA, 19 bp, Mus musculus
  siRNA target sequence for Alas2 (NM_009653.1,339-357).
gatgtcaagactttcaaga

SEQ ID NO: 603384 - DNA, 19 bp, Mus musculus
  siRNA target sequence for Alas2 (NM_009653.1,385-403).
ccacccgaagccattcatt

SEQ ID NO: 603385 - DNA, 19 bp, Mus musculus
  siRNA target sequence for Alas2 (NM_009653.1,386-404).
cacccgaagccattcattt

SEQ ID NO: 603386 - DNA, 19 bp, Mus musculus
  siRNA target sequence for Alas2 (NM_009653.1,390-408).
cgaagccattcatttccta

SEQ ID NO: 603387 - DNA, 19 bp, Mus musculus
  siRNA target sequence for Alas2 (NM_009653.1,446-464).
ccacctgattcagaacaat

SEQ ID NO: 603388 - DNA, 19 bp, Mus musculus
  siRNA target sequence for Alas2 (NM_009653.1,475-493).
gccaggctttcggttatga

SEQ ID NO: 603389 - DNA, 19 bp, Mus musculus
  siRNA target sequence for Alas2 (NM_009653.1,481-499).
ctttcggttatgaccaatt

SEQ ID NO: 603390 - DNA, 19 bp, Mus musculus
  siRNA target sequence for Alas2 (NM_009653.1,486-504).
ggttatgaccaatttttca

SEQ ID NO: 603391 - DNA, 19 bp, Mus musculus
  siRNA target sequence for Alas2 (NM_009653.1,631-649).
ctgtttggtgtagtaatga

SEQ ID NO: 603392 - DNA, 19 bp, Mus musculus
  siRNA target sequence for Alas2 (NM_009653.1,648-666).
gactatttgggcataagca

SEQ ID NO: 603393 - DNA, 19 bp, Mus musculus
  siRNA target sequence for Alas2 (NM_009653.1,724-742).
ctgggggcactcgcaatat

SEQ ID NO: 603394 - DNA, 19 bp, Mus musculus
  siRNA target sequence for Alas2 (NM_009653.1,726-744).
gggggcactcgcaatatct

SEQ ID NO: 603395 - DNA, 19 bp, Mus musculus
  siRNA target sequence for Alas2 (NM_009653.1,728-746).
gggcactcgcaatatctca

SEQ ID NO: 603396 - DNA, 19 bp, Mus musculus
  siRNA target sequence for Alas2 (NM_009653.1,743-761).
ctcaggtaccagcaagttt

SEQ ID NO: 603397 - DNA, 19 bp, Mus musculus
  siRNA target sequence for Alas2 (NM_009653.1,748-766).
gtaccagcaagtttcatgt

SEQ ID NO: 603398 - DNA, 19 bp, Mus musculus
  siRNA target sequence for Alas2 (NM_009653.1,787-805).
ctgaactacaccagaaaga

SEQ ID NO: 603399 - DNA, 19 bp, Mus musculus
  siRNA target sequence for Alas2 (NM_009653.1,789-807).
gaactacaccagaaagact

SEQ ID NO: 603400 - DNA, 19 bp, Mus musculus
  siRNA target sequence for Alas2 (NM_009653.1,876-894).
ccagggtgtgagatctact

SEQ ID NO: 603401 - DNA, 19 bp, Mus musculus
  siRNA target sequence for Alas2 (NM_009653.1,893-911).
ctcagatgcaggcaatcat

SEQ ID NO: 603402 - DNA, 19 bp, Mus musculus
  siRNA target sequence for Alas2 (NM_009653.1,1008-1026).
gatcccaagacaccaaaaa

SEQ ID NO: 603403 - DNA, 19 bp, Mus musculus
  siRNA target sequence for Alas2 (NM_009653.1,1111-1129).
ccctgaccttcgtagatga

SEQ ID NO: 603404 - DNA, 19 bp, Mus musculus
  siRNA target sequence for Alas2 (NM_009653.1,1172-1190).
cggggagcgtgatggaatt

SEQ ID NO: 603405 - DNA, 19 bp, Mus musculus
  siRNA target sequence for Alas2 (NM_009653.1,1173-1191).
ggggagcgtgatggaatta

SEQ ID NO: 603406 - DNA, 19 bp, Mus musculus
  siRNA target sequence for Alas2 (NM_009653.1,1174-1192).
gggagcgtgatggaattat

SEQ ID NO: 603407 - DNA, 19 bp, Mus musculus
  siRNA target sequence for Alas2 (NM_009653.1,1237-1255).
gttgcgtcggtggctatat

SEQ ID NO: 603408 - DNA, 19 bp, Mus musculus
  siRNA target sequence for Alas2 (NM_009653.1,1337-1355).
gctctctggggctctagaa

SEQ ID NO: 603409 - DNA, 19 bp, Mus musculus
  siRNA target sequence for Alas2 (NM_009653.1,1401-1419).
gcacaccagcgcaatgtca

SEQ ID NO: 603410 - DNA, 19 bp, Mus musculus
  siRNA target sequence for Alas2 (NM_009653.1,1402-1420).
cacaccagcgcaatgtcaa

SEQ ID NO: 603411 - DNA, 19 bp, Mus musculus
  siRNA target sequence for Alas2 (NM_009653.1,1407-1425).
cagcgcaatgtcaaacaca

SEQ ID NO: 603412 - DNA, 19 bp, Mus musculus
  siRNA target sequence for Alas2 (NM_009653.1,1487-1505).
catcagggtgggtaatgca

SEQ ID NO: 603413 - DNA, 19 bp, Mus musculus
  siRNA target sequence for Alas2 (NM_009653.1,1735-1753).
gtcctgtgcactttgaact

SEQ ID NO: 603414 - DNA, 19 bp, Mus musculus
  siRNA target sequence for Alas2 (NM_009653.1,1737-1755).
cctgtgcactttgaactta

SEQ ID NO: 603415 - DNA, 19 bp, Mus musculus
  siRNA target sequence for Alas2 (NM_009653.1,1738-1756).
ctgtgcactttgaacttat

SEQ ID NO: 603416 - DNA, 19 bp, Mus musculus
  siRNA target sequence for Ate1 (NM_013799.2,101-119).
cacctagccttgtagagta

SEQ ID NO: 603417 - DNA, 19 bp, Mus musculus
  siRNA target sequence for Ate1 (NM_013799.2,213-231).
ggattatcaggatcttata

SEQ ID NO: 603418 - DNA, 19 bp, Mus musculus
  siRNA target sequence for Ate1 (NM_013799.2,251-269).
gtgggaaatatgtgtacaa

SEQ ID NO: 603419 - DNA, 19 bp, Mus musculus
  siRNA target sequence for Ate1 (NM_013799.2,271-289).
cctgtcatggatcaaacat

SEQ ID NO: 603420 - DNA, 19 bp, Mus musculus
  siRNA target sequence for Ate1 (NM_013799.2,295-313).
cctcagtatacaataaggt

SEQ ID NO: 603421 - DNA, 19 bp, Mus musculus
  siRNA target sequence for Ate1 (NM_013799.2,305-323).
caataaggtgtcatccttt

SEQ ID NO: 603422 - DNA, 19 bp, Mus musculus
  siRNA target sequence for Ate1 (NM_013799.2,311-329).
ggtgtcatcctttacagtt

SEQ ID NO: 603423 - DNA, 19 bp, Mus musculus
  siRNA target sequence for Ate1 (NM_013799.2,327-345).
gtttcagccatcaaaatct

SEQ ID NO: 603424 - DNA, 19 bp, Mus musculus
  siRNA target sequence for Ate1 (NM_013799.2,338-356).
caaaatctcacaagaaagt

SEQ ID NO: 603425 - DNA, 19 bp, Mus musculus
  siRNA target sequence for Ate1 (NM_013799.2,393-411).
gatctcgaaaggcaattgt

SEQ ID NO: 603426 - DNA, 19 bp, Mus musculus
  siRNA target sequence for Ate1 (NM_013799.2,448-466).
gttgacggtgactttgcat

SEQ ID NO: 603427 - DNA, 19 bp, Mus musculus
  siRNA target sequence for Ate1 (NM_013799.2,453-471).
cggtgactttgcattaatt

SEQ ID NO: 603428 - DNA, 19 bp, Mus musculus
  siRNA target sequence for Ate1 (NM_013799.2,454-472).
ggtgactttgcattaatta

SEQ ID NO: 603429 - DNA, 19 bp, Mus musculus
  siRNA target sequence for Ate1 (NM_013799.2,474-492).
caagctggatataaagtgt

SEQ ID NO: 603430 - DNA, 19 bp, Mus musculus
  siRNA target sequence for Ate1 (NM_013799.2,572-590).
ggtctaaagaattcattca

SEQ ID NO: 603431 - DNA, 19 bp, Mus musculus
  siRNA target sequence for Ate1 (NM_013799.2,618-636).
ctctggtgaaccatcacat

SEQ ID NO: 603432 - DNA, 19 bp, Mus musculus
  siRNA target sequence for Ate1 (NM_013799.2,623-641).
gtgaaccatcacatccaat

SEQ ID NO: 603433 - DNA, 19 bp, Mus musculus
  siRNA target sequence for Ate1 (NM_013799.2,632-650).
cacatccaatcaaagttca

SEQ ID NO: 603434 - DNA, 19 bp, Mus musculus
  siRNA target sequence for Ate1 (NM_013799.2,691-709).
cctccatgtcggaaagcaa

SEQ ID NO: 603435 - DNA, 19 bp, Mus musculus
  siRNA target sequence for Ate1 (NM_013799.2,788-806).
cagtctgtttgttaccaaa

SEQ ID NO: 603436 - DNA, 19 bp, Mus musculus
  siRNA target sequence for Ate1 (NM_013799.2,886-904).
gtgagggtggtaagatctt

SEQ ID NO: 603437 - DNA, 19 bp, Mus musculus
  siRNA target sequence for Ate1 (NM_013799.2,1106-1124).
ggctcgatgggaagatcat

SEQ ID NO: 603438 - DNA, 19 bp, Mus musculus
  siRNA target sequence for Ate1 (NM_013799.2,1176-1194).
ctactacgatcctgattat

SEQ ID NO: 603439 - DNA, 19 bp, Mus musculus
  siRNA target sequence for Ate1 (NM_013799.2,1182-1200).
cgatcctgattattcattt

SEQ ID NO: 603440 - DNA, 19 bp, Mus musculus
  siRNA target sequence for Ate1 (NM_013799.2,1186-1204).
cctgattattcatttctgt

SEQ ID NO: 603441 - DNA, 19 bp, Mus musculus
  siRNA target sequence for Ate1 (NM_013799.2,1209-1227).
gggtgtctattcagcatta

SEQ ID NO: 603442 - DNA, 19 bp, Mus musculus
  siRNA target sequence for Ate1 (NM_013799.2,1265-1283).
catcgcaactcagctatta

SEQ ID NO: 603443 - DNA, 19 bp, Mus musculus
  siRNA target sequence for Ate1 (NM_013799.2,1268-1286).
cgcaactcagctattatta

SEQ ID NO: 603444 - DNA, 19 bp, Mus musculus
  siRNA target sequence for Ate1 (NM_013799.2,1269-1287).
gcaactcagctattattat

SEQ ID NO: 603445 - DNA, 19 bp, Mus musculus
  siRNA target sequence for Ate1 (NM_013799.2,1270-1288).
caactcagctattattata

SEQ ID NO: 603446 - DNA, 19 bp, Mus musculus
  siRNA target sequence for Ate1 (NM_013799.2,1307-1325).
cctgtcccaagatgagata

SEQ ID NO: 603447 - DNA, 19 bp, Mus musculus
  siRNA target sequence for Ate1 (NM_013799.2,1310-1328).
gtcccaagatgagatacaa

SEQ ID NO: 603448 - DNA, 19 bp, Mus musculus
  siRNA target sequence for Ate1 (NM_013799.2,1320-1338).
gagatacaagggtcaatat

SEQ ID NO: 603449 - DNA, 19 bp, Mus musculus
  siRNA target sequence for Ate1 (NM_013799.2,1460-1478).
gacgcagtaaggaacttga

SEQ ID NO: 603450 - DNA, 19 bp, Mus musculus
  siRNA target sequence for Ate1 (NM_013799.2,1480-1498).
cgactaagggtgtttcaca

SEQ ID NO: 603451 - DNA, 19 bp, Mus musculus
  siRNA target sequence for Ate1 (NM_013799.2,1508-1526).
ccatgccttacggtgttta

SEQ ID NO: 603452 - DNA, 19 bp, Mus musculus
  siRNA target sequence for Ate1 (NM_013799.2,1509-1527).
catgccttacggtgtttat

SEQ ID NO: 603453 - DNA, 19 bp, Mus musculus
  siRNA target sequence for Ate1 (NM_013799.2,1513-1531).
ccttacggtgtttataaga

SEQ ID NO: 603454 - DNA, 19 bp, Mus musculus
  siRNA target sequence for Ate1 (NM_013799.2,1514-1532).
cttacggtgtttataagaa

SEQ ID NO: 603455 - DNA, 19 bp, Mus musculus
  siRNA target sequence for Ate1 (NM_013799.2,1561-1579).
ggtgtgctggagtatgcaa

SEQ ID NO: 603456 - DNA, 19 bp, Mus musculus
  siRNA target sequence for AU041707 (NM_018743.2,988-1006).
cgaaagctctacatgaaaa

SEQ ID NO: 603457 - DNA, 19 bp, Mus musculus
  siRNA target sequence for AU041707 (NM_018743.2,1025-1043).
cgtgggccaccctgagaat

SEQ ID NO: 603458 - DNA, 19 bp, Mus musculus
  siRNA target sequence for AU041707 (NM_018743.2,1085-1103).
cctacaccaacggaatcat

SEQ ID NO: 603459 - DNA, 19 bp, Mus musculus
  siRNA target sequence for AU041707 (NM_018743.2,1091-1109).
ccaacggaatcattgcaaa

SEQ ID NO: 603460 - DNA, 19 bp, Mus musculus
  siRNA target sequence for AU041707 (NM_018743.2,1095-1113).
cggaatcattgcaaaagat

SEQ ID NO: 603461 - DNA, 19 bp, Mus musculus
  siRNA target sequence for AU041707 (NM_018743.2,1147-1165).
cgtcgaagtggtagtagta

SEQ ID NO: 603462 - DNA, 19 bp, Mus musculus
  siRNA target sequence for AU041707 (NM_018743.2,1148-1166).
gtcgaagtggtagtagtaa

SEQ ID NO: 603463 - DNA, 19 bp, Mus musculus
  siRNA target sequence for AU041707 (NM_018743.2,1249-1267).
gaagtgacaaagagattct

SEQ ID NO: 603464 - DNA, 19 bp, Mus musculus
  siRNA target sequence for AU041707 (NM_018743.2,1293-1311).
cttgctgagcagaaccaat

SEQ ID NO: 603465 - DNA, 19 bp, Mus musculus
  siRNA target sequence for AU041707 (NM_018743.2,1301-1319).
gcagaaccaattacaactt

SEQ ID NO: 603466 - DNA, 19 bp, Mus musculus
  siRNA target sequence for AU041707 (NM_018743.2,1307-1325).
ccaattacaacttccaata

SEQ ID NO: 603467 - DNA, 19 bp, Mus musculus
  siRNA target sequence for AU041707 (NM_018743.2,1363-1381).
gtgctgattcggtattgct

SEQ ID NO: 603468 - DNA, 19 bp, Mus musculus
  siRNA target sequence for AU041707 (NM_018743.2,1428-1446).
cttggtagtgggaactact

SEQ ID NO: 603469 - DNA, 19 bp, Mus musculus
  siRNA target sequence for AU041707 (NM_018743.2,1468-1486).
gggagatttaaggagtttt

SEQ ID NO: 603470 - DNA, 19 bp, Mus musculus
  siRNA target sequence for AU041707 (NM_018743.2,1531-1549).
gccctgacggccatcatta

SEQ ID NO: 603471 - DNA, 19 bp, Mus musculus
  siRNA target sequence for AU041707 (NM_018743.2,1602-1620).
ccatacatcccccattgat

SEQ ID NO: 603472 - DNA, 19 bp, Mus musculus
  siRNA target sequence for AU041707 (NM_018743.2,1607-1625).
catcccccattgatgtgat

SEQ ID NO: 603473 - DNA, 19 bp, Mus musculus
  siRNA target sequence for AU041707 (NM_018743.2,1676-1694).
gccttatgggtgtgattca

SEQ ID NO: 603474 - DNA, 19 bp, Mus musculus
  siRNA target sequence for AU041707 (NM_018743.2,1780-1798).
gagcatgtccaggataaaa

SEQ ID NO: 603475 - DNA, 19 bp, Mus musculus
  siRNA target sequence for AU041707 (NM_018743.2,1825-1843).
gaaggaacctgcatcaata

SEQ ID NO: 603476 - DNA, 19 bp, Mus musculus
  siRNA target sequence for AU041707 (NM_018743.2,1901-1919).
ctgtggctatcaagtatga

SEQ ID NO: 603477 - DNA, 19 bp, Mus musculus
  siRNA target sequence for AU041707 (NM_018743.2,1911-1929).
caagtatgaccctcagttt

SEQ ID NO: 603478 - DNA, 19 bp, Mus musculus
  siRNA target sequence for AU041707 (NM_018743.2,2170-2188).
gagcagcagaagctatata

SEQ ID NO: 603479 - DNA, 19 bp, Mus musculus
  siRNA target sequence for AU041707 (NM_018743.2,2193-2211).
gatgatagtcggaaaccat

SEQ ID NO: 603480 - DNA, 19 bp, Mus musculus
  siRNA target sequence for Aup1 (NM_007517.1,85-103).
ccggagcggctctttgact

SEQ ID NO: 603481 - DNA, 19 bp, Mus musculus
  siRNA target sequence for Aup1 (NM_007517.1,321-339).
ccgcgtcagggtccttatt

SEQ ID NO: 603482 - DNA, 19 bp, Mus musculus
  siRNA target sequence for Aup1 (NM_007517.1,342-360).
caaccacgtaacacctttt

SEQ ID NO: 603483 - DNA, 19 bp, Mus musculus
  siRNA target sequence for Aup1 (NM_007517.1,353-371).
caccttttgaccacaacat

SEQ ID NO: 603484 - DNA, 19 bp, Mus musculus
  siRNA target sequence for Aup1 (NM_007517.1,392-410).
gtagcacccctctactcaa

SEQ ID NO: 603485 - DNA, 19 bp, Mus musculus
  siRNA target sequence for Aup1 (NM_007517.1,396-414).
cacccctctactcaatagt

SEQ ID NO: 603486 - DNA, 19 bp, Mus musculus
  siRNA target sequence for Aup1 (NM_007517.1,475-493).
gtggagtcactcaagaaat

SEQ ID NO: 603487 - DNA, 19 bp, Mus musculus
  siRNA target sequence for Aup1 (NM_007517.1,480-498).
gtcactcaagaaattctgt

SEQ ID NO: 603488 - DNA, 19 bp, Mus musculus
  siRNA target sequence for Aup1 (NM_007517.1,568-586).
gggctgctgcgtttcagtt

SEQ ID NO: 603489 - DNA, 19 bp, Mus musculus
  siRNA target sequence for Aup1 (NM_007517.1,582-600).
cagttcgtggccattttct

SEQ ID NO: 603490 - DNA, 19 bp, Mus musculus
  siRNA target sequence for Aup1 (NM_007517.1,584-602).
gttcgtggccattttctat

SEQ ID NO: 603491 - DNA, 19 bp, Mus musculus
  siRNA target sequence for Aup1 (NM_007517.1,710-728).
ctttcacggtgtatcaagt

SEQ ID NO: 603492 - DNA, 19 bp, Mus musculus
  siRNA target sequence for Aup1 (NM_007517.1,777-795).
gtttgcgctccgtgtacaa

SEQ ID NO: 603493 - DNA, 19 bp, Mus musculus
  siRNA target sequence for Aup1 (NM_007517.1,897-915).
gtcagtgcagtcttctttt

SEQ ID NO: 603494 - DNA, 19 bp, Mus musculus
  siRNA target sequence for Aup1 (NM_007517.1,984-1002).
gccccatgtgccattgaat

SEQ ID NO: 603495 - DNA, 19 bp, Mus musculus
  siRNA target sequence for Aup1 (NM_007517.1,986-1004).
cccatgtgccattgaatgt

SEQ ID NO: 603496 - DNA, 19 bp, Mus musculus
  siRNA target sequence for Aup1 (NM_007517.1,1025-1043).
ggactgggtgtgtagactt

SEQ ID NO: 603497 - DNA, 19 bp, Mus musculus
  siRNA target sequence for Aup1 (NM_007517.1,1076-1094).
ctttcatgcctgaagatgt

SEQ ID NO: 603498 - DNA, 19 bp, Mus musculus
  siRNA target sequence for Aup1 (NM_007517.1,1224-1242).
gcgcaagcaggcactgtat

SEQ ID NO: 603499 - DNA, 19 bp, Mus musculus
  siRNA target sequence for Aup1 (NM_007517.1,1233-1251).
ggcactgtatgaatatgca

SEQ ID NO: 603500 - DNA, 19 bp, Mus musculus
  siRNA target sequence for Aup1 (NM_007517.1,1234-1252).
gcactgtatgaatatgcaa

SEQ ID NO: 603501 - DNA, 19 bp, Mus musculus
  siRNA target sequence for BC013667 (NM_172266.1,165-183).
cgaaagccctgatgagatt

SEQ ID NO: 603502 - DNA, 19 bp, Mus musculus
  siRNA target sequence for BC013667 (NM_172266.1,202-220).
caacctggtcgctattcca

SEQ ID NO: 603503 - DNA, 19 bp, Mus musculus
  siRNA target sequence for BC013667 (NM_172266.1,212-230).
gctattccatcctacatct

SEQ ID NO: 603504 - DNA, 19 bp, Mus musculus
  siRNA target sequence for BC013667 (NM_172266.1,223-241).
ctacatctgctatgtaatt

SEQ ID NO: 603505 - DNA, 19 bp, Mus musculus
  siRNA target sequence for BC013667 (NM_172266.1,270-288).
gtaagcgcttctggtatat

SEQ ID NO: 603506 - DNA, 19 bp, Mus musculus
  siRNA target sequence for BC013667 (NM_172266.1,289-307).
cgaaggactcatgtacaaa

SEQ ID NO: 603507 - DNA, 19 bp, Mus musculus
  siRNA target sequence for BC013667 (NM_172266.1,301-319).
gtacaaatggcttttagga

SEQ ID NO: 603508 - DNA, 19 bp, Mus musculus
  siRNA target sequence for BC013667 (NM_172266.1,337-355).
ctggtatgctggatacaca

SEQ ID NO: 603509 - DNA, 19 bp, Mus musculus
  siRNA target sequence for BC013667 (NM_172266.1,347-365).
ggatacacagtgatggaat

SEQ ID NO: 603510 - DNA, 19 bp, Mus musculus
  siRNA target sequence for BC013667 (NM_172266.1,361-379).
ggaatggggggaagatatt

SEQ ID NO: 603511 - DNA, 19 bp, Mus musculus
  siRNA target sequence for BC013667 (NM_172266.1,432-450).
gagatgtgtgtacattgat

SEQ ID NO: 603512 - DNA, 19 bp, Mus musculus
  siRNA target sequence for BC013667 (NM_172266.1,451-469).
gatgtgcctacaggataaa

SEQ ID NO: 603513 - DNA, 19 bp, Mus musculus
  siRNA target sequence for BC013667 (NM_172266.1,454-472).
gtgcctacaggataaagga

SEQ ID NO: 603514 - DNA, 19 bp, Mus musculus
  siRNA target sequence for BC013667 (NM_172266.1,474-492).
cggttgtcgctcagatgat

SEQ ID NO: 603515 - DNA, 19 bp, Mus musculus
  siRNA target sequence for BC013667 (NM_172266.1,476-494).
gttgtcgctcagatgatgt

SEQ ID NO: 603516 - DNA, 19 bp, Mus musculus
  siRNA target sequence for BC013667 (NM_172266.1,493-511).
gtggctgatggatcatatt

SEQ ID NO: 603517 - DNA, 19 bp, Mus musculus
  siRNA target sequence for BC013667 (NM_172266.1,607-625).
caagaagcaccttgaacat

SEQ ID NO: 603518 - DNA, 19 bp, Mus musculus
  siRNA target sequence for BC013667 (NM_172266.1,610-628).
gaagcaccttgaacataat

SEQ ID NO: 603519 - DNA, 19 bp, Mus musculus
  siRNA target sequence for BC013667 (NM_172266.1,636-654).
gcagagatcgaaaatggat

SEQ ID NO: 603520 - DNA, 19 bp, Mus musculus
  siRNA target sequence for BC013667 (NM_172266.1,641-659).
gatcgaaaatggatcgttt

SEQ ID NO: 603521 - DNA, 19 bp, Mus musculus
  siRNA target sequence for BC013667 (NM_172266.1,756-774).
caaggtttggggcaacaaa

SEQ ID NO: 603522 - DNA, 19 bp, Mus musculus
  siRNA target sequence for BC013667 (NM_172266.1,760-778).
gtttggggcaacaaacatt

SEQ ID NO: 603523 - DNA, 19 bp, Mus musculus
  siRNA target sequence for BC013667 (NM_172266.1,839-857).
ggcttagaatgcaaatcaa

SEQ ID NO: 603524 - DNA, 19 bp, Mus musculus
  siRNA target sequence for BC013667 (NM_172266.1,858-876).
gaggcctccagtggataat

SEQ ID NO: 603525 - DNA, 19 bp, Mus musculus
  siRNA target sequence for BC013667 (NM_172266.1,861-879).
gcctccagtggataataga

SEQ ID NO: 603526 - DNA, 19 bp, Mus musculus
  siRNA target sequence for BC013667 (NM_172266.1,862-880).
cctccagtggataatagat

SEQ ID NO: 603527 - DNA, 19 bp, Mus musculus
  siRNA target sequence for BC013667 (NM_172266.1,863-881).
ctccagtggataatagata

SEQ ID NO: 603528 - DNA, 19 bp, Mus musculus
  siRNA target sequence for BC013667 (NM_172266.1,865-883).
ccagtggataatagataca

SEQ ID NO: 603529 - DNA, 19 bp, Mus musculus
  siRNA target sequence for BC013667 (NM_172266.1,866-884).
cagtggataatagatacaa

SEQ ID NO: 603530 - DNA, 19 bp, Mus musculus
  siRNA target sequence for BC013667 (NM_172266.1,871-889).
gataatagatacaaccata

SEQ ID NO: 603531 - DNA, 19 bp, Mus musculus
  siRNA target sequence for BC013667 (NM_172266.1,897-915).
ccaaagctgaaccaataga

SEQ ID NO: 603532 - DNA, 19 bp, Mus musculus
  siRNA target sequence for BC013667 (NM_172266.1,903-921).
ctgaaccaatagacattca

SEQ ID NO: 603533 - DNA, 19 bp, Mus musculus
  siRNA target sequence for BC013667 (NM_172266.1,951-969).
cagtcactcatgtccatta

SEQ ID NO: 603534 - DNA, 19 bp, Mus musculus
  siRNA target sequence for BC013667 (NM_172266.1,953-971).
gtcactcatgtccattaca

SEQ ID NO: 603535 - DNA, 19 bp, Mus musculus
  siRNA target sequence for BC013667 (NM_172266.1,959-977).
catgtccattacaggattt

SEQ ID NO: 603536 - DNA, 19 bp, Mus musculus
  siRNA target sequence for BC013667 (NM_172266.1,970-988).
caggattttcccaattgga

SEQ ID NO: 603537 - DNA, 19 bp, Mus musculus
  siRNA target sequence for BC013667 (NM_172266.1,1024-1042).
gctctatcagcgctttatt

SEQ ID NO: 603538 - DNA, 19 bp, Mus musculus
  siRNA target sequence for BC013667 (NM_172266.1,1052-1070).
gacctcctgtcccattttt

SEQ ID NO: 603539 - DNA, 19 bp, Mus musculus
  siRNA target sequence for BC013667 (NM_172266.1,1133-1151).
ctcagcaacatgtggatat

SEQ ID NO: 603540 - DNA, 19 bp, Mus musculus
  siRNA target sequence for BC013667 (NM_172266.1,1191-1209).
ggtaccacatcattcagta

SEQ ID NO: 603541 - DNA, 19 bp, Mus musculus
  siRNA target sequence for BC013667 (NM_172266.1,1192-1210).
gtaccacatcattcagtat

SEQ ID NO: 603542 - DNA, 19 bp, Mus musculus
  siRNA target sequence for C730036D15Rik (NM_145368.2,449-467).
ctgtacgactctgttaact

SEQ ID NO: 603543 - DNA, 19 bp, Mus musculus
  siRNA target sequence for C730036D15Rik (NM_145368.2,473-491).
gaaacagtcaggattccat

SEQ ID NO: 603544 - DNA, 19 bp, Mus musculus
  siRNA target sequence for C730036D15Rik (NM_145368.2,565-583).
ggttcggggagcccttttt

SEQ ID NO: 603545 - DNA, 19 bp, Mus musculus
  siRNA target sequence for C730036D15Rik (NM_145368.2,608-626).
ccaggaattattgatttgt

SEQ ID NO: 603546 - DNA, 19 bp, Mus musculus
  siRNA target sequence for C730036D15Rik (NM_145368.2,609-627).
caggaattattgatttgtt

SEQ ID NO: 603547 - DNA, 19 bp, Mus musculus
  siRNA target sequence for C730036D15Rik (NM_145368.2,634-652).
cattgggggtctagttgaa

SEQ ID NO: 603548 - DNA, 19 bp, Mus musculus
  siRNA target sequence for C730036D15Rik (NM_145368.2,640-658).
gggtctagttgaatttcgt

SEQ ID NO: 603549 - DNA, 19 bp, Mus musculus
  siRNA target sequence for C730036D15Rik (NM_145368.2,946-964).
ggtgatgacaccaatccat

SEQ ID NO: 603550 - DNA, 19 bp, Mus musculus
  siRNA target sequence for C730036D15Rik (NM_145368.2,977-995).
cggatccaagtccatgatt

SEQ ID NO: 603551 - DNA, 19 bp, Mus musculus
  siRNA target sequence for C730036D15Rik (NM_145368.2,979-997).
gatccaagtccatgattca

SEQ ID NO: 603552 - DNA, 19 bp, Mus musculus
  siRNA target sequence for Cpt1c (NM_153679.1,892-910).
cgactggtgggaagagttt

SEQ ID NO: 603553 - DNA, 19 bp, Mus musculus
  siRNA target sequence for Cpt1c (NM_153679.1,926-944).
cgaggctcactgattaata

SEQ ID NO: 603554 - DNA, 19 bp, Mus musculus
  siRNA target sequence for Cpt1c (NM_153679.1,1082-1100).
gggatgcgacccttgtgtt

SEQ ID NO: 603555 - DNA, 19 bp, Mus musculus
  siRNA target sequence for Cpt1c (NM_153679.1,1526-1544).
catgaccgctggtttgaca

SEQ ID NO: 603556 - DNA, 19 bp, Mus musculus
  siRNA target sequence for Cpt1c (NM_153679.1,1919-1937).
cgggacaggggtcaattct

SEQ ID NO: 603557 - DNA, 19 bp, Mus musculus
  siRNA target sequence for Cpt1c (NM_153679.1,2254-2272).
gcagacacacctgattgat

SEQ ID NO: 603558 - DNA, 19 bp, Mus musculus
  siRNA target sequence for Cpt1c (NM_153679.1,2264-2282).
ctgattgatgtccacaatt

SEQ ID NO: 603559 - DNA, 19 bp, Mus musculus
  siRNA target sequence for Cpt1c (NM_153679.1,2266-2284).
gattgatgtccacaattat

SEQ ID NO: 603560 - DNA, 19 bp, Mus musculus
  siRNA target sequence for Cpt1c (NM_153679.1,2278-2296).
caattatccggattacgtt

SEQ ID NO: 603561 - DNA, 19 bp, Mus musculus
  siRNA target sequence for Cpt1c (NM_153679.1,2339-2357).
ggtatctcctacatcttca

SEQ ID NO: 603562 - DNA, 19 bp, Mus musculus
  siRNA target sequence for Cpt1c (NM_153679.1,2369-2387).
gcaatcaccttccatatct

SEQ ID NO: 603563 - DNA, 19 bp, Mus musculus
  siRNA target sequence for Cpt1c (NM_153679.1,2428-2446).
ggggcagcacatcgaaaat

SEQ ID NO: 603564 - DNA, 19 bp, Mus musculus
  siRNA target sequence for Cpt1c (NM_153679.1,2474-2492).
cgggttggacagcatttca

SEQ ID NO: 603565 - DNA, 19 bp, Mus musculus
  siRNA target sequence for Cpt1c (NM_153679.1,2506-2524).
gggggagaattcggattat

SEQ ID NO: 603566 - DNA, 19 bp, Mus musculus
  siRNA target sequence for Cpt1c (NM_153679.1,2507-2525).
ggggagaattcggattata

SEQ ID NO: 603567 - DNA, 19 bp, Mus musculus
  siRNA target sequence for Cpt1c (NM_153679.1,2509-2527).
ggagaattcggattataga

SEQ ID NO: 603568 - DNA, 19 bp, Mus musculus
  siRNA target sequence for Cpt1c (NM_153679.1,2517-2535).
cggattatagatacaactt

SEQ ID NO: 603569 - DNA, 19 bp, Mus musculus
  siRNA target sequence for Dgat2l1 (NM_026713.1,984-1002).
gctgcatcagacataccta

SEQ ID NO: 603570 - DNA, 19 bp, Mus musculus
  siRNA target sequence for Dgat2l1 (NM_026713.1,1056-1074).
gcacgaaactctggtattt

SEQ ID NO: 603571 - DNA, 19 bp, Mus musculus
  siRNA target sequence for Dgat2l1 (NM_026713.1,1057-1075).
cacgaaactctggtattta

SEQ ID NO: 603572 - DNA, 19 bp, Mus musculus
  siRNA target sequence for Dgat2l1 (NM_026713.1,1059-1077).
cgaaactctggtatttaaa

SEQ ID NO: 603573 - DNA, 19 bp, Mus musculus
  siRNA target sequence for Dgat2l1 (NM_026713.1,1060-1078).
gaaactctggtatttaaat

SEQ ID NO: 603574 - DNA, 19 bp, Mus musculus
  siRNA target sequence for Ggt1 (NM_008116.1,450-468).
caggaaaagttgaggttat

SEQ ID NO: 603575 - DNA, 19 bp, Mus musculus
  siRNA target sequence for Ggt1 (NM_008116.1,488-506).
cccaggttggccaatacca

SEQ ID NO: 603576 - DNA, 19 bp, Mus musculus
  siRNA target sequence for Ggt1 (NM_008116.1,680-698).
gcaatagccctggacaaaa

SEQ ID NO: 603577 - DNA, 19 bp, Mus musculus
  siRNA target sequence for Ggt1 (NM_008116.1,681-699).
caatagccctggacaaaaa

SEQ ID NO: 603578 - DNA, 19 bp, Mus musculus
  siRNA target sequence for Ggt1 (NM_008116.1,829-847).
cgccaaggccttctacaat

SEQ ID NO: 603579 - DNA, 19 bp, Mus musculus
  siRNA target sequence for Ggt1 (NM_008116.1,852-870).
gcctcacagcccagattgt

SEQ ID NO: 603580 - DNA, 19 bp, Mus musculus
  siRNA target sequence for Ggt1 (NM_008116.1,1257-1275).
cctactatgagcctgaatt

SEQ ID NO: 603581 - DNA, 19 bp, Mus musculus
  siRNA target sequence for Ggt1 (NM_008116.1,1431-1449).
gctcgcccaacttcatcaa

SEQ ID NO: 603582 - DNA, 19 bp, Mus musculus
  siRNA target sequence for Ggt1 (NM_008116.1,1493-1511).
ggtaagcagcctctttcat

SEQ ID NO: 603583 - DNA, 19 bp, Mus musculus
  siRNA target sequence for Ggt1 (NM_008116.1,1582-1600).
ccagatcaccacatctgtt

SEQ ID NO: 603584 - DNA, 19 bp, Mus musculus
  siRNA target sequence for Ggt1 (NM_008116.1,1621-1639).
cctgtggttcggatacgat

SEQ ID NO: 603585 - DNA, 19 bp, Mus musculus
  siRNA target sequence for Ggt1 (NM_008116.1,1626-1644).
ggttcggatacgatgtgaa

SEQ ID NO: 603586 - DNA, 19 bp, Mus musculus
  siRNA target sequence for Ggt1 (NM_008116.1,1665-1683).
ggctgcacaaccagctttt

SEQ ID NO: 603587 - DNA, 19 bp, Mus musculus
  siRNA target sequence for Ggt1 (NM_008116.1,1670-1688).
cacaaccagcttttaccta

SEQ ID NO: 603588 - DNA, 19 bp, Mus musculus
  siRNA target sequence for Ggt1 (NM_008116.1,1676-1694).
cagcttttacctaatacca

SEQ ID NO: 603589 - DNA, 19 bp, Mus musculus
  siRNA target sequence for Ggt1 (NM_008116.1,1692-1710).
ccacaacggtagagaaaga

SEQ ID NO: 603590 - DNA, 19 bp, Mus musculus
  siRNA target sequence for Ggt1 (NM_008116.1,1695-1713).
caacggtagagaaagacat

SEQ ID NO: 603591 - DNA, 19 bp, Mus musculus
  siRNA target sequence for Ggt1 (NM_008116.1,1698-1716).
cggtagagaaagacattga

SEQ ID NO: 603592 - DNA, 19 bp, Mus musculus
  siRNA target sequence for Ggt1 (NM_008116.1,1773-1791).
ccttcatcgctgtagttca

SEQ ID NO: 603593 - DNA, 19 bp, Mus musculus
  siRNA target sequence for Gpam (NM_008149.2,184-202).
ggcacaatagacgtttctt

SEQ ID NO: 603594 - DNA, 19 bp, Mus musculus
  siRNA target sequence for Gpam (NM_008149.2,185-203).
gcacaatagacgtttctta

SEQ ID NO: 603595 - DNA, 19 bp, Mus musculus
  siRNA target sequence for Gpam (NM_008149.2,186-204).
cacaatagacgtttcttat

SEQ ID NO: 603596 - DNA, 19 bp, Mus musculus
  siRNA target sequence for Gpam (NM_008149.2,188-206).
caatagacgtttcttatct

SEQ ID NO: 603597 - DNA, 19 bp, Mus musculus
  siRNA target sequence for Gpam (NM_008149.2,208-226).
cccagttcatcggaataca

SEQ ID NO: 603598 - DNA, 19 bp, Mus musculus
  siRNA target sequence for Gpam (NM_008149.2,227-245).
gccttggccgatgtaaaca

SEQ ID NO: 603599 - DNA, 19 bp, Mus musculus
  siRNA target sequence for Gpam (NM_008149.2,229-247).
cttggccgatgtaaacaca

SEQ ID NO: 603600 - DNA, 19 bp, Mus musculus
  siRNA target sequence for Gpam (NM_008149.2,349-367).
ggaaggtgctgctattcct

SEQ ID NO: 603601 - DNA, 19 bp, Mus musculus
  siRNA target sequence for Gpam (NM_008149.2,415-433).
ctgggtttgcggaatgtta

SEQ ID NO: 603602 - DNA, 19 bp, Mus musculus
  siRNA target sequence for Gpam (NM_008149.2,417-435).
gggtttgcggaatgttatt

SEQ ID NO: 603603 - DNA, 19 bp, Mus musculus
  siRNA target sequence for Gpam (NM_008149.2,419-437).
gtttgcggaatgttattta

SEQ ID NO: 603604 - DNA, 19 bp, Mus musculus
  siRNA target sequence for Gpam (NM_008149.2,475-493).
gcgagacggctgtcttaca

SEQ ID NO: 603605 - DNA, 19 bp, Mus musculus
  siRNA target sequence for Gpam (NM_008149.2,476-494).
cgagacggctgtcttacat

SEQ ID NO: 603606 - DNA, 19 bp, Mus musculus
  siRNA target sequence for Gpam (NM_008149.2,482-500).
ggctgtcttacatcctttt

SEQ ID NO: 603607 - DNA, 19 bp, Mus musculus
  siRNA target sequence for Gpam (NM_008149.2,516-534).
cgtccataagggcatgttt

SEQ ID NO: 603608 - DNA, 19 bp, Mus musculus
  siRNA target sequence for Gpam (NM_008149.2,537-555).
caccagtgttactgagaat

SEQ ID NO: 603609 - DNA, 19 bp, Mus musculus
  siRNA target sequence for Gpam (NM_008149.2,700-718).
gtctccccagggatgatca

SEQ ID NO: 603610 - DNA, 19 bp, Mus musculus
  siRNA target sequence for Gpam (NM_008149.2,818-836).
cgaacctgccgctcttgtt

SEQ ID NO: 603611 - DNA, 19 bp, Mus musculus
  siRNA target sequence for Gpam (NM_008149.2,819-837).
gaacctgccgctcttgttt

SEQ ID NO: 603612 - DNA, 19 bp, Mus musculus
  siRNA target sequence for Gpam (NM_008149.2,919-937).
gcctcgggcaataatctca

SEQ ID NO: 603613 - DNA, 19 bp, Mus musculus
  siRNA target sequence for Gpam (NM_008149.2,920-938).
cctcgggcaataatctcaa

SEQ ID NO: 603614 - DNA, 19 bp, Mus musculus
  siRNA target sequence for Gpam (NM_008149.2,969-987).
gcttgggggctttttcata

SEQ ID NO: 603615 - DNA, 19 bp, Mus musculus
  siRNA target sequence for Gpam (NM_008149.2,970-988).
cttgggggctttttcataa

SEQ ID NO: 603616 - DNA, 19 bp, Mus musculus
  siRNA target sequence for Gpam (NM_008149.2,1015-1033).
ggacgcaaagacattctgt

SEQ ID NO: 603617 - DNA, 19 bp, Mus musculus
  siRNA target sequence for Gpam (NM_008149.2,1044-1062).
gctccatgggcatgtagtt

SEQ ID NO: 603618 - DNA, 19 bp, Mus musculus
  siRNA target sequence for Gpam (NM_008149.2,1047-1065).
ccatgggcatgtagttgaa

SEQ ID NO: 603619 - DNA, 19 bp, Mus musculus
  siRNA target sequence for Gpam (NM_008149.2,1157-1175).
cagtggtagtggatactct

SEQ ID NO: 603620 - DNA, 19 bp, Mus musculus
  siRNA target sequence for Gpam (NM_008149.2,1212-1230).
cgtgggcatctcgtatgat

SEQ ID NO: 603621 - DNA, 19 bp, Mus musculus
  siRNA target sequence for Gpam (NM_008149.2,1223-1241).
cgtatgatcgcataatcga

SEQ ID NO: 603622 - DNA, 19 bp, Mus musculus
  siRNA target sequence for Gpam (NM_008149.2,1224-1242).
gtatgatcgcataatcgaa

SEQ ID NO: 603623 - DNA, 19 bp, Mus musculus
  siRNA target sequence for Gpam (NM_008149.2,1300-1318).
gtggcgagaggcgttatca

SEQ ID NO: 603624 - DNA, 19 bp, Mus musculus
  siRNA target sequence for Gpam (NM_008149.2,1302-1320).
ggcgagaggcgttatcaga

SEQ ID NO: 603625 - DNA, 19 bp, Mus musculus
  siRNA target sequence for Gpam (NM_008149.2,1304-1322).
cgagaggcgttatcagaat

SEQ ID NO: 603626 - DNA, 19 bp, Mus musculus
  siRNA target sequence for Gpam (NM_008149.2,1340-1358).
gctacgtccgagtggattt

SEQ ID NO: 603627 - DNA, 19 bp, Mus musculus
  siRNA target sequence for Gpam (NM_008149.2,1341-1359).
ctacgtccgagtggatttt

SEQ ID NO: 603628 - DNA, 19 bp, Mus musculus
  siRNA target sequence for Gpam (NM_008149.2,1344-1362).
cgtccgagtggattttgca

SEQ ID NO: 603629 - DNA, 19 bp, Mus musculus
  siRNA target sequence for Gpam (NM_008149.2,1398-1416).
gagtcagaaacctgtatct

SEQ ID NO: 603630 - DNA, 19 bp, Mus musculus
  siRNA target sequence for Gpam (NM_008149.2,1460-1478).
cttcaagaccgaatgatgt

SEQ ID NO: 603631 - DNA, 19 bp, Mus musculus
  siRNA target sequence for Gpam (NM_008149.2,1540-1558).
cgacgaaggctgattgcaa

SEQ ID NO: 603632 - DNA, 19 bp, Mus musculus
  siRNA target sequence for Gpam (NM_008149.2,1541-1559).
gacgaaggctgattgcaaa

SEQ ID NO: 603633 - DNA, 19 bp, Mus musculus
  siRNA target sequence for Gpam (NM_008149.2,1589-1607).
gcaagtcctgcgctatcat

SEQ ID NO: 603634 - DNA, 19 bp, Mus musculus
  siRNA target sequence for Gpam (NM_008149.2,1667-1685).
ccacgcttgtggaagactt

SEQ ID NO: 603635 - DNA, 19 bp, Mus musculus
  siRNA target sequence for Gpam (NM_008149.2,1670-1688).
cgcttgtggaagacttctt

SEQ ID NO: 603636 - DNA, 19 bp, Mus musculus
  siRNA target sequence for Gpam (NM_008149.2,1731-1749).
cttctccgggaattcagaa

SEQ ID NO: 603637 - DNA, 19 bp, Mus musculus
  siRNA target sequence for Gpam (NM_008149.2,1734-1752).
ctccgggaattcagaagat

SEQ ID NO: 603638 - DNA, 19 bp, Mus musculus
  siRNA target sequence for Gpam (NM_008149.2,2063-2081).
cctgccagactttttacca

SEQ ID NO: 603639 - DNA, 19 bp, Mus musculus
  siRNA target sequence for Gpam (NM_008149.2,2068-2086).
cagactttttaccaagttt

SEQ ID NO: 603640 - DNA, 19 bp, Mus musculus
  siRNA target sequence for Gpam (NM_008149.2,2070-2088).
gactttttaccaagtttgt

SEQ ID NO: 603641 - DNA, 19 bp, Mus musculus
  siRNA target sequence for Gpam (NM_008149.2,2072-2090).
ctttttaccaagtttgtca

SEQ ID NO: 603642 - DNA, 19 bp, Mus musculus
  siRNA target sequence for Gpam (NM_008149.2,2092-2110).
gagacagttggcaagttca

SEQ ID NO: 603643 - DNA, 19 bp, Mus musculus
  siRNA target sequence for Gpam (NM_008149.2,2257-2275).
cagcgagattgctatctca

SEQ ID NO: 603644 - DNA, 19 bp, Mus musculus
  siRNA target sequence for Gpam (NM_008149.2,2293-2311).
gagcaccagcaattcatca

SEQ ID NO: 603645 - DNA, 19 bp, Mus musculus
  siRNA target sequence for Gpam (NM_008149.2,2301-2319).
gcaattcatcacctttctt

SEQ ID NO: 603646 - DNA, 19 bp, Mus musculus
  siRNA target sequence for Gpam (NM_008149.2,2363-2381).
ccatctttgtccacaactt

SEQ ID NO: 603647 - DNA, 19 bp, Mus musculus
  siRNA target sequence for Gpam (NM_008149.2,2467-2485).
gctgagagtgccacatact

SEQ ID NO: 603648 - DNA, 19 bp, Mus musculus
  siRNA target sequence for Gpam (NM_008149.2,2480-2498).
catactgtctcgtgaagaa

SEQ ID NO: 603649 - DNA, 19 bp, Mus musculus
  siRNA target sequence for Gpam (NM_008149.2,2517-2535).
ggacatcggggttttcaaa

SEQ ID NO: 603650 - DNA, 19 bp, Mus musculus
  siRNA target sequence for Gpam (NM_008149.2,2563-2581).
ctagaactgagcagtactt

SEQ ID NO: 603651 - DNA, 19 bp, Mus musculus
  siRNA target sequence for Mgat1l (NM_177448.3,274-292).
gacgcttggccatatggaa

SEQ ID NO: 603652 - DNA, 19 bp, Mus musculus
  siRNA target sequence for Mgat1l (NM_177448.3,290-308).
gaagtacatgaaggattat

SEQ ID NO: 603653 - DNA, 19 bp, Mus musculus
  siRNA target sequence for Mgat1l (NM_177448.3,342-360).
gacccttcccggaactaca

SEQ ID NO: 603654 - DNA, 19 bp, Mus musculus
  siRNA target sequence for Mgat1l (NM_177448.3,450-468).
ggcatccgctcctatctga

SEQ ID NO: 603655 - DNA, 19 bp, Mus musculus
  siRNA target sequence for Mgat1l (NM_177448.3,495-513).
cccttcttccgagattaca

SEQ ID NO: 603656 - DNA, 19 bp, Mus musculus
  siRNA target sequence for Mgat1l (NM_177448.3,525-543).
gggctggtctcatcagaaa

SEQ ID NO: 603657 - DNA, 19 bp, Mus musculus
  siRNA target sequence for Mgat1l (NM_177448.3,545-563).
ggtgagtgccgatcacatt

SEQ ID NO: 603658 - DNA, 19 bp, Mus musculus
  siRNA target sequence for Mgat1l (NM_177448.3,703-721).
cagctcttgtgccaatctt

SEQ ID NO: 603659 - DNA, 19 bp, Mus musculus
  siRNA target sequence for Mgat1l (NM_177448.3,705-723).
gctcttgtgccaatcttct

SEQ ID NO: 603660 - DNA, 19 bp, Mus musculus
  siRNA target sequence for Mgat1l (NM_177448.3,960-978).
cttcatcagcgctatatca

SEQ ID NO: 603661 - DNA, 19 bp, Mus musculus
  siRNA target sequence for Taz (NM_181516.2,422-440).
cctgccaccccccttatca

SEQ ID NO: 603662 - DNA, 19 bp, Mus musculus
  siRNA target sequence for Taz (NM_181516.2,476-494).
catctctgggggatcctaa

SEQ ID NO: 603663 - DNA, 19 bp, Mus musculus
  siRNA target sequence for Taz (NM_181516.2,583-601).
cttcagcttgggcaaatgt

SEQ ID NO: 603664 - DNA, 19 bp, Mus musculus
  siRNA target sequence for Taz (NM_181516.2,634-652).
gaaagggatggacttcatt

SEQ ID NO: 603665 - DNA, 19 bp, Mus musculus
  siRNA target sequence for Taz (NM_181516.2,719-737).
gagttcctgcgcttcaaat

SEQ ID NO: 603666 - DNA, 19 bp, Mus musculus
  siRNA target sequence for Taz (NM_181516.2,793-811).
gtggcatgttggaatgaat

SEQ ID NO: 603667 - DNA, 19 bp, Mus musculus
  siRNA target sequence for Taz (NM_181516.2,796-814).
gcatgttggaatgaatgat

SEQ ID NO: 603668 - DNA, 19 bp, Mus musculus
  siRNA target sequence for Taz (NM_181516.2,911-929).
ctccgggcagagaacaagt

SEQ ID NO: 603669 - DNA, 19 bp, Mus musculus
  siRNA target sequence for Taz (NM_181516.2,951-969).
ccctcacagacttcattca

SEQ ID NO: 603670 - DNA, 19 bp, Mus musculus
  siRNA target sequence for Taz (NM_181516.2,1001-1019).
gaacagctccacaatcatt

SEQ ID NO: 603671 - DNA, 19 bp, Mus musculus
  siRNA target sequence for 5330437I02Rik (NM_177028.2,59-77).
cgctctgttcccctttgtt

SEQ ID NO: 603672 - DNA, 19 bp, Mus musculus
  siRNA target sequence for 5330437I02Rik (NM_177028.2,75-93).
gtttctcctgcaagaaaca

SEQ ID NO: 603673 - DNA, 19 bp, Mus musculus
  siRNA target sequence for 5330437I02Rik (NM_177028.2,99-117).
ctcaagtgcatgcaagata

SEQ ID NO: 603674 - DNA, 19 bp, Mus musculus
  siRNA target sequence for 5330437I02Rik (NM_177028.2,114-132).
gatactgacgaattccttt

SEQ ID NO: 603675 - DNA, 19 bp, Mus musculus
  siRNA target sequence for 5330437I02Rik (NM_177028.2,118-136).
ctgacgaattcctttctga

SEQ ID NO: 603676 - DNA, 19 bp, Mus musculus
  siRNA target sequence for 5330437I02Rik (NM_177028.2,159-177).
gaatacgctctgagaatgt

SEQ ID NO: 603677 - DNA, 19 bp, Mus musculus
  siRNA target sequence for 5330437I02Rik (NM_177028.2,195-213).
cttggaagcaacgttctta

SEQ ID NO: 603678 - DNA, 19 bp, Mus musculus
  siRNA target sequence for 5330437I02Rik (NM_177028.2,341-359).
gtgtgtccctgattcttgt

SEQ ID NO: 603679 - DNA, 19 bp, Mus musculus
  siRNA target sequence for 5330437I02Rik (NM_177028.2,366-384).
gaggacgtgaccatgatgt

SEQ ID NO: 603680 - DNA, 19 bp, Mus musculus
  siRNA target sequence for 5330437I02Rik (NM_177028.2,393-411).
ggtactctcaagttcagaa

SEQ ID NO: 603681 - DNA, 19 bp, Mus musculus
  siRNA target sequence for 5330437I02Rik (NM_177028.2,460-478).
cctcatcttgtgaagttgt

SEQ ID NO: 603682 - DNA, 19 bp, Mus musculus
  siRNA target sequence for 5330437I02Rik (NM_177028.2,498-516).
gccatgagtccagatatgt

SEQ ID NO: 603683 - DNA, 19 bp, Mus musculus
  siRNA target sequence for 5330437I02Rik (NM_177028.2,499-517).
ccatgagtccagatatgtt

SEQ ID NO: 603684 - DNA, 19 bp, Mus musculus
  siRNA target sequence for 5330437I02Rik (NM_177028.2,500-518).
catgagtccagatatgttt

SEQ ID NO: 603685 - DNA, 19 bp, Mus musculus
  siRNA target sequence for 5330437I02Rik (NM_177028.2,771-789).
gaagttctgcagtgctttt

SEQ ID NO: 603686 - DNA, 19 bp, Mus musculus
  siRNA target sequence for 5330437I02Rik (NM_177028.2,837-855).
ggcacctgccggacactaa

SEQ ID NO: 603687 - DNA, 19 bp, Mus musculus
  siRNA target sequence for 5330437I02Rik (NM_177028.2,838-856).
gcacctgccggacactaaa

SEQ ID NO: 603688 - DNA, 19 bp, Mus musculus
  siRNA target sequence for 5330437I02Rik (NM_177028.2,936-954).
gtgctcgaatggaaatcca

SEQ ID NO: 603689 - DNA, 19 bp, Mus musculus
  siRNA target sequence for 5330437I02Rik (NM_177028.2,988-1006).
ggagtggcccattctatct

SEQ ID NO: 603690 - DNA, 19 bp, Mus musculus
  siRNA target sequence for 5330437I02Rik (NM_177028.2,1009-1027).
gggtggatacatttttcct

SEQ ID NO: 603691 - DNA, 19 bp, Mus musculus
  siRNA target sequence for 5330437I02Rik (NM_177028.2,1086-1104).
ggaataactcctaaagtca

SEQ ID NO: 603692 - DNA, 19 bp, Mus musculus
  siRNA target sequence for 5330437I02Rik (NM_177028.2,1087-1105).
gaataactcctaaagtcat

SEQ ID NO: 603693 - DNA, 19 bp, Mus musculus
  siRNA target sequence for 5330437I02Rik (NM_177028.2,1111-1129).
gatactttctgaaacgttt

SEQ ID NO: 603694 - DNA, 19 bp, Mus musculus
  siRNA target sequence for 5330437I02Rik (NM_177028.2,1115-1133).
ctttctgaaacgttttaca

SEQ ID NO: 603695 - DNA, 19 bp, Mus musculus
  siRNA target sequence for 5330437I02Rik (NM_177028.2,1135-1153).
ggttgcagctccttcatat

SEQ ID NO: 603696 - DNA, 19 bp, Mus musculus
  siRNA target sequence for 5330437I02Rik (NM_177028.2,1364-1382).
cttcttcgtccatggaaaa

SEQ ID NO: 603697 - DNA, 19 bp, Mus musculus
  siRNA target sequence for 5330437I02Rik (NM_177028.2,1446-1464).
ctgctcaccttggcttata

SEQ ID NO: 603698 - DNA, 19 bp, Mus musculus
  siRNA target sequence for 5330437I02Rik (NM_177028.2,1451-1469).
caccttggcttataaactt

SEQ ID NO: 603699 - DNA, 19 bp, Mus musculus
  siRNA target sequence for 5330437I02Rik (NM_177028.2,1503-1521).
gggactgtgctctatttct

SEQ ID NO: 603700 - DNA, 19 bp, Mus musculus
  siRNA target sequence for 5330437I02Rik (NM_177028.2,1578-1596).
ctgagcatgttcatgcatt

SEQ ID NO: 603701 - DNA, 19 bp, Mus musculus
  siRNA target sequence for 5330437I02Rik (NM_177028.2,1604-1622).
ccctacagacattctcaaa

SEQ ID NO: 603702 - DNA, 19 bp, Mus musculus
  siRNA target sequence for 5330437I02Rik (NM_177028.2,1818-1836).
cccgtgaaacgcatgcttt

SEQ ID NO: 603703 - DNA, 19 bp, Mus musculus
  siRNA target sequence for 5330437I02Rik (NM_177028.2,1884-1902).
ctcgtacaccccattgtca

SEQ ID NO: 603704 - DNA, 19 bp, Mus musculus
  siRNA target sequence for Elovl2 (NM_019423.1,90-108).
gtttggaccacgagattct

SEQ ID NO: 603705 - DNA, 19 bp, Mus musculus
  siRNA target sequence for Elovl2 (NM_019423.1,187-205).
ctgggtaacaagtacatga

SEQ ID NO: 603706 - DNA, 19 bp, Mus musculus
  siRNA target sequence for Elovl2 (NM_019423.1,191-209).
gtaacaagtacatgaagaa

SEQ ID NO: 603707 - DNA, 19 bp, Mus musculus
  siRNA target sequence for Elovl2 (NM_019423.1,231-249).
gggcatcctcaccttgtat

SEQ ID NO: 603708 - DNA, 19 bp, Mus musculus
  siRNA target sequence for Elovl2 (NM_019423.1,246-264).
gtataacctcgcaatcaca

SEQ ID NO: 603709 - DNA, 19 bp, Mus musculus
  siRNA target sequence for Elovl2 (NM_019423.1,321-339).
caacttgcagtgtcagaat

SEQ ID NO: 603710 - DNA, 19 bp, Mus musculus
  siRNA target sequence for Elovl2 (NM_019423.1,412-430).
gagttcctggacacgattt

SEQ ID NO: 603711 - DNA, 19 bp, Mus musculus
  siRNA target sequence for Elovl2 (NM_019423.1,420-438).
ggacacgattttctttgtt

SEQ ID NO: 603712 - DNA, 19 bp, Mus musculus
  siRNA target sequence for Elovl2 (NM_019423.1,423-441).
cacgattttctttgttcta

SEQ ID NO: 603713 - DNA, 19 bp, Mus musculus
  siRNA target sequence for Elovl2 (NM_019423.1,481-499).
caccacgcgtccatgttca

SEQ ID NO: 603714 - DNA, 19 bp, Mus musculus
  siRNA target sequence for Elovl2 (NM_019423.1,484-502).
cacgcgtccatgttcaaca

SEQ ID NO: 603715 - DNA, 19 bp, Mus musculus
  siRNA target sequence for Elovl2 (NM_019423.1,514-532).
gttttgaactggatacctt

SEQ ID NO: 603716 - DNA, 19 bp, Mus musculus
  siRNA target sequence for Elovl2 (NM_019423.1,566-584).
gctttatccacattctcat

SEQ ID NO: 603717 - DNA, 19 bp, Mus musculus
  siRNA target sequence for Elovl2 (NM_019423.1,748-766).
cagtcttcctatatgatga

SEQ ID NO: 603718 - DNA, 19 bp, Mus musculus
  siRNA target sequence for Elovl2 (NM_019423.1,772-790).
gtcatcctgttcttaaact

SEQ ID NO: 603719 - DNA, 19 bp, Mus musculus
  siRNA target sequence for Elovl2 (NM_019423.1,777-795).
cctgttcttaaacttctat

SEQ ID NO: 603720 - DNA, 19 bp, Mus musculus
  siRNA target sequence for Elovl2 (NM_019423.1,778-796).
ctgttcttaaacttctata

SEQ ID NO: 603721 - DNA, 19 bp, Mus musculus
  siRNA target sequence for Elovl2 (NM_019423.1,780-798).
gttcttaaacttctatatt

SEQ ID NO: 603722 - DNA, 19 bp, Mus musculus
  siRNA target sequence for Elovl6 (NM_130450.1,653-671).
ccgagtctcccggaagttt

SEQ ID NO: 603723 - DNA, 19 bp, Mus musculus
  siRNA target sequence for Elovl6 (NM_130450.1,664-682).
ggaagtttgccatgttcat

SEQ ID NO: 603724 - DNA, 19 bp, Mus musculus
  siRNA target sequence for Elovl6 (NM_130450.1,857-875).
catcggcaaagtgaagaaa

SEQ ID NO: 603725 - DNA, 19 bp, Mus musculus
  siRNA target sequence for 9030405D14Rik (NM_027819.1,109-127).
caggacctgtgcactatca

SEQ ID NO: 603726 - DNA, 19 bp, Mus musculus
  siRNA target sequence for 9030405D14Rik (NM_027819.1,112-130).
gacctgtgcactatcacaa

SEQ ID NO: 603727 - DNA, 19 bp, Mus musculus
  siRNA target sequence for 9030405D14Rik (NM_027819.1,216-234).
ctaaggagactccaaaata

SEQ ID NO: 603728 - DNA, 19 bp, Mus musculus
  siRNA target sequence for 9030405D14Rik (NM_027819.1,454-472).
cccaactgggccaagagtt

SEQ ID NO: 603729 - DNA, 19 bp, Mus musculus
  siRNA target sequence for 9030405D14Rik (NM_027819.1,552-570).
ggcttaggtgccacattct

SEQ ID NO: 603730 - DNA, 19 bp, Mus musculus
  siRNA target sequence for 9030405D14Rik (NM_027819.1,573-591).
ggtctcttctacaatagct

SEQ ID NO: 603731 - DNA, 19 bp, Mus musculus
  siRNA target sequence for 9030405D14Rik (NM_027819.1,963-981).
ctggggttagagttacctt

SEQ ID NO: 603732 - DNA, 19 bp, Mus musculus
  siRNA target sequence for Ggtl3 (NM_144786.1,397-415).
gtggcgctggtcatgcaaa

SEQ ID NO: 603733 - DNA, 19 bp, Mus musculus
  siRNA target sequence for Ggtl3 (NM_144786.1,400-418).
gcgctggtcatgcaaatct

SEQ ID NO: 603734 - DNA, 19 bp, Mus musculus
  siRNA target sequence for Ggtl3 (NM_144786.1,401-419).
cgctggtcatgcaaatcta

SEQ ID NO: 603735 - DNA, 19 bp, Mus musculus
  siRNA target sequence for Ggtl3 (NM_144786.1,593-611).
gcgtgatgttggtacatga

SEQ ID NO: 603736 - DNA, 19 bp, Mus musculus
  siRNA target sequence for Ggtl3 (NM_144786.1,621-639).
gaatgagagccacctaatt

SEQ ID NO: 603737 - DNA, 19 bp, Mus musculus
  siRNA target sequence for Ggtl3 (NM_144786.1,735-753).
ggtgaaagggttacatgaa

SEQ ID NO: 603738 - DNA, 19 bp, Mus musculus
  siRNA target sequence for Ggtl3 (NM_144786.1,828-846).
caacgtgacccatgatcta

SEQ ID NO: 603739 - DNA, 19 bp, Mus musculus
  siRNA target sequence for Ggtla1 (NM_011820.2,380-398).
gtctaggtctggttatcgt

SEQ ID NO: 603740 - DNA, 19 bp, Mus musculus
  siRNA target sequence for Ggtla1 (NM_011820.2,386-404).
gtctggttatcgttgtgtt

SEQ ID NO: 603741 - DNA, 19 bp, Mus musculus
  siRNA target sequence for Ggtla1 (NM_011820.2,480-498).
caagatctgctcggatatt

SEQ ID NO: 603742 - DNA, 19 bp, Mus musculus
  siRNA target sequence for Ggtla1 (NM_011820.2,555-573).
ggtctgtactggtgttgtt

SEQ ID NO: 603743 - DNA, 19 bp, Mus musculus
  siRNA target sequence for Ggtla1 (NM_011820.2,689-707).
gcctgttgaaccagtgtaa

SEQ ID NO: 603744 - DNA, 19 bp, Mus musculus
  siRNA target sequence for Ggtla1 (NM_011820.2,690-708).
cctgttgaaccagtgtaaa

SEQ ID NO: 603745 - DNA, 19 bp, Mus musculus
  siRNA target sequence for Ggtla1 (NM_011820.2,691-709).
ctgttgaaccagtgtaaaa

SEQ ID NO: 603746 - DNA, 19 bp, Mus musculus
  siRNA target sequence for Ggtla1 (NM_011820.2,803-821).
cttgggctcagcttttcca

SEQ ID NO: 603747 - DNA, 19 bp, Mus musculus
  siRNA target sequence for Ggtla1 (NM_011820.2,1146-1164).
gatgcccctaggaaactat

SEQ ID NO: 603748 - DNA, 19 bp, Mus musculus
  siRNA target sequence for Ggtla1 (NM_011820.2,1608-1626).
caacgagcttctagactta

SEQ ID NO: 603749 - DNA, 19 bp, Mus musculus
  siRNA target sequence for Ggtla1 (NM_011820.2,1775-1793).
ctgccgtggcccagactat

SEQ ID NO: 603750 - DNA, 19 bp, Mus musculus
  siRNA target sequence for Ggtla1 (NM_011820.2,1777-1795).
gccgtggcccagactatca

SEQ ID NO: 603751 - DNA, 19 bp, Mus musculus
  siRNA target sequence for Ggtla1 (NM_011820.2,1778-1796).
ccgtggcccagactatcat

SEQ ID NO: 603752 - DNA, 19 bp, Mus musculus
  siRNA target sequence for Ggtla1 (NM_011820.2,1783-1801).
gcccagactatcatgaaca

SEQ ID NO: 603753 - DNA, 19 bp, Mus musculus
  siRNA target sequence for 1700007H16Rik (NM_027945.1,924-942).
gacaattttccgaccaaat

SEQ ID NO: 603754 - DNA, 19 bp, Mus musculus
  siRNA target sequence for 1700007H16Rik (NM_027945.1,1118-1136).
gtaccgggaagataggaat

SEQ ID NO: 603755 - DNA, 19 bp, Mus musculus
  siRNA target sequence for 1700007H16Rik (NM_027945.1,1297-1315).
gtgccctttctgatcctta

SEQ ID NO: 603756 - DNA, 19 bp, Mus musculus
  siRNA target sequence for Hmgcs1 (NM_145942.2,896-914).
ggcttcatgatctttcact

SEQ ID NO: 603757 - DNA, 19 bp, Mus musculus
  siRNA target sequence for Hmgcs1 (NM_145942.2,948-966).
ctcggatgttcctgaatga

SEQ ID NO: 603758 - DNA, 19 bp, Mus musculus
  siRNA target sequence for Hmgcs1 (NM_145942.2,985-1003).
cagagataaaaacagtatt

SEQ ID NO: 603759 - DNA, 19 bp, Mus musculus
  siRNA target sequence for Hmgcs1 (NM_145942.2,1020-1038).
cctttggggacgttaaatt

SEQ ID NO: 603760 - DNA, 19 bp, Mus musculus
  siRNA target sequence for Hmgcs1 (NM_145942.2,1021-1039).
ctttggggacgttaaatta

SEQ ID NO: 603761 - DNA, 19 bp, Mus musculus
  siRNA target sequence for Hmgcs1 (NM_145942.2,1028-1046).
gacgttaaattagaagata

SEQ ID NO: 603762 - DNA, 19 bp, Mus musculus
  siRNA target sequence for Hmgcs1 (NM_145942.2,1030-1048).
cgttaaattagaagatact

SEQ ID NO: 603763 - DNA, 19 bp, Mus musculus
  siRNA target sequence for Hmgcs1 (NM_145942.2,1085-1103).
gctagttctgagctattca

SEQ ID NO: 603764 - DNA, 19 bp, Mus musculus
  siRNA target sequence for Hmgcs1 (NM_145942.2,1119-1137).
cgtctttgcttgtgtctaa

SEQ ID NO: 603765 - DNA, 19 bp, Mus musculus
  siRNA target sequence for Hmgcs1 (NM_145942.2,1120-1138).
gtctttgcttgtgtctaat

SEQ ID NO: 603766 - DNA, 19 bp, Mus musculus
  siRNA target sequence for Hmgcs1 (NM_145942.2,1122-1140).
ctttgcttgtgtctaatca

SEQ ID NO: 603767 - DNA, 19 bp, Mus musculus
  siRNA target sequence for Hmgcs1 (NM_145942.2,1132-1150).
gtctaatcagaatggaaat

SEQ ID NO: 603768 - DNA, 19 bp, Mus musculus
  siRNA target sequence for Hmgcs1 (NM_145942.2,1264-1282).
cacgctgtactcccttaaa

SEQ ID NO: 603769 - DNA, 19 bp, Mus musculus
  siRNA target sequence for Hmgcs1 (NM_145942.2,1266-1284).
cgctgtactcccttaaagt

SEQ ID NO: 603770 - DNA, 19 bp, Mus musculus
  siRNA target sequence for Hmgcs1 (NM_145942.2,1304-1322).
ggatctgcccttgataaaa

SEQ ID NO: 603771 - DNA, 19 bp, Mus musculus
  siRNA target sequence for Hmgcs1 (NM_145942.2,1329-1347).
caagtttatgtgaccttaa

SEQ ID NO: 603772 - DNA, 19 bp, Mus musculus
  siRNA target sequence for Hmgcs1 (NM_145942.2,1354-1372).
gcttgactcgagaacttgt

SEQ ID NO: 603773 - DNA, 19 bp, Mus musculus
  siRNA target sequence for Hmgcs1 (NM_145942.2,1371-1389).
gtgtggcaccggatgtctt

SEQ ID NO: 603774 - DNA, 19 bp, Mus musculus
  siRNA target sequence for Hmgcs1 (NM_145942.2,1380-1398).
cggatgtctttgctgaaaa

SEQ ID NO: 603775 - DNA, 19 bp, Mus musculus
  siRNA target sequence for Hmgcs1 (NM_145942.2,1421-1439).
catcacttagccaactata

SEQ ID NO: 603776 - DNA, 19 bp, Mus musculus
  siRNA target sequence for Hmgcs1 (NM_145942.2,1452-1470).
caatagactcactctttga

SEQ ID NO: 603777 - DNA, 19 bp, Mus musculus
  siRNA target sequence for Hmgcs1 (NM_145942.2,1565-1583).
gggctcgtgcatagtaaca

SEQ ID NO: 603778 - DNA, 19 bp, Mus musculus
  siRNA target sequence for Hmgcs1 (NM_145942.2,1567-1585).
gctcgtgcatagtaacaca

SEQ ID NO: 603779 - DNA, 19 bp, Mus musculus
  siRNA target sequence for Hmgcs1 (NM_145942.2,1635-1653).
caacctcggccgaatctga

SEQ ID NO: 603780 - DNA, 19 bp, Mus musculus
  siRNA target sequence for Hmgcs1 (NM_145942.2,1639-1657).
ctcggccgaatctgaatca

SEQ ID NO: 603781 - DNA, 19 bp, Mus musculus
  siRNA target sequence for Hmgcs2 (NM_008256.2,77-95).
ggcgggtcctgcaagtgaa

SEQ ID NO: 603782 - DNA, 19 bp, Mus musculus
  siRNA target sequence for Hmgcs2 (NM_008256.2,147-165).
ccagcagaggttttctaca

SEQ ID NO: 603783 - DNA, 19 bp, Mus musculus
  siRNA target sequence for Hmgcs2 (NM_008256.2,148-166).
cagcagaggttttctacaa

SEQ ID NO: 603784 - DNA, 19 bp, Mus musculus
  siRNA target sequence for Hmgcs2 (NM_008256.2,176-194).
ctcccctggccaaaacaga

SEQ ID NO: 603785 - DNA, 19 bp, Mus musculus
  siRNA target sequence for Hmgcs2 (NM_008256.2,178-196).
cccctggccaaaacagata

SEQ ID NO: 603786 - DNA, 19 bp, Mus musculus
  siRNA target sequence for Hmgcs2 (NM_008256.2,220-238).
cttgccctggaggtctatt

SEQ ID NO: 603787 - DNA, 19 bp, Mus musculus
  siRNA target sequence for Hmgcs2 (NM_008256.2,234-252).
ctattttccagcccaatat

SEQ ID NO: 603788 - DNA, 19 bp, Mus musculus
  siRNA target sequence for Hmgcs2 (NM_008256.2,343-361).
gtccaggaggacatcaact

SEQ ID NO: 603789 - DNA, 19 bp, Mus musculus
  siRNA target sequence for Hmgcs2 (NM_008256.2,438-456).
gggcaccgagaccatcatt

SEQ ID NO: 603790 - DNA, 19 bp, Mus musculus
  siRNA target sequence for Hmgcs2 (NM_008256.2,440-458).
gcaccgagaccatcattga

SEQ ID NO: 603791 - DNA, 19 bp, Mus musculus
  siRNA target sequence for Hmgcs2 (NM_008256.2,464-482).
ccaaggctgtcaaaacagt

SEQ ID NO: 603792 - DNA, 19 bp, Mus musculus
  siRNA target sequence for Hmgcs2 (NM_008256.2,762-780).
cgcgtacgacttctacaaa

SEQ ID NO: 603793 - DNA, 19 bp, Mus musculus
  siRNA target sequence for Hmgcs2 (NM_008256.2,843-861).
ggccttggatcgatgctat

SEQ ID NO: 603794 - DNA, 19 bp, Mus musculus
  siRNA target sequence for Hmgcs2 (NM_008256.2,925-943).
ctcgatgatgtgcagtata

SEQ ID NO: 603795 - DNA, 19 bp, Mus musculus
  siRNA target sequence for Hmgcs2 (NM_008256.2,931-949).
gatgtgcagtatatgatct

SEQ ID NO: 603796 - DNA, 19 bp, Mus musculus
  siRNA target sequence for Hmgcs2 (NM_008256.2,983-1001).
ccctggctcggttgatgtt

SEQ ID NO: 603797 - DNA, 19 bp, Mus musculus
  siRNA target sequence for Hmgcs2 (NM_008256.2,987-1005).
ggctcggttgatgttcaat

SEQ ID NO: 603798 - DNA, 19 bp, Mus musculus
  siRNA target sequence for Hmgcs2 (NM_008256.2,991-1009).
cggttgatgttcaatgact

SEQ ID NO: 603799 - DNA, 19 bp, Mus musculus
  siRNA target sequence for Hmgcs2 (NM_008256.2,992-1010).
ggttgatgttcaatgactt

SEQ ID NO: 603800 - DNA, 19 bp, Mus musculus
  siRNA target sequence for Hmgcs2 (NM_008256.2,1014-1032).
gtcatccagcagtgacaaa

SEQ ID NO: 603801 - DNA, 19 bp, Mus musculus
  siRNA target sequence for Hmgcs2 (NM_008256.2,1027-1045).
gacaaacagaacaacttat

SEQ ID NO: 603802 - DNA, 19 bp, Mus musculus
  siRNA target sequence for Hmgcs2 (NM_008256.2,1061-1079).
ccttcaggggtctaaagct

SEQ ID NO: 603803 - DNA, 19 bp, Mus musculus
  siRNA target sequence for Hmgcs2 (NM_008256.2,1542-1560).
gatgcatcgcaggaagtat

SEQ ID NO: 603804 - DNA, 19 bp, Mus musculus
  siRNA target sequence for Clybl (NM_029556.2,103-121).
gctccttgtccaatcacaa

SEQ ID NO: 603805 - DNA, 19 bp, Mus musculus
  siRNA target sequence for Clybl (NM_029556.2,106-124).
ccttgtccaatcacaagta

SEQ ID NO: 603806 - DNA, 19 bp, Mus musculus
  siRNA target sequence for Clybl (NM_029556.2,182-200).
gatcccgtccttgaaagta

SEQ ID NO: 603807 - DNA, 19 bp, Mus musculus
  siRNA target sequence for Clybl (NM_029556.2,185-203).
cccgtccttgaaagtagat

SEQ ID NO: 603808 - DNA, 19 bp, Mus musculus
  siRNA target sequence for Clybl (NM_029556.2,186-204).
ccgtccttgaaagtagatt

SEQ ID NO: 603809 - DNA, 19 bp, Mus musculus
  siRNA target sequence for Clybl (NM_029556.2,188-206).
gtccttgaaagtagattgt

SEQ ID NO: 603810 - DNA, 19 bp, Mus musculus
  siRNA target sequence for Clybl (NM_029556.2,248-266).
gaatgaagctcgattgaga

SEQ ID NO: 603811 - DNA, 19 bp, Mus musculus
  siRNA target sequence for Clybl (NM_029556.2,255-273).
gctcgattgagaatagcaa

SEQ ID NO: 603812 - DNA, 19 bp, Mus musculus
  siRNA target sequence for Clybl (NM_029556.2,258-276).
cgattgagaatagcaaaaa

SEQ ID NO: 603813 - DNA, 19 bp, Mus musculus
  siRNA target sequence for Clybl (NM_029556.2,271-289).
caaaaactcttgaagactt

SEQ ID NO: 603814 - DNA, 19 bp, Mus musculus
  siRNA target sequence for Clybl (NM_029556.2,296-314).
gggcacaacggaaaagtgt

SEQ ID NO: 603815 - DNA, 19 bp, Mus musculus
  siRNA target sequence for Clybl (NM_029556.2,391-409).
ctagtctgatgctaccaaa

SEQ ID NO: 603816 - DNA, 19 bp, Mus musculus
  siRNA target sequence for Clybl (NM_029556.2,431-449).
ccgatggttttcagacaaa

SEQ ID NO: 603817 - DNA, 19 bp, Mus musculus
  siRNA target sequence for Clybl (NM_029556.2,516-534).
gcaatgggtttgctcaatt

SEQ ID NO: 603818 - DNA, 19 bp, Mus musculus
  siRNA target sequence for Clybl (NM_029556.2,634-652).
gtgcaacaagcaacaaaga

SEQ ID NO: 603819 - DNA, 19 bp, Mus musculus
  siRNA target sequence for Clybl (NM_029556.2,709-727).
gcctacaagccatagatct

SEQ ID NO: 603820 - DNA, 19 bp, Mus musculus
  siRNA target sequence for Clybl (NM_029556.2,710-728).
cctacaagccatagatctt

SEQ ID NO: 603821 - DNA, 19 bp, Mus musculus
  siRNA target sequence for Clybl (NM_029556.2,723-741).
gatcttgtgtacattgact

SEQ ID NO: 603822 - DNA, 19 bp, Mus musculus
  siRNA target sequence for Clybl (NM_029556.2,836-854).
ggtacaggaacagtttact

SEQ ID NO: 603823 - DNA, 19 bp, Mus musculus
  siRNA target sequence for Clybl (NM_029556.2,937-955).
ctttccgaggaagtatgat

SEQ ID NO: 603824 - DNA, 19 bp, Mus musculus
  siRNA target sequence for 1600028F23Rik (NM_080793.2,138-156).
ggacgatgacggattacca

SEQ ID NO: 603825 - DNA, 19 bp, Mus musculus
  siRNA target sequence for 1600028F23Rik (NM_080793.2,192-210).
cagatttgagggcaacttt

SEQ ID NO: 603826 - DNA, 19 bp, Mus musculus
  siRNA target sequence for 1600028F23Rik (NM_080793.2,230-248).
ggcgtgggaaattcttctt

SEQ ID NO: 603827 - DNA, 19 bp, Mus musculus
  siRNA target sequence for 1600028F23Rik (NM_080793.2,232-250).
cgtgggaaattcttcttct

SEQ ID NO: 603828 - DNA, 19 bp, Mus musculus
  siRNA target sequence for 1600028F23Rik (NM_080793.2,260-278).
gcaccctggagggatatta

SEQ ID NO: 603829 - DNA, 19 bp, Mus musculus
  siRNA target sequence for 1600028F23Rik (NM_080793.2,263-281).
ccctggagggatattacgt

SEQ ID NO: 603830 - DNA, 19 bp, Mus musculus
  siRNA target sequence for 1600028F23Rik (NM_080793.2,391-409).
gacgggaggctgatcttca

SEQ ID NO: 603831 - DNA, 19 bp, Mus musculus
  siRNA target sequence for 1600028F23Rik (NM_080793.2,473-491).
gcctcgtcggggaagtcaa

SEQ ID NO: 603832 - DNA, 19 bp, Mus musculus
  siRNA target sequence for 1600028F23Rik (NM_080793.2,474-492).
cctcgtcggggaagtcaat

SEQ ID NO: 603833 - DNA, 19 bp, Mus musculus
  siRNA target sequence for 1600028F23Rik (NM_080793.2,477-495).
cgtcggggaagtcaatgaa

SEQ ID NO: 603834 - DNA, 19 bp, Mus musculus
  siRNA target sequence for 1600028F23Rik (NM_080793.2,480-498).
cggggaagtcaatgaagat

SEQ ID NO: 603835 - DNA, 19 bp, Mus musculus
  siRNA target sequence for 1600028F23Rik (NM_080793.2,500-518).
gagagatgacgggagaaaa

SEQ ID NO: 603836 - DNA, 19 bp, Mus musculus
  siRNA target sequence for 1600028F23Rik (NM_080793.2,514-532).
gaaaagatcgcctatgtgt

SEQ ID NO: 603837 - DNA, 19 bp, Mus musculus
  siRNA target sequence for 1600028F23Rik (NM_080793.2,653-671).
gttccgtgtaccactttga

SEQ ID NO: 603838 - DNA, 19 bp, Mus musculus
  siRNA target sequence for 1600028F23Rik (NM_080793.2,656-674).
ccgtgtaccactttgataa

SEQ ID NO: 603839 - DNA, 19 bp, Mus musculus
  siRNA target sequence for 1600028F23Rik (NM_080793.2,657-675).
cgtgtaccactttgataaa

SEQ ID NO: 603840 - DNA, 19 bp, Mus musculus
  siRNA target sequence for 1600028F23Rik (NM_080793.2,789-807).
ggtagcagttggacctaat

SEQ ID NO: 603841 - DNA, 19 bp, Mus musculus
  siRNA target sequence for 1600028F23Rik (NM_080793.2,796-814).
gttggacctaatactgtta

SEQ ID NO: 603842 - DNA, 19 bp, Mus musculus
  siRNA target sequence for 1600028F23Rik (NM_080793.2,799-817).
ggacctaatactgttatgt

SEQ ID NO: 603843 - DNA, 19 bp, Mus musculus
  siRNA target sequence for 1600028F23Rik (NM_080793.2,809-827).
ctgttatgtcgttttataa

SEQ ID NO: 603844 - DNA, 19 bp, Mus musculus
  siRNA target sequence for 1600028F23Rik (NM_080793.2,861-879).
cagggattgggccctaaat

SEQ ID NO: 603845 - DNA, 19 bp, Mus musculus
  siRNA target sequence for 1600028F23Rik (NM_080793.2,900-918).
cgaggagacagtcattgat

SEQ ID NO: 603846 - DNA, 19 bp, Mus musculus
  siRNA target sequence for 1600028F23Rik (NM_080793.2,989-1007).
ctccgaactgcgtctatga

SEQ ID NO: 603847 - DNA, 19 bp, Mus musculus
  siRNA target sequence for 1600028F23Rik (NM_080793.2,998-1016).
gcgtctatgacctgtttgt

SEQ ID NO: 603848 - DNA, 19 bp, Mus musculus
  siRNA target sequence for Bat8 (NM_145830.1,536-554).
gtcccagtcgggccaaaat

SEQ ID NO: 603849 - DNA, 19 bp, Mus musculus
  siRNA target sequence for Bat8 (NM_145830.1,538-556).
cccagtcgggccaaaatgt

SEQ ID NO: 603850 - DNA, 19 bp, Mus musculus
  siRNA target sequence for Bat8 (NM_145830.1,542-560).
gtcgggccaaaatgtcaat

SEQ ID NO: 603851 - DNA, 19 bp, Mus musculus
  siRNA target sequence for Bat8 (NM_145830.1,544-562).
cgggccaaaatgtcaatga

SEQ ID NO: 603852 - DNA, 19 bp, Mus musculus
  siRNA target sequence for Bat8 (NM_145830.1,546-564).
ggccaaaatgtcaatgaca

SEQ ID NO: 603853 - DNA, 19 bp, Mus musculus
  siRNA target sequence for Bat8 (NM_145830.1,703-721).
caccgagcccggaaaacca

SEQ ID NO: 603854 - DNA, 19 bp, Mus musculus
  siRNA target sequence for Bat8 (NM_145830.1,1132-1150).
gaggagtcgggcaatcagt

SEQ ID NO: 603855 - DNA, 19 bp, Mus musculus
  siRNA target sequence for Bat8 (NM_145830.1,1295-1313).
cagggcccagtgagtacat

SEQ ID NO: 603856 - DNA, 19 bp, Mus musculus
  siRNA target sequence for Bat8 (NM_145830.1,1446-1464).
catggaggctcccaagatt

SEQ ID NO: 603857 - DNA, 19 bp, Mus musculus
  siRNA target sequence for Bat8 (NM_145830.1,2146-2164).
ctgcagaaggtgatcctta

SEQ ID NO: 603858 - DNA, 19 bp, Mus musculus
  siRNA target sequence for Bat8 (NM_145830.1,2292-2310).
caatgccgtagataagcaa

SEQ ID NO: 603859 - DNA, 19 bp, Mus musculus
  siRNA target sequence for Bat8 (NM_145830.1,2411-2429).
gctccacctgtctacatca

SEQ ID NO: 603860 - DNA, 19 bp, Mus musculus
  siRNA target sequence for Bat8 (NM_145830.1,2512-2530).
ggctggacgcccatcatct

SEQ ID NO: 603861 - DNA, 19 bp, Mus musculus
  siRNA target sequence for Bat8 (NM_145830.1,2544-2562).
caagcacatcgatgtgatt

SEQ ID NO: 603862 - DNA, 19 bp, Mus musculus
  siRNA target sequence for Bat8 (NM_145830.1,2548-2566).
cacatcgatgtgattcgta

SEQ ID NO: 603863 - DNA, 19 bp, Mus musculus
  siRNA target sequence for Bat8 (NM_145830.1,2857-2875).
gcactgcagctcaatcgaa

SEQ ID NO: 603864 - DNA, 19 bp, Mus musculus
  siRNA target sequence for Bat8 (NM_145830.1,2858-2876).
cactgcagctcaatcgaaa

SEQ ID NO: 603865 - DNA, 19 bp, Mus musculus
  siRNA target sequence for Bat8 (NM_145830.1,2862-2880).
gcagctcaatcgaaagctt

SEQ ID NO: 603866 - DNA, 19 bp, Mus musculus
  siRNA target sequence for Bat8 (NM_145830.1,2863-2881).
cagctcaatcgaaagctta

SEQ ID NO: 603867 - DNA, 19 bp, Mus musculus
  siRNA target sequence for Bat8 (NM_145830.1,2935-2953).
gtagcccgaggctatgaga

SEQ ID NO: 603868 - DNA, 19 bp, Mus musculus
  siRNA target sequence for Bat8 (NM_145830.1,2940-2958).
ccgaggctatgagaatgta

SEQ ID NO: 603869 - DNA, 19 bp, Mus musculus
  siRNA target sequence for Bat8 (NM_145830.1,2993-3011).
cgtgcccggaggactacaa

SEQ ID NO: 603870 - DNA, 19 bp, Mus musculus
  siRNA target sequence for Bat8 (NM_145830.1,2998-3016).
ccggaggactacaagtaca

SEQ ID NO: 603871 - DNA, 19 bp, Mus musculus
  siRNA target sequence for Bat8 (NM_145830.1,2999-3017).
cggaggactacaagtacat

SEQ ID NO: 603872 - DNA, 19 bp, Mus musculus
  siRNA target sequence for Bat8 (NM_145830.1,3031-3049).
gagacatcgaccatgaaca

SEQ ID NO: 603873 - DNA, 19 bp, Mus musculus
  siRNA target sequence for Bat8 (NM_145830.1,3160-3178).
cggctgctccaggagttta

SEQ ID NO: 603874 - DNA, 19 bp, Mus musculus
  siRNA target sequence for Bat8 (NM_145830.1,3194-3212).
ccctgatctttgagtgtaa

SEQ ID NO: 603875 - DNA, 19 bp, Mus musculus
  siRNA target sequence for Bat8 (NM_145830.1,3344-3362).
cgttcatctgcgagtatgt

SEQ ID NO: 603876 - DNA, 19 bp, Mus musculus
  siRNA target sequence for Bat8 (NM_145830.1,3345-3363).
gttcatctgcgagtatgta

SEQ ID NO: 603877 - DNA, 19 bp, Mus musculus
  siRNA target sequence for Bat8 (NM_145830.1,3406-3424).
gattcttacctcttcgatt

SEQ ID NO: 603878 - DNA, 19 bp, Mus musculus
  siRNA target sequence for Bat8 (NM_145830.1,3415-3433).
ctcttcgatttagataaca

SEQ ID NO: 603879 - DNA, 19 bp, Mus musculus
  siRNA target sequence for Bat8 (NM_145830.1,3453-3471).
cattgatgcccgttactat

SEQ ID NO: 603880 - DNA, 19 bp, Mus musculus
  siRNA target sequence for Bat8 (NM_145830.1,3559-3577).
ccacgcattgccttcttca

SEQ ID NO: 603881 - DNA, 19 bp, Mus musculus
  siRNA target sequence for 1500031M22Rik (NM_025447.1,177-195).
catcgataaggctgcttta

SEQ ID NO: 603882 - DNA, 19 bp, Mus musculus
  siRNA target sequence for 1500031M22Rik (NM_025447.1,180-198).
cgataaggctgctttaaga

SEQ ID NO: 603883 - DNA, 19 bp, Mus musculus
  siRNA target sequence for 1500031M22Rik (NM_025447.1,273-291).
ggtagttgcctgtgaactt

SEQ ID NO: 603884 - DNA, 19 bp, Mus musculus
  siRNA target sequence for 1500031M22Rik (NM_025447.1,304-322).
gtagctgaacttcacaaaa

SEQ ID NO: 603885 - DNA, 19 bp, Mus musculus
  siRNA target sequence for 1500031M22Rik (NM_025447.1,363-381).
ggtgggagatgtactgaaa

SEQ ID NO: 603886 - DNA, 19 bp, Mus musculus
  siRNA target sequence for 1500031M22Rik (NM_025447.1,364-382).
gtgggagatgtactgaaat

SEQ ID NO: 603887 - DNA, 19 bp, Mus musculus
  siRNA target sequence for 1500031M22Rik (NM_025447.1,413-431).
caaacttgccttatcagat

SEQ ID NO: 603888 - DNA, 19 bp, Mus musculus
  siRNA target sequence for 1500031M22Rik (NM_025447.1,437-455).
ctccctttgtcttcaagtt

SEQ ID NO: 603889 - DNA, 19 bp, Mus musculus
  siRNA target sequence for 1500031M22Rik (NM_025447.1,457-475).
ctgctccaccggccatttt

SEQ ID NO: 603890 - DNA, 19 bp, Mus musculus
  siRNA target sequence for 1500031M22Rik (NM_025447.1,460-478).
ctccaccggccatttttca

SEQ ID NO: 603891 - DNA, 19 bp, Mus musculus
  siRNA target sequence for 1500031M22Rik (NM_025447.1,503-521).
gagagtttgctcttcgatt

SEQ ID NO: 603892 - DNA, 19 bp, Mus musculus
  siRNA target sequence for 1500031M22Rik (NM_025447.1,507-525).
gtttgctcttcgattggtt

SEQ ID NO: 603893 - DNA, 19 bp, Mus musculus
  siRNA target sequence for 1500031M22Rik (NM_025447.1,528-546).
caagcctggagataaatta

SEQ ID NO: 603894 - DNA, 19 bp, Mus musculus
  siRNA target sequence for 1500031M22Rik (NM_025447.1,535-553).
ggagataaattatactgta

SEQ ID NO: 603895 - DNA, 19 bp, Mus musculus
  siRNA target sequence for 1500031M22Rik (NM_025447.1,560-578).
ccatcaacacacagctttt

SEQ ID NO: 603896 - DNA, 19 bp, Mus musculus
  siRNA target sequence for 1500031M22Rik (NM_025447.1,561-579).
catcaacacacagctttta

SEQ ID NO: 603897 - DNA, 19 bp, Mus musculus
  siRNA target sequence for 1500031M22Rik (NM_025447.1,580-598).
gcacgcgtggaccatctaa

SEQ ID NO: 603898 - DNA, 19 bp, Mus musculus
  siRNA target sequence for 1500031M22Rik (NM_025447.1,581-599).
cacgcgtggaccatctaat

SEQ ID NO: 603899 - DNA, 19 bp, Mus musculus
  siRNA target sequence for 1500031M22Rik (NM_025447.1,583-601).
cgcgtggaccatctaatga

SEQ ID NO: 603900 - DNA, 19 bp, Mus musculus
  siRNA target sequence for 1500031M22Rik (NM_025447.1,584-602).
gcgtggaccatctaatgaa

SEQ ID NO: 603901 - DNA, 19 bp, Mus musculus
  siRNA target sequence for 1500031M22Rik (NM_025447.1,645-663).
cagcgtggtcaggatagaa

SEQ ID NO: 603902 - DNA, 19 bp, Mus musculus
  siRNA target sequence for 1500031M22Rik (NM_025447.1,654-672).
caggatagaacctaagaat

SEQ ID NO: 603903 - DNA, 19 bp, Mus musculus
  siRNA target sequence for 1500031M22Rik (NM_025447.1,673-691).
ccgccaccaccaatcaatt

SEQ ID NO: 603904 - DNA, 19 bp, Mus musculus
  siRNA target sequence for 1500031M22Rik (NM_025447.1,674-692).
cgccaccaccaatcaattt

SEQ ID NO: 603905 - DNA, 19 bp, Mus musculus
  siRNA target sequence for 1500031M22Rik (NM_025447.1,675-693).
gccaccaccaatcaatttt

SEQ ID NO: 603906 - DNA, 19 bp, Mus musculus
  siRNA target sequence for 1500031M22Rik (NM_025447.1,677-695).
caccaccaatcaattttca

SEQ ID NO: 603907 - DNA, 19 bp, Mus musculus
  siRNA target sequence for 1500031M22Rik (NM_025447.1,697-715).
gaatgggacggcttagtaa

SEQ ID NO: 603908 - DNA, 19 bp, Mus musculus
  siRNA target sequence for 1500031M22Rik (NM_025447.1,701-719).
gggacggcttagtaaggat

SEQ ID NO: 603909 - DNA, 19 bp, Mus musculus
  siRNA target sequence for 1500031M22Rik (NM_025447.1,706-724).
ggcttagtaaggatcactt

SEQ ID NO: 603910 - DNA, 19 bp, Mus musculus
  siRNA target sequence for 1500031M22Rik (NM_025447.1,743-761).
cactgtccgctgcattcaa

SEQ ID NO: 603911 - DNA, 19 bp, Mus musculus
  siRNA target sequence for 1500031M22Rik (NM_025447.1,745-763).
ctgtccgctgcattcaaat

SEQ ID NO: 603912 - DNA, 19 bp, Mus musculus
  siRNA target sequence for 1500031M22Rik (NM_025447.1,747-765).
gtccgctgcattcaaatca

SEQ ID NO: 603913 - DNA, 19 bp, Mus musculus
  siRNA target sequence for 1500031M22Rik (NM_025447.1,750-768).
cgctgcattcaaatcaagt

SEQ ID NO: 603914 - DNA, 19 bp, Mus musculus
  siRNA target sequence for 1500031M22Rik (NM_025447.1,759-777).
caaatcaagtgcagtacaa

SEQ ID NO: 603915 - DNA, 19 bp, Mus musculus
  siRNA target sequence for 1500031M22Rik (NM_025447.1,812-830).
cagtacagaatactgtaat

SEQ ID NO: 603916 - DNA, 19 bp, Mus musculus
  siRNA target sequence for 1500031M22Rik (NM_025447.1,902-920).
cccgttccatggacataga

SEQ ID NO: 603917 - DNA, 19 bp, Mus musculus
  siRNA target sequence for 1500031M22Rik (NM_025447.1,903-921).
ccgttccatggacatagat

SEQ ID NO: 603918 - DNA, 19 bp, Mus musculus
  siRNA target sequence for 1500031M22Rik (NM_025447.1,933-951).
gttgctacatggattcaat

SEQ ID NO: 603919 - DNA, 19 bp, Mus musculus
  siRNA target sequence for Tfb1m (NM_146074.1,50-68).
ccattcgggagatcattaa

SEQ ID NO: 603920 - DNA, 19 bp, Mus musculus
  siRNA target sequence for Tfb1m (NM_146074.1,55-73).
cgggagatcattaagttgt

SEQ ID NO: 603921 - DNA, 19 bp, Mus musculus
  siRNA target sequence for Tfb1m (NM_146074.1,56-74).
gggagatcattaagttgtt

SEQ ID NO: 603922 - DNA, 19 bp, Mus musculus
  siRNA target sequence for Tfb1m (NM_146074.1,77-95).
gactgcgagcggtgaaaca

SEQ ID NO: 603923 - DNA, 19 bp, Mus musculus
  siRNA target sequence for Tfb1m (NM_146074.1,125-143).
ggctgacagacaagattgt

SEQ ID NO: 603924 - DNA, 19 bp, Mus musculus
  siRNA target sequence for Tfb1m (NM_146074.1,155-173).
gcagtctagcagatgttta

SEQ ID NO: 603925 - DNA, 19 bp, Mus musculus
  siRNA target sequence for Tfb1m (NM_146074.1,156-174).
cagtctagcagatgtttat

SEQ ID NO: 603926 - DNA, 19 bp, Mus musculus
  siRNA target sequence for Tfb1m (NM_146074.1,158-176).
gtctagcagatgtttatgt

SEQ ID NO: 603927 - DNA, 19 bp, Mus musculus
  siRNA target sequence for Tfb1m (NM_146074.1,305-323).
ctggaaaactccgaattgt

SEQ ID NO: 603928 - DNA, 19 bp, Mus musculus
  siRNA target sequence for Tfb1m (NM_146074.1,357-375).
ggcttttccaggcaacatt

SEQ ID NO: 603929 - DNA, 19 bp, Mus musculus
  siRNA target sequence for Tfb1m (NM_146074.1,358-376).
gcttttccaggcaacatta

SEQ ID NO: 603930 - DNA, 19 bp, Mus musculus
  siRNA target sequence for Tfb1m (NM_146074.1,387-405).
ggaagatgatcctccaaat

SEQ ID NO: 603931 - DNA, 19 bp, Mus musculus
  siRNA target sequence for Tfb1m (NM_146074.1,436-454).
gtttcaactccactgatta

SEQ ID NO: 603932 - DNA, 19 bp, Mus musculus
  siRNA target sequence for Tfb1m (NM_146074.1,461-479).
ggcttgaaaatatttctct

SEQ ID NO: 603933 - DNA, 19 bp, Mus musculus
  siRNA target sequence for Tfb1m (NM_146074.1,509-527).
ctaagatgacgttaacgtt

SEQ ID NO: 603934 - DNA, 19 bp, Mus musculus
  siRNA target sequence for Tfb1m (NM_146074.1,518-536).
cgttaacgtttcaaaagga

SEQ ID NO: 603935 - DNA, 19 bp, Mus musculus
  siRNA target sequence for Tfb1m (NM_146074.1,576-594).
gcacagtcgcctttccatt

SEQ ID NO: 603936 - DNA, 19 bp, Mus musculus
  siRNA target sequence for Tfb1m (NM_146074.1,577-595).
cacagtcgcctttccatta

SEQ ID NO: 603937 - DNA, 19 bp, Mus musculus
  siRNA target sequence for Tfb1m (NM_146074.1,616-634).
gttgaacacctctttacaa

SEQ ID NO: 603938 - DNA, 19 bp, Mus musculus
  siRNA target sequence for Tfb1m (NM_146074.1,627-645).
ctttacaatcccaggaaaa

SEQ ID NO: 603939 - DNA, 19 bp, Mus musculus
  siRNA target sequence for Tfb1m (NM_146074.1,636-654).
cccaggaaaagcttttgtt

SEQ ID NO: 603940 - DNA, 19 bp, Mus musculus
  siRNA target sequence for Tfb1m (NM_146074.1,656-674).
ccaaaccaaaagttgatgt

SEQ ID NO: 603941 - DNA, 19 bp, Mus musculus
  siRNA target sequence for Tfb1m (NM_146074.1,657-675).
caaaccaaaagttgatgta

SEQ ID NO: 603942 - DNA, 19 bp, Mus musculus
  siRNA target sequence for Tfb1m (NM_146074.1,684-702).
gcaccttacgcccttgata

SEQ ID NO: 603943 - DNA, 19 bp, Mus musculus
  siRNA target sequence for Tfb1m (NM_146074.1,745-763).
gtccagaatgcgtttcagt

SEQ ID NO: 603944 - DNA, 19 bp, Mus musculus
  siRNA target sequence for Tfb1m (NM_146074.1,760-778).
cagtttcgaaggaaatatt

SEQ ID NO: 603945 - DNA, 19 bp, Mus musculus
  siRNA target sequence for Tfb1m (NM_146074.1,779-797).
gccaccgagggcttggaat

SEQ ID NO: 603946 - DNA, 19 bp, Mus musculus
  siRNA target sequence for Tfb1m (NM_146074.1,783-801).
ccgagggcttggaatgtta

SEQ ID NO: 603947 - DNA, 19 bp, Mus musculus
  siRNA target sequence for Tfb1m (NM_146074.1,784-802).
cgagggcttggaatgttat

SEQ ID NO: 603948 - DNA, 19 bp, Mus musculus
  siRNA target sequence for Tfb1m (NM_146074.1,785-803).
gagggcttggaatgttatt

SEQ ID NO: 603949 - DNA, 19 bp, Mus musculus
  siRNA target sequence for Tfb1m (NM_146074.1,830-848).
ctggaaggctgttacagtt

SEQ ID NO: 603950 - DNA, 19 bp, Mus musculus
  siRNA target sequence for Tfb1m (NM_146074.1,840-858).
gttacagttggcagacatt

SEQ ID NO: 603951 - DNA, 19 bp, Mus musculus
  siRNA target sequence for Tfb1m (NM_146074.1,880-898).
cacctctcgctcatgcatt

SEQ ID NO: 603952 - DNA, 19 bp, Mus musculus
  siRNA target sequence for Tfb1m (NM_146074.1,882-900).
cctctcgctcatgcatttt

SEQ ID NO: 603953 - DNA, 19 bp, Mus musculus
  siRNA target sequence for Tfb1m (NM_146074.1,888-906).
gctcatgcattttaagagt

SEQ ID NO: 603954 - DNA, 19 bp, Mus musculus
  siRNA target sequence for Tfb1m (NM_146074.1,943-961).
ccacaactctttacttata

SEQ ID NO: 603955 - DNA, 19 bp, Mus musculus
  siRNA target sequence for Tfb2m (NM_008249.1,301-319).
cgtcacatagcatgtaaga

SEQ ID NO: 603956 - DNA, 19 bp, Mus musculus
  siRNA target sequence for Tfb2m (NM_008249.1,1021-1039).
cctttgaactatgatatat

SEQ ID NO: 603957 - DNA, 19 bp, Mus musculus
  siRNA target sequence for Tfb2m (NM_008249.1,1022-1040).
ctttgaactatgatatatt

SEQ ID NO: 603958 - DNA, 19 bp, Mus musculus
  siRNA target sequence for Tfb2m (NM_008249.1,1080-1098).
cccaataatacgccattta

SEQ ID NO: 603959 - DNA, 19 bp, Mus musculus
  siRNA target sequence for Tfb2m (NM_008249.1,1107-1125).
gagtacggttgatcctatt

SEQ ID NO: 603960 - DNA, 19 bp, Mus musculus
  siRNA target sequence for Tfb2m (NM_008249.1,1109-1127).
gtacggttgatcctattaa

SEQ ID NO: 603961 - DNA, 19 bp, Mus musculus
  siRNA target sequence for Tfb2m (NM_008249.1,1112-1130).
cggttgatcctattaatat

SEQ ID NO: 603962 - DNA, 19 bp, Mus musculus
  siRNA target sequence for Tfb2m (NM_008249.1,1176-1194).
gtatcctcacgacttcaaa

SEQ ID NO: 603963 - DNA, 19 bp, Mus musculus
  siRNA target sequence for Tfb2m (NM_008249.1,1181-1199).
ctcacgacttcaaaaaact

SEQ ID NO: 603964 - DNA, 19 bp, Mus musculus
  siRNA target sequence for Tfb2m (NM_008249.1,1183-1201).
cacgacttcaaaaaacttt

SEQ ID NO: 603965 - DNA, 19 bp, Mus musculus
  siRNA target sequence for 5330414D10Rik (NM_153594.2,383-401).
ggctttccgcgctattgat

SEQ ID NO: 603966 - DNA, 19 bp, Mus musculus
  siRNA target sequence for 5330414D10Rik (NM_153594.2,394-412).
ctattgatcgagcagatta

SEQ ID NO: 603967 - DNA, 19 bp, Mus musculus
  siRNA target sequence for 5330414D10Rik (NM_153594.2,408-426).
gattattatcttgaagaat

SEQ ID NO: 603968 - DNA, 19 bp, Mus musculus
  siRNA target sequence for 5330414D10Rik (NM_153594.2,452-470).
ggcatggaaacatggaaat

SEQ ID NO: 603969 - DNA, 19 bp, Mus musculus
  siRNA target sequence for 5330414D10Rik (NM_153594.2,531-549).
gggctttcatttctgaatt

SEQ ID NO: 603970 - DNA, 19 bp, Mus musculus
  siRNA target sequence for 5330414D10Rik (NM_153594.2,578-596).
catggtggggctcattcta

SEQ ID NO: 603971 - DNA, 19 bp, Mus musculus
  siRNA target sequence for 5330414D10Rik (NM_153594.2,615-633).
cacggggtggagcttcatt

SEQ ID NO: 603972 - DNA, 19 bp, Mus musculus
  siRNA target sequence for 5330414D10Rik (NM_153594.2,617-635).
cggggtggagcttcattca

SEQ ID NO: 603973 - DNA, 19 bp, Mus musculus
  siRNA target sequence for 5330414D10Rik (NM_153594.2,683-701).
cagcgacagctttgacaaa

SEQ ID NO: 603974 - DNA, 19 bp, Mus musculus
  siRNA target sequence for 5330414D10Rik (NM_153594.2,743-761).
ggagattgctccagattgt

SEQ ID NO: 603975 - DNA, 19 bp, Mus musculus
  siRNA target sequence for 5330414D10Rik (NM_153594.2,746-764).
gattgctccagattgttgt

SEQ ID NO: 603976 - DNA, 19 bp, Mus musculus
  siRNA target sequence for 5330414D10Rik (NM_153594.2,763-781).
gtcagtatgatcgtgttta

SEQ ID NO: 603977 - DNA, 19 bp, Mus musculus
  siRNA target sequence for 5330414D10Rik (NM_153594.2,765-783).
cagtatgatcgtgtttatt

SEQ ID NO: 603978 - DNA, 19 bp, Mus musculus
  siRNA target sequence for 5330414D10Rik (NM_153594.2,767-785).
gtatgatcgtgtttattgt

SEQ ID NO: 603979 - DNA, 19 bp, Mus musculus
  siRNA target sequence for 5330414D10Rik (NM_153594.2,869-887).
gaagttgaccaagataaca

SEQ ID NO: 603980 - DNA, 19 bp, Mus musculus
  siRNA target sequence for 5330414D10Rik (NM_153594.2,904-922).
cttgggagacaaaaaagat

SEQ ID NO: 603981 - DNA, 19 bp, Mus musculus
  siRNA target sequence for 5330414D10Rik (NM_153594.2,1172-1190).
ggtttttgccagtcgaatt

SEQ ID NO: 603982 - DNA, 19 bp, Mus musculus
  siRNA target sequence for 5330414D10Rik (NM_153594.2,1327-1345).
ctgatcccctgaagtacta

SEQ ID NO: 603983 - DNA, 19 bp, Mus musculus
  siRNA target sequence for Pcmt1 (NM_008786.1,142-160).
ccagccactcggagctaat

SEQ ID NO: 603984 - DNA, 19 bp, Mus musculus
  siRNA target sequence for Pcmt1 (NM_008786.1,161-179).
ccacaacctccgcaagaat

SEQ ID NO: 603985 - DNA, 19 bp, Mus musculus
  siRNA target sequence for Pcmt1 (NM_008786.1,225-243).
gaccgttcccactatgcaa

SEQ ID NO: 603986 - DNA, 19 bp, Mus musculus
  siRNA target sequence for Pcmt1 (NM_008786.1,227-245).
ccgttcccactatgcaaaa

SEQ ID NO: 603987 - DNA, 19 bp, Mus musculus
  siRNA target sequence for Pcmt1 (NM_008786.1,228-246).
cgttcccactatgcaaaat

SEQ ID NO: 603988 - DNA, 19 bp, Mus musculus
  siRNA target sequence for Pcmt1 (NM_008786.1,232-250).
cccactatgcaaaatctaa

SEQ ID NO: 603989 - DNA, 19 bp, Mus musculus
  siRNA target sequence for Pcmt1 (NM_008786.1,257-275).
catggattctccacaatca

SEQ ID NO: 603990 - DNA, 19 bp, Mus musculus
  siRNA target sequence for Pcmt1 (NM_008786.1,292-310).
caatcagtgcccctcatat

SEQ ID NO: 603991 - DNA, 19 bp, Mus musculus
  siRNA target sequence for Pcmt1 (NM_008786.1,311-329).
gcacgcatatgcactagaa

SEQ ID NO: 603992 - DNA, 19 bp, Mus musculus
  siRNA target sequence for Pcmt1 (NM_008786.1,314-332).
cgcatatgcactagaactt

SEQ ID NO: 603993 - DNA, 19 bp, Mus musculus
  siRNA target sequence for Pcmt1 (NM_008786.1,322-340).
cactagaacttctgtttga

SEQ ID NO: 603994 - DNA, 19 bp, Mus musculus
  siRNA target sequence for Pcmt1 (NM_008786.1,430-448).
gaaaagtcattggaattga

SEQ ID NO: 603995 - DNA, 19 bp, Mus musculus
  siRNA target sequence for Pcmt1 (NM_008786.1,465-483).
gtagatgactcaataacta

SEQ ID NO: 603996 - DNA, 19 bp, Mus musculus
  siRNA target sequence for Pcmt1 (NM_008786.1,471-489).
gactcaataactaatgtca

SEQ ID NO: 603997 - DNA, 19 bp, Mus musculus
  siRNA target sequence for Pcmt1 (NM_008786.1,473-491).
ctcaataactaatgtcaaa

SEQ ID NO: 603998 - DNA, 19 bp, Mus musculus
  siRNA target sequence for Pcmt1 (NM_008786.1,571-589).
ccccttacgacgctattca

SEQ ID NO: 603999 - DNA, 19 bp, Mus musculus
  siRNA target sequence for Pcmt1 (NM_008786.1,572-590).
cccttacgacgctattcat

SEQ ID NO: 604000 - DNA, 19 bp, Mus musculus
  siRNA target sequence for Pcmt1 (NM_008786.1,574-592).
cttacgacgctattcatgt

SEQ ID NO: 604001 - DNA, 19 bp, Mus musculus
  siRNA target sequence for Pcmt1 (NM_008786.1,621-639).
gcattaatagaccagttaa

SEQ ID NO: 604002 - DNA, 19 bp, Mus musculus
  siRNA target sequence for Pcmt1 (NM_008786.1,622-640).
cattaatagaccagttaaa

SEQ ID NO: 604003 - DNA, 19 bp, Mus musculus
  siRNA target sequence for Pcmt1 (NM_008786.1,642-660).
cctggtggaagattgatat

SEQ ID NO: 604004 - DNA, 19 bp, Mus musculus
  siRNA target sequence for Pcmt1 (NM_008786.1,643-661).
ctggtggaagattgatatt

SEQ ID NO: 604005 - DNA, 19 bp, Mus musculus
  siRNA target sequence for Pcmt1 (NM_008786.1,701-719).
gtatgacaagctacaagat

SEQ ID NO: 604006 - DNA, 19 bp, Mus musculus
  siRNA target sequence for Pcmt1 (NM_008786.1,717-735).
gatggcagtgtcaaaatga

SEQ ID NO: 604007 - DNA, 19 bp, Mus musculus
  siRNA target sequence for Pcmt1 (NM_008786.1,738-756).
cctctcatgggggtgatat

SEQ ID NO: 604008 - DNA, 19 bp, Mus musculus
  siRNA target sequence for Pcmt1 (NM_008786.1,739-757).
ctctcatgggggtgatata

SEQ ID NO: 604009 - DNA, 19 bp, Mus musculus
  siRNA target sequence for Pcmt1 (NM_008786.1,752-770).
gatatacgtgcctttaaca

SEQ ID NO: 604010 - DNA, 19 bp, Mus musculus
  siRNA target sequence for Bhmt (NM_016668.2,467-485).
gtagaagtgaaaaagatat

SEQ ID NO: 604011 - DNA, 19 bp, Mus musculus
  siRNA target sequence for Bhmt (NM_016668.2,769-787).
ggaggctgcgcggttgaaa

SEQ ID NO: 604012 - DNA, 19 bp, Mus musculus
  siRNA target sequence for Bhmt (NM_016668.2,773-791).
gctgcgcggttgaaagctt

SEQ ID NO: 604013 - DNA, 19 bp, Mus musculus
  siRNA target sequence for Bhmt (NM_016668.2,774-792).
ctgcgcggttgaaagctta

SEQ ID NO: 604014 - DNA, 19 bp, Mus musculus
  siRNA target sequence for Bhmt (NM_016668.2,881-899).
ccccgagttgccactagat

SEQ ID NO: 604015 - DNA, 19 bp, Mus musculus
  siRNA target sequence for Bhmt (NM_016668.2,1097-1115).
gcaagggccagaaaggaat

SEQ ID NO: 604016 - DNA, 19 bp, Mus musculus
  siRNA target sequence for Bhmt (NM_016668.2,1120-1138).
gcagaatctgcgaatagct

SEQ ID NO: 604017 - DNA, 19 bp, Mus musculus
  siRNA target sequence for Bhmt2 (NM_022884.1,92-110).
gggacagcggctttctctt

SEQ ID NO: 604018 - DNA, 19 bp, Mus musculus
  siRNA target sequence for Bhmt2 (NM_022884.1,212-230).
gagcgggagctgatgtctt

SEQ ID NO: 604019 - DNA, 19 bp, Mus musculus
  siRNA target sequence for Bhmt2 (NM_022884.1,240-258).
caccttttctgctactgaa

SEQ ID NO: 604020 - DNA, 19 bp, Mus musculus
  siRNA target sequence for Bhmt2 (NM_022884.1,378-396).
gtaccacaaggatgaaact

SEQ ID NO: 604021 - DNA, 19 bp, Mus musculus
  siRNA target sequence for Bhmt2 (NM_022884.1,415-433).
cgactacagctagaagttt

SEQ ID NO: 604022 - DNA, 19 bp, Mus musculus
  siRNA target sequence for Bhmt2 (NM_022884.1,416-434).
gactacagctagaagtttt

SEQ ID NO: 604023 - DNA, 19 bp, Mus musculus
  siRNA target sequence for Bhmt2 (NM_022884.1,440-458).
ggaaaaatgtggacttctt

SEQ ID NO: 604024 - DNA, 19 bp, Mus musculus
  siRNA target sequence for Bhmt2 (NM_022884.1,1025-1043).
caagggctagacgagaata

SEQ ID NO: 604025 - DNA, 19 bp, Mus musculus
  siRNA target sequence for 1600025P05Rik (NM_028063.1,137-155).
ccaggtgacaggggtattt

SEQ ID NO: 604026 - DNA, 19 bp, Mus musculus
  siRNA target sequence for 1600025P05Rik (NM_028063.1,138-156).
caggtgacaggggtattta

SEQ ID NO: 604027 - DNA, 19 bp, Mus musculus
  siRNA target sequence for 1600025P05Rik (NM_028063.1,141-159).
gtgacaggggtatttatga

SEQ ID NO: 604028 - DNA, 19 bp, Mus musculus
  siRNA target sequence for 1600025P05Rik (NM_028063.1,147-165).
ggggtatttatgaagaact

SEQ ID NO: 604029 - DNA, 19 bp, Mus musculus
  siRNA target sequence for 1600025P05Rik (NM_028063.1,211-229).
gtgaagatgcgtataaagt

SEQ ID NO: 604030 - DNA, 19 bp, Mus musculus
  siRNA target sequence for 1600025P05Rik (NM_028063.1,213-231).
gaagatgcgtataaagttt

SEQ ID NO: 604031 - DNA, 19 bp, Mus musculus
  siRNA target sequence for 1600025P05Rik (NM_028063.1,228-246).
gtttgtcagatcttagaca

SEQ ID NO: 604032 - DNA, 19 bp, Mus musculus
  siRNA target sequence for 1600025P05Rik (NM_028063.1,333-351).
ccaaaccccgacatcaact

SEQ ID NO: 604033 - DNA, 19 bp, Mus musculus
  siRNA target sequence for 1600025P05Rik (NM_028063.1,339-357).
cccgacatcaactgcaata

SEQ ID NO: 604034 - DNA, 19 bp, Mus musculus
  siRNA target sequence for 1600025P05Rik (NM_028063.1,340-358).
ccgacatcaactgcaataa

SEQ ID NO: 604035 - DNA, 19 bp, Mus musculus
  siRNA target sequence for 1600025P05Rik (NM_028063.1,489-507).
cctgacgggctgttcagaa

SEQ ID NO: 604036 - DNA, 19 bp, Mus musculus
  siRNA target sequence for 1600025P05Rik (NM_028063.1,490-508).
ctgacgggctgttcagaaa

SEQ ID NO: 604037 - DNA, 19 bp, Mus musculus
  siRNA target sequence for 1600025P05Rik (NM_028063.1,494-512).
cgggctgttcagaaatcga

SEQ ID NO: 604038 - DNA, 19 bp, Mus musculus
  siRNA target sequence for 1600025P05Rik (NM_028063.1,495-513).
gggctgttcagaaatcgat

SEQ ID NO: 604039 - DNA, 19 bp, Mus musculus
  siRNA target sequence for 1600025P05Rik (NM_028063.1,496-514).
ggctgttcagaaatcgatt

SEQ ID NO: 604040 - DNA, 19 bp, Mus musculus
  siRNA target sequence for 1600025P05Rik (NM_028063.1,500-518).
gttcagaaatcgatttgaa

SEQ ID NO: 604041 - DNA, 19 bp, Mus musculus
  siRNA target sequence for 1600025P05Rik (NM_028063.1,521-539).
cagaaaccccgtaaaactt

SEQ ID NO: 604042 - DNA, 19 bp, Mus musculus
  siRNA target sequence for 1600025P05Rik (NM_028063.1,523-541).
gaaaccccgtaaaacttct

SEQ ID NO: 604043 - DNA, 19 bp, Mus musculus
  siRNA target sequence for 1600025P05Rik (NM_028063.1,543-561).
caagcagctgacagcttta

SEQ ID NO: 604044 - DNA, 19 bp, Mus musculus
  siRNA target sequence for 1600025P05Rik (NM_028063.1,621-639).
cccctgggggaactaacaa

SEQ ID NO: 604045 - DNA, 19 bp, Mus musculus
  siRNA target sequence for 1600025P05Rik (NM_028063.1,622-640).
ccctgggggaactaacaaa

SEQ ID NO: 604046 - DNA, 19 bp, Mus musculus
  siRNA target sequence for 1600025P05Rik (NM_028063.1,623-641).
cctgggggaactaacaaaa

SEQ ID NO: 604047 - DNA, 19 bp, Mus musculus
  siRNA target sequence for 1600025P05Rik (NM_028063.1,627-645).
ggggaactaacaaaagatt

SEQ ID NO: 604048 - DNA, 19 bp, Mus musculus
  siRNA target sequence for 1600025P05Rik (NM_028063.1,713-731).
ctgcttcattggtaagaga

SEQ ID NO: 604049 - DNA, 19 bp, Mus musculus
  siRNA target sequence for 1600025P05Rik (NM_028063.1,715-733).
gcttcattggtaagagaaa

SEQ ID NO: 604050 - DNA, 19 bp, Mus musculus
  siRNA target sequence for 1600025P05Rik (NM_028063.1,766-784).
ctcggcctggaaagtttgt

SEQ ID NO: 604051 - DNA, 19 bp, Mus musculus
  siRNA target sequence for 1600025P05Rik (NM_028063.1,768-786).
cggcctggaaagtttgttt

SEQ ID NO: 604052 - DNA, 19 bp, Mus musculus
  siRNA target sequence for 1600025P05Rik (NM_028063.1,783-801).
gtttctatcgaggataata

SEQ ID NO: 604053 - DNA, 19 bp, Mus musculus
  siRNA target sequence for 1600025P05Rik (NM_028063.1,822-840).
ggttggttcctgtacactt

SEQ ID NO: 604054 - DNA, 19 bp, Mus musculus
  siRNA target sequence for 1600025P05Rik (NM_028063.1,823-841).
gttggttcctgtacacttt

SEQ ID NO: 604055 - DNA, 19 bp, Mus musculus
  siRNA target sequence for 1600025P05Rik (NM_028063.1,843-861).
ggccagagagctaagatca

SEQ ID NO: 604056 - DNA, 19 bp, Mus musculus
  siRNA target sequence for 1600025P05Rik (NM_028063.1,1073-1091).
ctgcgtgctgactctcaat

SEQ ID NO: 604057 - DNA, 19 bp, Mus musculus
  siRNA target sequence for 1600025P05Rik (NM_028063.1,1225-1243).
cactccagaagggtaagaa

SEQ ID NO: 604058 - DNA, 19 bp, Mus musculus
  siRNA target sequence for 1600025P05Rik (NM_028063.1,1230-1248).
cagaagggtaagaacagaa

SEQ ID NO: 604059 - DNA, 19 bp, Mus musculus
  siRNA target sequence for Temt (NM_009349.1,30-48).
ggaggtgaggactatgaaa

SEQ ID NO: 604060 - DNA, 19 bp, Mus musculus
  siRNA target sequence for Temt (NM_009349.1,31-49).
gaggtgaggactatgaaaa

SEQ ID NO: 604061 - DNA, 19 bp, Mus musculus
  siRNA target sequence for Temt (NM_009349.1,107-125).
ggcagagcaggaaatcgta

SEQ ID NO: 604062 - DNA, 19 bp, Mus musculus
  siRNA target sequence for Temt (NM_009349.1,108-126).
gcagagcaggaaatcgtaa

SEQ ID NO: 604063 - DNA, 19 bp, Mus musculus
  siRNA target sequence for Temt (NM_009349.1,109-127).
cagagcaggaaatcgtaaa

SEQ ID NO: 604064 - DNA, 19 bp, Mus musculus
  siRNA target sequence for Temt (NM_009349.1,111-129).
gagcaggaaatcgtaaagt

SEQ ID NO: 604065 - DNA, 19 bp, Mus musculus
  siRNA target sequence for Temt (NM_009349.1,239-257).
ggtcttccgggagatcatt

SEQ ID NO: 604066 - DNA, 19 bp, Mus musculus
  siRNA target sequence for Temt (NM_009349.1,512-530).
gtgtgcctgccctgatata

SEQ ID NO: 604067 - DNA, 19 bp, Mus musculus
  siRNA target sequence for Temt (NM_009349.1,520-538).
gccctgatatagataccta

SEQ ID NO: 604068 - DNA, 19 bp, Mus musculus
  siRNA target sequence for Temt (NM_009349.1,674-692).
ggagaaggctattcaagat

SEQ ID NO: 604069 - DNA, 19 bp, Mus musculus
  siRNA target sequence for Pnmt (NM_008890.1,133-151).
gcctatctccgcaacaact

SEQ ID NO: 604070 - DNA, 19 bp, Mus musculus
  siRNA target sequence for Pnmt (NM_008890.1,134-152).
cctatctccgcaacaacta

SEQ ID NO: 604071 - DNA, 19 bp, Mus musculus
  siRNA target sequence for Pnmt (NM_008890.1,243-261).
gtcgggacgggttctcatt

SEQ ID NO: 604072 - DNA, 19 bp, Mus musculus
  siRNA target sequence for Pnmt (NM_008890.1,246-264).
gggacgggttctcattgat

SEQ ID NO: 604073 - DNA, 19 bp, Mus musculus
  siRNA target sequence for Pnmt (NM_008890.1,247-265).
ggacgggttctcattgata

SEQ ID NO: 604074 - DNA, 19 bp, Mus musculus
  siRNA target sequence for Pnmt (NM_008890.1,248-266).
gacgggttctcattgatat

SEQ ID NO: 604075 - DNA, 19 bp, Mus musculus
  siRNA target sequence for Pnmt (NM_008890.1,489-507).
gcgagtcctgcctatcgat

SEQ ID NO: 604076 - DNA, 19 bp, Mus musculus
  siRNA target sequence for Pnmt (NM_008890.1,592-610).
gtgagcccagatcttacta

SEQ ID NO: 604077 - DNA, 19 bp, Mus musculus
  siRNA target sequence for Pnmt (NM_008890.1,787-805).
gagcttcgcacctacatca

SEQ ID NO: 604078 - DNA, 19 bp, Mus musculus
  siRNA target sequence for Pnmt (NM_008890.1,819-837).
ctgcacgggggtagatgat

SEQ ID NO: 604079 - DNA, 19 bp, Mus musculus
  siRNA target sequence for Pnmt (NM_008890.1,821-839).
gcacgggggtagatgatgt

SEQ ID NO: 604080 - DNA, 19 bp, Mus musculus
  siRNA target sequence for Pnmt (NM_008890.1,824-842).
cgggggtagatgatgtcaa

SEQ ID NO: 604081 - DNA, 19 bp, Mus musculus
  siRNA target sequence for Pnmt (NM_008890.1,825-843).
gggggtagatgatgtcaaa

SEQ ID NO: 604082 - DNA, 19 bp, Mus musculus
  siRNA target sequence for 2410012M04Rik (NM_027193.2,192-210).
gatgcagtcgcgtgtatct

SEQ ID NO: 604083 - DNA, 19 bp, Mus musculus
  siRNA target sequence for 2410012M04Rik (NM_027193.2,421-439).
gggcatcccttatcaagtt

SEQ ID NO: 604084 - DNA, 19 bp, Mus musculus
  siRNA target sequence for 2410012M04Rik (NM_027193.2,428-446).
ccttatcaagttattcaca

SEQ ID NO: 604085 - DNA, 19 bp, Mus musculus
  siRNA target sequence for 2410012M04Rik (NM_027193.2,429-447).
cttatcaagttattcacaa

SEQ ID NO: 604086 - DNA, 19 bp, Mus musculus
  siRNA target sequence for 2410012M04Rik (NM_027193.2,594-612).
cgctgtgcttactcgatat

SEQ ID NO: 604087 - DNA, 19 bp, Mus musculus
  siRNA target sequence for 2410012M04Rik (NM_027193.2,596-614).
ctgtgcttactcgatatca

SEQ ID NO: 604088 - DNA, 19 bp, Mus musculus
  siRNA target sequence for 2410012M04Rik (NM_027193.2,598-616).
gtgcttactcgatatcaaa

SEQ ID NO: 604089 - DNA, 19 bp, Mus musculus
  siRNA target sequence for 2410012M04Rik (NM_027193.2,600-618).
gcttactcgatatcaaagt

SEQ ID NO: 604090 - DNA, 19 bp, Mus musculus
  siRNA target sequence for 2410012M04Rik (NM_027193.2,937-955).
ggaatcccagagtactgat

SEQ ID NO: 604091 - DNA, 19 bp, Mus musculus
  siRNA target sequence for Gamt (NM_010255.1,241-259).
gttgggagaccccctatat

SEQ ID NO: 604092 - DNA, 19 bp, Mus musculus
  siRNA target sequence for Gamt (NM_010255.1,244-262).
gggagaccccctatatgca

SEQ ID NO: 604093 - DNA, 19 bp, Mus musculus
  siRNA target sequence for Gamt (NM_010255.1,245-263).
ggagaccccctatatgcat

SEQ ID NO: 604094 - DNA, 19 bp, Mus musculus
  siRNA target sequence for Gamt (NM_010255.1,363-381).
gaacactggattattgagt

SEQ ID NO: 604095 - DNA, 19 bp, Mus musculus
  siRNA target sequence for Gamt (NM_010255.1,371-389).
gattattgagtgcaatgat

SEQ ID NO: 604096 - DNA, 19 bp, Mus musculus
  siRNA target sequence for Gamt (NM_010255.1,392-410).
ggtcttccagcgtctacaa

SEQ ID NO: 604097 - DNA, 19 bp, Mus musculus
  siRNA target sequence for Gamt (NM_010255.1,482-500).
gcctgacggtcactttgat

SEQ ID NO: 604098 - DNA, 19 bp, Mus musculus
  siRNA target sequence for Gamt (NM_010255.1,498-516).
gatgggattctatatgaca

SEQ ID NO: 604099 - DNA, 19 bp, Mus musculus
  siRNA target sequence for Gamt (NM_010255.1,541-559).
ggcacactcaccagttcaa

SEQ ID NO: 604100 - DNA, 19 bp, Mus musculus
  siRNA target sequence for Gamt (NM_010255.1,554-572).
gttcaactttattaagaat

SEQ ID NO: 604101 - DNA, 19 bp, Mus musculus
  siRNA target sequence for Gamt (NM_010255.1,636-654).
gagctcatgaagtccaaat

SEQ ID NO: 604102 - DNA, 19 bp, Mus musculus
  siRNA target sequence for Gamt (NM_010255.1,641-659).
catgaagtccaaatacaca

SEQ ID NO: 604103 - DNA, 19 bp, Mus musculus
  siRNA target sequence for Mettl1 (NM_010792.1,185-203).
gttctttgctccgcttatt

SEQ ID NO: 604104 - DNA, 19 bp, Mus musculus
  siRNA target sequence for Mettl1 (NM_010792.1,188-206).
ctttgctccgcttattcaa

SEQ ID NO: 604105 - DNA, 19 bp, Mus musculus
  siRNA target sequence for Mettl1 (NM_010792.1,193-211).
ctccgcttattcaaaataa

SEQ ID NO: 604106 - DNA, 19 bp, Mus musculus
  siRNA target sequence for Mettl1 (NM_010792.1,195-213).
ccgcttattcaaaataaga

SEQ ID NO: 604107 - DNA, 19 bp, Mus musculus
  siRNA target sequence for Mettl1 (NM_010792.1,440-458).
ccgaagtaacgccatgaaa

SEQ ID NO: 604108 - DNA, 19 bp, Mus musculus
  siRNA target sequence for Mettl1 (NM_010792.1,483-501).
ggccagctggcaaagatgt

SEQ ID NO: 604109 - DNA, 19 bp, Mus musculus
  siRNA target sequence for Mettl1 (NM_010792.1,509-527).
cttcccggacccacacttt

SEQ ID NO: 604110 - DNA, 19 bp, Mus musculus
  siRNA target sequence for Mettl1 (NM_010792.1,531-549).
cgaacgaagcataaatgga

SEQ ID NO: 604111 - DNA, 19 bp, Mus musculus
  siRNA target sequence for Mettl1 (NM_010792.1,540-558).
cataaatggagaatcatca

SEQ ID NO: 604112 - DNA, 19 bp, Mus musculus
  siRNA target sequence for Mettl1 (NM_010792.1,646-664).
ggatgtgcacccactttga

SEQ ID NO: 604113 - DNA, 19 bp, Mus musculus
  siRNA target sequence for Mettl1 (NM_010792.1,647-665).
gatgtgcacccactttgaa

SEQ ID NO: 604114 - DNA, 19 bp, Mus musculus
  siRNA target sequence for Mettl1 (NM_010792.1,650-668).
gtgcacccactttgaagaa

SEQ ID NO: 604115 - DNA, 19 bp, Mus musculus
  siRNA target sequence for Mettl1 (NM_010792.1,691-709).
ctcttgaagagctaagtga

SEQ ID NO: 604116 - DNA, 19 bp, Mus musculus
  siRNA target sequence for Mettl1 (NM_010792.1,736-754).
gttcaactgaggaaggaaa

SEQ ID NO: 604117 - DNA, 19 bp, Mus musculus
  siRNA target sequence for Mettl1 (NM_010792.1,765-783).
cgcaatgggggaaagaatt

SEQ ID NO: 604118 - DNA, 19 bp, Mus musculus
  siRNA target sequence for Mettl1 (NM_010792.1,787-805).
cagccgtcttccgaagaat

SEQ ID NO: 604119 - DNA, 19 bp, Mus musculus
  siRNA target sequence for Mettl1 (NM_010792.1,790-808).
ccgtcttccgaagaataca

SEQ ID NO: 604120 - DNA, 19 bp, Mus musculus
  siRNA target sequence for Tpmt (NM_016785.1,323-341).
gtggactgcgagtgttttt

SEQ ID NO: 604121 - DNA, 19 bp, Mus musculus
  siRNA target sequence for Tpmt (NM_016785.1,537-555).
ctgcagcatatttgatctt

SEQ ID NO: 604122 - DNA, 19 bp, Mus musculus
  siRNA target sequence for Tpmt (NM_016785.1,830-848).
ggggtcttgactacctttt

SEQ ID NO: 604123 - DNA, 19 bp, Mus musculus
  siRNA target sequence for Tpmt (NM_016785.1,831-849).
gggtcttgactaccttttt

SEQ ID NO: 604124 - DNA, 19 bp, Mus musculus
  siRNA target sequence for Nnmt (NM_010924.1,594-612).
gcaatcaagcaggtactaa

SEQ ID NO: 604125 - DNA, 19 bp, Mus musculus
  siRNA target sequence for Nnmt (NM_010924.1,595-613).
caatcaagcaggtactaaa

SEQ ID NO: 604126 - DNA, 19 bp, Mus musculus
  siRNA target sequence for Nnmt (NM_010924.1,599-617).
caagcaggtactaaagtgt

SEQ ID NO: 604127 - DNA, 19 bp, Mus musculus
  siRNA target sequence for Nnmt (NM_010924.1,780-798).
gtagatgccctgaagagta

SEQ ID NO: 604128 - DNA, 19 bp, Mus musculus
  siRNA target sequence for Nnmt (NM_010924.1,794-812).
gagtagctactacatgatt

SEQ ID NO: 604129 - DNA, 19 bp, Mus musculus
  siRNA target sequence for Nnmt (NM_010924.1,905-923).
gatttctcaaaattactct

SEQ ID NO: 604130 - DNA, 19 bp, Mus musculus
  siRNA target sequence for 0610006F02Rik (NM_027853.1,131-149).
gctggcagcctatatgcaa

SEQ ID NO: 604131 - DNA, 19 bp, Mus musculus
  siRNA target sequence for 0610006F02Rik (NM_027853.1,132-150).
ctggcagcctatatgcaaa

SEQ ID NO: 604132 - DNA, 19 bp, Mus musculus
  siRNA target sequence for 0610006F02Rik (NM_027853.1,185-203).
ccaggtcctacaaaaagat

SEQ ID NO: 604133 - DNA, 19 bp, Mus musculus
  siRNA target sequence for 0610006F02Rik (NM_027853.1,209-227).
gcaagaaacgggaactatt

SEQ ID NO: 604134 - DNA, 19 bp, Mus musculus
  siRNA target sequence for 0610006F02Rik (NM_027853.1,230-248).
gccagataaaagatctcaa

SEQ ID NO: 604135 - DNA, 19 bp, Mus musculus
  siRNA target sequence for 0610006F02Rik (NM_027853.1,402-420).
ccaatatgagcgcttcatt

SEQ ID NO: 604136 - DNA, 19 bp, Mus musculus
  siRNA target sequence for 0610006F02Rik (NM_027853.1,548-566).
cgggaggcctactgttctt

SEQ ID NO: 604137 - DNA, 19 bp, Mus musculus
  siRNA target sequence for 0610006F02Rik (NM_027853.1,550-568).
ggaggcctactgttcttct

SEQ ID NO: 604138 - DNA, 19 bp, Mus musculus
  siRNA target sequence for 0610006F02Rik (NM_027853.1,606-624).
cctgtggcagcgagtttta

SEQ ID NO: 604139 - DNA, 19 bp, Mus musculus
  siRNA target sequence for 0610006F02Rik (NM_027853.1,625-643).
gagcctacctggaaacaca

SEQ ID NO: 604140 - DNA, 19 bp, Mus musculus
  siRNA target sequence for 1600013P15Rik (NM_025907.2,349-367).
gaactgggaccttttttat

SEQ ID NO: 604141 - DNA, 19 bp, Mus musculus
  siRNA target sequence for 1600013P15Rik (NM_025907.2,372-390).
gaaacagtaccaatttttt

SEQ ID NO: 604142 - DNA, 19 bp, Mus musculus
  siRNA target sequence for 1600013P15Rik (NM_025907.2,422-440).
gaggagttgagatcatgta

SEQ ID NO: 604143 - DNA, 19 bp, Mus musculus
  siRNA target sequence for 1600013P15Rik (NM_025907.2,432-450).
gatcatgtagggagtatga

SEQ ID NO: 604144 - DNA, 19 bp, Mus musculus
  siRNA target sequence for 1600013P15Rik (NM_025907.2,443-461).
gagtatgaaggtcaaaaat

SEQ ID NO: 604145 - DNA, 19 bp, Mus musculus
  siRNA target sequence for 1600013P15Rik (NM_025907.2,449-467).
gaaggtcaaaaattgactt

SEQ ID NO: 604146 - DNA, 19 bp, Mus musculus
  siRNA target sequence for 1600013P15Rik (NM_025907.2,452-470).
ggtcaaaaattgactttgt

SEQ ID NO: 604147 - DNA, 19 bp, Mus musculus
  siRNA target sequence for 1600013P15Rik (NM_025907.2,453-471).
gtcaaaaattgactttgtt

SEQ ID NO: 604148 - DNA, 19 bp, Mus musculus
  siRNA target sequence for 1600013P15Rik (NM_025907.2,486-504).
gggttgggaactgtttatt

SEQ ID NO: 604149 - DNA, 19 bp, Mus musculus
  siRNA target sequence for 1600013P15Rik (NM_025907.2,555-573).
ctccaagggcagttgacta

SEQ ID NO: 604150 - DNA, 19 bp, Mus musculus
  siRNA target sequence for 1600013P15Rik (NM_025907.2,669-687).
ctgtggatgccgttacatt

SEQ ID NO: 604151 - DNA, 19 bp, Mus musculus
  siRNA target sequence for 1600013P15Rik (NM_025907.2,671-689).
gtggatgccgttacattga

SEQ ID NO: 604152 - DNA, 19 bp, Mus musculus
  siRNA target sequence for 1600013P15Rik (NM_025907.2,674-692).
gatgccgttacattgatct

SEQ ID NO: 604153 - DNA, 19 bp, Mus musculus
  siRNA target sequence for 1600013P15Rik (NM_025907.2,718-736).
gaagatgcgccttgtctta

SEQ ID NO: 604154 - DNA, 19 bp, Mus musculus
  siRNA target sequence for 1600013P15Rik (NM_025907.2,721-739).
gatgcgccttgtcttacta

SEQ ID NO: 604155 - DNA, 19 bp, Mus musculus
  siRNA target sequence for 1600013P15Rik (NM_025907.2,726-744).
gccttgtcttactaaacgt

SEQ ID NO: 604156 - DNA, 19 bp, Mus musculus
  siRNA target sequence for 1600013P15Rik (NM_025907.2,762-780).
caggcagaagtgtcttatt

SEQ ID NO: 604157 - DNA, 19 bp, Mus musculus
  siRNA target sequence for 1600013P15Rik (NM_025907.2,783-801).
gtgactacgggctgaatga

SEQ ID NO: 604158 - DNA, 19 bp, Mus musculus
  siRNA target sequence for 1600013P15Rik (NM_025907.2,800-818).
gatcacgccatgcttagat

SEQ ID NO: 604159 - DNA, 19 bp, Mus musculus
  siRNA target sequence for 1600013P15Rik (NM_025907.2,803-821).
cacgccatgcttagattta

SEQ ID NO: 604160 - DNA, 19 bp, Mus musculus
  siRNA target sequence for 1600013P15Rik (NM_025907.2,805-823).
cgccatgcttagatttaaa

SEQ ID NO: 604161 - DNA, 19 bp, Mus musculus
  siRNA target sequence for 1600013P15Rik (NM_025907.2,863-881).
gatggaaccagatcgtatt

SEQ ID NO: 604162 - DNA, 19 bp, Mus musculus
  siRNA target sequence for 1600013P15Rik (NM_025907.2,866-884).
ggaaccagatcgtattttt

SEQ ID NO: 604163 - DNA, 19 bp, Mus musculus
  siRNA target sequence for 1600013P15Rik (NM_025907.2,910-928).
ctttgtggatgcaggttat

SEQ ID NO: 604164 - DNA, 19 bp, Mus musculus
  siRNA target sequence for 1600013P15Rik (NM_025907.2,952-970).
gtttcgagagacagtgaat

SEQ ID NO: 604165 - DNA, 19 bp, Mus musculus
  siRNA target sequence for 1600013P15Rik (NM_025907.2,956-974).
cgagagacagtgaataaaa

SEQ ID NO: 604166 - DNA, 19 bp, Mus musculus
  siRNA target sequence for 1810009K13Rik (NM_025462.1,58-76).
cggagttaccggagaagaa

SEQ ID NO: 604167 - DNA, 19 bp, Mus musculus
  siRNA target sequence for 1810009K13Rik (NM_025462.1,60-78).
gagttaccggagaagaact

SEQ ID NO: 604168 - DNA, 19 bp, Mus musculus
  siRNA target sequence for 1810009K13Rik (NM_025462.1,261-279).
ggaggcttccctaatgtga

SEQ ID NO: 604169 - DNA, 19 bp, Mus musculus
  siRNA target sequence for 1810009K13Rik (NM_025462.1,380-398).
cttccctagtgggtctttt

SEQ ID NO: 604170 - DNA, 19 bp, Mus musculus
  siRNA target sequence for 1810009K13Rik (NM_025462.1,450-468).
gatccctggaatgtatctt

SEQ ID NO: 604171 - DNA, 19 bp, Mus musculus
  siRNA target sequence for 1810009K13Rik (NM_025462.1,525-543).
cctggaggccgattcatct

SEQ ID NO: 604172 - DNA, 19 bp, Mus musculus
  siRNA target sequence for 1810009K13Rik (NM_025462.1,529-547).
gaggccgattcatctcaat

SEQ ID NO: 604173 - DNA, 19 bp, Mus musculus
  siRNA target sequence for 1810009K13Rik (NM_025462.1,533-551).
ccgattcatctcaatgact

SEQ ID NO: 604174 - DNA, 19 bp, Mus musculus
  siRNA target sequence for 1810009K13Rik (NM_025462.1,534-552).
cgattcatctcaatgactt

SEQ ID NO: 604175 - DNA, 19 bp, Mus musculus
  siRNA target sequence for 1810009K13Rik (NM_025462.1,555-573).
gcaggtccccactttagga

SEQ ID NO: 604176 - DNA, 19 bp, Mus musculus
  siRNA target sequence for 1810009K13Rik (NM_025462.1,556-574).
caggtccccactttaggat

SEQ ID NO: 604177 - DNA, 19 bp, Mus musculus
  siRNA target sequence for 1810009K13Rik (NM_025462.1,566-584).
ctttaggatcagacactat

SEQ ID NO: 604178 - DNA, 19 bp, Mus musculus
  siRNA target sequence for 1810030M08Rik (NM_026965.1,49-67).
cccgtccctcggctatcta

SEQ ID NO: 604179 - DNA, 19 bp, Mus musculus
  siRNA target sequence for 1810030M08Rik (NM_026965.1,50-68).
ccgtccctcggctatctat

SEQ ID NO: 604180 - DNA, 19 bp, Mus musculus
  siRNA target sequence for 1810030M08Rik (NM_026965.1,280-298).
cagggggattccatgatga

SEQ ID NO: 604181 - DNA, 19 bp, Mus musculus
  siRNA target sequence for 1810030M08Rik (NM_026965.1,336-354).
gctcattaaggccaagaaa

SEQ ID NO: 604182 - DNA, 19 bp, Mus musculus
  siRNA target sequence for 1810030M08Rik (NM_026965.1,595-613).
gcggacaaagagaactgta

SEQ ID NO: 604183 - DNA, 19 bp, Mus musculus
  siRNA target sequence for 1810030M08Rik (NM_026965.1,714-732).
gaacaagactgttgaatgt

SEQ ID NO: 604184 - DNA, 19 bp, Mus musculus
  siRNA target sequence for 1810030M08Rik (NM_026965.1,761-779).
gggacgccagggtctacat

SEQ ID NO: 604185 - DNA, 19 bp, Mus musculus
  siRNA target sequence for 1810030M08Rik (NM_026965.1,805-823).
ctctccttggcctttaaga

SEQ ID NO: 604186 - DNA, 19 bp, Mus musculus
  siRNA target sequence for 2310045H08Rik (NM_020577.1,75-93).
cccgagacgctgatgagat

SEQ ID NO: 604187 - DNA, 19 bp, Mus musculus
  siRNA target sequence for 2310045H08Rik (NM_020577.1,100-118).
ggacgttcagaactactat

SEQ ID NO: 604188 - DNA, 19 bp, Mus musculus
  siRNA target sequence for 2310045H08Rik (NM_020577.1,109-127).
gaactactatgggaatgta

SEQ ID NO: 604189 - DNA, 19 bp, Mus musculus
  siRNA target sequence for 2310045H08Rik (NM_020577.1,143-161).
gacctccagactaatgctt

SEQ ID NO: 604190 - DNA, 19 bp, Mus musculus
  siRNA target sequence for 2310045H08Rik (NM_020577.1,215-233).
gtacacgaagacgttagtt

SEQ ID NO: 604191 - DNA, 19 bp, Mus musculus
  siRNA target sequence for 2310045H08Rik (NM_020577.1,224-242).
gacgttagttcgaggtatt

SEQ ID NO: 604192 - DNA, 19 bp, Mus musculus
  siRNA target sequence for 2310045H08Rik (NM_020577.1,226-244).
cgttagttcgaggtattat

SEQ ID NO: 604193 - DNA, 19 bp, Mus musculus
  siRNA target sequence for 2310045H08Rik (NM_020577.1,263-281).
cctgagcggctggaaaact

SEQ ID NO: 604194 - DNA, 19 bp, Mus musculus
  siRNA target sequence for 2310045H08Rik (NM_020577.1,272-290).
ctggaaaactgccgaattt

SEQ ID NO: 604195 - DNA, 19 bp, Mus musculus
  siRNA target sequence for 2310045H08Rik (NM_020577.1,354-372).
gacatgtcaccggaataga

SEQ ID NO: 604196 - DNA, 19 bp, Mus musculus
  siRNA target sequence for 2310045H08Rik (NM_020577.1,356-374).
catgtcaccggaatagaca

SEQ ID NO: 604197 - DNA, 19 bp, Mus musculus
  siRNA target sequence for 2310045H08Rik (NM_020577.1,386-404).
caggtcgaagtggctaaaa

SEQ ID NO: 604198 - DNA, 19 bp, Mus musculus
  siRNA target sequence for 2310045H08Rik (NM_020577.1,413-431).
gaacaccacatggaaaaat

SEQ ID NO: 604199 - DNA, 19 bp, Mus musculus
  siRNA target sequence for 2310045H08Rik (NM_020577.1,418-436).
ccacatggaaaaatttggt

SEQ ID NO: 604200 - DNA, 19 bp, Mus musculus
  siRNA target sequence for 2310045H08Rik (NM_020577.1,500-518).
cagagtgagagctatggta

SEQ ID NO: 604201 - DNA, 19 bp, Mus musculus
  siRNA target sequence for 2310045H08Rik (NM_020577.1,521-539).
gtcatatccaactgtgtta

SEQ ID NO: 604202 - DNA, 19 bp, Mus musculus
  siRNA target sequence for 2310045H08Rik (NM_020577.1,652-670).
catcaagtcgcacaaagtt

SEQ ID NO: 604203 - DNA, 19 bp, Mus musculus
  siRNA target sequence for 2310045H08Rik (NM_020577.1,655-673).
caagtcgcacaaagtttta

SEQ ID NO: 604204 - DNA, 19 bp, Mus musculus
  siRNA target sequence for 2310045H08Rik (NM_020577.1,706-724).
gaaggatcttgccatcatt

SEQ ID NO: 604205 - DNA, 19 bp, Mus musculus
  siRNA target sequence for 2310045H08Rik (NM_020577.1,760-778).
cactgccgatatcattact

SEQ ID NO: 604206 - DNA, 19 bp, Mus musculus
  siRNA target sequence for 2310045H08Rik (NM_020577.1,762-780).
ctgccgatatcattactgt

SEQ ID NO: 604207 - DNA, 19 bp, Mus musculus
  siRNA target sequence for 2310045H08Rik (NM_020577.1,766-784).
cgatatcattactgttgaa

SEQ ID NO: 604208 - DNA, 19 bp, Mus musculus
  siRNA target sequence for 2310045H08Rik (NM_020577.1,809-827).
ggtgactgtcgctttgtgt

SEQ ID NO: 604209 - DNA, 19 bp, Mus musculus
  siRNA target sequence for 2310045H08Rik (NM_020577.1,831-849).
ccacatttcgcctcttcaa

SEQ ID NO: 604210 - DNA, 19 bp, Mus musculus
  siRNA target sequence for 2310045H08Rik (NM_020577.1,832-850).
cacatttcgcctcttcaaa

SEQ ID NO: 604211 - DNA, 19 bp, Mus musculus
  siRNA target sequence for 2310045H08Rik (NM_020577.1,871-889).
cgaaagatgccgagttgtt

SEQ ID NO: 604212 - DNA, 19 bp, Mus musculus
  siRNA target sequence for 2310045H08Rik (NM_020577.1,872-890).
gaaagatgccgagttgttt

SEQ ID NO: 604213 - DNA, 19 bp, Mus musculus
  siRNA target sequence for 2310045H08Rik (NM_020577.1,899-917).
ggaatcaagggacatgaaa

SEQ ID NO: 604214 - DNA, 19 bp, Mus musculus
  siRNA target sequence for 2310045H08Rik (NM_020577.1,932-950).
gatgcaaatttcacattca

SEQ ID NO: 604215 - DNA, 19 bp, Mus musculus
  siRNA target sequence for 2310045H08Rik (NM_020577.1,994-1012).
cctgaagaactcacgtttt

SEQ ID NO: 604216 - DNA, 19 bp, Mus musculus
  siRNA target sequence for 2310045H08Rik (NM_020577.1,997-1015).
gaagaactcacgttttgct

SEQ ID NO: 604217 - DNA, 19 bp, Mus musculus
  siRNA target sequence for 2610205E22Rik (NM_170592.1,347-365).
ggactgtggcgctggtatt

SEQ ID NO: 604218 - DNA, 19 bp, Mus musculus
  siRNA target sequence for 2610205E22Rik (NM_170592.1,350-368).
ctgtggcgctggtattgga

SEQ ID NO: 604219 - DNA, 19 bp, Mus musculus
  siRNA target sequence for 3300001H21Rik (NM_027334.2,156-174).
cgattctccgtgatgtaca

SEQ ID NO: 604220 - DNA, 19 bp, Mus musculus
  siRNA target sequence for 3300001H21Rik (NM_027334.2,675-693).
gccagcttctcgaagctaa

SEQ ID NO: 604221 - DNA, 19 bp, Mus musculus
  siRNA target sequence for 3300001H21Rik (NM_027334.2,676-694).
ccagcttctcgaagctaaa

SEQ ID NO: 604222 - DNA, 19 bp, Mus musculus
  siRNA target sequence for 3300001H21Rik (NM_027334.2,679-697).
gcttctcgaagctaaagct

SEQ ID NO: 604223 - DNA, 19 bp, Mus musculus
  siRNA target sequence for 3300001H21Rik (NM_027334.2,680-698).
cttctcgaagctaaagcta

SEQ ID NO: 604224 - DNA, 19 bp, Mus musculus
  siRNA target sequence for 4732479N06Rik (NM_172540.1,117-135).
caacccaagactattcctt

SEQ ID NO: 604225 - DNA, 19 bp, Mus musculus
  siRNA target sequence for 4732479N06Rik (NM_172540.1,196-214).
gatttgtcacagtccttat

SEQ ID NO: 604226 - DNA, 19 bp, Mus musculus
  siRNA target sequence for 4732479N06Rik (NM_172540.1,210-228).
cttattgggcagagcatat

SEQ ID NO: 604227 - DNA, 19 bp, Mus musculus
  siRNA target sequence for 4732479N06Rik (NM_172540.1,269-287).
gcagacaaaaatatcagaa

SEQ ID NO: 604228 - DNA, 19 bp, Mus musculus
  siRNA target sequence for 4732479N06Rik (NM_172540.1,362-380).
gttatgaagcacaactcaa

SEQ ID NO: 604229 - DNA, 19 bp, Mus musculus
  siRNA target sequence for 4732479N06Rik (NM_172540.1,535-553).
cggaacaagtccacctttt

SEQ ID NO: 604230 - DNA, 19 bp, Mus musculus
  siRNA target sequence for 4732479N06Rik (NM_172540.1,566-584).
gcccagatggcaatccaaa

SEQ ID NO: 604231 - DNA, 19 bp, Mus musculus
  siRNA target sequence for 4732479N06Rik (NM_172540.1,630-648).
ctgtctaccatgtaatcat

SEQ ID NO: 604232 - DNA, 19 bp, Mus musculus
  siRNA target sequence for 4732479N06Rik (NM_172540.1,632-650).
gtctaccatgtaatcatct

SEQ ID NO: 604233 - DNA, 19 bp, Mus musculus
  siRNA target sequence for 4732479N06Rik (NM_172540.1,641-659).
gtaatcatctgaaaaacat

SEQ ID NO: 604234 - DNA, 19 bp, Mus musculus
  siRNA target sequence for 4732479N06Rik (NM_172540.1,682-700).
gctcagtactatgaagtat

SEQ ID NO: 604235 - DNA, 19 bp, Mus musculus
  siRNA target sequence for 4732479N06Rik (NM_172540.1,687-705).
gtactatgaagtattcctt

SEQ ID NO: 604236 - DNA, 19 bp, Mus musculus
  siRNA target sequence for 4732479N06Rik (NM_172540.1,763-781).
ctcgtagttcgtaccaata

SEQ ID NO: 604237 - DNA, 19 bp, Mus musculus
  siRNA target sequence for 4732479N06Rik (NM_172540.1,788-806).
gacacacaatggctattgt

SEQ ID NO: 604238 - DNA, 19 bp, Mus musculus
  siRNA target sequence for 4732479N06Rik (NM_172540.1,886-904).
cctggagcgatctgtgaat

SEQ ID NO: 604239 - DNA, 19 bp, Mus musculus
  siRNA target sequence for 4732479N06Rik (NM_172540.1,887-905).
ctggagcgatctgtgaatt

SEQ ID NO: 604240 - DNA, 19 bp, Mus musculus
  siRNA target sequence for 4732479N06Rik (NM_172540.1,889-907).
ggagcgatctgtgaattga

SEQ ID NO: 604241 - DNA, 19 bp, Mus musculus
  siRNA target sequence for 4732479N06Rik (NM_172540.1,901-919).
gaattgacctcgctctatt

SEQ ID NO: 604242 - DNA, 19 bp, Mus musculus
  siRNA target sequence for 4732479N06Rik (NM_172540.1,1000-1018).
gatcttctgggtttgaaga

SEQ ID NO: 604243 - DNA, 19 bp, Mus musculus
  siRNA target sequence for 4732479N06Rik (NM_172540.1,1008-1026).
gggtttgaagattcgaatt

SEQ ID NO: 604244 - DNA, 19 bp, Mus musculus
  siRNA target sequence for 4732479N06Rik (NM_172540.1,1036-1054).
gccttcttccagattaata

SEQ ID NO: 604245 - DNA, 19 bp, Mus musculus
  siRNA target sequence for 4732479N06Rik (NM_172540.1,1068-1086).
gatgctgtatcggatcatt

SEQ ID NO: 604246 - DNA, 19 bp, Mus musculus
  siRNA target sequence for 4732479N06Rik (NM_172540.1,1113-1131).
gagcctcctcctagacatt

SEQ ID NO: 604247 - DNA, 19 bp, Mus musculus
  siRNA target sequence for 4732479N06Rik (NM_172540.1,1117-1135).
ctcctcctagacatttgct

SEQ ID NO: 604248 - DNA, 19 bp, Mus musculus
  siRNA target sequence for 4732479N06Rik (NM_172540.1,1134-1152).
ctgtggcacgggtgtgatt

SEQ ID NO: 604249 - DNA, 19 bp, Mus musculus
  siRNA target sequence for 4732479N06Rik (NM_172540.1,1273-1291).
ggcagagcagagacgattt

SEQ ID NO: 604250 - DNA, 19 bp, Mus musculus
  siRNA target sequence for 4732479N06Rik (NM_172540.1,1274-1292).
gcagagcagagacgatttt

SEQ ID NO: 604251 - DNA, 19 bp, Mus musculus
  siRNA target sequence for 4732479N06Rik (NM_172540.1,1352-1370).
cccgagctggattgcatta

SEQ ID NO: 604252 - DNA, 19 bp, Mus musculus
  siRNA target sequence for 4732479N06Rik (NM_172540.1,1354-1372).
cgagctggattgcattaca

SEQ ID NO: 604253 - DNA, 19 bp, Mus musculus
  siRNA target sequence for 4732479N06Rik (NM_172540.1,1468-1486).
ctatgctgtcctccaaatt

SEQ ID NO: 604254 - DNA, 19 bp, Mus musculus
  siRNA target sequence for 4732479N06Rik (NM_172540.1,1528-1546).
gctgtacctgtggatttgt

SEQ ID NO: 604255 - DNA, 19 bp, Mus musculus
  siRNA target sequence for 4732479N06Rik (NM_172540.1,1529-1547).
ctgtacctgtggatttgtt

SEQ ID NO: 604256 - DNA, 19 bp, Mus musculus
  siRNA target sequence for 4933434L15Rik (NM_026231.1,171-189).
gaccaagttgatggaaaaa

SEQ ID NO: 604257 - DNA, 19 bp, Mus musculus
  siRNA target sequence for 4933434L15Rik (NM_026231.1,428-446).
cctcgtgccaggttacgtt

SEQ ID NO: 604258 - DNA, 19 bp, Mus musculus
  siRNA target sequence for 4933434L15Rik (NM_026231.1,429-447).
ctcgtgccaggttacgtta

SEQ ID NO: 604259 - DNA, 19 bp, Mus musculus
  siRNA target sequence for 4933434L15Rik (NM_026231.1,431-449).
cgtgccaggttacgttaat

SEQ ID NO: 604260 - DNA, 19 bp, Mus musculus
  siRNA target sequence for 4933434L15Rik (NM_026231.1,432-450).
gtgccaggttacgttaata

SEQ ID NO: 604261 - DNA, 19 bp, Mus musculus
  siRNA target sequence for 4933434L15Rik (NM_026231.1,434-452).
gccaggttacgttaataga

SEQ ID NO: 604262 - DNA, 19 bp, Mus musculus
  siRNA target sequence for 4933434L15Rik (NM_026231.1,436-454).
caggttacgttaatagaga

SEQ ID NO: 604263 - DNA, 19 bp, Mus musculus
  siRNA target sequence for 4933434L15Rik (NM_026231.1,467-485).
cattaatccgtgctaagaa

SEQ ID NO: 604264 - DNA, 19 bp, Mus musculus
  siRNA target sequence for 4933434L15Rik (NM_026231.1,488-506).
gaagtgacgaacttggttt

SEQ ID NO: 604265 - DNA, 19 bp, Mus musculus
  siRNA target sequence for 4933434L15Rik (NM_026231.1,493-511).
gacgaacttggtttaagca

SEQ ID NO: 604266 - DNA, 19 bp, Mus musculus
  siRNA target sequence for 4933434L15Rik (NM_026231.1,495-513).
cgaacttggtttaagcaat

SEQ ID NO: 604267 - DNA, 19 bp, Mus musculus
  siRNA target sequence for 4933434L15Rik (NM_026231.1,496-514).
gaacttggtttaagcaata

SEQ ID NO: 604268 - DNA, 19 bp, Mus musculus
  siRNA target sequence for 4933434L15Rik (NM_026231.1,499-517).
cttggtttaagcaatattt

SEQ ID NO: 604269 - DNA, 19 bp, Mus musculus
  siRNA target sequence for 4933434L15Rik (NM_026231.1,502-520).
ggtttaagcaatatttggt

SEQ ID NO: 604270 - DNA, 19 bp, Mus musculus
  siRNA target sequence for 4933434L15Rik (NM_026231.1,503-521).
gtttaagcaatatttggtt

SEQ ID NO: 604271 - DNA, 19 bp, Mus musculus
  siRNA target sequence for 4933434L15Rik (NM_026231.1,510-528).
caatatttggttcattcaa

SEQ ID NO: 604272 - DNA, 19 bp, Mus musculus
  siRNA target sequence for 4933434L15Rik (NM_026231.1,518-536).
ggttcattcaagcaaatat

SEQ ID NO: 604273 - DNA, 19 bp, Mus musculus
  siRNA target sequence for 4933434L15Rik (NM_026231.1,529-547).
gcaaatatggagtatttca

SEQ ID NO: 604274 - DNA, 19 bp, Mus musculus
  siRNA target sequence for 4933434L15Rik (NM_026231.1,628-646).
cgggcttccttcatcacat

SEQ ID NO: 604275 - DNA, 19 bp, Mus musculus
  siRNA target sequence for 4933434L15Rik (NM_026231.1,653-671).
gctgttacgggttcattca

SEQ ID NO: 604276 - DNA, 19 bp, Mus musculus
  siRNA target sequence for 4933434L15Rik (NM_026231.1,656-674).
gttacgggttcattcagaa

SEQ ID NO: 604277 - DNA, 19 bp, Mus musculus
  siRNA target sequence for 4933434L15Rik (NM_026231.1,860-878).
gctactctgttcaagtgat

SEQ ID NO: 604278 - DNA, 19 bp, Mus musculus
  siRNA target sequence for 4933434L15Rik (NM_026231.1,896-914).
gctgctctcccaagaacaa

SEQ ID NO: 604279 - DNA, 19 bp, Mus musculus
  siRNA target sequence for 4933434L15Rik (NM_026231.1,902-920).
ctcccaagaacaacatgat

SEQ ID NO: 604280 - DNA, 19 bp, Mus musculus
  siRNA target sequence for 5630401D24Rik (NM_144877.1,705-723).
gccttcgtcatgactaagt

SEQ ID NO: 604281 - DNA, 19 bp, Mus musculus
  siRNA target sequence for 5630401D24Rik (NM_144877.1,706-724).
ccttcgtcatgactaagtt

SEQ ID NO: 604282 - DNA, 19 bp, Mus musculus
  siRNA target sequence for 5630401D24Rik (NM_144877.1,827-845).
gcgggagcgccagtactat

SEQ ID NO: 604283 - DNA, 19 bp, Mus musculus
  siRNA target sequence for 5630401D24Rik (NM_144877.1,969-987).
ccatcgcgggacaatcatt

SEQ ID NO: 604284 - DNA, 19 bp, Mus musculus
  siRNA target sequence for 5630401D24Rik (NM_144877.1,970-988).
catcgcgggacaatcattt

SEQ ID NO: 604285 - DNA, 19 bp, Mus musculus
  siRNA target sequence for 5630401D24Rik (NM_144877.1,1116-1134).
cggtatgctggcatggaaa

SEQ ID NO: 604286 - DNA, 19 bp, Mus musculus
  siRNA target sequence for 5630401D24Rik (NM_144877.1,1431-1449).
cagcgacctgctgatactt

SEQ ID NO: 604287 - DNA, 19 bp, Mus musculus
  siRNA target sequence for 5630401D24Rik (NM_144877.1,1433-1451).
gcgacctgctgatacttct

SEQ ID NO: 604288 - DNA, 19 bp, Mus musculus
  siRNA target sequence for 5630401D24Rik (NM_144877.1,1471-1489).
cagggcagtccatcgataa

SEQ ID NO: 604289 - DNA, 19 bp, Mus musculus
  siRNA target sequence for 5630401D24Rik (NM_144877.1,1473-1491).
gggcagtccatcgataaga

SEQ ID NO: 604290 - DNA, 19 bp, Mus musculus
  siRNA target sequence for 5630401D24Rik (NM_144877.1,1475-1493).
gcagtccatcgataagagt

SEQ ID NO: 604291 - DNA, 19 bp, Mus musculus
  siRNA target sequence for 5630401D24Rik (NM_144877.1,1476-1494).
cagtccatcgataagagtt

SEQ ID NO: 604292 - DNA, 19 bp, Mus musculus
  siRNA target sequence for 5630401D24Rik (NM_144877.1,1546-1564).
gaaaccccgagctactctt

SEQ ID NO: 604293 - DNA, 19 bp, Mus musculus
  siRNA target sequence for 5630401D24Rik (NM_144877.1,1551-1569).
cccgagctactcttagaga

SEQ ID NO: 604294 - DNA, 19 bp, Mus musculus
  siRNA target sequence for 5630401D24Rik (NM_144877.1,1617-1635).
ctcttcgttcacgatcatt

SEQ ID NO: 604295 - DNA, 19 bp, Mus musculus
  siRNA target sequence for 5630401D24Rik (NM_144877.1,1648-1666).
gcatcgatgctgttgagat

SEQ ID NO: 604296 - DNA, 19 bp, Mus musculus
  siRNA target sequence for 5630401D24Rik (NM_144877.1,1741-1759).
cagatggtcttgactacat

SEQ ID NO: 604297 - DNA, 19 bp, Mus musculus
  siRNA target sequence for 5630401D24Rik (NM_144877.1,1743-1761).
gatggtcttgactacatta

SEQ ID NO: 604298 - DNA, 19 bp, Mus musculus
  siRNA target sequence for 5630401D24Rik (NM_144877.1,1746-1764).
ggtcttgactacattacca

SEQ ID NO: 604299 - DNA, 19 bp, Mus musculus
  siRNA target sequence for 5630401D24Rik (NM_144877.1,1783-1801).
cgcctcactatgatgtgat

SEQ ID NO: 604300 - DNA, 19 bp, Mus musculus
  siRNA target sequence for 5630401D24Rik (NM_144877.1,1784-1802).
gcctcactatgatgtgata

SEQ ID NO: 604301 - DNA, 19 bp, Mus musculus
  siRNA target sequence for 5630401D24Rik (NM_144877.1,1785-1803).
cctcactatgatgtgataa

SEQ ID NO: 604302 - DNA, 19 bp, Mus musculus
  siRNA target sequence for 5630401D24Rik (NM_144877.1,1844-1862).
ctgtcctcccccagcattt

SEQ ID NO: 604303 - DNA, 19 bp, Mus musculus
  siRNA target sequence for 5630401D24Rik (NM_144877.1,1903-1921).
gtcacgacggcgtcttcat

SEQ ID NO: 604304 - DNA, 19 bp, Mus musculus
  siRNA target sequence for 5630401D24Rik (NM_144877.1,1936-1954).
gtcgggacgtgaggttaaa

SEQ ID NO: 604305 - DNA, 19 bp, Mus musculus
  siRNA target sequence for 5630401D24Rik (NM_144877.1,1939-1957).
gggacgtgaggttaaagga

SEQ ID NO: 604306 - DNA, 19 bp, Mus musculus
  siRNA target sequence for 5630401D24Rik (NM_144877.1,2017-2035).
gcgaggtgaatgaaatcct

SEQ ID NO: 604307 - DNA, 19 bp, Mus musculus
  siRNA target sequence for 5630401D24Rik (NM_144877.1,2048-2066).
gcatccagaacagaaactt

SEQ ID NO: 604308 - DNA, 19 bp, Mus musculus
  siRNA target sequence for 5630401D24Rik (NM_144877.1,2134-2152).
gggatgacacgtatgttct

SEQ ID NO: 604309 - DNA, 19 bp, Mus musculus
  siRNA target sequence for 5630401D24Rik (NM_144877.1,2143-2161).
cgtatgttctgtcagatat

SEQ ID NO: 604310 - DNA, 19 bp, Mus musculus
  siRNA target sequence for 6430573F11Rik (NM_176952.3,191-209).
cagcctcgtcgctgacatt

SEQ ID NO: 604311 - DNA, 19 bp, Mus musculus
  siRNA target sequence for 6430573F11Rik (NM_176952.3,195-213).
ctcgtcgctgacattggtt

SEQ ID NO: 604312 - DNA, 19 bp, Mus musculus
  siRNA target sequence for 6430573F11Rik (NM_176952.3,220-238).
ctggaaagtatcttaaagt

SEQ ID NO: 604313 - DNA, 19 bp, Mus musculus
  siRNA target sequence for 6430573F11Rik (NM_176952.3,320-338).
ggtatgtgacaaccttaat

SEQ ID NO: 604314 - DNA, 19 bp, Mus musculus
  siRNA target sequence for 6430573F11Rik (NM_176952.3,371-389).
catctccataggagtcata

SEQ ID NO: 604315 - DNA, 19 bp, Mus musculus
  siRNA target sequence for 6430573F11Rik (NM_176952.3,374-392).
ctccataggagtcatacat

SEQ ID NO: 604316 - DNA, 19 bp, Mus musculus
  siRNA target sequence for 6430573F11Rik (NM_176952.3,377-395).
cataggagtcatacatcat

SEQ ID NO: 604317 - DNA, 19 bp, Mus musculus
  siRNA target sequence for 6430573F11Rik (NM_176952.3,381-399).
ggagtcatacatcattttt

SEQ ID NO: 604318 - DNA, 19 bp, Mus musculus
  siRNA target sequence for 6430573F11Rik (NM_176952.3,453-471).
cccggaggccagttgatga

SEQ ID NO: 604319 - DNA, 19 bp, Mus musculus
  siRNA target sequence for 6430573F11Rik (NM_176952.3,454-472).
ccggaggccagttgatgat

SEQ ID NO: 604320 - DNA, 19 bp, Mus musculus
  siRNA target sequence for 6430573F11Rik (NM_176952.3,455-473).
cggaggccagttgatgatt

SEQ ID NO: 604321 - DNA, 19 bp, Mus musculus
  siRNA target sequence for 6430573F11Rik (NM_176952.3,456-474).
ggaggccagttgatgattt

SEQ ID NO: 604322 - DNA, 19 bp, Mus musculus
  siRNA target sequence for 6430573F11Rik (NM_176952.3,460-478).
gccagttgatgatttatgt

SEQ ID NO: 604323 - DNA, 19 bp, Mus musculus
  siRNA target sequence for 6430573F11Rik (NM_176952.3,481-499).
gggcaatggaacagaagaa

SEQ ID NO: 604324 - DNA, 19 bp, Mus musculus
  siRNA target sequence for 6430573F11Rik (NM_176952.3,497-515).
gaaccgacgctttgagaaa

SEQ ID NO: 604325 - DNA, 19 bp, Mus musculus
  siRNA target sequence for 6430573F11Rik (NM_176952.3,640-658).
gcggctgcgcagtgtgttt

SEQ ID NO: 604326 - DNA, 19 bp, Mus musculus
  siRNA target sequence for 6430573F11Rik (NM_176952.3,718-736).
gaacctgctgcgaagctat

SEQ ID NO: 604327 - DNA, 19 bp, Mus musculus
  siRNA target sequence for 6430573F11Rik (NM_176952.3,722-740).
ctgctgcgaagctatttca

SEQ ID NO: 604328 - DNA, 19 bp, Mus musculus
  siRNA target sequence for 6430573F11Rik (NM_176952.3,724-742).
gctgcgaagctatttcaaa

SEQ ID NO: 604329 - DNA, 19 bp, Mus musculus
  siRNA target sequence for 6430573F11Rik (NM_176952.3,728-746).
cgaagctatttcaaaggaa

SEQ ID NO: 604330 - DNA, 19 bp, Mus musculus
  siRNA target sequence for 6430573F11Rik (NM_176952.3,752-770).
gcgagagaacggattgtat

SEQ ID NO: 604331 - DNA, 19 bp, Mus musculus
  siRNA target sequence for 6430573F11Rik (NM_176952.3,753-771).
cgagagaacggattgtata

SEQ ID NO: 604332 - DNA, 19 bp, Mus musculus
  siRNA target sequence for 6430573F11Rik (NM_176952.3,758-776).
gaacggattgtatagcaat

SEQ ID NO: 604333 - DNA, 19 bp, Mus musculus
  siRNA target sequence for 6430573F11Rik (NM_176952.3,761-779).
cggattgtatagcaatttt

SEQ ID NO: 604334 - DNA, 19 bp, Mus musculus
  siRNA target sequence for 6430573F11Rik (NM_176952.3,850-868).
gagtcaggcccatgaaaat

SEQ ID NO: 604335 - DNA, 19 bp, Mus musculus
  siRNA target sequence for 6430573F11Rik (NM_176952.3,933-951).
cacgctccggagccatttt

SEQ ID NO: 604336 - DNA, 19 bp, Mus musculus
  siRNA target sequence for 6430573F11Rik (NM_176952.3,935-953).
cgctccggagccattttca

SEQ ID NO: 604337 - DNA, 19 bp, Mus musculus
  siRNA target sequence for 6430573F11Rik (NM_176952.3,936-954).
gctccggagccattttcaa

SEQ ID NO: 604338 - DNA, 19 bp, Mus musculus
  siRNA target sequence for 6430573F11Rik (NM_176952.3,978-996).
gtgttcgtagacacatctt

SEQ ID NO: 604339 - DNA, 19 bp, Mus musculus
  siRNA target sequence for 6430573F11Rik (NM_176952.3,980-998).
gttcgtagacacatcttct

SEQ ID NO: 604340 - DNA, 19 bp, Mus musculus
  siRNA target sequence for 6430573F11Rik (NM_176952.3,1027-1045).
ctggcacatcagacaactt

SEQ ID NO: 604341 - DNA, 19 bp, Mus musculus
  siRNA target sequence for 6430573F11Rik (NM_176952.3,1202-1220).
ctcagaagactcaagcttt

SEQ ID NO: 604342 - DNA, 19 bp, Mus musculus
  siRNA target sequence for 6430573F11Rik (NM_176952.3,1234-1252).
gggatgccaccgattccaa

SEQ ID NO: 604343 - DNA, 19 bp, Mus musculus
  siRNA target sequence for 6430573F11Rik (NM_176952.3,1235-1253).
ggatgccaccgattccaaa

SEQ ID NO: 604344 - DNA, 19 bp, Mus musculus
  siRNA target sequence for 6430573F11Rik (NM_176952.3,1262-1280).
gcgttactaccatgtattt

SEQ ID NO: 604345 - DNA, 19 bp, Mus musculus
  siRNA target sequence for 6720458F09Rik (NM_177374.2,837-855).
ctgtatcccacgcaatcat

SEQ ID NO: 604346 - DNA, 19 bp, Mus musculus
  siRNA target sequence for 6720458F09Rik (NM_177374.2,1016-1034).
gacgctgtcttcttggata

SEQ ID NO: 604347 - DNA, 19 bp, Mus musculus
  siRNA target sequence for A930016P21Rik (NM_026546.1,104-122).
ggaccagttggggattctt

SEQ ID NO: 604348 - DNA, 19 bp, Mus musculus
  siRNA target sequence for A930016P21Rik (NM_026546.1,108-126).
cagttggggattcttgatt

SEQ ID NO: 604349 - DNA, 19 bp, Mus musculus
  siRNA target sequence for A930016P21Rik (NM_026546.1,190-208).
gccctccggaaagtttgtt

SEQ ID NO: 604350 - DNA, 19 bp, Mus musculus
  siRNA target sequence for A930016P21Rik (NM_026546.1,191-209).
ccctccggaaagtttgttt

SEQ ID NO: 604351 - DNA, 19 bp, Mus musculus
  siRNA target sequence for A930016P21Rik (NM_026546.1,227-245).
cttcgaagcaggttgaaaa

SEQ ID NO: 604352 - DNA, 19 bp, Mus musculus
  siRNA target sequence for A930016P21Rik (NM_026546.1,230-248).
cgaagcaggttgaaaatgt

SEQ ID NO: 604353 - DNA, 19 bp, Mus musculus
  siRNA target sequence for A930016P21Rik (NM_026546.1,299-317).
gcgatgggcggattgtgat

SEQ ID NO: 604354 - DNA, 19 bp, Mus musculus
  siRNA target sequence for A930016P21Rik (NM_026546.1,341-359).
cagcggtggggtatgaatt

SEQ ID NO: 604355 - DNA, 19 bp, Mus musculus
  siRNA target sequence for A930016P21Rik (NM_026546.1,343-361).
gcggtggggtatgaattga

SEQ ID NO: 604356 - DNA, 19 bp, Mus musculus
  siRNA target sequence for A930016P21Rik (NM_026546.1,344-362).
cggtggggtatgaattgaa

SEQ ID NO: 604357 - DNA, 19 bp, Mus musculus
  siRNA target sequence for A930016P21Rik (NM_026546.1,345-363).
ggtggggtatgaattgaat

SEQ ID NO: 604358 - DNA, 19 bp, Mus musculus
  siRNA target sequence for A930016P21Rik (NM_026546.1,372-390).
ggtttggtactccagatat

SEQ ID NO: 604359 - DNA, 19 bp, Mus musculus
  siRNA target sequence for A930016P21Rik (NM_026546.1,416-434).
gctctgccaagttttatat

SEQ ID NO: 604360 - DNA, 19 bp, Mus musculus
  siRNA target sequence for A930016P21Rik (NM_026546.1,465-483).
gtactccaatgttgtcatt

SEQ ID NO: 604361 - DNA, 19 bp, Mus musculus
  siRNA target sequence for A930016P21Rik (NM_026546.1,540-558).
ggacggagctcgagtcatt

SEQ ID NO: 604362 - DNA, 19 bp, Mus musculus
  siRNA target sequence for A930016P21Rik (NM_026546.1,620-638).
ccgtgtgggcctatgacat

SEQ ID NO: 604363 - DNA, 19 bp, Mus musculus
  siRNA target sequence for AI931714 (NM_178903.2,270-288).
ctgcttatgcccattacct

SEQ ID NO: 604364 - DNA, 19 bp, Mus musculus
  siRNA target sequence for AI931714 (NM_178903.2,300-318).
gcctggcgccagagctaaa

SEQ ID NO: 604365 - DNA, 19 bp, Mus musculus
  siRNA target sequence for AI931714 (NM_178903.2,301-319).
cctggcgccagagctaaaa

SEQ ID NO: 604366 - DNA, 19 bp, Mus musculus
  siRNA target sequence for AI931714 (NM_178903.2,320-338).
gacgacgtgaaggaaactt

SEQ ID NO: 604367 - DNA, 19 bp, Mus musculus
  siRNA target sequence for AI931714 (NM_178903.2,322-340).
cgacgtgaaggaaactttt

SEQ ID NO: 604368 - DNA, 19 bp, Mus musculus
  siRNA target sequence for AI931714 (NM_178903.2,331-349).
ggaaacttttcagtataca

SEQ ID NO: 604369 - DNA, 19 bp, Mus musculus
  siRNA target sequence for AI931714 (NM_178903.2,378-396).
cactgagccgaatacaaga

SEQ ID NO: 604370 - DNA, 19 bp, Mus musculus
  siRNA target sequence for AI931714 (NM_178903.2,384-402).
gccgaatacaagacttact

SEQ ID NO: 604371 - DNA, 19 bp, Mus musculus
  siRNA target sequence for AI931714 (NM_178903.2,385-403).
ccgaatacaagacttactt

SEQ ID NO: 604372 - DNA, 19 bp, Mus musculus
  siRNA target sequence for AI931714 (NM_178903.2,424-442).
ggagctgtttcctgatgat

SEQ ID NO: 604373 - DNA, 19 bp, Mus musculus
  siRNA target sequence for AI931714 (NM_178903.2,465-483).
gagagcacctcttcagaat

SEQ ID NO: 604374 - DNA, 19 bp, Mus musculus
  siRNA target sequence for AI931714 (NM_178903.2,529-547).
gctaaaccctgatttcaat

SEQ ID NO: 604375 - DNA, 19 bp, Mus musculus
  siRNA target sequence for AI931714 (NM_178903.2,675-693).
ccagaaccgttctggatat

SEQ ID NO: 604376 - DNA, 19 bp, Mus musculus
  siRNA target sequence for AI931714 (NM_178903.2,694-712).
cggcacggggactggaata

SEQ ID NO: 604377 - DNA, 19 bp, Mus musculus
  siRNA target sequence for AI931714 (NM_178903.2,718-736).
catgtttgctaaaaaagct

SEQ ID NO: 604378 - DNA, 19 bp, Mus musculus
  siRNA target sequence for AI931714 (NM_178903.2,734-752).
gctggcgcacaatcagtat

SEQ ID NO: 604379 - DNA, 19 bp, Mus musculus
  siRNA target sequence for AI931714 (NM_178903.2,735-753).
ctggcgcacaatcagtata

SEQ ID NO: 604380 - DNA, 19 bp, Mus musculus
  siRNA target sequence for AI931714 (NM_178903.2,817-835).
ggaaaatgggataaagctt

SEQ ID NO: 604381 - DNA, 19 bp, Mus musculus
  siRNA target sequence for AI931714 (NM_178903.2,844-862).
gaagtcacttgatatagaa

SEQ ID NO: 604382 - DNA, 19 bp, Mus musculus
  siRNA target sequence for BC002286 (NM_024479.1,287-305).
gccttgctgtggattgtct

SEQ ID NO: 604383 - DNA, 19 bp, Mus musculus
  siRNA target sequence for BC002286 (NM_024479.1,525-543).
ctttgacgcggtgatcatt

SEQ ID NO: 604384 - DNA, 19 bp, Mus musculus
  siRNA target sequence for BC006705 (NM_145404.1,188-206).
gaggatgaacactatgatt

SEQ ID NO: 604385 - DNA, 19 bp, Mus musculus
  siRNA target sequence for BC006705 (NM_145404.1,237-255).
ccgacatgctacatgacaa

SEQ ID NO: 604386 - DNA, 19 bp, Mus musculus
  siRNA target sequence for BC006705 (NM_145404.1,238-256).
cgacatgctacatgacaaa

SEQ ID NO: 604387 - DNA, 19 bp, Mus musculus
  siRNA target sequence for BC006705 (NM_145404.1,248-266).
catgacaaagacagaaata

SEQ ID NO: 604388 - DNA, 19 bp, Mus musculus
  siRNA target sequence for BC006705 (NM_145404.1,257-275).
gacagaaatataaaatact

SEQ ID NO: 604389 - DNA, 19 bp, Mus musculus
  siRNA target sequence for BC006705 (NM_145404.1,294-312).
ctgtgagcagggtgaaaga

SEQ ID NO: 604390 - DNA, 19 bp, Mus musculus
  siRNA target sequence for BC006705 (NM_145404.1,325-343).
ggccttggttcttgacatt

SEQ ID NO: 604391 - DNA, 19 bp, Mus musculus
  siRNA target sequence for BC006705 (NM_145404.1,350-368).
ggcacaggcctcttgtcaa

SEQ ID NO: 604392 - DNA, 19 bp, Mus musculus
  siRNA target sequence for BC006705 (NM_145404.1,351-369).
gcacaggcctcttgtcaat

SEQ ID NO: 604393 - DNA, 19 bp, Mus musculus
  siRNA target sequence for BC006705 (NM_145404.1,354-372).
caggcctcttgtcaatgat

SEQ ID NO: 604394 - DNA, 19 bp, Mus musculus
  siRNA target sequence for BC006705 (NM_145404.1,364-382).
gtcaatgatggcagttact

SEQ ID NO: 604395 - DNA, 19 bp, Mus musculus
  siRNA target sequence for BC006705 (NM_145404.1,399-417).
gctatgctatcgaggtttt

SEQ ID NO: 604396 - DNA, 19 bp, Mus musculus
  siRNA target sequence for BC006705 (NM_145404.1,400-418).
ctatgctatcgaggttttt

SEQ ID NO: 604397 - DNA, 19 bp, Mus musculus
  siRNA target sequence for BC006705 (NM_145404.1,461-479).
ggcttcagtgataagatta

SEQ ID NO: 604398 - DNA, 19 bp, Mus musculus
  siRNA target sequence for BC006705 (NM_145404.1,462-480).
gcttcagtgataagattaa

SEQ ID NO: 604399 - DNA, 19 bp, Mus musculus
  siRNA target sequence for BC006705 (NM_145404.1,532-550).
gccgtgtcgtgctaacatt

SEQ ID NO: 604400 - DNA, 19 bp, Mus musculus
  siRNA target sequence for BC006705 (NM_145404.1,537-555).
gtcgtgctaacattctgat

SEQ ID NO: 604401 - DNA, 19 bp, Mus musculus
  siRNA target sequence for BC006705 (NM_145404.1,591-609).
gagcgctgccctcttatga

SEQ ID NO: 604402 - DNA, 19 bp, Mus musculus
  siRNA target sequence for BC006705 (NM_145404.1,855-873).
gtgatgtgctgccaatgtt

SEQ ID NO: 604403 - DNA, 19 bp, Mus musculus
  siRNA target sequence for BC006705 (NM_145404.1,1071-1089).
ggatgcagtgtgtgtactt

SEQ ID NO: 604404 - DNA, 19 bp, Mus musculus
  siRNA target sequence for BC006705 (NM_145404.1,1257-1275).
ggcctcggtttggagaaat

SEQ ID NO: 604405 - DNA, 19 bp, Mus musculus
  siRNA target sequence for BC006705 (NM_145404.1,1263-1281).
ggtttggagaaatcaatga

SEQ ID NO: 604406 - DNA, 19 bp, Mus musculus
  siRNA target sequence for BC006705 (NM_145404.1,1285-1303).
ggacagaactgatcactat

SEQ ID NO: 604407 - DNA, 19 bp, Mus musculus
  siRNA target sequence for BC006705 (NM_145404.1,1335-1353).
gtagcgtctgcctttgtgt

SEQ ID NO: 604408 - DNA, 19 bp, Mus musculus
  siRNA target sequence for BC006705 (NM_145404.1,1398-1416).
cggagcaggtgtttacagt

SEQ ID NO: 604409 - DNA, 19 bp, Mus musculus
  siRNA target sequence for BC006705 (NM_145404.1,1425-1443).
cagtagcttcctatagact

SEQ ID NO: 604410 - DNA, 19 bp, Mus musculus
  siRNA target sequence for BC006705 (NM_145404.1,1452-1470).
ggatcttcaaggttaacca

SEQ ID NO: 604411 - DNA, 19 bp, Mus musculus
  siRNA target sequence for BC006705 (NM_145404.1,1471-1489).
cttggaagataaaatcagt

SEQ ID NO: 604412 - DNA, 19 bp, Mus musculus
  siRNA target sequence for BC006705 (NM_145404.1,1556-1574).
ctgggtgaaccctttttca

SEQ ID NO: 604413 - DNA, 19 bp, Mus musculus
  siRNA target sequence for BC006705 (NM_145404.1,1677-1695).
cactgcatgccgtgattgt

SEQ ID NO: 604414 - DNA, 19 bp, Mus musculus
  siRNA target sequence for BC006705 (NM_145404.1,1731-1749).
gcggtgactgcgaaggttt

SEQ ID NO: 604415 - DNA, 19 bp, Mus musculus
  siRNA target sequence for BC006705 (NM_145404.1,1732-1750).
cggtgactgcgaaggtttt

SEQ ID NO: 604416 - DNA, 19 bp, Mus musculus
  siRNA target sequence for BC006705 (NM_145404.1,1746-1764).
gttttgatgtgcacatcat

SEQ ID NO: 604417 - DNA, 19 bp, Mus musculus
  siRNA target sequence for BC006705 (NM_145404.1,1754-1772).
gtgcacatcatggatgata

SEQ ID NO: 604418 - DNA, 19 bp, Mus musculus
  siRNA target sequence for BC006705 (NM_145404.1,1865-1883).
gagatcctgacttttgatt

SEQ ID NO: 604419 - DNA, 19 bp, Mus musculus
  siRNA target sequence for BC006705 (NM_145404.1,1897-1915).
cccccaacagcctatgcaa

SEQ ID NO: 604420 - DNA, 19 bp, Mus musculus
  siRNA target sequence for BC006705 (NM_145404.1,1898-1916).
ccccaacagcctatgcaat

SEQ ID NO: 604421 - DNA, 19 bp, Mus musculus
  siRNA target sequence for BC006705 (NM_145404.1,2136-2154).
gctatgttgtggagtttca

SEQ ID NO: 604422 - DNA, 19 bp, Mus musculus
  siRNA target sequence for BC024814 (NM_146247.1,86-104).
ggacgaggtcaccttcaaa

SEQ ID NO: 604423 - DNA, 19 bp, Mus musculus
  siRNA target sequence for BC024814 (NM_146247.1,87-105).
gacgaggtcaccttcaaaa

SEQ ID NO: 604424 - DNA, 19 bp, Mus musculus
  siRNA target sequence for BC024814 (NM_146247.1,312-330).
cacagtcatgaggatttgt

SEQ ID NO: 604425 - DNA, 19 bp, Mus musculus
  siRNA target sequence for BC024814 (NM_146247.1,464-482).
ggtacaccccacgattcta

SEQ ID NO: 604426 - DNA, 19 bp, Mus musculus
  siRNA target sequence for BC024814 (NM_146247.1,533-551).
ccacagcatcatcaaaata

SEQ ID NO: 604427 - DNA, 19 bp, Mus musculus
  siRNA target sequence for BC024814 (NM_146247.1,608-626).
cctactcctggcagactat

SEQ ID NO: 604428 - DNA, 19 bp, Mus musculus
  siRNA target sequence for BC024814 (NM_146247.1,609-627).
ctactcctggcagactata

SEQ ID NO: 604429 - DNA, 19 bp, Mus musculus
  siRNA target sequence for BC024814 (NM_146247.1,716-734).
ggcacacaccgtttattgt

SEQ ID NO: 604430 - DNA, 19 bp, Mus musculus
  siRNA target sequence for BC024814 (NM_146247.1,717-735).
gcacacaccgtttattgta

SEQ ID NO: 604431 - DNA, 19 bp, Mus musculus
  siRNA target sequence for BC024814 (NM_146247.1,761-779).
catgtgccaacgaaacgtt

SEQ ID NO: 604432 - DNA, 19 bp, Mus musculus
  siRNA target sequence for BC024814 (NM_146247.1,808-826).
gaggtggcgtggttaaggt

SEQ ID NO: 604433 - DNA, 19 bp, Mus musculus
  siRNA target sequence for BC024814 (NM_146247.1,962-980).
cttaaccaacgctctgttt

SEQ ID NO: 604434 - DNA, 19 bp, Mus musculus
  siRNA target sequence for BC024814 (NM_146247.1,968-986).
caacgctctgtttaacaca

SEQ ID NO: 604435 - DNA, 19 bp, Mus musculus
  siRNA target sequence for BC024814 (NM_146247.1,1084-1102).
gtgaagcctacgatcactt

SEQ ID NO: 604436 - DNA, 19 bp, Mus musculus
  siRNA target sequence for BC024814 (NM_146247.1,1183-1201).
cgcagctgctcgtctatga

SEQ ID NO: 604437 - DNA, 19 bp, Mus musculus
  siRNA target sequence for BC024814 (NM_146247.1,1184-1202).
gcagctgctcgtctatgaa

SEQ ID NO: 604438 - DNA, 19 bp, Mus musculus
  siRNA target sequence for Coq3 (NM_172687.1,133-151).
gacgcagctcactaggaat

SEQ ID NO: 604439 - DNA, 19 bp, Mus musculus
  siRNA target sequence for Coq3 (NM_172687.1,182-200).
cacgggaccatgtgcttta

SEQ ID NO: 604440 - DNA, 19 bp, Mus musculus
  siRNA target sequence for Coq3 (NM_172687.1,184-202).
cgggaccatgtgctttaga

SEQ ID NO: 604441 - DNA, 19 bp, Mus musculus
  siRNA target sequence for Coq3 (NM_172687.1,268-286).
gtacagtacttcacaaaca

SEQ ID NO: 604442 - DNA, 19 bp, Mus musculus
  siRNA target sequence for Coq3 (NM_172687.1,359-377).
gcgcctcttcattctatga

SEQ ID NO: 604443 - DNA, 19 bp, Mus musculus
  siRNA target sequence for Coq3 (NM_172687.1,382-400).
cctacgggtgccattcatt

SEQ ID NO: 604444 - DNA, 19 bp, Mus musculus
  siRNA target sequence for Coq3 (NM_172687.1,391-409).
gccattcattagagacaat

SEQ ID NO: 604445 - DNA, 19 bp, Mus musculus
  siRNA target sequence for Coq3 (NM_172687.1,539-557).
gatcccgtggctgaaaaca

SEQ ID NO: 604446 - DNA, 19 bp, Mus musculus
  siRNA target sequence for Coq3 (NM_172687.1,542-560).
cccgtggctgaaaacatta

SEQ ID NO: 604447 - DNA, 19 bp, Mus musculus
  siRNA target sequence for Coq3 (NM_172687.1,547-565).
ggctgaaaacattaagata

SEQ ID NO: 604448 - DNA, 19 bp, Mus musculus
  siRNA target sequence for Coq3 (NM_172687.1,649-667).
gagcgcagagtgttttgat

SEQ ID NO: 604449 - DNA, 19 bp, Mus musculus
  siRNA target sequence for Coq3 (NM_172687.1,752-770).
ggctctttattcattacta

SEQ ID NO: 604450 - DNA, 19 bp, Mus musculus
  siRNA target sequence for Coq3 (NM_172687.1,754-772).
ctctttattcattactaca

SEQ ID NO: 604451 - DNA, 19 bp, Mus musculus
  siRNA target sequence for Coq3 (NM_172687.1,763-781).
cattactacagtgaacaaa

SEQ ID NO: 604452 - DNA, 19 bp, Mus musculus
  siRNA target sequence for Coq3 (NM_172687.1,793-811).
ctatgccttgggaattgtt

SEQ ID NO: 604453 - DNA, 19 bp, Mus musculus
  siRNA target sequence for Coq3 (NM_172687.1,836-854).
gttccaaaaggcactcata

SEQ ID NO: 604454 - DNA, 19 bp, Mus musculus
  siRNA target sequence for Coq3 (NM_172687.1,849-867).
ctcatacgtgggaaaagtt

SEQ ID NO: 604455 - DNA, 19 bp, Mus musculus
  siRNA target sequence for Coq3 (NM_172687.1,889-907).
gagtatcttggaaccaaat

SEQ ID NO: 604456 - DNA, 19 bp, Mus musculus
  siRNA target sequence for Coq3 (NM_172687.1,909-927).
gtctgtcagttgaaactgt

SEQ ID NO: 604457 - DNA, 19 bp, Mus musculus
  siRNA target sequence for Coq3 (NM_172687.1,926-944).
gtggcaggattggtctata

SEQ ID NO: 604458 - DNA, 19 bp, Mus musculus
  siRNA target sequence for Coq3 (NM_172687.1,928-946).
ggcaggattggtctataat

SEQ ID NO: 604459 - DNA, 19 bp, Mus musculus
  siRNA target sequence for Coq3 (NM_172687.1,932-950).
ggattggtctataatcctt

SEQ ID NO: 604460 - DNA, 19 bp, Mus musculus
  siRNA target sequence for Coq3 (NM_172687.1,933-951).
gattggtctataatccttt

SEQ ID NO: 604461 - DNA, 19 bp, Mus musculus
  siRNA target sequence for Coq3 (NM_172687.1,965-983).
cattggagtgaaaatacca

SEQ ID NO: 604462 - DNA, 19 bp, Mus musculus
  siRNA target sequence for D5Ertd33e (NM_026504.1,239-257).
ccaagaagtacgatctgat

SEQ ID NO: 604463 - DNA, 19 bp, Mus musculus
  siRNA target sequence for D5Ertd33e (NM_026504.1,243-261).
gaagtacgatctgatgaat

SEQ ID NO: 604464 - DNA, 19 bp, Mus musculus
  siRNA target sequence for D5Ertd33e (NM_026504.1,287-305).
gagcttggaaggatttgct

SEQ ID NO: 604465 - DNA, 19 bp, Mus musculus
  siRNA target sequence for D5Ertd33e (NM_026504.1,373-391).
gcgttccggttccttagtt

SEQ ID NO: 604466 - DNA, 19 bp, Mus musculus
  siRNA target sequence for D5Ertd33e (NM_026504.1,374-392).
cgttccggttccttagtta

SEQ ID NO: 604467 - DNA, 19 bp, Mus musculus
  siRNA target sequence for D5Ertd33e (NM_026504.1,467-485).
ccaaaaagtaccagaatga

SEQ ID NO: 604468 - DNA, 19 bp, Mus musculus
  siRNA target sequence for D5Ertd33e (NM_026504.1,531-549).
cagggagatgctaaaggtt

SEQ ID NO: 604469 - DNA, 19 bp, Mus musculus
  siRNA target sequence for D5Ertd33e (NM_026504.1,631-649).
gacgacagctttgatgttt

SEQ ID NO: 604470 - DNA, 19 bp, Mus musculus
  siRNA target sequence for D5Ertd33e (NM_026504.1,643-661).
gatgtttacaccattgcat

SEQ ID NO: 604471 - DNA, 19 bp, Mus musculus
  siRNA target sequence for D5Ertd33e (NM_026504.1,669-687).
ccggaatgtcacacacatt

SEQ ID NO: 604472 - DNA, 19 bp, Mus musculus
  siRNA target sequence for D5Ertd33e (NM_026504.1,724-742).
ccaggaggccggtttctct

SEQ ID NO: 604473 - DNA, 19 bp, Mus musculus
  siRNA target sequence for D5Ertd33e (NM_026504.1,760-778).
gtgaatgaccctctcatat

SEQ ID NO: 604474 - DNA, 19 bp, Mus musculus
  siRNA target sequence for D5Ertd33e (NM_026504.1,774-792).
catatccaggctttatgat

SEQ ID NO: 604475 - DNA, 19 bp, Mus musculus
  siRNA target sequence for D5Ertd33e (NM_026504.1,779-797).
ccaggctttatgatctgta

SEQ ID NO: 604476 - DNA, 19 bp, Mus musculus
  siRNA target sequence for D5Ertd33e (NM_026504.1,845-863).
ggaagtcctaccaatacct

SEQ ID NO: 604477 - DNA, 19 bp, Mus musculus
  siRNA target sequence for D5Ertd33e (NM_026504.1,887-905).
caaatcaggaggacttcaa

SEQ ID NO: 604478 - DNA, 19 bp, Mus musculus
  siRNA target sequence for D5Ertd33e (NM_026504.1,961-979).
gggattgtggccattcact

SEQ ID NO: 604479 - DNA, 19 bp, Mus musculus
  siRNA target sequence for D5Wsu46e (NM_144913.2,570-588).
ctctgtgttaccatccaat

SEQ ID NO: 604480 - DNA, 19 bp, Mus musculus
  siRNA target sequence for D5Wsu46e (NM_144913.2,613-631).
gatccactgaacctgaata

SEQ ID NO: 604481 - DNA, 19 bp, Mus musculus
  siRNA target sequence for D5Wsu46e (NM_144913.2,812-830).
gtcgcaagcgccatagaca

SEQ ID NO: 604482 - DNA, 19 bp, Mus musculus
  siRNA target sequence for D5Wsu46e (NM_144913.2,858-876).
ggcgtctggagggaatgat

SEQ ID NO: 604483 - DNA, 19 bp, Mus musculus
  siRNA target sequence for D5Wsu46e (NM_144913.2,859-877).
gcgtctggagggaatgata

SEQ ID NO: 604484 - DNA, 19 bp, Mus musculus
  siRNA target sequence for D5Wsu46e (NM_144913.2,974-992).
cccctcaaccctatgaact

SEQ ID NO: 604485 - DNA, 19 bp, Mus musculus
  siRNA target sequence for D5Wsu46e (NM_144913.2,1264-1282).
caacagctaaagttccaat

SEQ ID NO: 604486 - DNA, 19 bp, Mus musculus
  siRNA target sequence for D5Wsu46e (NM_144913.2,1285-1303).
gggaattactgcaagtact

SEQ ID NO: 604487 - DNA, 19 bp, Mus musculus
  siRNA target sequence for D5Wsu46e (NM_144913.2,1350-1368).
gaagcccgagtggtttcaa

SEQ ID NO: 604488 - DNA, 19 bp, Mus musculus
  siRNA target sequence for D5Wsu46e (NM_144913.2,1402-1420).
ggccatctgaccctaagta

SEQ ID NO: 604489 - DNA, 19 bp, Mus musculus
  siRNA target sequence for D5Wsu46e (NM_144913.2,1404-1422).
ccatctgaccctaagtatt

SEQ ID NO: 604490 - DNA, 19 bp, Mus musculus
  siRNA target sequence for D5Wsu46e (NM_144913.2,1479-1497).
ccactctgctcgccaaaat

SEQ ID NO: 604491 - DNA, 19 bp, Mus musculus
  siRNA target sequence for D5Wsu46e (NM_144913.2,1748-1766).
cccaaagaccggagtatga

SEQ ID NO: 604492 - DNA, 19 bp, Mus musculus
  siRNA target sequence for D5Wsu46e (NM_144913.2,1749-1767).
ccaaagaccggagtatgat

SEQ ID NO: 604493 - DNA, 19 bp, Mus musculus
  siRNA target sequence for D5Wsu46e (NM_144913.2,1922-1940).
ctctcacggaaacaatcta

SEQ ID NO: 604494 - DNA, 19 bp, Mus musculus
  siRNA target sequence for D5Wsu46e (NM_144913.2,1924-1942).
ctcacggaaacaatctata

SEQ ID NO: 604495 - DNA, 19 bp, Mus musculus
  siRNA target sequence for D5Wsu46e (NM_144913.2,1934-1952).
caatctataagaactactt

SEQ ID NO: 604496 - DNA, 19 bp, Mus musculus
  siRNA target sequence for D5Wsu46e (NM_144913.2,2029-2047).
gtggccacaccgaataaca

SEQ ID NO: 604497 - DNA, 19 bp, Mus musculus
  siRNA target sequence for Gnmt (NM_010321.1,133-151).
gccgtaccgcagagtacaa

SEQ ID NO: 604498 - DNA, 19 bp, Mus musculus
  siRNA target sequence for Gnmt (NM_010321.1,327-345).
gagccatcctttgacaatt

SEQ ID NO: 604499 - DNA, 19 bp, Mus musculus
  siRNA target sequence for Gnmt (NM_010321.1,341-359).
caattgggtcattgaagaa

SEQ ID NO: 604500 - DNA, 19 bp, Mus musculus
  siRNA target sequence for Hrmt1l1 (NM_133182.1,223-241).
cgtggccattgcagactat

SEQ ID NO: 604501 - DNA, 19 bp, Mus musculus
  siRNA target sequence for Hrmt1l1 (NM_133182.1,224-242).
gtggccattgcagactata

SEQ ID NO: 604502 - DNA, 19 bp, Mus musculus
  siRNA target sequence for Hrmt1l1 (NM_133182.1,408-426).
ggcaggacgaggagtactt

SEQ ID NO: 604503 - DNA, 19 bp, Mus musculus
  siRNA target sequence for Hrmt1l1 (NM_133182.1,873-891).
gcagcgccgagaaagacta

SEQ ID NO: 604504 - DNA, 19 bp, Mus musculus
  siRNA target sequence for Hrmt1l1 (NM_133182.1,978-996).
ggccaaagtcgaatcatat

SEQ ID NO: 604505 - DNA, 19 bp, Mus musculus
  siRNA target sequence for Hrmt1l1 (NM_133182.1,1086-1104).
gtggcgaactgcgatttga

SEQ ID NO: 604506 - DNA, 19 bp, Mus musculus
  siRNA target sequence for Hrmt1l1 (NM_133182.1,1088-1106).
ggcgaactgcgatttgaca

SEQ ID NO: 604507 - DNA, 19 bp, Mus musculus
  siRNA target sequence for Hrmt1l1 (NM_133182.1,1089-1107).
gcgaactgcgatttgacat

SEQ ID NO: 604508 - DNA, 19 bp, Mus musculus
  siRNA target sequence for Hrmt1l1 (NM_133182.1,1288-1306).
cgggttctgttgtgttaca

SEQ ID NO: 604509 - DNA, 19 bp, Mus musculus
  siRNA target sequence for Hrmt1l1 (NM_133182.1,1289-1307).
gggttctgttgtgttacaa

SEQ ID NO: 604510 - DNA, 19 bp, Mus musculus
  siRNA target sequence for Hrmt1l2 (NM_019830.1,40-58).
gcatcatggagaattttgt

SEQ ID NO: 604511 - DNA, 19 bp, Mus musculus
  siRNA target sequence for Hrmt1l2 (NM_019830.1,160-178).
ccaaagactactactttga

SEQ ID NO: 604512 - DNA, 19 bp, Mus musculus
  siRNA target sequence for Hrmt1l2 (NM_019830.1,243-261).
cgcaactccatgtttcaca

SEQ ID NO: 604513 - DNA, 19 bp, Mus musculus
  siRNA target sequence for Hrmt1l2 (NM_019830.1,244-262).
gcaactccatgtttcacaa

SEQ ID NO: 604514 - DNA, 19 bp, Mus musculus
  siRNA target sequence for Hrmt1l2 (NM_019830.1,260-278).
caatcggcatctcttcaaa

SEQ ID NO: 604515 - DNA, 19 bp, Mus musculus
  siRNA target sequence for Hrmt1l2 (NM_019830.1,383-401).
cgattatgctgtgaagatt

SEQ ID NO: 604516 - DNA, 19 bp, Mus musculus
  siRNA target sequence for Hrmt1l2 (NM_019830.1,571-589).
cacccgatggcctcatctt

SEQ ID NO: 604517 - DNA, 19 bp, Mus musculus
  siRNA target sequence for Hrmt1l2 (NM_019830.1,619-637).
ccattgaggaccgacaata

SEQ ID NO: 604518 - DNA, 19 bp, Mus musculus
  siRNA target sequence for Hrmt1l2 (NM_019830.1,620-638).
cattgaggaccgacaatat

SEQ ID NO: 604519 - DNA, 19 bp, Mus musculus
  siRNA target sequence for Hrmt1l2 (NM_019830.1,627-645).
gaccgacaatataaagact

SEQ ID NO: 604520 - DNA, 19 bp, Mus musculus
  siRNA target sequence for Hrmt1l2 (NM_019830.1,665-683).
gaacgtgtatggctttgat

SEQ ID NO: 604521 - DNA, 19 bp, Mus musculus
  siRNA target sequence for Hrmt1l2 (NM_019830.1,669-687).
gtgtatggctttgatatgt

SEQ ID NO: 604522 - DNA, 19 bp, Mus musculus
  siRNA target sequence for Hrmt1l2 (NM_019830.1,861-879).
gcgctggtggcttacttca

SEQ ID NO: 604523 - DNA, 19 bp, Mus musculus
  siRNA target sequence for Hrmt1l2 (NM_019830.1,992-1010).
gactggcgaggagatcttt

SEQ ID NO: 604524 - DNA, 19 bp, Mus musculus
  siRNA target sequence for Hrmt1l2 (NM_019830.1,1089-1107).
ctgtgtgagctctcttgtt

SEQ ID NO: 604525 - DNA, 19 bp, Mus musculus
  siRNA target sequence for Hrmt1l3 (NM_133740.1,287-305).
cctctgctgaggaaacgtt

SEQ ID NO: 604526 - DNA, 19 bp, Mus musculus
  siRNA target sequence for Hrmt1l3 (NM_133740.1,288-306).
ctctgctgaggaaacgttt

SEQ ID NO: 604527 - DNA, 19 bp, Mus musculus
  siRNA target sequence for Hrmt1l3 (NM_133740.1,293-311).
ctgaggaaacgttttcaca

SEQ ID NO: 604528 - DNA, 19 bp, Mus musculus
  siRNA target sequence for Hrmt1l3 (NM_133740.1,318-336).
gttggagcatcaatttaat

SEQ ID NO: 604529 - DNA, 19 bp, Mus musculus
  siRNA target sequence for Hrmt1l3 (NM_133740.1,321-339).
ggagcatcaatttaatatt

SEQ ID NO: 604530 - DNA, 19 bp, Mus musculus
  siRNA target sequence for Hrmt1l3 (NM_133740.1,351-369).
ccataaacatggacttgaa

SEQ ID NO: 604531 - DNA, 19 bp, Mus musculus
  siRNA target sequence for Hrmt1l3 (NM_133740.1,352-370).
cataaacatggacttgaat

SEQ ID NO: 604532 - DNA, 19 bp, Mus musculus
  siRNA target sequence for Hrmt1l3 (NM_133740.1,415-433).
cctacggttgaatatatga

SEQ ID NO: 604533 - DNA, 19 bp, Mus musculus
  siRNA target sequence for Hrmt1l3 (NM_133740.1,424-442).
gaatatatgaattccatat

SEQ ID NO: 604534 - DNA, 19 bp, Mus musculus
  siRNA target sequence for Hrmt1l3 (NM_133740.1,538-556).
gtgtctactccattctcat

SEQ ID NO: 604535 - DNA, 19 bp, Mus musculus
  siRNA target sequence for Hrmt1l3 (NM_133740.1,578-596).
gcgcatctgttgttgagaa

SEQ ID NO: 604536 - DNA, 19 bp, Mus musculus
  siRNA target sequence for Hrmt1l3 (NM_133740.1,584-602).
ctgttgttgagaagttgaa

SEQ ID NO: 604537 - DNA, 19 bp, Mus musculus
  siRNA target sequence for Hrmt1l3 (NM_133740.1,774-792).
cagctcctatgggcattat

SEQ ID NO: 604538 - DNA, 19 bp, Mus musculus
  siRNA target sequence for Hrmt1l3 (NM_133740.1,786-804).
gcattatgggatacatgaa

SEQ ID NO: 604539 - DNA, 19 bp, Mus musculus
  siRNA target sequence for Hrmt1l3 (NM_133740.1,823-841).
gtacgcacagaaagttaca

SEQ ID NO: 604540 - DNA, 19 bp, Mus musculus
  siRNA target sequence for Hrmt1l3 (NM_133740.1,958-976).
gcagtcgaccagtctgaaa

SEQ ID NO: 604541 - DNA, 19 bp, Mus musculus
  siRNA target sequence for Hrmt1l3 (NM_133740.1,989-1007).
ctatggatatcataagact

SEQ ID NO: 604542 - DNA, 19 bp, Mus musculus
  siRNA target sequence for Hrmt1l3 (NM_133740.1,1018-1036).
gaagataccattgtactaa

SEQ ID NO: 604543 - DNA, 19 bp, Mus musculus
  siRNA target sequence for Hrmt1l3 (NM_133740.1,1077-1095).
ggtggatgttattatatca

SEQ ID NO: 604544 - DNA, 19 bp, Mus musculus
  siRNA target sequence for Hrmt1l3 (NM_133740.1,1094-1112).
cagagtggatgggctattt

SEQ ID NO: 604545 - DNA, 19 bp, Mus musculus
  siRNA target sequence for Hrmt1l3 (NM_133740.1,1135-1153).
gattctgtcctttatgcta

SEQ ID NO: 604546 - DNA, 19 bp, Mus musculus
  siRNA target sequence for Hrmt1l3 (NM_133740.1,1141-1159).
gtcctttatgctaagagta

SEQ ID NO: 604547 - DNA, 19 bp, Mus musculus
  siRNA target sequence for Hrmt1l3 (NM_133740.1,1144-1162).
ctttatgctaagagtaaat

SEQ ID NO: 604548 - DNA, 19 bp, Mus musculus
  siRNA target sequence for Hrmt1l3 (NM_133740.1,1232-1250).
gcaagcacgccgatagaat

SEQ ID NO: 604549 - DNA, 19 bp, Mus musculus
  siRNA target sequence for Hrmt1l3 (NM_133740.1,1233-1251).
caagcacgccgatagaatt

SEQ ID NO: 604550 - DNA, 19 bp, Mus musculus
  siRNA target sequence for Hrmt1l3 (NM_133740.1,1267-1285).
gtctatggcttcaacatgt

SEQ ID NO: 604551 - DNA, 19 bp, Mus musculus
  siRNA target sequence for Hrmt1l3 (NM_133740.1,1330-1348).
gtggatcacaagactctta

SEQ ID NO: 604552 - DNA, 19 bp, Mus musculus
  siRNA target sequence for Hrmt1l3 (NM_133740.1,1333-1351).
gatcacaagactcttattt

SEQ ID NO: 604553 - DNA, 19 bp, Mus musculus
  siRNA target sequence for Hrmt1l3 (NM_133740.1,1383-1401).
ccacaccacgtctatctca

SEQ ID NO: 604554 - DNA, 19 bp, Mus musculus
  siRNA target sequence for Hrmt1l3 (NM_133740.1,1465-1483).
gctgggtactttgatatat

SEQ ID NO: 604555 - DNA, 19 bp, Mus musculus
  siRNA target sequence for Hrmt1l3 (NM_133740.1,1466-1484).
ctgggtactttgatatata

SEQ ID NO: 604556 - DNA, 19 bp, Mus musculus
  siRNA target sequence for Hrmt1l3 (NM_133740.1,1468-1486).
gggtactttgatatatatt

SEQ ID NO: 604557 - DNA, 19 bp, Mus musculus
  siRNA target sequence for Hrmt1l3 (NM_133740.1,1469-1487).
ggtactttgatatatattt

SEQ ID NO: 604558 - DNA, 19 bp, Mus musculus
  siRNA target sequence for Hrmt1l3 (NM_133740.1,1617-1635).
gatcacagttcacaagaat

SEQ ID NO: 604559 - DNA, 19 bp, Mus musculus
  siRNA target sequence for Ncoa6ip (NM_054089.2,1916-1934).
ccagagctggctaaatact

SEQ ID NO: 604560 - DNA, 19 bp, Mus musculus
  siRNA target sequence for Srm (NM_009272.2,245-263).
gatcgcggtaccaagacat

SEQ ID NO: 604561 - DNA, 19 bp, Mus musculus
  siRNA target sequence for Srm (NM_009272.2,264-282).
cctcgtcttccgcagtaaa

SEQ ID NO: 604562 - DNA, 19 bp, Mus musculus
  siRNA target sequence for Srm (NM_009272.2,323-341).
gtactgagagggatgagtt

SEQ ID NO: 604563 - DNA, 19 bp, Mus musculus
  siRNA target sequence for Srm (NM_009272.2,471-489).
ggtccagtgcgagattgat

SEQ ID NO: 604564 - DNA, 19 bp, Mus musculus
  siRNA target sequence for Srm (NM_009272.2,568-586).
gtgggcgatggctttgagt

SEQ ID NO: 604565 - DNA, 19 bp, Mus musculus
  siRNA target sequence for Srm (NM_009272.2,650-668).
ctgctgagagcctcttcaa

SEQ ID NO: 604566 - DNA, 19 bp, Mus musculus
  siRNA target sequence for Srm (NM_009272.2,674-692).
cctattaccagctcatgaa

SEQ ID NO: 604567 - DNA, 19 bp, Mus musculus
  siRNA target sequence for Srm (NM_009272.2,771-789).
gaggcacttctgcaaatct

SEQ ID NO: 604568 - DNA, 19 bp, Mus musculus
  siRNA target sequence for Srm (NM_009272.2,773-791).
ggcacttctgcaaatctct

SEQ ID NO: 604569 - DNA, 19 bp, Mus musculus
  siRNA target sequence for Srm (NM_009272.2,802-820).
gtggactacgcctactgta

SEQ ID NO: 604570 - DNA, 19 bp, Mus musculus
  siRNA target sequence for Srm (NM_009272.2,807-825).
ctacgcctactgtagcatt

SEQ ID NO: 604571 - DNA, 19 bp, Mus musculus
  siRNA target sequence for Srm (NM_009272.2,811-829).
gcctactgtagcattccta

SEQ ID NO: 604572 - DNA, 19 bp, Mus musculus
  siRNA target sequence for Srm (NM_009272.2,816-834).
ctgtagcattcctacctat

SEQ ID NO: 604573 - DNA, 19 bp, Mus musculus
  siRNA target sequence for Srm (NM_009272.2,930-948).
gatgcagctgaaatactat

SEQ ID NO: 604574 - DNA, 19 bp, Mus musculus
  siRNA target sequence for Srm (NM_009272.2,996-1014).
gaaggccctcaatgacata

SEQ ID NO: 604575 - DNA, 19 bp, Mus musculus
  siRNA target sequence for Wbscr22 (NM_025375.1,432-450).
gaccagctcacggatgatt

SEQ ID NO: 604576 - DNA, 19 bp, Mus musculus
  siRNA target sequence for Wbscr22 (NM_025375.1,437-455).
gctcacggatgattgacat

SEQ ID NO: 604577 - DNA, 19 bp, Mus musculus
  siRNA target sequence for Wbscr22 (NM_025375.1,479-497).
cgctggagctcctctgttt

SEQ ID NO: 604578 - DNA, 19 bp, Mus musculus
  siRNA target sequence for Wbscr22 (NM_025375.1,483-501).
ggagctcctctgtttacca

SEQ ID NO: 604579 - DNA, 19 bp, Mus musculus
  siRNA target sequence for Wbscr22 (NM_025375.1,684-702).
cagaccgggctcttttgat

SEQ ID NO: 604580 - DNA, 19 bp, Mus musculus
  siRNA target sequence for Wbscr22 (NM_025375.1,733-751).
ctctgcaacgccaacaaga

SEQ ID NO: 604581 - DNA, 19 bp, Mus musculus
  siRNA target sequence for Wbscr22 (NM_025375.1,771-789).
gcgcctgtactgcttcttt

SEQ ID NO: 604582 - DNA, 19 bp, Mus musculus
  siRNA target sequence for Wbscr22 (NM_025375.1,772-790).
cgcctgtactgcttctttt

SEQ ID NO: 604583 - DNA, 19 bp, Mus musculus
  siRNA target sequence for Wbscr22 (NM_025375.1,1024-1042).
gcctccgagtccatgttca

SEQ ID NO: 604584 - DNA, 19 bp, Mus musculus
  siRNA target sequence for Hnmt (NM_080462.1,76-94).
cttgcatgaggagcttatt

SEQ ID NO: 604585 - DNA, 19 bp, Mus musculus
  siRNA target sequence for Hnmt (NM_080462.1,105-123).
ggcagatacgtagaatctt

SEQ ID NO: 604586 - DNA, 19 bp, Mus musculus
  siRNA target sequence for Hnmt (NM_080462.1,106-124).
gcagatacgtagaatcttt

SEQ ID NO: 604587 - DNA, 19 bp, Mus musculus
  siRNA target sequence for Hnmt (NM_080462.1,107-125).
cagatacgtagaatctttt

SEQ ID NO: 604588 - DNA, 19 bp, Mus musculus
  siRNA target sequence for Hnmt (NM_080462.1,121-139).
cttttcggaggtttctaaa

SEQ ID NO: 604589 - DNA, 19 bp, Mus musculus
  siRNA target sequence for Hnmt (NM_080462.1,182-200).
gaagcttccgggcataata

SEQ ID NO: 604590 - DNA, 19 bp, Mus musculus
  siRNA target sequence for Hnmt (NM_080462.1,186-204).
cttccgggcataatagcaa

SEQ ID NO: 604591 - DNA, 19 bp, Mus musculus
  siRNA target sequence for Hnmt (NM_080462.1,191-209).
gggcataatagcaaggatt

SEQ ID NO: 604592 - DNA, 19 bp, Mus musculus
  siRNA target sequence for Hnmt (NM_080462.1,283-301).
ccaaagtccaggctcaata

SEQ ID NO: 604593 - DNA, 19 bp, Mus musculus
  siRNA target sequence for Hnmt (NM_080462.1,311-329).
ctgtattaacaatgaagtt

SEQ ID NO: 604594 - DNA, 19 bp, Mus musculus
  siRNA target sequence for Hnmt (NM_080462.1,313-331).
gtattaacaatgaagttgt

SEQ ID NO: 604595 - DNA, 19 bp, Mus musculus
  siRNA target sequence for Hnmt (NM_080462.1,340-358).
gtgctgaacaaattgtcaa

SEQ ID NO: 604596 - DNA, 19 bp, Mus musculus
  siRNA target sequence for Hnmt (NM_080462.1,430-448).
ctgaatatcaaaaacgtat

SEQ ID NO: 604597 - DNA, 19 bp, Mus musculus
  siRNA target sequence for Hnmt (NM_080462.1,468-486).
ccaccgaagtgggacttta

SEQ ID NO: 604598 - DNA, 19 bp, Mus musculus
  siRNA target sequence for Hnmt (NM_080462.1,472-490).
cgaagtgggactttattca

SEQ ID NO: 604599 - DNA, 19 bp, Mus musculus
  siRNA target sequence for Hnmt (NM_080462.1,478-496).
gggactttattcatatgat

SEQ ID NO: 604600 - DNA, 19 bp, Mus musculus
  siRNA target sequence for Hnmt (NM_080462.1,494-512).
gattcagatgctgtattat

SEQ ID NO: 604601 - DNA, 19 bp, Mus musculus
  siRNA target sequence for Hnmt (NM_080462.1,506-524).
gtattatgtaaaggatatt

SEQ ID NO: 604602 - DNA, 19 bp, Mus musculus
  siRNA target sequence for Hnmt (NM_080462.1,530-548).
caccctgaaatttttccat

SEQ ID NO: 604603 - DNA, 19 bp, Mus musculus
  siRNA target sequence for Hnmt (NM_080462.1,554-572).
cttagctgccagtgctaaa

SEQ ID NO: 604604 - DNA, 19 bp, Mus musculus
  siRNA target sequence for Hnmt (NM_080462.1,565-583).
gtgctaaaattctcattat

SEQ ID NO: 604605 - DNA, 19 bp, Mus musculus
  siRNA target sequence for Hnmt (NM_080462.1,651-669).
gacctctgccagtatgtca

SEQ ID NO: 604606 - DNA, 19 bp, Mus musculus
  siRNA target sequence for Hnmt (NM_080462.1,662-680).
gtatgtcacatcttctgat

SEQ ID NO: 604607 - DNA, 19 bp, Mus musculus
  siRNA target sequence for Hnmt (NM_080462.1,676-694).
ctgatcttgcgcagatact

SEQ ID NO: 604608 - DNA, 19 bp, Mus musculus
  siRNA target sequence for Hnmt (NM_080462.1,706-724).
gtattaagtatgaatgcta

SEQ ID NO: 604609 - DNA, 19 bp, Mus musculus
  siRNA target sequence for Hnmt (NM_080462.1,732-750).
gtgtccaccatggacataa

SEQ ID NO: 604610 - DNA, 19 bp, Mus musculus
  siRNA target sequence for Hnmt (NM_080462.1,734-752).
gtccaccatggacataaca

SEQ ID NO: 604611 - DNA, 19 bp, Mus musculus
  siRNA target sequence for Hnmt (NM_080462.1,744-762).
gacataacagactgtttta

SEQ ID NO: 604612 - DNA, 19 bp, Mus musculus
  siRNA target sequence for Hnmt (NM_080462.1,757-775).
gttttattgatggtaatga

SEQ ID NO: 604613 - DNA, 19 bp, Mus musculus
  siRNA target sequence for Hnmt (NM_080462.1,803-821).
gacagaaacctgtaacttt

SEQ ID NO: 604614 - DNA, 19 bp, Mus musculus
  siRNA target sequence for Hnmt (NM_080462.1,829-847).
cagcaccactggatctcaa

SEQ ID NO: 604615 - DNA, 19 bp, Mus musculus
  siRNA target sequence for Hnmt (NM_080462.1,900-918).
gggaaggtactttttaata

SEQ ID NO: 604616 - DNA, 19 bp, Mus musculus
  siRNA target sequence for Hnmt (NM_080462.1,901-919).
ggaaggtactttttaataa

SEQ ID NO: 604617 - DNA, 19 bp, Mus musculus
  siRNA target sequence for Hnmt (NM_080462.1,902-920).
gaaggtactttttaataat

SEQ ID NO: 604618 - DNA, 19 bp, Mus musculus
  siRNA target sequence for Pemt (NM_008819.2,178-196).
ccccacctagcctgctatt

SEQ ID NO: 604619 - DNA, 19 bp, Mus musculus
  siRNA target sequence for Pemt (NM_008819.2,209-227).
gcatcctgcttttgaacat

SEQ ID NO: 604620 - DNA, 19 bp, Mus musculus
  siRNA target sequence for Pemt (NM_008819.2,326-344).
gttggggattcgtgtttgt

SEQ ID NO: 604621 - DNA, 19 bp, Mus musculus
  siRNA target sequence for Pemt (NM_008819.2,369-387).
gttcactgggacctttcta

SEQ ID NO: 604622 - DNA, 19 bp, Mus musculus
  siRNA target sequence for Pemt (NM_008819.2,414-432).
gtccagagtgaccacattt

SEQ ID NO: 604623 - DNA, 19 bp, Mus musculus
  siRNA target sequence for Pemt (NM_008819.2,552-570).
cgtggttgctctcctatat

SEQ ID NO: 604624 - DNA, 19 bp, Mus musculus
  siRNA target sequence for Pemt (NM_008819.2,578-596).
ccttcactgctgagatcta

SEQ ID NO: 604625 - DNA, 19 bp, Mus musculus
  siRNA target sequence for Pemt (NM_008819.2,607-625).
gctaccaggttgcacaaaa

SEQ ID NO: 604626 - DNA, 19 bp, Mus musculus
  siRNA target sequence for Gart (NM_010256.1,189-207).
ctcaggtcaagcaagtgtt

SEQ ID NO: 604627 - DNA, 19 bp, Mus musculus
  siRNA target sequence for Gart (NM_010256.1,300-318).
gcaaggatgaaaagattga

SEQ ID NO: 604628 - DNA, 19 bp, Mus musculus
  siRNA target sequence for Gart (NM_010256.1,419-437).
caattagagtccagtaaga

SEQ ID NO: 604629 - DNA, 19 bp, Mus musculus
  siRNA target sequence for Gart (NM_010256.1,509-527).
gatgcctgcagctttatta

SEQ ID NO: 604630 - DNA, 19 bp, Mus musculus
  siRNA target sequence for Gart (NM_010256.1,629-647).
caggagatcatgcaagaaa

SEQ ID NO: 604631 - DNA, 19 bp, Mus musculus
  siRNA target sequence for Gart (NM_010256.1,753-771).
ccccagcacaagaccataa

SEQ ID NO: 604632 - DNA, 19 bp, Mus musculus
  siRNA target sequence for Gart (NM_010256.1,838-856).
ggtttctaaggacttgtta

SEQ ID NO: 604633 - DNA, 19 bp, Mus musculus
  siRNA target sequence for Gart (NM_010256.1,847-865).
ggacttgttagtaaaaatt

SEQ ID NO: 604634 - DNA, 19 bp, Mus musculus
  siRNA target sequence for Gart (NM_010256.1,915-933).
cgccgtacacaggaattct

SEQ ID NO: 604635 - DNA, 19 bp, Mus musculus
  siRNA target sequence for Gart (NM_010256.1,916-934).
gccgtacacaggaattctt

SEQ ID NO: 604636 - DNA, 19 bp, Mus musculus
  siRNA target sequence for Gart (NM_010256.1,917-935).
ccgtacacaggaattcttt

SEQ ID NO: 604637 - DNA, 19 bp, Mus musculus
  siRNA target sequence for Gart (NM_010256.1,918-936).
cgtacacaggaattcttta

SEQ ID NO: 604638 - DNA, 19 bp, Mus musculus
  siRNA target sequence for Gart (NM_010256.1,966-984).
caaaagtgttggagtttaa

SEQ ID NO: 604639 - DNA, 19 bp, Mus musculus
  siRNA target sequence for Gart (NM_010256.1,1012-1030).
ggtcatcctcccacttctt

SEQ ID NO: 604640 - DNA, 19 bp, Mus musculus
  siRNA target sequence for Gart (NM_010256.1,1013-1031).
gtcatcctcccacttctta

SEQ ID NO: 604641 - DNA, 19 bp, Mus musculus
  siRNA target sequence for Gart (NM_010256.1,1088-1106).
ctgcctgtttggctagaaa

SEQ ID NO: 604642 - DNA, 19 bp, Mus musculus
  siRNA target sequence for Gart (NM_010256.1,1123-1141).
cgtcgtcatggcgagtaaa

SEQ ID NO: 604643 - DNA, 19 bp, Mus musculus
  siRNA target sequence for Gart (NM_010256.1,1162-1180).
caaaggcgtggagattaca

SEQ ID NO: 604644 - DNA, 19 bp, Mus musculus
  siRNA target sequence for Gart (NM_010256.1,1331-1349).
ggactcgctgctctaaagt

SEQ ID NO: 604645 - DNA, 19 bp, Mus musculus
  siRNA target sequence for Gart (NM_010256.1,1332-1350).
gactcgctgctctaaagtt

SEQ ID NO: 604646 - DNA, 19 bp, Mus musculus
  siRNA target sequence for Gart (NM_010256.1,1352-1370).
gagggagccatctatagaa

SEQ ID NO: 604647 - DNA, 19 bp, Mus musculus
  siRNA target sequence for Gart (NM_010256.1,1454-1472).
ggaaatatgctggttaaga

SEQ ID NO: 604648 - DNA, 19 bp, Mus musculus
  siRNA target sequence for Gart (NM_010256.1,1536-1554).
ctggtctttttgatttgaa

SEQ ID NO: 604649 - DNA, 19 bp, Mus musculus
  siRNA target sequence for Gart (NM_010256.1,1552-1570).
gaaagcagctggtttcaaa

SEQ ID NO: 604650 - DNA, 19 bp, Mus musculus
  siRNA target sequence for Gart (NM_010256.1,1593-1611).
cagatggtgtgggaactaa

SEQ ID NO: 604651 - DNA, 19 bp, Mus musculus
  siRNA target sequence for Gart (NM_010256.1,1599-1617).
gtgtgggaactaaactaaa

SEQ ID NO: 604652 - DNA, 19 bp, Mus musculus
  siRNA target sequence for Gart (NM_010256.1,1624-1642).
gcagctgtgcaataagcat

SEQ ID NO: 604653 - DNA, 19 bp, Mus musculus
  siRNA target sequence for Gart (NM_010256.1,1632-1650).
gcaataagcatgattccat

SEQ ID NO: 604654 - DNA, 19 bp, Mus musculus
  siRNA target sequence for Gart (NM_010256.1,1741-1759).
gctcgacctcagtacaact

SEQ ID NO: 604655 - DNA, 19 bp, Mus musculus
  siRNA target sequence for Gart (NM_010256.1,1744-1762).
cgacctcagtacaactgaa

SEQ ID NO: 604656 - DNA, 19 bp, Mus musculus
  siRNA target sequence for Gart (NM_010256.1,1830-1848).
cagagatgcccaacatgta

SEQ ID NO: 604657 - DNA, 19 bp, Mus musculus
  siRNA target sequence for Gart (NM_010256.1,1932-1950).
ccgaaggggatgctgttat

SEQ ID NO: 604658 - DNA, 19 bp, Mus musculus
  siRNA target sequence for Gart (NM_010256.1,1989-2007).
gccttgtgaggaaaatcgt

SEQ ID NO: 604659 - DNA, 19 bp, Mus musculus
  siRNA target sequence for Gart (NM_010256.1,2065-2083).
cttaggggacttacttcta

SEQ ID NO: 604660 - DNA, 19 bp, Mus musculus
  siRNA target sequence for Gart (NM_010256.1,2094-2112).
ggatctacagccattcact

SEQ ID NO: 604661 - DNA, 19 bp, Mus musculus
  siRNA target sequence for Gart (NM_010256.1,2111-2129).
ctgctgcccatcatacgtt

SEQ ID NO: 604662 - DNA, 19 bp, Mus musculus
  siRNA target sequence for Gart (NM_010256.1,2130-2148).
caggacgtgtcaaagcttt

SEQ ID NO: 604663 - DNA, 19 bp, Mus musculus
  siRNA target sequence for Gart (NM_010256.1,2163-2181).
gaggcgggttgctggaaaa

SEQ ID NO: 604664 - DNA, 19 bp, Mus musculus
  siRNA target sequence for Gart (NM_010256.1,2203-2221).
gaagtttggagtagattta

SEQ ID NO: 604665 - DNA, 19 bp, Mus musculus
  siRNA target sequence for Gart (NM_010256.1,2206-2224).
gtttggagtagatttagat

SEQ ID NO: 604666 - DNA, 19 bp, Mus musculus
  siRNA target sequence for Gart (NM_010256.1,2291-2309).
gaaatggccaggacattca

SEQ ID NO: 604667 - DNA, 19 bp, Mus musculus
  siRNA target sequence for Gart (NM_010256.1,2413-2431).
cgttgcgtgtcctgaagat

SEQ ID NO: 604668 - DNA, 19 bp, Mus musculus
  siRNA target sequence for Gart (NM_010256.1,2433-2451).
cccctcgtgtcagagttaa

SEQ ID NO: 604669 - DNA, 19 bp, Mus musculus
  siRNA target sequence for Gart (NM_010256.1,2435-2453).
cctcgtgtcagagttaaga

SEQ ID NO: 604670 - DNA, 19 bp, Mus musculus
  siRNA target sequence for Gart (NM_010256.1,2436-2454).
ctcgtgtcagagttaagaa

SEQ ID NO: 604671 - DNA, 19 bp, Mus musculus
  siRNA target sequence for Gart (NM_010256.1,2439-2457).
gtgtcagagttaagaatct

SEQ ID NO: 604672 - DNA, 19 bp, Mus musculus
  siRNA target sequence for Gart (NM_010256.1,2443-2461).
cagagttaagaatctgatt

SEQ ID NO: 604673 - DNA, 19 bp, Mus musculus
  siRNA target sequence for Gart (NM_010256.1,2452-2470).
gaatctgattgaaaccata

SEQ ID NO: 604674 - DNA, 19 bp, Mus musculus
  siRNA target sequence for Gart (NM_010256.1,2456-2474).
ctgattgaaaccatacaaa

SEQ ID NO: 604675 - DNA, 19 bp, Mus musculus
  siRNA target sequence for Gart (NM_010256.1,2608-2626).
caagagctcctcacatatt

SEQ ID NO: 604676 - DNA, 19 bp, Mus musculus
  siRNA target sequence for Gart (NM_010256.1,2613-2631).
gctcctcacatattgttct

SEQ ID NO: 604677 - DNA, 19 bp, Mus musculus
  siRNA target sequence for Gart (NM_010256.1,2619-2637).
cacatattgttcttgtcat

SEQ ID NO: 604678 - DNA, 19 bp, Mus musculus
  siRNA target sequence for Gart (NM_010256.1,2694-2712).
ccagggtaattaatcacaa

SEQ ID NO: 604679 - DNA, 19 bp, Mus musculus
  siRNA target sequence for Gart (NM_010256.1,2695-2713).
cagggtaattaatcacaaa

SEQ ID NO: 604680 - DNA, 19 bp, Mus musculus
  siRNA target sequence for Gart (NM_010256.1,2697-2715).
gggtaattaatcacaaatt

SEQ ID NO: 604681 - DNA, 19 bp, Mus musculus
  siRNA target sequence for Gart (NM_010256.1,2814-2832).
ctgggcccttcgtcagaaa

SEQ ID NO: 604682 - DNA, 19 bp, Mus musculus
  siRNA target sequence for Gart (NM_010256.1,2816-2834).
gggcccttcgtcagaaaat

SEQ ID NO: 604683 - DNA, 19 bp, Mus musculus
  siRNA target sequence for Gart (NM_010256.1,2931-2949).
ctgggtgtaccgtacactt

SEQ ID NO: 604684 - DNA, 19 bp, Mus musculus
  siRNA target sequence for Gart (NM_010256.1,2934-2952).
ggtgtaccgtacactttgt

SEQ ID NO: 604685 - DNA, 19 bp, Mus musculus
  siRNA target sequence for Gart (NM_010256.1,2947-2965).
ctttgtcgctgaagatgta

SEQ ID NO: 604686 - DNA, 19 bp, Mus musculus
  siRNA target sequence for Gart (NM_010256.1,2963-2981).
gtagatgccggacaaatca

SEQ ID NO: 604687 - DNA, 19 bp, Mus musculus
  siRNA target sequence for Gart (NM_010256.1,3040-3058).
ggtcaaagtggcagaacat

SEQ ID NO: 604688 - DNA, 19 bp, Mus musculus
  siRNA target sequence for Gart (NM_010256.1,3041-3059).
gtcaaagtggcagaacata

SEQ ID NO: 604689 - DNA, 19 bp, Mus musculus
  siRNA target sequence for 2310020P08Rik (NM_027134.1,408-426).
gagtgaggctcttattctt

SEQ ID NO: 604690 - DNA, 19 bp, Mus musculus
  siRNA target sequence for 2310020P08Rik (NM_027134.1,434-452).
cctacggcatactgaatgt

SEQ ID NO: 604691 - DNA, 19 bp, Mus musculus
  siRNA target sequence for 2310020P08Rik (NM_027134.1,479-497).
gtggtcccgctccgataat

SEQ ID NO: 604692 - DNA, 19 bp, Mus musculus
  siRNA target sequence for 2310020P08Rik (NM_027134.1,1007-1025).
gtgttcggtcagtaatgct

SEQ ID NO: 604693 - DNA, 19 bp, Mus musculus
  siRNA target sequence for Fthfd (NM_027406.1,291-309).
gatggcgtgcccgtgttta

SEQ ID NO: 604694 - DNA, 19 bp, Mus musculus
  siRNA target sequence for Fthfd (NM_027406.1,294-312).
ggcgtgcccgtgtttaagt

SEQ ID NO: 604695 - DNA, 19 bp, Mus musculus
  siRNA target sequence for Fthfd (NM_027406.1,295-313).
gcgtgcccgtgtttaagtt

SEQ ID NO: 604696 - DNA, 19 bp, Mus musculus
  siRNA target sequence for Fthfd (NM_027406.1,503-521).
caactggaccctcattcat

SEQ ID NO: 604697 - DNA, 19 bp, Mus musculus
  siRNA target sequence for Fthfd (NM_027406.1,511-529).
ccctcattcatggagataa

SEQ ID NO: 604698 - DNA, 19 bp, Mus musculus
  siRNA target sequence for Fthfd (NM_027406.1,792-810).
ccagcagaggccattcaca

SEQ ID NO: 604699 - DNA, 19 bp, Mus musculus
  siRNA target sequence for Fthfd (NM_027406.1,814-832).
ggatccgtgggaatgacaa

SEQ ID NO: 604700 - DNA, 19 bp, Mus musculus
  siRNA target sequence for Fthfd (NM_027406.1,861-879).
gggcagaagctgacgtttt

SEQ ID NO: 604701 - DNA, 19 bp, Mus musculus
  siRNA target sequence for Fthfd (NM_027406.1,980-998).
cctctttgggaatgatgat

SEQ ID NO: 604702 - DNA, 19 bp, Mus musculus
  siRNA target sequence for Fthfd (NM_027406.1,1132-1150).
gctcttggatgcgaattct

SEQ ID NO: 604703 - DNA, 19 bp, Mus musculus
  siRNA target sequence for Fthfd (NM_027406.1,1198-1216).
gagctgcatccgtagatgt

SEQ ID NO: 604704 - DNA, 19 bp, Mus musculus
  siRNA target sequence for Fthfd (NM_027406.1,1253-1271).
cgggctggagttagaaaat

SEQ ID NO: 604705 - DNA, 19 bp, Mus musculus
  siRNA target sequence for Fthfd (NM_027406.1,1314-1332).
ctcctagtgaggaagttga

SEQ ID NO: 604706 - DNA, 19 bp, Mus musculus
  siRNA target sequence for Fthfd (NM_027406.1,1839-1857).
ggggtctgtggtattgtca

SEQ ID NO: 604707 - DNA, 19 bp, Mus musculus
  siRNA target sequence for Fthfd (NM_027406.1,1840-1858).
gggtctgtggtattgtcat

SEQ ID NO: 604708 - DNA, 19 bp, Mus musculus
  siRNA target sequence for Fthfd (NM_027406.1,1861-1879).
cctggaactatcccttaat

SEQ ID NO: 604709 - DNA, 19 bp, Mus musculus
  siRNA target sequence for Fthfd (NM_027406.1,1864-1882).
ggaactatcccttaatgat

SEQ ID NO: 604710 - DNA, 19 bp, Mus musculus
  siRNA target sequence for Fthfd (NM_027406.1,2101-2119).
cggaggtgggaaaacacat

SEQ ID NO: 604711 - DNA, 19 bp, Mus musculus
  siRNA target sequence for Fthfd (NM_027406.1,2131-2149).
gtgccctgagtaatgtgaa

SEQ ID NO: 604712 - DNA, 19 bp, Mus musculus
  siRNA target sequence for Fthfd (NM_027406.1,2134-2152).
ccctgagtaatgtgaagaa

SEQ ID NO: 604713 - DNA, 19 bp, Mus musculus
  siRNA target sequence for Fthfd (NM_027406.1,2172-2190).
ggaaagtcaccccttatca

SEQ ID NO: 604714 - DNA, 19 bp, Mus musculus
  siRNA target sequence for Fthfd (NM_027406.1,2229-2247).
ggcatgagctccgttttct

SEQ ID NO: 604715 - DNA, 19 bp, Mus musculus
  siRNA target sequence for Fthfd (NM_027406.1,2230-2248).
gcatgagctccgttttctt

SEQ ID NO: 604716 - DNA, 19 bp, Mus musculus
  siRNA target sequence for Fthfd (NM_027406.1,2299-2317).
ccatccatgaccagtttgt

SEQ ID NO: 604717 - DNA, 19 bp, Mus musculus
  siRNA target sequence for Fthfd (NM_027406.1,2616-2634).
ctatctcgggccaatgcta

SEQ ID NO: 604718 - DNA, 19 bp, Mus musculus
  siRNA target sequence for Fthfd (NM_027406.1,2622-2640).
cgggccaatgctacagaat

SEQ ID NO: 604719 - DNA, 19 bp, Mus musculus
  siRNA target sequence for Fthfd (NM_027406.1,2623-2641).
gggccaatgctacagaatt

SEQ ID NO: 604720 - DNA, 19 bp, Mus musculus
  siRNA target sequence for Fthfd (NM_027406.1,2658-2676).
gtcttcactcgggatatca

SEQ ID NO: 604721 - DNA, 19 bp, Mus musculus
  siRNA target sequence for Fthfd (NM_027406.1,2684-2702).
cctgtatgtcagtgacaaa

SEQ ID NO: 604722 - DNA, 19 bp, Mus musculus
  siRNA target sequence for Fthfd (NM_027406.1,2744-2762).
cgatgtggccgcacctttt

SEQ ID NO: 604723 - DNA, 19 bp, Mus musculus
  siRNA target sequence for Fthfd (NM_027406.1,2755-2773).
caccttttggaggattcaa

SEQ ID NO: 604724 - DNA, 19 bp, Mus musculus
  siRNA target sequence for Fthfd (NM_027406.1,2827-2845).
ggatcaagactgtgacttt

SEQ ID NO: 604725 - DNA, 19 bp, Mus musculus
  siRNA target sequence for Fthfd (NM_027406.1,2828-2846).
gatcaagactgtgactttt

SEQ ID NO: 604726 - DNA, 19 bp, Mus musculus
  siRNA target sequence for Shmt1 (NM_009171.1,233-251).
gggcttctcatgagaagat

SEQ ID NO: 604727 - DNA, 19 bp, Mus musculus
  siRNA target sequence for Shmt1 (NM_009171.1,282-300).
cgaggtttacagcatcatt

SEQ ID NO: 604728 - DNA, 19 bp, Mus musculus
  siRNA target sequence for Shmt1 (NM_009171.1,283-301).
gaggtttacagcatcatta

SEQ ID NO: 604729 - DNA, 19 bp, Mus musculus
  siRNA target sequence for Shmt1 (NM_009171.1,285-303).
ggtttacagcatcattaaa

SEQ ID NO: 604730 - DNA, 19 bp, Mus musculus
  siRNA target sequence for Shmt1 (NM_009171.1,317-335).
ggcagagggtcggattaga

SEQ ID NO: 604731 - DNA, 19 bp, Mus musculus
  siRNA target sequence for Shmt1 (NM_009171.1,339-357).
gattgcctcggagaatttt

SEQ ID NO: 604732 - DNA, 19 bp, Mus musculus
  siRNA target sequence for Shmt1 (NM_009171.1,416-434).
gatatccaggccaaaggta

SEQ ID NO: 604733 - DNA, 19 bp, Mus musculus
  siRNA target sequence for Shmt1 (NM_009171.1,474-492).
gtgtcagaagcgtgcatta

SEQ ID NO: 604734 - DNA, 19 bp, Mus musculus
  siRNA target sequence for Shmt1 (NM_009171.1,476-494).
gtcagaagcgtgcattaca

SEQ ID NO: 604735 - DNA, 19 bp, Mus musculus
  siRNA target sequence for Shmt1 (NM_009171.1,674-692).
ccacatctatcttctttga

SEQ ID NO: 604736 - DNA, 19 bp, Mus musculus
  siRNA target sequence for Shmt1 (NM_009171.1,718-736).
gagactgggtacatcaact

SEQ ID NO: 604737 - DNA, 19 bp, Mus musculus
  siRNA target sequence for Shmt1 (NM_009171.1,720-738).
gactgggtacatcaactat

SEQ ID NO: 604738 - DNA, 19 bp, Mus musculus
  siRNA target sequence for Shmt1 (NM_009171.1,832-850).
cggaagattgcggatgata

SEQ ID NO: 604739 - DNA, 19 bp, Mus musculus
  siRNA target sequence for Shmt1 (NM_009171.1,833-851).
ggaagattgcggatgataa

SEQ ID NO: 604740 - DNA, 19 bp, Mus musculus
  siRNA target sequence for Shmt1 (NM_009171.1,847-865).
gataatggggcgtatctca

SEQ ID NO: 604741 - DNA, 19 bp, Mus musculus
  siRNA target sequence for Shmt1 (NM_009171.1,909-927).
ggtgccctccccctttgaa

SEQ ID NO: 604742 - DNA, 19 bp, Mus musculus
  siRNA target sequence for Shmt1 (NM_009171.1,971-989).
gctgccgtgctggtatgat

SEQ ID NO: 604743 - DNA, 19 bp, Mus musculus
  siRNA target sequence for Shmt1 (NM_009171.1,972-990).
ctgccgtgctggtatgata

SEQ ID NO: 604744 - DNA, 19 bp, Mus musculus
  siRNA target sequence for Shmt1 (NM_009171.1,974-992).
gccgtgctggtatgatatt

SEQ ID NO: 604745 - DNA, 19 bp, Mus musculus
  siRNA target sequence for Shmt1 (NM_009171.1,976-994).
cgtgctggtatgatattct

SEQ ID NO: 604746 - DNA, 19 bp, Mus musculus
  siRNA target sequence for Shmt1 (NM_009171.1,977-995).
gtgctggtatgatattcta

SEQ ID NO: 604747 - DNA, 19 bp, Mus musculus
  siRNA target sequence for Shmt1 (NM_009171.1,979-997).
gctggtatgatattctaca

SEQ ID NO: 604748 - DNA, 19 bp, Mus musculus
  siRNA target sequence for Shmt2 (NM_028230.2,244-262).
gacgggccaggagagttta

SEQ ID NO: 604749 - DNA, 19 bp, Mus musculus
  siRNA target sequence for Shmt2 (NM_028230.2,410-428).
ggttaccctggcaagagat

SEQ ID NO: 604750 - DNA, 19 bp, Mus musculus
  siRNA target sequence for Shmt2 (NM_028230.2,411-429).
gttaccctggcaagagata

SEQ ID NO: 604751 - DNA, 19 bp, Mus musculus
  siRNA target sequence for Shmt2 (NM_028230.2,675-693).
ccattttcttcgagtctat

SEQ ID NO: 604752 - DNA, 19 bp, Mus musculus
  siRNA target sequence for Shmt2 (NM_028230.2,919-937).
caagtacgcggatgttgtt

SEQ ID NO: 604753 - DNA, 19 bp, Mus musculus
  siRNA target sequence for Shmt2 (NM_028230.2,972-990).
ggtcagggctcatcttcta

SEQ ID NO: 604754 - DNA, 19 bp, Mus musculus
  siRNA target sequence for Shmt2 (NM_028230.2,1025-1043).
ggcaaagagatcccttata

SEQ ID NO: 604755 - DNA, 19 bp, Mus musculus
  siRNA target sequence for Shmt2 (NM_028230.2,1156-1174).
ccgcgagtactccttacaa

SEQ ID NO: 604756 - DNA, 19 bp, Mus musculus
  siRNA target sequence for Shmt2 (NM_028230.2,1158-1176).
gcgagtactccttacaagt

SEQ ID NO: 604757 - DNA, 19 bp, Mus musculus
  siRNA target sequence for Shmt2 (NM_028230.2,1438-1456).
ccgtagagtcgtcgatttt

SEQ ID NO: 604758 - DNA, 19 bp, Mus musculus
  siRNA target sequence for Shmt2 (NM_028230.2,1439-1457).
cgtagagtcgtcgatttta

SEQ ID NO: 604759 - DNA, 19 bp, Mus musculus
  siRNA target sequence for Shmt2 (NM_028230.2,1440-1458).
gtagagtcgtcgattttat

SEQ ID NO: 604760 - DNA, 19 bp, Mus musculus
  siRNA target sequence for Shmt2 (NM_028230.2,1443-1461).
gagtcgtcgattttatcga

SEQ ID NO: 604761 - DNA, 19 bp, Mus musculus
  siRNA target sequence for Shmt2 (NM_028230.2,1459-1477).
cgatgagggagtcaacatt

SEQ ID NO: 604762 - DNA, 19 bp, Mus musculus
  siRNA target sequence for Shmt2 (NM_028230.2,1605-1623).
ccatgcctggatttgatga

SEQ ID NO: 604763 - DNA, 19 bp, Mus musculus
  siRNA target sequence for Mgmt (NM_008598.1,289-307).
gtgttccagcaagattcat

SEQ ID NO: 604764 - DNA, 19 bp, Mus musculus
  siRNA target sequence for Mgmt (NM_008598.1,359-377).
cggtttcttaccagcaatt

SEQ ID NO: 604765 - DNA, 19 bp, Mus musculus
  siRNA target sequence for Mgmt (NM_008598.1,360-378).
ggtttcttaccagcaatta

SEQ ID NO: 604766 - DNA, 19 bp, Mus musculus
  siRNA target sequence for Mgmt (NM_008598.1,484-502).
ggtgccatcggccattact

SEQ ID NO: 604767 - DNA, 19 bp, Mus musculus
  siRNA target sequence for Mgmt (NM_008598.1,631-649).
gagccgtctggccgaaatt

SEQ ID NO: 604768 - DNA, 19 bp, Mus musculus
  siRNA target sequence for A230051G13 (NM_173785.2,467-485).
cacctctccatgtacaaga

SEQ ID NO: 604769 - DNA, 19 bp, Mus musculus
  siRNA target sequence for A230051G13 (NM_173785.2,695-713).
gatctccaagattatcaca

SEQ ID NO: 604770 - DNA, 19 bp, Mus musculus
  siRNA target sequence for A230051G13 (NM_173785.2,817-835).
cacgaagggctgctacatt

SEQ ID NO: 604771 - DNA, 19 bp, Mus musculus
  siRNA target sequence for A230051G13 (NM_173785.2,1019-1037).
ctgcggtcagagacaatca

SEQ ID NO: 604772 - DNA, 19 bp, Mus musculus
  siRNA target sequence for Sardh (NM_138665.1,288-306).
ccgagaagagtgttcctta

SEQ ID NO: 604773 - DNA, 19 bp, Mus musculus
  siRNA target sequence for Sardh (NM_138665.1,373-391).
gcctagcacagccaatgtt

SEQ ID NO: 604774 - DNA, 19 bp, Mus musculus
  siRNA target sequence for Sardh (NM_138665.1,417-435).
gctgccagactctgtatca

SEQ ID NO: 604775 - DNA, 19 bp, Mus musculus
  siRNA target sequence for Sardh (NM_138665.1,420-438).
gccagactctgtatcactt

SEQ ID NO: 604776 - DNA, 19 bp, Mus musculus
  siRNA target sequence for Sardh (NM_138665.1,658-676).
ccagcaacgcctgaatgaa

SEQ ID NO: 604777 - DNA, 19 bp, Mus musculus
  siRNA target sequence for Sardh (NM_138665.1,659-677).
cagcaacgcctgaatgaat

SEQ ID NO: 604778 - DNA, 19 bp, Mus musculus
  siRNA target sequence for Sardh (NM_138665.1,662-680).
caacgcctgaatgaataca

SEQ ID NO: 604779 - DNA, 19 bp, Mus musculus
  siRNA target sequence for Sardh (NM_138665.1,665-683).
cgcctgaatgaatacaaga

SEQ ID NO: 604780 - DNA, 19 bp, Mus musculus
  siRNA target sequence for Sardh (NM_138665.1,697-715).
gggcaaggcctatggtata

SEQ ID NO: 604781 - DNA, 19 bp, Mus musculus
  siRNA target sequence for Sardh (NM_138665.1,699-717).
gcaaggcctatggtataga

SEQ ID NO: 604782 - DNA, 19 bp, Mus musculus
  siRNA target sequence for Sardh (NM_138665.1,700-718).
caaggcctatggtatagaa

SEQ ID NO: 604783 - DNA, 19 bp, Mus musculus
  siRNA target sequence for Sardh (NM_138665.1,750-768).
gtctatatccgctgatgaa

SEQ ID NO: 604784 - DNA, 19 bp, Mus musculus
  siRNA target sequence for Sardh (NM_138665.1,821-839).
cccgctggcacctgtacta

SEQ ID NO: 604785 - DNA, 19 bp, Mus musculus
  siRNA target sequence for Sardh (NM_138665.1,1252-1270).
gttcacccagcacattgaa

SEQ ID NO: 604786 - DNA, 19 bp, Mus musculus
  siRNA target sequence for Sardh (NM_138665.1,1568-1586).
gagtcctatgccaagaact

SEQ ID NO: 604787 - DNA, 19 bp, Mus musculus
  siRNA target sequence for Sardh (NM_138665.1,1616-1634).
ctggcaggacgcaacatga

SEQ ID NO: 604788 - DNA, 19 bp, Mus musculus
  siRNA target sequence for Sardh (NM_138665.1,1731-1749).
cagctcaggtccttgacta

SEQ ID NO: 604789 - DNA, 19 bp, Mus musculus
  siRNA target sequence for Sardh (NM_138665.1,1803-1821).
ggttgctaggcgatgagta

SEQ ID NO: 604790 - DNA, 19 bp, Mus musculus
  siRNA target sequence for Sardh (NM_138665.1,1847-1865).
cacatgatccagaaggaat

SEQ ID NO: 604791 - DNA, 19 bp, Mus musculus
  siRNA target sequence for Sardh (NM_138665.1,1884-1902).
ctgctgctgtgttcaacat

SEQ ID NO: 604792 - DNA, 19 bp, Mus musculus
  siRNA target sequence for Sardh (NM_138665.1,1905-1923).
cttactttgggaagttcta

SEQ ID NO: 604793 - DNA, 19 bp, Mus musculus
  siRNA target sequence for Sardh (NM_138665.1,1991-2009).
ggctcaacagtgtacacat

SEQ ID NO: 604794 - DNA, 19 bp, Mus musculus
  siRNA target sequence for Sardh (NM_138665.1,2147-2165).
cacaactggtcccacataa

SEQ ID NO: 604795 - DNA, 19 bp, Mus musculus
  siRNA target sequence for Sardh (NM_138665.1,2191-2209).
ccggtgccagcttatggat

SEQ ID NO: 604796 - DNA, 19 bp, Mus musculus
  siRNA target sequence for Sardh (NM_138665.1,2192-2210).
cggtgccagcttatggata

SEQ ID NO: 604797 - DNA, 19 bp, Mus musculus
  siRNA target sequence for Sardh (NM_138665.1,2197-2215).
ccagcttatggatagttct

SEQ ID NO: 604798 - DNA, 19 bp, Mus musculus
  siRNA target sequence for Sardh (NM_138665.1,2200-2218).
gcttatggatagttctgaa

SEQ ID NO: 604799 - DNA, 19 bp, Mus musculus
  siRNA target sequence for Sardh (NM_138665.1,2451-2469).
cgaggcatggcctagtcaa

SEQ ID NO: 604800 - DNA, 19 bp, Mus musculus
  siRNA target sequence for Sardh (NM_138665.1,2500-2518).
catcgagaaaggctataga

SEQ ID NO: 604801 - DNA, 19 bp, Mus musculus
  siRNA target sequence for Sardh (NM_138665.1,2645-2663).
ctccgccgacgcctgatat

SEQ ID NO: 604802 - DNA, 19 bp, Mus musculus
  siRNA target sequence for Sardh (NM_138665.1,2742-2760).
ggagagctgactttggatt

SEQ ID NO: 604803 - DNA, 19 bp, Mus musculus
  siRNA target sequence for Sardh (NM_138665.1,2756-2774).
ggatttactgtgaacaaga

SEQ ID NO: 604804 - DNA, 19 bp, Mus musculus
  siRNA target sequence for Sardh (NM_138665.1,2921-2939).
cgggtgaagggaatctatt

SEQ ID NO: 604805 - DNA, 19 bp, Mus musculus
  siRNA target sequence for 0610027B03Rik (NM_029790.1,1065-1083).
gtcgccctctccttccatt

SEQ ID NO: 604806 - DNA, 19 bp, Mus musculus
  siRNA target sequence for 0610027B03Rik (NM_029790.1,1139-1157).
gtttaacctgagcattaga

SEQ ID NO: 604807 - DNA, 19 bp, Mus musculus
  siRNA target sequence for 0610027B03Rik (NM_029790.1,1205-1223).
ggagagacactctgtaaga

SEQ ID NO: 604808 - DNA, 19 bp, Mus musculus
  siRNA target sequence for 0610027B03Rik (NM_029790.1,1237-1255).
gggagctgatacacaagaa

SEQ ID NO: 604809 - DNA, 19 bp, Mus musculus
  siRNA target sequence for 0610027B03Rik (NM_029790.1,1256-1274).
ggtacttactccagaagat

SEQ ID NO: 604810 - DNA, 19 bp, Mus musculus
  siRNA target sequence for 0610027B03Rik (NM_029790.1,1316-1334).
cagagcagccatcaaatta

SEQ ID NO: 604811 - DNA, 19 bp, Mus musculus
  siRNA target sequence for Skb1 (NM_013768.1,121-139).
gaattgcgtccccgaaata

SEQ ID NO: 604812 - DNA, 19 bp, Mus musculus
  siRNA target sequence for Skb1 (NM_013768.1,207-225).
gtttcaagagggagttcat

SEQ ID NO: 604813 - DNA, 19 bp, Mus musculus
  siRNA target sequence for Skb1 (NM_013768.1,289-307).
ggactggaatacgctaatt

SEQ ID NO: 604814 - DNA, 19 bp, Mus musculus
  siRNA target sequence for Skb1 (NM_013768.1,328-346).
gattcatccagactcaaaa

SEQ ID NO: 604815 - DNA, 19 bp, Mus musculus
  siRNA target sequence for Skb1 (NM_013768.1,367-385).
ctctgaagcggctatgtta

SEQ ID NO: 604816 - DNA, 19 bp, Mus musculus
  siRNA target sequence for Skb1 (NM_013768.1,435-453).
cccttaatcaggaagataa

SEQ ID NO: 604817 - DNA, 19 bp, Mus musculus
  siRNA target sequence for Skb1 (NM_013768.1,618-636).
ggatgtggtggcataactt

SEQ ID NO: 604818 - DNA, 19 bp, Mus musculus
  siRNA target sequence for Skb1 (NM_013768.1,619-637).
gatgtggtggcataacttt

SEQ ID NO: 604819 - DNA, 19 bp, Mus musculus
  siRNA target sequence for Skb1 (NM_013768.1,638-656).
cggactctgtgtgactata

SEQ ID NO: 604820 - DNA, 19 bp, Mus musculus
  siRNA target sequence for Skb1 (NM_013768.1,648-666).
gtgactatagcaagagaat

SEQ ID NO: 604821 - DNA, 19 bp, Mus musculus
  siRNA target sequence for Skb1 (NM_013768.1,652-670).
ctatagcaagagaattgca

SEQ ID NO: 604822 - DNA, 19 bp, Mus musculus
  siRNA target sequence for Skb1 (NM_013768.1,690-708).
ctgacctcccgtctaatca

SEQ ID NO: 604823 - DNA, 19 bp, Mus musculus
  siRNA target sequence for Skb1 (NM_013768.1,699-717).
cgtctaatcacgtcattga

SEQ ID NO: 604824 - DNA, 19 bp, Mus musculus
  siRNA target sequence for Skb1 (NM_013768.1,724-742).
gcttggagagcccatcaaa

SEQ ID NO: 604825 - DNA, 19 bp, Mus musculus
  siRNA target sequence for Skb1 (NM_013768.1,842-860).
gaagtgcagtttatcatca

SEQ ID NO: 604826 - DNA, 19 bp, Mus musculus
  siRNA target sequence for Skb1 (NM_013768.1,894-912).
gttcctacctccagtactt

SEQ ID NO: 604827 - DNA, 19 bp, Mus musculus
  siRNA target sequence for Skb1 (NM_013768.1,902-920).
ctccagtacttggaatact

SEQ ID NO: 604828 - DNA, 19 bp, Mus musculus
  siRNA target sequence for Skb1 (NM_013768.1,1048-1066).
ggaccccatcaaatactct

SEQ ID NO: 604829 - DNA, 19 bp, Mus musculus
  siRNA target sequence for Skb1 (NM_013768.1,1052-1070).
cccatcaaatactctcaat

SEQ ID NO: 604830 - DNA, 19 bp, Mus musculus
  siRNA target sequence for Skb1 (NM_013768.1,1053-1071).
ccatcaaatactctcaata

SEQ ID NO: 604831 - DNA, 19 bp, Mus musculus
  siRNA target sequence for Skb1 (NM_013768.1,1103-1121).
cgagtaccagaagaagaaa

SEQ ID NO: 604832 - DNA, 19 bp, Mus musculus
  siRNA target sequence for Skb1 (NM_013768.1,1128-1146).
ccaatgtccaggtacttat

SEQ ID NO: 604833 - DNA, 19 bp, Mus musculus
  siRNA target sequence for Skb1 (NM_013768.1,1251-1269).
ctgtggtgacgctagagaa

SEQ ID NO: 604834 - DNA, 19 bp, Mus musculus
  siRNA target sequence for Skb1 (NM_013768.1,1488-1506).
cttcctctaagctgtacaa

SEQ ID NO: 604835 - DNA, 19 bp, Mus musculus
  siRNA target sequence for Skb1 (NM_013768.1,1515-1533).
gtgcctgtcgggaaaagga

SEQ ID NO: 604836 - DNA, 19 bp, Mus musculus
  siRNA target sequence for Skb1 (NM_013768.1,1537-1555).
cgatcctgaggcacagttt

SEQ ID NO: 604837 - DNA, 19 bp, Mus musculus
  siRNA target sequence for Skb1 (NM_013768.1,1601-1619).
gctcctaagccctgcttta

SEQ ID NO: 604838 - DNA, 19 bp, Mus musculus
  siRNA target sequence for Skb1 (NM_013768.1,1632-1650).
ccaaccgagatcctatgat

SEQ ID NO: 604839 - DNA, 19 bp, Mus musculus
  siRNA target sequence for Skb1 (NM_013768.1,1633-1651).
caaccgagatcctatgatt

SEQ ID NO: 604840 - DNA, 19 bp, Mus musculus
  siRNA target sequence for Skb1 (NM_013768.1,1637-1655).
cgagatcctatgattgaca

SEQ ID NO: 604841 - DNA, 19 bp, Mus musculus
  siRNA target sequence for Skb1 (NM_013768.1,1638-1656).
gagatcctatgattgacaa

SEQ ID NO: 604842 - DNA, 19 bp, Mus musculus
  siRNA target sequence for Skb1 (NM_013768.1,1652-1670).
gacaacaaccgctactgta

SEQ ID NO: 604843 - DNA, 19 bp, Mus musculus
  siRNA target sequence for Skb1 (NM_013768.1,1743-1761).
gggacatcactctgagtat

SEQ ID NO: 604844 - DNA, 19 bp, Mus musculus
  siRNA target sequence for Skb1 (NM_013768.1,1869-1887).
ggcgatgcagcaattccaa

SEQ ID NO: 604845 - DNA, 19 bp, Mus musculus
  siRNA target sequence for Skb1 (NM_013768.1,1920-1938).
ccgtctgttcttctattca

SEQ ID NO: 604846 - DNA, 19 bp, Mus musculus
  siRNA target sequence for Gatm (NM_025961.2,107-125).
ccgaggcggtgcactacat

SEQ ID NO: 604847 - DNA, 19 bp, Mus musculus
  siRNA target sequence for Gatm (NM_025961.2,135-153).
gcttggaggatccttaaca

SEQ ID NO: 604848 - DNA, 19 bp, Mus musculus
  siRNA target sequence for Gatm (NM_025961.2,262-280).
gtctcctcttacaacgaat

SEQ ID NO: 604849 - DNA, 19 bp, Mus musculus
  siRNA target sequence for Gatm (NM_025961.2,348-366).
ggtgaaggccaatacatat

SEQ ID NO: 604850 - DNA, 19 bp, Mus musculus
  siRNA target sequence for Gatm (NM_025961.2,351-369).
gaaggccaatacatatgaa

SEQ ID NO: 604851 - DNA, 19 bp, Mus musculus
  siRNA target sequence for Gatm (NM_025961.2,355-373).
gccaatacatatgaaaagt

SEQ ID NO: 604852 - DNA, 19 bp, Mus musculus
  siRNA target sequence for Gatm (NM_025961.2,356-374).
ccaatacatatgaaaagta

SEQ ID NO: 604853 - DNA, 19 bp, Mus musculus
  siRNA target sequence for Gatm (NM_025961.2,372-390).
gtactggccattttaccaa

SEQ ID NO: 604854 - DNA, 19 bp, Mus musculus
  siRNA target sequence for Gatm (NM_025961.2,375-393).
ctggccattttaccaaaaa

SEQ ID NO: 604855 - DNA, 19 bp, Mus musculus
  siRNA target sequence for Gatm (NM_025961.2,453-471).
gatgtgcaatattttatca

SEQ ID NO: 604856 - DNA, 19 bp, Mus musculus
  siRNA target sequence for Gatm (NM_025961.2,507-525).
cgactggtcactcaagtat

SEQ ID NO: 604857 - DNA, 19 bp, Mus musculus
  siRNA target sequence for Gatm (NM_025961.2,508-526).
gactggtcactcaagtata

SEQ ID NO: 604858 - DNA, 19 bp, Mus musculus
  siRNA target sequence for Gatm (NM_025961.2,522-540).
gtataagactcctgatttt

SEQ ID NO: 604859 - DNA, 19 bp, Mus musculus
  siRNA target sequence for Gatm (NM_025961.2,586-604).
gttgtgggaaacgagatta

SEQ ID NO: 604860 - DNA, 19 bp, Mus musculus
  siRNA target sequence for Gatm (NM_025961.2,623-641).
ggcgctcacgcttctttga

SEQ ID NO: 604861 - DNA, 19 bp, Mus musculus
  siRNA target sequence for Gatm (NM_025961.2,625-643).
cgctcacgcttctttgagt

SEQ ID NO: 604862 - DNA, 19 bp, Mus musculus
  siRNA target sequence for Gatm (NM_025961.2,626-644).
gctcacgcttctttgagta

SEQ ID NO: 604863 - DNA, 19 bp, Mus musculus
  siRNA target sequence for Gatm (NM_025961.2,656-674).
ggtcaattatcaaagacta

SEQ ID NO: 604864 - DNA, 19 bp, Mus musculus
  siRNA target sequence for Gatm (NM_025961.2,716-734).
caatggctgacgaactgta

SEQ ID NO: 604865 - DNA, 19 bp, Mus musculus
  siRNA target sequence for Gatm (NM_025961.2,795-813).
gttcgtgacgactgagttt

SEQ ID NO: 604866 - DNA, 19 bp, Mus musculus
  siRNA target sequence for Gatm (NM_025961.2,840-858).
cattcgagctggaagagat

SEQ ID NO: 604867 - DNA, 19 bp, Mus musculus
  siRNA target sequence for Gatm (NM_025961.2,845-863).
gagctggaagagatatttt

SEQ ID NO: 604868 - DNA, 19 bp, Mus musculus
  siRNA target sequence for Gatm (NM_025961.2,872-890).
gaagccaggttacaaacta

SEQ ID NO: 604869 - DNA, 19 bp, Mus musculus
  siRNA target sequence for Gatm (NM_025961.2,925-943).
ccagactacagagtacata

SEQ ID NO: 604870 - DNA, 19 bp, Mus musculus
  siRNA target sequence for Gatm (NM_025961.2,926-944).
cagactacagagtacatat

SEQ ID NO: 604871 - DNA, 19 bp, Mus musculus
  siRNA target sequence for Gatm (NM_025961.2,928-946).
gactacagagtacatatca

SEQ ID NO: 604872 - DNA, 19 bp, Mus musculus
  siRNA target sequence for Gatm (NM_025961.2,1042-1060).
cagattgatcttttcaaga

SEQ ID NO: 604873 - DNA, 19 bp, Mus musculus
  siRNA target sequence for Gatm (NM_025961.2,1063-1081).
gcaggatggaccatagtta

SEQ ID NO: 604874 - DNA, 19 bp, Mus musculus
  siRNA target sequence for Gatm (NM_025961.2,1111-1129).
catcccctctggatgtcat

SEQ ID NO: 604875 - DNA, 19 bp, Mus musculus
  siRNA target sequence for Gatm (NM_025961.2,1142-1160).
ccatgaacgtcttaatgct

SEQ ID NO: 604876 - DNA, 19 bp, Mus musculus
  siRNA target sequence for Gatm (NM_025961.2,1143-1161).
catgaacgtcttaatgcta

SEQ ID NO: 604877 - DNA, 19 bp, Mus musculus
  siRNA target sequence for Gatm (NM_025961.2,1187-1205).
ccaatgaagttccaattca

SEQ ID NO: 604878 - DNA, 19 bp, Mus musculus
  siRNA target sequence for Gatm (NM_025961.2,1188-1206).
caatgaagttccaattcaa

SEQ ID NO: 604879 - DNA, 19 bp, Mus musculus
  siRNA target sequence for Gatm (NM_025961.2,1195-1213).
gttccaattcaaaagatgt

SEQ ID NO: 604880 - DNA, 19 bp, Mus musculus
  siRNA target sequence for Gatm (NM_025961.2,1221-1239).
gctgggtatcagtaccatt

SEQ ID NO: 604881 - DNA, 19 bp, Mus musculus
  siRNA target sequence for Gatm (NM_025961.2,1222-1240).
ctgggtatcagtaccatta

SEQ ID NO: 604882 - DNA, 19 bp, Mus musculus
  siRNA target sequence for Gatm (NM_025961.2,1226-1244).
gtatcagtaccattaaggt

SEQ ID NO: 604883 - DNA, 19 bp, Mus musculus
  siRNA target sequence for Gatm (NM_025961.2,1318-1336).
cttcagtcctactttgact

SEQ ID NO: 604884 - DNA, 19 bp, Mus musculus
  siRNA target sequence for 1700020F09Rik (NM_026619.1,498-516).
ggtgtgatccgaatctaca

SEQ ID NO: 604885 - DNA, 19 bp, Mus musculus
  siRNA target sequence for 1700020F09Rik (NM_026619.1,544-562).
gggcacgcctggttctcaa

SEQ ID NO: 604886 - DNA, 19 bp, Mus musculus
  siRNA target sequence for 1700020F09Rik (NM_026619.1,578-596).
gcatgaagtgatcaatatt

SEQ ID NO: 604887 - DNA, 19 bp, Mus musculus
  siRNA target sequence for 1700020F09Rik (NM_026619.1,608-626).
caagcctgactggtactat

SEQ ID NO: 604888 - DNA, 19 bp, Mus musculus
  siRNA target sequence for 1700020F09Rik (NM_026619.1,611-629).
gcctgactggtactataca

SEQ ID NO: 604889 - DNA, 19 bp, Mus musculus
  siRNA target sequence for 1700020F09Rik (NM_026619.1,612-630).
cctgactggtactatacaa

SEQ ID NO: 604890 - DNA, 19 bp, Mus musculus
  siRNA target sequence for 1700020F09Rik (NM_026619.1,613-631).
ctgactggtactatacaaa

SEQ ID NO: 604891 - DNA, 19 bp, Mus musculus
  siRNA target sequence for 1700020F09Rik (NM_026619.1,680-698).
ggtctatgaatctgtcatt

SEQ ID NO: 604892 - DNA, 19 bp, Mus musculus
  siRNA target sequence for 1700020F09Rik (NM_026619.1,762-780).
cgagctcgccagaagatgt

SEQ ID NO: 604893 - DNA, 19 bp, Mus musculus
  siRNA target sequence for 1700020F09Rik (NM_026619.1,763-781).
gagctcgccagaagatgtt

SEQ ID NO: 604894 - DNA, 19 bp, Mus musculus
  siRNA target sequence for 1700020F09Rik (NM_026619.1,765-783).
gctcgccagaagatgttat

SEQ ID NO: 604895 - DNA, 19 bp, Mus musculus
  siRNA target sequence for 1700020F09Rik (NM_026619.1,779-797).
gttattggagctattctgt

SEQ ID NO: 604896 - DNA, 19 bp, Mus musculus
  siRNA target sequence for 1700020F09Rik (NM_026619.1,804-822).
ccgcctttaagcaaggaat

SEQ ID NO: 604897 - DNA, 19 bp, Mus musculus
  siRNA target sequence for 1700020F09Rik (NM_026619.1,847-865).
gagactgtacggatctgaa

SEQ ID NO: 604898 - DNA, 19 bp, Mus musculus
  siRNA target sequence for 1700020F09Rik (NM_026619.1,887-905).
gtgcaacatggaagagatt

SEQ ID NO: 604899 - DNA, 19 bp, Mus musculus
  siRNA target sequence for 1700020F09Rik (NM_026619.1,933-951).
ggcggagactgtatatcca

SEQ ID NO: 604900 - DNA, 19 bp, Mus musculus
  siRNA target sequence for 1700020F09Rik (NM_026619.1,934-952).
gcggagactgtatatccat

SEQ ID NO: 604901 - DNA, 19 bp, Mus musculus
  siRNA target sequence for 1700020F09Rik (NM_026619.1,941-959).
ctgtatatccatgattgat

SEQ ID NO: 604902 - DNA, 19 bp, Mus musculus
  siRNA target sequence for 1700020F09Rik (NM_026619.1,943-961).
gtatatccatgattgatta

SEQ ID NO: 604903 - DNA, 19 bp, Mus musculus
  siRNA target sequence for 1700020F09Rik (NM_026619.1,1077-1095).
gctctgcacactgataaga

SEQ ID NO: 604904 - DNA, 19 bp, Mus musculus
  siRNA target sequence for 1700020F09Rik (NM_026619.1,1107-1125).
ggcttcttgaatctctatt

SEQ ID NO: 604905 - DNA, 19 bp, Mus musculus
  siRNA target sequence for 1700020F09Rik (NM_026619.1,1156-1174).
ggctgtgtaacccaatcat

SEQ ID NO: 604906 - DNA, 19 bp, Mus musculus
  siRNA target sequence for 1700020F09Rik (NM_026619.1,1157-1175).
gctgtgtaacccaatcata

SEQ ID NO: 604907 - DNA, 19 bp, Mus musculus
  siRNA target sequence for BC021614 (NM_144869.1,14-32).
ccttacaccatcgtctatt

SEQ ID NO: 604908 - DNA, 19 bp, Mus musculus
  siRNA target sequence for BC021614 (NM_144869.1,15-33).
cttacaccatcgtctattt

SEQ ID NO: 604909 - DNA, 19 bp, Mus musculus
  siRNA target sequence for BC021614 (NM_144869.1,42-60).
gagggcgctgtgaggttat

SEQ ID NO: 604910 - DNA, 19 bp, Mus musculus
  siRNA target sequence for BC021614 (NM_144869.1,104-122).
gtggtgaccttggatgttt

SEQ ID NO: 604911 - DNA, 19 bp, Mus musculus
  siRNA target sequence for BC021614 (NM_144869.1,123-141).
gggagcaaggcacattcaa

SEQ ID NO: 604912 - DNA, 19 bp, Mus musculus
  siRNA target sequence for BC021614 (NM_144869.1,199-217).
ccaatccaatactatccta

SEQ ID NO: 604913 - DNA, 19 bp, Mus musculus
  siRNA target sequence for BC021614 (NM_144869.1,324-342).
ggcagtatcgccatatcct

SEQ ID NO: 604914 - DNA, 19 bp, Mus musculus
  siRNA target sequence for BC021614 (NM_144869.1,381-399).
gacacctgaagccatttga

SEQ ID NO: 604915 - DNA, 19 bp, Mus musculus
  siRNA target sequence for BC021614 (NM_144869.1,509-527).
cctggttacttgaatgact

SEQ ID NO: 604916 - DNA, 19 bp, Mus musculus
  siRNA target sequence for Gsta3 (NM_010356.2,99-117).
cagtccttcattactttga

SEQ ID NO: 604917 - DNA, 19 bp, Mus musculus
  siRNA target sequence for Gsta3 (NM_010356.2,199-217).
ggatgacctggcaaggtta

SEQ ID NO: 604918 - DNA, 19 bp, Mus musculus
  siRNA target sequence for Gsta3 (NM_010356.2,203-221).
gacctggcaaggttacgaa

SEQ ID NO: 604919 - DNA, 19 bp, Mus musculus
  siRNA target sequence for Gsta3 (NM_010356.2,208-226).
ggcaaggttacgaagtgat

SEQ ID NO: 604920 - DNA, 19 bp, Mus musculus
  siRNA target sequence for Gsta3 (NM_010356.2,380-398).
gtggcggatctggagataa

SEQ ID NO: 604921 - DNA, 19 bp, Mus musculus
  siRNA target sequence for Gsta3 (NM_010356.2,384-402).
cggatctggagataatgat

SEQ ID NO: 604922 - DNA, 19 bp, Mus musculus
  siRNA target sequence for Gsta3 (NM_010356.2,391-409).
ggagataatgattctctat

SEQ ID NO: 604923 - DNA, 19 bp, Mus musculus
  siRNA target sequence for Gsta3 (NM_010356.2,392-410).
gagataatgattctctatt

SEQ ID NO: 604924 - DNA, 19 bp, Mus musculus
  siRNA target sequence for Gsta3 (NM_010356.2,440-458).
gcaagccttgccaagatca

SEQ ID NO: 604925 - DNA, 19 bp, Mus musculus
  siRNA target sequence for Gsta3 (NM_010356.2,441-459).
caagccttgccaagatcaa

SEQ ID NO: 604926 - DNA, 19 bp, Mus musculus
  siRNA target sequence for Gsta3 (NM_010356.2,690-708).
gccagaggaagccttttga

SEQ ID NO: 604927 - DNA, 19 bp, Mus musculus
  siRNA target sequence for Gsta3 (NM_010356.2,701-719).
ccttttgatgacgcaaaat

SEQ ID NO: 604928 - DNA, 19 bp, Mus musculus
  siRNA target sequence for Gsta4 (NM_010357.1,79-97).
ccaaacctaagctctacta

SEQ ID NO: 604929 - DNA, 19 bp, Mus musculus
  siRNA target sequence for Gsta4 (NM_010357.1,231-249).
caagtacccttggttgaaa

SEQ ID NO: 604930 - DNA, 19 bp, Mus musculus
  siRNA target sequence for Gsta4 (NM_010357.1,297-315).
gctgccaagtacaacttgt

SEQ ID NO: 604931 - DNA, 19 bp, Mus musculus
  siRNA target sequence for Gsta4 (NM_010357.1,298-316).
ctgccaagtacaacttgta

SEQ ID NO: 604932 - DNA, 19 bp, Mus musculus
  siRNA target sequence for Gsta4 (NM_010357.1,337-355).
gagtcaggattgacatgta

SEQ ID NO: 604933 - DNA, 19 bp, Mus musculus
  siRNA target sequence for Gsta4 (NM_010357.1,390-408).
gccgtggctccatttaaaa

SEQ ID NO: 604934 - DNA, 19 bp, Mus musculus
  siRNA target sequence for Gsta4 (NM_010357.1,425-443).
ggagagctatgatttgata

SEQ ID NO: 604935 - DNA, 19 bp, Mus musculus
  siRNA target sequence for Gsta4 (NM_010357.1,440-458).
gatactgtcaagagctaaa

SEQ ID NO: 604936 - DNA, 19 bp, Mus musculus
  siRNA target sequence for Gsta4 (NM_010357.1,451-469).
gagctaaaacccgttactt

SEQ ID NO: 604937 - DNA, 19 bp, Mus musculus
  siRNA target sequence for Gsta4 (NM_010357.1,463-481).
gttacttcccagtgtttga

SEQ ID NO: 604938 - DNA, 19 bp, Mus musculus
  siRNA target sequence for Gsta4 (NM_010357.1,606-624).
cctctgctgcaggcattta

SEQ ID NO: 604939 - DNA, 19 bp, Mus musculus
  siRNA target sequence for Gsta4 (NM_010357.1,611-629).
gctgcaggcatttaagaca

SEQ ID NO: 604940 - DNA, 19 bp, Mus musculus
  siRNA target sequence for Gsta4 (NM_010357.1,626-644).
gacaagaatcagcaacatt

SEQ ID NO: 604941 - DNA, 19 bp, Mus musculus
  siRNA target sequence for Gstm3 (NM_010359.1,635-653).
gacctgtgtttactaagat

SEQ ID NO: 604942 - DNA, 19 bp, Mus musculus
  siRNA target sequence for Gstm3 (NM_010359.1,655-673).
gcccagtggggcactgatt

SEQ ID NO: 604943 - DNA, 19 bp, Mus musculus
  siRNA target sequence for Gstm4 (NM_026764.2,740-758).
cctccgaacacccctatat

SEQ ID NO: 604944 - DNA, 19 bp, Mus musculus
  siRNA target sequence for Gstm4 (NM_026764.2,741-759).
ctccgaacacccctatata

SEQ ID NO: 604945 - DNA, 19 bp, Mus musculus
  siRNA target sequence for Gstm4 (NM_026764.2,743-761).
ccgaacacccctatataca

SEQ ID NO: 604946 - DNA, 19 bp, Mus musculus
  siRNA target sequence for Gstm5 (NM_010360.1,157-175).
cgcatgcttctggagttta

SEQ ID NO: 604947 - DNA, 19 bp, Mus musculus
  siRNA target sequence for Gstm5 (NM_010360.1,190-208).
gaggagaaacggtacatct

SEQ ID NO: 604948 - DNA, 19 bp, Mus musculus
  siRNA target sequence for Gstm5 (NM_010360.1,238-256).
caatggctggacgtgaaat

SEQ ID NO: 604949 - DNA, 19 bp, Mus musculus
  siRNA target sequence for Gstm5 (NM_010360.1,242-260).
ggctggacgtgaaattcaa

SEQ ID NO: 604950 - DNA, 19 bp, Mus musculus
  siRNA target sequence for Gstm5 (NM_010360.1,262-280).
ctagatctggactttccta

SEQ ID NO: 604951 - DNA, 19 bp, Mus musculus
  siRNA target sequence for Gstm5 (NM_010360.1,439-457).
gttcgcctctgctacaatt

SEQ ID NO: 604952 - DNA, 19 bp, Mus musculus
  siRNA target sequence for Gstm5 (NM_010360.1,442-460).
cgcctctgctacaattcta

SEQ ID NO: 604953 - DNA, 19 bp, Mus musculus
  siRNA target sequence for Gstm5 (NM_010360.1,443-461).
gcctctgctacaattctaa

SEQ ID NO: 604954 - DNA, 19 bp, Mus musculus
  siRNA target sequence for Gstm5 (NM_010360.1,499-517).
cctgcacagctgaaacaat

SEQ ID NO: 604955 - DNA, 19 bp, Mus musculus
  siRNA target sequence for Gstm5 (NM_010360.1,653-671).
ctttcatgtgccgttttga

SEQ ID NO: 604956 - DNA, 19 bp, Mus musculus
  siRNA target sequence for Gstm5 (NM_010360.1,751-769).
ggtaacaagtgcttatgct

SEQ ID NO: 604957 - DNA, 19 bp, Mus musculus
  siRNA target sequence for Gstm6 (NM_008184.1,4-22).
cccgtgactctgggttatt

SEQ ID NO: 604958 - DNA, 19 bp, Mus musculus
  siRNA target sequence for Gstm6 (NM_008184.1,467-485).
cagacttcctcgtctatga

SEQ ID NO: 604959 - DNA, 19 bp, Mus musculus
  siRNA target sequence for Gstm6 (NM_008184.1,617-635).
gtcctgtgtacttaaaaca

SEQ ID NO: 604960 - DNA, 19 bp, Mus musculus
  siRNA target sequence for Gsto1 (NM_010362.1,410-428).
ccagatgacccgtacaaga

SEQ ID NO: 604961 - DNA, 19 bp, Mus musculus
  siRNA target sequence for Gsto1 (NM_010362.1,411-429).
cagatgacccgtacaagaa

SEQ ID NO: 604962 - DNA, 19 bp, Mus musculus
  siRNA target sequence for Gsto1 (NM_010362.1,447-465).
cccttgagtcattctctaa

SEQ ID NO: 604963 - DNA, 19 bp, Mus musculus
  siRNA target sequence for Gsto1 (NM_010362.1,462-480).
ctaaggtgccgcctttgat

SEQ ID NO: 604964 - DNA, 19 bp, Mus musculus
  siRNA target sequence for Gsto1 (NM_010362.1,467-485).
gtgccgcctttgattgcaa

SEQ ID NO: 604965 - DNA, 19 bp, Mus musculus
  siRNA target sequence for Gsto1 (NM_010362.1,509-527).
gaagactctccgaacctaa

SEQ ID NO: 604966 - DNA, 19 bp, Mus musculus
  siRNA target sequence for Gsto1 (NM_010362.1,530-548).
gaagcgttggagaacgaat

SEQ ID NO: 604967 - DNA, 19 bp, Mus musculus
  siRNA target sequence for Gsto1 (NM_010362.1,533-551).
gcgttggagaacgaattca

SEQ ID NO: 604968 - DNA, 19 bp, Mus musculus
  siRNA target sequence for Gsto1 (NM_010362.1,541-559).
gaacgaattcaaaaagcta

SEQ ID NO: 604969 - DNA, 19 bp, Mus musculus
  siRNA target sequence for Gsto1 (NM_010362.1,557-575).
ctagaggagggcatggata

SEQ ID NO: 604970 - DNA, 19 bp, Mus musculus
  siRNA target sequence for Gsto1 (NM_010362.1,560-578).
gaggagggcatggataatt

SEQ ID NO: 604971 - DNA, 19 bp, Mus musculus
  siRNA target sequence for Gsto1 (NM_010362.1,563-581).
gagggcatggataattaca

SEQ ID NO: 604972 - DNA, 19 bp, Mus musculus
  siRNA target sequence for Gsto1 (NM_010362.1,594-612).
gtggggattctccttctat

SEQ ID NO: 604973 - DNA, 19 bp, Mus musculus
  siRNA target sequence for Gsto1 (NM_010362.1,598-616).
ggattctccttctatggtt

SEQ ID NO: 604974 - DNA, 19 bp, Mus musculus
  siRNA target sequence for Gsto1 (NM_010362.1,603-621).
ctccttctatggttgatta

SEQ ID NO: 604975 - DNA, 19 bp, Mus musculus
  siRNA target sequence for Gsto1 (NM_010362.1,732-750).
catcctctcacaaaattga

SEQ ID NO: 604976 - DNA, 19 bp, Mus musculus
  siRNA target sequence for Gsto1 (NM_010362.1,757-775).
gacctaccgcgagtactta

SEQ ID NO: 604977 - DNA, 19 bp, Mus musculus
  siRNA target sequence for Gsto1 (NM_010362.1,759-777).
cctaccgcgagtacttaaa

SEQ ID NO: 604978 - DNA, 19 bp, Mus musculus
  siRNA target sequence for Gsto1 (NM_010362.1,760-778).
ctaccgcgagtacttaaat

SEQ ID NO: 604979 - DNA, 19 bp, Mus musculus
  siRNA target sequence for Gsto1 (NM_010362.1,764-782).
cgcgagtacttaaatctct

SEQ ID NO: 604980 - DNA, 19 bp, Mus musculus
  siRNA target sequence for Gsto1 (NM_010362.1,765-783).
gcgagtacttaaatctcta

SEQ ID NO: 604981 - DNA, 19 bp, Mus musculus
  siRNA target sequence for Gsto1 (NM_010362.1,795-813).
gccccgaggcctgtgatta

SEQ ID NO: 604982 - DNA, 19 bp, Mus musculus
  siRNA target sequence for Gstp1 (NM_181796.1,83-101).
cgtacaccattgtctactt

SEQ ID NO: 604983 - DNA, 19 bp, Mus musculus
  siRNA target sequence for Gstp1 (NM_181796.1,404-422).
gaaactatgagaatggtaa

SEQ ID NO: 604984 - DNA, 19 bp, Mus musculus
  siRNA target sequence for Gstp2 (NM_013541.1,142-160).
ggaggtggttaccatagat

SEQ ID NO: 604985 - DNA, 19 bp, Mus musculus
  siRNA target sequence for Gstp2 (NM_013541.1,282-300).
ggctttatgggaaaaacca

SEQ ID NO: 604986 - DNA, 19 bp, Mus musculus
  siRNA target sequence for Gstp2 (NM_013541.1,343-361).
ggaccttcgcggcaaatat

SEQ ID NO: 604987 - DNA, 19 bp, Mus musculus
  siRNA target sequence for Gstp2 (NM_013541.1,386-404).
gagaatggtaagaatgact

SEQ ID NO: 604988 - DNA, 19 bp, Mus musculus
  siRNA target sequence for Gstt1 (NM_008185.2,129-147).
gtcgcgccatttatatctt

SEQ ID NO: 604989 - DNA, 19 bp, Mus musculus
  siRNA target sequence for Gstt1 (NM_008185.2,310-328).
ggcacacaagtataaggtt

SEQ ID NO: 604990 - DNA, 19 bp, Mus musculus
  siRNA target sequence for Gstt1 (NM_008185.2,457-475).
ccttggtgagcaaatacct

SEQ ID NO: 604991 - DNA, 19 bp, Mus musculus
  siRNA target sequence for Gstt1 (NM_008185.2,466-484).
gcaaatacctcctgaaaca

SEQ ID NO: 604992 - DNA, 19 bp, Mus musculus
  siRNA target sequence for Gstt1 (NM_008185.2,756-774).
ctgacctcatcataaagca

SEQ ID NO: 604993 - DNA, 19 bp, Mus musculus
  siRNA target sequence for Gstt2 (NM_010361.1,91-109).
cgtaccgtggatatactca

SEQ ID NO: 604994 - DNA, 19 bp, Mus musculus
  siRNA target sequence for Gstt2 (NM_010361.1,95-113).
ccgtggatatactcaaaca

SEQ ID NO: 604995 - DNA, 19 bp, Mus musculus
  siRNA target sequence for Gstt2 (NM_010361.1,115-133).
cacatgagcgagcaattct

SEQ ID NO: 604996 - DNA, 19 bp, Mus musculus
  siRNA target sequence for Gstt2 (NM_010361.1,136-154).
caggtgaactgcttaaaca

SEQ ID NO: 604997 - DNA, 19 bp, Mus musculus
  siRNA target sequence for Gstt2 (NM_010361.1,138-156).
ggtgaactgcttaaacaaa

SEQ ID NO: 604998 - DNA, 19 bp, Mus musculus
  siRNA target sequence for Gstt2 (NM_010361.1,141-159).
gaactgcttaaacaaagtt

SEQ ID NO: 604999 - DNA, 19 bp, Mus musculus
  siRNA target sequence for Gstt2 (NM_010361.1,272-290).
gtgcccaagtccacgaata

SEQ ID NO: 605000 - DNA, 19 bp, Mus musculus
  siRNA target sequence for Gstt2 (NM_010361.1,524-542).
ccgtggctcttggctataa

SEQ ID NO: 605001 - DNA, 19 bp, Mus musculus
  siRNA target sequence for Gstt2 (NM_010361.1,698-716).
ccagcatgcagcttcgaat

SEQ ID NO: 605002 - DNA, 19 bp, Mus musculus
  siRNA target sequence for Gstt2 (NM_010361.1,699-717).
cagcatgcagcttcgaatt

SEQ ID NO: 605003 - DNA, 19 bp, Mus musculus
  siRNA target sequence for Gstt2 (NM_010361.1,702-720).
catgcagcttcgaattgct

SEQ ID NO: 605004 - DNA, 19 bp, Mus musculus
  siRNA target sequence for Gstt2 (NM_010361.1,708-726).
gcttcgaattgctaggatt

SEQ ID NO: 605005 - DNA, 19 bp, Mus musculus
  siRNA target sequence for Gstt2 (NM_010361.1,712-730).
cgaattgctaggattcctt

SEQ ID NO: 605006 - DNA, 19 bp, Mus musculus
  siRNA target sequence for Gstt3 (NM_133994.2,568-586).
ggtcagcagtacacagatt

SEQ ID NO: 605007 - DNA, 19 bp, Mus musculus
  siRNA target sequence for Gstt3 (NM_133994.2,928-946).
cttacaggatcccatattt

SEQ ID NO: 605008 - DNA, 19 bp, Mus musculus
  siRNA target sequence for Gstt3 (NM_133994.2,992-1010).
gtgctggctgcaaaatctt

SEQ ID NO: 605009 - DNA, 19 bp, Mus musculus
  siRNA target sequence for Gstt3 (NM_133994.2,995-1013).
ctggctgcaaaatctttga

SEQ ID NO: 605010 - DNA, 19 bp, Mus musculus
  siRNA target sequence for Gstt3 (NM_133994.2,1125-1143).
gatggaccctgccttgaaa

SEQ ID NO: 605011 - DNA, 19 bp, Mus musculus
  siRNA target sequence for Gstz1 (NM_010363.2,128-146).
cctatcctctactcctatt

SEQ ID NO: 605012 - DNA, 19 bp, Mus musculus
  siRNA target sequence for Gstz1 (NM_010363.2,159-177).
gttcatggagagttcgaat

SEQ ID NO: 605013 - DNA, 19 bp, Mus musculus
  siRNA target sequence for Gstz1 (NM_010363.2,174-192).
gaattgctctggcgttaaa

SEQ ID NO: 605014 - DNA, 19 bp, Mus musculus
  siRNA target sequence for Gstz1 (NM_010363.2,185-203).
gcgttaaaaggcattgact

SEQ ID NO: 605015 - DNA, 19 bp, Mus musculus
  siRNA target sequence for Gstz1 (NM_010363.2,186-204).
cgttaaaaggcattgacta

SEQ ID NO: 605016 - DNA, 19 bp, Mus musculus
  siRNA target sequence for Gstz1 (NM_010363.2,195-213).
gcattgactatgagatagt

SEQ ID NO: 605017 - DNA, 19 bp, Mus musculus
  siRNA target sequence for Gstz1 (NM_010363.2,212-230).
gtgcccatcaacctcataa

SEQ ID NO: 605018 - DNA, 19 bp, Mus musculus
  siRNA target sequence for Gstz1 (NM_010363.2,216-234).
ccatcaacctcataaagga

SEQ ID NO: 605019 - DNA, 19 bp, Mus musculus
  siRNA target sequence for Gstz1 (NM_010363.2,217-235).
catcaacctcataaaggat

SEQ ID NO: 605020 - DNA, 19 bp, Mus musculus
  siRNA target sequence for Gstz1 (NM_010363.2,289-307).
gccagcgctgaaaattgat

SEQ ID NO: 605021 - DNA, 19 bp, Mus musculus
  siRNA target sequence for Gstz1 (NM_010363.2,294-312).
cgctgaaaattgatggaat

SEQ ID NO: 605022 - DNA, 19 bp, Mus musculus
  siRNA target sequence for Gstz1 (NM_010363.2,403-421).
catcgtgcgcatgatttct

SEQ ID NO: 605023 - DNA, 19 bp, Mus musculus
  siRNA target sequence for Gstz1 (NM_010363.2,496-514).
gcaatgggcccaaaaggtt

SEQ ID NO: 605024 - DNA, 19 bp, Mus musculus
  siRNA target sequence for Gstz1 (NM_010363.2,502-520).
ggcccaaaaggttattact

SEQ ID NO: 605025 - DNA, 19 bp, Mus musculus
  siRNA target sequence for Gstz1 (NM_010363.2,503-521).
gcccaaaaggttattactt

SEQ ID NO: 605026 - DNA, 19 bp, Mus musculus
  siRNA target sequence for Gstz1 (NM_010363.2,663-681).
ctaccatcagtcacatcaa

SEQ ID NO: 605027 - DNA, 19 bp, Mus musculus
  siRNA target sequence for Mgst1 (NM_019946.3,145-163).
gcctttacctcctatgcaa

SEQ ID NO: 605028 - DNA, 19 bp, Mus musculus
  siRNA target sequence for Mgst1 (NM_019946.3,161-179).
caacgatcattcttaccaa

SEQ ID NO: 605029 - DNA, 19 bp, Mus musculus
  siRNA target sequence for Mgst1 (NM_019946.3,216-234).
gataaccaacaaggttttt

SEQ ID NO: 605030 - DNA, 19 bp, Mus musculus
  siRNA target sequence for Mgst1 (NM_019946.3,320-338).
gcagagcccacctgaatga

SEQ ID NO: 605031 - DNA, 19 bp, Mus musculus
  siRNA target sequence for Mgst1 (NM_019946.3,326-344).
cccacctgaatgatcttga

SEQ ID NO: 605032 - DNA, 19 bp, Mus musculus
  siRNA target sequence for Mgst1 (NM_019946.3,328-346).
cacctgaatgatcttgaaa

SEQ ID NO: 605033 - DNA, 19 bp, Mus musculus
  siRNA target sequence for Mgst1 (NM_019946.3,508-526).
gttggctatggagttactt

SEQ ID NO: 605034 - DNA, 19 bp, Mus musculus
  siRNA target sequence for 1110035O14Rik (NM_021524.1,106-124).
cggcagaagccgagttcaa

SEQ ID NO: 605035 - DNA, 19 bp, Mus musculus
  siRNA target sequence for 1110035O14Rik (NM_021524.1,146-164).
gtacaaggttactcactat

SEQ ID NO: 605036 - DNA, 19 bp, Mus musculus
  siRNA target sequence for 1110035O14Rik (NM_021524.1,152-170).
ggttactcactataaacaa

SEQ ID NO: 605037 - DNA, 19 bp, Mus musculus
  siRNA target sequence for 1110035O14Rik (NM_021524.1,153-171).
gttactcactataaacaat

SEQ ID NO: 605038 - DNA, 19 bp, Mus musculus
  siRNA target sequence for 1110035O14Rik (NM_021524.1,177-195).
cccaacacaagcaaagttt

SEQ ID NO: 605039 - DNA, 19 bp, Mus musculus
  siRNA target sequence for 1110035O14Rik (NM_021524.1,276-294).
gggttgcagtacattctta

SEQ ID NO: 605040 - DNA, 19 bp, Mus musculus
  siRNA target sequence for 1110035O14Rik (NM_021524.1,278-296).
gttgcagtacattcttaat

SEQ ID NO: 605041 - DNA, 19 bp, Mus musculus
  siRNA target sequence for 1110035O14Rik (NM_021524.1,387-405).
gaaagaggatggaactaca

SEQ ID NO: 605042 - DNA, 19 bp, Mus musculus
  siRNA target sequence for 1110035O14Rik (NM_021524.1,404-422).
catccttgagaaatacgat

SEQ ID NO: 605043 - DNA, 19 bp, Mus musculus
  siRNA target sequence for 1110035O14Rik (NM_021524.1,424-442).
gtcatctcccgattgaagt

SEQ ID NO: 605044 - DNA, 19 bp, Mus musculus
  siRNA target sequence for 1110035O14Rik (NM_021524.1,426-444).
catctcccgattgaagtaa

SEQ ID NO: 605045 - DNA, 19 bp, Mus musculus
  siRNA target sequence for 1110035O14Rik (NM_021524.1,515-533).
gtgctactggcttaccaat

SEQ ID NO: 605046 - DNA, 19 bp, Mus musculus
  siRNA target sequence for 1110035O14Rik (NM_021524.1,521-539).
ctggcttaccaattggatt

SEQ ID NO: 605047 - DNA, 19 bp, Mus musculus
  siRNA target sequence for 1110035O14Rik (NM_021524.1,525-543).
cttaccaattggattgaga

SEQ ID NO: 605048 - DNA, 19 bp, Mus musculus
  siRNA target sequence for 1110035O14Rik (NM_021524.1,529-547).
ccaattggattgagactat

SEQ ID NO: 605049 - DNA, 19 bp, Mus musculus
  siRNA target sequence for 1110035O14Rik (NM_021524.1,536-554).
gattgagactattcttgtt

SEQ ID NO: 605050 - DNA, 19 bp, Mus musculus
  siRNA target sequence for 1110035O14Rik (NM_021524.1,555-573).
cagtcctggtatccaatta

SEQ ID NO: 605051 - DNA, 19 bp, Mus musculus
  siRNA target sequence for 1110035O14Rik (NM_021524.1,557-575).
gtcctggtatccaattaca

SEQ ID NO: 605052 - DNA, 19 bp, Mus musculus
  siRNA target sequence for 1110035O14Rik (NM_021524.1,559-577).
cctggtatccaattacagt

SEQ ID NO: 605053 - DNA, 19 bp, Mus musculus
  siRNA target sequence for 1110035O14Rik (NM_021524.1,715-733).
gggcatctgctcatttggt

SEQ ID NO: 605054 - DNA, 19 bp, Mus musculus
  siRNA target sequence for 1110035O14Rik (NM_021524.1,758-776).
ggcgggaattgctctaatt

SEQ ID NO: 605055 - DNA, 19 bp, Mus musculus
  siRNA target sequence for 1110035O14Rik (NM_021524.1,759-777).
gcgggaattgctctaatta

SEQ ID NO: 605056 - DNA, 19 bp, Mus musculus
  siRNA target sequence for 1110035O14Rik (NM_021524.1,760-778).
cgggaattgctctaattaa

SEQ ID NO: 605057 - DNA, 19 bp, Mus musculus
  siRNA target sequence for 1110035O14Rik (NM_021524.1,919-937).
ctgtggtcagcgatagcta

SEQ ID NO: 605058 - DNA, 19 bp, Mus musculus
  siRNA target sequence for 1110035O14Rik (NM_021524.1,924-942).
gtcagcgatagctatgaca

SEQ ID NO: 605059 - DNA, 19 bp, Mus musculus
  siRNA target sequence for 1110035O14Rik (NM_021524.1,926-944).
cagcgatagctatgacatt

SEQ ID NO: 605060 - DNA, 19 bp, Mus musculus
  siRNA target sequence for 1110035O14Rik (NM_021524.1,928-946).
gcgatagctatgacattta

SEQ ID NO: 605061 - DNA, 19 bp, Mus musculus
  siRNA target sequence for 1110035O14Rik (NM_021524.1,977-995).
cctgagacatctgatagta

SEQ ID NO: 605062 - DNA, 19 bp, Mus musculus
  siRNA target sequence for 1110035O14Rik (NM_021524.1,978-996).
ctgagacatctgatagtat

SEQ ID NO: 605063 - DNA, 19 bp, Mus musculus
  siRNA target sequence for 1110035O14Rik (NM_021524.1,987-1005).
ctgatagtatcgagaagta

SEQ ID NO: 605064 - DNA, 19 bp, Mus musculus
  siRNA target sequence for 1110035O14Rik (NM_021524.1,1003-1021).
gtacagaggcaccactaat

SEQ ID NO: 605065 - DNA, 19 bp, Mus musculus
  siRNA target sequence for 1110035O14Rik (NM_021524.1,1006-1024).
cagaggcaccactaatcat

SEQ ID NO: 605066 - DNA, 19 bp, Mus musculus
  siRNA target sequence for 1110035O14Rik (NM_021524.1,1044-1062).
cctcttgacactgtattga

SEQ ID NO: 605067 - DNA, 19 bp, Mus musculus
  siRNA target sequence for 1110035O14Rik (NM_021524.1,1054-1072).
ctgtattgaaggtcttaga

SEQ ID NO: 605068 - DNA, 19 bp, Mus musculus
  siRNA target sequence for 1110035O14Rik (NM_021524.1,1082-1100).
caagaagtttcctgttact

SEQ ID NO: 605069 - DNA, 19 bp, Mus musculus
  siRNA target sequence for 1110035O14Rik (NM_021524.1,1118-1136).
caagttgctgccaccttat

SEQ ID NO: 605070 - DNA, 19 bp, Mus musculus
  siRNA target sequence for 1110035O14Rik (NM_021524.1,1159-1177).
gcgtggatatcaatacttt

SEQ ID NO: 605071 - DNA, 19 bp, Mus musculus
  siRNA target sequence for 1110035O14Rik (NM_021524.1,1160-1178).
cgtggatatcaatacttta

SEQ ID NO: 605072 - DNA, 19 bp, Mus musculus
  siRNA target sequence for 1110035O14Rik (NM_021524.1,1163-1181).
ggatatcaatactttacaa

SEQ ID NO: 605073 - DNA, 19 bp, Mus musculus
  siRNA target sequence for 1110035O14Rik (NM_021524.1,1184-1202).
gattgtagagggaatgaaa

SEQ ID NO: 605074 - DNA, 19 bp, Mus musculus
  siRNA target sequence for 1110035O14Rik (NM_021524.1,1243-1261).
gtggcgctttgctacagaa

SEQ ID NO: 605075 - DNA, 19 bp, Mus musculus
  siRNA target sequence for 1110035O14Rik (NM_021524.1,1246-1264).
gcgctttgctacagaagtt

SEQ ID NO: 605076 - DNA, 19 bp, Mus musculus
  siRNA target sequence for 1110035O14Rik (NM_021524.1,1247-1265).
cgctttgctacagaagtta

SEQ ID NO: 605077 - DNA, 19 bp, Mus musculus
  siRNA target sequence for 1110035O14Rik (NM_021524.1,1248-1266).
gctttgctacagaagttaa

SEQ ID NO: 605078 - DNA, 19 bp, Mus musculus
  siRNA target sequence for 1110035O14Rik (NM_021524.1,1292-1310).
caagtgcagctatgttgta

SEQ ID NO: 605079 - DNA, 19 bp, Mus musculus
  siRNA target sequence for 1110035O14Rik (NM_021524.1,1297-1315).
gcagctatgttgtaaccaa

SEQ ID NO: 605080 - DNA, 19 bp, Mus musculus
  siRNA target sequence for 1110035O14Rik (NM_021524.1,1298-1316).
cagctatgttgtaaccaat

SEQ ID NO: 605081 - DNA, 19 bp, Mus musculus
  siRNA target sequence for 1110035O14Rik (NM_021524.1,1324-1342).
gggttaatgtgtttaagga

SEQ ID NO: 605082 - DNA, 19 bp, Mus musculus
  siRNA target sequence for 1110035O14Rik (NM_021524.1,1347-1365).
gttgctgatcccaacaaaa

SEQ ID NO: 605083 - DNA, 19 bp, Mus musculus
  siRNA target sequence for 1110035O14Rik (NM_021524.1,1350-1368).
gctgatcccaacaaaaggt

SEQ ID NO: 605084 - DNA, 19 bp, Mus musculus
  siRNA target sequence for 1110035O14Rik (NM_021524.1,1401-1419).
ccagcggggaactttgtta

SEQ ID NO: 605085 - DNA, 19 bp, Mus musculus
  siRNA target sequence for 1110035O14Rik (NM_021524.1,1405-1423).
cggggaactttgttacact

SEQ ID NO: 605086 - DNA, 19 bp, Mus musculus
  siRNA target sequence for 1110035O14Rik (NM_021524.1,1467-1485).
ctccatacggttttcaaga

SEQ ID NO: 605087 - DNA, 19 bp, Mus musculus
  siRNA target sequence for 1110035O14Rik (NM_021524.1,1494-1512).
gtgacaaaaagctactcat

SEQ ID NO: 605088 - DNA, 19 bp, Mus musculus
  siRNA target sequence for 2210409M21Rik (NM_133728.2,409-427).
gttctgtaagcttctctat

SEQ ID NO: 605089 - DNA, 19 bp, Mus musculus
  siRNA target sequence for 2210409M21Rik (NM_133728.2,412-430).
ctgtaagcttctctattga

SEQ ID NO: 605090 - DNA, 19 bp, Mus musculus
  siRNA target sequence for 2210409M21Rik (NM_133728.2,424-442).
ctattgaacacttcagtaa

SEQ ID NO: 605091 - DNA, 19 bp, Mus musculus
  siRNA target sequence for 2210409M21Rik (NM_133728.2,429-447).
gaacacttcagtaaagagt

SEQ ID NO: 605092 - DNA, 19 bp, Mus musculus
  siRNA target sequence for 2210409M21Rik (NM_133728.2,432-450).
cacttcagtaaagagttaa

SEQ ID NO: 605093 - DNA, 19 bp, Mus musculus
  siRNA target sequence for 2210409M21Rik (NM_133728.2,455-473).
ggatttgctgcataatctt

SEQ ID NO: 605094 - DNA, 19 bp, Mus musculus
  siRNA target sequence for 2210409M21Rik (NM_133728.2,456-474).
gatttgctgcataatctta

SEQ ID NO: 605095 - DNA, 19 bp, Mus musculus
  siRNA target sequence for 2210409M21Rik (NM_133728.2,543-561).
ggtcatgttcttcatttaa

SEQ ID NO: 605096 - DNA, 19 bp, Mus musculus
  siRNA target sequence for 2210409M21Rik (NM_133728.2,600-618).
ggcaatgtgttcttatgga

SEQ ID NO: 605097 - DNA, 19 bp, Mus musculus
  siRNA target sequence for 2210409M21Rik (NM_133728.2,738-756).
caaggtccatggtcgttta

SEQ ID NO: 605098 - DNA, 19 bp, Mus musculus
  siRNA target sequence for 2210409M21Rik (NM_133728.2,741-759).
ggtccatggtcgtttatct

SEQ ID NO: 605099 - DNA, 19 bp, Mus musculus
  siRNA target sequence for 2210409M21Rik (NM_133728.2,745-763).
catggtcgtttatctatta

SEQ ID NO: 605100 - DNA, 19 bp, Mus musculus
  siRNA target sequence for 2210409M21Rik (NM_133728.2,748-766).
ggtcgtttatctattatca

SEQ ID NO: 605101 - DNA, 19 bp, Mus musculus
  siRNA target sequence for 2210409M21Rik (NM_133728.2,768-786).
gcctctagccatcacttat

SEQ ID NO: 605102 - DNA, 19 bp, Mus musculus
  siRNA target sequence for 2210409M21Rik (NM_133728.2,777-795).
catcacttatggtttggta

SEQ ID NO: 605103 - DNA, 19 bp, Mus musculus
  siRNA target sequence for 2210409M21Rik (NM_133728.2,787-805).
ggtttggtagggacttttt

SEQ ID NO: 605104 - DNA, 19 bp, Mus musculus
  siRNA target sequence for 2210409M21Rik (NM_133728.2,788-806).
gtttggtagggactttttt

SEQ ID NO: 605105 - DNA, 19 bp, Mus musculus
  siRNA target sequence for 2210409M21Rik (NM_133728.2,807-825).
ggtcggcgtagcttgcttt

SEQ ID NO: 605106 - DNA, 19 bp, Mus musculus
  siRNA target sequence for 2210409M21Rik (NM_133728.2,818-836).
cttgctttggcagtttagt

SEQ ID NO: 605107 - DNA, 19 bp, Mus musculus
  siRNA target sequence for 2210409M21Rik (NM_133728.2,984-1002).
ccttggagatacatttcta

SEQ ID NO: 605108 - DNA, 19 bp, Mus musculus
  siRNA target sequence for 2210409M21Rik (NM_133728.2,985-1003).
cttggagatacatttctaa

SEQ ID NO: 605109 - DNA, 19 bp, Mus musculus
  siRNA target sequence for 2210409M21Rik (NM_133728.2,1005-1023).
gaggatattgccgaagaat

SEQ ID NO: 605110 - DNA, 19 bp, Mus musculus
  siRNA target sequence for 2210409M21Rik (NM_133728.2,1007-1025).
ggatattgccgaagaatgt

SEQ ID NO: 605111 - DNA, 19 bp, Mus musculus
  siRNA target sequence for 2210409M21Rik (NM_133728.2,1110-1128).
cctgtcgttcccttaaata

SEQ ID NO: 605112 - DNA, 19 bp, Mus musculus
  siRNA target sequence for 2210409M21Rik (NM_133728.2,1111-1129).
ctgtcgttcccttaaataa

SEQ ID NO: 605113 - DNA, 19 bp, Mus musculus
  siRNA target sequence for 2210409M21Rik (NM_133728.2,1113-1131).
gtcgttcccttaaataaga

SEQ ID NO: 605114 - DNA, 19 bp, Mus musculus
  siRNA target sequence for 2210409M21Rik (NM_133728.2,1136-1154).
gcctgagagtccattggaa

SEQ ID NO: 605115 - DNA, 19 bp, Mus musculus
  siRNA target sequence for 2210409M21Rik (NM_133728.2,1146-1164).
ccattggaaatccaatgta

SEQ ID NO: 605116 - DNA, 19 bp, Mus musculus
  siRNA target sequence for 2210409M21Rik (NM_133728.2,1158-1176).
caatgtagaaacagttcta

SEQ ID NO: 605117 - DNA, 19 bp, Mus musculus
  siRNA target sequence for 2210409M21Rik (NM_133728.2,1192-1210).
gagagacacttgaggtatt

SEQ ID NO: 605118 - DNA, 19 bp, Mus musculus
  siRNA target sequence for 2210409M21Rik (NM_133728.2,1255-1273).
ccatcctcaatgtttcagt

SEQ ID NO: 605119 - DNA, 19 bp, Mus musculus
  siRNA target sequence for 2210409M21Rik (NM_133728.2,1272-1290).
gtcaagagacgcatcttat

SEQ ID NO: 605120 - DNA, 19 bp, Mus musculus
  siRNA target sequence for 2210409M21Rik (NM_133728.2,1274-1292).
caagagacgcatcttatgt

SEQ ID NO: 605121 - DNA, 19 bp, Mus musculus
  siRNA target sequence for 2210409M21Rik (NM_133728.2,1281-1299).
cgcatcttatgtttagcta

SEQ ID NO: 605122 - DNA, 19 bp, Mus musculus
  siRNA target sequence for 2210409M21Rik (NM_133728.2,1291-1309).
gtttagctagggaagaaaa

SEQ ID NO: 605123 - DNA, 19 bp, Mus musculus
  siRNA target sequence for 2210409M21Rik (NM_133728.2,1313-1331).
ggcatcaaaggaagtttta

SEQ ID NO: 605124 - DNA, 19 bp, Mus musculus
  siRNA target sequence for 2210409M21Rik (NM_133728.2,1339-1357).
gcagttcgaaagcaaacat

SEQ ID NO: 605125 - DNA, 19 bp, Mus musculus
  siRNA target sequence for 2210409M21Rik (NM_133728.2,1367-1385).
gttttctggaggtgttgat

SEQ ID NO: 605126 - DNA, 19 bp, Mus musculus
  siRNA target sequence for 2210409M21Rik (NM_133728.2,1402-1420).
cccttgctgatcgtcatat

SEQ ID NO: 605127 - DNA, 19 bp, Mus musculus
  siRNA target sequence for 2210409M21Rik (NM_133728.2,1403-1421).
ccttgctgatcgtcatatt

SEQ ID NO: 605128 - DNA, 19 bp, Mus musculus
  siRNA target sequence for 2210409M21Rik (NM_133728.2,1407-1425).
gctgatcgtcatattcctt

SEQ ID NO: 605129 - DNA, 19 bp, Mus musculus
  siRNA target sequence for 2210409M21Rik (NM_133728.2,1408-1426).
ctgatcgtcatattccttt

SEQ ID NO: 605130 - DNA, 19 bp, Mus musculus
  siRNA target sequence for 2210409M21Rik (NM_133728.2,1414-1432).
gtcatattcctttagatga

SEQ ID NO: 605131 - DNA, 19 bp, Mus musculus
  siRNA target sequence for 2210409M21Rik (NM_133728.2,1433-1451).
gccaattgatcttctgaat

SEQ ID NO: 605132 - DNA, 19 bp, Mus musculus
  siRNA target sequence for 2210409M21Rik (NM_133728.2,1435-1453).
caattgatcttctgaatgt

SEQ ID NO: 605133 - DNA, 19 bp, Mus musculus
  siRNA target sequence for 2210409M21Rik (NM_133728.2,1480-1498).
ggctacctattcctaacat

SEQ ID NO: 605134 - DNA, 19 bp, Mus musculus
  siRNA target sequence for 2210409M21Rik (NM_133728.2,1481-1499).
gctacctattcctaacata

SEQ ID NO: 605135 - DNA, 19 bp, Mus musculus
  siRNA target sequence for 2210409M21Rik (NM_133728.2,1492-1510).
ctaacatagaaagaaaaca

SEQ ID NO: 605136 - DNA, 19 bp, Mus musculus
  siRNA target sequence for 2210409M21Rik (NM_133728.2,1520-1538).
ccatgagatcccttctgaa

SEQ ID NO: 605137 - DNA, 19 bp, Mus musculus
  siRNA target sequence for 2210409M21Rik (NM_133728.2,1612-1630).
caggactaaaggaactaca

SEQ ID NO: 605138 - DNA, 19 bp, Mus musculus
  siRNA target sequence for 2210409M21Rik (NM_133728.2,1640-1658).
cccttctcgaacttggaat

SEQ ID NO: 605139 - DNA, 19 bp, Mus musculus
  siRNA target sequence for 2210409M21Rik (NM_133728.2,1645-1663).
ctcgaacttggaattttgt

SEQ ID NO: 605140 - DNA, 19 bp, Mus musculus
  siRNA target sequence for 2210409M21Rik (NM_133728.2,2072-2090).
gccagtttgggaaaaggta

SEQ ID NO: 605141 - DNA, 19 bp, Mus musculus
  siRNA target sequence for 2210409M21Rik (NM_133728.2,2112-2130).
gttggtgagaagcttattt

SEQ ID NO: 605142 - DNA, 19 bp, Mus musculus
  siRNA target sequence for Fnta (NM_008033.2,201-219).
cgcccacctatgtcttgta

SEQ ID NO: 605143 - DNA, 19 bp, Mus musculus
  siRNA target sequence for Fnta (NM_008033.2,231-249).
cagaatgggctgatataga

SEQ ID NO: 605144 - DNA, 19 bp, Mus musculus
  siRNA target sequence for Fnta (NM_008033.2,357-375).
ggagcgaacgagcctttaa

SEQ ID NO: 605145 - DNA, 19 bp, Mus musculus
  siRNA target sequence for Fnta (NM_008033.2,360-378).
gcgaacgagcctttaagct

SEQ ID NO: 605146 - DNA, 19 bp, Mus musculus
  siRNA target sequence for Fnta (NM_008033.2,381-399).
cccgagacgctattgagtt

SEQ ID NO: 605147 - DNA, 19 bp, Mus musculus
  siRNA target sequence for Fnta (NM_008033.2,382-400).
ccgagacgctattgagtta

SEQ ID NO: 605148 - DNA, 19 bp, Mus musculus
  siRNA target sequence for Fnta (NM_008033.2,384-402).
gagacgctattgagttaaa

SEQ ID NO: 605149 - DNA, 19 bp, Mus musculus
  siRNA target sequence for Fnta (NM_008033.2,431-449).
cggagagttctcttaaggt

SEQ ID NO: 605150 - DNA, 19 bp, Mus musculus
  siRNA target sequence for Fnta (NM_008033.2,440-458).
ctcttaaggtcgcttcaaa

SEQ ID NO: 605151 - DNA, 19 bp, Mus musculus
  siRNA target sequence for Fnta (NM_008033.2,461-479).
gatctacaagaggaaatga

SEQ ID NO: 605152 - DNA, 19 bp, Mus musculus
  siRNA target sequence for Fnta (NM_008033.2,481-499).
ctacatcactgcgataatt

SEQ ID NO: 605153 - DNA, 19 bp, Mus musculus
  siRNA target sequence for Fnta (NM_008033.2,502-520).
ggagcagcccaaaaactat

SEQ ID NO: 605154 - DNA, 19 bp, Mus musculus
  siRNA target sequence for Fnta (NM_008033.2,509-527).
cccaaaaactatcaagttt

SEQ ID NO: 605155 - DNA, 19 bp, Mus musculus
  siRNA target sequence for Fnta (NM_008033.2,529-547).
gcaccacaggcgagtatta

SEQ ID NO: 605156 - DNA, 19 bp, Mus musculus
  siRNA target sequence for Fnta (NM_008033.2,586-604).
cattgccgacattcttagt

SEQ ID NO: 605157 - DNA, 19 bp, Mus musculus
  siRNA target sequence for Fnta (NM_008033.2,709-727).
ggatgtgaggaataactct

SEQ ID NO: 605158 - DNA, 19 bp, Mus musculus
  siRNA target sequence for Fnta (NM_008033.2,737-755).
caaagacacttcgtcattt

SEQ ID NO: 605159 - DNA, 19 bp, Mus musculus
  siRNA target sequence for Fnta (NM_008033.2,741-759).
gacacttcgtcatttctaa

SEQ ID NO: 605160 - DNA, 19 bp, Mus musculus
  siRNA target sequence for Fnta (NM_008033.2,743-761).
cacttcgtcatttctaaca

SEQ ID NO: 605161 - DNA, 19 bp, Mus musculus
  siRNA target sequence for Fnta (NM_008033.2,791-809).
gagcgagaagtccagtata

SEQ ID NO: 605162 - DNA, 19 bp, Mus musculus
  siRNA target sequence for Fnta (NM_008033.2,793-811).
gcgagaagtccagtatact

SEQ ID NO: 605163 - DNA, 19 bp, Mus musculus
  siRNA target sequence for Fnta (NM_008033.2,795-813).
gagaagtccagtatactct

SEQ ID NO: 605164 - DNA, 19 bp, Mus musculus
  siRNA target sequence for Fnta (NM_008033.2,823-841).
caagttagtgccgcataat

SEQ ID NO: 605165 - DNA, 19 bp, Mus musculus
  siRNA target sequence for Fnta (NM_008033.2,874-892).
gcaggaccgtggtctttct

SEQ ID NO: 605166 - DNA, 19 bp, Mus musculus
  siRNA target sequence for Fnta (NM_008033.2,878-896).
gaccgtggtctttctagat

SEQ ID NO: 605167 - DNA, 19 bp, Mus musculus
  siRNA target sequence for Fnta (NM_008033.2,891-909).
ctagataccctaatctatt

SEQ ID NO: 605168 - DNA, 19 bp, Mus musculus
  siRNA target sequence for Fnta (NM_008033.2,894-912).
gataccctaatctattaaa

SEQ ID NO: 605169 - DNA, 19 bp, Mus musculus
  siRNA target sequence for Fnta (NM_008033.2,900-918).
ctaatctattaaatcagtt

SEQ ID NO: 605170 - DNA, 19 bp, Mus musculus
  siRNA target sequence for Fnta (NM_008033.2,1012-1030).
ggaggacattcttaataaa

SEQ ID NO: 605171 - DNA, 19 bp, Mus musculus
  siRNA target sequence for Fnta (NM_008033.2,1061-1079).
gaaaaggacactataagaa

SEQ ID NO: 605172 - DNA, 19 bp, Mus musculus
  siRNA target sequence for Fnta (NM_008033.2,1081-1099).
ggaatattggaggtatatt

SEQ ID NO: 605173 - DNA, 19 bp, Mus musculus
  siRNA target sequence for Fnta (NM_008033.2,1104-1122).
ggtcccttcagagtaaaca

SEQ ID NO: 605174 - DNA, 19 bp, Mus musculus
  siRNA target sequence for Fnta (NM_008033.2,1136-1154).
gacataccggcgagtgtat

SEQ ID NO: 605175 - DNA, 19 bp, Mus musculus
  siRNA target sequence for Rabggta (NM_019519.1,388-406).
gagcgggaacagaagctaa

SEQ ID NO: 605176 - DNA, 19 bp, Mus musculus
  siRNA target sequence for Rabggta (NM_019519.1,741-759).
ggccgatgagcggaacttt

SEQ ID NO: 605177 - DNA, 19 bp, Mus musculus
  siRNA target sequence for Rabggta (NM_019519.1,743-761).
ccgatgagcggaactttca

SEQ ID NO: 605178 - DNA, 19 bp, Mus musculus
  siRNA target sequence for Rabggta (NM_019519.1,744-762).
cgatgagcggaactttcat

SEQ ID NO: 605179 - DNA, 19 bp, Mus musculus
  siRNA target sequence for Rabggta (NM_019519.1,745-763).
gatgagcggaactttcatt

SEQ ID NO: 605180 - DNA, 19 bp, Mus musculus
  siRNA target sequence for Rabggta (NM_019519.1,768-786).
ggactatcggcgatttgta

SEQ ID NO: 605181 - DNA, 19 bp, Mus musculus
  siRNA target sequence for Rabggta (NM_019519.1,838-856).
ctcatcacccggaacttct

SEQ ID NO: 605182 - DNA, 19 bp, Mus musculus
  siRNA target sequence for Rabggta (NM_019519.1,846-864).
ccggaacttctccaactat

SEQ ID NO: 605183 - DNA, 19 bp, Mus musculus
  siRNA target sequence for Rabggta (NM_019519.1,847-865).
cggaacttctccaactatt

SEQ ID NO: 605184 - DNA, 19 bp, Mus musculus
  siRNA target sequence for Rabggta (NM_019519.1,849-867).
gaacttctccaactattct

SEQ ID NO: 605185 - DNA, 19 bp, Mus musculus
  siRNA target sequence for Rabggta (NM_019519.1,861-879).
ctattcttcctggcattat

SEQ ID NO: 605186 - DNA, 19 bp, Mus musculus
  siRNA target sequence for Rabggta (NM_019519.1,930-948).
gggacggctccctgaaaat

SEQ ID NO: 605187 - DNA, 19 bp, Mus musculus
  siRNA target sequence for Rabggta (NM_019519.1,932-950).
gacggctccctgaaaatgt

SEQ ID NO: 605188 - DNA, 19 bp, Mus musculus
  siRNA target sequence for Rabggta (NM_019519.1,1522-1540).
ctcctctacgagaaagaaa

SEQ ID NO: 605189 - DNA, 19 bp, Mus musculus
  siRNA target sequence for Rabggta (NM_019519.1,1524-1542).
cctctacgagaaagaaaca

SEQ ID NO: 605190 - DNA, 19 bp, Mus musculus
  siRNA target sequence for Rabggta (NM_019519.1,1800-1818).
gttgcaggccagtgataat

SEQ ID NO: 605191 - DNA, 19 bp, Mus musculus
  siRNA target sequence for Rabggta (NM_019519.1,1833-1851).
ggacggcgtggctaacctt

SEQ ID NO: 605192 - DNA, 19 bp, Mus musculus
  siRNA target sequence for Rabggta (NM_019519.1,1858-1876).
ctgcgggagctgttactat

SEQ ID NO: 605193 - DNA, 19 bp, Mus musculus
  siRNA target sequence for Rabggta (NM_019519.1,1860-1878).
gcgggagctgttactatgt

SEQ ID NO: 605194 - DNA, 19 bp, Mus musculus
  siRNA target sequence for Rabggta (NM_019519.1,1861-1879).
cgggagctgttactatgta

SEQ ID NO: 605195 - DNA, 19 bp, Mus musculus
  siRNA target sequence for Rabggta (NM_019519.1,1862-1880).
gggagctgttactatgtaa

SEQ ID NO: 605196 - DNA, 19 bp, Mus musculus
  siRNA target sequence for Rabggta (NM_019519.1,1863-1881).
ggagctgttactatgtaat

SEQ ID NO: 605197 - DNA, 19 bp, Mus musculus
  siRNA target sequence for Rabggta (NM_019519.1,1864-1882).
gagctgttactatgtaata

SEQ ID NO: 605198 - DNA, 19 bp, Mus musculus
  siRNA target sequence for Smarcd3 (NM_025891.2,551-569).
gacctcctagcatttgaga

SEQ ID NO: 605199 - DNA, 19 bp, Mus musculus
  siRNA target sequence for Smarcd3 (NM_025891.2,643-661).
gcgaaagctgcgcctttat

SEQ ID NO: 605200 - DNA, 19 bp, Mus musculus
  siRNA target sequence for Smarcd3 (NM_025891.2,644-662).
cgaaagctgcgcctttata

SEQ ID NO: 605201 - DNA, 19 bp, Mus musculus
  siRNA target sequence for Smarcd3 (NM_025891.2,645-663).
gaaagctgcgcctttatat

SEQ ID NO: 605202 - DNA, 19 bp, Mus musculus
  siRNA target sequence for Smarcd3 (NM_025891.2,655-673).
cctttatatctccaatact

SEQ ID NO: 605203 - DNA, 19 bp, Mus musculus
  siRNA target sequence for Smarcd3 (NM_025891.2,656-674).
ctttatatctccaatactt

SEQ ID NO: 605204 - DNA, 19 bp, Mus musculus
  siRNA target sequence for Smarcd3 (NM_025891.2,960-978).
ctccccagttcaaattgga

SEQ ID NO: 605205 - DNA, 19 bp, Mus musculus
  siRNA target sequence for Smarcd3 (NM_025891.2,1093-1111).
catcaatggcgacaagtat

SEQ ID NO: 605206 - DNA, 19 bp, Mus musculus
  siRNA target sequence for Smarcd3 (NM_025891.2,1108-1126).
gtatttccagcagattttt

SEQ ID NO: 605207 - DNA, 19 bp, Mus musculus
  siRNA target sequence for Smarcd3 (NM_025891.2,1338-1356).
gtgctctggacagtaagat

SEQ ID NO: 605208 - DNA, 19 bp, Mus musculus
  siRNA target sequence for Smarcd3 (NM_025891.2,1374-1392).
ccataaaccagctcaagat

SEQ ID NO: 605209 - DNA, 19 bp, Mus musculus
  siRNA target sequence for Smarcd3 (NM_025891.2,1400-1418).
gacttcatgctaagtttct

SEQ ID NO: 605210 - DNA, 19 bp, Mus musculus
  siRNA target sequence for Smarcd3 (NM_025891.2,1553-1571).
gccgttagccgctacttct

SEQ ID NO: 605211 - DNA, 19 bp, Mus musculus
  siRNA target sequence for Smarcd3 (NM_025891.2,1554-1572).
ccgttagccgctacttcta

SEQ ID NO: 605212 - DNA, 19 bp, Mus musculus
  siRNA target sequence for Smarcd3 (NM_025891.2,1556-1574).
gttagccgctacttctact

SEQ ID NO: 605213 - DNA, 19 bp, Mus musculus
  siRNA target sequence for Smarcd3 (NM_025891.2,1560-1578).
gccgctacttctactgtaa

SEQ ID NO: 605214 - DNA, 19 bp, Mus musculus
  siRNA target sequence for 2410004F01Rik (NM_178379.2,54-72).
gcgtccccgcacaccattt

SEQ ID NO: 605215 - DNA, 19 bp, Mus musculus
  siRNA target sequence for 2410004F01Rik (NM_178379.2,91-109).
gctcagtaggaggatgtat

SEQ ID NO: 605216 - DNA, 19 bp, Mus musculus
  siRNA target sequence for 2410004F01Rik (NM_178379.2,100-118).
gaggatgtatctggtattt

SEQ ID NO: 605217 - DNA, 19 bp, Mus musculus
  siRNA target sequence for 2410004F01Rik (NM_178379.2,286-304).
cgtctcctttccttgaaca

SEQ ID NO: 605218 - DNA, 19 bp, Mus musculus
  siRNA target sequence for 2410004F01Rik (NM_178379.2,435-453).
ctcgacacagccaaagaga

SEQ ID NO: 605219 - DNA, 19 bp, Mus musculus
  siRNA target sequence for 2410004F01Rik (NM_178379.2,651-669).
gccaactccatcaatcagt

SEQ ID NO: 605220 - DNA, 19 bp, Mus musculus
  siRNA target sequence for 2410004F01Rik (NM_178379.2,678-696).
gtgccgttcgactcaaaca

SEQ ID NO: 605221 - DNA, 19 bp, Mus musculus
  siRNA target sequence for 2410004F01Rik (NM_178379.2,681-699).
ccgttcgactcaaacatga

SEQ ID NO: 605222 - DNA, 19 bp, Mus musculus
  siRNA target sequence for 2410004F01Rik (NM_178379.2,682-700).
cgttcgactcaaacatgaa

SEQ ID NO: 605223 - DNA, 19 bp, Mus musculus
  siRNA target sequence for 2410004F01Rik (NM_178379.2,683-701).
gttcgactcaaacatgaat

SEQ ID NO: 605224 - DNA, 19 bp, Mus musculus
  siRNA target sequence for 2410004F01Rik (NM_178379.2,720-738).
ctggttcgagggcagataa

SEQ ID NO: 605225 - DNA, 19 bp, Mus musculus
  siRNA target sequence for 2410004F01Rik (NM_178379.2,742-760).
cattgctagccgtgtcttt

SEQ ID NO: 605226 - DNA, 19 bp, Mus musculus
  siRNA target sequence for 2410004F01Rik (NM_178379.2,827-845).
cttgggggtcttcaacatt

SEQ ID NO: 605227 - DNA, 19 bp, Mus musculus
  siRNA target sequence for 2410004F01Rik (NM_178379.2,1006-1024).
ggcaattcccccacttcaa

SEQ ID NO: 605228 - DNA, 19 bp, Mus musculus
  siRNA target sequence for 2410004F01Rik (NM_178379.2,1007-1025).
gcaattcccccacttcaat

SEQ ID NO: 605229 - DNA, 19 bp, Mus musculus
  siRNA target sequence for 2410004F01Rik (NM_178379.2,1036-1054).
ggggcctccgtgaagacta

SEQ ID NO: 605230 - DNA, 19 bp, Mus musculus
  siRNA target sequence for 2410004F01Rik (NM_178379.2,1057-1075).
cccgaggaggctactgtat

SEQ ID NO: 605231 - DNA, 19 bp, Mus musculus
  siRNA target sequence for 2410004F01Rik (NM_178379.2,1059-1077).
cgaggaggctactgtatga

SEQ ID NO: 605232 - DNA, 19 bp, Mus musculus
  siRNA target sequence for 2410004F01Rik (NM_178379.2,1060-1078).
gaggaggctactgtatgat

SEQ ID NO: 605233 - DNA, 19 bp, Mus musculus
  siRNA target sequence for 2410004F01Rik (NM_178379.2,1256-1274).
ccgcaggagctcaaggaaa

SEQ ID NO: 605234 - DNA, 19 bp, Mus musculus
  siRNA target sequence for Ggps1 (NM_010282.1,597-615).
cagctgttctctgattaca

SEQ ID NO: 605235 - DNA, 19 bp, Mus musculus
  siRNA target sequence for Ggps1 (NM_010282.1,787-805).
gcacccaggtacagaacat

SEQ ID NO: 605236 - DNA, 19 bp, Mus musculus
  siRNA target sequence for Ggps1 (NM_010282.1,884-902).
cactcgacacactcttaga

SEQ ID NO: 605237 - DNA, 19 bp, Mus musculus
  siRNA target sequence for Ggps1 (NM_010282.1,912-930).
gctaaagcctacaaacaaa

SEQ ID NO: 605238 - DNA, 19 bp, Mus musculus
  siRNA target sequence for Ggps1 (NM_010282.1,955-973).
cactagtggctttagtcaa

SEQ ID NO: 605239 - DNA, 19 bp, Mus musculus
  siRNA target sequence for Ggps1 (NM_010282.1,963-981).
gctttagtcaagcacttaa

SEQ ID NO: 605240 - DNA, 19 bp, Mus musculus
  siRNA target sequence for Ggps1 (NM_010282.1,975-993).
cacttaagtaagatgttca

SEQ ID NO: 605241 - DNA, 19 bp, Mus musculus
  siRNA target sequence for Fdps (NM_134469.2,835-853).
cgactaccttgatctcttt

SEQ ID NO: 605242 - DNA, 19 bp, Mus musculus
  siRNA target sequence for Fdps (NM_134469.2,945-963).
ctcaacagcgccagatctt

SEQ ID NO: 605243 - DNA, 19 bp, Mus musculus
  siRNA target sequence for Fdps (NM_134469.2,1005-1023).
gggtgaaagcactgtatga

SEQ ID NO: 605244 - DNA, 19 bp, Mus musculus
  siRNA target sequence for Fdps (NM_134469.2,1037-1055).
cagtctgctttcttcaagt

SEQ ID NO: 605245 - DNA, 19 bp, Mus musculus
  siRNA target sequence for Fdps (NM_134469.2,1075-1093).
ccgcctcaagagtctcata

SEQ ID NO: 605246 - DNA, 19 bp, Mus musculus
  siRNA target sequence for Rabggtb (NM_011231.1,34-52).
cagcagaaagacgttacta

SEQ ID NO: 605247 - DNA, 19 bp, Mus musculus
  siRNA target sequence for Rabggtb (NM_011231.1,37-55).
cagaaagacgttactatca

SEQ ID NO: 605248 - DNA, 19 bp, Mus musculus
  siRNA target sequence for Rabggtb (NM_011231.1,84-102).
ggagaagcatgccgattat

SEQ ID NO: 605249 - DNA, 19 bp, Mus musculus
  siRNA target sequence for Rabggtb (NM_011231.1,85-103).
gagaagcatgccgattata

SEQ ID NO: 605250 - DNA, 19 bp, Mus musculus
  siRNA target sequence for Rabggtb (NM_011231.1,87-105).
gaagcatgccgattatatt

SEQ ID NO: 605251 - DNA, 19 bp, Mus musculus
  siRNA target sequence for Rabggtb (NM_011231.1,90-108).
gcatgccgattatattgct

SEQ ID NO: 605252 - DNA, 19 bp, Mus musculus
  siRNA target sequence for Rabggtb (NM_011231.1,91-109).
catgccgattatattgctt

SEQ ID NO: 605253 - DNA, 19 bp, Mus musculus
  siRNA target sequence for Rabggtb (NM_011231.1,117-135).
ctcaaagaaagatgattat

SEQ ID NO: 605254 - DNA, 19 bp, Mus musculus
  siRNA target sequence for Rabggtb (NM_011231.1,136-154).
gaatactgcatgtctgaat

SEQ ID NO: 605255 - DNA, 19 bp, Mus musculus
  siRNA target sequence for Rabggtb (NM_011231.1,262-280).
catgagtgtgggggaataa

SEQ ID NO: 605256 - DNA, 19 bp, Mus musculus
  siRNA target sequence for Rabggtb (NM_011231.1,358-376).
catgttatcaacgtagata

SEQ ID NO: 605257 - DNA, 19 bp, Mus musculus
  siRNA target sequence for Rabggtb (NM_011231.1,428-446).
gagacatttggggagaaat

SEQ ID NO: 605258 - DNA, 19 bp, Mus musculus
  siRNA target sequence for Rabggtb (NM_011231.1,540-558).
gtcctgcatgaactttgat

SEQ ID NO: 605259 - DNA, 19 bp, Mus musculus
  siRNA target sequence for Rabggtb (NM_011231.1,549-567).
gaactttgatggtggattt

SEQ ID NO: 605260 - DNA, 19 bp, Mus musculus
  siRNA target sequence for Rabggtb (NM_011231.1,590-608).
ctcacgctgggcagatcta

SEQ ID NO: 605261 - DNA, 19 bp, Mus musculus
  siRNA target sequence for Rabggtb (NM_011231.1,595-613).
gctgggcagatctattgtt

SEQ ID NO: 605262 - DNA, 19 bp, Mus musculus
  siRNA target sequence for Rabggtb (NM_011231.1,638-656).
gtcagttgcaccaagtgaa

SEQ ID NO: 605263 - DNA, 19 bp, Mus musculus
  siRNA target sequence for Rabggtb (NM_011231.1,774-792).
gatcatcgggagacttcat

SEQ ID NO: 605264 - DNA, 19 bp, Mus musculus
  siRNA target sequence for Rabggtb (NM_011231.1,780-798).
cgggagacttcattggatt

SEQ ID NO: 605265 - DNA, 19 bp, Mus musculus
  siRNA target sequence for Rabggtb (NM_011231.1,805-823).
gaaaagcttcgaagtttca

SEQ ID NO: 605266 - DNA, 19 bp, Mus musculus
  siRNA target sequence for Rabggtb (NM_011231.1,882-900).
ggatccctttcatacctta

SEQ ID NO: 605267 - DNA, 19 bp, Mus musculus
  siRNA target sequence for Rabggtb (NM_011231.1,883-901).
gatccctttcataccttat

SEQ ID NO: 605268 - DNA, 19 bp, Mus musculus
  siRNA target sequence for Ltc4s (NM_008521.1,85-103).
ctgttgcaagcctacttct

SEQ ID NO: 605269 - DNA, 19 bp, Mus musculus
  siRNA target sequence for Ltc4s (NM_008521.1,275-293).
ccctgtgcggactgttcta

SEQ ID NO: 605270 - DNA, 19 bp, Mus musculus
  siRNA target sequence for Ltc4s (NM_008521.1,442-460).
cggactgcgctcttcagat

SEQ ID NO: 605271 - DNA, 19 bp, Mus musculus
  siRNA target sequence for Hmbs (NM_013551.1,168-186).
gccacaaccgcggaagaaa

SEQ ID NO: 605272 - DNA, 19 bp, Mus musculus
  siRNA target sequence for Hmbs (NM_013551.1,169-187).
ccacaaccgcggaagaaaa

SEQ ID NO: 605273 - DNA, 19 bp, Mus musculus
  siRNA target sequence for Hmbs (NM_013551.1,231-249).
cagctggctcgcatacaga

SEQ ID NO: 605274 - DNA, 19 bp, Mus musculus
  siRNA target sequence for Hmbs (NM_013551.1,284-302).
ccctggcatacagtttgaa

SEQ ID NO: 605275 - DNA, 19 bp, Mus musculus
  siRNA target sequence for Hmbs (NM_013551.1,286-304).
ctggcatacagtttgaaat

SEQ ID NO: 605276 - DNA, 19 bp, Mus musculus
  siRNA target sequence for Hmbs (NM_013551.1,319-337).
ccacgggagacaagattct

SEQ ID NO: 605277 - DNA, 19 bp, Mus musculus
  siRNA target sequence for Hmbs (NM_013551.1,339-357).
gatactgcactctctaaga

SEQ ID NO: 605278 - DNA, 19 bp, Mus musculus
  siRNA target sequence for Hmbs (NM_013551.1,395-413).
cgccctggaaaaaaacgaa

SEQ ID NO: 605279 - DNA, 19 bp, Mus musculus
  siRNA target sequence for Hmbs (NM_013551.1,437-455).
gaaggatgtgcctaccata

SEQ ID NO: 605280 - DNA, 19 bp, Mus musculus
  siRNA target sequence for Hmbs (NM_013551.1,440-458).
ggatgtgcctaccatacta

SEQ ID NO: 605281 - DNA, 19 bp, Mus musculus
  siRNA target sequence for Hmbs (NM_013551.1,518-536).
ctttcacccaaagtttatt

SEQ ID NO: 605282 - DNA, 19 bp, Mus musculus
  siRNA target sequence for Hmbs (NM_013551.1,548-566).
ggaaaccttgccagagaaa

SEQ ID NO: 605283 - DNA, 19 bp, Mus musculus
  siRNA target sequence for Hmbs (NM_013551.1,549-567).
gaaaccttgccagagaaaa

SEQ ID NO: 605284 - DNA, 19 bp, Mus musculus
  siRNA target sequence for Hmbs (NM_013551.1,748-766).
gggtgggccagattttgca

SEQ ID NO: 605285 - DNA, 19 bp, Mus musculus
  siRNA target sequence for Sult1a1 (NM_133670.1,63-81).
ggagcccttgcgtaaacca

SEQ ID NO: 605286 - DNA, 19 bp, Mus musculus
  siRNA target sequence for Sult1a1 (NM_133670.1,96-114).
gggaatcccactcatcaaa

SEQ ID NO: 605287 - DNA, 19 bp, Mus musculus
  siRNA target sequence for Sult1a1 (NM_133670.1,97-115).
ggaatcccactcatcaaat

SEQ ID NO: 605288 - DNA, 19 bp, Mus musculus
  siRNA target sequence for Sult1a1 (NM_133670.1,177-195).
cagcacgtacccaaagtct

SEQ ID NO: 605289 - DNA, 19 bp, Mus musculus
  siRNA target sequence for Sult1a1 (NM_133670.1,238-256).
ggtggcaagctagataagt

SEQ ID NO: 605290 - DNA, 19 bp, Mus musculus
  siRNA target sequence for Sult1a1 (NM_133670.1,312-330).
ggtccccccaggtcttgaa

SEQ ID NO: 605291 - DNA, 19 bp, Mus musculus
  siRNA target sequence for Sult1a1 (NM_133670.1,313-331).
gtccccccaggtcttgaaa

SEQ ID NO: 605292 - DNA, 19 bp, Mus musculus
  siRNA target sequence for Sult1a1 (NM_133670.1,315-333).
ccccccaggtcttgaaact

SEQ ID NO: 605293 - DNA, 19 bp, Mus musculus
  siRNA target sequence for Sult1a1 (NM_133670.1,346-364).
ccagccccacggatcatta

SEQ ID NO: 605294 - DNA, 19 bp, Mus musculus
  siRNA target sequence for Sult1a1 (NM_133670.1,349-367).
gccccacggatcattaaga

SEQ ID NO: 605295 - DNA, 19 bp, Mus musculus
  siRNA target sequence for Sult1a1 (NM_133670.1,351-369).
cccacggatcattaagaca

SEQ ID NO: 605296 - DNA, 19 bp, Mus musculus
  siRNA target sequence for Sult1a1 (NM_133670.1,400-418).
ctgctggatcaaaagatca

SEQ ID NO: 605297 - DNA, 19 bp, Mus musculus
  siRNA target sequence for Sult1a1 (NM_133670.1,653-671).
gggagatcaagaagattct

SEQ ID NO: 605298 - DNA, 19 bp, Mus musculus
  siRNA target sequence for Sult1a1 (NM_133670.1,773-791).
ccatcccaactgaagttat

SEQ ID NO: 605299 - DNA, 19 bp, Mus musculus
  siRNA target sequence for Sult1a1 (NM_133670.1,787-805).
gttatggaccacactattt

SEQ ID NO: 605300 - DNA, 19 bp, Mus musculus
  siRNA target sequence for Sult1a2 (NM_018751.2,204-222).
ggaagtgaatgggattcta

SEQ ID NO: 605301 - DNA, 19 bp, Mus musculus
  siRNA target sequence for Sult1a2 (NM_018751.2,205-223).
gaagtgaatgggattctaa

SEQ ID NO: 605302 - DNA, 19 bp, Mus musculus
  siRNA target sequence for Sult1a2 (NM_018751.2,289-307).
ctcattgcaacctatgcaa

SEQ ID NO: 605303 - DNA, 19 bp, Mus musculus
  siRNA target sequence for Sult1a2 (NM_018751.2,320-338).
cctggacacaggaaattgt

SEQ ID NO: 605304 - DNA, 19 bp, Mus musculus
  siRNA target sequence for Sult1a2 (NM_018751.2,443-461).
gtctggatctggctaacaa

SEQ ID NO: 605305 - DNA, 19 bp, Mus musculus
  siRNA target sequence for Sult1a2 (NM_018751.2,488-506).
ctcatctgcctgttcaaat

SEQ ID NO: 605306 - DNA, 19 bp, Mus musculus
  siRNA target sequence for Sult1a2 (NM_018751.2,568-586).
gactgcctggtatcttact

SEQ ID NO: 605307 - DNA, 19 bp, Mus musculus
  siRNA target sequence for Sult1a2 (NM_018751.2,572-590).
gcctggtatcttactacta

SEQ ID NO: 605308 - DNA, 19 bp, Mus musculus
  siRNA target sequence for Sult1a2 (NM_018751.2,573-591).
cctggtatcttactactat

SEQ ID NO: 605309 - DNA, 19 bp, Mus musculus
  siRNA target sequence for Sult1a2 (NM_018751.2,588-606).
ctatttctcaagaatgaat

SEQ ID NO: 605310 - DNA, 19 bp, Mus musculus
  siRNA target sequence for Sult1a2 (NM_018751.2,623-641).
ctggtaccctgggagaata

SEQ ID NO: 605311 - DNA, 19 bp, Mus musculus
  siRNA target sequence for Sult1a2 (NM_018751.2,626-644).
gtaccctgggagaatacat

SEQ ID NO: 605312 - DNA, 19 bp, Mus musculus
  siRNA target sequence for Sult1a2 (NM_018751.2,630-648).
cctgggagaatacattgaa

SEQ ID NO: 605313 - DNA, 19 bp, Mus musculus
  siRNA target sequence for Sult1a2 (NM_018751.2,631-649).
ctgggagaatacattgaaa

SEQ ID NO: 605314 - DNA, 19 bp, Mus musculus
  siRNA target sequence for Sult1a2 (NM_018751.2,650-668).
ccttcaaagctggaaaagt

SEQ ID NO: 605315 - DNA, 19 bp, Mus musculus
  siRNA target sequence for Sult1a2 (NM_018751.2,704-722).
ggtgggatgtgaaagacaa

SEQ ID NO: 605316 - DNA, 19 bp, Mus musculus
  siRNA target sequence for Sult1a2 (NM_018751.2,705-723).
gtgggatgtgaaagacaaa

SEQ ID NO: 605317 - DNA, 19 bp, Mus musculus
  siRNA target sequence for Sult1a2 (NM_018751.2,718-736).
gacaaacaccgtattctgt

SEQ ID NO: 605318 - DNA, 19 bp, Mus musculus
  siRNA target sequence for Sult1a2 (NM_018751.2,728-746).
gtattctgtacctcttcta

SEQ ID NO: 605319 - DNA, 19 bp, Mus musculus
  siRNA target sequence for Sult1a2 (NM_018751.2,905-923).
gtatcatggaccactctat

SEQ ID NO: 605320 - DNA, 19 bp, Mus musculus
  siRNA target sequence for Sult1a2 (NM_018751.2,969-987).
ctttaccgtggcacaaagt

SEQ ID NO: 605321 - DNA, 19 bp, Mus musculus
  siRNA target sequence for Sult1a2 (NM_018751.2,978-996).
ggcacaaagtgaggatttt

SEQ ID NO: 605322 - DNA, 19 bp, Mus musculus
  siRNA target sequence for Sult1a2 (NM_018751.2,1017-1035).
gatggcagggagcactatt

SEQ ID NO: 605323 - DNA, 19 bp, Mus musculus
  siRNA target sequence for Sult1a2 (NM_018751.2,1022-1040).
cagggagcactattacctt

SEQ ID NO: 605324 - DNA, 19 bp, Mus musculus
  siRNA target sequence for Sult1b1 (NM_019878.2,621-639).
catggtttgatcatgttaa

SEQ ID NO: 605325 - DNA, 19 bp, Mus musculus
  siRNA target sequence for Sult1b1 (NM_019878.2,625-643).
gtttgatcatgttaagagt

SEQ ID NO: 605326 - DNA, 19 bp, Mus musculus
  siRNA target sequence for Sult1b1 (NM_019878.2,874-892).
catgagaaaaggtattgtt

SEQ ID NO: 605327 - DNA, 19 bp, Mus musculus
  siRNA target sequence for Sult1b1 (NM_019878.2,900-918).
ggaaaaattacttcacaat

SEQ ID NO: 605328 - DNA, 19 bp, Mus musculus
  siRNA target sequence for Sult1b1 (NM_019878.2,922-940).
ccaaactgagcaatttgat

SEQ ID NO: 605329 - DNA, 19 bp, Mus musculus
  siRNA target sequence for Sult1b1 (NM_019878.2,944-962).
gtctataagaagaagatgt

SEQ ID NO: 605330 - DNA, 19 bp, Mus musculus
  siRNA target sequence for Tpst1 (NM_013837.1,260-278).
gttctgtgaccgtgtttta

SEQ ID NO: 605331 - DNA, 19 bp, Mus musculus
  siRNA target sequence for Tpst1 (NM_013837.1,263-281).
ctgtgaccgtgttttacct

SEQ ID NO: 605332 - DNA, 19 bp, Mus musculus
  siRNA target sequence for Tpst1 (NM_013837.1,365-383).
gagctggcctcgacatcaa

SEQ ID NO: 605333 - DNA, 19 bp, Mus musculus
  siRNA target sequence for Tpst1 (NM_013837.1,406-424).
cacaaagatatgcctttaa

SEQ ID NO: 605334 - DNA, 19 bp, Mus musculus
  siRNA target sequence for Tpst1 (NM_013837.1,549-567).
gtggtcccggtccagtaaa

SEQ ID NO: 605335 - DNA, 19 bp, Mus musculus
  siRNA target sequence for Tpst1 (NM_013837.1,551-569).
ggtcccggtccagtaaaga

SEQ ID NO: 605336 - DNA, 19 bp, Mus musculus
  siRNA target sequence for Tpst1 (NM_013837.1,663-681).
gccggcaccttatttatgt

SEQ ID NO: 605337 - DNA, 19 bp, Mus musculus
  siRNA target sequence for Tpst1 (NM_013837.1,664-682).
ccggcaccttatttatgta

SEQ ID NO: 605338 - DNA, 19 bp, Mus musculus
  siRNA target sequence for Tpst1 (NM_013837.1,665-683).
cggcaccttatttatgtaa

SEQ ID NO: 605339 - DNA, 19 bp, Mus musculus
  siRNA target sequence for Tpst1 (NM_013837.1,688-706).
gatccgtttgccctgaaat

SEQ ID NO: 605340 - DNA, 19 bp, Mus musculus
  siRNA target sequence for Tpst1 (NM_013837.1,697-715).
gccctgaaatccttgactt

SEQ ID NO: 605341 - DNA, 19 bp, Mus musculus
  siRNA target sequence for Tpst1 (NM_013837.1,698-716).
ccctgaaatccttgactta

SEQ ID NO: 605342 - DNA, 19 bp, Mus musculus
  siRNA target sequence for Tpst1 (NM_013837.1,702-720).
gaaatccttgacttacctt

SEQ ID NO: 605343 - DNA, 19 bp, Mus musculus
  siRNA target sequence for Tpst1 (NM_013837.1,711-729).
gacttaccttgctaggtta

SEQ ID NO: 605344 - DNA, 19 bp, Mus musculus
  siRNA target sequence for Tpst1 (NM_013837.1,713-731).
cttaccttgctaggttatt

SEQ ID NO: 605345 - DNA, 19 bp, Mus musculus
  siRNA target sequence for Tpst1 (NM_013837.1,773-791).
cgtcagtacattcaatgat

SEQ ID NO: 605346 - DNA, 19 bp, Mus musculus
  siRNA target sequence for Tpst1 (NM_013837.1,774-792).
gtcagtacattcaatgatt

SEQ ID NO: 605347 - DNA, 19 bp, Mus musculus
  siRNA target sequence for Tpst1 (NM_013837.1,862-880).
gccatagaaaccatgtaca

SEQ ID NO: 605348 - DNA, 19 bp, Mus musculus
  siRNA target sequence for Tpst1 (NM_013837.1,872-890).
ccatgtacaaccagtgtat

SEQ ID NO: 605349 - DNA, 19 bp, Mus musculus
  siRNA target sequence for Tpst1 (NM_013837.1,885-903).
gtgtatggaagttggttat

SEQ ID NO: 605350 - DNA, 19 bp, Mus musculus
  siRNA target sequence for Tpst1 (NM_013837.1,887-905).
gtatggaagttggttataa

SEQ ID NO: 605351 - DNA, 19 bp, Mus musculus
  siRNA target sequence for Tpst1 (NM_013837.1,892-910).
gaagttggttataagaaat

SEQ ID NO: 605352 - DNA, 19 bp, Mus musculus
  siRNA target sequence for Tpst1 (NM_013837.1,895-913).
gttggttataagaaatgca

SEQ ID NO: 605353 - DNA, 19 bp, Mus musculus
  siRNA target sequence for Tpst1 (NM_013837.1,911-929).
gcatgttggttcactatga

SEQ ID NO: 605354 - DNA, 19 bp, Mus musculus
  siRNA target sequence for Tpst1 (NM_013837.1,912-930).
catgttggttcactatgaa

SEQ ID NO: 605355 - DNA, 19 bp, Mus musculus
  siRNA target sequence for Tpst1 (NM_013837.1,946-964).
cctgaacggtggatgagaa

SEQ ID NO: 605356 - DNA, 19 bp, Mus musculus
  siRNA target sequence for Tpst1 (NM_013837.1,956-974).
ggatgagaacgctcttaaa

SEQ ID NO: 605357 - DNA, 19 bp, Mus musculus
  siRNA target sequence for Tpst1 (NM_013837.1,992-1010).
ggaaccattccgttttgca

SEQ ID NO: 605358 - DNA, 19 bp, Mus musculus
  siRNA target sequence for Tpst1 (NM_013837.1,1001-1019).
ccgttttgcaccatgaaga

SEQ ID NO: 605359 - DNA, 19 bp, Mus musculus
  siRNA target sequence for Tpst1 (NM_013837.1,1002-1020).
cgttttgcaccatgaagaa

SEQ ID NO: 605360 - DNA, 19 bp, Mus musculus
  siRNA target sequence for Tpst1 (NM_013837.1,1064-1082).
gatcaacagaccaagtcat

SEQ ID NO: 605361 - DNA, 19 bp, Mus musculus
  siRNA target sequence for Tpst1 (NM_013837.1,1110-1128).
gaagtgggttgggaagata

SEQ ID NO: 605362 - DNA, 19 bp, Mus musculus
  siRNA target sequence for Tpst1 (NM_013837.1,1133-1151).
cggacgtcttacaagacat

SEQ ID NO: 605363 - DNA, 19 bp, Mus musculus
  siRNA target sequence for Tpst1 (NM_013837.1,1253-1271).
gggtctataaaggagaatt

SEQ ID NO: 605364 - DNA, 19 bp, Mus musculus
  siRNA target sequence for Tpst1 (NM_013837.1,1254-1272).
ggtctataaaggagaattt

SEQ ID NO: 605365 - DNA, 19 bp, Mus musculus
  siRNA target sequence for Tpst1 (NM_013837.1,1275-1293).
gctccctgactttctgaaa

SEQ ID NO: 605366 - DNA, 19 bp, Mus musculus
  siRNA target sequence for Tpst2 (NM_009419.2,396-414).
ggccatgccactcatcttt

SEQ ID NO: 605367 - DNA, 19 bp, Mus musculus
  siRNA target sequence for Tpst2 (NM_009419.2,725-743).
ccaaattcctgctaatggt

SEQ ID NO: 605368 - DNA, 19 bp, Mus musculus
  siRNA target sequence for Tpst2 (NM_009419.2,894-912).
gtgcctgcccgtgtactat

SEQ ID NO: 605369 - DNA, 19 bp, Mus musculus
  siRNA target sequence for Tpst2 (NM_009419.2,896-914).
gcctgcccgtgtactatga

SEQ ID NO: 605370 - DNA, 19 bp, Mus musculus
  siRNA target sequence for Tpst2 (NM_009419.2,1265-1283).
cagccaatctgaaaggata

SEQ ID NO: 605371 - DNA, 19 bp, Mus musculus
  siRNA target sequence for Tpst2 (NM_009419.2,1267-1285).
gccaatctgaaaggatatt

SEQ ID NO: 605372 - DNA, 19 bp, Mus musculus
  siRNA target sequence for Hs2st1 (NM_011828.2,349-367).
cggtggcgatgctcttctt

SEQ ID NO: 605373 - DNA, 19 bp, Mus musculus
  siRNA target sequence for Hs2st1 (NM_011828.2,408-426).
ctagaaagggcaattgcaa

SEQ ID NO: 605374 - DNA, 19 bp, Mus musculus
  siRNA target sequence for Hs2st1 (NM_011828.2,427-445).
ggcacgaagtccgagaaat

SEQ ID NO: 605375 - DNA, 19 bp, Mus musculus
  siRNA target sequence for Hs2st1 (NM_011828.2,428-446).
gcacgaagtccgagaaatt

SEQ ID NO: 605376 - DNA, 19 bp, Mus musculus
  siRNA target sequence for Hs2st1 (NM_011828.2,431-449).
cgaagtccgagaaattgaa

SEQ ID NO: 605377 - DNA, 19 bp, Mus musculus
  siRNA target sequence for Hs2st1 (NM_011828.2,544-562).
gcacctcgttcaccaatat

SEQ ID NO: 605378 - DNA, 19 bp, Mus musculus
  siRNA target sequence for Hs2st1 (NM_011828.2,545-563).
cacctcgttcaccaatata

SEQ ID NO: 605379 - DNA, 19 bp, Mus musculus
  siRNA target sequence for Hs2st1 (NM_011828.2,569-587).
cgacctgtgtgcaaagaat

SEQ ID NO: 605380 - DNA, 19 bp, Mus musculus
  siRNA target sequence for Hs2st1 (NM_011828.2,570-588).
gacctgtgtgcaaagaata

SEQ ID NO: 605381 - DNA, 19 bp, Mus musculus
  siRNA target sequence for Hs2st1 (NM_011828.2,572-590).
cctgtgtgcaaagaataga

SEQ ID NO: 605382 - DNA, 19 bp, Mus musculus
  siRNA target sequence for Hs2st1 (NM_011828.2,584-602).
gaatagataccatgttctt

SEQ ID NO: 605383 - DNA, 19 bp, Mus musculus
  siRNA target sequence for Hs2st1 (NM_011828.2,589-607).
gataccatgttcttcacat

SEQ ID NO: 605384 - DNA, 19 bp, Mus musculus
  siRNA target sequence for Hs2st1 (NM_011828.2,597-615).
gttcttcacatcaacacta

SEQ ID NO: 605385 - DNA, 19 bp, Mus musculus
  siRNA target sequence for Hs2st1 (NM_011828.2,626-644).
cccagtaatgtcattgcaa

SEQ ID NO: 605386 - DNA, 19 bp, Mus musculus
  siRNA target sequence for Hs2st1 (NM_011828.2,645-663).
gatcaggtgcgctttgtga

SEQ ID NO: 605387 - DNA, 19 bp, Mus musculus
  siRNA target sequence for Hs2st1 (NM_011828.2,653-671).
gcgctttgtgaagaacata

SEQ ID NO: 605388 - DNA, 19 bp, Mus musculus
  siRNA target sequence for Hs2st1 (NM_011828.2,686-704).
gatgaagccaggcttctat

SEQ ID NO: 605389 - DNA, 19 bp, Mus musculus
  siRNA target sequence for Hs2st1 (NM_011828.2,711-729).
cacatctcttacttggatt

SEQ ID NO: 605390 - DNA, 19 bp, Mus musculus
  siRNA target sequence for Hs2st1 (NM_011828.2,716-734).
ctcttacttggattttgca

SEQ ID NO: 605391 - DNA, 19 bp, Mus musculus
  siRNA target sequence for Hs2st1 (NM_011828.2,793-811).
ggctagtttcctactatta

SEQ ID NO: 605392 - DNA, 19 bp, Mus musculus
  siRNA target sequence for Hs2st1 (NM_011828.2,831-849).
gattacagaccaggattaa

SEQ ID NO: 605393 - DNA, 19 bp, Mus musculus
  siRNA target sequence for Hs2st1 (NM_011828.2,995-1013).
catggaccaggctaagtct

SEQ ID NO: 605394 - DNA, 19 bp, Mus musculus
  siRNA target sequence for Hs2st1 (NM_011828.2,1006-1024).
ctaagtctaacctcattaa

SEQ ID NO: 605395 - DNA, 19 bp, Mus musculus
  siRNA target sequence for Hs2st1 (NM_011828.2,1012-1030).
ctaacctcattaatgagta

SEQ ID NO: 605396 - DNA, 19 bp, Mus musculus
  siRNA target sequence for Hs2st1 (NM_011828.2,1084-1102).
cagctttgccccgattctt

SEQ ID NO: 605397 - DNA, 19 bp, Mus musculus
  siRNA target sequence for Hs2st1 (NM_011828.2,1121-1139).
ctaccgtacaggaaagaaa

SEQ ID NO: 605398 - DNA, 19 bp, Mus musculus
  siRNA target sequence for Hs2st1 (NM_011828.2,1136-1154).
gaaatctcaccttaggaaa

SEQ ID NO: 605399 - DNA, 19 bp, Mus musculus
  siRNA target sequence for Hs2st1 (NM_011828.2,1317-1335).
cagaactttttctacgaaa

SEQ ID NO: 605400 - DNA, 19 bp, Mus musculus
  siRNA target sequence for Sth2 (NM_009286.1,731-749).
ggaagatcgggttactaat

SEQ ID NO: 605401 - DNA, 19 bp, Mus musculus
  siRNA target sequence for Chst8 (NM_175140.3,538-556).
caagttccaggtataaagt

SEQ ID NO: 605402 - DNA, 19 bp, Mus musculus
  siRNA target sequence for Chst8 (NM_175140.3,541-559).
gttccaggtataaagttca

SEQ ID NO: 605403 - DNA, 19 bp, Mus musculus
  siRNA target sequence for Chst8 (NM_175140.3,586-604).
gatagccacttgaggatat

SEQ ID NO: 605404 - DNA, 19 bp, Mus musculus
  siRNA target sequence for Chst8 (NM_175140.3,729-747).
gcggagactgctcatcaaa

SEQ ID NO: 605405 - DNA, 19 bp, Mus musculus
  siRNA target sequence for Chst8 (NM_175140.3,734-752).
gactgctcatcaaaaagat

SEQ ID NO: 605406 - DNA, 19 bp, Mus musculus
  siRNA target sequence for Chst8 (NM_175140.3,785-803).
cgtccgaaacctttatcca

SEQ ID NO: 605407 - DNA, 19 bp, Mus musculus
  siRNA target sequence for Chst8 (NM_175140.3,877-895).
cgagaagcctgcgctaaat

SEQ ID NO: 605408 - DNA, 19 bp, Mus musculus
  siRNA target sequence for Chst8 (NM_175140.3,878-896).
gagaagcctgcgctaaata

SEQ ID NO: 605409 - DNA, 19 bp, Mus musculus
  siRNA target sequence for Chst8 (NM_175140.3,880-898).
gaagcctgcgctaaataca

SEQ ID NO: 605410 - DNA, 19 bp, Mus musculus
  siRNA target sequence for Chst8 (NM_175140.3,1043-1061).
cctcatccacggcagatat

SEQ ID NO: 605411 - DNA, 19 bp, Mus musculus
  siRNA target sequence for Chst8 (NM_175140.3,1046-1064).
catccacggcagatatcca

SEQ ID NO: 605412 - DNA, 19 bp, Mus musculus
  siRNA target sequence for Chst8 (NM_175140.3,1093-1111).
cttaagcgcctggatactt

SEQ ID NO: 605413 - DNA, 19 bp, Mus musculus
  siRNA target sequence for Chst8 (NM_175140.3,1196-1214).
ctttccgagacaagtttga

SEQ ID NO: 605414 - DNA, 19 bp, Mus musculus
  siRNA target sequence for Chst8 (NM_175140.3,1406-1424).
cctgcctcatcgactatga

SEQ ID NO: 605415 - DNA, 19 bp, Mus musculus
  siRNA target sequence for Chst8 (NM_175140.3,1409-1427).
gcctcatcgactatgactt

SEQ ID NO: 605416 - DNA, 19 bp, Mus musculus
  siRNA target sequence for Chst8 (NM_175140.3,1540-1558).
cggaccacatcgagaatca

SEQ ID NO: 605417 - DNA, 19 bp, Mus musculus
  siRNA target sequence for Chst8 (NM_175140.3,1550-1568).
cgagaatcacccatcagta

SEQ ID NO: 605418 - DNA, 19 bp, Mus musculus
  siRNA target sequence for Chst8 (NM_175140.3,1600-1618).
cgaacctacgacttctact

SEQ ID NO: 605419 - DNA, 19 bp, Mus musculus
  siRNA target sequence for Chst8 (NM_175140.3,1609-1627).
gacttctactacatggatt

SEQ ID NO: 605420 - DNA, 19 bp, Mus musculus
  siRNA target sequence for Chst8 (NM_175140.3,1624-1642).
gattacctgatgttcaact

SEQ ID NO: 605421 - DNA, 19 bp, Mus musculus
  siRNA target sequence for Hs3st3b (NM_018805.1,458-476).
ctgctcttcgccatgcttt

SEQ ID NO: 605422 - DNA, 19 bp, Mus musculus
  siRNA target sequence for Hs3st3b (NM_018805.1,647-665).
ctggctgcaggcaaggata

SEQ ID NO: 605423 - DNA, 19 bp, Mus musculus
  siRNA target sequence for Hs3st3b (NM_018805.1,650-668).
gctgcaggcaaggataaga

SEQ ID NO: 605424 - DNA, 19 bp, Mus musculus
  siRNA target sequence for Gcst (NM_016922.2,573-591).
gtcaacctcggcgagatat

SEQ ID NO: 605425 - DNA, 19 bp, Mus musculus
  siRNA target sequence for Gcst (NM_016922.2,579-597).
ctcggcgagatattgtgtt

SEQ ID NO: 605426 - DNA, 19 bp, Mus musculus
  siRNA target sequence for Gcst (NM_016922.2,582-600).
ggcgagatattgtgttcat

SEQ ID NO: 605427 - DNA, 19 bp, Mus musculus
  siRNA target sequence for Gcst (NM_016922.2,584-602).
cgagatattgtgttcatga

SEQ ID NO: 605428 - DNA, 19 bp, Mus musculus
  siRNA target sequence for Gcst (NM_016922.2,703-721).
ccactacccgtcgtacttt

SEQ ID NO: 605429 - DNA, 19 bp, Mus musculus
  siRNA target sequence for Gcst (NM_016922.2,749-767).
cctggggcgtgcttcaaca

SEQ ID NO: 605430 - DNA, 19 bp, Mus musculus
  siRNA target sequence for Gcst (NM_016922.2,752-770).
ggggcgtgcttcaacatca

SEQ ID NO: 605431 - DNA, 19 bp, Mus musculus
  siRNA target sequence for Gcst (NM_016922.2,753-771).
gggcgtgcttcaacatcat

SEQ ID NO: 605432 - DNA, 19 bp, Mus musculus
  siRNA target sequence for Gcst (NM_016922.2,1015-1033).
cttcgatctgggctatgat

SEQ ID NO: 605433 - DNA, 19 bp, Mus musculus
  siRNA target sequence for Gcst (NM_016922.2,1018-1036).
cgatctgggctatgatagt

SEQ ID NO: 605434 - DNA, 19 bp, Mus musculus
  siRNA target sequence for Gcst (NM_016922.2,1166-1184).
ctggaggacgtgctgtatt

SEQ ID NO: 605435 - DNA, 19 bp, Mus musculus
  siRNA target sequence for Gcst (NM_016922.2,1305-1323).
ggcgaaaggtggaagcttt

SEQ ID NO: 605436 - DNA, 19 bp, Mus musculus
  siRNA target sequence for 2810007J24Rik (NM_175250.3,312-330).
cattccctacagtttacta

SEQ ID NO: 605437 - DNA, 19 bp, Mus musculus
  siRNA target sequence for 2810007J24Rik (NM_175250.3,323-341).
gtttactactcacaagaaa

SEQ ID NO: 605438 - DNA, 19 bp, Mus musculus
  siRNA target sequence for 2810007J24Rik (NM_175250.3,328-346).
ctactcacaagaaatcata

SEQ ID NO: 605439 - DNA, 19 bp, Mus musculus
  siRNA target sequence for 2810007J24Rik (NM_175250.3,385-403).
cacgatcatagtgacttat

SEQ ID NO: 605440 - DNA, 19 bp, Mus musculus
  siRNA target sequence for 2810007J24Rik (NM_175250.3,464-482).
cccacatgggtccaatcta

SEQ ID NO: 605441 - DNA, 19 bp, Mus musculus
  siRNA target sequence for 2810007J24Rik (NM_175250.3,466-484).
cacatgggtccaatctaca

SEQ ID NO: 605442 - DNA, 19 bp, Mus musculus
  siRNA target sequence for 2810007J24Rik (NM_175250.3,468-486).
catgggtccaatctacaat

SEQ ID NO: 605443 - DNA, 19 bp, Mus musculus
  siRNA target sequence for 2810007J24Rik (NM_175250.3,496-514).
gcgcacaccatggatagaa

SEQ ID NO: 605444 - DNA, 19 bp, Mus musculus
  siRNA target sequence for 2810007J24Rik (NM_175250.3,497-515).
cgcacaccatggatagaat

SEQ ID NO: 605445 - DNA, 19 bp, Mus musculus
  siRNA target sequence for 2810007J24Rik (NM_175250.3,499-517).
cacaccatggatagaattt

SEQ ID NO: 605446 - DNA, 19 bp, Mus musculus
  siRNA target sequence for 2810007J24Rik (NM_175250.3,574-592).
ccttcccatccaactattt

SEQ ID NO: 605447 - DNA, 19 bp, Mus musculus
  siRNA target sequence for 2810007J24Rik (NM_175250.3,663-681).
caggctatcactacttcaa

SEQ ID NO: 605448 - DNA, 19 bp, Mus musculus
  siRNA target sequence for 2810007J24Rik (NM_175250.3,704-722).
caagtgccatggaaaatat

SEQ ID NO: 605449 - DNA, 19 bp, Mus musculus
  siRNA target sequence for 2810007J24Rik (NM_175250.3,739-757).
gcaaggaaaatcatatttt

SEQ ID NO: 605450 - DNA, 19 bp, Mus musculus
  siRNA target sequence for 2810007J24Rik (NM_175250.3,900-918).
caggggaactggagttagt

SEQ ID NO: 605451 - DNA, 19 bp, Mus musculus
  siRNA target sequence for 2810007J24Rik (NM_175250.3,963-981).
ctcagtcatgtctctcaaa

SEQ ID NO: 605452 - DNA, 19 bp, Mus musculus
  siRNA target sequence for 2810007J24Rik (NM_175250.3,969-987).
catgtctctcaaatataga

SEQ ID NO: 605453 - DNA, 19 bp, Mus musculus
  siRNA target sequence for 2810007J24Rik (NM_175250.3,1100-1118).
cctcaagagctcttttcat

SEQ ID NO: 605454 - DNA, 19 bp, Mus musculus
  siRNA target sequence for 4631426J05Rik (NM_029935.2,702-720).
gacagtaagcagatgaact

SEQ ID NO: 605455 - DNA, 19 bp, Mus musculus
  siRNA target sequence for 4631426J05Rik (NM_029935.2,742-760).
ggactgagggcaatgaaaa

SEQ ID NO: 605456 - DNA, 19 bp, Mus musculus
  siRNA target sequence for 4631426J05Rik (NM_029935.2,799-817).
gtagcctggtctttggatt

SEQ ID NO: 605457 - DNA, 19 bp, Mus musculus
  siRNA target sequence for 4631426J05Rik (NM_029935.2,806-824).
ggtctttggattgataata

SEQ ID NO: 605458 - DNA, 19 bp, Mus musculus
  siRNA target sequence for 4631426J05Rik (NM_029935.2,963-981).
cactaccagccttctgtaa

SEQ ID NO: 605459 - DNA, 19 bp, Mus musculus
  siRNA target sequence for 4631426J05Rik (NM_029935.2,965-983).
ctaccagccttctgtaaat

SEQ ID NO: 605460 - DNA, 19 bp, Mus musculus
  siRNA target sequence for 4631426J05Rik (NM_029935.2,1001-1019).
ggactatccgagcattaaa

SEQ ID NO: 605461 - DNA, 19 bp, Mus musculus
  siRNA target sequence for 4631426J05Rik (NM_029935.2,1008-1026).
ccgagcattaaactgatta

SEQ ID NO: 605462 - DNA, 19 bp, Mus musculus
  siRNA target sequence for 4631426J05Rik (NM_029935.2,1009-1027).
cgagcattaaactgattat

SEQ ID NO: 605463 - DNA, 19 bp, Mus musculus
  siRNA target sequence for 4631426J05Rik (NM_029935.2,1012-1030).
gcattaaactgattatcga

SEQ ID NO: 605464 - DNA, 19 bp, Mus musculus
  siRNA target sequence for 4631426J05Rik (NM_029935.2,1063-1081).
ggcagctcccggacttaca

SEQ ID NO: 605465 - DNA, 19 bp, Mus musculus
  siRNA target sequence for 4631426J05Rik (NM_029935.2,1064-1082).
gcagctcccggacttacaa

SEQ ID NO: 605466 - DNA, 19 bp, Mus musculus
  siRNA target sequence for 4631426J05Rik (NM_029935.2,1072-1090).
cggacttacaagatctcaa

SEQ ID NO: 605467 - DNA, 19 bp, Mus musculus
  siRNA target sequence for 4631426J05Rik (NM_029935.2,1095-1113).
caagagttgcatatgtttt

SEQ ID NO: 605468 - DNA, 19 bp, Mus musculus
  siRNA target sequence for 4631426J05Rik (NM_029935.2,1100-1118).
gttgcatatgttttctgta

SEQ ID NO: 605469 - DNA, 19 bp, Mus musculus
  siRNA target sequence for 4631426J05Rik (NM_029935.2,1194-1212).
ccctacctgaccaattcct

SEQ ID NO: 605470 - DNA, 19 bp, Mus musculus
  siRNA target sequence for 4631426J05Rik (NM_029935.2,1195-1213).
cctacctgaccaattccta

SEQ ID NO: 605471 - DNA, 19 bp, Mus musculus
  siRNA target sequence for 4631426J05Rik (NM_029935.2,1229-1247).
gcggttccgctctaccttt

SEQ ID NO: 605472 - DNA, 19 bp, Mus musculus
  siRNA target sequence for 4631426J05Rik (NM_029935.2,1248-1266).
gacgctctgcgcaaggttt

SEQ ID NO: 605473 - DNA, 19 bp, Mus musculus
  siRNA target sequence for 4631426J05Rik (NM_029935.2,1251-1269).
gctctgcgcaaggttttct

SEQ ID NO: 605474 - DNA, 19 bp, Mus musculus
  siRNA target sequence for 4631426J05Rik (NM_029935.2,1386-1404).
catccagaagtgaaattct

SEQ ID NO: 605475 - DNA, 19 bp, Mus musculus
  siRNA target sequence for 4631426J05Rik (NM_029935.2,1432-1450).
cccggaagcgctttggaat

SEQ ID NO: 605476 - DNA, 19 bp, Mus musculus
  siRNA target sequence for 4631426J05Rik (NM_029935.2,1433-1451).
ccggaagcgctttggaatt

SEQ ID NO: 605477 - DNA, 19 bp, Mus musculus
  siRNA target sequence for 4631426J05Rik (NM_029935.2,1609-1627).
ctacaatgtgggataacaa

SEQ ID NO: 605478 - DNA, 19 bp, Mus musculus
  siRNA target sequence for 4631426J05Rik (NM_029935.2,1672-1690).
cattcctgacccaagactt

SEQ ID NO: 605479 - DNA, 19 bp, Mus musculus
  siRNA target sequence for 4631426J05Rik (NM_029935.2,1710-1728).
gaagccaagctcattgtta

SEQ ID NO: 605480 - DNA, 19 bp, Mus musculus
  siRNA target sequence for 4631426J05Rik (NM_029935.2,1769-1787).
ctacttcgcaagttccaat

SEQ ID NO: 605481 - DNA, 19 bp, Mus musculus
  siRNA target sequence for 4631426J05Rik (NM_029935.2,1772-1790).
cttcgcaagttccaataaa

SEQ ID NO: 605482 - DNA, 19 bp, Mus musculus
  siRNA target sequence for 4631426J05Rik (NM_029935.2,1830-1848).
cagctgtttgaaaattgca

SEQ ID NO: 605483 - DNA, 19 bp, Mus musculus
  siRNA target sequence for 4631426J05Rik (NM_029935.2,1846-1864).
gcatgctggattattcact

SEQ ID NO: 605484 - DNA, 19 bp, Mus musculus
  siRNA target sequence for 4631426J05Rik (NM_029935.2,1994-2012).
ggaagaccacgcatccaat

SEQ ID NO: 605485 - DNA, 19 bp, Mus musculus
  siRNA target sequence for 4631426J05Rik (NM_029935.2,1998-2016).
gaccacgcatccaatgtca

SEQ ID NO: 605486 - DNA, 19 bp, Mus musculus
  siRNA target sequence for 4631426J05Rik (NM_029935.2,2003-2021).
cgcatccaatgtcaagtat

SEQ ID NO: 605487 - DNA, 19 bp, Mus musculus
  siRNA target sequence for 4631426J05Rik (NM_029935.2,2147-2165).
gcccatcacccagaagatt

SEQ ID NO: 605488 - DNA, 19 bp, Mus musculus
  siRNA target sequence for 4631426J05Rik (NM_029935.2,2210-2228).
cttggatgacgaagcattt

SEQ ID NO: 605489 - DNA, 19 bp, Mus musculus
  siRNA target sequence for A830061E14 (NM_177575.2,130-148).
gcgcaagcggccagaaact

SEQ ID NO: 605490 - DNA, 19 bp, Mus musculus
  siRNA target sequence for A830061E14 (NM_177575.2,131-149).
cgcaagcggccagaaactt

SEQ ID NO: 605491 - DNA, 19 bp, Mus musculus
  siRNA target sequence for A830061E14 (NM_177575.2,133-151).
caagcggccagaaacttct

SEQ ID NO: 605492 - DNA, 19 bp, Mus musculus
  siRNA target sequence for A830061E14 (NM_177575.2,243-261).
ctctccggatccaatcact

SEQ ID NO: 605493 - DNA, 19 bp, Mus musculus
  siRNA target sequence for A830061E14 (NM_177575.2,434-452).
cagtgtcggtgtgttctta

SEQ ID NO: 605494 - DNA, 19 bp, Mus musculus
  siRNA target sequence for A830061E14 (NM_177575.2,479-497).
gatttgccccagaggtaat

SEQ ID NO: 605495 - DNA, 19 bp, Mus musculus
  siRNA target sequence for A830061E14 (NM_177575.2,488-506).
cagaggtaatgctctaagt

SEQ ID NO: 605496 - DNA, 19 bp, Mus musculus
  siRNA target sequence for A830061E14 (NM_177575.2,490-508).
gaggtaatgctctaagtaa

SEQ ID NO: 605497 - DNA, 19 bp, Mus musculus
  siRNA target sequence for A830061E14 (NM_177575.2,492-510).
ggtaatgctctaagtaaga

SEQ ID NO: 605498 - DNA, 19 bp, Mus musculus
  siRNA target sequence for BC030477 (NM_177618.3,443-461).
gtagtcctgacctactact

SEQ ID NO: 605499 - DNA, 19 bp, Mus musculus
  siRNA target sequence for BC030477 (NM_177618.3,446-464).
gtcctgacctactacttga

SEQ ID NO: 605500 - DNA, 19 bp, Mus musculus
  siRNA target sequence for BC030477 (NM_177618.3,735-753).
ctgtgctgagcggtcttat

SEQ ID NO: 605501 - DNA, 19 bp, Mus musculus
  siRNA target sequence for BC030477 (NM_177618.3,737-755).
gtgctgagcggtcttatgt

SEQ ID NO: 605502 - DNA, 19 bp, Mus musculus
  siRNA target sequence for BC030477 (NM_177618.3,739-757).
gctgagcggtcttatgtct

SEQ ID NO: 605503 - DNA, 19 bp, Mus musculus
  siRNA target sequence for BC030477 (NM_177618.3,740-758).
ctgagcggtcttatgtcta

SEQ ID NO: 605504 - DNA, 19 bp, Mus musculus
  siRNA target sequence for BC030477 (NM_177618.3,1023-1041).
ggagacgtgttctggattt

SEQ ID NO: 605505 - DNA, 19 bp, Mus musculus
  siRNA target sequence for BC030477 (NM_177618.3,1024-1042).
gagacgtgttctggatttt

SEQ ID NO: 605506 - DNA, 19 bp, Mus musculus
  siRNA target sequence for BC030477 (NM_177618.3,1074-1092).
ccgaggctgggattgctat

SEQ ID NO: 605507 - DNA, 19 bp, Mus musculus
  siRNA target sequence for BC030477 (NM_177618.3,1075-1093).
cgaggctgggattgctatt

SEQ ID NO: 605508 - DNA, 19 bp, Mus musculus
  siRNA target sequence for BC030477 (NM_177618.3,1321-1339).
cacgccactggcttctaca

SEQ ID NO: 605509 - DNA, 19 bp, Mus musculus
  siRNA target sequence for BC030477 (NM_177618.3,1442-1460).
gtggccggagggagattga

SEQ ID NO: 605510 - DNA, 19 bp, Mus musculus
  siRNA target sequence for BC030477 (NM_177618.3,1444-1462).
ggccggagggagattgaga

SEQ ID NO: 605511 - DNA, 19 bp, Mus musculus
  siRNA target sequence for BC030477 (NM_177618.3,1579-1597).
gaatggccggagtttgtga

SEQ ID NO: 605512 - DNA, 19 bp, Mus musculus
  siRNA target sequence for BC030477 (NM_177618.3,1585-1603).
ccggagtttgtgaatagct

SEQ ID NO: 605513 - DNA, 19 bp, Mus musculus
  siRNA target sequence for BC030477 (NM_177618.3,1586-1604).
cggagtttgtgaatagcta

SEQ ID NO: 605514 - DNA, 19 bp, Mus musculus
  siRNA target sequence for BC030477 (NM_177618.3,1587-1605).
ggagtttgtgaatagctat

SEQ ID NO: 605515 - DNA, 19 bp, Mus musculus
  siRNA target sequence for BC030477 (NM_177618.3,1629-1647).
cctagactggctcaagtat

SEQ ID NO: 605516 - DNA, 19 bp, Mus musculus
  siRNA target sequence for Chst1 (NM_023850.1,176-194).
ctttcaccgccaagtcttt

SEQ ID NO: 605517 - DNA, 19 bp, Mus musculus
  siRNA target sequence for Chst1 (NM_023850.1,377-395).
cgctctatcacgtccaaaa

SEQ ID NO: 605518 - DNA, 19 bp, Mus musculus
  siRNA target sequence for Chst1 (NM_023850.1,379-397).
ctctatcacgtccaaaaca

SEQ ID NO: 605519 - DNA, 19 bp, Mus musculus
  siRNA target sequence for Chst1 (NM_023850.1,468-486).
cctgctgaggagcctttat

SEQ ID NO: 605520 - DNA, 19 bp, Mus musculus
  siRNA target sequence for Chst1 (NM_023850.1,476-494).
ggagcctttatgattgtga

SEQ ID NO: 605521 - DNA, 19 bp, Mus musculus
  siRNA target sequence for Chst1 (NM_023850.1,728-746).
gggtgcccgaggtgaatga

SEQ ID NO: 605522 - DNA, 19 bp, Mus musculus
  siRNA target sequence for Chst1 (NM_023850.1,990-1008).
gtacatgctggtacgttat

SEQ ID NO: 605523 - DNA, 19 bp, Mus musculus
  siRNA target sequence for Chst1 (NM_023850.1,1012-1030).
gacctggccagaaatccaa

SEQ ID NO: 605524 - DNA, 19 bp, Mus musculus
  siRNA target sequence for Chst1 (NM_023850.1,1040-1058).
cagaagagatctacgaatt

SEQ ID NO: 605525 - DNA, 19 bp, Mus musculus
  siRNA target sequence for Chst1 (NM_023850.1,1124-1142).
ctttgggcaagcacaaata

SEQ ID NO: 605526 - DNA, 19 bp, Mus musculus
  siRNA target sequence for Chst1 (NM_023850.1,1244-1262).
ctcagctgggctacaagat

SEQ ID NO: 605527 - DNA, 19 bp, Mus musculus
  siRNA target sequence for Chst1 (NM_023850.1,1315-1333).
cgtgacttccgcccttttt

SEQ ID NO: 605528 - DNA, 19 bp, Mus musculus
  siRNA target sequence for Chst10 (NM_145142.1,283-301).
gcatgcttttgggtgattt

SEQ ID NO: 605529 - DNA, 19 bp, Mus musculus
  siRNA target sequence for Chst10 (NM_145142.1,284-302).
catgcttttgggtgatttt

SEQ ID NO: 605530 - DNA, 19 bp, Mus musculus
  siRNA target sequence for Chst10 (NM_145142.1,330-348).
cacgttgacctttaaggat

SEQ ID NO: 605531 - DNA, 19 bp, Mus musculus
  siRNA target sequence for Chst10 (NM_145142.1,345-363).
ggatccggatgggtatagt

SEQ ID NO: 605532 - DNA, 19 bp, Mus musculus
  siRNA target sequence for Chst10 (NM_145142.1,362-380).
gtgccaaacaggagtttgt

SEQ ID NO: 605533 - DNA, 19 bp, Mus musculus
  siRNA target sequence for Chst10 (NM_145142.1,576-594).
gttcgtcctggatcgaata

SEQ ID NO: 605534 - DNA, 19 bp, Mus musculus
  siRNA target sequence for Chst10 (NM_145142.1,579-597).
cgtcctggatcgaatattt

SEQ ID NO: 605535 - DNA, 19 bp, Mus musculus
  siRNA target sequence for Chst10 (NM_145142.1,583-601).
ctggatcgaatatttgtct

SEQ ID NO: 605536 - DNA, 19 bp, Mus musculus
  siRNA target sequence for Chst10 (NM_145142.1,756-774).
ctcttccttcagcaaaata

SEQ ID NO: 605537 - DNA, 19 bp, Mus musculus
  siRNA target sequence for Chst10 (NM_145142.1,776-794).
gaattcagaagcgattgaa

SEQ ID NO: 605538 - DNA, 19 bp, Mus musculus
  siRNA target sequence for Chst10 (NM_145142.1,787-805).
cgattgaaaacatacttca

SEQ ID NO: 605539 - DNA, 19 bp, Mus musculus
  siRNA target sequence for Chst10 (NM_145142.1,821-839).
gagatccctttgaaagact

SEQ ID NO: 605540 - DNA, 19 bp, Mus musculus
  siRNA target sequence for Chst10 (NM_145142.1,836-854).
gactgatttctgcctttaa

SEQ ID NO: 605541 - DNA, 19 bp, Mus musculus
  siRNA target sequence for Chst10 (NM_145142.1,845-863).
ctgcctttaaggataagtt

SEQ ID NO: 605542 - DNA, 19 bp, Mus musculus
  siRNA target sequence for Chst10 (NM_145142.1,855-873).
ggataagtttgttcacaat

SEQ ID NO: 605543 - DNA, 19 bp, Mus musculus
  siRNA target sequence for Chst10 (NM_145142.1,903-921).
gatagccccaggcattatt

SEQ ID NO: 605544 - DNA, 19 bp, Mus musculus
  siRNA target sequence for Chst10 (NM_145142.1,980-998).
gctacctgggtgatccaaa

SEQ ID NO: 605545 - DNA, 19 bp, Mus musculus
  siRNA target sequence for Chst10 (NM_145142.1,1043-1061).
gggtgacctacgttgaact

SEQ ID NO: 605546 - DNA, 19 bp, Mus musculus
  siRNA target sequence for Chst10 (NM_145142.1,1064-1082).
gtgcgccctgtgagatcaa

SEQ ID NO: 605547 - DNA, 19 bp, Mus musculus
  siRNA target sequence for Chst10 (NM_145142.1,1066-1084).
gcgccctgtgagatcaagt

SEQ ID NO: 605548 - DNA, 19 bp, Mus musculus
  siRNA target sequence for Chst10 (NM_145142.1,1067-1085).
cgccctgtgagatcaagta

SEQ ID NO: 605549 - DNA, 19 bp, Mus musculus
  siRNA target sequence for Chst10 (NM_145142.1,1183-1201).
ccgggcatcaccatgtaca

SEQ ID NO: 605550 - DNA, 19 bp, Mus musculus
  siRNA target sequence for Chst10 (NM_145142.1,1184-1202).
cgggcatcaccatgtacaa

SEQ ID NO: 605551 - DNA, 19 bp, Mus musculus
  siRNA target sequence for Chst11 (NM_021439.1,395-413).
gaagtgatgaggatgaaca

SEQ ID NO: 605552 - DNA, 19 bp, Mus musculus
  siRNA target sequence for Chst11 (NM_021439.1,441-459).
gcttcggatcctttatctt

SEQ ID NO: 605553 - DNA, 19 bp, Mus musculus
  siRNA target sequence for Chst11 (NM_021439.1,460-478).
ggtcatcttctatttccaa

SEQ ID NO: 605554 - DNA, 19 bp, Mus musculus
  siRNA target sequence for Chst11 (NM_021439.1,889-907).
gatcaaccaccgcttgaaa

SEQ ID NO: 605555 - DNA, 19 bp, Mus musculus
  siRNA target sequence for Chst11 (NM_021439.1,899-917).
cgcttgaaaagctacatga

SEQ ID NO: 605556 - DNA, 19 bp, Mus musculus
  siRNA target sequence for Chst11 (NM_021439.1,959-977).
gcctaccgcaacaagttca

SEQ ID NO: 605557 - DNA, 19 bp, Mus musculus
  siRNA target sequence for Chst11 (NM_021439.1,1007-1025).
cgctacggcaccaagatca

SEQ ID NO: 605558 - DNA, 19 bp, Mus musculus
  siRNA target sequence for Chst11 (NM_021439.1,1065-1083).
gcaagggggacgatgtcaa

SEQ ID NO: 605559 - DNA, 19 bp, Mus musculus
  siRNA target sequence for Chst11 (NM_021439.1,1195-1213).
cgacctcgtgggcaagtat

SEQ ID NO: 605560 - DNA, 19 bp, Mus musculus
  siRNA target sequence for Chst11 (NM_021439.1,1199-1217).
ctcgtgggcaagtatgaga

SEQ ID NO: 605561 - DNA, 19 bp, Mus musculus
  siRNA target sequence for Chst11 (NM_021439.1,1359-1377).
cacagctgtacgaagtcta

SEQ ID NO: 605562 - DNA, 19 bp, Mus musculus
  siRNA target sequence for Chst11 (NM_021439.1,1363-1381).
gctgtacgaagtctacaaa

SEQ ID NO: 605563 - DNA, 19 bp, Mus musculus
  siRNA target sequence for Chst11 (NM_021439.1,1382-1400).
ctggactttttaatgttca

SEQ ID NO: 605564 - DNA, 19 bp, Mus musculus
  siRNA target sequence for Chst11 (NM_021439.1,1385-1403).
gactttttaatgttcaact

SEQ ID NO: 605565 - DNA, 19 bp, Mus musculus
  siRNA target sequence for Chst2 (NM_018763.1,919-937).
gtggcacgtgtggcaaaaa

SEQ ID NO: 605566 - DNA, 19 bp, Mus musculus
  siRNA target sequence for Chst2 (NM_018763.1,921-939).
ggcacgtgtggcaaaaact

SEQ ID NO: 605567 - DNA, 19 bp, Mus musculus
  siRNA target sequence for Chst2 (NM_018763.1,1005-1023).
gcgatctttcggttttcca

SEQ ID NO: 605568 - DNA, 19 bp, Mus musculus
  siRNA target sequence for Chst2 (NM_018763.1,1154-1172).
gacgaccgcgtgtgcaaaa

SEQ ID NO: 605569 - DNA, 19 bp, Mus musculus
  siRNA target sequence for Chst2 (NM_018763.1,1157-1175).
gaccgcgtgtgcaaaaagt

SEQ ID NO: 605570 - DNA, 19 bp, Mus musculus
  siRNA target sequence for Chst2 (NM_018763.1,1613-1631).
gtgggagaccccgttaaga

SEQ ID NO: 605571 - DNA, 19 bp, Mus musculus
  siRNA target sequence for Chst2 (NM_018763.1,1630-1648).
gaccctacggagggtatat

SEQ ID NO: 605572 - DNA, 19 bp, Mus musculus
  siRNA target sequence for Chst2 (NM_018763.1,1632-1650).
ccctacggagggtatatga

SEQ ID NO: 605573 - DNA, 19 bp, Mus musculus
  siRNA target sequence for Chst2 (NM_018763.1,1634-1652).
ctacggagggtatatgact

SEQ ID NO: 605574 - DNA, 19 bp, Mus musculus
  siRNA target sequence for Chst2 (NM_018763.1,1638-1656).
ggagggtatatgactttgt

SEQ ID NO: 605575 - DNA, 19 bp, Mus musculus
  siRNA target sequence for Chst2 (NM_018763.1,1808-1826).
caggtggaggagttttgct

SEQ ID NO: 605576 - DNA, 19 bp, Mus musculus
  siRNA target sequence for Chst2 (NM_018763.1,1847-1865).
ggctatgagcgggttaaca

SEQ ID NO: 605577 - DNA, 19 bp, Mus musculus
  siRNA target sequence for Chst2 (NM_018763.1,1849-1867).
ctatgagcgggttaacagt

SEQ ID NO: 605578 - DNA, 19 bp, Mus musculus
  siRNA target sequence for Chst3 (NM_016803.2,691-709).
gacccagccctgctcttat

SEQ ID NO: 605579 - DNA, 19 bp, Mus musculus
  siRNA target sequence for Chst3 (NM_016803.2,739-757).
gagttggattccacctttt

SEQ ID NO: 605580 - DNA, 19 bp, Mus musculus
  siRNA target sequence for Chst3 (NM_016803.2,914-932).
cgttcgtgggcgagttctt

SEQ ID NO: 605581 - DNA, 19 bp, Mus musculus
  siRNA target sequence for Chst3 (NM_016803.2,1051-1069).
ctcaagcagttgttgctat

SEQ ID NO: 605582 - DNA, 19 bp, Mus musculus
  siRNA target sequence for Chst3 (NM_016803.2,1178-1196).
gcacacccttcgtcaagaa

SEQ ID NO: 605583 - DNA, 19 bp, Mus musculus
  siRNA target sequence for Chst3 (NM_016803.2,1350-1368).
gttggatctacgagtcatt

SEQ ID NO: 605584 - DNA, 19 bp, Mus musculus
  siRNA target sequence for Chst3 (NM_016803.2,1413-1431).
ggcctttgcgggcaagtat

SEQ ID NO: 605585 - DNA, 19 bp, Mus musculus
  siRNA target sequence for Chst3 (NM_016803.2,1556-1574).
ggctgcgcggtcgttacat

SEQ ID NO: 605586 - DNA, 19 bp, Mus musculus
  siRNA target sequence for Chst3 (NM_016803.2,1700-1718).
gcgacagcagcgatgtcta

SEQ ID NO: 605587 - DNA, 19 bp, Mus musculus
  siRNA target sequence for Chst5 (NM_019950.1,327-345).
ggcacgtctgggatacgtt

SEQ ID NO: 605588 - DNA, 19 bp, Mus musculus
  siRNA target sequence for Chst5 (NM_019950.1,411-429).
gcgacatggacgtatttga

SEQ ID NO: 605589 - DNA, 19 bp, Mus musculus
  siRNA target sequence for Chst5 (NM_019950.1,412-430).
cgacatggacgtatttgat

SEQ ID NO: 605590 - DNA, 19 bp, Mus musculus
  siRNA target sequence for Chst5 (NM_019950.1,537-555).
gcagcgaggaggtgtgtaa

SEQ ID NO: 605591 - DNA, 19 bp, Mus musculus
  siRNA target sequence for Chst5 (NM_019950.1,951-969).
ccgtaatccgtgaactcta

SEQ ID NO: 605592 - DNA, 19 bp, Mus musculus
  siRNA target sequence for Chst5 (NM_019950.1,952-970).
cgtaatccgtgaactctat

SEQ ID NO: 605593 - DNA, 19 bp, Mus musculus
  siRNA target sequence for Chst5 (NM_019950.1,1274-1292).
gagaagcaaccggaatctt

SEQ ID NO: 605594 - DNA, 19 bp, Mus musculus
  siRNA target sequence for Chst7 (NM_021715.1,203-221).
gctgtacacgcttttgcta

SEQ ID NO: 605595 - DNA, 19 bp, Mus musculus
  siRNA target sequence for Chst7 (NM_021715.1,209-227).
cacgcttttgctacttctt

SEQ ID NO: 605596 - DNA, 19 bp, Mus musculus
  siRNA target sequence for Chst7 (NM_021715.1,211-229).
cgcttttgctacttcttgt

SEQ ID NO: 605597 - DNA, 19 bp, Mus musculus
  siRNA target sequence for Chst7 (NM_021715.1,437-455).
ggaaaagcaacacatctat

SEQ ID NO: 605598 - DNA, 19 bp, Mus musculus
  siRNA target sequence for Chst7 (NM_021715.1,484-502).
ccttcttgggcgaactctt

SEQ ID NO: 605599 - DNA, 19 bp, Mus musculus
  siRNA target sequence for Chst7 (NM_021715.1,510-528).
cacccggacgttttctact

SEQ ID NO: 605600 - DNA, 19 bp, Mus musculus
  siRNA target sequence for Chst7 (NM_021715.1,513-531).
ccggacgttttctacttgt

SEQ ID NO: 605601 - DNA, 19 bp, Mus musculus
  siRNA target sequence for Chst7 (NM_021715.1,514-532).
cggacgttttctacttgta

SEQ ID NO: 605602 - DNA, 19 bp, Mus musculus
  siRNA target sequence for Chst7 (NM_021715.1,584-602).
cctgcagggcgcactaaga

SEQ ID NO: 605603 - DNA, 19 bp, Mus musculus
  siRNA target sequence for Chst7 (NM_021715.1,872-890).
cccggtggtggtcatcaaa

SEQ ID NO: 605604 - DNA, 19 bp, Mus musculus
  siRNA target sequence for Chst7 (NM_021715.1,874-892).
cggtggtggtcatcaaaga

SEQ ID NO: 605605 - DNA, 19 bp, Mus musculus
  siRNA target sequence for Chst7 (NM_021715.1,936-954).
gacccaggcctcaacctaa

SEQ ID NO: 605606 - DNA, 19 bp, Mus musculus
  siRNA target sequence for Chst7 (NM_021715.1,940-958).
caggcctcaacctaaaggt

SEQ ID NO: 605607 - DNA, 19 bp, Mus musculus
  siRNA target sequence for Chst7 (NM_021715.1,1018-1036).
gactgctgcgcgaaagcat

SEQ ID NO: 605608 - DNA, 19 bp, Mus musculus
  siRNA target sequence for Chst7 (NM_021715.1,1141-1159).
cgccacgcgctgatttctt

SEQ ID NO: 605609 - DNA, 19 bp, Mus musculus
  siRNA target sequence for Chst7 (NM_021715.1,1143-1161).
ccacgcgctgatttcttct

SEQ ID NO: 605610 - DNA, 19 bp, Mus musculus
  siRNA target sequence for Chst7 (NM_021715.1,1144-1162).
cacgcgctgatttcttctt

SEQ ID NO: 605611 - DNA, 19 bp, Mus musculus
  siRNA target sequence for Chst7 (NM_021715.1,1195-1213).
ggcttcgcgacctgctatt

SEQ ID NO: 605612 - DNA, 19 bp, Mus musculus
  siRNA target sequence for Chst7 (NM_021715.1,1347-1365).
gccttcgcattcaatatga

SEQ ID NO: 605613 - DNA, 19 bp, Mus musculus
  siRNA target sequence for Hs3st1 (NM_010474.1,464-482).
ggcacagcatccaatggtt

SEQ ID NO: 605614 - DNA, 19 bp, Mus musculus
  siRNA target sequence for Hs3st1 (NM_010474.1,582-600).
ctgaaaacgaggtccattt

SEQ ID NO: 605615 - DNA, 19 bp, Mus musculus
  siRNA target sequence for Hs3st1 (NM_010474.1,691-709).
gacacccgcctatttcact

SEQ ID NO: 605616 - DNA, 19 bp, Mus musculus
  siRNA target sequence for Hs3st1 (NM_010474.1,750-768).
ccatccgcctgctgcttat

SEQ ID NO: 605617 - DNA, 19 bp, Mus musculus
  siRNA target sequence for Hs3st1 (NM_010474.1,935-953).
ctgaactggctgcgttttt

SEQ ID NO: 605618 - DNA, 19 bp, Mus musculus
  siRNA target sequence for Hs3st1 (NM_010474.1,1065-1083).
cgaacttctactttaacaa

SEQ ID NO: 605619 - DNA, 19 bp, Mus musculus
  siRNA target sequence for Hs3st1 (NM_010474.1,1159-1177).
ccaggtggatcccaaacta

SEQ ID NO: 605620 - DNA, 19 bp, Mus musculus
  siRNA target sequence for Hs3st1 (NM_010474.1,1162-1180).
ggtggatcccaaactactt

SEQ ID NO: 605621 - DNA, 19 bp, Mus musculus
  siRNA target sequence for Hs3st1 (NM_010474.1,1165-1183).
ggatcccaaactacttgat

SEQ ID NO: 605622 - DNA, 19 bp, Mus musculus
  siRNA target sequence for Hs3st1 (NM_010474.1,1166-1184).
gatcccaaactacttgata

SEQ ID NO: 605623 - DNA, 19 bp, Mus musculus
  siRNA target sequence for Hs3st1 (NM_010474.1,1170-1188).
ccaaactacttgataaact

SEQ ID NO: 605624 - DNA, 19 bp, Mus musculus
  siRNA target sequence for Hs3st1 (NM_010474.1,1181-1199).
gataaactgcacgaatact

SEQ ID NO: 605625 - DNA, 19 bp, Mus musculus
  siRNA target sequence for Hs3st3a (NM_178870.2,1111-1129).
ggggaccctggccttactt

SEQ ID NO: 605626 - DNA, 19 bp, Mus musculus
  siRNA target sequence for Ndst2 (NM_010811.1,308-326).
cccttgggagactgtagta

SEQ ID NO: 605627 - DNA, 19 bp, Mus musculus
  siRNA target sequence for Ndst2 (NM_010811.1,464-482).
gtggccatcttggaatcta

SEQ ID NO: 605628 - DNA, 19 bp, Mus musculus
  siRNA target sequence for Ndst2 (NM_010811.1,476-494).
gaatctagtcgctttcgtt

SEQ ID NO: 605629 - DNA, 19 bp, Mus musculus
  siRNA target sequence for Ndst2 (NM_010811.1,549-567).
cccatggccgctatgtctt

SEQ ID NO: 605630 - DNA, 19 bp, Mus musculus
  siRNA target sequence for Ndst2 (NM_010811.1,554-572).
ggccgctatgtcttagtca

SEQ ID NO: 605631 - DNA, 19 bp, Mus musculus
  siRNA target sequence for Ndst2 (NM_010811.1,555-573).
gccgctatgtcttagtcat

SEQ ID NO: 605632 - DNA, 19 bp, Mus musculus
  siRNA target sequence for Ndst2 (NM_010811.1,563-581).
gtcttagtcatctatgaga

SEQ ID NO: 605633 - DNA, 19 bp, Mus musculus
  siRNA target sequence for Ndst2 (NM_010811.1,712-730).
gggctttccccttttccta

SEQ ID NO: 605634 - DNA, 19 bp, Mus musculus
  siRNA target sequence for Ndst2 (NM_010811.1,720-738).
cccttttcctacactcaaa

SEQ ID NO: 605635 - DNA, 19 bp, Mus musculus
  siRNA target sequence for Ndst2 (NM_010811.1,748-766).
ccgggactaccaagtgaat

SEQ ID NO: 605636 - DNA, 19 bp, Mus musculus
  siRNA target sequence for Ndst2 (NM_010811.1,752-770).
gactaccaagtgaatcctt

SEQ ID NO: 605637 - DNA, 19 bp, Mus musculus
  siRNA target sequence for Ndst2 (NM_010811.1,850-868).
gtccaatcacagcacttat

SEQ ID NO: 605638 - DNA, 19 bp, Mus musculus
  siRNA target sequence for Ndst2 (NM_010811.1,864-882).
cttatgagcccgtgcttat

SEQ ID NO: 605639 - DNA, 19 bp, Mus musculus
  siRNA target sequence for Ndst2 (NM_010811.1,1011-1029).
ctttttggcttcacaaact

SEQ ID NO: 605640 - DNA, 19 bp, Mus musculus
  siRNA target sequence for Ndst2 (NM_010811.1,1017-1035).
ggcttcacaaacttgtttt

SEQ ID NO: 605641 - DNA, 19 bp, Mus musculus
  siRNA target sequence for Ndst2 (NM_010811.1,1081-1099).
ccttgaccgctacatctta

SEQ ID NO: 605642 - DNA, 19 bp, Mus musculus
  siRNA target sequence for Ndst2 (NM_010811.1,1087-1105).
ccgctacatcttagtagat

SEQ ID NO: 605643 - DNA, 19 bp, Mus musculus
  siRNA target sequence for Ndst2 (NM_010811.1,1088-1106).
cgctacatcttagtagata

SEQ ID NO: 605644 - DNA, 19 bp, Mus musculus
  siRNA target sequence for Ndst2 (NM_010811.1,1089-1107).
gctacatcttagtagatat

SEQ ID NO: 605645 - DNA, 19 bp, Mus musculus
  siRNA target sequence for Ndst2 (NM_010811.1,1168-1186).
gttgaccactcagaacaaa

SEQ ID NO: 605646 - DNA, 19 bp, Mus musculus
  siRNA target sequence for Ndst2 (NM_010811.1,1224-1242).
gcttctcgggcaagttcta

SEQ ID NO: 605647 - DNA, 19 bp, Mus musculus
  siRNA target sequence for Ndst2 (NM_010811.1,1225-1243).
cttctcgggcaagttctat

SEQ ID NO: 605648 - DNA, 19 bp, Mus musculus
  siRNA target sequence for Ndst2 (NM_010811.1,1228-1246).
ctcgggcaagttctatcat

SEQ ID NO: 605649 - DNA, 19 bp, Mus musculus
  siRNA target sequence for Ndst2 (NM_010811.1,1480-1498).
ctatgaggcctggaaatct

SEQ ID NO: 605650 - DNA, 19 bp, Mus musculus
  siRNA target sequence for Ndst2 (NM_010811.1,1618-1636).
cacccacacgatcttctat

SEQ ID NO: 605651 - DNA, 19 bp, Mus musculus
  siRNA target sequence for Ndst2 (NM_010811.1,1620-1638).
cccacacgatcttctataa

SEQ ID NO: 605652 - DNA, 19 bp, Mus musculus
  siRNA target sequence for Ndst2 (NM_010811.1,1621-1639).
ccacacgatcttctataat

SEQ ID NO: 605653 - DNA, 19 bp, Mus musculus
  siRNA target sequence for Ndst2 (NM_010811.1,1626-1644).
cgatcttctataatgagta

SEQ ID NO: 605654 - DNA, 19 bp, Mus musculus
  siRNA target sequence for Ndst2 (NM_010811.1,1627-1645).
gatcttctataatgagtat

SEQ ID NO: 605655 - DNA, 19 bp, Mus musculus
  siRNA target sequence for Ndst2 (NM_010811.1,1650-1668).
gaggttctcgtgaactaga

SEQ ID NO: 605656 - DNA, 19 bp, Mus musculus
  siRNA target sequence for Ndst2 (NM_010811.1,1845-1863).
ctcttgcacaaaagtactt

SEQ ID NO: 605657 - DNA, 19 bp, Mus musculus
  siRNA target sequence for Ndst2 (NM_010811.1,1995-2013).
caggcaccacggctattca

SEQ ID NO: 605658 - DNA, 19 bp, Mus musculus
  siRNA target sequence for Ndst2 (NM_010811.1,1997-2015).
ggcaccacggctattcact

SEQ ID NO: 605659 - DNA, 19 bp, Mus musculus
  siRNA target sequence for Ndst2 (NM_010811.1,1998-2016).
gcaccacggctattcactt

SEQ ID NO: 605660 - DNA, 19 bp, Mus musculus
  siRNA target sequence for Ndst2 (NM_010811.1,2064-2082).
gcacctttgaggagattca

SEQ ID NO: 605661 - DNA, 19 bp, Mus musculus
  siRNA target sequence for Ndst2 (NM_010811.1,2389-2407).
cttgcagaaccgttgtctt

SEQ ID NO: 605662 - DNA, 19 bp, Mus musculus
  siRNA target sequence for Ndst2 (NM_010811.1,2392-2410).
gcagaaccgttgtcttgtt

SEQ ID NO: 605663 - DNA, 19 bp, Mus musculus
  siRNA target sequence for Ndst2 (NM_010811.1,2419-2437).
ctattctacccatcttcaa

SEQ ID NO: 605664 - DNA, 19 bp, Mus musculus
  siRNA target sequence for Ndst2 (NM_010811.1,2435-2453).
caacgctggctgacttact

SEQ ID NO: 605665 - DNA, 19 bp, Mus musculus
  siRNA target sequence for Ndst2 (NM_010811.1,2540-2558).
ggtatcaccccctttctga

SEQ ID NO: 605666 - DNA, 19 bp, Mus musculus
  siRNA target sequence for Ndst2 (NM_010811.1,2541-2559).
gtatcaccccctttctgaa

SEQ ID NO: 605667 - DNA, 19 bp, Mus musculus
  siRNA target sequence for Ndst2 (NM_010811.1,2568-2586).
ggaccctcaggtttgatga

SEQ ID NO: 605668 - DNA, 19 bp, Mus musculus
  siRNA target sequence for Ndst2 (NM_010811.1,2569-2587).
gaccctcaggtttgatgaa

SEQ ID NO: 605669 - DNA, 19 bp, Mus musculus
  siRNA target sequence for Ndst2 (NM_010811.1,2571-2589).
ccctcaggtttgatgaaga

SEQ ID NO: 605670 - DNA, 19 bp, Mus musculus
  siRNA target sequence for Ndst2 (NM_010811.1,2572-2590).
cctcaggtttgatgaagat

SEQ ID NO: 605671 - DNA, 19 bp, Mus musculus
  siRNA target sequence for Ndst2 (NM_010811.1,2573-2591).
ctcaggtttgatgaagata

SEQ ID NO: 605672 - DNA, 19 bp, Mus musculus
  siRNA target sequence for Ndst2 (NM_010811.1,2611-2629).
ccttgaaggtggtaagact

SEQ ID NO: 605673 - DNA, 19 bp, Mus musculus
  siRNA target sequence for Ndst2 (NM_010811.1,2678-2696).
gagtctcgccttttcctta

SEQ ID NO: 605674 - DNA, 19 bp, Mus musculus
  siRNA target sequence for Ndst2 (NM_010811.1,2686-2704).
ccttttccttacggatttt

SEQ ID NO: 605675 - DNA, 19 bp, Mus musculus
  siRNA target sequence for Ndst2 (NM_010811.1,2699-2717).
gattttttccggaaccata

SEQ ID NO: 605676 - DNA, 19 bp, Mus musculus
  siRNA target sequence for Ndst3 (NM_031186.1,210-228).
gccaccttttgtatggtaa

SEQ ID NO: 605677 - DNA, 19 bp, Mus musculus
  siRNA target sequence for Ndst3 (NM_031186.1,214-232).
ccttttgtatggtaagcat

SEQ ID NO: 605678 - DNA, 19 bp, Mus musculus
  siRNA target sequence for Ndst3 (NM_031186.1,224-242).
ggtaagcattattatttct

SEQ ID NO: 605679 - DNA, 19 bp, Mus musculus
  siRNA target sequence for Ndst3 (NM_031186.1,421-439).
catcccttggtcaagacat

SEQ ID NO: 605680 - DNA, 19 bp, Mus musculus
  siRNA target sequence for Ndst3 (NM_031186.1,424-442).
cccttggtcaagacatcat

SEQ ID NO: 605681 - DNA, 19 bp, Mus musculus
  siRNA target sequence for Ndst3 (NM_031186.1,426-444).
cttggtcaagacatcatta

SEQ ID NO: 605682 - DNA, 19 bp, Mus musculus
  siRNA target sequence for Ndst3 (NM_031186.1,457-475).
ccatccggttccattatca

SEQ ID NO: 605683 - DNA, 19 bp, Mus musculus
  siRNA target sequence for Ndst3 (NM_031186.1,508-526).
cggcacttacagacaatgt

SEQ ID NO: 605684 - DNA, 19 bp, Mus musculus
  siRNA target sequence for Ndst3 (NM_031186.1,530-548).
gggcaaatatgttctcatt

SEQ ID NO: 605685 - DNA, 19 bp, Mus musculus
  siRNA target sequence for Ndst3 (NM_031186.1,531-549).
ggcaaatatgttctcatta

SEQ ID NO: 605686 - DNA, 19 bp, Mus musculus
  siRNA target sequence for Ndst3 (NM_031186.1,540-558).
gttctcattatatatgaga

SEQ ID NO: 605687 - DNA, 19 bp, Mus musculus
  siRNA target sequence for Ndst3 (NM_031186.1,543-561).
ctcattatatatgagaata

SEQ ID NO: 605688 - DNA, 19 bp, Mus musculus
  siRNA target sequence for Ndst3 (NM_031186.1,632-650).
gggtatcattggattccat

SEQ ID NO: 605689 - DNA, 19 bp, Mus musculus
  siRNA target sequence for Ndst3 (NM_031186.1,633-651).
ggtatcattggattccata

SEQ ID NO: 605690 - DNA, 19 bp, Mus musculus
  siRNA target sequence for Ndst3 (NM_031186.1,634-652).
gtatcattggattccataa

SEQ ID NO: 605691 - DNA, 19 bp, Mus musculus
  siRNA target sequence for Ndst3 (NM_031186.1,689-707).
gggcttccccttttccata

SEQ ID NO: 605692 - DNA, 19 bp, Mus musculus
  siRNA target sequence for Ndst3 (NM_031186.1,690-708).
ggcttccccttttccataa

SEQ ID NO: 605693 - DNA, 19 bp, Mus musculus
  siRNA target sequence for Ndst3 (NM_031186.1,758-776).
ccttcgtgtgaccaaatca

SEQ ID NO: 605694 - DNA, 19 bp, Mus musculus
  siRNA target sequence for Ndst3 (NM_031186.1,841-859).
cctaccagccagtaatatt

SEQ ID NO: 605695 - DNA, 19 bp, Mus musculus
  siRNA target sequence for Ndst3 (NM_031186.1,842-860).
ctaccagccagtaatattt

SEQ ID NO: 605696 - DNA, 19 bp, Mus musculus
  siRNA target sequence for Ndst3 (NM_031186.1,896-914).
catctctaaacatgcattt

SEQ ID NO: 605697 - DNA, 19 bp, Mus musculus
  siRNA target sequence for Ndst3 (NM_031186.1,899-917).
ctctaaacatgcattttat

SEQ ID NO: 605698 - DNA, 19 bp, Mus musculus
  siRNA target sequence for Ndst3 (NM_031186.1,909-927).
gcattttatgccactatca

SEQ ID NO: 605699 - DNA, 19 bp, Mus musculus
  siRNA target sequence for Ndst3 (NM_031186.1,910-928).
cattttatgccactatcat

SEQ ID NO: 605700 - DNA, 19 bp, Mus musculus
  siRNA target sequence for Ndst3 (NM_031186.1,1104-1122).
gagggcacaaggatgaaca

SEQ ID NO: 605701 - DNA, 19 bp, Mus musculus
  siRNA target sequence for Ndst3 (NM_031186.1,1139-1157).
cctgcttgacactcagaat

SEQ ID NO: 605702 - DNA, 19 bp, Mus musculus
  siRNA target sequence for Ndst3 (NM_031186.1,1339-1357).
ctttaatagagcagatgat

SEQ ID NO: 605703 - DNA, 19 bp, Mus musculus
  siRNA target sequence for Ndst3 (NM_031186.1,1562-1580).
catggttctcccaagacaa

SEQ ID NO: 605704 - DNA, 19 bp, Mus musculus
  siRNA target sequence for Ndst3 (NM_031186.1,1682-1700).
ggttctcaacccaatcagt

SEQ ID NO: 605705 - DNA, 19 bp, Mus musculus
  siRNA target sequence for Ndst3 (NM_031186.1,1734-1752).
gaccgactgggattatata

SEQ ID NO: 605706 - DNA, 19 bp, Mus musculus
  siRNA target sequence for Ndst3 (NM_031186.1,1736-1754).
ccgactgggattatataca

SEQ ID NO: 605707 - DNA, 19 bp, Mus musculus
  siRNA target sequence for Ndst3 (NM_031186.1,1737-1755).
cgactgggattatatacat

SEQ ID NO: 605708 - DNA, 19 bp, Mus musculus
  siRNA target sequence for Ndst3 (NM_031186.1,1823-1841).
gctggctcacaagtatttt

SEQ ID NO: 605709 - DNA, 19 bp, Mus musculus
  siRNA target sequence for Ndst3 (NM_031186.1,1896-1914).
cgccacagagacatttggt

SEQ ID NO: 605710 - DNA, 19 bp, Mus musculus
  siRNA target sequence for Ndst3 (NM_031186.1,1903-1921).
gagacatttggtctaaaga

SEQ ID NO: 605711 - DNA, 19 bp, Mus musculus
  siRNA target sequence for Ndst3 (NM_031186.1,1922-1940).
gaaaacctgcgatcgttta

SEQ ID NO: 605712 - DNA, 19 bp, Mus musculus
  siRNA target sequence for Ndst3 (NM_031186.1,1930-1948).
gcgatcgtttaccaaaatt

SEQ ID NO: 605713 - DNA, 19 bp, Mus musculus
  siRNA target sequence for Ndst3 (NM_031186.1,1932-1950).
gatcgtttaccaaaattct

SEQ ID NO: 605714 - DNA, 19 bp, Mus musculus
  siRNA target sequence for Ndst3 (NM_031186.1,2007-2025).
catccttccatccttagta

SEQ ID NO: 605715 - DNA, 19 bp, Mus musculus
  siRNA target sequence for Ndst3 (NM_031186.1,2010-2028).
ccttccatccttagtaact

SEQ ID NO: 605716 - DNA, 19 bp, Mus musculus
  siRNA target sequence for Ndst3 (NM_031186.1,2054-2072).
ggtacagttctttaataga

SEQ ID NO: 605717 - DNA, 19 bp, Mus musculus
  siRNA target sequence for Ndst3 (NM_031186.1,2055-2073).
gtacagttctttaatagaa

SEQ ID NO: 605718 - DNA, 19 bp, Mus musculus
  siRNA target sequence for Ndst3 (NM_031186.1,2078-2096).
ctaccacagggggattgat

SEQ ID NO: 605719 - DNA, 19 bp, Mus musculus
  siRNA target sequence for Ndst3 (NM_031186.1,2115-2133).
ccagtcccatctaatgtca

SEQ ID NO: 605720 - DNA, 19 bp, Mus musculus
  siRNA target sequence for Ndst3 (NM_031186.1,2298-2316).
gcagctctgaaatttagct

SEQ ID NO: 605721 - DNA, 19 bp, Mus musculus
  siRNA target sequence for Ndst3 (NM_031186.1,2299-2317).
cagctctgaaatttagctt

SEQ ID NO: 605722 - DNA, 19 bp, Mus musculus
  siRNA target sequence for Ndst3 (NM_031186.1,2361-2379).
cgaaccctgcagaagagat

SEQ ID NO: 605723 - DNA, 19 bp, Mus musculus
  siRNA target sequence for Ndst3 (NM_031186.1,2540-2558).
ctccgaagctttaacgttt

SEQ ID NO: 605724 - DNA, 19 bp, Mus musculus
  siRNA target sequence for Ndst3 (NM_031186.1,2543-2561).
cgaagctttaacgtttgat

SEQ ID NO: 605725 - DNA, 19 bp, Mus musculus
  siRNA target sequence for Ndst3 (NM_031186.1,2655-2673).
gatagcagagcgtttctgt

SEQ ID NO: 605726 - DNA, 19 bp, Mus musculus
  siRNA target sequence for Ndst4 (NM_022565.1,133-151).
gctttcgaacactgattgt

SEQ ID NO: 605727 - DNA, 19 bp, Mus musculus
  siRNA target sequence for Ndst4 (NM_022565.1,144-162).
ctgattgttctcttagcta

SEQ ID NO: 605728 - DNA, 19 bp, Mus musculus
  siRNA target sequence for Ndst4 (NM_022565.1,150-168).
gttctcttagctacttttt

SEQ ID NO: 605729 - DNA, 19 bp, Mus musculus
  siRNA target sequence for Ndst4 (NM_022565.1,275-293).
cctcccttatcggtctata

SEQ ID NO: 605730 - DNA, 19 bp, Mus musculus
  siRNA target sequence for Ndst4 (NM_022565.1,301-319).
gaaccatcaagcctattga

SEQ ID NO: 605731 - DNA, 19 bp, Mus musculus
  siRNA target sequence for Ndst4 (NM_022565.1,305-323).
catcaagcctattgataca

SEQ ID NO: 605732 - DNA, 19 bp, Mus musculus
  siRNA target sequence for Ndst4 (NM_022565.1,370-388).
cgcaacttggtcaagatat

SEQ ID NO: 605733 - DNA, 19 bp, Mus musculus
  siRNA target sequence for Ndst4 (NM_022565.1,371-389).
gcaacttggtcaagatatt

SEQ ID NO: 605734 - DNA, 19 bp, Mus musculus
  siRNA target sequence for Ndst4 (NM_022565.1,378-396).
ggtcaagatattatagcaa

SEQ ID NO: 605735 - DNA, 19 bp, Mus musculus
  siRNA target sequence for Ndst4 (NM_022565.1,379-397).
gtcaagatattatagcaat

SEQ ID NO: 605736 - DNA, 19 bp, Mus musculus
  siRNA target sequence for Ndst4 (NM_022565.1,401-419).
ggagtccagtcggtttcaa

SEQ ID NO: 605737 - DNA, 19 bp, Mus musculus
  siRNA target sequence for Ndst4 (NM_022565.1,402-420).
gagtccagtcggtttcaat

SEQ ID NO: 605738 - DNA, 19 bp, Mus musculus
  siRNA target sequence for Ndst4 (NM_022565.1,406-424).
ccagtcggtttcaatacca

SEQ ID NO: 605739 - DNA, 19 bp, Mus musculus
  siRNA target sequence for Ndst4 (NM_022565.1,475-493).
gcaaagggaagtacacatt

SEQ ID NO: 605740 - DNA, 19 bp, Mus musculus
  siRNA target sequence for Ndst4 (NM_022565.1,482-500).
gaagtacacattgattatt

SEQ ID NO: 605741 - DNA, 19 bp, Mus musculus
  siRNA target sequence for Ndst4 (NM_022565.1,577-595).
gtgttagcataattggttt

SEQ ID NO: 605742 - DNA, 19 bp, Mus musculus
  siRNA target sequence for Ndst4 (NM_022565.1,605-623).
caatgagaacagtttacca

SEQ ID NO: 605743 - DNA, 19 bp, Mus musculus
  siRNA target sequence for Ndst4 (NM_022565.1,611-629).
gaacagtttaccaactaca

SEQ ID NO: 605744 - DNA, 19 bp, Mus musculus
  siRNA target sequence for Ndst4 (NM_022565.1,614-632).
cagtttaccaactacacaa

SEQ ID NO: 605745 - DNA, 19 bp, Mus musculus
  siRNA target sequence for Ndst4 (NM_022565.1,650-668).
gaacttattcaataacgta

SEQ ID NO: 605746 - DNA, 19 bp, Mus musculus
  siRNA target sequence for Ndst4 (NM_022565.1,702-720).
cctctgctccatattacca

SEQ ID NO: 605747 - DNA, 19 bp, Mus musculus
  siRNA target sequence for Ndst4 (NM_022565.1,804-822).
cttttaactgagttacagt

SEQ ID NO: 605748 - DNA, 19 bp, Mus musculus
  siRNA target sequence for Ndst4 (NM_022565.1,813-831).
gagttacagtcagaaaagt

SEQ ID NO: 605749 - DNA, 19 bp, Mus musculus
  siRNA target sequence for Ndst4 (NM_022565.1,856-874).
cactttatgcgacaattat

SEQ ID NO: 605750 - DNA, 19 bp, Mus musculus
  siRNA target sequence for Ndst4 (NM_022565.1,1049-1067).
ggagggcacgagaatgaat

SEQ ID NO: 605751 - DNA, 19 bp, Mus musculus
  siRNA target sequence for Ndst4 (NM_022565.1,1057-1075).
cgagaatgaatgtcaaaga

SEQ ID NO: 605752 - DNA, 19 bp, Mus musculus
  siRNA target sequence for Ndst4 (NM_022565.1,1084-1102).
cattactagagactcaaaa

SEQ ID NO: 605753 - DNA, 19 bp, Mus musculus
  siRNA target sequence for Ndst4 (NM_022565.1,1109-1127).
gcgcactcaggttgcaaat

SEQ ID NO: 605754 - DNA, 19 bp, Mus musculus
  siRNA target sequence for Ndst4 (NM_022565.1,1110-1128).
cgcactcaggttgcaaatt

SEQ ID NO: 605755 - DNA, 19 bp, Mus musculus
  siRNA target sequence for Ndst4 (NM_022565.1,1111-1129).
gcactcaggttgcaaattt

SEQ ID NO: 605756 - DNA, 19 bp, Mus musculus
  siRNA target sequence for Ndst4 (NM_022565.1,1112-1130).
cactcaggttgcaaatttt

SEQ ID NO: 605757 - DNA, 19 bp, Mus musculus
  siRNA target sequence for Ndst4 (NM_022565.1,1116-1134).
caggttgcaaattttacct

SEQ ID NO: 605758 - DNA, 19 bp, Mus musculus
  siRNA target sequence for Ndst4 (NM_022565.1,1378-1396).
gggtctacccagtccatat

SEQ ID NO: 605759 - DNA, 19 bp, Mus musculus
  siRNA target sequence for Ndst4 (NM_022565.1,1379-1397).
ggtctacccagtccatatt

SEQ ID NO: 605760 - DNA, 19 bp, Mus musculus
  siRNA target sequence for Ndst4 (NM_022565.1,1387-1405).
cagtccatattcagttgta

SEQ ID NO: 605761 - DNA, 19 bp, Mus musculus
  siRNA target sequence for Ndst4 (NM_022565.1,1575-1593).
ggacctcaagaattggata

SEQ ID NO: 605762 - DNA, 19 bp, Mus musculus
  siRNA target sequence for Ndst4 (NM_022565.1,1581-1599).
caagaattggataaaagta

SEQ ID NO: 605763 - DNA, 19 bp, Mus musculus
  siRNA target sequence for Ndst4 (NM_022565.1,1624-1642).
caatccttctaaatccaat

SEQ ID NO: 605764 - DNA, 19 bp, Mus musculus
  siRNA target sequence for Ndst4 (NM_022565.1,1727-1745).
cagctggaccaacttgaaa

SEQ ID NO: 605765 - DNA, 19 bp, Mus musculus
  siRNA target sequence for Ndst4 (NM_022565.1,1767-1785).
caactggcccacaaatact

SEQ ID NO: 605766 - DNA, 19 bp, Mus musculus
  siRNA target sequence for Ndst4 (NM_022565.1,1823-1841).
gaatccatgcgacgataaa

SEQ ID NO: 605767 - DNA, 19 bp, Mus musculus
  siRNA target sequence for Ndst4 (NM_022565.1,1832-1850).
cgacgataaacgacacaaa

SEQ ID NO: 605768 - DNA, 19 bp, Mus musculus
  siRNA target sequence for Ndst4 (NM_022565.1,1868-1886).
gaaaacctgtgaccattta

SEQ ID NO: 605769 - DNA, 19 bp, Mus musculus
  siRNA target sequence for Ndst4 (NM_022565.1,1876-1894).
gtgaccatttaccgaaatt

SEQ ID NO: 605770 - DNA, 19 bp, Mus musculus
  siRNA target sequence for Ndst4 (NM_022565.1,1880-1898).
ccatttaccgaaattcctt

SEQ ID NO: 605771 - DNA, 19 bp, Mus musculus
  siRNA target sequence for Ndst4 (NM_022565.1,1920-1938).
ggaacaactgcactttatt

SEQ ID NO: 605772 - DNA, 19 bp, Mus musculus
  siRNA target sequence for Ndst4 (NM_022565.1,1991-2009).
ctttgaagaagttcaattt

SEQ ID NO: 605773 - DNA, 19 bp, Mus musculus
  siRNA target sequence for Ndst4 (NM_022565.1,2040-2058).
gagtggtatatggactttt

SEQ ID NO: 605774 - DNA, 19 bp, Mus musculus
  siRNA target sequence for Ndst4 (NM_022565.1,2061-2079).
cccactccttccaacatta

SEQ ID NO: 605775 - DNA, 19 bp, Mus musculus
  siRNA target sequence for Ndst4 (NM_022565.1,2080-2098).
ccagtgatttcctatttga

SEQ ID NO: 605776 - DNA, 19 bp, Mus musculus
  siRNA target sequence for Ndst4 (NM_022565.1,2192-2210).
ctcggacagggcatattct

SEQ ID NO: 605777 - DNA, 19 bp, Mus musculus
  siRNA target sequence for Ndst4 (NM_022565.1,2219-2237).
gcaccaacgatctcatgaa

SEQ ID NO: 605778 - DNA, 19 bp, Mus musculus
  siRNA target sequence for Ndst4 (NM_022565.1,2244-2262).
gctgccctgaggttcaatt

SEQ ID NO: 605779 - DNA, 19 bp, Mus musculus
  siRNA target sequence for Ndst4 (NM_022565.1,2346-2364).
gcagtgcacatagaaagat

SEQ ID NO: 605780 - DNA, 19 bp, Mus musculus
  siRNA target sequence for Ndst4 (NM_022565.1,2366-2384).
gctggcctacttttctact

SEQ ID NO: 605781 - DNA, 19 bp, Mus musculus
  siRNA target sequence for Ndst4 (NM_022565.1,2386-2404).
cccagttgctaattattga

SEQ ID NO: 605782 - DNA, 19 bp, Mus musculus
  siRNA target sequence for Ndst4 (NM_022565.1,2486-2504).
ctcggaagcactaacgttt

SEQ ID NO: 605783 - DNA, 19 bp, Mus musculus
  siRNA target sequence for Ndst4 (NM_022565.1,2489-2507).
ggaagcactaacgtttgat

SEQ ID NO: 605784 - DNA, 19 bp, Mus musculus
  siRNA target sequence for Sult1c1 (NM_026935.3,329-347).
cgacctcctcatttgtact

SEQ ID NO: 605785 - DNA, 19 bp, Mus musculus
  siRNA target sequence for Sult1c1 (NM_026935.3,330-348).
gacctcctcatttgtactt

SEQ ID NO: 605786 - DNA, 19 bp, Mus musculus
  siRNA target sequence for Sult1c1 (NM_026935.3,424-442).
ggcgaaccatcattcaaca

SEQ ID NO: 605787 - DNA, 19 bp, Mus musculus
  siRNA target sequence for Sult1c1 (NM_026935.3,575-593).
caactgtaagttcctttat

SEQ ID NO: 605788 - DNA, 19 bp, Mus musculus
  siRNA target sequence for Sult1c1 (NM_026935.3,578-596).
ctgtaagttcctttatgta

SEQ ID NO: 605789 - DNA, 19 bp, Mus musculus
  siRNA target sequence for Sult1c1 (NM_026935.3,587-605).
cctttatgtagctcgaaat

SEQ ID NO: 605790 - DNA, 19 bp, Mus musculus
  siRNA target sequence for Sult1c1 (NM_026935.3,597-615).
gctcgaaatgctaaagact

SEQ ID NO: 605791 - DNA, 19 bp, Mus musculus
  siRNA target sequence for Sult1c1 (NM_026935.3,670-688).
gcacctgggatgagtattt

SEQ ID NO: 605792 - DNA, 19 bp, Mus musculus
  siRNA target sequence for Sult1c1 (NM_026935.3,751-769).
gggaaattcgagacaaata

SEQ ID NO: 605793 - DNA, 19 bp, Mus musculus
  siRNA target sequence for Sult1c1 (NM_026935.3,752-770).
ggaaattcgagacaaatat

SEQ ID NO: 605794 - DNA, 19 bp, Mus musculus
  siRNA target sequence for Sult1c1 (NM_026935.3,914-932).
gaatcctatgacaaatcgt

SEQ ID NO: 605795 - DNA, 19 bp, Mus musculus
  siRNA target sequence for Sult1c1 (NM_026935.3,1032-1050).
gagaggtttgatgaaatct

SEQ ID NO: 605796 - DNA, 19 bp, Mus musculus
  siRNA target sequence for Sult2b1 (NM_017465.1,98-116).
ggagctcgtctgagaaaaa

SEQ ID NO: 605797 - DNA, 19 bp, Mus musculus
  siRNA target sequence for Sult2b1 (NM_017465.1,101-119).
gctcgtctgagaaaaatgt

SEQ ID NO: 605798 - DNA, 19 bp, Mus musculus
  siRNA target sequence for Sult2b1 (NM_017465.1,123-141).
cgaaatgagctggaatttt

SEQ ID NO: 605799 - DNA, 19 bp, Mus musculus
  siRNA target sequence for Sult2b1 (NM_017465.1,142-160).
ggaggtgaatacttcagat

SEQ ID NO: 605800 - DNA, 19 bp, Mus musculus
  siRNA target sequence for Sult2b1 (NM_017465.1,143-161).
gaggtgaatacttcagata

SEQ ID NO: 605801 - DNA, 19 bp, Mus musculus
  siRNA target sequence for Sult2b1 (NM_017465.1,235-253).
cgggacgacgacatcttca

SEQ ID NO: 605802 - DNA, 19 bp, Mus musculus
  siRNA target sequence for Sult2b1 (NM_017465.1,237-255).
ggacgacgacatcttcatt

SEQ ID NO: 605803 - DNA, 19 bp, Mus musculus
  siRNA target sequence for Sult2b1 (NM_017465.1,366-384).
ctggtgcgagaccatcata

SEQ ID NO: 605804 - DNA, 19 bp, Mus musculus
  siRNA target sequence for Sult2b1 (NM_017465.1,386-404).
gcgccttcaatgtcttaga

SEQ ID NO: 605805 - DNA, 19 bp, Mus musculus
  siRNA target sequence for Sult2b1 (NM_017465.1,431-449).
ctcacctccctattgaact

SEQ ID NO: 605806 - DNA, 19 bp, Mus musculus
  siRNA target sequence for Sult2b1 (NM_017465.1,514-532).
gtcgtggtctccctctatt

SEQ ID NO: 605807 - DNA, 19 bp, Mus musculus
  siRNA target sequence for Sult2b1 (NM_017465.1,516-534).
cgtggtctccctctattat

SEQ ID NO: 605808 - DNA, 19 bp, Mus musculus
  siRNA target sequence for Sult2b1 (NM_017465.1,520-538).
gtctccctctattattatt

SEQ ID NO: 605809 - DNA, 19 bp, Mus musculus
  siRNA target sequence for Sult2b1 (NM_017465.1,524-542).
ccctctattattattctaa

SEQ ID NO: 605810 - DNA, 19 bp, Mus musculus
  siRNA target sequence for Sult2b1 (NM_017465.1,526-544).
ctctattattattctaaga

SEQ ID NO: 605811 - DNA, 19 bp, Mus musculus
  siRNA target sequence for Sult2b1 (NM_017465.1,528-546).
ctattattattctaagatt

SEQ ID NO: 605812 - DNA, 19 bp, Mus musculus
  siRNA target sequence for Sult2b1 (NM_017465.1,574-592).
cccgaccagttccttcaaa

SEQ ID NO: 605813 - DNA, 19 bp, Mus musculus
  siRNA target sequence for Sult2b1 (NM_017465.1,802-820).
gccatgaaggccaatacca

SEQ ID NO: 605814 - DNA, 19 bp, Mus musculus
  siRNA target sequence for Sult4a1 (NM_013873.3,381-399).
gaaatcggcctgatgaaca

SEQ ID NO: 605815 - DNA, 19 bp, Mus musculus
  siRNA target sequence for Sult4a1 (NM_013873.3,526-544).
gggactccaaggtcatcta

SEQ ID NO: 605816 - DNA, 19 bp, Mus musculus
  siRNA target sequence for Sult4a1 (NM_013873.3,564-582).
gacttggtggtatcttact

SEQ ID NO: 605817 - DNA, 19 bp, Mus musculus
  siRNA target sequence for Sult4a1 (NM_013873.3,566-584).
cttggtggtatcttactat

SEQ ID NO: 605818 - DNA, 19 bp, Mus musculus
  siRNA target sequence for Sult4a1 (NM_013873.3,638-656).
ctgtcggaggttcatgaat

SEQ ID NO: 605819 - DNA, 19 bp, Mus musculus
  siRNA target sequence for Sult4a1 (NM_013873.3,640-658).
gtcggaggttcatgaatga

SEQ ID NO: 605820 - DNA, 19 bp, Mus musculus
  siRNA target sequence for Sult4a1 (NM_013873.3,642-660).
cggaggttcatgaatgaca

SEQ ID NO: 605821 - DNA, 19 bp, Mus musculus
  siRNA target sequence for Sult4a1 (NM_013873.3,644-662).
gaggttcatgaatgacaaa

SEQ ID NO: 605822 - DNA, 19 bp, Mus musculus
  siRNA target sequence for Sult4a1 (NM_013873.3,646-664).
ggttcatgaatgacaaact

SEQ ID NO: 605823 - DNA, 19 bp, Mus musculus
  siRNA target sequence for Sult4a1 (NM_013873.3,701-719).
ctgggaacatcgaatggat

SEQ ID NO: 605824 - DNA, 19 bp, Mus musculus
  siRNA target sequence for Sult4a1 (NM_013873.3,720-738).
gccaacgtgcttttcctta

SEQ ID NO: 605825 - DNA, 19 bp, Mus musculus
  siRNA target sequence for Sult4a1 (NM_013873.3,725-743).
cgtgcttttccttaagtat

SEQ ID NO: 605826 - DNA, 19 bp, Mus musculus
  siRNA target sequence for Sult4a1 (NM_013873.3,932-950).
ctccatgaacgagaagttt

SEQ ID NO: 605827 - DNA, 19 bp, Mus musculus
  siRNA target sequence for Sult4a1 (NM_013873.3,938-956).
gaacgagaagtttgatcta

SEQ ID NO: 605828 - DNA, 19 bp, Mus musculus
  siRNA target sequence for Sult4a1 (NM_013873.3,986-1004).
cctcacgtttgacttttat

SEQ ID NO: 605829 - DNA, 19 bp, Mus musculus
  siRNA target sequence for Sultx1 (NM_020564.1,98-116).
cgcatgaacaccactgaaa

SEQ ID NO: 605830 - DNA, 19 bp, Mus musculus
  siRNA target sequence for Sultx1 (NM_020564.1,99-117).
gcatgaacaccactgaaat

SEQ ID NO: 605831 - DNA, 19 bp, Mus musculus
  siRNA target sequence for Sultx1 (NM_020564.1,132-150).
gcttcccaggattcataca

SEQ ID NO: 605832 - DNA, 19 bp, Mus musculus
  siRNA target sequence for Sultx1 (NM_020564.1,276-294).
gtcacttgtggcctattca

SEQ ID NO: 605833 - DNA, 19 bp, Mus musculus
  siRNA target sequence for Sultx1 (NM_020564.1,353-371).
cattccaagcggaacactt

SEQ ID NO: 605834 - DNA, 19 bp, Mus musculus
  siRNA target sequence for Sultx1 (NM_020564.1,681-699).
ctatccgcaagttaagtga

SEQ ID NO: 605835 - DNA, 19 bp, Mus musculus
  siRNA target sequence for Sultx1 (NM_020564.1,687-705).
gcaagttaagtgaattcct

SEQ ID NO: 605836 - DNA, 19 bp, Mus musculus
  siRNA target sequence for Sultx1 (NM_020564.1,766-784).
catgagtcagagcaacata

SEQ ID NO: 605837 - DNA, 19 bp, Mus musculus
  siRNA target sequence for Sultx1 (NM_020564.1,771-789).
gtcagagcaacatagtcaa

SEQ ID NO: 605838 - DNA, 19 bp, Mus musculus
  siRNA target sequence for Sultx2 (NM_020565.1,78-96).
gaatatttgcttaacttca

SEQ ID NO: 605839 - DNA, 19 bp, Mus musculus
  siRNA target sequence for Sultx2 (NM_020565.1,246-264).
gagggtcatcggaacagaa

SEQ ID NO: 605840 - DNA, 19 bp, Mus musculus
  siRNA target sequence for Sultx2 (NM_020565.1,479-497).
gcttatatttcaaaatcca

SEQ ID NO: 605841 - DNA, 19 bp, Mus musculus
  siRNA target sequence for Mpst (NM_138670.1,587-605).
cgcagctggccgtttccaa

SEQ ID NO: 605842 - DNA, 19 bp, Mus musculus
  siRNA target sequence for Mpst (NM_138670.1,717-735).
gagatcaaacgcctgttta

SEQ ID NO: 605843 - DNA, 19 bp, Mus musculus
  siRNA target sequence for Mpst (NM_138670.1,880-898).
gtgcccagccagagcatat

SEQ ID NO: 605844 - DNA, 19 bp, Mus musculus
  siRNA target sequence for Mpst (NM_138670.1,882-900).
gcccagccagagcatatca

SEQ ID NO: 605845 - DNA, 19 bp, Mus musculus
  siRNA target sequence for Tst (NM_009437.2,174-192).
cgccaggcacgcaaagagt

SEQ ID NO: 605846 - DNA, 19 bp, Mus musculus
  siRNA target sequence for Tst (NM_009437.2,175-193).
gccaggcacgcaaagagta

SEQ ID NO: 605847 - DNA, 19 bp, Mus musculus
  siRNA target sequence for Tst (NM_009437.2,209-227).
gcctggcgcgtccttcttt

SEQ ID NO: 605848 - DNA, 19 bp, Mus musculus
  siRNA target sequence for Tst (NM_009437.2,213-231).
ggcgcgtccttctttgata

SEQ ID NO: 605849 - DNA, 19 bp, Mus musculus
  siRNA target sequence for Tst (NM_009437.2,214-232).
gcgcgtccttctttgatat

SEQ ID NO: 605850 - DNA, 19 bp, Mus musculus
  siRNA target sequence for Tst (NM_009437.2,215-233).
cgcgtccttctttgatata

SEQ ID NO: 605851 - DNA, 19 bp, Mus musculus
  siRNA target sequence for Tst (NM_009437.2,217-235).
cgtccttctttgatataga

SEQ ID NO: 605852 - DNA, 19 bp, Mus musculus
  siRNA target sequence for Tst (NM_009437.2,253-271).
cttcgccttatgagatgat

SEQ ID NO: 605853 - DNA, 19 bp, Mus musculus
  siRNA target sequence for Tst (NM_009437.2,286-304).
cccactttggggactatgt

SEQ ID NO: 605854 - DNA, 19 bp, Mus musculus
  siRNA target sequence for Tst (NM_009437.2,307-325).
gcaacctgggcataagcaa

SEQ ID NO: 605855 - DNA, 19 bp, Mus musculus
  siRNA target sequence for Tst (NM_009437.2,850-868).
ccgatgtggctgtttacga

SEQ ID NO: 605856 - DNA, 19 bp, Mus musculus
  siRNA target sequence for Tst (NM_009437.2,851-869).
cgatgtggctgtttacgat

SEQ ID NO: 605857 - DNA, 19 bp, Mus musculus
  siRNA target sequence for Oxct (NM_024188.3,103-121).
gggtgtgtctgctacttct

SEQ ID NO: 605858 - DNA, 19 bp, Mus musculus
  siRNA target sequence for Oxct (NM_024188.3,131-149).
ctcgtcaccacaccaaatt

SEQ ID NO: 605859 - DNA, 19 bp, Mus musculus
  siRNA target sequence for Oxct (NM_024188.3,133-151).
cgtcaccacaccaaatttt

SEQ ID NO: 605860 - DNA, 19 bp, Mus musculus
  siRNA target sequence for Oxct (NM_024188.3,138-156).
ccacaccaaattttacaca

SEQ ID NO: 605861 - DNA, 19 bp, Mus musculus
  siRNA target sequence for Oxct (NM_024188.3,161-179).
ccgtggaagctgtaaaaga

SEQ ID NO: 605862 - DNA, 19 bp, Mus musculus
  siRNA target sequence for Oxct (NM_024188.3,162-180).
cgtggaagctgtaaaagat

SEQ ID NO: 605863 - DNA, 19 bp, Mus musculus
  siRNA target sequence for Oxct (NM_024188.3,261-279).
gactggagtaaaagatcta

SEQ ID NO: 605864 - DNA, 19 bp, Mus musculus
  siRNA target sequence for Oxct (NM_024188.3,315-333).
cggcctgggccttttactt

SEQ ID NO: 605865 - DNA, 19 bp, Mus musculus
  siRNA target sequence for Oxct (NM_024188.3,331-349).
cttcgatccaagcagataa

SEQ ID NO: 605866 - DNA, 19 bp, Mus musculus
  siRNA target sequence for Oxct (NM_024188.3,343-361).
cagataaaacgaatgatct

SEQ ID NO: 605867 - DNA, 19 bp, Mus musculus
  siRNA target sequence for Oxct (NM_024188.3,353-371).
gaatgatctcctcatatgt

SEQ ID NO: 605868 - DNA, 19 bp, Mus musculus
  siRNA target sequence for Oxct (NM_024188.3,363-381).
ctcatatgtgggagaaaat

SEQ ID NO: 605869 - DNA, 19 bp, Mus musculus
  siRNA target sequence for Oxct (NM_024188.3,402-420).
cctttctggtgaattagaa

SEQ ID NO: 605870 - DNA, 19 bp, Mus musculus
  siRNA target sequence for Oxct (NM_024188.3,407-425).
ctggtgaattagaagtaga

SEQ ID NO: 605871 - DNA, 19 bp, Mus musculus
  siRNA target sequence for Oxct (NM_024188.3,526-544).
ggaggatcacccatcaaat

SEQ ID NO: 605872 - DNA, 19 bp, Mus musculus
  siRNA target sequence for Oxct (NM_024188.3,527-545).
gaggatcacccatcaaata

SEQ ID NO: 605873 - DNA, 19 bp, Mus musculus
  siRNA target sequence for Oxct (NM_024188.3,529-547).
ggatcacccatcaaatata

SEQ ID NO: 605874 - DNA, 19 bp, Mus musculus
  siRNA target sequence for Oxct (NM_024188.3,530-548).
gatcacccatcaaatataa

SEQ ID NO: 605875 - DNA, 19 bp, Mus musculus
  siRNA target sequence for Oxct (NM_024188.3,533-551).
cacccatcaaatataacaa

SEQ ID NO: 605876 - DNA, 19 bp, Mus musculus
  siRNA target sequence for Oxct (NM_024188.3,583-601).
cgagaggtgagggagttta

SEQ ID NO: 605877 - DNA, 19 bp, Mus musculus
  siRNA target sequence for Oxct (NM_024188.3,630-648).
catcacgggagattttgct

SEQ ID NO: 605878 - DNA, 19 bp, Mus musculus
  siRNA target sequence for Oxct (NM_024188.3,672-690).
ccgggcaggcaatgtgatt

SEQ ID NO: 605879 - DNA, 19 bp, Mus musculus
  siRNA target sequence for Oxct (NM_024188.3,673-691).
cgggcaggcaatgtgattt

SEQ ID NO: 605880 - DNA, 19 bp, Mus musculus
  siRNA target sequence for Oxct (NM_024188.3,674-692).
gggcaggcaatgtgatttt

SEQ ID NO: 605881 - DNA, 19 bp, Mus musculus
  siRNA target sequence for Oxct (NM_024188.3,780-798).
ctcatttgccccagaagat

SEQ ID NO: 605882 - DNA, 19 bp, Mus musculus
  siRNA target sequence for Oxct (NM_024188.3,793-811).
gaagatatccacattccaa

SEQ ID NO: 605883 - DNA, 19 bp, Mus musculus
  siRNA target sequence for Oxct (NM_024188.3,831-849).
cataaagggagagaaatat

SEQ ID NO: 605884 - DNA, 19 bp, Mus musculus
  siRNA target sequence for Oxct (NM_024188.3,857-875).
gaattgagcgtttatcact

SEQ ID NO: 605885 - DNA, 19 bp, Mus musculus
  siRNA target sequence for Oxct (NM_024188.3,925-943).
gtgagggaacggatcatca

SEQ ID NO: 605886 - DNA, 19 bp, Mus musculus
  siRNA target sequence for Oxct (NM_024188.3,1100-1118).
ctgatgcggatctcatcaa

SEQ ID NO: 605887 - DNA, 19 bp, Mus musculus
  siRNA target sequence for Oxct (NM_024188.3,1174-1192).
gagtcattcgccatgatta

SEQ ID NO: 605888 - DNA, 19 bp, Mus musculus
  siRNA target sequence for Oxct (NM_024188.3,1176-1194).
gtcattcgccatgattaga

SEQ ID NO: 605889 - DNA, 19 bp, Mus musculus
  siRNA target sequence for Oxct (NM_024188.3,1193-1211).
gagggggacatgtcaatct

SEQ ID NO: 605890 - DNA, 19 bp, Mus musculus
  siRNA target sequence for Oxct (NM_024188.3,1353-1371).
ctctgcgaagggaaatgct

SEQ ID NO: 605891 - DNA, 19 bp, Mus musculus
  siRNA target sequence for Oxct (NM_024188.3,1380-1398).
catggagaaatgtacacta

SEQ ID NO: 605892 - DNA, 19 bp, Mus musculus
  siRNA target sequence for Oxct (NM_024188.3,1399-1417).
ccactgacgggcaaacagt

SEQ ID NO: 605893 - DNA, 19 bp, Mus musculus
  siRNA target sequence for Oxct (NM_024188.3,1422-1440).
caaccgcatcattacagaa

SEQ ID NO: 605894 - DNA, 19 bp, Mus musculus
  siRNA target sequence for Oxct (NM_024188.3,1494-1512).
ggaaggcctgactgttgat

SEQ ID NO: 605895 - DNA, 19 bp, Mus musculus
  siRNA target sequence for Bcat1 (NM_007532.1,69-87).
gacttttagggccaaagat

SEQ ID NO: 605896 - DNA, 19 bp, Mus musculus
  siRNA target sequence for Bcat1 (NM_007532.1,77-95).
gggccaaagatctcatcat

SEQ ID NO: 605897 - DNA, 19 bp, Mus musculus
  siRNA target sequence for Bcat1 (NM_007532.1,141-159).
ggtctttggagctacgttt

SEQ ID NO: 605898 - DNA, 19 bp, Mus musculus
  siRNA target sequence for Bcat1 (NM_007532.1,144-162).
ctttggagctacgtttact

SEQ ID NO: 605899 - DNA, 19 bp, Mus musculus
  siRNA target sequence for Bcat1 (NM_007532.1,267-285).
ctacgctgtggaactgttt

SEQ ID NO: 605900 - DNA, 19 bp, Mus musculus
  siRNA target sequence for Bcat1 (NM_007532.1,298-316).
gcctttcggggagttgata

SEQ ID NO: 605901 - DNA, 19 bp, Mus musculus
  siRNA target sequence for Bcat1 (NM_007532.1,299-317).
cctttcggggagttgataa

SEQ ID NO: 605902 - DNA, 19 bp, Mus musculus
  siRNA target sequence for Bcat1 (NM_007532.1,305-323).
ggggagttgataacaagat

SEQ ID NO: 605903 - DNA, 19 bp, Mus musculus
  siRNA target sequence for Bcat1 (NM_007532.1,337-355).
ccggacctcaacatggata

SEQ ID NO: 605904 - DNA, 19 bp, Mus musculus
  siRNA target sequence for Bcat1 (NM_007532.1,340-358).
gacctcaacatggatagaa

SEQ ID NO: 605905 - DNA, 19 bp, Mus musculus
  siRNA target sequence for Bcat1 (NM_007532.1,343-361).
ctcaacatggatagaatgt

SEQ ID NO: 605906 - DNA, 19 bp, Mus musculus
  siRNA target sequence for Bcat1 (NM_007532.1,378-396).
gaccacgctgccgatgttt

SEQ ID NO: 605907 - DNA, 19 bp, Mus musculus
  siRNA target sequence for Bcat1 (NM_007532.1,402-420).
ggaggagctcctaaagtgt

SEQ ID NO: 605908 - DNA, 19 bp, Mus musculus
  siRNA target sequence for Bcat1 (NM_007532.1,403-421).
gaggagctcctaaagtgta

SEQ ID NO: 605909 - DNA, 19 bp, Mus musculus
  siRNA target sequence for Bcat1 (NM_007532.1,405-423).
ggagctcctaaagtgtatt

SEQ ID NO: 605910 - DNA, 19 bp, Mus musculus
  siRNA target sequence for Bcat1 (NM_007532.1,512-530).
catctcttggcgtcaagaa

SEQ ID NO: 605911 - DNA, 19 bp, Mus musculus
  siRNA target sequence for Bcat1 (NM_007532.1,561-579).
gagccccgtgggaccttat

SEQ ID NO: 605912 - DNA, 19 bp, Mus musculus
  siRNA target sequence for Bcat1 (NM_007532.1,563-581).
gccccgtgggaccttattt

SEQ ID NO: 605913 - DNA, 19 bp, Mus musculus
  siRNA target sequence for Bcat1 (NM_007532.1,567-585).
cgtgggaccttatttttct

SEQ ID NO: 605914 - DNA, 19 bp, Mus musculus
  siRNA target sequence for Bcat1 (NM_007532.1,608-626).
ccctgtgggccaatccaaa

SEQ ID NO: 605915 - DNA, 19 bp, Mus musculus
  siRNA target sequence for Bcat1 (NM_007532.1,614-632).
gggccaatccaaagtacat

SEQ ID NO: 605916 - DNA, 19 bp, Mus musculus
  siRNA target sequence for Bcat1 (NM_007532.1,616-634).
gccaatccaaagtacatca

SEQ ID NO: 605917 - DNA, 19 bp, Mus musculus
  siRNA target sequence for Bcat1 (NM_007532.1,756-774).
caaccagataactgaagta

SEQ ID NO: 605918 - DNA, 19 bp, Mus musculus
  siRNA target sequence for Bcat1 (NM_007532.1,767-785).
ctgaagtaggcacaatgaa

SEQ ID NO: 605919 - DNA, 19 bp, Mus musculus
  siRNA target sequence for Bcat1 (NM_007532.1,792-810).
cctctactggataaacgaa

SEQ ID NO: 605920 - DNA, 19 bp, Mus musculus
  siRNA target sequence for Bcat1 (NM_007532.1,839-857).
cactagatggcatcattct

SEQ ID NO: 605921 - DNA, 19 bp, Mus musculus
  siRNA target sequence for Bcat1 (NM_007532.1,1009-1027).
gtctgcccagtctctgata

SEQ ID NO: 605922 - DNA, 19 bp, Mus musculus
  siRNA target sequence for Bcat1 (NM_007532.1,1013-1031).
gcccagtctctgatattct

SEQ ID NO: 605923 - DNA, 19 bp, Mus musculus
  siRNA target sequence for Bcat1 (NM_007532.1,1015-1033).
ccagtctctgatattctgt

SEQ ID NO: 605924 - DNA, 19 bp, Mus musculus
  siRNA target sequence for Bcat1 (NM_007532.1,1016-1034).
cagtctctgatattctgta

SEQ ID NO: 605925 - DNA, 19 bp, Mus musculus
  siRNA target sequence for Bcat1 (NM_007532.1,1038-1056).
gggccagatgctgcatatt

SEQ ID NO: 605926 - DNA, 19 bp, Mus musculus
  siRNA target sequence for Bcat2 (NM_009737.1,72-90).
cttctatgtgggtccaaaa

SEQ ID NO: 605927 - DNA, 19 bp, Mus musculus
  siRNA target sequence for Bcat2 (NM_009737.1,326-344).
gggcttgaaagcatacaaa

SEQ ID NO: 605928 - DNA, 19 bp, Mus musculus
  siRNA target sequence for Bcat2 (NM_009737.1,457-475).
gtatccgccagctcattga

SEQ ID NO: 605929 - DNA, 19 bp, Mus musculus
  siRNA target sequence for Bcat2 (NM_009737.1,580-598).
ccctcctgtacgtcattct

SEQ ID NO: 605930 - DNA, 19 bp, Mus musculus
  siRNA target sequence for Bcat2 (NM_009737.1,812-830).
gggcaccatgaacatcttt

SEQ ID NO: 605931 - DNA, 19 bp, Mus musculus
  siRNA target sequence for Bcat2 (NM_009737.1,901-919).
gagtagttcgacaaagtct

SEQ ID NO: 605932 - DNA, 19 bp, Mus musculus
  siRNA target sequence for Bcat2 (NM_009737.1,958-976).
cagaacgcaaggtcactat

SEQ ID NO: 605933 - DNA, 19 bp, Mus musculus
  siRNA target sequence for Bcat2 (NM_009737.1,960-978).
gaacgcaaggtcactatga

SEQ ID NO: 605934 - DNA, 19 bp, Mus musculus
  siRNA target sequence for Bcat2 (NM_009737.1,1006-1024).
gccgagtgcgagaagtctt

SEQ ID NO: 605935 - DNA, 19 bp, Mus musculus
  siRNA target sequence for Bcat2 (NM_009737.1,1051-1069).
gcccggtgcaccaaatcct

SEQ ID NO: 605936 - DNA, 19 bp, Mus musculus
  siRNA target sequence for Bcat2 (NM_009737.1,1165-1183).
ccagtgcccacgattggat

SEQ ID NO: 605937 - DNA, 19 bp, Mus musculus
  siRNA target sequence for Got1 (NM_010324.1,57-75).
ggcgcctccatcagtcttt

SEQ ID NO: 605938 - DNA, 19 bp, Mus musculus
  siRNA target sequence for Got1 (NM_010324.1,94-112).
cctccggttctggtcttta

SEQ ID NO: 605939 - DNA, 19 bp, Mus musculus
  siRNA target sequence for Got1 (NM_010324.1,95-113).
ctccggttctggtctttaa

SEQ ID NO: 605940 - DNA, 19 bp, Mus musculus
  siRNA target sequence for Got1 (NM_010324.1,139-157).
ccagatccccgcaaggtta

SEQ ID NO: 605941 - DNA, 19 bp, Mus musculus
  siRNA target sequence for Got1 (NM_010324.1,140-158).
cagatccccgcaaggttaa

SEQ ID NO: 605942 - DNA, 19 bp, Mus musculus
  siRNA target sequence for Got1 (NM_010324.1,172-190).
gcgtaccgcacagatgaat

SEQ ID NO: 605943 - DNA, 19 bp, Mus musculus
  siRNA target sequence for Got1 (NM_010324.1,223-241).
gtcgaacagaagattgcta

SEQ ID NO: 605944 - DNA, 19 bp, Mus musculus
  siRNA target sequence for Got1 (NM_010324.1,302-320).
gtgcttctcgcctagttct

SEQ ID NO: 605945 - DNA, 19 bp, Mus musculus
  siRNA target sequence for Got1 (NM_010324.1,411-429).
cttagggcgatggtacaat

SEQ ID NO: 605946 - DNA, 19 bp, Mus musculus
  siRNA target sequence for Got1 (NM_010324.1,415-433).
gggcgatggtacaatggta

SEQ ID NO: 605947 - DNA, 19 bp, Mus musculus
  siRNA target sequence for Got1 (NM_010324.1,430-448).
ggtacagataacaagaaca

SEQ ID NO: 605948 - DNA, 19 bp, Mus musculus
  siRNA target sequence for Got1 (NM_010324.1,469-487).
ccaacctgggagaaccata

SEQ ID NO: 605949 - DNA, 19 bp, Mus musculus
  siRNA target sequence for Got1 (NM_010324.1,470-488).
caacctgggagaaccataa

SEQ ID NO: 605950 - DNA, 19 bp, Mus musculus
  siRNA target sequence for Got1 (NM_010324.1,480-498).
gaaccataatgctgtgttt

SEQ ID NO: 605951 - DNA, 19 bp, Mus musculus
  siRNA target sequence for Got1 (NM_010324.1,483-501).
ccataatgctgtgttttct

SEQ ID NO: 605952 - DNA, 19 bp, Mus musculus
  siRNA target sequence for Got1 (NM_010324.1,517-535).
gacattcggccctattgct

SEQ ID NO: 605953 - DNA, 19 bp, Mus musculus
  siRNA target sequence for Got1 (NM_010324.1,727-745).
gcctatcagggctttgcat

SEQ ID NO: 605954 - DNA, 19 bp, Mus musculus
  siRNA target sequence for Got1 (NM_010324.1,767-785).
cgtgggctattcgctattt

SEQ ID NO: 605955 - DNA, 19 bp, Mus musculus
  siRNA target sequence for Got1 (NM_010324.1,768-786).
gtgggctattcgctatttt

SEQ ID NO: 605956 - DNA, 19 bp, Mus musculus
  siRNA target sequence for Got1 (NM_010324.1,772-790).
gctattcgctattttgtgt

SEQ ID NO: 605957 - DNA, 19 bp, Mus musculus
  siRNA target sequence for Got1 (NM_010324.1,831-849).
gaacttcgggctctacaat

SEQ ID NO: 605958 - DNA, 19 bp, Mus musculus
  siRNA target sequence for Got1 (NM_010324.1,989-1007).
ctgacccggagctctttaa

SEQ ID NO: 605959 - DNA, 19 bp, Mus musculus
  siRNA target sequence for Got1 (NM_010324.1,1062-1080).
cgaactcagggcaagacta

SEQ ID NO: 605960 - DNA, 19 bp, Mus musculus
  siRNA target sequence for Got1 (NM_010324.1,1120-1138).
gagcagattggaatgttca

SEQ ID NO: 605961 - DNA, 19 bp, Mus musculus
  siRNA target sequence for Got1 (NM_010324.1,1156-1174).
cccaagcaggtcgagtatt

SEQ ID NO: 605962 - DNA, 19 bp, Mus musculus
  siRNA target sequence for Got1 (NM_010324.1,1157-1175).
ccaagcaggtcgagtattt

SEQ ID NO: 605963 - DNA, 19 bp, Mus musculus
  siRNA target sequence for Got1 (NM_010324.1,1177-1195).
gtcaacgagaagcatatct

SEQ ID NO: 605964 - DNA, 19 bp, Mus musculus
  siRNA target sequence for Got1 (NM_010324.1,1179-1197).
caacgagaagcatatctat

SEQ ID NO: 605965 - DNA, 19 bp, Mus musculus
  siRNA target sequence for Got1 (NM_010324.1,1204-1222).
ccgagtggtcggatcaaca

SEQ ID NO: 605966 - DNA, 19 bp, Mus musculus
  siRNA target sequence for Got1 (NM_010324.1,1205-1223).
cgagtggtcggatcaacat

SEQ ID NO: 605967 - DNA, 19 bp, Mus musculus
  siRNA target sequence for Got1 (NM_010324.1,1238-1256).
ccaagaacctagattacgt

SEQ ID NO: 605968 - DNA, 19 bp, Mus musculus
  siRNA target sequence for Got2 (NM_010325.1,523-541).
gtctttctgcccaaaccat

SEQ ID NO: 605969 - DNA, 19 bp, Mus musculus
  siRNA target sequence for Got2 (NM_010325.1,578-596).
gcatgcagctccaaggtta

SEQ ID NO: 605970 - DNA, 19 bp, Mus musculus
  siRNA target sequence for Got2 (NM_010325.1,640-658).
gccctagaagacatatcaa

SEQ ID NO: 605971 - DNA, 19 bp, Mus musculus
  siRNA target sequence for Got2 (NM_010325.1,643-661).
ctagaagacatatcaaaaa

SEQ ID NO: 605972 - DNA, 19 bp, Mus musculus
  siRNA target sequence for Got2 (NM_010325.1,748-766).
gcgtccgtggtgaagaaaa

SEQ ID NO: 605973 - DNA, 19 bp, Mus musculus
  siRNA target sequence for Got2 (NM_010325.1,749-767).
cgtccgtggtgaagaaaaa

SEQ ID NO: 605974 - DNA, 19 bp, Mus musculus
  siRNA target sequence for Got2 (NM_010325.1,812-830).
gcggtgatggtgataagga

SEQ ID NO: 605975 - DNA, 19 bp, Mus musculus
  siRNA target sequence for Got2 (NM_010325.1,836-854).
gggccgtgcggcacttcat

SEQ ID NO: 605976 - DNA, 19 bp, Mus musculus
  siRNA target sequence for Got2 (NM_010325.1,852-870).
catcgagcagggcatcaat

SEQ ID NO: 605977 - DNA, 19 bp, Mus musculus
  siRNA target sequence for Got2 (NM_010325.1,873-891).
ctgcctctgccaatcgtat

SEQ ID NO: 605978 - DNA, 19 bp, Mus musculus
  siRNA target sequence for Got2 (NM_010325.1,883-901).
caatcgtatgccaagaaca

SEQ ID NO: 605979 - DNA, 19 bp, Mus musculus
  siRNA target sequence for Got2 (NM_010325.1,933-951).
cacggtggtctgcaaagat

SEQ ID NO: 605980 - DNA, 19 bp, Mus musculus
  siRNA target sequence for Got2 (NM_010325.1,1060-1078).
ccagacttgcggaagcaat

SEQ ID NO: 605981 - DNA, 19 bp, Mus musculus
  siRNA target sequence for Got2 (NM_010325.1,1186-1204).
gaccagatcggcatgttct

SEQ ID NO: 605982 - DNA, 19 bp, Mus musculus
  siRNA target sequence for Got2 (NM_010325.1,1249-1267).
gagttctcggtctacatga

SEQ ID NO: 605983 - DNA, 19 bp, Mus musculus
  siRNA target sequence for Got2 (NM_010325.1,1257-1275).
ggtctacatgacaaaggat

SEQ ID NO: 605984 - DNA, 19 bp, Mus musculus
  siRNA target sequence for Tat (NM_146214.1,89-107).
gtaatccagacgaatgtca

SEQ ID NO: 605985 - DNA, 19 bp, Mus musculus
  siRNA target sequence for Tat (NM_146214.1,128-146).
ctggatgttcgcgtcaata

SEQ ID NO: 605986 - DNA, 19 bp, Mus musculus
  siRNA target sequence for Tat (NM_146214.1,130-148).
ggatgttcgcgtcaatatt

SEQ ID NO: 605987 - DNA, 19 bp, Mus musculus
  siRNA target sequence for Tat (NM_146214.1,209-227).
ccctctgacatgtccaata

SEQ ID NO: 605988 - DNA, 19 bp, Mus musculus
  siRNA target sequence for Tat (NM_146214.1,210-228).
cctctgacatgtccaataa

SEQ ID NO: 605989 - DNA, 19 bp, Mus musculus
  siRNA target sequence for Tat (NM_146214.1,211-229).
ctctgacatgtccaataaa

SEQ ID NO: 605990 - DNA, 19 bp, Mus musculus
  siRNA target sequence for Tat (NM_146214.1,220-238).
gtccaataaaaccttcaat

SEQ ID NO: 605991 - DNA, 19 bp, Mus musculus
  siRNA target sequence for Tat (NM_146214.1,271-289).
gaagccgaatccgaacaaa

SEQ ID NO: 605992 - DNA, 19 bp, Mus musculus
  siRNA target sequence for Tat (NM_146214.1,291-309).
ccgtgatctctctgtcaat

SEQ ID NO: 605993 - DNA, 19 bp, Mus musculus
  siRNA target sequence for Tat (NM_146214.1,292-310).
cgtgatctctctgtcaatt

SEQ ID NO: 605994 - DNA, 19 bp, Mus musculus
  siRNA target sequence for Tat (NM_146214.1,407-425).
ccatctatcggctacctat

SEQ ID NO: 605995 - DNA, 19 bp, Mus musculus
  siRNA target sequence for Tat (NM_146214.1,434-452).
gaggaggtcgcttcctatt

SEQ ID NO: 605996 - DNA, 19 bp, Mus musculus
  siRNA target sequence for Tat (NM_146214.1,594-612).
ggacattggctgagtctat

SEQ ID NO: 605997 - DNA, 19 bp, Mus musculus
  siRNA target sequence for Tat (NM_146214.1,622-640).
ggtcaagctctacaatcta

SEQ ID NO: 605998 - DNA, 19 bp, Mus musculus
  siRNA target sequence for Tat (NM_146214.1,623-641).
gtcaagctctacaatctat

SEQ ID NO: 605999 - DNA, 19 bp, Mus musculus
  siRNA target sequence for Tat (NM_146214.1,649-667).
gaagtcttgggaaattgat

SEQ ID NO: 606000 - DNA, 19 bp, Mus musculus
  siRNA target sequence for Tat (NM_146214.1,652-670).
gtcttgggaaattgatcta

SEQ ID NO: 606001 - DNA, 19 bp, Mus musculus
  siRNA target sequence for Tat (NM_146214.1,705-723).
cttgtctcgtggtcaacaa

SEQ ID NO: 606002 - DNA, 19 bp, Mus musculus
  siRNA target sequence for Tat (NM_146214.1,753-771).
gtaagcggcaccttcagaa

SEQ ID NO: 606003 - DNA, 19 bp, Mus musculus
  siRNA target sequence for Tat (NM_146214.1,757-775).
gcggcaccttcagaagatt

SEQ ID NO: 606004 - DNA, 19 bp, Mus musculus
  siRNA target sequence for Tat (NM_146214.1,758-776).
cggcaccttcagaagattt

SEQ ID NO: 606005 - DNA, 19 bp, Mus musculus
  siRNA target sequence for Tat (NM_146214.1,793-811).
gcaatgcgtccccatctta

SEQ ID NO: 606006 - DNA, 19 bp, Mus musculus
  siRNA target sequence for Tat (NM_146214.1,804-822).
ccatcttagccgatgagat

SEQ ID NO: 606007 - DNA, 19 bp, Mus musculus
  siRNA target sequence for Tat (NM_146214.1,808-826).
cttagccgatgagatctat

SEQ ID NO: 606008 - DNA, 19 bp, Mus musculus
  siRNA target sequence for Tat (NM_146214.1,939-957).
ggctgggctggatccttat

SEQ ID NO: 606009 - DNA, 19 bp, Mus musculus
  siRNA target sequence for Tat (NM_146214.1,958-976).
ccatgatcgaagagacatt

SEQ ID NO: 606010 - DNA, 19 bp, Mus musculus
  siRNA target sequence for Tat (NM_146214.1,1074-1092).
gcacccctcaggagttcta

SEQ ID NO: 606011 - DNA, 19 bp, Mus musculus
  siRNA target sequence for Tat (NM_146214.1,1185-1203).
gagccatgtaccttatggt

SEQ ID NO: 606012 - DNA, 19 bp, Mus musculus
  siRNA target sequence for Tat (NM_146214.1,1216-1234).
ggagcacttcccagaattt

SEQ ID NO: 606013 - DNA, 19 bp, Mus musculus
  siRNA target sequence for Tat (NM_146214.1,1220-1238).
cacttcccagaatttgaga

SEQ ID NO: 606014 - DNA, 19 bp, Mus musculus
  siRNA target sequence for Tat (NM_146214.1,1235-1253).
gagaatgacgtggaattca

SEQ ID NO: 606015 - DNA, 19 bp, Mus musculus
  siRNA target sequence for Tat (NM_146214.1,1302-1320).
gcttcgagtacccaaattt

SEQ ID NO: 606016 - DNA, 19 bp, Mus musculus
  siRNA target sequence for Agxt (NM_016702.1,254-272).
ggccacatgcaaaaagaga

SEQ ID NO: 606017 - DNA, 19 bp, Mus musculus
  siRNA target sequence for Agxt (NM_016702.1,412-430).
ctttctaaccggaaccaat

SEQ ID NO: 606018 - DNA, 19 bp, Mus musculus
  siRNA target sequence for Agxt (NM_016702.1,477-495).
cccgtgtgcaccagatgat

SEQ ID NO: 606019 - DNA, 19 bp, Mus musculus
  siRNA target sequence for Agxt (NM_016702.1,479-497).
cgtgtgcaccagatgatca

SEQ ID NO: 606020 - DNA, 19 bp, Mus musculus
  siRNA target sequence for Agxt (NM_016702.1,480-498).
gtgtgcaccagatgatcaa

SEQ ID NO: 606021 - DNA, 19 bp, Mus musculus
  siRNA target sequence for Agxt (NM_016702.1,710-728).
ggcattgacatcatgtact

SEQ ID NO: 606022 - DNA, 19 bp, Mus musculus
  siRNA target sequence for Agxt (NM_016702.1,803-821).
gtctactcccggaagacaa

SEQ ID NO: 606023 - DNA, 19 bp, Mus musculus
  siRNA target sequence for Agxt (NM_016702.1,877-895).
gggcgagaccagagtaatt

SEQ ID NO: 606024 - DNA, 19 bp, Mus musculus
  siRNA target sequence for Agxt (NM_016702.1,879-897).
gcgagaccagagtaattca

SEQ ID NO: 606025 - DNA, 19 bp, Mus musculus
  siRNA target sequence for Agxt (NM_016702.1,880-898).
cgagaccagagtaattcat

SEQ ID NO: 606026 - DNA, 19 bp, Mus musculus
  siRNA target sequence for Agxt (NM_016702.1,883-901).
gaccagagtaattcatcat

SEQ ID NO: 606027 - DNA, 19 bp, Mus musculus
  siRNA target sequence for Agxt (NM_016702.1,908-926).
cctgtcaccagcttatact

SEQ ID NO: 606028 - DNA, 19 bp, Mus musculus
  siRNA target sequence for Agxt (NM_016702.1,934-952).
ggagagcctggcactcatt

SEQ ID NO: 606029 - DNA, 19 bp, Mus musculus
  siRNA target sequence for Agxt (NM_016702.1,1031-1049).
ggcttaaagttctttgtga

SEQ ID NO: 606030 - DNA, 19 bp, Mus musculus
  siRNA target sequence for Agxt (NM_016702.1,1032-1050).
gcttaaagttctttgtgaa

SEQ ID NO: 606031 - DNA, 19 bp, Mus musculus
  siRNA target sequence for Agxt (NM_016702.1,1132-1150).
ggaccacttcagcattgaa

SEQ ID NO: 606032 - DNA, 19 bp, Mus musculus
  siRNA target sequence for Oat (NM_016978.1,191-209).
cgtctgttgccacaaagaa

SEQ ID NO: 606033 - DNA, 19 bp, Mus musculus
  siRNA target sequence for Oat (NM_016978.1,224-242).
caccatcctccgagtacat

SEQ ID NO: 606034 - DNA, 19 bp, Mus musculus
  siRNA target sequence for Oat (NM_016978.1,226-244).
ccatcctccgagtacattt

SEQ ID NO: 606035 - DNA, 19 bp, Mus musculus
  siRNA target sequence for Oat (NM_016978.1,230-248).
cctccgagtacatttttga

SEQ ID NO: 606036 - DNA, 19 bp, Mus musculus
  siRNA target sequence for Oat (NM_016978.1,231-249).
ctccgagtacatttttgaa

SEQ ID NO: 606037 - DNA, 19 bp, Mus musculus
  siRNA target sequence for Oat (NM_016978.1,269-287).
cacacaattaccatccttt

SEQ ID NO: 606038 - DNA, 19 bp, Mus musculus
  siRNA target sequence for Oat (NM_016978.1,338-356).
gcaggcagtacttcgattt

SEQ ID NO: 606039 - DNA, 19 bp, Mus musculus
  siRNA target sequence for Oat (NM_016978.1,351-369).
cgatttcctgagtgcttat

SEQ ID NO: 606040 - DNA, 19 bp, Mus musculus
  siRNA target sequence for Oat (NM_016978.1,386-404).
gacactgccacccaaagat

SEQ ID NO: 606041 - DNA, 19 bp, Mus musculus
  siRNA target sequence for Oat (NM_016978.1,390-408).
ctgccacccaaagatcata

SEQ ID NO: 606042 - DNA, 19 bp, Mus musculus
  siRNA target sequence for Oat (NM_016978.1,393-411).
ccacccaaagatcatagat

SEQ ID NO: 606043 - DNA, 19 bp, Mus musculus
  siRNA target sequence for Oat (NM_016978.1,429-447).
ggacaagctgacattaaca

SEQ ID NO: 606044 - DNA, 19 bp, Mus musculus
  siRNA target sequence for Oat (NM_016978.1,430-448).
gacaagctgacattaacat

SEQ ID NO: 606045 - DNA, 19 bp, Mus musculus
  siRNA target sequence for Oat (NM_016978.1,446-464).
catctcgggctttctataa

SEQ ID NO: 606046 - DNA, 19 bp, Mus musculus
  siRNA target sequence for Oat (NM_016978.1,449-467).
ctcgggctttctataacaa

SEQ ID NO: 606047 - DNA, 19 bp, Mus musculus
  siRNA target sequence for Oat (NM_016978.1,476-494).
gtgaatacgaggagtacat

SEQ ID NO: 606048 - DNA, 19 bp, Mus musculus
  siRNA target sequence for Oat (NM_016978.1,478-496).
gaatacgaggagtacatca

SEQ ID NO: 606049 - DNA, 19 bp, Mus musculus
  siRNA target sequence for Oat (NM_016978.1,516-534).
caaagttctccctatgaat

SEQ ID NO: 606050 - DNA, 19 bp, Mus musculus
  siRNA target sequence for Oat (NM_016978.1,642-660).
cttttggggtcgaacacta

SEQ ID NO: 606051 - DNA, 19 bp, Mus musculus
  siRNA target sequence for Oat (NM_016978.1,678-696).
cacagatccgaccagttat

SEQ ID NO: 606052 - DNA, 19 bp, Mus musculus
  siRNA target sequence for Oat (NM_016978.1,680-698).
cagatccgaccagttatga

SEQ ID NO: 606053 - DNA, 19 bp, Mus musculus
  siRNA target sequence for Oat (NM_016978.1,767-785).
ctcttcaggatccaaatgt

SEQ ID NO: 606054 - DNA, 19 bp, Mus musculus
  siRNA target sequence for Oat (NM_016978.1,815-833).
gtgaagcaggcgttatcgt

SEQ ID NO: 606055 - DNA, 19 bp, Mus musculus
  siRNA target sequence for Oat (NM_016978.1,879-897).
gcaccaggtcctgtttatt

SEQ ID NO: 606056 - DNA, 19 bp, Mus musculus
  siRNA target sequence for Oat (NM_016978.1,991-1009).
gccctttctggcggtttat

SEQ ID NO: 606057 - DNA, 19 bp, Mus musculus
  siRNA target sequence for Oat (NM_016978.1,992-1010).
ccctttctggcggtttata

SEQ ID NO: 606058 - DNA, 19 bp, Mus musculus
  siRNA target sequence for Oat (NM_016978.1,1026-1044).
gctgtgtgacgatgagata

SEQ ID NO: 606059 - DNA, 19 bp, Mus musculus
  siRNA target sequence for Oat (NM_016978.1,1027-1045).
ctgtgtgacgatgagataa

SEQ ID NO: 606060 - DNA, 19 bp, Mus musculus
  siRNA target sequence for Oat (NM_016978.1,1039-1057).
gagataatgctgaccatta

SEQ ID NO: 606061 - DNA, 19 bp, Mus musculus
  siRNA target sequence for Oat (NM_016978.1,1118-1136).
cggctcttgaggttttaga

SEQ ID NO: 606062 - DNA, 19 bp, Mus musculus
  siRNA target sequence for Oat (NM_016978.1,1295-1313).
gcctgcgacttcgagataa

SEQ ID NO: 606063 - DNA, 19 bp, Mus musculus
  siRNA target sequence for Oat (NM_016978.1,1330-1348).
ccaacccacggtgatatca

SEQ ID NO: 606064 - DNA, 19 bp, Mus musculus
  siRNA target sequence for Oat (NM_016978.1,1331-1349).
caacccacggtgatatcat

SEQ ID NO: 606065 - DNA, 19 bp, Mus musculus
  siRNA target sequence for 9630038C02Rik (NM_172961.2,226-244).
ctgccaaagttgacattga

SEQ ID NO: 606066 - DNA, 19 bp, Mus musculus
  siRNA target sequence for 9630038C02Rik (NM_172961.2,255-273).
gatggaccactcatgaaga

SEQ ID NO: 606067 - DNA, 19 bp, Mus musculus
  siRNA target sequence for 9630038C02Rik (NM_172961.2,288-306).
cctagatctaaggaactaa

SEQ ID NO: 606068 - DNA, 19 bp, Mus musculus
  siRNA target sequence for 9630038C02Rik (NM_172961.2,289-307).
ctagatctaaggaactaat

SEQ ID NO: 606069 - DNA, 19 bp, Mus musculus
  siRNA target sequence for 9630038C02Rik (NM_172961.2,333-351).
gcagaggccgtgcactttt

SEQ ID NO: 606070 - DNA, 19 bp, Mus musculus
  siRNA target sequence for 9630038C02Rik (NM_172961.2,336-354).
gaggccgtgcactttttct

SEQ ID NO: 606071 - DNA, 19 bp, Mus musculus
  siRNA target sequence for 9630038C02Rik (NM_172961.2,405-423).
cgcatgttggacctgtatt

SEQ ID NO: 606072 - DNA, 19 bp, Mus musculus
  siRNA target sequence for 9630038C02Rik (NM_172961.2,433-451).
cctctgtgcccataggtta

SEQ ID NO: 606073 - DNA, 19 bp, Mus musculus
  siRNA target sequence for 9630038C02Rik (NM_172961.2,489-507).
cagaacgcgagcactttca

SEQ ID NO: 606074 - DNA, 19 bp, Mus musculus
  siRNA target sequence for 9630038C02Rik (NM_172961.2,662-680).
gtggtaccggagtaaggaa

SEQ ID NO: 606075 - DNA, 19 bp, Mus musculus
  siRNA target sequence for 9630038C02Rik (NM_172961.2,788-806).
gaggaccatgggttgctta

SEQ ID NO: 606076 - DNA, 19 bp, Mus musculus
  siRNA target sequence for 9630038C02Rik (NM_172961.2,814-832).
cacactccaaagcaattca

SEQ ID NO: 606077 - DNA, 19 bp, Mus musculus
  siRNA target sequence for 9630038C02Rik (NM_172961.2,816-834).
cactccaaagcaattcaca

SEQ ID NO: 606078 - DNA, 19 bp, Mus musculus
  siRNA target sequence for 9630038C02Rik (NM_172961.2,821-839).
caaagcaattcacaagatt

SEQ ID NO: 606079 - DNA, 19 bp, Mus musculus
  siRNA target sequence for 9630038C02Rik (NM_172961.2,985-1003).
gaacggtggctggaatcat

SEQ ID NO: 606080 - DNA, 19 bp, Mus musculus
  siRNA target sequence for 9630038C02Rik (NM_172961.2,1058-1076).
ccggaagctgagagacata

SEQ ID NO: 606081 - DNA, 19 bp, Mus musculus
  siRNA target sequence for 9630038C02Rik (NM_172961.2,1249-1267).
gtgctccttaccggatttt

SEQ ID NO: 606082 - DNA, 19 bp, Mus musculus
  siRNA target sequence for 9630038C02Rik (NM_172961.2,1251-1269).
gctccttaccggattttca

SEQ ID NO: 606083 - DNA, 19 bp, Mus musculus
  siRNA target sequence for 9630038C02Rik (NM_172961.2,1252-1270).
ctccttaccggattttcaa

SEQ ID NO: 606084 - DNA, 19 bp, Mus musculus
  siRNA target sequence for 9630038C02Rik (NM_172961.2,1474-1492).
ccatacggaataaactcat

SEQ ID NO: 606085 - DNA, 19 bp, Mus musculus
  siRNA target sequence for 9630038C02Rik (NM_172961.2,1479-1497).
cggaataaactcatcctaa

SEQ ID NO: 606086 - DNA, 19 bp, Mus musculus
  siRNA target sequence for 2610203E10Rik (NM_183220.1,337-355).
gacgcagcccaaactctat

SEQ ID NO: 606087 - DNA, 19 bp, Mus musculus
  siRNA target sequence for 2610203E10Rik (NM_183220.1,413-431).
ggaagagtcatcaaatggt

SEQ ID NO: 606088 - DNA, 19 bp, Mus musculus
  siRNA target sequence for 2610203E10Rik (NM_183220.1,414-432).
gaagagtcatcaaatggtt

SEQ ID NO: 606089 - DNA, 19 bp, Mus musculus
  siRNA target sequence for 2610203E10Rik (NM_183220.1,493-511).
gaaccccagtggcatcatt

SEQ ID NO: 606090 - DNA, 19 bp, Mus musculus
  siRNA target sequence for 2610203E10Rik (NM_183220.1,498-516).
ccagtggcatcattaactt

SEQ ID NO: 606091 - DNA, 19 bp, Mus musculus
  siRNA target sequence for 2610203E10Rik (NM_183220.1,519-537).
gcaccagtgaaaacaaact

SEQ ID NO: 606092 - DNA, 19 bp, Mus musculus
  siRNA target sequence for 2610203E10Rik (NM_183220.1,641-659).
gaagaagtggcaaagttct

SEQ ID NO: 606093 - DNA, 19 bp, Mus musculus
  siRNA target sequence for 2610203E10Rik (NM_183220.1,864-882).
gcaaggtaactggattgaa

SEQ ID NO: 606094 - DNA, 19 bp, Mus musculus
  siRNA target sequence for 2610203E10Rik (NM_183220.1,865-883).
caaggtaactggattgaat

SEQ ID NO: 606095 - DNA, 19 bp, Mus musculus
  siRNA target sequence for 2610203E10Rik (NM_183220.1,1255-1273).
ctccctctgccgctatcat

SEQ ID NO: 606096 - DNA, 19 bp, Mus musculus
  siRNA target sequence for 2610203E10Rik (NM_183220.1,1342-1360).
gtacctgccagaaaaccat

SEQ ID NO: 606097 - DNA, 19 bp, Mus musculus
  siRNA target sequence for 2610203E10Rik (NM_183220.1,1452-1470).
gggttgacttgagaaagta

SEQ ID NO: 606098 - DNA, 19 bp, Mus musculus
  siRNA target sequence for 2610203E10Rik (NM_183220.1,1453-1471).
ggttgacttgagaaagtat

SEQ ID NO: 606099 - DNA, 19 bp, Mus musculus
  siRNA target sequence for 2610203E10Rik (NM_183220.1,1612-1630).
gcttcgcctgggaatgcaa

SEQ ID NO: 606100 - DNA, 19 bp, Mus musculus
  siRNA target sequence for 2610203E10Rik (NM_183220.1,1613-1631).
cttcgcctgggaatgcaaa

SEQ ID NO: 606101 - DNA, 19 bp, Mus musculus
  siRNA target sequence for 2610203E10Rik (NM_183220.1,1645-1663).
gcttgaaggacaatctcaa

SEQ ID NO: 606102 - DNA, 19 bp, Mus musculus
  siRNA target sequence for 2900006B13Rik (NM_028398.1,161-179).
gagagtacctggactgtat

SEQ ID NO: 606103 - DNA, 19 bp, Mus musculus
  siRNA target sequence for 2900006B13Rik (NM_028398.1,163-181).
gagtacctggactgtatca

SEQ ID NO: 606104 - DNA, 19 bp, Mus musculus
  siRNA target sequence for 2900006B13Rik (NM_028398.1,219-237).
ggtccaagccgcacatgaa

SEQ ID NO: 606105 - DNA, 19 bp, Mus musculus
  siRNA target sequence for 2900006B13Rik (NM_028398.1,420-438).
ggtattagaccatgcttat

SEQ ID NO: 606106 - DNA, 19 bp, Mus musculus
  siRNA target sequence for 2900006B13Rik (NM_028398.1,916-934).
gaagctaccggtgtagaat

SEQ ID NO: 606107 - DNA, 19 bp, Mus musculus
  siRNA target sequence for 2900006B13Rik (NM_028398.1,919-937).
gctaccggtgtagaatact

SEQ ID NO: 606108 - DNA, 19 bp, Mus musculus
  siRNA target sequence for 2900006B13Rik (NM_028398.1,920-938).
ctaccggtgtagaatactt

SEQ ID NO: 606109 - DNA, 19 bp, Mus musculus
  siRNA target sequence for 2900006B13Rik (NM_028398.1,923-941).
ccggtgtagaatacttcaa

SEQ ID NO: 606110 - DNA, 19 bp, Mus musculus
  siRNA target sequence for 2900006B13Rik (NM_028398.1,925-943).
ggtgtagaatacttcaaca

SEQ ID NO: 606111 - DNA, 19 bp, Mus musculus
  siRNA target sequence for 2900006B13Rik (NM_028398.1,977-995).
ggctagcagtcctagatgt

SEQ ID NO: 606112 - DNA, 19 bp, Mus musculus
  siRNA target sequence for 2900006B13Rik (NM_028398.1,1263-1281).
gtgcttcaacgttgacaat

SEQ ID NO: 606113 - DNA, 19 bp, Mus musculus
  siRNA target sequence for 2900006B13Rik (NM_028398.1,1302-1320).
gctggatgacattctaaca

SEQ ID NO: 606114 - DNA, 19 bp, Mus musculus
  siRNA target sequence for 2900006B13Rik (NM_028398.1,1365-1383).
gcaccccccagaagatact

SEQ ID NO: 606115 - DNA, 19 bp, Mus musculus
  siRNA target sequence for 2900006B13Rik (NM_028398.1,1368-1386).
ccccccagaagatactcat

SEQ ID NO: 606116 - DNA, 19 bp, Mus musculus
  siRNA target sequence for 2900006B13Rik (NM_028398.1,1378-1396).
gatactcatcctactcaaa

SEQ ID NO: 606117 - DNA, 19 bp, Mus musculus
  siRNA target sequence for 2900006B13Rik (NM_028398.1,1382-1400).
ctcatcctactcaaatact

SEQ ID NO: 606118 - DNA, 19 bp, Mus musculus
  siRNA target sequence for 4631422C05Rik (NM_173866.1,330-348).
gctgcagcggggtatcaaa

SEQ ID NO: 606119 - DNA, 19 bp, Mus musculus
  siRNA target sequence for 4631422C05Rik (NM_173866.1,333-351).
gcagcggggtatcaaaaaa

SEQ ID NO: 606120 - DNA, 19 bp, Mus musculus
  siRNA target sequence for 4631422C05Rik (NM_173866.1,336-354).
gcggggtatcaaaaaacca

SEQ ID NO: 606121 - DNA, 19 bp, Mus musculus
  siRNA target sequence for 4631422C05Rik (NM_173866.1,337-355).
cggggtatcaaaaaaccat

SEQ ID NO: 606122 - DNA, 19 bp, Mus musculus
  siRNA target sequence for 4631422C05Rik (NM_173866.1,338-356).
ggggtatcaaaaaaccatt

SEQ ID NO: 606123 - DNA, 19 bp, Mus musculus
  siRNA target sequence for 4631422C05Rik (NM_173866.1,363-381).
ggtaatccgagccaacatt

SEQ ID NO: 606124 - DNA, 19 bp, Mus musculus
  siRNA target sequence for 4631422C05Rik (NM_173866.1,441-459).
ctgcacctacccaaaccta

SEQ ID NO: 606125 - DNA, 19 bp, Mus musculus
  siRNA target sequence for 4631422C05Rik (NM_173866.1,446-464).
cctacccaaacctactaaa

SEQ ID NO: 606126 - DNA, 19 bp, Mus musculus
  siRNA target sequence for 4631422C05Rik (NM_173866.1,554-572).
gccaaggcgttaactgtat

SEQ ID NO: 606127 - DNA, 19 bp, Mus musculus
  siRNA target sequence for 4631422C05Rik (NM_173866.1,776-794).
cggtgcaggtcaactacta

SEQ ID NO: 606128 - DNA, 19 bp, Mus musculus
  siRNA target sequence for 4631422C05Rik (NM_173866.1,777-795).
ggtgcaggtcaactactat

SEQ ID NO: 606129 - DNA, 19 bp, Mus musculus
  siRNA target sequence for 4631422C05Rik (NM_173866.1,874-892).
cctaaagttctctgcatta

SEQ ID NO: 606130 - DNA, 19 bp, Mus musculus
  siRNA target sequence for Agxt2l1 (NM_027907.1,177-195).
ccctcgtgcaaaattttct

SEQ ID NO: 606131 - DNA, 19 bp, Mus musculus
  siRNA target sequence for Agxt2l1 (NM_027907.1,201-219).
gcggatcccatcaaaataa

SEQ ID NO: 606132 - DNA, 19 bp, Mus musculus
  siRNA target sequence for Agxt2l1 (NM_027907.1,202-220).
cggatcccatcaaaataat

SEQ ID NO: 606133 - DNA, 19 bp, Mus musculus
  siRNA target sequence for Agxt2l1 (NM_027907.1,223-241).
gagcccaggggcagtacat

SEQ ID NO: 606134 - DNA, 19 bp, Mus musculus
  siRNA target sequence for Agxt2l1 (NM_027907.1,225-243).
gcccaggggcagtacatgt

SEQ ID NO: 606135 - DNA, 19 bp, Mus musculus
  siRNA target sequence for Agxt2l1 (NM_027907.1,226-244).
cccaggggcagtacatgtt

SEQ ID NO: 606136 - DNA, 19 bp, Mus musculus
  siRNA target sequence for Agxt2l1 (NM_027907.1,227-245).
ccaggggcagtacatgttt

SEQ ID NO: 606137 - DNA, 19 bp, Mus musculus
  siRNA target sequence for Agxt2l1 (NM_027907.1,230-248).
ggggcagtacatgtttgat

SEQ ID NO: 606138 - DNA, 19 bp, Mus musculus
  siRNA target sequence for Agxt2l1 (NM_027907.1,232-250).
ggcagtacatgtttgatga

SEQ ID NO: 606139 - DNA, 19 bp, Mus musculus
  siRNA target sequence for Agxt2l1 (NM_027907.1,251-269).
gaaaggcgaacggtactta

SEQ ID NO: 606140 - DNA, 19 bp, Mus musculus
  siRNA target sequence for Agxt2l1 (NM_027907.1,255-273).
ggcgaacggtacttagact

SEQ ID NO: 606141 - DNA, 19 bp, Mus musculus
  siRNA target sequence for Agxt2l1 (NM_027907.1,327-345).
gccgcgaaacagatggaat

SEQ ID NO: 606142 - DNA, 19 bp, Mus musculus
  siRNA target sequence for Agxt2l1 (NM_027907.1,328-346).
ccgcgaaacagatggaatt

SEQ ID NO: 606143 - DNA, 19 bp, Mus musculus
  siRNA target sequence for Agxt2l1 (NM_027907.1,329-347).
cgcgaaacagatggaatta

SEQ ID NO: 606144 - DNA, 19 bp, Mus musculus
  siRNA target sequence for Agxt2l1 (NM_027907.1,336-354).
cagatggaattactaaata

SEQ ID NO: 606145 - DNA, 19 bp, Mus musculus
  siRNA target sequence for Agxt2l1 (NM_027907.1,338-356).
gatggaattactaaataca

SEQ ID NO: 606146 - DNA, 19 bp, Mus musculus
  siRNA target sequence for Agxt2l1 (NM_027907.1,364-382).
gcttcctccacgacaacat

SEQ ID NO: 606147 - DNA, 19 bp, Mus musculus
  siRNA target sequence for Agxt2l1 (NM_027907.1,368-386).
cctccacgacaacatcatt

SEQ ID NO: 606148 - DNA, 19 bp, Mus musculus
  siRNA target sequence for Agxt2l1 (NM_027907.1,374-392).
cgacaacatcattgagttt

SEQ ID NO: 606149 - DNA, 19 bp, Mus musculus
  siRNA target sequence for Agxt2l1 (NM_027907.1,426-444).
ctctccgtttgctacttca

SEQ ID NO: 606150 - DNA, 19 bp, Mus musculus
  siRNA target sequence for Agxt2l1 (NM_027907.1,430-448).
ccgtttgctacttcacaaa

SEQ ID NO: 606151 - DNA, 19 bp, Mus musculus
  siRNA target sequence for Agxt2l1 (NM_027907.1,432-450).
gtttgctacttcacaaact

SEQ ID NO: 606152 - DNA, 19 bp, Mus musculus
  siRNA target sequence for Agxt2l1 (NM_027907.1,454-472).
gatccgaagccaatgactt

SEQ ID NO: 606153 - DNA, 19 bp, Mus musculus
  siRNA target sequence for Agxt2l1 (NM_027907.1,546-564).
ctgtcgtcattaattgaga

SEQ ID NO: 606154 - DNA, 19 bp, Mus musculus
  siRNA target sequence for Agxt2l1 (NM_027907.1,563-581).
gatcagtccttataagttt

SEQ ID NO: 606155 - DNA, 19 bp, Mus musculus
  siRNA target sequence for Agxt2l1 (NM_027907.1,769-787).
gttgtggtggacaaattat

SEQ ID NO: 606156 - DNA, 19 bp, Mus musculus
  siRNA target sequence for Agxt2l1 (NM_027907.1,848-866).
cattgctgacgaagttcaa

SEQ ID NO: 606157 - DNA, 19 bp, Mus musculus
  siRNA target sequence for Agxt2l1 (NM_027907.1,939-957).
gtcaccatggggaaaccta

SEQ ID NO: 606158 - DNA, 19 bp, Mus musculus
  siRNA target sequence for Agxt2l1 (NM_027907.1,1018-1036).
gcagctcgggcatggaata

SEQ ID NO: 606159 - DNA, 19 bp, Mus musculus
  siRNA target sequence for Agxt2l1 (NM_027907.1,1019-1037).
cagctcgggcatggaatat

SEQ ID NO: 606160 - DNA, 19 bp, Mus musculus
  siRNA target sequence for Agxt2l1 (NM_027907.1,1024-1042).
cgggcatggaatatttcaa

SEQ ID NO: 606161 - DNA, 19 bp, Mus musculus
  siRNA target sequence for Agxt2l1 (NM_027907.1,1026-1044).
ggcatggaatatttcaata

SEQ ID NO: 606162 - DNA, 19 bp, Mus musculus
  siRNA target sequence for Agxt2l1 (NM_027907.1,1031-1049).
ggaatatttcaatacgtat

SEQ ID NO: 606163 - DNA, 19 bp, Mus musculus
  siRNA target sequence for Agxt2l1 (NM_027907.1,1040-1058).
caatacgtatggaggaaat

SEQ ID NO: 606164 - DNA, 19 bp, Mus musculus
  siRNA target sequence for Agxt2l1 (NM_027907.1,1212-1230).
ctttttatcggcatcgatt

SEQ ID NO: 606165 - DNA, 19 bp, Mus musculus
  siRNA target sequence for Agxt2l1 (NM_027907.1,1267-1285).
ctgaagcacagcacatcat

SEQ ID NO: 606166 - DNA, 19 bp, Mus musculus
  siRNA target sequence for Agxt2l1 (NM_027907.1,1334-1352).
caggaacgtgctgaaaata

SEQ ID NO: 606167 - DNA, 19 bp, Mus musculus
  siRNA target sequence for Agxt2l1 (NM_027907.1,1372-1390).
cggaagacgatgcaaagtt

SEQ ID NO: 606168 - DNA, 19 bp, Mus musculus
  siRNA target sequence for Agxt2l1 (NM_027907.1,1400-1418).
ccaccttgacggcatttta

SEQ ID NO: 606169 - DNA, 19 bp, Mus musculus
  siRNA target sequence for Agxt2l1 (NM_027907.1,1403-1421).
ccttgacggcattttaaca

SEQ ID NO: 606170 - DNA, 19 bp, Mus musculus
  siRNA target sequence for Agxt2l1 (NM_027907.1,1407-1425).
gacggcattttaacagttt

SEQ ID NO: 606171 - DNA, 19 bp, Mus musculus
  siRNA target sequence for BC037135 (NM_173763.2,263-281).
gggttgaatttactaagtt

SEQ ID NO: 606172 - DNA, 19 bp, Mus musculus
  siRNA target sequence for BC037135 (NM_173763.2,311-329).
gacaaggctttccagatat

SEQ ID NO: 606173 - DNA, 19 bp, Mus musculus
  siRNA target sequence for BC037135 (NM_173763.2,332-350).
cccctccttcatacgtaaa

SEQ ID NO: 606174 - DNA, 19 bp, Mus musculus
  siRNA target sequence for BC037135 (NM_173763.2,333-351).
ccctccttcatacgtaaaa

SEQ ID NO: 606175 - DNA, 19 bp, Mus musculus
  siRNA target sequence for BC037135 (NM_173763.2,335-353).
ctccttcatacgtaaaaga

SEQ ID NO: 606176 - DNA, 19 bp, Mus musculus
  siRNA target sequence for BC037135 (NM_173763.2,338-356).
cttcatacgtaaaagaaga

SEQ ID NO: 606177 - DNA, 19 bp, Mus musculus
  siRNA target sequence for BC037135 (NM_173763.2,341-359).
catacgtaaaagaagagtt

SEQ ID NO: 606178 - DNA, 19 bp, Mus musculus
  siRNA target sequence for BC037135 (NM_173763.2,345-363).
cgtaaaagaagagttatca

SEQ ID NO: 606179 - DNA, 19 bp, Mus musculus
  siRNA target sequence for BC037135 (NM_173763.2,362-380).
caaaggctgcatttattga

SEQ ID NO: 606180 - DNA, 19 bp, Mus musculus
  siRNA target sequence for BC037135 (NM_173763.2,370-388).
gcatttattgataacatga

SEQ ID NO: 606181 - DNA, 19 bp, Mus musculus
  siRNA target sequence for BC037135 (NM_173763.2,437-455).
cctgcttatatggaaagat

SEQ ID NO: 606182 - DNA, 19 bp, Mus musculus
  siRNA target sequence for BC037135 (NM_173763.2,440-458).
gcttatatggaaagattta

SEQ ID NO: 606183 - DNA, 19 bp, Mus musculus
  siRNA target sequence for BC037135 (NM_173763.2,453-471).
gatttatcaacgtcaaatt

SEQ ID NO: 606184 - DNA, 19 bp, Mus musculus
  siRNA target sequence for BC037135 (NM_173763.2,495-513).
ggccgtgggggcatatgga

SEQ ID NO: 606185 - DNA, 19 bp, Mus musculus
  siRNA target sequence for BC037135 (NM_173763.2,575-593).
ctttttacgactgttatga

SEQ ID NO: 606186 - DNA, 19 bp, Mus musculus
  siRNA target sequence for BC037135 (NM_173763.2,612-630).
cggagcagtgcctgtgttt

SEQ ID NO: 606187 - DNA, 19 bp, Mus musculus
  siRNA target sequence for BC037135 (NM_173763.2,614-632).
gagcagtgcctgtgtttat

SEQ ID NO: 606188 - DNA, 19 bp, Mus musculus
  siRNA target sequence for BC037135 (NM_173763.2,649-667).
cctactgacgggatgaagt

SEQ ID NO: 606189 - DNA, 19 bp, Mus musculus
  siRNA target sequence for BC037135 (NM_173763.2,675-693).
ctctgactggacattcgat

SEQ ID NO: 606190 - DNA, 19 bp, Mus musculus
  siRNA target sequence for BC037135 (NM_173763.2,695-713).
ctcgagaactggaaagtaa

SEQ ID NO: 606191 - DNA, 19 bp, Mus musculus
  siRNA target sequence for BC037135 (NM_173763.2,697-715).
cgagaactggaaagtaaat

SEQ ID NO: 606192 - DNA, 19 bp, Mus musculus
  siRNA target sequence for BC037135 (NM_173763.2,760-778).
cccctcggcaaggtgtata

SEQ ID NO: 606193 - DNA, 19 bp, Mus musculus
  siRNA target sequence for BC037135 (NM_173763.2,763-781).
ctcggcaaggtgtatacca

SEQ ID NO: 606194 - DNA, 19 bp, Mus musculus
  siRNA target sequence for BC037135 (NM_173763.2,833-851).
gcatcagcgatgaggttta

SEQ ID NO: 606195 - DNA, 19 bp, Mus musculus
  siRNA target sequence for BC037135 (NM_173763.2,834-852).
catcagcgatgaggtttat

SEQ ID NO: 606196 - DNA, 19 bp, Mus musculus
  siRNA target sequence for BC037135 (NM_173763.2,869-887).
ctggacatacgcacgtaaa

SEQ ID NO: 606197 - DNA, 19 bp, Mus musculus
  siRNA target sequence for BC037135 (NM_173763.2,871-889).
ggacatacgcacgtaaaaa

SEQ ID NO: 606198 - DNA, 19 bp, Mus musculus
  siRNA target sequence for BC037135 (NM_173763.2,872-890).
gacatacgcacgtaaaaat

SEQ ID NO: 606199 - DNA, 19 bp, Mus musculus
  siRNA target sequence for BC037135 (NM_173763.2,986-1004).
gccctgctcacctgataaa

SEQ ID NO: 606200 - DNA, 19 bp, Mus musculus
  siRNA target sequence for BC037135 (NM_173763.2,991-1009).
gctcacctgataaagcatt

SEQ ID NO: 606201 - DNA, 19 bp, Mus musculus
  siRNA target sequence for BC037135 (NM_173763.2,1016-1034).
ccgttcaacagaacagttt

SEQ ID NO: 606202 - DNA, 19 bp, Mus musculus
  siRNA target sequence for BC037135 (NM_173763.2,1017-1035).
cgttcaacagaacagtttt

SEQ ID NO: 606203 - DNA, 19 bp, Mus musculus
  siRNA target sequence for BC037135 (NM_173763.2,1038-1056).
cacgtgtgcgactccttta

SEQ ID NO: 606204 - DNA, 19 bp, Mus musculus
  siRNA target sequence for BC037135 (NM_173763.2,1040-1058).
cgtgtgcgactcctttaca

SEQ ID NO: 606205 - DNA, 19 bp, Mus musculus
  siRNA target sequence for BC037135 (NM_173763.2,1075-1093).
gcgttttggatcgatatca

SEQ ID NO: 606206 - DNA, 19 bp, Mus musculus
  siRNA target sequence for BC037135 (NM_173763.2,1076-1094).
cgttttggatcgatatcaa

SEQ ID NO: 606207 - DNA, 19 bp, Mus musculus
  siRNA target sequence for BC037135 (NM_173763.2,1105-1123).
gaccctgagtgttacttta

SEQ ID NO: 606208 - DNA, 19 bp, Mus musculus
  siRNA target sequence for BC037135 (NM_173763.2,1132-1150).
ccaaaggaattagaagtaa

SEQ ID NO: 606209 - DNA, 19 bp, Mus musculus
  siRNA target sequence for BC037135 (NM_173763.2,1159-1177).
cggatggtccgtttactta

SEQ ID NO: 606210 - DNA, 19 bp, Mus musculus
  siRNA target sequence for BC037135 (NM_173763.2,1204-1222).
cctgacgggggttacttca

SEQ ID NO: 606211 - DNA, 19 bp, Mus musculus
  siRNA target sequence for BC037135 (NM_173763.2,1205-1223).
ctgacgggggttacttcat

SEQ ID NO: 606212 - DNA, 19 bp, Mus musculus
  siRNA target sequence for BC037135 (NM_173763.2,1207-1225).
gacgggggttacttcatca

SEQ ID NO: 606213 - DNA, 19 bp, Mus musculus
  siRNA target sequence for BC037135 (NM_173763.2,1209-1227).
cgggggttacttcatcatt

SEQ ID NO: 606214 - DNA, 19 bp, Mus musculus
  siRNA target sequence for BC037135 (NM_173763.2,1250-1268).
ctgacctctcggacatgaa

SEQ ID NO: 606215 - DNA, 19 bp, Mus musculus
  siRNA target sequence for BC037135 (NM_173763.2,1273-1291).
gatgagccttatgactata

SEQ ID NO: 606216 - DNA, 19 bp, Mus musculus
  siRNA target sequence for BC037135 (NM_173763.2,1276-1294).
gagccttatgactataagt

SEQ ID NO: 606217 - DNA, 19 bp, Mus musculus
  siRNA target sequence for BC037135 (NM_173763.2,1278-1296).
gccttatgactataagttt

SEQ ID NO: 606218 - DNA, 19 bp, Mus musculus
  siRNA target sequence for BC037135 (NM_173763.2,1299-1317).
gaagtggatgacgaaacat

SEQ ID NO: 606219 - DNA, 19 bp, Mus musculus
  siRNA target sequence for BC037135 (NM_173763.2,1350-1368).
ctgcgactccaagtctaaa

SEQ ID NO: 606220 - DNA, 19 bp, Mus musculus
  siRNA target sequence for BC037135 (NM_173763.2,1359-1377).
caagtctaaaccacacttt

SEQ ID NO: 606221 - DNA, 19 bp, Mus musculus
  siRNA target sequence for BC037135 (NM_173763.2,1364-1382).
ctaaaccacactttgagaa

SEQ ID NO: 606222 - DNA, 19 bp, Mus musculus
  siRNA target sequence for C130053K05Rik (NM_175467.1,220-238).
gaacgacagtgctgttaca

SEQ ID NO: 606223 - DNA, 19 bp, Mus musculus
  siRNA target sequence for C130053K05Rik (NM_175467.1,237-255).
caaatgggactctacacaa

SEQ ID NO: 606224 - DNA, 19 bp, Mus musculus
  siRNA target sequence for C130053K05Rik (NM_175467.1,373-391).
ccaggaagcaccactttat

SEQ ID NO: 606225 - DNA, 19 bp, Mus musculus
  siRNA target sequence for C130053K05Rik (NM_175467.1,383-401).
ccactttatgtctacgttt

SEQ ID NO: 606226 - DNA, 19 bp, Mus musculus
  siRNA target sequence for C130053K05Rik (NM_175467.1,384-402).
cactttatgtctacgtttt

SEQ ID NO: 606227 - DNA, 19 bp, Mus musculus
  siRNA target sequence for C130053K05Rik (NM_175467.1,386-404).
ctttatgtctacgttttaa

SEQ ID NO: 606228 - DNA, 19 bp, Mus musculus
  siRNA target sequence for C130053K05Rik (NM_175467.1,457-475).
gagaaactggggaattgaa

SEQ ID NO: 606229 - DNA, 19 bp, Mus musculus
  siRNA target sequence for C130053K05Rik (NM_175467.1,459-477).
gaaactggggaattgaaaa

SEQ ID NO: 606230 - DNA, 19 bp, Mus musculus
  siRNA target sequence for C130053K05Rik (NM_175467.1,489-507).
ctgtagagcgagaagaaca

SEQ ID NO: 606231 - DNA, 19 bp, Mus musculus
  siRNA target sequence for C130053K05Rik (NM_175467.1,524-542).
ctgtatcaggactttgaga

SEQ ID NO: 606232 - DNA, 19 bp, Mus musculus
  siRNA target sequence for C130053K05Rik (NM_175467.1,606-624).
ccccagagccttacatgaa

SEQ ID NO: 606233 - DNA, 19 bp, Mus musculus
  siRNA target sequence for C130053K05Rik (NM_175467.1,732-750).
ggaaatatgatgattcgat

SEQ ID NO: 606234 - DNA, 19 bp, Mus musculus
  siRNA target sequence for C130053K05Rik (NM_175467.1,743-761).
gattcgatggtgagagtta

SEQ ID NO: 606235 - DNA, 19 bp, Mus musculus
  siRNA target sequence for C130053K05Rik (NM_175467.1,747-765).
cgatggtgagagttaagga

SEQ ID NO: 606236 - DNA, 19 bp, Mus musculus
  siRNA target sequence for C130053K05Rik (NM_175467.1,752-770).
gtgagagttaaggatactt

SEQ ID NO: 606237 - DNA, 19 bp, Mus musculus
  siRNA target sequence for C130053K05Rik (NM_175467.1,793-811).
ggccagcaccagaaatgaa

SEQ ID NO: 606238 - DNA, 19 bp, Mus musculus
  siRNA target sequence for C130053K05Rik (NM_175467.1,815-833).
ggtaccttggatatacaca

SEQ ID NO: 606239 - DNA, 19 bp, Mus musculus
  siRNA target sequence for C130053K05Rik (NM_175467.1,853-871).
ggctgagttcttgaatgta

SEQ ID NO: 606240 - DNA, 19 bp, Mus musculus
  siRNA target sequence for C130053K05Rik (NM_175467.1,901-919).
cgcaaccaacgcaatgaat

SEQ ID NO: 606241 - DNA, 19 bp, Mus musculus
  siRNA target sequence for C130053K05Rik (NM_175467.1,902-920).
gcaaccaacgcaatgaata

SEQ ID NO: 606242 - DNA, 19 bp, Mus musculus
  siRNA target sequence for C130053K05Rik (NM_175467.1,903-921).
caaccaacgcaatgaatat

SEQ ID NO: 606243 - DNA, 19 bp, Mus musculus
  siRNA target sequence for C130053K05Rik (NM_175467.1,916-934).
gaatatccctgtatttgtt

SEQ ID NO: 606244 - DNA, 19 bp, Mus musculus
  siRNA target sequence for C130053K05Rik (NM_175467.1,1017-1035).
gacccttcaaacacaataa

SEQ ID NO: 606245 - DNA, 19 bp, Mus musculus
  siRNA target sequence for C130053K05Rik (NM_175467.1,1021-1039).
cttcaaacacaataatgca

SEQ ID NO: 606246 - DNA, 19 bp, Mus musculus
  siRNA target sequence for C130053K05Rik (NM_175467.1,1138-1156).
cagcatggaaggttccatt

SEQ ID NO: 606247 - DNA, 19 bp, Mus musculus
  siRNA target sequence for C130053K05Rik (NM_175467.1,1200-1218).
cttacctgtacattgatga

SEQ ID NO: 606248 - DNA, 19 bp, Mus musculus
  siRNA target sequence for C130053K05Rik (NM_175467.1,1253-1271).
cgaggcgtcagagagttat

SEQ ID NO: 606249 - DNA, 19 bp, Mus musculus
  siRNA target sequence for C130053K05Rik (NM_175467.1,1254-1272).
gaggcgtcagagagttatt

SEQ ID NO: 606250 - DNA, 19 bp, Mus musculus
  siRNA target sequence for C130053K05Rik (NM_175467.1,1274-1292).
ggactggaccctgaagata

SEQ ID NO: 606251 - DNA, 19 bp, Mus musculus
  siRNA target sequence for C130053K05Rik (NM_175467.1,1284-1302).
ctgaagatattgacgtata

SEQ ID NO: 606252 - DNA, 19 bp, Mus musculus
  siRNA target sequence for C130053K05Rik (NM_175467.1,1286-1304).
gaagatattgacgtataca

SEQ ID NO: 606253 - DNA, 19 bp, Mus musculus
  siRNA target sequence for C130053K05Rik (NM_175467.1,1327-1345).
ctcgggctcaggaggatat

SEQ ID NO: 606254 - DNA, 19 bp, Mus musculus
  siRNA target sequence for C130053K05Rik (NM_175467.1,1329-1347).
cgggctcaggaggatatat

SEQ ID NO: 606255 - DNA, 19 bp, Mus musculus
  siRNA target sequence for C130053K05Rik (NM_175467.1,1330-1348).
gggctcaggaggatatata

SEQ ID NO: 606256 - DNA, 19 bp, Mus musculus
  siRNA target sequence for C130053K05Rik (NM_175467.1,1350-1368).
gcgggaaaaaggaaattgt

SEQ ID NO: 606257 - DNA, 19 bp, Mus musculus
  siRNA target sequence for C130053K05Rik (NM_175467.1,1385-1403).
cagtcacatagcactactt

SEQ ID NO: 606258 - DNA, 19 bp, Mus musculus
  siRNA target sequence for C130053K05Rik (NM_175467.1,1387-1405).
gtcacatagcactacttat

SEQ ID NO: 606259 - DNA, 19 bp, Mus musculus
  siRNA target sequence for C130053K05Rik (NM_175467.1,1436-1454).
caactcatcagatcattga

SEQ ID NO: 606260 - DNA, 19 bp, Mus musculus
  siRNA target sequence for C130053K05Rik (NM_175467.1,1441-1459).
catcagatcattgaagata

SEQ ID NO: 606261 - DNA, 19 bp, Mus musculus
  siRNA target sequence for C130053K05Rik (NM_175467.1,1446-1464).
gatcattgaagataactat

SEQ ID NO: 606262 - DNA, 19 bp, Mus musculus
  siRNA target sequence for C130053K05Rik (NM_175467.1,1485-1503).
gaggtatggagagaataca

SEQ ID NO: 606263 - DNA, 19 bp, Mus musculus
  siRNA target sequence for C130053K05Rik (NM_175467.1,1493-1511).
gagagaatacagcaactta

SEQ ID NO: 606264 - DNA, 19 bp, Mus musculus
  siRNA target sequence for C130053K05Rik (NM_175467.1,1504-1522).
gcaacttaaggaaaacata

SEQ ID NO: 606265 - DNA, 19 bp, Mus musculus
  siRNA target sequence for C130053K05Rik (NM_175467.1,1528-1546).
cttccgacggcgactgaaa

SEQ ID NO: 606266 - DNA, 19 bp, Mus musculus
  siRNA target sequence for C130053K05Rik (NM_175467.1,1532-1550).
cgacggcgactgaaagaga

SEQ ID NO: 606267 - DNA, 19 bp, Mus musculus
  siRNA target sequence for C130053K05Rik (NM_175467.1,1621-1639).
gtctgctttcagcagattt

SEQ ID NO: 606268 - DNA, 19 bp, Mus musculus
  siRNA target sequence for C130053K05Rik (NM_175467.1,1663-1681).
ggtggttgttggatttcca

SEQ ID NO: 606269 - DNA, 19 bp, Mus musculus
  siRNA target sequence for C130053K05Rik (NM_175467.1,1728-1746).
cacatactcgggagatgtt

SEQ ID NO: 606270 - DNA, 19 bp, Mus musculus
  siRNA target sequence for C130053K05Rik (NM_175467.1,1781-1799).
gatctcctgaacgtgaaat

SEQ ID NO: 606271 - DNA, 19 bp, Mus musculus
  siRNA target sequence for C130053K05Rik (NM_175467.1,1813-1831).
gaaatcagggcgtgctata

SEQ ID NO: 606272 - DNA, 19 bp, Mus musculus
  siRNA target sequence for C130053K05Rik (NM_175467.1,1818-1836).
cagggcgtgctatactcta

SEQ ID NO: 606273 - DNA, 19 bp, Mus musculus
  siRNA target sequence for C130053K05Rik (NM_175467.1,1821-1839).
ggcgtgctatactctacaa

SEQ ID NO: 606274 - DNA, 19 bp, Mus musculus
  siRNA target sequence for C130053K05Rik (NM_175467.1,1822-1840).
gcgtgctatactctacaat

SEQ ID NO: 606275 - DNA, 19 bp, Mus musculus
  siRNA target sequence for C130053K05Rik (NM_175467.1,1823-1841).
cgtgctatactctacaata

SEQ ID NO: 606276 - DNA, 19 bp, Mus musculus
  siRNA target sequence for C130053K05Rik (NM_175467.1,1824-1842).
gtgctatactctacaataa

SEQ ID NO: 606277 - DNA, 19 bp, Mus musculus
  siRNA target sequence for C130053K05Rik (NM_175467.1,1827-1845).
ctatactctacaataagga

SEQ ID NO: 606278 - DNA, 19 bp, Mus musculus
  siRNA target sequence for Ccbl1 (NM_172404.2,498-516).
gatcctggcaagtttcttt

SEQ ID NO: 606279 - DNA, 19 bp, Mus musculus
  siRNA target sequence for Ccbl1 (NM_172404.2,633-651).
catcatcgaacctgctttt

SEQ ID NO: 606280 - DNA, 19 bp, Mus musculus
  siRNA target sequence for Ccbl1 (NM_172404.2,636-654).
catcgaacctgcttttaat

SEQ ID NO: 606281 - DNA, 19 bp, Mus musculus
  siRNA target sequence for Ccbl1 (NM_172404.2,656-674).
gttacgaacccatgacaat

SEQ ID NO: 606282 - DNA, 19 bp, Mus musculus
  siRNA target sequence for Ccbl1 (NM_172404.2,924-942).
ccagtggctggtctatgat

SEQ ID NO: 606283 - DNA, 19 bp, Mus musculus
  siRNA target sequence for Ccbl1 (NM_172404.2,1004-1022).
gcagcgcaggcaaaagctt

SEQ ID NO: 606284 - DNA, 19 bp, Mus musculus
  siRNA target sequence for Ccbl1 (NM_172404.2,1049-1067).
gggtcatgggtccagataa

SEQ ID NO: 606285 - DNA, 19 bp, Mus musculus
  siRNA target sequence for Ccbl1 (NM_172404.2,1051-1069).
gtcatgggtccagataaca

SEQ ID NO: 606286 - DNA, 19 bp, Mus musculus
  siRNA target sequence for Ccbl1 (NM_172404.2,1090-1108).
gtgcaccagaactctatct

SEQ ID NO: 606287 - DNA, 19 bp, Mus musculus
  siRNA target sequence for Ccbl1 (NM_172404.2,1096-1114).
cagaactctatctttcact

SEQ ID NO: 606288 - DNA, 19 bp, Mus musculus
  siRNA target sequence for Ccbl1 (NM_172404.2,1155-1173).
gcgggagcagcaacacttt

SEQ ID NO: 606289 - DNA, 19 bp, Mus musculus
  siRNA target sequence for Ccbl1 (NM_172404.2,1174-1192).
ggacaacccagcagttact

SEQ ID NO: 606290 - DNA, 19 bp, Mus musculus
  siRNA target sequence for Ccbl1 (NM_172404.2,1335-1353).
cctgcctggtgctatggat

SEQ ID NO: 606291 - DNA, 19 bp, Mus musculus
  siRNA target sequence for Ccbl1 (NM_172404.2,1350-1368).
ggatgagccctatgataca

SEQ ID NO: 606292 - DNA, 19 bp, Mus musculus
  siRNA target sequence for Ccbl1 (NM_172404.2,1376-1394).
ccaagtggatgatcaaaaa

SEQ ID NO: 606293 - DNA, 19 bp, Mus musculus
  siRNA target sequence for Ccbl1 (NM_172404.2,1433-1451).
gccagccccatcataagga

SEQ ID NO: 606294 - DNA, 19 bp, Mus musculus
  siRNA target sequence for Ccbl1 (NM_172404.2,1439-1457).
cccatcataaggactttga

SEQ ID NO: 606295 - DNA, 19 bp, Mus musculus
  siRNA target sequence for Gpt1 (NM_182805.1,291-309).
ggttatccgtgccaatatt

SEQ ID NO: 606296 - DNA, 19 bp, Mus musculus
  siRNA target sequence for Gpt1 (NM_182805.1,369-387).
ctgtgtctaccccaatctt

SEQ ID NO: 606297 - DNA, 19 bp, Mus musculus
  siRNA target sequence for Gpt1 (NM_182805.1,466-484).
ggtgcctatagcattagct

SEQ ID NO: 606298 - DNA, 19 bp, Mus musculus
  siRNA target sequence for Gpt1 (NM_182805.1,511-529).
gtggcgcaatatattgaga

SEQ ID NO: 606299 - DNA, 19 bp, Mus musculus
  siRNA target sequence for Gpt1 (NM_182805.1,550-568).
gcagacccgaacaacatat

SEQ ID NO: 606300 - DNA, 19 bp, Mus musculus
  siRNA target sequence for Gpt1 (NM_182805.1,638-656).
cgcgaaccggtgtactcat

SEQ ID NO: 606301 - DNA, 19 bp, Mus musculus
  siRNA target sequence for Gpt1 (NM_182805.1,639-657).
gcgaaccggtgtactcatt

SEQ ID NO: 606302 - DNA, 19 bp, Mus musculus
  siRNA target sequence for Gpt1 (NM_182805.1,707-725).
ccgtgcaagtggactacta

SEQ ID NO: 606303 - DNA, 19 bp, Mus musculus
  siRNA target sequence for Gpt1 (NM_182805.1,809-827).
gagtactatgcgtcatcaa

SEQ ID NO: 606304 - DNA, 19 bp, Mus musculus
  siRNA target sequence for Gpt1 (NM_182805.1,874-892).
gccgtaatccgctttgctt

SEQ ID NO: 606305 - DNA, 19 bp, Mus musculus
  siRNA target sequence for Gpt1 (NM_182805.1,924-942).
ggtataccaagacaatgta

SEQ ID NO: 606306 - DNA, 19 bp, Mus musculus
  siRNA target sequence for Gpt1 (NM_182805.1,958-976).
cagttccattcattcaaga

SEQ ID NO: 606307 - DNA, 19 bp, Mus musculus
  siRNA target sequence for Gpt1 (NM_182805.1,987-1005).
ggagatggggccaccatat

SEQ ID NO: 606308 - DNA, 19 bp, Mus musculus
  siRNA target sequence for Gpt1 (NM_182805.1,1028-1046).
ctttccactcagtctctaa

SEQ ID NO: 606309 - DNA, 19 bp, Mus musculus
  siRNA target sequence for Gpt1 (NM_182805.1,1079-1097).
gctatgtggaagtggtaaa

SEQ ID NO: 606310 - DNA, 19 bp, Mus musculus
  siRNA target sequence for Gpt1 (NM_182805.1,1214-1232).
cgtccttcaagcagtttca

SEQ ID NO: 606311 - DNA, 19 bp, Mus musculus
  siRNA target sequence for Gpt1 (NM_182805.1,1264-1282).
gcagccaaggctaaactca

SEQ ID NO: 606312 - DNA, 19 bp, Mus musculus
  siRNA target sequence for Gpt1 (NM_182805.1,1325-1343).
cggtgcagggcgctatgta

SEQ ID NO: 606313 - DNA, 19 bp, Mus musculus
  siRNA target sequence for Gpt1 (NM_182805.1,1326-1344).
ggtgcagggcgctatgtat

SEQ ID NO: 606314 - DNA, 19 bp, Mus musculus
  siRNA target sequence for Gpt1 (NM_182805.1,1327-1345).
gtgcagggcgctatgtatt

SEQ ID NO: 606315 - DNA, 19 bp, Mus musculus
  siRNA target sequence for Gpt1 (NM_182805.1,1330-1348).
cagggcgctatgtattcct

SEQ ID NO: 606316 - DNA, 19 bp, Mus musculus
  siRNA target sequence for Gpt1 (NM_182805.1,1482-1500).
gcaggagggcacctatcat

SEQ ID NO: 606317 - DNA, 19 bp, Mus musculus
  siRNA target sequence for Gpt1 (NM_182805.1,1557-1575).
gaggcacttccatgctaaa

SEQ ID NO: 606318 - DNA, 19 bp, Mus musculus
  siRNA target sequence for Gpt1 (NM_182805.1,1559-1577).
ggcacttccatgctaaatt

SEQ ID NO: 606319 - DNA, 19 bp, Mus musculus
  siRNA target sequence for Gpt1 (NM_182805.1,1561-1579).
cacttccatgctaaattca

SEQ ID NO: 606320 - DNA, 19 bp, Mus musculus
  siRNA target sequence for Kat2 (NM_011834.1,148-166).
gaactacagcggacatact

SEQ ID NO: 606321 - DNA, 19 bp, Mus musculus
  siRNA target sequence for Kat2 (NM_011834.1,217-235).
cgagcatgttcccctttaa

SEQ ID NO: 606322 - DNA, 19 bp, Mus musculus
  siRNA target sequence for Kat2 (NM_011834.1,274-292).
ggtttgaagacgacttgat

SEQ ID NO: 606323 - DNA, 19 bp, Mus musculus
  siRNA target sequence for Kat2 (NM_011834.1,311-329).
ctctccaagctatggaatt

SEQ ID NO: 606324 - DNA, 19 bp, Mus musculus
  siRNA target sequence for Kat2 (NM_011834.1,341-359).
gtcctggctaaaacagttt

SEQ ID NO: 606325 - DNA, 19 bp, Mus musculus
  siRNA target sequence for Kat2 (NM_011834.1,343-361).
cctggctaaaacagtttca

SEQ ID NO: 606326 - DNA, 19 bp, Mus musculus
  siRNA target sequence for Kat2 (NM_011834.1,344-362).
ctggctaaaacagtttcaa

SEQ ID NO: 606327 - DNA, 19 bp, Mus musculus
  siRNA target sequence for Kat2 (NM_011834.1,460-478).
catttgaaatgctcatcaa

SEQ ID NO: 606328 - DNA, 19 bp, Mus musculus
  siRNA target sequence for Kat2 (NM_011834.1,488-506).
cactatcctggtcaatgaa

SEQ ID NO: 606329 - DNA, 19 bp, Mus musculus
  siRNA target sequence for Kat2 (NM_011834.1,497-515).
ggtcaatgaaccactgttt

SEQ ID NO: 606330 - DNA, 19 bp, Mus musculus
  siRNA target sequence for Kat2 (NM_011834.1,516-534).
ccaggaaccctttatgcta

SEQ ID NO: 606331 - DNA, 19 bp, Mus musculus
  siRNA target sequence for Kat2 (NM_011834.1,517-535).
caggaaccctttatgctat

SEQ ID NO: 606332 - DNA, 19 bp, Mus musculus
  siRNA target sequence for Kat2 (NM_011834.1,520-538).
gaaccctttatgctatgaa

SEQ ID NO: 606333 - DNA, 19 bp, Mus musculus
  siRNA target sequence for Kat2 (NM_011834.1,540-558).
ccactaggctgcaacatta

SEQ ID NO: 606334 - DNA, 19 bp, Mus musculus
  siRNA target sequence for Kat2 (NM_011834.1,541-559).
cactaggctgcaacattat

SEQ ID NO: 606335 - DNA, 19 bp, Mus musculus
  siRNA target sequence for Kat2 (NM_011834.1,592-610).
cagagggtctcaaaaaaat

SEQ ID NO: 606336 - DNA, 19 bp, Mus musculus
  siRNA target sequence for Kat2 (NM_011834.1,641-659).
ggatcccacaaaaaagact

SEQ ID NO: 606337 - DNA, 19 bp, Mus musculus
  siRNA target sequence for Kat2 (NM_011834.1,656-674).
gactccaaaatttctgtat

SEQ ID NO: 606338 - DNA, 19 bp, Mus musculus
  siRNA target sequence for Kat2 (NM_011834.1,717-735).
ggtgaccgcaagaaggaaa

SEQ ID NO: 606339 - DNA, 19 bp, Mus musculus
  siRNA target sequence for Kat2 (NM_011834.1,718-736).
gtgaccgcaagaaggaaat

SEQ ID NO: 606340 - DNA, 19 bp, Mus musculus
  siRNA target sequence for Kat2 (NM_011834.1,859-877).
gagctgacaccttttcaaa

SEQ ID NO: 606341 - DNA, 19 bp, Mus musculus
  siRNA target sequence for Kat2 (NM_011834.1,896-914).
gagagtagggtttatgact

SEQ ID NO: 606342 - DNA, 19 bp, Mus musculus
  siRNA target sequence for Kat2 (NM_011834.1,918-936).
cctaagaccttgatacaga

SEQ ID NO: 606343 - DNA, 19 bp, Mus musculus
  siRNA target sequence for Kat2 (NM_011834.1,926-944).
cttgatacagaatattgtt

SEQ ID NO: 606344 - DNA, 19 bp, Mus musculus
  siRNA target sequence for Kat2 (NM_011834.1,1147-1165).
gcatgtttctatggattaa

SEQ ID NO: 606345 - DNA, 19 bp, Mus musculus
  siRNA target sequence for Kat2 (NM_011834.1,1341-1359).
gcccaactgataaaagagt

SEQ ID NO: 606346 - DNA, 19 bp, Mus musculus
  siRNA target sequence for Kat2 (NM_011834.1,1347-1365).
ctgataaaagagtctttat

SEQ ID NO: 606347 - DNA, 19 bp, Mus musculus
  siRNA target sequence for Nfs1 (NM_010911.1,158-176).
gcctgcgcgttgtagatca

SEQ ID NO: 606348 - DNA, 19 bp, Mus musculus
  siRNA target sequence for Nfs1 (NM_010911.1,286-304).
ccataccttgtcaactact

SEQ ID NO: 606349 - DNA, 19 bp, Mus musculus
  siRNA target sequence for Nfs1 (NM_010911.1,287-305).
cataccttgtcaactacta

SEQ ID NO: 606350 - DNA, 19 bp, Mus musculus
  siRNA target sequence for Nfs1 (NM_010911.1,303-321).
ctatgggaaccctcattct

SEQ ID NO: 606351 - DNA, 19 bp, Mus musculus
  siRNA target sequence for Nfs1 (NM_010911.1,403-421).
cctcgggagatcattttca

SEQ ID NO: 606352 - DNA, 19 bp, Mus musculus
  siRNA target sequence for Nfs1 (NM_010911.1,430-448).
gctactgagtccaacaaca

SEQ ID NO: 606353 - DNA, 19 bp, Mus musculus
  siRNA target sequence for Nfs1 (NM_010911.1,431-449).
ctactgagtccaacaacat

SEQ ID NO: 606354 - DNA, 19 bp, Mus musculus
  siRNA target sequence for Nfs1 (NM_010911.1,471-489).
gttctacaggtcaaggaaa

SEQ ID NO: 606355 - DNA, 19 bp, Mus musculus
  siRNA target sequence for Nfs1 (NM_010911.1,591-609).
gagcgggatcattgactta

SEQ ID NO: 606356 - DNA, 19 bp, Mus musculus
  siRNA target sequence for Nfs1 (NM_010911.1,593-611).
gcgggatcattgacttaaa

SEQ ID NO: 606357 - DNA, 19 bp, Mus musculus
  siRNA target sequence for Nfs1 (NM_010911.1,645-663).
cctggtctccgttatgact

SEQ ID NO: 606358 - DNA, 19 bp, Mus musculus
  siRNA target sequence for Nfs1 (NM_010911.1,654-672).
cgttatgactgtgaacaat

SEQ ID NO: 606359 - DNA, 19 bp, Mus musculus
  siRNA target sequence for Nfs1 (NM_010911.1,772-790).
ccacttgacgtcaatgaca

SEQ ID NO: 606360 - DNA, 19 bp, Mus musculus
  siRNA target sequence for Nfs1 (NM_010911.1,780-798).
cgtcaatgacatgaagatt

SEQ ID NO: 606361 - DNA, 19 bp, Mus musculus
  siRNA target sequence for Nfs1 (NM_010911.1,783-801).
caatgacatgaagattgat

SEQ ID NO: 606362 - DNA, 19 bp, Mus musculus
  siRNA target sequence for Nfs1 (NM_010911.1,809-827).
gcatcagcggtcacaaact

SEQ ID NO: 606363 - DNA, 19 bp, Mus musculus
  siRNA target sequence for Nfs1 (NM_010911.1,841-859).
ggggttggtgctatctata

SEQ ID NO: 606364 - DNA, 19 bp, Mus musculus
  siRNA target sequence for Nfs1 (NM_010911.1,842-860).
gggttggtgctatctatat

SEQ ID NO: 606365 - DNA, 19 bp, Mus musculus
  siRNA target sequence for Nfs1 (NM_010911.1,974-992).
gtgagttggcacaacaaga

SEQ ID NO: 606366 - DNA, 19 bp, Mus musculus
  siRNA target sequence for Nfs1 (NM_010911.1,1003-1021).
gaccataagcggatctcaa

SEQ ID NO: 606367 - DNA, 19 bp, Mus musculus
  siRNA target sequence for Nfs1 (NM_010911.1,1006-1024).
cataagcggatctcaaagt

SEQ ID NO: 606368 - DNA, 19 bp, Mus musculus
  siRNA target sequence for Nfs1 (NM_010911.1,1060-1078).
cttccagatgtggtaatga

SEQ ID NO: 606369 - DNA, 19 bp, Mus musculus
  siRNA target sequence for Nfs1 (NM_010911.1,1096-1114).
cactaccctggctgtatca

SEQ ID NO: 606370 - DNA, 19 bp, Mus musculus
  siRNA target sequence for Nfs1 (NM_010911.1,1344-1362).
gcgccttcgagaaatgagt

SEQ ID NO: 606371 - DNA, 19 bp, Mus musculus
  siRNA target sequence for Taldo1 (NM_011528.1,670-688).
ccaaaatctacaactacta

SEQ ID NO: 606372 - DNA, 19 bp, Mus musculus
  siRNA target sequence for 2310042P20Rik (NM_028003.1,100-118).
cgagtaaggcagttgagtt

SEQ ID NO: 606373 - DNA, 19 bp, Mus musculus
  siRNA target sequence for 2310042P20Rik (NM_028003.1,242-260).
gaatttacctcctattcga

SEQ ID NO: 606374 - DNA, 19 bp, Mus musculus
  siRNA target sequence for 2310042P20Rik (NM_028003.1,253-271).
ctattcgaaatgggaattt

SEQ ID NO: 606375 - DNA, 19 bp, Mus musculus
  siRNA target sequence for 2310042P20Rik (NM_028003.1,504-522).
gaaaagggcaataagtact

SEQ ID NO: 606376 - DNA, 19 bp, Mus musculus
  siRNA target sequence for 2310042P20Rik (NM_028003.1,648-666).
gctgagtctgactgtaact

SEQ ID NO: 606377 - DNA, 19 bp, Mus musculus
  siRNA target sequence for 2310042P20Rik (NM_028003.1,649-667).
ctgagtctgactgtaactt

SEQ ID NO: 606378 - DNA, 19 bp, Mus musculus
  siRNA target sequence for 2310042P20Rik (NM_028003.1,744-762).
gaggacgccagaaaagatt

SEQ ID NO: 606379 - DNA, 19 bp, Mus musculus
  siRNA target sequence for 2310042P20Rik (NM_028003.1,746-764).
ggacgccagaaaagattat

SEQ ID NO: 606380 - DNA, 19 bp, Mus musculus
  siRNA target sequence for 2310042P20Rik (NM_028003.1,1109-1127).
ctgcacacaagctatcgta

SEQ ID NO: 606381 - DNA, 19 bp, Mus musculus
  siRNA target sequence for 2310042P20Rik (NM_028003.1,1114-1132).
cacaagctatcgtactaga

SEQ ID NO: 606382 - DNA, 19 bp, Mus musculus
  siRNA target sequence for 2310042P20Rik (NM_028003.1,1128-1146).
ctagatggctcatactcaa

SEQ ID NO: 606383 - DNA, 19 bp, Mus musculus
  siRNA target sequence for 2310042P20Rik (NM_028003.1,1174-1192).
ggacatttttgggaaagat

SEQ ID NO: 606384 - DNA, 19 bp, Mus musculus
  siRNA target sequence for 2310042P20Rik (NM_028003.1,1177-1195).
catttttgggaaagatcaa

SEQ ID NO: 606385 - DNA, 19 bp, Mus musculus
  siRNA target sequence for 2310042P20Rik (NM_028003.1,1258-1276).
ccgagctttccagaatcaa

SEQ ID NO: 606386 - DNA, 19 bp, Mus musculus
  siRNA target sequence for 2310042P20Rik (NM_028003.1,1259-1277).
cgagctttccagaatcaaa

SEQ ID NO: 606387 - DNA, 19 bp, Mus musculus
  siRNA target sequence for 2310042P20Rik (NM_028003.1,1770-1788).
ctgtatcagtatgtaaaga

SEQ ID NO: 606388 - DNA, 19 bp, Mus musculus
  siRNA target sequence for 2310042P20Rik (NM_028003.1,1830-1848).
ctagatccagatgtattca

SEQ ID NO: 606389 - DNA, 19 bp, Mus musculus
  siRNA target sequence for 2310042P20Rik (NM_028003.1,1836-1854).
ccagatgtattcaatcaaa

SEQ ID NO: 606390 - DNA, 19 bp, Mus musculus
  siRNA target sequence for 2310042P20Rik (NM_028003.1,1842-1860).
gtattcaatcaaatcatta

SEQ ID NO: 606391 - DNA, 19 bp, Mus musculus
  siRNA target sequence for 2310042P20Rik (NM_028003.1,2003-2021).
caatcacttagaaaaatca

SEQ ID NO: 606392 - DNA, 19 bp, Mus musculus
  siRNA target sequence for 3322402E17Rik (NM_028715.2,111-129).
catttttggggcgacaaaa

SEQ ID NO: 606393 - DNA, 19 bp, Mus musculus
  siRNA target sequence for 3322402E17Rik (NM_028715.2,495-513).
ccaaagtctcgcgagaatt

SEQ ID NO: 606394 - DNA, 19 bp, Mus musculus
  siRNA target sequence for 3322402E17Rik (NM_028715.2,496-514).
caaagtctcgcgagaatta

SEQ ID NO: 606395 - DNA, 19 bp, Mus musculus
  siRNA target sequence for 3322402E17Rik (NM_028715.2,645-663).
gcccgagccgactttgaga

SEQ ID NO: 606396 - DNA, 19 bp, Mus musculus
  siRNA target sequence for 3322402E17Rik (NM_028715.2,646-664).
cccgagccgactttgagat

SEQ ID NO: 606397 - DNA, 19 bp, Mus musculus
  siRNA target sequence for 3322402E17Rik (NM_028715.2,886-904).
ctctggacttcgatgcata

SEQ ID NO: 606398 - DNA, 19 bp, Mus musculus
  siRNA target sequence for 3322402E17Rik (NM_028715.2,991-1009).
gtgcatctgttgatttcct

SEQ ID NO: 606399 - DNA, 19 bp, Mus musculus
  siRNA target sequence for 3322402E17Rik (NM_028715.2,1067-1085).
cgatatatctcagaacaat

SEQ ID NO: 606400 - DNA, 19 bp, Mus musculus
  siRNA target sequence for 3322402E17Rik (NM_028715.2,1144-1162).
gaaagttctatgttcacat

SEQ ID NO: 606401 - DNA, 19 bp, Mus musculus
  siRNA target sequence for 3322402E17Rik (NM_028715.2,1256-1274).
cccagggggcaccatgaaa

SEQ ID NO: 606402 - DNA, 19 bp, Mus musculus
  siRNA target sequence for 3322402E17Rik (NM_028715.2,1265-1283).
caccatgaaacgtcattca

SEQ ID NO: 606403 - DNA, 19 bp, Mus musculus
  siRNA target sequence for 3322402E17Rik (NM_028715.2,1268-1286).
catgaaacgtcattcatca

SEQ ID NO: 606404 - DNA, 19 bp, Mus musculus
  siRNA target sequence for 3322402E17Rik (NM_028715.2,1734-1752).
ccacggtccaggaaagtgt

SEQ ID NO: 606405 - DNA, 19 bp, Mus musculus
  siRNA target sequence for 3322402E17Rik (NM_028715.2,1992-2010).
cgagtcaccggggagttaa

SEQ ID NO: 606406 - DNA, 19 bp, Mus musculus
  siRNA target sequence for 3322402E17Rik (NM_028715.2,2387-2405).
gtccacgccactcactaat

SEQ ID NO: 606407 - DNA, 19 bp, Mus musculus
  siRNA target sequence for 3322402E17Rik (NM_028715.2,2389-2407).
ccacgccactcactaatgt

SEQ ID NO: 606408 - DNA, 19 bp, Mus musculus
  siRNA target sequence for 3322402E17Rik (NM_028715.2,2581-2599).
gccccgtggccgcacaatt

SEQ ID NO: 606409 - DNA, 19 bp, Mus musculus
  siRNA target sequence for 3322402E17Rik (NM_028715.2,2583-2601).
cccgtggccgcacaattca

SEQ ID NO: 606410 - DNA, 19 bp, Mus musculus
  siRNA target sequence for 4732435N03Rik (NM_172753.2,388-406).
gatttctcgggtagtgatt

SEQ ID NO: 606411 - DNA, 19 bp, Mus musculus
  siRNA target sequence for 4732435N03Rik (NM_172753.2,546-564).
gcgaggaacagcatcgtaa

SEQ ID NO: 606412 - DNA, 19 bp, Mus musculus
  siRNA target sequence for 4732435N03Rik (NM_172753.2,550-568).
ggaacagcatcgtaactat

SEQ ID NO: 606413 - DNA, 19 bp, Mus musculus
  siRNA target sequence for 4732435N03Rik (NM_172753.2,554-572).
cagcatcgtaactatgtga

SEQ ID NO: 606414 - DNA, 19 bp, Mus musculus
  siRNA target sequence for 4732435N03Rik (NM_172753.2,556-574).
gcatcgtaactatgtgaat

SEQ ID NO: 606415 - DNA, 19 bp, Mus musculus
  siRNA target sequence for 4732435N03Rik (NM_172753.2,565-583).
ctatgtgaatagccttaaa

SEQ ID NO: 606416 - DNA, 19 bp, Mus musculus
  siRNA target sequence for 4732435N03Rik (NM_172753.2,589-607).
gatagctcagctaaaggat

SEQ ID NO: 606417 - DNA, 19 bp, Mus musculus
  siRNA target sequence for 4732435N03Rik (NM_172753.2,893-911).
ctggtagaagccatcgaat

SEQ ID NO: 606418 - DNA, 19 bp, Mus musculus
  siRNA target sequence for 4732435N03Rik (NM_172753.2,997-1015).
ccgaaccgaaagggataaa

SEQ ID NO: 606419 - DNA, 19 bp, Mus musculus
  siRNA target sequence for 4732435N03Rik (NM_172753.2,1008-1026).
gggataaaggcactttgta

SEQ ID NO: 606420 - DNA, 19 bp, Mus musculus
  siRNA target sequence for 4732435N03Rik (NM_172753.2,1043-1061).
ggggaccacaagcatgaat

SEQ ID NO: 606421 - DNA, 19 bp, Mus musculus
  siRNA target sequence for 4732435N03Rik (NM_172753.2,1066-1084).
gcgacttgtcctatttcga

SEQ ID NO: 606422 - DNA, 19 bp, Mus musculus
  siRNA target sequence for 4732435N03Rik (NM_172753.2,1129-1147).
ggccaacacgcttatcaat

SEQ ID NO: 606423 - DNA, 19 bp, Mus musculus
  siRNA target sequence for 4732435N03Rik (NM_172753.2,1131-1149).
ccaacacgcttatcaatgt

SEQ ID NO: 606424 - DNA, 19 bp, Mus musculus
  siRNA target sequence for 4732435N03Rik (NM_172753.2,1132-1150).
caacacgcttatcaatgtt

SEQ ID NO: 606425 - DNA, 19 bp, Mus musculus
  siRNA target sequence for 4732435N03Rik (NM_172753.2,1137-1155).
cgcttatcaatgttattgt

SEQ ID NO: 606426 - DNA, 19 bp, Mus musculus
  siRNA target sequence for 4732435N03Rik (NM_172753.2,1164-1182).
cgaggagggtggacaagtt

SEQ ID NO: 606427 - DNA, 19 bp, Mus musculus
  siRNA target sequence for 4732435N03Rik (NM_172753.2,1404-1422).
gtaacgtcctgctcttttt

SEQ ID NO: 606428 - DNA, 19 bp, Mus musculus
  siRNA target sequence for 4732435N03Rik (NM_172753.2,1425-1443).
gtgatgtagacatctactt

SEQ ID NO: 606429 - DNA, 19 bp, Mus musculus
  siRNA target sequence for 4732435N03Rik (NM_172753.2,1571-1589).
ggacagcagctggtcataa

SEQ ID NO: 606430 - DNA, 19 bp, Mus musculus
  siRNA target sequence for 4732435N03Rik (NM_172753.2,1574-1592).
cagcagctggtcataaaga

SEQ ID NO: 606431 - DNA, 19 bp, Mus musculus
  siRNA target sequence for 4732435N03Rik (NM_172753.2,1643-1661).
cggtcagacttcatcaaca

SEQ ID NO: 606432 - DNA, 19 bp, Mus musculus
  siRNA target sequence for 4732435N03Rik (NM_172753.2,1644-1662).
ggtcagacttcatcaacat

SEQ ID NO: 606433 - DNA, 19 bp, Mus musculus
  siRNA target sequence for 4732435N03Rik (NM_172753.2,1708-1726).
gcacctgtaccggaaatat

SEQ ID NO: 606434 - DNA, 19 bp, Mus musculus
  siRNA target sequence for 4732435N03Rik (NM_172753.2,1755-1773).
cacctgtacggggactttt

SEQ ID NO: 606435 - DNA, 19 bp, Mus musculus
  siRNA target sequence for 4732435N03Rik (NM_172753.2,1758-1776).
ctgtacggggacttttcca

SEQ ID NO: 606436 - DNA, 19 bp, Mus musculus
  siRNA target sequence for 4732435N03Rik (NM_172753.2,1837-1855).
gcaatcaaaggctatgaat

SEQ ID NO: 606437 - DNA, 19 bp, Mus musculus
  siRNA target sequence for 4732435N03Rik (NM_172753.2,1883-1901).
cttgtcttccggcatgaaa

SEQ ID NO: 606438 - DNA, 19 bp, Mus musculus
  siRNA target sequence for 4732435N03Rik (NM_172753.2,1907-1925).
gctcatcttcgcaaacaga

SEQ ID NO: 606439 - DNA, 19 bp, Mus musculus
  siRNA target sequence for 4732435N03Rik (NM_172753.2,1908-1926).
ctcatcttcgcaaacagaa

SEQ ID NO: 606440 - DNA, 19 bp, Mus musculus
  siRNA target sequence for 4732435N03Rik (NM_172753.2,1927-1945).
gcagaaagccagcagtaaa

SEQ ID NO: 606441 - DNA, 19 bp, Mus musculus
  siRNA target sequence for 4732435N03Rik (NM_172753.2,1928-1946).
cagaaagccagcagtaaaa

SEQ ID NO: 606442 - DNA, 19 bp, Mus musculus
  siRNA target sequence for A930017E24Rik (NM_177041.2,292-310).
gttggagatgagatcctta

SEQ ID NO: 606443 - DNA, 19 bp, Mus musculus
  siRNA target sequence for A930017E24Rik (NM_177041.2,314-332).
gacacacgcaagataccaa

SEQ ID NO: 606444 - DNA, 19 bp, Mus musculus
  siRNA target sequence for A930017E24Rik (NM_177041.2,320-338).
cgcaagataccaacactta

SEQ ID NO: 606445 - DNA, 19 bp, Mus musculus
  siRNA target sequence for A930017E24Rik (NM_177041.2,322-340).
caagataccaacacttact

SEQ ID NO: 606446 - DNA, 19 bp, Mus musculus
  siRNA target sequence for A930017E24Rik (NM_177041.2,418-436).
gcatccgaggtcaactcat

SEQ ID NO: 606447 - DNA, 19 bp, Mus musculus
  siRNA target sequence for A930017E24Rik (NM_177041.2,419-437).
catccgaggtcaactcatt

SEQ ID NO: 606448 - DNA, 19 bp, Mus musculus
  siRNA target sequence for A930017E24Rik (NM_177041.2,481-499).
cccactcatgatgatgtta

SEQ ID NO: 606449 - DNA, 19 bp, Mus musculus
  siRNA target sequence for A930017E24Rik (NM_177041.2,777-795).
ccacctgaaggagttgtat

SEQ ID NO: 606450 - DNA, 19 bp, Mus musculus
  siRNA target sequence for A930017E24Rik (NM_177041.2,890-908).
gcagcaactactttcaagt

SEQ ID NO: 606451 - DNA, 19 bp, Mus musculus
  siRNA target sequence for A930017E24Rik (NM_177041.2,949-967).
gaatgtctggcctatctga

SEQ ID NO: 606452 - DNA, 19 bp, Mus musculus
  siRNA target sequence for A930017E24Rik (NM_177041.2,1229-1247).
ctctccagatcctgtacat

SEQ ID NO: 606453 - DNA, 19 bp, Mus musculus
  siRNA target sequence for A930017E24Rik (NM_177041.2,1293-1311).
caccatcaagaggtataat

SEQ ID NO: 606454 - DNA, 19 bp, Mus musculus
  siRNA target sequence for A930017E24Rik (NM_177041.2,1463-1481).
ggccttcattcatgagaat

SEQ ID NO: 606455 - DNA, 19 bp, Mus musculus
  siRNA target sequence for A930017E24Rik (NM_177041.2,1492-1510).
ctggactggacctacagaa

SEQ ID NO: 606456 - DNA, 19 bp, Mus musculus
  siRNA target sequence for A930017E24Rik (NM_177041.2,1495-1513).
gactggacctacagaaaca

SEQ ID NO: 606457 - DNA, 19 bp, Mus musculus
  siRNA target sequence for A930017E24Rik (NM_177041.2,1542-1560).
cccatactgcatcctatat

SEQ ID NO: 606458 - DNA, 19 bp, Mus musculus
  siRNA target sequence for A930017E24Rik (NM_177041.2,1581-1599).
ggggagtcgggaaaacaca

SEQ ID NO: 606459 - DNA, 19 bp, Mus musculus
  siRNA target sequence for A930017E24Rik (NM_177041.2,1647-1665).
ctaccgtccagcataccta

SEQ ID NO: 606460 - DNA, 19 bp, Mus musculus
  siRNA target sequence for A930017E24Rik (NM_177041.2,1658-1676).
catacctactggagaatga

SEQ ID NO: 606461 - DNA, 19 bp, Mus musculus
  siRNA target sequence for A930017E24Rik (NM_177041.2,1733-1751).
caaggatgggtcacaaaga

SEQ ID NO: 606462 - DNA, 19 bp, Mus musculus
  siRNA target sequence for ACTL (NM_153151.1,838-856).
gtcacaactgctaatgcaa

SEQ ID NO: 606463 - DNA, 19 bp, Mus musculus
  siRNA target sequence for ACTL (NM_153151.1,1083-1101).
ctctgttgcaatagctaaa

SEQ ID NO: 606464 - DNA, 19 bp, Mus musculus
  siRNA target sequence for AI447312 (NM_172589.1,442-460).
gagctcgttgccttcatga

SEQ ID NO: 606465 - DNA, 19 bp, Mus musculus
  siRNA target sequence for AI447312 (NM_172589.1,647-665).
ggcaggctaccgctatttt

SEQ ID NO: 606466 - DNA, 19 bp, Mus musculus
  siRNA target sequence for AI447312 (NM_172589.1,861-879).
gtatgcgtccccctacaaa

SEQ ID NO: 606467 - DNA, 19 bp, Mus musculus
  siRNA target sequence for AI447312 (NM_172589.1,895-913).
ctgggctgggccttctata

SEQ ID NO: 606468 - DNA, 19 bp, Mus musculus
  siRNA target sequence for AI447312 (NM_172589.1,925-943).
ggcacggtcctcaccttta

SEQ ID NO: 606469 - DNA, 19 bp, Mus musculus
  siRNA target sequence for AI447312 (NM_172589.1,926-944).
gcacggtcctcacctttat

SEQ ID NO: 606470 - DNA, 19 bp, Mus musculus
  siRNA target sequence for AI447312 (NM_172589.1,930-948).
ggtcctcacctttatctgt

SEQ ID NO: 606471 - DNA, 19 bp, Mus musculus
  siRNA target sequence for Carkl (NM_029031.2,206-224).
gagcaggatgtgactagaa

SEQ ID NO: 606472 - DNA, 19 bp, Mus musculus
  siRNA target sequence for Carkl (NM_029031.2,209-227).
caggatgtgactagaatca

SEQ ID NO: 606473 - DNA, 19 bp, Mus musculus
  siRNA target sequence for Carkl (NM_029031.2,307-325).
gatgcatggcatcctattt

SEQ ID NO: 606474 - DNA, 19 bp, Mus musculus
  siRNA target sequence for Carkl (NM_029031.2,358-376).
gggagggcctgcctttgta

SEQ ID NO: 606475 - DNA, 19 bp, Mus musculus
  siRNA target sequence for Carkl (NM_029031.2,411-429).
ggcaggatggccgttgtaa

SEQ ID NO: 606476 - DNA, 19 bp, Mus musculus
  siRNA target sequence for Carkl (NM_029031.2,413-431).
caggatggccgttgtaaca

SEQ ID NO: 606477 - DNA, 19 bp, Mus musculus
  siRNA target sequence for Carkl (NM_029031.2,415-433).
ggatggccgttgtaacagt

SEQ ID NO: 606478 - DNA, 19 bp, Mus musculus
  siRNA target sequence for Carkl (NM_029031.2,416-434).
gatggccgttgtaacagta

SEQ ID NO: 606479 - DNA, 19 bp, Mus musculus
  siRNA target sequence for Carkl (NM_029031.2,419-437).
ggccgttgtaacagtagtt

SEQ ID NO: 606480 - DNA, 19 bp, Mus musculus
  siRNA target sequence for Carkl (NM_029031.2,532-550).
gtttctgaagtcctatgat

SEQ ID NO: 606481 - DNA, 19 bp, Mus musculus
  siRNA target sequence for Carkl (NM_029031.2,552-570).
cagctggcaccattcaaga

SEQ ID NO: 606482 - DNA, 19 bp, Mus musculus
  siRNA target sequence for Carkl (NM_029031.2,555-573).
ctggcaccattcaagatta

SEQ ID NO: 606483 - DNA, 19 bp, Mus musculus
  siRNA target sequence for Carkl (NM_029031.2,558-576).
gcaccattcaagattatgt

SEQ ID NO: 606484 - DNA, 19 bp, Mus musculus
  siRNA target sequence for Carkl (NM_029031.2,627-645).
ccgctagctggggctattt

SEQ ID NO: 606485 - DNA, 19 bp, Mus musculus
  siRNA target sequence for Carkl (NM_029031.2,628-646).
cgctagctggggctatttt

SEQ ID NO: 606486 - DNA, 19 bp, Mus musculus
  siRNA target sequence for Carkl (NM_029031.2,753-771).
ctcacacatggtttgaaat

SEQ ID NO: 606487 - DNA, 19 bp, Mus musculus
  siRNA target sequence for Carkl (NM_029031.2,793-811).
catagccctgggtgactta

SEQ ID NO: 606488 - DNA, 19 bp, Mus musculus
  siRNA target sequence for Carkl (NM_029031.2,808-826).
cttacaagcctctgtctat

SEQ ID NO: 606489 - DNA, 19 bp, Mus musculus
  siRNA target sequence for Carkl (NM_029031.2,843-861).
ggactgatgcagttctcaa

SEQ ID NO: 606490 - DNA, 19 bp, Mus musculus
  siRNA target sequence for Carkl (NM_029031.2,846-864).
ctgatgcagttctcaacat

SEQ ID NO: 606491 - DNA, 19 bp, Mus musculus
  siRNA target sequence for Carkl (NM_029031.2,848-866).
gatgcagttctcaacatca

SEQ ID NO: 606492 - DNA, 19 bp, Mus musculus
  siRNA target sequence for Carkl (NM_029031.2,979-997).
ggtggcagcgtcactcaat

SEQ ID NO: 606493 - DNA, 19 bp, Mus musculus
  siRNA target sequence for Carkl (NM_029031.2,1239-1257).
gcagaggcatcgttcagaa

SEQ ID NO: 606494 - DNA, 19 bp, Mus musculus
  siRNA target sequence for Cdipt (NM_026638.1,437-455).
cctgttcgtgcctaacctt

SEQ ID NO: 606495 - DNA, 19 bp, Mus musculus
  siRNA target sequence for Cdipt (NM_026638.1,438-456).
ctgttcgtgcctaacctta

SEQ ID NO: 606496 - DNA, 19 bp, Mus musculus
  siRNA target sequence for Cdipt (NM_026638.1,459-477).
ggttatgcccggattgtct

SEQ ID NO: 606497 - DNA, 19 bp, Mus musculus
  siRNA target sequence for Cdipt (NM_026638.1,460-478).
gttatgcccggattgtctt

SEQ ID NO: 606498 - DNA, 19 bp, Mus musculus
  siRNA target sequence for Cdipt (NM_026638.1,474-492).
gtcttcgccatcatttcct

SEQ ID NO: 606499 - DNA, 19 bp, Mus musculus
  siRNA target sequence for Cdipt (NM_026638.1,518-536).
cacggcctcctccttctat

SEQ ID NO: 606500 - DNA, 19 bp, Mus musculus
  siRNA target sequence for Cdipt (NM_026638.1,766-784).
gtgagagtcacaagatgat

SEQ ID NO: 606501 - DNA, 19 bp, Mus musculus
  siRNA target sequence for Cdipt (NM_026638.1,802-820).
ctgtgcttcggatctacta

SEQ ID NO: 606502 - DNA, 19 bp, Mus musculus
  siRNA target sequence for Cdipt (NM_026638.1,968-986).
gctcaagtccgtcattagt

SEQ ID NO: 606503 - DNA, 19 bp, Mus musculus
  siRNA target sequence for Chst12 (NM_021528.2,202-220).
gatccttttgatcattgta

SEQ ID NO: 606504 - DNA, 19 bp, Mus musculus
  siRNA target sequence for Chst12 (NM_021528.2,205-223).
ccttttgatcattgtatat

SEQ ID NO: 606505 - DNA, 19 bp, Mus musculus
  siRNA target sequence for Chst12 (NM_021528.2,206-224).
cttttgatcattgtatatt

SEQ ID NO: 606506 - DNA, 19 bp, Mus musculus
  siRNA target sequence for Chst12 (NM_021528.2,352-370).
ggatactctccttagttct

SEQ ID NO: 606507 - DNA, 19 bp, Mus musculus
  siRNA target sequence for Chst12 (NM_021528.2,475-493).
cgactggtccactcatgat

SEQ ID NO: 606508 - DNA, 19 bp, Mus musculus
  siRNA target sequence for Chst12 (NM_021528.2,583-601).
caccaaggaccgctctttt

SEQ ID NO: 606509 - DNA, 19 bp, Mus musculus
  siRNA target sequence for Chst12 (NM_021528.2,647-665).
cgccacggggtcatctact

SEQ ID NO: 606510 - DNA, 19 bp, Mus musculus
  siRNA target sequence for Chst12 (NM_021528.2,798-816).
cgcacctcaccttcaacaa

SEQ ID NO: 606511 - DNA, 19 bp, Mus musculus
  siRNA target sequence for Chst12 (NM_021528.2,1149-1167).
gccacccgtgccagataga

SEQ ID NO: 606512 - DNA, 19 bp, Mus musculus
  siRNA target sequence for Chst12 (NM_021528.2,1151-1169).
cacccgtgccagatagact

SEQ ID NO: 606513 - DNA, 19 bp, Mus musculus
  siRNA target sequence for Chst12 (NM_021528.2,1153-1171).
cccgtgccagatagactat

SEQ ID NO: 606514 - DNA, 19 bp, Mus musculus
  siRNA target sequence for Chst12 (NM_021528.2,1155-1173).
cgtgccagatagactatga

SEQ ID NO: 606515 - DNA, 19 bp, Mus musculus
  siRNA target sequence for Chst12 (NM_021528.2,1327-1345).
gaggcaacagctctataaa

SEQ ID NO: 606516 - DNA, 19 bp, Mus musculus
  siRNA target sequence for Chst12 (NM_021528.2,1329-1347).
ggcaacagctctataaact

SEQ ID NO: 606517 - DNA, 19 bp, Mus musculus
  siRNA target sequence for Chst12 (NM_021528.2,1331-1349).
caacagctctataaactct

SEQ ID NO: 606518 - DNA, 19 bp, Mus musculus
  siRNA target sequence for Chst12 (NM_021528.2,1348-1366).
ctacgaggccgactttgtt

SEQ ID NO: 606519 - DNA, 19 bp, Mus musculus
  siRNA target sequence for Chst12 (NM_021528.2,1354-1372).
ggccgactttgttctcttt

SEQ ID NO: 606520 - DNA, 19 bp, Mus musculus
  siRNA target sequence for Dhdds (NM_026144.2,189-207).
cggttctgtgctaacatca

SEQ ID NO: 606521 - DNA, 19 bp, Mus musculus
  siRNA target sequence for Dhdds (NM_026144.2,216-234).
ggcccagtacccaaacata

SEQ ID NO: 606522 - DNA, 19 bp, Mus musculus
  siRNA target sequence for Dhdds (NM_026144.2,227-245).
caaacatatcgcgttcata

SEQ ID NO: 606523 - DNA, 19 bp, Mus musculus
  siRNA target sequence for Dhdds (NM_026144.2,258-276).
cgtcgctatgccaagaagt

SEQ ID NO: 606524 - DNA, 19 bp, Mus musculus
  siRNA target sequence for Dhdds (NM_026144.2,702-720).
gagtctctgctcgataagt

SEQ ID NO: 606525 - DNA, 19 bp, Mus musculus
  siRNA target sequence for Dhdds (NM_026144.2,711-729).
ctcgataagtgcctctata

SEQ ID NO: 606526 - DNA, 19 bp, Mus musculus
  siRNA target sequence for Dhdds (NM_026144.2,714-732).
gataagtgcctctatagca

SEQ ID NO: 606527 - DNA, 19 bp, Mus musculus
  siRNA target sequence for Dhdds (NM_026144.2,837-855).
gtcctgtggccagaataca

SEQ ID NO: 606528 - DNA, 19 bp, Mus musculus
  siRNA target sequence for Dhdds (NM_026144.2,846-864).
ccagaatacacattttgga

SEQ ID NO: 606529 - DNA, 19 bp, Mus musculus
  siRNA target sequence for Dhdds (NM_026144.2,1036-1054).
ggacacgcttgcacaaact

SEQ ID NO: 606530 - DNA, 19 bp, Mus musculus
  siRNA target sequence for Fn3k (NM_022014.1,509-527).
gactggccgaccttcttca

SEQ ID NO: 606531 - DNA, 19 bp, Mus musculus
  siRNA target sequence for Fn3k (NM_022014.1,616-634).
gaagatcccggatctgttt

SEQ ID NO: 606532 - DNA, 19 bp, Mus musculus
  siRNA target sequence for Fn3k (NM_022014.1,629-647).
ctgtttgcgggtatagaga

SEQ ID NO: 606533 - DNA, 19 bp, Mus musculus
  siRNA target sequence for Fn3k (NM_022014.1,631-649).
gtttgcgggtatagagatt

SEQ ID NO: 606534 - DNA, 19 bp, Mus musculus
  siRNA target sequence for Fn3k (NM_022014.1,701-719).
gaccagggacccgtaattt

SEQ ID NO: 606535 - DNA, 19 bp, Mus musculus
  siRNA target sequence for Fn3k (NM_022014.1,703-721).
ccagggacccgtaatttat

SEQ ID NO: 606536 - DNA, 19 bp, Mus musculus
  siRNA target sequence for Fn3k (NM_022014.1,706-724).
gggacccgtaatttatgat

SEQ ID NO: 606537 - DNA, 19 bp, Mus musculus
  siRNA target sequence for Fn3k (NM_022014.1,741-759).
gccattctgagtttgaact

SEQ ID NO: 606538 - DNA, 19 bp, Mus musculus
  siRNA target sequence for Galnt2 (NM_139272.1,54-72).
gcatcgcctactacatgta

SEQ ID NO: 606539 - DNA, 19 bp, Mus musculus
  siRNA target sequence for Galnt2 (NM_139272.1,224-242).
gtccggtggccagacttta

SEQ ID NO: 606540 - DNA, 19 bp, Mus musculus
  siRNA target sequence for Galnt2 (NM_139272.1,252-270).
catacgttggcggtacaat

SEQ ID NO: 606541 - DNA, 19 bp, Mus musculus
  siRNA target sequence for Galnt2 (NM_139272.1,411-429).
ccagcgtggtgatcacatt

SEQ ID NO: 606542 - DNA, 19 bp, Mus musculus
  siRNA target sequence for Galnt2 (NM_139272.1,552-570).
ccctcttggggaaaatcga

SEQ ID NO: 606543 - DNA, 19 bp, Mus musculus
  siRNA target sequence for Galnt2 (NM_139272.1,574-592).
ggtgcgggtcctcagaaat

SEQ ID NO: 606544 - DNA, 19 bp, Mus musculus
  siRNA target sequence for Galnt2 (NM_139272.1,727-745).
ggacaggacccgagttgta

SEQ ID NO: 606545 - DNA, 19 bp, Mus musculus
  siRNA target sequence for Galnt2 (NM_139272.1,728-746).
gacaggacccgagttgtat

SEQ ID NO: 606546 - DNA, 19 bp, Mus musculus
  siRNA target sequence for Galnt2 (NM_139272.1,738-756).
gagttgtatcccccattat

SEQ ID NO: 606547 - DNA, 19 bp, Mus musculus
  siRNA target sequence for Galnt2 (NM_139272.1,886-904).
cccagttgcccctataaaa

SEQ ID NO: 606548 - DNA, 19 bp, Mus musculus
  siRNA target sequence for Galnt2 (NM_139272.1,887-905).
ccagttgcccctataaaaa

SEQ ID NO: 606549 - DNA, 19 bp, Mus musculus
  siRNA target sequence for Galnt2 (NM_139272.1,932-950).
gtgatggacaagctctatt

SEQ ID NO: 606550 - DNA, 19 bp, Mus musculus
  siRNA target sequence for Galnt2 (NM_139272.1,934-952).
gatggacaagctctatttt

SEQ ID NO: 606551 - DNA, 19 bp, Mus musculus
  siRNA target sequence for Galnt2 (NM_139272.1,963-981).
ggaagtacgacatgatgat

SEQ ID NO: 606552 - DNA, 19 bp, Mus musculus
  siRNA target sequence for Galnt2 (NM_139272.1,1213-1231).
cgtgccctatgggaatatt

SEQ ID NO: 606553 - DNA, 19 bp, Mus musculus
  siRNA target sequence for Galnt2 (NM_139272.1,1217-1235).
ccctatgggaatattcaga

SEQ ID NO: 606554 - DNA, 19 bp, Mus musculus
  siRNA target sequence for Galnt2 (NM_139272.1,1384-1402).
cttcgcggatggagttgtt

SEQ ID NO: 606555 - DNA, 19 bp, Mus musculus
  siRNA target sequence for Galnt3 (NM_015736.1,229-247).
caccttaagcgactagtaa

SEQ ID NO: 606556 - DNA, 19 bp, Mus musculus
  siRNA target sequence for Galnt3 (NM_015736.1,231-249).
ccttaagcgactagtaaaa

SEQ ID NO: 606557 - DNA, 19 bp, Mus musculus
  siRNA target sequence for Galnt3 (NM_015736.1,241-259).
ctagtaaaattgcacatta

SEQ ID NO: 606558 - DNA, 19 bp, Mus musculus
  siRNA target sequence for Galnt3 (NM_015736.1,263-281).
gacattaccacagaaagtt

SEQ ID NO: 606559 - DNA, 19 bp, Mus musculus
  siRNA target sequence for Galnt3 (NM_015736.1,288-306).
gctgggtgcagtcatcttt

SEQ ID NO: 606560 - DNA, 19 bp, Mus musculus
  siRNA target sequence for Galnt3 (NM_015736.1,289-307).
ctgggtgcagtcatctttt

SEQ ID NO: 606561 - DNA, 19 bp, Mus musculus
  siRNA target sequence for Galnt3 (NM_015736.1,292-310).
ggtgcagtcatctttttct

SEQ ID NO: 606562 - DNA, 19 bp, Mus musculus
  siRNA target sequence for Galnt3 (NM_015736.1,420-438).
gctcgaagctgtaaataat

SEQ ID NO: 606563 - DNA, 19 bp, Mus musculus
  siRNA target sequence for Galnt3 (NM_015736.1,472-490).
gcgcccattaaggagaata

SEQ ID NO: 606564 - DNA, 19 bp, Mus musculus
  siRNA target sequence for Galnt3 (NM_015736.1,476-494).
ccattaaggagaatatcga

SEQ ID NO: 606565 - DNA, 19 bp, Mus musculus
  siRNA target sequence for Galnt3 (NM_015736.1,537-555).
ggagttgaagccggttttt

SEQ ID NO: 606566 - DNA, 19 bp, Mus musculus
  siRNA target sequence for Galnt3 (NM_015736.1,559-577).
cgcccacctcaggattcta

SEQ ID NO: 606567 - DNA, 19 bp, Mus musculus
  siRNA target sequence for Galnt3 (NM_015736.1,560-578).
gcccacctcaggattctaa

SEQ ID NO: 606568 - DNA, 19 bp, Mus musculus
  siRNA target sequence for Galnt3 (NM_015736.1,590-608).
cttctggcaagccgtttaa

SEQ ID NO: 606569 - DNA, 19 bp, Mus musculus
  siRNA target sequence for Galnt3 (NM_015736.1,593-611).
ctggcaagccgtttaagat

SEQ ID NO: 606570 - DNA, 19 bp, Mus musculus
  siRNA target sequence for Galnt3 (NM_015736.1,595-613).
ggcaagccgtttaagatca

SEQ ID NO: 606571 - DNA, 19 bp, Mus musculus
  siRNA target sequence for Galnt3 (NM_015736.1,677-695).
cctttgcaagtgacagaat

SEQ ID NO: 606572 - DNA, 19 bp, Mus musculus
  siRNA target sequence for Galnt3 (NM_015736.1,678-696).
ctttgcaagtgacagaatt

SEQ ID NO: 606573 - DNA, 19 bp, Mus musculus
  siRNA target sequence for Galnt3 (NM_015736.1,775-793).
cctaccaccagtgtcataa

SEQ ID NO: 606574 - DNA, 19 bp, Mus musculus
  siRNA target sequence for Galnt3 (NM_015736.1,779-797).
ccaccagtgtcataatagt

SEQ ID NO: 606575 - DNA, 19 bp, Mus musculus
  siRNA target sequence for Galnt3 (NM_015736.1,783-801).
cagtgtcataatagtcttt

SEQ ID NO: 606576 - DNA, 19 bp, Mus musculus
  siRNA target sequence for Galnt3 (NM_015736.1,785-803).
gtgtcataatagtctttca

SEQ ID NO: 606577 - DNA, 19 bp, Mus musculus
  siRNA target sequence for Galnt3 (NM_015736.1,840-858).
cagtgtgctctattcttca

SEQ ID NO: 606578 - DNA, 19 bp, Mus musculus
  siRNA target sequence for Galnt3 (NM_015736.1,888-906).
ggtggatgatgctagtgta

SEQ ID NO: 606579 - DNA, 19 bp, Mus musculus
  siRNA target sequence for Galnt3 (NM_015736.1,1032-1050).
cgagacgctcacgttctta

SEQ ID NO: 606580 - DNA, 19 bp, Mus musculus
  siRNA target sequence for Galnt3 (NM_015736.1,1035-1053).
gacgctcacgttcttagat

SEQ ID NO: 606581 - DNA, 19 bp, Mus musculus
  siRNA target sequence for Galnt3 (NM_015736.1,1097-1115).
ccaggatagctgagaacta

SEQ ID NO: 606582 - DNA, 19 bp, Mus musculus
  siRNA target sequence for Galnt3 (NM_015736.1,1137-1155).
catcgcatccatagatcta

SEQ ID NO: 606583 - DNA, 19 bp, Mus musculus
  siRNA target sequence for Galnt3 (NM_015736.1,1184-1202).
cgtacggaagcaaccataa

SEQ ID NO: 606584 - DNA, 19 bp, Mus musculus
  siRNA target sequence for Galnt3 (NM_015736.1,1197-1215).
ccataaccgtggaaatttt

SEQ ID NO: 606585 - DNA, 19 bp, Mus musculus
  siRNA target sequence for Galnt3 (NM_015736.1,1249-1267).
cctgatcatgagaagcaaa

SEQ ID NO: 606586 - DNA, 19 bp, Mus musculus
  siRNA target sequence for Galnt3 (NM_015736.1,1268-1286).
gaaggaaagatgaaaccta

SEQ ID NO: 606587 - DNA, 19 bp, Mus musculus
  siRNA target sequence for Galnt3 (NM_015736.1,1276-1294).
gatgaaacctacccaatta

SEQ ID NO: 606588 - DNA, 19 bp, Mus musculus
  siRNA target sequence for Galnt3 (NM_015736.1,1347-1365).
gcacattggaagttacgat

SEQ ID NO: 606589 - DNA, 19 bp, Mus musculus
  siRNA target sequence for Galnt3 (NM_015736.1,1427-1445).
gtgggcagttggagattat

SEQ ID NO: 606590 - DNA, 19 bp, Mus musculus
  siRNA target sequence for Galnt3 (NM_015736.1,1478-1496).
gcaaaagccctcatacctt

SEQ ID NO: 606591 - DNA, 19 bp, Mus musculus
  siRNA target sequence for Galnt3 (NM_015736.1,1512-1530).
ggtgattgctcgtaaccaa

SEQ ID NO: 606592 - DNA, 19 bp, Mus musculus
  siRNA target sequence for Galnt3 (NM_015736.1,1554-1572).
ggacgaatacaaggaaata

SEQ ID NO: 606593 - DNA, 19 bp, Mus musculus
  siRNA target sequence for Galnt3 (NM_015736.1,1555-1573).
gacgaatacaaggaaatat

SEQ ID NO: 606594 - DNA, 19 bp, Mus musculus
  siRNA target sequence for Galnt3 (NM_015736.1,1589-1607).
cagatgcagcaaaaatcgt

SEQ ID NO: 606595 - DNA, 19 bp, Mus musculus
  siRNA target sequence for Galnt3 (NM_015736.1,1591-1609).
gatgcagcaaaaatcgtta

SEQ ID NO: 606596 - DNA, 19 bp, Mus musculus
  siRNA target sequence for Galnt3 (NM_015736.1,1597-1615).
gcaaaaatcgttaagcaaa

SEQ ID NO: 606597 - DNA, 19 bp, Mus musculus
  siRNA target sequence for Galnt3 (NM_015736.1,1605-1623).
cgttaagcaaaaatcattt

SEQ ID NO: 606598 - DNA, 19 bp, Mus musculus
  siRNA target sequence for Galnt3 (NM_015736.1,1619-1637).
catttggtgatctttccaa

SEQ ID NO: 606599 - DNA, 19 bp, Mus musculus
  siRNA target sequence for Galnt3 (NM_015736.1,1624-1642).
ggtgatctttccaaaagat

SEQ ID NO: 606600 - DNA, 19 bp, Mus musculus
  siRNA target sequence for Galnt3 (NM_015736.1,1680-1698).
ctggtacctgaacactatt

SEQ ID NO: 606601 - DNA, 19 bp, Mus musculus
  siRNA target sequence for Galnt3 (NM_015736.1,1682-1700).
ggtacctgaacactattta

SEQ ID NO: 606602 - DNA, 19 bp, Mus musculus
  siRNA target sequence for Galnt3 (NM_015736.1,1709-1727).
cgtatgtgccagaccttaa

SEQ ID NO: 606603 - DNA, 19 bp, Mus musculus
  siRNA target sequence for Galnt3 (NM_015736.1,1710-1728).
gtatgtgccagaccttaat

SEQ ID NO: 606604 - DNA, 19 bp, Mus musculus
  siRNA target sequence for Galnt3 (NM_015736.1,1718-1736).
cagaccttaatcctgttat

SEQ ID NO: 606605 - DNA, 19 bp, Mus musculus
  siRNA target sequence for Galnt3 (NM_015736.1,1720-1738).
gaccttaatcctgttatat

SEQ ID NO: 606606 - DNA, 19 bp, Mus musculus
  siRNA target sequence for Galnt3 (NM_015736.1,1722-1740).
ccttaatcctgttatatct

SEQ ID NO: 606607 - DNA, 19 bp, Mus musculus
  siRNA target sequence for Galnt3 (NM_015736.1,1797-1815).
gggaggcaaaccattgatt

SEQ ID NO: 606608 - DNA, 19 bp, Mus musculus
  siRNA target sequence for Galnt3 (NM_015736.1,1831-1849).
ggcctcgggggaaatcagt

SEQ ID NO: 606609 - DNA, 19 bp, Mus musculus
  siRNA target sequence for Galnt3 (NM_015736.1,1832-1850).
gcctcgggggaaatcagta

SEQ ID NO: 606610 - DNA, 19 bp, Mus musculus
  siRNA target sequence for Galnt3 (NM_015736.1,1893-1911).
gaaggagctgtgtcttcat

SEQ ID NO: 606611 - DNA, 19 bp, Mus musculus
  siRNA target sequence for Galnt3 (NM_015736.1,1933-1951).
ctgaaggcatgtgtctata

SEQ ID NO: 606612 - DNA, 19 bp, Mus musculus
  siRNA target sequence for Galnt3 (NM_015736.1,1935-1953).
gaaggcatgtgtctataaa

SEQ ID NO: 606613 - DNA, 19 bp, Mus musculus
  siRNA target sequence for Galnt3 (NM_015736.1,1938-1956).
ggcatgtgtctataaaggt

SEQ ID NO: 606614 - DNA, 19 bp, Mus musculus
  siRNA target sequence for Galnt3 (NM_015736.1,1969-1987).
gcccctggagaacagatat

SEQ ID NO: 606615 - DNA, 19 bp, Mus musculus
  siRNA target sequence for Galnt3 (NM_015736.1,1996-2014).
cggaaggaccaacttctat

SEQ ID NO: 606616 - DNA, 19 bp, Mus musculus
  siRNA target sequence for Galnt3 (NM_015736.1,1997-2015).
ggaaggaccaacttctata

SEQ ID NO: 606617 - DNA, 19 bp, Mus musculus
  siRNA target sequence for Galnt3 (NM_015736.1,1998-2016).
gaaggaccaacttctatat

SEQ ID NO: 606618 - DNA, 19 bp, Mus musculus
  siRNA target sequence for Galnt3 (NM_015736.1,2001-2019).
ggaccaacttctatataat

SEQ ID NO: 606619 - DNA, 19 bp, Mus musculus
  siRNA target sequence for Galnt3 (NM_015736.1,2070-2088).
gccatgtgacgcaacagat

SEQ ID NO: 606620 - DNA, 19 bp, Mus musculus
  siRNA target sequence for Galnt3 (NM_015736.1,2075-2093).
gtgacgcaacagatctact

SEQ ID NO: 606621 - DNA, 19 bp, Mus musculus
  siRNA target sequence for Galnt3 (NM_015736.1,2081-2099).
caacagatctactccaaaa

SEQ ID NO: 606622 - DNA, 19 bp, Mus musculus
  siRNA target sequence for Gstk1 (NM_029555.1,102-120).
gcatcctggaactcttcta

SEQ ID NO: 606623 - DNA, 19 bp, Mus musculus
  siRNA target sequence for Gstk1 (NM_029555.1,266-284).
cgaaaaggccagtacatct

SEQ ID NO: 606624 - DNA, 19 bp, Mus musculus
  siRNA target sequence for Gstk1 (NM_029555.1,267-285).
gaaaaggccagtacatctt

SEQ ID NO: 606625 - DNA, 19 bp, Mus musculus
  siRNA target sequence for Gstk1 (NM_029555.1,316-334).
ccaggttcccctcaacata

SEQ ID NO: 606626 - DNA, 19 bp, Mus musculus
  siRNA target sequence for Gstk1 (NM_029555.1,601-619).
ggatgcagcctgcaaatat

SEQ ID NO: 606627 - DNA, 19 bp, Mus musculus
  siRNA target sequence for Gstk1 (NM_029555.1,690-708).
gcttggagttgctagctta

SEQ ID NO: 606628 - DNA, 19 bp, Mus musculus
  siRNA target sequence for Hs6st1 (NM_015818.1,422-440).
ccacgccggacccacatta

SEQ ID NO: 606629 - DNA, 19 bp, Mus musculus
  siRNA target sequence for Hs6st1 (NM_015818.1,430-448).
gacccacattacgagaaaa

SEQ ID NO: 606630 - DNA, 19 bp, Mus musculus
  siRNA target sequence for Hs6st1 (NM_015818.1,436-454).
cattacgagaaaaagtact

SEQ ID NO: 606631 - DNA, 19 bp, Mus musculus
  siRNA target sequence for Hs6st1 (NM_015818.1,482-500).
cgctgcgcttcgacatgaa

SEQ ID NO: 606632 - DNA, 19 bp, Mus musculus
  siRNA target sequence for Hs6st1 (NM_015818.1,827-845).
gtgaatggcgacatgtaca

SEQ ID NO: 606633 - DNA, 19 bp, Mus musculus
  siRNA target sequence for Hs6st1 (NM_015818.1,947-965).
gcacgttgcaggagttcat

SEQ ID NO: 606634 - DNA, 19 bp, Mus musculus
  siRNA target sequence for Hs6st1 (NM_015818.1,1030-1048).
ggctgctacaacctatctt

SEQ ID NO: 606635 - DNA, 19 bp, Mus musculus
  siRNA target sequence for Hs6st1 (NM_015818.1,1031-1049).
gctgctacaacctatcttt

SEQ ID NO: 606636 - DNA, 19 bp, Mus musculus
  siRNA target sequence for Hs6st1 (NM_015818.1,1189-1207).
cggccattcatgcaataca

SEQ ID NO: 606637 - DNA, 19 bp, Mus musculus
  siRNA target sequence for Hs6st1 (NM_015818.1,1190-1208).
ggccattcatgcaatacaa

SEQ ID NO: 606638 - DNA, 19 bp, Mus musculus
  siRNA target sequence for Hs6st1 (NM_015818.1,1318-1336).
cagcgttaccagtacaaga

SEQ ID NO: 606639 - DNA, 19 bp, Mus musculus
  siRNA target sequence for Hs6st1 (NM_015818.1,1455-1473).
ctacatgagccatatcatt

SEQ ID NO: 606640 - DNA, 19 bp, Mus musculus
  siRNA target sequence for Hs6st2 (NM_015819.1,503-521).
ccttccaggtggaggattt

SEQ ID NO: 606641 - DNA, 19 bp, Mus musculus
  siRNA target sequence for Hs6st2 (NM_015819.1,507-525).
ccaggtggaggatttttca

SEQ ID NO: 606642 - DNA, 19 bp, Mus musculus
  siRNA target sequence for Hs6st2 (NM_015819.1,510-528).
ggtggaggatttttcagat

SEQ ID NO: 606643 - DNA, 19 bp, Mus musculus
  siRNA target sequence for Hs6st2 (NM_015819.1,511-529).
gtggaggatttttcagatt

SEQ ID NO: 606644 - DNA, 19 bp, Mus musculus
  siRNA target sequence for Hs6st2 (NM_015819.1,533-551).
gatggaacaagtaaggata

SEQ ID NO: 606645 - DNA, 19 bp, Mus musculus
  siRNA target sequence for Hs6st2 (NM_015819.1,552-570).
gatggggttcttcaaactt

SEQ ID NO: 606646 - DNA, 19 bp, Mus musculus
  siRNA target sequence for Hs6st2 (NM_015819.1,555-573).
ggggttcttcaaacttcaa

SEQ ID NO: 606647 - DNA, 19 bp, Mus musculus
  siRNA target sequence for Hs6st2 (NM_015819.1,817-835).
catggactgtccctataat

SEQ ID NO: 606648 - DNA, 19 bp, Mus musculus
  siRNA target sequence for Hs6st2 (NM_015819.1,902-920).
gtcatgcctgaaaagcaaa

SEQ ID NO: 606649 - DNA, 19 bp, Mus musculus
  siRNA target sequence for Hs6st2 (NM_015819.1,935-953).
ctggaaagtgccaaatcca

SEQ ID NO: 606650 - DNA, 19 bp, Mus musculus
  siRNA target sequence for Hs6st2 (NM_015819.1,937-955).
ggaaagtgccaaatccaat

SEQ ID NO: 606651 - DNA, 19 bp, Mus musculus
  siRNA target sequence for Hs6st2 (NM_015819.1,1044-1062).
cgccgtttacccagtataa

SEQ ID NO: 606652 - DNA, 19 bp, Mus musculus
  siRNA target sequence for Hs6st2 (NM_015819.1,1045-1063).
gccgtttacccagtataat

SEQ ID NO: 606653 - DNA, 19 bp, Mus musculus
  siRNA target sequence for Hs6st2 (NM_015819.1,1046-1064).
ccgtttacccagtataata

SEQ ID NO: 606654 - DNA, 19 bp, Mus musculus
  siRNA target sequence for Hs6st2 (NM_015819.1,1071-1089).
gggcctctagtgttgagat

SEQ ID NO: 606655 - DNA, 19 bp, Mus musculus
  siRNA target sequence for Hs6st2 (NM_015819.1,1075-1093).
ctctagtgttgagatcaat

SEQ ID NO: 606656 - DNA, 19 bp, Mus musculus
  siRNA target sequence for Hs6st2 (NM_015819.1,1087-1105).
gatcaatgaggaaatccaa

SEQ ID NO: 606657 - DNA, 19 bp, Mus musculus
  siRNA target sequence for Hs6st2 (NM_015819.1,1108-1126).
gcgtattgagggactgaat

SEQ ID NO: 606658 - DNA, 19 bp, Mus musculus
  siRNA target sequence for Hs6st2 (NM_015819.1,1109-1127).
cgtattgagggactgaatt

SEQ ID NO: 606659 - DNA, 19 bp, Mus musculus
  siRNA target sequence for Hs6st2 (NM_015819.1,1139-1157).
gagttgtacagctatgcta

SEQ ID NO: 606660 - DNA, 19 bp, Mus musculus
  siRNA target sequence for Hs6st2 (NM_015819.1,1172-1190).
caaaggtatcagttcatga

SEQ ID NO: 606661 - DNA, 19 bp, Mus musculus
  siRNA target sequence for Hs6st2 (NM_015819.1,1224-1242).
gtcaggagcaacgcaaatt

SEQ ID NO: 606662 - DNA, 19 bp, Mus musculus
  siRNA target sequence for Hs6st2 (NM_015819.1,1303-1321).
ccagagtccaggtcagaat

SEQ ID NO: 606663 - DNA, 19 bp, Mus musculus
  siRNA target sequence for Hs6st2 (NM_015819.1,1324-1342).
gagtcagaatccaaatcct

SEQ ID NO: 606664 - DNA, 19 bp, Mus musculus
  siRNA target sequence for Hs6st3 (NM_015820.1,117-135).
gatgaaaggttcaacaagt

SEQ ID NO: 606665 - DNA, 19 bp, Mus musculus
  siRNA target sequence for Hs6st3 (NM_015820.1,286-304).
cacaagcaccccttgatga

SEQ ID NO: 606666 - DNA, 19 bp, Mus musculus
  siRNA target sequence for Hs6st3 (NM_015820.1,475-493).
ggttcgtgcctcgattcaa

SEQ ID NO: 606667 - DNA, 19 bp, Mus musculus
  siRNA target sequence for Hs6st3 (NM_015820.1,480-498).
gtgcctcgattcaacttca

SEQ ID NO: 606668 - DNA, 19 bp, Mus musculus
  siRNA target sequence for Hs6st3 (NM_015820.1,514-532).
cccgcttcgtggacttcaa

SEQ ID NO: 606669 - DNA, 19 bp, Mus musculus
  siRNA target sequence for Hs6st3 (NM_015820.1,516-534).
cgcttcgtggacttcaaca

SEQ ID NO: 606670 - DNA, 19 bp, Mus musculus
  siRNA target sequence for Hs6st3 (NM_015820.1,859-877).
gttacctgagcgaatggaa

SEQ ID NO: 606671 - DNA, 19 bp, Mus musculus
  siRNA target sequence for Hs6st3 (NM_015820.1,996-1014).
cgggagttcatggattgta

SEQ ID NO: 606672 - DNA, 19 bp, Mus musculus
  siRNA target sequence for Hs6st3 (NM_015820.1,1071-1089).
ggctgctacaacttgactt

SEQ ID NO: 606673 - DNA, 19 bp, Mus musculus
  siRNA target sequence for Hs6st3 (NM_015820.1,1079-1097).
caacttgactttcatgaat

SEQ ID NO: 606674 - DNA, 19 bp, Mus musculus
  siRNA target sequence for Hs6st3 (NM_015820.1,1129-1147).
gcgctaagaacaatctgaa

SEQ ID NO: 606675 - DNA, 19 bp, Mus musculus
  siRNA target sequence for Hs6st3 (NM_015820.1,1132-1150).
ctaagaacaatctgaagaa

SEQ ID NO: 606676 - DNA, 19 bp, Mus musculus
  siRNA target sequence for Hs6st3 (NM_015820.1,1197-1215).
ctctttgagaggacattca

SEQ ID NO: 606677 - DNA, 19 bp, Mus musculus
  siRNA target sequence for Mgst2 (NM_174995.1,56-74).
ctgcctgtcagcaaagtta

SEQ ID NO: 606678 - DNA, 19 bp, Mus musculus
  siRNA target sequence for Mgst2 (NM_174995.1,58-76).
gcctgtcagcaaagttatt

SEQ ID NO: 606679 - DNA, 19 bp, Mus musculus
  siRNA target sequence for Mgst2 (NM_174995.1,90-108).
cggacgagcaagactaaaa

SEQ ID NO: 606680 - DNA, 19 bp, Mus musculus
  siRNA target sequence for Mgst2 (NM_174995.1,94-112).
cgagcaagactaaaacaca

SEQ ID NO: 606681 - DNA, 19 bp, Mus musculus
  siRNA target sequence for Mgst2 (NM_174995.1,98-116).
caagactaaaacacaagat

SEQ ID NO: 606682 - DNA, 19 bp, Mus musculus
  siRNA target sequence for Mgst2 (NM_174995.1,333-351).
ggtacttcaatcaagtttt

SEQ ID NO: 606683 - DNA, 19 bp, Mus musculus
  siRNA target sequence for Mgst2 (NM_174995.1,334-352).
gtacttcaatcaagttttt

SEQ ID NO: 606684 - DNA, 19 bp, Mus musculus
  siRNA target sequence for Mgst2 (NM_174995.1,337-355).
cttcaatcaagtttttgca

SEQ ID NO: 606685 - DNA, 19 bp, Mus musculus
  siRNA target sequence for Mgst2 (NM_174995.1,362-380).
ctgggtctcctgtacatat

SEQ ID NO: 606686 - DNA, 19 bp, Mus musculus
  siRNA target sequence for Mgst3 (NM_025569.1,196-214).
cctgagaacgggcatatgt

SEQ ID NO: 606687 - DNA, 19 bp, Mus musculus
  siRNA target sequence for Mgst3 (NM_025569.1,197-215).
ctgagaacgggcatatgtt

SEQ ID NO: 606688 - DNA, 19 bp, Mus musculus
  siRNA target sequence for Mgst3 (NM_025569.1,281-299).
cggtgggaggtgtttacca

SEQ ID NO: 606689 - DNA, 19 bp, Mus musculus
  siRNA target sequence for Ugcg (NM_011673.2,155-173).
gtgctgtggctgatgcatt

SEQ ID NO: 606690 - DNA, 19 bp, Mus musculus
  siRNA target sequence for Ugcg (NM_011673.2,170-188).
catttcatgtccatcatct

SEQ ID NO: 606691 - DNA, 19 bp, Mus musculus
  siRNA target sequence for Ugcg (NM_011673.2,192-210).
cccggttacacctcaacaa

SEQ ID NO: 606692 - DNA, 19 bp, Mus musculus
  siRNA target sequence for Ugcg (NM_011673.2,195-213).
ggttacacctcaacaagaa

SEQ ID NO: 606693 - DNA, 19 bp, Mus musculus
  siRNA target sequence for Ugcg (NM_011673.2,276-294).
gggtggatcctaacctaat

SEQ ID NO: 606694 - DNA, 19 bp, Mus musculus
  siRNA target sequence for Ugcg (NM_011673.2,278-296).
gtggatcctaacctaatca

SEQ ID NO: 606695 - DNA, 19 bp, Mus musculus
  siRNA target sequence for Ugcg (NM_011673.2,281-299).
gatcctaacctaatcaaca

SEQ ID NO: 606696 - DNA, 19 bp, Mus musculus
  siRNA target sequence for Ugcg (NM_011673.2,284-302).
cctaacctaatcaacaact

SEQ ID NO: 606697 - DNA, 19 bp, Mus musculus
  siRNA target sequence for Ugcg (NM_011673.2,298-316).
caacttggagacattcttt

SEQ ID NO: 606698 - DNA, 19 bp, Mus musculus
  siRNA target sequence for Ugcg (NM_011673.2,368-386).
gatccagccattgatgtat

SEQ ID NO: 606699 - DNA, 19 bp, Mus musculus
  siRNA target sequence for Ugcg (NM_011673.2,411-429).
caaatgtcgatgctagatt

SEQ ID NO: 606700 - DNA, 19 bp, Mus musculus
  siRNA target sequence for Ugcg (NM_011673.2,418-436).
cgatgctagattatttata

SEQ ID NO: 606701 - DNA, 19 bp, Mus musculus
  siRNA target sequence for Ugcg (NM_011673.2,441-459).
gcaaaaaggttggcattaa

SEQ ID NO: 606702 - DNA, 19 bp, Mus musculus
  siRNA target sequence for Ugcg (NM_011673.2,449-467).
gttggcattaaccctaaaa

SEQ ID NO: 606703 - DNA, 19 bp, Mus musculus
  siRNA target sequence for Ugcg (NM_011673.2,452-470).
ggcattaaccctaaaatta

SEQ ID NO: 606704 - DNA, 19 bp, Mus musculus
  siRNA target sequence for Ugcg (NM_011673.2,453-471).
gcattaaccctaaaattaa

SEQ ID NO: 606705 - DNA, 19 bp, Mus musculus
  siRNA target sequence for Ugcg (NM_011673.2,509-527).
ctcatatggatttgtgata

SEQ ID NO: 606706 - DNA, 19 bp, Mus musculus
  siRNA target sequence for Ugcg (NM_011673.2,537-555).
gagtcatcccagacacatt

SEQ ID NO: 606707 - DNA, 19 bp, Mus musculus
  siRNA target sequence for Ugcg (NM_011673.2,539-557).
gtcatcccagacacattaa

SEQ ID NO: 606708 - DNA, 19 bp, Mus musculus
  siRNA target sequence for Ugcg (NM_011673.2,541-559).
catcccagacacattaact

SEQ ID NO: 606709 - DNA, 19 bp, Mus musculus
  siRNA target sequence for Ugcg (NM_011673.2,558-576).
ctgacatggtgaatcagat

SEQ ID NO: 606710 - DNA, 19 bp, Mus musculus
  siRNA target sequence for Ugcg (NM_011673.2,598-616).
ccacgggctgccgtatgta

SEQ ID NO: 606711 - DNA, 19 bp, Mus musculus
  siRNA target sequence for Ugcg (NM_011673.2,639-657).
ccaccttagagcaggtata

SEQ ID NO: 606712 - DNA, 19 bp, Mus musculus
  siRNA target sequence for Ugcg (NM_011673.2,640-658).
caccttagagcaggtatat

SEQ ID NO: 606713 - DNA, 19 bp, Mus musculus
  siRNA target sequence for Ugcg (NM_011673.2,642-660).
ccttagagcaggtatattt

SEQ ID NO: 606714 - DNA, 19 bp, Mus musculus
  siRNA target sequence for Ugcg (NM_011673.2,643-661).
cttagagcaggtatatttt

SEQ ID NO: 606715 - DNA, 19 bp, Mus musculus
  siRNA target sequence for Ugcg (NM_011673.2,669-687).
cacacccaagatcctatat

SEQ ID NO: 606716 - DNA, 19 bp, Mus musculus
  siRNA target sequence for Ugcg (NM_011673.2,682-700).
ctatatctctgccaatgta

SEQ ID NO: 606717 - DNA, 19 bp, Mus musculus
  siRNA target sequence for Ugcg (NM_011673.2,829-847).
ccgaggttggaggttttca

SEQ ID NO: 606718 - DNA, 19 bp, Mus musculus
  siRNA target sequence for Ugcg (NM_011673.2,857-875).
caagttgccatgcaaaact

SEQ ID NO: 606719 - DNA, 19 bp, Mus musculus
  siRNA target sequence for Ugcg (NM_011673.2,874-892).
ctctggttcgtactcaatt

SEQ ID NO: 606720 - DNA, 19 bp, Mus musculus
  siRNA target sequence for Ugcg (NM_011673.2,879-897).
gttcgtactcaatttctca

SEQ ID NO: 606721 - DNA, 19 bp, Mus musculus
  siRNA target sequence for Ugcg (NM_011673.2,918-936).
ggtggaccaaattgagaat

SEQ ID NO: 606722 - DNA, 19 bp, Mus musculus
  siRNA target sequence for Ugcg (NM_011673.2,924-942).
ccaaattgagaattaacat

SEQ ID NO: 606723 - DNA, 19 bp, Mus musculus
  siRNA target sequence for Ugcg (NM_011673.2,948-966).
ctgctacaataatttgtga

SEQ ID NO: 606724 - DNA, 19 bp, Mus musculus
  siRNA target sequence for Ugcg (NM_011673.2,1008-1026).
gggcagcccaccatgtatt

SEQ ID NO: 606725 - DNA, 19 bp, Mus musculus
  siRNA target sequence for Ugcg (NM_011673.2,1010-1028).
gcagcccaccatgtattca

SEQ ID NO: 606726 - DNA, 19 bp, Mus musculus
  siRNA target sequence for Ugcg (NM_011673.2,1022-1040).
gtattcagatgggatatca

SEQ ID NO: 606727 - DNA, 19 bp, Mus musculus
  siRNA target sequence for Ugcg (NM_011673.2,1032-1050).
gggatatcatggtcttctt

SEQ ID NO: 606728 - DNA, 19 bp, Mus musculus
  siRNA target sequence for Ugcg (NM_011673.2,1062-1080).
gcctggcatggtttatatt

SEQ ID NO: 606729 - DNA, 19 bp, Mus musculus
  siRNA target sequence for Ugcg (NM_011673.2,1152-1170).
ggttcatccgtgaatccat

SEQ ID NO: 606730 - DNA, 19 bp, Mus musculus
  siRNA target sequence for Ugcg (NM_011673.2,1161-1179).
gtgaatccatgacaatcta

SEQ ID NO: 606731 - DNA, 19 bp, Mus musculus
  siRNA target sequence for 0610041B22Rik (NM_025340.1,538-556).
gcggaagctgcaattgata

SEQ ID NO: 606732 - DNA, 19 bp, Mus musculus
  siRNA target sequence for 0610041B22Rik (NM_025340.1,631-649).
gcccttggaggctatttgt

SEQ ID NO: 606733 - DNA, 19 bp, Mus musculus
  siRNA target sequence for 0610041B22Rik (NM_025340.1,633-651).
ccttggaggctatttgtta

SEQ ID NO: 606734 - DNA, 19 bp, Mus musculus
  siRNA target sequence for 0610041B22Rik (NM_025340.1,655-673).
cgtccgtgggcctaaccaa

SEQ ID NO: 606735 - DNA, 19 bp, Mus musculus
  siRNA target sequence for 0610041B22Rik (NM_025340.1,849-867).
gttcttctatggctcaaat

SEQ ID NO: 606736 - DNA, 19 bp, Mus musculus
  siRNA target sequence for 0610041B22Rik (NM_025340.1,889-907).
ggtggatcttcctcaaagt

SEQ ID NO: 606737 - DNA, 19 bp, Mus musculus
  siRNA target sequence for 0610041B22Rik (NM_025340.1,890-908).
gtggatcttcctcaaagtt

SEQ ID NO: 606738 - DNA, 19 bp, Mus musculus
  siRNA target sequence for 0610041B22Rik (NM_025340.1,1009-1027).
gcatcatgtggctctcaat

SEQ ID NO: 606739 - DNA, 19 bp, Mus musculus
  siRNA target sequence for 0610041B22Rik (NM_025340.1,1059-1077).
gtcccataaggctacaagt

SEQ ID NO: 606740 - DNA, 19 bp, Mus musculus
  siRNA target sequence for 0610041B22Rik (NM_025340.1,1088-1106).
gacgccacatcggttttgt

SEQ ID NO: 606741 - DNA, 19 bp, Mus musculus
  siRNA target sequence for 0610041B22Rik (NM_025340.1,1286-1304).
gaccctgcttttctttact

SEQ ID NO: 606742 - DNA, 19 bp, Mus musculus
  siRNA target sequence for 0610041B22Rik (NM_025340.1,1350-1368).
ccaagatggaccggaaatt

SEQ ID NO: 606743 - DNA, 19 bp, Mus musculus
  siRNA target sequence for 0610041B22Rik (NM_025340.1,1351-1369).
caagatggaccggaaatta

SEQ ID NO: 606744 - DNA, 19 bp, Mus musculus
  siRNA target sequence for 0610041B22Rik (NM_025340.1,1360-1378).
ccggaaattaggcttgttt

SEQ ID NO: 606745 - DNA, 19 bp, Mus musculus
  siRNA target sequence for 0610041B22Rik (NM_025340.1,1493-1511).
cctggctgtgagatgtgta

SEQ ID NO: 606746 - DNA, 19 bp, Mus musculus
  siRNA target sequence for 2310038K02Rik (NM_146186.2,94-112).
gcggagtgacacgatagaa

SEQ ID NO: 606747 - DNA, 19 bp, Mus musculus
  siRNA target sequence for 2310038K02Rik (NM_146186.2,95-113).
cggagtgacacgatagaaa

SEQ ID NO: 606748 - DNA, 19 bp, Mus musculus
  siRNA target sequence for 2310038K02Rik (NM_146186.2,96-114).
ggagtgacacgatagaaaa

SEQ ID NO: 606749 - DNA, 19 bp, Mus musculus
  siRNA target sequence for 2310038K02Rik (NM_146186.2,548-566).
gctttctcacccaatatga

SEQ ID NO: 606750 - DNA, 19 bp, Mus musculus
  siRNA target sequence for 2310038K02Rik (NM_146186.2,549-567).
ctttctcacccaatatgaa

SEQ ID NO: 606751 - DNA, 19 bp, Mus musculus
  siRNA target sequence for 2310038K02Rik (NM_146186.2,646-664).
caacaaggtgtcatgtaga

SEQ ID NO: 606752 - DNA, 19 bp, Mus musculus
  siRNA target sequence for 2310038K02Rik (NM_146186.2,719-737).
cggcatgtgaggttttggt

SEQ ID NO: 606753 - DNA, 19 bp, Mus musculus
  siRNA target sequence for 2310038K02Rik (NM_146186.2,727-745).
gaggttttggttcttagaa

SEQ ID NO: 606754 - DNA, 19 bp, Mus musculus
  siRNA target sequence for 2310038K02Rik (NM_146186.2,806-824).
ggtgagctgcacaacaata

SEQ ID NO: 606755 - DNA, 19 bp, Mus musculus
  siRNA target sequence for 2310038K02Rik (NM_146186.2,814-832).
gcacaacaatatcttttgt

SEQ ID NO: 606756 - DNA, 19 bp, Mus musculus
  siRNA target sequence for 2310038K02Rik (NM_146186.2,854-872).
cggatggcaggcaatacct

SEQ ID NO: 606757 - DNA, 19 bp, Mus musculus
  siRNA target sequence for 2310038K02Rik (NM_146186.2,855-873).
ggatggcaggcaatacctt

SEQ ID NO: 606758 - DNA, 19 bp, Mus musculus
  siRNA target sequence for 2310038K02Rik (NM_146186.2,969-987).
gtgtcagtgacgagttgat

SEQ ID NO: 606759 - DNA, 19 bp, Mus musculus
  siRNA target sequence for 2310038K02Rik (NM_146186.2,971-989).
gtcagtgacgagttgatct

SEQ ID NO: 606760 - DNA, 19 bp, Mus musculus
  siRNA target sequence for 2310038K02Rik (NM_146186.2,1221-1239).
gggatgtcaaggacattga

SEQ ID NO: 606761 - DNA, 19 bp, Mus musculus
  siRNA target sequence for 2310038K02Rik (NM_146186.2,1276-1294).
ctcctttgtctggaatgta

SEQ ID NO: 606762 - DNA, 19 bp, Mus musculus
  siRNA target sequence for 2310038K02Rik (NM_146186.2,1297-1315).
ggtgtaccctgaatttgaa

SEQ ID NO: 606763 - DNA, 19 bp, Mus musculus
  siRNA target sequence for 2310038K02Rik (NM_146186.2,1334-1352).
ccgtccgggacttttctga

SEQ ID NO: 606764 - DNA, 19 bp, Mus musculus
  siRNA target sequence for 2310038K02Rik (NM_146186.2,1351-1369).
gacttgttcctcagacaat

SEQ ID NO: 606765 - DNA, 19 bp, Mus musculus
  siRNA target sequence for 2310038K02Rik (NM_146186.2,1403-1421).
gacactcgatggcaaaaga

SEQ ID NO: 606766 - DNA, 19 bp, Mus musculus
  siRNA target sequence for 2310038K02Rik (NM_146186.2,1407-1425).
ctcgatggcaaaagaacat

SEQ ID NO: 606767 - DNA, 19 bp, Mus musculus
  siRNA target sequence for 2310038K02Rik (NM_146186.2,1441-1459).
gctgaaggtggtctatgta

SEQ ID NO: 606768 - DNA, 19 bp, Mus musculus
  siRNA target sequence for 2310038K02Rik (NM_146186.2,1447-1465).
ggtggtctatgtagagaat

SEQ ID NO: 606769 - DNA, 19 bp, Mus musculus
  siRNA target sequence for 2310038K02Rik (NM_146186.2,1520-1538).
ggcactcccatggatatga

SEQ ID NO: 606770 - DNA, 19 bp, Mus musculus
  siRNA target sequence for 2310038K02Rik (NM_146186.2,1521-1539).
gcactcccatggatatgaa

SEQ ID NO: 606771 - DNA, 19 bp, Mus musculus
  siRNA target sequence for 2310038K02Rik (NM_146186.2,1593-1611).
gcgaccgcagtggaaatct

SEQ ID NO: 606772 - DNA, 19 bp, Mus musculus
  siRNA target sequence for 2310038K02Rik (NM_146186.2,1595-1613).
gaccgcagtggaaatctga

SEQ ID NO: 606773 - DNA, 19 bp, Mus musculus
  siRNA target sequence for 2310038K02Rik (NM_146186.2,1740-1758).
gactcatccatgtgttaaa

SEQ ID NO: 606774 - DNA, 19 bp, Mus musculus
  siRNA target sequence for 2310038K02Rik (NM_146186.2,1905-1923).
cggatggactgcactttgt

SEQ ID NO: 606775 - DNA, 19 bp, Mus musculus
  siRNA target sequence for 2310038K02Rik (NM_146186.2,1972-1990).
cgacatcacacagaagtat

SEQ ID NO: 606776 - DNA, 19 bp, Mus musculus
  siRNA target sequence for 2310038K02Rik (NM_146186.2,2013-2031).
gcaacgtaagggtctacaa

SEQ ID NO: 606777 - DNA, 19 bp, Mus musculus
  siRNA target sequence for 2310038K02Rik (NM_146186.2,2152-2170).
catctccttgattgacttt

SEQ ID NO: 606778 - DNA, 19 bp, Mus musculus
  siRNA target sequence for 2310038K02Rik (NM_146186.2,2197-2215).
gtttggccattcggaaatt

SEQ ID NO: 606779 - DNA, 19 bp, Mus musculus
  siRNA target sequence for 2310038K02Rik (NM_146186.2,2201-2219).
ggccattcggaaattgtca

SEQ ID NO: 606780 - DNA, 19 bp, Mus musculus
  siRNA target sequence for 2310038K02Rik (NM_146186.2,2240-2258).
gactgccgccacttgatca

SEQ ID NO: 606781 - DNA, 19 bp, Mus musculus
  siRNA target sequence for 2310038K02Rik (NM_146186.2,2580-2598).
ggctgctaggggatgatga

SEQ ID NO: 606782 - DNA, 19 bp, Mus musculus
  siRNA target sequence for 2310038K02Rik (NM_146186.2,2581-2599).
gctgctaggggatgatgat

SEQ ID NO: 606783 - DNA, 19 bp, Mus musculus
  siRNA target sequence for 2310038K02Rik (NM_146186.2,2987-3005).
gggatgcacagggagtatt

SEQ ID NO: 606784 - DNA, 19 bp, Mus musculus
  siRNA target sequence for 2310038K02Rik (NM_146186.2,2988-3006).
ggatgcacagggagtatta

SEQ ID NO: 606785 - DNA, 19 bp, Mus musculus
  siRNA target sequence for 2310038K02Rik (NM_146186.2,2989-3007).
gatgcacagggagtattat

SEQ ID NO: 606786 - DNA, 19 bp, Mus musculus
  siRNA target sequence for 2310038K02Rik (NM_146186.2,3062-3080).
gtctcttccgtcagttcaa

SEQ ID NO: 606787 - DNA, 19 bp, Mus musculus
  siRNA target sequence for 4732496O19Rik (NM_133853.1,373-391).
ggtgaagccaggcaaagtt

SEQ ID NO: 606788 - DNA, 19 bp, Mus musculus
  siRNA target sequence for 4732496O19Rik (NM_133853.1,376-394).
gaagccaggcaaagttata

SEQ ID NO: 606789 - DNA, 19 bp, Mus musculus
  siRNA target sequence for 4732496O19Rik (NM_133853.1,381-399).
caggcaaagttataaataa

SEQ ID NO: 606790 - DNA, 19 bp, Mus musculus
  siRNA target sequence for 4732496O19Rik (NM_133853.1,412-430).
ctacctgagtcttcagttt

SEQ ID NO: 606791 - DNA, 19 bp, Mus musculus
  siRNA target sequence for 4732496O19Rik (NM_133853.1,416-434).
ctgagtcttcagtttcaga

SEQ ID NO: 606792 - DNA, 19 bp, Mus musculus
  siRNA target sequence for 4732496O19Rik (NM_133853.1,438-456).
gatcaattgaccacaaact

SEQ ID NO: 606793 - DNA, 19 bp, Mus musculus
  siRNA target sequence for 4732496O19Rik (NM_133853.1,441-459).
caattgaccacaaactaca

SEQ ID NO: 606794 - DNA, 19 bp, Mus musculus
  siRNA target sequence for 4732496O19Rik (NM_133853.1,534-552).
caggggtggattataactt

SEQ ID NO: 606795 - DNA, 19 bp, Mus musculus
  siRNA target sequence for 4732496O19Rik (NM_133853.1,536-554).
ggggtggattataacttca

SEQ ID NO: 606796 - DNA, 19 bp, Mus musculus
  siRNA target sequence for 4732496O19Rik (NM_133853.1,537-555).
gggtggattataacttcat

SEQ ID NO: 606797 - DNA, 19 bp, Mus musculus
  siRNA target sequence for 4732496O19Rik (NM_133853.1,589-607).
cggagcattgttagaaagt

SEQ ID NO: 606798 - DNA, 19 bp, Mus musculus
  siRNA target sequence for 4732496O19Rik (NM_133853.1,598-616).
gttagaaagtggaacgtat

SEQ ID NO: 606799 - DNA, 19 bp, Mus musculus
  siRNA target sequence for 4732496O19Rik (NM_133853.1,606-624).
gtggaacgtatgatggaaa

SEQ ID NO: 606800 - DNA, 19 bp, Mus musculus
  siRNA target sequence for 4732496O19Rik (NM_133853.1,608-626).
ggaacgtatgatggaaatt

SEQ ID NO: 606801 - DNA, 19 bp, Mus musculus
  siRNA target sequence for 4732496O19Rik (NM_133853.1,609-627).
gaacgtatgatggaaattt

SEQ ID NO: 606802 - DNA, 19 bp, Mus musculus
  siRNA target sequence for 4732496O19Rik (NM_133853.1,667-685).
ccagcccgatccagttgat

SEQ ID NO: 606803 - DNA, 19 bp, Mus musculus
  siRNA target sequence for 4732496O19Rik (NM_133853.1,689-707).
gtcctctttgacaatgagt

SEQ ID NO: 606804 - DNA, 19 bp, Mus musculus
  siRNA target sequence for 4732496O19Rik (NM_133853.1,820-838).
cggaagcatggaaactaga

SEQ ID NO: 606805 - DNA, 19 bp, Mus musculus
  siRNA target sequence for 4732496O19Rik (NM_133853.1,878-896).
gttccaagttataaccaaa

SEQ ID NO: 606806 - DNA, 19 bp, Mus musculus
  siRNA target sequence for 4732496O19Rik (NM_133853.1,903-921).
gctccatggactttagaaa

SEQ ID NO: 606807 - DNA, 19 bp, Mus musculus
  siRNA target sequence for 4732496O19Rik (NM_133853.1,906-924).
ccatggactttagaaatta

SEQ ID NO: 606808 - DNA, 19 bp, Mus musculus
  siRNA target sequence for 4732496O19Rik (NM_133853.1,990-1008).
gaatgatctacttcattga

SEQ ID NO: 606809 - DNA, 19 bp, Mus musculus
  siRNA target sequence for 4732496O19Rik (NM_133853.1,1007-1025).
gatcataatacgaagacaa

SEQ ID NO: 606810 - DNA, 19 bp, Mus musculus
  siRNA target sequence for 4732496O19Rik (NM_133853.1,1156-1174).
ccagaaaactcagtttgaa

SEQ ID NO: 606811 - DNA, 19 bp, Mus musculus
  siRNA target sequence for 4732496O19Rik (NM_133853.1,1207-1225).
gttaggacaggctgaaatt

SEQ ID NO: 606812 - DNA, 19 bp, Mus musculus
  siRNA target sequence for 4732496O19Rik (NM_133853.1,1211-1229).
ggacaggctgaaattcatt

SEQ ID NO: 606813 - DNA, 19 bp, Mus musculus
  siRNA target sequence for 4732496O19Rik (NM_133853.1,1244-1262).
gtggaaagagcacacttta

SEQ ID NO: 606814 - DNA, 19 bp, Mus musculus
  siRNA target sequence for 4732496O19Rik (NM_133853.1,1265-1283).
cgggacccatcccaactta

SEQ ID NO: 606815 - DNA, 19 bp, Mus musculus
  siRNA target sequence for 4732496O19Rik (NM_133853.1,1266-1284).
gggacccatcccaacttaa

SEQ ID NO: 606816 - DNA, 19 bp, Mus musculus
  siRNA target sequence for 4732496O19Rik (NM_133853.1,1267-1285).
ggacccatcccaacttaaa

SEQ ID NO: 606817 - DNA, 19 bp, Mus musculus
  siRNA target sequence for 4732496O19Rik (NM_133853.1,1270-1288).
cccatcccaacttaaaggt

SEQ ID NO: 606818 - DNA, 19 bp, Mus musculus
  siRNA target sequence for 4732496O19Rik (NM_133853.1,1295-1313).
gttcgagcatcgctgaaaa

SEQ ID NO: 606819 - DNA, 19 bp, Mus musculus
  siRNA target sequence for 4732496O19Rik (NM_133853.1,1301-1319).
gcatcgctgaaaaaaagca

SEQ ID NO: 606820 - DNA, 19 bp, Mus musculus
  siRNA target sequence for 4732496O19Rik (NM_133853.1,1512-1530).
ctgtcaaccagtatgtcaa

SEQ ID NO: 606821 - DNA, 19 bp, Mus musculus
  siRNA target sequence for 4732496O19Rik (NM_133853.1,1520-1538).
cagtatgtcaaccttactt

SEQ ID NO: 606822 - DNA, 19 bp, Mus musculus
  siRNA target sequence for 4732496O19Rik (NM_133853.1,1522-1540).
gtatgtcaaccttacttta

SEQ ID NO: 606823 - DNA, 19 bp, Mus musculus
  siRNA target sequence for 4732496O19Rik (NM_133853.1,1612-1630).
caatggacaatctttaaca

SEQ ID NO: 606824 - DNA, 19 bp, Mus musculus
  siRNA target sequence for 4732496O19Rik (NM_133853.1,1644-1662).
gcatgaatactcaggattt

SEQ ID NO: 606825 - DNA, 19 bp, Mus musculus
  siRNA target sequence for 4732496O19Rik (NM_133853.1,1694-1712).
ggaaaatcaggacaaatct

SEQ ID NO: 606826 - DNA, 19 bp, Mus musculus
  siRNA target sequence for 4732496O19Rik (NM_133853.1,1780-1798).
cagctcacagcctgaacta

SEQ ID NO: 606827 - DNA, 19 bp, Mus musculus
  siRNA target sequence for 4732496O19Rik (NM_133853.1,1799-1817).
gtgactatccctctgatta

SEQ ID NO: 606828 - DNA, 19 bp, Mus musculus
  siRNA target sequence for 4732496O19Rik (NM_133853.1,1910-1928).
caaaaaggggatatcatca

SEQ ID NO: 606829 - DNA, 19 bp, Mus musculus
  siRNA target sequence for 4732496O19Rik (NM_133853.1,1945-1963).
gaatgtgcagaatttaaca

SEQ ID NO: 606830 - DNA, 19 bp, Mus musculus
  siRNA target sequence for 4732496O19Rik (NM_133853.1,2006-2024).
gcagatgttccattgctta

SEQ ID NO: 606831 - DNA, 19 bp, Mus musculus
  siRNA target sequence for 4732496O19Rik (NM_133853.1,2039-2057).
ccttgttcaccaactaaaa

SEQ ID NO: 606832 - DNA, 19 bp, Mus musculus
  siRNA target sequence for 4732496O19Rik (NM_133853.1,2135-2153).
ccttttccgcccagcataa

SEQ ID NO: 606833 - DNA, 19 bp, Mus musculus
  siRNA target sequence for 4732496O19Rik (NM_133853.1,2136-2154).
cttttccgcccagcataat

SEQ ID NO: 606834 - DNA, 19 bp, Mus musculus
  siRNA target sequence for 4732496O19Rik (NM_133853.1,2141-2159).
ccgcccagcataatcagat

SEQ ID NO: 606835 - DNA, 19 bp, Mus musculus
  siRNA target sequence for 4732496O19Rik (NM_133853.1,2160-2178).
caggatccccaaaattgga

SEQ ID NO: 606836 - DNA, 19 bp, Mus musculus
  siRNA target sequence for 4732496O19Rik (NM_133853.1,2191-2209).
ctacctgaaatctaagact

SEQ ID NO: 606837 - DNA, 19 bp, Mus musculus
  siRNA target sequence for 4732496O19Rik (NM_133853.1,2194-2212).
cctgaaatctaagacttta

SEQ ID NO: 606838 - DNA, 19 bp, Mus musculus
  siRNA target sequence for 4732496O19Rik (NM_133853.1,2235-2253).
ccaaagatctggatgtctt

SEQ ID NO: 606839 - DNA, 19 bp, Mus musculus
  siRNA target sequence for 4732496O19Rik (NM_133853.1,2303-2321).
ggacctgaccagtctatat

SEQ ID NO: 606840 - DNA, 19 bp, Mus musculus
  siRNA target sequence for 4732496O19Rik (NM_133853.1,2304-2322).
gacctgaccagtctatata

SEQ ID NO: 606841 - DNA, 19 bp, Mus musculus
  siRNA target sequence for 4732496O19Rik (NM_133853.1,2306-2324).
cctgaccagtctatatata

SEQ ID NO: 606842 - DNA, 19 bp, Mus musculus
  siRNA target sequence for 4732496O19Rik (NM_133853.1,2373-2391).
gtgctgctgatgaattgat

SEQ ID NO: 606843 - DNA, 19 bp, Mus musculus
  siRNA target sequence for 4732496O19Rik (NM_133853.1,2375-2393).
gctgctgatgaattgatgt

SEQ ID NO: 606844 - DNA, 19 bp, Mus musculus
  siRNA target sequence for 4732496O19Rik (NM_133853.1,2378-2396).
gctgatgaattgatgtgta

SEQ ID NO: 606845 - DNA, 19 bp, Mus musculus
  siRNA target sequence for 4732496O19Rik (NM_133853.1,2424-2442).
cacacaagcaagtattaga

SEQ ID NO: 606846 - DNA, 19 bp, Mus musculus
  siRNA target sequence for 4732496O19Rik (NM_133853.1,2428-2446).
caagcaagtattagactta

SEQ ID NO: 606847 - DNA, 19 bp, Mus musculus
  siRNA target sequence for 4732496O19Rik (NM_133853.1,2432-2450).
caagtattagacttaatga

SEQ ID NO: 606848 - DNA, 19 bp, Mus musculus
  siRNA target sequence for 4732496O19Rik (NM_133853.1,2469-2487).
gacacgtgctactaactgt

SEQ ID NO: 606849 - DNA, 19 bp, Mus musculus
  siRNA target sequence for 4732496O19Rik (NM_133853.1,2497-2515).
gatcttctatggagagaaa

SEQ ID NO: 606850 - DNA, 19 bp, Mus musculus
  siRNA target sequence for 4732496O19Rik (NM_133853.1,2500-2518).
cttctatggagagaaacaa

SEQ ID NO: 606851 - DNA, 19 bp, Mus musculus
  siRNA target sequence for 4732496O19Rik (NM_133853.1,2599-2617).
cccacaggaggcctatgat

SEQ ID NO: 606852 - DNA, 19 bp, Mus musculus
  siRNA target sequence for 4732496O19Rik (NM_133853.1,2601-2619).
cacaggaggcctatgatgt

SEQ ID NO: 606853 - DNA, 19 bp, Mus musculus
  siRNA target sequence for 4732496O19Rik (NM_133853.1,2798-2816).
gtcgacctatcccatgata

SEQ ID NO: 606854 - DNA, 19 bp, Mus musculus
  siRNA target sequence for 4732496O19Rik (NM_133853.1,2800-2818).
cgacctatcccatgataat

SEQ ID NO: 606855 - DNA, 19 bp, Mus musculus
  siRNA target sequence for 4732496O19Rik (NM_133853.1,2801-2819).
gacctatcccatgataata

SEQ ID NO: 606856 - DNA, 19 bp, Mus musculus
  siRNA target sequence for 4732496O19Rik (NM_133853.1,2803-2821).
cctatcccatgataatatt

SEQ ID NO: 606857 - DNA, 19 bp, Mus musculus
  siRNA target sequence for 4732496O19Rik (NM_133853.1,3036-3054).
cctggtctgaccataagca

SEQ ID NO: 606858 - DNA, 19 bp, Mus musculus
  siRNA target sequence for 4732496O19Rik (NM_133853.1,3171-3189).
gcggagggaaggagtacaa

SEQ ID NO: 606859 - DNA, 19 bp, Mus musculus
  siRNA target sequence for 4732496O19Rik (NM_133853.1,3174-3192).
gagggaaggagtacaacat

SEQ ID NO: 606860 - DNA, 19 bp, Mus musculus
  siRNA target sequence for 4732496O19Rik (NM_133853.1,3257-3275).
ggtgaccagatcgttgaaa

SEQ ID NO: 606861 - DNA, 19 bp, Mus musculus
  siRNA target sequence for 4732496O19Rik (NM_133853.1,3262-3280).
ccagatcgttgaaatcaat

SEQ ID NO: 606862 - DNA, 19 bp, Mus musculus
  siRNA target sequence for 4732496O19Rik (NM_133853.1,3364-3382).
gccaggaactggcttgata

SEQ ID NO: 606863 - DNA, 19 bp, Mus musculus
  siRNA target sequence for Akap8 (NM_019774.2,102-120).
cacccagggtacatatgga

SEQ ID NO: 606864 - DNA, 19 bp, Mus musculus
  siRNA target sequence for Akap8 (NM_019774.2,129-147).
gaccagctggcaaggttat

SEQ ID NO: 606865 - DNA, 19 bp, Mus musculus
  siRNA target sequence for Akap8 (NM_019774.2,131-149).
ccagctggcaaggttatga

SEQ ID NO: 606866 - DNA, 19 bp, Mus musculus
  siRNA target sequence for Akap8 (NM_019774.2,132-150).
cagctggcaaggttatgaa

SEQ ID NO: 606867 - DNA, 19 bp, Mus musculus
  siRNA target sequence for Akap8 (NM_019774.2,134-152).
gctggcaaggttatgaaaa

SEQ ID NO: 606868 - DNA, 19 bp, Mus musculus
  siRNA target sequence for Akap8 (NM_019774.2,143-161).
gttatgaaaactacaacta

SEQ ID NO: 606869 - DNA, 19 bp, Mus musculus
  siRNA target sequence for Akap8 (NM_019774.2,190-208).
gcaggaacaccctatagtt

SEQ ID NO: 606870 - DNA, 19 bp, Mus musculus
  siRNA target sequence for Akap8 (NM_019774.2,191-209).
caggaacaccctatagtta

SEQ ID NO: 606871 - DNA, 19 bp, Mus musculus
  siRNA target sequence for Akap8 (NM_019774.2,324-342).
gctcattgccaagatcaat

SEQ ID NO: 606872 - DNA, 19 bp, Mus musculus
  siRNA target sequence for Akap8 (NM_019774.2,327-345).
cattgccaagatcaatcaa

SEQ ID NO: 606873 - DNA, 19 bp, Mus musculus
  siRNA target sequence for Akap8 (NM_019774.2,332-350).
ccaagatcaatcaacgttt

SEQ ID NO: 606874 - DNA, 19 bp, Mus musculus
  siRNA target sequence for Akap8 (NM_019774.2,343-361).
caacgtttggacatgttgt

SEQ ID NO: 606875 - DNA, 19 bp, Mus musculus
  siRNA target sequence for Akap8 (NM_019774.2,346-364).
cgtttggacatgttgtcta

SEQ ID NO: 606876 - DNA, 19 bp, Mus musculus
  siRNA target sequence for Akap8 (NM_019774.2,351-369).
ggacatgttgtctaaggaa

SEQ ID NO: 606877 - DNA, 19 bp, Mus musculus
  siRNA target sequence for Akap8 (NM_019774.2,453-471).
cgacgccaggccctgtata

SEQ ID NO: 606878 - DNA, 19 bp, Mus musculus
  siRNA target sequence for Akap8 (NM_019774.2,464-482).
cctgtatacctgagcataa

SEQ ID NO: 606879 - DNA, 19 bp, Mus musculus
  siRNA target sequence for Akap8 (NM_019774.2,465-483).
ctgtatacctgagcataat

SEQ ID NO: 606880 - DNA, 19 bp, Mus musculus
  siRNA target sequence for Akap8 (NM_019774.2,495-513).
cggctacggttatgattat

SEQ ID NO: 606881 - DNA, 19 bp, Mus musculus
  siRNA target sequence for Akap8 (NM_019774.2,501-519).
cggttatgattatgacttt

SEQ ID NO: 606882 - DNA, 19 bp, Mus musculus
  siRNA target sequence for Akap8 (NM_019774.2,526-544).
ggaactgaccgcaatggta

SEQ ID NO: 606883 - DNA, 19 bp, Mus musculus
  siRNA target sequence for Akap8 (NM_019774.2,593-611).
gctcccttgatggtttctt

SEQ ID NO: 606884 - DNA, 19 bp, Mus musculus
  siRNA target sequence for Akap8 (NM_019774.2,716-734).
cgtggaatgagctgaacta

SEQ ID NO: 606885 - DNA, 19 bp, Mus musculus
  siRNA target sequence for Akap8 (NM_019774.2,1012-1030).
gacggagatctgtctgaaa

SEQ ID NO: 606886 - DNA, 19 bp, Mus musculus
  siRNA target sequence for Akap8 (NM_019774.2,1055-1073).
gatcaggagatgaagaatt

SEQ ID NO: 606887 - DNA, 19 bp, Mus musculus
  siRNA target sequence for Akap8 (NM_019774.2,1227-1245).
caagtttcgtagctttgaa

SEQ ID NO: 606888 - DNA, 19 bp, Mus musculus
  siRNA target sequence for Akap8 (NM_019774.2,1230-1248).
gtttcgtagctttgaagat

SEQ ID NO: 606889 - DNA, 19 bp, Mus musculus
  siRNA target sequence for Akap8 (NM_019774.2,1269-1287).
gcaaagtaaatttcacaaa

SEQ ID NO: 606890 - DNA, 19 bp, Mus musculus
  siRNA target sequence for Akap8 (NM_019774.2,1290-1308).
gactttgcgatttataagt

SEQ ID NO: 606891 - DNA, 19 bp, Mus musculus
  siRNA target sequence for Akap8 (NM_019774.2,1296-1314).
gcgatttataagtaccaaa

SEQ ID NO: 606892 - DNA, 19 bp, Mus musculus
  siRNA target sequence for Akap8 (NM_019774.2,1317-1335).
gcccgacaagacagtagaa

SEQ ID NO: 606893 - DNA, 19 bp, Mus musculus
  siRNA target sequence for Akap8 (NM_019774.2,1319-1337).
ccgacaagacagtagaatt

SEQ ID NO: 606894 - DNA, 19 bp, Mus musculus
  siRNA target sequence for Akap8 (NM_019774.2,1439-1457).
gcattggccaggagcattt

SEQ ID NO: 606895 - DNA, 19 bp, Mus musculus
  siRNA target sequence for Akap8 (NM_019774.2,1544-1562).
ccgtggaccataaccataa

SEQ ID NO: 606896 - DNA, 19 bp, Mus musculus
  siRNA target sequence for Akap8 (NM_019774.2,1545-1563).
cgtggaccataaccataat

SEQ ID NO: 606897 - DNA, 19 bp, Mus musculus
  siRNA target sequence for Akap8 (NM_019774.2,1548-1566).
ggaccataaccataatcga

SEQ ID NO: 606898 - DNA, 19 bp, Mus musculus
  siRNA target sequence for Akap8 (NM_019774.2,1549-1567).
gaccataaccataatcgaa

SEQ ID NO: 606899 - DNA, 19 bp, Mus musculus
  siRNA target sequence for Akap8 (NM_019774.2,1755-1773).
ggtagctgccgaagtctta

SEQ ID NO: 606900 - DNA, 19 bp, Mus musculus
  siRNA target sequence for Akap8 (NM_019774.2,1899-1917).
cactgaaaagctactagaa

SEQ ID NO: 606901 - DNA, 19 bp, Mus musculus
  siRNA target sequence for Akap8 (NM_019774.2,2030-2048).
cgttacctgtcatagcaat

SEQ ID NO: 606902 - DNA, 19 bp, Mus musculus
  siRNA target sequence for AV047578 (NM_145852.1,110-128).
ctgcccgacaccatgttct

SEQ ID NO: 606903 - DNA, 19 bp, Mus musculus
  siRNA target sequence for AV047578 (NM_145852.1,360-378).
gtagccacaagcaatatgt

SEQ ID NO: 606904 - DNA, 19 bp, Mus musculus
  siRNA target sequence for AV047578 (NM_145852.1,588-606).
gcatcccctttgaaacctt

SEQ ID NO: 606905 - DNA, 19 bp, Mus musculus
  siRNA target sequence for AV047578 (NM_145852.1,589-607).
catcccctttgaaaccttt

SEQ ID NO: 606906 - DNA, 19 bp, Mus musculus
  siRNA target sequence for AV047578 (NM_145852.1,603-621).
cctttgcctatgtttacca

SEQ ID NO: 606907 - DNA, 19 bp, Mus musculus
  siRNA target sequence for AV047578 (NM_145852.1,654-672).
ccgtggagaccgagaacta

SEQ ID NO: 606908 - DNA, 19 bp, Mus musculus
  siRNA target sequence for AV047578 (NM_145852.1,655-673).
cgtggagaccgagaactat

SEQ ID NO: 606909 - DNA, 19 bp, Mus musculus
  siRNA target sequence for AV047578 (NM_145852.1,658-676).
ggagaccgagaactatctt

SEQ ID NO: 606910 - DNA, 19 bp, Mus musculus
  siRNA target sequence for AV047578 (NM_145852.1,670-688).
ctatcttaccagtttaaga

SEQ ID NO: 606911 - DNA, 19 bp, Mus musculus
  siRNA target sequence for BC032265 (NM_181420.2,195-213).
gggtgagatggcaagctta

SEQ ID NO: 606912 - DNA, 19 bp, Mus musculus
  siRNA target sequence for BC032265 (NM_181420.2,196-214).
ggtgagatggcaagcttaa

SEQ ID NO: 606913 - DNA, 19 bp, Mus musculus
  siRNA target sequence for BC032265 (NM_181420.2,209-227).
gcttaactgccattctgaa

SEQ ID NO: 606914 - DNA, 19 bp, Mus musculus
  siRNA target sequence for BC032265 (NM_181420.2,348-366).
gacccagcttgcagatcta

SEQ ID NO: 606915 - DNA, 19 bp, Mus musculus
  siRNA target sequence for BC032265 (NM_181420.2,456-474).
ggaccagtttgggtttgat

SEQ ID NO: 606916 - DNA, 19 bp, Mus musculus
  siRNA target sequence for BC032265 (NM_181420.2,491-509).
gatacctcccccaggtaaa

SEQ ID NO: 606917 - DNA, 19 bp, Mus musculus
  siRNA target sequence for BC032265 (NM_181420.2,522-540).
gaattgggtcgaattctat

SEQ ID NO: 606918 - DNA, 19 bp, Mus musculus
  siRNA target sequence for BC032265 (NM_181420.2,645-663).
gttccgtgatctggaaatt

SEQ ID NO: 606919 - DNA, 19 bp, Mus musculus
  siRNA target sequence for BC032265 (NM_181420.2,697-715).
gggaatgtagcagaagatt

SEQ ID NO: 606920 - DNA, 19 bp, Mus musculus
  siRNA target sequence for BC032265 (NM_181420.2,719-737).
ctgggcccatcatttttga

SEQ ID NO: 606921 - DNA, 19 bp, Mus musculus
  siRNA target sequence for BC032265 (NM_181420.2,750-768).
ctatggacactcagaatat

SEQ ID NO: 606922 - DNA, 19 bp, Mus musculus
  siRNA target sequence for BC032265 (NM_181420.2,774-792).
ggcaatagcgggcatgttt

SEQ ID NO: 606923 - DNA, 19 bp, Mus musculus
  siRNA target sequence for BC032265 (NM_181420.2,797-815).
gcttcagtagctcctttta

SEQ ID NO: 606924 - DNA, 19 bp, Mus musculus
  siRNA target sequence for BC032265 (NM_181420.2,892-910).
ctgaaccactggaatcatt

SEQ ID NO: 606925 - DNA, 19 bp, Mus musculus
  siRNA target sequence for BC032265 (NM_181420.2,927-945).
gggatcctctctaaacata

SEQ ID NO: 606926 - DNA, 19 bp, Mus musculus
  siRNA target sequence for Ccnh (NM_023243.2,136-154).
gccaaccgcaaattcaagt

SEQ ID NO: 606927 - DNA, 19 bp, Mus musculus
  siRNA target sequence for Ccnh (NM_023243.2,171-189).
cgggaaggttcttccaaat

SEQ ID NO: 606928 - DNA, 19 bp, Mus musculus
  siRNA target sequence for Ccnh (NM_023243.2,174-192).
gaaggttcttccaaatgat

SEQ ID NO: 606929 - DNA, 19 bp, Mus musculus
  siRNA target sequence for Ccnh (NM_023243.2,298-316).
gtgggtacagcttgtatgt

SEQ ID NO: 606930 - DNA, 19 bp, Mus musculus
  siRNA target sequence for Ccnh (NM_023243.2,300-318).
gggtacagcttgtatgtat

SEQ ID NO: 606931 - DNA, 19 bp, Mus musculus
  siRNA target sequence for Ccnh (NM_023243.2,301-319).
ggtacagcttgtatgtatt

SEQ ID NO: 606932 - DNA, 19 bp, Mus musculus
  siRNA target sequence for Ccnh (NM_023243.2,302-320).
gtacagcttgtatgtattt

SEQ ID NO: 606933 - DNA, 19 bp, Mus musculus
  siRNA target sequence for Ccnh (NM_023243.2,315-333).
gtatttcaagcgtttttat

SEQ ID NO: 606934 - DNA, 19 bp, Mus musculus
  siRNA target sequence for Ccnh (NM_023243.2,321-339).
caagcgtttttatcttaat

SEQ ID NO: 606935 - DNA, 19 bp, Mus musculus
  siRNA target sequence for Ccnh (NM_023243.2,360-378).
ccctcggataataatgctt

SEQ ID NO: 606936 - DNA, 19 bp, Mus musculus
  siRNA target sequence for Ccnh (NM_023243.2,361-379).
cctcggataataatgctta

SEQ ID NO: 606937 - DNA, 19 bp, Mus musculus
  siRNA target sequence for Ccnh (NM_023243.2,364-382).
cggataataatgcttactt

SEQ ID NO: 606938 - DNA, 19 bp, Mus musculus
  siRNA target sequence for Ccnh (NM_023243.2,398-416).
gcaaagtagatgaattcaa

SEQ ID NO: 606939 - DNA, 19 bp, Mus musculus
  siRNA target sequence for Ccnh (NM_023243.2,425-443).
gtccccagtttgttggaaa

SEQ ID NO: 606940 - DNA, 19 bp, Mus musculus
  siRNA target sequence for Ccnh (NM_023243.2,492-510).
ggaatatgaactactactt

SEQ ID NO: 606941 - DNA, 19 bp, Mus musculus
  siRNA target sequence for Ccnh (NM_023243.2,493-511).
gaatatgaactactactta

SEQ ID NO: 606942 - DNA, 19 bp, Mus musculus
  siRNA target sequence for Ccnh (NM_023243.2,532-550).
cttattgtccacaatccat

SEQ ID NO: 606943 - DNA, 19 bp, Mus musculus
  siRNA target sequence for Ccnh (NM_023243.2,543-561).
caatccatacagaccattt

SEQ ID NO: 606944 - DNA, 19 bp, Mus musculus
  siRNA target sequence for Ccnh (NM_023243.2,562-580).
gaaggcttcctcatcgata

SEQ ID NO: 606945 - DNA, 19 bp, Mus musculus
  siRNA target sequence for Ccnh (NM_023243.2,565-583).
ggcttcctcatcgatataa

SEQ ID NO: 606946 - DNA, 19 bp, Mus musculus
  siRNA target sequence for Ccnh (NM_023243.2,566-584).
gcttcctcatcgatataaa

SEQ ID NO: 606947 - DNA, 19 bp, Mus musculus
  siRNA target sequence for Ccnh (NM_023243.2,570-588).
cctcatcgatataaagact

SEQ ID NO: 606948 - DNA, 19 bp, Mus musculus
  siRNA target sequence for Ccnh (NM_023243.2,604-622).
gagaatccggagattctga

SEQ ID NO: 606949 - DNA, 19 bp, Mus musculus
  siRNA target sequence for Ccnh (NM_023243.2,634-652).
gatgattttcttagtagaa

SEQ ID NO: 606950 - DNA, 19 bp, Mus musculus
  siRNA target sequence for Ccnh (NM_023243.2,664-682).
gatgcttatcttttataca

SEQ ID NO: 606951 - DNA, 19 bp, Mus musculus
  siRNA target sequence for Ccnh (NM_023243.2,699-717).
cctgaccgccattttatca

SEQ ID NO: 606952 - DNA, 19 bp, Mus musculus
  siRNA target sequence for Ccnh (NM_023243.2,700-718).
ctgaccgccattttatcaa

SEQ ID NO: 606953 - DNA, 19 bp, Mus musculus
  siRNA target sequence for Ccnh (NM_023243.2,702-720).
gaccgccattttatcaagt

SEQ ID NO: 606954 - DNA, 19 bp, Mus musculus
  siRNA target sequence for Ccnh (NM_023243.2,725-743).
ctagagctggaattactat

SEQ ID NO: 606955 - DNA, 19 bp, Mus musculus
  siRNA target sequence for Ccnh (NM_023243.2,758-776).
cagagagtctaatgctaaa

SEQ ID NO: 606956 - DNA, 19 bp, Mus musculus
  siRNA target sequence for Ccnh (NM_023243.2,762-780).
gagtctaatgctaaaagaa

SEQ ID NO: 606957 - DNA, 19 bp, Mus musculus
  siRNA target sequence for Ccnh (NM_023243.2,764-782).
gtctaatgctaaaagaaaa

SEQ ID NO: 606958 - DNA, 19 bp, Mus musculus
  siRNA target sequence for Ccnh (NM_023243.2,889-907).
ctggagcggtgtcattctt

SEQ ID NO: 606959 - DNA, 19 bp, Mus musculus
  siRNA target sequence for Ccnh (NM_023243.2,891-909).
ggagcggtgtcattcttct

SEQ ID NO: 606960 - DNA, 19 bp, Mus musculus
  siRNA target sequence for Ccnh (NM_023243.2,905-923).
cttctgaccttgcacttaa

SEQ ID NO: 606961 - DNA, 19 bp, Mus musculus
  siRNA target sequence for Ccnh (NM_023243.2,917-935).
cacttaatgcggttacgaa

SEQ ID NO: 606962 - DNA, 19 bp, Mus musculus
  siRNA target sequence for Ccnh (NM_023243.2,958-976).
gatgactatgtgtcaaaga

SEQ ID NO: 606963 - DNA, 19 bp, Mus musculus
  siRNA target sequence for Ccnh (NM_023243.2,1006-1024).
gatgacgacctggtagatt

SEQ ID NO: 606964 - DNA, 19 bp, Mus musculus
  siRNA target sequence for Cdkn2d (NM_009878.2,223-241).
ccttgcaggtcatgatgtt

SEQ ID NO: 606965 - DNA, 19 bp, Mus musculus
  siRNA target sequence for Cdkn2d (NM_009878.2,419-437).
catccatctggcgataaga

SEQ ID NO: 606966 - DNA, 19 bp, Mus musculus
  siRNA target sequence for Cdkn2d (NM_009878.2,461-479).
cttcctagctcctgaatct

SEQ ID NO: 606967 - DNA, 19 bp, Mus musculus
  siRNA target sequence for Cdkn2d (NM_009878.2,464-482).
cctagctcctgaatctgat

SEQ ID NO: 606968 - DNA, 19 bp, Mus musculus
  siRNA target sequence for F730038I15Rik (NM_177320.1,178-196).
gaacagatcctacaaaaga

SEQ ID NO: 606969 - DNA, 19 bp, Mus musculus
  siRNA target sequence for F730038I15Rik (NM_177320.1,624-642).
ctgcgaccttcctaaacta

SEQ ID NO: 606970 - DNA, 19 bp, Mus musculus
  siRNA target sequence for F730038I15Rik (NM_177320.1,626-644).
gcgaccttcctaaactaca

SEQ ID NO: 606971 - DNA, 19 bp, Mus musculus
  siRNA target sequence for F730038I15Rik (NM_177320.1,1226-1244).
ggcctgggcagaagttcaa

SEQ ID NO: 606972 - DNA, 19 bp, Mus musculus
  siRNA target sequence for F730038I15Rik (NM_177320.1,1570-1588).
gtggctagggcctatagca

SEQ ID NO: 606973 - DNA, 19 bp, Mus musculus
  siRNA target sequence for F730038I15Rik (NM_177320.1,1829-1847).
ggtacgaacgcaatgtgtt

SEQ ID NO: 606974 - DNA, 19 bp, Mus musculus
  siRNA target sequence for F730038I15Rik (NM_177320.1,2081-2099).
cgaccactcgggctatcaa

SEQ ID NO: 606975 - DNA, 19 bp, Mus musculus
  siRNA target sequence for F730038I15Rik (NM_177320.1,2118-2136).
gaagaggctgggcattgat

SEQ ID NO: 606976 - DNA, 19 bp, Mus musculus
  siRNA target sequence for F730038I15Rik (NM_177320.1,2148-2166).
ggccgtccctctaacacta

SEQ ID NO: 606977 - DNA, 19 bp, Mus musculus
  siRNA target sequence for F730038I15Rik (NM_177320.1,2154-2172).
ccctctaacactacagatt

SEQ ID NO: 606978 - DNA, 19 bp, Mus musculus
  siRNA target sequence for F730038I15Rik (NM_177320.1,2327-2345).
ggcagaaccctaaatccaa

SEQ ID NO: 606979 - DNA, 19 bp, Mus musculus
  siRNA target sequence for Gdpd1 (NM_026550.1,217-235).
ctccaacagtcgctatgta

SEQ ID NO: 606980 - DNA, 19 bp, Mus musculus
  siRNA target sequence for Gdpd1 (NM_026550.1,219-237).
ccaacagtcgctatgtagt

SEQ ID NO: 606981 - DNA, 19 bp, Mus musculus
  siRNA target sequence for Gdpd1 (NM_026550.1,251-269).
gatgagacgattcacattt

SEQ ID NO: 606982 - DNA, 19 bp, Mus musculus
  siRNA target sequence for Gdpd1 (NM_026550.1,311-329).
cacgctggcacagtaactt

SEQ ID NO: 606983 - DNA, 19 bp, Mus musculus
  siRNA target sequence for Gdpd1 (NM_026550.1,321-339).
cagtaacttgcctgaaatt

SEQ ID NO: 606984 - DNA, 19 bp, Mus musculus
  siRNA target sequence for Gdpd1 (NM_026550.1,341-359).
catggcaaccagcacttaa

SEQ ID NO: 606985 - DNA, 19 bp, Mus musculus
  siRNA target sequence for Gdpd1 (NM_026550.1,344-362).
ggcaaccagcacttaatca

SEQ ID NO: 606986 - DNA, 19 bp, Mus musculus
  siRNA target sequence for Gdpd1 (NM_026550.1,346-364).
caaccagcacttaatcagt

SEQ ID NO: 606987 - DNA, 19 bp, Mus musculus
  siRNA target sequence for Gdpd1 (NM_026550.1,439-457).
gggacatgtcactttcctt

SEQ ID NO: 606988 - DNA, 19 bp, Mus musculus
  siRNA target sequence for Gdpd1 (NM_026550.1,487-505).
gtctgttggcaccgataaa

SEQ ID NO: 606989 - DNA, 19 bp, Mus musculus
  siRNA target sequence for Gdpd1 (NM_026550.1,494-512).
ggcaccgataaaacattaa

SEQ ID NO: 606990 - DNA, 19 bp, Mus musculus
  siRNA target sequence for Gdpd1 (NM_026550.1,496-514).
caccgataaaacattaaga

SEQ ID NO: 606991 - DNA, 19 bp, Mus musculus
  siRNA target sequence for Gdpd1 (NM_026550.1,597-615).
gagggaagtacatagttgt

SEQ ID NO: 606992 - DNA, 19 bp, Mus musculus
  siRNA target sequence for Gdpd1 (NM_026550.1,600-618).
ggaagtacatagttgttgt

SEQ ID NO: 606993 - DNA, 19 bp, Mus musculus
  siRNA target sequence for Gdpd1 (NM_026550.1,659-677).
gtgagcggcaccatcacaa

SEQ ID NO: 606994 - DNA, 19 bp, Mus musculus
  siRNA target sequence for Gdpd1 (NM_026550.1,773-791).
ctagagtgcctctgtgaat

SEQ ID NO: 606995 - DNA, 19 bp, Mus musculus
  siRNA target sequence for Gdpd1 (NM_026550.1,803-821).
gagaacagggtaaaagaca

SEQ ID NO: 606996 - DNA, 19 bp, Mus musculus
  siRNA target sequence for Gdpd1 (NM_026550.1,840-858).
cagaccatcacgttcttgt

SEQ ID NO: 606997 - DNA, 19 bp, Mus musculus
  siRNA target sequence for Gdpd1 (NM_026550.1,952-970).
caggctgacatgtcttact

SEQ ID NO: 606998 - DNA, 19 bp, Mus musculus
  siRNA target sequence for Gdpd1 (NM_026550.1,954-972).
ggctgacatgtcttactgt

SEQ ID NO: 606999 - DNA, 19 bp, Mus musculus
  siRNA target sequence for Gdpd1 (NM_026550.1,1041-1059).
ctaagacaatcgaaaagga

SEQ ID NO: 607000 - DNA, 19 bp, Mus musculus
  siRNA target sequence for Gdpd1 (NM_026550.1,1129-1147).
caagcagccaacaaaagga

SEQ ID NO: 607001 - DNA, 19 bp, Mus musculus
  siRNA target sequence for Gdpd1 (NM_026550.1,1224-1242).
cgtggcaaatcccagattt

SEQ ID NO: 607002 - DNA, 19 bp, Mus musculus
  siRNA target sequence for Gdpd1 (NM_026550.1,1260-1278).
gtccttttgacggaattct

SEQ ID NO: 607003 - DNA, 19 bp, Mus musculus
  siRNA target sequence for Madd (NM_145527.2,174-192).
gccctcggttacttgacta

SEQ ID NO: 607004 - DNA, 19 bp, Mus musculus
  siRNA target sequence for Madd (NM_145527.2,175-193).
ccctcggttacttgactat

SEQ ID NO: 607005 - DNA, 19 bp, Mus musculus
  siRNA target sequence for Madd (NM_145527.2,177-195).
ctcggttacttgactatct

SEQ ID NO: 607006 - DNA, 19 bp, Mus musculus
  siRNA target sequence for Madd (NM_145527.2,297-315).
ccccagatgtggtgttctt

SEQ ID NO: 607007 - DNA, 19 bp, Mus musculus
  siRNA target sequence for Madd (NM_145527.2,299-317).
ccagatgtggtgttcttct

SEQ ID NO: 607008 - DNA, 19 bp, Mus musculus
  siRNA target sequence for Madd (NM_145527.2,366-384).
gggacgatacctcttttgt

SEQ ID NO: 607009 - DNA, 19 bp, Mus musculus
  siRNA target sequence for Madd (NM_145527.2,368-386).
gacgatacctcttttgtct

SEQ ID NO: 607010 - DNA, 19 bp, Mus musculus
  siRNA target sequence for Madd (NM_145527.2,718-736).
cagagagtgtctgtatact

SEQ ID NO: 607011 - DNA, 19 bp, Mus musculus
  siRNA target sequence for Madd (NM_145527.2,728-746).
ctgtatactctcaaacgtt

SEQ ID NO: 607012 - DNA, 19 bp, Mus musculus
  siRNA target sequence for Madd (NM_145527.2,748-766).
ggtagactgctgtagtgaa

SEQ ID NO: 607013 - DNA, 19 bp, Mus musculus
  siRNA target sequence for Madd (NM_145527.2,790-808).
catccctcgaggtgtacaa

SEQ ID NO: 607014 - DNA, 19 bp, Mus musculus
  siRNA target sequence for Madd (NM_145527.2,817-835).
catgtggcgaatctttact

SEQ ID NO: 607015 - DNA, 19 bp, Mus musculus
  siRNA target sequence for Madd (NM_145527.2,889-907).
gattgaggcctggatctat

SEQ ID NO: 607016 - DNA, 19 bp, Mus musculus
  siRNA target sequence for Madd (NM_145527.2,982-1000).
gcaggccctgacatttgct

SEQ ID NO: 607017 - DNA, 19 bp, Mus musculus
  siRNA target sequence for Madd (NM_145527.2,1014-1032).
ctcgattcaccctagtaga

SEQ ID NO: 607018 - DNA, 19 bp, Mus musculus
  siRNA target sequence for Madd (NM_145527.2,1016-1034).
cgattcaccctagtagatt

SEQ ID NO: 607019 - DNA, 19 bp, Mus musculus
  siRNA target sequence for Madd (NM_145527.2,1017-1035).
gattcaccctagtagattt

SEQ ID NO: 607020 - DNA, 19 bp, Mus musculus
  siRNA target sequence for Madd (NM_145527.2,1054-1072).
ggaacttctgggtgtagat

SEQ ID NO: 607021 - DNA, 19 bp, Mus musculus
  siRNA target sequence for Madd (NM_145527.2,1063-1081).
gggtgtagatgcttgtctt

SEQ ID NO: 607022 - DNA, 19 bp, Mus musculus
  siRNA target sequence for Madd (NM_145527.2,1123-1141).
gcagtctcgagactacaat

SEQ ID NO: 607023 - DNA, 19 bp, Mus musculus
  siRNA target sequence for Madd (NM_145527.2,1163-1181).
gcgttcgtggcaatgatct

SEQ ID NO: 607024 - DNA, 19 bp, Mus musculus
  siRNA target sequence for Madd (NM_145527.2,1164-1182).
cgttcgtggcaatgatcta

SEQ ID NO: 607025 - DNA, 19 bp, Mus musculus
  siRNA target sequence for Madd (NM_145527.2,1256-1274).
gctccaaccccatacatca

SEQ ID NO: 607026 - DNA, 19 bp, Mus musculus
  siRNA target sequence for Madd (NM_145527.2,1257-1275).
ctccaaccccatacatcat

SEQ ID NO: 607027 - DNA, 19 bp, Mus musculus
  siRNA target sequence for Madd (NM_145527.2,1298-1316).
ctctacaagctagatttca

SEQ ID NO: 607028 - DNA, 19 bp, Mus musculus
  siRNA target sequence for Madd (NM_145527.2,1340-1358).
gtggatctggacagcaata

SEQ ID NO: 607029 - DNA, 19 bp, Mus musculus
  siRNA target sequence for Madd (NM_145527.2,1418-1436).
gagctgaaaaaacacttaa

SEQ ID NO: 607030 - DNA, 19 bp, Mus musculus
  siRNA target sequence for Madd (NM_145527.2,1522-1540).
cttgggaaggccatctaat

SEQ ID NO: 607031 - DNA, 19 bp, Mus musculus
  siRNA target sequence for Madd (NM_145527.2,1565-1583).
gaattcaacccgctcattt

SEQ ID NO: 607032 - DNA, 19 bp, Mus musculus
  siRNA target sequence for Madd (NM_145527.2,1576-1594).
gctcatttatggcaatgat

SEQ ID NO: 607033 - DNA, 19 bp, Mus musculus
  siRNA target sequence for Madd (NM_145527.2,1620-1638).
gagtggccatggtacgttt

SEQ ID NO: 607034 - DNA, 19 bp, Mus musculus
  siRNA target sequence for Madd (NM_145527.2,1655-1673).
gtgctgcagggctttcaga

SEQ ID NO: 607035 - DNA, 19 bp, Mus musculus
  siRNA target sequence for Madd (NM_145527.2,1816-1834).
cctgaacccttctaactat

SEQ ID NO: 607036 - DNA, 19 bp, Mus musculus
  siRNA target sequence for Madd (NM_145527.2,1836-1854).
ccttccagcggattcacaa

SEQ ID NO: 607037 - DNA, 19 bp, Mus musculus
  siRNA target sequence for Madd (NM_145527.2,1840-1858).
ccagcggattcacaacaat

SEQ ID NO: 607038 - DNA, 19 bp, Mus musculus
  siRNA target sequence for Madd (NM_145527.2,1841-1859).
cagcggattcacaacaata

SEQ ID NO: 607039 - DNA, 19 bp, Mus musculus
  siRNA target sequence for Madd (NM_145527.2,1844-1862).
cggattcacaacaatacgt

SEQ ID NO: 607040 - DNA, 19 bp, Mus musculus
  siRNA target sequence for Madd (NM_145527.2,1845-1863).
ggattcacaacaatacgtt

SEQ ID NO: 607041 - DNA, 19 bp, Mus musculus
  siRNA target sequence for Madd (NM_145527.2,1912-1930).
gcagcccatccattatcga

SEQ ID NO: 607042 - DNA, 19 bp, Mus musculus
  siRNA target sequence for Madd (NM_145527.2,1921-1939).
ccattatcgagtctatgat

SEQ ID NO: 607043 - DNA, 19 bp, Mus musculus
  siRNA target sequence for Madd (NM_145527.2,2016-2034).
gcagtgatagtcaggatta

SEQ ID NO: 607044 - DNA, 19 bp, Mus musculus
  siRNA target sequence for Madd (NM_145527.2,2066-2084).
ggggactttgtcagtgaaa

SEQ ID NO: 607045 - DNA, 19 bp, Mus musculus
  siRNA target sequence for Madd (NM_145527.2,2067-2085).
gggactttgtcagtgaaat

SEQ ID NO: 607046 - DNA, 19 bp, Mus musculus
  siRNA target sequence for Madd (NM_145527.2,2069-2087).
gactttgtcagtgaaatga

SEQ ID NO: 607047 - DNA, 19 bp, Mus musculus
  siRNA target sequence for Madd (NM_145527.2,2075-2093).
gtcagtgaaatgatgaaat

SEQ ID NO: 607048 - DNA, 19 bp, Mus musculus
  siRNA target sequence for Madd (NM_145527.2,2086-2104).
gatgaaatgtgacatcaat

SEQ ID NO: 607049 - DNA, 19 bp, Mus musculus
  siRNA target sequence for Madd (NM_145527.2,2372-2390).
cccgtgcctcccagcattt

SEQ ID NO: 607050 - DNA, 19 bp, Mus musculus
  siRNA target sequence for Madd (NM_145527.2,2442-2460).
gccagcgaacctatgacaa

SEQ ID NO: 607051 - DNA, 19 bp, Mus musculus
  siRNA target sequence for Madd (NM_145527.2,2443-2461).
ccagcgaacctatgacaat

SEQ ID NO: 607052 - DNA, 19 bp, Mus musculus
  siRNA target sequence for Madd (NM_145527.2,2447-2465).
cgaacctatgacaatccat

SEQ ID NO: 607053 - DNA, 19 bp, Mus musculus
  siRNA target sequence for Madd (NM_145527.2,2448-2466).
gaacctatgacaatccata

SEQ ID NO: 607054 - DNA, 19 bp, Mus musculus
  siRNA target sequence for Madd (NM_145527.2,2451-2469).
cctatgacaatccatactt

SEQ ID NO: 607055 - DNA, 19 bp, Mus musculus
  siRNA target sequence for Madd (NM_145527.2,2553-2571).
gtggcagtcgggctcaaaa

SEQ ID NO: 607056 - DNA, 19 bp, Mus musculus
  siRNA target sequence for Madd (NM_145527.2,2556-2574).
gcagtcgggctcaaaagct

SEQ ID NO: 607057 - DNA, 19 bp, Mus musculus
  siRNA target sequence for Madd (NM_145527.2,2708-2726).
ctgtatcggaaccatagta

SEQ ID NO: 607058 - DNA, 19 bp, Mus musculus
  siRNA target sequence for Madd (NM_145527.2,2710-2728).
gtatcggaaccatagtaca

SEQ ID NO: 607059 - DNA, 19 bp, Mus musculus
  siRNA target sequence for Madd (NM_145527.2,2811-2829).
ggctaaatactctaatgga

SEQ ID NO: 607060 - DNA, 19 bp, Mus musculus
  siRNA target sequence for Madd (NM_145527.2,2852-2870).
gggagtggtgaaggaaata

SEQ ID NO: 607061 - DNA, 19 bp, Mus musculus
  siRNA target sequence for Madd (NM_145527.2,2909-2927).
cacagcccaaccgtgaaaa

SEQ ID NO: 607062 - DNA, 19 bp, Mus musculus
  siRNA target sequence for Madd (NM_145527.2,2913-2931).
gcccaaccgtgaaaagaga

SEQ ID NO: 607063 - DNA, 19 bp, Mus musculus
  siRNA target sequence for Madd (NM_145527.2,2914-2932).
cccaaccgtgaaaagagaa

SEQ ID NO: 607064 - DNA, 19 bp, Mus musculus
  siRNA target sequence for Madd (NM_145527.2,3020-3038).
ggagtgggctggctcaata

SEQ ID NO: 607065 - DNA, 19 bp, Mus musculus
  siRNA target sequence for Madd (NM_145527.2,3026-3044).
ggctggctcaatatgaaga

SEQ ID NO: 607066 - DNA, 19 bp, Mus musculus
  siRNA target sequence for Madd (NM_145527.2,3281-3299).
gcccagacccactactata

SEQ ID NO: 607067 - DNA, 19 bp, Mus musculus
  siRNA target sequence for Madd (NM_145527.2,3286-3304).
gacccactactatagtaaa

SEQ ID NO: 607068 - DNA, 19 bp, Mus musculus
  siRNA target sequence for Madd (NM_145527.2,3289-3307).
ccactactatagtaaagaa

SEQ ID NO: 607069 - DNA, 19 bp, Mus musculus
  siRNA target sequence for Madd (NM_145527.2,3324-3342).
gaagtccgacagagaatgt

SEQ ID NO: 607070 - DNA, 19 bp, Mus musculus
  siRNA target sequence for Madd (NM_145527.2,3327-3345).
gtccgacagagaatgtaaa

SEQ ID NO: 607071 - DNA, 19 bp, Mus musculus
  siRNA target sequence for Madd (NM_145527.2,3329-3347).
ccgacagagaatgtaaata

SEQ ID NO: 607072 - DNA, 19 bp, Mus musculus
  siRNA target sequence for Madd (NM_145527.2,3493-3511).
gaattttgtagcatctgtt

SEQ ID NO: 607073 - DNA, 19 bp, Mus musculus
  siRNA target sequence for Madd (NM_145527.2,3661-3679).
ctcccagaggactgatcaa

SEQ ID NO: 607074 - DNA, 19 bp, Mus musculus
  siRNA target sequence for Madd (NM_145527.2,3663-3681).
cccagaggactgatcaaga

SEQ ID NO: 607075 - DNA, 19 bp, Mus musculus
  siRNA target sequence for Madd (NM_145527.2,3693-3711).
gtgtgagtccagctgttat

SEQ ID NO: 607076 - DNA, 19 bp, Mus musculus
  siRNA target sequence for Madd (NM_145527.2,3745-3763).
caccgtggtgagtaatagt

SEQ ID NO: 607077 - DNA, 19 bp, Mus musculus
  siRNA target sequence for Madd (NM_145527.2,3861-3879).
ctctgtccgacagtgaaat

SEQ ID NO: 607078 - DNA, 19 bp, Mus musculus
  siRNA target sequence for Madd (NM_145527.2,3865-3883).
gtccgacagtgaaatcgaa

SEQ ID NO: 607079 - DNA, 19 bp, Mus musculus
  siRNA target sequence for Madd (NM_145527.2,3897-3915).
caagcgccatctttggtaa

SEQ ID NO: 607080 - DNA, 19 bp, Mus musculus
  siRNA target sequence for Madd (NM_145527.2,3976-3994).
cgtaagccagcgagtctat

SEQ ID NO: 607081 - DNA, 19 bp, Mus musculus
  siRNA target sequence for Madd (NM_145527.2,4078-4096).
caaagaacgttctacctta

SEQ ID NO: 607082 - DNA, 19 bp, Mus musculus
  siRNA target sequence for Madd (NM_145527.2,4089-4107).
ctaccttatgggaccaaat

SEQ ID NO: 607083 - DNA, 19 bp, Mus musculus
  siRNA target sequence for Madd (NM_145527.2,4092-4110).
ccttatgggaccaaatgca

SEQ ID NO: 607084 - DNA, 19 bp, Mus musculus
  siRNA target sequence for Madd (NM_145527.2,4133-4151).
gatgctgtaatgttggaaa

SEQ ID NO: 607085 - DNA, 19 bp, Mus musculus
  siRNA target sequence for Madd (NM_145527.2,4250-4268).
cgcttgctggccacacttt

SEQ ID NO: 607086 - DNA, 19 bp, Mus musculus
  siRNA target sequence for Madd (NM_145527.2,4265-4283).
cttttacacaacctcatat

SEQ ID NO: 607087 - DNA, 19 bp, Mus musculus
  siRNA target sequence for Madd (NM_145527.2,4271-4289).
cacaacctcatatcctata

SEQ ID NO: 607088 - DNA, 19 bp, Mus musculus
  siRNA target sequence for Madd (NM_145527.2,4445-4463).
ggcagccggcacatgaaga

SEQ ID NO: 607089 - DNA, 19 bp, Mus musculus
  siRNA target sequence for Madd (NM_145527.2,4446-4464).
gcagccggcacatgaagaa

SEQ ID NO: 607090 - DNA, 19 bp, Mus musculus
  siRNA target sequence for Madd (NM_145527.2,4459-4477).
gaagaagcagacttttgtt

SEQ ID NO: 607091 - DNA, 19 bp, Mus musculus
  siRNA target sequence for Madd (NM_145527.2,4536-4554).
gcgtggtgttgcgtagtaa

SEQ ID NO: 607092 - DNA, 19 bp, Mus musculus
  siRNA target sequence for Madd (NM_145527.2,4630-4648).
gtgcttatggcggagaaat

SEQ ID NO: 607093 - DNA, 19 bp, Mus musculus
  siRNA target sequence for Madd (NM_145527.2,4795-4813).
ccctggaagggatcaatct

SEQ ID NO: 607094 - DNA, 19 bp, Mus musculus
  siRNA target sequence for Madd (NM_145527.2,4803-4821).
gggatcaatctcaagttca

SEQ ID NO: 607095 - DNA, 19 bp, Mus musculus
  siRNA target sequence for Madd (NM_145527.2,4804-4822).
ggatcaatctcaagttcat

SEQ ID NO: 607096 - DNA, 19 bp, Mus musculus
  siRNA target sequence for Madd (NM_145527.2,4823-4841).
gcacaaccaggttttcata

SEQ ID NO: 607097 - DNA, 19 bp, Mus musculus
  siRNA target sequence for Madd (NM_145527.2,4838-4856).
catagagctgaatcacatt

SEQ ID NO: 607098 - DNA, 19 bp, Mus musculus
  siRNA target sequence for Madd (NM_178369.1,3468-3486).
ctgcctcccaggtgagtaa

SEQ ID NO: 607099 - DNA, 19 bp, Mus musculus
  siRNA target sequence for Madd (NM_178369.1,3470-3488).
gcctcccaggtgagtaata

SEQ ID NO: 607100 - DNA, 19 bp, Mus musculus
  siRNA target sequence for Madd (NM_178369.1,3472-3490).
ctcccaggtgagtaatagt

SEQ ID NO: 607101 - DNA, 19 bp, Mus musculus
  siRNA target sequence for Map3k7ip1 (NM_025609.2,150-168).
gaggacaactggcttaagt

SEQ ID NO: 607102 - DNA, 19 bp, Mus musculus
  siRNA target sequence for Map3k7ip1 (NM_025609.2,153-171).
gacaactggcttaagttca

SEQ ID NO: 607103 - DNA, 19 bp, Mus musculus
  siRNA target sequence for Map3k7ip1 (NM_025609.2,346-364).
ggagcttcctggagtctat

SEQ ID NO: 607104 - DNA, 19 bp, Mus musculus
  siRNA target sequence for Map3k7ip1 (NM_025609.2,471-489).
gcactggagagggagattt

SEQ ID NO: 607105 - DNA, 19 bp, Mus musculus
  siRNA target sequence for Map3k7ip1 (NM_025609.2,724-742).
ggcggattggggattacaa

SEQ ID NO: 607106 - DNA, 19 bp, Mus musculus
  siRNA target sequence for Map3k7ip1 (NM_025609.2,800-818).
catcgcagagccggaaatt

SEQ ID NO: 607107 - DNA, 19 bp, Mus musculus
  siRNA target sequence for Map3k7ip1 (NM_025609.2,803-821).
cgcagagccggaaattcat

SEQ ID NO: 607108 - DNA, 19 bp, Mus musculus
  siRNA target sequence for Map3k7ip1 (NM_025609.2,923-941).
ggagattgccgcgatgatt

SEQ ID NO: 607109 - DNA, 19 bp, Mus musculus
  siRNA target sequence for Map3k7ip1 (NM_025609.2,1090-1108).
ggaactttggctatccatt

SEQ ID NO: 607110 - DNA, 19 bp, Mus musculus
  siRNA target sequence for Map3k7ip1 (NM_025609.2,1099-1117).
gctatccattgggtgaaat

SEQ ID NO: 607111 - DNA, 19 bp, Mus musculus
  siRNA target sequence for Nakap95 (NM_017476.1,192-210).
ggctacgagaactatggtt

SEQ ID NO: 607112 - DNA, 19 bp, Mus musculus
  siRNA target sequence for Nakap95 (NM_017476.1,193-211).
gctacgagaactatggtta

SEQ ID NO: 607113 - DNA, 19 bp, Mus musculus
  siRNA target sequence for Nakap95 (NM_017476.1,194-212).
ctacgagaactatggttat

SEQ ID NO: 607114 - DNA, 19 bp, Mus musculus
  siRNA target sequence for Nakap95 (NM_017476.1,329-347).
cagtgccgattccgtttta

SEQ ID NO: 607115 - DNA, 19 bp, Mus musculus
  siRNA target sequence for Nakap95 (NM_017476.1,333-351).
gccgattccgttttatcca

SEQ ID NO: 607116 - DNA, 19 bp, Mus musculus
  siRNA target sequence for Nakap95 (NM_017476.1,340-358).
ccgttttatccagaattaa

SEQ ID NO: 607117 - DNA, 19 bp, Mus musculus
  siRNA target sequence for Nakap95 (NM_017476.1,424-442).
gtggtggagagagatatga

SEQ ID NO: 607118 - DNA, 19 bp, Mus musculus
  siRNA target sequence for Nakap95 (NM_017476.1,494-512).
ccggtcaagctatgactat

SEQ ID NO: 607119 - DNA, 19 bp, Mus musculus
  siRNA target sequence for Nakap95 (NM_017476.1,539-557).
ggcctatgagggccaatat

SEQ ID NO: 607120 - DNA, 19 bp, Mus musculus
  siRNA target sequence for Nakap95 (NM_017476.1,584-602).
gcgtggaggagatacattt

SEQ ID NO: 607121 - DNA, 19 bp, Mus musculus
  siRNA target sequence for Nakap95 (NM_017476.1,811-829).
cccgatttggctttggatt

SEQ ID NO: 607122 - DNA, 19 bp, Mus musculus
  siRNA target sequence for Nakap95 (NM_017476.1,812-830).
ccgatttggctttggattt

SEQ ID NO: 607123 - DNA, 19 bp, Mus musculus
  siRNA target sequence for Nakap95 (NM_017476.1,879-897).
gccgacttccggaccaaaa

SEQ ID NO: 607124 - DNA, 19 bp, Mus musculus
  siRNA target sequence for Nakap95 (NM_017476.1,880-898).
ccgacttccggaccaaaaa

SEQ ID NO: 607125 - DNA, 19 bp, Mus musculus
  siRNA target sequence for Nakap95 (NM_017476.1,930-948).
gagccagacagcaaagcta

SEQ ID NO: 607126 - DNA, 19 bp, Mus musculus
  siRNA target sequence for Nakap95 (NM_017476.1,1256-1274).
caaataccggaccttctat

SEQ ID NO: 607127 - DNA, 19 bp, Mus musculus
  siRNA target sequence for Nakap95 (NM_017476.1,1310-1328).
ccacaaggaacacttcaaa

SEQ ID NO: 607128 - DNA, 19 bp, Mus musculus
  siRNA target sequence for Nakap95 (NM_017476.1,1311-1329).
cacaaggaacacttcaaat

SEQ ID NO: 607129 - DNA, 19 bp, Mus musculus
  siRNA target sequence for Nakap95 (NM_017476.1,1374-1392).
gaatatgtcaccaacaaga

SEQ ID NO: 607130 - DNA, 19 bp, Mus musculus
  siRNA target sequence for Nakap95 (NM_017476.1,1403-1421).
ggaggagctccgaaaaact

SEQ ID NO: 607131 - DNA, 19 bp, Mus musculus
  siRNA target sequence for Nakap95 (NM_017476.1,1434-1452).
gatggtctgatccaacaaa

SEQ ID NO: 607132 - DNA, 19 bp, Mus musculus
  siRNA target sequence for Nakap95 (NM_017476.1,1437-1455).
ggtctgatccaacaaatct

SEQ ID NO: 607133 - DNA, 19 bp, Mus musculus
  siRNA target sequence for Nakap95 (NM_017476.1,1485-1503).
gctatggagcattttgtga

SEQ ID NO: 607134 - DNA, 19 bp, Mus musculus
  siRNA target sequence for Nakap95 (NM_017476.1,1554-1572).
cagtttggaatcatccaaa

SEQ ID NO: 607135 - DNA, 19 bp, Mus musculus
  siRNA target sequence for Nakap95 (NM_017476.1,1600-1618).
gaaaccgcaggcttatgat

SEQ ID NO: 607136 - DNA, 19 bp, Mus musculus
  siRNA target sequence for Nakap95 (NM_017476.1,1653-1671).
cgcagtattctcaacaaca

SEQ ID NO: 607137 - DNA, 19 bp, Mus musculus
  siRNA target sequence for Nakap95 (NM_017476.1,1701-1719).
ctgaagggcgagaatcctt

SEQ ID NO: 607138 - DNA, 19 bp, Mus musculus
  siRNA target sequence for Nakap95 (NM_017476.1,1706-1724).
gggcgagaatcctttcact

SEQ ID NO: 607139 - DNA, 19 bp, Mus musculus
  siRNA target sequence for Nck1 (NM_010878.2,92-110).
ggtggtggtggccaaattt

SEQ ID NO: 607140 - DNA, 19 bp, Mus musculus
  siRNA target sequence for Nck1 (NM_010878.2,95-113).
ggtggtggccaaatttgat

SEQ ID NO: 607141 - DNA, 19 bp, Mus musculus
  siRNA target sequence for Nck1 (NM_010878.2,96-114).
gtggtggccaaatttgatt

SEQ ID NO: 607142 - DNA, 19 bp, Mus musculus
  siRNA target sequence for Nck1 (NM_010878.2,98-116).
ggtggccaaatttgattat

SEQ ID NO: 607143 - DNA, 19 bp, Mus musculus
  siRNA target sequence for Nck1 (NM_010878.2,171-189).
ctggatgactctaaatcct

SEQ ID NO: 607144 - DNA, 19 bp, Mus musculus
  siRNA target sequence for Nck1 (NM_010878.2,187-205).
cctggtggcgagttcgaaa

SEQ ID NO: 607145 - DNA, 19 bp, Mus musculus
  siRNA target sequence for Nck1 (NM_010878.2,188-206).
ctggtggcgagttcgaaat

SEQ ID NO: 607146 - DNA, 19 bp, Mus musculus
  siRNA target sequence for Nck1 (NM_010878.2,193-211).
ggcgagttcgaaattccat

SEQ ID NO: 607147 - DNA, 19 bp, Mus musculus
  siRNA target sequence for Nck1 (NM_010878.2,220-238).
caggttttgtcccttctaa

SEQ ID NO: 607148 - DNA, 19 bp, Mus musculus
  siRNA target sequence for Nck1 (NM_010878.2,222-240).
ggttttgtcccttctaact

SEQ ID NO: 607149 - DNA, 19 bp, Mus musculus
  siRNA target sequence for Nck1 (NM_010878.2,264-282).
cggaaagcatctattgtta

SEQ ID NO: 607150 - DNA, 19 bp, Mus musculus
  siRNA target sequence for Nck1 (NM_010878.2,265-283).
ggaaagcatctattgttaa

SEQ ID NO: 607151 - DNA, 19 bp, Mus musculus
  siRNA target sequence for Nck1 (NM_010878.2,266-284).
gaaagcatctattgttaaa

SEQ ID NO: 607152 - DNA, 19 bp, Mus musculus
  siRNA target sequence for Nck1 (NM_010878.2,290-308).
gaaggacaccttaggtatt

SEQ ID NO: 607153 - DNA, 19 bp, Mus musculus
  siRNA target sequence for Nck1 (NM_010878.2,293-311).
ggacaccttaggtattgga

SEQ ID NO: 607154 - DNA, 19 bp, Mus musculus
  siRNA target sequence for Nck1 (NM_010878.2,345-363).
gcatctcctgctgatgata

SEQ ID NO: 607155 - DNA, 19 bp, Mus musculus
  siRNA target sequence for Nck1 (NM_010878.2,355-373).
ctgatgatagctttgttga

SEQ ID NO: 607156 - DNA, 19 bp, Mus musculus
  siRNA target sequence for Nck1 (NM_010878.2,384-402).
cgtctctatgaccttaaca

SEQ ID NO: 607157 - DNA, 19 bp, Mus musculus
  siRNA target sequence for Nck1 (NM_010878.2,385-403).
gtctctatgaccttaacat

SEQ ID NO: 607158 - DNA, 19 bp, Mus musculus
  siRNA target sequence for Nck1 (NM_010878.2,443-461).
ggatgagttgtcattgata

SEQ ID NO: 607159 - DNA, 19 bp, Mus musculus
  siRNA target sequence for Nck1 (NM_010878.2,444-462).
gatgagttgtcattgataa

SEQ ID NO: 607160 - DNA, 19 bp, Mus musculus
  siRNA target sequence for Nck1 (NM_010878.2,518-536).
ctacaacggacaaattgga

SEQ ID NO: 607161 - DNA, 19 bp, Mus musculus
  siRNA target sequence for Nck1 (NM_010878.2,524-542).
cggacaaattggatggttt

SEQ ID NO: 607162 - DNA, 19 bp, Mus musculus
  siRNA target sequence for Nck1 (NM_010878.2,572-590).
cagtcctttgggtgatcat

SEQ ID NO: 607163 - DNA, 19 bp, Mus musculus
  siRNA target sequence for Nck1 (NM_010878.2,616-634).
cagcagttgtcaataacct

SEQ ID NO: 607164 - DNA, 19 bp, Mus musculus
  siRNA target sequence for Nck1 (NM_010878.2,618-636).
gcagttgtcaataacctaa

SEQ ID NO: 607165 - DNA, 19 bp, Mus musculus
  siRNA target sequence for Nck1 (NM_010878.2,619-637).
cagttgtcaataacctaaa

SEQ ID NO: 607166 - DNA, 19 bp, Mus musculus
  siRNA target sequence for Nck1 (NM_010878.2,621-639).
gttgtcaataacctaaata

SEQ ID NO: 607167 - DNA, 19 bp, Mus musculus
  siRNA target sequence for Nck1 (NM_010878.2,632-650).
cctaaatacgggtcaagta

SEQ ID NO: 607168 - DNA, 19 bp, Mus musculus
  siRNA target sequence for Nck1 (NM_010878.2,633-651).
ctaaatacgggtcaagtat

SEQ ID NO: 607169 - DNA, 19 bp, Mus musculus
  siRNA target sequence for Nck1 (NM_010878.2,666-684).
gctctttacccgtttagct

SEQ ID NO: 607170 - DNA, 19 bp, Mus musculus
  siRNA target sequence for Nck1 (NM_010878.2,674-692).
cccgtttagctcatccaat

SEQ ID NO: 607171 - DNA, 19 bp, Mus musculus
  siRNA target sequence for Nck1 (NM_010878.2,677-695).
gtttagctcatccaatgat

SEQ ID NO: 607172 - DNA, 19 bp, Mus musculus
  siRNA target sequence for Nck1 (NM_010878.2,713-731).
gaaaggcgatgtaatggat

SEQ ID NO: 607173 - DNA, 19 bp, Mus musculus
  siRNA target sequence for Nck1 (NM_010878.2,717-735).
ggcgatgtaatggatgtta

SEQ ID NO: 607174 - DNA, 19 bp, Mus musculus
  siRNA target sequence for Nck1 (NM_010878.2,719-737).
cgatgtaatggatgttatt

SEQ ID NO: 607175 - DNA, 19 bp, Mus musculus
  siRNA target sequence for Nck1 (NM_010878.2,801-819).
gtgccaaaaaactacgtta

SEQ ID NO: 607176 - DNA, 19 bp, Mus musculus
  siRNA target sequence for Nck1 (NM_010878.2,805-823).
caaaaaactacgttaccat

SEQ ID NO: 607177 - DNA, 19 bp, Mus musculus
  siRNA target sequence for Nck1 (NM_010878.2,812-830).
ctacgttaccattatgcaa

SEQ ID NO: 607178 - DNA, 19 bp, Mus musculus
  siRNA target sequence for Nck1 (NM_010878.2,862-880).
ctcctccacaatgtgatta

SEQ ID NO: 607179 - DNA, 19 bp, Mus musculus
  siRNA target sequence for Nck1 (NM_010878.2,864-882).
cctccacaatgtgattaca

SEQ ID NO: 607180 - DNA, 19 bp, Mus musculus
  siRNA target sequence for Nck1 (NM_010878.2,865-883).
ctccacaatgtgattacat

SEQ ID NO: 607181 - DNA, 19 bp, Mus musculus
  siRNA target sequence for Nck1 (NM_010878.2,910-928).
ctggcaatccttggtatta

SEQ ID NO: 607182 - DNA, 19 bp, Mus musculus
  siRNA target sequence for Nck1 (NM_010878.2,993-1011).
ctcattcgtgacagtgaat

SEQ ID NO: 607183 - DNA, 19 bp, Mus musculus
  siRNA target sequence for Nck1 (NM_010878.2,1008-1026).
gaatcttcgccaaatgatt

SEQ ID NO: 607184 - DNA, 19 bp, Mus musculus
  siRNA target sequence for Nck1 (NM_010878.2,1028-1046).
ctcagtatcactaaaagca

SEQ ID NO: 607185 - DNA, 19 bp, Mus musculus
  siRNA target sequence for Nck1 (NM_010878.2,1117-1135).
gcaccatggaggaacttgt

SEQ ID NO: 607186 - DNA, 19 bp, Mus musculus
  siRNA target sequence for Nck1 (NM_010878.2,1128-1146).
gaacttgtagaacattaca

SEQ ID NO: 607187 - DNA, 19 bp, Mus musculus
  siRNA target sequence for Nck1 (NM_010878.2,1151-1169).
ggcaccgatctttacaagt

SEQ ID NO: 607188 - DNA, 19 bp, Mus musculus
  siRNA target sequence for Nck1 (NM_010878.2,1191-1209).
ctcgtcaagcatttgtctt

SEQ ID NO: 607189 - DNA, 19 bp, Mus musculus
  siRNA target sequence for Nck2 (NM_010879.2,1340-1358).
ccgagtgtgcgctcaatga

SEQ ID NO: 607190 - DNA, 19 bp, Mus musculus
  siRNA target sequence for Nck2 (NM_010879.2,1369-1387).
gagggcgacttcctcatta

SEQ ID NO: 607191 - DNA, 19 bp, Mus musculus
  siRNA target sequence for Plaur (NM_011113.2,420-438).
ctgcaatgccgctatccta

SEQ ID NO: 607192 - DNA, 19 bp, Mus musculus
  siRNA target sequence for Plaur (NM_011113.2,556-574).
gcaaccagacctttcactt

SEQ ID NO: 607193 - DNA, 19 bp, Mus musculus
  siRNA target sequence for Plaur (NM_011113.2,640-658).
cgaatggcttccagtgtta

SEQ ID NO: 607194 - DNA, 19 bp, Mus musculus
  siRNA target sequence for Plaur (NM_011113.2,764-782).
gctgggaaaccggagttat

SEQ ID NO: 607195 - DNA, 19 bp, Mus musculus
  siRNA target sequence for Plaur (NM_011113.2,765-783).
ctgggaaaccggagttata

SEQ ID NO: 607196 - DNA, 19 bp, Mus musculus
  siRNA target sequence for Plaur (NM_011113.2,876-894).
cacggcagcggctgtaaca

SEQ ID NO: 607197 - DNA, 19 bp, Mus musculus
  siRNA target sequence for Pnkp (NM_021549.1,132-150).
gaagtgctcccgaaaccaa

SEQ ID NO: 607198 - DNA, 19 bp, Mus musculus
  siRNA target sequence for Pnkp (NM_021549.1,177-195).
ccggacagtggcagtgaaa

SEQ ID NO: 607199 - DNA, 19 bp, Mus musculus
  siRNA target sequence for Pnkp (NM_021549.1,179-197).
ggacagtggcagtgaaaca

SEQ ID NO: 607200 - DNA, 19 bp, Mus musculus
  siRNA target sequence for Pnkp (NM_021549.1,430-448).
cttggctgggagagcttaa

SEQ ID NO: 607201 - DNA, 19 bp, Mus musculus
  siRNA target sequence for Pnkp (NM_021549.1,437-455).
gggagagcttaaagaagtt

SEQ ID NO: 607202 - DNA, 19 bp, Mus musculus
  siRNA target sequence for Pnkp (NM_021549.1,438-456).
ggagagcttaaagaagtta

SEQ ID NO: 607203 - DNA, 19 bp, Mus musculus
  siRNA target sequence for Pnkp (NM_021549.1,845-863).
gcctgttcgcccttaacgt

SEQ ID NO: 607204 - DNA, 19 bp, Mus musculus
  siRNA target sequence for Pnkp (NM_021549.1,878-896).
ccactccggaagagttttt

SEQ ID NO: 607205 - DNA, 19 bp, Mus musculus
  siRNA target sequence for Pnkp (NM_021549.1,1160-1178).
ggaagcgagtcgtgattga

SEQ ID NO: 607206 - DNA, 19 bp, Mus musculus
  siRNA target sequence for Pnkp (NM_021549.1,1204-1222).
cgggccaggtacatccaat

SEQ ID NO: 607207 - DNA, 19 bp, Mus musculus
  siRNA target sequence for Pnkp (NM_021549.1,1215-1233).
catccaatgtgccaaagat

SEQ ID NO: 607208 - DNA, 19 bp, Mus musculus
  siRNA target sequence for Pnkp (NM_021549.1,1244-1262).
cctgccgctgtttcaactt

SEQ ID NO: 607209 - DNA, 19 bp, Mus musculus
  siRNA target sequence for Pnkp (NM_021549.1,1257-1275).
caacttctgtgctacaata

SEQ ID NO: 607210 - DNA, 19 bp, Mus musculus
  siRNA target sequence for Pnkp (NM_021549.1,1456-1474).
cgactgtaccgccagtttt

SEQ ID NO: 607211 - DNA, 19 bp, Mus musculus
  siRNA target sequence for Skp2 (NM_013787.1,341-359).
gcaaagggagtgacaaaga

SEQ ID NO: 607212 - DNA, 19 bp, Mus musculus
  siRNA target sequence for Skp2 (NM_013787.1,482-500).
gagtctcgggcgtttgcaa

SEQ ID NO: 607213 - DNA, 19 bp, Mus musculus
  siRNA target sequence for Skp2 (NM_013787.1,544-562).
ctcgacctcgcgggtaaaa

SEQ ID NO: 607214 - DNA, 19 bp, Mus musculus
  siRNA target sequence for Skp2 (NM_013787.1,546-564).
cgacctcgcgggtaaaaat

SEQ ID NO: 607215 - DNA, 19 bp, Mus musculus
  siRNA target sequence for Skp2 (NM_013787.1,687-705).
cctgtcgaactcagtgata

SEQ ID NO: 607216 - DNA, 19 bp, Mus musculus
  siRNA target sequence for Skp2 (NM_013787.1,692-710).
cgaactcagtgataaatgt

SEQ ID NO: 607217 - DNA, 19 bp, Mus musculus
  siRNA target sequence for Skp2 (NM_013787.1,711-729).
gtcgaacctccataagatt

SEQ ID NO: 607218 - DNA, 19 bp, Mus musculus
  siRNA target sequence for Skp2 (NM_013787.1,713-731).
cgaacctccataagattct

SEQ ID NO: 607219 - DNA, 19 bp, Mus musculus
  siRNA target sequence for Skp2 (NM_013787.1,741-759).
ctccaagctgcagaatcta

SEQ ID NO: 607220 - DNA, 19 bp, Mus musculus
  siRNA target sequence for Skp2 (NM_013787.1,800-818).
ctcttgcacagaatgaaaa

SEQ ID NO: 607221 - DNA, 19 bp, Mus musculus
  siRNA target sequence for Skp2 (NM_013787.1,894-912).
cagactggatgagctaaat

SEQ ID NO: 607222 - DNA, 19 bp, Mus musculus
  siRNA target sequence for Skp2 (NM_013787.1,896-914).
gactggatgagctaaatct

SEQ ID NO: 607223 - DNA, 19 bp, Mus musculus
  siRNA target sequence for Skp2 (NM_013787.1,898-916).
ctggatgagctaaatctct

SEQ ID NO: 607224 - DNA, 19 bp, Mus musculus
  siRNA target sequence for Skp2 (NM_013787.1,954-972).
ggctgtggcacatttacca

SEQ ID NO: 607225 - DNA, 19 bp, Mus musculus
  siRNA target sequence for Skp2 (NM_013787.1,1006-1024).
cgaaagaacctccagaaaa

SEQ ID NO: 607226 - DNA, 19 bp, Mus musculus
  siRNA target sequence for Skp2 (NM_013787.1,1060-1078).
ctcatccgcctcgacttaa

SEQ ID NO: 607227 - DNA, 19 bp, Mus musculus
  siRNA target sequence for Skp2 (NM_013787.1,1062-1080).
catccgcctcgacttaagt

SEQ ID NO: 607228 - DNA, 19 bp, Mus musculus
  siRNA target sequence for Skp2 (NM_013787.1,1083-1101).
cagtatcatgctaaagaat

SEQ ID NO: 607229 - DNA, 19 bp, Mus musculus
  siRNA target sequence for Skp2 (NM_013787.1,1150-1168).
ctcagccggtgctatgata

SEQ ID NO: 607230 - DNA, 19 bp, Mus musculus
  siRNA target sequence for Skp2 (NM_013787.1,1152-1170).
cagccggtgctatgatata

SEQ ID NO: 607231 - DNA, 19 bp, Mus musculus
  siRNA target sequence for Skp2 (NM_013787.1,1154-1172).
gccggtgctatgatataat

SEQ ID NO: 607232 - DNA, 19 bp, Mus musculus
  siRNA target sequence for Skp2 (NM_013787.1,1155-1173).
ccggtgctatgatataata

SEQ ID NO: 607233 - DNA, 19 bp, Mus musculus
  siRNA target sequence for Skp2 (NM_013787.1,1175-1193).
ctgatactctacttgaact

SEQ ID NO: 607234 - DNA, 19 bp, Mus musculus
  siRNA target sequence for Skp2 (NM_013787.1,1189-1207).
gaacttggagaaattccta

SEQ ID NO: 607235 - DNA, 19 bp, Mus musculus
  siRNA target sequence for Skp2 (NM_013787.1,1210-1228).
ctaaaaacgctacaagttt

SEQ ID NO: 607236 - DNA, 19 bp, Mus musculus
  siRNA target sequence for Skp2 (NM_013787.1,1217-1235).
cgctacaagtttttggaat

SEQ ID NO: 607237 - DNA, 19 bp, Mus musculus
  siRNA target sequence for Skp2 (NM_013787.1,1310-1328).
ccattgcaaggccaactat

SEQ ID NO: 607238 - DNA, 19 bp, Mus musculus
  siRNA target sequence for Skp2 (NM_013787.1,1348-1366).
gagatttggggtatcaagt

SEQ ID NO: 607239 - DNA, 19 bp, Mus musculus
  siRNA target sequence for Skp2 (NM_013787.1,1367-1385).
gccgactgactctgcaaaa

SEQ ID NO: 607240 - DNA, 19 bp, Mus musculus
  siRNA target sequence for Skp2 (NM_013787.1,1380-1398).
gcaaaagcccagttgtcta

SEQ ID NO: 607241 - DNA, 19 bp, Mus musculus
  siRNA target sequence for Skp2 (NM_013787.1,1381-1399).
caaaagcccagttgtctat

SEQ ID NO: 607242 - DNA, 19 bp, Mus musculus
  siRNA target sequence for Stk22s1 (NM_011651.1,45-63).
gacaatctggcaatccaaa

SEQ ID NO: 607243 - DNA, 19 bp, Mus musculus
  siRNA target sequence for Stk22s1 (NM_011651.1,148-166).
cctgccaaagggataacga

SEQ ID NO: 607244 - DNA, 19 bp, Mus musculus
  siRNA target sequence for Stk22s1 (NM_011651.1,578-596).
ggtactgcagtcagttgaa

SEQ ID NO: 607245 - DNA, 19 bp, Mus musculus
  siRNA target sequence for Stk22s1 (NM_011651.1,652-670).
gtggaagacgctgaaatca

SEQ ID NO: 607246 - DNA, 19 bp, Mus musculus
  siRNA target sequence for Stk22s1 (NM_011651.1,658-676).
gacgctgaaatcaaaacca

SEQ ID NO: 607247 - DNA, 19 bp, Mus musculus
  siRNA target sequence for Stk22s1 (NM_011651.1,660-678).
cgctgaaatcaaaaccaat

SEQ ID NO: 607248 - DNA, 19 bp, Mus musculus
  siRNA target sequence for Stk22s1 (NM_011651.1,1306-1324).
gctgaccatgtcttgaact

SEQ ID NO: 607249 - DNA, 19 bp, Mus musculus
  siRNA target sequence for Stk22s1 (NM_011651.1,1307-1325).
ctgaccatgtcttgaactt

SEQ ID NO: 607250 - DNA, 19 bp, Mus musculus
  siRNA target sequence for 4632417N05Rik (NM_028725.1,430-448).
gagcccgtgtgattctgtt

SEQ ID NO: 607251 - DNA, 19 bp, Mus musculus
  siRNA target sequence for 4632417N05Rik (NM_028725.1,478-496).
cagagggaatcaaattcgt

SEQ ID NO: 607252 - DNA, 19 bp, Mus musculus
  siRNA target sequence for 4632417N05Rik (NM_028725.1,595-613).
ggagggagcaactgaacaa

SEQ ID NO: 607253 - DNA, 19 bp, Mus musculus
  siRNA target sequence for 4632417N05Rik (NM_028725.1,679-697).
gagtgcccagattagtcta

SEQ ID NO: 607254 - DNA, 19 bp, Mus musculus
  siRNA target sequence for 4632417N05Rik (NM_028725.1,695-713).
ctacacaagcacattcaat

SEQ ID NO: 607255 - DNA, 19 bp, Mus musculus
  siRNA target sequence for 4632417N05Rik (NM_028725.1,851-869).
caagcagggcgatggtata

SEQ ID NO: 607256 - DNA, 19 bp, Mus musculus
  siRNA target sequence for 4632417N05Rik (NM_028725.1,931-949).
ccaggatagtgagttacat

SEQ ID NO: 607257 - DNA, 19 bp, Mus musculus
  siRNA target sequence for 4632417N05Rik (NM_028725.1,934-952).
ggatagtgagttacattga

SEQ ID NO: 607258 - DNA, 19 bp, Mus musculus
  siRNA target sequence for 4632417N05Rik (NM_028725.1,953-971).
gaggggcctgttcagattt

SEQ ID NO: 607259 - DNA, 19 bp, Mus musculus
  siRNA target sequence for 4632417N05Rik (NM_028725.1,1049-1067).
ggctctgaaagccgataaa

SEQ ID NO: 607260 - DNA, 19 bp, Mus musculus
  siRNA target sequence for 4632417N05Rik (NM_028725.1,1081-1099).
ccggtcagccctacttcat

SEQ ID NO: 607261 - DNA, 19 bp, Mus musculus
  siRNA target sequence for 4632417N05Rik (NM_028725.1,1083-1101).
ggtcagccctacttcatct

SEQ ID NO: 607262 - DNA, 19 bp, Mus musculus
  siRNA target sequence for 4632417N05Rik (NM_028725.1,1104-1122).
gatggtagaccggtcaata

SEQ ID NO: 607263 - DNA, 19 bp, Mus musculus
  siRNA target sequence for 4632417N05Rik (NM_028725.1,1107-1125).
ggtagaccggtcaataact

SEQ ID NO: 607264 - DNA, 19 bp, Mus musculus
  siRNA target sequence for 4632417N05Rik (NM_028725.1,1108-1126).
gtagaccggtcaataactt

SEQ ID NO: 607265 - DNA, 19 bp, Mus musculus
  siRNA target sequence for 4632417N05Rik (NM_028725.1,1111-1129).
gaccggtcaataactttga

SEQ ID NO: 607266 - DNA, 19 bp, Mus musculus
  siRNA target sequence for 4632417N05Rik (NM_028725.1,1269-1287).
ctcacccgcaccgaagttt

SEQ ID NO: 607267 - DNA, 19 bp, Mus musculus
  siRNA target sequence for 4632417N05Rik (NM_028725.1,1271-1289).
cacccgcaccgaagtttat

SEQ ID NO: 607268 - DNA, 19 bp, Mus musculus
  siRNA target sequence for 4632417N05Rik (NM_028725.1,1273-1291).
cccgcaccgaagtttataa

SEQ ID NO: 607269 - DNA, 19 bp, Mus musculus
  siRNA target sequence for 4632417N05Rik (NM_028725.1,1274-1292).
ccgcaccgaagtttataaa

SEQ ID NO: 607270 - DNA, 19 bp, Mus musculus
  siRNA target sequence for 4632417N05Rik (NM_028725.1,1296-1314).
ggcgtcacacattacttca

SEQ ID NO: 607271 - DNA, 19 bp, Mus musculus
  siRNA target sequence for 4632417N05Rik (NM_028725.1,1371-1389).
gaggtagtagagtggttta

SEQ ID NO: 607272 - DNA, 19 bp, Mus musculus
  siRNA target sequence for 4632417N05Rik (NM_028725.1,1419-1437).
ggtcaagactcggagttta

SEQ ID NO: 607273 - DNA, 19 bp, Mus musculus
  siRNA target sequence for Hsd3b1 (NM_008293.1,680-698).
gccttaagacccatgtaca

SEQ ID NO: 607274 - DNA, 19 bp, Mus musculus
  siRNA target sequence for Hsd3b1 (NM_008293.1,681-699).
ccttaagacccatgtacat

SEQ ID NO: 607275 - DNA, 19 bp, Mus musculus
  siRNA target sequence for Hsd3b1 (NM_008293.1,757-775).
gggtattctgtgtgttact

SEQ ID NO: 607276 - DNA, 19 bp, Mus musculus
  siRNA target sequence for Hsd3b1 (NM_008293.1,1057-1075).
caggtatagacctctcttt

SEQ ID NO: 607277 - DNA, 19 bp, Mus musculus
  siRNA target sequence for Hsd3b1 (NM_008293.1,1059-1077).
ggtatagacctctctttaa

SEQ ID NO: 607278 - DNA, 19 bp, Mus musculus
  siRNA target sequence for Hsd3b1 (NM_008293.1,1084-1102).
cttgatcacactgtcaaat

SEQ ID NO: 607279 - DNA, 19 bp, Mus musculus
  siRNA target sequence for Hsd3b5 (NM_008295.1,1073-1091).
gcgtgtttaccatttccta

SEQ ID NO: 607280 - DNA, 19 bp, Mus musculus
  siRNA target sequence for Hsd3b5 (NM_008295.1,1074-1092).
cgtgtttaccatttcctat

SEQ ID NO: 607281 - DNA, 19 bp, Mus musculus
  siRNA target sequence for Hsd3b5 (NM_008295.1,1195-1213).
gagacactacacaaaaagt

SEQ ID NO: 607282 - DNA, 19 bp, Mus musculus
  siRNA target sequence for Hsd3b5 (NM_008295.1,1197-1215).
gacactacacaaaaagtca

SEQ ID NO: 607283 - DNA, 19 bp, Mus musculus
  siRNA target sequence for Hsd3b6 (NM_013821.2,952-970).
ggttgtacgggcaaattct

SEQ ID NO: 607284 - DNA, 19 bp, Mus musculus
  siRNA target sequence for Hsd3b7 (NM_133943.1,160-178).
ccgggagctgcgtgtcttt

SEQ ID NO: 607285 - DNA, 19 bp, Mus musculus
  siRNA target sequence for Hsd3b7 (NM_133943.1,446-464).
gtggtggggcctaacatca

SEQ ID NO: 607286 - DNA, 19 bp, Mus musculus
  siRNA target sequence for Nsdhl (NM_010941.3,265-283).
cacatttgacaaatgacat

SEQ ID NO: 607287 - DNA, 19 bp, Mus musculus
  siRNA target sequence for Nsdhl (NM_010941.3,353-371).
gctggagcgaggctatact

SEQ ID NO: 607288 - DNA, 19 bp, Mus musculus
  siRNA target sequence for Nsdhl (NM_010941.3,359-377).
gcgaggctatactgtcaat

SEQ ID NO: 607289 - DNA, 19 bp, Mus musculus
  siRNA target sequence for Nsdhl (NM_010941.3,361-379).
gaggctatactgtcaatgt

SEQ ID NO: 607290 - DNA, 19 bp, Mus musculus
  siRNA target sequence for Nsdhl (NM_010941.3,363-381).
ggctatactgtcaatgtat

SEQ ID NO: 607291 - DNA, 19 bp, Mus musculus
  siRNA target sequence for Nsdhl (NM_010941.3,364-382).
gctatactgtcaatgtatt

SEQ ID NO: 607292 - DNA, 19 bp, Mus musculus
  siRNA target sequence for Nsdhl (NM_010941.3,370-388).
ctgtcaatgtatttgatat

SEQ ID NO: 607293 - DNA, 19 bp, Mus musculus
  siRNA target sequence for Nsdhl (NM_010941.3,501-519).
cctccgccgtacagtaaca

SEQ ID NO: 607294 - DNA, 19 bp, Mus musculus
  siRNA target sequence for Nsdhl (NM_010941.3,502-520).
ctccgccgtacagtaacaa

SEQ ID NO: 607295 - DNA, 19 bp, Mus musculus
  siRNA target sequence for Nsdhl (NM_010941.3,504-522).
ccgccgtacagtaacaaca

SEQ ID NO: 607296 - DNA, 19 bp, Mus musculus
  siRNA target sequence for Nsdhl (NM_010941.3,505-523).
cgccgtacagtaacaacaa

SEQ ID NO: 607297 - DNA, 19 bp, Mus musculus
  siRNA target sequence for Nsdhl (NM_010941.3,518-536).
caacaaggagctcttttat

SEQ ID NO: 607298 - DNA, 19 bp, Mus musculus
  siRNA target sequence for Nsdhl (NM_010941.3,527-545).
gctcttttatagagtgaat

SEQ ID NO: 607299 - DNA, 19 bp, Mus musculus
  siRNA target sequence for Nsdhl (NM_010941.3,528-546).
ctcttttatagagtgaatt

SEQ ID NO: 607300 - DNA, 19 bp, Mus musculus
  siRNA target sequence for Nsdhl (NM_010941.3,553-571).
gcaccaagactgtcattga

SEQ ID NO: 607301 - DNA, 19 bp, Mus musculus
  siRNA target sequence for Nsdhl (NM_010941.3,580-598).
gagaggccggagttcagaa

SEQ ID NO: 607302 - DNA, 19 bp, Mus musculus
  siRNA target sequence for Nsdhl (NM_010941.3,585-603).
gccggagttcagaaactca

SEQ ID NO: 607303 - DNA, 19 bp, Mus musculus
  siRNA target sequence for Nsdhl (NM_010941.3,587-605).
cggagttcagaaactcatt

SEQ ID NO: 607304 - DNA, 19 bp, Mus musculus
  siRNA target sequence for Nsdhl (NM_010941.3,633-651).
gagggtgttgacataaaaa

SEQ ID NO: 607305 - DNA, 19 bp, Mus musculus
  siRNA target sequence for Hsd17b1 (NM_010475.1,38-56).
cccacggtagtgctcatta

SEQ ID NO: 607306 - DNA, 19 bp, Mus musculus
  siRNA target sequence for Hsd17b1 (NM_010475.1,109-127).
ccgttcccagagcttcaaa

SEQ ID NO: 607307 - DNA, 19 bp, Mus musculus
  siRNA target sequence for Hsd17b1 (NM_010475.1,286-304).
ggatgtactggtctgtaat

SEQ ID NO: 607308 - DNA, 19 bp, Mus musculus
  siRNA target sequence for Hsd17b1 (NM_010475.1,496-514).
gtactgtgccagcaagttt

SEQ ID NO: 607309 - DNA, 19 bp, Mus musculus
  siRNA target sequence for Hsd17b1 (NM_010475.1,603-621).
cagccttctatgaaaagct

SEQ ID NO: 607310 - DNA, 19 bp, Mus musculus
  siRNA target sequence for Hsd17b1 (NM_010475.1,682-700).
gcactacctgcgtggttat

SEQ ID NO: 607311 - DNA, 19 bp, Mus musculus
  siRNA target sequence for Hsd17b1 (NM_010475.1,871-889).
ccaagaagccttctctaat

SEQ ID NO: 607312 - DNA, 19 bp, Mus musculus
  siRNA target sequence for Hsd17b1 (NM_010475.1,961-979).
catttgcctccctgaatgt

SEQ ID NO: 607313 - DNA, 19 bp, Mus musculus
  siRNA target sequence for Hsd17b1 (NM_010475.1,985-1003).
ccctagggtggcatctgaa

SEQ ID NO: 607314 - DNA, 19 bp, Mus musculus
  siRNA target sequence for Hsd17b1 (NM_010475.1,986-1004).
cctagggtggcatctgaat

SEQ ID NO: 607315 - DNA, 19 bp, Mus musculus
  siRNA target sequence for Hsd17b1 (NM_010475.1,1009-1027).
gtggtctgcatcggataaa

SEQ ID NO: 607316 - DNA, 19 bp, Mus musculus
  siRNA target sequence for Hsd17b1 (NM_010475.1,1028-1046).
ccgggtcaggacaattcat

SEQ ID NO: 607317 - DNA, 19 bp, Mus musculus
  siRNA target sequence for Hsd17b1 (NM_010475.1,1031-1049).
ggtcaggacaattcatgtt

SEQ ID NO: 607318 - DNA, 19 bp, Mus musculus
  siRNA target sequence for Hsd17b1 (NM_010475.1,1044-1062).
catgttaccagcaaaagat

SEQ ID NO: 607319 - DNA, 19 bp, Mus musculus
  siRNA target sequence for Hsd17b2 (NM_008290.1,209-227).
ccttcttctgtatatgagt

SEQ ID NO: 607320 - DNA, 19 bp, Mus musculus
  siRNA target sequence for Hsd17b2 (NM_008290.1,226-244).
gttcatctgaccaagactt

SEQ ID NO: 607321 - DNA, 19 bp, Mus musculus
  siRNA target sequence for Hsd17b2 (NM_008290.1,378-396).
gaggaactgagaaaacact

SEQ ID NO: 607322 - DNA, 19 bp, Mus musculus
  siRNA target sequence for Hsd17b2 (NM_008290.1,397-415).
gctctgagcgtctttcagt

SEQ ID NO: 607323 - DNA, 19 bp, Mus musculus
  siRNA target sequence for Hsd17b2 (NM_008290.1,493-511).
gactgtgggccgtggttaa

SEQ ID NO: 607324 - DNA, 19 bp, Mus musculus
  siRNA target sequence for Hsd17b2 (NM_008290.1,497-515).
gtgggccgtggttaacaat

SEQ ID NO: 607325 - DNA, 19 bp, Mus musculus
  siRNA target sequence for Hsd17b2 (NM_008290.1,520-538).
gggtcttccacttacctat

SEQ ID NO: 607326 - DNA, 19 bp, Mus musculus
  siRNA target sequence for Hsd17b2 (NM_008290.1,535-553).
ctatcgacggggaactcat

SEQ ID NO: 607327 - DNA, 19 bp, Mus musculus
  siRNA target sequence for Hsd17b2 (NM_008290.1,678-696).
ggcacggttccacttcaaa

SEQ ID NO: 607328 - DNA, 19 bp, Mus musculus
  siRNA target sequence for Hsd17b2 (NM_008290.1,679-697).
gcacggttccacttcaaat

SEQ ID NO: 607329 - DNA, 19 bp, Mus musculus
  siRNA target sequence for Hsd17b2 (NM_008290.1,683-701).
ggttccacttcaaatgaca

SEQ ID NO: 607330 - DNA, 19 bp, Mus musculus
  siRNA target sequence for Hsd17b2 (NM_008290.1,733-751).
ccatgttctcaacaatcat

SEQ ID NO: 607331 - DNA, 19 bp, Mus musculus
  siRNA target sequence for Hsd17b2 (NM_008290.1,866-884).
ggaccacttttccaaagat

SEQ ID NO: 607332 - DNA, 19 bp, Mus musculus
  siRNA target sequence for Hsd17b2 (NM_008290.1,869-887).
ccacttttccaaagatatt

SEQ ID NO: 607333 - DNA, 19 bp, Mus musculus
  siRNA target sequence for Hsd17b2 (NM_008290.1,929-947).
catcatcccgaccttgaaa

SEQ ID NO: 607334 - DNA, 19 bp, Mus musculus
  siRNA target sequence for Hsd17b2 (NM_008290.1,986-1004).
catccagcatgccatttct

SEQ ID NO: 607335 - DNA, 19 bp, Mus musculus
  siRNA target sequence for Hsd17b2 (NM_008290.1,1009-1027).
ggaacccctcttcctttta

SEQ ID NO: 607336 - DNA, 19 bp, Mus musculus
  siRNA target sequence for Hsd17b3 (NM_008291.1,123-141).
ggttctcgcagcacctttt

SEQ ID NO: 607337 - DNA, 19 bp, Mus musculus
  siRNA target sequence for Hsd17b3 (NM_008291.1,124-142).
gttctcgcagcaccttttt

SEQ ID NO: 607338 - DNA, 19 bp, Mus musculus
  siRNA target sequence for Hsd17b3 (NM_008291.1,168-186).
gctctttcctgcgatcaat

SEQ ID NO: 607339 - DNA, 19 bp, Mus musculus
  siRNA target sequence for Hsd17b3 (NM_008291.1,187-205).
gggacaatgggcagtgatt

SEQ ID NO: 607340 - DNA, 19 bp, Mus musculus
  siRNA target sequence for Hsd17b3 (NM_008291.1,188-206).
ggacaatgggcagtgatta

SEQ ID NO: 607341 - DNA, 19 bp, Mus musculus
  siRNA target sequence for Hsd17b3 (NM_008291.1,223-241).
catcgggaaagcctattca

SEQ ID NO: 607342 - DNA, 19 bp, Mus musculus
  siRNA target sequence for Hsd17b3 (NM_008291.1,226-244).
cgggaaagcctattcattt

SEQ ID NO: 607343 - DNA, 19 bp, Mus musculus
  siRNA target sequence for Hsd17b3 (NM_008291.1,228-246).
ggaaagcctattcatttga

SEQ ID NO: 607344 - DNA, 19 bp, Mus musculus
  siRNA target sequence for Hsd17b3 (NM_008291.1,252-270).
ccagacatggactcaatgt

SEQ ID NO: 607345 - DNA, 19 bp, Mus musculus
  siRNA target sequence for Hsd17b3 (NM_008291.1,253-271).
cagacatggactcaatgtt

SEQ ID NO: 607346 - DNA, 19 bp, Mus musculus
  siRNA target sequence for Hsd17b3 (NM_008291.1,260-278).
ggactcaatgttgtactta

SEQ ID NO: 607347 - DNA, 19 bp, Mus musculus
  siRNA target sequence for Hsd17b3 (NM_008291.1,261-279).
gactcaatgttgtacttat

SEQ ID NO: 607348 - DNA, 19 bp, Mus musculus
  siRNA target sequence for Hsd17b3 (NM_008291.1,263-281).
ctcaatgttgtacttatta

SEQ ID NO: 607349 - DNA, 19 bp, Mus musculus
  siRNA target sequence for Hsd17b3 (NM_008291.1,304-322).
gaccattgcagaagagatt

SEQ ID NO: 607350 - DNA, 19 bp, Mus musculus
  siRNA target sequence for Hsd17b3 (NM_008291.1,349-367).
gattgtacaagcagatttt

SEQ ID NO: 607351 - DNA, 19 bp, Mus musculus
  siRNA target sequence for Hsd17b3 (NM_008291.1,444-462).
gaatgctccccagcttttt

SEQ ID NO: 607352 - DNA, 19 bp, Mus musculus
  siRNA target sequence for Hsd17b3 (NM_008291.1,486-504).
ccggtgagagccagaatct

SEQ ID NO: 607353 - DNA, 19 bp, Mus musculus
  siRNA target sequence for Hsd17b3 (NM_008291.1,489-507).
gtgagagccagaatctcat

SEQ ID NO: 607354 - DNA, 19 bp, Mus musculus
  siRNA target sequence for Hsd17b3 (NM_008291.1,573-591).
ggaaaggcctcatcttgaa

SEQ ID NO: 607355 - DNA, 19 bp, Mus musculus
  siRNA target sequence for Hsd17b3 (NM_008291.1,645-663).
cttccaaggcttttgtgta

SEQ ID NO: 607356 - DNA, 19 bp, Mus musculus
  siRNA target sequence for Hsd17b3 (NM_008291.1,652-670).
ggcttttgtgtacacattt

SEQ ID NO: 607357 - DNA, 19 bp, Mus musculus
  siRNA target sequence for Hsd17b3 (NM_008291.1,677-695).
gctctgagtgtggaataca

SEQ ID NO: 607358 - DNA, 19 bp, Mus musculus
  siRNA target sequence for Hsd17b3 (NM_008291.1,696-714).
gagataaaggaatcattat

SEQ ID NO: 607359 - DNA, 19 bp, Mus musculus
  siRNA target sequence for Hsd17b3 (NM_008291.1,716-734).
caggtgctgaccccttatt

SEQ ID NO: 607360 - DNA, 19 bp, Mus musculus
  siRNA target sequence for Hsd17b3 (NM_008291.1,718-736).
ggtgctgaccccttattct

SEQ ID NO: 607361 - DNA, 19 bp, Mus musculus
  siRNA target sequence for Hsd17b3 (NM_008291.1,721-739).
gctgaccccttattctatt

SEQ ID NO: 607362 - DNA, 19 bp, Mus musculus
  siRNA target sequence for Hsd17b3 (NM_008291.1,724-742).
gaccccttattctatttca

SEQ ID NO: 607363 - DNA, 19 bp, Mus musculus
  siRNA target sequence for Hsd17b3 (NM_008291.1,741-759).
caaccccaatgacaaagta

SEQ ID NO: 607364 - DNA, 19 bp, Mus musculus
  siRNA target sequence for Hsd17b3 (NM_008291.1,746-764).
ccaatgacaaagtacctaa

SEQ ID NO: 607365 - DNA, 19 bp, Mus musculus
  siRNA target sequence for Hsd17b3 (NM_008291.1,777-795).
ccaagaccgccgatgagtt

SEQ ID NO: 607366 - DNA, 19 bp, Mus musculus
  siRNA target sequence for Hsd17b3 (NM_008291.1,778-796).
caagaccgccgatgagttt

SEQ ID NO: 607367 - DNA, 19 bp, Mus musculus
  siRNA target sequence for Hsd17b3 (NM_008291.1,781-799).
gaccgccgatgagtttgtt

SEQ ID NO: 607368 - DNA, 19 bp, Mus musculus
  siRNA target sequence for Hsd17b3 (NM_008291.1,783-801).
ccgccgatgagtttgttaa

SEQ ID NO: 607369 - DNA, 19 bp, Mus musculus
  siRNA target sequence for Hsd17b3 (NM_008291.1,786-804).
ccgatgagtttgttaaaga

SEQ ID NO: 607370 - DNA, 19 bp, Mus musculus
  siRNA target sequence for Hsd17b3 (NM_008291.1,787-805).
cgatgagtttgttaaagaa

SEQ ID NO: 607371 - DNA, 19 bp, Mus musculus
  siRNA target sequence for Hsd17b3 (NM_008291.1,803-821).
gaatccttgaaatatgtca

SEQ ID NO: 607372 - DNA, 19 bp, Mus musculus
  siRNA target sequence for Hsd17b3 (NM_008291.1,846-864).
gccttgctcatgaaatcat

SEQ ID NO: 607373 - DNA, 19 bp, Mus musculus
  siRNA target sequence for Hsd17b3 (NM_008291.1,906-924).
gcagcaccgctcaacgatt

SEQ ID NO: 607374 - DNA, 19 bp, Mus musculus
  siRNA target sequence for Hsd17b3 (NM_008291.1,929-947).
ctgacacgatactcagatt

SEQ ID NO: 607375 - DNA, 19 bp, Mus musculus
  siRNA target sequence for Hsd17b3 (NM_008291.1,933-951).
cacgatactcagattacct

SEQ ID NO: 607376 - DNA, 19 bp, Mus musculus
  siRNA target sequence for Hsd11b1 (NM_008288.1,132-150).
cagttatgaaaaattacct

SEQ ID NO: 607377 - DNA, 19 bp, Mus musculus
  siRNA target sequence for Hsd11b1 (NM_008288.1,173-191).
ctggcctactactactatt

SEQ ID NO: 607378 - DNA, 19 bp, Mus musculus
  siRNA target sequence for Hsd11b1 (NM_008288.1,175-193).
ggcctactactactattct

SEQ ID NO: 607379 - DNA, 19 bp, Mus musculus
  siRNA target sequence for Hsd11b1 (NM_008288.1,178-196).
ctactactactattctaca

SEQ ID NO: 607380 - DNA, 19 bp, Mus musculus
  siRNA target sequence for Hsd11b1 (NM_008288.1,181-199).
ctactactattctacaaat

SEQ ID NO: 607381 - DNA, 19 bp, Mus musculus
  siRNA target sequence for Hsd11b1 (NM_008288.1,277-295).
ggcatatcatctgtcaaaa

SEQ ID NO: 607382 - DNA, 19 bp, Mus musculus
  siRNA target sequence for Hsd11b1 (NM_008288.1,278-296).
gcatatcatctgtcaaaaa

SEQ ID NO: 607383 - DNA, 19 bp, Mus musculus
  siRNA target sequence for Hsd11b1 (NM_008288.1,375-393).
cagcctctgctcactacat

SEQ ID NO: 607384 - DNA, 19 bp, Mus musculus
  siRNA target sequence for Hsd11b1 (NM_008288.1,415-433).
gacatttgcggagcaattt

SEQ ID NO: 607385 - DNA, 19 bp, Mus musculus
  siRNA target sequence for Hsd11b1 (NM_008288.1,417-435).
catttgcggagcaatttat

SEQ ID NO: 607386 - DNA, 19 bp, Mus musculus
  siRNA target sequence for Hsd11b1 (NM_008288.1,422-440).
gcggagcaatttattgtca

SEQ ID NO: 607387 - DNA, 19 bp, Mus musculus
  siRNA target sequence for Hsd11b1 (NM_008288.1,423-441).
cggagcaatttattgtcaa

SEQ ID NO: 607388 - DNA, 19 bp, Mus musculus
  siRNA target sequence for Hsd11b1 (NM_008288.1,460-478).
cggactggacatgcttatt

SEQ ID NO: 607389 - DNA, 19 bp, Mus musculus
  siRNA target sequence for Hsd11b1 (NM_008288.1,540-558).
gagtcatggaggtcaactt

SEQ ID NO: 607390 - DNA, 19 bp, Mus musculus
  siRNA target sequence for Hsd11b1 (NM_008288.1,695-713).
ctggatgggttcttttcca

SEQ ID NO: 607391 - DNA, 19 bp, Mus musculus
  siRNA target sequence for Hsd11b1 (NM_008288.1,706-724).
cttttccaccattagaaca

SEQ ID NO: 607392 - DNA, 19 bp, Mus musculus
  siRNA target sequence for Hsd11b1 (NM_008288.1,714-732).
ccattagaacagaactcta

SEQ ID NO: 607393 - DNA, 19 bp, Mus musculus
  siRNA target sequence for Hsd11b1 (NM_008288.1,723-741).
cagaactctacataaccaa

SEQ ID NO: 607394 - DNA, 19 bp, Mus musculus
  siRNA target sequence for Hsd11b1 (NM_008288.1,883-901).
caaaagcgaggtgtactat

SEQ ID NO: 607395 - DNA, 19 bp, Mus musculus
  siRNA target sequence for Hsd11b1 (NM_008288.1,888-906).
gcgaggtgtactatgacaa

SEQ ID NO: 607396 - DNA, 19 bp, Mus musculus
  siRNA target sequence for Hsd11b1 (NM_008288.1,890-908).
gaggtgtactatgacaaat

SEQ ID NO: 607397 - DNA, 19 bp, Mus musculus
  siRNA target sequence for Hsd11b1 (NM_008288.1,955-973).
ggaatttttttcattacga

SEQ ID NO: 607398 - DNA, 19 bp, Mus musculus
  siRNA target sequence for Hsd11b1 (NM_008288.1,966-984).
cattacgatattataataa

SEQ ID NO: 607399 - DNA, 19 bp, Mus musculus
  siRNA target sequence for Rdh1 (NM_080436.1,621-639).
cgtcatgggccgaatgtct

SEQ ID NO: 607400 - DNA, 19 bp, Mus musculus
  siRNA target sequence for Rdh1 (NM_080436.1,627-645).
gggccgaatgtctttcttt

SEQ ID NO: 607401 - DNA, 19 bp, Mus musculus
  siRNA target sequence for Rdh1 (NM_080436.1,745-763).
cctggaggcttcaagactt

SEQ ID NO: 607402 - DNA, 19 bp, Mus musculus
  siRNA target sequence for Rdh1 (NM_080436.1,776-794).
gtgacaggctatcatcaaa

SEQ ID NO: 607403 - DNA, 19 bp, Mus musculus
  siRNA target sequence for Rdh1 (NM_080436.1,818-836).
ccagctcggaagtcaaaga

SEQ ID NO: 607404 - DNA, 19 bp, Mus musculus
  siRNA target sequence for Rdh1 (NM_080436.1,821-839).
gctcggaagtcaaagagat

SEQ ID NO: 607405 - DNA, 19 bp, Mus musculus
  siRNA target sequence for Rdh1 (NM_080436.1,824-842).
cggaagtcaaagagatcta

SEQ ID NO: 607406 - DNA, 19 bp, Mus musculus
  siRNA target sequence for Rdh1 (NM_080436.1,840-858).
ctatggcgagaagttttta

SEQ ID NO: 607407 - DNA, 19 bp, Mus musculus
  siRNA target sequence for Rdh1 (NM_080436.1,844-862).
ggcgagaagtttttattat

SEQ ID NO: 607408 - DNA, 19 bp, Mus musculus
  siRNA target sequence for Rdh1 (NM_080436.1,845-863).
gcgagaagtttttattatt

SEQ ID NO: 607409 - DNA, 19 bp, Mus musculus
  siRNA target sequence for 4933405O20Rik (NM_172901.1,48-66).
gctgttctatgaaaacagt

SEQ ID NO: 607410 - DNA, 19 bp, Mus musculus
  siRNA target sequence for 4933405O20Rik (NM_172901.1,213-231).
gcattgggcctgagcttat

SEQ ID NO: 607411 - DNA, 19 bp, Mus musculus
  siRNA target sequence for 4933405O20Rik (NM_172901.1,239-257).
gtcaagaaaatattcagat

SEQ ID NO: 607412 - DNA, 19 bp, Mus musculus
  siRNA target sequence for 4933405O20Rik (NM_172901.1,291-309).
gggtcacctcgacatctaa

SEQ ID NO: 607413 - DNA, 19 bp, Mus musculus
  siRNA target sequence for 4933405O20Rik (NM_172901.1,292-310).
ggtcacctcgacatctaat

SEQ ID NO: 607414 - DNA, 19 bp, Mus musculus
  siRNA target sequence for 4933405O20Rik (NM_172901.1,295-313).
cacctcgacatctaatgaa

SEQ ID NO: 607415 - DNA, 19 bp, Mus musculus
  siRNA target sequence for 4933405O20Rik (NM_172901.1,358-376).
cgctctgaagggcaatatt

SEQ ID NO: 607416 - DNA, 19 bp, Mus musculus
  siRNA target sequence for 4933405O20Rik (NM_172901.1,392-410).
ctgcctgcccgttacaagt

SEQ ID NO: 607417 - DNA, 19 bp, Mus musculus
  siRNA target sequence for 4933405O20Rik (NM_172901.1,449-467).
gccagtgtcgtccatttca

SEQ ID NO: 607418 - DNA, 19 bp, Mus musculus
  siRNA target sequence for 4933405O20Rik (NM_172901.1,514-532).
ggttgttcgggagaataca

SEQ ID NO: 607419 - DNA, 19 bp, Mus musculus
  siRNA target sequence for 4933405O20Rik (NM_172901.1,531-549).
cagagggggagtacactaa

SEQ ID NO: 607420 - DNA, 19 bp, Mus musculus
  siRNA target sequence for 4933405O20Rik (NM_172901.1,535-553).
gggggagtacactaaccta

SEQ ID NO: 607421 - DNA, 19 bp, Mus musculus
  siRNA target sequence for 4933405O20Rik (NM_172901.1,577-595).
ggtagaaagccttaagatt

SEQ ID NO: 607422 - DNA, 19 bp, Mus musculus
  siRNA target sequence for 4933405O20Rik (NM_172901.1,585-603).
gccttaagattgtgacaaa

SEQ ID NO: 607423 - DNA, 19 bp, Mus musculus
  siRNA target sequence for 4933405O20Rik (NM_172901.1,667-685).
ggtgacagttgttcacaaa

SEQ ID NO: 607424 - DNA, 19 bp, Mus musculus
  siRNA target sequence for 4933405O20Rik (NM_172901.1,718-736).
ccttcagtgctgtaaggat

SEQ ID NO: 607425 - DNA, 19 bp, Mus musculus
  siRNA target sequence for 4933405O20Rik (NM_172901.1,760-778).
caccttagagagtatgatt

SEQ ID NO: 607426 - DNA, 19 bp, Mus musculus
  siRNA target sequence for 4933405O20Rik (NM_172901.1,763-781).
cttagagagtatgattata

SEQ ID NO: 607427 - DNA, 19 bp, Mus musculus
  siRNA target sequence for 4933405O20Rik (NM_172901.1,767-785).
gagagtatgattatagaca

SEQ ID NO: 607428 - DNA, 19 bp, Mus musculus
  siRNA target sequence for 4933405O20Rik (NM_172901.1,792-810).
caatgcagttggtatcgaa

SEQ ID NO: 607429 - DNA, 19 bp, Mus musculus
  siRNA target sequence for 4933405O20Rik (NM_172901.1,913-931).
caattatggtgattcatat

SEQ ID NO: 607430 - DNA, 19 bp, Mus musculus
  siRNA target sequence for 4933405O20Rik (NM_172901.1,920-938).
ggtgattcatatgcaatat

SEQ ID NO: 607431 - DNA, 19 bp, Mus musculus
  siRNA target sequence for 4933405O20Rik (NM_172901.1,921-939).
gtgattcatatgcaatatt

SEQ ID NO: 607432 - DNA, 19 bp, Mus musculus
  siRNA target sequence for 4933405O20Rik (NM_172901.1,946-964).
gggttcaaaggaaataggt

SEQ ID NO: 607433 - DNA, 19 bp, Mus musculus
  siRNA target sequence for 4933405O20Rik (NM_172901.1,947-965).
ggttcaaaggaaataggta

SEQ ID NO: 607434 - DNA, 19 bp, Mus musculus
  siRNA target sequence for 4933405O20Rik (NM_172901.1,948-966).
gttcaaaggaaataggtaa

SEQ ID NO: 607435 - DNA, 19 bp, Mus musculus
  siRNA target sequence for 4933405O20Rik (NM_172901.1,1007-1025).
ctgctgaccagctgtatca

SEQ ID NO: 607436 - DNA, 19 bp, Mus musculus
  siRNA target sequence for 4933405O20Rik (NM_172901.1,1076-1094).
gtcatggcgtccttacaaa

SEQ ID NO: 607437 - DNA, 19 bp, Mus musculus
  siRNA target sequence for 4933405O20Rik (NM_172901.1,1081-1099).
ggcgtccttacaaaacaaa

SEQ ID NO: 607438 - DNA, 19 bp, Mus musculus
  siRNA target sequence for 4933405O20Rik (NM_172901.1,1139-1157).
gcaagcactgtagagtata

SEQ ID NO: 607439 - DNA, 19 bp, Mus musculus
  siRNA target sequence for 4933405O20Rik (NM_172901.1,1140-1158).
caagcactgtagagtatat

SEQ ID NO: 607440 - DNA, 19 bp, Mus musculus
  siRNA target sequence for 4933405O20Rik (NM_172901.1,1144-1162).
cactgtagagtatatctta

SEQ ID NO: 607441 - DNA, 19 bp, Mus musculus
  siRNA target sequence for 4933405O20Rik (NM_172901.1,1187-1205).
ggttgtcatccaaatttct

SEQ ID NO: 607442 - DNA, 19 bp, Mus musculus
  siRNA target sequence for Idh3a (NM_029573.2,94-112).
ggtgttcagacagtaactt

SEQ ID NO: 607443 - DNA, 19 bp, Mus musculus
  siRNA target sequence for Idh3a (NM_029573.2,175-193).
gccaaagcacctattcagt

SEQ ID NO: 607444 - DNA, 19 bp, Mus musculus
  siRNA target sequence for Idh3a (NM_029573.2,201-219).
gcgcaatgtcacagcaatt

SEQ ID NO: 607445 - DNA, 19 bp, Mus musculus
  siRNA target sequence for Idh3a (NM_029573.2,257-275).
ccaaggagtccatggataa

SEQ ID NO: 607446 - DNA, 19 bp, Mus musculus
  siRNA target sequence for Idh3a (NM_029573.2,287-305).
gcttgaaaggcccactaaa

SEQ ID NO: 607447 - DNA, 19 bp, Mus musculus
  siRNA target sequence for Idh3a (NM_029573.2,317-335).
ccgctggccatccatctat

SEQ ID NO: 607448 - DNA, 19 bp, Mus musculus
  siRNA target sequence for Idh3a (NM_029573.2,340-358).
ctgttgcttcgtaagacat

SEQ ID NO: 607449 - DNA, 19 bp, Mus musculus
  siRNA target sequence for Idh3a (NM_029573.2,410-428).
ccccttacacggatgtaaa

SEQ ID NO: 607450 - DNA, 19 bp, Mus musculus
  siRNA target sequence for Idh3a (NM_029573.2,411-429).
cccttacacggatgtaaat

SEQ ID NO: 607451 - DNA, 19 bp, Mus musculus
  siRNA target sequence for Idh3a (NM_029573.2,412-430).
ccttacacggatgtaaata

SEQ ID NO: 607452 - DNA, 19 bp, Mus musculus
  siRNA target sequence for Idh3a (NM_029573.2,450-468).
cacggaaggagaatacagt

SEQ ID NO: 607453 - DNA, 19 bp, Mus musculus
  siRNA target sequence for Idh3a (NM_029573.2,467-485).
gtggaattgagcatgtgat

SEQ ID NO: 607454 - DNA, 19 bp, Mus musculus
  siRNA target sequence for Idh3a (NM_029573.2,534-552).
caagcgcattgcagagttt

SEQ ID NO: 607455 - DNA, 19 bp, Mus musculus
  siRNA target sequence for Idh3a (NM_029573.2,631-649).
gggctctttctgcaaaaat

SEQ ID NO: 607456 - DNA, 19 bp, Mus musculus
  siRNA target sequence for Idh3a (NM_029573.2,634-652).
ctctttctgcaaaaatgca

SEQ ID NO: 607457 - DNA, 19 bp, Mus musculus
  siRNA target sequence for Idh3a (NM_029573.2,661-679).
gcggagaactgtaaagaca

SEQ ID NO: 607458 - DNA, 19 bp, Mus musculus
  siRNA target sequence for Idh3a (NM_029573.2,662-680).
cggagaactgtaaagacat

SEQ ID NO: 607459 - DNA, 19 bp, Mus musculus
  siRNA target sequence for Idh3a (NM_029573.2,663-681).
ggagaactgtaaagacatt

SEQ ID NO: 607460 - DNA, 19 bp, Mus musculus
  siRNA target sequence for Idh3a (NM_029573.2,664-682).
gagaactgtaaagacatta

SEQ ID NO: 607461 - DNA, 19 bp, Mus musculus
  siRNA target sequence for Idh3a (NM_029573.2,690-708).
cgagatgtaccttgatact

SEQ ID NO: 607462 - DNA, 19 bp, Mus musculus
  siRNA target sequence for Idh3a (NM_029573.2,696-714).
gtaccttgatactgtatgt

SEQ ID NO: 607463 - DNA, 19 bp, Mus musculus
  siRNA target sequence for Idh3a (NM_029573.2,748-766).
gttcttgtcatgccaaatt

SEQ ID NO: 607464 - DNA, 19 bp, Mus musculus
  siRNA target sequence for Idh3a (NM_029573.2,751-769).
cttgtcatgccaaatttat

SEQ ID NO: 607465 - DNA, 19 bp, Mus musculus
  siRNA target sequence for Idh3a (NM_029573.2,771-789).
cggagacatccttagtgat

SEQ ID NO: 607466 - DNA, 19 bp, Mus musculus
  siRNA target sequence for Idh3a (NM_029573.2,846-864).
caacggtgttgccatcttt

SEQ ID NO: 607467 - DNA, 19 bp, Mus musculus
  siRNA target sequence for Idh3a (NM_029573.2,849-867).
cggtgttgccatctttgaa

SEQ ID NO: 607468 - DNA, 19 bp, Mus musculus
  siRNA target sequence for Idh3a (NM_029573.2,953-971).
gccacatgggactttttga

SEQ ID NO: 607469 - DNA, 19 bp, Mus musculus
  siRNA target sequence for Idh3a (NM_029573.2,987-1005).
cgaggctgcatgttttgct

SEQ ID NO: 607470 - DNA, 19 bp, Mus musculus
  siRNA target sequence for Idh3a (NM_029573.2,988-1006).
gaggctgcatgttttgcta

SEQ ID NO: 607471 - DNA, 19 bp, Mus musculus
  siRNA target sequence for Idh3a (NM_029573.2,992-1010).
ctgcatgttttgctacaat

SEQ ID NO: 607472 - DNA, 19 bp, Mus musculus
  siRNA target sequence for Idh3a (NM_029573.2,995-1013).
catgttttgctacaattaa

SEQ ID NO: 607473 - DNA, 19 bp, Mus musculus
  siRNA target sequence for Idh3a (NM_029573.2,1004-1022).
ctacaattaaggatggaaa

SEQ ID NO: 607474 - DNA, 19 bp, Mus musculus
  siRNA target sequence for Idh3a (NM_029573.2,1014-1032).
ggatggaaagagcttaaca

SEQ ID NO: 607475 - DNA, 19 bp, Mus musculus
  siRNA target sequence for Idh3a (NM_029573.2,1019-1037).
gaaagagcttaacaaaaga

SEQ ID NO: 607476 - DNA, 19 bp, Mus musculus
  siRNA target sequence for Idh3a (NM_029573.2,1082-1100).
gtcgtagagtcaaagactt

SEQ ID NO: 607477 - DNA, 19 bp, Mus musculus
  siRNA target sequence for Idh3b (NM_130884.1,92-110).
gagaggtctcggaacatct

SEQ ID NO: 607478 - DNA, 19 bp, Mus musculus
  siRNA target sequence for Idh3b (NM_130884.1,217-235).
ctgtcaaggaagtgttcaa

SEQ ID NO: 607479 - DNA, 19 bp, Mus musculus
  siRNA target sequence for Idh3b (NM_130884.1,273-291).
ctgagcgaggtgcagaata

SEQ ID NO: 607480 - DNA, 19 bp, Mus musculus
  siRNA target sequence for Idh3b (NM_130884.1,377-395).
ggagtataagggtgaacta

SEQ ID NO: 607481 - DNA, 19 bp, Mus musculus
  siRNA target sequence for Idh3b (NM_130884.1,390-408).
gaactagcctcctatgata

SEQ ID NO: 607482 - DNA, 19 bp, Mus musculus
  siRNA target sequence for Idh3b (NM_130884.1,418-436).
ggcgtaagttggatttgtt

SEQ ID NO: 607483 - DNA, 19 bp, Mus musculus
  siRNA target sequence for Idh3b (NM_130884.1,473-491).
caagactcggcacaacaat

SEQ ID NO: 607484 - DNA, 19 bp, Mus musculus
  siRNA target sequence for Idh3b (NM_130884.1,476-494).
gactcggcacaacaatcta

SEQ ID NO: 607485 - DNA, 19 bp, Mus musculus
  siRNA target sequence for Idh3b (NM_130884.1,478-496).
ctcggcacaacaatctaga

SEQ ID NO: 607486 - DNA, 19 bp, Mus musculus
  siRNA target sequence for Idh3b (NM_130884.1,626-644).
cgactatgccaccaagaaa

SEQ ID NO: 607487 - DNA, 19 bp, Mus musculus
  siRNA target sequence for Idh3b (NM_130884.1,732-750).
gaactgtaccctaaaatca

SEQ ID NO: 607488 - DNA, 19 bp, Mus musculus
  siRNA target sequence for Idh3b (NM_130884.1,819-837).
ctcgtgatgcccaatctct

SEQ ID NO: 607489 - DNA, 19 bp, Mus musculus
  siRNA target sequence for Idh3b (NM_130884.1,841-859).
gcaacataattgacaatct

SEQ ID NO: 607490 - DNA, 19 bp, Mus musculus
  siRNA target sequence for Idh3b (NM_130884.1,913-931).
cagagtatgcagtttttga

SEQ ID NO: 607491 - DNA, 19 bp, Mus musculus
  siRNA target sequence for Idh3b (NM_130884.1,959-977).
ggcagtgggcaggaatata

SEQ ID NO: 607492 - DNA, 19 bp, Mus musculus
  siRNA target sequence for Idh3b (NM_130884.1,1013-1031).
catgctgcggcatctcaat

SEQ ID NO: 607493 - DNA, 19 bp, Mus musculus
  siRNA target sequence for Idh3b (NM_130884.1,1016-1034).
gctgcggcatctcaatctt

SEQ ID NO: 607494 - DNA, 19 bp, Mus musculus
  siRNA target sequence for Idh3b (NM_130884.1,1021-1039).
ggcatctcaatcttgagta

SEQ ID NO: 607495 - DNA, 19 bp, Mus musculus
  siRNA target sequence for Idh3b (NM_130884.1,1022-1040).
gcatctcaatcttgagtat

SEQ ID NO: 607496 - DNA, 19 bp, Mus musculus
  siRNA target sequence for Idh3b (NM_130884.1,1037-1055).
gtatcactccagcatgatt

SEQ ID NO: 607497 - DNA, 19 bp, Mus musculus
  siRNA target sequence for Idh1 (NM_010497.1,52-70).
ggagatgcaaggagatgaa

SEQ ID NO: 607498 - DNA, 19 bp, Mus musculus
  siRNA target sequence for Idh1 (NM_010497.1,58-76).
gcaaggagatgaaatgaca

SEQ ID NO: 607499 - DNA, 19 bp, Mus musculus
  siRNA target sequence for Idh1 (NM_010497.1,77-95).
cgaatcatttgggaattga

SEQ ID NO: 607500 - DNA, 19 bp, Mus musculus
  siRNA target sequence for Idh1 (NM_010497.1,87-105).
gggaattgattaaggaaaa

SEQ ID NO: 607501 - DNA, 19 bp, Mus musculus
  siRNA target sequence for Idh1 (NM_010497.1,131-149).
gatctgcatagctatgatt

SEQ ID NO: 607502 - DNA, 19 bp, Mus musculus
  siRNA target sequence for Idh1 (NM_010497.1,309-327).
gcaccatccgaaacattct

SEQ ID NO: 607503 - DNA, 19 bp, Mus musculus
  siRNA target sequence for Idh1 (NM_010497.1,338-356).
gtcttcagggaagctatta

SEQ ID NO: 607504 - DNA, 19 bp, Mus musculus
  siRNA target sequence for Idh1 (NM_010497.1,390-408).
gggtaaaacccatcatcat

SEQ ID NO: 607505 - DNA, 19 bp, Mus musculus
  siRNA target sequence for Idh1 (NM_010497.1,406-424).
cattggccgacatgcatat

SEQ ID NO: 607506 - DNA, 19 bp, Mus musculus
  siRNA target sequence for Idh1 (NM_010497.1,430-448).
ccaatacagagcaactgat

SEQ ID NO: 607507 - DNA, 19 bp, Mus musculus
  siRNA target sequence for Idh1 (NM_010497.1,431-449).
caatacagagcaactgatt

SEQ ID NO: 607508 - DNA, 19 bp, Mus musculus
  siRNA target sequence for Idh1 (NM_010497.1,438-456).
gagcaactgattttgttgt

SEQ ID NO: 607509 - DNA, 19 bp, Mus musculus
  siRNA target sequence for Idh1 (NM_010497.1,467-485).
ggaaaagtagagataacct

SEQ ID NO: 607510 - DNA, 19 bp, Mus musculus
  siRNA target sequence for Idh1 (NM_010497.1,468-486).
gaaaagtagagataaccta

SEQ ID NO: 607511 - DNA, 19 bp, Mus musculus
  siRNA target sequence for Idh1 (NM_010497.1,478-496).
gataacctacacaccaaaa

SEQ ID NO: 607512 - DNA, 19 bp, Mus musculus
  siRNA target sequence for Idh1 (NM_010497.1,565-583).
gtacaaccaggataagtca

SEQ ID NO: 607513 - DNA, 19 bp, Mus musculus
  siRNA target sequence for Idh1 (NM_010497.1,568-586).
caaccaggataagtcaatt

SEQ ID NO: 607514 - DNA, 19 bp, Mus musculus
  siRNA target sequence for Idh1 (NM_010497.1,596-614).
gcacacagttccttccaaa

SEQ ID NO: 607515 - DNA, 19 bp, Mus musculus
  siRNA target sequence for Idh1 (NM_010497.1,624-642).
ccaagggctggcctttgta

SEQ ID NO: 607516 - DNA, 19 bp, Mus musculus
  siRNA target sequence for Idh1 (NM_010497.1,625-643).
caagggctggcctttgtat

SEQ ID NO: 607517 - DNA, 19 bp, Mus musculus
  siRNA target sequence for Idh1 (NM_010497.1,673-691).
gtatgatgggcgtttcaaa

SEQ ID NO: 607518 - DNA, 19 bp, Mus musculus
  siRNA target sequence for Idh1 (NM_010497.1,819-837).
gggcctgtaagaattacga

SEQ ID NO: 607519 - DNA, 19 bp, Mus musculus
  siRNA target sequence for Idh1 (NM_010497.1,820-838).
ggcctgtaagaattacgat

SEQ ID NO: 607520 - DNA, 19 bp, Mus musculus
  siRNA target sequence for Idh1 (NM_010497.1,856-874).
ctcagtcgcccaaggttat

SEQ ID NO: 607521 - DNA, 19 bp, Mus musculus
  siRNA target sequence for Idh1 (NM_010497.1,1043-1061).
cacagagcaaagcttgata

SEQ ID NO: 607522 - DNA, 19 bp, Mus musculus
  siRNA target sequence for Idh1 (NM_010497.1,1047-1065).
gagcaaagcttgataacaa

SEQ ID NO: 607523 - DNA, 19 bp, Mus musculus
  siRNA target sequence for Idh1 (NM_010497.1,1049-1067).
gcaaagcttgataacaata

SEQ ID NO: 607524 - DNA, 19 bp, Mus musculus
  siRNA target sequence for Idh1 (NM_010497.1,1121-1139).
gaggctggctttatgacta

SEQ ID NO: 607525 - DNA, 19 bp, Mus musculus
  siRNA target sequence for Idh1 (NM_010497.1,1142-1160).
gacttggctgcttgcatta

SEQ ID NO: 607526 - DNA, 19 bp, Mus musculus
  siRNA target sequence for Idh1 (NM_010497.1,1178-1196).
caacgttctgactacttga

SEQ ID NO: 607527 - DNA, 19 bp, Mus musculus
  siRNA target sequence for Idh1 (NM_010497.1,1231-1249).
cttgaaggccaaattagct

SEQ ID NO: 607528 - DNA, 19 bp, Mus musculus
  siRNA target sequence for 4933402O15Rik (NM_175349.2,157-175).
caaccagggtagatttcaa

SEQ ID NO: 607529 - DNA, 19 bp, Mus musculus
  siRNA target sequence for 4933402O15Rik (NM_175349.2,266-284).
gaccgtgaagggtgaactt

SEQ ID NO: 607530 - DNA, 19 bp, Mus musculus
  siRNA target sequence for 4933402O15Rik (NM_175349.2,268-286).
ccgtgaagggtgaacttat

SEQ ID NO: 607531 - DNA, 19 bp, Mus musculus
  siRNA target sequence for 4933402O15Rik (NM_175349.2,362-380).
ctgtgccatcggcatcata

SEQ ID NO: 607532 - DNA, 19 bp, Mus musculus
  siRNA target sequence for 4933402O15Rik (NM_175349.2,398-416).
cgagctcgcccttgttgat

SEQ ID NO: 607533 - DNA, 19 bp, Mus musculus
  siRNA target sequence for 4933402O15Rik (NM_175349.2,401-419).
gctcgcccttgttgataat

SEQ ID NO: 607534 - DNA, 19 bp, Mus musculus
  siRNA target sequence for 4933402O15Rik (NM_175349.2,404-422).
cgcccttgttgataataat

SEQ ID NO: 607535 - DNA, 19 bp, Mus musculus
  siRNA target sequence for 4933402O15Rik (NM_175349.2,407-425).
ccttgttgataataatgaa

SEQ ID NO: 607536 - DNA, 19 bp, Mus musculus
  siRNA target sequence for 4933402O15Rik (NM_175349.2,439-457).
gtgagacgatggatcttca

SEQ ID NO: 607537 - DNA, 19 bp, Mus musculus
  siRNA target sequence for 4933402O15Rik (NM_175349.2,461-479).
cggcagtgtcttcatgaaa

SEQ ID NO: 607538 - DNA, 19 bp, Mus musculus
  siRNA target sequence for 4933402O15Rik (NM_175349.2,520-538).
ccaactctgaggtagtgat

SEQ ID NO: 607539 - DNA, 19 bp, Mus musculus
  siRNA target sequence for 4933402O15Rik (NM_175349.2,521-539).
caactctgaggtagtgatt

SEQ ID NO: 607540 - DNA, 19 bp, Mus musculus
  siRNA target sequence for 4933402O15Rik (NM_175349.2,547-565).
cgggtgcacgccaagagaa

SEQ ID NO: 607541 - DNA, 19 bp, Mus musculus
  siRNA target sequence for 4933402O15Rik (NM_175349.2,548-566).
gggtgcacgccaagagaaa

SEQ ID NO: 607542 - DNA, 19 bp, Mus musculus
  siRNA target sequence for 4933402O15Rik (NM_175349.2,549-567).
ggtgcacgccaagagaaaa

SEQ ID NO: 607543 - DNA, 19 bp, Mus musculus
  siRNA target sequence for 4933402O15Rik (NM_175349.2,593-611).
gcgaaacgtaaccatcttt

SEQ ID NO: 607544 - DNA, 19 bp, Mus musculus
  siRNA target sequence for 4933402O15Rik (NM_175349.2,594-612).
cgaaacgtaaccatcttta

SEQ ID NO: 607545 - DNA, 19 bp, Mus musculus
  siRNA target sequence for 4933402O15Rik (NM_175349.2,605-623).
catctttaaggcaatggtt

SEQ ID NO: 607546 - DNA, 19 bp, Mus musculus
  siRNA target sequence for 4933402O15Rik (NM_175349.2,614-632).
ggcaatggttgcggaaatt

SEQ ID NO: 607547 - DNA, 19 bp, Mus musculus
  siRNA target sequence for 4933402O15Rik (NM_175349.2,615-633).
gcaatggttgcggaaatta

SEQ ID NO: 607548 - DNA, 19 bp, Mus musculus
  siRNA target sequence for 4933402O15Rik (NM_175349.2,616-634).
caatggttgcggaaattat

SEQ ID NO: 607549 - DNA, 19 bp, Mus musculus
  siRNA target sequence for 4933402O15Rik (NM_175349.2,641-659).
cagccctcgctgcaaaatt

SEQ ID NO: 607550 - DNA, 19 bp, Mus musculus
  siRNA target sequence for 4933402O15Rik (NM_175349.2,643-661).
gccctcgctgcaaaattat

SEQ ID NO: 607551 - DNA, 19 bp, Mus musculus
  siRNA target sequence for 4933402O15Rik (NM_175349.2,644-662).
ccctcgctgcaaaattatt

SEQ ID NO: 607552 - DNA, 19 bp, Mus musculus
  siRNA target sequence for 4933402O15Rik (NM_175349.2,681-699).
gatatcttaactttcgtaa

SEQ ID NO: 607553 - DNA, 19 bp, Mus musculus
  siRNA target sequence for 4933402O15Rik (NM_175349.2,743-761).
cggctgtaacctagataca

SEQ ID NO: 607554 - DNA, 19 bp, Mus musculus
  siRNA target sequence for 4933402O15Rik (NM_175349.2,792-810).
cttgggatccactctgaaa

SEQ ID NO: 607555 - DNA, 19 bp, Mus musculus
  siRNA target sequence for 4933402O15Rik (NM_175349.2,940-958).
ggggcgatgtccacaaaga

SEQ ID NO: 607556 - DNA, 19 bp, Mus musculus
  siRNA target sequence for 4933402O15Rik (NM_175349.2,941-959).
gggcgatgtccacaaagaa

SEQ ID NO: 607557 - DNA, 19 bp, Mus musculus
  siRNA target sequence for 4933402O15Rik (NM_175349.2,943-961).
gcgatgtccacaaagaagt

SEQ ID NO: 607558 - DNA, 19 bp, Mus musculus
  siRNA target sequence for 4933402O15Rik (NM_175349.2,962-980).
cattgccagtgcctataat

SEQ ID NO: 607559 - DNA, 19 bp, Mus musculus
  siRNA target sequence for 4933402O15Rik (NM_175349.2,1018-1036).
gcctgtctgtaactgatat

SEQ ID NO: 607560 - DNA, 19 bp, Mus musculus
  siRNA target sequence for 4933402O15Rik (NM_175349.2,1030-1048).
ctgatattgcagagagtat

SEQ ID NO: 607561 - DNA, 19 bp, Mus musculus
  siRNA target sequence for 4933402O15Rik (NM_175349.2,1147-1165).
gagagagtggcatatctga

SEQ ID NO: 607562 - DNA, 19 bp, Mus musculus
  siRNA target sequence for 4933402O15Rik (NM_175349.2,1149-1167).
gagagtggcatatctgata

SEQ ID NO: 607563 - DNA, 19 bp, Mus musculus
  siRNA target sequence for 4933402O15Rik (NM_175349.2,1153-1171).
gtggcatatctgatatcat

SEQ ID NO: 607564 - DNA, 19 bp, Mus musculus
  siRNA target sequence for 4933402O15Rik (NM_175349.2,1155-1173).
ggcatatctgatatcataa

SEQ ID NO: 607565 - DNA, 19 bp, Mus musculus
  siRNA target sequence for 4933402O15Rik (NM_175349.2,1216-1234).
gcgcagagactatttggaa

SEQ ID NO: 607566 - DNA, 19 bp, Mus musculus
  siRNA target sequence for Ldh3 (NM_013580.2,143-161).
catggcgtgtgctattagt

SEQ ID NO: 607567 - DNA, 19 bp, Mus musculus
  siRNA target sequence for Ldh3 (NM_013580.2,147-165).
gcgtgtgctattagtattt

SEQ ID NO: 607568 - DNA, 19 bp, Mus musculus
  siRNA target sequence for Ldh3 (NM_013580.2,148-166).
cgtgtgctattagtatttt

SEQ ID NO: 607569 - DNA, 19 bp, Mus musculus
  siRNA target sequence for Ldh3 (NM_013580.2,204-222).
gctgatacgaacaaactga

SEQ ID NO: 607570 - DNA, 19 bp, Mus musculus
  siRNA target sequence for Ldh3 (NM_013580.2,226-244).
gagaggcactggatcttct

SEQ ID NO: 607571 - DNA, 19 bp, Mus musculus
  siRNA target sequence for Ldh3 (NM_013580.2,240-258).
cttctgcacggcagtcttt

SEQ ID NO: 607572 - DNA, 19 bp, Mus musculus
  siRNA target sequence for Ldh3 (NM_013580.2,271-289).
caaaaatcgtctttggaaa

SEQ ID NO: 607573 - DNA, 19 bp, Mus musculus
  siRNA target sequence for Ldh3 (NM_013580.2,381-399).
cgtaatgtcgctatcatga

SEQ ID NO: 607574 - DNA, 19 bp, Mus musculus
  siRNA target sequence for Ldh3 (NM_013580.2,382-400).
gtaatgtcgctatcatgaa

SEQ ID NO: 607575 - DNA, 19 bp, Mus musculus
  siRNA target sequence for Ldh3 (NM_013580.2,411-429).
ccgggcattgtccaaaaca

SEQ ID NO: 607576 - DNA, 19 bp, Mus musculus
  siRNA target sequence for Ldh3 (NM_013580.2,428-446).
cagtccggactgtaaaata

SEQ ID NO: 607577 - DNA, 19 bp, Mus musculus
  siRNA target sequence for Ldh3 (NM_013580.2,430-448).
gtccggactgtaaaataat

SEQ ID NO: 607578 - DNA, 19 bp, Mus musculus
  siRNA target sequence for Ldh3 (NM_013580.2,433-451).
cggactgtaaaataattat

SEQ ID NO: 607579 - DNA, 19 bp, Mus musculus
  siRNA target sequence for Ldh3 (NM_013580.2,539-557).
cctagactcagcacgtttt

SEQ ID NO: 607580 - DNA, 19 bp, Mus musculus
  siRNA target sequence for Ldh3 (NM_013580.2,543-561).
gactcagcacgttttcgtt

SEQ ID NO: 607581 - DNA, 19 bp, Mus musculus
  siRNA target sequence for Ldh3 (NM_013580.2,683-701).
gtcactgaacccagcaata

SEQ ID NO: 607582 - DNA, 19 bp, Mus musculus
  siRNA target sequence for Ldh3 (NM_013580.2,687-705).
ctgaacccagcaataggaa

SEQ ID NO: 607583 - DNA, 19 bp, Mus musculus
  siRNA target sequence for Ldh3 (NM_013580.2,757-775).
gcggctatgaggtccttaa

SEQ ID NO: 607584 - DNA, 19 bp, Mus musculus
  siRNA target sequence for Ldh3 (NM_013580.2,759-777).
ggctatgaggtccttaaca

SEQ ID NO: 607585 - DNA, 19 bp, Mus musculus
  siRNA target sequence for Ldh3 (NM_013580.2,760-778).
gctatgaggtccttaacat

SEQ ID NO: 607586 - DNA, 19 bp, Mus musculus
  siRNA target sequence for Ldh3 (NM_013580.2,822-840).
ctggcgcgatccatcttga

SEQ ID NO: 607587 - DNA, 19 bp, Mus musculus
  siRNA target sequence for Ldh3 (NM_013580.2,825-843).
gcgcgatccatcttgaaga

SEQ ID NO: 607588 - DNA, 19 bp, Mus musculus
  siRNA target sequence for Ldh3 (NM_013580.2,826-844).
cgcgatccatcttgaagaa

SEQ ID NO: 607589 - DNA, 19 bp, Mus musculus
  siRNA target sequence for Ldh3 (NM_013580.2,827-845).
gcgatccatcttgaagaat

SEQ ID NO: 607590 - DNA, 19 bp, Mus musculus
  siRNA target sequence for Ldh3 (NM_013580.2,829-847).
gatccatcttgaagaatct

SEQ ID NO: 607591 - DNA, 19 bp, Mus musculus
  siRNA target sequence for Ldh3 (NM_013580.2,932-950).
gggacaaagtggtatcaca

SEQ ID NO: 607592 - DNA, 19 bp, Mus musculus
  siRNA target sequence for Ldh3 (NM_013580.2,1005-1023).
gcggacacactctggaata

SEQ ID NO: 607593 - DNA, 19 bp, Mus musculus
  siRNA target sequence for Ldh3 (NM_013580.2,1006-1024).
cggacacactctggaatat

SEQ ID NO: 607594 - DNA, 19 bp, Mus musculus
  siRNA target sequence for 6430402H10Rik (NM_145567.1,131-149).
cttgcagcggtgtgttcta

SEQ ID NO: 607595 - DNA, 19 bp, Mus musculus
  siRNA target sequence for 6430402H10Rik (NM_145567.1,147-165).
ctaggtcaatggcttctaa

SEQ ID NO: 607596 - DNA, 19 bp, Mus musculus
  siRNA target sequence for 6430402H10Rik (NM_145567.1,162-180).
ctaagactccagttggatt

SEQ ID NO: 607597 - DNA, 19 bp, Mus musculus
  siRNA target sequence for 6430402H10Rik (NM_145567.1,166-184).
gactccagttggattcatt

SEQ ID NO: 607598 - DNA, 19 bp, Mus musculus
  siRNA target sequence for 6430402H10Rik (NM_145567.1,190-208).
gggaaacatgggaaatcca

SEQ ID NO: 607599 - DNA, 19 bp, Mus musculus
  siRNA target sequence for 6430402H10Rik (NM_145567.1,200-218).
ggaaatccaatggcaaaaa

SEQ ID NO: 607600 - DNA, 19 bp, Mus musculus
  siRNA target sequence for 6430402H10Rik (NM_145567.1,254-272).
gacgtgttccctgatgtat

SEQ ID NO: 607601 - DNA, 19 bp, Mus musculus
  siRNA target sequence for 6430402H10Rik (NM_145567.1,392-410).
ggagcaaacgggattctaa

SEQ ID NO: 607602 - DNA, 19 bp, Mus musculus
  siRNA target sequence for 6430402H10Rik (NM_145567.1,393-411).
gagcaaacgggattctaaa

SEQ ID NO: 607603 - DNA, 19 bp, Mus musculus
  siRNA target sequence for 6430402H10Rik (NM_145567.1,395-413).
gcaaacgggattctaaaaa

SEQ ID NO: 607604 - DNA, 19 bp, Mus musculus
  siRNA target sequence for 6430402H10Rik (NM_145567.1,396-414).
caaacgggattctaaaaaa

SEQ ID NO: 607605 - DNA, 19 bp, Mus musculus
  siRNA target sequence for 6430402H10Rik (NM_145567.1,401-419).
gggattctaaaaaaagtga

SEQ ID NO: 607606 - DNA, 19 bp, Mus musculus
  siRNA target sequence for 6430402H10Rik (NM_145567.1,628-646).
ctccaacgtggtatactgt

SEQ ID NO: 607607 - DNA, 19 bp, Mus musculus
  siRNA target sequence for 6430402H10Rik (NM_145567.1,845-863).
ggggtcccctcatccaata

SEQ ID NO: 607608 - DNA, 19 bp, Mus musculus
  siRNA target sequence for Pgd (NM_025801.1,138-156).
catgaatgatcatggattt

SEQ ID NO: 607609 - DNA, 19 bp, Mus musculus
  siRNA target sequence for Pgd (NM_025801.1,252-270).
ggacatggtctccaaacta

SEQ ID NO: 607610 - DNA, 19 bp, Mus musculus
  siRNA target sequence for Pgd (NM_025801.1,307-325).
gggcaagccgtggatgatt

SEQ ID NO: 607611 - DNA, 19 bp, Mus musculus
  siRNA target sequence for Pgd (NM_025801.1,308-326).
ggcaagccgtggatgattt

SEQ ID NO: 607612 - DNA, 19 bp, Mus musculus
  siRNA target sequence for Pgd (NM_025801.1,310-328).
caagccgtggatgatttca

SEQ ID NO: 607613 - DNA, 19 bp, Mus musculus
  siRNA target sequence for Pgd (NM_025801.1,352-370).
gacacgggtgacatcatca

SEQ ID NO: 607614 - DNA, 19 bp, Mus musculus
  siRNA target sequence for Pgd (NM_025801.1,428-446).
ccaagggcatcttgtttgt

SEQ ID NO: 607615 - DNA, 19 bp, Mus musculus
  siRNA target sequence for Pgd (NM_025801.1,546-564).
ccaagccatcgctgcaaaa

SEQ ID NO: 607616 - DNA, 19 bp, Mus musculus
  siRNA target sequence for Pgd (NM_025801.1,631-649).
gtgcacaacgggatagagt

SEQ ID NO: 607617 - DNA, 19 bp, Mus musculus
  siRNA target sequence for Pgd (NM_025801.1,633-651).
gcacaacgggatagagtat

SEQ ID NO: 607618 - DNA, 19 bp, Mus musculus
  siRNA target sequence for Pgd (NM_025801.1,671-689).
gtgaggcttaccatttgat

SEQ ID NO: 607619 - DNA, 19 bp, Mus musculus
  siRNA target sequence for Pgd (NM_025801.1,673-691).
gaggcttaccatttgatga

SEQ ID NO: 607620 - DNA, 19 bp, Mus musculus
  siRNA target sequence for Pgd (NM_025801.1,782-800).
ctgctaacattctcaagta

SEQ ID NO: 607621 - DNA, 19 bp, Mus musculus
  siRNA target sequence for Pgd (NM_025801.1,1045-1063).
cgtaaggccctctatgctt

SEQ ID NO: 607622 - DNA, 19 bp, Mus musculus
  siRNA target sequence for Pgd (NM_025801.1,1054-1072).
ctctatgcttccaagatca

SEQ ID NO: 607623 - DNA, 19 bp, Mus musculus
  siRNA target sequence for Pgd (NM_025801.1,1076-1094).
cctacgcccaaggctttat

SEQ ID NO: 607624 - DNA, 19 bp, Mus musculus
  siRNA target sequence for Pgd (NM_025801.1,1405-1423).
caggctcaacgggattact

SEQ ID NO: 607625 - DNA, 19 bp, Mus musculus
  siRNA target sequence for Pgd (NM_025801.1,1407-1425).
ggctcaacgggattacttt

SEQ ID NO: 607626 - DNA, 19 bp, Mus musculus
  siRNA target sequence for Pgd (NM_025801.1,1427-1445).
gggctcacacctatgaact

SEQ ID NO: 607627 - DNA, 19 bp, Mus musculus
  siRNA target sequence for Pgd (NM_025801.1,1451-1469).
ccaaaccgggagaatttat

SEQ ID NO: 607628 - DNA, 19 bp, Mus musculus
  siRNA target sequence for Pgd (NM_025801.1,1501-1519).
gtgtcatcctcttcataca

SEQ ID NO: 607629 - DNA, 19 bp, Mus musculus
  siRNA target sequence for Pgd (NM_025801.1,1503-1521).
gtcatcctcttcatacaat

SEQ ID NO: 607630 - DNA, 19 bp, Mus musculus
  siRNA target sequence for Hadh2 (NM_016763.1,391-409).
gtattgcagtggccattaa

SEQ ID NO: 607631 - DNA, 19 bp, Mus musculus
  siRNA target sequence for Hadh2 (NM_016763.1,456-474).
cagcgggttatcaatgtga

SEQ ID NO: 607632 - DNA, 19 bp, Mus musculus
  siRNA target sequence for Hadh2 (NM_016763.1,458-476).
gcgggttatcaatgtgaat

SEQ ID NO: 607633 - DNA, 19 bp, Mus musculus
  siRNA target sequence for Hadh2 (NM_016763.1,461-479).
ggttatcaatgtgaatctt

SEQ ID NO: 607634 - DNA, 19 bp, Mus musculus
  siRNA target sequence for Hadh2 (NM_016763.1,546-564).
ggccaacgtggagttatca

SEQ ID NO: 607635 - DNA, 19 bp, Mus musculus
  siRNA target sequence for Hadh2 (NM_016763.1,547-565).
gccaacgtggagttatcat

SEQ ID NO: 607636 - DNA, 19 bp, Mus musculus
  siRNA target sequence for Hadh2 (NM_016763.1,682-700).
gcatccgtgtggtaacaat

SEQ ID NO: 607637 - DNA, 19 bp, Mus musculus
  siRNA target sequence for Hadh2 (NM_016763.1,697-715).
caattgcgccaggtttgtt

SEQ ID NO: 607638 - DNA, 19 bp, Mus musculus
  siRNA target sequence for Hadh2 (NM_016763.1,744-762).
gagaaagtgcgaaacttct

SEQ ID NO: 607639 - DNA, 19 bp, Mus musculus
  siRNA target sequence for Hadh2 (NM_016763.1,836-854).
cgagaacccattcttgaat

SEQ ID NO: 607640 - DNA, 19 bp, Mus musculus
  siRNA target sequence for Hadhsc (NM_008212.1,160-178).
cagcaactggccatacagt

SEQ ID NO: 607641 - DNA, 19 bp, Mus musculus
  siRNA target sequence for Hadhsc (NM_008212.1,166-184).
ctggccatacagtagtatt

SEQ ID NO: 607642 - DNA, 19 bp, Mus musculus
  siRNA target sequence for Hadhsc (NM_008212.1,612-630).
gtggacttttgtaaaacct

SEQ ID NO: 607643 - DNA, 19 bp, Mus musculus
  siRNA target sequence for Hadhsc (NM_008212.1,614-632).
ggacttttgtaaaacctta

SEQ ID NO: 607644 - DNA, 19 bp, Mus musculus
  siRNA target sequence for Hadhsc (NM_008212.1,793-811).
cgtttgagcttcttgacta

SEQ ID NO: 607645 - DNA, 19 bp, Mus musculus
  siRNA target sequence for Hadhsc (NM_008212.1,822-840).
gatactacaaagttcatct

SEQ ID NO: 607646 - DNA, 19 bp, Mus musculus
  siRNA target sequence for Hadhsc (NM_008212.1,865-883).
cagagaaccccttatttca

SEQ ID NO: 607647 - DNA, 19 bp, Mus musculus
  siRNA target sequence for Hadhsc (NM_008212.1,887-905).
cagtccttccatgaataat

SEQ ID NO: 607648 - DNA, 19 bp, Mus musculus
  siRNA target sequence for Hadhsc (NM_008212.1,889-907).
gtccttccatgaataatct

SEQ ID NO: 607649 - DNA, 19 bp, Mus musculus
  siRNA target sequence for Hadhsc (NM_008212.1,932-950).
gaagaccggagaaggattt

SEQ ID NO: 607650 - DNA, 19 bp, Mus musculus
  siRNA target sequence for Hadhsc (NM_008212.1,942-960).
gaaggattttacaaataca

SEQ ID NO: 607651 - DNA, 19 bp, Mus musculus
  siRNA target sequence for Hadhsc (NM_008212.1,945-963).
ggattttacaaatacaagt

SEQ ID NO: 607652 - DNA, 19 bp, Mus musculus
  siRNA target sequence for G6pd2 (NM_019468.1,308-326).
cgcgtaactcctatgtagt

SEQ ID NO: 607653 - DNA, 19 bp, Mus musculus
  siRNA target sequence for G6pd2 (NM_019468.1,309-327).
gcgtaactcctatgtagtt

SEQ ID NO: 607654 - DNA, 19 bp, Mus musculus
  siRNA target sequence for G6pd2 (NM_019468.1,488-506).
gctttaaccgcatcatagt

SEQ ID NO: 607655 - DNA, 19 bp, Mus musculus
  siRNA target sequence for G6pd2 (NM_019468.1,1109-1127).
gactgcaattccgagatat

SEQ ID NO: 607656 - DNA, 19 bp, Mus musculus
  siRNA target sequence for G6pd2 (NM_019468.1,1113-1131).
gcaattccgagatatacca

SEQ ID NO: 607657 - DNA, 19 bp, Mus musculus
  siRNA target sequence for G6pdx (NM_008062.1,350-368).
gagttctttgcccgtaatt

SEQ ID NO: 607658 - DNA, 19 bp, Mus musculus
  siRNA target sequence for Akr1b3 (NM_009658.2,633-651).
gagtgccacccgtacctaa

SEQ ID NO: 607659 - DNA, 19 bp, Mus musculus
  siRNA target sequence for Akr1b3 (NM_009658.2,637-655).
gccacccgtacctaactca

SEQ ID NO: 607660 - DNA, 19 bp, Mus musculus
  siRNA target sequence for Akr1b7 (NM_009731.1,371-389).
ggctgggaatgcgttatta

SEQ ID NO: 607661 - DNA, 19 bp, Mus musculus
  siRNA target sequence for Akr1b7 (NM_009731.1,381-399).
gcgttattacccaaagaca

SEQ ID NO: 607662 - DNA, 19 bp, Mus musculus
  siRNA target sequence for Akr1b7 (NM_009731.1,382-400).
cgttattacccaaagacaa

SEQ ID NO: 607663 - DNA, 19 bp, Mus musculus
  siRNA target sequence for Akr1b7 (NM_009731.1,383-401).
gttattacccaaagacaat

SEQ ID NO: 607664 - DNA, 19 bp, Mus musculus
  siRNA target sequence for Akr1b7 (NM_009731.1,626-644).
caagggcatcgctgttaca

SEQ ID NO: 607665 - DNA, 19 bp, Mus musculus
  siRNA target sequence for Akr1b7 (NM_009731.1,688-706).
cagaagaccccgtagtaat

SEQ ID NO: 607666 - DNA, 19 bp, Mus musculus
  siRNA target sequence for Akr1b7 (NM_009731.1,951-969).
cctttccacgaggaatact

SEQ ID NO: 607667 - DNA, 19 bp, Mus musculus
  siRNA target sequence for Akr1b8 (NM_008012.1,201-219).
gcgcgtatgcctattgcaa

SEQ ID NO: 607668 - DNA, 19 bp, Mus musculus
  siRNA target sequence for Akr1b8 (NM_008012.1,210-228).
cctattgcaacgagaatga

SEQ ID NO: 607669 - DNA, 19 bp, Mus musculus
  siRNA target sequence for Akr1b8 (NM_008012.1,461-479).
ctcaccagtaagacaacat

SEQ ID NO: 607670 - DNA, 19 bp, Mus musculus
  siRNA target sequence for Akr1b8 (NM_008012.1,465-483).
ccagtaagacaacattctt

SEQ ID NO: 607671 - DNA, 19 bp, Mus musculus
  siRNA target sequence for Akr1b8 (NM_008012.1,734-752).
ccagaggacccttcactat

SEQ ID NO: 607672 - DNA, 19 bp, Mus musculus
  siRNA target sequence for Akr1b8 (NM_008012.1,735-753).
cagaggacccttcactatt

SEQ ID NO: 607673 - DNA, 19 bp, Mus musculus
  siRNA target sequence for Akr1b8 (NM_008012.1,782-800).
gccaagcacgagaaaacct

SEQ ID NO: 607674 - DNA, 19 bp, Mus musculus
  siRNA target sequence for 1700124B08Rik (NM_029696.2,479-497).
gctaagcggggaagtgttt

SEQ ID NO: 607675 - DNA, 19 bp, Mus musculus
  siRNA target sequence for 1700124B08Rik (NM_029696.2,743-761).
cggctacctgatagagaaa

SEQ ID NO: 607676 - DNA, 19 bp, Mus musculus
  siRNA target sequence for 1700124B08Rik (NM_029696.2,745-763).
gctacctgatagagaaaaa

SEQ ID NO: 607677 - DNA, 19 bp, Mus musculus
  siRNA target sequence for 1700124B08Rik (NM_029696.2,820-838).
caactttgctcatgcaata

SEQ ID NO: 607678 - DNA, 19 bp, Mus musculus
  siRNA target sequence for 1700124B08Rik (NM_029696.2,901-919).
cagtactggcccgaaagat

SEQ ID NO: 607679 - DNA, 19 bp, Mus musculus
  siRNA target sequence for 1700124B08Rik (NM_029696.2,903-921).
gtactggcccgaaagatga

SEQ ID NO: 607680 - DNA, 19 bp, Mus musculus
  siRNA target sequence for 1700124B08Rik (NM_029696.2,909-927).
gcccgaaagatgaaaacca

SEQ ID NO: 607681 - DNA, 19 bp, Mus musculus
  siRNA target sequence for 1700124B08Rik (NM_029696.2,959-977).
gggcaatatcactggaaat

SEQ ID NO: 607682 - DNA, 19 bp, Mus musculus
  siRNA target sequence for 1700124B08Rik (NM_029696.2,960-978).
ggcaatatcactggaaata

SEQ ID NO: 607683 - DNA, 19 bp, Mus musculus
  siRNA target sequence for 1700124B08Rik (NM_029696.2,973-991).
gaaataactacgttgatct

SEQ ID NO: 607684 - DNA, 19 bp, Mus musculus
  siRNA target sequence for 1700124B08Rik (NM_029696.2,990-1008).
ctgaggaaagcaaaagttt

SEQ ID NO: 607685 - DNA, 19 bp, Mus musculus
  siRNA target sequence for 1700124B08Rik (NM_029696.2,1044-1062).
cactatcactctgtgttaa

SEQ ID NO: 607686 - DNA, 19 bp, Mus musculus
  siRNA target sequence for 1700124B08Rik (NM_029696.2,1052-1070).
ctctgtgttaagcttgatt

SEQ ID NO: 607687 - DNA, 19 bp, Mus musculus
  siRNA target sequence for 1700124B08Rik (NM_029696.2,1078-1096).
gagagtggatcacaaaaga

SEQ ID NO: 607688 - DNA, 19 bp, Mus musculus
  siRNA target sequence for 1700124B08Rik (NM_029696.2,1080-1098).
gagtggatcacaaaagaat

SEQ ID NO: 607689 - DNA, 19 bp, Mus musculus
  siRNA target sequence for 1700124B08Rik (NM_029696.2,1084-1102).
ggatcacaaaagaatttgt

SEQ ID NO: 607690 - DNA, 19 bp, Mus musculus
  siRNA target sequence for 1700124B08Rik (NM_029696.2,1095-1113).
gaatttgtgcagacactta

SEQ ID NO: 607691 - DNA, 19 bp, Mus musculus
  siRNA target sequence for 1700124B08Rik (NM_029696.2,1178-1196).
cctgaagtactggtatcat

SEQ ID NO: 607692 - DNA, 19 bp, Mus musculus
  siRNA target sequence for 1700124B08Rik (NM_029696.2,1218-1236).
gtttccttgggggtaatga

SEQ ID NO: 607693 - DNA, 19 bp, Mus musculus
  siRNA target sequence for 1700124B08Rik (NM_029696.2,1237-1255).
gtgaaggccagtttgacat

SEQ ID NO: 607694 - DNA, 19 bp, Mus musculus
  siRNA target sequence for 1700124B08Rik (NM_029696.2,1257-1275).
cctgaagggatcgtctttt

SEQ ID NO: 607695 - DNA, 19 bp, Mus musculus
  siRNA target sequence for 1700124B08Rik (NM_029696.2,1260-1278).
gaagggatcgtcttttcta

SEQ ID NO: 607696 - DNA, 19 bp, Mus musculus
  siRNA target sequence for 1700124B08Rik (NM_029696.2,1276-1294).
ctatgccagtgaaatttga

SEQ ID NO: 607697 - DNA, 19 bp, Mus musculus
  siRNA target sequence for 1700124B08Rik (NM_029696.2,1299-1317).
ggaacgtgggtggttctta

SEQ ID NO: 607698 - DNA, 19 bp, Mus musculus
  siRNA target sequence for 1700124B08Rik (NM_029696.2,1376-1394).
gattcaggagaaacttgtt

SEQ ID NO: 607699 - DNA, 19 bp, Mus musculus
  siRNA target sequence for 1700124B08Rik (NM_029696.2,1392-1410).
gttgcatgtggagacttat

SEQ ID NO: 607700 - DNA, 19 bp, Mus musculus
  siRNA target sequence for 1700124B08Rik (NM_029696.2,1399-1417).
gtggagacttattaacttt

SEQ ID NO: 607701 - DNA, 19 bp, Mus musculus
  siRNA target sequence for 1700124B08Rik (NM_029696.2,1443-1461).
gataacgaaccttctaata

SEQ ID NO: 607702 - DNA, 19 bp, Mus musculus
  siRNA target sequence for 1700124B08Rik (NM_029696.2,1456-1474).
ctaatacaggcatgaatga

SEQ ID NO: 607703 - DNA, 19 bp, Mus musculus
  siRNA target sequence for 1700124B08Rik (NM_029696.2,1493-1511).
gtccgatgactctgatgaa

SEQ ID NO: 607704 - DNA, 19 bp, Mus musculus
  siRNA target sequence for 1700124B08Rik (NM_029696.2,1496-1514).
cgatgactctgatgaaaaa

SEQ ID NO: 607705 - DNA, 19 bp, Mus musculus
  siRNA target sequence for Rdh5 (NM_134006.3,448-466).
gacacgtgttggagaaact

SEQ ID NO: 607706 - DNA, 19 bp, Mus musculus
  siRNA target sequence for Rdh5 (NM_134006.3,470-488).
ctttttggtctggtgaata

SEQ ID NO: 607707 - DNA, 19 bp, Mus musculus
  siRNA target sequence for Rdh5 (NM_134006.3,492-510).
ctggcgtagctggtatcat

SEQ ID NO: 607708 - DNA, 19 bp, Mus musculus
  siRNA target sequence for Rdh5 (NM_134006.3,736-754).
ggctccgttcggagtacaa

SEQ ID NO: 607709 - DNA, 19 bp, Mus musculus
  siRNA target sequence for Rdh5 (NM_134006.3,738-756).
ctccgttcggagtacaagt

SEQ ID NO: 607710 - DNA, 19 bp, Mus musculus
  siRNA target sequence for Rdh5 (NM_134006.3,872-890).
gaagccttcctcgatactt

SEQ ID NO: 607711 - DNA, 19 bp, Mus musculus
  siRNA target sequence for Rdh5 (NM_134006.3,876-894).
ccttcctcgatacttatct

SEQ ID NO: 607712 - DNA, 19 bp, Mus musculus
  siRNA target sequence for Rdh5 (NM_134006.3,922-940).
gatctgtgacccagaacta

SEQ ID NO: 607713 - DNA, 19 bp, Mus musculus
  siRNA target sequence for Rdh5 (NM_134006.3,927-945).
gtgacccagaactaacgaa

SEQ ID NO: 607714 - DNA, 19 bp, Mus musculus
  siRNA target sequence for Impdh1 (NM_011829.2,213-231).
gatcctcccaggattcata

SEQ ID NO: 607715 - DNA, 19 bp, Mus musculus
  siRNA target sequence for Impdh1 (NM_011829.2,221-239).
caggattcatagacttcat

SEQ ID NO: 607716 - DNA, 19 bp, Mus musculus
  siRNA target sequence for Impdh1 (NM_011829.2,305-323).
cgtctcccatggatacagt

SEQ ID NO: 607717 - DNA, 19 bp, Mus musculus
  siRNA target sequence for Impdh1 (NM_011829.2,351-369).
ggctctcatgggaggaatt

SEQ ID NO: 607718 - DNA, 19 bp, Mus musculus
  siRNA target sequence for Impdh1 (NM_011829.2,355-373).
ctcatgggaggaattggtt

SEQ ID NO: 607719 - DNA, 19 bp, Mus musculus
  siRNA target sequence for Impdh1 (NM_011829.2,360-378).
gggaggaattggtttcatt

SEQ ID NO: 607720 - DNA, 19 bp, Mus musculus
  siRNA target sequence for Impdh1 (NM_011829.2,415-433).
gtacggaaggtcaagaagt

SEQ ID NO: 607721 - DNA, 19 bp, Mus musculus
  siRNA target sequence for Impdh1 (NM_011829.2,465-483).
cctgagcccttcacatact

SEQ ID NO: 607722 - DNA, 19 bp, Mus musculus
  siRNA target sequence for Impdh1 (NM_011829.2,576-594).
cgtcacctcccgagacatt

SEQ ID NO: 607723 - DNA, 19 bp, Mus musculus
  siRNA target sequence for Impdh1 (NM_011829.2,734-752).
ccatagtcaacgatcaaga

SEQ ID NO: 607724 - DNA, 19 bp, Mus musculus
  siRNA target sequence for Impdh1 (NM_011829.2,735-753).
catagtcaacgatcaagat

SEQ ID NO: 607725 - DNA, 19 bp, Mus musculus
  siRNA target sequence for Impdh1 (NM_011829.2,815-833).
ccaaggactcccacaaaca

SEQ ID NO: 607726 - DNA, 19 bp, Mus musculus
  siRNA target sequence for Impdh1 (NM_011829.2,858-876).
cacccgtgaggatgacaaa

SEQ ID NO: 607727 - DNA, 19 bp, Mus musculus
  siRNA target sequence for Impdh1 (NM_011829.2,860-878).
cccgtgaggatgacaaata

SEQ ID NO: 607728 - DNA, 19 bp, Mus musculus
  siRNA target sequence for Impdh1 (NM_011829.2,903-921).
cggtgctgacgtcatagta

SEQ ID NO: 607729 - DNA, 19 bp, Mus musculus
  siRNA target sequence for Impdh1 (NM_011829.2,908-926).
ctgacgtcatagtactaga

SEQ ID NO: 607730 - DNA, 19 bp, Mus musculus
  siRNA target sequence for Impdh1 (NM_011829.2,910-928).
gacgtcatagtactagatt

SEQ ID NO: 607731 - DNA, 19 bp, Mus musculus
  siRNA target sequence for Impdh1 (NM_011829.2,912-930).
cgtcatagtactagattca

SEQ ID NO: 607732 - DNA, 19 bp, Mus musculus
  siRNA target sequence for Impdh1 (NM_011829.2,913-931).
gtcatagtactagattcat

SEQ ID NO: 607733 - DNA, 19 bp, Mus musculus
  siRNA target sequence for Impdh1 (NM_011829.2,1158-1176).
cgagtacgcccgacgtttt

SEQ ID NO: 607734 - DNA, 19 bp, Mus musculus
  siRNA target sequence for Impdh1 (NM_011829.2,1244-1262).
gagcctctacagtaatgat

SEQ ID NO: 607735 - DNA, 19 bp, Mus musculus
  siRNA target sequence for Impdh1 (NM_011829.2,1286-1304).
cggaggcgcctggtgaata

SEQ ID NO: 607736 - DNA, 19 bp, Mus musculus
  siRNA target sequence for Impdh1 (NM_011829.2,1288-1306).
gaggcgcctggtgaatact

SEQ ID NO: 607737 - DNA, 19 bp, Mus musculus
  siRNA target sequence for Impdh1 (NM_011829.2,1291-1309).
gcgcctggtgaatacttct

SEQ ID NO: 607738 - DNA, 19 bp, Mus musculus
  siRNA target sequence for Impdh1 (NM_011829.2,1292-1310).
cgcctggtgaatacttctt

SEQ ID NO: 607739 - DNA, 19 bp, Mus musculus
  siRNA target sequence for Impdh1 (NM_011829.2,1457-1475).
gctccattcagaagtttgt

SEQ ID NO: 607740 - DNA, 19 bp, Mus musculus
  siRNA target sequence for Impdh1 (NM_011829.2,1537-1555).
gtcctgcgatccatgatgt

SEQ ID NO: 607741 - DNA, 19 bp, Mus musculus
  siRNA target sequence for Impdh1 (NM_011829.2,1540-1558).
ctgcgatccatgatgtact

SEQ ID NO: 607742 - DNA, 19 bp, Mus musculus
  siRNA target sequence for Impdh1 (NM_011829.2,1586-1604).
ccatgtcggcccagattga

SEQ ID NO: 607743 - DNA, 19 bp, Mus musculus
  siRNA target sequence for Impdh2 (NM_011830.2,406-424).
gatcgtgtacgcgatgttt

SEQ ID NO: 607744 - DNA, 19 bp, Mus musculus
  siRNA target sequence for Impdh2 (NM_011830.2,490-508).
cgattggtgggcatcatct

SEQ ID NO: 607745 - DNA, 19 bp, Mus musculus
  siRNA target sequence for Impdh2 (NM_011830.2,657-675).
gttgcccattgtgaatgaa

SEQ ID NO: 607746 - DNA, 19 bp, Mus musculus
  siRNA target sequence for Impdh2 (NM_011830.2,700-718).
gcccggacagacctaaaga

SEQ ID NO: 607747 - DNA, 19 bp, Mus musculus
  siRNA target sequence for Impdh2 (NM_011830.2,790-808).
catgaggatgacaagtata

SEQ ID NO: 607748 - DNA, 19 bp, Mus musculus
  siRNA target sequence for Impdh2 (NM_011830.2,927-945).
ggtcattggaggcaatgta

SEQ ID NO: 607749 - DNA, 19 bp, Mus musculus
  siRNA target sequence for Impdh2 (NM_011830.2,1100-1118).
gctttggtgttcctgttat

SEQ ID NO: 607750 - DNA, 19 bp, Mus musculus
  siRNA target sequence for Impdh2 (NM_011830.2,1134-1152).
ccaaaatgtgggtcatatt
